United States Patent Application Publication US 2006/0003322 A1 - sequence listing, part 27

SEQ ID NO: 1149359 - RNA, 20 nt, Human
ccaaagugcugggauuacag

SEQ ID NO: 1149360 - RNA, 21 nt, Human
ccaaagugcugggauuacagg

SEQ ID NO: 1149361 - RNA, 21 nt, Human
ccaaagugcugggauuacagg

SEQ ID NO: 1149362 - RNA, 24 nt, Human
ccaaagugcugggauuacaggugu

SEQ ID NO: 1149363 - RNA, 20 nt, Human
ccaagccacacuaaaaaggc

SEQ ID NO: 1149364 - RNA, 19 nt, Human
ccacaccugaggucuccuc

SEQ ID NO: 1149365 - RNA, 20 nt, Human
ccaccacgcccagcuaauuu

SEQ ID NO: 1149366 - RNA, 21 nt, Human
ccacugaccccggcagcugcc

SEQ ID NO: 1149367 - RNA, 18 nt, Human
ccacugcaagccuuuccc

SEQ ID NO: 1149368 - RNA, 21 nt, Human
ccacugcaagccuuucccaaa

SEQ ID NO: 1149369 - RNA, 20 nt, Human
ccacugcacccagccuacac

SEQ ID NO: 1149370 - RNA, 22 nt, Human
ccacugcacccagccuacacug

SEQ ID NO: 1149371 - RNA, 21 nt, Human
ccacugggugauggcgggggg

SEQ ID NO: 1149372 - RNA, 24 nt, Human
ccagcagagcccuggaggcaggag

SEQ ID NO: 1149373 - RNA, 23 nt, Human
ccagccgggcaucugacacagcc

SEQ ID NO: 1149374 - RNA, 19 nt, Human
ccagccugggacccccccc

SEQ ID NO: 1149375 - RNA, 21 nt, Human
ccagccuguguccuuugccac

SEQ ID NO: 1149376 - RNA, 26 nt, Human
ccagcgguucuccugcucagccuccc

SEQ ID NO: 1149377 - RNA, 18 nt, Human
ccagggucuccaaucucc

SEQ ID NO: 1149378 - RNA, 22 nt, Human
ccauagggccggcgcggggucc

SEQ ID NO: 1149379 - RNA, 19 nt, Human
ccaugggacuucaacacac

SEQ ID NO: 1149380 - RNA, 27 nt, Human
cccaaaaauuuccccucaaagcccccu

SEQ ID NO: 1149381 - RNA, 23 nt, Human
cccaaguagcugggacuacaggc

SEQ ID NO: 1149382 - RNA, 24 nt, Human
cccaaguagcugggacuacaggcg

SEQ ID NO: 1149383 - RNA, 22 nt, Human
cccacccaggcugggggacaag

SEQ ID NO: 1149384 - RNA, 21 nt, Human
cccacccccagcugccugcag

SEQ ID NO: 1149385 - RNA, 20 nt, Human
cccaccgugcccagcagggu

SEQ ID NO: 1149386 - RNA, 24 nt, Human
cccacugcaagccuuucccaaaaa

SEQ ID NO: 1149387 - RNA, 22 nt, Human
cccaggcuggagugcaguggcg

SEQ ID NO: 1149388 - RNA, 23 nt, Human
cccagggccgggcuccauagggc

SEQ ID NO: 1149389 - RNA, 18 nt, Human
cccagggucuccaaucuc

SEQ ID NO: 1149390 - RNA, 19 nt, Human
cccauuuguuuccauuccc

SEQ ID NO: 1149391 - RNA, 19 nt, Human
ccccaaaaguuuggcgcuu

SEQ ID NO: 1149392 - RNA, 19 nt, Human
ccccaccccgcccaccagg

SEQ ID NO: 1149393 - RNA, 20 nt, Human
ccccaccccgcccaccagga

SEQ ID NO: 1149394 - RNA, 21 nt, Human
ccccaccccgcccaccaggaa

SEQ ID NO: 1149395 - RNA, 21 nt, Human
cccccacccaggcugggggac

SEQ ID NO: 1149396 - RNA, 23 nt, Human
cccccacccaggcugggggacaa

SEQ ID NO: 1149397 - RNA, 22 nt, Human
cccccagcugccugcaggcccu

SEQ ID NO: 1149398 - RNA, 20 nt, Human
ccccccaccccgcccaccag

SEQ ID NO: 1149399 - RNA, 18 nt, Human
ccccccccuccccacccc

SEQ ID NO: 1149400 - RNA, 21 nt, Human
ccccccccuccccaccccgca

SEQ ID NO: 1149401 - RNA, 18 nt, Human
cccccccuccccaccccg

SEQ ID NO: 1149402 - RNA, 24 nt, Human
ccccucacacccagccaucucccu

SEQ ID NO: 1149403 - RNA, 21 nt, Human
ccccucacccucccacaccug

SEQ ID NO: 1149404 - RNA, 18 nt, Human
ccccucuguggggccaca

SEQ ID NO: 1149405 - RNA, 20 nt, Human
ccccugggugccucucaacc

SEQ ID NO: 1149406 - RNA, 18 nt, Human
cccgcccaccaggaaggc

SEQ ID NO: 1149407 - RNA, 23 nt, Human
cccgccucggccucccaaagggc

SEQ ID NO: 1149408 - RNA, 23 nt, Human
cccggguuccagcgguucuccug

SEQ ID NO: 1149409 - RNA, 18 nt, Human
cccugagcacgagggccu

SEQ ID NO: 1149410 - RNA, 23 nt, Human
cccuggguggcagaggcaggucc

SEQ ID NO: 1149411 - RNA, 21 nt, Human
ccgcaccccccaccccgccca

SEQ ID NO: 1149412 - RNA, 28 nt, Human
ccgcaccccccaccccgcccaccagggg

SEQ ID NO: 1149413 - RNA, 18 nt, Human
ccgcagggacucuccucc

SEQ ID NO: 1149414 - RNA, 24 nt, Human
ccucacacccagccaucucccuuc

SEQ ID NO: 1149415 - RNA, 24 nt, Human
ccucccggguuccagcgguucucc

SEQ ID NO: 1149416 - RNA, 25 nt, Human
ccucuguuccccugggagauugagc

SEQ ID NO: 1149417 - RNA, 23 nt, Human
ccugaacagucaccacagccacu

SEQ ID NO: 1149418 - RNA, 23 nt, Human
ccugagaaccuggggaugucaga

SEQ ID NO: 1149419 - RNA, 19 nt, Human
ccugccauccagccuggga

SEQ ID NO: 1149420 - RNA, 23 nt, Human
ccuggcaggcaccagaacacuga

SEQ ID NO: 1149421 - RNA, 18 nt, Human
ccuggccagggggaaggg

SEQ ID NO: 1149422 - RNA, 19 nt, Human
ccugggaccccccccuccc

SEQ ID NO: 1149423 - RNA, 19 nt, Human
ccuguaugccgcacccccc

SEQ ID NO: 1149424 - RNA, 22 nt, Human
ccuucugggcccacgcuucugg

SEQ ID NO: 1149425 - RNA, 22 nt, Human
cgaugaggaugggguacuccag

SEQ ID NO: 1149426 - RNA, 20 nt, Human
cgcaccccccaccccgccca

SEQ ID NO: 1149427 - RNA, 20 nt, Human
cgcaugcugcccaccucccc

SEQ ID NO: 1149428 - RNA, 19 nt, Human
cgccucccggguucacgcc

SEQ ID NO: 1149429 - RNA, 22 nt, Human
cgccucggccucccaaagggcu

SEQ ID NO: 1149430 - RNA, 24 nt, Human
cgccucggccucccaaagggcugg

SEQ ID NO: 1149431 - RNA, 27 nt, Human
cggauacccauaguaacacugguaccg

SEQ ID NO: 1149432 - RNA, 22 nt, Human
cggcggauacccauaguaacac

SEQ ID NO: 1149433 - RNA, 19 nt, Human
cgguucuccugcucagccu

SEQ ID NO: 1149434 - RNA, 27 nt, Human
cucaacccugccauccagccugggacu

SEQ ID NO: 1149435 - RNA, 18 nt, Human
cuccaugcagccauugga

SEQ ID NO: 1149436 - RNA, 23 nt, Human
cucccacugcaagccuuucccaa

SEQ ID NO: 1149437 - RNA, 19 nt, Human
cucccccucacacccagcc

SEQ ID NO: 1149438 - RNA, 21 nt, Human
cucccggguucacgccauucu

SEQ ID NO: 1149439 - RNA, 21 nt, Human
cucccggguuccagcgguucu

SEQ ID NO: 1149440 - RNA, 25 nt, Human
cucccggguuccagcgguucuccuu

SEQ ID NO: 1149441 - RNA, 19 nt, Human
cucccuggccuguuucuga

SEQ ID NO: 1149442 - RNA, 26 nt, Human
cuccugaccucagguuaucugcccgc

SEQ ID NO: 1149443 - RNA, 24 nt, Human
cuccugaccucgugauccgccggc

SEQ ID NO: 1149444 - RNA, 20 nt, Human
cucugucacccaggcuggag

SEQ ID NO: 1149445 - RNA, 23 nt, Human
cucugucacccaggcuggagugc

SEQ ID NO: 1149446 - RNA, 20 nt, Human
cucuuucucccccgcacccc

SEQ ID NO: 1149447 - RNA, 23 nt, Human
cugagcagcccccucuguucccc

SEQ ID NO: 1149448 - RNA, 20 nt, Human
cugagugggaccccucaccc

SEQ ID NO: 1149449 - RNA, 23 nt, Human
cugagugggaccccucacccucc

SEQ ID NO: 1149450 - RNA, 18 nt, Human
cugcaaccuccaccuccc

SEQ ID NO: 1149451 - RNA, 23 nt, Human
cugcaaccuccaccucccggguu

SEQ ID NO: 1149452 - RNA, 24 nt, Human
cugcaaccuccaccucccggguuc

SEQ ID NO: 1149453 - RNA, 23 nt, Human
cugcaagccuuucccaaaaauuu

SEQ ID NO: 1149454 - RNA, 23 nt, Human
cugcagccuggggagguggggug

SEQ ID NO: 1149455 - RNA, 23 nt, Human
cugccauguugggcucccacuga

SEQ ID NO: 1149456 - RNA, 19 nt, Human
cugcccaccuccccugggu

SEQ ID NO: 1149457 - RNA, 20 nt, Human
cugccgcagggacucuccuc

SEQ ID NO: 1149458 - RNA, 21 nt, Human
cugccgcagggacucuccucc

SEQ ID NO: 1149459 - RNA, 21 nt, Human
cugcucccagccugguggugg

SEQ ID NO: 1149460 - RNA, 22 nt, Human
cugcugcacacaucugcccucc

SEQ ID NO: 1149461 - RNA, 20 nt, Human
cugggaccccccccucccca

SEQ ID NO: 1149462 - RNA, 21 nt, Human
cugggccucccaaagugcugg

SEQ ID NO: 1149463 - RNA, 32 nt, Human
cugguuaauuuuuguguuuuuaguagagauga

SEQ ID NO: 1149464 - RNA, 23 nt, Human
cuguaugccgcaccccccacccc

SEQ ID NO: 1149465 - RNA, 18 nt, Human
cugucacccaggcuggag

SEQ ID NO: 1149466 - RNA, 19 nt, Human
cugucacccaggcuggagu

SEQ ID NO: 1149467 - RNA, 20 nt, Human
cugugaggaugcugcgaagg

SEQ ID NO: 1149468 - RNA, 25 nt, Human
cuuaagacccucucccaaggaaucu

SEQ ID NO: 1149469 - RNA, 19 nt, Human
cuuacugggcaccgggcca

SEQ ID NO: 1149470 - RNA, 19 nt, Human
cuuccccagcucagggacc

SEQ ID NO: 1149471 - RNA, 21 nt, Human
cuugcucugucacccaggcug

SEQ ID NO: 1149472 - RNA, 19 nt, Human
gaacagcaccuggaugguc

SEQ ID NO: 1149473 - RNA, 18 nt, Human
gaagggcacauguccaca

SEQ ID NO: 1149474 - RNA, 18 nt, Human
gaccacucaggucaggaa

SEQ ID NO: 1149475 - RNA, 19 nt, Human
gaccccccccuccccaccc

SEQ ID NO: 1149476 - RNA, 20 nt, Human
gaccccccccuccccacccc

SEQ ID NO: 1149477 - RNA, 24 nt, Human
gaccucagguuaucugcccgccuc

SEQ ID NO: 1149478 - RNA, 18 nt, Human
gaccucgugauccgccgg

SEQ ID NO: 1149479 - RNA, 18 nt, Human
gagaugggguuucaccau

SEQ ID NO: 1149480 - RNA, 24 nt, Human
gagaugggguuucaccauguuggc

SEQ ID NO: 1149481 - RNA, 21 nt, Human
gagcaaggggugggcuccaaa

SEQ ID NO: 1149482 - RNA, 24 nt, Human
gagccacugcacccagccuacacu

SEQ ID NO: 1149483 - RNA, 20 nt, Human
gagcccaggggggcuggcag

SEQ ID NO: 1149484 - RNA, 19 nt, Human
gagcccuggaggcaggaga

SEQ ID NO: 1149485 - RNA, 19 nt, Human
gagccgcaaccaucccugg

SEQ ID NO: 1149486 - RNA, 23 nt, Human
gagccugcuucacaaugcauacc

SEQ ID NO: 1149487 - RNA, 21 nt, Human
gaggcagagcccagcagagcc

SEQ ID NO: 1149488 - RNA, 18 nt, Human
gauuacaggcaugagcca

SEQ ID NO: 1149489 - RNA, 21 nt, Human
gauuacaggcaugagccacca

SEQ ID NO: 1149490 - RNA, 24 nt, Human
gauuacaggcaugagccaccaugc

SEQ ID NO: 1149491 - RNA, 18 nt, Human
gauuacaggugugagcca

SEQ ID NO: 1149492 - RNA, 19 nt, Human
gauuacaggugugagccac

SEQ ID NO: 1149493 - RNA, 23 nt, Human
gauuacaggugugagccacugca

SEQ ID NO: 1149494 - RNA, 27 nt, Human
gauucacaaacaggcugugccucccuu

SEQ ID NO: 1149495 - RNA, 20 nt, Human
gcaugcugcccaccuccccu

SEQ ID NO: 1149496 - RNA, 24 nt, Human
gccacugagugcugaagaacaaaa

SEQ ID NO: 1149497 - RNA, 19 nt, Human
gcccaggcuggagugcagu

SEQ ID NO: 1149498 - RNA, 20 nt, Human
gcccaggcuggagugcagug

SEQ ID NO: 1149499 - RNA, 20 nt, Human
gccgaggccaaaucccacuc

SEQ ID NO: 1149500 - RNA, 25 nt, Human
gccucccggguucacgccauucucc

SEQ ID NO: 1149501 - RNA, 19 nt, Human
gccuggccagggggaaggg

SEQ ID NO: 1149502 - RNA, 25 nt, Human
gcucugucgcccaggcuggagugca

SEQ ID NO: 1149503 - RNA, 20 nt, Human
gcugaagaacaaaagcuaug

SEQ ID NO: 1149504 - RNA, 19 nt, Human
gcuggagugcaguggcacg

SEQ ID NO: 1149505 - RNA, 19 nt, Human
gcuggagugcaguggcgcg

SEQ ID NO: 1149506 - RNA, 23 nt, Human
gcuggucuugaacuccugaccuc

SEQ ID NO: 1149507 - RNA, 23 nt, Human
gcuucuggccugccugccauguu

SEQ ID NO: 1149508 - RNA, 24 nt, Human
gcuuuuuggcucccucccucucaa

SEQ ID NO: 1149509 - RNA, 20 nt, Human
ggaaccaugggacuucaacc

SEQ ID NO: 1149510 - RNA, 19 nt, Human
ggaggugggguggggacag

SEQ ID NO: 1149511 - RNA, 23 nt, Human
ggagucuugcucugucgcccagg

SEQ ID NO: 1149512 - RNA, 18 nt, Human
ggaugguccaguugccuu

SEQ ID NO: 1149513 - RNA, 24 nt, Human
ggauuacaggcaugagccaccaug

SEQ ID NO: 1149514 - RNA, 19 nt, Human
ggcagaggcaggucccugg

SEQ ID NO: 1149515 - RNA, 21 nt, Human
ggcccauagacaccaagaaca

SEQ ID NO: 1149516 - RNA, 24 nt, Human
ggcuggucuugaacuccugaccuc

SEQ ID NO: 1149517 - RNA, 20 nt, Human
gggaaggggcuguuaccuug

SEQ ID NO: 1149518 - RNA, 21 nt, Human
gggaccccccccuccccaccc

SEQ ID NO: 1149519 - RNA, 21 nt, Human
gggagggccgcaguccaugga

SEQ ID NO: 1149520 - RNA, 23 nt, Human
gggcaaaggggaaggccuggccu

SEQ ID NO: 1149521 - RNA, 19 nt, Human
gggcccccaccgugcccag

SEQ ID NO: 1149522 - RNA, 20 nt, Human
gggguggggacagugucuuu

SEQ ID NO: 1149523 - RNA, 22 nt, Human
gggguuucaccauguuggcaag

SEQ ID NO: 1149524 - RNA, 18 nt, Human
ggucauccaugcuggccu

SEQ ID NO: 1149525 - RNA, 21 nt, Human
gguccaguugccuuccagaag

SEQ ID NO: 1149526 - RNA, 19 nt, Human
ggucuugaacuccugaccu

SEQ ID NO: 1149527 - RNA, 20 nt, Human
ggucuugaucuccugaccuc

SEQ ID NO: 1149528 - RNA, 18 nt, Human
gguggcaccaaccugaaa

SEQ ID NO: 1149529 - RNA, 20 nt, Human
ggugggcuccaaaggcaucc

SEQ ID NO: 1149530 - RNA, 18 nt, Human
gguuccagcgguucuccu

SEQ ID NO: 1149531 - RNA, 23 nt, Human
guagagaugggguuucaccaugu

SEQ ID NO: 1149532 - RNA, 27 nt, Human
gucaccccuucccaacugcagagacuc

SEQ ID NO: 1149533 - RNA, 24 nt, Human
gucacugcaaccuccaccucccgg

SEQ ID NO: 1149534 - RNA, 24 nt, Human
gucuugcucugucacccaggcugg

SEQ ID NO: 1149535 - RNA, 24 nt, Human
gugcagcugagccaccucccagcc

SEQ ID NO: 1149536 - RNA, 24 nt, Human
guuaucugcccgccucggccuccc

SEQ ID NO: 1149537 - RNA, 19 nt, Human
uaaccaaaaaauacacauc

SEQ ID NO: 1149538 - RNA, 25 nt, Human
uaauuuuuguguuuuuaguagagaa

SEQ ID NO: 1149539 - RNA, 24 nt, Human
uaauuuuuuguaucuuuaguagag

SEQ ID NO: 1149540 - RNA, 25 nt, Human
uaauuuuuuguaucuuuaguagaga

SEQ ID NO: 1149541 - RNA, 21 nt, Human
uacaagaugaagagccuggau

SEQ ID NO: 1149542 - RNA, 22 nt, Human
uacaggcaugagccaccaugcc

SEQ ID NO: 1149543 - RNA, 24 nt, Human
uacaggcgccagccaccacgccca

SEQ ID NO: 1149544 - RNA, 19 nt, Human
uacaggugugagccacugc

SEQ ID NO: 1149545 - RNA, 24 nt, Human
uacaggugugagccacugcaccca

SEQ ID NO: 1149546 - RNA, 26 nt, Human
uaccgcagaaacaccaggaaucugga

SEQ ID NO: 1149547 - RNA, 20 nt, Human
uacugggcaccgggccacag

SEQ ID NO: 1149548 - RNA, 22 nt, Human
uagagacaggguuucaccgugu

SEQ ID NO: 1149549 - RNA, 22 nt, Human
uagagaugggguuucaccaugu

SEQ ID NO: 1149550 - RNA, 26 nt, Human
uagcaaggggccgaggccaaauccca

SEQ ID NO: 1149551 - RNA, 21 nt, Human
uaguagagacaggguuucacc

SEQ ID NO: 1149552 - RNA, 24 nt, Human
uaguagagacaggguuucaccgug

SEQ ID NO: 1149553 - RNA, 24 nt, Human
uaguagagaugggguuucaccaug

SEQ ID NO: 1149554 - RNA, 24 nt, Human
uaguuuaaccaaaaaauacacauc

SEQ ID NO: 1149555 - RNA, 25 nt, Human
uaugggggucuucaccaucgaagua

SEQ ID NO: 1149556 - RNA, 23 nt, Human
ucaacaccuacuagaggguuaaa

SEQ ID NO: 1149557 - RNA, 24 nt, Human
ucacccaggcuggagugcaguggc

SEQ ID NO: 1149558 - RNA, 24 nt, Human
ucaccguguuagccaggauggucu

SEQ ID NO: 1149559 - RNA, 23 nt, Human
ucacugcaaccuccaccucccgg

SEQ ID NO: 1149560 - RNA, 24 nt, Human
ucacugcaaccuccaccucccggg

SEQ ID NO: 1149561 - RNA, 25 nt, Human
ucacugcaaccuccaccucccgggu

SEQ ID NO: 1149562 - RNA, 27 nt, Human
ucacugcaaccuccaccucccggguuc

SEQ ID NO: 1149563 - RNA, 18 nt, Human
ucacugcaagcuccgccu

SEQ ID NO: 1149564 - RNA, 19 nt, Human
ucacugcaagcuccgccuc

SEQ ID NO: 1149565 - RNA, 24 nt, Human
ucacugcaagcuccgccucccggg

SEQ ID NO: 1149566 - RNA, 20 nt, Human
ucauggguccagcuucagcu

SEQ ID NO: 1149567 - RNA, 23 nt, Human
uccacaggccaggccugagaacc

SEQ ID NO: 1149568 - RNA, 27 nt, Human
ucccaaaaauuuccccucaaagcccuu

SEQ ID NO: 1149569 - RNA, 19 nt, Human
ucccaaagggcugggauua

SEQ ID NO: 1149570 - RNA, 23 nt, Human
ucccaaagggcugggauuacagg

SEQ ID NO: 1149571 - RNA, 24 nt, Human
ucccaaagggcugggauuacaggc

SEQ ID NO: 1149572 - RNA, 23 nt, Human
ucccaaagugcugggauuacagg

SEQ ID NO: 1149573 - RNA, 24 nt, Human
ucccaaguagcugggacuacaggc

SEQ ID NO: 1149574 - RNA, 22 nt, Human
ucccacaggccugguccccgag

SEQ ID NO: 1149575 - RNA, 23 nt, Human
uccccucaaagcccccuauugga

SEQ ID NO: 1149576 - RNA, 21 nt, Human
ucccggguucacgccauucuc

SEQ ID NO: 1149577 - RNA, 24 nt, Human
ucccggguucacgccauucuccug

SEQ ID NO: 1149578 - RNA, 19 nt, Human
ucccggguuccagcgguuc

SEQ ID NO: 1149579 - RNA, 21 nt, Human
ucccggguuccagcgguucuc

SEQ ID NO: 1149580 - RNA, 24 nt, Human
ucccggguuccagcgguucuccug

SEQ ID NO: 1149581 - RNA, 22 nt, Human
ucccuguggucuccuggggcua

SEQ ID NO: 1149582 - RNA, 24 nt, Human
uccugaccucgugauccgccggcc

SEQ ID NO: 1149583 - RNA, 24 nt, Human
uccugcucagccucccgaguagcu

SEQ ID NO: 1149584 - RNA, 23 nt, Human
uccuggcugcagagagcagggag

SEQ ID NO: 1149585 - RNA, 18 nt, Human
uccuguaugccgcacccc

SEQ ID NO: 1149586 - RNA, 22 nt, Human
uccuucauggguccagcuucag

SEQ ID NO: 1149587 - RNA, 24 nt, Human
ucgcccaggcuggagugcaguggc

SEQ ID NO: 1149588 - RNA, 22 nt, Human
ucgcuccagccucucugcuccc

SEQ ID NO: 1149589 - RNA, 18 nt, Human
ucuccuggggcuaccugu

SEQ ID NO: 1149590 - RNA, 21 nt, Human
ucugcucccagccugguggug

SEQ ID NO: 1149591 - RNA, 24 nt, Human
ucugucacccaggcuggagugcag

SEQ ID NO: 1149592 - RNA, 24 nt, Human
ucugucgcccaggcuggagugcag

SEQ ID NO: 1149593 - RNA, 23 nt, Human
ucuugaacuccugaccucagguu

SEQ ID NO: 1149594 - RNA, 22 nt, Human
ucuugcucugucacccaggcug

SEQ ID NO: 1149595 - RNA, 23 nt, Human
ucuugcucugucacccaggcugg

SEQ ID NO: 1149596 - RNA, 24 nt, Human
ucuugcucugucacccaggcugga

SEQ ID NO: 1149597 - RNA, 23 nt, Human
ucuugcucugucgcccaggcugg

SEQ ID NO: 1149598 - RNA, 24 nt, Human
ucuugcucugucgcccaggcugga

SEQ ID NO: 1149599 - RNA, 24 nt, Human
ucuuuaguagagacaggguuucac

SEQ ID NO: 1149600 - RNA, 18 nt, Human
ucuuuuuuuugaggcgga

SEQ ID NO: 1149601 - RNA, 22 nt, Human
ucuuuuuuuuugagauggaguc

SEQ ID NO: 1149602 - RNA, 18 nt, Human
ugaacagucaccacagcc

SEQ ID NO: 1149603 - RNA, 19 nt, Human
ugaagaacaaaagcuaugg

SEQ ID NO: 1149604 - RNA, 26 nt, Human
ugaagaaccacccucaauuucgcuaa

SEQ ID NO: 1149605 - RNA, 19 nt, Human
ugaccccugggacgcagcc

SEQ ID NO: 1149606 - RNA, 18 nt, Human
ugaccucagguuaucugc

SEQ ID NO: 1149607 - RNA, 20 nt, Human
ugaccucagguuaucugccc

SEQ ID NO: 1149608 - RNA, 24 nt, Human
ugaccucagguuaucugcccgccu

SEQ ID NO: 1149609 - RNA, 22 nt, Human
ugagacuacaugugugccacua

SEQ ID NO: 1149610 - RNA, 18 nt, Human
ugagagggcaguggggga

SEQ ID NO: 1149611 - RNA, 22 nt, Human
ugagauggagucuugcucuguc

SEQ ID NO: 1149612 - RNA, 27 nt, Human
ugagcccaggggggcugggaccaaagu

SEQ ID NO: 1149613 - RNA, 22 nt, Human
ugaggcggagucuugcucuguc

SEQ ID NO: 1149614 - RNA, 18 nt, Human
ugaggggggaaggggaga

SEQ ID NO: 1149615 - RNA, 21 nt, Human
ugaggucaguuugccgaaucc

SEQ ID NO: 1149616 - RNA, 22 nt, Human
ugcaguggcacgaucucggcuc

SEQ ID NO: 1149617 - RNA, 19 nt, Human
ugcccuuguccccucuccc

SEQ ID NO: 1149618 - RNA, 24 nt, Human
ugcccuuguccccucucccaccug

SEQ ID NO: 1149619 - RNA, 23 nt, Human
ugccucagaaucaaggauuuaac

SEQ ID NO: 1149620 - RNA, 21 nt, Human
ugccucagacucccaaguagc

SEQ ID NO: 1149621 - RNA, 24 nt, Human
ugccucagacucccaaguagcugg

SEQ ID NO: 1149622 - RNA, 19 nt, Human
ugcgaaggccacagggucc

SEQ ID NO: 1149623 - RNA, 23 nt, Human
ugcgaaggccacagggucccaca

SEQ ID NO: 1149624 - RNA, 23 nt, Human
ugcucagccucccgaguagcuga

SEQ ID NO: 1149625 - RNA, 23 nt, Human
ugcuccaugcagccauuggaguu

SEQ ID NO: 1149626 - RNA, 24 nt, Human
ugcucugucgcccaggcuggagug

SEQ ID NO: 1149627 - RNA, 24 nt, Human
ugcugggauuacaggugugagcca

SEQ ID NO: 1149628 - RNA, 22 nt, Human
uggaaggcugcaggcagggcag

SEQ ID NO: 1149629 - RNA, 23 nt, Human
uggaggaccaggcuucagacccc

SEQ ID NO: 1149630 - RNA, 18 nt, Human
uggaggcaggagaagcag

SEQ ID NO: 1149631 - RNA, 23 nt, Human
uggagucuugcucugucgcccag

SEQ ID NO: 1149632 - RNA, 24 nt, Human
uggagucuugcucugucgcccagg

SEQ ID NO: 1149633 - RNA, 23 nt, Human
uggagugcaguggcacgaucucg

SEQ ID NO: 1149634 - RNA, 24 nt, Human
uggagugcaguggcacgaucucgg

SEQ ID NO: 1149635 - RNA, 23 nt, Human
uggagugcaguggcgcgaucuca

SEQ ID NO: 1149636 - RNA, 24 nt, Human
uggagugcaguggcgcgaucucag

SEQ ID NO: 1149637 - RNA, 24 nt, Human
uggcaaggcuggucuugaacuccu

SEQ ID NO: 1149638 - RNA, 21 nt, Human
uggcagaggcaggucccuggg

SEQ ID NO: 1149639 - RNA, 18 nt, Human
uggcagagggggaggcug

SEQ ID NO: 1149640 - RNA, 19 nt, Human
uggcuucuucccauccugu

SEQ ID NO: 1149641 - RNA, 21 nt, Human
uggcuuucaugcccuuguccc

SEQ ID NO: 1149642 - RNA, 22 nt, Human
ugggacuacaggcgccagccac

SEQ ID NO: 1149643 - RNA, 24 nt, Human
ugggacuacaggcgccagccacca

SEQ ID NO: 1149644 - RNA, 18 nt, Human
ugggauuacaggcaugag

SEQ ID NO: 1149645 - RNA, 22 nt, Human
ugggauuacaggcaugagccac

SEQ ID NO: 1149646 - RNA, 23 nt, Human
ugggauuacaggcaugagccacc

SEQ ID NO: 1149647 - RNA, 24 nt, Human
ugggauuacaggcaugagccacca

SEQ ID NO: 1149648 - RNA, 25 nt, Human
ugggauuacaggcaugagccaccau

SEQ ID NO: 1149649 - RNA, 19 nt, Human
ugggauuacaggugugagc

SEQ ID NO: 1149650 - RNA, 21 nt, Human
ugggauuacaggugugagcca

SEQ ID NO: 1149651 - RNA, 22 nt, Human
ugggauuacaggugugagccac

SEQ ID NO: 1149652 - RNA, 22 nt, Human
ugggauuacaggugugagccac

SEQ ID NO: 1149653 - RNA, 24 nt, Human
ugggauuacaggugugagccacug

SEQ ID NO: 1149654 - RNA, 23 nt, Human
uggggacagugucuuuccccccg

SEQ ID NO: 1149655 - RNA, 21 nt, Human
uggggacagugucuuuccuuu

SEQ ID NO: 1149656 - RNA, 18 nt, Human
uggggagguggggugggg

SEQ ID NO: 1149657 - RNA, 21 nt, Human
uggggaugucagagcccguuc

SEQ ID NO: 1149658 - RNA, 24 nt, Human
ugggguuucaccauguuggcaagg

SEQ ID NO: 1149659 - RNA, 24 nt, Human
uggguggcagaggcaggucccugg

SEQ ID NO: 1149660 - RNA, 25 nt, Human
ugguccccgagugcgggcccccucc

SEQ ID NO: 1149661 - RNA, 23 nt, Human
ugucggggccuggcaggcaccag

SEQ ID NO: 1149662 - RNA, 20 nt, Human
ugucucaucacccagcuuuu

SEQ ID NO: 1149663 - RNA, 18 nt, Human
ugugcagcugagccaccu

SEQ ID NO: 1149664 - RNA, 18 nt, Human
uguguggaggaccaggcu

SEQ ID NO: 1149665 - RNA, 21 nt, Human
uguguuuuuaguagagauggg

SEQ ID NO: 1149666 - RNA, 18 nt, Human
uguuuccauucccaucug

SEQ ID NO: 1149667 - RNA, 23 nt, Human
uuaaacaaaacguacccccaccc

SEQ ID NO: 1149668 - RNA, 26 nt, Human
uuaacgaccuuuccgucaccccuucc

SEQ ID NO: 1149669 - RNA, 19 nt, Human
uuacaaaggauuuuuacag

SEQ ID NO: 1149670 - RNA, 23 nt, Human
uuagcugggggcggagucagagg

SEQ ID NO: 1149671 - RNA, 22 nt, Human
uuaguagagacaggguuucacc

SEQ ID NO: 1149672 - RNA, 24 nt, Human
uuaguagagacaggguuucaccgu

SEQ ID NO: 1149673 - RNA, 18 nt, Human
uuaguagagaugggguuu

SEQ ID NO: 1149674 - RNA, 22 nt, Human
uuaguagagaugggguuucacc

SEQ ID NO: 1149675 - RNA, 24 nt, Human
uuaguagagaugggguuucaccau

SEQ ID NO: 1149676 - RNA, 20 nt, Human
uucacaaauaacauccccgu

SEQ ID NO: 1149677 - RNA, 19 nt, Human
uucaccaucgaaguaagug

SEQ ID NO: 1149678 - RNA, 22 nt, Human
uucaccauguuggcaaggcugg

SEQ ID NO: 1149679 - RNA, 20 nt, Human
uuccccagcucagggaccua

SEQ ID NO: 1149680 - RNA, 20 nt, Human
uucucccucaacaccuacua

SEQ ID NO: 1149681 - RNA, 20 nt, Human
uugcgagggggaaggcucca

SEQ ID NO: 1149682 - RNA, 24 nt, Human
uugcucugucgcccaggcuggagu

SEQ ID NO: 1149683 - RNA, 23 nt, Human
uuguguuuuuaguagagaugggg

SEQ ID NO: 1149684 - RNA, 21 nt, Human
uuucaccauguuggcaaggcu

SEQ ID NO: 1149685 - RNA, 19 nt, Human
uuucaccguguuagccagg

SEQ ID NO: 1149686 - RNA, 20 nt, Human
uuugccgaauccuugcagug

SEQ ID NO: 1149687 - RNA, 24 nt, Human
uuuuuaguagagaugggguuucac

SEQ ID NO: 1149688 - RNA, 24 nt, Human
uuuuugagauggagucuugcucug

SEQ ID NO: 1149689 - RNA, 21 nt, Human
uuuuuguaucuuuaguagaga

SEQ ID NO: 1149690 - RNA, 20 nt, Human
uuuuuguguuuuuaguagag

SEQ ID NO: 1149691 - RNA, 24 nt, Human
uuuuuuguaucuuuaguagagaca

SEQ ID NO: 1149692 - RNA, 24 nt, Human
aaaguacuccuugccccagccuug

SEQ ID NO: 1149693 - RNA, 20 nt, Human
acuccuugccccagccuugc

SEQ ID NO: 1149694 - RNA, 23 nt, Human
cacgaccagguuccuagucuacc

SEQ ID NO: 1149695 - RNA, 21 nt, Human
cgaccagguuccuagucuacc

SEQ ID NO: 1149696 - RNA, 23 nt, Human
gagggaacaaacagaaaagauuc

SEQ ID NO: 1149697 - RNA, 23 nt, Human
gauugccaggaugccggagagau

SEQ ID NO: 1149698 - RNA, 28 nt, Human
gugcaacuccaaauaaaaagggaacgcc

SEQ ID NO: 1149699 - RNA, 21 nt, Human
uaacaaacauguauuuuucca

SEQ ID NO: 1149700 - RNA, 22 nt, Human
ugcgcaggcugugauugccagg

SEQ ID NO: 1149701 - RNA, 21 nt, Human
ugcuucaaugcagaaccuuau

SEQ ID NO: 1149702 - RNA, 22 nt, Human
aaaaacacaaaauuauagacac

SEQ ID NO: 1149703 - RNA, 23 nt, Human
aaaacacuucucucccccagggc

SEQ ID NO: 1149704 - RNA, 18 nt, Human
aaaagaccaggccaguca

SEQ ID NO: 1149705 - RNA, 21 nt, Human
aaagacagggguguagcaaag

SEQ ID NO: 1149706 - RNA, 21 nt, Human
aaagugcugcgauuacaggca

SEQ ID NO: 1149707 - RNA, 23 nt, Human
aaagugcugcgauuacaggcagg

SEQ ID NO: 1149708 - RNA, 24 nt, Human
aaagugcugcgauuacaggcagga

SEQ ID NO: 1149709 - RNA, 26 nt, Human
aacuccugggcucaagugaucccccu

SEQ ID NO: 1149710 - RNA, 23 nt, Human
aagaccccucaccuggcauggga

SEQ ID NO: 1149711 - RNA, 19 nt, Human
aagcggcaugacccaaggc

SEQ ID NO: 1149712 - RNA, 19 nt, Human
aaucguaguucacuguaac

SEQ ID NO: 1149713 - RNA, 23 nt, Human
aaugagggagacgugcagagaga

SEQ ID NO: 1149714 - RNA, 18 nt, Human
aauggagggacacccaga

SEQ ID NO: 1149715 - RNA, 22 nt, Human
acaaaaacacaaaauuauagac

SEQ ID NO: 1149716 - RNA, 18 nt, Human
acacugcuacagccagcc

SEQ ID NO: 1149717 - RNA, 20 nt, Human
acagacuuccagcugcuuuu

SEQ ID NO: 1149718 - RNA, 18 nt, Human
acaggacaguggugcuuc

SEQ ID NO: 1149719 - RNA, 23 nt, Human
acagucacccuucccugacucag

SEQ ID NO: 1149720 - RNA, 24 nt, Human
accccaggaagccugcaucccacc

SEQ ID NO: 1149721 - RNA, 19 nt, Human
accucagccucuggaguag

SEQ ID NO: 1149722 - RNA, 23 nt, Human
accugcucugcuuucuaauaguc

SEQ ID NO: 1149723 - RNA, 21 nt, Human
agaaaagcaagugccccaggg

SEQ ID NO: 1149724 - RNA, 22 nt, Human
agaaaauaacaggcuugcacaa

SEQ ID NO: 1149725 - RNA, 23 nt, Human
agaaaauaacaggcuugcacaaa

SEQ ID NO: 1149726 - RNA, 23 nt, Human
agaaccuuucaagguggacucac

SEQ ID NO: 1149727 - RNA, 22 nt, Human
agagacagagucucccucuguu

SEQ ID NO: 1149728 - RNA, 20 nt, Human
agagagacuuuaaauggauc

SEQ ID NO: 1149729 - RNA, 20 nt, Human
aggagccaccguucccagca

SEQ ID NO: 1149730 - RNA, 24 nt, Human
aggcaccccugaccugcuagucuu

SEQ ID NO: 1149731 - RNA, 25 nt, Human
aggcaccccugaccugcuagucuug

SEQ ID NO: 1149732 - RNA, 26 nt, Human
aggcaggagccaccguucccagcaac

SEQ ID NO: 1149733 - RNA, 23 nt, Human
aggcaugcaccacaacacccagc

SEQ ID NO: 1149734 - RNA, 19 nt, Human
aggccucucaacugcccaa

SEQ ID NO: 1149735 - RNA, 19 nt, Human
agggaaaccggggaucuca

SEQ ID NO: 1149736 - RNA, 20 nt, Human
agggaggugggaagaccccu

SEQ ID NO: 1149737 - RNA, 22 nt, Human
auguuugcgccccaggggcuga

SEQ ID NO: 1149738 - RNA, 26 nt, Human
caaaaacacaaaauuauagacacuac

SEQ ID NO: 1149739 - RNA, 22 nt, Human
caaagugcugcgauuacaggca

SEQ ID NO: 1149740 - RNA, 23 nt, Human
caagcaccugcuccaagcccagc

SEQ ID NO: 1149741 - RNA, 23 nt, Human
caagccaguggaggaaaguggca

SEQ ID NO: 1149742 - RNA, 23 nt, Human
caagguagagccauuccaauguc

SEQ ID NO: 1149743 - RNA, 19 nt, Human
cacaccgaaaaagaccagg

SEQ ID NO: 1149744 - RNA, 20 nt, Human
cacaccgaaaaagaccaggc

SEQ ID NO: 1149745 - RNA, 25 nt, Human
caccccaggcuacuggaucagaggc

SEQ ID NO: 1149746 - RNA, 22 nt, Human
cacccugccagggauagcccag

SEQ ID NO: 1149747 - RNA, 19 nt, Human
cacccuucccugacucagg

SEQ ID NO: 1149748 - RNA, 19 nt, Human
caccugcuccaagcccagc

SEQ ID NO: 1149749 - RNA, 20 nt, Human
caccugcuccaagcccagca

SEQ ID NO: 1149750 - RNA, 23 nt, Human
caccuggcaugggaggggcuggc

SEQ ID NO: 1149751 - RNA, 19 nt, Human
cacgcaaacuccaugcagg

SEQ ID NO: 1149752 - RNA, 18 nt, Human
cacucaggcaguacaacu

SEQ ID NO: 1149753 - RNA, 21 nt, Human
cacuuccagggccacaucuca

SEQ ID NO: 1149754 - RNA, 20 nt, Human
cagcacugccgaagaaauug

SEQ ID NO: 1149755 - RNA, 21 nt, Human
cagcagcaggacauccugugc

SEQ ID NO: 1149756 - RNA, 21 nt, Human
cagcaggacauccugugcccc

SEQ ID NO: 1149757 - RNA, 20 nt, Human
cagcauagcgagaaaagcaa

SEQ ID NO: 1149758 - RNA, 25 nt, Human
caggaagcagcaaaugcccuggguc

SEQ ID NO: 1149759 - RNA, 22 nt, Human
caggacauccugugccccaccc

SEQ ID NO: 1149760 - RNA, 19 nt, Human
caggagccaccguucccag

SEQ ID NO: 1149761 - RNA, 18 nt, Human
caggagccucuggugucc

SEQ ID NO: 1149762 - RNA, 22 nt, Human
caggcaggagccaccguuccca

SEQ ID NO: 1149763 - RNA, 21 nt, Human
caggccucagcaaagggcagg

SEQ ID NO: 1149764 - RNA, 24 nt, Human
cagggccacaucucagguccagga

SEQ ID NO: 1149765 - RNA, 18 nt, Human
cagugaacaagucccuca

SEQ ID NO: 1149766 - RNA, 24 nt, Human
caugaaggggaauccacgcuccuc

SEQ ID NO: 1149767 - RNA, 18 nt, Human
cauucuguguggucacug

SEQ ID NO: 1149768 - RNA, 23 nt, Human
ccaaagugcugcgauuacaggca

SEQ ID NO: 1149769 - RNA, 25 nt, Human
ccaacuccugggcucaagugauccc

SEQ ID NO: 1149770 - RNA, 18 nt, Human
ccaaugucauuucuugcu

SEQ ID NO: 1149771 - RNA, 19 nt, Human
ccacgcuccucuguguccu

SEQ ID NO: 1149772 - RNA, 18 nt, Human
ccagccuugguccccaga

SEQ ID NO: 1149773 - RNA, 20 nt, Human
ccaggcuggccuccaacucc

SEQ ID NO: 1149774 - RNA, 21 nt, Human
ccaggggcugaccacugagau

SEQ ID NO: 1149775 - RNA, 21 nt, Human
cccaaggccucucaacugccc

SEQ ID NO: 1149776 - RNA, 21 nt, Human
cccacagcugcucugcucugc

SEQ ID NO: 1149777 - RNA, 19 nt, Human
cccacguucuccauugcua

SEQ ID NO: 1149778 - RNA, 22 nt, Human
ccccaccccaggcuacuggauc

SEQ ID NO: 1149779 - RNA, 24 nt, Human
ccccaucucuugagaccacaucug

SEQ ID NO: 1149780 - RNA, 21 nt, Human
cccccaucucuugagaccaca

SEQ ID NO: 1149781 - RNA, 27 nt, Human
ccccccuaccucagccucccaaagugc

SEQ ID NO: 1149782 - RNA, 18 nt, Human
cccccuaccucagccucc

SEQ ID NO: 1149783 - RNA, 20 nt, Human
ccuaaguggaacuucagcuu

SEQ ID NO: 1149784 - RNA, 18 nt, Human
ccucccaccucagccucc

SEQ ID NO: 1149785 - RNA, 21 nt, Human
ccugcagugaacaagucccuc

SEQ ID NO: 1149786 - RNA, 22 nt, Human
ccugggcucaagugaucccccc

SEQ ID NO: 1149787 - RNA, 22 nt, Human
ccugggucagggagugagggac

SEQ ID NO: 1149788 - RNA, 21 nt, Human
cuacaaucacauacuuaagaa

SEQ ID NO: 1149789 - RNA, 21 nt, Human
cuaggcucuaaggauuuccaa

SEQ ID NO: 1149790 - RNA, 18 nt, Human
cucaaagcuuggcuggug

SEQ ID NO: 1149791 - RNA, 24 nt, Human
cucaagccauccucccaccucagc

SEQ ID NO: 1149792 - RNA, 25 nt, Human
cucaagugauccccccuaccucagc

SEQ ID NO: 1149793 - RNA, 23 nt, Human
cucuauuauaucccuagcuucca

SEQ ID NO: 1149794 - RNA, 23 nt, Human
cucugcacuggacaguucccucc

SEQ ID NO: 1149795 - RNA, 19 nt, Human
cucugcucuagggccuccc

SEQ ID NO: 1149796 - RNA, 23 nt, Human
cucuguguccugucacgggcugg

SEQ ID NO: 1149797 - RNA, 23 nt, Human
cugcaucaucccacuuuauccag

SEQ ID NO: 1149798 - RNA, 20 nt, Human
cugcaucccaccuucacacc

SEQ ID NO: 1149799 - RNA, 20 nt, Human
cuggauucaaucugggcaau

SEQ ID NO: 1149800 - RNA, 22 nt, Human
cuugcuguguugcccaggcugg

SEQ ID NO: 1149801 - RNA, 24 nt, Human
gaacuucuggacucaagccauccu

SEQ ID NO: 1149802 - RNA, 23 nt, Human
gaaugcacuugacagacuuccag

SEQ ID NO: 1149803 - RNA, 18 nt, Human
gagaccugcucugcuuuc

SEQ ID NO: 1149804 - RNA, 19 nt, Human
gagaugggacccagcaacc

SEQ ID NO: 1149805 - RNA, 24 nt, Human
gaguaguuaagaauacaggcaugc

SEQ ID NO: 1149806 - RNA, 18 nt, Human
gauuacaggcaggagcca

SEQ ID NO: 1149807 - RNA, 25 nt, Human
gcacaccccuuccaccugggaacug

SEQ ID NO: 1149808 - RNA, 21 nt, Human
gcagagagaagcaggagugag

SEQ ID NO: 1149809 - RNA, 20 nt, Human
gcaugggaggggcuggcuga

SEQ ID NO: 1149810 - RNA, 18 nt, Human
gcauuaucuguugucacu

SEQ ID NO: 1149811 - RNA, 26 nt, Human
gcccugggcccccaucucuugagacc

SEQ ID NO: 1149812 - RNA, 18 nt, Human
gcuaaguacaaaaacaca

SEQ ID NO: 1149813 - RNA, 21 nt, Human
gcuagucuugccacaccuaaa

SEQ ID NO: 1149814 - RNA, 20 nt, Human
gcucaagugauccccccuac

SEQ ID NO: 1149815 - RNA, 20 nt, Human
gcugcccagaccccagcagc

SEQ ID NO: 1149816 - RNA, 19 nt, Human
gcuggccuccaacuccugg

SEQ ID NO: 1149817 - RNA, 20 nt, Human
ggcaggcuuuggcagcgggg

SEQ ID NO: 1149818 - RNA, 22 nt, Human
ggcagggcagcauagcgagaaa

SEQ ID NO: 1149819 - RNA, 20 nt, Human
ggcaugccagcuuucaucag

SEQ ID NO: 1149820 - RNA, 26 nt, Human
ggccauggaggcacacugcuacagcc

SEQ ID NO: 1149821 - RNA, 20 nt, Human
gggaauguuugcgccccagg

SEQ ID NO: 1149822 - RNA, 19 nt, Human
gggaccaccugaucgagcu

SEQ ID NO: 1149823 - RNA, 23 nt, Human
gggcucaagugauccccccuacc

SEQ ID NO: 1149824 - RNA, 22 nt, Human
gggucuugcuguguugcccagg

SEQ ID NO: 1149825 - RNA, 20 nt, Human
guguggucacugcaucaucc

SEQ ID NO: 1149826 - RNA, 18 nt, Human
guugacaucuaugcccca

SEQ ID NO: 1149827 - RNA, 23 nt, Human
guuucauugaaucuugagaccug

SEQ ID NO: 1149828 - RNA, 21 nt, Human
uaagaauacaggcaugcacca

SEQ ID NO: 1149829 - RNA, 24 nt, Human
uaagaauacaggcaugcaccacaa

SEQ ID NO: 1149830 - RNA, 21 nt, Human
uaagguguaaacucaagugcu

SEQ ID NO: 1149831 - RNA, 19 nt, Human
uaaguacaaaaacacaaaa

SEQ ID NO: 1149832 - RNA, 20 nt, Human
uaauaaagacagggguguag

SEQ ID NO: 1149833 - RNA, 21 nt, Human
uaaugauaccuguguuacagu

SEQ ID NO: 1149834 - RNA, 24 nt, Human
uacaaaaacacaaaauuauagaca

SEQ ID NO: 1149835 - RNA, 25 nt, Human
uaccucagccucccaaagugcugcg

SEQ ID NO: 1149836 - RNA, 18 nt, Human
uagcccaggccucagcaa

SEQ ID NO: 1149837 - RNA, 19 nt, Human
uagcccugggcccccaucu

SEQ ID NO: 1149838 - RNA, 24 nt, Human
uaggcgucucuauucagaacacuc

SEQ ID NO: 1149839 - RNA, 24 nt, Human
uauagaaauggggucuugcugugu

SEQ ID NO: 1149840 - RNA, 19 nt, Human
uaugcuuucaagcaccugc

SEQ ID NO: 1149841 - RNA, 25 nt, Human
ucaagccauccucccaccucagccu

SEQ ID NO: 1149842 - RNA, 22 nt, Human
ucacaaaagaccgaggucugca

SEQ ID NO: 1149843 - RNA, 19 nt, Human
ucaccaagcucacaaaaga

SEQ ID NO: 1149844 - RNA, 23 nt, Human
ucacuguaaccuugaacuucugg

SEQ ID NO: 1149845 - RNA, 22 nt, Human
ucagaacacucuguuagccuga

SEQ ID NO: 1149846 - RNA, 18 nt, Human
ucagacucugguucacac

SEQ ID NO: 1149847 - RNA, 25 nt, Human
ucagcaguucucauagcgcugccca

SEQ ID NO: 1149848 - RNA, 18 nt, Human
ucagccucccaaagugcu

SEQ ID NO: 1149849 - RNA, 23 nt, Human
ucaguacuuuuuaagcuccuacg

SEQ ID NO: 1149850 - RNA, 22 nt, Human
ucauucaagccuaucugcuucu

SEQ ID NO: 1149851 - RNA, 18 nt, Human
uccacaagguagagccau

SEQ ID NO: 1149852 - RNA, 19 nt, Human
uccauuuccagaaugcacu

SEQ ID NO: 1149853 - RNA, 24 nt, Human
ucccaaagugcugcgauuacaggc

SEQ ID NO: 1149854 - RNA, 24 nt, Human
ucccccagggcaggcaaucagggc

SEQ ID NO: 1149855 - RNA, 26 nt, Human
uccccggauggcggcauuccuagccc

SEQ ID NO: 1149856 - RNA, 21 nt, Human
uccuggcacaccccuuccacc

SEQ ID NO: 1149857 - RNA, 18 nt, Human
uccugggcucaagugauc

SEQ ID NO: 1149858 - RNA, 21 nt, Human
uccugggcucaagugaucccc

SEQ ID NO: 1149859 - RNA, 20 nt, Human
ucgccaggguggagggcugu

SEQ ID NO: 1149860 - RNA, 21 nt, Human
ucgccaggguggagggcugua

SEQ ID NO: 1149861 - RNA, 23 nt, Human
ucucaacugcccaagcagacccu

SEQ ID NO: 1149862 - RNA, 19 nt, Human
ucucagguccaggagccuc

SEQ ID NO: 1149863 - RNA, 19 nt, Human
ucucauagcgcugcccaga

SEQ ID NO: 1149864 - RNA, 20 nt, Human
ucugauguggccagaagugu

SEQ ID NO: 1149865 - RNA, 18 nt, Human
ucugcacccugccaggga

SEQ ID NO: 1149866 - RNA, 23 nt, Human
ucuguuacccagcuggaaugcag

SEQ ID NO: 1149867 - RNA, 20 nt, Human
ucuucuccuccuccuguaga

SEQ ID NO: 1149868 - RNA, 18 nt, Human
ucuugcuguguugcccag

SEQ ID NO: 1149869 - RNA, 19 nt, Human
ucuugcuguguugcccagg

SEQ ID NO: 1149870 - RNA, 23 nt, Human
ucuugcuguguugcccaggcugg

SEQ ID NO: 1149871 - RNA, 21 nt, Human
ucuuucauucauucauuuauu

SEQ ID NO: 1149872 - RNA, 25 nt, Human
ugaauuggccugcaggguccaaggu

SEQ ID NO: 1149873 - RNA, 19 nt, Human
ugagaaaagaauggcagag

SEQ ID NO: 1149874 - RNA, 19 nt, Human
ugagaaaagaauggcagag

SEQ ID NO: 1149875 - RNA, 20 nt, Human
ugagaaaagaauggcagaga

SEQ ID NO: 1149876 - RNA, 21 nt, Human
ugagaaaagaauggcagagac

SEQ ID NO: 1149877 - RNA, 19 nt, Human
ugagaaccuuucaaggugg

SEQ ID NO: 1149878 - RNA, 19 nt, Human
ugagggaccaccugaucga

SEQ ID NO: 1149879 - RNA, 21 nt, Human
ugcacuggacaguucccucca

SEQ ID NO: 1149880 - RNA, 18 nt, Human
ugccagggauagcccagg

SEQ ID NO: 1149881 - RNA, 19 nt, Human
ugccagggauagcccaggc

SEQ ID NO: 1149882 - RNA, 20 nt, Human
ugcccaggcuggccuccaac

SEQ ID NO: 1149883 - RNA, 28 nt, Human
ugcccaggcuggccuccaacuccugggc

SEQ ID NO: 1149884 - RNA, 22 nt, Human
ugccccacacuucugaaaagua

SEQ ID NO: 1149885 - RNA, 21 nt, Human
ugccccagguugagaaaagaa

SEQ ID NO: 1149886 - RNA, 20 nt, Human
ugcccugggucagggaguga

SEQ ID NO: 1149887 - RNA, 21 nt, Human
ugcccugggucagggagugag

SEQ ID NO: 1149888 - RNA, 20 nt, Human
ugccgagcugggugagaagg

SEQ ID NO: 1149889 - RNA, 23 nt, Human
ugccgagcugggugagaaggggc

SEQ ID NO: 1149890 - RNA, 20 nt, Human
ugccuucuggaauugcuccc

SEQ ID NO: 1149891 - RNA, 22 nt, Human
ugcgauuacaggcaggagccac

SEQ ID NO: 1149892 - RNA, 24 nt, Human
ugcgauuacaggcaggagccaccg

SEQ ID NO: 1149893 - RNA, 23 nt, Human
ugcuaggcucaguugacaucuaa

SEQ ID NO: 1149894 - RNA, 19 nt, Human
ugcuaugucuuuggcuccu

SEQ ID NO: 1149895 - RNA, 19 nt, Human
ugcuccaagcccagcauug

SEQ ID NO: 1149896 - RNA, 20 nt, Human
ugcucugcucugcucuaggg

SEQ ID NO: 1149897 - RNA, 24 nt, Human
ugcucugcuuucuaauagucucuu

SEQ ID NO: 1149898 - RNA, 24 nt, Human
ugcuguguugcccaggcuggccuc

SEQ ID NO: 1149899 - RNA, 21 nt, Human
ugcuugaauuggccugcaggg

SEQ ID NO: 1149900 - RNA, 23 nt, Human
uggcagagacaggaagcagcaaa

SEQ ID NO: 1149901 - RNA, 21 nt, Human
uggccuccaacuccugggcuc

SEQ ID NO: 1149902 - RNA, 24 nt, Human
uggcucaaucguaguucacuguaa

SEQ ID NO: 1149903 - RNA, 23 nt, Human
uggcugaagucaaccaugaaggg

SEQ ID NO: 1149904 - RNA, 22 nt, Human
uggcugagguuagagacaagga

SEQ ID NO: 1149905 - RNA, 22 nt, Human
uggcuggugggguccagguucc

SEQ ID NO: 1149906 - RNA, 22 nt, Human
ugggaagaccccucaccuggca

SEQ ID NO: 1149907 - RNA, 18 nt, Human
ugggacccagcaaccugc

SEQ ID NO: 1149908 - RNA, 24 nt, Human
uggggucuugcuguguugcccagg

SEQ ID NO: 1149909 - RNA, 20 nt, Human
ugggugguccaauugccugu

SEQ ID NO: 1149910 - RNA, 24 nt, Human
uguagcaaaggcugccgagcuggg

SEQ ID NO: 1149911 - RNA, 25 nt, Human
uguggaugauucuucuccuucaaag

SEQ ID NO: 1149912 - RNA, 26 nt, Human
uguggaugauucuucuccuucaaagg

SEQ ID NO: 1149913 - RNA, 24 nt, Human
uguguugcccaggcuggccuccaa

SEQ ID NO: 1149914 - RNA, 19 nt, Human
uguuacagaaaauaacagg

SEQ ID NO: 1149915 - RNA, 22 nt, Human
uguugcccaggcuggccuccaa

SEQ ID NO: 1149916 - RNA, 18 nt, Human
uuacagaaaauaacaggc

SEQ ID NO: 1149917 - RNA, 19 nt, Human
uuauagaaauggggucuug

SEQ ID NO: 1149918 - RNA, 26 nt, Human
uucaaaacacuucucucccccagggc

SEQ ID NO: 1149919 - RNA, 21 nt, Human
uuccaccugcauguccuccug

SEQ ID NO: 1149920 - RNA, 24 nt, Human
uucccagcaacauacucuauuaua

SEQ ID NO: 1149921 - RNA, 20 nt, Human
uucugaaaaguagugauggu

SEQ ID NO: 1149922 - RNA, 20 nt, Human
uugcacaaauuccaccugca

SEQ ID NO: 1149923 - RNA, 22 nt, Human
uuggaauuuggucccagaagga

SEQ ID NO: 1149924 - RNA, 18 nt, Human
uuggcuccugcagagaga

SEQ ID NO: 1149925 - RNA, 21 nt, Human
uuguuuuuucuuuaggaauuu

SEQ ID NO: 1149926 - RNA, 22 nt, Human
uuuguaagccuugaucugaccg

SEQ ID NO: 1149927 - RNA, 19 nt, Human
uuuugguuuguuuuuucuu

SEQ ID NO: 1149928 - RNA, 23 nt, Human
aagaagcuggucaucggagagau

SEQ ID NO: 1149929 - RNA, 20 nt, Human
aagaugacaccaucuccauc

SEQ ID NO: 1149930 - RNA, 22 nt, Human
aagcaaccuucucuagagucga

SEQ ID NO: 1149931 - RNA, 25 nt, Human
aaugcagaaagcaaccuucucuaga

SEQ ID NO: 1149932 - RNA, 21 nt, Human
acaaucaaggcaagaugacac

SEQ ID NO: 1149933 - RNA, 20 nt, Human
acaguauuuggccuauuguu

SEQ ID NO: 1149934 - RNA, 20 nt, Human
agagauguccauccuuuauc

SEQ ID NO: 1149935 - RNA, 19 nt, Human
agagggcaguugccagaau

SEQ ID NO: 1149936 - RNA, 24 nt, Human
agccucguguucucugaccugggg

SEQ ID NO: 1149937 - RNA, 21 nt, Human
aggaauggaaucuugggccau

SEQ ID NO: 1149938 - RNA, 19 nt, Human
aggcagaaggaucuuaaau

SEQ ID NO: 1149939 - RNA, 19 nt, Human
augcagugaguguuauagc

SEQ ID NO: 1149940 - RNA, 19 nt, Human
caggugguccuugcuccca

SEQ ID NO: 1149941 - RNA, 24 nt, Human
ccaaaauggcggcgggcugcuucc

SEQ ID NO: 1149942 - RNA, 24 nt, Human
ccaagaugguggugggccacuucc

SEQ ID NO: 1149943 - RNA, 24 nt, Human
cgggcugcuuccaagaugguggaa

SEQ ID NO: 1149944 - RNA, 22 nt, Human
cuggucaucggagagaugucca

SEQ ID NO: 1149945 - RNA, 18 nt, Human
gauacaaucaaggcaaga

SEQ ID NO: 1149946 - RNA, 22 nt, Human
gcagaaagcaaccuucucuaga

SEQ ID NO: 1149947 - RNA, 21 nt, Human
gcaguugccagaaugcagaaa

SEQ ID NO: 1149948 - RNA, 21 nt, Human
gguccuugcucccagagcucc

SEQ ID NO: 1149949 - RNA, 21 nt, Human
gucaucggagagauguccauc

SEQ ID NO: 1149950 - RNA, 23 nt, Human
uacaaucaaggcaagaugacacc

SEQ ID NO: 1149951 - RNA, 21 nt, Human
uaccaggugguccuugcuccu

SEQ ID NO: 1149952 - RNA, 24 nt, Human
uaucagcacaguauuuggccuauu

SEQ ID NO: 1149953 - RNA, 24 nt, Human
uauuagaagccgugggucauggaa

SEQ ID NO: 1149954 - RNA, 22 nt, Human
ucccagagcucccaagauggug

SEQ ID NO: 1149955 - RNA, 26 nt, Human
uccuuuaucuuggggaugaagcuucu

SEQ ID NO: 1149956 - RNA, 28 nt, Human
uggaaucuugggccaugcagugaguguu

SEQ ID NO: 1149957 - RNA, 18 nt, Human
uggauacaaucaaggcaa

SEQ ID NO: 1149958 - RNA, 21 nt, Human
uggcaagccucguguucucug

SEQ ID NO: 1149959 - RNA, 24 nt, Human
uggcaagccucguguucucugacc

SEQ ID NO: 1149960 - RNA, 22 nt, Human
aaaauacuccugucagccucag

SEQ ID NO: 1149961 - RNA, 23 nt, Human
aagcgucugguuuuccgcccuuc

SEQ ID NO: 1149962 - RNA, 18 nt, Human
accccaucagcuuccauc

SEQ ID NO: 1149963 - RNA, 20 nt, Human
auuuucagcgauucugugcc

SEQ ID NO: 1149964 - RNA, 18 nt, Human
caacuccuuggccgaccc

SEQ ID NO: 1149965 - RNA, 25 nt, Human
caccuccucaucacuauccacagcc

SEQ ID NO: 1149966 - RNA, 25 nt, Human
cagcagguuucuucucuuccagcuu

SEQ ID NO: 1149967 - RNA, 22 nt, Human
cagccaugucauccaucguggc

SEQ ID NO: 1149968 - RNA, 20 nt, Human
caucaacaaucgagucucca

SEQ ID NO: 1149969 - RNA, 20 nt, Human
ccacagccaugucauccauc

SEQ ID NO: 1149970 - RNA, 20 nt, Human
ccaccuccucaucacuaucc

SEQ ID NO: 1149971 - RNA, 22 nt, Human
ccccaucagcuuccaucuucuu

SEQ ID NO: 1149972 - RNA, 20 nt, Human
ccucuucucucucucguucc

SEQ ID NO: 1149973 - RNA, 24 nt, Human
ccucuucucucucucguucccgau

SEQ ID NO: 1149974 - RNA, 19 nt, Human
ccuucccagccagcagacc

SEQ ID NO: 1149975 - RNA, 21 nt, Human
ccuugcugcggauaagagugg

SEQ ID NO: 1149976 - RNA, 21 nt, Human
cucucggucacggucucuguc

SEQ ID NO: 1149977 - RNA, 18 nt, Human
cuuugucauugguuuccu

SEQ ID NO: 1149978 - RNA, 20 nt, Human
gucagcuuacucaucaucca

SEQ ID NO: 1149979 - RNA, 20 nt, Human
uacccugguccauuuugcua

SEQ ID NO: 1149980 - RNA, 18 nt, Human
ucaaagucccaacggcuu

SEQ ID NO: 1149981 - RNA, 26 nt, Human
ucagcuuccaucuucuuccucuucuc

SEQ ID NO: 1149982 - RNA, 23 nt, Human
uccaccuccucaucacuauccac

SEQ ID NO: 1149983 - RNA, 29 nt, Human
uccccaaugucuucgaaaauacuccuguu

SEQ ID NO: 1149984 - RNA, 18 nt, Human
uccuucuucuuaagcuuc

SEQ ID NO: 1149985 - RNA, 24 nt, Human
ucgaaaauacuccugucagccuca

SEQ ID NO: 1149986 - RNA, 27 nt, Human
ucuccugaucacgcucccguucccgau

SEQ ID NO: 1149987 - RNA, 18 nt, Human
ucucuucuuuuccucuuc

SEQ ID NO: 1149988 - RNA, 19 nt, Human
ucuucucuuccagcuuccc

SEQ ID NO: 1149989 - RNA, 23 nt, Human
ugacaauaucauuuguggucagu

SEQ ID NO: 1149990 - RNA, 24 nt, Human
uggggcagucaaccuugcugcgga

SEQ ID NO: 1149991 - RNA, 20 nt, Human
uggucuuuugacuucaaccc

SEQ ID NO: 1149992 - RNA, 18 nt, Human
uucugcaauuuucagcga

SEQ ID NO: 1149993 - RNA, 25 nt, Human
uucuuaagcuucuuguuacggguuc

SEQ ID NO: 1149994 - RNA, 23 nt, Human
uuuccucuucucucucucguucc

SEQ ID NO: 1149995 - RNA, 23 nt, Human
aaagaauuucccucaaauuggaa

SEQ ID NO: 1149996 - RNA, 24 nt, Human
aaagugcugggauuacgggcauga

SEQ ID NO: 1149997 - RNA, 18 nt, Human
aacacuuugugcaggaga

SEQ ID NO: 1149998 - RNA, 19 nt, Human
aacuggcuccaaaacuuuu

SEQ ID NO: 1149999 - RNA, 18 nt, Human
aagaacuccaacucacgg

SEQ ID NO: 1150000 - RNA, 19 nt, Human
aagaacuccacgguagggg

SEQ ID NO: 1150001 - RNA, 21 nt, Human
aagaccaguggccuuggggac

SEQ ID NO: 1150002 - RNA, 21 nt, Human
aagaccaguggccuuggggac

SEQ ID NO: 1150003 - RNA, 19 nt, Human
aagugcugggauuacgggc

SEQ ID NO: 1150004 - RNA, 21 nt, Human
aagugcugggauuacgggcau

SEQ ID NO: 1150005 - RNA, 26 nt, Human
aagugcugggauuacgggcaugagcc

SEQ ID NO: 1150006 - RNA, 21 nt, Human
acaggcauuugccaccacacc

SEQ ID NO: 1150007 - RNA, 23 nt, Human
acaggcauuugccaccacacccg

SEQ ID NO: 1150008 - RNA, 19 nt, Human
acucagguaaaccagggag

SEQ ID NO: 1150009 - RNA, 18 nt, Human
acuggguuucaccauguu

SEQ ID NO: 1150010 - RNA, 23 nt, Human
acuggguuucaccauguugccua

SEQ ID NO: 1150011 - RNA, 24 nt, Human
acuggguuucaccauguugccuag

SEQ ID NO: 1150012 - RNA, 24 nt, Human
acuugcuucugcuguggcaccuuu

SEQ ID NO: 1150013 - RNA, 20 nt, Human
acuuuuuuaucuuucugaag

SEQ ID NO: 1150014 - RNA, 18 nt, Human
agaagggauugugcucug

SEQ ID NO: 1150015 - RNA, 22 nt, Human
agauacaugcuuccagccaaca

SEQ ID NO: 1150016 - RNA, 23 nt, Human
agguucuuaacugcuuucaauuu

SEQ ID NO: 1150017 - RNA, 21 nt, Human
aguagcugggauuacaggcau

SEQ ID NO: 1150018 - RNA, 21 nt, Human
auagcaauauacaaguauauc

SEQ ID NO: 1150019 - RNA, 22 nt, Human
aucacuaaugccauccuuucuu

SEQ ID NO: 1150020 - RNA, 23 nt, Human
augcaguggcacaaucucggcuc

SEQ ID NO: 1150021 - RNA, 20 nt, Human
auuccugacaaaugcacugg

SEQ ID NO: 1150022 - RNA, 18 nt, Human
auuuguuucccuucccca

SEQ ID NO: 1150023 - RNA, 20 nt, Human
auuuuuguauuuucaguaga

SEQ ID NO: 1150024 - RNA, 22 nt, Human
auuuuuguauuuucaguagaga

SEQ ID NO: 1150025 - RNA, 24 nt, Human
caaagugcugggauuacgggcaug

SEQ ID NO: 1150026 - RNA, 25 nt, Human
caagugaucugcccacccccugaag

SEQ ID NO: 1150027 - RNA, 20 nt, Human
caagugauucuugugucuca

SEQ ID NO: 1150028 - RNA, 22 nt, Human
caagugauucuugugucucagc

SEQ ID NO: 1150029 - RNA, 21 nt, Human
cacauaaagaacaacccaaua

SEQ ID NO: 1150030 - RNA, 24 nt, Human
cacauaaagaacaacccaauaguu

SEQ ID NO: 1150031 - RNA, 19 nt, Human
cacauugcagcuacucuuu

SEQ ID NO: 1150032 - RNA, 22 nt, Human
caccaagaacuccaacucacgg

SEQ ID NO: 1150033 - RNA, 28 nt, Human
caccaagaacuccaacucacggcaccaa

SEQ ID NO: 1150034 - RNA, 19 nt, Human
caccaagaacuccacggua

SEQ ID NO: 1150035 - RNA, 22 nt, Human
caccaagaacuccacgguaggg

SEQ ID NO: 1150036 - RNA, 24 nt, Human
caccacacccggcugauuuuugua

SEQ ID NO: 1150037 - RNA, 24 nt, Human
caccauguugccuaggcuggucuc

SEQ ID NO: 1150038 - RNA, 27 nt, Human
caccauguugccuaggcuggucucaaa

SEQ ID NO: 1150039 - RNA, 25 nt, Human
cacccaggcaccaagaacuccaacu

SEQ ID NO: 1150040 - RNA, 21 nt, Human
cacugcaaacucccccuccug

SEQ ID NO: 1150041 - RNA, 19 nt, Human
cagcuccuggaagaauccc

SEQ ID NO: 1150042 - RNA, 24 nt, Human
caguagagacuggguuucaccaug

SEQ ID NO: 1150043 - RNA, 25 nt, Human
caguagcugggauuacaggcauuug

SEQ ID NO: 1150044 - RNA, 18 nt, Human
cagugacuucuaagacau

SEQ ID NO: 1150045 - RNA, 22 nt, Human
cauguucaaagccuucucucaa

SEQ ID NO: 1150046 - RNA, 24 nt, Human
cauguugccuaggcuggucucaaa

SEQ ID NO: 1150047 - RNA, 19 nt, Human
cauugcagcuacucuuugg

SEQ ID NO: 1150048 - RNA, 24 nt, Human
ccaaagugcugggauuacgggcau

SEQ ID NO: 1150049 - RNA, 19 nt, Human
ccaccccuccuccacugaa

SEQ ID NO: 1150050 - RNA, 22 nt, Human
ccaguagcugggauuacaggca

SEQ ID NO: 1150051 - RNA, 23 nt, Human
ccaguagcugggauuacaggcau

SEQ ID NO: 1150052 - RNA, 31 nt, Human
cccaggcaccaagaacuccaacucacggcaa

SEQ ID NO: 1150053 - RNA, 23 nt, Human
cccaguagcugggauuacaggca

SEQ ID NO: 1150054 - RNA, 24 nt, Human
cccaguagcugggauuacaggcau

SEQ ID NO: 1150055 - RNA, 21 nt, Human
ccccaacccaccccuccuccu

SEQ ID NO: 1150056 - RNA, 23 nt, Human
ccccaguagcugggauuacaggc

SEQ ID NO: 1150057 - RNA, 23 nt, Human
cccggccucauucugguuuuguu

SEQ ID NO: 1150058 - RNA, 22 nt, Human
ccuacugccaacacaacuugcu

SEQ ID NO: 1150059 - RNA, 22 nt, Human
ccuccuggguucaagugauucu

SEQ ID NO: 1150060 - RNA, 19 nt, Human
ccugaccucaagugaucug

SEQ ID NO: 1150061 - RNA, 24 nt, Human
ccugaccucaagugaucugcccac

SEQ ID NO: 1150062 - RNA, 22 nt, Human
cguacaccaagcuguguguaua

SEQ ID NO: 1150063 - RNA, 23 nt, Human
cucaaguaagaaagaucugaaga

SEQ ID NO: 1150064 - RNA, 25 nt, Human
cucaagugaucugcccaccccuuag

SEQ ID NO: 1150065 - RNA, 21 nt, Human
cucacugcaaacucccccucc

SEQ ID NO: 1150066 - RNA, 23 nt, Human
cucacugcaaacucccccuccug

SEQ ID NO: 1150067 - RNA, 24 nt, Human
cucagccuccccaguagcugggau

SEQ ID NO: 1150068 - RNA, 20 nt, Human
cuccuggguucaagugauuc

SEQ ID NO: 1150069 - RNA, 21 nt, Human
cuccuggguucaagugauucu

SEQ ID NO: 1150070 - RNA, 23 nt, Human
cugauuuuuguauuuucaguaga

SEQ ID NO: 1150071 - RNA, 24 nt, Human
cuggguuucaccauguugccuagg

SEQ ID NO: 1150072 - RNA, 21 nt, Human
cuuaaaguccccgaccuguuc

SEQ ID NO: 1150073 - RNA, 19 nt, Human
cuuccccaacccaccccuc

SEQ ID NO: 1150074 - RNA, 21 nt, Human
cuuccccaacccaccccuccu

SEQ ID NO: 1150075 - RNA, 23 nt, Human
cuucugcuguggcaccuugacaa

SEQ ID NO: 1150076 - RNA, 22 nt, Human
cuuugugcaggagaaaguccuc

SEQ ID NO: 1150077 - RNA, 25 nt, Human
gaaaguaucuucauuucucccaaga

SEQ ID NO: 1150078 - RNA, 21 nt, Human
gaacuccaacucacggcacca

SEQ ID NO: 1150079 - RNA, 18 nt, Human
gacaaaugcacuggcccc

SEQ ID NO: 1150080 - RNA, 24 nt, Human
gaccucaagugaucugcccacccc

SEQ ID NO: 1150081 - RNA, 22 nt, Human
gagaaaguccucgaacuggcuc

SEQ ID NO: 1150082 - RNA, 18 nt, Human
gauuacgggcaugagcca

SEQ ID NO: 1150083 - RNA, 20 nt, Human
gauuacgggcaugagccacu

SEQ ID NO: 1150084 - RNA, 24 nt, Human
gauuacgggcaugagccacuuugc

SEQ ID NO: 1150085 - RNA, 21 nt, Human
gauucuugugucucagccucc

SEQ ID NO: 1150086 - RNA, 19 nt, Human
gcagucagauguuuucagc

SEQ ID NO: 1150087 - RNA, 20 nt, Human
gcugggcagcaaucugugcu

SEQ ID NO: 1150088 - RNA, 23 nt, Human
gcuggucucaaacuccugaccuc

SEQ ID NO: 1150089 - RNA, 20 nt, Human
ggagagccaggaggcggagg

SEQ ID NO: 1150090 - RNA, 18 nt, Human
ggaggagaaaguaucuuc

SEQ ID NO: 1150091 - RNA, 24 nt, Human
ggcuggucucaaacuccugaccuc

SEQ ID NO: 1150092 - RNA, 18 nt, Human
ggguuucaccauguugcc

SEQ ID NO: 1150093 - RNA, 22 nt, Human
ggguuucaccauguugccuagg

SEQ ID NO: 1150094 - RNA, 23 nt, Human
ggugcuggaaacucagguaaacc

SEQ ID NO: 1150095 - RNA, 18 nt, Human
guagcugggauuacaggc

SEQ ID NO: 1150096 - RNA, 21 nt, Human
gucccuuucaucacuuaauuc

SEQ ID NO: 1150097 - RNA, 26 nt, Human
gugaucugcccaccccuuagccuccc

SEQ ID NO: 1150098 - RNA, 24 nt, Human
gugauucuugugucucagccuccc

SEQ ID NO: 1150099 - RNA, 19 nt, Human
gugcuuuaugcuggugugu

SEQ ID NO: 1150100 - RNA, 22 nt, Human
guggugguggcaauaccacugg

SEQ ID NO: 1150101 - RNA, 23 nt, Human
uaaaguccccgaccuguuccaca

SEQ ID NO: 1150102 - RNA, 21 nt, Human
uaagaaagaucugaagaccag

SEQ ID NO: 1150103 - RNA, 23 nt, Human
uaagaaagaucugaagaccagug

SEQ ID NO: 1150104 - RNA, 21 nt, Human
uaauuccaagcuuaagauaau

SEQ ID NO: 1150105 - RNA, 23 nt, Human
uacaggcauuugccaccacaccc

SEQ ID NO: 1150106 - RNA, 20 nt, Human
uacgggcaugagccacuuug

SEQ ID NO: 1150107 - RNA, 28 nt, Human
uacuuuacuaaaacugggaaggaguaau

SEQ ID NO: 1150108 - RNA, 21 nt, Human
uagagacuggguuucaccaug

SEQ ID NO: 1150109 - RNA, 22 nt, Human
uagagacuggguuucaccaugu

SEQ ID NO: 1150110 - RNA, 21 nt, Human
uauagugaaaggagggcuggc

SEQ ID NO: 1150111 - RNA, 24 nt, Human
ucacugcaaacucccccuccuggg

SEQ ID NO: 1150112 - RNA, 23 nt, Human
ucacugcagguguacacaucacu

SEQ ID NO: 1150113 - RNA, 22 nt, Human
ucagacuggcaugcaguggcac

SEQ ID NO: 1150114 - RNA, 18 nt, Human
ucagccuccccaguagcu

SEQ ID NO: 1150115 - RNA, 20 nt, Human
ucagccuccccaguagcugg

SEQ ID NO: 1150116 - RNA, 24 nt, Human
ucaguagagacuggguuucaccau

SEQ ID NO: 1150117 - RNA, 19 nt, Human
uccaaaacuuuucaauucc

SEQ ID NO: 1150118 - RNA, 20 nt, Human
uccaaaacuuuucaauuccu

SEQ ID NO: 1150119 - RNA, 24 nt, Human
ucccaaagugcugggauuacgggc

SEQ ID NO: 1150120 - RNA, 20 nt, Human
ucccaagaguguuauuucuc

SEQ ID NO: 1150121 - RNA, 24 nt, Human
uccccaguagcugggauuacaggc

SEQ ID NO: 1150122 - RNA, 19 nt, Human
uccuggguucaagugauuc

SEQ ID NO: 1150123 - RNA, 21 nt, Human
uccuggguucaagugauucuu

SEQ ID NO: 1150124 - RNA, 22 nt, Human
uccuggguucaagugauucuug

SEQ ID NO: 1150125 - RNA, 23 nt, Human
ucugaagaccaguggccuugggg

SEQ ID NO: 1150126 - RNA, 25 nt, Human
ucuucaguguacgccuuucccaagg

SEQ ID NO: 1150127 - RNA, 20 nt, Human
ucuucaguguacgccuuucu

SEQ ID NO: 1150128 - RNA, 18 nt, Human
ucuugcucuguuguucag

SEQ ID NO: 1150129 - RNA, 19 nt, Human
ucuugcucuguuguucaga

SEQ ID NO: 1150130 - RNA, 23 nt, Human
ucuugcucuguuguucagacugg

SEQ ID NO: 1150131 - RNA, 26 nt, Human
ugacaaauagugcaucuucacuuucc

SEQ ID NO: 1150132 - RNA, 19 nt, Human
ugacaaaugcacuggcccc

SEQ ID NO: 1150133 - RNA, 24 nt, Human
ugacaaaugcacuggccccucuuc

SEQ ID NO: 1150134 - RNA, 19 nt, Human
ugacagagucuugcucugu

SEQ ID NO: 1150135 - RNA, 18 nt, Human
ugaccucaagugaucugc

SEQ ID NO: 1150136 - RNA, 27 nt, Human
ugaccucaagugaucugcccaccccuu

SEQ ID NO: 1150137 - RNA, 26 nt, Human
ugaucugcccaccccuuagccuccca

SEQ ID NO: 1150138 - RNA, 24 nt, Human
ugauuuuuguauuuucaguagaga

SEQ ID NO: 1150139 - RNA, 24 nt, Human
ugccuaggcuggucucaaacuccu

SEQ ID NO: 1150140 - RNA, 23 nt, Human
ugcuucugcuguggcaccuugac

SEQ ID NO: 1150141 - RNA, 20 nt, Human
uggcaaaaugucuaccacga

SEQ ID NO: 1150142 - RNA, 24 nt, Human
uggcacaaucucggcucacugcaa

SEQ ID NO: 1150143 - RNA, 24 nt, Human
uggcaugcaguggcacaaucucgg

SEQ ID NO: 1150144 - RNA, 23 nt, Human
ugggagagccaggaggcggaggc

SEQ ID NO: 1150145 - RNA, 18 nt, Human
ugggauuacaggcauuug

SEQ ID NO: 1150146 - RNA, 19 nt, Human
ugggauuacaggcauuugc

SEQ ID NO: 1150147 - RNA, 21 nt, Human
ugggauuacaggcauuugcca

SEQ ID NO: 1150148 - RNA, 22 nt, Human
ugggauuacaggcauuugccac

SEQ ID NO: 1150149 - RNA, 24 nt, Human
ugggauuacaggcauuugccacca

SEQ ID NO: 1150150 - RNA, 18 nt, Human
ugggauuacgggcaugag

SEQ ID NO: 1150151 - RNA, 19 nt, Human
ugggauuacgggcaugagc

SEQ ID NO: 1150152 - RNA, 22 nt, Human
ugggauuacgggcaugagccac

SEQ ID NO: 1150153 - RNA, 22 nt, Human
ugggauuacgggcaugagccac

SEQ ID NO: 1150154 - RNA, 23 nt, Human
ugggauuacgggcaugagccacu

SEQ ID NO: 1150155 - RNA, 26 nt, Human
ugggauuacgggcaugagccacuuug

SEQ ID NO: 1150156 - RNA, 24 nt, Human
uggguucaagugauucuugugucu

SEQ ID NO: 1150157 - RNA, 23 nt, Human
uggguuucaccauguugccuagg

SEQ ID NO: 1150158 - RNA, 22 nt, Human
ugguggcaauaccacugguggg

SEQ ID NO: 1150159 - RNA, 24 nt, Human
uguacgccuuucuugauaagcccc

SEQ ID NO: 1150160 - RNA, 21 nt, Human
ugucucagccuccccaguagc

SEQ ID NO: 1150161 - RNA, 22 nt, Human
ugucucagccuccccaguagcu

SEQ ID NO: 1150162 - RNA, 24 nt, Human
ugucucagccuccccaguagcugg

SEQ ID NO: 1150163 - RNA, 21 nt, Human
ugugcaggagaaaguccucga

SEQ ID NO: 1150164 - RNA, 21 nt, Human
uguguguauagugaaaggagg

SEQ ID NO: 1150165 - RNA, 19 nt, Human
uguugugugcuuuguucug

SEQ ID NO: 1150166 - RNA, 18 nt, Human
uuagccucccaaagugcu

SEQ ID NO: 1150167 - RNA, 23 nt, Human
uucaagugauucuugugucucag

SEQ ID NO: 1150168 - RNA, 27 nt, Human
uuccccaacccaccccuccuccacuga

SEQ ID NO: 1150169 - RNA, 23 nt, Human
uucgaaggucccuuucaucacuu

SEQ ID NO: 1150170 - RNA, 23 nt, Human
uuggaauauuugaggguuaagaa

SEQ ID NO: 1150171 - RNA, 24 nt, Human
uuucaccauguugccuaggcuggu

SEQ ID NO: 1150172 - RNA, 24 nt, Human
uuuucaguagagacuggguuucac

SEQ ID NO: 1150173 - RNA, 20 nt, Human
uuuuuguauuuucaguagag

SEQ ID NO: 1150174 - RNA, 21 nt, Human
cggcugccgauucgucuuggg

SEQ ID NO: 1150175 - RNA, 18 nt, Human
gcugccgauucgucuugg

SEQ ID NO: 1150176 - RNA, 21 nt, Human
aacagcucagccuccaggacu

SEQ ID NO: 1150177 - RNA, 20 nt, Human
aagaaggcauaccaagcaaa

SEQ ID NO: 1150178 - RNA, 24 nt, Human
aagguccuucacccuggggcccag

SEQ ID NO: 1150179 - RNA, 21 nt, Human
agaaggcauaccaagcaaacc

SEQ ID NO: 1150180 - RNA, 21 nt, Human
agauacaaauagaaccaggug

SEQ ID NO: 1150181 - RNA, 24 nt, Human
agcagagugcuugacaagggccug

SEQ ID NO: 1150182 - RNA, 23 nt, Human
aggugcagggagaggugggugug

SEQ ID NO: 1150183 - RNA, 22 nt, Human
aguaguuggugaggggucucua

SEQ ID NO: 1150184 - RNA, 21 nt, Human
caaagaucaguacccccagac

SEQ ID NO: 1150185 - RNA, 18 nt, Human
cacccuggggcccaccuc

SEQ ID NO: 1150186 - RNA, 24 nt, Human
caggugcagggagaggugggugug

SEQ ID NO: 1150187 - RNA, 19 nt, Human
ccagacuccagcagagugc

SEQ ID NO: 1150188 - RNA, 22 nt, Human
cccagcacuccugccuacugcc

SEQ ID NO: 1150189 - RNA, 21 nt, Human
cccuggggcccaccucuguuc

SEQ ID NO: 1150190 - RNA, 20 nt, Human
ccuccaggacugacauuucc

SEQ ID NO: 1150191 - RNA, 20 nt, Human
ccuggggcccaccucuguuc

SEQ ID NO: 1150192 - RNA, 20 nt, Human
gaacagcucagccuccagga

SEQ ID NO: 1150193 - RNA, 23 nt, Human
gauuucccagcacuccugccuac

SEQ ID NO: 1150194 - RNA, 19 nt, Human
gcucagccuccaggacuga

SEQ ID NO: 1150195 - RNA, 21 nt, Human
gcucuggggaacagcucagcc

SEQ ID NO: 1150196 - RNA, 18 nt, Human
gggaggcugagcaagguc

SEQ ID NO: 1150197 - RNA, 19 nt, Human
gggcucuggggaacagcuc

SEQ ID NO: 1150198 - RNA, 19 nt, Human
gggcucuggggaacagcuc

SEQ ID NO: 1150199 - RNA, 21 nt, Human
ggggaggcugagcaagguccu

SEQ ID NO: 1150200 - RNA, 19 nt, Human
uaaaguaguuggugagggg

SEQ ID NO: 1150201 - RNA, 18 nt, Human
uagaaccaggugcaggga

SEQ ID NO: 1150202 - RNA, 24 nt, Human
uaguuggugaggggucucuagggc

SEQ ID NO: 1150203 - RNA, 24 nt, Human
ucccagcacuccugccuacugccu

SEQ ID NO: 1150204 - RNA, 19 nt, Human
ucuguucagcagcagucac

SEQ ID NO: 1150205 - RNA, 19 nt, Human
ugacaagggccugguagac

SEQ ID NO: 1150206 - RNA, 23 nt, Human
ugacaagggccugguagaccaaa

SEQ ID NO: 1150207 - RNA, 22 nt, Human
ugccuugucccucaauaaagua

SEQ ID NO: 1150208 - RNA, 20 nt, Human
ugcuugacaagggccuggua

SEQ ID NO: 1150209 - RNA, 24 nt, Human
uuucccagcacuccugccuacugc

SEQ ID NO: 1150210 - RNA, 24 nt, Human
aaaccaacaaauccaauucaagca

SEQ ID NO: 1150211 - RNA, 23 nt, Human
aaccuucuucugcaccuccacca

SEQ ID NO: 1150212 - RNA, 20 nt, Human
aaugccaaagacuuccagcu

SEQ ID NO: 1150213 - RNA, 19 nt, Human
accaacaaauccaauucaa

SEQ ID NO: 1150214 - RNA, 22 nt, Human
accuucuucugcaccuccacca

SEQ ID NO: 1150215 - RNA, 31 nt, Human
agcauccagcucacucugugggcaaguggcc

SEQ ID NO: 1150216 - RNA, 19 nt, Human
aggcacagugcucagagua

SEQ ID NO: 1150217 - RNA, 19 nt, Human
caaauggaaaaccaacaaa

SEQ ID NO: 1150218 - RNA, 19 nt, Human
caagugaaugccaaagacu

SEQ ID NO: 1150219 - RNA, 22 nt, Human
caagugaaugccaaagacuucc

SEQ ID NO: 1150220 - RNA, 22 nt, Human
caagugaaugccaaagacuucc

SEQ ID NO: 1150221 - RNA, 21 nt, Human
caauaggucaucaaaauucca

SEQ ID NO: 1150222 - RNA, 21 nt, Human
cacaaauggaaaaccaacaaa

SEQ ID NO: 1150223 - RNA, 23 nt, Human
caccaccaccaccacccuuugga

SEQ ID NO: 1150224 - RNA, 23 nt, Human
cacucugugggcaaguggcugug

SEQ ID NO: 1150225 - RNA, 24 nt, Human
cacucugugggcaaguggcuguga

SEQ ID NO: 1150226 - RNA, 24 nt, Human
cagaaaucuccacugugguccugg

SEQ ID NO: 1150227 - RNA, 22 nt, Human
cauccagcucacucugugggca

SEQ ID NO: 1150228 - RNA, 21 nt, Human
ccacaaauggaaaaccaacaa

SEQ ID NO: 1150229 - RNA, 21 nt, Human
ccacaaauggaaaaccaacaa

SEQ ID NO: 1150230 - RNA, 22 nt, Human
cccacaaauggaaaaccaacaa

SEQ ID NO: 1150231 - RNA, 22 nt, Human
ccuccaccaccaccaccacccu

SEQ ID NO: 1150232 - RNA, 18 nt, Human
ccucccuuguccuucuuc

SEQ ID NO: 1150233 - RNA, 19 nt, Human
ccucccuuguccuucuucu

SEQ ID NO: 1150234 - RNA, 18 nt, Human
ccugguaauugccuuugg

SEQ ID NO: 1150235 - RNA, 21 nt, Human
cgacgaccucuaccuuuccca

SEQ ID NO: 1150236 - RNA, 19 nt, Human
cgagccuuaagcagcccca

SEQ ID NO: 1150237 - RNA, 26 nt, Human
cugcaccuccaccaccaccaccaccc

SEQ ID NO: 1150238 - RNA, 22 nt, Human
cugccagguuacuaagcagugu

SEQ ID NO: 1150239 - RNA, 20 nt, Human
cuuucccaucccuggcaccu

SEQ ID NO: 1150240 - RNA, 21 nt, Human
gaccucuaccuuucccauccc

SEQ ID NO: 1150241 - RNA, 20 nt, Human
gacgaccucuaccuuuccca

SEQ ID NO: 1150242 - RNA, 21 nt, Human
ggacauccagaacaaucagga

SEQ ID NO: 1150243 - RNA, 19 nt, Human
gugguccuggaguaaggaa

SEQ ID NO: 1150244 - RNA, 24 nt, Human
guggugaugggcagagauggguac

SEQ ID NO: 1150245 - RNA, 18 nt, Human
guggugugcuguggccuu

SEQ ID NO: 1150246 - RNA, 20 nt, Human
uaaagccauuguuggggggc

SEQ ID NO: 1150247 - RNA, 22 nt, Human
uacaccgugaggcaccuuauag

SEQ ID NO: 1150248 - RNA, 22 nt, Human
uagugaguucucgacgaagcuu

SEQ ID NO: 1150249 - RNA, 21 nt, Human
uauaccccugccagguuacua

SEQ ID NO: 1150250 - RNA, 19 nt, Human
ucaagugaaugccaaagac

SEQ ID NO: 1150251 - RNA, 22 nt, Human
uccaccaccaccaccacccuuu

SEQ ID NO: 1150252 - RNA, 19 nt, Human
uccacugugguccuggagu

SEQ ID NO: 1150253 - RNA, 21 nt, Human
ucccuuguccuucuucuuaaa

SEQ ID NO: 1150254 - RNA, 18 nt, Human
ucgggccacugcaaugaa

SEQ ID NO: 1150255 - RNA, 19 nt, Human
ucugugggcaaguggcugu

SEQ ID NO: 1150256 - RNA, 20 nt, Human
ugagaugaaugccucccuug

SEQ ID NO: 1150257 - RNA, 23 nt, Human
ugaggcaccuuauagugcuaucc

SEQ ID NO: 1150258 - RNA, 22 nt, Human
ugcaccuccaccaccaccacca

SEQ ID NO: 1150259 - RNA, 25 nt, Human
ugcaccuccaccaccaccaccaccc

SEQ ID NO: 1150260 - RNA, 24 nt, Human
ugccuuuggguuuggugcaaauuc

SEQ ID NO: 1150261 - RNA, 24 nt, Human
uggaaaaccaacaaauccaauuca

SEQ ID NO: 1150262 - RNA, 21 nt, Human
uuacagguucgggccacugca

SEQ ID NO: 1150263 - RNA, 20 nt, Human
aaugccaaagacuuccagcu

SEQ ID NO: 1150264 - RNA, 18 nt, Human
agaugaaugccucccuug

SEQ ID NO: 1150265 - RNA, 31 nt, Human; identical to SEQ ID NO: 1150215

SEQ ID NO: 1150266 - RNA, 19 nt, Human
caagugaaugccaaagacu

SEQ ID NO: 1150267 - RNA, 21 nt, Human
caagugaaugccaaagacuuc

SEQ ID NO: 1150268 - RNA, 22 nt, Human
caagugaaugccaaagacuucc

SEQ ID NO: 1150269 - RNA, 21 nt, Human
caauaggucaucaaaauucca

SEQ ID NO: 1150270 - RNA, 23 nt, Human
cacucugugggcaaguggcugug

SEQ ID NO: 1150271 - RNA, 24 nt, Human
cacucugugggcaaguggcuguga

SEQ ID NO: 1150272 - RNA, 22 nt, Human
cauccagcucacucugugggca

SEQ ID NO: 1150273 - RNA, 18 nt, Human
ccucccuuguccuucuuc

SEQ ID NO: 1150274 - RNA, 19 nt, Human
ccucccuuguccuucuucu

SEQ ID NO: 1150275 - RNA, 20 nt, Human
ccucccuuguccuucuucuu

SEQ ID NO: 1150276 - RNA, 18 nt, Human
ccugguaauugccuuugg

SEQ ID NO: 1150277 - RNA, 19 nt, Human
gugguccuggaguaaggaa

SEQ ID NO: 1150278 - RNA, 24 nt, Human
guggugaugggcagagauggguac

SEQ ID NO: 1150279 - RNA, 20 nt, Human
uaaagccauuguuggggggc

SEQ ID NO: 1150280 - RNA, 26 nt, Human
uaagauaaaggggauauaaacucugg

SEQ ID NO: 1150281 - RNA, 22 nt, Human
uacaccgugaggcaccuuauag

SEQ ID NO: 1150282 - RNA, 19 nt, Human
ucaagugaaugccaaagac

SEQ ID NO: 1150283 - RNA, 19 nt, Human
uccacugugguccuggagu

SEQ ID NO: 1150284 - RNA, 20 nt, Human
ucccuuguccuucuucuuaa

SEQ ID NO: 1150285 - RNA, 19 nt, Human
ucugugggcaaguggcugu

SEQ ID NO: 1150286 - RNA, 23 nt, Human
ugaggcaccuuauagugcuaucc

SEQ ID NO: 1150287 - RNA, 18 nt, Human
ugaggucaucagcuguag

SEQ ID NO: 1150288 - RNA, 24 nt, Human
ugccuuuggguuuggugcaaauuc

SEQ ID NO: 1150289 - RNA, 24 nt, Human
aaaaaauuagguagaagagcaaga

SEQ ID NO: 1150290 - RNA, 23 nt, Human
aaaugaagacagacaacacaaaa

SEQ ID NO: 1150291 - RNA, 20 nt, Human
acagcauauuaagcuuuaga

SEQ ID NO: 1150292 - RNA, 20 nt, Human
acucuguggagacauccuac

SEQ ID NO: 1150293 - RNA, 21 nt, Human
agacacuuggcaauuaaacca

SEQ ID NO: 1150294 - RNA, 20 nt, Human
agacagacaacacaaaauuu

SEQ ID NO: 1150295 - RNA, 21 nt, Human
aggaacucuccgguggucggg

SEQ ID NO: 1150296 - RNA, 20 nt, Human
augcagaacuucuccacaua

SEQ ID NO: 1150297 - RNA, 22 nt, Human
cacauaaaaagaggacaagacc

SEQ ID NO: 1150298 - RNA, 19 nt, Human
cacugguucaaagggcagc

SEQ ID NO: 1150299 - RNA, 22 nt, Human
cauaaaaagaggacaagacccc

SEQ ID NO: 1150300 - RNA, 24 nt, Human
cauaaaaagaggacaagaccccca

SEQ ID NO: 1150301 - RNA, 25 nt, Human
ccacauaaaaagaggacaagacccc

SEQ ID NO: 1150302 - RNA, 18 nt, Human
cccccauccuacauguuu

SEQ ID NO: 1150303 - RNA, 22 nt, Human
gagcaagaucaaaccccagcuc

SEQ ID NO: 1150304 - RNA, 18 nt, Human
gcgccacaggaacucucc

SEQ ID NO: 1150305 - RNA, 18 nt, Human
gggcagcagaggcaagag

SEQ ID NO: 1150306 - RNA, 22 nt, Human
ggguaccauuuuaucccuaaaa

SEQ ID NO: 1150307 - RNA, 22 nt, Human
uaaaaagaggacaagaccccca

SEQ ID NO: 1150308 - RNA, 19 nt, Human
uaacccagugucauguacc

SEQ ID NO: 1150309 - RNA, 23 nt, Human
uaucccuaaaacucuguugacau

SEQ ID NO: 1150310 - RNA, 20 nt, Human
uauuuacauagcacagcaua

SEQ ID NO: 1150311 - RNA, 19 nt, Human
ucaaagggcagcagaggca

SEQ ID NO: 1150312 - RNA, 22 nt, Human
ucacaugcagaacuucuccaca

SEQ ID NO: 1150313 - RNA, 20 nt, Human
ucacuugauguuggccgggu

SEQ ID NO: 1150314 - RNA, 18 nt, Human
ucccuaaaacucuguuga

SEQ ID NO: 1150315 - RNA, 18 nt, Human
ugacaucaaaauaugaca

SEQ ID NO: 1150316 - RNA, 23 nt, Human
uggaaucagguguucaccggucc

SEQ ID NO: 1150317 - RNA, 25 nt, Human
ugucuuuuuuuccuuccucacaugc

SEQ ID NO: 1150318 - RNA, 22 nt, Human
uuagacacuuggcaauuaaacc

SEQ ID NO: 1150319 - RNA, 22 nt, Human
aaaaaagguaauaacaaaaugu

SEQ ID NO: 1150320 - RNA, 23 nt, Human
aaaaaauagaaauaacauuaucc

SEQ ID NO: 1150321 - RNA, 25 nt, Human
aaaaauaaaaaauagaaauaacauu

SEQ ID NO: 1150322 - RNA, 19 nt, Human
aaaagacacagggaaggag

SEQ ID NO: 1150323 - RNA, 19 nt, Human
aaagacacagggaaggagg

SEQ ID NO: 1150324 - RNA, 19 nt, Human
aaagauaucuuaaagcuga

SEQ ID NO: 1150325 - RNA, 22 nt, Human
aaagcugaaaacuugaacagaa

SEQ ID NO: 1150326 - RNA, 20 nt, Human
aacccaaagaagcaaaguuu

SEQ ID NO: 1150327 - RNA, 19 nt, Human
aagaucaacaaacugccag

SEQ ID NO: 1150328 - RNA, 22 nt, Human
aagcagccuuccaguuaaagau

SEQ ID NO: 1150329 - RNA, 19 nt, Human
aagccaauaagcugcagga

SEQ ID NO: 1150330 - RNA, 22 nt, Human
aagggauucgauugcugcuuca

SEQ ID NO: 1150331 - RNA, 21 nt, Human
acaaaacaacaaaaaagguaa

SEQ ID NO: 1150332 - RNA, 22 nt, Human
accuaacagaccuccuagaaac

SEQ ID NO: 1150333 - RNA, 22 nt, Human
agagaccacauaaaaggagagu

SEQ ID NO: 1150334 - RNA, 18 nt, Human
agcagggugggacugggg

SEQ ID NO: 1150335 - RNA, 23 nt, Human
aggagaaagcagccuuccaguua

SEQ ID NO: 1150336 - RNA, 24 nt, Human
aggauguacaccuaacagaccucc

SEQ ID NO: 1150337 - RNA, 23 nt, Human
aggcagagacaguuuggugaaaa

SEQ ID NO: 1150338 - RNA, 25 nt, Human
agggaaggagggggcggcaaaagga

SEQ ID NO: 1150339 - RNA, 20 nt, Human
agggugccacaaacccaaag

SEQ ID NO: 1150340 - RNA, 19 nt, Human
auaguggagucuccugggc

SEQ ID NO: 1150341 - RNA, 19 nt, Human
auuaaggugaaaagucacc

SEQ ID NO: 1150342 - RNA, 21 nt, Human
caccuuucugguuuagcuagu

SEQ ID NO: 1150343 - RNA, 18 nt, Human
cagcagcagggugggacu

SEQ ID NO: 1150344 - RNA, 26 nt, Human
cagcuucaaacccagaaaaggguaau

SEQ ID NO: 1150345 - RNA, 22 nt, Human
cagggcuguggaauuauuugga

SEQ ID NO: 1150346 - RNA, 22 nt, Human
ccaaagaagcaaaguuucaaaa

SEQ ID NO: 1150347 - RNA, 21 nt, Human
ccaaagauaucuuaaagcuga

SEQ ID NO: 1150348 - RNA, 24 nt, Human
ccuuaccagaaaauggggacuagg

SEQ ID NO: 1150349 - RNA, 19 nt, Human
cuaaugaaaaaaauaaaaa

SEQ ID NO: 1150350 - RNA, 23 nt, Human
cuacaaaacaacaaaaaagguaa

SEQ ID NO: 1150351 - RNA, 23 nt, Human
cuccuagaaaccuuaccagaaaa

SEQ ID NO: 1150352 - RNA, 21 nt, Human
cucuuucucccaaucggcccc

SEQ ID NO: 1150353 - RNA, 18 nt, Human
cugguuuagcuaguacuu

SEQ ID NO: 1150354 - RNA, 19 nt, Human
gagcagcagcaggguggga

SEQ ID NO: 1150355 - RNA, 21 nt, Human
gaggagcagcagcaggguggg

SEQ ID NO: 1150356 - RNA, 21 nt, Human
gaucuuuguuucuuucaagga

SEQ ID NO: 1150357 - RNA, 21 nt, Human
gcagcagcagggugggacugg

SEQ ID NO: 1150358 - RNA, 24 nt, Human
gcagcagcagggugggacuggggc

SEQ ID NO: 1150359 - RNA, 28 nt, Human
ggagcagcagcagggugggacuggggcg

SEQ ID NO: 1150360 - RNA, 22 nt, Human
ggagggacugguucuuuauuuc

SEQ ID NO: 1150361 - RNA, 19 nt, Human
ggaggggguagagauggga

SEQ ID NO: 1150362 - RNA, 23 nt, Human
ggcacuucuagagacagcagcuu

SEQ ID NO: 1150363 - RNA, 23 nt, Human
gggaaggagggggcggcaaaagg

SEQ ID NO: 1150364 - RNA, 24 nt, Human
gggaggagcagcagcaggguggga

SEQ ID NO: 1150365 - RNA, 23 nt, Human
ggugaaaaagacacagggaagga

SEQ ID NO: 1150366 - RNA, 21 nt, Human
guaagcaggugggagggggua

SEQ ID NO: 1150367 - RNA, 31 nt, Human
uacaaaacaacaaaaaagguaauaacaaaag

SEQ ID NO: 1150368 - RNA, 22 nt, Human
uacaccuaacagaccuccuaga

SEQ ID NO: 1150369 - RNA, 22 nt, Human
uagaaauaacauuauccaaaga

SEQ ID NO: 1150370 - RNA, 21 nt, Human
uagcuaguacuuuguacagag

SEQ ID NO: 1150371 - RNA, 20 nt, Human
ucaaacccagaaaaggguaa

SEQ ID NO: 1150372 - RNA, 22 nt, Human
ucaccuuccaaaagugagaaag

SEQ ID NO: 1150373 - RNA, 21 nt, Human
ucagaggucuuaccaucuuaa

SEQ ID NO: 1150374 - RNA, 22 nt, Human
uccugggcucuguuuggcucuc

SEQ ID NO: 1150375 - RNA, 22 nt, Human
ucggccccaaagagaccacaua

SEQ ID NO: 1150376 - RNA, 18 nt, Human
ucuagagacagcagcuuc

SEQ ID NO: 1150377 - RNA, 18 nt, Human
ucucaguaaggcaggccu

SEQ ID NO: 1150378 - RNA, 19 nt, Human
ucucugagaagaggcagag

SEQ ID NO: 1150379 - RNA, 22 nt, Human
ugaaaaaaauaaaaaauagaaa

SEQ ID NO: 1150380 - RNA, 20 nt, Human
ugaaaaagacacagggaagg

SEQ ID NO: 1150381 - RNA, 19 nt, Human
ugagaaagggauucgauug

SEQ ID NO: 1150382 - RNA, 20 nt, Human
ugagaaagggauucgauugc

SEQ ID NO: 1150383 - RNA, 20 nt, Human
ugagaagaggcagagacagu

SEQ ID NO: 1150384 - RNA, 18 nt, Human
ugagaugaguuucacaug

SEQ ID NO: 1150385 - RNA, 22 nt, Human
ugcuacaaaacaacaaaaaagg

SEQ ID NO: 1150386 - RNA, 23 nt, Human
ugcucagccucuagcccagcugg

SEQ ID NO: 1150387 - RNA, 19 nt, Human
ugggaggggguagagaugg

SEQ ID NO: 1150388 - RNA, 20 nt, Human
ugggaggggguagagaugga

SEQ ID NO: 1150389 - RNA, 22 nt, Human
uggggacuagguagggaaagaa

SEQ ID NO: 1150390 - RNA, 24 nt, Human
uggggacuagguagggaaagaaac

SEQ ID NO: 1150391 - RNA, 18 nt, Human
uggucaccucaacauaag

SEQ ID NO: 1150392 - RNA, 18 nt, Human
uguguacaucacaacaug

SEQ ID NO: 1150393 - RNA, 24 nt, Human
uuaaagacauuaugcauugugcuc

SEQ ID NO: 1150394 - RNA, 22 nt, Human
uuaccagaaaauggggacuagg

SEQ ID NO: 1150395 - RNA, 22 nt, Human
uuauccaaagauaucuuaaagc

SEQ ID NO: 1150396 - RNA, 18 nt, Human
uucuccagcacugacuga

SEQ ID NO: 1150397 - RNA, 18 nt, Human
uucucccaaucggcccca

SEQ ID NO: 1150398 - RNA, 23 nt, Human
uugcuacaaaacaacaaaaaagg

SEQ ID NO: 1150399 - RNA, 21 nt, Human
uuuacaaaugguugcuacaaa

SEQ ID NO: 1150400 - RNA, 20 nt, Human
uuuggugaaaaagacacagg

SEQ ID NO: 1150401 - RNA, 21 nt, Human
uuuggugaaaaagacacaggg

SEQ ID NO: 1150402 - RNA, 22 nt, Human
aaaaagagaacuuguccauuga

SEQ ID NO: 1150403 - RNA, 19 nt, Human
aaacaaguaaggcagccag

SEQ ID NO: 1150404 - RNA, 20 nt, Human
aacacgagagucuagagaug

SEQ ID NO: 1150405 - RNA, 19 nt, Human
aacacugucaucucuagaa

SEQ ID NO: 1150406 - RNA, 21 nt, Human
aaccagcagugcaagcauuca

SEQ ID NO: 1150407 - RNA, 21 nt, Human
aagaggccaaugauacgaaua

SEQ ID NO: 1150408 - RNA, 21 nt, Human
aagcaauguaguuuuuaaaac

SEQ ID NO: 1150409 - RNA, 24 nt, Human
aaggauuugugugugugugaugau

SEQ ID NO: 1150410 - RNA, 21 nt, Human
acaaaaagagaacuuguccau

SEQ ID NO: 1150411 - RNA, 23 nt, Human
accacucccacuauacauuagag

SEQ ID NO: 1150412 - RNA, 19 nt, Human
accaugcuuuugucucucc

SEQ ID NO: 1150413 - RNA, 18 nt, Human
accucaugcuuauaucau

SEQ ID NO: 1150414 - RNA, 19 nt, Human
agagagagauagaggaggg

SEQ ID NO: 1150415 - RNA, 19 nt, Human
agagaugggcuauuuguua

SEQ ID NO: 1150416 - RNA, 23 nt, Human
aggaaauaauggagauggaacaa

SEQ ID NO: 1150417 - RNA, 21 nt, Human
aggaaaucauuacuguuauuu

SEQ ID NO: 1150418 - RNA, 23 nt, Human
aggaggauuuaggagucacaauc

SEQ ID NO: 1150419 - RNA, 20 nt, Human
aggcagccagaaauuucaaa

SEQ ID NO: 1150420 - RNA, 19 nt, Human
auaaacaggaaauauuugc

SEQ ID NO: 1150421 - RNA, 23 nt, Human
auuccaauuccuaguagcauucc

SEQ ID NO: 1150422 - RNA, 23 nt, Human
caaaccuaaccugggcuuccuuc

SEQ ID NO: 1150423 - RNA, 22 nt, Human
caacaugaauacugcaagcagg

SEQ ID NO: 1150424 - RNA, 23 nt, Human
caagagaacuauuuuuaaaacug

SEQ ID NO: 1150425 - RNA, 20 nt, Human
cacaacuguacaaacugaac

SEQ ID NO: 1150426 - RNA, 23 nt, Human
cacagcaaccaugcgagguaggc

SEQ ID NO: 1150427 - RNA, 18 nt, Human
cagagagagauagaggag

SEQ ID NO: 1150428 - RNA, 21 nt, Human
cagugccaguuaccguacaaa

SEQ ID NO: 1150429 - RNA, 20 nt, Human
ccaaagcuguaaugauaaca

SEQ ID NO: 1150430 - RNA, 20 nt, Human
ccaggccaggugagcguuug

SEQ ID NO: 1150431 - RNA, 22 nt, Human
cuauaauaauuuacaggcaauu

SEQ ID NO: 1150432 - RNA, 22 nt, Human
cucaugcuuauaucaucuaaga

SEQ ID NO: 1150433 - RNA, 21 nt, Human
cuuagaaaaauagacaucuca

SEQ ID NO: 1150434 - RNA, 23 nt, Human
cuuagaaaaauagacaucucaga

SEQ ID NO: 1150435 - RNA, 20 nt, Human
cuugccuuuguuugaugcua

SEQ ID NO: 1150436 - RNA, 19 nt, Human
cuuuuagaggaggauuuag

SEQ ID NO: 1150437 - RNA, 18 nt, Human
gagaacuauuuuuaaaac

SEQ ID NO: 1150438 - RNA, 21 nt, Human
gagcaggaaauaauggagaug

SEQ ID NO: 1150439 - RNA, 24 nt, Human
gcagaauucccucauaaaaauaca

SEQ ID NO: 1150440 - RNA, 28 nt, Human
gcugaggcccugggcgagggcgcucugu

SEQ ID NO: 1150441 - RNA, 18 nt, Human
gggcucccgggcucuucc

SEQ ID NO: 1150442 - RNA, 18 nt, Human
uaaaagcuguauuuaaaa

SEQ ID NO: 1150443 - RNA, 21 nt, Human
uaacugaaacugcuggcuaaa

SEQ ID NO: 1150444 - RNA, 18 nt, Human
uaacuggauagcacugaa

SEQ ID NO: 1150445 - RNA, 24 nt, Human
uaagucaacacacaacuguacaaa

SEQ ID NO: 1150446 - RNA, 23 nt, Human
uacaaaaugcuuucccacguccu

SEQ ID NO: 1150447 - RNA, 23 nt, Human
uagaaaaauagacaucucagaua

SEQ ID NO: 1150448 - RNA, 20 nt, Human
uagaagucaccacuuucaaa

SEQ ID NO: 1150449 - RNA, 19 nt, Human
uagauguaauuagaguuga

SEQ ID NO: 1150450 - RNA, 26 nt, Human
uagcugcagaauucccucauaaaaau

SEQ ID NO: 1150451 - RNA, 21 nt, Human
uaggugccucacagcaaccau

SEQ ID NO: 1150452 - RNA, 20 nt, Human
uaguagaucaauagcucccu

SEQ ID NO: 1150453 - RNA, 19 nt, Human
uauaagggcauuucuacca

SEQ ID NO: 1150454 - RNA, 24 nt, Human
uauuuuugggcagaagaaacucag

SEQ ID NO: 1150455 - RNA, 25 nt, Human
ucaacacacaacuguacaaacugaa

SEQ ID NO: 1150456 - RNA, 19 nt, Human
ucaaggauuugugugugug

SEQ ID NO: 1150457 - RNA, 23 nt, Human
ucaaucuaaucauccuaauucua

SEQ ID NO: 1150458 - RNA, 24 nt, Human
ucagaaaaaaauauuacaggcccc

SEQ ID NO: 1150459 - RNA, 25 nt, Human
ucagaaaaaaauauuacaggcccca

SEQ ID NO: 1150460 - RNA, 18 nt, Human
ucagauaaagaaagggca

SEQ ID NO: 1150461 - RNA, 18 nt, Human
ucauuggagguaauauua

SEQ ID NO: 1150462 - RNA, 20 nt, Human
ucccuguaauaauuaauuuc

SEQ ID NO: 1150463 - RNA, 22 nt, Human
ucuaagaggccaaugauacgaa

SEQ ID NO: 1150464 - RNA, 21 nt, Human
ucuguaagcuuucuggaagca

SEQ ID NO: 1150465 - RNA, 22 nt, Human
ucugugaggggcucccgggcuc

SEQ ID NO: 1150466 - RNA, 23 nt, Human
ucuuccgccgcucgcugccaggc

SEQ ID NO: 1150467 - RNA, 18 nt, Human
ucuugugcuugaaaccca

SEQ ID NO: 1150468 - RNA, 19 nt, Human
ugaaaagcuuuuauucccu

SEQ ID NO: 1150469 - RNA, 18 nt, Human
ugaaagcucgacgccuca

SEQ ID NO: 1150470 - RNA, 23 nt, Human
ugaucugggaagaacauucugca

SEQ ID NO: 1150471 - RNA, 18 nt, Human
ugcacuaaauuguauuac

SEQ ID NO: 1150472 - RNA, 21 nt, Human
ugccuuuuauuauuuuggugg

SEQ ID NO: 1150473 - RNA, 23 nt, Human
uggaguaugacaugcaaucuauu

SEQ ID NO: 1150474 - RNA, 21 nt, Human
ugggaagaacauucugcagga

SEQ ID NO: 1150475 - RNA, 27 nt, Human
ugggaagaacauucugcagucugaaaa

SEQ ID NO: 1150476 - RNA, 21 nt, Human
ugggcuauuuguuaucacuac

SEQ ID NO: 1150477 - RNA, 21 nt, Human
uguaaugauaacacauagguu

SEQ ID NO: 1150478 - RNA, 23 nt, Human
ugugaaggauaauugagaauggg

SEQ ID NO: 1150479 - RNA, 19 nt, Human
ugugaggggcucccgggcu

SEQ ID NO: 1150480 - RNA, 18 nt, Human
ugugaugaucaaauugug

SEQ ID NO: 1150481 - RNA, 18 nt, Human
uguggcacagacaucuac

SEQ ID NO: 1150482 - RNA, 20 nt, Human
uguggcacagacaucuacac

SEQ ID NO: 1150483 - RNA, 26 nt, Human
uguuuuuguuuuuaaaagcuguauuu

SEQ ID NO: 1150484 - RNA, 21 nt, Human
uuaaaacccuagucccaguag

SEQ ID NO: 1150485 - RNA, 21 nt, Human
uuacucuguugucaacaugaa

SEQ ID NO: 1150486 - RNA, 24 nt, Human
uuuaaaacccuagucccaguagau

SEQ ID NO: 1150487 - RNA, 22 nt, Human
uuuuacucuguugucaacauga

SEQ ID NO: 1150488 - RNA, 23 nt, Human
uuuuacucuguugucaacaugaa

SEQ ID NO: 1150489 - RNA, 18 nt, Human
aaaaaaaaaaaaauuagc

SEQ ID NO: 1150490 - RNA, 23 nt, Human
aaaaagccagaauacgggugugc

SEQ ID NO: 1150491 - RNA, 18 nt, Human
aaaaggaagggggccugg

SEQ ID NO: 1150492 - RNA, 20 nt, Human
aacauggugaaaccucgucu

SEQ ID NO: 1150493 - RNA, 21 nt, Human
aacauggugaaaccucgucuc

SEQ ID NO: 1150494 - RNA, 20 nt, Human
aaggagaugguuuuauucaa

SEQ ID NO: 1150495 - RNA, 20 nt, Human
aaggucucccacccauucug

SEQ ID NO: 1150496 - RNA, 21 nt, Human
aagugcuggcugcccuuauga

SEQ ID NO: 1150497 - RNA, 26 nt, Human
aagugggcagaucaccuaaggucagg

SEQ ID NO: 1150498 - RNA, 22 nt, Human
aauacaaaaaaaaaaaaauuag

SEQ ID NO: 1150499 - RNA, 24 nt, Human
aaucgcuugaacccaggaggcaga

SEQ ID NO: 1150500 - RNA, 24 nt, Human
aaucgcuugaaccugggaggugga

SEQ ID NO: 1150501 - RNA, 24 nt, Human
acagagcaagacucugucucaaaa

SEQ ID NO: 1150502 - RNA, 24 nt, Human
acagagccagacucugucucaaaa

SEQ ID NO: 1150503 - RNA, 21 nt, Human
accaagaaugaugucauccac

SEQ ID NO: 1150504 - RNA, 18 nt, Human
accacagagguccuugac

SEQ ID NO: 1150505 - RNA, 24 nt, Human
accacgccacuacacuccagccug

SEQ ID NO: 1150506 - RNA, 20 nt, Human
accagauaccagcugcaagc

SEQ ID NO: 1150507 - RNA, 24 nt, Human
accucgucucuacuaaaaauacaa

SEQ ID NO: 1150508 - RNA, 22 nt, Human
accucucauugaaccuccccca

SEQ ID NO: 1150509 - RNA, 23 nt, Human
accucucauugaaccucccccac

SEQ ID NO: 1150510 - RNA, 22 nt, Human
acgccacuacacuccagccugg

SEQ ID NO: 1150511 - RNA, 24 nt, Human
acgccacuacacuccagccugggc

SEQ ID NO: 1150512 - RNA, 18 nt, Human
acuacacuccagccuggg

SEQ ID NO: 1150513 - RNA, 24 nt, Human
acuacacuccagccugggccacag

SEQ ID NO: 1150514 - RNA, 19 nt, Human
acuccagccugggccacag

SEQ ID NO: 1150515 - RNA, 24 nt, Human
acuccagccugggccacagagcaa

SEQ ID NO: 1150516 - RNA, 24 nt, Human
acugcacuccagccuggaugacag

SEQ ID NO: 1150517 - RNA, 26 nt, Human
acugcacuccagccuggaugacagag

SEQ ID NO: 1150518 - RNA, 24 nt, Human
acuuugggaggccgaagugggcag

SEQ ID NO: 1150519 - RNA, 24 nt, Human
agacgaaauucacuugacgauuaa

SEQ ID NO: 1150520 - RNA, 18 nt, Human
agacgaagguaaaagagg

SEQ ID NO: 1150521 - RNA, 18 nt, Human
agagcaagacucugucuc

SEQ ID NO: 1150522 - RNA, 22 nt, Human
agagguugcagugagcugagau

SEQ ID NO: 1150523 - RNA, 24 nt, Human
agagguugcagugagcugagauug

SEQ ID NO: 1150524 - RNA, 24 nt, Human
agcacuuugggaggccgaaguggg

SEQ ID NO: 1150525 - RNA, 23 nt, Human
agccagcaggcacugccuggggu

SEQ ID NO: 1150526 - RNA, 24 nt, Human
agccuggaugacagagccagacuc

SEQ ID NO: 1150527 - RNA, 23 nt, Human
agccuggccaacauggugaaacc

SEQ ID NO: 1150528 - RNA, 25 nt, Human
agccuggccaacauggugaaaccuc

SEQ ID NO: 1150529 - RNA, 24 nt, Human
agccugggccacagagcaagacuc

SEQ ID NO: 1150530 - RNA, 19 nt, Human
agcuaggcaugguggugca

SEQ ID NO: 1150531 - RNA, 23 nt, Human
agcuaggcaugguggugcaugcc

SEQ ID NO: 1150532 - RNA, 18 nt, Human
aggaauccaaacucaacc

SEQ ID NO: 1150533 - RNA, 19 nt, Human
aggaucugacuaccugugg

SEQ ID NO: 1150534 - RNA, 20 nt, Human
aggaugucagggagucuucu

SEQ ID NO: 1150535 - RNA, 20 nt, Human
aggcagagguugcagugagc

SEQ ID NO: 1150536 - RNA, 24 nt, Human
aggcagagguugcagugagcugag

SEQ ID NO: 1150537 - RNA, 22 nt, Human
aggcaggagaaucgcuugaacc

SEQ ID NO: 1150538 - RNA, 23 nt, Human
aggcaggagaaucgcuugaaccc

SEQ ID NO: 1150539 - RNA, 24 nt, Human
aggcaggagaaucgcuugaaccca

SEQ ID NO: 1150540 - RNA, 24 nt, Human
aggcaggagaaucgcuugaaccug

SEQ ID NO: 1150541 - RNA, 21 nt, Human
aggccgaagugggcagaucac

SEQ ID NO: 1150542 - RNA, 24 nt, Human
aggcgcgguggcucaugccuguaa

SEQ ID NO: 1150543 - RNA, 24 nt, Human
aggcuaaggcaggagaaucgcuug

SEQ ID NO: 1150544 - RNA, 20 nt, Human
aggcugaggcaggagaaucg

SEQ ID NO: 1150545 - RNA, 24 nt, Human
aggcugaggcaggagaaucgcuug

SEQ ID NO: 1150546 - RNA, 20 nt, Human
agggauuugggcagucgggg

SEQ ID NO: 1150547 - RNA, 24 nt, Human
agguggagguugcagugagccaag

SEQ ID NO: 1150548 - RNA, 23 nt, Human
aguauggacagacagcacagaug

SEQ ID NO: 1150549 - RNA, 19 nt, Human
augccuguaaucccagcac

SEQ ID NO: 1150550 - RNA, 24 nt, Human
auugcgccacugcacuccagccug

SEQ ID NO: 1150551 - RNA, 24 nt, Human
auuggccaggcgcgguggcucaug

SEQ ID NO: 1150552 - RNA, 18 nt, Human
caaaaaaaaaaagaggga

SEQ ID NO: 1150553 - RNA, 20 nt, Human
caaacucaacccucugcccu

SEQ ID NO: 1150554 - RNA, 24 nt, Human
caacauggugaaaccucgucucua

SEQ ID NO: 1150555 - RNA, 26 nt, Human
caaugccuaccacagccgucccuaga

SEQ ID NO: 1150556 - RNA, 31 nt, Human
cacacacacccacacauucaccuaugugcag

SEQ ID NO: 1150557 - RNA, 24 nt, Human
cacagagcaagacucugucucaaa

SEQ ID NO: 1150558 - RNA, 20 nt, Human
caccagcauaaccagauacc

SEQ ID NO: 1150559 - RNA, 25 nt, Human
caccccacugcuccuggccccccua

SEQ ID NO: 1150560 - RNA, 22 nt, Human
caccuccccccagcacacauac

SEQ ID NO: 1150561 - RNA, 24 nt, Human
cacuacacuccagccugggccaca

SEQ ID NO: 1150562 - RNA, 23 nt, Human
cacuccagccuggaugacagagc

SEQ ID NO: 1150563 - RNA, 23 nt, Human
cacuccagccugggccacagagc

SEQ ID NO: 1150564 - RNA, 18 nt, Human
cacugcacuccagccugg

SEQ ID NO: 1150565 - RNA, 19 nt, Human
cacugcacuccagccugga

SEQ ID NO: 1150566 - RNA, 19 nt, Human
cacugcacuccagccugga

SEQ ID NO: 1150567 - RNA, 22 nt, Human
cacugcacuccagccuggauga

SEQ ID NO: 1150568 - RNA, 24 nt, Human
cacugcacuccagccuggaugaca

SEQ ID NO: 1150569 - RNA, 27 nt, Human
cagaucaccuaaggucaggaguuugaa

SEQ ID NO: 1150570 - RNA, 24 nt, Human
cagcacuuugggaggccgaagugg

SEQ ID NO: 1150571 - RNA, 20 nt, Human
caggaauccaaacucaaccc

SEQ ID NO: 1150572 - RNA, 23 nt, Human
cagggagucuucugaacucaggg

SEQ ID NO: 1150573 - RNA, 28 nt, Human
caguaggcuuccuauacaaguauucugg

SEQ ID NO: 1150574 - RNA, 19 nt, Human
cauaaccacagagguccuu

SEQ ID NO: 1150575 - RNA, 25 nt, Human
cauaaccagauaccagcugcaagcc

SEQ ID NO: 1150576 - RNA, 21 nt, Human
cauacccacucacacacaccc

SEQ ID NO: 1150577 - RNA, 24 nt, Human
caugccuguaaucccagcacuuug

SEQ ID NO: 1150578 - RNA, 20 nt, Human
cauuuugaccccuccagcaa

SEQ ID NO: 1150579 - RNA, 18 nt, Human
ccaagaccacgccacuac

SEQ ID NO: 1150580 - RNA, 19 nt, Human
ccaaugccuaccacagccg

SEQ ID NO: 1150581 - RNA, 20 nt, Human
ccacuacacuccagccuggg

SEQ ID NO: 1150582 - RNA, 21 nt, Human
ccacuacacuccagccugggc

SEQ ID NO: 1150583 - RNA, 23 nt, Human
ccacuacacuccagccugggcca

SEQ ID NO: 1150584 - RNA, 24 nt, Human
ccacuacacuccagccugggccac

SEQ ID NO: 1150585 - RNA, 18 nt, Human
ccacugcacuccagccug

SEQ ID NO: 1150586 - RNA, 19 nt, Human
ccacugcacuccagccugg

SEQ ID NO: 1150587 - RNA, 20 nt, Human
ccacugcacuccagccugga

SEQ ID NO: 1150588 - RNA, 21 nt, Human
ccacugcacuccagccuggau

SEQ ID NO: 1150589 - RNA, 24 nt, Human
ccacugcacuccagccuggaugac

SEQ ID NO: 1150590 - RNA, 22 nt, Human
ccagauaccagcugcaagccaa

SEQ ID NO: 1150591 - RNA, 23 nt, Human
ccagcacacauacucaccaguca

SEQ ID NO: 1150592 - RNA, 21 nt, Human
ccagcacuuugggaggccgaa

SEQ ID NO: 1150593 - RNA, 19 nt, Human
ccagccagcaggcacugcc

SEQ ID NO: 1150594 - RNA, 22 nt, Human
ccagccuggaugacagagccag

SEQ ID NO: 1150595 - RNA, 22 nt, Human
ccaggaggcagagguugcagug

SEQ ID NO: 1150596 - RNA, 26 nt, Human
cccacacauucaccuaugugcaccuc

SEQ ID NO: 1150597 - RNA, 22 nt, Human
cccacugcuccuggccccccua

SEQ ID NO: 1150598 - RNA, 24 nt, Human
cccauucugcagggauuccaaaag

SEQ ID NO: 1150599 - RNA, 18 nt, Human
ccccucccaaccaccaag

SEQ ID NO: 1150600 - RNA, 22 nt, Human
cccucugcccuaagaccuaagg

SEQ ID NO: 1150601 - RNA, 22 nt, Human
ccuaaggucaggaguuugaaac

SEQ ID NO: 1150602 - RNA, 18 nt, Human
ccuauuccccucccaacc

SEQ ID NO: 1150603 - RNA, 21 nt, Human
ccuggccaacauggugaaacc

SEQ ID NO: 1150604 - RNA, 24 nt, Human
ccuggccaacauggugaaaccucg

SEQ ID NO: 1150605 - RNA, 21 nt, Human
ccugggagguggagguugcag

SEQ ID NO: 1150606 - RNA, 21 nt, Human
ccugggauuuugcagacgaag

SEQ ID NO: 1150607 - RNA, 22 nt, Human
ccugggccacagagcaagacuc

SEQ ID NO: 1150608 - RNA, 21 nt, Human
ccuguagucccagcuacugcg

SEQ ID NO: 1150609 - RNA, 22 nt, Human
ccuguagucccagcuacugcgg

SEQ ID NO: 1150610 - RNA, 26 nt, Human
cgaagugggcagaucaccuaagguca

SEQ ID NO: 1150611 - RNA, 26 nt, Human
cgccacugcacuccagccuggaugac

SEQ ID NO: 1150612 - RNA, 18 nt, Human
cgggugugcauucugcca

SEQ ID NO: 1150613 - RNA, 23 nt, Human
cuagacaaggucucccacccauu

SEQ ID NO: 1150614 - RNA, 24 nt, Human
cucaugccuguaaucccagcacuu

SEQ ID NO: 1150615 - RNA, 19 nt, Human
cucugucucaaaaaaaaaa

SEQ ID NO: 1150616 - RNA, 21 nt, Human
cuguaaucccagcuacucggg

SEQ ID NO: 1150617 - RNA, 19 nt, Human
cuugaaccugggaggugga

SEQ ID NO: 1150618 - RNA, 19 nt, Human
gaaaccucgucucuacuaa

SEQ ID NO: 1150619 - RNA, 23 nt, Human
gaaacuagccuggccaacauggu

SEQ ID NO: 1150620 - RNA, 22 nt, Human
gaacggggcagggggcuagcuc

SEQ ID NO: 1150621 - RNA, 21 nt, Human
gaagacuuugguuucauccuc

SEQ ID NO: 1150622 - RNA, 22 nt, Human
gaagugcuggcugcccuuauga

SEQ ID NO: 1150623 - RNA, 24 nt, Human
gacagagccagacucugucucaaa

SEQ ID NO: 1150624 - RNA, 24 nt, Human
gaccagucuucuggaagaaacugg

SEQ ID NO: 1150625 - RNA, 19 nt, Human
gaccuaaggcagaaaggau

SEQ ID NO: 1150626 - RNA, 18 nt, Human
gagaaaaggccagcugca

SEQ ID NO: 1150627 - RNA, 23 nt, Human
gagaaucgcuugaacccaggagg

SEQ ID NO: 1150628 - RNA, 23 nt, Human
gagaaucgcuugaaccugggagg

SEQ ID NO: 1150629 - RNA, 23 nt, Human
gagauugcgccacugcacuccag

SEQ ID NO: 1150630 - RNA, 22 nt, Human
gagcaaucuuaaaauccaccag

SEQ ID NO: 1150631 - RNA, 26 nt, Human
gagggacaucucaaagaaaaggaagg

SEQ ID NO: 1150632 - RNA, 19 nt, Human
gagguugcagugagccaag

SEQ ID NO: 1150633 - RNA, 24 nt, Human
gaucaccuaaggucaggaguuuga

SEQ ID NO: 1150634 - RNA, 20 nt, Human
gcaaggcaacccacaguccu

SEQ ID NO: 1150635 - RNA, 24 nt, Human
gcacuccagccuggaugacagagc

SEQ ID NO: 1150636 - RNA, 20 nt, Human
gcacuugucacgaaagggca

SEQ ID NO: 1150637 - RNA, 19 nt, Human
gcagagaacggggcagggg

SEQ ID NO: 1150638 - RNA, 22 nt, Human
gcaggagaaucgcuugaaccca

SEQ ID NO: 1150639 - RNA, 24 nt, Human
gccaacauggugaaaccucgucuc

SEQ ID NO: 1150640 - RNA, 20 nt, Human
gccaagaccacgccacuaca

SEQ ID NO: 1150641 - RNA, 22 nt, Human
gccacuacacuccagccugggc

SEQ ID NO: 1150642 - RNA, 20 nt, Human
gcccuaagaccuaaggcaga

SEQ ID NO: 1150643 - RNA, 25 nt, Human
ggacagacagcacagaugagucccu

SEQ ID NO: 1150644 - RNA, 22 nt, Human
ggaggcagagguugcagugagc

SEQ ID NO: 1150645 - RNA, 19 nt, Human
ggagggcaguguggccuuu

SEQ ID NO: 1150646 - RNA, 18 nt, Human
ggagguugcagugagcca

SEQ ID NO: 1150647 - RNA, 20 nt, Human
ggagguugcagugagccaag

SEQ ID NO: 1150648 - RNA, 25 nt, Human
ggcagaucaccuaaggucaggaguu

SEQ ID NO: 1150649 - RNA, 25 nt, Human
gggacaucucaaagaaaaggaaggg

SEQ ID NO: 1150650 - RNA, 22 nt, Human
gggauuuugcagacgaagguaa

SEQ ID NO: 1150651 - RNA, 24 nt, Human
ggugccccauuggugccaagagca

SEQ ID NO: 1150652 - RNA, 23 nt, Human
gguggcucaugccuguaauccca

SEQ ID NO: 1150653 - RNA, 24 nt, Human
gguggcucaugccuguaaucccag

SEQ ID NO: 1150654 - RNA, 19 nt, Human
guagaacuccuucagauuc

SEQ ID NO: 1150655 - RNA, 21 nt, Human
guagaacuccuucagauucug

SEQ ID NO: 1150656 - RNA, 19 nt, Human
gucccuagacaaggucucc

SEQ ID NO: 1150657 - RNA, 21 nt, Human
guugcagugagcugagauugc

SEQ ID NO: 1150658 - RNA, 23 nt, Human
uaaggagaugguuuuauucaagc

SEQ ID NO: 1150659 - RNA, 23 nt, Human
uaaggagaugguuuuauucaagc

SEQ ID NO: 1150660 - RNA, 20 nt, Human
uaaggcaggagaaucgcuug

SEQ ID NO: 1150661 - RNA, 24 nt, Human
uaaggcaggagaaucgcuugaacc

SEQ ID NO: 1150662 - RNA, 19 nt, Human
uacccacucacacacaccu

SEQ ID NO: 1150663 - RNA, 22 nt, Human
uagaugaacagggcagaagaug

SEQ ID NO: 1150664 - RNA, 24 nt, Human
uagccuggccaacauggugaaacc

SEQ ID NO: 1150665 - RNA, 21 nt, Human
ucaaaaaaaaaaagagggagg

SEQ ID NO: 1150666 - RNA, 18 nt, Human
ucaacccucugcccuaag

SEQ ID NO: 1150667 - RNA, 19 nt, Human
ucauccaccaggaauccaa

SEQ ID NO: 1150668 - RNA, 22 nt, Human
ucaugccuguaaucccagcacu

SEQ ID NO: 1150669 - RNA, 21 nt, Human
uccaagagguuagcagaagaa

SEQ ID NO: 1150670 - RNA, 24 nt, Human
uccagccuggaugacagagccaga

SEQ ID NO: 1150671 - RNA, 23 nt, Human
uccccccagcacacauacucacc

SEQ ID NO: 1150672 - RNA, 24 nt, Human
ucgcuugaaccugggagguggagg

SEQ ID NO: 1150673 - RNA, 22 nt, Human
ucucuacuaaaaauacaaaaaa

SEQ ID NO: 1150674 - RNA, 19 nt, Human
ucugucucaaaaaaaaaaa

SEQ ID NO: 1150675 - RNA, 22 nt, Human
ucuucuggcaagacauacucag

SEQ ID NO: 1150676 - RNA, 21 nt, Human
ugaaacaguuaucacugagca

SEQ ID NO: 1150677 - RNA, 27 nt, Human
ugaaccucccccacauuuacacaucau

SEQ ID NO: 1150678 - RNA, 24 nt, Human
ugaaccugggagguggagguugca

SEQ ID NO: 1150679 - RNA, 19 nt, Human
ugaccagcccagccagcag

SEQ ID NO: 1150680 - RNA, 18 nt, Human
ugacuuccugaccagccc

SEQ ID NO: 1150681 - RNA, 22 nt, Human
ugagcugagauugcgccacugc

SEQ ID NO: 1150682 - RNA, 20 nt, Human
ugaggcaggagaaucgcuug

SEQ ID NO: 1150683 - RNA, 24 nt, Human
ugaggcaggagaaucgcuugaacc

SEQ ID NO: 1150684 - RNA, 25 nt, Human
ugaggcaggagaaucgcuugaaccc

SEQ ID NO: 1150685 - RNA, 21 nt, Human
ugcaacccuugcuggacaccc

SEQ ID NO: 1150686 - RNA, 21 nt, Human
ugcagagaacggggcaggggg

SEQ ID NO: 1150687 - RNA, 22 nt, Human
ugcagagaacggggcagggggc

SEQ ID NO: 1150688 - RNA, 18 nt, Human
ugccugggguggucagua

SEQ ID NO: 1150689 - RNA, 19 nt, Human
ugccugggguggucaguag

SEQ ID NO: 1150690 - RNA, 23 nt, Human
ugccuguaaucccagcacuuugg

SEQ ID NO: 1150691 - RNA, 23 nt, Human
ugccuguaaucccagcacuuugg

SEQ ID NO: 1150692 - RNA, 24 nt, Human
ugccuguaaucccagcacuuuggg

SEQ ID NO: 1150693 - RNA, 24 nt, Human
ugccuguagucccagcuacugcgg

SEQ ID NO: 1150694 - RNA, 24 nt, Human
ugcuccuuuccuauuccccuccca

SEQ ID NO: 1150695 - RNA, 24 nt, Human
uggccaacauggugaaaccucguc

SEQ ID NO: 1150696 - RNA, 24 nt, Human
uggccaggcgcgguggcucaugcc

SEQ ID NO: 1150697 - RNA, 22 nt, Human
uggcucaugccuguaaucccag

SEQ ID NO: 1150698 - RNA, 24 nt, Human
uggcucaugccuguaaucccagca

SEQ ID NO: 1150699 - RNA, 20 nt, Human
ugggaggccgaagugggcag

SEQ ID NO: 1150700 - RNA, 24 nt, Human
ugggaggccgaagugggcagauca

SEQ ID NO: 1150701 - RNA, 20 nt, Human
ugggagggcaguguggccuu

SEQ ID NO: 1150702 - RNA, 21 nt, Human
ugggagggcaguguggccuuu

SEQ ID NO: 1150703 - RNA, 18 nt, Human
ugggagguggagguugca

SEQ ID NO: 1150704 - RNA, 29 nt, Human
ugggagguggagguugcagugacaacggu

SEQ ID NO: 1150705 - RNA, 24 nt, Human
ugggagguggagguugcagugagc

SEQ ID NO: 1150706 - RNA, 24 nt, Human
ugggcagaucaccuaaggucagga

SEQ ID NO: 1150707 - RNA, 18 nt, Human
uggugcaugccuguaguc

SEQ ID NO: 1150708 - RNA, 24 nt, Human
ugguggugcaugccuguaguccca

SEQ ID NO: 1150709 - RNA, 26 nt, Human
ugucagggagucuucugaacucaggg

SEQ ID NO: 1150710 - RNA, 24 nt, Human
uguccgagggaugagccacaggag

SEQ ID NO: 1150711 - RNA, 24 nt, Human
uuaaaguaaaagccaguaguugaa

SEQ ID NO: 1150712 - RNA, 21 nt, Human
uuagauuacaggaugucaggg

SEQ ID NO: 1150713 - RNA, 20 nt, Human
uuagcuaggcaugguggugc

SEQ ID NO: 1150714 - RNA, 24 nt, Human
uuagcuaggcaugguggugcaugc

SEQ ID NO: 1150715 - RNA, 18 nt, Human
uuccugaccagcccagcc

SEQ ID NO: 1150716 - RNA, 21 nt, Human
uucugggagaaaaggccagcu

SEQ ID NO: 1150717 - RNA, 26 nt, Human
uucugggccaccucucauugaaccuc

SEQ ID NO: 1150718 - RNA, 24 nt, Human
uugaaccugggagguggagguugc

SEQ ID NO: 1150719 - RNA, 20 nt, Human
uugcagugagccaagaccac

SEQ ID NO: 1150720 - RNA, 22 nt, Human
uugcagugagcugagauugcgc

SEQ ID NO: 1150721 - RNA, 23 nt, Human
uugcuggacaccccacugcuccu

SEQ ID NO: 1150722 - RNA, 23 nt, Human
uuuuugaguuucuuaaagcuguc

SEQ ID NO: 1150723 - RNA, 22 nt, Human
aaacauccacugagacucccca

SEQ ID NO: 1150724 - RNA, 24 nt, Human
aacccucgcugcccacagcagccc

SEQ ID NO: 1150725 - RNA, 21 nt, Human
aagcaaaagucaaacauccac

SEQ ID NO: 1150726 - RNA, 21 nt, Human
aagucaaacauccacugagac

SEQ ID NO: 1150727 - RNA, 22 nt, Human
accgcaggcgccgacacgcugg

SEQ ID NO: 1150728 - RNA, 25 nt, Human
aucacuacccccaccagaauucaga

SEQ ID NO: 1150729 - RNA, 25 nt, Human
cagaacacacaugagucuauaaccc

SEQ ID NO: 1150730 - RNA, 20 nt, Human
cagcccgaagaaaaccgcag

SEQ ID NO: 1150731 - RNA, 22 nt, Human
caucuucuaccuccuuugggga

SEQ ID NO: 1150732 - RNA, 24 nt, Human
ccacugagacuccccaucaaugag

SEQ ID NO: 1150733 - RNA, 23 nt, Human
ccaucaaugaggcccaucccgaa

SEQ ID NO: 1150734 - RNA, 24 nt, Human
cccacagcagcccuugucccuaac

SEQ ID NO: 1150735 - RNA, 23 nt, Human
cccuaacagguuuuccuuuaagg

SEQ ID NO: 1150736 - RNA, 20 nt, Human
ccucgcugcccacagcagcc

SEQ ID NO: 1150737 - RNA, 19 nt, Human
cuugaccuuuuuuccugca

SEQ ID NO: 1150738 - RNA, 21 nt, Human
gcgcgugacggacgcgggcac

SEQ ID NO: 1150739 - RNA, 19 nt, Human
guagaaagcaaaagucaaa

SEQ ID NO: 1150740 - RNA, 24 nt, Human
uaacagguuuuccuuuaaggcugu

SEQ ID NO: 1150741 - RNA, 20 nt, Human
uacccccaccagaauucaga

SEQ ID NO: 1150742 - RNA, 22 nt, Human
uacccccaccagaauucagaac

SEQ ID NO: 1150743 - RNA, 28 nt, Human
uaccuuuacuucgccagucagauaauuc

SEQ ID NO: 1150744 - RNA, 22 nt, Human
ucacuacccccaccagaauuca

SEQ ID NO: 1150745 - RNA, 18 nt, Human
uccacugagacuccccau

SEQ ID NO: 1150746 - RNA, 19 nt, Human
uccccaucaaugaggccca

SEQ ID NO: 1150747 - RNA, 26 nt, Human
ucccgaagaaucagccgaccauuggg

SEQ ID NO: 1150748 - RNA, 26 nt, Human
ucccgaagaaucagccgggaauugcc

SEQ ID NO: 1150749 - RNA, 19 nt, Human
ucgcugcccacagcagccc

SEQ ID NO: 1150750 - RNA, 23 nt, Human
ucuuccccaucuucuaccuccuu

SEQ ID NO: 1150751 - RNA, 23 nt, Human
ugaggcccaucccgaagaaucag

SEQ ID NO: 1150752 - RNA, 18 nt, Human
ugcaagccaccgcgcgug

SEQ ID NO: 1150753 - RNA, 21 nt, Human
ugcaauucaaguaccuuuacu

SEQ ID NO: 1150754 - RNA, 19 nt, Human
ugccaaggcaguuuucaga

SEQ ID NO: 1150755 - RNA, 22 nt, Human
uuccccaucuucuaccuccuuu

SEQ ID NO: 1150756 - RNA, 25 nt, Human
aaggagcccagucccauuucuuggc

SEQ ID NO: 1150757 - RNA, 21 nt, Human
agaaggucauaaauccaagga

SEQ ID NO: 1150758 - RNA, 20 nt, Human
agucaauucuucugcagucu

SEQ ID NO: 1150759 - RNA, 24 nt, Human
cacaggugggaggcuggcgugcga

SEQ ID NO: 1150760 - RNA, 23 nt, Human
cacugcugccagccuucccuuuc

SEQ ID NO: 1150761 - RNA, 21 nt, Human
cagggcuggggagggagaggg

SEQ ID NO: 1150762 - RNA, 18 nt, Human
ccaaggagcccaguccca

SEQ ID NO: 1150763 - RNA, 21 nt, Human
ccaggcuggacguggcuucca

SEQ ID NO: 1150764 - RNA, 25 nt, Human
ccucacugcugccagccuucccuuu

SEQ ID NO: 1150765 - RNA, 21 nt, Human
ccuuugucucacaggugggag

SEQ ID NO: 1150766 - RNA, 20 nt, Human
cggggccaggcuggacgugg

SEQ ID NO: 1150767 - RNA, 23 nt, Human
cuggagcagucauuggguggagg

SEQ ID NO: 1150768 - RNA, 21 nt, Human
cuuggccuucagggcugggga

SEQ ID NO: 1150769 - RNA, 19 nt, Human
gccaggaacgaucagacug

SEQ ID NO: 1150770 - RNA, 21 nt, Human
ggaacauugccaaggucaaaa

SEQ ID NO: 1150771 - RNA, 19 nt, Human
ucauaaauccaaggagccc

SEQ ID NO: 1150772 - RNA, 21 nt, Human
ugccaaggucaaaaaaccuca

SEQ ID NO: 1150773 - RNA, 18 nt, Human
uuccagugacagggcccu

SEQ ID NO: 1150774 - RNA, 22 nt, Human
uuucccaucaguccuccguuag

SEQ ID NO: 1150775 - RNA, 21 nt, Human
aaaaaugcuucaaaaauccua

SEQ ID NO: 1150776 - RNA, 19 nt, Human
aagcaaagccaucaaauau

SEQ ID NO: 1150777 - RNA, 20 nt, Human
aaguucuccugugacuuuuc

SEQ ID NO: 1150778 - RNA, 22 nt, Human
ucaaauaucuauaaaaugugac

SEQ ID NO: 1150779 - RNA, 21 nt, Human
ugccauauugcucuucuacuc

SEQ ID NO: 1150780 - RNA, 19 nt, Human
uuuaugccauauugcucuu

SEQ ID NO: 1150781 - RNA, 21 nt, Human
uuuuaugccauauugcucuuc

SEQ ID NO: 1150782 - RNA, 27 nt, Human
acaaaguagcaagugucaugucagaac

SEQ ID NO: 1150783 - RNA, 22 nt, Human
acuucagucuuuucuucaauau

SEQ ID NO: 1150784 - RNA, 22 nt, Human
acuuugagacuacuuugcaguu

SEQ ID NO: 1150785 - RNA, 20 nt, Human
agaaggaaccgucagaagca

SEQ ID NO: 1150786 - RNA, 19 nt, Human
agcuguaaaauugcaaaca

SEQ ID NO: 1150787 - RNA, 22 nt, Human
caaaaagaacauuuuacagaaa

SEQ ID NO: 1150788 - RNA, 19 nt, Human
caaguacaaacuaaaccuu

SEQ ID NO: 1150789 - RNA, 20 nt, Human
cagaaagggaaccguaacau

SEQ ID NO: 1150790 - RNA, 21 nt, Human
cagaacaccaugcuagaugga

SEQ ID NO: 1150791 - RNA, 22 nt, Human
cagcuucaucaagagaaugaaa

SEQ ID NO: 1150792 - RNA, 27 nt, Human
cauccuugucuucacuacugucagagg

SEQ ID NO: 1150793 - RNA, 19 nt, Human
cauuuuacagaaagggaac

SEQ ID NO: 1150794 - RNA, 27 nt, Human
ccaccaccuuguuaauuuuuuaccugg

SEQ ID NO: 1150795 - RNA, 18 nt, Human
ccucuaaaauacuuugag

SEQ ID NO: 1150796 - RNA, 19 nt, Human
ccuuuuuguuugaagcucc

SEQ ID NO: 1150797 - RNA, 21 nt, Human
cuggaacucagaacaccaugc

SEQ ID NO: 1150798 - RNA, 18 nt, Human
cuuuuuguuugaagcucc

SEQ ID NO: 1150799 - RNA, 23 nt, Human
gaaccguaacauuacacaaaaaa

SEQ ID NO: 1150800 - RNA, 24 nt, Human
gcaaugcuuucuuuagaucaccaa

SEQ ID NO: 1150801 - RNA, 18 nt, Human
ggugggcacuuuguuuug

SEQ ID NO: 1150802 - RNA, 23 nt, Human
uaaugcuaacaaauaacgaaaca

SEQ ID NO: 1150803 - RNA, 20 nt, Human
uacagaaagggaaccguaac

SEQ ID NO: 1150804 - RNA, 22 nt, Human
uaccugccaucacagauggccu

SEQ ID NO: 1150805 - RNA, 20 nt, Human
uagaucaccaaaaagaacau

SEQ ID NO: 1150806 - RNA, 22 nt, Human
uagcuguaaaauugcaaacaag

SEQ ID NO: 1150807 - RNA, 21 nt, Human
uauuuuuucauccuugucuuc

SEQ ID NO: 1150808 - RNA, 19 nt, Human
ucaauauggauucccucua

SEQ ID NO: 1150809 - RNA, 23 nt, Human
ucaggcaccuaggaaauaauucu

SEQ ID NO: 1150810 - RNA, 22 nt, Human
ucaugucagaacacuuucaggc

SEQ ID NO: 1150811 - RNA, 18 nt, Human
ugaagcuccgguucuucu

SEQ ID NO: 1150812 - RNA, 21 nt, Human
ugcaaacaagaaaggcaaugc

SEQ ID NO: 1150813 - RNA, 20 nt, Human
uggccuaaccuauguacacu

SEQ ID NO: 1150814 - RNA, 21 nt, Human
uuaaugcuaacaaauaacgaa

SEQ ID NO: 1150815 - RNA, 19 nt, Human
uucacagagaaggaaccgu

SEQ ID NO: 1150816 - RNA, 24 nt, Human
uugugcucuggauaaaaacccacc

SEQ ID NO: 1150817 - RNA, 18 nt, Human
uuucacagagaaggaacc

SEQ ID NO: 1150818 - RNA, 23 nt, Human
aaauaaguugaggccagagccag

SEQ ID NO: 1150819 - RNA, 20 nt, Human
aacaaagugucggaccaaaa

SEQ ID NO: 1150820 - RNA, 21 nt, Human
aacugagccuggaggggccca

SEQ ID NO: 1150821 - RNA, 21 nt, Human
aagcaccccuacaacagagga

SEQ ID NO: 1150822 - RNA, 25 nt, Human
aagcaucacagucugagguacaagc

SEQ ID NO: 1150823 - RNA, 21 nt, Human
aaucagucccucaacaugaag

SEQ ID NO: 1150824 - RNA, 23 nt, Human
acaacagaggagucagcugugga

SEQ ID NO: 1150825 - RNA, 18 nt, Human
acauugcaaacacaauca

SEQ ID NO: 1150826 - RNA, 24 nt, Human
acgcacuucagguuguccuuaacc

SEQ ID NO: 1150827 - RNA, 23 nt, Human
agaccacuggcugcagcagagaa

SEQ ID NO: 1150828 - RNA, 23 nt, Human
agagaggaaggaggagcuccugg

SEQ ID NO: 1150829 - RNA, 22 nt, Human
agaggaaggaggagcuccuggc

SEQ ID NO: 1150830 - RNA, 19 nt, Human
agaggcgcguccugcagga

SEQ ID NO: 1150831 - RNA, 19 nt, Human
agaugcuggaggcagguga

SEQ ID NO: 1150832 - RNA, 20 nt, Human
agcaggaggcacagccaagg

SEQ ID NO: 1150833 - RNA, 18 nt, Human
agccgaacaggcuccagg

SEQ ID NO: 1150834 - RNA, 22 nt, Human
agcugcuggaagaacagcucac

SEQ ID NO: 1150835 - RNA, 22 nt, Human
aggcagaugcccugaggccagg

SEQ ID NO: 1150836 - RNA, 18 nt, Human
aggccaggguuucccugc

SEQ ID NO: 1150837 - RNA, 22 nt, Human
aggccgcagaggcucagcggcg

SEQ ID NO: 1150838 - RNA, 24 nt, Human
aggcggagaggcgcguccugcagg

SEQ ID NO: 1150839 - RNA, 19 nt, Human
agggugaccaggagggcag

SEQ ID NO: 1150840 - RNA, 27 nt, Human
aguaacaaagugucggaccaaaaaaaa

SEQ ID NO: 1150841 - RNA, 18 nt, Human
caaauuccauaaaagcug

SEQ ID NO: 1150842 - RNA, 20 nt, Human
caacgcacuucagguugucc

SEQ ID NO: 1150843 - RNA, 24 nt, Human
caccucaggcuuuaucccaagggc

SEQ ID NO: 1150844 - RNA, 19 nt, Human
cacgcuagaccagaccccc

SEQ ID NO: 1150845 - RNA, 21 nt, Human
cacgcuagaccagacccccag

SEQ ID NO: 1150846 - RNA, 22 nt, Human
cagaggagucagcuguggacac

SEQ ID NO: 1150847 - RNA, 18 nt, Human
cagagugggcacacggcc

SEQ ID NO: 1150848 - RNA, 20 nt, Human
cagcagagaaccugccaagc

SEQ ID NO: 1150849 - RNA, 22 nt, Human
cagcagagaaccugccaagccc

SEQ ID NO: 1150850 - RNA, 25 nt, Human
cagcccacgggguggccucacaccg

SEQ ID NO: 1150851 - RNA, 24 nt, Human
cagggccucccacccccagugucu

SEQ ID NO: 1150852 - RNA, 18 nt, Human
ccaagcccaagucuuugc

SEQ ID NO: 1150853 - RNA, 21 nt, Human
ccaagggcaguaggagccacc

SEQ ID NO: 1150854 - RNA, 30 nt, Human
ccaaugacggacgccuugcaaucuccuucu

SEQ ID NO: 1150855 - RNA, 22 nt, Human
ccacccccagugucuccaggug

SEQ ID NO: 1150856 - RNA, 27 nt, Human
ccacgcccagcgucuucggcccaggug

SEQ ID NO: 1150857 - RNA, 20 nt, Human
ccacgggguggccucacacc

SEQ ID NO: 1150858 - RNA, 25 nt, Human
ccagaaggagcuggccauuucuccc

SEQ ID NO: 1150859 - RNA, 21 nt, Human
ccagaaggcugagguaucgcc

SEQ ID NO: 1150860 - RNA, 23 nt, Human
ccagacggucuaggcagaugccc

SEQ ID NO: 1150861 - RNA, 22 nt, Human
ccagagccagccuuagauggaa

SEQ ID NO: 1150862 - RNA, 22 nt, Human
cccaagggcaguaggagccacc

SEQ ID NO: 1150863 - RNA, 24 nt, Human
cccaaucccuggcccacgcccagc

SEQ ID NO: 1150864 - RNA, 27 nt, Human
cccccagugucuccagguggacccugu

SEQ ID NO: 1150865 - RNA, 18 nt, Human
ccggccucucaagcuguc

SEQ ID NO: 1150866 - RNA, 20 nt, Human
ccucacaccgaucccucuuu

SEQ ID NO: 1150867 - RNA, 21 nt, Human
ccucaggaaggugcaagggcu

SEQ ID NO: 1150868 - RNA, 19 nt, Human
ccucugagaccacuggcug

SEQ ID NO: 1150869 - RNA, 21 nt, Human
ccugcagggccucccaccccc

SEQ ID NO: 1150870 - RNA, 18 nt, Human
cgcaugcuucuguguccu

SEQ ID NO: 1150871 - RNA, 25 nt, Human
cgcccagcgucuucggcccaggugc

SEQ ID NO: 1150872 - RNA, 18 nt, Human
cggccgaggcgcaggcgg

SEQ ID NO: 1150873 - RNA, 19 nt, Human
cggcgggcaggaggcggcc

SEQ ID NO: 1150874 - RNA, 22 nt, Human
cucaggcuuccuggggguccac

SEQ ID NO: 1150875 - RNA, 24 nt, Human
cucccaaucccuggcccacgccca

SEQ ID NO: 1150876 - RNA, 20 nt, Human
cucucaagcugucugcacag

SEQ ID NO: 1150877 - RNA, 18 nt, Human
cucuccuugaugccggcc

SEQ ID NO: 1150878 - RNA, 20 nt, Human
cuggcccacgcaugcuucug

SEQ ID NO: 1150879 - RNA, 24 nt, Human
cuugcaaucuccuucacacgucug

SEQ ID NO: 1150880 - RNA, 27 nt, Human
cuuggggagggucaccucaggcuuuau

SEQ ID NO: 1150881 - RNA, 22 nt, Human
cuuugagguuacauugcaaaca

SEQ ID NO: 1150882 - RNA, 19 nt, Human
gacccaggcaccauccagu

SEQ ID NO: 1150883 - RNA, 26 nt, Human
gacuuucgucucaggcuuccuggggg

SEQ ID NO: 1150884 - RNA, 20 nt, Human
gagccagccuuagauggaac

SEQ ID NO: 1150885 - RNA, 21 nt, Human
gaggcggccgaggcgcaggcg

SEQ ID NO: 1150886 - RNA, 23 nt, Human
gcacacggccccagcccacgggg

SEQ ID NO: 1150887 - RNA, 21 nt, Human
gcagagacccaggcaccaucc

SEQ ID NO: 1150888 - RNA, 21 nt, Human
gcagagugggcacacggcccc

SEQ ID NO: 1150889 - RNA, 19 nt, Human
gcaggugagggcagagugg

SEQ ID NO: 1150890 - RNA, 22 nt, Human
gcccacgcuagaccagaccccc

SEQ ID NO: 1150891 - RNA, 24 nt, Human
gcgacaggugagggugaccaggag

SEQ ID NO: 1150892 - RNA, 23 nt, Human
gcggugguccuuagagaggaagg

SEQ ID NO: 1150893 - RNA, 24 nt, Human
ggaaacugagccuggaggggccca

SEQ ID NO: 1150894 - RNA, 27 nt, Human
ggccugagccgaacaggcuccaggagc

SEQ ID NO: 1150895 - RNA, 21 nt, Human
gggagggucaccucaggcuuu

SEQ ID NO: 1150896 - RNA, 18 nt, Human
gggcaggaggcggccgag

SEQ ID NO: 1150897 - RNA, 26 nt, Human
gggccugagccgaacaggcuccagga

SEQ ID NO: 1150898 - RNA, 20 nt, Human
gucggaccaaaaaaaaaagu

SEQ ID NO: 1150899 - RNA, 19 nt, Human
gugaagcaucacagucuga

SEQ ID NO: 1150900 - RNA, 19 nt, Human
uaacaaagugucggaccaa

SEQ ID NO: 1150901 - RNA, 24 nt, Human
uagagaggaaggaggagcuccugg

SEQ ID NO: 1150902 - RNA, 21 nt, Human
uaggagccaccaaggcuggag

SEQ ID NO: 1150903 - RNA, 23 nt, Human
ucaucaagaccugaccaggccaa

SEQ ID NO: 1150904 - RNA, 22 nt, Human
ucccccgcugacagauggggaa

SEQ ID NO: 1150905 - RNA, 22 nt, Human
uccucaccuggcaggugagggc

SEQ ID NO: 1150906 - RNA, 24 nt, Human
uccuggggguccacaccuuugagg

SEQ ID NO: 1150907 - RNA, 25 nt, Human
ucggaccaaaaaaaaaaguguuuuc

SEQ ID NO: 1150908 - RNA, 19 nt, Human
ucucaaggcccaacagcug

SEQ ID NO: 1150909 - RNA, 24 nt, Human
ucucagaaacucgggcccucccaa

SEQ ID NO: 1150910 - RNA, 18 nt, Human
ucuccagggcuucagggc

SEQ ID NO: 1150911 - RNA, 20 nt, Human
ucuccagggcuucagggcuc

SEQ ID NO: 1150912 - RNA, 21 nt, Human
ucuccagggcuucagggcugg

SEQ ID NO: 1150913 - RNA, 19 nt, Human
ucuccagguggacccugug

SEQ ID NO: 1150914 - RNA, 18 nt, Human
ucucccacaaaacccuca

SEQ ID NO: 1150915 - RNA, 22 nt, Human
ucucccacaaaacccucaggaa

SEQ ID NO: 1150916 - RNA, 22 nt, Human
ugaagagagcaggaggcacagc

SEQ ID NO: 1150917 - RNA, 18 nt, Human
ugaagcaucacagucuga

SEQ ID NO: 1150918 - RNA, 25 nt, Human
ugagccuggaggggcccacagggag

SEQ ID NO: 1150919 - RNA, 21 nt, Human
ugagggcagagugggcacacg

SEQ ID NO: 1150920 - RNA, 22 nt, Human
ugagggcagagugggcacacgg

SEQ ID NO: 1150921 - RNA, 26 nt, Human
ugagggcagagugggcacacggcccc

SEQ ID NO: 1150922 - RNA, 24 nt, Human
ugcagggggagcucgcggcgcugc

SEQ ID NO: 1150923 - RNA, 26 nt, Human
ugccagacggucuaggcagaugcccu

SEQ ID NO: 1150924 - RNA, 22 nt, Human
uggaacgaccccgcucucagaa

SEQ ID NO: 1150925 - RNA, 23 nt, Human
uggaagaacagcucaccaacuug

SEQ ID NO: 1150926 - RNA, 19 nt, Human
uggcaggugagggcagagu

SEQ ID NO: 1150927 - RNA, 22 nt, Human
uggggaaacugagccuggaggg

SEQ ID NO: 1150928 - RNA, 18 nt, Human
ugugauggcagaaggggc

SEQ ID NO: 1150929 - RNA, 23 nt, Human
uguguccucaccuggcaggugag

SEQ ID NO: 1150930 - RNA, 19 nt, Human
uucagaauccggccacccc

SEQ ID NO: 1150931 - RNA, 22 nt, Human
uucuguucauccuccucuccuu

SEQ ID NO: 1150932 - RNA, 25 nt, Human
uuggagcacaggugccagaaggcug

SEQ ID NO: 1150933 - RNA, 20 nt, Human
uuugcagaaucaggacgagg

SEQ ID NO: 1150934 - RNA, 21 nt, Human
uuuucaaaauugcacgaaggg

SEQ ID NO: 1150935 - RNA, 22 nt, Human
aaagacccugcagcuaggaccc

SEQ ID NO: 1150936 - RNA, 18 nt, Human
aaaggcucuucagggagg

SEQ ID NO: 1150937 - RNA, 29 nt, Human
aagcaaaugacagaaagaaaagggacccc

SEQ ID NO: 1150938 - RNA, 18 nt, Human
aagcagaguggggaugac

SEQ ID NO: 1150939 - RNA, 20 nt, Human
aagcagaguggggaugacuu

SEQ ID NO: 1150940 - RNA, 22 nt, Human
aagcaggagggagcaggcgcgg

SEQ ID NO: 1150941 - RNA, 23 nt, Human
acacacacacacacacacacaca

SEQ ID NO: 1150942 - RNA, 23 nt, Human
acacacacacacacacacacaca

SEQ ID NO: 1150943 - RNA, 23 nt, Human
acacacacacacacacacacaca

SEQ ID NO: 1150944 - RNA, 23 nt, Human
acacacacacacacacacacaca

SEQ ID NO: 1150945 - RNA, 24 nt, Human
acacacacacacacacacacacag

SEQ ID NO: 1150946 - RNA, 24 nt, Human
acacacacacacacacacacacag

SEQ ID NO: 1150947 - RNA, 21 nt, Human
acacacacacacacacacgug

SEQ ID NO: 1150948 - RNA, 24 nt, Human
acacacacacacacgugcacaauc

SEQ ID NO: 1150949 - RNA, 21 nt, Human
acacacacacacgugcacaau

SEQ ID NO: 1150950 - RNA, 24 nt, Human
acagaugaggacacggaggaugug

SEQ ID NO: 1150951 - RNA, 21 nt, Human
accagccagcccacaucccaa

SEQ ID NO: 1150952 - RNA, 22 nt, Human
acccacgccaagaagagaaacc

SEQ ID NO: 1150953 - RNA, 18 nt, Human
accccgcccuccugccag

SEQ ID NO: 1150954 - RNA, 19 nt, Human
acccucccuggccuguguu

SEQ ID NO: 1150955 - RNA, 21 nt, Human
accucagcagcaacccacgcc

SEQ ID NO: 1150956 - RNA, 19 nt, Human
acuuugaguggucaaagga

SEQ ID NO: 1150957 - RNA, 26 nt, Human
agaauaacagaugaggacacggagga

SEQ ID NO: 1150958 - RNA, 19 nt, Human
agcaggagggagcaggcgc

SEQ ID NO: 1150959 - RNA, 22 nt, Human
aggcagaggaggguuccagcaa

SEQ ID NO: 1150960 - RNA, 27 nt, Human
aggcagugcuguggccuggcccggcgg

SEQ ID NO: 1150961 - RNA, 22 nt, Human
agggaggcaaaggggagagaag

SEQ ID NO: 1150962 - RNA, 20 nt, Human
auccauccuuggaccaacac

SEQ ID NO: 1150963 - RNA, 18 nt, Human
augggauuuccuggagag

SEQ ID NO: 1150964 - RNA, 21 nt, Human
caaaugacagaaagaaaauac

SEQ ID NO: 1150965 - RNA, 19 nt, Human
caacagcagcuugaugacu

SEQ ID NO: 1150966 - RNA, 24 nt, Human
caaccccccccacagcgguggguc

SEQ ID NO: 1150967 - RNA, 19 nt, Human
caacugugacccucacaaa

SEQ ID NO: 1150968 - RNA, 21 nt, Human
caagaaaggccagccucuguu

SEQ ID NO: 1150969 - RNA, 21 nt, Human
caagaagagaaacccacagag

SEQ ID NO: 1150970 - RNA, 23 nt, Human
caaugggcuucaaagcaaaugac

SEQ ID NO: 1150971 - RNA, 20 nt, Human
cacacacacacacacacaca

SEQ ID NO: 1150972 - RNA, 20 nt, Human
cacacacacacacacacaca

SEQ ID NO: 1150973 - RNA, 20 nt, Human
cacacacacacacacacaca

SEQ ID NO: 1150974 - RNA, 20 nt, Human
cacacacacacacacacaca

SEQ ID NO: 1150975 - RNA, 20 nt, Human
cacacacacacacacacaca

SEQ ID NO: 1150976 - RNA, 20 nt, Human
cacacacacacacacacaca

SEQ ID NO: 1150977 - RNA, 22 nt, Human
cacacacacacacacacacaca

SEQ ID NO: 1150978 - RNA, 26 nt, Human
cacacacacacacacacacacacaca

SEQ ID NO: 1150979 - RNA, 26 nt, Human
cacacacacacacacacacacacacg

SEQ ID NO: 1150980 - RNA, 26 nt, Human
cacacacacacacacacacacgugca

SEQ ID NO: 1150981 - RNA, 25 nt, Human
cacacacacacacacacacgugcac

SEQ ID NO: 1150982 - RNA, 19 nt, Human
cacacacauucuaaagcag

SEQ ID NO: 1150983 - RNA, 21 nt, Human
caccaauauuuaggagguuaa

SEQ ID NO: 1150984 - RNA, 22 nt, Human
caccagccagcccacaucccaa

SEQ ID NO: 1150985 - RNA, 21 nt, Human
caccccgcccuccugccagca

SEQ ID NO: 1150986 - RNA, 25 nt, Human
cacccucugcauccauccuuggacc

SEQ ID NO: 1150987 - RNA, 21 nt, Human
cagaauaacagaugaggacac

SEQ ID NO: 1150988 - RNA, 23 nt, Human
cagagcagugucggcgcaaucac

SEQ ID NO: 1150989 - RNA, 20 nt, Human
cagcagcuugaugaccaugg

SEQ ID NO: 1150990 - RNA, 19 nt, Human
cagcauaaagaaugcacag

SEQ ID NO: 1150991 - RNA, 21 nt, Human
cagcauaaagaaugcacagaa

SEQ ID NO: 1150992 - RNA, 22 nt, Human
cagcccacaucccaagaaaggc

SEQ ID NO: 1150993 - RNA, 22 nt, Human
cagcucagagaccggggaagcc

SEQ ID NO: 1150994 - RNA, 22 nt, Human
caguggaagccuccccuaccag

SEQ ID NO: 1150995 - RNA, 21 nt, Human
cauuucuagcuuccuugggag

SEQ ID NO: 1150996 - RNA, 19 nt, Human
ccaacaccagccagcccac

SEQ ID NO: 1150997 - RNA, 19 nt, Human
ccaagaaaggccagccucu

SEQ ID NO: 1150998 - RNA, 21 nt, Human
ccaagaagagaaacccacaga

SEQ ID NO: 1150999 - RNA, 18 nt, Human
ccaagcccagugaccccc

SEQ ID NO: 1151000 - RNA, 21 nt, Human
ccaagcccagugacccccaug

SEQ ID NO: 1151001 - RNA, 24 nt, Human
ccagaauaacagaugaggacacgg

SEQ ID NO: 1151002 - RNA, 21 nt, Human
ccagccagcccacaucccaag

SEQ ID NO: 1151003 - RNA, 23 nt, Human
ccauggggacccugucccucuaa

SEQ ID NO: 1151004 - RNA, 20 nt, Human
cccaagaaaggccagccucu

SEQ ID NO: 1151005 - RNA, 23 nt, Human
cccacgccaagaagagaaaccca

SEQ ID NO: 1151006 - RNA, 23 nt, Human
ccccgcccuccugccagcauccg

SEQ ID NO: 1151007 - RNA, 20 nt, Human
ccccugcagagggaggcaaa

SEQ ID NO: 1151008 - RNA, 24 nt, Human
cccuggccuguguuccagaauaac

SEQ ID NO: 1151009 - RNA, 18 nt, Human
ccucacaaagacccugca

SEQ ID NO: 1151010 - RNA, 18 nt, Human
ccucacaaagacccugca

SEQ ID NO: 1151011 - RNA, 19 nt, Human
ccuccucaccccgcccucc

SEQ ID NO: 1151012 - RNA, 20 nt, Human
ccuccugccagcauccggcc

SEQ ID NO: 1151013 - RNA, 19 nt, Human
ccucucgaagcagaguggg

SEQ ID NO: 1151014 - RNA, 18 nt, Human
ccugcugcucuccucugg

SEQ ID NO: 1151015 - RNA, 18 nt, Human
ccuggagagggaggcaga

SEQ ID NO: 1151016 - RNA, 25 nt, Human
ccuguacccucccuggccuguguuc

SEQ ID NO: 1151017 - RNA, 22 nt, Human
ccuuuguucuggaagcuccgcc

SEQ ID NO: 1151018 - RNA, 19 nt, Human
cuaaagcagguaugggauc

SEQ ID NO: 1151019 - RNA, 28 nt, Human
cucacaaagacccugcagcuaggacccc

SEQ ID NO: 1151020 - RNA, 19 nt, Human
cucaccccgcccuccugcc

SEQ ID NO: 1151021 - RNA, 20 nt, Human
cucccuggccuguguuccag

SEQ ID NO: 1151022 - RNA, 24 nt, Human
cuccuaccacaugccaggcacugg

SEQ ID NO: 1151023 - RNA, 21 nt, Human
cucuaagccagccugcucucc

SEQ ID NO: 1151024 - RNA, 19 nt, Human
cucuccucuggaaccucag

SEQ ID NO: 1151025 - RNA, 23 nt, Human
cugagcuccuaccacaugccagg

SEQ ID NO: 1151026 - RNA, 19 nt, Human
cugcagagggaggcaaagg

SEQ ID NO: 1151027 - RNA, 19 nt, Human
cugcauccauccuuggacc

SEQ ID NO: 1151028 - RNA, 22 nt, Human
cuggaaccucagcagcaaccca

SEQ ID NO: 1151029 - RNA, 23 nt, Human
cuucaaagcaaaugacagaaaga

SEQ ID NO: 1151030 - RNA, 21 nt, Human
cuuggaccaacaccagccagc

SEQ ID NO: 1151031 - RNA, 21 nt, Human
cuuuguucuggaagcuccgcc

SEQ ID NO: 1151032 - RNA, 22 nt, Human
gaaccucagcagcaacccacgc

SEQ ID NO: 1151033 - RNA, 20 nt, Human
gaagcagaguggggaugacu

SEQ ID NO: 1151034 - RNA, 23 nt, Human
gacagaaagaaaauacgauugua

SEQ ID NO: 1151035 - RNA, 24 nt, Human
gaccaacaccagccagcccacauc

SEQ ID NO: 1151036 - RNA, 21 nt, Human
gaccagacgcccaucagcuca

SEQ ID NO: 1151037 - RNA, 21 nt, Human
gacccugcagcuaggacccag

SEQ ID NO: 1151038 - RNA, 18 nt, Human
gagagggaggcagaggag

SEQ ID NO: 1151039 - RNA, 20 nt, Human
gcagcaauugaauuauuggc

SEQ ID NO: 1151040 - RNA, 24 nt, Human
gccaagaagagaaacccacagagc

SEQ ID NO: 1151041 - RNA, 22 nt, Human
ggagagaagagcaagaguugau

SEQ ID NO: 1151042 - RNA, 21 nt, Human
ggagagggaggcagaggaggg

SEQ ID NO: 1151043 - RNA, 25 nt, Human
ggccucucgaagcagaguggggaug

SEQ ID NO: 1151044 - RNA, 24 nt, Human
ggcuuugaggaccugagagugacc

SEQ ID NO: 1151045 - RNA, 19 nt, Human
ggguuccagcauaaagaau

SEQ ID NO: 1151046 - RNA, 22 nt, Human
gucaucaacagcagcuugauga

SEQ ID NO: 1151047 - RNA, 27 nt, Human
gugaggacacacacacacacacacaca

SEQ ID NO: 1151048 - RNA, 21 nt, Human
guucaguggaagccuccccua

SEQ ID NO: 1151049 - RNA, 22 nt, Human
uaagccagccugcucucccuca

SEQ ID NO: 1151050 - RNA, 25 nt, Human
uaaggcacaaugggcuucaaagcaa

SEQ ID NO: 1151051 - RNA, 19 nt, Human
uagcuuccuugggagcucu

SEQ ID NO: 1151052 - RNA, 18 nt, Human
uaggcuggccccugggcu

SEQ ID NO: 1151053 - RNA, 23 nt, Human
uaggcuggccccugggcucccca

SEQ ID NO: 1151054 - RNA, 19 nt, Human
uaugggauuuccuggagag

SEQ ID NO: 1151055 - RNA, 21 nt, Human
ucaaagacaagcauuucuagc

SEQ ID NO: 1151056 - RNA, 27 nt, Human
ucaaagcaaaugacagaaaggaguuuc

SEQ ID NO: 1151057 - RNA, 18 nt, Human
ucaccccgcccuccugcc

SEQ ID NO: 1151058 - RNA, 21 nt, Human
ucaucaacagcagcuugauga

SEQ ID NO: 1151059 - RNA, 19 nt, Human
uccagaauaacagaugagg

SEQ ID NO: 1151060 - RNA, 23 nt, Human
uccagcauaaagaaugcacagaa

SEQ ID NO: 1151061 - RNA, 21 nt, Human
ucccagagcaacugugacccu

SEQ ID NO: 1151062 - RNA, 20 nt, Human
ucccucaccugugccuguuc

SEQ ID NO: 1151063 - RNA, 18 nt, Human
ucuaaagcagguauggga

SEQ ID NO: 1151064 - RNA, 21 nt, Human
ucucacacacauucuaaagca

SEQ ID NO: 1151065 - RNA, 18 nt, Human
ugaaggaaggggaggcag

SEQ ID NO: 1151066 - RNA, 18 nt, Human
ugagcuccuaccacaugc

SEQ ID NO: 1151067 - RNA, 26 nt, Human
ugagucuuugucaucaacagcagcuu

SEQ ID NO: 1151068 - RNA, 19 nt, Human
ugcucuccucuggaaccuc

SEQ ID NO: 1151069 - RNA, 23 nt, Human
uggagagggaggcagaggagggu

SEQ ID NO: 1151070 - RNA, 26 nt, Human
uggccccugggcuccccauucuccuu

SEQ ID NO: 1151071 - RNA, 18 nt, Human
ugggcuccccauucuccu

SEQ ID NO: 1151072 - RNA, 19 nt, Human
ugucucacacacauucuaa

SEQ ID NO: 1151073 - RNA, 20 nt, Human
uuccuugggagcucuuccag

SEQ ID NO: 1151074 - RNA, 20 nt, Human
uucuccuuuguucuggaagc

SEQ ID NO: 1151075 - RNA, 22 nt, Human
uucuccuuuguucuggaagcuc

SEQ ID NO: 1151076 - RNA, 19 nt, Human
uugcccggccuugggcaag

SEQ ID NO: 1151077 - RNA, 23 nt, Human
uuucaaagacaagcauuucuagc

SEQ ID NO: 1151078 - RNA, 19 nt, Human
uuuccuggagagggaggca

SEQ ID NO: 1151079 - RNA, 19 nt, Human
agaggggacgggucggggc

SEQ ID NO: 1151080 - RNA, 21 nt, Human
ccacucugcucagggucauuu

SEQ ID NO: 1151081 - RNA, 18 nt, Human
ccccggugcccaagcucg

SEQ ID NO: 1151082 - RNA, 19 nt, Human
cccggugcccaagcucggc

SEQ ID NO: 1151083 - RNA, 18 nt, Human
ccugccacgcugccgccg

SEQ ID NO: 1151084 - RNA, 21 nt, Human
ccugccacgcugccgccgccc

SEQ ID NO: 1151085 - RNA, 25 nt, Human
ccugccacgcugccgccgccccaga

SEQ ID NO: 1151086 - RNA, 21 nt, Human
cgccccaggggcccugcucgc

SEQ ID NO: 1151087 - RNA, 23 nt, Human
cgcccgugggacgccccaggggc

SEQ ID NO: 1151088 - RNA, 23 nt, Human
cuccugccacgcugccgccgccc

SEQ ID NO: 1151089 - RNA, 18 nt, Human
gcccgugggacgccccag

SEQ ID NO: 1151090 - RNA, 20 nt, Human
ggacgccccaggggcccugc

SEQ ID NO: 1151091 - RNA, 20 nt, Human
ggcuggagccggcaggggua

SEQ ID NO: 1151092 - RNA, 20 nt, Human
gggaggaaagaaguaugaca

SEQ ID NO: 1151093 - RNA, 19 nt, Human
gugcccaagcucggcgcuc

SEQ ID NO: 1151094 - RNA, 18 nt, Human
uaaagacggugagacacg

SEQ ID NO: 1151095 - RNA, 25 nt, Human
uaacauaggacagcagccggcucuu

SEQ ID NO: 1151096 - RNA, 22 nt, Human
uacaagcacgccaacccccccg

SEQ ID NO: 1151097 - RNA, 21 nt, Human
uagugcacgggaggaaagaag

SEQ ID NO: 1151098 - RNA, 19 nt, Human
ugccacgcugccgccgccc

SEQ ID NO: 1151099 - RNA, 18 nt, Human
uguuaaauaaagacggug

SEQ ID NO: 1151100 - RNA, 22 nt, Human
aaccucacuaacaggagauaau

SEQ ID NO: 1151101 - RNA, 18 nt, Human
aacucuguccccucuucc

SEQ ID NO: 1151102 - RNA, 21 nt, Human
cucacuaacaggagauaauaa

SEQ ID NO: 1151103 - RNA, 21 nt, Human
ucacuaacaggagauaauaag

SEQ ID NO: 1151104 - RNA, 18 nt, Human
uguuggacugcuggaauu

SEQ ID NO: 1151105 - RNA, 22 nt, Human
aaacagaaaacuauacaaaacc

SEQ ID NO: 1151106 - RNA, 21 nt, Human
aaagcagcaggagggcucagg

SEQ ID NO: 1151107 - RNA, 20 nt, Human
aaguacucuugcgugacgau

SEQ ID NO: 1151108 - RNA, 18 nt, Human
aaguguggccacucugcc

SEQ ID NO: 1151109 - RNA, 18 nt, Human
acaaagcaggaccaacag

SEQ ID NO: 1151110 - RNA, 19 nt, Human
acaagauaauuugcugggg

SEQ ID NO: 1151111 - RNA, 24 nt, Human
acaauacuaggaaaagcuaaacac

SEQ ID NO: 1151112 - RNA, 21 nt, Human
acacagacauuucacugaaac

SEQ ID NO: 1151113 - RNA, 20 nt, Human
acagcacacacauacagaaa

SEQ ID NO: 1151114 - RNA, 20 nt, Human
acccacaaagcaggaccaac

SEQ ID NO: 1151115 - RNA, 24 nt, Human
accgcagcaucaccgucagacacc

SEQ ID NO: 1151116 - RNA, 24 nt, Human
accucacaauacuaggaaaagcua

SEQ ID NO: 1151117 - RNA, 24 nt, Human
agacacagacauuucacugaaacc

SEQ ID NO: 1151118 - RNA, 18 nt, Human
agaguuuagggucuuucu

SEQ ID NO: 1151119 - RNA, 24 nt, Human
agauucaaacagaaaacuauacaa

SEQ ID NO: 1151120 - RNA, 21 nt, Human
agcagaaagaguauuuacaug

SEQ ID NO: 1151121 - RNA, 23 nt, Human
agcagaaagaguauuuacaugga

SEQ ID NO: 1151122 - RNA, 21 nt, Human
aggaaaagcuaaacacagaca

SEQ ID NO: 1151123 - RNA, 18 nt, Human
agggcagcuuuggugcuc

SEQ ID NO: 1151124 - RNA, 21 nt, Human
aguagcagaaagaguauuuac

SEQ ID NO: 1151125 - RNA, 19 nt, Human
auaaauauauauauauaua

SEQ ID NO: 1151126 - RNA, 19 nt, Human
auauguguauauauauaaa

SEQ ID NO: 1151127 - RNA, 28 nt, Human
caaaauaaaagcccaagaaacuaaccac

SEQ ID NO: 1151128 - RNA, 24 nt, Human
caacaggugugagguggaguggaa

SEQ ID NO: 1151129 - RNA, 25 nt, Human
caacaggugugagguggaguggaag

SEQ ID NO: 1151130 - RNA, 18 nt, Human
cacaaagcaggaccaaca

SEQ ID NO: 1151131 - RNA, 21 nt, Human
cacaauacuaggaaaagcuaa

SEQ ID NO: 1151132 - RNA, 22 nt, Human
cacacacauacagaaauucacg

SEQ ID NO: 1151133 - RNA, 22 nt, Human
caccccacugaaguccccacac

SEQ ID NO: 1151134 - RNA, 24 nt, Human
caccccacugaaguccccacacug

SEQ ID NO: 1151135 - RNA, 21 nt, Human
cagacaccaaagcagcaggag

SEQ ID NO: 1151136 - RNA, 22 nt, Human
cagcaggagggcucaggaagug

SEQ ID NO: 1151137 - RNA, 19 nt, Human
cagccaggcgaucucaggc

SEQ ID NO: 1151138 - RNA, 18 nt, Human
cauaaauauauauauaua

SEQ ID NO: 1151139 - RNA, 19 nt, Human
cauuccuuggugaccgagc

SEQ ID NO: 1151140 - RNA, 25 nt, Human
ccaaagcagcaggagggcucaggaa

SEQ ID NO: 1151141 - RNA, 19 nt, Human
ccaagaaacuaaccaccga

SEQ ID NO: 1151142 - RNA, 25 nt, Human
ccagcuggagauucuuccuaauugu

SEQ ID NO: 1151143 - RNA, 18 nt, Human
ccuggccucuucccggag

SEQ ID NO: 1151144 - RNA, 22 nt, Human
cuauacaaaaccaacccauaaa

SEQ ID NO: 1151145 - RNA, 21 nt, Human
cucaaaaaguguuagcauaga

SEQ ID NO: 1151146 - RNA, 20 nt, Human
cucgugaaaaucaaagggca

SEQ ID NO: 1151147 - RNA, 20 nt, Human
cugauucacguuaaaagggg

SEQ ID NO: 1151148 - RNA, 21 nt, Human
gaaguccccacacugcuuccc

SEQ ID NO: 1151149 - RNA, 24 nt, Human
gagguggaguggaagugugggggu

SEQ ID NO: 1151150 - RNA, 20 nt, Human
gcgugacgauugucagacac

SEQ ID NO: 1151151 - RNA, 19 nt, Human
ggagaucuggccuuugggu

SEQ ID NO: 1151152 - RNA, 24 nt, Human
ggaguggaaguguggggguggggu

SEQ ID NO: 1151153 - RNA, 22 nt, Human
gucucuauaaaaaugaugaaag

SEQ ID NO: 1151154 - RNA, 19 nt, Human
guguuucaaguguggccac

SEQ ID NO: 1151155 - RNA, 18 nt, Human
uaaaagcccaagaaacua

SEQ ID NO: 1151156 - RNA, 18 nt, Human
uaaaaggggagaucuggc

SEQ ID NO: 1151157 - RNA, 22 nt, Human
uaaaauugcaaaauaaaagccc

SEQ ID NO: 1151158 - RNA, 23 nt, Human
uaaccaccgaucugcacgucagu

SEQ ID NO: 1151159 - RNA, 24 nt, Human
uaauuguuccuaagaugaaaagcc

SEQ ID NO: 1151160 - RNA, 19 nt, Human
uacaaaaccaacccauaaa

SEQ ID NO: 1151161 - RNA, 19 nt, Human
uacaguuauucucccacca

SEQ ID NO: 1151162 - RNA, 18 nt, Human
uagagaacacugcauucu

SEQ ID NO: 1151163 - RNA, 22 nt, Human
uagcagaaagaguauuuacaug

SEQ ID NO: 1151164 - RNA, 23 nt, Human
uagcagaaagaguauuuacaugg

SEQ ID NO: 1151165 - RNA, 22 nt, Human
uaggaaaagcuaaacacagaca

SEQ ID NO: 1151166 - RNA, 18 nt, Human
uauaauauguguauauau

SEQ ID NO: 1151167 - RNA, 23 nt, Human
uauaauguguuucaaguguggcc

SEQ ID NO: 1151168 - RNA, 19 nt, Human
uauacaaaaccaacccaua

SEQ ID NO: 1151169 - RNA, 23 nt, Human
uauauauauaauauguguauaua

SEQ ID NO: 1151170 - RNA, 22 nt, Human
uauucucccaccaccccccaaa

SEQ ID NO: 1151171 - RNA, 23 nt, Human
ucaaacagaaaacuauacaaaac

SEQ ID NO: 1151172 - RNA, 21 nt, Human
ucaagggggccggcauuucag

SEQ ID NO: 1151173 - RNA, 21 nt, Human
ucaaucaaucacccacaaagc

SEQ ID NO: 1151174 - RNA, 18 nt, Human
ucccugaaauauauuccc

SEQ ID NO: 1151175 - RNA, 22 nt, Human
ucugugggggugaugcauacuc

SEQ ID NO: 1151176 - RNA, 21 nt, Human
ucuucccggagagagcaaaca

SEQ ID NO: 1151177 - RNA, 24 nt, Human
ucuugcgugacgauugucagacac

SEQ ID NO: 1151178 - RNA, 26 nt, Human
ugaaaccucacaauacuaggaaaagc

SEQ ID NO: 1151179 - RNA, 22 nt, Human
ugaaguccccacacugcuuccc

SEQ ID NO: 1151180 - RNA, 19 nt, Human
ugagcguggcugcucauug

SEQ ID NO: 1151181 - RNA, 21 nt, Human
ugagguggaguggaagugugg

SEQ ID NO: 1151182 - RNA, 19 nt, Human
ugcucagagauucaaacag

SEQ ID NO: 1151183 - RNA, 18 nt, Human
ugcuugccugcaccccag

SEQ ID NO: 1151184 - RNA, 24 nt, Human
ugcuugccugcaccccagccaggc

SEQ ID NO: 1151185 - RNA, 18 nt, Human
uggaaaguucucgugaaa

SEQ ID NO: 1151186 - RNA, 23 nt, Human
ugggguucccugaaauauauucc

SEQ ID NO: 1151187 - RNA, 20 nt, Human
uguucucccccaccuggccu

SEQ ID NO: 1151188 - RNA, 21 nt, Human
uuaaacuaccuagagauaagc

SEQ ID NO: 1151189 - RNA, 26 nt, Human
uuagggucuuucuacaguuauucucc

SEQ ID NO: 1151190 - RNA, 18 nt, Human
uucaaguguggccacucu

SEQ ID NO: 1151191 - RNA, 23 nt, Human
uucccggagagagcaaacacuaa

SEQ ID NO: 1151192 - RNA, 21 nt, Human
uuuaaacuaccuagagauaag

SEQ ID NO: 1151193 - RNA, 21 nt, Human
cagcaugggggugaccacagu

SEQ ID NO: 1151194 - RNA, 18 nt, Human
ugacuggguagugugggg

SEQ ID NO: 1151195 - RNA, 20 nt, Human
ugacuggguaguguggggag

SEQ ID NO: 1151196 - RNA, 21 nt, Human
aagaaguuuaccuuuuuccug

SEQ ID NO: 1151197 - RNA, 20 nt, Human
acaaaaaggcuuuuauagua

SEQ ID NO: 1151198 - RNA, 24 nt, Human
accuuuuuccuguuuugcuuuuaa

SEQ ID NO: 1151199 - RNA, 18 nt, Human
agaaaaacagccugcagg

SEQ ID NO: 1151200 - RNA, 22 nt, Human
agaaaaacagccugcaggagcg

SEQ ID NO: 1151201 - RNA, 22 nt, Human
agacccagagcagagggaacag

SEQ ID NO: 1151202 - RNA, 18 nt, Human
aguaaguccauguguuuu

SEQ ID NO: 1151203 - RNA, 21 nt, Human
aguuuaccuuuuuccuguuuu

SEQ ID NO: 1151204 - RNA, 24 nt, Human
ccugcaggagcgggggcgcgcggg

SEQ ID NO: 1151205 - RNA, 23 nt, Human
cuuuuuccuguuuugcuuuuaau

SEQ ID NO: 1151206 - RNA, 19 nt, Human
gcgggcgccggcggagacc

SEQ ID NO: 1151207 - RNA, 22 nt, Human
gugccgcgcaggugaggcuggc

SEQ ID NO: 1151208 - RNA, 20 nt, Human
uaauacaauaucaacaauuu

SEQ ID NO: 1151209 - RNA, 21 nt, Human
uucaaaugagaucacugaaaa

SEQ ID NO: 1151210 - RNA, 24 nt, Human
aaaaaacaaauggaguggggccac

SEQ ID NO: 1151211 - RNA, 21 nt, Human
aaacaaauggaguggggccac

SEQ ID NO: 1151212 - RNA, 22 nt, Human
aaagcuuccaaacguuuccagg

SEQ ID NO: 1151213 - RNA, 18 nt, Human
aagaagccagggugggga

SEQ ID NO: 1151214 - RNA, 18 nt, Human
aagcucugugggcuuugc

SEQ ID NO: 1151215 - RNA, 20 nt, Human
aagggcaacuucaaggaaca

SEQ ID NO: 1151216 - RNA, 22 nt, Human
aaguagcugaggaggagaggga

SEQ ID NO: 1151217 - RNA, 18 nt, Human
acaaaaaggagggagaag

SEQ ID NO: 1151218 - RNA, 21 nt, Human
acaggaacagacagaagccaa

SEQ ID NO: 1151219 - RNA, 21 nt, Human
acccggaccccggggucacuc

SEQ ID NO: 1151220 - RNA, 20 nt, Human
acugcgacuagaagaagcca

SEQ ID NO: 1151221 - RNA, 20 nt, Human
acuucaaggaacaaaaggga

SEQ ID NO: 1151222 - RNA, 18 nt, Human
agaacccgaguuaaaacc

SEQ ID NO: 1151223 - RNA, 25 nt, Human
agacaggaacagacagaagccaaag

SEQ ID NO: 1151224 - RNA, 18 nt, Human
agcaaagcuuccaaacgu

SEQ ID NO: 1151225 - RNA, 20 nt, Human
agcagcgcggaaggcgcuca

SEQ ID NO: 1151226 - RNA, 25 nt, Human
aggaacaaaagggaagcugcaaggc

SEQ ID NO: 1151227 - RNA, 21 nt, Human
caagguggcugaagcuggcca

SEQ ID NO: 1151228 - RNA, 18 nt, Human
cacugcgucucccaaggu

SEQ ID NO: 1151229 - RNA, 26 nt, Human
caggaacaccccagcucagggcuccc

SEQ ID NO: 1151230 - RNA, 19 nt, Human
caggccuccagccuggaau

SEQ ID NO: 1151231 - RNA, 21 nt, Human
ccaaacguuuccaggccucca

SEQ ID NO: 1151232 - RNA, 20 nt, Human
cccaacagacaggaacagac

SEQ ID NO: 1151233 - RNA, 23 nt, Human
cccacccggaccccggggucacu

SEQ ID NO: 1151234 - RNA, 19 nt, Human
cccacccuggccggucuga

SEQ ID NO: 1151235 - RNA, 18 nt, Human
ccccacuccccuuccugc

SEQ ID NO: 1151236 - RNA, 23 nt, Human
ccccggggucacucgggucuccg

SEQ ID NO: 1151237 - RNA, 20 nt, Human
cccugaggaccaagucacgg

SEQ ID NO: 1151238 - RNA, 18 nt, Human
ccugaagguagccggccu

SEQ ID NO: 1151239 - RNA, 18 nt, Human
ccugccauuggggcuggg

SEQ ID NO: 1151240 - RNA, 19 nt, Human
ccugcugccaaaccuggga

SEQ ID NO: 1151241 - RNA, 18 nt, Human
ccuggcggccggggcugu

SEQ ID NO: 1151242 - RNA, 18 nt, Human
ccuggcggccggggcugu

SEQ ID NO: 1151243 - RNA, 25 nt, Human
cgaggccggagacccugaggaccaa

SEQ ID NO: 1151244 - RNA, 22 nt, Human
cuaggagugacgggauggcgug

SEQ ID NO: 1151245 - RNA, 22 nt, Human
cuccccccgcuccccgaccuuc

SEQ ID NO: 1151246 - RNA, 20 nt, Human
cucgggucuccgucugugcc

SEQ ID NO: 1151247 - RNA, 21 nt, Human
cugcacugcgucucccaaggu

SEQ ID NO: 1151248 - RNA, 22 nt, Human
cugcacugcgucucccaaggug

SEQ ID NO: 1151249 - RNA, 20 nt, Human
gaagcuguugagggcugaag

SEQ ID NO: 1151250 - RNA, 18 nt, Human
gaccucuuccaggaacac

SEQ ID NO: 1151251 - RNA, 18 nt, Human
gaccucuuccaggaacac

SEQ ID NO: 1151252 - RNA, 21 nt, Human
gaccucuuccaggaacacccc

SEQ ID NO: 1151253 - RNA, 19 nt, Human
gagcagcgcggaaggcgcu

SEQ ID NO: 1151254 - RNA, 21 nt, Human
gauggggacaaaaaggaggga

SEQ ID NO: 1151255 - RNA, 21 nt, Human
gcccaggguccuccucgugcc

SEQ ID NO: 1151256 - RNA, 18 nt, Human
gccuugaggccgagcagc

SEQ ID NO: 1151257 - RNA, 19 nt, Human
gcgcucaggccggaucugg

SEQ ID NO: 1151258 - RNA, 21 nt, Human
gcgcucaggccggaucugggg

SEQ ID NO: 1151259 - RNA, 18 nt, Human
gcgguccgggcgggcgag

SEQ ID NO: 1151260 - RNA, 22 nt, Human
ggaagcugcaaggcaccagcuc

SEQ ID NO: 1151261 - RNA, 20 nt, Human
ggaccccggggucacucggg

SEQ ID NO: 1151262 - RNA, 18 nt, Human
ggagagggagcugaugug

SEQ ID NO: 1151263 - RNA, 21 nt, Human
ggagagggagcugauguggag

SEQ ID NO: 1151264 - RNA, 19 nt, Human
ggaggcgcagcguguguag

SEQ ID NO: 1151265 - RNA, 19 nt, Human
ggccggggcuguucuccag

SEQ ID NO: 1151266 - RNA, 23 nt, Human
gggauggggacaaaaaggaggga

SEQ ID NO: 1151267 - RNA, 24 nt, Human
gggccacaggaauugucagaaaug

SEQ ID NO: 1151268 - RNA, 19 nt, Human
gggcucaggggagaguaga

SEQ ID NO: 1151269 - RNA, 22 nt, Human
gggggauggggacaaaaaggag

SEQ ID NO: 1151270 - RNA, 20 nt, Human
gucccgggucuaugggucca

SEQ ID NO: 1151271 - RNA, 24 nt, Human
uaaaaaacaaauggaguggggcca

SEQ ID NO: 1151272 - RNA, 23 nt, Human
uauggaggcgcagcguguguagc

SEQ ID NO: 1151273 - RNA, 20 nt, Human
uccccacuccccuuccugcg

SEQ ID NO: 1151274 - RNA, 20 nt, Human
ucgaaaaagccgggucugaa

SEQ ID NO: 1151275 - RNA, 20 nt, Human
ugacuccacggcuucuaggg

SEQ ID NO: 1151276 - RNA, 20 nt, Human
ugaggaggagagggagcuga

SEQ ID NO: 1151277 - RNA, 23 nt, Human
ugaggaggagagggagcugaugu

SEQ ID NO: 1151278 - RNA, 18 nt, Human
ugcccaacagacaggaac

SEQ ID NO: 1151279 - RNA, 18 nt, Human
ugccgaggccggagaccc

SEQ ID NO: 1151280 - RNA, 25 nt, Human
ugccgaggccggagacccugaggac

SEQ ID NO: 1151281 - RNA, 18 nt, Human
ugcgaagcuguugagggc

SEQ ID NO: 1151282 - RNA, 18 nt, Human
ugcgacuagaagaagcca

SEQ ID NO: 1151283 - RNA, 23 nt, Human
ugcgcgaaaaguuuccuaggagu

SEQ ID NO: 1151284 - RNA, 21 nt, Human
uggccggucugacuccacggc

SEQ ID NO: 1151285 - RNA, 21 nt, Human
uggcgugggcucaggggagag

SEQ ID NO: 1151286 - RNA, 20 nt, Human
uggcugaagcuggccagcug

SEQ ID NO: 1151287 - RNA, 21 nt, Human
ugggacaaacuguauggaggc

SEQ ID NO: 1151288 - RNA, 20 nt, Human
uggggcccagccgagccuug

SEQ ID NO: 1151289 - RNA, 20 nt, Human
uggggcugggcggcagcucg

SEQ ID NO: 1151290 - RNA, 22 nt, Human
ugggguggggcccagccgagcc

SEQ ID NO: 1151291 - RNA, 19 nt, Human
uguagccagaacccgaguu

SEQ ID NO: 1151292 - RNA, 20 nt, Human
uucuaugguucucucagugg

SEQ ID NO: 1151293 - RNA, 23 nt, Human
uucuaugguucucucaguggggu

SEQ ID NO: 1151294 - RNA, 19 nt, Human
uugucagaaauggaggcuu

SEQ ID NO: 1151295 - RNA, 18 nt, Human
uuuuuuuuuuuuuuuuug

SEQ ID NO: 1151296 - RNA, 19 nt, Human
uuuuuuuuuuuuuuuuugc

SEQ ID NO: 1151297 - RNA, 20 nt, Human
cagccuuuucugucuucuuc

SEQ ID NO: 1151298 - RNA, 21 nt, Human
guaaaauacucuguaucuaca

SEQ ID NO: 1151299 - RNA, 18 nt, Human
uuuaauaacuugaaagcg

SEQ ID NO: 1151300 - RNA, 24 nt, Human
aaaguacugggauuacaggcguga

SEQ ID NO: 1151301 - RNA, 25 nt, Human
aaauguacuggagauauucugggua

SEQ ID NO: 1151302 - RNA, 22 nt, Human
aaauuuucgacauauacaggua

SEQ ID NO: 1151303 - RNA, 19 nt, Human
aaccaauccccuuggauac

SEQ ID NO: 1151304 - RNA, 20 nt, Human
aacuccaaccagaucucaca

SEQ ID NO: 1151305 - RNA, 19 nt, Human
aaguacugggauuacaggc

SEQ ID NO: 1151306 - RNA, 26 nt, Human
aaguacugggauuacaggcgugagcc

SEQ ID NO: 1151307 - RNA, 20 nt, Human
acagacccugcgcauguggu

SEQ ID NO: 1151308 - RNA, 18 nt, Human
acgggguuucgccauguu

SEQ ID NO: 1151309 - RNA, 23 nt, Human
acgggguuucgccauguuggcca

SEQ ID NO: 1151310 - RNA, 24 nt, Human
acgggguuucgccauguuggccag

SEQ ID NO: 1151311 - RNA, 20 nt, Human
agaaaauaaacccuauaggg

SEQ ID NO: 1151312 - RNA, 19 nt, Human
agaccagcaaggagaucag

SEQ ID NO: 1151313 - RNA, 22 nt, Human
agauauuggugccaccaaauaa

SEQ ID NO: 1151314 - RNA, 24 nt, Human
agccuuguaauugacauugaaggu

SEQ ID NO: 1151315 - RNA, 19 nt, Human
aggaagcuguuuauauuuc

SEQ ID NO: 1151316 - RNA, 23 nt, Human
aggaaggaccaguccacauugga

SEQ ID NO: 1151317 - RNA, 22 nt, Human
aggaguccuggaaccaaucccc

SEQ ID NO: 1151318 - RNA, 25 nt, Human
aggcuggagugcaguggcacgaucu

SEQ ID NO: 1151319 - RNA, 22 nt, Human
agggacuugaguauccucagau

SEQ ID NO: 1151320 - RNA, 21 nt, Human
aggucacccagcuaaaaacua

SEQ ID NO: 1151321 - RNA, 24 nt, Human
aggugauccaccugacucggccuc

SEQ ID NO: 1151322 - RNA, 22 nt, Human
aguagagacgggguuucgccau

SEQ ID NO: 1151323 - RNA, 18 nt, Human
aguagcugggauuacagg

SEQ ID NO: 1151324 - RNA, 18 nt, Human
agucagcuuccuaugugu

SEQ ID NO: 1151325 - RNA, 20 nt, Human
agugcaguggcacgaucucg

SEQ ID NO: 1151326 - RNA, 23 nt, Human
agugcaguggcacgaucucggcu

SEQ ID NO: 1151327 - RNA, 24 nt, Human
agugcaguggcacgaucucggcuc

SEQ ID NO: 1151328 - RNA, 22 nt, Human
auacagaaaugcauaauuugau

SEQ ID NO: 1151329 - RNA, 24 nt, Human
auaguagagacgggguuucgccau

SEQ ID NO: 1151330 - RNA, 23 nt, Human
augccaaagcauuccaguaaggc

SEQ ID NO: 1151331 - RNA, 18 nt, Human
auggcuuaggguccauag

SEQ ID NO: 1151332 - RNA, 23 nt, Human
auucauuuucucucacccuccaa

SEQ ID NO: 1151333 - RNA, 24 nt, Human
caaaguacugggauuacaggcgug

SEQ ID NO: 1151334 - RNA, 22 nt, Human
caagcgauucuccugccucagc

SEQ ID NO: 1151335 - RNA, 23 nt, Human
cacaugggaacuugcgauuauuc

SEQ ID NO: 1151336 - RNA, 23 nt, Human
caccacacugucgcccuugucca

SEQ ID NO: 1151337 - RNA, 24 nt, Human
caccacacugucgcccuuguccaa

SEQ ID NO: 1151338 - RNA, 19 nt, Human
caccauacagaaaugcaua

SEQ ID NO: 1151339 - RNA, 23 nt, Human
caccaucgugagaccaagauaaa

SEQ ID NO: 1151340 - RNA, 18 nt, Human
cacccgccaccacaccca

SEQ ID NO: 1151341 - RNA, 19 nt, Human
cagaaaaagaauuuccaag

SEQ ID NO: 1151342 - RNA, 24 nt, Human
cagcaaccucugccucccagauuc

SEQ ID NO: 1151343 - RNA, 21 nt, Human
cagcaccagaaguuuagcugu

SEQ ID NO: 1151344 - RNA, 20 nt, Human
cagccuccugaguagcuggg

SEQ ID NO: 1151345 - RNA, 26 nt, Human
caggaaauacaccauacaaccuucag

SEQ ID NO: 1151346 - RNA, 21 nt, Human
caggcagaaacguacaugaug

SEQ ID NO: 1151347 - RNA, 23 nt, Human
caggugauccaccugacucggcc

SEQ ID NO: 1151348 - RNA, 24 nt, Human
cauguuggccaggcuggucuugaa

SEQ ID NO: 1151349 - RNA, 20 nt, Human
cauuucucugcacagaagug

SEQ ID NO: 1151350 - RNA, 20 nt, Human
ccaaaguacugggauuacag

SEQ ID NO: 1151351 - RNA, 22 nt, Human
ccaaaguacugggauuacaggc

SEQ ID NO: 1151352 - RNA, 24 nt, Human
ccaaaguacugggauuacaggcgu

SEQ ID NO: 1151353 - RNA, 22 nt, Human
ccaccugacucggccucccaaa

SEQ ID NO: 1151354 - RNA, 19 nt, Human
ccauguuggccaggcuggu

SEQ ID NO: 1151355 - RNA, 21 nt, Human
ccauguuggccaggcuggucu

SEQ ID NO: 1151356 - RNA, 21 nt, Human
cccgccaccacacccaacuaa

SEQ ID NO: 1151357 - RNA, 25 nt, Human
cccucgccggccgcgaggccccgac

SEQ ID NO: 1151358 - RNA, 22 nt, Human
ccucaggugauccaccugacuc

SEQ ID NO: 1151359 - RNA, 24 nt, Human
ccucccagauucaagcgauucucc

SEQ ID NO: 1151360 - RNA, 20 nt, Human
ccugaccucaggugauccac

SEQ ID NO: 1151361 - RNA, 23 nt, Human
ccugaccucaggugauccaccug

SEQ ID NO: 1151362 - RNA, 24 nt, Human
ccugaccucaggugauccaccuga

SEQ ID NO: 1151363 - RNA, 23 nt, Human
ccugaguagcugggauuacaggc

SEQ ID NO: 1151364 - RNA, 24 nt, Human
ccugaguagcugggauuacaggca

SEQ ID NO: 1151365 - RNA, 23 nt, Human
ccugccucagccuccugaguagc

SEQ ID NO: 1151366 - RNA, 19 nt, Human
cgauuauuccacugaaguc

SEQ ID NO: 1151367 - RNA, 24 nt, Human
cgccauguuggccaggcuggucuu

SEQ ID NO: 1151368 - RNA, 27 nt, Human
cgccauguuggccaggcuggucuugaa

SEQ ID NO: 1151369 - RNA, 24 nt, Human
cgggguuucgccauguuggccagg

SEQ ID NO: 1151370 - RNA, 19 nt, Human
cuaucaggacuggcaacca

SEQ ID NO: 1151371 - RNA, 18 nt, Human
cucaaaagaagaauagcc

SEQ ID NO: 1151372 - RNA, 24 nt, Human
cucacagcaaccucugccucccag

SEQ ID NO: 1151373 - RNA, 23 nt, Human
cucagccuccugaguagcuggga

SEQ ID NO: 1151374 - RNA, 18 nt, Human
cucccgcccccagcccuc

SEQ ID NO: 1151375 - RNA, 23 nt, Human
cugaguagcugggauuacaggca

SEQ ID NO: 1151376 - RNA, 22 nt, Human
cugcagguaaauuagaauucau

SEQ ID NO: 1151377 - RNA, 23 nt, Human
cugccucagccuccugaguagcu

SEQ ID NO: 1151378 - RNA, 20 nt, Human
cuuaucaccaucccugaggu

SEQ ID NO: 1151379 - RNA, 24 nt, Human
cuugcucuguugcucaggcuggag

SEQ ID NO: 1151380 - RNA, 23 nt, Human
cuuuaauuugguuuucucuuuuu

SEQ ID NO: 1151381 - RNA, 22 nt, Human
gaagagacaacugaggcucaga

SEQ ID NO: 1151382 - RNA, 22 nt, Human
gaauaaaauugaaggcgaugcc

SEQ ID NO: 1151383 - RNA, 24 nt, Human
gaccucaggugauccaccugacuc

SEQ ID NO: 1151384 - RNA, 23 nt, Human
gagaccagcaaggagaucaggcu

SEQ ID NO: 1151385 - RNA, 24 nt, Human
gagacgggguuucgccauguuggc

SEQ ID NO: 1151386 - RNA, 21 nt, Human
gagauagagucuugcucuguu

SEQ ID NO: 1151387 - RNA, 28 nt, Human
gagcagacacaaaugugcuuaucaccau

SEQ ID NO: 1151388 - RNA, 24 nt, Human
gagccaccaugcccggccuacacc

SEQ ID NO: 1151389 - RNA, 25 nt, Human
gaguagcugggauuacaggcacccg

SEQ ID NO: 1151390 - RNA, 21 nt, Human
gaucucggcucacagcaaccu

SEQ ID NO: 1151391 - RNA, 18 nt, Human
gauuacaggcgugagcca

SEQ ID NO: 1151392 - RNA, 21 nt, Human
gauuacaggcgugagccacca

SEQ ID NO: 1151393 - RNA, 24 nt, Human
gauuacaggcgugagccaccaugc

SEQ ID NO: 1151394 - RNA, 21 nt, Human
gauucuccugccucagccucc

SEQ ID NO: 1151395 - RNA, 22 nt, Human
gcaaccucugccucccagauuc

SEQ ID NO: 1151396 - RNA, 24 nt, Human
gccauguuggccaggcuggucuug

SEQ ID NO: 1151397 - RNA, 24 nt, Human
gcgauucuccugccucagccuccu

SEQ ID NO: 1151398 - RNA, 19 nt, Human
gcgugagccaccaugcccg

SEQ ID NO: 1151399 - RNA, 23 nt, Human
gcuggucuugaacuccugaccuc

SEQ ID NO: 1151400 - RNA, 19 nt, Human
ggagaagggagcuggugcu

SEQ ID NO: 1151401 - RNA, 24 nt, Human
ggauuacaggcgugagccaccaug

SEQ ID NO: 1151402 - RNA, 24 nt, Human
ggcuggucuugaacuccugaccuc

SEQ ID NO: 1151403 - RNA, 23 nt, Human
gggguuucgccauguuggccagg

SEQ ID NO: 1151404 - RNA, 23 nt, Human
gggucauuaguggaauuaaaucc

SEQ ID NO: 1151405 - RNA, 21 nt, Human
gggugccagcugcagcagcuu

SEQ ID NO: 1151406 - RNA, 24 nt, Human
ggucauauugacugcaaugguuaa

SEQ ID NO: 1151407 - RNA, 22 nt, Human
ggucauuaguggaauuaaaucc

SEQ ID NO: 1151408 - RNA, 19 nt, Human
ggucuugaacuccugaccu

SEQ ID NO: 1151409 - RNA, 23 nt, Human
guagagacgggguuucgccaugu

SEQ ID NO: 1151410 - RNA, 18 nt, Human
guagcugggauuacaggc

SEQ ID NO: 1151411 - RNA, 21 nt, Human
guccagcuuugcuaaaucgac

SEQ ID NO: 1151412 - RNA, 24 nt, Human
gugauccaccugacucggccuccc

SEQ ID NO: 1151413 - RNA, 24 nt, Human
gugcucgcagggugccaagcaggg

SEQ ID NO: 1151414 - RNA, 19 nt, Human
uaagagauauuggugccac

SEQ ID NO: 1151415 - RNA, 20 nt, Human
uaauuuuuuguauuuuauag

SEQ ID NO: 1151416 - RNA, 25 nt, Human
uaauuuuuuguauuuuauaguagag

SEQ ID NO: 1151417 - RNA, 20 nt, Human
uacaaugaaaaauacagaag

SEQ ID NO: 1151418 - RNA, 22 nt, Human
uacaggaaauacaccauacaga

SEQ ID NO: 1151419 - RNA, 24 nt, Human
uacaggcacccgccaccacaccca

SEQ ID NO: 1151420 - RNA, 23 nt, Human
uacaggcgugagccaccaugccc

SEQ ID NO: 1151421 - RNA, 24 nt, Human
uacugggauuacaggcgugagcca

SEQ ID NO: 1151422 - RNA, 22 nt, Human
uagagacgggguuucgccaugu

SEQ ID NO: 1151423 - RNA, 23 nt, Human
uaguagagacgggguuucgccau

SEQ ID NO: 1151424 - RNA, 24 nt, Human
uaguagagacgggguuucgccaug

SEQ ID NO: 1151425 - RNA, 23 nt, Human
uaucccaaugcaaagucauuacu

SEQ ID NO: 1151426 - RNA, 18 nt, Human
ucacagcaaccucugccu

SEQ ID NO: 1151427 - RNA, 19 nt, Human
ucacagcaaccucugccuc

SEQ ID NO: 1151428 - RNA, 23 nt, Human
ucacagcaaccucugccucccag

SEQ ID NO: 1151429 - RNA, 24 nt, Human
ucacagcaaccucugccucccaga

SEQ ID NO: 1151430 - RNA, 20 nt, Human
ucagccuccugaguagcugg

SEQ ID NO: 1151431 - RNA, 21 nt, Human
uccaagaguuccaccauuucu

SEQ ID NO: 1151432 - RNA, 24 nt, Human
ucccaaaguacugggauuacaggc

SEQ ID NO: 1151433 - RNA, 21 nt, Human
ucccagauucaagcgauucuc

SEQ ID NO: 1151434 - RNA, 24 nt, Human
ucccagauucaagcgauucuccug

SEQ ID NO: 1151435 - RNA, 21 nt, Human
ucccugagguuauaauuucua

SEQ ID NO: 1151436 - RNA, 24 nt, Human
uccugaguagcugggauuacaggc

SEQ ID NO: 1151437 - RNA, 22 nt, Human
ucgccauguuggccaggcuggu

SEQ ID NO: 1151438 - RNA, 24 nt, Human
ucgccauguuggccaggcuggucu

SEQ ID NO: 1151439 - RNA, 18 nt, Human
ucgccgagcgcaaccggg

SEQ ID NO: 1151440 - RNA, 18 nt, Human
ucucacccuccaacucca

SEQ ID NO: 1151441 - RNA, 24 nt, Human
ucucacccuccaacuccaaccaga

SEQ ID NO: 1151442 - RNA, 24 nt, Human
ucucccgcccccagcccucuucgc

SEQ ID NO: 1151443 - RNA, 24 nt, Human
ucuccugccucagccuccugagua

SEQ ID NO: 1151444 - RNA, 24 nt, Human
ucuguuaacuugcccaaggucacc

SEQ ID NO: 1151445 - RNA, 24 nt, Human
ucuguugcucaggcuggagugcag

SEQ ID NO: 1151446 - RNA, 23 nt, Human
ucuugaacuccugaccucaggug

SEQ ID NO: 1151447 - RNA, 19 nt, Human
ucuugcucuguugcucagg

SEQ ID NO: 1151448 - RNA, 20 nt, Human
ucuugcucuguugcucaggc

SEQ ID NO: 1151449 - RNA, 23 nt, Human
ucuugcucuguugcucaggcugg

SEQ ID NO: 1151450 - RNA, 24 nt, Human
ucuugcucuguugcucaggcugga

SEQ ID NO: 1151451 - RNA, 22 nt, Human
ugaaaaauacagaagcuuuggc

SEQ ID NO: 1151452 - RNA, 19 nt, Human
ugaccucaggugauccacc

SEQ ID NO: 1151453 - RNA, 20 nt, Human
ugaccucaggugauccaccu

SEQ ID NO: 1151454 - RNA, 26 nt, Human
ugagugucuuuccacuuuuggauuuc

SEQ ID NO: 1151455 - RNA, 24 nt, Human
ugauauaaagcuucaacuauaggg

SEQ ID NO: 1151456 - RNA, 21 nt, Human
ugccaagcagggagaagacca

SEQ ID NO: 1151457 - RNA, 24 nt, Human
ugccucagccuccugaguagcugg

SEQ ID NO: 1151458 - RNA, 23 nt, Human
ugccucuguuaacuugcccaagg

SEQ ID NO: 1151459 - RNA, 20 nt, Human
ugcucaggcuggagugcagu

SEQ ID NO: 1151460 - RNA, 22 nt, Human
ugcucaggcuggagugcagugg

SEQ ID NO: 1151461 - RNA, 24 nt, Human
ugcucaggcuggagugcaguggca

SEQ ID NO: 1151462 - RNA, 20 nt, Human
uggaaaaagccuuguaauug

SEQ ID NO: 1151463 - RNA, 21 nt, Human
uggaaccaauccccuuggaua

SEQ ID NO: 1151464 - RNA, 18 nt, Human
uggaagugcaaaucugga

SEQ ID NO: 1151465 - RNA, 23 nt, Human
uggagugcaguggcacgaucucg

SEQ ID NO: 1151466 - RNA, 24 nt, Human
uggagugcaguggcacgaucucgg

SEQ ID NO: 1151467 - RNA, 24 nt, Human
uggccaggcuggucuugaacuccu

SEQ ID NO: 1151468 - RNA, 21 nt, Human
uggcgaggagaagggagcugg

SEQ ID NO: 1151469 - RNA, 22 nt, Human
ugggaaaggucaguaaccaggc

SEQ ID NO: 1151470 - RNA, 21 nt, Human
ugggauuacaggcacccgcca

SEQ ID NO: 1151471 - RNA, 22 nt, Human
ugggauuacaggcacccgccac

SEQ ID NO: 1151472 - RNA, 24 nt, Human
ugggauuacaggcacccgccacca

SEQ ID NO: 1151473 - RNA, 18 nt, Human
ugggauuacaggcgugag

SEQ ID NO: 1151474 - RNA, 22 nt, Human
ugggauuacaggcgugagccac

SEQ ID NO: 1151475 - RNA, 23 nt, Human
ugggauuacaggcgugagccacc

SEQ ID NO: 1151476 - RNA, 24 nt, Human
ugggauuacaggcgugagccacca

SEQ ID NO: 1151477 - RNA, 25 nt, Human
ugggauuacaggcgugagccaccau

SEQ ID NO: 1151478 - RNA, 22 nt, Human
uguaaaaucacagacccugcgc

SEQ ID NO: 1151479 - RNA, 19 nt, Human
ugugaugagaagaauuagu

SEQ ID NO: 1151480 - RNA, 19 nt, Human
uguguuuuacauacaugua

SEQ ID NO: 1151481 - RNA, 21 nt, Human
uucaagcgauucuccugccuc

SEQ ID NO: 1151482 - RNA, 23 nt, Human
uucaagcgauucuccugccucag

SEQ ID NO: 1151483 - RNA, 24 nt, Human
uucaagcgauucuccugccucagc

SEQ ID NO: 1151484 - RNA, 20 nt, Human
uuccugcuauguagccacaa

SEQ ID NO: 1151485 - RNA, 28 nt, Human
uugacugcaaugguuaaguucucugcaa

SEQ ID NO: 1151486 - RNA, 24 nt, Human
uugcucaggcuggagugcaguggc

SEQ ID NO: 1151487 - RNA, 24 nt, Human
uugcucuguugcucaggcuggagu

SEQ ID NO: 1151488 - RNA, 20 nt, Human
uuguaugguucaccacacug

SEQ ID NO: 1151489 - RNA, 19 nt, Human
uuuauaaucacaucugcuu

SEQ ID NO: 1151490 - RNA, 24 nt, Human
uuuauaguagagacgggguuucgc

SEQ ID NO: 1151491 - RNA, 24 nt, Human
uuucgccauguuggccaggcuggu

SEQ ID NO: 1151492 - RNA, 24 nt, Human
uuuuauaguagagacgggguuucg

SEQ ID NO: 1151493 - RNA, 22 nt, Human
uuuuuguauuuuauaguagaga

SEQ ID NO: 1151494 - RNA, 25 nt, Human
uuuuuuguauuuuauaguagagacg

SEQ ID NO: 1151495 - RNA, 19 nt, Human
aaacaaccuucccaaagga

SEQ ID NO: 1151496 - RNA, 22 nt, Human
aaacaagcccccagacucggca

SEQ ID NO: 1151497 - RNA, 22 nt, Human
aaacaggcuggcccaggcaggc

SEQ ID NO: 1151498 - RNA, 18 nt, Human
aaacauuggcaucuucuc

SEQ ID NO: 1151499 - RNA, 21 nt, Human
aaaccaaaacaagcccccaga

SEQ ID NO: 1151500 - RNA, 27 nt, Human
aacacggcaccuggcugagaggacaca

SEQ ID NO: 1151501 - RNA, 21 nt, Human
aacauuggcaucuucucagcg

SEQ ID NO: 1151502 - RNA, 24 nt, Human
aacuucaggggcccaaacaaccuu

SEQ ID NO: 1151503 - RNA, 23 nt, Human
aagcagcagccacccugggccug

SEQ ID NO: 1151504 - RNA, 19 nt, Human
aagugcacgcacaguacag

SEQ ID NO: 1151505 - RNA, 26 nt, Human
accccaugagcaccuccacaccagcc

SEQ ID NO: 1151506 - RNA, 23 nt, Human
accucccccacuuagcaggaagc

SEQ ID NO: 1151507 - RNA, 18 nt, Human
acucagcccacccacgcc

SEQ ID NO: 1151508 - RNA, 19 nt, Human
agaagccagguguccugac

SEQ ID NO: 1151509 - RNA, 25 nt, Human
agauggaacuucaggggcccaaaca

SEQ ID NO: 1151510 - RNA, 22 nt, Human
agcauuaaaugaaaccaucuga

SEQ ID NO: 1151511 - RNA, 18 nt, Human
agccacaaagacugcagc

SEQ ID NO: 1151512 - RNA, 20 nt, Human
agcccuccaccucacagaug

SEQ ID NO: 1151513 - RNA, 22 nt, Human
aggcagccacaaagacugcagc

SEQ ID NO: 1151514 - RNA, 26 nt, Human
aggcagcuaacguggucccuaggugg

SEQ ID NO: 1151515 - RNA, 25 nt, Human
aggcaggcagccacaaagacugcag

SEQ ID NO: 1151516 - RNA, 20 nt, Human
aggcgucgugacgucgggac

SEQ ID NO: 1151517 - RNA, 24 nt, Human
aggcgucgugacgucgggacggca

SEQ ID NO: 1151518 - RNA, 21 nt, Human
aguuucuggguccuggcuuag

SEQ ID NO: 1151519 - RNA, 18 nt, Human
caaaacaagcccccagac

SEQ ID NO: 1151520 - RNA, 21 nt, Human
caaaacaagcccccagacucg

SEQ ID NO: 1151521 - RNA, 24 nt, Human
caaaacaagcccccagacucggca

SEQ ID NO: 1151522 - RNA, 19 nt, Human
caaagacugcagccagcau

SEQ ID NO: 1151523 - RNA, 24 nt, Human
caagcaccgcaccccaugagcacc

SEQ ID NO: 1151524 - RNA, 24 nt, Human
caagcccccagacucggcaguaua

SEQ ID NO: 1151525 - RNA, 18 nt, Human
cacagccucaggcuggcu

SEQ ID NO: 1151526 - RNA, 19 nt, Human
caccccaugagcaccucca

SEQ ID NO: 1151527 - RNA, 23 nt, Human
caccccaugagcaccuccacacc

SEQ ID NO: 1151528 - RNA, 27 nt, Human
caccccaugagcaccuccacaccagcc

SEQ ID NO: 1151529 - RNA, 25 nt, Human
caccugagcccagguacgaaaaggc

SEQ ID NO: 1151530 - RNA, 19 nt, Human
cacgcacaguacaggagcc

SEQ ID NO: 1151531 - RNA, 21 nt, Human
cagaccagcguguccugcccu

SEQ ID NO: 1151532 - RNA, 23 nt, Human
cagaggucacccauggggagcac

SEQ ID NO: 1151533 - RNA, 22 nt, Human
cagccacaaagacugcagccag

SEQ ID NO: 1151534 - RNA, 21 nt, Human
cagccccugggagagccuccc

SEQ ID NO: 1151535 - RNA, 18 nt, Human
cagccgguggaugaaaca

SEQ ID NO: 1151536 - RNA, 27 nt, Human
caggagccuagggcuaacacucgggaa

SEQ ID NO: 1151537 - RNA, 20 nt, Human
caggcaccuccacucagccc

SEQ ID NO: 1151538 - RNA, 19 nt, Human
ccaaaacaagcccccagac

SEQ ID NO: 1151539 - RNA, 21 nt, Human
ccaagcaccgcaccccaugag

SEQ ID NO: 1151540 - RNA, 22 nt, Human
ccaagcaccgcaccccaugagc

SEQ ID NO: 1151541 - RNA, 23 nt, Human
ccacugccuccagaggucaccca

SEQ ID NO: 1151542 - RNA, 21 nt, Human
ccagacucggcaguauaaagc

SEQ ID NO: 1151543 - RNA, 24 nt, Human
cccacgccgcgagugcucugcagg

SEQ ID NO: 1151544 - RNA, 21 nt, Human
cccagacucggcaguauaaag

SEQ ID NO: 1151545 - RNA, 22 nt, Human
cccaggcaggcagccacaaaga

SEQ ID NO: 1151546 - RNA, 18 nt, Human
cccaugagcaccuccaca

SEQ ID NO: 1151547 - RNA, 18 nt, Human
cccauggggcucccccuc

SEQ ID NO: 1151548 - RNA, 19 nt, Human
cccaugugguguagaaggc

SEQ ID NO: 1151549 - RNA, 21 nt, Human
ccccaaaccaaaacaagcccc

SEQ ID NO: 1151550 - RNA, 24 nt, Human
cccccaaaccaaaacaagccccca

SEQ ID NO: 1151551 - RNA, 22 nt, Human
cccccaucagccccugggagag

SEQ ID NO: 1151552 - RNA, 21 nt, Human
cccugggccuggcugucuccc

SEQ ID NO: 1151553 - RNA, 19 nt, Human
ccgagcccugauucucccu

SEQ ID NO: 1151554 - RNA, 22 nt, Human
ccuccacaccagcccuccaccu

SEQ ID NO: 1151555 - RNA, 22 nt, Human
ccuccaggcagcgcuggaugcc

SEQ ID NO: 1151556 - RNA, 18 nt, Human
ccucuagccugccugggg

SEQ ID NO: 1151557 - RNA, 18 nt, Human
ccucuccuuccugccucc

SEQ ID NO: 1151558 - RNA, 18 nt, Human
cgaaaaggcgagcccaca

SEQ ID NO: 1151559 - RNA, 20 nt, Human
cucacagaacccccccauca

SEQ ID NO: 1151560 - RNA, 18 nt, Human
cucacagauguggaaacc

SEQ ID NO: 1151561 - RNA, 20 nt, Human
cuccacaccagcccuccacc

SEQ ID NO: 1151562 - RNA, 21 nt, Human
cuccacaccagcccuccaccu

SEQ ID NO: 1151563 - RNA, 22 nt, Human
cuccacaccagcccuccaccuc

SEQ ID NO: 1151564 - RNA, 24 nt, Human
cucccaggcaccuccacucagccc

SEQ ID NO: 1151565 - RNA, 22 nt, Human
cucccaggcaggggaugagggu

SEQ ID NO: 1151566 - RNA, 19 nt, Human
cucccagugggaggccuug

SEQ ID NO: 1151567 - RNA, 24 nt, Human
cugcagccagcaugggcccuggcc

SEQ ID NO: 1151568 - RNA, 21 nt, Human
cugcccccaaaccaaaacaag

SEQ ID NO: 1151569 - RNA, 18 nt, Human
cugccuucccaggcgugg

SEQ ID NO: 1151570 - RNA, 18 nt, Human
cuggagcccggcaucccc

SEQ ID NO: 1151571 - RNA, 20 nt, Human
cuggggugugcccacagcaa

SEQ ID NO: 1151572 - RNA, 21 nt, Human
cuucccgagcccugauucucc

SEQ ID NO: 1151573 - RNA, 21 nt, Human
cuucucagcgaugacucccag

SEQ ID NO: 1151574 - RNA, 22 nt, Human
gaaggcccgugcucccccacuc

SEQ ID NO: 1151575 - RNA, 22 nt, Human
gacccuuuggaggccacagccu

SEQ ID NO: 1151576 - RNA, 20 nt, Human
gagcaccuccacaccagccc

SEQ ID NO: 1151577 - RNA, 23 nt, Human
gagcccacagucccagcucccaa

SEQ ID NO: 1151578 - RNA, 22 nt, Human
gagcccugauucucccucacag

SEQ ID NO: 1151579 - RNA, 19 nt, Human
gagccgcugucucuccccc

SEQ ID NO: 1151580 - RNA, 22 nt, Human
gaggguggcgguggccacaccg

SEQ ID NO: 1151581 - RNA, 21 nt, Human
gagucggcggaggcugcagug

SEQ ID NO: 1151582 - RNA, 19 nt, Human
gagugcucugcagguuggc

SEQ ID NO: 1151583 - RNA, 21 nt, Human
gaugccggagcaggugcuucu

SEQ ID NO: 1151584 - RNA, 19 nt, Human
gccacauuuauuucuuaau

SEQ ID NO: 1151585 - RNA, 18 nt, Human
gcccugccucuccuuccu

SEQ ID NO: 1151586 - RNA, 19 nt, Human
gcccugccucuccuuccug

SEQ ID NO: 1151587 - RNA, 18 nt, Human
gccucagacaccugcgac

SEQ ID NO: 1151588 - RNA, 21 nt, Human
gccuccucucaccaucaacuc

SEQ ID NO: 1151589 - RNA, 20 nt, Human
gccuggggcccauggggcuc

SEQ ID NO: 1151590 - RNA, 20 nt, Human
gccugugccuccucuagccu

SEQ ID NO: 1151591 - RNA, 21 nt, Human
gcgcccagacccuuuggaggc

SEQ ID NO: 1151592 - RNA, 21 nt, Human
gcugcccccaaaccaaaacaa

SEQ ID NO: 1151593 - RNA, 24 nt, Human
ggacagagccucaagugcacgcag

SEQ ID NO: 1151594 - RNA, 24 nt, Human
ggcagcucccaggcaccuccacuc

SEQ ID NO: 1151595 - RNA, 21 nt, Human
ggcccgugcucccccacuccu

SEQ ID NO: 1151596 - RNA, 24 nt, Human
ggcuucccgagcccugauucuccc

SEQ ID NO: 1151597 - RNA, 19 nt, Human
ggguccuagccaaggccaa

SEQ ID NO: 1151598 - RNA, 19 nt, Human
ggguguaagacaucgggac

SEQ ID NO: 1151599 - RNA, 20 nt, Human
gguccacugccuccagaggu

SEQ ID NO: 1151600 - RNA, 19 nt, Human
ggucccuaggugguuucug

SEQ ID NO: 1151601 - RNA, 19 nt, Human
guccacugccuccagaggu

SEQ ID NO: 1151602 - RNA, 22 nt, Human
guggcgguggccacaccgcacc

SEQ ID NO: 1151603 - RNA, 19 nt, Human
gugguguagaaggcccgug

SEQ ID NO: 1151604 - RNA, 23 nt, Human
uaaaugaaaccaucugagggaga

SEQ ID NO: 1151605 - RNA, 19 nt, Human
uacaagccagggacgcggc

SEQ ID NO: 1151606 - RNA, 20 nt, Human
uaucuggagccgcagcggaa

SEQ ID NO: 1151607 - RNA, 20 nt, Human
ucagaccagcguguccugcc

SEQ ID NO: 1151608 - RNA, 19 nt, Human
ucagccccugggagagccu

SEQ ID NO: 1151609 - RNA, 20 nt, Human
ucaggggcccaaacaaccuu

SEQ ID NO: 1151610 - RNA, 20 nt, Human
uccagaggucacccaugggg

SEQ ID NO: 1151611 - RNA, 19 nt, Human
ucccagcucccaaacaggc

SEQ ID NO: 1151612 - RNA, 25 nt, Human
ucccagcucccaaacaggcuggccc

SEQ ID NO: 1151613 - RNA, 18 nt, Human
ucccgagcccugauucuc

SEQ ID NO: 1151614 - RNA, 21 nt, Human
uccucucaccaucaacucuga

SEQ ID NO: 1151615 - RNA, 20 nt, Human
ucgggacaggcgucgugacg

SEQ ID NO: 1151616 - RNA, 21 nt, Human
ucuccauggcaguggaggcuu

SEQ ID NO: 1151617 - RNA, 19 nt, Human
ucucccaagcaccgcaccc

SEQ ID NO: 1151618 - RNA, 20 nt, Human
ucucccaagcaccgcacccc

SEQ ID NO: 1151619 - RNA, 18 nt, Human
ucucccccaggcauggga

SEQ ID NO: 1151620 - RNA, 21 nt, Human
ugaaacauuggcaucuucuca

SEQ ID NO: 1151621 - RNA, 18 nt, Human
ugacauggggucuggggu

SEQ ID NO: 1151622 - RNA, 21 nt, Human
ugacauggggucuggggugug

SEQ ID NO: 1151623 - RNA, 18 nt, Human
ugagaggacacagccagg

SEQ ID NO: 1151624 - RNA, 22 nt, Human
ugagcaccuccacaccagcccu

SEQ ID NO: 1151625 - RNA, 18 nt, Human
ugaggguggcgguggcca

SEQ ID NO: 1151626 - RNA, 24 nt, Human
ugaggguggcgguggccacaccgg

SEQ ID NO: 1151627 - RNA, 19 nt, Human
ugaguuggccguggcaggg

SEQ ID NO: 1151628 - RNA, 19 nt, Human
ugcaagaagcuguucugca

SEQ ID NO: 1151629 - RNA, 23 nt, Human
ugcccccaaaccaaaacaagccc

SEQ ID NO: 1151630 - RNA, 26 nt, Human
ugcccugccucuccuuccugccucca

SEQ ID NO: 1151631 - RNA, 20 nt, Human
ugccuccagaggucacccau

SEQ ID NO: 1151632 - RNA, 21 nt, Human
uggcagggccugugccuccuc

SEQ ID NO: 1151633 - RNA, 18 nt, Human
uggcucuggguccuagcc

SEQ ID NO: 1151634 - RNA, 25 nt, Human
uggcuucccgagcccugauucuccc

SEQ ID NO: 1151635 - RNA, 20 nt, Human
ugggagagccucccaggcag

SEQ ID NO: 1151636 - RNA, 20 nt, Human
ugggaggccuuggacuuggc

SEQ ID NO: 1151637 - RNA, 21 nt, Human
uggggucuggggugugcccac

SEQ ID NO: 1151638 - RNA, 23 nt, Human
uggguccuggcuuaggcacuccu

SEQ ID NO: 1151639 - RNA, 23 nt, Human
ugggugggggaguuugugccugu

SEQ ID NO: 1151640 - RNA, 23 nt, Human
uguagaaggcccgugcuccccca

SEQ ID NO: 1151641 - RNA, 21 nt, Human
uguccugcccugccucuccuu

SEQ ID NO: 1151642 - RNA, 25 nt, Human
uguccugcccugccucuccuuccug

SEQ ID NO: 1151643 - RNA, 21 nt, Human
ugugcccacagcaaucacaua

SEQ ID NO: 1151644 - RNA, 26 nt, Human
ugugcccacagcaaucacauauguac

SEQ ID NO: 1151645 - RNA, 20 nt, Human
uguguugaguaagagccaca

SEQ ID NO: 1151646 - RNA, 20 nt, Human
uuccaaagaaagcugcugug

SEQ ID NO: 1151647 - RNA, 21 nt, Human
uucccaugugguguagaaggc

SEQ ID NO: 1151648 - RNA, 23 nt, Human
uucugguggaggauggcugcccc

SEQ ID NO: 1151649 - RNA, 23 nt, Human
uuggcaucuucucagcgaugacu

SEQ ID NO: 1151650 - RNA, 18 nt, Human
uuuuuuuuuuuuuuuuug

SEQ ID NO: 1151651 - RNA, 23 nt, Human
uuuuuuuuuuuuuuuuuuguguu

SEQ ID NO: 1151652 - RNA, 20 nt, Human
aagccccagccugguccacc

SEQ ID NO: 1151653 - RNA, 21 nt, Human
aagcccccugucccggcccag

SEQ ID NO: 1151654 - RNA, 23 nt, Human
acccggcugaggaccugcuggcg

SEQ ID NO: 1151655 - RNA, 20 nt, Human
accggcagaagcugggcgcc

SEQ ID NO: 1151656 - RNA, 21 nt, Human
agcagcccggcccgcgcgcgc

SEQ ID NO: 1151657 - RNA, 18 nt, Human
agccgcgggcgcggagga

SEQ ID NO: 1151658 - RNA, 18 nt, Human
agccgcucggccgccguc

SEQ ID NO: 1151659 - RNA, 22 nt, Human
agcuugaaggccugcugccugg

SEQ ID NO: 1151660 - RNA, 22 nt, Human
aggcaagaggguuguauauuuu

SEQ ID NO: 1151661 - RNA, 18 nt, Human
aggccgcggugcgcgccg

SEQ ID NO: 1151662 - RNA, 21 nt, Human
auagauccucagggcccaaaa

SEQ ID NO: 1151663 - RNA, 19 nt, Human
caaaauagauccucagggc

SEQ ID NO: 1151664 - RNA, 19 nt, Human
caagccccagccuggucca

SEQ ID NO: 1151665 - RNA, 20 nt, Human
caccgcguaccucaugcggc

SEQ ID NO: 1151666 - RNA, 19 nt, Human
caccuggagcccacgugcg

SEQ ID NO: 1151667 - RNA, 22 nt, Human
cacgcugugcgucaacgucucc

SEQ ID NO: 1151668 - RNA, 22 nt, Human
cagccugguccaccucggaggc

SEQ ID NO: 1151669 - RNA, 19 nt, Human
caggcccaguccugccugc

SEQ ID NO: 1151670 - RNA, 22 nt, Human
caugucauuuaugauguauaua

SEQ ID NO: 1151671 - RNA, 24 nt, Human
ccaaaagcagacucuucggcgggc

SEQ ID NO: 1151672 - RNA, 21 nt, Human
ccacaaauagacuccugggcu

SEQ ID NO: 1151673 - RNA, 19 nt, Human
ccagaaguaugaggaggcc

SEQ ID NO: 1151674 - RNA, 23 nt, Human
cccaaaauagauccucagggccc

SEQ ID NO: 1151675 - RNA, 18 nt, Human
cccaagccccagccuggu

SEQ ID NO: 1151676 - RNA, 23 nt, Human
cccacauucaccucuuuccacuu

SEQ ID NO: 1151677 - RNA, 25 nt, Human
cccacgugcgccgccauggaggccg

SEQ ID NO: 1151678 - RNA, 27 nt, Human
cccacgugcgccgccauggaggccgcg

SEQ ID NO: 1151679 - RNA, 21 nt, Human
ccccagccuuaggguugggcc

SEQ ID NO: 1151680 - RNA, 21 nt, Human
cccccagccuuaggguugggc

SEQ ID NO: 1151681 - RNA, 20 nt, Human
ccccggccccaacgagaccc

SEQ ID NO: 1151682 - RNA, 25 nt, Human
ccccggccccaacgagacccaagcc

SEQ ID NO: 1151683 - RNA, 20 nt, Human
ccuccaggcccaguccugcc

SEQ ID NO: 1151684 - RNA, 27 nt, Human
ccugagcccccaaaauagauccucagg

SEQ ID NO: 1151685 - RNA, 24 nt, Human
ccugggcgggcgccugagccccca

SEQ ID NO: 1151686 - RNA, 22 nt, Human
cgagacccaagcccccuguccc

SEQ ID NO: 1151687 - RNA, 24 nt, Human
cgagacccaagcccccugucccgg

SEQ ID NO: 1151688 - RNA, 20 nt, Human
cgccugagcccccaaaauag

SEQ ID NO: 1151689 - RNA, 19 nt, Human
cgcgggggacccaagcccc

SEQ ID NO: 1151690 - RNA, 19 nt, Human
cggcgccugccuagucuac

SEQ ID NO: 1151691 - RNA, 23 nt, Human
cggcgggcgccaugggaccggca

SEQ ID NO: 1151692 - RNA, 22 nt, Human
cggcucccacaaauagacuccu

SEQ ID NO: 1151693 - RNA, 19 nt, Human
cgucgcgcccucacucuuc

SEQ ID NO: 1151694 - RNA, 20 nt, Human
cuccaggcccaguccugccu

SEQ ID NO: 1151695 - RNA, 22 nt, Human
cuccaggcccaguccugccugc

SEQ ID NO: 1151696 - RNA, 20 nt, Human
cucccacaaauagacuccug

SEQ ID NO: 1151697 - RNA, 20 nt, Human
cuggagcccacgugcgccgc

SEQ ID NO: 1151698 - RNA, 21 nt, Human
gagcagcuggcgcgcgcggga

SEQ ID NO: 1151699 - RNA, 18 nt, Human
gaggagcagcuggcgcgc

SEQ ID NO: 1151700 - RNA, 24 nt, Human
gcccccagccuuaggguugggccc

SEQ ID NO: 1151701 - RNA, 24 nt, Human
gcccgcgggggacccaagccccag

SEQ ID NO: 1151702 - RNA, 21 nt, Human
gcgcgagccgcgggcgcggag

SEQ ID NO: 1151703 - RNA, 21 nt, Human
gcggugcgcgccggcggcgcc

SEQ ID NO: 1151704 - RNA, 20 nt, Human
ggacccgggggcgcccggcg

SEQ ID NO: 1151705 - RNA, 21 nt, Human
ggacccgggggcgcccggcgg

SEQ ID NO: 1151706 - RNA, 18 nt, Human
gucucccgccagcagccc

SEQ ID NO: 1151707 - RNA, 25 nt, Human
guuuuguguuccuuaacuauuuugu

SEQ ID NO: 1151708 - RNA, 21 nt, Human
uagcagaaccgaacccgggcu

SEQ ID NO: 1151709 - RNA, 23 nt, Human
ucauuuaugauguauauaaccuc

SEQ ID NO: 1151710 - RNA, 19 nt, Human
ucggaggccucuaggaccc

SEQ ID NO: 1151711 - RNA, 21 nt, Human
ucggaggccucuaggacccgg

SEQ ID NO: 1151712 - RNA, 20 nt, Human
ucuggcaaagccugccgugu

SEQ ID NO: 1151713 - RNA, 21 nt, Human
ucuuccucgggagcgcgcgag

SEQ ID NO: 1151714 - RNA, 21 nt, Human
ugaaucuugucauaacaguuu

SEQ ID NO: 1151715 - RNA, 19 nt, Human
ugaggaggcccuccaggcc

SEQ ID NO: 1151716 - RNA, 18 nt, Human
ugaggcuugaagcuugaa

SEQ ID NO: 1151717 - RNA, 23 nt, Human
ugccuggaggaaggaugucccug

SEQ ID NO: 1151718 - RNA, 24 nt, Human
ugccuggaggaaggaugucccugc

SEQ ID NO: 1151719 - RNA, 22 nt, Human
uggcgcaccuggagcccacgug

SEQ ID NO: 1151720 - RNA, 19 nt, Human
uggucucagcuccagaagu

SEQ ID NO: 1151721 - RNA, 24 nt, Human
uuuaaugccugaaaucauaagaau

SEQ ID NO: 1151722 - RNA, 23 nt, Human
uuuccacuuaaacgugucccaug

SEQ ID NO: 1151723 - RNA, 25 nt, Human
aaaacaaaacaaaacaaaaaguuaa

SEQ ID NO: 1151724 - RNA, 19 nt, Human
aaacaaaacaaaacaaaaa

SEQ ID NO: 1151725 - RNA, 22 nt, Human
aaacaaaacaaaacaaaacaaa

SEQ ID NO: 1151726 - RNA, 22 nt, Human
aaacaaaacaaaacaaaacaaa

SEQ ID NO: 1151727 - RNA, 22 nt, Human
aaaccagagaccaaacaauuga

SEQ ID NO: 1151728 - RNA, 26 nt, Human
aaccagagaccaaacaauugagcuuu

SEQ ID NO: 1151729 - RNA, 24 nt, Human
aacuaaaugcagaaguuucucaag

SEQ ID NO: 1151730 - RNA, 20 nt, Human
aagaaccaggacacaugaga

SEQ ID NO: 1151731 - RNA, 21 nt, Human
aagccaguccaguaugaccga

SEQ ID NO: 1151732 - RNA, 22 nt, Human
aaugaaaaggcagccauuaaaa

SEQ ID NO: 1151733 - RNA, 27 nt, Human
aaugcaaaacaaaacaaaacaaaacaa

SEQ ID NO: 1151734 - RNA, 22 nt, Human
aauggaucaauuguauaccaag

SEQ ID NO: 1151735 - RNA, 24 nt, Human
aauggcaccuucaaaaggggcgau

SEQ ID NO: 1151736 - RNA, 18 nt, Human
acaaaacaaaacaaaaag

SEQ ID NO: 1151737 - RNA, 27 nt, Human
acaaaacaaaacaaaacaaaacaaaaa

SEQ ID NO: 1151738 - RNA, 24 nt, Human
acaugacauuuuaucuacaacucc

SEQ ID NO: 1151739 - RNA, 21 nt, Human
accaaaucauauccuuaaaac

SEQ ID NO: 1151740 - RNA, 21 nt, Human
accaagaaguauuuggcucau

SEQ ID NO: 1151741 - RNA, 24 nt, Human
acccauuuguuuugccuggaaaga

SEQ ID NO: 1151742 - RNA, 22 nt, Human
acguacucaagauucauguuaa

SEQ ID NO: 1151743 - RNA, 22 nt, Human
agguagaagauaacugaaaaga

SEQ ID NO: 1151744 - RNA, 20 nt, Human
caaaacaaaacaaaaaguua

SEQ ID NO: 1151745 - RNA, 24 nt, Human
caaaacaaaacaaaacaaaaaguu

SEQ ID NO: 1151746 - RNA, 21 nt, Human
caaaacaaaacaaaacaaaac

SEQ ID NO: 1151747 - RNA, 24 nt, Human
caaaacaaaacaaaacaaaacaaa

SEQ ID NO: 1151748 - RNA, 24 nt, Human
caaaacaaaacaaaacaaaacaaa

SEQ ID NO: 1151749 - RNA, 31 nt, Human; identical to SEQ ID NO: 461509

SEQ ID NO: 1151750 - RNA, 25 nt, Human
caacuccuguuugcuuuacugaggg

SEQ ID NO: 1151751 - RNA, 23 nt, Human
caagcaaugguccacguacucaa

SEQ ID NO: 1151752 - RNA, 21 nt, Human
cagaucacuacguagaaaucu

SEQ ID NO: 1151753 - RNA, 20 nt, Human
caggagguagaagauaacug

SEQ ID NO: 1151754 - RNA, 18 nt, Human
cagggcuccgggcaugcc

SEQ ID NO: 1151755 - RNA, 23 nt, Human
caguuaaaauaaaauuugccaug

SEQ ID NO: 1151756 - RNA, 24 nt, Human
cauugcacuucauuuguuauagca

SEQ ID NO: 1151757 - RNA, 20 nt, Human
cccaaugacuacauacauag

SEQ ID NO: 1151758 - RNA, 21 nt, Human
ccucugccacauuaugauuuc

SEQ ID NO: 1151759 - RNA, 24 nt, Human
cucaacuuucuucuucccaccacc

SEQ ID NO: 1151760 - RNA, 22 nt, Human
cucuaaggaugaaaaccagaga

SEQ ID NO: 1151761 - RNA, 20 nt, Human
cugaaaagacuaaugcaaca

SEQ ID NO: 1151762 - RNA, 18 nt, Human
cuucccaccaccucugcc

SEQ ID NO: 1151763 - RNA, 24 nt, Human
cuuuuccaguuuaauuugcaaaca

SEQ ID NO: 1151764 - RNA, 18 nt, Human
gaagauguaagaaccagg

SEQ ID NO: 1151765 - RNA, 23 nt, Human
gaagccaguccaguaugaccgag

SEQ ID NO: 1151766 - RNA, 24 nt, Human
gaccuuuaacauuuucaacaauuu

SEQ ID NO: 1151767 - RNA, 19 nt, Human
gauguaagaaccaggacac

SEQ ID NO: 1151768 - RNA, 18 nt, Human
ggagguagaagauaacug

SEQ ID NO: 1151769 - RNA, 21 nt, Human
ggauaucuggaguuaaaaaug

SEQ ID NO: 1151770 - RNA, 25 nt, Human
uaaauggaucaauuguauaccaaga

SEQ ID NO: 1151771 - RNA, 23 nt, Human
uaacacaaagucuucccauaaaa

SEQ ID NO: 1151772 - RNA, 21 nt, Human
uacaguagaaaauacaggagg

SEQ ID NO: 1151773 - RNA, 19 nt, Human
uaccaagaaguauuuggcu

SEQ ID NO: 1151774 - RNA, 21 nt, Human
uagcagcaagaaaagaugaaa

SEQ ID NO: 1151775 - RNA, 18 nt, Human
uaggaagauguaagaacc

SEQ ID NO: 1151776 - RNA, 20 nt, Human
uaggauaucuggaguuaaaa

SEQ ID NO: 1151777 - RNA, 21 nt, Human
uauagcaaauacucuaagcca

SEQ ID NO: 1151778 - RNA, 23 nt, Human
uaucaaaguuacucauuuuaaca

SEQ ID NO: 1151779 - RNA, 23 nt, Human
uaucuggaguuaaaaaugcaaaa

SEQ ID NO: 1151780 - RNA, 25 nt, Human
ucaguuauaauguucuuuuuaaggg

SEQ ID NO: 1151781 - RNA, 21 nt, Human
ucauugaugagcagggcuccg

SEQ ID NO: 1151782 - RNA, 20 nt, Human
uccacucagucucugguggc

SEQ ID NO: 1151783 - RNA, 21 nt, Human
ucccaauuagaacaugcugac

SEQ ID NO: 1151784 - RNA, 20 nt, Human
ucuauagcuccuguagcuac

SEQ ID NO: 1151785 - RNA, 18 nt, Human
ugaaaagaauacccauuu

SEQ ID NO: 1151786 - RNA, 22 nt, Human
ugaaaaggcagccauuaaaaua

SEQ ID NO: 1151787 - RNA, 21 nt, Human
ugaaagcccuuauaucaugcu

SEQ ID NO: 1151788 - RNA, 21 nt, Human
ugaauacauuuugccugugca

SEQ ID NO: 1151789 - RNA, 24 nt, Human
ugacuacauacauagauggguagc

SEQ ID NO: 1151790 - RNA, 23 nt, Human
ugagacucuggauacuuuuccag

SEQ ID NO: 1151791 - RNA, 20 nt, Human
ugcaaaacaaaacaaaacaa

SEQ ID NO: 1151792 - RNA, 25 nt, Human
ugcaaaacaaaacaaaacaaaacaa

SEQ ID NO: 1151793 - RNA, 26 nt, Human
ugcaagcaaugguccacguacucaag

SEQ ID NO: 1151794 - RNA, 19 nt, Human
ugccauauuaucucacaaa

SEQ ID NO: 1151795 - RNA, 18 nt, Human
ugccuuuugagacucugg

SEQ ID NO: 1151796 - RNA, 23 nt, Human
uggauacuuuuccaguuuaauuu

SEQ ID NO: 1151797 - RNA, 21 nt, Human
uggcaauuaaaaaauggcaac

SEQ ID NO: 1151798 - RNA, 18 nt, Human
uggcucauaagaauggca

SEQ ID NO: 1151799 - RNA, 22 nt, Human
ugucauugcacuucauuuguua

SEQ ID NO: 1151800 - RNA, 25 nt, Human
ugucauugcacuucauuuguuauag

SEQ ID NO: 1151801 - RNA, 18 nt, Human
uguggcuacauuuucccc

SEQ ID NO: 1151802 - RNA, 22 nt, Human
uuaacacaaagucuucccauaa

SEQ ID NO: 1151803 - RNA, 19 nt, Human
uucaccccauucacaacaa

SEQ ID NO: 1151804 - RNA, 26 nt, Human
uucacuuuuaacacaaagucuuccca

SEQ ID NO: 1151805 - RNA, 20 nt, Human
uucccaccaccucugccaca

SEQ ID NO: 1151806 - RNA, 24 nt, Human
uuucaagucuguucuccauggcuu

SEQ ID NO: 1151807 - RNA, 25 nt, Human
uuugcaaacagaauuuuuauaacaa

SEQ ID NO: 1151808 - RNA, 24 nt, Human
aaaaagacaaacuuuugaaacagg

SEQ ID NO: 1151809 - RNA, 25 nt, Human
aaaacucaaaacaaaauccaaaucu

SEQ ID NO: 1151810 - RNA, 19 nt, Human
aaagcaguccaucaaaccc

SEQ ID NO: 1151811 - RNA, 23 nt, Human
aacaaaagcaacaucuaauuaac

SEQ ID NO: 1151812 - RNA, 19 nt, Human
aaggugcaaaauaaggagc

SEQ ID NO: 1151813 - RNA, 26 nt, Human
acaaacuuuugaaacaggacuuacug

SEQ ID NO: 1151814 - RNA, 18 nt, Human
acaccccgcaacaucccc

SEQ ID NO: 1151815 - RNA, 24 nt, Human
acagcauuugcuucuacugcccau

SEQ ID NO: 1151816 - RNA, 23 nt, Human
aggaggcaguuugugaagucaaa

SEQ ID NO: 1151817 - RNA, 21 nt, Human
aggcagcauggucccacugcu

SEQ ID NO: 1151818 - RNA, 22 nt, Human
agggagucaaauacauuugucu

SEQ ID NO: 1151819 - RNA, 21 nt, Human
agguagaagcaaaaaaagaca

SEQ ID NO: 1151820 - RNA, 18 nt, Human
aguggaaaauaguggcac

SEQ ID NO: 1151821 - RNA, 21 nt, Human
aucaaacccugaauacuucgc

SEQ ID NO: 1151822 - RNA, 20 nt, Human
caaaauccaaaucuaguucu

SEQ ID NO: 1151823 - RNA, 19 nt, Human
caacagcauuugcuucuac

SEQ ID NO: 1151824 - RNA, 18 nt, Human
cacaccccgcaacauccc

SEQ ID NO: 1151825 - RNA, 25 nt, Human
cacugaagguagaagcaaaaaaaga

SEQ ID NO: 1151826 - RNA, 31 nt, Human
caucauuauuuuguuucuccagcaauuuuaa

SEQ ID NO: 1151827 - RNA, 22 nt, Human
cgcaacauccccuuuacaaaug

SEQ ID NO: 1151828 - RNA, 21 nt, Human
cuccagcaauuuuaguggcag

SEQ ID NO: 1151829 - RNA, 22 nt, Human
cuccucaacagcaucacacccc

SEQ ID NO: 1151830 - RNA, 23 nt, Human
cugaaauauaaggaagauaaggu

SEQ ID NO: 1151831 - RNA, 20 nt, Human
gcaguggaaaauaguggcac

SEQ ID NO: 1151832 - RNA, 22 nt, Human
ggaaugccauccuccagccucc

SEQ ID NO: 1151833 - RNA, 19 nt, Human
ggcacugaagguagaagca

SEQ ID NO: 1151834 - RNA, 19 nt, Human
uaagaugaacugaacaaca

SEQ ID NO: 1151835 - RNA, 26 nt, Human
uacaacaguagaauuuaccuuuuaaa

SEQ ID NO: 1151836 - RNA, 18 nt, Human
uacauuguucucucugga

SEQ ID NO: 1151837 - RNA, 23 nt, Human
ucaaaacaaaauccaaaucuagu

SEQ ID NO: 1151838 - RNA, 26 nt, Human
ucaaauguaacaacagcauuugcuuc

SEQ ID NO: 1151839 - RNA, 18 nt, Human
uccaaacgaaaguaaagc

SEQ ID NO: 1151840 - RNA, 22 nt, Human
uccaggccuccugcaauuuccu

SEQ ID NO: 1151841 - RNA, 18 nt, Human
ucuccucaacagcaucac

SEQ ID NO: 1151842 - RNA, 21 nt, Human
ucucuggaggaggcaguuugu

SEQ ID NO: 1151843 - RNA, 24 nt, Human
ucugaaauauaaggaagauaaggu

SEQ ID NO: 1151844 - RNA, 24 nt, Human
ugaacugaacaacagcuucuuuua

SEQ ID NO: 1151845 - RNA, 23 nt, Human
ugaaggugaaucuccucaacagc

SEQ ID NO: 1151846 - RNA, 18 nt, Human
ugaagucaaaacacugca

SEQ ID NO: 1151847 - RNA, 23 nt, Human
uggaaaauaguggcacugaaggu

SEQ ID NO: 1151848 - RNA, 23 nt, Human
uggaaugccauccuccagccucc

SEQ ID NO: 1151849 - RNA, 20 nt, Human
uggugggugcuucuccuuug

SEQ ID NO: 1151850 - RNA, 19 nt, Human
ugugaagucaaaacacugc

SEQ ID NO: 1151851 - RNA, 20 nt, Human
uguugcuucuuuguucugaa

SEQ ID NO: 1151852 - RNA, 20 nt, Human
uucccagaugaagugguggg

SEQ ID NO: 1151853 - RNA, 24 nt, Human
uugggaaagcuaaguuuuaauuuc

SEQ ID NO: 1151854 - RNA, 22 nt, Human
uuuaaaaauccaaaaacucaaa

SEQ ID NO: 1151855 - RNA, 20 nt, Human
uuugaaacaggacuuacuga

SEQ ID NO: 1151856 - RNA, 22 nt, Human
cgcuggcucagcgugaccacgc

SEQ ID NO: 1151857 - RNA, 18 nt, Human
aaaccuggauaaaggcua

SEQ ID NO: 1151858 - RNA, 24 nt, Human
auaagacacuguucguauaaauaa

SEQ ID NO: 1151859 - RNA, 19 nt, Human
gacacaauauucucuuaag

SEQ ID NO: 1151860 - RNA, 20 nt, Human
gagagaaggcugcucuuugu

SEQ ID NO: 1151861 - RNA, 21 nt, Human
gggauuccuuagauaaaaacc

SEQ ID NO: 1151862 - RNA, 20 nt, Human
uaaaaaggacuuggacacaa

SEQ ID NO: 1151863 - RNA, 22 nt, Human
uaaaaaggacuuggacacaaua

SEQ ID NO: 1151864 - RNA, 21 nt, Human
uccuuagauaaaaaccuggau

SEQ ID NO: 1151865 - RNA, 19 nt, Human
uuauaagaaaauaagacac

SEQ ID NO: 1151866 - RNA, 27 nt, Human
aaaaaagagacagaaaaagggggaccc

SEQ ID NO: 1151867 - RNA, 22 nt, Human
aaaccagaaauagaaaagcggg

SEQ ID NO: 1151868 - RNA, 21 nt, Human
aaacuuuacaaagaaaccgac

SEQ ID NO: 1151869 - RNA, 18 nt, Human
aaagaaaccgacacuuga

SEQ ID NO: 1151870 - RNA, 24 nt, Human
aaaguguugggauuacaggcguga

SEQ ID NO: 1151871 - RNA, 20 nt, Human
aacaacgaccagaggggccc

SEQ ID NO: 1151872 - RNA, 21 nt, Human
aacaacgaccagaggggcccc

SEQ ID NO: 1151873 - RNA, 18 nt, Human
aaccgacacuugagcccc

SEQ ID NO: 1151874 - RNA, 21 nt, Human
aaguguugggauuacaggcgu

SEQ ID NO: 1151875 - RNA, 26 nt, Human
aaguguugggauuacaggcgugagcc

SEQ ID NO: 1151876 - RNA, 24 nt, Human
accauguuggccaggcugaucucg

SEQ ID NO: 1151877 - RNA, 18 nt, Human
acgggguuucaccauguu

SEQ ID NO: 1151878 - RNA, 23 nt, Human
acgggguuucaccauguuggcca

SEQ ID NO: 1151879 - RNA, 24 nt, Human
acgggguuucaccauguuggccag

SEQ ID NO: 1151880 - RNA, 23 nt, Human
agcgaugaaacuuuacaaagaaa

SEQ ID NO: 1151881 - RNA, 23 nt, Human
aggaucauugagcccaggaguuc

SEQ ID NO: 1151882 - RNA, 20 nt, Human
aggccgaggcgggaggauca

SEQ ID NO: 1151883 - RNA, 20 nt, Human
aggccgaggcgggaggauca

SEQ ID NO: 1151884 - RNA, 24 nt, Human
aggcgcgguggcucacuccuguaa

SEQ ID NO: 1151885 - RNA, 23 nt, Human
aggcgggaggaucauugagccca

SEQ ID NO: 1151886 - RNA, 19 nt, Human
agggggugggcgcgggggc

SEQ ID NO: 1151887 - RNA, 23 nt, Human
aguagcugggauuacaggcgcgu

SEQ ID NO: 1151888 - RNA, 20 nt, Human
agugcaauggugcaaucucg

SEQ ID NO: 1151889 - RNA, 24 nt, Human
agugcaauggugcaaucucggcuc

SEQ ID NO: 1151890 - RNA, 18 nt, Human
aguguugggauuacaggc

SEQ ID NO: 1151891 - RNA, 24 nt, Human
auuuuuguauuuuuaguagagacg

SEQ ID NO: 1151892 - RNA, 24 nt, Human
caacaacgaccagaggggccccaa

SEQ ID NO: 1151893 - RNA, 22 nt, Human
caagcaauucucuugccucagc

SEQ ID NO: 1151894 - RNA, 28 nt, Human
cacaacaacgaccagaggggccccaaac

SEQ ID NO: 1151895 - RNA, 24 nt, Human
caccaugcccggcuaauuuuugua

SEQ ID NO: 1151896 - RNA, 21 nt, Human
caccauguuggccaggcugau

SEQ ID NO: 1151897 - RNA, 24 nt, Human
caccauguuggccaggcugaucuc

SEQ ID NO: 1151898 - RNA, 27 nt, Human
caccauguuggccaggcugaucucgaa

SEQ ID NO: 1151899 - RNA, 21 nt, Human
cacugcaaccuccgccucccg

SEQ ID NO: 1151900 - RNA, 23 nt, Human
cacugcaaccuccgccucccggg

SEQ ID NO: 1151901 - RNA, 24 nt, Human
cagaacuuuaggaggccgaggcgg

SEQ ID NO: 1151902 - RNA, 20 nt, Human
cagccuccugaguagcuggg

SEQ ID NO: 1151903 - RNA, 24 nt, Human
caucuagagaagguuuucaaccau

SEQ ID NO: 1151904 - RNA, 24 nt, Human
cauguuggccaggcugaucucgaa

SEQ ID NO: 1151905 - RNA, 23 nt, Human
ccaaaaaaagagacagaaaaagg

SEQ ID NO: 1151906 - RNA, 20 nt, Human
cccggguucaagcaauucuc

SEQ ID NO: 1151907 - RNA, 19 nt, Human
ccgacacuugagccccacu

SEQ ID NO: 1151908 - RNA, 21 nt, Human
ccgcagcgagacccugucucc

SEQ ID NO: 1151909 - RNA, 27 nt, Human
ccgccucccggguucaagcaauucuuu

SEQ ID NO: 1151910 - RNA, 24 nt, Human
ccucccggguucaagcaauucucu

SEQ ID NO: 1151911 - RNA, 18 nt, Human
ccugaccucaggugaucc

SEQ ID NO: 1151912 - RNA, 22 nt, Human
ccugaccucaggugauccgucc

SEQ ID NO: 1151913 - RNA, 23 nt, Human
ccugaguagcugggauuacaggc

SEQ ID NO: 1151914 - RNA, 23 nt, Human
ccugaguagcugggauuacaggc

SEQ ID NO: 1151915 - RNA, 20 nt, Human
cgacacaacaacgaccagag

SEQ ID NO: 1151916 - RNA, 21 nt, Human
cgacuguaacgacuccgggaa

SEQ ID NO: 1151917 - RNA, 24 nt, Human
cgagacccugucuccaaaaaaaga

SEQ ID NO: 1151918 - RNA, 19 nt, Human
cgaggcgggaggaucauug

SEQ ID NO: 1151919 - RNA, 24 nt, Human
cgcucugucacccaagcuggagug

SEQ ID NO: 1151920 - RNA, 23 nt, Human
cgggggcggcaguggagcuggag

SEQ ID NO: 1151921 - RNA, 24 nt, Human
cgggguuucaccauguuggccagg

SEQ ID NO: 1151922 - RNA, 24 nt, Human
cucacuccuguaaucccagaacuu

SEQ ID NO: 1151923 - RNA, 24 nt, Human
cucacugcaaccuccgccucccgg

SEQ ID NO: 1151924 - RNA, 24 nt, Human
cucagccuccugaguagcugggau

SEQ ID NO: 1151925 - RNA, 24 nt, Human
cucccacaguaaagaguacacaaa

SEQ ID NO: 1151926 - RNA, 26 nt, Human
cuccugaccucaggugauccguccgc

SEQ ID NO: 1151927 - RNA, 24 nt, Human
cucgcucugucacccaagcuggag

SEQ ID NO: 1151928 - RNA, 22 nt, Human
cugaguagcugggauuacaggc

SEQ ID NO: 1151929 - RNA, 23 nt, Human
cugcaaccuccgccucccggguu

SEQ ID NO: 1151930 - RNA, 23 nt, Human
cuugccucagccuccugaguagc

SEQ ID NO: 1151931 - RNA, 21 nt, Human
cuuuacaaagaaaccgacacu

SEQ ID NO: 1151932 - RNA, 22 nt, Human
cuuuccggcuaauuucuucuag

SEQ ID NO: 1151933 - RNA, 24 nt, Human
gaaaaguguugggauuacaggcgu

SEQ ID NO: 1151934 - RNA, 21 nt, Human
gacacaacaacgaccagaggg

SEQ ID NO: 1151935 - RNA, 22 nt, Human
gaccucaggugauccguccgcc

SEQ ID NO: 1151936 - RNA, 24 nt, Human
gagacgggguuucaccauguuggc

SEQ ID NO: 1151937 - RNA, 21 nt, Human
gaggaucauugagcccaggag

SEQ ID NO: 1151938 - RNA, 21 nt, Human
gaguaccagcaggacugggca

SEQ ID NO: 1151939 - RNA, 26 nt, Human
gaguagcugggauuacaggcgcgugc

SEQ ID NO: 1151940 - RNA, 18 nt, Human
gauuacaggcgcgugcca

SEQ ID NO: 1151941 - RNA, 18 nt, Human
gauuacaggcgugagcca

SEQ ID NO: 1151942 - RNA, 21 nt, Human
gauuacaggcgugagccacca

SEQ ID NO: 1151943 - RNA, 22 nt, Human
gauuacaggcgugagccaccac

SEQ ID NO: 1151944 - RNA, 22 nt, Human
gcaaccuccgccucccggguuc

SEQ ID NO: 1151945 - RNA, 24 nt, Human
gccaccgcagcgagacccugucuc

SEQ ID NO: 1151946 - RNA, 22 nt, Human
gcccggcuaauuuuuguauuuu

SEQ ID NO: 1151947 - RNA, 19 nt, Human
gcggcaguggagcuggaga

SEQ ID NO: 1151948 - RNA, 27 nt, Human
gcucugucacccaagcuggagugcaau

SEQ ID NO: 1151949 - RNA, 23 nt, Human
gcugaucucgaacuccugaccuc

SEQ ID NO: 1151950 - RNA, 30 nt, Human
gcuggagugcaauggugcaaucucggcucc

SEQ ID NO: 1151951 - RNA, 22 nt, Human
ggaguuccagguugcagugagc

SEQ ID NO: 1151952 - RNA, 19 nt, Human
ggauuacaggcgugagcca

SEQ ID NO: 1151953 - RNA, 19 nt, Human
ggcggcaguggagcuggag

SEQ ID NO: 1151954 - RNA, 21 nt, Human
ggcucacuccuguaaucccag

SEQ ID NO: 1151955 - RNA, 20 nt, Human
ggggaggggggugaaacucc

SEQ ID NO: 1151956 - RNA, 23 nt, Human
ggggugggcgcgggggcggcagu

SEQ ID NO: 1151957 - RNA, 23 nt, Human
gggguuucaccauguuggccagg

SEQ ID NO: 1151958 - RNA, 23 nt, Human
gguggcucacuccuguaauccca

SEQ ID NO: 1151959 - RNA, 24 nt, Human
gguggcucacuccuguaaucccag

SEQ ID NO: 1151960 - RNA, 23 nt, Human
guagagacgggguuucaccaugu

SEQ ID NO: 1151961 - RNA, 20 nt, Human
gucaccagccuucugagggg

SEQ ID NO: 1151962 - RNA, 24 nt, Human
guugcagugagccgcgaucgugcc

SEQ ID NO: 1151963 - RNA, 18 nt, Human
uaaagaguacacaaacga

SEQ ID NO: 1151964 - RNA, 24 nt, Human
uaauuuuuguauuuuuaguagaga

SEQ ID NO: 1151965 - RNA, 27 nt, Human
uacaaagaaaccgacacuugagcccca

SEQ ID NO: 1151966 - RNA, 23 nt, Human
uacacaaacgacacaacaacgac

SEQ ID NO: 1151967 - RNA, 23 nt, Human
uacaggcgugagccaccacgccc

SEQ ID NO: 1151968 - RNA, 22 nt, Human
uagagacgggguuucaccaugu

SEQ ID NO: 1151969 - RNA, 24 nt, Human
uaggaggccgaggcgggaggauca

SEQ ID NO: 1151970 - RNA, 24 nt, Human
uaguagagacgggguuucaccaug

SEQ ID NO: 1151971 - RNA, 26 nt, Human
uaguagagacgggguuucaccauguu

SEQ ID NO: 1151972 - RNA, 21 nt, Human
ucaacagaugucaccagccuu

SEQ ID NO: 1151973 - RNA, 21 nt, Human
ucaccagccuucugagggggu

SEQ ID NO: 1151974 - RNA, 22 nt, Human
ucaccccgacuguaacgacucc

SEQ ID NO: 1151975 - RNA, 23 nt, Human
ucacugcaaccuccgccucccgg

SEQ ID NO: 1151976 - RNA, 24 nt, Human
ucacugcaaccuccgccucccggg

SEQ ID NO: 1151977 - RNA, 25 nt, Human
ucacugcaaccuccgccucccgggu

SEQ ID NO: 1151978 - RNA, 26 nt, Human
ucacugcaaccuccgccucccggguu

SEQ ID NO: 1151979 - RNA, 20 nt, Human
ucagccuccugaguagcugg

SEQ ID NO: 1151980 - RNA, 21 nt, Human
ucccggguucaagcaauucuc

SEQ ID NO: 1151981 - RNA, 21 nt, Human
ucccggguucaagcaauucuc

SEQ ID NO: 1151982 - RNA, 24 nt, Human
ucccggguucaagcaauucucuug

SEQ ID NO: 1151983 - RNA, 24 nt, Human
uccgccucccggguucaagcaauu

SEQ ID NO: 1151984 - RNA, 24 nt, Human
uccugaguagcugggauuacaggc

SEQ ID NO: 1151985 - RNA, 24 nt, Human
ucgaaaaguguugggauuacaggc

SEQ ID NO: 1151986 - RNA, 23 nt, Human
ucucgaacuccugaccucaggug

SEQ ID NO: 1151987 - RNA, 24 nt, Human
ucucgcucugucacccaagcugga

SEQ ID NO: 1151988 - RNA, 26 nt, Human
ucucgcucugucacccaagcuggagu

SEQ ID NO: 1151989 - RNA, 27 nt, Human
ucucgcucugucacccaagcuggagug

SEQ ID NO: 1151990 - RNA, 24 nt, Human
ucugucacccaagcuggagugcaa

SEQ ID NO: 1151991 - RNA, 23 nt, Human
ucuucuaggugccucaaugaaua

SEQ ID NO: 1151992 - RNA, 19 nt, Human
ugaccucaggugauccguc

SEQ ID NO: 1151993 - RNA, 24 nt, Human
ugaccucaggugauccguccgccu

SEQ ID NO: 1151994 - RNA, 22 nt, Human
ugagccgcgaucgugccaccgc

SEQ ID NO: 1151995 - RNA, 19 nt, Human
ugagggggugggcgcgggg

SEQ ID NO: 1151996 - RNA, 22 nt, Human
ugauacggagucucgcucuguc

SEQ ID NO: 1151997 - RNA, 22 nt, Human
ugcagugagccgcgaucgugcc

SEQ ID NO: 1151998 - RNA, 24 nt, Human
ugcccggcuaauuuuuguauuuuu

SEQ ID NO: 1151999 - RNA, 21 nt, Human
ugccuauaagucucucccaca

SEQ ID NO: 1152000 - RNA, 22 nt, Human
ugccucagccuccugaguagcu

SEQ ID NO: 1152001 - RNA, 24 nt, Human
ugccucagccuccugaguagcugg

SEQ ID NO: 1152002 - RNA, 20 nt, Human
ugcugaguugcuucaacaga

SEQ ID NO: 1152003 - RNA, 23 nt, Human
uggagugcaauggugcaaucucg

SEQ ID NO: 1152004 - RNA, 24 nt, Human
uggagugcaauggugcaaucucgg

SEQ ID NO: 1152005 - RNA, 24 nt, Human
uggccaggcugaucucgaacuccu

SEQ ID NO: 1152006 - RNA, 21 nt, Human
uggcucacuccuguaauccca

SEQ ID NO: 1152007 - RNA, 22 nt, Human
uggcucacuccuguaaucccag

SEQ ID NO: 1152008 - RNA, 21 nt, Human
ugggauuacaggcgcgugcca

SEQ ID NO: 1152009 - RNA, 22 nt, Human
ugggauuacaggcgcgugccac

SEQ ID NO: 1152010 - RNA, 24 nt, Human
ugggauuacaggcgcgugccacca

SEQ ID NO: 1152011 - RNA, 25 nt, Human
ugggauuacaggcgcgugccaccau

SEQ ID NO: 1152012 - RNA, 18 nt, Human
ugggauuacaggcgugag

SEQ ID NO: 1152013 - RNA, 19 nt, Human
ugggauuacaggcgugagc

SEQ ID NO: 1152014 - RNA, 22 nt, Human
ugggauuacaggcgugagccac

SEQ ID NO: 1152015 - RNA, 23 nt, Human
ugggauuacaggcgugagccacc

SEQ ID NO: 1152016 - RNA, 24 nt, Human
ugggauuacaggcgugagccacca

SEQ ID NO: 1152017 - RNA, 21 nt, Human
uguauuuuuaguagagacggg

SEQ ID NO: 1152018 - RNA, 19 nt, Human
ugucaagaccauuaaaaug

SEQ ID NO: 1152019 - RNA, 20 nt, Human
ugucacccaagcuggagugc

SEQ ID NO: 1152020 - RNA, 18 nt, Human
uuaguagagacgggguuu

SEQ ID NO: 1152021 - RNA, 22 nt, Human
uuaguagagacgggguuucacc

SEQ ID NO: 1152022 - RNA, 24 nt, Human
uuaguagagacgggguuucaccau

SEQ ID NO: 1152023 - RNA, 19 nt, Human
uucaccccgacuguaacga

SEQ ID NO: 1152024 - RNA, 22 nt, Human
uugcagugagccgcgaucgugc

SEQ ID NO: 1152025 - RNA, 24 nt, Human
uugcugaguugcuucaacagaugu

SEQ ID NO: 1152026 - RNA, 22 nt, Human
uuggagacccacuuaaaauuuu

SEQ ID NO: 1152027 - RNA, 21 nt, Human
uuucaccauguuggccaggcu

SEQ ID NO: 1152028 - RNA, 24 nt, Human
uuuuuaguagagacgggguuucac

SEQ ID NO: 1152029 - RNA, 20 nt, Human
uuuuuguauuuuuaguagag

SEQ ID NO: 1152030 - RNA, 25 nt, Human
uuuuuuuuuuuugauacggagucuc

SEQ ID NO: 1152031 - RNA, 21 nt, Human
uuuuuuuuuuuuugauacgga

SEQ ID NO: 1152032 - RNA, 18 nt, Human
aaaaagaaggccaagagg

SEQ ID NO: 1152033 - RNA, 19 nt, Human
aaaaagaggucuggcugcc

SEQ ID NO: 1152034 - RNA, 24 nt, Human
aaaacuuaucacaaugcaaguucc

SEQ ID NO: 1152035 - RNA, 22 nt, Human
aaacaaaaauucaaaggguguc

SEQ ID NO: 1152036 - RNA, 19 nt, Human
aaaccccugcugcaaggau

SEQ ID NO: 1152037 - RNA, 20 nt, Human
aaagaggucuggcugccuuu

SEQ ID NO: 1152038 - RNA, 18 nt, Human
aaggaugacaagaagaga

SEQ ID NO: 1152039 - RNA, 21 nt, Human
acugagaugggaggaugggag

SEQ ID NO: 1152040 - RNA, 19 nt, Human
agacaaaaaucagggaacc

SEQ ID NO: 1152041 - RNA, 25 nt, Human
agacaaaaaucagggaaccaacaac

SEQ ID NO: 1152042 - RNA, 20 nt, Human
agcaguccuugcuguguaau

SEQ ID NO: 1152043 - RNA, 20 nt, Human
agcuaccaagccaacuagcc

SEQ ID NO: 1152044 - RNA, 19 nt, Human
aggaauccuccaauuugcc

SEQ ID NO: 1152045 - RNA, 20 nt, Human
aggagugaucagaaccaaug

SEQ ID NO: 1152046 - RNA, 18 nt, Human
agggaugggugaggggaa

SEQ ID NO: 1152047 - RNA, 19 nt, Human
auguaugaucacccagcaa

SEQ ID NO: 1152048 - RNA, 23 nt, Human
caacaugcugagucuuuuccaca

SEQ ID NO: 1152049 - RNA, 20 nt, Human
caagacaaaaaucagggaac

SEQ ID NO: 1152050 - RNA, 19 nt, Human
caaguggcucagacaugcc

SEQ ID NO: 1152051 - RNA, 18 nt, Human
cacagccaaucacuuuaa

SEQ ID NO: 1152052 - RNA, 19 nt, Human
cacagccaaucacuuuaaa

SEQ ID NO: 1152053 - RNA, 21 nt, Human
cacucccaccauccccaaaaa

SEQ ID NO: 1152054 - RNA, 26 nt, Human
cagagauacugaaacuggucuggcca

SEQ ID NO: 1152055 - RNA, 23 nt, Human
ccaccuccugaaggaaccaucua

SEQ ID NO: 1152056 - RNA, 19 nt, Human
ccagaugugucugcacucu

SEQ ID NO: 1152057 - RNA, 19 nt, Human
ccaucuaaaccccugcugc

SEQ ID NO: 1152058 - RNA, 27 nt, Human
cccacacacagcaguccuugcugugua

SEQ ID NO: 1152059 - RNA, 24 nt, Human
ccccaaaaaagaaggccaagagga

SEQ ID NO: 1152060 - RNA, 26 nt, Human
ccccugagaagggaacugaguuucua

SEQ ID NO: 1152061 - RNA, 21 nt, Human
cccugcugcaaggauuuccug

SEQ ID NO: 1152062 - RNA, 22 nt, Human
ccucacuguccucggcuaccug

SEQ ID NO: 1152063 - RNA, 26 nt, Human
ccucagaggccaaggggcuggggaga

SEQ ID NO: 1152064 - RNA, 27 nt, Human
ccugaucugugugggugccgggcggcc

SEQ ID NO: 1152065 - RNA, 24 nt, Human
cgccauggaaccacugagauggga

SEQ ID NO: 1152066 - RNA, 21 nt, Human
cuaaaccccugcugcaaggau

SEQ ID NO: 1152067 - RNA, 23 nt, Human
cuaccugcaagcaaggggacagg

SEQ ID NO: 1152068 - RNA, 21 nt, Human
cugaagccaggagggccaucc

SEQ ID NO: 1152069 - RNA, 20 nt, Human
cugagaugggaggaugggag

SEQ ID NO: 1152070 - RNA, 20 nt, Human
cugagcccauaacagauggg

SEQ ID NO: 1152071 - RNA, 24 nt, Human
cugcaagcaaggggacagggaugg

SEQ ID NO: 1152072 - RNA, 20 nt, Human
cugcucaagacaaaaaucag

SEQ ID NO: 1152073 - RNA, 19 nt, Human
cuggcccuugugcaguagg

SEQ ID NO: 1152074 - RNA, 23 nt, Human
cuuaacucugugccaauucuacc

SEQ ID NO: 1152075 - RNA, 18 nt, Human
cuuuggggagagggacug

SEQ ID NO: 1152076 - RNA, 19 nt, Human
gacaagaagagagcagcga

SEQ ID NO: 1152077 - RNA, 19 nt, Human
gagaugcaggcuggccuuc

SEQ ID NO: 1152078 - RNA, 21 nt, Human
gagaugggaggaugggaggaa

SEQ ID NO: 1152079 - RNA, 18 nt, Human
gcaaggggacagggaugg

SEQ ID NO: 1152080 - RNA, 20 nt, Human
gcaggagaaacaagaauauu

SEQ ID NO: 1152081 - RNA, 22 nt, Human
gccaaccagacaggggucugga

SEQ ID NO: 1152082 - RNA, 23 nt, Human
gccaaggggcuggggagaaccca

SEQ ID NO: 1152083 - RNA, 20 nt, Human
gcugaagccaggagggccag

SEQ ID NO: 1152084 - RNA, 21 nt, Human
ggaaacugcugccaacagcua

SEQ ID NO: 1152085 - RNA, 19 nt, Human
ggaauccuccaauuugccc

SEQ ID NO: 1152086 - RNA, 18 nt, Human
ggagaacccaaacucaaa

SEQ ID NO: 1152087 - RNA, 19 nt, Human
ggaugggaggaagccaccc

SEQ ID NO: 1152088 - RNA, 19 nt, Human
ggcuggggagaacccaaac

SEQ ID NO: 1152089 - RNA, 24 nt, Human
gggaugggugaggggaaagugagg

SEQ ID NO: 1152090 - RNA, 19 nt, Human
gggcagcaauggaugaaaa

SEQ ID NO: 1152091 - RNA, 27 nt, Human
ggggagaggcaguucggaaacgagugu

SEQ ID NO: 1152092 - RNA, 20 nt, Human
ggggucuggaguccaaggag

SEQ ID NO: 1152093 - RNA, 24 nt, Human
uaacagauggaauugccacccucu

SEQ ID NO: 1152094 - RNA, 24 nt, Human
uaacccaucuggauucagcaaaga

SEQ ID NO: 1152095 - RNA, 19 nt, Human
uaaggccaugucaaaccaa

SEQ ID NO: 1152096 - RNA, 19 nt, Human
uaauaaauauggagucaca

SEQ ID NO: 1152097 - RNA, 23 nt, Human
uagcaaggaggccucugaccaag

SEQ ID NO: 1152098 - RNA, 20 nt, Human
uagugccaagaaaauaaaaa

SEQ ID NO: 1152099 - RNA, 23 nt, Human
uaugcugggaagaaccuaguguc

SEQ ID NO: 1152100 - RNA, 21 nt, Human
uauuauggaaccuuaacucug

SEQ ID NO: 1152101 - RNA, 18 nt, Human
ucaaaccaaaugcuaucu

SEQ ID NO: 1152102 - RNA, 18 nt, Human
ucacacaacugcagccau

SEQ ID NO: 1152103 - RNA, 18 nt, Human
ucagcaaagaugcaaugc

SEQ ID NO: 1152104 - RNA, 27 nt, Human
ucagccucagaggccaaggggcugggg

SEQ ID NO: 1152105 - RNA, 24 nt, Human
ucagcugccccucaaguggcucag

SEQ ID NO: 1152106 - RNA, 21 nt, Human
ucccaccuccugaaggaacca

SEQ ID NO: 1152107 - RNA, 21 nt, Human
ucuuuggggagaggcaguucg

SEQ ID NO: 1152108 - RNA, 28 nt, Human
ucuuuggggagagggacugacguaaacg

SEQ ID NO: 1152109 - RNA, 18 nt, Human
ugaccaagggaaacugcu

SEQ ID NO: 1152110 - RNA, 24 nt, Human
ugagaugggaggaugggaggaagc

SEQ ID NO: 1152111 - RNA, 26 nt, Human
ugagaugggaggaugggaggaagcca

SEQ ID NO: 1152112 - RNA, 19 nt, Human
ugaugcagacguugcaccc

SEQ ID NO: 1152113 - RNA, 22 nt, Human
ugcagaacaggagcuuuguuga

SEQ ID NO: 1152114 - RNA, 19 nt, Human
ugccaugacaucuucuuca

SEQ ID NO: 1152115 - RNA, 21 nt, Human
ugcuaggaaaggcaggacuca

SEQ ID NO: 1152116 - RNA, 21 nt, Human
ugcuuuuuccaucuuacacuc

SEQ ID NO: 1152117 - RNA, 20 nt, Human
uggaaacuucacugguucug

SEQ ID NO: 1152118 - RNA, 18 nt, Human
uggaacaccuaaauaguu

SEQ ID NO: 1152119 - RNA, 18 nt, Human
uggaggcuucccaccucc

SEQ ID NO: 1152120 - RNA, 22 nt, Human
uggcuagccaccaggaugaugc

SEQ ID NO: 1152121 - RNA, 23 nt, Human
uggcugccuuuccacaccccagg

SEQ ID NO: 1152122 - RNA, 24 nt, Human
ugggagugccaaccagacaggggu

SEQ ID NO: 1152123 - RNA, 18 nt, Human
ugugaaggaaugaggcug

SEQ ID NO: 1152124 - RNA, 20 nt, Human
ugugaaggaaugaggcugcu

SEQ ID NO: 1152125 - RNA, 22 nt, Human
ugugaaggaaugaggcugcucu

SEQ ID NO: 1152126 - RNA, 21 nt, Human
uguugugugcaugcuaggaaa

SEQ ID NO: 1152127 - RNA, 22 nt, Human
uguugugugcaugcuaggaaag

SEQ ID NO: 1152128 - RNA, 18 nt, Human
uguuugcuuuuuccaucu

SEQ ID NO: 1152129 - RNA, 18 nt, Human
uucacccccuucacuccc

SEQ ID NO: 1152130 - RNA, 20 nt, Human
uucagcaaagaugcaaugcu

SEQ ID NO: 1152131 - RNA, 21 nt, Human
uuccugaugaaaccacacacu

SEQ ID NO: 1152132 - RNA, 22 nt, Human
uugaauuuccaaaacuuaucac

SEQ ID NO: 1152133 - RNA, 20 nt, Human
uugagagcaggagaaacaag

SEQ ID NO: 1152134 - RNA, 19 nt, Human
aaaaggcaagaaggagagu

SEQ ID NO: 1152135 - RNA, 18 nt, Human
aaagaaauagaaaaaguc

SEQ ID NO: 1152136 - RNA, 24 nt, Human
aaagugcugggauuacagguguga

SEQ ID NO: 1152137 - RNA, 18 nt, Human
aagugcugggauuacagg

SEQ ID NO: 1152138 - RNA, 19 nt, Human
aagugcugggauuacaggu

SEQ ID NO: 1152139 - RNA, 26 nt, Human
aagugcugggauuacaggugugagcc

SEQ ID NO: 1152140 - RNA, 23 nt, Human
aauaaauggaacaccaaaagaaa

SEQ ID NO: 1152141 - RNA, 23 nt, Human
acacacaugcacgcgcauacaca

SEQ ID NO: 1152142 - RNA, 27 nt, Human
acacacaugcacgcgcauacacacaca

SEQ ID NO: 1152143 - RNA, 24 nt, Human
acacacaugcacgcgcauacacag

SEQ ID NO: 1152144 - RNA, 18 nt, Human
accucgugauccaccagc

SEQ ID NO: 1152145 - RNA, 18 nt, Human
acgagguuucacuguguu

SEQ ID NO: 1152146 - RNA, 20 nt, Human
acgagguuucacuguguuag

SEQ ID NO: 1152147 - RNA, 23 nt, Human
aggaauucaauacaaaugaaugu

SEQ ID NO: 1152148 - RNA, 24 nt, Human
aggagcuugaagaccgaaugauag

SEQ ID NO: 1152149 - RNA, 23 nt, Human
aggcaagaaggagagucaccuag

SEQ ID NO: 1152150 - RNA, 19 nt, Human
aguagagacgagguuucac

SEQ ID NO: 1152151 - RNA, 24 nt, Human
agugaaaagaaauagaaaaagucu

SEQ ID NO: 1152152 - RNA, 19 nt, Human
aguggaauuuggggcuggg

SEQ ID NO: 1152153 - RNA, 24 nt, Human
aguggcucacaccuguaaucccag

SEQ ID NO: 1152154 - RNA, 21 nt, Human
augagauagcaggaaguaaag

SEQ ID NO: 1152155 - RNA, 23 nt, Human
auggaacaccaaaagaaaaauca

SEQ ID NO: 1152156 - RNA, 24 nt, Human
caaagugcugggauuacaggugug

SEQ ID NO: 1152157 - RNA, 24 nt, Human
caacaagauuucuuugaaaacuaa

SEQ ID NO: 1152158 - RNA, 21 nt, Human
caagaccuggaccuggcacua

SEQ ID NO: 1152159 - RNA, 22 nt, Human
caagcucuuuucugugccccag

SEQ ID NO: 1152160 - RNA, 24 nt, Human
cacacaugcacgcgcauacacaca

SEQ ID NO: 1152161 - RNA, 26 nt, Human
cacaccuguaaucccagcacuuucuu

SEQ ID NO: 1152162 - RNA, 21 nt, Human
cacacuccuccagccacacug

SEQ ID NO: 1152163 - RNA, 25 nt, Human
caccaaaagaaaaaucaguaguuca

SEQ ID NO: 1152164 - RNA, 21 nt, Human
caccgugccggcccaugcagc

SEQ ID NO: 1152165 - RNA, 18 nt, Human
caccuguaaucccagcac

SEQ ID NO: 1152166 - RNA, 19 nt, Human
caccuguaaucccagcacu

SEQ ID NO: 1152167 - RNA, 21 nt, Human
cacuggauuuucuucuugcuc

SEQ ID NO: 1152168 - RNA, 22 nt, Human
cacuggauuuucuucuugcucu

SEQ ID NO: 1152169 - RNA, 21 nt, Human
cacuguguuagccaggagggu

SEQ ID NO: 1152170 - RNA, 24 nt, Human
cacuguguuagccaggagggucuc

SEQ ID NO: 1152171 - RNA, 18 nt, Human
cagcaguucuaacagccu

SEQ ID NO: 1152172 - RNA, 20 nt, Human
caggaguuguagaccagcuu

SEQ ID NO: 1152173 - RNA, 21 nt, Human
cagugcuuguuuugcaccauc

SEQ ID NO: 1152174 - RNA, 19 nt, Human
cauagcaggacccugucuc

SEQ ID NO: 1152175 - RNA, 21 nt, Human
ccaaagugcugggauuacagg

SEQ ID NO: 1152176 - RNA, 21 nt, Human
ccaaagugcugggauuacagg

SEQ ID NO: 1152177 - RNA, 24 nt, Human
ccaaagugcugggauuacaggugu

SEQ ID NO: 1152178 - RNA, 18 nt, Human
ccacauuucuacccacuc

SEQ ID NO: 1152179 - RNA, 18 nt, Human
ccccaucuauucucuaca

SEQ ID NO: 1152180 - RNA, 22 nt, Human
cccugcuuaaaagccucuauug

SEQ ID NO: 1152181 - RNA, 25 nt, Human
ccuggcacuagccccaaucacugac

SEQ ID NO: 1152182 - RNA, 24 nt, Human
cgagguuucacuguguuagccagg

SEQ ID NO: 1152183 - RNA, 21 nt, Human
cgcauacacacacacagcgua

SEQ ID NO: 1152184 - RNA, 29 nt, Human
cgcauacacacacacagcguacuguccua

SEQ ID NO: 1152185 - RNA, 23 nt, Human
cgcgcauacacacacacagcgua

SEQ ID NO: 1152186 - RNA, 23 nt, Human
cuaauccuaacugacacacaugc

SEQ ID NO: 1152187 - RNA, 24 nt, Human
cucacaccuguaaucccagcacuu

SEQ ID NO: 1152188 - RNA, 25 nt, Human
cucacaccuguaaucccagcacuuu

SEQ ID NO: 1152189 - RNA, 28 nt, Human
cuugaccucgugauccaccagccuuggc

SEQ ID NO: 1152190 - RNA, 19 nt, Human
cuuucuuuggaaggucaag

SEQ ID NO: 1152191 - RNA, 25 nt, Human
gaaauaaacuucuauuuuguguaaa

SEQ ID NO: 1152192 - RNA, 20 nt, Human
gaccucgugauccaccagcc

SEQ ID NO: 1152193 - RNA, 21 nt, Human
gaccucgugauccaccagccu

SEQ ID NO: 1152194 - RNA, 24 nt, Human
gaccucgugauccaccagccuugg

SEQ ID NO: 1152195 - RNA, 18 nt, Human
gaccuggcacuagcccca

SEQ ID NO: 1152196 - RNA, 18 nt, Human
gagccaccgugccggccc

SEQ ID NO: 1152197 - RNA, 18 nt, Human
gauuacaggugugagcca

SEQ ID NO: 1152198 - RNA, 21 nt, Human
gauuacaggugugagccaccg

SEQ ID NO: 1152199 - RNA, 24 nt, Human
gauuacaggugugagccaccgugc

SEQ ID NO: 1152200 - RNA, 22 nt, Human
gcccuuaucugcaacacacaca

SEQ ID NO: 1152201 - RNA, 22 nt, Human
gccuuggccucccaaagugcug

SEQ ID NO: 1152202 - RNA, 19 nt, Human
gcugggugcaguggcucac

SEQ ID NO: 1152203 - RNA, 21 nt, Human
ggagacccaccaagaccugga

SEQ ID NO: 1152204 - RNA, 24 nt, Human
ggaggcuagacacagugaaaagaa

SEQ ID NO: 1152205 - RNA, 18 nt, Human
ggggcugggugcaguggc

SEQ ID NO: 1152206 - RNA, 21 nt, Human
ggggcugggugcaguggcuca

SEQ ID NO: 1152207 - RNA, 23 nt, Human
ggugcaguggcucacaccuguaa

SEQ ID NO: 1152208 - RNA, 24 nt, Human
gugauccaccagccuuggccuccc

SEQ ID NO: 1152209 - RNA, 18 nt, Human
gugcaguggcucacaccu

SEQ ID NO: 1152210 - RNA, 23 nt, Human
uaaaaagcucacagaugaugcuc

SEQ ID NO: 1152211 - RNA, 23 nt, Human
uaaacaggccauccuuaucucag

SEQ ID NO: 1152212 - RNA, 19 nt, Human
uaaagcagccauccuggac

SEQ ID NO: 1152213 - RNA, 22 nt, Human
uaacagccuuucugaaaggucu

SEQ ID NO: 1152214 - RNA, 22 nt, Human
uacagaaucaauagaaagauaa

SEQ ID NO: 1152215 - RNA, 22 nt, Human
uacaggugugagccaccgugcc

SEQ ID NO: 1152216 - RNA, 22 nt, Human
uagaaagauaaauaaauggaac

SEQ ID NO: 1152217 - RNA, 20 nt, Human
uaguagagacgagguuucac

SEQ ID NO: 1152218 - RNA, 24 nt, Human
uaguagagacgagguuucacugug

SEQ ID NO: 1152219 - RNA, 25 nt, Human
uaucugcaacacacacaugcacgcg

SEQ ID NO: 1152220 - RNA, 27 nt, Human
uaucugcaacacacacaugcacgcgca

SEQ ID NO: 1152221 - RNA, 24 nt, Human
ucacuguguuagccaggagggucu

SEQ ID NO: 1152222 - RNA, 23 nt, Human
ucagcccaggaguuguagaccag

SEQ ID NO: 1152223 - RNA, 18 nt, Human
uccaaccagaaguggaau

SEQ ID NO: 1152224 - RNA, 23 nt, Human
ucccaaagugcugggauuacagg

SEQ ID NO: 1152225 - RNA, 19 nt, Human
ugacacacaugccaacagc

SEQ ID NO: 1152226 - RNA, 24 nt, Human
ugacaugagagagaaauaaacuuc

SEQ ID NO: 1152227 - RNA, 21 nt, Human
ugaggucagcuucagaaugga

SEQ ID NO: 1152228 - RNA, 19 nt, Human
ugaguaaaaggcaagaagg

SEQ ID NO: 1152229 - RNA, 22 nt, Human
ugauccaccagccuuggccucc

SEQ ID NO: 1152230 - RNA, 19 nt, Human
ugccaacagcauucagaaa

SEQ ID NO: 1152231 - RNA, 23 nt, Human
ugccggcccaugcagcaguucua

SEQ ID NO: 1152232 - RNA, 20 nt, Human
ugccuuguccacacuccucc

SEQ ID NO: 1152233 - RNA, 23 nt, Human
ugccuuguccacacuccuccagc

SEQ ID NO: 1152234 - RNA, 25 nt, Human
ugccuuguccacacuccuccagcca

SEQ ID NO: 1152235 - RNA, 24 nt, Human
ugcugggauuacaggugugagcca

SEQ ID NO: 1152236 - RNA, 28 nt, Human
uggaacaccaaaagaaaaagggaggccu

SEQ ID NO: 1152237 - RNA, 22 nt, Human
uggaacaccaaaagaaaaauca

SEQ ID NO: 1152238 - RNA, 20 nt, Human
uggaauuuggggcugggugc

SEQ ID NO: 1152239 - RNA, 24 nt, Human
uggaauuuggggcugggugcagug

SEQ ID NO: 1152240 - RNA, 21 nt, Human
uggcucacaccuguaauccca

SEQ ID NO: 1152241 - RNA, 24 nt, Human
uggcucacaccuguaaucccagca

SEQ ID NO: 1152242 - RNA, 18 nt, Human
ugggauuacaggugugag

SEQ ID NO: 1152243 - RNA, 21 nt, Human
ugggauuacaggugugagcca

SEQ ID NO: 1152244 - RNA, 22 nt, Human
ugggauuacaggugugagccac

SEQ ID NO: 1152245 - RNA, 23 nt, Human
ugggauuacaggugugagccacc

SEQ ID NO: 1152246 - RNA, 23 nt, Human
ugggauuacaggugugagccacc

SEQ ID NO: 1152247 - RNA, 24 nt, Human
ugggauuacaggugugagccaccg

SEQ ID NO: 1152248 - RNA, 19 nt, Human
uggggcugggugcaguggc

SEQ ID NO: 1152249 - RNA, 20 nt, Human
uggggcugggugcaguggcu

SEQ ID NO: 1152250 - RNA, 22 nt, Human
ugucaaacuuauaccauccuua

SEQ ID NO: 1152251 - RNA, 19 nt, Human
uguuuugcaccaucucuuc

SEQ ID NO: 1152252 - RNA, 22 nt, Human
uuagggaaauaaacaaacaaau

SEQ ID NO: 1152253 - RNA, 21 nt, Human
uuaguagagacgagguuucac

SEQ ID NO: 1152254 - RNA, 24 nt, Human
uuaguagagacgagguuucacugu

SEQ ID NO: 1152255 - RNA, 23 nt, Human
uucacuguguuagccaggagggu

SEQ ID NO: 1152256 - RNA, 24 nt, Human
uucagcugcugaguaaaaggcaag

SEQ ID NO: 1152257 - RNA, 21 nt, Human
uucucaaacuggggauucuau

SEQ ID NO: 1152258 - RNA, 18 nt, Human
uuggccucccaaagugcu

SEQ ID NO: 1152259 - RNA, 19 nt, Human
uuucacuguguuagccagg

SEQ ID NO: 1152260 - RNA, 24 nt, Human
uuuuuaguagagacgagguuucac

SEQ ID NO: 1152261 - RNA, 23 nt, Human
aaaaacguguguaucaaguauga

SEQ ID NO: 1152262 - RNA, 23 nt, Human
aacacggcagaaagguggcaccu

SEQ ID NO: 1152263 - RNA, 24 nt, Human
aaccaauucauucaccaggcggca

SEQ ID NO: 1152264 - RNA, 23 nt, Human
aagaacagaagaagacaggaagc

SEQ ID NO: 1152265 - RNA, 22 nt, Human
aagacaggaagcguuucugagc

SEQ ID NO: 1152266 - RNA, 21 nt, Human
aagugcccucuaauaagacau

SEQ ID NO: 1152267 - RNA, 20 nt, Human
agaacaguaauacucuagca

SEQ ID NO: 1152268 - RNA, 19 nt, Human
agacaugaaaauucuggcu

SEQ ID NO: 1152269 - RNA, 20 nt, Human
agagaagaaaucagggccaa

SEQ ID NO: 1152270 - RNA, 19 nt, Human
agggaagucacagaacagu

SEQ ID NO: 1152271 - RNA, 21 nt, Human
caggcuaaggaguacugcaga

SEQ ID NO: 1152272 - RNA, 24 nt, Human
caggcuaaggaguacugcagaggu

SEQ ID NO: 1152273 - RNA, 21 nt, Human
cccccaacguggacacacucg

SEQ ID NO: 1152274 - RNA, 22 nt, Human
cccgcugcagcugucacauccc

SEQ ID NO: 1152275 - RNA, 21 nt, Human
ccgaaaauagcaauuucuuug

SEQ ID NO: 1152276 - RNA, 21 nt, Human
cggcagaaagguggcaccugg

SEQ ID NO: 1152277 - RNA, 26 nt, Human
cggcagaaagguggcaccuggagacc

SEQ ID NO: 1152278 - RNA, 21 nt, Human
cggucacagaaccaauucauu

SEQ ID NO: 1152279 - RNA, 19 nt, Human
cugcagcugucacaucccu

SEQ ID NO: 1152280 - RNA, 24 nt, Human
cugcagcugucacaucccugggcu

SEQ ID NO: 1152281 - RNA, 20 nt, Human
gcagcaggugcuuuuuucaa

SEQ ID NO: 1152282 - RNA, 20 nt, Human
gcugcagcugucacaucccu

SEQ ID NO: 1152283 - RNA, 21 nt, Human
gcuuauggugcagcaggugcu

SEQ ID NO: 1152284 - RNA, 19 nt, Human
ggaaccacaaagugcccuc

SEQ ID NO: 1152285 - RNA, 19 nt, Human
ggcgugaagaacagaagaa

SEQ ID NO: 1152286 - RNA, 18 nt, Human
ggugcuuuuuucaagaca

SEQ ID NO: 1152287 - RNA, 20 nt, Human
gucacagggaagucacagaa

SEQ ID NO: 1152288 - RNA, 23 nt, Human
gugaagaacagaagaagacagga

SEQ ID NO: 1152289 - RNA, 26 nt, Human
gugaagaacagaagaagacaggaagc

SEQ ID NO: 1152290 - RNA, 22 nt, Human
uaugauguucccccaacgugga

SEQ ID NO: 1152291 - RNA, 18 nt, Human
ucuagcaggagcaugggg

SEQ ID NO: 1152292 - RNA, 20 nt, Human
ugccagcaguucugguucuu

SEQ ID NO: 1152293 - RNA, 22 nt, Human
ugucacaucccugggcuuaugg

SEQ ID NO: 1152294 - RNA, 22 nt, Human
ugugcaaauaaaaacgugugua

SEQ ID NO: 1152295 - RNA, 21 nt, Human
ugugggugcccccuuucugcc

SEQ ID NO: 1152296 - RNA, 20 nt, Human
aaaaccugagauugugaaga

SEQ ID NO: 1152297 - RNA, 19 nt, Human
aaagugcugggauuacagg

SEQ ID NO: 1152298 - RNA, 24 nt, Human
aaagugcugggauuacaggugcga

SEQ ID NO: 1152299 - RNA, 25 nt, Human
aagcgauccucccaccucagccucc

SEQ ID NO: 1152300 - RNA, 18 nt, Human
aagugcugggauuacagg

SEQ ID NO: 1152301 - RNA, 19 nt, Human
aagugcugggauuacaggu

SEQ ID NO: 1152302 - RNA, 20 nt, Human
aaguggcuguuugcacgugu

SEQ ID NO: 1152303 - RNA, 27 nt, Human
aauggaaagcggggggagggugagggg

SEQ ID NO: 1152304 - RNA, 18 nt, Human
acccagccucaacuguuu

SEQ ID NO: 1152305 - RNA, 22 nt, Human
acccucagcauugcuuuuaauc

SEQ ID NO: 1152306 - RNA, 19 nt, Human
acggagcaguaaguacaga

SEQ ID NO: 1152307 - RNA, 24 nt, Human
acuaguuccccacgacaugugugc

SEQ ID NO: 1152308 - RNA, 19 nt, Human
acugcagccucuaccuccu

SEQ ID NO: 1152309 - RNA, 21 nt, Human
acugcuuuuuuuuuuuuuuuu

SEQ ID NO: 1152310 - RNA, 25 nt, Human
agcgauccucccaccucagccuccu

SEQ ID NO: 1152311 - RNA, 19 nt, Human
agcggggggagggugaggg

SEQ ID NO: 1152312 - RNA, 21 nt, Human
aggguucagggggacugcggg

SEQ ID NO: 1152313 - RNA, 22 nt, Human
aguacagaguucuggagaggga

SEQ ID NO: 1152314 - RNA, 23 nt, Human
aguagcugagaccacaggcaugu

SEQ ID NO: 1152315 - RNA, 18 nt, Human
aguauccuuccaccaccc

SEQ ID NO: 1152316 - RNA, 20 nt, Human
agugacggagcaguaaguac

SEQ ID NO: 1152317 - RNA, 21 nt, Human
agugcagugguacgaucccag

SEQ ID NO: 1152318 - RNA, 23 nt, Human
agugcagugguacgaucccagcu

SEQ ID NO: 1152319 - RNA, 24 nt, Human
aucacuuugcaauaaaaccugagg

SEQ ID NO: 1152320 - RNA, 24 nt, Human
caaagugcugggauuacaggugcg

SEQ ID NO: 1152321 - RNA, 20 nt, Human
caagcgauccucccaccuca

SEQ ID NO: 1152322 - RNA, 24 nt, Human
caaggucuugcuauuuugcccagg

SEQ ID NO: 1152323 - RNA, 19 nt, Human
caaucucugguuucuuugc

SEQ ID NO: 1152324 - RNA, 19 nt, Human
caccacaccuggcuaauuu

SEQ ID NO: 1152325 - RNA, 24 nt, Human
cacccucagcauugcuuuuaaucu

SEQ ID NO: 1152326 - RNA, 24 nt, Human
caccucagccuccugaguagcuga

SEQ ID NO: 1152327 - RNA, 20 nt, Human
cacggaugcugcuaaacauc

SEQ ID NO: 1152328 - RNA, 21 nt, Human
cacguguggucagcaaaucca

SEQ ID NO: 1152329 - RNA, 23 nt, Human
cacugcagccucuaccuccuggg

SEQ ID NO: 1152330 - RNA, 21 nt, Human
cacuuugcaauaaaaccugag

SEQ ID NO: 1152331 - RNA, 20 nt, Human
cagccuccugaguagcugag

SEQ ID NO: 1152332 - RNA, 23 nt, Human
cagccucuaccuccuggguucaa

SEQ ID NO: 1152333 - RNA, 18 nt, Human
cagccuuucuucuaucgc

SEQ ID NO: 1152334 - RNA, 23 nt, Human
cagcucacugcagccucuaccuc

SEQ ID NO: 1152335 - RNA, 18 nt, Human
caguauccuuccaccacc

SEQ ID NO: 1152336 - RNA, 18 nt, Human
cagugcaccuguguuugg

SEQ ID NO: 1152337 - RNA, 24 nt, Human
cauuuucaauugauucauuggggg

SEQ ID NO: 1152338 - RNA, 20 nt, Human
ccaaagugcugggauuacag

SEQ ID NO: 1152339 - RNA, 21 nt, Human
ccaaagugcugggauuacagg

SEQ ID NO: 1152340 - RNA, 21 nt, Human
ccaaagugcugggauuacagg

SEQ ID NO: 1152341 - RNA, 22 nt, Human
ccaaagugcugggauuacaggu

SEQ ID NO: 1152342 - RNA, 23 nt, Human
ccaccucagccuccugaguagcu

SEQ ID NO: 1152343 - RNA, 22 nt, Human
ccauuccccacccugaucugga

SEQ ID NO: 1152344 - RNA, 23 nt, Human
cccaccucagccuccugaguagc

SEQ ID NO: 1152345 - RNA, 18 nt, Human
cccuggagagcaggaugg

SEQ ID NO: 1152346 - RNA, 20 nt, Human
ccuacaauuccccggacaac

SEQ ID NO: 1152347 - RNA, 24 nt, Human
ccuccuggguucaagcgauccucc

SEQ ID NO: 1152348 - RNA, 19 nt, Human
ccucuaccuccuggguuca

SEQ ID NO: 1152349 - RNA, 24 nt, Human
ccucuuuaagacucugcuuuguca

SEQ ID NO: 1152350 - RNA, 20 nt, Human
ccuggguucaagcgauccuc

SEQ ID NO: 1152351 - RNA, 21 nt, Human
ccuguagcugucaacucugug

SEQ ID NO: 1152352 - RNA, 20 nt, Human
cgacuggccauuccccaccc

SEQ ID NO: 1152353 - RNA, 24 nt, Human
cggggaguggggcugggaaguggc

SEQ ID NO: 1152354 - RNA, 24 nt, Human
cucacugcagccucuaccuccugg

SEQ ID NO: 1152355 - RNA, 24 nt, Human
cuccugaguagcugagaccacagg

SEQ ID NO: 1152356 - RNA, 22 nt, Human
cucucggcagcugggacuucau

SEQ ID NO: 1152357 - RNA, 23 nt, Human
cugcagccucuaccuccuggguu

SEQ ID NO: 1152358 - RNA, 20 nt, Human
cugcggggaguggggcuggg

SEQ ID NO: 1152359 - RNA, 25 nt, Human
cuucagggcuucucaaccagggggu

SEQ ID NO: 1152360 - RNA, 21 nt, Human
cuucccauuucagccugggag

SEQ ID NO: 1152361 - RNA, 23 nt, Human
cuuuucucuuucuccaccucucu

SEQ ID NO: 1152362 - RNA, 22 nt, Human
gacgggauuucuuuaguuucug

SEQ ID NO: 1152363 - RNA, 19 nt, Human
gaguaaucccaaagugcug

SEQ ID NO: 1152364 - RNA, 27 nt, Human
gaguagcugagaccacaggcauguauc

SEQ ID NO: 1152365 - RNA, 18 nt, Human
gauuacaggugcgaguca

SEQ ID NO: 1152366 - RNA, 24 nt, Human
gauuacaggugcgagucacucuac

SEQ ID NO: 1152367 - RNA, 21 nt, Human
gcacugcuucagccuuucuuc

SEQ ID NO: 1152368 - RNA, 20 nt, Human
gcagaaugagccgcucaccc

SEQ ID NO: 1152369 - RNA, 19 nt, Human
gcccaggcuggagugcagu

SEQ ID NO: 1152370 - RNA, 20 nt, Human
gcccaggcuggagugcagug

SEQ ID NO: 1152371 - RNA, 21 nt, Human
gcuaauuuuuucccuuuuucu

SEQ ID NO: 1152372 - RNA, 24 nt, Human
gcuauuuugcccaggcuggucuug

SEQ ID NO: 1152373 - RNA, 23 nt, Human
gcuggaggagguggugcuacugg

SEQ ID NO: 1152374 - RNA, 24 nt, Human
ggaaagcggggggagggugagggg

SEQ ID NO: 1152375 - RNA, 23 nt, Human
ggacugcggggaguggggcuggg

SEQ ID NO: 1152376 - RNA, 21 nt, Human
ggcaaggucuugcuauuuugc

SEQ ID NO: 1152377 - RNA, 20 nt, Human
ggcuggucuugaacuccuga

SEQ ID NO: 1152378 - RNA, 18 nt, Human
gggaguggggcugggaag

SEQ ID NO: 1152379 - RNA, 24 nt, Human
gggggagggugaggggucauucug

SEQ ID NO: 1152380 - RNA, 30 nt, Human
guacugcuuuuuuuuuuuuuuuuuuccuuu

SEQ ID NO: 1152381 - RNA, 19 nt, Human
gucucaaucucugguuucu

SEQ ID NO: 1152382 - RNA, 18 nt, Human
uaaucccaaagugcuggg

SEQ ID NO: 1152383 - RNA, 22 nt, Human
uacaauuccccggacaacuccc

SEQ ID NO: 1152384 - RNA, 21 nt, Human
uacagaguucuggagagggaa

SEQ ID NO: 1152385 - RNA, 24 nt, Human
uaccuccuggguucaagcgauccu

SEQ ID NO: 1152386 - RNA, 21 nt, Human
uacuuacaugugaucugcgua

SEQ ID NO: 1152387 - RNA, 18 nt, Human
uacuucagggcuucucaa

SEQ ID NO: 1152388 - RNA, 20 nt, Human
uagaggcaaggucuugcuau

SEQ ID NO: 1152389 - RNA, 18 nt, Human
uagcccaggcuggagugc

SEQ ID NO: 1152390 - RNA, 26 nt, Human
uaguacugcuuuuuuuuuuuuuuuuu

SEQ ID NO: 1152391 - RNA, 18 nt, Human
uaugucuuuacuucaggg

SEQ ID NO: 1152392 - RNA, 24 nt, Human
uauuuugcccaggcuggucuugaa

SEQ ID NO: 1152393 - RNA, 24 nt, Human
ucacugcagccucuaccuccuggg

SEQ ID NO: 1152394 - RNA, 25 nt, Human
ucacugcagccucuaccuccugggu

SEQ ID NO: 1152395 - RNA, 18 nt, Human
ucagcagcguugucccug

SEQ ID NO: 1152396 - RNA, 18 nt, Human
ucagcaucuuuuaacuca

SEQ ID NO: 1152397 - RNA, 23 nt, Human
ucagugcaccuguguuuggggcu

SEQ ID NO: 1152398 - RNA, 26 nt, Human
ucagugcaccuguguuuggggcuuug

SEQ ID NO: 1152399 - RNA, 23 nt, Human
ucccaaagugcugggauuacagg

SEQ ID NO: 1152400 - RNA, 20 nt, Human
ucccuuuuucuagaggcaag

SEQ ID NO: 1152401 - RNA, 26 nt, Human
uccucccaccucagccuccugaguag

SEQ ID NO: 1152402 - RNA, 24 nt, Human
uccugaguagcugagaccacaggc

SEQ ID NO: 1152403 - RNA, 20 nt, Human
uccugaguucaagcaaucuu

SEQ ID NO: 1152404 - RNA, 21 nt, Human
uccuggguucaagcgauccuc

SEQ ID NO: 1152405 - RNA, 24 nt, Human
uccuggguucaagcgauccuccca

SEQ ID NO: 1152406 - RNA, 22 nt, Human
uccuugagggaguuccuuuuuu

SEQ ID NO: 1152407 - RNA, 23 nt, Human
ucuccaaugacaguccccgauuu

SEQ ID NO: 1152408 - RNA, 23 nt, Human
ucucugguuucuuugcucagugc

SEQ ID NO: 1152409 - RNA, 19 nt, Human
ucuguagcccaggcuggag

SEQ ID NO: 1152410 - RNA, 19 nt, Human
ucuguagcccaggcuggag

SEQ ID NO: 1152411 - RNA, 24 nt, Human
ucuguagcccaggcuggagugcag

SEQ ID NO: 1152412 - RNA, 22 nt, Human
ucuucuaucgcuccucuccaau

SEQ ID NO: 1152413 - RNA, 23 nt, Human
ucuugaacuccugaguucaagca

SEQ ID NO: 1152414 - RNA, 23 nt, Human
ucuugcuauuuugcccaggcugg

SEQ ID NO: 1152415 - RNA, 24 nt, Human
ucuugcuauuuugcccaggcuggu

SEQ ID NO: 1152416 - RNA, 24 nt, Human
ugaacuccugaguucaagcaaucu

SEQ ID NO: 1152417 - RNA, 19 nt, Human
ugagaagcagauuagccaa

SEQ ID NO: 1152418 - RNA, 24 nt, Human
ugagaccacaggcauguaucacca

SEQ ID NO: 1152419 - RNA, 21 nt, Human
ugaguucaagcaaucuuccca

SEQ ID NO: 1152420 - RNA, 24 nt, Human
ugcccaggcuggucuugaacuccu

SEQ ID NO: 1152421 - RNA, 27 nt, Human
ugcccaggcuggucuugaacuccugag

SEQ ID NO: 1152422 - RNA, 19 nt, Human
ugcggggaguggggcuggg

SEQ ID NO: 1152423 - RNA, 19 nt, Human
ugcuaaacauccuacaauu

SEQ ID NO: 1152424 - RNA, 24 nt, Human
ugcuauuuugcccaggcuggucuu

SEQ ID NO: 1152425 - RNA, 24 nt, Human
ugcugggauuacaggugcgaguca

SEQ ID NO: 1152426 - RNA, 19 nt, Human
uggagugcagugguacgau

SEQ ID NO: 1152427 - RNA, 23 nt, Human
uggcuaauuuuuucccuuuuucu

SEQ ID NO: 1152428 - RNA, 23 nt, Human
uggcuuuuacuuuugauagcuuc

SEQ ID NO: 1152429 - RNA, 18 nt, Human
ugggauuacaggugcgag

SEQ ID NO: 1152430 - RNA, 18 nt, Human
ugggauuacaggugcgag

SEQ ID NO: 1152431 - RNA, 21 nt, Human
ugggauuacaggugcgaguca

SEQ ID NO: 1152432 - RNA, 22 nt, Human
ugggauuacaggugcgagucac

SEQ ID NO: 1152433 - RNA, 23 nt, Human
ugggauuacaggugcgagucacu

SEQ ID NO: 1152434 - RNA, 25 nt, Human
ugggauuacaggugcgagucacucu

SEQ ID NO: 1152435 - RNA, 19 nt, Human
uggggcugggaaguggcug

SEQ ID NO: 1152436 - RNA, 24 nt, Human
ugggucaucaguacucaagacauc

SEQ ID NO: 1152437 - RNA, 24 nt, Human
ugguacgaucccagcucacugcag

SEQ ID NO: 1152438 - RNA, 26 nt, Human
ugucaguauccuuccaccacccuggc

SEQ ID NO: 1152439 - RNA, 18 nt, Human
ugucccuggagagcagga

SEQ ID NO: 1152440 - RNA, 23 nt, Human
ugucuggagacaauuuugguugu

SEQ ID NO: 1152441 - RNA, 18 nt, Human
uguggcccuuaggcucuc

SEQ ID NO: 1152442 - RNA, 18 nt, Human
uucaagcaaucuucccau

SEQ ID NO: 1152443 - RNA, 24 nt, Human
uucaagcaaucuucccauuucagc

SEQ ID NO: 1152444 - RNA, 24 nt, Human
uucaagcgauccucccaccucagc

SEQ ID NO: 1152445 - RNA, 18 nt, Human
uucauugucauuaccagu

SEQ ID NO: 1152446 - RNA, 21 nt, Human
uucuaucgcuccucuccaaug

SEQ ID NO: 1152447 - RNA, 19 nt, Human
uugucccuggagagcagga

SEQ ID NO: 1152448 - RNA, 21 nt, Human
uuucuuuucucuuucuccacc

SEQ ID NO: 1152449 - RNA, 18 nt, Human
uuugguuguugcagcugg

SEQ ID NO: 1152450 - RNA, 21 nt, Human
uuuugguuguugcagcuggag

SEQ ID NO: 1152451 - RNA, 23 nt, Human
uuuuucagcagcguugucccugg

SEQ ID NO: 1152452 - RNA, 20 nt, Human
aaccuccaccuccugggcuc

SEQ ID NO: 1152453 - RNA, 21 nt, Human
aagcccccccagagaagcaag

SEQ ID NO: 1152454 - RNA, 24 nt, Human
aaggauucuccucccucagccucc

SEQ ID NO: 1152455 - RNA, 24 nt, Human
aaggugcugagaucacagguguga

SEQ ID NO: 1152456 - RNA, 19 nt, Human
aaguagcugggaaugcagg

SEQ ID NO: 1152457 - RNA, 24 nt, Human
accauuuuggccaggcuggucucg

SEQ ID NO: 1152458 - RNA, 22 nt, Human
accuacagguacuggaggugaa

SEQ ID NO: 1152459 - RNA, 21 nt, Human
acucuguugcccaggcuggag

SEQ ID NO: 1152460 - RNA, 25 nt, Human
acucuguugcccaggcuggagugca

SEQ ID NO: 1152461 - RNA, 18 nt, Human
agaacucaagggacagga

SEQ ID NO: 1152462 - RNA, 25 nt, Human
agacaagauggggguuuugcucuaa

SEQ ID NO: 1152463 - RNA, 19 nt, Human
agaucacaggugugagcca

SEQ ID NO: 1152464 - RNA, 20 nt, Human
agcuaugacagagaggggca

SEQ ID NO: 1152465 - RNA, 18 nt, Human
aggaaggagaugaguugg

SEQ ID NO: 1152466 - RNA, 21 nt, Human
aggaaggcagguuugggcugg

SEQ ID NO: 1152467 - RNA, 24 nt, Human
aggcagugguugaggcuguggaaa

SEQ ID NO: 1152468 - RNA, 25 nt, Human
aggcuggagugcaguggcaugaucu

SEQ ID NO: 1152469 - RNA, 22 nt, Human
aggugauccuccugccccggcc

SEQ ID NO: 1152470 - RNA, 24 nt, Human
aggugauccuccugccccggccuc

SEQ ID NO: 1152471 - RNA, 26 nt, Human
aggugcugagaucacaggugugagcc

SEQ ID NO: 1152472 - RNA, 18 nt, Human
aguaggugggauuacagg

SEQ ID NO: 1152473 - RNA, 24 nt, Human
agugauucuccugccucagccucc

SEQ ID NO: 1152474 - RNA, 18 nt, Human
agugcaguggcaugaucu

SEQ ID NO: 1152475 - RNA, 19 nt, Human
agugcaguggcaugaucuc

SEQ ID NO: 1152476 - RNA, 21 nt, Human
agugcaguggcaugaucuccg

SEQ ID NO: 1152477 - RNA, 22 nt, Human
augacagagaggggcaggguac

SEQ ID NO: 1152478 - RNA, 24 nt, Human
augggguuucaccauuuuggccag

SEQ ID NO: 1152479 - RNA, 18 nt, Human
auucuccugccucagccu

SEQ ID NO: 1152480 - RNA, 24 nt, Human
auuuuuguauuuuuaguagagaug

SEQ ID NO: 1152481 - RNA, 24 nt, Human
caaaggauucuccucccucagccu

SEQ ID NO: 1152482 - RNA, 23 nt, Human
caaccuccaccuccugggcucaa

SEQ ID NO: 1152483 - RNA, 24 nt, Human
caaccuccaccuccugggcucaag

SEQ ID NO: 1152484 - RNA, 24 nt, Human
caagauggggguuuugcucuaagc

SEQ ID NO: 1152485 - RNA, 21 nt, Human
caagcccccccagagaagcaa

SEQ ID NO: 1152486 - RNA, 22 nt, Human
caagcccccccagagaagcaag

SEQ ID NO: 1152487 - RNA, 24 nt, Human
caaggugcugagaucacaggugug

SEQ ID NO: 1152488 - RNA, 22 nt, Human
caagugauucuccugccucagc

SEQ ID NO: 1152489 - RNA, 19 nt, Human
cacagaacucaagggacag

SEQ ID NO: 1152490 - RNA, 19 nt, Human
cacaggugugagccaccac

SEQ ID NO: 1152491 - RNA, 21 nt, Human
caccauuuuggccaggcuggu

SEQ ID NO: 1152492 - RNA, 24 nt, Human
caccauuuuggccaggcuggucuc

SEQ ID NO: 1152493 - RNA, 21 nt, Human
cacugcaaccuccaccuccug

SEQ ID NO: 1152494 - RNA, 23 nt, Human
cacugcaaccuccaccuccuggg

SEQ ID NO: 1152495 - RNA, 20 nt, Human
cacuggacauuucaagcccc

SEQ ID NO: 1152496 - RNA, 24 nt, Human
caggugcccaccaacacaccuggc

SEQ ID NO: 1152497 - RNA, 19 nt, Human
cagguucaaaggauucucc

SEQ ID NO: 1152498 - RNA, 20 nt, Human
cauuguaacacagacaaagc

SEQ ID NO: 1152499 - RNA, 21 nt, Human
ccaaggugcugagaucacagg

SEQ ID NO: 1152500 - RNA, 24 nt, Human
ccaaggugcugagaucacaggugu

SEQ ID NO: 1152501 - RNA, 24 nt, Human
ccaccuccugggcucaagugauuc

SEQ ID NO: 1152502 - RNA, 21 nt, Human
ccagggggcaacgugugccag

SEQ ID NO: 1152503 - RNA, 23 nt, Human
cccaaguagcugggaaugcaggu

SEQ ID NO: 1152504 - RNA, 23 nt, Human
cccgaguaggugggauuacaggu

SEQ ID NO: 1152505 - RNA, 21 nt, Human
ccuacagguacuggaggugaa

SEQ ID NO: 1152506 - RNA, 22 nt, Human
ccuccaccuccugggcucaagu

SEQ ID NO: 1152507 - RNA, 24 nt, Human
ccucccagguucaaaggauucucc

SEQ ID NO: 1152508 - RNA, 25 nt, Human
ccuccugccccggccucccaaggug

SEQ ID NO: 1152509 - RNA, 24 nt, Human
ccuccugggcucaagugauucucc

SEQ ID NO: 1152510 - RNA, 23 nt, Human
ccugaccuaaggugauccuccug

SEQ ID NO: 1152511 - RNA, 23 nt, Human
ccugggcucaagugauucuccuc

SEQ ID NO: 1152512 - RNA, 23 nt, Human
ccugggcucaagugauucuccug

SEQ ID NO: 1152513 - RNA, 23 nt, Human
cucaagugauucuccugccucag

SEQ ID NO: 1152514 - RNA, 24 nt, Human
cucaagugauucuccugccucagc

SEQ ID NO: 1152515 - RNA, 24 nt, Human
cucacugcaaccuccaccuccugg

SEQ ID NO: 1152516 - RNA, 27 nt, Human
cucacugcaaccuccaccuccugggcu

SEQ ID NO: 1152517 - RNA, 21 nt, Human
cucccaaggugcugagaucac

SEQ ID NO: 1152518 - RNA, 23 nt, Human
cucccucagccucccaaguagcu

SEQ ID NO: 1152519 - RNA, 20 nt, Human
cuccugggcucaagugauuc

SEQ ID NO: 1152520 - RNA, 21 nt, Human
cuccugggcucaagugauucu

SEQ ID NO: 1152521 - RNA, 18 nt, Human
cugcaaccuccaccuccu

SEQ ID NO: 1152522 - RNA, 23 nt, Human
cugcaaccuccaccuccugggcu

SEQ ID NO: 1152523 - RNA, 24 nt, Human
cugcaaccuccaccuccugggcuc

SEQ ID NO: 1152524 - RNA, 21 nt, Human
cugccucagccucccgaguag

SEQ ID NO: 1152525 - RNA, 24 nt, Human
cuggacauuucaagcccccccaga

SEQ ID NO: 1152526 - RNA, 21 nt, Human
cuggaucuugauauguguuuc

SEQ ID NO: 1152527 - RNA, 24 nt, Human
cuggggaacccaccucccagguuc

SEQ ID NO: 1152528 - RNA, 21 nt, Human
cuggggacgcaucccagguag

SEQ ID NO: 1152529 - RNA, 21 nt, Human
cuuacucuguugcccaggcug

SEQ ID NO: 1152530 - RNA, 26 nt, Human
cuuacugugcugggaguacuugugga

SEQ ID NO: 1152531 - RNA, 19 nt, Human
cuuguggagugggggcugu

SEQ ID NO: 1152532 - RNA, 21 nt, Human
cuuguggagugggggcugugu

SEQ ID NO: 1152533 - RNA, 22 nt, Human
gaaggcagguuugggcuggaga

SEQ ID NO: 1152534 - RNA, 22 nt, Human
gaaucuuacucuguugcccagg

SEQ ID NO: 1152535 - RNA, 19 nt, Human
gacacagaacucaagggac

SEQ ID NO: 1152536 - RNA, 21 nt, Human
gacaggaaggagaugaguugg

SEQ ID NO: 1152537 - RNA, 19 nt, Human
gacagugucaggcaaggac

SEQ ID NO: 1152538 - RNA, 23 nt, Human
gaccauagggaaaugucuucuca

SEQ ID NO: 1152539 - RNA, 18 nt, Human
gagaugggguuucaccau

SEQ ID NO: 1152540 - RNA, 18 nt, Human
gaucacaggugugagcca

SEQ ID NO: 1152541 - RNA, 24 nt, Human
gcccaggcuggagugcaguggcau

SEQ ID NO: 1152542 - RNA, 21 nt, Human
gccugguuuggggaauauucg

SEQ ID NO: 1152543 - RNA, 25 nt, Human
gcuggagugcaguggcaugaucucc

SEQ ID NO: 1152544 - RNA, 25 nt, Human
ggacaggggucccugccagggaugc

SEQ ID NO: 1152545 - RNA, 20 nt, Human
ggagacagacaagauggggg

SEQ ID NO: 1152546 - RNA, 19 nt, Human
gggcuaggaaggcagguuu

SEQ ID NO: 1152547 - RNA, 22 nt, Human
gggcucaagugauucuccugcc

SEQ ID NO: 1152548 - RNA, 18 nt, Human
gggguuucaccauuuugg

SEQ ID NO: 1152549 - RNA, 22 nt, Human
gggguuucaccauuuuggccag

SEQ ID NO: 1152550 - RNA, 22 nt, Human
ggguuucaccauuuuggccagg

SEQ ID NO: 1152551 - RNA, 19 nt, Human
gguaggcagugguugaggc

SEQ ID NO: 1152552 - RNA, 19 nt, Human
ggucucgaacuccugaccu

SEQ ID NO: 1152553 - RNA, 21 nt, Human
ggugauccuccugccccggcc

SEQ ID NO: 1152554 - RNA, 24 nt, Human
gugauucuccugccucagccuccc

SEQ ID NO: 1152555 - RNA, 21 nt, Human
gugcugagaucacagguguga

SEQ ID NO: 1152556 - RNA, 21 nt, Human
gugugagccaccacgcugggc

SEQ ID NO: 1152557 - RNA, 23 nt, Human
uaacuguuguauuuuuaguggag

SEQ ID NO: 1152558 - RNA, 24 nt, Human
uaauuuuuguauuuuuaguagaga

SEQ ID NO: 1152559 - RNA, 21 nt, Human
uagcugggaaugcaggugugc

SEQ ID NO: 1152560 - RNA, 19 nt, Human
uaguagagaugggguuuca

SEQ ID NO: 1152561 - RNA, 23 nt, Human
uaguagagaugggguuucaccau

SEQ ID NO: 1152562 - RNA, 26 nt, Human
uaguagagaugggguuucaccauuuu

SEQ ID NO: 1152563 - RNA, 19 nt, Human
uauguguuucucaguugga

SEQ ID NO: 1152564 - RNA, 23 nt, Human
ucacugcaaccuccaccuccugg

SEQ ID NO: 1152565 - RNA, 24 nt, Human
ucacugcaaccuccaccuccuggg

SEQ ID NO: 1152566 - RNA, 25 nt, Human
ucacugcaaccuccaccuccugggc

SEQ ID NO: 1152567 - RNA, 27 nt, Human
ucacugcaaccuccaccuccugggcuc

SEQ ID NO: 1152568 - RNA, 20 nt, Human
ucagccucccaaguagcugg

SEQ ID NO: 1152569 - RNA, 23 nt, Human
ucccaaggugcugagaucacagg

SEQ ID NO: 1152570 - RNA, 23 nt, Human
ucccaaguagcugggaaugcagg

SEQ ID NO: 1152571 - RNA, 21 nt, Human
ucccagguucaaaggauucuc

SEQ ID NO: 1152572 - RNA, 23 nt, Human
ucccgaguaggugggauuacagg

SEQ ID NO: 1152573 - RNA, 24 nt, Human
ucccgaguaggugggauuacaggu

SEQ ID NO: 1152574 - RNA, 24 nt, Human
ucccucagccucccaaguagcugg

SEQ ID NO: 1152575 - RNA, 21 nt, Human
uccugggcucaagugauucuc

SEQ ID NO: 1152576 - RNA, 22 nt, Human
uccugggcucaagugauucucc

SEQ ID NO: 1152577 - RNA, 24 nt, Human
uccugggcucaagugauucuccug

SEQ ID NO: 1152578 - RNA, 21 nt, Human
ucuagacuccauccuccaucc

SEQ ID NO: 1152579 - RNA, 20 nt, Human
ucuccucccucagccuccca

SEQ ID NO: 1152580 - RNA, 19 nt, Human
ucuccugccucagccuccc

SEQ ID NO: 1152581 - RNA, 20 nt, Human
ucucgaacuccugaccuaag

SEQ ID NO: 1152582 - RNA, 18 nt, Human
ucuguugcccaggcugga

SEQ ID NO: 1152583 - RNA, 24 nt, Human
ucuguugcccaggcuggagugcag

SEQ ID NO: 1152584 - RNA, 23 nt, Human
ucuuacucuguugcccaggcugg

SEQ ID NO: 1152585 - RNA, 24 nt, Human
ucuuacucuguugcccaggcugga

SEQ ID NO: 1152586 - RNA, 19 nt, Human
ugacacagaacucaaggga

SEQ ID NO: 1152587 - RNA, 18 nt, Human
ugacagagaggggcaggg

SEQ ID NO: 1152588 - RNA, 23 nt, Human
ugaccuaaggugauccuccugcc

SEQ ID NO: 1152589 - RNA, 18 nt, Human
ugacguuggacucauugg

SEQ ID NO: 1152590 - RNA, 22 nt, Human
ugagaucacaggugugagccac

SEQ ID NO: 1152591 - RNA, 24 nt, Human
ugagaucacaggugugagccacca

SEQ ID NO: 1152592 - RNA, 23 nt, Human
ugaucuccgcucacugcaaccuc

SEQ ID NO: 1152593 - RNA, 20 nt, Human
ugcccaccaacacaccuggc

SEQ ID NO: 1152594 - RNA, 18 nt, Human
ugcccaggcuggagugca

SEQ ID NO: 1152595 - RNA, 21 nt, Human
ugcccaggcuggagugcagug

SEQ ID NO: 1152596 - RNA, 22 nt, Human
ugcccaggcuggagugcagugg

SEQ ID NO: 1152597 - RNA, 24 nt, Human
ugcccaggcuggagugcaguggca

SEQ ID NO: 1152598 - RNA, 24 nt, Human
ugccccggccucccaaggugcuga

SEQ ID NO: 1152599 - RNA, 21 nt, Human
ugcccugggcuuuaauuauuu

SEQ ID NO: 1152600 - RNA, 24 nt, Human
ugccucagccucccgaguaggugg

SEQ ID NO: 1152601 - RNA, 22 nt, Human
ugccugggaugagaguggagac

SEQ ID NO: 1152602 - RNA, 21 nt, Human
ugccugguuuggggaauauuc

SEQ ID NO: 1152603 - RNA, 24 nt, Human
ugcugagaucacaggugugagcca

SEQ ID NO: 1152604 - RNA, 24 nt, Human
uggaaucuuacucuguugcccagg

SEQ ID NO: 1152605 - RNA, 19 nt, Human
uggagugcaguggcaugau

SEQ ID NO: 1152606 - RNA, 22 nt, Human
uggagugcaguggcaugaucuc

SEQ ID NO: 1152607 - RNA, 23 nt, Human
uggagugcaguggcaugaucucc

SEQ ID NO: 1152608 - RNA, 24 nt, Human
uggagugcaguggcaugaucuccg

SEQ ID NO: 1152609 - RNA, 24 nt, Human
uggccaggcuggucucgaacuccu

SEQ ID NO: 1152610 - RNA, 24 nt, Human
ugggaaugcaggugugcgccacca

SEQ ID NO: 1152611 - RNA, 20 nt, Human
ugggaugagaguggagacag

SEQ ID NO: 1152612 - RNA, 21 nt, Human
ugggauuacaggugcccacca

SEQ ID NO: 1152613 - RNA, 18 nt, Human
ugggcucaagugauucuc

SEQ ID NO: 1152614 - RNA, 24 nt, Human
ugggcucaagugauucuccugccu

SEQ ID NO: 1152615 - RNA, 24 nt, Human
ugggguuucaccauuuuggccagg

SEQ ID NO: 1152616 - RNA, 22 nt, Human
ugugacacagaacucaagggac

SEQ ID NO: 1152617 - RNA, 24 nt, Human
uuacucuguugcccaggcuggagu

SEQ ID NO: 1152618 - RNA, 22 nt, Human
uuaguagagaugggguuucacc

SEQ ID NO: 1152619 - RNA, 24 nt, Human
uuaguagagaugggguuucaccau

SEQ ID NO: 1152620 - RNA, 18 nt, Human
uucuucuuguggccucug

SEQ ID NO: 1152621 - RNA, 19 nt, Human
uugauauguguuucucagu

SEQ ID NO: 1152622 - RNA, 24 nt, Human
uugcccaggcuggagugcaguggc

SEQ ID NO: 1152623 - RNA, 19 nt, Human
uugcuugggacccaggggg

SEQ ID NO: 1152624 - RNA, 23 nt, Human
uuguauuuuuaguagagaugggg

SEQ ID NO: 1152625 - RNA, 22 nt, Human
uuuaaagauggaaucuuacucu

SEQ ID NO: 1152626 - RNA, 24 nt, Human
uuucaccauuuuggccaggcuggu

SEQ ID NO: 1152627 - RNA, 18 nt, Human
uuuggccaggcuggucuc

SEQ ID NO: 1152628 - RNA, 24 nt, Human
uuuuuaguagagaugggguuucac

SEQ ID NO: 1152629 - RNA, 21 nt, Human
uuuuucuucuuguggccucug

SEQ ID NO: 1152630 - RNA, 20 nt, Human
uuuuuguauuuuuaguagag

SEQ ID NO: 1152631 - RNA, 21 nt, Human
aaaaacaaguaaaauaaguca

SEQ ID NO: 1152632 - RNA, 23 nt, Human
aauacaucccucaaaaauagccc

SEQ ID NO: 1152633 - RNA, 18 nt, Human
agcccaucaaugcuaaac

SEQ ID NO: 1152634 - RNA, 23 nt, Human
aggaaauaaacaaauaaaaaugc

SEQ ID NO: 1152635 - RNA, 20 nt, Human
caaccuccaaguuauucuuu

SEQ ID NO: 1152636 - RNA, 23 nt, Human
caagaaaggccgaaaaccaguca

SEQ ID NO: 1152637 - RNA, 21 nt, Human
cacaguuggcaaaggcucaga

SEQ ID NO: 1152638 - RNA, 18 nt, Human
cacuggcacucauaggug

SEQ ID NO: 1152639 - RNA, 19 nt, Human
caggaaaaacaaaucccac

SEQ ID NO: 1152640 - RNA, 22 nt, Human
cagugggcccuuggauuuaugc

SEQ ID NO: 1152641 - RNA, 23 nt, Human
ccuagaaagcacagacagagcau

SEQ ID NO: 1152642 - RNA, 23 nt, Human
ccuucaggaaaaacaaaucccac

SEQ ID NO: 1152643 - RNA, 25 nt, Human
ccuucccagauauuguuccuucaaa

SEQ ID NO: 1152644 - RNA, 18 nt, Human
cgaaaaccagucaacugc

SEQ ID NO: 1152645 - RNA, 20 nt, Human
cgacaguaucuuuucccagu

SEQ ID NO: 1152646 - RNA, 21 nt, Human
cucaaaaauagcccaucaaug

SEQ ID NO: 1152647 - RNA, 25 nt, Human
cuuuuuaaauugccaugaaugaaua

SEQ ID NO: 1152648 - RNA, 19 nt, Human
gaacauuuuaauguguggu

SEQ ID NO: 1152649 - RNA, 23 nt, Human
gcuaaaaaaaaaaaucaaaauga

SEQ ID NO: 1152650 - RNA, 22 nt, Human
ggaaaaacaaaucccacuuaaa

SEQ ID NO: 1152651 - RNA, 23 nt, Human
ggcuaaaaaaaaaaaucaaaaug

SEQ ID NO: 1152652 - RNA, 19 nt, Human
gguuggcuaaaaaaaaaaa

SEQ ID NO: 1152653 - RNA, 23 nt, Human
uaaaaaaaaaaaucaaaaugaaa

SEQ ID NO: 1152654 - RNA, 24 nt, Human
uaaaaaaaaaaaucaaaaugaaac

SEQ ID NO: 1152655 - RNA, 19 nt, Human
uaaacaaacaaaaaaagag

SEQ ID NO: 1152656 - RNA, 25 nt, Human
uaaacaaacaaaaaaagagacuugu

SEQ ID NO: 1152657 - RNA, 23 nt, Human
uaaacagaacucaacaauuuuua

SEQ ID NO: 1152658 - RNA, 18 nt, Human
uaaaugcauuuuuuuccu

SEQ ID NO: 1152659 - RNA, 19 nt, Human
uaaauuucuuucuaaaaag

SEQ ID NO: 1152660 - RNA, 22 nt, Human
uacugagauucaauguaaaaac

SEQ ID NO: 1152661 - RNA, 20 nt, Human
uagcauggaauuaaaucuuu

SEQ ID NO: 1152662 - RNA, 22 nt, Human
uagcccaucaaugcuaaaccaa

SEQ ID NO: 1152663 - RNA, 21 nt, Human
uauugcugaauggaaaaaccc

SEQ ID NO: 1152664 - RNA, 21 nt, Human
ucaagaaaggccgaaaaccag

SEQ ID NO: 1152665 - RNA, 20 nt, Human
ucugguuuuauuuuuaaauu

SEQ ID NO: 1152666 - RNA, 21 nt, Human
ucugguuuuauuuuuaaauug

SEQ ID NO: 1152667 - RNA, 20 nt, Human
ucuuauuagucaaccuccaa

SEQ ID NO: 1152668 - RNA, 20 nt, Human
ugagcuagcauggaauuaaa

SEQ ID NO: 1152669 - RNA, 20 nt, Human
ugagcuagcauggaauuaaa

SEQ ID NO: 1152670 - RNA, 20 nt, Human
ugagcuagcauggaauuaaa

SEQ ID NO: 1152671 - RNA, 23 nt, Human
ugagcuagcauggaauuaaaucu

SEQ ID NO: 1152672 - RNA, 19 nt, Human
ugauaaaagcaagauaaca

SEQ ID NO: 1152673 - RNA, 25 nt, Human
ugauaaaagcaagauaacaaaagga

SEQ ID NO: 1152674 - RNA, 24 nt, Human
ugcccuucaggaaaaacaaauccc

SEQ ID NO: 1152675 - RNA, 18 nt, Human
ugcugaauggaaaaaccc

SEQ ID NO: 1152676 - RNA, 18 nt, Human
uggaaaaacccgacagua

SEQ ID NO: 1152677 - RNA, 22 nt, Human
uucaaaacuaauugagcuagca

SEQ ID NO: 1152678 - RNA, 22 nt, Human
uucuuugggagaaaucaaagca

SEQ ID NO: 1152679 - RNA, 19 nt, Human
uuggcuaaaaaaaaaaauc

SEQ ID NO: 1152680 - RNA, 21 nt, Human
uuguauauaaccucugguucc

SEQ ID NO: 1152681 - RNA, 24 nt, Human
uuugauugaaaguuuaugccaacu

SEQ ID NO: 1152682 - RNA, 23 nt, Human
aaaaggaaaaguucaaaagagga

SEQ ID NO: 1152683 - RNA, 19 nt, Human
aaauaacccuugaucuaaa

SEQ ID NO: 1152684 - RNA, 22 nt, Human
aacaaauauucaaaaauuacgc

SEQ ID NO: 1152685 - RNA, 22 nt, Human
aacaaguuuuauaaauauguuc

SEQ ID NO: 1152686 - RNA, 22 nt, Human
aagcaaaaaaaaaauagaagua

SEQ ID NO: 1152687 - RNA, 24 nt, Human
aagcagaaagaaagugaagaauga

SEQ ID NO: 1152688 - RNA, 27 nt, Human
aagcagaaagaaagugaagagggaccc

SEQ ID NO: 1152689 - RNA, 24 nt, Human
acaaaagccguaaaaauuccaaca

SEQ ID NO: 1152690 - RNA, 24 nt, Human
accuacaugacuacacaaaagccg

SEQ ID NO: 1152691 - RNA, 21 nt, Human
agaaacuauguuuuuggcauu

SEQ ID NO: 1152692 - RNA, 20 nt, Human
agaaguaaaaauacaaugca

SEQ ID NO: 1152693 - RNA, 20 nt, Human
agacucgacuagagccggca

SEQ ID NO: 1152694 - RNA, 22 nt, Human
agcccgaagcuccugcgggaga

SEQ ID NO: 1152695 - RNA, 27 nt, Human
agccggcauccaagucggaccggcgcg

SEQ ID NO: 1152696 - RNA, 24 nt, Human
auacaaauaugaaguugcugaaau

SEQ ID NO: 1152697 - RNA, 24 nt, Human
aucuuuuuagaccccuuuaaaacc

SEQ ID NO: 1152698 - RNA, 23 nt, Human
caagcaaaagagcuccgccuccu

SEQ ID NO: 1152699 - RNA, 22 nt, Human
caaggacaaaaggaaaaguuca

SEQ ID NO: 1152700 - RNA, 23 nt, Human
caccucugcagccucgccaggag

SEQ ID NO: 1152701 - RNA, 23 nt, Human
cagccgcgcgcgcagucggugcg

SEQ ID NO: 1152702 - RNA, 22 nt, Human
caggagaagcccgaagcuccug

SEQ ID NO: 1152703 - RNA, 23 nt, Human
ccaaucaggacucagauuuuaaa

SEQ ID NO: 1152704 - RNA, 28 nt, Human
cccccuauaaaugugaaaggacagggau

SEQ ID NO: 1152705 - RNA, 25 nt, Human
ccccuuuaaaaccacuuuaauacaa

SEQ ID NO: 1152706 - RNA, 20 nt, Human
cccgcgggagccccgggagc

SEQ ID NO: 1152707 - RNA, 27 nt, Human
cgccaacaaaucuuuccauuccuuucc

SEQ ID NO: 1152708 - RNA, 19 nt, Human
cgggagaagccugaagcug

SEQ ID NO: 1152709 - RNA, 21 nt, Human
cuaagaaauaacccuugaucu

SEQ ID NO: 1152710 - RNA, 23 nt, Human
cuagaaccaaucauuucugccgu

SEQ ID NO: 1152711 - RNA, 22 nt, Human
cucacauauacaaauaugaagu

SEQ ID NO: 1152712 - RNA, 21 nt, Human
cuccgccuccugcugccccuc

SEQ ID NO: 1152713 - RNA, 24 nt, Human
cugaaagacuccugucucggaguu

SEQ ID NO: 1152714 - RNA, 22 nt, Human
cugcugccccuccaggauugaa

SEQ ID NO: 1152715 - RNA, 20 nt, Human
gaaaggacagggauaauuaa

SEQ ID NO: 1152716 - RNA, 18 nt, Human
gagaagaaaaguucccac

SEQ ID NO: 1152717 - RNA, 18 nt, Human
gcgcagucggugcgcccc

SEQ ID NO: 1152718 - RNA, 24 nt, Human
gcuaacuggaaaauggaaagcaaa

SEQ ID NO: 1152719 - RNA, 22 nt, Human
gugaaugccaccucucacagcu

SEQ ID NO: 1152720 - RNA, 23 nt, Human
uaagauggcuaacacagaaguca

SEQ ID NO: 1152721 - RNA, 19 nt, Human
uaagugaaugccaccucuc

SEQ ID NO: 1152722 - RNA, 22 nt, Human
uacacaaaagccguaaaaauuc

SEQ ID NO: 1152723 - RNA, 23 nt, Human
uaccaggagaagcccgaagcucc

SEQ ID NO: 1152724 - RNA, 18 nt, Human
uagcaguaauuuucuuca

SEQ ID NO: 1152725 - RNA, 24 nt, Human
uaggcuauaaacaacauuaaagua

SEQ ID NO: 1152726 - RNA, 18 nt, Human
uaguauguacuuuaacaa

SEQ ID NO: 1152727 - RNA, 20 nt, Human
ucaccgugccgccuccccgc

SEQ ID NO: 1152728 - RNA, 22 nt, Human
uccaaguucuuuuguaaaagca

SEQ ID NO: 1152729 - RNA, 22 nt, Human
uccccgcgggagccccgggagc

SEQ ID NO: 1152730 - RNA, 18 nt, Human
ucguagcucagaagacuc

SEQ ID NO: 1152731 - RNA, 22 nt, Human
ucuuuccauuccuuuccauucc

SEQ ID NO: 1152732 - RNA, 22 nt, Human
ugaaagacuccugucucggagu

SEQ ID NO: 1152733 - RNA, 19 nt, Human
ugaaauaaaaucacgaagc

SEQ ID NO: 1152734 - RNA, 23 nt, Human
ugacuacacaaaagccguaaaaa

SEQ ID NO: 1152735 - RNA, 21 nt, Human
ugaucuaagaaauaacccuug

SEQ ID NO: 1152736 - RNA, 22 nt, Human
ugcaagaauaaaaucaaauaac

SEQ ID NO: 1152737 - RNA, 23 nt, Human
ugccaccucucacagcucacaua

SEQ ID NO: 1152738 - RNA, 20 nt, Human
ugcccgcagccgcgcgcgca

SEQ ID NO: 1152739 - RNA, 23 nt, Human
uggaaaauggaaagcaaaaaaaa

SEQ ID NO: 1152740 - RNA, 18 nt, Human
uggaaagcaaaaaaaaaa

SEQ ID NO: 1152741 - RNA, 23 nt, Human
uggaaagcaaaaaaaaaauagaa

SEQ ID NO: 1152742 - RNA, 20 nt, Human
ugguggcuugugguuauaau

SEQ ID NO: 1152743 - RNA, 21 nt, Human
uuaauacaaggacaaaaggaa

SEQ ID NO: 1152744 - RNA, 18 nt, Human
uugaagacucugauuugc

SEQ ID NO: 1152745 - RNA, 22 nt, Human
uuucugccguuccaaaaaauua

SEQ ID NO: 1152746 - RNA, 21 nt, Human
uuugaagacucugauuugcuc

SEQ ID NO: 1152747 - RNA, 19 nt, Human
uuugagaauauguggagac

SEQ ID NO: 1152748 - RNA, 18 nt, Human
uuuggcauuucuuaauau

SEQ ID NO: 1152749 - RNA, 22 nt, Human
agggacuccaggaaggccgggg

SEQ ID NO: 1152750 - RNA, 24 nt, Human
cccgcgcacugggcccuccaggac

SEQ ID NO: 1152751 - RNA, 22 nt, Human
ccuccaggaccguaccaccguc

SEQ ID NO: 1152752 - RNA, 23 nt, Human
ccuccaggaccguaccaccgucc

SEQ ID NO: 1152753 - RNA, 24 nt, Human
cguccagaacgauaccuuggccac

SEQ ID NO: 1152754 - RNA, 22 nt, Human
cuacuucuuccucuuucaggga

SEQ ID NO: 1152755 - RNA, 18 nt, Human
cuccaggaaggccggggg

SEQ ID NO: 1152756 - RNA, 22 nt, Human
cuccugccgcaggcgcguccag

SEQ ID NO: 1152757 - RNA, 18 nt, Human
cugcaacagcuaucuucc

SEQ ID NO: 1152758 - RNA, 19 nt, Human
gagguggggcuggcggaag

SEQ ID NO: 1152759 - RNA, 26 nt, Human
gcacugggcccuccaggaccguacca

SEQ ID NO: 1152760 - RNA, 19 nt, Human
ggaaguggacgcggcgacc

SEQ ID NO: 1152761 - RNA, 19 nt, Human
ggccggggggagguggggc

SEQ ID NO: 1152762 - RNA, 21 nt, Human
ggggagguggggcuggcggaa

SEQ ID NO: 1152763 - RNA, 21 nt, Human
uccaggaaggccggggggagg

SEQ ID NO: 1152764 - RNA, 19 nt, Human
uccaggaccguaccaccgu

SEQ ID NO: 1152765 - RNA, 19 nt, Human
ucuauggcaauggcucacu

SEQ ID NO: 1152766 - RNA, 21 nt, Human
ucuauggcaauggcucacucu

SEQ ID NO: 1152767 - RNA, 21 nt, Human
ucuuccuccuccucacauuuc

SEQ ID NO: 1152768 - RNA, 18 nt, Human
ugccgcaggcgcguccag

SEQ ID NO: 1152769 - RNA, 20 nt, Human
uggggcuggcggaaguggac

SEQ ID NO: 1152770 - RNA, 22 nt, Human
aaaauacauauuccagcauaug

SEQ ID NO: 1152771 - RNA, 23 nt, Human
aaacaaacauaaacagggaagca

SEQ ID NO: 1152772 - RNA, 20 nt, Human
aagaggaaaaagauaaacag

SEQ ID NO: 1152773 - RNA, 26 nt, Human
aagcauuaaaggcuuaauagaaaacc

SEQ ID NO: 1152774 - RNA, 20 nt, Human
acacauauugagaacuuaca

SEQ ID NO: 1152775 - RNA, 20 nt, Human
acauuccuaaacaccaaaca

SEQ ID NO: 1152776 - RNA, 21 nt, Human
acuuagcugcacuuguuauau

SEQ ID NO: 1152777 - RNA, 18 nt, Human
aggaaaaagauaaacagc

SEQ ID NO: 1152778 - RNA, 22 nt, Human
aggaaaaagauaaacagcuuaa

SEQ ID NO: 1152779 - RNA, 25 nt, Human
aggaagcaagggauugguuuggagg

SEQ ID NO: 1152780 - RNA, 22 nt, Human
aggaggcacggggucccaaagc

SEQ ID NO: 1152781 - RNA, 25 nt, Human
aggagugggauccuuuccuuccacc

SEQ ID NO: 1152782 - RNA, 21 nt, Human
auagaacggcaauguuccuaa

SEQ ID NO: 1152783 - RNA, 21 nt, Human
augucugcaacuuagcugcac

SEQ ID NO: 1152784 - RNA, 23 nt, Human
auguuggcaggaggcacgggguc

SEQ ID NO: 1152785 - RNA, 24 nt, Human
caacaaccaucuucacucccaaau

SEQ ID NO: 1152786 - RNA, 21 nt, Human
caccucuggccaaguugggag

SEQ ID NO: 1152787 - RNA, 24 nt, Human
cagcauaggaaaauacauauucca

SEQ ID NO: 1152788 - RNA, 19 nt, Human
cagcguagaaccaauuuau

SEQ ID NO: 1152789 - RNA, 22 nt, Human
caggaaagggcaaauaggauua

SEQ ID NO: 1152790 - RNA, 22 nt, Human
caugucugcaacuuagcugcac

SEQ ID NO: 1152791 - RNA, 18 nt, Human
ccuacccacugaaaauuc

SEQ ID NO: 1152792 - RNA, 24 nt, Human
cuaaacaccaaacaaacauaaaca

SEQ ID NO: 1152793 - RNA, 22 nt, Human
gaaaauguauacuucuguaagc

SEQ ID NO: 1152794 - RNA, 22 nt, Human
gaacggcaauguuccuaaugaa

SEQ ID NO: 1152795 - RNA, 18 nt, Human
gcugcaauuaguuguccu

SEQ ID NO: 1152796 - RNA, 25 nt, Human
gcugcaauuaguuguccuguguuua

SEQ ID NO: 1152797 - RNA, 24 nt, Human
ggcaggaggcacggggucccaaag

SEQ ID NO: 1152798 - RNA, 18 nt, Human
gggagucaggagcuaaac

SEQ ID NO: 1152799 - RNA, 21 nt, Human
ggggucccaaagccucugugu

SEQ ID NO: 1152800 - RNA, 19 nt, Human
guauaauaagaggaaaaag

SEQ ID NO: 1152801 - RNA, 18 nt, Human
guccuuuuauuucugggu

SEQ ID NO: 1152802 - RNA, 25 nt, Human
guuuuggcucucugcaucacuuuca

SEQ ID NO: 1152803 - RNA, 19 nt, Human
uaaggaaccggaggguggc

SEQ ID NO: 1152804 - RNA, 22 nt, Human
uagguucccuuucuauggaaaa

SEQ ID NO: 1152805 - RNA, 24 nt, Human
uauauuuauuuauuuacuaguacc

SEQ ID NO: 1152806 - RNA, 21 nt, Human
ucagaacauccuacccacuga

SEQ ID NO: 1152807 - RNA, 23 nt, Human
ucuguccucugcuuucauuaagg

SEQ ID NO: 1152808 - RNA, 19 nt, Human
ugagccaggcaccaugcua

SEQ ID NO: 1152809 - RNA, 23 nt, Human
ugauguuggcaggaggcacgggg

SEQ ID NO: 1152810 - RNA, 21 nt, Human
uggaggcagaagcgagaggga

SEQ ID NO: 1152811 - RNA, 20 nt, Human
uggcaggaggcacggggucc

SEQ ID NO: 1152812 - RNA, 21 nt, Human
ugggagucaggagcuaaacug

SEQ ID NO: 1152813 - RNA, 21 nt, Human
uuaaucauauucuuucuggug

SEQ ID NO: 1152814 - RNA, 18 nt, Human
uucaccacaccucuggcc

SEQ ID NO: 1152815 - RNA, 23 nt, Human
uucacugcucagaacauccuacc

SEQ ID NO: 1152816 - RNA, 18 nt, Human
uucuggguggaaggaagc

SEQ ID NO: 1152817 - RNA, 25 nt, Human
uuucuggguggaaggaagcaaggga

SEQ ID NO: 1152818 - RNA, 20 nt, Human
aacauagugagaccccuucu

SEQ ID NO: 1152819 - RNA, 21 nt, Human
accacagcacuccagacaaca

SEQ ID NO: 1152820 - RNA, 19 nt, Human
caagugauucuguguccca

SEQ ID NO: 1152821 - RNA, 22 nt, Human
cagaaggccuccauucaaacac

SEQ ID NO: 1152822 - RNA, 25 nt, Human
cagcacuccagacaacauagugaga

SEQ ID NO: 1152823 - RNA, 21 nt, Human
cagccaggcucucucucacuu

SEQ ID NO: 1152824 - RNA, 25 nt, Human
caggaaggaugugauucauauggug

SEQ ID NO: 1152825 - RNA, 20 nt, Human
ccacuccacuccaccacagc

SEQ ID NO: 1152826 - RNA, 23 nt, Human
ccauccguaagauguucagcuac

SEQ ID NO: 1152827 - RNA, 18 nt, Human
cccagcagaacaggcucu

SEQ ID NO: 1152828 - RNA, 22 nt, Human
ccuuuggagcccugggccaucc

SEQ ID NO: 1152829 - RNA, 18 nt, Human
ccuuuguguuugucuuga

SEQ ID NO: 1152830 - RNA, 25 nt, Human
cuccacuccaccacagcacuccaga

SEQ ID NO: 1152831 - RNA, 18 nt, Human
cuucggaggcuggagaau

SEQ ID NO: 1152832 - RNA, 23 nt, Human
ggaaacgagccuuuggagcccug

SEQ ID NO: 1152833 - RNA, 21 nt, Human
gugucccagcagaacaggcuc

SEQ ID NO: 1152834 - RNA, 20 nt, Human
uacagcuucagccaggcucu

SEQ ID NO: 1152835 - RNA, 24 nt, Human
uagugagaccccuucucugggccu

SEQ ID NO: 1152836 - RNA, 19 nt, Human
uaugguguggauguuagaa

SEQ ID NO: 1152837 - RNA, 21 nt, Human
uccaccacagcacuccagaca

SEQ ID NO: 1152838 - RNA, 21 nt, Human
uccaccacagcacuccagaca

SEQ ID NO: 1152839 - RNA, 22 nt, Human
uccaccacagcacuccagacaa

SEQ ID NO: 1152840 - RNA, 18 nt, Human
uccacuccaccacagcac

SEQ ID NO: 1152841 - RNA, 19 nt, Human
uccacuccaccacagcacu

SEQ ID NO: 1152842 - RNA, 22 nt, Human
uccacuccaccacagcacucca

SEQ ID NO: 1152843 - RNA, 23 nt, Human
ucugugaauagccacuccacucu

SEQ ID NO: 1152844 - RNA, 19 nt, Human
ugcuuugagacuucggagg

SEQ ID NO: 1152845 - RNA, 22 nt, Human
uggaagguacacauacaaauua

SEQ ID NO: 1152846 - RNA, 21 nt, Human
uguuagaauuaugaaaccuau

SEQ ID NO: 1152847 - RNA, 21 nt, Human
uucagccaggcucucucucac

SEQ ID NO: 1152848 - RNA, 20 nt, Human
uuccuguccagaaggccucc

SEQ ID NO: 1152849 - RNA, 21 nt, Human
uuggaagguacacauacaaau

SEQ ID NO: 1152850 - RNA, 19 nt, Human
aacauggugaaaccccguc

SEQ ID NO: 1152851 - RNA, 20 nt, Human
aacauggugaaaccccgucu

SEQ ID NO: 1152852 - RNA, 21 nt, Human
aacauggugaaaccccgucuc

SEQ ID NO: 1152853 - RNA, 24 nt, Human
aagcacuuugggaggcuaaagugg

SEQ ID NO: 1152854 - RNA, 24 nt, Human
aaggggccugggaagacagcuggg

SEQ ID NO: 1152855 - RNA, 21 nt, Human
aaguggagguugcaggaagcc

SEQ ID NO: 1152856 - RNA, 24 nt, Human
aaguggagguugcaggaagccgag

SEQ ID NO: 1152857 - RNA, 23 nt, Human
aauaaauaaaaccccaaaaaucc

SEQ ID NO: 1152858 - RNA, 24 nt, Human
acagagcgagacuccaucucaaaa

SEQ ID NO: 1152859 - RNA, 18 nt, Human
accaucacccagcuucuc

SEQ ID NO: 1152860 - RNA, 21 nt, Human
accaucacccagcuucuccag

SEQ ID NO: 1152861 - RNA, 18 nt, Human
accccaaaaauccugagc

SEQ ID NO: 1152862 - RNA, 24 nt, Human
accccgucucuacuaaaaauacaa

SEQ ID NO: 1152863 - RNA, 21 nt, Human
accuguaauccaagcacuuug

SEQ ID NO: 1152864 - RNA, 24 nt, Human
acgccaaaggaaccaucacccagc

SEQ ID NO: 1152865 - RNA, 24 nt, Human
acuaaaaauacaaaaauuaacuga

SEQ ID NO: 1152866 - RNA, 18 nt, Human
acugcacuccagccuggg

SEQ ID NO: 1152867 - RNA, 19 nt, Human
acugcacuccagccugggc

SEQ ID NO: 1152868 - RNA, 19 nt, Human
acugcacuccagccugggc

SEQ ID NO: 1152869 - RNA, 22 nt, Human
acugcacuccagccugggcgac

SEQ ID NO: 1152870 - RNA, 24 nt, Human
acugcacuccagccugggcgacag

SEQ ID NO: 1152871 - RNA, 26 nt, Human
acugcacuccagccugggcgacagag

SEQ ID NO: 1152872 - RNA, 19 nt, Human
agaagaaaggaggccauga

SEQ ID NO: 1152873 - RNA, 20 nt, Human
agaagaaaggaggccaugag

SEQ ID NO: 1152874 - RNA, 22 nt, Human
agaagaaaggaggccaugaggg

SEQ ID NO: 1152875 - RNA, 19 nt, Human
agacucggaggccagggug

SEQ ID NO: 1152876 - RNA, 23 nt, Human
agaucaucugaggucaggaguuc

SEQ ID NO: 1152877 - RNA, 24 nt, Human
agcaauguucagguuacaagaccc

SEQ ID NO: 1152878 - RNA, 20 nt, Human
agcacuuugggaggcuaaag

SEQ ID NO: 1152879 - RNA, 24 nt, Human
agcacuuugggaggcuaaaguggg

SEQ ID NO: 1152880 - RNA, 22 nt, Human
agccuggccaacauggugaaac

SEQ ID NO: 1152881 - RNA, 24 nt, Human
agccuggccaacauggugaaaccc

SEQ ID NO: 1152882 - RNA, 24 nt, Human
agccugggcgacagagcgagacuc

SEQ ID NO: 1152883 - RNA, 25 nt, Human
aggaaaaguggaggagaccgguacc

SEQ ID NO: 1152884 - RNA, 24 nt, Human
aggcaggaggauugcuugaacccg

SEQ ID NO: 1152885 - RNA, 18 nt, Human
aggcaggugaggcucugc

SEQ ID NO: 1152886 - RNA, 19 nt, Human
aggccaugagggucaaagc

SEQ ID NO: 1152887 - RNA, 21 nt, Human
aggccaugagggucaaagcug

SEQ ID NO: 1152888 - RNA, 21 nt, Human
aggcugaggcaggaggauugc

SEQ ID NO: 1152889 - RNA, 24 nt, Human
aggcugaggcaggaggauugcuug

SEQ ID NO: 1152890 - RNA, 18 nt, Human
auaaauaaaaccccaaaa

SEQ ID NO: 1152891 - RNA, 22 nt, Human
aucugaggucaggaguucgaga

SEQ ID NO: 1152892 - RNA, 24 nt, Human
aucugaggucaggaguucgagacc

SEQ ID NO: 1152893 - RNA, 22 nt, Human
auggagccgcaggggcccucca

SEQ ID NO: 1152894 - RNA, 23 nt, Human
auugcuugaacccggaaagugga

SEQ ID NO: 1152895 - RNA, 24 nt, Human
caacauggugaaaccccgucucua

SEQ ID NO: 1152896 - RNA, 21 nt, Human
cacacccugguugggggcaga

SEQ ID NO: 1152897 - RNA, 24 nt, Human
cacaccuguaauccaagcacuuug

SEQ ID NO: 1152898 - RNA, 23 nt, Human
caccuguaauccaagcacuuugg

SEQ ID NO: 1152899 - RNA, 24 nt, Human
caccuguaauccaagcacuuuggg

SEQ ID NO: 1152900 - RNA, 24 nt, Human
cacuccagccugggcgacagagcg

SEQ ID NO: 1152901 - RNA, 24 nt, Human
cagaucaucugaggucaggaguuc

SEQ ID NO: 1152902 - RNA, 21 nt, Human
cagauggaauccaacacccca

SEQ ID NO: 1152903 - RNA, 20 nt, Human
cagccccgggucccaugccu

SEQ ID NO: 1152904 - RNA, 26 nt, Human
cagccuuggcuccagauugcagauuc

SEQ ID NO: 1152905 - RNA, 24 nt, Human
cagcuacucaggaggcugaggcag

SEQ ID NO: 1152906 - RNA, 25 nt, Human
caggggccccuccccugcugggccc

SEQ ID NO: 1152907 - RNA, 23 nt, Human
caggguggacagggaggagccga

SEQ ID NO: 1152908 - RNA, 19 nt, Human
cauccacacccugguuggg

SEQ ID NO: 1152909 - RNA, 21 nt, Human
cauccacacccugguuggggg

SEQ ID NO: 1152910 - RNA, 19 nt, Human
ccagauggaauccaacacc

SEQ ID NO: 1152911 - RNA, 26 nt, Human
ccagccccgggucccaugccucugcu

SEQ ID NO: 1152912 - RNA, 22 nt, Human
ccccaaaaauccugagcacgga

SEQ ID NO: 1152913 - RNA, 19 nt, Human
ccccagucccauccacacc

SEQ ID NO: 1152914 - RNA, 21 nt, Human
ccccgggucccaugccucugc

SEQ ID NO: 1152915 - RNA, 21 nt, Human
cccggaaaguggagguugcag

SEQ ID NO: 1152916 - RNA, 20 nt, Human
cccuccacagacaccuccuu

SEQ ID NO: 1152917 - RNA, 24 nt, Human
cccucuacagccauuaucuccggu

SEQ ID NO: 1152918 - RNA, 22 nt, Human
cccugguugggggcagaagagc

SEQ ID NO: 1152919 - RNA, 24 nt, Human
ccuacugcacuccagccugggcga

SEQ ID NO: 1152920 - RNA, 19 nt, Human
ccuccacagacaccuccuu

SEQ ID NO: 1152921 - RNA, 19 nt, Human
ccuccugcagccccgggag

SEQ ID NO: 1152922 - RNA, 19 nt, Human
ccugaccauuuggugcugu

SEQ ID NO: 1152923 - RNA, 23 nt, Human
ccuggccaacauggugaaacccc

SEQ ID NO: 1152924 - RNA, 24 nt, Human
ccuggccaacauggugaaaccccg

SEQ ID NO: 1152925 - RNA, 22 nt, Human
ccugggcgacagagcgagacuc

SEQ ID NO: 1152926 - RNA, 24 nt, Human
ccuguaauccaagcacuuugggag

SEQ ID NO: 1152927 - RNA, 21 nt, Human
ccuguaaucccagcuacucag

SEQ ID NO: 1152928 - RNA, 22 nt, Human
ccuguaaucccagcuacucagg

SEQ ID NO: 1152929 - RNA, 24 nt, Human
cgagaccagccuggccaacauggu

SEQ ID NO: 1152930 - RNA, 18 nt, Human
cgcagguccuucucccca

SEQ ID NO: 1152931 - RNA, 23 nt, Human
cgccuagagcugagggcugagac

SEQ ID NO: 1152932 - RNA, 20 nt, Human
cuacugcacuccagccuggg

SEQ ID NO: 1152933 - RNA, 21 nt, Human
cuacugcacuccagccugggc

SEQ ID NO: 1152934 - RNA, 24 nt, Human
cuacugcacuccagccugggcgac

SEQ ID NO: 1152935 - RNA, 24 nt, Human
cucacaccuguaauccaagcacuu

SEQ ID NO: 1152936 - RNA, 20 nt, Human
cuccacugaggcacccacag

SEQ ID NO: 1152937 - RNA, 22 nt, Human
cugagacggaaggaaaagugga

SEQ ID NO: 1152938 - RNA, 21 nt, Human
cugcaggggccccuccccugc

SEQ ID NO: 1152939 - RNA, 21 nt, Human
cugcccaggggagaggauaau

SEQ ID NO: 1152940 - RNA, 21 nt, Human
cugugacgcauccccaguccc

SEQ ID NO: 1152941 - RNA, 23 nt, Human
gaagacagcugggucucuggagg

SEQ ID NO: 1152942 - RNA, 20 nt, Human
gacagggaggagccgaaggu

SEQ ID NO: 1152943 - RNA, 23 nt, Human
gacgugguggcucacaccuguaa

SEQ ID NO: 1152944 - RNA, 24 nt, Human
gagaucgugccuacugcacuccag

SEQ ID NO: 1152945 - RNA, 24 nt, Human
gaucaucugaggucaggaguucga

SEQ ID NO: 1152946 - RNA, 24 nt, Human
gauugcuugaacccggaaagugga

SEQ ID NO: 1152947 - RNA, 24 nt, Human
gcacuccagccugggcgacagagc

SEQ ID NO: 1152948 - RNA, 24 nt, Human
gccaacauggugaaaccccgucuc

SEQ ID NO: 1152949 - RNA, 20 nt, Human
gccuacugcacuccagccug

SEQ ID NO: 1152950 - RNA, 22 nt, Human
gcucugagagugaugagguggg

SEQ ID NO: 1152951 - RNA, 19 nt, Human
gcuggacgugguggcucac

SEQ ID NO: 1152952 - RNA, 20 nt, Human
ggaggggcgccuagagcuga

SEQ ID NO: 1152953 - RNA, 20 nt, Human
ggagguugcaggaagccgag

SEQ ID NO: 1152954 - RNA, 24 nt, Human
ggagguugcaggaagccgagaucg

SEQ ID NO: 1152955 - RNA, 25 nt, Human
ggcagaucaucugaggucaggaguu

SEQ ID NO: 1152956 - RNA, 22 nt, Human
ggucaagggacagaagaaagga

SEQ ID NO: 1152957 - RNA, 21 nt, Human
ggugcaugccuguaaucccag

SEQ ID NO: 1152958 - RNA, 19 nt, Human
ggugccucaaaucugaggg

SEQ ID NO: 1152959 - RNA, 24 nt, Human
gguggcucacaccuguaauccaag

SEQ ID NO: 1152960 - RNA, 24 nt, Human
gguggugcaugccuguaaucccag

SEQ ID NO: 1152961 - RNA, 20 nt, Human
guggagguugcaggaagccg

SEQ ID NO: 1152962 - RNA, 19 nt, Human
uaaaccugagcaugggcug

SEQ ID NO: 1152963 - RNA, 24 nt, Human
uaaagugggcagaucaucugaggu

SEQ ID NO: 1152964 - RNA, 26 nt, Human
uaaagugggcagaucaucugagguca

SEQ ID NO: 1152965 - RNA, 20 nt, Human
uacugcacuccagccugggc

SEQ ID NO: 1152966 - RNA, 22 nt, Human
uacugcacuccagccugggcga

SEQ ID NO: 1152967 - RNA, 23 nt, Human
uacugcacuccagccugggcgac

SEQ ID NO: 1152968 - RNA, 24 nt, Human
uacugcacuccagccugggcgaca

SEQ ID NO: 1152969 - RNA, 24 nt, Human
uagcccuggccccuucucuggccu

SEQ ID NO: 1152970 - RNA, 20 nt, Human
ucaucugaggucaggaguuc

SEQ ID NO: 1152971 - RNA, 23 nt, Human
uccagccugggcgacagagcgag

SEQ ID NO: 1152972 - RNA, 24 nt, Human
uccagccugggcgacagagcgaga

SEQ ID NO: 1152973 - RNA, 23 nt, Human
uccccugcugggcccccaggggc

SEQ ID NO: 1152974 - RNA, 23 nt, Human
uccuugcugggaaggggccuggg

SEQ ID NO: 1152975 - RNA, 18 nt, Human
ucgccccugcgcaccacg

SEQ ID NO: 1152976 - RNA, 19 nt, Human
ucucaaaaauaaauaaaua

SEQ ID NO: 1152977 - RNA, 21 nt, Human
ucucuacuaaaaauacaaaaa

SEQ ID NO: 1152978 - RNA, 22 nt, Human
ucugaggucaggaguucgagac

SEQ ID NO: 1152979 - RNA, 23 nt, Human
ucugaggucaggaguucgagacc

SEQ ID NO: 1152980 - RNA, 25 nt, Human
ucugcaggggccccuccccugcugg

SEQ ID NO: 1152981 - RNA, 29 nt, Human
ucugggcuagggugccucaaaucugaggg

SEQ ID NO: 1152982 - RNA, 22 nt, Human
ugaaccgugagugugugugugg

SEQ ID NO: 1152983 - RNA, 18 nt, Human
ugacucggccuccacuga

SEQ ID NO: 1152984 - RNA, 25 nt, Human
ugagacggaaggaaaaguggaggag

SEQ ID NO: 1152985 - RNA, 24 nt, Human
ugaggcaggaggauugcuugaacc

SEQ ID NO: 1152986 - RNA, 25 nt, Human
ugaggcaggaggauugcuugaaccc

SEQ ID NO: 1152987 - RNA, 19 nt, Human
ugaggcaggugaggcucug

SEQ ID NO: 1152988 - RNA, 24 nt, Human
ugcaagcaauguucagguuacaag

SEQ ID NO: 1152989 - RNA, 24 nt, Human
ugccuguaaucccagcuacucagg

SEQ ID NO: 1152990 - RNA, 18 nt, Human
ugcugggaaggggccugg

SEQ ID NO: 1152991 - RNA, 18 nt, Human
ugcugggcccccaggggc

SEQ ID NO: 1152992 - RNA, 20 nt, Human
uggacagggaggagccgaag

SEQ ID NO: 1152993 - RNA, 24 nt, Human
uggccaacauggugaaaccccguc

SEQ ID NO: 1152994 - RNA, 19 nt, Human
uggcucacaccuguaaucc

SEQ ID NO: 1152995 - RNA, 20 nt, Human
uggcucacaccuguaaucca

SEQ ID NO: 1152996 - RNA, 20 nt, Human
ugggaggcuaaagugggcag

SEQ ID NO: 1152997 - RNA, 24 nt, Human
ugggaggcuaaagugggcagauca

SEQ ID NO: 1152998 - RNA, 18 nt, Human
ugggcagaucaucugagg

SEQ ID NO: 1152999 - RNA, 24 nt, Human
ugggcagaucaucugaggucagga

SEQ ID NO: 1153000 - RNA, 23 nt, Human
ugggggcagaagagccacuacca

SEQ ID NO: 1153001 - RNA, 21 nt, Human
uggugcaugccuguaauccca

SEQ ID NO: 1153002 - RNA, 24 nt, Human
ugguggugcaugccuguaauccca

SEQ ID NO: 1153003 - RNA, 21 nt, Human
ugguugggggcagaagagcca

SEQ ID NO: 1153004 - RNA, 25 nt, Human
ugugguucagaugaagcuaguccuu

SEQ ID NO: 1153005 - RNA, 24 nt, Human
uuaacugagugugguggugcaugc

SEQ ID NO: 1153006 - RNA, 24 nt, Human
uuccuuauguuugcaagcaauguu

SEQ ID NO: 1153007 - RNA, 24 nt, Human
uugcuugaacccggaaaguggagg

SEQ ID NO: 1153008 - RNA, 24 nt, Human
uuuagcccuggccccuucucuggc

SEQ ID NO: 1153009 - RNA, 20 nt, Human
accugauucuuuaucucugu

SEQ ID NO: 1153010 - RNA, 20 nt, Human
agacccggugguggugaugg

SEQ ID NO: 1153011 - RNA, 22 nt, Human
aggcagacccggugguggugau

SEQ ID NO: 1153012 - RNA, 21 nt, Human
aggcauuggaggggcaguggu

SEQ ID NO: 1153013 - RNA, 19 nt, Human
gcaguggugggucuggcug

SEQ ID NO: 1153014 - RNA, 20 nt, Human
ggaggggcaguggugguggc

SEQ ID NO: 1153015 - RNA, 20 nt, Human
gggcaguggugguggcagug

SEQ ID NO: 1153016 - RNA, 24 nt, Human
ggugaugguggugguaguagaggg

SEQ ID NO: 1153017 - RNA, 25 nt, Human
ggugaugguggugguaguagagggg

SEQ ID NO: 1153018 - RNA, 23 nt, Human
gugaugaugguggcagucuaauu

SEQ ID NO: 1153019 - RNA, 22 nt, Human
uagaggcaguggugggucuggc

SEQ ID NO: 1153020 - RNA, 20 nt, Human
uagagggggcaaugacggug

SEQ ID NO: 1153021 - RNA, 22 nt, Human
ucucuguggcuggauuuuuguc

SEQ ID NO: 1153022 - RNA, 21 nt, Human
ugacgguggugauggcaaagg

SEQ ID NO: 1153023 - RNA, 20 nt, Human
ugaugaugguggcagucuuu

SEQ ID NO: 1153024 - RNA, 19 nt, Human
uggaggggcagugguggug

SEQ ID NO: 1153025 - RNA, 21 nt, Human
uggaggggcaguggugguggc

SEQ ID NO: 1153026 - RNA, 19 nt, Human
uggauuuuugucacuaugu

SEQ ID NO: 1153027 - RNA, 22 nt, Human
uggcuggauuuuugucacuaug

SEQ ID NO: 1153028 - RNA, 20 nt, Human
uggugguggcagugaugaug

SEQ ID NO: 1153029 - RNA, 21 nt, Human
aaacagaauguucaguauagu

SEQ ID NO: 1153030 - RNA, 19 nt, Human
aagcugcagcccaggagag

SEQ ID NO: 1153031 - RNA, 18 nt, Human
acaggguuucaccauguu

SEQ ID NO: 1153032 - RNA, 19 nt, Human
acaggguuucaccauguua

SEQ ID NO: 1153033 - RNA, 20 nt, Human
acaggguuucaccauguuag

SEQ ID NO: 1153034 - RNA, 24 nt, Human
acaggguuucaccauguuagccag

SEQ ID NO: 1153035 - RNA, 22 nt, Human
acuacaagcucugccuccuggg

SEQ ID NO: 1153036 - RNA, 22 nt, Human
agaauccucaacaaccucacac

SEQ ID NO: 1153037 - RNA, 22 nt, Human
agacagagacagagaaaccaag

SEQ ID NO: 1153038 - RNA, 23 nt, Human
agacagagacagagaaaccaaga

SEQ ID NO: 1153039 - RNA, 21 nt, Human
agaccagaggcaagggcaagg

SEQ ID NO: 1153040 - RNA, 23 nt, Human
agcacacagggcauggagaggga

SEQ ID NO: 1153041 - RNA, 18 nt, Human
agcucugccuccuggguu

SEQ ID NO: 1153042 - RNA, 21 nt, Human
aggcaagggcaaggggaccgu

SEQ ID NO: 1153043 - RNA, 25 nt, Human
aggcuggagugcaguggcgcgaucu

SEQ ID NO: 1153044 - RNA, 18 nt, Human
aguagcugggacuacagg

SEQ ID NO: 1153045 - RNA, 21 nt, Human
agucuucagcuggugucccca

SEQ ID NO: 1153046 - RNA, 20 nt, Human
agugcaguggcgcgaucuag

SEQ ID NO: 1153047 - RNA, 24 nt, Human
agugcaguggcgcgaucuaggcuc

SEQ ID NO: 1153048 - RNA, 22 nt, Human
auaggguuuccuuucuccacuu

SEQ ID NO: 1153049 - RNA, 22 nt, Human
augagcuggccacuuacagaug

SEQ ID NO: 1153050 - RNA, 20 nt, Human
caagcccaugagggaagcug

SEQ ID NO: 1153051 - RNA, 21 nt, Human
caagcccaugagggaagcugg

SEQ ID NO: 1153052 - RNA, 19 nt, Human
caccaggcagagggcaccc

SEQ ID NO: 1153053 - RNA, 18 nt, Human
caccauguuagccaggau

SEQ ID NO: 1153054 - RNA, 22 nt, Human
caccauguuagccaggaugguc

SEQ ID NO: 1153055 - RNA, 24 nt, Human
caccauguuagccaggauggucuc

SEQ ID NO: 1153056 - RNA, 20 nt, Human
caccauuuauugaauagggu

SEQ ID NO: 1153057 - RNA, 25 nt, Human
caccccacugaugagggacggaggu

SEQ ID NO: 1153058 - RNA, 23 nt, Human
cacucucuccuuccacccuucca

SEQ ID NO: 1153059 - RNA, 19 nt, Human
cagaauccucaacaaccuc

SEQ ID NO: 1153060 - RNA, 22 nt, Human
cagaauccucaacaaccucaca

SEQ ID NO: 1153061 - RNA, 23 nt, Human
cagagcacacagggcauggagag

SEQ ID NO: 1153062 - RNA, 20 nt, Human
cagccuccugaguagcuggg

SEQ ID NO: 1153063 - RNA, 19 nt, Human
caggaaccaccaggcagag

SEQ ID NO: 1153064 - RNA, 24 nt, Human
caggguuucaccauguuagccagg

SEQ ID NO: 1153065 - RNA, 24 nt, Human
caguagagacaggguuucaccaug

SEQ ID NO: 1153066 - RNA, 26 nt, Human
caguagagacaggguuucaccauguu

SEQ ID NO: 1153067 - RNA, 22 nt, Human
cauggagagggauggcuguggu

SEQ ID NO: 1153068 - RNA, 25 nt, Human
cauuccugccucuagggagugggag

SEQ ID NO: 1153069 - RNA, 22 nt, Human
ccaagcccaugagggaagcugg

SEQ ID NO: 1153070 - RNA, 22 nt, Human
ccaauuaucccagcaccauuua

SEQ ID NO: 1153071 - RNA, 18 nt, Human
ccagaauccucaacaacc

SEQ ID NO: 1153072 - RNA, 18 nt, Human
ccagcaccauuuauugaa

SEQ ID NO: 1153073 - RNA, 19 nt, Human
cccacugaugagggacgga

SEQ ID NO: 1153074 - RNA, 23 nt, Human
cccuuccagucuucagcuggugu

SEQ ID NO: 1153075 - RNA, 19 nt, Human
ccuaccugcaacccagaau

SEQ ID NO: 1153076 - RNA, 18 nt, Human
ccucccaccacagugggg

SEQ ID NO: 1153077 - RNA, 24 nt, Human
ccuccuggguucaugccauucucc

SEQ ID NO: 1153078 - RNA, 18 nt, Human
ccugaccucgugauccgc

SEQ ID NO: 1153079 - RNA, 22 nt, Human
ccugaguagcugggacuacagg

SEQ ID NO: 1153080 - RNA, 23 nt, Human
ccugaguagcugggacuacaggu

SEQ ID NO: 1153081 - RNA, 23 nt, Human
ccugccccagccuccugaguagc

SEQ ID NO: 1153082 - RNA, 24 nt, Human
ccuggccugaggcuggcaggaacc

SEQ ID NO: 1153083 - RNA, 18 nt, Human
ccuuccacccuuccaguc

SEQ ID NO: 1153084 - RNA, 24 nt, Human
cgcccaggcuggagugcaguggcg

SEQ ID NO: 1153085 - RNA, 18 nt, Human
cuacaagcucugccuccg

SEQ ID NO: 1153086 - RNA, 21 nt, Human
cuacaagcucugccuccuggg

SEQ ID NO: 1153087 - RNA, 18 nt, Human
cucccaagcugcagccca

SEQ ID NO: 1153088 - RNA, 21 nt, Human
cuccuggguucaugccauucu

SEQ ID NO: 1153089 - RNA, 24 nt, Human
cucgcucugucgcccaggcuggag

SEQ ID NO: 1153090 - RNA, 24 nt, Human
cucuccuuccacccuuccagucuu

SEQ ID NO: 1153091 - RNA, 21 nt, Human
cucucuccuuccacccuucca

SEQ ID NO: 1153092 - RNA, 21 nt, Human
cucucugaaccccuggccuga

SEQ ID NO: 1153093 - RNA, 20 nt, Human
cucugucgcccaggcuggag

SEQ ID NO: 1153094 - RNA, 23 nt, Human
cucugucgcccaggcuggagugc

SEQ ID NO: 1153095 - RNA, 19 nt, Human
cugaggcuguacuaagugc

SEQ ID NO: 1153096 - RNA, 24 nt, Human
cugcaacccagaauccucaacaac

SEQ ID NO: 1153097 - RNA, 23 nt, Human
cugccccagccuccugaguagcu

SEQ ID NO: 1153098 - RNA, 19 nt, Human
cugugagaguccugagguu

SEQ ID NO: 1153099 - RNA, 24 nt, Human
cuugccaauuaucccagcaccauu

SEQ ID NO: 1153100 - RNA, 18 nt, Human
gaaccaagcccaugaggg

SEQ ID NO: 1153101 - RNA, 23 nt, Human
gaaccaagcccaugagggaagcu

SEQ ID NO: 1153102 - RNA, 23 nt, Human
gaauccucaacaaccucacaccc

SEQ ID NO: 1153103 - RNA, 20 nt, Human
gaccucgugauccgccuccc

SEQ ID NO: 1153104 - RNA, 22 nt, Human
gacuugcucucugaaccccuuu

SEQ ID NO: 1153105 - RNA, 20 nt, Human
gagaaccaagcccaugaggg

SEQ ID NO: 1153106 - RNA, 21 nt, Human
gagacggagucucgcucuguc

SEQ ID NO: 1153107 - RNA, 26 nt, Human
gaguagcugggacuacaggugcacac

SEQ ID NO: 1153108 - RNA, 25 nt, Human
gccacccucccaccacaguggggac

SEQ ID NO: 1153109 - RNA, 19 nt, Human
gcccaggcuggagugcagu

SEQ ID NO: 1153110 - RNA, 20 nt, Human
gcccaggcuggagugcagug

SEQ ID NO: 1153111 - RNA, 21 nt, Human
gcucacuacaagcucugccuc

SEQ ID NO: 1153112 - RNA, 24 nt, Human
gcuggagugcaguggcgcgaucua

SEQ ID NO: 1153113 - RNA, 18 nt, Human
ggaaagggcuuaaugagc

SEQ ID NO: 1153114 - RNA, 21 nt, Human
ggacggaggugguauaggccu

SEQ ID NO: 1153115 - RNA, 21 nt, Human
ggagcucucccaagcugcagc

SEQ ID NO: 1153116 - RNA, 23 nt, Human
ggagcucucccaagcugcagccc

SEQ ID NO: 1153117 - RNA, 20 nt, Human
ggcagccugggaggcugagu

SEQ ID NO: 1153118 - RNA, 22 nt, Human
ggcaggagacguagucugcaaa

SEQ ID NO: 1153119 - RNA, 19 nt, Human
ggcauggagagggauggcu

SEQ ID NO: 1153120 - RNA, 25 nt, Human
ggcauggagagggauggcugugguc

SEQ ID NO: 1153121 - RNA, 19 nt, Human
ggcuguggucguggaggag

SEQ ID NO: 1153122 - RNA, 21 nt, Human
gggcaaggggaccguggcagc

SEQ ID NO: 1153123 - RNA, 24 nt, Human
gguuucaccauguuagccaggaug

SEQ ID NO: 1153124 - RNA, 24 nt, Human
gucucgcucugucgcccaggcugg

SEQ ID NO: 1153125 - RNA, 21 nt, Human
gugguauaggccugaggcugu

SEQ ID NO: 1153126 - RNA, 22 nt, Human
uacaggugcacaccaccacgcc

SEQ ID NO: 1153127 - RNA, 23 nt, Human
uacugauccgauccuggcaggag

SEQ ID NO: 1153128 - RNA, 21 nt, Human
uagagacaggguuucaccaug

SEQ ID NO: 1153129 - RNA, 22 nt, Human
uagagacaggguuucaccaugu

SEQ ID NO: 1153130 - RNA, 20 nt, Human
uauucuguuccauuggucua

SEQ ID NO: 1153131 - RNA, 24 nt, Human
ucaccauguuagccaggauggucu

SEQ ID NO: 1153132 - RNA, 18 nt, Human
ucacuacaagcucugccu

SEQ ID NO: 1153133 - RNA, 24 nt, Human
ucacuacaagcucugccuccuggg

SEQ ID NO: 1153134 - RNA, 19 nt, Human
ucagacagagacagagaaa

SEQ ID NO: 1153135 - RNA, 24 nt, Human
ucaguagagacaggguuucaccau

SEQ ID NO: 1153136 - RNA, 25 nt, Human
ucaugccauucuccugccccagccu

SEQ ID NO: 1153137 - RNA, 18 nt, Human
uccacccuuccagucuuc

SEQ ID NO: 1153138 - RNA, 24 nt, Human
uccugaguagcugggacuacaggu

SEQ ID NO: 1153139 - RNA, 23 nt, Human
uccugccucuagggagugggagc

SEQ ID NO: 1153140 - RNA, 24 nt, Human
uccuggguucaugccauucuccug

SEQ ID NO: 1153141 - RNA, 24 nt, Human
ucgcccaggcuggagugcaguggc

SEQ ID NO: 1153142 - RNA, 24 nt, Human
ucgcucugucgcccaggcuggagu

SEQ ID NO: 1153143 - RNA, 24 nt, Human
ucuccugccccagccuccugagua

SEQ ID NO: 1153144 - RNA, 19 nt, Human
ucucgcucugucgcccagg

SEQ ID NO: 1153145 - RNA, 23 nt, Human
ucucgcucugucgcccaggcugg

SEQ ID NO: 1153146 - RNA, 24 nt, Human
ucucgcucugucgcccaggcugga

SEQ ID NO: 1153147 - RNA, 26 nt, Human
ucucgcucugucgcccaggcuggagu

SEQ ID NO: 1153148 - RNA, 24 nt, Human
ucugucgcccaggcuggagugcag

SEQ ID NO: 1153149 - RNA, 25 nt, Human
ucuuagucaggacauggccgggguc

SEQ ID NO: 1153150 - RNA, 24 nt, Human
ugccccagccuccugaguagcugg

SEQ ID NO: 1153151 - RNA, 20 nt, Human
ugcccugggucccuggggcu

SEQ ID NO: 1153152 - RNA, 25 nt, Human
ugcccugggucccuggggcuacagc

SEQ ID NO: 1153153 - RNA, 22 nt, Human
ugcccuguagggcugugagagu

SEQ ID NO: 1153154 - RNA, 19 nt, Human
ugccuccuggguucaugcc

SEQ ID NO: 1153155 - RNA, 24 nt, Human
uggagugcaguggcgcgaucuagg

SEQ ID NO: 1153156 - RNA, 26 nt, Human
uggcagcagagcacacagggcaugga

SEQ ID NO: 1153157 - RNA, 19 nt, Human
uggcaggaaccaccaggca

SEQ ID NO: 1153158 - RNA, 22 nt, Human
uggcaggagacguagucugcaa

SEQ ID NO: 1153159 - RNA, 18 nt, Human
uggcccagccaggcccug

SEQ ID NO: 1153160 - RNA, 23 nt, Human
uggcccagccaggcccugggagc

SEQ ID NO: 1153161 - RNA, 24 nt, Human
uggcgcgaucuaggcucacuacaa

SEQ ID NO: 1153162 - RNA, 25 nt, Human
uggcuccagcugcccuguagggcug

SEQ ID NO: 1153163 - RNA, 18 nt, Human
uggcuguaaguauuuggc

SEQ ID NO: 1153164 - RNA, 18 nt, Human
uggcuguggucguggagg

SEQ ID NO: 1153165 - RNA, 22 nt, Human
uggcuugccaauuaucccagca

SEQ ID NO: 1153166 - RNA, 19 nt, Human
uggcuuuauuucuggguuc

SEQ ID NO: 1153167 - RNA, 21 nt, Human
uggcuuuauuucuggguucuc

SEQ ID NO: 1153168 - RNA, 24 nt, Human
ugggacuacaggugcacaccacca

SEQ ID NO: 1153169 - RNA, 23 nt, Human
uguccccauuggugaaccagacc

SEQ ID NO: 1153170 - RNA, 24 nt, Human
uguggucguggaggaggaaacaga

SEQ ID NO: 1153171 - RNA, 19 nt, Human
uuacugauccgauccuggc

SEQ ID NO: 1153172 - RNA, 26 nt, Human
uucaugccauucuccugccccagccu

SEQ ID NO: 1153173 - RNA, 21 nt, Human
uucugagucaguuucuucauc

SEQ ID NO: 1153174 - RNA, 25 nt, Human
uucuggguucucuauucccuaaggg

SEQ ID NO: 1153175 - RNA, 23 nt, Human
uugcucucugaaccccuggccug

SEQ ID NO: 1153176 - RNA, 21 nt, Human
uuggcuuuauuucuggguucu

SEQ ID NO: 1153177 - RNA, 19 nt, Human
uuucaccauguuagccagg

SEQ ID NO: 1153178 - RNA, 20 nt, Human
uuucaccauguuagccagga

SEQ ID NO: 1153179 - RNA, 23 nt, Human
uuuuauaccaguaccaugcugcu

SEQ ID NO: 1153180 - RNA, 24 nt, Human
uuuucaguagagacaggguuucac

SEQ ID NO: 1153181 - RNA, 21 nt, Human
aagggcacagcagcugcaggc

SEQ ID NO: 1153182 - RNA, 21 nt, Human
acccugagcagcugcucaggc

SEQ ID NO: 1153183 - RNA, 21 nt, Human
agcagcugcaggccauuggca

SEQ ID NO: 1153184 - RNA, 18 nt, Human
agccaggggacccaggca

SEQ ID NO: 1153185 - RNA, 18 nt, Human
cagccaggggacccaggc

SEQ ID NO: 1153186 - RNA, 20 nt, Human
cagccaggggacccaggcag

SEQ ID NO: 1153187 - RNA, 20 nt, Human
cccgggccagggaggcuccc

SEQ ID NO: 1153188 - RNA, 24 nt, Human
cgagguggggaggaggagagacac

SEQ ID NO: 1153189 - RNA, 19 nt, Human
cgggugccgaacgucuggc

SEQ ID NO: 1153190 - RNA, 26 nt, Human
cuccagagggcccagguacugguggu

SEQ ID NO: 1153191 - RNA, 21 nt, Human
cugcaucucccuggccagcca

SEQ ID NO: 1153192 - RNA, 19 nt, Human
cugggggugugggucgacc

SEQ ID NO: 1153193 - RNA, 20 nt, Human
gaacgucuggcccgggccag

SEQ ID NO: 1153194 - RNA, 23 nt, Human
gaagauggugaguggaaagcagg

SEQ ID NO: 1153195 - RNA, 18 nt, Human
gacccugagcagcugcuc

SEQ ID NO: 1153196 - RNA, 21 nt, Human
gaccucugagagcugcaucuc

SEQ ID NO: 1153197 - RNA, 23 nt, Human
gagaccccagaaggagccaaggg

SEQ ID NO: 1153198 - RNA, 19 nt, Human
gagccaguccacggagcca

SEQ ID NO: 1153199 - RNA, 26 nt, Human
gagccaguccacggagccaaagcugg

SEQ ID NO: 1153200 - RNA, 18 nt, Human
gagcugcaucucccuggc

SEQ ID NO: 1153201 - RNA, 24 nt, Human
ggagacgucggcaggccugggggu

SEQ ID NO: 1153202 - RNA, 19 nt, Human
ggcagccaggggacccagg

SEQ ID NO: 1153203 - RNA, 23 nt, Human
ggccagaagauggugaguggaaa

SEQ ID NO: 1153204 - RNA, 21 nt, Human
ggugaguggaaagcagggggc

SEQ ID NO: 1153205 - RNA, 21 nt, Human
ucaacccagccacaguccucu

SEQ ID NO: 1153206 - RNA, 23 nt, Human
uccacggagccaaagcuggaggg

SEQ ID NO: 1153207 - RNA, 24 nt, Human
ucccgggugccgaacgucuggccc

SEQ ID NO: 1153208 - RNA, 21 nt, Human
ucccuggccagccaauuccgc

SEQ ID NO: 1153209 - RNA, 21 nt, Human
ucgacccugagcagcugcuca

SEQ ID NO: 1153210 - RNA, 18 nt, Human
ugcccaagggcacagcag

SEQ ID NO: 1153211 - RNA, 19 nt, Human
ugggaguccugcauuugcc

SEQ ID NO: 1153212 - RNA, 19 nt, Human
uggugaguggaaagcaggg

SEQ ID NO: 1153213 - RNA, 19 nt, Human
aagaagggaggaggagagg

SEQ ID NO: 1153214 - RNA, 25 nt, Human
aagcuucagagugcuggcuuccccc

SEQ ID NO: 1153215 - RNA, 26 nt, Human
agaagggaggaggagagggaacaagc

SEQ ID NO: 1153216 - RNA, 27 nt, Human
auggugauaaguuugaaaaacagauac

SEQ ID NO: 1153217 - RNA, 19 nt, Human
cgggaagaagggaggagga

SEQ ID NO: 1153218 - RNA, 19 nt, Human
cugacauggugauaaguuu

SEQ ID NO: 1153219 - RNA, 21 nt, Human
gaacaagcuucagagugcugg

SEQ ID NO: 1153220 - RNA, 23 nt, Human
gggaagaagggaggaggagaggg

SEQ ID NO: 1153221 - RNA, 22 nt, Human
ucagugggaagagacucagaaa

SEQ ID NO: 1153222 - RNA, 19 nt, Human
ucccgggaagaagggagga

SEQ ID NO: 1153223 - RNA, 23 nt, Human
uccgcagauagccagugugcuuu

SEQ ID NO: 1153224 - RNA, 18 nt, Human
ugaaaaacagauacagcc

SEQ ID NO: 1153225 - RNA, 24 nt, Human
ugaaaaacagauacagcccugaaa

SEQ ID NO: 1153226 - RNA, 19 nt, Human
uggcuuccaaaguccuucc

SEQ ID NO: 1153227 - RNA, 23 nt, Human
ugggaagagacucagaaauagug

SEQ ID NO: 1153228 - RNA, 21 nt, Human
ugugcuuccagcugcucagug

SEQ ID NO: 1153229 - RNA, 21 nt, Human
aaaaagcaggcauguucuggu

SEQ ID NO: 1153230 - RNA, 25 nt, Human
aaaaguaagcaaaucucaugggaaa

SEQ ID NO: 1153231 - RNA, 23 nt, Human
aaacacaaaaacuggcagcugga

SEQ ID NO: 1153232 - RNA, 23 nt, Human
aaccauuccaaaucugcuuccaa

SEQ ID NO: 1153233 - RNA, 21 nt, Human
aacuacauuggccaagggcac

SEQ ID NO: 1153234 - RNA, 22 nt, Human
aagaaaaagagguuuaauugga

SEQ ID NO: 1153235 - RNA, 19 nt, Human
aagcugcaguagcugggaa

SEQ ID NO: 1153236 - RNA, 20 nt, Human
aagcugcaguagcugggaac

SEQ ID NO: 1153237 - RNA, 20 nt, Human
aaugcacaaaggcuggucag

SEQ ID NO: 1153238 - RNA, 23 nt, Human
acaaagagaggacacaacagcug

SEQ ID NO: 1153239 - RNA, 18 nt, Human
acagcagcaggaggggag

SEQ ID NO: 1153240 - RNA, 21 nt, Human
accauuccaaaucugcuucca

SEQ ID NO: 1153241 - RNA, 20 nt, Human
acccagcauuuucucuaaau

SEQ ID NO: 1153242 - RNA, 18 nt, Human
acugggaagaaaaagagg

SEQ ID NO: 1153243 - RNA, 20 nt, Human
agagaggacacaacagcuga

SEQ ID NO: 1153244 - RNA, 26 nt, Human
agcaagccaggccccuaaauaauucu

SEQ ID NO: 1153245 - RNA, 23 nt, Human
agcaggaggggagagggcagggu

SEQ ID NO: 1153246 - RNA, 23 nt, Human
aggaaaaacacaaaaacuggcag

SEQ ID NO: 1153247 - RNA, 18 nt, Human
aggcaaagagagugaccc

SEQ ID NO: 1153248 - RNA, 23 nt, Human
aggccccuaaauaauucuggccc

SEQ ID NO: 1153249 - RNA, 19 nt, Human
agguggccggugaaugugg

SEQ ID NO: 1153250 - RNA, 26 nt, Human
auaauacacuauuuucuuugucuuuc

SEQ ID NO: 1153251 - RNA, 20 nt, Human
aucccuccuacccucuucca

SEQ ID NO: 1153252 - RNA, 19 nt, Human
augaaaggcacuucuuaca

SEQ ID NO: 1153253 - RNA, 20 nt, Human
caaaaguaagcaaaucucau

SEQ ID NO: 1153254 - RNA, 20 nt, Human
cacuccuuucucaaugcaaa

SEQ ID NO: 1153255 - RNA, 18 nt, Human
cagcagcaggaggggaga

SEQ ID NO: 1153256 - RNA, 20 nt, Human
cagcagcaggaggggagagg

SEQ ID NO: 1153257 - RNA, 18 nt, Human
cagcucacuccuuucuca

SEQ ID NO: 1153258 - RNA, 24 nt, Human
cagcugaugccuggaggacccuga

SEQ ID NO: 1153259 - RNA, 19 nt, Human
cagcugcagucugagacug

SEQ ID NO: 1153260 - RNA, 19 nt, Human
cagcuuacuugccagggaa

SEQ ID NO: 1153261 - RNA, 18 nt, Human
caggacagcucugucucu

SEQ ID NO: 1153262 - RNA, 20 nt, Human
caggccccuaaauaauucug

SEQ ID NO: 1153263 - RNA, 20 nt, Human
cagggaacacugugacucau

SEQ ID NO: 1153264 - RNA, 20 nt, Human
ccacuuaucaauauggguuc

SEQ ID NO: 1153265 - RNA, 27 nt, Human
ccaguaguuucccaccaaaucccaagg

SEQ ID NO: 1153266 - RNA, 21 nt, Human
cccaagcugcaguagcuggga

SEQ ID NO: 1153267 - RNA, 23 nt, Human
cccaguaguuucccaccaaaucc

SEQ ID NO: 1153268 - RNA, 20 nt, Human
cccuccuacccucuuccacc

SEQ ID NO: 1153269 - RNA, 19 nt, Human
ccuggacacugcuuuggga

SEQ ID NO: 1153270 - RNA, 18 nt, Human
cucacagggaaagaacaa

SEQ ID NO: 1153271 - RNA, 18 nt, Human
cucagaacacugccugac

SEQ ID NO: 1153272 - RNA, 26 nt, Human
cucagaaggacaaagcauucucagga

SEQ ID NO: 1153273 - RNA, 22 nt, Human
cucgcaguccccaagagcagcc

SEQ ID NO: 1153274 - RNA, 18 nt, Human
cucucugcuucucgcagu

SEQ ID NO: 1153275 - RNA, 25 nt, Human
cugcuaauggcaccagcaucccucc

SEQ ID NO: 1153276 - RNA, 20 nt, Human
gaagaugcuguuuaagggcc

SEQ ID NO: 1153277 - RNA, 22 nt, Human
gacccagcauuuucucuaaaua

SEQ ID NO: 1153278 - RNA, 18 nt, Human
gacugggaagaaaaagag

SEQ ID NO: 1153279 - RNA, 21 nt, Human
gaggagguggccggugaaugu

SEQ ID NO: 1153280 - RNA, 22 nt, Human
gcacuggguggucuguccuguc

SEQ ID NO: 1153281 - RNA, 22 nt, Human
gcaggccugcaggccacggggc

SEQ ID NO: 1153282 - RNA, 19 nt, Human
gcuaaaaaacaauaaccaa

SEQ ID NO: 1153283 - RNA, 21 nt, Human
gcugcaguagcugggaacucu

SEQ ID NO: 1153284 - RNA, 22 nt, Human
ggaaaggggcaaggaaaaacac

SEQ ID NO: 1153285 - RNA, 21 nt, Human
ggagaaaucaagacagauugc

SEQ ID NO: 1153286 - RNA, 21 nt, Human
ggcauaugggaagcuauaacc

SEQ ID NO: 1153287 - RNA, 20 nt, Human
gucccuuugcugccuccccu

SEQ ID NO: 1153288 - RNA, 22 nt, Human
guugccacaucagccccugacc

SEQ ID NO: 1153289 - RNA, 25 nt, Human
uaagggccucugggagucgagauuu

SEQ ID NO: 1153290 - RNA, 20 nt, Human
uacaaagagaggacacaaca

SEQ ID NO: 1153291 - RNA, 22 nt, Human
uacaaagagaggacacaacagc

SEQ ID NO: 1153292 - RNA, 19 nt, Human
uacaguauacaaaaguaag

SEQ ID NO: 1153293 - RNA, 19 nt, Human
uagcccucucugcuaaugg

SEQ ID NO: 1153294 - RNA, 22 nt, Human
uauacaaaaguaagcaaaucuc

SEQ ID NO: 1153295 - RNA, 21 nt, Human
uaucauuuccuucaucuacug

SEQ ID NO: 1153296 - RNA, 22 nt, Human
uauccuggacacugcuuuggga

SEQ ID NO: 1153297 - RNA, 25 nt, Human
uauggcuaaaaaacaauaaccaagg

SEQ ID NO: 1153298 - RNA, 24 nt, Human
uauuuucuuugucuuucucguagu

SEQ ID NO: 1153299 - RNA, 18 nt, Human
ucaagacagauugcagcc

SEQ ID NO: 1153300 - RNA, 23 nt, Human
ucacugauuauagaccuaagacc

SEQ ID NO: 1153301 - RNA, 20 nt, Human
ucagccccugaccacucaca

SEQ ID NO: 1153302 - RNA, 22 nt, Human
ucauauaugugacucuacagcu

SEQ ID NO: 1153303 - RNA, 19 nt, Human
uccacauggcuggggaggc

SEQ ID NO: 1153304 - RNA, 25 nt, Human
uccccuaacgugguuucuuggucac

SEQ ID NO: 1153305 - RNA, 21 nt, Human
ucccuuugcugccuccccugc

SEQ ID NO: 1153306 - RNA, 23 nt, Human
ucccuuugcugccuccccugcag

SEQ ID NO: 1153307 - RNA, 27 nt, Human
uccuggacacugcuuugggaaaacucc

SEQ ID NO: 1153308 - RNA, 18 nt, Human
ucuaaggcagcugagacc

SEQ ID NO: 1153309 - RNA, 23 nt, Human
ucucaggacagcucugucucuug

SEQ ID NO: 1153310 - RNA, 22 nt, Human
ugaaaaaucaggguaucuguug

SEQ ID NO: 1153311 - RNA, 24 nt, Human
ugaaaauggaaggaaucaugguau

SEQ ID NO: 1153312 - RNA, 25 nt, Human
ugacacauaugcuauucacuucaua

SEQ ID NO: 1153313 - RNA, 19 nt, Human
ugaccacucacaggugacg

SEQ ID NO: 1153314 - RNA, 19 nt, Human
ugacgcaguggccugucuc

SEQ ID NO: 1153315 - RNA, 21 nt, Human
ugauguggauggagauuugca

SEQ ID NO: 1153316 - RNA, 19 nt, Human
ugauuaggauaaaugcaca

SEQ ID NO: 1153317 - RNA, 18 nt, Human
ugcacaaaggcuggucag

SEQ ID NO: 1153318 - RNA, 21 nt, Human
ugcuguucaaggauggucugg

SEQ ID NO: 1153319 - RNA, 22 nt, Human
uggaaaauacaguauacaaaag

SEQ ID NO: 1153320 - RNA, 19 nt, Human
uggaaaggggcaaggaaaa

SEQ ID NO: 1153321 - RNA, 23 nt, Human
uggacacugcuuugggaaaacuc

SEQ ID NO: 1153322 - RNA, 22 nt, Human
uggaggacccugaacaggaucu

SEQ ID NO: 1153323 - RNA, 19 nt, Human
uggcaccagcaucccuccu

SEQ ID NO: 1153324 - RNA, 26 nt, Human
uggcaggagaugaaaggcacuucuua

SEQ ID NO: 1153325 - RNA, 22 nt, Human
uggcauaugggaagcuauaacc

SEQ ID NO: 1153326 - RNA, 22 nt, Human
uggcuaaaaaacaauaaccaag

SEQ ID NO: 1153327 - RNA, 23 nt, Human
uggucacguaagaugaaaaauca

SEQ ID NO: 1153328 - RNA, 21 nt, Human
ugucaaggagaagcuuauccc

SEQ ID NO: 1153329 - RNA, 20 nt, Human
uuccaguuucuuaacuacau

SEQ ID NO: 1153330 - RNA, 21 nt, Human
uucucaaugcaaacagcuuac

SEQ ID NO: 1153331 - RNA, 24 nt, Human
uucucagugcagucaaagaaaguu

SEQ ID NO: 1153332 - RNA, 18 nt, Human
uugaaaguccuuuagucu

SEQ ID NO: 1153333 - RNA, 18 nt, Human
uugucuuucucguagucc

SEQ ID NO: 1153334 - RNA, 21 nt, Human
caaaagaagcuguccaaaaug

SEQ ID NO: 1153335 - RNA, 24 nt, Human
caaaagcacccuggccagagcggu

SEQ ID NO: 1153336 - RNA, 23 nt, Human
ccuggccagagcggugaguccca

SEQ ID NO: 1153337 - RNA, 26 nt, Human
ucacugccuguauaaucaggucuuua

SEQ ID NO: 1153338 - RNA, 21 nt, Human
uccaaaagcacccuggccaga

SEQ ID NO: 1153339 - RNA, 25 nt, Human
uccaaaaugauuugaccuuuaugga

SEQ ID NO: 1153340 - RNA, 20 nt, Human
ugccuguauaaucaggucuu

SEQ ID NO: 1153341 - RNA, 19 nt, Human
aaagagaguccucagguug

SEQ ID NO: 1153342 - RNA, 18 nt, Human
aaagccucaaaguuuuac

SEQ ID NO: 1153343 - RNA, 21 nt, Human
acacgacucucuggugucccc

SEQ ID NO: 1153344 - RNA, 18 nt, Human
agacaaagaaucucucag

SEQ ID NO: 1153345 - RNA, 25 nt, Human
agaguccucagguuguucuucuugg

SEQ ID NO: 1153346 - RNA, 19 nt, Human
aggaacaaggagcucacaa

SEQ ID NO: 1153347 - RNA, 22 nt, Human
caacacaaggaccaagagucaa

SEQ ID NO: 1153348 - RNA, 19 nt, Human
caagagucaaaugcugaag

SEQ ID NO: 1153349 - RNA, 19 nt, Human
cacaacacaaggaccaaga

SEQ ID NO: 1153350 - RNA, 24 nt, Human
cacggucccacaagccucucucuu

SEQ ID NO: 1153351 - RNA, 19 nt, Human
cagaaagagaguccucagg

SEQ ID NO: 1153352 - RNA, 28 nt, Human
cagagggucuuuuucccguagaugaaau

SEQ ID NO: 1153353 - RNA, 27 nt, Human
cagcauaaaagcagcucucuaucucuu

SEQ ID NO: 1153354 - RNA, 20 nt, Human
ccccaugagagaggggcaaa

SEQ ID NO: 1153355 - RNA, 20 nt, Human
ccgaugcugagacuccaagu

SEQ ID NO: 1153356 - RNA, 21 nt, Human
ccucagguuguucuucuuggc

SEQ ID NO: 1153357 - RNA, 20 nt, Human
ccugagcaucugcugaugug

SEQ ID NO: 1153358 - RNA, 22 nt, Human
cuccucuggauuuacuaaagga

SEQ ID NO: 1153359 - RNA, 23 nt, Human
cugcuggggccgcggcaacaacg

SEQ ID NO: 1153360 - RNA, 26 nt, Human
gagaguccucagguuguucuucuugg

SEQ ID NO: 1153361 - RNA, 19 nt, Human
gagcucacaacacaaggac

SEQ ID NO: 1153362 - RNA, 18 nt, Human
gggccgcggcaacaacgg

SEQ ID NO: 1153363 - RNA, 19 nt, Human
ggucccggcucuccugcug

SEQ ID NO: 1153364 - RNA, 21 nt, Human
ggugaccccagccagcuuugc

SEQ ID NO: 1153365 - RNA, 26 nt, Human
uacuaaaggaguucaauuaccuccag

SEQ ID NO: 1153366 - RNA, 21 nt, Human
uagauacaaaagauguacuga

SEQ ID NO: 1153367 - RNA, 19 nt, Human
uaggucccggcucuccugc

SEQ ID NO: 1153368 - RNA, 23 nt, Human
uaucauagauacaaaagauguac

SEQ ID NO: 1153369 - RNA, 19 nt, Human
uauggugaccccagccagc

SEQ ID NO: 1153370 - RNA, 19 nt, Human
ucaucgagaacaugucuug

SEQ ID NO: 1153371 - RNA, 21 nt, Human
uccaaguauauuccucacacc

SEQ ID NO: 1153372 - RNA, 21 nt, Human
ucccguagaugaaaucucucu

SEQ ID NO: 1153373 - RNA, 22 nt, Human
ucccguagaugaaaucucucuu

SEQ ID NO: 1153374 - RNA, 24 nt, Human
uccucuggauuuacuaaaggaguu

SEQ ID NO: 1153375 - RNA, 23 nt, Human
ucucagauuucuccucuggauuu

SEQ ID NO: 1153376 - RNA, 23 nt, Human
ucucuaucucuuugacaggcaaa

SEQ ID NO: 1153377 - RNA, 19 nt, Human
ugaucucagauuucuccuc

SEQ ID NO: 1153378 - RNA, 26 nt, Human
ugcugagacuccaaguauauuccuca

SEQ ID NO: 1153379 - RNA, 21 nt, Human
uucauugaugaauuuuuuuuu

SEQ ID NO: 1153380 - RNA, 26 nt, Human
uugggauagagauuggagauucccua

SEQ ID NO: 1153381 - RNA, 21 nt, Human
uuucagagggucuuuuucccg

SEQ ID NO: 1153382 - RNA, 19 nt, Human
aaaaaaaaaaaaaaagcag

SEQ ID NO: 1153383 - RNA, 24 nt, Human
acuaaaaaaaaaaaaaaagcagac

SEQ ID NO: 1153384 - RNA, 24 nt, Human
cuaaaaaaaaaaaaaaagcagacu

SEQ ID NO: 1153385 - RNA, 22 nt, Human
gaacuaaaaaaaaaaaaaaagc

SEQ ID NO: 1153386 - RNA, 26 nt, Human
uauuuuuauugccuuuuauuuucaac

SEQ ID NO: 1153387 - RNA, 21 nt, Human
ugaacuaaaaaaaaaaaaaaa

SEQ ID NO: 1153388 - RNA, 24 nt, Human
ugaacuaaaaaaaaaaaaaaagca

SEQ ID NO: 1153389 - RNA, 24 nt, Human
uugaacuaaaaaaaaaaaaaaagc

SEQ ID NO: 1153390 - RNA, 21 nt, Human
aagacccugacccugcucugg

SEQ ID NO: 1153391 - RNA, 19 nt, Human
agagcuggggggaucugga

SEQ ID NO: 1153392 - RNA, 19 nt, Human
agcaagaagacccugaccc

SEQ ID NO: 1153393 - RNA, 21 nt, Human
agccacaggcccagcaggccc

SEQ ID NO: 1153394 - RNA, 23 nt, Human
aggagguaagccagccacuccag

SEQ ID NO: 1153395 - RNA, 19 nt, Human
agugguagauggugaagau

SEQ ID NO: 1153396 - RNA, 18 nt, Human
caccccugcuccagccac

SEQ ID NO: 1153397 - RNA, 19 nt, Human
caccccugcuccagccacc

SEQ ID NO: 1153398 - RNA, 24 nt, Human
caccccugcuccagccaccagggg

SEQ ID NO: 1153399 - RNA, 21 nt, Human
cacuccagccccaccgagcac

SEQ ID NO: 1153400 - RNA, 19 nt, Human
cagaaaaagaggaugaagg

SEQ ID NO: 1153401 - RNA, 21 nt, Human
cagcaggugcaccccugcucc

SEQ ID NO: 1153402 - RNA, 25 nt, Human
cagccacaggcccagcaggcccagg

SEQ ID NO: 1153403 - RNA, 19 nt, Human
cagccaccaggggcacagg

SEQ ID NO: 1153404 - RNA, 24 nt, Human
caggcccagcaggcccaggaguga

SEQ ID NO: 1153405 - RNA, 24 nt, Human
caggcccaggagugagguggcugg

SEQ ID NO: 1153406 - RNA, 19 nt, Human
cagggagcugcccacaacc

SEQ ID NO: 1153407 - RNA, 23 nt, Human
ccacaacccaaagggcggcugcc

SEQ ID NO: 1153408 - RNA, 21 nt, Human
ccacauagaggauccagcugu

SEQ ID NO: 1153409 - RNA, 23 nt, Human
ccacauagaggauccagcugugu

SEQ ID NO: 1153410 - RNA, 18 nt, Human
cgcgcucacacgcagccc

SEQ ID NO: 1153411 - RNA, 26 nt, Human
cggcggacccugggaauaggaggugc

SEQ ID NO: 1153412 - RNA, 22 nt, Human
cucggcggacccugggaauagg

SEQ ID NO: 1153413 - RNA, 18 nt, Human
gaagauggccacagccug

SEQ ID NO: 1153414 - RNA, 25 nt, Human
gaaggugagcagcaggugcaccccc

SEQ ID NO: 1153415 - RNA, 18 nt, Human
gacccugcucuggggcug

SEQ ID NO: 1153416 - RNA, 21 nt, Human
gagagcuggggggaucuggag

SEQ ID NO: 1153417 - RNA, 23 nt, Human
gagcggggccagguagcaagaag

SEQ ID NO: 1153418 - RNA, 21 nt, Human
gcacagggcguggcagccaca

SEQ ID NO: 1153419 - RNA, 23 nt, Human
gcucuggggcuggggcgcgugcu

SEQ ID NO: 1153420 - RNA, 20 nt, Human
ggcacaggggcccagaaaaa

SEQ ID NO: 1153421 - RNA, 24 nt, Human
ggggcuggggcgcgugcuaggggc

SEQ ID NO: 1153422 - RNA, 23 nt, Human
gguccgcggccgagagcuggggg

SEQ ID NO: 1153423 - RNA, 21 nt, Human
ggugaagauggccacagccug

SEQ ID NO: 1153424 - RNA, 18 nt, Human
guggcucucggcggaccc

SEQ ID NO: 1153425 - RNA, 21 nt, Human
uaagccagccacuccagcccc

SEQ ID NO: 1153426 - RNA, 18 nt, Human
uccagccccaccgagcac

SEQ ID NO: 1153427 - RNA, 19 nt, Human
ugaagauggccacagccug

SEQ ID NO: 1153428 - RNA, 18 nt, Human
ugagcagcaggugcaccc

SEQ ID NO: 1153429 - RNA, 24 nt, Human
ugaguccagucuuguucagggagc

SEQ ID NO: 1153430 - RNA, 19 nt, Human
ugcaggacccgaggcacag

SEQ ID NO: 1153431 - RNA, 20 nt, Human
uggcagccacaggcccagca

SEQ ID NO: 1153432 - RNA, 22 nt, Human
uuuucuguaaaaaaucguggcu

SEQ ID NO: 1153433 - RNA, 20 nt, Human
acaaacacaggcugugggcu

SEQ ID NO: 1153434 - RNA, 19 nt, Human
acacaggcugugggcugga

SEQ ID NO: 1153435 - RNA, 19 nt, Human
uuacaaacacaggcugugg

SEQ ID NO: 1153436 - RNA, 19 nt, Human
aacagugaagguuuuucug

SEQ ID NO: 1153437 - RNA, 23 nt, Human
agaaauugacagaugauagauaa

SEQ ID NO: 1153438 - RNA, 25 nt, Human
cauuuuauaucuguaccuuauguaa

SEQ ID NO: 1153439 - RNA, 24 nt, Human
cccaugaagagaaaacuuccugaa

SEQ ID NO: 1153440 - RNA, 25 nt, Human
gcuuuuucugcauuuuauaucugua

SEQ ID NO: 1153441 - RNA, 23 nt, Human
uauaaaauaaaauaaaaggcaga

SEQ ID NO: 1153442 - RNA, 25 nt, Human
uaucccaugaagagaaaacuuccug

SEQ ID NO: 1153443 - RNA, 18 nt, Human
ugaugcuuuuucugcauu

SEQ ID NO: 1153444 - RNA, 24 nt, Human
uuauguaacagugaagguuuuucu

SEQ ID NO: 1153445 - RNA, 27 nt, Human
uucaauauuuauuuuauuaagaauaca

SEQ ID NO: 1153446 - RNA, 23 nt, Human
aacauaaguaggagggcaguuug

SEQ ID NO: 1153447 - RNA, 23 nt, Human
caacggggucugugucacaggcu

SEQ ID NO: 1153448 - RNA, 18 nt, Human
gagcaacggggucugugu

SEQ ID NO: 1153449 - RNA, 23 nt, Human
gagccucagcuuccucuccuggu

SEQ ID NO: 1153450 - RNA, 20 nt, Human
gccauuuucagcuucuccca

SEQ ID NO: 1153451 - RNA, 19 nt, Human
uaggagggcaguuugcuuc

SEQ ID NO: 1153452 - RNA, 19 nt, Human
uaggaugggaaagucuuca

SEQ ID NO: 1153453 - RNA, 23 nt, Human
uaugugagcaacggggucugugu

SEQ ID NO: 1153454 - RNA, 19 nt, Human
ucacaggcucaccaggcac

SEQ ID NO: 1153455 - RNA, 19 nt, Human
ucaccaggcacagggcagc

SEQ ID NO: 1153456 - RNA, 22 nt, Human
ucugccauuuucagcuucuccc

SEQ ID NO: 1153457 - RNA, 18 nt, Human
ugcuucucugagccucag

SEQ ID NO: 1153458 - RNA, 25 nt, Human
ugucacaggcucaccaggcacaggg

SEQ ID NO: 1153459 - RNA, 23 nt, Human
ugugagcaacggggucuguguca

SEQ ID NO: 1153460 - RNA, 21 nt, Human
uugcaaccugccuaccaccua

SEQ ID NO: 1153461 - RNA, 22 nt, Human
uuuucagcuucucccaccuggg

SEQ ID NO: 1153462 - RNA, 19 nt, Human
aagcgcugcucaagaguga

SEQ ID NO: 1153463 - RNA, 23 nt, Human
aucuggcacagggggaccuccag

SEQ ID NO: 1153464 - RNA, 19 nt, Human
augguggcuggacucuucu

SEQ ID NO: 1153465 - RNA, 23 nt, Human
cagagggccuuucuuuagggcuu

SEQ ID NO: 1153466 - RNA, 19 nt, Human
cagcauucccagagcacac

SEQ ID NO: 1153467 - RNA, 21 nt, Human
cccuggagaguggggaccugg

SEQ ID NO: 1153468 - RNA, 22 nt, Human
ccuggagaguggggaccuggga

SEQ ID NO: 1153469 - RNA, 20 nt, Human
cucuugggaugugggcucag

SEQ ID NO: 1153470 - RNA, 23 nt, Human
cugguggugguugugguacuccu

SEQ ID NO: 1153471 - RNA, 21 nt, Human
cugguugguagccacuuucuu

SEQ ID NO: 1153472 - RNA, 18 nt, Human
cuguguaugggcucccca

SEQ ID NO: 1153473 - RNA, 22 nt, Human
gaagggaccuuaccaaccagag

SEQ ID NO: 1153474 - RNA, 19 nt, Human
gaggcuguccaggccugag

SEQ ID NO: 1153475 - RNA, 21 nt, Human
gcagggucugggggacauggc

SEQ ID NO: 1153476 - RNA, 18 nt, Human
ggagaguggggaccuggg

SEQ ID NO: 1153477 - RNA, 23 nt, Human
gggcuuugggacccugguuggua

SEQ ID NO: 1153478 - RNA, 20 nt, Human
ggggaccugggacagucagg

SEQ ID NO: 1153479 - RNA, 19 nt, Human
ggugguugugguacuccug

SEQ ID NO: 1153480 - RNA, 21 nt, Human
guagcacugguggugguugug

SEQ ID NO: 1153481 - RNA, 21 nt, Human
guagccacuuucuugaugagc

SEQ ID NO: 1153482 - RNA, 18 nt, Human
uaccaaccagaguccagc

SEQ ID NO: 1153483 - RNA, 18 nt, Human
uacuccuggauacguccu

SEQ ID NO: 1153484 - RNA, 21 nt, Human
uccagcauucccagagcacac

SEQ ID NO: 1153485 - RNA, 22 nt, Human
uccccagcucucguuccuccac

SEQ ID NO: 1153486 - RNA, 22 nt, Human
uccccgaugggcucacagaacc

SEQ ID NO: 1153487 - RNA, 21 nt, Human
ucuggcacagggggaccucca

SEQ ID NO: 1153488 - RNA, 24 nt, Human
ugagcagagggccuuucuuuaggg

SEQ ID NO: 1153489 - RNA, 24 nt, Human
ugagguugggcuuugggacccugg

SEQ ID NO: 1153490 - RNA, 20 nt, Human
ugccuuuaggcucugggccu

SEQ ID NO: 1153491 - RNA, 18 nt, Human
ugcuggaagggaccuuac

SEQ ID NO: 1153492 - RNA, 19 nt, Human
uggagaguggggaccuggg

SEQ ID NO: 1153493 - RNA, 19 nt, Human
uggcuggacucuucuucuc

SEQ ID NO: 1153494 - RNA, 23 nt, Human
ugggacccugguugguagccacu

SEQ ID NO: 1153495 - RNA, 19 nt, Human
ugggaugugggcucagugg

SEQ ID NO: 1153496 - RNA, 18 nt, Human
uggggaccugggacaguc

SEQ ID NO: 1153497 - RNA, 19 nt, Human
uggggaccugggacaguca

SEQ ID NO: 1153498 - RNA, 18 nt, Human
ugguagcacugguggugg

SEQ ID NO: 1153499 - RNA, 22 nt, Human
uggugguugugguacuccugga

SEQ ID NO: 1153500 - RNA, 23 nt, Human
uugaugagcagagggccuuucuu

SEQ ID NO: 1153501 - RNA, 21 nt, Human
uuuggcacuguccuugccuuu

SEQ ID NO: 1153502 - RNA, 18 nt, Human
aaacaaacaaaaaaaacc

SEQ ID NO: 1153503 - RNA, 20 nt, Human
aaacaaacaaaaaaaaccca

SEQ ID NO: 1153504 - RNA, 23 nt, Human
aaacaaacaaacaaaaaaaaccc

SEQ ID NO: 1153505 - RNA, 22 nt, Human
aaacccugucucuacuaaaaaa

SEQ ID NO: 1153506 - RNA, 23 nt, Human
aaacucacaacuaacugcuuuag

SEQ ID NO: 1153507 - RNA, 22 nt, Human
aaagaaggcaaauuuaaauuaa

SEQ ID NO: 1153508 - RNA, 19 nt, Human
aacacggugaaacccuguc

SEQ ID NO: 1153509 - RNA, 20 nt, Human
aacacggugaaacccugucu

SEQ ID NO: 1153510 - RNA, 21 nt, Human
aacacggugaaacccugucuc

SEQ ID NO: 1153511 - RNA, 22 nt, Human
aacuuaucuuucccucuuucug

SEQ ID NO: 1153512 - RNA, 18 nt, Human
aagugugaugauaugacc

SEQ ID NO: 1153513 - RNA, 22 nt, Human
aaguuauaguccuauuugaaac

SEQ ID NO: 1153514 - RNA, 18 nt, Human
aauuucacuagccuaaaa

SEQ ID NO: 1153515 - RNA, 23 nt, Human
acagagugagacuccaucucaaa

SEQ ID NO: 1153516 - RNA, 25 nt, Human
acccugucucuacuaaaaaauacaa

SEQ ID NO: 1153517 - RNA, 24 nt, Human
acuccagccugggugacagaguga

SEQ ID NO: 1153518 - RNA, 22 nt, Human
acuccaucucaaacaaacaaac

SEQ ID NO: 1153519 - RNA, 24 nt, Human
acugcacuccagccugggugacag

SEQ ID NO: 1153520 - RNA, 26 nt, Human
acugcacuccagccugggugacagag

SEQ ID NO: 1153521 - RNA, 24 nt, Human
agagaucauaggccuuuuggacaa

SEQ ID NO: 1153522 - RNA, 24 nt, Human
agcacuuugggaggccgaggcagg

SEQ ID NO: 1153523 - RNA, 19 nt, Human
agccauugguuuaagggcu

SEQ ID NO: 1153524 - RNA, 24 nt, Human
agccugggugacagagugagacuc

SEQ ID NO: 1153525 - RNA, 23 nt, Human
agcugggugugguggcaugugcc

SEQ ID NO: 1153526 - RNA, 18 nt, Human
aggcaggaggaucacuug

SEQ ID NO: 1153527 - RNA, 22 nt, Human
aggcaggaggaucacuugaacc

SEQ ID NO: 1153528 - RNA, 18 nt, Human
aggcagguggaucaccug

SEQ ID NO: 1153529 - RNA, 26 nt, Human
aggcagguggaucaccugaugucagg

SEQ ID NO: 1153530 - RNA, 24 nt, Human
aggcaugguggcucaugccuguaa

SEQ ID NO: 1153531 - RNA, 21 nt, Human
aggccgaggcagguggaucac

SEQ ID NO: 1153532 - RNA, 20 nt, Human
aggcggagguugcagugagc

SEQ ID NO: 1153533 - RNA, 24 nt, Human
aggcggagguugcagugagcugag

SEQ ID NO: 1153534 - RNA, 24 nt, Human
aggcugaggcaggaggaucacuug

SEQ ID NO: 1153535 - RNA, 24 nt, Human
agguggaucaccugaugucaggag

SEQ ID NO: 1153536 - RNA, 19 nt, Human
augccuguaaucccagcac

SEQ ID NO: 1153537 - RNA, 24 nt, Human
auuucgccacugcacuccagccug

SEQ ID NO: 1153538 - RNA, 22 nt, Human
caaacaaacaaaaaaaacccau

SEQ ID NO: 1153539 - RNA, 22 nt, Human
caaacaaacaaacaaaaaaaac

SEQ ID NO: 1153540 - RNA, 25 nt, Human
caaacaaacaaacaaacaaaaaaaa

SEQ ID NO: 1153541 - RNA, 24 nt, Human
caacacggugaaacccugucucua

SEQ ID NO: 1153542 - RNA, 24 nt, Human
caacagaaaucagguauuuucaug

SEQ ID NO: 1153543 - RNA, 22 nt, Human
caaugacgagugcagacaacaa

SEQ ID NO: 1153544 - RNA, 22 nt, Human
cacuccagccugggugacagag

SEQ ID NO: 1153545 - RNA, 22 nt, Human
cacuccagccugggugacagag

SEQ ID NO: 1153546 - RNA, 24 nt, Human
cacuccagccugggugacagagug

SEQ ID NO: 1153547 - RNA, 19 nt, Human
cacugcacuccagccuggg

SEQ ID NO: 1153548 - RNA, 19 nt, Human
cacugcacuccagccuggg

SEQ ID NO: 1153549 - RNA, 19 nt, Human
cacugcacuccagccuggg

SEQ ID NO: 1153550 - RNA, 22 nt, Human
cacugcacuccagccuggguga

SEQ ID NO: 1153551 - RNA, 24 nt, Human
cacugcacuccagccugggugaca

SEQ ID NO: 1153552 - RNA, 25 nt, Human
cacugcacuccagccugggugacag

SEQ ID NO: 1153553 - RNA, 24 nt, Human
cagcacuuugggaggccgaggcag

SEQ ID NO: 1153554 - RNA, 26 nt, Human
cagcacuuugggaggccgaggcaggu

SEQ ID NO: 1153555 - RNA, 24 nt, Human
cagcuacuugggaggcugaggcag

SEQ ID NO: 1153556 - RNA, 31 nt, Human
caucucaaacaaacaaacaaacaaaaaaaac

SEQ ID NO: 1153557 - RNA, 20 nt, Human
caugccuguaaucccagcac

SEQ ID NO: 1153558 - RNA, 24 nt, Human
caugccuguaaucccagcacuuug

SEQ ID NO: 1153559 - RNA, 20 nt, Human
ccacugcacuccagccuggg

SEQ ID NO: 1153560 - RNA, 20 nt, Human
ccacugcacuccagccuggg

SEQ ID NO: 1153561 - RNA, 21 nt, Human
ccacugcacuccagccugggu

SEQ ID NO: 1153562 - RNA, 21 nt, Human
ccacugcacuccagccugggu

SEQ ID NO: 1153563 - RNA, 24 nt, Human
ccacugcacuccagccugggugac

SEQ ID NO: 1153564 - RNA, 25 nt, Human
cccuuguaaccccaugcauuuccuu

SEQ ID NO: 1153565 - RNA, 22 nt, Human
ccucagaaaauauguccucucu

SEQ ID NO: 1153566 - RNA, 23 nt, Human
ccugaugucaggaguucaagauc

SEQ ID NO: 1153567 - RNA, 22 nt, Human
ccugggugacagagugagacuc

SEQ ID NO: 1153568 - RNA, 18 nt, Human
ccuguaaucccagcuacu

SEQ ID NO: 1153569 - RNA, 19 nt, Human
ccuguaaucccagcuacuu

SEQ ID NO: 1153570 - RNA, 21 nt, Human
ccuguaaucccagcuacuugg

SEQ ID NO: 1153571 - RNA, 22 nt, Human
ccuguaaucccagcuacuuggg

SEQ ID NO: 1153572 - RNA, 23 nt, Human
ccuuguguaguuaucugcaugac

SEQ ID NO: 1153573 - RNA, 20 nt, Human
cgaggcagguggaucaccug

SEQ ID NO: 1153574 - RNA, 23 nt, Human
cgccaacacggugaaacccuguc

SEQ ID NO: 1153575 - RNA, 26 nt, Human
cgccacugcacuccagccugggugac

SEQ ID NO: 1153576 - RNA, 19 nt, Human
cuaaaacuauaaaccucag

SEQ ID NO: 1153577 - RNA, 19 nt, Human
cuacuaaaaaauacaaaaa

SEQ ID NO: 1153578 - RNA, 19 nt, Human
cucaaacaaacaaacaaac

SEQ ID NO: 1153579 - RNA, 23 nt, Human
cucaugccuguaaucccagcacu

SEQ ID NO: 1153580 - RNA, 24 nt, Human
cucaugccuguaaucccagcacuu

SEQ ID NO: 1153581 - RNA, 21 nt, Human
cucgccaacacggugaaaccc

SEQ ID NO: 1153582 - RNA, 21 nt, Human
cucgccaacacggugaaaccc

SEQ ID NO: 1153583 - RNA, 18 nt, Human
gaaaauauguccucucuc

SEQ ID NO: 1153584 - RNA, 19 nt, Human
gaaacccugucucuacuaa

SEQ ID NO: 1153585 - RNA, 23 nt, Human
gaaaucauugaaaaugaaauaag

SEQ ID NO: 1153586 - RNA, 21 nt, Human
gaaguaucauuggccuuugaa

SEQ ID NO: 1153587 - RNA, 23 nt, Human
gagauuucgccacugcacuccag

SEQ ID NO: 1153588 - RNA, 25 nt, Human
gaggcagguggaucaccugauguca

SEQ ID NO: 1153589 - RNA, 22 nt, Human
gagguugcagugagcugagauu

SEQ ID NO: 1153590 - RNA, 18 nt, Human
gaucaccugaugucagga

SEQ ID NO: 1153591 - RNA, 24 nt, Human
gaucaccugaugucaggaguucaa

SEQ ID NO: 1153592 - RNA, 20 nt, Human
gcacaccuauaacuaccaca

SEQ ID NO: 1153593 - RNA, 24 nt, Human
gcacuccagccugggugacagagu

SEQ ID NO: 1153594 - RNA, 21 nt, Human
gccaacacggugaaacccugu

SEQ ID NO: 1153595 - RNA, 24 nt, Human
gccaacacggugaaacccugucuc

SEQ ID NO: 1153596 - RNA, 19 nt, Human
gccacugcacuccagccug

SEQ ID NO: 1153597 - RNA, 24 nt, Human
gccacugcacuccagccuggguga

SEQ ID NO: 1153598 - RNA, 22 nt, Human
gccaggcaugguggcucaugcc

SEQ ID NO: 1153599 - RNA, 20 nt, Human
gccuguaaucccagcuacuu

SEQ ID NO: 1153600 - RNA, 22 nt, Human
ggaggcggagguugcagugagc

SEQ ID NO: 1153601 - RNA, 18 nt, Human
ggagguugcagugagcug

SEQ ID NO: 1153602 - RNA, 22 nt, Human
ggagguugcagugagcugagau

SEQ ID NO: 1153603 - RNA, 22 nt, Human
ggagguugcagugagcugagau

SEQ ID NO: 1153604 - RNA, 25 nt, Human
ggagguugcagugagcugagauuuc

SEQ ID NO: 1153605 - RNA, 21 nt, Human
ggcucaugccuguaaucccag

SEQ ID NO: 1153606 - RNA, 24 nt, Human
gggugugguggcaugugccuguaa

SEQ ID NO: 1153607 - RNA, 20 nt, Human
ggguucuuaaccuacaauuc

SEQ ID NO: 1153608 - RNA, 24 nt, Human
gguggcaugugccuguaaucccag

SEQ ID NO: 1153609 - RNA, 24 nt, Human
gguggcucaugccuguaaucccag

SEQ ID NO: 1153610 - RNA, 18 nt, Human
gugauaaggaucugacaa

SEQ ID NO: 1153611 - RNA, 21 nt, Human
guggaucaccugaugucagga

SEQ ID NO: 1153612 - RNA, 19 nt, Human
guugcagugagcugagauu

SEQ ID NO: 1153613 - RNA, 25 nt, Human
uaaaguaucaaaggaucucugugcu

SEQ ID NO: 1153614 - RNA, 25 nt, Human
uaagauauaaucuaucaaaacaaaa

SEQ ID NO: 1153615 - RNA, 21 nt, Human
uacaauucacagaccucuaag

SEQ ID NO: 1153616 - RNA, 21 nt, Human
uagcaauuugcugccguagca

SEQ ID NO: 1153617 - RNA, 19 nt, Human
uagcaguaacuuugucaac

SEQ ID NO: 1153618 - RNA, 23 nt, Human
uagcaguaacuuugucaacagaa

SEQ ID NO: 1153619 - RNA, 20 nt, Human
uagcaguaacuuugucaacc

SEQ ID NO: 1153620 - RNA, 22 nt, Human
uagcugggugugguggcaugug

SEQ ID NO: 1153621 - RNA, 22 nt, Human
uaggaaaucauugaaaaugaaa

SEQ ID NO: 1153622 - RNA, 22 nt, Human
uaggaguaagauauaaucuauc

SEQ ID NO: 1153623 - RNA, 20 nt, Human
uauaaaguuaugagaucuuu

SEQ ID NO: 1153624 - RNA, 24 nt, Human
uaucaaaacaaaacaucacauaac

SEQ ID NO: 1153625 - RNA, 25 nt, Human
uaucaaaacaaaacaucacauaaca

SEQ ID NO: 1153626 - RNA, 19 nt, Human
uaucaaaaugcuuacaaca

SEQ ID NO: 1153627 - RNA, 23 nt, Human
ucaccugaugucaggaguucaag

SEQ ID NO: 1153628 - RNA, 24 nt, Human
ucacuagaacaggauuuuaguuau

SEQ ID NO: 1153629 - RNA, 21 nt, Human
ucacuagccuaaaacuaaaau

SEQ ID NO: 1153630 - RNA, 23 nt, Human
ucagaaaauauguccucucucag

SEQ ID NO: 1153631 - RNA, 23 nt, Human
uccagccugggugacagagugag

SEQ ID NO: 1153632 - RNA, 24 nt, Human
uccagccugggugacagagugaga

SEQ ID NO: 1153633 - RNA, 25 nt, Human
ucccuuguaaccccaugcauuuccu

SEQ ID NO: 1153634 - RNA, 24 nt, Human
ucucgccaacacggugaaacccug

SEQ ID NO: 1153635 - RNA, 22 nt, Human
ucucuacuaaaaaauacaaaaa

SEQ ID NO: 1153636 - RNA, 24 nt, Human
ucuggccaggcaugguggcucaug

SEQ ID NO: 1153637 - RNA, 20 nt, Human
ugacacaaaaaaguuaaagu

SEQ ID NO: 1153638 - RNA, 22 nt, Human
ugacaugaaaugugaauaauau

SEQ ID NO: 1153639 - RNA, 22 nt, Human
ugagcugagauuucgccacugc

SEQ ID NO: 1153640 - RNA, 20 nt, Human
ugaggcaggaggaucacuug

SEQ ID NO: 1153641 - RNA, 24 nt, Human
ugaggcaggaggaucacuugaacc

SEQ ID NO: 1153642 - RNA, 25 nt, Human
ugaggcaggaggaucacuugaaccu

SEQ ID NO: 1153643 - RNA, 26 nt, Human
ugcacaccuauaacuaccacaucaua

SEQ ID NO: 1153644 - RNA, 18 nt, Human
ugcaugacauucacuaga

SEQ ID NO: 1153645 - RNA, 22 nt, Human
ugcaugacauucacuagaacag

SEQ ID NO: 1153646 - RNA, 23 nt, Human
ugccuguaaucccagcacuuugg

SEQ ID NO: 1153647 - RNA, 24 nt, Human
ugccuguaaucccagcacuuuggg

SEQ ID NO: 1153648 - RNA, 24 nt, Human
ugccuguaaucccagcuacuuggg

SEQ ID NO: 1153649 - RNA, 21 nt, Human
ugcuaagaagagaucauaggc

SEQ ID NO: 1153650 - RNA, 27 nt, Human
ugcuuuagccauugguuuaagggcuug

SEQ ID NO: 1153651 - RNA, 24 nt, Human
uggaucaccugaugucaggaguuc

SEQ ID NO: 1153652 - RNA, 21 nt, Human
uggcaugugccuguaauccca

SEQ ID NO: 1153653 - RNA, 22 nt, Human
uggcaugugccuguaaucccag

SEQ ID NO: 1153654 - RNA, 24 nt, Human
uggcaugugccuguaaucccagcu

SEQ ID NO: 1153655 - RNA, 24 nt, Human
uggccaggcaugguggcucaugcc

SEQ ID NO: 1153656 - RNA, 22 nt, Human
uggcucaugccuguaaucccag

SEQ ID NO: 1153657 - RNA, 24 nt, Human
uggcucaugccuguaaucccagca

SEQ ID NO: 1153658 - RNA, 24 nt, Human
ugggaggccgaggcagguggauca

SEQ ID NO: 1153659 - RNA, 20 nt, Human
ugggaggcugaggcaggagg

SEQ ID NO: 1153660 - RNA, 24 nt, Human
ugggaggcugaggcaggaggauca

SEQ ID NO: 1153661 - RNA, 18 nt, Human
ugggugugguggcaugug

SEQ ID NO: 1153662 - RNA, 24 nt, Human
ugguggcaugugccuguaauccca

SEQ ID NO: 1153663 - RNA, 24 nt, Human
ugguggcucaugccuguaauccca

SEQ ID NO: 1153664 - RNA, 21 nt, Human
uguaguuaucugcaugacauu

SEQ ID NO: 1153665 - RNA, 20 nt, Human
ugucaggaguucaagaucag

SEQ ID NO: 1153666 - RNA, 19 nt, Human
ugugcuagguuggacaaau

SEQ ID NO: 1153667 - RNA, 19 nt, Human
uuagcugggugugguggca

SEQ ID NO: 1153668 - RNA, 20 nt, Human
uuagcugggugugguggcau

SEQ ID NO: 1153669 - RNA, 24 nt, Human
uuagcugggugugguggcaugugc

SEQ ID NO: 1153670 - RNA, 20 nt, Human
uuccaauaagaaacagaugg

SEQ ID NO: 1153671 - RNA, 24 nt, Human
uucugcauuuaaaaacauuauucu

SEQ ID NO: 1153672 - RNA, 25 nt, Human
uugaaccucaggaggcggagguugc

SEQ ID NO: 1153673 - RNA, 19 nt, Human
uugcagauaucuaauauau

SEQ ID NO: 1153674 - RNA, 21 nt, Human
uugcagugagcugagauuucc

SEQ ID NO: 1153675 - RNA, 21 nt, Human
uugcagugagcugagauuucg

SEQ ID NO: 1153676 - RNA, 22 nt, Human
uugcagugagcugagauuucgc

SEQ ID NO: 1153677 - RNA, 25 nt, Human
uugggaggccgaggcagguggauca

SEQ ID NO: 1153678 - RNA, 25 nt, Human
uugggaggcugaggcaggaggauca

SEQ ID NO: 1153679 - RNA, 21 nt, Human
aaaagaaaauaggcuauagaa

SEQ ID NO: 1153680 - RNA, 20 nt, Human
aagaagcagaguagcaucag

SEQ ID NO: 1153681 - RNA, 18 nt, Human
acaguccgccugcagcug

SEQ ID NO: 1153682 - RNA, 21 nt, Human
aggccucacugcuaaggcagu

SEQ ID NO: 1153683 - RNA, 20 nt, Human
caaagugugcaccggccugc

SEQ ID NO: 1153684 - RNA, 21 nt, Human
cacaauagacaguuauacaaa

SEQ ID NO: 1153685 - RNA, 18 nt, Human
cacugcuaaggcagugac

SEQ ID NO: 1153686 - RNA, 22 nt, Human
cagcgaagaagcagaguagcau

SEQ ID NO: 1153687 - RNA, 23 nt, Human
cccgcuccuacaaagugugcacc

SEQ ID NO: 1153688 - RNA, 23 nt, Human
ccgcgcgcgcacuuacaguccgc

SEQ ID NO: 1153689 - RNA, 18 nt, Human
cgaagaagcagaguagca

SEQ ID NO: 1153690 - RNA, 22 nt, Human
cggccugccgggccagcgaaga

SEQ ID NO: 1153691 - RNA, 19 nt, Human
cuaaggcagugaccgccua

SEQ ID NO: 1153692 - RNA, 22 nt, Human
cuacaaagugugcaccggccug

SEQ ID NO: 1153693 - RNA, 22 nt, Human
gaggccucacugcuaaggcagu

SEQ ID NO: 1153694 - RNA, 23 nt, Human
gaggccucacugcuaaggcagug

SEQ ID NO: 1153695 - RNA, 18 nt, Human
gccagcgaagaagcagag

SEQ ID NO: 1153696 - RNA, 23 nt, Human
ggagguccuuugucacccugccc

SEQ ID NO: 1153697 - RNA, 21 nt, Human
ggccugccgggccagcgaaga

SEQ ID NO: 1153698 - RNA, 23 nt, Human
ggcuacacgagccucggcgccag

SEQ ID NO: 1153699 - RNA, 18 nt, Human
gggcuggggcuacaaaga

SEQ ID NO: 1153700 - RNA, 23 nt, Human
gugcaccggccugccgggccagc

SEQ ID NO: 1153701 - RNA, 19 nt, Human
uaauacagucauuaucuuu

SEQ ID NO: 1153702 - RNA, 20 nt, Human
uacucuguggagguccuuug

SEQ ID NO: 1153703 - RNA, 20 nt, Human
uaugacaaagcccgcuccua

SEQ ID NO: 1153704 - RNA, 18 nt, Human
ucccgagguuugaggggc

SEQ ID NO: 1153705 - RNA, 23 nt, Human
ucuguggagguccuuugucaccc

SEQ ID NO: 1153706 - RNA, 18 nt, Human
ugcugagcuagggcuggg

SEQ ID NO: 1153707 - RNA, 25 nt, Human
uugcagggaggaguucccgagguuu

SEQ ID NO: 1153708 - RNA, 24 nt, Human
agagguggugauagugccaggccc

SEQ ID NO: 1153709 - RNA, 21 nt, Human
auagugccaggcccucugcag

SEQ ID NO: 1153710 - RNA, 20 nt, Human
caggcaaggaggcggagggc

SEQ ID NO: 1153711 - RNA, 27 nt, Human
cccucugcaggcaaggaggcggagggc

SEQ ID NO: 1153712 - RNA, 18 nt, Human
ccucugcaggcaaggagg

SEQ ID NO: 1153713 - RNA, 22 nt, Human
ccucugcaggcaaggaggcgga

SEQ ID NO: 1153714 - RNA, 23 nt, Human
ccucuggcuuaaagcagaagcug

SEQ ID NO: 1153715 - RNA, 21 nt, Human
uauuggcaugaaggcagagag

SEQ ID NO: 1153716 - RNA, 18 nt, Human
uggcaugaaggcagagag

SEQ ID NO: 1153717 - RNA, 19 nt, Human
ugugaggcauuggauaugu

SEQ ID NO: 1153718 - RNA, 26 nt, Human
aagccccccaaaaaccucuacaagaa

SEQ ID NO: 1153719 - RNA, 21 nt, Human
aaggacuuuugagagagucaa

SEQ ID NO: 1153720 - RNA, 20 nt, Human
acacacacacacgcacauau

SEQ ID NO: 1153721 - RNA, 19 nt, Human
agggagaggggagaaagga

SEQ ID NO: 1153722 - RNA, 24 nt, Human
auuccccuaaagccccccaaaaac

SEQ ID NO: 1153723 - RNA, 22 nt, Human
auuguucuguuauuuucauuca

SEQ ID NO: 1153724 - RNA, 18 nt, Human
cccccaaaaaccucuaca

SEQ ID NO: 1153725 - RNA, 20 nt, Human
cccccaaaaaccucuacaag

SEQ ID NO: 1153726 - RNA, 21 nt, Human
ccccuaaagccccccaaaaac

SEQ ID NO: 1153727 - RNA, 24 nt, Human
ccccuaaagccccccaaaaaccuc

SEQ ID NO: 1153728 - RNA, 23 nt, Human
gagagucaagucauggggcaggg

SEQ ID NO: 1153729 - RNA, 22 nt, Human
ggcaggggcgcagugggauucu

SEQ ID NO: 1153730 - RNA, 20 nt, Human
uaaagccccccaaaaaccuc

SEQ ID NO: 1153731 - RNA, 22 nt, Human
uaaagccccccaaaaaccucua

SEQ ID NO: 1153732 - RNA, 26 nt, Human
uacacacacacacgcacauauguuag

SEQ ID NO: 1153733 - RNA, 21 nt, Human
uauuaauuccccuaaagcccc

SEQ ID NO: 1153734 - RNA, 23 nt, Human
ucauggggcaggggcgcaguggg

SEQ ID NO: 1153735 - RNA, 21 nt, Human
uccccuaaagccccccaaaaa

SEQ ID NO: 1153736 - RNA, 23 nt, Human
ugaagggagaggggagaaaggac

SEQ ID NO: 1153737 - RNA, 19 nt, Human
uuccccuaaagccccccaa

SEQ ID NO: 1153738 - RNA, 24 nt, Human
uuuacacacacacacgcacauaug

SEQ ID NO: 1153739 - RNA, 24 nt, Human
acuguguugcccaggcuggucuug

SEQ ID NO: 1153740 - RNA, 25 nt, Human
acuguguugcccaggcuggucuuga

SEQ ID NO: 1153741 - RNA, 21 nt, Human
augauuuuguuuuguagauca

SEQ ID NO: 1153742 - RNA, 19 nt, Human
auuccuggcugaguuccca

SEQ ID NO: 1153743 - RNA, 23 nt, Human
caacacccugggauggaaggaga

SEQ ID NO: 1153744 - RNA, 19 nt, Human
cacuguguugcccaggcug

SEQ ID NO: 1153745 - RNA, 21 nt, Human
cacuguguugcccaggcuggu

SEQ ID NO: 1153746 - RNA, 24 nt, Human
cacuguguugcccaggcuggucuu

SEQ ID NO: 1153747 - RNA, 26 nt, Human
ccucacuguguugcccaggcuggucu

SEQ ID NO: 1153748 - RNA, 27 nt, Human
ccucacuguguugcccaggcuggucuu

SEQ ID NO: 1153749 - RNA, 18 nt, Human
cuccucuuccacuccuuc

SEQ ID NO: 1153750 - RNA, 20 nt, Human
gaggauguggguagggggcc

SEQ ID NO: 1153751 - RNA, 19 nt, Human
ggaaggagauugcggggac

SEQ ID NO: 1153752 - RNA, 22 nt, Human
gggccucacuguguugcccagg

SEQ ID NO: 1153753 - RNA, 24 nt, Human
gggggccucacuguguugcccagg

SEQ ID NO: 1153754 - RNA, 19 nt, Human
guagaucaugaggauucau

SEQ ID NO: 1153755 - RNA, 24 nt, Human
uagguuacaugaucugaaaguaca

SEQ ID NO: 1153756 - RNA, 18 nt, Human
ucacuguggaguccuagu

SEQ ID NO: 1153757 - RNA, 23 nt, Human
ucccuccuuuaguacauuguauu

SEQ ID NO: 1153758 - RNA, 24 nt, Human
ugcccaggcuggucuugaauuccu

SEQ ID NO: 1153759 - RNA, 19 nt, Human
ugcggggacggagaggaug

SEQ ID NO: 1153760 - RNA, 24 nt, Human
uggcugaguucccagacucaaguu

SEQ ID NO: 1153761 - RNA, 19 nt, Human
ugggauggaaggagauugc

SEQ ID NO: 1153762 - RNA, 27 nt, Human
uggguuuucagacauacagaaagggau

SEQ ID NO: 1153763 - RNA, 19 nt, Human
ugucuccucuuccacuccu

SEQ ID NO: 1153764 - RNA, 20 nt, Human
ugucuccucuuccacuccuu

SEQ ID NO: 1153765 - RNA, 24 nt, Human
uguguugcccaggcuggucuugaa

SEQ ID NO: 1153766 - RNA, 22 nt, Human
uguugcccaggcuggucuugaa

SEQ ID NO: 1153767 - RNA, 18 nt, Human
uuagauggggcuguguca

SEQ ID NO: 1153768 - RNA, 21 nt, Human
uuccuggcugaguucccagaa

SEQ ID NO: 1153769 - RNA, 20 nt, Human
uuuauuuuaauggguuuuca

SEQ ID NO: 1153770 - RNA, 19 nt, Human
uuuuuuuuuuuuuuuugcc

SEQ ID NO: 1153771 - RNA, 21 nt, Human
aaaaagccucugucucaaaaa

SEQ ID NO: 1153772 - RNA, 24 nt, Human
aaaaauggaccauauaccuaaaug

SEQ ID NO: 1153773 - RNA, 23 nt, Human
aaaagaccaaauaaacacauuaa

SEQ ID NO: 1153774 - RNA, 19 nt, Human
aaaagaccaaauaaacagu

SEQ ID NO: 1153775 - RNA, 24 nt, Human
aaaagccaggugugguagcucacg

SEQ ID NO: 1153776 - RNA, 21 nt, Human
aaacaaaagaaaaaaaauaga

SEQ ID NO: 1153777 - RNA, 20 nt, Human
aacacaaugagaucgacuuc

SEQ ID NO: 1153778 - RNA, 19 nt, Human
aacacagcaagaccccauc

SEQ ID NO: 1153779 - RNA, 20 nt, Human
aacacagcaagaccccaucu

SEQ ID NO: 1153780 - RNA, 21 nt, Human
aacacagcaagaccccaucuc

SEQ ID NO: 1153781 - RNA, 18 nt, Human
aacccucaaaguuaauuc

SEQ ID NO: 1153782 - RNA, 18 nt, Human
aagagaaaugaaaacaua

SEQ ID NO: 1153783 - RNA, 18 nt, Human
aagaucauuuggacccag

SEQ ID NO: 1153784 - RNA, 24 nt, Human
aagccaggugugguagcucacguc

SEQ ID NO: 1153785 - RNA, 23 nt, Human
aaguaaaucuucaaaacccuggg

SEQ ID NO: 1153786 - RNA, 22 nt, Human
aagugcugauuugucucuuggg

SEQ ID NO: 1153787 - RNA, 18 nt, Human
aagugcuggugacgacgu

SEQ ID NO: 1153788 - RNA, 22 nt, Human
aaucgccuuuucaacaaauggu

SEQ ID NO: 1153789 - RNA, 19 nt, Human
acaaaagaaaaaaaauaga

SEQ ID NO: 1153790 - RNA, 18 nt, Human
acaacccaaauguccuuc

SEQ ID NO: 1153791 - RNA, 25 nt, Human
acaggcaagugcuggugacgacgug

SEQ ID NO: 1153792 - RNA, 23 nt, Human
accauagccaaaaacuaggaaca

SEQ ID NO: 1153793 - RNA, 18 nt, Human
acccacggcaagcucuca

SEQ ID NO: 1153794 - RNA, 24 nt, Human
acccaggagguggugguuguagug

SEQ ID NO: 1153795 - RNA, 21 nt, Human
acggcggauccggaaacaggc

SEQ ID NO: 1153796 - RNA, 23 nt, Human
acuacucagaaggcugggguggg

SEQ ID NO: 1153797 - RNA, 18 nt, Human
acuggacuccagcuuggg

SEQ ID NO: 1153798 - RNA, 20 nt, Human
acuggacuccagcuugggag

SEQ ID NO: 1153799 - RNA, 24 nt, Human
acuucaauucuaaaaaaagaacaa

SEQ ID NO: 1153800 - RNA, 18 nt, Human
agaaccggaacagugcug

SEQ ID NO: 1153801 - RNA, 24 nt, Human
agacagauagcuugagcccaagca

SEQ ID NO: 1153802 - RNA, 25 nt, Human
agacauauaacacuauuuuuaaaug

SEQ ID NO: 1153803 - RNA, 23 nt, Human
agauaaaaguuuugugcugcaaa

SEQ ID NO: 1153804 - RNA, 22 nt, Human
agcaagggcuucaugccucuaa

SEQ ID NO: 1153805 - RNA, 24 nt, Human
agcagcucacgccuguagucccag

SEQ ID NO: 1153806 - RNA, 23 nt, Human
agccaaguacaucugcugcucuc

SEQ ID NO: 1153807 - RNA, 24 nt, Human
agccugggcaacacagcaagaccc

SEQ ID NO: 1153808 - RNA, 20 nt, Human
agcggccaagauggcgagcu

SEQ ID NO: 1153809 - RNA, 21 nt, Human
agcucacgccuguagucccag

SEQ ID NO: 1153810 - RNA, 24 nt, Human
aggcuggggugggaagaucauuug

SEQ ID NO: 1153811 - RNA, 21 nt, Human
agguggugguuguagugagcc

SEQ ID NO: 1153812 - RNA, 22 nt, Human
agguggugguuguagugagccg

SEQ ID NO: 1153813 - RNA, 24 nt, Human
agguguagcagcucacgccuguag

SEQ ID NO: 1153814 - RNA, 24 nt, Human
aggugugguagcucacgucuguaa

SEQ ID NO: 1153815 - RNA, 22 nt, Human
agguuucagacaaagggggacu

SEQ ID NO: 1153816 - RNA, 21 nt, Human
agugaagaugcaggcuaggug

SEQ ID NO: 1153817 - RNA, 20 nt, Human
auaaaggacuuguauccaca

SEQ ID NO: 1153818 - RNA, 28 nt, Human
auccauagcaguauuacucaccauagcc

SEQ ID NO: 1153819 - RNA, 20 nt, Human
aucugcugcucucuggaccc

SEQ ID NO: 1153820 - RNA, 25 nt, Human
augcaaaagaaugaaguugggaccc

SEQ ID NO: 1153821 - RNA, 19 nt, Human
auggcacuuugguucucua

SEQ ID NO: 1153822 - RNA, 23 nt, Human
caaaaacuaggaacaacccaaau

SEQ ID NO: 1153823 - RNA, 18 nt, Human
caaaaccacaaacaaaag

SEQ ID NO: 1153824 - RNA, 20 nt, Human
caaaaccacaaacaaaagaa

SEQ ID NO: 1153825 - RNA, 22 nt, Human
caaaaccacaaacaaaagaaaa

SEQ ID NO: 1153826 - RNA, 19 nt, Human
caaaccaucuuaacagaca

SEQ ID NO: 1153827 - RNA, 19 nt, Human
caagaaaauuuaacagaaa

SEQ ID NO: 1153828 - RNA, 22 nt, Human
caagaugauguacaaaagacca

SEQ ID NO: 1153829 - RNA, 19 nt, Human
caagcucucaggccugcaa

SEQ ID NO: 1153830 - RNA, 25 nt, Human
caaggcagacagauagcuugagccc

SEQ ID NO: 1153831 - RNA, 27 nt, Human
caagguucuggggcagcggccaagaug

SEQ ID NO: 1153832 - RNA, 20 nt, Human
caaguacaucugcugcucuc

SEQ ID NO: 1153833 - RNA, 23 nt, Human
caccauagccaaaaacuaggaac

SEQ ID NO: 1153834 - RNA, 19 nt, Human
cacgucuguaaucccagca

SEQ ID NO: 1153835 - RNA, 21 nt, Human
cagaaaaagaaucgccuuuuc

SEQ ID NO: 1153836 - RNA, 22 nt, Human
cagaaugagagaacauacuuaa

SEQ ID NO: 1153837 - RNA, 24 nt, Human
cagcucacgccuguagucccagua

SEQ ID NO: 1153838 - RNA, 21 nt, Human
caggcaaaacaaauauauggu

SEQ ID NO: 1153839 - RNA, 23 nt, Human
caggcuagguguagcagcucacg

SEQ ID NO: 1153840 - RNA, 24 nt, Human
caguacuuugggaacccaaggcag

SEQ ID NO: 1153841 - RNA, 26 nt, Human
caugcaaaagaaugaaguugggaccc

SEQ ID NO: 1153842 - RNA, 20 nt, Human
cauguaugagaaggagaagg

SEQ ID NO: 1153843 - RNA, 25 nt, Human
cauucgauauuagccugggcaacac

SEQ ID NO: 1153844 - RNA, 21 nt, Human
ccaaaaccacaaacaaaagaa

SEQ ID NO: 1153845 - RNA, 22 nt, Human
ccaaaaccacaaacaaaagaaa

SEQ ID NO: 1153846 - RNA, 19 nt, Human
ccaagauggcgagcuuugg

SEQ ID NO: 1153847 - RNA, 21 nt, Human
ccacaugcaaaagaaugaagu

SEQ ID NO: 1153848 - RNA, 23 nt, Human
ccacggcaagcucucaggccugc

SEQ ID NO: 1153849 - RNA, 20 nt, Human
ccacuggacuccagcuuggg

SEQ ID NO: 1153850 - RNA, 20 nt, Human
ccacuggacuccagcuuggg

SEQ ID NO: 1153851 - RNA, 22 nt, Human
ccacuggacuccagcuugggag

SEQ ID NO: 1153852 - RNA, 24 nt, Human
ccacuggacuccagcuugggaggu

SEQ ID NO: 1153853 - RNA, 19 nt, Human
ccauagccaaaaacuagga

SEQ ID NO: 1153854 - RNA, 30 nt, Human
cccacggcaagcucucaggccugcagaggg

SEQ ID NO: 1153855 - RNA, 24 nt, Human
ccugggcaacacagcaagacccca

SEQ ID NO: 1153856 - RNA, 21 nt, Human
ccuguagucccaguacuuugg

SEQ ID NO: 1153857 - RNA, 21 nt, Human
ccugugauaacccucaaaguu

SEQ ID NO: 1153858 - RNA, 22 nt, Human
ccuucauacacugcugguguga

SEQ ID NO: 1153859 - RNA, 23 nt, Human
cgccuguagucccaguacuuugg

SEQ ID NO: 1153860 - RNA, 24 nt, Human
cggaaacaggcaagaugcacaggc

SEQ ID NO: 1153861 - RNA, 18 nt, Human
cgucuguaaucccagcac

SEQ ID NO: 1153862 - RNA, 21 nt, Human
cguguagaugacccacagaau

SEQ ID NO: 1153863 - RNA, 26 nt, Human
cuacauaguguuccugugauaacccu

SEQ ID NO: 1153864 - RNA, 24 nt, Human
cucacgccuguagucccaguacuu

SEQ ID NO: 1153865 - RNA, 23 nt, Human
cucacgucuguaaucccagcacu

SEQ ID NO: 1153866 - RNA, 20 nt, Human
cugcucucuggacccacggc

SEQ ID NO: 1153867 - RNA, 20 nt, Human
cugcugcucucuggacccac

SEQ ID NO: 1153868 - RNA, 21 nt, Human
cuggacccacggcaagcucuc

SEQ ID NO: 1153869 - RNA, 23 nt, Human
cuuuaagaggagagcacugagug

SEQ ID NO: 1153870 - RNA, 24 nt, Human
cuuugguucucuaucuucuccuua

SEQ ID NO: 1153871 - RNA, 21 nt, Human
gagguaaacucugucucaaaa

SEQ ID NO: 1153872 - RNA, 18 nt, Human
gcaaaacaaauauauggu

SEQ ID NO: 1153873 - RNA, 19 nt, Human
ggaaaacuucacauccaca

SEQ ID NO: 1153874 - RNA, 18 nt, Human
ggacaguaacaguguguc

SEQ ID NO: 1153875 - RNA, 19 nt, Human
gguaauagaagaaccggaa

SEQ ID NO: 1153876 - RNA, 24 nt, Human
gguagcucacgucuguaaucccag

SEQ ID NO: 1153877 - RNA, 18 nt, Human
ggugguuguagugagccg

SEQ ID NO: 1153878 - RNA, 21 nt, Human
guuuccaagguucuggggcag

SEQ ID NO: 1153879 - RNA, 23 nt, Human
uaaaaccuaaaacuaugaaacuc

SEQ ID NO: 1153880 - RNA, 24 nt, Human
uaaaaccuaaaacuaugaaacucu

SEQ ID NO: 1153881 - RNA, 24 nt, Human
uaaaccaaaaccacaaacaaaaga

SEQ ID NO: 1153882 - RNA, 28 nt, Human
uaaaccaaaaccacaaacaaccccgggg

SEQ ID NO: 1153883 - RNA, 25 nt, Human
uaaagaguuuccauuugaaccagca

SEQ ID NO: 1153884 - RNA, 21 nt, Human
uacaaaagaccaaauaaacac

SEQ ID NO: 1153885 - RNA, 22 nt, Human
uacacaguaauaccucaauuaa

SEQ ID NO: 1153886 - RNA, 18 nt, Human
uacacuuugugggagaga

SEQ ID NO: 1153887 - RNA, 25 nt, Human
uagcaguauuacucaccauagccaa

SEQ ID NO: 1153888 - RNA, 22 nt, Human
uagcucacgucuguaaucccag

SEQ ID NO: 1153889 - RNA, 24 nt, Human
uagcucacgucuguaaucccagca

SEQ ID NO: 1153890 - RNA, 23 nt, Human
uauuaaucuggugaugguuacac

SEQ ID NO: 1153891 - RNA, 18 nt, Human
ucacacaaaaaccuguac

SEQ ID NO: 1153892 - RNA, 23 nt, Human
ucacauccacaugcaaaagaaug

SEQ ID NO: 1153893 - RNA, 19 nt, Human
ucagaaggcugggguggga

SEQ ID NO: 1153894 - RNA, 18 nt, Human
ucauguaugagaaggaga

SEQ ID NO: 1153895 - RNA, 18 nt, Human
uccaaacuacucagaagg

SEQ ID NO: 1153896 - RNA, 19 nt, Human
uccacaagaugauguacaa

SEQ ID NO: 1153897 - RNA, 22 nt, Human
uccacaagaugauguacaaaag

SEQ ID NO: 1153898 - RNA, 19 nt, Human
ucccaggguacuuaugaug

SEQ ID NO: 1153899 - RNA, 19 nt, Human
ucccagguauguacccaag

SEQ ID NO: 1153900 - RNA, 21 nt, Human
ucccagguauguacccaagag

SEQ ID NO: 1153901 - RNA, 24 nt, Human
uccuuaucugagcaagggcuucau

SEQ ID NO: 1153902 - RNA, 27 nt, Human
ucuaaaaaaagaacaaagguaauaaaa

SEQ ID NO: 1153903 - RNA, 24 nt, Human
ugaaaagccaggugugguagcuca

SEQ ID NO: 1153904 - RNA, 22 nt, Human
ugagagaacauacuuaaaauca

SEQ ID NO: 1153905 - RNA, 23 nt, Human
ugcaauacacaaaaaaaauggac

SEQ ID NO: 1153906 - RNA, 21 nt, Human
ugcagcaaaaucuacagcaaa

SEQ ID NO: 1153907 - RNA, 22 nt, Human
ugcauuauuacauuauuacacu

SEQ ID NO: 1153908 - RNA, 19 nt, Human
ugcuggugacgacgugaag

SEQ ID NO: 1153909 - RNA, 22 nt, Human
uggcugagaccucagauaaccu

SEQ ID NO: 1153910 - RNA, 19 nt, Human
ugggagagaaggacagcau

SEQ ID NO: 1153911 - RNA, 23 nt, Human
ugggagguaaacucugucucaaa

SEQ ID NO: 1153912 - RNA, 22 nt, Human
ugggcaacacagcaagacccca

SEQ ID NO: 1153913 - RNA, 19 nt, Human
uggggugggaagaucauuu

SEQ ID NO: 1153914 - RNA, 24 nt, Human
ugguagcucacgucuguaauccca

SEQ ID NO: 1153915 - RNA, 20 nt, Human
uguacaaaagaccaaauaaa

SEQ ID NO: 1153916 - RNA, 25 nt, Human
uguacaaaagaccaaauaaacacau

SEQ ID NO: 1153917 - RNA, 21 nt, Human
uguaugagaaggagaaggagu

SEQ ID NO: 1153918 - RNA, 18 nt, Human
ugucaagaccucugcaua

SEQ ID NO: 1153919 - RNA, 20 nt, Human
uuaaaaagccucugucucaa

SEQ ID NO: 1153920 - RNA, 19 nt, Human
uucaacacaggugccaaga

SEQ ID NO: 1153921 - RNA, 18 nt, Human
uucaugagcaggcaaaac

SEQ ID NO: 1153922 - RNA, 19 nt, Human
uuccaagguucuggggcag

SEQ ID NO: 1153923 - RNA, 22 nt, Human
uuggacccaggagguggugguu

SEQ ID NO: 1153924 - RNA, 18 nt, Human
uuguagugagccgaaauc

SEQ ID NO: 1153925 - RNA, 19 nt, Human
uuguagugagccgaaaucu

SEQ ID NO: 1153926 - RNA, 19 nt, Human
uuuuaagaacguguagaug

SEQ ID NO: 1153927 - RNA, 25 nt, Human
aaaaaaaaaaagucacaaaugagaa

SEQ ID NO: 1153928 - RNA, 25 nt, Human
aaacaaaaaaauuacuuuggacuca

SEQ ID NO: 1153929 - RNA, 22 nt, Human
aaacuaaacuuaguaugucgug

SEQ ID NO: 1153930 - RNA, 18 nt, Human
aaagaucacugagaagga

SEQ ID NO: 1153931 - RNA, 20 nt, Human
aaaugaccuagugaauggga

SEQ ID NO: 1153932 - RNA, 22 nt, Human
aacuaagaagagacacaguuca

SEQ ID NO: 1153933 - RNA, 23 nt, Human
aagaagagacacaguucagguca

SEQ ID NO: 1153934 - RNA, 21 nt, Human
aagaguuuccccaccccaaag

SEQ ID NO: 1153935 - RNA, 19 nt, Human
aaggaacaaaagaaacacc

SEQ ID NO: 1153936 - RNA, 24 nt, Human
aaggaacaaaagaaacaccaugug

SEQ ID NO: 1153937 - RNA, 23 nt, Human
aaguagcuccaaaagaaagcuga

SEQ ID NO: 1153938 - RNA, 24 nt, Human
accccaaaguagcuccaaaagaaa

SEQ ID NO: 1153939 - RNA, 21 nt, Human
accuagugaaugggaaaacuc

SEQ ID NO: 1153940 - RNA, 30 nt, Human
agaaauaauagcaagagccaucucuuggcc

SEQ ID NO: 1153941 - RNA, 23 nt, Human
agaacauccaguaucuggaaggu

SEQ ID NO: 1153942 - RNA, 18 nt, Human
agaaucuccucaagcagc

SEQ ID NO: 1153943 - RNA, 20 nt, Human
agaguuuccccaccccaaag

SEQ ID NO: 1153944 - RNA, 21 nt, Human
agcagaaguuucacaugagca

SEQ ID NO: 1153945 - RNA, 21 nt, Human
agcuccaaaagaaagcugaca

SEQ ID NO: 1153946 - RNA, 23 nt, Human
agcuuauugaagaaaagagcuac

SEQ ID NO: 1153947 - RNA, 22 nt, Human
aguggccagugcucaacaaaac

SEQ ID NO: 1153948 - RNA, 22 nt, Human
caaaguagcuccaaaagaaagc

SEQ ID NO: 1153949 - RNA, 20 nt, Human
caagauguagauaucuguug

SEQ ID NO: 1153950 - RNA, 19 nt, Human
caaguuccauggcuuaaga

SEQ ID NO: 1153951 - RNA, 22 nt, Human
cacaguucaggucagagugcag

SEQ ID NO: 1153952 - RNA, 18 nt, Human
caccccaaaguagcucca

SEQ ID NO: 1153953 - RNA, 20 nt, Human
caccucuggcuguagaaucu

SEQ ID NO: 1153954 - RNA, 21 nt, Human
cacucugcccuuacaagucuu

SEQ ID NO: 1153955 - RNA, 19 nt, Human
caguagagcaaguuccaug

SEQ ID NO: 1153956 - RNA, 20 nt, Human
cauucucacucugcccuuac

SEQ ID NO: 1153957 - RNA, 24 nt, Human
ccaucucuuggcaccucuggcugu

SEQ ID NO: 1153958 - RNA, 24 nt, Human
cccuacuuucccagugugucucaa

SEQ ID NO: 1153959 - RNA, 18 nt, Human
ccucccacauucucacuc

SEQ ID NO: 1153960 - RNA, 19 nt, Human
ccucccacauucucacucu

SEQ ID NO: 1153961 - RNA, 21 nt, Human
ccuccuucccuccuccaaucc

SEQ ID NO: 1153962 - RNA, 19 nt, Human
cuccuucccuccuccaauc

SEQ ID NO: 1153963 - RNA, 23 nt, Human
cugagaaggagcaaugauauuag

SEQ ID NO: 1153964 - RNA, 21 nt, Human
cuuuucaugcagaacauccag

SEQ ID NO: 1153965 - RNA, 19 nt, Human
gaaaaagaugucaggaagg

SEQ ID NO: 1153966 - RNA, 25 nt, Human
gaaccugccuuagagucugaacuag

SEQ ID NO: 1153967 - RNA, 22 nt, Human
gaaucuccucaagcagcaguuu

SEQ ID NO: 1153968 - RNA, 30 nt, Human
gaauguccucccacauucucacucugcccu

SEQ ID NO: 1153969 - RNA, 24 nt, Human
gaccuccuucccuccuccaauccu

SEQ ID NO: 1153970 - RNA, 19 nt, Human
gagcaaauuuagcccucca

SEQ ID NO: 1153971 - RNA, 21 nt, Human
ggaaacagaugagaagccgga

SEQ ID NO: 1153972 - RNA, 22 nt, Human
ggaaacagaugagaagccggac

SEQ ID NO: 1153973 - RNA, 21 nt, Human
ggaggggcuggagggaacuug

SEQ ID NO: 1153974 - RNA, 23 nt, Human
ggagggguggaggggcuggaggg

SEQ ID NO: 1153975 - RNA, 19 nt, Human
ggguaggggagggguggag

SEQ ID NO: 1153976 - RNA, 22 nt, Human
ggguaggggagggguggagggg

SEQ ID NO: 1153977 - RNA, 18 nt, Human
guaaaaaaaaaaaaaagu

SEQ ID NO: 1153978 - RNA, 19 nt, Human
guagaaucuccucaagcag

SEQ ID NO: 1153979 - RNA, 22 nt, Human
gucagagugcagcuaggaguga

SEQ ID NO: 1153980 - RNA, 23 nt, Human
guugauuugucacuauccaccuu

SEQ ID NO: 1153981 - RNA, 26 nt, Human
guugcugaccuccuucccuccuccaa

SEQ ID NO: 1153982 - RNA, 22 nt, Human
uaagaagagacacaguucaggu

SEQ ID NO: 1153983 - RNA, 24 nt, Human
uacaaguacucaccacaguugauu

SEQ ID NO: 1153984 - RNA, 24 nt, Human
uagaugaacuaagaagagacacag

SEQ ID NO: 1153985 - RNA, 22 nt, Human
uagcaagagccaucucuuggca

SEQ ID NO: 1153986 - RNA, 24 nt, Human
uaggggagggguggaggggcugga

SEQ ID NO: 1153987 - RNA, 18 nt, Human
uaguaaaaaaaaaaaaaa

SEQ ID NO: 1153988 - RNA, 25 nt, Human
uaguaaaaaaaaaaaaaagucacaa

SEQ ID NO: 1153989 - RNA, 24 nt, Human
uaugaacaacguuagcagaaguuu

SEQ ID NO: 1153990 - RNA, 26 nt, Human
ucuguuguaguaaaaaaaaaaaaaag

SEQ ID NO: 1153991 - RNA, 19 nt, Human
ugaaaccccuuguggcacu

SEQ ID NO: 1153992 - RNA, 21 nt, Human
ugaaaccccuuguggcacugu

SEQ ID NO: 1153993 - RNA, 21 nt, Human
ugaagaaaagagcuacaucac

SEQ ID NO: 1153994 - RNA, 18 nt, Human
ugaccuccuucccuccuc

SEQ ID NO: 1153995 - RNA, 18 nt, Human
ugagaaggagcaaugaua

SEQ ID NO: 1153996 - RNA, 23 nt, Human
ugaguucccuguugcugaccucc

SEQ ID NO: 1153997 - RNA, 18 nt, Human
uggaauauuucuacuuug

SEQ ID NO: 1153998 - RNA, 21 nt, Human
uggaggggcuggagggaacuu

SEQ ID NO: 1153999 - RNA, 24 nt, Human
uggcuguagaaucuccucaagcaa

SEQ ID NO: 1154000 - RNA, 23 nt, Human
ugggaaaacucugggaaacagau

SEQ ID NO: 1154001 - RNA, 26 nt, Human
ugggaaacagaugagaagccggacaa

SEQ ID NO: 1154002 - RNA, 22 nt, Human
ugggcucucgacuauccaguuu

SEQ ID NO: 1154003 - RNA, 19 nt, Human
uguaaaggaacaaaagaaa

SEQ ID NO: 1154004 - RNA, 23 nt, Human
uguaaaggaacaaaagaaacacc

SEQ ID NO: 1154005 - RNA, 21 nt, Human
ugucucaacucugggcucucg

SEQ ID NO: 1154006 - RNA, 25 nt, Human
uguuaagaguuuccccaccccaaag

SEQ ID NO: 1154007 - RNA, 22 nt, Human
uuacauagacuugauuucuaau

SEQ ID NO: 1154008 - RNA, 21 nt, Human
uuccaaguccuuucccugcuc

SEQ ID NO: 1154009 - RNA, 23 nt, Human
uuccccaccccaaaguagcucca

SEQ ID NO: 1154010 - RNA, 24 nt, Human
uuuccagccacuucuguuucuaac

SEQ ID NO: 1154011 - RNA, 26 nt, Human
aaaaauucucaaauugagaaauauua

SEQ ID NO: 1154012 - RNA, 25 nt, Human
aaaguaaaaauucucaaauugagaa

SEQ ID NO: 1154013 - RNA, 18 nt, Human
ccaagcacuaacaugaac

SEQ ID NO: 1154014 - RNA, 20 nt, Human
ggagucagaaacagacuuaa

SEQ ID NO: 1154015 - RNA, 20 nt, Human
ggucccuguuggagucagaa

SEQ ID NO: 1154016 - RNA, 19 nt, Human
ucuugccagucuugaguuc

SEQ ID NO: 1154017 - RNA, 18 nt, Human
uggagucagaaacagacu

SEQ ID NO: 1154018 - RNA, 22 nt, Human
uggagucagaaacagacuuaac

SEQ ID NO: 1154019 - RNA, 19 nt, Human
aagaugaaucuugaacuca

SEQ ID NO: 1154020 - RNA, 19 nt, Human
acaggauucugaagaugaa

SEQ ID NO: 1154021 - RNA, 23 nt, Human
caaggaaagccacauaauccguc

SEQ ID NO: 1154022 - RNA, 26 nt, Human
cauccuuguucuaauaagccuuucac

SEQ ID NO: 1154023 - RNA, 20 nt, Human
ccagggccccugcaacuggc

SEQ ID NO: 1154024 - RNA, 22 nt, Human
ccauccuuguucuaauaagccu

SEQ ID NO: 1154025 - RNA, 19 nt, Human
gcucugauaagggaauaaa

SEQ ID NO: 1154026 - RNA, 18 nt, Human
gguauugggggaagugga

SEQ ID NO: 1154027 - RNA, 18 nt, Human
uaagucagucuucaagga

SEQ ID NO: 1154028 - RNA, 19 nt, Human
ucaaggaaagccacauaau

SEQ ID NO: 1154029 - RNA, 22 nt, Human
ucagagugauaagucagucuuc

SEQ ID NO: 1154030 - RNA, 23 nt, Human
ucagucuggcuaacugcuguuca

SEQ ID NO: 1154031 - RNA, 23 nt, Human
ucuugugguggaaucaacuugcc

SEQ ID NO: 1154032 - RNA, 18 nt, Human
uggaaucaacuugccauc

SEQ ID NO: 1154033 - RNA, 21 nt, Human
ugggcagaaccauucuugugg

SEQ ID NO: 1154034 - RNA, 20 nt, Human
ugggggaaguggagcaggcu

SEQ ID NO: 1154035 - RNA, 18 nt, Human
uggguauugggggaagug

SEQ ID NO: 1154036 - RNA, 24 nt, Human
uuaaaggaaacauccagggccccu

SEQ ID NO: 1154037 - RNA, 24 nt, Human
aaagugcugggauuacaggcguga

SEQ ID NO: 1154038 - RNA, 19 nt, Human
aagugcugggauuacaggc

SEQ ID NO: 1154039 - RNA, 19 nt, Human
aagugcugggauuacaggc

SEQ ID NO: 1154040 - RNA, 26 nt, Human
aagugcugggauuacaggcgugagcc

SEQ ID NO: 1154041 - RNA, 24 nt, Human
aaugauucuuuggccucagccuuc

SEQ ID NO: 1154042 - RNA, 23 nt, Human
acacacacacaugcacacacaca

SEQ ID NO: 1154043 - RNA, 24 nt, Human
accauguuggccaggcuggucuug

SEQ ID NO: 1154044 - RNA, 25 nt, Human
acccgccucagccucccaaagugcu

SEQ ID NO: 1154045 - RNA, 22 nt, Human
accuagagccacacugcuggca

SEQ ID NO: 1154046 - RNA, 24 nt, Human
agaggugggguuucaccauguugg

SEQ ID NO: 1154047 - RNA, 23 nt, Human
agccuggggacaaaguuagcucc

SEQ ID NO: 1154048 - RNA, 22 nt, Human
aggcaaggccauucccugugcu

SEQ ID NO: 1154049 - RNA, 23 nt, Human
aggcucccagcagcccgcauacc

SEQ ID NO: 1154050 - RNA, 25 nt, Human
aggcuggagugcaguggcgcaaucu

SEQ ID NO: 1154051 - RNA, 24 nt, Human
aggggauagaauggggcaggggaa

SEQ ID NO: 1154052 - RNA, 23 nt, Human
aggggucagcucugacagccugg

SEQ ID NO: 1154053 - RNA, 18 nt, Human
aguagcuuggauuacagg

SEQ ID NO: 1154054 - RNA, 21 nt, Human
agugcaguggcgcaaucucag

SEQ ID NO: 1154055 - RNA, 18 nt, Human
agugcugggauuacaggc

SEQ ID NO: 1154056 - RNA, 19 nt, Human
auccacccgccucagccuc

SEQ ID NO: 1154057 - RNA, 23 nt, Human
auccucuuuagagaaauguauac

SEQ ID NO: 1154058 - RNA, 24 nt, Human
augauucuuuggccucagccuucc

SEQ ID NO: 1154059 - RNA, 23 nt, Human
caaagccuuugaucucccccaca

SEQ ID NO: 1154060 - RNA, 24 nt, Human
caaagugcugggauuacaggcgug

SEQ ID NO: 1154061 - RNA, 20 nt, Human
caaccuccgccucccggguu

SEQ ID NO: 1154062 - RNA, 23 nt, Human
cacacaugcacacacacaccaca

SEQ ID NO: 1154063 - RNA, 18 nt, Human
cacaugcacacacacacc

SEQ ID NO: 1154064 - RNA, 21 nt, Human
caccauguuggccaggcuggu

SEQ ID NO: 1154065 - RNA, 24 nt, Human
caccauguuggccaggcuggucuu

SEQ ID NO: 1154066 - RNA, 27 nt, Human
caccauguuggccaggcuggucuugaa

SEQ ID NO: 1154067 - RNA, 23 nt, Human
cacccgccucagccucccaaagu

SEQ ID NO: 1154068 - RNA, 24 nt, Human
cacgcgcauccacacgaggucaug

SEQ ID NO: 1154069 - RNA, 21 nt, Human
cacugcaaccuccgccucccg

SEQ ID NO: 1154070 - RNA, 23 nt, Human
cacugcaaccuccgccucccggg

SEQ ID NO: 1154071 - RNA, 23 nt, Human
cagaaggcuaggugaggggcaag

SEQ ID NO: 1154072 - RNA, 24 nt, Human
cagacagugcucucaggcucccag

SEQ ID NO: 1154073 - RNA, 23 nt, Human
caggcuccaggacucaggggagg

SEQ ID NO: 1154074 - RNA, 23 nt, Human
caggguggcucugggccaaugcc

SEQ ID NO: 1154075 - RNA, 24 nt, Human
cauguuggccaggcuggucuugaa

SEQ ID NO: 1154076 - RNA, 20 nt, Human
ccaaagugcugggauuacag

SEQ ID NO: 1154077 - RNA, 22 nt, Human
ccaaagugcugggauuacaggc

SEQ ID NO: 1154078 - RNA, 22 nt, Human
ccaaagugcugggauuacaggc

SEQ ID NO: 1154079 - RNA, 24 nt, Human
ccaaagugcugggauuacaggcgu

SEQ ID NO: 1154080 - RNA, 18 nt, Human
ccacacugcuggcagagu

SEQ ID NO: 1154081 - RNA, 26 nt, Human
ccacccgccucagccucccaaagugc

SEQ ID NO: 1154082 - RNA, 21 nt, Human
ccagauaauccuugaccucau

SEQ ID NO: 1154083 - RNA, 19 nt, Human
ccaguguggcccacucccc

SEQ ID NO: 1154084 - RNA, 19 nt, Human
cccacaaagccucuaccuc

SEQ ID NO: 1154085 - RNA, 24 nt, Human
cccaccucccggcuuacacacaca

SEQ ID NO: 1154086 - RNA, 21 nt, Human
cccagccugcacauccucuuu

SEQ ID NO: 1154087 - RNA, 22 nt, Human
cccagccugcacauccucuuua

SEQ ID NO: 1154088 - RNA, 19 nt, Human
ccccagagcaggggauaga

SEQ ID NO: 1154089 - RNA, 19 nt, Human
ccccagcauggcugccucc

SEQ ID NO: 1154090 - RNA, 24 nt, Human
ccccagccucucugcagggcuuug

SEQ ID NO: 1154091 - RNA, 23 nt, Human
cccccuggagcugcccugacucc

SEQ ID NO: 1154092 - RNA, 21 nt, Human
ccccuggagcugcccugacuc

SEQ ID NO: 1154093 - RNA, 22 nt, Human
ccccuggagcugcccugacucc

SEQ ID NO: 1154094 - RNA, 26 nt, Human
cccugccacgcagacacgcgcaucca

SEQ ID NO: 1154095 - RNA, 23 nt, Human
cccugugcugggccucagcuuuc

SEQ ID NO: 1154096 - RNA, 23 nt, Human
ccgccucagccucccaaagugcu

SEQ ID NO: 1154097 - RNA, 24 nt, Human
ccgccucccggguucaaaugauuc

SEQ ID NO: 1154098 - RNA, 22 nt, Human
ccucaugugauccacccgccuc

SEQ ID NO: 1154099 - RNA, 19 nt, Human
ccuccccucucuauccuca

SEQ ID NO: 1154100 - RNA, 20 nt, Human
ccuccugcagaaggcuaggu

SEQ ID NO: 1154101 - RNA, 22 nt, Human
ccuggccucaugugauccaccc

SEQ ID NO: 1154102 - RNA, 20 nt, Human
ccuguguuagcggccccagc

SEQ ID NO: 1154103 - RNA, 24 nt, Human
cgcccccuggagcugcccugacuc

SEQ ID NO: 1154104 - RNA, 24 nt, Human
cgccucagccucccaaagugcugg

SEQ ID NO: 1154105 - RNA, 24 nt, Human
cgcucuguugcccaggcuggagug

SEQ ID NO: 1154106 - RNA, 24 nt, Human
cucacugcaaccuccgccucccgg

SEQ ID NO: 1154107 - RNA, 21 nt, Human
cucaggggaggggcccuggcc

SEQ ID NO: 1154108 - RNA, 30 nt, Human
cucccggcuuacacacacacaugcacacag

SEQ ID NO: 1154109 - RNA, 19 nt, Human
cuccuccagcucagcgucc

SEQ ID NO: 1154110 - RNA, 24 nt, Human
cuccugcccugccacccauuccca

SEQ ID NO: 1154111 - RNA, 24 nt, Human
cucgcucuguugcccaggcuggag

SEQ ID NO: 1154112 - RNA, 19 nt, Human
cucucaggcucccagcagc

SEQ ID NO: 1154113 - RNA, 21 nt, Human
cucucugcagggcuuugcucu

SEQ ID NO: 1154114 - RNA, 24 nt, Human
cugcaaccuccgccucccggguuc

SEQ ID NO: 1154115 - RNA, 22 nt, Human
cugcaggugugugcaccucccu

SEQ ID NO: 1154116 - RNA, 24 nt, Human
cuggccccagagcaggggauagaa

SEQ ID NO: 1154117 - RNA, 20 nt, Human
cuuggauuacaggcaccggc

SEQ ID NO: 1154118 - RNA, 25 nt, Human
cuuuggccucagccuuccgaguagc

SEQ ID NO: 1154119 - RNA, 18 nt, Human
gacagcucagacagugcu

SEQ ID NO: 1154120 - RNA, 21 nt, Human
gagauggagucucgcucuguu

SEQ ID NO: 1154121 - RNA, 22 nt, Human
gaggggcaagcgcaacagagaa

SEQ ID NO: 1154122 - RNA, 20 nt, Human
gaggugggguuucaccaugu

SEQ ID NO: 1154123 - RNA, 24 nt, Human
gaggugggguuucaccauguuggc

SEQ ID NO: 1154124 - RNA, 18 nt, Human
gauuacaggcgugagcca

SEQ ID NO: 1154125 - RNA, 21 nt, Human
gauuacaggcgugagccacca

SEQ ID NO: 1154126 - RNA, 22 nt, Human
gauuacaggcgugagccaccac

SEQ ID NO: 1154127 - RNA, 21 nt, Human
gcccagauaauccuugaccuc

SEQ ID NO: 1154128 - RNA, 20 nt, Human
gcccagccugcacauccucu

SEQ ID NO: 1154129 - RNA, 24 nt, Human
gccuauuuuuuaguuggguuguuu

SEQ ID NO: 1154130 - RNA, 19 nt, Human
gccucagcuuucccacccg

SEQ ID NO: 1154131 - RNA, 22 nt, Human
gcucugacagccuggggacaaa

SEQ ID NO: 1154132 - RNA, 25 nt, Human
gcucuguugcccaggcuggagugca

SEQ ID NO: 1154133 - RNA, 19 nt, Human
gcuggagugcaguggcgca

SEQ ID NO: 1154134 - RNA, 23 nt, Human
gcuggucuugaacuccuggccuc

SEQ ID NO: 1154135 - RNA, 25 nt, Human
gcuuacacacacacaugcacacaca

SEQ ID NO: 1154136 - RNA, 23 nt, Human
ggagucucgcucuguugcccagg

SEQ ID NO: 1154137 - RNA, 19 nt, Human
ggauuacaggcaccggcca

SEQ ID NO: 1154138 - RNA, 20 nt, Human
ggauuacaggcaccggccau

SEQ ID NO: 1154139 - RNA, 22 nt, Human
ggauuacaggcaccggccauca

SEQ ID NO: 1154140 - RNA, 24 nt, Human
ggauuacaggcaccggccaucaug

SEQ ID NO: 1154141 - RNA, 19 nt, Human
ggauuacaggcgugagcca

SEQ ID NO: 1154142 - RNA, 24 nt, Human
ggcuggucuugaacuccuggccuc

SEQ ID NO: 1154143 - RNA, 24 nt, Human
gggccucagcuuucccacccgugg

SEQ ID NO: 1154144 - RNA, 19 nt, Human
ggggcaagcgcaacagaga

SEQ ID NO: 1154145 - RNA, 22 nt, Human
gggguuucaccauguuggccag

SEQ ID NO: 1154146 - RNA, 21 nt, Human
gguuguuuggggggugguuuu

SEQ ID NO: 1154147 - RNA, 19 nt, Human
guagaggugggguuucacc

SEQ ID NO: 1154148 - RNA, 21 nt, Human
guagaggugggguuucaccau

SEQ ID NO: 1154149 - RNA, 22 nt, Human
guagaggugggguuucaccaug

SEQ ID NO: 1154150 - RNA, 21 nt, Human
gucacucaggcaaggccauuc

SEQ ID NO: 1154151 - RNA, 24 nt, Human
gucucgcucuguugcccaggcugg

SEQ ID NO: 1154152 - RNA, 20 nt, Human
gucuugaacuccuggccuca

SEQ ID NO: 1154153 - RNA, 24 nt, Human
gugauccacccgccucagccuccc

SEQ ID NO: 1154154 - RNA, 19 nt, Human
guggcucugggccaaugcc

SEQ ID NO: 1154155 - RNA, 20 nt, Human
guggcucugggccaaugccc

SEQ ID NO: 1154156 - RNA, 18 nt, Human
gugggguuucaccauguu

SEQ ID NO: 1154157 - RNA, 23 nt, Human
gugggguuucaccauguuggcca

SEQ ID NO: 1154158 - RNA, 24 nt, Human
gugggguuucaccauguuggccag

SEQ ID NO: 1154159 - RNA, 20 nt, Human
uaacaugucacccaccuccc

SEQ ID NO: 1154160 - RNA, 22 nt, Human
uaauucuuguauuuuuguagag

SEQ ID NO: 1154161 - RNA, 23 nt, Human
uaauucuuguauuuuuguagagg

SEQ ID NO: 1154162 - RNA, 24 nt, Human
uacacacacacaugcacacacaca

SEQ ID NO: 1154163 - RNA, 27 nt, Human
uacacacacacaugcacacacacacca

SEQ ID NO: 1154164 - RNA, 24 nt, Human
uacaggcgugagccaccacgccca

SEQ ID NO: 1154165 - RNA, 18 nt, Human
uaccucugaccuagagcc

SEQ ID NO: 1154166 - RNA, 20 nt, Human
uagcggccccagcauggcug

SEQ ID NO: 1154167 - RNA, 31 nt, Human
ucacaucaagccugcgugaaucaucuccucu

SEQ ID NO: 1154168 - RNA, 20 nt, Human
ucacccaccucccggcuuac

SEQ ID NO: 1154169 - RNA, 23 nt, Human
ucacugcaaccuccgccucccgg

SEQ ID NO: 1154170 - RNA, 23 nt, Human
ucacugcaaccuccgccucccgg

SEQ ID NO: 1154171 - RNA, 24 nt, Human
ucacugcaaccuccgccucccggg

SEQ ID NO: 1154172 - RNA, 26 nt, Human
ucacugcaaccuccgccucccggguu

SEQ ID NO: 1154173 - RNA, 21 nt, Human
uccacccgccucagccuccca

SEQ ID NO: 1154174 - RNA, 24 nt, Human
ucccaaagugcugggauuacaggc

SEQ ID NO: 1154175 - RNA, 18 nt, Human
ucccagcagcccgcauac

SEQ ID NO: 1154176 - RNA, 19 nt, Human
uccccacaaagccucuacc

SEQ ID NO: 1154177 - RNA, 20 nt, Human
ucccggguucaaaugauucu

SEQ ID NO: 1154178 - RNA, 23 nt, Human
ucccggguucaaaugauucuuug

SEQ ID NO: 1154179 - RNA, 23 nt, Human
uccgaguagcuuggauuacaggc

SEQ ID NO: 1154180 - RNA, 24 nt, Human
uccgaguagcuuggauuacaggca

SEQ ID NO: 1154181 - RNA, 19 nt, Human
uccuggguccuggccugca

SEQ ID NO: 1154182 - RNA, 24 nt, Human
ucgcucuguugcccaggcuggagu

SEQ ID NO: 1154183 - RNA, 19 nt, Human
ucucgcucuguugcccagg

SEQ ID NO: 1154184 - RNA, 23 nt, Human
ucucgcucuguugcccaggcugg

SEQ ID NO: 1154185 - RNA, 24 nt, Human
ucucgcucuguugcccaggcugga

SEQ ID NO: 1154186 - RNA, 26 nt, Human
ucucgcucuguugcccaggcuggagu

SEQ ID NO: 1154187 - RNA, 27 nt, Human
ucucgcucuguugcccaggcuggagug

SEQ ID NO: 1154188 - RNA, 18 nt, Human
ucuguugcccaggcugga

SEQ ID NO: 1154189 - RNA, 21 nt, Human
ucuugaacuccuggccucaug

SEQ ID NO: 1154190 - RNA, 21 nt, Human
ugaaaaggcgcccccuggagc

SEQ ID NO: 1154191 - RNA, 19 nt, Human
ugacuccuggguccuggcc

SEQ ID NO: 1154192 - RNA, 20 nt, Human
ugacuccuggguccuggccu

SEQ ID NO: 1154193 - RNA, 18 nt, Human
ugcaccucccuccaccac

SEQ ID NO: 1154194 - RNA, 22 nt, Human
ugcaguggcgcaaucucagcuc

SEQ ID NO: 1154195 - RNA, 23 nt, Human
ugcaguggcgcaaucucagcuca

SEQ ID NO: 1154196 - RNA, 18 nt, Human
ugcccaggcuggagugca

SEQ ID NO: 1154197 - RNA, 21 nt, Human
ugcccaggcuggagugcagug

SEQ ID NO: 1154198 - RNA, 22 nt, Human
ugcccaggcuggagugcagugg

SEQ ID NO: 1154199 - RNA, 24 nt, Human
ugcccaggcuggagugcaguggcg

SEQ ID NO: 1154200 - RNA, 18 nt, Human
ugcccugacuccuggguc

SEQ ID NO: 1154201 - RNA, 19 nt, Human
ugcccugccacccauuccc

SEQ ID NO: 1154202 - RNA, 25 nt, Human
ugcgugaaucaucuccucgaggaag

SEQ ID NO: 1154203 - RNA, 21 nt, Human
ugcucucaggcucccagcagc

SEQ ID NO: 1154204 - RNA, 24 nt, Human
ugcugggauuacaggcgugagcca

SEQ ID NO: 1154205 - RNA, 24 nt, Human
uggagucucgcucuguugcccagg

SEQ ID NO: 1154206 - RNA, 18 nt, Human
uggagugcaguggcgcaa

SEQ ID NO: 1154207 - RNA, 23 nt, Human
uggagugcaguggcgcaaucuca

SEQ ID NO: 1154208 - RNA, 24 nt, Human
uggagugcaguggcgcaaucucag

SEQ ID NO: 1154209 - RNA, 19 nt, Human
uggauuacaggcaccggcc

SEQ ID NO: 1154210 - RNA, 20 nt, Human
uggauuacaggcaccggcca

SEQ ID NO: 1154211 - RNA, 20 nt, Human
uggauuacaggcaccggcca

SEQ ID NO: 1154212 - RNA, 24 nt, Human
uggccaggcuggucuugaacuccu

SEQ ID NO: 1154213 - RNA, 22 nt, Human
uggcccacuccccacucaaagc

SEQ ID NO: 1154214 - RNA, 24 nt, Human
uggccucagccuuccgaguagcuu

SEQ ID NO: 1154215 - RNA, 24 nt, Human
uggcgcaaucucagcucacugcaa

SEQ ID NO: 1154216 - RNA, 20 nt, Human
uggcucugggccaaugcccc

SEQ ID NO: 1154217 - RNA, 18 nt, Human
ugggauuacaggcgugag

SEQ ID NO: 1154218 - RNA, 19 nt, Human
ugggauuacaggcgugagc

SEQ ID NO: 1154219 - RNA, 22 nt, Human
ugggauuacaggcgugagccac

SEQ ID NO: 1154220 - RNA, 23 nt, Human
ugggauuacaggcgugagccacc

SEQ ID NO: 1154221 - RNA, 24 nt, Human
ugggauuacaggcgugagccacca

SEQ ID NO: 1154222 - RNA, 21 nt, Human
ugggguuucaccauguuggcc

SEQ ID NO: 1154223 - RNA, 24 nt, Human
ugggguuucaccauguuggccagg

SEQ ID NO: 1154224 - RNA, 22 nt, Human
uggguccuggccugcaaggugu

SEQ ID NO: 1154225 - RNA, 24 nt, Human
uguagaggugggguuucaccaugu

SEQ ID NO: 1154226 - RNA, 21 nt, Human
uguauacauacaaguccuuug

SEQ ID NO: 1154227 - RNA, 25 nt, Human
ugucacccaccucccggcuuacaca

SEQ ID NO: 1154228 - RNA, 24 nt, Human
ugugauccacccgccucagccucc

SEQ ID NO: 1154229 - RNA, 21 nt, Human
ugugcugggccucagcuuucc

SEQ ID NO: 1154230 - RNA, 21 nt, Human
uguugcccaggcuggagugca

SEQ ID NO: 1154231 - RNA, 21 nt, Human
uuaguuggguuguuugggggg

SEQ ID NO: 1154232 - RNA, 25 nt, Human
uucaaaugauucuuugggacuccgg

SEQ ID NO: 1154233 - RNA, 24 nt, Human
uugcccaggcuggagugcaguggc

SEQ ID NO: 1154234 - RNA, 22 nt, Human
uuggauuacaggcaccggccau

SEQ ID NO: 1154235 - RNA, 24 nt, Human
uuggauuacaggcaccggccauca

SEQ ID NO: 1154236 - RNA, 24 nt, Human
uuggccucagccuuccgaguagcu

SEQ ID NO: 1154237 - RNA, 18 nt, Human
uugguggacaugcaguga

SEQ ID NO: 1154238 - RNA, 24 nt, Human
uuguagaggugggguuucaccaug

SEQ ID NO: 1154239 - RNA, 24 nt, Human
uuucaccauguuggccaggcuggu

SEQ ID NO: 1154240 - RNA, 24 nt, Human
uuuguagaggugggguuucaccau

SEQ ID NO: 1154241 - RNA, 23 nt, Human
uuuuuguagaggugggguuucac

SEQ ID NO: 1154242 - RNA, 22 nt, Human
aaaaaaaaaaucaguaauagga

SEQ ID NO: 1154243 - RNA, 22 nt, Human
aaaaaacuggucucacagcuua

SEQ ID NO: 1154244 - RNA, 19 nt, Human
aaaaagggacacaacuggg

SEQ ID NO: 1154245 - RNA, 24 nt, Human
aaacauuucaaagcaauggaauuc

SEQ ID NO: 1154246 - RNA, 22 nt, Human
aaaugaggcugcaaacuacccc

SEQ ID NO: 1154247 - RNA, 18 nt, Human
aaaugcacaggacaacac

SEQ ID NO: 1154248 - RNA, 20 nt, Human
aacuaccccugaauggccac

SEQ ID NO: 1154249 - RNA, 18 nt, Human
aagcaauggaauucaaaa

SEQ ID NO: 1154250 - RNA, 26 nt, Human
caaggaaaguuaaaaaaaaaaaucag

SEQ ID NO: 1154251 - RNA, 18 nt, Human
cauuguagcugcuucugc

SEQ ID NO: 1154252 - RNA, 30 nt, Human
ccccugaauggccacgauuuccuggagcuu

SEQ ID NO: 1154253 - RNA, 20 nt, Human
ccccugacggccauuguagc

SEQ ID NO: 1154254 - RNA, 18 nt, Human
ccuccugcuguaaggaau

SEQ ID NO: 1154255 - RNA, 22 nt, Human
ccugacggccauuguagcugcu

SEQ ID NO: 1154256 - RNA, 18 nt, Human
cuuggcccuggcuauagc

SEQ ID NO: 1154257 - RNA, 27 nt, Human
gccccugacggccauuguagcugcuuc

SEQ ID NO: 1154258 - RNA, 22 nt, Human
ggcuauagcaggacccacaacc

SEQ ID NO: 1154259 - RNA, 24 nt, Human
uaaaaaaaaaaaucaguaauagga

SEQ ID NO: 1154260 - RNA, 28 nt, Human
uacaaaugaggcugcaaacuaccccuga

SEQ ID NO: 1154261 - RNA, 18 nt, Human
uaccauggguacugggua

SEQ ID NO: 1154262 - RNA, 22 nt, Human
uaccccugaauggccacgauuu

SEQ ID NO: 1154263 - RNA, 18 nt, Human
uccuggagcuuggcccug

SEQ ID NO: 1154264 - RNA, 21 nt, Human
ugcaaacuaccccugaauggc

SEQ ID NO: 1154265 - RNA, 23 nt, Human
ugcacaggacaacacaauaaugu

SEQ ID NO: 1154266 - RNA, 26 nt, Human
ugcucaggcucaagggcagccuccug

SEQ ID NO: 1154267 - RNA, 19 nt, Human
uguaaggaaucaaagcuua

SEQ ID NO: 1154268 - RNA, 23 nt, Human
uucaaagcaauggaauucaaaaa

SEQ ID NO: 1154269 - RNA, 24 nt, Human
aaaaaguacugauuuuaaaaacua

SEQ ID NO: 1154270 - RNA, 19 nt, Human
aguuguuuccauuaaaaag

SEQ ID NO: 1154271 - RNA, 21 nt, Human
aaauuaaguuuauuuuuucca

SEQ ID NO: 1154272 - RNA, 21 nt, Human
acccucuguugccccuccccu

SEQ ID NO: 1154273 - RNA, 22 nt, Human
acucaaacacaaagggacccag

SEQ ID NO: 1154274 - RNA, 22 nt, Human
agaacucgaacccucaugcccc

SEQ ID NO: 1154275 - RNA, 22 nt, Human
agacgcugggagcccuggcuuc

SEQ ID NO: 1154276 - RNA, 23 nt, Human
agagagcaagaggaaguaggaga

SEQ ID NO: 1154277 - RNA, 22 nt, Human
agagaggaaagcaauaauccag

SEQ ID NO: 1154278 - RNA, 19 nt, Human
agcaagaggaaguaggaga

SEQ ID NO: 1154279 - RNA, 21 nt, Human
agcaagaggaaguaggagaaa

SEQ ID NO: 1154280 - RNA, 19 nt, Human
aggcauccuguucccagug

SEQ ID NO: 1154281 - RNA, 21 nt, Human
aguaauaauaacaauuucaca

SEQ ID NO: 1154282 - RNA, 22 nt, Human
aguuccaaaucagcccaacuuc

SEQ ID NO: 1154283 - RNA, 19 nt, Human
aguuuggguaggaaaaaag

SEQ ID NO: 1154284 - RNA, 22 nt, Human
auggguuucuucuggagugguc

SEQ ID NO: 1154285 - RNA, 21 nt, Human
caaaauaccaugcagaucccc

SEQ ID NO: 1154286 - RNA, 18 nt, Human
caaagugggucuaccugu

SEQ ID NO: 1154287 - RNA, 22 nt, Human
caccaaacccuacccuuucugg

SEQ ID NO: 1154288 - RNA, 24 nt, Human
cacgcgcgcgcacgcugucgcggu

SEQ ID NO: 1154289 - RNA, 21 nt, Human
cacuagagaggaaagcaauaa

SEQ ID NO: 1154290 - RNA, 20 nt, Human
cacuguccuggcaggaacau

SEQ ID NO: 1154291 - RNA, 18 nt, Human
cagcagaaagcuuauucu

SEQ ID NO: 1154292 - RNA, 26 nt, Human
cagcggcagaggccgaacuagcgcag

SEQ ID NO: 1154293 - RNA, 22 nt, Human
caggaacauuuccaaagccucc

SEQ ID NO: 1154294 - RNA, 25 nt, Human
caggugucucucaccaaacccuacc

SEQ ID NO: 1154295 - RNA, 25 nt, Human
cauccuugcguuauugagcucggag

SEQ ID NO: 1154296 - RNA, 23 nt, Human
cauuccugacuacccuggagcgu

SEQ ID NO: 1154297 - RNA, 19 nt, Human
ccacgcugaaggcuugggg

SEQ ID NO: 1154298 - RNA, 24 nt, Human
cccacuccccacaauacucaaaca

SEQ ID NO: 1154299 - RNA, 26 nt, Human
cccacuccccacaauacucaaacaca

SEQ ID NO: 1154300 - RNA, 20 nt, Human
cccagugagggaaaugaaau

SEQ ID NO: 1154301 - RNA, 19 nt, Human
cccccgcugccccuuuccc

SEQ ID NO: 1154302 - RNA, 22 nt, Human
ccccuuuccccuuuuagagacc

SEQ ID NO: 1154303 - RNA, 18 nt, Human
cccgcgacauuccugacu

SEQ ID NO: 1154304 - RNA, 25 nt, Human
cccgcugccccuuuccccuuuuaga

SEQ ID NO: 1154305 - RNA, 23 nt, Human
cccggcacugaccuaggcauccu

SEQ ID NO: 1154306 - RNA, 18 nt, Human
cccucuguugccccuccc

SEQ ID NO: 1154307 - RNA, 25 nt, Human
ccgccucacuggggagccccgcgac

SEQ ID NO: 1154308 - RNA, 21 nt, Human
ccucacuggggagccccgcga

SEQ ID NO: 1154309 - RNA, 24 nt, Human
ccucuguugccccuccccuuuguu

SEQ ID NO: 1154310 - RNA, 24 nt, Human
ccuguggcggggguuuggaggaac

SEQ ID NO: 1154311 - RNA, 28 nt, Human
cgcgcgccucaggccacgcgcgcgcacg

SEQ ID NO: 1154312 - RNA, 22 nt, Human
cggcagaggccgaacuagcgca

SEQ ID NO: 1154313 - RNA, 23 nt, Human
cgggaccuaggacagaacucgaa

SEQ ID NO: 1154314 - RNA, 23 nt, Human
cuagaguaggauuggaaucuguc

SEQ ID NO: 1154315 - RNA, 22 nt, Human
cuaggacagaacucgaacccuc

SEQ ID NO: 1154316 - RNA, 23 nt, Human
cucccugcguccucagguuccac

SEQ ID NO: 1154317 - RNA, 19 nt, Human
cucucaccaaacccuaccc

SEQ ID NO: 1154318 - RNA, 18 nt, Human
cugccaggccucuguggg

SEQ ID NO: 1154319 - RNA, 21 nt, Human
cugcuuagggaaagggacaau

SEQ ID NO: 1154320 - RNA, 25 nt, Human
cuuuucgcucccgccucacugggga

SEQ ID NO: 1154321 - RNA, 22 nt, Human
gaccauuucaacuccaagacag

SEQ ID NO: 1154322 - RNA, 23 nt, Human
gcacugaccuaggcauccuguuc

SEQ ID NO: 1154323 - RNA, 19 nt, Human
gcagaguugguagcugaga

SEQ ID NO: 1154324 - RNA, 24 nt, Human
gcccacuccccacaauacucaaac

SEQ ID NO: 1154325 - RNA, 20 nt, Human
gccccggccacuuucuuccu

SEQ ID NO: 1154326 - RNA, 22 nt, Human
gcgacauuccugacuacccugg

SEQ ID NO: 1154327 - RNA, 23 nt, Human
ggauuggaaucugucggcaacca

SEQ ID NO: 1154328 - RNA, 18 nt, Human
gguagcugagaggccagc

SEQ ID NO: 1154329 - RNA, 19 nt, Human
gucaugaguagugaggggu

SEQ ID NO: 1154330 - RNA, 21 nt, Human
uaaaacacccaaaggcuguag

SEQ ID NO: 1154331 - RNA, 20 nt, Human
uaaacgacgugaccuaaggc

SEQ ID NO: 1154332 - RNA, 24 nt, Human
uaccaugcagauccccaaggacuu

SEQ ID NO: 1154333 - RNA, 20 nt, Human
uagcccacuccccacaauac

SEQ ID NO: 1154334 - RNA, 19 nt, Human
uagugacauguaaacgacg

SEQ ID NO: 1154335 - RNA, 23 nt, Human
ucaaauggaaaccgcccaguaaa

SEQ ID NO: 1154336 - RNA, 19 nt, Human
ucaaguggaaacccuagaa

SEQ ID NO: 1154337 - RNA, 20 nt, Human
ucagcgcgcgccucaggcca

SEQ ID NO: 1154338 - RNA, 22 nt, Human
ucagcgcgcgccucaggccacg

SEQ ID NO: 1154339 - RNA, 19 nt, Human
ucaggccacgcgcgcgcac

SEQ ID NO: 1154340 - RNA, 23 nt, Human
uccaaagccucccucccugcguc

SEQ ID NO: 1154341 - RNA, 25 nt, Human
uccaaagccucccucccugcguccu

SEQ ID NO: 1154342 - RNA, 21 nt, Human
ucuaccuguucaaaugaaagu

SEQ ID NO: 1154343 - RNA, 18 nt, Human
ucucuucccccgcugccc

SEQ ID NO: 1154344 - RNA, 21 nt, Human
ucuuacuaaaacacccaaagg

SEQ ID NO: 1154345 - RNA, 26 nt, Human
ugaaaugauaagcuccacaaaguggg

SEQ ID NO: 1154346 - RNA, 23 nt, Human
ugaccuaggcauccuguucccag

SEQ ID NO: 1154347 - RNA, 20 nt, Human
ugccaggccucugugggccu

SEQ ID NO: 1154348 - RNA, 20 nt, Human
ugccccggccacuuucuucc

SEQ ID NO: 1154349 - RNA, 20 nt, Human
uggaguggucccuguggcgg

SEQ ID NO: 1154350 - RNA, 18 nt, Human
uggcaggaacauuuccaa

SEQ ID NO: 1154351 - RNA, 21 nt, Human
uggcaggaacauuuccaaagc

SEQ ID NO: 1154352 - RNA, 19 nt, Human
ugggacccaggauucuuac

SEQ ID NO: 1154353 - RNA, 19 nt, Human
ugggaggcuggggaaaugc

SEQ ID NO: 1154354 - RNA, 20 nt, Human
uggguaggaaaaaaggcacu

SEQ ID NO: 1154355 - RNA, 22 nt, Human
ugguagcugagaggccagcaga

SEQ ID NO: 1154356 - RNA, 20 nt, Human
uguccuggcaggaacauuuc

SEQ ID NO: 1154357 - RNA, 23 nt, Human
uucacuagagaggaaagcaauaa

SEQ ID NO: 1154358 - RNA, 18 nt, Human
uuccaaaucagcccaacu

SEQ ID NO: 1154359 - RNA, 19 nt, Human
uuccagugggaaggaagug

SEQ ID NO: 1154360 - RNA, 21 nt, Human
uugaagaccuuagugauuaga

SEQ ID NO: 1154361 - RNA, 20 nt, Human
uuucuggucucuaggccagg

SEQ ID NO: 1154362 - RNA, 23 nt, Human
aaaaaacagaaagauagcaucac

SEQ ID NO: 1154363 - RNA, 21 nt, Human
aaaaagacaaaaacaaaauaa

SEQ ID NO: 1154364 - RNA, 23 nt, Human
aaaaaguaaacaacgaaaucaga

SEQ ID NO: 1154365 - RNA, 24 nt, Human
aaaacgcgccgaguagcagcuccg

SEQ ID NO: 1154366 - RNA, 23 nt, Human
aaaagaaaaaaaacuccaacaaa

SEQ ID NO: 1154367 - RNA, 20 nt, Human
aaacaaaauaauaaaaauaa

SEQ ID NO: 1154368 - RNA, 24 nt, Human
aaacaacgaaaucagaggcagaau

SEQ ID NO: 1154369 - RNA, 19 nt, Human
aaacaccagcuugccauga

SEQ ID NO: 1154370 - RNA, 22 nt, Human
aaacagaaagauagcaucacaa

SEQ ID NO: 1154371 - RNA, 23 nt, Human
aaacugucaaagacacccuucaa

SEQ ID NO: 1154372 - RNA, 20 nt, Human
aaagauagcaucacaaacca

SEQ ID NO: 1154373 - RNA, 23 nt, Human
aaaguaaacaacgaaaucagagg

SEQ ID NO: 1154374 - RNA, 21 nt, Human
aaauaaauacaaagacaccua

SEQ ID NO: 1154375 - RNA, 23 nt, Human
aacccuugaguuuggacauucaa

SEQ ID NO: 1154376 - RNA, 23 nt, Human
aacuccaacaaacuaaagagcau

SEQ ID NO: 1154377 - RNA, 19 nt, Human
aagacaggacaccucuaua

SEQ ID NO: 1154378 - RNA, 18 nt, Human
aagcaaaugcaaagaauc

SEQ ID NO: 1154379 - RNA, 20 nt, Human
aagcaggaccccacaacuga

SEQ ID NO: 1154380 - RNA, 20 nt, Human
aaguaacuucacucaugaag

SEQ ID NO: 1154381 - RNA, 18 nt, Human
aaugguauguucuuuaau

SEQ ID NO: 1154382 - RNA, 21 nt, Human
acccaagaucgcauaugucug

SEQ ID NO: 1154383 - RNA, 30 nt, Human
acccacccccgccccccaccccgccccccu

SEQ ID NO: 1154384 - RNA, 19 nt, Human
acccccgccccccaccccg

SEQ ID NO: 1154385 - RNA, 19 nt, Human
acuccaacaaacuaaagag

SEQ ID NO: 1154386 - RNA, 23 nt, Human
acucuggucacuggccaaaauaa

SEQ ID NO: 1154387 - RNA, 20 nt, Human
acuuugcaauucugacaaug

SEQ ID NO: 1154388 - RNA, 21 nt, Human
agaaaaaagacaaaaacaaaa

SEQ ID NO: 1154389 - RNA, 20 nt, Human
agacacccuucaaaccaccc

SEQ ID NO: 1154390 - RNA, 23 nt, Human
agcaaaugcaaagaaucauuuca

SEQ ID NO: 1154391 - RNA, 22 nt, Human
agcggcaacggcggucguagag

SEQ ID NO: 1154392 - RNA, 21 nt, Human
agcuuaccucuaugaccccaa

SEQ ID NO: 1154393 - RNA, 23 nt, Human
aggaauaucaaagagggcaaagc

SEQ ID NO: 1154394 - RNA, 20 nt, Human
aggcucccaggcuuuggccc

SEQ ID NO: 1154395 - RNA, 23 nt, Human
aguaauauacuguuucagagccu

SEQ ID NO: 1154396 - RNA, 24 nt, Human
aguggugaaagcucauaagaaaaa

SEQ ID NO: 1154397 - RNA, 22 nt, Human
augaaacagaaaaaagcaagag

SEQ ID NO: 1154398 - RNA, 20 nt, Human
augaacaaauuugcaccaag

SEQ ID NO: 1154399 - RNA, 23 nt, Human
caaaaaagcuuaccucuaugacc

SEQ ID NO: 1154400 - RNA, 21 nt, Human
caaaacgcgccgaguagcagc

SEQ ID NO: 1154401 - RNA, 20 nt, Human
caaaaugaacacguuacuug

SEQ ID NO: 1154402 - RNA, 23 nt, Human
caaaaugaacacguuacuugccc

SEQ ID NO: 1154403 - RNA, 20 nt, Human
caacuucucucaguaagaca

SEQ ID NO: 1154404 - RNA, 24 nt, Human
caaguaacuucacucaugaagaca

SEQ ID NO: 1154405 - RNA, 18 nt, Human
caccaaaacagggagcca

SEQ ID NO: 1154406 - RNA, 19 nt, Human
caccaaaacagggagccaa

SEQ ID NO: 1154407 - RNA, 22 nt, Human
cacccccgccccccaccccgcc

SEQ ID NO: 1154408 - RNA, 18 nt, Human
caccccgccccccugggc

SEQ ID NO: 1154409 - RNA, 24 nt, Human
cagaaagauagcaucacaaaccac

SEQ ID NO: 1154410 - RNA, 19 nt, Human
cagaaccaggaaacuuaaa

SEQ ID NO: 1154411 - RNA, 19 nt, Human
cagcgcggcacccaccccc

SEQ ID NO: 1154412 - RNA, 26 nt, Human
cagcgcggcacccacccccgcccccc

SEQ ID NO: 1154413 - RNA, 24 nt, Human
cagcuugccaugaguccacaccaa

SEQ ID NO: 1154414 - RNA, 24 nt, Human
caggacaccucuauaccaaggcug

SEQ ID NO: 1154415 - RNA, 19 nt, Human
caggaccccacaacugaag

SEQ ID NO: 1154416 - RNA, 20 nt, Human
caucacaaaccacacgacac

SEQ ID NO: 1154417 - RNA, 20 nt, Human
caugccaaguaguucccagg

SEQ ID NO: 1154418 - RNA, 23 nt, Human
ccaaggcugccacccacagauau

SEQ ID NO: 1154419 - RNA, 20 nt, Human
ccaaguaugaaacagaaaaa

SEQ ID NO: 1154420 - RNA, 23 nt, Human
ccacagauauuuccugggugcug

SEQ ID NO: 1154421 - RNA, 27 nt, Human
ccacccacagauauuuccugggugcug

SEQ ID NO: 1154422 - RNA, 20 nt, Human
ccagcaccuaaucaggcaag

SEQ ID NO: 1154423 - RNA, 24 nt, Human
ccagcaccuaaucaggcaaguaac

SEQ ID NO: 1154424 - RNA, 27 nt, Human
cccaaaagaaauaaauacaaagacacc

SEQ ID NO: 1154425 - RNA, 24 nt, Human
cccacaacugaaggagaacuaagc

SEQ ID NO: 1154426 - RNA, 23 nt, Human
cccacccccgccccccaccccgc

SEQ ID NO: 1154427 - RNA, 22 nt, Human
cccaccccgccccccugggccu

SEQ ID NO: 1154428 - RNA, 18 nt, Human
cccaggcuuuggccccgg

SEQ ID NO: 1154429 - RNA, 23 nt, Human
cccccaccccgccccccugggcc

SEQ ID NO: 1154430 - RNA, 26 nt, Human
cccccaccccgccccccugggccucc

SEQ ID NO: 1154431 - RNA, 19 nt, Human
cccccgccccccaccccgc

SEQ ID NO: 1154432 - RNA, 20 nt, Human
cccccgccccccaccccgcc

SEQ ID NO: 1154433 - RNA, 23 nt, Human
ccccgccccccaccccgcccccc

SEQ ID NO: 1154434 - RNA, 20 nt, Human
ccccgccccccugggccucc

SEQ ID NO: 1154435 - RNA, 20 nt, Human
ccccugggccuccuccccuc

SEQ ID NO: 1154436 - RNA, 20 nt, Human
cccgacacccuuuucuccgg

SEQ ID NO: 1154437 - RNA, 25 nt, Human
cccgccccccugggccuccuccccu

SEQ ID NO: 1154438 - RNA, 24 nt, Human
cccugcccugcccuggcccucucu

SEQ ID NO: 1154439 - RNA, 21 nt, Human
ccgcggcagcgcggcacccac

SEQ ID NO: 1154440 - RNA, 19 nt, Human
ccggcucgugggcggguug

SEQ ID NO: 1154441 - RNA, 21 nt, Human
ccuccugaccucuuaaacacc

SEQ ID NO: 1154442 - RNA, 23 nt, Human
ccucuauaccaaggcugccaccc

SEQ ID NO: 1154443 - RNA, 24 nt, Human
ccuuaaaaagaaaaaaaacuccaa

SEQ ID NO: 1154444 - RNA, 23 nt, Human
cgcggcacccacccccgcccccc

SEQ ID NO: 1154445 - RNA, 25 nt, Human
cggcacccacccccgccccccaccc

SEQ ID NO: 1154446 - RNA, 30 nt, Human
cggcagcgcggcacccacccccgccccccu

SEQ ID NO: 1154447 - RNA, 21 nt, Human
cggcucgugggcggguuggcg

SEQ ID NO: 1154448 - RNA, 22 nt, Human
cucuauaccaaggcugccaccc

SEQ ID NO: 1154449 - RNA, 19 nt, Human
cucuauagcaauaccugcu

SEQ ID NO: 1154450 - RNA, 22 nt, Human
cucuauagcaauaccugcuuuu

SEQ ID NO: 1154451 - RNA, 21 nt, Human
cuggcagcggcaacggcgguc

SEQ ID NO: 1154452 - RNA, 26 nt, Human
cuggccaaaauaaauaaauccagcua

SEQ ID NO: 1154453 - RNA, 22 nt, Human
cugggccuccuccccucgcagg

SEQ ID NO: 1154454 - RNA, 19 nt, Human
cuugccaugaguccacacc

SEQ ID NO: 1154455 - RNA, 25 nt, Human
gaaaaaagcaagaggauucaugggc

SEQ ID NO: 1154456 - RNA, 18 nt, Human
gacaauggcaaagauuag

SEQ ID NO: 1154457 - RNA, 23 nt, Human
gagccaauaccuuccagcaccua

SEQ ID NO: 1154458 - RNA, 22 nt, Human
gcagcgcggcacccacccccgc

SEQ ID NO: 1154459 - RNA, 22 nt, Human
gcaucagaaagagauuuguuuc

SEQ ID NO: 1154460 - RNA, 24 nt, Human
gccccccaccccgccccccugggc

SEQ ID NO: 1154461 - RNA, 26 nt, Human
gccccgacacccuuuucuccggcccc

SEQ ID NO: 1154462 - RNA, 23 nt, Human
ggcaaagcaggaccccacaacug

SEQ ID NO: 1154463 - RNA, 21 nt, Human
gggaggagcuggacugcagcg

SEQ ID NO: 1154464 - RNA, 20 nt, Human
gggcggguuggcgggcgggc

SEQ ID NO: 1154465 - RNA, 26 nt, Human
guggccccgacacccuuuucuccggc

SEQ ID NO: 1154466 - RNA, 21 nt, Human
uaaaaaacagaaagauagcau

SEQ ID NO: 1154467 - RNA, 26 nt, Human
uaaaaaacagaaagauagcaucacaa

SEQ ID NO: 1154468 - RNA, 22 nt, Human
uaagacaggaaccaggaauauc

SEQ ID NO: 1154469 - RNA, 19 nt, Human
uaauaggauagaaucguua

SEQ ID NO: 1154470 - RNA, 27 nt, Human
uaauuacauaugcuaaaauuaacauuu

SEQ ID NO: 1154471 - RNA, 20 nt, Human
uacauuguuugguggaaaag

SEQ ID NO: 1154472 - RNA, 21 nt, Human
uauagcaauaccugcuuuuga

SEQ ID NO: 1154473 - RNA, 19 nt, Human
uaucaaagagggcaaagca

SEQ ID NO: 1154474 - RNA, 23 nt, Human
uaucaaagagggcaaagcaggac

SEQ ID NO: 1154475 - RNA, 27 nt, Human
uaugaccccaaaagaaauaaauacaaa

SEQ ID NO: 1154476 - RNA, 18 nt, Human
uauggcuuaagaucuccu

SEQ ID NO: 1154477 - RNA, 19 nt, Human
uauggcuuaagaucuccuu

SEQ ID NO: 1154478 - RNA, 19 nt, Human
uauguaaaaaacagaaaga

SEQ ID NO: 1154479 - RNA, 25 nt, Human
uaugucugauuucaauuggccaaaa

SEQ ID NO: 1154480 - RNA, 22 nt, Human
ucaaagacacccuucaaaccac

SEQ ID NO: 1154481 - RNA, 21 nt, Human
ucccagguucauaugauucuc

SEQ ID NO: 1154482 - RNA, 19 nt, Human
ucgcaggcucccaggcuuu

SEQ ID NO: 1154483 - RNA, 20 nt, Human
ucgcaggcucccaggcuuuc

SEQ ID NO: 1154484 - RNA, 23 nt, Human
ucuauagcaauaccugcuuuuga

SEQ ID NO: 1154485 - RNA, 20 nt, Human
ucucucaguaagacaggaac

SEQ ID NO: 1154486 - RNA, 22 nt, Human
ucucuggcagcggcaacggcgg

SEQ ID NO: 1154487 - RNA, 23 nt, Human
ugaaacagaaaaaagcaagagga

SEQ ID NO: 1154488 - RNA, 21 nt, Human
ugaaauaguaauauacuguuu

SEQ ID NO: 1154489 - RNA, 25 nt, Human
ugaacaaauuugcaccaaguaugaa

SEQ ID NO: 1154490 - RNA, 28 nt, Human
ugaacagacgugguaucuucuauuuggg

SEQ ID NO: 1154491 - RNA, 19 nt, Human
ugaguagacaucaugggug

SEQ ID NO: 1154492 - RNA, 19 nt, Human
ugcaaaaacccaagaucgc

SEQ ID NO: 1154493 - RNA, 19 nt, Human
ugcaccaaguaugaaacag

SEQ ID NO: 1154494 - RNA, 21 nt, Human
ugccaugaguccacaccaaaa

SEQ ID NO: 1154495 - RNA, 22 nt, Human
ugcccugcccuggcccucucug

SEQ ID NO: 1154496 - RNA, 24 nt, Human
ugcugcgcgucccugcccugcccu

SEQ ID NO: 1154497 - RNA, 19 nt, Human
uggcagcggcaacggcggu

SEQ ID NO: 1154498 - RNA, 22 nt, Human
ugggcauuuucaucuauggcuu

SEQ ID NO: 1154499 - RNA, 21 nt, Human
ugggcggguuggcgggcgggc

SEQ ID NO: 1154500 - RNA, 19 nt, Human
uguaaaaaacagaaagaua

SEQ ID NO: 1154501 - RNA, 20 nt, Human
uguaaaaaacagaaagauag

SEQ ID NO: 1154502 - RNA, 23 nt, Human
uuaauucugcuuggaaaacuguc

SEQ ID NO: 1154503 - RNA, 21 nt, Human
uucacugauagaaaugggcaa

SEQ ID NO: 1154504 - RNA, 26 nt, Human
uuuccaugcaaaaacccaagaucgca

SEQ ID NO: 1154505 - RNA, 19 nt, Human
aacauggugaaaccccguc

SEQ ID NO: 1154506 - RNA, 20 nt, Human
aacauggugaaaccccgucu

SEQ ID NO: 1154507 - RNA, 21 nt, Human
aacauggugaaaccccgucuc

SEQ ID NO: 1154508 - RNA, 18 nt, Human
aacuguagagacagaaga

SEQ ID NO: 1154509 - RNA, 18 nt, Human
aagaaacaaauacugugu

SEQ ID NO: 1154510 - RNA, 19 nt, Human
aagaggccaggcgcggugg

SEQ ID NO: 1154511 - RNA, 18 nt, Human
aagauggcacaacuguag

SEQ ID NO: 1154512 - RNA, 19 nt, Human
aagcagcgcacagcugugg

SEQ ID NO: 1154513 - RNA, 19 nt, Human
aauacacucugcugacaac

SEQ ID NO: 1154514 - RNA, 23 nt, Human
acaacuguagagacagaagaaga

SEQ ID NO: 1154515 - RNA, 20 nt, Human
acacagcugcacagagaggu

SEQ ID NO: 1154516 - RNA, 21 nt, Human
acacaucaccaccaucacaca

SEQ ID NO: 1154517 - RNA, 21 nt, Human
acagaagaagaguccucccuu

SEQ ID NO: 1154518 - RNA, 20 nt, Human
acaucaccaccaucacacau

SEQ ID NO: 1154519 - RNA, 25 nt, Human
acaucaccaccaucacacaugugcu

SEQ ID NO: 1154520 - RNA, 27 nt, Human
acaugugcucacacacacacacccugc

SEQ ID NO: 1154521 - RNA, 25 nt, Human
accaucacacaugugcucacacaca

SEQ ID NO: 1154522 - RNA, 18 nt, Human
accccgucucuacuaaaa

SEQ ID NO: 1154523 - RNA, 24 nt, Human
acugcauuccagcuugggcaacag

SEQ ID NO: 1154524 - RNA, 24 nt, Human
acugugccacugcauuccagcuug

SEQ ID NO: 1154525 - RNA, 21 nt, Human
agacugccucccacgacauca

SEQ ID NO: 1154526 - RNA, 24 nt, Human
agcacuuugggaggccgagguggg

SEQ ID NO: 1154527 - RNA, 21 nt, Human
aggccgaggugggcagaucau

SEQ ID NO: 1154528 - RNA, 24 nt, Human
aggcgcggugucucacgccuauaa

SEQ ID NO: 1154529 - RNA, 23 nt, Human
aggcuacagugagcagugacugu

SEQ ID NO: 1154530 - RNA, 24 nt, Human
aggugggcagaucaugaggucagg

SEQ ID NO: 1154531 - RNA, 19 nt, Human
aucagaacaggugaggucc

SEQ ID NO: 1154532 - RNA, 21 nt, Human
augugcucacacacacacagu

SEQ ID NO: 1154533 - RNA, 21 nt, Human
cacacacacccugcuggacuc

SEQ ID NO: 1154534 - RNA, 21 nt, Human
cacacacccugcuggacuccc

SEQ ID NO: 1154535 - RNA, 19 nt, Human
cacagcuguggccugcuuc

SEQ ID NO: 1154536 - RNA, 26 nt, Human
cacaucaccaccaucacacaugugcu

SEQ ID NO: 1154537 - RNA, 20 nt, Human
cacaugugcucacacacaca

SEQ ID NO: 1154538 - RNA, 24 nt, Human
cacgccuauaaucccagcacuuug

SEQ ID NO: 1154539 - RNA, 21 nt, Human
cacuagccgagaccacccuag

SEQ ID NO: 1154540 - RNA, 23 nt, Human
cacugcauuccagcuugggcaac

SEQ ID NO: 1154541 - RNA, 24 nt, Human
cacugcauuccagcuugggcaaca

SEQ ID NO: 1154542 - RNA, 21 nt, Human
cagaaggagaagaggccaggc

SEQ ID NO: 1154543 - RNA, 22 nt, Human
cagaaggggcagaaaugggagc

SEQ ID NO: 1154544 - RNA, 24 nt, Human
cagcacuuugggaggccgaggugg

SEQ ID NO: 1154545 - RNA, 22 nt, Human
cagcaggacgauagcaaagaga

SEQ ID NO: 1154546 - RNA, 18 nt, Human
caggugaggucccaccau

SEQ ID NO: 1154547 - RNA, 23 nt, Human
cagguuccaagcccagacugccu

SEQ ID NO: 1154548 - RNA, 18 nt, Human
caucacagcugccauucu

SEQ ID NO: 1154549 - RNA, 20 nt, Human
ccacugcauuccagcuuggg

SEQ ID NO: 1154550 - RNA, 21 nt, Human
ccacugcauuccagcuugggc

SEQ ID NO: 1154551 - RNA, 23 nt, Human
ccacugcauuccagcuugggcaa

SEQ ID NO: 1154552 - RNA, 24 nt, Human
ccacugcauuccagcuugggcaac

SEQ ID NO: 1154553 - RNA, 21 nt, Human
ccacuuggcccacacugggcu

SEQ ID NO: 1154554 - RNA, 20 nt, Human
cccccucucucacacacaca

SEQ ID NO: 1154555 - RNA, 22 nt, Human
ccuagguaacauggugaaaccc

SEQ ID NO: 1154556 - RNA, 23 nt, Human
ccuagguaacauggugaaacccc

SEQ ID NO: 1154557 - RNA, 24 nt, Human
ccuagguaacauggugaaaccccg

SEQ ID NO: 1154558 - RNA, 22 nt, Human
ccuauaaucccagcacuuuggg

SEQ ID NO: 1154559 - RNA, 26 nt, Human
ccuccagaaggggcagaaaugggagc

SEQ ID NO: 1154560 - RNA, 23 nt, Human
ccugcuggacucccggcuuugcu

SEQ ID NO: 1154561 - RNA, 24 nt, Human
cgagaccacccuagguaacauggu

SEQ ID NO: 1154562 - RNA, 24 nt, Human
cgaggugggcagaucaugagguca

SEQ ID NO: 1154563 - RNA, 22 nt, Human
cgauagcaaagagauuguccac

SEQ ID NO: 1154564 - RNA, 20 nt, Human
cuacagugagcagugacugu

SEQ ID NO: 1154565 - RNA, 22 nt, Human
cucacgccuauaaucccagcac

SEQ ID NO: 1154566 - RNA, 24 nt, Human
cucacgccuauaaucccagcacuu

SEQ ID NO: 1154567 - RNA, 19 nt, Human
cucucacacacacaucacc

SEQ ID NO: 1154568 - RNA, 22 nt, Human
cugcugaggucacacagcugca

SEQ ID NO: 1154569 - RNA, 23 nt, Human
cugcugaggucacacagcugcac

SEQ ID NO: 1154570 - RNA, 23 nt, Human
cuuugggaggccgaggugggcag

SEQ ID NO: 1154571 - RNA, 19 nt, Human
gaccuuuguggagcugaag

SEQ ID NO: 1154572 - RNA, 21 nt, Human
gacugugccacugcauuccag

SEQ ID NO: 1154573 - RNA, 21 nt, Human
gagaagaggccaggcgcggug

SEQ ID NO: 1154574 - RNA, 23 nt, Human
gagcuccagagucaaggcuacag

SEQ ID NO: 1154575 - RNA, 23 nt, Human
gaggugggcagaucaugagguca

SEQ ID NO: 1154576 - RNA, 24 nt, Human
gccacugcauuccagcuugggcaa

SEQ ID NO: 1154577 - RNA, 18 nt, Human
gcugaggucacacagcug

SEQ ID NO: 1154578 - RNA, 19 nt, Human
gcuggacucccggcuuugc

SEQ ID NO: 1154579 - RNA, 21 nt, Human
ggcagaucaugaggucaggag

SEQ ID NO: 1154580 - RNA, 24 nt, Human
ggugucucacgccuauaaucccag

SEQ ID NO: 1154581 - RNA, 22 nt, Human
gucaagacccuuauuccccagg

SEQ ID NO: 1154582 - RNA, 20 nt, Human
guggagcuccagagucaagg

SEQ ID NO: 1154583 - RNA, 27 nt, Human
uaaaauacacucugcugacaacacugu

SEQ ID NO: 1154584 - RNA, 22 nt, Human
uaacauggugaaaccccgucuc

SEQ ID NO: 1154585 - RNA, 24 nt, Human
uaacauggugaaaccccgucucua

SEQ ID NO: 1154586 - RNA, 21 nt, Human
uacacucugcugacaacacug

SEQ ID NO: 1154587 - RNA, 20 nt, Human
uagguaacauggugaaaccc

SEQ ID NO: 1154588 - RNA, 21 nt, Human
ucacacacacaucaccaccau

SEQ ID NO: 1154589 - RNA, 23 nt, Human
ucacacacacaucaccaccauca

SEQ ID NO: 1154590 - RNA, 25 nt, Human
ucacacacacaucaccaccaucaca

SEQ ID NO: 1154591 - RNA, 22 nt, Human
ucacacagguugcaaggagugg

SEQ ID NO: 1154592 - RNA, 20 nt, Human
ucaggaucugcugaggucac

SEQ ID NO: 1154593 - RNA, 18 nt, Human
ucaugaggucaggagauc

SEQ ID NO: 1154594 - RNA, 24 nt, Human
ucaugaggucaggagaucgacacu

SEQ ID NO: 1154595 - RNA, 23 nt, Human
uccagcuugggcaacagucaaga

SEQ ID NO: 1154596 - RNA, 19 nt, Human
ucccggcuuugcugcucuc

SEQ ID NO: 1154597 - RNA, 18 nt, Human
ucucacacacacaucacc

SEQ ID NO: 1154598 - RNA, 25 nt, Human
ucuuccuggugcuggaggaagaugg

SEQ ID NO: 1154599 - RNA, 24 nt, Human
ugaagaaacaaauacuguguggca

SEQ ID NO: 1154600 - RNA, 21 nt, Human
ugaggucacacagcugcacag

SEQ ID NO: 1154601 - RNA, 22 nt, Human
ugaggucacacagcugcacaga

SEQ ID NO: 1154602 - RNA, 18 nt, Human
ugcacagagagguggggg

SEQ ID NO: 1154603 - RNA, 19 nt, Human
ugcugaggucacacagcug

SEQ ID NO: 1154604 - RNA, 22 nt, Human
uggacucccggcuuugcugcuc

SEQ ID NO: 1154605 - RNA, 22 nt, Human
uggcagacaagcccuucuuccu

SEQ ID NO: 1154606 - RNA, 19 nt, Human
ugggaggccgaggugggca

SEQ ID NO: 1154607 - RNA, 20 nt, Human
ugggaggccgaggugggcag

SEQ ID NO: 1154608 - RNA, 24 nt, Human
ugggaggccgaggugggcagauca

SEQ ID NO: 1154609 - RNA, 22 nt, Human
ugggcagaucaugaggucagga

SEQ ID NO: 1154610 - RNA, 22 nt, Human
uguaaaauacacucugcugaca

SEQ ID NO: 1154611 - RNA, 24 nt, Human
ugucucacgccuauaaucccagca

SEQ ID NO: 1154612 - RNA, 23 nt, Human
ugugcucacacacacacacccug

SEQ ID NO: 1154613 - RNA, 18 nt, Human
uguguggcaaauauaaga

SEQ ID NO: 1154614 - RNA, 25 nt, Human
uugggaggccgaggugggcagauca

SEQ ID NO: 1154615 - RNA, 19 nt, Human
agcggcuggccagaaaucc

SEQ ID NO: 1154616 - RNA, 18 nt, Human
ggguagcggcuggccaga

SEQ ID NO: 1154617 - RNA, 21 nt, Human
uggccagaaauccuuugccuu

SEQ ID NO: 1154618 - RNA, 21 nt, Human
aacgccuccccccaccccccc

SEQ ID NO: 1154619 - RNA, 23 nt, Human
aagccgcuaccaccaacccucca

SEQ ID NO: 1154620 - RNA, 22 nt, Human
acccccccgacgcccucccccu

SEQ ID NO: 1154621 - RNA, 20 nt, Human
accggaacgccuccccccac

SEQ ID NO: 1154622 - RNA, 24 nt, Human
ccccaagccgcuaccaccaacccu

SEQ ID NO: 1154623 - RNA, 22 nt, Human
ccccacccccccgacgcccucc

SEQ ID NO: 1154624 - RNA, 25 nt, Human
cccccacccccccgacgcccucccc

SEQ ID NO: 1154625 - RNA, 26 nt, Human
ccccccacccccccgacgcccucccc

SEQ ID NO: 1154626 - RNA, 24 nt, Human
cccccgacgcccucccccucccuc

SEQ ID NO: 1154627 - RNA, 20 nt, Human
ccgcuaccaccaacccucca

SEQ ID NO: 1154628 - RNA, 21 nt, Human
cggaacgccuccccccacccc

SEQ ID NO: 1154629 - RNA, 22 nt, Human
cggaacgccuccccccaccccc

SEQ ID NO: 1154630 - RNA, 23 nt, Human
cggaacgccuccccccacccccc

SEQ ID NO: 1154631 - RNA, 24 nt, Human
cggagucccucacagccuccgccu

SEQ ID NO: 1154632 - RNA, 22 nt, Human
cgggggaagcgugcgagagagc

SEQ ID NO: 1154633 - RNA, 23 nt, Human
cgggggggggaaacgaagggagc

SEQ ID NO: 1154634 - RNA, 23 nt, Human
cuccccccacccccccgacgccc

SEQ ID NO: 1154635 - RNA, 22 nt, Human
cucgcacacacuccggcacgca

SEQ ID NO: 1154636 - RNA, 19 nt, Human
gaagggagccgggggaagc

SEQ ID NO: 1154637 - RNA, 18 nt, Human
gaccggaacgccuccccc

SEQ ID NO: 1154638 - RNA, 24 nt, Human
gaccggaacgccuccccccacccc

SEQ ID NO: 1154639 - RNA, 23 nt, Human
gagcaccuccccaagccgcuacc

SEQ ID NO: 1154640 - RNA, 18 nt, Human
gagccgggggaagcgugc

SEQ ID NO: 1154641 - RNA, 21 nt, Human
gagccgggggaagcgugcgag

SEQ ID NO: 1154642 - RNA, 23 nt, Human
gcccucccccucccucgcacaca

SEQ ID NO: 1154643 - RNA, 18 nt, Human
gggggggaaacgaaggga

SEQ ID NO: 1154644 - RNA, 18 nt, Human
guaaaacuaaagguccau

SEQ ID NO: 1154645 - RNA, 23 nt, Human
uaaaaccagaacuguauguaaaa

SEQ ID NO: 1154646 - RNA, 18 nt, Human
uccccccacccccccgac

SEQ ID NO: 1154647 - RNA, 19 nt, Human
uccggcacgcaggcgaccg

SEQ ID NO: 1154648 - RNA, 20 nt, Human
ucucuuguaaaacuaaaggu

SEQ ID NO: 1154649 - RNA, 22 nt, Human
ucucuuguaaaacuaaaggucc

SEQ ID NO: 1154650 - RNA, 18 nt, Human
ugcgagagagcaagaccg

SEQ ID NO: 1154651 - RNA, 23 nt, Human
ugcuucucuuguaaaacuaaagg

SEQ ID NO: 1154652 - RNA, 21 nt, Human
uguaaaacuaaagguccauuu

SEQ ID NO: 1154653 - RNA, 22 nt, Human
uuggggaccggaacgccucccc

SEQ ID NO: 1154654 - RNA, 21 nt, Human
aaaagcccaggaugggggaua

SEQ ID NO: 1154655 - RNA, 18 nt, Human
aaaggaagaggcaagagg

SEQ ID NO: 1154656 - RNA, 20 nt, Human
aacuccuaaccagaccacac

SEQ ID NO: 1154657 - RNA, 22 nt, Human
aagcaaggcaaacaugaucuag

SEQ ID NO: 1154658 - RNA, 18 nt, Human
acauuagaaagacacuag

SEQ ID NO: 1154659 - RNA, 22 nt, Human
accacacgcaggaggagcucca

SEQ ID NO: 1154660 - RNA, 21 nt, Human
accccuggccacggggccuuu

SEQ ID NO: 1154661 - RNA, 19 nt, Human
acgcaggaggagcuccagg

SEQ ID NO: 1154662 - RNA, 18 nt, Human
acuugugccuaugcacaa

SEQ ID NO: 1154663 - RNA, 18 nt, Human
agaaaggaagaggcaaga

SEQ ID NO: 1154664 - RNA, 22 nt, Human
agaauaacccuggagcaaacaa

SEQ ID NO: 1154665 - RNA, 23 nt, Human
agacagaccccccaacccugccc

SEQ ID NO: 1154666 - RNA, 19 nt, Human
agcagaagacagacccccc

SEQ ID NO: 1154667 - RNA, 21 nt, Human
agcagaagacagaccccccaa

SEQ ID NO: 1154668 - RNA, 23 nt, Human
agcgggugaugcucaugugccau

SEQ ID NO: 1154669 - RNA, 18 nt, Human
agggacccccaggcacca

SEQ ID NO: 1154670 - RNA, 21 nt, Human
aguucuuucccaauagcucua

SEQ ID NO: 1154671 - RNA, 25 nt, Human
auaauaaaaucuccuguucaggcca

SEQ ID NO: 1154672 - RNA, 32 nt, Human
auccuguccacacccacauauucuccuccaac

SEQ ID NO: 1154673 - RNA, 18 nt, Human
aucugaaagguuguggaa

SEQ ID NO: 1154674 - RNA, 19 nt, Human
caacucaacuccuaaccag

SEQ ID NO: 1154675 - RNA, 24 nt, Human
cacacgcaggaggagcuccaggga

SEQ ID NO: 1154676 - RNA, 24 nt, Human
cacacucuacaaaacccugagggc

SEQ ID NO: 1154677 - RNA, 22 nt, Human
cacagggacccccaggcaccag

SEQ ID NO: 1154678 - RNA, 21 nt, Human
caccucccuccagcccuggcc

SEQ ID NO: 1154679 - RNA, 18 nt, Human
cacgugcuccuguggccc

SEQ ID NO: 1154680 - RNA, 18 nt, Human
cacgugcuccuguggccc

SEQ ID NO: 1154681 - RNA, 18 nt, Human
cacucuacaaaacccuga

SEQ ID NO: 1154682 - RNA, 20 nt, Human
cacucuacaaaacccugagg

SEQ ID NO: 1154683 - RNA, 23 nt, Human
cagaagacagaccccccaacccu

SEQ ID NO: 1154684 - RNA, 23 nt, Human
cagaccacacgcaggaggagcuc

SEQ ID NO: 1154685 - RNA, 20 nt, Human
cagaccccccaacccugccc

SEQ ID NO: 1154686 - RNA, 22 nt, Human
cagcagaagacagaccccccaa

SEQ ID NO: 1154687 - RNA, 25 nt, Human
cagcagaagacagaccccccaaccc

SEQ ID NO: 1154688 - RNA, 26 nt, Human
cagcaggccaccaucagcgggugaug

SEQ ID NO: 1154689 - RNA, 19 nt, Human
cagccagggugccccaggu

SEQ ID NO: 1154690 - RNA, 21 nt, Human
cagccauggcuuccuucccaa

SEQ ID NO: 1154691 - RNA, 21 nt, Human
caggagcacccgacaggucug

SEQ ID NO: 1154692 - RNA, 22 nt, Human
caggucugugggcaaacccaug

SEQ ID NO: 1154693 - RNA, 20 nt, Human
cauccaaccacucugauggg

SEQ ID NO: 1154694 - RNA, 26 nt, Human
ccaacccugcccaccagggcucacac

SEQ ID NO: 1154695 - RNA, 24 nt, Human
ccaccaagccauacacuaucaugu

SEQ ID NO: 1154696 - RNA, 19 nt, Human
ccaccaucagcgggugaug

SEQ ID NO: 1154697 - RNA, 22 nt, Human
ccaccucccuccagcccuggcc

SEQ ID NO: 1154698 - RNA, 19 nt, Human
ccacggggccuuugcacag

SEQ ID NO: 1154699 - RNA, 18 nt, Human
cccaaggccacugcuggc

SEQ ID NO: 1154700 - RNA, 22 nt, Human
cccaccucccuccagcccuggc

SEQ ID NO: 1154701 - RNA, 20 nt, Human
ccccagacccagugugaccc

SEQ ID NO: 1154702 - RNA, 24 nt, Human
ccccaggucucagggucucucagg

SEQ ID NO: 1154703 - RNA, 23 nt, Human
cccccagacccagugugacccau

SEQ ID NO: 1154704 - RNA, 23 nt, Human
ccguccuggcucauggggggcag

SEQ ID NO: 1154705 - RNA, 18 nt, Human
ccucaccuagggugcucc

SEQ ID NO: 1154706 - RNA, 23 nt, Human
ccuggcccacuugugccuaugca

SEQ ID NO: 1154707 - RNA, 24 nt, Human
ccuggcccacuugugguccccugg

SEQ ID NO: 1154708 - RNA, 22 nt, Human
ccuggcucauggggggcagguc

SEQ ID NO: 1154709 - RNA, 25 nt, Human
ccugggcagacguggagaccugaaa

SEQ ID NO: 1154710 - RNA, 21 nt, Human
ccuuggagacccuggggggau

SEQ ID NO: 1154711 - RNA, 19 nt, Human
ccuuggugcauguccucca

SEQ ID NO: 1154712 - RNA, 21 nt, Human
cguuacacuucguuuucaauu

SEQ ID NO: 1154713 - RNA, 24 nt, Human
cucuacaaaacccugagggccuag

SEQ ID NO: 1154714 - RNA, 21 nt, Human
cucugggucccgaguuaucuc

SEQ ID NO: 1154715 - RNA, 24 nt, Human
cucuugacucugacgggccucauc

SEQ ID NO: 1154716 - RNA, 21 nt, Human
cugacugugggaucugggggc

SEQ ID NO: 1154717 - RNA, 19 nt, Human
cugccagcugacugugaug

SEQ ID NO: 1154718 - RNA, 22 nt, Human
cuggccagccagggugccccag

SEQ ID NO: 1154719 - RNA, 19 nt, Human
cuucagaagcccccaucuc

SEQ ID NO: 1154720 - RNA, 19 nt, Human
gaaaauuaaaaacagauac

SEQ ID NO: 1154721 - RNA, 18 nt, Human
gaaguucagcugccagcu

SEQ ID NO: 1154722 - RNA, 21 nt, Human
gaaguucuuucccaauagcuc

SEQ ID NO: 1154723 - RNA, 22 nt, Human
gacaggucugugggcaaaccca

SEQ ID NO: 1154724 - RNA, 21 nt, Human
gaccccccaacccugcccacc

SEQ ID NO: 1154725 - RNA, 18 nt, Human
gagaaagacacacguugc

SEQ ID NO: 1154726 - RNA, 19 nt, Human
gagaaagacacacguugcc

SEQ ID NO: 1154727 - RNA, 21 nt, Human
gagaccugaaauucuccauuu

SEQ ID NO: 1154728 - RNA, 23 nt, Human
gagcacccgacaggucugugggc

SEQ ID NO: 1154729 - RNA, 22 nt, Human
gcccucaggucagccucuggcu

SEQ ID NO: 1154730 - RNA, 19 nt, Human
gcccuggaggaugucacag

SEQ ID NO: 1154731 - RNA, 22 nt, Human
ggaccucugcagucaggacccu

SEQ ID NO: 1154732 - RNA, 18 nt, Human
ggagacccuggggggaug

SEQ ID NO: 1154733 - RNA, 18 nt, Human
ggaggagaauaacccugg

SEQ ID NO: 1154734 - RNA, 22 nt, Human
ggccacucacaggagcacccga

SEQ ID NO: 1154735 - RNA, 21 nt, Human
ggccaguuguccagagaaaga

SEQ ID NO: 1154736 - RNA, 20 nt, Human
gggauauuugugacgcucug

SEQ ID NO: 1154737 - RNA, 21 nt, Human
gucuggagggguaugggccgg

SEQ ID NO: 1154738 - RNA, 21 nt, Human
gugcuccaaugucauggcuac

SEQ ID NO: 1154739 - RNA, 18 nt, Human
gugcuccugggugguguc

SEQ ID NO: 1154740 - RNA, 23 nt, Human
guggcuugccagcccacccucuc

SEQ ID NO: 1154741 - RNA, 24 nt, Human
guuugcaaacagcccucuggacac

SEQ ID NO: 1154742 - RNA, 24 nt, Human
uaacccuggagcaaacaacucaac

SEQ ID NO: 1154743 - RNA, 19 nt, Human
uaagagaagaagaaaccug

SEQ ID NO: 1154744 - RNA, 20 nt, Human
uaagagccgaucgggauugg

SEQ ID NO: 1154745 - RNA, 20 nt, Human
uaagagccgaucgggauugg

SEQ ID NO: 1154746 - RNA, 20 nt, Human
uacaaagugcacuaguguuu

SEQ ID NO: 1154747 - RNA, 25 nt, Human
uacaagcagcauccagcagaagaca

SEQ ID NO: 1154748 - RNA, 18 nt, Human
uaccaagugagguucuga

SEQ ID NO: 1154749 - RNA, 22 nt, Human
uacugccaggaauaccuaaggg

SEQ ID NO: 1154750 - RNA, 24 nt, Human
uagcuaaaagcuaggauacaucua

SEQ ID NO: 1154751 - RNA, 21 nt, Human
uagggugcuccuggguggugu

SEQ ID NO: 1154752 - RNA, 22 nt, Human
uauagcaggaaagccagagaag

SEQ ID NO: 1154753 - RNA, 20 nt, Human
uaucauguucccacuuuucu

SEQ ID NO: 1154754 - RNA, 23 nt, Human
ucagaagcccccaucuccucugg

SEQ ID NO: 1154755 - RNA, 24 nt, Human
ucagcuuuucuaguagcuccucag

SEQ ID NO: 1154756 - RNA, 21 nt, Human
ucagggucucucagggucucc

SEQ ID NO: 1154757 - RNA, 21 nt, Human
uccacacccacauauucuccu

SEQ ID NO: 1154758 - RNA, 25 nt, Human
uccagagaaagacacacguugccau

SEQ ID NO: 1154759 - RNA, 19 nt, Human
uccagcagaagacagaccc

SEQ ID NO: 1154760 - RNA, 19 nt, Human
ucccaccucccuccagccc

SEQ ID NO: 1154761 - RNA, 18 nt, Human
ucccauccuguccacacc

SEQ ID NO: 1154762 - RNA, 19 nt, Human
uccccggaaguggcuugcc

SEQ ID NO: 1154763 - RNA, 20 nt, Human
ucccgaguuaucucuagcug

SEQ ID NO: 1154764 - RNA, 22 nt, Human
ucccugggacagagggugaaaa

SEQ ID NO: 1154765 - RNA, 23 nt, Human
ucuacaucagcaucugaaagguu

SEQ ID NO: 1154766 - RNA, 19 nt, Human
ucuaggggugaacacaggg

SEQ ID NO: 1154767 - RNA, 24 nt, Human
ucuccauuucacuguaaacugggc

SEQ ID NO: 1154768 - RNA, 18 nt, Human
ucuccuccaccccuggcc

SEQ ID NO: 1154769 - RNA, 23 nt, Human
ucugaaguucagcugccagcuga

SEQ ID NO: 1154770 - RNA, 18 nt, Human
ucugcaaacuuccugagu

SEQ ID NO: 1154771 - RNA, 22 nt, Human
ucuggguuaagauuggcagggc

SEQ ID NO: 1154772 - RNA, 19 nt, Human
ucuuguggagcggggagcu

SEQ ID NO: 1154773 - RNA, 19 nt, Human
ucuuguggagcggggagcu

SEQ ID NO: 1154774 - RNA, 19 nt, Human
ucuuguggagcggggagcu

SEQ ID NO: 1154775 - RNA, 23 nt, Human
ugaaagguuguggaaauuguguc

SEQ ID NO: 1154776 - RNA, 24 nt, Human
ugaagggcccgcugaagaaaagga

SEQ ID NO: 1154777 - RNA, 18 nt, Human
ugaccuggccagccaggg

SEQ ID NO: 1154778 - RNA, 26 nt, Human
ugaccuggccagccagggugccccag

SEQ ID NO: 1154779 - RNA, 21 nt, Human
ugacgggccucaucucuccua

SEQ ID NO: 1154780 - RNA, 18 nt, Human
ugacugugacucgaggag

SEQ ID NO: 1154781 - RNA, 19 nt, Human
ugacuguggggggaccguc

SEQ ID NO: 1154782 - RNA, 19 nt, Human
ugagggccuagaaaucugu

SEQ ID NO: 1154783 - RNA, 21 nt, Human
ugaugagguuucccaccuccc

SEQ ID NO: 1154784 - RNA, 19 nt, Human
ugcacaaagacaucuggag

SEQ ID NO: 1154785 - RNA, 24 nt, Human
ugcacaggcugacuguggggggac

SEQ ID NO: 1154786 - RNA, 25 nt, Human
ugccagcccacccucucugaaccac

SEQ ID NO: 1154787 - RNA, 21 nt, Human
uggaaauuguguccaugaaaa

SEQ ID NO: 1154788 - RNA, 20 nt, Human
uggaagggaaaacuggucag

SEQ ID NO: 1154789 - RNA, 19 nt, Human
uggagcaaacaacucaacu

SEQ ID NO: 1154790 - RNA, 23 nt, Human
uggagucagcugaaguucuuucc

SEQ ID NO: 1154791 - RNA, 20 nt, Human
uggauuuccaaagcacaggu

SEQ ID NO: 1154792 - RNA, 23 nt, Human
uggcugcacggaccucugcaguc

SEQ ID NO: 1154793 - RNA, 21 nt, Human
uggcuucccaacaacgcagau

SEQ ID NO: 1154794 - RNA, 22 nt, Human
uggcuugccagcccacccucuc

SEQ ID NO: 1154795 - RNA, 25 nt, Human
uggggcggaaggaguuuuccccgag

SEQ ID NO: 1154796 - RNA, 21 nt, Human
ugucacaggugucuuguggag

SEQ ID NO: 1154797 - RNA, 18 nt, Human
uguuugcaaacagcccuc

SEQ ID NO: 1154798 - RNA, 20 nt, Human
uuaaaggaucucaucucuga

SEQ ID NO: 1154799 - RNA, 21 nt, Human
uuaagggauggaagaguuuau

SEQ ID NO: 1154800 - RNA, 18 nt, Human
uucagaagcccccaucuc

SEQ ID NO: 1154801 - RNA, 26 nt, Human
uucccaccucccuccagcccuggccc

SEQ ID NO: 1154802 - RNA, 20 nt, Human
uucucuaagcaaggcaaaca

SEQ ID NO: 1154803 - RNA, 26 nt, Human
uuucacuguaaacugggccaguuguc

SEQ ID NO: 1154804 - RNA, 22 nt, Human
uuuccagaucacaggugucuug

SEQ ID NO: 1154805 - RNA, 26 nt, Human
uuuccugugguuacaaagcuuuugau

SEQ ID NO: 1154806 - RNA, 24 nt, Human
aaaguguugggauuacaggcuuga

SEQ ID NO: 1154807 - RNA, 18 nt, Human
aacccuguccuuccccca

SEQ ID NO: 1154808 - RNA, 22 nt, Human
aagccacccucccacuucagcc

SEQ ID NO: 1154809 - RNA, 20 nt, Human
aagugcuugcuucccagccc

SEQ ID NO: 1154810 - RNA, 19 nt, Human
aaguguugggauuacaggc

SEQ ID NO: 1154811 - RNA, 20 nt, Human
aaguguugggauuacaggcu

SEQ ID NO: 1154812 - RNA, 20 nt, Human
accagcagugcacaggccag

SEQ ID NO: 1154813 - RNA, 19 nt, Human
accucggucucccaaagug

SEQ ID NO: 1154814 - RNA, 25 nt, Human
acucugucguccaggcuggagugca

SEQ ID NO: 1154815 - RNA, 18 nt, Human
acugugcccggccugggc

SEQ ID NO: 1154816 - RNA, 23 nt, Human
acuucagccucccaaguagccgg

SEQ ID NO: 1154817 - RNA, 19 nt, Human
agacagcaagggggacccu

SEQ ID NO: 1154818 - RNA, 24 nt, Human
agaggcagacagcaagggggaccc

SEQ ID NO: 1154819 - RNA, 18 nt, Human
agcacaagccaccacacc

SEQ ID NO: 1154820 - RNA, 23 nt, Human
agccgggacaacaagcacaagcc

SEQ ID NO: 1154821 - RNA, 22 nt, Human
aggcuugacgacugugcccggc

SEQ ID NO: 1154822 - RNA, 21 nt, Human
aguagagucuggucaccugga

SEQ ID NO: 1154823 - RNA, 24 nt, Human
agugcaguggugugaucacagcuc

SEQ ID NO: 1154824 - RNA, 23 nt, Human
aguguugggauuacaggcuugac

SEQ ID NO: 1154825 - RNA, 22 nt, Human
augggggccucccuguguuucc

SEQ ID NO: 1154826 - RNA, 18 nt, Human
caaaguguugggauuaca

SEQ ID NO: 1154827 - RNA, 25 nt, Human
caagcacaagccaccacaaucaacg

SEQ ID NO: 1154828 - RNA, 21 nt, Human
caagccaccacaccuggcuaa

SEQ ID NO: 1154829 - RNA, 23 nt, Human
caccagcagugcacaggccaguc

SEQ ID NO: 1154830 - RNA, 24 nt, Human
cacucugucguccaggcuggagug

SEQ ID NO: 1154831 - RNA, 23 nt, Human
cagcacagugaccugcccggcag

SEQ ID NO: 1154832 - RNA, 21 nt, Human
caggagaaugcgcgugcagca

SEQ ID NO: 1154833 - RNA, 19 nt, Human
caguucuccugcauguccu

SEQ ID NO: 1154834 - RNA, 21 nt, Human
ccaaaaaaggccgggucuaaa

SEQ ID NO: 1154835 - RNA, 19 nt, Human
ccaaaguguugggauuaca

SEQ ID NO: 1154836 - RNA, 22 nt, Human
ccaaaguguugggauuacaggc

SEQ ID NO: 1154837 - RNA, 23 nt, Human
ccaaaguguugggauuacaggcu

SEQ ID NO: 1154838 - RNA, 19 nt, Human
ccaagcaccagcagugcac

SEQ ID NO: 1154839 - RNA, 24 nt, Human
ccaaggaacccuguccuuccccca

SEQ ID NO: 1154840 - RNA, 18 nt, Human
ccaggcuggagugcagug

SEQ ID NO: 1154841 - RNA, 21 nt, Human
ccaggcuggagugcaguggug

SEQ ID NO: 1154842 - RNA, 24 nt, Human
cccaaaguguugggauuacaggcu

SEQ ID NO: 1154843 - RNA, 20 nt, Human
cccaaggaacccuguccuuc

SEQ ID NO: 1154844 - RNA, 19 nt, Human
cccaugcgcuacgagaccg

SEQ ID NO: 1154845 - RNA, 21 nt, Human
cccaugcgcuacgagaccgcg

SEQ ID NO: 1154846 - RNA, 26 nt, Human
cccccagaucuggaggccccgggggc

SEQ ID NO: 1154847 - RNA, 22 nt, Human
ccccgggggcaaggcacgggga

SEQ ID NO: 1154848 - RNA, 22 nt, Human
ccccuuccuucucuucaagugc

SEQ ID NO: 1154849 - RNA, 18 nt, Human
cccgacaguucuccugca

SEQ ID NO: 1154850 - RNA, 18 nt, Human
cccuuucuccccuuccuu

SEQ ID NO: 1154851 - RNA, 20 nt, Human
cccuuucuccccuuccuucu

SEQ ID NO: 1154852 - RNA, 21 nt, Human
ccggcaggaggucucagcacc

SEQ ID NO: 1154853 - RNA, 23 nt, Human
ccucccacuucagccucccaagu

SEQ ID NO: 1154854 - RNA, 26 nt, Human
ccucccacuucagccucccaaguagc

SEQ ID NO: 1154855 - RNA, 18 nt, Human
ccuggacucaagccaccc

SEQ ID NO: 1154856 - RNA, 21 nt, Human
ccuguccuucccccagaucug

SEQ ID NO: 1154857 - RNA, 18 nt, Human
cgacaguucuccugcaug

SEQ ID NO: 1154858 - RNA, 18 nt, Human
cggcgccaggcggcggcc

SEQ ID NO: 1154859 - RNA, 24 nt, Human
cguccaggcuggagugcaguggug

SEQ ID NO: 1154860 - RNA, 24 nt, Human
cucaagccacccucccacuucagc

SEQ ID NO: 1154861 - RNA, 24 nt, Human
cucacucugucguccaggcuggag

SEQ ID NO: 1154862 - RNA, 26 nt, Human
cuccccuuccuucucuucaagugcuu

SEQ ID NO: 1154863 - RNA, 21 nt, Human
cuggucccgacaguucuccug

SEQ ID NO: 1154864 - RNA, 22 nt, Human
cuuagccccggcgccaggcggc

SEQ ID NO: 1154865 - RNA, 22 nt, Human
cuuugugucgccugcucccugg

SEQ ID NO: 1154866 - RNA, 23 nt, Human
cuuuuuggaaugagucuuccugg

SEQ ID NO: 1154867 - RNA, 23 nt, Human
gaauaaaggacaaugggguucua

SEQ ID NO: 1154868 - RNA, 24 nt, Human
gagugcaguggugugaucacagcu

SEQ ID NO: 1154869 - RNA, 20 nt, Human
gauuacaggcuugacgacug

SEQ ID NO: 1154870 - RNA, 21 nt, Human
gcagcagccucccagggugag

SEQ ID NO: 1154871 - RNA, 20 nt, Human
gcaggccccaguugguccug

SEQ ID NO: 1154872 - RNA, 23 nt, Human
gccacccucccacuucagccucc

SEQ ID NO: 1154873 - RNA, 23 nt, Human
gccggcggccacuuagccccggc

SEQ ID NO: 1154874 - RNA, 19 nt, Human
gccgggacaacaagcacaa

SEQ ID NO: 1154875 - RNA, 18 nt, Human
gcggguggccucagcaca

SEQ ID NO: 1154876 - RNA, 19 nt, Human
gcgugcagcagccucccag

SEQ ID NO: 1154877 - RNA, 22 nt, Human
gcuuuuuggaaugagucuuccu

SEQ ID NO: 1154878 - RNA, 22 nt, Human
ggacaacaagcacaagccacca

SEQ ID NO: 1154879 - RNA, 22 nt, Human
ggcuggagugcaguggugugau

SEQ ID NO: 1154880 - RNA, 23 nt, Human
gggacaacaagcacaagccacca

SEQ ID NO: 1154881 - RNA, 24 nt, Human
guccaggcuggagugcaguggugu

SEQ ID NO: 1154882 - RNA, 21 nt, Human
guccuuggcggguggccucag

SEQ ID NO: 1154883 - RNA, 18 nt, Human
gucguccaggcuggagug

SEQ ID NO: 1154884 - RNA, 23 nt, Human
uacccccaccucggucucccaaa

SEQ ID NO: 1154885 - RNA, 20 nt, Human
uagccgggacaacaagcaca

SEQ ID NO: 1154886 - RNA, 18 nt, Human
uaugcaggccccaguugg

SEQ ID NO: 1154887 - RNA, 25 nt, Human
ucaagccacccucccacuucagccu

SEQ ID NO: 1154888 - RNA, 18 nt, Human
ucacaggacuucccugcg

SEQ ID NO: 1154889 - RNA, 24 nt, Human
ucacucugucguccaggcuggagu

SEQ ID NO: 1154890 - RNA, 20 nt, Human
ucagccucccaaguagccgg

SEQ ID NO: 1154891 - RNA, 21 nt, Human
ucagccucccaaguagccggg

SEQ ID NO: 1154892 - RNA, 24 nt, Human
ucccaaaguguugggauuacaggc

SEQ ID NO: 1154893 - RNA, 21 nt, Human
ucccuguguuucccaggcuga

SEQ ID NO: 1154894 - RNA, 19 nt, Human
uccuggucccgacaguucu

SEQ ID NO: 1154895 - RNA, 20 nt, Human
uccuggucccgacaguucuc

SEQ ID NO: 1154896 - RNA, 23 nt, Human
uccuggucccgacaguucuccug

SEQ ID NO: 1154897 - RNA, 24 nt, Human
ucguccaggcuggagugcaguggu

SEQ ID NO: 1154898 - RNA, 23 nt, Human
ucucacucugucguccaggcugg

SEQ ID NO: 1154899 - RNA, 24 nt, Human
ucucacucugucguccaggcugga

SEQ ID NO: 1154900 - RNA, 24 nt, Human
ucugucguccaggcuggagugcag

SEQ ID NO: 1154901 - RNA, 19 nt, Human
ugaguagagucuggucacc

SEQ ID NO: 1154902 - RNA, 27 nt, Human
ugcaggccccaguugguccugaagucc

SEQ ID NO: 1154903 - RNA, 22 nt, Human
ugcaguggugugaucacagcuc

SEQ ID NO: 1154904 - RNA, 22 nt, Human
ugcgcgugcagcagccucccag

SEQ ID NO: 1154905 - RNA, 21 nt, Human
ugcuugcuucccagcccacug

SEQ ID NO: 1154906 - RNA, 18 nt, Human
uggaagcuuagauacugg

SEQ ID NO: 1154907 - RNA, 21 nt, Human
uggaggccccgggggcaaggc

SEQ ID NO: 1154908 - RNA, 19 nt, Human
uggagugcaguggugugau

SEQ ID NO: 1154909 - RNA, 19 nt, Human
uggagugcaguggugugau

SEQ ID NO: 1154910 - RNA, 21 nt, Human
uggagugcaguggugugauca

SEQ ID NO: 1154911 - RNA, 28 nt, Human
uggagugcaguggugugauggcucuagc

SEQ ID NO: 1154912 - RNA, 23 nt, Human
ugggauuacaggcuugacgacug

SEQ ID NO: 1154913 - RNA, 25 nt, Human
ugggggccucccuguguuucccagg

SEQ ID NO: 1154914 - RNA, 22 nt, Human
ugguccugaaguccuuccucaa

SEQ ID NO: 1154915 - RNA, 20 nt, Human
ugugaucacagcucagugca

SEQ ID NO: 1154916 - RNA, 18 nt, Human
uucccagcccacuggaca

SEQ ID NO: 1154917 - RNA, 22 nt, Human
uucccccagaucuggaggcccc

SEQ ID NO: 1154918 - RNA, 19 nt, Human
uuccuggucccgacaguuc

SEQ ID NO: 1154919 - RNA, 21 nt, Human
uuggggcucgaugggugcuaa

SEQ ID NO: 1154920 - RNA, 19 nt, Human
acccagacccaagaaugaa

SEQ ID NO: 1154921 - RNA, 20 nt, Human
acccugaggauauuaaugaa

SEQ ID NO: 1154922 - RNA, 19 nt, Human
agaaggcaucucuaccucu

SEQ ID NO: 1154923 - RNA, 20 nt, Human
auuuaaacuauguaaaugug

SEQ ID NO: 1154924 - RNA, 20 nt, Human
auuuaaacuauguaaaugug

SEQ ID NO: 1154925 - RNA, 21 nt, Human
cagcaacauuuuaagaugaaa

SEQ ID NO: 1154926 - RNA, 24 nt, Human
cauacugaacuuacagagguuucc

SEQ ID NO: 1154927 - RNA, 21 nt, Human
caucucuaccucucugucuau

SEQ ID NO: 1154928 - RNA, 24 nt, Human
ccauuuguucagauuuaauuugga

SEQ ID NO: 1154929 - RNA, 19 nt, Human
cccuccuuauuucuuaguc

SEQ ID NO: 1154930 - RNA, 20 nt, Human
cuaauccaccuuauccacau

SEQ ID NO: 1154931 - RNA, 24 nt, Human
cuugcauuaaaaacgggaaaaaga

SEQ ID NO: 1154932 - RNA, 23 nt, Human
gaugaaauugcccaaagcagggu

SEQ ID NO: 1154933 - RNA, 21 nt, Human
ggagggcaacuuaccacuaca

SEQ ID NO: 1154934 - RNA, 21 nt, Human
uaagugcuuguaaggccagga

SEQ ID NO: 1154935 - RNA, 22 nt, Human
uaauccaccuuauccacauaag

SEQ ID NO: 1154936 - RNA, 18 nt, Human
uaccuugcauuaaaaacg

SEQ ID NO: 1154937 - RNA, 21 nt, Human
uccauacugaacuuacagagg

SEQ ID NO: 1154938 - RNA, 23 nt, Human
ugcuaauccaccuuauccacaua

SEQ ID NO: 1154939 - RNA, 21 nt, Human
uguguuaacuguuuuaaagug

SEQ ID NO: 1154940 - RNA, 20 nt, Human
uugaaaagcugcaaaaucug

SEQ ID NO: 1154941 - RNA, 21 nt, Human
uugaaaagcugcaaaaucugg

SEQ ID NO: 1154942 - RNA, 24 nt, Human
uugcucuuccacccugaggauauu

SEQ ID NO: 1154943 - RNA, 18 nt, Human
aaccaagcccccaccugc

SEQ ID NO: 1154944 - RNA, 20 nt, Human
caaccaagcccccaccugcc

SEQ ID NO: 1154945 - RNA, 22 nt, Human
caaccaagcccccaccugcccc

SEQ ID NO: 1154946 - RNA, 24 nt, Human
caaccaagcccccaccugccccuu

SEQ ID NO: 1154947 - RNA, 20 nt, Human
caagcccccaccugccccuu

SEQ ID NO: 1154948 - RNA, 18 nt, Human
caccacugccggcccaac

SEQ ID NO: 1154949 - RNA, 25 nt, Human
cagcaaccaagcccccaccugcccc

SEQ ID NO: 1154950 - RNA, 24 nt, Human
cagcagggugacccguuccuggcu

SEQ ID NO: 1154951 - RNA, 21 nt, Human
caggaagagcacugggccuug

SEQ ID NO: 1154952 - RNA, 25 nt, Human
cauaggaaaggcccagccaaguccc

SEQ ID NO: 1154953 - RNA, 23 nt, Human
caucaagcucugauucccucaaa

SEQ ID NO: 1154954 - RNA, 21 nt, Human
cccaccacugccggcccaacc

SEQ ID NO: 1154955 - RNA, 18 nt, Human
ccccauagggugccacug

SEQ ID NO: 1154956 - RNA, 21 nt, Human
ccccauagggugccacugcuc

SEQ ID NO: 1154957 - RNA, 21 nt, Human
ccuagagcacagagcccucug

SEQ ID NO: 1154958 - RNA, 25 nt, Human
ccuguccaguucuguacaguagcau

SEQ ID NO: 1154959 - RNA, 19 nt, Human
cucccucccaccuauccac

SEQ ID NO: 1154960 - RNA, 21 nt, Human
cuuuaaaauauacauuauaua

SEQ ID NO: 1154961 - RNA, 20 nt, Human
gaggaagaagggcgggagcc

SEQ ID NO: 1154962 - RNA, 20 nt, Human
gaggggcacacucuccagga

SEQ ID NO: 1154963 - RNA, 24 nt, Human
gcacagagcccucuggccccacca

SEQ ID NO: 1154964 - RNA, 22 nt, Human
gcucuguggggacuugggccgg

SEQ ID NO: 1154965 - RNA, 25 nt, Human
gcuggagcuacagaaggugcucugg

SEQ ID NO: 1154966 - RNA, 21 nt, Human
gggcacagagugaucuucagc

SEQ ID NO: 1154967 - RNA, 21 nt, Human
uacaguagcaucaagcucuga

SEQ ID NO: 1154968 - RNA, 18 nt, Human
uagccccauagggugcca

SEQ ID NO: 1154969 - RNA, 23 nt, Human
uagcuccuagagcacagagcccu

SEQ ID NO: 1154970 - RNA, 23 nt, Human
ucaucuucaauaugauucucuca

SEQ ID NO: 1154971 - RNA, 18 nt, Human
uccuagagcacagagccc

SEQ ID NO: 1154972 - RNA, 23 nt, Human
ucuccaggaaccaagguuagccu

SEQ ID NO: 1154973 - RNA, 23 nt, Human
ugagggcuuggcuccucccccag

SEQ ID NO: 1154974 - RNA, 18 nt, Human
ugcuggaggaagaagggc

SEQ ID NO: 1154975 - RNA, 20 nt, Human
ugcuggaggaagaagggcgg

SEQ ID NO: 1154976 - RNA, 20 nt, Human
ugcuggagggaggguggagg

SEQ ID NO: 1154977 - RNA, 23 nt, Human
uggugugaucagggcugcuggag

SEQ ID NO: 1154978 - RNA, 20 nt, Human
uugcucccucccaccuaucc

SEQ ID NO: 1154979 - RNA, 24 nt, Human
aguguguaccaguuguacaagaaa

SEQ ID NO: 1154980 - RNA, 24 nt, Human
aucauucugaaguacaaucaccuc

SEQ ID NO: 1154981 - RNA, 22 nt, Human
cagcggccgggggugacagcag

SEQ ID NO: 1154982 - RNA, 18 nt, Human
cccucaggcucgcuccca

SEQ ID NO: 1154983 - RNA, 20 nt, Human
ccuggcgccuggccucaggc

SEQ ID NO: 1154984 - RNA, 21 nt, Human
ccuuuaaaauugccaaaauug

SEQ ID NO: 1154985 - RNA, 19 nt, Human
cggccgggggugacagcag

SEQ ID NO: 1154986 - RNA, 24 nt, Human
cggcugucuggcuucaggcgacac

SEQ ID NO: 1154987 - RNA, 22 nt, Human
gagagguguggggagagaccga

SEQ ID NO: 1154988 - RNA, 24 nt, Human
gcggccgggggugacagcagcggc

SEQ ID NO: 1154989 - RNA, 21 nt, Human
ggagggcagcagcggccgggg

SEQ ID NO: 1154990 - RNA, 21 nt, Human
ggcgagagguguggggagaga

SEQ ID NO: 1154991 - RNA, 20 nt, Human
gggcagcagcggccgggggu

SEQ ID NO: 1154992 - RNA, 25 nt, Human
uaaauggcccucaggcucgcuccca

SEQ ID NO: 1154993 - RNA, 18 nt, Human
ugagauaaauggcccuca

SEQ ID NO: 1154994 - RNA, 21 nt, Human
ugggcacauguagauggcagg

SEQ ID NO: 1154995 - RNA, 20 nt, Human
ugguauauggguuuaucauu

SEQ ID NO: 1154996 - RNA, 19 nt, Human
aaaauguucacaagcucuc

SEQ ID NO: 1154997 - RNA, 23 nt, Human
aagaaaaagaacaucuaugaagu

SEQ ID NO: 1154998 - RNA, 23 nt, Human
aagaaauaaacacacgaaaaaga

SEQ ID NO: 1154999 - RNA, 24 nt, Human
aagaacacucaucaaucaaagaca

SEQ ID NO: 1155000 - RNA, 24 nt, Human
aagauuauuuaaaaugcagguccc

SEQ ID NO: 1155001 - RNA, 24 nt, Human
aagcaaauauuuguuauggaccca

SEQ ID NO: 1155002 - RNA, 22 nt, Human
aagcacagugcagaacucuggu

SEQ ID NO: 1155003 - RNA, 22 nt, Human
agaaauaaacacacgaaaaaga

SEQ ID NO: 1155004 - RNA, 24 nt, Human
agaaauacaaagcuuaaucguaga

SEQ ID NO: 1155005 - RNA, 21 nt, Human
agaggaagaaaaagaacaucu

SEQ ID NO: 1155006 - RNA, 21 nt, Human
aggaagaaaaagaacaucuau

SEQ ID NO: 1155007 - RNA, 21 nt, Human
aguagccaacucccuuagcau

SEQ ID NO: 1155008 - RNA, 21 nt, Human
agucucauuuggaaggaaagu

SEQ ID NO: 1155009 - RNA, 23 nt, Human
aguuuaugagaaguguuacacuu

SEQ ID NO: 1155010 - RNA, 19 nt, Human
aucucuauaaaacuaacac

SEQ ID NO: 1155011 - RNA, 21 nt, Human
caaagcuuaaucguagaguuu

SEQ ID NO: 1155012 - RNA, 24 nt, Human
caagcaguucacaauugccauuuu

SEQ ID NO: 1155013 - RNA, 21 nt, Human
caaggcucucugaaagcacca

SEQ ID NO: 1155014 - RNA, 18 nt, Human
caaggugcuagaaauaca

SEQ ID NO: 1155015 - RNA, 19 nt, Human
caccaggaaacaucuucag

SEQ ID NO: 1155016 - RNA, 22 nt, Human
caggaaacaucuucagaguuca

SEQ ID NO: 1155017 - RNA, 21 nt, Human
cccacuagaggaagaaaaaga

SEQ ID NO: 1155018 - RNA, 24 nt, Human
ccuauggccauaguuacuguuuug

SEQ ID NO: 1155019 - RNA, 22 nt, Human
cucucuauccucuucuuggagg

SEQ ID NO: 1155020 - RNA, 21 nt, Human
cugugcuucagucugauauca

SEQ ID NO: 1155021 - RNA, 23 nt, Human
gaggaacucuauaaugcaauuca

SEQ ID NO: 1155022 - RNA, 21 nt, Human
gauucaccaggaaacaucuuc

SEQ ID NO: 1155023 - RNA, 18 nt, Human
gccuauggccauaguuac

SEQ ID NO: 1155024 - RNA, 19 nt, Human
ggaggguggaagcggggag

SEQ ID NO: 1155025 - RNA, 22 nt, Human
gguaaugaugaacaauauggaa

SEQ ID NO: 1155026 - RNA, 26 nt, Human
ggucauggagcuuuuaaaucacagag

SEQ ID NO: 1155027 - RNA, 18 nt, Human
gguccagggucauggagc

SEQ ID NO: 1155028 - RNA, 25 nt, Human
gucugguaccaggugucaaggcucc

SEQ ID NO: 1155029 - RNA, 18 nt, Human
gugauaguagccaacucc

SEQ ID NO: 1155030 - RNA, 20 nt, Human
guucaaggggguggagguca

SEQ ID NO: 1155031 - RNA, 20 nt, Human
guucauucaccuuaagccaa

SEQ ID NO: 1155032 - RNA, 24 nt, Human
uaaaacaaaauguaaugguuccuu

SEQ ID NO: 1155033 - RNA, 22 nt, Human
uaacgucugaauaaacagccuu

SEQ ID NO: 1155034 - RNA, 22 nt, Human
uaauaggaaaacugagguucac

SEQ ID NO: 1155035 - RNA, 19 nt, Human
uacgaggaacucuauaaug

SEQ ID NO: 1155036 - RNA, 20 nt, Human
uacuaaagaaauaaacacac

SEQ ID NO: 1155037 - RNA, 21 nt, Human
uagcaagucuuugcucuaucc

SEQ ID NO: 1155038 - RNA, 21 nt, Human
uagccaaggugcuagaaauac

SEQ ID NO: 1155039 - RNA, 24 nt, Human
uaucauaauccccuuuccacagaa

SEQ ID NO: 1155040 - RNA, 28 nt, Human
uaugugcaaggucuuuacaugcagugug

SEQ ID NO: 1155041 - RNA, 23 nt, Human
uauuucaaaugcaugcaguuuau

SEQ ID NO: 1155042 - RNA, 23 nt, Human
ucaaacauuagcaagucuuugcu

SEQ ID NO: 1155043 - RNA, 27 nt, Human
ucaaagacagucuuaagagucucuccu

SEQ ID NO: 1155044 - RNA, 18 nt, Human
ucaagcaguucacaauug

SEQ ID NO: 1155045 - RNA, 21 nt, Human
ucaccaggaaacaucuucaga

SEQ ID NO: 1155046 - RNA, 20 nt, Human
uccacauauguuuauugauu

SEQ ID NO: 1155047 - RNA, 27 nt, Human
ucccagucuccauccuaagugauucug

SEQ ID NO: 1155048 - RNA, 24 nt, Human
ucuacaugucgcagccgauuuaga

SEQ ID NO: 1155049 - RNA, 19 nt, Human
ucucaaacauuagcaaguc

SEQ ID NO: 1155050 - RNA, 22 nt, Human
ucucuccuuuaucucuauaaaa

SEQ ID NO: 1155051 - RNA, 25 nt, Human
ucugaauauuugaaacucuaaaaca

SEQ ID NO: 1155052 - RNA, 23 nt, Human
ucuuuacaugcaacaucugauca

SEQ ID NO: 1155053 - RNA, 22 nt, Human
ucuuuggauucaccaggaaaca

SEQ ID NO: 1155054 - RNA, 20 nt, Human
ugaaagcaccagucaucauc

SEQ ID NO: 1155055 - RNA, 22 nt, Human
ugaauaagaaacaguauagcca

SEQ ID NO: 1155056 - RNA, 25 nt, Human
ugagguggagaccaggaaucugaau

SEQ ID NO: 1155057 - RNA, 20 nt, Human
uggaggguggaagcggggag

SEQ ID NO: 1155058 - RNA, 22 nt, Human
uggaggguggaagcggggagua

SEQ ID NO: 1155059 - RNA, 19 nt, Human
ugguaccaggugucaaggc

SEQ ID NO: 1155060 - RNA, 20 nt, Human
ugucaggggucuccuaaccu

SEQ ID NO: 1155061 - RNA, 24 nt, Human
uuaauucuauagguggucuuccuc

SEQ ID NO: 1155062 - RNA, 18 nt, Human
uucaaggggguggagguc

SEQ ID NO: 1155063 - RNA, 19 nt, Human
uucacagauguaaauacua

SEQ ID NO: 1155064 - RNA, 23 nt, Human
uucaccaggaaacaucuucagag

SEQ ID NO: 1155065 - RNA, 24 nt, Human
uugggggagguuggaggguggaag

SEQ ID NO: 1155066 - RNA, 21 nt, Human
uuuuuguccuauauuuaggaa

SEQ ID NO: 1155067 - RNA, 18 nt, Human
aggcaacugugcuggccu

SEQ ID NO: 1155068 - RNA, 23 nt, Human
cagggguuuccguuucucaucuc

SEQ ID NO: 1155069 - RNA, 27 nt, Human
ccaaagguuugcugugugggcccaagg

SEQ ID NO: 1155070 - RNA, 21 nt, Human
cccaggcaacugugcuggccu

SEQ ID NO: 1155071 - RNA, 24 nt, Human
cccaggcaacugugcuggccucca

SEQ ID NO: 1155072 - RNA, 23 nt, Human
ccccgacuccaggcugucccccu

SEQ ID NO: 1155073 - RNA, 23 nt, Human
ccuccagcugggucccccgacuc

SEQ ID NO: 1155074 - RNA, 18 nt, Human
cgaugguaaugagucagg

SEQ ID NO: 1155075 - RNA, 19 nt, Human
gaacucguugcuacccaaa

SEQ ID NO: 1155076 - RNA, 25 nt, Human
ggaaaaacaaucuggacuccuuagg

SEQ ID NO: 1155077 - RNA, 21 nt, Human
gggguuuccguuucucaucuc

SEQ ID NO: 1155078 - RNA, 18 nt, Human
uagaaagggcugccaaug

SEQ ID NO: 1155079 - RNA, 20 nt, Human
uagaacucguugcuacccaa

SEQ ID NO: 1155080 - RNA, 18 nt, Human
ucagggguuuccguuucu

SEQ ID NO: 1155081 - RNA, 24 nt, Human
ucagggguuuccguuucucaucuc

SEQ ID NO: 1155082 - RNA, 19 nt, Human
ucgcccaggcaacugugcu

SEQ ID NO: 1155083 - RNA, 23 nt, Human
ugagagacagaguuaguaugcug

SEQ ID NO: 1155084 - RNA, 25 nt, Human
ugauaguagaccuggucuacucccc

SEQ ID NO: 1155085 - RNA, 18 nt, Human
ugcugcuagauaggcaug

SEQ ID NO: 1155086 - RNA, 20 nt, Human
uggauccgucuucucuguuc

SEQ ID NO: 1155087 - RNA, 22 nt, Human
uggccuccagcugggucccccu

SEQ ID NO: 1155088 - RNA, 23 nt, Human
ugggaagaguuuuugcuaggacu

SEQ ID NO: 1155089 - RNA, 20 nt, Human
ugugcugauaguagaccugg

SEQ ID NO: 1155090 - RNA, 25 nt, Human
uuucaaggaaaaacaaucuggacua

SEQ ID NO: 1155091 - RNA, 18 nt, Human
uuugcugugugggcccaa

SEQ ID NO: 1155092 - RNA, 23 nt, Human
aaacugaagcaaaagaucagcga

SEQ ID NO: 1155093 - RNA, 21 nt, Human
aaagcccaggugagagucagg

SEQ ID NO: 1155094 - RNA, 22 nt, Human
aagaaacugaagcaaaagauca

SEQ ID NO: 1155095 - RNA, 18 nt, Human
aagaguucagggaaggga

SEQ ID NO: 1155096 - RNA, 18 nt, Human
aagcuucccuggcuugcc

SEQ ID NO: 1155097 - RNA, 25 nt, Human
aauauauaaugaaacaauuacacaa

SEQ ID NO: 1155098 - RNA, 26 nt, Human
agacacagaauccuagcuacagcuac

SEQ ID NO: 1155099 - RNA, 18 nt, Human
agacuagcccacgcuccg

SEQ ID NO: 1155100 - RNA, 21 nt, Human
agaucccucucaugccuaguu

SEQ ID NO: 1155101 - RNA, 21 nt, Human
agcuacuaaagaaaagaacac

SEQ ID NO: 1155102 - RNA, 21 nt, Human
aggcggggggaguggggaagu

SEQ ID NO: 1155103 - RNA, 21 nt, Human
aguggguugcugaaauggacc

SEQ ID NO: 1155104 - RNA, 24 nt, Human
auaaaugaggcacauaaacauuaa

SEQ ID NO: 1155105 - RNA, 21 nt, Human
augcaaaaguggguugcugaa

SEQ ID NO: 1155106 - RNA, 22 nt, Human
auggggagcagcuguaaauaca

SEQ ID NO: 1155107 - RNA, 21 nt, Human
caaagcccaggugagagucag

SEQ ID NO: 1155108 - RNA, 23 nt, Human
caacgaaaucaggcaggaccgaa

SEQ ID NO: 1155109 - RNA, 24 nt, Human
cacagccucaaggaggagggaacc

SEQ ID NO: 1155110 - RNA, 18 nt, Human
cacaguaguuccagcucc

SEQ ID NO: 1155111 - RNA, 25 nt, Human
cacuucuugcuguguagcccgguuc

SEQ ID NO: 1155112 - RNA, 21 nt, Human
cagagauucacuucuugcugu

SEQ ID NO: 1155113 - RNA, 19 nt, Human
cagcagcagcuccagcagg

SEQ ID NO: 1155114 - RNA, 23 nt, Human
cagcauauacuguuagauucuga

SEQ ID NO: 1155115 - RNA, 25 nt, Human
cagcuguaaauacagauuaagcuuc

SEQ ID NO: 1155116 - RNA, 21 nt, Human
caggacgaguguccggacuug

SEQ ID NO: 1155117 - RNA, 18 nt, Human
cauaaggagcauaaccua

SEQ ID NO: 1155118 - RNA, 25 nt, Human
ccaaggccugauaaagguuuuugaa

SEQ ID NO: 1155119 - RNA, 25 nt, Human
ccaugggcugguacccguuuguggc

SEQ ID NO: 1155120 - RNA, 19 nt, Human
cccauccuugacgcucauc

SEQ ID NO: 1155121 - RNA, 19 nt, Human
ccccgggcucucgcccuuc

SEQ ID NO: 1155122 - RNA, 20 nt, Human
ccccuucucccauccuugac

SEQ ID NO: 1155123 - RNA, 21 nt, Human
ccggggcuggauggggggccg

SEQ ID NO: 1155124 - RNA, 21 nt, Human
ccuagcuacagcuacuaaaga

SEQ ID NO: 1155125 - RNA, 18 nt, Human
ccugggucaggcugcugg

SEQ ID NO: 1155126 - RNA, 22 nt, Human
cgaggccagccaguggcacccc

SEQ ID NO: 1155127 - RNA, 19 nt, Human
cgcagggccaaagcccagg

SEQ ID NO: 1155128 - RNA, 24 nt, Human
cgcggcggcggcgacgccgacacc

SEQ ID NO: 1155129 - RNA, 19 nt, Human
cgcggcucccggggcugga

SEQ ID NO: 1155130 - RNA, 19 nt, Human
cggaagaaagagacgcggc

SEQ ID NO: 1155131 - RNA, 20 nt, Human
cggcccgcggacgaaagagg

SEQ ID NO: 1155132 - RNA, 22 nt, Human
cuacagcuacuaaagaaaagaa

SEQ ID NO: 1155133 - RNA, 25 nt, Human
cucauaaggagcauaaccuagaucc

SEQ ID NO: 1155134 - RNA, 22 nt, Human
cucaugccacagcugaucugac

SEQ ID NO: 1155135 - RNA, 22 nt, Human
cuccaaggccugauaaagguuu

SEQ ID NO: 1155136 - RNA, 20 nt, Human
cucuggaucuccccuucucc

SEQ ID NO: 1155137 - RNA, 23 nt, Human
cugcugccaucgauagaagcagc

SEQ ID NO: 1155138 - RNA, 19 nt, Human
cugcugccguugucgucgc

SEQ ID NO: 1155139 - RNA, 24 nt, Human
cuuugcggugggcccgucggcccc

SEQ ID NO: 1155140 - RNA, 18 nt, Human
gaaguucuuccgugaccu

SEQ ID NO: 1155141 - RNA, 30 nt, Human
gacuagcccacgcuccgguucugagccgcc

SEQ ID NO: 1155142 - RNA, 26 nt, Human
gagcauaaccuagaucccucucaugc

SEQ ID NO: 1155143 - RNA, 23 nt, Human
gagcuuauuuuccugcaacuaga

SEQ ID NO: 1155144 - RNA, 24 nt, Human
gagcuuauuuuccugcaacuagau

SEQ ID NO: 1155145 - RNA, 18 nt, Human
gauagaagcagcacucuc

SEQ ID NO: 1155146 - RNA, 26 nt, Human
gcaacgaaaucaggcaggaccgaacc

SEQ ID NO: 1155147 - RNA, 19 nt, Human
gcccagguguuaaggcagu

SEQ ID NO: 1155148 - RNA, 23 nt, Human
ggagacggcgaggcccggccccc

SEQ ID NO: 1155149 - RNA, 19 nt, Human
ggcccgggggcuggggaca

SEQ ID NO: 1155150 - RNA, 22 nt, Human
ggccgagcgcgcaugugcggga

SEQ ID NO: 1155151 - RNA, 18 nt, Human
ggcggugcaggucguccg

SEQ ID NO: 1155152 - RNA, 20 nt, Human
gggacccgacauugugcuug

SEQ ID NO: 1155153 - RNA, 20 nt, Human
gggccaaagcccaggugaga

SEQ ID NO: 1155154 - RNA, 23 nt, Human
gggccaaagcccaggugagaguc

SEQ ID NO: 1155155 - RNA, 20 nt, Human
ggggggccgaggccagccag

SEQ ID NO: 1155156 - RNA, 21 nt, Human
guacagcaugcaaaagugggu

SEQ ID NO: 1155157 - RNA, 24 nt, Human
guccguaacuccugaccuggauuu

SEQ ID NO: 1155158 - RNA, 18 nt, Human
uaaagcagguguccaaac

SEQ ID NO: 1155159 - RNA, 21 nt, Human
uaaagcagguguccaaacacu

SEQ ID NO: 1155160 - RNA, 27 nt, Human
uaaagcagguguccaaacacuugaggu

SEQ ID NO: 1155161 - RNA, 18 nt, Human
uaaccccuaacccgcacu

SEQ ID NO: 1155162 - RNA, 21 nt, Human
uaaccuagaucccucucaugc

SEQ ID NO: 1155163 - RNA, 18 nt, Human
uacagcaugcaaaagugg

SEQ ID NO: 1155164 - RNA, 19 nt, Human
uagaacguggagaucagca

SEQ ID NO: 1155165 - RNA, 21 nt, Human
uagggcccgcgucagguucuc

SEQ ID NO: 1155166 - RNA, 21 nt, Human
ucacuucuugcuguguagccc

SEQ ID NO: 1155167 - RNA, 18 nt, Human
uccacuaggcuguaaauu

SEQ ID NO: 1155168 - RNA, 24 nt, Human
ucccucucaugccuaguucacagu

SEQ ID NO: 1155169 - RNA, 18 nt, Human
uccguaguuagccucugu

SEQ ID NO: 1155170 - RNA, 21 nt, Human
uccuaugagaaucucaugcca

SEQ ID NO: 1155171 - RNA, 22 nt, Human
ucgcggccgggacuccccgggc

SEQ ID NO: 1155172 - RNA, 23 nt, Human
ucgcggccgggacuccccgggcu

SEQ ID NO: 1155173 - RNA, 21 nt, Human
ucgucgccgccgcggcucccg

SEQ ID NO: 1155174 - RNA, 22 nt, Human
ucucuggaucuccccuucuccc

SEQ ID NO: 1155175 - RNA, 20 nt, Human
ugaaccauggggagcagcug

SEQ ID NO: 1155176 - RNA, 19 nt, Human
ugauugcagguguuaggag

SEQ ID NO: 1155177 - RNA, 18 nt, Human
ugccagagauucacuucu

SEQ ID NO: 1155178 - RNA, 19 nt, Human
ugccaucgauagaagcagc

SEQ ID NO: 1155179 - RNA, 24 nt, Human
uggaccccuggcgccugguaucag

SEQ ID NO: 1155180 - RNA, 21 nt, Human
uggcgcacaguucaccugcug

SEQ ID NO: 1155181 - RNA, 20 nt, Human
uguaaauacagauuaagcuu

SEQ ID NO: 1155182 - RNA, 22 nt, Human
uuaggaaucugugucuuccacu

SEQ ID NO: 1155183 - RNA, 21 nt, Human
uuauuuuccugcaacuagaug

SEQ ID NO: 1155184 - RNA, 23 nt, Human
uucagggaagggaagcgggcccc

SEQ ID NO: 1155185 - RNA, 24 nt, Human
uuccagcuccuaugagaaucucau

SEQ ID NO: 1155186 - RNA, 21 nt, Human
uuccaggccccacuguggcuc

SEQ ID NO: 1155187 - RNA, 18 nt, Human
uuggaccccuggcgccug

SEQ ID NO: 1155188 - RNA, 21 nt, Human
uuucgcagggccaaagcccag

SEQ ID NO: 1155189 - RNA, 18 nt, Human
uuugcuagaacguggaga

SEQ ID NO: 1155190 - RNA, 20 nt, Human
aaccccugccucgcuuguca

SEQ ID NO: 1155191 - RNA, 21 nt, Human
aacuugcugccucgguucuuc

SEQ ID NO: 1155192 - RNA, 23 nt, Human
aacuugcugccucgguucuucuc

SEQ ID NO: 1155193 - RNA, 22 nt, Human
aagcuaaaaugcaucauagucc

SEQ ID NO: 1155194 - RNA, 20 nt, Human
aagguagaggaaaucgcgaa

SEQ ID NO: 1155195 - RNA, 20 nt, Human
aaucugcgcaaacagggcug

SEQ ID NO: 1155196 - RNA, 24 nt, Human
accagcuucugcuaccuucaugcu

SEQ ID NO: 1155197 - RNA, 19 nt, Human
accaucuggaaacacaccg

SEQ ID NO: 1155198 - RNA, 19 nt, Human
acuugcugccucgguucuu

SEQ ID NO: 1155199 - RNA, 19 nt, Human
agaaagaaaggguccaaga

SEQ ID NO: 1155200 - RNA, 23 nt, Human
agaauaacccccaaaagcucaaa

SEQ ID NO: 1155201 - RNA, 18 nt, Human
agagacucuccuaucuca

SEQ ID NO: 1155202 - RNA, 19 nt, Human
agagcagagaagcaguuuu

SEQ ID NO: 1155203 - RNA, 24 nt, Human
agcaggaagcggacucaaggucgc

SEQ ID NO: 1155204 - RNA, 18 nt, Human
agccacccagcccagggc

SEQ ID NO: 1155205 - RNA, 18 nt, Human
agcugugcuucucagagc

SEQ ID NO: 1155206 - RNA, 19 nt, Human
aggcagaaccaggauagaa

SEQ ID NO: 1155207 - RNA, 22 nt, Human
aggcaguccagugguauggaac

SEQ ID NO: 1155208 - RNA, 21 nt, Human
agugcaaccccugccucgcuu

SEQ ID NO: 1155209 - RNA, 25 nt, Human
auagccacccagcccagggccugga

SEQ ID NO: 1155210 - RNA, 24 nt, Human
augguugaggcagaaccggggucc

SEQ ID NO: 1155211 - RNA, 24 nt, Human
auuucugucacuguggugaccaac

SEQ ID NO: 1155212 - RNA, 19 nt, Human
caaagaacccagagacacu

SEQ ID NO: 1155213 - RNA, 21 nt, Human
caccccaaauuucagccugag

SEQ ID NO: 1155214 - RNA, 21 nt, Human
cacuguggugaccaacuucug

SEQ ID NO: 1155215 - RNA, 23 nt, Human
cacuguggugaccaacuucugcc

SEQ ID NO: 1155216 - RNA, 19 nt, Human
caggaccagcaagcaguga

SEQ ID NO: 1155217 - RNA, 21 nt, Human
caucuuuguacucuuugagga

SEQ ID NO: 1155218 - RNA, 22 nt, Human
ccaagguagaggaaaucgcgaa

SEQ ID NO: 1155219 - RNA, 25 nt, Human
ccagagacucuccuaucucaugguu

SEQ ID NO: 1155220 - RNA, 19 nt, Human
ccagugguauggaacuccu

SEQ ID NO: 1155221 - RNA, 22 nt, Human
ccauagccacccagcccagggc

SEQ ID NO: 1155222 - RNA, 23 nt, Human
ccaucuggaaacacaccagcuuc

SEQ ID NO: 1155223 - RNA, 21 nt, Human
ccucaacugggggaggaggac

SEQ ID NO: 1155224 - RNA, 19 nt, Human
ccuucuguaggaaugaggg

SEQ ID NO: 1155225 - RNA, 26 nt, Human
cucagagcagagaagcaguuuuaaga

SEQ ID NO: 1155226 - RNA, 24 nt, Human
cuugaacuguucaagaacugggaa

SEQ ID NO: 1155227 - RNA, 23 nt, Human
gagggcaaagaacccagagacac

SEQ ID NO: 1155228 - RNA, 19 nt, Human
gcaaagaacccagagacac

SEQ ID NO: 1155229 - RNA, 21 nt, Human
gcagcaucauucauuucuuuc

SEQ ID NO: 1155230 - RNA, 25 nt, Human
ggaaaucgcgaaaagaaccgguacc

SEQ ID NO: 1155231 - RNA, 21 nt, Human
ggaacuccuuaauguaagccu

SEQ ID NO: 1155232 - RNA, 21 nt, Human
ggagggcaaagaacccagaga

SEQ ID NO: 1155233 - RNA, 22 nt, Human
gggcagggaucccagagaaaga

SEQ ID NO: 1155234 - RNA, 26 nt, Human
guagaauaacccccaaaagcucaaag

SEQ ID NO: 1155235 - RNA, 23 nt, Human
guccagauggcagaguccacuca

SEQ ID NO: 1155236 - RNA, 23 nt, Human
gugaagggagggcaaagaaccca

SEQ ID NO: 1155237 - RNA, 23 nt, Human
guuauagcagaaccaucuggaaa

SEQ ID NO: 1155238 - RNA, 18 nt, Human
uaaaacauggcagcauca

SEQ ID NO: 1155239 - RNA, 18 nt, Human
uaaaaugcaucauagucc

SEQ ID NO: 1155240 - RNA, 24 nt, Human
uaacuucccuggaugaaggacacu

SEQ ID NO: 1155241 - RNA, 21 nt, Human
uaagagcaccaagguagagga

SEQ ID NO: 1155242 - RNA, 21 nt, Human
uaagcuuugacccagucuaca

SEQ ID NO: 1155243 - RNA, 22 nt, Human
uacagcagcuagcaccagagac

SEQ ID NO: 1155244 - RNA, 18 nt, Human
uagaauaacccccaaaag

SEQ ID NO: 1155245 - RNA, 23 nt, Human
uagaauaacccccaaaagcucaa

SEQ ID NO: 1155246 - RNA, 19 nt, Human
uagaauagagaauaaaagg

SEQ ID NO: 1155247 - RNA, 21 nt, Human
uaguccuagucggcaguucca

SEQ ID NO: 1155248 - RNA, 22 nt, Human
ucccaccccaaauuucagccug

SEQ ID NO: 1155249 - RNA, 18 nt, Human
ucccgaaagcuuaucacu

SEQ ID NO: 1155250 - RNA, 21 nt, Human
ucucccgaaagcuuaucacuu

SEQ ID NO: 1155251 - RNA, 24 nt, Human
ucuugaucugccacaggaccagca

SEQ ID NO: 1155252 - RNA, 20 nt, Human
ucuuuguacucuuugaggac

SEQ ID NO: 1155253 - RNA, 24 nt, Human
ugaaggacacugcuacagcagcua

SEQ ID NO: 1155254 - RNA, 19 nt, Human
ugacagcugacaggugauu

SEQ ID NO: 1155255 - RNA, 20 nt, Human
ugacccagucuacaugcuuc

SEQ ID NO: 1155256 - RNA, 18 nt, Human
ugaccugcuaucccaccc

SEQ ID NO: 1155257 - RNA, 19 nt, Human
ugagcaggaagcggacuca

SEQ ID NO: 1155258 - RNA, 18 nt, Human
ugagucaaaugcuugcac

SEQ ID NO: 1155259 - RNA, 24 nt, Human
ugcaaccccugccucgcuugucaa

SEQ ID NO: 1155260 - RNA, 21 nt, Human
ugccacaggaccagcaagcag

SEQ ID NO: 1155261 - RNA, 23 nt, Human
ugcuacagcagcuagcaccagag

SEQ ID NO: 1155262 - RNA, 20 nt, Human
ugcuguagggucuugaacug

SEQ ID NO: 1155263 - RNA, 19 nt, Human
uggaaugcuagauggccaa

SEQ ID NO: 1155264 - RNA, 24 nt, Human
uggaaugcuagauggccaagccuc

SEQ ID NO: 1155265 - RNA, 23 nt, Human
uggccaagccucagccuuugguc

SEQ ID NO: 1155266 - RNA, 19 nt, Human
uggugaccaacuucugccc

SEQ ID NO: 1155267 - RNA, 22 nt, Human
uucguugacagcugacagguga

SEQ ID NO: 1155268 - RNA, 22 nt, Human
uugaggcagaaccaggauagaa

SEQ ID NO: 1155269 - RNA, 22 nt, Human
uugguccagugcaaccccugcc

SEQ ID NO: 1155270 - RNA, 19 nt, Human
uuucacauaagugccaggc

SEQ ID NO: 1155271 - RNA, 19 nt, Human
uuucguugacagcugacag

SEQ ID NO: 1155272 - RNA, 23 nt, Human
agccgcuguggcccccgaggcug

SEQ ID NO: 1155273 - RNA, 18 nt, Human
aggccacacacagagccc

SEQ ID NO: 1155274 - RNA, 18 nt, Human
agguggccaauaagaagg

SEQ ID NO: 1155275 - RNA, 19 nt, Human
cagacugaagcuggccaug

SEQ ID NO: 1155276 - RNA, 21 nt, Human
cagccagaaaggacaagcugc

SEQ ID NO: 1155277 - RNA, 19 nt, Human
cagcugccacauuaccaca

SEQ ID NO: 1155278 - RNA, 20 nt, Human
ccagccagaaaggacaagcu

SEQ ID NO: 1155279 - RNA, 18 nt, Human
ccuugaauucuggcagug

SEQ ID NO: 1155280 - RNA, 19 nt, Human
cuacugcccagagccugcc

SEQ ID NO: 1155281 - RNA, 22 nt, Human
cucucagccauggcaggcagcu

SEQ ID NO: 1155282 - RNA, 25 nt, Human
cucucuggaaagacccagucccagg

SEQ ID NO: 1155283 - RNA, 20 nt, Human
cugccacauuaccacaggaa

SEQ ID NO: 1155284 - RNA, 18 nt, Human
cuggcuuaugugacgcca

SEQ ID NO: 1155285 - RNA, 20 nt, Human
gaggcuggcagggcccuggc

SEQ ID NO: 1155286 - RNA, 20 nt, Human
gccaggcagacugaagcugg

SEQ ID NO: 1155287 - RNA, 20 nt, Human
gccgcuguggcccccgaggc

SEQ ID NO: 1155288 - RNA, 24 nt, Human
ggcaggcagcuaccuugaauucug

SEQ ID NO: 1155289 - RNA, 21 nt, Human
uaagaaggccacacacagagc

SEQ ID NO: 1155290 - RNA, 22 nt, Human
uaccacaggaacagcagcccca

SEQ ID NO: 1155291 - RNA, 20 nt, Human
ucucagccauggcaggcagc

SEQ ID NO: 1155292 - RNA, 19 nt, Human
ucucuggaaagacccaguc

SEQ ID NO: 1155293 - RNA, 21 nt, Human
ucucuggaaagacccaguccc

SEQ ID NO: 1155294 - RNA, 18 nt, Human
ucucuguggcuacugccc

SEQ ID NO: 1155295 - RNA, 20 nt, Human
ucuggaaagacccaguccca

SEQ ID NO: 1155296 - RNA, 21 nt, Human
ucuguggcuacugcccagagc

SEQ ID NO: 1155297 - RNA, 19 nt, Human
ugccaaggagaagguggcc

SEQ ID NO: 1155298 - RNA, 22 nt, Human
ugcccagagcuuccagccagaa

SEQ ID NO: 1155299 - RNA, 23 nt, Human
ugcuggugugagagccgcugugg

SEQ ID NO: 1155300 - RNA, 18 nt, Human
uggggggaccacaaacca

SEQ ID NO: 1155301 - RNA, 21 nt, Human
uggguuaagcugaggcacacc

SEQ ID NO: 1155302 - RNA, 21 nt, Human
ugugagagccgcuguggcccc

SEQ ID NO: 1155303 - RNA, 22 nt, Human
uuccagccagaaaggacaagcu

SEQ ID NO: 1155304 - RNA, 24 nt, Human
ccagcugauuuuauaguaaguggu

SEQ ID NO: 1155305 - RNA, 18 nt, Human
cccaagagguugaugcaa

SEQ ID NO: 1155306 - RNA, 21 nt, Human
ucacccuuggcacuucuuaac

SEQ ID NO: 1155307 - RNA, 18 nt, Human
uucuccucuucuaaagga

SEQ ID NO: 1155308 - RNA, 18 nt, Human
uugaugcaaggcuucucc

SEQ ID NO: 1155309 - RNA, 21 nt, Human
aagauagagugauuccaaaga

SEQ ID NO: 1155310 - RNA, 19 nt, Human
agccauguaacucaaucuu

SEQ ID NO: 1155311 - RNA, 18 nt, Human
aggagauaagucuauucc

SEQ ID NO: 1155312 - RNA, 18 nt, Human
aggcaaaacaaccuuuug

SEQ ID NO: 1155313 - RNA, 19 nt, Human
aggugccacuugucugaaa

SEQ ID NO: 1155314 - RNA, 19 nt, Human
agucaagauaaaucuucuc

SEQ ID NO: 1155315 - RNA, 19 nt, Human
auaagucuauuccuuuaag

SEQ ID NO: 1155316 - RNA, 18 nt, Human
auuagcugcaaauggaug

SEQ ID NO: 1155317 - RNA, 21 nt, Human
caaagugcuaagcacuuuaca

SEQ ID NO: 1155318 - RNA, 21 nt, Human
ccugggcuuuccacuuuaccu

SEQ ID NO: 1155319 - RNA, 21 nt, Human
cguuggccagcagccggcgcc

SEQ ID NO: 1155320 - RNA, 24 nt, Human
cuagggccucaauguccucauuug

SEQ ID NO: 1155321 - RNA, 24 nt, Human
cuccgagagaucagggaagaaaag

SEQ ID NO: 1155322 - RNA, 24 nt, Human
cucuucccugguguuuguaggugg

SEQ ID NO: 1155323 - RNA, 21 nt, Human
cuuuaaacauuugccugacca

SEQ ID NO: 1155324 - RNA, 19 nt, Human
gcguuggccagcagccggc

SEQ ID NO: 1155325 - RNA, 25 nt, Human
ggaaacugaaggagaaacccacagc

SEQ ID NO: 1155326 - RNA, 27 nt, Human
ggcaaugagaggaaacugaaggagaaa

SEQ ID NO: 1155327 - RNA, 21 nt, Human
guggaguuuucucugggucuu

SEQ ID NO: 1155328 - RNA, 22 nt, Human
guggaguuuucucugggucuug

SEQ ID NO: 1155329 - RNA, 22 nt, Human
uaaacaacuguaauacccaggc

SEQ ID NO: 1155330 - RNA, 20 nt, Human
uaccaugugucacgcaaagu

SEQ ID NO: 1155331 - RNA, 18 nt, Human
uagaauguccaagaaacc

SEQ ID NO: 1155332 - RNA, 24 nt, Human
ucaaucuugcucuucccugguguu

SEQ ID NO: 1155333 - RNA, 18 nt, Human
ucagggaagaaaagcugu

SEQ ID NO: 1155334 - RNA, 21 nt, Human
ucuaaacauuucaguguagaa

SEQ ID NO: 1155335 - RNA, 22 nt, Human
ugagaggaaacugaaggagaaa

SEQ ID NO: 1155336 - RNA, 21 nt, Human
ugcccugcguuggccagcagc

SEQ ID NO: 1155337 - RNA, 22 nt, Human
ugcucgaagacacuugcaggug

SEQ ID NO: 1155338 - RNA, 21 nt, Human
ugcuggagguugaggccuugc

SEQ ID NO: 1155339 - RNA, 18 nt, Human
uggcaagagcugugcugg

SEQ ID NO: 1155340 - RNA, 21 nt, Human
uggcaagagcugugcuggagg

SEQ ID NO: 1155341 - RNA, 21 nt, Human
uggcaagagcugugcuggagg

SEQ ID NO: 1155342 - RNA, 21 nt, Human
ugggcuuuccacuuuaccuuu

SEQ ID NO: 1155343 - RNA, 20 nt, Human
ugguagaaaucacagcaggc

SEQ ID NO: 1155344 - RNA, 18 nt, Human
uguaauacccaggcaugc

SEQ ID NO: 1155345 - RNA, 24 nt, Human
uuuaaacauuugccugaccaaaga

SEQ ID NO: 1155346 - RNA, 21 nt, Human
uuuaacuuccuagggccucaa

SEQ ID NO: 1155347 - RNA, 18 nt, Human
uuuucucugggucuugcg

SEQ ID NO: 1155348 - RNA, 18 nt, Human
uuuugacaauucauucau

SEQ ID NO: 1155349 - RNA, 18 nt, Human
agaaaauacaggagaaaa

SEQ ID NO: 1155350 - RNA, 23 nt, Human
agaagaaaauacaggagaaaauc

SEQ ID NO: 1155351 - RNA, 19 nt, Human
cacuuagaagaaaauacag

SEQ ID NO: 1155352 - RNA, 22 nt, Human
cacuuagaagaaaauacaggag

SEQ ID NO: 1155353 - RNA, 19 nt, Human
cuaaaacuauaaaacacuu

SEQ ID NO: 1155354 - RNA, 23 nt, Human
cuuagaagaaaauacaggagaaa

SEQ ID NO: 1155355 - RNA, 22 nt, Human
uacaggagaaaauccuucugac

SEQ ID NO: 1155356 - RNA, 22 nt, Human
uauaaaacacuuagaagaaaau

SEQ ID NO: 1155357 - RNA, 22 nt, Human
ugaaacggcuuucccggucucc

SEQ ID NO: 1155358 - RNA, 18 nt, Human
ugagagagcuuugaagcc

SEQ ID NO: 1155359 - RNA, 20 nt, Human
agccaucgucccucaccucg

SEQ ID NO: 1155360 - RNA, 22 nt, Human
cacguauguggaccgcacuuug

SEQ ID NO: 1155361 - RNA, 19 nt, Human
ccaauuccguuucucacac

SEQ ID NO: 1155362 - RNA, 18 nt, Human
cccaggcugaggaaagcc

SEQ ID NO: 1155363 - RNA, 23 nt, Human
ggucaucccaggcugaggaaagc

SEQ ID NO: 1155364 - RNA, 22 nt, Human
ugaaacggcuuucccggucucc

SEQ ID NO: 1155365 - RNA, 18 nt, Human
ugagagagcuuugaagcc

SEQ ID NO: 1155366 - RNA, 19 nt, Human
ugaggaaagccaucguccc

SEQ ID NO: 1155367 - RNA, 22 nt, Human
ugaggaaagccaucgucccuca

SEQ ID NO: 1155368 - RNA, 22 nt, Human
ugauaaguggcugcagcuacgu

SEQ ID NO: 1155369 - RNA, 21 nt, Human
ugugaaccuccucucuaacaa

SEQ ID NO: 1155370 - RNA, 25 nt, Human
uugugaaccuccucucuaacaagau

SEQ ID NO: 1155371 - RNA, 26 nt, Human
aaaauagacuccaaaacuccagagaa

SEQ ID NO: 1155372 - RNA, 22 nt, Human
aacacuaacuuaaauaccauuu

SEQ ID NO: 1155373 - RNA, 23 nt, Human
aaccauuuaaaaauuaaggcaaa

SEQ ID NO: 1155374 - RNA, 21 nt, Human
acuccaaaacuccagagaagg

SEQ ID NO: 1155375 - RNA, 22 nt, Human
acuccaaaacuccagagaaggg

SEQ ID NO: 1155376 - RNA, 21 nt, Human
aggcaaacaagaaauauauaa

SEQ ID NO: 1155377 - RNA, 21 nt, Human
ccaugaagaaaauagacucca

SEQ ID NO: 1155378 - RNA, 23 nt, Human
ccuagcaaaauuccaugaagaaa

SEQ ID NO: 1155379 - RNA, 24 nt, Human
ccuagcaaaauuccaugaagaaaa

SEQ ID NO: 1155380 - RNA, 20 nt, Human
gcaaauauacauucucuaag

SEQ ID NO: 1155381 - RNA, 20 nt, Human
ggcaaauuucacaaaccauu

SEQ ID NO: 1155382 - RNA, 25 nt, Human
uaaauauaaagaugccaauauuuuu

SEQ ID NO: 1155383 - RNA, 18 nt, Human
uaaauuuuuaacacuaac

SEQ ID NO: 1155384 - RNA, 24 nt, Human
uaauucuaaauuuuuaacacuaac

SEQ ID NO: 1155385 - RNA, 21 nt, Human
uagacuccaaaacuccagaga

SEQ ID NO: 1155386 - RNA, 24 nt, Human
uccaaaacuccagagaagggaagu

SEQ ID NO: 1155387 - RNA, 19 nt, Human
uccauuuuugaacaaaggg

SEQ ID NO: 1155388 - RNA, 22 nt, Human
ucuuuuguuccuagcaaaauuc

SEQ ID NO: 1155389 - RNA, 24 nt, Human
ugaagaaaauagacuccaaaacuc

SEQ ID NO: 1155390 - RNA, 22 nt, Human
ugaaguagaaaguuaccgcaaa

SEQ ID NO: 1155391 - RNA, 24 nt, Human
ugagaauuauaauagcuuggccag

SEQ ID NO: 1155392 - RNA, 22 nt, Human
uuaauggaguuagacuuuucuu

SEQ ID NO: 1155393 - RNA, 21 nt, Human
uucacaaaccauuuaaaaauu

SEQ ID NO: 1155394 - RNA, 27 nt, Human
uucucuaaguuuauuagauuugaauua

SEQ ID NO: 1155395 - RNA, 22 nt, Human
uuuguuccuagcaaaauuccau

SEQ ID NO: 1155396 - RNA, 28 nt, Human
uuuuuaaaguuuuaacuuuggauaaaua

SEQ ID NO: 1155397 - RNA, 25 nt, Human
aagcaaacauauaugcuugagucca

SEQ ID NO: 1155398 - RNA, 21 nt, Human
acccguucccucuuccuuccc

SEQ ID NO: 1155399 - RNA, 22 nt, Human
agaaacacgggcccuuugcaaa

SEQ ID NO: 1155400 - RNA, 22 nt, Human
aggacuauaaaaugacuuccau

SEQ ID NO: 1155401 - RNA, 21 nt, Human
aggggaggggcuugggcucgg

SEQ ID NO: 1155402 - RNA, 20 nt, Human
aggggaguggaggggagggg

SEQ ID NO: 1155403 - RNA, 23 nt, Human
caggacccguucccucuuccuuc

SEQ ID NO: 1155404 - RNA, 23 nt, Human
cgccaggacccguucccucuucc

SEQ ID NO: 1155405 - RNA, 23 nt, Human
cgcuuggcggcuccggggcacgc

SEQ ID NO: 1155406 - RNA, 20 nt, Human
cggggcacgcaggaagggga

SEQ ID NO: 1155407 - RNA, 19 nt, Human
gacccccgggagcuucccg

SEQ ID NO: 1155408 - RNA, 19 nt, Human
gacccguucccucuuccuu

SEQ ID NO: 1155409 - RNA, 23 nt, Human
gagaagaacguagccgcuuggcg

SEQ ID NO: 1155410 - RNA, 19 nt, Human
gcaaagcaccgccaggacc

SEQ ID NO: 1155411 - RNA, 20 nt, Human
ggggaguggaggggaggggc

SEQ ID NO: 1155412 - RNA, 19 nt, Human
guaaagcaaacauauaugc

SEQ ID NO: 1155413 - RNA, 26 nt, Human
uaaagcaaacauauaugcuugagucc

SEQ ID NO: 1155414 - RNA, 22 nt, Human
ugacuuccaugaauauuagagu

SEQ ID NO: 1155415 - RNA, 19 nt, Human
ugcaaagcaccgccaggac

SEQ ID NO: 1155416 - RNA, 22 nt, Human
uggaggggaggggcuugggcuc

SEQ ID NO: 1155417 - RNA, 23 nt, Human
uggaggggaggggcuugggcucg

SEQ ID NO: 1155418 - RNA, 21 nt, Human
uuuaaggacuauaaaaugacu

SEQ ID NO: 1155419 - RNA, 23 nt, Human
aaagcuucuccaauacaaaauau

SEQ ID NO: 1155420 - RNA, 21 nt, Human
aaaguguugggauuacaggca

SEQ ID NO: 1155421 - RNA, 22 nt, Human
aaaguguugggauuacaggcaa

SEQ ID NO: 1155422 - RNA, 23 nt, Human
aaggcaugagauuuaacucgugc

SEQ ID NO: 1155423 - RNA, 18 nt, Human
aaguguugggauuacagg

SEQ ID NO: 1155424 - RNA, 18 nt, Human
aauaagagagcugaaaaa

SEQ ID NO: 1155425 - RNA, 22 nt, Human
acaaaaaaagggaaggcaugag

SEQ ID NO: 1155426 - RNA, 19 nt, Human
acaaaaggaacuucuuaca

SEQ ID NO: 1155427 - RNA, 23 nt, Human
acaauagccacccccggcccccc

SEQ ID NO: 1155428 - RNA, 18 nt, Human
acaggcaaaagccacugu

SEQ ID NO: 1155429 - RNA, 22 nt, Human
acccugccuaccuuaggaauaa

SEQ ID NO: 1155430 - RNA, 19 nt, Human
acgccucguccgccugcug

SEQ ID NO: 1155431 - RNA, 25 nt, Human
acucugucgaccaggcuggagugca

SEQ ID NO: 1155432 - RNA, 21 nt, Human
agaaagacccacggagcuccg

SEQ ID NO: 1155433 - RNA, 19 nt, Human
agagcugaaaaaguuggug

SEQ ID NO: 1155434 - RNA, 24 nt, Human
agcgaagauggcaauaacaaaagg

SEQ ID NO: 1155435 - RNA, 25 nt, Human
aggcuggagugcaguggugcgaucu

SEQ ID NO: 1155436 - RNA, 18 nt, Human
aguagcugggacuacagg

SEQ ID NO: 1155437 - RNA, 19 nt, Human
agugcaguggugcgaucuc

SEQ ID NO: 1155438 - RNA, 21 nt, Human
agugcaguggugcgaucuccg

SEQ ID NO: 1155439 - RNA, 24 nt, Human
agugcaguggugcgaucuccgcuc

SEQ ID NO: 1155440 - RNA, 24 nt, Human
aguugacccaaaagguuguggucu

SEQ ID NO: 1155441 - RNA, 19 nt, Human
auuccuggugaguggguca

SEQ ID NO: 1155442 - RNA, 23 nt, Human
caaaauauuuggucauguauuca

SEQ ID NO: 1155443 - RNA, 22 nt, Human
caaaguguugggauuacaggca

SEQ ID NO: 1155444 - RNA, 21 nt, Human
caagagaagagaaagacccac

SEQ ID NO: 1155445 - RNA, 20 nt, Human
caagcgauccuccugccuca

SEQ ID NO: 1155446 - RNA, 22 nt, Human
caagcgauccuccugccucagc

SEQ ID NO: 1155447 - RNA, 27 nt, Human
caagcgauccuccugccucagccuccc

SEQ ID NO: 1155448 - RNA, 22 nt, Human
caaggaucuauuaauuaccauc

SEQ ID NO: 1155449 - RNA, 22 nt, Human
cacccccggcccccaccagccc

SEQ ID NO: 1155450 - RNA, 22 nt, Human
cacucugucgaccaggcuggag

SEQ ID NO: 1155451 - RNA, 23 nt, Human
cacugcaaucuccacuuccuggg

SEQ ID NO: 1155452 - RNA, 23 nt, Human
cagcuucugcggggccguggcca

SEQ ID NO: 1155453 - RNA, 21 nt, Human
caggcccugcgcggucuuacg

SEQ ID NO: 1155454 - RNA, 20 nt, Human
caugguuucgccauguuggc

SEQ ID NO: 1155455 - RNA, 24 nt, Human
caugguuucgccauguuggcuggg

SEQ ID NO: 1155456 - RNA, 19 nt, Human
ccaaaguguugggauuaca

SEQ ID NO: 1155457 - RNA, 23 nt, Human
ccaaaguguugggauuacaggca

SEQ ID NO: 1155458 - RNA, 19 nt, Human
ccagcaaagcgaagauggc

SEQ ID NO: 1155459 - RNA, 19 nt, Human
ccauguuggcugggcuggu

SEQ ID NO: 1155460 - RNA, 20 nt, Human
ccauguuggcugggcugguc

SEQ ID NO: 1155461 - RNA, 24 nt, Human
cccaaaguguugggauuacaggca

SEQ ID NO: 1155462 - RNA, 24 nt, Human
cccacaauagccacccccggcccc

SEQ ID NO: 1155463 - RNA, 23 nt, Human
cccgaguagcugggacuacaggc

SEQ ID NO: 1155464 - RNA, 24 nt, Human
cccgaguagcugggacuacaggca

SEQ ID NO: 1155465 - RNA, 23 nt, Human
ccugcaugguggagaguggagaa

SEQ ID NO: 1155466 - RNA, 23 nt, Human
ccugccucagccucccgaguagc

SEQ ID NO: 1155467 - RNA, 20 nt, Human
ccuggguucaagcgauccuc

SEQ ID NO: 1155468 - RNA, 23 nt, Human
ccuggguucaagcgauccuccug

SEQ ID NO: 1155469 - RNA, 24 nt, Human
cgaccaggcuggagugcaguggug

SEQ ID NO: 1155470 - RNA, 22 nt, Human
cgccauguuggcugggcugguc

SEQ ID NO: 1155471 - RNA, 23 nt, Human
cggccacaucaccuuuagcuuuc

SEQ ID NO: 1155472 - RNA, 23 nt, Human
cggccagagaacaacuuuagaau

SEQ ID NO: 1155473 - RNA, 22 nt, Human
cucacacucaccgcccagcucc

SEQ ID NO: 1155474 - RNA, 24 nt, Human
cucacucugucgaccaggcuggag

SEQ ID NO: 1155475 - RNA, 24 nt, Human
cucacugcaaucuccacuuccugg

SEQ ID NO: 1155476 - RNA, 24 nt, Human
cucagccucccgaguagcugggac

SEQ ID NO: 1155477 - RNA, 24 nt, Human
cugccuauucucccaggaaccaaa

SEQ ID NO: 1155478 - RNA, 23 nt, Human
cugccucagccucccgaguagcu

SEQ ID NO: 1155479 - RNA, 21 nt, Human
cugcggggccguggccagucu

SEQ ID NO: 1155480 - RNA, 24 nt, Human
cuuccuggguucaagcgauccucc

SEQ ID NO: 1155481 - RNA, 20 nt, Human
cuuuuucugccuccuccagc

SEQ ID NO: 1155482 - RNA, 20 nt, Human
gaguagcugggacuacaggc

SEQ ID NO: 1155483 - RNA, 27 nt, Human
gaguagcugggacuacaggcaggcguc

SEQ ID NO: 1155484 - RNA, 22 nt, Human
gaucuccgcucacugcaaucuc

SEQ ID NO: 1155485 - RNA, 18 nt, Human
gauuacaggcaaaagcca

SEQ ID NO: 1155486 - RNA, 21 nt, Human
gauuacaggcaaaagccacug

SEQ ID NO: 1155487 - RNA, 24 nt, Human
gauuacaggcaaaagccacugugc

SEQ ID NO: 1155488 - RNA, 18 nt, Human
gcagcuuuuucugccucc

SEQ ID NO: 1155489 - RNA, 24 nt, Human
gcaugguuucgccauguuggcugg

SEQ ID NO: 1155490 - RNA, 18 nt, Human
gccauguuggcugggcug

SEQ ID NO: 1155491 - RNA, 18 nt, Human
gccggccauggcgcggag

SEQ ID NO: 1155492 - RNA, 24 nt, Human
gcgauccuccugccucagccuccc

SEQ ID NO: 1155493 - RNA, 23 nt, Human
gcuggucuggaacuccugaccuc

SEQ ID NO: 1155494 - RNA, 23 nt, Human
ggaaauaugcaaaaggacaucac

SEQ ID NO: 1155495 - RNA, 19 nt, Human
ggagaaggaccaggauucu

SEQ ID NO: 1155496 - RNA, 24 nt, Human
ggauuacaggcaaaagccacugug

SEQ ID NO: 1155497 - RNA, 25 nt, Human
ggcaauaacaaaaggaaccgguacc

SEQ ID NO: 1155498 - RNA, 20 nt, Human
ggcguuucacugccuccagg

SEQ ID NO: 1155499 - RNA, 19 nt, Human
ggcugggcuggucuggaac

SEQ ID NO: 1155500 - RNA, 24 nt, Human
ggcuggucuggaacuccugaccuc

SEQ ID NO: 1155501 - RNA, 21 nt, Human
gggaaggcaugagauuuaacu

SEQ ID NO: 1155502 - RNA, 21 nt, Human
gguuucgccauguuggcuggg

SEQ ID NO: 1155503 - RNA, 22 nt, Human
guccuguccucccaaaguguug

SEQ ID NO: 1155504 - RNA, 19 nt, Human
gucgaccaggcuggagugc

SEQ ID NO: 1155505 - RNA, 20 nt, Human
guugacugcuugagaggaug

SEQ ID NO: 1155506 - RNA, 23 nt, Human
uaagagagcugaaaaaguuggug

SEQ ID NO: 1155507 - RNA, 22 nt, Human
uaaguaaaucuucaauuugcua

SEQ ID NO: 1155508 - RNA, 23 nt, Human
uaauuuuuguauuuuuaguagag

SEQ ID NO: 1155509 - RNA, 24 nt, Human
uaauuuuuguauuuuuaguagagg

SEQ ID NO: 1155510 - RNA, 23 nt, Human
uacaggcaaaagccacugugccc

SEQ ID NO: 1155511 - RNA, 23 nt, Human
uacguugacugcuugagaggaug

SEQ ID NO: 1155512 - RNA, 22 nt, Human
uagaggcaugguuucgccaugu

SEQ ID NO: 1155513 - RNA, 24 nt, Human
uaguagaggcaugguuucgccaug

SEQ ID NO: 1155514 - RNA, 21 nt, Human
uaguuugaccaacaguugacc

SEQ ID NO: 1155515 - RNA, 19 nt, Human
ucaagcgauccuccugccu

SEQ ID NO: 1155516 - RNA, 24 nt, Human
ucacugcaaucuccacuuccuggg

SEQ ID NO: 1155517 - RNA, 23 nt, Human
ucagccucccgaguagcugggac

SEQ ID NO: 1155518 - RNA, 22 nt, Human
uccagcaaagcgaagauggcaa

SEQ ID NO: 1155519 - RNA, 26 nt, Human
uccagguagcugaggccggggccgac

SEQ ID NO: 1155520 - RNA, 24 nt, Human
ucccaaaguguugggauuacaggc

SEQ ID NO: 1155521 - RNA, 25 nt, Human
ucccaggaaccaaauggccucuguc

SEQ ID NO: 1155522 - RNA, 24 nt, Human
ucccgaguagcugggacuacaggc

SEQ ID NO: 1155523 - RNA, 21 nt, Human
ucccugaaguauggaaaugaa

SEQ ID NO: 1155524 - RNA, 26 nt, Human
uccuccugccucagccucccgaguag

SEQ ID NO: 1155525 - RNA, 21 nt, Human
uccuggguucaagcgauccuc

SEQ ID NO: 1155526 - RNA, 24 nt, Human
uccuggguucaagcgauccuccug

SEQ ID NO: 1155527 - RNA, 18 nt, Human
ucgaccaggcuggagugc

SEQ ID NO: 1155528 - RNA, 22 nt, Human
ucgccauguuggcugggcuggu

SEQ ID NO: 1155529 - RNA, 24 nt, Human
ucgccauguuggcugggcuggucu

SEQ ID NO: 1155530 - RNA, 22 nt, Human
ucucacucugucgaccaggcug

SEQ ID NO: 1155531 - RNA, 24 nt, Human
ucucacucugucgaccaggcugga

SEQ ID NO: 1155532 - RNA, 26 nt, Human
ucucgcgccgcucacacucaccgccc

SEQ ID NO: 1155533 - RNA, 18 nt, Human
ucuggcguuucacugccu

SEQ ID NO: 1155534 - RNA, 19 nt, Human
ucugucgaccaggcuggag

SEQ ID NO: 1155535 - RNA, 18 nt, Human
ugaaggaaauaugcaaaa

SEQ ID NO: 1155536 - RNA, 20 nt, Human
ugaaguauggaaaugaaguc

SEQ ID NO: 1155537 - RNA, 18 nt, Human
ugacaaaaaaagggaagg

SEQ ID NO: 1155538 - RNA, 19 nt, Human
ugaccucaagugaucuguc

SEQ ID NO: 1155539 - RNA, 20 nt, Human
ugaccucaagugaucugucc

SEQ ID NO: 1155540 - RNA, 21 nt, Human
ugaccucaagugaucuguccu

SEQ ID NO: 1155541 - RNA, 22 nt, Human
ugacuucccacaauagccaccc

SEQ ID NO: 1155542 - RNA, 24 nt, Human
ugacuucccacaauagccaccccc

SEQ ID NO: 1155543 - RNA, 20 nt, Human
ugagcccuguccaacuucuc

SEQ ID NO: 1155544 - RNA, 23 nt, Human
ugccauuugacaaaaaaagggaa

SEQ ID NO: 1155545 - RNA, 24 nt, Human
ugccucagccucccgaguagcugg

SEQ ID NO: 1155546 - RNA, 18 nt, Human
ugcggggccguggccagu

SEQ ID NO: 1155547 - RNA, 22 nt, Human
uggagugcaguggugcgaucuc

SEQ ID NO: 1155548 - RNA, 24 nt, Human
uggagugcaguggugcgaucuccg

SEQ ID NO: 1155549 - RNA, 22 nt, Human
uggauauggcugaucugaauug

SEQ ID NO: 1155550 - RNA, 24 nt, Human
uggauggaaaaucccuacccaugu

SEQ ID NO: 1155551 - RNA, 20 nt, Human
uggcgcggaggcagcggcgg

SEQ ID NO: 1155552 - RNA, 21 nt, Human
uggcguuucacugccuccagg

SEQ ID NO: 1155553 - RNA, 21 nt, Human
uggcucuggauggaaaauccc

SEQ ID NO: 1155554 - RNA, 24 nt, Human
uggcugggcuggucuggaacuccu

SEQ ID NO: 1155555 - RNA, 22 nt, Human
ugggacuacaggcaggcgucac

SEQ ID NO: 1155556 - RNA, 24 nt, Human
ugggacuacaggcaggcgucacca

SEQ ID NO: 1155557 - RNA, 22 nt, Human
ugggauuacaggcaaaagccac

SEQ ID NO: 1155558 - RNA, 22 nt, Human
ugggauuacaggcaaaagccac

SEQ ID NO: 1155559 - RNA, 24 nt, Human
ugggauuacaggcaaaagccacug

SEQ ID NO: 1155560 - RNA, 26 nt, Human
ugggauuacaggcaaaagccacugug

SEQ ID NO: 1155561 - RNA, 23 nt, Human
uggguucaagcgauccuccugcc

SEQ ID NO: 1155562 - RNA, 24 nt, Human
uggugccauuugacaaaaaaaggg

SEQ ID NO: 1155563 - RNA, 19 nt, Human
uguccugcaugguggagag

SEQ ID NO: 1155564 - RNA, 22 nt, Human
uguccuguccucccaaaguguu

SEQ ID NO: 1155565 - RNA, 24 nt, Human
uguccuguccucccaaaguguugg

SEQ ID NO: 1155566 - RNA, 21 nt, Human
ugucgaccaggcuggagugca

SEQ ID NO: 1155567 - RNA, 20 nt, Human
uguugggauuacaggcaaaa

SEQ ID NO: 1155568 - RNA, 20 nt, Human
uuaccaucuauuaauuacua

SEQ ID NO: 1155569 - RNA, 24 nt, Human
uuaguagaggcaugguuucgccau

SEQ ID NO: 1155570 - RNA, 21 nt, Human
uuauuggcucuggauggaaaa

SEQ ID NO: 1155571 - RNA, 21 nt, Human
uucaagcgauccuccugccuc

SEQ ID NO: 1155572 - RNA, 24 nt, Human
uucaagcgauccuccugccucagc

SEQ ID NO: 1155573 - RNA, 24 nt, Human
uucacugccuccagguagcugagg

SEQ ID NO: 1155574 - RNA, 22 nt, Human
uucauaauuugcuugacauuuc

SEQ ID NO: 1155575 - RNA, 25 nt, Human
uuccugagcccuguccaacuucucc

SEQ ID NO: 1155576 - RNA, 20 nt, Human
uugagucucacucugucgac

SEQ ID NO: 1155577 - RNA, 23 nt, Human
uuggugccauuugacaaaaaaag

SEQ ID NO: 1155578 - RNA, 24 nt, Human
uuucgccauguuggcugggcuggu

SEQ ID NO: 1155579 - RNA, 22 nt, Human
uuuuguauuuuuaguagaggca

SEQ ID NO: 1155580 - RNA, 22 nt, Human
uuuuuaguagaggcaugguuuc

SEQ ID NO: 1155581 - RNA, 20 nt, Human
uuuuuguauuuuuaguagag

SEQ ID NO: 1155582 - RNA, 19 nt, Human
aaguccacucaaaaugcag

SEQ ID NO: 1155583 - RNA, 25 nt, Human
aaucaaguccacucaaaaugcagca

SEQ ID NO: 1155584 - RNA, 21 nt, Human
aaugaagcccucaaguaccgc

SEQ ID NO: 1155585 - RNA, 18 nt, Human
acaaguuuuuuuuaaugu

SEQ ID NO: 1155586 - RNA, 27 nt, Human
agcagaaggcaaaggaggagggacccc

SEQ ID NO: 1155587 - RNA, 21 nt, Human
agcagcacccaauccuugggc

SEQ ID NO: 1155588 - RNA, 20 nt, Human
agcauuuucucccagcagca

SEQ ID NO: 1155589 - RNA, 19 nt, Human
aggagagcgaagguagagg

SEQ ID NO: 1155590 - RNA, 21 nt, Human
auagcggcugaaguccagaac

SEQ ID NO: 1155591 - RNA, 18 nt, Human
augaagcccucaaguacc

SEQ ID NO: 1155592 - RNA, 20 nt, Human
cacacccucuagcagcaccc

SEQ ID NO: 1155593 - RNA, 23 nt, Human
cacccucuagcagcacccaaucc

SEQ ID NO: 1155594 - RNA, 24 nt, Human
cacccucuagcagcacccaauccu

SEQ ID NO: 1155595 - RNA, 24 nt, Human
cagcagcacacugguagcucugac

SEQ ID NO: 1155596 - RNA, 27 nt, Human
caucaggaagcuuccaaugauagcaga

SEQ ID NO: 1155597 - RNA, 20 nt, Human
ccacccuccaaaagaugaau

SEQ ID NO: 1155598 - RNA, 24 nt, Human
ccagaaagaaguccugcaggcccc

SEQ ID NO: 1155599 - RNA, 25 nt, Human
ccagcacaggacccccagaaagaag

SEQ ID NO: 1155600 - RNA, 23 nt, Human
cccauggcaucuuggucuuuucc

SEQ ID NO: 1155601 - RNA, 28 nt, Human
cccccagaaagaaguccugcaggccccc

SEQ ID NO: 1155602 - RNA, 23 nt, Human
cccuccaaaagaugaauuuugca

SEQ ID NO: 1155603 - RNA, 19 nt, Human
ccucuagcagcacccaauc

SEQ ID NO: 1155604 - RNA, 18 nt, Human
cuccagcacaggaccccc

SEQ ID NO: 1155605 - RNA, 19 nt, Human
gagcaggagcaggagagcg

SEQ ID NO: 1155606 - RNA, 21 nt, Human
ggcugaaguccagaacuugaa

SEQ ID NO: 1155607 - RNA, 21 nt, Human
uaaggaaaauucuguaagaga

SEQ ID NO: 1155608 - RNA, 20 nt, Human
ugaacuucacugagaaaauu

SEQ ID NO: 1155609 - RNA, 22 nt, Human
uggcaaugaagcccucaaguac

SEQ ID NO: 1155610 - RNA, 18 nt, Human
uggccagagcaggagcag

SEQ ID NO: 1155611 - RNA, 23 nt, Human
uguucuggcaaugaagcccucaa

SEQ ID NO: 1155612 - RNA, 23 nt, Human
uguuguuguuuuuggguuuuccc

SEQ ID NO: 1155613 - RNA, 20 nt, Human
uuuuuuguuguuguuuuugg

SEQ ID NO: 1155614 - RNA, 18 nt, Human
uuuuuuuguuguuguuuu

SEQ ID NO: 1155615 - RNA, 21 nt, Human
accaaacaacuaauaauacac

SEQ ID NO: 1155616 - RNA, 19 nt, Human
agaggcucugagauguucc

SEQ ID NO: 1155617 - RNA, 20 nt, Human
auaauuacuuaaaauaugga

SEQ ID NO: 1155618 - RNA, 21 nt, Human
augaauuuuguuuuuauuugu

SEQ ID NO: 1155619 - RNA, 23 nt, Human
ccccaguaacuuuucugcuccua

SEQ ID NO: 1155620 - RNA, 18 nt, Human
cucugagauguuccacag

SEQ ID NO: 1155621 - RNA, 22 nt, Human
uacacagcacucucauaauuag

SEQ ID NO: 1155622 - RNA, 20 nt, Human
uacuuaaaauauggagaaau

SEQ ID NO: 1155623 - RNA, 19 nt, Human
ucucuggguugcccaggcc

SEQ ID NO: 1155624 - RNA, 20 nt, Human
ucucuggguugcccaggccc

SEQ ID NO: 1155625 - RNA, 20 nt, Human
ucucuggguugcccaggccu

SEQ ID NO: 1155626 - RNA, 21 nt, Human
ugagaggcucugagauguucc

SEQ ID NO: 1155627 - RNA, 21 nt, Human
uggagaaauuaaagcaugcaa

SEQ ID NO: 1155628 - RNA, 25 nt, Human
cagucuauuggaaagaagaguuuua

SEQ ID NO: 1155629 - RNA, 19 nt, Human
uccaagugaagaccccuuc

SEQ ID NO: 1155630 - RNA, 19 nt, Human
uggaaagaagaguuuuaug

SEQ ID NO: 1155631 - RNA, 22 nt, Human
uggaaagaagaguuuuauggug

SEQ ID NO: 1155632 - RNA, 18 nt, Human
ugguggaagcuacguggu

SEQ ID NO: 1155633 - RNA, 22 nt, Human
aaaaccucuacaguccaucuag

SEQ ID NO: 1155634 - RNA, 18 nt, Human
aaacaaaacaaaaaccaa

SEQ ID NO: 1155635 - RNA, 24 nt, Human
aaacaaaacaaaaaccaaauacuu

SEQ ID NO: 1155636 - RNA, 23 nt, Human
aaacaaaacaaaacaaaaaccaa

SEQ ID NO: 1155637 - RNA, 24 nt, Human
aaacaaaacaaaacaaaaaccaaa

SEQ ID NO: 1155638 - RNA, 22 nt, Human
aaacaaaacaaaacaaaacaaa

SEQ ID NO: 1155639 - RNA, 22 nt, Human
aaagaagagauggaauacaaag

SEQ ID NO: 1155640 - RNA, 21 nt, Human
aaagcaaaggcucuguccuuc

SEQ ID NO: 1155641 - RNA, 19 nt, Human
aacauggugaaacccgcuc

SEQ ID NO: 1155642 - RNA, 20 nt, Human
aacauggugaaacccgcucu

SEQ ID NO: 1155643 - RNA, 21 nt, Human
aacauggugaaacccgcucuu

SEQ ID NO: 1155644 - RNA, 23 nt, Human
aagugaucaugaauaaccaaaac

SEQ ID NO: 1155645 - RNA, 22 nt, Human
acaaaacaaaacaaaaaccaaa

SEQ ID NO: 1155646 - RNA, 23 nt, Human
acaaaacaaaacaaaaaccaaau

SEQ ID NO: 1155647 - RNA, 22 nt, Human
acaaaacaaaacaaaacaaaaa

SEQ ID NO: 1155648 - RNA, 23 nt, Human
acaaaacaaaacaaaacaaaaac

SEQ ID NO: 1155649 - RNA, 24 nt, Human
acaaaacaaaacaaaacaaaaacc

SEQ ID NO: 1155650 - RNA, 24 nt, Human
acagggcgagacuccaacucaaaa

SEQ ID NO: 1155651 - RNA, 22 nt, Human
acucaaaaaacaaaacaaaaca

SEQ ID NO: 1155652 - RNA, 21 nt, Human
acuccauaccuaacaaaaugg

SEQ ID NO: 1155653 - RNA, 23 nt, Human
acugcacuccagccugugugaca

SEQ ID NO: 1155654 - RNA, 24 nt, Human
acugcacuccagccugugugacag

SEQ ID NO: 1155655 - RNA, 24 nt, Human
acuugaggucagggguucgagacc

SEQ ID NO: 1155656 - RNA, 24 nt, Human
agaaaugcacuugaggauaaaucc

SEQ ID NO: 1155657 - RNA, 18 nt, Human
agaauacaaaaagcaaag

SEQ ID NO: 1155658 - RNA, 23 nt, Human
agacagaaaggcgggcgggccgg

SEQ ID NO: 1155659 - RNA, 22 nt, Human
agagaggagacagaaaggcggg

SEQ ID NO: 1155660 - RNA, 21 nt, Human
agcagcgccggacgcggcgca

SEQ ID NO: 1155661 - RNA, 23 nt, Human
agccggguguggugacacaugcc

SEQ ID NO: 1155662 - RNA, 22 nt, Human
agccuggccaacauggugaaac

SEQ ID NO: 1155663 - RNA, 24 nt, Human
agccuggccaacauggugaaaccc

SEQ ID NO: 1155664 - RNA, 24 nt, Human
agccugugugacagggcgagacuc

SEQ ID NO: 1155665 - RNA, 22 nt, Human
aggagaaaaaaaguaaguguag

SEQ ID NO: 1155666 - RNA, 18 nt, Human
aggcaaaagcagaggaag

SEQ ID NO: 1155667 - RNA, 20 nt, Human
aggcugaggcaggggaauug

SEQ ID NO: 1155668 - RNA, 21 nt, Human
aggcugaggcaggggaauugc

SEQ ID NO: 1155669 - RNA, 22 nt, Human
aggggaauugcuccagcccagg

SEQ ID NO: 1155670 - RNA, 22 nt, Human
agguggaucacuugaggucagg

SEQ ID NO: 1155671 - RNA, 21 nt, Human
agguggccaauauucagaagc

SEQ ID NO: 1155672 - RNA, 23 nt, Human
agguggcggagguugcagugagc

SEQ ID NO: 1155673 - RNA, 24 nt, Human
agguggcggagguugcagugagcc

SEQ ID NO: 1155674 - RNA, 19 nt, Human
aguaaaugaaaaagaagag

SEQ ID NO: 1155675 - RNA, 21 nt, Human
auagugaguccauuuucaagg

SEQ ID NO: 1155676 - RNA, 21 nt, Human
aucacuugaggucagggguuc

SEQ ID NO: 1155677 - RNA, 24 nt, Human
auugcaccacugcacuccagccug

SEQ ID NO: 1155678 - RNA, 25 nt, Human
caaaaaacaaaacaaaacaaaacaa

SEQ ID NO: 1155679 - RNA, 26 nt, Human
caaaaaacaaaacaaaacaaaacaaa

SEQ ID NO: 1155680 - RNA, 22 nt, Human
caaaacaaaaaccaaauacuug

SEQ ID NO: 1155681 - RNA, 19 nt, Human
caaaacaaaacaaaaacca

SEQ ID NO: 1155682 - RNA, 22 nt, Human
caaaacaaaacaaaacaaaaac

SEQ ID NO: 1155683 - RNA, 23 nt, Human
caaaacaaaacaaaacaaaaacc

SEQ ID NO: 1155684 - RNA, 20 nt, Human
caaaguccggccggcagggc

SEQ ID NO: 1155685 - RNA, 20 nt, Human
caacaaaaaggccacacggg

SEQ ID NO: 1155686 - RNA, 21 nt, Human
caacauggugaaacccgcucu

SEQ ID NO: 1155687 - RNA, 22 nt, Human
caacauggugaaacccgcucuu

SEQ ID NO: 1155688 - RNA, 23 nt, Human
caacucaaaaaacaaaacaaaac

SEQ ID NO: 1155689 - RNA, 20 nt, Human
caaguaaaugaaaaagaaga

SEQ ID NO: 1155690 - RNA, 27 nt, Human
caccacugcacuccagccugugugaca

SEQ ID NO: 1155691 - RNA, 24 nt, Human
cacuccagccugugugacagggcg

SEQ ID NO: 1155692 - RNA, 19 nt, Human
cacugcacuccagccugug

SEQ ID NO: 1155693 - RNA, 22 nt, Human
cacugcacuccagccuguguga

SEQ ID NO: 1155694 - RNA, 24 nt, Human
cacugcacuccagccugugugaca

SEQ ID NO: 1155695 - RNA, 19 nt, Human
cagcagcgccggacgcggc

SEQ ID NO: 1155696 - RNA, 19 nt, Human
cagcgggagacgguccccc

SEQ ID NO: 1155697 - RNA, 24 nt, Human
cagcuacuugggaggcugaggcag

SEQ ID NO: 1155698 - RNA, 19 nt, Human
cagcugccccgccgcggcc

SEQ ID NO: 1155699 - RNA, 20 nt, Human
caguacggagggagagagga

SEQ ID NO: 1155700 - RNA, 24 nt, Human
caugccuguaauuccagcuacuug

SEQ ID NO: 1155701 - RNA, 18 nt, Human
ccacugcacuccagccug

SEQ ID NO: 1155702 - RNA, 18 nt, Human
ccacugcacuccagccug

SEQ ID NO: 1155703 - RNA, 19 nt, Human
ccacugcacuccagccugu

SEQ ID NO: 1155704 - RNA, 21 nt, Human
ccacugcacuccagccugugu

SEQ ID NO: 1155705 - RNA, 24 nt, Human
ccacugcacuccagccugugugac

SEQ ID NO: 1155706 - RNA, 25 nt, Human
ccacugcacuccagccugugugaca

SEQ ID NO: 1155707 - RNA, 22 nt, Human
cccagcugccccgccgcggcca

SEQ ID NO: 1155708 - RNA, 22 nt, Human
ccccaaucgauaccaaauaucc

SEQ ID NO: 1155709 - RNA, 19 nt, Human
cccccgggcccugcccccc

SEQ ID NO: 1155710 - RNA, 20 nt, Human
cccccuccuacgggaggguc

SEQ ID NO: 1155711 - RNA, 21 nt, Human
ccccgcugugcucccgccccc

SEQ ID NO: 1155712 - RNA, 21 nt, Human
ccgcccccgggcccugccccc

SEQ ID NO: 1155713 - RNA, 21 nt, Human
ccgccugaggcuggggccccg

SEQ ID NO: 1155714 - RNA, 22 nt, Human
ccgggccagggucccgguugcc

SEQ ID NO: 1155715 - RNA, 18 nt, Human
ccuccuacgggagggucg

SEQ ID NO: 1155716 - RNA, 21 nt, Human
ccugccccccuccuacgggag

SEQ ID NO: 1155717 - RNA, 22 nt, Human
ccuggccaacauggugaaaccc

SEQ ID NO: 1155718 - RNA, 23 nt, Human
ccuggccaacauggugaaacccg

SEQ ID NO: 1155719 - RNA, 18 nt, Human
ccuguaauuccagcuacu

SEQ ID NO: 1155720 - RNA, 21 nt, Human
ccuguaauuccagcuacuugg

SEQ ID NO: 1155721 - RNA, 24 nt, Human
cgagaccagccuggccaacauggu

SEQ ID NO: 1155722 - RNA, 22 nt, Human
cgccugaggcuggggccccgcu

SEQ ID NO: 1155723 - RNA, 22 nt, Human
cgggucaccuaaaacauagucu

SEQ ID NO: 1155724 - RNA, 21 nt, Human
cuagauaccaaacuccauacc

SEQ ID NO: 1155725 - RNA, 22 nt, Human
cuagucagaauaacauauuuca

SEQ ID NO: 1155726 - RNA, 23 nt, Human
cucaaaaaacaaaacaaaacaaa

SEQ ID NO: 1155727 - RNA, 19 nt, Human
cuccaacucaaaaaacaaa

SEQ ID NO: 1155728 - RNA, 23 nt, Human
cuccaacucaaaaaacaaaacaa

SEQ ID NO: 1155729 - RNA, 18 nt, Human
cugccccccuccuacggg

SEQ ID NO: 1155730 - RNA, 21 nt, Human
cugccccccuccuacgggagg

SEQ ID NO: 1155731 - RNA, 21 nt, Human
gaacuaaauuuuugucaauaa

SEQ ID NO: 1155732 - RNA, 27 nt, Human
gagcgcagcagcagcgccggacgcggc

SEQ ID NO: 1155733 - RNA, 21 nt, Human
gagguugcagugagccaagau

SEQ ID NO: 1155734 - RNA, 23 nt, Human
gagguugcagugagccaagauug

SEQ ID NO: 1155735 - RNA, 24 nt, Human
gaucacuugaggucagggguucga

SEQ ID NO: 1155736 - RNA, 24 nt, Human
gcacuccagccugugugacagggc

SEQ ID NO: 1155737 - RNA, 21 nt, Human
gcagcgggagacgguccccga

SEQ ID NO: 1155738 - RNA, 19 nt, Human
gcagguggaucacuugagg

SEQ ID NO: 1155739 - RNA, 20 nt, Human
gccaacauggugaaacccgc

SEQ ID NO: 1155740 - RNA, 23 nt, Human
gccaacauggugaaacccgcucu

SEQ ID NO: 1155741 - RNA, 18 nt, Human
gccggacgcggcgcaaag

SEQ ID NO: 1155742 - RNA, 19 nt, Human
gccggcugggggaggggga

SEQ ID NO: 1155743 - RNA, 21 nt, Human
gccggcugggggagggggagc

SEQ ID NO: 1155744 - RNA, 20 nt, Human
gccuguaauuccagcuacuu

SEQ ID NO: 1155745 - RNA, 24 nt, Human
gcuauagugaguccauuuucaagg

SEQ ID NO: 1155746 - RNA, 22 nt, Human
ggagguugcagugagccaagau

SEQ ID NO: 1155747 - RNA, 24 nt, Human
ggagguugcagugagccaagauug

SEQ ID NO: 1155748 - RNA, 22 nt, Human
ggaucacuugaggucagggguu

SEQ ID NO: 1155749 - RNA, 18 nt, Human
ggcagggcucgcaggccg

SEQ ID NO: 1155750 - RNA, 21 nt, Human
ggccucaacaaaaaggccaca

SEQ ID NO: 1155751 - RNA, 23 nt, Human
ggcggagguugcagugagccaag

SEQ ID NO: 1155752 - RNA, 24 nt, Human
ggugacacaugccuguaauuccag

SEQ ID NO: 1155753 - RNA, 23 nt, Human
gguguggugacacaugccuguaa

SEQ ID NO: 1155754 - RNA, 22 nt, Human
guccccgaggcaccaagcuggc

SEQ ID NO: 1155755 - RNA, 19 nt, Human
gugaccaaagcagcgggag

SEQ ID NO: 1155756 - RNA, 21 nt, Human
guggcggagguugcagugagc

SEQ ID NO: 1155757 - RNA, 24 nt, Human
uagauaccaaacuccauaccuaac

SEQ ID NO: 1155758 - RNA, 23 nt, Human
uagauacuauaucccaagaagua

SEQ ID NO: 1155759 - RNA, 23 nt, Human
uauacugcccaagugaucaugaa

SEQ ID NO: 1155760 - RNA, 24 nt, Human
ucaaaauaucauacauuaaugcaa

SEQ ID NO: 1155761 - RNA, 20 nt, Human
ucacuugaggucagggguuc

SEQ ID NO: 1155762 - RNA, 23 nt, Human
ucagcgcccgcugccgccucgcu

SEQ ID NO: 1155763 - RNA, 19 nt, Human
uccaacucaaaaaacaaaa

SEQ ID NO: 1155764 - RNA, 23 nt, Human
uccagccugugugacagggcgag

SEQ ID NO: 1155765 - RNA, 24 nt, Human
uccagccugugugacagggcgaga

SEQ ID NO: 1155766 - RNA, 26 nt, Human
uccauaccuaacaaaauggcaguuua

SEQ ID NO: 1155767 - RNA, 20 nt, Human
uccccgaggcaccaagcugg

SEQ ID NO: 1155768 - RNA, 18 nt, Human
ucccuagauaccaaacuc

SEQ ID NO: 1155769 - RNA, 19 nt, Human
ucgcuguugucuccuuugu

SEQ ID NO: 1155770 - RNA, 20 nt, Human
ucgcuguugucuccuuugug

SEQ ID NO: 1155771 - RNA, 23 nt, Human
ucuuuacuaaaaauacaaaaauu

SEQ ID NO: 1155772 - RNA, 21 nt, Human
ugaaaaagaagagauggaaua

SEQ ID NO: 1155773 - RNA, 22 nt, Human
ugaccaaagcagcgggagacgg

SEQ ID NO: 1155774 - RNA, 21 nt, Human
ugacgcgccgccugaggcugg

SEQ ID NO: 1155775 - RNA, 21 nt, Human
ugaggcaggggaauugcucca

SEQ ID NO: 1155776 - RNA, 25 nt, Human
ugaggcaggggaauugcuccagccc

SEQ ID NO: 1155777 - RNA, 23 nt, Human
ugaggcuggggccccgcugugcu

SEQ ID NO: 1155778 - RNA, 24 nt, Human
ugcaaacacaggagaaaaaaagua

SEQ ID NO: 1155779 - RNA, 21 nt, Human
ugcaccacugcacuccagccu

SEQ ID NO: 1155780 - RNA, 24 nt, Human
ugccuguaauuccagcuacuuggg

SEQ ID NO: 1155781 - RNA, 19 nt, Human
ugcucccgcccccgggccc

SEQ ID NO: 1155782 - RNA, 21 nt, Human
ugcuccgcguccccggcccca

SEQ ID NO: 1155783 - RNA, 24 nt, Human
uggaucacuugaggucagggguuc

SEQ ID NO: 1155784 - RNA, 18 nt, Human
uggcauguaaaccaaaca

SEQ ID NO: 1155785 - RNA, 23 nt, Human
uggccaacauggugaaacccgcu

SEQ ID NO: 1155786 - RNA, 24 nt, Human
uggcggagguugcagugagccaag

SEQ ID NO: 1155787 - RNA, 18 nt, Human
ugggaggcugaggcaggg

SEQ ID NO: 1155788 - RNA, 20 nt, Human
ugggaggcugaggcagggga

SEQ ID NO: 1155789 - RNA, 19 nt, Human
uggggccccgcugugcucc

SEQ ID NO: 1155790 - RNA, 24 nt, Human
uggugacacaugccuguaauucca

SEQ ID NO: 1155791 - RNA, 23 nt, Human
ugucaauaaauacuaauaaaugu

SEQ ID NO: 1155792 - RNA, 20 nt, Human
uuagccggguguggugacac

SEQ ID NO: 1155793 - RNA, 24 nt, Human
uuagccggguguggugacacaugc

SEQ ID NO: 1155794 - RNA, 22 nt, Human
uuauacugcccaagugaucaug

SEQ ID NO: 1155795 - RNA, 23 nt, Human
uucuuauacugcccaagugauca

SEQ ID NO: 1155796 - RNA, 23 nt, Human
uugcaccacugcacuccagccug

SEQ ID NO: 1155797 - RNA, 22 nt, Human
uugcagugagccaagauugcac

SEQ ID NO: 1155798 - RNA, 22 nt, Human
uuggcucuacaaguaaaugaaa

SEQ ID NO: 1155799 - RNA, 23 nt, Human
uugggaggcugaggcaggggaau

SEQ ID NO: 1155800 - RNA, 18 nt, Human
uuugcuauagugagucca

SEQ ID NO: 1155801 - RNA, 21 nt, Human
aggcaagaguaaagucaugua

SEQ ID NO: 1155802 - RNA, 19 nt, Human
caaaugauuuauuacaaag

SEQ ID NO: 1155803 - RNA, 20 nt, Human
guccuuuauuuauuuuuuuu

SEQ ID NO: 1155804 - RNA, 24 nt, Human
aaaaccaauuuagucauuacagag

SEQ ID NO: 1155805 - RNA, 23 nt, Human
aaaauuaaaaagauccacacuca

SEQ ID NO: 1155806 - RNA, 19 nt, Human
aaacagaaagcuacacgug

SEQ ID NO: 1155807 - RNA, 19 nt, Human
aaagaacuuaugaaaaaga

SEQ ID NO: 1155808 - RNA, 21 nt, Human
aaagacacuuucaaaucuacu

SEQ ID NO: 1155809 - RNA, 21 nt, Human
aacaauuccaugacauaguua

SEQ ID NO: 1155810 - RNA, 25 nt, Human
aacaguuuaaaauauuuuaaagugg

SEQ ID NO: 1155811 - RNA, 19 nt, Human
aagaaaagguggauucuaa

SEQ ID NO: 1155812 - RNA, 22 nt, Human
aagaaauuuuuuuagcacucau

SEQ ID NO: 1155813 - RNA, 21 nt, Human
aagaagucuuaaaucuggaac

SEQ ID NO: 1155814 - RNA, 21 nt, Human
aaggaaaaauugcccaugaug

SEQ ID NO: 1155815 - RNA, 21 nt, Human
acaaagaacuuaugaaaaaga

SEQ ID NO: 1155816 - RNA, 19 nt, Human
acaaagacacuuucaaauc

SEQ ID NO: 1155817 - RNA, 20 nt, Human
acccaauugcuuagcauuuu

SEQ ID NO: 1155818 - RNA, 25 nt, Human
agaauucuuuagggauccuccaccu

SEQ ID NO: 1155819 - RNA, 25 nt, Human
agcaaaauuagcaauagaaaaauga

SEQ ID NO: 1155820 - RNA, 21 nt, Human
agcuguuccucacuaacuguu

SEQ ID NO: 1155821 - RNA, 22 nt, Human
aggcaaaugggucucucucaga

SEQ ID NO: 1155822 - RNA, 23 nt, Human
aggucaaucuucucuuuucauuu

SEQ ID NO: 1155823 - RNA, 23 nt, Human
aucuuauucagcccucuuaacca

SEQ ID NO: 1155824 - RNA, 22 nt, Human
augaugcugagauaauaccagu

SEQ ID NO: 1155825 - RNA, 30 nt, Human
caaaacaauuccaugacauaguuaauuaaa

SEQ ID NO: 1155826 - RNA, 19 nt, Human
caaaagaaaagguggauuc

SEQ ID NO: 1155827 - RNA, 21 nt, Human
caaaucaaacucacaaacacu

SEQ ID NO: 1155828 - RNA, 20 nt, Human
caccuccucccccacucccu

SEQ ID NO: 1155829 - RNA, 21 nt, Human
cacguggcccauaauggcacc

SEQ ID NO: 1155830 - RNA, 24 nt, Human
caucacaaagaacuuaugaaaaag

SEQ ID NO: 1155831 - RNA, 24 nt, Human
caucuuauucagcccucuuaaccu

SEQ ID NO: 1155832 - RNA, 25 nt, Human
cauuacagaguuguuuguguuggaa

SEQ ID NO: 1155833 - RNA, 20 nt, Human
ccaccuccucccccacuccc

SEQ ID NO: 1155834 - RNA, 20 nt, Human
ccucuuaaccaugguggaac

SEQ ID NO: 1155835 - RNA, 21 nt, Human
cgguauuagugaaaauucuuc

SEQ ID NO: 1155836 - RNA, 18 nt, Human
cuaaccuuacaaagcauc

SEQ ID NO: 1155837 - RNA, 23 nt, Human
cucagauuugagaaacagaaagc

SEQ ID NO: 1155838 - RNA, 19 nt, Human
cucaggguuucaagucacc

SEQ ID NO: 1155839 - RNA, 26 nt, Human
cuccaccuccucccccacucccuuuu

SEQ ID NO: 1155840 - RNA, 21 nt, Human
cugcuauuuuaaaaagcaaaa

SEQ ID NO: 1155841 - RNA, 20 nt, Human
cuuucaaaucuacugugaaa

SEQ ID NO: 1155842 - RNA, 20 nt, Human
gaaaaagauccaaguuaacc

SEQ ID NO: 1155843 - RNA, 27 nt, Human
gaaaucacuuugggaguuucagcuagg

SEQ ID NO: 1155844 - RNA, 19 nt, Human
gaacuuaugaaaaagaucc

SEQ ID NO: 1155845 - RNA, 18 nt, Human
gaagucuuaaaucuggaa

SEQ ID NO: 1155846 - RNA, 19 nt, Human
gagaaacagaaagcuacac

SEQ ID NO: 1155847 - RNA, 21 nt, Human
gcucccucuauuggugguaag

SEQ ID NO: 1155848 - RNA, 23 nt, Human
gcugacaggaaaauuagaaggaa

SEQ ID NO: 1155849 - RNA, 22 nt, Human
ggucaaucuucucuuuucauuu

SEQ ID NO: 1155850 - RNA, 18 nt, Human
guaauaaggaaaaauugc

SEQ ID NO: 1155851 - RNA, 23 nt, Human
uaaaaagcaaaauuagcaauaga

SEQ ID NO: 1155852 - RNA, 22 nt, Human
uaaaacagaucaguuuuggaca

SEQ ID NO: 1155853 - RNA, 19 nt, Human
uaagaugacuguaggacuu

SEQ ID NO: 1155854 - RNA, 20 nt, Human
uaagaugacuguaggacuug

SEQ ID NO: 1155855 - RNA, 24 nt, Human
uaauagucaguuaaccacccaagu

SEQ ID NO: 1155856 - RNA, 23 nt, Human
uacauguucuaccaaaagaaaag

SEQ ID NO: 1155857 - RNA, 18 nt, Human
uaggaagagagaguggca

SEQ ID NO: 1155858 - RNA, 20 nt, Human
uaggacuugaaacaaaaaaa

SEQ ID NO: 1155859 - RNA, 21 nt, Human
uauguuaaaauaugcccagca

SEQ ID NO: 1155860 - RNA, 20 nt, Human
ucaggcgguauuagugaaaa

SEQ ID NO: 1155861 - RNA, 18 nt, Human
ucauuacagaguuguuug

SEQ ID NO: 1155862 - RNA, 22 nt, Human
uccaaaauaucaaaacaauucc

SEQ ID NO: 1155863 - RNA, 19 nt, Human
uccuccaccuccuccccca

SEQ ID NO: 1155864 - RNA, 21 nt, Human
ucggaagcuguuccucacuaa

SEQ ID NO: 1155865 - RNA, 22 nt, Human
ucuauaaugaaaaugucucuau

SEQ ID NO: 1155866 - RNA, 22 nt, Human
ucucucagauuugagaaacaga

SEQ ID NO: 1155867 - RNA, 27 nt, Human
ucuuaaccaugguggaaacagucccgg

SEQ ID NO: 1155868 - RNA, 21 nt, Human
ugaaaaugucucuauuauaac

SEQ ID NO: 1155869 - RNA, 23 nt, Human
ugaagcaaaugucuuucccuauu

SEQ ID NO: 1155870 - RNA, 21 nt, Human
ugacaggaaaauuagaaggaa

SEQ ID NO: 1155871 - RNA, 18 nt, Human
ugagaaacagaaagcuac

SEQ ID NO: 1155872 - RNA, 24 nt, Human
ugcccagcaaugaaaucacuuugg

SEQ ID NO: 1155873 - RNA, 22 nt, Human
uggaagauuuucccucguuugc

SEQ ID NO: 1155874 - RNA, 24 nt, Human
uggaaggaaaaaaguaauuuuggc

SEQ ID NO: 1155875 - RNA, 23 nt, Human
uggcaggacuccucuuagaaauc

SEQ ID NO: 1155876 - RNA, 22 nt, Human
ugggaccaaaucaaacucacaa

SEQ ID NO: 1155877 - RNA, 19 nt, Human
ugguggucuuuugaauggu

SEQ ID NO: 1155878 - RNA, 21 nt, Human
ugucauggacuacaaugauua

SEQ ID NO: 1155879 - RNA, 18 nt, Human
uuaaaaagcaaaauuagc

SEQ ID NO: 1155880 - RNA, 26 nt, Human
uuagugguagaaaauauuauuuuuuu

SEQ ID NO: 1155881 - RNA, 19 nt, Human
uucuaccaaaagaaaaggu

SEQ ID NO: 1155882 - RNA, 20 nt, Human
aaaaaagaaagaaaaguggg

SEQ ID NO: 1155883 - RNA, 23 nt, Human
aaaaacccuuaaaauacuuaaga

SEQ ID NO: 1155884 - RNA, 23 nt, Human
aaagucagagcagggaaagggaa

SEQ ID NO: 1155885 - RNA, 24 nt, Human
aagaaaguauuaaaauacaaaacu

SEQ ID NO: 1155886 - RNA, 19 nt, Human
acagucaaaguuucauuca

SEQ ID NO: 1155887 - RNA, 23 nt, Human
acccuuuugguagcccugguccc

SEQ ID NO: 1155888 - RNA, 22 nt, Human
accucaaaaaacccugaauaaa

SEQ ID NO: 1155889 - RNA, 24 nt, Human
accucaaaaaacccugaauaaaga

SEQ ID NO: 1155890 - RNA, 18 nt, Human
acucuuaccugcuuaagc

SEQ ID NO: 1155891 - RNA, 24 nt, Human
agaaagucaaaaaauaauugcuuu

SEQ ID NO: 1155892 - RNA, 23 nt, Human
agacagaugccaccaccguucuc

SEQ ID NO: 1155893 - RNA, 19 nt, Human
aggauauaaaaacuuaaaa

SEQ ID NO: 1155894 - RNA, 19 nt, Human
caaaacacagagccgcggc

SEQ ID NO: 1155895 - RNA, 23 nt, Human
caaacucagugagacuugacuuc

SEQ ID NO: 1155896 - RNA, 20 nt, Human
cagauccaucaucucaaccu

SEQ ID NO: 1155897 - RNA, 18 nt, Human
cagcaaugacuucccaag

SEQ ID NO: 1155898 - RNA, 23 nt, Human
cagcaaugacuucccaagaaaaa

SEQ ID NO: 1155899 - RNA, 18 nt, Human
caucucaaccugccuugc

SEQ ID NO: 1155900 - RNA, 21 nt, Human
cccaaccgggcgccuggaucc

SEQ ID NO: 1155901 - RNA, 22 nt, Human
cccaggcaacagacagaugcca

SEQ ID NO: 1155902 - RNA, 19 nt, Human
cgccuggaucccaggcaac

SEQ ID NO: 1155903 - RNA, 24 nt, Human
cuccccacccuuuugguagcccug

SEQ ID NO: 1155904 - RNA, 24 nt, Human
gaaaaguggguguuacauauuccu

SEQ ID NO: 1155905 - RNA, 22 nt, Human
gagccgcggcugcgcuuccuga

SEQ ID NO: 1155906 - RNA, 23 nt, Human
guuacauauuccugaaagccaga

SEQ ID NO: 1155907 - RNA, 23 nt, Human
guuucauucacagggagcuguag

SEQ ID NO: 1155908 - RNA, 26 nt, Human
uaaauggaucaacuaagauauacuaa

SEQ ID NO: 1155909 - RNA, 19 nt, Human
uaagcaaauauaaacaaac

SEQ ID NO: 1155910 - RNA, 21 nt, Human
uaagcaaauauaaacaaacac

SEQ ID NO: 1155911 - RNA, 26 nt, Human
uaagcaaauauaaacaaacacucccu

SEQ ID NO: 1155912 - RNA, 24 nt, Human
uacauauuccugaaagccagacuc

SEQ ID NO: 1155913 - RNA, 25 nt, Human
uauacuaaaccucaaaaaacccuga

SEQ ID NO: 1155914 - RNA, 22 nt, Human
uaucugaaagaaggauauaaaa

SEQ ID NO: 1155915 - RNA, 22 nt, Human
uauuaagaacaaacucagugag

SEQ ID NO: 1155916 - RNA, 23 nt, Human
uauuaagaacaaacucagugaga

SEQ ID NO: 1155917 - RNA, 20 nt, Human
uauuaauaaaaaaaacccuu

SEQ ID NO: 1155918 - RNA, 19 nt, Human
ucaaaaaacccugaauaaa

SEQ ID NO: 1155919 - RNA, 22 nt, Human
ucaaaaaacccugaauaaagau

SEQ ID NO: 1155920 - RNA, 21 nt, Human
ucacuugauggaaaaagugau

SEQ ID NO: 1155921 - RNA, 20 nt, Human
ucccaagaaaaaagaaagaa

SEQ ID NO: 1155922 - RNA, 22 nt, Human
ucccaagaaaaaagaaagaaaa

SEQ ID NO: 1155923 - RNA, 24 nt, Human
ugaaaacuuauuugagaaagucaa

SEQ ID NO: 1155924 - RNA, 25 nt, Human
ugaaagccagacucuaaucacacag

SEQ ID NO: 1155925 - RNA, 19 nt, Human
ugagaaagucaaaaaauaa

SEQ ID NO: 1155926 - RNA, 20 nt, Human
ugccaccaccguucucccca

SEQ ID NO: 1155927 - RNA, 23 nt, Human
uguaaguuacaugcaaagcaaau

SEQ ID NO: 1155928 - RNA, 22 nt, Human
uucauuaguacuaauucacagg

SEQ ID NO: 1155929 - RNA, 18 nt, Human
uuuaacuucucuacaguc

SEQ ID NO: 1155930 - RNA, 22 nt, Human
uuuuaaggcuguauauuucacu

SEQ ID NO: 1155931 - RNA, 18 nt, Human
uuuuuuuuuuuuuuuuug

SEQ ID NO: 1155932 - RNA, 19 nt, Human
aagaauauaaaaaacauua

SEQ ID NO: 1155933 - RNA, 21 nt, Human
agaaaauaugaucuaugaaga

SEQ ID NO: 1155934 - RNA, 18 nt, Human
agaauauaaaaaacauua

SEQ ID NO: 1155935 - RNA, 24 nt, Human
agagucuuccuuuuuuuuuccuuu

SEQ ID NO: 1155936 - RNA, 23 nt, Human
auuauaagcuacaacacuuugca

SEQ ID NO: 1155937 - RNA, 20 nt, Human
auucucaauauuagcaauuu

SEQ ID NO: 1155938 - RNA, 25 nt, Human
caguuuaauuguaacaaaccacaau

SEQ ID NO: 1155939 - RNA, 22 nt, Human
ccccagggaccccggcgggucu

SEQ ID NO: 1155940 - RNA, 23 nt, Human
ccccagggaccccggcgggucug

SEQ ID NO: 1155941 - RNA, 22 nt, Human
ccuggggacacaggcgcggggg

SEQ ID NO: 1155942 - RNA, 24 nt, Human
ccuggggacacaggcgcgggggag

SEQ ID NO: 1155943 - RNA, 21 nt, Human
cucaauauuagcaauuuaucu

SEQ ID NO: 1155944 - RNA, 20 nt, Human
cuuccuuuuuuuuuccuuuu

SEQ ID NO: 1155945 - RNA, 19 nt, Human
gaagacauuaauacauuaa

SEQ ID NO: 1155946 - RNA, 21 nt, Human
gagucuuccuuuuuuuuuccu

SEQ ID NO: 1155947 - RNA, 24 nt, Human
ggcaggaggugcgagggggggacc

SEQ ID NO: 1155948 - RNA, 26 nt, Human
gggcaggaggugcgagggggggaccc

SEQ ID NO: 1155949 - RNA, 20 nt, Human
ggggaggggagcgcggcccg

SEQ ID NO: 1155950 - RNA, 18 nt, Human
gggucuggggcuggacgc

SEQ ID NO: 1155951 - RNA, 23 nt, Human
gucuuccuuuuuuuuuccuuuua

SEQ ID NO: 1155952 - RNA, 20 nt, Human
uaagauacuuaagaguucau

SEQ ID NO: 1155953 - RNA, 20 nt, Human
uagguuuacaaacuugacac

SEQ ID NO: 1155954 - RNA, 26 nt, Human
uauacauuauaccuacagcuguuuuu

SEQ ID NO: 1155955 - RNA, 22 nt, Human
ugagcaaauuuaagaauauaaa

SEQ ID NO: 1155956 - RNA, 21 nt, Human
ugcaaauaaguauccaguuua

SEQ ID NO: 1155957 - RNA, 26 nt, Human
ugccgggcuggcgcguccccagggac

SEQ ID NO: 1155958 - RNA, 18 nt, Human
uggggacacaggcgcggg

SEQ ID NO: 1155959 - RNA, 20 nt, Human
uuuacagugagagucuuccu

SEQ ID NO: 1155960 - RNA, 22 nt, Human
aaacucauggaugcugaaaacg

SEQ ID NO: 1155961 - RNA, 26 nt, Human
aacgcuuggaagaucagagucuuccc

SEQ ID NO: 1155962 - RNA, 24 nt, Human
aagcauuucuaaguuaagaaugaa

SEQ ID NO: 1155963 - RNA, 20 nt, Human
acuaaaauccauuggguguu

SEQ ID NO: 1155964 - RNA, 23 nt, Human
agcaauaaaaucagucacaggaa

SEQ ID NO: 1155965 - RNA, 20 nt, Human
aggccgaggccgugcggcgc

SEQ ID NO: 1155966 - RNA, 18 nt, Human
agucacaggaaaugaaaa

SEQ ID NO: 1155967 - RNA, 21 nt, Human
agucacaggaaaugaaaagaa

SEQ ID NO: 1155968 - RNA, 22 nt, Human
agucauuguucuugaucuuuuc

SEQ ID NO: 1155969 - RNA, 24 nt, Human
aucucgcuucuuuuuauccuccuu

SEQ ID NO: 1155970 - RNA, 19 nt, Human
cacccggucucgaucucgc

SEQ ID NO: 1155971 - RNA, 18 nt, Human
cagcagccuccguccucc

SEQ ID NO: 1155972 - RNA, 21 nt, Human
caggauggagaagucccaacg

SEQ ID NO: 1155973 - RNA, 20 nt, Human
caggcucugaauucuuuccu

SEQ ID NO: 1155974 - RNA, 20 nt, Human
ccagaguccucucucucuga

SEQ ID NO: 1155975 - RNA, 19 nt, Human
ccagauuccuucacaaugc

SEQ ID NO: 1155976 - RNA, 19 nt, Human
ccauggagaguucggugac

SEQ ID NO: 1155977 - RNA, 20 nt, Human
ccccgcgccaggccgaggcc

SEQ ID NO: 1155978 - RNA, 26 nt, Human
ccccuggaaucugcuucucuccuuuc

SEQ ID NO: 1155979 - RNA, 19 nt, Human
ccgcgccaggccgaggccg

SEQ ID NO: 1155980 - RNA, 24 nt, Human
ccuccagauuccuucacaaugcgg

SEQ ID NO: 1155981 - RNA, 26 nt, Human
ccuccuacuuugaggaccagcuucaa

SEQ ID NO: 1155982 - RNA, 21 nt, Human
ccuuuuauccucuuugaaccc

SEQ ID NO: 1155983 - RNA, 18 nt, Human
cgagcggagggcgggagc

SEQ ID NO: 1155984 - RNA, 22 nt, Human
cgccaggccgaggccgugcggc

SEQ ID NO: 1155985 - RNA, 18 nt, Human
cggcgccgcuuccggucc

SEQ ID NO: 1155986 - RNA, 18 nt, Human
cuaaucucacaggggcgu

SEQ ID NO: 1155987 - RNA, 21 nt, Human
cugugaggugucuguuccauc

SEQ ID NO: 1155988 - RNA, 23 nt, Human
cuucucuccuuucuuucucuuuu

SEQ ID NO: 1155989 - RNA, 19 nt, Human
cuucuuguuuggcuaaaga

SEQ ID NO: 1155990 - RNA, 24 nt, Human
cuugcugauauucgcaaaugugga

SEQ ID NO: 1155991 - RNA, 23 nt, Human
cuuggaagaucagagucuucccc

SEQ ID NO: 1155992 - RNA, 22 nt, Human
cuuuauaauaaauggucucugg

SEQ ID NO: 1155993 - RNA, 19 nt, Human
cuuucucuuuuuccgcuuu

SEQ ID NO: 1155994 - RNA, 23 nt, Human
cuuucuuucucuuuuuccgcuuu

SEQ ID NO: 1155995 - RNA, 19 nt, Human
gaggaccagcuucaauggc

SEQ ID NO: 1155996 - RNA, 20 nt, Human
gcggcgccgcuuccgguccg

SEQ ID NO: 1155997 - RNA, 23 nt, Human
ggauccacaggauggagaagucc

SEQ ID NO: 1155998 - RNA, 23 nt, Human
guacuaaaauccauuggguguuu

SEQ ID NO: 1155999 - RNA, 21 nt, Human
guaucuuuuucuuuuucuuug

SEQ ID NO: 1156000 - RNA, 23 nt, Human
gugcaacagcuucuuugcagcuu

SEQ ID NO: 1156001 - RNA, 23 nt, Human
guggccaaaaacucauggaugcu

SEQ ID NO: 1156002 - RNA, 19 nt, Human
uaaagagcuugugagaggc

SEQ ID NO: 1156003 - RNA, 21 nt, Human
uaaugaucauggaguagccag

SEQ ID NO: 1156004 - RNA, 20 nt, Human
uaaugcggugcauaagaacc

SEQ ID NO: 1156005 - RNA, 18 nt, Human
uacuuugaggaccagcuu

SEQ ID NO: 1156006 - RNA, 21 nt, Human
uaggguccuggaaugcccucc

SEQ ID NO: 1156007 - RNA, 22 nt, Human
uauaaucaaauaccaggcagcc

SEQ ID NO: 1156008 - RNA, 22 nt, Human
ucaagcguaucuuuuucuuuuu

SEQ ID NO: 1156009 - RNA, 24 nt, Human
ucaauggcuucucuacauacuccu

SEQ ID NO: 1156010 - RNA, 18 nt, Human
ucacaggaaaugaaaaga

SEQ ID NO: 1156011 - RNA, 23 nt, Human
ucaguugauucaaagcuucuuga

SEQ ID NO: 1156012 - RNA, 23 nt, Human
uccguuuucuccccuuuucuucc

SEQ ID NO: 1156013 - RNA, 19 nt, Human
uccuucacaaugcggucaa

SEQ ID NO: 1156014 - RNA, 24 nt, Human
ucgcuucuuuuuauccuccuuaac

SEQ ID NO: 1156015 - RNA, 24 nt, Human
ucuaaucucacaggggcgugacac

SEQ ID NO: 1156016 - RNA, 18 nt, Human
ucuccguuuucuccccuu

SEQ ID NO: 1156017 - RNA, 21 nt, Human
ucucuccuuucuuucucuuuu

SEQ ID NO: 1156018 - RNA, 18 nt, Human
ucucucuaaauuauugcu

SEQ ID NO: 1156019 - RNA, 22 nt, Human
ucugccucauucuccacccccc

SEQ ID NO: 1156020 - RNA, 18 nt, Human
ucugcuucucuccuuucu

SEQ ID NO: 1156021 - RNA, 18 nt, Human
ucuucuccguuuucuccc

SEQ ID NO: 1156022 - RNA, 18 nt, Human
ucuugugcuucuugccca

SEQ ID NO: 1156023 - RNA, 21 nt, Human
ucuuucucuuuuuccgcuuuc

SEQ ID NO: 1156024 - RNA, 20 nt, Human
ugaaaacgcuuggaagauca

SEQ ID NO: 1156025 - RNA, 21 nt, Human
ugccucauucuccacccgguc

SEQ ID NO: 1156026 - RNA, 22 nt, Human
uggaaucugcuucucuccuuuc

SEQ ID NO: 1156027 - RNA, 22 nt, Human
uggagguguuuguccgacuugu

SEQ ID NO: 1156028 - RNA, 22 nt, Human
uggcuaagaauuuucaucccug

SEQ ID NO: 1156029 - RNA, 18 nt, Human
uguuaaaacauccaguaa

SEQ ID NO: 1156030 - RNA, 23 nt, Human
uguucuacuucuuguuuggcuaa

SEQ ID NO: 1156031 - RNA, 21 nt, Human
uucccagucucacagggcagu

SEQ ID NO: 1156032 - RNA, 23 nt, Human
uuccuuuuauccucuuugaaccc

SEQ ID NO: 1156033 - RNA, 21 nt, Human
uucuuugcagcuuuauaauaa

SEQ ID NO: 1156034 - RNA, 19 nt, Human
uugaauagauuaaaucaga

SEQ ID NO: 1156035 - RNA, 22 nt, Human
uuugaggaccagcuucaauggc

SEQ ID NO: 1156036 - RNA, 23 nt, Human
uuuugucuucgaagaggcuggag

SEQ ID NO: 1156037 - RNA, 20 nt, Human
aaagagcaggcauggaggac

SEQ ID NO: 1156038 - RNA, 20 nt, Human
aaagaucuguugcacaaaug

SEQ ID NO: 1156039 - RNA, 18 nt, Human
aaagcaaagaggguccuc

SEQ ID NO: 1156040 - RNA, 18 nt, Human
aaagcaccagcuuccacc

SEQ ID NO: 1156041 - RNA, 24 nt, Human
aaauaagccaggugaaaauaccac

SEQ ID NO: 1156042 - RNA, 21 nt, Human
aaccuaaguguccaucaacag

SEQ ID NO: 1156043 - RNA, 25 nt, Human
aagaggcaggguaugguaacaaaug

SEQ ID NO: 1156044 - RNA, 23 nt, Human
aaguguccaucaacagauaaaca

SEQ ID NO: 1156045 - RNA, 24 nt, Human
aaguguuggagauugguuaagacc

SEQ ID NO: 1156046 - RNA, 18 nt, Human
aaugugguauauauacac

SEQ ID NO: 1156047 - RNA, 23 nt, Human
acaccaggcccagcaccuccagc

SEQ ID NO: 1156048 - RNA, 19 nt, Human
acgaauccgccagggaagc

SEQ ID NO: 1156049 - RNA, 19 nt, Human
acuauguaguuuacaaagc

SEQ ID NO: 1156050 - RNA, 24 nt, Human
acucacaccaggcccagcaccucc

SEQ ID NO: 1156051 - RNA, 24 nt, Human
agagguaggcucugagaaccugcc

SEQ ID NO: 1156052 - RNA, 22 nt, Human
agauaaacagauaaagaaaaug

SEQ ID NO: 1156053 - RNA, 21 nt, Human
agcaccagcuuccaccacucu

SEQ ID NO: 1156054 - RNA, 22 nt, Human
aggaagagguaggcucugagaa

SEQ ID NO: 1156055 - RNA, 19 nt, Human
aggacucagccuugcugua

SEQ ID NO: 1156056 - RNA, 18 nt, Human
aggcagcaccaauaaagc

SEQ ID NO: 1156057 - RNA, 22 nt, Human
aggcaggguaugguaacaaaug

SEQ ID NO: 1156058 - RNA, 19 nt, Human
aggcauggaggacuguggg

SEQ ID NO: 1156059 - RNA, 21 nt, Human
auaaagcaauucuccagaaag

SEQ ID NO: 1156060 - RNA, 20 nt, Human
aucaaccuaaguguccauca

SEQ ID NO: 1156061 - RNA, 23 nt, Human
cacaccaggcccagcaccuccag

SEQ ID NO: 1156062 - RNA, 26 nt, Human
caccuccagcccgugguccuuggccc

SEQ ID NO: 1156063 - RNA, 19 nt, Human
cacucacaccaggcccagc

SEQ ID NO: 1156064 - RNA, 20 nt, Human
cagauaaagaaaauguggua

SEQ ID NO: 1156065 - RNA, 26 nt, Human
cagcaccaauaaagcaauucuccaga

SEQ ID NO: 1156066 - RNA, 18 nt, Human
caggcagcaccaauaaag

SEQ ID NO: 1156067 - RNA, 25 nt, Human
caggcgcccaucaaagcgcaucugc

SEQ ID NO: 1156068 - RNA, 21 nt, Human
caggguaugguaacaaaugcc

SEQ ID NO: 1156069 - RNA, 25 nt, Human
caugccucuagccuggccccagcgc

SEQ ID NO: 1156070 - RNA, 20 nt, Human
ccacaccaucaugcagggua

SEQ ID NO: 1156071 - RNA, 21 nt, Human
ccagaaagaugggcaggccuc

SEQ ID NO: 1156072 - RNA, 26 nt, Human
ccagggccucggccagcuccagccug

SEQ ID NO: 1156073 - RNA, 23 nt, Human
cccacaccaucaugcaggguaca

SEQ ID NO: 1156074 - RNA, 22 nt, Human
cccgacacugcucuuccgcugu

SEQ ID NO: 1156075 - RNA, 18 nt, Human
ccgcuguuccgaaggccu

SEQ ID NO: 1156076 - RNA, 22 nt, Human
ccuccacagccaacagcugcuc

SEQ ID NO: 1156077 - RNA, 24 nt, Human
ccuccagcccgugguccuuggccc

SEQ ID NO: 1156078 - RNA, 19 nt, Human
ccucgcccagcaguuccag

SEQ ID NO: 1156079 - RNA, 22 nt, Human
ccucgcccagcaguuccagcag

SEQ ID NO: 1156080 - RNA, 26 nt, Human
ccuggccccagcgccagggccucggc

SEQ ID NO: 1156081 - RNA, 19 nt, Human
cggccagagagaauuccag

SEQ ID NO: 1156082 - RNA, 23 nt, Human
cucucugcaaagcaagaggcagg

SEQ ID NO: 1156083 - RNA, 23 nt, Human
cuuccuuaccccuucucaguuuc

SEQ ID NO: 1156084 - RNA, 22 nt, Human
gaaagaugggcaggccucccac

SEQ ID NO: 1156085 - RNA, 20 nt, Human
gacccuaaagagcaggcaug

SEQ ID NO: 1156086 - RNA, 24 nt, Human
gagaaauaaguucaaaagaucugu

SEQ ID NO: 1156087 - RNA, 19 nt, Human
gagaauuccaggguccggc

SEQ ID NO: 1156088 - RNA, 19 nt, Human
gcaguuccagcagaccacg

SEQ ID NO: 1156089 - RNA, 21 nt, Human
gccucgcccagcaguuccagc

SEQ ID NO: 1156090 - RNA, 19 nt, Human
gccucuagccuggccccag

SEQ ID NO: 1156091 - RNA, 19 nt, Human
gccuugauccggcgugaga

SEQ ID NO: 1156092 - RNA, 21 nt, Human
ggcaggccucccacaccauca

SEQ ID NO: 1156093 - RNA, 23 nt, Human
ggcauggaggacugugggaagga

SEQ ID NO: 1156094 - RNA, 18 nt, Human
gggguuggggguagggaa

SEQ ID NO: 1156095 - RNA, 23 nt, Human
guuucaggagaagaaaaguguug

SEQ ID NO: 1156096 - RNA, 18 nt, Human
uaagccaggugaaaauac

SEQ ID NO: 1156097 - RNA, 19 nt, Human
uaccaugaaagaugauaaa

SEQ ID NO: 1156098 - RNA, 24 nt, Human
uaccccuucucaguuucaggagaa

SEQ ID NO: 1156099 - RNA, 22 nt, Human
uagacccuaaagagcaggcaug

SEQ ID NO: 1156100 - RNA, 21 nt, Human
uagucagggcgcuccacgcgg

SEQ ID NO: 1156101 - RNA, 27 nt, Human
uaugcaugccuggggguuccggagccc

SEQ ID NO: 1156102 - RNA, 22 nt, Human
ucaaccuaaguguccaucaaca

SEQ ID NO: 1156103 - RNA, 19 nt, Human
ucaugcaggguacaggggc

SEQ ID NO: 1156104 - RNA, 19 nt, Human
uccacgcggaaggcggccg

SEQ ID NO: 1156105 - RNA, 23 nt, Human
uccaucaacagauaaacagauaa

SEQ ID NO: 1156106 - RNA, 20 nt, Human
ucccugaguccacagagggu

SEQ ID NO: 1156107 - RNA, 19 nt, Human
uccugagaaagcaccagcu

SEQ ID NO: 1156108 - RNA, 26 nt, Human
ucucuauccuucccaaaaaacauggg

SEQ ID NO: 1156109 - RNA, 23 nt, Human
ugaaagcaucauuuuguacacag

SEQ ID NO: 1156110 - RNA, 20 nt, Human
ugauccggcgugagagcugc

SEQ ID NO: 1156111 - RNA, 18 nt, Human
ugccucuagccuggcccc

SEQ ID NO: 1156112 - RNA, 19 nt, Human
ugccuggggguuaccaggc

SEQ ID NO: 1156113 - RNA, 21 nt, Human
ugccuggggguuaccaggcug

SEQ ID NO: 1156114 - RNA, 23 nt, Human
ugcuucucuauccuucccaaaaa

SEQ ID NO: 1156115 - RNA, 22 nt, Human
uggaauacuauuuggccuuaaa

SEQ ID NO: 1156116 - RNA, 24 nt, Human
uggcguagcgcagagggaggcggc

SEQ ID NO: 1156117 - RNA, 18 nt, Human
ugggaaggacucagccuu

SEQ ID NO: 1156118 - RNA, 20 nt, Human
ugggguagacccuaaagagc

SEQ ID NO: 1156119 - RNA, 18 nt, Human
uguguguggucacauugu

SEQ ID NO: 1156120 - RNA, 23 nt, Human
uucaggagaagaaaaguguugga

SEQ ID NO: 1156121 - RNA, 18 nt, Human
uucccaccaauugcugug

SEQ ID NO: 1156122 - RNA, 23 nt, Human
uuccuuaccccuucucaguuuca

SEQ ID NO: 1156123 - RNA, 19 nt, Human
uuuagccacgccacaaugu

SEQ ID NO: 1156124 - RNA, 25 nt, Human
uuuguacacaguaaacauaggcaau

SEQ ID NO: 1156125 - RNA, 20 nt, Human
aaaacacccagcacagugcc

SEQ ID NO: 1156126 - RNA, 24 nt, Human
aaacacccagcacagugccuaaca

SEQ ID NO: 1156127 - RNA, 23 nt, Human
aagaaucauuaagauaguauaaa

SEQ ID NO: 1156128 - RNA, 18 nt, Human
acacccagcaagaauucu

SEQ ID NO: 1156129 - RNA, 23 nt, Human
acaggcugcaccuuggaauguug

SEQ ID NO: 1156130 - RNA, 22 nt, Human
acuaacacuggcugucucacaa

SEQ ID NO: 1156131 - RNA, 21 nt, Human
acuacauucuaguggcaacag

SEQ ID NO: 1156132 - RNA, 26 nt, Human
agaaaaugaaaucaagaaagcaacua

SEQ ID NO: 1156133 - RNA, 28 nt, Human
aguugagaaaauggagggacgucagcuu

SEQ ID NO: 1156134 - RNA, 25 nt, Human
aucacaauuaaaauugucauuaacu

SEQ ID NO: 1156135 - RNA, 24 nt, Human
caagcucagcaaggugacaaaaca

SEQ ID NO: 1156136 - RNA, 23 nt, Human
caaggugacaaaacauaagauca

SEQ ID NO: 1156137 - RNA, 20 nt, Human
cacagugccuaacacacugg

SEQ ID NO: 1156138 - RNA, 19 nt, Human
cagcgcuacagucccuggu

SEQ ID NO: 1156139 - RNA, 20 nt, Human
caggccuuauacacaggcug

SEQ ID NO: 1156140 - RNA, 19 nt, Human
caguauauagaaaauccua

SEQ ID NO: 1156141 - RNA, 18 nt, Human
cauccgggauaccacagu

SEQ ID NO: 1156142 - RNA, 20 nt, Human
caugaaaaacacccagcaca

SEQ ID NO: 1156143 - RNA, 18 nt, Human
ccacaguaccuuuaguug

SEQ ID NO: 1156144 - RNA, 21 nt, Human
cccagcacagugccuaacaca

SEQ ID NO: 1156145 - RNA, 25 nt, Human
cccaggaucccauccgggauaccac

SEQ ID NO: 1156146 - RNA, 22 nt, Human
ccccacccuggucuugcccuuc

SEQ ID NO: 1156147 - RNA, 22 nt, Human
ccccugccucacccguccuucc

SEQ ID NO: 1156148 - RNA, 21 nt, Human
ccugcacccaguuuccucuau

SEQ ID NO: 1156149 - RNA, 20 nt, Human
ccuggccaaaccugaucccc

SEQ ID NO: 1156150 - RNA, 20 nt, Human
ccuuuaguugccaugucucc

SEQ ID NO: 1156151 - RNA, 25 nt, Human
cggccccuggcuuugagucaguacc

SEQ ID NO: 1156152 - RNA, 23 nt, Human
cguccuucccagcgcuacagucc

SEQ ID NO: 1156153 - RNA, 23 nt, Human
cuaaaaaauaacacuauucauaa

SEQ ID NO: 1156154 - RNA, 24 nt, Human
cucuucuucuccuagucuuugcug

SEQ ID NO: 1156155 - RNA, 23 nt, Human
cugagccucagucuccucaucug

SEQ ID NO: 1156156 - RNA, 23 nt, Human
cuguuaggacugauaagcaagcu

SEQ ID NO: 1156157 - RNA, 23 nt, Human
gaauccacuaaaaaacuguuagg

SEQ ID NO: 1156158 - RNA, 21 nt, Human
gacugauaagcaagcucagca

SEQ ID NO: 1156159 - RNA, 22 nt, Human
gagaaaauggagggacgucagc

SEQ ID NO: 1156160 - RNA, 23 nt, Human
gagucaguacccagaagcucuga

SEQ ID NO: 1156161 - RNA, 18 nt, Human
gcugcauagacccaaccu

SEQ ID NO: 1156162 - RNA, 19 nt, Human
gggaaggcagcaccuacua

SEQ ID NO: 1156163 - RNA, 24 nt, Human
ggugguguuggcugugaucacagc

SEQ ID NO: 1156164 - RNA, 21 nt, Human
gugcuaaaaaauaacacuauu

SEQ ID NO: 1156165 - RNA, 27 nt, Human
uaaaauaucagaaaaugaaaucaagaa

SEQ ID NO: 1156166 - RNA, 22 nt, Human
uaauacaugaaaaacacccagc

SEQ ID NO: 1156167 - RNA, 20 nt, Human
uaauuuauuuaagcccucug

SEQ ID NO: 1156168 - RNA, 18 nt, Human
uacuacauucuaguggca

SEQ ID NO: 1156169 - RNA, 23 nt, Human
uagaaaauccuaaggaauccacu

SEQ ID NO: 1156170 - RNA, 19 nt, Human
uaggucccagcaugugagc

SEQ ID NO: 1156171 - RNA, 19 nt, Human
uaguugccaugucuccuua

SEQ ID NO: 1156172 - RNA, 22 nt, Human
uaguuuaaaaugcaaguuuuag

SEQ ID NO: 1156173 - RNA, 18 nt, Human
uaucuaagaauaaauuua

SEQ ID NO: 1156174 - RNA, 25 nt, Human
uauuacuaagaauaagauaucuaag

SEQ ID NO: 1156175 - RNA, 21 nt, Human
ucagacaagccuugacucaua

SEQ ID NO: 1156176 - RNA, 24 nt, Human
ucagggagguacaggcacacccag

SEQ ID NO: 1156177 - RNA, 22 nt, Human
uccccugccucacccguccuuc

SEQ ID NO: 1156178 - RNA, 20 nt, Human
ucccugguaagccacugccc

SEQ ID NO: 1156179 - RNA, 18 nt, Human
uccuuagaucccucuugc

SEQ ID NO: 1156180 - RNA, 18 nt, Human
ucuacugcuuccugcugc

SEQ ID NO: 1156181 - RNA, 24 nt, Human
ucuccucaucuguaaaauggaggc

SEQ ID NO: 1156182 - RNA, 21 nt, Human
ucuccuggccaaaccugaucc

SEQ ID NO: 1156183 - RNA, 23 nt, Human
ucugccccuauuagcugaagacc

SEQ ID NO: 1156184 - RNA, 23 nt, Human
ugaaaaacacccagcacagugcc

SEQ ID NO: 1156185 - RNA, 19 nt, Human
ugagaaagucugagaucug

SEQ ID NO: 1156186 - RNA, 22 nt, Human
ugagccagugcuccuugucaug

SEQ ID NO: 1156187 - RNA, 23 nt, Human
ugagucaguacccagaagcucug

SEQ ID NO: 1156188 - RNA, 20 nt, Human
ugauccccacccuggucuug

SEQ ID NO: 1156189 - RNA, 23 nt, Human
ugcccucuucuucuccuagucuu

SEQ ID NO: 1156190 - RNA, 19 nt, Human
ugccucacccguccuuccc

SEQ ID NO: 1156191 - RNA, 22 nt, Human
ugccucacccguccuucccagc

SEQ ID NO: 1156192 - RNA, 23 nt, Human
uggccaggccacauugucaggga

SEQ ID NO: 1156193 - RNA, 19 nt, Human
uggcuuugagucaguaccc

SEQ ID NO: 1156194 - RNA, 26 nt, Human
uguaaaauggaggcaauaaaaucuaa

SEQ ID NO: 1156195 - RNA, 20 nt, Human
ugugaucacagcccugcaau

SEQ ID NO: 1156196 - RNA, 20 nt, Human
uucaaguuauguaggugaug

SEQ ID NO: 1156197 - RNA, 18 nt, Human
uucuaguggcaacaguug

SEQ ID NO: 1156198 - RNA, 18 nt, Human
uuuaagcccucugagccu

SEQ ID NO: 1156199 - RNA, 18 nt, Human
uuucugucccaggauccc

SEQ ID NO: 1156200 - RNA, 19 nt, Human
uuugagucaguacccagaa

SEQ ID NO: 1156201 - RNA, 20 nt, Human
aacagcuuuucacaagccga

SEQ ID NO: 1156202 - RNA, 22 nt, Human
aacucccuucuucaauugacua

SEQ ID NO: 1156203 - RNA, 19 nt, Human
acacaguuauaaaaaaugc

SEQ ID NO: 1156204 - RNA, 25 nt, Human
acccaaugaaguuuucgucugaugc

SEQ ID NO: 1156205 - RNA, 19 nt, Human
agacaaucaugaacaguau

SEQ ID NO: 1156206 - RNA, 22 nt, Human
aggauggaaagggagaagagga

SEQ ID NO: 1156207 - RNA, 21 nt, Human
auagcuuuaaaaaaaaaagua

SEQ ID NO: 1156208 - RNA, 20 nt, Human
caaacuguauccagcuuuau

SEQ ID NO: 1156209 - RNA, 21 nt, Human
caagaggaagucucucaaagc

SEQ ID NO: 1156210 - RNA, 18 nt, Human
cagcuuuauuaaagauac

SEQ ID NO: 1156211 - RNA, 21 nt, Human
caucugugucaaagucaggga

SEQ ID NO: 1156212 - RNA, 20 nt, Human
ccacagucuagaaauggaac

SEQ ID NO: 1156213 - RNA, 26 nt, Human
cccuccuccugggagccaagaggaag

SEQ ID NO: 1156214 - RNA, 20 nt, Human
cugggggucaggucccaaca

SEQ ID NO: 1156215 - RNA, 19 nt, Human
cuucaauugacuaccaaaa

SEQ ID NO: 1156216 - RNA, 21 nt, Human
gaaggauggaaagggagaaga

SEQ ID NO: 1156217 - RNA, 20 nt, Human
ggaaagguguuuuccccaca

SEQ ID NO: 1156218 - RNA, 21 nt, Human
ggcaucacuggaaaguccaga

SEQ ID NO: 1156219 - RNA, 26 nt, Human
uagaaauggaaccaccgcuguuuuga

SEQ ID NO: 1156220 - RNA, 22 nt, Human
uagcauagcuuuaaaaaaaaaa

SEQ ID NO: 1156221 - RNA, 23 nt, Human
uaugccccuucucccuaaaacaa

SEQ ID NO: 1156222 - RNA, 18 nt, Human
ucaaagcuagaagggaaa

SEQ ID NO: 1156223 - RNA, 19 nt, Human
ucacaagccgacccugagu

SEQ ID NO: 1156224 - RNA, 22 nt, Human
ucaggcaggacaugggcagaca

SEQ ID NO: 1156225 - RNA, 21 nt, Human
uccacagucuagaaauggaac

SEQ ID NO: 1156226 - RNA, 25 nt, Human
ucccaacagaugucugggcuuaagg

SEQ ID NO: 1156227 - RNA, 20 nt, Human
ugaaaauggcagaauuuauc

SEQ ID NO: 1156228 - RNA, 21 nt, Human
ugaaaauggcagaauuuaucu

SEQ ID NO: 1156229 - RNA, 25 nt, Human
ugaacaguauacaacaaauuuuaaa

SEQ ID NO: 1156230 - RNA, 19 nt, Human
ugccaaggugaccaucugu

SEQ ID NO: 1156231 - RNA, 18 nt, Human
uggcaucacuggaaaguc

SEQ ID NO: 1156232 - RNA, 19 nt, Human
uguucugugugcuaauagc

SEQ ID NO: 1156233 - RNA, 19 nt, Human
uuccccacaucaauccagc

SEQ ID NO: 1156234 - RNA, 29 nt, Human
uuuagagugaggguugacauuucacauuu

SEQ ID NO: 1156235 - RNA, 23 nt, Human
aaaauauccacauauaagggcug

SEQ ID NO: 1156236 - RNA, 23 nt, Human
aagaacauaaaaaaaaaacuuca

SEQ ID NO: 1156237 - RNA, 20 nt, Human
aaggauagaaccaugucacu

SEQ ID NO: 1156238 - RNA, 22 nt, Human
aauccuuaacaucugcauuuaa

SEQ ID NO: 1156239 - RNA, 21 nt, Human
acacuuguagacagaaaccgg

SEQ ID NO: 1156240 - RNA, 19 nt, Human
acagaauuacaaagucaag

SEQ ID NO: 1156241 - RNA, 23 nt, Human
accaaaauacagaugcuaaaaca

SEQ ID NO: 1156242 - RNA, 19 nt, Human
accuucccacccccuaaaa

SEQ ID NO: 1156243 - RNA, 21 nt, Human
accuucccacccccuaaaaac

SEQ ID NO: 1156244 - RNA, 19 nt, Human
acuacaguauuaaaagguc

SEQ ID NO: 1156245 - RNA, 23 nt, Human
agcaaaaacaaauuuauauccau

SEQ ID NO: 1156246 - RNA, 24 nt, Human
aggcugucuuaaaacggcucugcu

SEQ ID NO: 1156247 - RNA, 22 nt, Human
aucucuuuaauaaaacccaaau

SEQ ID NO: 1156248 - RNA, 21 nt, Human
caagguacuacaguauuaaaa

SEQ ID NO: 1156249 - RNA, 21 nt, Human
cacucaauaaaauuuucacaa

SEQ ID NO: 1156250 - RNA, 27 nt, Human
cacuccacauccuaccuucccaccccc

SEQ ID NO: 1156251 - RNA, 22 nt, Human
caguauguucacuguuuacacu

SEQ ID NO: 1156252 - RNA, 18 nt, Human
caguauuaaaaggucaac

SEQ ID NO: 1156253 - RNA, 23 nt, Human
caguauuaaaaggucaacuuuaa

SEQ ID NO: 1156254 - RNA, 24 nt, Human
cauccuaccuucccacccccuaaa

SEQ ID NO: 1156255 - RNA, 31 nt, Human
cauccuaccuucccacccccuaaaaacaaaa

SEQ ID NO: 1156256 - RNA, 22 nt, Human
caugaguuccggcuuuccagga

SEQ ID NO: 1156257 - RNA, 26 nt, Human
cauuaaugggugggguggaggguggg

SEQ ID NO: 1156258 - RNA, 18 nt, Human
ccacccaaauccauacua

SEQ ID NO: 1156259 - RNA, 22 nt, Human
ccacccccuaaaaacaaagcuu

SEQ ID NO: 1156260 - RNA, 20 nt, Human
cccccuaaaaacaaagcuac

SEQ ID NO: 1156261 - RNA, 21 nt, Human
ccuaccuucccacccccuaaa

SEQ ID NO: 1156262 - RNA, 22 nt, Human
cucucucccuucuauucuggca

SEQ ID NO: 1156263 - RNA, 25 nt, Human
cucuuuaauaaaacccaaaugaaua

SEQ ID NO: 1156264 - RNA, 23 nt, Human
cuucuucacaaugauaaccuucc

SEQ ID NO: 1156265 - RNA, 21 nt, Human
gacuagaauauacaguaaaug

SEQ ID NO: 1156266 - RNA, 19 nt, Human
gagcaucuggcuuuguaga

SEQ ID NO: 1156267 - RNA, 19 nt, Human
ggaaggccaucacuucuuc

SEQ ID NO: 1156268 - RNA, 18 nt, Human
ggaguccuuugagcuacu

SEQ ID NO: 1156269 - RNA, 20 nt, Human
ggcugggagagagacaucac

SEQ ID NO: 1156270 - RNA, 18 nt, Human
gggcugggagagagacau

SEQ ID NO: 1156271 - RNA, 22 nt, Human
gguggggguuccuuuguccuuu

SEQ ID NO: 1156272 - RNA, 22 nt, Human
guguacauauauacaauguaua

SEQ ID NO: 1156273 - RNA, 22 nt, Human
guguaggguguacauauauaca

SEQ ID NO: 1156274 - RNA, 22 nt, Human
uaaaugcagauacaauaguggg

SEQ ID NO: 1156275 - RNA, 26 nt, Human
uaaaugcagauacaauagugggguua

SEQ ID NO: 1156276 - RNA, 18 nt, Human
uaaccaaaauacagaugc

SEQ ID NO: 1156277 - RNA, 26 nt, Human
uaaccaaaauacagaugcuaaaacag

SEQ ID NO: 1156278 - RNA, 21 nt, Human
uaaguaaaggauagaaccaug

SEQ ID NO: 1156279 - RNA, 21 nt, Human
uaauaucuucuaaccaaaaua

SEQ ID NO: 1156280 - RNA, 24 nt, Human
uacaauagugggguuacuuaacag

SEQ ID NO: 1156281 - RNA, 24 nt, Human
uacaguaaaugucuuugauuaaua

SEQ ID NO: 1156282 - RNA, 18 nt, Human
uacccacccaaauccaua

SEQ ID NO: 1156283 - RNA, 24 nt, Human
uaccuucccacccccuaaaaacaa

SEQ ID NO: 1156284 - RNA, 22 nt, Human
uacuacaguauuaaaaggucaa

SEQ ID NO: 1156285 - RNA, 24 nt, Human
uagaaauguuuucucucucccuuc

SEQ ID NO: 1156286 - RNA, 18 nt, Human
uagaauauacagaauuac

SEQ ID NO: 1156287 - RNA, 21 nt, Human
uagaauauacaguaaaugucu

SEQ ID NO: 1156288 - RNA, 19 nt, Human
uaggguguacauauauaca

SEQ ID NO: 1156289 - RNA, 22 nt, Human
ucacacuggugaucaaagggua

SEQ ID NO: 1156290 - RNA, 29 nt, Human
uccacaugauagaauaugcuguagggcug

SEQ ID NO: 1156291 - RNA, 18 nt, Human
uccuaccuucccaccccc

SEQ ID NO: 1156292 - RNA, 18 nt, Human
uccugggcguuuaaaugc

SEQ ID NO: 1156293 - RNA, 23 nt, Human
ugaacaugaaugacugcagguca

SEQ ID NO: 1156294 - RNA, 19 nt, Human
ugaagacagagcaucuggc

SEQ ID NO: 1156295 - RNA, 18 nt, Human
ugaaugacugcaggucac

SEQ ID NO: 1156296 - RNA, 18 nt, Human
ugacugcaggucacgcug

SEQ ID NO: 1156297 - RNA, 21 nt, Human
uggaggguggggguuccuuug

SEQ ID NO: 1156298 - RNA, 21 nt, Human
uggcaguuugaaaaagaauca

SEQ ID NO: 1156299 - RNA, 19 nt, Human
uggggguuccuuuguccuu

SEQ ID NO: 1156300 - RNA, 25 nt, Human
ugggguggaggguggggguuccuuu

SEQ ID NO: 1156301 - RNA, 21 nt, Human
uggguuuuuagcaaggggucu

SEQ ID NO: 1156302 - RNA, 20 nt, Human
uguagauauauuucugaguc

SEQ ID NO: 1156303 - RNA, 23 nt, Human
uguagggcaauuagauuugaggg

SEQ ID NO: 1156304 - RNA, 18 nt, Human
uucccacccccuaaaaac

SEQ ID NO: 1156305 - RNA, 19 nt, Human
uucguaagcccuuugugac

SEQ ID NO: 1156306 - RNA, 22 nt, Human
uuguagauauauuucugagucu

SEQ ID NO: 1156307 - RNA, 24 nt, Human
uuuccaauccuuaacaucugcauu

SEQ ID NO: 1156308 - RNA, 23 nt, Human
aucacacucaugccuaucaacca

SEQ ID NO: 1156309 - RNA, 18 nt, Human
cccucgucuuccgccccg

SEQ ID NO: 1156310 - RNA, 18 nt, Human
ccgaccucgccgcccucg

SEQ ID NO: 1156311 - RNA, 21 nt, Human
ccucgccgcccucgucuuccg

SEQ ID NO: 1156312 - RNA, 22 nt, Human
cgcccggaacccgaccucgccg

SEQ ID NO: 1156313 - RNA, 25 nt, Human
cgcgcgcagugcccggaaugacccc

SEQ ID NO: 1156314 - RNA, 22 nt, Human
cggaaugaccccuccacauuga

SEQ ID NO: 1156315 - RNA, 22 nt, Human
cggccucggccccgcacagccc

SEQ ID NO: 1156316 - RNA, 24 nt, Human
cuggccuaggcucuuaugcguggg

SEQ ID NO: 1156317 - RNA, 21 nt, Human
cuuaacacaucuugccugaga

SEQ ID NO: 1156318 - RNA, 23 nt, Human
gguauucuuaacacaucuugccu

SEQ ID NO: 1156319 - RNA, 22 nt, Human
uaccuucaucucuguuaggcuu

SEQ ID NO: 1156320 - RNA, 19 nt, Human
ucccagucgggauucgaag

SEQ ID NO: 1156321 - RNA, 20 nt, Human
ucccuggaauuaacuguccu

SEQ ID NO: 1156322 - RNA, 22 nt, Human
ucgucccuggaauuaacugucc

SEQ ID NO: 1156323 - RNA, 25 nt, Human
ucuccaagcgcccggaacccgaccu

SEQ ID NO: 1156324 - RNA, 22 nt, Human
ugccuaucaaccagcucacaca

SEQ ID NO: 1156325 - RNA, 18 nt, Human
ugcgugggaugucugcag

SEQ ID NO: 1156326 - RNA, 26 nt, Human
uguagagcccggaaggaaaagcaagc

SEQ ID NO: 1156327 - RNA, 24 nt, Human
uuggcagcuguaggguugucuuuu

SEQ ID NO: 1156328 - RNA, 20 nt, Human
aaaacaaaacaaaacuaaac

SEQ ID NO: 1156329 - RNA, 23 nt, Human
aaaagaaaaagaacaaaccuaaa

SEQ ID NO: 1156330 - RNA, 23 nt, Human
aaaagaacaaaccuaaaccuaaa

SEQ ID NO: 1156331 - RNA, 20 nt, Human
aaaagcaacucaaaaggagc

SEQ ID NO: 1156332 - RNA, 23 nt, Human
aaaaugccagaaccaaaccacag

SEQ ID NO: 1156333 - RNA, 26 nt, Human
aaaaugccagaaccaaaccacagaua

SEQ ID NO: 1156334 - RNA, 23 nt, Human
aaacaaaacaaaacuaaacuaaa

SEQ ID NO: 1156335 - RNA, 19 nt, Human
aaacaagaaaaaaaaagcc

SEQ ID NO: 1156336 - RNA, 21 nt, Human
aaacauguauuuaagugagcc

SEQ ID NO: 1156337 - RNA, 28 nt, Human
aaagaacaaaccuaaaccuaaaauugca

SEQ ID NO: 1156338 - RNA, 21 nt, Human
aaaugccagaaccaaaccaca

SEQ ID NO: 1156339 - RNA, 21 nt, Human
aacagaaaagacaaaaacuac

SEQ ID NO: 1156340 - RNA, 28 nt, Human
aacaugaggccaggugcaguggcucacg

SEQ ID NO: 1156341 - RNA, 21 nt, Human
aaccacagauacuugaacaac

SEQ ID NO: 1156342 - RNA, 19 nt, Human
aacuaucgaagaagucgca

SEQ ID NO: 1156343 - RNA, 20 nt, Human
aacucaaaaggagcaagucc

SEQ ID NO: 1156344 - RNA, 21 nt, Human
aagcccagguuggaacaacaa

SEQ ID NO: 1156345 - RNA, 20 nt, Human
aagcggagguugcagugagc

SEQ ID NO: 1156346 - RNA, 24 nt, Human
aagcggagguugcagugagcugag

SEQ ID NO: 1156347 - RNA, 18 nt, Human
aaggagcuacauaauuuc

SEQ ID NO: 1156348 - RNA, 22 nt, Human
aauaauggaaauaaaaccugcc

SEQ ID NO: 1156349 - RNA, 18 nt, Human
aauauuuugacacugaca

SEQ ID NO: 1156350 - RNA, 24 nt, Human
aauugcuugaacccaggaagcgga

SEQ ID NO: 1156351 - RNA, 24 nt, Human
acaaagcccagguuggaacaacaa

SEQ ID NO: 1156352 - RNA, 19 nt, Human
acacauuucaaaauuaacc

SEQ ID NO: 1156353 - RNA, 24 nt, Human
acagagugagacucuguaucaaaa

SEQ ID NO: 1156354 - RNA, 20 nt, Human
acagauacuugaacaacacc

SEQ ID NO: 1156355 - RNA, 19 nt, Human
accaaagucacaaagccca

SEQ ID NO: 1156356 - RNA, 24 nt, Human
accacacugcugacgaccuggggc

SEQ ID NO: 1156357 - RNA, 24 nt, Human
acccaggaagcggagguugcagug

SEQ ID NO: 1156358 - RNA, 24 nt, Human
acuccagccugagugacagaguga

SEQ ID NO: 1156359 - RNA, 24 nt, Human
acucugucgcucaaguucucauag

SEQ ID NO: 1156360 - RNA, 18 nt, Human
acugcacuccagccugag

SEQ ID NO: 1156361 - RNA, 24 nt, Human
acugcacuccagccugagugacag

SEQ ID NO: 1156362 - RNA, 19 nt, Human
agaagaaaaaagaaaaaga

SEQ ID NO: 1156363 - RNA, 28 nt, Human
agagaaaagggaggggaggggagaaggg

SEQ ID NO: 1156364 - RNA, 24 nt, Human
agaggacuauuaagguaacuuuca

SEQ ID NO: 1156365 - RNA, 23 nt, Human
agcaaaauuauuuuuuauucaug

SEQ ID NO: 1156366 - RNA, 24 nt, Human
agcacuuugggaggccaagguggg

SEQ ID NO: 1156367 - RNA, 21 nt, Human
agcagaagaaaaaagaaaaag

SEQ ID NO: 1156368 - RNA, 24 nt, Human
agccugagugacagagugagacuc

SEQ ID NO: 1156369 - RNA, 24 nt, Human
agccugggcaauguggugagacuc

SEQ ID NO: 1156370 - RNA, 25 nt, Human
agccugggcaauguggugagacucu

SEQ ID NO: 1156371 - RNA, 23 nt, Human
agcugggugugguggcgggugcc

SEQ ID NO: 1156372 - RNA, 23 nt, Human
aggaagcggagguugcagugagc

SEQ ID NO: 1156373 - RNA, 21 nt, Human
aggaguuggagaccagccugg

SEQ ID NO: 1156374 - RNA, 21 nt, Human
aggauuaaugaaaaagaaaaa

SEQ ID NO: 1156375 - RNA, 18 nt, Human
aggcaugagaauugcuug

SEQ ID NO: 1156376 - RNA, 21 nt, Human
aggccaaggugggcagacugc

SEQ ID NO: 1156377 - RNA, 24 nt, Human
aggcugaggcaugagaauugcuug

SEQ ID NO: 1156378 - RNA, 19 nt, Human
agggaggggaggggagaag

SEQ ID NO: 1156379 - RNA, 24 nt, Human
agggggaaaggagggaagaaggua

SEQ ID NO: 1156380 - RNA, 22 nt, Human
aggggugaucugggcacagaaa

SEQ ID NO: 1156381 - RNA, 21 nt, Human
agguaacuaucgaagaagucg

SEQ ID NO: 1156382 - RNA, 24 nt, Human
aggugcaguggcucacgccuguaa

SEQ ID NO: 1156383 - RNA, 19 nt, Human
aguccacaauuccuucugg

SEQ ID NO: 1156384 - RNA, 24 nt, Human
aguggcucacgccuguaacugcag

SEQ ID NO: 1156385 - RNA, 24 nt, Human
auagcugggugugguggcgggugc

SEQ ID NO: 1156386 - RNA, 24 nt, Human
aucaugucacugcacuccagccug

SEQ ID NO: 1156387 - RNA, 20 nt, Human
auggcaagcaggggggaagu

SEQ ID NO: 1156388 - RNA, 22 nt, Human
augucacugcacuccagccuga

SEQ ID NO: 1156389 - RNA, 18 nt, Human
auugguagcaucuucuuu

SEQ ID NO: 1156390 - RNA, 22 nt, Human
caaaagcaacucaaaaggagca

SEQ ID NO: 1156391 - RNA, 24 nt, Human
caaaagcaacucaaaaggagcaag

SEQ ID NO: 1156392 - RNA, 27 nt, Human
caaaagcaacucaaaaggagcaagucc

SEQ ID NO: 1156393 - RNA, 20 nt, Human
caaaauacagcaguuaaugu

SEQ ID NO: 1156394 - RNA, 25 nt, Human
caaaccuaaaccuaaaauugcaaca

SEQ ID NO: 1156395 - RNA, 21 nt, Human
caaaugaucuauaaauucauc

SEQ ID NO: 1156396 - RNA, 24 nt, Human
caacaccuacuccaaaagcaaaac

SEQ ID NO: 1156397 - RNA, 18 nt, Human
caacacgcacauuucauu

SEQ ID NO: 1156398 - RNA, 18 nt, Human
caacagaaaagacaaaaa

SEQ ID NO: 1156399 - RNA, 23 nt, Human
caacucaaaaggagcaaguccag

SEQ ID NO: 1156400 - RNA, 19 nt, Human
caaugccaccgccgccaag

SEQ ID NO: 1156401 - RNA, 24 nt, Human
cacgccuguaacugcagcacuuug

SEQ ID NO: 1156402 - RNA, 22 nt, Human
cacuccagccugagugacagag

SEQ ID NO: 1156403 - RNA, 24 nt, Human
cacuccagccugagugacagagug

SEQ ID NO: 1156404 - RNA, 19 nt, Human
cacugcacuccagccugag

SEQ ID NO: 1156405 - RNA, 19 nt, Human
cacugcacuccagccugag

SEQ ID NO: 1156406 - RNA, 20 nt, Human
cacugcacuccagccugagu

SEQ ID NO: 1156407 - RNA, 21 nt, Human
cacugcacuccagccugagug

SEQ ID NO: 1156408 - RNA, 23 nt, Human
cacugcacuccagccugagugac

SEQ ID NO: 1156409 - RNA, 24 nt, Human
cacugcacuccagccugagugaca

SEQ ID NO: 1156410 - RNA, 25 nt, Human
cacugcacuccagccugagugacag

SEQ ID NO: 1156411 - RNA, 24 nt, Human
cagcacuuugggaggccaaggugg

SEQ ID NO: 1156412 - RNA, 18 nt, Human
cagcagaagaaaaaagaa

SEQ ID NO: 1156413 - RNA, 20 nt, Human
caggaagacaaucugcuuuu

SEQ ID NO: 1156414 - RNA, 19 nt, Human
caggggugaucugggcaca

SEQ ID NO: 1156415 - RNA, 18 nt, Human
caugaagacagaguugua

SEQ ID NO: 1156416 - RNA, 19 nt, Human
caugggaggggguaucugu

SEQ ID NO: 1156417 - RNA, 19 nt, Human
cauugguagcaucuucuuu

SEQ ID NO: 1156418 - RNA, 23 nt, Human
ccaaagucacaaagcccagguug

SEQ ID NO: 1156419 - RNA, 20 nt, Human
ccaacuguuuacaaagaaug

SEQ ID NO: 1156420 - RNA, 20 nt, Human
ccacuauaaaaaaccccaaa

SEQ ID NO: 1156421 - RNA, 23 nt, Human
ccaggcagucaacacaugaagac

SEQ ID NO: 1156422 - RNA, 19 nt, Human
ccauuucuaucaaaacaag

SEQ ID NO: 1156423 - RNA, 22 nt, Human
ccccaaaugaguauuaaucugg

SEQ ID NO: 1156424 - RNA, 22 nt, Human
ccugagugacagagugagacuc

SEQ ID NO: 1156425 - RNA, 19 nt, Human
ccuguggucucagcuacuc

SEQ ID NO: 1156426 - RNA, 24 nt, Human
cgcaaaagcaacucaaaaggagca

SEQ ID NO: 1156427 - RNA, 23 nt, Human
cgccuguaacugcagcacuuugg

SEQ ID NO: 1156428 - RNA, 19 nt, Human
cgcuuguuagaggcacagg

SEQ ID NO: 1156429 - RNA, 23 nt, Human
cuaaaauugcaacauauacagaa

SEQ ID NO: 1156430 - RNA, 24 nt, Human
cucacgccuguaacugcagcacuu

SEQ ID NO: 1156431 - RNA, 21 nt, Human
cucugcucaggggugaucugg

SEQ ID NO: 1156432 - RNA, 21 nt, Human
cugcagcuuucugccagaaau

SEQ ID NO: 1156433 - RNA, 21 nt, Human
cugccaguuucuccaauguau

SEQ ID NO: 1156434 - RNA, 20 nt, Human
cugccucugcugcuaguccc

SEQ ID NO: 1156435 - RNA, 19 nt, Human
gaaaggagggaagaaggua

SEQ ID NO: 1156436 - RNA, 22 nt, Human
gaagacaacagaaaagacaaaa

SEQ ID NO: 1156437 - RNA, 18 nt, Human
gaagcggagguugcagug

SEQ ID NO: 1156438 - RNA, 23 nt, Human
gaagucgcaacuacaaaucccaa

SEQ ID NO: 1156439 - RNA, 24 nt, Human
gacagagugagacucuguaucaaa

SEQ ID NO: 1156440 - RNA, 24 nt, Human
gacugccugagcucaggaguugga

SEQ ID NO: 1156441 - RNA, 23 nt, Human
gagaagagaaaagggaggggagg

SEQ ID NO: 1156442 - RNA, 28 nt, Human
gagaggaaaaaagagaagagaaaaggga

SEQ ID NO: 1156443 - RNA, 23 nt, Human
gagaucaugucacugcacuccag

SEQ ID NO: 1156444 - RNA, 24 nt, Human
gaggcaugagaauugcuugaaccc

SEQ ID NO: 1156445 - RNA, 18 nt, Human
gaggggagaagggagggc

SEQ ID NO: 1156446 - RNA, 23 nt, Human
gaggggaggggagaagggagggc

SEQ ID NO: 1156447 - RNA, 22 nt, Human
gagguugcagugagcugagauc

SEQ ID NO: 1156448 - RNA, 20 nt, Human
gaucacagucuucucaucuc

SEQ ID NO: 1156449 - RNA, 24 nt, Human
gcacuccagccugagugacagagu

SEQ ID NO: 1156450 - RNA, 21 nt, Human
gcgggugccuguggucucagc

SEQ ID NO: 1156451 - RNA, 24 nt, Human
gcuguuugcugaaagaccuaaggc

SEQ ID NO: 1156452 - RNA, 21 nt, Human
ggaacaaaaugccagaaccaa

SEQ ID NO: 1156453 - RNA, 21 nt, Human
ggaggggagaagggagggcac

SEQ ID NO: 1156454 - RNA, 23 nt, Human
ggaggggaggggagaagggaggg

SEQ ID NO: 1156455 - RNA, 21 nt, Human
ggaggggguaucugugaggug

SEQ ID NO: 1156456 - RNA, 22 nt, Human
ggagguugcagugagcugagau

SEQ ID NO: 1156457 - RNA, 23 nt, Human
ggagguugcagugagcugagauc

SEQ ID NO: 1156458 - RNA, 24 nt, Human
ggagguugcagugagcugagauca

SEQ ID NO: 1156459 - RNA, 22 nt, Human
gggaaacaggcagaagggaaga

SEQ ID NO: 1156460 - RNA, 21 nt, Human
gggaggggagaagggagggca

SEQ ID NO: 1156461 - RNA, 20 nt, Human
gggaggggaggggagaaggg

SEQ ID NO: 1156462 - RNA, 21 nt, Human
ggggaggggagaagggagggc

SEQ ID NO: 1156463 - RNA, 19 nt, Human
gucucuacuaaaaauacaa

SEQ ID NO: 1156464 - RNA, 24 nt, Human
guugcagugagcugagaucauguc

SEQ ID NO: 1156465 - RNA, 23 nt, Human
uaaaaaacagucacuucucuccu

SEQ ID NO: 1156466 - RNA, 23 nt, Human
uaaaaaacaugaaucuugauuca

SEQ ID NO: 1156467 - RNA, 22 nt, Human
uaaaaauacaaaaaaauagcug

SEQ ID NO: 1156468 - RNA, 24 nt, Human
uaaaaggcaauuauuuaaaaaaca

SEQ ID NO: 1156469 - RNA, 22 nt, Human
uaaaauaaauaaguacuauaau

SEQ ID NO: 1156470 - RNA, 23 nt, Human
uaaaauuaauaaaucacaauucu

SEQ ID NO: 1156471 - RNA, 18 nt, Human
uaaaggagaaggagagga

SEQ ID NO: 1156472 - RNA, 24 nt, Human
uaacaaaugccgaacuuacuacca

SEQ ID NO: 1156473 - RNA, 26 nt, Human
uaacucaacaucucaaaugaucuaua

SEQ ID NO: 1156474 - RNA, 23 nt, Human
uaauaauacuguccuaauaacac

SEQ ID NO: 1156475 - RNA, 21 nt, Human
uaaucuauaauauuuugacac

SEQ ID NO: 1156476 - RNA, 20 nt, Human
uacaaacauguauuuaagug

SEQ ID NO: 1156477 - RNA, 24 nt, Human
uacacuugccuaggcaugagaaac

SEQ ID NO: 1156478 - RNA, 20 nt, Human
uacauguaacaaaugccgaa

SEQ ID NO: 1156479 - RNA, 23 nt, Human
uagcugggugugguggcgggugc

SEQ ID NO: 1156480 - RNA, 18 nt, Human
uauaaaaaaccccaaaug

SEQ ID NO: 1156481 - RNA, 20 nt, Human
uauagagcuccuuugccaac

SEQ ID NO: 1156482 - RNA, 21 nt, Human
uaucaaaacaagaaaaaaaaa

SEQ ID NO: 1156483 - RNA, 26 nt, Human
uaucaaaacaagaaaaaaaaagccaa

SEQ ID NO: 1156484 - RNA, 20 nt, Human
uaugaaggagagaaagacua

SEQ ID NO: 1156485 - RNA, 21 nt, Human
ucacugcacuccagccugagu

SEQ ID NO: 1156486 - RNA, 24 nt, Human
ucacugcacuccagccugagugac

SEQ ID NO: 1156487 - RNA, 24 nt, Human
ucagaccuuuuagaaucuuuaaaa

SEQ ID NO: 1156488 - RNA, 20 nt, Human
ucaggaguuggagaccagcc

SEQ ID NO: 1156489 - RNA, 22 nt, Human
ucagugaggauggucuuugacu

SEQ ID NO: 1156490 - RNA, 23 nt, Human
ucaugucacugcacuccagccug

SEQ ID NO: 1156491 - RNA, 23 nt, Human
uccaccacagcaucuuugccaga

SEQ ID NO: 1156492 - RNA, 23 nt, Human
uccagccugagugacagagugag

SEQ ID NO: 1156493 - RNA, 24 nt, Human
uccagccugagugacagagugaga

SEQ ID NO: 1156494 - RNA, 23 nt, Human
ucccuaaaagcagcagaagaaaa

SEQ ID NO: 1156495 - RNA, 20 nt, Human
uccuucuggacccuaaagaa

SEQ ID NO: 1156496 - RNA, 20 nt, Human
ucgcaacuacaaaucccaaa

SEQ ID NO: 1156497 - RNA, 20 nt, Human
ucuacaguugauuugcuauc

SEQ ID NO: 1156498 - RNA, 23 nt, Human
ucucauagauaauaccacacugc

SEQ ID NO: 1156499 - RNA, 19 nt, Human
ucucguugguuuucuauuu

SEQ ID NO: 1156500 - RNA, 22 nt, Human
ucucuacuaaaaauacaaaaaa

SEQ ID NO: 1156501 - RNA, 18 nt, Human
ucucuuauuacuucuguu

SEQ ID NO: 1156502 - RNA, 24 nt, Human
ucugccucugucuuggcagcuuuc

SEQ ID NO: 1156503 - RNA, 23 nt, Human
ucuguauuacuuuuaagauuguu

SEQ ID NO: 1156504 - RNA, 18 nt, Human
ucuuacugccucugcugc

SEQ ID NO: 1156505 - RNA, 24 nt, Human
ucuuguagaaaauggaaaaaagag

SEQ ID NO: 1156506 - RNA, 19 nt, Human
ugaaaaaacaaaacaaaac

SEQ ID NO: 1156507 - RNA, 24 nt, Human
ugaaaaacuccaaucugccauuca

SEQ ID NO: 1156508 - RNA, 23 nt, Human
ugaaagaacaaaauuauugaaca

SEQ ID NO: 1156509 - RNA, 23 nt, Human
ugaacaacaccuacuccaaaagc

SEQ ID NO: 1156510 - RNA, 19 nt, Human
ugaagacaacagaaaagac

SEQ ID NO: 1156511 - RNA, 18 nt, Human
ugaagggggaaaggaggg

SEQ ID NO: 1156512 - RNA, 18 nt, Human
ugacgaccuggggcaaug

SEQ ID NO: 1156513 - RNA, 22 nt, Human
ugagcugagaucaugucacugc

SEQ ID NO: 1156514 - RNA, 24 nt, Human
ugaggcaugagaauugcuugaacc

SEQ ID NO: 1156515 - RNA, 21 nt, Human
ugagugacagagugagacucu

SEQ ID NO: 1156516 - RNA, 19 nt, Human
ugcagaccauuucuuuaaa

SEQ ID NO: 1156517 - RNA, 19 nt, Human
ugccagaaccaaaccacag

SEQ ID NO: 1156518 - RNA, 21 nt, Human
ugccagaguguucaaucaaug

SEQ ID NO: 1156519 - RNA, 21 nt, Human
ugccaggcagucaacacauga

SEQ ID NO: 1156520 - RNA, 21 nt, Human
ugccucugucuuggcagcuuu

SEQ ID NO: 1156521 - RNA, 19 nt, Human
ugccugagcucaggaguug

SEQ ID NO: 1156522 - RNA, 24 nt, Human
ugccuguggucucagcuacucagg

SEQ ID NO: 1156523 - RNA, 21 nt, Human
ugccuuaucaauaaaaaacag

SEQ ID NO: 1156524 - RNA, 19 nt, Human
ugcguuugcucugcucagg

SEQ ID NO: 1156525 - RNA, 21 nt, Human
uggaaaaaagcuaauuuuuaa

SEQ ID NO: 1156526 - RNA, 19 nt, Human
uggcaagcaggggggaagu

SEQ ID NO: 1156527 - RNA, 21 nt, Human
uggcucacgccuguaacugca

SEQ ID NO: 1156528 - RNA, 22 nt, Human
uggcucacgccuguaacugcag

SEQ ID NO: 1156529 - RNA, 24 nt, Human
uggcucacgccuguaacugcagca

SEQ ID NO: 1156530 - RNA, 24 nt, Human
ugggaaucuuuuucuaucucaaug

SEQ ID NO: 1156531 - RNA, 20 nt, Human
ugggaggccaaggugggcag

SEQ ID NO: 1156532 - RNA, 22 nt, Human
ugggaggccaaggugggcagac

SEQ ID NO: 1156533 - RNA, 20 nt, Human
ugggaggggguaucugugag

SEQ ID NO: 1156534 - RNA, 24 nt, Human
ugguggcgggugccuguggucuca

SEQ ID NO: 1156535 - RNA, 21 nt, Human
uguauacuacaacagcaaaau

SEQ ID NO: 1156536 - RNA, 20 nt, Human
ugugguggcgggugccugug

SEQ ID NO: 1156537 - RNA, 21 nt, Human
ugugguggcgggugccugugg

SEQ ID NO: 1156538 - RNA, 18 nt, Human
uguguguaucuauuuuuu

SEQ ID NO: 1156539 - RNA, 19 nt, Human
uuaagguaacuuucagauu

SEQ ID NO: 1156540 - RNA, 18 nt, Human
uucacaucucuuacugcc

SEQ ID NO: 1156541 - RNA, 21 nt, Human
uucacauuuguuaaaaaaggu

SEQ ID NO: 1156542 - RNA, 25 nt, Human
uucaugauuuauacuacugcaggau

SEQ ID NO: 1156543 - RNA, 21 nt, Human
uucuaucaauggaaaagcccu

SEQ ID NO: 1156544 - RNA, 23 nt, Human
uucuccaauguauacuacaacag

SEQ ID NO: 1156545 - RNA, 18 nt, Human
uugcagugagcugagauc

SEQ ID NO: 1156546 - RNA, 20 nt, Human
uugcagugagcugagaucau

SEQ ID NO: 1156547 - RNA, 21 nt, Human
uugcagugagcugagaucaug

SEQ ID NO: 1156548 - RNA, 24 nt, Human
uugcuugaacccaggaagcggagg

SEQ ID NO: 1156549 - RNA, 19 nt, Human
uuugaagacaacagaaaag

SEQ ID NO: 1156550 - RNA, 20 nt, Human
aaccuggucuuccuugccuu

SEQ ID NO: 1156551 - RNA, 21 nt, Human
aaccuggucuuccuugccuuc

SEQ ID NO: 1156552 - RNA, 18 nt, Human
accauucuguacucagca

SEQ ID NO: 1156553 - RNA, 27 nt, Human
accuugaaagaaucagacucugagaag

SEQ ID NO: 1156554 - RNA, 22 nt, Human
acucagcacuuacauucacgaa

SEQ ID NO: 1156555 - RNA, 21 nt, Human
acugugccuaacacagaguga

SEQ ID NO: 1156556 - RNA, 23 nt, Human
acuguuccaacaucaugacacca

SEQ ID NO: 1156557 - RNA, 22 nt, Human
aggauuguauucagacaagccc

SEQ ID NO: 1156558 - RNA, 22 nt, Human
cacaaccuggucuuccuugccu

SEQ ID NO: 1156559 - RNA, 20 nt, Human
cacugugccuaacacagagu

SEQ ID NO: 1156560 - RNA, 20 nt, Human
cuuccaccauuauuggagaa

SEQ ID NO: 1156561 - RNA, 22 nt, Human
uauaucuccacagcuccugcug

SEQ ID NO: 1156562 - RNA, 20 nt, Human
uccugggaguaaauucgucu

SEQ ID NO: 1156563 - RNA, 18 nt, Human
ugccuaacacagagugag

SEQ ID NO: 1156564 - RNA, 23 nt, Human
uuauuguucugucuuccaccauu

SEQ ID NO: 1156565 - RNA, 22 nt, Human
uuguuacuguuccaacaucaug

SEQ ID NO: 1156566 - RNA, 26 nt, Human
aaaaaaaaaaacuuaaacuguuguuc

SEQ ID NO: 1156567 - RNA, 18 nt, Human
aaaaggcacaaaaccagc

SEQ ID NO: 1156568 - RNA, 20 nt, Human
aaaauacuagaauuuuaaug

SEQ ID NO: 1156569 - RNA, 22 nt, Human
aaaccacaacacuuuaaaagca

SEQ ID NO: 1156570 - RNA, 21 nt, Human
aacacaauccuguauuaaacu

SEQ ID NO: 1156571 - RNA, 19 nt, Human
aaccaagggcccccacaaa

SEQ ID NO: 1156572 - RNA, 24 nt, Human
acagagcgaagcaauuuugcccaa

SEQ ID NO: 1156573 - RNA, 24 nt, Human
acagagcgagacuccauuucaaaa

SEQ ID NO: 1156574 - RNA, 28 nt, Human
acugcacucacuccagccugggcgacag

SEQ ID NO: 1156575 - RNA, 21 nt, Human
acuguggggcguugcccgggc

SEQ ID NO: 1156576 - RNA, 24 nt, Human
agaaaauuccauuggaugacacca

SEQ ID NO: 1156577 - RNA, 25 nt, Human
agaaacaugcccagagacuuuaucc

SEQ ID NO: 1156578 - RNA, 22 nt, Human
agagggggaggggggacuagaa

SEQ ID NO: 1156579 - RNA, 23 nt, Human
agccaggaaauuuacugauccag

SEQ ID NO: 1156580 - RNA, 24 nt, Human
agccugggcgacagagcgagacuc

SEQ ID NO: 1156581 - RNA, 20 nt, Human
aggagcuauuaacacaaucc

SEQ ID NO: 1156582 - RNA, 19 nt, Human
aggcggagguugcagugag

SEQ ID NO: 1156583 - RNA, 21 nt, Human
aggcggagguugcagugagcc

SEQ ID NO: 1156584 - RNA, 24 nt, Human
aggcggagguugcagugagccgag

SEQ ID NO: 1156585 - RNA, 20 nt, Human
agggguggaggagcaacucc

SEQ ID NO: 1156586 - RNA, 21 nt, Human
auaacacaaccuaaaucgaaa

SEQ ID NO: 1156587 - RNA, 26 nt, Human
aucaaauuaguugcacauuaaaaaau

SEQ ID NO: 1156588 - RNA, 21 nt, Human
aucagggggugcccacccaac

SEQ ID NO: 1156589 - RNA, 22 nt, Human
auugcgccacugcacucacucc

SEQ ID NO: 1156590 - RNA, 28 nt, Human
auugcgccacugcacucacuccagccug

SEQ ID NO: 1156591 - RNA, 20 nt, Human
caaaaggcacaaaaccagcg

SEQ ID NO: 1156592 - RNA, 19 nt, Human
caacaaaagaccucacccg

SEQ ID NO: 1156593 - RNA, 18 nt, Human
caagaaaccgcagaagac

SEQ ID NO: 1156594 - RNA, 23 nt, Human
caaucagggggugcccacccaac

SEQ ID NO: 1156595 - RNA, 20 nt, Human
cacagaucccaagcauucuu

SEQ ID NO: 1156596 - RNA, 24 nt, Human
cacagaucccaagcauucuucaag

SEQ ID NO: 1156597 - RNA, 19 nt, Human
cacucacuccagccugggc

SEQ ID NO: 1156598 - RNA, 23 nt, Human
cacuccagccugggcgacagagc

SEQ ID NO: 1156599 - RNA, 24 nt, Human
cacuccagccugggcgacagagcg

SEQ ID NO: 1156600 - RNA, 23 nt, Human
cacuccagccugggcuacagagc

SEQ ID NO: 1156601 - RNA, 24 nt, Human
cacuccagccugggcuacagagcg

SEQ ID NO: 1156602 - RNA, 19 nt, Human
cacugcacucacuccagcc

SEQ ID NO: 1156603 - RNA, 27 nt, Human
cacugcacucacuccagccugggcgac

SEQ ID NO: 1156604 - RNA, 28 nt, Human
cacugcacucacuccagccugggcgaca

SEQ ID NO: 1156605 - RNA, 19 nt, Human
cagaaacaugcccagagac

SEQ ID NO: 1156606 - RNA, 24 nt, Human
cagaaccauuuccaacacugaaga

SEQ ID NO: 1156607 - RNA, 24 nt, Human
cagaucccaagcauucuucaagaa

SEQ ID NO: 1156608 - RNA, 23 nt, Human
cagcacagacagaaccauuucca

SEQ ID NO: 1156609 - RNA, 25 nt, Human
cagcacagacagaaccauuuccaac

SEQ ID NO: 1156610 - RNA, 23 nt, Human
cagcguuggcccauugcggccaa

SEQ ID NO: 1156611 - RNA, 24 nt, Human
cagcugcucccagggagccaggaa

SEQ ID NO: 1156612 - RNA, 23 nt, Human
cauuggaugacaccauugguagc

SEQ ID NO: 1156613 - RNA, 26 nt, Human
ccacaacacuuuaaaagcacguguga

SEQ ID NO: 1156614 - RNA, 19 nt, Human
ccacccaacaaaagaccuc

SEQ ID NO: 1156615 - RNA, 23 nt, Human
ccacccaacaaaagaccucaccc

SEQ ID NO: 1156616 - RNA, 27 nt, Human
ccacugcacucacuccagccugggcga

SEQ ID NO: 1156617 - RNA, 28 nt, Human
ccacugcacucacuccagccugggcgac

SEQ ID NO: 1156618 - RNA, 20 nt, Human
ccagccugggcuacagagcg

SEQ ID NO: 1156619 - RNA, 19 nt, Human
ccaguaaauuucagaguca

SEQ ID NO: 1156620 - RNA, 19 nt, Human
ccaucucaaccagcaaggc

SEQ ID NO: 1156621 - RNA, 24 nt, Human
cccaagcauucuucaagaaaccgc

SEQ ID NO: 1156622 - RNA, 22 nt, Human
cccagcguuggcccauugcggc

SEQ ID NO: 1156623 - RNA, 20 nt, Human
cccccacaaaaggcacaaaa

SEQ ID NO: 1156624 - RNA, 21 nt, Human
cccccacaaaaggcacaaaac

SEQ ID NO: 1156625 - RNA, 22 nt, Human
ccugggcgacagagcgagacuc

SEQ ID NO: 1156626 - RNA, 23 nt, Human
cgagacuccauuucaaaaaaaaa

SEQ ID NO: 1156627 - RNA, 24 nt, Human
cuccauuucaaaaaaaaaaaaaaa

SEQ ID NO: 1156628 - RNA, 18 nt, Human
cuguuguuccucagucca

SEQ ID NO: 1156629 - RNA, 19 nt, Human
gaagagggggaggggggac

SEQ ID NO: 1156630 - RNA, 18 nt, Human
gagaauccaucucaaccg

SEQ ID NO: 1156631 - RNA, 27 nt, Human
gagauugcgccacugcacucacuccag

SEQ ID NO: 1156632 - RNA, 18 nt, Human
gagggaagagggggaggg

SEQ ID NO: 1156633 - RNA, 20 nt, Human
gagggaagagggggaggggg

SEQ ID NO: 1156634 - RNA, 23 nt, Human
gagguugcagugagccgagauug

SEQ ID NO: 1156635 - RNA, 28 nt, Human
gagucagccuccaaugagggggaaccaa

SEQ ID NO: 1156636 - RNA, 19 nt, Human
gauggagagagaaaccugu

SEQ ID NO: 1156637 - RNA, 24 nt, Human
gcacuccagccugggcuacagagc

SEQ ID NO: 1156638 - RNA, 28 nt, Human
gccacugcacucacuccagccugggcga

SEQ ID NO: 1156639 - RNA, 19 nt, Human
gccagaaacaugcccagag

SEQ ID NO: 1156640 - RNA, 22 nt, Human
gccagccugugggugccccucu

SEQ ID NO: 1156641 - RNA, 21 nt, Human
gcccaaggccugaggccucaa

SEQ ID NO: 1156642 - RNA, 25 nt, Human
ggagggaagagggggaggggggacu

SEQ ID NO: 1156643 - RNA, 22 nt, Human
ggagguugcagugagccgagau

SEQ ID NO: 1156644 - RNA, 24 nt, Human
ggagguugcagugagccgagauug

SEQ ID NO: 1156645 - RNA, 21 nt, Human
ggcugcuauccacuguggggc

SEQ ID NO: 1156646 - RNA, 20 nt, Human
gggaagagggggagggggga

SEQ ID NO: 1156647 - RNA, 21 nt, Human
gggagggaagagggggagggg

SEQ ID NO: 1156648 - RNA, 22 nt, Human
gugagguccuuuugcagggcca

SEQ ID NO: 1156649 - RNA, 19 nt, Human
guugcagugagccgagauu

SEQ ID NO: 1156650 - RNA, 22 nt, Human
uaaaaaauaaacagacaagcaa

SEQ ID NO: 1156651 - RNA, 19 nt, Human
uaaacagacaagcaaucaa

SEQ ID NO: 1156652 - RNA, 25 nt, Human
uaaacagacaagcaaucagggggug

SEQ ID NO: 1156653 - RNA, 18 nt, Human
uaaagugugcauaacaca

SEQ ID NO: 1156654 - RNA, 23 nt, Human
uaagccugggagggaagaggggg

SEQ ID NO: 1156655 - RNA, 21 nt, Human
uagccuccaagggccuagagc

SEQ ID NO: 1156656 - RNA, 26 nt, Human
uagggguggaggagcaacuccggcag

SEQ ID NO: 1156657 - RNA, 18 nt, Human
uaguugcacauuaaaaaa

SEQ ID NO: 1156658 - RNA, 23 nt, Human
uccaauauaacccaucgucugau

SEQ ID NO: 1156659 - RNA, 18 nt, Human
uccacuagcuacauuuca

SEQ ID NO: 1156660 - RNA, 20 nt, Human
uccacuagcuacauuucaaa

SEQ ID NO: 1156661 - RNA, 23 nt, Human
uccagccugggcgacagagcgag

SEQ ID NO: 1156662 - RNA, 24 nt, Human
uccagccugggcgacagagcgaga

SEQ ID NO: 1156663 - RNA, 23 nt, Human
uccagccugggcuacagagcgag

SEQ ID NO: 1156664 - RNA, 24 nt, Human
uccagccugggcuacagagcgaga

SEQ ID NO: 1156665 - RNA, 25 nt, Human
uccauuucaaaaaaaaaaaaaaaaa

SEQ ID NO: 1156666 - RNA, 23 nt, Human
ucccagggagccaggaaauuuac

SEQ ID NO: 1156667 - RNA, 20 nt, Human
ugaaggaaauucaaaucaaa

SEQ ID NO: 1156668 - RNA, 23 nt, Human
ugagauccugcaguuuuagcauc

SEQ ID NO: 1156669 - RNA, 25 nt, Human
ugagauccugcaguuuuagcaucuu

SEQ ID NO: 1156670 - RNA, 22 nt, Human
ugagccgagauugcgccacugc

SEQ ID NO: 1156671 - RNA, 18 nt, Human
ugaguuuaaaaacaauuu

SEQ ID NO: 1156672 - RNA, 21 nt, Human
ugcacucacuccagccugggc

SEQ ID NO: 1156673 - RNA, 22 nt, Human
ugcacuccagccugggcuacag

SEQ ID NO: 1156674 - RNA, 19 nt, Human
uggccccagcguuggccca

SEQ ID NO: 1156675 - RNA, 22 nt, Human
uggcugcuaugcuggacagcac

SEQ ID NO: 1156676 - RNA, 18 nt, Human
ugggagggaagaggggga

SEQ ID NO: 1156677 - RNA, 20 nt, Human
ugggagggaagagggggagg

SEQ ID NO: 1156678 - RNA, 22 nt, Human
ugggagggaagagggggagggg

SEQ ID NO: 1156679 - RNA, 20 nt, Human
uuaaacuguuguuccucagu

SEQ ID NO: 1156680 - RNA, 20 nt, Human
uuaaaugaacgcuauccuua

SEQ ID NO: 1156681 - RNA, 22 nt, Human
uucaaaucaaauuaguugcaca

SEQ ID NO: 1156682 - RNA, 22 nt, Human
uuccauuggaugacaccauugg

SEQ ID NO: 1156683 - RNA, 19 nt, Human
uuccucaguccacuagcua

SEQ ID NO: 1156684 - RNA, 18 nt, Human
uugcagugagccgagauu

SEQ ID NO: 1156685 - RNA, 19 nt, Human
uugcagugagccgagauug

SEQ ID NO: 1156686 - RNA, 20 nt, Human
uugcagugagccgagauugc

SEQ ID NO: 1156687 - RNA, 22 nt, Human
uugcagugagccgagauugcgc

SEQ ID NO: 1156688 - RNA, 24 nt, Human
uuuaaaccacaacacuuuaaaagc

SEQ ID NO: 1156689 - RNA, 25 nt, Human
uuuaaaccacaacacuuuaaaagca

SEQ ID NO: 1156690 - RNA, 21 nt, Human
aaaaagaaagagacguggaaa

SEQ ID NO: 1156691 - RNA, 27 nt, Human
aaacaagagagaaaaauugagggaccc

SEQ ID NO: 1156692 - RNA, 21 nt, Human
aaagaaagagacguggaaaac

SEQ ID NO: 1156693 - RNA, 24 nt, Human
aaagugcugggauuacagguguga

SEQ ID NO: 1156694 - RNA, 18 nt, Human
aaauuuauucugcuugag

SEQ ID NO: 1156695 - RNA, 25 nt, Human
aagcaguccuccuuccuuggccucc

SEQ ID NO: 1156696 - RNA, 18 nt, Human
aagugcugggauuacagg

SEQ ID NO: 1156697 - RNA, 19 nt, Human
aagugcugggauuacaggu

SEQ ID NO: 1156698 - RNA, 26 nt, Human
aagugcugggauuacaggugugagcc

SEQ ID NO: 1156699 - RNA, 18 nt, Human
aauuucucagacaucauc

SEQ ID NO: 1156700 - RNA, 20 nt, Human
acgcugcucaggcuggucuu

SEQ ID NO: 1156701 - RNA, 19 nt, Human
acugcucagccuugaaguu

SEQ ID NO: 1156702 - RNA, 22 nt, Human
agagagaaaaauugauuacugg

SEQ ID NO: 1156703 - RNA, 21 nt, Human
aggauuauggauauaugccac

SEQ ID NO: 1156704 - RNA, 22 nt, Human
agggauccucccacuucagccu

SEQ ID NO: 1156705 - RNA, 24 nt, Human
agggauccucccacuucagccucc

SEQ ID NO: 1156706 - RNA, 22 nt, Human
aggucuugcuacgcugcucagg

SEQ ID NO: 1156707 - RNA, 21 nt, Human
aguaauagagaaaaagaaaga

SEQ ID NO: 1156708 - RNA, 24 nt, Human
aguucugggcucaagggauccucc

SEQ ID NO: 1156709 - RNA, 23 nt, Human
aguucugggcucaaggggagagc

SEQ ID NO: 1156710 - RNA, 24 nt, Human
auaaucagagcucacugcucagcc

SEQ ID NO: 1156711 - RNA, 24 nt, Human
auccuaaauuuugaaaauguguuu

SEQ ID NO: 1156712 - RNA, 19 nt, Human
auuucauuauaagcaggaa

SEQ ID NO: 1156713 - RNA, 21 nt, Human
auuucauuauaagcaggaaua

SEQ ID NO: 1156714 - RNA, 24 nt, Human
caaagugcugggauuacaggugug

SEQ ID NO: 1156715 - RNA, 21 nt, Human
caccucuccuuccuucucucc

SEQ ID NO: 1156716 - RNA, 24 nt, Human
cacuucagccucccaagcagcuag

SEQ ID NO: 1156717 - RNA, 23 nt, Human
cagccucccaagcagcuaggauu

SEQ ID NO: 1156718 - RNA, 20 nt, Human
ccaaagugcugggauuacag

SEQ ID NO: 1156719 - RNA, 21 nt, Human
ccaaagugcugggauuacagg

SEQ ID NO: 1156720 - RNA, 21 nt, Human
ccaaagugcugggauuacagg

SEQ ID NO: 1156721 - RNA, 24 nt, Human
ccaaagugcugggauuacaggugu

SEQ ID NO: 1156722 - RNA, 19 nt, Human
cccuuuugcugcuuuguua

SEQ ID NO: 1156723 - RNA, 23 nt, Human
ccucccacuucagccucccaagc

SEQ ID NO: 1156724 - RNA, 20 nt, Human
ccuccuuccuuggccuccca

SEQ ID NO: 1156725 - RNA, 19 nt, Human
ccuggcuggaaugcacugg

SEQ ID NO: 1156726 - RNA, 21 nt, Human
ccuuugaucugacaacucaca

SEQ ID NO: 1156727 - RNA, 20 nt, Human
ccuuuugcugcuuuguuagu

SEQ ID NO: 1156728 - RNA, 24 nt, Human
cucaagggauccucccacuucagc

SEQ ID NO: 1156729 - RNA, 28 nt, Human
cucacugcucagccuugaaagguuuucc

SEQ ID NO: 1156730 - RNA, 21 nt, Human
cucuccuuccuucucuccucc

SEQ ID NO: 1156731 - RNA, 19 nt, Human
cugugcuucgcccuuuugc

SEQ ID NO: 1156732 - RNA, 24 nt, Human
cuuccuucucuccuccugaaacuc

SEQ ID NO: 1156733 - RNA, 20 nt, Human
cuuucuuucuuuuuuuuuga

SEQ ID NO: 1156734 - RNA, 19 nt, Human
gacguggaaaacaagagag

SEQ ID NO: 1156735 - RNA, 21 nt, Human
gagcucacugcucagccuuga

SEQ ID NO: 1156736 - RNA, 18 nt, Human
gauuacaggugugagcca

SEQ ID NO: 1156737 - RNA, 19 nt, Human
gauuacaggugugagccac

SEQ ID NO: 1156738 - RNA, 21 nt, Human
gauuacaggugugagccacug

SEQ ID NO: 1156739 - RNA, 22 nt, Human
gauuauggauauaugccaccau

SEQ ID NO: 1156740 - RNA, 20 nt, Human
gcucugucauccuggcugga

SEQ ID NO: 1156741 - RNA, 21 nt, Human
ggcuggucuugaacuccucac

SEQ ID NO: 1156742 - RNA, 21 nt, Human
guaauagagaaaaagaaagag

SEQ ID NO: 1156743 - RNA, 24 nt, Human
gucuugcuacgcugcucaggcugg

SEQ ID NO: 1156744 - RNA, 19 nt, Human
gugugagccacugugcuuc

SEQ ID NO: 1156745 - RNA, 25 nt, Human
guucugggcucaagggauccuccca

SEQ ID NO: 1156746 - RNA, 25 nt, Human
uaaaauuuauucugcuugagacaau

SEQ ID NO: 1156747 - RNA, 27 nt, Human
uaagcaguccuccuuccuuggccuccc

SEQ ID NO: 1156748 - RNA, 18 nt, Human
uaaguuccuggccccauu

SEQ ID NO: 1156749 - RNA, 24 nt, Human
uacaggucucaauuucuaaaauuu

SEQ ID NO: 1156750 - RNA, 21 nt, Human
uacaggugugagccacugugc

SEQ ID NO: 1156751 - RNA, 23 nt, Human
uacaggugugagccacugugcuu

SEQ ID NO: 1156752 - RNA, 20 nt, Human
uacgcugcucaggcuggucu

SEQ ID NO: 1156753 - RNA, 24 nt, Human
uacgcugcucaggcuggucuugaa

SEQ ID NO: 1156754 - RNA, 18 nt, Human
uagagaugaggucuugcu

SEQ ID NO: 1156755 - RNA, 24 nt, Human
uaggauuauggauauaugccacca

SEQ ID NO: 1156756 - RNA, 18 nt, Human
uauagaauucuaguuucu

SEQ ID NO: 1156757 - RNA, 20 nt, Human
ucagacaucaucucuggaga

SEQ ID NO: 1156758 - RNA, 18 nt, Human
ucagccucccaagcagcu

SEQ ID NO: 1156759 - RNA, 20 nt, Human
ucagccucccaagcagcuag

SEQ ID NO: 1156760 - RNA, 23 nt, Human
ucccaaagugcugggauuacagg

SEQ ID NO: 1156761 - RNA, 24 nt, Human
uccucacuuuaagcaguccuccuu

SEQ ID NO: 1156762 - RNA, 22 nt, Human
ucucuccuccugaaacucuuuu

SEQ ID NO: 1156763 - RNA, 24 nt, Human
ucucugaacuuaccuuugcugccu

SEQ ID NO: 1156764 - RNA, 25 nt, Human
ucugaaaauuucucagacaucaucu

SEQ ID NO: 1156765 - RNA, 20 nt, Human
ucugucauccuggcuggaau

SEQ ID NO: 1156766 - RNA, 24 nt, Human
ucuucugucacaacuguuggugau

SEQ ID NO: 1156767 - RNA, 24 nt, Human
ucuugaacuccucacuuuaagcag

SEQ ID NO: 1156768 - RNA, 23 nt, Human
ucuugcuacgcugcucaggcugg

SEQ ID NO: 1156769 - RNA, 19 nt, Human
ucuugcucugucauccugg

SEQ ID NO: 1156770 - RNA, 24 nt, Human
ucuugcucugucauccuggcugga

SEQ ID NO: 1156771 - RNA, 20 nt, Human
ucuuuuuuuuugagaugcag

SEQ ID NO: 1156772 - RNA, 24 nt, Human
ugaacuccucacuuuaagcagucc

SEQ ID NO: 1156773 - RNA, 18 nt, Human
ugaauaugcaccuuauuu

SEQ ID NO: 1156774 - RNA, 23 nt, Human
ugacaggaugauagucauuucuc

SEQ ID NO: 1156775 - RNA, 24 nt, Human
ugaggucuugcuacgcugcucagg

SEQ ID NO: 1156776 - RNA, 24 nt, Human
ugcucaggcuggucuugaacuccu

SEQ ID NO: 1156777 - RNA, 21 nt, Human
ugcucugucauccuggcugga

SEQ ID NO: 1156778 - RNA, 24 nt, Human
ugcugggauuacaggugugagcca

SEQ ID NO: 1156779 - RNA, 18 nt, Human
uggaaugcacuggcauaa

SEQ ID NO: 1156780 - RNA, 22 nt, Human
uggccccauuggcuucgaugau

SEQ ID NO: 1156781 - RNA, 18 nt, Human
ugggauuacaggugugag

SEQ ID NO: 1156782 - RNA, 21 nt, Human
ugggauuacaggugugagcca

SEQ ID NO: 1156783 - RNA, 22 nt, Human
ugggauuacaggugugagccac

SEQ ID NO: 1156784 - RNA, 22 nt, Human
ugggauuacaggugugagccac

SEQ ID NO: 1156785 - RNA, 22 nt, Human
ugggauuacaggugugagccac

SEQ ID NO: 1156786 - RNA, 24 nt, Human
ugggauuacaggugugagccacug

SEQ ID NO: 1156787 - RNA, 25 nt, Human
uguaguaauagagaaaaagaaagag

SEQ ID NO: 1156788 - RNA, 18 nt, Human
uuaguagagaugaggucu

SEQ ID NO: 1156789 - RNA, 24 nt, Human
uuccagccucugggucucugaacu

SEQ ID NO: 1156790 - RNA, 21 nt, Human
uuccuuggccucccaaagugc

SEQ ID NO: 1156791 - RNA, 23 nt, Human
uuccuuggccucccaaagugcug

SEQ ID NO: 1156792 - RNA, 22 nt, Human
uucucagugguaacuuuuaaca

SEQ ID NO: 1156793 - RNA, 21 nt, Human
uucucaguuuuggucucuuaa

SEQ ID NO: 1156794 - RNA, 21 nt, Human
uuuccaucaucuucugucaca

SEQ ID NO: 1156795 - RNA, 24 nt, Human
uuuuugagaugcagucuugcucug

SEQ ID NO: 1156796 - RNA, 19 nt, Human
aaacuagaagggaaaggug

SEQ ID NO: 1156797 - RNA, 19 nt, Human
aaacuguacagucaccaga

SEQ ID NO: 1156798 - RNA, 20 nt, Human
aacaacuuuucacaagccga

SEQ ID NO: 1156799 - RNA, 18 nt, Human
aagggaaagguguuuucu

SEQ ID NO: 1156800 - RNA, 21 nt, Human
aagggaaagguguuuucucca

SEQ ID NO: 1156801 - RNA, 25 nt, Human
aaucagaaagccacuauaaacccaa

SEQ ID NO: 1156802 - RNA, 23 nt, Human
agaaagccacuauaaacccaaug

SEQ ID NO: 1156803 - RNA, 22 nt, Human
agauggaaagggagaagaagaa

SEQ ID NO: 1156804 - RNA, 24 nt, Human
aucuuuauaaaacuugauaaaaaa

SEQ ID NO: 1156805 - RNA, 20 nt, Human
caaacuguauccagcuuuau

SEQ ID NO: 1156806 - RNA, 19 nt, Human
caagaggaagucucucaaa

SEQ ID NO: 1156807 - RNA, 22 nt, Human
caagccgacccugacuuucagu

SEQ ID NO: 1156808 - RNA, 24 nt, Human
cacugguaaccaacgacuaggggu

SEQ ID NO: 1156809 - RNA, 18 nt, Human
caggcaggacgugggcag

SEQ ID NO: 1156810 - RNA, 21 nt, Human
ccaagguggccauguguguca

SEQ ID NO: 1156811 - RNA, 21 nt, Human
ccacaaggcuuuugugccaag

SEQ ID NO: 1156812 - RNA, 20 nt, Human
ccacaaucuagaaauggaac

SEQ ID NO: 1156813 - RNA, 19 nt, Human
ccauaccacaaggcuuuug

SEQ ID NO: 1156814 - RNA, 26 nt, Human
cccuccuccugggagccaagaggaag

SEQ ID NO: 1156815 - RNA, 20 nt, Human
cccuuccccccaaaacaaug

SEQ ID NO: 1156816 - RNA, 21 nt, Human
ccuuuaaaaaaaaaaaaguaa

SEQ ID NO: 1156817 - RNA, 19 nt, Human
cucaccucuucuucauacu

SEQ ID NO: 1156818 - RNA, 25 nt, Human
cuuuaaaaaaaaaaaaguaaaacaa

SEQ ID NO: 1156819 - RNA, 18 nt, Human
cuuuugugccaagguggc

SEQ ID NO: 1156820 - RNA, 20 nt, Human
ggaaagguguuuucuccaca

SEQ ID NO: 1156821 - RNA, 21 nt, Human
ggcaucacuggaaaguccaga

SEQ ID NO: 1156822 - RNA, 19 nt, Human
uaagugaaaauggcagaau

SEQ ID NO: 1156823 - RNA, 22 nt, Human
uacaacaacuuucaaacucccu

SEQ ID NO: 1156824 - RNA, 20 nt, Human
uaccaaaaaucagaaagcca

SEQ ID NO: 1156825 - RNA, 22 nt, Human
uaccaaaaaucagaaagccacu

SEQ ID NO: 1156826 - RNA, 24 nt, Human
uaccaaaaaucagaaagccacuau

SEQ ID NO: 1156827 - RNA, 25 nt, Human
uagaaauggaaccacugcucuuuug

SEQ ID NO: 1156828 - RNA, 19 nt, Human
uaugccccuuccccccaaa

SEQ ID NO: 1156829 - RNA, 23 nt, Human
uaugccccuuccccccaaaacaa

SEQ ID NO: 1156830 - RNA, 22 nt, Human
ucaggcaggacgugggcagaca

SEQ ID NO: 1156831 - RNA, 25 nt, Human
ucccaacagaugucugggcuuaagg

SEQ ID NO: 1156832 - RNA, 21 nt, Human
ucucaaaacuagaagggaaag

SEQ ID NO: 1156833 - RNA, 21 nt, Human
ucugcaauggacuaccaaaaa

SEQ ID NO: 1156834 - RNA, 20 nt, Human
ugaaaauggcagaauuuauc

SEQ ID NO: 1156835 - RNA, 21 nt, Human
ugaaaauggcagaauuuaucu

SEQ ID NO: 1156836 - RNA, 20 nt, Human
ugaaagauggaaagggagaa

SEQ ID NO: 1156837 - RNA, 19 nt, Human
ugaagucuucaucuggugc

SEQ ID NO: 1156838 - RNA, 23 nt, Human
uggaaccacugcucuuuugacag

SEQ ID NO: 1156839 - RNA, 18 nt, Human
uggcaucacuggaaaguc

SEQ ID NO: 1156840 - RNA, 20 nt, Human
ugugcuaacaacauaccuuu

SEQ ID NO: 1156841 - RNA, 19 nt, Human
uguucugugugcuaacaac

SEQ ID NO: 1156842 - RNA, 23 nt, Human
uuaaaaaaaaaaaaguaaaacaa

SEQ ID NO: 1156843 - RNA, 20 nt, Human
uuaucugaagauccacaauc

SEQ ID NO: 1156844 - RNA, 25 nt, Human
uucaaacucccuucugcaauggacu

SEQ ID NO: 1156845 - RNA, 21 nt, Human
uucaguaagugaaaauggcag

SEQ ID NO: 1156846 - RNA, 29 nt, Human
uuuagagugaggguugacauuucacauuu

SEQ ID NO: 1156847 - RNA, 22 nt, Human
uuucaguaagugaaaauggcag

SEQ ID NO: 1156848 - RNA, 18 nt, Human
uuuccauaccacaaggcu

SEQ ID NO: 1156849 - RNA, 20 nt, Human
aaccuccaccuccugggcuc

SEQ ID NO: 1156850 - RNA, 24 nt, Human
aaguagcugggaaugcaggugugu

SEQ ID NO: 1156851 - RNA, 22 nt, Human
aagugcugccugcgcagguugg

SEQ ID NO: 1156852 - RNA, 23 nt, Human
acaggugccuaccaccacacccg

SEQ ID NO: 1156853 - RNA, 22 nt, Human
accauagggaaaugucuucuca

SEQ ID NO: 1156854 - RNA, 20 nt, Human
acccaguucacucccacgcu

SEQ ID NO: 1156855 - RNA, 21 nt, Human
acucuguugcccaggcuggag

SEQ ID NO: 1156856 - RNA, 27 nt, Human
acucuguugcccaggcuggagugcacu

SEQ ID NO: 1156857 - RNA, 21 nt, Human
acuggacauuucaagccccug

SEQ ID NO: 1156858 - RNA, 25 nt, Human
agacaagauggggguuuugcucuaa

SEQ ID NO: 1156859 - RNA, 18 nt, Human
aggcagggaugugggcag

SEQ ID NO: 1156860 - RNA, 24 nt, Human
aggcagggaugugggcaggcaggg

SEQ ID NO: 1156861 - RNA, 18 nt, Human
aggcuggaucuugauaug

SEQ ID NO: 1156862 - RNA, 24 nt, Human
agggauucuccugccucagccucc

SEQ ID NO: 1156863 - RNA, 24 nt, Human
aggugaucugccugccucggccuc

SEQ ID NO: 1156864 - RNA, 26 nt, Human
aggugcugagaucauaggugugagcc

SEQ ID NO: 1156865 - RNA, 21 nt, Human
aguagcugggauuacaggugc

SEQ ID NO: 1156866 - RNA, 24 nt, Human
agugauucuccugccucagccucc

SEQ ID NO: 1156867 - RNA, 21 nt, Human
auacuggacauuucaagcccc

SEQ ID NO: 1156868 - RNA, 24 nt, Human
aucccccccuggccaaaagugcug

SEQ ID NO: 1156869 - RNA, 24 nt, Human
augggguuucaccacauuggccag

SEQ ID NO: 1156870 - RNA, 18 nt, Human
auucuccugccucagccu

SEQ ID NO: 1156871 - RNA, 24 nt, Human
auuuuuguauuuuuaguagagaug

SEQ ID NO: 1156872 - RNA, 23 nt, Human
caaaagugcugccugcgcagguu

SEQ ID NO: 1156873 - RNA, 23 nt, Human
caaccuccaccuccugggcucaa

SEQ ID NO: 1156874 - RNA, 24 nt, Human
caaccuccaccuccugggcucaag

SEQ ID NO: 1156875 - RNA, 19 nt, Human
caagacaggguguuuugac

SEQ ID NO: 1156876 - RNA, 24 nt, Human
caagauggggguuuugcucuaagc

SEQ ID NO: 1156877 - RNA, 22 nt, Human
caagccccugcagagaagcaag

SEQ ID NO: 1156878 - RNA, 23 nt, Human
caagcugacaugaagacauggcc

SEQ ID NO: 1156879 - RNA, 22 nt, Human
caagggauucuccugccucagc

SEQ ID NO: 1156880 - RNA, 24 nt, Human
caaggugcugagaucauaggugug

SEQ ID NO: 1156881 - RNA, 20 nt, Human
caagugauucuccugccuca

SEQ ID NO: 1156882 - RNA, 22 nt, Human
caagugauucuccugccucagc

SEQ ID NO: 1156883 - RNA, 24 nt, Human
cacauuggccaggcuggucucaaa

SEQ ID NO: 1156884 - RNA, 24 nt, Human
caccacacccggcuaauuuuugua

SEQ ID NO: 1156885 - RNA, 18 nt, Human
caccacaucccccugguu

SEQ ID NO: 1156886 - RNA, 21 nt, Human
caccacauuggccaggcuggu

SEQ ID NO: 1156887 - RNA, 24 nt, Human
caccacauuggccaggcuggucuc

SEQ ID NO: 1156888 - RNA, 27 nt, Human
caccacauuggccaggcuggucucaaa

SEQ ID NO: 1156889 - RNA, 21 nt, Human
cacccaccuagacugcagagu

SEQ ID NO: 1156890 - RNA, 19 nt, Human
cacgcuggggaccugcaga

SEQ ID NO: 1156891 - RNA, 21 nt, Human
cacugcaaccuccaccuccug

SEQ ID NO: 1156892 - RNA, 23 nt, Human
cacugcaaccuccaccuccuggg

SEQ ID NO: 1156893 - RNA, 22 nt, Human
cagcuggacuacacaggcugaa

SEQ ID NO: 1156894 - RNA, 21 nt, Human
caggugccuaccaccacaccc

SEQ ID NO: 1156895 - RNA, 24 nt, Human
caggugccuaccaccacacccggc

SEQ ID NO: 1156896 - RNA, 21 nt, Human
ccaaggugcugagaucauagg

SEQ ID NO: 1156897 - RNA, 24 nt, Human
ccaaggugcugagaucauaggugu

SEQ ID NO: 1156898 - RNA, 24 nt, Human
ccaccuccugggcucaagugauuc

SEQ ID NO: 1156899 - RNA, 19 nt, Human
ccaggauuccaggaggcag

SEQ ID NO: 1156900 - RNA, 23 nt, Human
cccaaguagcugggaaugcaggu

SEQ ID NO: 1156901 - RNA, 19 nt, Human
cccacccaguucacuccca

SEQ ID NO: 1156902 - RNA, 21 nt, Human
cccagguucaagggauucucc

SEQ ID NO: 1156903 - RNA, 21 nt, Human
ccccuggccaaaagugcugcc

SEQ ID NO: 1156904 - RNA, 23 nt, Human
cccgaguagcugggauuacaggu

SEQ ID NO: 1156905 - RNA, 24 nt, Human
cccgaguagcugggauuacaggug

SEQ ID NO: 1156906 - RNA, 21 nt, Human
ccgaguagcugggauuacagg

SEQ ID NO: 1156907 - RNA, 22 nt, Human
ccuccaccuccugggcucaagu

SEQ ID NO: 1156908 - RNA, 24 nt, Human
ccucccagguucaagggauucucc

SEQ ID NO: 1156909 - RNA, 21 nt, Human
ccuccugggcucaagugauuc

SEQ ID NO: 1156910 - RNA, 24 nt, Human
ccuccugggcucaagugauucucc

SEQ ID NO: 1156911 - RNA, 21 nt, Human
ccugaccuaaggugaucugcc

SEQ ID NO: 1156912 - RNA, 23 nt, Human
ccugaccuaaggugaucugccug

SEQ ID NO: 1156913 - RNA, 23 nt, Human
ccugccucagccucccaaguagc

SEQ ID NO: 1156914 - RNA, 24 nt, Human
ccugccucggccucccaaggugcu

SEQ ID NO: 1156915 - RNA, 23 nt, Human
ccugggcucaagugauucuccuc

SEQ ID NO: 1156916 - RNA, 23 nt, Human
ccugggcucaagugauucuccug

SEQ ID NO: 1156917 - RNA, 18 nt, Human
ccuggguugagaguggag

SEQ ID NO: 1156918 - RNA, 23 nt, Human
cuaauuuuuguauuuuuaguaga

SEQ ID NO: 1156919 - RNA, 23 nt, Human
cucaagugauucuccugccucag

SEQ ID NO: 1156920 - RNA, 24 nt, Human
cucaagugauucuccugccucagc

SEQ ID NO: 1156921 - RNA, 24 nt, Human
cucacugcaaccuccaccuccugg

SEQ ID NO: 1156922 - RNA, 27 nt, Human
cucacugcaaccuccaccuccugggcu

SEQ ID NO: 1156923 - RNA, 23 nt, Human
cucagccucccgaguagcuggga

SEQ ID NO: 1156924 - RNA, 19 nt, Human
cucccacgcuggggaccug

SEQ ID NO: 1156925 - RNA, 26 nt, Human
cuccugaccuaaggugaucugccugc

SEQ ID NO: 1156926 - RNA, 21 nt, Human
cuccugggcucaagugauucu

SEQ ID NO: 1156927 - RNA, 24 nt, Human
cucuaagccuggggaccccaccuc

SEQ ID NO: 1156928 - RNA, 21 nt, Human
cucucaucccccccuggccaa

SEQ ID NO: 1156929 - RNA, 18 nt, Human
cugcaaccuccaccuccu

SEQ ID NO: 1156930 - RNA, 23 nt, Human
cugcaaccuccaccuccugggcu

SEQ ID NO: 1156931 - RNA, 24 nt, Human
cugcaaccuccaccuccugggcuc

SEQ ID NO: 1156932 - RNA, 23 nt, Human
cugccucagccucccaaguagcu

SEQ ID NO: 1156933 - RNA, 23 nt, Human
cugccucagccucccgaguagcu

SEQ ID NO: 1156934 - RNA, 21 nt, Human
cuggaucuugauauguguuuc

SEQ ID NO: 1156935 - RNA, 24 nt, Human
cuggggaccccaccucccagguuc

SEQ ID NO: 1156936 - RNA, 21 nt, Human
cuuacucuguugcccaggcug

SEQ ID NO: 1156937 - RNA, 26 nt, Human
cuuacugugcugggaguacuugugga

SEQ ID NO: 1156938 - RNA, 19 nt, Human
cuuguggagugggggcugu

SEQ ID NO: 1156939 - RNA, 21 nt, Human
cuuguggagugggggcugugu

SEQ ID NO: 1156940 - RNA, 20 nt, Human
cuuuuguacuuuuaguagag

SEQ ID NO: 1156941 - RNA, 21 nt, Human
gaaguucucucaucccccccu

SEQ ID NO: 1156942 - RNA, 24 nt, Human
gaccuaaggugaucugccugccuc

SEQ ID NO: 1156943 - RNA, 20 nt, Human
gagaugggguuucaccacau

SEQ ID NO: 1156944 - RNA, 24 nt, Human
gagaugggguuucaccacauuggc

SEQ ID NO: 1156945 - RNA, 22 nt, Human
gagcaggaagaagacacggagc

SEQ ID NO: 1156946 - RNA, 18 nt, Human
gaucauaggugugagcca

SEQ ID NO: 1156947 - RNA, 22 nt, Human
gauucuccugccucagccuccc

SEQ ID NO: 1156948 - RNA, 20 nt, Human
gcccaggcuggagugcacug

SEQ ID NO: 1156949 - RNA, 24 nt, Human
gcccaggcuggagugcacuggcau

SEQ ID NO: 1156950 - RNA, 20 nt, Human
gccucagccucccgaguagc

SEQ ID NO: 1156951 - RNA, 20 nt, Human
gccuguuccccaccacaucc

SEQ ID NO: 1156952 - RNA, 24 nt, Human
gcuggacuacacaggcugaagcug

SEQ ID NO: 1156953 - RNA, 20 nt, Human
ggagacagacaagauggggg

SEQ ID NO: 1156954 - RNA, 23 nt, Human
ggagucuuacucuguugcccagg

SEQ ID NO: 1156955 - RNA, 22 nt, Human
gggcucaagugauucuccugcc

SEQ ID NO: 1156956 - RNA, 18 nt, Human
gggguuucaccacauugg

SEQ ID NO: 1156957 - RNA, 22 nt, Human
gggguuucaccacauuggccag

SEQ ID NO: 1156958 - RNA, 18 nt, Human
guagcugggauuacaggu

SEQ ID NO: 1156959 - RNA, 19 nt, Human
gugaucugccugccucggc

SEQ ID NO: 1156960 - RNA, 24 nt, Human
gugauucuccugccucagccuccc

SEQ ID NO: 1156961 - RNA, 18 nt, Human
gugcugagaucauaggug

SEQ ID NO: 1156962 - RNA, 21 nt, Human
gugcugagaucauagguguga

SEQ ID NO: 1156963 - RNA, 20 nt, Human
gugcugccugcgcagguugg

SEQ ID NO: 1156964 - RNA, 22 nt, Human
uaagacggagucuuacucuguu

SEQ ID NO: 1156965 - RNA, 21 nt, Human
uaagccuggggaccccaccuc

SEQ ID NO: 1156966 - RNA, 18 nt, Human
uaaggugaucugccugcc

SEQ ID NO: 1156967 - RNA, 24 nt, Human
uaauuuuuguauuuuuaguagaga

SEQ ID NO: 1156968 - RNA, 23 nt, Human
uacaggugccuaccaccacaccc

SEQ ID NO: 1156969 - RNA, 18 nt, Human
uacuggacauuucaagcc

SEQ ID NO: 1156970 - RNA, 18 nt, Human
uagcauuguaacacagac

SEQ ID NO: 1156971 - RNA, 22 nt, Human
uagcuacgacaaagaggggcag

SEQ ID NO: 1156972 - RNA, 20 nt, Human
uagcugggaaugcaggugug

SEQ ID NO: 1156973 - RNA, 19 nt, Human
uaguagagaugggguuuca

SEQ ID NO: 1156974 - RNA, 23 nt, Human
uaguagagaugggguuucaccac

SEQ ID NO: 1156975 - RNA, 26 nt, Human
uaguagagaugggguuucaccacauu

SEQ ID NO: 1156976 - RNA, 19 nt, Human
uauguguuucucaguugga

SEQ ID NO: 1156977 - RNA, 23 nt, Human
uauuuuauuuuaagacggagucu

SEQ ID NO: 1156978 - RNA, 23 nt, Human
ucacugcaaccuccaccuccugg

SEQ ID NO: 1156979 - RNA, 24 nt, Human
ucacugcaaccuccaccuccuggg

SEQ ID NO: 1156980 - RNA, 25 nt, Human
ucacugcaaccuccaccuccugggc

SEQ ID NO: 1156981 - RNA, 27 nt, Human
ucacugcaaccuccaccuccugggcuc

SEQ ID NO: 1156982 - RNA, 20 nt, Human
ucagccucccaaguagcugg

SEQ ID NO: 1156983 - RNA, 20 nt, Human
ucagccucccgaguagcugg

SEQ ID NO: 1156984 - RNA, 18 nt, Human
ucaucccccccuggccaa

SEQ ID NO: 1156985 - RNA, 21 nt, Human
uccaagacaggguguuuugac

SEQ ID NO: 1156986 - RNA, 19 nt, Human
uccauuugagcacagcugg

SEQ ID NO: 1156987 - RNA, 23 nt, Human
ucccaaggugcugagaucauagg

SEQ ID NO: 1156988 - RNA, 23 nt, Human
ucccaaguagcugggaaugcagg

SEQ ID NO: 1156989 - RNA, 21 nt, Human
ucccagguucaagggauucuc

SEQ ID NO: 1156990 - RNA, 24 nt, Human
ucccagguucaagggauucuccug

SEQ ID NO: 1156991 - RNA, 23 nt, Human
ucccgaguagcugggauuacagg

SEQ ID NO: 1156992 - RNA, 24 nt, Human
ucccgaguagcugggauuacaggu

SEQ ID NO: 1156993 - RNA, 21 nt, Human
uccugggcucaagugauucuc

SEQ ID NO: 1156994 - RNA, 22 nt, Human
uccugggcucaagugauucucc

SEQ ID NO: 1156995 - RNA, 22 nt, Human
uccugggcucaagugauucucc

SEQ ID NO: 1156996 - RNA, 24 nt, Human
uccugggcucaagugauucuccug

SEQ ID NO: 1156997 - RNA, 18 nt, Human
ucggccucccaaggugcu

SEQ ID NO: 1156998 - RNA, 22 nt, Human
ucuagacuccauccuccauccc

SEQ ID NO: 1156999 - RNA, 18 nt, Human
ucucaggguccaggauuc

SEQ ID NO: 1157000 - RNA, 26 nt, Human
ucuccugccucagccucccaaguagc

SEQ ID NO: 1157001 - RNA, 24 nt, Human
ucuccugccucagccucccgagua

SEQ ID NO: 1157002 - RNA, 22 nt, Human
ucucucaucccccccuggccaa

SEQ ID NO: 1157003 - RNA, 18 nt, Human
ucuguugcccaggcugga

SEQ ID NO: 1157004 - RNA, 23 nt, Human
ucuuacucuguugcccaggcugg

SEQ ID NO: 1157005 - RNA, 24 nt, Human
ucuuacucuguugcccaggcugga

SEQ ID NO: 1157006 - RNA, 24 nt, Human
ugaccuaaggugaucugccugccu

SEQ ID NO: 1157007 - RNA, 21 nt, Human
ugagaucauaggugugagcca

SEQ ID NO: 1157008 - RNA, 23 nt, Human
ugaucuccgcucacugcaaccuc

SEQ ID NO: 1157009 - RNA, 18 nt, Human
ugcagaguggauuugggu

SEQ ID NO: 1157010 - RNA, 19 nt, Human
ugcccaggcuggagugcac

SEQ ID NO: 1157011 - RNA, 21 nt, Human
ugcccaggcuggagugcacug

SEQ ID NO: 1157012 - RNA, 21 nt, Human
ugcccugggcuuuaauuauuu

SEQ ID NO: 1157013 - RNA, 24 nt, Human
ugccucagccucccaaguagcugg

SEQ ID NO: 1157014 - RNA, 24 nt, Human
ugccucagccucccgaguagcugg

SEQ ID NO: 1157015 - RNA, 21 nt, Human
ugccucggccucccaaggugc

SEQ ID NO: 1157016 - RNA, 24 nt, Human
ugccucggccucccaaggugcuga

SEQ ID NO: 1157017 - RNA, 22 nt, Human
ugccuggguugagaguggagac

SEQ ID NO: 1157018 - RNA, 23 nt, Human
ugccuggguugagaguggagaca

SEQ ID NO: 1157019 - RNA, 22 nt, Human
uggagugcacuggcaugaucuc

SEQ ID NO: 1157020 - RNA, 23 nt, Human
uggauuuggguggcaucuuggcu

SEQ ID NO: 1157021 - RNA, 24 nt, Human
uggccaggcuggucucaaacuccu

SEQ ID NO: 1157022 - RNA, 24 nt, Human
ugggaaugcaggugugugccacca

SEQ ID NO: 1157023 - RNA, 19 nt, Human
ugggauuacaggugccuac

SEQ ID NO: 1157024 - RNA, 21 nt, Human
ugggauuacaggugccuacca

SEQ ID NO: 1157025 - RNA, 24 nt, Human
ugggauuacaggugccuaccacca

SEQ ID NO: 1157026 - RNA, 18 nt, Human
ugggcucaagugauucuc

SEQ ID NO: 1157027 - RNA, 24 nt, Human
ugggcucaagugauucuccugccu

SEQ ID NO: 1157028 - RNA, 19 nt, Human
uggggaccugcagagccgg

SEQ ID NO: 1157029 - RNA, 21 nt, Human
uggggaccugcagagccggcu

SEQ ID NO: 1157030 - RNA, 24 nt, Human
ugggguuucaccacauuggccagg

SEQ ID NO: 1157031 - RNA, 24 nt, Human
uuacucuguugcccaggcuggagu

SEQ ID NO: 1157032 - RNA, 18 nt, Human
uuaguagagaugggguuu

SEQ ID NO: 1157033 - RNA, 22 nt, Human
uuaguagagaugggguuucacc

SEQ ID NO: 1157034 - RNA, 25 nt, Human
uuaguagagaugggguuucaccaca

SEQ ID NO: 1157035 - RNA, 23 nt, Human
uucaagggauucuccugccucag

SEQ ID NO: 1157036 - RNA, 19 nt, Human
uugauauguguuucucagu

SEQ ID NO: 1157037 - RNA, 18 nt, Human
uugcccaggcuggagugc

SEQ ID NO: 1157038 - RNA, 24 nt, Human
uugcccaggcuggagugcacuggc

SEQ ID NO: 1157039 - RNA, 23 nt, Human
uuguauuuuuaguagagaugggg

SEQ ID NO: 1157040 - RNA, 22 nt, Human
uuugcucuaagccuggggaccc

SEQ ID NO: 1157041 - RNA, 24 nt, Human
uuuuuaguagagaugggguuucac

SEQ ID NO: 1157042 - RNA, 20 nt, Human
uuuuuguauuuuuaguagag

SEQ ID NO: 1157043 - RNA, 26 nt, Human
aacuuguuuucucuuuuuuucaccuc

SEQ ID NO: 1157044 - RNA, 22 nt, Human
acacagaaaggcacacaauaaa

SEQ ID NO: 1157045 - RNA, 23 nt, Human
acgugugugacaggcaccagggu

SEQ ID NO: 1157046 - RNA, 22 nt, Human
agaccuugacucuucagaggcc

SEQ ID NO: 1157047 - RNA, 21 nt, Human
aggauaucaaacaauugauuu

SEQ ID NO: 1157048 - RNA, 23 nt, Human
aggauaucaaacaauugauuuuu

SEQ ID NO: 1157049 - RNA, 18 nt, Human
aggcaccagggugggggg

SEQ ID NO: 1157050 - RNA, 23 nt, Human
agggagggcucugcucagacagc

SEQ ID NO: 1157051 - RNA, 21 nt, Human
auaguguugaggacugcucug

SEQ ID NO: 1157052 - RNA, 21 nt, Human
aucccuuaaggauuccauuca

SEQ ID NO: 1157053 - RNA, 20 nt, Human
auggugcuuuuuacaaaaag

SEQ ID NO: 1157054 - RNA, 24 nt, Human
auuccauucaugaagauguuggca

SEQ ID NO: 1157055 - RNA, 24 nt, Human
caacagucacccucaggaggcgau

SEQ ID NO: 1157056 - RNA, 22 nt, Human
caagugcccauagaacagccuc

SEQ ID NO: 1157057 - RNA, 22 nt, Human
cacaccagcaagccacagccag

SEQ ID NO: 1157058 - RNA, 24 nt, Human
cacagcuuagcuucuaaaagcauu

SEQ ID NO: 1157059 - RNA, 20 nt, Human
caccaggguggggggccucu

SEQ ID NO: 1157060 - RNA, 21 nt, Human
cagaggcccugcggugacguu

SEQ ID NO: 1157061 - RNA, 21 nt, Human
cagccauaccacucgucccuc

SEQ ID NO: 1157062 - RNA, 23 nt, Human
cagcgccugggccuuguaguccu

SEQ ID NO: 1157063 - RNA, 18 nt, Human
ccaaggauuaccgugugu

SEQ ID NO: 1157064 - RNA, 22 nt, Human
ccagcagaauaagcaacaguca

SEQ ID NO: 1157065 - RNA, 23 nt, Human
ccaucugccaagaccaggaauuc

SEQ ID NO: 1157066 - RNA, 18 nt, Human
cccaagugcccauagaac

SEQ ID NO: 1157067 - RNA, 22 nt, Human
cccaagugcccauagaacagcc

SEQ ID NO: 1157068 - RNA, 22 nt, Human
cccccagccucucucguaucuc

SEQ ID NO: 1157069 - RNA, 24 nt, Human
cguaaaauaauaaagugcuuucga

SEQ ID NO: 1157070 - RNA, 27 nt, Human
cguaaaauaauaaagugcuuucgauga

SEQ ID NO: 1157071 - RNA, 19 nt, Human
cucugggggaggagggacc

SEQ ID NO: 1157072 - RNA, 22 nt, Human
cuggaaaaaaaaauuccccuga

SEQ ID NO: 1157073 - RNA, 21 nt, Human
gaaaaaaaaauuccccugaaa

SEQ ID NO: 1157074 - RNA, 19 nt, Human
gagggcucugcucagacag

SEQ ID NO: 1157075 - RNA, 22 nt, Human
gcuugcacaccagcaagccacc

SEQ ID NO: 1157076 - RNA, 19 nt, Human
ggacagggcagcaacagaa

SEQ ID NO: 1157077 - RNA, 19 nt, Human
ggcaggggagugguggggc

SEQ ID NO: 1157078 - RNA, 20 nt, Human
ggcggguggggguaggggug

SEQ ID NO: 1157079 - RNA, 18 nt, Human
gggcagcaacagaauggg

SEQ ID NO: 1157080 - RNA, 21 nt, Human
ggguggcggguggggguaggg

SEQ ID NO: 1157081 - RNA, 21 nt, Human
guaacaaggaaucccaccccu

SEQ ID NO: 1157082 - RNA, 18 nt, Human
uaaaaagccuucaguaau

SEQ ID NO: 1157083 - RNA, 22 nt, Human
uaaaagaaggauagauucccau

SEQ ID NO: 1157084 - RNA, 21 nt, Human
uaaacacagaaaggcacacaa

SEQ ID NO: 1157085 - RNA, 18 nt, Human
uaaauuuuaacucacugc

SEQ ID NO: 1157086 - RNA, 18 nt, Human
uaacaaggaaucccaccc

SEQ ID NO: 1157087 - RNA, 20 nt, Human
uaacaaggaaucccaccccu

SEQ ID NO: 1157088 - RNA, 21 nt, Human
uaacaaggaaucccaccccuc

SEQ ID NO: 1157089 - RNA, 21 nt, Human
uaacaaggaaucccaccccuc

SEQ ID NO: 1157090 - RNA, 26 nt, Human
uacuaaauuuuaacucacugcggggu

SEQ ID NO: 1157091 - RNA, 18 nt, Human
uagaaaacacaaaauugg

SEQ ID NO: 1157092 - RNA, 21 nt, Human
uagcaaaaaaggucaggccuc

SEQ ID NO: 1157093 - RNA, 22 nt, Human
uaguguugaggacugcucuggg

SEQ ID NO: 1157094 - RNA, 23 nt, Human
uaugguggaaugcagccagcgcc

SEQ ID NO: 1157095 - RNA, 18 nt, Human
uauguacacccuuguuag

SEQ ID NO: 1157096 - RNA, 18 nt, Human
uauugcaguaagaguaac

SEQ ID NO: 1157097 - RNA, 21 nt, Human
ucaggccacgacuucugugcu

SEQ ID NO: 1157098 - RNA, 18 nt, Human
ucauugcugaauccaggu

SEQ ID NO: 1157099 - RNA, 19 nt, Human
ucauugcugaauccaggug

SEQ ID NO: 1157100 - RNA, 20 nt, Human
ucauugcugaauccaggugu

SEQ ID NO: 1157101 - RNA, 21 nt, Human
uccccugaaaauauuuaaugc

SEQ ID NO: 1157102 - RNA, 22 nt, Human
ucucaaaaaauaaaaagccuuc

SEQ ID NO: 1157103 - RNA, 23 nt, Human
ugagguaaacacagaaaggcaca

SEQ ID NO: 1157104 - RNA, 19 nt, Human
ugcacaccagcaagccaca

SEQ ID NO: 1157105 - RNA, 18 nt, Human
uggaaaacacagaaaagg

SEQ ID NO: 1157106 - RNA, 18 nt, Human
uggaaugcagccagcgcc

SEQ ID NO: 1157107 - RNA, 21 nt, Human
uggcaagggcaggggaguggu

SEQ ID NO: 1157108 - RNA, 18 nt, Human
uggcggguggggguaggg

SEQ ID NO: 1157109 - RNA, 19 nt, Human
uggcggguggggguagggg

SEQ ID NO: 1157110 - RNA, 24 nt, Human
uggcugcauuuccagcacugacau

SEQ ID NO: 1157111 - RNA, 21 nt, Human
uggggcgguuauagcaaaaaa

SEQ ID NO: 1157112 - RNA, 24 nt, Human
uggguggcggguggggguaggggu

SEQ ID NO: 1157113 - RNA, 22 nt, Human
ugucuaaaagaaggauagauuc

SEQ ID NO: 1157114 - RNA, 23 nt, Human
ugucuaaaagaaggauagauucc

SEQ ID NO: 1157115 - RNA, 19 nt, Human
ugugcucccucgcuguucc

SEQ ID NO: 1157116 - RNA, 25 nt, Human
uguuagaaaacugguggcacauuag

SEQ ID NO: 1157117 - RNA, 18 nt, Human
uuaaagcagaccuugacu

SEQ ID NO: 1157118 - RNA, 19 nt, Human
uucccagagccaucugcca

SEQ ID NO: 1157119 - RNA, 24 nt, Human
uuccccugaaaauauuuaaugcaa

SEQ ID NO: 1157120 - RNA, 24 nt, Human
uucucuuuuuuucaccucucaaaa

SEQ ID NO: 1157121 - RNA, 18 nt, Human
uuggcaagggcaggggag

SEQ ID NO: 1157122 - RNA, 19 nt, Human
aaaaagauucuugaccccu

SEQ ID NO: 1157123 - RNA, 25 nt, Human
aaacaagagugguaggaggcaggga

SEQ ID NO: 1157124 - RNA, 20 nt, Human
aaagucaccccacgcuuucc

SEQ ID NO: 1157125 - RNA, 22 nt, Human
aacagaaaggaaaguccagaac

SEQ ID NO: 1157126 - RNA, 18 nt, Human
aacagugggcaaacaaga

SEQ ID NO: 1157127 - RNA, 20 nt, Human
aacccccuguuucuccaaau

SEQ ID NO: 1157128 - RNA, 18 nt, Human
aagcagccauuucaacuu

SEQ ID NO: 1157129 - RNA, 19 nt, Human
aagcuguagaggaccaggc

SEQ ID NO: 1157130 - RNA, 23 nt, Human
aagggagucccuguguuccccca

SEQ ID NO: 1157131 - RNA, 19 nt, Human
aauggcacguggauuagau

SEQ ID NO: 1157132 - RNA, 22 nt, Human
aauggugcuggauaaauuggac

SEQ ID NO: 1157133 - RNA, 19 nt, Human
acaguacagugagagaggg

SEQ ID NO: 1157134 - RNA, 20 nt, Human
acaugggaauaaaaagauuc

SEQ ID NO: 1157135 - RNA, 26 nt, Human
acccaaggaacagaaaggaaaguccc

SEQ ID NO: 1157136 - RNA, 25 nt, Human
acucuaccacacauugagugaauga

SEQ ID NO: 1157137 - RNA, 23 nt, Human
acugcucuaccacccacccaggu

SEQ ID NO: 1157138 - RNA, 21 nt, Human
acuucucucagucuccucauu

SEQ ID NO: 1157139 - RNA, 22 nt, Human
acuucucucagucuccucauug

SEQ ID NO: 1157140 - RNA, 21 nt, Human
agagugaggcaagagccagug

SEQ ID NO: 1157141 - RNA, 19 nt, Human
agcagccaccagggaagau

SEQ ID NO: 1157142 - RNA, 19 nt, Human
agcaggaaggcacagguuu

SEQ ID NO: 1157143 - RNA, 19 nt, Human
aggaaaacauguuuuguug

SEQ ID NO: 1157144 - RNA, 24 nt, Human
aggaaaguccagaacuagcccaac

SEQ ID NO: 1157145 - RNA, 18 nt, Human
aggaaauaaucagcccga

SEQ ID NO: 1157146 - RNA, 24 nt, Human
aggaagccacggugaauuucagug

SEQ ID NO: 1157147 - RNA, 23 nt, Human
agggacacccagaaggaacaggg

SEQ ID NO: 1157148 - RNA, 23 nt, Human
agggacuucgugggggcucaggg

SEQ ID NO: 1157149 - RNA, 20 nt, Human
agguccaccugcugaaagac

SEQ ID NO: 1157150 - RNA, 22 nt, Human
agugguaggaggcagggaccug

SEQ ID NO: 1157151 - RNA, 24 nt, Human
auaaaaaaauagacccaaggaaca

SEQ ID NO: 1157152 - RNA, 19 nt, Human
auaaaauaaacuccagccc

SEQ ID NO: 1157153 - RNA, 20 nt, Human
auacaauaguaauuaagaca

SEQ ID NO: 1157154 - RNA, 23 nt, Human
auaguaauuaagacagggugguc

SEQ ID NO: 1157155 - RNA, 22 nt, Human
aucuuugguugugaugguuguc

SEQ ID NO: 1157156 - RNA, 18 nt, Human
caaacacaagguccaccu

SEQ ID NO: 1157157 - RNA, 26 nt, Human
caaaggccaggauuggggucagcaug

SEQ ID NO: 1157158 - RNA, 19 nt, Human
caacuccucgggaaugaac

SEQ ID NO: 1157159 - RNA, 22 nt, Human
caaggaacagaaaggaaagucc

SEQ ID NO: 1157160 - RNA, 19 nt, Human
caagucagugagaaauggc

SEQ ID NO: 1157161 - RNA, 19 nt, Human
cacccacccaggugugccu

SEQ ID NO: 1157162 - RNA, 23 nt, Human
cacccagaaggaacagggacuuc

SEQ ID NO: 1157163 - RNA, 28 nt, Human
cacugggccccacauugaggagggcccc

SEQ ID NO: 1157164 - RNA, 23 nt, Human
cacuggguuucccccagugcuug

SEQ ID NO: 1157165 - RNA, 19 nt, Human
cagcagggcacggacaggc

SEQ ID NO: 1157166 - RNA, 21 nt, Human
cagcagggcacggacaggccc

SEQ ID NO: 1157167 - RNA, 18 nt, Human
cagcauggaacagugggc

SEQ ID NO: 1157168 - RNA, 26 nt, Human
cagcccaugguaaacuaucccuucuu

SEQ ID NO: 1157169 - RNA, 22 nt, Human
cagcuuggugggaggguaagca

SEQ ID NO: 1157170 - RNA, 21 nt, Human
cagggaagauccagcccugcc

SEQ ID NO: 1157171 - RNA, 20 nt, Human
cagggaaucucaccucacug

SEQ ID NO: 1157172 - RNA, 21 nt, Human
caguaaaaaaaaucuaacauu

SEQ ID NO: 1157173 - RNA, 20 nt, Human
cagucugugccaggcugugg

SEQ ID NO: 1157174 - RNA, 21 nt, Human
cagugaccucuagaaauucuu

SEQ ID NO: 1157175 - RNA, 21 nt, Human
ccagcccaugguaaacuaucc

SEQ ID NO: 1157176 - RNA, 19 nt, Human
ccagcccggaagauccuuc

SEQ ID NO: 1157177 - RNA, 22 nt, Human
ccaggcugugagcaggagcugg

SEQ ID NO: 1157178 - RNA, 24 nt, Human
cccaaggaacagaaaggaaagucc

SEQ ID NO: 1157179 - RNA, 18 nt, Human
cccacuggguuuccccca

SEQ ID NO: 1157180 - RNA, 24 nt, Human
cccaggcuuuuaacagggccucca

SEQ ID NO: 1157181 - RNA, 19 nt, Human
ccccagcagccacagggca

SEQ ID NO: 1157182 - RNA, 23 nt, Human
ccccugcuggaaggcagcuugga

SEQ ID NO: 1157183 - RNA, 23 nt, Human
cccugugcuuggcucagaccccc

SEQ ID NO: 1157184 - RNA, 23 nt, Human
ccgacaguuaccugugugccagg

SEQ ID NO: 1157185 - RNA, 24 nt, Human
ccgcaaggggaccccuucacaccc

SEQ ID NO: 1157186 - RNA, 21 nt, Human
ccggcacccagagcagccaag

SEQ ID NO: 1157187 - RNA, 20 nt, Human
ccgugcuggagguggagcag

SEQ ID NO: 1157188 - RNA, 19 nt, Human
ccuaagcuguagaggacca

SEQ ID NO: 1157189 - RNA, 24 nt, Human
ccucacugggccugggggcaggca

SEQ ID NO: 1157190 - RNA, 23 nt, Human
ccuccuagaccccgaggcuugga

SEQ ID NO: 1157191 - RNA, 18 nt, Human
ccucgaggccaugggccc

SEQ ID NO: 1157192 - RNA, 23 nt, Human
ccucuaagcagccauuucaacuu

SEQ ID NO: 1157193 - RNA, 18 nt, Human
ccugaacccucaccuacg

SEQ ID NO: 1157194 - RNA, 23 nt, Human
ccugggggcaggcauucugucgg

SEQ ID NO: 1157195 - RNA, 22 nt, Human
ccugugcuuggcucagaccccc

SEQ ID NO: 1157196 - RNA, 24 nt, Human
ccugugcuuggcucagacccccac

SEQ ID NO: 1157197 - RNA, 20 nt, Human
ccuucccgagcugccccggc

SEQ ID NO: 1157198 - RNA, 20 nt, Human
cucaccucacugggccuggg

SEQ ID NO: 1157199 - RNA, 24 nt, Human
cuccucagaaagucaaaucaccuu

SEQ ID NO: 1157200 - RNA, 21 nt, Human
cuccucgggaaugaaccuuuu

SEQ ID NO: 1157201 - RNA, 27 nt, Human
cucguauacaugacauacauacgugca

SEQ ID NO: 1157202 - RNA, 19 nt, Human
cucugugcaugaggccccc

SEQ ID NO: 1157203 - RNA, 18 nt, Human
cugcgccuggacagcgag

SEQ ID NO: 1157204 - RNA, 20 nt, Human
cuugaggaggcccugaaccc

SEQ ID NO: 1157205 - RNA, 19 nt, Human
cuugucagggccuucccga

SEQ ID NO: 1157206 - RNA, 27 nt, Human
gaaaaagguaacauuaugagcaaacgu

SEQ ID NO: 1157207 - RNA, 22 nt, Human
gaaugaaccuuuacuucucuca

SEQ ID NO: 1157208 - RNA, 21 nt, Human
gaccuggggucagaccuuucc

SEQ ID NO: 1157209 - RNA, 20 nt, Human
gaggcugcuccugcagggac

SEQ ID NO: 1157210 - RNA, 20 nt, Human
gagguggagcagccaccagg

SEQ ID NO: 1157211 - RNA, 26 nt, Human
gcaaacaagagugguaggaggcaggg

SEQ ID NO: 1157212 - RNA, 27 nt, Human
gcaaacaagagugguaggaggcaggga

SEQ ID NO: 1157213 - RNA, 24 nt, Human
gcaaggagaagccagggguaugga

SEQ ID NO: 1157214 - RNA, 20 nt, Human
gcaauggaccggcacccaga

SEQ ID NO: 1157215 - RNA, 18 nt, Human
gcacagacugacgaggaa

SEQ ID NO: 1157216 - RNA, 18 nt, Human
gcacguggauuagaucuc

SEQ ID NO: 1157217 - RNA, 21 nt, Human
gccccccugcuggaaggcagc

SEQ ID NO: 1157218 - RNA, 18 nt, Human
gcccugugcuuggcucag

SEQ ID NO: 1157219 - RNA, 21 nt, Human
ggaaaguccagaacuagccca

SEQ ID NO: 1157220 - RNA, 23 nt, Human
ggaaugaaccuuuacuucucuca

SEQ ID NO: 1157221 - RNA, 18 nt, Human
ggacagagccccagcagc

SEQ ID NO: 1157222 - RNA, 21 nt, Human
ggagacacaacaguacaguga

SEQ ID NO: 1157223 - RNA, 18 nt, Human
ggccugggggcaggcauu

SEQ ID NO: 1157224 - RNA, 22 nt, Human
gggagcaccaguggcccaacca

SEQ ID NO: 1157225 - RNA, 23 nt, Human
ggguaagcaggaaggcacagguu

SEQ ID NO: 1157226 - RNA, 19 nt, Human
gguuguccuuuuaguaaaa

SEQ ID NO: 1157227 - RNA, 22 nt, Human
gucccuguguucccccaacccc

SEQ ID NO: 1157228 - RNA, 20 nt, Human
guggaccuuggcagugaccu

SEQ ID NO: 1157229 - RNA, 23 nt, Human
gugguaggaggcagggaccuggg

SEQ ID NO: 1157230 - RNA, 19 nt, Human
gugugucuaagcaagucuc

SEQ ID NO: 1157231 - RNA, 22 nt, Human
uaaaaaaauagacccaaggaac

SEQ ID NO: 1157232 - RNA, 24 nt, Human
uaaaaaaauagacccaaggaacag

SEQ ID NO: 1157233 - RNA, 24 nt, Human
uaaaacauuggcaacaaccuaaau

SEQ ID NO: 1157234 - RNA, 22 nt, Human
uaacaaugcucaguaaaaaaaa

SEQ ID NO: 1157235 - RNA, 22 nt, Human
uaacggccggguucuccucuga

SEQ ID NO: 1157236 - RNA, 20 nt, Human
uacaccuaauucuguuucca

SEQ ID NO: 1157237 - RNA, 26 nt, Human
uacaugacauacauacgugcagggug

SEQ ID NO: 1157238 - RNA, 21 nt, Human
uaccacccacccaggugugcc

SEQ ID NO: 1157239 - RNA, 20 nt, Human
uaggaaguuggagucaauug

SEQ ID NO: 1157240 - RNA, 25 nt, Human
uaggggagacacaacaguacaguga

SEQ ID NO: 1157241 - RNA, 18 nt, Human
uaggugccagcaaagccu

SEQ ID NO: 1157242 - RNA, 26 nt, Human
uaucuuauuucaucuuccuagugggc

SEQ ID NO: 1157243 - RNA, 19 nt, Human
ucaauuauuggaaaacaca

SEQ ID NO: 1157244 - RNA, 18 nt, Human
ucaguguguggcuccugc

SEQ ID NO: 1157245 - RNA, 21 nt, Human
ucauacaugcucguauacaug

SEQ ID NO: 1157246 - RNA, 22 nt, Human
uccagagccuuaacccccuguu

SEQ ID NO: 1157247 - RNA, 20 nt, Human
ucccagacugggccugauuc

SEQ ID NO: 1157248 - RNA, 20 nt, Human
uccccacaccugcuccccuc

SEQ ID NO: 1157249 - RNA, 23 nt, Human
ucccuagcugggcacagcagggc

SEQ ID NO: 1157250 - RNA, 18 nt, Human
uccuagugggcaugugcc

SEQ ID NO: 1157251 - RNA, 22 nt, Human
uccucgaggccaugggccccca

SEQ ID NO: 1157252 - RNA, 20 nt, Human
uccugagccucaguuuaccc

SEQ ID NO: 1157253 - RNA, 21 nt, Human
ucucaccucacugggccuggg

SEQ ID NO: 1157254 - RNA, 18 nt, Human
ucucauucaagcugcagg

SEQ ID NO: 1157255 - RNA, 19 nt, Human
ucuccaaacacaaggucca

SEQ ID NO: 1157256 - RNA, 19 nt, Human
ucuccgugcuggaggugga

SEQ ID NO: 1157257 - RNA, 21 nt, Human
ucugcaaagccagcccacaag

SEQ ID NO: 1157258 - RNA, 18 nt, Human
ucuggaaacuuccugagc

SEQ ID NO: 1157259 - RNA, 21 nt, Human
ucuggaaacuuccugagccuc

SEQ ID NO: 1157260 - RNA, 24 nt, Human
ucugugccaggcugugagcaggag

SEQ ID NO: 1157261 - RNA, 24 nt, Human
ugaaagacaugaaauccuaauuca

SEQ ID NO: 1157262 - RNA, 22 nt, Human
ugaaauuauaaagccacuucaa

SEQ ID NO: 1157263 - RNA, 28 nt, Human
ugaaccuuuacuucucucagucuccuca

SEQ ID NO: 1157264 - RNA, 21 nt, Human
ugaccccacuggguuuccccc

SEQ ID NO: 1157265 - RNA, 18 nt, Human
ugaccccuuccucacacc

SEQ ID NO: 1157266 - RNA, 21 nt, Human
ugaccucuaagcagccauuuc

SEQ ID NO: 1157267 - RNA, 18 nt, Human
ugacucaguauuacacaa

SEQ ID NO: 1157268 - RNA, 18 nt, Human
ugaggagggcccugugcu

SEQ ID NO: 1157269 - RNA, 22 nt, Human
ugaggcaagagccaguguugcu

SEQ ID NO: 1157270 - RNA, 21 nt, Human
ugaguuaaaaccaggugugug

SEQ ID NO: 1157271 - RNA, 21 nt, Human
ugcaaagccagcccacaaggg

SEQ ID NO: 1157272 - RNA, 21 nt, Human
ugcacagacugacgaggaagc

SEQ ID NO: 1157273 - RNA, 24 nt, Human
ugcacugggccccaccaauuaugu

SEQ ID NO: 1157274 - RNA, 22 nt, Human
ugcagggaaucucaccucacug

SEQ ID NO: 1157275 - RNA, 21 nt, Human
ugccaggcugugagcaggagc

SEQ ID NO: 1157276 - RNA, 22 nt, Human
ugccgggcuauguucuccgugc

SEQ ID NO: 1157277 - RNA, 21 nt, Human
ugccuagccgcaaggggaccc

SEQ ID NO: 1157278 - RNA, 23 nt, Human
ugcuggaaggcagcuuggaggcu

SEQ ID NO: 1157279 - RNA, 25 nt, Human
ugcuggggguggaaggugcuuuccc

SEQ ID NO: 1157280 - RNA, 21 nt, Human
uggacagcgagggcuggcugc

SEQ ID NO: 1157281 - RNA, 18 nt, Human
uggaccggcacccagagc

SEQ ID NO: 1157282 - RNA, 19 nt, Human
uggcagugaccuugucaac

SEQ ID NO: 1157283 - RNA, 18 nt, Human
ugggaucaggaaaacaaa

SEQ ID NO: 1157284 - RNA, 19 nt, Human
ugggaugcccugcuuuaac

SEQ ID NO: 1157285 - RNA, 18 nt, Human
ugggcccccaccacugug

SEQ ID NO: 1157286 - RNA, 18 nt, Human
uggggucagaccuuuccg

SEQ ID NO: 1157287 - RNA, 22 nt, Human
uggggucagcauggaacagugg

SEQ ID NO: 1157288 - RNA, 20 nt, Human
uggugagugguggggcuggg

SEQ ID NO: 1157289 - RNA, 22 nt, Human
ugguucagacuucaggcccuuu

SEQ ID NO: 1157290 - RNA, 23 nt, Human
uguagaggaccaggcuucggccu

SEQ ID NO: 1157291 - RNA, 21 nt, Human
ugucagggccuucccgagcug

SEQ ID NO: 1157292 - RNA, 22 nt, Human
uuaacccaaagguguggaccuu

SEQ ID NO: 1157293 - RNA, 23 nt, Human
uucacaugggaauaaaaagauuc

SEQ ID NO: 1157294 - RNA, 22 nt, Human
uucaugauccugaguccaccuc

SEQ ID NO: 1157295 - RNA, 20 nt, Human
uuccgcugcuugccagcugu

SEQ ID NO: 1157296 - RNA, 22 nt, Human
uucuccaaaugaagaaucucau

SEQ ID NO: 1157297 - RNA, 20 nt, Human
uuggcauucggaaggaggau

SEQ ID NO: 1157298 - RNA, 22 nt, Human
uuugcacugggccccaccaauu

SEQ ID NO: 1157299 - RNA, 18 nt, Human
aaaagaagguggaacaga

SEQ ID NO: 1157300 - RNA, 25 nt, Human
aaacaagcagaugaaaaccuuagag

SEQ ID NO: 1157301 - RNA, 20 nt, Human
aaagcacgcugacuuggguu

SEQ ID NO: 1157302 - RNA, 19 nt, Human
aacgagaaaacauaaagga

SEQ ID NO: 1157303 - RNA, 18 nt, Human
aagaagaaaauagagagg

SEQ ID NO: 1157304 - RNA, 19 nt, Human
aagaagaaaauagagaugg

SEQ ID NO: 1157305 - RNA, 19 nt, Human
aagaagaaaauagagaugg

SEQ ID NO: 1157306 - RNA, 20 nt, Human
aaugauaaggaagaccagga

SEQ ID NO: 1157307 - RNA, 25 nt, Human
acaaaaaaagaugaaaaaaucaaaa

SEQ ID NO: 1157308 - RNA, 25 nt, Human
acagacaacagaucagagaacaaaa

SEQ ID NO: 1157309 - RNA, 21 nt, Human
acccaccacaagcccccacag

SEQ ID NO: 1157310 - RNA, 23 nt, Human
acccaccccauccucuaccugcc

SEQ ID NO: 1157311 - RNA, 22 nt, Human
accggagccagaggcugugcca

SEQ ID NO: 1157312 - RNA, 19 nt, Human
accuacacuccugugugca

SEQ ID NO: 1157313 - RNA, 20 nt, Human
acuccugcccccgacaaccc

SEQ ID NO: 1157314 - RNA, 22 nt, Human
acuccugcccccgacaacccac

SEQ ID NO: 1157315 - RNA, 18 nt, Human
agaagaaaauagagaugg

SEQ ID NO: 1157316 - RNA, 23 nt, Human
agacuuggggcugcacaguggag

SEQ ID NO: 1157317 - RNA, 19 nt, Human
agagaacaaaacgagaaaa

SEQ ID NO: 1157318 - RNA, 19 nt, Human
agaggguugggggugggca

SEQ ID NO: 1157319 - RNA, 22 nt, Human
agaucagccgauggaccauagg

SEQ ID NO: 1157320 - RNA, 19 nt, Human
agccuaaucauucugucag

SEQ ID NO: 1157321 - RNA, 23 nt, Human
aggaaaugauaaggaagaccagg

SEQ ID NO: 1157322 - RNA, 24 nt, Human
aggagaggguugggggugggcagg

SEQ ID NO: 1157323 - RNA, 21 nt, Human
aggguucuuuuccauuccuuu

SEQ ID NO: 1157324 - RNA, 21 nt, Human
auaccuaccuggauuuacaug

SEQ ID NO: 1157325 - RNA, 23 nt, Human
aucccaccucccugucgccccca

SEQ ID NO: 1157326 - RNA, 22 nt, Human
caagcaaucuuagacaaacauc

SEQ ID NO: 1157327 - RNA, 19 nt, Human
caagcaguggaaaacugca

SEQ ID NO: 1157328 - RNA, 22 nt, Human
cacccaccccauccucuaccuu

SEQ ID NO: 1157329 - RNA, 25 nt, Human
caccggagccagaggcugugccaac

SEQ ID NO: 1157330 - RNA, 18 nt, Human
cagaucagagaacaaaac

SEQ ID NO: 1157331 - RNA, 22 nt, Human
cagcaaggaggaaaguuaugga

SEQ ID NO: 1157332 - RNA, 22 nt, Human
cagcacagagugacccagggag

SEQ ID NO: 1157333 - RNA, 23 nt, Human
cagcacagagugacccagggcag

SEQ ID NO: 1157334 - RNA, 21 nt, Human
cagccgauggaccauagguca

SEQ ID NO: 1157335 - RNA, 20 nt, Human
caggugucuuuauuccaagg

SEQ ID NO: 1157336 - RNA, 24 nt, Human
cauaaaggaaaagcgaaaggcuag

SEQ ID NO: 1157337 - RNA, 22 nt, Human
cauacgucacccacuccugccc

SEQ ID NO: 1157338 - RNA, 18 nt, Human
cauccugaauucuuacaa

SEQ ID NO: 1157339 - RNA, 20 nt, Human
caugcucggcuuccucacaa

SEQ ID NO: 1157340 - RNA, 25 nt, Human
cauucaggagccugacuuggaucag

SEQ ID NO: 1157341 - RNA, 20 nt, Human
ccacaagcccccacaguuac

SEQ ID NO: 1157342 - RNA, 21 nt, Human
ccacacauccgggagugggac

SEQ ID NO: 1157343 - RNA, 26 nt, Human
ccaccacaagcccccacaggggcccu

SEQ ID NO: 1157344 - RNA, 20 nt, Human
cccaccacaagcccccacag

SEQ ID NO: 1157345 - RNA, 24 nt, Human
cccacuccugcccccgacaaccca

SEQ ID NO: 1157346 - RNA, 21 nt, Human
cccauccucuaccugccacac

SEQ ID NO: 1157347 - RNA, 19 nt, Human
cccugaccagagccacgga

SEQ ID NO: 1157348 - RNA, 24 nt, Human
cccugucgcccccaugcucggcuu

SEQ ID NO: 1157349 - RNA, 26 nt, Human
ccucacauucaggagccugacuugga

SEQ ID NO: 1157350 - RNA, 24 nt, Human
ccucccugucgcccccaugcucgg

SEQ ID NO: 1157351 - RNA, 23 nt, Human
ccugcccccgacaacccaccaca

SEQ ID NO: 1157352 - RNA, 21 nt, Human
cgacaaaaaaagaugaaaaaa

SEQ ID NO: 1157353 - RNA, 25 nt, Human
cuagacagucuuuuuagugcccucu

SEQ ID NO: 1157354 - RNA, 19 nt, Human
cuaguaucaagcaaucuua

SEQ ID NO: 1157355 - RNA, 21 nt, Human
cucagacuuaaacacaauuga

SEQ ID NO: 1157356 - RNA, 21 nt, Human
cucuguucuccaagaggaccc

SEQ ID NO: 1157357 - RNA, 21 nt, Human
cugcccccgacaacccaccac

SEQ ID NO: 1157358 - RNA, 21 nt, Human
cugguuuuuccagcagccagg

SEQ ID NO: 1157359 - RNA, 18 nt, Human
gaaaauagagauggagau

SEQ ID NO: 1157360 - RNA, 20 nt, Human
gaacagaagaagaaaauaga

SEQ ID NO: 1157361 - RNA, 23 nt, Human
gacaaaaaaagaugaaaaaauca

SEQ ID NO: 1157362 - RNA, 19 nt, Human
gagaacaaaacgagaaaac

SEQ ID NO: 1157363 - RNA, 19 nt, Human
ggaaaugauaaggaagacc

SEQ ID NO: 1157364 - RNA, 21 nt, Human
ggaccuggucagagacugaug

SEQ ID NO: 1157365 - RNA, 20 nt, Human
ggcagugcccugaccagagc

SEQ ID NO: 1157366 - RNA, 19 nt, Human
ggggcugcacaguggagca

SEQ ID NO: 1157367 - RNA, 19 nt, Human
ggggugggcagggcuccag

SEQ ID NO: 1157368 - RNA, 27 nt, Human
guagaagugggaguuguuucccacugg

SEQ ID NO: 1157369 - RNA, 21 nt, Human
gugccuuagcggcaaugguua

SEQ ID NO: 1157370 - RNA, 21 nt, Human
uacuuugugggucagaagaga

SEQ ID NO: 1157371 - RNA, 22 nt, Human
uaucaagcaaucuuagacaaac

SEQ ID NO: 1157372 - RNA, 22 nt, Human
uaugaagacauucgggaaaaug

SEQ ID NO: 1157373 - RNA, 19 nt, Human
ucagaagagaacugguuuu

SEQ ID NO: 1157374 - RNA, 22 nt, Human
ucaguaaauguguguugaagga

SEQ ID NO: 1157375 - RNA, 23 nt, Human
ucccaccucccugucgcccccau

SEQ ID NO: 1157376 - RNA, 23 nt, Human
ucccuaggaggcacagacuucgg

SEQ ID NO: 1157377 - RNA, 21 nt, Human
ugaaaaccuuagagaugcugc

SEQ ID NO: 1157378 - RNA, 22 nt, Human
ugacagugccuuucucucccag

SEQ ID NO: 1157379 - RNA, 22 nt, Human
ugacaugauuuccuauuacaaa

SEQ ID NO: 1157380 - RNA, 19 nt, Human
ugaccagagccacggaccu

SEQ ID NO: 1157381 - RNA, 22 nt, Human
ugagaaacaagcagaugaaaac

SEQ ID NO: 1157382 - RNA, 23 nt, Human
ugagaaacaagcagaugaaaacg

SEQ ID NO: 1157383 - RNA, 22 nt, Human
ugagaugugcuuauaacccugu

SEQ ID NO: 1157384 - RNA, 21 nt, Human
ugagaugugcuuauaacccuu

SEQ ID NO: 1157385 - RNA, 22 nt, Human
ugaggauaaaguugccaguccu

SEQ ID NO: 1157386 - RNA, 24 nt, Human
ugaggcccggcaacuugguguugg

SEQ ID NO: 1157387 - RNA, 22 nt, Human
ugccaaacuucgacaaaaaaag

SEQ ID NO: 1157388 - RNA, 29 nt, Human
ugcccccgacaacccaccacaagccccca

SEQ ID NO: 1157389 - RNA, 25 nt, Human
ugcccgagacaaagaguugagaaac

SEQ ID NO: 1157390 - RNA, 19 nt, Human
ugcuggaccuggucagaga

SEQ ID NO: 1157391 - RNA, 25 nt, Human
uggaacagaagaagaaaagggaggc

SEQ ID NO: 1157392 - RNA, 19 nt, Human
uggaccuggucagagacug

SEQ ID NO: 1157393 - RNA, 20 nt, Human
ugggauagggacauaccuac

SEQ ID NO: 1157394 - RNA, 20 nt, Human
uggggcugcacaguggagca

SEQ ID NO: 1157395 - RNA, 20 nt, Human
ugggucagaagagaacuggu

SEQ ID NO: 1157396 - RNA, 20 nt, Human
ugugugcagugggcauucag

SEQ ID NO: 1157397 - RNA, 20 nt, Human
uucgacaaaaaaagaugaaa

SEQ ID NO: 1157398 - RNA, 21 nt, Human
uucgacaaaaaaagaugaaaa

SEQ ID NO: 1157399 - RNA, 20 nt, Human
uuuccuauuacaaacaagug

SEQ ID NO: 1157400 - RNA, 23 nt, Human
uuuuauucuaagugggauaggga

SEQ ID NO: 1157401 - RNA, 22 nt, Human
aaggagaguucauuguugcaaa

SEQ ID NO: 1157402 - RNA, 23 nt, Human
acagggcaagacucuguccagag

SEQ ID NO: 1157403 - RNA, 27 nt, Human
acuacuauacuccagccugggcaacag

SEQ ID NO: 1157404 - RNA, 18 nt, Human
acuauacuccagccuggg

SEQ ID NO: 1157405 - RNA, 21 nt, Human
acuauacuccagccugggcaa

SEQ ID NO: 1157406 - RNA, 22 nt, Human
acuauacuccagccugggcaac

SEQ ID NO: 1157407 - RNA, 24 nt, Human
acuauacuccagccugggcaacag

SEQ ID NO: 1157408 - RNA, 18 nt, Human
acugcuggggcugcugcu

SEQ ID NO: 1157409 - RNA, 20 nt, Human
acuugggaggcagaggaaga

SEQ ID NO: 1157410 - RNA, 22 nt, Human
agaggaagaaggauuguuugag

SEQ ID NO: 1157411 - RNA, 25 nt, Human
agaggaagaaggauuguuugagccc

SEQ ID NO: 1157412 - RNA, 24 nt, Human
agccugggcaacagggcaagacuc

SEQ ID NO: 1157413 - RNA, 24 nt, Human
aggcagaggaagaaggauuguuug

SEQ ID NO: 1157414 - RNA, 24 nt, Human
auacuccagccugggcaacagggc

SEQ ID NO: 1157415 - RNA, 27 nt, Human
cacuacuauacuccagccugggcaaca

SEQ ID NO: 1157416 - RNA, 23 nt, Human
ccacugcacuacuauacuccagc

SEQ ID NO: 1157417 - RNA, 21 nt, Human
ccucagugcuaggaggcacuc

SEQ ID NO: 1157418 - RNA, 22 nt, Human
ccugggcaacagggcaagacuc

SEQ ID NO: 1157419 - RNA, 23 nt, Human
ccuuaugcaagcaccauuuccuc

SEQ ID NO: 1157420 - RNA, 23 nt, Human
cgcugcuacuggggcugcugcug

SEQ ID NO: 1157421 - RNA, 21 nt, Human
cuacuauacuccagccugggc

SEQ ID NO: 1157422 - RNA, 24 nt, Human
cuacuauacuccagccugggcaac

SEQ ID NO: 1157423 - RNA, 22 nt, Human
cuacugcuggggcugcugcugc

SEQ ID NO: 1157424 - RNA, 25 nt, Human
cuacuggaguugcugcugcuggggc

SEQ ID NO: 1157425 - RNA, 24 nt, Human
cuaugaucacaccacugcacuacu

SEQ ID NO: 1157426 - RNA, 21 nt, Human
cucugugccaguuuccucuuc

SEQ ID NO: 1157427 - RNA, 19 nt, Human
cugcuacuggggcugcugc

SEQ ID NO: 1157428 - RNA, 19 nt, Human
cugcuacuggggcugcugc

SEQ ID NO: 1157429 - RNA, 19 nt, Human
cugcuacuggggcugcugc

SEQ ID NO: 1157430 - RNA, 19 nt, Human
cugcuacuggggcugcugc

SEQ ID NO: 1157431 - RNA, 19 nt, Human
cugcuacuggggcugcugc

SEQ ID NO: 1157432 - RNA, 22 nt, Human
cugcuacuggggcugcuggagc

SEQ ID NO: 1157433 - RNA, 22 nt, Human
cugcuacuggggcugcuggagc

SEQ ID NO: 1157434 - RNA, 20 nt, Human
cugcuacuggggcugcuggu

SEQ ID NO: 1157435 - RNA, 25 nt, Human
cugcugcugcuagagcugcuacugg

SEQ ID NO: 1157436 - RNA, 25 nt, Human
cugcugcugcuagagcugcuacugg

SEQ ID NO: 1157437 - RNA, 19 nt, Human
cugcugcugcuggagcugc

SEQ ID NO: 1157438 - RNA, 25 nt, Human
cugcugcugcuggagcugcuacugg

SEQ ID NO: 1157439 - RNA, 27 nt, Human
cugcugcugcugggacugcugcugcug

SEQ ID NO: 1157440 - RNA, 19 nt, Human
cugcugcuggagcugcuac

SEQ ID NO: 1157441 - RNA, 19 nt, Human
cugcugcuggagcugcuac

SEQ ID NO: 1157442 - RNA, 22 nt, Human
cugcugcuggagcugcugcugc

SEQ ID NO: 1157443 - RNA, 19 nt, Human
cugcugcugggacugcugc

SEQ ID NO: 1157444 - RNA, 22 nt, Human
cugcugcuggggcugcugcugc

SEQ ID NO: 1157445 - RNA, 23 nt, Human
cuggguccugcucuguaguccca

SEQ ID NO: 1157446 - RNA, 20 nt, Human
cuguagucccagcuacuugg

SEQ ID NO: 1157447 - RNA, 20 nt, Human
gcuacuggggcugcuggagc

SEQ ID NO: 1157448 - RNA, 20 nt, Human
gcuacuggggcugcuggagc

SEQ ID NO: 1157449 - RNA, 20 nt, Human
gcuacuggggcugcuggugg

SEQ ID NO: 1157450 - RNA, 24 nt, Human
gcucuguagucccagcuacuuggg

SEQ ID NO: 1157451 - RNA, 22 nt, Human
gcugcugcuagagcugcuacug

SEQ ID NO: 1157452 - RNA, 22 nt, Human
gcugcugcuagagcugcuacug

SEQ ID NO: 1157453 - RNA, 19 nt, Human
gcugcugcugcuacuacug

SEQ ID NO: 1157454 - RNA, 18 nt, Human
gcugcugcugcugcugcc

SEQ ID NO: 1157455 - RNA, 20 nt, Human
gcugcugcugcugcugcugg

SEQ ID NO: 1157456 - RNA, 20 nt, Human
gcugcugcugcugcugcugg

SEQ ID NO: 1157457 - RNA, 22 nt, Human
gcugcugcuggagcuacugcug

SEQ ID NO: 1157458 - RNA, 22 nt, Human
gcugcugcuggagcugcuacug

SEQ ID NO: 1157459 - RNA, 22 nt, Human
gcugcugcuggagcugcuacug

SEQ ID NO: 1157460 - RNA, 23 nt, Human
gcugcugcuggagcugcuacugg

SEQ ID NO: 1157461 - RNA, 20 nt, Human
gcugcugcuggggcugcugc

SEQ ID NO: 1157462 - RNA, 20 nt, Human
gcugcugcuggggcugcugc

SEQ ID NO: 1157463 - RNA, 20 nt, Human
gcugcugcuggggcugcugc

SEQ ID NO: 1157464 - RNA, 18 nt, Human
gcugcuggagcugcuacu

SEQ ID NO: 1157465 - RNA, 18 nt, Human
gcugcuggagcugcuacu

SEQ ID NO: 1157466 - RNA, 19 nt, Human
gcugcuggagcugcuacug

SEQ ID NO: 1157467 - RNA, 19 nt, Human
gcugcuggagcugcuacug

SEQ ID NO: 1157468 - RNA, 18 nt, Human
gcugcuggagcugcugcu

SEQ ID NO: 1157469 - RNA, 19 nt, Human
gcugcugggacugcugcug

SEQ ID NO: 1157470 - RNA, 18 nt, Human
gcugcuggggcugcugcu

SEQ ID NO: 1157471 - RNA, 20 nt, Human
gcuggggcugcugcugcugc

SEQ ID NO: 1157472 - RNA, 21 nt, Human
ggcugcugccgcugcuacugg

SEQ ID NO: 1157473 - RNA, 21 nt, Human
ggcugcugcugcuacuacugg

SEQ ID NO: 1157474 - RNA, 21 nt, Human
ggcugcugcugcugcuacugg

SEQ ID NO: 1157475 - RNA, 21 nt, Human
ggcugcugcugcugcugcugg

SEQ ID NO: 1157476 - RNA, 21 nt, Human
ggcugcuguugcugcuacugg

SEQ ID NO: 1157477 - RNA, 21 nt, Human
gucucuuccagcaaggagagu

SEQ ID NO: 1157478 - RNA, 24 nt, Human
uaacaggacuugugucugaaguuu

SEQ ID NO: 1157479 - RNA, 24 nt, Human
uacuacuggggcugcuguugcugc

SEQ ID NO: 1157480 - RNA, 23 nt, Human
uacuccagccugggcaacagggc

SEQ ID NO: 1157481 - RNA, 21 nt, Human
uacugcuggggcugcugcugc

SEQ ID NO: 1157482 - RNA, 25 nt, Human
uacuggaguugcugcugcuggggcu

SEQ ID NO: 1157483 - RNA, 18 nt, Human
uacuggggcugcugcugc

SEQ ID NO: 1157484 - RNA, 28 nt, Human
ugcuacuggggcugcugcugcugcugcc

SEQ ID NO: 1157485 - RNA, 18 nt, Human
ugcuaggaggcacucagc

SEQ ID NO: 1157486 - RNA, 28 nt, Human
ugcugcugcuacuggggcugcugcugcc

SEQ ID NO: 1157487 - RNA, 18 nt, Human
ugcugcugcuagagcugc

SEQ ID NO: 1157488 - RNA, 28 nt, Human
ugcugcugcugcuacuggggcugcugcc

SEQ ID NO: 1157489 - RNA, 21 nt, Human
ugcugcugcugcuagagcugc

SEQ ID NO: 1157490 - RNA, 18 nt, Human
ugcugcugcugcuggagc

SEQ ID NO: 1157491 - RNA, 26 nt, Human
ugcugcugcugcuggagcuacugcug

SEQ ID NO: 1157492 - RNA, 18 nt, Human
ugcugcugcuggagcugc

SEQ ID NO: 1157493 - RNA, 24 nt, Human
ugcugcugcuggagcugcugcugc

SEQ ID NO: 1157494 - RNA, 24 nt, Human
ugcugcugcugggacugcugcugc

SEQ ID NO: 1157495 - RNA, 21 nt, Human
ugcugcugcuggggcugcugc

SEQ ID NO: 1157496 - RNA, 18 nt, Human
ugcugcuggggcugcugc

SEQ ID NO: 1157497 - RNA, 18 nt, Human
ugcugcuggggcugcugc

SEQ ID NO: 1157498 - RNA, 28 nt, Human
ugcugcuggggcugcugcugcugcugcc

SEQ ID NO: 1157499 - RNA, 21 nt, Human
ugcuggagcugcuacuggggc

SEQ ID NO: 1157500 - RNA, 21 nt, Human
ugcuggagcugcuacuggggc

SEQ ID NO: 1157501 - RNA, 21 nt, Human
ugcuggagcugcuacuggggc

SEQ ID NO: 1157502 - RNA, 28 nt, Human
ugcuguugcugcuacuggggcugcugcc

SEQ ID NO: 1157503 - RNA, 22 nt, Human
ugggaggcagaggaagaaggau

SEQ ID NO: 1157504 - RNA, 22 nt, Human
ugggaggcagaggaagaaggau

SEQ ID NO: 1157505 - RNA, 24 nt, Human
ugggaggcagaggaagaaggauug

SEQ ID NO: 1157506 - RNA, 23 nt, Human
ugucugaaguuuccuccagcuac

SEQ ID NO: 1157507 - RNA, 22 nt, Human
uuagaggugggcggucucuucc

SEQ ID NO: 1157508 - RNA, 24 nt, Human
uugcugcuacuggggcugcugccg

SEQ ID NO: 1157509 - RNA, 24 nt, Human
uugcugcugcuggggcugcugcug

SEQ ID NO: 1157510 - RNA, 28 nt, Human
uugcugcugcuggggcugcugcugcugc

SEQ ID NO: 1157511 - RNA, 22 nt, Human
uugggaggcagaggaagaagga

SEQ ID NO: 1157512 - RNA, 24 nt, Human
uugggaggcagaggaagaaggauu

SEQ ID NO: 1157513 - RNA, 18 nt, Human
uuguuugagcccaggugg

SEQ ID NO: 1157514 - RNA, 24 nt, Human
aaagugcugggaugacaggcauga

SEQ ID NO: 1157515 - RNA, 19 nt, Human
aaccacccagggucaucca

SEQ ID NO: 1157516 - RNA, 21 nt, Human
aaccccgacccuucuggcucc

SEQ ID NO: 1157517 - RNA, 21 nt, Human
aacuuauggcgcgcgugccuc

SEQ ID NO: 1157518 - RNA, 25 nt, Human
aagaaggcguggaggugccgcugga

SEQ ID NO: 1157519 - RNA, 19 nt, Human
aagcccccugucuacacag

SEQ ID NO: 1157520 - RNA, 19 nt, Human
aaguagcugggauuacagg

SEQ ID NO: 1157521 - RNA, 26 nt, Human
aaguagcugggauuacaggugcacac

SEQ ID NO: 1157522 - RNA, 21 nt, Human
acaggcaugagccaucgugcc

SEQ ID NO: 1157523 - RNA, 18 nt, Human
acaguucauuucuucuuc

SEQ ID NO: 1157524 - RNA, 18 nt, Human
acaugccucgccucccuc

SEQ ID NO: 1157525 - RNA, 28 nt, Human
acccagggucauccaaugccguaaguac

SEQ ID NO: 1157526 - RNA, 18 nt, Human
accuccuccuccuccucc

SEQ ID NO: 1157527 - RNA, 21 nt, Human
accuccuccuccucuuccccc

SEQ ID NO: 1157528 - RNA, 26 nt, Human
acgaaugacacgccaaagguuugaaa

SEQ ID NO: 1157529 - RNA, 18 nt, Human
acgggguuucacuauguu

SEQ ID NO: 1157530 - RNA, 19 nt, Human
acgggguuucacuauguug

SEQ ID NO: 1157531 - RNA, 24 nt, Human
acgggguuucacuauguugaccag

SEQ ID NO: 1157532 - RNA, 23 nt, Human
acuccuccuccuccuccuccccc

SEQ ID NO: 1157533 - RNA, 24 nt, Human
acucuuguugcccaggcuggagug

SEQ ID NO: 1157534 - RNA, 19 nt, Human
agagacgggguuucacuau

SEQ ID NO: 1157535 - RNA, 19 nt, Human
agagccggggacccuugga

SEQ ID NO: 1157536 - RNA, 21 nt, Human
agccauaaccacccaggguca

SEQ ID NO: 1157537 - RNA, 18 nt, Human
agccugggcuugggggca

SEQ ID NO: 1157538 - RNA, 22 nt, Human
aggcaggaggaggucgcucugg

SEQ ID NO: 1157539 - RNA, 23 nt, Human
aggcaggaggaggucgcucugga

SEQ ID NO: 1157540 - RNA, 18 nt, Human
aggcccuugugucgaugu

SEQ ID NO: 1157541 - RNA, 20 nt, Human
agggagagcucuuugugaug

SEQ ID NO: 1157542 - RNA, 18 nt, Human
aggggccucccuucagug

SEQ ID NO: 1157543 - RNA, 24 nt, Human
agugcaauggcacaaucucggcuc

SEQ ID NO: 1157544 - RNA, 18 nt, Human
auccacgaacuccuccuc

SEQ ID NO: 1157545 - RNA, 18 nt, Human
auccacgaccuccuccuc

SEQ ID NO: 1157546 - RNA, 24 nt, Human
caaagugcugggaugacaggcaug

SEQ ID NO: 1157547 - RNA, 21 nt, Human
caacaaccuccuccuccucuu

SEQ ID NO: 1157548 - RNA, 20 nt, Human
caaccuccgccucccagguu

SEQ ID NO: 1157549 - RNA, 22 nt, Human
caagcaauucuccuguuucagc

SEQ ID NO: 1157550 - RNA, 24 nt, Human
cacaccaccaugccuggcuaauuu

SEQ ID NO: 1157551 - RNA, 19 nt, Human
cacauagaggcuggccacg

SEQ ID NO: 1157552 - RNA, 24 nt, Human
caccaugccuggcuaauuuuugua

SEQ ID NO: 1157553 - RNA, 19 nt, Human
cacccucccugcucagcaa

SEQ ID NO: 1157554 - RNA, 24 nt, Human
cacccucccugcucagcaauacug

SEQ ID NO: 1157555 - RNA, 26 nt, Human
cacgaacuccuccuccuccuccuccc

SEQ ID NO: 1157556 - RNA, 19 nt, Human
cacgcuccucuuccucuuc

SEQ ID NO: 1157557 - RNA, 21 nt, Human
cacgggaaggucggggaaucc

SEQ ID NO: 1157558 - RNA, 18 nt, Human
cacuauguugaccaggcu

SEQ ID NO: 1157559 - RNA, 24 nt, Human
cacuauguugaccaggcugcucuc

SEQ ID NO: 1157560 - RNA, 24 nt, Human
cacucuuguugcccaggcuggagu

SEQ ID NO: 1157561 - RNA, 21 nt, Human
cacugcaaccuccgccuccca

SEQ ID NO: 1157562 - RNA, 20 nt, Human
cagccaagccucagucaggu

SEQ ID NO: 1157563 - RNA, 20 nt, Human
cagccugggcuugggggcaa

SEQ ID NO: 1157564 - RNA, 24 nt, Human
caggagagagggagagcucuuugu

SEQ ID NO: 1157565 - RNA, 24 nt, Human
ccaaagugcugggaugacaggcau

SEQ ID NO: 1157566 - RNA, 21 nt, Human
ccaaguagcugggauuacagg

SEQ ID NO: 1157567 - RNA, 21 nt, Human
ccaggugcugaggaaccugcc

SEQ ID NO: 1157568 - RNA, 18 nt, Human
ccaguuccuccuucucag

SEQ ID NO: 1157569 - RNA, 23 nt, Human
cccaaguagcugggauuacaggu

SEQ ID NO: 1157570 - RNA, 24 nt, Human
cccaaguagcugggauuacaggug

SEQ ID NO: 1157571 - RNA, 28 nt, Human
cccacucccaucacauagaggcuggcca

SEQ ID NO: 1157572 - RNA, 19 nt, Human
cccagcaggcccacuccca

SEQ ID NO: 1157573 - RNA, 19 nt, Human
cccaggcuggagugcaaug

SEQ ID NO: 1157574 - RNA, 23 nt, Human
cccagguucaagcaauucuccug

SEQ ID NO: 1157575 - RNA, 20 nt, Human
cccccuccuccuacccggga

SEQ ID NO: 1157576 - RNA, 19 nt, Human
ccccggccaguuccuccuu

SEQ ID NO: 1157577 - RNA, 23 nt, Human
ccccuccucuuccuggcaggccc

SEQ ID NO: 1157578 - RNA, 20 nt, Human
cccgggcgccccgggagcuc

SEQ ID NO: 1157579 - RNA, 26 nt, Human
ccgccucccagguucaagcaauucuu

SEQ ID NO: 1157580 - RNA, 22 nt, Human
ccggccaguuccuccuucucag

SEQ ID NO: 1157581 - RNA, 20 nt, Human
ccggggccccucaucaagcc

SEQ ID NO: 1157582 - RNA, 24 nt, Human
ccucccagguucaagcaauucucc

SEQ ID NO: 1157583 - RNA, 19 nt, Human
ccuccccuccuccucuccu

SEQ ID NO: 1157584 - RNA, 23 nt, Human
ccuccgaugccaggugcugagga

SEQ ID NO: 1157585 - RNA, 20 nt, Human
ccuccuccuccuccccuccu

SEQ ID NO: 1157586 - RNA, 19 nt, Human
ccuccuccuccucuucccc

SEQ ID NO: 1157587 - RNA, 19 nt, Human
ccuccuccuucuccucccc

SEQ ID NO: 1157588 - RNA, 18 nt, Human
ccuccucuucccccuccu

SEQ ID NO: 1157589 - RNA, 18 nt, Human
ccuccucuucccccuccu

SEQ ID NO: 1157590 - RNA, 20 nt, Human
ccuccucuucccccuccucc

SEQ ID NO: 1157591 - RNA, 20 nt, Human
ccuccucuucccccuccucc

SEQ ID NO: 1157592 - RNA, 21 nt, Human
ccuccucuucccccuccuccu

SEQ ID NO: 1157593 - RNA, 20 nt, Human
ccuccuucuccuccccuccu

SEQ ID NO: 1157594 - RNA, 23 nt, Human
ccucuccuccuccuggcaguccc

SEQ ID NO: 1157595 - RNA, 24 nt, Human
ccucuccuccuccuggcaguccca

SEQ ID NO: 1157596 - RNA, 18 nt, Human
ccucuuuccucuuuaucc

SEQ ID NO: 1157597 - RNA, 28 nt, Human
ccugggcuugggggcaaugggggggcuu

SEQ ID NO: 1157598 - RNA, 24 nt, Human
ccuguuucagccucccaaguagcu

SEQ ID NO: 1157599 - RNA, 19 nt, Human
ccuugugucgauguucuuc

SEQ ID NO: 1157600 - RNA, 18 nt, Human
cgaaaggaggugggaugu

SEQ ID NO: 1157601 - RNA, 22 nt, Human
cgacaggugguuuuggcaacgu

SEQ ID NO: 1157602 - RNA, 22 nt, Human
cgccaaagguuugaaacaguga

SEQ ID NO: 1157603 - RNA, 20 nt, Human
cgccccgggagcuccaacuu

SEQ ID NO: 1157604 - RNA, 24 nt, Human
cgccucagcuucccaaagugcugg

SEQ ID NO: 1157605 - RNA, 20 nt, Human
cggccagggcgcggccucgc

SEQ ID NO: 1157606 - RNA, 23 nt, Human
cggccucgccaaggcugaggcgg

SEQ ID NO: 1157607 - RNA, 24 nt, Human
cgggguuucacuauguugaccagg

SEQ ID NO: 1157608 - RNA, 21 nt, Human
cggucucugacucagagcacu

SEQ ID NO: 1157609 - RNA, 20 nt, Human
cuacacagagcagccguccg

SEQ ID NO: 1157610 - RNA, 19 nt, Human
cucacucccaucacauaga

SEQ ID NO: 1157611 - RNA, 24 nt, Human
cucacucuuguugcccaggcugga

SEQ ID NO: 1157612 - RNA, 24 nt, Human
cucacugcaaccuccgccucccag

SEQ ID NO: 1157613 - RNA, 21 nt, Human
cuccagcccaaggccugccau

SEQ ID NO: 1157614 - RNA, 21 nt, Human
cuccaggccacaugccucgcc

SEQ ID NO: 1157615 - RNA, 18 nt, Human
cuccuccuccuccucccc

SEQ ID NO: 1157616 - RNA, 27 nt, Human
cuccuccuccucuucccccuccucccu

SEQ ID NO: 1157617 - RNA, 27 nt, Human
cuccuccuccucuucccccuccucccu

SEQ ID NO: 1157618 - RNA, 23 nt, Human
cuccuccuucuccuccccuccuc

SEQ ID NO: 1157619 - RNA, 26 nt, Human
cuccugaccuucggugaucugcucgc

SEQ ID NO: 1157620 - RNA, 19 nt, Human
cucucgagccuggcugagg

SEQ ID NO: 1157621 - RNA, 21 nt, Human
cucugccuccggaccccggcc

SEQ ID NO: 1157622 - RNA, 18 nt, Human
cucuuguugcccaggcug

SEQ ID NO: 1157623 - RNA, 21 nt, Human
cugacucagagcacuuuggga

SEQ ID NO: 1157624 - RNA, 24 nt, Human
cugcaaccuccgccucccagguuc

SEQ ID NO: 1157625 - RNA, 22 nt, Human
cugcagcuggggcagcaauagc

SEQ ID NO: 1157626 - RNA, 19 nt, Human
cugcccccguccuuggguu

SEQ ID NO: 1157627 - RNA, 19 nt, Human
cuggaagaccaccucucca

SEQ ID NO: 1157628 - RNA, 26 nt, Human
cuggacaccugcucuucugucccugg

SEQ ID NO: 1157629 - RNA, 19 nt, Human
cuggcuuccaggggccucc

SEQ ID NO: 1157630 - RNA, 18 nt, Human
cugguuucuuugggggca

SEQ ID NO: 1157631 - RNA, 19 nt, Human
cuucuccuccccuccuccu

SEQ ID NO: 1157632 - RNA, 18 nt, Human
cuugugguccucuccaug

SEQ ID NO: 1157633 - RNA, 24 nt, Human
cuuguugcccaggcuggagugcaa

SEQ ID NO: 1157634 - RNA, 20 nt, Human
gaaccugccucagaucuggg

SEQ ID NO: 1157635 - RNA, 20 nt, Human
gaagaaggcguggaggugcc

SEQ ID NO: 1157636 - RNA, 24 nt, Human
gacaggugguuuuggcaacgaccc

SEQ ID NO: 1157637 - RNA, 22 nt, Human
gacucagagcacuuugggacgg

SEQ ID NO: 1157638 - RNA, 24 nt, Human
gaggaggucgcucuggaagaccac

SEQ ID NO: 1157639 - RNA, 18 nt, Human
gagugggauaugggcuca

SEQ ID NO: 1157640 - RNA, 18 nt, Human
gaugacaggcaugagcca

SEQ ID NO: 1157641 - RNA, 24 nt, Human
gaugacaggcaugagccaucgugc

SEQ ID NO: 1157642 - RNA, 21 nt, Human
gauuacaggugcacaccacca

SEQ ID NO: 1157643 - RNA, 20 nt, Human
gcaguuucugggacgguuuc

SEQ ID NO: 1157644 - RNA, 19 nt, Human
gcccaggcuggagugcaau

SEQ ID NO: 1157645 - RNA, 18 nt, Human
gccucagaucugguuucu

SEQ ID NO: 1157646 - RNA, 24 nt, Human
gccucagcuucccaaagugcuggg

SEQ ID NO: 1157647 - RNA, 19 nt, Human
gccucgccaaggcugaggc

SEQ ID NO: 1157648 - RNA, 26 nt, Human
gcgcggccucgccaaggcugaggcgg

SEQ ID NO: 1157649 - RNA, 25 nt, Human
gcucccaguacacagagauggaaac

SEQ ID NO: 1157650 - RNA, 20 nt, Human
gcugcaccagcuucucuucc

SEQ ID NO: 1157651 - RNA, 19 nt, Human
gcuggagugcaauggcaca

SEQ ID NO: 1157652 - RNA, 19 nt, Human
gcuucucuuccuccucacu

SEQ ID NO: 1157653 - RNA, 18 nt, Human
ggaaggucggggaauccu

SEQ ID NO: 1157654 - RNA, 21 nt, Human
ggaccccggagccgcgcaugc

SEQ ID NO: 1157655 - RNA, 19 nt, Human
ggacgguuucuggccaccu

SEQ ID NO: 1157656 - RNA, 24 nt, Human
ggaugacaggcaugagccaucgug

SEQ ID NO: 1157657 - RNA, 23 nt, Human
ggccaaggccgagcagcacggga

SEQ ID NO: 1157658 - RNA, 24 nt, Human
ggccuccucgcuggcuuccucagc

SEQ ID NO: 1157659 - RNA, 22 nt, Human
gggaugacaggcaugagccauc

SEQ ID NO: 1157660 - RNA, 21 nt, Human
gggcagcaauagccgccgagu

SEQ ID NO: 1157661 - RNA, 23 nt, Human
gggguuucacuauguugaccagg

SEQ ID NO: 1157662 - RNA, 22 nt, Human
ggguuucacuauguugaccagg

SEQ ID NO: 1157663 - RNA, 22 nt, Human
gucugugccuucuucacccucc

SEQ ID NO: 1157664 - RNA, 23 nt, Human
gugaaggcccugggcuuugcugg

SEQ ID NO: 1157665 - RNA, 24 nt, Human
gugaucugcucgccucagcuuccc

SEQ ID NO: 1157666 - RNA, 19 nt, Human
gugccuucuucacccuccc

SEQ ID NO: 1157667 - RNA, 21 nt, Human
uaaccccgacccuucuggcuc

SEQ ID NO: 1157668 - RNA, 22 nt, Human
uaaccccgacccuucuggcucc

SEQ ID NO: 1157669 - RNA, 23 nt, Human
uaacuggaggguagagccgggga

SEQ ID NO: 1157670 - RNA, 24 nt, Human
uaauuuuuguauuuuuauuagaga

SEQ ID NO: 1157671 - RNA, 21 nt, Human
uagagacgggguuucacuaug

SEQ ID NO: 1157672 - RNA, 22 nt, Human
uagagacgggguuucacuaugu

SEQ ID NO: 1157673 - RNA, 19 nt, Human
uagccgccgaguccuuacc

SEQ ID NO: 1157674 - RNA, 18 nt, Human
uauguugaccaggcugcu

SEQ ID NO: 1157675 - RNA, 24 nt, Human
uauguugaccaggcugcucucgaa

SEQ ID NO: 1157676 - RNA, 24 nt, Human
uauuagagacgggguuucacuaug

SEQ ID NO: 1157677 - RNA, 19 nt, Human
ucacugcaaccuccgccuc

SEQ ID NO: 1157678 - RNA, 23 nt, Human
ucacugcaaccuccgccucccag

SEQ ID NO: 1157679 - RNA, 24 nt, Human
ucacugcaaccuccgccucccagg

SEQ ID NO: 1157680 - RNA, 27 nt, Human
ucacugcaaccuccgccucccagguuc

SEQ ID NO: 1157681 - RNA, 22 nt, Human
ucagcauccucucccauguccu

SEQ ID NO: 1157682 - RNA, 20 nt, Human
ucagccucccaaguagcugg

SEQ ID NO: 1157683 - RNA, 22 nt, Human
ucagccucccaaguagcuggga

SEQ ID NO: 1157684 - RNA, 25 nt, Human
ucaggggccuccucgcuggcuuccu

SEQ ID NO: 1157685 - RNA, 21 nt, Human
ucagucagguggggccccuga

SEQ ID NO: 1157686 - RNA, 19 nt, Human
ucauccacagccuccuccu

SEQ ID NO: 1157687 - RNA, 19 nt, Human
ucauccacgaccuccuccu

SEQ ID NO: 1157688 - RNA, 19 nt, Human
uccauggcuuccuccuccu

SEQ ID NO: 1157689 - RNA, 24 nt, Human
ucccaaagugcugggaugacaggc

SEQ ID NO: 1157690 - RNA, 23 nt, Human
ucccaaguagcugggauuacagg

SEQ ID NO: 1157691 - RNA, 21 nt, Human
ucccagguucaagcaauucuc

SEQ ID NO: 1157692 - RNA, 24 nt, Human
ucccagguucaagcaauucuccug

SEQ ID NO: 1157693 - RNA, 21 nt, Human
ucccccuccuccuacccggga

SEQ ID NO: 1157694 - RNA, 21 nt, Human
ucccgggcgccccgggagcuc

SEQ ID NO: 1157695 - RNA, 22 nt, Human
ucccugaggcggggcgauuugg

SEQ ID NO: 1157696 - RNA, 25 nt, Human
ucccuguguggcugcaccagcuucu

SEQ ID NO: 1157697 - RNA, 23 nt, Human
uccgcagcccucuccuugguccu

SEQ ID NO: 1157698 - RNA, 18 nt, Human
uccuccuucuccuccccu

SEQ ID NO: 1157699 - RNA, 19 nt, Human
uccuggcacagccuuccuc

SEQ ID NO: 1157700 - RNA, 21 nt, Human
ucgcuggcuuccucagcaucc

SEQ ID NO: 1157701 - RNA, 20 nt, Human
ucgcugucgaucaggagaga

SEQ ID NO: 1157702 - RNA, 21 nt, Human
ucuaaccccgacccuucuggc

SEQ ID NO: 1157703 - RNA, 24 nt, Human
ucucacucuuguugcccaggcugg

SEQ ID NO: 1157704 - RNA, 25 nt, Human
ucucacucuuguugcccaggcugga

SEQ ID NO: 1157705 - RNA, 22 nt, Human
ucucaggggccuccucgcuggc

SEQ ID NO: 1157706 - RNA, 21 nt, Human
ucuccaggccacaugccucgc

SEQ ID NO: 1157707 - RNA, 19 nt, Human
ucucuuccuccucacuucu

SEQ ID NO: 1157708 - RNA, 18 nt, Human
ucugagccauaaccaccc

SEQ ID NO: 1157709 - RNA, 26 nt, Human
ucugcagaggccucgggagacaccag

SEQ ID NO: 1157710 - RNA, 21 nt, Human
ucugcggcaccuccgaugccg

SEQ ID NO: 1157711 - RNA, 22 nt, Human
ucuuguugcccaggcuggagug

SEQ ID NO: 1157712 - RNA, 24 nt, Human
ugaaggcccugggcuuugcuggcc

SEQ ID NO: 1157713 - RNA, 24 nt, Human
ugaccaggcugcucucgaacuccu

SEQ ID NO: 1157714 - RNA, 18 nt, Human
ugagaagggagcgaggcc

SEQ ID NO: 1157715 - RNA, 19 nt, Human
ugagagugggauaugggcu

SEQ ID NO: 1157716 - RNA, 21 nt, Human
ugaggacgauguaauccucgu

SEQ ID NO: 1157717 - RNA, 19 nt, Human
ugauguguguuucugcugg

SEQ ID NO: 1157718 - RNA, 18 nt, Human
ugcaccagcuucucuucc

SEQ ID NO: 1157719 - RNA, 18 nt, Human
ugcagccugcccuccuuc

SEQ ID NO: 1157720 - RNA, 18 nt, Human
ugcccaggcuggagugca

SEQ ID NO: 1157721 - RNA, 21 nt, Human
ugcccaggcuggagugcaaug

SEQ ID NO: 1157722 - RNA, 24 nt, Human
ugcccaggcuggagugcaauggca

SEQ ID NO: 1157723 - RNA, 21 nt, Human
ugcccucuccuucacaguuca

SEQ ID NO: 1157724 - RNA, 23 nt, Human
ugccuccggaccccggccaguuc

SEQ ID NO: 1157725 - RNA, 18 nt, Human
ugccucgccucccuccuc

SEQ ID NO: 1157726 - RNA, 24 nt, Human
ugccuucuucacccucccugcuca

SEQ ID NO: 1157727 - RNA, 20 nt, Human
uggaagaaggcguggaggug

SEQ ID NO: 1157728 - RNA, 21 nt, Human
uggaaggugguuucucuggga

SEQ ID NO: 1157729 - RNA, 22 nt, Human
uggaaggugguuucucugggag

SEQ ID NO: 1157730 - RNA, 21 nt, Human
uggaaucugcaugcuucagga

SEQ ID NO: 1157731 - RNA, 23 nt, Human
uggagugcaauggcacaaucucg

SEQ ID NO: 1157732 - RNA, 24 nt, Human
uggagugcaauggcacaaucucgg

SEQ ID NO: 1157733 - RNA, 24 nt, Human
uggcaaggcccugcuggcuuccag

SEQ ID NO: 1157734 - RNA, 24 nt, Human
uggcacaaucucggcucacugcaa

SEQ ID NO: 1157735 - RNA, 19 nt, Human
uggcuuccaggggccuccc

SEQ ID NO: 1157736 - RNA, 20 nt, Human
ugggagaaacucccagacac

SEQ ID NO: 1157737 - RNA, 21 nt, Human
ugggaugacaggcaugagcca

SEQ ID NO: 1157738 - RNA, 22 nt, Human
ugggaugacaggcaugagccau

SEQ ID NO: 1157739 - RNA, 24 nt, Human
ugggaugacaggcaugagccaucg

SEQ ID NO: 1157740 - RNA, 21 nt, Human
ugggauuacaggugcacacca

SEQ ID NO: 1157741 - RNA, 22 nt, Human
ugggauuacaggugcacaccac

SEQ ID NO: 1157742 - RNA, 22 nt, Human
ugggauuacaggugcacaccac

SEQ ID NO: 1157743 - RNA, 24 nt, Human
ugggauuacaggugcacaccacca

SEQ ID NO: 1157744 - RNA, 18 nt, Human
ugucaggauccgaacccu

SEQ ID NO: 1157745 - RNA, 24 nt, Human
ugucccuggcucauccgcagcccu

SEQ ID NO: 1157746 - RNA, 20 nt, Human
uguugcccaggcuggagugc

SEQ ID NO: 1157747 - RNA, 18 nt, Human
uuagagacgggguuucac

SEQ ID NO: 1157748 - RNA, 24 nt, Human
uuauuagagacgggguuucacuau

SEQ ID NO: 1157749 - RNA, 21 nt, Human
uucacgaaugacacgccaaag

SEQ ID NO: 1157750 - RNA, 18 nt, Human
uugcccaggcuggagugc

SEQ ID NO: 1157751 - RNA, 18 nt, Human
uugggagcgacagguggu

SEQ ID NO: 1157752 - RNA, 21 nt, Human
uuucacuauguugaccaggcu

SEQ ID NO: 1157753 - RNA, 24 nt, Human
uuuuuauuagagacgggguuucac

SEQ ID NO: 1157754 - RNA, 20 nt, Human
uuuuuguauuuuuauuagag

SEQ ID NO: 1157755 - RNA, 23 nt, Human
uuuuuguauuuuuauuagagacg

SEQ ID NO: 1157756 - RNA, 21 nt, Human
aaagggggcugugcaaacccu

SEQ ID NO: 1157757 - RNA, 23 nt, Human
aaagggggcugugcaaacccuag

SEQ ID NO: 1157758 - RNA, 21 nt, Human
aacccaguguuuccauuucag

SEQ ID NO: 1157759 - RNA, 23 nt, Human
aagaggagccuuccccaggccug

SEQ ID NO: 1157760 - RNA, 23 nt, Human
aagcaagaagcaggcuggggcaa

SEQ ID NO: 1157761 - RNA, 24 nt, Human
aaucccgcuacucagcaucuccac

SEQ ID NO: 1157762 - RNA, 25 nt, Human
aaucccgcuacucagcaucuccacc

SEQ ID NO: 1157763 - RNA, 19 nt, Human
acaaagagcaggaacggga

SEQ ID NO: 1157764 - RNA, 20 nt, Human
acccugcuuccucugcccug

SEQ ID NO: 1157765 - RNA, 22 nt, Human
acugaaucucccuccacccagu

SEQ ID NO: 1157766 - RNA, 20 nt, Human
acugugacucuggggaaggc

SEQ ID NO: 1157767 - RNA, 18 nt, Human
acuuggcaagccucaugg

SEQ ID NO: 1157768 - RNA, 19 nt, Human
agagcaggaacgggaagca

SEQ ID NO: 1157769 - RNA, 21 nt, Human
agagcaggaacgggaagcaag

SEQ ID NO: 1157770 - RNA, 19 nt, Human
agaggccacccaguagagc

SEQ ID NO: 1157771 - RNA, 22 nt, Human
agcaagaagcaggcuggggcaa

SEQ ID NO: 1157772 - RNA, 21 nt, Human
agcagggaccuugccuccccc

SEQ ID NO: 1157773 - RNA, 18 nt, Human
agcuccccaccaagggcc

SEQ ID NO: 1157774 - RNA, 20 nt, Human
aggaccaaagucuggacugg

SEQ ID NO: 1157775 - RNA, 19 nt, Human
agggauggagggggugaug

SEQ ID NO: 1157776 - RNA, 22 nt, Human
agggggagcagaaagaauuggg

SEQ ID NO: 1157777 - RNA, 24 nt, Human
auacugaaucucccuccacccagu

SEQ ID NO: 1157778 - RNA, 20 nt, Human
augaccccacccacagcaaa

SEQ ID NO: 1157779 - RNA, 23 nt, Human
augcuuguacacuuaugggguac

SEQ ID NO: 1157780 - RNA, 20 nt, Human
caaccccagagagagggucc

SEQ ID NO: 1157781 - RNA, 19 nt, Human
caagagagaucggguagca

SEQ ID NO: 1157782 - RNA, 22 nt, Human
cacugcagucuucucuccaucu

SEQ ID NO: 1157783 - RNA, 22 nt, Human
cacuucccccuuccuccccacu

SEQ ID NO: 1157784 - RNA, 21 nt, Human
cagagucugugccuccaacuu

SEQ ID NO: 1157785 - RNA, 22 nt, Human
cagccacuucccaguucucugc

SEQ ID NO: 1157786 - RNA, 18 nt, Human
cagcgcuuuuccccugcc

SEQ ID NO: 1157787 - RNA, 19 nt, Human
cagcuugcugcucuccuga

SEQ ID NO: 1157788 - RNA, 24 nt, Human
caggaacgggaagcaagaagcagg

SEQ ID NO: 1157789 - RNA, 19 nt, Human
caggucccgucugccugug

SEQ ID NO: 1157790 - RNA, 23 nt, Human
cagugagaugggauucaagcccg

SEQ ID NO: 1157791 - RNA, 18 nt, Human
cauggguucacagcuacc

SEQ ID NO: 1157792 - RNA, 22 nt, Human
cauuggaagugcagcccugggu

SEQ ID NO: 1157793 - RNA, 19 nt, Human
ccaacagcuguggggagga

SEQ ID NO: 1157794 - RNA, 22 nt, Human
ccacacauugcgcauggccucu

SEQ ID NO: 1157795 - RNA, 21 nt, Human
ccagcggccccuucagguccc

SEQ ID NO: 1157796 - RNA, 24 nt, Human
cccaugcugccacgugcccagcaa

SEQ ID NO: 1157797 - RNA, 19 nt, Human
cccccaggugucaauacug

SEQ ID NO: 1157798 - RNA, 18 nt, Human
ccccccucagaggccuga

SEQ ID NO: 1157799 - RNA, 24 nt, Human
cccccuuccuccccacuccgcuca

SEQ ID NO: 1157800 - RNA, 18 nt, Human
cccccuucucagguucug

SEQ ID NO: 1157801 - RNA, 18 nt, Human
ccccuuccuccccacucc

SEQ ID NO: 1157802 - RNA, 18 nt, Human
cccgaaggccugggaacc

SEQ ID NO: 1157803 - RNA, 28 nt, Human
cccugcucuauuuuaucuuuuuuaauaa

SEQ ID NO: 1157804 - RNA, 22 nt, Human
cccuggguccgagaggccaccc

SEQ ID NO: 1157805 - RNA, 21 nt, Human
ccgcacccgcccagccacuuc

SEQ ID NO: 1157806 - RNA, 18 nt, Human
ccucccugcacagaaagg

SEQ ID NO: 1157807 - RNA, 19 nt, Human
ccucuccacacucacacug

SEQ ID NO: 1157808 - RNA, 19 nt, Human
ccucugggagugccagccc

SEQ ID NO: 1157809 - RNA, 23 nt, Human
ccucuugucuccccagugugcca

SEQ ID NO: 1157810 - RNA, 20 nt, Human
ccugacaguggaugccaaca

SEQ ID NO: 1157811 - RNA, 23 nt, Human
ccugcagcgcuuuuccccugccc

SEQ ID NO: 1157812 - RNA, 21 nt, Human
cucacugcagucuucucucca

SEQ ID NO: 1157813 - RNA, 21 nt, Human
cucacugcagucuucucucca

SEQ ID NO: 1157814 - RNA, 24 nt, Human
cucacugcagucuucucuccaucu

SEQ ID NO: 1157815 - RNA, 21 nt, Human
cuccacccagugccaguuugc

SEQ ID NO: 1157816 - RNA, 20 nt, Human
cuccaucuuuccaagguaga

SEQ ID NO: 1157817 - RNA, 20 nt, Human
cuccuggcugucuagugugg

SEQ ID NO: 1157818 - RNA, 21 nt, Human
cucugcugcuuugcgcccucc

SEQ ID NO: 1157819 - RNA, 21 nt, Human
cucuuuucuccugucuguacc

SEQ ID NO: 1157820 - RNA, 19 nt, Human
cugaaaaaguugaccccau

SEQ ID NO: 1157821 - RNA, 24 nt, Human
cugcaccgcacccgcccagccacu

SEQ ID NO: 1157822 - RNA, 24 nt, Human
cugcagucuucucuccaucuuucc

SEQ ID NO: 1157823 - RNA, 22 nt, Human
cugcugcuuugcgcccucccug

SEQ ID NO: 1157824 - RNA, 20 nt, Human
cuggagagugacagagggag

SEQ ID NO: 1157825 - RNA, 21 nt, Human
gacacugaggugcaagagaga

SEQ ID NO: 1157826 - RNA, 23 nt, Human
gacacugaggugcaagagagauc

SEQ ID NO: 1157827 - RNA, 19 nt, Human
gaccuugccucccccacag

SEQ ID NO: 1157828 - RNA, 23 nt, Human
gaccuugccucccccacagccac

SEQ ID NO: 1157829 - RNA, 18 nt, Human
gagccugcagcgcuuuuc

SEQ ID NO: 1157830 - RNA, 23 nt, Human
gagcuccccaccaagggccccuc

SEQ ID NO: 1157831 - RNA, 23 nt, Human
gaggagccuuccccaggccuggc

SEQ ID NO: 1157832 - RNA, 19 nt, Human
gaggcagguguccuggggg

SEQ ID NO: 1157833 - RNA, 19 nt, Human
gagggaaugggggguuguc

SEQ ID NO: 1157834 - RNA, 21 nt, Human
gagggucccuguggguccugu

SEQ ID NO: 1157835 - RNA, 25 nt, Human
gagugacagagggagggaauggggg

SEQ ID NO: 1157836 - RNA, 21 nt, Human
gccccgagggauggagggggu

SEQ ID NO: 1157837 - RNA, 24 nt, Human
gccuacugugacucuggggaaggc

SEQ ID NO: 1157838 - RNA, 22 nt, Human
gccucuccacacucacacugcc

SEQ ID NO: 1157839 - RNA, 21 nt, Human
gcucugagugggugcagggca

SEQ ID NO: 1157840 - RNA, 25 nt, Human
gcucugagugggugcagggcagagu

SEQ ID NO: 1157841 - RNA, 19 nt, Human
gcugaggcucugagugggu

SEQ ID NO: 1157842 - RNA, 26 nt, Human
ggaaaucccgcuacucagcaucucca

SEQ ID NO: 1157843 - RNA, 18 nt, Human
ggaacagauggcaaagau

SEQ ID NO: 1157844 - RNA, 19 nt, Human
ggcaagacacagcagcagc

SEQ ID NO: 1157845 - RNA, 24 nt, Human
ggcaagacacagcagcagccccga

SEQ ID NO: 1157846 - RNA, 23 nt, Human
ggcagacucccuagagacagccc

SEQ ID NO: 1157847 - RNA, 18 nt, Human
ggcccagggcaccaucuc

SEQ ID NO: 1157848 - RNA, 22 nt, Human
ggcgaugguagcgguggcagcc

SEQ ID NO: 1157849 - RNA, 19 nt, Human
gggaagcaagaagcaggcu

SEQ ID NO: 1157850 - RNA, 21 nt, Human
gggaagcucaaacucuaccaa

SEQ ID NO: 1157851 - RNA, 21 nt, Human
gggaccuugccucccccacag

SEQ ID NO: 1157852 - RNA, 21 nt, Human
gggguugagggucccccaggu

SEQ ID NO: 1157853 - RNA, 21 nt, Human
ggguugagggucccccaggug

SEQ ID NO: 1157854 - RNA, 19 nt, Human
ggguuuccuucgcaaacuc

SEQ ID NO: 1157855 - RNA, 19 nt, Human
gguaaggagaaggcaaaga

SEQ ID NO: 1157856 - RNA, 19 nt, Human
ggugaugggaaugggggcu

SEQ ID NO: 1157857 - RNA, 20 nt, Human
ggugaugggaaugggggcuu

SEQ ID NO: 1157858 - RNA, 20 nt, Human
gguugagggucccccaggug

SEQ ID NO: 1157859 - RNA, 20 nt, Human
guguccccucugggagugcc

SEQ ID NO: 1157860 - RNA, 24 nt, Human
guguuguggagccucuugucuccc

SEQ ID NO: 1157861 - RNA, 23 nt, Human
uaaaggaccaaagucuggacugg

SEQ ID NO: 1157862 - RNA, 18 nt, Human
uaaggcuauggcuucugg

SEQ ID NO: 1157863 - RNA, 21 nt, Human
uauccuggaguucaaccaguc

SEQ ID NO: 1157864 - RNA, 24 nt, Human
uaucuuuuuuaauaaagauggcuc

SEQ ID NO: 1157865 - RNA, 18 nt, Human
uauuaugucuuuauuagu

SEQ ID NO: 1157866 - RNA, 27 nt, Human
ucaauacugaaucucccuccacccagu

SEQ ID NO: 1157867 - RNA, 20 nt, Human
ucagagagaccaauuccaca

SEQ ID NO: 1157868 - RNA, 25 nt, Human
ucagagagaccaauuccacaugaug

SEQ ID NO: 1157869 - RNA, 18 nt, Human
ucagagugacgggggugg

SEQ ID NO: 1157870 - RNA, 24 nt, Human
uccacaugauguccuggaaguugg

SEQ ID NO: 1157871 - RNA, 18 nt, Human
ucccacacauugcgcaug

SEQ ID NO: 1157872 - RNA, 23 nt, Human
ucccaggcugcaccgcacccgcc

SEQ ID NO: 1157873 - RNA, 21 nt, Human
ucccaguucucugcuuugucc

SEQ ID NO: 1157874 - RNA, 21 nt, Human
uccccaaagugccuuaggggg

SEQ ID NO: 1157875 - RNA, 24 nt, Human
uccccaaagugccuuagggggcca

SEQ ID NO: 1157876 - RNA, 20 nt, Human
ucccgaaggccugggaacca

SEQ ID NO: 1157877 - RNA, 21 nt, Human
uccucugcccugccacuuccc

SEQ ID NO: 1157878 - RNA, 22 nt, Human
uccugcuuuacaccugucacuc

SEQ ID NO: 1157879 - RNA, 22 nt, Human
uccugggggucuggggaggguu

SEQ ID NO: 1157880 - RNA, 20 nt, Human
ucucagguucugaaaucauc

SEQ ID NO: 1157881 - RNA, 20 nt, Human
ucuccacacucacacugccu

SEQ ID NO: 1157882 - RNA, 24 nt, Human
ucuccacacucacacugccuggug

SEQ ID NO: 1157883 - RNA, 24 nt, Human
ucucgcauccaguaggcccucagu

SEQ ID NO: 1157884 - RNA, 19 nt, Human
ucuuuuuuaauaaagaugg

SEQ ID NO: 1157885 - RNA, 19 nt, Human
ugaaucucccuccacccag

SEQ ID NO: 1157886 - RNA, 20 nt, Human
ugacagagggagggaauggg

SEQ ID NO: 1157887 - RNA, 20 nt, Human
ugacagagggagggaauggg

SEQ ID NO: 1157888 - RNA, 21 nt, Human
ugacagagggagggaaugggg

SEQ ID NO: 1157889 - RNA, 24 nt, Human
ugacagagggagggaauggggggu

SEQ ID NO: 1157890 - RNA, 19 nt, Human
ugacccugcccacuacuga

SEQ ID NO: 1157891 - RNA, 23 nt, Human
ugaccucuuggacuuuauuuccc

SEQ ID NO: 1157892 - RNA, 20 nt, Human
ugagaagggcagacucccua

SEQ ID NO: 1157893 - RNA, 18 nt, Human
ugagaugggauucaagcc

SEQ ID NO: 1157894 - RNA, 18 nt, Human
ugagaugggauucaagcc

SEQ ID NO: 1157895 - RNA, 20 nt, Human
ugaggcagguguccuggggg

SEQ ID NO: 1157896 - RNA, 21 nt, Human
ugauaaaugaccguuuccugc

SEQ ID NO: 1157897 - RNA, 26 nt, Human
ugauggcaagacacagcagcagcccc

SEQ ID NO: 1157898 - RNA, 23 nt, Human
ugcaaaacaccugagagagucca

SEQ ID NO: 1157899 - RNA, 23 nt, Human
ugccagcccugugagaagaggag

SEQ ID NO: 1157900 - RNA, 20 nt, Human
ugcccagcaacguuggagcc

SEQ ID NO: 1157901 - RNA, 21 nt, Human
ugccccaacuaaggcuauggc

SEQ ID NO: 1157902 - RNA, 19 nt, Human
ugccgugccguguccccuc

SEQ ID NO: 1157903 - RNA, 21 nt, Human
ugccuuagggggccacuuguu

SEQ ID NO: 1157904 - RNA, 19 nt, Human
ugcugcucuccugaugccc

SEQ ID NO: 1157905 - RNA, 20 nt, Human
ugcugcucuccugaugcccc

SEQ ID NO: 1157906 - RNA, 22 nt, Human
ugcuggggucagagugacgggg

SEQ ID NO: 1157907 - RNA, 18 nt, Human
ugcuuugucccccuucuc

SEQ ID NO: 1157908 - RNA, 19 nt, Human
uggacuggaggaagagcuu

SEQ ID NO: 1157909 - RNA, 21 nt, Human
uggaggaagagcuuuugacau

SEQ ID NO: 1157910 - RNA, 19 nt, Human
uggaugccaacagcugugg

SEQ ID NO: 1157911 - RNA, 19 nt, Human
uggcagccaccuggcccag

SEQ ID NO: 1157912 - RNA, 24 nt, Human
uggcaggugggucacagacacucu

SEQ ID NO: 1157913 - RNA, 23 nt, Human
uggcuucuggugccugcugaccu

SEQ ID NO: 1157914 - RNA, 21 nt, Human
ugggaaccaguugugcugggg

SEQ ID NO: 1157915 - RNA, 20 nt, Human
uggggacccgcaggggcagg

SEQ ID NO: 1157916 - RNA, 20 nt, Human
ugggggucuggggaggguug

SEQ ID NO: 1157917 - RNA, 21 nt, Human
ugggguacaaugugaggauuc

SEQ ID NO: 1157918 - RNA, 21 nt, Human
uggggugucauagugacagug

SEQ ID NO: 1157919 - RNA, 23 nt, Human
ugguagcgguggcagccaccugg

SEQ ID NO: 1157920 - RNA, 19 nt, Human
uggugagacgcccaugcug

SEQ ID NO: 1157921 - RNA, 24 nt, Human
uggugccugcugaccucuuggacu

SEQ ID NO: 1157922 - RNA, 25 nt, Human
ugugcuggggucagagugacggggg

SEQ ID NO: 1157923 - RNA, 26 nt, Human
uguggaaucagugagaugggauucaa

SEQ ID NO: 1157924 - RNA, 24 nt, Human
ugugguccccaaagugccuuaggg

SEQ ID NO: 1157925 - RNA, 25 nt, Human
ugugucugcagagcauucucgucga

SEQ ID NO: 1157926 - RNA, 18 nt, Human
ugugugcaccguggaaug

SEQ ID NO: 1157927 - RNA, 21 nt, Human
uguguuaaucaugcugagagg

SEQ ID NO: 1157928 - RNA, 21 nt, Human
uucauggguuccuaaggggcc

SEQ ID NO: 1157929 - RNA, 22 nt, Human
uucccaggaggaucccgaaggc

SEQ ID NO: 1157930 - RNA, 18 nt, Human
uuccucauccaaucuugg

SEQ ID NO: 1157931 - RNA, 21 nt, Human
uuccucugcccugccacuucc

SEQ ID NO: 1157932 - RNA, 22 nt, Human
uucgauagaugugugcaccgug

SEQ ID NO: 1157933 - RNA, 23 nt, Human
uucgcaaacucaaaucagacugc

SEQ ID NO: 1157934 - RNA, 26 nt, Human
uucuccugucuguacccugcuuccuc

SEQ ID NO: 1157935 - RNA, 23 nt, Human
uugaaaccugacaguggaugcca

SEQ ID NO: 1157936 - RNA, 22 nt, Human
uugcgcauggccucuccacacu

SEQ ID NO: 1157937 - RNA, 20 nt, Human
uugcugcucuccugaugccc

SEQ ID NO: 1157938 - RNA, 19 nt, Human
uuguaguagcauuggaaaa

SEQ ID NO: 1157939 - RNA, 23 nt, Human
uuuucagaaggaccagcggcccc

SEQ ID NO: 1157940 - RNA, 21 nt, Human
aaaaaacaaacaaacagacaa

SEQ ID NO: 1157941 - RNA, 23 nt, Human
aaacagacaaacacauauucuca

SEQ ID NO: 1157942 - RNA, 24 nt, Human
aaacagacaaacacauauucucag

SEQ ID NO: 1157943 - RNA, 25 nt, Human
aaacagacaaacacauauucucaga

SEQ ID NO: 1157944 - RNA, 20 nt, Human
aaacagacaaaccggacccc

SEQ ID NO: 1157945 - RNA, 24 nt, Human
aaacaggacaagugcauuuuccaa

SEQ ID NO: 1157946 - RNA, 20 nt, Human
aacaacacauauucucggcc

SEQ ID NO: 1157947 - RNA, 24 nt, Human
aacagcccagggaugaagaacaag

SEQ ID NO: 1157948 - RNA, 23 nt, Human
aacauccuggggaggcuccaggc

SEQ ID NO: 1157949 - RNA, 21 nt, Human
aauauggugaaacccugucuc

SEQ ID NO: 1157950 - RNA, 24 nt, Human
aaucacuugaaccugagaggcaga

SEQ ID NO: 1157951 - RNA, 18 nt, Human
acaaacaaacagacaaac

SEQ ID NO: 1157952 - RNA, 24 nt, Human
acaaagugagacucugucucaaaa

SEQ ID NO: 1157953 - RNA, 23 nt, Human
acacuuugauaggccaaggcggg

SEQ ID NO: 1157954 - RNA, 24 nt, Human
acccugucucuacuaaaaacacaa

SEQ ID NO: 1157955 - RNA, 18 nt, Human
acucaggaggcugaggca

SEQ ID NO: 1157956 - RNA, 30 nt, Human
acucugucucaaaaaacaaacaaacagacc

SEQ ID NO: 1157957 - RNA, 18 nt, Human
acugcacuccagccuggg

SEQ ID NO: 1157958 - RNA, 23 nt, Human
acugcacuccagccugggugaca

SEQ ID NO: 1157959 - RNA, 21 nt, Human
agaaucacuugaaccugagag

SEQ ID NO: 1157960 - RNA, 18 nt, Human
agagcuugcagugagcug

SEQ ID NO: 1157961 - RNA, 24 nt, Human
agagcuugcagugagcugagaucg

SEQ ID NO: 1157962 - RNA, 23 nt, Human
agccaggcauaguggcaggugcc

SEQ ID NO: 1157963 - RNA, 22 nt, Human
agccuggccaauauggugaaac

SEQ ID NO: 1157964 - RNA, 24 nt, Human
agccuggccaauauggugaaaccc

SEQ ID NO: 1157965 - RNA, 25 nt, Human
agccuggccaauauggugaaacccu

SEQ ID NO: 1157966 - RNA, 24 nt, Human
agccugggugacaaagugagacuc

SEQ ID NO: 1157967 - RNA, 23 nt, Human
aggaggcugaggcaggagaauca

SEQ ID NO: 1157968 - RNA, 20 nt, Human
aggcagagcuugcagugagc

SEQ ID NO: 1157969 - RNA, 24 nt, Human
aggcagagcuugcagugagcugag

SEQ ID NO: 1157970 - RNA, 22 nt, Human
aggcaggagaaucacuugaacc

SEQ ID NO: 1157971 - RNA, 24 nt, Human
aggcaggagaaucacuugaaccug

SEQ ID NO: 1157972 - RNA, 23 nt, Human
aggccaaggcgggcagaucacga

SEQ ID NO: 1157973 - RNA, 20 nt, Human
aggccucagaggaggaguca

SEQ ID NO: 1157974 - RNA, 25 nt, Human
aggcgggcagaucacgaggucagua

SEQ ID NO: 1157975 - RNA, 24 nt, Human
aggcugaggcaggagaaucacuug

SEQ ID NO: 1157976 - RNA, 24 nt, Human
aucgugccacugcacuccagccug

SEQ ID NO: 1157977 - RNA, 20 nt, Human
auggugaaacccugucucua

SEQ ID NO: 1157978 - RNA, 26 nt, Human
auuuuugugucucuaaaagcugaggg

SEQ ID NO: 1157979 - RNA, 25 nt, Human
caaacagacaaacacauauucucag

SEQ ID NO: 1157980 - RNA, 23 nt, Human
caaagaaacugaggucccaaaaa

SEQ ID NO: 1157981 - RNA, 24 nt, Human
caacacuuugauaggccaaggcgg

SEQ ID NO: 1157982 - RNA, 19 nt, Human
caacaugacuuuucagaua

SEQ ID NO: 1157983 - RNA, 24 nt, Human
caagccuguaaucccaacacuuug

SEQ ID NO: 1157984 - RNA, 24 nt, Human
caaggcgggcagaucacgagguca

SEQ ID NO: 1157985 - RNA, 22 nt, Human
cacuccagccugggugacaaag

SEQ ID NO: 1157986 - RNA, 23 nt, Human
cacuccagccugggugacaaagu

SEQ ID NO: 1157987 - RNA, 24 nt, Human
cacuccagccugggugacaaagug

SEQ ID NO: 1157988 - RNA, 19 nt, Human
cacugcacuccagccuggg

SEQ ID NO: 1157989 - RNA, 19 nt, Human
cacugcacuccagccuggg

SEQ ID NO: 1157990 - RNA, 22 nt, Human
cacugcacuccagccuggguga

SEQ ID NO: 1157991 - RNA, 23 nt, Human
cacugcacuccagccugggugac

SEQ ID NO: 1157992 - RNA, 24 nt, Human
cacugcacuccagccugggugaca

SEQ ID NO: 1157993 - RNA, 25 nt, Human
cacugcacuccagccugggugacaa

SEQ ID NO: 1157994 - RNA, 23 nt, Human
cacuuuuuccucuuuguagagca

SEQ ID NO: 1157995 - RNA, 23 nt, Human
cagacaaacacauauucucagaa

SEQ ID NO: 1157996 - RNA, 22 nt, Human
cagugaaaugaaguuucccucc

SEQ ID NO: 1157997 - RNA, 18 nt, Human
caguggaaagccugcaga

SEQ ID NO: 1157998 - RNA, 19 nt, Human
caucaggggccaaagagcu

SEQ ID NO: 1157999 - RNA, 18 nt, Human
ccacugcacuccagccug

SEQ ID NO: 1158000 - RNA, 20 nt, Human
ccacugcacuccagccuggg

SEQ ID NO: 1158001 - RNA, 20 nt, Human
ccacugcacuccagccuggg

SEQ ID NO: 1158002 - RNA, 20 nt, Human
ccacugcacuccagccuggg

SEQ ID NO: 1158003 - RNA, 20 nt, Human
ccacugcacuccagccuggg

SEQ ID NO: 1158004 - RNA, 21 nt, Human
ccacugcacuccagccugggu

SEQ ID NO: 1158005 - RNA, 23 nt, Human
ccacugcacuccagccuggguga

SEQ ID NO: 1158006 - RNA, 24 nt, Human
ccacugcacuccagccugggugac

SEQ ID NO: 1158007 - RNA, 25 nt, Human
cccacgaugacccgcagccuuccuu

SEQ ID NO: 1158008 - RNA, 19 nt, Human
cccagaaaggaagagacuu

SEQ ID NO: 1158009 - RNA, 26 nt, Human
cccgcagccuuccuuccccauucucu

SEQ ID NO: 1158010 - RNA, 21 nt, Human
ccuacagucccaucuacucag

SEQ ID NO: 1158011 - RNA, 22 nt, Human
ccuggccaauauggugaaaccc

SEQ ID NO: 1158012 - RNA, 24 nt, Human
ccuggccaauauggugaaacccug

SEQ ID NO: 1158013 - RNA, 22 nt, Human
ccugggugacaaagugagacuc

SEQ ID NO: 1158014 - RNA, 18 nt, Human
ccuuccuuccccauucuc

SEQ ID NO: 1158015 - RNA, 24 nt, Human
cgagaccagccuggccaauauggu

SEQ ID NO: 1158016 - RNA, 22 nt, Human
cgaggucaguaguucgagacca

SEQ ID NO: 1158017 - RNA, 19 nt, Human
cucaaaaaacaaacaaaca

SEQ ID NO: 1158018 - RNA, 24 nt, Human
cucaagccuguaaucccaacacuu

SEQ ID NO: 1158019 - RNA, 25 nt, Human
cucagaauaaaagcuccauuaaaaa

SEQ ID NO: 1158020 - RNA, 21 nt, Human
cuccaggccaacacaggccuc

SEQ ID NO: 1158021 - RNA, 22 nt, Human
cucccaacagcccagggaugaa

SEQ ID NO: 1158022 - RNA, 22 nt, Human
cucugucucaaaaaacaaacaa

SEQ ID NO: 1158023 - RNA, 23 nt, Human
cugagggccuuucucucccaacu

SEQ ID NO: 1158024 - RNA, 24 nt, Human
cuggccaauauggugaaacccugu

SEQ ID NO: 1158025 - RNA, 19 nt, Human
cugggcccgugugcagggu

SEQ ID NO: 1158026 - RNA, 24 nt, Human
cuugcagugagcugagaucgugcc

SEQ ID NO: 1158027 - RNA, 19 nt, Human
gaaacccugucucuacuaa

SEQ ID NO: 1158028 - RNA, 24 nt, Human
gacaaagugagacucugucucaaa

SEQ ID NO: 1158029 - RNA, 22 nt, Human
gacuaacaaagcccagaaagga

SEQ ID NO: 1158030 - RNA, 24 nt, Human
gagaggcagagcuugcagugagcu

SEQ ID NO: 1158031 - RNA, 23 nt, Human
gagaucgugccacugcacuccag

SEQ ID NO: 1158032 - RNA, 19 nt, Human
gcagaauauucuccaucag

SEQ ID NO: 1158033 - RNA, 19 nt, Human
gcagcagaaucagacauga

SEQ ID NO: 1158034 - RNA, 22 nt, Human
gcaggagaaucacuugaaccug

SEQ ID NO: 1158035 - RNA, 22 nt, Human
gcaguggaaagccugcagagcu

SEQ ID NO: 1158036 - RNA, 20 nt, Human
gcauuuguagaaccugaggc

SEQ ID NO: 1158037 - RNA, 24 nt, Human
gccaauauggugaaacccugucuc

SEQ ID NO: 1158038 - RNA, 19 nt, Human
gccacugcacuccagccug

SEQ ID NO: 1158039 - RNA, 24 nt, Human
gccacugcacuccagccuggguga

SEQ ID NO: 1158040 - RNA, 19 nt, Human
gccucccuucccacgauga

SEQ ID NO: 1158041 - RNA, 22 nt, Human
gcucugacuaacaaagcccaga

SEQ ID NO: 1158042 - RNA, 20 nt, Human
gcugagaucgugccacugca

SEQ ID NO: 1158043 - RNA, 23 nt, Human
ggcagaucacgaggucaguaguu

SEQ ID NO: 1158044 - RNA, 25 nt, Human
gggaggcuccaggccaacacaggcc

SEQ ID NO: 1158045 - RNA, 19 nt, Human
ggggagaagugggguggca

SEQ ID NO: 1158046 - RNA, 24 nt, Human
gggugcgguggcucaagccuguaa

SEQ ID NO: 1158047 - RNA, 23 nt, Human
gguggcucaagccuguaauccca

SEQ ID NO: 1158048 - RNA, 24 nt, Human
gugacaaagugagacucugucuca

SEQ ID NO: 1158049 - RNA, 21 nt, Human
uaaaaacacaaaaauuagcca

SEQ ID NO: 1158050 - RNA, 23 nt, Human
uaaaaagaaauuacuauagauua

SEQ ID NO: 1158051 - RNA, 22 nt, Human
uaaagguaccaggcagugacug

SEQ ID NO: 1158052 - RNA, 20 nt, Human
uaacaaagcccagaaaggaa

SEQ ID NO: 1158053 - RNA, 20 nt, Human
uacaaaacaggacaagugca

SEQ ID NO: 1158054 - RNA, 21 nt, Human
uacaaagaaacugagguccca

SEQ ID NO: 1158055 - RNA, 19 nt, Human
uacaggcaguggaaagccu

SEQ ID NO: 1158056 - RNA, 19 nt, Human
uaggauauuucucccagug

SEQ ID NO: 1158057 - RNA, 18 nt, Human
ucacgaggucaguaguuc

SEQ ID NO: 1158058 - RNA, 24 nt, Human
ucacgaggucaguaguucgagacc

SEQ ID NO: 1158059 - RNA, 21 nt, Human
uccaagugcuucuauagccac

SEQ ID NO: 1158060 - RNA, 23 nt, Human
uccagccugggugacaaagugag

SEQ ID NO: 1158061 - RNA, 24 nt, Human
uccagccugggugacaaagugaga

SEQ ID NO: 1158062 - RNA, 23 nt, Human
ucccaaaaauuaaaugauugacu

SEQ ID NO: 1158063 - RNA, 19 nt, Human
uccccauucucugugggga

SEQ ID NO: 1158064 - RNA, 21 nt, Human
uccccugcucugacuaacaaa

SEQ ID NO: 1158065 - RNA, 25 nt, Human
ucggccgggugcgguggcucaagcc

SEQ ID NO: 1158066 - RNA, 23 nt, Human
ucucaaaaaacaaacaaacagac

SEQ ID NO: 1158067 - RNA, 21 nt, Human
ucucuacuaaaaacacaaaaa

SEQ ID NO: 1158068 - RNA, 20 nt, Human
ucugccucagaccuuuuucu

SEQ ID NO: 1158069 - RNA, 20 nt, Human
ugacaaagugagacucuguc

SEQ ID NO: 1158070 - RNA, 22 nt, Human
ugacccgcagccuuccuucccc

SEQ ID NO: 1158071 - RNA, 18 nt, Human
ugacuuaauuagcagcag

SEQ ID NO: 1158072 - RNA, 22 nt, Human
ugagcugagaucgugccacugc

SEQ ID NO: 1158073 - RNA, 20 nt, Human
ugaggcaggagaaucacuug

SEQ ID NO: 1158074 - RNA, 24 nt, Human
ugaggcaggagaaucacuugaacc

SEQ ID NO: 1158075 - RNA, 25 nt, Human
ugaggcaggagaaucacuugaaccu

SEQ ID NO: 1158076 - RNA, 24 nt, Human
ugauaggccaaggcgggcagauca

SEQ ID NO: 1158077 - RNA, 20 nt, Human
ugccacgaaguuucuguaac

SEQ ID NO: 1158078 - RNA, 24 nt, Human
ugccucagaccuuuuucuugaucu

SEQ ID NO: 1158079 - RNA, 18 nt, Human
uggcaggugccuacaguc

SEQ ID NO: 1158080 - RNA, 24 nt, Human
uggccaauauggugaaacccuguc

SEQ ID NO: 1158081 - RNA, 24 nt, Human
uggcucaagccuguaaucccaaca

SEQ ID NO: 1158082 - RNA, 19 nt, Human
ugucucaucuguuccuccc

SEQ ID NO: 1158083 - RNA, 20 nt, Human
ugucucuaaaagcugagggc

SEQ ID NO: 1158084 - RNA, 24 nt, Human
uguuccggucaucaggggccaaga

SEQ ID NO: 1158085 - RNA, 24 nt, Human
uuacuuacaaagaaacugaggucc

SEQ ID NO: 1158086 - RNA, 22 nt, Human
uuauauaaaaagaaauuacuau

SEQ ID NO: 1158087 - RNA, 19 nt, Human
uucuugaucugaugcucau

SEQ ID NO: 1158088 - RNA, 18 nt, Human
uugcagugagcugagauc

SEQ ID NO: 1158089 - RNA, 21 nt, Human
uugcagugagcugagaucgug

SEQ ID NO: 1158090 - RNA, 22 nt, Human
uugcagugagcugagaucgugc

SEQ ID NO: 1158091 - RNA, 22 nt, Human
uuuuacuuacaaagaaacugag

SEQ ID NO: 1158092 - RNA, 21 nt, Human
uuuuguuguguguuuccuggc

SEQ ID NO: 1158093 - RNA, 18 nt, Human
aaaaauuggugaaauaua

SEQ ID NO: 1158094 - RNA, 19 nt, Human
aaagaagagauuaacacug

SEQ ID NO: 1158095 - RNA, 18 nt, Human
aaagugcugggauuacaa

SEQ ID NO: 1158096 - RNA, 22 nt, Human
aaauacgacucucauccauacc

SEQ ID NO: 1158097 - RNA, 18 nt, Human
aaauauccagggucccuc

SEQ ID NO: 1158098 - RNA, 18 nt, Human
aacaagagaaaucaaagc

SEQ ID NO: 1158099 - RNA, 19 nt, Human
aacagcuuugacagaaugu

SEQ ID NO: 1158100 - RNA, 19 nt, Human
aaccacaaaugauccagcc

SEQ ID NO: 1158101 - RNA, 22 nt, Human
aacugugagccaauuaaaccuc

SEQ ID NO: 1158102 - RNA, 23 nt, Human
aagaaaaaaaucugcacccugcc

SEQ ID NO: 1158103 - RNA, 20 nt, Human
aagaaagaggaugucccagu

SEQ ID NO: 1158104 - RNA, 21 nt, Human
aaggaaauucacuguaguuaa

SEQ ID NO: 1158105 - RNA, 19 nt, Human
aagugcugggauuacaagc

SEQ ID NO: 1158106 - RNA, 26 nt, Human
aagugcugggauuacaagcacgagcc

SEQ ID NO: 1158107 - RNA, 23 nt, Human
acaaagaaagcgugaaaaauauc

SEQ ID NO: 1158108 - RNA, 19 nt, Human
acaagaaaagaagcaggga

SEQ ID NO: 1158109 - RNA, 21 nt, Human
acaggaacuucaagcucuucu

SEQ ID NO: 1158110 - RNA, 21 nt, Human
acaggaucugaugaucagaca

SEQ ID NO: 1158111 - RNA, 18 nt, Human
accaaacagauucacaga

SEQ ID NO: 1158112 - RNA, 24 nt, Human
accaccaaagacucaauaagaaag

SEQ ID NO: 1158113 - RNA, 24 nt, Human
acccaggcuggagugcaguggcau

SEQ ID NO: 1158114 - RNA, 19 nt, Human
acccugagaaacuuugggu

SEQ ID NO: 1158115 - RNA, 21 nt, Human
acgguaaacuuuguguuugug

SEQ ID NO: 1158116 - RNA, 20 nt, Human
acuucaagcucuucuccuuu

SEQ ID NO: 1158117 - RNA, 21 nt, Human
acuuuggugcuguucucauga

SEQ ID NO: 1158118 - RNA, 23 nt, Human
agaacagcaccuucaaccacaaa

SEQ ID NO: 1158119 - RNA, 25 nt, Human
agaacccaaguagaugucagcauca

SEQ ID NO: 1158120 - RNA, 18 nt, Human
agaagaaacaaagaaagc

SEQ ID NO: 1158121 - RNA, 18 nt, Human
agaagaaacaaagaaagc

SEQ ID NO: 1158122 - RNA, 21 nt, Human
agaccaaccaccaaagacuca

SEQ ID NO: 1158123 - RNA, 18 nt, Human
agagaagaaacaaagaaa

SEQ ID NO: 1158124 - RNA, 18 nt, Human
agcuucuauucauccuuc

SEQ ID NO: 1158125 - RNA, 23 nt, Human
aggaacaaagaaggauugcugac

SEQ ID NO: 1158126 - RNA, 23 nt, Human
aggauggaggagauggagaagga

SEQ ID NO: 1158127 - RNA, 21 nt, Human
aggcaaauauccagggucccu

SEQ ID NO: 1158128 - RNA, 25 nt, Human
aggcuggagugcaguggcaugaucu

SEQ ID NO: 1158129 - RNA, 22 nt, Human
agggaggcaccaggggagaagc

SEQ ID NO: 1158130 - RNA, 21 nt, Human
agguguuucuuuauagcagug

SEQ ID NO: 1158131 - RNA, 19 nt, Human
agucugcagguggcaugca

SEQ ID NO: 1158132 - RNA, 20 nt, Human
agugcaguggcaugaucucg

SEQ ID NO: 1158133 - RNA, 23 nt, Human
agugcaguggcaugaucucggcu

SEQ ID NO: 1158134 - RNA, 24 nt, Human
agugcaguggcaugaucucggcuc

SEQ ID NO: 1158135 - RNA, 18 nt, Human
agugcugggauuacaagc

SEQ ID NO: 1158136 - RNA, 24 nt, Human
aguggcaugaucucggcucacugc

SEQ ID NO: 1158137 - RNA, 22 nt, Human
auagaauauaugccagauuccc

SEQ ID NO: 1158138 - RNA, 20 nt, Human
aucucagacacauacuagga

SEQ ID NO: 1158139 - RNA, 18 nt, Human
augaggaacaaagaagga

SEQ ID NO: 1158140 - RNA, 23 nt, Human
auggaaggaaccaaggagagggg

SEQ ID NO: 1158141 - RNA, 23 nt, Human
augggacaagaaaagaagcaggg

SEQ ID NO: 1158142 - RNA, 24 nt, Human
augggacaagaaaagaagcaggga

SEQ ID NO: 1158143 - RNA, 25 nt, Human
augggacaagaaaagaagcagggag

SEQ ID NO: 1158144 - RNA, 24 nt, Human
augucuggagacauuuuugauugu

SEQ ID NO: 1158145 - RNA, 21 nt, Human
auucaggucagcugauccaau

SEQ ID NO: 1158146 - RNA, 21 nt, Human
auucuccugccucagccuccc

SEQ ID NO: 1158147 - RNA, 18 nt, Human
caaagccaggauaccacc

SEQ ID NO: 1158148 - RNA, 23 nt, Human
caaagugcugggauuacaagcac

SEQ ID NO: 1158149 - RNA, 24 nt, Human
caaagugcugggauuacaagcacg

SEQ ID NO: 1158150 - RNA, 19 nt, Human
caagcccggggagggagau

SEQ ID NO: 1158151 - RNA, 24 nt, Human
caagcucuucuccuuuccagccuc

SEQ ID NO: 1158152 - RNA, 20 nt, Human
cacaagggccuuggugcugc

SEQ ID NO: 1158153 - RNA, 23 nt, Human
cacccugcccaacucaucccgaa

SEQ ID NO: 1158154 - RNA, 18 nt, Human
caccguguuagccaggau

SEQ ID NO: 1158155 - RNA, 24 nt, Human
caccguguuagccaggauggucuc

SEQ ID NO: 1158156 - RNA, 20 nt, Human
caccucaaacuccucaccau

SEQ ID NO: 1158157 - RNA, 22 nt, Human
cacgccauucuccugccucagc

SEQ ID NO: 1158158 - RNA, 24 nt, Human
cacuguaguuaauacuuugaaaua

SEQ ID NO: 1158159 - RNA, 24 nt, Human
cagaaaaagagucaauucuuggca

SEQ ID NO: 1158160 - RNA, 26 nt, Human
cagaacccaaguagaugucagcauca

SEQ ID NO: 1158161 - RNA, 22 nt, Human
cagauguccucacaagggccuu

SEQ ID NO: 1158162 - RNA, 27 nt, Human
cagcuggcuaauuuuuuuguauuuuca

SEQ ID NO: 1158163 - RNA, 21 nt, Human
caggaacuucaagcucuucuc

SEQ ID NO: 1158164 - RNA, 24 nt, Human
caguagagacaguguuucaccgug

SEQ ID NO: 1158165 - RNA, 25 nt, Human
caguagagacaguguuucaccgugu

SEQ ID NO: 1158166 - RNA, 19 nt, Human
caguaugcaccccaaaacu

SEQ ID NO: 1158167 - RNA, 24 nt, Human
caguguuucaccguguuagccagg

SEQ ID NO: 1158168 - RNA, 23 nt, Human
cauuuaauaccacuaagcugcac

SEQ ID NO: 1158169 - RNA, 25 nt, Human
cauuuuugauugucacaacugggag

SEQ ID NO: 1158170 - RNA, 24 nt, Human
ccaaaacguaauaucuauguguuc

SEQ ID NO: 1158171 - RNA, 23 nt, Human
ccaaacagauucacagaaucuaa

SEQ ID NO: 1158172 - RNA, 19 nt, Human
ccaaagugcugggauuaca

SEQ ID NO: 1158173 - RNA, 20 nt, Human
ccaaccaccaaagacucaau

SEQ ID NO: 1158174 - RNA, 22 nt, Human
ccaacucaucccgaacaagccc

SEQ ID NO: 1158175 - RNA, 19 nt, Human
ccaagacaggccugaggca

SEQ ID NO: 1158176 - RNA, 22 nt, Human
ccaggauggaggagauggagaa

SEQ ID NO: 1158177 - RNA, 22 nt, Human
ccauuggcaccuagaacaccca

SEQ ID NO: 1158178 - RNA, 21 nt, Human
cccccaggggacauuuggcua

SEQ ID NO: 1158179 - RNA, 20 nt, Human
cccccucuucuuccuacucc

SEQ ID NO: 1158180 - RNA, 26 nt, Human
ccccgccccaccacacgaaggucggc

SEQ ID NO: 1158181 - RNA, 19 nt, Human
ccccucuucuuccuacucc

SEQ ID NO: 1158182 - RNA, 24 nt, Human
ccccucuucuuccuacuccugcca

SEQ ID NO: 1158183 - RNA, 24 nt, Human
cccgauuagcugggacuacaggcg

SEQ ID NO: 1158184 - RNA, 18 nt, Human
cccgccccaccacacgag

SEQ ID NO: 1158185 - RNA, 23 nt, Human
cccuuccccaggcagagcccuag

SEQ ID NO: 1158186 - RNA, 19 nt, Human
ccgauuagcugggacuaca

SEQ ID NO: 1158187 - RNA, 24 nt, Human
ccgccucagccucccaaagugcug

SEQ ID NO: 1158188 - RNA, 22 nt, Human
ccuacucaggauuuuagccacc

SEQ ID NO: 1158189 - RNA, 24 nt, Human
ccuagaacacccauugcccccagg

SEQ ID NO: 1158190 - RNA, 19 nt, Human
ccuauaaucauucauucgu

SEQ ID NO: 1158191 - RNA, 20 nt, Human
ccucacaagggccuuggugc

SEQ ID NO: 1158192 - RNA, 19 nt, Human
ccucaccauuucucaagua

SEQ ID NO: 1158193 - RNA, 20 nt, Human
ccugaccccgugaucugccc

SEQ ID NO: 1158194 - RNA, 23 nt, Human
ccugccucagccucccgauuagc

SEQ ID NO: 1158195 - RNA, 22 nt, Human
ccuuccccaggcagagcccuag

SEQ ID NO: 1158196 - RNA, 24 nt, Human
cgccucagccucccaaagugcugg

SEQ ID NO: 1158197 - RNA, 24 nt, Human
cgcucugucacccaggcuggagug

SEQ ID NO: 1158198 - RNA, 21 nt, Human
cuacuccugccauguaagaug

SEQ ID NO: 1158199 - RNA, 22 nt, Human
cuagaccaaaguggagaguaaa

SEQ ID NO: 1158200 - RNA, 22 nt, Human
cuauguuauacagaacagcacc

SEQ ID NO: 1158201 - RNA, 18 nt, Human
cucaccauuucucaagua

SEQ ID NO: 1158202 - RNA, 24 nt, Human
cuccugaccccgugaucugcccgc

SEQ ID NO: 1158203 - RNA, 25 nt, Human
cuccugccucagccucccgauuagc

SEQ ID NO: 1158204 - RNA, 21 nt, Human
cucgcucugucacccaggcug

SEQ ID NO: 1158205 - RNA, 24 nt, Human
cucgcucugucacccaggcuggag

SEQ ID NO: 1158206 - RNA, 24 nt, Human
cugacacagaccaaccaccaaaga

SEQ ID NO: 1158207 - RNA, 21 nt, Human
cugccuaagucccccuggauc

SEQ ID NO: 1158208 - RNA, 23 nt, Human
cugccucagccucccgauuagcu

SEQ ID NO: 1158209 - RNA, 24 nt, Human
cuggagugcaguggcaugaucucg

SEQ ID NO: 1158210 - RNA, 20 nt, Human
cuggcuaauuuuuuuguauu

SEQ ID NO: 1158211 - RNA, 21 nt, Human
cuugacccccuuggucccucc

SEQ ID NO: 1158212 - RNA, 20 nt, Human
cuuggcauuuuuucaaaagu

SEQ ID NO: 1158213 - RNA, 18 nt, Human
gaaccaaggagaggggga

SEQ ID NO: 1158214 - RNA, 18 nt, Human
gaaggaaccaaggagagg

SEQ ID NO: 1158215 - RNA, 23 nt, Human
gacuacaggcgcccgccacugca

SEQ ID NO: 1158216 - RNA, 26 nt, Human
gagaagaaacaaagaaagcgugaaaa

SEQ ID NO: 1158217 - RNA, 19 nt, Human
gagguaauggcaggcuagg

SEQ ID NO: 1158218 - RNA, 20 nt, Human
gauacaauuaucccaucucu

SEQ ID NO: 1158219 - RNA, 18 nt, Human
gauccagcccaaaaugcc

SEQ ID NO: 1158220 - RNA, 21 nt, Human
gcacaacccuggagggaaacc

SEQ ID NO: 1158221 - RNA, 21 nt, Human
gcacccugcccaacucauccc

SEQ ID NO: 1158222 - RNA, 23 nt, Human
gcaccuucaaccacaaaugaucc

SEQ ID NO: 1158223 - RNA, 22 nt, Human
gccaccucaaacuccucaccau

SEQ ID NO: 1158224 - RNA, 24 nt, Human
gcccaguguggugugugagcagca

SEQ ID NO: 1158225 - RNA, 21 nt, Human
gcccuagggaggcaccagggg

SEQ ID NO: 1158226 - RNA, 25 nt, Human
gcucugucacccaggcuggagugca

SEQ ID NO: 1158227 - RNA, 21 nt, Human
gcucuucuccuuuccagccuc

SEQ ID NO: 1158228 - RNA, 19 nt, Human
gcuggagugcaguggcaug

SEQ ID NO: 1158229 - RNA, 23 nt, Human
gcuggcuaauuuuuuuguauuuu

SEQ ID NO: 1158230 - RNA, 20 nt, Human
ggacaagaaaagaagcaggg

SEQ ID NO: 1158231 - RNA, 21 nt, Human
ggagagggggacacaugagga

SEQ ID NO: 1158232 - RNA, 19 nt, Human
ggggagggagaugaugagg

SEQ ID NO: 1158233 - RNA, 23 nt, Human
gguacagggaucuauaagaaaaa

SEQ ID NO: 1158234 - RNA, 20 nt, Human
guaaagcaaaguauauguag

SEQ ID NO: 1158235 - RNA, 20 nt, Human
gucaggaaugcugcuaaaca

SEQ ID NO: 1158236 - RNA, 20 nt, Human
gucaggaaugcugcuaaaca

SEQ ID NO: 1158237 - RNA, 24 nt, Human
gucucgcucugucacccaggcugg

SEQ ID NO: 1158238 - RNA, 22 nt, Human
gucuggagacauuuuugauugu

SEQ ID NO: 1158239 - RNA, 24 nt, Human
gugaucugcccgccucagccuccc

SEQ ID NO: 1158240 - RNA, 19 nt, Human
guggcacuucccccccccu

SEQ ID NO: 1158241 - RNA, 22 nt, Human
guguacagauuacugcuggcug

SEQ ID NO: 1158242 - RNA, 24 nt, Human
uaaaagauccuucuucuauaagag

SEQ ID NO: 1158243 - RNA, 21 nt, Human
uaaaccacaacagauguccuc

SEQ ID NO: 1158244 - RNA, 19 nt, Human
uaaagauuuccuagaccaa

SEQ ID NO: 1158245 - RNA, 22 nt, Human
uaagaaaaaaaucugcacccug

SEQ ID NO: 1158246 - RNA, 23 nt, Human
uaagcugcacaauuaaaaauggg

SEQ ID NO: 1158247 - RNA, 23 nt, Human
uacaagcacgagccaccgcgccc

SEQ ID NO: 1158248 - RNA, 20 nt, Human
uaccuuugcacaugcugucu

SEQ ID NO: 1158249 - RNA, 19 nt, Human
uagaacacccauugccccc

SEQ ID NO: 1158250 - RNA, 23 nt, Human
uagaacacccauugcccccaggg

SEQ ID NO: 1158251 - RNA, 20 nt, Human
uagauugaugauaaaccaca

SEQ ID NO: 1158252 - RNA, 20 nt, Human
uagccaccucaaacuccuca

SEQ ID NO: 1158253 - RNA, 21 nt, Human
uauaagaaaaaaaucugcacc

SEQ ID NO: 1158254 - RNA, 19 nt, Human
uaugcaaaguccaucacaa

SEQ ID NO: 1158255 - RNA, 19 nt, Human
uaugggacaagaaaagaag

SEQ ID NO: 1158256 - RNA, 19 nt, Human
uauucauccuucaaaaucc

SEQ ID NO: 1158257 - RNA, 19 nt, Human
ucaaaaguccuuagggagg

SEQ ID NO: 1158258 - RNA, 23 nt, Human
ucaaacuccucaccauuucucaa

SEQ ID NO: 1158259 - RNA, 22 nt, Human
ucaaauuguaauccccaguguu

SEQ ID NO: 1158260 - RNA, 18 nt, Human
ucaaccacaaaugaucca

SEQ ID NO: 1158261 - RNA, 28 nt, Human
ucaagcucuucuccuuuccagccuccuu

SEQ ID NO: 1158262 - RNA, 21 nt, Human
ucacagaaucuaagaguggag

SEQ ID NO: 1158263 - RNA, 24 nt, Human
ucacccaggcuggagugcaguggc

SEQ ID NO: 1158264 - RNA, 24 nt, Human
ucaccguguuagccaggauggucu

SEQ ID NO: 1158265 - RNA, 18 nt, Human
ucacugcaagcuccaccu

SEQ ID NO: 1158266 - RNA, 19 nt, Human
ucacugcaagcuccaccug

SEQ ID NO: 1158267 - RNA, 24 nt, Human
ucacugcaagcuccaccugccgga

SEQ ID NO: 1158268 - RNA, 19 nt, Human
ucacuguaguuaauacuuu

SEQ ID NO: 1158269 - RNA, 19 nt, Human
ucagacacauacuaggaac

SEQ ID NO: 1158270 - RNA, 22 nt, Human
ucagggauaaugcagaaaaaga

SEQ ID NO: 1158271 - RNA, 22 nt, Human
ucaguagagacaguguuucacc

SEQ ID NO: 1158272 - RNA, 24 nt, Human
ucaguagagacaguguuucaccgu

SEQ ID NO: 1158273 - RNA, 18 nt, Human
ucccaaagugcugggauu

SEQ ID NO: 1158274 - RNA, 24 nt, Human
ucccaaagugcugggauuacaagc

SEQ ID NO: 1158275 - RNA, 21 nt, Human
uccccaggggacauuuggcua

SEQ ID NO: 1158276 - RNA, 22 nt, Human
ucccgaacaagcccggggaggg

SEQ ID NO: 1158277 - RNA, 24 nt, Human
ucccgauuagcugggacuacaggc

SEQ ID NO: 1158278 - RNA, 19 nt, Human
ucccucauggcccagugug

SEQ ID NO: 1158279 - RNA, 20 nt, Human
uccuucaugaaugguuuagc

SEQ ID NO: 1158280 - RNA, 24 nt, Human
ucgcucugucacccaggcuggagu

SEQ ID NO: 1158281 - RNA, 18 nt, Human
ucuaggugccaaaaaaca

SEQ ID NO: 1158282 - RNA, 18 nt, Human
ucucaaguacccugaccc

SEQ ID NO: 1158283 - RNA, 23 nt, Human
ucucaaguacccugacccuuuug

SEQ ID NO: 1158284 - RNA, 19 nt, Human
ucucaggagaucugguugu

SEQ ID NO: 1158285 - RNA, 19 nt, Human
ucucgcucugucacccagg

SEQ ID NO: 1158286 - RNA, 23 nt, Human
ucucgcucugucacccaggcugg

SEQ ID NO: 1158287 - RNA, 24 nt, Human
ucucgcucugucacccaggcugga

SEQ ID NO: 1158288 - RNA, 26 nt, Human
ucucgcucugucacccaggcuggagu

SEQ ID NO: 1158289 - RNA, 23 nt, Human
ucugccaugauuguaaguauccu

SEQ ID NO: 1158290 - RNA, 21 nt, Human
ucugcccgccucagccuccca

SEQ ID NO: 1158291 - RNA, 24 nt, Human
ucugucacccaggcuggagugcag

SEQ ID NO: 1158292 - RNA, 22 nt, Human
ugaaacuauuuuugugucccca

SEQ ID NO: 1158293 - RNA, 23 nt, Human
ugacacagaccaaccaccaaaga

SEQ ID NO: 1158294 - RNA, 18 nt, Human
ugagaaacuuuggguugc

SEQ ID NO: 1158295 - RNA, 22 nt, Human
ugagauggagucucgcucuguc

SEQ ID NO: 1158296 - RNA, 18 nt, Human
ugauaagacuuaaguuuc

SEQ ID NO: 1158297 - RNA, 21 nt, Human
ugauccaauagagaguugcug

SEQ ID NO: 1158298 - RNA, 20 nt, Human
ugaugacaaagccaggauac

SEQ ID NO: 1158299 - RNA, 19 nt, Human
ugcaaaguccaucacaaga

SEQ ID NO: 1158300 - RNA, 21 nt, Human
ugcagaaaaagagucaauucu

SEQ ID NO: 1158301 - RNA, 27 nt, Human
ugcauggaaggaaccaaggagaggggg

SEQ ID NO: 1158302 - RNA, 23 nt, Human
ugccagauucccugcaguauucc

SEQ ID NO: 1158303 - RNA, 24 nt, Human
ugccucagccucccgauuagcugg

SEQ ID NO: 1158304 - RNA, 24 nt, Human
ugccugcuuccccuucaccuucug

SEQ ID NO: 1158305 - RNA, 19 nt, Human
ugcuaagaauucaggucag

SEQ ID NO: 1158306 - RNA, 24 nt, Human
ugcugggauuacaagcacgagcca

SEQ ID NO: 1158307 - RNA, 19 nt, Human
uggagugcaguggcaugau

SEQ ID NO: 1158308 - RNA, 24 nt, Human
uggagugcaguggcaugaucucgg

SEQ ID NO: 1158309 - RNA, 26 nt, Human
uggcacuucccccccccucuucuucc

SEQ ID NO: 1158310 - RNA, 20 nt, Human
ugggacaagaaaagaagcag

SEQ ID NO: 1158311 - RNA, 21 nt, Human
ugggacuacaggcgcccgcca

SEQ ID NO: 1158312 - RNA, 22 nt, Human
ugggacuacaggcgcccgccac

SEQ ID NO: 1158313 - RNA, 22 nt, Human
ugggacuacaggcgcccgccac

SEQ ID NO: 1158314 - RNA, 24 nt, Human
ugggacuacaggcgcccgccacug

SEQ ID NO: 1158315 - RNA, 21 nt, Human
ugggagcagggaugcuacugg

SEQ ID NO: 1158316 - RNA, 21 nt, Human
ugggauuacaagcacgagcca

SEQ ID NO: 1158317 - RNA, 22 nt, Human
ugggauuacaagcacgagccac

SEQ ID NO: 1158318 - RNA, 23 nt, Human
ugggauuacaagcacgagccacc

SEQ ID NO: 1158319 - RNA, 24 nt, Human
ugggauuacaagcacgagccaccg

SEQ ID NO: 1158320 - RNA, 24 nt, Human
ugggauuacaagcacgagccaccg

SEQ ID NO: 1158321 - RNA, 24 nt, Human
uggguaaagauuuccuagaccaaa

SEQ ID NO: 1158322 - RNA, 21 nt, Human
uggguugcacuggucccagca

SEQ ID NO: 1158323 - RNA, 21 nt, Human
uggugcuguucucaugauggu

SEQ ID NO: 1158324 - RNA, 24 nt, Human
uguaaguauccugaggucucccca

SEQ ID NO: 1158325 - RNA, 22 nt, Human
uguaugcaaaguccaucacaag

SEQ ID NO: 1158326 - RNA, 22 nt, Human
ugugaccauuggcaccuagaac

SEQ ID NO: 1158327 - RNA, 22 nt, Human
uguggggagaguagacuauggg

SEQ ID NO: 1158328 - RNA, 23 nt, Human
uuagaacugugguucucaacuag

SEQ ID NO: 1158329 - RNA, 23 nt, Human
uucauuguaaguuuccacagugc

SEQ ID NO: 1158330 - RNA, 21 nt, Human
uugaaacuucauuguaaguuu

SEQ ID NO: 1158331 - RNA, 21 nt, Human
uuggagcacaacccuggaggg

SEQ ID NO: 1158332 - RNA, 23 nt, Human
uuggagcacaacccuggagggaa

SEQ ID NO: 1158333 - RNA, 20 nt, Human
uuggucccuccucagucagg

SEQ ID NO: 1158334 - RNA, 19 nt, Human
uuucaccguguuagccagg

SEQ ID NO: 1158335 - RNA, 24 nt, Human
uuugguuguguccccgcccaaauc

SEQ ID NO: 1158336 - RNA, 24 nt, Human
uuuucaguagagacaguguuucac

SEQ ID NO: 1158337 - RNA, 21 nt, Human
uuuuuuguauuuucaguagag

SEQ ID NO: 1158338 - RNA, 24 nt, Human
uuuuuuguauuuucaguagagaca

SEQ ID NO: 1158339 - RNA, 25 nt, Human
uuuuuuuuuuuugagauggagucuc

SEQ ID NO: 1158340 - RNA, 22 nt, Human
uuuuuuuuuuuuuugagaugga

SEQ ID NO: 1158341 - RNA, 20 nt, Human
uuuuuuuuuuuuuuuuuugg

SEQ ID NO: 1158342 - RNA, 27 nt, Human
aaaaggagacagguuaaaaucauccaa

SEQ ID NO: 1158343 - RNA, 18 nt, Human
agcagcucuucuugcccu

SEQ ID NO: 1158344 - RNA, 20 nt, Human
agcucccccauccauucccc

SEQ ID NO: 1158345 - RNA, 23 nt, Human
agcucuccucccucagcuccccc

SEQ ID NO: 1158346 - RNA, 22 nt, Human
aguucagacucauuagccuucc

SEQ ID NO: 1158347 - RNA, 19 nt, Human
cagcucuucuugcccugcc

SEQ ID NO: 1158348 - RNA, 22 nt, Human
cauuccccucugcagucggaag

SEQ ID NO: 1158349 - RNA, 24 nt, Human
cauuccccucugcagucggaaguc

SEQ ID NO: 1158350 - RNA, 26 nt, Human
ccauggucuuccugcuucagcucucc

SEQ ID NO: 1158351 - RNA, 18 nt, Human
ccccauccauuccccucu

SEQ ID NO: 1158352 - RNA, 23 nt, Human
cccucagcucccccauccauucc

SEQ ID NO: 1158353 - RNA, 19 nt, Human
ccuggccacucuuugccau

SEQ ID NO: 1158354 - RNA, 19 nt, Human
ccuguuugacucucuguga

SEQ ID NO: 1158355 - RNA, 18 nt, Human
cucuucuugcccugcccc

SEQ ID NO: 1158356 - RNA, 21 nt, Human
gcagcucuucuugcccugccc

SEQ ID NO: 1158357 - RNA, 24 nt, Human
gcucuccucccucagcucccccau

SEQ ID NO: 1158358 - RNA, 22 nt, Human
ggacucacaaaaauuagaaaag

SEQ ID NO: 1158359 - RNA, 18 nt, Human
ggcuuggugacagguugg

SEQ ID NO: 1158360 - RNA, 23 nt, Human
ggggagucacuuggauagcacug

SEQ ID NO: 1158361 - RNA, 24 nt, Human
gugguguggaugacggcagcugac

SEQ ID NO: 1158362 - RNA, 26 nt, Human
uacauuugaccuuaucaugucagcuc

SEQ ID NO: 1158363 - RNA, 23 nt, Human
uagccuuccaggaaaagcagcuc

SEQ ID NO: 1158364 - RNA, 24 nt, Human
uaggucggaguccaggaagacacc

SEQ ID NO: 1158365 - RNA, 18 nt, Human
uauaacgauuaccuccag

SEQ ID NO: 1158366 - RNA, 20 nt, Human
ucacaaaaauuagaaaagcu

SEQ ID NO: 1158367 - RNA, 23 nt, Human
ucacuugagggacucacaaaaau

SEQ ID NO: 1158368 - RNA, 21 nt, Human
ucagcucuccucccucagcuc

SEQ ID NO: 1158369 - RNA, 26 nt, Human
ucagcucuccucccucagcuccccca

SEQ ID NO: 1158370 - RNA, 18 nt, Human
ucaugguuaugguucauu

SEQ ID NO: 1158371 - RNA, 21 nt, Human
ucccucagcucccccauccau

SEQ ID NO: 1158372 - RNA, 21 nt, Human
uccucccucagcucccccauc

SEQ ID NO: 1158373 - RNA, 24 nt, Human
uccugcuucagcucuccucccuca

SEQ ID NO: 1158374 - RNA, 19 nt, Human
ucggaagucuucuagaggu

SEQ ID NO: 1158375 - RNA, 22 nt, Human
ucugugaugggggucccaaaac

SEQ ID NO: 1158376 - RNA, 18 nt, Human
ugacggcagcugacaugg

SEQ ID NO: 1158377 - RNA, 23 nt, Human
ugagggacucacaaaaauuagaa

SEQ ID NO: 1158378 - RNA, 20 nt, Human
ugccccuguuugacucucug

SEQ ID NO: 1158379 - RNA, 22 nt, Human
ugguucagccaucucuuuccag

SEQ ID NO: 1158380 - RNA, 23 nt, Human
uucacucagaaggccuggccacu

SEQ ID NO: 1158381 - RNA, 24 nt, Human
uucauugcagcaaaaggagacagg

SEQ ID NO: 1158382 - RNA, 22 nt, Human
uuccaggaaaagcagcucuucu

SEQ ID NO: 1158383 - RNA, 23 nt, Human
uuugccaugucugaucuguggug

SEQ ID NO: 1158384 - RNA, 24 nt, Human
aaaaagcacuuauugguacacagu

SEQ ID NO: 1158385 - RNA, 20 nt, Human
aaacaggagagguggugggg

SEQ ID NO: 1158386 - RNA, 21 nt, Human
aaacgacaaagugcacagacc

SEQ ID NO: 1158387 - RNA, 18 nt, Human
aaagcacuacccuccuuc

SEQ ID NO: 1158388 - RNA, 22 nt, Human
aaagugcugggauuacaggcau

SEQ ID NO: 1158389 - RNA, 23 nt, Human
aaagugcugggauuacaggcaug

SEQ ID NO: 1158390 - RNA, 24 nt, Human
aaagugcugggauuacaggcauga

SEQ ID NO: 1158391 - RNA, 20 nt, Human
aaccuccaccuccugggcuc

SEQ ID NO: 1158392 - RNA, 18 nt, Human
aagacuucaagacuaacc

SEQ ID NO: 1158393 - RNA, 21 nt, Human
aagcacuacccuccuucagga

SEQ ID NO: 1158394 - RNA, 25 nt, Human
aagcaguccucccacuucggccucc

SEQ ID NO: 1158395 - RNA, 19 nt, Human
aaggaagagccacagauac

SEQ ID NO: 1158396 - RNA, 19 nt, Human
aagugcugggauuacaggc

SEQ ID NO: 1158397 - RNA, 21 nt, Human
aagugcugggauuacaggcau

SEQ ID NO: 1158398 - RNA, 26 nt, Human
aagugcugggauuacaggcaugaacc

SEQ ID NO: 1158399 - RNA, 19 nt, Human
aaugcaguggugcagucuc

SEQ ID NO: 1158400 - RNA, 26 nt, Human
acacaauccaauccauuaccaauacc

SEQ ID NO: 1158401 - RNA, 23 nt, Human
acagaggacaggcuuacagccca

SEQ ID NO: 1158402 - RNA, 25 nt, Human
accacccacauaagcacagaggaca

SEQ ID NO: 1158403 - RNA, 22 nt, Human
accauguuucccaggcuggucu

SEQ ID NO: 1158404 - RNA, 22 nt, Human
accauguuucccaggcuggucu

SEQ ID NO: 1158405 - RNA, 18 nt, Human
acccccagagcaugggaa

SEQ ID NO: 1158406 - RNA, 20 nt, Human
acgccgcaggcaggaaggcc

SEQ ID NO: 1158407 - RNA, 24 nt, Human
acugcacacagauguuugcaagug

SEQ ID NO: 1158408 - RNA, 20 nt, Human
agaaauagcugagcaaagag

SEQ ID NO: 1158409 - RNA, 22 nt, Human
agaagggcaagcgcagacuaga

SEQ ID NO: 1158410 - RNA, 21 nt, Human
agaaguaaacagaaacaguca

SEQ ID NO: 1158411 - RNA, 18 nt, Human
agaauggauggaccuugg

SEQ ID NO: 1158412 - RNA, 18 nt, Human
agacagggucuuaccaug

SEQ ID NO: 1158413 - RNA, 19 nt, Human
agaggcuaugucuagugcg

SEQ ID NO: 1158414 - RNA, 19 nt, Human
agagggagaaguaaacaga

SEQ ID NO: 1158415 - RNA, 21 nt, Human
agaggugguggggcauggcuc

SEQ ID NO: 1158416 - RNA, 18 nt, Human
agcucugggcuggccaug

SEQ ID NO: 1158417 - RNA, 22 nt, Human
agcuggccuggcgcagugaugc

SEQ ID NO: 1158418 - RNA, 18 nt, Human
aggaagcugggaagcuac

SEQ ID NO: 1158419 - RNA, 20 nt, Human
aggaaggccagagggagaag

SEQ ID NO: 1158420 - RNA, 19 nt, Human
aggcaugaaccacugcacc

SEQ ID NO: 1158421 - RNA, 19 nt, Human
aguaacagagagagcuggg

SEQ ID NO: 1158422 - RNA, 18 nt, Human
agucuccacucacugcaa

SEQ ID NO: 1158423 - RNA, 19 nt, Human
agugaucuacccaccucag

SEQ ID NO: 1158424 - RNA, 18 nt, Human
agugcugggauuacaggc

SEQ ID NO: 1158425 - RNA, 23 nt, Human
augaaccacugcaccugcccaaa

SEQ ID NO: 1158426 - RNA, 23 nt, Human
caaccuccaccuccugggcucaa

SEQ ID NO: 1158427 - RNA, 24 nt, Human
caaccuccaccuccugggcucaag

SEQ ID NO: 1158428 - RNA, 27 nt, Human
caagcaguccucccacuucggccuccu

SEQ ID NO: 1158429 - RNA, 24 nt, Human
caaggcaaacaggagagguggugg

SEQ ID NO: 1158430 - RNA, 25 nt, Human
cacauaagcacagaggacaggcuua

SEQ ID NO: 1158431 - RNA, 24 nt, Human
caccucagccuccuaaagugcugg

SEQ ID NO: 1158432 - RNA, 24 nt, Human
caccuccugggcucaagcaguccu

SEQ ID NO: 1158433 - RNA, 21 nt, Human
cacugcaaccuccaccuccug

SEQ ID NO: 1158434 - RNA, 23 nt, Human
cacugcaaccuccaccuccuggg

SEQ ID NO: 1158435 - RNA, 20 nt, Human
cacugcugggagguauggcc

SEQ ID NO: 1158436 - RNA, 22 nt, Human
cagauacaacgucauaggauca

SEQ ID NO: 1158437 - RNA, 22 nt, Human
cagcaggccgaauggagcagca

SEQ ID NO: 1158438 - RNA, 24 nt, Human
cagggucuuaccauguuucccagg

SEQ ID NO: 1158439 - RNA, 19 nt, Human
caugcccagcuaauggcua

SEQ ID NO: 1158440 - RNA, 28 nt, Human
cauggugaaauguccaaccccguggucg

SEQ ID NO: 1158441 - RNA, 24 nt, Human
cauguuucccaggcuggucuugaa

SEQ ID NO: 1158442 - RNA, 23 nt, Human
cauugcagaggcuaugucuagug

SEQ ID NO: 1158443 - RNA, 20 nt, Human
ccaaaguucuaaugccgggg

SEQ ID NO: 1158444 - RNA, 18 nt, Human
ccacugcaccugcccaaa

SEQ ID NO: 1158445 - RNA, 22 nt, Human
ccacugcaccugcccaaaugac

SEQ ID NO: 1158446 - RNA, 19 nt, Human
ccaggagcugggccucucc

SEQ ID NO: 1158447 - RNA, 21 nt, Human
ccaggagcugggccucuccug

SEQ ID NO: 1158448 - RNA, 21 nt, Human
ccaggcuggucuugaacuccu

SEQ ID NO: 1158449 - RNA, 18 nt, Human
ccccagagcaugggaacc

SEQ ID NO: 1158450 - RNA, 22 nt, Human
ccccagagcaugggaaccaagu

SEQ ID NO: 1158451 - RNA, 21 nt, Human
ccccaggagcugggccucucc

SEQ ID NO: 1158452 - RNA, 20 nt, Human
cccccaaaccucucaggugc

SEQ ID NO: 1158453 - RNA, 23 nt, Human
ccuaaagugcugggauuacaggc

SEQ ID NO: 1158454 - RNA, 24 nt, Human
ccuaaagugcugggauuacaggca

SEQ ID NO: 1158455 - RNA, 19 nt, Human
ccuccaccuccugggcuca

SEQ ID NO: 1158456 - RNA, 24 nt, Human
ccuccaccuccugggcucaagcag

SEQ ID NO: 1158457 - RNA, 24 nt, Human
ccugaguaacugggacuacaggca

SEQ ID NO: 1158458 - RNA, 18 nt, Human
ccuggacucaagugaucu

SEQ ID NO: 1158459 - RNA, 24 nt, Human
ccuggacucaagugaucuacccac

SEQ ID NO: 1158460 - RNA, 20 nt, Human
ccugggcucaagcaguccuc

SEQ ID NO: 1158461 - RNA, 18 nt, Human
ccugucugccuccucaca

SEQ ID NO: 1158462 - RNA, 22 nt, Human
ccuucaaaaggaagagaaugga

SEQ ID NO: 1158463 - RNA, 20 nt, Human
cggccuccugaguaacuggg

SEQ ID NO: 1158464 - RNA, 23 nt, Human
cuaaagugcugggauuacaggca

SEQ ID NO: 1158465 - RNA, 24 nt, Human
cuaaagugcugggauuacaggcau

SEQ ID NO: 1158466 - RNA, 24 nt, Human
cucaagcaguccucccacuucggc

SEQ ID NO: 1158467 - RNA, 24 nt, Human
cucaagugaucuacccaccucagc

SEQ ID NO: 1158468 - RNA, 24 nt, Human
cucacugcaaccuccaccuccugg

SEQ ID NO: 1158469 - RNA, 26 nt, Human
cucacugcaaccuccaccuccugggc

SEQ ID NO: 1158470 - RNA, 19 nt, Human
cucagccuucaaaaggaag

SEQ ID NO: 1158471 - RNA, 18 nt, Human
cugcaaccuccaccuccu

SEQ ID NO: 1158472 - RNA, 23 nt, Human
cugcaaccuccaccuccugggcu

SEQ ID NO: 1158473 - RNA, 20 nt, Human
cuggaaugcaguggugcagu

SEQ ID NO: 1158474 - RNA, 21 nt, Human
cuggccccaggagcugggccu

SEQ ID NO: 1158475 - RNA, 19 nt, Human
cuucccacacucccugcuu

SEQ ID NO: 1158476 - RNA, 18 nt, Human
gaaaagaaggcgcaaaca

SEQ ID NO: 1158477 - RNA, 22 nt, Human
gacacaauccaauccauuacca

SEQ ID NO: 1158478 - RNA, 21 nt, Human
gacagggucuuaccauguuuc

SEQ ID NO: 1158479 - RNA, 24 nt, Human
gacuacaggcacaugccaccaugc

SEQ ID NO: 1158480 - RNA, 23 nt, Human
gacucaagugaucuacccaccuc

SEQ ID NO: 1158481 - RNA, 21 nt, Human
gagacagggucucgcucuguu

SEQ ID NO: 1158482 - RNA, 19 nt, Human
gagcucugggcuggccaug

SEQ ID NO: 1158483 - RNA, 20 nt, Human
gagcuggggagugagaaggg

SEQ ID NO: 1158484 - RNA, 25 nt, Human
gaguaacugggacuacaggcacaug

SEQ ID NO: 1158485 - RNA, 23 nt, Human
gauuacaggcaugaaccacugca

SEQ ID NO: 1158486 - RNA, 22 nt, Human
gcaaccuccaccuccugggcuc

SEQ ID NO: 1158487 - RNA, 21 nt, Human
gcacaacucagccuucaaaag

SEQ ID NO: 1158488 - RNA, 21 nt, Human
gcacagggacgccgcaggcag

SEQ ID NO: 1158489 - RNA, 18 nt, Human
gcaccagggccagccgag

SEQ ID NO: 1158490 - RNA, 19 nt, Human
gcauggcucguggccacaa

SEQ ID NO: 1158491 - RNA, 24 nt, Human
gccacaagccccuaagcacugugc

SEQ ID NO: 1158492 - RNA, 21 nt, Human
gcccagcacaaugccaggcac

SEQ ID NO: 1158493 - RNA, 23 nt, Human
gccccaggagcugggccucuccu

SEQ ID NO: 1158494 - RNA, 18 nt, Human
ggacuugaaaaucuuuug

SEQ ID NO: 1158495 - RNA, 22 nt, Human
ggccauggugaaauguccaacc

SEQ ID NO: 1158496 - RNA, 18 nt, Human
ggcuggucuugaacuccu

SEQ ID NO: 1158497 - RNA, 23 nt, Human
gggcauggcucguggccacaagc

SEQ ID NO: 1158498 - RNA, 21 nt, Human
ggguuaggacuugaaaaucuu

SEQ ID NO: 1158499 - RNA, 22 nt, Human
guagagacagggucuuaccaug

SEQ ID NO: 1158500 - RNA, 23 nt, Human
gugaucuacccaccucagccucc

SEQ ID NO: 1158501 - RNA, 21 nt, Human
gugccugacucuggcaggccc

SEQ ID NO: 1158502 - RNA, 19 nt, Human
gugcugggauuacaggcau

SEQ ID NO: 1158503 - RNA, 22 nt, Human
guggugcagucuccacucacug

SEQ ID NO: 1158504 - RNA, 19 nt, Human
guuuccagccgagcucugg

SEQ ID NO: 1158505 - RNA, 18 nt, Human
uaaaacaguuccugcacu

SEQ ID NO: 1158506 - RNA, 25 nt, Human
uaaaauaaaacaguuccugcacuca

SEQ ID NO: 1158507 - RNA, 19 nt, Human
uacacaguguucacaggag

SEQ ID NO: 1158508 - RNA, 22 nt, Human
uacagcccaaaguucuaaugcc

SEQ ID NO: 1158509 - RNA, 24 nt, Human
uacaggcacaugccaccaugccca

SEQ ID NO: 1158510 - RNA, 22 nt, Human
uacaggcaugaaccacugcacc

SEQ ID NO: 1158511 - RNA, 21 nt, Human
uaccauguuucccaggcuggu

SEQ ID NO: 1158512 - RNA, 27 nt, Human
uaccauguuucccaggcuggucuugaa

SEQ ID NO: 1158513 - RNA, 22 nt, Human
uacccaccucagccuccuaaag

SEQ ID NO: 1158514 - RNA, 18 nt, Human
uacccccagagcauggga

SEQ ID NO: 1158515 - RNA, 22 nt, Human
uagagacagggucuuaccaugu

SEQ ID NO: 1158516 - RNA, 21 nt, Human
uaggaucaaaacgacaaagug

SEQ ID NO: 1158517 - RNA, 20 nt, Human
uagguggcacagggacgccg

SEQ ID NO: 1158518 - RNA, 23 nt, Human
uaguaaacaucuauugguguuug

SEQ ID NO: 1158519 - RNA, 20 nt, Human
ucaaaacgacaaagugcaca

SEQ ID NO: 1158520 - RNA, 24 nt, Human
ucaaccagaugcggucuaggcaca

SEQ ID NO: 1158521 - RNA, 19 nt, Human
ucacauguugucucucauc

SEQ ID NO: 1158522 - RNA, 23 nt, Human
ucacugcaaccuccaccuccugg

SEQ ID NO: 1158523 - RNA, 24 nt, Human
ucacugcaaccuccaccuccuggg

SEQ ID NO: 1158524 - RNA, 25 nt, Human
ucacugcaaccuccaccuccugggc

SEQ ID NO: 1158525 - RNA, 27 nt, Human
ucacugcaaccuccaccuccugggcuc

SEQ ID NO: 1158526 - RNA, 24 nt, Human
uccauuaccaauaccuucccccaa

SEQ ID NO: 1158527 - RNA, 24 nt, Human
uccuaaagugcugggauuacaggc

SEQ ID NO: 1158528 - RNA, 24 nt, Human
uccugaguaacugggacuacaggc

SEQ ID NO: 1158529 - RNA, 22 nt, Human
uccugggcucaagcaguccucc

SEQ ID NO: 1158530 - RNA, 24 nt, Human
uccugggcucaagcaguccuccca

SEQ ID NO: 1158531 - RNA, 22 nt, Human
ucuauugguguuugcuucuuaa

SEQ ID NO: 1158532 - RNA, 19 nt, Human
ucucgcucuguugccuagg

SEQ ID NO: 1158533 - RNA, 20 nt, Human
ucucgcucuguugccuaggc

SEQ ID NO: 1158534 - RNA, 23 nt, Human
ucucgcucuguugccuaggcugg

SEQ ID NO: 1158535 - RNA, 24 nt, Human
ucucgcucuguugccuaggcugga

SEQ ID NO: 1158536 - RNA, 24 nt, Human
ucuguugccuaggcuggaaugcag

SEQ ID NO: 1158537 - RNA, 23 nt, Human
ucuugaacuccuggacucaagug

SEQ ID NO: 1158538 - RNA, 24 nt, Human
ugaaagcacuacccuccuucagga

SEQ ID NO: 1158539 - RNA, 21 nt, Human
ugaaccacugcaccugcccaa

SEQ ID NO: 1158540 - RNA, 20 nt, Human
ugaugcugcuugcacugcug

SEQ ID NO: 1158541 - RNA, 23 nt, Human
ugcaagugcuuugugcaccaccc

SEQ ID NO: 1158542 - RNA, 20 nt, Human
ugcccuggaaggaggcccug

SEQ ID NO: 1158543 - RNA, 19 nt, Human
ugccuaggcuggaaugcag

SEQ ID NO: 1158544 - RNA, 24 nt, Human
ugccuaggcuggaaugcaguggug

SEQ ID NO: 1158545 - RNA, 25 nt, Human
ugcucagagccuggauccccagcuc

SEQ ID NO: 1158546 - RNA, 19 nt, Human
ugcugggagguauggccac

SEQ ID NO: 1158547 - RNA, 23 nt, Human
ugcugggauuacaggcaugaacc

SEQ ID NO: 1158548 - RNA, 18 nt, Human
uggaaggaggcccuggug

SEQ ID NO: 1158549 - RNA, 28 nt, Human
uggaaugcaguggugcaguccuagcacg

SEQ ID NO: 1158550 - RNA, 23 nt, Human
uggaaugcaguggugcagucucc

SEQ ID NO: 1158551 - RNA, 21 nt, Human
uggccacaagccccuaagcac

SEQ ID NO: 1158552 - RNA, 20 nt, Human
uggcccagcucugagcuggg

SEQ ID NO: 1158553 - RNA, 21 nt, Human
ugggacuacaggcacaugcca

SEQ ID NO: 1158554 - RNA, 22 nt, Human
ugggacuacaggcacaugccac

SEQ ID NO: 1158555 - RNA, 24 nt, Human
ugggacuacaggcacaugccacca

SEQ ID NO: 1158556 - RNA, 25 nt, Human
ugggacuacaggcacaugccaccau

SEQ ID NO: 1158557 - RNA, 21 nt, Human
ugggauuacaggcaugaacca

SEQ ID NO: 1158558 - RNA, 22 nt, Human
ugggauuacaggcaugaaccac

SEQ ID NO: 1158559 - RNA, 24 nt, Human
ugggauuacaggcaugaaccacug

SEQ ID NO: 1158560 - RNA, 24 nt, Human
ugggauuacaggcaugaaccacug

SEQ ID NO: 1158561 - RNA, 23 nt, Human
ugggggacacaauccaauccagc

SEQ ID NO: 1158562 - RNA, 24 nt, Human
uguagagacagggucuuaccaugu

SEQ ID NO: 1158563 - RNA, 22 nt, Human
uucccacugcagcccagcacaa

SEQ ID NO: 1158564 - RNA, 24 nt, Human
uucccaggcuggucuugaacuccu

SEQ ID NO: 1158565 - RNA, 24 nt, Human
uugccuaggcuggaaugcaguggu

SEQ ID NO: 1158566 - RNA, 19 nt, Human
uugucucucaucuguuucc

SEQ ID NO: 1158567 - RNA, 18 nt, Human
uuuguagagacagggucu

SEQ ID NO: 1158568 - RNA, 24 nt, Human
uuuguagagacagggucuuaccau

SEQ ID NO: 1158569 - RNA, 21 nt, Human
uuuuuuguauuuuuuguagag

SEQ ID NO: 1158570 - RNA, 24 nt, Human
uuuuuuguauuuuuuguagagaca

SEQ ID NO: 1158571 - RNA, 22 nt, Human
aaaccagcagccuuacaaagaa

SEQ ID NO: 1158572 - RNA, 24 nt, Human
aaaccccagcauuuauaaucagaa

SEQ ID NO: 1158573 - RNA, 22 nt, Human
aaaggagaggaaaugacaggag

SEQ ID NO: 1158574 - RNA, 24 nt, Human
aaaguguugggguuacagguguga

SEQ ID NO: 1158575 - RNA, 22 nt, Human
aacaacuaaauuguuccugcaa

SEQ ID NO: 1158576 - RNA, 21 nt, Human
aaccuuuacccugagaagugg

SEQ ID NO: 1158577 - RNA, 21 nt, Human
aagaaaaaaaggaggaaagag

SEQ ID NO: 1158578 - RNA, 23 nt, Human
aagaaaaaaaggaggaaagagaa

SEQ ID NO: 1158579 - RNA, 19 nt, Human
aagaaacacaaaggacaag

SEQ ID NO: 1158580 - RNA, 19 nt, Human
aagaacaaaaagaagaagg

SEQ ID NO: 1158581 - RNA, 22 nt, Human
aagagaaaagcaaaucaccagg

SEQ ID NO: 1158582 - RNA, 21 nt, Human
aagaggaaacagguaaacaaa

SEQ ID NO: 1158583 - RNA, 20 nt, Human
aagcagaagguggcggccuu

SEQ ID NO: 1158584 - RNA, 21 nt, Human
aagcugaagaggucuaugugg

SEQ ID NO: 1158585 - RNA, 21 nt, Human
aaggacagauggcugacuugg

SEQ ID NO: 1158586 - RNA, 20 nt, Human
aaggauggaggaacagagcu

SEQ ID NO: 1158587 - RNA, 21 nt, Human
aaguaaauaggccauuaaaua

SEQ ID NO: 1158588 - RNA, 21 nt, Human
aaguaauucucccacuucagc

SEQ ID NO: 1158589 - RNA, 25 nt, Human
aaguaauucucccacuucagccucc

SEQ ID NO: 1158590 - RNA, 24 nt, Human
aagugggaggcagcacuuucuggg

SEQ ID NO: 1158591 - RNA, 26 nt, Human
aaguguugggguuacaggugugagcc

SEQ ID NO: 1158592 - RNA, 19 nt, Human
aaucauggcucacugcagc

SEQ ID NO: 1158593 - RNA, 20 nt, Human
aaugacaggaguaggagaga

SEQ ID NO: 1158594 - RNA, 24 nt, Human
aaugacaggaguaggagagagaga

SEQ ID NO: 1158595 - RNA, 19 nt, Human
accaaagagugccccugau

SEQ ID NO: 1158596 - RNA, 19 nt, Human
accacgcccaguugguaca

SEQ ID NO: 1158597 - RNA, 24 nt, Human
accauguugcccaggcuggucucg

SEQ ID NO: 1158598 - RNA, 25 nt, Human
accauguugcccaggcuggucucga

SEQ ID NO: 1158599 - RNA, 19 nt, Human
accgggugcugucaagagc

SEQ ID NO: 1158600 - RNA, 22 nt, Human
accugaaugccugcccugcucu

SEQ ID NO: 1158601 - RNA, 18 nt, Human
acggaguuucaccauguu

SEQ ID NO: 1158602 - RNA, 19 nt, Human
acggaguuucaccauguug

SEQ ID NO: 1158603 - RNA, 24 nt, Human
acggaguuucaccauguugcccag

SEQ ID NO: 1158604 - RNA, 22 nt, Human
acucaguuuuucuaucaggauu

SEQ ID NO: 1158605 - RNA, 24 nt, Human
acugcagccucaaccucccugggc

SEQ ID NO: 1158606 - RNA, 23 nt, Human
acuucagccuccugaguugcugg

SEQ ID NO: 1158607 - RNA, 19 nt, Human
acuuuagccucucaggagu

SEQ ID NO: 1158608 - RNA, 19 nt, Human
agaaaaaaaggaggaaaga

SEQ ID NO: 1158609 - RNA, 24 nt, Human
agaaaacuacucccagccuccucc

SEQ ID NO: 1158610 - RNA, 19 nt, Human
agaaaagcaaaucaccagg

SEQ ID NO: 1158611 - RNA, 23 nt, Human
agaacaaaaagaacccuuugaag

SEQ ID NO: 1158612 - RNA, 23 nt, Human
agaagaaaaaaaggaggaaagag

SEQ ID NO: 1158613 - RNA, 19 nt, Human
agaagcuacuuccaaccug

SEQ ID NO: 1158614 - RNA, 22 nt, Human
agagaacugcuaagccaugaug

SEQ ID NO: 1158615 - RNA, 23 nt, Human
agagagagagcaagcuacaggga

SEQ ID NO: 1158616 - RNA, 19 nt, Human
agagauaaagagauggaca

SEQ ID NO: 1158617 - RNA, 22 nt, Human
agagauggacagaaggagaucc

SEQ ID NO: 1158618 - RNA, 20 nt, Human
agaggacagggugagggcug

SEQ ID NO: 1158619 - RNA, 23 nt, Human
agauggagaggacagggugaggg

SEQ ID NO: 1158620 - RNA, 24 nt, Human
agccaguuuuuuuuuuauagagcc

SEQ ID NO: 1158621 - RNA, 19 nt, Human
agccucaaccucccugggc

SEQ ID NO: 1158622 - RNA, 20 nt, Human
aggaaggcaggugcuucggu

SEQ ID NO: 1158623 - RNA, 20 nt, Human
aggagcuguggaaaaaccag

SEQ ID NO: 1158624 - RNA, 22 nt, Human
aggagcuguggaaaaaccagca

SEQ ID NO: 1158625 - RNA, 19 nt, Human
aggcaacagauacacaaac

SEQ ID NO: 1158626 - RNA, 20 nt, Human
aggcaacagauacacaaaca

SEQ ID NO: 1158627 - RNA, 21 nt, Human
aggcaaggguuaauucacaua

SEQ ID NO: 1158628 - RNA, 19 nt, Human
aggcagugugcugguagga

SEQ ID NO: 1158629 - RNA, 21 nt, Human
aggccagaacaaaaagaaccc

SEQ ID NO: 1158630 - RNA, 24 nt, Human
aggcuccuucacauaugucaccuu

SEQ ID NO: 1158631 - RNA, 22 nt, Human
agggacaagaaaaaaaaccgaa

SEQ ID NO: 1158632 - RNA, 19 nt, Human
agggacugacagggaccuc

SEQ ID NO: 1158633 - RNA, 18 nt, Human
agggaggggagaacugga

SEQ ID NO: 1158634 - RNA, 22 nt, Human
agggcuguuaaaagggauagag

SEQ ID NO: 1158635 - RNA, 21 nt, Human
agguaaacaaaucaggagguu

SEQ ID NO: 1158636 - RNA, 23 nt, Human
aguacaguggcacaaucauggcu

SEQ ID NO: 1158637 - RNA, 23 nt, Human
agugugagaggccccaggaagaa

SEQ ID NO: 1158638 - RNA, 18 nt, Human
aucaucucggagggggac

SEQ ID NO: 1158639 - RNA, 18 nt, Human
auccaccucccuguccca

SEQ ID NO: 1158640 - RNA, 19 nt, Human
aucgcuuugcaccaugaga

SEQ ID NO: 1158641 - RNA, 24 nt, Human
auggcugcuucuucgcugacccag

SEQ ID NO: 1158642 - RNA, 24 nt, Human
auggggaggaagccccacugggug

SEQ ID NO: 1158643 - RNA, 19 nt, Human
auuauauuuuacaacugca

SEQ ID NO: 1158644 - RNA, 26 nt, Human
auuucaccagcuacuacccccucacu

SEQ ID NO: 1158645 - RNA, 20 nt, Human
caacagauacacaaacaacu

SEQ ID NO: 1158646 - RNA, 21 nt, Human
caacagauacacaaacaacua

SEQ ID NO: 1158647 - RNA, 19 nt, Human
caacuaaauuguuccugca

SEQ ID NO: 1158648 - RNA, 24 nt, Human
caagaaaggcaacagauacacaaa

SEQ ID NO: 1158649 - RNA, 20 nt, Human
caagcugaacgugacaucug

SEQ ID NO: 1158650 - RNA, 20 nt, Human
caaguaccaugggcccuugg

SEQ ID NO: 1158651 - RNA, 24 nt, Human
caaugaccaguaacugccaaugcc

SEQ ID NO: 1158652 - RNA, 30 nt, Human
cacaccuguaaucuggcauuaucgcuuugg

SEQ ID NO: 1158653 - RNA, 24 nt, Human
cacagagcagacccucaaagggga

SEQ ID NO: 1158654 - RNA, 18 nt, Human
cacagcaccuucagccuc

SEQ ID NO: 1158655 - RNA, 22 nt, Human
cacaggcauaugccaccaugcc

SEQ ID NO: 1158656 - RNA, 18 nt, Human
cacaucuccaaacaaagc

SEQ ID NO: 1158657 - RNA, 23 nt, Human
cacaucuccaaacaaagccucug

SEQ ID NO: 1158658 - RNA, 21 nt, Human
caccaugagaagcuacuucca

SEQ ID NO: 1158659 - RNA, 24 nt, Human
caccaugccuggcuaauuuuugua

SEQ ID NO: 1158660 - RNA, 24 nt, Human
caccauguugcccaggcuggucuc

SEQ ID NO: 1158661 - RNA, 24 nt, Human
cacccuuugauuucaucuccaggg

SEQ ID NO: 1158662 - RNA, 24 nt, Human
caccucaacuucccaaaguguugg

SEQ ID NO: 1158663 - RNA, 25 nt, Human
cagaaaacuacucccagccuccucc

SEQ ID NO: 1158664 - RNA, 21 nt, Human
cagaaaccagcagccuuacaa

SEQ ID NO: 1158665 - RNA, 19 nt, Human
cagaacaaaaagaacccuu

SEQ ID NO: 1158666 - RNA, 19 nt, Human
cagaacaaaaagaacccuu

SEQ ID NO: 1158667 - RNA, 19 nt, Human
cagaaggagauccagaaau

SEQ ID NO: 1158668 - RNA, 22 nt, Human
cagagggcagugguaaaacccc

SEQ ID NO: 1158669 - RNA, 19 nt, Human
cagauacacaaacaacuaa

SEQ ID NO: 1158670 - RNA, 18 nt, Human
cagcaaagggacugacag

SEQ ID NO: 1158671 - RNA, 21 nt, Human
cagcccgaggagcuguggaaa

SEQ ID NO: 1158672 - RNA, 24 nt, Human
cagccucaaccucccugggcuuaa

SEQ ID NO: 1158673 - RNA, 25 nt, Human
cagccucaaccucccugggcuuaag

SEQ ID NO: 1158674 - RNA, 20 nt, Human
cagccuccugaguugcuggg

SEQ ID NO: 1158675 - RNA, 21 nt, Human
cauaugguucagauugcuugu

SEQ ID NO: 1158676 - RNA, 28 nt, Human
caucuccaaacaaagccucugcaggaca

SEQ ID NO: 1158677 - RNA, 24 nt, Human
cauguugcccaggcuggucucgaa

SEQ ID NO: 1158678 - RNA, 23 nt, Human
cauucccauuuuauagauaagga

SEQ ID NO: 1158679 - RNA, 26 nt, Human
ccaaagcucugacucaugcauucugg

SEQ ID NO: 1158680 - RNA, 20 nt, Human
ccaaaguguugggguuacag

SEQ ID NO: 1158681 - RNA, 21 nt, Human
ccaaaguguugggguuacagg

SEQ ID NO: 1158682 - RNA, 24 nt, Human
ccaaaguguugggguuacaggugu

SEQ ID NO: 1158683 - RNA, 21 nt, Human
ccacaaaagaaacacaaagga

SEQ ID NO: 1158684 - RNA, 20 nt, Human
ccacgcccaguugguacaga

SEQ ID NO: 1158685 - RNA, 21 nt, Human
cccaaauaucucccccagugc

SEQ ID NO: 1158686 - RNA, 21 nt, Human
cccagcaagcccuauucucuc

SEQ ID NO: 1158687 - RNA, 20 nt, Human
cccaggugcuuggugcaucc

SEQ ID NO: 1158688 - RNA, 19 nt, Human
cccaugccaggacuugggg

SEQ ID NO: 1158689 - RNA, 23 nt, Human
ccccaggaccucucuuggaaccc

SEQ ID NO: 1158690 - RNA, 22 nt, Human
cccccagugcccuccuagcccu

SEQ ID NO: 1158691 - RNA, 19 nt, Human
ccccuggcucgcugugugg

SEQ ID NO: 1158692 - RNA, 20 nt, Human
ccgcagcucagaugcaggcc

SEQ ID NO: 1158693 - RNA, 21 nt, Human
ccgcagcucagaugcaggccu

SEQ ID NO: 1158694 - RNA, 18 nt, Human
ccucaaggaccgacgucu

SEQ ID NO: 1158695 - RNA, 23 nt, Human
ccugaguugcugggaccacaggc

SEQ ID NO: 1158696 - RNA, 20 nt, Human
ccugauuugaccuuugaggc

SEQ ID NO: 1158697 - RNA, 18 nt, Human
ccugcuggauuccauuca

SEQ ID NO: 1158698 - RNA, 22 nt, Human
ccugggcucaagugaucugccc

SEQ ID NO: 1158699 - RNA, 24 nt, Human
ccugggcucaagugaucugcccac

SEQ ID NO: 1158700 - RNA, 23 nt, Human
ccuuguucugucacucaggcugg

SEQ ID NO: 1158701 - RNA, 24 nt, Human
ccuuguucugucacucaggcugga

SEQ ID NO: 1158702 - RNA, 23 nt, Human
cgaaguaaauaggccauuaaaua

SEQ ID NO: 1158703 - RNA, 21 nt, Human
cgaggagcuguggaaaaacca

SEQ ID NO: 1158704 - RNA, 18 nt, Human
cgcccaguugguacagaa

SEQ ID NO: 1158705 - RNA, 24 nt, Human
cggaguuucaccauguugcccagg

SEQ ID NO: 1158706 - RNA, 24 nt, Human
cucaaggaccgacgucuuguucau

SEQ ID NO: 1158707 - RNA, 24 nt, Human
cucaagugaucugcccaccucaac

SEQ ID NO: 1158708 - RNA, 21 nt, Human
cucacugcagccucaaccucc

SEQ ID NO: 1158709 - RNA, 24 nt, Human
cucaguuuuucuaucaggauuagg

SEQ ID NO: 1158710 - RNA, 19 nt, Human
cucaugcauucugggggcc

SEQ ID NO: 1158711 - RNA, 22 nt, Human
cuccaggucucuuuuuucugag

SEQ ID NO: 1158712 - RNA, 18 nt, Human
cuccugaguugcugggac

SEQ ID NO: 1158713 - RNA, 24 nt, Human
cuccugaguugcugggaccacagg

SEQ ID NO: 1158714 - RNA, 24 nt, Human
cucucucucaccacacauuuccca

SEQ ID NO: 1158715 - RNA, 20 nt, Human
cucugugucaggcccaugcc

SEQ ID NO: 1158716 - RNA, 23 nt, Human
cugacccauuagcucccucucag

SEQ ID NO: 1158717 - RNA, 21 nt, Human
cugacucaugcauucuggggg

SEQ ID NO: 1158718 - RNA, 24 nt, Human
cugaguugcugggaccacaggcau

SEQ ID NO: 1158719 - RNA, 21 nt, Human
cugaucaagcugaacgugaca

SEQ ID NO: 1158720 - RNA, 24 nt, Human
cugcagccucaaccucccugggcu

SEQ ID NO: 1158721 - RNA, 22 nt, Human
cugggcccucccgcagcucaga

SEQ ID NO: 1158722 - RNA, 20 nt, Human
cuguggaaaaaccagcaaag

SEQ ID NO: 1158723 - RNA, 21 nt, Human
cuguuccugugacccgggucu

SEQ ID NO: 1158724 - RNA, 21 nt, Human
cuuccaaccugucaagaucug

SEQ ID NO: 1158725 - RNA, 20 nt, Human
cuuggggcaugccaugaagg

SEQ ID NO: 1158726 - RNA, 24 nt, Human
cuuguucugucacucaggcuggag

SEQ ID NO: 1158727 - RNA, 20 nt, Human
cuuucucucucucucucuca

SEQ ID NO: 1158728 - RNA, 20 nt, Human
gaaaacuacucccagccucc

SEQ ID NO: 1158729 - RNA, 24 nt, Human
gaagaaaaaaaggaggaaagagaa

SEQ ID NO: 1158730 - RNA, 18 nt, Human
gacaagaaaaaaaaccga

SEQ ID NO: 1158731 - RNA, 19 nt, Human
gagaacugcuaagccauga

SEQ ID NO: 1158732 - RNA, 21 nt, Human
gagaacugcuaagccaugaug

SEQ ID NO: 1158733 - RNA, 23 nt, Human
gagagagagagagagcaagcuac

SEQ ID NO: 1158734 - RNA, 20 nt, Human
gagagggacaagaaaaaaaa

SEQ ID NO: 1158735 - RNA, 19 nt, Human
gagauccagaaauaaaaag

SEQ ID NO: 1158736 - RNA, 22 nt, Human
gaggaacagagcuugcuuucua

SEQ ID NO: 1158737 - RNA, 21 nt, Human
gagguaagaugaagcuaacaa

SEQ ID NO: 1158738 - RNA, 23 nt, Human
gaguugcugggaccacaggcaua

SEQ ID NO: 1158739 - RNA, 28 nt, Human
gauggcaagaauguaacaucacagaggu

SEQ ID NO: 1158740 - RNA, 24 nt, Human
gcccaucagcccgaggagcugugg

SEQ ID NO: 1158741 - RNA, 24 nt, Human
gcccugugguugggcugggguccc

SEQ ID NO: 1158742 - RNA, 23 nt, Human
gcuaacaagggcugcccugucuu

SEQ ID NO: 1158743 - RNA, 21 nt, Human
gcucacugcagccucaaccuc

SEQ ID NO: 1158744 - RNA, 19 nt, Human
gcuggaguacaguggcaca

SEQ ID NO: 1158745 - RNA, 20 nt, Human
gcuguggaaaaaccagcaaa

SEQ ID NO: 1158746 - RNA, 24 nt, Human
gcuguggaaaaaccagcaaaggga

SEQ ID NO: 1158747 - RNA, 23 nt, Human
ggaagaaucccuuguccccagga

SEQ ID NO: 1158748 - RNA, 21 nt, Human
ggaaggauggaggaacagagc

SEQ ID NO: 1158749 - RNA, 24 nt, Human
ggaccacaggccagaacaaaaaga

SEQ ID NO: 1158750 - RNA, 18 nt, Human
ggagaacuggaggugguc

SEQ ID NO: 1158751 - RNA, 23 nt, Human
ggagagagagagagagagagagc

SEQ ID NO: 1158752 - RNA, 23 nt, Human
ggaguuucaccauguugcccagg

SEQ ID NO: 1158753 - RNA, 20 nt, Human
ggaucccccucacucaccuu

SEQ ID NO: 1158754 - RNA, 24 nt, Human
gggauagagggaggggagaacugg

SEQ ID NO: 1158755 - RNA, 18 nt, Human
gggcucaagugaucugcc

SEQ ID NO: 1158756 - RNA, 24 nt, Human
gggcucaagugaucugcccaccuc

SEQ ID NO: 1158757 - RNA, 19 nt, Human
ggucuaugugggccagccc

SEQ ID NO: 1158758 - RNA, 18 nt, Human
gguuacaggugugagcca

SEQ ID NO: 1158759 - RNA, 24 nt, Human
guauaauuucaccagcuacuaccc

SEQ ID NO: 1158760 - RNA, 18 nt, Human
gucccacaaaagaaacac

SEQ ID NO: 1158761 - RNA, 22 nt, Human
gucuuguucaucccugugccca

SEQ ID NO: 1158762 - RNA, 24 nt, Human
gugaucugcccaccucaacuuccc

SEQ ID NO: 1158763 - RNA, 21 nt, Human
guggaggaaucuggagaaagg

SEQ ID NO: 1158764 - RNA, 24 nt, Human
guuucaccauguugcccaggcugg

SEQ ID NO: 1158765 - RNA, 22 nt, Human
uaaaaagagcaacagauggaga

SEQ ID NO: 1158766 - RNA, 20 nt, Human
uaagaggaaacagguaaaca

SEQ ID NO: 1158767 - RNA, 18 nt, Human
uaaggcggacaagguucc

SEQ ID NO: 1158768 - RNA, 20 nt, Human
uaauucucccacuucagccu

SEQ ID NO: 1158769 - RNA, 19 nt, Human
uacaaagaacaaaaagaag

SEQ ID NO: 1158770 - RNA, 20 nt, Human
uacagaguccauugauguuu

SEQ ID NO: 1158771 - RNA, 24 nt, Human
uacaggugugagccaccacgccca

SEQ ID NO: 1158772 - RNA, 23 nt, Human
uacaguggcacaaucauggcuca

SEQ ID NO: 1158773 - RNA, 20 nt, Human
uaccccccacuaauacacac

SEQ ID NO: 1158774 - RNA, 22 nt, Human
uaccgggugcugucaagagcca

SEQ ID NO: 1158775 - RNA, 22 nt, Human
uagagacggaguuucaccaugu

SEQ ID NO: 1158776 - RNA, 19 nt, Human
uaggagggaugcaaugaua

SEQ ID NO: 1158777 - RNA, 20 nt, Human
uagggagagggacaagaaaa

SEQ ID NO: 1158778 - RNA, 25 nt, Human
uaugugggccagcccugugguuggg

SEQ ID NO: 1158779 - RNA, 21 nt, Human
uauuguguucauuuuuuuucu

SEQ ID NO: 1158780 - RNA, 25 nt, Human
uauuuuacaacugcauuaguauaaa

SEQ ID NO: 1158781 - RNA, 25 nt, Human
uauuuugguuuuuuuuguagagacg

SEQ ID NO: 1158782 - RNA, 18 nt, Human
ucaccacacauuucccag

SEQ ID NO: 1158783 - RNA, 25 nt, Human
ucacugcagccucaaccucccuggg

SEQ ID NO: 1158784 - RNA, 23 nt, Human
ucagauugcuugucuacacaguc

SEQ ID NO: 1158785 - RNA, 26 nt, Human
ucagcccccaggaaggcaggugcuuc

SEQ ID NO: 1158786 - RNA, 19 nt, Human
ucaggccauggggacugga

SEQ ID NO: 1158787 - RNA, 25 nt, Human
ucaucuccagggugcccaaugcacc

SEQ ID NO: 1158788 - RNA, 21 nt, Human
uccagaaauaaaaagagcaac

SEQ ID NO: 1158789 - RNA, 23 nt, Human
uccagaaauaaaaagagcaacag

SEQ ID NO: 1158790 - RNA, 25 nt, Human
uccagaaauaaaaagagcaacagau

SEQ ID NO: 1158791 - RNA, 20 nt, Human
uccagagaagccuucugccc

SEQ ID NO: 1158792 - RNA, 23 nt, Human
ucccaaaguguugggguuacagg

SEQ ID NO: 1158793 - RNA, 22 nt, Human
ucccagaaugauuuuuccugcc

SEQ ID NO: 1158794 - RNA, 20 nt, Human
ucccagacuguggcuucuuc

SEQ ID NO: 1158795 - RNA, 21 nt, Human
ucccaggugcuuggugcaucc

SEQ ID NO: 1158796 - RNA, 21 nt, Human
ucccauggcugcuucuucgcu

SEQ ID NO: 1158797 - RNA, 22 nt, Human
ucccuagagacuaguccgacuc

SEQ ID NO: 1158798 - RNA, 20 nt, Human
ucccucugugcuucaacucc

SEQ ID NO: 1158799 - RNA, 22 nt, Human
ucccucugugcuucaacuccag

SEQ ID NO: 1158800 - RNA, 20 nt, Human
ucccugugcccaagucccag

SEQ ID NO: 1158801 - RNA, 18 nt, Human
uccuggcuucauguugcu

SEQ ID NO: 1158802 - RNA, 18 nt, Human
uccugggcucaagugauc

SEQ ID NO: 1158803 - RNA, 20 nt, Human
uccugggcucaagugaucuc

SEQ ID NO: 1158804 - RNA, 20 nt, Human
ucggcagaagaaaaaaagga

SEQ ID NO: 1158805 - RNA, 18 nt, Human
ucggucaagacaaaggag

SEQ ID NO: 1158806 - RNA, 22 nt, Human
ucucgaauuccugggcucaagu

SEQ ID NO: 1158807 - RNA, 18 nt, Human
ucucugccugauuugacc

SEQ ID NO: 1158808 - RNA, 21 nt, Human
ucucugccugauuugaccuuu

SEQ ID NO: 1158809 - RNA, 23 nt, Human
ucugcagcucacuauucugccac

SEQ ID NO: 1158810 - RNA, 21 nt, Human
ucugcccaccucaacuuccca

SEQ ID NO: 1158811 - RNA, 23 nt, Human
ucugcccaucagcccgaggagcu

SEQ ID NO: 1158812 - RNA, 18 nt, Human
ucugucacucaggcugga

SEQ ID NO: 1158813 - RNA, 22 nt, Human
ucuuauccaccucccuguccca

SEQ ID NO: 1158814 - RNA, 23 nt, Human
ucuuauggggaggaagccccacu

SEQ ID NO: 1158815 - RNA, 18 nt, Human
ucuuuuaccaguucccag

SEQ ID NO: 1158816 - RNA, 18 nt, Human
ugaaacuggcucucccag

SEQ ID NO: 1158817 - RNA, 20 nt, Human
ugaaccuuuacccugagaag

SEQ ID NO: 1158818 - RNA, 19 nt, Human
ugacaaaagucagugugag

SEQ ID NO: 1158819 - RNA, 20 nt, Human
ugacaggaguaggagagaga

SEQ ID NO: 1158820 - RNA, 20 nt, Human
ugaccuuugaggccugcugg

SEQ ID NO: 1158821 - RNA, 21 nt, Human
ugacucaaggcaguccaauga

SEQ ID NO: 1158822 - RNA, 22 nt, Human
ugagacaggaccuuguucuguc

SEQ ID NO: 1158823 - RNA, 21 nt, Human
ugaggaucugcucugugucag

SEQ ID NO: 1158824 - RNA, 22 nt, Human
ugaggugacauaucccaggagg

SEQ ID NO: 1158825 - RNA, 23 nt, Human
ugaucugcccaccucaacuuccc

SEQ ID NO: 1158826 - RNA, 24 nt, Human
ugaucugcccaccucaacuuccca

SEQ ID NO: 1158827 - RNA, 23 nt, Human
ugcaaggaaacacgggaauggga

SEQ ID NO: 1158828 - RNA, 23 nt, Human
ugcaggacacauuccucaguuca

SEQ ID NO: 1158829 - RNA, 22 nt, Human
ugcaggcacugagaguagacug

SEQ ID NO: 1158830 - RNA, 18 nt, Human
ugcaugcaaaagccccga

SEQ ID NO: 1158831 - RNA, 24 nt, Human
ugcccaggcuggucucgaauuccu

SEQ ID NO: 1158832 - RNA, 23 nt, Human
ugcccugucuuucugcaugcaaa

SEQ ID NO: 1158833 - RNA, 20 nt, Human
ugccucagauuacaugacca

SEQ ID NO: 1158834 - RNA, 20 nt, Human
ugccugcccugcucuccuga

SEQ ID NO: 1158835 - RNA, 21 nt, Human
ugccugcccugcucuccuggu

SEQ ID NO: 1158836 - RNA, 18 nt, Human
ugcugggaccacaggcau

SEQ ID NO: 1158837 - RNA, 21 nt, Human
ugcugggaccacaggcauaug

SEQ ID NO: 1158838 - RNA, 24 nt, Human
ugcugggaccacaggcauaugcca

SEQ ID NO: 1158839 - RNA, 24 nt, Human
uggaguacaguggcacaaucaugg

SEQ ID NO: 1158840 - RNA, 22 nt, Human
uggcaagaauguaacauuuaga

SEQ ID NO: 1158841 - RNA, 24 nt, Human
uggcacaaucauggcucacugcag

SEQ ID NO: 1158842 - RNA, 24 nt, Human
uggcucacugcagccucaaccucc

SEQ ID NO: 1158843 - RNA, 21 nt, Human
ugggaccacaggcauaugcca

SEQ ID NO: 1158844 - RNA, 24 nt, Human
ugggaccacaggcauaugccacca

SEQ ID NO: 1158845 - RNA, 22 nt, Human
ugggaggcagcacuuucugggg

SEQ ID NO: 1158846 - RNA, 18 nt, Human
ugggcucaagugaucugc

SEQ ID NO: 1158847 - RNA, 24 nt, Human
ugggcucaagugaucugcccaccu

SEQ ID NO: 1158848 - RNA, 19 nt, Human
ugggcugucacugcaagga

SEQ ID NO: 1158849 - RNA, 21 nt, Human
ugggcugucacugcaaggaaa

SEQ ID NO: 1158850 - RNA, 18 nt, Human
ugggguuacaggugugag

SEQ ID NO: 1158851 - RNA, 22 nt, Human
ugggguuacaggugugagccac

SEQ ID NO: 1158852 - RNA, 23 nt, Human
ugggguuacaggugugagccacc

SEQ ID NO: 1158853 - RNA, 24 nt, Human
ugggguuacaggugugagccacca

SEQ ID NO: 1158854 - RNA, 21 nt, Human
uggugacagacugggaguucc

SEQ ID NO: 1158855 - RNA, 24 nt, Human
uguagagacggaguuucaccaugu

SEQ ID NO: 1158856 - RNA, 23 nt, Human
ugucaagagcaaagaagacagau

SEQ ID NO: 1158857 - RNA, 24 nt, Human
uguccagagaagccuucugcccau

SEQ ID NO: 1158858 - RNA, 21 nt, Human
uguccccaggaucccccucac

SEQ ID NO: 1158859 - RNA, 21 nt, Human
ugucuacacaguccaguuucc

SEQ ID NO: 1158860 - RNA, 20 nt, Human
ugucucuuuuaccaguuccc

SEQ ID NO: 1158861 - RNA, 18 nt, Human
ugucuggaagggguggag

SEQ ID NO: 1158862 - RNA, 18 nt, Human
ugucuggaagggguggag

SEQ ID NO: 1158863 - RNA, 20 nt, Human
ugucuuucugcaugcaaaag

SEQ ID NO: 1158864 - RNA, 18 nt, Human
uguggaaaaaccagcaaa

SEQ ID NO: 1158865 - RNA, 22 nt, Human
uguucugucacucaggcuggag

SEQ ID NO: 1158866 - RNA, 21 nt, Human
uuacaaagaacaaaaagaaga

SEQ ID NO: 1158867 - RNA, 19 nt, Human
uuacaggugugagccacca

SEQ ID NO: 1158868 - RNA, 20 nt, Human
uuacaggugugagccaccac

SEQ ID NO: 1158869 - RNA, 24 nt, Human
uuccugcaauuuggcauucauugg

SEQ ID NO: 1158870 - RNA, 22 nt, Human
uucugccacuguuuggccaggg

SEQ ID NO: 1158871 - RNA, 19 nt, Human
uugacugucucugcagcuc

SEQ ID NO: 1158872 - RNA, 25 nt, Human
uugagacaggaccuuguucugucac

SEQ ID NO: 1158873 - RNA, 21 nt, Human
uugaggcaaggguuaauucac

SEQ ID NO: 1158874 - RNA, 21 nt, Human
uugggguuacaggugugagcc

SEQ ID NO: 1158875 - RNA, 23 nt, Human
uugguuuuuuuuguagagacgga

SEQ ID NO: 1158876 - RNA, 24 nt, Human
uuguagagacggaguuucaccaug

SEQ ID NO: 1158877 - RNA, 22 nt, Human
uuguucugucacucaggcugga

SEQ ID NO: 1158878 - RNA, 24 nt, Human
uuguucugucacucaggcuggagu

SEQ ID NO: 1158879 - RNA, 24 nt, Human
uuucaaggguccuaggcccuuuug

SEQ ID NO: 1158880 - RNA, 23 nt, Human
uuucaccauguugcccaggcugg

SEQ ID NO: 1158881 - RNA, 24 nt, Human
uuucaccauguugcccaggcuggu

SEQ ID NO: 1158882 - RNA, 24 nt, Human
uuuguagagacggaguuucaccau

SEQ ID NO: 1158883 - RNA, 24 nt, Human
uuuuuuguagagacggaguuucac

SEQ ID NO: 1158884 - RNA, 18 nt, Human
uuuuuuuguagagacgga

SEQ ID NO: 1158885 - RNA, 22 nt, Human
uuuuuuuuuuugagacaggacc

SEQ ID NO: 1158886 - RNA, 20 nt, Human
uuuuuuuuuuugagacaggg

SEQ ID NO: 1158887 - RNA, 21 nt, Human
uuuuuuuuuuuuuuuuuuugg

SEQ ID NO: 1158888 - RNA, 18 nt, Human
ccagcaccuaucagaggg

SEQ ID NO: 1158889 - RNA, 21 nt, Human
uggcaaguaucccaaaacucc

SEQ ID NO: 1158890 - RNA, 19 nt, Human
aaagcacaugcacugaccc

SEQ ID NO: 1158891 - RNA, 21 nt, Human
aaagcaucggauauuccacag

SEQ ID NO: 1158892 - RNA, 19 nt, Human
aaccccuguggcagagccu

SEQ ID NO: 1158893 - RNA, 24 nt, Human
aaccccuguggcagagccugcgua

SEQ ID NO: 1158894 - RNA, 20 nt, Human
aacuucagcauaccaucacc

SEQ ID NO: 1158895 - RNA, 22 nt, Human
aagcaucggauauuccacagcc

SEQ ID NO: 1158896 - RNA, 21 nt, Human
aagggaccccgcgcccgcacc

SEQ ID NO: 1158897 - RNA, 18 nt, Human
acagagcuuaugacugcc

SEQ ID NO: 1158898 - RNA, 19 nt, Human
acagugcaugauucaaagc

SEQ ID NO: 1158899 - RNA, 24 nt, Human
accacaccauaaagcacaugcacu

SEQ ID NO: 1158900 - RNA, 22 nt, Human
accauaaagcacaugcacugac

SEQ ID NO: 1158901 - RNA, 22 nt, Human
acuccccuuccucuuuaaagac

SEQ ID NO: 1158902 - RNA, 20 nt, Human
acuucagcauaccaucaccg

SEQ ID NO: 1158903 - RNA, 19 nt, Human
aggcuuuggggagaggggg

SEQ ID NO: 1158904 - RNA, 19 nt, Human
agggugggaauucuuugca

SEQ ID NO: 1158905 - RNA, 20 nt, Human
agucaccccacagacauucc

SEQ ID NO: 1158906 - RNA, 22 nt, Human
auaaagcacaguagagucaccc

SEQ ID NO: 1158907 - RNA, 20 nt, Human
auacccuuuuuagaacuggu

SEQ ID NO: 1158908 - RNA, 25 nt, Human
augaucuccaaagaugcaccacacc

SEQ ID NO: 1158909 - RNA, 19 nt, Human
augcaccacaccauaaagc

SEQ ID NO: 1158910 - RNA, 22 nt, Human
caaaauaccggauacccugaau

SEQ ID NO: 1158911 - RNA, 21 nt, Human
caacaagguuuccuauucccu

SEQ ID NO: 1158912 - RNA, 21 nt, Human
cagagcuuaugacugccccuc

SEQ ID NO: 1158913 - RNA, 24 nt, Human
cagcaauuuggucucacaaggcgg

SEQ ID NO: 1158914 - RNA, 21 nt, Human
cagcagcagcaagaggacgag

SEQ ID NO: 1158915 - RNA, 22 nt, Human
cagcagcagcaagaggacgaga

SEQ ID NO: 1158916 - RNA, 26 nt, Human
cagcgagagcagcagcagcaagagga

SEQ ID NO: 1158917 - RNA, 19 nt, Human
caggguucccuccacuccc

SEQ ID NO: 1158918 - RNA, 23 nt, Human
ccccgcgcccgcaccggucccgg

SEQ ID NO: 1158919 - RNA, 18 nt, Human
ccccucugaaccaaaggc

SEQ ID NO: 1158920 - RNA, 19 nt, Human
ccccuguggcagagccugc

SEQ ID NO: 1158921 - RNA, 20 nt, Human
ccgcaagggaccccgcgccc

SEQ ID NO: 1158922 - RNA, 22 nt, Human
ccggccuccuggcucccugccg

SEQ ID NO: 1158923 - RNA, 21 nt, Human
ccuccuggcucccugccgcuc

SEQ ID NO: 1158924 - RNA, 24 nt, Human
ccuguggcagagccugcguaggac

SEQ ID NO: 1158925 - RNA, 18 nt, Human
ccuuuggccauugggcag

SEQ ID NO: 1158926 - RNA, 23 nt, Human
cgagagcagcagcagcaagagga

SEQ ID NO: 1158927 - RNA, 22 nt, Human
cuagugcgggcgcagccauguu

SEQ ID NO: 1158928 - RNA, 18 nt, Human
cuccaaagaugcaccaca

SEQ ID NO: 1158929 - RNA, 23 nt, Human
cuuggaaaaacaaagugcaguac

SEQ ID NO: 1158930 - RNA, 19 nt, Human
gaaaaacaaagugcaguac

SEQ ID NO: 1158931 - RNA, 18 nt, Human
gaaacagagcuuaugacu

SEQ ID NO: 1158932 - RNA, 22 nt, Human
gagcuuaugacugccccucuga

SEQ ID NO: 1158933 - RNA, 22 nt, Human
gcagcagcagcaagaggacgag

SEQ ID NO: 1158934 - RNA, 18 nt, Human
gccgcagccgcaagaacc

SEQ ID NO: 1158935 - RNA, 20 nt, Human
gcguaggacgcgggccuccu

SEQ ID NO: 1158936 - RNA, 26 nt, Human
gcucaggguucccuccacuccccuuc

SEQ ID NO: 1158937 - RNA, 19 nt, Human
ggacuggggaagacuuucc

SEQ ID NO: 1158938 - RNA, 19 nt, Human
ggagagggggaaacagagc

SEQ ID NO: 1158939 - RNA, 20 nt, Human
ggcacuugaggcccaggaag

SEQ ID NO: 1158940 - RNA, 23 nt, Human
ggggagagggggaaacagagcuu

SEQ ID NO: 1158941 - RNA, 21 nt, Human
guaucacucaagguucacaca

SEQ ID NO: 1158942 - RNA, 25 nt, Human
uaaaagauaaagcacaguagaguca

SEQ ID NO: 1158943 - RNA, 20 nt, Human
uaaccccuguggcagagccu

SEQ ID NO: 1158944 - RNA, 19 nt, Human
uacaaaauaccggauaccc

SEQ ID NO: 1158945 - RNA, 22 nt, Human
uaucuagaauuaaacagguuuc

SEQ ID NO: 1158946 - RNA, 19 nt, Human
ucaaaaguaaaauauggug

SEQ ID NO: 1158947 - RNA, 21 nt, Human
ucaccacaccccucuuccgaa

SEQ ID NO: 1158948 - RNA, 23 nt, Human
uccaaagaugcaccacaccauaa

SEQ ID NO: 1158949 - RNA, 18 nt, Human
uccacacaccagcccuag

SEQ ID NO: 1158950 - RNA, 18 nt, Human
uccacacagcagcgagag

SEQ ID NO: 1158951 - RNA, 24 nt, Human
ucuuccgaaaauaauacauaagag

SEQ ID NO: 1158952 - RNA, 20 nt, Human
ugagaaaagcccaauguagg

SEQ ID NO: 1158953 - RNA, 25 nt, Human
ugagaaaagcccaauguaggucaga

SEQ ID NO: 1158954 - RNA, 19 nt, Human
ugauaggggagggcacuug

SEQ ID NO: 1158955 - RNA, 24 nt, Human
uggcagagccugcguaggacgcgg

SEQ ID NO: 1158956 - RNA, 21 nt, Human
uggggagagggggaaacagag

SEQ ID NO: 1158957 - RNA, 23 nt, Human
ugugggauucaucauaacaacgu

SEQ ID NO: 1158958 - RNA, 20 nt, Human
uuaaaagauaaagcacagua

SEQ ID NO: 1158959 - RNA, 21 nt, Human
uuggaaaaacaaagugcagua

SEQ ID NO: 1158960 - RNA, 22 nt, Human
uuuggggagagggggaaacaga

SEQ ID NO: 1158961 - RNA, 18 nt, Human
aaacaaagcggcgauuau

SEQ ID NO: 1158962 - RNA, 21 nt, Human
acacagguauaauucccaaca

SEQ ID NO: 1158963 - RNA, 18 nt, Human
auaaacagcaaguccuuc

SEQ ID NO: 1158964 - RNA, 21 nt, Human
ccaggaccuugugguuuguca

SEQ ID NO: 1158965 - RNA, 21 nt, Human
ccagucucuugagaaacaaag

SEQ ID NO: 1158966 - RNA, 18 nt, Human
cuccaucauuucucaaua

SEQ ID NO: 1158967 - RNA, 28 nt, Human
gaccuugugguuugucacgggacuccgu

SEQ ID NO: 1158968 - RNA, 19 nt, Human
gguguagguggccccagga

SEQ ID NO: 1158969 - RNA, 22 nt, Human
uaggaaggguauucauugaaga

SEQ ID NO: 1158970 - RNA, 23 nt, Human
ugucacgguauugguaaccacac

SEQ ID NO: 1158971 - RNA, 19 nt, Human
uuccaguaauaagauguac

SEQ ID NO: 1158972 - RNA, 21 nt, Human
aaaaaaauaaaauggacaaaa

SEQ ID NO: 1158973 - RNA, 23 nt, Human
aaaaaaauaaaauggacaaaaag

SEQ ID NO: 1158974 - RNA, 21 nt, Human
aaaaggccaggcacgccuaaa

SEQ ID NO: 1158975 - RNA, 24 nt, Human
aaaaggccaggcacgccuaaagua

SEQ ID NO: 1158976 - RNA, 18 nt, Human
aacauggugaaacccagu

SEQ ID NO: 1158977 - RNA, 19 nt, Human
aacauggugaaacccaguc

SEQ ID NO: 1158978 - RNA, 21 nt, Human
aacauggugaaacccagucgc

SEQ ID NO: 1158979 - RNA, 19 nt, Human
aacauggugacacccccuc

SEQ ID NO: 1158980 - RNA, 22 nt, Human
aagacaaauauugaauguucuc

SEQ ID NO: 1158981 - RNA, 26 nt, Human
aagcaagaaacaaagacaggggaccc

SEQ ID NO: 1158982 - RNA, 23 nt, Human
aagcaagaaacaaagacaguuau

SEQ ID NO: 1158983 - RNA, 24 nt, Human
aauugcuugaaccugggaggcgga

SEQ ID NO: 1158984 - RNA, 20 nt, Human
acacagcaagacuccaucuc

SEQ ID NO: 1158985 - RNA, 24 nt, Human
acacagcaagacuccaucucaaaa

SEQ ID NO: 1158986 - RNA, 19 nt, Human
acagaagcaagaaacaaag

SEQ ID NO: 1158987 - RNA, 21 nt, Human
acagaagcaagaaacaaagac

SEQ ID NO: 1158988 - RNA, 19 nt, Human
accacugcacuccagccug

SEQ ID NO: 1158989 - RNA, 24 nt, Human
acccccucucuacuaaaaauacaa

SEQ ID NO: 1158990 - RNA, 26 nt, Human
acuccagcucuuucucuuugggccgc

SEQ ID NO: 1158991 - RNA, 18 nt, Human
acugcacuccagccuggg

SEQ ID NO: 1158992 - RNA, 26 nt, Human
acugcacuccagccugggugacacag

SEQ ID NO: 1158993 - RNA, 20 nt, Human
agaagcaagaaacaaagaca

SEQ ID NO: 1158994 - RNA, 23 nt, Human
agaaguucaagaucacccuggcc

SEQ ID NO: 1158995 - RNA, 19 nt, Human
agaauacauuuagauacaa

SEQ ID NO: 1158996 - RNA, 21 nt, Human
agacaaauauugaauguucuc

SEQ ID NO: 1158997 - RNA, 19 nt, Human
agaggccaaggugagcggu

SEQ ID NO: 1158998 - RNA, 21 nt, Human
agcaaaaaacccauaaccuga

SEQ ID NO: 1158999 - RNA, 24 nt, Human
agcacuuugggagaccaagguggg

SEQ ID NO: 1159000 - RNA, 19 nt, Human
agccugggcaacaugguga

SEQ ID NO: 1159001 - RNA, 22 nt, Human
agccugggcaacauggugaaac

SEQ ID NO: 1159002 - RNA, 24 nt, Human
agccugggcaacauggugaaaccc

SEQ ID NO: 1159003 - RNA, 22 nt, Human
agccugggugacacagcaagac

SEQ ID NO: 1159004 - RNA, 24 nt, Human
agccugggugacacagcaagacuc

SEQ ID NO: 1159005 - RNA, 23 nt, Human
agcugagcaugguggcacucgcc

SEQ ID NO: 1159006 - RNA, 18 nt, Human
agcugggugugguggugc

SEQ ID NO: 1159007 - RNA, 23 nt, Human
aggaguucaagaccagccugggc

SEQ ID NO: 1159008 - RNA, 22 nt, Human
aggcaggagaauugcuugaacc

SEQ ID NO: 1159009 - RNA, 24 nt, Human
aggcaggagaauugcuugaaccug

SEQ ID NO: 1159010 - RNA, 19 nt, Human
aggcggagguugcacugag

SEQ ID NO: 1159011 - RNA, 24 nt, Human
aggcggagguugcacugagucgag

SEQ ID NO: 1159012 - RNA, 21 nt, Human
aggcugaggcaggagaauugc

SEQ ID NO: 1159013 - RNA, 24 nt, Human
aggcugaggcaggagaauugcuug

SEQ ID NO: 1159014 - RNA, 21 nt, Human
agggaaacagggucuucacaa

SEQ ID NO: 1159015 - RNA, 23 nt, Human
agguggguggaucacaaggucag

SEQ ID NO: 1159016 - RNA, 24 nt, Human
agguggguggaucacaaggucaga

SEQ ID NO: 1159017 - RNA, 20 nt, Human
aggugguuacaaggcuggga

SEQ ID NO: 1159018 - RNA, 23 nt, Human
aguaccugcacuuugagaggcca

SEQ ID NO: 1159019 - RNA, 24 nt, Human
aguggcucacaccuguaaucccag

SEQ ID NO: 1159020 - RNA, 25 nt, Human
auaaaauggacaaaaaggccaggca

SEQ ID NO: 1159021 - RNA, 22 nt, Human
aucccagcacuuugggagacca

SEQ ID NO: 1159022 - RNA, 24 nt, Human
aucgcaccacugcacuccagccug

SEQ ID NO: 1159023 - RNA, 22 nt, Human
aucuccuccaccucucucucuu

SEQ ID NO: 1159024 - RNA, 23 nt, Human
augugccugcuccugcuuugcuu

SEQ ID NO: 1159025 - RNA, 23 nt, Human
caaaaaacccauaaccugauuaa

SEQ ID NO: 1159026 - RNA, 20 nt, Human
caacauggugaaacccaguc

SEQ ID NO: 1159027 - RNA, 24 nt, Human
caacauggugaaacccagucgcua

SEQ ID NO: 1159028 - RNA, 21 nt, Human
caagacuccaucucaaaaaaa

SEQ ID NO: 1159029 - RNA, 18 nt, Human
caagaucacccuggccaa

SEQ ID NO: 1159030 - RNA, 24 nt, Human
caagaucacccuggccaacauggu

SEQ ID NO: 1159031 - RNA, 24 nt, Human
caagccuagaaagacaaauauuga

SEQ ID NO: 1159032 - RNA, 21 nt, Human
caaggugagcggaucacuuga

SEQ ID NO: 1159033 - RNA, 24 nt, Human
caagguggguggaucacaagguca

SEQ ID NO: 1159034 - RNA, 18 nt, Human
cacaccuguaaucccagc

SEQ ID NO: 1159035 - RNA, 24 nt, Human
cacaccuguaaucccagcacuuug

SEQ ID NO: 1159036 - RNA, 20 nt, Human
cacagcuagggaaacagggu

SEQ ID NO: 1159037 - RNA, 19 nt, Human
caccagaaaaacaggcagu

SEQ ID NO: 1159038 - RNA, 23 nt, Human
caccagaaaaacaggcagugaau

SEQ ID NO: 1159039 - RNA, 21 nt, Human
caccucucucucuugcucucu

SEQ ID NO: 1159040 - RNA, 23 nt, Human
caccuguaaucccagcacuuugg

SEQ ID NO: 1159041 - RNA, 24 nt, Human
caccuguaaucccagcacuuuggg

SEQ ID NO: 1159042 - RNA, 21 nt, Human
caccuguaaucccagcuacuc

SEQ ID NO: 1159043 - RNA, 24 nt, Human
caccuguaaucccagcuacucagg

SEQ ID NO: 1159044 - RNA, 22 nt, Human
cacuccagccugggugacacag

SEQ ID NO: 1159045 - RNA, 23 nt, Human
cacuccagccugggugacacagc

SEQ ID NO: 1159046 - RNA, 19 nt, Human
cacugcacuccagccuggg

SEQ ID NO: 1159047 - RNA, 19 nt, Human
cacugcacuccagccuggg

SEQ ID NO: 1159048 - RNA, 22 nt, Human
cacugcacuccagccuggguga

SEQ ID NO: 1159049 - RNA, 23 nt, Human
cacugcacuccagccugggugac

SEQ ID NO: 1159050 - RNA, 24 nt, Human
cacugcacuccagccugggugaca

SEQ ID NO: 1159051 - RNA, 19 nt, Human
cagaagcaagaaacaaaga

SEQ ID NO: 1159052 - RNA, 25 nt, Human
cagaagccaagcaaugcuggugcca

SEQ ID NO: 1159053 - RNA, 24 nt, Human
cagaauauauaaggaacucaaaca

SEQ ID NO: 1159054 - RNA, 24 nt, Human
cagcacuuugggagaccaaggugg

SEQ ID NO: 1159055 - RNA, 24 nt, Human
cagcuacucaggaggcugaggcag

SEQ ID NO: 1159056 - RNA, 18 nt, Human
cagcuagggaaacagggu

SEQ ID NO: 1159057 - RNA, 18 nt, Human
caggauguggaagcccag

SEQ ID NO: 1159058 - RNA, 23 nt, Human
caggcugggcgcaguggcucaca

SEQ ID NO: 1159059 - RNA, 24 nt, Human
cauauuacagaagcaagaaacaaa

SEQ ID NO: 1159060 - RNA, 20 nt, Human
ccacugcacuccagccuggg

SEQ ID NO: 1159061 - RNA, 20 nt, Human
ccacugcacuccagccuggg

SEQ ID NO: 1159062 - RNA, 20 nt, Human
ccacugcacuccagccuggg

SEQ ID NO: 1159063 - RNA, 21 nt, Human
ccacugcacuccagccugggu

SEQ ID NO: 1159064 - RNA, 21 nt, Human
ccacugcacuccagccugggu

SEQ ID NO: 1159065 - RNA, 23 nt, Human
ccacugcacuccagccuggguga

SEQ ID NO: 1159066 - RNA, 23 nt, Human
ccacugcacuccagccuggguga

SEQ ID NO: 1159067 - RNA, 24 nt, Human
ccacugcacuccagccugggugac

SEQ ID NO: 1159068 - RNA, 25 nt, Human
ccacugcacuccagccugggugaca

SEQ ID NO: 1159069 - RNA, 18 nt, Human
ccagucagauuaacaucc

SEQ ID NO: 1159070 - RNA, 21 nt, Human
ccccagaagccaagcaaugcu

SEQ ID NO: 1159071 - RNA, 19 nt, Human
ccugggaggcggagguugc

SEQ ID NO: 1159072 - RNA, 22 nt, Human
ccugggcaacauggugaaaccc

SEQ ID NO: 1159073 - RNA, 23 nt, Human
ccugggcaacauggugaaaccca

SEQ ID NO: 1159074 - RNA, 22 nt, Human
ccugggugacacagcaagacuc

SEQ ID NO: 1159075 - RNA, 24 nt, Human
ccugggugacacagcaagacucca

SEQ ID NO: 1159076 - RNA, 21 nt, Human
ccuguaaucccagcuacucag

SEQ ID NO: 1159077 - RNA, 21 nt, Human
cgcaccacugcacuccagccu

SEQ ID NO: 1159078 - RNA, 21 nt, Human
cgcuacaaaaaauacaaaaag

SEQ ID NO: 1159079 - RNA, 24 nt, Human
cggaucacuugagcacaggaguuc

SEQ ID NO: 1159080 - RNA, 24 nt, Human
cggcccagucagauuaacauccaa

SEQ ID NO: 1159081 - RNA, 20 nt, Human
cuagccaccagaaaaacagg

SEQ ID NO: 1159082 - RNA, 23 nt, Human
cucaaaaaaauaaaauggacaaa

SEQ ID NO: 1159083 - RNA, 19 nt, Human
cucaaacaauucaauagca

SEQ ID NO: 1159084 - RNA, 22 nt, Human
cucacaccuguaaucccagcac

SEQ ID NO: 1159085 - RNA, 24 nt, Human
cucacaccuguaaucccagcacuu

SEQ ID NO: 1159086 - RNA, 21 nt, Human
cuccagcucuuucucuuucuc

SEQ ID NO: 1159087 - RNA, 21 nt, Human
cugagguggaaugaucacuug

SEQ ID NO: 1159088 - RNA, 21 nt, Human
cugcuccugcuuugcuuucug

SEQ ID NO: 1159089 - RNA, 21 nt, Human
cuguaaucccagcuacucagg

SEQ ID NO: 1159090 - RNA, 23 nt, Human
cuugcagcugcacagcuagggaa

SEQ ID NO: 1159091 - RNA, 22 nt, Human
gaaacccagucgcuacaaaaaa

SEQ ID NO: 1159092 - RNA, 21 nt, Human
gaaauaagccaagccuagagg

SEQ ID NO: 1159093 - RNA, 18 nt, Human
gaagggaaggggagagua

SEQ ID NO: 1159094 - RNA, 20 nt, Human
gacacagcaagacuccaucu

SEQ ID NO: 1159095 - RNA, 20 nt, Human
gacaggcugggcgcaguggc

SEQ ID NO: 1159096 - RNA, 21 nt, Human
gacaggcugggcgcaguggcu

SEQ ID NO: 1159097 - RNA, 23 nt, Human
gagaauugcuugaaccugggagg

SEQ ID NO: 1159098 - RNA, 23 nt, Human
gagaucgcaccacugcacuccag

SEQ ID NO: 1159099 - RNA, 23 nt, Human
gagguugcacugagucgagaucg

SEQ ID NO: 1159100 - RNA, 24 nt, Human
gaucacaaggucagaaguucaaga

SEQ ID NO: 1159101 - RNA, 24 nt, Human
gaucacuugagcacaggaguucaa

SEQ ID NO: 1159102 - RNA, 22 nt, Human
gaucacuugagcccaggaugug

SEQ ID NO: 1159103 - RNA, 24 nt, Human
gaugugccugcuccugcuuugcuu

SEQ ID NO: 1159104 - RNA, 20 nt, Human
gcaccacugcacuccagccu

SEQ ID NO: 1159105 - RNA, 20 nt, Human
gcacuuugagaggccaaggu

SEQ ID NO: 1159106 - RNA, 22 nt, Human
gccaacauggugacacccccuc

SEQ ID NO: 1159107 - RNA, 25 nt, Human
gcccugaacaaagaguuaaguuagc

SEQ ID NO: 1159108 - RNA, 21 nt, Human
gcuacaaaaaauacaaaaaaa

SEQ ID NO: 1159109 - RNA, 22 nt, Human
gcuuccuguacagucugcagaa

SEQ ID NO: 1159110 - RNA, 21 nt, Human
ggacaggcugggcgcaguggc

SEQ ID NO: 1159111 - RNA, 21 nt, Human
ggacugagcccugaacaaaga

SEQ ID NO: 1159112 - RNA, 24 nt, Human
ggagguugcacugagucgagaucg

SEQ ID NO: 1159113 - RNA, 23 nt, Human
ggaucacuugagcacaggaguuc

SEQ ID NO: 1159114 - RNA, 19 nt, Human
ggcaucuccuccaccucuc

SEQ ID NO: 1159115 - RNA, 23 nt, Human
ggcgcaguggcucacaccuguaa

SEQ ID NO: 1159116 - RNA, 22 nt, Human
ggugaaacccagucgcuacaaa

SEQ ID NO: 1159117 - RNA, 23 nt, Human
gguggaucacaaggucagaaguu

SEQ ID NO: 1159118 - RNA, 24 nt, Human
gguggugcacaccuguaaucccag

SEQ ID NO: 1159119 - RNA, 23 nt, Human
ggugugguggugcacaccuguaa

SEQ ID NO: 1159120 - RNA, 21 nt, Human
gguuacaaggcugggaaggga

SEQ ID NO: 1159121 - RNA, 23 nt, Human
gugaugugccugcuccccugaag

SEQ ID NO: 1159122 - RNA, 22 nt, Human
guuagcuuuuaagcauuucgug

SEQ ID NO: 1159123 - RNA, 18 nt, Human
guugcacugagucgagau

SEQ ID NO: 1159124 - RNA, 20 nt, Human
uaaaauggacaaaaaggcca

SEQ ID NO: 1159125 - RNA, 18 nt, Human
uaaccagaauauauaagg

SEQ ID NO: 1159126 - RNA, 19 nt, Human
uaaccugauuaaaaaaugg

SEQ ID NO: 1159127 - RNA, 21 nt, Human
uaauguaagugaaauaagcca

SEQ ID NO: 1159128 - RNA, 20 nt, Human
uagaaaggugguuacaaggc

SEQ ID NO: 1159129 - RNA, 18 nt, Human
uagcugagcaugguggca

SEQ ID NO: 1159130 - RNA, 20 nt, Human
ucaagaucacccuggccaac

SEQ ID NO: 1159131 - RNA, 22 nt, Human
ucaagaucacccuggccaacau

SEQ ID NO: 1159132 - RNA, 22 nt, Human
ucacaaggucagaaguucaaga

SEQ ID NO: 1159133 - RNA, 24 nt, Human
ucacaaggucagaaguucaagauc

SEQ ID NO: 1159134 - RNA, 23 nt, Human
ucaccuccagacugggugacccc

SEQ ID NO: 1159135 - RNA, 23 nt, Human
ucacuugagcacaggaguucaag

SEQ ID NO: 1159136 - RNA, 24 nt, Human
uccagccugggugacacagcaaga

SEQ ID NO: 1159137 - RNA, 19 nt, Human
uccaucucaaaaaaauaaa

SEQ ID NO: 1159138 - RNA, 23 nt, Human
ucgcaccacugcacuccagccug

SEQ ID NO: 1159139 - RNA, 22 nt, Human
ucucuacuaaaaauacaaaaaa

SEQ ID NO: 1159140 - RNA, 18 nt, Human
ucucuugcucucuugcca

SEQ ID NO: 1159141 - RNA, 24 nt, Human
ugaaaguuccuugaggccucccca

SEQ ID NO: 1159142 - RNA, 24 nt, Human
ugaaccugggaggcggagguugca

SEQ ID NO: 1159143 - RNA, 24 nt, Human
ugagaggccaaggugagcggauca

SEQ ID NO: 1159144 - RNA, 21 nt, Human
ugagcaugguggcacucgccu

SEQ ID NO: 1159145 - RNA, 22 nt, Human
ugagcccugaacaaagaguuaa

SEQ ID NO: 1159146 - RNA, 24 nt, Human
ugagcggaucacuugagcacagga

SEQ ID NO: 1159147 - RNA, 24 nt, Human
ugaggcaggagaauugcuugaacc

SEQ ID NO: 1159148 - RNA, 25 nt, Human
ugaggcaggagaauugcuugaaccu

SEQ ID NO: 1159149 - RNA, 22 nt, Human
ugagucgagaucgcaccacugc

SEQ ID NO: 1159150 - RNA, 18 nt, Human
ugccugggaagggaggag

SEQ ID NO: 1159151 - RNA, 21 nt, Human
ugcuugaaccugggaggcgga

SEQ ID NO: 1159152 - RNA, 20 nt, Human
uggacaggcugggcgcagug

SEQ ID NO: 1159153 - RNA, 21 nt, Human
uggaggcagaguagaaaggug

SEQ ID NO: 1159154 - RNA, 21 nt, Human
uggcucacaccuguaauccca

SEQ ID NO: 1159155 - RNA, 24 nt, Human
uggcucacaccuguaaucccagca

SEQ ID NO: 1159156 - RNA, 19 nt, Human
ugggaagggaaggggagag

SEQ ID NO: 1159157 - RNA, 20 nt, Human
ugggaagggaaggggagagu

SEQ ID NO: 1159158 - RNA, 24 nt, Human
ugggagaccaagguggguggauca

SEQ ID NO: 1159159 - RNA, 19 nt, Human
ugggaggcggagguugcac

SEQ ID NO: 1159160 - RNA, 24 nt, Human
ugggaggcggagguugcacugagu

SEQ ID NO: 1159161 - RNA, 18 nt, Human
ugggucauccugaggugg

SEQ ID NO: 1159162 - RNA, 22 nt, Human
uggugcacaccuguaaucccag

SEQ ID NO: 1159163 - RNA, 24 nt, Human
ugguggugcacaccuguaauccca

SEQ ID NO: 1159164 - RNA, 24 nt, Human
ugguuacaagaauacauuuagaua

SEQ ID NO: 1159165 - RNA, 22 nt, Human
ugguuacaaggcugggaaggga

SEQ ID NO: 1159166 - RNA, 21 nt, Human
uguaagugaaauaagccaagc

SEQ ID NO: 1159167 - RNA, 18 nt, Human
uuagcugagcaugguggc

SEQ ID NO: 1159168 - RNA, 20 nt, Human
uuagcugggugugguggugc

SEQ ID NO: 1159169 - RNA, 22 nt, Human
uuagcugggugugguggugcac

SEQ ID NO: 1159170 - RNA, 21 nt, Human
uucguggggcagggggagauc

SEQ ID NO: 1159171 - RNA, 24 nt, Human
uugaaccugggaggcggagguugc

SEQ ID NO: 1159172 - RNA, 22 nt, Human
uugagcacaggaguucaagacc

SEQ ID NO: 1159173 - RNA, 24 nt, Human
uugcuugaaccugggaggcggagg

SEQ ID NO: 1159174 - RNA, 26 nt, Human
uuucaaggaaaaacauguuuugcgac

SEQ ID NO: 1159175 - RNA, 23 nt, Human
uuucguggggcagggggagaucu

SEQ ID NO: 1159176 - RNA, 26 nt, Human
uuuucuaacaacaaugaguuccugag

SEQ ID NO: 1159177 - RNA, 21 nt, Human
aaccuccuugggcucagcugc

SEQ ID NO: 1159178 - RNA, 18 nt, Human
aauuuaggauuauuccau

SEQ ID NO: 1159179 - RNA, 20 nt, Human
auccuuuuucuucacccucu

SEQ ID NO: 1159180 - RNA, 20 nt, Human
auggggcagugucuucagag

SEQ ID NO: 1159181 - RNA, 22 nt, Human
caaugaguccaaugccucuccc

SEQ ID NO: 1159182 - RNA, 22 nt, Human
cacccaugaccucauuugacuc

SEQ ID NO: 1159183 - RNA, 20 nt, Human
cagcaaacugaaacugcagu

SEQ ID NO: 1159184 - RNA, 19 nt, Human
caguuggauggcucaaggg

SEQ ID NO: 1159185 - RNA, 21 nt, Human
ccauccccugucgacuugagg

SEQ ID NO: 1159186 - RNA, 25 nt, Human
ccccccgcgggccgggccagggggc

SEQ ID NO: 1159187 - RNA, 22 nt, Human
ccuccuugggcucagcugcuuc

SEQ ID NO: 1159188 - RNA, 19 nt, Human
ccucucccacauucucugu

SEQ ID NO: 1159189 - RNA, 23 nt, Human
ccugucgccuccugacccuugcu

SEQ ID NO: 1159190 - RNA, 23 nt, Human
cgccagccucugcgcuuccgcgc

SEQ ID NO: 1159191 - RNA, 21 nt, Human
cgcucuguccgcggagacgga

SEQ ID NO: 1159192 - RNA, 22 nt, Human
cuaccugcuucuguacucugca

SEQ ID NO: 1159193 - RNA, 19 nt, Human
cuccaaccugagucaccgc

SEQ ID NO: 1159194 - RNA, 18 nt, Human
cucccggcucugcguggc

SEQ ID NO: 1159195 - RNA, 19 nt, Human
cucccggcucugcguggcc

SEQ ID NO: 1159196 - RNA, 19 nt, Human
cucggcccgcuccacccgg

SEQ ID NO: 1159197 - RNA, 19 nt, Human
cucugcguggccgcggggc

SEQ ID NO: 1159198 - RNA, 18 nt, Human
cugugggcguguuuuucc

SEQ ID NO: 1159199 - RNA, 19 nt, Human
cugugucugccugcucucc

SEQ ID NO: 1159200 - RNA, 21 nt, Human
cuuuucuucaucuggcucuuu

SEQ ID NO: 1159201 - RNA, 21 nt, Human
gaccugucgccuccugacccu

SEQ ID NO: 1159202 - RNA, 23 nt, Human
gagacggagccacucgccgcgaa

SEQ ID NO: 1159203 - RNA, 22 nt, Human
gcacuggaaccuccuugggcuc

SEQ ID NO: 1159204 - RNA, 23 nt, Human
gcacuggaaccuccuugggcuca

SEQ ID NO: 1159205 - RNA, 22 nt, Human
ggcucaaggggaguucuggucc

SEQ ID NO: 1159206 - RNA, 20 nt, Human
gggcucggcccgcuccaccc

SEQ ID NO: 1159207 - RNA, 21 nt, Human
gucauucuuuucuucaucugg

SEQ ID NO: 1159208 - RNA, 23 nt, Human
gugaauucuuucucuaaacuaug

SEQ ID NO: 1159209 - RNA, 21 nt, Human
uaucaaacauuacugagagug

SEQ ID NO: 1159210 - RNA, 27 nt, Human
ucaccgcugccucucccacauucucug

SEQ ID NO: 1159211 - RNA, 26 nt, Human
ucaccuccaccucacuggcuuuccua

SEQ ID NO: 1159212 - RNA, 25 nt, Human
uccacacaauccuucacuguguccu

SEQ ID NO: 1159213 - RNA, 19 nt, Human
uccccugucgacuugaggg

SEQ ID NO: 1159214 - RNA, 26 nt, Human
uccuugggcucagcugcuuccugguu

SEQ ID NO: 1159215 - RNA, 18 nt, Human
ucggaagucucuccauug

SEQ ID NO: 1159216 - RNA, 19 nt, Human
ucuccaaccugagucaccg

SEQ ID NO: 1159217 - RNA, 21 nt, Human
ugaaacugcaguauacugugg

SEQ ID NO: 1159218 - RNA, 24 nt, Human
ugcacuggaaccuccuugggcuca

SEQ ID NO: 1159219 - RNA, 18 nt, Human
ugcccuaaaggacaugag

SEQ ID NO: 1159220 - RNA, 19 nt, Human
ugcccuaaaggacaugagg

SEQ ID NO: 1159221 - RNA, 23 nt, Human
ugcccuaaaggacaugaggccac

SEQ ID NO: 1159222 - RNA, 20 nt, Human
ugccucucccacauucucug

SEQ ID NO: 1159223 - RNA, 18 nt, Human
uggcuuuccuaggguccc

SEQ ID NO: 1159224 - RNA, 21 nt, Human
ugucgacuugagggcauuuaa

SEQ ID NO: 1159225 - RNA, 26 nt, Human
uucagggagagaagcgcucucaagaa

SEQ ID NO: 1159226 - RNA, 21 nt, Human
uuccugcuggagaaccaggaa

SEQ ID NO: 1159227 - RNA, 19 nt, Human
uucuucaucuggcucuuuc

SEQ ID NO: 1159228 - RNA, 20 nt, Human
uugcggcgagccgggccucc

SEQ ID NO: 1159229 - RNA, 21 nt, Human
uuuccuagggucccauccccu

SEQ ID NO: 1159230 - RNA, 25 nt, Human
uuucucaguauugugcaagauuucu

SEQ ID NO: 1159231 - RNA, 18 nt, Human
uuugcggcgagccgggcc

SEQ ID NO: 1159232 - RNA, 20 nt, Human
aaaacaaacaacaaagaaca

SEQ ID NO: 1159233 - RNA, 22 nt, Human
aagaguuuggagaacagacgga

SEQ ID NO: 1159234 - RNA, 20 nt, Human
aaucagcacaaacugaugcc

SEQ ID NO: 1159235 - RNA, 22 nt, Human
aauguaccauagacugaguggc

SEQ ID NO: 1159236 - RNA, 21 nt, Human
aauuacucuucacaaauuuau

SEQ ID NO: 1159237 - RNA, 24 nt, Human
agcacuuugggaggcugaggcagg

SEQ ID NO: 1159238 - RNA, 22 nt, Human
aggccgggagugguggcucaug

SEQ ID NO: 1159239 - RNA, 22 nt, Human
aucccauucaugagggcuccac

SEQ ID NO: 1159240 - RNA, 21 nt, Human
caaaauuuacaaaaucagcac

SEQ ID NO: 1159241 - RNA, 23 nt, Human
caaacaacaaagaacacacuuuu

SEQ ID NO: 1159242 - RNA, 24 nt, Human
cagcacuuugggaggcugaggcag

SEQ ID NO: 1159243 - RNA, 26 nt, Human
cagcacuuugggaggcugaggcaggu

SEQ ID NO: 1159244 - RNA, 24 nt, Human
caugacuguaaucccagcacuuug

SEQ ID NO: 1159245 - RNA, 18 nt, Human
ccucacauggaaaacagg

SEQ ID NO: 1159246 - RNA, 25 nt, Human
cuagcaauguaagaaaauuucuuuu

SEQ ID NO: 1159247 - RNA, 22 nt, Human
cuauucauuacauuuuuggaau

SEQ ID NO: 1159248 - RNA, 24 nt, Human
cucaugacuguaaucccagcacuu

SEQ ID NO: 1159249 - RNA, 24 nt, Human
cuggaaguccgagaucaaggugcc

SEQ ID NO: 1159250 - RNA, 24 nt, Human
gaaacuuucugaaaacccaaauaa

SEQ ID NO: 1159251 - RNA, 23 nt, Human
ggagugguggcucaugacuguaa

SEQ ID NO: 1159252 - RNA, 21 nt, Human
ggcucaugacuguaaucccag

SEQ ID NO: 1159253 - RNA, 19 nt, Human
ggcucucuuccagguugca

SEQ ID NO: 1159254 - RNA, 19 nt, Human
gggauauggcaugaaggga

SEQ ID NO: 1159255 - RNA, 24 nt, Human
gguggcucaugacuguaaucccag

SEQ ID NO: 1159256 - RNA, 22 nt, Human
uaaaaaaagaugaauaaggccg

SEQ ID NO: 1159257 - RNA, 19 nt, Human
uaaaaacaaacaacaaaga

SEQ ID NO: 1159258 - RNA, 26 nt, Human
uaaaacucucuaaauaaucacccuuc

SEQ ID NO: 1159259 - RNA, 21 nt, Human
uaaggagaauuaacuuaauaa

SEQ ID NO: 1159260 - RNA, 25 nt, Human
uagaaugaauaaauuacucuucaca

SEQ ID NO: 1159261 - RNA, 23 nt, Human
uagauucauuugccuauuuaaaa

SEQ ID NO: 1159262 - RNA, 24 nt, Human
uaugggaauaagauuaguagauac

SEQ ID NO: 1159263 - RNA, 20 nt, Human
ucaaaauguguacuauucau

SEQ ID NO: 1159264 - RNA, 18 nt, Human
ucucuaaauaaucacccu

SEQ ID NO: 1159265 - RNA, 21 nt, Human
ugaauaaggccgggaguggug

SEQ ID NO: 1159266 - RNA, 20 nt, Human
ugaccuaaucauauaccaaa

SEQ ID NO: 1159267 - RNA, 23 nt, Human
ugacuguaaucccagcacuuugg

SEQ ID NO: 1159268 - RNA, 24 nt, Human
ugacuguaaucccagcacuuuggg

SEQ ID NO: 1159269 - RNA, 21 nt, Human
ugccuauuuaaaaacaaacaa

SEQ ID NO: 1159270 - RNA, 20 nt, Human
uggaaaacaggugagcgcuc

SEQ ID NO: 1159271 - RNA, 22 nt, Human
uggcucaugacuguaaucccag

SEQ ID NO: 1159272 - RNA, 24 nt, Human
uggcucaugacuguaaucccagca

SEQ ID NO: 1159273 - RNA, 24 nt, Human
uggcuuauaaacaacagaaauuuc

SEQ ID NO: 1159274 - RNA, 18 nt, Human
ugggaggcugaggcaggu

SEQ ID NO: 1159275 - RNA, 21 nt, Human
uggugaggcucucuuccaggu

SEQ ID NO: 1159276 - RNA, 24 nt, Human
ugguggcucaugacuguaauccca

SEQ ID NO: 1159277 - RNA, 18 nt, Human
uuaaaaacaaacaacaaa

SEQ ID NO: 1159278 - RNA, 19 nt, Human
uuacacgguauacaagcaa

SEQ ID NO: 1159279 - RNA, 20 nt, Human
uugguggugacugaugcuuu

SEQ ID NO: 1159280 - RNA, 23 nt, Human
uuuaaaacucucuaaauaaucac

SEQ ID NO: 1159281 - RNA, 21 nt, Human
aaggggaucuaauguuugggc

SEQ ID NO: 1159282 - RNA, 21 nt, Human
aauaccuacccccaaaucuuc

SEQ ID NO: 1159283 - RNA, 24 nt, Human
agcuagaaagggcccuggagugag

SEQ ID NO: 1159284 - RNA, 25 nt, Human
auaccagucccauucuuccuuuuca

SEQ ID NO: 1159285 - RNA, 18 nt, Human
caggaaagcaccuguccu

SEQ ID NO: 1159286 - RNA, 20 nt, Human
caugcugguuuccuuccugc

SEQ ID NO: 1159287 - RNA, 24 nt, Human
ccccaaaucuucuccuaaccacca

SEQ ID NO: 1159288 - RNA, 21 nt, Human
ccccaauuucuuugagcucac

SEQ ID NO: 1159289 - RNA, 19 nt, Human
cccucagcuuauguagcua

SEQ ID NO: 1159290 - RNA, 20 nt, Human
cuacccccaaaucuucuccu

SEQ ID NO: 1159291 - RNA, 21 nt, Human
cuggccccaugugcucaaggg

SEQ ID NO: 1159292 - RNA, 20 nt, Human
cugggcagaggcuggcccac

SEQ ID NO: 1159293 - RNA, 24 nt, Human
cugugccacucugggcaaaugcuc

SEQ ID NO: 1159294 - RNA, 23 nt, Human
gacccucucuaauccuuccacca

SEQ ID NO: 1159295 - RNA, 21 nt, Human
ggaaagcaccuguccuggcuc

SEQ ID NO: 1159296 - RNA, 20 nt, Human
ggaccagcgcagcccuggug

SEQ ID NO: 1159297 - RNA, 18 nt, Human
gugcucaguucaugcugg

SEQ ID NO: 1159298 - RNA, 18 nt, Human
gugugaagacugggacga

SEQ ID NO: 1159299 - RNA, 21 nt, Human
guucagggcucugcacucuca

SEQ ID NO: 1159300 - RNA, 18 nt, Human
guuuacauaccaguccca

SEQ ID NO: 1159301 - RNA, 21 nt, Human
uaaaagcauccugaccccaau

SEQ ID NO: 1159302 - RNA, 20 nt, Human
uacaggaaagcaccuguccu

SEQ ID NO: 1159303 - RNA, 22 nt, Human
uaccuggcacguaguaggugcu

SEQ ID NO: 1159304 - RNA, 19 nt, Human
uacuaaguccccucucccu

SEQ ID NO: 1159305 - RNA, 19 nt, Human
uagaaagggcccuggagug

SEQ ID NO: 1159306 - RNA, 20 nt, Human
uagcugugccacucugggca

SEQ ID NO: 1159307 - RNA, 22 nt, Human
uagcugugccacucugggcaaa

SEQ ID NO: 1159308 - RNA, 21 nt, Human
uaugauucugaagucuacaga

SEQ ID NO: 1159309 - RNA, 28 nt, Human
ucaauaccuacccccaaaucuucuccua

SEQ ID NO: 1159310 - RNA, 24 nt, Human
ucacgggccuuuugcugaaggucu

SEQ ID NO: 1159311 - RNA, 25 nt, Human
ucaggguguagugguguggcucucu

SEQ ID NO: 1159312 - RNA, 26 nt, Human
uccuugagccuguuuccacaccugua

SEQ ID NO: 1159313 - RNA, 24 nt, Human
ucuauucaucuggaucaugggacc

SEQ ID NO: 1159314 - RNA, 24 nt, Human
ucucuaauccuuccaccaaucaaa

SEQ ID NO: 1159315 - RNA, 21 nt, Human
ucucuggacuuaacgucacuc

SEQ ID NO: 1159316 - RNA, 21 nt, Human
ucucugggcagaggcuggccc

SEQ ID NO: 1159317 - RNA, 22 nt, Human
ucucugggcagaggcuggccca

SEQ ID NO: 1159318 - RNA, 19 nt, Human
ucuuugagcucacgggccu

SEQ ID NO: 1159319 - RNA, 19 nt, Human
ugccaaacccucagcuuau

SEQ ID NO: 1159320 - RNA, 19 nt, Human
uggccccaugugcucaagg

SEQ ID NO: 1159321 - RNA, 21 nt, Human
ugguagcagauugcaaugcuc

SEQ ID NO: 1159322 - RNA, 20 nt, Human
ugugaagacugggacgacac

SEQ ID NO: 1159323 - RNA, 21 nt, Human
uuaaaagcauccugaccccaa

SEQ ID NO: 1159324 - RNA, 21 nt, Human
uucaugcugguuuccuuccug

SEQ ID NO: 1159325 - RNA, 19 nt, Human
uucuccuaaccaccaucug

SEQ ID NO: 1159326 - RNA, 18 nt, Human
uucuuugagcucacgggc

SEQ ID NO: 1159327 - RNA, 22 nt, Human
uuuaaagcauuuuuugcuuuaa

SEQ ID NO: 1159328 - RNA, 26 nt, Human
uuuaaagcauuuuuugcuuuaaaagc

SEQ ID NO: 1159329 - RNA, 20 nt, Human
uuuacuaaguccccucuccc

SEQ ID NO: 1159330 - RNA, 18 nt, Human
aacauggccauccuucuc

SEQ ID NO: 1159331 - RNA, 23 nt, Human
aagaagauccucuugacuucuuu

SEQ ID NO: 1159332 - RNA, 21 nt, Human
aagcauucagggcuuccauca

SEQ ID NO: 1159333 - RNA, 19 nt, Human
aagucugcaauccccuuua

SEQ ID NO: 1159334 - RNA, 24 nt, Human
acagugccuuuuccaggcucaaag

SEQ ID NO: 1159335 - RNA, 21 nt, Human
acaucaaggaaaaagaagauc

SEQ ID NO: 1159336 - RNA, 18 nt, Human
accacuguguaaucuggg

SEQ ID NO: 1159337 - RNA, 18 nt, Human
accuguucccauccuucu

SEQ ID NO: 1159338 - RNA, 20 nt, Human
agaaagagauggccgugaug

SEQ ID NO: 1159339 - RNA, 22 nt, Human
agcuggucccauucgugacaca

SEQ ID NO: 1159340 - RNA, 19 nt, Human
agcuucagaacaucaagga

SEQ ID NO: 1159341 - RNA, 23 nt, Human
aggaaaaagaagauccucuugac

SEQ ID NO: 1159342 - RNA, 21 nt, Human
aggaggaaaggccccucccca

SEQ ID NO: 1159343 - RNA, 22 nt, Human
aucaaggaaaaagaagauccuc

SEQ ID NO: 1159344 - RNA, 20 nt, Human
auccugauaccaaaaccacu

SEQ ID NO: 1159345 - RNA, 23 nt, Human
aucuuguagcuucagaacaucaa

SEQ ID NO: 1159346 - RNA, 20 nt, Human
caaagaagagcuggucccau

SEQ ID NO: 1159347 - RNA, 30 nt, Human
caacucucaacaaaauaaagcgcaggacaa

SEQ ID NO: 1159348 - RNA, 27 nt, Human
cacuccuauucaacaugguauuggaag

SEQ ID NO: 1159349 - RNA, 22 nt, Human
caggaaagguggagaaagagau

SEQ ID NO: 1159350 - RNA, 23 nt, Human
cagugccuuuuccaggcucaaag

SEQ ID NO: 1159351 - RNA, 21 nt, Human
cagugcgguuucaucaacauc

SEQ ID NO: 1159352 - RNA, 18 nt, Human
caucaaggaaaaagaaga

SEQ ID NO: 1159353 - RNA, 28 nt, Human
caucaaggaaaaagaagauccucuugac

SEQ ID NO: 1159354 - RNA, 23 nt, Human
cauccugauaccaaaaccacucc

SEQ ID NO: 1159355 - RNA, 21 nt, Human
cauuccuacugaaacuauucc

SEQ ID NO: 1159356 - RNA, 21 nt, Human
ccagcaucauccugauaccaa

SEQ ID NO: 1159357 - RNA, 20 nt, Human
ccaugguuuguacuaauuua

SEQ ID NO: 1159358 - RNA, 19 nt, Human
ccccagcauccuaggaauu

SEQ ID NO: 1159359 - RNA, 18 nt, Human
cccuccccagcucauucu

SEQ ID NO: 1159360 - RNA, 19 nt, Human
ccucaccccagcauccuag

SEQ ID NO: 1159361 - RNA, 19 nt, Human
ccucugguugcuguuuccu

SEQ ID NO: 1159362 - RNA, 19 nt, Human
ccugccugcaucuuugaau

SEQ ID NO: 1159363 - RNA, 21 nt, Human
ccuggagcucuugauugccau

SEQ ID NO: 1159364 - RNA, 22 nt, Human
ccuguccauggcuuagcaacau

SEQ ID NO: 1159365 - RNA, 24 nt, Human
cuaauuuaucccaaacuuuccacc

SEQ ID NO: 1159366 - RNA, 25 nt, Human
cucaacaaaauaaagcgcaggacaa

SEQ ID NO: 1159367 - RNA, 25 nt, Human
cugauaccaaaaccacuccuauuca

SEQ ID NO: 1159368 - RNA, 23 nt, Human
cugcugccuggucauucuucugg

SEQ ID NO: 1159369 - RNA, 21 nt, Human
cuguugacuuccuugggcaac

SEQ ID NO: 1159370 - RNA, 21 nt, Human
gaacauggccauccuucuccg

SEQ ID NO: 1159371 - RNA, 20 nt, Human
gagcagugguucaggugauc

SEQ ID NO: 1159372 - RNA, 21 nt, Human
gcaggacaagaaggauccaca

SEQ ID NO: 1159373 - RNA, 22 nt, Human
gccacagugccuuuuccaggcu

SEQ ID NO: 1159374 - RNA, 24 nt, Human
ggcauauugcugugacauagccuu

SEQ ID NO: 1159375 - RNA, 19 nt, Human
ggcuuuggaggaggaggca

SEQ ID NO: 1159376 - RNA, 21 nt, Human
ggggcaggaaagguggagaaa

SEQ ID NO: 1159377 - RNA, 26 nt, Human
ggguagugcagccuguuccgggcccc

SEQ ID NO: 1159378 - RNA, 24 nt, Human
gguauuggaagucaucuuguagcu

SEQ ID NO: 1159379 - RNA, 18 nt, Human
gguggagaaagagauggc

SEQ ID NO: 1159380 - RNA, 22 nt, Human
uaugaccaggggccacagugcc

SEQ ID NO: 1159381 - RNA, 18 nt, Human
uauuccaaaaaauugagg

SEQ ID NO: 1159382 - RNA, 22 nt, Human
ucaacaucuuccauuaugcuuu

SEQ ID NO: 1159383 - RNA, 22 nt, Human
ucacaaaggcaacuaugaccag

SEQ ID NO: 1159384 - RNA, 23 nt, Human
ucccaaacuuuccaccaaaacuu

SEQ ID NO: 1159385 - RNA, 20 nt, Human
ucccuucuucccugugagga

SEQ ID NO: 1159386 - RNA, 21 nt, Human
uccuaggaauuucuuucccuu

SEQ ID NO: 1159387 - RNA, 25 nt, Human
ucuaugaggccagcaucauccugau

SEQ ID NO: 1159388 - RNA, 21 nt, Human
ugaagugaagauuuaccuguu

SEQ ID NO: 1159389 - RNA, 19 nt, Human
ugaccaggggccacagugc

SEQ ID NO: 1159390 - RNA, 23 nt, Human
ugaucaucucccucugguugcug

SEQ ID NO: 1159391 - RNA, 25 nt, Human
ugcagagccacucuggaugcuuugg

SEQ ID NO: 1159392 - RNA, 21 nt, Human
ugcagccuguucuccaugccc

SEQ ID NO: 1159393 - RNA, 23 nt, Human
ugcccaugauuagaggcuagagg

SEQ ID NO: 1159394 - RNA, 21 nt, Human
ugccuggucauucuucugggg

SEQ ID NO: 1159395 - RNA, 23 nt, Human
ugccuuuuccaggcucaaaguug

SEQ ID NO: 1159396 - RNA, 23 nt, Human
uggagaaagagauggccgugaug

SEQ ID NO: 1159397 - RNA, 24 nt, Human
uggauaaagagaaaauaccuggcu

SEQ ID NO: 1159398 - RNA, 20 nt, Human
uggcaggggcaggaaagguu

SEQ ID NO: 1159399 - RNA, 22 nt, Human
uguagcuucagaacaucaagga

SEQ ID NO: 1159400 - RNA, 21 nt, Human
ugugacauagccuuucaugca

SEQ ID NO: 1159401 - RNA, 19 nt, Human
uguugacuuccuugggcaa

SEQ ID NO: 1159402 - RNA, 20 nt, Human
uguuucaacagugcgguuuc

SEQ ID NO: 1159403 - RNA, 20 nt, Human
uuccuacugaaacuauucca

SEQ ID NO: 1159404 - RNA, 22 nt, Human
uuucauggaccgcugcaccacu

SEQ ID NO: 1159405 - RNA, 18 nt, Human
aguaccuugucagugggg

SEQ ID NO: 1159406 - RNA, 18 nt, Human
cggcaaauaugugauccc

SEQ ID NO: 1159407 - RNA, 22 nt, Human
ugcuccaauguugcaugucugc

SEQ ID NO: 1159408 - RNA, 20 nt, Human
ugcugccaguaccuugucag

SEQ ID NO: 1159409 - RNA, 18 nt, Human
aucugugaggacacagag

SEQ ID NO: 1159410 - RNA, 21 nt, Human
cacaggcuuuuauuuguuuuc

SEQ ID NO: 1159411 - RNA, 20 nt, Human
cauggucagccuuccacuuc

SEQ ID NO: 1159412 - RNA, 24 nt, Human
caugucagucaggccaguucccug

SEQ ID NO: 1159413 - RNA, 21 nt, Human
ccaccgggcgccuggccccug

SEQ ID NO: 1159414 - RNA, 20 nt, Human
cuugucccacuuccccgcuu

SEQ ID NO: 1159415 - RNA, 21 nt, Human
uauuuguuuucuucagauugc

SEQ ID NO: 1159416 - RNA, 19 nt, Human
ucccugcagagggaauucc

SEQ ID NO: 1159417 - RNA, 21 nt, Human
ugagacaaacaucugcauuua

SEQ ID NO: 1159418 - RNA, 21 nt, Human
ugcaugucagucaggccaguu

SEQ ID NO: 1159419 - RNA, 23 nt, Human
uucccagcaugaccucauucauc

SEQ ID NO: 1159420 - RNA, 24 nt, Human
uuuagacauacacauucaucuacu

SEQ ID NO: 1159421 - RNA, 25 nt, Human
uuuguuuucuucagauugcuuuuuc

SEQ ID NO: 1159422 - RNA, 24 nt, Human
aagcucagaauccaacuaugaagu

SEQ ID NO: 1159423 - RNA, 24 nt, Human
acauugagggacugggcagaggga

SEQ ID NO: 1159424 - RNA, 19 nt, Human
agaagccggcucugggcac

SEQ ID NO: 1159425 - RNA, 23 nt, Human
agaaucuggaauccagcagcugc

SEQ ID NO: 1159426 - RNA, 18 nt, Human
agaugauccuaagcucag

SEQ ID NO: 1159427 - RNA, 18 nt, Human
aggcagggagguggggcc

SEQ ID NO: 1159428 - RNA, 21 nt, Human
aggcagggagguggggcgcag

SEQ ID NO: 1159429 - RNA, 24 nt, Human
aggcagggagguggggcgcagugg

SEQ ID NO: 1159430 - RNA, 24 nt, Human
aggcagggagguggggcgcagugg

SEQ ID NO: 1159431 - RNA, 18 nt, Human
aucccaguuccccuuucc

SEQ ID NO: 1159432 - RNA, 21 nt, Human
auucagugccuuggaauauca

SEQ ID NO: 1159433 - RNA, 22 nt, Human
caacauugagggacugggcaga

SEQ ID NO: 1159434 - RNA, 22 nt, Human
cagccccuccccaaaucccagu

SEQ ID NO: 1159435 - RNA, 21 nt, Human
caggaucuagacuuggggccu

SEQ ID NO: 1159436 - RNA, 23 nt, Human
cagggauuaagggcuugggauuc

SEQ ID NO: 1159437 - RNA, 19 nt, Human
ccagccccuccccaaaucc

SEQ ID NO: 1159438 - RNA, 27 nt, Human
ccccaaaucccaguuccccuuuccaag

SEQ ID NO: 1159439 - RNA, 19 nt, Human
ccuccagccccuccccaaa

SEQ ID NO: 1159440 - RNA, 24 nt, Human
gaagauucagaucagaaaccaggg

SEQ ID NO: 1159441 - RNA, 19 nt, Human
gagcuuagaaaauuuauuc

SEQ ID NO: 1159442 - RNA, 18 nt, Human
gccaggaucuagacuugg

SEQ ID NO: 1159443 - RNA, 18 nt, Human
gcuuggguuuagggaagg

SEQ ID NO: 1159444 - RNA, 21 nt, Human
gcuuggguuuagggaagggug

SEQ ID NO: 1159445 - RNA, 22 nt, Human
ggcccugauagugcuggggugg

SEQ ID NO: 1159446 - RNA, 18 nt, Human
gggcaccagugugugugg

SEQ ID NO: 1159447 - RNA, 20 nt, Human
gguuuuuuuguuuuuguuuu

SEQ ID NO: 1159448 - RNA, 18 nt, Human
guaggggaggaggacuuu

SEQ ID NO: 1159449 - RNA, 22 nt, Human
uaagcucagaauccaacuauga

SEQ ID NO: 1159450 - RNA, 24 nt, Human
ucagaauccaacuaugaagugcag

SEQ ID NO: 1159451 - RNA, 21 nt, Human
uccccaaaucccaguuccccu

SEQ ID NO: 1159452 - RNA, 27 nt, Human
uccuccagccccuccccaaaucccagg

SEQ ID NO: 1159453 - RNA, 22 nt, Human
ucuccagaugauccuaagcucu

SEQ ID NO: 1159454 - RNA, 21 nt, Human
ucuccuggcuuucaacucugg

SEQ ID NO: 1159455 - RNA, 19 nt, Human
ugaaauaacacacacaggc

SEQ ID NO: 1159456 - RNA, 21 nt, Human
ugaauuuggggauuuggcggg

SEQ ID NO: 1159457 - RNA, 22 nt, Human
ugagggacugggcagagggauu

SEQ ID NO: 1159458 - RNA, 20 nt, Human
ugauccuaagcucagaaucc

SEQ ID NO: 1159459 - RNA, 19 nt, Human
ugcauucaagagaugaggu

SEQ ID NO: 1159460 - RNA, 22 nt, Human
ugccgauuuucuccuggcuuuc

SEQ ID NO: 1159461 - RNA, 23 nt, Human
ugccuuggaauaucagggucugc

SEQ ID NO: 1159462 - RNA, 20 nt, Human
uguuuuuuuccuuugaaaua

SEQ ID NO: 1159463 - RNA, 23 nt, Human
uuuauuccuuuuguuuuuuuccu

SEQ ID NO: 1159464 - RNA, 18 nt, Human
uuuccaagucccuccaug

SEQ ID NO: 1159465 - RNA, 23 nt, Human
acggagccccguggccugguugc

SEQ ID NO: 1159466 - RNA, 28 nt, Human
aguggcugacugacucuguguuucuaug

SEQ ID NO: 1159467 - RNA, 22 nt, Human
cagaagaacacuuggguggaag

SEQ ID NO: 1159468 - RNA, 18 nt, Human
cagagccugagaaucgcc

SEQ ID NO: 1159469 - RNA, 23 nt, Human
ccucugugaacaaggaagagggu

SEQ ID NO: 1159470 - RNA, 24 nt, Human
ccugcauuuucuuuauccauucau

SEQ ID NO: 1159471 - RNA, 20 nt, Human
cggccaucuuggcuccuccc

SEQ ID NO: 1159472 - RNA, 25 nt, Human
cguggccugguugcucggcagggug

SEQ ID NO: 1159473 - RNA, 18 nt, Human
cuccucccaccauauguc

SEQ ID NO: 1159474 - RNA, 23 nt, Human
cugcagggucagcugacugccgu

SEQ ID NO: 1159475 - RNA, 21 nt, Human
cugcgcucgccugcacacugc

SEQ ID NO: 1159476 - RNA, 18 nt, Human
cugguugcucggcagggu

SEQ ID NO: 1159477 - RNA, 20 nt, Human
gagaacucuucauuuguauc

SEQ ID NO: 1159478 - RNA, 18 nt, Human
gccugguugcucggcagg

SEQ ID NO: 1159479 - RNA, 19 nt, Human
gcgcucgccugcacacugc

SEQ ID NO: 1159480 - RNA, 21 nt, Human
uaacugccagagccugagaau

SEQ ID NO: 1159481 - RNA, 18 nt, Human
ucagauggaaaugcagaa

SEQ ID NO: 1159482 - RNA, 21 nt, Human
ucucacacacugcggagaacc

SEQ ID NO: 1159483 - RNA, 22 nt, Human
ucuucuugccucagauggaaau

SEQ ID NO: 1159484 - RNA, 23 nt, Human
ugccagagccugagaaucgcccc

SEQ ID NO: 1159485 - RNA, 23 nt, Human
ugccagagccugagaaucgcccc

SEQ ID NO: 1159486 - RNA, 20 nt, Human
ugcuccaguaucgacuguug

SEQ ID NO: 1159487 - RNA, 19 nt, Human
uggcagaagaacacuuggg

SEQ ID NO: 1159488 - RNA, 20 nt, Human
uuggcuccucccaccauaug

SEQ ID NO: 1159489 - RNA, 22 nt, Human
agguauguuuacuucauaagaa

SEQ ID NO: 1159490 - RNA, 26 nt, Human
gcuguauuuuacaauaaagagaaaaa

SEQ ID NO: 1159491 - RNA, 24 nt, Human
ucuauacacuuugcuguaugugug

SEQ ID NO: 1159492 - RNA, 19 nt, Human
ugacuggucuagguugcca

SEQ ID NO: 1159493 - RNA, 19 nt, Human
ugccgcgucccugacuggu

SEQ ID NO: 1159494 - RNA, 21 nt, Human
uucagaguuguacguacuuug

SEQ ID NO: 1159495 - RNA, 23 nt, Human
agaggagggaaaggggagugggu

SEQ ID NO: 1159496 - RNA, 21 nt, Human
cagcagaggagggaaagggga

SEQ ID NO: 1159497 - RNA, 24 nt, Human
cugaagauucuucagcagaggaag

SEQ ID NO: 1159498 - RNA, 23 nt, Human
ugucccgcaggcagcuugagaaa

SEQ ID NO: 1159499 - RNA, 25 nt, Human
uucagcagaggagggaaaggggagu

SEQ ID NO: 1159500 - RNA, 22 nt, Human
aaaacccucuucaggccuccag

SEQ ID NO: 1159501 - RNA, 22 nt, Human
aaacccaccugacuuccagagc

SEQ ID NO: 1159502 - RNA, 24 nt, Human
aaagugcugggauuacaggcguga

SEQ ID NO: 1159503 - RNA, 24 nt, Human
aaccuccuccaggcagcccuccca

SEQ ID NO: 1159504 - RNA, 20 nt, Human
aaccucuaccucccaaguuc

SEQ ID NO: 1159505 - RNA, 23 nt, Human
aacuaacucucucaggaaaccca

SEQ ID NO: 1159506 - RNA, 24 nt, Human
aagaaaaccuucucagggcaggcu

SEQ ID NO: 1159507 - RNA, 20 nt, Human
aagaggacaaacauggaggc

SEQ ID NO: 1159508 - RNA, 19 nt, Human
aagcaaaaauggaaaacag

SEQ ID NO: 1159509 - RNA, 22 nt, Human
aagcaaaaauggaaaacagcuc

SEQ ID NO: 1159510 - RNA, 24 nt, Human
aagcaaaaauggaaaacagcucug

SEQ ID NO: 1159511 - RNA, 19 nt, Human
aagugcagaggcccaagag

SEQ ID NO: 1159512 - RNA, 19 nt, Human
aagugcugggauuacaggc

SEQ ID NO: 1159513 - RNA, 19 nt, Human
aagugcugggauuacaggc

SEQ ID NO: 1159514 - RNA, 26 nt, Human
aagugcugggauuacaggcgugagcu

SEQ ID NO: 1159515 - RNA, 22 nt, Human
aauagagacaggguuucaccau

SEQ ID NO: 1159516 - RNA, 22 nt, Human
aaucaucggaaguccugaagcu

SEQ ID NO: 1159517 - RNA, 21 nt, Human
acaggcacccgccaccaugcc

SEQ ID NO: 1159518 - RNA, 18 nt, Human
acaggguuucaccauguu

SEQ ID NO: 1159519 - RNA, 19 nt, Human
acaggguuucaccauguua

SEQ ID NO: 1159520 - RNA, 20 nt, Human
acaggguuucaccauguuag

SEQ ID NO: 1159521 - RNA, 24 nt, Human
acaggguuucaccauguuagccag

SEQ ID NO: 1159522 - RNA, 22 nt, Human
accagucucccugcacaucugc

SEQ ID NO: 1159523 - RNA, 20 nt, Human
acccaccugacuuccagagc

SEQ ID NO: 1159524 - RNA, 19 nt, Human
acccucuucaggccuccag

SEQ ID NO: 1159525 - RNA, 24 nt, Human
accucgugauccgccugccuuggc

SEQ ID NO: 1159526 - RNA, 25 nt, Human
acucugucgcccaggcuggagugca

SEQ ID NO: 1159527 - RNA, 18 nt, Human
acuucaacucagccaggc

SEQ ID NO: 1159528 - RNA, 19 nt, Human
agaggaaagugggagaggc

SEQ ID NO: 1159529 - RNA, 22 nt, Human
agaggacaaacauggaggcaag

SEQ ID NO: 1159530 - RNA, 18 nt, Human
agagguggccaccugggg

SEQ ID NO: 1159531 - RNA, 21 nt, Human
agaguuccuccacucuggcuu

SEQ ID NO: 1159532 - RNA, 22 nt, Human
agccacaagcucuucuaagucc

SEQ ID NO: 1159533 - RNA, 23 nt, Human
agccagcccagaagccagggcuc

SEQ ID NO: 1159534 - RNA, 26 nt, Human
agcuugucaaggaagacucuaaccaa

SEQ ID NO: 1159535 - RNA, 21 nt, Human
aggaaaaggugagagccagaa

SEQ ID NO: 1159536 - RNA, 18 nt, Human
aggaaagugggagaggcc

SEQ ID NO: 1159537 - RNA, 18 nt, Human
aggacaaacauggaggca

SEQ ID NO: 1159538 - RNA, 18 nt, Human
aggagccugcaguaaaug

SEQ ID NO: 1159539 - RNA, 23 nt, Human
aggcaagaaagugcagaggccca

SEQ ID NO: 1159540 - RNA, 20 nt, Human
aggcagcccucccagcuucc

SEQ ID NO: 1159541 - RNA, 19 nt, Human
aggccagggaaggcaaggu

SEQ ID NO: 1159542 - RNA, 24 nt, Human
aggccuccaggcucucuaggcccc

SEQ ID NO: 1159543 - RNA, 25 nt, Human
aggcuggagugcaguagcgcgaucu

SEQ ID NO: 1159544 - RNA, 18 nt, Human
aguagcugggacuacagg

SEQ ID NO: 1159545 - RNA, 19 nt, Human
aguagcugggacuacaggc

SEQ ID NO: 1159546 - RNA, 23 nt, Human
agugcaguagcgcgaucuuggcu

SEQ ID NO: 1159547 - RNA, 24 nt, Human
agugcaguagcgcgaucuuggcuc

SEQ ID NO: 1159548 - RNA, 19 nt, Human
agugguagggagggggacg

SEQ ID NO: 1159549 - RNA, 23 nt, Human
auaaaguccccuucaggaauaag

SEQ ID NO: 1159550 - RNA, 25 nt, Human
auaaaguccccuucaggaauaagca

SEQ ID NO: 1159551 - RNA, 26 nt, Human
auaaaguccccuucaggaauaagcaa

SEQ ID NO: 1159552 - RNA, 19 nt, Human
aucaggagguguuagguau

SEQ ID NO: 1159553 - RNA, 19 nt, Human
auccgccugccuuggccuc

SEQ ID NO: 1159554 - RNA, 19 nt, Human
augggaaucauccugggcu

SEQ ID NO: 1159555 - RNA, 23 nt, Human
auggucuuuucacucaaagccuu

SEQ ID NO: 1159556 - RNA, 22 nt, Human
auuaccaaaccuaagacuguga

SEQ ID NO: 1159557 - RNA, 24 nt, Human
caaagugcugggauuacaggcgug

SEQ ID NO: 1159558 - RNA, 18 nt, Human
caacaugagaacugcucg

SEQ ID NO: 1159559 - RNA, 22 nt, Human
caagaggacaaacauggaggca

SEQ ID NO: 1159560 - RNA, 18 nt, Human
caagguggaggccccagg

SEQ ID NO: 1159561 - RNA, 18 nt, Human
caaguuuuccuuuuuccu

SEQ ID NO: 1159562 - RNA, 22 nt, Human
cacaccauucuccugccucagc

SEQ ID NO: 1159563 - RNA, 18 nt, Human
caccauguuagccaggau

SEQ ID NO: 1159564 - RNA, 22 nt, Human
caccauguuagccaggaugguc

SEQ ID NO: 1159565 - RNA, 24 nt, Human
caccauguuagccaggauggucuc

SEQ ID NO: 1159566 - RNA, 24 nt, Human
caccuggggccaaccuccccagac

SEQ ID NO: 1159567 - RNA, 18 nt, Human
cacggcauccuaaccucc

SEQ ID NO: 1159568 - RNA, 24 nt, Human
cacucugucgcccaggcuggagug

SEQ ID NO: 1159569 - RNA, 22 nt, Human
cagagcccuuuacacugaugcc

SEQ ID NO: 1159570 - RNA, 23 nt, Human
cagagcccuuuacacugaugcca

SEQ ID NO: 1159571 - RNA, 21 nt, Human
cagcaccagucucccugcaca

SEQ ID NO: 1159572 - RNA, 19 nt, Human
cagccagcccagaagccag

SEQ ID NO: 1159573 - RNA, 20 nt, Human
cagccuccugaguagcuggg

SEQ ID NO: 1159574 - RNA, 19 nt, Human
caggcagcccucccagcuu

SEQ ID NO: 1159575 - RNA, 22 nt, Human
cagggaccagcagggacugugg

SEQ ID NO: 1159576 - RNA, 24 nt, Human
caggguuucaccauguuagccagg

SEQ ID NO: 1159577 - RNA, 19 nt, Human
caguaucacucaaggagcc

SEQ ID NO: 1159578 - RNA, 23 nt, Human
caucgauaaaguccccuucagga

SEQ ID NO: 1159579 - RNA, 22 nt, Human
ccaaagugcugggauuacaggc

SEQ ID NO: 1159580 - RNA, 22 nt, Human
ccaaagugcugggauuacaggc

SEQ ID NO: 1159581 - RNA, 24 nt, Human
ccaaagugcugggauuacaggcgu

SEQ ID NO: 1159582 - RNA, 22 nt, Human
ccagggaaggcaagguggccca

SEQ ID NO: 1159583 - RNA, 20 nt, Human
ccaguuguggagcaguauca

SEQ ID NO: 1159584 - RNA, 24 nt, Human
ccccaaaccacucgcuugucacuu

SEQ ID NO: 1159585 - RNA, 19 nt, Human
ccccagaguccagggacca

SEQ ID NO: 1159586 - RNA, 20 nt, Human
ccccagaguccagggaccag

SEQ ID NO: 1159587 - RNA, 22 nt, Human
ccccagaguccagggaccagca

SEQ ID NO: 1159588 - RNA, 24 nt, Human
ccccagaguccagggaccagcagg

SEQ ID NO: 1159589 - RNA, 20 nt, Human
ccccaguaauucagcaccag

SEQ ID NO: 1159590 - RNA, 22 nt, Human
ccccuauccccugcccacuucc

SEQ ID NO: 1159591 - RNA, 19 nt, Human
cccugcacaucugcccuuc

SEQ ID NO: 1159592 - RNA, 18 nt, Human
ccuaaacccccuuucaca

SEQ ID NO: 1159593 - RNA, 19 nt, Human
ccuaaacccccuuucacac

SEQ ID NO: 1159594 - RNA, 23 nt, Human
ccuccaggcagcccucccagcuu

SEQ ID NO: 1159595 - RNA, 18 nt, Human
ccuccaggcucucuaggc

SEQ ID NO: 1159596 - RNA, 24 nt, Human
ccucccaaguucacaccauucucc

SEQ ID NO: 1159597 - RNA, 18 nt, Human
ccuccccagacccaguug

SEQ ID NO: 1159598 - RNA, 21 nt, Human
ccucugacuaucuucccucca

SEQ ID NO: 1159599 - RNA, 23 nt, Human
ccucugacuaucuucccuccaga

SEQ ID NO: 1159600 - RNA, 21 nt, Human
ccugaagcuagagccacaagc

SEQ ID NO: 1159601 - RNA, 23 nt, Human
ccugaguagcugggacuacaggc

SEQ ID NO: 1159602 - RNA, 24 nt, Human
ccugaguagcugggacuacaggca

SEQ ID NO: 1159603 - RNA, 23 nt, Human
ccugccucagccuccugaguagc

SEQ ID NO: 1159604 - RNA, 24 nt, Human
ccugccucagccuccugaguagcu

SEQ ID NO: 1159605 - RNA, 27 nt, Human
ccugccugugacugcugcaaggguugg

SEQ ID NO: 1159606 - RNA, 22 nt, Human
ccugccuuggccucccaaagug

SEQ ID NO: 1159607 - RNA, 21 nt, Human
ccuggggccaaccuccccaga

SEQ ID NO: 1159608 - RNA, 22 nt, Human
ccuguaaccucuaccucccaag

SEQ ID NO: 1159609 - RNA, 22 nt, Human
ccuucccuaaacccccuuucac

SEQ ID NO: 1159610 - RNA, 19 nt, Human
ccuucugaaaggaggccua

SEQ ID NO: 1159611 - RNA, 21 nt, Human
cucaccuggaaaacacaacug

SEQ ID NO: 1159612 - RNA, 24 nt, Human
cucacucugucgcccaggcuggag

SEQ ID NO: 1159613 - RNA, 24 nt, Human
cucagccuccugaguagcugggac

SEQ ID NO: 1159614 - RNA, 28 nt, Human
cuccuccaggcagcccucccagcuucag

SEQ ID NO: 1159615 - RNA, 24 nt, Human
cuccugaccucgugauccgccugc

SEQ ID NO: 1159616 - RNA, 19 nt, Human
cugacuuccagagcaacag

SEQ ID NO: 1159617 - RNA, 28 nt, Human
cugauggucuuuucacucaaagccuucu

SEQ ID NO: 1159618 - RNA, 23 nt, Human
cugccuuggccucccaaagugcu

SEQ ID NO: 1159619 - RNA, 19 nt, Human
cugggaaagguggccauag

SEQ ID NO: 1159620 - RNA, 24 nt, Human
cuguaaccucuaccucccaaguuc

SEQ ID NO: 1159621 - RNA, 19 nt, Human
cuuccagagcaacagaagg

SEQ ID NO: 1159622 - RNA, 22 nt, Human
cuucccuaaacccccuuucacc

SEQ ID NO: 1159623 - RNA, 22 nt, Human
cuuuacacugaugccagugccc

SEQ ID NO: 1159624 - RNA, 21 nt, Human
cuuugggcaguuguccugaga

SEQ ID NO: 1159625 - RNA, 20 nt, Human
cuuuggggaagaggaaagug

SEQ ID NO: 1159626 - RNA, 24 nt, Human
gaaaaacccucuucaggccuccag

SEQ ID NO: 1159627 - RNA, 20 nt, Human
gaccucgugauccgccugcc

SEQ ID NO: 1159628 - RNA, 21 nt, Human
gaccucgugauccgccugccu

SEQ ID NO: 1159629 - RNA, 24 nt, Human
gaccucgugauccgccugccuugg

SEQ ID NO: 1159630 - RNA, 24 nt, Human
gacuacaggcacccgccaccaugc

SEQ ID NO: 1159631 - RNA, 26 nt, Human
gagaguuccuccacucuggggcacuc

SEQ ID NO: 1159632 - RNA, 18 nt, Human
gagcauuaccaaaccuaa

SEQ ID NO: 1159633 - RNA, 25 nt, Human
gaguagcugggacuacaggcacccg

SEQ ID NO: 1159634 - RNA, 24 nt, Human
gauaaaguccccuucaggaauaag

SEQ ID NO: 1159635 - RNA, 19 nt, Human
gauuacaggcgugagcuac

SEQ ID NO: 1159636 - RNA, 22 nt, Human
gauuacaggcgugagcuaccgc

SEQ ID NO: 1159637 - RNA, 19 nt, Human
gcccaggcuggagugcagu

SEQ ID NO: 1159638 - RNA, 24 nt, Human
gccuggcuaauuuuuuuguauuuu

SEQ ID NO: 1159639 - RNA, 27 nt, Human
gccugugucaacuuucauuuuuccugg

SEQ ID NO: 1159640 - RNA, 22 nt, Human
gccuuggccucccaaagugcug

SEQ ID NO: 1159641 - RNA, 22 nt, Human
gcuauggcuuccaacaucuccu

SEQ ID NO: 1159642 - RNA, 25 nt, Human
ggaaaacagcucugcaggaaaaggu

SEQ ID NO: 1159643 - RNA, 22 nt, Human
ggaaacccaccugacuuccaga

SEQ ID NO: 1159644 - RNA, 23 nt, Human
ggaaagugggagaggcuuucccc

SEQ ID NO: 1159645 - RNA, 27 nt, Human
ggaagacucuaaccaagggugggcccu

SEQ ID NO: 1159646 - RNA, 22 nt, Human
ggacaggaggucccaggcagug

SEQ ID NO: 1159647 - RNA, 18 nt, Human
ggacagggggugcacaug

SEQ ID NO: 1159648 - RNA, 19 nt, Human
ggcaccugccugugacugc

SEQ ID NO: 1159649 - RNA, 23 nt, Human
ggcuuccaacaucuccucagccc

SEQ ID NO: 1159650 - RNA, 24 nt, Human
ggcuugaagggccucuggcuucca

SEQ ID NO: 1159651 - RNA, 20 nt, Human
ggucucaaucuccugaccuc

SEQ ID NO: 1159652 - RNA, 21 nt, Human
ggucugaaaaacccucuucag

SEQ ID NO: 1159653 - RNA, 21 nt, Human
ggucuggcaacaugagaacug

SEQ ID NO: 1159654 - RNA, 19 nt, Human
ggugcgaauggcaccugcc

SEQ ID NO: 1159655 - RNA, 21 nt, Human
ggugguucuugaugcuggcaa

SEQ ID NO: 1159656 - RNA, 21 nt, Human
ggugugagaagugaugguggu

SEQ ID NO: 1159657 - RNA, 24 nt, Human
gguuucaccauguuagccaggaug

SEQ ID NO: 1159658 - RNA, 24 nt, Human
guagggacuucaacucagccaggc

SEQ ID NO: 1159659 - RNA, 26 nt, Human
guccugagagugguagggagggggac

SEQ ID NO: 1159660 - RNA, 19 nt, Human
gucugcccugaggccgugc

SEQ ID NO: 1159661 - RNA, 23 nt, Human
uaaccccagaguccagggaccag

SEQ ID NO: 1159662 - RNA, 24 nt, Human
uaaccccagaguccagggaccagc

SEQ ID NO: 1159663 - RNA, 23 nt, Human
uaaccuccuccaggcagcccucc

SEQ ID NO: 1159664 - RNA, 26 nt, Human
uaacucucucaggaaacccaccugac

SEQ ID NO: 1159665 - RNA, 24 nt, Human
uaauagagacaggguuucaccaug

SEQ ID NO: 1159666 - RNA, 26 nt, Human
uaauagagacaggguuucaccauguu

SEQ ID NO: 1159667 - RNA, 22 nt, Human
uacaggcacccgccaccaugcc

SEQ ID NO: 1159668 - RNA, 22 nt, Human
uacaggcgugagcuaccgcgcc

SEQ ID NO: 1159669 - RNA, 23 nt, Human
uacaggcgugagcuaccgcgccu

SEQ ID NO: 1159670 - RNA, 23 nt, Human
uacauuucagaccaucuccaggg

SEQ ID NO: 1159671 - RNA, 19 nt, Human
uaccucccaaguucacacc

SEQ ID NO: 1159672 - RNA, 21 nt, Human
uagagacaggguuucaccaug

SEQ ID NO: 1159673 - RNA, 22 nt, Human
uagagacaggguuucaccaugu

SEQ ID NO: 1159674 - RNA, 21 nt, Human
ucacaccauucuccugccuca

SEQ ID NO: 1159675 - RNA, 24 nt, Human
ucaccauguuagccaggauggucu

SEQ ID NO: 1159676 - RNA, 21 nt, Human
ucaccuggaaaacacaacugg

SEQ ID NO: 1159677 - RNA, 24 nt, Human
ucacucugucgcccaggcuggagu

SEQ ID NO: 1159678 - RNA, 24 nt, Human
ucacuucucuucaguccaaggguc

SEQ ID NO: 1159679 - RNA, 18 nt, Human
ucagccaggcuauggcuu

SEQ ID NO: 1159680 - RNA, 21 nt, Human
ucagccaggcuauggcuucca

SEQ ID NO: 1159681 - RNA, 23 nt, Human
ucagccuccugaguagcugggac

SEQ ID NO: 1159682 - RNA, 24 nt, Human
ucagcugaccucugacuaucuucc

SEQ ID NO: 1159683 - RNA, 19 nt, Human
uccaagaggacaaacaugg

SEQ ID NO: 1159684 - RNA, 21 nt, Human
uccagagcaacagaaggaaga

SEQ ID NO: 1159685 - RNA, 18 nt, Human
uccaggcagcccucccag

SEQ ID NO: 1159686 - RNA, 21 nt, Human
uccauucacaggaugcagcca

SEQ ID NO: 1159687 - RNA, 24 nt, Human
ucccaaagugcugggauuacaggc

SEQ ID NO: 1159688 - RNA, 21 nt, Human
ucccaaguucacaccauucuc

SEQ ID NO: 1159689 - RNA, 24 nt, Human
ucccaaguucacaccauucuccug

SEQ ID NO: 1159690 - RNA, 22 nt, Human
ucccaggcgaagcugccccaaa

SEQ ID NO: 1159691 - RNA, 20 nt, Human
uccccuucaggaauaagcaa

SEQ ID NO: 1159692 - RNA, 18 nt, Human
ucccuccagagcguggaa

SEQ ID NO: 1159693 - RNA, 19 nt, Human
ucccuguaaccucuaccuc

SEQ ID NO: 1159694 - RNA, 20 nt, Human
uccucagccccacuccauuc

SEQ ID NO: 1159695 - RNA, 19 nt, Human
uccuccaggcagcccuccc

SEQ ID NO: 1159696 - RNA, 22 nt, Human
uccugagagugguagggagggg

SEQ ID NO: 1159697 - RNA, 24 nt, Human
uccugaguagcugggacuacaggc

SEQ ID NO: 1159698 - RNA, 20 nt, Human
uccugggcugucucugagca

SEQ ID NO: 1159699 - RNA, 19 nt, Human
ucgaagcuggguagcuggc

SEQ ID NO: 1159700 - RNA, 24 nt, Human
ucgcccaggcuggagugcaguagc

SEQ ID NO: 1159701 - RNA, 22 nt, Human
ucuaccucccaaguucacacca

SEQ ID NO: 1159702 - RNA, 22 nt, Human
ucucacucugucgcccaggcug

SEQ ID NO: 1159703 - RNA, 23 nt, Human
ucucacucugucgcccaggcugg

SEQ ID NO: 1159704 - RNA, 24 nt, Human
ucucacucugucgcccaggcugga

SEQ ID NO: 1159705 - RNA, 26 nt, Human
ucucacucugucgcccaggcuggagu

SEQ ID NO: 1159706 - RNA, 27 nt, Human
ucucacucugucgcccaggcuggagug

SEQ ID NO: 1159707 - RNA, 24 nt, Human
ucuccugccucagccuccugagua

SEQ ID NO: 1159708 - RNA, 20 nt, Human
ucucuaggccccaguaauuc

SEQ ID NO: 1159709 - RNA, 24 nt, Human
ucucugagcauccagccacagucc

SEQ ID NO: 1159710 - RNA, 22 nt, Human
ucugaaaaacccucuucaggcc

SEQ ID NO: 1159711 - RNA, 22 nt, Human
ucugggcaaccuuggacaauuc

SEQ ID NO: 1159712 - RNA, 24 nt, Human
ucugucgcccaggcuggagugcag

SEQ ID NO: 1159713 - RNA, 21 nt, Human
ucuucaggccuccaggcucuc

SEQ ID NO: 1159714 - RNA, 20 nt, Human
ucuuuucacucaaagccuuc

SEQ ID NO: 1159715 - RNA, 20 nt, Human
ugaaaggaggccuaaggaag

SEQ ID NO: 1159716 - RNA, 20 nt, Human
ugaccucugacuaucuuccc

SEQ ID NO: 1159717 - RNA, 21 nt, Human
ugaccucugacuaucuucccu

SEQ ID NO: 1159718 - RNA, 19 nt, Human
ugagcauccagccacaguc

SEQ ID NO: 1159719 - RNA, 18 nt, Human
ugagccagggguugaugg

SEQ ID NO: 1159720 - RNA, 18 nt, Human
ugaggaaccucaggucug

SEQ ID NO: 1159721 - RNA, 19 nt, Human
ugagggcuucuugaauggu

SEQ ID NO: 1159722 - RNA, 26 nt, Human
ugagggcuucuugaauggugugagaa

SEQ ID NO: 1159723 - RNA, 20 nt, Human
ugagggguucaggauccauc

SEQ ID NO: 1159724 - RNA, 19 nt, Human
ugauggggcccagagccgg

SEQ ID NO: 1159725 - RNA, 22 nt, Human
ugcaguagcgcgaucuuggcuc

SEQ ID NO: 1159726 - RNA, 19 nt, Human
ugcaugggauggggucuga

SEQ ID NO: 1159727 - RNA, 21 nt, Human
ugccacaaaaccggucaucga

SEQ ID NO: 1159728 - RNA, 24 nt, Human
ugccucagccuccugaguagcugg

SEQ ID NO: 1159729 - RNA, 25 nt, Human
ugcuccuucccuaaacccccuuuca

SEQ ID NO: 1159730 - RNA, 20 nt, Human
ugcugggauuacaggcguga

SEQ ID NO: 1159731 - RNA, 22 nt, Human
uggaaaacagcucugcaggaaa

SEQ ID NO: 1159732 - RNA, 21 nt, Human
uggaagauacuuuggggaaga

SEQ ID NO: 1159733 - RNA, 20 nt, Human
uggaggcaagaaagugcaga

SEQ ID NO: 1159734 - RNA, 18 nt, Human
uggaggccccagggaggu

SEQ ID NO: 1159735 - RNA, 18 nt, Human
uggaggccccagggaggu

SEQ ID NO: 1159736 - RNA, 24 nt, Human
uggagucucacucugucgcccagg

SEQ ID NO: 1159737 - RNA, 23 nt, Human
uggagugcaguagcgcgaucuug

SEQ ID NO: 1159738 - RNA, 24 nt, Human
uggagugcaguagcgcgaucuugg

SEQ ID NO: 1159739 - RNA, 18 nt, Human
uggcuuccaacaucuccu

SEQ ID NO: 1159740 - RNA, 21 nt, Human
ugggacuacaggcacccgcca

SEQ ID NO: 1159741 - RNA, 22 nt, Human
ugggacuacaggcacccgccac

SEQ ID NO: 1159742 - RNA, 24 nt, Human
ugggacuacaggcacccgccacca

SEQ ID NO: 1159743 - RNA, 25 nt, Human
ugggacuacaggcacccgccaccau

SEQ ID NO: 1159744 - RNA, 18 nt, Human
ugggauuacaggcgugag

SEQ ID NO: 1159745 - RNA, 19 nt, Human
ugggauuacaggcgugagc

SEQ ID NO: 1159746 - RNA, 21 nt, Human
ugggauuacaggcgugagcua

SEQ ID NO: 1159747 - RNA, 22 nt, Human
ugggauuacaggcgugagcuac

SEQ ID NO: 1159748 - RNA, 23 nt, Human
ugggauuacaggcgugagcuacc

SEQ ID NO: 1159749 - RNA, 24 nt, Human
ugggauuacaggcgugagcuaccg

SEQ ID NO: 1159750 - RNA, 27 nt, Human
uggggcccagagccgggguaaccccag

SEQ ID NO: 1159751 - RNA, 21 nt, Human
ugggugcgaauggcaccugcc

SEQ ID NO: 1159752 - RNA, 23 nt, Human
ugucaaggaagacucuaaccaag

SEQ ID NO: 1159753 - RNA, 24 nt, Human
uuaauagagacaggguuucaccau

SEQ ID NO: 1159754 - RNA, 21 nt, Human
uucacacaugcacggcauccu

SEQ ID NO: 1159755 - RNA, 21 nt, Human
uucuaaaugcagagaaaaccc

SEQ ID NO: 1159756 - RNA, 25 nt, Human
uugaauggugugagaagugauggug

SEQ ID NO: 1159757 - RNA, 22 nt, Human
uuggacaauucagcugaccucu

SEQ ID NO: 1159758 - RNA, 18 nt, Human
uuggccucccaaagugcu

SEQ ID NO: 1159759 - RNA, 21 nt, Human
uuuaagaggcugaccuucaaa

SEQ ID NO: 1159760 - RNA, 21 nt, Human
uuucacacaugcacggcaucc

SEQ ID NO: 1159761 - RNA, 19 nt, Human
uuucaccauguuagccagg

SEQ ID NO: 1159762 - RNA, 20 nt, Human
uuucaccauguuagccagga

SEQ ID NO: 1159763 - RNA, 21 nt, Human
uuuccuuuuuccuuccauugg

SEQ ID NO: 1159764 - RNA, 18 nt, Human
uuugcagaaccuggagug

SEQ ID NO: 1159765 - RNA, 24 nt, Human
uuuuuaauagagacaggguuucac

SEQ ID NO: 1159766 - RNA, 21 nt, Human
uuuuuuguauuuuuaauagag

SEQ ID NO: 1159767 - RNA, 24 nt, Human
uuuuuuguauuuuuaauagagaca

SEQ ID NO: 1159768 - RNA, 18 nt, Human
aaaguauauacccagaac

SEQ ID NO: 1159769 - RNA, 24 nt, Human
aaaguguagggaucacaggcauga

SEQ ID NO: 1159770 - RNA, 22 nt, Human
aacugucuuucucauuccuugg

SEQ ID NO: 1159771 - RNA, 20 nt, Human
acccacccugucccaggccc

SEQ ID NO: 1159772 - RNA, 19 nt, Human
accccaaaagaaaugaggu

SEQ ID NO: 1159773 - RNA, 24 nt, Human
acccugagggucacugagaggaau

SEQ ID NO: 1159774 - RNA, 19 nt, Human
agaaggaagaagugugcag

SEQ ID NO: 1159775 - RNA, 21 nt, Human
agccacugguugaaacucacc

SEQ ID NO: 1159776 - RNA, 21 nt, Human
aggaauaaaggggccaugugu

SEQ ID NO: 1159777 - RNA, 21 nt, Human
aggcugacaccaaaggggcag

SEQ ID NO: 1159778 - RNA, 24 nt, Human
agggaucacaggcaugagucauca

SEQ ID NO: 1159779 - RNA, 24 nt, Human
auccuccugcugugcccuccuaaa

SEQ ID NO: 1159780 - RNA, 19 nt, Human
auguugaccaggcuggucu

SEQ ID NO: 1159781 - RNA, 19 nt, Human
auguugaccaggcuggucu

SEQ ID NO: 1159782 - RNA, 24 nt, Human
caaaagaaaugagguuugaguaug

SEQ ID NO: 1159783 - RNA, 23 nt, Human
caacccccacauccucaccaccu

SEQ ID NO: 1159784 - RNA, 24 nt, Human
cacaggcaugagucaucacaucca

SEQ ID NO: 1159785 - RNA, 22 nt, Human
cacccugucccaggcccaugcu

SEQ ID NO: 1159786 - RNA, 20 nt, Human
caccuguuuguugcagccuc

SEQ ID NO: 1159787 - RNA, 25 nt, Human
cagacaaaaacuagcaauggucuca

SEQ ID NO: 1159788 - RNA, 22 nt, Human
cagagagagagucuugcuaugu

SEQ ID NO: 1159789 - RNA, 22 nt, Human
caggagccgccaagaaucgguc

SEQ ID NO: 1159790 - RNA, 23 nt, Human
cagugggugauggcagagauucc

SEQ ID NO: 1159791 - RNA, 25 nt, Human
cagugggugauggcagagauucccu

SEQ ID NO: 1159792 - RNA, 20 nt, Human
caguguggaagcauguugcc

SEQ ID NO: 1159793 - RNA, 23 nt, Human
cauaagccugagauaugugcagg

SEQ ID NO: 1159794 - RNA, 21 nt, Human
ccaaaggggcagaguauggca

SEQ ID NO: 1159795 - RNA, 20 nt, Human
cccacuggugaucucaccca

SEQ ID NO: 1159796 - RNA, 27 nt, Human
cccauagcaccugcugauuguccugga

SEQ ID NO: 1159797 - RNA, 21 nt, Human
cccaugagccacaacucugcc

SEQ ID NO: 1159798 - RNA, 19 nt, Human
ccccacauccucaccaccu

SEQ ID NO: 1159799 - RNA, 22 nt, Human
cccccacauccucaccaccugu

SEQ ID NO: 1159800 - RNA, 21 nt, Human
cccugucccaggcccaugcuc

SEQ ID NO: 1159801 - RNA, 18 nt, Human
ccuccuaaaguguaggga

SEQ ID NO: 1159802 - RNA, 22 nt, Human
ccuccugcugugcccuccuaaa

SEQ ID NO: 1159803 - RNA, 18 nt, Human
ccuggucccauuuugucu

SEQ ID NO: 1159804 - RNA, 19 nt, Human
ccuggucccauuuugucuc

SEQ ID NO: 1159805 - RNA, 18 nt, Human
cgaucauacaggacgaca

SEQ ID NO: 1159806 - RNA, 21 nt, Human
cggcugcagaguggcuaccau

SEQ ID NO: 1159807 - RNA, 20 nt, Human
cgucgcccccaugaccugcu

SEQ ID NO: 1159808 - RNA, 24 nt, Human
cuaaaguguagggaucacaggcau

SEQ ID NO: 1159809 - RNA, 21 nt, Human
cuaguaaacaagcaaaaggaa

SEQ ID NO: 1159810 - RNA, 18 nt, Human
cucacugggcuucuggga

SEQ ID NO: 1159811 - RNA, 23 nt, Human
cucaggcgauccuccugcugugc

SEQ ID NO: 1159812 - RNA, 19 nt, Human
cuucuuggucucagcgucc

SEQ ID NO: 1159813 - RNA, 20 nt, Human
cuugaauuccugggcucagg

SEQ ID NO: 1159814 - RNA, 21 nt, Human
cuugugauagcccccuggucc

SEQ ID NO: 1159815 - RNA, 23 nt, Human
cuuucaacccccacauccucacc

SEQ ID NO: 1159816 - RNA, 19 nt, Human
gaccuguuccucuucuugg

SEQ ID NO: 1159817 - RNA, 22 nt, Human
gaccuguuccucuucuuggucu

SEQ ID NO: 1159818 - RNA, 27 nt, Human
gagagagugugugugugugugugugug

SEQ ID NO: 1159819 - RNA, 23 nt, Human
gagcccacuggugaucucaccca

SEQ ID NO: 1159820 - RNA, 18 nt, Human
gagggucacugagaggaa

SEQ ID NO: 1159821 - RNA, 21 nt, Human
gaguauguuagaguaugccaa

SEQ ID NO: 1159822 - RNA, 18 nt, Human
gaucacaggcaugaguca

SEQ ID NO: 1159823 - RNA, 22 nt, Human
gaucacaggcaugagucaucac

SEQ ID NO: 1159824 - RNA, 20 nt, Human
gcugugggucuacaccagca

SEQ ID NO: 1159825 - RNA, 20 nt, Human
ggaaacugcuagggcucagg

SEQ ID NO: 1159826 - RNA, 18 nt, Human
ggagaucuugggagcuua

SEQ ID NO: 1159827 - RNA, 20 nt, Human
ggagaucuugggagcuuagg

SEQ ID NO: 1159828 - RNA, 19 nt, Human
ggaucacaggcaugaguca

SEQ ID NO: 1159829 - RNA, 22 nt, Human
ggcccccaugaaccuuacuccc

SEQ ID NO: 1159830 - RNA, 18 nt, Human
ggcugucccccacaaauc

SEQ ID NO: 1159831 - RNA, 20 nt, Human
gggaucacaggcaugaguca

SEQ ID NO: 1159832 - RNA, 23 nt, Human
gggaucacaggcaugagucauca

SEQ ID NO: 1159833 - RNA, 19 nt, Human
gggcucaggcgauccuccu

SEQ ID NO: 1159834 - RNA, 18 nt, Human
guaacccacccuguccca

SEQ ID NO: 1159835 - RNA, 21 nt, Human
gugucuucaggaaggagccgg

SEQ ID NO: 1159836 - RNA, 20 nt, Human
gugugugugugugugugugu

SEQ ID NO: 1159837 - RNA, 23 nt, Human
guugcagugggugauggcagaga

SEQ ID NO: 1159838 - RNA, 23 nt, Human
uaaaacugaccuuuaaggcugac

SEQ ID NO: 1159839 - RNA, 21 nt, Human
uaaacaagcaaaaggaaacug

SEQ ID NO: 1159840 - RNA, 22 nt, Human
uaaacaagcaaaaggaaacugc

SEQ ID NO: 1159841 - RNA, 20 nt, Human
uaagacuggugcagacaaaa

SEQ ID NO: 1159842 - RNA, 25 nt, Human
uaagacuggugcagacaaaaacuag

SEQ ID NO: 1159843 - RNA, 20 nt, Human
uacaccguuuccuuucaacc

SEQ ID NO: 1159844 - RNA, 21 nt, Human
uacaccguuuccuuucaaccc

SEQ ID NO: 1159845 - RNA, 21 nt, Human
uacccugagggucacugagag

SEQ ID NO: 1159846 - RNA, 21 nt, Human
uagcccccuggucccauuuug

SEQ ID NO: 1159847 - RNA, 23 nt, Human
uagcccccuggucccauuuuguc

SEQ ID NO: 1159848 - RNA, 22 nt, Human
uaguggauguucagcacgggau

SEQ ID NO: 1159849 - RNA, 23 nt, Human
uaguggauguucagcacgggauu

SEQ ID NO: 1159850 - RNA, 24 nt, Human
uauguugaccaggcuggucuugaa

SEQ ID NO: 1159851 - RNA, 18 nt, Human
uauugugugauacaagga

SEQ ID NO: 1159852 - RNA, 22 nt, Human
ucaggcagagccuccgcccucc

SEQ ID NO: 1159853 - RNA, 22 nt, Human
uccagguuguuuucccuaagac

SEQ ID NO: 1159854 - RNA, 18 nt, Human
ucccaggcccaugcucug

SEQ ID NO: 1159855 - RNA, 19 nt, Human
ucccccacaaauccucuca

SEQ ID NO: 1159856 - RNA, 20 nt, Human
ucccuaagacuggugcagac

SEQ ID NO: 1159857 - RNA, 18 nt, Human
ucccucuugggcagaaac

SEQ ID NO: 1159858 - RNA, 25 nt, Human
ucccucuugggcagaaacccuaaac

SEQ ID NO: 1159859 - RNA, 24 nt, Human
uccuaaaguguagggaucacaggc

SEQ ID NO: 1159860 - RNA, 21 nt, Human
uccugggcucaggcgauccuc

SEQ ID NO: 1159861 - RNA, 22 nt, Human
uccugggcucaggcgauccucc

SEQ ID NO: 1159862 - RNA, 24 nt, Human
uccugggcucaggcgauccuccug

SEQ ID NO: 1159863 - RNA, 18 nt, Human
ucgcccccaugaccugcu

SEQ ID NO: 1159864 - RNA, 20 nt, Human
ucugcucugucauccccaug

SEQ ID NO: 1159865 - RNA, 21 nt, Human
ucugcucugucauccccauga

SEQ ID NO: 1159866 - RNA, 23 nt, Human
ucuugcuauguugaccaggcugg

SEQ ID NO: 1159867 - RNA, 24 nt, Human
ucuugcuauguugaccaggcuggu

SEQ ID NO: 1159868 - RNA, 19 nt, Human
ucuugggcagaaacccuaa

SEQ ID NO: 1159869 - RNA, 21 nt, Human
ugaaacucaccuaaaacugac

SEQ ID NO: 1159870 - RNA, 24 nt, Human
ugaaagaugauuucugucagugug

SEQ ID NO: 1159871 - RNA, 24 nt, Human
ugaccaggcuggucuugaauuccu

SEQ ID NO: 1159872 - RNA, 24 nt, Human
ugacccugaccuguuccucuucuu

SEQ ID NO: 1159873 - RNA, 25 nt, Human
ugaccuguuccucuucuuggucuca

SEQ ID NO: 1159874 - RNA, 19 nt, Human
ugagggucacugagaggaa

SEQ ID NO: 1159875 - RNA, 20 nt, Human
ugaguugagggcucagggcu

SEQ ID NO: 1159876 - RNA, 19 nt, Human
ugcagacaaaaacuagcaa

SEQ ID NO: 1159877 - RNA, 18 nt, Human
ugccggcugcagaguggc

SEQ ID NO: 1159878 - RNA, 22 nt, Human
ugcugugcccuccuaaagugua

SEQ ID NO: 1159879 - RNA, 23 nt, Human
uggagucagacagaacugugucc

SEQ ID NO: 1159880 - RNA, 21 nt, Human
ugggcagaaacccuaaacauu

SEQ ID NO: 1159881 - RNA, 24 nt, Human
uggucuugaauuccugggcucagg

SEQ ID NO: 1159882 - RNA, 22 nt, Human
uguagggaucacaggcaugagu

SEQ ID NO: 1159883 - RNA, 22 nt, Human
ugucucucaaacugucuuucuc

SEQ ID NO: 1159884 - RNA, 18 nt, Human
ugugugugugugugugug

SEQ ID NO: 1159885 - RNA, 18 nt, Human
ugugugugugugugugug

SEQ ID NO: 1159886 - RNA, 18 nt, Human
ugugugugugugugugug

SEQ ID NO: 1159887 - RNA, 21 nt, Human
ugugugugugugugugugugu

SEQ ID NO: 1159888 - RNA, 21 nt, Human
ugugugugugugugugugugu

SEQ ID NO: 1159889 - RNA, 21 nt, Human
ugugugugugugugugugugu

SEQ ID NO: 1159890 - RNA, 21 nt, Human
ugugugugugugugugugugu

SEQ ID NO: 1159891 - RNA, 22 nt, Human
ugugugugugugugugugugug

SEQ ID NO: 1159892 - RNA, 19 nt, Human
uguguguguguguguguug

SEQ ID NO: 1159893 - RNA, 20 nt, Human
uguuucauaagccugagaua

SEQ ID NO: 1159894 - RNA, 21 nt, Human
uguuucauaagccugagauau

SEQ ID NO: 1159895 - RNA, 18 nt, Human
uguuuucccuaagacugg

SEQ ID NO: 1159896 - RNA, 20 nt, Human
uucaacccccacauccucac

SEQ ID NO: 1159897 - RNA, 24 nt, Human
uucaacccccacauccucaccacc

SEQ ID NO: 1159898 - RNA, 19 nt, Human
uucaggaaggagccggucc

SEQ ID NO: 1159899 - RNA, 21 nt, Human
uucaggaaggagccgguccug

SEQ ID NO: 1159900 - RNA, 22 nt, Human
uucaucagugacagagcuggau

SEQ ID NO: 1159901 - RNA, 18 nt, Human
uuccuuggacuccacugg

SEQ ID NO: 1159902 - RNA, 22 nt, Human
uucugcucugucauccccauga

SEQ ID NO: 1159903 - RNA, 23 nt, Human
uucugcucugucauccccaugag

SEQ ID NO: 1159904 - RNA, 24 nt, Human
uucuuggucucagcguccuucacu

SEQ ID NO: 1159905 - RNA, 23 nt, Human
uugugugauacaaggaauaucug

SEQ ID NO: 1159906 - RNA, 19 nt, Human
uuuccuuucaacccccaca

SEQ ID NO: 1159907 - RNA, 24 nt, Human
aaaaaaaaaaaaaaaaaaaaggga

SEQ ID NO: 1159908 - RNA, 23 nt, Human
aaaaaaacaaacaaauggauuag

SEQ ID NO: 1159909 - RNA, 24 nt, Human
aaaaaaacaaacaaauggauuagg

SEQ ID NO: 1159910 - RNA, 22 nt, Human
aaaaaaagggauuauuuucuau

SEQ ID NO: 1159911 - RNA, 23 nt, Human
aaaaaacaaacaaacaaacaaaa

SEQ ID NO: 1159912 - RNA, 25 nt, Human
aaaaacaaacaaauggauuaggcca

SEQ ID NO: 1159913 - RNA, 26 nt, Human
aaaacaaacaaauggauuaggccagg

SEQ ID NO: 1159914 - RNA, 21 nt, Human
aaaacugcuuuuauuuguagc

SEQ ID NO: 1159915 - RNA, 23 nt, Human
aaacaaaaaagaaaaccuuaaag

SEQ ID NO: 1159916 - RNA, 25 nt, Human
aaacaaacaaacaaacaaaaaaaca

SEQ ID NO: 1159917 - RNA, 23 nt, Human
aaacaaacugaagguggccuuca

SEQ ID NO: 1159918 - RNA, 20 nt, Human
aaacugcugggauuacaggu

SEQ ID NO: 1159919 - RNA, 24 nt, Human
aaacugcugggauuacagguguga

SEQ ID NO: 1159920 - RNA, 19 nt, Human
aaagaaaaccuuaaagucu

SEQ ID NO: 1159921 - RNA, 19 nt, Human
aaaguacugugcuuucccu

SEQ ID NO: 1159922 - RNA, 23 nt, Human
aaaucccaacaaccacaugagcu

SEQ ID NO: 1159923 - RNA, 24 nt, Human
aacaaacaaacaaacaaaaaaaca

SEQ ID NO: 1159924 - RNA, 21 nt, Human
aacacauggcaggccaacccu

SEQ ID NO: 1159925 - RNA, 21 nt, Human
aacagaucgagacuccgucuc

SEQ ID NO: 1159926 - RNA, 24 nt, Human
aacagaucgagacuccgucucaaa

SEQ ID NO: 1159927 - RNA, 19 nt, Human
aacauggugaaacccuguc

SEQ ID NO: 1159928 - RNA, 20 nt, Human
aacauggugaaacccugucu

SEQ ID NO: 1159929 - RNA, 21 nt, Human
aacauggugaaacccugucuc

SEQ ID NO: 1159930 - RNA, 19 nt, Human
aacauuuugggaggcugag

SEQ ID NO: 1159931 - RNA, 19 nt, Human
aagaaagaaauacaaagaa

SEQ ID NO: 1159932 - RNA, 33 nt, Human
aagaaagaaauacaaagaacucuaaagagaaag

SEQ ID NO: 1159933 - RNA, 23 nt, Human
aagaaauacaaagaacucuaaag

SEQ ID NO: 1159934 - RNA, 21 nt, Human
aagacaccuugucaaccauag

SEQ ID NO: 1159935 - RNA, 19 nt, Human
aagaguucaagaccagccu

SEQ ID NO: 1159936 - RNA, 22 nt, Human
aagauccugcccacuccaacac

SEQ ID NO: 1159937 - RNA, 21 nt, Human
aagaugaacagaauuuaauca

SEQ ID NO: 1159938 - RNA, 24 nt, Human
aaggaaccauagacagaaacagac

SEQ ID NO: 1159939 - RNA, 24 nt, Human
aaguagcuggaauuacaggcacgu

SEQ ID NO: 1159940 - RNA, 25 nt, Human
aaguagcuggaauuacaggcacgug

SEQ ID NO: 1159941 - RNA, 26 nt, Human
aauagcaagacuucauuucuccaaaa

SEQ ID NO: 1159942 - RNA, 18 nt, Human
aauuacaagcaugagcca

SEQ ID NO: 1159943 - RNA, 20 nt, Human
aauugcuugaacccaggagg

SEQ ID NO: 1159944 - RNA, 24 nt, Human
aauugcuugaacccaggaggcaga

SEQ ID NO: 1159945 - RNA, 23 nt, Human
acaaacaaaaaaacaaacaaaug

SEQ ID NO: 1159946 - RNA, 22 nt, Human
acaaauuaucuaccuuugucac

SEQ ID NO: 1159947 - RNA, 22 nt, Human
acaaggagggaucuccugggac

SEQ ID NO: 1159948 - RNA, 23 nt, Human
acaagguuucaucauguuggcca

SEQ ID NO: 1159949 - RNA, 24 nt, Human
acaagguuucaucauguuggccag

SEQ ID NO: 1159950 - RNA, 20 nt, Human
acacauggcaggccaacccu

SEQ ID NO: 1159951 - RNA, 18 nt, Human
acagauccaggaagucca

SEQ ID NO: 1159952 - RNA, 24 nt, Human
acagaucgagacuccgucucaaaa

SEQ ID NO: 1159953 - RNA, 24 nt, Human
acaggggaagaucccgucucaaaa

SEQ ID NO: 1159954 - RNA, 22 nt, Human
acagugcuggccuauacuaaca

SEQ ID NO: 1159955 - RNA, 23 nt, Human
accaaagauccugcccacuccaa

SEQ ID NO: 1159956 - RNA, 22 nt, Human
accacaaccucccgucucccgg

SEQ ID NO: 1159957 - RNA, 24 nt, Human
accguggcuaacauggugaaaccc

SEQ ID NO: 1159958 - RNA, 22 nt, Human
accugacaccagguacugacgc

SEQ ID NO: 1159959 - RNA, 20 nt, Human
acgggguuucuccauguugg

SEQ ID NO: 1159960 - RNA, 21 nt, Human
acgggguuucuccauguuggu

SEQ ID NO: 1159961 - RNA, 24 nt, Human
acgggguuucuccauguuggucag

SEQ ID NO: 1159962 - RNA, 23 nt, Human
acucaggcuggagugcaguggug

SEQ ID NO: 1159963 - RNA, 30 nt, Human
acuccgucucaaaaaacaaacaaacaaacc

SEQ ID NO: 1159964 - RNA, 24 nt, Human
acugcacuccagccugggcaacag

SEQ ID NO: 1159965 - RNA, 18 nt, Human
acugcugggauuacaggu

SEQ ID NO: 1159966 - RNA, 19 nt, Human
acuggagugcaauggcacg

SEQ ID NO: 1159967 - RNA, 21 nt, Human
agaaagaaauacaaagaacuc

SEQ ID NO: 1159968 - RNA, 19 nt, Human
agaauccagcaaagaccgc

SEQ ID NO: 1159969 - RNA, 23 nt, Human
agaauccagcaaagaccgcggga

SEQ ID NO: 1159970 - RNA, 20 nt, Human
agacaggagaaucauugagc

SEQ ID NO: 1159971 - RNA, 22 nt, Human
agagguugcagugacccaagau

SEQ ID NO: 1159972 - RNA, 24 nt, Human
agagguugcagugacccaagauug

SEQ ID NO: 1159973 - RNA, 19 nt, Human
agaugguuuuuggagauau

SEQ ID NO: 1159974 - RNA, 23 nt, Human
agcaccuucuaucauagagcaac

SEQ ID NO: 1159975 - RNA, 24 nt, Human
agcacuuugggaggccgaggcagg

SEQ ID NO: 1159976 - RNA, 19 nt, Human
agccaccgcacccggccca

SEQ ID NO: 1159977 - RNA, 23 nt, Human
agccagauguggugacaugugcc

SEQ ID NO: 1159978 - RNA, 24 nt, Human
agccugggcaacagaucgagacuc

SEQ ID NO: 1159979 - RNA, 23 nt, Human
agccuggguaaaauagcaagacu

SEQ ID NO: 1159980 - RNA, 24 nt, Human
agccuggguaaaauagcaagacuu

SEQ ID NO: 1159981 - RNA, 24 nt, Human
agcgauucuccugccucagccucc

SEQ ID NO: 1159982 - RNA, 18 nt, Human
aggaagcccagcccuggc

SEQ ID NO: 1159983 - RNA, 19 nt, Human
aggcagagguugcagugac

SEQ ID NO: 1159984 - RNA, 24 nt, Human
aggcagagguugcagugacccaag

SEQ ID NO: 1159985 - RNA, 23 nt, Human
aggcaggagaauugcuugaaccc

SEQ ID NO: 1159986 - RNA, 24 nt, Human
aggcagguggaucacgaggucagg

SEQ ID NO: 1159987 - RNA, 26 nt, Human
aggcagguggaucacgaggucaggag

SEQ ID NO: 1159988 - RNA, 21 nt, Human
aggccgaggcagguggaucac

SEQ ID NO: 1159989 - RNA, 24 nt, Human
aggcgcaguggcucaugccugcaa

SEQ ID NO: 1159990 - RNA, 24 nt, Human
aggcguguuggcaugcaccuguag

SEQ ID NO: 1159991 - RNA, 24 nt, Human
aggcuaaggcaggagaauugcuug

SEQ ID NO: 1159992 - RNA, 25 nt, Human
aggcuggagugcaguggugcaaucu

SEQ ID NO: 1159993 - RNA, 24 nt, Human
aggugauccgccugccuuggccuc

SEQ ID NO: 1159994 - RNA, 24 nt, Human
agguggaucacgaggucaggagau

SEQ ID NO: 1159995 - RNA, 22 nt, Human
agguuucaucauguuggccagg

SEQ ID NO: 1159996 - RNA, 18 nt, Human
aguagagacaagguuuca

SEQ ID NO: 1159997 - RNA, 21 nt, Human
aguaguugggauuacaggcau

SEQ ID NO: 1159998 - RNA, 22 nt, Human
aguauuuaaacauccccugccc

SEQ ID NO: 1159999 - RNA, 20 nt, Human
agugcaguggugcaaucucg

SEQ ID NO: 1160000 - RNA, 24 nt, Human
aguggcucacgccuguaaucccag

SEQ ID NO: 1160001 - RNA, 23 nt, Human
aguggcucaugccugcaaucuca

SEQ ID NO: 1160002 - RNA, 20 nt, Human
aucagaauccagcaaagacc

SEQ ID NO: 1160003 - RNA, 24 nt, Human
aucauguuggccaggcuggucuug

SEQ ID NO: 1160004 - RNA, 21 nt, Human
auccacccaccucggccuucc

SEQ ID NO: 1160005 - RNA, 18 nt, Human
aucccgucucaaaaaaaa

SEQ ID NO: 1160006 - RNA, 28 nt, Human
aucccgucucaaaaaaaaaaaaaaaaaa

SEQ ID NO: 1160007 - RNA, 21 nt, Human
auccugaaauucuuaauuuuu

SEQ ID NO: 1160008 - RNA, 22 nt, Human
augcaguguugucugaguguuu

SEQ ID NO: 1160009 - RNA, 24 nt, Human
auugcuccacugcacuccagccug

SEQ ID NO: 1160010 - RNA, 24 nt, Human
caaacugcugggauuacaggugug

SEQ ID NO: 1160011 - RNA, 22 nt, Human
caaaggaaccauagacagaaac

SEQ ID NO: 1160012 - RNA, 20 nt, Human
caacacuaugaagaaagaaa

SEQ ID NO: 1160013 - RNA, 18 nt, Human
caacauuuugggaggcug

SEQ ID NO: 1160014 - RNA, 24 nt, Human
caacauuuugggaggcugagacag

SEQ ID NO: 1160015 - RNA, 28 nt, Human
caacucccagguucaagcgagucuccuu

SEQ ID NO: 1160016 - RNA, 23 nt, Human
caagagcacacaaaggaaccagu

SEQ ID NO: 1160017 - RNA, 22 nt, Human
caagcgagucuccugccucagc

SEQ ID NO: 1160018 - RNA, 22 nt, Human
caagcgauucuccugccucagc

SEQ ID NO: 1160019 - RNA, 24 nt, Human
caaggaaauucacuuuaaaaaaaa

SEQ ID NO: 1160020 - RNA, 24 nt, Human
caagguuucaucauguuggccagg

SEQ ID NO: 1160021 - RNA, 19 nt, Human
caauauguuuacuuugcag

SEQ ID NO: 1160022 - RNA, 20 nt, Human
caauauguuuacuuugcagu

SEQ ID NO: 1160023 - RNA, 24 nt, Human
cacagugcuggaauuacaagcaug

SEQ ID NO: 1160024 - RNA, 24 nt, Human
caccacacccggcuaauuuuugua

SEQ ID NO: 1160025 - RNA, 23 nt, Human
cacccugccggcuaauuuuugua

SEQ ID NO: 1160026 - RNA, 18 nt, Human
caccgcacccggcccaaa

SEQ ID NO: 1160027 - RNA, 23 nt, Human
caccguauuccagccucggagac

SEQ ID NO: 1160028 - RNA, 22 nt, Human
caccgugccaagcccuccccuc

SEQ ID NO: 1160029 - RNA, 18 nt, Human
caccuguagucgcagcua

SEQ ID NO: 1160030 - RNA, 24 nt, Human
caccuguagucgcagcuacucagg

SEQ ID NO: 1160031 - RNA, 24 nt, Human
caccuugucaaccauagggagacu

SEQ ID NO: 1160032 - RNA, 24 nt, Human
cacgccuguaaucccagcacuuug

SEQ ID NO: 1160033 - RNA, 24 nt, Human
cacucaggcuggagugcaguggug

SEQ ID NO: 1160034 - RNA, 21 nt, Human
cacugcaaccuccaacuccca

SEQ ID NO: 1160035 - RNA, 19 nt, Human
cacugcacuccagccuggg

SEQ ID NO: 1160036 - RNA, 21 nt, Human
cacugcacuccagccugggca

SEQ ID NO: 1160037 - RNA, 22 nt, Human
cacugcacuccagccugggcaa

SEQ ID NO: 1160038 - RNA, 23 nt, Human
cacugcacuccagccugggcaac

SEQ ID NO: 1160039 - RNA, 24 nt, Human
cacugcacuccagccugggcaaca

SEQ ID NO: 1160040 - RNA, 24 nt, Human
cagcacuuugggaggccgaggcag

SEQ ID NO: 1160041 - RNA, 26 nt, Human
cagcacuuugggaggccgaggcaggu

SEQ ID NO: 1160042 - RNA, 18 nt, Human
cagcccccagggauccca

SEQ ID NO: 1160043 - RNA, 20 nt, Human
cagccuccugaguaguuggg

SEQ ID NO: 1160044 - RNA, 22 nt, Human
cagcuucuaaguauuucauuuc

SEQ ID NO: 1160045 - RNA, 19 nt, Human
caguagaaaggagucuaca

SEQ ID NO: 1160046 - RNA, 24 nt, Human
caguccuaucccucagucucccca

SEQ ID NO: 1160047 - RNA, 25 nt, Human
cagugcuggaauuacaagcaugagc

SEQ ID NO: 1160048 - RNA, 18 nt, Human
caguugccauccugaaau

SEQ ID NO: 1160049 - RNA, 18 nt, Human
cauagacagaaacagacu

SEQ ID NO: 1160050 - RNA, 23 nt, Human
cauagacagaaacagacuccuaa

SEQ ID NO: 1160051 - RNA, 27 nt, Human
caucauguuggccaggcuggucuugaa

SEQ ID NO: 1160052 - RNA, 19 nt, Human
caugagccaccgugccaag

SEQ ID NO: 1160053 - RNA, 24 nt, Human
caugccugcaaucucaacauuuug

SEQ ID NO: 1160054 - RNA, 18 nt, Human
cauguuggccaggcuggu

SEQ ID NO: 1160055 - RNA, 20 nt, Human
cauguuggccaggcuggucu

SEQ ID NO: 1160056 - RNA, 24 nt, Human
cauguuggccaggcuggucuugaa

SEQ ID NO: 1160057 - RNA, 24 nt, Human
cauguuggucaggcugguugugaa

SEQ ID NO: 1160058 - RNA, 19 nt, Human
cauuucaaaugccaccucc

SEQ ID NO: 1160059 - RNA, 21 nt, Human
ccaaacugcugggauuacagg

SEQ ID NO: 1160060 - RNA, 21 nt, Human
ccaaacugcugggauuacagg

SEQ ID NO: 1160061 - RNA, 24 nt, Human
ccaaacugcugggauuacaggugu

SEQ ID NO: 1160062 - RNA, 24 nt, Human
ccacaaccucccgucucccggguu

SEQ ID NO: 1160063 - RNA, 25 nt, Human
ccacaaccucccgucucccggguuc

SEQ ID NO: 1160064 - RNA, 18 nt, Human
ccacaaggaaauucacuu

SEQ ID NO: 1160065 - RNA, 24 nt, Human
ccacagugcuggaauuacaagcau

SEQ ID NO: 1160066 - RNA, 20 nt, Human
ccaccguauuccagccucgg

SEQ ID NO: 1160067 - RNA, 24 nt, Human
ccaccguauuccagccucggagac

SEQ ID NO: 1160068 - RNA, 23 nt, Human
ccaccgugccaagcccuccccuc

SEQ ID NO: 1160069 - RNA, 18 nt, Human
ccacuccaacacauggca

SEQ ID NO: 1160070 - RNA, 20 nt, Human
ccacugcacuccagccuggg

SEQ ID NO: 1160071 - RNA, 20 nt, Human
ccacugcacuccagccuggg

SEQ ID NO: 1160072 - RNA, 21 nt, Human
ccacugcacuccagccugggc

SEQ ID NO: 1160073 - RNA, 23 nt, Human
ccacugcacuccagccugggcaa

SEQ ID NO: 1160074 - RNA, 24 nt, Human
ccacugcacuccagccugggcaac

SEQ ID NO: 1160075 - RNA, 18 nt, Human
ccagcuucuaaguauuuc

SEQ ID NO: 1160076 - RNA, 22 nt, Human
ccaggaggcagagguugcagug

SEQ ID NO: 1160077 - RNA, 25 nt, Human
ccaguccuaucccucagucucccca

SEQ ID NO: 1160078 - RNA, 19 nt, Human
ccauguuggucaggcuggu

SEQ ID NO: 1160079 - RNA, 19 nt, Human
ccauguuggucaggcuggu

SEQ ID NO: 1160080 - RNA, 23 nt, Human
cccaaguagcuggaauuacaggc

SEQ ID NO: 1160081 - RNA, 24 nt, Human
cccagcccuggcuaccaucuugac

SEQ ID NO: 1160082 - RNA, 23 nt, Human
cccagguucaagcgagucucccc

SEQ ID NO: 1160083 - RNA, 23 nt, Human
cccagguucaagcgagucuccug

SEQ ID NO: 1160084 - RNA, 18 nt, Human
cccgaccucaggugaucc

SEQ ID NO: 1160085 - RNA, 21 nt, Human
cccgaccucaggugauccgcc

SEQ ID NO: 1160086 - RNA, 23 nt, Human
cccgaccucaggugauccgccug

SEQ ID NO: 1160087 - RNA, 20 nt, Human
cccggguucaagcgauucuc

SEQ ID NO: 1160088 - RNA, 23 nt, Human
cccggguucaagcgauucuccug

SEQ ID NO: 1160089 - RNA, 22 nt, Human
cccucagucuccccauaaaugc

SEQ ID NO: 1160090 - RNA, 25 nt, Human
cccuguagcauagaauacagugcug

SEQ ID NO: 1160091 - RNA, 22 nt, Human
ccgcacccggcccaaacucuua

SEQ ID NO: 1160092 - RNA, 23 nt, Human
ccgccugccuuggccucccaaac

SEQ ID NO: 1160093 - RNA, 22 nt, Human
ccuaugguccuagcuacucagg

SEQ ID NO: 1160094 - RNA, 23 nt, Human
ccugaguaguugggauuacaggc

SEQ ID NO: 1160095 - RNA, 24 nt, Human
ccugaguaguugggauuacaggca

SEQ ID NO: 1160096 - RNA, 18 nt, Human
ccugaucucccaggccag

SEQ ID NO: 1160097 - RNA, 20 nt, Human
ccugaucucccaggccagau

SEQ ID NO: 1160098 - RNA, 21 nt, Human
ccugaucucccaggccagaug

SEQ ID NO: 1160099 - RNA, 22 nt, Human
ccugcaaucucaacauuuuggg

SEQ ID NO: 1160100 - RNA, 23 nt, Human
ccugccucagccucccaaguagc

SEQ ID NO: 1160101 - RNA, 21 nt, Human
ccuggccaucaccuugacucc

SEQ ID NO: 1160102 - RNA, 25 nt, Human
ccuggccaucaccuugguccccugg

SEQ ID NO: 1160103 - RNA, 21 nt, Human
ccuggcuaaggcacugguagc

SEQ ID NO: 1160104 - RNA, 20 nt, Human
ccugggcaagucacuuaacu

SEQ ID NO: 1160105 - RNA, 18 nt, Human
ccuguagcauagaauaca

SEQ ID NO: 1160106 - RNA, 21 nt, Human
ccuguagucgcagcuacucag

SEQ ID NO: 1160107 - RNA, 18 nt, Human
cgaccucaggugauccgc

SEQ ID NO: 1160108 - RNA, 24 nt, Human
cgaccucaggugauccgccugccu

SEQ ID NO: 1160109 - RNA, 24 nt, Human
cgagaccaccguggcuaacauggu

SEQ ID NO: 1160110 - RNA, 24 nt, Human
cgaggcagguggaucacgagguca

SEQ ID NO: 1160111 - RNA, 21 nt, Human
cgcaccaccguauuccagccu

SEQ ID NO: 1160112 - RNA, 23 nt, Human
cgccuguaaucccagcacuuugg

SEQ ID NO: 1160113 - RNA, 24 nt, Human
cgccuguaaucccagcacuuuggg

SEQ ID NO: 1160114 - RNA, 31 nt, Human
cggcuaauuuuuguauuuuuaguagagacaa

SEQ ID NO: 1160115 - RNA, 24 nt, Human
cgggguuucuccauguuggucagg

SEQ ID NO: 1160116 - RNA, 25 nt, Human
cgucucaaaaaacaaacaaacaaac

SEQ ID NO: 1160117 - RNA, 24 nt, Human
cguggcuaacauggugaaacccug

SEQ ID NO: 1160118 - RNA, 23 nt, Human
cuaauuuuuguauuuuuaguaga

SEQ ID NO: 1160119 - RNA, 23 nt, Human
cucaaaaaaaaaaaaaaaaaaaa

SEQ ID NO: 1160120 - RNA, 19 nt, Human
cucacacaucaagcucccc

SEQ ID NO: 1160121 - RNA, 22 nt, Human
cucaccacaaccucccgucucc

SEQ ID NO: 1160122 - RNA, 25 nt, Human
cucaccacaaccucccgucucccgg

SEQ ID NO: 1160123 - RNA, 22 nt, Human
cucacgccuguaaucccagcac

SEQ ID NO: 1160124 - RNA, 24 nt, Human
cucacgccuguaaucccagcacuu

SEQ ID NO: 1160125 - RNA, 24 nt, Human
cucaugccugcaaucucaacauuu

SEQ ID NO: 1160126 - RNA, 22 nt, Human
cucauuagcuguaugauccugg

SEQ ID NO: 1160127 - RNA, 24 nt, Human
cuccacugcacuccagccugggca

SEQ ID NO: 1160128 - RNA, 27 nt, Human
cuccagccuugagaccccagcccuggc

SEQ ID NO: 1160129 - RNA, 22 nt, Human
cuccauguuggucaggcugguu

SEQ ID NO: 1160130 - RNA, 21 nt, Human
cucccaaacugcugggauuac

SEQ ID NO: 1160131 - RNA, 26 nt, Human
cucccgaccucaggugauccgccugc

SEQ ID NO: 1160132 - RNA, 23 nt, Human
cucccuugucugacaggccuuau

SEQ ID NO: 1160133 - RNA, 22 nt, Human
cuccgucucaaaaaacaaacaa

SEQ ID NO: 1160134 - RNA, 21 nt, Human
cugagacaggagaaucauuga

SEQ ID NO: 1160135 - RNA, 24 nt, Human
cugaguaguugggauuacaggcau

SEQ ID NO: 1160136 - RNA, 23 nt, Human
cugcaaccuccaacucccagguu

SEQ ID NO: 1160137 - RNA, 24 nt, Human
cugcaaccuccaacucccagguuc

SEQ ID NO: 1160138 - RNA, 22 nt, Human
cugcagugagcuuugaucgcac

SEQ ID NO: 1160139 - RNA, 19 nt, Human
cugccggcuaauuuuugua

SEQ ID NO: 1160140 - RNA, 23 nt, Human
cugccucagccucccaaguagcu

SEQ ID NO: 1160141 - RNA, 21 nt, Human
cugccucagccuccugaguag

SEQ ID NO: 1160142 - RNA, 21 nt, Human
cugugcuuucccuguugucgu

SEQ ID NO: 1160143 - RNA, 22 nt, Human
cuguugugcauccuuugacccc

SEQ ID NO: 1160144 - RNA, 19 nt, Human
cuuccucacucaggcugga

SEQ ID NO: 1160145 - RNA, 26 nt, Human
cuugacuccagccuugagaccccagc

SEQ ID NO: 1160146 - RNA, 24 nt, Human
cuuuaaauauugugcuuaccuuua

SEQ ID NO: 1160147 - RNA, 24 nt, Human
cuuucccuguugucguuugcggga

SEQ ID NO: 1160148 - RNA, 20 nt, Human
gaagaaagaaauacaaagaa

SEQ ID NO: 1160149 - RNA, 26 nt, Human
gaaucauugagcccaagaguucaaga

SEQ ID NO: 1160150 - RNA, 23 nt, Human
gaccucaggugauccgccugccu

SEQ ID NO: 1160151 - RNA, 23 nt, Human
gaccucaggugauccgccugccu

SEQ ID NO: 1160152 - RNA, 23 nt, Human
gagaauugcuugaacccaggagg

SEQ ID NO: 1160153 - RNA, 23 nt, Human
gagacgggguuucuccauguugg

SEQ ID NO: 1160154 - RNA, 24 nt, Human
gagacgggguuucuccauguuggu

SEQ ID NO: 1160155 - RNA, 22 nt, Human
gaguaguugggauuacaggcau

SEQ ID NO: 1160156 - RNA, 24 nt, Human
gaguaguugggauuacaggcaugc

SEQ ID NO: 1160157 - RNA, 24 nt, Human
gaucucaaguuauccacccaccuc

SEQ ID NO: 1160158 - RNA, 20 nt, Human
gaugagccuaggaguucaag

SEQ ID NO: 1160159 - RNA, 22 nt, Human
gauggacagcuaccaacuaccg

SEQ ID NO: 1160160 - RNA, 18 nt, Human
gauuacaggcaugcgcca

SEQ ID NO: 1160161 - RNA, 18 nt, Human
gauuacaggugugagcca

SEQ ID NO: 1160162 - RNA, 22 nt, Human
gauuacaggugugagccaccgc

SEQ ID NO: 1160163 - RNA, 23 nt, Human
gauuacaggugugagccaccgca

SEQ ID NO: 1160164 - RNA, 20 nt, Human
gcaaagaucuugaagcagag

SEQ ID NO: 1160165 - RNA, 20 nt, Human
gcaaagaucuugaagcagag

SEQ ID NO: 1160166 - RNA, 22 nt, Human
gcaaccuccaacucccagguuc

SEQ ID NO: 1160167 - RNA, 20 nt, Human
gcaccaccguauuccagccu

SEQ ID NO: 1160168 - RNA, 22 nt, Human
gcaggagaauugcuugaaccca

SEQ ID NO: 1160169 - RNA, 25 nt, Human
gcccagcccuggccaucaccuugac

SEQ ID NO: 1160170 - RNA, 24 nt, Human
gccuaggaguucaaggcugcagug

SEQ ID NO: 1160171 - RNA, 24 nt, Human
gcgagucuccugccucagccuccc

SEQ ID NO: 1160172 - RNA, 23 nt, Human
gcgauucuccugccucagccucc

SEQ ID NO: 1160173 - RNA, 20 nt, Human
gcgcaguggcucacgccugu

SEQ ID NO: 1160174 - RNA, 24 nt, Human
gcuaacauggugaaacccugucuc

SEQ ID NO: 1160175 - RNA, 21 nt, Human
gcuaccaucuugacugcggcc

SEQ ID NO: 1160176 - RNA, 23 nt, Human
gcugguugugaacucccgaccuc

SEQ ID NO: 1160177 - RNA, 20 nt, Human
gcuuccucacucaggcugga

SEQ ID NO: 1160178 - RNA, 24 nt, Human
ggaaacaaacugaagguggccuuc

SEQ ID NO: 1160179 - RNA, 18 nt, Human
ggagauaguucccauuug

SEQ ID NO: 1160180 - RNA, 19 nt, Human
ggauuacaggcaugcgcca

SEQ ID NO: 1160181 - RNA, 21 nt, Human
ggccgggcgcaguggcucacg

SEQ ID NO: 1160182 - RNA, 24 nt, Human
gggcgcaguggcucacgccuguaa

SEQ ID NO: 1160183 - RNA, 23 nt, Human
gggguuucuccauguuggucagg

SEQ ID NO: 1160184 - RNA, 23 nt, Human
guagagacgggguuucuccaugu

SEQ ID NO: 1160185 - RNA, 18 nt, Human
guaguugggauuacaggc

SEQ ID NO: 1160186 - RNA, 20 nt, Human
guaguugggauuacaggcau

SEQ ID NO: 1160187 - RNA, 18 nt, Human
gucucucaccaguguuuu

SEQ ID NO: 1160188 - RNA, 22 nt, Human
guuaacaagagcacacaaagga

SEQ ID NO: 1160189 - RNA, 19 nt, Human
guugucugaguguuugcau

SEQ ID NO: 1160190 - RNA, 23 nt, Human
guuuucucagcuuccugggcaca

SEQ ID NO: 1160191 - RNA, 18 nt, Human
uaaacauccccugcccaa

SEQ ID NO: 1160192 - RNA, 22 nt, Human
uaacauggugaaacccugucuc

SEQ ID NO: 1160193 - RNA, 24 nt, Human
uaacauggugaaacccugucucua

SEQ ID NO: 1160194 - RNA, 24 nt, Human
uaaggcaggagaauugcuugaacc

SEQ ID NO: 1160195 - RNA, 25 nt, Human
uaaggcaggagaauugcuugaaccc

SEQ ID NO: 1160196 - RNA, 24 nt, Human
uaauuuuuguauuuuuaguagaga

SEQ ID NO: 1160197 - RNA, 24 nt, Human
uaauuuuuguauuuuuaguagaga

SEQ ID NO: 1160198 - RNA, 23 nt, Human
uacaggcaugcgccaccacaccc

SEQ ID NO: 1160199 - RNA, 23 nt, Human
uacaggugugagccaccgcaccc

SEQ ID NO: 1160200 - RNA, 20 nt, Human
uacuguugugcauccuuuga

SEQ ID NO: 1160201 - RNA, 18 nt, Human
uagaaaggagucuacacc

SEQ ID NO: 1160202 - RNA, 19 nt, Human
uagaauacagugcuggccu

SEQ ID NO: 1160203 - RNA, 19 nt, Human
uagacucuccacugccuuc

SEQ ID NO: 1160204 - RNA, 22 nt, Human
uagagacaagguuucaucaugu

SEQ ID NO: 1160205 - RNA, 23 nt, Human
uaggaugaaauccaaaaaucuua

SEQ ID NO: 1160206 - RNA, 24 nt, Human
uaggaugaaauccaaaaaucuuau

SEQ ID NO: 1160207 - RNA, 27 nt, Human
uaggaugaaauccaaaaaucuuauaag

SEQ ID NO: 1160208 - RNA, 24 nt, Human
uaguagagacaagguuucaucaug

SEQ ID NO: 1160209 - RNA, 24 nt, Human
uaguagagacgggguuucuccaug

SEQ ID NO: 1160210 - RNA, 18 nt, Human
uaguugggauuacaggca

SEQ ID NO: 1160211 - RNA, 22 nt, Human
uauaguuaacaagagcacacaa

SEQ ID NO: 1160212 - RNA, 21 nt, Human
uaucucaaauuuacccagucc

SEQ ID NO: 1160213 - RNA, 23 nt, Human
uaugacccaguagaaaggagucu

SEQ ID NO: 1160214 - RNA, 23 nt, Human
ucaaaaaaaaaaaaaaaaaaaaa

SEQ ID NO: 1160215 - RNA, 18 nt, Human
ucaaagaggaagcccagc

SEQ ID NO: 1160216 - RNA, 19 nt, Human
ucacaccaaagauccugcc

SEQ ID NO: 1160217 - RNA, 25 nt, Human
ucaccacaaccucccgucucccggg

SEQ ID NO: 1160218 - RNA, 18 nt, Human
ucacgaggucaggagauc

SEQ ID NO: 1160219 - RNA, 24 nt, Human
ucacgaggucaggagaucgagacc

SEQ ID NO: 1160220 - RNA, 24 nt, Human
ucacucaggcuggagugcaguggu

SEQ ID NO: 1160221 - RNA, 23 nt, Human
ucacucuucuuacccagacugga

SEQ ID NO: 1160222 - RNA, 19 nt, Human
ucacugcaaccuccaacuc

SEQ ID NO: 1160223 - RNA, 20 nt, Human
ucacugcaaccuccaacucc

SEQ ID NO: 1160224 - RNA, 24 nt, Human
ucacugcaaccuccaacucccagg

SEQ ID NO: 1160225 - RNA, 20 nt, Human
ucagccucccaaguagcugg

SEQ ID NO: 1160226 - RNA, 20 nt, Human
ucagccuccugaguaguugg

SEQ ID NO: 1160227 - RNA, 25 nt, Human
ucauugagcccaagaguucaagacc

SEQ ID NO: 1160228 - RNA, 21 nt, Human
ucauuucuccaaaaaguaaga

SEQ ID NO: 1160229 - RNA, 24 nt, Human
uccaagaugaccuucuuuccacuu

SEQ ID NO: 1160230 - RNA, 21 nt, Human
uccacccaccucggccuucca

SEQ ID NO: 1160231 - RNA, 20 nt, Human
uccacugcacuccagccugg

SEQ ID NO: 1160232 - RNA, 23 nt, Human
ucccaaacugcugggauuacagg

SEQ ID NO: 1160233 - RNA, 20 nt, Human
ucccaacaaccacaugagcu

SEQ ID NO: 1160234 - RNA, 24 nt, Human
ucccaaguagcuggaauuacaggc

SEQ ID NO: 1160235 - RNA, 19 nt, Human
ucccagguucaagcgaguc

SEQ ID NO: 1160236 - RNA, 21 nt, Human
ucccagguucaagcgagucuc

SEQ ID NO: 1160237 - RNA, 24 nt, Human
ucccagguucaagcgagucuccug

SEQ ID NO: 1160238 - RNA, 22 nt, Human
uccccauaaaugcguguuacuc

SEQ ID NO: 1160239 - RNA, 21 nt, Human
ucccggguucaagcgauucuc

SEQ ID NO: 1160240 - RNA, 24 nt, Human
ucccggguucaagcgauucuccug

SEQ ID NO: 1160241 - RNA, 24 nt, Human
ucccgucucaaaaaaaaaaaaaaa

SEQ ID NO: 1160242 - RNA, 18 nt, Human
uccgcagaaaccaugaga

SEQ ID NO: 1160243 - RNA, 20 nt, Human
uccuccaaucauccaagaug

SEQ ID NO: 1160244 - RNA, 20 nt, Human
uccugaaauucuuaauuuuu

SEQ ID NO: 1160245 - RNA, 24 nt, Human
uccugaguaguugggauuacaggc

SEQ ID NO: 1160246 - RNA, 23 nt, Human
uccuggugcucacacccuugaga

SEQ ID NO: 1160247 - RNA, 24 nt, Human
ucuaccuuugucacaccaaagauc

SEQ ID NO: 1160248 - RNA, 23 nt, Human
ucucaaaaaacaaacaaacaaac

SEQ ID NO: 1160249 - RNA, 24 nt, Human
ucucccggguucaagcgauucucc

SEQ ID NO: 1160250 - RNA, 18 nt, Human
ucuccugccucagccucc

SEQ ID NO: 1160251 - RNA, 26 nt, Human
ucuccugccucagccucccaaguagc

SEQ ID NO: 1160252 - RNA, 21 nt, Human
ucuccugggaccucugucuca

SEQ ID NO: 1160253 - RNA, 24 nt, Human
ucucuauuaaaaauacaaaaaauu

SEQ ID NO: 1160254 - RNA, 21 nt, Human
ucucugccaaccucaccacaa

SEQ ID NO: 1160255 - RNA, 21 nt, Human
ucucuuugguaaaaugaagau

SEQ ID NO: 1160256 - RNA, 25 nt, Human
ucuggaauaucuauuagauggaaga

SEQ ID NO: 1160257 - RNA, 25 nt, Human
ugaagcagaggaccuagcucagcca

SEQ ID NO: 1160258 - RNA, 24 nt, Human
ugacaugugccuaugguccuagcu

SEQ ID NO: 1160259 - RNA, 20 nt, Human
ugaccccaguccuuucuggg

SEQ ID NO: 1160260 - RNA, 19 nt, Human
ugagacaggagaaucauug

SEQ ID NO: 1160261 - RNA, 23 nt, Human
ugagacaggagaaucauugagcc

SEQ ID NO: 1160262 - RNA, 22 nt, Human
ugagcaagacaccuugucaacc

SEQ ID NO: 1160263 - RNA, 23 nt, Human
ugagcaagacaccuugucaacca

SEQ ID NO: 1160264 - RNA, 19 nt, Human
ugagccaccgugccaagcc

SEQ ID NO: 1160265 - RNA, 23 nt, Human
ugagcccaagaguucaagaccag

SEQ ID NO: 1160266 - RNA, 24 nt, Human
ugagccuaggaguucaaggcugca

SEQ ID NO: 1160267 - RNA, 19 nt, Human
ugagggaagacugcaugau

SEQ ID NO: 1160268 - RNA, 19 nt, Human
ugaguaagcucuaagacag

SEQ ID NO: 1160269 - RNA, 19 nt, Human
ugagugccagucuguugaa

SEQ ID NO: 1160270 - RNA, 21 nt, Human
ugaguuuucucagcuuccugg

SEQ ID NO: 1160271 - RNA, 24 nt, Human
ugaugagccuaggaguucaaggcu

SEQ ID NO: 1160272 - RNA, 20 nt, Human
ugcaguugccauccugaaau

SEQ ID NO: 1160273 - RNA, 23 nt, Human
ugccaagcccuccccucuauucu

SEQ ID NO: 1160274 - RNA, 24 nt, Human
ugccuaugguccuagcuacucagg

SEQ ID NO: 1160275 - RNA, 24 nt, Human
ugccucagccucccaaguagcugg

SEQ ID NO: 1160276 - RNA, 24 nt, Human
ugccucagccuccugaguaguugg

SEQ ID NO: 1160277 - RNA, 21 nt, Human
ugccuuggccucccaaacugc

SEQ ID NO: 1160278 - RNA, 19 nt, Human
ugcuccacugcacuccagc

SEQ ID NO: 1160279 - RNA, 24 nt, Human
ugcuggaauuacaagcaugagcca

SEQ ID NO: 1160280 - RNA, 24 nt, Human
ugcugggauuacaggugugagcca

SEQ ID NO: 1160281 - RNA, 19 nt, Human
ugcuucagcuuuccugauc

SEQ ID NO: 1160282 - RNA, 21 nt, Human
uggaauaucuauuagauggaa

SEQ ID NO: 1160283 - RNA, 22 nt, Human
uggaaucccuguagcauagaau

SEQ ID NO: 1160284 - RNA, 22 nt, Human
uggaauuacaagcaugagccac

SEQ ID NO: 1160285 - RNA, 23 nt, Human
uggaauuacaagcaugagccacc

SEQ ID NO: 1160286 - RNA, 24 nt, Human
uggaauuacaagcaugagccaccg

SEQ ID NO: 1160287 - RNA, 26 nt, Human
uggaauuacaagcaugagccaccgug

SEQ ID NO: 1160288 - RNA, 27 nt, Human
uggaauuacaagcaugagccaccgugc

SEQ ID NO: 1160289 - RNA, 21 nt, Human
uggaauuacaggcacgugcca

SEQ ID NO: 1160290 - RNA, 22 nt, Human
uggaauuacaggcacgugccac

SEQ ID NO: 1160291 - RNA, 24 nt, Human
uggaauuacaggcacgugccaccc

SEQ ID NO: 1160292 - RNA, 26 nt, Human
uggaauuacaggcacgugccacccug

SEQ ID NO: 1160293 - RNA, 23 nt, Human
uggagugcaauggcacgaucuca

SEQ ID NO: 1160294 - RNA, 24 nt, Human
uggagugcaauggcacgaucucag

SEQ ID NO: 1160295 - RNA, 18 nt, Human
uggagugcaguggugcaa

SEQ ID NO: 1160296 - RNA, 23 nt, Human
uggagugcaguggugcaaucucg

SEQ ID NO: 1160297 - RNA, 22 nt, Human
uggauuagggccgggcgcagug

SEQ ID NO: 1160298 - RNA, 23 nt, Human
uggcaacacuaugaagaaagaaa

SEQ ID NO: 1160299 - RNA, 24 nt, Human
uggcacgaucucagcucaccacaa

SEQ ID NO: 1160300 - RNA, 24 nt, Human
uggccaggcuggucuugaacucuu

SEQ ID NO: 1160301 - RNA, 21 nt, Human
uggccaucaccuugacuccag

SEQ ID NO: 1160302 - RNA, 20 nt, Human
uggcuaacauggugaaaccc

SEQ ID NO: 1160303 - RNA, 23 nt, Human
uggcuaacauggugaaacccugu

SEQ ID NO: 1160304 - RNA, 20 nt, Human
uggcuaaggcacugguagcu

SEQ ID NO: 1160305 - RNA, 24 nt, Human
uggcuagacaaauuaucuaccuuu

SEQ ID NO: 1160306 - RNA, 22 nt, Human
uggcucacgccuguaaucccag

SEQ ID NO: 1160307 - RNA, 24 nt, Human
uggcucacgccuguaaucccagca

SEQ ID NO: 1160308 - RNA, 24 nt, Human
uggcucaugccugcaaucucaaca

SEQ ID NO: 1160309 - RNA, 24 nt, Human
ugggaggccgaggcagguggauca

SEQ ID NO: 1160310 - RNA, 24 nt, Human
ugggaggcugagacaggagaauca

SEQ ID NO: 1160311 - RNA, 18 nt, Human
ugggauuacaggcaugcg

SEQ ID NO: 1160312 - RNA, 21 nt, Human
ugggauuacaggcaugcgcca

SEQ ID NO: 1160313 - RNA, 22 nt, Human
ugggauuacaggcaugcgccac

SEQ ID NO: 1160314 - RNA, 24 nt, Human
ugggauuacaggcaugcgccacca

SEQ ID NO: 1160315 - RNA, 19 nt, Human
ugggauuacaggugugagc

SEQ ID NO: 1160316 - RNA, 21 nt, Human
ugggauuacaggugugagcca

SEQ ID NO: 1160317 - RNA, 22 nt, Human
ugggauuacaggugugagccac

SEQ ID NO: 1160318 - RNA, 23 nt, Human
ugggauuacaggugugagccacc

SEQ ID NO: 1160319 - RNA, 24 nt, Human
ugggauuacaggugugagccaccg

SEQ ID NO: 1160320 - RNA, 23 nt, Human
uggguaaaauagcaagacuucau

SEQ ID NO: 1160321 - RNA, 21 nt, Human
uggucaggcugguugugaacu

SEQ ID NO: 1160322 - RNA, 24 nt, Human
uguaugauuuuuaaguacacaucu

SEQ ID NO: 1160323 - RNA, 22 nt, Human
ugucguuugcgggauguugucc

SEQ ID NO: 1160324 - RNA, 22 nt, Human
uuaaucaccagcuucuaaguau

SEQ ID NO: 1160325 - RNA, 24 nt, Human
uuaggccaggcgcaguggcucaug

SEQ ID NO: 1160326 - RNA, 24 nt, Human
uuaguagagacaagguuucaucau

SEQ ID NO: 1160327 - RNA, 18 nt, Human
uuaguagagacgggguuu

SEQ ID NO: 1160328 - RNA, 24 nt, Human
uuaguagagacgggguuucuccau

SEQ ID NO: 1160329 - RNA, 18 nt, Human
uuauuuauuuauuuauuu

SEQ ID NO: 1160330 - RNA, 21 nt, Human
uucaagcgauucuccugccuc

SEQ ID NO: 1160331 - RNA, 23 nt, Human
uucaagcgauucuccugccucag

SEQ ID NO: 1160332 - RNA, 24 nt, Human
uucaagcgauucuccugccucagc

SEQ ID NO: 1160333 - RNA, 24 nt, Human
uucacucuucuuacccagacugga

SEQ ID NO: 1160334 - RNA, 22 nt, Human
uucauucaacaaacagugauug

SEQ ID NO: 1160335 - RNA, 24 nt, Human
uuccucacucaggcuggagugcag

SEQ ID NO: 1160336 - RNA, 20 nt, Human
uucuccaaaaaguaagaaaa

SEQ ID NO: 1160337 - RNA, 19 nt, Human
uugcuuccucacucaggcu

SEQ ID NO: 1160338 - RNA, 20 nt, Human
uugcuuccucacucaggcug

SEQ ID NO: 1160339 - RNA, 22 nt, Human
uugcuuccucacucaggcugga

SEQ ID NO: 1160340 - RNA, 24 nt, Human
uugcuugaacccaggaggcagagg

SEQ ID NO: 1160341 - RNA, 21 nt, Human
uuggcaacacuaugaagaaag

SEQ ID NO: 1160342 - RNA, 25 nt, Human
uugggaggccgaggcagguggauca

SEQ ID NO: 1160343 - RNA, 25 nt, Human
uugggaggcugagacaggagaauca

SEQ ID NO: 1160344 - RNA, 23 nt, Human
uuguauuuuuaguagagacgggg

SEQ ID NO: 1160345 - RNA, 24 nt, Human
uuucaucauguuggccaggcuggu

SEQ ID NO: 1160346 - RNA, 21 nt, Human
uuucuccauguuggucaggcu

SEQ ID NO: 1160347 - RNA, 23 nt, Human
uuugucucgcacucaccacuuuu

SEQ ID NO: 1160348 - RNA, 20 nt, Human
uuuguuuuguuuuguuuuug

SEQ ID NO: 1160349 - RNA, 31 nt, Human
uuuuaauuuuuauuuauuuauuuauuuauuu

SEQ ID NO: 1160350 - RNA, 23 nt, Human
uuuugcuuccucacucaggcugg

SEQ ID NO: 1160351 - RNA, 24 nt, Human
uuuugcuuccucacucaggcugga

SEQ ID NO: 1160352 - RNA, 21 nt, Human
uuuuguauuuuuaguagagac

SEQ ID NO: 1160353 - RNA, 23 nt, Human
uuuuuaguagagacaagguuuca

SEQ ID NO: 1160354 - RNA, 22 nt, Human
uuuuuaguagagacgggguuuc

SEQ ID NO: 1160355 - RNA, 20 nt, Human
uuuuuguauuuuuaguagag

SEQ ID NO: 1160356 - RNA, 20 nt, Human
uuuuuguauuuuuaguagag

SEQ ID NO: 1160357 - RNA, 22 nt, Human
accacaguuaugcggagcaaca

SEQ ID NO: 1160358 - RNA, 18 nt, Human
acgcggccggcgccugga

SEQ ID NO: 1160359 - RNA, 18 nt, Human
agcaacagaaagcuuccu

SEQ ID NO: 1160360 - RNA, 19 nt, Human
agggagcagagguacagcg

SEQ ID NO: 1160361 - RNA, 24 nt, Human
caacagaaagcuuccuaccccccc

SEQ ID NO: 1160362 - RNA, 19 nt, Human
caagcaacuccauaagaca

SEQ ID NO: 1160363 - RNA, 18 nt, Human
cccccgguaggcgagagc

SEQ ID NO: 1160364 - RNA, 21 nt, Human
ccuacccccccggguugaaag

SEQ ID NO: 1160365 - RNA, 21 nt, Human
cgcggccggcgccuggaagcc

SEQ ID NO: 1160366 - RNA, 19 nt, Human
cuccgaaugagggagcaga

SEQ ID NO: 1160367 - RNA, 21 nt, Human
gaaagcuuccuacccccccgg

SEQ ID NO: 1160368 - RNA, 24 nt, Human
gcaacagaaagcuuccuacccccc

SEQ ID NO: 1160369 - RNA, 23 nt, Human
gcggagcaacagaaagcuuccua

SEQ ID NO: 1160370 - RNA, 20 nt, Human
gcggccggcgccuggaagcc

SEQ ID NO: 1160371 - RNA, 19 nt, Human
gggaacaguuauuccacga

SEQ ID NO: 1160372 - RNA, 18 nt, Human
gucccggugagagaagcc

SEQ ID NO: 1160373 - RNA, 23 nt, Human
uaagacaacugucucggaaaggc

SEQ ID NO: 1160374 - RNA, 22 nt, Human
uaggccucuuauuuuacguucu

SEQ ID NO: 1160375 - RNA, 26 nt, Human
ucccgagucccggugagagaagcccc

SEQ ID NO: 1160376 - RNA, 19 nt, Human
uccuacccccccggguuga

SEQ ID NO: 1160377 - RNA, 18 nt, Human
ugagagaagcccccggua

SEQ ID NO: 1160378 - RNA, 24 nt, Human
ugagcgggaacaguuauuccacgg

SEQ ID NO: 1160379 - RNA, 19 nt, Human
ugccgcucuagcaacgggg

SEQ ID NO: 1160380 - RNA, 23 nt, Human
ugccgguccacuucccgggaguc

SEQ ID NO: 1160381 - RNA, 23 nt, Human
uuagcugaccacaguuaugcgga

SEQ ID NO: 1160382 - RNA, 22 nt, Human
uugcccgggacaucacacgcgg

SEQ ID NO: 1160383 - RNA, 24 nt, Human
aaagcccacuucucaagcuccaag

SEQ ID NO: 1160384 - RNA, 19 nt, Human
aaagugcugggauuacagg

SEQ ID NO: 1160385 - RNA, 19 nt, Human
aaagugcugggauuacagg

SEQ ID NO: 1160386 - RNA, 23 nt, Human
aaagugcugggauuacaggcaug

SEQ ID NO: 1160387 - RNA, 23 nt, Human
aaagugcugggauuacaggcgug

SEQ ID NO: 1160388 - RNA, 28 nt, Human
aaauaaaaacgaauuuuuuaugacaaaa

SEQ ID NO: 1160389 - RNA, 23 nt, Human
aaccuccugagcucaagcaaucc

SEQ ID NO: 1160390 - RNA, 25 nt, Human
aagcaauccuccugccucagccucc

SEQ ID NO: 1160391 - RNA, 21 nt, Human
aaggugugcacccugcugcug

SEQ ID NO: 1160392 - RNA, 19 nt, Human
aagugcugggauuacaggc

SEQ ID NO: 1160393 - RNA, 19 nt, Human
aagugcugggauuacaggc

SEQ ID NO: 1160394 - RNA, 23 nt, Human
aagugcugggauuacaggcaugu

SEQ ID NO: 1160395 - RNA, 23 nt, Human
aagugcugggauuacaggcgugu

SEQ ID NO: 1160396 - RNA, 21 nt, Human
aaguguugggauuacaggcgu

SEQ ID NO: 1160397 - RNA, 23 nt, Human
aaguguugggauuacaggcguga

SEQ ID NO: 1160398 - RNA, 26 nt, Human
aaguguugggauuacaggcgugagcc

SEQ ID NO: 1160399 - RNA, 24 nt, Human
acaggguuuugccaugcuucccag

SEQ ID NO: 1160400 - RNA, 21 nt, Human
accacagccucucaaagugcu

SEQ ID NO: 1160401 - RNA, 23 nt, Human
accucagccuccugaguaacugg

SEQ ID NO: 1160402 - RNA, 18 nt, Human
acgggguuucuccauguu

SEQ ID NO: 1160403 - RNA, 20 nt, Human
acgggguuucuccauguuga

SEQ ID NO: 1160404 - RNA, 23 nt, Human
acgggguuucuccauguugaggc

SEQ ID NO: 1160405 - RNA, 26 nt, Human
acgggguuucuccauguugaggcugg

SEQ ID NO: 1160406 - RNA, 19 nt, Human
acucucuccacccuucccc

SEQ ID NO: 1160407 - RNA, 18 nt, Human
acucugucacccaagcug

SEQ ID NO: 1160408 - RNA, 25 nt, Human
acucugucacccaagcuggagugca

SEQ ID NO: 1160409 - RNA, 18 nt, Human
agacaggguuuugccaug

SEQ ID NO: 1160410 - RNA, 22 nt, Human
agacaggguuuugccaugcuuc

SEQ ID NO: 1160411 - RNA, 21 nt, Human
agagagaagauagaggcaggg

SEQ ID NO: 1160412 - RNA, 21 nt, Human
agcccacuucucaagcuccaa

SEQ ID NO: 1160413 - RNA, 19 nt, Human
agccuggcccucacaaacg

SEQ ID NO: 1160414 - RNA, 24 nt, Human
agcuggagugcaguggugcaaaca

SEQ ID NO: 1160415 - RNA, 23 nt, Human
agcuucaaccuccugagcucaag

SEQ ID NO: 1160416 - RNA, 22 nt, Human
aggcagggccucuggcauugug

SEQ ID NO: 1160417 - RNA, 18 nt, Human
aggugauccucccgccuc

SEQ ID NO: 1160418 - RNA, 25 nt, Human
aggugauccucccgccucggccucc

SEQ ID NO: 1160419 - RNA, 18 nt, Human
aguaacugggauuacagg

SEQ ID NO: 1160420 - RNA, 22 nt, Human
aguagagacgggguuucuccau

SEQ ID NO: 1160421 - RNA, 21 nt, Human
aguagcugggauuacaggcau

SEQ ID NO: 1160422 - RNA, 24 nt, Human
agugcaauggcacgaucuuggcuc

SEQ ID NO: 1160423 - RNA, 20 nt, Human
agugcaguggugcaaucuug

SEQ ID NO: 1160424 - RNA, 18 nt, Human
agugcugggauuacaggc

SEQ ID NO: 1160425 - RNA, 21 nt, Human
auccuccugccucagccuccc

SEQ ID NO: 1160426 - RNA, 24 nt, Human
auggagggccagcucuugcccaca

SEQ ID NO: 1160427 - RNA, 19 nt, Human
auuacaggcgugugccacc

SEQ ID NO: 1160428 - RNA, 21 nt, Human
auucuccugccucagccuccc

SEQ ID NO: 1160429 - RNA, 23 nt, Human
caaagugcugggauuacaggcau

SEQ ID NO: 1160430 - RNA, 23 nt, Human
caaagugcugggauuacaggcau

SEQ ID NO: 1160431 - RNA, 24 nt, Human
caaagugcugggauuacaggcaug

SEQ ID NO: 1160432 - RNA, 24 nt, Human
caaagugcugggauuacaggcgug

SEQ ID NO: 1160433 - RNA, 25 nt, Human
caaccuccugagcucaagcaauccu

SEQ ID NO: 1160434 - RNA, 23 nt, Human
caagaaaccucucaggcuggaug

SEQ ID NO: 1160435 - RNA, 19 nt, Human
caagaaauuaucccaccac

SEQ ID NO: 1160436 - RNA, 22 nt, Human
caagcaauccuccugccucagc

SEQ ID NO: 1160437 - RNA, 27 nt, Human
caagcaauccuccugccucagccuccc

SEQ ID NO: 1160438 - RNA, 27 nt, Human
caagcaauccuccugccucagccuccc

SEQ ID NO: 1160439 - RNA, 22 nt, Human
caagcaauucuccugccucagc

SEQ ID NO: 1160440 - RNA, 22 nt, Human
caaguaaauacuuuauccccuc

SEQ ID NO: 1160441 - RNA, 19 nt, Human
caaugcuacacacacacuu

SEQ ID NO: 1160442 - RNA, 23 nt, Human
cacaaacgaugaugccaaagcag

SEQ ID NO: 1160443 - RNA, 18 nt, Human
caccagaacaucauuccc

SEQ ID NO: 1160444 - RNA, 21 nt, Human
caccagaacaucauuccccag

SEQ ID NO: 1160445 - RNA, 27 nt, Human
caccagaacaucauuccccagugaggu

SEQ ID NO: 1160446 - RNA, 20 nt, Human
caccagggcccuucccccuc

SEQ ID NO: 1160447 - RNA, 24 nt, Human
cacccaagcuggagugcaguggug

SEQ ID NO: 1160448 - RNA, 24 nt, Human
cacccaagcuggagugcaguggug

SEQ ID NO: 1160449 - RNA, 20 nt, Human
caccccuggcuaauuuuugu

SEQ ID NO: 1160450 - RNA, 21 nt, Human
cacccugcugcugugcaccuu

SEQ ID NO: 1160451 - RNA, 21 nt, Human
caccgcaaccuccgccuccug

SEQ ID NO: 1160452 - RNA, 24 nt, Human
caccuucuccuuguccuccucuga

SEQ ID NO: 1160453 - RNA, 23 nt, Human
cacucugucacccaagcuggagu

SEQ ID NO: 1160454 - RNA, 24 nt, Human
cacucugucacccaagcuggagug

SEQ ID NO: 1160455 - RNA, 22 nt, Human
cacugcagccucaaccucccag

SEQ ID NO: 1160456 - RNA, 19 nt, Human
cacuucucaagcuccaagu

SEQ ID NO: 1160457 - RNA, 20 nt, Human
cagccucaaccucccaggcu

SEQ ID NO: 1160458 - RNA, 23 nt, Human
cagccucaaccucccaggcucau

SEQ ID NO: 1160459 - RNA, 22 nt, Human
cagccuccccagggaaggacac

SEQ ID NO: 1160460 - RNA, 23 nt, Human
cagccuccccagggaaggacacu

SEQ ID NO: 1160461 - RNA, 20 nt, Human
cagccuccugaguaacuggg

SEQ ID NO: 1160462 - RNA, 18 nt, Human
cagccucugggggcucac

SEQ ID NO: 1160463 - RNA, 22 nt, Human
cagccucugggggcucacaccg

SEQ ID NO: 1160464 - RNA, 21 nt, Human
caggcucuagaggcccugagg

SEQ ID NO: 1160465 - RNA, 21 nt, Human
cagggaaggacacucucucca

SEQ ID NO: 1160466 - RNA, 24 nt, Human
caggguuuugccaugcuucccagg

SEQ ID NO: 1160467 - RNA, 21 nt, Human
cagugccagggccuggccaaa

SEQ ID NO: 1160468 - RNA, 24 nt, Human
caugcuucccaggcuggucucgaa

SEQ ID NO: 1160469 - RNA, 20 nt, Human
ccaaagugcugggauuacag

SEQ ID NO: 1160470 - RNA, 22 nt, Human
ccaaagugcugggauuacaggc

SEQ ID NO: 1160471 - RNA, 22 nt, Human
ccaaagugcugggauuacaggc

SEQ ID NO: 1160472 - RNA, 24 nt, Human
ccaaagugcugggauuacaggcgu

SEQ ID NO: 1160473 - RNA, 28 nt, Human
ccaaugcuacacacacacuucaaacaua

SEQ ID NO: 1160474 - RNA, 23 nt, Human
ccaccacgccuggcuaauuguau

SEQ ID NO: 1160475 - RNA, 19 nt, Human
ccaccgugcccagccacaa

SEQ ID NO: 1160476 - RNA, 24 nt, Human
ccagaagcuuggaaaagaugacug

SEQ ID NO: 1160477 - RNA, 22 nt, Human
ccagcucuugcccacaggcucu

SEQ ID NO: 1160478 - RNA, 19 nt, Human
ccaugcuucccaggcuggu

SEQ ID NO: 1160479 - RNA, 23 nt, Human
ccaugcuucccaggcuggucucg

SEQ ID NO: 1160480 - RNA, 18 nt, Human
cccagccacaaguaaaua

SEQ ID NO: 1160481 - RNA, 23 nt, Human
cccaggcucaugugauccuccca

SEQ ID NO: 1160482 - RNA, 24 nt, Human
ccccaaugcuacacacacacuuca

SEQ ID NO: 1160483 - RNA, 23 nt, Human
ccccagugagcagagccucugcc

SEQ ID NO: 1160484 - RNA, 24 nt, Human
cccgaaguguugggauuacaggcg

SEQ ID NO: 1160485 - RNA, 23 nt, Human
cccgaguagcugggauuacaggc

SEQ ID NO: 1160486 - RNA, 24 nt, Human
cccgaguagcugggauuacaggca

SEQ ID NO: 1160487 - RNA, 25 nt, Human
cccucauagaagcacacgguuuuac

SEQ ID NO: 1160488 - RNA, 24 nt, Human
ccgaaguguugggauuacaggcgu

SEQ ID NO: 1160489 - RNA, 23 nt, Human
ccgaguagcugggauuacaggca

SEQ ID NO: 1160490 - RNA, 24 nt, Human
ccgaguagcugggauuacaggcau

SEQ ID NO: 1160491 - RNA, 18 nt, Human
ccgcaaccuccgccuccu

SEQ ID NO: 1160492 - RNA, 23 nt, Human
ccgcaaccuccgccuccuggguu

SEQ ID NO: 1160493 - RNA, 24 nt, Human
ccgcaaccuccgccuccuggguuc

SEQ ID NO: 1160494 - RNA, 27 nt, Human
ccgccuccuggguucaagcaauucuuu

SEQ ID NO: 1160495 - RNA, 19 nt, Human
ccucaaccucccaggcuca

SEQ ID NO: 1160496 - RNA, 22 nt, Human
ccucacaaacgaugaugccaaa

SEQ ID NO: 1160497 - RNA, 24 nt, Human
ccucccaccucagccuccugagua

SEQ ID NO: 1160498 - RNA, 19 nt, Human
ccucccgccucggccuccc

SEQ ID NO: 1160499 - RNA, 19 nt, Human
ccuccgccuccuggguuca

SEQ ID NO: 1160500 - RNA, 24 nt, Human
ccuccuggguucaagcaauucucc

SEQ ID NO: 1160501 - RNA, 18 nt, Human
ccugaccucaggugaucc

SEQ ID NO: 1160502 - RNA, 22 nt, Human
ccugaccucaggugauccuccc

SEQ ID NO: 1160503 - RNA, 20 nt, Human
ccugagcucaagcaauccuc

SEQ ID NO: 1160504 - RNA, 19 nt, Human
ccugaguaacugggauuac

SEQ ID NO: 1160505 - RNA, 22 nt, Human
ccugaguaacugggauuacagg

SEQ ID NO: 1160506 - RNA, 24 nt, Human
ccugaguaacugggauuacaggua

SEQ ID NO: 1160507 - RNA, 23 nt, Human
ccugccucagccucccgaguagc

SEQ ID NO: 1160508 - RNA, 24 nt, Human
ccugccucagccucccgaguagcu

SEQ ID NO: 1160509 - RNA, 23 nt, Human
ccuggguucaagcaauucuccug

SEQ ID NO: 1160510 - RNA, 24 nt, Human
ccuguccccaaugcuacacacaca

SEQ ID NO: 1160511 - RNA, 24 nt, Human
cgccucggccucccgaaguguugg

SEQ ID NO: 1160512 - RNA, 24 nt, Human
cgcucugucacccaagcuggagug

SEQ ID NO: 1160513 - RNA, 24 nt, Human
cgcucuuguugcccaggcuggagu

SEQ ID NO: 1160514 - RNA, 24 nt, Human
cuaauuguauuuuuaguagagacg

SEQ ID NO: 1160515 - RNA, 24 nt, Human
cuagguggucagugccagggccug

SEQ ID NO: 1160516 - RNA, 20 nt, Human
cuagucccacuugcuguguu

SEQ ID NO: 1160517 - RNA, 24 nt, Human
cucaagcaauccuccugccucagc

SEQ ID NO: 1160518 - RNA, 24 nt, Human
cucacucugucacccaagcuggag

SEQ ID NO: 1160519 - RNA, 21 nt, Human
cucacugcagccucaaccucc

SEQ ID NO: 1160520 - RNA, 24 nt, Human
cucagccucccgaguagcugggau

SEQ ID NO: 1160521 - RNA, 18 nt, Human
cucaggugauccucccgc

SEQ ID NO: 1160522 - RNA, 24 nt, Human
cucaugugauccucccaccucagc

SEQ ID NO: 1160523 - RNA, 19 nt, Human
cucauuguagcuucaaccu

SEQ ID NO: 1160524 - RNA, 21 nt, Human
cuccuggguucaagcaauucu

SEQ ID NO: 1160525 - RNA, 24 nt, Human
cucgcucugucacccaagcuggag

SEQ ID NO: 1160526 - RNA, 18 nt, Human
cucucuccacccuucccc

SEQ ID NO: 1160527 - RNA, 21 nt, Human
cugaguaacugggauuacagg

SEQ ID NO: 1160528 - RNA, 24 nt, Human
cugaguaacugggauuacagguau

SEQ ID NO: 1160529 - RNA, 22 nt, Human
cugcagccucaaccucccaggc

SEQ ID NO: 1160530 - RNA, 23 nt, Human
cugccucagccucccaaagugcu

SEQ ID NO: 1160531 - RNA, 24 nt, Human
cugccucagccucccaaagugcug

SEQ ID NO: 1160532 - RNA, 18 nt, Human
cugcugugcaccuucucc

SEQ ID NO: 1160533 - RNA, 19 nt, Human
cugcugugcaccuucuccu

SEQ ID NO: 1160534 - RNA, 24 nt, Human
cuggaucuugcucugcagucuggg

SEQ ID NO: 1160535 - RNA, 22 nt, Human
cuugacucacugcagccucaac

SEQ ID NO: 1160536 - RNA, 24 nt, Human
cuuguugcccaggcuggagugcaa

SEQ ID NO: 1160537 - RNA, 22 nt, Human
gaacaucauucaaacaggaaau

SEQ ID NO: 1160538 - RNA, 22 nt, Human
gacaggguuuugccaugcuucc

SEQ ID NO: 1160539 - RNA, 24 nt, Human
gaccucaggugauccucccgccuc

SEQ ID NO: 1160540 - RNA, 21 nt, Human
gagaauuuacacaauggacac

SEQ ID NO: 1160541 - RNA, 20 nt, Human
gagacagggucucacucugu

SEQ ID NO: 1160542 - RNA, 21 nt, Human
gagacagggucucacucuguc

SEQ ID NO: 1160543 - RNA, 20 nt, Human
gagacgggguuucuccaugu

SEQ ID NO: 1160544 - RNA, 19 nt, Human
gaguaacugggauuacagg

SEQ ID NO: 1160545 - RNA, 24 nt, Human
gaguaacugggauuacagguaugc

SEQ ID NO: 1160546 - RNA, 24 nt, Human
gaguagcugggauuacaggcaugc

SEQ ID NO: 1160547 - RNA, 19 nt, Human
gagugcaauggcacgaucu

SEQ ID NO: 1160548 - RNA, 18 nt, Human
gauuacaggcaugugcca

SEQ ID NO: 1160549 - RNA, 19 nt, Human
gauuacaggcaugugccac

SEQ ID NO: 1160550 - RNA, 21 nt, Human
gauuacaggcaugugccacug

SEQ ID NO: 1160551 - RNA, 18 nt, Human
gauuacaggcgugagcca

SEQ ID NO: 1160552 - RNA, 21 nt, Human
gauuacaggcgugagccaccg

SEQ ID NO: 1160553 - RNA, 24 nt, Human
gauuacaggcgugagccaccgugc

SEQ ID NO: 1160554 - RNA, 18 nt, Human
gauuacaggcgugugcca

SEQ ID NO: 1160555 - RNA, 20 nt, Human
gcaccaccacgccuggcuaa

SEQ ID NO: 1160556 - RNA, 20 nt, Human
gccagagagaagauagaggc

SEQ ID NO: 1160557 - RNA, 19 nt, Human
gcccaggcuggagugcaau

SEQ ID NO: 1160558 - RNA, 22 nt, Human
gcccucaauaauuucuuuuucu

SEQ ID NO: 1160559 - RNA, 25 nt, Human
gcucugucacccaagcuggagugca

SEQ ID NO: 1160560 - RNA, 24 nt, Human
gcucuuguugcccaggcuggagug

SEQ ID NO: 1160561 - RNA, 19 nt, Human
gcuggagugcaauggcacg

SEQ ID NO: 1160562 - RNA, 23 nt, Human
gcuggucucgaacuccugaccuc

SEQ ID NO: 1160563 - RNA, 21 nt, Human
gcuuggaaaagaugacuguuc

SEQ ID NO: 1160564 - RNA, 31 nt, Human
ggacacugaacaucauucaaacaggaaaugg

SEQ ID NO: 1160565 - RNA, 22 nt, Human
ggaucuugcucugcagucuggg

SEQ ID NO: 1160566 - RNA, 20 nt, Human
ggaugcugucuuuggaaagg

SEQ ID NO: 1160567 - RNA, 24 nt, Human
ggauuacaggcaugugccacugug

SEQ ID NO: 1160568 - RNA, 18 nt, Human
ggcaugggaggaagagcc

SEQ ID NO: 1160569 - RNA, 24 nt, Human
ggcuaauuguauuuuuaguagaga

SEQ ID NO: 1160570 - RNA, 24 nt, Human
ggcuggucucgaacuccugaccuc

SEQ ID NO: 1160571 - RNA, 22 nt, Human
gggcucacaccguccucuaccc

SEQ ID NO: 1160572 - RNA, 19 nt, Human
ggucucgaacuccugaccu

SEQ ID NO: 1160573 - RNA, 21 nt, Human
ggugauccucccgccucggcc

SEQ ID NO: 1160574 - RNA, 21 nt, Human
guagagacaggguuuugccau

SEQ ID NO: 1160575 - RNA, 22 nt, Human
guagagacaggguuuugccaug

SEQ ID NO: 1160576 - RNA, 23 nt, Human
guagagacgggguuucuccaugu

SEQ ID NO: 1160577 - RNA, 18 nt, Human
guagcugggauuacaggc

SEQ ID NO: 1160578 - RNA, 20 nt, Human
guagcugggauuacaggcau

SEQ ID NO: 1160579 - RNA, 24 nt, Human
gugauccucccaccucagccuccu

SEQ ID NO: 1160580 - RNA, 24 nt, Human
gugauccucccgccucggccuccc

SEQ ID NO: 1160581 - RNA, 18 nt, Human
gugcaaucuugacucacu

SEQ ID NO: 1160582 - RNA, 25 nt, Human
uaauuuuuguguuuuuuuuguagag

SEQ ID NO: 1160583 - RNA, 26 nt, Human
uaauuuuuguguuuuuuuuguagaga

SEQ ID NO: 1160584 - RNA, 22 nt, Human
uacaggcaugcaccaccacgcc

SEQ ID NO: 1160585 - RNA, 22 nt, Human
uacaggcaugugccacugugcc

SEQ ID NO: 1160586 - RNA, 24 nt, Human
uacaggcgugagccaccgugccca

SEQ ID NO: 1160587 - RNA, 23 nt, Human
uagaagcacacgguuuuacugca

SEQ ID NO: 1160588 - RNA, 20 nt, Human
uagagacaggguuuugccau

SEQ ID NO: 1160589 - RNA, 21 nt, Human
uagagacaggguuuugccaug

SEQ ID NO: 1160590 - RNA, 24 nt, Human
uaguagagacgggguuucuccaug

SEQ ID NO: 1160591 - RNA, 21 nt, Human
uagucccacuugcuguguuuu

SEQ ID NO: 1160592 - RNA, 24 nt, Human
uagucccacuugcuguguuuuugg

SEQ ID NO: 1160593 - RNA, 23 nt, Human
ucaaagugcugggauuacaggca

SEQ ID NO: 1160594 - RNA, 24 nt, Human
ucaaagugcugggauuacaggcau

SEQ ID NO: 1160595 - RNA, 24 nt, Human
ucaagaaauuaucccaccacagcc

SEQ ID NO: 1160596 - RNA, 19 nt, Human
ucaagcaauucuccugccu

SEQ ID NO: 1160597 - RNA, 18 nt, Human
ucaccagggcccuucccc

SEQ ID NO: 1160598 - RNA, 24 nt, Human
ucaccgcaaccuccgccuccuggg

SEQ ID NO: 1160599 - RNA, 25 nt, Human
ucaccgcaaccuccgccuccugggu

SEQ ID NO: 1160600 - RNA, 27 nt, Human
ucaccgcaaccuccgccuccuggguuc

SEQ ID NO: 1160601 - RNA, 19 nt, Human
ucacugcagccucaaccuc

SEQ ID NO: 1160602 - RNA, 23 nt, Human
ucacugcagccucaaccucccag

SEQ ID NO: 1160603 - RNA, 24 nt, Human
ucacugcagccucaaccucccagg

SEQ ID NO: 1160604 - RNA, 20 nt, Human
ucagccucccgaguagcugg

SEQ ID NO: 1160605 - RNA, 21 nt, Human
ucaguagcuucuccuuuuuuu

SEQ ID NO: 1160606 - RNA, 23 nt, Human
ucaguagcuucuccuuuuuuucu

SEQ ID NO: 1160607 - RNA, 22 nt, Human
ucagugccagggccuggccaaa

SEQ ID NO: 1160608 - RNA, 22 nt, Human
ucauuguagcuucaaccuccug

SEQ ID NO: 1160609 - RNA, 22 nt, Human
uccaccagaacaucauucccca

SEQ ID NO: 1160610 - RNA, 18 nt, Human
uccaugggguguuccacc

SEQ ID NO: 1160611 - RNA, 24 nt, Human
ucccaaagugcugggauuacaggc

SEQ ID NO: 1160612 - RNA, 23 nt, Human
ucccaccacagccucucaaagug

SEQ ID NO: 1160613 - RNA, 23 nt, Human
uccccagccuggcccucacaaac

SEQ ID NO: 1160614 - RNA, 22 nt, Human
uccccagugagcagagccucug

SEQ ID NO: 1160615 - RNA, 23 nt, Human
uccccagugagcagagccucugc

SEQ ID NO: 1160616 - RNA, 24 nt, Human
ucccgaaguguugggauuacaggc

SEQ ID NO: 1160617 - RNA, 24 nt, Human
ucccgaguagcugggauuacaggc

SEQ ID NO: 1160618 - RNA, 21 nt, Human
ucccuggguucagccucccca

SEQ ID NO: 1160619 - RNA, 24 nt, Human
uccgccuccuggguucaagcaauu

SEQ ID NO: 1160620 - RNA, 27 nt, Human
uccuccugccucagccucccaaagugc

SEQ ID NO: 1160621 - RNA, 24 nt, Human
uccugaguaacugggauuacaggu

SEQ ID NO: 1160622 - RNA, 18 nt, Human
uccugggcucaagaaauu

SEQ ID NO: 1160623 - RNA, 21 nt, Human
uccuggguucaagcaauucuc

SEQ ID NO: 1160624 - RNA, 24 nt, Human
uccuggguucaagcaauucuccug

SEQ ID NO: 1160625 - RNA, 22 nt, Human
ucgcucuuguugcccaggcugg

SEQ ID NO: 1160626 - RNA, 23 nt, Human
ucgcucuuguugcccaggcugga

SEQ ID NO: 1160627 - RNA, 24 nt, Human
ucucaaagugcugggauuacaggc

SEQ ID NO: 1160628 - RNA, 24 nt, Human
ucucacucugucacccaagcugga

SEQ ID NO: 1160629 - RNA, 26 nt, Human
ucucacucugucacccaagcuggagu

SEQ ID NO: 1160630 - RNA, 27 nt, Human
ucucacucugucacccaagcuggagug

SEQ ID NO: 1160631 - RNA, 25 nt, Human
ucuccacccuuccccagccuggccc

SEQ ID NO: 1160632 - RNA, 24 nt, Human
ucuccugccucagccucccgagua

SEQ ID NO: 1160633 - RNA, 19 nt, Human
ucucgaacuccugaccuca

SEQ ID NO: 1160634 - RNA, 19 nt, Human
ucucgaacuccugggcuca

SEQ ID NO: 1160635 - RNA, 21 nt, Human
ucucgaacuccugggcucaag

SEQ ID NO: 1160636 - RNA, 24 nt, Human
ucucgcucugucacccaagcugga

SEQ ID NO: 1160637 - RNA, 26 nt, Human
ucucgcucugucacccaagcuggagu

SEQ ID NO: 1160638 - RNA, 22 nt, Human
ucugcagucugggagaacccug

SEQ ID NO: 1160639 - RNA, 24 nt, Human
ucugucacccaagcuggagugcag

SEQ ID NO: 1160640 - RNA, 24 nt, Human
ucugucacccaagcuggagugcag

SEQ ID NO: 1160641 - RNA, 18 nt, Human
ucuugcucugcagucugg

SEQ ID NO: 1160642 - RNA, 22 nt, Human
ucuuguugcccaggcuggagug

SEQ ID NO: 1160643 - RNA, 18 nt, Human
ugaccucaggugauccuc

SEQ ID NO: 1160644 - RNA, 20 nt, Human
ugaccucaggugauccuccc

SEQ ID NO: 1160645 - RNA, 21 nt, Human
ugaccucaggugauccucccg

SEQ ID NO: 1160646 - RNA, 24 nt, Human
ugaccucaggugauccucccgccu

SEQ ID NO: 1160647 - RNA, 19 nt, Human
ugacucacugcagccucaa

SEQ ID NO: 1160648 - RNA, 22 nt, Human
ugagacagggucucgcucuguc

SEQ ID NO: 1160649 - RNA, 21 nt, Human
ugagcagagccucugccuguc

SEQ ID NO: 1160650 - RNA, 24 nt, Human
ugagcucaagcaauccuccugccu

SEQ ID NO: 1160651 - RNA, 22 nt, Human
ugaggcuggucucgaacuccug

SEQ ID NO: 1160652 - RNA, 18 nt, Human
ugcagccucaaccuccca

SEQ ID NO: 1160653 - RNA, 24 nt, Human
ugccaugcuucccaggcuggucuc

SEQ ID NO: 1160654 - RNA, 27 nt, Human
ugccaugcuucccaggcuggucucgaa

SEQ ID NO: 1160655 - RNA, 18 nt, Human
ugcccaggcuggagugca

SEQ ID NO: 1160656 - RNA, 21 nt, Human
ugcccaggcuggagugcaaug

SEQ ID NO: 1160657 - RNA, 24 nt, Human
ugcccaggcuggagugcaauggca

SEQ ID NO: 1160658 - RNA, 24 nt, Human
ugccucagccucccaaagugcugg

SEQ ID NO: 1160659 - RNA, 24 nt, Human
ugccucagccucccgaguagcugg

SEQ ID NO: 1160660 - RNA, 18 nt, Human
ugccuggccccucaauaa

SEQ ID NO: 1160661 - RNA, 28 nt, Human
ugcuacacacacacuucaaacauauaca

SEQ ID NO: 1160662 - RNA, 20 nt, Human
ugcugggauuacaggcaugu

SEQ ID NO: 1160663 - RNA, 24 nt, Human
ugcugggauuacaggcgugugcca

SEQ ID NO: 1160664 - RNA, 21 nt, Human
ugcuguguuuuuggggcaugu

SEQ ID NO: 1160665 - RNA, 19 nt, Human
uggagggccagcucuugcc

SEQ ID NO: 1160666 - RNA, 24 nt, Human
uggagugcaauggcacgaucuugg

SEQ ID NO: 1160667 - RNA, 18 nt, Human
uggagugcaguggugcaa

SEQ ID NO: 1160668 - RNA, 18 nt, Human
uggagugcaguggugcaa

SEQ ID NO: 1160669 - RNA, 18 nt, Human
uggagugcaguggugcaa

SEQ ID NO: 1160670 - RNA, 23 nt, Human
uggagugcaguggugcaaucuug

SEQ ID NO: 1160671 - RNA, 19 nt, Human
uggcauggagggccagcuc

SEQ ID NO: 1160672 - RNA, 20 nt, Human
uggccccucaauaauuucuu

SEQ ID NO: 1160673 - RNA, 21 nt, Human
ugggauuacaggcaugcacca

SEQ ID NO: 1160674 - RNA, 24 nt, Human
ugggauuacaggcaugcaccacca

SEQ ID NO: 1160675 - RNA, 21 nt, Human
ugggauuacaggcaugugcca

SEQ ID NO: 1160676 - RNA, 22 nt, Human
ugggauuacaggcaugugccac

SEQ ID NO: 1160677 - RNA, 22 nt, Human
ugggauuacaggcaugugccac

SEQ ID NO: 1160678 - RNA, 23 nt, Human
ugggauuacaggcaugugccacu

SEQ ID NO: 1160679 - RNA, 24 nt, Human
ugggauuacaggcaugugccacug

SEQ ID NO: 1160680 - RNA, 18 nt, Human
ugggauuacaggcgugag

SEQ ID NO: 1160681 - RNA, 21 nt, Human
ugggauuacaggcgugagcca

SEQ ID NO: 1160682 - RNA, 22 nt, Human
ugggauuacaggcgugagccac

SEQ ID NO: 1160683 - RNA, 23 nt, Human
ugggauuacaggcgugagccacc

SEQ ID NO: 1160684 - RNA, 23 nt, Human
ugggauuacaggcgugagccacc

SEQ ID NO: 1160685 - RNA, 24 nt, Human
ugggauuacaggcgugagccaccg

SEQ ID NO: 1160686 - RNA, 18 nt, Human
ugggauuacaggcgugug

SEQ ID NO: 1160687 - RNA, 19 nt, Human
ugggauuacaggcgugugc

SEQ ID NO: 1160688 - RNA, 21 nt, Human
ugggauuacaggcgugugcca

SEQ ID NO: 1160689 - RNA, 22 nt, Human
ugggauuacaggcgugugccac

SEQ ID NO: 1160690 - RNA, 24 nt, Human
ugggauuacaggcgugugccacca

SEQ ID NO: 1160691 - RNA, 21 nt, Human
ugggauuacagguaugcacca

SEQ ID NO: 1160692 - RNA, 21 nt, Human
uggguucaagcaauucuccug

SEQ ID NO: 1160693 - RNA, 23 nt, Human
uggguucaagcaauucuccugcc

SEQ ID NO: 1160694 - RNA, 24 nt, Human
uggguucaagcaauucuccugccu

SEQ ID NO: 1160695 - RNA, 22 nt, Human
ugguuagggacucgcaccuuac

SEQ ID NO: 1160696 - RNA, 22 nt, Human
uguagagacaggguuuugccau

SEQ ID NO: 1160697 - RNA, 21 nt, Human
uguauuuuuaguagagacggg

SEQ ID NO: 1160698 - RNA, 21 nt, Human
ugucacccaagcuggagugca

SEQ ID NO: 1160699 - RNA, 24 nt, Human
ugugauccucccaccucagccucc

SEQ ID NO: 1160700 - RNA, 24 nt, Human
uguugaggcuggucucgaacuccu

SEQ ID NO: 1160701 - RNA, 20 nt, Human
uguugcccaggcuggagugc

SEQ ID NO: 1160702 - RNA, 18 nt, Human
uuacagaagaggaaccag

SEQ ID NO: 1160703 - RNA, 18 nt, Human
uuaguagagacgggguuu

SEQ ID NO: 1160704 - RNA, 24 nt, Human
uuaguagagacgggguuucuccau

SEQ ID NO: 1160705 - RNA, 21 nt, Human
uucaagcaauucuccugccuc

SEQ ID NO: 1160706 - RNA, 24 nt, Human
uucaagcaauucuccugccucagc

SEQ ID NO: 1160707 - RNA, 24 nt, Human
uucccaggcuggucucgaacuccu

SEQ ID NO: 1160708 - RNA, 24 nt, Human
uucgcucuuguugcccaggcugga

SEQ ID NO: 1160709 - RNA, 22 nt, Human
uugagacagggucucgcucugu

SEQ ID NO: 1160710 - RNA, 24 nt, Human
uuguagagacaggguuuugccaug

SEQ ID NO: 1160711 - RNA, 18 nt, Human
uuguauuuuuaguagaga

SEQ ID NO: 1160712 - RNA, 23 nt, Human
uuucgcucuuguugcccaggcug

SEQ ID NO: 1160713 - RNA, 19 nt, Human
uuuggaaaggugguuaggg

SEQ ID NO: 1160714 - RNA, 23 nt, Human
uuuguagagacaggguuuugcca

SEQ ID NO: 1160715 - RNA, 24 nt, Human
uuuguagagacaggguuuugccau

SEQ ID NO: 1160716 - RNA, 22 nt, Human
uuuuuaguagagacgggguuuc

SEQ ID NO: 1160717 - RNA, 24 nt, Human
uuuuuuguagagacaggguuuugc

SEQ ID NO: 1160718 - RNA, 18 nt, Human
uuuuuuucuugagacagg

SEQ ID NO: 1160719 - RNA, 22 nt, Human
uuuuuuuguagagacaggguuu

SEQ ID NO: 1160720 - RNA, 23 nt, Human
aacaguaucaaucgcuaccccca

SEQ ID NO: 1160721 - RNA, 21 nt, Human
aaucgcuacccccaauccaga

SEQ ID NO: 1160722 - RNA, 20 nt, Human
accaagguagaaaucacaaa

SEQ ID NO: 1160723 - RNA, 21 nt, Human
acccugucugacccuaggcug

SEQ ID NO: 1160724 - RNA, 20 nt, Human
agguauggucuaaggucaca

SEQ ID NO: 1160725 - RNA, 19 nt, Human
agguugugcagaagcaccu

SEQ ID NO: 1160726 - RNA, 23 nt, Human
auccuuggcaagaaagcuaaggg

SEQ ID NO: 1160727 - RNA, 18 nt, Human
caaucgcuacccccaauc

SEQ ID NO: 1160728 - RNA, 19 nt, Human
cacccugucugacccuagg

SEQ ID NO: 1160729 - RNA, 23 nt, Human
cagaagcaccuuccccaccuccu

SEQ ID NO: 1160730 - RNA, 26 nt, Human
caguaaauucuucucccaaggcuggg

SEQ ID NO: 1160731 - RNA, 31 nt, Human
ccaagguagaaaucacaaaugggacgcauua

SEQ ID NO: 1160732 - RNA, 20 nt, Human
ccacuuuccuccgaaggggg

SEQ ID NO: 1160733 - RNA, 23 nt, Human
cccaaggcuggggccgucaaggc

SEQ ID NO: 1160734 - RNA, 21 nt, Human
ccuccagcuucucuuuugggg

SEQ ID NO: 1160735 - RNA, 23 nt, Human
cuccugcuccuccagcuucucuu

SEQ ID NO: 1160736 - RNA, 19 nt, Human
gacccuaggcuggggcugc

SEQ ID NO: 1160737 - RNA, 22 nt, Human
ggcuggggcugcuugcucggua

SEQ ID NO: 1160738 - RNA, 21 nt, Human
ggggucacaguggagccacca

SEQ ID NO: 1160739 - RNA, 20 nt, Human
gguaggcaggaauuuacuac

SEQ ID NO: 1160740 - RNA, 23 nt, Human
ggucuaaggucacagucugggag

SEQ ID NO: 1160741 - RNA, 22 nt, Human
uaacaguaaauucuucucccaa

SEQ ID NO: 1160742 - RNA, 21 nt, Human
uaggcaggaauuuacuaccug

SEQ ID NO: 1160743 - RNA, 23 nt, Human
uaggggucacaguggagccacca

SEQ ID NO: 1160744 - RNA, 18 nt, Human
ucaaagguugugcagaag

SEQ ID NO: 1160745 - RNA, 21 nt, Human
ucaaucgcuacccccaaucca

SEQ ID NO: 1160746 - RNA, 18 nt, Human
ucacagucugggagagga

SEQ ID NO: 1160747 - RNA, 19 nt, Human
uccccaccuccugccucau

SEQ ID NO: 1160748 - RNA, 22 nt, Human
ucgcuacccccaauccagauga

SEQ ID NO: 1160749 - RNA, 18 nt, Human
ucucccaaggcuggggcc

SEQ ID NO: 1160750 - RNA, 21 nt, Human
ucucugggcucguggguuagg

SEQ ID NO: 1160751 - RNA, 24 nt, Human
ugauuuugggggagucgaggcauu

SEQ ID NO: 1160752 - RNA, 18 nt, Human
uggcaagaaagcuaaggg

SEQ ID NO: 1160753 - RNA, 21 nt, Human
ugucugacccuaggcuggggc

SEQ ID NO: 1160754 - RNA, 23 nt, Human
ugugcagaagcaccuuccccacc

SEQ ID NO: 1160755 - RNA, 22 nt, Human
uguguuaacugacaguggccug

SEQ ID NO: 1160756 - RNA, 23 nt, Human
uuugggggagucgaggcauuggg

SEQ ID NO: 1160757 - RNA, 24 nt, Human
aaagccucucuguugcagcuucca

SEQ ID NO: 1160758 - RNA, 19 nt, Human
aagugcuggggggaaguga

SEQ ID NO: 1160759 - RNA, 22 nt, Human
aagugcuggggggaagugagcu

SEQ ID NO: 1160760 - RNA, 21 nt, Human
accugcuugugguccagaugc

SEQ ID NO: 1160761 - RNA, 19 nt, Human
agcacagcucccagggucc

SEQ ID NO: 1160762 - RNA, 22 nt, Human
aggcacagugaaccucgccagg

SEQ ID NO: 1160763 - RNA, 20 nt, Human
aggcuccacugagaguccac

SEQ ID NO: 1160764 - RNA, 23 nt, Human
aucaucaucacagaugucaaagu

SEQ ID NO: 1160765 - RNA, 18 nt, Human
auggcgcagcaaaagcag

SEQ ID NO: 1160766 - RNA, 24 nt, Human
caaaguggcuguugagucaagguc

SEQ ID NO: 1160767 - RNA, 21 nt, Human
cagccgcauuaaugcuugcug

SEQ ID NO: 1160768 - RNA, 26 nt, Human
cagcuuccugccgccuucaccagaag

SEQ ID NO: 1160769 - RNA, 19 nt, Human
cagugaaccucgccaggcu

SEQ ID NO: 1160770 - RNA, 18 nt, Human
caucaagaagugcugggg

SEQ ID NO: 1160771 - RNA, 24 nt, Human
ccacguuguagaugcgcacaccug

SEQ ID NO: 1160772 - RNA, 23 nt, Human
ccaggauuguucccccugggauc

SEQ ID NO: 1160773 - RNA, 19 nt, Human
cccacugccaaggcucagc

SEQ ID NO: 1160774 - RNA, 22 nt, Human
ccccacugccaaggcucagcuc

SEQ ID NO: 1160775 - RNA, 20 nt, Human
cccccugggaucgugcucca

SEQ ID NO: 1160776 - RNA, 18 nt, Human
cccgacccaggccccagc

SEQ ID NO: 1160777 - RNA, 20 nt, Human
ccuccgcguguccccgaccc

SEQ ID NO: 1160778 - RNA, 23 nt, Human
ccugaccuccgcguguccccgac

SEQ ID NO: 1160779 - RNA, 18 nt, Human
cucccaggguccuuaaaa

SEQ ID NO: 1160780 - RNA, 26 nt, Human
cuuccugccgccuucaccagccugac

SEQ ID NO: 1160781 - RNA, 19 nt, Human
gaaagugggcaccagcccc

SEQ ID NO: 1160782 - RNA, 25 nt, Human
gaaggagcagaugcaagcugacuca

SEQ ID NO: 1160783 - RNA, 19 nt, Human
gaccgaaggagcagaugca

SEQ ID NO: 1160784 - RNA, 26 nt, Human
gagcagaugcaagcugacucagcagg

SEQ ID NO: 1160785 - RNA, 25 nt, Human
gcacagcucccaggguccuuaaaag

SEQ ID NO: 1160786 - RNA, 19 nt, Human
guccccgacccaggcccca

SEQ ID NO: 1160787 - RNA, 21 nt, Human
gucccuggcaauuuccuccag

SEQ ID NO: 1160788 - RNA, 19 nt, Human
guggaaggucccaucuaca

SEQ ID NO: 1160789 - RNA, 20 nt, Human
uagcacagcucccagggucc

SEQ ID NO: 1160790 - RNA, 24 nt, Human
uagcacagcucccaggguccuuaa

SEQ ID NO: 1160791 - RNA, 18 nt, Human
uagggaucccaagggguc

SEQ ID NO: 1160792 - RNA, 25 nt, Human
uauucaucacaucggagaucaucuc

SEQ ID NO: 1160793 - RNA, 25 nt, Human
ucaaaguacacaucgaaagccucuc

SEQ ID NO: 1160794 - RNA, 21 nt, Human
ucccaaggggucucugccuuc

SEQ ID NO: 1160795 - RNA, 18 nt, Human
ucccccugggaucgugcu

SEQ ID NO: 1160796 - RNA, 20 nt, Human
ucccccugggaucgugcucc

SEQ ID NO: 1160797 - RNA, 20 nt, Human
ucgaaagccucucuguugca

SEQ ID NO: 1160798 - RNA, 21 nt, Human
ucuccauggcgcagcaaaagc

SEQ ID NO: 1160799 - RNA, 22 nt, Human
ucucuagcacagcucccagggu

SEQ ID NO: 1160800 - RNA, 25 nt, Human
ucugcagucugccacugcaggucuc

SEQ ID NO: 1160801 - RNA, 20 nt, Human
ugacucagcaggcacaguga

SEQ ID NO: 1160802 - RNA, 21 nt, Human
ugagucaagguccaggauugu

SEQ ID NO: 1160803 - RNA, 22 nt, Human
ugagucaagguccaggauuguu

SEQ ID NO: 1160804 - RNA, 22 nt, Human
ugccccacugccaaggcucagc

SEQ ID NO: 1160805 - RNA, 22 nt, Human
ugcgaccgaaggagcagaugca

SEQ ID NO: 1160806 - RNA, 21 nt, Human
ugcugaguggaaagugggcac

SEQ ID NO: 1160807 - RNA, 21 nt, Human
uggaaguauugcgaccgaagg

SEQ ID NO: 1160808 - RNA, 19 nt, Human
uggcuaguggcuuccaagc

SEQ ID NO: 1160809 - RNA, 20 nt, Human
uggcuuccaagcaugccccu

SEQ ID NO: 1160810 - RNA, 19 nt, Human
ugggucccuggcaauuucc

SEQ ID NO: 1160811 - RNA, 22 nt, Human
uuaaaaaauccccagguuggau

SEQ ID NO: 1160812 - RNA, 21 nt, Human
uuccugccgccuucaccagcc

SEQ ID NO: 1160813 - RNA, 25 nt, Human
uuggaaguauugcgaccgaaggagc

SEQ ID NO: 1160814 - RNA, 21 nt, Human
aaaggaaggagcuggccggug

SEQ ID NO: 1160815 - RNA, 25 nt, Human
aaaggaaggagcuggccgguggagg

SEQ ID NO: 1160816 - RNA, 18 nt, Human
aacuucuuucacugaccu

SEQ ID NO: 1160817 - RNA, 23 nt, Human
aagcggccaagguagaacuggca

SEQ ID NO: 1160818 - RNA, 20 nt, Human
aaggaaggagcuggccggug

SEQ ID NO: 1160819 - RNA, 18 nt, Human
acuuguacuccaucuugu

SEQ ID NO: 1160820 - RNA, 19 nt, Human
agcuccagcugguuggccu

SEQ ID NO: 1160821 - RNA, 19 nt, Human
aggaaggagcuggccggug

SEQ ID NO: 1160822 - RNA, 25 nt, Human
aggaaggagcuggccgguggagggu

SEQ ID NO: 1160823 - RNA, 25 nt, Human
aggaaggaguguuugggugagggga

SEQ ID NO: 1160824 - RNA, 26 nt, Human
aggaaggaguguuugggugaggggau

SEQ ID NO: 1160825 - RNA, 18 nt, Human
aggaguguuugggugagg

SEQ ID NO: 1160826 - RNA, 29 nt, Human
caaagccuugagugccagguugggcucuu

SEQ ID NO: 1160827 - RNA, 21 nt, Human
cacaggcccuucuuguccucc

SEQ ID NO: 1160828 - RNA, 21 nt, Human
ccaggaaggaguguuugggug

SEQ ID NO: 1160829 - RNA, 21 nt, Human
cucccgaccaccaggagcggg

SEQ ID NO: 1160830 - RNA, 24 nt, Human
cucccgggugugcgucuccagcuc

SEQ ID NO: 1160831 - RNA, 19 nt, Human
cuugugcagguugagauug

SEQ ID NO: 1160832 - RNA, 19 nt, Human
gaaggucuggcguggggcg

SEQ ID NO: 1160833 - RNA, 21 nt, Human
gacagggccacggucugcaga

SEQ ID NO: 1160834 - RNA, 21 nt, Human
gcagagccugggaggcagaca

SEQ ID NO: 1160835 - RNA, 18 nt, Human
ggaaggaguguuugggug

SEQ ID NO: 1160836 - RNA, 18 nt, Human
ggacacaggcccuucuug

SEQ ID NO: 1160837 - RNA, 19 nt, Human
ggaggguggaaugugagau

SEQ ID NO: 1160838 - RNA, 21 nt, Human
ggccaggaaggaguguuuggg

SEQ ID NO: 1160839 - RNA, 19 nt, Human
ggccggccgguuccuuggg

SEQ ID NO: 1160840 - RNA, 24 nt, Human
ggcuggacacaggcccuucuuguc

SEQ ID NO: 1160841 - RNA, 25 nt, Human
ggggcccccgggccggccgguuccu

SEQ ID NO: 1160842 - RNA, 19 nt, Human
gguggaaugugagauccaa

SEQ ID NO: 1160843 - RNA, 18 nt, Human
guggaagggccgcucccc

SEQ ID NO: 1160844 - RNA, 22 nt, Human
uaacauugucaagggaaugaga

SEQ ID NO: 1160845 - RNA, 20 nt, Human
uagcugcacuggucacagug

SEQ ID NO: 1160846 - RNA, 22 nt, Human
uagcugcacuggucacaguggg

SEQ ID NO: 1160847 - RNA, 18 nt, Human
uauaacauugucaaggga

SEQ ID NO: 1160848 - RNA, 22 nt, Human
ucacugaccuucuuggacaaag

SEQ ID NO: 1160849 - RNA, 26 nt, Human
uccaagugguucuuggggacuccgug

SEQ ID NO: 1160850 - RNA, 23 nt, Human
uccucggggcaguccccacucug

SEQ ID NO: 1160851 - RNA, 19 nt, Human
ucucucaguccgagauagg

SEQ ID NO: 1160852 - RNA, 23 nt, Human
ucuggcguggggcgugcuucagc

SEQ ID NO: 1160853 - RNA, 19 nt, Human
ucuugugcagguugagauu

SEQ ID NO: 1160854 - RNA, 21 nt, Human
ucuugugcagguugagauugu

SEQ ID NO: 1160855 - RNA, 19 nt, Human
ugaccuucuuggacaaagc

SEQ ID NO: 1160856 - RNA, 26 nt, Human
ugagauuguccuugcgcuugcagcug

SEQ ID NO: 1160857 - RNA, 21 nt, Human
ugcagguugagauuguccuug

SEQ ID NO: 1160858 - RNA, 19 nt, Human
ugccgugggcugccgacag

SEQ ID NO: 1160859 - RNA, 20 nt, Human
ugcucuuucucucaguccga

SEQ ID NO: 1160860 - RNA, 21 nt, Human
uggaagggccgcuccccggug

SEQ ID NO: 1160861 - RNA, 22 nt, Human
uggaauaaaugcagaaugggca

SEQ ID NO: 1160862 - RNA, 23 nt, Human
uggaauaaaugcagaaugggcac

SEQ ID NO: 1160863 - RNA, 20 nt, Human
uggcagcggggcgguuggug

SEQ ID NO: 1160864 - RNA, 24 nt, Human
ugggggcuggacacaggcccuucu

SEQ ID NO: 1160865 - RNA, 21 nt, Human
uguguggucuugaacaggcac

SEQ ID NO: 1160866 - RNA, 19 nt, Human
uuccuugggggcuggacac

SEQ ID NO: 1160867 - RNA, 18 nt, Human
uuugggugaggggaugcu

SEQ ID NO: 1160868 - RNA, 25 nt, Human
aaaaagcuaggguaaccaggagaaa

SEQ ID NO: 1160869 - RNA, 19 nt, Human
aagagaccaagucacuggu

SEQ ID NO: 1160870 - RNA, 18 nt, Human
agaaauggccccuucaga

SEQ ID NO: 1160871 - RNA, 26 nt, Human
aggaagagaccaagucacugguaaaa

SEQ ID NO: 1160872 - RNA, 20 nt, Human
caggaagagaccaagucacu

SEQ ID NO: 1160873 - RNA, 24 nt, Human
caggaagagaccaagucacuggua

SEQ ID NO: 1160874 - RNA, 23 nt, Human
caggagaaauggccccuucagau

SEQ ID NO: 1160875 - RNA, 20 nt, Human
ccccuucagaugacacugga

SEQ ID NO: 1160876 - RNA, 25 nt, Human
uacaggaagagaccaagucacuggu

SEQ ID NO: 1160877 - RNA, 23 nt, Human
uaggguaaccaggagaaauggcc

SEQ ID NO: 1160878 - RNA, 21 nt, Human
ucacugguaaaaagcuagggu

SEQ ID NO: 1160879 - RNA, 19 nt, Human
ugcuagagaagcacuguuu

SEQ ID NO: 1160880 - RNA, 24 nt, Human
uucacguguguugccacuacagga

SEQ ID NO: 1160881 - RNA, 18 nt, Human
aaaaacacaaaugaagug

SEQ ID NO: 1160882 - RNA, 19 nt, Human
aaaacaucccugcuaccaa

SEQ ID NO: 1160883 - RNA, 23 nt, Human
aaaagcuuugaacagaaggguuc

SEQ ID NO: 1160884 - RNA, 21 nt, Human
aagaagaucuaucacuuccac

SEQ ID NO: 1160885 - RNA, 19 nt, Human
aagcagcaauacaaaagua

SEQ ID NO: 1160886 - RNA, 22 nt, Human
aagcagcaauacaaaaguauuc

SEQ ID NO: 1160887 - RNA, 22 nt, Human
aguuaagccagaacugggaaug

SEQ ID NO: 1160888 - RNA, 22 nt, Human
auguccaauauuuaaaaccagu

SEQ ID NO: 1160889 - RNA, 29 nt, Human
caccacgaccucgaauagguccggcgccg

SEQ ID NO: 1160890 - RNA, 23 nt, Human
caccuauauuucaaguuuggaaa

SEQ ID NO: 1160891 - RNA, 24 nt, Human
caccuuguccuccccugccgccac

SEQ ID NO: 1160892 - RNA, 24 nt, Human
cacgaaggaaccaggguugucuua

SEQ ID NO: 1160893 - RNA, 24 nt, Human
cacuuccacuaugccuaucaaauu

SEQ ID NO: 1160894 - RNA, 20 nt, Human
caucagcaccuucauuuggu

SEQ ID NO: 1160895 - RNA, 19 nt, Human
caucccugcuaccaauaca

SEQ ID NO: 1160896 - RNA, 24 nt, Human
ccaccuuguccuccccugccgcca

SEQ ID NO: 1160897 - RNA, 19 nt, Human
ccacucauccaaagucauc

SEQ ID NO: 1160898 - RNA, 18 nt, Human
ccacugcccaucagcacc

SEQ ID NO: 1160899 - RNA, 24 nt, Human
ccacugcccaucagcaccuucauu

SEQ ID NO: 1160900 - RNA, 19 nt, Human
ccaguuaagccagaacugg

SEQ ID NO: 1160901 - RNA, 21 nt, Human
cccauguccaccuuguccucc

SEQ ID NO: 1160902 - RNA, 19 nt, Human
cugaauccucagcauaagc

SEQ ID NO: 1160903 - RNA, 22 nt, Human
cuguaaugugaaaaagaagauc

SEQ ID NO: 1160904 - RNA, 20 nt, Human
cuuccaagaccaccacgacc

SEQ ID NO: 1160905 - RNA, 20 nt, Human
gaaccaggguugucuuaugg

SEQ ID NO: 1160906 - RNA, 18 nt, Human
gaacuucuaaauccuuaa

SEQ ID NO: 1160907 - RNA, 22 nt, Human
gaagugaaaaaagauuuuuccc

SEQ ID NO: 1160908 - RNA, 20 nt, Human
gacagucuuuuuuuuuuuuu

SEQ ID NO: 1160909 - RNA, 24 nt, Human
gccagaacugggaaugccucuggg

SEQ ID NO: 1160910 - RNA, 21 nt, Human
uaaaaccaguuuguaauuggg

SEQ ID NO: 1160911 - RNA, 27 nt, Human
uaaacugguacacacuguucacaccua

SEQ ID NO: 1160912 - RNA, 23 nt, Human
uaacugaauccucagcauaagcc

SEQ ID NO: 1160913 - RNA, 25 nt, Human
uauaaagauuuagcauauauauaua

SEQ ID NO: 1160914 - RNA, 23 nt, Human
ucauccaaagucaucucuuuugg

SEQ ID NO: 1160915 - RNA, 19 nt, Human
uccaagaccaccacgaccu

SEQ ID NO: 1160916 - RNA, 24 nt, Human
uccacggcccccucgaccucuucc

SEQ ID NO: 1160917 - RNA, 19 nt, Human
uccccaguugugagauccg

SEQ ID NO: 1160918 - RNA, 20 nt, Human
uccccugccgccacguccug

SEQ ID NO: 1160919 - RNA, 26 nt, Human
uccugcugccacgguuugggcgccca

SEQ ID NO: 1160920 - RNA, 22 nt, Human
uccugggcggccaaggucucca

SEQ ID NO: 1160921 - RNA, 22 nt, Human
ucugggucauccacaucaggag

SEQ ID NO: 1160922 - RNA, 22 nt, Human
ugaaaaaagauuuuuccccaaa

SEQ ID NO: 1160923 - RNA, 21 nt, Human
ugaaaacaaaucccuucuucc

SEQ ID NO: 1160924 - RNA, 26 nt, Human
ugaaaacaaaucccuucuuccacugc

SEQ ID NO: 1160925 - RNA, 20 nt, Human
ugaauaugcaaagcauguau

SEQ ID NO: 1160926 - RNA, 22 nt, Human
ugaauccucagcauaagccucu

SEQ ID NO: 1160927 - RNA, 24 nt, Human
ugaauccucagcauaagccucuuc

SEQ ID NO: 1160928 - RNA, 21 nt, Human
ugaaugacagucuuuuuuuuu

SEQ ID NO: 1160929 - RNA, 26 nt, Human
ugaaugacagucuuuuuuuuuuuuua

SEQ ID NO: 1160930 - RNA, 20 nt, Human
ugaaugguaugaaugacagu

SEQ ID NO: 1160931 - RNA, 23 nt, Human
ugauuuaugaaaacaaaucccuu

SEQ ID NO: 1160932 - RNA, 22 nt, Human
ugcaagcagcaauacaaaagua

SEQ ID NO: 1160933 - RNA, 19 nt, Human
ugcagcgggccgcgccgag

SEQ ID NO: 1160934 - RNA, 18 nt, Human
ugccacgguuugggcgcc

SEQ ID NO: 1160935 - RNA, 26 nt, Human
ugguaugaaugacagucuuuuuuuuu

SEQ ID NO: 1160936 - RNA, 20 nt, Human
uguucacaccuauauuucaa

SEQ ID NO: 1160937 - RNA, 25 nt, Human
uuccccaguugugagauccgcuacc

SEQ ID NO: 1160938 - RNA, 21 nt, Human
uuuguaauugggggaacuucu

SEQ ID NO: 1160939 - RNA, 24 nt, Human
uuuuaccucuucaacaucauucuc

SEQ ID NO: 1160940 - RNA, 20 nt, Human
uuuucagugucugccacugg

SEQ ID NO: 1160941 - RNA, 22 nt, Human
aaaaacagaagaaagucaugac

SEQ ID NO: 1160942 - RNA, 26 nt, Human
aaaacucuguccagaacaucauuucc

SEQ ID NO: 1160943 - RNA, 19 nt, Human
aaacagaagaaagucauga

SEQ ID NO: 1160944 - RNA, 21 nt, Human
aaacagaagaaagucaugacc

SEQ ID NO: 1160945 - RNA, 20 nt, Human
aaagaccaaguaaauauuac

SEQ ID NO: 1160946 - RNA, 27 nt, Human
aacaauaaaagcuaaaaugugguccag

SEQ ID NO: 1160947 - RNA, 20 nt, Human
aacuacaaaaucugaacguu

SEQ ID NO: 1160948 - RNA, 22 nt, Human
aacuucugugugugagccuccc

SEQ ID NO: 1160949 - RNA, 24 nt, Human
aauaaaacaaaaaaguaccagucu

SEQ ID NO: 1160950 - RNA, 25 nt, Human
accacuuuuaucuuaagcuuagaau

SEQ ID NO: 1160951 - RNA, 22 nt, Human
acccccuucaaauccuuagaca

SEQ ID NO: 1160952 - RNA, 19 nt, Human
acuugugcugauuaaaaca

SEQ ID NO: 1160953 - RNA, 20 nt, Human
acuugugcugauuaaaacag

SEQ ID NO: 1160954 - RNA, 22 nt, Human
agaaaggcugaagaggcuugag

SEQ ID NO: 1160955 - RNA, 18 nt, Human
agaaggccaaaacugaag

SEQ ID NO: 1160956 - RNA, 21 nt, Human
agacuggggccggccugggga

SEQ ID NO: 1160957 - RNA, 18 nt, Human
agccgagcuaaaacucug

SEQ ID NO: 1160958 - RNA, 19 nt, Human
aggaaaaaaauaaguaugg

SEQ ID NO: 1160959 - RNA, 23 nt, Human
aggaaccagcucauuaggccucc

SEQ ID NO: 1160960 - RNA, 22 nt, Human
aggccaaaacugaagauugaga

SEQ ID NO: 1160961 - RNA, 24 nt, Human
aguggcucagcugccacaauggug

SEQ ID NO: 1160962 - RNA, 21 nt, Human
auggaugacaaggguccuugg

SEQ ID NO: 1160963 - RNA, 19 nt, Human
auugcacuuaucauucugc

SEQ ID NO: 1160964 - RNA, 24 nt, Human
auuugaauaucaaaaaugaaauug

SEQ ID NO: 1160965 - RNA, 19 nt, Human
caaagaaaugagcugugga

SEQ ID NO: 1160966 - RNA, 22 nt, Human
caacuagucaguaaacuauccc

SEQ ID NO: 1160967 - RNA, 27 nt, Human
caaguagauuuacaacuauugcacuua

SEQ ID NO: 1160968 - RNA, 18 nt, Human
caccaugugcuuacaaau

SEQ ID NO: 1160969 - RNA, 21 nt, Human
cacucugaauagaaguccgag

SEQ ID NO: 1160970 - RNA, 21 nt, Human
cagaaaauucuaguguaccau

SEQ ID NO: 1160971 - RNA, 20 nt, Human
cagaagaaagucaugaccau

SEQ ID NO: 1160972 - RNA, 23 nt, Human
cagauucagaaaaugugcuuugu

SEQ ID NO: 1160973 - RNA, 23 nt, Human
cagcagagacuggggccggccug

SEQ ID NO: 1160974 - RNA, 27 nt, Human
cagcagagacuggggccggccugggga

SEQ ID NO: 1160975 - RNA, 21 nt, Human
cagcauaugaaacucuucuca

SEQ ID NO: 1160976 - RNA, 20 nt, Human
cagcauuauuauuauuugua

SEQ ID NO: 1160977 - RNA, 20 nt, Human
caugugcauguuucuauugu

SEQ ID NO: 1160978 - RNA, 24 nt, Human
cauuacuuugaggcagaucguugu

SEQ ID NO: 1160979 - RNA, 24 nt, Human
cauucugauuauauuacaaagaaa

SEQ ID NO: 1160980 - RNA, 19 nt, Human
cauuucagggaugguuuug

SEQ ID NO: 1160981 - RNA, 23 nt, Human
ccacuuuuaucuuaagcuuagaa

SEQ ID NO: 1160982 - RNA, 19 nt, Human
ccauauccuuccugcuguu

SEQ ID NO: 1160983 - RNA, 22 nt, Human
cccaugcugccaugccaccaga

SEQ ID NO: 1160984 - RNA, 22 nt, Human
ccccaugcugccaugccaccag

SEQ ID NO: 1160985 - RNA, 20 nt, Human
cccccuucaaauccuuagac

SEQ ID NO: 1160986 - RNA, 20 nt, Human
ccuguuaacauaaaguauac

SEQ ID NO: 1160987 - RNA, 19 nt, Human
cgugcaacuucugugugug

SEQ ID NO: 1160988 - RNA, 20 nt, Human
cuaaaacucuguccagaaca

SEQ ID NO: 1160989 - RNA, 22 nt, Human
cuaaagccgagcuaaaacucug

SEQ ID NO: 1160990 - RNA, 24 nt, Human
cucaaaaacagaagaaagucauga

SEQ ID NO: 1160991 - RNA, 24 nt, Human
cucauuaggccuccaagagccugc

SEQ ID NO: 1160992 - RNA, 18 nt, Human
cuccaagagccugcugca

SEQ ID NO: 1160993 - RNA, 20 nt, Human
cucgguagaauccuagcuca

SEQ ID NO: 1160994 - RNA, 20 nt, Human
cugaacguuuucugcuuuca

SEQ ID NO: 1160995 - RNA, 20 nt, Human
cugcugggcugauuuucugu

SEQ ID NO: 1160996 - RNA, 20 nt, Human
cuggaauaaugcaaagaaaa

SEQ ID NO: 1160997 - RNA, 18 nt, Human
cugggcgccuucuaucuc

SEQ ID NO: 1160998 - RNA, 22 nt, Human
cugggguuuucuggacaauucg

SEQ ID NO: 1160999 - RNA, 24 nt, Human
cuguggcugugauccuaguuacau

SEQ ID NO: 1161000 - RNA, 23 nt, Human
cugugugugagccuccccaugcu

SEQ ID NO: 1161001 - RNA, 19 nt, Human
cuucuuugcagaacuccag

SEQ ID NO: 1161002 - RNA, 20 nt, Human
gaacacagacaagcuucucc

SEQ ID NO: 1161003 - RNA, 19 nt, Human
gacugcugagaaaggcuga

SEQ ID NO: 1161004 - RNA, 23 nt, Human
gagaaaaaauaaaacaaaaaagu

SEQ ID NO: 1161005 - RNA, 19 nt, Human
gagacugcugagaaaggcu

SEQ ID NO: 1161006 - RNA, 24 nt, Human
gaggugcuagcguuguccagcaga

SEQ ID NO: 1161007 - RNA, 21 nt, Human
gcugauuuucuguugacuuug

SEQ ID NO: 1161008 - RNA, 20 nt, Human
ggaaaaaaaaaacaauaaaa

SEQ ID NO: 1161009 - RNA, 20 nt, Human
ggacaaugggaaaaaaaaaa

SEQ ID NO: 1161010 - RNA, 24 nt, Human
ggacaauucgguucuucagaaaua

SEQ ID NO: 1161011 - RNA, 20 nt, Human
ggcaggggcugauuucacca

SEQ ID NO: 1161012 - RNA, 19 nt, Human
gggggugggguuccuggaa

SEQ ID NO: 1161013 - RNA, 19 nt, Human
guacuacuauaacaagaca

SEQ ID NO: 1161014 - RNA, 19 nt, Human
gugcuagcguuguccagca

SEQ ID NO: 1161015 - RNA, 23 nt, Human
guucuuuagacuaaguaagauac

SEQ ID NO: 1161016 - RNA, 23 nt, Human
guugucuauuucuucugaaaagu

SEQ ID NO: 1161017 - RNA, 23 nt, Human
uaaaaaaaauagugcaaaaacau

SEQ ID NO: 1161018 - RNA, 23 nt, Human
uaaaggcaaagauauauaccuca

SEQ ID NO: 1161019 - RNA, 20 nt, Human
uaaaggugccacauuuguug

SEQ ID NO: 1161020 - RNA, 24 nt, Human
uaacuuguucauaagaugguggga

SEQ ID NO: 1161021 - RNA, 23 nt, Human
uaagcuagagaaaaaauaaaaca

SEQ ID NO: 1161022 - RNA, 20 nt, Human
uaauaaagauagguuuucag

SEQ ID NO: 1161023 - RNA, 23 nt, Human
uagaaguccgagaagaucucuug

SEQ ID NO: 1161024 - RNA, 19 nt, Human
uagaauauuaaauguccuc

SEQ ID NO: 1161025 - RNA, 22 nt, Human
uagaauggggagauaacuuuag

SEQ ID NO: 1161026 - RNA, 18 nt, Human
uagacaaaugggaaucac

SEQ ID NO: 1161027 - RNA, 22 nt, Human
uagcaaauuuccccacuaaucu

SEQ ID NO: 1161028 - RNA, 23 nt, Human
uagcaaauuuccccacuaaucuu

SEQ ID NO: 1161029 - RNA, 24 nt, Human
uauuacaaagaaaugagcugugga

SEQ ID NO: 1161030 - RNA, 18 nt, Human
ucaaggugauaguucaag

SEQ ID NO: 1161031 - RNA, 24 nt, Human
ucaccaugugcuuacaaaugcucc

SEQ ID NO: 1161032 - RNA, 25 nt, Human
ucaguuaaaaaaaauagugcaaaaa

SEQ ID NO: 1161033 - RNA, 19 nt, Human
ucccaguccuggggguggg

SEQ ID NO: 1161034 - RNA, 20 nt, Human
uccuagcucauggguuucca

SEQ ID NO: 1161035 - RNA, 24 nt, Human
uccugcuguuguacaguuugcugc

SEQ ID NO: 1161036 - RNA, 20 nt, Human
uccugggggugggguuccug

SEQ ID NO: 1161037 - RNA, 23 nt, Human
ucuccuacggcugcugggcugau

SEQ ID NO: 1161038 - RNA, 25 nt, Human
ucuguggcuaaagccgagcuaaaac

SEQ ID NO: 1161039 - RNA, 18 nt, Human
ucuugguuuuggcacugg

SEQ ID NO: 1161040 - RNA, 19 nt, Human
ugaaggaaggauuugcucu

SEQ ID NO: 1161041 - RNA, 21 nt, Human
ugagaaaggcugaagaggcuu

SEQ ID NO: 1161042 - RNA, 23 nt, Human
ugagaaaggcugaagaggcuuga

SEQ ID NO: 1161043 - RNA, 18 nt, Human
ugagaggugccuguagug

SEQ ID NO: 1161044 - RNA, 21 nt, Human
ugaggcagaucguugucuauu

SEQ ID NO: 1161045 - RNA, 19 nt, Human
ugauaugcucaagcuguaa

SEQ ID NO: 1161046 - RNA, 25 nt, Human
ugcagggauaagcuagagaaaaaau

SEQ ID NO: 1161047 - RNA, 19 nt, Human
ugccaaggaacacagacaa

SEQ ID NO: 1161048 - RNA, 24 nt, Human
ugccaugccaccagaugcuuuccc

SEQ ID NO: 1161049 - RNA, 23 nt, Human
ugccuguaguguugcauuacuuu

SEQ ID NO: 1161050 - RNA, 20 nt, Human
ugccuuggaguagcagcagc

SEQ ID NO: 1161051 - RNA, 24 nt, Human
ugcuaaccauguccugauaguuac

SEQ ID NO: 1161052 - RNA, 18 nt, Human
uggaaagcaggaaagugg

SEQ ID NO: 1161053 - RNA, 21 nt, Human
uggaaagcaggaaagugguuu

SEQ ID NO: 1161054 - RNA, 22 nt, Human
uggaaagcaggaaagugguuuu

SEQ ID NO: 1161055 - RNA, 22 nt, Human
ugggagcucagcaggaaccagc

SEQ ID NO: 1161056 - RNA, 21 nt, Human
uggggaugacuccucuccuac

SEQ ID NO: 1161057 - RNA, 21 nt, Human
ugggggugggguuccuggaaa

SEQ ID NO: 1161058 - RNA, 23 nt, Human
ugggguuccuggaaaccacgagg

SEQ ID NO: 1161059 - RNA, 20 nt, Human
ugggguuuucuggacaauuc

SEQ ID NO: 1161060 - RNA, 18 nt, Human
uggugaucucugggcgcc

SEQ ID NO: 1161061 - RNA, 21 nt, Human
uguacaguuugcugcaaauga

SEQ ID NO: 1161062 - RNA, 23 nt, Human
uguaguauuaacuugaacuuggu

SEQ ID NO: 1161063 - RNA, 21 nt, Human
ugucuucaaccuauuuggcuc

SEQ ID NO: 1161064 - RNA, 21 nt, Human
ugugcagggauaagcuagaga

SEQ ID NO: 1161065 - RNA, 21 nt, Human
uguggagguuuggcacuguuu

SEQ ID NO: 1161066 - RNA, 21 nt, Human
uguucugguuuauuucguucg

SEQ ID NO: 1161067 - RNA, 22 nt, Human
uguuggaagauugccagacgag

SEQ ID NO: 1161068 - RNA, 23 nt, Human
uguuuggaugauugucuucaacc

SEQ ID NO: 1161069 - RNA, 22 nt, Human
uuaacuacaaaaucugaacguu

SEQ ID NO: 1161070 - RNA, 24 nt, Human
uuaauucacuugugcugauuaaaa

SEQ ID NO: 1161071 - RNA, 22 nt, Human
uuacaaagaaaugagcugugga

SEQ ID NO: 1161072 - RNA, 20 nt, Human
uucaagugaguucuugugcc

SEQ ID NO: 1161073 - RNA, 18 nt, Human
uuccuguggcugugaucc

SEQ ID NO: 1161074 - RNA, 20 nt, Human
uuggaugauugucuucaacc

SEQ ID NO: 1161075 - RNA, 20 nt, Human
uuucuguugacuuugcucuu

SEQ ID NO: 1161076 - RNA, 21 nt, Human
uuuuccucgguagaauccuag

SEQ ID NO: 1161077 - RNA, 25 nt, Human
uuuucuguugacuuugcucuuuaau

SEQ ID NO: 1161078 - RNA, 20 nt, Human
gacacuauuugaagucugaa

SEQ ID NO: 1161079 - RNA, 23 nt, Human
aaaauuccucacuaauaaaccaa

SEQ ID NO: 1161080 - RNA, 19 nt, Human
aagauucuuccacaaacuc

SEQ ID NO: 1161081 - RNA, 23 nt, Human
aagccuuaugaaauauuuuaguu

SEQ ID NO: 1161082 - RNA, 21 nt, Human
aaguacaaggaagcccaauga

SEQ ID NO: 1161083 - RNA, 23 nt, Human
acaaggaagcccaaugaacaaaa

SEQ ID NO: 1161084 - RNA, 20 nt, Human
acuaaguacaaggaagccca

SEQ ID NO: 1161085 - RNA, 22 nt, Human
agcccaaugaacaaaaacacgg

SEQ ID NO: 1161086 - RNA, 22 nt, Human
agcugagagaauacagagauga

SEQ ID NO: 1161087 - RNA, 21 nt, Human
aguaaccaaaacauuaagaaa

SEQ ID NO: 1161088 - RNA, 19 nt, Human
caaaaacacguuacucugc

SEQ ID NO: 1161089 - RNA, 24 nt, Human
caaggaagcccaaugaacaaaaac

SEQ ID NO: 1161090 - RNA, 21 nt, Human
cauucuguccuucuaacaaca

SEQ ID NO: 1161091 - RNA, 22 nt, Human
cccaaugaacaaaaacacguua

SEQ ID NO: 1161092 - RNA, 18 nt, Human
cuaacaacagcugagaga

SEQ ID NO: 1161093 - RNA, 24 nt, Human
cuaauaaaccaauuucugaaauuu

SEQ ID NO: 1161094 - RNA, 22 nt, Human
gaaauauuucucuuacugcaga

SEQ ID NO: 1161095 - RNA, 21 nt, Human
uaauuaagauaaaguuuaaca

SEQ ID NO: 1161096 - RNA, 21 nt, Human
uaguggacucaccucauguuu

SEQ ID NO: 1161097 - RNA, 19 nt, Human
ucuuccacaaacucuuuua

SEQ ID NO: 1161098 - RNA, 25 nt, Human
ucuuccacaaacucuuuuacaagag

SEQ ID NO: 1161099 - RNA, 23 nt, Human
ugaaaaaacuaaguacaaggaag

SEQ ID NO: 1161100 - RNA, 20 nt, Human
ugaaauauuuuaguuucagu

SEQ ID NO: 1161101 - RNA, 24 nt, Human
ugcccuuucuaguauacuaauuaa

SEQ ID NO: 1161102 - RNA, 22 nt, Human
ugccuucacuuuaaaacaguau

SEQ ID NO: 1161103 - RNA, 19 nt, Human
uggcaugguaguggacuca

SEQ ID NO: 1161104 - RNA, 21 nt, Human
uuaacaacuuaucuaaaucca

SEQ ID NO: 1161105 - RNA, 19 nt, Human
acagcaaaggaaauaaacc

SEQ ID NO: 1161106 - RNA, 22 nt, Human
accaaggagaucacaguuauga

SEQ ID NO: 1161107 - RNA, 23 nt, Human
aggagaucacaguuaugaucaca

SEQ ID NO: 1161108 - RNA, 21 nt, Human
aucacaguuaugaucacagca

SEQ ID NO: 1161109 - RNA, 23 nt, Human
caaaaucagcaccaaggagauca

SEQ ID NO: 1161110 - RNA, 23 nt, Human
cagauugaaauauaaaccaauau

SEQ ID NO: 1161111 - RNA, 25 nt, Human
caguugaccccaauauacuuaauau

SEQ ID NO: 1161112 - RNA, 22 nt, Human
cucucaauuucauuuccauuuc

SEQ ID NO: 1161113 - RNA, 18 nt, Human
gaucacaguuaugaucac

SEQ ID NO: 1161114 - RNA, 19 nt, Human
gccacaaucaaaaucagca

SEQ ID NO: 1161115 - RNA, 18 nt, Human
gccccgggagcgggcuuc

SEQ ID NO: 1161116 - RNA, 20 nt, Human
gccccgggagcgggcuuccg

SEQ ID NO: 1161117 - RNA, 24 nt, Human
gggcauggauaaccaucacaguug

SEQ ID NO: 1161118 - RNA, 22 nt, Human
uaaccaucacaguugaccccaa

SEQ ID NO: 1161119 - RNA, 24 nt, Human
ucaugcaaagaugugacuuccucu

SEQ ID NO: 1161120 - RNA, 20 nt, Human
ucucucaauuucauuuccau

SEQ ID NO: 1161121 - RNA, 21 nt, Human
ugaccccaauauacuuaauau

SEQ ID NO: 1161122 - RNA, 21 nt, Human
ugcaaagaugugacuuccucu

SEQ ID NO: 1161123 - RNA, 24 nt, Human
aaaacacuacacuggaaaagaaac

SEQ ID NO: 1161124 - RNA, 20 nt, Human
aaaaucauguaagccaauaa

SEQ ID NO: 1161125 - RNA, 19 nt, Human
aaccuguaauccacucaca

SEQ ID NO: 1161126 - RNA, 23 nt, Human
aaccuguaauccacucacaagaa

SEQ ID NO: 1161127 - RNA, 24 nt, Human
aaguagcacccacaaugcugggaa

SEQ ID NO: 1161128 - RNA, 21 nt, Human
aaguauauacaauaaaaagaa

SEQ ID NO: 1161129 - RNA, 22 nt, Human
aagugccaguuucucacaaauc

SEQ ID NO: 1161130 - RNA, 25 nt, Human
accaaaaucuucuaucacuuaacau

SEQ ID NO: 1161131 - RNA, 19 nt, Human
accgcgcugccgcugcugc

SEQ ID NO: 1161132 - RNA, 19 nt, Human
acugaauucaccagguggc

SEQ ID NO: 1161133 - RNA, 19 nt, Human
agaaauagugggguauaca

SEQ ID NO: 1161134 - RNA, 23 nt, Human
auaaagcauuacucauauuaaaa

SEQ ID NO: 1161135 - RNA, 22 nt, Human
cacaaaaggcauuuugggaaua

SEQ ID NO: 1161136 - RNA, 23 nt, Human
caccuaaaauaaugauuuucccc

SEQ ID NO: 1161137 - RNA, 19 nt, Human
cagaaaccgaggaccagag

SEQ ID NO: 1161138 - RNA, 21 nt, Human
caggucccgccuccccgggga

SEQ ID NO: 1161139 - RNA, 19 nt, Human
ccaaaaacacuacacugga

SEQ ID NO: 1161140 - RNA, 24 nt, Human
cccacaaugcugggaacccccacc

SEQ ID NO: 1161141 - RNA, 21 nt, Human
cccaggucccgccuccccggg

SEQ ID NO: 1161142 - RNA, 18 nt, Human
ccgccgccgcuccccggc

SEQ ID NO: 1161143 - RNA, 18 nt, Human
ccgccgccgcuccccggc

SEQ ID NO: 1161144 - RNA, 20 nt, Human
ccgccgccgcuccccggcuc

SEQ ID NO: 1161145 - RNA, 18 nt, Human
ccgcgcugccgcugcugc

SEQ ID NO: 1161146 - RNA, 22 nt, Human
ccggagcccgcggacgcugcgc

SEQ ID NO: 1161147 - RNA, 19 nt, Human
cgcccccgccccggagccc

SEQ ID NO: 1161148 - RNA, 23 nt, Human
cuguaauccacucacaagaauuc

SEQ ID NO: 1161149 - RNA, 26 nt, Human
cuuaaacuugacaauuaacugaaaau

SEQ ID NO: 1161150 - RNA, 28 nt, Human
cuuacugcagaaguuuaaaagguuuucc

SEQ ID NO: 1161151 - RNA, 24 nt, Human
cuuuccaaguaucauaugcacaaa

SEQ ID NO: 1161152 - RNA, 20 nt, Human
gaaagaccaaagaauaagag

SEQ ID NO: 1161153 - RNA, 18 nt, Human
gcauuuugggaauaagcu

SEQ ID NO: 1161154 - RNA, 18 nt, Human
gccgccgccgcuccccgg

SEQ ID NO: 1161155 - RNA, 24 nt, Human
gccuccccggggagggggcuucgc

SEQ ID NO: 1161156 - RNA, 20 nt, Human
ggaaaaagggaaaacuaaug

SEQ ID NO: 1161157 - RNA, 22 nt, Human
ggagcucccccaggucccgccu

SEQ ID NO: 1161158 - RNA, 18 nt, Human
ggcccggcucugcgcuca

SEQ ID NO: 1161159 - RNA, 21 nt, Human
uaaaacagccauuuucaaagc

SEQ ID NO: 1161160 - RNA, 22 nt, Human
uaaaacagccauuuucaaagca

SEQ ID NO: 1161161 - RNA, 21 nt, Human
uaaaacagcucaugucaacuc

SEQ ID NO: 1161162 - RNA, 21 nt, Human
uaaaggauauaauaucugaag

SEQ ID NO: 1161163 - RNA, 24 nt, Human
uaaccuuauaagguaaaacagcca

SEQ ID NO: 1161164 - RNA, 21 nt, Human
uaacugaaaauaauuaagcac

SEQ ID NO: 1161165 - RNA, 19 nt, Human
uaauaaaaauggcuccaca

SEQ ID NO: 1161166 - RNA, 23 nt, Human
uaaugggaaucuuagaaauagug

SEQ ID NO: 1161167 - RNA, 25 nt, Human
uacacuggaaaagaaacacaacauu

SEQ ID NO: 1161168 - RNA, 19 nt, Human
uacagauccuuaaguauac

SEQ ID NO: 1161169 - RNA, 26 nt, Human
uauuucaacacuaguuucccauucau

SEQ ID NO: 1161170 - RNA, 22 nt, Human
ucaccagguggccauaccuaau

SEQ ID NO: 1161171 - RNA, 21 nt, Human
ucccccaggucccgccucccc

SEQ ID NO: 1161172 - RNA, 21 nt, Human
ugagauacuauacuagcaugg

SEQ ID NO: 1161173 - RNA, 18 nt, Human
ugauagaaaaugagaagu

SEQ ID NO: 1161174 - RNA, 20 nt, Human
ugccaguuucucacaaauca

SEQ ID NO: 1161175 - RNA, 19 nt, Human
ugcccagggcccggcucug

SEQ ID NO: 1161176 - RNA, 23 nt, Human
uguugucuaaucuuguacuuagu

SEQ ID NO: 1161177 - RNA, 22 nt, Human
uucccggccgccgccgcucccc

SEQ ID NO: 1161178 - RNA, 24 nt, Human
uucuauggccuugcaaguagcacc

SEQ ID NO: 1161179 - RNA, 22 nt, Human
uucucucaacuuacugcagaag

SEQ ID NO: 1161180 - RNA, 20 nt, Human
uugggaauaagcuucaucau

SEQ ID NO: 1161181 - RNA, 21 nt, Human
uuuacugagccuccugggggg

SEQ ID NO: 1161182 - RNA, 18 nt, Human
aaauagccacuacagagc

SEQ ID NO: 1161183 - RNA, 20 nt, Human
aaauauauagucaucaaaca

SEQ ID NO: 1161184 - RNA, 18 nt, Human
agaaaacaguucucuggu

SEQ ID NO: 1161185 - RNA, 21 nt, Human
auauuuugaauaaaaguagca

SEQ ID NO: 1161186 - RNA, 23 nt, Human
augaaaaagaaacauguagcccu

SEQ ID NO: 1161187 - RNA, 18 nt, Human
auguuugcaaaaccagaa

SEQ ID NO: 1161188 - RNA, 19 nt, Human
auuacaauuagguauuuuu

SEQ ID NO: 1161189 - RNA, 22 nt, Human
caacaauaaauagccacuacag

SEQ ID NO: 1161190 - RNA, 18 nt, Human
caaugugguaaauacauu

SEQ ID NO: 1161191 - RNA, 19 nt, Human
caguucucugguuuagccu

SEQ ID NO: 1161192 - RNA, 23 nt, Human
cauaaaaauuacaguaugacuac

SEQ ID NO: 1161193 - RNA, 22 nt, Human
cauguuugcaaaaccagaaaac

SEQ ID NO: 1161194 - RNA, 21 nt, Human
ccaaauauauagucaucaaac

SEQ ID NO: 1161195 - RNA, 20 nt, Human
ccaggaugaugaacgcaaug

SEQ ID NO: 1161196 - RNA, 24 nt, Human
ccaggaugaugaacgcaaugaaga

SEQ ID NO: 1161197 - RNA, 21 nt, Human
ccccaacuguccaacuuucac

SEQ ID NO: 1161198 - RNA, 22 nt, Human
cccuuaaguuuaccuaauaguu

SEQ ID NO: 1161199 - RNA, 19 nt, Human
ccuaucauaacucaaugaa

SEQ ID NO: 1161200 - RNA, 21 nt, Human
cuccuccaugacacugaucag

SEQ ID NO: 1161201 - RNA, 20 nt, Human
cugcaauaaauacucccucc

SEQ ID NO: 1161202 - RNA, 22 nt, Human
cugcauauuuugaauaaaagua

SEQ ID NO: 1161203 - RNA, 20 nt, Human
gaugaugaacgcaaugaaga

SEQ ID NO: 1161204 - RNA, 18 nt, Human
gcaaugggagcagggcuc

SEQ ID NO: 1161205 - RNA, 25 nt, Human
gcauguggcaaugggagcagggcuc

SEQ ID NO: 1161206 - RNA, 24 nt, Human
gcgagggcuccuugggucucaaac

SEQ ID NO: 1161207 - RNA, 19 nt, Human
gcuccuugggucucaaaca

SEQ ID NO: 1161208 - RNA, 22 nt, Human
uaaauagccacuacagagccca

SEQ ID NO: 1161209 - RNA, 19 nt, Human
uaacucaaugaacaacuua

SEQ ID NO: 1161210 - RNA, 22 nt, Human
uaagcaauauagcugaaugucc

SEQ ID NO: 1161211 - RNA, 22 nt, Human
uaagccccaacuguccaacuuu

SEQ ID NO: 1161212 - RNA, 19 nt, Human
uaccuaauaguuaauuuuu

SEQ ID NO: 1161213 - RNA, 21 nt, Human
uagauuuuucacugcccccuu

SEQ ID NO: 1161214 - RNA, 22 nt, Human
uagcugcggagugagaagcgga

SEQ ID NO: 1161215 - RNA, 24 nt, Human
uauaugaaaaagaaacauguagcc

SEQ ID NO: 1161216 - RNA, 22 nt, Human
uccaacaagauauaugcccaaa

SEQ ID NO: 1161217 - RNA, 23 nt, Human
uccaacaagauauaugcccaaau

SEQ ID NO: 1161218 - RNA, 20 nt, Human
ucugcaauaaauacucccuc

SEQ ID NO: 1161219 - RNA, 21 nt, Human
ucugugauuggagacaggaac

SEQ ID NO: 1161220 - RNA, 21 nt, Human
ugagugggggaaaugauuuua

SEQ ID NO: 1161221 - RNA, 23 nt, Human
ugagugggggaaaugauuuuaca

SEQ ID NO: 1161222 - RNA, 20 nt, Human
ugggucucaaacaggugcaa

SEQ ID NO: 1161223 - RNA, 21 nt, Human
uguuuuauuuauucuaaucca

SEQ ID NO: 1161224 - RNA, 19 nt, Human
uuaaaacuuuaaacuccuc

SEQ ID NO: 1161225 - RNA, 24 nt, Human
acaaagcuaaaaucaaaacagaaa

SEQ ID NO: 1161226 - RNA, 18 nt, Human
cauuuguguucuguugga

SEQ ID NO: 1161227 - RNA, 19 nt, Human
ccggccucuguuaccaccu

SEQ ID NO: 1161228 - RNA, 21 nt, Human
cucucugaaaccuucacacuc

SEQ ID NO: 1161229 - RNA, 21 nt, Human
gaugaaucacucucugaaacc

SEQ ID NO: 1161230 - RNA, 18 nt, Human
uaaccccacacuuguugc

SEQ ID NO: 1161231 - RNA, 22 nt, Human
uacaaagcuaaaaucaaaacag

SEQ ID NO: 1161232 - RNA, 25 nt, Human
uccccagagaaacagaucauauaca

SEQ ID NO: 1161233 - RNA, 20 nt, Human
ucccuugacaccggccucug

SEQ ID NO: 1161234 - RNA, 24 nt, Human
ucuguuggaaaacaugaggcuuga

SEQ ID NO: 1161235 - RNA, 23 nt, Human
uguuaccaccuucguucucccug

SEQ ID NO: 1161236 - RNA, 27 nt, Human
uucacacucccuugacaccggccucug

SEQ ID NO: 1161237 - RNA, 23 nt, Human
aacacaugcaggcuaccagcacu

SEQ ID NO: 1161238 - RNA, 19 nt, Human
aagaucacaaacagagggu

SEQ ID NO: 1161239 - RNA, 21 nt, Human
aaucaaaacucauacccacaa

SEQ ID NO: 1161240 - RNA, 21 nt, Human
acaguuccaaguagccuggca

SEQ ID NO: 1161241 - RNA, 21 nt, Human
acuacggugcaggaacuucuu

SEQ ID NO: 1161242 - RNA, 19 nt, Human
agcuagaacaaugcagucc

SEQ ID NO: 1161243 - RNA, 23 nt, Human
aggaagaucacaaacagaggguu

SEQ ID NO: 1161244 - RNA, 21 nt, Human
aggcuaccagcacugccccag

SEQ ID NO: 1161245 - RNA, 21 nt, Human
agugguucguuuuugcccugg

SEQ ID NO: 1161246 - RNA, 21 nt, Human
augucuaacuucucgagcaac

SEQ ID NO: 1161247 - RNA, 21 nt, Human
caagagagaaacaaagccuca

SEQ ID NO: 1161248 - RNA, 20 nt, Human
cacagcaauccaagcaaagu

SEQ ID NO: 1161249 - RNA, 21 nt, Human
cacuaccccucccuuccuugc

SEQ ID NO: 1161250 - RNA, 22 nt, Human
cacuugccaacaggcuuuuauu

SEQ ID NO: 1161251 - RNA, 21 nt, Human
caggaagaucacaaacagagg

SEQ ID NO: 1161252 - RNA, 24 nt, Human
ccaacacuugccaacaggcuuuua

SEQ ID NO: 1161253 - RNA, 18 nt, Human
ccaccuucccacuacagu

SEQ ID NO: 1161254 - RNA, 18 nt, Human
ccagcacugccccagaca

SEQ ID NO: 1161255 - RNA, 21 nt, Human
cccuccaaucaaccaccuucc

SEQ ID NO: 1161256 - RNA, 24 nt, Human
ccuggcagaccugcccagugggcc

SEQ ID NO: 1161257 - RNA, 24 nt, Human
cgagcaacuucaaauaaaaagagu

SEQ ID NO: 1161258 - RNA, 23 nt, Human
cuuaaacuuacagaaaagaaagc

SEQ ID NO: 1161259 - RNA, 21 nt, Human
cuuuuuuuuuuuuuuuuuaag

SEQ ID NO: 1161260 - RNA, 28 nt, Human
gagcaacuucaaauaaaaagggaacgcc

SEQ ID NO: 1161261 - RNA, 20 nt, Human
gccucugacacgcucccuga

SEQ ID NO: 1161262 - RNA, 22 nt, Human
gggccagcuagaacaaugcagu

SEQ ID NO: 1161263 - RNA, 24 nt, Human
gugggccagcuagaacaaugcagu

SEQ ID NO: 1161264 - RNA, 21 nt, Human
guggucggccucugacacgcu

SEQ ID NO: 1161265 - RNA, 20 nt, Human
gugguucguuuuugcccugg

SEQ ID NO: 1161266 - RNA, 23 nt, Human
guuucagagcaagagagaaacaa

SEQ ID NO: 1161267 - RNA, 20 nt, Human
uaaacuuacagaaaagaaag

SEQ ID NO: 1161268 - RNA, 19 nt, Human
uaaauggaaacgaucacua

SEQ ID NO: 1161269 - RNA, 24 nt, Human
uaaggaacaucaaauuuuccccag

SEQ ID NO: 1161270 - RNA, 22 nt, Human
uaaggauaaauggaaacgauca

SEQ ID NO: 1161271 - RNA, 26 nt, Human
ucaaaacucauacccacaaaguccac

SEQ ID NO: 1161272 - RNA, 27 nt, Human
ucagagcaagagagaaacaaagccuca

SEQ ID NO: 1161273 - RNA, 19 nt, Human
uccaaucaaccaccuuccc

SEQ ID NO: 1161274 - RNA, 21 nt, Human
ucuccacaguacacguggucg

SEQ ID NO: 1161275 - RNA, 23 nt, Human
ucucgagcaacuucaaauaaaaa

SEQ ID NO: 1161276 - RNA, 24 nt, Human
ugaacuuguagguggaaucaggaa

SEQ ID NO: 1161277 - RNA, 21 nt, Human
ugcccuggaguucuuacaaag

SEQ ID NO: 1161278 - RNA, 22 nt, Human
ugcccuggaguucuuacaaagu

SEQ ID NO: 1161279 - RNA, 21 nt, Human
ugggaccagguaucuuguacu

SEQ ID NO: 1161280 - RNA, 21 nt, Human
ugggucuagguuuuucugcua

SEQ ID NO: 1161281 - RNA, 27 nt, Human
uguucccuccucaguuauauaauccua

SEQ ID NO: 1161282 - RNA, 21 nt, Human
uuacaauuuagacucccuggg

SEQ ID NO: 1161283 - RNA, 26 nt, Human
uucagagcaagagagaaacaaagccu

SEQ ID NO: 1161284 - RNA, 24 nt, Human
uuccaaguagccuggcagaccugc

SEQ ID NO: 1161285 - RNA, 21 nt, Human
uucgcagacuugggaaacuac

SEQ ID NO: 1161286 - RNA, 21 nt, Human
uucuuuggaggggagaaaacc

SEQ ID NO: 1161287 - RNA, 19 nt, Human
uugcaauguucccuccuca

SEQ ID NO: 1161288 - RNA, 19 nt, Human
uugggcuccgggagacuuu

SEQ ID NO: 1161289 - RNA, 22 nt, Human
aaaaacagcaacgaccagccca

SEQ ID NO: 1161290 - RNA, 24 nt, Human
aaaaagcccuaucuaacauagucc

SEQ ID NO: 1161291 - RNA, 19 nt, Human
aaccugaaggucacuguag

SEQ ID NO: 1161292 - RNA, 21 nt, Human
aagaaucuguccaaaguugcu

SEQ ID NO: 1161293 - RNA, 18 nt, Human
aagucaggcacaagggga

SEQ ID NO: 1161294 - RNA, 20 nt, Human
accuggggugccuggcccag

SEQ ID NO: 1161295 - RNA, 26 nt, Human
accuugcuuuccucugguuccucagc

SEQ ID NO: 1161296 - RNA, 22 nt, Human
agaagagacaagagacagaaag

SEQ ID NO: 1161297 - RNA, 24 nt, Human
agaauccuucaugggcagcuacuc

SEQ ID NO: 1161298 - RNA, 19 nt, Human
agacaagagacagaaaggg

SEQ ID NO: 1161299 - RNA, 21 nt, Human
agaggcuugggggcccaggac

SEQ ID NO: 1161300 - RNA, 24 nt, Human
agagugcugggaaagcuguggcuc

SEQ ID NO: 1161301 - RNA, 21 nt, Human
agcagaaacugaggcugagag

SEQ ID NO: 1161302 - RNA, 19 nt, Human
agccgcugagaaggcagug

SEQ ID NO: 1161303 - RNA, 19 nt, Human
agcucgugaguccaggccc

SEQ ID NO: 1161304 - RNA, 22 nt, Human
agcucuggcuguggagaaauuc

SEQ ID NO: 1161305 - RNA, 21 nt, Human
aggaacaaagccuuguaaacg

SEQ ID NO: 1161306 - RNA, 22 nt, Human
aggauuucagcaacuccagccc

SEQ ID NO: 1161307 - RNA, 21 nt, Human
auaaagagcagcccuugcuga

SEQ ID NO: 1161308 - RNA, 23 nt, Human
caagagacagaaagggccuggug

SEQ ID NO: 1161309 - RNA, 21 nt, Human
caccugcccuucccucagccu

SEQ ID NO: 1161310 - RNA, 23 nt, Human
cagaagcagaaacugaggcugag

SEQ ID NO: 1161311 - RNA, 20 nt, Human
cagccaccgcuccccuucca

SEQ ID NO: 1161312 - RNA, 23 nt, Human
caggagaauuaaacugagccuua

SEQ ID NO: 1161313 - RNA, 21 nt, Human
caggcuccaaggggaaggagg

SEQ ID NO: 1161314 - RNA, 22 nt, Human
cauacugcagaggcuugggggc

SEQ ID NO: 1161315 - RNA, 19 nt, Human
caucuccacgaguaaccuc

SEQ ID NO: 1161316 - RNA, 20 nt, Human
caugaagcugggaagaggug

SEQ ID NO: 1161317 - RNA, 18 nt, Human
caugguguugcugaccac

SEQ ID NO: 1161318 - RNA, 23 nt, Human
cauucugugagcuccagcaguag

SEQ ID NO: 1161319 - RNA, 19 nt, Human
ccaccgcuccccuuccagg

SEQ ID NO: 1161320 - RNA, 18 nt, Human
ccagggaugaccauucug

SEQ ID NO: 1161321 - RNA, 22 nt, Human
cccugguggccaccugcccuuc

SEQ ID NO: 1161322 - RNA, 27 nt, Human
ccucucuggacaaaaucaaacaagggu

SEQ ID NO: 1161323 - RNA, 19 nt, Human
ccugcugggcacccagccc

SEQ ID NO: 1161324 - RNA, 20 nt, Human
ccuggggugccuggcccagc

SEQ ID NO: 1161325 - RNA, 24 nt, Human
ccuguacaaagaacuuguguucca

SEQ ID NO: 1161326 - RNA, 18 nt, Human
ccuuguaaacgcacuugg

SEQ ID NO: 1161327 - RNA, 23 nt, Human
ccuuuuugcccacaggacugggc

SEQ ID NO: 1161328 - RNA, 24 nt, Human
cgaguaaccucccucucuuuuucu

SEQ ID NO: 1161329 - RNA, 21 nt, Human
cgcuugaggugguuaacuuag

SEQ ID NO: 1161330 - RNA, 18 nt, Human
cuaaguaugauggggagg

SEQ ID NO: 1161331 - RNA, 30 nt, Human
cuauuggagccgguuaguauguuggccccg

SEQ ID NO: 1161332 - RNA, 21 nt, Human
cucgugaguccaggcccuuug

SEQ ID NO: 1161333 - RNA, 20 nt, Human
cucuucaccaacaaaucuga

SEQ ID NO: 1161334 - RNA, 19 nt, Human
cugcugggcacccagcccu

SEQ ID NO: 1161335 - RNA, 24 nt, Human
cugggcacccagcccuccuucuga

SEQ ID NO: 1161336 - RNA, 21 nt, Human
cugguuccucagccaccgcuc

SEQ ID NO: 1161337 - RNA, 18 nt, Human
cugugagcuccagcagua

SEQ ID NO: 1161338 - RNA, 21 nt, Human
cuguugccugcugggcaccca

SEQ ID NO: 1161339 - RNA, 20 nt, Human
gaagaccugaguuaugaagg

SEQ ID NO: 1161340 - RNA, 20 nt, Human
gacaaaaucaaacaaggguu

SEQ ID NO: 1161341 - RNA, 18 nt, Human
gagagcagcuggcagcca

SEQ ID NO: 1161342 - RNA, 20 nt, Human
gagagcagcuggcagccaug

SEQ ID NO: 1161343 - RNA, 22 nt, Human
gagcagcccuugcugagucccg

SEQ ID NO: 1161344 - RNA, 19 nt, Human
gaggccacaaaagagacag

SEQ ID NO: 1161345 - RNA, 24 nt, Human
gaguacuuuuucugacaucuccac

SEQ ID NO: 1161346 - RNA, 21 nt, Human
gccauugugaggccacaaaag

SEQ ID NO: 1161347 - RNA, 20 nt, Human
gcugggaaagcuguggcucu

SEQ ID NO: 1161348 - RNA, 20 nt, Human
ggaagaggugcucaugagag

SEQ ID NO: 1161349 - RNA, 23 nt, Human
ggaugaccauucugugagcucca

SEQ ID NO: 1161350 - RNA, 18 nt, Human
ggccugguggguuccaag

SEQ ID NO: 1161351 - RNA, 21 nt, Human
ggucacuguaguuaucucccu

SEQ ID NO: 1161352 - RNA, 24 nt, Human
gucuuugggggcucauggauguuu

SEQ ID NO: 1161353 - RNA, 19 nt, Human
uaaaaacagcaacgaccag

SEQ ID NO: 1161354 - RNA, 19 nt, Human
uaacaaaugaaaaauguaa

SEQ ID NO: 1161355 - RNA, 20 nt, Human
uaacuggaauggaaggaaga

SEQ ID NO: 1161356 - RNA, 19 nt, Human
uacauuuuccucuuuuccu

SEQ ID NO: 1161357 - RNA, 19 nt, Human
uaucucccuuuacagaagc

SEQ ID NO: 1161358 - RNA, 25 nt, Human
uaucucccuuuacagaagcagaaac

SEQ ID NO: 1161359 - RNA, 21 nt, Human
ucacuuguuucuucuauggug

SEQ ID NO: 1161360 - RNA, 20 nt, Human
ucaggcacaaggggaguacu

SEQ ID NO: 1161361 - RNA, 21 nt, Human
uccacgaguaaccucccucuc

SEQ ID NO: 1161362 - RNA, 20 nt, Human
ucccucucuuuuucucuggu

SEQ ID NO: 1161363 - RNA, 19 nt, Human
ucuaacauaguccccuuga

SEQ ID NO: 1161364 - RNA, 24 nt, Human
ucucagagaccucaagcugggagg

SEQ ID NO: 1161365 - RNA, 21 nt, Human
ucucugguugugggaccuggu

SEQ ID NO: 1161366 - RNA, 21 nt, Human
ucugccauugugaggccacaa

SEQ ID NO: 1161367 - RNA, 20 nt, Human
ucuuccucuuccuccacuuc

SEQ ID NO: 1161368 - RNA, 18 nt, Human
ucuuuuccccugcugcuc

SEQ ID NO: 1161369 - RNA, 19 nt, Human
ugaaaguccauaaacugcc

SEQ ID NO: 1161370 - RNA, 23 nt, Human
ugaagucccacagugaagccucc

SEQ ID NO: 1161371 - RNA, 26 nt, Human
ugaggcugagaguucaagaaucuguc

SEQ ID NO: 1161372 - RNA, 20 nt, Human
ugagucccgcuugagguggu

SEQ ID NO: 1161373 - RNA, 19 nt, Human
ugcaucucagagaccucaa

SEQ ID NO: 1161374 - RNA, 23 nt, Human
ugccauaaaaagcccuaucuaac

SEQ ID NO: 1161375 - RNA, 22 nt, Human
ugcuguugccugcugggcaccc

SEQ ID NO: 1161376 - RNA, 19 nt, Human
uggaaaguauguccaggaa

SEQ ID NO: 1161377 - RNA, 18 nt, Human
uggaauggaaggaagagc

SEQ ID NO: 1161378 - RNA, 18 nt, Human
uggcaguugggaucauaa

SEQ ID NO: 1161379 - RNA, 18 nt, Human
uggccuccgccuuuguga

SEQ ID NO: 1161380 - RNA, 18 nt, Human
ugggaagaggugcucaug

SEQ ID NO: 1161381 - RNA, 23 nt, Human
ugggggcccaggacuggaagauc

SEQ ID NO: 1161382 - RNA, 22 nt, Human
ugugaggccacaaaagagacag

SEQ ID NO: 1161383 - RNA, 18 nt, Human
ugugaggggucacccggg

SEQ ID NO: 1161384 - RNA, 24 nt, Human
ugugaggggucacccgggauuugu

SEQ ID NO: 1161385 - RNA, 21 nt, Human
ugugggaccuggugugcaucu

SEQ ID NO: 1161386 - RNA, 23 nt, Human
uuaaacugagccuuagagagaag

SEQ ID NO: 1161387 - RNA, 19 nt, Human
uuacacaaggagcccguau

SEQ ID NO: 1161388 - RNA, 24 nt, Human
uuagagcucuggcuguggagaaau

SEQ ID NO: 1161389 - RNA, 19 nt, Human
uucagcaacuccagcccug

SEQ ID NO: 1161390 - RNA, 19 nt, Human
uuccucagccaccgcuccc

SEQ ID NO: 1161391 - RNA, 22 nt, Human
uuccucagccaccgcuccccuu

SEQ ID NO: 1161392 - RNA, 24 nt, Human
uugcugagucccgcuugagguggu

SEQ ID NO: 1161393 - RNA, 24 nt, Human
uuggcaucuucaagauaaccugaa

SEQ ID NO: 1161394 - RNA, 22 nt, Human
uuguguugcaucucagagaccu

SEQ ID NO: 1161395 - RNA, 27 nt, Human
uuuauauuaacaaaugaaaaauguaag

SEQ ID NO: 1161396 - RNA, 20 nt, Human
uuucuuuuccccugcugcuc

SEQ ID NO: 1161397 - RNA, 24 nt, Human
uuugccaggauuucagcaacucca

SEQ ID NO: 1161398 - RNA, 24 nt, Human
uuuucucugguugugggaccuggu

SEQ ID NO: 1161399 - RNA, 19 nt, Human
acagcagauuccaucccuc

SEQ ID NO: 1161400 - RNA, 18 nt, Human
agagguugcggugagccg

SEQ ID NO: 1161401 - RNA, 23 nt, Human
agagguugcggugagccgagauc

SEQ ID NO: 1161402 - RNA, 24 nt, Human
agagguugcggugagccgagauca

SEQ ID NO: 1161403 - RNA, 24 nt, Human
aggcagagguugcggugagccgag

SEQ ID NO: 1161404 - RNA, 23 nt, Human
aucaugccacugcaugccagccu

SEQ ID NO: 1161405 - RNA, 21 nt, Human
cacugcaugccagccucuuua

SEQ ID NO: 1161406 - RNA, 23 nt, Human
cacugcaugccagccucuuuagu

SEQ ID NO: 1161407 - RNA, 24 nt, Human
cagcuacucaggaggcugaggcag

SEQ ID NO: 1161408 - RNA, 24 nt, Human
caggaggcugaggcaggauaauca

SEQ ID NO: 1161409 - RNA, 24 nt, Human
ccacugcaugccagccucuuuagu

SEQ ID NO: 1161410 - RNA, 19 nt, Human
ccaggcccuguaauccagc

SEQ ID NO: 1161411 - RNA, 22 nt, Human
cccacauacucuuguucauuua

SEQ ID NO: 1161412 - RNA, 23 nt, Human
cccuguaauccagcuacucagga

SEQ ID NO: 1161413 - RNA, 21 nt, Human
ccugggaggcagagguugcgg

SEQ ID NO: 1161414 - RNA, 24 nt, Human
cgagaucaugccacugcaugccag

SEQ ID NO: 1161415 - RNA, 24 nt, Human
cuccugccaugggccaggcccugu

SEQ ID NO: 1161416 - RNA, 25 nt, Human
cuggcccuucugggcugcaugggca

SEQ ID NO: 1161417 - RNA, 22 nt, Human
gaaacuggcccuucugggcugc

SEQ ID NO: 1161418 - RNA, 20 nt, Human
gccgagaucaugccacugca

SEQ ID NO: 1161419 - RNA, 24 nt, Human
ggcccuguaauccagcuacucagg

SEQ ID NO: 1161420 - RNA, 27 nt, Human
gggcaggaggcaggagcugaaguuuuc

SEQ ID NO: 1161421 - RNA, 25 nt, Human
gucacaauugaguuuccuuuaagag

SEQ ID NO: 1161422 - RNA, 20 nt, Human
guguuuugguucuucuucug

SEQ ID NO: 1161423 - RNA, 24 nt, Human
guugcggugagccgagaucaugcc

SEQ ID NO: 1161424 - RNA, 19 nt, Human
uaagagcagaucagaugug

SEQ ID NO: 1161425 - RNA, 19 nt, Human
uaagagcagaucagaugug

SEQ ID NO: 1161426 - RNA, 19 nt, Human
uaggaacauaacccaaaag

SEQ ID NO: 1161427 - RNA, 23 nt, Human
ugaaacuggcccuucugggcugc

SEQ ID NO: 1161428 - RNA, 22 nt, Human
ugagccgagaucaugccacugc

SEQ ID NO: 1161429 - RNA, 20 nt, Human
ugcaugggcaggaggcagga

SEQ ID NO: 1161430 - RNA, 19 nt, Human
ugccagccucuuuaguuuc

SEQ ID NO: 1161431 - RNA, 22 nt, Human
ugcuugucacaauugaguuucc

SEQ ID NO: 1161432 - RNA, 24 nt, Human
ugggaggcagagguugcggugagc

SEQ ID NO: 1161433 - RNA, 21 nt, Human
ugggcugcaugggcaggaggc

SEQ ID NO: 1161434 - RNA, 21 nt, Human
uucacugaccacccagcuguu

SEQ ID NO: 1161435 - RNA, 24 nt, Human
uugauucuucucauucccacauac

SEQ ID NO: 1161436 - RNA, 18 nt, Human
uugcggugagccgagauc

SEQ ID NO: 1161437 - RNA, 20 nt, Human
uugcggugagccgagaucau

SEQ ID NO: 1161438 - RNA, 21 nt, Human
uugcggugagccgagaucaug

SEQ ID NO: 1161439 - RNA, 26 nt, Human
uuggugagacagcagauuccaucccu

SEQ ID NO: 1161440 - RNA, 18 nt, Human
uuuaucugacauuuccug

SEQ ID NO: 1161441 - RNA, 19 nt, Human
aggccggcggguggaggcg

SEQ ID NO: 1161442 - RNA, 26 nt, Human
ccccagcacacccgcccugggaagcc

SEQ ID NO: 1161443 - RNA, 18 nt, Human
cgcccugggaagccgccu

SEQ ID NO: 1161444 - RNA, 21 nt, Human
cgcggugccgcgugggucccc

SEQ ID NO: 1161445 - RNA, 20 nt, Human
gagcgcgcagagcccccucc

SEQ ID NO: 1161446 - RNA, 20 nt, Human
gcccuggccaggcugcggga

SEQ ID NO: 1161447 - RNA, 26 nt, Human
ggguggaggcggcggauaaugccagg

SEQ ID NO: 1161448 - RNA, 20 nt, Human
uccccgcggugccgcguggg

SEQ ID NO: 1161449 - RNA, 19 nt, Human
uggccaggcugcgggaggc

SEQ ID NO: 1161450 - RNA, 18 nt, Human
aaaauuagcugggcgugg

SEQ ID NO: 1161451 - RNA, 24 nt, Human
aaaucaauuuuaguuucuucaugg

SEQ ID NO: 1161452 - RNA, 23 nt, Human
aacucuugucuuaaaaaaaaaga

SEQ ID NO: 1161453 - RNA, 21 nt, Human
aagcuuuuacaaacacagucu

SEQ ID NO: 1161454 - RNA, 19 nt, Human
aauggguuauguuacaggg

SEQ ID NO: 1161455 - RNA, 19 nt, Human
aauugcuugaacccggagg

SEQ ID NO: 1161456 - RNA, 23 nt, Human
aauuuuuauuucagauucaggga

SEQ ID NO: 1161457 - RNA, 21 nt, Human
acagacacaaaauagguuaac

SEQ ID NO: 1161458 - RNA, 24 nt, Human
accccgccucuacuaaaaauacaa

SEQ ID NO: 1161459 - RNA, 24 nt, Human
acugcacuccagccugggcaacag

SEQ ID NO: 1161460 - RNA, 24 nt, Human
acugcacuccagccugggcaacag

SEQ ID NO: 1161461 - RNA, 18 nt, Human
agagguuguagugagcug

SEQ ID NO: 1161462 - RNA, 22 nt, Human
agagguuguagugagcugaaau

SEQ ID NO: 1161463 - RNA, 24 nt, Human
agagguuguagugagcugaaauug

SEQ ID NO: 1161464 - RNA, 24 nt, Human
agcacuuugggaggccaagguggg

SEQ ID NO: 1161465 - RNA, 24 nt, Human
agccugggcaacagagagaaacuc

SEQ ID NO: 1161466 - RNA, 23 nt, Human
agcugggcgugguugugugugcc

SEQ ID NO: 1161467 - RNA, 22 nt, Human
aggcagagguuguagugagcug

SEQ ID NO: 1161468 - RNA, 24 nt, Human
aggcaggagaauugcuugaacccg

SEQ ID NO: 1161469 - RNA, 20 nt, Human
aggccaagguggguggauca

SEQ ID NO: 1161470 - RNA, 21 nt, Human
aggcugaggcaggagaauugc

SEQ ID NO: 1161471 - RNA, 24 nt, Human
aggcugaggcaggagaauugcuug

SEQ ID NO: 1161472 - RNA, 23 nt, Human
agguauguaugaucuuguuuauu

SEQ ID NO: 1161473 - RNA, 18 nt, Human
aggucagccuacagacac

SEQ ID NO: 1161474 - RNA, 24 nt, Human
aguggcucacaucuguaaucucag

SEQ ID NO: 1161475 - RNA, 21 nt, Human
aguggcucuucugcuuucuuu

SEQ ID NO: 1161476 - RNA, 24 nt, Human
auugcgccacugcacuccagccug

SEQ ID NO: 1161477 - RNA, 20 nt, Human
auuuuagaccaguuucccuc

SEQ ID NO: 1161478 - RNA, 24 nt, Human
auuuuugucaaaguuuaaacacug

SEQ ID NO: 1161479 - RNA, 18 nt, Human
caaaaugauucuugcuaa

SEQ ID NO: 1161480 - RNA, 23 nt, Human
caaauaaaaugcagagaucaaaa

SEQ ID NO: 1161481 - RNA, 22 nt, Human
caagguggguggaucaugaagu

SEQ ID NO: 1161482 - RNA, 24 nt, Human
caagguggguggaucaugaaguca

SEQ ID NO: 1161483 - RNA, 22 nt, Human
cacaaaaugauucuugcuaaua

SEQ ID NO: 1161484 - RNA, 24 nt, Human
cacaucuguaaucucagcacuuug

SEQ ID NO: 1161485 - RNA, 18 nt, Human
cacugcacuccagccugg

SEQ ID NO: 1161486 - RNA, 19 nt, Human
cacugcacuccagccuggg

SEQ ID NO: 1161487 - RNA, 21 nt, Human
cacugcacuccagccugggca

SEQ ID NO: 1161488 - RNA, 23 nt, Human
cacugcacuccagccugggcaac

SEQ ID NO: 1161489 - RNA, 24 nt, Human
cacugcacuccagccugggcaaca

SEQ ID NO: 1161490 - RNA, 18 nt, Human
cagagguuguagugagcu

SEQ ID NO: 1161491 - RNA, 24 nt, Human
cagcacuuugggaggccaaggugg

SEQ ID NO: 1161492 - RNA, 22 nt, Human
cagccugggcaacagagagaaa

SEQ ID NO: 1161493 - RNA, 24 nt, Human
cagcuacucaggaggcugaggcag

SEQ ID NO: 1161494 - RNA, 23 nt, Human
cauaaaccaagucauuaucuccu

SEQ ID NO: 1161495 - RNA, 23 nt, Human
caucuguaaucucagcacuuugg

SEQ ID NO: 1161496 - RNA, 18 nt, Human
caugguguaaccccgccu

SEQ ID NO: 1161497 - RNA, 20 nt, Human
ccacugcacuccagccuggg

SEQ ID NO: 1161498 - RNA, 20 nt, Human
ccacugcacuccagccuggg

SEQ ID NO: 1161499 - RNA, 21 nt, Human
ccacugcacuccagccugggc

SEQ ID NO: 1161500 - RNA, 23 nt, Human
ccacugcacuccagccugggcaa

SEQ ID NO: 1161501 - RNA, 24 nt, Human
ccacugcacuccagccugggcaac

SEQ ID NO: 1161502 - RNA, 19 nt, Human
cccaaagccaugccugucu

SEQ ID NO: 1161503 - RNA, 19 nt, Human
cccagugucuauuauuccc

SEQ ID NO: 1161504 - RNA, 21 nt, Human
ccccucccuaccuccccagug

SEQ ID NO: 1161505 - RNA, 20 nt, Human
cccucuccguauuuccucac

SEQ ID NO: 1161506 - RNA, 21 nt, Human
ccuguaaucccagcuacucag

SEQ ID NO: 1161507 - RNA, 24 nt, Human
cgagaccauccugaucagcauggu

SEQ ID NO: 1161508 - RNA, 24 nt, Human
cgccacugcacuccagccugggca

SEQ ID NO: 1161509 - RNA, 24 nt, Human
cucacaucuguaaucucagcacuu

SEQ ID NO: 1161510 - RNA, 20 nt, Human
cucccuaccuccccaguguc

SEQ ID NO: 1161511 - RNA, 20 nt, Human
cucuacuaaaaauacaaaaa

SEQ ID NO: 1161512 - RNA, 21 nt, Human
cuguaaucucagcacuuuggg

SEQ ID NO: 1161513 - RNA, 23 nt, Human
gacgcaguggcucacaucuguaa

SEQ ID NO: 1161514 - RNA, 23 nt, Human
gagaaucuuuuauuuaugguauc

SEQ ID NO: 1161515 - RNA, 18 nt, Human
gauacuaaauguggcagg

SEQ ID NO: 1161516 - RNA, 22 nt, Human
gaucauaguuaauaacaauuua

SEQ ID NO: 1161517 - RNA, 24 nt, Human
gaucaugaagucaagaguucgaga

SEQ ID NO: 1161518 - RNA, 22 nt, Human
gauuuggggguggggauacuaa

SEQ ID NO: 1161519 - RNA, 19 nt, Human
gccaagguggguggaucau

SEQ ID NO: 1161520 - RNA, 22 nt, Human
gccacugcacuccagccugggc

SEQ ID NO: 1161521 - RNA, 24 nt, Human
gccacugcacuccagccugggcaa

SEQ ID NO: 1161522 - RNA, 22 nt, Human
ggaggcagagguuguagugagc

SEQ ID NO: 1161523 - RNA, 20 nt, Human
gggaacacaugggcagguuu

SEQ ID NO: 1161524 - RNA, 24 nt, Human
gggcgugguugugugugccuguaa

SEQ ID NO: 1161525 - RNA, 23 nt, Human
gguggaucaugaagucaagaguu

SEQ ID NO: 1161526 - RNA, 19 nt, Human
gucacagaaaaauacugua

SEQ ID NO: 1161527 - RNA, 21 nt, Human
guggggauacuaaauguggca

SEQ ID NO: 1161528 - RNA, 20 nt, Human
gugugccuguaaucccagcu

SEQ ID NO: 1161529 - RNA, 20 nt, Human
gugugugccuguaaucccag

SEQ ID NO: 1161530 - RNA, 24 nt, Human
uaaguaaguaguauauuaaggcca

SEQ ID NO: 1161531 - RNA, 22 nt, Human
uaauaacaauuuaagcuuuaga

SEQ ID NO: 1161532 - RNA, 22 nt, Human
uaauaguacaaauuuuguccca

SEQ ID NO: 1161533 - RNA, 19 nt, Human
uacaugaaacuacugaaag

SEQ ID NO: 1161534 - RNA, 21 nt, Human
uagcugggcgugguugugugu

SEQ ID NO: 1161535 - RNA, 18 nt, Human
uaggaaggacgcaguggc

SEQ ID NO: 1161536 - RNA, 24 nt, Human
ucaugaagucaagaguucgagacc

SEQ ID NO: 1161537 - RNA, 19 nt, Human
ucaugcuuauagguuacuc

SEQ ID NO: 1161538 - RNA, 18 nt, Human
ucauuaucuccuaucaaa

SEQ ID NO: 1161539 - RNA, 23 nt, Human
uccccaguagguaguuuuucagc

SEQ ID NO: 1161540 - RNA, 21 nt, Human
uccccagugucuauuauuccc

SEQ ID NO: 1161541 - RNA, 18 nt, Human
uccugucacccagguagu

SEQ ID NO: 1161542 - RNA, 22 nt, Human
ucugagcaaaucaauuuuaguu

SEQ ID NO: 1161543 - RNA, 25 nt, Human
ucuugcuccugcuccccucccuacc

SEQ ID NO: 1161544 - RNA, 24 nt, Human
ugaaauugcgccacugcacuccag

SEQ ID NO: 1161545 - RNA, 22 nt, Human
ugagcagaguccccaguaggua

SEQ ID NO: 1161546 - RNA, 22 nt, Human
ugagcugaaauugcgccacugc

SEQ ID NO: 1161547 - RNA, 24 nt, Human
ugaggcaggagaauugcuugaacc

SEQ ID NO: 1161548 - RNA, 25 nt, Human
ugaggcaggagaauugcuugaaccc

SEQ ID NO: 1161549 - RNA, 24 nt, Human
ugccuguaaucccagcuacucagg

SEQ ID NO: 1161550 - RNA, 21 nt, Human
uggcucacaucuguaaucuca

SEQ ID NO: 1161551 - RNA, 24 nt, Human
uggcucacaucuguaaucucagca

SEQ ID NO: 1161552 - RNA, 23 nt, Human
ugggaggccaagguggguggauc

SEQ ID NO: 1161553 - RNA, 24 nt, Human
ugggaggccaagguggguggauca

SEQ ID NO: 1161554 - RNA, 23 nt, Human
uggguggaucaugaagucaagag

SEQ ID NO: 1161555 - RNA, 24 nt, Human
ugguugugugugccuguaauccca

SEQ ID NO: 1161556 - RNA, 21 nt, Human
ugucaaaguuuaaacacugga

SEQ ID NO: 1161557 - RNA, 22 nt, Human
uuaccgguugacucuuugaaac

SEQ ID NO: 1161558 - RNA, 20 nt, Human
uuagcugggcgugguugugu

SEQ ID NO: 1161559 - RNA, 24 nt, Human
uuagcugggcgugguugugugugc

SEQ ID NO: 1161560 - RNA, 24 nt, Human
uuaggaaggacgcaguggcucaca

SEQ ID NO: 1161561 - RNA, 19 nt, Human
uucaguggcucuucugcuu

SEQ ID NO: 1161562 - RNA, 18 nt, Human
uucccauggguccucagg

SEQ ID NO: 1161563 - RNA, 23 nt, Human
uugcgccacugcacuccagccug

SEQ ID NO: 1161564 - RNA, 20 nt, Human
uuguagugagcugaaauugc

SEQ ID NO: 1161565 - RNA, 19 nt, Human
uugugugugccuguaaucc

SEQ ID NO: 1161566 - RNA, 22 nt, Human
uuuaaaauacaucaaugacaca

SEQ ID NO: 1161567 - RNA, 21 nt, Human
uuuggggguggggauacuaaa

SEQ ID NO: 1161568 - RNA, 22 nt, Human
uuuuucagcucuugcuccugcu

SEQ ID NO: 1161569 - RNA, 18 nt, Human
aaaagagagaaagaacgu

SEQ ID NO: 1161570 - RNA, 22 nt, Human
aaacaacauuaaucucccugua

SEQ ID NO: 1161571 - RNA, 22 nt, Human
aaacuugcuccacacaguugcc

SEQ ID NO: 1161572 - RNA, 19 nt, Human
aaauguauuucuugaauca

SEQ ID NO: 1161573 - RNA, 22 nt, Human
aaccccucaaagucauccauga

SEQ ID NO: 1161574 - RNA, 18 nt, Human
acaggguuucaccauguu

SEQ ID NO: 1161575 - RNA, 21 nt, Human
acaggguuucaccauguuggc

SEQ ID NO: 1161576 - RNA, 24 nt, Human
acaggguuucaccauguuggccag

SEQ ID NO: 1161577 - RNA, 19 nt, Human
accauguuggccaggcuag

SEQ ID NO: 1161578 - RNA, 23 nt, Human
acucaggccacuaaaacuuucuc

SEQ ID NO: 1161579 - RNA, 22 nt, Human
acucuguggcccaggcuggagu

SEQ ID NO: 1161580 - RNA, 24 nt, Human
acucuguggcccaggcuggagugc

SEQ ID NO: 1161581 - RNA, 23 nt, Human
acugcaaccucugccuccacguu

SEQ ID NO: 1161582 - RNA, 22 nt, Human
acugcacccucugccucccagg

SEQ ID NO: 1161583 - RNA, 23 nt, Human
acuuccuccacugaagucuugaa

SEQ ID NO: 1161584 - RNA, 21 nt, Human
agaacuuuuccuuugcauuca

SEQ ID NO: 1161585 - RNA, 28 nt, Human
agaaggacagagauggcagaacaacagg

SEQ ID NO: 1161586 - RNA, 26 nt, Human
agagagaaagaacgugcuguuggaaa

SEQ ID NO: 1161587 - RNA, 24 nt, Human
agccuccagaagguuuucaauuga

SEQ ID NO: 1161588 - RNA, 23 nt, Human
agcuaggucuucuggauaacuug

SEQ ID NO: 1161589 - RNA, 24 nt, Human
aggcaaucugcccgccucggucuc

SEQ ID NO: 1161590 - RNA, 31 nt, Human
aggcuaguuuuuguauuuuuaguagagacaa

SEQ ID NO: 1161591 - RNA, 25 nt, Human
aggcuggagugcaguggcacaaucu

SEQ ID NO: 1161592 - RNA, 18 nt, Human
aguagcugggauuacagg

SEQ ID NO: 1161593 - RNA, 23 nt, Human
agugaguggcgggaucucggcuc

SEQ ID NO: 1161594 - RNA, 21 nt, Human
agugcaguggcacaaucucag

SEQ ID NO: 1161595 - RNA, 25 nt, Human
auucagaacacacacaacacuuaac

SEQ ID NO: 1161596 - RNA, 24 nt, Human
auuuuaguagagaugggguuucac

SEQ ID NO: 1161597 - RNA, 24 nt, Human
auuuuuugcauuuuaguagagaug

SEQ ID NO: 1161598 - RNA, 24 nt, Human
caaauugcugggauuacagguaug

SEQ ID NO: 1161599 - RNA, 21 nt, Human
caccauguuggccaggcuagu

SEQ ID NO: 1161600 - RNA, 23 nt, Human
caccauguuggccaggcuagucu

SEQ ID NO: 1161601 - RNA, 24 nt, Human
caccauguuggccaggcuagucuu

SEQ ID NO: 1161602 - RNA, 27 nt, Human
caccauguuggccaggcuagucuuaaa

SEQ ID NO: 1161603 - RNA, 21 nt, Human
cacccucugccucccagguuc

SEQ ID NO: 1161604 - RNA, 18 nt, Human
caccugaauacuuagaag

SEQ ID NO: 1161605 - RNA, 23 nt, Human
cacucagccuccugaguagcugg

SEQ ID NO: 1161606 - RNA, 24 nt, Human
cacucuguggcccaggcuggagug

SEQ ID NO: 1161607 - RNA, 18 nt, Human
cacugcaaccucugccuc

SEQ ID NO: 1161608 - RNA, 22 nt, Human
cagaacaacaggucaguggggc

SEQ ID NO: 1161609 - RNA, 20 nt, Human
cagccuccugaguagcuggg

SEQ ID NO: 1161610 - RNA, 24 nt, Human
caggguuucaccauguuggccagg

SEQ ID NO: 1161611 - RNA, 24 nt, Human
cauguuggccaggcuagucuuaaa

SEQ ID NO: 1161612 - RNA, 21 nt, Human
cauucagaacacacacaacac

SEQ ID NO: 1161613 - RNA, 24 nt, Human
cauuuccagaagguuuucucuuuu

SEQ ID NO: 1161614 - RNA, 21 nt, Human
ccaaauugcugggauuacagg

SEQ ID NO: 1161615 - RNA, 21 nt, Human
ccaaauugcugggauuacagg

SEQ ID NO: 1161616 - RNA, 22 nt, Human
ccaaauugcugggauuacaggu

SEQ ID NO: 1161617 - RNA, 24 nt, Human
ccaaauugcugggauuacagguau

SEQ ID NO: 1161618 - RNA, 20 nt, Human
ccaggcuggagugaguggcg

SEQ ID NO: 1161619 - RNA, 19 nt, Human
cccagguucaagcaauucu

SEQ ID NO: 1161620 - RNA, 21 nt, Human
cccaugaaauguauuucuuga

SEQ ID NO: 1161621 - RNA, 18 nt, Human
ccccaaaacaauuacaac

SEQ ID NO: 1161622 - RNA, 22 nt, Human
ccccuagauuagacguuggcuu

SEQ ID NO: 1161623 - RNA, 19 nt, Human
ccgcagcugccucaccucu

SEQ ID NO: 1161624 - RNA, 24 nt, Human
ccgccucggucucccaaagugcug

SEQ ID NO: 1161625 - RNA, 22 nt, Human
ccucccagguucaagcaauucu

SEQ ID NO: 1161626 - RNA, 23 nt, Human
ccugaguagcugggauuacaggg

SEQ ID NO: 1161627 - RNA, 22 nt, Human
ccuugccaggcuaguuuuugua

SEQ ID NO: 1161628 - RNA, 18 nt, Human
cuaaaacuuucuccaugu

SEQ ID NO: 1161629 - RNA, 23 nt, Human
cucacucagccuccugaguagcu

SEQ ID NO: 1161630 - RNA, 24 nt, Human
cucacugcaaccucugccuccacg

SEQ ID NO: 1161631 - RNA, 23 nt, Human
cucagccuccugaguagcuggga

SEQ ID NO: 1161632 - RNA, 21 nt, Human
cuccacacaguugccaaaacc

SEQ ID NO: 1161633 - RNA, 22 nt, Human
cugaaaacaacauuaaucuccc

SEQ ID NO: 1161634 - RNA, 21 nt, Human
cugaagucuugaaccccucaa

SEQ ID NO: 1161635 - RNA, 23 nt, Human
cugcaaccucugccuccacguuc

SEQ ID NO: 1161636 - RNA, 21 nt, Human
cugcacccucugccucccagg

SEQ ID NO: 1161637 - RNA, 25 nt, Human
cugcagcuucuccaucagcaguugg

SEQ ID NO: 1161638 - RNA, 20 nt, Human
cugccucaccucucucagcc

SEQ ID NO: 1161639 - RNA, 23 nt, Human
cuuaacuucgugagccagccucu

SEQ ID NO: 1161640 - RNA, 18 nt, Human
cuucuacucaggccacua

SEQ ID NO: 1161641 - RNA, 22 nt, Human
cuucuuagcuaugaaaguccag

SEQ ID NO: 1161642 - RNA, 24 nt, Human
cuuuaaagauuugaagccaggcau

SEQ ID NO: 1161643 - RNA, 19 nt, Human
gaaacauuuccagaagguu

SEQ ID NO: 1161644 - RNA, 24 nt, Human
gaagaucugcccuucucagccucc

SEQ ID NO: 1161645 - RNA, 18 nt, Human
gaaucauagugcuugaaa

SEQ ID NO: 1161646 - RNA, 22 nt, Human
gaaucucacucuguggcccagg

SEQ ID NO: 1161647 - RNA, 20 nt, Human
gagaugggguuucaccuggg

SEQ ID NO: 1161648 - RNA, 20 nt, Human
gagcacgcagccacgcccgg

SEQ ID NO: 1161649 - RNA, 21 nt, Human
gagcaguacuacuuugaaagg

SEQ ID NO: 1161650 - RNA, 24 nt, Human
gagcucaggcaaucugcccgccuc

SEQ ID NO: 1161651 - RNA, 24 nt, Human
gaguagcugggauuacaggggugc

SEQ ID NO: 1161652 - RNA, 18 nt, Human
gauuacaggggugcacca

SEQ ID NO: 1161653 - RNA, 18 nt, Human
gauuacagguaugagcca

SEQ ID NO: 1161654 - RNA, 21 nt, Human
gauuacagguaugagccacca

SEQ ID NO: 1161655 - RNA, 24 nt, Human
gauuacagguaugagccaccaugc

SEQ ID NO: 1161656 - RNA, 24 nt, Human
gcaaucugcccgccucggucuccc

SEQ ID NO: 1161657 - RNA, 22 nt, Human
gcacccucugccucccagguuc

SEQ ID NO: 1161658 - RNA, 19 nt, Human
gcccaggcuggagugcagu

SEQ ID NO: 1161659 - RNA, 23 nt, Human
gcccaggcuggagugcaguggca

SEQ ID NO: 1161660 - RNA, 19 nt, Human
gcccuucucagccucccaa

SEQ ID NO: 1161661 - RNA, 18 nt, Human
gccucagcuucccgagua

SEQ ID NO: 1161662 - RNA, 24 nt, Human
gccucggucucccaaagugcuggg

SEQ ID NO: 1161663 - RNA, 23 nt, Human
gcuagucuuaaacuccugaccuc

SEQ ID NO: 1161664 - RNA, 19 nt, Human
gcuggagugcaguggcaca

SEQ ID NO: 1161665 - RNA, 18 nt, Human
ggaaucuauauccccaug

SEQ ID NO: 1161666 - RNA, 20 nt, Human
ggagaaggacagagauggca

SEQ ID NO: 1161667 - RNA, 19 nt, Human
ggagucuugcucuuuuauc

SEQ ID NO: 1161668 - RNA, 24 nt, Human
ggauuacagguaugagccaccaug

SEQ ID NO: 1161669 - RNA, 19 nt, Human
ggcaccccaaaacaauuac

SEQ ID NO: 1161670 - RNA, 22 nt, Human
ggguuucaccauguuggccagg

SEQ ID NO: 1161671 - RNA, 23 nt, Human
ggguuucaccuggguuucccagg

SEQ ID NO: 1161672 - RNA, 18 nt, Human
guagcugggauuacaggg

SEQ ID NO: 1161673 - RNA, 20 nt, Human
guagcugggauuacaggggu

SEQ ID NO: 1161674 - RNA, 24 nt, Human
gucuugcucuuuuauccaggcugg

SEQ ID NO: 1161675 - RNA, 19 nt, Human
guggcccaggcuggagugc

SEQ ID NO: 1161676 - RNA, 22 nt, Human
gugggacuacaggagcacgcag

SEQ ID NO: 1161677 - RNA, 19 nt, Human
uaacagaggccaaaagaga

SEQ ID NO: 1161678 - RNA, 22 nt, Human
uaacuggccuaauuucaauauu

SEQ ID NO: 1161679 - RNA, 23 nt, Human
uaauuuuuugcauuuuaguagag

SEQ ID NO: 1161680 - RNA, 19 nt, Human
uacaggagcacgcagccac

SEQ ID NO: 1161681 - RNA, 24 nt, Human
uacagguaugagccaccaugccca

SEQ ID NO: 1161682 - RNA, 23 nt, Human
uacugcacccucugccucccagg

SEQ ID NO: 1161683 - RNA, 22 nt, Human
uagagacaggguuucaccaugu

SEQ ID NO: 1161684 - RNA, 22 nt, Human
uagauggaaucucacucugugg

SEQ ID NO: 1161685 - RNA, 23 nt, Human
uaggcccuuucaccaauuauuuu

SEQ ID NO: 1161686 - RNA, 23 nt, Human
uaggucucaaaagaaagcuaaaa

SEQ ID NO: 1161687 - RNA, 24 nt, Human
uaguagagacaggguuucaccaug

SEQ ID NO: 1161688 - RNA, 26 nt, Human
uaguagagacaggguuucaccauguu

SEQ ID NO: 1161689 - RNA, 21 nt, Human
uaguagagaugggguuucacc

SEQ ID NO: 1161690 - RNA, 23 nt, Human
uaguagagaugggguuucaccug

SEQ ID NO: 1161691 - RNA, 24 nt, Human
uaguagagaugggguuucaccugg

SEQ ID NO: 1161692 - RNA, 25 nt, Human
uaguagagaugggguuucaccuggg

SEQ ID NO: 1161693 - RNA, 22 nt, Human
uaguuaucuugcuauuuccaga

SEQ ID NO: 1161694 - RNA, 19 nt, Human
ucacugcaaccucugccuc

SEQ ID NO: 1161695 - RNA, 21 nt, Human
ucacugcaaccucugccucca

SEQ ID NO: 1161696 - RNA, 23 nt, Human
ucacugcaaccucugccuccacg

SEQ ID NO: 1161697 - RNA, 22 nt, Human
ucagaacacacacaacacuuaa

SEQ ID NO: 1161698 - RNA, 22 nt, Human
ucagaacacacacaacacuuaa

SEQ ID NO: 1161699 - RNA, 20 nt, Human
ucagccuccugaguagcugg

SEQ ID NO: 1161700 - RNA, 21 nt, Human
ucagccuucauagaauugaag

SEQ ID NO: 1161701 - RNA, 24 nt, Human
ucaggcucugcuucuaauucuagu

SEQ ID NO: 1161702 - RNA, 23 nt, Human
uccacguuccagcaauucuccug

SEQ ID NO: 1161703 - RNA, 23 nt, Human
ucccaaauugcugggauuacagg

SEQ ID NO: 1161704 - RNA, 24 nt, Human
ucccaaauugcugggauuacaggu

SEQ ID NO: 1161705 - RNA, 19 nt, Human
ucccagguucaagcaauuc

SEQ ID NO: 1161706 - RNA, 20 nt, Human
ucccagguucaagcaauucu

SEQ ID NO: 1161707 - RNA, 25 nt, Human
uccugaguagcugggauuacagggg

SEQ ID NO: 1161708 - RNA, 21 nt, Human
ucuauggaaucuauaucccca

SEQ ID NO: 1161709 - RNA, 23 nt, Human
ucucacucuguggcccaggcugg

SEQ ID NO: 1161710 - RNA, 24 nt, Human
ucucacucuguggcccaggcugga

SEQ ID NO: 1161711 - RNA, 23 nt, Human
ucugcccuucucagccucccaaa

SEQ ID NO: 1161712 - RNA, 22 nt, Human
ucuggauaacuugcugcagcuu

SEQ ID NO: 1161713 - RNA, 24 nt, Human
ucuguggcccaggcuggagugcag

SEQ ID NO: 1161714 - RNA, 23 nt, Human
ucuugcucuuuuauccaggcugg

SEQ ID NO: 1161715 - RNA, 24 nt, Human
ucuugcucuuuuauccaggcugga

SEQ ID NO: 1161716 - RNA, 21 nt, Human
ugaaaggaauauuauuuucug

SEQ ID NO: 1161717 - RNA, 24 nt, Human
ugaauuccugagcucaggcaaucu

SEQ ID NO: 1161718 - RNA, 20 nt, Human
ugacaugccuuccucacuga

SEQ ID NO: 1161719 - RNA, 21 nt, Human
ugcaguggcacaaucucagcu

SEQ ID NO: 1161720 - RNA, 23 nt, Human
ugccucaccucucucagccuuca

SEQ ID NO: 1161721 - RNA, 18 nt, Human
ugccucacucagccuccu

SEQ ID NO: 1161722 - RNA, 20 nt, Human
ugccucagcuucccgaguag

SEQ ID NO: 1161723 - RNA, 24 nt, Human
ugccucagcuucccgaguaggugg

SEQ ID NO: 1161724 - RNA, 18 nt, Human
ugccuugccucacucagc

SEQ ID NO: 1161725 - RNA, 20 nt, Human
ugcugggauuacagguauga

SEQ ID NO: 1161726 - RNA, 24 nt, Human
ugcugggauuacagguaugagcca

SEQ ID NO: 1161727 - RNA, 23 nt, Human
uggagucuugcucuuuuauccag

SEQ ID NO: 1161728 - RNA, 23 nt, Human
uggagugaguggcgggaucucgg

SEQ ID NO: 1161729 - RNA, 18 nt, Human
uggagugcaguggcacaa

SEQ ID NO: 1161730 - RNA, 23 nt, Human
uggagugcaguggcacaaucuca

SEQ ID NO: 1161731 - RNA, 24 nt, Human
uggagugcaguggcacaaucucag

SEQ ID NO: 1161732 - RNA, 23 nt, Human
uggcacaaucucagcuuacugca

SEQ ID NO: 1161733 - RNA, 20 nt, Human
uggcaucuuuccuuaacuuc

SEQ ID NO: 1161734 - RNA, 24 nt, Human
uggccaggcuagucuuaaacuccu

SEQ ID NO: 1161735 - RNA, 18 nt, Human
uggcccaggcuggagugc

SEQ ID NO: 1161736 - RNA, 24 nt, Human
ugggacuacaggagcacgcagcca

SEQ ID NO: 1161737 - RNA, 21 nt, Human
ugggauuacaggggugcacca

SEQ ID NO: 1161738 - RNA, 22 nt, Human
ugggauuacaggggugcaccac

SEQ ID NO: 1161739 - RNA, 18 nt, Human
ugggauuacagguaugag

SEQ ID NO: 1161740 - RNA, 22 nt, Human
ugggauuacagguaugagccac

SEQ ID NO: 1161741 - RNA, 23 nt, Human
ugggauuacagguaugagccacc

SEQ ID NO: 1161742 - RNA, 24 nt, Human
ugggauuacagguaugagccacca

SEQ ID NO: 1161743 - RNA, 25 nt, Human
ugggauuacagguaugagccaccau

SEQ ID NO: 1161744 - RNA, 19 nt, Human
ugggguuucaccuggguuu

SEQ ID NO: 1161745 - RNA, 22 nt, Human
ugggguuucaccuggguuuccc

SEQ ID NO: 1161746 - RNA, 18 nt, Human
uguaguaucugugguugu

SEQ ID NO: 1161747 - RNA, 22 nt, Human
ugugauaauaaugaacaaguuu

SEQ ID NO: 1161748 - RNA, 24 nt, Human
uuacugcacccucugccucccagg

SEQ ID NO: 1161749 - RNA, 25 nt, Human
uuacugcacccucugccucccaggu

SEQ ID NO: 1161750 - RNA, 24 nt, Human
uuaguagagacaggguuucaccau

SEQ ID NO: 1161751 - RNA, 18 nt, Human
uuaguagagaugggguuu

SEQ ID NO: 1161752 - RNA, 22 nt, Human
uuaguagagaugggguuucacc

SEQ ID NO: 1161753 - RNA, 23 nt, Human
uuaguagagaugggguuucaccu

SEQ ID NO: 1161754 - RNA, 20 nt, Human
uuauccaggcuggagugagu

SEQ ID NO: 1161755 - RNA, 23 nt, Human
uucauaauuuggcuaguuuuggu

SEQ ID NO: 1161756 - RNA, 21 nt, Human
uuccagaccaucuucaguuac

SEQ ID NO: 1161757 - RNA, 22 nt, Human
uugaagccaggcaucaacuucu

SEQ ID NO: 1161758 - RNA, 21 nt, Human
uugccaggcuaguuuuuguau

SEQ ID NO: 1161759 - RNA, 23 nt, Human
uugcugcuucaccuuacauuucu

SEQ ID NO: 1161760 - RNA, 23 nt, Human
uugugaauuccugagcucaggca

SEQ ID NO: 1161761 - RNA, 21 nt, Human
uuguucuuaaugcaauuuaga

SEQ ID NO: 1161762 - RNA, 23 nt, Human
uuuaauuuccuuccagaacuuuu

SEQ ID NO: 1161763 - RNA, 24 nt, Human
uuucaccauguuggccaggcuagu

SEQ ID NO: 1161764 - RNA, 19 nt, Human
uuucuauguuaugcagaug

SEQ ID NO: 1161765 - RNA, 20 nt, Human
uuugcauucauaauuuggcu

SEQ ID NO: 1161766 - RNA, 24 nt, Human
uuuuuaguagagacaggguuucac

SEQ ID NO: 1161767 - RNA, 20 nt, Human
uuuuugcauuuuaguagaga

SEQ ID NO: 1161768 - RNA, 20 nt, Human
uuuuuguauuuuuaguagag

SEQ ID NO: 1161769 - RNA, 21 nt, Human
uuuuuguauuuuuaguagaga

SEQ ID NO: 1161770 - RNA, 21 nt, Human
aaaaacagaggcuuccaaaca

SEQ ID NO: 1161771 - RNA, 19 nt, Human
aaaacagaggcuuccaaac

SEQ ID NO: 1161772 - RNA, 21 nt, Human
aaacagaagcagcuuccaaac

SEQ ID NO: 1161773 - RNA, 22 nt, Human
aaacagaagcagcuuccaaaca

SEQ ID NO: 1161774 - RNA, 20 nt, Human
aacacauguacacgcacaca

SEQ ID NO: 1161775 - RNA, 26 nt, Human
aagcggaucccagggucugcaagucu

SEQ ID NO: 1161776 - RNA, 22 nt, Human
aaggacacccagagcaggagag

SEQ ID NO: 1161777 - RNA, 22 nt, Human
aaguucccagccucaggccacc

SEQ ID NO: 1161778 - RNA, 31 nt, Human
acacacacacacacgcucaaacacgugcaca

SEQ ID NO: 1161779 - RNA, 29 nt, Human
acacacacgcucaaacacgugcacauggu

SEQ ID NO: 1161780 - RNA, 21 nt, Human
acacagaaaucccaggagccc

SEQ ID NO: 1161781 - RNA, 25 nt, Human
acacaugcauacgugcucaugcaua

SEQ ID NO: 1161782 - RNA, 25 nt, Human
acacgcacacaugcgcacacacacg

SEQ ID NO: 1161783 - RNA, 29 nt, Human
acacgcacaugcaugcucacgcguguaca

SEQ ID NO: 1161784 - RNA, 21 nt, Human
acagaaaucccaggagcccca

SEQ ID NO: 1161785 - RNA, 20 nt, Human
acagaagcagcuuccaaaca

SEQ ID NO: 1161786 - RNA, 24 nt, Human
acaugcacacaugcucacacuaca

SEQ ID NO: 1161787 - RNA, 28 nt, Human
acaugcgcacacacacguacaucuauac

SEQ ID NO: 1161788 - RNA, 22 nt, Human
accaggucugcagcgacucaca

SEQ ID NO: 1161789 - RNA, 22 nt, Human
acccauacaccagccacacaca

SEQ ID NO: 1161790 - RNA, 19 nt, Human
acccccagcacagcaagac

SEQ ID NO: 1161791 - RNA, 22 nt, Human
acgcauacaugcccacacacaa

SEQ ID NO: 1161792 - RNA, 19 nt, Human
acgccccccacuccaaaaa

SEQ ID NO: 1161793 - RNA, 27 nt, Human
acgugcacaugcacacacacagguaca

SEQ ID NO: 1161794 - RNA, 22 nt, Human
acuacacauauccaagaaccca

SEQ ID NO: 1161795 - RNA, 22 nt, Human
agagaaguacacaagaacauga

SEQ ID NO: 1161796 - RNA, 25 nt, Human
agagcuuccccagcaccugccacac

SEQ ID NO: 1161797 - RNA, 26 nt, Human
agccccucccgccuuccacgcccccc

SEQ ID NO: 1161798 - RNA, 21 nt, Human
aggaacacaggccuguggcca

SEQ ID NO: 1161799 - RNA, 20 nt, Human
aggaacccaaguucccagcc

SEQ ID NO: 1161800 - RNA, 18 nt, Human
aggagcccuucugggggc

SEQ ID NO: 1161801 - RNA, 19 nt, Human
aggaggaggagaugccgcc

SEQ ID NO: 1161802 - RNA, 24 nt, Human
aggccucccacccucagggaccag

SEQ ID NO: 1161803 - RNA, 22 nt, Human
aggcgccagcagagcccaggaa

SEQ ID NO: 1161804 - RNA, 29 nt, Human
aggcuuccaaacacacagaaaucccuuuu

SEQ ID NO: 1161805 - RNA, 18 nt, Human
agggccagccauccaccc

SEQ ID NO: 1161806 - RNA, 27 nt, Human
aguacacacacguacaccauaugcaua

SEQ ID NO: 1161807 - RNA, 24 nt, Human
auacacaugugcaugcucacccau

SEQ ID NO: 1161808 - RNA, 18 nt, Human
auacaugcccacacacaa

SEQ ID NO: 1161809 - RNA, 21 nt, Human
aucacgccaccucuggaagca

SEQ ID NO: 1161810 - RNA, 23 nt, Human
augcacgugcacaggcucacaca

SEQ ID NO: 1161811 - RNA, 33 nt, Human
augcauacgugcucaugcauacacacgcacagu

SEQ ID NO: 1161812 - RNA, 25 nt, Human
augcgcacacacacguacaucuaua

SEQ ID NO: 1161813 - RNA, 22 nt, Human
caaaaacagaggcuuccaaaca

SEQ ID NO: 1161814 - RNA, 22 nt, Human
caaacacacagaaaucccagga

SEQ ID NO: 1161815 - RNA, 31 nt, Human
caaacacauguacacgcacacaugcgcacag

SEQ ID NO: 1161816 - RNA, 28 nt, Human
caaacacgugcacaugcacacacacagu

SEQ ID NO: 1161817 - RNA, 21 nt, Human
caaguucccagccucaggcca

SEQ ID NO: 1161818 - RNA, 31 nt, Human
cacaaacacauguacacgcacacaugcggug

SEQ ID NO: 1161819 - RNA, 30 nt, Human
cacacacguacaccauaugcauauguaugg

SEQ ID NO: 1161820 - RNA, 22 nt, Human
cacacagguacaucccuccuuu

SEQ ID NO: 1161821 - RNA, 26 nt, Human
cacagcccugggugucccagggcagg

SEQ ID NO: 1161822 - RNA, 25 nt, Human
cacaugcacacaugcucacacuaca

SEQ ID NO: 1161823 - RNA, 26 nt, Human
cacaugcgcacacacacguacaucua

SEQ ID NO: 1161824 - RNA, 26 nt, Human
cacauguacaccuauacacguguaca

SEQ ID NO: 1161825 - RNA, 23 nt, Human
cacauguacacucuacauguaca

SEQ ID NO: 1161826 - RNA, 26 nt, Human
cacauucauacacacgugcaugcuua

SEQ ID NO: 1161827 - RNA, 19 nt, Human
caccagccggaagcaaggc

SEQ ID NO: 1161828 - RNA, 20 nt, Human
cacccccagcacagcaagac

SEQ ID NO: 1161829 - RNA, 23 nt, Human
caccuucggcccccacaaagccc

SEQ ID NO: 1161830 - RNA, 31 nt, Human
cacgcacaugcaugcucacgcguguacaugg

SEQ ID NO: 1161831 - RNA, 19 nt, Human
cacgccaccucuggaagca

SEQ ID NO: 1161832 - RNA, 18 nt, Human
cacgccccccacuccaaa

SEQ ID NO: 1161833 - RNA, 23 nt, Human
cacgccccccacuccaaaaacag

SEQ ID NO: 1161834 - RNA, 22 nt, Human
cacuacacauauccaagaaccc

SEQ ID NO: 1161835 - RNA, 29 nt, Human
cacuugcacacacacacacacgcucaaac

SEQ ID NO: 1161836 - RNA, 19 nt, Human
cagagcccaggaacccaag

SEQ ID NO: 1161837 - RNA, 19 nt, Human
cagcaccugccacacagcc

SEQ ID NO: 1161838 - RNA, 23 nt, Human
cagcagccguggcgcggaggagu

SEQ ID NO: 1161839 - RNA, 24 nt, Human
cagcaggcaacacagggugcgcga

SEQ ID NO: 1161840 - RNA, 24 nt, Human
cagcccccugcccggcggggcaac

SEQ ID NO: 1161841 - RNA, 19 nt, Human
cagccguggcgcggaggag

SEQ ID NO: 1161842 - RNA, 21 nt, Human
cagcugcccggagccucucgu

SEQ ID NO: 1161843 - RNA, 18 nt, Human
caggcacugucagccccu

SEQ ID NO: 1161844 - RNA, 23 nt, Human
caggccaccagcacagcccuggg

SEQ ID NO: 1161845 - RNA, 24 nt, Human
caggccaccagcacagcccugggu

SEQ ID NO: 1161846 - RNA, 24 nt, Human
caggccagacugacccagcccuug

SEQ ID NO: 1161847 - RNA, 22 nt, Human
cagggccucccagcccagccuu

SEQ ID NO: 1161848 - RNA, 18 nt, Human
caguggcagcugccuggg

SEQ ID NO: 1161849 - RNA, 22 nt, Human
caucuucucugagaaggacacc

SEQ ID NO: 1161850 - RNA, 20 nt, Human
caugcacacacacagguaca

SEQ ID NO: 1161851 - RNA, 25 nt, Human
caugcacauguacaccuauacacgu

SEQ ID NO: 1161852 - RNA, 24 nt, Human
caugcacgugcacaggcucacaca

SEQ ID NO: 1161853 - RNA, 31 nt, Human
caugcacgugcacaggcucacacaugcacag

SEQ ID NO: 1161854 - RNA, 25 nt, Human
caugcauacacacgcacauucauac

SEQ ID NO: 1161855 - RNA, 20 nt, Human
caugccaccagccggaagca

SEQ ID NO: 1161856 - RNA, 30 nt, Human
caugcccacacacaaaguacacacacguag

SEQ ID NO: 1161857 - RNA, 24 nt, Human
caugcucacacuacacauauccaa

SEQ ID NO: 1161858 - RNA, 20 nt, Human
cauguacacgcacacaugcg

SEQ ID NO: 1161859 - RNA, 26 nt, Human
cauguacacgcacacaugcgcacaca

SEQ ID NO: 1161860 - RNA, 22 nt, Human
caugugcaugcucacccauaca

SEQ ID NO: 1161861 - RNA, 24 nt, Human
ccaaaaacagaggcuuccaaacac

SEQ ID NO: 1161862 - RNA, 19 nt, Human
ccaccagcacagcccuggg

SEQ ID NO: 1161863 - RNA, 20 nt, Human
ccaccuucggcccccacaaa

SEQ ID NO: 1161864 - RNA, 19 nt, Human
ccacgccccccacuccaaa

SEQ ID NO: 1161865 - RNA, 22 nt, Human
ccagcacagcccuggguguccc

SEQ ID NO: 1161866 - RNA, 24 nt, Human
ccagcccuuggcccccucccuccg

SEQ ID NO: 1161867 - RNA, 21 nt, Human
ccauacaccagccacacacaa

SEQ ID NO: 1161868 - RNA, 26 nt, Human
ccauacaccagccacacacaaguacu

SEQ ID NO: 1161869 - RNA, 19 nt, Human
cccacaaagcccaggcgcc

SEQ ID NO: 1161870 - RNA, 27 nt, Human
cccacaaagcccaggcgccagcagagc

SEQ ID NO: 1161871 - RNA, 21 nt, Human
cccaccguggccccgggaggc

SEQ ID NO: 1161872 - RNA, 24 nt, Human
cccagcaccugccacacagccagg

SEQ ID NO: 1161873 - RNA, 27 nt, Human
cccagcucuggccccaggcacugucag

SEQ ID NO: 1161874 - RNA, 22 nt, Human
cccaggaccucguggccucagg

SEQ ID NO: 1161875 - RNA, 18 nt, Human
cccaggcgccagcagagc

SEQ ID NO: 1161876 - RNA, 22 nt, Human
ccccagcaccugccacacagcc

SEQ ID NO: 1161877 - RNA, 19 nt, Human
ccccagcccgucguccccu

SEQ ID NO: 1161878 - RNA, 22 nt, Human
ccccagcccgucguccccucua

SEQ ID NO: 1161879 - RNA, 21 nt, Human
ccccaggaccucguggccuca

SEQ ID NO: 1161880 - RNA, 23 nt, Human
ccccaggaccucguggccucagg

SEQ ID NO: 1161881 - RNA, 23 nt, Human
ccccaggcacugucagccccucc

SEQ ID NO: 1161882 - RNA, 20 nt, Human
cccccagcacagcaagaccc

SEQ ID NO: 1161883 - RNA, 22 nt, Human
cccccagcacagcaagacccgu

SEQ ID NO: 1161884 - RNA, 22 nt, Human
ccccccacuccaaaaacagagg

SEQ ID NO: 1161885 - RNA, 23 nt, Human
ccccccacuccaaaaacagaggc

SEQ ID NO: 1161886 - RNA, 27 nt, Human
ccccucagagaaguacacaagaacugg

SEQ ID NO: 1161887 - RNA, 21 nt, Human
cccggccccaaggcaugccac

SEQ ID NO: 1161888 - RNA, 21 nt, Human
cccuacgcucaggagcccuuc

SEQ ID NO: 1161889 - RNA, 19 nt, Human
cccuauggcccagagagcu

SEQ ID NO: 1161890 - RNA, 22 nt, Human
cccucaggccagacugacccag

SEQ ID NO: 1161891 - RNA, 21 nt, Human
cccucccgccuuccacgcccc

SEQ ID NO: 1161892 - RNA, 23 nt, Human
ccggaagcaaggcugggcauggg

SEQ ID NO: 1161893 - RNA, 23 nt, Human
ccucaggccaccagcacagcccu

SEQ ID NO: 1161894 - RNA, 19 nt, Human
ccucccagcccagccuucc

SEQ ID NO: 1161895 - RNA, 27 nt, Human
ccucccagcccagccuucccccagggc

SEQ ID NO: 1161896 - RNA, 22 nt, Human
ccucccgccuuccacgcccccc

SEQ ID NO: 1161897 - RNA, 23 nt, Human
ccugcagccuucugccaucuucu

SEQ ID NO: 1161898 - RNA, 21 nt, Human
ccugccacacagccaggaagc

SEQ ID NO: 1161899 - RNA, 24 nt, Human
ccuucggcccccacaaagcccagg

SEQ ID NO: 1161900 - RNA, 23 nt, Human
cgcacauucauacacacgugcag

SEQ ID NO: 1161901 - RNA, 24 nt, Human
cgccagcagagcccaggaacccaa

SEQ ID NO: 1161902 - RNA, 27 nt, Human
cgccccccacuccaaaaacagaggcuu

SEQ ID NO: 1161903 - RNA, 20 nt, Human
cgcucaggagcccuucuggg

SEQ ID NO: 1161904 - RNA, 22 nt, Human
cgugcacaugcacacacacagg

SEQ ID NO: 1161905 - RNA, 28 nt, Human
cguguacacgcacaugcaugcucacgcg

SEQ ID NO: 1161906 - RNA, 20 nt, Human
cguguacaugcuuaugcagu

SEQ ID NO: 1161907 - RNA, 23 nt, Human
cucacacuacacauauccaagaa

SEQ ID NO: 1161908 - RNA, 18 nt, Human
cucauacgcauacaugcc

SEQ ID NO: 1161909 - RNA, 26 nt, Human
cucaugcauacacacgcacauucaua

SEQ ID NO: 1161910 - RNA, 21 nt, Human
cucccacccucagggaccagg

SEQ ID NO: 1161911 - RNA, 25 nt, Human
cucccgccuuccacgccccccacuc

SEQ ID NO: 1161912 - RNA, 23 nt, Human
cugcagccuucugccaucuucuc

SEQ ID NO: 1161913 - RNA, 27 nt, Human
cuugcacacacacacacacgcucaaac

SEQ ID NO: 1161914 - RNA, 19 nt, Human
gaaaucccaggagccccag

SEQ ID NO: 1161915 - RNA, 19 nt, Human
gacacaaacacauguacac

SEQ ID NO: 1161916 - RNA, 18 nt, Human
gaccucguggccucaggc

SEQ ID NO: 1161917 - RNA, 24 nt, Human
gagcaggagagggguggccccagg

SEQ ID NO: 1161918 - RNA, 18 nt, Human
gaggauguccuccuucgc

SEQ ID NO: 1161919 - RNA, 21 nt, Human
gcaguguggggcaucccgagg

SEQ ID NO: 1161920 - RNA, 26 nt, Human
gcccaggaacccaaguucccagccuc

SEQ ID NO: 1161921 - RNA, 24 nt, Human
gcucacccauacaccagccacaca

SEQ ID NO: 1161922 - RNA, 19 nt, Human
gcugggcauggggcggagg

SEQ ID NO: 1161923 - RNA, 21 nt, Human
ggaacccaaguucccagccuc

SEQ ID NO: 1161924 - RNA, 20 nt, Human
ggaagguggccccacgaggg

SEQ ID NO: 1161925 - RNA, 21 nt, Human
ggcaguguggggcaucccgag

SEQ ID NO: 1161926 - RNA, 19 nt, Human
ggcauggggcggaggaagg

SEQ ID NO: 1161927 - RNA, 23 nt, Human
ggcgcaggggcaacugucccacc

SEQ ID NO: 1161928 - RNA, 23 nt, Human
gggcaguguggggcaucccgagg

SEQ ID NO: 1161929 - RNA, 24 nt, Human
gggucugcaagucuggaacucaaa

SEQ ID NO: 1161930 - RNA, 26 nt, Human
gugcacaggcucacacaugcacacag

SEQ ID NO: 1161931 - RNA, 18 nt, Human
gugcaugcucacccauac

SEQ ID NO: 1161932 - RNA, 30 nt, Human
guguacacgcacaugcaugcucacgcgugg

SEQ ID NO: 1161933 - RNA, 22 nt, Human
uaagcaagucagcaggcaacac

SEQ ID NO: 1161934 - RNA, 24 nt, Human
uacacacgugcaugcuuaugcaua

SEQ ID NO: 1161935 - RNA, 25 nt, Human
uacacgcacacaugcgcacacacac

SEQ ID NO: 1161936 - RNA, 18 nt, Human
uacacucauacauaugug

SEQ ID NO: 1161937 - RNA, 19 nt, Human
uacaugcccacacacaaag

SEQ ID NO: 1161938 - RNA, 27 nt, Human
uacaugcccacacacaaaguacacaca

SEQ ID NO: 1161939 - RNA, 23 nt, Human
uacauguacagcucacauaugca

SEQ ID NO: 1161940 - RNA, 18 nt, Human
uacccaagacacaaacac

SEQ ID NO: 1161941 - RNA, 25 nt, Human
uaugcaccuacaacaugcacgugca

SEQ ID NO: 1161942 - RNA, 18 nt, Human
ucacauaugcauccauac

SEQ ID NO: 1161943 - RNA, 27 nt, Human
ucacauaugcauccauacacaugugca

SEQ ID NO: 1161944 - RNA, 19 nt, Human
ucaccccaccguggccccg

SEQ ID NO: 1161945 - RNA, 21 nt, Human
ucagagaaguacacaagaaca

SEQ ID NO: 1161946 - RNA, 18 nt, Human
ucaggccagacugaccca

SEQ ID NO: 1161947 - RNA, 25 nt, Human
ucauacacacgugcaugcuuaugca

SEQ ID NO: 1161948 - RNA, 25 nt, Human
ucauacgcauacaugcccacacaca

SEQ ID NO: 1161949 - RNA, 20 nt, Human
uccacagggccucccagccc

SEQ ID NO: 1161950 - RNA, 22 nt, Human
uccacagggccucccagcccag

SEQ ID NO: 1161951 - RNA, 22 nt, Human
uccauacacaugugcaugcuca

SEQ ID NO: 1161952 - RNA, 18 nt, Human
ucccagccucaggccacc

SEQ ID NO: 1161953 - RNA, 22 nt, Human
ucccaggagccccaggccccug

SEQ ID NO: 1161954 - RNA, 19 nt, Human
ucccagggcaggcgggccu

SEQ ID NO: 1161955 - RNA, 21 nt, Human
ucccagggcaggcgggccucu

SEQ ID NO: 1161956 - RNA, 24 nt, Human
ucccucgggcacugacaggaaggu

SEQ ID NO: 1161957 - RNA, 21 nt, Human
ucgcccagcucuggccccagg

SEQ ID NO: 1161958 - RNA, 20 nt, Human
ucguggccucaggccugcug

SEQ ID NO: 1161959 - RNA, 28 nt, Human
ucuauacacgugcucacgcauguacaca

SEQ ID NO: 1161960 - RNA, 22 nt, Human
ucuguggccaucagcccaggaa

SEQ ID NO: 1161961 - RNA, 18 nt, Human
ugaaaaacagcagcauug

SEQ ID NO: 1161962 - RNA, 19 nt, Human
ugagaaggacacccagagc

SEQ ID NO: 1161963 - RNA, 22 nt, Human
ugagaaggacacccagagcagg

SEQ ID NO: 1161964 - RNA, 21 nt, Human
ugcacacacacagguacaucc

SEQ ID NO: 1161965 - RNA, 24 nt, Human
ugcauacacacgcacauucauaca

SEQ ID NO: 1161966 - RNA, 20 nt, Human
ugcauccauacacaugugca

SEQ ID NO: 1161967 - RNA, 27 nt, Human
ugccacacagccaggaagcucagggcg

SEQ ID NO: 1161968 - RNA, 29 nt, Human
ugcccacacacaaaguacacacacguaca

SEQ ID NO: 1161969 - RNA, 28 nt, Human
ugcgcaucacacaugcauacgugcucau

SEQ ID NO: 1161970 - RNA, 24 nt, Human
ugcucacccauacaccagccacac

SEQ ID NO: 1161971 - RNA, 25 nt, Human
ugcucacccauacaccagccacaca

SEQ ID NO: 1161972 - RNA, 22 nt, Human
uggaagcacagcagccguggcg

SEQ ID NO: 1161973 - RNA, 18 nt, Human
uggcccccucccuccggg

SEQ ID NO: 1161974 - RNA, 22 nt, Human
uggccucaggccugcuguccac

SEQ ID NO: 1161975 - RNA, 19 nt, Human
uggcgcaggggcaacuguc

SEQ ID NO: 1161976 - RNA, 18 nt, Human
uggcgcggaggaguaagc

SEQ ID NO: 1161977 - RNA, 19 nt, Human
uggcucugggcaguguggg

SEQ ID NO: 1161978 - RNA, 21 nt, Human
uggcucugggcaguguggggc

SEQ ID NO: 1161979 - RNA, 23 nt, Human
ugggcauggggcggaggaaggag

SEQ ID NO: 1161980 - RNA, 18 nt, Human
uggggccaccccaccccc

SEQ ID NO: 1161981 - RNA, 23 nt, Human
ugguuuuauugaaaaacagcagc

SEQ ID NO: 1161982 - RNA, 25 nt, Human
uguacacaacucaugcacauguaca

SEQ ID NO: 1161983 - RNA, 24 nt, Human
uguacaccuauacacguguacacg

SEQ ID NO: 1161984 - RNA, 28 nt, Human
uguaugcacucauacacucauacauaug

SEQ ID NO: 1161985 - RNA, 19 nt, Human
uuggcccccucccuccggg

SEQ ID NO: 1161986 - RNA, 19 nt, Human
uuggcccccucccuccggg

SEQ ID NO: 1161987 - RNA, 24 nt, Human
acaccgcaauucaaguguuggcua

SEQ ID NO: 1161988 - RNA, 22 nt, Human
acgcccagacugcucuaagggc

SEQ ID NO: 1161989 - RNA, 18 nt, Human
agcccagacggcggcggc

SEQ ID NO: 1161990 - RNA, 20 nt, Human
aggugcuccaagcucuccag

SEQ ID NO: 1161991 - RNA, 19 nt, Human
aguccuuacgcauuagcgg

SEQ ID NO: 1161992 - RNA, 26 nt, Human
cacaagcggccgcccuaaaugcgguc

SEQ ID NO: 1161993 - RNA, 20 nt, Human
cacgccgcgcaggccagccu

SEQ ID NO: 1161994 - RNA, 21 nt, Human
cagcuucccggauccgagccc

SEQ ID NO: 1161995 - RNA, 21 nt, Human
cagggcgucucauuccaccgg

SEQ ID NO: 1161996 - RNA, 23 nt, Human
ccaccccuuuccucucgaaaguc

SEQ ID NO: 1161997 - RNA, 18 nt, Human
ccaccgacgcacucccag

SEQ ID NO: 1161998 - RNA, 21 nt, Human
ccagccucacacaguagcgaa

SEQ ID NO: 1161999 - RNA, 18 nt, Human
cccaccgacgcacuccca

SEQ ID NO: 1162000 - RNA, 19 nt, Human
cccaggugcuccaagcucu

SEQ ID NO: 1162001 - RNA, 18 nt, Human
ccccggacagcuacugcc

SEQ ID NO: 1162002 - RNA, 23 nt, Human
cccgccaccccuuuccucucgaa

SEQ ID NO: 1162003 - RNA, 19 nt, Human
cccgccuuccucccaccug

SEQ ID NO: 1162004 - RNA, 18 nt, Human
cccgcggggcagugcguc

SEQ ID NO: 1162005 - RNA, 24 nt, Human
cccugagccucuccaccuucgaga

SEQ ID NO: 1162006 - RNA, 18 nt, Human
ccgcugccgcggcagcgc

SEQ ID NO: 1162007 - RNA, 21 nt, Human
ccggaggggcucggggcgcgg

SEQ ID NO: 1162008 - RNA, 23 nt, Human
ccggaggggcucggggcgcggcg

SEQ ID NO: 1162009 - RNA, 22 nt, Human
ccggcagccugggcgccgcgac

SEQ ID NO: 1162010 - RNA, 24 nt, Human
ccgucccggacccaccgacgcacu

SEQ ID NO: 1162011 - RNA, 18 nt, Human
ccuuaagaccccaccagg

SEQ ID NO: 1162012 - RNA, 18 nt, Human
ccuuccuucccuaccucc

SEQ ID NO: 1162013 - RNA, 19 nt, Human
ccuucgagauuggccgcag

SEQ ID NO: 1162014 - RNA, 18 nt, Human
cgagagccccugcccagc

SEQ ID NO: 1162015 - RNA, 24 nt, Human
cgagcccagacggcggcggcuccg

SEQ ID NO: 1162016 - RNA, 21 nt, Human
cgcaggccagccucacacagu

SEQ ID NO: 1162017 - RNA, 18 nt, Human
cggaggccccgccguccc

SEQ ID NO: 1162018 - RNA, 26 nt, Human
cggcagcgccgcagcuucccgaaucg

SEQ ID NO: 1162019 - RNA, 18 nt, Human
cgggauggccuggggagc

SEQ ID NO: 1162020 - RNA, 23 nt, Human
cgggcgcaugcuaaucgcaugca

SEQ ID NO: 1162021 - RNA, 19 nt, Human
cguccagaaacucuaaaac

SEQ ID NO: 1162022 - RNA, 21 nt, Human
cguucaaccuuaagaccccac

SEQ ID NO: 1162023 - RNA, 18 nt, Human
cucccagggcuuggcgcu

SEQ ID NO: 1162024 - RNA, 19 nt, Human
cuucacgcccagacugcuc

SEQ ID NO: 1162025 - RNA, 23 nt, Human
cuucgcccgccuuccucccaccu

SEQ ID NO: 1162026 - RNA, 18 nt, Human
gaaauaaauaagcuagga

SEQ ID NO: 1162027 - RNA, 21 nt, Human
gaacacagauccggagguggg

SEQ ID NO: 1162028 - RNA, 20 nt, Human
gaaucuccuucacgcgacuu

SEQ ID NO: 1162029 - RNA, 22 nt, Human
gacggcggcggcuccggcagcc

SEQ ID NO: 1162030 - RNA, 22 nt, Human
gacuuuugcaaucuuccccguu

SEQ ID NO: 1162031 - RNA, 24 nt, Human
gaggaaugcgcaugcagaugaggc

SEQ ID NO: 1162032 - RNA, 19 nt, Human
gagggccaggagcccuggc

SEQ ID NO: 1162033 - RNA, 24 nt, Human
gaucaccuccugaugaauggacua

SEQ ID NO: 1162034 - RNA, 18 nt, Human
gcagcggcgggguuaagc

SEQ ID NO: 1162035 - RNA, 19 nt, Human
gcagugcguccgagcuggu

SEQ ID NO: 1162036 - RNA, 19 nt, Human
gccgcagaugccccgacgg

SEQ ID NO: 1162037 - RNA, 21 nt, Human
gccgcagcuucccggauccga

SEQ ID NO: 1162038 - RNA, 18 nt, Human
gccgcgacccucggcggc

SEQ ID NO: 1162039 - RNA, 18 nt, Human
gcggaacacagauccgga

SEQ ID NO: 1162040 - RNA, 24 nt, Human
gcucggggcgcggcguggggagcc

SEQ ID NO: 1162041 - RNA, 23 nt, Human
ggacuggggcggaacacagaucc

SEQ ID NO: 1162042 - RNA, 22 nt, Human
ggccgcagaugccccgacggga

SEQ ID NO: 1162043 - RNA, 24 nt, Human
gggcagugcguccgagcuggugcg

SEQ ID NO: 1162044 - RNA, 21 nt, Human
gggucaaggggagggagcugg

SEQ ID NO: 1162045 - RNA, 24 nt, Human
guacaccgcaauucaaguguuggc

SEQ ID NO: 1162046 - RNA, 25 nt, Human
guagcgaaucuccuucacgcgacuu

SEQ ID NO: 1162047 - RNA, 23 nt, Human
uaagcuaggaagcaagguuuaau

SEQ ID NO: 1162048 - RNA, 20 nt, Human
ucaaacguucaaccuuaaga

SEQ ID NO: 1162049 - RNA, 19 nt, Human
ucaaccuuaagaccccacc

SEQ ID NO: 1162050 - RNA, 23 nt, Human
ucaggaaugcggcgcgaggaaug

SEQ ID NO: 1162051 - RNA, 18 nt, Human
ucccaccaccccggaccg

SEQ ID NO: 1162052 - RNA, 21 nt, Human
uccggaggagagcuccccgcc

SEQ ID NO: 1162053 - RNA, 20 nt, Human
uccuucgcccgccuuccucc

SEQ ID NO: 1162054 - RNA, 22 nt, Human
ucucauuccaccgggaacuaga

SEQ ID NO: 1162055 - RNA, 19 nt, Human
ugacuugugugaucaccuc

SEQ ID NO: 1162056 - RNA, 21 nt, Human
ugagguuuuuucuccggagga

SEQ ID NO: 1162057 - RNA, 20 nt, Human
ugccgcggcagcgccgcagc

SEQ ID NO: 1162058 - RNA, 18 nt, Human
ugccggaggggcucgggg

SEQ ID NO: 1162059 - RNA, 20 nt, Human
ugcggcgacgccggcagcgg

SEQ ID NO: 1162060 - RNA, 20 nt, Human
uggccuggggagccgaaagc

SEQ ID NO: 1162061 - RNA, 25 nt, Human
uggggucaaggggagggagcuggcc

SEQ ID NO: 1162062 - RNA, 22 nt, Human
uggggugccggaggggcucggg

SEQ ID NO: 1162063 - RNA, 23 nt, Human
ugggugccuuccuucccuaccuc

SEQ ID NO: 1162064 - RNA, 23 nt, Human
uuaguauaacaaauguuuucaag

SEQ ID NO: 1162065 - RNA, 18 nt, Human
uuccucgguguugcuauu

SEQ ID NO: 1162066 - RNA, 21 nt, Human
uugggccaauuuagggaaguc

SEQ ID NO: 1162067 - RNA, 21 nt, Human
uuugugguuucccuagaagac

SEQ ID NO: 1162068 - RNA, 26 nt, Human
acgacacagggcaggcagaaagguaa

SEQ ID NO: 1162069 - RNA, 18 nt, Human
gacuagacaucccagucu

SEQ ID NO: 1162070 - RNA, 22 nt, Human
uacgacacagggcaggcagaaa

SEQ ID NO: 1162071 - RNA, 23 nt, Human
uguucuccaccaagguggugacg

SEQ ID NO: 1162072 - RNA, 24 nt, Human
uucuccaccaagguggugacggug

SEQ ID NO: 1162073 - RNA, 22 nt, Human
aaaaaacagaaagcaaugaagc

SEQ ID NO: 1162074 - RNA, 22 nt, Human
aaacagaaagcaaugaagccua

SEQ ID NO: 1162075 - RNA, 21 nt, Human
aaagcaaugaagccuaaaccc

SEQ ID NO: 1162076 - RNA, 21 nt, Human
aaagcuuucacagugcaugcc

SEQ ID NO: 1162077 - RNA, 23 nt, Human
aacaccuguccaauaacugcccu

SEQ ID NO: 1162078 - RNA, 23 nt, Human
aacagaaagcaaugaagccuaaa

SEQ ID NO: 1162079 - RNA, 21 nt, Human
aagcuuucuuguuagcagucc

SEQ ID NO: 1162080 - RNA, 20 nt, Human
aagggcuccauuucaucacc

SEQ ID NO: 1162081 - RNA, 21 nt, Human
acacgauucaggccacagaug

SEQ ID NO: 1162082 - RNA, 18 nt, Human
acuuagucacacaacauc

SEQ ID NO: 1162083 - RNA, 19 nt, Human
agaggggagagggaauggc

SEQ ID NO: 1162084 - RNA, 18 nt, Human
auuuagaaucuuaaacua

SEQ ID NO: 1162085 - RNA, 26 nt, Human
caacaucaaggacuggugaguuccag

SEQ ID NO: 1162086 - RNA, 22 nt, Human
cacaacaucaaggacuggugag

SEQ ID NO: 1162087 - RNA, 24 nt, Human
cacaaugcaguagaaccaaacaac

SEQ ID NO: 1162088 - RNA, 21 nt, Human
cagcugggccuuucccuccuu

SEQ ID NO: 1162089 - RNA, 19 nt, Human
caguagaaccaaacaacac

SEQ ID NO: 1162090 - RNA, 24 nt, Human
cccaagcagagaaaagguuugaga

SEQ ID NO: 1162091 - RNA, 20 nt, Human
cccuuuggcaagucgaccgg

SEQ ID NO: 1162092 - RNA, 19 nt, Human
cuccacaaugcaguagaac

SEQ ID NO: 1162093 - RNA, 22 nt, Human
cuucagcugggccuuucccucc

SEQ ID NO: 1162094 - RNA, 20 nt, Human
gagaaaccaaacacgauuca

SEQ ID NO: 1162095 - RNA, 24 nt, Human
gcacuggaguagaacgagaaacca

SEQ ID NO: 1162096 - RNA, 22 nt, Human
gccaagugugaagugacacccc

SEQ ID NO: 1162097 - RNA, 21 nt, Human
ggacagguuuggucaucugca

SEQ ID NO: 1162098 - RNA, 19 nt, Human
ggucaguucucuuccccca

SEQ ID NO: 1162099 - RNA, 18 nt, Human
gguuggauagagagggga

SEQ ID NO: 1162100 - RNA, 26 nt, Human
uaaaaaacagaaagcaaugaagccua

SEQ ID NO: 1162101 - RNA, 21 nt, Human
uaaaauaauuucccaagcaga

SEQ ID NO: 1162102 - RNA, 25 nt, Human
uacaauagaauguuuaaauaacacc

SEQ ID NO: 1162103 - RNA, 21 nt, Human
uagaaccaaacaacacauuca

SEQ ID NO: 1162104 - RNA, 25 nt, Human
uagggcauuuuuaguagaacuucag

SEQ ID NO: 1162105 - RNA, 20 nt, Human
ucccaagcagagaaaagguu

SEQ ID NO: 1162106 - RNA, 23 nt, Human
ucccaagcagagaaaagguuuga

SEQ ID NO: 1162107 - RNA, 21 nt, Human
ugaagugacacccccagcaga

SEQ ID NO: 1162108 - RNA, 23 nt, Human
ugaggaaaguggcagcaggacag

SEQ ID NO: 1162109 - RNA, 23 nt, Human
ugcacaggaugcaggcaaaggag

SEQ ID NO: 1162110 - RNA, 18 nt, Human
ugcaugccaagugugaag

SEQ ID NO: 1162111 - RNA, 23 nt, Human
ugccaagugugaagugacacccc

SEQ ID NO: 1162112 - RNA, 25 nt, Human
ugccuauucuccuagggcauuuuua

SEQ ID NO: 1162113 - RNA, 24 nt, Human
ugguuaaaaaugucauguugugca

SEQ ID NO: 1162114 - RNA, 20 nt, Human
uuagcaguccuuucaugcau

SEQ ID NO: 1162115 - RNA, 22 nt, Human
uuggggaaaaguaaaaaacaga

SEQ ID NO: 1162116 - RNA, 22 nt, Human
uuuagaaucuuaaacuaaaucc

SEQ ID NO: 1162117 - RNA, 19 nt, Human
uuuuagauuggauugguua

SEQ ID NO: 1162118 - RNA, 24 nt, Human
aaaaaaaaagccuuccuuacaaaa

SEQ ID NO: 1162119 - RNA, 23 nt, Human
aaaaaagccuuccuuacaaaacc

SEQ ID NO: 1162120 - RNA, 20 nt, Human
aaaacauaacuccaaauggu

SEQ ID NO: 1162121 - RNA, 18 nt, Human
aaaaccacaacucucuca

SEQ ID NO: 1162122 - RNA, 19 nt, Human
aaaaccugccaacccugau

SEQ ID NO: 1162123 - RNA, 18 nt, Human
aaacaggucccaaggaag

SEQ ID NO: 1162124 - RNA, 24 nt, Human
aaacauaacuccaaauggucagca

SEQ ID NO: 1162125 - RNA, 19 nt, Human
aaagaacaggacagaaucu

SEQ ID NO: 1162126 - RNA, 23 nt, Human
aaagauagaauagacgaaaggga

SEQ ID NO: 1162127 - RNA, 18 nt, Human
aaaguguggaguggggag

SEQ ID NO: 1162128 - RNA, 24 nt, Human
aacaaaaagaacaggacagaaucu

SEQ ID NO: 1162129 - RNA, 22 nt, Human
aagaaacaaaaagaacaggaca

SEQ ID NO: 1162130 - RNA, 21 nt, Human
aagacaucuuccacucaaccc

SEQ ID NO: 1162131 - RNA, 23 nt, Human
aagacaucuuccacucaacccaa

SEQ ID NO: 1162132 - RNA, 19 nt, Human
aagccucagcuucucccug

SEQ ID NO: 1162133 - RNA, 18 nt, Human
aagcuccacaaaauggua

SEQ ID NO: 1162134 - RNA, 19 nt, Human
aauuaugugcauuugcauu

SEQ ID NO: 1162135 - RNA, 19 nt, Human
aauuuguugggugaaaacu

SEQ ID NO: 1162136 - RNA, 18 nt, Human
accuggguuugaaccuuc

SEQ ID NO: 1162137 - RNA, 19 nt, Human
acucaggcagcaucuggau

SEQ ID NO: 1162138 - RNA, 20 nt, Human
acuuacuauuaucucccaaa

SEQ ID NO: 1162139 - RNA, 21 nt, Human
agacauaaauagaacaguaua

SEQ ID NO: 1162140 - RNA, 18 nt, Human
agagagagugucuugaaa

SEQ ID NO: 1162141 - RNA, 22 nt, Human
agauaaccauuucuaaggugaa

SEQ ID NO: 1162142 - RNA, 18 nt, Human
agcccauccuucucccca

SEQ ID NO: 1162143 - RNA, 21 nt, Human
agcuccauagccucuugccuu

SEQ ID NO: 1162144 - RNA, 21 nt, Human
aggaagaaucuaaaaccucau

SEQ ID NO: 1162145 - RNA, 19 nt, Human
agucugcauugcucccucu

SEQ ID NO: 1162146 - RNA, 18 nt, Human
aguguguauuauggguag

SEQ ID NO: 1162147 - RNA, 26 nt, Human
aguuuuucuuuuauuuuuccuucccu

SEQ ID NO: 1162148 - RNA, 20 nt, Human
augaagaaacaaaaagaaca

SEQ ID NO: 1162149 - RNA, 21 nt, Human
auuucacucuaaaucuuacua

SEQ ID NO: 1162150 - RNA, 22 nt, Human
caaaaccugccaacccugauca

SEQ ID NO: 1162151 - RNA, 21 nt, Human
caaagauaaccauuucuaagg

SEQ ID NO: 1162152 - RNA, 20 nt, Human
caaagcaauacuacuaagac

SEQ ID NO: 1162153 - RNA, 21 nt, Human
caaauuugugacccaauccua

SEQ ID NO: 1162154 - RNA, 22 nt, Human
cacaacaguggaauaggcgaaa

SEQ ID NO: 1162155 - RNA, 19 nt, Human
cacaucacagcaagucaau

SEQ ID NO: 1162156 - RNA, 26 nt, Human
caccaaggaaugcaacugaacaugac

SEQ ID NO: 1162157 - RNA, 27 nt, Human
caccaaggaaugcaacugaacaugaca

SEQ ID NO: 1162158 - RNA, 20 nt, Human
caggacagaaucuuauucug

SEQ ID NO: 1162159 - RNA, 24 nt, Human
caguuaggaaauuucaaaucaaac

SEQ ID NO: 1162160 - RNA, 20 nt, Human
cauaaaaaccagagccuugu

SEQ ID NO: 1162161 - RNA, 25 nt, Human
cauaucugcucucuacgacacaaaa

SEQ ID NO: 1162162 - RNA, 19 nt, Human
caugaagaaacaaaaagaa

SEQ ID NO: 1162163 - RNA, 25 nt, Human
ccaaggaaugcaacugaacaugaca

SEQ ID NO: 1162164 - RNA, 23 nt, Human
ccagcucagauaaaaaaaaaaaa

SEQ ID NO: 1162165 - RNA, 26 nt, Human
ccagcucagauaaaaaaaaaaaaaag

SEQ ID NO: 1162166 - RNA, 21 nt, Human
ccauaaauucauguauuuaaa

SEQ ID NO: 1162167 - RNA, 24 nt, Human
cccaaggaagcauuuucuaaaaca

SEQ ID NO: 1162168 - RNA, 18 nt, Human
cccugccuccuccacaaa

SEQ ID NO: 1162169 - RNA, 28 nt, Human
ccugccuccuccacaaacuuuuuuuuuc

SEQ ID NO: 1162170 - RNA, 21 nt, Human
ccugugugaaauggguuuaau

SEQ ID NO: 1162171 - RNA, 22 nt, Human
cucaacccaaauguuauagaau

SEQ ID NO: 1162172 - RNA, 22 nt, Human
cuccauaacugaaagucuugcu

SEQ ID NO: 1162173 - RNA, 22 nt, Human
cugaaagucuugcucaccacug

SEQ ID NO: 1162174 - RNA, 19 nt, Human
cugccuccuccacaaacuu

SEQ ID NO: 1162175 - RNA, 19 nt, Human
cugcucugguucuaaagcc

SEQ ID NO: 1162176 - RNA, 24 nt, Human
cuuacaaaaccugccaacccugau

SEQ ID NO: 1162177 - RNA, 22 nt, Human
gaaggaaacaggucccaaggaa

SEQ ID NO: 1162178 - RNA, 22 nt, Human
gacugaguaauucaccuguggc

SEQ ID NO: 1162179 - RNA, 20 nt, Human
gagcccauccuucuccccac

SEQ ID NO: 1162180 - RNA, 21 nt, Human
gccaaauuaucaauaaaaagu

SEQ ID NO: 1162181 - RNA, 21 nt, Human
ggaaagauugauucaacccuc

SEQ ID NO: 1162182 - RNA, 21 nt, Human
ggaacacuacuuaacaaagca

SEQ ID NO: 1162183 - RNA, 24 nt, Human
ggaguggggaggucuuccuaggga

SEQ ID NO: 1162184 - RNA, 20 nt, Human
ggugacagugccaggaaaga

SEQ ID NO: 1162185 - RNA, 23 nt, Human
gguggguugaauaucagaaaacc

SEQ ID NO: 1162186 - RNA, 20 nt, Human
guaaagcacuacucagagag

SEQ ID NO: 1162187 - RNA, 18 nt, Human
guagauaauuuguugggu

SEQ ID NO: 1162188 - RNA, 18 nt, Human
gucuagacauaaauagaa

SEQ ID NO: 1162189 - RNA, 23 nt, Human
gugaagcugccuuagaaaaccac

SEQ ID NO: 1162190 - RNA, 24 nt, Human
uaaaacucauaaaaaccagagccu

SEQ ID NO: 1162191 - RNA, 24 nt, Human
uaaaauucuaaaagugaaauguca

SEQ ID NO: 1162192 - RNA, 22 nt, Human
uaagacaucuuccacucaaccc

SEQ ID NO: 1162193 - RNA, 18 nt, Human
uaaggccucugcccacac

SEQ ID NO: 1162194 - RNA, 20 nt, Human
uacauauaaaguugacacac

SEQ ID NO: 1162195 - RNA, 18 nt, Human
uacaugguaaaugcugga

SEQ ID NO: 1162196 - RNA, 24 nt, Human
uacccauaugacuuucaggaagaa

SEQ ID NO: 1162197 - RNA, 23 nt, Human
uacuaagacaucuuccacucaac

SEQ ID NO: 1162198 - RNA, 20 nt, Human
uagaaaauagaugaaaggaa

SEQ ID NO: 1162199 - RNA, 24 nt, Human
uagaauagacgaaagggaaacagu

SEQ ID NO: 1162200 - RNA, 21 nt, Human
uaggcgaaaccugguuuccug

SEQ ID NO: 1162201 - RNA, 20 nt, Human
uaguagauaauuuguugggg

SEQ ID NO: 1162202 - RNA, 19 nt, Human
uauuauggguagcacagag

SEQ ID NO: 1162203 - RNA, 20 nt, Human
ucacaggccaguaagacugu

SEQ ID NO: 1162204 - RNA, 19 nt, Human
ucacucuuaccucaguguu

SEQ ID NO: 1162205 - RNA, 22 nt, Human
ucacuguauguuacaccgggca

SEQ ID NO: 1162206 - RNA, 20 nt, Human
ucagauaaaaaaaaaaaagc

SEQ ID NO: 1162207 - RNA, 25 nt, Human
ucaugccaaacacaacaguggaaua

SEQ ID NO: 1162208 - RNA, 20 nt, Human
uccaacuucaaauuugugac

SEQ ID NO: 1162209 - RNA, 20 nt, Human
uccacaaaaugguaaagcac

SEQ ID NO: 1162210 - RNA, 19 nt, Human
uccagcucagauaaaaaaa

SEQ ID NO: 1162211 - RNA, 22 nt, Human
uccauagccucuugccuuuaau

SEQ ID NO: 1162212 - RNA, 25 nt, Human
uccauagccucuugccuuugguccc

SEQ ID NO: 1162213 - RNA, 18 nt, Human
ucccauagguacacacug

SEQ ID NO: 1162214 - RNA, 20 nt, Human
ucccauagguacacacugcc

SEQ ID NO: 1162215 - RNA, 20 nt, Human
uccugggcucauguuucaau

SEQ ID NO: 1162216 - RNA, 18 nt, Human
ucuacuauuaccuuucaa

SEQ ID NO: 1162217 - RNA, 18 nt, Human
ucugugucugcucugguu

SEQ ID NO: 1162218 - RNA, 18 nt, Human
ugaaugaauaaaugaaca

SEQ ID NO: 1162219 - RNA, 20 nt, Human
ugaaugccacuuaucuauag

SEQ ID NO: 1162220 - RNA, 22 nt, Human
ugacauaaaacucauaaaaacc

SEQ ID NO: 1162221 - RNA, 21 nt, Human
ugagagcacucucuccauaac

SEQ ID NO: 1162222 - RNA, 19 nt, Human
ugcccuugacuauccagcu

SEQ ID NO: 1162223 - RNA, 23 nt, Human
ugcuaugggguuacugcucugaa

SEQ ID NO: 1162224 - RNA, 26 nt, Human
ugcucccucuacccauaugacuuuca

SEQ ID NO: 1162225 - RNA, 22 nt, Human
uggaacacuacuuaacaaagca

SEQ ID NO: 1162226 - RNA, 21 nt, Human
uggaauaggcgaaaccugguu

SEQ ID NO: 1162227 - RNA, 20 nt, Human
uggaguggggaggucuuccu

SEQ ID NO: 1162228 - RNA, 19 nt, Human
uggccuuuaguagauaauu

SEQ ID NO: 1162229 - RNA, 20 nt, Human
ugggaggugcaagaauugau

SEQ ID NO: 1162230 - RNA, 24 nt, Human
ugggaggugcaagaauugaucuua

SEQ ID NO: 1162231 - RNA, 19 nt, Human
uguacuucaccauacuacu

SEQ ID NO: 1162232 - RNA, 24 nt, Human
uuaaaaggaaauuagaauggccug

SEQ ID NO: 1162233 - RNA, 19 nt, Human
uuaaagauucucaugcaca

SEQ ID NO: 1162234 - RNA, 25 nt, Human
uucaccuguggcugacauaauugag

SEQ ID NO: 1162235 - RNA, 19 nt, Human
uucccugccuccuccacaa

SEQ ID NO: 1162236 - RNA, 19 nt, Human
uugacuauccagcucagau

SEQ ID NO: 1162237 - RNA, 24 nt, Human
uuucaggaagaaucuaaaaccucc

SEQ ID NO: 1162238 - RNA, 18 nt, Human
aaaacccagggagaccag

SEQ ID NO: 1162239 - RNA, 24 nt, Human
aaaccaagcccucgcaggagccag

SEQ ID NO: 1162240 - RNA, 18 nt, Human
aaauuguccaauacccuc

SEQ ID NO: 1162241 - RNA, 19 nt, Human
acaagcacugguaaacucc

SEQ ID NO: 1162242 - RNA, 21 nt, Human
acagagcaacgggaggcagag

SEQ ID NO: 1162243 - RNA, 18 nt, Human
agacaggugaccaggucu

SEQ ID NO: 1162244 - RNA, 18 nt, Human
agagcugaagcccuaaac

SEQ ID NO: 1162245 - RNA, 18 nt, Human
aggucuggguuagagauc

SEQ ID NO: 1162246 - RNA, 21 nt, Human
auuugcuguguaaagacacug

SEQ ID NO: 1162247 - RNA, 19 nt, Human
cacaaaacccagggagacc

SEQ ID NO: 1162248 - RNA, 19 nt, Human
caccgaggccucccggagc

SEQ ID NO: 1162249 - RNA, 23 nt, Human
cagagagcugaagcccuaaacca

SEQ ID NO: 1162250 - RNA, 20 nt, Human
cagagcaacgggaggcagag

SEQ ID NO: 1162251 - RNA, 18 nt, Human
caggucacagagcaacgg

SEQ ID NO: 1162252 - RNA, 24 nt, Human
ccaagcccucgcaggagccagagg

SEQ ID NO: 1162253 - RNA, 18 nt, Human
cgagaacgcagagagcug

SEQ ID NO: 1162254 - RNA, 22 nt, Human
cgaggccucccggagccgagaa

SEQ ID NO: 1162255 - RNA, 20 nt, Human
cucuccagcaugaauuccug

SEQ ID NO: 1162256 - RNA, 18 nt, Human
cugaagcccuaaaccaag

SEQ ID NO: 1162257 - RNA, 21 nt, Human
cugcugggcaggguccagaca

SEQ ID NO: 1162258 - RNA, 21 nt, Human
cuguggcugaaucaccgaggc

SEQ ID NO: 1162259 - RNA, 20 nt, Human
gaauucuauggccacauccc

SEQ ID NO: 1162260 - RNA, 20 nt, Human
gagaacauauagcugggggu

SEQ ID NO: 1162261 - RNA, 18 nt, Human
gcugaaucaccgaggccu

SEQ ID NO: 1162262 - RNA, 19 nt, Human
ggagaauucuauggccaca

SEQ ID NO: 1162263 - RNA, 24 nt, Human
gggcaggguccagacauuuccacu

SEQ ID NO: 1162264 - RNA, 21 nt, Human
ggguuucucuccaguaugucu

SEQ ID NO: 1162265 - RNA, 19 nt, Human
guaaauucucauguccaca

SEQ ID NO: 1162266 - RNA, 22 nt, Human
uaaagacacuggaauuagagau

SEQ ID NO: 1162267 - RNA, 19 nt, Human
uaaaggguuucucuccagu

SEQ ID NO: 1162268 - RNA, 20 nt, Human
uacacucauucacacguuua

SEQ ID NO: 1162269 - RNA, 18 nt, Human
ucacagagcaacgggagg

SEQ ID NO: 1162270 - RNA, 22 nt, Human
ucaguauaaguuugucggaacc

SEQ ID NO: 1162271 - RNA, 23 nt, Human
ucauguccacauuucucguaucu

SEQ ID NO: 1162272 - RNA, 24 nt, Human
uccaauuuauuugcuguguaaaga

SEQ ID NO: 1162273 - RNA, 26 nt, Human
uccccugcacuggugaaaggucuugg

SEQ ID NO: 1162274 - RNA, 20 nt, Human
ucguaucuuuucaguauaag

SEQ ID NO: 1162275 - RNA, 19 nt, Human
ucuccagcaugaauuccug

SEQ ID NO: 1162276 - RNA, 20 nt, Human
ucugcaccuuacacucauuc

SEQ ID NO: 1162277 - RNA, 24 nt, Human
ugaaaggagaacauauagcugggg

SEQ ID NO: 1162278 - RNA, 21 nt, Human
ugaagcccuaaaccaagcccu

SEQ ID NO: 1162279 - RNA, 20 nt, Human
ugacauguaaaacgaucugc

SEQ ID NO: 1162280 - RNA, 21 nt, Human
ugccacauuuuucacauugua

SEQ ID NO: 1162281 - RNA, 23 nt, Human
uguaggguuucucuccagcauga

SEQ ID NO: 1162282 - RNA, 23 nt, Human
uguaggguuucucuccaguauga

SEQ ID NO: 1162283 - RNA, 20 nt, Human
uguguaggguuucucuccag

SEQ ID NO: 1162284 - RNA, 19 nt, Human
uucuccaacaucacaucuc

SEQ ID NO: 1162285 - RNA, 19 nt, Human
uugaguuaggugugacaug

SEQ ID NO: 1162286 - RNA, 19 nt, Human
uugcagggcucuuuuauuu

SEQ ID NO: 1162287 - RNA, 20 nt, Human
uuuaacacauguauuacauu

SEQ ID NO: 1162288 - RNA, 20 nt, Human
aaggagccccugccaccugc

SEQ ID NO: 1162289 - RNA, 24 nt, Human
acagaagcgccacagccggggagc

SEQ ID NO: 1162290 - RNA, 22 nt, Human
aggagcuggaggccaaggagcc

SEQ ID NO: 1162291 - RNA, 20 nt, Human
aggguucccuaacuuuuccc

SEQ ID NO: 1162292 - RNA, 22 nt, Human
aggguucccuaacuuuucccuu

SEQ ID NO: 1162293 - RNA, 21 nt, Human
agucaucuagagagcaaauac

SEQ ID NO: 1162294 - RNA, 22 nt, Human
auccacagaagcgccacagccg

SEQ ID NO: 1162295 - RNA, 23 nt, Human
augauccaucuucugagcuucuc

SEQ ID NO: 1162296 - RNA, 23 nt, Human
caacacaccuauuuacaaaggca

SEQ ID NO: 1162297 - RNA, 24 nt, Human
cacagagucugcucucugcucuga

SEQ ID NO: 1162298 - RNA, 19 nt, Human
cacuuccaaacaaauucaa

SEQ ID NO: 1162299 - RNA, 20 nt, Human
cagagcccaguuuucgaggc

SEQ ID NO: 1162300 - RNA, 27 nt, Human
cagggugcacacaccccugcaggucuc

SEQ ID NO: 1162301 - RNA, 19 nt, Human
cauguuugcagcccuaggc

SEQ ID NO: 1162302 - RNA, 19 nt, Human
ccacaguccccuccaaguc

SEQ ID NO: 1162303 - RNA, 21 nt, Human
cccacauccacagaagcgcca

SEQ ID NO: 1162304 - RNA, 24 nt, Human
ccccugcaggucucagggcuccug

SEQ ID NO: 1162305 - RNA, 18 nt, Human
cuccucagucccacaguc

SEQ ID NO: 1162306 - RNA, 18 nt, Human
cucugcucugagcuccuc

SEQ ID NO: 1162307 - RNA, 18 nt, Human
cugcucccugccuggccu

SEQ ID NO: 1162308 - RNA, 19 nt, Human
cuggcacggaagcuuuucc

SEQ ID NO: 1162309 - RNA, 19 nt, Human
cuucggagucaccgcacag

SEQ ID NO: 1162310 - RNA, 19 nt, Human
gaccauauuuacucuaucu

SEQ ID NO: 1162311 - RNA, 22 nt, Human
gagcaaauacacaguaauuccc

SEQ ID NO: 1162312 - RNA, 21 nt, Human
gaggcugaggaaagaccccga

SEQ ID NO: 1162313 - RNA, 20 nt, Human
gcagagaucccugaccacac

SEQ ID NO: 1162314 - RNA, 18 nt, Human
gcagaucccugcaucugc

SEQ ID NO: 1162315 - RNA, 19 nt, Human
ggcaacgaaucucucuggc

SEQ ID NO: 1162316 - RNA, 20 nt, Human
gggcacagcggaagggcugc

SEQ ID NO: 1162317 - RNA, 22 nt, Human
ggucaccuuuuaauuggaccau

SEQ ID NO: 1162318 - RNA, 23 nt, Human
ggugcagggcuaugccucagggu

SEQ ID NO: 1162319 - RNA, 18 nt, Human
gucacggccaugauccau

SEQ ID NO: 1162320 - RNA, 21 nt, Human
uacaaugucccucaccagaau

SEQ ID NO: 1162321 - RNA, 22 nt, Human
ucagcagagaucccugaccaca

SEQ ID NO: 1162322 - RNA, 19 nt, Human
ucaucaaggagauucuccu

SEQ ID NO: 1162323 - RNA, 19 nt, Human
ucccacaguccccuccaag

SEQ ID NO: 1162324 - RNA, 21 nt, Human
uccccuccaagucacaggagc

SEQ ID NO: 1162325 - RNA, 23 nt, Human
ucccucaccagaauucaaugagg

SEQ ID NO: 1162326 - RNA, 23 nt, Human
ucccugcaucugcucccugccug

SEQ ID NO: 1162327 - RNA, 25 nt, Human
uccuggguugcuucuggaagggccc

SEQ ID NO: 1162328 - RNA, 19 nt, Human
ucugcucccugccuggccu

SEQ ID NO: 1162329 - RNA, 20 nt, Human
ugaccacacccucauguguu

SEQ ID NO: 1162330 - RNA, 23 nt, Human
ugaccacacccucauguguuuuc

SEQ ID NO: 1162331 - RNA, 19 nt, Human
ugagaauuuuauucacuuc

SEQ ID NO: 1162332 - RNA, 23 nt, Human
ugagcuccucagucccacagucc

SEQ ID NO: 1162333 - RNA, 21 nt, Human
ugaggaaagaccccgagagcg

SEQ ID NO: 1162334 - RNA, 23 nt, Human
ugaggcagaucccugcaucugcu

SEQ ID NO: 1162335 - RNA, 22 nt, Human
ugcaccucucaggguucccuaa

SEQ ID NO: 1162336 - RNA, 24 nt, Human
uucuuccccaagguaagucuguca

SEQ ID NO: 1162337 - RNA, 23 nt, Human
uuuacaaaggcauuccagagccc

SEQ ID NO: 1162338 - RNA, 20 nt, Human
uuuuccuggcgcguuuccgg

SEQ ID NO: 1162339 - RNA, 23 nt, Human
uuuuucagggguugauuuuuggg

SEQ ID NO: 1162340 - RNA, 28 nt, Human
aaggcauuuuccacacuguuugcugaca

SEQ ID NO: 1162341 - RNA, 19 nt, Human
aguaugaauuuguuuaugu

SEQ ID NO: 1162342 - RNA, 18 nt, Human
gcauuuuccacacuguuu

SEQ ID NO: 1162343 - RNA, 22 nt, Human
ggggacaaaagauuaugaaggc

SEQ ID NO: 1162344 - RNA, 20 nt, Human
uaguaugaauuuguuuaugu

SEQ ID NO: 1162345 - RNA, 19 nt, Human
ugaguuauuguggaacugu

SEQ ID NO: 1162346 - RNA, 22 nt, Human
uugcugacauaggguuucuuuc

SEQ ID NO: 1162347 - RNA, 20 nt, Human
aaaaaauagcaacaauuugg

SEQ ID NO: 1162348 - RNA, 23 nt, Human
aaacaauguuuuagaaagauuuu

SEQ ID NO: 1162349 - RNA, 24 nt, Human
aauagcaacaauuuggggauaaaa

SEQ ID NO: 1162350 - RNA, 24 nt, Human
agccuccacaauaguauucuuuag

SEQ ID NO: 1162351 - RNA, 19 nt, Human
aggaggaagcugaauagaa

SEQ ID NO: 1162352 - RNA, 23 nt, Human
aucgaaaucccaccgggcugcaa

SEQ ID NO: 1162353 - RNA, 18 nt, Human
cacccaucugacuuccag

SEQ ID NO: 1162354 - RNA, 18 nt, Human
cagcaaaucgaaauccca

SEQ ID NO: 1162355 - RNA, 24 nt, Human
ccaagaaauuacauuucacauccc

SEQ ID NO: 1162356 - RNA, 21 nt, Human
ccuccuuguccguucagcaaa

SEQ ID NO: 1162357 - RNA, 18 nt, Human
cuuguaaagagagucauc

SEQ ID NO: 1162358 - RNA, 22 nt, Human
gaaacauugcacuuaaagcuca

SEQ ID NO: 1162359 - RNA, 21 nt, Human
gccucccauaauccgaaaguc

SEQ ID NO: 1162360 - RNA, 24 nt, Human
gcuuguaaagagagucaucaguug

SEQ ID NO: 1162361 - RNA, 18 nt, Human
uaaguaaaauccaaaacu

SEQ ID NO: 1162362 - RNA, 20 nt, Human
uacaagccugaaauauuaag

SEQ ID NO: 1162363 - RNA, 25 nt, Human
uacaagccugaaauauuaaguacaa

SEQ ID NO: 1162364 - RNA, 23 nt, Human
ucacagggguaaccacaguacgu

SEQ ID NO: 1162365 - RNA, 22 nt, Human
ucccaccgggcugcaacagcau

SEQ ID NO: 1162366 - RNA, 18 nt, Human
ucccucuggaucccgccu

SEQ ID NO: 1162367 - RNA, 19 nt, Human
ugaaacauugcacuuaaag

SEQ ID NO: 1162368 - RNA, 18 nt, Human
ugaauagaagccuccaca

SEQ ID NO: 1162369 - RNA, 19 nt, Human
ugaauagaagccuccacaa

SEQ ID NO: 1162370 - RNA, 19 nt, Human
ugacuuccagccuccuugu

SEQ ID NO: 1162371 - RNA, 23 nt, Human
ugaguugaagcuuguaaagagag

SEQ ID NO: 1162372 - RNA, 20 nt, Human
ugcuuuggugagaaaaggga

SEQ ID NO: 1162373 - RNA, 20 nt, Human
uggggauaaaaauaaguaaa

SEQ ID NO: 1162374 - RNA, 25 nt, Human
ugugguggguaucuacauucacacc

SEQ ID NO: 1162375 - RNA, 18 nt, Human
uuaaaugcucauagcuuc

SEQ ID NO: 1162376 - RNA, 21 nt, Human
uuaacagggauguggugggua

SEQ ID NO: 1162377 - RNA, 20 nt, Human
uuguuucagauccuaaaaaa

SEQ ID NO: 1162378 - RNA, 22 nt, Human
uuuugcuuuggugagaaaaggg

SEQ ID NO: 1162379 - RNA, 24 nt, Human
uuuugcuuuggugagaaaagggaa

SEQ ID NO: 1162380 - RNA, 18 nt, Human
aaaaaaaaacaggccggg

SEQ ID NO: 1162381 - RNA, 25 nt, Human
aaaaacaaaccaacaaaaaaaaaac

SEQ ID NO: 1162382 - RNA, 24 nt, Human
aaaaauacaaaaauuagccgugcg

SEQ ID NO: 1162383 - RNA, 24 nt, Human
aaacaaaccaacaaaaaaaaaaca

SEQ ID NO: 1162384 - RNA, 27 nt, Human
aaacaaaccaacaaaaaaaaaacaggc

SEQ ID NO: 1162385 - RNA, 19 nt, Human
aacauggugaaaccccguc

SEQ ID NO: 1162386 - RNA, 20 nt, Human
aacauggugaaaccccgucu

SEQ ID NO: 1162387 - RNA, 21 nt, Human
aacauggugaaaccccgucuc

SEQ ID NO: 1162388 - RNA, 18 nt, Human
aacauggugaaacccguc

SEQ ID NO: 1162389 - RNA, 19 nt, Human
aacauggugaaacccguca

SEQ ID NO: 1162390 - RNA, 19 nt, Human
aagaguaauggauggaugg

SEQ ID NO: 1162391 - RNA, 24 nt, Human
aauugcuugaacccgggaggcaga

SEQ ID NO: 1162392 - RNA, 20 nt, Human
acagagcgagacuccgucuc

SEQ ID NO: 1162393 - RNA, 23 nt, Human
acagagcgagacuccgucucaaa

SEQ ID NO: 1162394 - RNA, 24 nt, Human
acagagcgagacuccgucucaaaa

SEQ ID NO: 1162395 - RNA, 24 nt, Human
accaacauggugaaaccccgucuc

SEQ ID NO: 1162396 - RNA, 24 nt, Human
accccgucucaacuaaaaauacaa

SEQ ID NO: 1162397 - RNA, 22 nt, Human
acgccacugcauuccagccugg

SEQ ID NO: 1162398 - RNA, 24 nt, Human
acgccacugcauuccagccugggc

SEQ ID NO: 1162399 - RNA, 23 nt, Human
acuaaaaaauacaaaaaaaaaaa

SEQ ID NO: 1162400 - RNA, 24 nt, Human
acugcacuccaggcugggcgacag

SEQ ID NO: 1162401 - RNA, 26 nt, Human
acugcacuccaggcugggcgacagag

SEQ ID NO: 1162402 - RNA, 24 nt, Human
acugcauuccagccugggcgacag

SEQ ID NO: 1162403 - RNA, 26 nt, Human
acugcauuccagccugggcgacagag

SEQ ID NO: 1162404 - RNA, 24 nt, Human
agagguugcagugaucugagauca

SEQ ID NO: 1162405 - RNA, 24 nt, Human
agccugaccaacauggugaaaccc

SEQ ID NO: 1162406 - RNA, 24 nt, Human
agccugggcgacagagugagauuu

SEQ ID NO: 1162407 - RNA, 18 nt, Human
aggcagagguugcaguga

SEQ ID NO: 1162408 - RNA, 24 nt, Human
aggcagagguugcagugaucugag

SEQ ID NO: 1162409 - RNA, 24 nt, Human
aggcaggagaauugcuugaacccg

SEQ ID NO: 1162410 - RNA, 21 nt, Human
aggccgaggcgggcggaucac

SEQ ID NO: 1162411 - RNA, 23 nt, Human
aggccgaggcgggcggaucacga

SEQ ID NO: 1162412 - RNA, 24 nt, Human
aggcggagcuugcagugagcggag

SEQ ID NO: 1162413 - RNA, 24 nt, Human
aggcgggcggaucacgaggucagg

SEQ ID NO: 1162414 - RNA, 24 nt, Human
aggcgggcggaucacgaggucagg

SEQ ID NO: 1162415 - RNA, 21 nt, Human
aggcugaggcaggagaauugc

SEQ ID NO: 1162416 - RNA, 24 nt, Human
aggcugaggcaggagaauugcuug

SEQ ID NO: 1162417 - RNA, 24 nt, Human
aggcugggcgacagagcgagacuc

SEQ ID NO: 1162418 - RNA, 21 nt, Human
aucacgaggucaggaguucaa

SEQ ID NO: 1162419 - RNA, 22 nt, Human
aucacgaggucaggaguucaag

SEQ ID NO: 1162420 - RNA, 24 nt, Human
aucacgccacugcauuccagccug

SEQ ID NO: 1162421 - RNA, 20 nt, Human
aucucucagugcuuaucaau

SEQ ID NO: 1162422 - RNA, 20 nt, Human
augccuguaaaucccagcac

SEQ ID NO: 1162423 - RNA, 21 nt, Human
caaaccaacaaaaaaaaaaca

SEQ ID NO: 1162424 - RNA, 23 nt, Human
caacauggugaaaccccgucuca

SEQ ID NO: 1162425 - RNA, 18 nt, Human
caagaacagccugaccaa

SEQ ID NO: 1162426 - RNA, 23 nt, Human
caauaccgaggaucaauaggcga

SEQ ID NO: 1162427 - RNA, 22 nt, Human
caccgcccgcuguucguauguc

SEQ ID NO: 1162428 - RNA, 21 nt, Human
caccuguaaucccagcuacuc

SEQ ID NO: 1162429 - RNA, 24 nt, Human
caccuguaaucccagcuacucagg

SEQ ID NO: 1162430 - RNA, 24 nt, Human
cacgccuguaaucccagcucuuug

SEQ ID NO: 1162431 - RNA, 23 nt, Human
cacuccaggcugggcgacagagc

SEQ ID NO: 1162432 - RNA, 19 nt, Human
cacugcacuccaggcuggg

SEQ ID NO: 1162433 - RNA, 22 nt, Human
cacugcacuccaggcugggcga

SEQ ID NO: 1162434 - RNA, 23 nt, Human
cacugcacuccaggcugggcgac

SEQ ID NO: 1162435 - RNA, 24 nt, Human
cacugcacuccaggcugggcgaca

SEQ ID NO: 1162436 - RNA, 19 nt, Human
cacugcauuccagccuggg

SEQ ID NO: 1162437 - RNA, 22 nt, Human
cacugcauuccagccugggcga

SEQ ID NO: 1162438 - RNA, 23 nt, Human
cacugcauuccagccugggcgac

SEQ ID NO: 1162439 - RNA, 24 nt, Human
cacugcauuccagccugggcgaca

SEQ ID NO: 1162440 - RNA, 25 nt, Human
cagaggcgggcggaucacgagguca

SEQ ID NO: 1162441 - RNA, 24 nt, Human
cagcacucugggaggccgaggcgg

SEQ ID NO: 1162442 - RNA, 20 nt, Human
cagccugggcgacagaguga

SEQ ID NO: 1162443 - RNA, 24 nt, Human
cagcuacucaggaggcugaggcag

SEQ ID NO: 1162444 - RNA, 24 nt, Human
cagcucuuugggagacagaggcgg

SEQ ID NO: 1162445 - RNA, 23 nt, Human
caggccgggcgcgguggcucaug

SEQ ID NO: 1162446 - RNA, 20 nt, Human
caguuugggcaauaaggugc

SEQ ID NO: 1162447 - RNA, 20 nt, Human
caugacacagccuccggaga

SEQ ID NO: 1162448 - RNA, 21 nt, Human
caugccuguaaaucccagcac

SEQ ID NO: 1162449 - RNA, 24 nt, Human
cauuccagccugggcgacagagug

SEQ ID NO: 1162450 - RNA, 20 nt, Human
ccaacaaaaaaaaaacaggc

SEQ ID NO: 1162451 - RNA, 21 nt, Human
ccaacaaaaaaaaaacaggcc

SEQ ID NO: 1162452 - RNA, 20 nt, Human
ccacugcacuccaggcuggg

SEQ ID NO: 1162453 - RNA, 21 nt, Human
ccacugcacuccaggcugggc

SEQ ID NO: 1162454 - RNA, 24 nt, Human
ccacugcacuccaggcugggcgac

SEQ ID NO: 1162455 - RNA, 20 nt, Human
ccacugcauuccagccuggg

SEQ ID NO: 1162456 - RNA, 20 nt, Human
ccacugcauuccagccuggg

SEQ ID NO: 1162457 - RNA, 21 nt, Human
ccacugcauuccagccugggc

SEQ ID NO: 1162458 - RNA, 21 nt, Human
ccacugcauuccagccugggc

SEQ ID NO: 1162459 - RNA, 21 nt, Human
ccacugcauuccagccugggc

SEQ ID NO: 1162460 - RNA, 24 nt, Human
ccacugcauuccagccugggcgac

SEQ ID NO: 1162461 - RNA, 19 nt, Human
cccgcuguucguauguccg

SEQ ID NO: 1162462 - RNA, 18 nt, Human
cccgucacuacuaaaaaa

SEQ ID NO: 1162463 - RNA, 25 nt, Human
ccuccggagauccugacgacguggg

SEQ ID NO: 1162464 - RNA, 23 nt, Human
ccugaccaacauggugaaacccc

SEQ ID NO: 1162465 - RNA, 24 nt, Human
ccugaccaacauggugaaaccccg

SEQ ID NO: 1162466 - RNA, 22 nt, Human
ccuggcuaacauggugaaaccc

SEQ ID NO: 1162467 - RNA, 22 nt, Human
ccuggcuaacauggugaaaccc

SEQ ID NO: 1162468 - RNA, 23 nt, Human
ccuggcuaacauggugaaacccg

SEQ ID NO: 1162469 - RNA, 19 nt, Human
ccugggcgacagagugaga

SEQ ID NO: 1162470 - RNA, 21 nt, Human
ccuguaaucccagcuacucag

SEQ ID NO: 1162471 - RNA, 21 nt, Human
ccuguaaucccagcucuuugg

SEQ ID NO: 1162472 - RNA, 21 nt, Human
ccuguagucccagcuacacgg

SEQ ID NO: 1162473 - RNA, 22 nt, Human
ccuguagucccagcuacacggg

SEQ ID NO: 1162474 - RNA, 23 nt, Human
cgccuguaaucccagcucuuugg

SEQ ID NO: 1162475 - RNA, 24 nt, Human
cgccuguaaucccagcucuuuggg

SEQ ID NO: 1162476 - RNA, 21 nt, Human
cgccuguagucccagcuacac

SEQ ID NO: 1162477 - RNA, 23 nt, Human
cgccuguagucccagcuacacgg

SEQ ID NO: 1162478 - RNA, 23 nt, Human
cgccuguagucccagcuacacgg

SEQ ID NO: 1162479 - RNA, 22 nt, Human
cggaucacgaggucaggaguuc

SEQ ID NO: 1162480 - RNA, 20 nt, Human
cucacgccuguaaucccagc

SEQ ID NO: 1162481 - RNA, 24 nt, Human
cucacgccuguaaucccagcucuu

SEQ ID NO: 1162482 - RNA, 24 nt, Human
cucaugccuguaaaucccagcacu

SEQ ID NO: 1162483 - RNA, 24 nt, Human
cucuuugggagacagaggcgggcg

SEQ ID NO: 1162484 - RNA, 21 nt, Human
cuguaaucccagcuacucagg

SEQ ID NO: 1162485 - RNA, 19 nt, Human
gaaaccccgucucaacuaa

SEQ ID NO: 1162486 - RNA, 23 nt, Human
gagaauugcuugaacccgggagg

SEQ ID NO: 1162487 - RNA, 23 nt, Human
gaggcgggcggaucacgagguca

SEQ ID NO: 1162488 - RNA, 24 nt, Human
gaucacgaggucaggaguucaaga

SEQ ID NO: 1162489 - RNA, 24 nt, Human
gcauuccagccugggcgacagagu

SEQ ID NO: 1162490 - RNA, 19 nt, Human
gccacugcacuccaggcug

SEQ ID NO: 1162491 - RNA, 24 nt, Human
gccacugcacuccaggcugggcga

SEQ ID NO: 1162492 - RNA, 22 nt, Human
gccacugcauuccagccugggc

SEQ ID NO: 1162493 - RNA, 24 nt, Human
gccacugcauuccagccugggcga

SEQ ID NO: 1162494 - RNA, 24 nt, Human
gcccaugacacagccuccggagau

SEQ ID NO: 1162495 - RNA, 19 nt, Human
gccggacagggcgcggugu

SEQ ID NO: 1162496 - RNA, 21 nt, Human
gcuaacauggugaaacccguc

SEQ ID NO: 1162497 - RNA, 19 nt, Human
ggacagggcgcggugucuc

SEQ ID NO: 1162498 - RNA, 24 nt, Human
ggagauggugccacugcacuccag

SEQ ID NO: 1162499 - RNA, 18 nt, Human
ggagcuugcagugagcgg

SEQ ID NO: 1162500 - RNA, 24 nt, Human
ggagcuugcagugagcggagaugg

SEQ ID NO: 1162501 - RNA, 21 nt, Human
ggcacgcaccuguaaucccag

SEQ ID NO: 1162502 - RNA, 22 nt, Human
ggccccacggagccgggaacac

SEQ ID NO: 1162503 - RNA, 23 nt, Human
ggccgggcgcgguggcucaugcc

SEQ ID NO: 1162504 - RNA, 23 nt, Human
ggcgcggugucucacgccuguaa

SEQ ID NO: 1162505 - RNA, 21 nt, Human
ggcggaucacgaggucaggag

SEQ ID NO: 1162506 - RNA, 23 nt, Human
ggcggaucacgaggucaggaguu

SEQ ID NO: 1162507 - RNA, 24 nt, Human
ggcggcgggcgccuguagucccag

SEQ ID NO: 1162508 - RNA, 18 nt, Human
ggcguggcggcgggcgcc

SEQ ID NO: 1162509 - RNA, 22 nt, Human
ggcguggcggcgggcgccugua

SEQ ID NO: 1162510 - RNA, 24 nt, Human
gggcgcgguggcucaugccuguaa

SEQ ID NO: 1162511 - RNA, 24 nt, Human
gguggcucaugccuguaaauccca

SEQ ID NO: 1162512 - RNA, 25 nt, Human
gguggcucaugccuguaaaucccag

SEQ ID NO: 1162513 - RNA, 24 nt, Human
ggugucucacgccuguaaucccag

SEQ ID NO: 1162514 - RNA, 24 nt, Human
gugcgugguggcacgcaccuguaa

SEQ ID NO: 1162515 - RNA, 19 nt, Human
uaacauggugaaacccguc

SEQ ID NO: 1162516 - RNA, 22 nt, Human
uaacauggugaaacccgucacu

SEQ ID NO: 1162517 - RNA, 23 nt, Human
uaacauggugaaacccgucacua

SEQ ID NO: 1162518 - RNA, 18 nt, Human
uauuucccaaaguuaagg

SEQ ID NO: 1162519 - RNA, 22 nt, Human
ucaaaaacaaaccaacaaaaaa

SEQ ID NO: 1162520 - RNA, 24 nt, Human
ucaaaaacaaaccaacaaaaaaaa

SEQ ID NO: 1162521 - RNA, 27 nt, Human
ucaacuaaaaauacaaaaauuagccgu

SEQ ID NO: 1162522 - RNA, 19 nt, Human
ucaaucgagaaaaaugaca

SEQ ID NO: 1162523 - RNA, 24 nt, Human
ucacgaggucaggagauugagacc

SEQ ID NO: 1162524 - RNA, 24 nt, Human
ucacgaggucaggaguucaagaac

SEQ ID NO: 1162525 - RNA, 23 nt, Human
ucacgccacugcauuccagccug

SEQ ID NO: 1162526 - RNA, 27 nt, Human
ucacuacuaaaaaauacaaaaaaaaaa

SEQ ID NO: 1162527 - RNA, 23 nt, Human
ucaugccuguaaaucccagcacu

SEQ ID NO: 1162528 - RNA, 19 nt, Human
uccagccugggcgacagag

SEQ ID NO: 1162529 - RNA, 23 nt, Human
uccagccugggcgacagagugag

SEQ ID NO: 1162530 - RNA, 24 nt, Human
uccagccugggcgacagagugaga

SEQ ID NO: 1162531 - RNA, 24 nt, Human
uccaggcugggcgacagagcgaga

SEQ ID NO: 1162532 - RNA, 23 nt, Human
ucgccgggaagacggccccacgg

SEQ ID NO: 1162533 - RNA, 24 nt, Human
ugaccaacauggugaaaccccguc

SEQ ID NO: 1162534 - RNA, 24 nt, Human
ugagaccauccuggcuaacauggu

SEQ ID NO: 1162535 - RNA, 24 nt, Human
ugagaucacgccacugcauuccag

SEQ ID NO: 1162536 - RNA, 24 nt, Human
ugaggcaggagaauugcuugaacc

SEQ ID NO: 1162537 - RNA, 25 nt, Human
ugaggcaggagaauugcuugaaccc

SEQ ID NO: 1162538 - RNA, 23 nt, Human
ugcgguaggaaaauggcgugaac

SEQ ID NO: 1162539 - RNA, 22 nt, Human
uggcacgcaccuguaaucccag

SEQ ID NO: 1162540 - RNA, 24 nt, Human
uggcggcgggcgccuguaguccca

SEQ ID NO: 1162541 - RNA, 23 nt, Human
uggcucaugccuguaaaucccag

SEQ ID NO: 1162542 - RNA, 25 nt, Human
uggcucaugccuguaaaucccagca

SEQ ID NO: 1162543 - RNA, 19 nt, Human
ugggagacagaggcgggcg

SEQ ID NO: 1162544 - RNA, 20 nt, Human
ugggagacagaggcgggcgg

SEQ ID NO: 1162545 - RNA, 24 nt, Human
ugggagacagaggcgggcggauca

SEQ ID NO: 1162546 - RNA, 19 nt, Human
ugggaggccgaggcgggcg

SEQ ID NO: 1162547 - RNA, 24 nt, Human
ugggaggccgaggcgggcggauca

SEQ ID NO: 1162548 - RNA, 19 nt, Human
ugggcggcgaccgucgcgg

SEQ ID NO: 1162549 - RNA, 24 nt, Human
ugguggcacgcaccuguaauccca

SEQ ID NO: 1162550 - RNA, 22 nt, Human
ugguuguauucauuuuagggag

SEQ ID NO: 1162551 - RNA, 21 nt, Human
ugucucacgccuguaauccca

SEQ ID NO: 1162552 - RNA, 22 nt, Human
ugucucacgccuguaaucccag

SEQ ID NO: 1162553 - RNA, 26 nt, Human
uguuucgcuuuucccaagagacuuca

SEQ ID NO: 1162554 - RNA, 22 nt, Human
uuccaauggugaagaguaaugg

SEQ ID NO: 1162555 - RNA, 18 nt, Human
uugcagugagcggagaug

SEQ ID NO: 1162556 - RNA, 22 nt, Human
uugcagugagcggagauggugc

SEQ ID NO: 1162557 - RNA, 20 nt, Human
uugcagugaucugagaucac

SEQ ID NO: 1162558 - RNA, 21 nt, Human
uugcagugaucugagaucacg

SEQ ID NO: 1162559 - RNA, 18 nt, Human
uugcuugaacccgggagg

SEQ ID NO: 1162560 - RNA, 24 nt, Human
uugcuugaacccgggaggcagagg

SEQ ID NO: 1162561 - RNA, 22 nt, Human
uuucccaaaguuaaggacgccc

SEQ ID NO: 1162562 - RNA, 23 nt, Human
aaacaaggaugaauaagagggac

SEQ ID NO: 1162563 - RNA, 18 nt, Human
aaccagagacgacccccc

SEQ ID NO: 1162564 - RNA, 24 nt, Human
aagaaacauaugggaagacaaccc

SEQ ID NO: 1162565 - RNA, 20 nt, Human
acugaaaaccacaaagaaua

SEQ ID NO: 1162566 - RNA, 21 nt, Human
agaaacauaugggaagacaac

SEQ ID NO: 1162567 - RNA, 21 nt, Human
aggaagaaacauaugggaaga

SEQ ID NO: 1162568 - RNA, 22 nt, Human
ccacaaauaaguagcggggaca

SEQ ID NO: 1162569 - RNA, 21 nt, Human
cccuaccaccuaguaaaauaa

SEQ ID NO: 1162570 - RNA, 21 nt, Human
cuauuaacauuuacugaaaac

SEQ ID NO: 1162571 - RNA, 19 nt, Human
uacaaacuugcuuaccacc

SEQ ID NO: 1162572 - RNA, 22 nt, Human
ucacuaugcauaauucccuaca

SEQ ID NO: 1162573 - RNA, 23 nt, Human
ugauuuacaaacuugcuuaccac

SEQ ID NO: 1162574 - RNA, 21 nt, Human
aaaaaacagaaucacagcccc

SEQ ID NO: 1162575 - RNA, 23 nt, Human
aaaaacaaagaacaucaacaaua

SEQ ID NO: 1162576 - RNA, 20 nt, Human
aaacaauucgauaagaauac

SEQ ID NO: 1162577 - RNA, 24 nt, Human
aaagaacaucaacaauaaaagaaa

SEQ ID NO: 1162578 - RNA, 21 nt, Human
aacaauaaaagaaaaaaaaaa

SEQ ID NO: 1162579 - RNA, 24 nt, Human
aacaucaacaauaaaagaaaaaaa

SEQ ID NO: 1162580 - RNA, 18 nt, Human
aagaacaucaacaauaaa

SEQ ID NO: 1162581 - RNA, 22 nt, Human
aaugaacaguaaaacccuagag

SEQ ID NO: 1162582 - RNA, 18 nt, Human
aaugcaaaaacaggcuaa

SEQ ID NO: 1162583 - RNA, 23 nt, Human
agaaaaaaaaaacagaaucacag

SEQ ID NO: 1162584 - RNA, 18 nt, Human
agaaucacagcccagagg

SEQ ID NO: 1162585 - RNA, 26 nt, Human
agccauagcagcuaaaacaacauucc

SEQ ID NO: 1162586 - RNA, 24 nt, Human
caacuuagaaaaaaaaagcagaaa

SEQ ID NO: 1162587 - RNA, 22 nt, Human
cacaaugaacaguaaaacccua

SEQ ID NO: 1162588 - RNA, 23 nt, Human
cagaagccuuggcaguucaacaa

SEQ ID NO: 1162589 - RNA, 19 nt, Human
cagagcccaauagacccaa

SEQ ID NO: 1162590 - RNA, 18 nt, Human
cagcccagagggagugga

SEQ ID NO: 1162591 - RNA, 18 nt, Human
caggcuaaauaaaccuaa

SEQ ID NO: 1162592 - RNA, 22 nt, Human
cauucuuaauaguuggcaauga

SEQ ID NO: 1162593 - RNA, 25 nt, Human
ccaaaaacacaacuguguugcaaca

SEQ ID NO: 1162594 - RNA, 21 nt, Human
ccaauagacccaauauuacag

SEQ ID NO: 1162595 - RNA, 25 nt, Human
ccaauuaaaaaaaauaucuaaaauc

SEQ ID NO: 1162596 - RNA, 20 nt, Human
ccagagggaguggugaagcc

SEQ ID NO: 1162597 - RNA, 20 nt, Human
cccacagagcccaauagacc

SEQ ID NO: 1162598 - RNA, 19 nt, Human
cccuagagcaaauacugca

SEQ ID NO: 1162599 - RNA, 24 nt, Human
cuacuuaucuaccugccucauuua

SEQ ID NO: 1162600 - RNA, 23 nt, Human
cucuucacauaguuacuaauuuu

SEQ ID NO: 1162601 - RNA, 21 nt, Human
cuuagaaaaaaaaagcagaaa

SEQ ID NO: 1162602 - RNA, 19 nt, Human
cuugcuucucuuuucuucc

SEQ ID NO: 1162603 - RNA, 24 nt, Human
gaacacauugggggcuuagcauuu

SEQ ID NO: 1162604 - RNA, 21 nt, Human
gaguggugaagccaaaaacac

SEQ ID NO: 1162605 - RNA, 22 nt, Human
gcaacaucuggauaauccauac

SEQ ID NO: 1162606 - RNA, 19 nt, Human
gcucucuugaucuaaaauc

SEQ ID NO: 1162607 - RNA, 19 nt, Human
ggcaaugagaaagcugaga

SEQ ID NO: 1162608 - RNA, 18 nt, Human
ggucuggcuucuucuucu

SEQ ID NO: 1162609 - RNA, 18 nt, Human
uaaaacccuagagcaaau

SEQ ID NO: 1162610 - RNA, 23 nt, Human
uaaaaugcuauguucacccuguu

SEQ ID NO: 1162611 - RNA, 19 nt, Human
uaaaccucacgagaggcua

SEQ ID NO: 1162612 - RNA, 18 nt, Human
uaaauuagucguugccuc

SEQ ID NO: 1162613 - RNA, 26 nt, Human
uaauauuagucacugaccaauuuuaa

SEQ ID NO: 1162614 - RNA, 26 nt, Human
uacaaaaacguaccaacugauguaag

SEQ ID NO: 1162615 - RNA, 20 nt, Human
uagcagcuaaaacaacauuc

SEQ ID NO: 1162616 - RNA, 20 nt, Human
ucagcagugaugaucagaag

SEQ ID NO: 1162617 - RNA, 25 nt, Human
uccagcagcgauauccauuuccuuu

SEQ ID NO: 1162618 - RNA, 20 nt, Human
uccauuuccugccaugucuu

SEQ ID NO: 1162619 - RNA, 22 nt, Human
ucccacagagcccaauagaccc

SEQ ID NO: 1162620 - RNA, 23 nt, Human
ucugugauuaaggaaacuaaaac

SEQ ID NO: 1162621 - RNA, 22 nt, Human
ucuuugucuaauuucugacuug

SEQ ID NO: 1162622 - RNA, 21 nt, Human
ugaaagugguucaaaauuucc

SEQ ID NO: 1162623 - RNA, 24 nt, Human
ugacacaaugaacaguaaaacccu

SEQ ID NO: 1162624 - RNA, 19 nt, Human
ugacuccaaacaaucuuca

SEQ ID NO: 1162625 - RNA, 23 nt, Human
ugacuccaaacaaucuucagcau

SEQ ID NO: 1162626 - RNA, 20 nt, Human
ugagaaagcugagauggaag

SEQ ID NO: 1162627 - RNA, 18 nt, Human
ugccucauuuacuuuccc

SEQ ID NO: 1162628 - RNA, 19 nt, Human
uggcacaaaggaaaaaaaa

SEQ ID NO: 1162629 - RNA, 22 nt, Human
uggcacaaaggaaaaaaaaaaa

SEQ ID NO: 1162630 - RNA, 20 nt, Human
uggcuucuaagugguuuccu

SEQ ID NO: 1162631 - RNA, 21 nt, Human
uucacuuuccuggucuggcuu

SEQ ID NO: 1162632 - RNA, 22 nt, Human
uucagcagugaugaucagaagc

SEQ ID NO: 1162633 - RNA, 18 nt, Human
uucaugaaauuuugcucu

SEQ ID NO: 1162634 - RNA, 23 nt, Human
uuccagauaaaagaguaaaacag

SEQ ID NO: 1162635 - RNA, 19 nt, Human
uuggcuacugucuuuugcu

SEQ ID NO: 1162636 - RNA, 21 nt, Human
aaguggcagacaauucagaau

SEQ ID NO: 1162637 - RNA, 26 nt, Human
acccaggagguuuuuguuucguuucg

SEQ ID NO: 1162638 - RNA, 21 nt, Human
acccagugugaaacacagccu

SEQ ID NO: 1162639 - RNA, 23 nt, Human
accucauccccuucauuguccag

SEQ ID NO: 1162640 - RNA, 19 nt, Human
agagguuagaaaucauacc

SEQ ID NO: 1162641 - RNA, 25 nt, Human
agaugucagauguccccugugagcu

SEQ ID NO: 1162642 - RNA, 21 nt, Human
agcauucauguauuuuuaguu

SEQ ID NO: 1162643 - RNA, 21 nt, Human
agccuaaguaguuucauaaaa

SEQ ID NO: 1162644 - RNA, 23 nt, Human
agccuguuuuguugcuggaauga

SEQ ID NO: 1162645 - RNA, 27 nt, Human
aguugcuaaaauaaugaaagaaaaaaa

SEQ ID NO: 1162646 - RNA, 22 nt, Human
auaaagcacaaagugcucaaaa

SEQ ID NO: 1162647 - RNA, 20 nt, Human
augacuugcuguuucagaau

SEQ ID NO: 1162648 - RNA, 23 nt, Human
cacaauaaaacaaaauuugugua

SEQ ID NO: 1162649 - RNA, 18 nt, Human
cagaugucagaugucccc

SEQ ID NO: 1162650 - RNA, 21 nt, Human
cauacccagugugaaacacag

SEQ ID NO: 1162651 - RNA, 18 nt, Human
cccagugugaaacacagc

SEQ ID NO: 1162652 - RNA, 20 nt, Human
cgaauaaagcacaaagugcu

SEQ ID NO: 1162653 - RNA, 23 nt, Human
cugaaaacuaaagcaugaauccu

SEQ ID NO: 1162654 - RNA, 26 nt, Human
gguguaggauggcaugacccaggagg

SEQ ID NO: 1162655 - RNA, 19 nt, Human
ggugucuuuccaaaucgca

SEQ ID NO: 1162656 - RNA, 28 nt, Human
uaaaaauaucacuugaagaaaagauuuc

SEQ ID NO: 1162657 - RNA, 21 nt, Human
uaaaauaaugaaagaaaaaaa

SEQ ID NO: 1162658 - RNA, 24 nt, Human
uaaaucaugccucuguuuaacagg

SEQ ID NO: 1162659 - RNA, 21 nt, Human
uaacaggaauuugguguagga

SEQ ID NO: 1162660 - RNA, 22 nt, Human
uaacauuagacauauuacaguu

SEQ ID NO: 1162661 - RNA, 18 nt, Human
uaagaaaauauggucuga

SEQ ID NO: 1162662 - RNA, 20 nt, Human
uacccagugugaaacacagc

SEQ ID NO: 1162663 - RNA, 18 nt, Human
uagcugaaaacuaaagca

SEQ ID NO: 1162664 - RNA, 22 nt, Human
uagcuuucaaauaauucauccu

SEQ ID NO: 1162665 - RNA, 21 nt, Human
uaugacuugcuguuucagaau

SEQ ID NO: 1162666 - RNA, 21 nt, Human
ucacggucucacccggaaguc

SEQ ID NO: 1162667 - RNA, 21 nt, Human
ucuauagcugaaaacuaaagc

SEQ ID NO: 1162668 - RNA, 23 nt, Human
ucuucgguagcauucauguauuu

SEQ ID NO: 1162669 - RNA, 24 nt, Human
ugaaagaaaaaaacuuucuucugc

SEQ ID NO: 1162670 - RNA, 23 nt, Human
ugaagaaauagcaaggucacugg

SEQ ID NO: 1162671 - RNA, 18 nt, Human
ugccuggguggugcgaga

SEQ ID NO: 1162672 - RNA, 25 nt, Human
ugcuaaaauaaugaaagaaaaaaac

SEQ ID NO: 1162673 - RNA, 23 nt, Human
uggcaugacccaggagguuuuug

SEQ ID NO: 1162674 - RNA, 20 nt, Human
uguccagaacaaauccuaac

SEQ ID NO: 1162675 - RNA, 21 nt, Human
uguccagaacaaauccuaaca

SEQ ID NO: 1162676 - RNA, 24 nt, Human
uuaauuuaaaaugucuaacauuag

SEQ ID NO: 1162677 - RNA, 21 nt, Human
uucagguuuucagaacugcau

SEQ ID NO: 1162678 - RNA, 23 nt, Human
uuuaaaaugucuaacauuagaca

SEQ ID NO: 1162679 - RNA, 18 nt, Human
uuuccaaaucgcacugua

SEQ ID NO: 1162680 - RNA, 21 nt, Human
uuuguggugucuuuccaaauc

SEQ ID NO: 1162681 - RNA, 20 nt, Human
uuuucagguuuucagaacug

SEQ ID NO: 1162682 - RNA, 23 nt, Human
aaacuccagguggcaggggcugu

SEQ ID NO: 1162683 - RNA, 21 nt, Human
aacgugcugggguccagccug

SEQ ID NO: 1162684 - RNA, 19 nt, Human
aacucaauggacucucccc

SEQ ID NO: 1162685 - RNA, 20 nt, Human
aacuuuccccacugaaaggc

SEQ ID NO: 1162686 - RNA, 18 nt, Human
aagagacagaggcugcga

SEQ ID NO: 1162687 - RNA, 22 nt, Human
acacagcacccacaccccaccc

SEQ ID NO: 1162688 - RNA, 23 nt, Human
acacagcacccacaccccacccc

SEQ ID NO: 1162689 - RNA, 22 nt, Human
accuccccaacuuuccccacug

SEQ ID NO: 1162690 - RNA, 18 nt, Human
agaaaacagacgcugccu

SEQ ID NO: 1162691 - RNA, 21 nt, Human
agaacgugcugggguccagcc

SEQ ID NO: 1162692 - RNA, 18 nt, Human
agcggaagagacagaggc

SEQ ID NO: 1162693 - RNA, 21 nt, Human
agcgguagggaggggaagaga

SEQ ID NO: 1162694 - RNA, 19 nt, Human
agcucagcccggccugcug

SEQ ID NO: 1162695 - RNA, 21 nt, Human
agcugugucagugacccuggc

SEQ ID NO: 1162696 - RNA, 20 nt, Human
aggagaaagagauuuccaga

SEQ ID NO: 1162697 - RNA, 23 nt, Human
aggcgguggcugggggaaagagg

SEQ ID NO: 1162698 - RNA, 23 nt, Human
aggcgguggcugggggaaagagg

SEQ ID NO: 1162699 - RNA, 19 nt, Human
aggggcgggggaggagaaa

SEQ ID NO: 1162700 - RNA, 28 nt, Human
aucccgccccuccccuccccuccccagg

SEQ ID NO: 1162701 - RNA, 21 nt, Human
cacacagcacccacaccccac

SEQ ID NO: 1162702 - RNA, 18 nt, Human
caccccuccaucucacuc

SEQ ID NO: 1162703 - RNA, 21 nt, Human
caccccuccaucucacucaag

SEQ ID NO: 1162704 - RNA, 18 nt, Human
caccuccccaacuuuccc

SEQ ID NO: 1162705 - RNA, 19 nt, Human
caccuccccaacuuucccc

SEQ ID NO: 1162706 - RNA, 24 nt, Human
cacugaaaggcaaacucaauggac

SEQ ID NO: 1162707 - RNA, 18 nt, Human
cagcacccacaccccacc

SEQ ID NO: 1162708 - RNA, 21 nt, Human
cagcacccacaccccaccccg

SEQ ID NO: 1162709 - RNA, 21 nt, Human
cagcagugauucagacuucaa

SEQ ID NO: 1162710 - RNA, 23 nt, Human
cagcugccccuccagaaaacaga

SEQ ID NO: 1162711 - RNA, 23 nt, Human
caggaagaacuugcugaucagug

SEQ ID NO: 1162712 - RNA, 26 nt, Human
caugaacaucccgccccuccccuccc

SEQ ID NO: 1162713 - RNA, 20 nt, Human
cauugguucuccaccucccc

SEQ ID NO: 1162714 - RNA, 23 nt, Human
ccagucccucagcuuggucucag

SEQ ID NO: 1162715 - RNA, 22 nt, Human
cccacagagaccaagagagacg

SEQ ID NO: 1162716 - RNA, 18 nt, Human
cccagguugggguggggg

SEQ ID NO: 1162717 - RNA, 19 nt, Human
ccccgcucgcacacuccag

SEQ ID NO: 1162718 - RNA, 18 nt, Human
ccccuccccuccccaguc

SEQ ID NO: 1162719 - RNA, 20 nt, Human
ccccuccccuccccucccca

SEQ ID NO: 1162720 - RNA, 19 nt, Human
ccgccccuccccuccccuc

SEQ ID NO: 1162721 - RNA, 19 nt, Human
ccgccccuccccuccccuc

SEQ ID NO: 1162722 - RNA, 21 nt, Human
ccuccccaacuuuccccacug

SEQ ID NO: 1162723 - RNA, 23 nt, Human
ccuccccuccccuccccaguccc

SEQ ID NO: 1162724 - RNA, 23 nt, Human
cgagaccuacccacagagaccaa

SEQ ID NO: 1162725 - RNA, 23 nt, Human
cgaggaaagucaggcccaaagau

SEQ ID NO: 1162726 - RNA, 21 nt, Human
cgccccuccccuccccucccc

SEQ ID NO: 1162727 - RNA, 27 nt, Human
cgccccuccccuccccuccccaguccc

SEQ ID NO: 1162728 - RNA, 21 nt, Human
cgcucgcacacuccaguuccc

SEQ ID NO: 1162729 - RNA, 20 nt, Human
cggaagagacagaggcugcg

SEQ ID NO: 1162730 - RNA, 21 nt, Human
cucagcccggccugcugcggc

SEQ ID NO: 1162731 - RNA, 22 nt, Human
cucagcuuggucucagcugugu

SEQ ID NO: 1162732 - RNA, 22 nt, Human
cuccccuuccucucuucguacu

SEQ ID NO: 1162733 - RNA, 19 nt, Human
cuccuggguccucaggacu

SEQ ID NO: 1162734 - RNA, 19 nt, Human
cucgcacacuccaguuccc

SEQ ID NO: 1162735 - RNA, 24 nt, Human
cucguagcccugggucuguuuucu

SEQ ID NO: 1162736 - RNA, 22 nt, Human
cucuuccagcccugaagacagg

SEQ ID NO: 1162737 - RNA, 24 nt, Human
cugcauugccccgcucgcacacuc

SEQ ID NO: 1162738 - RNA, 22 nt, Human
cuggaccucuguucucuaccca

SEQ ID NO: 1162739 - RNA, 22 nt, Human
cugggucuguuuucuucucaga

SEQ ID NO: 1162740 - RNA, 21 nt, Human
cuuggucucagcugugucagu

SEQ ID NO: 1162741 - RNA, 26 nt, Human
gaacaccccuccaucucacucaaggg

SEQ ID NO: 1162742 - RNA, 30 nt, Human
gaagacagggagccagcagccaaaagagaa

SEQ ID NO: 1162743 - RNA, 19 nt, Human
gacccuggcucagaaaagu

SEQ ID NO: 1162744 - RNA, 20 nt, Human
gagcaagaggcgguggcugg

SEQ ID NO: 1162745 - RNA, 18 nt, Human
gagcacugauugagcacu

SEQ ID NO: 1162746 - RNA, 20 nt, Human
gaggaaagucaggcccaaag

SEQ ID NO: 1162747 - RNA, 19 nt, Human
gcccugaagacagggagcc

SEQ ID NO: 1162748 - RNA, 22 nt, Human
gcccugggucuguuuucuucuc

SEQ ID NO: 1162749 - RNA, 23 nt, Human
gcccugggucuguuuucuucuca

SEQ ID NO: 1162750 - RNA, 21 nt, Human
gcgagcacugauugagcacuu

SEQ ID NO: 1162751 - RNA, 22 nt, Human
gcgaggaaagucaggcccaaag

SEQ ID NO: 1162752 - RNA, 21 nt, Human
gcugggguccagccugggugc

SEQ ID NO: 1162753 - RNA, 24 nt, Human
ggaaagucaggcccaaagauacag

SEQ ID NO: 1162754 - RNA, 18 nt, Human
ggaagagacagaggcugc

SEQ ID NO: 1162755 - RNA, 23 nt, Human
ggaggaagaaccuuguccaggug

SEQ ID NO: 1162756 - RNA, 18 nt, Human
ggccuggggccacugcuc

SEQ ID NO: 1162757 - RNA, 19 nt, Human
ggcgguaagcgcaagaggg

SEQ ID NO: 1162758 - RNA, 21 nt, Human
ggguucccggugacccuuucc

SEQ ID NO: 1162759 - RNA, 20 nt, Human
gguuggggugggggcugugg

SEQ ID NO: 1162760 - RNA, 23 nt, Human
gucacacagcacccacaccccac

SEQ ID NO: 1162761 - RNA, 23 nt, Human
guccagccugggugcccugagcu

SEQ ID NO: 1162762 - RNA, 23 nt, Human
guggugagcaagaggcgguggcu

SEQ ID NO: 1162763 - RNA, 18 nt, Human
uaagcgcaagagggaaga

SEQ ID NO: 1162764 - RNA, 21 nt, Human
uaaggugaacaccccuccauc

SEQ ID NO: 1162765 - RNA, 26 nt, Human
uacccagaaaggcccuccgguaaggg

SEQ ID NO: 1162766 - RNA, 25 nt, Human
uagcaaacccagguugggguggggg

SEQ ID NO: 1162767 - RNA, 19 nt, Human
ucacacagcacccacaccc

SEQ ID NO: 1162768 - RNA, 19 nt, Human
ucacacagcacccacaccc

SEQ ID NO: 1162769 - RNA, 21 nt, Human
ucacacagcacccacacccca

SEQ ID NO: 1162770 - RNA, 18 nt, Human
ucacagcagcuucucagc

SEQ ID NO: 1162771 - RNA, 22 nt, Human
uccaccuccccaacuuucccca

SEQ ID NO: 1162772 - RNA, 21 nt, Human
uccccaacuuuccccacugaa

SEQ ID NO: 1162773 - RNA, 21 nt, Human
uccccagucccucagcuuggu

SEQ ID NO: 1162774 - RNA, 23 nt, Human
uccccagucccucagcuuggucu

SEQ ID NO: 1162775 - RNA, 21 nt, Human
ucccucagcuuggucucagcu

SEQ ID NO: 1162776 - RNA, 19 nt, Human
uccugggccggcugagguc

SEQ ID NO: 1162777 - RNA, 21 nt, Human
uccuggguccucaggacugcc

SEQ ID NO: 1162778 - RNA, 22 nt, Human
ucuccucuggaccucuguucuc

SEQ ID NO: 1162779 - RNA, 19 nt, Human
ucucuagcucagcccggcc

SEQ ID NO: 1162780 - RNA, 27 nt, Human
ucuggaccucuguucucuacccagaaa

SEQ ID NO: 1162781 - RNA, 20 nt, Human
ucuuccagcccugaagacag

SEQ ID NO: 1162782 - RNA, 22 nt, Human
ugaaaagggaggcgcggagaua

SEQ ID NO: 1162783 - RNA, 20 nt, Human
ugacagcagugauucagacu

SEQ ID NO: 1162784 - RNA, 22 nt, Human
ugagcaugaacaucccgccccu

SEQ ID NO: 1162785 - RNA, 23 nt, Human
ugagcaugaacaucccgccccuc

SEQ ID NO: 1162786 - RNA, 20 nt, Human
ugagcgguagggaggggaag

SEQ ID NO: 1162787 - RNA, 24 nt, Human
ugagcgguagggaggggaagagag

SEQ ID NO: 1162788 - RNA, 18 nt, Human
ugauucagacuucaacuu

SEQ ID NO: 1162789 - RNA, 26 nt, Human
ugcaaggaccaaaaagggucacacag

SEQ ID NO: 1162790 - RNA, 25 nt, Human
ugcccuauucuccauagcaaaccca

SEQ ID NO: 1162791 - RNA, 21 nt, Human
ugcuggagucacagcagcuuc

SEQ ID NO: 1162792 - RNA, 20 nt, Human
ugcugggguccagccugggu

SEQ ID NO: 1162793 - RNA, 22 nt, Human
uggaccucuguucucuacccag

SEQ ID NO: 1162794 - RNA, 18 nt, Human
uggcucagaaaagugcaa

SEQ ID NO: 1162795 - RNA, 18 nt, Human
uggcugggggaaagaggc

SEQ ID NO: 1162796 - RNA, 21 nt, Human
ugggcugccugcggguucccg

SEQ ID NO: 1162797 - RNA, 29 nt, Human
ugggcugccugcggguucccggugaaacg

SEQ ID NO: 1162798 - RNA, 20 nt, Human
ugggggaaagaggcaaggga

SEQ ID NO: 1162799 - RNA, 23 nt, Human
ugggggcuguggugagcaagagg

SEQ ID NO: 1162800 - RNA, 21 nt, Human
uggggugggggcuguggugag

SEQ ID NO: 1162801 - RNA, 23 nt, Human
ugugcagcgcgcgguccagaagu

SEQ ID NO: 1162802 - RNA, 20 nt, Human
uguuuuguucuccugggccu

SEQ ID NO: 1162803 - RNA, 18 nt, Human
uguuuuguuuuguucucc

SEQ ID NO: 1162804 - RNA, 20 nt, Human
uucucuacccagaaaggccc

SEQ ID NO: 1162805 - RNA, 20 nt, Human
uucuucucagagagaccuga

SEQ ID NO: 1162806 - RNA, 19 nt, Human
uuguucuccugggccuaaa

SEQ ID NO: 1162807 - RNA, 23 nt, Human
uuuguucuccugggccuaaagga

SEQ ID NO: 1162808 - RNA, 18 nt, Human
aacagccucucaaggugu

SEQ ID NO: 1162809 - RNA, 26 nt, Human
aaccaaaaagaaaauucuaaggcccc

SEQ ID NO: 1162810 - RNA, 22 nt, Human
aaccaucugaaugcauggcccc

SEQ ID NO: 1162811 - RNA, 20 nt, Human
aacuuauuagguggguccua

SEQ ID NO: 1162812 - RNA, 18 nt, Human
aagcagaagagagaauug

SEQ ID NO: 1162813 - RNA, 20 nt, Human
aagcagggccaccacacgca

SEQ ID NO: 1162814 - RNA, 23 nt, Human
aagcugggaccagucgugaggga

SEQ ID NO: 1162815 - RNA, 28 nt, Human
aaggaggagacguaguuccccuuaauag

SEQ ID NO: 1162816 - RNA, 23 nt, Human
acagaggaggagagcaggcugaa

SEQ ID NO: 1162817 - RNA, 18 nt, Human
acaucaggcccaggaguc

SEQ ID NO: 1162818 - RNA, 25 nt, Human
acccagagaggugcuucuggggagc

SEQ ID NO: 1162819 - RNA, 21 nt, Human
accccuuacucagaugggggc

SEQ ID NO: 1162820 - RNA, 21 nt, Human
acgcaauagaaaucaagcauc

SEQ ID NO: 1162821 - RNA, 19 nt, Human
agaaacagaggaaacaaag

SEQ ID NO: 1162822 - RNA, 22 nt, Human
agaagagagaauuggaagaaac

SEQ ID NO: 1162823 - RNA, 20 nt, Human
agaagcugggaccagucgug

SEQ ID NO: 1162824 - RNA, 20 nt, Human
agacagacagacagacagcc

SEQ ID NO: 1162825 - RNA, 23 nt, Human
aggagauuuaaaaggaagggaga

SEQ ID NO: 1162826 - RNA, 19 nt, Human
aggaggagagcaggcugaa

SEQ ID NO: 1162827 - RNA, 18 nt, Human
aggucuuuagauaauaac

SEQ ID NO: 1162828 - RNA, 22 nt, Human
agucaggaagucuuugaaucug

SEQ ID NO: 1162829 - RNA, 26 nt, Human
augccagguuagacagacagacagac

SEQ ID NO: 1162830 - RNA, 18 nt, Human
auguacauguuacaugua

SEQ ID NO: 1162831 - RNA, 20 nt, Human
caacuuuccagaccaaaaca

SEQ ID NO: 1162832 - RNA, 23 nt, Human
caaugggucacccuucugugagc

SEQ ID NO: 1162833 - RNA, 18 nt, Human
cacacgcauggggagaac

SEQ ID NO: 1162834 - RNA, 21 nt, Human
caccacaaagcagggccacca

SEQ ID NO: 1162835 - RNA, 20 nt, Human
cacugcaugccucaaugggu

SEQ ID NO: 1162836 - RNA, 18 nt, Human
cagagcacagacaggauu

SEQ ID NO: 1162837 - RNA, 25 nt, Human
cagcacaagacacacuauggggucu

SEQ ID NO: 1162838 - RNA, 22 nt, Human
cagcagaggcugcauugcagca

SEQ ID NO: 1162839 - RNA, 23 nt, Human
cagcaggacaguccuggaggcuc

SEQ ID NO: 1162840 - RNA, 20 nt, Human
cagccucuugauacccuccu

SEQ ID NO: 1162841 - RNA, 21 nt, Human
caggcggcuucugcauccuga

SEQ ID NO: 1162842 - RNA, 18 nt, Human
caggucaugaggggaagg

SEQ ID NO: 1162843 - RNA, 19 nt, Human
cauaacucacccggucugc

SEQ ID NO: 1162844 - RNA, 23 nt, Human
cauccugagacacccuuccugaa

SEQ ID NO: 1162845 - RNA, 24 nt, Human
ccaaaguggggagggggcagagaa

SEQ ID NO: 1162846 - RNA, 19 nt, Human
ccacaaagcagggccacca

SEQ ID NO: 1162847 - RNA, 22 nt, Human
ccagaccaaaacaauguacaug

SEQ ID NO: 1162848 - RNA, 18 nt, Human
ccagagaggugcuucugg

SEQ ID NO: 1162849 - RNA, 25 nt, Human
ccagucaggaagucuuugaaucuga

SEQ ID NO: 1162850 - RNA, 21 nt, Human
ccaucugaaugcauggccccu

SEQ ID NO: 1162851 - RNA, 19 nt, Human
cccaagaugccaggugcuu

SEQ ID NO: 1162852 - RNA, 20 nt, Human
ccccaaaugccagagaacuc

SEQ ID NO: 1162853 - RNA, 23 nt, Human
cccccuuccgguugucccaacuu

SEQ ID NO: 1162854 - RNA, 23 nt, Human
ccccgacaaaaccccuccccaaa

SEQ ID NO: 1162855 - RNA, 21 nt, Human
ccccuuaccaucacccagaca

SEQ ID NO: 1162856 - RNA, 23 nt, Human
ccucccaggacaccugugggaau

SEQ ID NO: 1162857 - RNA, 23 nt, Human
ccucuugauacccuccuuccuuu

SEQ ID NO: 1162858 - RNA, 23 nt, Human
ccucuuuaagucugaguagaaac

SEQ ID NO: 1162859 - RNA, 19 nt, Human
ccugagacacccuuccuga

SEQ ID NO: 1162860 - RNA, 18 nt, Human
ccugcagaccccaaaugc

SEQ ID NO: 1162861 - RNA, 22 nt, Human
ccugcagaccccaaaugccaga

SEQ ID NO: 1162862 - RNA, 20 nt, Human
ccugcagaccccaaaugccg

SEQ ID NO: 1162863 - RNA, 21 nt, Human
ccuuacucagaugggggcagg

SEQ ID NO: 1162864 - RNA, 27 nt, Human
ccuucugugagcaggugcuucagaggc

SEQ ID NO: 1162865 - RNA, 19 nt, Human
cgagugugugagagcagaa

SEQ ID NO: 1162866 - RNA, 22 nt, Human
cgccaauuagauggacgugguc

SEQ ID NO: 1162867 - RNA, 19 nt, Human
cucccccuuccgguugucc

SEQ ID NO: 1162868 - RNA, 19 nt, Human
cugaaggccuauccaccuc

SEQ ID NO: 1162869 - RNA, 20 nt, Human
cugcgcaaagacaaaacauc

SEQ ID NO: 1162870 - RNA, 22 nt, Human
cuggagaacaaggaggagacgu

SEQ ID NO: 1162871 - RNA, 23 nt, Human
cugggcauguucuuaaccuuggc

SEQ ID NO: 1162872 - RNA, 19 nt, Human
cuguuucacuccagcagag

SEQ ID NO: 1162873 - RNA, 20 nt, Human
cuguuucacuccagcagagg

SEQ ID NO: 1162874 - RNA, 21 nt, Human
cuguuucacuccagcagaggc

SEQ ID NO: 1162875 - RNA, 23 nt, Human
cuugcuccugcagaccccaaaug

SEQ ID NO: 1162876 - RNA, 19 nt, Human
cuugggguuuacaccccuu

SEQ ID NO: 1162877 - RNA, 18 nt, Human
gagaacaaggaggagacc

SEQ ID NO: 1162878 - RNA, 18 nt, Human
gaggccccaagaugccag

SEQ ID NO: 1162879 - RNA, 18 nt, Human
gaugaguuuguaggcgag

SEQ ID NO: 1162880 - RNA, 24 nt, Human
gcagaagagagaauuggaagaaac

SEQ ID NO: 1162881 - RNA, 21 nt, Human
gcagaccccaaaugccagaga

SEQ ID NO: 1162882 - RNA, 20 nt, Human
gcagagaagaggccccaaga

SEQ ID NO: 1162883 - RNA, 18 nt, Human
gcaggacagaggaggaga

SEQ ID NO: 1162884 - RNA, 18 nt, Human
gcaggcagugccuggcag

SEQ ID NO: 1162885 - RNA, 20 nt, Human
gcugggagagaagcugggac

SEQ ID NO: 1162886 - RNA, 22 nt, Human
ggaagaaacagaggaaacaaag

SEQ ID NO: 1162887 - RNA, 23 nt, Human
ggcuguguccugggcauguucuu

SEQ ID NO: 1162888 - RNA, 23 nt, Human
gggaaagcagaggcuaacauaac

SEQ ID NO: 1162889 - RNA, 21 nt, Human
gggaaucucccaaaaccuaga

SEQ ID NO: 1162890 - RNA, 18 nt, Human
gggagggggcagagaaga

SEQ ID NO: 1162891 - RNA, 18 nt, Human
gggcagagaagaggcccc

SEQ ID NO: 1162892 - RNA, 23 nt, Human
gggcaggcagugccuggcagcaa

SEQ ID NO: 1162893 - RNA, 21 nt, Human
ggugugugugugugugugugu

SEQ ID NO: 1162894 - RNA, 19 nt, Human
gugcugggagagaagcugg

SEQ ID NO: 1162895 - RNA, 21 nt, Human
gugugccggggcuguguguga

SEQ ID NO: 1162896 - RNA, 21 nt, Human
gugugugugugugugugugug

SEQ ID NO: 1162897 - RNA, 21 nt, Human
gugugugugugugugugugug

SEQ ID NO: 1162898 - RNA, 21 nt, Human
gugugugugugugugugugug

SEQ ID NO: 1162899 - RNA, 21 nt, Human
gugugugugugugugugugug

SEQ ID NO: 1162900 - RNA, 21 nt, Human
gugugugugugugugugugug

SEQ ID NO: 1162901 - RNA, 19 nt, Human
uaaaaggaagggagaggga

SEQ ID NO: 1162902 - RNA, 23 nt, Human
uaagccccaggagauuuaaaagg

SEQ ID NO: 1162903 - RNA, 20 nt, Human
uaagucugaguagaaacauu

SEQ ID NO: 1162904 - RNA, 20 nt, Human
uaauaacucaaucaacugcc

SEQ ID NO: 1162905 - RNA, 22 nt, Human
uagacagacagacagacagcca

SEQ ID NO: 1162906 - RNA, 24 nt, Human
uagacagacagacagacagccagg

SEQ ID NO: 1162907 - RNA, 19 nt, Human
uagguggguccuagaaauu

SEQ ID NO: 1162908 - RNA, 20 nt, Human
uauccaccucugcacgcauc

SEQ ID NO: 1162909 - RNA, 24 nt, Human
uaugaccuauucucucugaagccu

SEQ ID NO: 1162910 - RNA, 24 nt, Human
ucaccacaaagcagggccaccaca

SEQ ID NO: 1162911 - RNA, 23 nt, Human
ucacccagacauuccuuucucuu

SEQ ID NO: 1162912 - RNA, 19 nt, Human
ucaggacaggaagggaaag

SEQ ID NO: 1162913 - RNA, 21 nt, Human
ucaggacaggaagggaaagca

SEQ ID NO: 1162914 - RNA, 24 nt, Human
ucagugcacaguuauugaaagaaa

SEQ ID NO: 1162915 - RNA, 20 nt, Human
uccaaaggauggaggcugcc

SEQ ID NO: 1162916 - RNA, 22 nt, Human
uccacacugcagguguucacag

SEQ ID NO: 1162917 - RNA, 19 nt, Human
uccccaaaguggggagggg

SEQ ID NO: 1162918 - RNA, 24 nt, Human
ucccgggaaucucccaaaaccuag

SEQ ID NO: 1162919 - RNA, 22 nt, Human
ucccuaaaauguauaaaaccaa

SEQ ID NO: 1162920 - RNA, 20 nt, Human
ucccugcuguucuggguggg

SEQ ID NO: 1162921 - RNA, 19 nt, Human
uccugcagaccccaaaugc

SEQ ID NO: 1162922 - RNA, 22 nt, Human
uccuguuucacuccagcagagg

SEQ ID NO: 1162923 - RNA, 24 nt, Human
ucuacagagcuuagcacagccauu

SEQ ID NO: 1162924 - RNA, 28 nt, Human
ucucaaggugugugugugugugugugug

SEQ ID NO: 1162925 - RNA, 25 nt, Human
ucucuacaaccccuuaccaucaccc

SEQ ID NO: 1162926 - RNA, 21 nt, Human
ucucucugaagccuguuaccu

SEQ ID NO: 1162927 - RNA, 19 nt, Human
ucucuuagaccucugggca

SEQ ID NO: 1162928 - RNA, 23 nt, Human
ucuggagaacaaggaggagacgu

SEQ ID NO: 1162929 - RNA, 19 nt, Human
ugaccuggaagcucccccu

SEQ ID NO: 1162930 - RNA, 20 nt, Human
ugacgcaauagaaaucaagc

SEQ ID NO: 1162931 - RNA, 18 nt, Human
ugauggcuuaugucuccc

SEQ ID NO: 1162932 - RNA, 18 nt, Human
ugcagaccccaaaugcca

SEQ ID NO: 1162933 - RNA, 25 nt, Human
ugcccccgacaaaaccccuccccaa

SEQ ID NO: 1162934 - RNA, 20 nt, Human
uggaagaaacagaggaaaca

SEQ ID NO: 1162935 - RNA, 22 nt, Human
uggauucuaagccccaggagau

SEQ ID NO: 1162936 - RNA, 22 nt, Human
uggcagcaaucccgggaaucuc

SEQ ID NO: 1162937 - RNA, 18 nt, Human
ugugcugggagagaagcu

SEQ ID NO: 1162938 - RNA, 22 nt, Human
uguggucaggaccucccaaggc

SEQ ID NO: 1162939 - RNA, 21 nt, Human
ugugugccggggcugugugug

SEQ ID NO: 1162940 - RNA, 18 nt, Human
ugugugugugugugugug

SEQ ID NO: 1162941 - RNA, 18 nt, Human
ugugugugugugugugug

SEQ ID NO: 1162942 - RNA, 18 nt, Human
ugugugugugugugugug

SEQ ID NO: 1162943 - RNA, 18 nt, Human
ugugugugugugugugug

SEQ ID NO: 1162944 - RNA, 18 nt, Human
ugugugugugugugugug

SEQ ID NO: 1162945 - RNA, 18 nt, Human
ugugugugugugugugug

SEQ ID NO: 1162946 - RNA, 18 nt, Human
ugugugugugugugugug

SEQ ID NO: 1162947 - RNA, 18 nt, Human
ugugugugugugugugug

SEQ ID NO: 1162948 - RNA, 18 nt, Human
ugugugugugugugugug

SEQ ID NO: 1162949 - RNA, 18 nt, Human
ugugugugugugugugug

SEQ ID NO: 1162950 - RNA, 18 nt, Human
ugugugugugugugugug

SEQ ID NO: 1162951 - RNA, 18 nt, Human
ugugugugugugugugug

SEQ ID NO: 1162952 - RNA, 18 nt, Human
ugugugugugugugugug

SEQ ID NO: 1162953 - RNA, 18 nt, Human
ugugugugugugugugug

SEQ ID NO: 1162954 - RNA, 21 nt, Human
ugugugugugugugugugugu

SEQ ID NO: 1162955 - RNA, 21 nt, Human
ugugugugugugugugugugu

SEQ ID NO: 1162956 - RNA, 21 nt, Human
ugugugugugugugugugugu

SEQ ID NO: 1162957 - RNA, 21 nt, Human
ugugugugugugugugugugu

SEQ ID NO: 1162958 - RNA, 21 nt, Human
ugugugugugugugugugugu

SEQ ID NO: 1162959 - RNA, 21 nt, Human
ugugugugugugugugugugu

SEQ ID NO: 1162960 - RNA, 21 nt, Human
ugugugugugugugugugugu

SEQ ID NO: 1162961 - RNA, 21 nt, Human
ugugugugugugugugugugu

SEQ ID NO: 1162962 - RNA, 21 nt, Human
ugugugugugugugugugugu

SEQ ID NO: 1162963 - RNA, 21 nt, Human
ugugugugugugugugugugu

SEQ ID NO: 1162964 - RNA, 21 nt, Human
ugugugugugugugugugugu

SEQ ID NO: 1162965 - RNA, 21 nt, Human
ugugugugugugugugugugu

SEQ ID NO: 1162966 - RNA, 21 nt, Human
ugugugugugugugugugugu

SEQ ID NO: 1162967 - RNA, 21 nt, Human
ugugugugugugugugugugu

SEQ ID NO: 1162968 - RNA, 21 nt, Human
ugugugugugugugugugugu

SEQ ID NO: 1162969 - RNA, 21 nt, Human
ugugugugugugugugugugu

SEQ ID NO: 1162970 - RNA, 21 nt, Human
ugugugugugugugugugugu

SEQ ID NO: 1162971 - RNA, 21 nt, Human
ugugugugugugugugugugu

SEQ ID NO: 1162972 - RNA, 21 nt, Human
ugugugugugugugugugugu

SEQ ID NO: 1162973 - RNA, 21 nt, Human
ugugugugugugugugugugu

SEQ ID NO: 1162974 - RNA, 21 nt, Human
ugugugugugugugugugugu

SEQ ID NO: 1162975 - RNA, 21 nt, Human
ugugugugugugugugugugu

SEQ ID NO: 1162976 - RNA, 21 nt, Human
ugugugugugugugugugugu

SEQ ID NO: 1162977 - RNA, 21 nt, Human
ugugugugugugugugugugu

SEQ ID NO: 1162978 - RNA, 21 nt, Human
ugugugugugugugugugugu

SEQ ID NO: 1162979 - RNA, 22 nt, Human
ugugugugugugugugugugug

SEQ ID NO: 1162980 - RNA, 22 nt, Human
ugugugugugugugugugugug

SEQ ID NO: 1162981 - RNA, 22 nt, Human
ugugugugugugugugugugug

SEQ ID NO: 1162982 - RNA, 22 nt, Human
ugugugugugugugugugugug

SEQ ID NO: 1162983 - RNA, 22 nt, Human
ugugugugugugugugugugug

SEQ ID NO: 1162984 - RNA, 22 nt, Human
ugugugugugugugugugugug

SEQ ID NO: 1162985 - RNA, 22 nt, Human
ugugugugugugugugugugug

SEQ ID NO: 1162986 - RNA, 23 nt, Human
ugugugugugugugugugugugu

SEQ ID NO: 1162987 - RNA, 22 nt, Human
uuaagccccugcugugugccgg

SEQ ID NO: 1162988 - RNA, 22 nt, Human
uuccugcacccaaggaucucau

SEQ ID NO: 1162989 - RNA, 18 nt, Human
uucuaagccccaggagau

SEQ ID NO: 1162990 - RNA, 19 nt, Human
uucuggggagcgaaggccc

SEQ ID NO: 1162991 - RNA, 23 nt, Human
uuggaauuucccugcuguucugg

SEQ ID NO: 1162992 - RNA, 18 nt, Human
acaauggaugcugccuag

SEQ ID NO: 1162993 - RNA, 20 nt, Human
cacccccugaaagcagauuc

SEQ ID NO: 1162994 - RNA, 24 nt, Human
cauggaaauccccuuacacccccc

SEQ ID NO: 1162995 - RNA, 22 nt, Human
cccccugaaagcagauucaggu

SEQ ID NO: 1162996 - RNA, 22 nt, Human
ccccuuacacccccugaaagca

SEQ ID NO: 1162997 - RNA, 22 nt, Human
ccggaaggcgagaaauaggucu

SEQ ID NO: 1162998 - RNA, 18 nt, Human
ccuagucaagacguagag

SEQ ID NO: 1162999 - RNA, 19 nt, Human
ccuagucaagacguagagc

SEQ ID NO: 1163000 - RNA, 22 nt, Human
cgucacaguaucuccuacucau

SEQ ID NO: 1163001 - RNA, 24 nt, Human
gaaauccccuuacacccccugaaa

SEQ ID NO: 1163002 - RNA, 23 nt, Human
uacccaaggcagccaugcuguga

SEQ ID NO: 1163003 - RNA, 22 nt, Human
ucaaggcagguuugggacucac

SEQ ID NO: 1163004 - RNA, 20 nt, Human
ucaggugugcuagaugguau

SEQ ID NO: 1163005 - RNA, 20 nt, Human
uccccuuacacccccugaaa

SEQ ID NO: 1163006 - RNA, 21 nt, Human
uccguuuccuugagucaaggc

SEQ ID NO: 1163007 - RNA, 22 nt, Human
uccuacucaugugcuuccagaa

SEQ ID NO: 1163008 - RNA, 21 nt, Human
uggaaauccccuuacaccccc

SEQ ID NO: 1163009 - RNA, 21 nt, Human
uggaugcugccuagcuucuag

SEQ ID NO: 1163010 - RNA, 19 nt, Human
ugggacucacucacaaccc

SEQ ID NO: 1163011 - RNA, 20 nt, Human
ugucuugcuggggcauuugc

SEQ ID NO: 1163012 - RNA, 20 nt, Human
uugcuggggcauuugcucuc

SEQ ID NO: 1163013 - RNA, 21 nt, Human
uugcuggggcauuugcucucg

SEQ ID NO: 1163014 - RNA, 22 nt, Human
aauuccuacaaggcaacagucc

SEQ ID NO: 1163015 - RNA, 19 nt, Human
guccuucuggcuaugucac

SEQ ID NO: 1163016 - RNA, 20 nt, Human
aacccaauccuucaauccca

SEQ ID NO: 1163017 - RNA, 25 nt, Human
acauagaaaaauacaucucaguaac

SEQ ID NO: 1163018 - RNA, 20 nt, Human
acaugccgaagacaaaucua

SEQ ID NO: 1163019 - RNA, 21 nt, Human
acaugccgaagacaaaucuac

SEQ ID NO: 1163020 - RNA, 18 nt, Human
accuuaaggcaccagaga

SEQ ID NO: 1163021 - RNA, 22 nt, Human
agaaaacccaauccuucaaucc

SEQ ID NO: 1163022 - RNA, 26 nt, Human
agaaaacccaauccuucaaucccaag

SEQ ID NO: 1163023 - RNA, 22 nt, Human
agcaguuuuagguccaacguac

SEQ ID NO: 1163024 - RNA, 19 nt, Human
agugcuuuaagaagcgugc

SEQ ID NO: 1163025 - RNA, 20 nt, Human
aucaugcauuucauuucuuu

SEQ ID NO: 1163026 - RNA, 21 nt, Human
caaaacucacucuccuacugc

SEQ ID NO: 1163027 - RNA, 18 nt, Human
caaacaacugcacccaag

SEQ ID NO: 1163028 - RNA, 22 nt, Human
caaagccaacucauggucaaaa

SEQ ID NO: 1163029 - RNA, 21 nt, Human
cauaaagggaucaucagccca

SEQ ID NO: 1163030 - RNA, 19 nt, Human
cauagaaaaauacaucuca

SEQ ID NO: 1163031 - RNA, 21 nt, Human
cauuucuuuccuagcuaggag

SEQ ID NO: 1163032 - RNA, 22 nt, Human
ccaagagcucagcuccaggcuc

SEQ ID NO: 1163033 - RNA, 23 nt, Human
ccaaugacacucaugccucuucc

SEQ ID NO: 1163034 - RNA, 19 nt, Human
cccaaaacucacucuccua

SEQ ID NO: 1163035 - RNA, 18 nt, Human
cccacuguuuccauggag

SEQ ID NO: 1163036 - RNA, 22 nt, Human
ccccaucacuuucaauguccua

SEQ ID NO: 1163037 - RNA, 20 nt, Human
ccuccuguagacucugagga

SEQ ID NO: 1163038 - RNA, 22 nt, Human
ccuucuacaccaccuuaaggca

SEQ ID NO: 1163039 - RNA, 21 nt, Human
cgucgcgugucuggccccaaa

SEQ ID NO: 1163040 - RNA, 22 nt, Human
cuagcacagaagaaacccacaa

SEQ ID NO: 1163041 - RNA, 23 nt, Human
cuagcacagaagaaacccacaau

SEQ ID NO: 1163042 - RNA, 19 nt, Human
cucaguaacaagagaaaau

SEQ ID NO: 1163043 - RNA, 18 nt, Human
cuggccccaaaacucacu

SEQ ID NO: 1163044 - RNA, 18 nt, Human
gaccuuguccuuuuccac

SEQ ID NO: 1163045 - RNA, 23 nt, Human
gagaagaggacuaaauacauuaa

SEQ ID NO: 1163046 - RNA, 20 nt, Human
gagcucagcuccaggcucug

SEQ ID NO: 1163047 - RNA, 21 nt, Human
gaggguagaguuacaaagcca

SEQ ID NO: 1163048 - RNA, 21 nt, Human
gaucuuuuccuucuacaccac

SEQ ID NO: 1163049 - RNA, 19 nt, Human
gcacagaagaaacccacaa

SEQ ID NO: 1163050 - RNA, 24 nt, Human
ggaaaaaaacccuuuaauugugaa

SEQ ID NO: 1163051 - RNA, 23 nt, Human
ggaagaacuaaggaguccacaga

SEQ ID NO: 1163052 - RNA, 19 nt, Human
gggaaagagaaaacccaau

SEQ ID NO: 1163053 - RNA, 23 nt, Human
gggaaugggggaguggaaagaga

SEQ ID NO: 1163054 - RNA, 19 nt, Human
uaaauagcacagggaaugg

SEQ ID NO: 1163055 - RNA, 19 nt, Human
uaacaagagaaaaugccgg

SEQ ID NO: 1163056 - RNA, 24 nt, Human
uaagaaccaccagcuguuuaaaag

SEQ ID NO: 1163057 - RNA, 18 nt, Human
uaauuugucucucuccuc

SEQ ID NO: 1163058 - RNA, 22 nt, Human
uacaaagccaacucauggucaa

SEQ ID NO: 1163059 - RNA, 20 nt, Human
uaccaaagugaacuugccaa

SEQ ID NO: 1163060 - RNA, 20 nt, Human
uagcacagaagaaacccaca

SEQ ID NO: 1163061 - RNA, 20 nt, Human
uaggauagaccccagccucc

SEQ ID NO: 1163062 - RNA, 23 nt, Human
uaggauagaccccagccucccac

SEQ ID NO: 1163063 - RNA, 19 nt, Human
uaucugaacuuucauggaa

SEQ ID NO: 1163064 - RNA, 21 nt, Human
ucaccugcaaaagcugguugu

SEQ ID NO: 1163065 - RNA, 23 nt, Human
ucccaccaaaauguguuugugca

SEQ ID NO: 1163066 - RNA, 18 nt, Human
ucccaugguucuccccca

SEQ ID NO: 1163067 - RNA, 24 nt, Human
uccuguagacucugaggacacauu

SEQ ID NO: 1163068 - RNA, 20 nt, Human
ucuucacaccuuacccacug

SEQ ID NO: 1163069 - RNA, 24 nt, Human
ucuuuaaucuucacaccuuaccca

SEQ ID NO: 1163070 - RNA, 26 nt, Human
ucuuuaaucuucacaccuuacccacu

SEQ ID NO: 1163071 - RNA, 18 nt, Human
ugaaagcaguuuuagguc

SEQ ID NO: 1163072 - RNA, 18 nt, Human
ugaaagcaguuuuagguc

SEQ ID NO: 1163073 - RNA, 19 nt, Human
ugaccagucaccaagagcu

SEQ ID NO: 1163074 - RNA, 20 nt, Human
ugagguuaagagagguaggu

SEQ ID NO: 1163075 - RNA, 19 nt, Human
ugcaaacaacugcacccaa

SEQ ID NO: 1163076 - RNA, 21 nt, Human
ugcacaguuagucggcagcag

SEQ ID NO: 1163077 - RNA, 23 nt, Human
ugccaaugacacucaugccucuu

SEQ ID NO: 1163078 - RNA, 24 nt, Human
ugcccaggauucaaccuggaagaa

SEQ ID NO: 1163079 - RNA, 20 nt, Human
ugccgaagacaaaucuacuu

SEQ ID NO: 1163080 - RNA, 19 nt, Human
uggaaagagacuaugugac

SEQ ID NO: 1163081 - RNA, 23 nt, Human
uggaagaacuaaggaguccacag

SEQ ID NO: 1163082 - RNA, 23 nt, Human
uggacacagccugcugguguuuu

SEQ ID NO: 1163083 - RNA, 19 nt, Human
uggcuauaacgucacugca

SEQ ID NO: 1163084 - RNA, 21 nt, Human
ugucuggccccaaaacucacu

SEQ ID NO: 1163085 - RNA, 21 nt, Human
ugugaaaaagcauacauuuua

SEQ ID NO: 1163086 - RNA, 21 nt, Human
ugugcagagcccauuuucaaa

SEQ ID NO: 1163087 - RNA, 18 nt, Human
uguguuugugcagagccc

SEQ ID NO: 1163088 - RNA, 19 nt, Human
uguguuugugcagagccca

SEQ ID NO: 1163089 - RNA, 27 nt, Human
uuaacaaucccauuaauuugucucucu

SEQ ID NO: 1163090 - RNA, 21 nt, Human
uucaaaggggugagggaaggc

SEQ ID NO: 1163091 - RNA, 19 nt, Human
uucaaccuggaagaacuaa

SEQ ID NO: 1163092 - RNA, 18 nt, Human
uucagagacaaaaaaaaa

SEQ ID NO: 1163093 - RNA, 19 nt, Human
uucagagacaaaaaaaaau

SEQ ID NO: 1163094 - RNA, 23 nt, Human
uugucucucuccucccuuguucu

SEQ ID NO: 1163095 - RNA, 20 nt, Human
uuugucucucuccucccuuc

SEQ ID NO: 1163096 - RNA, 24 nt, Human
aagucuucuagcacgacacuguuc

SEQ ID NO: 1163097 - RNA, 22 nt, Human
aaucuggcugucaccacacaga

SEQ ID NO: 1163098 - RNA, 19 nt, Human
acaaaacauaagaguagag

SEQ ID NO: 1163099 - RNA, 27 nt, Human
accgagucccugcaaguuggcaugcgc

SEQ ID NO: 1163100 - RNA, 24 nt, Human
acuguucuguuguuccucucucaa

SEQ ID NO: 1163101 - RNA, 20 nt, Human
agaaaaucaucccuucucuc

SEQ ID NO: 1163102 - RNA, 19 nt, Human
aggaguguuuauguccuug

SEQ ID NO: 1163103 - RNA, 19 nt, Human
aggaugggguguggauugc

SEQ ID NO: 1163104 - RNA, 22 nt, Human
agggugggggucuccuccaggg

SEQ ID NO: 1163105 - RNA, 24 nt, Human
cacacagaccauagcuucugcagc

SEQ ID NO: 1163106 - RNA, 28 nt, Human
caccacacagaccauagcuucugcagca

SEQ ID NO: 1163107 - RNA, 21 nt, Human
caccggcgggcaggagaaaau

SEQ ID NO: 1163108 - RNA, 24 nt, Human
cagaggaugggguguggauugcag

SEQ ID NO: 1163109 - RNA, 23 nt, Human
caucuggaaauucaugagacaag

SEQ ID NO: 1163110 - RNA, 19 nt, Human
cccuggggagguggggcug

SEQ ID NO: 1163111 - RNA, 18 nt, Human
gagagugggccaucugga

SEQ ID NO: 1163112 - RNA, 22 nt, Human
gagguggggcugaaagaaggag

SEQ ID NO: 1163113 - RNA, 19 nt, Human
ggccaucuggaaauucaug

SEQ ID NO: 1163114 - RNA, 21 nt, Human
gggagguggggcugaaagaag

SEQ ID NO: 1163115 - RNA, 22 nt, Human
guaauaaacagcuuugugcaaa

SEQ ID NO: 1163116 - RNA, 25 nt, Human
guaauaaacagcuuugugcaaaaca

SEQ ID NO: 1163117 - RNA, 21 nt, Human
uaaacagcuuugugcaaaaca

SEQ ID NO: 1163118 - RNA, 24 nt, Human
uaacaaauacaaaacauaagagua

SEQ ID NO: 1163119 - RNA, 27 nt, Human
uagagaaucuggcugucaccacacaga

SEQ ID NO: 1163120 - RNA, 20 nt, Human
uagcacgacacuguucuguu

SEQ ID NO: 1163121 - RNA, 23 nt, Human
uagcacgacacuguucuguuguu

SEQ ID NO: 1163122 - RNA, 20 nt, Human
ucccuuuauaaaaauagaau

SEQ ID NO: 1163123 - RNA, 19 nt, Human
ugcagcagaggauggggug

SEQ ID NO: 1163124 - RNA, 20 nt, Human
ugcagggugggggucuccuc

SEQ ID NO: 1163125 - RNA, 21 nt, Human
uguucuguuguuccucucuca

SEQ ID NO: 1163126 - RNA, 22 nt, Human
uuggcaugcgcuacggggucug

SEQ ID NO: 1163127 - RNA, 20 nt, Human
uuuuccaacaagucuucuag

SEQ ID NO: 1163128 - RNA, 22 nt, Human
aaaaaaaaaaaaaauugggcag

SEQ ID NO: 1163129 - RNA, 25 nt, Human
aaaagaaaaaaaaaagucaguagaa

SEQ ID NO: 1163130 - RNA, 21 nt, Human
aaaccccaucuccacaaaaaa

SEQ ID NO: 1163131 - RNA, 24 nt, Human
aacagaccaagacucugucucaaa

SEQ ID NO: 1163132 - RNA, 19 nt, Human
aacaugaugaaaccccauc

SEQ ID NO: 1163133 - RNA, 20 nt, Human
aacaugaugaaaccccaucu

SEQ ID NO: 1163134 - RNA, 21 nt, Human
aacaugaugaaaccccaucuc

SEQ ID NO: 1163135 - RNA, 21 nt, Human
aacaugaugaaaccccaucuc

SEQ ID NO: 1163136 - RNA, 21 nt, Human
aacuguaucaucccuaacccc

SEQ ID NO: 1163137 - RNA, 24 nt, Human
aacuuucuguccccaauacacuuc

SEQ ID NO: 1163138 - RNA, 24 nt, Human
aagguugccucucuucugaaacuc

SEQ ID NO: 1163139 - RNA, 18 nt, Human
aaucguuugaaccuggga

SEQ ID NO: 1163140 - RNA, 24 nt, Human
acagaccaagacucugucucaaaa

SEQ ID NO: 1163141 - RNA, 20 nt, Human
acaugagcuacauucuacuu

SEQ ID NO: 1163142 - RNA, 27 nt, Human
accaacuuugcgaccuugagcacguca

SEQ ID NO: 1163143 - RNA, 19 nt, Human
accagaucaugccacugca

SEQ ID NO: 1163144 - RNA, 23 nt, Human
accccaucuccacaaaaaauaca

SEQ ID NO: 1163145 - RNA, 24 nt, Human
accugaggucaggaguucaagacu

SEQ ID NO: 1163146 - RNA, 21 nt, Human
acuaaacuaaggcacaugagc

SEQ ID NO: 1163147 - RNA, 24 nt, Human
acugcacuccagccuggguaacag

SEQ ID NO: 1163148 - RNA, 19 nt, Human
agaagcauauguguuucca

SEQ ID NO: 1163149 - RNA, 23 nt, Human
agaggaaaaggaaaagguggggg

SEQ ID NO: 1163150 - RNA, 19 nt, Human
agagguugcagugagacca

SEQ ID NO: 1163151 - RNA, 24 nt, Human
agagguugcagugagaccagauca

SEQ ID NO: 1163152 - RNA, 23 nt, Human
agaguuugggagaagcauaugug

SEQ ID NO: 1163153 - RNA, 22 nt, Human
agaucaugccacugcacuccag

SEQ ID NO: 1163154 - RNA, 24 nt, Human
agccuggccaacaugaugaaaccc

SEQ ID NO: 1163155 - RNA, 24 nt, Human
agccuggguaacagaccaagacuc

SEQ ID NO: 1163156 - RNA, 22 nt, Human
aggaaaaggugggggugagggg

SEQ ID NO: 1163157 - RNA, 19 nt, Human
aggagacugaggcaagaga

SEQ ID NO: 1163158 - RNA, 23 nt, Human
aggaguucaagacuagccuggcc

SEQ ID NO: 1163159 - RNA, 23 nt, Human
aggaucaccugaggucaggaguu

SEQ ID NO: 1163160 - RNA, 24 nt, Human
aggaucaccugaggucaggaguuc

SEQ ID NO: 1163161 - RNA, 22 nt, Human
aggcaagagaaucguuugaacc

SEQ ID NO: 1163162 - RNA, 24 nt, Human
aggcaagagaaucguuugaaccug

SEQ ID NO: 1163163 - RNA, 24 nt, Human
aggccgaggcgggaggaucaccug

SEQ ID NO: 1163164 - RNA, 18 nt, Human
aggcgggaggaucaccug

SEQ ID NO: 1163165 - RNA, 21 nt, Human
aggcgggaggaucaccugagg

SEQ ID NO: 1163166 - RNA, 22 nt, Human
aggcgggaggaucaccugaggu

SEQ ID NO: 1163167 - RNA, 23 nt, Human
aggcgggaggaucaccugagguc

SEQ ID NO: 1163168 - RNA, 24 nt, Human
agggaguuuaccuaaaucaguggu

SEQ ID NO: 1163169 - RNA, 18 nt, Human
agggcucacaccuagaaa

SEQ ID NO: 1163170 - RNA, 25 nt, Human
agguagagguugcagugacaacggu

SEQ ID NO: 1163171 - RNA, 19 nt, Human
agguagagguugcagugag

SEQ ID NO: 1163172 - RNA, 24 nt, Human
aucaccugaggucaggaguucaag

SEQ ID NO: 1163173 - RNA, 24 nt, Human
aucaugccacugcacuccagccug

SEQ ID NO: 1163174 - RNA, 21 nt, Human
aucuccacaaaaaauacaaaa

SEQ ID NO: 1163175 - RNA, 21 nt, Human
aucucucucucuugccuccag

SEQ ID NO: 1163176 - RNA, 22 nt, Human
augccacugcacuccagccugg

SEQ ID NO: 1163177 - RNA, 19 nt, Human
augccuguaaucccagcac

SEQ ID NO: 1163178 - RNA, 22 nt, Human
cacagguauacaugcaccaugg

SEQ ID NO: 1163179 - RNA, 24 nt, Human
caccagggcucacaccuagaaauu

SEQ ID NO: 1163180 - RNA, 22 nt, Human
caccugaagagcuuuauaaaaa

SEQ ID NO: 1163181 - RNA, 23 nt, Human
caccugaggucaggaguucaaga

SEQ ID NO: 1163182 - RNA, 22 nt, Human
cacuaaacuaaggcacaugagc

SEQ ID NO: 1163183 - RNA, 19 nt, Human
cacugcacuccagccuggg

SEQ ID NO: 1163184 - RNA, 21 nt, Human
cacugcacuccagccugggua

SEQ ID NO: 1163185 - RNA, 22 nt, Human
cacugcacuccagccuggguaa

SEQ ID NO: 1163186 - RNA, 23 nt, Human
cacugcacuccagccuggguaac

SEQ ID NO: 1163187 - RNA, 24 nt, Human
cacugcacuccagccuggguaaca

SEQ ID NO: 1163188 - RNA, 24 nt, Human
cagaauaucuccugaaaaaccucc

SEQ ID NO: 1163189 - RNA, 22 nt, Human
cagaccaagacucugucucaaa

SEQ ID NO: 1163190 - RNA, 24 nt, Human
cagcacuuugagaggccgaggcgg

SEQ ID NO: 1163191 - RNA, 20 nt, Human
caggcaugguggugcgugcc

SEQ ID NO: 1163192 - RNA, 20 nt, Human
caugccuguaaucccagcac

SEQ ID NO: 1163193 - RNA, 24 nt, Human
caugccuguaaucccagcacuuug

SEQ ID NO: 1163194 - RNA, 22 nt, Human
caugugcagaacaugcagguuu

SEQ ID NO: 1163195 - RNA, 24 nt, Human
cauuccauucaccccagacagcca

SEQ ID NO: 1163196 - RNA, 26 nt, Human
cauuccauucaccccagacagccacu

SEQ ID NO: 1163197 - RNA, 22 nt, Human
ccaauacacuuccuacaaaaca

SEQ ID NO: 1163198 - RNA, 21 nt, Human
ccacuaaacuaaggcacauga

SEQ ID NO: 1163199 - RNA, 20 nt, Human
ccacugcacuccagccuggg

SEQ ID NO: 1163200 - RNA, 20 nt, Human
ccacugcacuccagccuggg

SEQ ID NO: 1163201 - RNA, 20 nt, Human
ccacugcacuccagccuggg

SEQ ID NO: 1163202 - RNA, 21 nt, Human
ccacugcacuccagccugggu

SEQ ID NO: 1163203 - RNA, 22 nt, Human
ccacugcacuccagccugggua

SEQ ID NO: 1163204 - RNA, 24 nt, Human
ccacugcacuccagccuggguaac

SEQ ID NO: 1163205 - RNA, 20 nt, Human
ccagcucauuccauucaccc

SEQ ID NO: 1163206 - RNA, 18 nt, Human
ccaucuccacaaaaaaua

SEQ ID NO: 1163207 - RNA, 23 nt, Human
cccagacagccacuaaacuaagg

SEQ ID NO: 1163208 - RNA, 24 nt, Human
ccccagacagccacuaaacuaagg

SEQ ID NO: 1163209 - RNA, 18 nt, Human
ccccagccacugucuucu

SEQ ID NO: 1163210 - RNA, 20 nt, Human
ccuaacccccagccacuguc

SEQ ID NO: 1163211 - RNA, 22 nt, Human
ccugaaaaaccuccaagaaguc

SEQ ID NO: 1163212 - RNA, 23 nt, Human
ccugaagagcuuuauaaaaacgc

SEQ ID NO: 1163213 - RNA, 18 nt, Human
ccugagucagauaugaag

SEQ ID NO: 1163214 - RNA, 24 nt, Human
ccuggccaacaugaugaaacccca

SEQ ID NO: 1163215 - RNA, 21 nt, Human
ccuguagucucagcuacucag

SEQ ID NO: 1163216 - RNA, 22 nt, Human
ccuguagucucagcuacucagg

SEQ ID NO: 1163217 - RNA, 19 nt, Human
ccuucaagcuuuacacaac

SEQ ID NO: 1163218 - RNA, 20 nt, Human
cgaggcgggaggaucaccug

SEQ ID NO: 1163219 - RNA, 18 nt, Human
cgggaggaucaccugagg

SEQ ID NO: 1163220 - RNA, 24 nt, Human
cgggaggaucaccugaggucagga

SEQ ID NO: 1163221 - RNA, 23 nt, Human
cucaaaauaaaagaaaaaaaaaa

SEQ ID NO: 1163222 - RNA, 24 nt, Human
cucaaaauaaaagaaaaaaaaaag

SEQ ID NO: 1163223 - RNA, 24 nt, Human
cucaugccuguaaucccagcacuu

SEQ ID NO: 1163224 - RNA, 26 nt, Human
cuccaagaagucuaagaggaaaagga

SEQ ID NO: 1163225 - RNA, 21 nt, Human
cuccagcucauuccauucacc

SEQ ID NO: 1163226 - RNA, 24 nt, Human
cugcaccuaucaacccgucaucua

SEQ ID NO: 1163227 - RNA, 20 nt, Human
cuguccccaauacacuuccu

SEQ ID NO: 1163228 - RNA, 21 nt, Human
cuucauaaaugcaacauggaa

SEQ ID NO: 1163229 - RNA, 19 nt, Human
cuucuccaaagagcugaca

SEQ ID NO: 1163230 - RNA, 21 nt, Human
gaaaccccaucuccacaaaaa

SEQ ID NO: 1163231 - RNA, 23 nt, Human
gagaaucguuugaaccugggagg

SEQ ID NO: 1163232 - RNA, 25 nt, Human
gaggcgggaggaucaccugagguca

SEQ ID NO: 1163233 - RNA, 23 nt, Human
gaucaccugaggucaggaguuca

SEQ ID NO: 1163234 - RNA, 24 nt, Human
gaucaccugaggucaggaguucaa

SEQ ID NO: 1163235 - RNA, 19 nt, Human
gcagggcgcgguggcucau

SEQ ID NO: 1163236 - RNA, 24 nt, Human
gccaacaugaugaaaccccaucuc

SEQ ID NO: 1163237 - RNA, 19 nt, Human
gccacugcacuccagccug

SEQ ID NO: 1163238 - RNA, 24 nt, Human
gccacugcacuccagccuggguaa

SEQ ID NO: 1163239 - RNA, 20 nt, Human
gcgugccuguagucucagcu

SEQ ID NO: 1163240 - RNA, 23 nt, Human
ggaucaccugaggucaggaguuc

SEQ ID NO: 1163241 - RNA, 18 nt, Human
ggcagggcgcgguggcuc

SEQ ID NO: 1163242 - RNA, 21 nt, Human
ggcucaugccuguaaucccag

SEQ ID NO: 1163243 - RNA, 24 nt, Human
gggcgcgguggcucaugccuguaa

SEQ ID NO: 1163244 - RNA, 23 nt, Human
gguggcucaugccuguaauccca

SEQ ID NO: 1163245 - RNA, 24 nt, Human
gguggcucaugccuguaaucccag

SEQ ID NO: 1163246 - RNA, 24 nt, Human
guggugcgugccuguagucucagc

SEQ ID NO: 1163247 - RNA, 21 nt, Human
uaacagaccaagacucugucu

SEQ ID NO: 1163248 - RNA, 18 nt, Human
uaaccaacuuugcgaccu

SEQ ID NO: 1163249 - RNA, 19 nt, Human
uaagaggaaaaggaaaagg

SEQ ID NO: 1163250 - RNA, 24 nt, Human
uaagccccguaugcauuaguuauu

SEQ ID NO: 1163251 - RNA, 26 nt, Human
uacaaaaaaaaaaaaaaauugggcag

SEQ ID NO: 1163252 - RNA, 24 nt, Human
uagaaugaaauaagguugccucuc

SEQ ID NO: 1163253 - RNA, 24 nt, Human
uagccuggccaacaugaugaaacc

SEQ ID NO: 1163254 - RNA, 20 nt, Human
uaggggcagggcgcgguggc

SEQ ID NO: 1163255 - RNA, 18 nt, Human
uaucaacccgucaucuag

SEQ ID NO: 1163256 - RNA, 23 nt, Human
ucaugccacugcacuccagccug

SEQ ID NO: 1163257 - RNA, 22 nt, Human
ucaugccuguaaucccagcacu

SEQ ID NO: 1163258 - RNA, 23 nt, Human
ucccagucuuacccuaaccaacu

SEQ ID NO: 1163259 - RNA, 26 nt, Human
uccccaauacacuuccuacaaaacaa

SEQ ID NO: 1163260 - RNA, 18 nt, Human
ucguuugaaccugggagg

SEQ ID NO: 1163261 - RNA, 24 nt, Human
ucucaaaauaaaagaaaaaaaaaa

SEQ ID NO: 1163262 - RNA, 23 nt, Human
ucuuacccuaaccaacuuugcga

SEQ ID NO: 1163263 - RNA, 24 nt, Human
ugaaccugggagguagagguugca

SEQ ID NO: 1163264 - RNA, 24 nt, Human
ugaagauaggaaccuucucccuuc

SEQ ID NO: 1163265 - RNA, 20 nt, Human
ugagaccagaucaugccacu

SEQ ID NO: 1163266 - RNA, 20 nt, Human
ugagaggccgaggcgggagg

SEQ ID NO: 1163267 - RNA, 24 nt, Human
ugagaggccgaggcgggaggauca

SEQ ID NO: 1163268 - RNA, 20 nt, Human
ugaggcaagagaaucguuug

SEQ ID NO: 1163269 - RNA, 24 nt, Human
ugaggcaagagaaucguuugaacc

SEQ ID NO: 1163270 - RNA, 25 nt, Human
ugaggcaagagaaucguuugaaccu

SEQ ID NO: 1163271 - RNA, 22 nt, Human
ugaggggagagucccugaguca

SEQ ID NO: 1163272 - RNA, 20 nt, Human
ugcaccauggugguuugcug

SEQ ID NO: 1163273 - RNA, 18 nt, Human
ugccuguaaucccagcac

SEQ ID NO: 1163274 - RNA, 24 nt, Human
ugccuguagucucagcuacucagg

SEQ ID NO: 1163275 - RNA, 19 nt, Human
uggaaagucaguaggggca

SEQ ID NO: 1163276 - RNA, 22 nt, Human
uggcucaugccuguaaucccag

SEQ ID NO: 1163277 - RNA, 24 nt, Human
uggcucaugccuguaaucccagca

SEQ ID NO: 1163278 - RNA, 23 nt, Human
ugggagguagagguugcagugag

SEQ ID NO: 1163279 - RNA, 22 nt, Human
ugggauccaugugcagaacaug

SEQ ID NO: 1163280 - RNA, 21 nt, Human
ugggggugaggggagaguccc

SEQ ID NO: 1163281 - RNA, 18 nt, Human
uggugcgugccuguaguc

SEQ ID NO: 1163282 - RNA, 24 nt, Human
ugguggugcgugccuguagucuca

SEQ ID NO: 1163283 - RNA, 24 nt, Human
uugaaccugggagguagagguugc

SEQ ID NO: 1163284 - RNA, 20 nt, Human
uuuacacaacuuucuguccc

SEQ ID NO: 1163285 - RNA, 20 nt, Human
uuuauaaaaacgcccacacc

SEQ ID NO: 1163286 - RNA, 19 nt, Human
aaaaaaaucaauggaccca

SEQ ID NO: 1163287 - RNA, 21 nt, Human
aaaaaaaucaauggacccaaa

SEQ ID NO: 1163288 - RNA, 23 nt, Human
aaaaagaaaacaauagaaaaaaa

SEQ ID NO: 1163289 - RNA, 19 nt, Human
aaaaaggugucaugccucu

SEQ ID NO: 1163290 - RNA, 20 nt, Human
aaaaaugacaaaggaagaaa

SEQ ID NO: 1163291 - RNA, 22 nt, Human
aaaagaaccuaaaacaaggaca

SEQ ID NO: 1163292 - RNA, 23 nt, Human
aaacagaaaauccaaaagccuca

SEQ ID NO: 1163293 - RNA, 19 nt, Human
aaaccaugacagacacauc

SEQ ID NO: 1163294 - RNA, 24 nt, Human
aaagaaccuaaaacaaggacagca

SEQ ID NO: 1163295 - RNA, 26 nt, Human
aaagauccugacucaaaaaaaaagac

SEQ ID NO: 1163296 - RNA, 20 nt, Human
aaaguaaaauagcaagccag

SEQ ID NO: 1163297 - RNA, 18 nt, Human
aaagugcugggauuacaa

SEQ ID NO: 1163298 - RNA, 24 nt, Human
aaagugcugggauuacaagcguga

SEQ ID NO: 1163299 - RNA, 19 nt, Human
aaagugcugggauuccagg

SEQ ID NO: 1163300 - RNA, 24 nt, Human
aaagugcugggauuccaggcauga

SEQ ID NO: 1163301 - RNA, 20 nt, Human
aacacagcgagacccagucu

SEQ ID NO: 1163302 - RNA, 21 nt, Human
aacacagcgagacccagucuc

SEQ ID NO: 1163303 - RNA, 25 nt, Human
aaccauuaagaaaguaaaauagcaa

SEQ ID NO: 1163304 - RNA, 23 nt, Human
aaccuuuucuuuaaauuagcaga

SEQ ID NO: 1163305 - RNA, 25 nt, Human
aagaaaacacaaauggcccagagca

SEQ ID NO: 1163306 - RNA, 22 nt, Human
aagaaacagaaaauccaaaagc

SEQ ID NO: 1163307 - RNA, 24 nt, Human
aagaaaguaaaauagcaagccaga

SEQ ID NO: 1163308 - RNA, 22 nt, Human
aaguagcugggauuacaggugc

SEQ ID NO: 1163309 - RNA, 23 nt, Human
aaguagguuucuuuggggaaaau

SEQ ID NO: 1163310 - RNA, 28 nt, Human
aagugaccucaugagcaucucacuaggu

SEQ ID NO: 1163311 - RNA, 19 nt, Human
aagugcugggauuacaagc

SEQ ID NO: 1163312 - RNA, 19 nt, Human
aagugcugggauuacaagc

SEQ ID NO: 1163313 - RNA, 26 nt, Human
aagugcugggauuacaagcgugagcc

SEQ ID NO: 1163314 - RNA, 19 nt, Human
aagugcugggauuccaggc

SEQ ID NO: 1163315 - RNA, 24 nt, Human
aaucacuugagaccaggacuccga

SEQ ID NO: 1163316 - RNA, 24 nt, Human
aaugaaaaaccuaagcaaaaagaa

SEQ ID NO: 1163317 - RNA, 23 nt, Human
aaugacaaaggaagaaacagaaa

SEQ ID NO: 1163318 - RNA, 24 nt, Human
aauuuuuuauuuuuaguagagaug

SEQ ID NO: 1163319 - RNA, 18 nt, Human
acaaaggaagaaacagaa

SEQ ID NO: 1163320 - RNA, 20 nt, Human
accauggccacagggacuua

SEQ ID NO: 1163321 - RNA, 18 nt, Human
accauguuggccaggcug

SEQ ID NO: 1163322 - RNA, 23 nt, Human
acccagucucuauaaaaaaaacc

SEQ ID NO: 1163323 - RNA, 18 nt, Human
acgggguuucaccauguu

SEQ ID NO: 1163324 - RNA, 19 nt, Human
acgggguuucaccauguug

SEQ ID NO: 1163325 - RNA, 21 nt, Human
acgggguuucaccauguugac

SEQ ID NO: 1163326 - RNA, 24 nt, Human
acgggguuucaccauguugacuag

SEQ ID NO: 1163327 - RNA, 21 nt, Human
acguuggccucccaaagugcu

SEQ ID NO: 1163328 - RNA, 24 nt, Human
acuccgagaccagccugggcaaca

SEQ ID NO: 1163329 - RNA, 23 nt, Human
acugcacuccaagccugugcgag

SEQ ID NO: 1163330 - RNA, 21 nt, Human
agaaaacacaaauggcccaga

SEQ ID NO: 1163331 - RNA, 28 nt, Human
agaaaagagcaaaagucaaugaaaaaga

SEQ ID NO: 1163332 - RNA, 22 nt, Human
agaaaggaaauucauaagaaaa

SEQ ID NO: 1163333 - RNA, 23 nt, Human
agaagaaaggaaauucauaagaa

SEQ ID NO: 1163334 - RNA, 22 nt, Human
agacaaugaacauccaagccca

SEQ ID NO: 1163335 - RNA, 18 nt, Human
agccuccagaguagcugg

SEQ ID NO: 1163336 - RNA, 24 nt, Human
agccugggcaacacagcgagaccc

SEQ ID NO: 1163337 - RNA, 23 nt, Human
aggaagaaacagaaaauccaaaa

SEQ ID NO: 1163338 - RNA, 24 nt, Human
aggaagugaccucaugagcaucuc

SEQ ID NO: 1163339 - RNA, 23 nt, Human
aggacuccgagaccagccugggc

SEQ ID NO: 1163340 - RNA, 18 nt, Human
aggcaggugaaucacuug

SEQ ID NO: 1163341 - RNA, 26 nt, Human
aggcaggugaaucacuugagaccagg

SEQ ID NO: 1163342 - RNA, 20 nt, Human
aggcaugcaccaccacaccc

SEQ ID NO: 1163343 - RNA, 25 nt, Human
aggcuggagugcaguggugugaucu

SEQ ID NO: 1163344 - RNA, 24 nt, Human
aggugauccauccacguuggccuc

SEQ ID NO: 1163345 - RNA, 19 nt, Human
agguggaggcaggugaauc

SEQ ID NO: 1163346 - RNA, 23 nt, Human
aggugggaggcucgcuugagccc

SEQ ID NO: 1163347 - RNA, 22 nt, Human
aguagagaugggguuucaccau

SEQ ID NO: 1163348 - RNA, 21 nt, Human
aguagcugggauuacaggcau

SEQ ID NO: 1163349 - RNA, 23 nt, Human
aguagcugggauuacaggcaugc

SEQ ID NO: 1163350 - RNA, 19 nt, Human
agucaaugaaaaagaaaac

SEQ ID NO: 1163351 - RNA, 20 nt, Human
agugcaauggcgcgaucucg

SEQ ID NO: 1163352 - RNA, 24 nt, Human
agugcaauggcgcgaucucggcuc

SEQ ID NO: 1163353 - RNA, 19 nt, Human
agugcaguggugugaucuc

SEQ ID NO: 1163354 - RNA, 21 nt, Human
agugcaguggugugaucucag

SEQ ID NO: 1163355 - RNA, 23 nt, Human
agugcaguggugugaucucagcu

SEQ ID NO: 1163356 - RNA, 24 nt, Human
agugcaguggugugaucucagcuc

SEQ ID NO: 1163357 - RNA, 24 nt, Human
agugcugggauuacaagcgugagc

SEQ ID NO: 1163358 - RNA, 24 nt, Human
aguggugugaucucagcucacugc

SEQ ID NO: 1163359 - RNA, 20 nt, Human
aguucaagugauucuccugc

SEQ ID NO: 1163360 - RNA, 23 nt, Human
auccgcccaccuccaccucccaa

SEQ ID NO: 1163361 - RNA, 25 nt, Human
aucgcaccacugcacuccaagccug

SEQ ID NO: 1163362 - RNA, 19 nt, Human
aucuuuaaaaaaaugacaa

SEQ ID NO: 1163363 - RNA, 18 nt, Human
augggguuucaccauguu

SEQ ID NO: 1163364 - RNA, 22 nt, Human
augggguuucaccauguuggcc

SEQ ID NO: 1163365 - RNA, 23 nt, Human
augggguuucaccauguuggcca

SEQ ID NO: 1163366 - RNA, 24 nt, Human
augggguuucaccauguuggccag

SEQ ID NO: 1163367 - RNA, 21 nt, Human
auuacaggugccugccaccau

SEQ ID NO: 1163368 - RNA, 18 nt, Human
auucuccugccucagccu

SEQ ID NO: 1163369 - RNA, 22 nt, Human
caaaagaaccuaaaacaaggac

SEQ ID NO: 1163370 - RNA, 19 nt, Human
caaacccaacacugagccg

SEQ ID NO: 1163371 - RNA, 23 nt, Human
caaacccaacacugagccgggag

SEQ ID NO: 1163372 - RNA, 24 nt, Human
caaagugcugggauuacaagcgug

SEQ ID NO: 1163373 - RNA, 24 nt, Human
caaagugcugggauuccaggcaug

SEQ ID NO: 1163374 - RNA, 23 nt, Human
caaccuccaccuccugaguucaa

SEQ ID NO: 1163375 - RNA, 21 nt, Human
caagacaaugaacauccaagc

SEQ ID NO: 1163376 - RNA, 23 nt, Human
caagacaaugaacauccaagccc

SEQ ID NO: 1163377 - RNA, 22 nt, Human
caagccauucuccugccucagc

SEQ ID NO: 1163378 - RNA, 23 nt, Human
caagccugugcgagaaagauccu

SEQ ID NO: 1163379 - RNA, 22 nt, Human
caagugauucuccugccucagc

SEQ ID NO: 1163380 - RNA, 27 nt, Human
caagugauucuccugccucagccucca

SEQ ID NO: 1163381 - RNA, 22 nt, Human
caauagaaaaaaaaaaucaaug

SEQ ID NO: 1163382 - RNA, 19 nt, Human
caccacugcacuccaagcc

SEQ ID NO: 1163383 - RNA, 24 nt, Human
caccauguugacuagguuggucuc

SEQ ID NO: 1163384 - RNA, 21 nt, Human
caccauguuggccaggcuggu

SEQ ID NO: 1163385 - RNA, 24 nt, Human
caccauguuggccaggcuggucuc

SEQ ID NO: 1163386 - RNA, 27 nt, Human
caccauguuggccaggcuggucucaaa

SEQ ID NO: 1163387 - RNA, 19 nt, Human
caccgcacccggccggcuc

SEQ ID NO: 1163388 - RNA, 21 nt, Human
caccuccaccucccaaagugc

SEQ ID NO: 1163389 - RNA, 24 nt, Human
caccuccaccucccaaagugcugg

SEQ ID NO: 1163390 - RNA, 18 nt, Human
caccuguaauccuggcac

SEQ ID NO: 1163391 - RNA, 22 nt, Human
caccuguaauccuggcacuccg

SEQ ID NO: 1163392 - RNA, 27 nt, Human
cacgugauccgcccaccuccaccuccc

SEQ ID NO: 1163393 - RNA, 21 nt, Human
cacugcaaccuccaccuccug

SEQ ID NO: 1163394 - RNA, 18 nt, Human
cacugcaaccucugccuc

SEQ ID NO: 1163395 - RNA, 21 nt, Human
cacugcaaccucugccuccca

SEQ ID NO: 1163396 - RNA, 22 nt, Human
cacugcacuccaagccugugcg

SEQ ID NO: 1163397 - RNA, 23 nt, Human
cacugcacuccaagccugugcga

SEQ ID NO: 1163398 - RNA, 24 nt, Human
cagaguagcugggauuacaggcau

SEQ ID NO: 1163399 - RNA, 21 nt, Human
caggaaaagcccucagcaaau

SEQ ID NO: 1163400 - RNA, 21 nt, Human
caggcaugagccaccgcaccc

SEQ ID NO: 1163401 - RNA, 19 nt, Human
caggugccugccaccaugc

SEQ ID NO: 1163402 - RNA, 23 nt, Human
caggugccugccaccaugccugg

SEQ ID NO: 1163403 - RNA, 18 nt, Human
caucaaacuggaaaccuu

SEQ ID NO: 1163404 - RNA, 24 nt, Human
caugcagagaaaaggccaaugcac

SEQ ID NO: 1163405 - RNA, 24 nt, Human
cauguuggccaggcuggucucaaa

SEQ ID NO: 1163406 - RNA, 20 nt, Human
ccaaagugcugggauuacaa

SEQ ID NO: 1163407 - RNA, 22 nt, Human
ccaaagugcugggauuacaagc

SEQ ID NO: 1163408 - RNA, 24 nt, Human
ccaaagugcugggauuacaagcgu

SEQ ID NO: 1163409 - RNA, 24 nt, Human
ccaaagugcugggauuccaggcau

SEQ ID NO: 1163410 - RNA, 21 nt, Human
ccaaguagcugggauuacagg

SEQ ID NO: 1163411 - RNA, 24 nt, Human
ccaccuccugaguucaagugauuc

SEQ ID NO: 1163412 - RNA, 18 nt, Human
ccaccuguaauccuggca

SEQ ID NO: 1163413 - RNA, 19 nt, Human
ccacugcacuccaagccug

SEQ ID NO: 1163414 - RNA, 20 nt, Human
ccacugcacuccaagccugu

SEQ ID NO: 1163415 - RNA, 22 nt, Human
ccacugcacuccaagccugugc

SEQ ID NO: 1163416 - RNA, 19 nt, Human
ccagaguagcugggauuac

SEQ ID NO: 1163417 - RNA, 23 nt, Human
ccagaguagcugggauuacaggc

SEQ ID NO: 1163418 - RNA, 24 nt, Human
ccagaguagcugggauuacaggca

SEQ ID NO: 1163419 - RNA, 25 nt, Human
ccagaguagcugggauuacaggcau

SEQ ID NO: 1163420 - RNA, 21 nt, Human
ccaggcaugagccaccgcacc

SEQ ID NO: 1163421 - RNA, 23 nt, Human
ccaggccggagugcaauggcgcg

SEQ ID NO: 1163422 - RNA, 24 nt, Human
ccaggcuggguguggcggcucccg

SEQ ID NO: 1163423 - RNA, 24 nt, Human
ccagggaagugcaaguuacuacaa

SEQ ID NO: 1163424 - RNA, 22 nt, Human
ccagugcaaacccaacacugag

SEQ ID NO: 1163425 - RNA, 23 nt, Human
ccagugucccucaagagcauucc

SEQ ID NO: 1163426 - RNA, 23 nt, Human
cccaaguagcugggauuacaggu

SEQ ID NO: 1163427 - RNA, 24 nt, Human
cccaaguagcugggauuacaggug

SEQ ID NO: 1163428 - RNA, 20 nt, Human
cccagguucaagccauucuc

SEQ ID NO: 1163429 - RNA, 23 nt, Human
ccucaugucuauuuuuaaaaauc

SEQ ID NO: 1163430 - RNA, 24 nt, Human
ccucccagguucaagccauucucc

SEQ ID NO: 1163431 - RNA, 24 nt, Human
ccuccugaguucaagugauucucc

SEQ ID NO: 1163432 - RNA, 22 nt, Human
ccucgcucuguugcccaggcug

SEQ ID NO: 1163433 - RNA, 23 nt, Human
ccucgcucuguugcccaggcugg

SEQ ID NO: 1163434 - RNA, 24 nt, Human
ccucgcucuguugcccaggcugga

SEQ ID NO: 1163435 - RNA, 26 nt, Human
ccucgcucuguugcccaggcuggagu

SEQ ID NO: 1163436 - RNA, 27 nt, Human
ccucgcucuguugcccaggcuggagug

SEQ ID NO: 1163437 - RNA, 24 nt, Human
ccugaccucaggugauccauccac

SEQ ID NO: 1163438 - RNA, 23 nt, Human
ccugaguucaagugauucuccug

SEQ ID NO: 1163439 - RNA, 22 nt, Human
ccugggaauaacgcuaagacca

SEQ ID NO: 1163440 - RNA, 21 nt, Human
ccuguagucccagcuacucag

SEQ ID NO: 1163441 - RNA, 22 nt, Human
ccuguagucccagcuacucaga

SEQ ID NO: 1163442 - RNA, 19 nt, Human
cgaaaacaaaagaaucaaa

SEQ ID NO: 1163443 - RNA, 24 nt, Human
cgaggugggaggcucgcuugagcc

SEQ ID NO: 1163444 - RNA, 24 nt, Human
cgcucuguugcccaggcuggagug

SEQ ID NO: 1163445 - RNA, 24 nt, Human
cgggguuucaccauguugacuagg

SEQ ID NO: 1163446 - RNA, 25 nt, Human
cgugagccaccaugccaggccucau

SEQ ID NO: 1163447 - RNA, 23 nt, Human
cucaaaaaaaaagacaagauuuc

SEQ ID NO: 1163448 - RNA, 24 nt, Human
cucacgugauccgcccaccuccac

SEQ ID NO: 1163449 - RNA, 27 nt, Human
cucacugcaaccuccaccuccugaguu

SEQ ID NO: 1163450 - RNA, 24 nt, Human
cucacugcaaccucugccucccag

SEQ ID NO: 1163451 - RNA, 24 nt, Human
cucacugcaaccucugccucccag

SEQ ID NO: 1163452 - RNA, 18 nt, Human
cucagaagaccgaggugg

SEQ ID NO: 1163453 - RNA, 24 nt, Human
cucagccuccagaguagcugggau

SEQ ID NO: 1163454 - RNA, 24 nt, Human
cucagccucccaaguagcugggau

SEQ ID NO: 1163455 - RNA, 19 nt, Human
cuccgagaccagccugggc

SEQ ID NO: 1163456 - RNA, 23 nt, Human
cuccgagaccagccugggcaaca

SEQ ID NO: 1163457 - RNA, 19 nt, Human
cuccugaguucaagugauu

SEQ ID NO: 1163458 - RNA, 24 nt, Human
cucgcucuguugcccaggcuggag

SEQ ID NO: 1163459 - RNA, 23 nt, Human
cucgcuugagcccaggaguuuga

SEQ ID NO: 1163460 - RNA, 23 nt, Human
cucuguugcccaggcuggagugc

SEQ ID NO: 1163461 - RNA, 20 nt, Human
cugacucaaaaaaaaagaca

SEQ ID NO: 1163462 - RNA, 23 nt, Human
cugcaaccuccaccuccugaguu

SEQ ID NO: 1163463 - RNA, 24 nt, Human
cugcaaccuccaccuccugaguuc

SEQ ID NO: 1163464 - RNA, 23 nt, Human
cugcaaccucugccucccagguu

SEQ ID NO: 1163465 - RNA, 24 nt, Human
cugcaaccucugccucccagguuc

SEQ ID NO: 1163466 - RNA, 23 nt, Human
cugccucagccuccagaguagcu

SEQ ID NO: 1163467 - RNA, 23 nt, Human
cugccucagccucccaaguagcu

SEQ ID NO: 1163468 - RNA, 20 nt, Human
cugccucccagguucaagcc

SEQ ID NO: 1163469 - RNA, 22 nt, Human
cugcugagacgccgacuggagu

SEQ ID NO: 1163470 - RNA, 22 nt, Human
cugcugagacgccgacuggagu

SEQ ID NO: 1163471 - RNA, 22 nt, Human
cugcugagacgccgacuggagu

SEQ ID NO: 1163472 - RNA, 24 nt, Human
cuggagugcaguggugugaucuca

SEQ ID NO: 1163473 - RNA, 25 nt, Human
cuggccaaagaaugugauuuguauu

SEQ ID NO: 1163474 - RNA, 22 nt, Human
cuguugagacgccgacuggagu

SEQ ID NO: 1163475 - RNA, 22 nt, Human
cuguugagacgccgacuggagu

SEQ ID NO: 1163476 - RNA, 22 nt, Human
cuguugagacgccgacuggagu

SEQ ID NO: 1163477 - RNA, 22 nt, Human
cuguugagacgccgacuggagu

SEQ ID NO: 1163478 - RNA, 24 nt, Human
gaaaaagaaaacaauagaaaaaaa

SEQ ID NO: 1163479 - RNA, 25 nt, Human
gaaaacaauagaaaaaaaaaaucaa

SEQ ID NO: 1163480 - RNA, 20 nt, Human
gaaaacacaaauggcccaga

SEQ ID NO: 1163481 - RNA, 18 nt, Human
gaaaggcagcugaccaca

SEQ ID NO: 1163482 - RNA, 23 nt, Human
gaagucuugcucuuguccccagg

SEQ ID NO: 1163483 - RNA, 19 nt, Human
gacaaaggaagaaacagaa

SEQ ID NO: 1163484 - RNA, 19 nt, Human
gacacaucacaugacaaga

SEQ ID NO: 1163485 - RNA, 23 nt, Human
gacccagucucuauaaaaaaaac

SEQ ID NO: 1163486 - RNA, 24 nt, Human
gaccucacgugauccgcccaccuc

SEQ ID NO: 1163487 - RNA, 24 nt, Human
gaccucaggugauccauccacguu

SEQ ID NO: 1163488 - RNA, 20 nt, Human
gagacgggguuucaccaugu

SEQ ID NO: 1163489 - RNA, 18 nt, Human
gagaugggguuucaccau

SEQ ID NO: 1163490 - RNA, 24 nt, Human
gagaugggguuucaccauguuggc

SEQ ID NO: 1163491 - RNA, 19 nt, Human
gagcauuccuacacaggag

SEQ ID NO: 1163492 - RNA, 18 nt, Human
gagcccaggaguuugagg

SEQ ID NO: 1163493 - RNA, 25 nt, Human
gaggcaggugaaucacuugagacca

SEQ ID NO: 1163494 - RNA, 23 nt, Human
gaggugggaggcucgcuugagcc

SEQ ID NO: 1163495 - RNA, 22 nt, Human
gagguugcagugagcuaugauc

SEQ ID NO: 1163496 - RNA, 23 nt, Human
gagguugcagugagcuaugaucg

SEQ ID NO: 1163497 - RNA, 18 nt, Human
gauuacaagcgugagcca

SEQ ID NO: 1163498 - RNA, 22 nt, Human
gauuacaagcgugagccaccau

SEQ ID NO: 1163499 - RNA, 18 nt, Human
gauuacaggugccugcca

SEQ ID NO: 1163500 - RNA, 24 nt, Human
gauuacaggugccugccaccaugc

SEQ ID NO: 1163501 - RNA, 23 nt, Human
gauuccaggcaugagccaccgca

SEQ ID NO: 1163502 - RNA, 21 nt, Human
gauucuccugccucagccucc

SEQ ID NO: 1163503 - RNA, 22 nt, Human
gcaaccuccaccuccugaguuc

SEQ ID NO: 1163504 - RNA, 22 nt, Human
gcaaccucugccucccagguuc

SEQ ID NO: 1163505 - RNA, 23 nt, Human
gcagagcauagugaugcaugccu

SEQ ID NO: 1163506 - RNA, 21 nt, Human
gcaugcaccaccacacccugc

SEQ ID NO: 1163507 - RNA, 20 nt, Human
gcccaggcuggagugcagug

SEQ ID NO: 1163508 - RNA, 24 nt, Human
gcccaggcuggagugcaguggugu

SEQ ID NO: 1163509 - RNA, 19 nt, Human
gccggagugcaauggcgcg

SEQ ID NO: 1163510 - RNA, 18 nt, Human
gccgggagagacugagcc

SEQ ID NO: 1163511 - RNA, 20 nt, Human
gccucagccucccaaguagc

SEQ ID NO: 1163512 - RNA, 18 nt, Human
gcuacucagaagaccgag

SEQ ID NO: 1163513 - RNA, 23 nt, Human
gcuggucucaaacuccugaccuc

SEQ ID NO: 1163514 - RNA, 20 nt, Human
ggacuuaccuggaaaugcca

SEQ ID NO: 1163515 - RNA, 20 nt, Human
ggaggcaggugaaucacuug

SEQ ID NO: 1163516 - RNA, 23 nt, Human
ggagugcaauggcgcgaucucgg

SEQ ID NO: 1163517 - RNA, 22 nt, Human
ggaguuugagguugcagugagc

SEQ ID NO: 1163518 - RNA, 24 nt, Human
ggauuacaagcgugagccaccaug

SEQ ID NO: 1163519 - RNA, 21 nt, Human
ggcucccgccaccuguaaucc

SEQ ID NO: 1163520 - RNA, 22 nt, Human
ggcuggagugcaguggugugau

SEQ ID NO: 1163521 - RNA, 24 nt, Human
ggcuggucucaaacuccugaccuc

SEQ ID NO: 1163522 - RNA, 23 nt, Human
gggguuucaccauguugacuagg

SEQ ID NO: 1163523 - RNA, 22 nt, Human
gggguuucaccauguuggccag

SEQ ID NO: 1163524 - RNA, 20 nt, Human
ggucucaaacuccugaccuc

SEQ ID NO: 1163525 - RNA, 23 nt, Human
guagagaugggguuucaccaugu

SEQ ID NO: 1163526 - RNA, 18 nt, Human
guagcugggauuacaggc

SEQ ID NO: 1163527 - RNA, 20 nt, Human
guagcugggauuacaggcau

SEQ ID NO: 1163528 - RNA, 18 nt, Human
guagcugggauuacaggu

SEQ ID NO: 1163529 - RNA, 21 nt, Human
gugaaucacuugagaccagga

SEQ ID NO: 1163530 - RNA, 24 nt, Human
gugauccauccacguuggccuccc

SEQ ID NO: 1163531 - RNA, 24 nt, Human
gugauccgcccaccuccaccuccc

SEQ ID NO: 1163532 - RNA, 21 nt, Human
gugauucuccugccucagccu

SEQ ID NO: 1163533 - RNA, 22 nt, Human
uaaacucuuagcuagucugauc

SEQ ID NO: 1163534 - RNA, 22 nt, Human
uaaauaggcaaaagaauuaagu

SEQ ID NO: 1163535 - RNA, 24 nt, Human
uaaauuguuuugauaacuuagaug

SEQ ID NO: 1163536 - RNA, 21 nt, Human
uaagaaaagagcaaaagucaa

SEQ ID NO: 1163537 - RNA, 21 nt, Human
uaagugcaccagugcaaaccc

SEQ ID NO: 1163538 - RNA, 21 nt, Human
uaaugccaauccuauacaagg

SEQ ID NO: 1163539 - RNA, 24 nt, Human
uaauggagacgggguuucaccaug

SEQ ID NO: 1163540 - RNA, 24 nt, Human
uaauuuuuauauuuuuaauggaga

SEQ ID NO: 1163541 - RNA, 22 nt, Human
uaauuuuuuauuuuuaguagag

SEQ ID NO: 1163542 - RNA, 23 nt, Human
uaauuuuuuauuuuuaguagaga

SEQ ID NO: 1163543 - RNA, 23 nt, Human
uagaaagaccacuagaacggaaa

SEQ ID NO: 1163544 - RNA, 22 nt, Human
uagaacggaaaaauaaaaaaua

SEQ ID NO: 1163545 - RNA, 22 nt, Human
uagagaugggguuucaccaugu

SEQ ID NO: 1163546 - RNA, 24 nt, Human
uaguagagaugggguuucaccaug

SEQ ID NO: 1163547 - RNA, 26 nt, Human
uaguagagaugggguuucaccauguu

SEQ ID NO: 1163548 - RNA, 24 nt, Human
uagugaugcaugccuguaguccca

SEQ ID NO: 1163549 - RNA, 19 nt, Human
ucaaaagaaccuaaaacaa

SEQ ID NO: 1163550 - RNA, 23 nt, Human
ucaaacuccugaccucacgugau

SEQ ID NO: 1163551 - RNA, 25 nt, Human
ucaagccauucuccugccucagccu

SEQ ID NO: 1163552 - RNA, 23 nt, Human
ucaauugcacucuggccaaagaa

SEQ ID NO: 1163553 - RNA, 23 nt, Human
ucacacacggcagucaacgcgug

SEQ ID NO: 1163554 - RNA, 23 nt, Human
ucacacacggcagucaacgcgug

SEQ ID NO: 1163555 - RNA, 23 nt, Human
ucacacacggcagucaacgcgug

SEQ ID NO: 1163556 - RNA, 23 nt, Human
ucacacacggcagucaacgcgug

SEQ ID NO: 1163557 - RNA, 23 nt, Human
ucacacacggcagucaacgcgug

SEQ ID NO: 1163558 - RNA, 23 nt, Human
ucacacacggcagucaacgcgug

SEQ ID NO: 1163559 - RNA, 23 nt, Human
ucacacacggcagucaacgcgug

SEQ ID NO: 1163560 - RNA, 23 nt, Human
ucacacacggcagucaacgcgug

SEQ ID NO: 1163561 - RNA, 23 nt, Human
ucacacacggcagucaacgcgug

SEQ ID NO: 1163562 - RNA, 23 nt, Human
ucacacacggcagucaacgcgug

SEQ ID NO: 1163563 - RNA, 23 nt, Human
ucacacacggcagucaacgcgug

SEQ ID NO: 1163564 - RNA, 23 nt, Human
ucacacacggcagucaacgcgug

SEQ ID NO: 1163565 - RNA, 19 nt, Human
ucacugcaaccuccaccuc

SEQ ID NO: 1163566 - RNA, 20 nt, Human
ucacugcaaccuccaccucc

SEQ ID NO: 1163567 - RNA, 22 nt, Human
ucacugcaaccuccaccuccug

SEQ ID NO: 1163568 - RNA, 25 nt, Human
ucacugcaaccuccaccuccugagu

SEQ ID NO: 1163569 - RNA, 27 nt, Human
ucacugcaaccuccaccuccugaguuc

SEQ ID NO: 1163570 - RNA, 19 nt, Human
ucacugcaaccucugccuc

SEQ ID NO: 1163571 - RNA, 24 nt, Human
ucacugcaaccucugccucccagg

SEQ ID NO: 1163572 - RNA, 25 nt, Human
ucacugcaaccucugccucccaggu

SEQ ID NO: 1163573 - RNA, 20 nt, Human
ucagccucccaaguagcugg

SEQ ID NO: 1163574 - RNA, 23 nt, Human
ucauacauggcagucaacgcaug

SEQ ID NO: 1163575 - RNA, 24 nt, Human
uccagaguagcugggauuacaggc

SEQ ID NO: 1163576 - RNA, 19 nt, Human
ucccaaagacgccacccaa

SEQ ID NO: 1163577 - RNA, 25 nt, Human
ucccaaagacgccacccaaauggcc

SEQ ID NO: 1163578 - RNA, 18 nt, Human
ucccaaagugcugggauu

SEQ ID NO: 1163579 - RNA, 24 nt, Human
ucccaaagugcugggauuacaagc

SEQ ID NO: 1163580 - RNA, 24 nt, Human
ucccaaagugcugggauuccaggc

SEQ ID NO: 1163581 - RNA, 23 nt, Human
ucccaaguagcugggauuacagg

SEQ ID NO: 1163582 - RNA, 24 nt, Human
ucccaaguagcugggauuacaggu

SEQ ID NO: 1163583 - RNA, 21 nt, Human
ucccagguucaagccauucuc

SEQ ID NO: 1163584 - RNA, 24 nt, Human
ucccagguucaagccauucuccug

SEQ ID NO: 1163585 - RNA, 21 nt, Human
ucccgccaccuguaauccugg

SEQ ID NO: 1163586 - RNA, 23 nt, Human
uccgcccaccuccaccucccaaa

SEQ ID NO: 1163587 - RNA, 21 nt, Human
uccugaguucaagugauucuc

SEQ ID NO: 1163588 - RNA, 24 nt, Human
uccugaguucaagugauucuccug

SEQ ID NO: 1163589 - RNA, 21 nt, Human
ucgcaccacugcacuccaagc

SEQ ID NO: 1163590 - RNA, 24 nt, Human
ucgcaccacugcacuccaagccug

SEQ ID NO: 1163591 - RNA, 24 nt, Human
ucgcucuguugcccaggcuggagu

SEQ ID NO: 1163592 - RNA, 19 nt, Human
ucgcuugagcccaggaguu

SEQ ID NO: 1163593 - RNA, 24 nt, Human
ucgcuugagcccaggaguuugagg

SEQ ID NO: 1163594 - RNA, 24 nt, Human
ucuccugccucagccuccagagua

SEQ ID NO: 1163595 - RNA, 26 nt, Human
ucuccugccucagccucccaaguagc

SEQ ID NO: 1163596 - RNA, 18 nt, Human
ucuguugcccaggcugga

SEQ ID NO: 1163597 - RNA, 24 nt, Human
ucuguugcccaggcuggagugcag

SEQ ID NO: 1163598 - RNA, 24 nt, Human
ucuugcucuuguccccaggccgga

SEQ ID NO: 1163599 - RNA, 20 nt, Human
ucuuuuuuuuugagacagag

SEQ ID NO: 1163600 - RNA, 22 nt, Human
ucuuuuuuuuugagacagagcc

SEQ ID NO: 1163601 - RNA, 23 nt, Human
ugaaaaaccuaagcaaaaagaaa

SEQ ID NO: 1163602 - RNA, 19 nt, Human
ugaaaaagaaaacaauaga

SEQ ID NO: 1163603 - RNA, 23 nt, Human
ugaaucacuugagaccaggacuc

SEQ ID NO: 1163604 - RNA, 18 nt, Human
ugaccucacgugauccgc

SEQ ID NO: 1163605 - RNA, 19 nt, Human
ugaccucaggugauccauc

SEQ ID NO: 1163606 - RNA, 21 nt, Human
ugaccucaggugauccaucca

SEQ ID NO: 1163607 - RNA, 22 nt, Human
ugaccucaggugauccauccac

SEQ ID NO: 1163608 - RNA, 25 nt, Human
ugaccucaggugauccauccacguu

SEQ ID NO: 1163609 - RNA, 24 nt, Human
ugacuagguuggucucaaacuccu

SEQ ID NO: 1163610 - RNA, 20 nt, Human
ugacucaaaaaaaaagacaa

SEQ ID NO: 1163611 - RNA, 23 nt, Human
ugagaaaauagaaagaccacuag

SEQ ID NO: 1163612 - RNA, 18 nt, Human
ugagacagagccucgcuc

SEQ ID NO: 1163613 - RNA, 22 nt, Human
ugagacagagccucgcucuguu

SEQ ID NO: 1163614 - RNA, 21 nt, Human
ugagcaaaucucaucuggcca

SEQ ID NO: 1163615 - RNA, 27 nt, Human
ugagcaaaucucaucuggccaugcaga

SEQ ID NO: 1163616 - RNA, 22 nt, Human
ugagcccaggaguuugagguug

SEQ ID NO: 1163617 - RNA, 23 nt, Human
ugagguugcagugagcuaugauc

SEQ ID NO: 1163618 - RNA, 18 nt, Human
ugaguucaagugauucuc

SEQ ID NO: 1163619 - RNA, 23 nt, Human
ugaguucaagugauucuccugcc

SEQ ID NO: 1163620 - RNA, 24 nt, Human
ugaguucaagugauucuccugccu

SEQ ID NO: 1163621 - RNA, 20 nt, Human
ugauaaacucuuagcuaguc

SEQ ID NO: 1163622 - RNA, 24 nt, Human
ugauccgcccaccuccaccuccca

SEQ ID NO: 1163623 - RNA, 18 nt, Human
ugaugcaugccuguaguc

SEQ ID NO: 1163624 - RNA, 19 nt, Human
ugcaaacccaacacugagc

SEQ ID NO: 1163625 - RNA, 18 nt, Human
ugcccaggcuggagugca

SEQ ID NO: 1163626 - RNA, 21 nt, Human
ugcccaggcuggagugcagug

SEQ ID NO: 1163627 - RNA, 24 nt, Human
ugcccaggcuggagugcaguggug

SEQ ID NO: 1163628 - RNA, 24 nt, Human
ugccucagccuccagaguagcugg

SEQ ID NO: 1163629 - RNA, 24 nt, Human
ugccucagccucccaaguagcugg

SEQ ID NO: 1163630 - RNA, 23 nt, Human
ugccuguagucccagcuacucag

SEQ ID NO: 1163631 - RNA, 26 nt, Human
ugcugggauuacaagcgugagccacc

SEQ ID NO: 1163632 - RNA, 21 nt, Human
uggaaaccuuugcuuuccaaa

SEQ ID NO: 1163633 - RNA, 21 nt, Human
uggagacgggguuucaccaug

SEQ ID NO: 1163634 - RNA, 19 nt, Human
uggagugcaguggugugau

SEQ ID NO: 1163635 - RNA, 24 nt, Human
uggagugcaguggugugaucucag

SEQ ID NO: 1163636 - RNA, 24 nt, Human
uggccaggcuggucucaaacuccu

SEQ ID NO: 1163637 - RNA, 22 nt, Human
uggccaugcagagaaaaggcca

SEQ ID NO: 1163638 - RNA, 25 nt, Human
uggcggcucccgccaccuguaaucc

SEQ ID NO: 1163639 - RNA, 20 nt, Human
ugggaauaacgcuaagacca

SEQ ID NO: 1163640 - RNA, 18 nt, Human
ugggagaaguugaagaug

SEQ ID NO: 1163641 - RNA, 18 nt, Human
ugggauuacaagcgugag

SEQ ID NO: 1163642 - RNA, 22 nt, Human
ugggauuacaagcgugagccac

SEQ ID NO: 1163643 - RNA, 23 nt, Human
ugggauuacaagcgugagccacc

SEQ ID NO: 1163644 - RNA, 24 nt, Human
ugggauuacaagcgugagccacca

SEQ ID NO: 1163645 - RNA, 25 nt, Human
ugggauuacaagcgugagccaccau

SEQ ID NO: 1163646 - RNA, 21 nt, Human
ugggauuacaggcaugcacca

SEQ ID NO: 1163647 - RNA, 24 nt, Human
ugggauuacaggcaugcaccacca

SEQ ID NO: 1163648 - RNA, 21 nt, Human
ugggauuacaggugccugcca

SEQ ID NO: 1163649 - RNA, 22 nt, Human
ugggauuacaggugccugccac

SEQ ID NO: 1163650 - RNA, 24 nt, Human
ugggauuacaggugccugccacca

SEQ ID NO: 1163651 - RNA, 25 nt, Human
ugggauuacaggugccugccaccau

SEQ ID NO: 1163652 - RNA, 18 nt, Human
ugggauuccaggcaugag

SEQ ID NO: 1163653 - RNA, 23 nt, Human
ugggauuccaggcaugagccacc

SEQ ID NO: 1163654 - RNA, 24 nt, Human
ugggauuccaggcaugagccaccg

SEQ ID NO: 1163655 - RNA, 18 nt, Human
ugggcauaaguagaccaa

SEQ ID NO: 1163656 - RNA, 24 nt, Human
ugggguuucaccauguuggccagg

SEQ ID NO: 1163657 - RNA, 24 nt, Human
uggugugaucucagcucacugcaa

SEQ ID NO: 1163658 - RNA, 24 nt, Human
uuaauggagacgggguuucaccau

SEQ ID NO: 1163659 - RNA, 18 nt, Human
uuaguagagaugggguuu

SEQ ID NO: 1163660 - RNA, 22 nt, Human
uuaguagagaugggguuucacc

SEQ ID NO: 1163661 - RNA, 24 nt, Human
uuaguagagaugggguuucaccau

SEQ ID NO: 1163662 - RNA, 18 nt, Human
uucaagccauucuccugc

SEQ ID NO: 1163663 - RNA, 21 nt, Human
uucaagccauucuccugccuc

SEQ ID NO: 1163664 - RNA, 21 nt, Human
uucaagugauucuccugccuc

SEQ ID NO: 1163665 - RNA, 23 nt, Human
uucaagugauucuccugccucag

SEQ ID NO: 1163666 - RNA, 24 nt, Human
uucaagugauucuccugccucagc

SEQ ID NO: 1163667 - RNA, 25 nt, Human
uugagacagagccucgcucuguugc

SEQ ID NO: 1163668 - RNA, 22 nt, Human
uugcagugagcuaugaucgcac

SEQ ID NO: 1163669 - RNA, 19 nt, Human
uuucaccauguugacuagg

SEQ ID NO: 1163670 - RNA, 24 nt, Human
uuucaccauguuggccaggcuggu

SEQ ID NO: 1163671 - RNA, 18 nt, Human
uuugauaacuuagaugaa

SEQ ID NO: 1163672 - RNA, 23 nt, Human
uuuguauuauuuaccuacauauc

SEQ ID NO: 1163673 - RNA, 22 nt, Human
uuuuauuuuuaguagagauggg

SEQ ID NO: 1163674 - RNA, 24 nt, Human
uuuuuaauggagacgggguuucac

SEQ ID NO: 1163675 - RNA, 24 nt, Human
uuuuuaguagagaugggguuucac

SEQ ID NO: 1163676 - RNA, 28 nt, Human
uuuuuuauuuuuaguagagaugggguuu

SEQ ID NO: 1163677 - RNA, 22 nt, Human
cagagagggugacccuggccca

SEQ ID NO: 1163678 - RNA, 22 nt, Human
ccccgauccccagaaccgccuc

SEQ ID NO: 1163679 - RNA, 23 nt, Human
ccccgccacagccagcucugcag

SEQ ID NO: 1163680 - RNA, 18 nt, Human
ccugagacacugggcgug

SEQ ID NO: 1163681 - RNA, 19 nt, Human
ccuggcccaaggcgauggc

SEQ ID NO: 1163682 - RNA, 21 nt, Human
ccuggcccccgauccccagaa

SEQ ID NO: 1163683 - RNA, 23 nt, Human
cucauccugagacacugggcgug

SEQ ID NO: 1163684 - RNA, 22 nt, Human
cuggcccccgauccccagaacc

SEQ ID NO: 1163685 - RNA, 21 nt, Human
cuuggccccgccacagccagc

SEQ ID NO: 1163686 - RNA, 22 nt, Human
gagcagagagggugacccuggc

SEQ ID NO: 1163687 - RNA, 19 nt, Human
gccucacucauccugagac

SEQ ID NO: 1163688 - RNA, 27 nt, Human
ucauccugagacacugggcguggcugu

SEQ ID NO: 1163689 - RNA, 18 nt, Human
uccccagggacagguccu

SEQ ID NO: 1163690 - RNA, 23 nt, Human
uccccagggacagguccuagccu

SEQ ID NO: 1163691 - RNA, 24 nt, Human
uggcccccgauccccagaaccgcc

SEQ ID NO: 1163692 - RNA, 18 nt, Human
aaccuaugauccaauauc

SEQ ID NO: 1163693 - RNA, 20 nt, Human
cuguuuaauuuagaggagga

SEQ ID NO: 1163694 - RNA, 18 nt, Human
ggauaggaauuacuagag

SEQ ID NO: 1163695 - RNA, 18 nt, Human
guugcuuuuuucugaagg

SEQ ID NO: 1163696 - RNA, 22 nt, Human
ucucucagcaucuuaguaugga

SEQ ID NO: 1163697 - RNA, 18 nt, Human
ugaaggauaggcuuuuuu

SEQ ID NO: 1163698 - RNA, 24 nt, Human
uuauuguccaauuuugcaaccauc

SEQ ID NO: 1163699 - RNA, 20 nt, Human
uuuguugcuuuuuucugaag

SEQ ID NO: 1163700 - RNA, 22 nt, Human
cagcauguccucuuuaaggcau

SEQ ID NO: 1163701 - RNA, 23 nt, Human
ccucuuugguucuuuugguucau

SEQ ID NO: 1163702 - RNA, 25 nt, Human
cucuuuaaggcauuuggcagcuuca

SEQ ID NO: 1163703 - RNA, 21 nt, Human
cuuuugguucauuuucuuccu

SEQ ID NO: 1163704 - RNA, 23 nt, Human
gaaugguucccucuuugguucuu

SEQ ID NO: 1163705 - RNA, 22 nt, Human
uagaacauaucuaccuuaauau

SEQ ID NO: 1163706 - RNA, 20 nt, Human
ugaaugguucccucuuuggu

SEQ ID NO: 1163707 - RNA, 20 nt, Human
ugagaugccaccugucaaaa

SEQ ID NO: 1163708 - RNA, 27 nt, Human
ugagaugccaccugucaaaacuacaag

SEQ ID NO: 1163709 - RNA, 23 nt, Human
uugaaguaugaaugguucccucu

SEQ ID NO: 1163710 - RNA, 19 nt, Human
uugguucauuuucuuccuu

SEQ ID NO: 1163711 - RNA, 24 nt, Human
agugcaguggugcauuuucggcuc

SEQ ID NO: 1163712 - RNA, 20 nt, Human
cccaugcuggagugcagugg

SEQ ID NO: 1163713 - RNA, 23 nt, Human
ccgcaaccucugcuuccuggauu

SEQ ID NO: 1163714 - RNA, 24 nt, Human
ccgcaaccucugcuuccuggauuc

SEQ ID NO: 1163715 - RNA, 24 nt, Human
cucaccgcaaccucugcuuccugg

SEQ ID NO: 1163716 - RNA, 21 nt, Human
cuucacgggcguaggcuugcu

SEQ ID NO: 1163717 - RNA, 22 nt, Human
ggcugugcucucguugccucgg

SEQ ID NO: 1163718 - RNA, 23 nt, Human
ucaccgcaaccucugcuuccugg

SEQ ID NO: 1163719 - RNA, 20 nt, Human
ucccugggcgggagcgcggc

SEQ ID NO: 1163720 - RNA, 23 nt, Human
ucucacuguguugcccaugcugg

SEQ ID NO: 1163721 - RNA, 24 nt, Human
ucucacuguguugcccaugcugga

SEQ ID NO: 1163722 - RNA, 26 nt, Human
ucucacuguguugcccaugcuggagu

SEQ ID NO: 1163723 - RNA, 22 nt, Human
ugcaguggugcauuuucggcuc

SEQ ID NO: 1163724 - RNA, 24 nt, Human
ugcauuuucggcucaccgcaaccu

SEQ ID NO: 1163725 - RNA, 21 nt, Human
ugcccaugcuggagugcagug

SEQ ID NO: 1163726 - RNA, 24 nt, Human
ugcccaugcuggagugcaguggug

SEQ ID NO: 1163727 - RNA, 26 nt, Human
ugcggagggccgggcgcucggggcgu

SEQ ID NO: 1163728 - RNA, 27 nt, Human
uggagugcaguggugcauucuagcacg

SEQ ID NO: 1163729 - RNA, 24 nt, Human
uggagugcaguggugcauuuucgg

SEQ ID NO: 1163730 - RNA, 24 nt, Human
uguguugcccaugcuggagugcag

SEQ ID NO: 1163731 - RNA, 18 nt, Human
uugcccaugcuggagugc

SEQ ID NO: 1163732 - RNA, 23 nt, Human
uuuuuuuugagacaacagucuca

SEQ ID NO: 1163733 - RNA, 18 nt, Human
ucugccuuuaggaagugu

SEQ ID NO: 1163734 - RNA, 23 nt, Human
ugccuuuaggaaguguggggcac

SEQ ID NO: 1163735 - RNA, 21 nt, Human
uucuguggcucuucugccuuu

SEQ ID NO: 1163736 - RNA, 21 nt, Human
aaagguuucuccgaaauuuca

SEQ ID NO: 1163737 - RNA, 23 nt, Human
aagguuucuccgaaauuucacau

SEQ ID NO: 1163738 - RNA, 18 nt, Human
acgcaucaggugguccuu

SEQ ID NO: 1163739 - RNA, 21 nt, Human
agaauuccucaccguccgcuc

SEQ ID NO: 1163740 - RNA, 24 nt, Human
agacaggaggcaaggagugcagag

SEQ ID NO: 1163741 - RNA, 19 nt, Human
agaggcccaaaguucagug

SEQ ID NO: 1163742 - RNA, 18 nt, Human
agcaugcauggccaggug

SEQ ID NO: 1163743 - RNA, 19 nt, Human
agcugaggaccucuguggg

SEQ ID NO: 1163744 - RNA, 22 nt, Human
aggcaaggagugcagaggccca

SEQ ID NO: 1163745 - RNA, 20 nt, Human
aggcaggguggugcuacuca

SEQ ID NO: 1163746 - RNA, 23 nt, Human
aggccucagcuucucuccauuug

SEQ ID NO: 1163747 - RNA, 24 nt, Human
aggcucucagcucugucacagccu

SEQ ID NO: 1163748 - RNA, 18 nt, Human
auccuuacgaguauagaa

SEQ ID NO: 1163749 - RNA, 21 nt, Human
cacaguacauacacugguggg

SEQ ID NO: 1163750 - RNA, 21 nt, Human
caccuugcagcugaggucacc

SEQ ID NO: 1163751 - RNA, 19 nt, Human
cacucggggccccaccgcu

SEQ ID NO: 1163752 - RNA, 26 nt, Human
cagcccacuuccuccugauuugcauc

SEQ ID NO: 1163753 - RNA, 23 nt, Human
cagggccuggguacucucaaagg

SEQ ID NO: 1163754 - RNA, 23 nt, Human
ccucacggccugugugcaccacu

SEQ ID NO: 1163755 - RNA, 21 nt, Human
cuccacacaggcucucagcuc

SEQ ID NO: 1163756 - RNA, 25 nt, Human
cucugguugugggaggccggaaagc

SEQ ID NO: 1163757 - RNA, 18 nt, Human
cugcaggcacaccuugca

SEQ ID NO: 1163758 - RNA, 19 nt, Human
gcgccgguggcccagcuuc

SEQ ID NO: 1163759 - RNA, 21 nt, Human
gcgugaguggcccuucaggug

SEQ ID NO: 1163760 - RNA, 22 nt, Human
gcucccuaacagagccaaaaac

SEQ ID NO: 1163761 - RNA, 22 nt, Human
gcucugguugugggaggcugug

SEQ ID NO: 1163762 - RNA, 24 nt, Human
ggcacaguacugacacaggaaguc

SEQ ID NO: 1163763 - RNA, 19 nt, Human
ggccuggguacucucaaag

SEQ ID NO: 1163764 - RNA, 20 nt, Human
ggccuggguacucucaaagg

SEQ ID NO: 1163765 - RNA, 19 nt, Human
gguggguuucugggcugag

SEQ ID NO: 1163766 - RNA, 18 nt, Human
uaccgcacucagagcagc

SEQ ID NO: 1163767 - RNA, 20 nt, Human
ucacggccugugugcaccac

SEQ ID NO: 1163768 - RNA, 23 nt, Human
ucacuugacucuccgccucccgg

SEQ ID NO: 1163769 - RNA, 20 nt, Human
ucaggccagacgugaagaca

SEQ ID NO: 1163770 - RNA, 19 nt, Human
ucaggugguccuuacggcc

SEQ ID NO: 1163771 - RNA, 19 nt, Human
ucaugggggacacggacgg

SEQ ID NO: 1163772 - RNA, 20 nt, Human
uccuugcggugaaacaccuu

SEQ ID NO: 1163773 - RNA, 21 nt, Human
ucgcaguggucacaggggugc

SEQ ID NO: 1163774 - RNA, 23 nt, Human
ucucaaaggucugcaggcacacc

SEQ ID NO: 1163775 - RNA, 24 nt, Human
ucuccuuggcacugccugcuaccc

SEQ ID NO: 1163776 - RNA, 24 nt, Human
ucugcaggcacaccuugcagcuga

SEQ ID NO: 1163777 - RNA, 20 nt, Human
ugacaugacgcaucaggugg

SEQ ID NO: 1163778 - RNA, 22 nt, Human
ugacucuccgccucccggcccc

SEQ ID NO: 1163779 - RNA, 18 nt, Human
ugaguggcccuucaggug

SEQ ID NO: 1163780 - RNA, 23 nt, Human
ugcuucuucuccuuggcacugcc

SEQ ID NO: 1163781 - RNA, 21 nt, Human
uggccagguggcgccgguggc

SEQ ID NO: 1163782 - RNA, 22 nt, Human
ugggaggcugugaggccucagc

SEQ ID NO: 1163783 - RNA, 18 nt, Human
ugggggacacggacgggg

SEQ ID NO: 1163784 - RNA, 20 nt, Human
ugguggaaacgaggcagggu

SEQ ID NO: 1163785 - RNA, 20 nt, Human
ugguggguuucugggcugag

SEQ ID NO: 1163786 - RNA, 23 nt, Human
ugguugugggaggcugugaggcc

SEQ ID NO: 1163787 - RNA, 21 nt, Human
uucaugggggacacggacggg

SEQ ID NO: 1163788 - RNA, 22 nt, Human
uucgccgcacucggggccccac

SEQ ID NO: 1163789 - RNA, 23 nt, Human
uucgccgcacucggggccccacc

SEQ ID NO: 1163790 - RNA, 20 nt, Human
uucugggcugaguggguggc

SEQ ID NO: 1163791 - RNA, 19 nt, Human
uugcagcugaggucaccgc

SEQ ID NO: 1163792 - RNA, 21 nt, Human
uugcagcugaggucaccgcug

SEQ ID NO: 1163793 - RNA, 23 nt, Human
agcggcagcggagcucuugggcc

SEQ ID NO: 1163794 - RNA, 24 nt, Human
ccaagccaguuugccaccaucccc

SEQ ID NO: 1163795 - RNA, 21 nt, Human
ccccaagccaguuugccacca

SEQ ID NO: 1163796 - RNA, 23 nt, Human
cccccaagccaguuugccaccau

SEQ ID NO: 1163797 - RNA, 20 nt, Human
ccgcaaccuccguucagguc

SEQ ID NO: 1163798 - RNA, 20 nt, Human
ccgccgccgccgcucggcag

SEQ ID NO: 1163799 - RNA, 18 nt, Human
cggccgccgccgcagccg

SEQ ID NO: 1163800 - RNA, 20 nt, Human
cggccgccgccgcagccgcg

SEQ ID NO: 1163801 - RNA, 18 nt, Human
cggcugcagcggcagcgg

SEQ ID NO: 1163802 - RNA, 19 nt, Human
cggcugcagcggcagcgga

SEQ ID NO: 1163803 - RNA, 18 nt, Human
cugcagcggcagcggagc

SEQ ID NO: 1163804 - RNA, 25 nt, Human
gcagcggcagcggagcucuugggcc

SEQ ID NO: 1163805 - RNA, 18 nt, Human
gccgccgccgccgcucgg

SEQ ID NO: 1163806 - RNA, 21 nt, Human
gcggccgccgccgcagccgcg

SEQ ID NO: 1163807 - RNA, 19 nt, Human
uacaggaaggggcucugcu

SEQ ID NO: 1163808 - RNA, 19 nt, Human
ugggccagaaggcgguggc

SEQ ID NO: 1163809 - RNA, 19 nt, Human
uuugccaccauccccuuga

SEQ ID NO: 1163810 - RNA, 27 nt, Human
aaaaaucaguaaaaacauuuuaauaca

SEQ ID NO: 1163811 - RNA, 18 nt, Human
aacagcccccaaaccacg

SEQ ID NO: 1163812 - RNA, 20 nt, Human
aacauagugaaauccugucu

SEQ ID NO: 1163813 - RNA, 25 nt, Human
aaggugggcagaucaccugagauca

SEQ ID NO: 1163814 - RNA, 23 nt, Human
aaucgcuugaacccaugggugga

SEQ ID NO: 1163815 - RNA, 20 nt, Human
acaccacugcacuccagccu

SEQ ID NO: 1163816 - RNA, 24 nt, Human
acaccacugcacuccagccuaggc

SEQ ID NO: 1163817 - RNA, 24 nt, Human
accaacauagugaaauccugucuc

SEQ ID NO: 1163818 - RNA, 22 nt, Human
accacagagaaggcugccuuca

SEQ ID NO: 1163819 - RNA, 24 nt, Human
acccagucuggagccucucccccc

SEQ ID NO: 1163820 - RNA, 19 nt, Human
acugcacuccagccuaggc

SEQ ID NO: 1163821 - RNA, 22 nt, Human
acugcacuccagccuaggccag

SEQ ID NO: 1163822 - RNA, 20 nt, Human
agaagagugaaacuccaucu

SEQ ID NO: 1163823 - RNA, 18 nt, Human
agaucaggaguucgagac

SEQ ID NO: 1163824 - RNA, 19 nt, Human
agcaaggagagcggggggc

SEQ ID NO: 1163825 - RNA, 24 nt, Human
agcaaggagagcggggggcagagc

SEQ ID NO: 1163826 - RNA, 24 nt, Human
agcacuuugggaggccaagguggg

SEQ ID NO: 1163827 - RNA, 24 nt, Human
agcccacuggcuucaggcacuucc

SEQ ID NO: 1163828 - RNA, 23 nt, Human
agccgggcgugguggugcaugcc

SEQ ID NO: 1163829 - RNA, 19 nt, Human
aggaacagcccccaaacca

SEQ ID NO: 1163830 - RNA, 18 nt, Human
aggcacgagaaucgcuug

SEQ ID NO: 1163831 - RNA, 21 nt, Human
aggccaaggugggcagaucac

SEQ ID NO: 1163832 - RNA, 22 nt, Human
aggcuguggguuucuccaggcc

SEQ ID NO: 1163833 - RNA, 24 nt, Human
aggugcgguggcucacgccuguaa

SEQ ID NO: 1163834 - RNA, 20 nt, Human
aucacaccacugcacuccag

SEQ ID NO: 1163835 - RNA, 22 nt, Human
aucccagcacuuugggaggcca

SEQ ID NO: 1163836 - RNA, 25 nt, Human
auuagccgggcgugguggugcaugc

SEQ ID NO: 1163837 - RNA, 21 nt, Human
caacauagugaaauccugucu

SEQ ID NO: 1163838 - RNA, 24 nt, Human
caacauagugaaauccugucucua

SEQ ID NO: 1163839 - RNA, 19 nt, Human
caaggugggcagaucaccu

SEQ ID NO: 1163840 - RNA, 21 nt, Human
cacaccacugcacuccagccu

SEQ ID NO: 1163841 - RNA, 25 nt, Human
caccacugcacuccagccuaggcca

SEQ ID NO: 1163842 - RNA, 24 nt, Human
cacgccuguaaucccagcacuuug

SEQ ID NO: 1163843 - RNA, 18 nt, Human
cacugcacuccagccuag

SEQ ID NO: 1163844 - RNA, 19 nt, Human
cacugcacuccagccuagg

SEQ ID NO: 1163845 - RNA, 27 nt, Human
cagaucaccugagaucaggaguucgag

SEQ ID NO: 1163846 - RNA, 21 nt, Human
cagcacuuugggaggccaagg

SEQ ID NO: 1163847 - RNA, 24 nt, Human
cagcacuuugggaggccaaggugg

SEQ ID NO: 1163848 - RNA, 22 nt, Human
cagcccacuggcuucaggcacu

SEQ ID NO: 1163849 - RNA, 23 nt, Human
caugauuguaaaccuaguuaugc

SEQ ID NO: 1163850 - RNA, 23 nt, Human
ccacagagaaggcugccuucacc

SEQ ID NO: 1163851 - RNA, 25 nt, Human
ccacagagaaggcugccuucacccc

SEQ ID NO: 1163852 - RNA, 19 nt, Human
ccacugcacuccagccuag

SEQ ID NO: 1163853 - RNA, 20 nt, Human
ccacugcacuccagccuagg

SEQ ID NO: 1163854 - RNA, 20 nt, Human
ccacugcacuccagccuagg

SEQ ID NO: 1163855 - RNA, 21 nt, Human
ccacugcacuccagccuaggc

SEQ ID NO: 1163856 - RNA, 23 nt, Human
ccacugcacuccagccuaggcca

SEQ ID NO: 1163857 - RNA, 20 nt, Human
cccauggguggagguugcag

SEQ ID NO: 1163858 - RNA, 22 nt, Human
ccccaccacucaagcaaggaga

SEQ ID NO: 1163859 - RNA, 20 nt, Human
cccccaaaccacgcagggag

SEQ ID NO: 1163860 - RNA, 18 nt, Human
cccccagccugaagccca

SEQ ID NO: 1163861 - RNA, 22 nt, Human
cccccagccugaagcccagccu

SEQ ID NO: 1163862 - RNA, 21 nt, Human
ccuaggccagaagagugaaac

SEQ ID NO: 1163863 - RNA, 22 nt, Human
ccugaccaacauagugaaaucc

SEQ ID NO: 1163864 - RNA, 24 nt, Human
ccugaccaacauagugaaauccug

SEQ ID NO: 1163865 - RNA, 22 nt, Human
ccugagaucaggaguucgagac

SEQ ID NO: 1163866 - RNA, 19 nt, Human
ccuggaaauuuuaaaaaaa

SEQ ID NO: 1163867 - RNA, 21 nt, Human
ccuggaaauuuuaaaaaaagg

SEQ ID NO: 1163868 - RNA, 24 nt, Human
ccuggaaauuuuaaaaaaagggag

SEQ ID NO: 1163869 - RNA, 21 nt, Human
ccuguaaucccagcuacucgg

SEQ ID NO: 1163870 - RNA, 22 nt, Human
ccugucucuacuaaaaacacaa

SEQ ID NO: 1163871 - RNA, 24 nt, Human
cgagaccagccugaccaacauagu

SEQ ID NO: 1163872 - RNA, 23 nt, Human
cgagccgaaaucacaccacugca

SEQ ID NO: 1163873 - RNA, 23 nt, Human
cgccuguaaucccagcacuuugg

SEQ ID NO: 1163874 - RNA, 24 nt, Human
cgccuguaaucccagcacuuuggg

SEQ ID NO: 1163875 - RNA, 20 nt, Human
cggagaagacccagucugga

SEQ ID NO: 1163876 - RNA, 23 nt, Human
cggagaagacccagucuggagcc

SEQ ID NO: 1163877 - RNA, 22 nt, Human
cucacgccuguaaucccagcac

SEQ ID NO: 1163878 - RNA, 24 nt, Human
cucacgccuguaaucccagcacuu

SEQ ID NO: 1163879 - RNA, 22 nt, Human
cugaagcccagccuccagguuc

SEQ ID NO: 1163880 - RNA, 18 nt, Human
cugagaucaggaguucga

SEQ ID NO: 1163881 - RNA, 22 nt, Human
cugagaucaggaguucgagacc

SEQ ID NO: 1163882 - RNA, 22 nt, Human
cugccuucaccccgucugcacc

SEQ ID NO: 1163883 - RNA, 25 nt, Human
cuguggguuucuccaggccaggccu

SEQ ID NO: 1163884 - RNA, 20 nt, Human
cuuccaagccccuugcucgc

SEQ ID NO: 1163885 - RNA, 25 nt, Human
cuucccacuccucuagcaauaauca

SEQ ID NO: 1163886 - RNA, 24 nt, Human
gaucaccugagaucaggaguucga

SEQ ID NO: 1163887 - RNA, 22 nt, Human
gcaggcagguguuugugaucag

SEQ ID NO: 1163888 - RNA, 24 nt, Human
gccagaagagugaaacuccaucuc

SEQ ID NO: 1163889 - RNA, 18 nt, Human
ggagguugcagcgagccg

SEQ ID NO: 1163890 - RNA, 24 nt, Human
ggagguugcagcgagccgaaauca

SEQ ID NO: 1163891 - RNA, 18 nt, Human
ggagugccugccacacug

SEQ ID NO: 1163892 - RNA, 25 nt, Human
ggcagaucaccugagaucaggaguu

SEQ ID NO: 1163893 - RNA, 21 nt, Human
ggccagaagagugaaacucca

SEQ ID NO: 1163894 - RNA, 23 nt, Human
ggcgugguggugcaugccuguaa

SEQ ID NO: 1163895 - RNA, 18 nt, Human
ggggcagagccacggaga

SEQ ID NO: 1163896 - RNA, 19 nt, Human
ggguggagguugcagcgag

SEQ ID NO: 1163897 - RNA, 19 nt, Human
ggucagcaaugcaggcagg

SEQ ID NO: 1163898 - RNA, 21 nt, Human
ggugcaugccuguaaucccag

SEQ ID NO: 1163899 - RNA, 18 nt, Human
gguggagguugcagcgag

SEQ ID NO: 1163900 - RNA, 23 nt, Human
gguggcucacgccuguaauccca

SEQ ID NO: 1163901 - RNA, 24 nt, Human
gguggcucacgccuguaaucccag

SEQ ID NO: 1163902 - RNA, 24 nt, Human
gguggugcaugccuguaaucccag

SEQ ID NO: 1163903 - RNA, 23 nt, Human
gugaccacagagaaggcugccuu

SEQ ID NO: 1163904 - RNA, 21 nt, Human
guugcagcgagccgaaaucac

SEQ ID NO: 1163905 - RNA, 22 nt, Human
uaaaaacacaaaauuagccggg

SEQ ID NO: 1163906 - RNA, 23 nt, Human
uaaaaacacaaaauuagccgggc

SEQ ID NO: 1163907 - RNA, 22 nt, Human
uagcaauaaucaccuggaaauu

SEQ ID NO: 1163908 - RNA, 24 nt, Human
uagcaauaaucaccuggaaauuuu

SEQ ID NO: 1163909 - RNA, 21 nt, Human
uaucaggaacagcccccaaac

SEQ ID NO: 1163910 - RNA, 23 nt, Human
ucaccugagaucaggaguucgag

SEQ ID NO: 1163911 - RNA, 26 nt, Human
ucaggccaggugcgguggcucacgcc

SEQ ID NO: 1163912 - RNA, 27 nt, Human
uccaggagaaacggcgcauggccugcc

SEQ ID NO: 1163913 - RNA, 22 nt, Human
uccaucucaaaaaauauuaaaa

SEQ ID NO: 1163914 - RNA, 18 nt, Human
ucccggccgugagucccc

SEQ ID NO: 1163915 - RNA, 22 nt, Human
uccucuagcaauaaucaccugg

SEQ ID NO: 1163916 - RNA, 20 nt, Human
ucgcuucccugaagaggcug

SEQ ID NO: 1163917 - RNA, 23 nt, Human
ucgcuugaacccauggguggagg

SEQ ID NO: 1163918 - RNA, 20 nt, Human
ucucuacuaaaaacacaaaa

SEQ ID NO: 1163919 - RNA, 23 nt, Human
ucuggagccucuccccccagccu

SEQ ID NO: 1163920 - RNA, 24 nt, Human
ugaccaacauagugaaauccuguc

SEQ ID NO: 1163921 - RNA, 21 nt, Human
ugaccacagagaaggcugccu

SEQ ID NO: 1163922 - RNA, 22 nt, Human
ugaccacagagaaggcugccuu

SEQ ID NO: 1163923 - RNA, 24 nt, Human
ugaggcacgagaaucgcuugaacc

SEQ ID NO: 1163924 - RNA, 24 nt, Human
ugaguccccagcccacuggcuuca

SEQ ID NO: 1163925 - RNA, 18 nt, Human
ugccguuacaugcacgug

SEQ ID NO: 1163926 - RNA, 23 nt, Human
ugccuguaaucccagcuacucgg

SEQ ID NO: 1163927 - RNA, 24 nt, Human
ugccuguaaucccagcuacucggg

SEQ ID NO: 1163928 - RNA, 20 nt, Human
ugccuucaccccgucugcac

SEQ ID NO: 1163929 - RNA, 21 nt, Human
uggaaauuuuaaaaaaaggga

SEQ ID NO: 1163930 - RNA, 22 nt, Human
uggcucacgccuguaaucccag

SEQ ID NO: 1163931 - RNA, 24 nt, Human
uggcucacgccuguaaucccagca

SEQ ID NO: 1163932 - RNA, 20 nt, Human
ugggaggccaaggugggcag

SEQ ID NO: 1163933 - RNA, 24 nt, Human
ugggaggccaaggugggcagauca

SEQ ID NO: 1163934 - RNA, 24 nt, Human
ugggcagaucaccugagaucagga

SEQ ID NO: 1163935 - RNA, 18 nt, Human
uggguuucuccaggccag

SEQ ID NO: 1163936 - RNA, 21 nt, Human
uggugcaugccuguaauccca

SEQ ID NO: 1163937 - RNA, 22 nt, Human
uggugcaugccuguaaucccag

SEQ ID NO: 1163938 - RNA, 24 nt, Human
ugguggugcaugccuguaauccca

SEQ ID NO: 1163939 - RNA, 20 nt, Human
uguaaaccuaguuaugccuc

SEQ ID NO: 1163940 - RNA, 19 nt, Human
uuagccgggcgugguggug

SEQ ID NO: 1163941 - RNA, 24 nt, Human
uuagccgggcgugguggugcaugc

SEQ ID NO: 1163942 - RNA, 23 nt, Human
uugaacccauggguggagguugc

SEQ ID NO: 1163943 - RNA, 24 nt, Human
aaagugcugggauuauagguguga

SEQ ID NO: 1163944 - RNA, 21 nt, Human
aaccaagcacccacgggggcc

SEQ ID NO: 1163945 - RNA, 24 nt, Human
aaccucaagugauccgcccgccuc

SEQ ID NO: 1163946 - RNA, 20 nt, Human
aagacgggguuucuccacgu

SEQ ID NO: 1163947 - RNA, 22 nt, Human
aagcggcaggaaccccucugcu

SEQ ID NO: 1163948 - RNA, 24 nt, Human
aagcggcaggaaccccucugcuuu

SEQ ID NO: 1163949 - RNA, 24 nt, Human
aagcggccccugacccuggcgagu

SEQ ID NO: 1163950 - RNA, 24 nt, Human
aagugauccgcccgccucugccuc

SEQ ID NO: 1163951 - RNA, 18 nt, Human
aagugcugggauuauagg

SEQ ID NO: 1163952 - RNA, 26 nt, Human
aagugcugggauuauaggugugagcc

SEQ ID NO: 1163953 - RNA, 21 nt, Human
aauuucuccugguuggugagu

SEQ ID NO: 1163954 - RNA, 21 nt, Human
acagacaaacagggccagcca

SEQ ID NO: 1163955 - RNA, 19 nt, Human
acccacagacaaacagggc

SEQ ID NO: 1163956 - RNA, 20 nt, Human
acgggguuucuccacguugg

SEQ ID NO: 1163957 - RNA, 21 nt, Human
acgggguuucuccacguuggu

SEQ ID NO: 1163958 - RNA, 24 nt, Human
acgggguuucuccacguuggucag

SEQ ID NO: 1163959 - RNA, 24 nt, Human
acugcaauugugugaucucagcuc

SEQ ID NO: 1163960 - RNA, 23 nt, Human
agcacacaaccgacggggcgggg

SEQ ID NO: 1163961 - RNA, 26 nt, Human
aggagaaggucugggaaaaaccugcu

SEQ ID NO: 1163962 - RNA, 22 nt, Human
aggagggagacuaggacucaga

SEQ ID NO: 1163963 - RNA, 24 nt, Human
aggcgggaaggugcggccgcgggg

SEQ ID NO: 1163964 - RNA, 21 nt, Human
aggugugagccaccgcgccca

SEQ ID NO: 1163965 - RNA, 21 nt, Human
aguagcugggauuacagacau

SEQ ID NO: 1163966 - RNA, 23 nt, Human
agugaguuuucucuucacagccc

SEQ ID NO: 1163967 - RNA, 25 nt, Human
caaagccaucucuuugaacaacugu

SEQ ID NO: 1163968 - RNA, 24 nt, Human
caaagugcugggauuauaggugug

SEQ ID NO: 1163969 - RNA, 21 nt, Human
caaccuccaucucucagguuc

SEQ ID NO: 1163970 - RNA, 23 nt, Human
caagcggccccugacccuggcga

SEQ ID NO: 1163971 - RNA, 22 nt, Human
caagggauucuccugccucagc

SEQ ID NO: 1163972 - RNA, 23 nt, Human
caccaacuagcuuuguuccugag

SEQ ID NO: 1163973 - RNA, 20 nt, Human
cacuucucuaaacaauuacu

SEQ ID NO: 1163974 - RNA, 22 nt, Human
cagcacaguccgggagaccaca

SEQ ID NO: 1163975 - RNA, 25 nt, Human
caggaaccccucugcuuuccucagu

SEQ ID NO: 1163976 - RNA, 27 nt, Human
caguagcugggauuacagacaugcgcc

SEQ ID NO: 1163977 - RNA, 22 nt, Human
caguccuaggugaauuucuccu

SEQ ID NO: 1163978 - RNA, 20 nt, Human
ccaaagugcugggauuauag

SEQ ID NO: 1163979 - RNA, 21 nt, Human
ccaaagugcugggauuauagg

SEQ ID NO: 1163980 - RNA, 24 nt, Human
ccaaagugcugggauuauaggugu

SEQ ID NO: 1163981 - RNA, 23 nt, Human
ccacagacaaacagggccagcca

SEQ ID NO: 1163982 - RNA, 21 nt, Human
ccagggucacccggagcgcga

SEQ ID NO: 1163983 - RNA, 18 nt, Human
cccacagacaaacagggc

SEQ ID NO: 1163984 - RNA, 19 nt, Human
cccaggacccacagacaaa

SEQ ID NO: 1163985 - RNA, 23 nt, Human
cccaggacccacagacaaacagg

SEQ ID NO: 1163986 - RNA, 24 nt, Human
cccaguagcugggauuacagacau

SEQ ID NO: 1163987 - RNA, 19 nt, Human
ccccaguagcugggauuac

SEQ ID NO: 1163988 - RNA, 19 nt, Human
cccccugucccugcugccc

SEQ ID NO: 1163989 - RNA, 21 nt, Human
cccccugucccugcugcccac

SEQ ID NO: 1163990 - RNA, 21 nt, Human
cccgaggguggaaaagucauu

SEQ ID NO: 1163991 - RNA, 18 nt, Human
ccgaggguggaaaaguca

SEQ ID NO: 1163992 - RNA, 19 nt, Human
ccgaggguggaaaagucau

SEQ ID NO: 1163993 - RNA, 24 nt, Human
ccgccucugccucccaaagugcug

SEQ ID NO: 1163994 - RNA, 24 nt, Human
ccugccucagcuuccccaguagcu

SEQ ID NO: 1163995 - RNA, 22 nt, Human
cgaagaagcuucugccaggccc

SEQ ID NO: 1163996 - RNA, 23 nt, Human
cgagggcacggggccgaagaagc

SEQ ID NO: 1163997 - RNA, 23 nt, Human
cgccggccuaacgguggggaccg

SEQ ID NO: 1163998 - RNA, 24 nt, Human
cgccucugccucccaaagugcugg

SEQ ID NO: 1163999 - RNA, 21 nt, Human
cggccuaacgguggggaccgg

SEQ ID NO: 1164000 - RNA, 24 nt, Human
cggcggacugacccagcuccagcg

SEQ ID NO: 1164001 - RNA, 20 nt, Human
cggcuucggggcguccuccu

SEQ ID NO: 1164002 - RNA, 20 nt, Human
cgggaaggugcggccgcggg

SEQ ID NO: 1164003 - RNA, 20 nt, Human
cggggccaggcgagggcacg

SEQ ID NO: 1164004 - RNA, 24 nt, Human
cggggccgaagaagcuucugccag

SEQ ID NO: 1164005 - RNA, 19 nt, Human
cggggccgggcagggacgc

SEQ ID NO: 1164006 - RNA, 20 nt, Human
cguuccaaccaagcacccac

SEQ ID NO: 1164007 - RNA, 24 nt, Human
cucaagugauccgcccgccucugc

SEQ ID NO: 1164008 - RNA, 24 nt, Human
cucagcuuccccaguagcugggau

SEQ ID NO: 1164009 - RNA, 21 nt, Human
cucagguucaagggauucucc

SEQ ID NO: 1164010 - RNA, 23 nt, Human
cucgcaaaccucaagugauccgc

SEQ ID NO: 1164011 - RNA, 18 nt, Human
cucugcuuuccucaguga

SEQ ID NO: 1164012 - RNA, 18 nt, Human
cucuugcugcccaggcug

SEQ ID NO: 1164013 - RNA, 18 nt, Human
cucuugcugcccaggcug

SEQ ID NO: 1164014 - RNA, 19 nt, Human
cucuugcugcccaggcugg

SEQ ID NO: 1164015 - RNA, 19 nt, Human
cugcuuccgaggccucggc

SEQ ID NO: 1164016 - RNA, 21 nt, Human
cugggauuauaggugugagcc

SEQ ID NO: 1164017 - RNA, 26 nt, Human
cuucucuaaacaauuacuuuuuguug

SEQ ID NO: 1164018 - RNA, 24 nt, Human
gagccaccgcgcccagccuguguu

SEQ ID NO: 1164019 - RNA, 18 nt, Human
gauuacagacaugcgcca

SEQ ID NO: 1164020 - RNA, 18 nt, Human
gauuauaggugugagcca

SEQ ID NO: 1164021 - RNA, 20 nt, Human
gauuauaggugugagccacc

SEQ ID NO: 1164022 - RNA, 22 nt, Human
gauuauaggugugagccaccgc

SEQ ID NO: 1164023 - RNA, 22 nt, Human
gauucuccugccucagcuuccc

SEQ ID NO: 1164024 - RNA, 22 nt, Human
gcaggaaccccucugcuuuccu

SEQ ID NO: 1164025 - RNA, 22 nt, Human
gccagccagggucacccggagc

SEQ ID NO: 1164026 - RNA, 23 nt, Human
gccauuauuccucuccuacaacu

SEQ ID NO: 1164027 - RNA, 18 nt, Human
gcccgagacccgcacuua

SEQ ID NO: 1164028 - RNA, 19 nt, Human
gccuagggggaacgcggga

SEQ ID NO: 1164029 - RNA, 24 nt, Human
gccucagcuuccccaguagcuggg

SEQ ID NO: 1164030 - RNA, 24 nt, Human
gcgggacaggagaaggucugggaa

SEQ ID NO: 1164031 - RNA, 20 nt, Human
ggacaggagaaggucuggga

SEQ ID NO: 1164032 - RNA, 23 nt, Human
ggaguuucacucuugcugcccag

SEQ ID NO: 1164033 - RNA, 22 nt, Human
ggauucuccugccucagcuucc

SEQ ID NO: 1164034 - RNA, 22 nt, Human
guagcugggauuacagacaugc

SEQ ID NO: 1164035 - RNA, 24 nt, Human
gugauccgcccgccucugccuccc

SEQ ID NO: 1164036 - RNA, 20 nt, Human
gugcuaaacuguuauucucc

SEQ ID NO: 1164037 - RNA, 23 nt, Human
guuauucuccuuuaaucguucca

SEQ ID NO: 1164038 - RNA, 20 nt, Human
guuccugaggcaagcggcag

SEQ ID NO: 1164039 - RNA, 18 nt, Human
uaagcuuccagcacaguc

SEQ ID NO: 1164040 - RNA, 23 nt, Human
uaagcuuccagcacaguccggga

SEQ ID NO: 1164041 - RNA, 23 nt, Human
uaauuuuguauuuuuaguaaaga

SEQ ID NO: 1164042 - RNA, 25 nt, Human
uaauuuuguauuuuuaguaaagacg

SEQ ID NO: 1164043 - RNA, 22 nt, Human
uacagacaugcgccaccacacc

SEQ ID NO: 1164044 - RNA, 19 nt, Human
uaguaaagacgggguuucu

SEQ ID NO: 1164045 - RNA, 24 nt, Human
uaguaaagacgggguuucuccacg

SEQ ID NO: 1164046 - RNA, 23 nt, Human
ucaaagccaucucuuugaacaac

SEQ ID NO: 1164047 - RNA, 24 nt, Human
ucacaucaaccuccaucucucagg

SEQ ID NO: 1164048 - RNA, 22 nt, Human
ucacucuugcugcccaggcugg

SEQ ID NO: 1164049 - RNA, 23 nt, Human
ucacucuugcugcccaggcugga

SEQ ID NO: 1164050 - RNA, 27 nt, Human
ucagcucacaucaaccuccaucucuca

SEQ ID NO: 1164051 - RNA, 23 nt, Human
ucccaaagugcugggauuauagg

SEQ ID NO: 1164052 - RNA, 25 nt, Human
uccuucaucuugucacuucucuaaa

SEQ ID NO: 1164053 - RNA, 21 nt, Human
ucucagguucaagggauucuc

SEQ ID NO: 1164054 - RNA, 24 nt, Human
ucucagguucaagggauucuccug

SEQ ID NO: 1164055 - RNA, 24 nt, Human
ucucucagguucaagggauucucc

SEQ ID NO: 1164056 - RNA, 19 nt, Human
ucucuucacagcccccugu

SEQ ID NO: 1164057 - RNA, 18 nt, Human
ucuugcugcccaggcugg

SEQ ID NO: 1164058 - RNA, 22 nt, Human
ugacccuggcgagugaguuuuc

SEQ ID NO: 1164059 - RNA, 28 nt, Human
ugagcaagcggccccugacuguaaugac

SEQ ID NO: 1164060 - RNA, 18 nt, Human
ugaggcaagcggcaggaa

SEQ ID NO: 1164061 - RNA, 21 nt, Human
ugccucagcuuccccaguagc

SEQ ID NO: 1164062 - RNA, 24 nt, Human
ugccucagcuuccccaguagcugg

SEQ ID NO: 1164063 - RNA, 20 nt, Human
ugcugcccaggcuggacugc

SEQ ID NO: 1164064 - RNA, 23 nt, Human
uggacugcaauugugugaucuca

SEQ ID NO: 1164065 - RNA, 18 nt, Human
uggcgccagcccgcagcg

SEQ ID NO: 1164066 - RNA, 21 nt, Human
ugggauuacagacaugcgcca

SEQ ID NO: 1164067 - RNA, 22 nt, Human
ugggauuacagacaugcgccac

SEQ ID NO: 1164068 - RNA, 24 nt, Human
ugggauuacagacaugcgccacca

SEQ ID NO: 1164069 - RNA, 18 nt, Human
ugggauuauaggugugag

SEQ ID NO: 1164070 - RNA, 19 nt, Human
ugggauuauaggugugagc

SEQ ID NO: 1164071 - RNA, 21 nt, Human
ugggauuauaggugugagcca

SEQ ID NO: 1164072 - RNA, 22 nt, Human
ugggauuauaggugugagccac

SEQ ID NO: 1164073 - RNA, 23 nt, Human
ugggauuauaggugugagccacc

SEQ ID NO: 1164074 - RNA, 24 nt, Human
ugggauuauaggugugagccaccg

SEQ ID NO: 1164075 - RNA, 21 nt, Human
uggucagacugguuuccaacu

SEQ ID NO: 1164076 - RNA, 23 nt, Human
ugguguauaccuucugcgccagu

SEQ ID NO: 1164077 - RNA, 21 nt, Human
uguauuuuuaguaaagacggg

SEQ ID NO: 1164078 - RNA, 23 nt, Human
ugugugaucucagcucacaucaa

SEQ ID NO: 1164079 - RNA, 20 nt, Human
uguuuaccucugcucacaca

SEQ ID NO: 1164080 - RNA, 19 nt, Human
uuaccucugcucacacagg

SEQ ID NO: 1164081 - RNA, 18 nt, Human
uuaguaaagacgggguuu

SEQ ID NO: 1164082 - RNA, 18 nt, Human
uucaagggauucuccugc

SEQ ID NO: 1164083 - RNA, 23 nt, Human
uucaagggauucuccugccucag

SEQ ID NO: 1164084 - RNA, 24 nt, Human
uucacucuugcugcccaggcugga

SEQ ID NO: 1164085 - RNA, 19 nt, Human
uucauuguuuaccucugcu

SEQ ID NO: 1164086 - RNA, 23 nt, Human
uuguauuuuuaguaaagacgggg

SEQ ID NO: 1164087 - RNA, 20 nt, Human
uuuuguauuuuuaguaaaga

SEQ ID NO: 1164088 - RNA, 23 nt, Human
aaguauaccaauguugaccucac

SEQ ID NO: 1164089 - RNA, 23 nt, Human
acaaaguauaccaauguugaccc

SEQ ID NO: 1164090 - RNA, 18 nt, Human
accucacucagugccaag

SEQ ID NO: 1164091 - RNA, 21 nt, Human
acugaagcugucucuggaucc

SEQ ID NO: 1164092 - RNA, 19 nt, Human
cagugccaagaaguuaaaa

SEQ ID NO: 1164093 - RNA, 21 nt, Human
ccaauguugaccucacucagu

SEQ ID NO: 1164094 - RNA, 18 nt, Human
ccucacucagugccaaga

SEQ ID NO: 1164095 - RNA, 21 nt, Human
uaagaaccuuauuuggacuga

SEQ ID NO: 1164096 - RNA, 18 nt, Human
ucucaggaggaguaagac

SEQ ID NO: 1164097 - RNA, 22 nt, Human
ugaaacccauuuagaaauguua

SEQ ID NO: 1164098 - RNA, 22 nt, Human
aagcgcagaggccuuucaaacu

SEQ ID NO: 1164099 - RNA, 23 nt, Human
agcuaccggaagccggugagacc

SEQ ID NO: 1164100 - RNA, 25 nt, Human
aggcuuuuugaauuuuuuaaagucu

SEQ ID NO: 1164101 - RNA, 19 nt, Human
caaaacacaaaggucaagc

SEQ ID NO: 1164102 - RNA, 20 nt, Human
cacaucuguaccugccccuu

SEQ ID NO: 1164103 - RNA, 22 nt, Human
caccugagguggguuaacucag

SEQ ID NO: 1164104 - RNA, 22 nt, Human
cagccacaucuguaccugcccc

SEQ ID NO: 1164105 - RNA, 24 nt, Human
cagccacaucuguaccugccccuu

SEQ ID NO: 1164106 - RNA, 23 nt, Human
caucugagguuaaacacaaaaca

SEQ ID NO: 1164107 - RNA, 20 nt, Human
ccaaaacacaaaggucaagc

SEQ ID NO: 1164108 - RNA, 23 nt, Human
ccaaauugggcuccaaagcgcag

SEQ ID NO: 1164109 - RNA, 18 nt, Human
ccaggcagucuggggggu

SEQ ID NO: 1164110 - RNA, 18 nt, Human
ccccagcugacagcugga

SEQ ID NO: 1164111 - RNA, 22 nt, Human
ccuccaggcagucuggggggug

SEQ ID NO: 1164112 - RNA, 21 nt, Human
ccuccuacgagcugaccugac

SEQ ID NO: 1164113 - RNA, 18 nt, Human
gaagccuccuacgagcug

SEQ ID NO: 1164114 - RNA, 19 nt, Human
uaacucagcuaccggaagc

SEQ ID NO: 1164115 - RNA, 19 nt, Human
uaccugccccuugccaaag

SEQ ID NO: 1164116 - RNA, 25 nt, Human
uccuacgagcugaccugacgucacu

SEQ ID NO: 1164117 - RNA, 21 nt, Human
ugaccugacgucacucagcaa

SEQ ID NO: 1164118 - RNA, 21 nt, Human
uucaggggccagguuuccuuc

SEQ ID NO: 1164119 - RNA, 20 nt, Human
uugagggagcaaaggcuuuu

SEQ ID NO: 1164120 - RNA, 26 nt, Human
aagccaaggcacaguuugucgaagaa

SEQ ID NO: 1164121 - RNA, 21 nt, Human
accaggcguccgccgcccccc

SEQ ID NO: 1164122 - RNA, 23 nt, Human
accguuaaagaguguuuucagag

SEQ ID NO: 1164123 - RNA, 19 nt, Human
agauaaaaaagaaauaaaa

SEQ ID NO: 1164124 - RNA, 19 nt, Human
aguuugucgaagaagucgg

SEQ ID NO: 1164125 - RNA, 19 nt, Human
cagcagacgccgauaccac

SEQ ID NO: 1164126 - RNA, 20 nt, Human
cagccccacaacaacggccc

SEQ ID NO: 1164127 - RNA, 19 nt, Human
cagcgccagcgcgcagccc

SEQ ID NO: 1164128 - RNA, 22 nt, Human
caggcguccgccgccccccgga

SEQ ID NO: 1164129 - RNA, 20 nt, Human
cauacauauauauuuauaua

SEQ ID NO: 1164130 - RNA, 22 nt, Human
cauauauauuuauauauacaca

SEQ ID NO: 1164131 - RNA, 23 nt, Human
ccagaggcgguccagcuucuucc

SEQ ID NO: 1164132 - RNA, 20 nt, Human
ccccccggaccaugcuuucc

SEQ ID NO: 1164133 - RNA, 20 nt, Human
cccccggaccaugcuuuccg

SEQ ID NO: 1164134 - RNA, 21 nt, Human
cccccggaccaugcuuuccgc

SEQ ID NO: 1164135 - RNA, 18 nt, Human
ccgccgccccccggacca

SEQ ID NO: 1164136 - RNA, 18 nt, Human
ccgccgccccccggacca

SEQ ID NO: 1164137 - RNA, 21 nt, Human
ccgccgccccccggaccaugc

SEQ ID NO: 1164138 - RNA, 23 nt, Human
cuccagaggcgguccagcuucuu

SEQ ID NO: 1164139 - RNA, 21 nt, Human
cuuuccgcuccucugcugggc

SEQ ID NO: 1164140 - RNA, 18 nt, Human
gcagccccacaacaacgg

SEQ ID NO: 1164141 - RNA, 18 nt, Human
ggcgguccagcuucuucc

SEQ ID NO: 1164142 - RNA, 20 nt, Human
uaagaauccuuauaccguua

SEQ ID NO: 1164143 - RNA, 20 nt, Human
uacacacacaaacgugugug

SEQ ID NO: 1164144 - RNA, 21 nt, Human
uacagcaucccgcccugcagc

SEQ ID NO: 1164145 - RNA, 18 nt, Human
uaccaggcguccgccgcc

SEQ ID NO: 1164146 - RNA, 19 nt, Human
uacuccuagaagccaaggc

SEQ ID NO: 1164147 - RNA, 27 nt, Human
uauacacacacaaacgugugugucucu

SEQ ID NO: 1164148 - RNA, 22 nt, Human
uauauacacacacaaacgugug

SEQ ID NO: 1164149 - RNA, 24 nt, Human
uauauacacacacaaacgugugug

SEQ ID NO: 1164150 - RNA, 21 nt, Human
ucagauaaaaaagaaauaaaa

SEQ ID NO: 1164151 - RNA, 21 nt, Human
ucccgcgacggccucucucuu

SEQ ID NO: 1164152 - RNA, 24 nt, Human
uccgcucccgcgacggccucucuc

SEQ ID NO: 1164153 - RNA, 20 nt, Human
uccgcuccucugcugggccg

SEQ ID NO: 1164154 - RNA, 26 nt, Human
uccucuauaaaucaaaagagaguacu

SEQ ID NO: 1164155 - RNA, 20 nt, Human
ugcugggccgccgucugcgg

SEQ ID NO: 1164156 - RNA, 27 nt, Human
uuauauauacacacacaaacgugugug

SEQ ID NO: 1164157 - RNA, 23 nt, Human
uucaugcugucaguugauggacc

SEQ ID NO: 1164158 - RNA, 20 nt, Human
uuuccgcuccucugcugggc

SEQ ID NO: 1164159 - RNA, 24 nt, Human
cccgcucugcgacgcugcucgggg

SEQ ID NO: 1164160 - RNA, 25 nt, Human
cuccgcgccgggcgccggucacuuc

SEQ ID NO: 1164161 - RNA, 21 nt, Human
ugaggaaagcccagcgacgcc

SEQ ID NO: 1164162 - RNA, 20 nt, Human
uucccggaagucggcccgcu

SEQ ID NO: 1164163 - RNA, 20 nt, Human
aaaaaaaagcuuaaagggca

SEQ ID NO: 1164164 - RNA, 26 nt, Human
aaaaaguccucuuugaaaaccuaaaa

SEQ ID NO: 1164165 - RNA, 25 nt, Human
aaaaauaaagagaggcaccgguacc

SEQ ID NO: 1164166 - RNA, 24 nt, Human
aaaguccucuuugaaaaccuaaaa

SEQ ID NO: 1164167 - RNA, 24 nt, Human
aaccaaauaaccuucugaguucca

SEQ ID NO: 1164168 - RNA, 23 nt, Human
aagagcuuguggugacucacuaa

SEQ ID NO: 1164169 - RNA, 23 nt, Human
aagcaucuuuuaaaauauuaucc

SEQ ID NO: 1164170 - RNA, 20 nt, Human
aaguagcugggacuacaagc

SEQ ID NO: 1164171 - RNA, 24 nt, Human
aaguagcugggacuacaagcacgu

SEQ ID NO: 1164172 - RNA, 25 nt, Human
aaguagcugggacuacaagcacgug

SEQ ID NO: 1164173 - RNA, 25 nt, Human
aagugcuccucccaucucagccucc

SEQ ID NO: 1164174 - RNA, 21 nt, Human
aauucuuggccaaacgcccaa

SEQ ID NO: 1164175 - RNA, 21 nt, Human
acagcuccucugcugcccucu

SEQ ID NO: 1164176 - RNA, 22 nt, Human
acauaaauucucaaugcucucc

SEQ ID NO: 1164177 - RNA, 24 nt, Human
acucugucucccaggcugggauga

SEQ ID NO: 1164178 - RNA, 22 nt, Human
acugaaauaccaggauucucua

SEQ ID NO: 1164179 - RNA, 19 nt, Human
agacaagaaggaggauuaa

SEQ ID NO: 1164180 - RNA, 19 nt, Human
agcaucuucuagggauugg

SEQ ID NO: 1164181 - RNA, 23 nt, Human
agcucuacuuugcagacagcauu

SEQ ID NO: 1164182 - RNA, 24 nt, Human
agcugggacuacaagcacgugcca

SEQ ID NO: 1164183 - RNA, 18 nt, Human
aggagagaugaagaagca

SEQ ID NO: 1164184 - RNA, 23 nt, Human
aggcacacagucacagacaagaa

SEQ ID NO: 1164185 - RNA, 19 nt, Human
agguaugagccaccgcacc

SEQ ID NO: 1164186 - RNA, 23 nt, Human
agugaucugccagccuuggccuc

SEQ ID NO: 1164187 - RNA, 20 nt, Human
augcuuuagguagagggggu

SEQ ID NO: 1164188 - RNA, 21 nt, Human
auguuaggauuauagguauga

SEQ ID NO: 1164189 - RNA, 24 nt, Human
caaacuccugggcuccagugaucu

SEQ ID NO: 1164190 - RNA, 19 nt, Human
cacacagucacagacaaga

SEQ ID NO: 1164191 - RNA, 19 nt, Human
cacacagucacagacaaga

SEQ ID NO: 1164192 - RNA, 24 nt, Human
caccauauuacccagguuugucuc

SEQ ID NO: 1164193 - RNA, 20 nt, Human
cacuaaaaagccacagggag

SEQ ID NO: 1164194 - RNA, 19 nt, Human
cacuauagccuuaaccucc

SEQ ID NO: 1164195 - RNA, 24 nt, Human
cacucugucucccaggcugggaug

SEQ ID NO: 1164196 - RNA, 18 nt, Human
cagcagccaggauggggc

SEQ ID NO: 1164197 - RNA, 18 nt, Human
cagcaucagcaucuucua

SEQ ID NO: 1164198 - RNA, 24 nt, Human
cagccaggauggggcauuaaugcu

SEQ ID NO: 1164199 - RNA, 22 nt, Human
caggaaaaauagauaauguggu

SEQ ID NO: 1164200 - RNA, 21 nt, Human
caggagagaugaagaagcaua

SEQ ID NO: 1164201 - RNA, 20 nt, Human
caggagagaugaagaagcug

SEQ ID NO: 1164202 - RNA, 21 nt, Human
caguaggcauaauauugggac

SEQ ID NO: 1164203 - RNA, 24 nt, Human
cauauuacccagguuugucucaaa

SEQ ID NO: 1164204 - RNA, 24 nt, Human
caucucagccucccaaguagcugg

SEQ ID NO: 1164205 - RNA, 24 nt, Human
ccaaacgcccaauucaagggccag

SEQ ID NO: 1164206 - RNA, 21 nt, Human
ccaacauguuaggauuauagg

SEQ ID NO: 1164207 - RNA, 19 nt, Human
cccaaguagcugggacuac

SEQ ID NO: 1164208 - RNA, 19 nt, Human
ccccaccauauuacccagg

SEQ ID NO: 1164209 - RNA, 19 nt, Human
ccccaccauauuacccagg

SEQ ID NO: 1164210 - RNA, 20 nt, Human
ccccaccauauuacccaggu

SEQ ID NO: 1164211 - RNA, 19 nt, Human
ccuaggcucaagugcuccu

SEQ ID NO: 1164212 - RNA, 19 nt, Human
ccuccaggcucacaaaaua

SEQ ID NO: 1164213 - RNA, 20 nt, Human
ccucccaucucagccuccca

SEQ ID NO: 1164214 - RNA, 23 nt, Human
ccucugagacuucuucccaaggg

SEQ ID NO: 1164215 - RNA, 23 nt, Human
ccucugagacuucuucccaaguu

SEQ ID NO: 1164216 - RNA, 23 nt, Human
cuagacauugcuuccucugcacu

SEQ ID NO: 1164217 - RNA, 22 nt, Human
cuauagccuuaaccuccuaggc

SEQ ID NO: 1164218 - RNA, 23 nt, Human
cucaaacuccugggcuccaguga

SEQ ID NO: 1164219 - RNA, 21 nt, Human
cucacaaaauaggcauaucua

SEQ ID NO: 1164220 - RNA, 24 nt, Human
cucagccucccaaguagcugggac

SEQ ID NO: 1164221 - RNA, 25 nt, Human
cuccuaggcucaagugcuccuccca

SEQ ID NO: 1164222 - RNA, 19 nt, Human
cuccugggcuccagugauc

SEQ ID NO: 1164223 - RNA, 22 nt, Human
cucucuguucuacagaugagaa

SEQ ID NO: 1164224 - RNA, 21 nt, Human
cuggcaggagagaugaagaag

SEQ ID NO: 1164225 - RNA, 25 nt, Human
gaaaaaauaaagagaggccgguacc

SEQ ID NO: 1164226 - RNA, 23 nt, Human
gaaaaccuaaaaucauuagagaa

SEQ ID NO: 1164227 - RNA, 21 nt, Human
gaagcaguuaguuacaagaga

SEQ ID NO: 1164228 - RNA, 20 nt, Human
gagacagggucucacucugu

SEQ ID NO: 1164229 - RNA, 22 nt, Human
gaugaagaagcauaugaaaaaa

SEQ ID NO: 1164230 - RNA, 18 nt, Human
gauuauagguaugagcca

SEQ ID NO: 1164231 - RNA, 22 nt, Human
gauuauagguaugagccaccgc

SEQ ID NO: 1164232 - RNA, 23 nt, Human
gauuauagguaugagccaccgca

SEQ ID NO: 1164233 - RNA, 24 nt, Human
gccaauauacauuauuuuuaucau

SEQ ID NO: 1164234 - RNA, 21 nt, Human
gcuagggagcuggcaggagag

SEQ ID NO: 1164235 - RNA, 22 nt, Human
ggauuauagguaugagccaccg

SEQ ID NO: 1164236 - RNA, 18 nt, Human
ggucucaaaauauggcuc

SEQ ID NO: 1164237 - RNA, 21 nt, Human
guaauuacaaccccaaagagc

SEQ ID NO: 1164238 - RNA, 18 nt, Human
uaaaaagccacagggaga

SEQ ID NO: 1164239 - RNA, 22 nt, Human
uaaaaagccacagggagaagca

SEQ ID NO: 1164240 - RNA, 25 nt, Human
uaaccuccuaggcucaagugcuccu

SEQ ID NO: 1164241 - RNA, 22 nt, Human
uaacuugggaaacaaaaaugcu

SEQ ID NO: 1164242 - RNA, 26 nt, Human
uaauaaaaaugaggacaguaggcaua

SEQ ID NO: 1164243 - RNA, 24 nt, Human
uaaugcuuuagguagagggggucu

SEQ ID NO: 1164244 - RNA, 22 nt, Human
uacaagcacgugccaccaugcc

SEQ ID NO: 1164245 - RNA, 20 nt, Human
uacagaugagaaaauugaac

SEQ ID NO: 1164246 - RNA, 23 nt, Human
uacagugcagccaagugcagaaa

SEQ ID NO: 1164247 - RNA, 22 nt, Human
uacuacagaguaaauuuuuuca

SEQ ID NO: 1164248 - RNA, 23 nt, Human
uacucucuguucuacagaugaga

SEQ ID NO: 1164249 - RNA, 21 nt, Human
uagccuuaaccuccuaggcuc

SEQ ID NO: 1164250 - RNA, 18 nt, Human
uaggauuauagguaugag

SEQ ID NO: 1164251 - RNA, 21 nt, Human
uaggauuauagguaugagcca

SEQ ID NO: 1164252 - RNA, 22 nt, Human
uaggauuauagguaugagccac

SEQ ID NO: 1164253 - RNA, 23 nt, Human
uaggauuauagguaugagccacc

SEQ ID NO: 1164254 - RNA, 24 nt, Human
uaggauuauagguaugagccaccg

SEQ ID NO: 1164255 - RNA, 20 nt, Human
uagggauugguauaaacaua

SEQ ID NO: 1164256 - RNA, 23 nt, Human
uagggauuuuuuucagacagcuc

SEQ ID NO: 1164257 - RNA, 23 nt, Human
ucacuauagccuuaaccuccuag

SEQ ID NO: 1164258 - RNA, 18 nt, Human
ucagccucccaaguagcu

SEQ ID NO: 1164259 - RNA, 20 nt, Human
ucagccucccaaguagcugg

SEQ ID NO: 1164260 - RNA, 18 nt, Human
ucccaaguagcugggacu

SEQ ID NO: 1164261 - RNA, 18 nt, Human
uccuaggcucaagugcuc

SEQ ID NO: 1164262 - RNA, 27 nt, Human
uccucccaucucagccucccaaguagc

SEQ ID NO: 1164263 - RNA, 21 nt, Human
ucucaaacuccugggcuccag

SEQ ID NO: 1164264 - RNA, 18 nt, Human
ucucaauacaguguggcc

SEQ ID NO: 1164265 - RNA, 23 nt, Human
ucucacucugucucccaggcugg

SEQ ID NO: 1164266 - RNA, 23 nt, Human
ucucacucugucucccaggcugg

SEQ ID NO: 1164267 - RNA, 24 nt, Human
ucucacucugucucccaggcuggg

SEQ ID NO: 1164268 - RNA, 26 nt, Human
ucucacucugucucccaggcugggau

SEQ ID NO: 1164269 - RNA, 19 nt, Human
ucugagacuucuucccaag

SEQ ID NO: 1164270 - RNA, 24 nt, Human
ucugcuaagaaauaauacauaaag

SEQ ID NO: 1164271 - RNA, 19 nt, Human
ugacucacuaaaaagccac

SEQ ID NO: 1164272 - RNA, 20 nt, Human
ugagacagggucucacucug

SEQ ID NO: 1164273 - RNA, 22 nt, Human
ugagacagggucucacucuguc

SEQ ID NO: 1164274 - RNA, 20 nt, Human
ugaguuccagcuagggagcc

SEQ ID NO: 1164275 - RNA, 22 nt, Human
ugaucugccagccuuggccucc

SEQ ID NO: 1164276 - RNA, 24 nt, Human
ugcuccucccaucucagccuccca

SEQ ID NO: 1164277 - RNA, 23 nt, Human
ugcucucccuaccuccaggcuca

SEQ ID NO: 1164278 - RNA, 21 nt, Human
ugggacuacaagcacgugcca

SEQ ID NO: 1164279 - RNA, 24 nt, Human
ugggacuacaagcacgugccacca

SEQ ID NO: 1164280 - RNA, 23 nt, Human
uguacaugugauaauaccgaaau

SEQ ID NO: 1164281 - RNA, 21 nt, Human
uuaaaauuuccucugagacuu

SEQ ID NO: 1164282 - RNA, 21 nt, Human
uuaggauuauagguaugagcc

SEQ ID NO: 1164283 - RNA, 20 nt, Human
uucaagaaaaacauaacagc

SEQ ID NO: 1164284 - RNA, 22 nt, Human
uucaagaaaaacauaacagcuc

SEQ ID NO: 1164285 - RNA, 21 nt, Human
uucagcucugcaucagcagga

SEQ ID NO: 1164286 - RNA, 18 nt, Human
uuccuggucaaguaggga

SEQ ID NO: 1164287 - RNA, 20 nt, Human
uugcuuccucugcacuucuc

SEQ ID NO: 1164288 - RNA, 24 nt, Human
uuggaucagcagccaggauggggc

SEQ ID NO: 1164289 - RNA, 22 nt, Human
uuuaaaauuuccucugagacuu

SEQ ID NO: 1164290 - RNA, 22 nt, Human
uuugaaaaccuaaaaucauuag

SEQ ID NO: 1164291 - RNA, 23 nt, Human
aaacgaacaaaaccaucgcuaaa

SEQ ID NO: 1164292 - RNA, 23 nt, Human
aacaacuauuaaugcuaaacuuc

SEQ ID NO: 1164293 - RNA, 21 nt, Human
aagaagacucaacaugggcuc

SEQ ID NO: 1164294 - RNA, 21 nt, Human
auaaaacacguuucagaacaa

SEQ ID NO: 1164295 - RNA, 24 nt, Human
augaaaacccaugaaaagaagacu

SEQ ID NO: 1164296 - RNA, 20 nt, Human
caacaguauguuaccaaggu

SEQ ID NO: 1164297 - RNA, 23 nt, Human
caacgaugaccuuaaagugccaa

SEQ ID NO: 1164298 - RNA, 22 nt, Human
ccaagguguguguguuuuuuuu

SEQ ID NO: 1164299 - RNA, 22 nt, Human
ccucaaauacuccuaaauucac

SEQ ID NO: 1164300 - RNA, 23 nt, Human
ccuggcuuggccaucucuccuuu

SEQ ID NO: 1164301 - RNA, 19 nt, Human
ccuuaaagugccaaacacc

SEQ ID NO: 1164302 - RNA, 24 nt, Human
ccuuuacuuaaacgaacaaaacca

SEQ ID NO: 1164303 - RNA, 21 nt, Human
cuaaaccugauaaaacacguu

SEQ ID NO: 1164304 - RNA, 23 nt, Human
cuugauaucaacaguauguuacc

SEQ ID NO: 1164305 - RNA, 21 nt, Human
gaccguuuucuaauagacaau

SEQ ID NO: 1164306 - RNA, 25 nt, Human
gguguguguguuuuuuuuuuuuuuu

SEQ ID NO: 1164307 - RNA, 22 nt, Human
guucuugauaucaacaguaugu

SEQ ID NO: 1164308 - RNA, 22 nt, Human
uaaacuaaacagguucuugaua

SEQ ID NO: 1164309 - RNA, 20 nt, Human
uagaauguuacaauguaaac

SEQ ID NO: 1164310 - RNA, 23 nt, Human
ugaaaagaagacucaacaugggc

SEQ ID NO: 1164311 - RNA, 25 nt, Human
ugccaaacaccaaagaaucucuuag

SEQ ID NO: 1164312 - RNA, 27 nt, Human
ugcccaacgaugaccuuaaagugccaa

SEQ ID NO: 1164313 - RNA, 21 nt, Human
uguguguuuuuuuuuuuuuuu

SEQ ID NO: 1164314 - RNA, 19 nt, Human
uuuuuuuuuuuuuuuguuu

SEQ ID NO: 1164315 - RNA, 21 nt, Human
aaaaaaaaacaaaaacaagga

SEQ ID NO: 1164316 - RNA, 18 nt, Human
aaaaaaaaagcuuggaau

SEQ ID NO: 1164317 - RNA, 18 nt, Human
aaaaacaaggaaggcauc

SEQ ID NO: 1164318 - RNA, 20 nt, Human
aaaagagauagggggcggga

SEQ ID NO: 1164319 - RNA, 18 nt, Human
aaaauaacuggaugaggc

SEQ ID NO: 1164320 - RNA, 18 nt, Human
aaggacccagagguguuc

SEQ ID NO: 1164321 - RNA, 19 nt, Human
aaggaugggagaaaacacc

SEQ ID NO: 1164322 - RNA, 18 nt, Human
aagguccuuuggagggga

SEQ ID NO: 1164323 - RNA, 22 nt, Human
aaggugaagaaaaaaacuugcc

SEQ ID NO: 1164324 - RNA, 22 nt, Human
aaugcaggcucaagcugacacu

SEQ ID NO: 1164325 - RNA, 19 nt, Human
aauuuuucaucugcagguu

SEQ ID NO: 1164326 - RNA, 20 nt, Human
acgaguucucaaacuaacgc

SEQ ID NO: 1164327 - RNA, 23 nt, Human
agaaaagaacaacugggaaaaga

SEQ ID NO: 1164328 - RNA, 22 nt, Human
agaagggugaaaagagauaggg

SEQ ID NO: 1164329 - RNA, 22 nt, Human
agaucaagaaaagaacaacugg

SEQ ID NO: 1164330 - RNA, 25 nt, Human
agcuacagguaaaggcucuaccacc

SEQ ID NO: 1164331 - RNA, 18 nt, Human
agcugaguaagacuagug

SEQ ID NO: 1164332 - RNA, 21 nt, Human
agggaggaaagcacauucggg

SEQ ID NO: 1164333 - RNA, 19 nt, Human
aguggcagagggagugacg

SEQ ID NO: 1164334 - RNA, 21 nt, Human
augguguuuuaguaacuguug

SEQ ID NO: 1164335 - RNA, 20 nt, Human
caaaaaaaaaaacaaaaaca

SEQ ID NO: 1164336 - RNA, 22 nt, Human
caaaaacaaggaaggcaucaca

SEQ ID NO: 1164337 - RNA, 23 nt, Human
caaaaacaaggaaggcaucacac

SEQ ID NO: 1164338 - RNA, 19 nt, Human
caagucccuuuacucugcc

SEQ ID NO: 1164339 - RNA, 23 nt, Human
caauaacugaggagcccacaugc

SEQ ID NO: 1164340 - RNA, 19 nt, Human
cacacaguuucauuaguaa

SEQ ID NO: 1164341 - RNA, 20 nt, Human
cacagcagcaacaaaagaaa

SEQ ID NO: 1164342 - RNA, 22 nt, Human
cagauggcauucuuggaaucag

SEQ ID NO: 1164343 - RNA, 18 nt, Human
cagcagcaacaaaagaaa

SEQ ID NO: 1164344 - RNA, 23 nt, Human
caggaauuaucacuaucacuuau

SEQ ID NO: 1164345 - RNA, 19 nt, Human
caguacaagcaacgacguu

SEQ ID NO: 1164346 - RNA, 21 nt, Human
cauauuuauuaaacuugaggc

SEQ ID NO: 1164347 - RNA, 19 nt, Human
ccuccaaucuuuccccuuu

SEQ ID NO: 1164348 - RNA, 22 nt, Human
ccuuccacuacuuuuugcagcu

SEQ ID NO: 1164349 - RNA, 21 nt, Human
cgccagugcauauucccucug

SEQ ID NO: 1164350 - RNA, 22 nt, Human
cgggaaaagaucaagaaaagaa

SEQ ID NO: 1164351 - RNA, 24 nt, Human
cucucagucccacuuuccauuucc

SEQ ID NO: 1164352 - RNA, 19 nt, Human
cugaaggaacucacagaug

SEQ ID NO: 1164353 - RNA, 20 nt, Human
cuuuggaggggaagcccaaa

SEQ ID NO: 1164354 - RNA, 19 nt, Human
gaauguucccccccagacu

SEQ ID NO: 1164355 - RNA, 19 nt, Human
gagggcagaggaugaggau

SEQ ID NO: 1164356 - RNA, 21 nt, Human
gaucaagaaaaaaaggcuuuc

SEQ ID NO: 1164357 - RNA, 19 nt, Human
gaucaagaaaagaacaacu

SEQ ID NO: 1164358 - RNA, 19 nt, Human
gcaaaaaaaaaaacaaaaa

SEQ ID NO: 1164359 - RNA, 22 nt, Human
gcaacaaaagaaaauaacugga

SEQ ID NO: 1164360 - RNA, 18 nt, Human
gcauucuuggaaucagga

SEQ ID NO: 1164361 - RNA, 19 nt, Human
gcccaaauggcggagccuu

SEQ ID NO: 1164362 - RNA, 24 nt, Human
ggcacaaagaucucuucaauuauc

SEQ ID NO: 1164363 - RNA, 18 nt, Human
gggaaaagaucaagaaaa

SEQ ID NO: 1164364 - RNA, 26 nt, Human
gggaagcccaaaaagacaaucacuga

SEQ ID NO: 1164365 - RNA, 19 nt, Human
gggcaggggagagggagga

SEQ ID NO: 1164366 - RNA, 20 nt, Human
uaaacuugaggcgggcaggg

SEQ ID NO: 1164367 - RNA, 22 nt, Human
uaagacuagugcugaaaacugg

SEQ ID NO: 1164368 - RNA, 23 nt, Human
uacagguaaaggcucuaccacca

SEQ ID NO: 1164369 - RNA, 18 nt, Human
uacuguauuuuuauguug

SEQ ID NO: 1164370 - RNA, 30 nt, Human
uauguugcaugcacagacacguacacacag

SEQ ID NO: 1164371 - RNA, 19 nt, Human
uauuucaccucuugagaau

SEQ ID NO: 1164372 - RNA, 18 nt, Human
ucacaguacaagcaacga

SEQ ID NO: 1164373 - RNA, 18 nt, Human
ucacugacuuccugggag

SEQ ID NO: 1164374 - RNA, 21 nt, Human
ucagauggcauucuuggaauc

SEQ ID NO: 1164375 - RNA, 19 nt, Human
ucaggaguagcugcucaca

SEQ ID NO: 1164376 - RNA, 19 nt, Human
ucaguccaucaguuuuugu

SEQ ID NO: 1164377 - RNA, 19 nt, Human
ucccuggggauaguggcag

SEQ ID NO: 1164378 - RNA, 21 nt, Human
ucccuggggauaguggcagag

SEQ ID NO: 1164379 - RNA, 19 nt, Human
uccuuuggaggggaagccc

SEQ ID NO: 1164380 - RNA, 21 nt, Human
ucugaaggaucaugacuauga

SEQ ID NO: 1164381 - RNA, 20 nt, Human
ucuuucuucuucugaguucu

SEQ ID NO: 1164382 - RNA, 24 nt, Human
ucuuuuaucaguccaucaguuuuu

SEQ ID NO: 1164383 - RNA, 18 nt, Human
ugaaggugaagaaaaaaa

SEQ ID NO: 1164384 - RNA, 22 nt, Human
ugaauuuucauauugaagguga

SEQ ID NO: 1164385 - RNA, 23 nt, Human
ugacuaugagugagaaccugaag

SEQ ID NO: 1164386 - RNA, 24 nt, Human
ugacuaugagugagaaccugaagg

SEQ ID NO: 1164387 - RNA, 21 nt, Human
ugagauaggaucacaauaacu

SEQ ID NO: 1164388 - RNA, 23 nt, Human
ugagcgagggugggagaagggug

SEQ ID NO: 1164389 - RNA, 20 nt, Human
ugaggcucuuccacugcaga

SEQ ID NO: 1164390 - RNA, 20 nt, Human
ugaggguuaaagggaaagga

SEQ ID NO: 1164391 - RNA, 23 nt, Human
ugcaaaaaaaaaaacaaaaacaa

SEQ ID NO: 1164392 - RNA, 31 nt, Human
ugcaaaaaaaaaaacaaaaacaaggaaggcu

SEQ ID NO: 1164393 - RNA, 18 nt, Human
uggaaugcaggcucaagc

SEQ ID NO: 1164394 - RNA, 23 nt, Human
uggaaugcaggcucaagcugaca

SEQ ID NO: 1164395 - RNA, 21 nt, Human
uggcagagggagugacggcca

SEQ ID NO: 1164396 - RNA, 23 nt, Human
ugggagaaaacaccaaauuaaaa

SEQ ID NO: 1164397 - RNA, 24 nt, Human
ugggagaaaacaccaaauuaaaaa

SEQ ID NO: 1164398 - RNA, 21 nt, Human
ugggagaagggugaaaagaga

SEQ ID NO: 1164399 - RNA, 20 nt, Human
uggggcaggaagauaggauu

SEQ ID NO: 1164400 - RNA, 19 nt, Human
uuaaaaaaaaagcuuggaa

SEQ ID NO: 1164401 - RNA, 23 nt, Human
uuaaagggaaaggaugggagaaa

SEQ ID NO: 1164402 - RNA, 18 nt, Human
uucaagucccuuuacucu

SEQ ID NO: 1164403 - RNA, 18 nt, Human
uucacaguacaagcaacg

SEQ ID NO: 1164404 - RNA, 21 nt, Human
uucauauugaaggugaagaaa

SEQ ID NO: 1164405 - RNA, 19 nt, Human
uucccaaaacacguagaaa

SEQ ID NO: 1164406 - RNA, 22 nt, Human
uugcccaaauggcggagccuuu

SEQ ID NO: 1164407 - RNA, 19 nt, Human
uuuccccuuucaagcuaca

SEQ ID NO: 1164408 - RNA, 18 nt, Human
uuugauucuuucuucuuc

SEQ ID NO: 1164409 - RNA, 18 nt, Human
uuuucuuaaaaaaaaaaa

SEQ ID NO: 1164410 - RNA, 23 nt, Human
aaacugaggccggcgaggaggga

SEQ ID NO: 1164411 - RNA, 20 nt, Human
aaagaagaaagcucugugcu

SEQ ID NO: 1164412 - RNA, 22 nt, Human
agaagaaagcucugugcuuagu

SEQ ID NO: 1164413 - RNA, 19 nt, Human
agagcuggggggaucugga

SEQ ID NO: 1164414 - RNA, 22 nt, Human
agcccggaggugacacgggcuc

SEQ ID NO: 1164415 - RNA, 21 nt, Human
cagcgcgggacuaggaggggg

SEQ ID NO: 1164416 - RNA, 22 nt, Human
caggggccuuugaagacagcgc

SEQ ID NO: 1164417 - RNA, 20 nt, Human
caguaccaagcuugcaggcg

SEQ ID NO: 1164418 - RNA, 19 nt, Human
cccggaggugacacgggcu

SEQ ID NO: 1164419 - RNA, 24 nt, Human
cccugguggagacccuggucacca

SEQ ID NO: 1164420 - RNA, 20 nt, Human
cccuguaugugucccagccc

SEQ ID NO: 1164421 - RNA, 26 nt, Human
ccggggcuggggcgcgugcuaggggc

SEQ ID NO: 1164422 - RNA, 24 nt, Human
ccuguaugugucccagcccgggac

SEQ ID NO: 1164423 - RNA, 23 nt, Human
ccuguccccaaccccaggugugc

SEQ ID NO: 1164424 - RNA, 22 nt, Human
cgcuaagcagaaguaggagcag

SEQ ID NO: 1164425 - RNA, 21 nt, Human
cguccccaacgugggggaggg

SEQ ID NO: 1164426 - RNA, 18 nt, Human
cucaaaagaagaaagcuc

SEQ ID NO: 1164427 - RNA, 22 nt, Human
cucggaggacccuggagauagg

SEQ ID NO: 1164428 - RNA, 21 nt, Human
gagagcuggggggaucuggag

SEQ ID NO: 1164429 - RNA, 22 nt, Human
gagcggggccgggucgcaagaa

SEQ ID NO: 1164430 - RNA, 23 nt, Human
gcaccacaugcguggccucaaaa

SEQ ID NO: 1164431 - RNA, 19 nt, Human
gccuuggaggggggcugcg

SEQ ID NO: 1164432 - RNA, 25 nt, Human
ggagcggggccgggucgcaagaaga

SEQ ID NO: 1164433 - RNA, 19 nt, Human
gggaggcugaguccgggga

SEQ ID NO: 1164434 - RNA, 23 nt, Human
gguccgcggccgagagcuggggg

SEQ ID NO: 1164435 - RNA, 20 nt, Human
uaagcagaaguaggagcagg

SEQ ID NO: 1164436 - RNA, 19 nt, Human
uagagagaucgaacuguuu

SEQ ID NO: 1164437 - RNA, 22 nt, Human
uaggagcaggugugccggguug

SEQ ID NO: 1164438 - RNA, 21 nt, Human
ucauguccuguccccaacccc

SEQ ID NO: 1164439 - RNA, 27 nt, Human
uccccaacgugggggaggccguauacg

SEQ ID NO: 1164440 - RNA, 20 nt, Human
uccccaacgugggggagggg

SEQ ID NO: 1164441 - RNA, 27 nt, Human
uccgcaccacaugcguggccucaaaag

SEQ ID NO: 1164442 - RNA, 23 nt, Human
ucggaggacccuggagauaggag

SEQ ID NO: 1164443 - RNA, 19 nt, Human
ugacacgggcucuggaagg

SEQ ID NO: 1164444 - RNA, 20 nt, Human
ugacacgggcucuggaaggg

SEQ ID NO: 1164445 - RNA, 29 nt, Human
uggccgagggguucccaaggcuccacucc

SEQ ID NO: 1164446 - RNA, 22 nt, Human
ugguggagacccuggucaccac

SEQ ID NO: 1164447 - RNA, 18 nt, Human
uguccuguccccaacccc

SEQ ID NO: 1164448 - RNA, 24 nt, Human
uguccuguccccaaccccaggugu

SEQ ID NO: 1164449 - RNA, 22 nt, Human
uguuucucuuucucagccugga

SEQ ID NO: 1164450 - RNA, 24 nt, Human
uucagcuguauuuucgaaccccug

SEQ ID NO: 1164451 - RNA, 25 nt, Human
uucagcuguauuuucgaaccccugu

SEQ ID NO: 1164452 - RNA, 22 nt, Human
uuuucuguaaaaaaucguggcu

SEQ ID NO: 1164453 - RNA, 22 nt, Human
aaagaagaaaaaagggaaagag

SEQ ID NO: 1164454 - RNA, 22 nt, Human
aagaaaaaagggaaagagaaaa

SEQ ID NO: 1164455 - RNA, 23 nt, Human
aagaagaaaaaagggaaagagaa

SEQ ID NO: 1164456 - RNA, 21 nt, Human
accauggcguuuauuuuuggc

SEQ ID NO: 1164457 - RNA, 18 nt, Human
accgugugcagccgcggc

SEQ ID NO: 1164458 - RNA, 22 nt, Human
agaaaauaccgucugaagucca

SEQ ID NO: 1164459 - RNA, 19 nt, Human
agaagaaaaaagggaaaga

SEQ ID NO: 1164460 - RNA, 22 nt, Human
agaagaaaaggagggagggaca

SEQ ID NO: 1164461 - RNA, 22 nt, Human
aggaagagauagggcgagaaga

SEQ ID NO: 1164462 - RNA, 23 nt, Human
aggaagagauagggcgagaagaa

SEQ ID NO: 1164463 - RNA, 21 nt, Human
aggcaggcgccggggaguggg

SEQ ID NO: 1164464 - RNA, 24 nt, Human
agguuguaacaaagaggugaccau

SEQ ID NO: 1164465 - RNA, 23 nt, Human
auaacucuucccacucaaggcac

SEQ ID NO: 1164466 - RNA, 19 nt, Human
cacccccgccaggcggccc

SEQ ID NO: 1164467 - RNA, 20 nt, Human
cagauccaagagugcccagu

SEQ ID NO: 1164468 - RNA, 24 nt, Human
caguuuaaggcauaacucuuccca

SEQ ID NO: 1164469 - RNA, 21 nt, Human
caugucugucaccucaucuaa

SEQ ID NO: 1164470 - RNA, 23 nt, Human
ccacccccgccaggcggcccgcc

SEQ ID NO: 1164471 - RNA, 24 nt, Human
cccccgccaggcggcccgcccucc

SEQ ID NO: 1164472 - RNA, 24 nt, Human
cccgccaggcggcccgcccucccc

SEQ ID NO: 1164473 - RNA, 21 nt, Human
cccuccccuccugggcuccgg

SEQ ID NO: 1164474 - RNA, 22 nt, Human
cccuccgccgcugccucgcguc

SEQ ID NO: 1164475 - RNA, 22 nt, Human
ccgcccuccccuccugggcucc

SEQ ID NO: 1164476 - RNA, 20 nt, Human
ccgccgcugccucgcguccg

SEQ ID NO: 1164477 - RNA, 18 nt, Human
ccugagugugcggucagg

SEQ ID NO: 1164478 - RNA, 22 nt, Human
cgagaaagaagaaaaaagggaa

SEQ ID NO: 1164479 - RNA, 23 nt, Human
cgagaaagaagaaaaaagggaaa

SEQ ID NO: 1164480 - RNA, 22 nt, Human
cgccuccauccccuuuacgaga

SEQ ID NO: 1164481 - RNA, 21 nt, Human
cucgcagcgcccucguccgcu

SEQ ID NO: 1164482 - RNA, 20 nt, Human
cucguccgcuuccaagccca

SEQ ID NO: 1164483 - RNA, 23 nt, Human
gacgagaaagaagaaaaaaggga

SEQ ID NO: 1164484 - RNA, 25 nt, Human
gagaaagaagaaaaaagggaaagga

SEQ ID NO: 1164485 - RNA, 23 nt, Human
gagaagaggagaucaaaaaauau

SEQ ID NO: 1164486 - RNA, 20 nt, Human
gaguagaaagggaggaagag

SEQ ID NO: 1164487 - RNA, 18 nt, Human
gauuacccggaaaagccc

SEQ ID NO: 1164488 - RNA, 28 nt, Human
gcggcccgcccuccccuccugggcuccg

SEQ ID NO: 1164489 - RNA, 18 nt, Human
gcugccacagguuccuga

SEQ ID NO: 1164490 - RNA, 20 nt, Human
ggcccgcccuccccuccugg

SEQ ID NO: 1164491 - RNA, 18 nt, Human
ggcgagaagaaaaggagg

SEQ ID NO: 1164492 - RNA, 19 nt, Human
ggcgagaagaaaaggaggg

SEQ ID NO: 1164493 - RNA, 19 nt, Human
ggcggauucagccugcauu

SEQ ID NO: 1164494 - RNA, 18 nt, Human
ggggaguggggcgcgggc

SEQ ID NO: 1164495 - RNA, 19 nt, Human
gucacgcucgcccuccgcc

SEQ ID NO: 1164496 - RNA, 24 nt, Human
gucccagauuacccggaaaagccc

SEQ ID NO: 1164497 - RNA, 23 nt, Human
gugcacggugcugggcacgcugu

SEQ ID NO: 1164498 - RNA, 19 nt, Human
uaaagagaggacccgcgca

SEQ ID NO: 1164499 - RNA, 19 nt, Human
uaaagagaggacccgcgca

SEQ ID NO: 1164500 - RNA, 18 nt, Human
uacccggaaaagcccugg

SEQ ID NO: 1164501 - RNA, 19 nt, Human
uccugggcuccgggcugcc

SEQ ID NO: 1164502 - RNA, 23 nt, Human
ugcauugcaugcaugcaugucug

SEQ ID NO: 1164503 - RNA, 21 nt, Human
ugcccacccccgccaggcggc

SEQ ID NO: 1164504 - RNA, 19 nt, Human
uguaacaaagaggugacca

SEQ ID NO: 1164505 - RNA, 20 nt, Human
uuacccggaaaagcccuggc

SEQ ID NO: 1164506 - RNA, 24 nt, Human
uuuuuggcuccagacaggcggauu

SEQ ID NO: 1164507 - RNA, 20 nt, Human
augagaaauccaaaugaagc

SEQ ID NO: 1164508 - RNA, 19 nt, Human
caagaaccuccaaaugcug

SEQ ID NO: 1164509 - RNA, 18 nt, Human
gggaggcucuggcagcau

SEQ ID NO: 1164510 - RNA, 22 nt, Human
uaacugugacuuugcuauugca

SEQ ID NO: 1164511 - RNA, 21 nt, Human
uagaagaggagggcucucaag

SEQ ID NO: 1164512 - RNA, 22 nt, Human
uagaagaggagggcucucaagc

SEQ ID NO: 1164513 - RNA, 20 nt, Human
uccuggguccauagaguugg

SEQ ID NO: 1164514 - RNA, 24 nt, Human
ugaagucgacuguaauuuucuagg

SEQ ID NO: 1164515 - RNA, 21 nt, Human
ugagcaagaaccuccaaaugc

SEQ ID NO: 1164516 - RNA, 24 nt, Human
uggcagcaucauugugaucucagu

SEQ ID NO: 1164517 - RNA, 26 nt, Human
uggguccauagaguuggucggaugac

SEQ ID NO: 1164518 - RNA, 18 nt, Human
uugagcaagaaccuccaa

SEQ ID NO: 1164519 - RNA, 18 nt, Human
aaaaacaaacagguugaa

SEQ ID NO: 1164520 - RNA, 19 nt, Human
aagccuuuuaaaaaacaaa

SEQ ID NO: 1164521 - RNA, 21 nt, Human
agccuuuuaaaaaacaaacag

SEQ ID NO: 1164522 - RNA, 19 nt, Human
caaugguacauauaaaccc

SEQ ID NO: 1164523 - RNA, 22 nt, Human
caauugccuaggaccucaacug

SEQ ID NO: 1164524 - RNA, 24 nt, Human
cagguugaaaaauggguuaaagua

SEQ ID NO: 1164525 - RNA, 22 nt, Human
caucaauugccuaggaccucaa

SEQ ID NO: 1164526 - RNA, 22 nt, Human
ccagagcuuccuaucacgucag

SEQ ID NO: 1164527 - RNA, 21 nt, Human
cccagagcuuccuaucacguc

SEQ ID NO: 1164528 - RNA, 24 nt, Human
cugaggaauucucucaauuaugaa

SEQ ID NO: 1164529 - RNA, 18 nt, Human
gcccagagcuuccuauca

SEQ ID NO: 1164530 - RNA, 27 nt, Human
gcuaucaacugaggaauucucucaauu

SEQ ID NO: 1164531 - RNA, 24 nt, Human
ggacgggcgaacgggugggcgggc

SEQ ID NO: 1164532 - RNA, 18 nt, Human
gggcgaacgggugggcgg

SEQ ID NO: 1164533 - RNA, 23 nt, Human
gggcggcugucuggcggcggcug

SEQ ID NO: 1164534 - RNA, 24 nt, Human
gggcgggcggcugucuggcggcgg

SEQ ID NO: 1164535 - RNA, 22 nt, Human
uaaaaaacaaacagguugaaaa

SEQ ID NO: 1164536 - RNA, 23 nt, Human
uaaaaaacaaacagguugaaaaa

SEQ ID NO: 1164537 - RNA, 18 nt, Human
uaaaguaggcaaauacag

SEQ ID NO: 1164538 - RNA, 20 nt, Human
uaaaguaggcaaauacagca

SEQ ID NO: 1164539 - RNA, 23 nt, Human
uagcugacuucaaauugcuccau

SEQ ID NO: 1164540 - RNA, 18 nt, Human
uaugaagaaaaggagacu

SEQ ID NO: 1164541 - RNA, 22 nt, Human
ucugccuuuagggcuaucaacu

SEQ ID NO: 1164542 - RNA, 19 nt, Human
ugccuaggaccucaacagc

SEQ ID NO: 1164543 - RNA, 22 nt, Human
ugggaaauguucaugcauaagg

SEQ ID NO: 1164544 - RNA, 20 nt, Human
uguucucuuuaccuaagccc

SEQ ID NO: 1164545 - RNA, 21 nt, Human
uuaaaguaggcaaauacagca

SEQ ID NO: 1164546 - RNA, 22 nt, Human
uuauuuucuuucucaaaaucca

SEQ ID NO: 1164547 - RNA, 22 nt, Human
uucaaauugcuccauacaaugg

SEQ ID NO: 1164548 - RNA, 19 nt, Human
uucuuucucaaaauccagg

SEQ ID NO: 1164549 - RNA, 19 nt, Human
aaaaagaaaauaguaaaug

SEQ ID NO: 1164550 - RNA, 21 nt, Human
aaaaagaaaauaguaaaugaa

SEQ ID NO: 1164551 - RNA, 21 nt, Human
aaacacccuauguuucccagg

SEQ ID NO: 1164552 - RNA, 23 nt, Human
aagaaucacuugaaccugggagg

SEQ ID NO: 1164553 - RNA, 24 nt, Human
aagcagucaauauaaauccaaaac

SEQ ID NO: 1164554 - RNA, 20 nt, Human
aaguuacagaaauuuauaau

SEQ ID NO: 1164555 - RNA, 24 nt, Human
aaucacuugaaccugggaggcaga

SEQ ID NO: 1164556 - RNA, 18 nt, Human
aauuacaauugugagcca

SEQ ID NO: 1164557 - RNA, 24 nt, Human
acaacaacaaaaaaagaaacuaaa

SEQ ID NO: 1164558 - RNA, 19 nt, Human
acccuauguuucccaggcu

SEQ ID NO: 1164559 - RNA, 22 nt, Human
agaagagacuuauaguagacac

SEQ ID NO: 1164560 - RNA, 18 nt, Human
agagauccucccaccuca

SEQ ID NO: 1164561 - RNA, 20 nt, Human
agaucaugccccugcacucc

SEQ ID NO: 1164562 - RNA, 19 nt, Human
agcaguauuuuuuuuuucu

SEQ ID NO: 1164563 - RNA, 23 nt, Human
agccucgaccucccgagcucaag

SEQ ID NO: 1164564 - RNA, 19 nt, Human
agcuaggacuacaagccca

SEQ ID NO: 1164565 - RNA, 24 nt, Human
aggaaaauucaagguccugaaaag

SEQ ID NO: 1164566 - RNA, 21 nt, Human
aggaaguucaguuaaaaaaua

SEQ ID NO: 1164567 - RNA, 19 nt, Human
aggaguauuuauuucuuau

SEQ ID NO: 1164568 - RNA, 19 nt, Human
aggauagaugccaggagaa

SEQ ID NO: 1164569 - RNA, 21 nt, Human
aggcagagguuggaguaagcc

SEQ ID NO: 1164570 - RNA, 24 nt, Human
aggcagagguuggaguaagccgag

SEQ ID NO: 1164571 - RNA, 22 nt, Human
aggcauaagaaucacuugaacc

SEQ ID NO: 1164572 - RNA, 23 nt, Human
agugcaauggcacgaugauggcu

SEQ ID NO: 1164573 - RNA, 21 nt, Human
agugguggcagcacuuacagg

SEQ ID NO: 1164574 - RNA, 24 nt, Human
aucaugccccugcacuccagccug

SEQ ID NO: 1164575 - RNA, 23 nt, Human
auuucaauuaucuucuacuuuca

SEQ ID NO: 1164576 - RNA, 18 nt, Human
caaacacccuauguuucc

SEQ ID NO: 1164577 - RNA, 26 nt, Human
caauagcuaggacuacaagcccaugc

SEQ ID NO: 1164578 - RNA, 22 nt, Human
cacacaccaccacaccuggcua

SEQ ID NO: 1164579 - RNA, 23 nt, Human
cacacaccaccacaccuggcuaa

SEQ ID NO: 1164580 - RNA, 25 nt, Human
cacaguugggaggcugaggcauaag

SEQ ID NO: 1164581 - RNA, 18 nt, Human
caccgcauccagccucca

SEQ ID NO: 1164582 - RNA, 25 nt, Human
caccucagccucccgaaguugcuga

SEQ ID NO: 1164583 - RNA, 20 nt, Human
caccuuagcuuccagaguag

SEQ ID NO: 1164584 - RNA, 23 nt, Human
cacuccagccugggccacugagc

SEQ ID NO: 1164585 - RNA, 24 nt, Human
cacuccagccugggccacugagcg

SEQ ID NO: 1164586 - RNA, 21 nt, Human
caggcacacaccaccacaccu

SEQ ID NO: 1164587 - RNA, 21 nt, Human
cauaguacugagacuaucaca

SEQ ID NO: 1164588 - RNA, 21 nt, Human
cauuucaauuaucuucuacuu

SEQ ID NO: 1164589 - RNA, 21 nt, Human
ccaauagcuaggacuacaagc

SEQ ID NO: 1164590 - RNA, 21 nt, Human
cccgagcucaagcaaaccucc

SEQ ID NO: 1164591 - RNA, 19 nt, Human
cccugcacuccagccuggg

SEQ ID NO: 1164592 - RNA, 19 nt, Human
cccugcacuccagccuggg

SEQ ID NO: 1164593 - RNA, 20 nt, Human
cccugcacuccagccugggc

SEQ ID NO: 1164594 - RNA, 22 nt, Human
cccugcacuccagccugggcca

SEQ ID NO: 1164595 - RNA, 20 nt, Human
ccuauguuucccaggcugau

SEQ ID NO: 1164596 - RNA, 18 nt, Human
ccucccaccuuagcuucc

SEQ ID NO: 1164597 - RNA, 25 nt, Human
ccucucgccucagccuccccaauag

SEQ ID NO: 1164598 - RNA, 18 nt, Human
ccugcacuccagccuggg

SEQ ID NO: 1164599 - RNA, 20 nt, Human
ccugggaggcagagguugga

SEQ ID NO: 1164600 - RNA, 18 nt, Human
ccugggcucaagggaacc

SEQ ID NO: 1164601 - RNA, 21 nt, Human
ccugggcucaagggaaccucu

SEQ ID NO: 1164602 - RNA, 19 nt, Human
ccuugagcuccugggcuca

SEQ ID NO: 1164603 - RNA, 20 nt, Human
ccuuuagagaagcuuugccu

SEQ ID NO: 1164604 - RNA, 24 nt, Human
cgagaucaugccccugcacuccag

SEQ ID NO: 1164605 - RNA, 21 nt, Human
cgccucagccuccccaauagc

SEQ ID NO: 1164606 - RNA, 24 nt, Human
cgccucagccuccccaauagcuag

SEQ ID NO: 1164607 - RNA, 23 nt, Human
cuacaaacacccuauguuuccca

SEQ ID NO: 1164608 - RNA, 21 nt, Human
cuaggacuacaagcccaugcu

SEQ ID NO: 1164609 - RNA, 19 nt, Human
cucaagagauccucccacc

SEQ ID NO: 1164610 - RNA, 24 nt, Human
cucaagagauccucccaccucagc

SEQ ID NO: 1164611 - RNA, 24 nt, Human
cucaagcaaaccucccaccuuagc

SEQ ID NO: 1164612 - RNA, 23 nt, Human
cuccugggcucaagggaaccucu

SEQ ID NO: 1164613 - RNA, 23 nt, Human
cucgccucagccuccccaauagc

SEQ ID NO: 1164614 - RNA, 27 nt, Human
cugaaacugguaugugauaugucccug

SEQ ID NO: 1164615 - RNA, 22 nt, Human
cugcauugcuucuuuuaaagca

SEQ ID NO: 1164616 - RNA, 22 nt, Human
gaaccucucgccucagccuccc

SEQ ID NO: 1164617 - RNA, 24 nt, Human
gagaaagauaaaggaaaauucaag

SEQ ID NO: 1164618 - RNA, 21 nt, Human
gagcucaagcaaaccucccac

SEQ ID NO: 1164619 - RNA, 25 nt, Human
gccaauaucacuuuuaacauuuucu

SEQ ID NO: 1164620 - RNA, 22 nt, Human
gccccugcacuccagccugggc

SEQ ID NO: 1164621 - RNA, 20 nt, Human
gcucaagggaaccucucgcc

SEQ ID NO: 1164622 - RNA, 21 nt, Human
gcucacuguagccucgaccuc

SEQ ID NO: 1164623 - RNA, 25 nt, Human
ggcacgaugauggcucacuguagcc

SEQ ID NO: 1164624 - RNA, 18 nt, Human
guagagauggggucuaca

SEQ ID NO: 1164625 - RNA, 24 nt, Human
uaaaacuaagagaaauaauaaagc

SEQ ID NO: 1164626 - RNA, 26 nt, Human
uaaaauuuuguuaacaacaacaaaaa

SEQ ID NO: 1164627 - RNA, 19 nt, Human
uaacaaaaagcaaaaaauu

SEQ ID NO: 1164628 - RNA, 21 nt, Human
uaacaacaacaaaaaaagaaa

SEQ ID NO: 1164629 - RNA, 24 nt, Human
uaacuuuagcucuaauucagacuc

SEQ ID NO: 1164630 - RNA, 24 nt, Human
uaagaaccugagaaaacuuucaac

SEQ ID NO: 1164631 - RNA, 21 nt, Human
uacaagcccaugcuacugugu

SEQ ID NO: 1164632 - RNA, 24 nt, Human
uacaauugugagccaccgcaucca

SEQ ID NO: 1164633 - RNA, 21 nt, Human
uacaguaccuugugacauaau

SEQ ID NO: 1164634 - RNA, 20 nt, Human
uacugagugaggauacuuuc

SEQ ID NO: 1164635 - RNA, 21 nt, Human
uacugagugaggauacuuucu

SEQ ID NO: 1164636 - RNA, 25 nt, Human
uacugcauugcuucuuuuaaagcaa

SEQ ID NO: 1164637 - RNA, 19 nt, Human
uagccucgaccucccgagc

SEQ ID NO: 1164638 - RNA, 18 nt, Human
uaguacugagacuaucac

SEQ ID NO: 1164639 - RNA, 22 nt, Human
uaguagacacagaguucaucug

SEQ ID NO: 1164640 - RNA, 25 nt, Human
uauaaauccaaaacaucugcuggaa

SEQ ID NO: 1164641 - RNA, 24 nt, Human
uauauagauguuauaauguaugua

SEQ ID NO: 1164642 - RNA, 23 nt, Human
uauguuucccaggcugaucucaa

SEQ ID NO: 1164643 - RNA, 24 nt, Human
uauguuucccaggcugaucucaaa

SEQ ID NO: 1164644 - RNA, 19 nt, Human
ucacuguagccucgaccuc

SEQ ID NO: 1164645 - RNA, 22 nt, Human
ucacuguagccucgaccucccg

SEQ ID NO: 1164646 - RNA, 25 nt, Human
ucacuugaaccugggaggcagaggu

SEQ ID NO: 1164647 - RNA, 21 nt, Human
ucagaacauuuucucaguggu

SEQ ID NO: 1164648 - RNA, 20 nt, Human
ucagccuccccaauagcuag

SEQ ID NO: 1164649 - RNA, 24 nt, Human
ucaugcugaccuugagcuccuggg

SEQ ID NO: 1164650 - RNA, 24 nt, Human
uccagccugggccacugagcgaga

SEQ ID NO: 1164651 - RNA, 22 nt, Human
uccccaauagcuaggacuacaa

SEQ ID NO: 1164652 - RNA, 21 nt, Human
ucccgagcucaagcaaaccuc

SEQ ID NO: 1164653 - RNA, 27 nt, Human
uccucccaccucagccucccgaaguug

SEQ ID NO: 1164654 - RNA, 18 nt, Human
uccugggcucaagagauc

SEQ ID NO: 1164655 - RNA, 21 nt, Human
uccugggcucaagagauccuc

SEQ ID NO: 1164656 - RNA, 24 nt, Human
uccugggcucaagagauccuccca

SEQ ID NO: 1164657 - RNA, 21 nt, Human
uccugggcucaagggaaccuc

SEQ ID NO: 1164658 - RNA, 22 nt, Human
uccugggcucaagggaaccucu

SEQ ID NO: 1164659 - RNA, 20 nt, Human
ucugcuggaauauuugcuca

SEQ ID NO: 1164660 - RNA, 25 nt, Human
ucuugcucuguccaaauucuugcca

SEQ ID NO: 1164661 - RNA, 21 nt, Human
ugaaaaaaacuccugaaaacu

SEQ ID NO: 1164662 - RNA, 24 nt, Human
ugaaauuacaauugugagccaccg

SEQ ID NO: 1164663 - RNA, 18 nt, Human
ugacauaauguauuaauu

SEQ ID NO: 1164664 - RNA, 18 nt, Human
ugagaauauuuggguagg

SEQ ID NO: 1164665 - RNA, 20 nt, Human
ugaggcauaagaaucacuug

SEQ ID NO: 1164666 - RNA, 24 nt, Human
ugaggcauaagaaucacuugaacc

SEQ ID NO: 1164667 - RNA, 23 nt, Human
ugccacugggauaagaaucuaua

SEQ ID NO: 1164668 - RNA, 25 nt, Human
ugccaggagaaagauaaaggaaaau

SEQ ID NO: 1164669 - RNA, 19 nt, Human
ugcucaugcugaccuugag

SEQ ID NO: 1164670 - RNA, 24 nt, Human
ugcugaaauuacaauugugagcca

SEQ ID NO: 1164671 - RNA, 21 nt, Human
uggaaccgcaggcacacacca

SEQ ID NO: 1164672 - RNA, 24 nt, Human
uggaaccgcaggcacacaccacca

SEQ ID NO: 1164673 - RNA, 24 nt, Human
uggcacgaugauggcucacuguag

SEQ ID NO: 1164674 - RNA, 25 nt, Human
uggcagcacuuacaggaaguucagu

SEQ ID NO: 1164675 - RNA, 24 nt, Human
uggcucacuguagccucgaccucc

SEQ ID NO: 1164676 - RNA, 21 nt, Human
ugggaauguaguaacuuuagc

SEQ ID NO: 1164677 - RNA, 19 nt, Human
ugggaggcagagguuggag

SEQ ID NO: 1164678 - RNA, 20 nt, Human
ugggaggcagagguuggagg

SEQ ID NO: 1164679 - RNA, 24 nt, Human
ugggaggcugaggcauaagaauca

SEQ ID NO: 1164680 - RNA, 24 nt, Human
uguagcauaacaaaaagcaaaaaa

SEQ ID NO: 1164681 - RNA, 19 nt, Human
uuaaauuuuuguagagaug

SEQ ID NO: 1164682 - RNA, 21 nt, Human
uuacuguucuugcucugucca

SEQ ID NO: 1164683 - RNA, 23 nt, Human
uuagagugcaauggcacgaugau

SEQ ID NO: 1164684 - RNA, 19 nt, Human
uuauaguagacacagaguu

SEQ ID NO: 1164685 - RNA, 19 nt, Human
uuccagaguagguggaacc

SEQ ID NO: 1164686 - RNA, 24 nt, Human
uuccuaguucucacuucuuucacu

SEQ ID NO: 1164687 - RNA, 23 nt, Human
uuccugggcucaagagauccucc

SEQ ID NO: 1164688 - RNA, 19 nt, Human
uugaaucacacagauguuu

SEQ ID NO: 1164689 - RNA, 24 nt, Human
uugcucaugcugaccuugagcucc

SEQ ID NO: 1164690 - RNA, 25 nt, Human
uugggaggcugaggcauaagaauca

SEQ ID NO: 1164691 - RNA, 24 nt, Human
uuuauaauaaugagaauauuuggg

SEQ ID NO: 1164692 - RNA, 21 nt, Human
uuucuaugugaagcagucaau

SEQ ID NO: 1164693 - RNA, 18 nt, Human
uuuguagagauggggucu

SEQ ID NO: 1164694 - RNA, 22 nt, Human
uuuuuguagagauggggucuac

SEQ ID NO: 1164695 - RNA, 24 nt, Human
uuuuuuuuuucuuuugagacaggg

SEQ ID NO: 1164696 - RNA, 26 nt, Human
aaaaaugaucaaaagaaacccauagc

SEQ ID NO: 1164697 - RNA, 21 nt, Human
aaaagaaacccauagcugccu

SEQ ID NO: 1164698 - RNA, 23 nt, Human
aaaauuauuaaugugacacucuc

SEQ ID NO: 1164699 - RNA, 23 nt, Human
aaagaaacccauagcugccuaag

SEQ ID NO: 1164700 - RNA, 24 nt, Human
aaagugcugggauuacaggcauga

SEQ ID NO: 1164701 - RNA, 26 nt, Human
aaccacuucucauuugcucuuuccau

SEQ ID NO: 1164702 - RNA, 19 nt, Human
aagugcugggauuacaggc

SEQ ID NO: 1164703 - RNA, 21 nt, Human
aagugcugggauuacaggcau

SEQ ID NO: 1164704 - RNA, 26 nt, Human
aagugcugggauuacaggcaugagcc

SEQ ID NO: 1164705 - RNA, 22 nt, Human
acaauaauggaaugucucugga

SEQ ID NO: 1164706 - RNA, 18 nt, Human
acaggguuucaccauguu

SEQ ID NO: 1164707 - RNA, 21 nt, Human
acaggguuucaccauguuggc

SEQ ID NO: 1164708 - RNA, 24 nt, Human
acaggguuucaccauguuggccag

SEQ ID NO: 1164709 - RNA, 24 nt, Human
accauguuggccaggcuggucuug

SEQ ID NO: 1164710 - RNA, 20 nt, Human
acuucaaaaacguguucaaa

SEQ ID NO: 1164711 - RNA, 24 nt, Human
agaugaucuacccaccuuggccuc

SEQ ID NO: 1164712 - RNA, 21 nt, Human
agaugccgaugggaacgagcc

SEQ ID NO: 1164713 - RNA, 23 nt, Human
aggcaugagccacugugccuggc

SEQ ID NO: 1164714 - RNA, 18 nt, Human
agugcugggauuacaggc

SEQ ID NO: 1164715 - RNA, 20 nt, Human
augagcauuuaugaaaaaac

SEQ ID NO: 1164716 - RNA, 24 nt, Human
augaucuacccaccuuggccuccc

SEQ ID NO: 1164717 - RNA, 21 nt, Human
auggagagggagaagucuguu

SEQ ID NO: 1164718 - RNA, 24 nt, Human
caaagugcugggauuacaggcaug

SEQ ID NO: 1164719 - RNA, 21 nt, Human
caccauguuggccaggcuggu

SEQ ID NO: 1164720 - RNA, 22 nt, Human
caccauguuggccaggcugguc

SEQ ID NO: 1164721 - RNA, 24 nt, Human
caccauguuggccaggcuggucuu

SEQ ID NO: 1164722 - RNA, 19 nt, Human
cacucggcgagacggcugg

SEQ ID NO: 1164723 - RNA, 18 nt, Human
cagccagucacagaugcc

SEQ ID NO: 1164724 - RNA, 22 nt, Human
cagcuccaaaggacucagugau

SEQ ID NO: 1164725 - RNA, 24 nt, Human
caggguuucaccauguuggccagg

SEQ ID NO: 1164726 - RNA, 24 nt, Human
cauguuggccaggcuggucuugaa

SEQ ID NO: 1164727 - RNA, 23 nt, Human
ccaaaccacuucucauuugcucu

SEQ ID NO: 1164728 - RNA, 23 nt, Human
ccaaagugcugggauuacaggca

SEQ ID NO: 1164729 - RNA, 24 nt, Human
ccaaagugcugggauuacaggcau

SEQ ID NO: 1164730 - RNA, 20 nt, Human
ccagaauacaaaauauggua

SEQ ID NO: 1164731 - RNA, 18 nt, Human
ccagauggagagggagaa

SEQ ID NO: 1164732 - RNA, 24 nt, Human
cccaaagugcugggauuacaggca

SEQ ID NO: 1164733 - RNA, 20 nt, Human
ccgcccgggcccucgaucgc

SEQ ID NO: 1164734 - RNA, 24 nt, Human
ccgcccgggcccucgaucgcagcc

SEQ ID NO: 1164735 - RNA, 24 nt, Human
ccugaaaaauguuuuaauuagcua

SEQ ID NO: 1164736 - RNA, 24 nt, Human
ccugaccucagaugaucuacccac

SEQ ID NO: 1164737 - RNA, 19 nt, Human
cgaagcaagcagucaaagc

SEQ ID NO: 1164738 - RNA, 24 nt, Human
cgaagcaagcagucaaagcggcca

SEQ ID NO: 1164739 - RNA, 22 nt, Human
cgcccgggcccucgaucgcagc

SEQ ID NO: 1164740 - RNA, 24 nt, Human
cucagaugaucuacccaccuuggc

SEQ ID NO: 1164741 - RNA, 22 nt, Human
cucgaaaauuuuucucccgcag

SEQ ID NO: 1164742 - RNA, 18 nt, Human
cuggccggccgcccgggc

SEQ ID NO: 1164743 - RNA, 24 nt, Human
gaaaaaaauuuuuuuaaacuugga

SEQ ID NO: 1164744 - RNA, 22 nt, Human
gaacauguacagcggaacauaa

SEQ ID NO: 1164745 - RNA, 23 nt, Human
gaccucagaugaucuacccaccu

SEQ ID NO: 1164746 - RNA, 19 nt, Human
gagaagucuguucccgcug

SEQ ID NO: 1164747 - RNA, 21 nt, Human
gaucgcagccagucacagaug

SEQ ID NO: 1164748 - RNA, 18 nt, Human
gauuacaggcaugagcca

SEQ ID NO: 1164749 - RNA, 21 nt, Human
gauuacaggcaugagccacug

SEQ ID NO: 1164750 - RNA, 24 nt, Human
gauuacaggcaugagccacugugc

SEQ ID NO: 1164751 - RNA, 20 nt, Human
gcagauccggccaguccgca

SEQ ID NO: 1164752 - RNA, 19 nt, Human
gcaugguugcuuucaccag

SEQ ID NO: 1164753 - RNA, 24 nt, Human
ggauuacaggcaugagccacugug

SEQ ID NO: 1164754 - RNA, 24 nt, Human
ggcuggucuugaauuccugaccuc

SEQ ID NO: 1164755 - RNA, 22 nt, Human
ggguuucaccauguuggccagg

SEQ ID NO: 1164756 - RNA, 20 nt, Human
gguaaauaagagugccuucu

SEQ ID NO: 1164757 - RNA, 19 nt, Human
ggucuugaauuccugaccu

SEQ ID NO: 1164758 - RNA, 20 nt, Human
guaagugguccagaauacaa

SEQ ID NO: 1164759 - RNA, 22 nt, Human
uaaagaacaaaaaugaucaaaa

SEQ ID NO: 1164760 - RNA, 22 nt, Human
uaaugugacacucucaucucuc

SEQ ID NO: 1164761 - RNA, 22 nt, Human
uacaggcaugagccacugugcc

SEQ ID NO: 1164762 - RNA, 22 nt, Human
uacccaccuuggccucccaaag

SEQ ID NO: 1164763 - RNA, 23 nt, Human
uacccaccuuggccucccaaagu

SEQ ID NO: 1164764 - RNA, 24 nt, Human
uacuagagacaggguuucaccaug

SEQ ID NO: 1164765 - RNA, 20 nt, Human
uagagacaggguuucaccau

SEQ ID NO: 1164766 - RNA, 21 nt, Human
uagagacaggguuucaccaug

SEQ ID NO: 1164767 - RNA, 22 nt, Human
uagagacaggguuucaccaugu

SEQ ID NO: 1164768 - RNA, 29 nt, Human
ucaauggaacaauaauggaaugucucuuu

SEQ ID NO: 1164769 - RNA, 24 nt, Human
ucccaaagugcugggauuacaggc

SEQ ID NO: 1164770 - RNA, 24 nt, Human
ucgguaaauaagagugccuucucc

SEQ ID NO: 1164771 - RNA, 22 nt, Human
ucuaagugguuuacacugacuu

SEQ ID NO: 1164772 - RNA, 19 nt, Human
ucucuggauggcuacgucc

SEQ ID NO: 1164773 - RNA, 20 nt, Human
ugaccucagaugaucuaccc

SEQ ID NO: 1164774 - RNA, 24 nt, Human
ugaucuacccaccuuggccuccca

SEQ ID NO: 1164775 - RNA, 19 nt, Human
ugcacagaaacucuaaguc

SEQ ID NO: 1164776 - RNA, 21 nt, Human
ugccuugccugcuggaaauuc

SEQ ID NO: 1164777 - RNA, 21 nt, Human
ugcucagugaaaaacuguugc

SEQ ID NO: 1164778 - RNA, 24 nt, Human
uggccaaauuaauuucuuuugcau

SEQ ID NO: 1164779 - RNA, 24 nt, Human
uggccaggcuggucuugaauuccu

SEQ ID NO: 1164780 - RNA, 18 nt, Human
ugggauuacaggcaugag

SEQ ID NO: 1164781 - RNA, 21 nt, Human
ugggauuacaggcaugagcca

SEQ ID NO: 1164782 - RNA, 22 nt, Human
ugggauuacaggcaugagccac

SEQ ID NO: 1164783 - RNA, 22 nt, Human
ugggauuacaggcaugagccac

SEQ ID NO: 1164784 - RNA, 22 nt, Human
ugggauuacaggcaugagccac

SEQ ID NO: 1164785 - RNA, 23 nt, Human
ugggauuacaggcaugagccacu

SEQ ID NO: 1164786 - RNA, 24 nt, Human
ugggauuacaggcaugagccacug

SEQ ID NO: 1164787 - RNA, 24 nt, Human
uuacuagagacaggguuucaccau

SEQ ID NO: 1164788 - RNA, 22 nt, Human
uugaagaacuucaaaaacgugu

SEQ ID NO: 1164789 - RNA, 21 nt, Human
uugaucuuaucaguuucuuga

SEQ ID NO: 1164790 - RNA, 22 nt, Human
uugcucuuuccauuuaaagacu

SEQ ID NO: 1164791 - RNA, 24 nt, Human
uuucaccauguuggccaggcuggu

SEQ ID NO: 1164792 - RNA, 24 nt, Human
uuuuuacuagagacaggguuucac

SEQ ID NO: 1164793 - RNA, 19 nt, Human
aagcugcaccagaaagaac

SEQ ID NO: 1164794 - RNA, 21 nt, Human
aagcugcaccagaaagaacga

SEQ ID NO: 1164795 - RNA, 22 nt, Human
agguugaguuaugcugauuuag

SEQ ID NO: 1164796 - RNA, 22 nt, Human
aguuucuccuucuaaaagcagg

SEQ ID NO: 1164797 - RNA, 22 nt, Human
caccagaaagaacgaaagacuc

SEQ ID NO: 1164798 - RNA, 19 nt, Human
ccuucuaaaagcagguuga

SEQ ID NO: 1164799 - RNA, 21 nt, Human
cuaaagucuuaaccgugcuac

SEQ ID NO: 1164800 - RNA, 19 nt, Human
gcaccagaaagaacgaaag

SEQ ID NO: 1164801 - RNA, 24 nt, Human
uaaaagcagguugaguuaugcuga

SEQ ID NO: 1164802 - RNA, 23 nt, Human
uacuggauuuucuucuucggcuu

SEQ ID NO: 1164803 - RNA, 22 nt, Human
uauacaguaguaggcaguuucu

SEQ ID NO: 1164804 - RNA, 24 nt, Human
ugcaagacaucuguccuggggcaa

SEQ ID NO: 1164805 - RNA, 24 nt, Human
ugcaccagaaagaacgaaagacuc

SEQ ID NO: 1164806 - RNA, 20 nt, Human
uguuauacaguaguaggcag

SEQ ID NO: 1164807 - RNA, 22 nt, Human
uuaaccgugcuacuggauuuuc

SEQ ID NO: 1164808 - RNA, 26 nt, Human
uuauacaguaguaggcaguuucuccu

SEQ ID NO: 1164809 - RNA, 21 nt, Human
uucuucuucggcuucuucaaa

SEQ ID NO: 1164810 - RNA, 21 nt, Human
uuguuauacaguaguaggcag

SEQ ID NO: 1164811 - RNA, 19 nt, Human
aaaaaaaauucccacacaa

SEQ ID NO: 1164812 - RNA, 19 nt, Human
aaaauacccucucccccaa

SEQ ID NO: 1164813 - RNA, 22 nt, Human
aaaauucccacacaaugacauu

SEQ ID NO: 1164814 - RNA, 25 nt, Human
aaacaaaugguucacauuuaccaag

SEQ ID NO: 1164815 - RNA, 23 nt, Human
aaauaggaaaacauuaaaaagaa

SEQ ID NO: 1164816 - RNA, 24 nt, Human
aaaugauaaagaucuuacaaaacu

SEQ ID NO: 1164817 - RNA, 23 nt, Human
aaccaacucuagugaagaaccua

SEQ ID NO: 1164818 - RNA, 24 nt, Human
aacucuagugaagaaccuaaaaag

SEQ ID NO: 1164819 - RNA, 23 nt, Human
aaguaugcaugaacaaaauauuc

SEQ ID NO: 1164820 - RNA, 18 nt, Human
aaugcuaggcaaaaggaa

SEQ ID NO: 1164821 - RNA, 19 nt, Human
acccucucccccaagcaca

SEQ ID NO: 1164822 - RNA, 23 nt, Human
agacuaaauuuuuauaaaaucuc

SEQ ID NO: 1164823 - RNA, 19 nt, Human
aggaaaacauuaaaaagaa

SEQ ID NO: 1164824 - RNA, 28 nt, Human
aggaagaggcugaauuuaagacaaagaa

SEQ ID NO: 1164825 - RNA, 23 nt, Human
aggcaaaaggaaauaggagggac

SEQ ID NO: 1164826 - RNA, 21 nt, Human
agugaagaaccuaaaaagcua

SEQ ID NO: 1164827 - RNA, 26 nt, Human
auuaaaauacccucucccccaagcac

SEQ ID NO: 1164828 - RNA, 23 nt, Human
caaaugguucacauuuaccaaga

SEQ ID NO: 1164829 - RNA, 20 nt, Human
caagcacaauaaaaaacaaa

SEQ ID NO: 1164830 - RNA, 20 nt, Human
caaguuaaaaaaaauuccca

SEQ ID NO: 1164831 - RNA, 23 nt, Human
caaguuaaaaaaaauucccacac

SEQ ID NO: 1164832 - RNA, 21 nt, Human
caaucucacuuucaagauaua

SEQ ID NO: 1164833 - RNA, 19 nt, Human
cacagaaaaauggaucaaa

SEQ ID NO: 1164834 - RNA, 21 nt, Human
cacaugugacccaccuguagu

SEQ ID NO: 1164835 - RNA, 21 nt, Human
cacggagacagcccccacaug

SEQ ID NO: 1164836 - RNA, 22 nt, Human
cccaagcacaauaaaaaacaaa

SEQ ID NO: 1164837 - RNA, 18 nt, Human
ccccacaugugacccacc

SEQ ID NO: 1164838 - RNA, 22 nt, Human
ccuaaaaagcuacagacuaaau

SEQ ID NO: 1164839 - RNA, 23 nt, Human
ccucugcggcuaagccagaauga

SEQ ID NO: 1164840 - RNA, 20 nt, Human
cucaggcuuugaggggccug

SEQ ID NO: 1164841 - RNA, 18 nt, Human
gaaaagcaagaugcuaca

SEQ ID NO: 1164842 - RNA, 18 nt, Human
gagcaaguggggucccuu

SEQ ID NO: 1164843 - RNA, 21 nt, Human
gcaaucucacuuucaagauau

SEQ ID NO: 1164844 - RNA, 22 nt, Human
gcaaucucacuuucaagauaua

SEQ ID NO: 1164845 - RNA, 25 nt, Human
gcaugaacaaaauauucucuaaagu

SEQ ID NO: 1164846 - RNA, 20 nt, Human
ggauacuuuauauucuuuau

SEQ ID NO: 1164847 - RNA, 18 nt, Human
gggagcaagugggguccc

SEQ ID NO: 1164848 - RNA, 20 nt, Human
gguuaaguuuaaaaaguugc

SEQ ID NO: 1164849 - RNA, 27 nt, Human
gguuuuuuuuuucuuuuuugcuuuuag

SEQ ID NO: 1164850 - RNA, 22 nt, Human
uaagacaaagaaaacuugaaug

SEQ ID NO: 1164851 - RNA, 27 nt, Human
uacagaacuuaaaacaccaaagucaaa

SEQ ID NO: 1164852 - RNA, 19 nt, Human
uacagacuucugcucuguc

SEQ ID NO: 1164853 - RNA, 24 nt, Human
uacccucucccccaagcacaauaa

SEQ ID NO: 1164854 - RNA, 19 nt, Human
uaggaaaacauuaaaaaga

SEQ ID NO: 1164855 - RNA, 18 nt, Human
uagguucugacuggaauc

SEQ ID NO: 1164856 - RNA, 24 nt, Human
uauauuaaaauacccucuccccca

SEQ ID NO: 1164857 - RNA, 24 nt, Human
uauuaaaauacccucucccccaag

SEQ ID NO: 1164858 - RNA, 20 nt, Human
ucccccaagcacaauaaaaa

SEQ ID NO: 1164859 - RNA, 19 nt, Human
ucuaaaguacauauuagcg

SEQ ID NO: 1164860 - RNA, 24 nt, Human
ucugcggcuaagccagaaugaagc

SEQ ID NO: 1164861 - RNA, 21 nt, Human
ugagguagauuucuuuucuuu

SEQ ID NO: 1164862 - RNA, 23 nt, Human
ugagguuuuuuuuuucuuuuuug

SEQ ID NO: 1164863 - RNA, 26 nt, Human
ugauugauaaaaaauaaaauacuuug

SEQ ID NO: 1164864 - RNA, 21 nt, Human
ugccacagaaaaauggaucaa

SEQ ID NO: 1164865 - RNA, 19 nt, Human
ugcuuggaaaagcaagaug

SEQ ID NO: 1164866 - RNA, 20 nt, Human
uggaauccugucaacugagg

SEQ ID NO: 1164867 - RNA, 20 nt, Human
ugggcaugggagcaaguggg

SEQ ID NO: 1164868 - RNA, 21 nt, Human
uggggucccuuucuugccucu

SEQ ID NO: 1164869 - RNA, 21 nt, Human
uuaaaaaacagcacacuucga

SEQ ID NO: 1164870 - RNA, 21 nt, Human
uuuggaauuaugcacaaguua

SEQ ID NO: 1164871 - RNA, 23 nt, Human
uuuuguaggcaauagauaugagg

SEQ ID NO: 1164872 - RNA, 18 nt, Human
uuuuuuuuuucuuuuuug

SEQ ID NO: 1164873 - RNA, 23 nt, Human
uuuuuuuuuucuuuuuugcuuuu

SEQ ID NO: 1164874 - RNA, 27 nt, Human
aaagcauauauacaaauaguaugccaa

SEQ ID NO: 1164875 - RNA, 23 nt, Human
aacaacaacaaaaaggaaucaga

SEQ ID NO: 1164876 - RNA, 24 nt, Human
aacaacaacaaaaaggaaucagaa

SEQ ID NO: 1164877 - RNA, 19 nt, Human
aacaguaagcaacaacaac

SEQ ID NO: 1164878 - RNA, 21 nt, Human
aagcaacaacaacaaaaagga

SEQ ID NO: 1164879 - RNA, 25 nt, Human
aagcaacaacaacaaaaaggaaucc

SEQ ID NO: 1164880 - RNA, 23 nt, Human
accacuaaagacauguaauacau

SEQ ID NO: 1164881 - RNA, 21 nt, Human
agcaacaacaacaaaaaggaa

SEQ ID NO: 1164882 - RNA, 22 nt, Human
cagaggaacugauaaaauagug

SEQ ID NO: 1164883 - RNA, 20 nt, Human
cugauaaaauagugaucacc

SEQ ID NO: 1164884 - RNA, 24 nt, Human
gaaagaaaagcauauauacaaaua

SEQ ID NO: 1164885 - RNA, 23 nt, Human
gaguuuaccuacucccacauuuu

SEQ ID NO: 1164886 - RNA, 19 nt, Human
gcaacaacaacaaaaagga

SEQ ID NO: 1164887 - RNA, 21 nt, Human
gcaacaacaacaaaaaggaau

SEQ ID NO: 1164888 - RNA, 31 nt, Human
gguaacaguaagcaacaacaacaaaaaggaa

SEQ ID NO: 1164889 - RNA, 25 nt, Human
uaaaauagugaucaccacuaaagac

SEQ ID NO: 1164890 - RNA, 26 nt, Human
uaaaauagugaucaccacuaaagaca

SEQ ID NO: 1164891 - RNA, 24 nt, Human
uaacaguaagcaacaacaacaaaa

SEQ ID NO: 1164892 - RNA, 19 nt, Human
uaagcaacaacaacaaaaa

SEQ ID NO: 1164893 - RNA, 23 nt, Human
uaagcaacaacaacaaaaaggaa

SEQ ID NO: 1164894 - RNA, 22 nt, Human
uacuugguauaaagaaagacag

SEQ ID NO: 1164895 - RNA, 26 nt, Human
uauaaagaaagacagaggaacugaua

SEQ ID NO: 1164896 - RNA, 22 nt, Human
ucucuuggcaaauuaauacugg

SEQ ID NO: 1164897 - RNA, 23 nt, Human
ugaaagaaaagcauauauacaaa

SEQ ID NO: 1164898 - RNA, 19 nt, Human
uguaauacauaacuuaaau

SEQ ID NO: 1164899 - RNA, 22 nt, Human
caacaauaucugacacugaucu

SEQ ID NO: 1164900 - RNA, 25 nt, Human
caacaauaucugacacugaucuuga

SEQ ID NO: 1164901 - RNA, 22 nt, Human
cugaucuugauacuaguuagaa

SEQ ID NO: 1164902 - RNA, 20 nt, Human
gcgcggcggggggcacucgg

SEQ ID NO: 1164903 - RNA, 20 nt, Human
ggaugaccucggacggcggu

SEQ ID NO: 1164904 - RNA, 24 nt, Human
ucccucaacaauaucugacacuga

SEQ ID NO: 1164905 - RNA, 19 nt, Human
ugacacugaucuugauacu

SEQ ID NO: 1164906 - RNA, 19 nt, Human
ugcgcgggcugaggcuggc

SEQ ID NO: 1164907 - RNA, 21 nt, Human
ugggcuuuuuuuuauaacuac

SEQ ID NO: 1164908 - RNA, 19 nt, Human
uucaagcacaugaaaguca

SEQ ID NO: 1164909 - RNA, 20 nt, Human
uuucaagcacaugaaaguca

SEQ ID NO: 1164910 - RNA, 21 nt, Human
aaaauacaguuaaauggcaaa

SEQ ID NO: 1164911 - RNA, 22 nt, Human
aaacaacagaagcugaugugag

SEQ ID NO: 1164912 - RNA, 21 nt, Human
aaacuauagcagguuacauca

SEQ ID NO: 1164913 - RNA, 23 nt, Human
aaaugccuucuuagauagagaac

SEQ ID NO: 1164914 - RNA, 23 nt, Human
aagaaggaaaucuauacagaaga

SEQ ID NO: 1164915 - RNA, 21 nt, Human
aaggaaaaaaauacaguuaaa

SEQ ID NO: 1164916 - RNA, 27 nt, Human
aaguaugagaaccacaaccaugaaaac

SEQ ID NO: 1164917 - RNA, 25 nt, Human
acacugaaacguacucagagaaaaa

SEQ ID NO: 1164918 - RNA, 21 nt, Human
acagcagaacauauaugaaca

SEQ ID NO: 1164919 - RNA, 18 nt, Human
acaucaaaaaggaaaaaa

SEQ ID NO: 1164920 - RNA, 21 nt, Human
accacaaccaugaaaacaaca

SEQ ID NO: 1164921 - RNA, 19 nt, Human
accaugaaaacaacagaag

SEQ ID NO: 1164922 - RNA, 22 nt, Human
agaaaggacuuuccaagcauga

SEQ ID NO: 1164923 - RNA, 20 nt, Human
agaaccacaaccaugaaaac

SEQ ID NO: 1164924 - RNA, 22 nt, Human
agauauuaaaaguaugagaacc

SEQ ID NO: 1164925 - RNA, 25 nt, Human
aggaaaaaaauacaguuaaauggca

SEQ ID NO: 1164926 - RNA, 26 nt, Human
aggaaaaaaauacaguuaaauggcaa

SEQ ID NO: 1164927 - RNA, 21 nt, Human
aggggaagcaaguaugcagaa

SEQ ID NO: 1164928 - RNA, 24 nt, Human
aguguaaauaaucuuugugugaga

SEQ ID NO: 1164929 - RNA, 21 nt, Human
auaugaacagacuucaagcac

SEQ ID NO: 1164930 - RNA, 28 nt, Human
augaaaacaacagaagcugaugugagaa

SEQ ID NO: 1164931 - RNA, 23 nt, Human
augaccucaaaggcuagagcaua

SEQ ID NO: 1164932 - RNA, 23 nt, Human
caaaggcuagagcauaagagucu

SEQ ID NO: 1164933 - RNA, 24 nt, Human
caacaaaauauuuucaaaacuaaa

SEQ ID NO: 1164934 - RNA, 23 nt, Human
caacagauauuaaaaguaugaga

SEQ ID NO: 1164935 - RNA, 22 nt, Human
caagcaugaccucaaaggcuag

SEQ ID NO: 1164936 - RNA, 21 nt, Human
cacagaguaugacccauuucu

SEQ ID NO: 1164937 - RNA, 18 nt, Human
cacaguaggggcaauaag

SEQ ID NO: 1164938 - RNA, 24 nt, Human
cacuaaaauuaaacagugcagaca

SEQ ID NO: 1164939 - RNA, 18 nt, Human
cacuaaccuguuccuggc

SEQ ID NO: 1164940 - RNA, 19 nt, Human
cacugcuggcaagacuccu

SEQ ID NO: 1164941 - RNA, 18 nt, Human
caugaaaacaacagaagc

SEQ ID NO: 1164942 - RNA, 20 nt, Human
ccacaaccaugaaaacaacc

SEQ ID NO: 1164943 - RNA, 23 nt, Human
cguacacagaggaagaaagugug

SEQ ID NO: 1164944 - RNA, 20 nt, Human
gaagguauguucagccacag

SEQ ID NO: 1164945 - RNA, 21 nt, Human
ggaaaaccacacacacguaca

SEQ ID NO: 1164946 - RNA, 23 nt, Human
ggaaaucuauacagaagacacca

SEQ ID NO: 1164947 - RNA, 20 nt, Human
gggaagcaaguaugcagaac

SEQ ID NO: 1164948 - RNA, 20 nt, Human
ggugaggggaagcaaguaug

SEQ ID NO: 1164949 - RNA, 19 nt, Human
guggaaaaagauguccaca

SEQ ID NO: 1164950 - RNA, 21 nt, Human
uaaauggcaaaugaugcauga

SEQ ID NO: 1164951 - RNA, 22 nt, Human
uaagaaggaaaucuauacagaa

SEQ ID NO: 1164952 - RNA, 19 nt, Human
uccaagcaugaccucaaag

SEQ ID NO: 1164953 - RNA, 19 nt, Human
uccacagaguaugacccau

SEQ ID NO: 1164954 - RNA, 22 nt, Human
ucggcaacaggcagagaacaaa

SEQ ID NO: 1164955 - RNA, 21 nt, Human
ugaaaggaaaaccacacacac

SEQ ID NO: 1164956 - RNA, 22 nt, Human
ugaccucaaaggcuagagcaua

SEQ ID NO: 1164957 - RNA, 23 nt, Human
ugagaaacaacacuaaaauuaaa

SEQ ID NO: 1164958 - RNA, 18 nt, Human
ugaugcaugaggaauaau

SEQ ID NO: 1164959 - RNA, 25 nt, Human
uuuacagugaauauguuacagguuu

SEQ ID NO: 1164960 - RNA, 20 nt, Human
aaaaauaccaaucuggugga

SEQ ID NO: 1164961 - RNA, 24 nt, Human
aaacacagccagagcagagaccac

SEQ ID NO: 1164962 - RNA, 21 nt, Human
aacauagcaagccugacaccu

SEQ ID NO: 1164963 - RNA, 18 nt, Human
aagcggcugcaucugaaa

SEQ ID NO: 1164964 - RNA, 19 nt, Human
acaucuugcacgacuauuu

SEQ ID NO: 1164965 - RNA, 22 nt, Human
agaaauccucccaaagcgaauc

SEQ ID NO: 1164966 - RNA, 24 nt, Human
agagcagagaccacagcacugacg

SEQ ID NO: 1164967 - RNA, 19 nt, Human
aucccgccccggagcuggu

SEQ ID NO: 1164968 - RNA, 18 nt, Human
auccucccaaagcgaauc

SEQ ID NO: 1164969 - RNA, 21 nt, Human
caacauagcaagccugacacc

SEQ ID NO: 1164970 - RNA, 19 nt, Human
caaucugguggaucccugc

SEQ ID NO: 1164971 - RNA, 19 nt, Human
cacgcugcgccucuggcug

SEQ ID NO: 1164972 - RNA, 19 nt, Human
cagcgcccugggaagggcc

SEQ ID NO: 1164973 - RNA, 18 nt, Human
caggagacauuguaagga

SEQ ID NO: 1164974 - RNA, 19 nt, Human
caucugaaacaagccaggc

SEQ ID NO: 1164975 - RNA, 23 nt, Human
cauggccggggugcccggagucc

SEQ ID NO: 1164976 - RNA, 20 nt, Human
ccacgggcgagacuuuggga

SEQ ID NO: 1164977 - RNA, 20 nt, Human
ccccauccucuucacagaug

SEQ ID NO: 1164978 - RNA, 22 nt, Human
ccccucaucaucuucuuccaaa

SEQ ID NO: 1164979 - RNA, 25 nt, Human
cccugcuccagagcagcugcucucc

SEQ ID NO: 1164980 - RNA, 26 nt, Human
ccucaucaucuucuuccaaaggcaaa

SEQ ID NO: 1164981 - RNA, 20 nt, Human
ccucggcuggcaaggaugca

SEQ ID NO: 1164982 - RNA, 25 nt, Human
ccugggaagggccugugcaaggcag

SEQ ID NO: 1164983 - RNA, 23 nt, Human
cggcggggaagucgcccucccuu

SEQ ID NO: 1164984 - RNA, 19 nt, Human
cuaaaaacaaccucaacau

SEQ ID NO: 1164985 - RNA, 23 nt, Human
cucaacauagcaagccugacacc

SEQ ID NO: 1164986 - RNA, 21 nt, Human
cucccuuccuucagcauggcc

SEQ ID NO: 1164987 - RNA, 20 nt, Human
cuugcacgacuauuucccuc

SEQ ID NO: 1164988 - RNA, 26 nt, Human
gaaacgcuggcagauacggucuuacu

SEQ ID NO: 1164989 - RNA, 20 nt, Human
gaaauccucccaaagcgaau

SEQ ID NO: 1164990 - RNA, 23 nt, Human
gaauccagaucugcggcggggaa

SEQ ID NO: 1164991 - RNA, 19 nt, Human
gagaaacgcuggcagauac

SEQ ID NO: 1164992 - RNA, 21 nt, Human
gagcagcugcucuccagugug

SEQ ID NO: 1164993 - RNA, 21 nt, Human
gagcucacgcugcgccucugg

SEQ ID NO: 1164994 - RNA, 21 nt, Human
gcccggagucccucaggggca

SEQ ID NO: 1164995 - RNA, 24 nt, Human
gggcaaugugggcuaguuuucggg

SEQ ID NO: 1164996 - RNA, 22 nt, Human
gugcccggagucccucaggggc

SEQ ID NO: 1164997 - RNA, 18 nt, Human
guggugagaaacgcuggc

SEQ ID NO: 1164998 - RNA, 24 nt, Human
guggugagaaacgcuggcagauac

SEQ ID NO: 1164999 - RNA, 21 nt, Human
uaaagcccugucaacaauuca

SEQ ID NO: 1165000 - RNA, 21 nt, Human
ucacgcugcgccucuggcugc

SEQ ID NO: 1165001 - RNA, 24 nt, Human
ucaugccacuuagaguggcccaug

SEQ ID NO: 1165002 - RNA, 24 nt, Human
ucccccaggagacauuguaaggau

SEQ ID NO: 1165003 - RNA, 19 nt, Human
uccccucaucaucuucuuc

SEQ ID NO: 1165004 - RNA, 21 nt, Human
ucccucaggggcacugaggcu

SEQ ID NO: 1165005 - RNA, 24 nt, Human
ucucuguaacucuaaaaacaaccu

SEQ ID NO: 1165006 - RNA, 21 nt, Human
ucuggcugcgaucccgccccg

SEQ ID NO: 1165007 - RNA, 27 nt, Human
ucuggggagagggucucauggaggagg

SEQ ID NO: 1165008 - RNA, 22 nt, Human
ucugguggaucccugcuccaga

SEQ ID NO: 1165009 - RNA, 25 nt, Human
ugaaacacagccagagcagagacca

SEQ ID NO: 1165010 - RNA, 25 nt, Human
ugaggauguggagaaagcugggagg

SEQ ID NO: 1165011 - RNA, 19 nt, Human
ugcccggagucccucaggg

SEQ ID NO: 1165012 - RNA, 21 nt, Human
ugcccggagucccucaggggc

SEQ ID NO: 1165013 - RNA, 23 nt, Human
ugcccggagucccucaggggcac

SEQ ID NO: 1165014 - RNA, 20 nt, Human
uggagaaagcugggaggagg

SEQ ID NO: 1165015 - RNA, 22 nt, Human
ugggaagggccugugcaaggca

SEQ ID NO: 1165016 - RNA, 24 nt, Human
ugggaagggccugugcaaggcagc

SEQ ID NO: 1165017 - RNA, 20 nt, Human
ugggagaaauccucccaaag

SEQ ID NO: 1165018 - RNA, 21 nt, Human
uggggagagggucucauggag

SEQ ID NO: 1165019 - RNA, 20 nt, Human
uggggcaggcgucggacagc

SEQ ID NO: 1165020 - RNA, 24 nt, Human
uggggcaggcgucggacagcgccc

SEQ ID NO: 1165021 - RNA, 21 nt, Human
ugggggcuuccgaguaacugu

SEQ ID NO: 1165022 - RNA, 22 nt, Human
ugggggcuuccgaguaacugug

SEQ ID NO: 1165023 - RNA, 23 nt, Human
uggugagaaacgcuggcagauac

SEQ ID NO: 1165024 - RNA, 22 nt, Human
uggugaggaaggccagcaacuc

SEQ ID NO: 1165025 - RNA, 21 nt, Human
ugugauguuuaugaaauacgg

SEQ ID NO: 1165026 - RNA, 22 nt, Human
uguggagaaagcugggaggagg

SEQ ID NO: 1165027 - RNA, 20 nt, Human
uguggugagaaacgcuggca

SEQ ID NO: 1165028 - RNA, 23 nt, Human
uucacagauguggacaugguggg

SEQ ID NO: 1165029 - RNA, 23 nt, Human
uuccccucaucaucuucuuccaa

SEQ ID NO: 1165030 - RNA, 24 nt, Human
uucucgaggagccccauccucuuc

SEQ ID NO: 1165031 - RNA, 20 nt, Human
aaaaaaaacacacacacaca

SEQ ID NO: 1165032 - RNA, 20 nt, Human
aaaaaaacacacacacacaa

SEQ ID NO: 1165033 - RNA, 26 nt, Human
aaaaaaacacacacacacaaaagaaa

SEQ ID NO: 1165034 - RNA, 22 nt, Human
aaaaauuuacaacacagcacau

SEQ ID NO: 1165035 - RNA, 21 nt, Human
aaaacaaaggccagccccucc

SEQ ID NO: 1165036 - RNA, 22 nt, Human
aaacaaaggccagccccuccau

SEQ ID NO: 1165037 - RNA, 19 nt, Human
aaacacacacacacaaaag

SEQ ID NO: 1165038 - RNA, 25 nt, Human
aaacacacacacacaaaagaaaaag

SEQ ID NO: 1165039 - RNA, 27 nt, Human
aaacacacacacacaaaagaaaacucc

SEQ ID NO: 1165040 - RNA, 19 nt, Human
aagaagccaaguagagagc

SEQ ID NO: 1165041 - RNA, 24 nt, Human
acaaaagaaaacuccauccaggug

SEQ ID NO: 1165042 - RNA, 19 nt, Human
acaaaggccagccccucca

SEQ ID NO: 1165043 - RNA, 21 nt, Human
acagcacauacuaaggggaaa

SEQ ID NO: 1165044 - RNA, 24 nt, Human
accaaauuaaaaaaaacacacaca

SEQ ID NO: 1165045 - RNA, 19 nt, Human
acugcagggucuucaugag

SEQ ID NO: 1165046 - RNA, 18 nt, Human
acuuccaucugucuuucu

SEQ ID NO: 1165047 - RNA, 28 nt, Human
agaaaaauuuacaacacagcacauacua

SEQ ID NO: 1165048 - RNA, 18 nt, Human
agauccccucccuccacu

SEQ ID NO: 1165049 - RNA, 21 nt, Human
agaugccagaaaacaaaggcc

SEQ ID NO: 1165050 - RNA, 22 nt, Human
agcagcagcagcaggcaggcag

SEQ ID NO: 1165051 - RNA, 20 nt, Human
aggaagcagcagcagcagca

SEQ ID NO: 1165052 - RNA, 20 nt, Human
aucaaggaguugaaguugcc

SEQ ID NO: 1165053 - RNA, 24 nt, Human
caaauuaaaaaaaacacacacaca

SEQ ID NO: 1165054 - RNA, 23 nt, Human
caauguuaaaacacucccgagcu

SEQ ID NO: 1165055 - RNA, 20 nt, Human
cacaaaagaaaacuccaucc

SEQ ID NO: 1165056 - RNA, 21 nt, Human
cacacacacacaaaagaaaac

SEQ ID NO: 1165057 - RNA, 25 nt, Human
cagcagcagcagcaggcaggcagcu

SEQ ID NO: 1165058 - RNA, 24 nt, Human
cagcuuccaaccagucuuaccccu

SEQ ID NO: 1165059 - RNA, 21 nt, Human
caggcagcucccauguguuaa

SEQ ID NO: 1165060 - RNA, 20 nt, Human
caucuucacugaagacuggu

SEQ ID NO: 1165061 - RNA, 20 nt, Human
ccccucccuccacuccuuuc

SEQ ID NO: 1165062 - RNA, 23 nt, Human
cccggcugcgugccgcgcgccca

SEQ ID NO: 1165063 - RNA, 19 nt, Human
cccuccacuccuuucuuca

SEQ ID NO: 1165064 - RNA, 21 nt, Human
ccucagagccagcacucagcu

SEQ ID NO: 1165065 - RNA, 20 nt, Human
ccucucuggcaauacugauu

SEQ ID NO: 1165066 - RNA, 20 nt, Human
cgccaucaaggaguugaagu

SEQ ID NO: 1165067 - RNA, 19 nt, Human
cgggaagaagaaaaacaaa

SEQ ID NO: 1165068 - RNA, 25 nt, Human
cucccuccacuccuuucuucauuua

SEQ ID NO: 1165069 - RNA, 21 nt, Human
cucucuggcaauacugauuga

SEQ ID NO: 1165070 - RNA, 21 nt, Human
cuuaaagacuuccaucugucu

SEQ ID NO: 1165071 - RNA, 23 nt, Human
cuuaccccucucuggcaauacug

SEQ ID NO: 1165072 - RNA, 22 nt, Human
cuucagugaacauuucagucuc

SEQ ID NO: 1165073 - RNA, 25 nt, Human
gccagaaaacaaaggccagccccuc

SEQ ID NO: 1165074 - RNA, 18 nt, Human
gccgcgcgcccacaaaug

SEQ ID NO: 1165075 - RNA, 20 nt, Human
gcuaaccagcagccaacuca

SEQ ID NO: 1165076 - RNA, 19 nt, Human
gcuuccucagagccagcac

SEQ ID NO: 1165077 - RNA, 21 nt, Human
ggaaggcgguuggcacaaccc

SEQ ID NO: 1165078 - RNA, 20 nt, Human
ggacacuccacuuguuucca

SEQ ID NO: 1165079 - RNA, 24 nt, Human
guuuuagauccccucccuccacuc

SEQ ID NO: 1165080 - RNA, 25 nt, Human
uaaaaaaaacacacacacacaaaag

SEQ ID NO: 1165081 - RNA, 21 nt, Human
uaaaaaaaacacacacacacc

SEQ ID NO: 1165082 - RNA, 23 nt, Human
uaaaacacucccgagcuacguca

SEQ ID NO: 1165083 - RNA, 24 nt, Human
uaaaacacucccgagcuacgucaa

SEQ ID NO: 1165084 - RNA, 23 nt, Human
uaagagacugaagaaugguauca

SEQ ID NO: 1165085 - RNA, 24 nt, Human
uaaguuaacaaaagaaacgugggc

SEQ ID NO: 1165086 - RNA, 18 nt, Human
uaaguucuccaucugguc

SEQ ID NO: 1165087 - RNA, 23 nt, Human
uaaguucuccaucuggucuugag

SEQ ID NO: 1165088 - RNA, 20 nt, Human
uacaacacagcacauacuaa

SEQ ID NO: 1165089 - RNA, 24 nt, Human
uacugauugagcuaagguuuggga

SEQ ID NO: 1165090 - RNA, 20 nt, Human
uagcagcaaauguucaacca

SEQ ID NO: 1165091 - RNA, 21 nt, Human
ucaaccaaauuaaaaaaaaca

SEQ ID NO: 1165092 - RNA, 18 nt, Human
uccacuccuuucuucauu

SEQ ID NO: 1165093 - RNA, 19 nt, Human
ucugcaggaagcagcagca

SEQ ID NO: 1165094 - RNA, 20 nt, Human
ucugcagucagcuuccaacc

SEQ ID NO: 1165095 - RNA, 24 nt, Human
ugaacuccgaguccucggccuccc

SEQ ID NO: 1165096 - RNA, 20 nt, Human
ugacccgggugcuccaauga

SEQ ID NO: 1165097 - RNA, 18 nt, Human
ugagcagauacugcaaga

SEQ ID NO: 1165098 - RNA, 21 nt, Human
ugagucuaucugucagcugca

SEQ ID NO: 1165099 - RNA, 23 nt, Human
ugcaggaaauaaguucuccaucu

SEQ ID NO: 1165100 - RNA, 23 nt, Human
ugcagucagcuuccaaccagucu

SEQ ID NO: 1165101 - RNA, 24 nt, Human
ugccagaaaacaaaggccagcccc

SEQ ID NO: 1165102 - RNA, 26 nt, Human
ugccuaagaggcucgaccuuaaagac

SEQ ID NO: 1165103 - RNA, 20 nt, Human
ugcgaccaaaggacagggag

SEQ ID NO: 1165104 - RNA, 22 nt, Human
ugcuaaccagcagccaacucaa

SEQ ID NO: 1165105 - RNA, 24 nt, Human
ugcucaagaaugucaaauuuugca

SEQ ID NO: 1165106 - RNA, 24 nt, Human
ugcuuugcugacccgggugcucca

SEQ ID NO: 1165107 - RNA, 20 nt, Human
ugggaucuaaacgggggggu

SEQ ID NO: 1165108 - RNA, 23 nt, Human
ugucagcugcaggaaauaaguuc

SEQ ID NO: 1165109 - RNA, 24 nt, Human
uugaaggguccaucugaugcucaa

SEQ ID NO: 1165110 - RNA, 23 nt, Human
uuuagauccccucccuccacucc

SEQ ID NO: 1165111 - RNA, 28 nt, Human
uuuagauccccucccuccacuccuuucu

SEQ ID NO: 1165112 - RNA, 21 nt, Human
uuuccugcaggugaacuccga

SEQ ID NO: 1165113 - RNA, 24 nt, Human
uuucucaagugucuucagugaaca

SEQ ID NO: 1165114 - RNA, 21 nt, Human
aaaaaagaaaaaaaauaaaag

SEQ ID NO: 1165115 - RNA, 22 nt, Human
aagcaaaaaagaaaaaaaauaa

SEQ ID NO: 1165116 - RNA, 28 nt, Human
aagcaaaaaagaaaaaaaauaaaagcaa

SEQ ID NO: 1165117 - RNA, 21 nt, Human
aagccaacagcacuucugcag

SEQ ID NO: 1165118 - RNA, 27 nt, Human
aaguacaaacacaaugucaucuaaaau

SEQ ID NO: 1165119 - RNA, 20 nt, Human
acaaagguauaaaacucaaa

SEQ ID NO: 1165120 - RNA, 23 nt, Human
acaauaaaagcaaaaaagaaaaa

SEQ ID NO: 1165121 - RNA, 21 nt, Human
acagacagaaccaugagcagc

SEQ ID NO: 1165122 - RNA, 22 nt, Human
agaaaaaaaauaaaagcaaugu

SEQ ID NO: 1165123 - RNA, 22 nt, Human
agacagaaccaugagcagcaac

SEQ ID NO: 1165124 - RNA, 19 nt, Human
agcaacagcaagggcacgg

SEQ ID NO: 1165125 - RNA, 20 nt, Human
agccaacagcacuucugcag

SEQ ID NO: 1165126 - RNA, 22 nt, Human
agccaacagcacuucugcagcc

SEQ ID NO: 1165127 - RNA, 18 nt, Human
aggucaucggggaaggga

SEQ ID NO: 1165128 - RNA, 21 nt, Human
caacaaaguacaaacacaaug

SEQ ID NO: 1165129 - RNA, 30 nt, Human; identical to SEQ ID NO: 950410

SEQ ID NO: 1165130 - RNA, 21 nt, Human
caauuucagaguacagcggug

SEQ ID NO: 1165131 - RNA, 25 nt, Human
cacacagcauccaagccaacagcac

SEQ ID NO: 1165132 - RNA, 20 nt, Human
cacagcauccaagccaacag

SEQ ID NO: 1165133 - RNA, 19 nt, Human
cagaaccaugagcagcaac

SEQ ID NO: 1165134 - RNA, 24 nt, Human
cagcugcacuaaagccuggggcag

SEQ ID NO: 1165135 - RNA, 22 nt, Human
cauguugccaagauaaccugaa

SEQ ID NO: 1165136 - RNA, 21 nt, Human
ccaaaaagacacugcccagca

SEQ ID NO: 1165137 - RNA, 22 nt, Human
cccaagagccucacuugucccu

SEQ ID NO: 1165138 - RNA, 23 nt, Human
ccccaagagccucacuugucccu

SEQ ID NO: 1165139 - RNA, 24 nt, Human
ccgccaccaccuccuccugcuuuc

SEQ ID NO: 1165140 - RNA, 28 nt, Human
ccgccaccaccuccuccugcuuuccuca

SEQ ID NO: 1165141 - RNA, 18 nt, Human
ccugcaaauccugccagg

SEQ ID NO: 1165142 - RNA, 20 nt, Human
cgccgaggccggcgccgcuc

SEQ ID NO: 1165143 - RNA, 21 nt, Human
cgccgccaccaccuccuccug

SEQ ID NO: 1165144 - RNA, 22 nt, Human
cggacagacagaaccaugagca

SEQ ID NO: 1165145 - RNA, 24 nt, Human
cucaacucacucgccaauuucaga

SEQ ID NO: 1165146 - RNA, 22 nt, Human
cugacuguacaauaaaagcaaa

SEQ ID NO: 1165147 - RNA, 21 nt, Human
cugccagagucaaggguuugc

SEQ ID NO: 1165148 - RNA, 18 nt, Human
cugcccagcaacagcaag

SEQ ID NO: 1165149 - RNA, 22 nt, Human
cugccugcaaauccugccagag

SEQ ID NO: 1165150 - RNA, 22 nt, Human
cuucccgccgccaccaccuccu

SEQ ID NO: 1165151 - RNA, 23 nt, Human
cuucccgccgccaccaccuccuc

SEQ ID NO: 1165152 - RNA, 24 nt, Human
gaacugacuguacaauaaaagcaa

SEQ ID NO: 1165153 - RNA, 23 nt, Human
gcaaauccugccagagucaaggg

SEQ ID NO: 1165154 - RNA, 22 nt, Human
gccucacuuaucugaacucuca

SEQ ID NO: 1165155 - RNA, 18 nt, Human
gcucccuuuccaaaaaga

SEQ ID NO: 1165156 - RNA, 21 nt, Human
ggagcccggcuggcagagggg

SEQ ID NO: 1165157 - RNA, 21 nt, Human
ggcagcucccuuuccaaaaag

SEQ ID NO: 1165158 - RNA, 22 nt, Human
ggccuggccaccaucccagguc

SEQ ID NO: 1165159 - RNA, 24 nt, Human
ggcuggcagaggggugcugccugc

SEQ ID NO: 1165160 - RNA, 19 nt, Human
gggaagggaaaagugugcu

SEQ ID NO: 1165161 - RNA, 22 nt, Human
gggcagcucccuuuccaaaaag

SEQ ID NO: 1165162 - RNA, 21 nt, Human
guacaauaaaagcaaaaaaga

SEQ ID NO: 1165163 - RNA, 22 nt, Human
uaaaagcaaaaaagaaaaaaaa

SEQ ID NO: 1165164 - RNA, 21 nt, Human
uaaccugaaagaccaccauga

SEQ ID NO: 1165165 - RNA, 22 nt, Human
uaacuugauucugagaaacgau

SEQ ID NO: 1165166 - RNA, 21 nt, Human
uacacaacaaaguacaaacac

SEQ ID NO: 1165167 - RNA, 20 nt, Human
uaccaugggugagaggaucu

SEQ ID NO: 1165168 - RNA, 23 nt, Human
uaucugaacucucacuucuaacu

SEQ ID NO: 1165169 - RNA, 23 nt, Human
ucacuuaucugaacucucacuuc

SEQ ID NO: 1165170 - RNA, 24 nt, Human
ucagaguacagcgguggggugugg

SEQ ID NO: 1165171 - RNA, 20 nt, Human
ucccagguaagcagggucaa

SEQ ID NO: 1165172 - RNA, 18 nt, Human
uccuccugcuuuccucag

SEQ ID NO: 1165173 - RNA, 25 nt, Human
ucuccccuucugagguguucaaagc

SEQ ID NO: 1165174 - RNA, 18 nt, Human
ugaaagaccaccaugaag

SEQ ID NO: 1165175 - RNA, 20 nt, Human
ugaaagaccaccaugaagga

SEQ ID NO: 1165176 - RNA, 18 nt, Human
ugacaaaacugagcuggg

SEQ ID NO: 1165177 - RNA, 18 nt, Human
ugacccuugaagucagaa

SEQ ID NO: 1165178 - RNA, 23 nt, Human
ugcaucggugcacggacagacag

SEQ ID NO: 1165179 - RNA, 21 nt, Human
ugcgugaugaccccgcagagc

SEQ ID NO: 1165180 - RNA, 24 nt, Human
uggggcagcucccuuuccaaaaag

SEQ ID NO: 1165181 - RNA, 18 nt, Human
uggggugugguguaugca

SEQ ID NO: 1165182 - RNA, 22 nt, Human
uggggugugguguaugcaucgg

SEQ ID NO: 1165183 - RNA, 22 nt, Human
uguacaauaaaagcaaaaaaga

SEQ ID NO: 1165184 - RNA, 23 nt, Human
uguugccaagauaaccugaaaga

SEQ ID NO: 1165185 - RNA, 22 nt, Human
uucugagaaacgaucccuaauc

SEQ ID NO: 1165186 - RNA, 21 nt, Human
uuuccucagccgccgaggccg

SEQ ID NO: 1165187 - RNA, 21 nt, Human
acugcauagcuuguguuuucc

SEQ ID NO: 1165188 - RNA, 20 nt, Human
aggagucacuuccagagcug

SEQ ID NO: 1165189 - RNA, 23 nt, Human
aggagucacuuccagagcuguuc

SEQ ID NO: 1165190 - RNA, 20 nt, Human
ccagauuccagaggacagag

SEQ ID NO: 1165191 - RNA, 21 nt, Human
cugugagccucgguuuccccu

SEQ ID NO: 1165192 - RNA, 20 nt, Human
gagcacagaugucuggagaa

SEQ ID NO: 1165193 - RNA, 19 nt, Human
gagccucgguuuccccuua

SEQ ID NO: 1165194 - RNA, 20 nt, Human
ggccaagccucaccugcccc

SEQ ID NO: 1165195 - RNA, 18 nt, Human
ggccggugcuggauccug

SEQ ID NO: 1165196 - RNA, 18 nt, Human
ggguggaggggccugggc

SEQ ID NO: 1165197 - RNA, 22 nt, Human
uccagaggacagaggagucacu

SEQ ID NO: 1165198 - RNA, 21 nt, Human
ucccaugacacucaggacagg

SEQ ID NO: 1165199 - RNA, 24 nt, Human
ugagcacagaugucuggagaaggc

SEQ ID NO: 1165200 - RNA, 20 nt, Human
ugauccagauuccagaggac

SEQ ID NO: 1165201 - RNA, 23 nt, Human
uggaggggccugggcuuguugac

SEQ ID NO: 1165202 - RNA, 18 nt, Human
uggauccugggcuacacu

SEQ ID NO: 1165203 - RNA, 22 nt, Human
ugugagccucgguuuccccuua

SEQ ID NO: 1165204 - RNA, 23 nt, Human
uuccagaggacagaggagucacu

SEQ ID NO: 1165205 - RNA, 22 nt, Human
uuuccccuuagcucccaccugc

SEQ ID NO: 1165206 - RNA, 24 nt, Human
aaacuccuggguucaagcaauccu

SEQ ID NO: 1165207 - RNA, 24 nt, Human
aaauugcugggauuacagacguga

SEQ ID NO: 1165208 - RNA, 20 nt, Human
aacauggugaagccccaucu

SEQ ID NO: 1165209 - RNA, 21 nt, Human
aacauggugaagccccaucuc

SEQ ID NO: 1165210 - RNA, 18 nt, Human
aaccucaagccauaaaau

SEQ ID NO: 1165211 - RNA, 22 nt, Human
aaccucaugauccgcccaccuc

SEQ ID NO: 1165212 - RNA, 25 nt, Human
aagcaauccucccaccuuggccucc

SEQ ID NO: 1165213 - RNA, 25 nt, Human
aagcaauccucccaccuuggccucc

SEQ ID NO: 1165214 - RNA, 22 nt, Human
aagcagauaaacaaaucucaga

SEQ ID NO: 1165215 - RNA, 22 nt, Human
aagcauuugaauccuuccccag

SEQ ID NO: 1165216 - RNA, 24 nt, Human
aaucgcuugaacccaggaggcgga

SEQ ID NO: 1165217 - RNA, 27 nt, Human
aauucucccuaauaggaacacuucuau

SEQ ID NO: 1165218 - RNA, 21 nt, Human
acagaacucaacaauucacaa

SEQ ID NO: 1165219 - RNA, 18 nt, Human
acagacgugagccaccgu

SEQ ID NO: 1165220 - RNA, 18 nt, Human
acagcauauauauauaua

SEQ ID NO: 1165221 - RNA, 18 nt, Human
acccagcuaauuaaaauu

SEQ ID NO: 1165222 - RNA, 24 nt, Human
acccaggaggcggagguugcagug

SEQ ID NO: 1165223 - RNA, 24 nt, Human
accgcuguguuccaguuaaacuuu

SEQ ID NO: 1165224 - RNA, 23 nt, Human
accucagccucccaaauugcugg

SEQ ID NO: 1165225 - RNA, 21 nt, Human
accucagccucccgaguagcu

SEQ ID NO: 1165226 - RNA, 24 nt, Human
accugaggucaggaguucaagacc

SEQ ID NO: 1165227 - RNA, 21 nt, Human
acgugagccaccgugccuggc

SEQ ID NO: 1165228 - RNA, 20 nt, Human
acugcaagcuccgccuccca

SEQ ID NO: 1165229 - RNA, 18 nt, Human
acugcacuccagccuggg

SEQ ID NO: 1165230 - RNA, 23 nt, Human
acugcacuccagccugggugaua

SEQ ID NO: 1165231 - RNA, 21 nt, Human
acugcagccuugaccucccag

SEQ ID NO: 1165232 - RNA, 22 nt, Human
acugcagccuugaccucccagg

SEQ ID NO: 1165233 - RNA, 18 nt, Human
agaaaccucaagccauaa

SEQ ID NO: 1165234 - RNA, 19 nt, Human
agaacucaacaauucacaa

SEQ ID NO: 1165235 - RNA, 18 nt, Human
agacagggucucacugug

SEQ ID NO: 1165236 - RNA, 23 nt, Human
agacagggucucacuguguugcc

SEQ ID NO: 1165237 - RNA, 20 nt, Human
agacgugagccaccgugccu

SEQ ID NO: 1165238 - RNA, 23 nt, Human
agacgugagccaccgugccuggc

SEQ ID NO: 1165239 - RNA, 27 nt, Human
agaggagggaaaaauagguacagggag

SEQ ID NO: 1165240 - RNA, 19 nt, Human
agaggggguuucacugugu

SEQ ID NO: 1165241 - RNA, 22 nt, Human
agaucgaggaccuaacaaagga

SEQ ID NO: 1165242 - RNA, 24 nt, Human
agcacuuugggaggccgaggcagg

SEQ ID NO: 1165243 - RNA, 23 nt, Human
agccgggugugguggcaugcgcc

SEQ ID NO: 1165244 - RNA, 24 nt, Human
agccuggccaacauggugaagccc

SEQ ID NO: 1165245 - RNA, 20 nt, Human
agccugggugauaucagcuu

SEQ ID NO: 1165246 - RNA, 18 nt, Human
agccuugaccucccaggc

SEQ ID NO: 1165247 - RNA, 25 nt, Human
aggcacgguggcucaugccuguuaa

SEQ ID NO: 1165248 - RNA, 23 nt, Human
aggcaggacaaucgcuugaaccc

SEQ ID NO: 1165249 - RNA, 18 nt, Human
aggcagguggaucaccug

SEQ ID NO: 1165250 - RNA, 22 nt, Human
aggcagguggaucaccugaggu

SEQ ID NO: 1165251 - RNA, 26 nt, Human
aggcagguggaucaccugaggucagg

SEQ ID NO: 1165252 - RNA, 21 nt, Human
aggcaugagccaccaugcccg

SEQ ID NO: 1165253 - RNA, 21 nt, Human
aggccgaggcagguggaucac

SEQ ID NO: 1165254 - RNA, 24 nt, Human
aggcggagguugcagugagccgag

SEQ ID NO: 1165255 - RNA, 21 nt, Human
aggcucaagugauccuuucac

SEQ ID NO: 1165256 - RNA, 20 nt, Human
aggcugaggcaggacaaucg

SEQ ID NO: 1165257 - RNA, 24 nt, Human
aggcugaggcaggacaaucgcuug

SEQ ID NO: 1165258 - RNA, 25 nt, Human
aggcuggagugcaguugcaaaaucu

SEQ ID NO: 1165259 - RNA, 20 nt, Human
aggggguuucacuguguuag

SEQ ID NO: 1165260 - RNA, 22 nt, Human
agguggaucaccugaggucagg

SEQ ID NO: 1165261 - RNA, 24 nt, Human
agguggucugaaacuccuggguuc

SEQ ID NO: 1165262 - RNA, 19 nt, Human
aguagcugggauuauaggc

SEQ ID NO: 1165263 - RNA, 22 nt, Human
agucuuuuuucuacauguacau

SEQ ID NO: 1165264 - RNA, 24 nt, Human
agugcaguugcaaaaucucagcuc

SEQ ID NO: 1165265 - RNA, 23 nt, Human
auaaauguaaaagcuagucuugg

SEQ ID NO: 1165266 - RNA, 19 nt, Human
aucaaugucaauuuagucu

SEQ ID NO: 1165267 - RNA, 24 nt, Human
aucaccugaggucaggaguucaag

SEQ ID NO: 1165268 - RNA, 24 nt, Human
aucgcgccacugcacuccagccug

SEQ ID NO: 1165269 - RNA, 24 nt, Human
augauccgcccaccucagccuccc

SEQ ID NO: 1165270 - RNA, 19 nt, Human
augccuguuaacccagcac

SEQ ID NO: 1165271 - RNA, 19 nt, Human
auucuuuucccuucugccu

SEQ ID NO: 1165272 - RNA, 18 nt, Human
caaaaacagccauagaac

SEQ ID NO: 1165273 - RNA, 24 nt, Human
caaauugcugggauuacagacgug

SEQ ID NO: 1165274 - RNA, 24 nt, Human
caacauggugaagccccaucucua

SEQ ID NO: 1165275 - RNA, 19 nt, Human
caacuauacaucaauccuc

SEQ ID NO: 1165276 - RNA, 24 nt, Human
caagaccagccuggccaacauggu

SEQ ID NO: 1165277 - RNA, 27 nt, Human
caagcaauccucccaccuuggccuccc

SEQ ID NO: 1165278 - RNA, 27 nt, Human
caagugauccuuucaccucagccuccc

SEQ ID NO: 1165279 - RNA, 24 nt, Human
caccucagccucccgaguagcugg

SEQ ID NO: 1165280 - RNA, 23 nt, Human
caccugaggucaggaguucaaga

SEQ ID NO: 1165281 - RNA, 22 nt, Human
caccuguuccuuggacaagaau

SEQ ID NO: 1165282 - RNA, 18 nt, Human
caccuucuuggccacagu

SEQ ID NO: 1165283 - RNA, 23 nt, Human
cacuccagccugggugauaucag

SEQ ID NO: 1165284 - RNA, 24 nt, Human
cacuccagccugggugauaucagc

SEQ ID NO: 1165285 - RNA, 24 nt, Human
cacuccagccugggugauaucagg

SEQ ID NO: 1165286 - RNA, 19 nt, Human
cacugcacuccagccuggg

SEQ ID NO: 1165287 - RNA, 19 nt, Human
cacugcacuccagccuggg

SEQ ID NO: 1165288 - RNA, 22 nt, Human
cacugcacuccagccuggguga

SEQ ID NO: 1165289 - RNA, 23 nt, Human
cacugcacuccagccugggugau

SEQ ID NO: 1165290 - RNA, 24 nt, Human
cacugcacuccagccugggugaua

SEQ ID NO: 1165291 - RNA, 26 nt, Human
cacugcacuccagccugggugauauc

SEQ ID NO: 1165292 - RNA, 18 nt, Human
cacuguguuagccaggau

SEQ ID NO: 1165293 - RNA, 19 nt, Human
cacuguguuagccaggaug

SEQ ID NO: 1165294 - RNA, 24 nt, Human
cacuguguuagccaggauggucuc

SEQ ID NO: 1165295 - RNA, 24 nt, Human
cagcacuuugggaggccgaggcag

SEQ ID NO: 1165296 - RNA, 26 nt, Human
cagcacuuugggaggccgaggcaggu

SEQ ID NO: 1165297 - RNA, 23 nt, Human
cagccuugaccucccaggcucaa

SEQ ID NO: 1165298 - RNA, 24 nt, Human
cagccuugaccucccaggcucaag

SEQ ID NO: 1165299 - RNA, 23 nt, Human
cagcuacucgaggcugaggcagg

SEQ ID NO: 1165300 - RNA, 24 nt, Human
cagcuuacugcagccuugaccucc

SEQ ID NO: 1165301 - RNA, 23 nt, Human
caggauagcucauuuuucauuga

SEQ ID NO: 1165302 - RNA, 23 nt, Human
cagggucucacuguguugccaag

SEQ ID NO: 1165303 - RNA, 24 nt, Human
cagguggaucaccugaggucagga

SEQ ID NO: 1165304 - RNA, 26 nt, Human
cauaaaaacuacaguaaacuagauag

SEQ ID NO: 1165305 - RNA, 24 nt, Human
caugauccgcccaccucagccucc

SEQ ID NO: 1165306 - RNA, 20 nt, Human
caugccuguuaacccagcac

SEQ ID NO: 1165307 - RNA, 24 nt, Human
caugccuguuaacccagcacuuug

SEQ ID NO: 1165308 - RNA, 19 nt, Human
cauuuugguuuuuuuuuca

SEQ ID NO: 1165309 - RNA, 24 nt, Human
ccaaauugcugggauuacagacgu

SEQ ID NO: 1165310 - RNA, 22 nt, Human
ccaaccacucaacuagacuuua

SEQ ID NO: 1165311 - RNA, 24 nt, Human
ccaaccugcuaggauuacaggcau

SEQ ID NO: 1165312 - RNA, 20 nt, Human
ccacugcacuccagccuggg

SEQ ID NO: 1165313 - RNA, 20 nt, Human
ccacugcacuccagccuggg

SEQ ID NO: 1165314 - RNA, 21 nt, Human
ccacugcacuccagccugggu

SEQ ID NO: 1165315 - RNA, 21 nt, Human
ccacugcacuccagccugggu

SEQ ID NO: 1165316 - RNA, 23 nt, Human
ccacugcacuccagccuggguga

SEQ ID NO: 1165317 - RNA, 23 nt, Human
ccacugcacuccagccuggguga

SEQ ID NO: 1165318 - RNA, 24 nt, Human
ccacugcacuccagccugggugau

SEQ ID NO: 1165319 - RNA, 25 nt, Human
ccacugcacuccagccugggugaua

SEQ ID NO: 1165320 - RNA, 20 nt, Human
ccauaaaaacuacaguaaac

SEQ ID NO: 1165321 - RNA, 19 nt, Human
cccaggcucaagugauccu

SEQ ID NO: 1165322 - RNA, 22 nt, Human
cccaggcucaagugauccuuuc

SEQ ID NO: 1165323 - RNA, 20 nt, Human
cccagguucaugccauucuc

SEQ ID NO: 1165324 - RNA, 23 nt, Human
ccccaucucuacuaaaaauacaa

SEQ ID NO: 1165325 - RNA, 24 nt, Human
cccgaguagcuggaacuacaggcu

SEQ ID NO: 1165326 - RNA, 19 nt, Human
cccugagguggcaauaccc

SEQ ID NO: 1165327 - RNA, 23 nt, Human
ccgcccaccucagccucccaaau

SEQ ID NO: 1165328 - RNA, 26 nt, Human
ccgcccaccucagccucccaaauugc

SEQ ID NO: 1165329 - RNA, 21 nt, Human
ccucaagccauaaaauaaauu

SEQ ID NO: 1165330 - RNA, 22 nt, Human
ccucccaccuuggccucccaac

SEQ ID NO: 1165331 - RNA, 24 nt, Human
ccucccagguucaugccauucucc

SEQ ID NO: 1165332 - RNA, 23 nt, Human
ccugaguagcugggauuauaggc

SEQ ID NO: 1165333 - RNA, 24 nt, Human
ccugaguagcugggauuauaggcg

SEQ ID NO: 1165334 - RNA, 23 nt, Human
ccuggccaacauggugaagcccc

SEQ ID NO: 1165335 - RNA, 24 nt, Human
ccuggccaacauggugaagcccca

SEQ ID NO: 1165336 - RNA, 19 nt, Human
ccuggcccauguacaugua

SEQ ID NO: 1165337 - RNA, 23 nt, Human
ccuggguucaagcaauccuccca

SEQ ID NO: 1165338 - RNA, 20 nt, Human
ccuguagucccagcuacucg

SEQ ID NO: 1165339 - RNA, 22 nt, Human
ccuguagucccagcuacucgag

SEQ ID NO: 1165340 - RNA, 18 nt, Human
ccuguuuguucauuccau

SEQ ID NO: 1165341 - RNA, 22 nt, Human
ccuucagaaauugagacggccu

SEQ ID NO: 1165342 - RNA, 19 nt, Human
ccuuggccucccaaccugc

SEQ ID NO: 1165343 - RNA, 20 nt, Human
cgaggcagguggaucaccug

SEQ ID NO: 1165344 - RNA, 24 nt, Human
cgaggcagguggaucaccugaggu

SEQ ID NO: 1165345 - RNA, 26 nt, Human
cgaggcagguggaucaccugagguca

SEQ ID NO: 1165346 - RNA, 27 nt, Human
cgccacugcacuccagccugggugaua

SEQ ID NO: 1165347 - RNA, 23 nt, Human
cgccuguagucccagcuacucga

SEQ ID NO: 1165348 - RNA, 25 nt, Human
cgccuguagucccagcuacucgagg

SEQ ID NO: 1165349 - RNA, 24 nt, Human
cgugagccaccgugccuggcccau

SEQ ID NO: 1165350 - RNA, 23 nt, Human
cuaauuuuuuguauuuuuaucag

SEQ ID NO: 1165351 - RNA, 24 nt, Human
cucaagugauccuuucaccucagc

SEQ ID NO: 1165352 - RNA, 21 nt, Human
cucaggauagcucauuuuuca

SEQ ID NO: 1165353 - RNA, 23 nt, Human
cucaugccuguuaacccagcacu

SEQ ID NO: 1165354 - RNA, 24 nt, Human
cucaugccuguuaacccagcacuu

SEQ ID NO: 1165355 - RNA, 18 nt, Human
cucccaaccugcuaggau

SEQ ID NO: 1165356 - RNA, 24 nt, Human
cugcaagcuccgccucccagguuc

SEQ ID NO: 1165357 - RNA, 23 nt, Human
cugcagccuugaccucccaggcu

SEQ ID NO: 1165358 - RNA, 23 nt, Human
cugccucagacuccugaguagcu

SEQ ID NO: 1165359 - RNA, 24 nt, Human
cugugacaguauucccugaggugg

SEQ ID NO: 1165360 - RNA, 21 nt, Human
cuugcucuguagcccaggcug

SEQ ID NO: 1165361 - RNA, 22 nt, Human
gagagaggagggaaaaauaggu

SEQ ID NO: 1165362 - RNA, 23 nt, Human
gagaucgcgccacugcacuccag

SEQ ID NO: 1165363 - RNA, 21 nt, Human
gaggcggagguugcagugagc

SEQ ID NO: 1165364 - RNA, 23 nt, Human
gagguugcagugagccgagaucg

SEQ ID NO: 1165365 - RNA, 27 nt, Human
gaguagcuggaacuacaggcuugagcc

SEQ ID NO: 1165366 - RNA, 23 nt, Human
gaucaccugaggucaggaguuca

SEQ ID NO: 1165367 - RNA, 24 nt, Human
gaucaccugaggucaggaguucaa

SEQ ID NO: 1165368 - RNA, 18 nt, Human
gauuacagacgugagcca

SEQ ID NO: 1165369 - RNA, 21 nt, Human
gauuacagacgugagccaccg

SEQ ID NO: 1165370 - RNA, 24 nt, Human
gauuacagacgugagccaccgugc

SEQ ID NO: 1165371 - RNA, 18 nt, Human
gauuacaggcaugagcca

SEQ ID NO: 1165372 - RNA, 21 nt, Human
gauuacaggcaugagccacca

SEQ ID NO: 1165373 - RNA, 24 nt, Human
gauuacaggcaugagccaccaugc

SEQ ID NO: 1165374 - RNA, 22 nt, Human
gcaagcuccgccucccagguuc

SEQ ID NO: 1165375 - RNA, 19 nt, Human
gcaguuggaaagaaugaag

SEQ ID NO: 1165376 - RNA, 24 nt, Human
gccaacauggugaagccccaucuc

SEQ ID NO: 1165377 - RNA, 19 nt, Human
gccacugcacuccagccug

SEQ ID NO: 1165378 - RNA, 24 nt, Human
gccacugcacuccagccuggguga

SEQ ID NO: 1165379 - RNA, 22 nt, Human
gccaggcacgguggcucaugcc

SEQ ID NO: 1165380 - RNA, 19 nt, Human
gcccaggcuggagugcagu

SEQ ID NO: 1165381 - RNA, 20 nt, Human
gccgagaucgcgccacugca

SEQ ID NO: 1165382 - RNA, 20 nt, Human
ggacuaaacuuacuggcuaa

SEQ ID NO: 1165383 - RNA, 20 nt, Human
ggagguugcagugagccgag

SEQ ID NO: 1165384 - RNA, 22 nt, Human
ggagguugcagugagccgagau

SEQ ID NO: 1165385 - RNA, 24 nt, Human
ggagguugcagugagccgagaucg

SEQ ID NO: 1165386 - RNA, 22 nt, Human
ggaucaccugaggucaggaguu

SEQ ID NO: 1165387 - RNA, 22 nt, Human
ggauuacaggcaugagccacca

SEQ ID NO: 1165388 - RNA, 24 nt, Human
ggauuacaggcaugagccaccaug

SEQ ID NO: 1165389 - RNA, 21 nt, Human
ggccaggcacgguggcucaug

SEQ ID NO: 1165390 - RNA, 21 nt, Human
ggcucaugccuguuaacccag

SEQ ID NO: 1165391 - RNA, 24 nt, Human
ggggguuucacuguguuagccagg

SEQ ID NO: 1165392 - RNA, 18 nt, Human
gggguuucacuguguuag

SEQ ID NO: 1165393 - RNA, 23 nt, Human
gggguuucacuguguuagccagg

SEQ ID NO: 1165394 - RNA, 24 nt, Human
gggugugguggcaugcgccuguag

SEQ ID NO: 1165395 - RNA, 24 nt, Human
gguggcaugcgccuguagucccag

SEQ ID NO: 1165396 - RNA, 24 nt, Human
gguggcucaugccuguuaacccag

SEQ ID NO: 1165397 - RNA, 24 nt, Human
guagcuggaacuacaggcuugagc

SEQ ID NO: 1165398 - RNA, 18 nt, Human
guagcugggauuauaggc

SEQ ID NO: 1165399 - RNA, 23 nt, Human
guaguuuaaaaaugguuagauga

SEQ ID NO: 1165400 - RNA, 21 nt, Human
gugaagccccaucucuacuaa

SEQ ID NO: 1165401 - RNA, 24 nt, Human
gugauccuuucaccucagccuccc

SEQ ID NO: 1165402 - RNA, 24 nt, Human
guguuaaaaauguaagagugaaca

SEQ ID NO: 1165403 - RNA, 19 nt, Human
guugcagugagccgagauc

SEQ ID NO: 1165404 - RNA, 21 nt, Human
guugcagugagccgagaucgc

SEQ ID NO: 1165405 - RNA, 24 nt, Human
uaaacuagauaggccauaaagaug

SEQ ID NO: 1165406 - RNA, 22 nt, Human
uaaagacagggucucacugugu

SEQ ID NO: 1165407 - RNA, 19 nt, Human
uaaagcagauaaacaaauc

SEQ ID NO: 1165408 - RNA, 25 nt, Human
uaaaggaagaugagaaggaaggggg

SEQ ID NO: 1165409 - RNA, 23 nt, Human
uaaauaaggagagggccaggcac

SEQ ID NO: 1165410 - RNA, 20 nt, Human
uaacugugguugaacggcag

SEQ ID NO: 1165411 - RNA, 18 nt, Human
uaagagugaacauucacc

SEQ ID NO: 1165412 - RNA, 24 nt, Human
uaauuuuuuguauuuuuaucagag

SEQ ID NO: 1165413 - RNA, 20 nt, Human
uacaacauccucuguucagu

SEQ ID NO: 1165414 - RNA, 22 nt, Human
uacagacgugagccaccgugcc

SEQ ID NO: 1165415 - RNA, 23 nt, Human
uacaggcaugagccaccaugccc

SEQ ID NO: 1165416 - RNA, 24 nt, Human
uacaggcuugagccaccacaccca

SEQ ID NO: 1165417 - RNA, 22 nt, Human
uagcccaggcuggagugcaguu

SEQ ID NO: 1165418 - RNA, 20 nt, Human
uagccgggugugguggcaug

SEQ ID NO: 1165419 - RNA, 18 nt, Human
uaggauuacaggcaugag

SEQ ID NO: 1165420 - RNA, 22 nt, Human
uaggauuacaggcaugagccac

SEQ ID NO: 1165421 - RNA, 24 nt, Human
uaggauuacaggcaugagccacca

SEQ ID NO: 1165422 - RNA, 26 nt, Human
uaucuguauuuaacagcauauauaua

SEQ ID NO: 1165423 - RNA, 30 nt, Human
uauuuaacagcauauauauauauaaauaua

SEQ ID NO: 1165424 - RNA, 28 nt, Human
uauuuuuuuuuuuuuugagguggagucu

SEQ ID NO: 1165425 - RNA, 24 nt, Human
ucaagcaauccucccaccuuggcc

SEQ ID NO: 1165426 - RNA, 20 nt, Human
ucaccuucuuggccacagug

SEQ ID NO: 1165427 - RNA, 18 nt, Human
ucacugcaagcuccgccu

SEQ ID NO: 1165428 - RNA, 19 nt, Human
ucacugcaagcuccgccuc

SEQ ID NO: 1165429 - RNA, 19 nt, Human
ucacugcaagcuccgccuc

SEQ ID NO: 1165430 - RNA, 24 nt, Human
ucacugcaagcuccgccucccagg

SEQ ID NO: 1165431 - RNA, 24 nt, Human
ucacuguguuagccaggauggucu

SEQ ID NO: 1165432 - RNA, 20 nt, Human
ucagagagagaggagggaaa

SEQ ID NO: 1165433 - RNA, 23 nt, Human
ucagccucccgaguagcuggaac

SEQ ID NO: 1165434 - RNA, 19 nt, Human
ucagcucacugcaagcucc

SEQ ID NO: 1165435 - RNA, 25 nt, Human
ucagcucacugcaagcuccgccucc

SEQ ID NO: 1165436 - RNA, 19 nt, Human
ucagcuuacugcagccuug

SEQ ID NO: 1165437 - RNA, 25 nt, Human
ucaugccuguuaacccagcacuuug

SEQ ID NO: 1165438 - RNA, 24 nt, Human
uccaucauucugauugauucuuuu

SEQ ID NO: 1165439 - RNA, 24 nt, Human
ucccaaauugcugggauuacagac

SEQ ID NO: 1165440 - RNA, 20 nt, Human
ucccaggcucaagugauccu

SEQ ID NO: 1165441 - RNA, 20 nt, Human
ucccagguucaugccauucu

SEQ ID NO: 1165442 - RNA, 21 nt, Human
ucccagguucaugccauucuc

SEQ ID NO: 1165443 - RNA, 24 nt, Human
ucccagguucaugccauucuccug

SEQ ID NO: 1165444 - RNA, 24 nt, Human
ucccgaguagcuggaacuacaggc

SEQ ID NO: 1165445 - RNA, 21 nt, Human
uccgcccaccucagccuccca

SEQ ID NO: 1165446 - RNA, 23 nt, Human
uccucccaccuuggccucccaac

SEQ ID NO: 1165447 - RNA, 24 nt, Human
uccugaguagcugggauuauaggc

SEQ ID NO: 1165448 - RNA, 18 nt, Human
uccuggguucaagcaauc

SEQ ID NO: 1165449 - RNA, 23 nt, Human
ucgcgccacugcacuccagccug

SEQ ID NO: 1165450 - RNA, 24 nt, Human
ucgcuugaacccaggaggcggagg

SEQ ID NO: 1165451 - RNA, 22 nt, Human
ucucacuguguugccaaggugg

SEQ ID NO: 1165452 - RNA, 21 nt, Human
ucucuacuaaaaauacaaaaa

SEQ ID NO: 1165453 - RNA, 19 nt, Human
ucugauugauucuuuuccc

SEQ ID NO: 1165454 - RNA, 24 nt, Human
ucuguagcccaggcuggagugcag

SEQ ID NO: 1165455 - RNA, 19 nt, Human
ucuugcucuguagcccagg

SEQ ID NO: 1165456 - RNA, 22 nt, Human
ucuugcucuguagcccaggcug

SEQ ID NO: 1165457 - RNA, 23 nt, Human
ucuugcucuguagcccaggcugg

SEQ ID NO: 1165458 - RNA, 24 nt, Human
ucuugcucuguagcccaggcugga

SEQ ID NO: 1165459 - RNA, 19 nt, Human
ugaagccccaucucuacua

SEQ ID NO: 1165460 - RNA, 25 nt, Human
ugaccucccaggcucaagugauccu

SEQ ID NO: 1165461 - RNA, 22 nt, Human
ugagaaggaagggggaaaagaa

SEQ ID NO: 1165462 - RNA, 19 nt, Human
ugagacggccugaauucuc

SEQ ID NO: 1165463 - RNA, 22 nt, Human
ugagccgagaucgcgccacugc

SEQ ID NO: 1165464 - RNA, 24 nt, Human
ugaggcaggacaaucgcuugaacc

SEQ ID NO: 1165465 - RNA, 25 nt, Human
ugaggcaggacaaucgcuugaaccc

SEQ ID NO: 1165466 - RNA, 21 nt, Human
ugagguggcaauacccuuucc

SEQ ID NO: 1165467 - RNA, 24 nt, Human
ugauccgcccaccucagccuccca

SEQ ID NO: 1165468 - RNA, 23 nt, Human
ugccauaucuuuacauaaacuca

SEQ ID NO: 1165469 - RNA, 23 nt, Human
ugcccggcagauuuugcuauuuu

SEQ ID NO: 1165470 - RNA, 21 nt, Human
ugccucagacuccugaguagc

SEQ ID NO: 1165471 - RNA, 24 nt, Human
ugccucagacuccugaguagcugg

SEQ ID NO: 1165472 - RNA, 23 nt, Human
ugcucuguagcccaggcuggagu

SEQ ID NO: 1165473 - RNA, 24 nt, Human
ugcucuguagcccaggcuggagug

SEQ ID NO: 1165474 - RNA, 24 nt, Human
ugcugggauuacagacgugagcca

SEQ ID NO: 1165475 - RNA, 21 nt, Human
uggaacuacaggcuugagcca

SEQ ID NO: 1165476 - RNA, 24 nt, Human
uggaacuacaggcuugagccacca

SEQ ID NO: 1165477 - RNA, 23 nt, Human
uggagugcaguugcaaaaucuca

SEQ ID NO: 1165478 - RNA, 24 nt, Human
uggaucaccugaggucaggaguuc

SEQ ID NO: 1165479 - RNA, 26 nt, Human
uggaucaccugaggucaggaguucaa

SEQ ID NO: 1165480 - RNA, 21 nt, Human
uggcaugcgccuguaguccca

SEQ ID NO: 1165481 - RNA, 24 nt, Human
uggccaacauggugaagccccauc

SEQ ID NO: 1165482 - RNA, 19 nt, Human
uggcuaaaggacagcuugc

SEQ ID NO: 1165483 - RNA, 24 nt, Human
ugggaggccgaggcagguggauca

SEQ ID NO: 1165484 - RNA, 18 nt, Human
ugggauuacagacgugag

SEQ ID NO: 1165485 - RNA, 21 nt, Human
ugggauuacagacgugagcca

SEQ ID NO: 1165486 - RNA, 22 nt, Human
ugggauuacagacgugagccac

SEQ ID NO: 1165487 - RNA, 23 nt, Human
ugggauuacagacgugagccacc

SEQ ID NO: 1165488 - RNA, 23 nt, Human
ugggauuacagacgugagccacc

SEQ ID NO: 1165489 - RNA, 24 nt, Human
ugggauuacagacgugagccaccg

SEQ ID NO: 1165490 - RNA, 19 nt, Human
ugggauuauaggcgccugc

SEQ ID NO: 1165491 - RNA, 23 nt, Human
ugggauuauaggcgccugcacca

SEQ ID NO: 1165492 - RNA, 21 nt, Human
uggguucaagcaauccuccca

SEQ ID NO: 1165493 - RNA, 24 nt, Human
ugguggcaugcgccuguaguccca

SEQ ID NO: 1165494 - RNA, 21 nt, Human
uuaagcccauaaaaacuacag

SEQ ID NO: 1165495 - RNA, 20 nt, Human
uuacccuuaacugugguuga

SEQ ID NO: 1165496 - RNA, 23 nt, Human
uuacugcagccuugaccucccag

SEQ ID NO: 1165497 - RNA, 24 nt, Human
uuacugcagccuugaccucccagg

SEQ ID NO: 1165498 - RNA, 21 nt, Human
uuagaguaaauguaagaggac

SEQ ID NO: 1165499 - RNA, 20 nt, Human
uuagccgggugugguggcau

SEQ ID NO: 1165500 - RNA, 22 nt, Human
uuagccgggugugguggcaugc

SEQ ID NO: 1165501 - RNA, 24 nt, Human
uucaagcaauccucccaccuuggc

SEQ ID NO: 1165502 - RNA, 21 nt, Human
uucacuguguuagccaggaug

SEQ ID NO: 1165503 - RNA, 19 nt, Human
uucaugccauucuccugcc

SEQ ID NO: 1165504 - RNA, 22 nt, Human
uucugauugauucuuuucccuu

SEQ ID NO: 1165505 - RNA, 24 nt, Human
uugaacccaggaggcggagguugc

SEQ ID NO: 1165506 - RNA, 24 nt, Human
uugcaaaaucucagcucacugcaa

SEQ ID NO: 1165507 - RNA, 18 nt, Human
uugcagugagccgagauc

SEQ ID NO: 1165508 - RNA, 19 nt, Human
uugcagugagccgagaucg

SEQ ID NO: 1165509 - RNA, 22 nt, Human
uugcagugagccgagaucgcgc

SEQ ID NO: 1165510 - RNA, 22 nt, Human
uuggaaagaaugaagucagaga

SEQ ID NO: 1165511 - RNA, 25 nt, Human
uugggaggccgaggcagguggauca

SEQ ID NO: 1165512 - RNA, 19 nt, Human
uuucacuguguuagccagg

SEQ ID NO: 1165513 - RNA, 22 nt, Human
uuugagguggagucuugcucug

SEQ ID NO: 1165514 - RNA, 21 nt, Human
uuugguuuuuuuuucaaccau

SEQ ID NO: 1165515 - RNA, 20 nt, Human
uuuuuguauuuuuaucagag

SEQ ID NO: 1165516 - RNA, 19 nt, Human
uuuuuuuucaaccauuuau

SEQ ID NO: 1165517 - RNA, 24 nt, Human
aaacuaccaaccugcaaaggauua

SEQ ID NO: 1165518 - RNA, 21 nt, Human
aaagacauacaggaggaaugg

SEQ ID NO: 1165519 - RNA, 24 nt, Human
aacaaaaucaugauugcugacacc

SEQ ID NO: 1165520 - RNA, 19 nt, Human
aaucaugauugcugacacc

SEQ ID NO: 1165521 - RNA, 20 nt, Human
acaaaaucaugauugcugac

SEQ ID NO: 1165522 - RNA, 26 nt, Human
acacagcccuccuccaugcuggcucu

SEQ ID NO: 1165523 - RNA, 22 nt, Human
accacacugcaagauuaaguag

SEQ ID NO: 1165524 - RNA, 21 nt, Human
auggagcuugagucuccucca

SEQ ID NO: 1165525 - RNA, 22 nt, Human
caaaaucaugauugcugacacc

SEQ ID NO: 1165526 - RNA, 23 nt, Human
caagauguuacaacaaacaccau

SEQ ID NO: 1165527 - RNA, 22 nt, Human
cacuccagaccauacguggcug

SEQ ID NO: 1165528 - RNA, 18 nt, Human
cagcaaaaugacuuaaca

SEQ ID NO: 1165529 - RNA, 20 nt, Human
cagcccuccuccaugcuggc

SEQ ID NO: 1165530 - RNA, 20 nt, Human
cagcccuccuccaugcuggc

SEQ ID NO: 1165531 - RNA, 23 nt, Human
cagcccuccuccaugcuggcucu

SEQ ID NO: 1165532 - RNA, 22 nt, Human
cagcuaggauuauaacuuuagc

SEQ ID NO: 1165533 - RNA, 25 nt, Human
caggcguccccucaucucuggcccu

SEQ ID NO: 1165534 - RNA, 18 nt, Human
ccacacuguucccacaug

SEQ ID NO: 1165535 - RNA, 24 nt, Human
ccauuuucaccaggcguccccuca

SEQ ID NO: 1165536 - RNA, 20 nt, Human
cuccaacacauuccaugagc

SEQ ID NO: 1165537 - RNA, 28 nt, Human
cuccuccaacacauuccaugagcuucaa

SEQ ID NO: 1165538 - RNA, 21 nt, Human
cucuggggcugagucuuccuu

SEQ ID NO: 1165539 - RNA, 21 nt, Human
cucuugacuaaacuucccaag

SEQ ID NO: 1165540 - RNA, 22 nt, Human
cugguggcagcaaaaugacuuu

SEQ ID NO: 1165541 - RNA, 18 nt, Human
gaucugugguguguccuu

SEQ ID NO: 1165542 - RNA, 23 nt, Human
gccacacuguucccacauggagc

SEQ ID NO: 1165543 - RNA, 21 nt, Human
gcucacacagcccuccuccau

SEQ ID NO: 1165544 - RNA, 20 nt, Human
uaccaagauguuacaacaaa

SEQ ID NO: 1165545 - RNA, 18 nt, Human
uauaguacaaagaagagc

SEQ ID NO: 1165546 - RNA, 26 nt, Human
uccaugcuggcucuugggccacacug

SEQ ID NO: 1165547 - RNA, 23 nt, Human
ucccaagaaucauuacaaauaag

SEQ ID NO: 1165548 - RNA, 23 nt, Human
ucugcucacacagcccuccucca

SEQ ID NO: 1165549 - RNA, 19 nt, Human
ugaaauacacaccaaaugg

SEQ ID NO: 1165550 - RNA, 21 nt, Human
ugaacaagcaaaacaaaauca

SEQ ID NO: 1165551 - RNA, 21 nt, Human
ugacuaaacuucccaagaauc

SEQ ID NO: 1165552 - RNA, 21 nt, Human
ugauuggugccucaugcaccu

SEQ ID NO: 1165553 - RNA, 18 nt, Human
ugcuuuaaaaagaggauc

SEQ ID NO: 1165554 - RNA, 22 nt, Human
uggaaauggguuuuacagccca

SEQ ID NO: 1165555 - RNA, 21 nt, Human
uggagcacuucauuguuaccc

SEQ ID NO: 1165556 - RNA, 23 nt, Human
ugugaacaagcaaaacaaaauca

SEQ ID NO: 1165557 - RNA, 18 nt, Human
uguuuuaaauuuauacuc

SEQ ID NO: 1165558 - RNA, 20 nt, Human
uuaauuuuacuuacuuaacc

SEQ ID NO: 1165559 - RNA, 21 nt, Human
uuagcauucuauagcagucug

SEQ ID NO: 1165560 - RNA, 20 nt, Human
uucaccaggcguccccucau

SEQ ID NO: 1165561 - RNA, 24 nt, Human
uucauaacagauguaaauauuugu

SEQ ID NO: 1165562 - RNA, 25 nt, Human
caaggaaaaucaaauaaaggacaga

SEQ ID NO: 1165563 - RNA, 19 nt, Human
cagacacugugccuaggau

SEQ ID NO: 1165564 - RNA, 21 nt, Human
cccaagcgaacagccuuaaag

SEQ ID NO: 1165565 - RNA, 18 nt, Human
cucuugaaaaaaacaguu

SEQ ID NO: 1165566 - RNA, 18 nt, Human
cuuaaaggugacaaggaa

SEQ ID NO: 1165567 - RNA, 23 nt, Human
uccaaaugaaaucccaagcgaac

SEQ ID NO: 1165568 - RNA, 19 nt, Human
ucuucaagagugugaugau

SEQ ID NO: 1165569 - RNA, 18 nt, Human
ugaaaaaaacaguugagg

SEQ ID NO: 1165570 - RNA, 25 nt, Human
acccuaacauuugaucccaaacaca

SEQ ID NO: 1165571 - RNA, 21 nt, Human
ccacaccaccacacuucuagu

SEQ ID NO: 1165572 - RNA, 21 nt, Human
cuaacauuugaucccaaacac

SEQ ID NO: 1165573 - RNA, 19 nt, Human
uaguaggucucauuuggua

SEQ ID NO: 1165574 - RNA, 19 nt, Human
uuccacaccaccacacuuc

SEQ ID NO: 1165575 - RNA, 21 nt, Human
uugaucccaaacacaugaaaa

SEQ ID NO: 1165576 - RNA, 21 nt, Human
uugcaggauuccacaccacca

SEQ ID NO: 1165577 - RNA, 26 nt, Human
uuuacccuaacauuugaucccaaaca

SEQ ID NO: 1165578 - RNA, 23 nt, Human
aaaaaaaaacaaaaaacaaaaaa

SEQ ID NO: 1165579 - RNA, 21 nt, Human
aaaaaaacaggcaggcuuaga

SEQ ID NO: 1165580 - RNA, 22 nt, Human
aaaaaacaggcaggcuuagaaa

SEQ ID NO: 1165581 - RNA, 21 nt, Human
aaaaaacuuaaucuugagcuc

SEQ ID NO: 1165582 - RNA, 26 nt, Human
aaacaaaaaacuuaaucuugagcucu

SEQ ID NO: 1165583 - RNA, 19 nt, Human
aacauaccuagaucauaua

SEQ ID NO: 1165584 - RNA, 19 nt, Human
aacauggaauaaagaaaaa

SEQ ID NO: 1165585 - RNA, 22 nt, Human
aagcauaugaauacaacagucu

SEQ ID NO: 1165586 - RNA, 22 nt, Human
aaggucaaaacaauauuucuuu

SEQ ID NO: 1165587 - RNA, 23 nt, Human
aaggugguuucuauguccaauua

SEQ ID NO: 1165588 - RNA, 25 nt, Human
aauguaggaguuccuccagguacca

SEQ ID NO: 1165589 - RNA, 23 nt, Human
acaaacauaaaagguaugucucc

SEQ ID NO: 1165590 - RNA, 23 nt, Human
acacacacacacacacacacaca

SEQ ID NO: 1165591 - RNA, 22 nt, Human
acacacacacacacacacacag

SEQ ID NO: 1165592 - RNA, 26 nt, Human
acacacacacacacgaaaagccuggu

SEQ ID NO: 1165593 - RNA, 20 nt, Human
acacacgaaaagccuguaac

SEQ ID NO: 1165594 - RNA, 25 nt, Human
acauaauugaugcugcauugaugcu

SEQ ID NO: 1165595 - RNA, 25 nt, Human
accaaauugccuccaaggucaaaac

SEQ ID NO: 1165596 - RNA, 22 nt, Human
accaucaguuucccuaguucug

SEQ ID NO: 1165597 - RNA, 21 nt, Human
acgacaauggauauaguugcc

SEQ ID NO: 1165598 - RNA, 22 nt, Human
acuaugauacugccacucugaa

SEQ ID NO: 1165599 - RNA, 22 nt, Human
acuuggcaacugauugcaacau

SEQ ID NO: 1165600 - RNA, 19 nt, Human
agacacccuccuucuggug

SEQ ID NO: 1165601 - RNA, 22 nt, Human
agaucauauaaauuugugaagg

SEQ ID NO: 1165602 - RNA, 21 nt, Human
aggaagacaagcauaugaaua

SEQ ID NO: 1165603 - RNA, 24 nt, Human
aggaaguggagcaauauuacaacg

SEQ ID NO: 1165604 - RNA, 20 nt, Human
aggcugucuggccuugggau

SEQ ID NO: 1165605 - RNA, 21 nt, Human
augaagaccaaauugccucca

SEQ ID NO: 1165606 - RNA, 22 nt, Human
augucucccuucaauauuuccu

SEQ ID NO: 1165607 - RNA, 24 nt, Human
auucccauauuuccaucuacuaug

SEQ ID NO: 1165608 - RNA, 23 nt, Human
caaacauaaaagguaugucuccc

SEQ ID NO: 1165609 - RNA, 21 nt, Human
caaacuccaugagcugauuaa

SEQ ID NO: 1165610 - RNA, 20 nt, Human
cacacacacacacacacaca

SEQ ID NO: 1165611 - RNA, 20 nt, Human
cacacacacacacacacaca

SEQ ID NO: 1165612 - RNA, 20 nt, Human
cacacacacacacacacaca

SEQ ID NO: 1165613 - RNA, 22 nt, Human
cacacacacacacacacacaca

SEQ ID NO: 1165614 - RNA, 26 nt, Human
cacacacacacacacacacacacacg

SEQ ID NO: 1165615 - RNA, 33 nt, Human
cacacacacacacacacacgaaaagccuguagu

SEQ ID NO: 1165616 - RNA, 25 nt, Human
cacacacacgaaaagccuguaaccu

SEQ ID NO: 1165617 - RNA, 21 nt, Human
cacaguuaaaauuauaguuaa

SEQ ID NO: 1165618 - RNA, 21 nt, Human
cagaaagaaaauugcugacau

SEQ ID NO: 1165619 - RNA, 24 nt, Human
cagcuaaaccuaaugaagaccaaa

SEQ ID NO: 1165620 - RNA, 19 nt, Human
ccagggaaauggaaaaaaa

SEQ ID NO: 1165621 - RNA, 24 nt, Human
ccagggaaauggaaaaaaaaacaa

SEQ ID NO: 1165622 - RNA, 20 nt, Human
ccaucaguuucccuaguucu

SEQ ID NO: 1165623 - RNA, 24 nt, Human
ccuacagcuaaaccuaaugaagac

SEQ ID NO: 1165624 - RNA, 18 nt, Human
cuaaaccuaaugaagacc

SEQ ID NO: 1165625 - RNA, 20 nt, Human
cugaaauaucuaguauagca

SEQ ID NO: 1165626 - RNA, 23 nt, Human
cugaaauaucuaguauagcacau

SEQ ID NO: 1165627 - RNA, 21 nt, Human
cuggccuugggauuccaggag

SEQ ID NO: 1165628 - RNA, 20 nt, Human
cuugagcucuaguucucgac

SEQ ID NO: 1165629 - RNA, 22 nt, Human
cuuuuggacauccaaacuccag

SEQ ID NO: 1165630 - RNA, 20 nt, Human
gaacaucaacuauccuacag

SEQ ID NO: 1165631 - RNA, 19 nt, Human
gaccuaagacacccuccuu

SEQ ID NO: 1165632 - RNA, 21 nt, Human
ggaccuaagacacccuccuuc

SEQ ID NO: 1165633 - RNA, 23 nt, Human
ggaguuccuccagguacucacuu

SEQ ID NO: 1165634 - RNA, 23 nt, Human
uaaaacagauccucuagccagga

SEQ ID NO: 1165635 - RNA, 21 nt, Human
uaaagaaaaagguuucuguuc

SEQ ID NO: 1165636 - RNA, 20 nt, Human
uaaugaacaucaacuauccu

SEQ ID NO: 1165637 - RNA, 24 nt, Human
uacaugaacacucagcuauguaua

SEQ ID NO: 1165638 - RNA, 18 nt, Human
uacuuggguuguaaggaa

SEQ ID NO: 1165639 - RNA, 21 nt, Human
uagcaauaauugugccucagg

SEQ ID NO: 1165640 - RNA, 18 nt, Human
uaggaguuccuccaggua

SEQ ID NO: 1165641 - RNA, 18 nt, Human
uaguucagauggaucuua

SEQ ID NO: 1165642 - RNA, 18 nt, Human
uaguucagauggaucuua

SEQ ID NO: 1165643 - RNA, 22 nt, Human
uaguucagauggaucuuaccag

SEQ ID NO: 1165644 - RNA, 19 nt, Human
uauuuaauagagggacacc

SEQ ID NO: 1165645 - RNA, 21 nt, Human
ucaaaacacacacacacacac

SEQ ID NO: 1165646 - RNA, 31 nt, Human; identical to SEQ ID NO: 806593

SEQ ID NO: 1165647 - RNA, 18 nt, Human
ucacuggggucuauuguu

SEQ ID NO: 1165648 - RNA, 20 nt, Human
ucagaaagaaaauugcugac

SEQ ID NO: 1165649 - RNA, 22 nt, Human
uccaagcuagcugcccaucauc

SEQ ID NO: 1165650 - RNA, 21 nt, Human
uccacauuuucucuauuuuuc

SEQ ID NO: 1165651 - RNA, 25 nt, Human
ucucacgacaauggauauaguugcc

SEQ ID NO: 1165652 - RNA, 26 nt, Human
ucucacgacaauggauauaguugccu

SEQ ID NO: 1165653 - RNA, 24 nt, Human
ucugaaaagcugucuacauccaaa

SEQ ID NO: 1165654 - RNA, 21 nt, Human
ucuuucuuuuaucaauucucc

SEQ ID NO: 1165655 - RNA, 24 nt, Human
ugaaaacauaccuagaucauauaa

SEQ ID NO: 1165656 - RNA, 24 nt, Human
ugaaagccuaaaauguaggaguuc

SEQ ID NO: 1165657 - RNA, 25 nt, Human
ugaaauaucuaguauagcacauaau

SEQ ID NO: 1165658 - RNA, 20 nt, Human
ugcuaauugaauuacacuuc

SEQ ID NO: 1165659 - RNA, 21 nt, Human
uggaauaaagaaaaagguuuc

SEQ ID NO: 1165660 - RNA, 27 nt, Human
ugggauguaccgaaaaaaggauguuuu

SEQ ID NO: 1165661 - RNA, 25 nt, Human
uguucccagggaaauggaaaaaaaa

SEQ ID NO: 1165662 - RNA, 19 nt, Human
uguuucaauuccauuuuuc

SEQ ID NO: 1165663 - RNA, 21 nt, Human
uuaguauuaaccaauaauuua

SEQ ID NO: 1165664 - RNA, 20 nt, Human
uucaauauuuccucuuaaug

SEQ ID NO: 1165665 - RNA, 19 nt, Human
uucaauuuccuuucuuuuc

SEQ ID NO: 1165666 - RNA, 33 nt, Human
uucucaaaacacacacacacacacacacacagu

SEQ ID NO: 1165667 - RNA, 22 nt, Human
uucuguucaucucuauacuuca

SEQ ID NO: 1165668 - RNA, 23 nt, Human
aaaaccuucccaucccaguucaa

SEQ ID NO: 1165669 - RNA, 24 nt, Human
aaagugcugagauuacaggcguga

SEQ ID NO: 1165670 - RNA, 21 nt, Human
aagcaagugucuugggugugg

SEQ ID NO: 1165671 - RNA, 24 nt, Human
aaguagcuggaauuacuggcaugc

SEQ ID NO: 1165672 - RNA, 26 nt, Human
aagugcugagauuacaggcgugagcc

SEQ ID NO: 1165673 - RNA, 18 nt, Human
aauuacuggcaugcacca

SEQ ID NO: 1165674 - RNA, 19 nt, Human
acaaaccccaucccaacac

SEQ ID NO: 1165675 - RNA, 24 nt, Human
acaccuucagcuucagaaugaucc

SEQ ID NO: 1165676 - RNA, 18 nt, Human
accacacacacacgaaca

SEQ ID NO: 1165677 - RNA, 22 nt, Human
accacacacacacgaacacaca

SEQ ID NO: 1165678 - RNA, 26 nt, Human
accacacacacacgaacacacacuug

SEQ ID NO: 1165679 - RNA, 25 nt, Human
accauguugcccaggcugaucucaa

SEQ ID NO: 1165680 - RNA, 20 nt, Human
accuuggaggccaccugggg

SEQ ID NO: 1165681 - RNA, 18 nt, Human
acgagguuucaccauguu

SEQ ID NO: 1165682 - RNA, 19 nt, Human
acgagguuucaccauguug

SEQ ID NO: 1165683 - RNA, 24 nt, Human
acgagguuucaccauguugcccag

SEQ ID NO: 1165684 - RNA, 21 nt, Human
acuccacuccugcugaaacag

SEQ ID NO: 1165685 - RNA, 19 nt, Human
agagggagaaacccaguuc

SEQ ID NO: 1165686 - RNA, 24 nt, Human
agaucuguugucgccguggguucu

SEQ ID NO: 1165687 - RNA, 20 nt, Human
agauuacaggcgugagcccu

SEQ ID NO: 1165688 - RNA, 20 nt, Human
agcaaggaaagcagacagcu

SEQ ID NO: 1165689 - RNA, 21 nt, Human
aggaaaaaugaagaggaaagc

SEQ ID NO: 1165690 - RNA, 19 nt, Human
aggagcuggccaggggagc

SEQ ID NO: 1165691 - RNA, 25 nt, Human
aggcuggagugcaguggggcuaucu

SEQ ID NO: 1165692 - RNA, 20 nt, Human
aggcugguuucaaacuuggc

SEQ ID NO: 1165693 - RNA, 24 nt, Human
agggauucuccugccucaaccucc

SEQ ID NO: 1165694 - RNA, 22 nt, Human
agguuucaccauguugcccagg

SEQ ID NO: 1165695 - RNA, 22 nt, Human
aguagagacgagguuucaccau

SEQ ID NO: 1165696 - RNA, 24 nt, Human
aguaggacaucagcgaagaucugu

SEQ ID NO: 1165697 - RNA, 24 nt, Human
agugauaugccugccuuggccucc

SEQ ID NO: 1165698 - RNA, 21 nt, Human
aguuauagaauuuuaauaggg

SEQ ID NO: 1165699 - RNA, 23 nt, Human
auuaaauuuacaaaccccauccc

SEQ ID NO: 1165700 - RNA, 21 nt, Human
auucacaacacuguacucaac

SEQ ID NO: 1165701 - RNA, 24 nt, Human
auuuuuauauuuuuaguagagacg

SEQ ID NO: 1165702 - RNA, 24 nt, Human
caaagugcugagauuacaggcgug

SEQ ID NO: 1165703 - RNA, 21 nt, Human
caacauuuuguuauuccccag

SEQ ID NO: 1165704 - RNA, 20 nt, Human
caaccuguaccucccagguu

SEQ ID NO: 1165705 - RNA, 24 nt, Human
caaccuguaccucccagguucaag

SEQ ID NO: 1165706 - RNA, 19 nt, Human
caagugauaugccugcccc

SEQ ID NO: 1165707 - RNA, 22 nt, Human
caagugauaugccugccuuggc

SEQ ID NO: 1165708 - RNA, 27 nt, Human
cacacacacaccacacacacacgaaca

SEQ ID NO: 1165709 - RNA, 18 nt, Human
cacacacaccacacacac

SEQ ID NO: 1165710 - RNA, 22 nt, Human
caccacacacacacgaacacac

SEQ ID NO: 1165711 - RNA, 22 nt, Human
caccaccaugcccugcuaauuu

SEQ ID NO: 1165712 - RNA, 24 nt, Human
caccauguugcccaggcugaucuc

SEQ ID NO: 1165713 - RNA, 25 nt, Human
cacccaggcuggagugcaguggggc

SEQ ID NO: 1165714 - RNA, 26 nt, Human
caccuucagcuucagaaugauccuga

SEQ ID NO: 1165715 - RNA, 20 nt, Human
cacuagaauucuuccaccaa

SEQ ID NO: 1165716 - RNA, 23 nt, Human
cacuccugcugaaacaggaauug

SEQ ID NO: 1165717 - RNA, 21 nt, Human
cacugcaaccuguaccuccca

SEQ ID NO: 1165718 - RNA, 19 nt, Human
cagaaugauccugauuuaa

SEQ ID NO: 1165719 - RNA, 22 nt, Human
cagcuuagggucgaagccuagg

SEQ ID NO: 1165720 - RNA, 19 nt, Human
cagguucaagggauucucc

SEQ ID NO: 1165721 - RNA, 19 nt, Human
caguucuaggccuccuccc

SEQ ID NO: 1165722 - RNA, 21 nt, Human
caucccaacaccgugcugagc

SEQ ID NO: 1165723 - RNA, 23 nt, Human
cauccccauccugagagcuagcg

SEQ ID NO: 1165724 - RNA, 23 nt, Human
cauguugcccaggcugaucucaa

SEQ ID NO: 1165725 - RNA, 24 nt, Human
cauguugcccaggcugaucucaaa

SEQ ID NO: 1165726 - RNA, 20 nt, Human
ccaaagugcugagauuacag

SEQ ID NO: 1165727 - RNA, 22 nt, Human
ccaaagugcugagauuacaggc

SEQ ID NO: 1165728 - RNA, 22 nt, Human
ccaaagugcugagauuacaggc

SEQ ID NO: 1165729 - RNA, 24 nt, Human
ccaaagugcugagauuacaggcgu

SEQ ID NO: 1165730 - RNA, 21 nt, Human
ccaggccccucccccaggagc

SEQ ID NO: 1165731 - RNA, 20 nt, Human
cccaaguagcuggaauuacu

SEQ ID NO: 1165732 - RNA, 20 nt, Human
cccacuccacuccugcugaa

SEQ ID NO: 1165733 - RNA, 26 nt, Human
cccaggcugaucucaaaaacguccgc

SEQ ID NO: 1165734 - RNA, 23 nt, Human
cccccaggagcuggccaggggag

SEQ ID NO: 1165735 - RNA, 24 nt, Human
ccucccagguucaagggauucucc

SEQ ID NO: 1165736 - RNA, 22 nt, Human
ccucggcucaagugauaugccu

SEQ ID NO: 1165737 - RNA, 25 nt, Human
ccucugucacccaggcuggagugca

SEQ ID NO: 1165738 - RNA, 22 nt, Human
ccugccuuggccucccaaagug

SEQ ID NO: 1165739 - RNA, 19 nt, Human
ccuggggucagcacucagg

SEQ ID NO: 1165740 - RNA, 21 nt, Human
ccuugugcccagccaccuuuc

SEQ ID NO: 1165741 - RNA, 24 nt, Human
ccuugugcccagccaccuuucuua

SEQ ID NO: 1165742 - RNA, 24 nt, Human
cgagguuucaccauguugcccagg

SEQ ID NO: 1165743 - RNA, 20 nt, Human
cucaagugauaugccugccu

SEQ ID NO: 1165744 - RNA, 19 nt, Human
cucacacacacaccacaca

SEQ ID NO: 1165745 - RNA, 25 nt, Human
cucacacacacaccacacacacacg

SEQ ID NO: 1165746 - RNA, 24 nt, Human
cucacugcaaccuguaccucccag

SEQ ID NO: 1165747 - RNA, 19 nt, Human
cucaugccucuccuucugg

SEQ ID NO: 1165748 - RNA, 21 nt, Human
cucccaaagugcugagauuac

SEQ ID NO: 1165749 - RNA, 24 nt, Human
cucccucugucacccaggcuggag

SEQ ID NO: 1165750 - RNA, 22 nt, Human
cuccuccccaacauccccaucc

SEQ ID NO: 1165751 - RNA, 20 nt, Human
cucugucacccaggcuggag

SEQ ID NO: 1165752 - RNA, 24 nt, Human
cugcaaccuguaccucccagguuc

SEQ ID NO: 1165753 - RNA, 23 nt, Human
cugccuuggccucccaaagugcu

SEQ ID NO: 1165754 - RNA, 24 nt, Human
cuucacaauuccauaugcuucgcu

SEQ ID NO: 1165755 - RNA, 18 nt, Human
cuuccccugccuucuugg

SEQ ID NO: 1165756 - RNA, 18 nt, Human
gaaacaggaauucaggag

SEQ ID NO: 1165757 - RNA, 18 nt, Human
gacacaguaggacaucag

SEQ ID NO: 1165758 - RNA, 21 nt, Human
gacacaguaggacaucagcga

SEQ ID NO: 1165759 - RNA, 21 nt, Human
gagauggagucucccucuguc

SEQ ID NO: 1165760 - RNA, 19 nt, Human
gagcauuuaaagucagaga

SEQ ID NO: 1165761 - RNA, 21 nt, Human
gagcauuuaaagucagagaaa

SEQ ID NO: 1165762 - RNA, 22 nt, Human
gaucuuuuugcuuuuuuucccu

SEQ ID NO: 1165763 - RNA, 24 nt, Human
gauuacaggcgugagcccuugugc

SEQ ID NO: 1165764 - RNA, 21 nt, Human
gcccacuccacuccugcugaa

SEQ ID NO: 1165765 - RNA, 22 nt, Human
gcccugcuaauuuuuauauuuu

SEQ ID NO: 1165766 - RNA, 20 nt, Human
gccucaaccucccaaguagc

SEQ ID NO: 1165767 - RNA, 22 nt, Human
gccuccuccccaacauccccau

SEQ ID NO: 1165768 - RNA, 22 nt, Human
gccuuggccucccaaagugcug

SEQ ID NO: 1165769 - RNA, 19 nt, Human
ggcgggugacacuggacuc

SEQ ID NO: 1165770 - RNA, 18 nt, Human
gggagugaccacuggggc

SEQ ID NO: 1165771 - RNA, 18 nt, Human
gggugacagagggaggaa

SEQ ID NO: 1165772 - RNA, 19 nt, Human
gucugaaugccauguggga

SEQ ID NO: 1165773 - RNA, 19 nt, Human
gugaccaggccccuccccc

SEQ ID NO: 1165774 - RNA, 24 nt, Human
guuucaccauguugcccaggcuga

SEQ ID NO: 1165775 - RNA, 22 nt, Human
uaaaaugcacauuccugggccc

SEQ ID NO: 1165776 - RNA, 23 nt, Human
uaaaaugcacauuccugggccca

SEQ ID NO: 1165777 - RNA, 26 nt, Human
uaaaaugcacauuccugggcccacuc

SEQ ID NO: 1165778 - RNA, 20 nt, Human
uaaauggcccugacguccaa

SEQ ID NO: 1165779 - RNA, 18 nt, Human
uaacaaagucaaaaaaaa

SEQ ID NO: 1165780 - RNA, 22 nt, Human
uaacaaagucaaaaaaaaucuu

SEQ ID NO: 1165781 - RNA, 20 nt, Human
uaagaaacucuuuucuaucu

SEQ ID NO: 1165782 - RNA, 24 nt, Human
uaauuuuuauauuuuuaguagaga

SEQ ID NO: 1165783 - RNA, 21 nt, Human
uacacugaucuuuaguuuuau

SEQ ID NO: 1165784 - RNA, 24 nt, Human
uacuggcaugcaccaccaugcccu

SEQ ID NO: 1165785 - RNA, 22 nt, Human
uagagacgagguuucaccaugu

SEQ ID NO: 1165786 - RNA, 25 nt, Human
uaggagcauuuaaagucagagaaaa

SEQ ID NO: 1165787 - RNA, 23 nt, Human
uaggccuccuccccaacaucccc

SEQ ID NO: 1165788 - RNA, 24 nt, Human
uaguagagacgagguuucaccaug

SEQ ID NO: 1165789 - RNA, 25 nt, Human
uaguagagacgagguuucaccaugu

SEQ ID NO: 1165790 - RNA, 18 nt, Human
uauuccccaguauuuuau

SEQ ID NO: 1165791 - RNA, 22 nt, Human
ucacacacacaccacacacaca

SEQ ID NO: 1165792 - RNA, 26 nt, Human
ucacacacacaccacacacacacgaa

SEQ ID NO: 1165793 - RNA, 23 nt, Human
ucacccaggcuggagugcagugg

SEQ ID NO: 1165794 - RNA, 24 nt, Human
ucacugcaaccuguaccucccagg

SEQ ID NO: 1165795 - RNA, 23 nt, Human
ucaggucucauucacaacacugu

SEQ ID NO: 1165796 - RNA, 20 nt, Human
ucaguccauguaaauuaggc

SEQ ID NO: 1165797 - RNA, 24 nt, Human
ucccaaagugcugagauuacaggc

SEQ ID NO: 1165798 - RNA, 20 nt, Human
ucccagagguccccucccuu

SEQ ID NO: 1165799 - RNA, 24 nt, Human
ucccagagguccccucccuuggug

SEQ ID NO: 1165800 - RNA, 21 nt, Human
ucccagguucaagggauucuc

SEQ ID NO: 1165801 - RNA, 24 nt, Human
ucccagguucaagggauucuccug

SEQ ID NO: 1165802 - RNA, 27 nt, Human
uccccucccuuggugagcagaagcugg

SEQ ID NO: 1165803 - RNA, 20 nt, Human
ucccucugucacccaggcug

SEQ ID NO: 1165804 - RNA, 24 nt, Human
ucccucugucacccaggcuggagu

SEQ ID NO: 1165805 - RNA, 22 nt, Human
ucccuggaaaggucuccugggu

SEQ ID NO: 1165806 - RNA, 24 nt, Human
ucccuuggugagcagaagcaaugc

SEQ ID NO: 1165807 - RNA, 19 nt, Human
uccugggcccacuccacuc

SEQ ID NO: 1165808 - RNA, 29 nt, Human
ucucacacacacaccacacacacacgaaa

SEQ ID NO: 1165809 - RNA, 23 nt, Human
ucucccucugucacccaggcugg

SEQ ID NO: 1165810 - RNA, 24 nt, Human
ucucccucugucacccaggcugga

SEQ ID NO: 1165811 - RNA, 26 nt, Human
ucuccugccucaaccucccaaguagc

SEQ ID NO: 1165812 - RNA, 29 nt, Human
ucucuaagagucuucucccgagggugagg

SEQ ID NO: 1165813 - RNA, 27 nt, Human
ucugcacaaccagaauguguucacagu

SEQ ID NO: 1165814 - RNA, 24 nt, Human
ucugucacccaggcuggagugcag

SEQ ID NO: 1165815 - RNA, 21 nt, Human
ucuuccaccaauacaucucug

SEQ ID NO: 1165816 - RNA, 19 nt, Human
ucuugagcccacgaugcug

SEQ ID NO: 1165817 - RNA, 18 nt, Human
ucuuguguauacuaaacc

SEQ ID NO: 1165818 - RNA, 20 nt, Human
ugaccacuggggcuuccccu

SEQ ID NO: 1165819 - RNA, 22 nt, Human
ugaccaggccccucccccagga

SEQ ID NO: 1165820 - RNA, 24 nt, Human
ugaccaggccccucccccaggagc

SEQ ID NO: 1165821 - RNA, 25 nt, Human
ugaccaggccccucccccaggagcu

SEQ ID NO: 1165822 - RNA, 19 nt, Human
ugagauuacaggcgugagc

SEQ ID NO: 1165823 - RNA, 20 nt, Human
ugagauuacaggcgugagcc

SEQ ID NO: 1165824 - RNA, 21 nt, Human
ugagauuacaggcgugagccc

SEQ ID NO: 1165825 - RNA, 22 nt, Human
ugagauuacaggcgugagcccu

SEQ ID NO: 1165826 - RNA, 23 nt, Human
ugagauuacaggcgugagcccuu

SEQ ID NO: 1165827 - RNA, 19 nt, Human
ugagcagaagcaaugcuca

SEQ ID NO: 1165828 - RNA, 21 nt, Human
ugagcagaagcaaugcucacc

SEQ ID NO: 1165829 - RNA, 23 nt, Human
ugccaugugggagugaccacugg

SEQ ID NO: 1165830 - RNA, 22 nt, Human
ugcccaggcugaucucaaaaac

SEQ ID NO: 1165831 - RNA, 24 nt, Human
ugccucaaccucccaaguagcugg

SEQ ID NO: 1165832 - RNA, 18 nt, Human
ugccugccuuggccuccc

SEQ ID NO: 1165833 - RNA, 20 nt, Human
ugcugagauuacaggcguga

SEQ ID NO: 1165834 - RNA, 24 nt, Human
uggaauuacuggcaugcaccacca

SEQ ID NO: 1165835 - RNA, 20 nt, Human
uggagugcaguggggcuauc

SEQ ID NO: 1165836 - RNA, 23 nt, Human
uggagugcaguggggcuaucugg

SEQ ID NO: 1165837 - RNA, 22 nt, Human
ugggugacagagggaggaaaaa

SEQ ID NO: 1165838 - RNA, 20 nt, Human
uggugagcagaagcaaugcu

SEQ ID NO: 1165839 - RNA, 22 nt, Human
uggugaucuuuuugcuuuuuuu

SEQ ID NO: 1165840 - RNA, 21 nt, Human
uguaggcucuggcagcucacg

SEQ ID NO: 1165841 - RNA, 24 nt, Human
uuaaaaccuucccaucccaguuca

SEQ ID NO: 1165842 - RNA, 24 nt, Human
uuaguagagacgagguuucaccau

SEQ ID NO: 1165843 - RNA, 22 nt, Human
uucaggaggggguggcugagga

SEQ ID NO: 1165844 - RNA, 21 nt, Human
uuccugggcccacuccacucc

SEQ ID NO: 1165845 - RNA, 18 nt, Human
uucuaggccuccucccca

SEQ ID NO: 1165846 - RNA, 21 nt, Human
uucucuagcaagaagucauuu

SEQ ID NO: 1165847 - RNA, 18 nt, Human
uuggccucccaaagugcu

SEQ ID NO: 1165848 - RNA, 24 nt, Human
uuuaaaaugcacauuccugggccc

SEQ ID NO: 1165849 - RNA, 21 nt, Human
uuucaccauguugcccaggcu

SEQ ID NO: 1165850 - RNA, 24 nt, Human
uuuuuaguagagacgagguuucac

SEQ ID NO: 1165851 - RNA, 20 nt, Human
uuuuuauauuuuuaguagag

SEQ ID NO: 1165852 - RNA, 25 nt, Human
aaaacagcagaaaauccccagaaga

SEQ ID NO: 1165853 - RNA, 24 nt, Human
aaaaguuuuguccuucuuaggagg

SEQ ID NO: 1165854 - RNA, 23 nt, Human
aaaauacaacauuaaaacagguu

SEQ ID NO: 1165855 - RNA, 22 nt, Human
aaacaaaugauacagaaaucuu

SEQ ID NO: 1165856 - RNA, 22 nt, Human
aaagcuaacuccuuuuaaaaca

SEQ ID NO: 1165857 - RNA, 22 nt, Human
aaguggauauguggguggauga

SEQ ID NO: 1165858 - RNA, 18 nt, Human
acagcagaaaauccccag

SEQ ID NO: 1165859 - RNA, 23 nt, Human
accaaaacagcagaaaaucccca

SEQ ID NO: 1165860 - RNA, 26 nt, Human
accaaaacagcagaaaauccccagaa

SEQ ID NO: 1165861 - RNA, 23 nt, Human
agcagaaaauccccagaagagga

SEQ ID NO: 1165862 - RNA, 23 nt, Human
aggcaugguccccagaaucaggg

SEQ ID NO: 1165863 - RNA, 20 nt, Human
aucauauuaacaagugcccu

SEQ ID NO: 1165864 - RNA, 18 nt, Human
auuucaccugggugcagg

SEQ ID NO: 1165865 - RNA, 24 nt, Human
caaaagcaagccaggaguccaaga

SEQ ID NO: 1165866 - RNA, 25 nt, Human
cacacacugaggggcuaagagggga

SEQ ID NO: 1165867 - RNA, 19 nt, Human
caccauuacauauguaucu

SEQ ID NO: 1165868 - RNA, 19 nt, Human
cagguuaccaaaacagcag

SEQ ID NO: 1165869 - RNA, 26 nt, Human
cauaaaucacaugagauaauugccuc

SEQ ID NO: 1165870 - RNA, 21 nt, Human
cauccauccuuuaaugucucc

SEQ ID NO: 1165871 - RNA, 20 nt, Human
ccagaagaggaaacugcuga

SEQ ID NO: 1165872 - RNA, 23 nt, Human
ccagaagaggaaacugcugagga

SEQ ID NO: 1165873 - RNA, 26 nt, Human
ccagcaauaaaccugugagguacccc

SEQ ID NO: 1165874 - RNA, 19 nt, Human
ccaggaguccaagagggga

SEQ ID NO: 1165875 - RNA, 18 nt, Human
ccgggcccuugcucuucu

SEQ ID NO: 1165876 - RNA, 21 nt, Human
ccgggcccuugcucuucuuuu

SEQ ID NO: 1165877 - RNA, 19 nt, Human
ccugggugcaggugggcug

SEQ ID NO: 1165878 - RNA, 19 nt, Human
ccugggugcaggugggcug

SEQ ID NO: 1165879 - RNA, 21 nt, Human
ccugggugcaggugggcuggu

SEQ ID NO: 1165880 - RNA, 23 nt, Human
cuccagccgggcccuugcucuuc

SEQ ID NO: 1165881 - RNA, 21 nt, Human
guggguggaugaugaaaugua

SEQ ID NO: 1165882 - RNA, 23 nt, Human
uaaaucacaugagauaauugccu

SEQ ID NO: 1165883 - RNA, 22 nt, Human
uaagaggaguuuucagucagua

SEQ ID NO: 1165884 - RNA, 21 nt, Human
uaagaggggagggggacacca

SEQ ID NO: 1165885 - RNA, 19 nt, Human
uaccaaaacagcagaaaaa

SEQ ID NO: 1165886 - RNA, 23 nt, Human
uauuuuuuacauuuuuacaucuc

SEQ ID NO: 1165887 - RNA, 18 nt, Human
uccagaaagucccagugg

SEQ ID NO: 1165888 - RNA, 20 nt, Human
ucugaaagcaauacuuaugg

SEQ ID NO: 1165889 - RNA, 27 nt, Human
ucuguagccaaaagcaagccggggucc

SEQ ID NO: 1165890 - RNA, 18 nt, Human
ugccacacacuauagaga

SEQ ID NO: 1165891 - RNA, 20 nt, Human
uggagagccauucugggaaa

SEQ ID NO: 1165892 - RNA, 21 nt, Human
uggauaaguggauaugugggu

SEQ ID NO: 1165893 - RNA, 18 nt, Human
uggggaaaugaaggucug

SEQ ID NO: 1165894 - RNA, 20 nt, Human
uggggaaaugaaggucugaa

SEQ ID NO: 1165895 - RNA, 21 nt, Human
uguggguggaugaugaaaugu

SEQ ID NO: 1165896 - RNA, 24 nt, Human
uucaccugggugcaggugggcucc

SEQ ID NO: 1165897 - RNA, 25 nt, Human
uugaauggauaaguggauauguggg

SEQ ID NO: 1165898 - RNA, 19 nt, Human
uugauaccagcaauaaacc

SEQ ID NO: 1165899 - RNA, 18 nt, Human
uuguccuucuuaggaggu

SEQ ID NO: 1165900 - RNA, 21 nt, Human
uuuguccuucuuaggagguau

SEQ ID NO: 1165901 - RNA, 23 nt, Human
aaagaaagaaacucuauagagaa

SEQ ID NO: 1165902 - RNA, 24 nt, Human
aagaaacucuauagagaacaccac

SEQ ID NO: 1165903 - RNA, 21 nt, Human
aagaaagaaacucuauagaga

SEQ ID NO: 1165904 - RNA, 22 nt, Human
aagaaagaaacucuauagagaa

SEQ ID NO: 1165905 - RNA, 21 nt, Human
auccaaauuaaaaagaaagaa

SEQ ID NO: 1165906 - RNA, 22 nt, Human
caccacauggaccaaacuuggu

SEQ ID NO: 1165907 - RNA, 22 nt, Human
uaaagcagaagcaauccuuuca

SEQ ID NO: 1165908 - RNA, 24 nt, Human
uuaaagcagaagcaauccuuucau

SEQ ID NO: 1165909 - RNA, 22 nt, Human
aaaaacaaugucauuuaaaaac

SEQ ID NO: 1165910 - RNA, 24 nt, Human
aaaaacgaacccaaccaaaaaaaa

SEQ ID NO: 1165911 - RNA, 27 nt, Human
aaaaagacagcaggccuagggccucaa

SEQ ID NO: 1165912 - RNA, 18 nt, Human
aaacauaguuagaaaaug

SEQ ID NO: 1165913 - RNA, 25 nt, Human
aaagccguggcuggcagucucacca

SEQ ID NO: 1165914 - RNA, 21 nt, Human
aacauuguuguauuugcuuuu

SEQ ID NO: 1165915 - RNA, 18 nt, Human
aacccuaugccagucccu

SEQ ID NO: 1165916 - RNA, 18 nt, Human
aaccucugccugcuuccc

SEQ ID NO: 1165917 - RNA, 23 nt, Human
aagaaaaaaaaaaacaaaauauu

SEQ ID NO: 1165918 - RNA, 23 nt, Human
aagacagcaggccuagggccuca

SEQ ID NO: 1165919 - RNA, 20 nt, Human
aagacagggugaccccugag

SEQ ID NO: 1165920 - RNA, 21 nt, Human
aagcagaauuuggcaguugga

SEQ ID NO: 1165921 - RNA, 24 nt, Human
aagcccaugggcacagcucugugc

SEQ ID NO: 1165922 - RNA, 22 nt, Human
aagcuaacacagucauagaaaa

SEQ ID NO: 1165923 - RNA, 19 nt, Human
aaggaccuuccagccccaa

SEQ ID NO: 1165924 - RNA, 19 nt, Human
aaggaugggcucagaggca

SEQ ID NO: 1165925 - RNA, 18 nt, Human
aagggcagccagcccaca

SEQ ID NO: 1165926 - RNA, 23 nt, Human
aaguggcagcagugaccuaggca

SEQ ID NO: 1165927 - RNA, 24 nt, Human
aaguggcagcagugaccuaggcag

SEQ ID NO: 1165928 - RNA, 24 nt, Human
aauccagaagaucucugcugucac

SEQ ID NO: 1165929 - RNA, 19 nt, Human
acacagccucccucccugc

SEQ ID NO: 1165930 - RNA, 18 nt, Human
acagagaaaacauauaca

SEQ ID NO: 1165931 - RNA, 19 nt, Human
acagagaaaacauauacaa

SEQ ID NO: 1165932 - RNA, 22 nt, Human
acagcugucaagccaggaaccc

SEQ ID NO: 1165933 - RNA, 20 nt, Human
accaagaaaaaaaaaaacaa

SEQ ID NO: 1165934 - RNA, 22 nt, Human
accaggaagcggccuccccagg

SEQ ID NO: 1165935 - RNA, 24 nt, Human
accccacaaaacccuaugccaguc

SEQ ID NO: 1165936 - RNA, 24 nt, Human
acccccucuccccacucuccccac

SEQ ID NO: 1165937 - RNA, 18 nt, Human
agaaaaaaaaaaacaaaa

SEQ ID NO: 1165938 - RNA, 23 nt, Human
agaaaaaaaaaaacaaaauauua

SEQ ID NO: 1165939 - RNA, 21 nt, Human
agaaaacccucuccucccuca

SEQ ID NO: 1165940 - RNA, 28 nt, Human
agaaaucagcccagagaucccacugucu

SEQ ID NO: 1165941 - RNA, 23 nt, Human
agaaguggcagcagugaccuagg

SEQ ID NO: 1165942 - RNA, 27 nt, Human
agaauagacgauggagccaccugaaca

SEQ ID NO: 1165943 - RNA, 20 nt, Human
agacaagccucuccagaaag

SEQ ID NO: 1165944 - RNA, 28 nt, Human
agacagcaggccuagggccucaaaaaca

SEQ ID NO: 1165945 - RNA, 20 nt, Human
agaccccuggccugccucag

SEQ ID NO: 1165946 - RNA, 23 nt, Human
agaccccuggccugccucagucu

SEQ ID NO: 1165947 - RNA, 19 nt, Human
agacuuggaacauguggca

SEQ ID NO: 1165948 - RNA, 23 nt, Human
agagagagaaaaagaauguggca

SEQ ID NO: 1165949 - RNA, 21 nt, Human
agagaggccuccaggccuaga

SEQ ID NO: 1165950 - RNA, 23 nt, Human
agagaucccacugucuacaaggg

SEQ ID NO: 1165951 - RNA, 23 nt, Human
agaggagcacgaugggacuugga

SEQ ID NO: 1165952 - RNA, 20 nt, Human
agaugcuggggagugggcau

SEQ ID NO: 1165953 - RNA, 26 nt, Human
agcagaccccaaccagaaaucagccc

SEQ ID NO: 1165954 - RNA, 24 nt, Human
agcaggagggaugaacuucuuagg

SEQ ID NO: 1165955 - RNA, 23 nt, Human
agccacggcacuggggagggccc

SEQ ID NO: 1165956 - RNA, 22 nt, Human
agcccaccucuccugccuucca

SEQ ID NO: 1165957 - RNA, 23 nt, Human
agcuggccccuuggaagagccug

SEQ ID NO: 1165958 - RNA, 19 nt, Human
aggaagauggucaggcagc

SEQ ID NO: 1165959 - RNA, 18 nt, Human
aggagaugcaggcugaag

SEQ ID NO: 1165960 - RNA, 21 nt, Human
aggagggaugaacuucuuagg

SEQ ID NO: 1165961 - RNA, 22 nt, Human
aggcagaagugaagcugucaag

SEQ ID NO: 1165962 - RNA, 24 nt, Human
agguggcuaagcaaagccguggcu

SEQ ID NO: 1165963 - RNA, 24 nt, Human
aguaagagcaggagggaugaacuu

SEQ ID NO: 1165964 - RNA, 18 nt, Human
agugagggacagaaaaga

SEQ ID NO: 1165965 - RNA, 18 nt, Human
aguggagcuccugcccua

SEQ ID NO: 1165966 - RNA, 22 nt, Human
auagaaaacccucuccucccuc

SEQ ID NO: 1165967 - RNA, 20 nt, Human
auagaauauauauauauaca

SEQ ID NO: 1165968 - RNA, 19 nt, Human
auauauauauauauauaua

SEQ ID NO: 1165969 - RNA, 19 nt, Human
auauauauauauauauaua

SEQ ID NO: 1165970 - RNA, 19 nt, Human
auauauauauauauauaua

SEQ ID NO: 1165971 - RNA, 19 nt, Human
auauauauauauauauaua

SEQ ID NO: 1165972 - RNA, 19 nt, Human
aucauaucccagggggaag

SEQ ID NO: 1165973 - RNA, 20 nt, Human
augcuagagucuucugaaca

SEQ ID NO: 1165974 - RNA, 23 nt, Human
auggucaggcagcuacuaaaugc

SEQ ID NO: 1165975 - RNA, 24 nt, Human
auguacuuuuaaauuaggacagag

SEQ ID NO: 1165976 - RNA, 24 nt, Human
auguagccuaaauuauccuugaaa

SEQ ID NO: 1165977 - RNA, 18 nt, Human
caaaaccagacacauaag

SEQ ID NO: 1165978 - RNA, 21 nt, Human
caacccaaaacggcugguucg

SEQ ID NO: 1165979 - RNA, 18 nt, Human
caagcaggccaccucccc

SEQ ID NO: 1165980 - RNA, 19 nt, Human
caaguucccaggcuugcaa

SEQ ID NO: 1165981 - RNA, 20 nt, Human
cacaaaaggcaaaaucucau

SEQ ID NO: 1165982 - RNA, 19 nt, Human
cacaacccaaaacggcugg

SEQ ID NO: 1165983 - RNA, 18 nt, Human
cacacaucauaucccagg

SEQ ID NO: 1165984 - RNA, 22 nt, Human
cacauuauauauauauauauau

SEQ ID NO: 1165985 - RNA, 18 nt, Human
cacauuguuaaauggggu

SEQ ID NO: 1165986 - RNA, 23 nt, Human
caccaagaaaaaaaaaaacaaaa

SEQ ID NO: 1165987 - RNA, 25 nt, Human
caccagaccuccacagaguauugcu

SEQ ID NO: 1165988 - RNA, 18 nt, Human
caccaugugagggagagu

SEQ ID NO: 1165989 - RNA, 21 nt, Human
cacccccucuccccacucucc

SEQ ID NO: 1165990 - RNA, 26 nt, Human
cacccccucuccccacucuccccacc

SEQ ID NO: 1165991 - RNA, 20 nt, Human
cacccuguccucagacccuu

SEQ ID NO: 1165992 - RNA, 25 nt, Human
cacccuguccucagacccuuugcuu

SEQ ID NO: 1165993 - RNA, 18 nt, Human
cacucgcaccugcaccca

SEQ ID NO: 1165994 - RNA, 22 nt, Human
cacucgcaccugcacccacccu

SEQ ID NO: 1165995 - RNA, 26 nt, Human
cacucuccccaccccccuacaaggga

SEQ ID NO: 1165996 - RNA, 19 nt, Human
cagacccaggcccccacag

SEQ ID NO: 1165997 - RNA, 19 nt, Human
cagaguagggucccaagga

SEQ ID NO: 1165998 - RNA, 25 nt, Human
cagaguagggucccaaggaugggcu

SEQ ID NO: 1165999 - RNA, 25 nt, Human
cagcagagaacuggagaaaagggaa

SEQ ID NO: 1166000 - RNA, 19 nt, Human
cagcagcucuccucugcug

SEQ ID NO: 1166001 - RNA, 24 nt, Human
cagcccacagcugucaagccagga

SEQ ID NO: 1166002 - RNA, 18 nt, Human
cagcccgauguccuggag

SEQ ID NO: 1166003 - RNA, 24 nt, Human
cagcccugcucccagcuggcucca

SEQ ID NO: 1166004 - RNA, 22 nt, Human
cagccucagucacuucacauug

SEQ ID NO: 1166005 - RNA, 19 nt, Human
cagcgcagcagcucuccuc

SEQ ID NO: 1166006 - RNA, 25 nt, Human
cagcucagaacagacccaggccccc

SEQ ID NO: 1166007 - RNA, 20 nt, Human
cagcucccagccuagcacca

SEQ ID NO: 1166008 - RNA, 20 nt, Human
cagcuuaucugccucuccuu

SEQ ID NO: 1166009 - RNA, 21 nt, Human
caggcagcuuaucugccucuc

SEQ ID NO: 1166010 - RNA, 18 nt, Human
caggcuggggaaggaccc

SEQ ID NO: 1166011 - RNA, 18 nt, Human
cagggucacuggacuuca

SEQ ID NO: 1166012 - RNA, 24 nt, Human
cagguuccuggcauugaccccaca

SEQ ID NO: 1166013 - RNA, 19 nt, Human
cagucggcccucuccucuu

SEQ ID NO: 1166014 - RNA, 24 nt, Human
cagugccccaaggcccugcgggaa

SEQ ID NO: 1166015 - RNA, 21 nt, Human
caguuggagggggccagggag

SEQ ID NO: 1166016 - RNA, 23 nt, Human
cauagaaaacccucuccucccuc

SEQ ID NO: 1166017 - RNA, 24 nt, Human
cauagaaaacccucuccucccuca

SEQ ID NO: 1166018 - RNA, 22 nt, Human
caucccagcagagaacuggaga

SEQ ID NO: 1166019 - RNA, 25 nt, Human
caucccgcagcccaguccccucacu

SEQ ID NO: 1166020 - RNA, 21 nt, Human
caucucaccaccucuguucac

SEQ ID NO: 1166021 - RNA, 21 nt, Human
cauucuccuccagggccggaa

SEQ ID NO: 1166022 - RNA, 19 nt, Human
ccaagcagcaggaugcucc

SEQ ID NO: 1166023 - RNA, 18 nt, Human
ccacagcugucaagccag

SEQ ID NO: 1166024 - RNA, 22 nt, Human
ccaccugaacaauuucaguuau

SEQ ID NO: 1166025 - RNA, 21 nt, Human
ccacggcacuggggagggccc

SEQ ID NO: 1166026 - RNA, 19 nt, Human
ccagaacgggagggugaga

SEQ ID NO: 1166027 - RNA, 22 nt, Human
ccagagaucccacugucuacaa

SEQ ID NO: 1166028 - RNA, 19 nt, Human
ccagcccaccucuccugcc

SEQ ID NO: 1166029 - RNA, 20 nt, Human
ccagccccaagaugcuagag

SEQ ID NO: 1166030 - RNA, 25 nt, Human
ccagcuggcuccaugacgucggcca

SEQ ID NO: 1166031 - RNA, 21 nt, Human
ccaggcuugcagaagggucca

SEQ ID NO: 1166032 - RNA, 19 nt, Human
ccagggccggaaacaguaa

SEQ ID NO: 1166033 - RNA, 19 nt, Human
ccagucccuuagggaagcu

SEQ ID NO: 1166034 - RNA, 21 nt, Human
ccagucuccaggcuugcagaa

SEQ ID NO: 1166035 - RNA, 21 nt, Human
ccagugugccccccacccucu

SEQ ID NO: 1166036 - RNA, 22 nt, Human
cccacaggcuggggaaggaccc

SEQ ID NO: 1166037 - RNA, 21 nt, Human
cccagcacccaggguauaaac

SEQ ID NO: 1166038 - RNA, 24 nt, Human
cccagccccaccagaccuccacag

SEQ ID NO: 1166039 - RNA, 18 nt, Human
cccagcuggcuccaugac

SEQ ID NO: 1166040 - RNA, 19 nt, Human
cccaggcuugcaggcccca

SEQ ID NO: 1166041 - RNA, 19 nt, Human
cccagggggaagaaagggg

SEQ ID NO: 1166042 - RNA, 24 nt, Human
cccauagccagaggcagagagaag

SEQ ID NO: 1166043 - RNA, 21 nt, Human
ccccaagaugcuagagucuuc

SEQ ID NO: 1166044 - RNA, 20 nt, Human
ccccagaacgggagggugag

SEQ ID NO: 1166045 - RNA, 24 nt, Human
ccccagccucagucacuucacauu

SEQ ID NO: 1166046 - RNA, 26 nt, Human
ccccaggccacugaggacacagccuc

SEQ ID NO: 1166047 - RNA, 19 nt, Human
ccccauaccugcaaguccc

SEQ ID NO: 1166048 - RNA, 23 nt, Human
cccccacccucuccagucggccc

SEQ ID NO: 1166049 - RNA, 23 nt, Human
cccccagccccaccagaccucca

SEQ ID NO: 1166050 - RNA, 25 nt, Human
cccccucuccccacucuccccaccc

SEQ ID NO: 1166051 - RNA, 19 nt, Human
ccccuacaagggaaggaaa

SEQ ID NO: 1166052 - RNA, 22 nt, Human
ccccuacagccuggaggacagg

SEQ ID NO: 1166053 - RNA, 21 nt, Human
ccccucuccccacucucccca

SEQ ID NO: 1166054 - RNA, 24 nt, Human
ccccugagacuggggcuuaccacc

SEQ ID NO: 1166055 - RNA, 26 nt, Human
ccccugagacuggggcuuagguaccc

SEQ ID NO: 1166056 - RNA, 20 nt, Human
ccccuggcuccauggcgugg

SEQ ID NO: 1166057 - RNA, 25 nt, Human
cccuaggccagcccaccucuccugc

SEQ ID NO: 1166058 - RNA, 20 nt, Human
cccugcucccagcuggcucc

SEQ ID NO: 1166059 - RNA, 22 nt, Human
ccgccugggugcucccccagcc

SEQ ID NO: 1166060 - RNA, 23 nt, Human
ccuaccaggaagcggccucccca

SEQ ID NO: 1166061 - RNA, 23 nt, Human
ccuagcccagcccuggcuguuuc

SEQ ID NO: 1166062 - RNA, 19 nt, Human
ccuaggacugacuccgggg

SEQ ID NO: 1166063 - RNA, 24 nt, Human
ccucacaucaacuagagcagaggc

SEQ ID NO: 1166064 - RNA, 21 nt, Human
ccuccaggccuagaggguaga

SEQ ID NO: 1166065 - RNA, 19 nt, Human
ccucccauccagccuagga

SEQ ID NO: 1166066 - RNA, 21 nt, Human
ccuccuuugaugugugaaaau

SEQ ID NO: 1166067 - RNA, 19 nt, Human
ccucggaaugagaaggcuc

SEQ ID NO: 1166068 - RNA, 22 nt, Human
ccucggguucaacgcucagccc

SEQ ID NO: 1166069 - RNA, 24 nt, Human
ccucggguucaacgcucagcccug

SEQ ID NO: 1166070 - RNA, 21 nt, Human
ccucuugcuaauaauaaaagc

SEQ ID NO: 1166071 - RNA, 18 nt, Human
ccugcacccacccugggg

SEQ ID NO: 1166072 - RNA, 20 nt, Human
ccugggugcucccccagccc

SEQ ID NO: 1166073 - RNA, 20 nt, Human
ccuuagcugggcccagaagc

SEQ ID NO: 1166074 - RNA, 22 nt, Human
ccuugaaaguacaggggauaga

SEQ ID NO: 1166075 - RNA, 19 nt, Human
cggaaugagaaggcucaaa

SEQ ID NO: 1166076 - RNA, 22 nt, Human
cuagaugcuggggagugggcau

SEQ ID NO: 1166077 - RNA, 19 nt, Human
cuaggccagcccaccucuc

SEQ ID NO: 1166078 - RNA, 20 nt, Human
cucaccuuuaacacaaccca

SEQ ID NO: 1166079 - RNA, 23 nt, Human
cucagucuuuuaccacaggaaac

SEQ ID NO: 1166080 - RNA, 19 nt, Human
cucccagccuagcaccaug

SEQ ID NO: 1166081 - RNA, 22 nt, Human
cuccccacucuccccacccccc

SEQ ID NO: 1166082 - RNA, 22 nt, Human
cucccccagccccaccagaccu

SEQ ID NO: 1166083 - RNA, 27 nt, Human
cucccugccaccucaucucuagcucua

SEQ ID NO: 1166084 - RNA, 21 nt, Human
cuccugcccuaggccagccca

SEQ ID NO: 1166085 - RNA, 18 nt, Human
cucgggaggggguguccu

SEQ ID NO: 1166086 - RNA, 22 nt, Human
cucuccuccccuacagccugga

SEQ ID NO: 1166087 - RNA, 24 nt, Human
cucugugcugggaccaccaaccuc

SEQ ID NO: 1166088 - RNA, 19 nt, Human
cucuucucgggagggggug

SEQ ID NO: 1166089 - RNA, 26 nt, Human
cuggauagcacccccucuccccacuc

SEQ ID NO: 1166090 - RNA, 21 nt, Human
cuggcccacucaucuguggcu

SEQ ID NO: 1166091 - RNA, 18 nt, Human
cugggcccagaagcacug

SEQ ID NO: 1166092 - RNA, 20 nt, Human
cugucuacaagggccuggag

SEQ ID NO: 1166093 - RNA, 19 nt, Human
gaaacaguaagagcaggag

SEQ ID NO: 1166094 - RNA, 20 nt, Human
gaagaaacugagggccuggg

SEQ ID NO: 1166095 - RNA, 20 nt, Human
gaagaucucugcugucacag

SEQ ID NO: 1166096 - RNA, 24 nt, Human
gaauauauauauauacacauuaua

SEQ ID NO: 1166097 - RNA, 22 nt, Human
gaccccuggccugccucagucu

SEQ ID NO: 1166098 - RNA, 18 nt, Human
gaccuguuucauacccgu

SEQ ID NO: 1166099 - RNA, 24 nt, Human
gagaaaaagaauguggcaaaaugu

SEQ ID NO: 1166100 - RNA, 21 nt, Human
gagcaggagggaugaacuucu

SEQ ID NO: 1166101 - RNA, 20 nt, Human
gaggaagauggucaggcagc

SEQ ID NO: 1166102 - RNA, 24 nt, Human
gaggacacagccucccucccugcc

SEQ ID NO: 1166103 - RNA, 19 nt, Human
gaggauggaguggauacug

SEQ ID NO: 1166104 - RNA, 21 nt, Human
gaggcugggagggugugggga

SEQ ID NO: 1166105 - RNA, 21 nt, Human
gaggcugggaguccucuugag

SEQ ID NO: 1166106 - RNA, 21 nt, Human
gagggggccacccucccaucc

SEQ ID NO: 1166107 - RNA, 19 nt, Human
gauuuccaaccgccugcuc

SEQ ID NO: 1166108 - RNA, 19 nt, Human
gcagacccagcggugggug

SEQ ID NO: 1166109 - RNA, 18 nt, Human
gcagcagcucuccucugc

SEQ ID NO: 1166110 - RNA, 23 nt, Human
gcagcagugaccuaggcagacag

SEQ ID NO: 1166111 - RNA, 23 nt, Human
gcagugccccaaggcccugcggg

SEQ ID NO: 1166112 - RNA, 22 nt, Human
gccaagcaggccaccuccccuu

SEQ ID NO: 1166113 - RNA, 18 nt, Human
gccacccucccauccagc

SEQ ID NO: 1166114 - RNA, 19 nt, Human
gccacccuguccucagacc

SEQ ID NO: 1166115 - RNA, 22 nt, Human
gccagucccuuagggaagcuga

SEQ ID NO: 1166116 - RNA, 21 nt, Human
gcccagaagcacugacugcuc

SEQ ID NO: 1166117 - RNA, 20 nt, Human
gccccaaggcccugcgggaa

SEQ ID NO: 1166118 - RNA, 21 nt, Human
gcccccucauccucacaucaa

SEQ ID NO: 1166119 - RNA, 24 nt, Human
gccugggaggaagauggucaggcc

SEQ ID NO: 1166120 - RNA, 22 nt, Human
gccugggugcucccccagcccc

SEQ ID NO: 1166121 - RNA, 19 nt, Human
ggaaccuggcacagaguag

SEQ ID NO: 1166122 - RNA, 18 nt, Human
ggacagaaaagagucucg

SEQ ID NO: 1166123 - RNA, 25 nt, Human
ggccaggcucuccuccccuacagcc

SEQ ID NO: 1166124 - RNA, 18 nt, Human
ggccuagggccucaaaaa

SEQ ID NO: 1166125 - RNA, 24 nt, Human
ggccuagggccucaaaaacaaugu

SEQ ID NO: 1166126 - RNA, 23 nt, Human
ggccugaggcugggagggugugg

SEQ ID NO: 1166127 - RNA, 21 nt, Human
ggccugggaggaagaugguca

SEQ ID NO: 1166128 - RNA, 21 nt, Human
ggcggaacacagugagggaca

SEQ ID NO: 1166129 - RNA, 26 nt, Human
ggcuucaaaaagacagcaggccuagg

SEQ ID NO: 1166130 - RNA, 18 nt, Human
gggaagaaaggggugcag

SEQ ID NO: 1166131 - RNA, 20 nt, Human
ggggcccggagaacugggcc

SEQ ID NO: 1166132 - RNA, 23 nt, Human
ggguagccccagagcagccacgg

SEQ ID NO: 1166133 - RNA, 23 nt, Human
gguggggcccggagaacugggcc

SEQ ID NO: 1166134 - RNA, 22 nt, Human
uaaaaacauaguuagaaaaugc

SEQ ID NO: 1166135 - RNA, 21 nt, Human
uaaaacgcauccaguuucccc

SEQ ID NO: 1166136 - RNA, 18 nt, Human
uaagagcaggagggauga

SEQ ID NO: 1166137 - RNA, 18 nt, Human
uaagccccuggcuccaug

SEQ ID NO: 1166138 - RNA, 23 nt, Human
uacauuaauggaggaaggucuca

SEQ ID NO: 1166139 - RNA, 24 nt, Human
uaccacaggaaacaccacacauca

SEQ ID NO: 1166140 - RNA, 22 nt, Human
uaccaccauuuuguaggacuga

SEQ ID NO: 1166141 - RNA, 19 nt, Human
uaccccccauaccugcaag

SEQ ID NO: 1166142 - RNA, 18 nt, Human
uagaaaacccucuccucc

SEQ ID NO: 1166143 - RNA, 20 nt, Human
uagaaaaugcaaugugugca

SEQ ID NO: 1166144 - RNA, 21 nt, Human
uagaaaaugcaaugugugcac

SEQ ID NO: 1166145 - RNA, 22 nt, Human
uagaagaagugguuaugcgaca

SEQ ID NO: 1166146 - RNA, 18 nt, Human
uaggaaccagauguggag

SEQ ID NO: 1166147 - RNA, 22 nt, Human
uaggacaaugcccuaacucuua

SEQ ID NO: 1166148 - RNA, 23 nt, Human
uagggucccaaggaugggcucag

SEQ ID NO: 1166149 - RNA, 23 nt, Human
uagugggucuucaagaaaggucu

SEQ ID NO: 1166150 - RNA, 24 nt, Human
uagugggucuucaagaaaggucug

SEQ ID NO: 1166151 - RNA, 21 nt, Human
uauacacauuauauauauaua

SEQ ID NO: 1166152 - RNA, 28 nt, Human
uauauacacauuauauauauauauauau

SEQ ID NO: 1166153 - RNA, 21 nt, Human
uauauauacacauuauauaua

SEQ ID NO: 1166154 - RNA, 23 nt, Human
uauauauacacauuauauauaua

SEQ ID NO: 1166155 - RNA, 23 nt, Human
uauauauacacauuauauauaua

SEQ ID NO: 1166156 - RNA, 25 nt, Human
uauauauauauaacacagugcgacc

SEQ ID NO: 1166157 - RNA, 18 nt, Human
uauauauauauauauaua

SEQ ID NO: 1166158 - RNA, 23 nt, Human
uauauauauauauauauaacaca

SEQ ID NO: 1166159 - RNA, 19 nt, Human
uauauauauauauauauau

SEQ ID NO: 1166160 - RNA, 19 nt, Human
uauauauauauauauauau

SEQ ID NO: 1166161 - RNA, 19 nt, Human
uauauauauauauauauau

SEQ ID NO: 1166162 - RNA, 19 nt, Human
ucaaaggcacccuggcugg

SEQ ID NO: 1166163 - RNA, 18 nt, Human
ucaagucagcacaaaagg

SEQ ID NO: 1166164 - RNA, 21 nt, Human
ucagaacagacccaggccccc

SEQ ID NO: 1166165 - RNA, 25 nt, Human
ucagaacagacccaggcccccacag

SEQ ID NO: 1166166 - RNA, 23 nt, Human
uccaccacagaaggcucuggaac

SEQ ID NO: 1166167 - RNA, 20 nt, Human
uccagaaaguauuuccuggg

SEQ ID NO: 1166168 - RNA, 22 nt, Human
uccagggccggaaacaguaaga

SEQ ID NO: 1166169 - RNA, 21 nt, Human
ucccacuaacaagcccauggg

SEQ ID NO: 1166170 - RNA, 21 nt, Human
ucccacugaguguccaacuuu

SEQ ID NO: 1166171 - RNA, 19 nt, Human
uccccacucuccccacccc

SEQ ID NO: 1166172 - RNA, 21 nt, Human
uccccagugugccccccaccc

SEQ ID NO: 1166173 - RNA, 22 nt, Human
uccccagugugccccccacccu

SEQ ID NO: 1166174 - RNA, 26 nt, Human
uccccuacagccuggaggacagggac

SEQ ID NO: 1166175 - RNA, 23 nt, Human
ucccgcagcccaguccccucacu

SEQ ID NO: 1166176 - RNA, 20 nt, Human
ucccucauucuccuccaggg

SEQ ID NO: 1166177 - RNA, 21 nt, Human
ucccugcgcaucucaccaccu

SEQ ID NO: 1166178 - RNA, 20 nt, Human
uccuaaggucugcucagccc

SEQ ID NO: 1166179 - RNA, 19 nt, Human
uccuggagagagcuggucu

SEQ ID NO: 1166180 - RNA, 21 nt, Human
ucucagggcagcucccagccu

SEQ ID NO: 1166181 - RNA, 19 nt, Human
ucuccuagcccagcccugg

SEQ ID NO: 1166182 - RNA, 23 nt, Human
ucuccuagcccagcccuggcugu

SEQ ID NO: 1166183 - RNA, 18 nt, Human
ucuccuccagggccggaa

SEQ ID NO: 1166184 - RNA, 21 nt, Human
ucucugagagcccucggccac

SEQ ID NO: 1166185 - RNA, 18 nt, Human
ucugccucuccuucuacc

SEQ ID NO: 1166186 - RNA, 18 nt, Human
ucugugggccuugguggg

SEQ ID NO: 1166187 - RNA, 22 nt, Human
ugaagaaacugagggccuggga

SEQ ID NO: 1166188 - RNA, 24 nt, Human
ugaagaaacugagggccugggagg

SEQ ID NO: 1166189 - RNA, 20 nt, Human
ugaccccacaaaacccuaug

SEQ ID NO: 1166190 - RNA, 23 nt, Human
ugaccccacaaaacccuaugcca

SEQ ID NO: 1166191 - RNA, 21 nt, Human
ugaccccagcucuccuagccc

SEQ ID NO: 1166192 - RNA, 23 nt, Human
ugacggaugggacucuggaaguc

SEQ ID NO: 1166193 - RNA, 19 nt, Human
ugagaggcaugauggggac

SEQ ID NO: 1166194 - RNA, 27 nt, Human
ugagcaaacaaucugacaaauucagaa

SEQ ID NO: 1166195 - RNA, 18 nt, Human
ugagcacacaagcagaca

SEQ ID NO: 1166196 - RNA, 21 nt, Human
ugaggcugggagggugugggg

SEQ ID NO: 1166197 - RNA, 22 nt, Human
ugccagucccuuagggaagcug

SEQ ID NO: 1166198 - RNA, 22 nt, Human
ugccucaacggccugggcagca

SEQ ID NO: 1166199 - RNA, 23 nt, Human
ugccucaacggccugggcagcag

SEQ ID NO: 1166200 - RNA, 24 nt, Human
ugcgggaagccuugaggauggagu

SEQ ID NO: 1166201 - RNA, 21 nt, Human
ugcuaauaauaaaagcuaaca

SEQ ID NO: 1166202 - RNA, 25 nt, Human
ugcugggaccaccaaccucugcaac

SEQ ID NO: 1166203 - RNA, 24 nt, Human
ugcuugcagauccgccugggugcu

SEQ ID NO: 1166204 - RNA, 20 nt, Human
uggaagagccuggcucgaaa

SEQ ID NO: 1166205 - RNA, 19 nt, Human
uggacucccuccuaccagg

SEQ ID NO: 1166206 - RNA, 22 nt, Human
uggagaaaagggaaucagcuca

SEQ ID NO: 1166207 - RNA, 24 nt, Human
uggagccaccugaacaauuucagu

SEQ ID NO: 1166208 - RNA, 20 nt, Human
uggagggggccagggagagg

SEQ ID NO: 1166209 - RNA, 24 nt, Human
uggcaagggcagccagcccacagc

SEQ ID NO: 1166210 - RNA, 20 nt, Human
uggcaccaagaaaaaaaaaa

SEQ ID NO: 1166211 - RNA, 21 nt, Human
uggcaccaagaaaaaaaaaaa

SEQ ID NO: 1166212 - RNA, 23 nt, Human
uggcagcagugaccuaggcagac

SEQ ID NO: 1166213 - RNA, 19 nt, Human
uggcauugaccccacaaaa

SEQ ID NO: 1166214 - RNA, 20 nt, Human
uggcauugaccccacaaaac

SEQ ID NO: 1166215 - RNA, 18 nt, Human
uggccugccucagucuuu

SEQ ID NO: 1166216 - RNA, 19 nt, Human
ugggaacagauggcuuccu

SEQ ID NO: 1166217 - RNA, 21 nt, Human
ugggaaggagugguuuguccc

SEQ ID NO: 1166218 - RNA, 20 nt, Human
ugggaccaccaaccucugca

SEQ ID NO: 1166219 - RNA, 23 nt, Human
ugggaccaccaaccucugcaggu

SEQ ID NO: 1166220 - RNA, 20 nt, Human
ugggaggguguggggaccgu

SEQ ID NO: 1166221 - RNA, 20 nt, Human
ugggcagcagggggucuagg

SEQ ID NO: 1166222 - RNA, 18 nt, Human
ugggguucagagggaagc

SEQ ID NO: 1166223 - RNA, 19 nt, Human
ugggucuucaagaaagguc

SEQ ID NO: 1166224 - RNA, 18 nt, Human
ugucacaggauuuccaac

SEQ ID NO: 1166225 - RNA, 21 nt, Human
uguccagucugucucccccgg

SEQ ID NO: 1166226 - RNA, 27 nt, Human
ugugaagguaggaaccagauguggagg

SEQ ID NO: 1166227 - RNA, 20 nt, Human
ugugccccccacccucucca

SEQ ID NO: 1166228 - RNA, 21 nt, Human
ugugugaaaaucccugcugug

SEQ ID NO: 1166229 - RNA, 21 nt, Human
uguucaccugggguagcccca

SEQ ID NO: 1166230 - RNA, 22 nt, Human
uguuugcaauguacuuuuaaau

SEQ ID NO: 1166231 - RNA, 22 nt, Human
uuaaaaacgaacccaaccaaaa

SEQ ID NO: 1166232 - RNA, 24 nt, Human
uucacauuguuaaauggggugggg

SEQ ID NO: 1166233 - RNA, 23 nt, Human
uucagaauguggggcuucaaaaa

SEQ ID NO: 1166234 - RNA, 30 nt, Human
uucaugagcacacaagcagacaugccaccu

SEQ ID NO: 1166235 - RNA, 24 nt, Human
uucaugcacaaauuacaaaaggag

SEQ ID NO: 1166236 - RNA, 22 nt, Human
uucccaggcuugcaggccccau

SEQ ID NO: 1166237 - RNA, 19 nt, Human
uucucuucucgggaggggg

SEQ ID NO: 1166238 - RNA, 19 nt, Human
uucugaacaagacaagccu

SEQ ID NO: 1166239 - RNA, 25 nt, Human
uugaccccacaaaacccuaugccag

SEQ ID NO: 1166240 - RNA, 20 nt, Human
uugccucaacggccugggca

SEQ ID NO: 1166241 - RNA, 21 nt, Human
uuggcugugauacugggccaa

SEQ ID NO: 1166242 - RNA, 23 nt, Human
uuugaccccagcucuccuagccg

SEQ ID NO: 1166243 - RNA, 18 nt, Human
uuuggcaguuggaggggg

SEQ ID NO: 1166244 - RNA, 20 nt, Human
uuuuuuuggccaaaugcuua

SEQ ID NO: 1166245 - RNA, 24 nt, Human
aaaaaugagccuuuuguacuaaau

SEQ ID NO: 1166246 - RNA, 20 nt, Human
aaacacaucucaaaucccac

SEQ ID NO: 1166247 - RNA, 24 nt, Human
aaagaaaaacacaucucaaauccc

SEQ ID NO: 1166248 - RNA, 21 nt, Human
aaaguucuucaggaucuacuc

SEQ ID NO: 1166249 - RNA, 24 nt, Human
aaauacaaccaaaaagaaaaacac

SEQ ID NO: 1166250 - RNA, 32 nt, Human
aacaauagagaaaaauacaaccaaaaagaaag

SEQ ID NO: 1166251 - RNA, 21 nt, Human
aacacaucucaaaucccacca

SEQ ID NO: 1166252 - RNA, 22 nt, Human
aaccaaaaagaaaaacacaucu

SEQ ID NO: 1166253 - RNA, 25 nt, Human
aaccaaaaagaaaaacacaucucaa

SEQ ID NO: 1166254 - RNA, 19 nt, Human
aacccagagaacacaccca

SEQ ID NO: 1166255 - RNA, 18 nt, Human
aagcaccccuuuccaucu

SEQ ID NO: 1166256 - RNA, 21 nt, Human
aagucccuucuagaucccucc

SEQ ID NO: 1166257 - RNA, 25 nt, Human
aaucaaaugaguguuucucacagga

SEQ ID NO: 1166258 - RNA, 18 nt, Human
aauuucugccuacuccuc

SEQ ID NO: 1166259 - RNA, 21 nt, Human
acaaagaaagcccugagcaca

SEQ ID NO: 1166260 - RNA, 26 nt, Human
acacaacccauggaauucaguucuca

SEQ ID NO: 1166261 - RNA, 24 nt, Human
agacaaaucacaucccuuauuccc

SEQ ID NO: 1166262 - RNA, 21 nt, Human
agaggagcugaaacccagagc

SEQ ID NO: 1166263 - RNA, 18 nt, Human
agcaugcuguggagucuu

SEQ ID NO: 1166264 - RNA, 21 nt, Human
agcgagggaggaagaggcugg

SEQ ID NO: 1166265 - RNA, 23 nt, Human
aggaacucacacuccuuauaccu

SEQ ID NO: 1166266 - RNA, 19 nt, Human
aggaagaggcugggccgga

SEQ ID NO: 1166267 - RNA, 21 nt, Human
aggaaggcagcuaaggccuau

SEQ ID NO: 1166268 - RNA, 19 nt, Human
agggcggaagugggcagag

SEQ ID NO: 1166269 - RNA, 25 nt, Human
aguauauauucuggauuuucuccau

SEQ ID NO: 1166270 - RNA, 21 nt, Human
auagugggcacucaguaaacc

SEQ ID NO: 1166271 - RNA, 23 nt, Human
auuuugcaacaugcuuuuuccac

SEQ ID NO: 1166272 - RNA, 27 nt, Human
caaaagacaaaucacaucccuuauucc

SEQ ID NO: 1166273 - RNA, 21 nt, Human
caaaucccaccacgucagaga

SEQ ID NO: 1166274 - RNA, 24 nt, Human
caaccaaaaagaaaaacacaucuc

SEQ ID NO: 1166275 - RNA, 23 nt, Human
caagauaccaagagacaaugaug

SEQ ID NO: 1166276 - RNA, 22 nt, Human
caauaaauguaaacgaguagca

SEQ ID NO: 1166277 - RNA, 20 nt, Human
cacacccugcacgcuaaccc

SEQ ID NO: 1166278 - RNA, 20 nt, Human
cacacguauuccuacauaca

SEQ ID NO: 1166279 - RNA, 21 nt, Human
cacagcgagggaggaagaggc

SEQ ID NO: 1166280 - RNA, 21 nt, Human
caccaaguuauuuugcaacau

SEQ ID NO: 1166281 - RNA, 25 nt, Human
cagagaacacacccaugucccacac

SEQ ID NO: 1166282 - RNA, 19 nt, Human
cagagccugagacucugcc

SEQ ID NO: 1166283 - RNA, 19 nt, Human
cagcacagaggagcugaaa

SEQ ID NO: 1166284 - RNA, 18 nt, Human
cagccuggugcuuuggcc

SEQ ID NO: 1166285 - RNA, 23 nt, Human
caggaaaggaagagcggucaagc

SEQ ID NO: 1166286 - RNA, 22 nt, Human
caggaacucacacuccuuauac

SEQ ID NO: 1166287 - RNA, 23 nt, Human
cauaaaccaaguuuugguaaagc

SEQ ID NO: 1166288 - RNA, 22 nt, Human
cauagugggcacucaguaaacc

SEQ ID NO: 1166289 - RNA, 25 nt, Human
caucaugcgugcagggucuggaccc

SEQ ID NO: 1166290 - RNA, 21 nt, Human
caucucaaaucccaccacguc

SEQ ID NO: 1166291 - RNA, 23 nt, Human
caucuguagaacaugguuacgug

SEQ ID NO: 1166292 - RNA, 18 nt, Human
ccaaaaagaaaaacacau

SEQ ID NO: 1166293 - RNA, 20 nt, Human
ccaucaaaucuaaagccuaa

SEQ ID NO: 1166294 - RNA, 21 nt, Human
ccauccaggaaaggaagagcg

SEQ ID NO: 1166295 - RNA, 18 nt, Human
cccaaaagacaaaucaca

SEQ ID NO: 1166296 - RNA, 25 nt, Human
cccagagaacacacccaugucccac

SEQ ID NO: 1166297 - RNA, 20 nt, Human
cccccgggucggggacccuc

SEQ ID NO: 1166298 - RNA, 23 nt, Human
ccccugaaauaaaaaugagccuu

SEQ ID NO: 1166299 - RNA, 22 nt, Human
cccugcuggugccauccaggaa

SEQ ID NO: 1166300 - RNA, 20 nt, Human
cccuuuggcaugccuuccgg

SEQ ID NO: 1166301 - RNA, 24 nt, Human
ccucuugcagcacgugucaggagc

SEQ ID NO: 1166302 - RNA, 23 nt, Human
ccugagacucugccuucugucuc

SEQ ID NO: 1166303 - RNA, 21 nt, Human
ccuggcagugucagcuucucu

SEQ ID NO: 1166304 - RNA, 23 nt, Human
ccuucauaauaaccaagcacccc

SEQ ID NO: 1166305 - RNA, 23 nt, Human
cgucagagauaaccauuguuagc

SEQ ID NO: 1166306 - RNA, 19 nt, Human
cuaaagccuaauaaagucc

SEQ ID NO: 1166307 - RNA, 21 nt, Human
cucacacuccuuauaccuuca

SEQ ID NO: 1166308 - RNA, 18 nt, Human
cuccagguccucaagccc

SEQ ID NO: 1166309 - RNA, 22 nt, Human
cuccccugcagccucccccgaa

SEQ ID NO: 1166310 - RNA, 20 nt, Human
cuccuugcaguccaggccug

SEQ ID NO: 1166311 - RNA, 23 nt, Human
cuggagagacucuuauuugcugg

SEQ ID NO: 1166312 - RNA, 18 nt, Human
cuucauaauaaccaagca

SEQ ID NO: 1166313 - RNA, 20 nt, Human
cuucauaauaaccaagcacc

SEQ ID NO: 1166314 - RNA, 21 nt, Human
gaacaugguuacguguuuuuc

SEQ ID NO: 1166315 - RNA, 21 nt, Human
gaauucaguucucaaagcuga

SEQ ID NO: 1166316 - RNA, 23 nt, Human
gagaaagagcaucuuucuggaga

SEQ ID NO: 1166317 - RNA, 19 nt, Human
gagcaugcuguggagucuu

SEQ ID NO: 1166318 - RNA, 19 nt, Human
gagggaggaagaggcuggg

SEQ ID NO: 1166319 - RNA, 21 nt, Human
gagguccuugaucugaucagu

SEQ ID NO: 1166320 - RNA, 22 nt, Human
gcaaauacaaccucaaaaaucu

SEQ ID NO: 1166321 - RNA, 23 nt, Human
gcacagaggagcugaaacccaga

SEQ ID NO: 1166322 - RNA, 19 nt, Human
gccggaauggaagguucca

SEQ ID NO: 1166323 - RNA, 21 nt, Human
gccuaauaaaguccauauagc

SEQ ID NO: 1166324 - RNA, 21 nt, Human
gccuccaccuuccccaucaug

SEQ ID NO: 1166325 - RNA, 24 nt, Human
gcggagcugagggggaagccucca

SEQ ID NO: 1166326 - RNA, 20 nt, Human
ggaagguuccagccuggcag

SEQ ID NO: 1166327 - RNA, 25 nt, Human
gggcagagugugagaaggguggggg

SEQ ID NO: 1166328 - RNA, 18 nt, Human
guaaagcaaauacaaccu

SEQ ID NO: 1166329 - RNA, 26 nt, Human
guaaagcaaauacaaccucaaaaauc

SEQ ID NO: 1166330 - RNA, 24 nt, Human
gucagcuucucuccgcggagcuga

SEQ ID NO: 1166331 - RNA, 20 nt, Human
gucccuucuagaucccuccu

SEQ ID NO: 1166332 - RNA, 19 nt, Human
guggagucuuucaccugcc

SEQ ID NO: 1166333 - RNA, 21 nt, Human
uaaccaaacauguucuguguu

SEQ ID NO: 1166334 - RNA, 20 nt, Human
uaauguguguguguaucugu

SEQ ID NO: 1166335 - RNA, 21 nt, Human
uaauguguguguguaucugug

SEQ ID NO: 1166336 - RNA, 21 nt, Human
uacaaccaaaaagaaaaacac

SEQ ID NO: 1166337 - RNA, 21 nt, Human
uacauaaaccaaguuuuggua

SEQ ID NO: 1166338 - RNA, 25 nt, Human
uacuaaaucggaguucugagccaaa

SEQ ID NO: 1166339 - RNA, 19 nt, Human
uagcuacuuggaacccugc

SEQ ID NO: 1166340 - RNA, 20 nt, Human
uauacagugaauuucugccu

SEQ ID NO: 1166341 - RNA, 21 nt, Human
uauagcacucaugaggccucu

SEQ ID NO: 1166342 - RNA, 18 nt, Human
ucaaaucccaccacguca

SEQ ID NO: 1166343 - RNA, 18 nt, Human
ucaccaagguucugguuc

SEQ ID NO: 1166344 - RNA, 21 nt, Human
ucagagauaaccauuguuagc

SEQ ID NO: 1166345 - RNA, 22 nt, Human
uccaaucggcccugcuggugcc

SEQ ID NO: 1166346 - RNA, 24 nt, Human
uccacagcacagaggagcugaaac

SEQ ID NO: 1166347 - RNA, 20 nt, Human
ucccagccagcgagcuccua

SEQ ID NO: 1166348 - RNA, 19 nt, Human
ucuaaagccuaauaaaguc

SEQ ID NO: 1166349 - RNA, 21 nt, Human
ucuccagguccucaagcccac

SEQ ID NO: 1166350 - RNA, 21 nt, Human
ucuccagucuuccaagcucuu

SEQ ID NO: 1166351 - RNA, 18 nt, Human
ugaagaacugaauuucag

SEQ ID NO: 1166352 - RNA, 21 nt, Human
ugaauuucagaggucugacac

SEQ ID NO: 1166353 - RNA, 20 nt, Human
ugacacaacccauggaauuc

SEQ ID NO: 1166354 - RNA, 21 nt, Human
ugagaagggugggggaggucc

SEQ ID NO: 1166355 - RNA, 21 nt, Human
ugagaucaugcauacaaagaa

SEQ ID NO: 1166356 - RNA, 21 nt, Human
ugagauuucaccaagguucug

SEQ ID NO: 1166357 - RNA, 22 nt, Human
ugaggauacacaucggcuuuuc

SEQ ID NO: 1166358 - RNA, 22 nt, Human
ugaucugaucaguacaacccag

SEQ ID NO: 1166359 - RNA, 20 nt, Human
ugauuucucccaagagucuc

SEQ ID NO: 1166360 - RNA, 23 nt, Human
ugcaaagaccccuccuugcaguc

SEQ ID NO: 1166361 - RNA, 25 nt, Human
ugcaaagaccccuccuugcaguccu

SEQ ID NO: 1166362 - RNA, 18 nt, Human
ugcagggucuggaccccc

SEQ ID NO: 1166363 - RNA, 18 nt, Human
ugcgccugcuccccugca

SEQ ID NO: 1166364 - RNA, 21 nt, Human
ugcgugcagggucuggacccc

SEQ ID NO: 1166365 - RNA, 18 nt, Human
ugcuccccugcagccucc

SEQ ID NO: 1166366 - RNA, 23 nt, Human
uggaauucaguucucaaagcuga

SEQ ID NO: 1166367 - RNA, 23 nt, Human
uggacccccgggucggggacccu

SEQ ID NO: 1166368 - RNA, 19 nt, Human
uggagcuucuaguauauau

SEQ ID NO: 1166369 - RNA, 26 nt, Human
uggcaaugccaugugucucaagcuuc

SEQ ID NO: 1166370 - RNA, 22 nt, Human
uggcaugccuuccggcccaggg

SEQ ID NO: 1166371 - RNA, 23 nt, Human
ugggcacucaguaaaccucggug

SEQ ID NO: 1166372 - RNA, 19 nt, Human
ugggcagagugugagaagg

SEQ ID NO: 1166373 - RNA, 23 nt, Human
uggugagauucacugagaucaug

SEQ ID NO: 1166374 - RNA, 19 nt, Human
uuagcaaauugauguacaa

SEQ ID NO: 1166375 - RNA, 23 nt, Human
uugcugggguagaggaaggcagc

SEQ ID NO: 1166376 - RNA, 24 nt, Human
uuggagcuucuaguauauauucug

SEQ ID NO: 1166377 - RNA, 22 nt, Human
uugguaaagcaaauacaaccuc

SEQ ID NO: 1166378 - RNA, 23 nt, Human
aaccaauaaaguuugcaauaucc

SEQ ID NO: 1166379 - RNA, 21 nt, Human
aggagucuguagccaaggacg

SEQ ID NO: 1166380 - RNA, 23 nt, Human
cagcaugagcaagccuaaaaacu

SEQ ID NO: 1166381 - RNA, 21 nt, Human
cauucucacacucuaaaagaa

SEQ ID NO: 1166382 - RNA, 23 nt, Human
ccaauaaaguuugcaauauccaa

SEQ ID NO: 1166383 - RNA, 24 nt, Human
cucuucuuugauaaggccuggaug

SEQ ID NO: 1166384 - RNA, 20 nt, Human
cugaauaugggccugcucuu

SEQ ID NO: 1166385 - RNA, 20 nt, Human
cuuugauaaggccuggauga

SEQ ID NO: 1166386 - RNA, 19 nt, Human
gcuuauauuaagcuucagc

SEQ ID NO: 1166387 - RNA, 18 nt, Human
gugugugcgugugggugu

SEQ ID NO: 1166388 - RNA, 18 nt, Human
uaaaagaaauacuauucu

SEQ ID NO: 1166389 - RNA, 23 nt, Human
uaagcuucagcaugagcaagccu

SEQ ID NO: 1166390 - RNA, 22 nt, Human
uccaggagucuguagccaagga

SEQ ID NO: 1166391 - RNA, 20 nt, Human
ucuggaaaaguucuauuuca

SEQ ID NO: 1166392 - RNA, 22 nt, Human
ucuguagccaaggacguacagc

SEQ ID NO: 1166393 - RNA, 22 nt, Human
ucuuuuguuguuuauuuguaac

SEQ ID NO: 1166394 - RNA, 23 nt, Human
ugaauaugggccugcucuuguca

SEQ ID NO: 1166395 - RNA, 21 nt, Human
ugcgugugggugugugugugu

SEQ ID NO: 1166396 - RNA, 21 nt, Human
ugcgugugggugugugugugu

SEQ ID NO: 1166397 - RNA, 20 nt, Human
uggguaacaccccaaccaau

SEQ ID NO: 1166398 - RNA, 20 nt, Human
ugggugugugugugugugug

SEQ ID NO: 1166399 - RNA, 18 nt, Human
ugugauauuugguucuug

SEQ ID NO: 1166400 - RNA, 26 nt, Human
ugugauauuugguucuugucaguuug

SEQ ID NO: 1166401 - RNA, 21 nt, Human
ugugcgugugggugugugugu

SEQ ID NO: 1166402 - RNA, 20 nt, Human
ugugggugugugugugugug

SEQ ID NO: 1166403 - RNA, 21 nt, Human
ugugggugugugugugugugu

SEQ ID NO: 1166404 - RNA, 20 nt, Human
ugugugcgugugggugugug

SEQ ID NO: 1166405 - RNA, 22 nt, Human
ugugugcgugugggugugugug

SEQ ID NO: 1166406 - RNA, 18 nt, Human
uuccagaucauuugguga

SEQ ID NO: 1166407 - RNA, 22 nt, Human
uuggugauuuugugugugcgug

SEQ ID NO: 1166408 - RNA, 25 nt, Human
aaaaaaucaaauucugguuugcaga

SEQ ID NO: 1166409 - RNA, 21 nt, Human
aaaaaccagaauuccuaacag

SEQ ID NO: 1166410 - RNA, 21 nt, Human
aaaaaguaucaaaaaccagaa

SEQ ID NO: 1166411 - RNA, 21 nt, Human
aaaagagcaccuaaaaacuaa

SEQ ID NO: 1166412 - RNA, 24 nt, Human
aaaagcucaacuauuuaaaagcuu

SEQ ID NO: 1166413 - RNA, 24 nt, Human
aaaauaaaacaaucgcaauaaugu

SEQ ID NO: 1166414 - RNA, 21 nt, Human
aaaccccauaauuuuuccauc

SEQ ID NO: 1166415 - RNA, 23 nt, Human
aacuugcaagccuguguuuugcc

SEQ ID NO: 1166416 - RNA, 24 nt, Human
aagcacaagauuugagaauaaaac

SEQ ID NO: 1166417 - RNA, 18 nt, Human
aagcgaacuagaggaaca

SEQ ID NO: 1166418 - RNA, 23 nt, Human
aaucaaauucugguuugcagaca

SEQ ID NO: 1166419 - RNA, 23 nt, Human
acaaaguaaaagaaaagaacaaa

SEQ ID NO: 1166420 - RNA, 18 nt, Human
acaagcuauauauauagc

SEQ ID NO: 1166421 - RNA, 24 nt, Human
acaauuuaaaccgacuguuuaaaa

SEQ ID NO: 1166422 - RNA, 19 nt, Human
acagaguccccugguuaaa

SEQ ID NO: 1166423 - RNA, 26 nt, Human
acugaaacucaaagauauggaaucua

SEQ ID NO: 1166424 - RNA, 21 nt, Human
acuugcaagccuguguuuugc

SEQ ID NO: 1166425 - RNA, 22 nt, Human
agaaacuauagaagaauaaguc

SEQ ID NO: 1166426 - RNA, 26 nt, Human
agacaggaaaaaaguaucaaaaacca

SEQ ID NO: 1166427 - RNA, 26 nt, Human
agacaggauggaaaaaucuguggggg

SEQ ID NO: 1166428 - RNA, 22 nt, Human
agaggaagcagauuauuacugg

SEQ ID NO: 1166429 - RNA, 25 nt, Human
agaguuuccccaaaauacaaggcac

SEQ ID NO: 1166430 - RNA, 22 nt, Human
agauaauuggacccaaacagaa

SEQ ID NO: 1166431 - RNA, 19 nt, Human
auauauauauauauauaua

SEQ ID NO: 1166432 - RNA, 19 nt, Human
auauauauauauauauaua

SEQ ID NO: 1166433 - RNA, 19 nt, Human
auauauauauauauauaua

SEQ ID NO: 1166434 - RNA, 19 nt, Human
auauauauauauauauaua

SEQ ID NO: 1166435 - RNA, 19 nt, Human
auauauauauauauauaua

SEQ ID NO: 1166436 - RNA, 19 nt, Human
auauauauauauauauaua

SEQ ID NO: 1166437 - RNA, 25 nt, Human
aucauccuugucaucuucauaaucc

SEQ ID NO: 1166438 - RNA, 19 nt, Human
aucaugguccucaucauca

SEQ ID NO: 1166439 - RNA, 25 nt, Human
augguccucaucaucaacauccucc

SEQ ID NO: 1166440 - RNA, 21 nt, Human
caaaacgcagacauuucugac

SEQ ID NO: 1166441 - RNA, 21 nt, Human
caaacagaaauaaaauucaca

SEQ ID NO: 1166442 - RNA, 22 nt, Human
caacauuaaaaagcucaacuau

SEQ ID NO: 1166443 - RNA, 24 nt, Human
cagacaggaaaaaaguaucaaaaa

SEQ ID NO: 1166444 - RNA, 18 nt, Human
cagaguccccugguuaaa

SEQ ID NO: 1166445 - RNA, 24 nt, Human
cagauucaaagucuuuuuuuuuuu

SEQ ID NO: 1166446 - RNA, 19 nt, Human
caggcacaagugcugggug

SEQ ID NO: 1166447 - RNA, 22 nt, Human
cauacauauauaaauagguaca

SEQ ID NO: 1166448 - RNA, 23 nt, Human
cauauauauauauacauaauaca

SEQ ID NO: 1166449 - RNA, 22 nt, Human
cauuuaaaccccauaauuuuuc

SEQ ID NO: 1166450 - RNA, 19 nt, Human
cauuucaacauaguccuau

SEQ ID NO: 1166451 - RNA, 25 nt, Human
cauuuuacuauuucacuccuccaaa

SEQ ID NO: 1166452 - RNA, 18 nt, Human
ccaccaguuuucagaguu

SEQ ID NO: 1166453 - RNA, 18 nt, Human
ccccaaaauacaaggcac

SEQ ID NO: 1166454 - RNA, 21 nt, Human
ccccugguuaaaauguaaagc

SEQ ID NO: 1166455 - RNA, 23 nt, Human
ccucaucaucaacauccuccucg

SEQ ID NO: 1166456 - RNA, 24 nt, Human
ccucuuccucuucuuccuccuccu

SEQ ID NO: 1166457 - RNA, 20 nt, Human
ccucuucuuccuccuccuca

SEQ ID NO: 1166458 - RNA, 19 nt, Human
cgaaauaugaguuuucuag

SEQ ID NO: 1166459 - RNA, 19 nt, Human
cuccuuggauuucuuuuuu

SEQ ID NO: 1166460 - RNA, 19 nt, Human
cucuuccucuucuuccucc

SEQ ID NO: 1166461 - RNA, 18 nt, Human
cuuuacauauauauauau

SEQ ID NO: 1166462 - RNA, 25 nt, Human
gaaauaaaagacaucuaaauggcca

SEQ ID NO: 1166463 - RNA, 19 nt, Human
gaacaucuaauauggccca

SEQ ID NO: 1166464 - RNA, 21 nt, Human
gacauuugugugugugugugu

SEQ ID NO: 1166465 - RNA, 18 nt, Human
gauauacauacauauaua

SEQ ID NO: 1166466 - RNA, 19 nt, Human
gcucacugccgaauccuuc

SEQ ID NO: 1166467 - RNA, 19 nt, Human
guauauauauauauauaua

SEQ ID NO: 1166468 - RNA, 19 nt, Human
guauauauauauauauaua

SEQ ID NO: 1166469 - RNA, 18 nt, Human
guccuccucaucuucuuc

SEQ ID NO: 1166470 - RNA, 20 nt, Human
guguguauauauauauauau

SEQ ID NO: 1166471 - RNA, 25 nt, Human
uaaaacacugaaacucaaagauaug

SEQ ID NO: 1166472 - RNA, 21 nt, Human
uaaaagacaucuaaauggcca

SEQ ID NO: 1166473 - RNA, 26 nt, Human
uaaaguacaaccauuucuagacgguu

SEQ ID NO: 1166474 - RNA, 24 nt, Human
uaaaguuaaaacagcaagaggauu

SEQ ID NO: 1166475 - RNA, 20 nt, Human
uaagaucccuaacccugacc

SEQ ID NO: 1166476 - RNA, 20 nt, Human
uaagcuaaauaaacauuuua

SEQ ID NO: 1166477 - RNA, 21 nt, Human
uacaauacacagacucugugg

SEQ ID NO: 1166478 - RNA, 25 nt, Human
uacaguaucauguaagcugugcaaa

SEQ ID NO: 1166479 - RNA, 18 nt, Human
uacauauauauauauaca

SEQ ID NO: 1166480 - RNA, 23 nt, Human
uaccuaacauuuacuuaaacaua

SEQ ID NO: 1166481 - RNA, 22 nt, Human
uacuggguguucuagaucaaac

SEQ ID NO: 1166482 - RNA, 19 nt, Human
uagccugguucagagaaag

SEQ ID NO: 1166483 - RNA, 19 nt, Human
uauauauauauauauauau

SEQ ID NO: 1166484 - RNA, 19 nt, Human
uauauauauauauauauau

SEQ ID NO: 1166485 - RNA, 21 nt, Human
uaucgcugcagcauuuaacaa

SEQ ID NO: 1166486 - RNA, 23 nt, Human
uauuucacuccuccaaaauguuu

SEQ ID NO: 1166487 - RNA, 22 nt, Human
uauuuuguugucugguggaagu

SEQ ID NO: 1166488 - RNA, 22 nt, Human
ucaauagcuuacuaaaaugaaa

SEQ ID NO: 1166489 - RNA, 20 nt, Human
uccaucuauauaucuuguuu

SEQ ID NO: 1166490 - RNA, 23 nt, Human
ucccagaaguaucuucuuuuacc

SEQ ID NO: 1166491 - RNA, 21 nt, Human
uccucuuccucuucuuccucc

SEQ ID NO: 1166492 - RNA, 22 nt, Human
ucguccuccucaucuucuucag

SEQ ID NO: 1166493 - RNA, 19 nt, Human
ucuaaauggccaccaacuu

SEQ ID NO: 1166494 - RNA, 18 nt, Human
ucuuccucuucuuccucc

SEQ ID NO: 1166495 - RNA, 18 nt, Human
ucuucuuccuccuccuca

SEQ ID NO: 1166496 - RNA, 24 nt, Human
ucuucuuccuccuccucauuuucc

SEQ ID NO: 1166497 - RNA, 23 nt, Human
ugaaaaagaguuggaacaaaaaa

SEQ ID NO: 1166498 - RNA, 23 nt, Human
ugaaaugcaagaccaaaaaauca

SEQ ID NO: 1166499 - RNA, 23 nt, Human
ugaagauauugaagucaccuccu

SEQ ID NO: 1166500 - RNA, 20 nt, Human
ugacaugcaaaacagaauga

SEQ ID NO: 1166501 - RNA, 18 nt, Human
ugagauuaaugguugugg

SEQ ID NO: 1166502 - RNA, 18 nt, Human
ugagcaaaaaagagcacc

SEQ ID NO: 1166503 - RNA, 21 nt, Human
ugaggugauuuucaccugauu

SEQ ID NO: 1166504 - RNA, 25 nt, Human
ugcaaaacagaaugaaaauuuacaa

SEQ ID NO: 1166505 - RNA, 18 nt, Human
ugcacagacauuugugug

SEQ ID NO: 1166506 - RNA, 22 nt, Human
ugcacagacauuugugugugug

SEQ ID NO: 1166507 - RNA, 23 nt, Human
ugcagaaauaaaagacaucuaaa

SEQ ID NO: 1166508 - RNA, 22 nt, Human
ugcagacaggaaaaaaguauca

SEQ ID NO: 1166509 - RNA, 20 nt, Human
ugccacagaguccccugguu

SEQ ID NO: 1166510 - RNA, 21 nt, Human
ugccugaaauuuuugguauuu

SEQ ID NO: 1166511 - RNA, 23 nt, Human
uggaacaaaaaaacauuuaaacc

SEQ ID NO: 1166512 - RNA, 18 nt, Human
uguauauauauauauaua

SEQ ID NO: 1166513 - RNA, 22 nt, Human
uguauauauauauauauauaua

SEQ ID NO: 1166514 - RNA, 18 nt, Human
uguguauauauauauaua

SEQ ID NO: 1166515 - RNA, 20 nt, Human
uguguauauauauauauaua

SEQ ID NO: 1166516 - RNA, 22 nt, Human
uguguauauauauauauauaua

SEQ ID NO: 1166517 - RNA, 22 nt, Human
uguguguauauauauauauaua

SEQ ID NO: 1166518 - RNA, 24 nt, Human
uguguguauauauauauauauaac

SEQ ID NO: 1166519 - RNA, 18 nt, Human
uguguguguauauauaua

SEQ ID NO: 1166520 - RNA, 23 nt, Human
uguguguguguauauauauauau

SEQ ID NO: 1166521 - RNA, 23 nt, Human
uguguguguguguauauauauau

SEQ ID NO: 1166522 - RNA, 20 nt, Human
uguguguguguguguauaua

SEQ ID NO: 1166523 - RNA, 20 nt, Human
uguuuugcuuuaacagauuu

SEQ ID NO: 1166524 - RNA, 22 nt, Human
uugaaaauaccuguacaaaaau

SEQ ID NO: 1166525 - RNA, 21 nt, Human
uugaacacaguuaaaacacug

SEQ ID NO: 1166526 - RNA, 20 nt, Human
uugaagucaccuccuucagg

SEQ ID NO: 1166527 - RNA, 23 nt, Human
uugaucuuugaaaauauuacaug

SEQ ID NO: 1166528 - RNA, 22 nt, Human
uuggacccaaacagaaauaaaa

SEQ ID NO: 1166529 - RNA, 18 nt, Human
uuuacauauauauauaua

SEQ ID NO: 1166530 - RNA, 21 nt, Human
uuuacauauauauauauacau

SEQ ID NO: 1166531 - RNA, 18 nt, Human
uuucagacaguucaugcu

SEQ ID NO: 1166532 - RNA, 25 nt, Human
uuucauagccugguucagagaaagu

SEQ ID NO: 1166533 - RNA, 21 nt, Human
uuucuuuacauauauauauau

SEQ ID NO: 1166534 - RNA, 20 nt, Human
uuuuuguuuuagccuguguu

SEQ ID NO: 1166535 - RNA, 18 nt, Human
uuuuuucuuuuuuuucuc

SEQ ID NO: 1166536 - RNA, 24 nt, Human
uuuuuuuuuuugaaaugcaagacc

SEQ ID NO: 1166537 - RNA, 19 nt, Human
aaagccucaugagagcagg

SEQ ID NO: 1166538 - RNA, 21 nt, Human
aagaaaaaagcuagacuacgu

SEQ ID NO: 1166539 - RNA, 21 nt, Human
aagacaaagagauaaagagaa

SEQ ID NO: 1166540 - RNA, 19 nt, Human
aagcuuugggggggggggg

SEQ ID NO: 1166541 - RNA, 21 nt, Human
aagcuuugggggggggggggc

SEQ ID NO: 1166542 - RNA, 22 nt, Human
aaguggccccgaaaggcugggu

SEQ ID NO: 1166543 - RNA, 19 nt, Human
aaucuccaucccauguguc

SEQ ID NO: 1166544 - RNA, 19 nt, Human
acaaagaugcuauggcucc

SEQ ID NO: 1166545 - RNA, 20 nt, Human
acaagaagcugguggagcag

SEQ ID NO: 1166546 - RNA, 22 nt, Human
acaguuugugccuucagucucu

SEQ ID NO: 1166547 - RNA, 25 nt, Human
acgaacuucaaagaggagggaacgc

SEQ ID NO: 1166548 - RNA, 23 nt, Human
acucaccacgcagggcuuccccc

SEQ ID NO: 1166549 - RNA, 19 nt, Human
acuucugcucccuucccca

SEQ ID NO: 1166550 - RNA, 23 nt, Human
acuucugcucccuuccccaagag

SEQ ID NO: 1166551 - RNA, 24 nt, Human
agacaaagagauaaagagaaaaca

SEQ ID NO: 1166552 - RNA, 27 nt, Human
agacaaagagauaaagagaagggaccc

SEQ ID NO: 1166553 - RNA, 18 nt, Human
agacagagaaggcagcau

SEQ ID NO: 1166554 - RNA, 18 nt, Human
agagauaaagagaaaaca

SEQ ID NO: 1166555 - RNA, 22 nt, Human
agaugcagccuucucuucucuu

SEQ ID NO: 1166556 - RNA, 20 nt, Human
agcaauaccccuggcuuggu

SEQ ID NO: 1166557 - RNA, 23 nt, Human
agcaccacagggagggguuuagg

SEQ ID NO: 1166558 - RNA, 18 nt, Human
agccuucucuucucucuc

SEQ ID NO: 1166559 - RNA, 26 nt, Human
aggaagcuuugggggggggggggcgg

SEQ ID NO: 1166560 - RNA, 19 nt, Human
aggaaggaagcuuuggggg

SEQ ID NO: 1166561 - RNA, 22 nt, Human
agggaaggaggucaacacagug

SEQ ID NO: 1166562 - RNA, 20 nt, Human
agggggcaggguaaggaggg

SEQ ID NO: 1166563 - RNA, 24 nt, Human
agguagcugaagcagacagagaag

SEQ ID NO: 1166564 - RNA, 19 nt, Human
aggugccuucccagacacc

SEQ ID NO: 1166565 - RNA, 18 nt, Human
aguggacgaggagugugc

SEQ ID NO: 1166566 - RNA, 22 nt, Human
caaggucucucacuuacauccu

SEQ ID NO: 1166567 - RNA, 20 nt, Human
caauagacccacuggcccaa

SEQ ID NO: 1166568 - RNA, 18 nt, Human
cacagugccugacacaag

SEQ ID NO: 1166569 - RNA, 19 nt, Human
caccaagacguggagaccg

SEQ ID NO: 1166570 - RNA, 21 nt, Human
cacuguucuugcuccuggacu

SEQ ID NO: 1166571 - RNA, 27 nt, Human
cacuugaccaaggagcccucaagcaac

SEQ ID NO: 1166572 - RNA, 19 nt, Human
cagcaccugacccuauacc

SEQ ID NO: 1166573 - RNA, 19 nt, Human
cagccuucucuucucucuc

SEQ ID NO: 1166574 - RNA, 18 nt, Human
ccaccgguuauuccuagg

SEQ ID NO: 1166575 - RNA, 21 nt, Human
ccccaaacgccugaaagccuc

SEQ ID NO: 1166576 - RNA, 24 nt, Human
cccccaaacgccugaaagccucau

SEQ ID NO: 1166577 - RNA, 20 nt, Human
ccccuggagcaacacuguuc

SEQ ID NO: 1166578 - RNA, 26 nt, Human
ccccuggagcaacacuguucuugcuc

SEQ ID NO: 1166579 - RNA, 24 nt, Human
cccuauacccaccgguuauuccua

SEQ ID NO: 1166580 - RNA, 21 nt, Human
ccgcauggacuucugcucccu

SEQ ID NO: 1166581 - RNA, 19 nt, Human
ccucaugagagcagguaag

SEQ ID NO: 1166582 - RNA, 19 nt, Human
ccugaccuacaagaaaaaa

SEQ ID NO: 1166583 - RNA, 23 nt, Human
cuccaucccauguguccuaaguu

SEQ ID NO: 1166584 - RNA, 19 nt, Human
cucccaacuucagccccag

SEQ ID NO: 1166585 - RNA, 19 nt, Human
cucucccccucacucacca

SEQ ID NO: 1166586 - RNA, 18 nt, Human
cucucucccccucacuca

SEQ ID NO: 1166587 - RNA, 19 nt, Human
cugaugcgugucucguccu

SEQ ID NO: 1166588 - RNA, 24 nt, Human
cuggagcaacacuguucuugcucc

SEQ ID NO: 1166589 - RNA, 18 nt, Human
cuggcccaaguuccccug

SEQ ID NO: 1166590 - RNA, 19 nt, Human
gacaagggggcaggguaag

SEQ ID NO: 1166591 - RNA, 21 nt, Human
gacaagggggcaggguaagga

SEQ ID NO: 1166592 - RNA, 20 nt, Human
gacuccuccaaggaaaggag

SEQ ID NO: 1166593 - RNA, 18 nt, Human
gagcaauaccccuggcuu

SEQ ID NO: 1166594 - RNA, 21 nt, Human
gaguaugggaggaacaugaaa

SEQ ID NO: 1166595 - RNA, 22 nt, Human
gaucaucucuauaucuaauuug

SEQ ID NO: 1166596 - RNA, 20 nt, Human
gcagagugugcccugacucc

SEQ ID NO: 1166597 - RNA, 25 nt, Human
gcagggcuucccccaaacgccugaa

SEQ ID NO: 1166598 - RNA, 26 nt, Human
gcagggcuucccccaaacgccugaaa

SEQ ID NO: 1166599 - RNA, 24 nt, Human
gcccgcauggacuucugcucccuu

SEQ ID NO: 1166600 - RNA, 19 nt, Human
gccugaaagccucaugaga

SEQ ID NO: 1166601 - RNA, 23 nt, Human
gccuuccacaagaagcuggugga

SEQ ID NO: 1166602 - RNA, 27 nt, Human
gcucuggagccuguaggguccagcccu

SEQ ID NO: 1166603 - RNA, 21 nt, Human
ggaagcuuugggggggggggg

SEQ ID NO: 1166604 - RNA, 24 nt, Human
ggaaggaagcuuuggggggggggg

SEQ ID NO: 1166605 - RNA, 23 nt, Human
ggagagcaccugcggggccugaa

SEQ ID NO: 1166606 - RNA, 19 nt, Human
ggaggaacaugaaagugga

SEQ ID NO: 1166607 - RNA, 18 nt, Human
ggcaaagugcagaaguca

SEQ ID NO: 1166608 - RNA, 24 nt, Human
ggcaaagugcagaagucaucccug

SEQ ID NO: 1166609 - RNA, 19 nt, Human
ggccccgaaaggcugggug

SEQ ID NO: 1166610 - RNA, 23 nt, Human
gggcagggguggugguggauguc

SEQ ID NO: 1166611 - RNA, 24 nt, Human
gggggcgggcaggggugguggugg

SEQ ID NO: 1166612 - RNA, 23 nt, Human
ggggggcgggcaggggugguggu

SEQ ID NO: 1166613 - RNA, 22 nt, Human
gggggggggcgggcaggggugg

SEQ ID NO: 1166614 - RNA, 19 nt, Human
ggggggggggggcgggcag

SEQ ID NO: 1166615 - RNA, 19 nt, Human
gggggggggggggcgggca

SEQ ID NO: 1166616 - RNA, 21 nt, Human
gggggggggggggcgggcagg

SEQ ID NO: 1166617 - RNA, 23 nt, Human
gugacagaagacucaccucuugc

SEQ ID NO: 1166618 - RNA, 18 nt, Human
guggagcagagugugccc

SEQ ID NO: 1166619 - RNA, 26 nt, Human
uaaauaagacacaagacaaagagaua

SEQ ID NO: 1166620 - RNA, 21 nt, Human
uaaguggccccgaaaggcugg

SEQ ID NO: 1166621 - RNA, 18 nt, Human
uagacccacuggcccaag

SEQ ID NO: 1166622 - RNA, 24 nt, Human
uauaaguagcuuaauccaccuucu

SEQ ID NO: 1166623 - RNA, 18 nt, Human
uauauuaguaaugcaaca

SEQ ID NO: 1166624 - RNA, 26 nt, Human
ucacaccccaacagcugggcaaaaug

SEQ ID NO: 1166625 - RNA, 19 nt, Human
uccagccuuccacaagaag

SEQ ID NO: 1166626 - RNA, 21 nt, Human
ucccuucagcaccugacccua

SEQ ID NO: 1166627 - RNA, 18 nt, Human
uccugaccuacaagaaaa

SEQ ID NO: 1166628 - RNA, 22 nt, Human
ucucucucccccucacucacca

SEQ ID NO: 1166629 - RNA, 23 nt, Human
ucugaggccccccaggaagugac

SEQ ID NO: 1166630 - RNA, 20 nt, Human
ucugcucccuuccccaagag

SEQ ID NO: 1166631 - RNA, 24 nt, Human
ucuggagccuguaggguccagccc

SEQ ID NO: 1166632 - RNA, 18 nt, Human
ucuucacaccccaacagc

SEQ ID NO: 1166633 - RNA, 22 nt, Human
ucuucccagccacacucggcuc

SEQ ID NO: 1166634 - RNA, 23 nt, Human
ucuucccagccacacucggcucu

SEQ ID NO: 1166635 - RNA, 20 nt, Human
ucuucucucucccccucacu

SEQ ID NO: 1166636 - RNA, 18 nt, Human
ugaccaaggagcccucaa

SEQ ID NO: 1166637 - RNA, 18 nt, Human
ugccugacacaagguagg

SEQ ID NO: 1166638 - RNA, 22 nt, Human
ugccuucuaggucacuucuccc

SEQ ID NO: 1166639 - RNA, 18 nt, Human
ugcucuggagccuguagg

SEQ ID NO: 1166640 - RNA, 19 nt, Human
ugcuggucccaaggucucu

SEQ ID NO: 1166641 - RNA, 21 nt, Human
uggaaggcaugcucuggagcc

SEQ ID NO: 1166642 - RNA, 19 nt, Human
ugggaggaacaugaaagug

SEQ ID NO: 1166643 - RNA, 21 nt, Human
ugggaggaacaugaaagugga

SEQ ID NO: 1166644 - RNA, 20 nt, Human
ugggggggggggggcgggca

SEQ ID NO: 1166645 - RNA, 21 nt, Human
ugggggggggggggcgggcag

SEQ ID NO: 1166646 - RNA, 22 nt, Human
uuccacaagaagcugguggagc

SEQ ID NO: 1166647 - RNA, 28 nt, Human
uucccagccacacucggcucugaggccc

SEQ ID NO: 1166648 - RNA, 18 nt, Human
uucccucuuagguagcug

SEQ ID NO: 1166649 - RNA, 20 nt, Human
uucuaagugauugacaaggu

SEQ ID NO: 1166650 - RNA, 18 nt, Human
uucucuggagaugcagcc

SEQ ID NO: 1166651 - RNA, 21 nt, Human
uucucuucucucucccccuca

SEQ ID NO: 1166652 - RNA, 24 nt, Human
uugcuggucccaaggucucucacu

SEQ ID NO: 1166653 - RNA, 18 nt, Human
aucccauuuuuuuccaag

SEQ ID NO: 1166654 - RNA, 26 nt, Human
ucagaucccauuuuuuuccaagacuc

SEQ ID NO: 1166655 - RNA, 22 nt, Human
uguucuguacuuucagauccca

SEQ ID NO: 1166656 - RNA, 28 nt, Human
uuaacagucuucaucaauguucauguuc

SEQ ID NO: 1166657 - RNA, 22 nt, Human
gucucuauaaagcuuuuccaaa

SEQ ID NO: 1166658 - RNA, 22 nt, Human
ucacuuuugagguuuuuacaaa

SEQ ID NO: 1166659 - RNA, 25 nt, Human
aaaaaaaaaaaaaaaagcaacugaa

SEQ ID NO: 1166660 - RNA, 24 nt, Human
aaggagcuggcgcccaggccguag

SEQ ID NO: 1166661 - RNA, 18 nt, Human
aaguccuccaccagcccc

SEQ ID NO: 1166662 - RNA, 20 nt, Human
aauggacaugguggaggcag

SEQ ID NO: 1166663 - RNA, 30 nt, Human
aauuguuuuguagcuggaggcaugggcaaa

SEQ ID NO: 1166664 - RNA, 27 nt, Human
accaaaaaaaaaaaaaaaagcaacuga

SEQ ID NO: 1166665 - RNA, 20 nt, Human
accacggcccuggaguagcu

SEQ ID NO: 1166666 - RNA, 18 nt, Human
acucauguucugcauccc

SEQ ID NO: 1166667 - RNA, 18 nt, Human
agccgcugguggucuucg

SEQ ID NO: 1166668 - RNA, 21 nt, Human
agccggcucuccucgcccucc

SEQ ID NO: 1166669 - RNA, 24 nt, Human
aggacgucagaggacucggacacc

SEQ ID NO: 1166670 - RNA, 18 nt, Human
aggaggcaaacuuguugu

SEQ ID NO: 1166671 - RNA, 19 nt, Human
aggcaggaguggaggcagg

SEQ ID NO: 1166672 - RNA, 21 nt, Human
aggcaggcgggccgaaccagg

SEQ ID NO: 1166673 - RNA, 22 nt, Human
aggcaguaaacucccccgcggg

SEQ ID NO: 1166674 - RNA, 23 nt, Human
aggcaguaaacucccccgcgggu

SEQ ID NO: 1166675 - RNA, 20 nt, Human
aggcaugggcaaaggggggg

SEQ ID NO: 1166676 - RNA, 20 nt, Human
aggccggggcuugugaggcc

SEQ ID NO: 1166677 - RNA, 18 nt, Human
aggcuccacuuggucucc

SEQ ID NO: 1166678 - RNA, 23 nt, Human
agggguaggcugggaggggcugc

SEQ ID NO: 1166679 - RNA, 18 nt, Human
auggacaugguggaggca

SEQ ID NO: 1166680 - RNA, 20 nt, Human
caacugaauuguuuuguagc

SEQ ID NO: 1166681 - RNA, 23 nt, Human
caacugaauuguuuuguagcugg

SEQ ID NO: 1166682 - RNA, 20 nt, Human
caccacagccgccgcccagg

SEQ ID NO: 1166683 - RNA, 26 nt, Human
caccacagccgccgcccaggccaccc

SEQ ID NO: 1166684 - RNA, 20 nt, Human
cagcaucuuguucugcugcu

SEQ ID NO: 1166685 - RNA, 21 nt, Human
cagcugccgccuaagguuguu

SEQ ID NO: 1166686 - RNA, 19 nt, Human
cagcugcugcccacuuggg

SEQ ID NO: 1166687 - RNA, 21 nt, Human
cagcugcugcccacuugggag

SEQ ID NO: 1166688 - RNA, 19 nt, Human
cagcuucaguuucuccuag

SEQ ID NO: 1166689 - RNA, 19 nt, Human
caucuuguucugcugcucc

SEQ ID NO: 1166690 - RNA, 24 nt, Human
caugguggaggcaggaguggaggc

SEQ ID NO: 1166691 - RNA, 21 nt, Human
cccacaggccgagcucagacc

SEQ ID NO: 1166692 - RNA, 20 nt, Human
ccccacaggccgagcucaga

SEQ ID NO: 1166693 - RNA, 23 nt, Human
cccgcggguggacugaggccuag

SEQ ID NO: 1166694 - RNA, 23 nt, Human
cccucccaggcucuggggcagcg

SEQ ID NO: 1166695 - RNA, 27 nt, Human
ccgcuggccccaccacagccgccgccc

SEQ ID NO: 1166696 - RNA, 24 nt, Human
ccucccucccaggcucuggggcag

SEQ ID NO: 1166697 - RNA, 21 nt, Human
cgcccaggccaccccgaaagc

SEQ ID NO: 1166698 - RNA, 21 nt, Human
cgcccaggccguagcugaggc

SEQ ID NO: 1166699 - RNA, 21 nt, Human
cgccgcccaggccaccccgaa

SEQ ID NO: 1166700 - RNA, 22 nt, Human
cgucagaggacucggacaccag

SEQ ID NO: 1166701 - RNA, 24 nt, Human
cuccaccagccccuacauguugcc

SEQ ID NO: 1166702 - RNA, 22 nt, Human
cuccaggaaccguaccuugucu

SEQ ID NO: 1166703 - RNA, 21 nt, Human
cucccaugccgcuggccccac

SEQ ID NO: 1166704 - RNA, 25 nt, Human
cucccaugccgcuggccccaccaca

SEQ ID NO: 1166705 - RNA, 19 nt, Human
cuccugggugcacacagcc

SEQ ID NO: 1166706 - RNA, 23 nt, Human
cugccacagcuguucacuugggc

SEQ ID NO: 1166707 - RNA, 21 nt, Human
cuugugaggcccccacaggcc

SEQ ID NO: 1166708 - RNA, 20 nt, Human
gcaugggcaaaggggggguc

SEQ ID NO: 1166709 - RNA, 24 nt, Human
gccggggcuugugaggcccccaca

SEQ ID NO: 1166710 - RNA, 18 nt, Human
ggaccaaaaaaaaaaaaa

SEQ ID NO: 1166711 - RNA, 23 nt, Human
ggaggggcugccacagcuguuca

SEQ ID NO: 1166712 - RNA, 20 nt, Human
ggcccccacaggccgagcuc

SEQ ID NO: 1166713 - RNA, 24 nt, Human
ggccuagggcugagccucaggugg

SEQ ID NO: 1166714 - RNA, 21 nt, Human
gggaggggcugccacagcugu

SEQ ID NO: 1166715 - RNA, 19 nt, Human
gggccgaaccaggcagaga

SEQ ID NO: 1166716 - RNA, 20 nt, Human
gggggccagagguggacacc

SEQ ID NO: 1166717 - RNA, 23 nt, Human
gggggccagagguggacaccuug

SEQ ID NO: 1166718 - RNA, 25 nt, Human
gggguccaccuccaggacaaggggg

SEQ ID NO: 1166719 - RNA, 19 nt, Human
gguggacugaggccuaggg

SEQ ID NO: 1166720 - RNA, 20 nt, Human
gguggacugaggccuagggc

SEQ ID NO: 1166721 - RNA, 21 nt, Human
guccauguugcucccggccgu

SEQ ID NO: 1166722 - RNA, 18 nt, Human
guggaggcaggcgggccg

SEQ ID NO: 1166723 - RNA, 26 nt, Human
uacccugcauagugaccucccuccca

SEQ ID NO: 1166724 - RNA, 21 nt, Human
uagcccagagucuccagcugc

SEQ ID NO: 1166725 - RNA, 22 nt, Human
uagugaccucccucccaggcuc

SEQ ID NO: 1166726 - RNA, 24 nt, Human
ucacaaccacggcccuggaguagc

SEQ ID NO: 1166727 - RNA, 18 nt, Human
ucacuugggcaggacguc

SEQ ID NO: 1166728 - RNA, 22 nt, Human
uccaccagccccuacauguugc

SEQ ID NO: 1166729 - RNA, 27 nt, Human
uccccuaauggacaugguggaggcagg

SEQ ID NO: 1166730 - RNA, 23 nt, Human
uccuucuccugggugcacacagc

SEQ ID NO: 1166731 - RNA, 19 nt, Human
ucuccagcaucuuguucug

SEQ ID NO: 1166732 - RNA, 19 nt, Human
ucugcaucccagacuccag

SEQ ID NO: 1166733 - RNA, 21 nt, Human
ucuuguucugcugcuccagga

SEQ ID NO: 1166734 - RNA, 18 nt, Human
ugaaggaggcaaacuugu

SEQ ID NO: 1166735 - RNA, 22 nt, Human
ugaaggcccgggggccagaggu

SEQ ID NO: 1166736 - RNA, 19 nt, Human
ugaccucccucccaggcuc

SEQ ID NO: 1166737 - RNA, 21 nt, Human
ugaggagcugaugugggcacc

SEQ ID NO: 1166738 - RNA, 18 nt, Human
ugaggccuagggcugagc

SEQ ID NO: 1166739 - RNA, 18 nt, Human
ugccaagcuccgccucca

SEQ ID NO: 1166740 - RNA, 20 nt, Human
ugccacagcuguucacuugg

SEQ ID NO: 1166741 - RNA, 24 nt, Human
ugccacagcuguucacuugggcag

SEQ ID NO: 1166742 - RNA, 22 nt, Human
ugcggcugaaggagcuggcgcc

SEQ ID NO: 1166743 - RNA, 20 nt, Human
ugcucccggccgucuucugc

SEQ ID NO: 1166744 - RNA, 20 nt, Human
ugcuccuucuccugggugca

SEQ ID NO: 1166745 - RNA, 18 nt, Human
uggacugaggccuagggc

SEQ ID NO: 1166746 - RNA, 19 nt, Human
ugggagaagcuugaggagc

SEQ ID NO: 1166747 - RNA, 19 nt, Human
ugggagaagcuugaggagc

SEQ ID NO: 1166748 - RNA, 21 nt, Human
ugggagaagcuugaggagcug

SEQ ID NO: 1166749 - RNA, 24 nt, Human
ugggagaagcuugaggagcugaug

SEQ ID NO: 1166750 - RNA, 22 nt, Human
ugggcaggacgucagaggacuc

SEQ ID NO: 1166751 - RNA, 21 nt, Human
uggugcggcugaaggagcugg

SEQ ID NO: 1166752 - RNA, 19 nt, Human
uucacaaccacggcccugg

SEQ ID NO: 1166753 - RNA, 26 nt, Human
uucguaugaauacucauguucugcau

SEQ ID NO: 1166754 - RNA, 26 nt, Human
uuggaccaaaaaaaaaaaaaaaagca

SEQ ID NO: 1166755 - RNA, 23 nt, Human
uuucuccuagcccagagucucca

SEQ ID NO: 1166756 - RNA, 21 nt, Human
auauugaugauaaaguacauc

SEQ ID NO: 1166757 - RNA, 23 nt, Human
uaacaugcagauagaaaccgccu

SEQ ID NO: 1166758 - RNA, 24 nt, Human
agugacauggaggaagggaaagga

SEQ ID NO: 1166759 - RNA, 21 nt, Human
caagagucuaaggccaggagc

SEQ ID NO: 1166760 - RNA, 19 nt, Human
caagucuugguggcuucuu

SEQ ID NO: 1166761 - RNA, 19 nt, Human
cagaagaucuacauaccau

SEQ ID NO: 1166762 - RNA, 24 nt, Human
cccauccaggagaagaugaaggaa

SEQ ID NO: 1166763 - RNA, 24 nt, Human
gcaagagucuaaggccaggagccc

SEQ ID NO: 1166764 - RNA, 20 nt, Human
gggcaagagucuaaggccag

SEQ ID NO: 1166765 - RNA, 21 nt, Human
uaaacacaagggcaagagucu

SEQ ID NO: 1166766 - RNA, 21 nt, Human
uacuuuguggagucaccauuu

SEQ ID NO: 1166767 - RNA, 18 nt, Human
uccaggagaagaugaagg

SEQ ID NO: 1166768 - RNA, 22 nt, Human
uccaggagaagaugaaggaaug

SEQ ID NO: 1166769 - RNA, 19 nt, Human
ucuccauagaaugcaugcc

SEQ ID NO: 1166770 - RNA, 21 nt, Human
uucccagaagagucuguuuuc

SEQ ID NO: 1166771 - RNA, 24 nt, Human
aaagugcugggauuacagguguga

SEQ ID NO: 1166772 - RNA, 18 nt, Human
aagugcugggauuacagg

SEQ ID NO: 1166773 - RNA, 19 nt, Human
aagugcugggauuacaggu

SEQ ID NO: 1166774 - RNA, 26 nt, Human
aagugcugggauuacaggugugagcc

SEQ ID NO: 1166775 - RNA, 24 nt, Human
accauguuggucaggcuggucucg

SEQ ID NO: 1166776 - RNA, 18 nt, Human
accgcacccagcacacau

SEQ ID NO: 1166777 - RNA, 24 nt, Human
accuugugaucugcccgccucagc

SEQ ID NO: 1166778 - RNA, 21 nt, Human
acgggguuucaccauguuggu

SEQ ID NO: 1166779 - RNA, 23 nt, Human
acgggguuucaccauguugguca

SEQ ID NO: 1166780 - RNA, 24 nt, Human
acgggguuucaccauguuggucag

SEQ ID NO: 1166781 - RNA, 18 nt, Human
agccaccgcacccagcac

SEQ ID NO: 1166782 - RNA, 23 nt, Human
agguggggggcugcgagggcugg

SEQ ID NO: 1166783 - RNA, 22 nt, Human
aguagagacgggguuucaccau

SEQ ID NO: 1166784 - RNA, 22 nt, Human
aguuccaagagguaggacugca

SEQ ID NO: 1166785 - RNA, 24 nt, Human
auuuuuguauuuuuaguagagacg

SEQ ID NO: 1166786 - RNA, 24 nt, Human
caaagugcugggauuacaggugug

SEQ ID NO: 1166787 - RNA, 23 nt, Human
caaccuccaccuccuggguucaa

SEQ ID NO: 1166788 - RNA, 22 nt, Human
caagcauuucuccugccucagc

SEQ ID NO: 1166789 - RNA, 23 nt, Human
caagucccgggcgcacacggaaa

SEQ ID NO: 1166790 - RNA, 21 nt, Human
caccauguuggucaggcuggu

SEQ ID NO: 1166791 - RNA, 24 nt, Human
caccauguuggucaggcuggucuc

SEQ ID NO: 1166792 - RNA, 20 nt, Human
cacccagcacacauuuggcu

SEQ ID NO: 1166793 - RNA, 25 nt, Human
caccgcacccagcacacauuuggcc

SEQ ID NO: 1166794 - RNA, 21 nt, Human
cacgcccagcuaauuuuugua

SEQ ID NO: 1166795 - RNA, 21 nt, Human
cacgugccaucacgcccagcu

SEQ ID NO: 1166796 - RNA, 21 nt, Human
cacugcaaccuccaccuccug

SEQ ID NO: 1166797 - RNA, 23 nt, Human
cacugcaaccuccaccuccuggg

SEQ ID NO: 1166798 - RNA, 20 nt, Human
cagccuccugaguagcugag

SEQ ID NO: 1166799 - RNA, 21 nt, Human
ccaaagugcugggauuacagg

SEQ ID NO: 1166800 - RNA, 21 nt, Human
ccaaagugcugggauuacagg

SEQ ID NO: 1166801 - RNA, 21 nt, Human
ccaaagugcugggauuacagg

SEQ ID NO: 1166802 - RNA, 24 nt, Human
ccaaagugcugggauuacaggugu

SEQ ID NO: 1166803 - RNA, 20 nt, Human
ccaucacgcccagcuaauuu

SEQ ID NO: 1166804 - RNA, 20 nt, Human
ccgcacccagcacacauuug

SEQ ID NO: 1166805 - RNA, 18 nt, Human
ccggcgccugcaaaguuu

SEQ ID NO: 1166806 - RNA, 19 nt, Human
ccuccaccuccuggguuca

SEQ ID NO: 1166807 - RNA, 19 nt, Human
ccugaguagcugagacuac

SEQ ID NO: 1166808 - RNA, 24 nt, Human
ccugaguagcugagacuacaggca

SEQ ID NO: 1166809 - RNA, 23 nt, Human
ccugccucagccuccugaguagc

SEQ ID NO: 1166810 - RNA, 23 nt, Human
ccuggguucaagcauuucuccug

SEQ ID NO: 1166811 - RNA, 24 nt, Human
cgccucagccugccaaagugcugg

SEQ ID NO: 1166812 - RNA, 24 nt, Human
cgggguuucaccauguuggucagg

SEQ ID NO: 1166813 - RNA, 24 nt, Human
cucacugcaaccuccaccuccugg

SEQ ID NO: 1166814 - RNA, 27 nt, Human
cucacugcaaccuccaccuccuggguu

SEQ ID NO: 1166815 - RNA, 24 nt, Human
cuccugaccuugugaucugcccgc

SEQ ID NO: 1166816 - RNA, 22 nt, Human
cuccugccucagccuccugagu

SEQ ID NO: 1166817 - RNA, 23 nt, Human
cuccuggguucaagcauuucucc

SEQ ID NO: 1166818 - RNA, 23 nt, Human
cugcaaccuccaccuccuggguu

SEQ ID NO: 1166819 - RNA, 24 nt, Human
cugcaaccuccaccuccuggguuc

SEQ ID NO: 1166820 - RNA, 23 nt, Human
cugccucagccuccugaguagcu

SEQ ID NO: 1166821 - RNA, 24 nt, Human
gaccuugugaucugcccgccucag

SEQ ID NO: 1166822 - RNA, 23 nt, Human
gagacgggguuucaccauguugg

SEQ ID NO: 1166823 - RNA, 24 nt, Human
gagacgggguuucaccauguuggu

SEQ ID NO: 1166824 - RNA, 25 nt, Human
gaguagcugagacuacaggcacgug

SEQ ID NO: 1166825 - RNA, 18 nt, Human
gauuacaggugugagcca

SEQ ID NO: 1166826 - RNA, 20 nt, Human
gauuacaggugugagccacc

SEQ ID NO: 1166827 - RNA, 23 nt, Human
gauuacaggugugagccaccgca

SEQ ID NO: 1166828 - RNA, 22 nt, Human
gcccagcuaauuuuuguauuuu

SEQ ID NO: 1166829 - RNA, 24 nt, Human
ggacgcggccccaacggauccccg

SEQ ID NO: 1166830 - RNA, 18 nt, Human
ggcccggaaacacgggua

SEQ ID NO: 1166831 - RNA, 20 nt, Human
ggccggggcgaggagguggg

SEQ ID NO: 1166832 - RNA, 25 nt, Human
ggccggggcgaggagguggggggcu

SEQ ID NO: 1166833 - RNA, 23 nt, Human
ggcuggucucgaacuccugaccu

SEQ ID NO: 1166834 - RNA, 18 nt, Human
gggcgaggaggugggggg

SEQ ID NO: 1166835 - RNA, 22 nt, Human
gggcugcgagggcugggcccgg

SEQ ID NO: 1166836 - RNA, 23 nt, Human
gggguuucaccauguuggucagg

SEQ ID NO: 1166837 - RNA, 20 nt, Human
ggucucgaacuccugaccuu

SEQ ID NO: 1166838 - RNA, 23 nt, Human
guagagacgggguuucaccaugu

SEQ ID NO: 1166839 - RNA, 24 nt, Human
gugaucugcccgccucagccugcc

SEQ ID NO: 1166840 - RNA, 24 nt, Human
uaauuuuuguauuuuuaguagaga

SEQ ID NO: 1166841 - RNA, 24 nt, Human
uacaggcacgugccaucacgccca

SEQ ID NO: 1166842 - RNA, 24 nt, Human
uacaggugugagccaccgcaccca

SEQ ID NO: 1166843 - RNA, 22 nt, Human
uagagacgggguuucaccaugu

SEQ ID NO: 1166844 - RNA, 24 nt, Human
uaguagagacgggguuucaccaug

SEQ ID NO: 1166845 - RNA, 26 nt, Human
uaguagagacgggguuucaccauguu

SEQ ID NO: 1166846 - RNA, 23 nt, Human
uaguuccaagagguaggacugca

SEQ ID NO: 1166847 - RNA, 23 nt, Human
ucacugcaaccuccaccuccugg

SEQ ID NO: 1166848 - RNA, 24 nt, Human
ucacugcaaccuccaccuccuggg

SEQ ID NO: 1166849 - RNA, 25 nt, Human
ucacugcaaccuccaccuccugggu

SEQ ID NO: 1166850 - RNA, 27 nt, Human
ucacugcaaccuccaccuccuggguuc

SEQ ID NO: 1166851 - RNA, 18 nt, Human
ucccgggcgcacacggaa

SEQ ID NO: 1166852 - RNA, 24 nt, Human
uccugaguagcugagacuacaggc

SEQ ID NO: 1166853 - RNA, 21 nt, Human
uccuggguucaagcauuucuc

SEQ ID NO: 1166854 - RNA, 22 nt, Human
uccuggguucaagcauuucucc

SEQ ID NO: 1166855 - RNA, 24 nt, Human
uccuggguucaagcauuucuccug

SEQ ID NO: 1166856 - RNA, 19 nt, Human
ucucgaacuccugaccuug

SEQ ID NO: 1166857 - RNA, 21 nt, Human
ucugcccgccucagccugcca

SEQ ID NO: 1166858 - RNA, 21 nt, Human
ugagacuacaggcacgugcca

SEQ ID NO: 1166859 - RNA, 26 nt, Human
ugagacuacaggcacgugccaucacg

SEQ ID NO: 1166860 - RNA, 22 nt, Human
ugcaaaguuucaccaagucccg

SEQ ID NO: 1166861 - RNA, 18 nt, Human
ugcaauggcaugaucucg

SEQ ID NO: 1166862 - RNA, 24 nt, Human
ugccucagccuccugaguagcuga

SEQ ID NO: 1166863 - RNA, 24 nt, Human
ugcugggauuacaggugugagcca

SEQ ID NO: 1166864 - RNA, 18 nt, Human
ugggauuacaggugugag

SEQ ID NO: 1166865 - RNA, 19 nt, Human
ugggauuacaggugugagc

SEQ ID NO: 1166866 - RNA, 21 nt, Human
ugggauuacaggugugagcca

SEQ ID NO: 1166867 - RNA, 22 nt, Human
ugggauuacaggugugagccac

SEQ ID NO: 1166868 - RNA, 23 nt, Human
ugggauuacaggugugagccacc

SEQ ID NO: 1166869 - RNA, 24 nt, Human
ugggauuacaggugugagccaccg

SEQ ID NO: 1166870 - RNA, 22 nt, Human
ugggggacgcggccccaacgga

SEQ ID NO: 1166871 - RNA, 24 nt, Human
ugggggacgcggccccaacggauc

SEQ ID NO: 1166872 - RNA, 24 nt, Human
uggucaggcuggucucgaacuccu

SEQ ID NO: 1166873 - RNA, 18 nt, Human
uuaguagagacgggguuu

SEQ ID NO: 1166874 - RNA, 22 nt, Human
uuaguagagacgggguuucacc

SEQ ID NO: 1166875 - RNA, 24 nt, Human
uuaguagagacgggguuucaccau

SEQ ID NO: 1166876 - RNA, 21 nt, Human
uucaagcauuucuccugccuc

SEQ ID NO: 1166877 - RNA, 23 nt, Human
uuguauuuuuaguagagacgggg

SEQ ID NO: 1166878 - RNA, 24 nt, Human
uuucaccauguuggucaggcuggu

SEQ ID NO: 1166879 - RNA, 24 nt, Human
uuuuuaguagagacgggguuucac

SEQ ID NO: 1166880 - RNA, 20 nt, Human
uuuuuguauuuuuaguagag

SEQ ID NO: 1166881 - RNA, 23 nt, Human
ugaguuuaggcaaaguaggacaa

SEQ ID NO: 1166882 - RNA, 26 nt, Human
aacccuuccuaaugcaggauccccau

SEQ ID NO: 1166883 - RNA, 19 nt, Human
aagcaaugaaccacgaggg

SEQ ID NO: 1166884 - RNA, 21 nt, Human
acacaaucuacuccuugcauc

SEQ ID NO: 1166885 - RNA, 21 nt, Human
acaggaagaggacuaggcuag

SEQ ID NO: 1166886 - RNA, 21 nt, Human
acagggcugcaauucaccagc

SEQ ID NO: 1166887 - RNA, 18 nt, Human
accuguuaacaaaaggca

SEQ ID NO: 1166888 - RNA, 18 nt, Human
acggccugggaccuggcu

SEQ ID NO: 1166889 - RNA, 18 nt, Human
agaauccccuaugggccc

SEQ ID NO: 1166890 - RNA, 22 nt, Human
agcaaggaguguggaagaggga

SEQ ID NO: 1166891 - RNA, 19 nt, Human
agcaaugaaccacgagggu

SEQ ID NO: 1166892 - RNA, 20 nt, Human
agcuguagaauuugugucga

SEQ ID NO: 1166893 - RNA, 19 nt, Human
aggaagaggacuaggcuag

SEQ ID NO: 1166894 - RNA, 19 nt, Human
aggaguguggaagagggag

SEQ ID NO: 1166895 - RNA, 24 nt, Human
agggagaagggguaugguccucuc

SEQ ID NO: 1166896 - RNA, 19 nt, Human
aucauccuggaaauccgcu

SEQ ID NO: 1166897 - RNA, 19 nt, Human
augaaauauccuccaagag

SEQ ID NO: 1166898 - RNA, 18 nt, Human
cacaggaagaggacuagg

SEQ ID NO: 1166899 - RNA, 18 nt, Human
caccugacagcucaggga

SEQ ID NO: 1166900 - RNA, 22 nt, Human
cacgaaggaaagagguguggca

SEQ ID NO: 1166901 - RNA, 22 nt, Human
cagaaucacagcaaggagugug

SEQ ID NO: 1166902 - RNA, 19 nt, Human
cagcaaggaguguggaaga

SEQ ID NO: 1166903 - RNA, 22 nt, Human
caucucuuccucuucauucuug

SEQ ID NO: 1166904 - RNA, 20 nt, Human
caucugagucucugcugugu

SEQ ID NO: 1166905 - RNA, 22 nt, Human
cauucaguugagacgugccacg

SEQ ID NO: 1166906 - RNA, 23 nt, Human
ccccacacacaaucuacuccuug

SEQ ID NO: 1166907 - RNA, 23 nt, Human
ccucucacaaggaggucccaagc

SEQ ID NO: 1166908 - RNA, 20 nt, Human
ccuggaaauccgcugcuucc

SEQ ID NO: 1166909 - RNA, 22 nt, Human
cgggagccugagagucaacccc

SEQ ID NO: 1166910 - RNA, 21 nt, Human
cuaccaaguuggacucuuugc

SEQ ID NO: 1166911 - RNA, 21 nt, Human
cucuacaugacauucucaaga

SEQ ID NO: 1166912 - RNA, 20 nt, Human
cucuccucagaagacauccg

SEQ ID NO: 1166913 - RNA, 24 nt, Human
cugcagccaaccuugacaggaaau

SEQ ID NO: 1166914 - RNA, 21 nt, Human
cugcauggugucucuguaccc

SEQ ID NO: 1166915 - RNA, 20 nt, Human
cugcgugugggcgggcggac

SEQ ID NO: 1166916 - RNA, 19 nt, Human
cuguacccauuaauaccug

SEQ ID NO: 1166917 - RNA, 18 nt, Human
cuucuggcuucacuguga

SEQ ID NO: 1166918 - RNA, 19 nt, Human
cuugcaucuuggacucugu

SEQ ID NO: 1166919 - RNA, 21 nt, Human
cuuucaccaccccacacacaa

SEQ ID NO: 1166920 - RNA, 19 nt, Human
gacccccacuccucaucuc

SEQ ID NO: 1166921 - RNA, 24 nt, Human
gacucuguuuuacuucacagggca

SEQ ID NO: 1166922 - RNA, 18 nt, Human
gagaucagagccucucac

SEQ ID NO: 1166923 - RNA, 23 nt, Human
gcuccugccucggugcgcgcaca

SEQ ID NO: 1166924 - RNA, 20 nt, Human
gcugcaauucaccagcuacc

SEQ ID NO: 1166925 - RNA, 21 nt, Human
ggcgggcggacagccgggagc

SEQ ID NO: 1166926 - RNA, 19 nt, Human
gggcaggcaagagcaugcu

SEQ ID NO: 1166927 - RNA, 24 nt, Human
gggcaggcaagagcaugcuggauu

SEQ ID NO: 1166928 - RNA, 20 nt, Human
gggcccugaugcugauggag

SEQ ID NO: 1166929 - RNA, 21 nt, Human
ggggcaaggcuuggaggggau

SEQ ID NO: 1166930 - RNA, 18 nt, Human
gguguccuuucaccaccc

SEQ ID NO: 1166931 - RNA, 18 nt, Human
gugcugguaggcugcaug

SEQ ID NO: 1166932 - RNA, 24 nt, Human
uaaaaagucaguuaaagagaagca

SEQ ID NO: 1166933 - RNA, 21 nt, Human
uaauggauuuuacagcucauc

SEQ ID NO: 1166934 - RNA, 24 nt, Human
uaauggauuuuacagcucaucuga

SEQ ID NO: 1166935 - RNA, 18 nt, Human
uccauggggcaaggcuug

SEQ ID NO: 1166936 - RNA, 21 nt, Human
ucggugcgcgcacaaugcagg

SEQ ID NO: 1166937 - RNA, 23 nt, Human
ucggugcgcgcacaaugcaggcu

SEQ ID NO: 1166938 - RNA, 19 nt, Human
ucucacaaggaggucccaa

SEQ ID NO: 1166939 - RNA, 22 nt, Human
ugacagcucagggacuaaggcu

SEQ ID NO: 1166940 - RNA, 21 nt, Human
ugagcacauaugcagggcagg

SEQ ID NO: 1166941 - RNA, 26 nt, Human
ugaggagcuguagaauuugggucggc

SEQ ID NO: 1166942 - RNA, 20 nt, Human
ugaugaugucauaucucauc

SEQ ID NO: 1166943 - RNA, 18 nt, Human
ugcaaacacgaaggaaag

SEQ ID NO: 1166944 - RNA, 20 nt, Human
ugcaagaaacagggagaagg

SEQ ID NO: 1166945 - RNA, 25 nt, Human
ugcccuguguccuccguccuucccc

SEQ ID NO: 1166946 - RNA, 23 nt, Human
ugcgacggauaaaagagggacac

SEQ ID NO: 1166947 - RNA, 22 nt, Human
ugcgcgcacaaugcaggcugcg

SEQ ID NO: 1166948 - RNA, 18 nt, Human
uggcugccuuugaugaug

SEQ ID NO: 1166949 - RNA, 23 nt, Human
ugggaagggaggcacugaugcuc

SEQ ID NO: 1166950 - RNA, 23 nt, Human
uguggcagcugcgugcagccggu

SEQ ID NO: 1166951 - RNA, 20 nt, Human
uuacagggcugcaauucacc

SEQ ID NO: 1166952 - RNA, 24 nt, Human
uucacugugacacacauuuaucuc

SEQ ID NO: 1166953 - RNA, 20 nt, Human
uucaugcaagaaacagggag

SEQ ID NO: 1166954 - RNA, 24 nt, Human
uuuaaaaagucaguuaaagagaag

SEQ ID NO: 1166955 - RNA, 25 nt, Human
aaaaauaaaauccacucacucugcu

SEQ ID NO: 1166956 - RNA, 23 nt, Human
aagcauuccacagcaucagauuc

SEQ ID NO: 1166957 - RNA, 22 nt, Human
acuacacuucaaaugcagaaca

SEQ ID NO: 1166958 - RNA, 19 nt, Human
agaugccagggacauaugg

SEQ ID NO: 1166959 - RNA, 28 nt, Human
auaaaucaacagcuucaacucgcacuca

SEQ ID NO: 1166960 - RNA, 20 nt, Human
caacagcuucaacucgcacu

SEQ ID NO: 1166961 - RNA, 19 nt, Human
caacucgcacucaaagucu

SEQ ID NO: 1166962 - RNA, 22 nt, Human
cacagcaucagauuccagcagg

SEQ ID NO: 1166963 - RNA, 20 nt, Human
cacgcccuucccccacaacc

SEQ ID NO: 1166964 - RNA, 18 nt, Human
cagaagcaaauaaaaaaa

SEQ ID NO: 1166965 - RNA, 25 nt, Human
cagaagcaaauaaaaaaaaaagaug

SEQ ID NO: 1166966 - RNA, 18 nt, Human
caggagcuggcugguugg

SEQ ID NO: 1166967 - RNA, 24 nt, Human
caucaacaauaacaaaaaauaaaa

SEQ ID NO: 1166968 - RNA, 20 nt, Human
ccaaauguuacagugaccac

SEQ ID NO: 1166969 - RNA, 23 nt, Human
ccaagguagggaugauuuucuuu

SEQ ID NO: 1166970 - RNA, 18 nt, Human
ccagcaggagcuggcugg

SEQ ID NO: 1166971 - RNA, 25 nt, Human
cccaccccccaaauguuacagugac

SEQ ID NO: 1166972 - RNA, 22 nt, Human
ccucccugucccaccccccaaa

SEQ ID NO: 1166973 - RNA, 24 nt, Human
ccucccugucccaccccccaaaug

SEQ ID NO: 1166974 - RNA, 18 nt, Human
ccucuuccaagguaggga

SEQ ID NO: 1166975 - RNA, 25 nt, Human
cucaaagucucuuccuuuauagugu

SEQ ID NO: 1166976 - RNA, 18 nt, Human
cucccugucccacccccc

SEQ ID NO: 1166977 - RNA, 21 nt, Human
cuggaggcccucuuccaaggu

SEQ ID NO: 1166978 - RNA, 22 nt, Human
cugguuggagugaguaauggca

SEQ ID NO: 1166979 - RNA, 19 nt, Human
gcagaacaccuacaaagca

SEQ ID NO: 1166980 - RNA, 25 nt, Human
gggaugagaacagcauuccuagaaa

SEQ ID NO: 1166981 - RNA, 21 nt, Human
uaaaaagagcauuauauucug

SEQ ID NO: 1166982 - RNA, 27 nt, Human
uaaacagaagcaaauaaaaaaaaaaga

SEQ ID NO: 1166983 - RNA, 23 nt, Human
uaacaaaaaauaaaauccacuca

SEQ ID NO: 1166984 - RNA, 20 nt, Human
uacagugaccacaaagcaag

SEQ ID NO: 1166985 - RNA, 18 nt, Human
uagcaccuuugaccccaa

SEQ ID NO: 1166986 - RNA, 30 nt, Human
ucacucugcugcuguuucaaaauuucaauu

SEQ ID NO: 1166987 - RNA, 21 nt, Human
ucagauuccagcaggagcugg

SEQ ID NO: 1166988 - RNA, 22 nt, Human
ucuuuagaauuucuccaauugu

SEQ ID NO: 1166989 - RNA, 24 nt, Human
ucuuugauuuuagcaccuuugacc

SEQ ID NO: 1166990 - RNA, 18 nt, Human
ugaacagaugccagggac

SEQ ID NO: 1166991 - RNA, 21 nt, Human
ugaacagaugccagggacaua

SEQ ID NO: 1166992 - RNA, 25 nt, Human
ugaacagaugccagggacauaugga

SEQ ID NO: 1166993 - RNA, 28 nt, Human
ugaguaauggcaacuggaggcccucuuc

SEQ ID NO: 1166994 - RNA, 21 nt, Human
ugggaucauaaggcugugcag

SEQ ID NO: 1166995 - RNA, 20 nt, Human
uucacuacacuucaaaugca

SEQ ID NO: 1166996 - RNA, 24 nt, Human
uuccaagguagggaugauuuucuu

SEQ ID NO: 1166997 - RNA, 19 nt, Human
uugcacgcccuucccccac

SEQ ID NO: 1166998 - RNA, 21 nt, Human
uuuaaaccaucaacaauaaca

SEQ ID NO: 1166999 - RNA, 21 nt, Human
aagaaauauagugacucucau

SEQ ID NO: 1167000 - RNA, 18 nt, Human
cauuucuguuuaaaaguu

SEQ ID NO: 1167001 - RNA, 21 nt, Human
uaaauuuuaaaccuaggguca

SEQ ID NO: 1167002 - RNA, 23 nt, Human
ucuaaauuuuaaaccuaggguca

SEQ ID NO: 1167003 - RNA, 26 nt, Human
ucugaugcuuuucuggggccucuuuu

SEQ ID NO: 1167004 - RNA, 18 nt, Human
uggaauggagcuaagaaa

SEQ ID NO: 1167005 - RNA, 20 nt, Human
uggagcuaagaaauauagug

SEQ ID NO: 1167006 - RNA, 24 nt, Human
uuaaaaguuucccuuuuuuucuga

SEQ ID NO: 1167007 - RNA, 24 nt, Human
uuuuauaauuucugucugucagaa

SEQ ID NO: 1167008 - RNA, 25 nt, Human
aaacaaaaaagggauuuaauguuga

SEQ ID NO: 1167009 - RNA, 27 nt, Human
acuuuaaaagagaaaaacaaaaaaggg

SEQ ID NO: 1167010 - RNA, 18 nt, Human
agagaaaaacaaaaaagg

SEQ ID NO: 1167011 - RNA, 25 nt, Human
agagaaaaacaaaaaagggauuuaa

SEQ ID NO: 1167012 - RNA, 18 nt, Human
agagaaguuaagugcucu

SEQ ID NO: 1167013 - RNA, 21 nt, Human
agagaaguuaagugcucugag

SEQ ID NO: 1167014 - RNA, 21 nt, Human
auaauggucaauuguaaacac

SEQ ID NO: 1167015 - RNA, 21 nt, Human
cggggccaggccacauccauc

SEQ ID NO: 1167016 - RNA, 19 nt, Human
cuggggaauuggcaggcuc

SEQ ID NO: 1167017 - RNA, 21 nt, Human
ucaggagucuccuuugucucu

SEQ ID NO: 1167018 - RNA, 20 nt, Human
ucccucaggagucuccuuug

SEQ ID NO: 1167019 - RNA, 21 nt, Human
ugggaaaaugcuuagcucugg

SEQ ID NO: 1167020 - RNA, 22 nt, Human
uggucaauuguaaacacacuuu

SEQ ID NO: 1167021 - RNA, 24 nt, Human
uguuuuguuuuuuuugcuuuuucc

SEQ ID NO: 1167022 - RNA, 23 nt, Human
uugacacugggaaaaugcuuagc

SEQ ID NO: 1167023 - RNA, 21 nt, Human
aaagcucuuugaugccagccu

SEQ ID NO: 1167024 - RNA, 18 nt, Human
acagugaggagcacgcac

SEQ ID NO: 1167025 - RNA, 21 nt, Human
agcccagagcucacuggcccc

SEQ ID NO: 1167026 - RNA, 22 nt, Human
agggaguggcugagcccagagc

SEQ ID NO: 1167027 - RNA, 22 nt, Human
agugacucaugaggcaucccag

SEQ ID NO: 1167028 - RNA, 19 nt, Human
cagagcucacuggccccuc

SEQ ID NO: 1167029 - RNA, 22 nt, Human
ccaaaggccaaacaucugcagc

SEQ ID NO: 1167030 - RNA, 18 nt, Human
cccucccggagccggggc

SEQ ID NO: 1167031 - RNA, 19 nt, Human
ccucagacagaggagugaa

SEQ ID NO: 1167032 - RNA, 19 nt, Human
cgagcgcgccgcaagaccg

SEQ ID NO: 1167033 - RNA, 19 nt, Human
cugagcccagagcucacug

SEQ ID NO: 1167034 - RNA, 24 nt, Human
cugagcccagagcucacuggcccc

SEQ ID NO: 1167035 - RNA, 18 nt, Human
gcaggagcggggaaaaac

SEQ ID NO: 1167036 - RNA, 20 nt, Human
gcaucagaagggccacguca

SEQ ID NO: 1167037 - RNA, 19 nt, Human
gcucacuggccccucccca

SEQ ID NO: 1167038 - RNA, 18 nt, Human
ggcagugcccacuuagag

SEQ ID NO: 1167039 - RNA, 21 nt, Human
ggccccuccccauccucagac

SEQ ID NO: 1167040 - RNA, 20 nt, Human
ggggaaaaaccuggucggug

SEQ ID NO: 1167041 - RNA, 19 nt, Human
ggugcaggagcggggaaaa

SEQ ID NO: 1167042 - RNA, 24 nt, Human
gugauuuaaucacucaacagacac

SEQ ID NO: 1167043 - RNA, 24 nt, Human
gugcugagaggagacuggaggcac

SEQ ID NO: 1167044 - RNA, 20 nt, Human
uagagucaguggggcauggc

SEQ ID NO: 1167045 - RNA, 21 nt, Human
ucacuggccccuccccauccu

SEQ ID NO: 1167046 - RNA, 20 nt, Human
ucagaagggccacgucagug

SEQ ID NO: 1167047 - RNA, 21 nt, Human
ucucugggugguuucuggcuc

SEQ ID NO: 1167048 - RNA, 19 nt, Human
ugagaggagacuggaggca

SEQ ID NO: 1167049 - RNA, 18 nt, Human
ugauuuaaucacucaaca

SEQ ID NO: 1167050 - RNA, 18 nt, Human
ugcugcagaccugaggau

SEQ ID NO: 1167051 - RNA, 21 nt, Human
uggagguccaaaggccaaaca

SEQ ID NO: 1167052 - RNA, 21 nt, Human
uggucaggacuucucagcugg

SEQ ID NO: 1167053 - RNA, 24 nt, Human
uuacuugagacuggagggaguggc

SEQ ID NO: 1167054 - RNA, 18 nt, Human
uuagagucaguggggcau

SEQ ID NO: 1167055 - RNA, 19 nt, Human
uucucagcuggaccaaaca

SEQ ID NO: 1167056 - RNA, 19 nt, Human
aaaaggagggggaagagua

SEQ ID NO: 1167057 - RNA, 22 nt, Human
aaacaccaagcuucacaaagaa

SEQ ID NO: 1167058 - RNA, 18 nt, Human
aaagaaguaagcuccaca

SEQ ID NO: 1167059 - RNA, 19 nt, Human
aaagugcuaggauuacagg

SEQ ID NO: 1167060 - RNA, 24 nt, Human
aaagugcuaggauuacaggcauga

SEQ ID NO: 1167061 - RNA, 22 nt, Human
aacaguauucaucacaagcuga

SEQ ID NO: 1167062 - RNA, 19 nt, Human
aaccucagaucacugaaag

SEQ ID NO: 1167063 - RNA, 21 nt, Human
aagcugacugaaggguccuug

SEQ ID NO: 1167064 - RNA, 21 nt, Human
aagcuucacaaagaaguaagc

SEQ ID NO: 1167065 - RNA, 24 nt, Human
aaggagcacuuccaaaaccugugc

SEQ ID NO: 1167066 - RNA, 19 nt, Human
aaguagcuuggguuacagg

SEQ ID NO: 1167067 - RNA, 26 nt, Human
aagugcuaggauuacaggcaugagcc

SEQ ID NO: 1167068 - RNA, 23 nt, Human
aaugauaggcacagaugaaaaga

SEQ ID NO: 1167069 - RNA, 19 nt, Human
acaauucauuaacuacuga

SEQ ID NO: 1167070 - RNA, 23 nt, Human
acacugauguauuugcugcaggc

SEQ ID NO: 1167071 - RNA, 18 nt, Human
acagugugcuugucaaau

SEQ ID NO: 1167072 - RNA, 20 nt, Human
accauguuggccaggcuggc

SEQ ID NO: 1167073 - RNA, 24 nt, Human
acccaggcuggagugcaguggcgu

SEQ ID NO: 1167074 - RNA, 21 nt, Human
acccuacccucaacucccagc

SEQ ID NO: 1167075 - RNA, 23 nt, Human
acucaguccugccacaauucauu

SEQ ID NO: 1167076 - RNA, 20 nt, Human
acugaaggguccuugggccu

SEQ ID NO: 1167077 - RNA, 24 nt, Human
acugcuucagacucccaaguagcu

SEQ ID NO: 1167078 - RNA, 18 nt, Human
agaaccagcugccuuaaa

SEQ ID NO: 1167079 - RNA, 21 nt, Human
agaagagaaccagcugccuua

SEQ ID NO: 1167080 - RNA, 19 nt, Human
agacacacccugggccaga

SEQ ID NO: 1167081 - RNA, 21 nt, Human
agaggaggaggagcgagaugg

SEQ ID NO: 1167082 - RNA, 21 nt, Human
agcacuuccaaaaccugugca

SEQ ID NO: 1167083 - RNA, 24 nt, Human
agcggguuucaccauguuggccag

SEQ ID NO: 1167084 - RNA, 20 nt, Human
agcugacugaaggguccuug

SEQ ID NO: 1167085 - RNA, 21 nt, Human
agcuuggauuaaauggcugug

SEQ ID NO: 1167086 - RNA, 21 nt, Human
aggagcacuuccaaaaccugu

SEQ ID NO: 1167087 - RNA, 18 nt, Human
aggcuggagugcaguggc

SEQ ID NO: 1167088 - RNA, 22 nt, Human
agugcaguggcgugacucggcu

SEQ ID NO: 1167089 - RNA, 23 nt, Human
agugcaguggcgugacucggcuc

SEQ ID NO: 1167090 - RNA, 23 nt, Human
augaaacaccaagcuucacaaag

SEQ ID NO: 1167091 - RNA, 21 nt, Human
augaaggacagcuuuccauaa

SEQ ID NO: 1167092 - RNA, 20 nt, Human
auggauuaauaucaaauuga

SEQ ID NO: 1167093 - RNA, 24 nt, Human
caaagugcuaggauuacaggcaug

SEQ ID NO: 1167094 - RNA, 20 nt, Human
caaaugaaacaccaagcuuc

SEQ ID NO: 1167095 - RNA, 19 nt, Human
caaauugaaaggagcacuu

SEQ ID NO: 1167096 - RNA, 19 nt, Human
caacaguauucaucacaag

SEQ ID NO: 1167097 - RNA, 24 nt, Human
caaccuccaccuccuggguuuaag

SEQ ID NO: 1167098 - RNA, 18 nt, Human
caccacaccccaccaggc

SEQ ID NO: 1167099 - RNA, 19 nt, Human
caccacaccccaccaggca

SEQ ID NO: 1167100 - RNA, 25 nt, Human
caccacccuacccucaacucccagc

SEQ ID NO: 1167101 - RNA, 18 nt, Human
caccauguuggccaggcu

SEQ ID NO: 1167102 - RNA, 21 nt, Human
caccauguuggccaggcuggc

SEQ ID NO: 1167103 - RNA, 21 nt, Human
caccauguuggccaggcuggc

SEQ ID NO: 1167104 - RNA, 31 nt, Human
caccauguuggccaggcuggcguugaacucc

SEQ ID NO: 1167105 - RNA, 24 nt, Human
cacccaggcuggagugcaguggcg

SEQ ID NO: 1167106 - RNA, 22 nt, Human
cacccuacccucaacucccagc

SEQ ID NO: 1167107 - RNA, 21 nt, Human
cacugcaaccuccaccuccug

SEQ ID NO: 1167108 - RNA, 23 nt, Human
cacugcaaccuccaccuccuggg

SEQ ID NO: 1167109 - RNA, 18 nt, Human
cacuguccugaagggaga

SEQ ID NO: 1167110 - RNA, 24 nt, Human
cacuguccugaagggagaguccca

SEQ ID NO: 1167111 - RNA, 21 nt, Human
cagagggauagagaaccaagu

SEQ ID NO: 1167112 - RNA, 18 nt, Human
cauauacaccagcccuag

SEQ ID NO: 1167113 - RNA, 24 nt, Human
cauguuggccaggcuggcguugaa

SEQ ID NO: 1167114 - RNA, 19 nt, Human
ccaaagugcuaggauuaca

SEQ ID NO: 1167115 - RNA, 24 nt, Human
ccaaagugcuaggauuacaggcau

SEQ ID NO: 1167116 - RNA, 18 nt, Human
ccacaccccaccaggcau

SEQ ID NO: 1167117 - RNA, 24 nt, Human
ccaccuccuggguuuaagcgauuc

SEQ ID NO: 1167118 - RNA, 22 nt, Human
cccaaguagcuuggguuacagg

SEQ ID NO: 1167119 - RNA, 23 nt, Human
cccaaguagcuuggguuacaggu

SEQ ID NO: 1167120 - RNA, 18 nt, Human
cccacacaaaaaagcacc

SEQ ID NO: 1167121 - RNA, 24 nt, Human
cccacacaaaaaagcaccuucaua

SEQ ID NO: 1167122 - RNA, 24 nt, Human
ccccaaagugcuaggauuacaggc

SEQ ID NO: 1167123 - RNA, 22 nt, Human
ccuccuggguuuaagcgauucu

SEQ ID NO: 1167124 - RNA, 20 nt, Human
ccucuacugauuguccuccc

SEQ ID NO: 1167125 - RNA, 22 nt, Human
ccucuacugauuguccucccca

SEQ ID NO: 1167126 - RNA, 23 nt, Human
ccugaccuaaagugaucugccug

SEQ ID NO: 1167127 - RNA, 22 nt, Human
ccugacuuggucccccaaagug

SEQ ID NO: 1167128 - RNA, 22 nt, Human
cggguuucaccauguuggccag

SEQ ID NO: 1167129 - RNA, 21 nt, Human
cuaggucuuggcuuaaccugg

SEQ ID NO: 1167130 - RNA, 21 nt, Human
cuauacaguagaacugacauu

SEQ ID NO: 1167131 - RNA, 22 nt, Human
cuaugggccuugggugagauuc

SEQ ID NO: 1167132 - RNA, 24 nt, Human
cucacugcaaccuccaccuccugg

SEQ ID NO: 1167133 - RNA, 19 nt, Human
cucagaauuggaacagagg

SEQ ID NO: 1167134 - RNA, 19 nt, Human
cucccugcuaagcuugucc

SEQ ID NO: 1167135 - RNA, 21 nt, Human
cuccuggguuuaagcgauucu

SEQ ID NO: 1167136 - RNA, 20 nt, Human
cucugucacccaggcuggag

SEQ ID NO: 1167137 - RNA, 22 nt, Human
cugacaccacccuacccucaac

SEQ ID NO: 1167138 - RNA, 23 nt, Human
cugcaaccuccaccuccuggguu

SEQ ID NO: 1167139 - RNA, 21 nt, Human
cuggcuucaagugugacucag

SEQ ID NO: 1167140 - RNA, 18 nt, Human
cugucacccaggcuggag

SEQ ID NO: 1167141 - RNA, 21 nt, Human
cuugcucugucacccaggcug

SEQ ID NO: 1167142 - RNA, 18 nt, Human
gaccacgguaccugguuu

SEQ ID NO: 1167143 - RNA, 21 nt, Human
gagauggagucuugcucuguc

SEQ ID NO: 1167144 - RNA, 22 nt, Human
gaucacugaaagaggcacuuaa

SEQ ID NO: 1167145 - RNA, 18 nt, Human
gauuacaggcaugagcca

SEQ ID NO: 1167146 - RNA, 21 nt, Human
gauuacaggcaugagccacca

SEQ ID NO: 1167147 - RNA, 22 nt, Human
gauuacaggcaugagccaccac

SEQ ID NO: 1167148 - RNA, 21 nt, Human
gcaaccuccaccuccuggguu

SEQ ID NO: 1167149 - RNA, 20 nt, Human
gccacaauucauuaacuacu

SEQ ID NO: 1167150 - RNA, 20 nt, Human
gccaccacaccccaccaggc

SEQ ID NO: 1167151 - RNA, 23 nt, Human
gcggguuucaccauguuggccag

SEQ ID NO: 1167152 - RNA, 25 nt, Human
gcucugucacccaggcuggagugca

SEQ ID NO: 1167153 - RNA, 19 nt, Human
gcugcaggccugggguggu

SEQ ID NO: 1167154 - RNA, 19 nt, Human
gcuggagugcaguggcgug

SEQ ID NO: 1167155 - RNA, 21 nt, Human
gcuucaagugugacucagcac

SEQ ID NO: 1167156 - RNA, 23 nt, Human
gcuuggauuaaauggcugugugu

SEQ ID NO: 1167157 - RNA, 19 nt, Human
ggacucagaauuggaacag

SEQ ID NO: 1167158 - RNA, 19 nt, Human
ggauuacaggcaugagcca

SEQ ID NO: 1167159 - RNA, 22 nt, Human
ggauuacaggcaugagccacca

SEQ ID NO: 1167160 - RNA, 19 nt, Human
ggccaggcuggcguugaac

SEQ ID NO: 1167161 - RNA, 22 nt, Human
ggguuucaccauguuggccagg

SEQ ID NO: 1167162 - RNA, 18 nt, Human
ggucuuggcuuaaccugg

SEQ ID NO: 1167163 - RNA, 24 nt, Human
gguuacaggugaccgccaccauac

SEQ ID NO: 1167164 - RNA, 21 nt, Human
uaaauggcuguguguguguau

SEQ ID NO: 1167165 - RNA, 19 nt, Human
uaaccuggucccugccucu

SEQ ID NO: 1167166 - RNA, 19 nt, Human
uaagaagauagaaaagaca

SEQ ID NO: 1167167 - RNA, 23 nt, Human
uacaggcaugagccaccacaccc

SEQ ID NO: 1167168 - RNA, 22 nt, Human
uacuuuggcuuuguuuuuauuc

SEQ ID NO: 1167169 - RNA, 22 nt, Human
uagcucccugcuaagcuugucc

SEQ ID NO: 1167170 - RNA, 18 nt, Human
uaggauuacaggcaugag

SEQ ID NO: 1167171 - RNA, 22 nt, Human
uaggauuacaggcaugagccac

SEQ ID NO: 1167172 - RNA, 24 nt, Human
uaggauuacaggcaugagccacca

SEQ ID NO: 1167173 - RNA, 24 nt, Human
uaggauuacaggcaugagccacca

SEQ ID NO: 1167174 - RNA, 24 nt, Human
uaguagacagcggguuucaccaug

SEQ ID NO: 1167175 - RNA, 23 nt, Human
uauaguagcuucuuuccaaaggg

SEQ ID NO: 1167176 - RNA, 22 nt, Human
uauucagugcuuugccauuuca

SEQ ID NO: 1167177 - RNA, 18 nt, Human
ucaaugccuauggaggga

SEQ ID NO: 1167178 - RNA, 24 nt, Human
ucacccaggcuggagugcaguggc

SEQ ID NO: 1167179 - RNA, 23 nt, Human
ucacugcaaccuccaccuccugg

SEQ ID NO: 1167180 - RNA, 24 nt, Human
ucacugcaaccuccaccuccuggg

SEQ ID NO: 1167181 - RNA, 25 nt, Human
ucacugcaaccuccaccuccugggu

SEQ ID NO: 1167182 - RNA, 22 nt, Human
ucacugcuuaaauagaguaguu

SEQ ID NO: 1167183 - RNA, 19 nt, Human
ucagagacaugcuggcuuc

SEQ ID NO: 1167184 - RNA, 21 nt, Human
ucagaguaagcaugggaaucc

SEQ ID NO: 1167185 - RNA, 21 nt, Human
ucagcacauccccagcuaugc

SEQ ID NO: 1167186 - RNA, 22 nt, Human
ucaucuauuccaaugacuugga

SEQ ID NO: 1167187 - RNA, 23 nt, Human
ucccaaguagcuuggguuacagg

SEQ ID NO: 1167188 - RNA, 18 nt, Human
ucccagcagcugccaugu

SEQ ID NO: 1167189 - RNA, 23 nt, Human
ucccagcagcugccauguggugc

SEQ ID NO: 1167190 - RNA, 19 nt, Human
uccuggguuuaagcgauuc

SEQ ID NO: 1167191 - RNA, 20 nt, Human
ucuacugauuguccucccca

SEQ ID NO: 1167192 - RNA, 20 nt, Human
ucucacugcuuaaauagagu

SEQ ID NO: 1167193 - RNA, 24 nt, Human
ucugucacccaggcuggagugcag

SEQ ID NO: 1167194 - RNA, 23 nt, Human
ucuugcucugucacccaggcugg

SEQ ID NO: 1167195 - RNA, 24 nt, Human
ucuugcucugucacccaggcugga

SEQ ID NO: 1167196 - RNA, 21 nt, Human
ucuugggguccaugauucgag

SEQ ID NO: 1167197 - RNA, 23 nt, Human
ugaaacaccaagcuucacaaaga

SEQ ID NO: 1167198 - RNA, 23 nt, Human
ugaaagaggcacuuaagaagaua

SEQ ID NO: 1167199 - RNA, 21 nt, Human
ugaagacaguuuuaguaaaca

SEQ ID NO: 1167200 - RNA, 19 nt, Human
ugaagcauagcucccugcu

SEQ ID NO: 1167201 - RNA, 22 nt, Human
ugaaggguccuugggccuugag

SEQ ID NO: 1167202 - RNA, 21 nt, Human
ugaauacucaagguaggauuu

SEQ ID NO: 1167203 - RNA, 18 nt, Human
ugacaccacccuacccuc

SEQ ID NO: 1167204 - RNA, 20 nt, Human
ugacaccacccuacccucaa

SEQ ID NO: 1167205 - RNA, 21 nt, Human
ugacaccacccuacccucaac

SEQ ID NO: 1167206 - RNA, 18 nt, Human
ugaccuaaagugaucugc

SEQ ID NO: 1167207 - RNA, 24 nt, Human
ugacucagcacauccccagcuaug

SEQ ID NO: 1167208 - RNA, 18 nt, Human
ugacucggcucacugcaa

SEQ ID NO: 1167209 - RNA, 23 nt, Human
ugacuuggucccccaaagugcua

SEQ ID NO: 1167210 - RNA, 22 nt, Human
ugagagagagagaagagaaaua

SEQ ID NO: 1167211 - RNA, 23 nt, Human
ugagagagagagaagagaaauac

SEQ ID NO: 1167212 - RNA, 18 nt, Human
ugcccacacaaaaaagca

SEQ ID NO: 1167213 - RNA, 20 nt, Human
ugcugcccugucagaaaagc

SEQ ID NO: 1167214 - RNA, 19 nt, Human
ugcuggcuaugaugagaga

SEQ ID NO: 1167215 - RNA, 26 nt, Human
ugcuugagaaaaggagggggaagagu

SEQ ID NO: 1167216 - RNA, 25 nt, Human
ugcuuugccauuucaaaaaauuuca

SEQ ID NO: 1167217 - RNA, 18 nt, Human
uggaaagauccuugguuu

SEQ ID NO: 1167218 - RNA, 21 nt, Human
uggagaggacagugugcuugu

SEQ ID NO: 1167219 - RNA, 19 nt, Human
uggagucuugcucugucac

SEQ ID NO: 1167220 - RNA, 21 nt, Human
uggagugcaguggcgugacuc

SEQ ID NO: 1167221 - RNA, 23 nt, Human
uggagugcaguggcgugacucgg

SEQ ID NO: 1167222 - RNA, 26 nt, Human
uggaugguauuacuggacuuuuccug

SEQ ID NO: 1167223 - RNA, 24 nt, Human
uggccaggcuggcguugaacuccu

SEQ ID NO: 1167224 - RNA, 20 nt, Human
uggcuguguguguguaugug

SEQ ID NO: 1167225 - RNA, 21 nt, Human
ugggguggugguggguccugg

SEQ ID NO: 1167226 - RNA, 18 nt, Human
ugguagcuagacaguacu

SEQ ID NO: 1167227 - RNA, 25 nt, Human
ugguggggagagugcagugauugug

SEQ ID NO: 1167228 - RNA, 22 nt, Human
uguggugcugagagaagaucug

SEQ ID NO: 1167229 - RNA, 24 nt, Human
uuaguagacagcggguuucaccau

SEQ ID NO: 1167230 - RNA, 21 nt, Human
uuagucaaugccuauggaggg

SEQ ID NO: 1167231 - RNA, 18 nt, Human
uugagaaaaggaggggga

SEQ ID NO: 1167232 - RNA, 24 nt, Human
uugcucugucacccaggcuggagu

SEQ ID NO: 1167233 - RNA, 21 nt, Human
uuggguuacaggugaccgcca

SEQ ID NO: 1167234 - RNA, 22 nt, Human
uuggguuacaggugaccgccac

SEQ ID NO: 1167235 - RNA, 19 nt, Human
uuggucccccaaagugcua

SEQ ID NO: 1167236 - RNA, 23 nt, Human
uuuaagcgauucuacugcuucag

SEQ ID NO: 1167237 - RNA, 26 nt, Human
uuuauauuuauucagugcuuugccau

SEQ ID NO: 1167238 - RNA, 26 nt, Human
uuucaccauguuggccaggcuggcgu

SEQ ID NO: 1167239 - RNA, 19 nt, Human
uuuguggaaagauccuugg

SEQ ID NO: 1167240 - RNA, 24 nt, Human
uuuuuaguagacagcggguuucac

SEQ ID NO: 1167241 - RNA, 25 nt, Human
uuuuugaagaaaacuaauuagcaug

SEQ ID NO: 1167242 - RNA, 22 nt, Human
uuuuuuguauuuuuaguagaca

SEQ ID NO: 1167243 - RNA, 23 nt, Human
aaaaaacacccccaaacaaaaaa

SEQ ID NO: 1167244 - RNA, 24 nt, Human
aaaaaacacccccaaacaaaaaac

SEQ ID NO: 1167245 - RNA, 18 nt, Human
aaaaaccaccacaggcaa

SEQ ID NO: 1167246 - RNA, 23 nt, Human
aaaacaaacaaacaaaaaauccc

SEQ ID NO: 1167247 - RNA, 18 nt, Human
aaaacacccccaaacaaa

SEQ ID NO: 1167248 - RNA, 21 nt, Human
aaaaccaaaaccaaaccaaaa

SEQ ID NO: 1167249 - RNA, 20 nt, Human
aaaauccuugaccugaugua

SEQ ID NO: 1167250 - RNA, 26 nt, Human
aaacaaacaaaaaauccccagauagu

SEQ ID NO: 1167251 - RNA, 24 nt, Human
aaacaaacaaacaaaaaaucccca

SEQ ID NO: 1167252 - RNA, 18 nt, Human
aaacacccccaaacaaaa

SEQ ID NO: 1167253 - RNA, 21 nt, Human
aaaccaaaaaacacccccaaa

SEQ ID NO: 1167254 - RNA, 24 nt, Human
aaaccaaaacaaacaaacaaaaaa

SEQ ID NO: 1167255 - RNA, 26 nt, Human
aaaccaaaaccaaaaaacacccccaa

SEQ ID NO: 1167256 - RNA, 24 nt, Human
aaaccaaaaccaaaccaaaacaaa

SEQ ID NO: 1167257 - RNA, 22 nt, Human
aaaccaaaccaaaacaaacaaa

SEQ ID NO: 1167258 - RNA, 21 nt, Human
aaaccaccacaggcaacacac

SEQ ID NO: 1167259 - RNA, 20 nt, Human
aaaccacuugacaugaguuu

SEQ ID NO: 1167260 - RNA, 24 nt, Human
aaagagcgauuuugaaccugaaca

SEQ ID NO: 1167261 - RNA, 27 nt, Human
aaauacagaaaaucaaaccaaaaccaa

SEQ ID NO: 1167262 - RNA, 22 nt, Human
aaauuuucccccaaaauuaucu

SEQ ID NO: 1167263 - RNA, 18 nt, Human
aacaaaaaaccaccacag

SEQ ID NO: 1167264 - RNA, 21 nt, Human
aacaaaaaauccccagauaac

SEQ ID NO: 1167265 - RNA, 27 nt, Human
aacaaaauacagaaaaucaaaccaaaa

SEQ ID NO: 1167266 - RNA, 19 nt, Human
aacaacagacacuggggcc

SEQ ID NO: 1167267 - RNA, 21 nt, Human
aacacccccaaacaaaaaacc

SEQ ID NO: 1167268 - RNA, 23 nt, Human
aacaggaaugagaaaaauacaag

SEQ ID NO: 1167269 - RNA, 20 nt, Human
aaccaaaccaaaacaaacaa

SEQ ID NO: 1167270 - RNA, 22 nt, Human
aacucuuuuucacaaaaccagg

SEQ ID NO: 1167271 - RNA, 20 nt, Human
aagaaucuuccauucuuguu

SEQ ID NO: 1167272 - RNA, 18 nt, Human
aagcagugcuccucugga

SEQ ID NO: 1167273 - RNA, 25 nt, Human
aaggaacaacagacacuggggccua

SEQ ID NO: 1167274 - RNA, 23 nt, Human
aaggacacaaagaaaggaacagu

SEQ ID NO: 1167275 - RNA, 21 nt, Human
aaucugugugccuaucuuccu

SEQ ID NO: 1167276 - RNA, 21 nt, Human
acaaagaaaggaacaacagac

SEQ ID NO: 1167277 - RNA, 20 nt, Human
acaacagauggccacccaga

SEQ ID NO: 1167278 - RNA, 24 nt, Human
acagcguucacaaugcugguauua

SEQ ID NO: 1167279 - RNA, 20 nt, Human
accaaaacaaacaaacaaaa

SEQ ID NO: 1167280 - RNA, 19 nt, Human
accaaaaccaaaccaaaac

SEQ ID NO: 1167281 - RNA, 18 nt, Human
accaaaccaaaacaaaca

SEQ ID NO: 1167282 - RNA, 21 nt, Human
accaccacaggcaacacacaa

SEQ ID NO: 1167283 - RNA, 21 nt, Human
accaggcagagaucugcucau

SEQ ID NO: 1167284 - RNA, 19 nt, Human
accaugaccuuaaaauaac

SEQ ID NO: 1167285 - RNA, 19 nt, Human
acccagaaauuagagccag

SEQ ID NO: 1167286 - RNA, 20 nt, Human
acccagaaauuagagccaga

SEQ ID NO: 1167287 - RNA, 18 nt, Human
accccaccaaaaccacaa

SEQ ID NO: 1167288 - RNA, 19 nt, Human
agauuuuggagauuagcuu

SEQ ID NO: 1167289 - RNA, 23 nt, Human
agcaaacuaacacagaacagaaa

SEQ ID NO: 1167290 - RNA, 23 nt, Human
agcagggaaaauaacuacugggu

SEQ ID NO: 1167291 - RNA, 24 nt, Human
agccuauuaaucuagaaauaauuu

SEQ ID NO: 1167292 - RNA, 22 nt, Human
aggaagaacaaugauuauaacc

SEQ ID NO: 1167293 - RNA, 26 nt, Human
agggauagucuaucugaugcuuaaau

SEQ ID NO: 1167294 - RNA, 19 nt, Human
auagucuaucugaugcuua

SEQ ID NO: 1167295 - RNA, 22 nt, Human
caaaaaacacccccaaacaaaa

SEQ ID NO: 1167296 - RNA, 22 nt, Human
caaaaaaccaccacaggcaaca

SEQ ID NO: 1167297 - RNA, 19 nt, Human
caaaacaaacaaacaaaaa

SEQ ID NO: 1167298 - RNA, 21 nt, Human
caaaaccaaaaaacaccccca

SEQ ID NO: 1167299 - RNA, 23 nt, Human
caaaauaaucuguacaacaaaac

SEQ ID NO: 1167300 - RNA, 21 nt, Human
caaaauauaccacuuuuaacu

SEQ ID NO: 1167301 - RNA, 27 nt, Human
caaacaaaaaaccaccacaaucaacgg

SEQ ID NO: 1167302 - RNA, 19 nt, Human
caaacaaaaaauccccaga

SEQ ID NO: 1167303 - RNA, 22 nt, Human
caaacaaacaaaaaauccccag

SEQ ID NO: 1167304 - RNA, 20 nt, Human
caaaccaaaacaaacaaaca

SEQ ID NO: 1167305 - RNA, 21 nt, Human
caaaccaaaacaaacaaacaa

SEQ ID NO: 1167306 - RNA, 19 nt, Human
caaacuaacacagaacaga

SEQ ID NO: 1167307 - RNA, 23 nt, Human
caacagauggccacccagaaauu

SEQ ID NO: 1167308 - RNA, 22 nt, Human
cacaaagaaaggaacaacagac

SEQ ID NO: 1167309 - RNA, 21 nt, Human
cacaagcuagguuauuucuag

SEQ ID NO: 1167310 - RNA, 24 nt, Human
cacaagcuuaagauguuuccuaga

SEQ ID NO: 1167311 - RNA, 21 nt, Human
caccccaccaaaaccacaaga

SEQ ID NO: 1167312 - RNA, 21 nt, Human
cacuagacauauaugaacuaa

SEQ ID NO: 1167313 - RNA, 20 nt, Human
cagaacagaaaaccaaauac

SEQ ID NO: 1167314 - RNA, 21 nt, Human
caggaaauguaaaugcaacca

SEQ ID NO: 1167315 - RNA, 22 nt, Human
caggaaauguaaaugcaaccau

SEQ ID NO: 1167316 - RNA, 20 nt, Human
caucccaccaccccaccaaa

SEQ ID NO: 1167317 - RNA, 20 nt, Human
caucccaccaccccaccaag

SEQ ID NO: 1167318 - RNA, 22 nt, Human
caucucuuucaccuagugcacu

SEQ ID NO: 1167319 - RNA, 26 nt, Human
caugccaaaaauauaaaaccaaaacc

SEQ ID NO: 1167320 - RNA, 18 nt, Human
ccaaaaccaaaaaacacc

SEQ ID NO: 1167321 - RNA, 21 nt, Human
ccaaaaccaaaaaacaccccc

SEQ ID NO: 1167322 - RNA, 22 nt, Human
ccaaaaccaaaaaacaccccca

SEQ ID NO: 1167323 - RNA, 19 nt, Human
ccaaaaccaaaccaaaaca

SEQ ID NO: 1167324 - RNA, 23 nt, Human
ccaaaaccaaaccaaaacaaaca

SEQ ID NO: 1167325 - RNA, 19 nt, Human
ccaaacaaaaaaccaccac

SEQ ID NO: 1167326 - RNA, 23 nt, Human
ccaaacaaaaaaccaccacaggc

SEQ ID NO: 1167327 - RNA, 21 nt, Human
cccaaacaaaaaaccaccaca

SEQ ID NO: 1167328 - RNA, 23 nt, Human
cccaccaccccaccaaaaccaca

SEQ ID NO: 1167329 - RNA, 20 nt, Human
ccccaaacaaaaaaccacca

SEQ ID NO: 1167330 - RNA, 22 nt, Human
ccccaccaaaaccacaagagaa

SEQ ID NO: 1167331 - RNA, 20 nt, Human
cccccaaacaaaaaaccacc

SEQ ID NO: 1167332 - RNA, 22 nt, Human
cccccaaacaaaaaaccaccac

SEQ ID NO: 1167333 - RNA, 23 nt, Human
cccuaacugaacugucacucuuc

SEQ ID NO: 1167334 - RNA, 19 nt, Human
cccugacuucuccaaaagc

SEQ ID NO: 1167335 - RNA, 23 nt, Human
ccugaaccuaaaaguuaaaaaaa

SEQ ID NO: 1167336 - RNA, 20 nt, Human
cuaaaauaaaaauagguggc

SEQ ID NO: 1167337 - RNA, 21 nt, Human
cucucccugacuucuccaaaa

SEQ ID NO: 1167338 - RNA, 24 nt, Human
cugaugcuuaaauugaucuuuaau

SEQ ID NO: 1167339 - RNA, 23 nt, Human
cugcaucccaccaccccaccaaa

SEQ ID NO: 1167340 - RNA, 18 nt, Human
cugugugccuaucuuccu

SEQ ID NO: 1167341 - RNA, 22 nt, Human
cuuucaguuccauacguuguuu

SEQ ID NO: 1167342 - RNA, 23 nt, Human
cuuucuaggcuuaugucuuaaua

SEQ ID NO: 1167343 - RNA, 22 nt, Human
gagaaacccuaaaaauccuuga

SEQ ID NO: 1167344 - RNA, 21 nt, Human
gagaagagcagggaaaauaac

SEQ ID NO: 1167345 - RNA, 20 nt, Human
gcaaaauauaccacuuuuaa

SEQ ID NO: 1167346 - RNA, 24 nt, Human
gccuagacuaaaaauuguugaagg

SEQ ID NO: 1167347 - RNA, 20 nt, Human
gcugguauuaaucagcuaca

SEQ ID NO: 1167348 - RNA, 22 nt, Human
gcuuaaaaccaccuacacugcc

SEQ ID NO: 1167349 - RNA, 23 nt, Human
ggaaaguauacuacuguauuccu

SEQ ID NO: 1167350 - RNA, 21 nt, Human
ggcaaaguaaaagucauggaa

SEQ ID NO: 1167351 - RNA, 20 nt, Human
gguggagggugggaggaggg

SEQ ID NO: 1167352 - RNA, 20 nt, Human
guauuaaucagcuacauauu

SEQ ID NO: 1167353 - RNA, 20 nt, Human
gucaguugccuccaccuuau

SEQ ID NO: 1167354 - RNA, 23 nt, Human
uaaaaccaaaaccaaaccaaaac

SEQ ID NO: 1167355 - RNA, 24 nt, Human
uaaaugaugagaacucaaggacac

SEQ ID NO: 1167356 - RNA, 27 nt, Human
uaacaaaauacagaaaaucaaaccaaa

SEQ ID NO: 1167357 - RNA, 21 nt, Human
uaacacagaacagaaaaccaa

SEQ ID NO: 1167358 - RNA, 21 nt, Human
uaaccugauucccuaucuaaa

SEQ ID NO: 1167359 - RNA, 24 nt, Human
uaaccuucugcaucccaccacccc

SEQ ID NO: 1167360 - RNA, 18 nt, Human
uaagaaucuuccauucuu

SEQ ID NO: 1167361 - RNA, 20 nt, Human
uaauacucccgaaguggcac

SEQ ID NO: 1167362 - RNA, 24 nt, Human
uaauuccaccucccccuuuuuuuc

SEQ ID NO: 1167363 - RNA, 20 nt, Human
uacaacaaaaccacuugaca

SEQ ID NO: 1167364 - RNA, 21 nt, Human
uacaacaaaaccacuugacau

SEQ ID NO: 1167365 - RNA, 20 nt, Human
uaccccugaaccuaaaaguu

SEQ ID NO: 1167366 - RNA, 19 nt, Human
uacgaggaagaaucugugu

SEQ ID NO: 1167367 - RNA, 19 nt, Human
uacucuguaaacuuggaaa

SEQ ID NO: 1167368 - RNA, 18 nt, Human
uagaauaucuagaauauu

SEQ ID NO: 1167369 - RNA, 21 nt, Human
uagaauccauuccaagugguu

SEQ ID NO: 1167370 - RNA, 23 nt, Human
uagccuauuaaucuagaaauaau

SEQ ID NO: 1167371 - RNA, 21 nt, Human
uaggcaugaauauauucaacc

SEQ ID NO: 1167372 - RNA, 22 nt, Human
uagggcaaaguaaaagucaugg

SEQ ID NO: 1167373 - RNA, 24 nt, Human
uaguuuuguguuaggcaggaggaa

SEQ ID NO: 1167374 - RNA, 22 nt, Human
uauauaacaaccugcacaugua

SEQ ID NO: 1167375 - RNA, 22 nt, Human
uauuacacacuagacauauaug

SEQ ID NO: 1167376 - RNA, 18 nt, Human
uauuuaagaaucuuccau

SEQ ID NO: 1167377 - RNA, 20 nt, Human
ucaacaggaaugagaaaaaa

SEQ ID NO: 1167378 - RNA, 20 nt, Human
ucaaggacacaaagaaagga

SEQ ID NO: 1167379 - RNA, 20 nt, Human
ucaaucucuauuuuguccua

SEQ ID NO: 1167380 - RNA, 23 nt, Human
ucagcuuaagcagugcuccucug

SEQ ID NO: 1167381 - RNA, 24 nt, Human
uccacaaauuuucccccaaaauua

SEQ ID NO: 1167382 - RNA, 20 nt, Human
uccaccucccccuuuuuuuc

SEQ ID NO: 1167383 - RNA, 23 nt, Human
ucccaccaccccaccaaaaccac

SEQ ID NO: 1167384 - RNA, 25 nt, Human
ucccaccaccccaccaaaaccacaa

SEQ ID NO: 1167385 - RNA, 21 nt, Human
ucccugacuucuccaaaagcu

SEQ ID NO: 1167386 - RNA, 21 nt, Human
ucucucccugacuucuccaaa

SEQ ID NO: 1167387 - RNA, 18 nt, Human
ucuuguuauaagcuuccu

SEQ ID NO: 1167388 - RNA, 21 nt, Human
ugaaagaaugguguaggagua

SEQ ID NO: 1167389 - RNA, 18 nt, Human
ugaaagagcgauuuugaa

SEQ ID NO: 1167390 - RNA, 23 nt, Human
ugaagcuacuuuucagaagcuag

SEQ ID NO: 1167391 - RNA, 19 nt, Human
ugaggguggagggugggag

SEQ ID NO: 1167392 - RNA, 18 nt, Human
ugagguagguaaucaaca

SEQ ID NO: 1167393 - RNA, 23 nt, Human
ugaguuuaccuauauaacaaccu

SEQ ID NO: 1167394 - RNA, 21 nt, Human
ugauauuggaguagcauuuca

SEQ ID NO: 1167395 - RNA, 24 nt, Human
ugauguaaagcccaagaggcaguu

SEQ ID NO: 1167396 - RNA, 23 nt, Human
ugcaucccaccaccccaccaaaa

SEQ ID NO: 1167397 - RNA, 24 nt, Human
ugcaucccaccaccccaccaaaac

SEQ ID NO: 1167398 - RNA, 20 nt, Human
ugccaaaaauauaaaaccaa

SEQ ID NO: 1167399 - RNA, 26 nt, Human
ugccaaaaauauaaaaccaaaaccaa

SEQ ID NO: 1167400 - RNA, 18 nt, Human
ugggaggagggagaagag

SEQ ID NO: 1167401 - RNA, 25 nt, Human
ugggaggagggagaagagcagggaa

SEQ ID NO: 1167402 - RNA, 20 nt, Human
ugugcaugauucucuguacu

SEQ ID NO: 1167403 - RNA, 25 nt, Human
ugugugccuaucuuccugucuucag

SEQ ID NO: 1167404 - RNA, 24 nt, Human
uguuuagcaucuauacaaagcaaa

SEQ ID NO: 1167405 - RNA, 20 nt, Human
uuaauuaugaagcuacuuuu

SEQ ID NO: 1167406 - RNA, 23 nt, Human
uucacaaugcugguauuaaucag

SEQ ID NO: 1167407 - RNA, 21 nt, Human
uucauuuuaucuuuaugauga

SEQ ID NO: 1167408 - RNA, 21 nt, Human
uucucauuuagaaguaggagc

SEQ ID NO: 1167409 - RNA, 20 nt, Human
uugaaggucuccuuucacua

SEQ ID NO: 1167410 - RNA, 20 nt, Human
uuuaagaaucuuccauucuu

SEQ ID NO: 1167411 - RNA, 19 nt, Human
uuuccuagaauccauucca

SEQ ID NO: 1167412 - RNA, 23 nt, Human
aaaaaauagcaaaacuaaaaacu

SEQ ID NO: 1167413 - RNA, 21 nt, Human
aaaaauagcaaaacuaaaaac

SEQ ID NO: 1167414 - RNA, 22 nt, Human
aaaaauagcaaaacuaaaaacu

SEQ ID NO: 1167415 - RNA, 26 nt, Human
aaacauuugacaagauuuuaaaaaua

SEQ ID NO: 1167416 - RNA, 27 nt, Human
aaagaagccaguucugaaguauuuaca

SEQ ID NO: 1167417 - RNA, 21 nt, Human
aaagcaaagaagguuuccucc

SEQ ID NO: 1167418 - RNA, 21 nt, Human
aacaaaguugggaauaguuua

SEQ ID NO: 1167419 - RNA, 18 nt, Human
aagugcugagguggaaac

SEQ ID NO: 1167420 - RNA, 23 nt, Human
aaguggcugcuucuggagucuuc

SEQ ID NO: 1167421 - RNA, 21 nt, Human
aauacaaaauacagaaacaaa

SEQ ID NO: 1167422 - RNA, 30 nt, Human
aauacaaaauacagaaacaaaaaauugaaa

SEQ ID NO: 1167423 - RNA, 25 nt, Human
aauacagaaacaaaaaauugaacaa

SEQ ID NO: 1167424 - RNA, 19 nt, Human
acaaaauacagaaacaaaa

SEQ ID NO: 1167425 - RNA, 18 nt, Human
acaaaauccuuacaccca

SEQ ID NO: 1167426 - RNA, 18 nt, Human
acaaagcagauguguccc

SEQ ID NO: 1167427 - RNA, 25 nt, Human
acacacacacacaaacacacacaca

SEQ ID NO: 1167428 - RNA, 25 nt, Human
acacacacacacacacacaaacaca

SEQ ID NO: 1167429 - RNA, 27 nt, Human
acacacacacacacacacaaacacaca

SEQ ID NO: 1167430 - RNA, 30 nt, Human; identical to SEQ ID NO: 680238

SEQ ID NO: 1167431 - RNA, 23 nt, Human
acacacacccccaccacaaacac

SEQ ID NO: 1167432 - RNA, 25 nt, Human
acacacaggcacagacguguguaug

SEQ ID NO: 1167433 - RNA, 25 nt, Human
acagaaacaaaaaauugaacaaaaa

SEQ ID NO: 1167434 - RNA, 21 nt, Human
acagaauaauaauacauagag

SEQ ID NO: 1167435 - RNA, 19 nt, Human
acagacguguguaugugug

SEQ ID NO: 1167436 - RNA, 19 nt, Human
acagagaaaucacaccaga

SEQ ID NO: 1167437 - RNA, 23 nt, Human
accaauucccuucacaaguaacc

SEQ ID NO: 1167438 - RNA, 22 nt, Human
agaaacaaaaaauugaacaaaa

SEQ ID NO: 1167439 - RNA, 19 nt, Human
agaagguaagacagagaaa

SEQ ID NO: 1167440 - RNA, 21 nt, Human
agaauaauaauacauagagca

SEQ ID NO: 1167441 - RNA, 18 nt, Human
agaaucugacaauguaca

SEQ ID NO: 1167442 - RNA, 20 nt, Human
agagcaauuugguuaaauua

SEQ ID NO: 1167443 - RNA, 18 nt, Human
agagucuacuaaguggcu

SEQ ID NO: 1167444 - RNA, 18 nt, Human
agcugguggagacaaccu

SEQ ID NO: 1167445 - RNA, 18 nt, Human
agcugguggagacaaccu

SEQ ID NO: 1167446 - RNA, 21 nt, Human
aggcacagacguguguaugug

SEQ ID NO: 1167447 - RNA, 22 nt, Human
auggacagcaggguggccgaaa

SEQ ID NO: 1167448 - RNA, 19 nt, Human
augugucccucuguguagg

SEQ ID NO: 1167449 - RNA, 25 nt, Human
auuccacacacacacacacacacaa

SEQ ID NO: 1167450 - RNA, 23 nt, Human
caaacacagccuuacacucacgc

SEQ ID NO: 1167451 - RNA, 22 nt, Human
caacccaacaaaauggaaaaaa

SEQ ID NO: 1167452 - RNA, 19 nt, Human
cacacaaacacacacacac

SEQ ID NO: 1167453 - RNA, 22 nt, Human
cacacacaaacacacacacaca

SEQ ID NO: 1167454 - RNA, 28 nt, Human
cacacacacacacacaaacacacacaca

SEQ ID NO: 1167455 - RNA, 29 nt, Human
cacacacacacaggcacagacguguguag

SEQ ID NO: 1167456 - RNA, 24 nt, Human
cacacacacaggcacagacgugug

SEQ ID NO: 1167457 - RNA, 22 nt, Human
cacacacccccaccacaaacac

SEQ ID NO: 1167458 - RNA, 18 nt, Human
cacacacccccaccaccc

SEQ ID NO: 1167459 - RNA, 18 nt, Human
cacaccagaaauaaaaua

SEQ ID NO: 1167460 - RNA, 20 nt, Human
cacacccccaccacaaacac

SEQ ID NO: 1167461 - RNA, 22 nt, Human
cacccccaccacaaacacagcc

SEQ ID NO: 1167462 - RNA, 23 nt, Human
caccuuucucaauaaaugcauca

SEQ ID NO: 1167463 - RNA, 18 nt, Human
cacgauggacagcagggu

SEQ ID NO: 1167464 - RNA, 22 nt, Human
cacugaucucugaacacaaagg

SEQ ID NO: 1167465 - RNA, 19 nt, Human
caggccccccacaaaaucc

SEQ ID NO: 1167466 - RNA, 20 nt, Human
caguaaacccuucccgggca

SEQ ID NO: 1167467 - RNA, 26 nt, Human
caucccucaagaaacaaaguugggaa

SEQ ID NO: 1167468 - RNA, 18 nt, Human
ccaaaaauacagcccagg

SEQ ID NO: 1167469 - RNA, 21 nt, Human
ccacacacacacacacacaca

SEQ ID NO: 1167470 - RNA, 23 nt, Human
ccacacacacacacacacacaaa

SEQ ID NO: 1167471 - RNA, 20 nt, Human
ccacagugggaguuugagaa

SEQ ID NO: 1167472 - RNA, 22 nt, Human
ccaguucugaaguauuuacaga

SEQ ID NO: 1167473 - RNA, 24 nt, Human
cucacagaauaauaauacauagag

SEQ ID NO: 1167474 - RNA, 23 nt, Human
cugggcugccaguauugcaguua

SEQ ID NO: 1167475 - RNA, 21 nt, Human
cuucuuaucuugccuugaggg

SEQ ID NO: 1167476 - RNA, 21 nt, Human
cuugcaccuuucucaauaaau

SEQ ID NO: 1167477 - RNA, 20 nt, Human
gaccgcauguugauaaggca

SEQ ID NO: 1167478 - RNA, 23 nt, Human
gacuuuuuauuccuaacacaaaa

SEQ ID NO: 1167479 - RNA, 26 nt, Human
gcacagauacacacacacacaccccc

SEQ ID NO: 1167480 - RNA, 20 nt, Human
gcaccuggaccucuccuggu

SEQ ID NO: 1167481 - RNA, 23 nt, Human
gcagagucagggaaagcccuggc

SEQ ID NO: 1167482 - RNA, 18 nt, Human
ggccauuauauuucauuc

SEQ ID NO: 1167483 - RNA, 24 nt, Human
gggaauaguuuaugacuuuuuauu

SEQ ID NO: 1167484 - RNA, 25 nt, Human
guaagacagagaaaucacaccagaa

SEQ ID NO: 1167485 - RNA, 19 nt, Human
guggagacaaccuuuggcc

SEQ ID NO: 1167486 - RNA, 22 nt, Human
uaaauaacaaagcagauguguc

SEQ ID NO: 1167487 - RNA, 19 nt, Human
uaaauaaggacacaaccca

SEQ ID NO: 1167488 - RNA, 19 nt, Human
uaaggacacaacccaacaa

SEQ ID NO: 1167489 - RNA, 19 nt, Human
uaauaaauaaugcccccuu

SEQ ID NO: 1167490 - RNA, 22 nt, Human
uacaaauacaagaaaacauuuu

SEQ ID NO: 1167491 - RNA, 21 nt, Human
uacagaaacaaaaaauugaac

SEQ ID NO: 1167492 - RNA, 19 nt, Human
uagaaucugacaauguaca

SEQ ID NO: 1167493 - RNA, 21 nt, Human
uagcugguggagacaaccuuu

SEQ ID NO: 1167494 - RNA, 19 nt, Human
uagggacgaugacaaccac

SEQ ID NO: 1167495 - RNA, 18 nt, Human
uaucaaagaucauggcca

SEQ ID NO: 1167496 - RNA, 31 nt, Human
uauuuuguuuuuaaucuccauaguguauucu

SEQ ID NO: 1167497 - RNA, 25 nt, Human
ucagaacaucccucaagaaacaaag

SEQ ID NO: 1167498 - RNA, 20 nt, Human
uccacacacacacacacaca

SEQ ID NO: 1167499 - RNA, 21 nt, Human
uccacacacacacacacacac

SEQ ID NO: 1167500 - RNA, 22 nt, Human
uccacacacacacacacacaca

SEQ ID NO: 1167501 - RNA, 29 nt, Human
uccacacacacacacacacacaaacacac

SEQ ID NO: 1167502 - RNA, 18 nt, Human
ucccaaaguucacgaugg

SEQ ID NO: 1167503 - RNA, 19 nt, Human
ucccaaaguucacgaugga

SEQ ID NO: 1167504 - RNA, 20 nt, Human
uccugucucuucugcccaca

SEQ ID NO: 1167505 - RNA, 18 nt, Human
uccuuugaccaaaaauac

SEQ ID NO: 1167506 - RNA, 21 nt, Human
ucgcagagucagggaaagccc

SEQ ID NO: 1167507 - RNA, 23 nt, Human
ugacaaaaccucacagguuuagc

SEQ ID NO: 1167508 - RNA, 21 nt, Human
ugaccaaaaauacagcccagg

SEQ ID NO: 1167509 - RNA, 18 nt, Human
ugauguaaacaauaaccc

SEQ ID NO: 1167510 - RNA, 25 nt, Human
ugcacagauacacacacacacaccc

SEQ ID NO: 1167511 - RNA, 28 nt, Human
ugcacagauacacacacacacaccccca

SEQ ID NO: 1167512 - RNA, 23 nt, Human
uggacagcaggguggccgaaagg

SEQ ID NO: 1167513 - RNA, 20 nt, Human
uggagucuucugacccuagu

SEQ ID NO: 1167514 - RNA, 22 nt, Human
uggccaggccccccacaaaauc

SEQ ID NO: 1167515 - RNA, 21 nt, Human
ugggaguuugagaaaagaagc

SEQ ID NO: 1167516 - RNA, 18 nt, Human
uguaaaagcaaagaaggu

SEQ ID NO: 1167517 - RNA, 21 nt, Human
uguaauuccacacacacacac

SEQ ID NO: 1167518 - RNA, 30 nt, Human
uguaauuccacacacacacacacacacagu

SEQ ID NO: 1167519 - RNA, 24 nt, Human
ugugugcacagauacacacacaca

SEQ ID NO: 1167520 - RNA, 24 nt, Human
uuaaaaaaaauagcaaaacuaaaa

SEQ ID NO: 1167521 - RNA, 24 nt, Human
uugacccugucgcagagucaggga

SEQ ID NO: 1167522 - RNA, 20 nt, Human
uugcacugaucucugaacac

SEQ ID NO: 1167523 - RNA, 22 nt, Human
uuuagaagguaagacagagaaa

SEQ ID NO: 1167524 - RNA, 25 nt, Human
uuuauuuauaagcagaucacuucac

SEQ ID NO: 1167525 - RNA, 21 nt, Human
uuuguaagccgccuuggagac

SEQ ID NO: 1167526 - RNA, 23 nt, Human
agaaacccauagcaauucaguga

SEQ ID NO: 1167527 - RNA, 24 nt, Human
augucauuuuucccccugcuucag

SEQ ID NO: 1167528 - RNA, 22 nt, Human
cagucaaaacagguaacagcag

SEQ ID NO: 1167529 - RNA, 26 nt, Human
cccauagcaauucagugauuuuucuu

SEQ ID NO: 1167530 - RNA, 24 nt, Human
cuaauggugugaugucauuuuucc

SEQ ID NO: 1167531 - RNA, 22 nt, Human
ggauauuucagaaacccauagc

SEQ ID NO: 1167532 - RNA, 21 nt, Human
gucauuuuucccccugcuuca

SEQ ID NO: 1167533 - RNA, 21 nt, Human
gugaugucauuuuucccccug

SEQ ID NO: 1167534 - RNA, 19 nt, Human
uagaaaauguugcuuccac

SEQ ID NO: 1167535 - RNA, 19 nt, Human
ucccccugcuucagguuaa

SEQ ID NO: 1167536 - RNA, 18 nt, Human
uuucacacaauaccugcu

SEQ ID NO: 1167537 - RNA, 21 nt, Human
aagcacuucaugaaaugcuca

SEQ ID NO: 1167538 - RNA, 23 nt, Human
aggcgggggcgugggaugcgggg

SEQ ID NO: 1167539 - RNA, 22 nt, Human
aggcggggugagugugggcgug

SEQ ID NO: 1167540 - RNA, 26 nt, Human
agggaggaggcguagagcgaggcggg

SEQ ID NO: 1167541 - RNA, 21 nt, Human
agugagggugggaagagcuag

SEQ ID NO: 1167542 - RNA, 26 nt, Human
cacacacagggcacugcggcugugug

SEQ ID NO: 1167543 - RNA, 26 nt, Human
cacaggcuguccacacacagggcacu

SEQ ID NO: 1167544 - RNA, 19 nt, Human
caccagcacgggggcgcag

SEQ ID NO: 1167545 - RNA, 21 nt, Human
cagaggcccgcagugagggug

SEQ ID NO: 1167546 - RNA, 19 nt, Human
cccgcagugagggugggaa

SEQ ID NO: 1167547 - RNA, 18 nt, Human
ccgcacccuuccgccagg

SEQ ID NO: 1167548 - RNA, 27 nt, Human
ccugcagccagggaggaggcguagagc

SEQ ID NO: 1167549 - RNA, 19 nt, Human
cgcagccucggcagccgca

SEQ ID NO: 1167550 - RNA, 22 nt, Human
cgcccacccacuggcucugcag

SEQ ID NO: 1167551 - RNA, 20 nt, Human
cguagagcgaggcgggggcg

SEQ ID NO: 1167552 - RNA, 20 nt, Human
cugauauauaauagugguau

SEQ ID NO: 1167553 - RNA, 21 nt, Human
cugcagcagaauggagacuca

SEQ ID NO: 1167554 - RNA, 24 nt, Human
gccgcaccacgagagagcuuuaac

SEQ ID NO: 1167555 - RNA, 21 nt, Human
gccugcagccagggaggaggc

SEQ ID NO: 1167556 - RNA, 22 nt, Human
gcuuauucauucucaaucuuuc

SEQ ID NO: 1167557 - RNA, 18 nt, Human
ggaauaggaggaggaagg

SEQ ID NO: 1167558 - RNA, 23 nt, Human
ggcaggggugcagccaggcgggg

SEQ ID NO: 1167559 - RNA, 20 nt, Human
ggcgaccguuucgccacccc

SEQ ID NO: 1167560 - RNA, 22 nt, Human
guagcgugcgcucccgcacccu

SEQ ID NO: 1167561 - RNA, 19 nt, Human
uaggaggaggaaggacgca

SEQ ID NO: 1167562 - RNA, 18 nt, Human
uauaauagugguauaaaa

SEQ ID NO: 1167563 - RNA, 22 nt, Human
uauaauagugguauaaaagcac

SEQ ID NO: 1167564 - RNA, 33 nt, Human
uauaauagugguauaaaagcacuucaugaaaag

SEQ ID NO: 1167565 - RNA, 18 nt, Human
ucaaucuuucucugauau

SEQ ID NO: 1167566 - RNA, 19 nt, Human
ucaaucuuucucugauaua

SEQ ID NO: 1167567 - RNA, 18 nt, Human
ucccgcacccuuccgcca

SEQ ID NO: 1167568 - RNA, 21 nt, Human
ugaaaugcucacuauuaauca

SEQ ID NO: 1167569 - RNA, 18 nt, Human
ugcagccaggcgggguga

SEQ ID NO: 1167570 - RNA, 18 nt, Human
ugccugcagccagggagg

SEQ ID NO: 1167571 - RNA, 20 nt, Human
uggcgaccguuucgccaccc

SEQ ID NO: 1167572 - RNA, 18 nt, Human
ugggaagagcuagaaccg

SEQ ID NO: 1167573 - RNA, 19 nt, Human
ugggaagagcuagaaccgc

SEQ ID NO: 1167574 - RNA, 21 nt, Human
ugggaagagcuagaaccgccc

SEQ ID NO: 1167575 - RNA, 19 nt, Human
aaacauaagugcaauagau

SEQ ID NO: 1167576 - RNA, 27 nt, Human
aacuggggugggggguggggguagugu

SEQ ID NO: 1167577 - RNA, 19 nt, Human
aagcacaaugucucacaug

SEQ ID NO: 1167578 - RNA, 23 nt, Human
aagcgaacgucuaguacaauucu

SEQ ID NO: 1167579 - RNA, 20 nt, Human
acaaaguuccaaaaugccaa

SEQ ID NO: 1167580 - RNA, 21 nt, Human
agagggaggaugucacgguca

SEQ ID NO: 1167581 - RNA, 19 nt, Human
auauauauauauauauaua

SEQ ID NO: 1167582 - RNA, 19 nt, Human
auauauauauauauauaua

SEQ ID NO: 1167583 - RNA, 19 nt, Human
auauauauauauauauaua

SEQ ID NO: 1167584 - RNA, 19 nt, Human
auauauauauauauauaua

SEQ ID NO: 1167585 - RNA, 19 nt, Human
auauauauauauauauaua

SEQ ID NO: 1167586 - RNA, 19 nt, Human
auauauauauauauauaua

SEQ ID NO: 1167587 - RNA, 19 nt, Human
auauauauauauauauaua

SEQ ID NO: 1167588 - RNA, 19 nt, Human
auauauauauauauauaua

SEQ ID NO: 1167589 - RNA, 19 nt, Human
auauauauauauauauaua

SEQ ID NO: 1167590 - RNA, 19 nt, Human
auauauauauauauauaua

SEQ ID NO: 1167591 - RNA, 19 nt, Human
auauauauauauauauaua

SEQ ID NO: 1167592 - RNA, 19 nt, Human
auauauauauauauauaua

SEQ ID NO: 1167593 - RNA, 19 nt, Human
auauauauauauauauaua

SEQ ID NO: 1167594 - RNA, 19 nt, Human
auauauauauauauauaua

SEQ ID NO: 1167595 - RNA, 19 nt, Human
auauauauauauauauaua

SEQ ID NO: 1167596 - RNA, 19 nt, Human
auauauauauauauauaua

SEQ ID NO: 1167597 - RNA, 19 nt, Human
auauauauauauauauaua

SEQ ID NO: 1167598 - RNA, 19 nt, Human
auauauauauauauauaua

SEQ ID NO: 1167599 - RNA, 19 nt, Human
auauauauauauauauaua

SEQ ID NO: 1167600 - RNA, 19 nt, Human
auauauauauauauauaua

SEQ ID NO: 1167601 - RNA, 18 nt, Human
auauauauauauauaugu

SEQ ID NO: 1167602 - RNA, 18 nt, Human
auauauauauauauaugu

SEQ ID NO: 1167603 - RNA, 21 nt, Human
auauauauguguguguauaua

SEQ ID NO: 1167604 - RNA, 25 nt, Human
auauauaugugugugugugugugug

SEQ ID NO: 1167605 - RNA, 19 nt, Human
auauauguauauauaugca

SEQ ID NO: 1167606 - RNA, 19 nt, Human
auauguguauauauauaug

SEQ ID NO: 1167607 - RNA, 19 nt, Human
auccacaguaguuguugag

SEQ ID NO: 1167608 - RNA, 24 nt, Human
augcugcuauauauauauauauau

SEQ ID NO: 1167609 - RNA, 22 nt, Human
auguauauauguauaugugcau

SEQ ID NO: 1167610 - RNA, 21 nt, Human
augugugugugugugugugug

SEQ ID NO: 1167611 - RNA, 22 nt, Human
augugugugugugugugugugu

SEQ ID NO: 1167612 - RNA, 23 nt, Human
auguguguguguguguguguguu

SEQ ID NO: 1167613 - RNA, 23 nt, Human
caccuuucagccaaaacagaucc

SEQ ID NO: 1167614 - RNA, 27 nt, Human
cagcaaaguaggauucaucauuccaua

SEQ ID NO: 1167615 - RNA, 19 nt, Human
cuacugauguuccuuugga

SEQ ID NO: 1167616 - RNA, 18 nt, Human
cuauauauauauauauau

SEQ ID NO: 1167617 - RNA, 19 nt, Human
cuauauauauauauauaua

SEQ ID NO: 1167618 - RNA, 26 nt, Human
cucacaaacauaagugcaauagaucu

SEQ ID NO: 1167619 - RNA, 22 nt, Human
cugcugguuuuaacaacugugc

SEQ ID NO: 1167620 - RNA, 19 nt, Human
gagguugcuuuguuuuguc

SEQ ID NO: 1167621 - RNA, 25 nt, Human
gccaaauucuuauuuuuuaaaaagc

SEQ ID NO: 1167622 - RNA, 22 nt, Human
ggggugggggguggggguagug

SEQ ID NO: 1167623 - RNA, 19 nt, Human
gggugggggguggggguag

SEQ ID NO: 1167624 - RNA, 20 nt, Human
ggugggggguggggguagug

SEQ ID NO: 1167625 - RNA, 19 nt, Human
guauauauauauauauaua

SEQ ID NO: 1167626 - RNA, 19 nt, Human
guauauauauauauauaua

SEQ ID NO: 1167627 - RNA, 19 nt, Human
guauauauauauauaugug

SEQ ID NO: 1167628 - RNA, 18 nt, Human
guguauauauauauauau

SEQ ID NO: 1167629 - RNA, 19 nt, Human
guguauauauauauauaua

SEQ ID NO: 1167630 - RNA, 21 nt, Human
guguauauauauauauaugaa

SEQ ID NO: 1167631 - RNA, 23 nt, Human
guguguauauauauauauaaaau

SEQ ID NO: 1167632 - RNA, 20 nt, Human
guguguauauauauauauau

SEQ ID NO: 1167633 - RNA, 22 nt, Human
guucaaguuauagauucaaugg

SEQ ID NO: 1167634 - RNA, 22 nt, Human
uaacaugaaacuugucaccaug

SEQ ID NO: 1167635 - RNA, 25 nt, Human
uaacaugaaacuugucaccaugaga

SEQ ID NO: 1167636 - RNA, 21 nt, Human
uacaaaggugaaaauuguuug

SEQ ID NO: 1167637 - RNA, 18 nt, Human
uacauauauguauauaua

SEQ ID NO: 1167638 - RNA, 24 nt, Human
uacauauauguauauauaugcaca

SEQ ID NO: 1167639 - RNA, 21 nt, Human
uacgguauuuaggcauuugcc

SEQ ID NO: 1167640 - RNA, 18 nt, Human
uauauacauauauguaua

SEQ ID NO: 1167641 - RNA, 20 nt, Human
uauauacauauauguauaua

SEQ ID NO: 1167642 - RNA, 24 nt, Human
uauauacauauauguauauauaug

SEQ ID NO: 1167643 - RNA, 19 nt, Human
uauauauauauauauauau

SEQ ID NO: 1167644 - RNA, 19 nt, Human
uauauauauauauauauau

SEQ ID NO: 1167645 - RNA, 19 nt, Human
uauauauauauauauauau

SEQ ID NO: 1167646 - RNA, 19 nt, Human
uauauauauauauauauau

SEQ ID NO: 1167647 - RNA, 19 nt, Human
uauauauauauauauauau

SEQ ID NO: 1167648 - RNA, 19 nt, Human
uauauauauauauauauau

SEQ ID NO: 1167649 - RNA, 19 nt, Human
uauauauauauauauauau

SEQ ID NO: 1167650 - RNA, 19 nt, Human
uauauauauauauauauau

SEQ ID NO: 1167651 - RNA, 19 nt, Human
uauauauauauauauauau

SEQ ID NO: 1167652 - RNA, 19 nt, Human
uauauauauauauauauau

SEQ ID NO: 1167653 - RNA, 19 nt, Human
uauauauauauauauauau

SEQ ID NO: 1167654 - RNA, 19 nt, Human
uauauauauauauauauau

SEQ ID NO: 1167655 - RNA, 19 nt, Human
uauauauauauauauauau

SEQ ID NO: 1167656 - RNA, 23 nt, Human
uauauauauauauauauauaugu

SEQ ID NO: 1167657 - RNA, 23 nt, Human
uauauauauauauauauauaugu

SEQ ID NO: 1167658 - RNA, 24 nt, Human
uauauauauauauauguguauaua

SEQ ID NO: 1167659 - RNA, 19 nt, Human
uauauauauauaugugugu

SEQ ID NO: 1167660 - RNA, 24 nt, Human
uauauauauauauguguguguaua

SEQ ID NO: 1167661 - RNA, 21 nt, Human
uauauauauauguauauacau

SEQ ID NO: 1167662 - RNA, 24 nt, Human
uauauauauauguauauacauaua

SEQ ID NO: 1167663 - RNA, 27 nt, Human
uauauauauauguguauauauauaugu

SEQ ID NO: 1167664 - RNA, 24 nt, Human
uauauauauauguguguguauaua

SEQ ID NO: 1167665 - RNA, 23 nt, Human
uauauauauaugugugugugugu

SEQ ID NO: 1167666 - RNA, 20 nt, Human
uauauauaugcacauauaua

SEQ ID NO: 1167667 - RNA, 22 nt, Human
uauauauaugcacauauauaua

SEQ ID NO: 1167668 - RNA, 22 nt, Human
uauauauaugcacauauauaua

SEQ ID NO: 1167669 - RNA, 24 nt, Human
uauauauaugcacauauauauaug

SEQ ID NO: 1167670 - RNA, 18 nt, Human
uauauauauguauauaca

SEQ ID NO: 1167671 - RNA, 26 nt, Human
uauauauauguauauacauauaugua

SEQ ID NO: 1167672 - RNA, 26 nt, Human
uauauauauguguauauauauaugua

SEQ ID NO: 1167673 - RNA, 19 nt, Human
uauauauaugugugugugu

SEQ ID NO: 1167674 - RNA, 19 nt, Human
uauauauaugugugugugu

SEQ ID NO: 1167675 - RNA, 19 nt, Human
uauauauaugugugugugu

SEQ ID NO: 1167676 - RNA, 22 nt, Human
uauauaugcacauauauauaug

SEQ ID NO: 1167677 - RNA, 18 nt, Human
uauauauguauauacaua

SEQ ID NO: 1167678 - RNA, 21 nt, Human
uauauauguauauacauauau

SEQ ID NO: 1167679 - RNA, 25 nt, Human
uauauauguauauacauauauguaa

SEQ ID NO: 1167680 - RNA, 20 nt, Human
uauauauguguauauauaua

SEQ ID NO: 1167681 - RNA, 19 nt, Human
uauaugcacauauauauau

SEQ ID NO: 1167682 - RNA, 22 nt, Human
uauaugcacauauauauaugua

SEQ ID NO: 1167683 - RNA, 19 nt, Human
uauauguauauauaugcac

SEQ ID NO: 1167684 - RNA, 21 nt, Human
uauauguauauauaugcacau

SEQ ID NO: 1167685 - RNA, 26 nt, Human
uauauguauauauaugcacauauaua

SEQ ID NO: 1167686 - RNA, 18 nt, Human
uauauguguauauauaua

SEQ ID NO: 1167687 - RNA, 23 nt, Human
uauaugugugugugugugugugu

SEQ ID NO: 1167688 - RNA, 20 nt, Human
uauccaacuuaacaugaaac

SEQ ID NO: 1167689 - RNA, 21 nt, Human
uauggguggggaggaaauaga

SEQ ID NO: 1167690 - RNA, 24 nt, Human
uauguauauacauauauguauaua

SEQ ID NO: 1167691 - RNA, 29 nt, Human
uauguauauacauauauguauauauuaca

SEQ ID NO: 1167692 - RNA, 22 nt, Human
uauguauauauaugcacauaua

SEQ ID NO: 1167693 - RNA, 24 nt, Human
uauguauauauaugcacauauaua

SEQ ID NO: 1167694 - RNA, 31 nt, Human
uauguauauauaugcacauauauauauguaa

SEQ ID NO: 1167695 - RNA, 18 nt, Human
uauguguauauauauaug

SEQ ID NO: 1167696 - RNA, 22 nt, Human
uauguguauauauauauguaua

SEQ ID NO: 1167697 - RNA, 24 nt, Human
uauguguauauauauauguauaua

SEQ ID NO: 1167698 - RNA, 18 nt, Human
uaugugugugugugugug

SEQ ID NO: 1167699 - RNA, 23 nt, Human
uaugugugugugugugugugugu

SEQ ID NO: 1167700 - RNA, 24 nt, Human
uaugugugugugugugugugugug

SEQ ID NO: 1167701 - RNA, 18 nt, Human
ucaaaacaaaaaaaaacu

SEQ ID NO: 1167702 - RNA, 25 nt, Human
ucaauguuuuuaaaaaucuguuuau

SEQ ID NO: 1167703 - RNA, 21 nt, Human
uccaaaaugccaaauucuuau

SEQ ID NO: 1167704 - RNA, 21 nt, Human
ugagaucuguuugaguuuagg

SEQ ID NO: 1167705 - RNA, 20 nt, Human
ugagcugucacuguggggaa

SEQ ID NO: 1167706 - RNA, 20 nt, Human
ugcacauauauauauguauu

SEQ ID NO: 1167707 - RNA, 21 nt, Human
ugcuauauauauauauauaua

SEQ ID NO: 1167708 - RNA, 20 nt, Human
uggaagaaaaaaucugcugg

SEQ ID NO: 1167709 - RNA, 21 nt, Human
ugggacaaaguuccaaaaugc

SEQ ID NO: 1167710 - RNA, 20 nt, Human
ugggggguggggguagugug

SEQ ID NO: 1167711 - RNA, 18 nt, Human
uguauauauauauauaua

SEQ ID NO: 1167712 - RNA, 22 nt, Human
uguauauauauauauauauaua

SEQ ID NO: 1167713 - RNA, 22 nt, Human
uguauauauauauauaugugua

SEQ ID NO: 1167714 - RNA, 18 nt, Human
uguauauauguauaugug

SEQ ID NO: 1167715 - RNA, 19 nt, Human
ugucacggucaguuguaac

SEQ ID NO: 1167716 - RNA, 22 nt, Human
ugugaaucuuugugcuucaaca

SEQ ID NO: 1167717 - RNA, 18 nt, Human
ugugcuucaacauucuuu

SEQ ID NO: 1167718 - RNA, 18 nt, Human
uguguauauauauauaua

SEQ ID NO: 1167719 - RNA, 18 nt, Human
uguguauauauauauaua

SEQ ID NO: 1167720 - RNA, 19 nt, Human
uguguauauauauauauau

SEQ ID NO: 1167721 - RNA, 19 nt, Human
uguguauauauauauauau

SEQ ID NO: 1167722 - RNA, 20 nt, Human
uguguauauauauauauaua

SEQ ID NO: 1167723 - RNA, 20 nt, Human
uguguauauauauauauaua

SEQ ID NO: 1167724 - RNA, 22 nt, Human
uguguauauauauauauauaua

SEQ ID NO: 1167725 - RNA, 22 nt, Human
uguguauauauauauauaugug

SEQ ID NO: 1167726 - RNA, 24 nt, Human
uguguauauauauauauaugugua

SEQ ID NO: 1167727 - RNA, 19 nt, Human
uguguauauauauauguau

SEQ ID NO: 1167728 - RNA, 22 nt, Human
uguguauauauauauguauaua

SEQ ID NO: 1167729 - RNA, 20 nt, Human
uguguauuuuuuaaagcuac

SEQ ID NO: 1167730 - RNA, 18 nt, Human
uguguguauauauauaua

SEQ ID NO: 1167731 - RNA, 24 nt, Human
uguguguauauauauauauauaac

SEQ ID NO: 1167732 - RNA, 23 nt, Human
uguguguauauauauauauaugu

SEQ ID NO: 1167733 - RNA, 18 nt, Human
uguguguguauauauaua

SEQ ID NO: 1167734 - RNA, 18 nt, Human
uguguguguauauauaua

SEQ ID NO: 1167735 - RNA, 18 nt, Human
uguguguguauauauaua

SEQ ID NO: 1167736 - RNA, 24 nt, Human
uguguguguauauauauauauaau

SEQ ID NO: 1167737 - RNA, 26 nt, Human
uguguguguguauauauauauaaugu

SEQ ID NO: 1167738 - RNA, 23 nt, Human
uguguguguguauauauauauau

SEQ ID NO: 1167739 - RNA, 18 nt, Human
uguguguguguguguaua

SEQ ID NO: 1167740 - RNA, 20 nt, Human
uguguguguguguguauaua

SEQ ID NO: 1167741 - RNA, 18 nt, Human
ugugugugugugugugug

SEQ ID NO: 1167742 - RNA, 18 nt, Human
ugugugugugugugugug

SEQ ID NO: 1167743 - RNA, 18 nt, Human
ugugugugugugugugug

SEQ ID NO: 1167744 - RNA, 18 nt, Human
ugugugugugugugugug

SEQ ID NO: 1167745 - RNA, 18 nt, Human
ugugugugugugugugug

SEQ ID NO: 1167746 - RNA, 24 nt, Human
uguguguguguguguguguauaua

SEQ ID NO: 1167747 - RNA, 21 nt, Human
ugugugugugugugugugugu

SEQ ID NO: 1167748 - RNA, 21 nt, Human
ugugugugugugugugugugu

SEQ ID NO: 1167749 - RNA, 21 nt, Human
ugugugugugugugugugugu

SEQ ID NO: 1167750 - RNA, 21 nt, Human
ugugugugugugugugugugu

SEQ ID NO: 1167751 - RNA, 22 nt, Human
ugugugugugugugugugugua

SEQ ID NO: 1167752 - RNA, 22 nt, Human
ugugugugugugugugugugug

SEQ ID NO: 1167753 - RNA, 22 nt, Human
ugugugugugugugugugugug

SEQ ID NO: 1167754 - RNA, 27 nt, Human
uguguuuuuaaaaguuacuccuuuuag

SEQ ID NO: 1167755 - RNA, 21 nt, Human
uguuuccaguacaccuuucag

SEQ ID NO: 1167756 - RNA, 20 nt, Human
uuaaaaaaaucaaaacaaaa

SEQ ID NO: 1167757 - RNA, 23 nt, Human
uuaaaauaaaguuggucuuuuga

SEQ ID NO: 1167758 - RNA, 27 nt, Human
uuaaagcacaaugucucacaugggacc

SEQ ID NO: 1167759 - RNA, 24 nt, Human
uuaaagcuacaaucuguucaaugu

SEQ ID NO: 1167760 - RNA, 24 nt, Human
uuuuuuaaaaagcuaguucuauaa

SEQ ID NO: 1167761 - RNA, 22 nt, Human
uguauccgagagcuggggagca

SEQ ID NO: 1167762 - RNA, 23 nt, Human
aagacagaaguccucgaaaaaga

SEQ ID NO: 1167763 - RNA, 25 nt, Human
aauacucuugcuauucucaagcagc

SEQ ID NO: 1167764 - RNA, 18 nt, Human
accaggucagaaaagaca

SEQ ID NO: 1167765 - RNA, 22 nt, Human
acccugagaauacagaggaaac

SEQ ID NO: 1167766 - RNA, 19 nt, Human
acccuggaguugccggggc

SEQ ID NO: 1167767 - RNA, 28 nt, Human
agaaauauuacccuuguagauagcccuc

SEQ ID NO: 1167768 - RNA, 25 nt, Human
agacugcuggagguuucuguaaacc

SEQ ID NO: 1167769 - RNA, 22 nt, Human
agauacuggugauagaaaagcc

SEQ ID NO: 1167770 - RNA, 23 nt, Human
aggcaagcagcaauccaccaggg

SEQ ID NO: 1167771 - RNA, 19 nt, Human
aguccucgaaaaagaagag

SEQ ID NO: 1167772 - RNA, 21 nt, Human
auaaaaccauuaaaagcaauc

SEQ ID NO: 1167773 - RNA, 22 nt, Human
caacaguaccauaaaaccauua

SEQ ID NO: 1167774 - RNA, 20 nt, Human
caaucauuuuaaaagaacuc

SEQ ID NO: 1167775 - RNA, 24 nt, Human
cagauacuggugauagaaaagccc

SEQ ID NO: 1167776 - RNA, 21 nt, Human
cagguccaaaccuaauggcaa

SEQ ID NO: 1167777 - RNA, 18 nt, Human
cauggcucaguuugaaga

SEQ ID NO: 1167778 - RNA, 20 nt, Human
ccaaugccacaguguaacag

SEQ ID NO: 1167779 - RNA, 22 nt, Human
ccccuaaagcauggcucaguuu

SEQ ID NO: 1167780 - RNA, 18 nt, Human
cccugagaauacagagga

SEQ ID NO: 1167781 - RNA, 20 nt, Human
cccuggaguugccggggcag

SEQ ID NO: 1167782 - RNA, 23 nt, Human
cgagagacucucaaacagcgaaa

SEQ ID NO: 1167783 - RNA, 18 nt, Human
cugcaacuuaaaauauua

SEQ ID NO: 1167784 - RNA, 19 nt, Human
cuggagguuucuguaaacg

SEQ ID NO: 1167785 - RNA, 23 nt, Human
cuuguagauagcccucucauacc

SEQ ID NO: 1167786 - RNA, 24 nt, Human
gaaaaagaagaggaguaaaaauau

SEQ ID NO: 1167787 - RNA, 21 nt, Human
gacagaaguccucgaaaaaga

SEQ ID NO: 1167788 - RNA, 21 nt, Human
gccuaggauaggucguggacc

SEQ ID NO: 1167789 - RNA, 21 nt, Human
ggugauagaaaagcccaaaaa

SEQ ID NO: 1167790 - RNA, 23 nt, Human
gguuuucaucagcccuuuaaggg

SEQ ID NO: 1167791 - RNA, 22 nt, Human
uaaaacaaaauauggcaggucc

SEQ ID NO: 1167792 - RNA, 24 nt, Human
uaaaauuucuagauacaaauacau

SEQ ID NO: 1167793 - RNA, 26 nt, Human
uaccaguaaauacaaagaguuaaaau

SEQ ID NO: 1167794 - RNA, 20 nt, Human
uaggaucacagaauaaaaca

SEQ ID NO: 1167795 - RNA, 21 nt, Human
uauauacaauacauacaggua

SEQ ID NO: 1167796 - RNA, 20 nt, Human
ucaucuccauuaaauuuaaa

SEQ ID NO: 1167797 - RNA, 21 nt, Human
ucguggaccagacacccugga

SEQ ID NO: 1167798 - RNA, 24 nt, Human
ucguggaccagacacccuggaguu

SEQ ID NO: 1167799 - RNA, 20 nt, Human
ucuauaggcagccacuauga

SEQ ID NO: 1167800 - RNA, 23 nt, Human
ucuguuggauuuuauuguuucaa

SEQ ID NO: 1167801 - RNA, 31 nt, Human
ugagccgagagacucucaaacagcgaaagaa

SEQ ID NO: 1167802 - RNA, 21 nt, Human
uggcaagauuacaaauguuca

SEQ ID NO: 1167803 - RNA, 23 nt, Human
uuaaaagaacucucaaguugggu

SEQ ID NO: 1167804 - RNA, 23 nt, Human
uuauauauuuuaaccauauucau

SEQ ID NO: 1167805 - RNA, 20 nt, Human
uucauauggccaaucauuuu

SEQ ID NO: 1167806 - RNA, 18 nt, Human
uuguauuugcuuucuucu

SEQ ID NO: 1167807 - RNA, 18 nt, Human
uuuaaaacaauacucuug

SEQ ID NO: 1167808 - RNA, 24 nt, Human
uuuuaaaagaacucucaaguuggg

SEQ ID NO: 1167809 - RNA, 22 nt, Human
uuuuaagcugcucagugccacu

SEQ ID NO: 1167810 - RNA, 27 nt, Human
aaaaaagacucaaucuauaauugcaaa

SEQ ID NO: 1167811 - RNA, 21 nt, Human
aaccauguuguauguuguacc

SEQ ID NO: 1167812 - RNA, 26 nt, Human
aagccuacaccaaagugcucauauga

SEQ ID NO: 1167813 - RNA, 20 nt, Human
aaggcacauuaucuugacug

SEQ ID NO: 1167814 - RNA, 19 nt, Human
acccugaaagaacagcaag

SEQ ID NO: 1167815 - RNA, 19 nt, Human
acccugaaagaacagcaag

SEQ ID NO: 1167816 - RNA, 25 nt, Human
aggaacacagagagguaccgguacc

SEQ ID NO: 1167817 - RNA, 22 nt, Human
caagacucagcccuccccaaug

SEQ ID NO: 1167818 - RNA, 21 nt, Human
cacccaauaaaaaguggucag

SEQ ID NO: 1167819 - RNA, 24 nt, Human
cacccuuaacucuuauggaauuuu

SEQ ID NO: 1167820 - RNA, 21 nt, Human
cacgauggcuuuuuuccaccu

SEQ ID NO: 1167821 - RNA, 25 nt, Human
cagcaaguaugcacacaugcagugu

SEQ ID NO: 1167822 - RNA, 26 nt, Human
cauuuuuaucuuaauauggcuggaaa

SEQ ID NO: 1167823 - RNA, 20 nt, Human
ccaagccuacaccaaagugc

SEQ ID NO: 1167824 - RNA, 18 nt, Human
cccaagcuaucauuuaaa

SEQ ID NO: 1167825 - RNA, 22 nt, Human
ccuaaaauacauuuucagcaca

SEQ ID NO: 1167826 - RNA, 20 nt, Human
cggggccagugcuuucgaga

SEQ ID NO: 1167827 - RNA, 18 nt, Human
cuggacuauccagcaucc

SEQ ID NO: 1167828 - RNA, 20 nt, Human
gacucagcccuccccaaugg

SEQ ID NO: 1167829 - RNA, 21 nt, Human
gccaucuuucaugcuggacua

SEQ ID NO: 1167830 - RNA, 23 nt, Human
gcguguguaugugcgcgcgcgcg

SEQ ID NO: 1167831 - RNA, 23 nt, Human
gcuaugugacaaggaacacagag

SEQ ID NO: 1167832 - RNA, 20 nt, Human
gguagacacagcaauggaca

SEQ ID NO: 1167833 - RNA, 22 nt, Human
guaguuuuuccaagccuacacu

SEQ ID NO: 1167834 - RNA, 27 nt, Human
uaaaauggguagacacagcaauggaca

SEQ ID NO: 1167835 - RNA, 23 nt, Human
uaaauauucacauguauuucccc

SEQ ID NO: 1167836 - RNA, 19 nt, Human
uaagugaagugauuccaaa

SEQ ID NO: 1167837 - RNA, 24 nt, Human
uagcagaaacacaguucggggcca

SEQ ID NO: 1167838 - RNA, 25 nt, Human
uauagcaagauuacguuuccuaaaa

SEQ ID NO: 1167839 - RNA, 18 nt, Human
uaugacauuaaaaagcag

SEQ ID NO: 1167840 - RNA, 21 nt, Human
ucaaucuauaauugcaaaccc

SEQ ID NO: 1167841 - RNA, 20 nt, Human
ucagcccuccccaauggccu

SEQ ID NO: 1167842 - RNA, 20 nt, Human
uccccaauggccuucauguu

SEQ ID NO: 1167843 - RNA, 23 nt, Human
ucuauaauugcaaacccugaaag

SEQ ID NO: 1167844 - RNA, 20 nt, Human
ugaaagcaaauacacaaaua

SEQ ID NO: 1167845 - RNA, 19 nt, Human
ugaaugacuuaccugcaca

SEQ ID NO: 1167846 - RNA, 21 nt, Human
ugaaugacuuaccugcacaga

SEQ ID NO: 1167847 - RNA, 23 nt, Human
ugacaaggaacacagagagguac

SEQ ID NO: 1167848 - RNA, 22 nt, Human
ugacauuaaaaagcagaaacac

SEQ ID NO: 1167849 - RNA, 21 nt, Human
ugacugaaaagcauccuugau

SEQ ID NO: 1167850 - RNA, 21 nt, Human
ugcaaggaagacauuuucaac

SEQ ID NO: 1167851 - RNA, 24 nt, Human
ugcaaggaagacauuuucaaccau

SEQ ID NO: 1167852 - RNA, 21 nt, Human
ugcacagauacucaggccaag

SEQ ID NO: 1167853 - RNA, 22 nt, Human
ugcacagauacucaggccaaga

SEQ ID NO: 1167854 - RNA, 24 nt, Human
uggaaacaaggcacauuaucuuga

SEQ ID NO: 1167855 - RNA, 19 nt, Human
uggacagccuucugcaagg

SEQ ID NO: 1167856 - RNA, 22 nt, Human
uggguagacacagcaauggaca

SEQ ID NO: 1167857 - RNA, 21 nt, Human
uguguacagaugcguguguau

SEQ ID NO: 1167858 - RNA, 22 nt, Human
uguguacagaugcguguguaug

SEQ ID NO: 1167859 - RNA, 24 nt, Human
uuccccgcccuauugcuuucuagc

SEQ ID NO: 1167860 - RNA, 24 nt, Human
uuucaugcuggacuauccagcauc

SEQ ID NO: 1167861 - RNA, 26 nt, Human
uuucuuaugaaugacuuaccugcaca

SEQ ID NO: 1167862 - RNA, 19 nt, Human
aaaaaaggaaacauauaau

SEQ ID NO: 1167863 - RNA, 22 nt, Human
aaaaaggaaacauauaauaaga

SEQ ID NO: 1167864 - RNA, 18 nt, Human
aaaaauacuaaaccugua

SEQ ID NO: 1167865 - RNA, 21 nt, Human
aaaccuguauauuugguauug

SEQ ID NO: 1167866 - RNA, 21 nt, Human
aacaaucacuaacaggcaaaa

SEQ ID NO: 1167867 - RNA, 22 nt, Human
aacaguucuucagaccuggcuc

SEQ ID NO: 1167868 - RNA, 18 nt, Human
aagagauuugaaaagucu

SEQ ID NO: 1167869 - RNA, 19 nt, Human
aagagauuugaaaagucug

SEQ ID NO: 1167870 - RNA, 22 nt, Human
aaggcuuuuaguuuacauuugg

SEQ ID NO: 1167871 - RNA, 23 nt, Human
acaacauugguggaugaagaaug

SEQ ID NO: 1167872 - RNA, 21 nt, Human
acauccacaguacucguccac

SEQ ID NO: 1167873 - RNA, 22 nt, Human
acaugugaaacaaucacuaaca

SEQ ID NO: 1167874 - RNA, 20 nt, Human
agauauuaaaggcaacgucu

SEQ ID NO: 1167875 - RNA, 20 nt, Human
agauuugaaaagucuggaca

SEQ ID NO: 1167876 - RNA, 23 nt, Human
agccugaaaaugauuuacaaaaa

SEQ ID NO: 1167877 - RNA, 21 nt, Human
agcugcagaagccugaaaaug

SEQ ID NO: 1167878 - RNA, 19 nt, Human
aggagcucuuuggacuuuc

SEQ ID NO: 1167879 - RNA, 23 nt, Human
aggagcucuuuggacuuucuuuu

SEQ ID NO: 1167880 - RNA, 20 nt, Human
aggcaaaaauacuaaaccug

SEQ ID NO: 1167881 - RNA, 19 nt, Human
aggguaccaccacaggaaa

SEQ ID NO: 1167882 - RNA, 22 nt, Human
cacacgacuauaaacauuguuc

SEQ ID NO: 1167883 - RNA, 22 nt, Human
cacauccacaguacucguccac

SEQ ID NO: 1167884 - RNA, 18 nt, Human
caccacaggaaaguccaa

SEQ ID NO: 1167885 - RNA, 18 nt, Human
caggcaaaaauacuaaac

SEQ ID NO: 1167886 - RNA, 18 nt, Human
cccacauucacauccaca

SEQ ID NO: 1167887 - RNA, 19 nt, Human
cccccacuguacacacgac

SEQ ID NO: 1167888 - RNA, 31 nt, Human; identical to SEQ ID NO: 335636

SEQ ID NO: 1167889 - RNA, 24 nt, Human
gaaucuacagcugcagaagccuga

SEQ ID NO: 1167890 - RNA, 20 nt, Human
gacuauaaacauuguucccu

SEQ ID NO: 1167891 - RNA, 20 nt, Human
gagaaucuacagcugcagaa

SEQ ID NO: 1167892 - RNA, 21 nt, Human
gugagaaucuacagcugcaga

SEQ ID NO: 1167893 - RNA, 18 nt, Human
uaaagacaagaucaccgu

SEQ ID NO: 1167894 - RNA, 24 nt, Human
uaaaguauacaguacaccauuuuc

SEQ ID NO: 1167895 - RNA, 21 nt, Human
uacaaguaucaaagaagcgaa

SEQ ID NO: 1167896 - RNA, 21 nt, Human
uacaguacaccauuuucauac

SEQ ID NO: 1167897 - RNA, 24 nt, Human
uacauuauuguacucuccaauaca

SEQ ID NO: 1167898 - RNA, 20 nt, Human
uacuucaacuugcuuucuau

SEQ ID NO: 1167899 - RNA, 22 nt, Human
uagaaugugcaaacugauauag

SEQ ID NO: 1167900 - RNA, 23 nt, Human
uaucuggaguagucuauauagga

SEQ ID NO: 1167901 - RNA, 19 nt, Human
uauguaaacaaaaaaagga

SEQ ID NO: 1167902 - RNA, 19 nt, Human
uccaauacaaaguaugggg

SEQ ID NO: 1167903 - RNA, 25 nt, Human
ucccuauguaaacaaaaaaaggaaa

SEQ ID NO: 1167904 - RNA, 27 nt, Human
ucccuauguaaacaaaaaaaggaaacu

SEQ ID NO: 1167905 - RNA, 22 nt, Human
ucuccaauacaaaguauggggc

SEQ ID NO: 1167906 - RNA, 20 nt, Human
ucucuuagcaguaauacugg

SEQ ID NO: 1167907 - RNA, 21 nt, Human
ucucuugugauacuggaaagu

SEQ ID NO: 1167908 - RNA, 21 nt, Human
ugaaacaaucacuaacaggca

SEQ ID NO: 1167909 - RNA, 20 nt, Human
ugagaaucuacagcugcaga

SEQ ID NO: 1167910 - RNA, 21 nt, Human
uggacauuuccuucccaacag

SEQ ID NO: 1167911 - RNA, 26 nt, Human
uggccaccucaaaguaguuguaacau

SEQ ID NO: 1167912 - RNA, 21 nt, Human
uguaaacaaaaaaaggaaaca

SEQ ID NO: 1167913 - RNA, 20 nt, Human
uguacacacgacuauaaaca

SEQ ID NO: 1167914 - RNA, 26 nt, Human
uguucccuauguaaacaaaaaaagga

SEQ ID NO: 1167915 - RNA, 20 nt, Human
uuaaaguauacaguacacca

SEQ ID NO: 1167916 - RNA, 20 nt, Human
uucccuauguaaacaaaaaa

SEQ ID NO: 1167917 - RNA, 23 nt, Human
uuuaacaaaguuggaaugcuggc

SEQ ID NO: 1167918 - RNA, 23 nt, Human
aaucugcuucuccuuuaucuccg

SEQ ID NO: 1167919 - RNA, 27 nt, Human
acugagaaggaaaauguuucauaaucu

SEQ ID NO: 1167920 - RNA, 18 nt, Human
agaaggaaaauguuucau

SEQ ID NO: 1167921 - RNA, 22 nt, Human
ucuccgcaccugccuuccgcug

SEQ ID NO: 1167922 - RNA, 18 nt, Human
uuuaucuccgcaccugcc

SEQ ID NO: 1167923 - RNA, 18 nt, Human
acaugcugccauugaucc

SEQ ID NO: 1167924 - RNA, 20 nt, Human
acccucugggcagagcucaa

SEQ ID NO: 1167925 - RNA, 23 nt, Human
agaagcugacagauaaaguuuug

SEQ ID NO: 1167926 - RNA, 23 nt, Human
agcugguuucuguugcagagagu

SEQ ID NO: 1167927 - RNA, 19 nt, Human
agggagaagcugacagaua

SEQ ID NO: 1167928 - RNA, 23 nt, Human
caggaaacuaaagcacacaguga

SEQ ID NO: 1167929 - RNA, 19 nt, Human
cauccucucauuccaaccu

SEQ ID NO: 1167930 - RNA, 26 nt, Human
ccacagguuuucucuagccaagaucc

SEQ ID NO: 1167931 - RNA, 22 nt, Human
ccaggaaacuaaagcacacagu

SEQ ID NO: 1167932 - RNA, 24 nt, Human
cucaaugccccuauuuuauaaacc

SEQ ID NO: 1167933 - RNA, 20 nt, Human
cuuccaccauuccacacauc

SEQ ID NO: 1167934 - RNA, 19 nt, Human
gcagggagaagcugacaga

SEQ ID NO: 1167935 - RNA, 26 nt, Human
guagagcauuccucacaaguucauaa

SEQ ID NO: 1167936 - RNA, 23 nt, Human
gugaaguggcagggagaagcuga

SEQ ID NO: 1167937 - RNA, 19 nt, Human
guggcagggagaagcugac

SEQ ID NO: 1167938 - RNA, 19 nt, Human
uaaaccaggaaacuaaagc

SEQ ID NO: 1167939 - RNA, 22 nt, Human
uaaguaacuuguucaaagguau

SEQ ID NO: 1167940 - RNA, 25 nt, Human
ucauacaugcugccauugauccgaa

SEQ ID NO: 1167941 - RNA, 23 nt, Human
uccacacaucuuggaaguagagc

SEQ ID NO: 1167942 - RNA, 19 nt, Human
uccugcugguaccuugauu

SEQ ID NO: 1167943 - RNA, 18 nt, Human
uccuuugcagucauccuc

SEQ ID NO: 1167944 - RNA, 26 nt, Human
uccuuugcagucauccucucauucca

SEQ ID NO: 1167945 - RNA, 21 nt, Human
ugaggaggugaacuaggacca

SEQ ID NO: 1167946 - RNA, 23 nt, Human
ugauuacuaaguggaaaagcugg

SEQ ID NO: 1167947 - RNA, 19 nt, Human
uggcagggagaagcugaca

SEQ ID NO: 1167948 - RNA, 18 nt, Human
ugugaaguggcagggaga

SEQ ID NO: 1167949 - RNA, 21 nt, Human
uguugcagagaguugggucuc

SEQ ID NO: 1167950 - RNA, 25 nt, Human
uguuugucuuccaccauuccacaca

SEQ ID NO: 1167951 - RNA, 18 nt, Human
uucauaaaaauccugcug

SEQ ID NO: 1167952 - RNA, 20 nt, Human
uucucuagccaagauccuga

SEQ ID NO: 1167953 - RNA, 27 nt, Human
aaacaacagagcugaaccagugaagca

SEQ ID NO: 1167954 - RNA, 21 nt, Human
aacauuuuuuuuuuuagaugg

SEQ ID NO: 1167955 - RNA, 24 nt, Human
aauauuguacucuagucugggcaa

SEQ ID NO: 1167956 - RNA, 22 nt, Human
acuaaaauccccaaauuacuuc

SEQ ID NO: 1167957 - RNA, 19 nt, Human
agagcugaaccagugaagc

SEQ ID NO: 1167958 - RNA, 19 nt, Human
agcacuaaagagaaaauau

SEQ ID NO: 1167959 - RNA, 24 nt, Human
agcccuuugggaggcagagguggg

SEQ ID NO: 1167960 - RNA, 24 nt, Human
aggaucacuugagcccaggaguuu

SEQ ID NO: 1167961 - RNA, 24 nt, Human
aggcagaggugggaggaucacuug

SEQ ID NO: 1167962 - RNA, 18 nt, Human
aggugggaggaucacuug

SEQ ID NO: 1167963 - RNA, 23 nt, Human
aggugggaggaucacuugagccc

SEQ ID NO: 1167964 - RNA, 24 nt, Human
auauuguacucuagucugggcaac

SEQ ID NO: 1167965 - RNA, 20 nt, Human
aucacuugagcccaggaguu

SEQ ID NO: 1167966 - RNA, 18 nt, Human
auuguacucuagucuggg

SEQ ID NO: 1167967 - RNA, 23 nt, Human
auuguacucuagucugggcaaca

SEQ ID NO: 1167968 - RNA, 24 nt, Human
auuguacucuagucugggcaacag

SEQ ID NO: 1167969 - RNA, 20 nt, Human
caaaaaguacaugaucacaa

SEQ ID NO: 1167970 - RNA, 22 nt, Human
caccugcagucccagcccuuug

SEQ ID NO: 1167971 - RNA, 24 nt, Human
caccugcagucccagcccuuuggg

SEQ ID NO: 1167972 - RNA, 24 nt, Human
cagagccuggggugagaaagcugg

SEQ ID NO: 1167973 - RNA, 21 nt, Human
cagcccuuugggaggcagagg

SEQ ID NO: 1167974 - RNA, 24 nt, Human
cagcccuuugggaggcagaggugg

SEQ ID NO: 1167975 - RNA, 21 nt, Human
cauuuuuuuuuuuagauggaa

SEQ ID NO: 1167976 - RNA, 18 nt, Human
cccuuugggaggcagagg

SEQ ID NO: 1167977 - RNA, 18 nt, Human
ccugcagucccagcccuu

SEQ ID NO: 1167978 - RNA, 20 nt, Human
ccuggggugagaaagcuggg

SEQ ID NO: 1167979 - RNA, 21 nt, Human
ccuuugggaggcagagguggg

SEQ ID NO: 1167980 - RNA, 22 nt, Human
cugaaccagugaagcacauuuc

SEQ ID NO: 1167981 - RNA, 18 nt, Human
gagcccaggaguuugagg

SEQ ID NO: 1167982 - RNA, 25 nt, Human
gaggcagaggugggaggaucacuug

SEQ ID NO: 1167983 - RNA, 23 nt, Human
gaggugggaggaucacuugagcc

SEQ ID NO: 1167984 - RNA, 24 nt, Human
gaucacuugagcccaggaguuuga

SEQ ID NO: 1167985 - RNA, 20 nt, Human
gcacuaaagagaaaauauga

SEQ ID NO: 1167986 - RNA, 24 nt, Human
gcccaggaguuugaggcugcagug

SEQ ID NO: 1167987 - RNA, 22 nt, Human
ggaucacuugagcccaggaguu

SEQ ID NO: 1167988 - RNA, 20 nt, Human
uaaaauccccaaauuacuuc

SEQ ID NO: 1167989 - RNA, 21 nt, Human
uaagcacuaaagagaaaauau

SEQ ID NO: 1167990 - RNA, 19 nt, Human
ucacuugagcccaggaguu

SEQ ID NO: 1167991 - RNA, 20 nt, Human
uccauaauaaaaguuacuau

SEQ ID NO: 1167992 - RNA, 24 nt, Human
ucccaaaauuguccuagacaacua

SEQ ID NO: 1167993 - RNA, 23 nt, Human
ucucagaccgcggcugcgucgcc

SEQ ID NO: 1167994 - RNA, 22 nt, Human
ucuccccaagagacuuauucaa

SEQ ID NO: 1167995 - RNA, 21 nt, Human
ucugagggauauuauuaaaaa

SEQ ID NO: 1167996 - RNA, 20 nt, Human
ugagaaagcugggcauggua

SEQ ID NO: 1167997 - RNA, 23 nt, Human
ugaggcugcagugagcugugauu

SEQ ID NO: 1167998 - RNA, 19 nt, Human
ugcagagccuggggugaga

SEQ ID NO: 1167999 - RNA, 19 nt, Human
ugggaggcagaggugggag

SEQ ID NO: 1168000 - RNA, 20 nt, Human
ugggaggcagaggugggagg

SEQ ID NO: 1168001 - RNA, 24 nt, Human
ugggaggcagaggugggaggauca

SEQ ID NO: 1168002 - RNA, 18 nt, Human
uggggugagaaagcuggg

SEQ ID NO: 1168003 - RNA, 18 nt, Human
uguacucuagucugggca

SEQ ID NO: 1168004 - RNA, 19 nt, Human
uguacucuagucugggcaa

SEQ ID NO: 1168005 - RNA, 20 nt, Human
uguacucuagucugggcaac

SEQ ID NO: 1168006 - RNA, 22 nt, Human
uguacucuagucugggcaacag

SEQ ID NO: 1168007 - RNA, 19 nt, Human
uguuuaaggaaacaacaga

SEQ ID NO: 1168008 - RNA, 26 nt, Human
uuagauggaaaaguuugcagaaagag

SEQ ID NO: 1168009 - RNA, 24 nt, Human
uucuccccaagagacuuauucaaa

SEQ ID NO: 1168010 - RNA, 25 nt, Human
uuuaaaaaaaaauacaaaaacaaac

SEQ ID NO: 1168011 - RNA, 25 nt, Human
uuuaaauauauauugacauuuaugu

SEQ ID NO: 1168012 - RNA, 22 nt, Human
uuuaaguacauauuggauuugu

SEQ ID NO: 1168013 - RNA, 20 nt, Human
uuuccuauguuuccauuauu

SEQ ID NO: 1168014 - RNA, 22 nt, Human
agguccaugaaaccagcagccu

SEQ ID NO: 1168015 - RNA, 25 nt, Human
cccuuuauagacuguuguuuuuaac

SEQ ID NO: 1168016 - RNA, 22 nt, Human
cucugugucauugugguacagg

SEQ ID NO: 1168017 - RNA, 21 nt, Human
gaaacuuuuacuacucugccu

SEQ ID NO: 1168018 - RNA, 22 nt, Human
guacagguccaugaaaccagca

SEQ ID NO: 1168019 - RNA, 23 nt, Human
uagugcagcuuuaaaaacuccaa

SEQ ID NO: 1168020 - RNA, 22 nt, Human
ucaguccugaugcucugguguu

SEQ ID NO: 1168021 - RNA, 20 nt, Human
ucccuaauaccuuuucuucg

SEQ ID NO: 1168022 - RNA, 21 nt, Human
uccugaugcucugguguucuc

SEQ ID NO: 1168023 - RNA, 24 nt, Human
ucugcugugagcaauauuugaaac

SEQ ID NO: 1168024 - RNA, 23 nt, Human
ugagcaauauuugaaaccuuaac

SEQ ID NO: 1168025 - RNA, 19 nt, Human
ugaugcucugguguucucu

SEQ ID NO: 1168026 - RNA, 22 nt, Human
ugcucugguguucucuguguca

SEQ ID NO: 1168027 - RNA, 18 nt, Human
ugguguucucugugucau

SEQ ID NO: 1168028 - RNA, 19 nt, Human
uuuucuggcuuucauuuug

SEQ ID NO: 1168029 - RNA, 21 nt, Human
uuuugguuuuucccauccacu

SEQ ID NO: 1168030 - RNA, 19 nt, Human
aaaaagccagccaacugag

SEQ ID NO: 1168031 - RNA, 18 nt, Human
aaauauccacuauucccc

SEQ ID NO: 1168032 - RNA, 20 nt, Human
aacaccuauccagucuugac

SEQ ID NO: 1168033 - RNA, 25 nt, Human
aaccaucuguuugucaaacaccuaa

SEQ ID NO: 1168034 - RNA, 18 nt, Human
aacuucucucuccaaucu

SEQ ID NO: 1168035 - RNA, 21 nt, Human
aagccagccaacugagugcaa

SEQ ID NO: 1168036 - RNA, 20 nt, Human
aagcucagcucgggaugcgg

SEQ ID NO: 1168037 - RNA, 21 nt, Human
aauauccacuauucccccagc

SEQ ID NO: 1168038 - RNA, 23 nt, Human
aauggcaauuaacagucccuaca

SEQ ID NO: 1168039 - RNA, 19 nt, Human
acacacacacguauauaua

SEQ ID NO: 1168040 - RNA, 22 nt, Human
accaagcccuuauugcaauccc

SEQ ID NO: 1168041 - RNA, 26 nt, Human
accuaaccaucuaacuuuuacaccau

SEQ ID NO: 1168042 - RNA, 20 nt, Human
agacuagaaaaucuguggug

SEQ ID NO: 1168043 - RNA, 23 nt, Human
aggcuuucagccaagcucagcuc

SEQ ID NO: 1168044 - RNA, 19 nt, Human
agguacauccaaaaugcaa

SEQ ID NO: 1168045 - RNA, 18 nt, Human
agugaugacuaacaccua

SEQ ID NO: 1168046 - RNA, 24 nt, Human
auauauauguguguauauauacau

SEQ ID NO: 1168047 - RNA, 19 nt, Human
auauauguguauauauaca

SEQ ID NO: 1168048 - RNA, 19 nt, Human
auauguguguauauauaca

SEQ ID NO: 1168049 - RNA, 22 nt, Human
auccaaaaugcaacaauuacac

SEQ ID NO: 1168050 - RNA, 18 nt, Human
auggaagagagguggugg

SEQ ID NO: 1168051 - RNA, 20 nt, Human
caaaaugcaacaauuacaca

SEQ ID NO: 1168052 - RNA, 26 nt, Human
caaaaugcaacaauuacacauaugac

SEQ ID NO: 1168053 - RNA, 21 nt, Human
caaaguauaauuuuacuggga

SEQ ID NO: 1168054 - RNA, 24 nt, Human
cacacacacacacguauauauaug

SEQ ID NO: 1168055 - RNA, 18 nt, Human
cacacacacguauauaua

SEQ ID NO: 1168056 - RNA, 22 nt, Human
cacacguauauauauguauaua

SEQ ID NO: 1168057 - RNA, 21 nt, Human
cacacuugacuucugucccuu

SEQ ID NO: 1168058 - RNA, 19 nt, Human
caccauacguuucaugguc

SEQ ID NO: 1168059 - RNA, 22 nt, Human
cacguauauauauguauauaua

SEQ ID NO: 1168060 - RNA, 19 nt, Human
cacuugacuucugucccuu

SEQ ID NO: 1168061 - RNA, 22 nt, Human
cagccagucaggagaaaucuga

SEQ ID NO: 1168062 - RNA, 21 nt, Human
cauauccuaagaauuuaggaa

SEQ ID NO: 1168063 - RNA, 25 nt, Human
cauuaaauauccacuauucccccag

SEQ ID NO: 1168064 - RNA, 22 nt, Human
cuauccagucuugacaguuuua

SEQ ID NO: 1168065 - RNA, 20 nt, Human
cuccaaucuggccacgcuau

SEQ ID NO: 1168066 - RNA, 25 nt, Human
cuucacacuugacuucugucccuuc

SEQ ID NO: 1168067 - RNA, 22 nt, Human
ggauaccauggggcccaaacug

SEQ ID NO: 1168068 - RNA, 22 nt, Human
gucuugccuaccuuacugccca

SEQ ID NO: 1168069 - RNA, 19 nt, Human
guguauauauacauauaua

SEQ ID NO: 1168070 - RNA, 26 nt, Human
uaaaaagccagccaacugagugcaac

SEQ ID NO: 1168071 - RNA, 22 nt, Human
uaaacucccaaaccagaagcuu

SEQ ID NO: 1168072 - RNA, 23 nt, Human
uaagaauuuaggaacagccaguc

SEQ ID NO: 1168073 - RNA, 22 nt, Human
uaagguaaguauuaaaaagcca

SEQ ID NO: 1168074 - RNA, 23 nt, Human
uaaguauuaaaaagccagccaac

SEQ ID NO: 1168075 - RNA, 24 nt, Human
uacacacacacacacguauauaua

SEQ ID NO: 1168076 - RNA, 25 nt, Human
uacacacacacacacguauauauau

SEQ ID NO: 1168077 - RNA, 20 nt, Human
uacacggauauauauauaua

SEQ ID NO: 1168078 - RNA, 20 nt, Human
uacauacacggauauauaua

SEQ ID NO: 1168079 - RNA, 22 nt, Human
uauauacacacacacacacggu

SEQ ID NO: 1168080 - RNA, 25 nt, Human
uauauacacacacacacacguauag

SEQ ID NO: 1168081 - RNA, 25 nt, Human
uauauacacacacacacacguauau

SEQ ID NO: 1168082 - RNA, 24 nt, Human
uauauacauauauauguguguaua

SEQ ID NO: 1168083 - RNA, 27 nt, Human
uauauacauauauauguguguauauaa

SEQ ID NO: 1168084 - RNA, 21 nt, Human
uauauauacacacacacacac

SEQ ID NO: 1168085 - RNA, 20 nt, Human
uauauauauauguguauaua

SEQ ID NO: 1168086 - RNA, 18 nt, Human
uauauauauguauauaua

SEQ ID NO: 1168087 - RNA, 22 nt, Human
uauauauauguguauauauaca

SEQ ID NO: 1168088 - RNA, 23 nt, Human
uauauauauguguauauauacau

SEQ ID NO: 1168089 - RNA, 24 nt, Human
uauauauauguguauauauacaua

SEQ ID NO: 1168090 - RNA, 18 nt, Human
uauauauguauauauaca

SEQ ID NO: 1168091 - RNA, 22 nt, Human
uauauauguguguauauauaca

SEQ ID NO: 1168092 - RNA, 24 nt, Human
uauauauguguguauauauacaua

SEQ ID NO: 1168093 - RNA, 20 nt, Human
uauauguguguauauauaca

SEQ ID NO: 1168094 - RNA, 25 nt, Human
uaucuaaacucccaaaccagaagcu

SEQ ID NO: 1168095 - RNA, 22 nt, Human
uauguguauauauacauauaua

SEQ ID NO: 1168096 - RNA, 24 nt, Human
uauguguauauauacauauauaug

SEQ ID NO: 1168097 - RNA, 29 nt, Human
uauguguauauauacauauauaugugugu

SEQ ID NO: 1168098 - RNA, 24 nt, Human
uauuaaaaagccagccaacugagu

SEQ ID NO: 1168099 - RNA, 20 nt, Human
uauuuacagcuuuuuuuugg

SEQ ID NO: 1168100 - RNA, 22 nt, Human
uauuucauauauauauaugugu

SEQ ID NO: 1168101 - RNA, 21 nt, Human
ucaaacaccuaaccaucuaac

SEQ ID NO: 1168102 - RNA, 24 nt, Human
ucaaaccuaucuaaacucccaaac

SEQ ID NO: 1168103 - RNA, 22 nt, Human
ucaccaagcccuuauugcaauc

SEQ ID NO: 1168104 - RNA, 22 nt, Human
ucaguugaggcuauggcuccua

SEQ ID NO: 1168105 - RNA, 24 nt, Human
ucccugauaaacaaagggggagga

SEQ ID NO: 1168106 - RNA, 18 nt, Human
uccgaggagguggcugag

SEQ ID NO: 1168107 - RNA, 21 nt, Human
ucuaaacucccaaaccagaag

SEQ ID NO: 1168108 - RNA, 21 nt, Human
ucucuccaaucuggccacgcu

SEQ ID NO: 1168109 - RNA, 23 nt, Human
ucugaccaaauuuagcaaucacu

SEQ ID NO: 1168110 - RNA, 20 nt, Human
ugaccugcaaacagauaccu

SEQ ID NO: 1168111 - RNA, 21 nt, Human
ugaccugcaaacagauaccuu

SEQ ID NO: 1168112 - RNA, 20 nt, Human
ugcaaucccaaauaugcaau

SEQ ID NO: 1168113 - RNA, 21 nt, Human
ugccuaccuuacugcccaugu

SEQ ID NO: 1168114 - RNA, 18 nt, Human
uggaaguccacaggcuuu

SEQ ID NO: 1168115 - RNA, 24 nt, Human
uggcuccuaugccuugggaugguu

SEQ ID NO: 1168116 - RNA, 28 nt, Human
uguauauauacauacacggauauauaua

SEQ ID NO: 1168117 - RNA, 19 nt, Human
uguauauauacauauauau

SEQ ID NO: 1168118 - RNA, 24 nt, Human
uguauauauacauauauaugugug

SEQ ID NO: 1168119 - RNA, 20 nt, Human
uguauuucauauauauauau

SEQ ID NO: 1168120 - RNA, 22 nt, Human
uguauuucauauauauauaugu

SEQ ID NO: 1168121 - RNA, 18 nt, Human
uguguauauauacauaca

SEQ ID NO: 1168122 - RNA, 18 nt, Human
uguguauauauacauaua

SEQ ID NO: 1168123 - RNA, 20 nt, Human
uguguauauauacauauaua

SEQ ID NO: 1168124 - RNA, 20 nt, Human
uguguauauauacauauaua

SEQ ID NO: 1168125 - RNA, 22 nt, Human
uguguauauauacauauauaug

SEQ ID NO: 1168126 - RNA, 21 nt, Human
uuaaucccaaacacugggcua

SEQ ID NO: 1168127 - RNA, 21 nt, Human
uucccccagcucaccaagccc

SEQ ID NO: 1168128 - RNA, 23 nt, Human
uucccccagcucaccaagcccuu

SEQ ID NO: 1168129 - RNA, 22 nt, Human
uuucucauuuucugaccugcaa

SEQ ID NO: 1168130 - RNA, 24 nt, Human
aacaucaaauauucaucugaacaa

SEQ ID NO: 1168131 - RNA, 21 nt, Human
aaccaugauagcgauacuuuc

SEQ ID NO: 1168132 - RNA, 30 nt, Human
aagagagaagacucaagaagcgaagaggaa

SEQ ID NO: 1168133 - RNA, 25 nt, Human
aagcacacggugcuggugacagaac

SEQ ID NO: 1168134 - RNA, 22 nt, Human
aagcuccaugaggagaagauga

SEQ ID NO: 1168135 - RNA, 20 nt, Human
aagucugcucucugugcuuc

SEQ ID NO: 1168136 - RNA, 21 nt, Human
accugaaaacggccaagaagc

SEQ ID NO: 1168137 - RNA, 21 nt, Human
agacucaagaagcgaagagga

SEQ ID NO: 1168138 - RNA, 29 nt, Human
agagagaagacucaagaagcgaagaggaa

SEQ ID NO: 1168139 - RNA, 19 nt, Human
agagauccagaggcucaag

SEQ ID NO: 1168140 - RNA, 22 nt, Human
aggaaauugcggaccugaaaac

SEQ ID NO: 1168141 - RNA, 24 nt, Human
aggagcacacccguccuuugaggc

SEQ ID NO: 1168142 - RNA, 21 nt, Human
aggcccgggaggaggcccgga

SEQ ID NO: 1168143 - RNA, 18 nt, Human
agguaucaaagcuugaaa

SEQ ID NO: 1168144 - RNA, 21 nt, Human
aguaaggacagcgcucaccau

SEQ ID NO: 1168145 - RNA, 22 nt, Human
agugacaaaguaaggacagcgc

SEQ ID NO: 1168146 - RNA, 20 nt, Human
aucauuucgccucucuguuu

SEQ ID NO: 1168147 - RNA, 26 nt, Human
caagaagccaucucgaagaucaagug

SEQ ID NO: 1168148 - RNA, 20 nt, Human
cacggugcuggugacagaac

SEQ ID NO: 1168149 - RNA, 24 nt, Human
cagaacaucaaauauucaucugaa

SEQ ID NO: 1168150 - RNA, 18 nt, Human
cagauaaaaucaaggcug

SEQ ID NO: 1168151 - RNA, 28 nt, Human
caucagacccauguagaacccaucucuu

SEQ ID NO: 1168152 - RNA, 19 nt, Human
caugcuuccugggugauac

SEQ ID NO: 1168153 - RNA, 21 nt, Human
ccacacauugcauaguaaggc

SEQ ID NO: 1168154 - RNA, 19 nt, Human
ccaugaggagaagaugaag

SEQ ID NO: 1168155 - RNA, 22 nt, Human
cgacggcagcagugacaaagga

SEQ ID NO: 1168156 - RNA, 18 nt, Human
cggugaagguacgugaug

SEQ ID NO: 1168157 - RNA, 23 nt, Human
cuaagacacacauuuaucaguuu

SEQ ID NO: 1168158 - RNA, 21 nt, Human
cugguuaguacaguaauccca

SEQ ID NO: 1168159 - RNA, 18 nt, Human
cuucuucauguguuuucu

SEQ ID NO: 1168160 - RNA, 21 nt, Human
gacccauguagaacccaucuc

SEQ ID NO: 1168161 - RNA, 22 nt, Human
gaucuguuuugcaguccucccc

SEQ ID NO: 1168162 - RNA, 23 nt, Human
gcagcagugacaaaguaaggaca

SEQ ID NO: 1168163 - RNA, 21 nt, Human
gcaggaaaugucaaggacggu

SEQ ID NO: 1168164 - RNA, 21 nt, Human
gcgacggcagcagugacaaag

SEQ ID NO: 1168165 - RNA, 20 nt, Human
gcuucuaacaugcuuccugg

SEQ ID NO: 1168166 - RNA, 18 nt, Human
ggaauuggaaaagagaug

SEQ ID NO: 1168167 - RNA, 19 nt, Human
gggaaaaaccaugauagcg

SEQ ID NO: 1168168 - RNA, 21 nt, Human
gguaucaaagcuugaaagaga

SEQ ID NO: 1168169 - RNA, 24 nt, Human
uaaggccccagaacaucaaauauu

SEQ ID NO: 1168170 - RNA, 22 nt, Human
uagcgauacuuucuaauuuuaa

SEQ ID NO: 1168171 - RNA, 20 nt, Human
ucaagucugcucucugugcu

SEQ ID NO: 1168172 - RNA, 20 nt, Human
ucaagugggagucggagcgg

SEQ ID NO: 1168173 - RNA, 21 nt, Human
uccaagcagauaaaaucaagg

SEQ ID NO: 1168174 - RNA, 22 nt, Human
ugcagaccacacauugcauagu

SEQ ID NO: 1168175 - RNA, 19 nt, Human
ugcuugucugcagaccaca

SEQ ID NO: 1168176 - RNA, 23 nt, Human
uggagagauccagaggcucaagu

SEQ ID NO: 1168177 - RNA, 18 nt, Human
uggugacagaacucaaag

SEQ ID NO: 1168178 - RNA, 19 nt, Human
uguaaacagugccuaccuu

SEQ ID NO: 1168179 - RNA, 21 nt, Human
uguaaacagugccuaccuuuu

SEQ ID NO: 1168180 - RNA, 21 nt, Human
uguuaagaugcaaauucugag

SEQ ID NO: 1168181 - RNA, 21 nt, Human
uuaucaagcagcacgagcagg

SEQ ID NO: 1168182 - RNA, 22 nt, Human
uucuucauguguuuucuuguca

SEQ ID NO: 1168183 - RNA, 22 nt, Human
aacuaugugaucccaaagcgcc

SEQ ID NO: 1168184 - RNA, 18 nt, Human
acuaugugaucccaaagc

SEQ ID NO: 1168185 - RNA, 19 nt, Human
caacuaugugaucccaaag

SEQ ID NO: 1168186 - RNA, 21 nt, Human
cagucccaggacaacugucag

SEQ ID NO: 1168187 - RNA, 19 nt, Human
ggaagucuggcuuuggguc

SEQ ID NO: 1168188 - RNA, 22 nt, Human
ggaagucuggcuuugggucuuu

SEQ ID NO: 1168189 - RNA, 19 nt, Human
gucaggaauaagacaagca

SEQ ID NO: 1168190 - RNA, 20 nt, Human
gucugguuugucgucugcau

SEQ ID NO: 1168191 - RNA, 23 nt, Human
uaagacaagcagucccaggacaa

SEQ ID NO: 1168192 - RNA, 21 nt, Human
ucuggcuugucgucuggcuug

SEQ ID NO: 1168193 - RNA, 24 nt, Human
uggcuugucgucuggcuugucugg

SEQ ID NO: 1168194 - RNA, 21 nt, Human
aacgagcgccggcugugcacg

SEQ ID NO: 1168195 - RNA, 20 nt, Human
aaggguccaggggaguuguu

SEQ ID NO: 1168196 - RNA, 22 nt, Human
agaauaaccacugaaucccaaa

SEQ ID NO: 1168197 - RNA, 25 nt, Human
agagcuucuccgaagcagcggucau

SEQ ID NO: 1168198 - RNA, 21 nt, Human
agcagggaaccagggcuggcc

SEQ ID NO: 1168199 - RNA, 24 nt, Human
agcgacgccagcuucagcagcgcg

SEQ ID NO: 1168200 - RNA, 23 nt, Human
aggacgguggcugcagcagggaa

SEQ ID NO: 1168201 - RNA, 18 nt, Human
aggcagcuuugcuccucu

SEQ ID NO: 1168202 - RNA, 24 nt, Human
aguaacagugacugcaguuagggu

SEQ ID NO: 1168203 - RNA, 19 nt, Human
agucagaugcaggcccaag

SEQ ID NO: 1168204 - RNA, 20 nt, Human
caacaguaaaaagcuaucaa

SEQ ID NO: 1168205 - RNA, 19 nt, Human
cacugaaucccaaaaaguc

SEQ ID NO: 1168206 - RNA, 21 nt, Human
cacuuggaaggcagcuuugcu

SEQ ID NO: 1168207 - RNA, 22 nt, Human
cagacaggcacuuggaaggcag

SEQ ID NO: 1168208 - RNA, 19 nt, Human
cagaugggacaaacugggg

SEQ ID NO: 1168209 - RNA, 23 nt, Human
cagaugggacaaacugggggccu

SEQ ID NO: 1168210 - RNA, 22 nt, Human
cagcagcgcggggcggcggcgc

SEQ ID NO: 1168211 - RNA, 21 nt, Human
cagcggcgucuccuccugcuc

SEQ ID NO: 1168212 - RNA, 22 nt, Human
caggcccaaggguccaggggag

SEQ ID NO: 1168213 - RNA, 19 nt, Human
caugcaggcuuuugugugg

SEQ ID NO: 1168214 - RNA, 22 nt, Human
ccacccggaaaccucccagcag

SEQ ID NO: 1168215 - RNA, 23 nt, Human
ccacccggaaaccucccagcagu

SEQ ID NO: 1168216 - RNA, 19 nt, Human
ccccggccugcuccgauga

SEQ ID NO: 1168217 - RNA, 21 nt, Human
ccuggacucagcuucugacuc

SEQ ID NO: 1168218 - RNA, 25 nt, Human
cgcggacccuucccgccggcggcgu

SEQ ID NO: 1168219 - RNA, 23 nt, Human
cugcagcagggaaccagggcugg

SEQ ID NO: 1168220 - RNA, 20 nt, Human
cugcaguuagggucgagagc

SEQ ID NO: 1168221 - RNA, 21 nt, Human
cugcucuguucucccaggcaa

SEQ ID NO: 1168222 - RNA, 21 nt, Human
cugcucuguucucccaggcac

SEQ ID NO: 1168223 - RNA, 24 nt, Human
cuucagcagcgcggggcggcggcg

SEQ ID NO: 1168224 - RNA, 21 nt, Human
gaacgagcgccggcugugcac

SEQ ID NO: 1168225 - RNA, 19 nt, Human
gaaggcagcuuugcuccuc

SEQ ID NO: 1168226 - RNA, 20 nt, Human
gaaggcagcuuugcuccucu

SEQ ID NO: 1168227 - RNA, 18 nt, Human
gacugggcagggcuugcu

SEQ ID NO: 1168228 - RNA, 18 nt, Human
gcacuuggaaggcagcuu

SEQ ID NO: 1168229 - RNA, 21 nt, Human
gcacuuggaaggcagcuuugc

SEQ ID NO: 1168230 - RNA, 19 nt, Human
gcgcgcgcgaggccgcugg

SEQ ID NO: 1168231 - RNA, 20 nt, Human
gcggcggcgcgcgcgaggcc

SEQ ID NO: 1168232 - RNA, 22 nt, Human
ggaucuguccaguagggucacu

SEQ ID NO: 1168233 - RNA, 19 nt, Human
gguaaccggguguccaggg

SEQ ID NO: 1168234 - RNA, 18 nt, Human
gugccgggaaggccaggc

SEQ ID NO: 1168235 - RNA, 24 nt, Human
gugcguggcacgagggcggcagcg

SEQ ID NO: 1168236 - RNA, 18 nt, Human
uaacagugacugcaguua

SEQ ID NO: 1168237 - RNA, 22 nt, Human
uaaccacugaaucccaaaaagu

SEQ ID NO: 1168238 - RNA, 25 nt, Human
ucagaugggacaaacugggggccug

SEQ ID NO: 1168239 - RNA, 18 nt, Human
ucccaaaaagucacugcg

SEQ ID NO: 1168240 - RNA, 18 nt, Human
ugccgggaaggccaggcc

SEQ ID NO: 1168241 - RNA, 21 nt, Human
ugcucuguucucccaggcaca

SEQ ID NO: 1168242 - RNA, 20 nt, Human
uggccuuggaucuguccagu

SEQ ID NO: 1168243 - RNA, 18 nt, Human
uggcugacgcuucccuuu

SEQ ID NO: 1168244 - RNA, 18 nt, Human
uggcugacgcuucccuuu

SEQ ID NO: 1168245 - RNA, 22 nt, Human
uggcugcagcagggaaccaggg

SEQ ID NO: 1168246 - RNA, 22 nt, Human
uggcugcauuuugugcucagag

SEQ ID NO: 1168247 - RNA, 19 nt, Human
uguggcugacgcuucccuu

SEQ ID NO: 1168248 - RNA, 20 nt, Human
uuguguggcugacgcuuccc

SEQ ID NO: 1168249 - RNA, 18 nt, Human
aagagguccucccaaccc

SEQ ID NO: 1168250 - RNA, 19 nt, Human
aagauuuugagaagaggcg

SEQ ID NO: 1168251 - RNA, 21 nt, Human
acucucucacacgcuuccccu

SEQ ID NO: 1168252 - RNA, 23 nt, Human
agaaacuauacaggaacagacaa

SEQ ID NO: 1168253 - RNA, 19 nt, Human
agaagaggcgaaaaagaaa

SEQ ID NO: 1168254 - RNA, 18 nt, Human
aggcggaggcugugaggg

SEQ ID NO: 1168255 - RNA, 20 nt, Human
aggcuauuuuauuuucaaac

SEQ ID NO: 1168256 - RNA, 23 nt, Human
agggagugggaggacgucggggg

SEQ ID NO: 1168257 - RNA, 24 nt, Human
caacaaagggaagaauacugaaaa

SEQ ID NO: 1168258 - RNA, 19 nt, Human
caaggagaaacuauacagg

SEQ ID NO: 1168259 - RNA, 23 nt, Human
cagcuccugugccaagagguccu

SEQ ID NO: 1168260 - RNA, 19 nt, Human
cccccccaccccacuuggc

SEQ ID NO: 1168261 - RNA, 20 nt, Human
cccccccaccccacuuggcc

SEQ ID NO: 1168262 - RNA, 19 nt, Human
ccgcggagggaggcggagg

SEQ ID NO: 1168263 - RNA, 21 nt, Human
ccuucguucccccccaccccc

SEQ ID NO: 1168264 - RNA, 20 nt, Human
ccuuugaugcaacaaaggga

SEQ ID NO: 1168265 - RNA, 19 nt, Human
cgcggagggaggcggaggc

SEQ ID NO: 1168266 - RNA, 18 nt, Human
cgggggguggggggaggc

SEQ ID NO: 1168267 - RNA, 24 nt, Human
cgucgggggguggggggaggcguu

SEQ ID NO: 1168268 - RNA, 18 nt, Human
cucacucucucacacgcu

SEQ ID NO: 1168269 - RNA, 20 nt, Human
cuguacaaaugcuuuauuuc

SEQ ID NO: 1168270 - RNA, 20 nt, Human
gagaagaggcgaaaaagaaa

SEQ ID NO: 1168271 - RNA, 23 nt, Human
gcaacaaagggaagaauacugaa

SEQ ID NO: 1168272 - RNA, 24 nt, Human
gccaagacuggagaaacagauucc

SEQ ID NO: 1168273 - RNA, 18 nt, Human
gcgugcuggagggugugc

SEQ ID NO: 1168274 - RNA, 21 nt, Human
gcucccuucguucccccccac

SEQ ID NO: 1168275 - RNA, 21 nt, Human
gcuggugguagcggcuugggg

SEQ ID NO: 1168276 - RNA, 20 nt, Human
ggagggugugcgagggagug

SEQ ID NO: 1168277 - RNA, 23 nt, Human
gugguagcggcuuggggaggugc

SEQ ID NO: 1168278 - RNA, 22 nt, Human
ucacuggauuuaaccguauccc

SEQ ID NO: 1168279 - RNA, 22 nt, Human
ucagaacuucagcuccugugcc

SEQ ID NO: 1168280 - RNA, 21 nt, Human
ucccuuugaugcaacaaaggg

SEQ ID NO: 1168281 - RNA, 18 nt, Human
uccugugccaagaggucc

SEQ ID NO: 1168282 - RNA, 18 nt, Human
ucucugucauccaucgcu

SEQ ID NO: 1168283 - RNA, 20 nt, Human
ugagaagaggcgaaaaagaa

SEQ ID NO: 1168284 - RNA, 21 nt, Human
ugagaagaggcgaaaaagaaa

SEQ ID NO: 1168285 - RNA, 22 nt, Human
ugccaggcgccauguuggaggg

SEQ ID NO: 1168286 - RNA, 18 nt, Human
ugcuggagggugugcgag

SEQ ID NO: 1168287 - RNA, 24 nt, Human
uggcucccuucguucccccccacc

SEQ ID NO: 1168288 - RNA, 21 nt, Human
ugggaggacgucggggggugg

SEQ ID NO: 1168289 - RNA, 20 nt, Human
uggugguagcggcuugggga

SEQ ID NO: 1168290 - RNA, 19 nt, Human
ugugcgagggagugggagg

SEQ ID NO: 1168291 - RNA, 23 nt, Human
uucaaacuggagaaagugaugga

SEQ ID NO: 1168292 - RNA, 21 nt, Human
uuggccugcgugcuggagggu

SEQ ID NO: 1168293 - RNA, 22 nt, Human
uuugagaagaggcgaaaaagaa

SEQ ID NO: 1168294 - RNA, 19 nt, Human
aaacgacacccacaaccuc

SEQ ID NO: 1168295 - RNA, 21 nt, Human
aaacgacacccacaaccucga

SEQ ID NO: 1168296 - RNA, 22 nt, Human
aaagucuuccaggaggcaggcc

SEQ ID NO: 1168297 - RNA, 19 nt, Human
aagcgcggccaccgggacc

SEQ ID NO: 1168298 - RNA, 21 nt, Human
aauugucgaaaaucuccagcc

SEQ ID NO: 1168299 - RNA, 23 nt, Human
accccaggacagagaagacagcg

SEQ ID NO: 1168300 - RNA, 19 nt, Human
acuccacacccagcacuag

SEQ ID NO: 1168301 - RNA, 22 nt, Human
agacagcgauggacgcguacag

SEQ ID NO: 1168302 - RNA, 26 nt, Human
agaccaggcagaccagcccagucagg

SEQ ID NO: 1168303 - RNA, 22 nt, Human
agagaagacagcgauggacgcg

SEQ ID NO: 1168304 - RNA, 18 nt, Human
aggcaggccuucaggggg

SEQ ID NO: 1168305 - RNA, 21 nt, Human
aggcggcgcgcgcccagcccg

SEQ ID NO: 1168306 - RNA, 21 nt, Human
augaccgccuccacggucccg

SEQ ID NO: 1168307 - RNA, 23 nt, Human
caagcccccccacagacccgccc

SEQ ID NO: 1168308 - RNA, 21 nt, Human
caaggacagcagcacacaggc

SEQ ID NO: 1168309 - RNA, 18 nt, Human
caaggugaacagcauccc

SEQ ID NO: 1168310 - RNA, 18 nt, Human
cacaaccucgagaaaggc

SEQ ID NO: 1168311 - RNA, 19 nt, Human
cacagacccgcccaugcag

SEQ ID NO: 1168312 - RNA, 19 nt, Human
cacccagcacuagagagcc

SEQ ID NO: 1168313 - RNA, 24 nt, Human
caccgggacccacagcacgggcag

SEQ ID NO: 1168314 - RNA, 28 nt, Human
cagcagcaggggacugaccacccuccag

SEQ ID NO: 1168315 - RNA, 23 nt, Human
cagcaggggacugaccacccucc

SEQ ID NO: 1168316 - RNA, 18 nt, Human
caggagcccccggcaugu

SEQ ID NO: 1168317 - RNA, 20 nt, Human
caggcccgggcccgaggcac

SEQ ID NO: 1168318 - RNA, 25 nt, Human
caguaggggcugggccgccucccuc

SEQ ID NO: 1168319 - RNA, 22 nt, Human
ccaaggugaacagcaucccgaa

SEQ ID NO: 1168320 - RNA, 24 nt, Human
ccaaggugaacagcaucccgaaga

SEQ ID NO: 1168321 - RNA, 19 nt, Human
ccaccgggacccacagcac

SEQ ID NO: 1168322 - RNA, 18 nt, Human
ccagcccagucagggccu

SEQ ID NO: 1168323 - RNA, 21 nt, Human
ccaggacagagaagacagcga

SEQ ID NO: 1168324 - RNA, 25 nt, Human
ccaggacagagaagacagcgaugga

SEQ ID NO: 1168325 - RNA, 19 nt, Human
cccacagacccgcccaugc

SEQ ID NO: 1168326 - RNA, 24 nt, Human
cccacagacccgcccaugcaggcc

SEQ ID NO: 1168327 - RNA, 21 nt, Human
cccagucagggccuccuuggg

SEQ ID NO: 1168328 - RNA, 19 nt, Human
ccccaggcuucagggcgag

SEQ ID NO: 1168329 - RNA, 20 nt, Human
cccccacguccagcaggggu

SEQ ID NO: 1168330 - RNA, 27 nt, Human
ccccccacagacccgcccaugcaggcc

SEQ ID NO: 1168331 - RNA, 21 nt, Human
ccgaagaagagcauggcccac

SEQ ID NO: 1168332 - RNA, 24 nt, Human
ccucacuccacacccagcacuaga

SEQ ID NO: 1168333 - RNA, 20 nt, Human
cgagaaaggccaacaugagc

SEQ ID NO: 1168334 - RNA, 18 nt, Human
cgcaaugucaucgcagaa

SEQ ID NO: 1168335 - RNA, 19 nt, Human
cgccaguaggggcugggcc

SEQ ID NO: 1168336 - RNA, 20 nt, Human
cgccaguaggggcugggccg

SEQ ID NO: 1168337 - RNA, 22 nt, Human
cgggcagcaaggacagcagcac

SEQ ID NO: 1168338 - RNA, 23 nt, Human
cuccagccaguaguucccagacu

SEQ ID NO: 1168339 - RNA, 25 nt, Human
cucugccgacguuuggaaaccacaa

SEQ ID NO: 1168340 - RNA, 21 nt, Human
cugggcgcgcgucccuguccc

SEQ ID NO: 1168341 - RNA, 23 nt, Human
gaaaaucuccagccaguaguucc

SEQ ID NO: 1168342 - RNA, 22 nt, Human
gaaaccacaagcagccccacug

SEQ ID NO: 1168343 - RNA, 26 nt, Human
gagcaagcgcggccaccgggacccac

SEQ ID NO: 1168344 - RNA, 21 nt, Human
gagcagcugagcaagcgcggc

SEQ ID NO: 1168345 - RNA, 18 nt, Human
gagcauggcccacacagg

SEQ ID NO: 1168346 - RNA, 26 nt, Human
gagcauggcccacacaggagcccccg

SEQ ID NO: 1168347 - RNA, 21 nt, Human
gaugaccgccuccacgguccc

SEQ ID NO: 1168348 - RNA, 22 nt, Human
gcaaaauugucgaaaaucucca

SEQ ID NO: 1168349 - RNA, 22 nt, Human
gcagaccaggcagaccagccca

SEQ ID NO: 1168350 - RNA, 21 nt, Human
gcaggggacugaccacccucc

SEQ ID NO: 1168351 - RNA, 19 nt, Human
gccaagcccccccacagac

SEQ ID NO: 1168352 - RNA, 22 nt, Human
gccaagcccccccacagaccgg

SEQ ID NO: 1168353 - RNA, 19 nt, Human
gccacccucuugggccagg

SEQ ID NO: 1168354 - RNA, 18 nt, Human
gccaguaggggcugggcc

SEQ ID NO: 1168355 - RNA, 23 nt, Human
ggcaggccuucagggggagcugg

SEQ ID NO: 1168356 - RNA, 21 nt, Human
ggccagguggcguucaggugc

SEQ ID NO: 1168357 - RNA, 19 nt, Human
gggagcugggccacccucu

SEQ ID NO: 1168358 - RNA, 18 nt, Human
gggcagcaaggacagcag

SEQ ID NO: 1168359 - RNA, 22 nt, Human
gggccagguggcguucaggugc

SEQ ID NO: 1168360 - RNA, 19 nt, Human
gugaagacgacgaaggcca

SEQ ID NO: 1168361 - RNA, 23 nt, Human
gugggcgggggcggggcacgcau

SEQ ID NO: 1168362 - RNA, 22 nt, Human
guucagggaagcggcaaaauug

SEQ ID NO: 1168363 - RNA, 24 nt, Human
uaaacauaaacgacacccacaacc

SEQ ID NO: 1168364 - RNA, 20 nt, Human
uagagcuucuccugacgcga

SEQ ID NO: 1168365 - RNA, 19 nt, Human
ucaggccaagcccccccac

SEQ ID NO: 1168366 - RNA, 24 nt, Human
uccagaacaggaggaugauguaag

SEQ ID NO: 1168367 - RNA, 24 nt, Human
uccagcaggggugugaugaccgcc

SEQ ID NO: 1168368 - RNA, 24 nt, Human
uccauaaacauaaacgacacccac

SEQ ID NO: 1168369 - RNA, 25 nt, Human
uccauaaacauaaacgacacccaca

SEQ ID NO: 1168370 - RNA, 23 nt, Human
ucccuggagaugcucugcucugg

SEQ ID NO: 1168371 - RNA, 18 nt, Human
uccggccggcuucagcgc

SEQ ID NO: 1168372 - RNA, 18 nt, Human
uccuuggggacccaucua

SEQ ID NO: 1168373 - RNA, 22 nt, Human
ucuccgugaagacgacgaaggc

SEQ ID NO: 1168374 - RNA, 19 nt, Human
ugaagcagguggcggagag

SEQ ID NO: 1168375 - RNA, 19 nt, Human
ugacgcgaggggaacagcu

SEQ ID NO: 1168376 - RNA, 20 nt, Human
ugccccaggcuucagggcga

SEQ ID NO: 1168377 - RNA, 23 nt, Human
ugcucugggaagucaaagucguu

SEQ ID NO: 1168378 - RNA, 24 nt, Human
uggagaugcucugcucugggaagu

SEQ ID NO: 1168379 - RNA, 22 nt, Human
uggaggucggucuccgugaaga

SEQ ID NO: 1168380 - RNA, 23 nt, Human
uguugaccagggcgaugaccacc

SEQ ID NO: 1168381 - RNA, 20 nt, Human
uucagggggagcugggccac

SEQ ID NO: 1168382 - RNA, 21 nt, Human
uuccauaaacauaaacgacac

SEQ ID NO: 1168383 - RNA, 21 nt, Human
uaucuggagaauuaucuagag

SEQ ID NO: 1168384 - RNA, 19 nt, Human
ucuuggccaguaauucugg

SEQ ID NO: 1168385 - RNA, 21 nt, Human
aaacaaaaugaagguaccuuc

SEQ ID NO: 1168386 - RNA, 24 nt, Human
aagaacucuguuaccagcuauauc

SEQ ID NO: 1168387 - RNA, 18 nt, Human
accagggagucagccggg

SEQ ID NO: 1168388 - RNA, 19 nt, Human
agucagccggguuucucca

SEQ ID NO: 1168389 - RNA, 27 nt, Human
caaaauaucacaaauguggcuuaaaaa

SEQ ID NO: 1168390 - RNA, 19 nt, Human
cagccggguuucuccaucu

SEQ ID NO: 1168391 - RNA, 19 nt, Human
cccaggucaucccauccau

SEQ ID NO: 1168392 - RNA, 20 nt, Human
ccucuucagaaaccagggag

SEQ ID NO: 1168393 - RNA, 22 nt, Human
cuugccacgaucucccagguca

SEQ ID NO: 1168394 - RNA, 27 nt, Human
gcaaaauaucacaaauguggcuuaaaa

SEQ ID NO: 1168395 - RNA, 20 nt, Human
gcuuaaaacaacaaaaauuu

SEQ ID NO: 1168396 - RNA, 19 nt, Human
uaaucauguuuucuaaagg

SEQ ID NO: 1168397 - RNA, 18 nt, Human
uacaaacaaaaugaaggu

SEQ ID NO: 1168398 - RNA, 26 nt, Human
uacaaacaaaaugaagguaccuucac

SEQ ID NO: 1168399 - RNA, 24 nt, Human
ucauguuuucuaaagguuuucuug

SEQ ID NO: 1168400 - RNA, 19 nt, Human
ucauuucuuugcagaguau

SEQ ID NO: 1168401 - RNA, 21 nt, Human
ucccaggucaucccauccauc

SEQ ID NO: 1168402 - RNA, 19 nt, Human
ucugugcuguggcugcugu

SEQ ID NO: 1168403 - RNA, 19 nt, Human
ucuuugguguuagcacugu

SEQ ID NO: 1168404 - RNA, 21 nt, Human
ucuuugguguuagcacugugu

SEQ ID NO: 1168405 - RNA, 26 nt, Human
ugagauauuucuuaaaaguuuagugu

SEQ ID NO: 1168406 - RNA, 22 nt, Human
ugccuaagcaccucuucagaaa

SEQ ID NO: 1168407 - RNA, 23 nt, Human
ugccuaagcaccucuucagaaac

SEQ ID NO: 1168408 - RNA, 24 nt, Human
uguacaaacaaaaugaagguaccu

SEQ ID NO: 1168409 - RNA, 25 nt, Human
uguacaaacaaaaugaagguaccuu

SEQ ID NO: 1168410 - RNA, 18 nt, Human
ugucagggcauguggggu

SEQ ID NO: 1168411 - RNA, 24 nt, Human
uuaaacuugccacgaucucccagg

SEQ ID NO: 1168412 - RNA, 27 nt, Human
uucggguuuggucuuuggggccgccgg

SEQ ID NO: 1168413 - RNA, 21 nt, Human
uugcaagacaggacuuuuugg

SEQ ID NO: 1168414 - RNA, 18 nt, Human
uuggucuuugguguuagc

SEQ ID NO: 1168415 - RNA, 24 nt, Human
uuuaaucauguuuucuaaagguuu

SEQ ID NO: 1168416 - RNA, 19 nt, Human
uuucuuggcaauuuccugg

SEQ ID NO: 1168417 - RNA, 24 nt, Human
aaccuaugccuaaaaugccacaga

SEQ ID NO: 1168418 - RNA, 18 nt, Human
acacugacugcccuccuc

SEQ ID NO: 1168419 - RNA, 23 nt, Human
acuccaucaaguguuacaaugau

SEQ ID NO: 1168420 - RNA, 19 nt, Human
agauacugcucccaggugu

SEQ ID NO: 1168421 - RNA, 20 nt, Human
agccuagucaucugcauuag

SEQ ID NO: 1168422 - RNA, 18 nt, Human
agggcacauuagcaccaa

SEQ ID NO: 1168423 - RNA, 21 nt, Human
agugcuggggcacaucccaga

SEQ ID NO: 1168424 - RNA, 18 nt, Human
caccaaguuaacuguucu

SEQ ID NO: 1168425 - RNA, 24 nt, Human
cacuugggcuggucuucuaagggc

SEQ ID NO: 1168426 - RNA, 20 nt, Human
caucauguagccaugggggu

SEQ ID NO: 1168427 - RNA, 19 nt, Human
cauguaauuuaagagcacc

SEQ ID NO: 1168428 - RNA, 19 nt, Human
cauuaggguacauuuaccg

SEQ ID NO: 1168429 - RNA, 21 nt, Human
cauuuucauuacaagcaggag

SEQ ID NO: 1168430 - RNA, 18 nt, Human
ccacagcaaaccugggag

SEQ ID NO: 1168431 - RNA, 23 nt, Human
ccaugggcuguuugcccuucacu

SEQ ID NO: 1168432 - RNA, 22 nt, Human
cccagaagugacacugacugcc

SEQ ID NO: 1168433 - RNA, 24 nt, Human
cccuaaguagucuauguagcucac

SEQ ID NO: 1168434 - RNA, 19 nt, Human
cgcaagggaauucagugcu

SEQ ID NO: 1168435 - RNA, 21 nt, Human
cuaaaaugccacagaaacugc

SEQ ID NO: 1168436 - RNA, 22 nt, Human
cuaaaaugccacagaaacugcc

SEQ ID NO: 1168437 - RNA, 20 nt, Human
cugaauggcuaagacggcac

SEQ ID NO: 1168438 - RNA, 20 nt, Human
cugcccuccucuuccagcag

SEQ ID NO: 1168439 - RNA, 20 nt, Human
cuggauugcaaaccuaugcc

SEQ ID NO: 1168440 - RNA, 22 nt, Human
uaaaauaauaagcaacaacuaa

SEQ ID NO: 1168441 - RNA, 27 nt, Human
uaaauuagaauauaauuuacaaaagca

SEQ ID NO: 1168442 - RNA, 27 nt, Human
uagaauauaauuuacaaaagcaaaaaa

SEQ ID NO: 1168443 - RNA, 21 nt, Human
uaucccaguggcagauacugc

SEQ ID NO: 1168444 - RNA, 21 nt, Human
uaugugaugcacugacaugua

SEQ ID NO: 1168445 - RNA, 21 nt, Human
uauguuggagaaaaucagauc

SEQ ID NO: 1168446 - RNA, 23 nt, Human
ucccuaaguagucuauguagcuc

SEQ ID NO: 1168447 - RNA, 18 nt, Human
ucccugggguucccuaag

SEQ ID NO: 1168448 - RNA, 19 nt, Human
ugaaauaagaacaugagcu

SEQ ID NO: 1168449 - RNA, 20 nt, Human
ugacacugacugcccuccuc

SEQ ID NO: 1168450 - RNA, 21 nt, Human
ugcccuccucuuccagcauca

SEQ ID NO: 1168451 - RNA, 21 nt, Human
ugccuaaaaugccacagaaac

SEQ ID NO: 1168452 - RNA, 19 nt, Human
uggagaaaaucagaucugg

SEQ ID NO: 1168453 - RNA, 20 nt, Human
uggcuacagaguagcagcag

SEQ ID NO: 1168454 - RNA, 20 nt, Human
ugggcuggucuucuaagggc

SEQ ID NO: 1168455 - RNA, 18 nt, Human
uggggcacaucccagaag

SEQ ID NO: 1168456 - RNA, 27 nt, Human
uggggguggcuacagaguagcagcagu

SEQ ID NO: 1168457 - RNA, 21 nt, Human
ugugaugugcuaugaaauaga

SEQ ID NO: 1168458 - RNA, 19 nt, Human
uucagugcucgggccauac

SEQ ID NO: 1168459 - RNA, 19 nt, Human
uucauuuucauuacaagca

SEQ ID NO: 1168460 - RNA, 24 nt, Human
uuggcuuuuggugucugagggucu

SEQ ID NO: 1168461 - RNA, 24 nt, Human
uuuuaaccuacucagguuucaauu

SEQ ID NO: 1168462 - RNA, 21 nt, Human
uuuuuuuuuuuuuuuuucauu

SEQ ID NO: 1168463 - RNA, 22 nt, Human
aaaccaagaugaauuaccacuu

SEQ ID NO: 1168464 - RNA, 24 nt, Human
aaauggcaacaagaaguuaagaaa

SEQ ID NO: 1168465 - RNA, 22 nt, Human
aaauggcugauaucauaaaaac

SEQ ID NO: 1168466 - RNA, 22 nt, Human
aacaaaugagaacaugcagaaa

SEQ ID NO: 1168467 - RNA, 24 nt, Human
aaccaaauaaggcgcaaggaccug

SEQ ID NO: 1168468 - RNA, 22 nt, Human
aacugagaaaaagaacaaauga

SEQ ID NO: 1168469 - RNA, 24 nt, Human
aagaacaugggagagaaaaaugac

SEQ ID NO: 1168470 - RNA, 18 nt, Human
aagaggacuucuugugcu

SEQ ID NO: 1168471 - RNA, 24 nt, Human
aagcuacuucuuucuuugcuccua

SEQ ID NO: 1168472 - RNA, 21 nt, Human
aaggaccugaagaauaaacac

SEQ ID NO: 1168473 - RNA, 24 nt, Human
aaucaaauggcugauaucauaaaa

SEQ ID NO: 1168474 - RNA, 21 nt, Human
aaucaccaggagacaaaagga

SEQ ID NO: 1168475 - RNA, 22 nt, Human
aauccucuccuuacucccagac

SEQ ID NO: 1168476 - RNA, 22 nt, Human
aaugaaaaaaaucaaauggcug

SEQ ID NO: 1168477 - RNA, 24 nt, Human
aauuucaacugacugaaugcucac

SEQ ID NO: 1168478 - RNA, 19 nt, Human
acaaaaccaaauaaggcgc

SEQ ID NO: 1168479 - RNA, 20 nt, Human
acagaguuucaaauggcaac

SEQ ID NO: 1168480 - RNA, 19 nt, Human
acaugggagagaaaaauga

SEQ ID NO: 1168481 - RNA, 23 nt, Human
acauuuaaacgauuaaagagaaa

SEQ ID NO: 1168482 - RNA, 19 nt, Human
accaauguucaaauacauu

SEQ ID NO: 1168483 - RNA, 20 nt, Human
agaaaaagaacaaaugagaa

SEQ ID NO: 1168484 - RNA, 26 nt, Human
agacaaaaggaaaauaagggggaccc

SEQ ID NO: 1168485 - RNA, 19 nt, Human
agacaagaauagaaaucag

SEQ ID NO: 1168486 - RNA, 21 nt, Human
agacaagaauagaaaucagga

SEQ ID NO: 1168487 - RNA, 23 nt, Human
agacaagaauagaaaucaggaga

SEQ ID NO: 1168488 - RNA, 25 nt, Human
agacaagaauagaaaucaggagaaa

SEQ ID NO: 1168489 - RNA, 20 nt, Human
agcaaucaacaaaugcaagc

SEQ ID NO: 1168490 - RNA, 19 nt, Human
aggaaucuuuaauuucaac

SEQ ID NO: 1168491 - RNA, 18 nt, Human
aggaauguauuuaguagg

SEQ ID NO: 1168492 - RNA, 23 nt, Human
agugagaaagaacaugggagaga

SEQ ID NO: 1168493 - RNA, 20 nt, Human
auccuagucguccugcagcc

SEQ ID NO: 1168494 - RNA, 19 nt, Human
auguguccacaucuauuca

SEQ ID NO: 1168495 - RNA, 22 nt, Human
auucaacugagaaaaagaacaa

SEQ ID NO: 1168496 - RNA, 19 nt, Human
caaaaggaaaauaaggggg

SEQ ID NO: 1168497 - RNA, 21 nt, Human
caaaugcaagccaagaaauua

SEQ ID NO: 1168498 - RNA, 18 nt, Human
caacuccucucuacuuuu

SEQ ID NO: 1168499 - RNA, 19 nt, Human
caagaugaauuaccacuug

SEQ ID NO: 1168500 - RNA, 23 nt, Human
caagaugaauuaccacuugggca

SEQ ID NO: 1168501 - RNA, 25 nt, Human
caaggaccugaagaauaaacacaaa

SEQ ID NO: 1168502 - RNA, 24 nt, Human
caagguccaagcuaguuuacucca

SEQ ID NO: 1168503 - RNA, 19 nt, Human
caccaggagacaaaaggaa

SEQ ID NO: 1168504 - RNA, 24 nt, Human
cagaacccuuuaaacauaagagua

SEQ ID NO: 1168505 - RNA, 20 nt, Human
cauacaaacuuccaaacucc

SEQ ID NO: 1168506 - RNA, 22 nt, Human
cauuauaacccacugguuucug

SEQ ID NO: 1168507 - RNA, 19 nt, Human
ccaagcuacuucuuucuuu

SEQ ID NO: 1168508 - RNA, 19 nt, Human
ccuaugaauaccuuuccaa

SEQ ID NO: 1168509 - RNA, 20 nt, Human
ccucucuacuuuuuuagucc

SEQ ID NO: 1168510 - RNA, 24 nt, Human
ccugaagaauaaacacaaagcuag

SEQ ID NO: 1168511 - RNA, 22 nt, Human
ccugcagcccaagguccaagcu

SEQ ID NO: 1168512 - RNA, 24 nt, Human
cuaaucaccaggagacaaaaggaa

SEQ ID NO: 1168513 - RNA, 22 nt, Human
cuacugaaugauucccuaagau

SEQ ID NO: 1168514 - RNA, 20 nt, Human
cuaguuuacuccauaaccuu

SEQ ID NO: 1168515 - RNA, 19 nt, Human
cugaaugcucacaggacuc

SEQ ID NO: 1168516 - RNA, 21 nt, Human
gaagaaaaaaauugacccaac

SEQ ID NO: 1168517 - RNA, 23 nt, Human
gcaaggaccugaagaauaaacac

SEQ ID NO: 1168518 - RNA, 21 nt, Human
ggacuucuugugcugaaaaug

SEQ ID NO: 1168519 - RNA, 18 nt, Human
gggggguggggguggggg

SEQ ID NO: 1168520 - RNA, 20 nt, Human
gggggugggggugggggugg

SEQ ID NO: 1168521 - RNA, 20 nt, Human
gggugggggugaagaacgcu

SEQ ID NO: 1168522 - RNA, 22 nt, Human
gucauuuuuuaacaagcaaauu

SEQ ID NO: 1168523 - RNA, 24 nt, Human
gugccucaaaagauuuuaauuuuc

SEQ ID NO: 1168524 - RNA, 19 nt, Human
guggggguggggguggggg

SEQ ID NO: 1168525 - RNA, 24 nt, Human
guuccaagcuacuucuuucuuugc

SEQ ID NO: 1168526 - RNA, 18 nt, Human
uaaaaacaacuggucucu

SEQ ID NO: 1168527 - RNA, 25 nt, Human
uaaauagaaaaugaaaaaaaucaaa

SEQ ID NO: 1168528 - RNA, 18 nt, Human
uaacacauuguaaaagca

SEQ ID NO: 1168529 - RNA, 23 nt, Human
uaaguaaauaaccgcgguuccua

SEQ ID NO: 1168530 - RNA, 26 nt, Human
uacagugacaacaccuuuagaauccc

SEQ ID NO: 1168531 - RNA, 18 nt, Human
uacguagaaauaggaauu

SEQ ID NO: 1168532 - RNA, 26 nt, Human
uagaaucccuuagguacaauaaggua

SEQ ID NO: 1168533 - RNA, 22 nt, Human
uaggaauuccaaauauuucagu

SEQ ID NO: 1168534 - RNA, 22 nt, Human
uagguacaauaagguaccgcag

SEQ ID NO: 1168535 - RNA, 22 nt, Human
uaugaauaccuuuccaaaacca

SEQ ID NO: 1168536 - RNA, 25 nt, Human
ucaaagugagaaagaacaugggaga

SEQ ID NO: 1168537 - RNA, 18 nt, Human
ucaccaggagacaaaagg

SEQ ID NO: 1168538 - RNA, 24 nt, Human
ucaccaggagacaaaaggaaaaua

SEQ ID NO: 1168539 - RNA, 24 nt, Human
ucccuaagauuagaaaaaauugcc

SEQ ID NO: 1168540 - RNA, 22 nt, Human
uccugaauaccaguaaggacuc

SEQ ID NO: 1168541 - RNA, 24 nt, Human
ucucuaaauuuaagauugagacaa

SEQ ID NO: 1168542 - RNA, 25 nt, Human
ugaaaaaaaaaauggcuauacagaa

SEQ ID NO: 1168543 - RNA, 20 nt, Human
ugaaaaaaaucaaauggcug

SEQ ID NO: 1168544 - RNA, 22 nt, Human
ugaagaacgcuaauuauagaaa

SEQ ID NO: 1168545 - RNA, 23 nt, Human
ugaagcauaauuaggaauuccag

SEQ ID NO: 1168546 - RNA, 21 nt, Human
ugagaaaaagaacaaaugaga

SEQ ID NO: 1168547 - RNA, 19 nt, Human
ugagaacaugcagaaaaca

SEQ ID NO: 1168548 - RNA, 20 nt, Human
ugcagaaaacacuggaaaua

SEQ ID NO: 1168549 - RNA, 21 nt, Human
ugcuacacaagagauauuuau

SEQ ID NO: 1168550 - RNA, 19 nt, Human
uggcuauacagaacccuuu

SEQ ID NO: 1168551 - RNA, 20 nt, Human
ugggagagaaaaaugacaau

SEQ ID NO: 1168552 - RNA, 18 nt, Human
uggggguggggguggggg

SEQ ID NO: 1168553 - RNA, 20 nt, Human
ugggggugggggugggggug

SEQ ID NO: 1168554 - RNA, 25 nt, Human
uguuacagaucuuuucauucuggaa

SEQ ID NO: 1168555 - RNA, 24 nt, Human
uguucuguuguauuuacaguuuua

SEQ ID NO: 1168556 - RNA, 18 nt, Human
uuacauaguucucucugc

SEQ ID NO: 1168557 - RNA, 18 nt, Human
uuauuucuauacaaagca

SEQ ID NO: 1168558 - RNA, 24 nt, Human
uucaugugccucaaaagauuuuaa

SEQ ID NO: 1168559 - RNA, 18 nt, Human
uugagacaagaauagaaa

SEQ ID NO: 1168560 - RNA, 23 nt, Human
uuggugcauucaacugagaaaaa

SEQ ID NO: 1168561 - RNA, 23 nt, Human
uuuacauaguucucucugcuaua

SEQ ID NO: 1168562 - RNA, 23 nt, Human
uuuauccauuaucaguauuaacg

SEQ ID NO: 1168563 - RNA, 20 nt, Human
uuuuucuuucuuuuuuguca

SEQ ID NO: 1168564 - RNA, 18 nt, Human
aacaagcgccacccucua

SEQ ID NO: 1168565 - RNA, 20 nt, Human
aacucuuuggguuuuugcag

SEQ ID NO: 1168566 - RNA, 24 nt, Human
aagugcuccugcugggccucaagg

SEQ ID NO: 1168567 - RNA, 21 nt, Human
aauccaacccggagacugccc

SEQ ID NO: 1168568 - RNA, 19 nt, Human
acccagcgcagcuccggcc

SEQ ID NO: 1168569 - RNA, 24 nt, Human
acccagcgcagcuccggccuggug

SEQ ID NO: 1168570 - RNA, 21 nt, Human
acccggagacugcccgggaaa

SEQ ID NO: 1168571 - RNA, 22 nt, Human
acgccgccgacaaggagcgggc

SEQ ID NO: 1168572 - RNA, 19 nt, Human
agcgggcggcgggcggcgg

SEQ ID NO: 1168573 - RNA, 18 nt, Human
aggauggcacacaauacc

SEQ ID NO: 1168574 - RNA, 23 nt, Human
auuucaccuaguaacuacacgga

SEQ ID NO: 1168575 - RNA, 19 nt, Human
caacccggagacugcccgg

SEQ ID NO: 1168576 - RNA, 23 nt, Human
cacacaauaccauuccugguuaa

SEQ ID NO: 1168577 - RNA, 20 nt, Human
cacccucuacuccuccaacu

SEQ ID NO: 1168578 - RNA, 22 nt, Human
cacccucuacuccuccaacucc

SEQ ID NO: 1168579 - RNA, 24 nt, Human
cacggaaacccggaucggaggccg

SEQ ID NO: 1168580 - RNA, 20 nt, Human
cagcugacgccgagcggugu

SEQ ID NO: 1168581 - RNA, 19 nt, Human
caggugagcgcccgaggcu

SEQ ID NO: 1168582 - RNA, 22 nt, Human
caggugagcgcccgaggcuucc

SEQ ID NO: 1168583 - RNA, 18 nt, Human
cccgcaacgccgccgaca

SEQ ID NO: 1168584 - RNA, 24 nt, Human
cccgcaacgccgccgacaaggagc

SEQ ID NO: 1168585 - RNA, 23 nt, Human
cccgcgcaccugcccucgcuccg

SEQ ID NO: 1168586 - RNA, 20 nt, Human
ccgcgacgagcaggacgacg

SEQ ID NO: 1168587 - RNA, 18 nt, Human
ccguguagaccccagggu

SEQ ID NO: 1168588 - RNA, 20 nt, Human
ccuccccguagagauggcuu

SEQ ID NO: 1168589 - RNA, 19 nt, Human
ccuuaccccuuucacaguc

SEQ ID NO: 1168590 - RNA, 25 nt, Human
cgacgacaagggcgacuccaaggaa

SEQ ID NO: 1168591 - RNA, 22 nt, Human
cgacuccaaggaaacgcggcuu

SEQ ID NO: 1168592 - RNA, 19 nt, Human
cgaggccucccgcaacgcc

SEQ ID NO: 1168593 - RNA, 19 nt, Human
cgcaccgaggccucccgca

SEQ ID NO: 1168594 - RNA, 22 nt, Human
cggagacugcccgggaaacuaa

SEQ ID NO: 1168595 - RNA, 24 nt, Human
cggaucggaggccgcgcggggagg

SEQ ID NO: 1168596 - RNA, 18 nt, Human
cggcggcgcggggcccgg

SEQ ID NO: 1168597 - RNA, 23 nt, Human
cggcgggcggcggcgccggcagc

SEQ ID NO: 1168598 - RNA, 19 nt, Human
cggcucggcgccucggcgg

SEQ ID NO: 1168599 - RNA, 19 nt, Human
cgggcugggcggggggcgg

SEQ ID NO: 1168600 - RNA, 24 nt, Human
cggggaggaggagggcgacccggu

SEQ ID NO: 1168601 - RNA, 22 nt, Human
cguguagaccccagggugcaaa

SEQ ID NO: 1168602 - RNA, 21 nt, Human
cuccugcugggccucaaggac

SEQ ID NO: 1168603 - RNA, 24 nt, Human
cucggcccggcucggcgccucggc

SEQ ID NO: 1168604 - RNA, 21 nt, Human
gacagcuauuuuuuuaaccua

SEQ ID NO: 1168605 - RNA, 19 nt, Human
gacccggucgguccugcga

SEQ ID NO: 1168606 - RNA, 24 nt, Human
gacgacaagggcgacuccaaggaa

SEQ ID NO: 1168607 - RNA, 20 nt, Human
gaggccucccgcaacgccgc

SEQ ID NO: 1168608 - RNA, 18 nt, Human
gcaccgaggccucccgca

SEQ ID NO: 1168609 - RNA, 18 nt, Human
gcagcggcgcaccgaggc

SEQ ID NO: 1168610 - RNA, 19 nt, Human
gcagcggcgcaccgaggcc

SEQ ID NO: 1168611 - RNA, 23 nt, Human
gccacccucuacuccuccaacuc

SEQ ID NO: 1168612 - RNA, 21 nt, Human
gccccggcguccggauuuaac

SEQ ID NO: 1168613 - RNA, 22 nt, Human
gcccgaggcuuccggcccgcgc

SEQ ID NO: 1168614 - RNA, 20 nt, Human
gcgcggcgggcugggcgggg

SEQ ID NO: 1168615 - RNA, 21 nt, Human
gcggggggcggcggcgcgggg

SEQ ID NO: 1168616 - RNA, 21 nt, Human
gcuuugcuguuguuccacucu

SEQ ID NO: 1168617 - RNA, 26 nt, Human
ggcagcagcgaggacgacgcgcagag

SEQ ID NO: 1168618 - RNA, 20 nt, Human
ggcggcgccggcagcagcga

SEQ ID NO: 1168619 - RNA, 18 nt, Human
ggcggcgcggggcccggg

SEQ ID NO: 1168620 - RNA, 18 nt, Human
ggcggcggcgccggcagc

SEQ ID NO: 1168621 - RNA, 19 nt, Human
ggcggcggcgcggggcccg

SEQ ID NO: 1168622 - RNA, 21 nt, Human
ggcgggcggcggcgccggcag

SEQ ID NO: 1168623 - RNA, 19 nt, Human
ggcgggcugggcggggggc

SEQ ID NO: 1168624 - RNA, 19 nt, Human
ggcgggcugggcggggggc

SEQ ID NO: 1168625 - RNA, 23 nt, Human
ggcgggcugggcggggggcggcg

SEQ ID NO: 1168626 - RNA, 19 nt, Human
gggcgcggcgggcugggcg

SEQ ID NO: 1168627 - RNA, 21 nt, Human
gggcggcggcgcggggcccgg

SEQ ID NO: 1168628 - RNA, 24 nt, Human
gggcggcggcgcggggcccgggcg

SEQ ID NO: 1168629 - RNA, 21 nt, Human
ggggaggaggagggcgacccg

SEQ ID NO: 1168630 - RNA, 20 nt, Human
ggugagcuccagguaggugc

SEQ ID NO: 1168631 - RNA, 18 nt, Human
ggugcgggcgcggcgggc

SEQ ID NO: 1168632 - RNA, 22 nt, Human
uaacagcuggagccaccagcgc

SEQ ID NO: 1168633 - RNA, 26 nt, Human
ucacagucgcuccuuucauuucgaca

SEQ ID NO: 1168634 - RNA, 21 nt, Human
uccaaggaaacgcggcugacc

SEQ ID NO: 1168635 - RNA, 19 nt, Human
ucgucgccuuuuuuccgcg

SEQ ID NO: 1168636 - RNA, 19 nt, Human
ugacccagcgcagcuccgg

SEQ ID NO: 1168637 - RNA, 25 nt, Human
ugcccucgcuccgaaguccgcgccu

SEQ ID NO: 1168638 - RNA, 19 nt, Human
ugcuuucuggauccucccc

SEQ ID NO: 1168639 - RNA, 19 nt, Human
uguuuaauacaggauggca

SEQ ID NO: 1168640 - RNA, 19 nt, Human
uuggauuuuuccuuacccc

SEQ ID NO: 1168641 - RNA, 22 nt, Human
uuguuccacucuguccauacau

SEQ ID NO: 1168642 - RNA, 19 nt, Human
uuuuuugcuuugcuguugu

SEQ ID NO: 1168643 - RNA, 19 nt, Human
aaagacaggucucacucug

SEQ ID NO: 1168644 - RNA, 24 nt, Human
aaagugcugggaucacaggcauga

SEQ ID NO: 1168645 - RNA, 24 nt, Human
aaagugcugggauuacaggcauga

SEQ ID NO: 1168646 - RNA, 25 nt, Human
aagcaauccucccaccuuggccuuc

SEQ ID NO: 1168647 - RNA, 24 nt, Human
aagcagcuaggacuacaggcacac

SEQ ID NO: 1168648 - RNA, 24 nt, Human
aagugcagugguguaaucacagcu

SEQ ID NO: 1168649 - RNA, 26 nt, Human
aagugcugggaucacaggcaugagcc

SEQ ID NO: 1168650 - RNA, 19 nt, Human
aagugcugggauuacaggc

SEQ ID NO: 1168651 - RNA, 21 nt, Human
aagugcugggauuacaggcau

SEQ ID NO: 1168652 - RNA, 26 nt, Human
aagugcugggauuacaggcaugagcc

SEQ ID NO: 1168653 - RNA, 18 nt, Human
acagcuuacugcagccuc

SEQ ID NO: 1168654 - RNA, 25 nt, Human
acucuguugcccaggcucaagugca

SEQ ID NO: 1168655 - RNA, 19 nt, Human
acugcagccuccaacuccu

SEQ ID NO: 1168656 - RNA, 23 nt, Human
aggcacucucauuugcuucuguu

SEQ ID NO: 1168657 - RNA, 21 nt, Human
aguaaauccaaaaugaggucc

SEQ ID NO: 1168658 - RNA, 24 nt, Human
agugcagugguguaaucacagcuu

SEQ ID NO: 1168659 - RNA, 18 nt, Human
agugcugggauuacaggc

SEQ ID NO: 1168660 - RNA, 22 nt, Human
auaaaacagacugaaauaccuu

SEQ ID NO: 1168661 - RNA, 18 nt, Human
aucugccugccuuggccu

SEQ ID NO: 1168662 - RNA, 24 nt, Human
caaagugcugggaucacaggcaug

SEQ ID NO: 1168663 - RNA, 24 nt, Human
caaagugcugggauuacaggcaug

SEQ ID NO: 1168664 - RNA, 27 nt, Human
caagcaauccucccaccuuggccuucc

SEQ ID NO: 1168665 - RNA, 23 nt, Human
cacacaccaccacaccuagcuaa

SEQ ID NO: 1168666 - RNA, 22 nt, Human
cacaggcaugagccaccaugcc

SEQ ID NO: 1168667 - RNA, 19 nt, Human
cacucuguugcccaggcuc

SEQ ID NO: 1168668 - RNA, 24 nt, Human
cacucuguugcccaggcucaagug

SEQ ID NO: 1168669 - RNA, 23 nt, Human
cacugaacaucagagguggaucc

SEQ ID NO: 1168670 - RNA, 24 nt, Human
cagcuuacugcagccuccaacucc

SEQ ID NO: 1168671 - RNA, 21 nt, Human
caggcacacaccaccacaccu

SEQ ID NO: 1168672 - RNA, 23 nt, Human
caggucucacucuguugcccagg

SEQ ID NO: 1168673 - RNA, 22 nt, Human
ccaaagugcugggaucacaggc

SEQ ID NO: 1168674 - RNA, 24 nt, Human
ccaaagugcugggaucacaggcau

SEQ ID NO: 1168675 - RNA, 23 nt, Human
ccaaagugcugggauuacaggca

SEQ ID NO: 1168676 - RNA, 24 nt, Human
ccaaagugcugggauuacaggcau

SEQ ID NO: 1168677 - RNA, 24 nt, Human
cccaaagugcugggauuacaggca

SEQ ID NO: 1168678 - RNA, 19 nt, Human
cccacaaugaccacuccca

SEQ ID NO: 1168679 - RNA, 21 nt, Human
cccacaaugaccacucccagg

SEQ ID NO: 1168680 - RNA, 19 nt, Human
cccaggcucaagugcagug

SEQ ID NO: 1168681 - RNA, 20 nt, Human
cccaggcucaagugcagugg

SEQ ID NO: 1168682 - RNA, 20 nt, Human
ccccacaaugaccacuccca

SEQ ID NO: 1168683 - RNA, 23 nt, Human
ccgccugccucagccucccaagc

SEQ ID NO: 1168684 - RNA, 26 nt, Human
ccucccaccuuggccuuccaaagugc

SEQ ID NO: 1168685 - RNA, 22 nt, Human
ccugccuuggccucccaaagug

SEQ ID NO: 1168686 - RNA, 24 nt, Human
ccuggccucaagcaauccucccac

SEQ ID NO: 1168687 - RNA, 21 nt, Human
ccugggucacacaaacgggaa

SEQ ID NO: 1168688 - RNA, 18 nt, Human
ccuuaagcuucucagccu

SEQ ID NO: 1168689 - RNA, 18 nt, Human
cggcaaaauuccagauga

SEQ ID NO: 1168690 - RNA, 24 nt, Human
cucaagcaauccucccaccuuggc

SEQ ID NO: 1168691 - RNA, 23 nt, Human
cucaugcuauccgccugccucag

SEQ ID NO: 1168692 - RNA, 27 nt, Human
cuccuggccucaagcaauccucccacc

SEQ ID NO: 1168693 - RNA, 25 nt, Human
cugcagccuccaacuccugugcuca

SEQ ID NO: 1168694 - RNA, 23 nt, Human
cugccucagccucccaagcagcu

SEQ ID NO: 1168695 - RNA, 23 nt, Human
cugccuuggccucccaaagugcu

SEQ ID NO: 1168696 - RNA, 24 nt, Human
cugcuuuucgcaaaugaguaacau

SEQ ID NO: 1168697 - RNA, 22 nt, Human
cuggccucaagcaauccuccca

SEQ ID NO: 1168698 - RNA, 22 nt, Human
cugguacucuucacugaacauc

SEQ ID NO: 1168699 - RNA, 21 nt, Human
cuuacugcagccuccaacucc

SEQ ID NO: 1168700 - RNA, 26 nt, Human
cuuuuuuuuuuuaaagacaggucuca

SEQ ID NO: 1168701 - RNA, 23 nt, Human
gaacuccuggccucaagcaaucc

SEQ ID NO: 1168702 - RNA, 20 nt, Human
gaaugccccacaaugaccac

SEQ ID NO: 1168703 - RNA, 18 nt, Human
gaucacaggcaugagcca

SEQ ID NO: 1168704 - RNA, 24 nt, Human
gaucacaggcaugagccaccaugc

SEQ ID NO: 1168705 - RNA, 18 nt, Human
gauuacaggcaugagcca

SEQ ID NO: 1168706 - RNA, 20 nt, Human
gauuacaggcaugagccacc

SEQ ID NO: 1168707 - RNA, 21 nt, Human
gauuacaggcaugagccaccg

SEQ ID NO: 1168708 - RNA, 21 nt, Human
gccucccaagcagcuaggacu

SEQ ID NO: 1168709 - RNA, 22 nt, Human
gccuuggccucccaaagugcug

SEQ ID NO: 1168710 - RNA, 24 nt, Human
gcuauccgccugccucagccuccc

SEQ ID NO: 1168711 - RNA, 24 nt, Human
gcuaugcugaacaggcuggucucg

SEQ ID NO: 1168712 - RNA, 24 nt, Human
gcucaugcuauccgccugccucag

SEQ ID NO: 1168713 - RNA, 19 nt, Human
gcuccuuuuuuuuuuuaaa

SEQ ID NO: 1168714 - RNA, 23 nt, Human
gcuggucucgaacuccuggccuc

SEQ ID NO: 1168715 - RNA, 23 nt, Human
ggaaugccccacaaugaccacuc

SEQ ID NO: 1168716 - RNA, 22 nt, Human
ggacuacaggcacacaccacca

SEQ ID NO: 1168717 - RNA, 24 nt, Human
ggaucacaggcaugagccaccaug

SEQ ID NO: 1168718 - RNA, 24 nt, Human
ggauuacaggcaugagccaccgug

SEQ ID NO: 1168719 - RNA, 24 nt, Human
ggcuggucucgaacuccuggccuc

SEQ ID NO: 1168720 - RNA, 22 nt, Human
gucacacaaacgggaaugcccc

SEQ ID NO: 1168721 - RNA, 18 nt, Human
guuccugcuaugcugaac

SEQ ID NO: 1168722 - RNA, 22 nt, Human
uaaaacagacugaaauaccuua

SEQ ID NO: 1168723 - RNA, 21 nt, Human
uaaagacaggucucacucugu

SEQ ID NO: 1168724 - RNA, 24 nt, Human
uacaggcaugagccaccgugccca

SEQ ID NO: 1168725 - RNA, 24 nt, Human
uaggacuacaggcacacaccacca

SEQ ID NO: 1168726 - RNA, 18 nt, Human
uaucccaaaaguaaaucc

SEQ ID NO: 1168727 - RNA, 24 nt, Human
ucaagcaauccucccaccuuggcc

SEQ ID NO: 1168728 - RNA, 20 nt, Human
ucacacaaacgggaaugccc

SEQ ID NO: 1168729 - RNA, 18 nt, Human
ucagccucccaagcagcu

SEQ ID NO: 1168730 - RNA, 20 nt, Human
ucagccucccaagcagcuag

SEQ ID NO: 1168731 - RNA, 19 nt, Human
uccauacgcgcucugaaua

SEQ ID NO: 1168732 - RNA, 24 nt, Human
ucccaaagugcugggauuacaggc

SEQ ID NO: 1168733 - RNA, 23 nt, Human
ucccaagcagcuaggacuacagg

SEQ ID NO: 1168734 - RNA, 21 nt, Human
ucggcaaaauuccagaugagc

SEQ ID NO: 1168735 - RNA, 19 nt, Human
ucucacucuguugcccagg

SEQ ID NO: 1168736 - RNA, 21 nt, Human
ucucacucuguugcccaggcu

SEQ ID NO: 1168737 - RNA, 23 nt, Human
ucucacucuguugcccaggcuca

SEQ ID NO: 1168738 - RNA, 24 nt, Human
ucucacucuguugcccaggcucaa

SEQ ID NO: 1168739 - RNA, 21 nt, Human
ucucgaacuccuggccucaag

SEQ ID NO: 1168740 - RNA, 24 nt, Human
ucuguugcccaggcucaagugcag

SEQ ID NO: 1168741 - RNA, 21 nt, Human
ugaaacccuacaagcguuucc

SEQ ID NO: 1168742 - RNA, 18 nt, Human
ugaaaucggcaaaauucc

SEQ ID NO: 1168743 - RNA, 24 nt, Human
ugaacaggcuggucucgaacuccu

SEQ ID NO: 1168744 - RNA, 18 nt, Human
ugagauagaaucucgcuc

SEQ ID NO: 1168745 - RNA, 22 nt, Human
ugagauagaaucucgcucuguc

SEQ ID NO: 1168746 - RNA, 21 nt, Human
ugcagugguguaaucacagcu

SEQ ID NO: 1168747 - RNA, 24 nt, Human
ugcccaggcucaagugcaguggug

SEQ ID NO: 1168748 - RNA, 23 nt, Human
ugccucagccucccaagcagcua

SEQ ID NO: 1168749 - RNA, 24 nt, Human
ugccucagccucccaagcagcuag

SEQ ID NO: 1168750 - RNA, 18 nt, Human
ugccugccuuggccuccc

SEQ ID NO: 1168751 - RNA, 24 nt, Human
ugcuaugcugaacaggcuggucuc

SEQ ID NO: 1168752 - RNA, 19 nt, Human
ugcugggaucacaggcaug

SEQ ID NO: 1168753 - RNA, 20 nt, Human
uggccucaagcaauccuccc

SEQ ID NO: 1168754 - RNA, 21 nt, Human
uggccucaagcaauccuccca

SEQ ID NO: 1168755 - RNA, 25 nt, Human
uggccucaagcaauccucccaccuu

SEQ ID NO: 1168756 - RNA, 22 nt, Human
ugggaucacaggcaugagccac

SEQ ID NO: 1168757 - RNA, 23 nt, Human
ugggaucacaggcaugagccacc

SEQ ID NO: 1168758 - RNA, 24 nt, Human
ugggaucacaggcaugagccacca

SEQ ID NO: 1168759 - RNA, 18 nt, Human
ugggauuacaggcaugag

SEQ ID NO: 1168760 - RNA, 21 nt, Human
ugggauuacaggcaugagcca

SEQ ID NO: 1168761 - RNA, 22 nt, Human
ugggauuacaggcaugagccac

SEQ ID NO: 1168762 - RNA, 23 nt, Human
ugggauuacaggcaugagccacc

SEQ ID NO: 1168763 - RNA, 23 nt, Human
ugggauuacaggcaugagccacc

SEQ ID NO: 1168764 - RNA, 24 nt, Human
ugggauuacaggcaugagccaccg

SEQ ID NO: 1168765 - RNA, 26 nt, Human
ugggauuacaggcaugagccaccgug

SEQ ID NO: 1168766 - RNA, 26 nt, Human
uuagucaugaaaucggcaaaauucca

SEQ ID NO: 1168767 - RNA, 18 nt, Human
uuggccucccaaagugcu

SEQ ID NO: 1168768 - RNA, 25 nt, Human
uuguagagaugggguuccugcuaug

SEQ ID NO: 1168769 - RNA, 21 nt, Human
uuuaguuuuuguagagauggg

SEQ ID NO: 1168770 - RNA, 21 nt, Human
uuuguagagaugggguuccug

SEQ ID NO: 1168771 - RNA, 25 nt, Human
uuuguagagaugggguuccugcuau

SEQ ID NO: 1168772 - RNA, 23 nt, Human
uuuuuguagagaugggguuccug

SEQ ID NO: 1168773 - RNA, 25 nt, Human
uuuuuuuuuuuugagauagaaucuc

SEQ ID NO: 1168774 - RNA, 18 nt, Human
uuuuuuuuuuuuuuuuug

SEQ ID NO: 1168775 - RNA, 19 nt, Human
aggcggcgggggccuuggg

SEQ ID NO: 1168776 - RNA, 21 nt, Human
aggcggcgggggccuuggggc

SEQ ID NO: 1168777 - RNA, 22 nt, Human
caccugugagguggacgcgguc

SEQ ID NO: 1168778 - RNA, 18 nt, Human
caggaggcguagagcucc

SEQ ID NO: 1168779 - RNA, 21 nt, Human
ccagguucuguccaagcacug

SEQ ID NO: 1168780 - RNA, 31 nt, Human; identical to SEQ ID NO: 1062172

SEQ ID NO: 1168781 - RNA, 19 nt, Human
ccgagggcgcggugaggag

SEQ ID NO: 1168782 - RNA, 23 nt, Human
ccuggcgcaccugugagguggac

SEQ ID NO: 1168783 - RNA, 26 nt, Human
cuggcgguugauggcggccuuuaguc

SEQ ID NO: 1168784 - RNA, 22 nt, Human
cuguugaagcaggaaaccccga

SEQ ID NO: 1168785 - RNA, 21 nt, Human
cuuggugaccagggaagucac

SEQ ID NO: 1168786 - RNA, 19 nt, Human
ggugaccagggaagucacc

SEQ ID NO: 1168787 - RNA, 24 nt, Human
ggugaggaggugacggagggcugg

SEQ ID NO: 1168788 - RNA, 20 nt, Human
uacaaaucaaagaacuuaag

SEQ ID NO: 1168789 - RNA, 24 nt, Human
uacaacuuauagaaaagguaaagg

SEQ ID NO: 1168790 - RNA, 23 nt, Human
uggugguaguccuggcgcaccug

SEQ ID NO: 1168791 - RNA, 21 nt, Human
uuggugaccagggaagucacc

SEQ ID NO: 1168792 - RNA, 19 nt, Human
accccgagcccgagccucc

SEQ ID NO: 1168793 - RNA, 21 nt, Human
accuccccacuucccugcgac

SEQ ID NO: 1168794 - RNA, 21 nt, Human
aguccccuaauuggacccggc

SEQ ID NO: 1168795 - RNA, 23 nt, Human
cacaggggccgggccuccucggg

SEQ ID NO: 1168796 - RNA, 25 nt, Human
cagcggggcaggcugugaguccccu

SEQ ID NO: 1168797 - RNA, 21 nt, Human
caggaaauccccgcucgcuga

SEQ ID NO: 1168798 - RNA, 25 nt, Human
ccacagcgcccccucgccgcccgcg

SEQ ID NO: 1168799 - RNA, 19 nt, Human
ccccgagcccgagccuccg

SEQ ID NO: 1168800 - RNA, 20 nt, Human
ccccuaauuggacccggccu

SEQ ID NO: 1168801 - RNA, 20 nt, Human
cccggggagaccccgagccc

SEQ ID NO: 1168802 - RNA, 20 nt, Human
ccgcgcccggcgagcgcccc

SEQ ID NO: 1168803 - RNA, 19 nt, Human
ccggcagacacgggccaca

SEQ ID NO: 1168804 - RNA, 18 nt, Human
ccggcgagcgccccggcc

SEQ ID NO: 1168805 - RNA, 18 nt, Human
ccggcuguuccucgcgcu

SEQ ID NO: 1168806 - RNA, 24 nt, Human
ccgggccuccucggggugcacagc

SEQ ID NO: 1168807 - RNA, 18 nt, Human
ccuccccacuucccugcg

SEQ ID NO: 1168808 - RNA, 18 nt, Human
ccuccggggccggcuguu

SEQ ID NO: 1168809 - RNA, 19 nt, Human
ccucgcgcucggccucgca

SEQ ID NO: 1168810 - RNA, 23 nt, Human
cgagcccgagccuccggggccgg

SEQ ID NO: 1168811 - RNA, 19 nt, Human
cgcgcccggcgagcgcccc

SEQ ID NO: 1168812 - RNA, 24 nt, Human
cgcgcucggccucgcaggaaaucc

SEQ ID NO: 1168813 - RNA, 22 nt, Human
cggcagacacgggccacagcgc

SEQ ID NO: 1168814 - RNA, 22 nt, Human
gagccuccggggccggcuguuc

SEQ ID NO: 1168815 - RNA, 18 nt, Human
gcccgcgcgcacgacucc

SEQ ID NO: 1168816 - RNA, 18 nt, Human
ucggggugcacagcgggg

SEQ ID NO: 1168817 - RNA, 18 nt, Human
ugaaaugccucgaugccg

SEQ ID NO: 1168818 - RNA, 23 nt, Human
ugaaaugccucgaugccguuuuu

SEQ ID NO: 1168819 - RNA, 19 nt, Human
ugccgggacucgggccggc

SEQ ID NO: 1168820 - RNA, 20 nt, Human
uggacccggccuggccugac

SEQ ID NO: 1168821 - RNA, 21 nt, Human
ugggucgcgcccaccguugcc

SEQ ID NO: 1168822 - RNA, 22 nt, Human
uuuuucuucuuccccgaauuaa

SEQ ID NO: 1168823 - RNA, 19 nt, Human
accacagcuugggcuugcu

SEQ ID NO: 1168824 - RNA, 25 nt, Human
cacagcuugggcuugcuggcggggg

SEQ ID NO: 1168825 - RNA, 19 nt, Human
cagcggcgccuccaagccg

SEQ ID NO: 1168826 - RNA, 20 nt, Human
cagcuccucgcugcgcggag

SEQ ID NO: 1168827 - RNA, 22 nt, Human
caucuuguucuccuucuugagg

SEQ ID NO: 1168828 - RNA, 22 nt, Human
ccccgguggcccgcagcccggg

SEQ ID NO: 1168829 - RNA, 20 nt, Human
cccgaagccgguggccgccu

SEQ ID NO: 1168830 - RNA, 26 nt, Human
cccgacgccgagcgcgccagcuccuc

SEQ ID NO: 1168831 - RNA, 20 nt, Human
cccuggggcgucuugcggcc

SEQ ID NO: 1168832 - RNA, 21 nt, Human
ccgagcccgacgccgagcgcg

SEQ ID NO: 1168833 - RNA, 21 nt, Human
ccggcgcgcguuggcgaacca

SEQ ID NO: 1168834 - RNA, 20 nt, Human
cgagcccgacgccgagcgcg

SEQ ID NO: 1168835 - RNA, 20 nt, Human
cgagcccggguaggggcuga

SEQ ID NO: 1168836 - RNA, 21 nt, Human
cgcccuuggugggguaggggu

SEQ ID NO: 1168837 - RNA, 23 nt, Human
cgcgcccggagacguccggcugc

SEQ ID NO: 1168838 - RNA, 30 nt, Human
cgggaagccggcggcggcggcggcggcgac

SEQ ID NO: 1168839 - RNA, 18 nt, Human
cggguaggccgcgcugcc

SEQ ID NO: 1168840 - RNA, 20 nt, Human
cugcgcggagccgccaaagc

SEQ ID NO: 1168841 - RNA, 22 nt, Human
gagccgccaaagccgacgcgcc

SEQ ID NO: 1168842 - RNA, 18 nt, Human
gccgagcgcgccagcucc

SEQ ID NO: 1168843 - RNA, 21 nt, Human
gcgucuugcggccaccgcggg

SEQ ID NO: 1168844 - RNA, 18 nt, Human
gcguuggcgaaccaggug

SEQ ID NO: 1168845 - RNA, 24 nt, Human
ggaagccggcggcggcggcggcgg

SEQ ID NO: 1168846 - RNA, 18 nt, Human
ggcccgcagcccgggccc

SEQ ID NO: 1168847 - RNA, 25 nt, Human
ggccucgggcggggggcucagcagc

SEQ ID NO: 1168848 - RNA, 19 nt, Human
ggcggcgcgcccggagacg

SEQ ID NO: 1168849 - RNA, 18 nt, Human
ggcggcggcgucggccga

SEQ ID NO: 1168850 - RNA, 22 nt, Human
ggcuugcuggcggggggcggcg

SEQ ID NO: 1168851 - RNA, 18 nt, Human
gggcagccccgguggccc

SEQ ID NO: 1168852 - RNA, 25 nt, Human
gggcagccccgguggcccgcagccc

SEQ ID NO: 1168853 - RNA, 23 nt, Human
gggcgcggccucgggcggggggc

SEQ ID NO: 1168854 - RNA, 20 nt, Human
ggggcgcggccucgggcggg

SEQ ID NO: 1168855 - RNA, 21 nt, Human
ggugcucguugagccaggccu

SEQ ID NO: 1168856 - RNA, 21 nt, Human
ugagaguggccguggcguccc

SEQ ID NO: 1168857 - RNA, 21 nt, Human
ugcccuggggcgucuugcggc

SEQ ID NO: 1168858 - RNA, 24 nt, Human
ugcccuggggcgucuugcggccac

SEQ ID NO: 1168859 - RNA, 20 nt, Human
uggccguggcgucccgcgug

SEQ ID NO: 1168860 - RNA, 31 nt, Human
uuggugaugauggcuagcaugaucuucucuu

SEQ ID NO: 1168861 - RNA, 22 nt, Human
aaagcuccccaucacccugccc

SEQ ID NO: 1168862 - RNA, 19 nt, Human
aaccaggaagaggcugucu

SEQ ID NO: 1168863 - RNA, 23 nt, Human
aagaagagugagacugagaccug

SEQ ID NO: 1168864 - RNA, 21 nt, Human
aagcaguggagacagagauuu

SEQ ID NO: 1168865 - RNA, 20 nt, Human
aagcuccccaucacccugcc

SEQ ID NO: 1168866 - RNA, 20 nt, Human
aagguuuugcccuuuuccua

SEQ ID NO: 1168867 - RNA, 24 nt, Human
acaacccacuaggguuaggggccc

SEQ ID NO: 1168868 - RNA, 23 nt, Human
acaguauuuccaaaggaggcuuu

SEQ ID NO: 1168869 - RNA, 21 nt, Human
acuccccccaaagcuccccau

SEQ ID NO: 1168870 - RNA, 22 nt, Human
acugaauccauucugacacacu

SEQ ID NO: 1168871 - RNA, 19 nt, Human
agaaagccugaaaucccac

SEQ ID NO: 1168872 - RNA, 25 nt, Human
agaaagccugaaaucccacguuaga

SEQ ID NO: 1168873 - RNA, 19 nt, Human
agaacucagcagcuuaaaa

SEQ ID NO: 1168874 - RNA, 24 nt, Human
agaagagugagacugagaccugag

SEQ ID NO: 1168875 - RNA, 18 nt, Human
agaaggagccugggcccu

SEQ ID NO: 1168876 - RNA, 20 nt, Human
agcucccgcagccaaggaau

SEQ ID NO: 1168877 - RNA, 19 nt, Human
aggcagcccucggcugggc

SEQ ID NO: 1168878 - RNA, 21 nt, Human
aggcagcugccauccacccuu

SEQ ID NO: 1168879 - RNA, 19 nt, Human
aggguuaggggcccgcagg

SEQ ID NO: 1168880 - RNA, 18 nt, Human
aucccacagccaccacag

SEQ ID NO: 1168881 - RNA, 18 nt, Human
aucggccaccaggcuggu

SEQ ID NO: 1168882 - RNA, 24 nt, Human
auggguuuuggugguaaauguuuu

SEQ ID NO: 1168883 - RNA, 24 nt, Human
augucaguggaaagaguaugguuc

SEQ ID NO: 1168884 - RNA, 18 nt, Human
caaagcuccccaucaccc

SEQ ID NO: 1168885 - RNA, 20 nt, Human
caacugcccccgcucugccc

SEQ ID NO: 1168886 - RNA, 18 nt, Human
caagagaggaggaggcag

SEQ ID NO: 1168887 - RNA, 24 nt, Human
cacacagccccauuccgcugccag

SEQ ID NO: 1168888 - RNA, 21 nt, Human
cacccugcccucuccaaaucc

SEQ ID NO: 1168889 - RNA, 22 nt, Human
cacccugcccucuccaaauccu

SEQ ID NO: 1168890 - RNA, 19 nt, Human
caccguguauggccguggu

SEQ ID NO: 1168891 - RNA, 20 nt, Human
cacgauaagcacauauuacu

SEQ ID NO: 1168892 - RNA, 23 nt, Human
cacuccccagaacccuccagcaa

SEQ ID NO: 1168893 - RNA, 23 nt, Human
cagaacccuccagcaaggggcuc

SEQ ID NO: 1168894 - RNA, 24 nt, Human
cagcaggaaaaggaaagcagugga

SEQ ID NO: 1168895 - RNA, 21 nt, Human
cagcgcucugugagcuuccaa

SEQ ID NO: 1168896 - RNA, 19 nt, Human
caggaaaaggaaagcagug

SEQ ID NO: 1168897 - RNA, 18 nt, Human
caggaagaggcucuggca

SEQ ID NO: 1168898 - RNA, 21 nt, Human
caggaagaggcugucucccug

SEQ ID NO: 1168899 - RNA, 23 nt, Human
caggggugccugugugauccagu

SEQ ID NO: 1168900 - RNA, 22 nt, Human
caguaggacagguuucucaaac

SEQ ID NO: 1168901 - RNA, 22 nt, Human
cauacaaucacucccuucuuag

SEQ ID NO: 1168902 - RNA, 23 nt, Human
caucacccugcccucuccaaauc

SEQ ID NO: 1168903 - RNA, 27 nt, Human
caucggccaccaggcuggucuccagga

SEQ ID NO: 1168904 - RNA, 21 nt, Human
caugacccugagaagacucag

SEQ ID NO: 1168905 - RNA, 26 nt, Human
ccacagaagguuguguuacccccgcc

SEQ ID NO: 1168906 - RNA, 25 nt, Human
ccaccaggcuuuacucacaaugcaa

SEQ ID NO: 1168907 - RNA, 21 nt, Human
cccaucacccugcccucucca

SEQ ID NO: 1168908 - RNA, 19 nt, Human
ccccaaagcuccccaucac

SEQ ID NO: 1168909 - RNA, 19 nt, Human
ccccacaccagccugcacc

SEQ ID NO: 1168910 - RNA, 21 nt, Human
ccccaucacccugcccucucc

SEQ ID NO: 1168911 - RNA, 21 nt, Human
ccccgcucugcccgcuccaga

SEQ ID NO: 1168912 - RNA, 22 nt, Human
ccccgcucugcccgcuccagaa

SEQ ID NO: 1168913 - RNA, 18 nt, Human
cccgcagaacucagcagc

SEQ ID NO: 1168914 - RNA, 21 nt, Human
cccgcagccaaggaaugagac

SEQ ID NO: 1168915 - RNA, 24 nt, Human
ccgugggccacuccccagaacccu

SEQ ID NO: 1168916 - RNA, 18 nt, Human
ccuaaucuagcagccaca

SEQ ID NO: 1168917 - RNA, 21 nt, Human
ccucuuuugcugacagggguu

SEQ ID NO: 1168918 - RNA, 23 nt, Human
ccuucuuccuuccuccuucuucc

SEQ ID NO: 1168919 - RNA, 21 nt, Human
cgcugccagcguccugcaggc

SEQ ID NO: 1168920 - RNA, 25 nt, Human
cuccccaucacccugcccucuccaa

SEQ ID NO: 1168921 - RNA, 22 nt, Human
cucccgcagaacucagcagcuu

SEQ ID NO: 1168922 - RNA, 25 nt, Human
cugaucgccgcucaccuacuccuga

SEQ ID NO: 1168923 - RNA, 27 nt, Human
cugcaggccccuccucagggaaggccc

SEQ ID NO: 1168924 - RNA, 20 nt, Human
cuggaaggauacaccaccca

SEQ ID NO: 1168925 - RNA, 18 nt, Human
cuggucuccaggaaauag

SEQ ID NO: 1168926 - RNA, 20 nt, Human
cugucucccugccaugaccu

SEQ ID NO: 1168927 - RNA, 19 nt, Human
cuuccaccguuucaaggac

SEQ ID NO: 1168928 - RNA, 21 nt, Human
gcagaacucagcagcuuaaaa

SEQ ID NO: 1168929 - RNA, 19 nt, Human
gcagcugccauccacccuu

SEQ ID NO: 1168930 - RNA, 21 nt, Human
gcaggaaaaggaaagcagugg

SEQ ID NO: 1168931 - RNA, 19 nt, Human
gcccauacaaucacucccu

SEQ ID NO: 1168932 - RNA, 21 nt, Human
gcuccagacacauguggaggg

SEQ ID NO: 1168933 - RNA, 21 nt, Human
gcugccauccacccuuuaccu

SEQ ID NO: 1168934 - RNA, 19 nt, Human
gcuguguguggccuucagg

SEQ ID NO: 1168935 - RNA, 19 nt, Human
ggacagaacacaguauccg

SEQ ID NO: 1168936 - RNA, 24 nt, Human
ggagccaaggugaacagcaggaaa

SEQ ID NO: 1168937 - RNA, 20 nt, Human
ggauuaaucccacagccacc

SEQ ID NO: 1168938 - RNA, 19 nt, Human
gggcccagagcagggccgg

SEQ ID NO: 1168939 - RNA, 21 nt, Human
ggggcucaggguagucagaug

SEQ ID NO: 1168940 - RNA, 19 nt, Human
gggugacgguggccauggg

SEQ ID NO: 1168941 - RNA, 21 nt, Human
gggugacgguggccaugggug

SEQ ID NO: 1168942 - RNA, 22 nt, Human
gggugacgguggccgugggcca

SEQ ID NO: 1168943 - RNA, 21 nt, Human
ggguuaggggcccgcagguuu

SEQ ID NO: 1168944 - RNA, 20 nt, Human
ggugacgguggccgugggcc

SEQ ID NO: 1168945 - RNA, 19 nt, Human
gugaacagcaggaaaagga

SEQ ID NO: 1168946 - RNA, 20 nt, Human
guggguaggugggagaacag

SEQ ID NO: 1168947 - RNA, 22 nt, Human
uaauagaaccagucuccuagau

SEQ ID NO: 1168948 - RNA, 24 nt, Human
uacuuauauacgaaaaaaguuauu

SEQ ID NO: 1168949 - RNA, 20 nt, Human
uagaugacacugcuccccac

SEQ ID NO: 1168950 - RNA, 23 nt, Human
uagggcccuggugucuacuuccu

SEQ ID NO: 1168951 - RNA, 26 nt, Human
uaugacaucggccaccaggcuggucu

SEQ ID NO: 1168952 - RNA, 23 nt, Human
ucacccugcccucuccaaauccu

SEQ ID NO: 1168953 - RNA, 18 nt, Human
ucagaaagagggcaagcu

SEQ ID NO: 1168954 - RNA, 23 nt, Human
ucagcaaacucccgcagaacuca

SEQ ID NO: 1168955 - RNA, 21 nt, Human
ucaguggaaagaguaugguuc

SEQ ID NO: 1168956 - RNA, 19 nt, Human
uccauucuggucacauaaa

SEQ ID NO: 1168957 - RNA, 19 nt, Human
ucccacagccaccacagaa

SEQ ID NO: 1168958 - RNA, 21 nt, Human
uccccccaaagcuccccauca

SEQ ID NO: 1168959 - RNA, 24 nt, Human
uccccccaaagcuccccaucaccc

SEQ ID NO: 1168960 - RNA, 22 nt, Human
uccgagaguucugguuucuacu

SEQ ID NO: 1168961 - RNA, 18 nt, Human
ucgcccauacaaucacuc

SEQ ID NO: 1168962 - RNA, 20 nt, Human
ucggugaagagugaggccug

SEQ ID NO: 1168963 - RNA, 20 nt, Human
ucuccaggucaggguuccua

SEQ ID NO: 1168964 - RNA, 20 nt, Human
ucuggcaggaagaacagcug

SEQ ID NO: 1168965 - RNA, 23 nt, Human
ucuuuugcugacaggggugccug

SEQ ID NO: 1168966 - RNA, 20 nt, Human
ugaaaaaaaguuuuggaagg

SEQ ID NO: 1168967 - RNA, 25 nt, Human
ugaaaaacagaauauaaaauugaaa

SEQ ID NO: 1168968 - RNA, 25 nt, Human
ugacaucggccaccaggcuggucuc

SEQ ID NO: 1168969 - RNA, 21 nt, Human
ugagaaggagccugggcccug

SEQ ID NO: 1168970 - RNA, 19 nt, Human
ugcaugacccugagaagac

SEQ ID NO: 1168971 - RNA, 23 nt, Human
ugccagcguccugcaggccccuc

SEQ ID NO: 1168972 - RNA, 20 nt, Human
ugccaggggccagaaugugg

SEQ ID NO: 1168973 - RNA, 21 nt, Human
ugccaggggccagaauguggg

SEQ ID NO: 1168974 - RNA, 22 nt, Human
ugccaugaccuaaucuagcagc

SEQ ID NO: 1168975 - RNA, 19 nt, Human
ugccccucuccaggucagg

SEQ ID NO: 1168976 - RNA, 20 nt, Human
uggaaagaguaugguucuuc

SEQ ID NO: 1168977 - RNA, 18 nt, Human
uggaaggaaaaaauauuc

SEQ ID NO: 1168978 - RNA, 22 nt, Human
uggaaggaaaaaauauucccau

SEQ ID NO: 1168979 - RNA, 20 nt, Human
uggaaggauacaccacccac

SEQ ID NO: 1168980 - RNA, 19 nt, Human
uggaggaacccccacacca

SEQ ID NO: 1168981 - RNA, 18 nt, Human
uggcaggaagaacagcug

SEQ ID NO: 1168982 - RNA, 19 nt, Human
uggcaggaagaacagcugg

SEQ ID NO: 1168983 - RNA, 22 nt, Human
ugggggaaaguaacagccuugg

SEQ ID NO: 1168984 - RNA, 19 nt, Human
ugguggcaaaacacugacc

SEQ ID NO: 1168985 - RNA, 21 nt, Human
ugguggcaaaacacugaccuc

SEQ ID NO: 1168986 - RNA, 20 nt, Human
uggugguaaauguuuuaucu

SEQ ID NO: 1168987 - RNA, 20 nt, Human
ugguuucuacuguugcucag

SEQ ID NO: 1168988 - RNA, 18 nt, Human
ugugaggaagacgucugg

SEQ ID NO: 1168989 - RNA, 19 nt, Human
uguguuagaugcuggccag

SEQ ID NO: 1168990 - RNA, 23 nt, Human
uuaaucccacagccaccacagaa

SEQ ID NO: 1168991 - RNA, 23 nt, Human
uuauguaugaauuuuauuuuccu

SEQ ID NO: 1168992 - RNA, 19 nt, Human
uuccaaaggaggcuuuugg

SEQ ID NO: 1168993 - RNA, 23 nt, Human
uuccuaaacucccugugaauugc

SEQ ID NO: 1168994 - RNA, 20 nt, Human
uuccuaaugcacucccccca

SEQ ID NO: 1168995 - RNA, 21 nt, Human
uuccugcucugcaacugaauc

SEQ ID NO: 1168996 - RNA, 24 nt, Human
uugaaaaacagaauauaaaauuga

SEQ ID NO: 1168997 - RNA, 24 nt, Human
uuggaucaugucaguggaaagagu

SEQ ID NO: 1168998 - RNA, 24 nt, Human
uuggaugcugaugaguaaauguuu

SEQ ID NO: 1168999 - RNA, 26 nt, Human
uuucagaaagagggcaagcuucuguu

SEQ ID NO: 1169000 - RNA, 27 nt, Human
aaaaaaaaaaaaaaaagaugaagaaaa

SEQ ID NO: 1169001 - RNA, 25 nt, Human
aaaaaaaaaaaaaagaugaagaaaa

SEQ ID NO: 1169002 - RNA, 19 nt, Human
aaaccuggacgagguggcg

SEQ ID NO: 1169003 - RNA, 23 nt, Human
aaagaugaagaaaaggggaaaga

SEQ ID NO: 1169004 - RNA, 24 nt, Human
aaaguacugggauuacagguguga

SEQ ID NO: 1169005 - RNA, 27 nt, Human
aagcuccgcuucccggguucacgcccu

SEQ ID NO: 1169006 - RNA, 18 nt, Human
aaguacugggauuacagg

SEQ ID NO: 1169007 - RNA, 26 nt, Human
aaguacugggauuacaggugugagcc

SEQ ID NO: 1169008 - RNA, 22 nt, Human
acagaacagaugggugaacacu

SEQ ID NO: 1169009 - RNA, 25 nt, Human
acccgccucggccucccaaaguacu

SEQ ID NO: 1169010 - RNA, 20 nt, Human
accuccgaugcggcacuccc

SEQ ID NO: 1169011 - RNA, 18 nt, Human
acgggguuucacuguguu

SEQ ID NO: 1169012 - RNA, 19 nt, Human
acgggguuucacuguguua

SEQ ID NO: 1169013 - RNA, 20 nt, Human
acgggguuucacuguguuag

SEQ ID NO: 1169014 - RNA, 24 nt, Human
acgggguuucacuguguuagccag

SEQ ID NO: 1169015 - RNA, 24 nt, Human
acuguguuagccaggcuggucucg

SEQ ID NO: 1169016 - RNA, 19 nt, Human
agcucaccuccucugcaaa

SEQ ID NO: 1169017 - RNA, 18 nt, Human
aggcaggggauggggaag

SEQ ID NO: 1169018 - RNA, 19 nt, Human
aggcaggggauggggaagu

SEQ ID NO: 1169019 - RNA, 20 nt, Human
aggcaggggauggggaagug

SEQ ID NO: 1169020 - RNA, 25 nt, Human
aggcuggagugcaguggcgccaucu

SEQ ID NO: 1169021 - RNA, 19 nt, Human
aggcugggcuggaagugag

SEQ ID NO: 1169022 - RNA, 23 nt, Human
aggcugggcuggaagugaggcuc

SEQ ID NO: 1169023 - RNA, 20 nt, Human
agggcguaacgacagcagcc

SEQ ID NO: 1169024 - RNA, 24 nt, Human
aggggucacuuaccaagcucuguc

SEQ ID NO: 1169025 - RNA, 20 nt, Human
agguagcagcaaaaggucug

SEQ ID NO: 1169026 - RNA, 21 nt, Human
aguccuggugagcucaccucc

SEQ ID NO: 1169027 - RNA, 20 nt, Human
agugcaguggcgccaucucg

SEQ ID NO: 1169028 - RNA, 24 nt, Human
agugcaguggcgccaucucggcuc

SEQ ID NO: 1169029 - RNA, 24 nt, Human
caaaguacugggauuacaggugug

SEQ ID NO: 1169030 - RNA, 23 nt, Human
cacccgccucggccucccaaagu

SEQ ID NO: 1169031 - RNA, 24 nt, Human
caccgauccccguuccccgguggc

SEQ ID NO: 1169032 - RNA, 22 nt, Human
cacgcccuucuccugccucagc

SEQ ID NO: 1169033 - RNA, 19 nt, Human
cacuguguuagccaggcug

SEQ ID NO: 1169034 - RNA, 21 nt, Human
cacuguguuagccaggcuggu

SEQ ID NO: 1169035 - RNA, 24 nt, Human
cacuguguuagccaggcuggucuc

SEQ ID NO: 1169036 - RNA, 20 nt, Human
cagaacagaugggugaacag

SEQ ID NO: 1169037 - RNA, 20 nt, Human
cagaggccagggcacgugug

SEQ ID NO: 1169038 - RNA, 21 nt, Human
cagcagugggggccaccuggc

SEQ ID NO: 1169039 - RNA, 23 nt, Human
cagcagugggggccaccuggcag

SEQ ID NO: 1169040 - RNA, 20 nt, Human
cagcugagcuccagaggcca

SEQ ID NO: 1169041 - RNA, 20 nt, Human
cagguagcagcaaaaggucu

SEQ ID NO: 1169042 - RNA, 21 nt, Human
caucugugcacuagccuccgu

SEQ ID NO: 1169043 - RNA, 21 nt, Human
ccaaaguacugggauuacagg

SEQ ID NO: 1169044 - RNA, 24 nt, Human
ccaaaguacugggauuacaggugu

SEQ ID NO: 1169045 - RNA, 19 nt, Human
ccauguagcugggacuaca

SEQ ID NO: 1169046 - RNA, 22 nt, Human
cccuccugcuagugugaaaauc

SEQ ID NO: 1169047 - RNA, 20 nt, Human
ccucccaaaucuauuagcuc

SEQ ID NO: 1169048 - RNA, 19 nt, Human
ccuccugcuagugugaaaa

SEQ ID NO: 1169049 - RNA, 21 nt, Human
ccucgcgcuggaauaaacccu

SEQ ID NO: 1169050 - RNA, 22 nt, Human
ccucgcgcuggaauaaacccuc

SEQ ID NO: 1169051 - RNA, 20 nt, Human
ccugaccucgugauccaccc

SEQ ID NO: 1169052 - RNA, 18 nt, Human
ccuggcagguagcagcaa

SEQ ID NO: 1169053 - RNA, 24 nt, Human
cgacagcagccggucaacccugac

SEQ ID NO: 1169054 - RNA, 24 nt, Human
cgcccaggcuggagugcaguggcg

SEQ ID NO: 1169055 - RNA, 21 nt, Human
cgccgggcuaauuuuuuguau

SEQ ID NO: 1169056 - RNA, 24 nt, Human
cgccucggccucccaaaguacugg

SEQ ID NO: 1169057 - RNA, 20 nt, Human
cgcuggcagcagagacccug

SEQ ID NO: 1169058 - RNA, 24 nt, Human
cgggguuucacuguguuagccagg

SEQ ID NO: 1169059 - RNA, 24 nt, Human
cucagccucccauguagcugggac

SEQ ID NO: 1169060 - RNA, 23 nt, Human
cucccauguagcugggacuacag

SEQ ID NO: 1169061 - RNA, 24 nt, Human
cuccugaccucgugauccacccgc

SEQ ID NO: 1169062 - RNA, 25 nt, Human
cuccugccucagccucccauguagc

SEQ ID NO: 1169063 - RNA, 21 nt, Human
cucgcucugucgcccaggcug

SEQ ID NO: 1169064 - RNA, 24 nt, Human
cucgcucugucgcccaggcuggag

SEQ ID NO: 1169065 - RNA, 20 nt, Human
cucugucgcccaggcuggag

SEQ ID NO: 1169066 - RNA, 22 nt, Human
cugaagcuuuuccagcucugca

SEQ ID NO: 1169067 - RNA, 23 nt, Human
cugccucagccucccauguagcu

SEQ ID NO: 1169068 - RNA, 26 nt, Human
cuggcagguagcagcaaaaggucuuu

SEQ ID NO: 1169069 - RNA, 22 nt, Human
cugucugaagcuuuuccagcuc

SEQ ID NO: 1169070 - RNA, 24 nt, Human
cuucccggguucacgcccuucucc

SEQ ID NO: 1169071 - RNA, 19 nt, Human
gaacgaucuucccccuucc

SEQ ID NO: 1169072 - RNA, 19 nt, Human
gacagcagccggucaaccc

SEQ ID NO: 1169073 - RNA, 18 nt, Human
gacaucugugcacuagcc

SEQ ID NO: 1169074 - RNA, 19 nt, Human
gaccgccgcuuccugaccc

SEQ ID NO: 1169075 - RNA, 22 nt, Human
gaccucgugauccacccgccuc

SEQ ID NO: 1169076 - RNA, 22 nt, Human
gaccucgugauccacccgccuc

SEQ ID NO: 1169077 - RNA, 24 nt, Human
gaccucgugauccacccgccucgg

SEQ ID NO: 1169078 - RNA, 21 nt, Human
gagacagagucucgcucuguc

SEQ ID NO: 1169079 - RNA, 19 nt, Human
gaguccuggugagcucacc

SEQ ID NO: 1169080 - RNA, 18 nt, Human
gauuacaggugugagcca

SEQ ID NO: 1169081 - RNA, 21 nt, Human
gauuacaggugugagccacug

SEQ ID NO: 1169082 - RNA, 24 nt, Human
gauuacaggugugagccacuggac

SEQ ID NO: 1169083 - RNA, 20 nt, Human
gccacuggacccggcccuga

SEQ ID NO: 1169084 - RNA, 19 nt, Human
gcccaggcuggagugcagu

SEQ ID NO: 1169085 - RNA, 20 nt, Human
gcccaggcuggagugcagug

SEQ ID NO: 1169086 - RNA, 18 nt, Human
gcccuucugcauaggagg

SEQ ID NO: 1169087 - RNA, 18 nt, Human
gccgggcuaauuuuuugu

SEQ ID NO: 1169088 - RNA, 20 nt, Human
gccucagccucccauguagc

SEQ ID NO: 1169089 - RNA, 21 nt, Human
gcuaugaaaaccuggacgagg

SEQ ID NO: 1169090 - RNA, 23 nt, Human
gcuccaggcaggggauggggaag

SEQ ID NO: 1169091 - RNA, 25 nt, Human
gcucugucgcccaggcuggagugca

SEQ ID NO: 1169092 - RNA, 20 nt, Human
gcuggagugcaguggcgcca

SEQ ID NO: 1169093 - RNA, 23 nt, Human
gcuggucucgaucuccugaccuc

SEQ ID NO: 1169094 - RNA, 27 nt, Human
ggaagugcgcacccuuggcugcccuuc

SEQ ID NO: 1169095 - RNA, 24 nt, Human
ggcuggucucgaucuccugaccuc

SEQ ID NO: 1169096 - RNA, 23 nt, Human
gggguuucacuguguuagccagg

SEQ ID NO: 1169097 - RNA, 18 nt, Human
guagcugggacuacaggc

SEQ ID NO: 1169098 - RNA, 24 nt, Human
gucucgcucugucgcccaggcugg

SEQ ID NO: 1169099 - RNA, 19 nt, Human
gugaaaaucagggucggag

SEQ ID NO: 1169100 - RNA, 24 nt, Human
gugauccacccgccucggccuccc

SEQ ID NO: 1169101 - RNA, 21 nt, Human
uaaacccucguaacgggaccc

SEQ ID NO: 1169102 - RNA, 18 nt, Human
uaaagugucuugguccca

SEQ ID NO: 1169103 - RNA, 19 nt, Human
uaagccccggacacugccu

SEQ ID NO: 1169104 - RNA, 24 nt, Human
uaauuuuuuguauuuuuagaagag

SEQ ID NO: 1169105 - RNA, 25 nt, Human
uaauuuuuuguauuuuuagaagaga

SEQ ID NO: 1169106 - RNA, 18 nt, Human
uacaggugugagccacug

SEQ ID NO: 1169107 - RNA, 19 nt, Human
uacaggugugagccacugg

SEQ ID NO: 1169108 - RNA, 23 nt, Human
uacaggugugagccacuggaccc

SEQ ID NO: 1169109 - RNA, 22 nt, Human
uaccaagcucugucugaagcuu

SEQ ID NO: 1169110 - RNA, 24 nt, Human
uacugggauuacaggugugagcca

SEQ ID NO: 1169111 - RNA, 24 nt, Human
uagaagagacgggguuucacugug

SEQ ID NO: 1169112 - RNA, 24 nt, Human
uagccaggcuggucucgaucuccu

SEQ ID NO: 1169113 - RNA, 20 nt, Human
ucacgcccuucuccugccuc

SEQ ID NO: 1169114 - RNA, 23 nt, Human
ucacugcaagcuccgcuucccgg

SEQ ID NO: 1169115 - RNA, 24 nt, Human
ucacugcaagcuccgcuucccggg

SEQ ID NO: 1169116 - RNA, 22 nt, Human
ucacuguguuagccaggcuggu

SEQ ID NO: 1169117 - RNA, 24 nt, Human
ucacuguguuagccaggcuggucu

SEQ ID NO: 1169118 - RNA, 23 nt, Human
ucccaaaguacugggauuacagg

SEQ ID NO: 1169119 - RNA, 21 nt, Human
ucccagaugcuaagauucccu

SEQ ID NO: 1169120 - RNA, 24 nt, Human
ucccauguagcugggacuacaggc

SEQ ID NO: 1169121 - RNA, 24 nt, Human
ucccggguucacgcccuucuccug

SEQ ID NO: 1169122 - RNA, 23 nt, Human
uccgcuucccggguucacgcccu

SEQ ID NO: 1169123 - RNA, 22 nt, Human
ucgcccaggcuggagugcagug

SEQ ID NO: 1169124 - RNA, 24 nt, Human
ucgcucugucgcccaggcuggagu

SEQ ID NO: 1169125 - RNA, 23 nt, Human
ucuagagaaaaaaaaaaaaaaaa

SEQ ID NO: 1169126 - RNA, 19 nt, Human
ucucgcucugucgcccagg

SEQ ID NO: 1169127 - RNA, 23 nt, Human
ucucgcucugucgcccaggcugg

SEQ ID NO: 1169128 - RNA, 24 nt, Human
ucucgcucugucgcccaggcugga

SEQ ID NO: 1169129 - RNA, 26 nt, Human
ucucgcucugucgcccaggcuggagu

SEQ ID NO: 1169130 - RNA, 27 nt, Human
ucucgcucugucgcccaggcuggagug

SEQ ID NO: 1169131 - RNA, 18 nt, Human
ucugcgggcccaggcugg

SEQ ID NO: 1169132 - RNA, 21 nt, Human
ucugcgggcccaggcugggcu

SEQ ID NO: 1169133 - RNA, 21 nt, Human
ucuguacagugugaugugaag

SEQ ID NO: 1169134 - RNA, 22 nt, Human
ugacccagcgcccucccuccug

SEQ ID NO: 1169135 - RNA, 23 nt, Human
ugaggcagacagaacagaugggu

SEQ ID NO: 1169136 - RNA, 24 nt, Human
ugccucagccucccauguagcugg

SEQ ID NO: 1169137 - RNA, 18 nt, Human
ugcgggcccaggcugggc

SEQ ID NO: 1169138 - RNA, 28 nt, Human
uggagugcaguggcgccauccuagcacg

SEQ ID NO: 1169139 - RNA, 23 nt, Human
uggagugcaguggcgccaucucg

SEQ ID NO: 1169140 - RNA, 24 nt, Human
uggagugcaguggcgccaucucgg

SEQ ID NO: 1169141 - RNA, 19 nt, Human
uggcagcagagacccuggu

SEQ ID NO: 1169142 - RNA, 21 nt, Human
ugggacuacaggcacaugccg

SEQ ID NO: 1169143 - RNA, 22 nt, Human
ugggacuacaggcacaugccgc

SEQ ID NO: 1169144 - RNA, 24 nt, Human
ugggacuacaggcacaugccgcca

SEQ ID NO: 1169145 - RNA, 18 nt, Human
ugggauuacaggugugag

SEQ ID NO: 1169146 - RNA, 19 nt, Human
ugggauuacaggugugagc

SEQ ID NO: 1169147 - RNA, 21 nt, Human
ugggauuacaggugugagcca

SEQ ID NO: 1169148 - RNA, 22 nt, Human
ugggauuacaggugugagccac

SEQ ID NO: 1169149 - RNA, 22 nt, Human
ugggauuacaggugugagccac

SEQ ID NO: 1169150 - RNA, 24 nt, Human
ugggauuacaggugugagccacug

SEQ ID NO: 1169151 - RNA, 20 nt, Human
ugggggccaccuggcaggua

SEQ ID NO: 1169152 - RNA, 19 nt, Human
uguagcugggacuacaggc

SEQ ID NO: 1169153 - RNA, 24 nt, Human
uguagcugggacuacaggcacaug

SEQ ID NO: 1169154 - RNA, 21 nt, Human
ugucgcccaggcuggagugca

SEQ ID NO: 1169155 - RNA, 24 nt, Human
uuagaagagacgggguuucacugu

SEQ ID NO: 1169156 - RNA, 18 nt, Human
uucccggguucacgcccu

SEQ ID NO: 1169157 - RNA, 22 nt, Human
uugcgcauccgcccgacucccu

SEQ ID NO: 1169158 - RNA, 21 nt, Human
uuucacuguguuagccaggcu

SEQ ID NO: 1169159 - RNA, 21 nt, Human
uuucucggugccugaccgccg

SEQ ID NO: 1169160 - RNA, 24 nt, Human
uuuuuagaagagacgggguuucac

SEQ ID NO: 1169161 - RNA, 21 nt, Human
uuuuuguauuuuuagaagaga

SEQ ID NO: 1169162 - RNA, 24 nt, Human
uuuuuuguauuuuuagaagagacg

SEQ ID NO: 1169163 - RNA, 18 nt, Human
aaaaaaaaaaaaaaagcu

SEQ ID NO: 1169164 - RNA, 22 nt, Human
aaaaaaagcugaagaacuugga

SEQ ID NO: 1169165 - RNA, 21 nt, Human
aaacaaaaacaagaacguggu

SEQ ID NO: 1169166 - RNA, 23 nt, Human
aaccacagaauuacucccacuuc

SEQ ID NO: 1169167 - RNA, 22 nt, Human
aaccagaagccucuggaguuuc

SEQ ID NO: 1169168 - RNA, 18 nt, Human
aacuuccaucucugccuc

SEQ ID NO: 1169169 - RNA, 23 nt, Human
aagaagccagucugagucccaaa

SEQ ID NO: 1169170 - RNA, 23 nt, Human
aagccucuggaguuucucagugc

SEQ ID NO: 1169171 - RNA, 19 nt, Human
aaucaaguugacacucaau

SEQ ID NO: 1169172 - RNA, 19 nt, Human
aaugccacagagcaccaac

SEQ ID NO: 1169173 - RNA, 19 nt, Human
acaaacaaaaacaagaacg

SEQ ID NO: 1169174 - RNA, 24 nt, Human
acaaacaaaaacaagaacgugguc

SEQ ID NO: 1169175 - RNA, 18 nt, Human
acacugugaugguggggg

SEQ ID NO: 1169176 - RNA, 22 nt, Human
accaacacuggacagggacaca

SEQ ID NO: 1169177 - RNA, 21 nt, Human
acggaugccugagguuccacc

SEQ ID NO: 1169178 - RNA, 26 nt, Human
acucccacuuccagacagcacuccau

SEQ ID NO: 1169179 - RNA, 19 nt, Human
acugcaagcugaggagcca

SEQ ID NO: 1169180 - RNA, 24 nt, Human
acuucucaguucauguauauacgg

SEQ ID NO: 1169181 - RNA, 21 nt, Human
agacagcacuccaucugagca

SEQ ID NO: 1169182 - RNA, 19 nt, Human
agccagcgcugcuuccugg

SEQ ID NO: 1169183 - RNA, 18 nt, Human
agccucuggaguuucuca

SEQ ID NO: 1169184 - RNA, 19 nt, Human
aggcaucccccaccccggc

SEQ ID NO: 1169185 - RNA, 22 nt, Human
aggcaucccccaccccggcuua

SEQ ID NO: 1169186 - RNA, 24 nt, Human
aggcuggaacacucagcaagucug

SEQ ID NO: 1169187 - RNA, 24 nt, Human
agggacacacugugaugguggggg

SEQ ID NO: 1169188 - RNA, 24 nt, Human
agggaggagaugaggccccacugg

SEQ ID NO: 1169189 - RNA, 21 nt, Human
augaauggaugcuucccauuc

SEQ ID NO: 1169190 - RNA, 19 nt, Human
augcagccuggaagagcug

SEQ ID NO: 1169191 - RNA, 21 nt, Human
augcagccuggaagagcugga

SEQ ID NO: 1169192 - RNA, 18 nt, Human
augccacagagcaccaac

SEQ ID NO: 1169193 - RNA, 22 nt, Human
augguaucuggggaucagccag

SEQ ID NO: 1169194 - RNA, 19 nt, Human
auuagaaagucuucaagca

SEQ ID NO: 1169195 - RNA, 20 nt, Human
auugagggggacaugcagcc

SEQ ID NO: 1169196 - RNA, 21 nt, Human
caaaaaaaaaaaaaaagcuga

SEQ ID NO: 1169197 - RNA, 25 nt, Human
caaaaaaaaaaaaaaagcugaagaa

SEQ ID NO: 1169198 - RNA, 24 nt, Human
caaaaacaagaacguggucaauac

SEQ ID NO: 1169199 - RNA, 19 nt, Human
caaaaugcugaauuccgua

SEQ ID NO: 1169200 - RNA, 25 nt, Human
caaacaaaaacaagaacguggucaa

SEQ ID NO: 1169201 - RNA, 21 nt, Human
caaauugcagaaacagccuga

SEQ ID NO: 1169202 - RNA, 23 nt, Human
caagaguccaaaaaaaaaaaaaa

SEQ ID NO: 1169203 - RNA, 23 nt, Human
caagugcugcgucccaaaagucc

SEQ ID NO: 1169204 - RNA, 28 nt, Human
cacaaaauacaaucaaaaucagggcaua

SEQ ID NO: 1169205 - RNA, 18 nt, Human
cacaaacaaaaacaagaa

SEQ ID NO: 1169206 - RNA, 24 nt, Human
cacaaauacgccuaggcauccccc

SEQ ID NO: 1169207 - RNA, 20 nt, Human
cacaagcaaugccacagagc

SEQ ID NO: 1169208 - RNA, 21 nt, Human
cacacucucacauauacaccc

SEQ ID NO: 1169209 - RNA, 22 nt, Human
cacaucuguggaaucagggcgg

SEQ ID NO: 1169210 - RNA, 18 nt, Human
cacugugauggugggggc

SEQ ID NO: 1169211 - RNA, 19 nt, Human
cagagcagcacagggagga

SEQ ID NO: 1169212 - RNA, 18 nt, Human
cagagcuggacugacccu

SEQ ID NO: 1169213 - RNA, 19 nt, Human
cagcacagggaggagauga

SEQ ID NO: 1169214 - RNA, 19 nt, Human
cagccugaggacagagcca

SEQ ID NO: 1169215 - RNA, 20 nt, Human
cauccagcaugggagaaaga

SEQ ID NO: 1169216 - RNA, 22 nt, Human
cauucaaccacagaauuacucc

SEQ ID NO: 1169217 - RNA, 19 nt, Human
cauuccaacuucugccugc

SEQ ID NO: 1169218 - RNA, 23 nt, Human
ccaaacuucaaagguagggaggc

SEQ ID NO: 1169219 - RNA, 22 nt, Human
ccagacagcacuccaucugagc

SEQ ID NO: 1169220 - RNA, 22 nt, Human
ccagacagcuuuggugaccgag

SEQ ID NO: 1169221 - RNA, 23 nt, Human
ccagccucacuccauuucuccca

SEQ ID NO: 1169222 - RNA, 18 nt, Human
ccauuggguugaaaggau

SEQ ID NO: 1169223 - RNA, 25 nt, Human
ccgacugcaagcugaggagccaaga

SEQ ID NO: 1169224 - RNA, 20 nt, Human
ccucuuauuccuuacggcuc

SEQ ID NO: 1169225 - RNA, 22 nt, Human
ccuggggaggaggaggcaccgg

SEQ ID NO: 1169226 - RNA, 19 nt, Human
ccuguguauuagucagggu

SEQ ID NO: 1169227 - RNA, 20 nt, Human
cgucugggucugugcuguuc

SEQ ID NO: 1169228 - RNA, 21 nt, Human
cuccauuucucccaccuucca

SEQ ID NO: 1169229 - RNA, 19 nt, Human
cucugccucugacccacau

SEQ ID NO: 1169230 - RNA, 22 nt, Human
cugcauccccucgucugggucu

SEQ ID NO: 1169231 - RNA, 22 nt, Human
cugcggcuagaggccugggagc

SEQ ID NO: 1169232 - RNA, 19 nt, Human
cuggcucugggcugcaucc

SEQ ID NO: 1169233 - RNA, 18 nt, Human
cugggcugcauccccucg

SEQ ID NO: 1169234 - RNA, 18 nt, Human
cuggucuggucacaaaca

SEQ ID NO: 1169235 - RNA, 21 nt, Human
gaaggcuggaacacucagcaa

SEQ ID NO: 1169236 - RNA, 19 nt, Human
gaauuagaaagucuucaag

SEQ ID NO: 1169237 - RNA, 20 nt, Human
gacacacugugauggugggg

SEQ ID NO: 1169238 - RNA, 20 nt, Human
gagagccgaugagagggcag

SEQ ID NO: 1169239 - RNA, 22 nt, Human
gaucacaggcucccaggaggaa

SEQ ID NO: 1169240 - RNA, 19 nt, Human
gcauccccucgucuggguc

SEQ ID NO: 1169241 - RNA, 19 nt, Human
gccugucacucagcaccgc

SEQ ID NO: 1169242 - RNA, 19 nt, Human
ggaggaggaggcaccgggu

SEQ ID NO: 1169243 - RNA, 23 nt, Human
ggaggaggaggcaccggguuacu

SEQ ID NO: 1169244 - RNA, 22 nt, Human
ggaucagccagcgcugcuuccu

SEQ ID NO: 1169245 - RNA, 19 nt, Human
guagaccucucuucaagug

SEQ ID NO: 1169246 - RNA, 21 nt, Human
gugaauaccuacccaaaauug

SEQ ID NO: 1169247 - RNA, 20 nt, Human
uaacacauauaacauaauua

SEQ ID NO: 1169248 - RNA, 22 nt, Human
uacuauguacuaaaagauaaga

SEQ ID NO: 1169249 - RNA, 18 nt, Human
uagcugcuguggcagcug

SEQ ID NO: 1169250 - RNA, 22 nt, Human
uaggcaucccccaccccggcuu

SEQ ID NO: 1169251 - RNA, 18 nt, Human
uaucuggggaucagccag

SEQ ID NO: 1169252 - RNA, 20 nt, Human
uaugugauuuccaaaaugcu

SEQ ID NO: 1169253 - RNA, 24 nt, Human
ucaauaccacaaauacgccuaggg

SEQ ID NO: 1169254 - RNA, 25 nt, Human
uccaacuuccaucucugccucugac

SEQ ID NO: 1169255 - RNA, 19 nt, Human
ucccaaagaacugucuacc

SEQ ID NO: 1169256 - RNA, 19 nt, Human
uccuggggaggaggaggca

SEQ ID NO: 1169257 - RNA, 20 nt, Human
ucuacacacuucucaguuca

SEQ ID NO: 1169258 - RNA, 22 nt, Human
ucuacugcucucagucacuuua

SEQ ID NO: 1169259 - RNA, 21 nt, Human
ucucacauauacacccaggaa

SEQ ID NO: 1169260 - RNA, 21 nt, Human
ucucugccucugacccacauc

SEQ ID NO: 1169261 - RNA, 23 nt, Human
ucugcggcuagaggccugggagc

SEQ ID NO: 1169262 - RNA, 19 nt, Human
ucuggucuggucacaaaca

SEQ ID NO: 1169263 - RNA, 20 nt, Human
ugaaaggauauugaggggga

SEQ ID NO: 1169264 - RNA, 22 nt, Human
ugaagaggucguuaaagcuguu

SEQ ID NO: 1169265 - RNA, 20 nt, Human
ugagagggcaggcuugucca

SEQ ID NO: 1169266 - RNA, 19 nt, Human
ugagucccaaacuucaaag

SEQ ID NO: 1169267 - RNA, 21 nt, Human
ugaucccgugaauuccuccuc

SEQ ID NO: 1169268 - RNA, 18 nt, Human
ugccugagguuccaccac

SEQ ID NO: 1169269 - RNA, 20 nt, Human
ugccuguugaaacuuuccuc

SEQ ID NO: 1169270 - RNA, 23 nt, Human
uggaacacucagcaagucugcuc

SEQ ID NO: 1169271 - RNA, 21 nt, Human
uggacacaagcaaugccacag

SEQ ID NO: 1169272 - RNA, 21 nt, Human
uggagagccgaugagagggca

SEQ ID NO: 1169273 - RNA, 24 nt, Human
uggagucugauguucgagggcagg

SEQ ID NO: 1169274 - RNA, 23 nt, Human
uggccaauuggacuggcuggugu

SEQ ID NO: 1169275 - RNA, 21 nt, Human
uggcucugggcugcauccccu

SEQ ID NO: 1169276 - RNA, 21 nt, Human
ugggagaaagaugaaggcugg

SEQ ID NO: 1169277 - RNA, 24 nt, Human
ugggagucggauguuugccugguu

SEQ ID NO: 1169278 - RNA, 20 nt, Human
uggggaggaggaggcaccgg

SEQ ID NO: 1169279 - RNA, 21 nt, Human
uggggaggaggaggcaccggg

SEQ ID NO: 1169280 - RNA, 18 nt, Human
uguauauaacacauauaa

SEQ ID NO: 1169281 - RNA, 18 nt, Human
ugucacucagcaccgccc

SEQ ID NO: 1169282 - RNA, 24 nt, Human
ugugaauaccuacccaaaauugcu

SEQ ID NO: 1169283 - RNA, 18 nt, Human
ugugagcagcugcugcuu

SEQ ID NO: 1169284 - RNA, 21 nt, Human
ugugccucucccaguccacug

SEQ ID NO: 1169285 - RNA, 21 nt, Human
uguguaccugcucgguaugug

SEQ ID NO: 1169286 - RNA, 23 nt, Human
uguugaaacuuuccucagccuga

SEQ ID NO: 1169287 - RNA, 18 nt, Human
uuccagacagcacuccau

SEQ ID NO: 1169288 - RNA, 18 nt, Human
uuccauuggguugaaagg

SEQ ID NO: 1169289 - RNA, 20 nt, Human
uucccuggggccaggccuca

SEQ ID NO: 1169290 - RNA, 20 nt, Human
uucuucuacacacuucucag

SEQ ID NO: 1169291 - RNA, 21 nt, Human
uuuuuagugcaugugaauacc

SEQ ID NO: 1169292 - RNA, 22 nt, Human
aaagaaaccugucugggggcaa

SEQ ID NO: 1169293 - RNA, 21 nt, Human
aacacagcaucaccuguaccc

SEQ ID NO: 1169294 - RNA, 19 nt, Human
aaccugacaaaagaaaccu

SEQ ID NO: 1169295 - RNA, 22 nt, Human
aaguggaggggcuauuucccua

SEQ ID NO: 1169296 - RNA, 20 nt, Human
aauucaagcacugaagccga

SEQ ID NO: 1169297 - RNA, 20 nt, Human
acaauaucuuauuaaaaggc

SEQ ID NO: 1169298 - RNA, 21 nt, Human
accacagauacccggcuuucc

SEQ ID NO: 1169299 - RNA, 23 nt, Human
acccuaaagacguuuuggugaaa

SEQ ID NO: 1169300 - RNA, 24 nt, Human
agaaagccccccucccuguuccuc

SEQ ID NO: 1169301 - RNA, 18 nt, Human
aggaaugcguguuucuug

SEQ ID NO: 1169302 - RNA, 23 nt, Human
aguggaggggcuauuucccuaaa

SEQ ID NO: 1169303 - RNA, 23 nt, Human
caaaagaaaccugucugggggca

SEQ ID NO: 1169304 - RNA, 20 nt, Human
caauagagugggcugccaca

SEQ ID NO: 1169305 - RNA, 18 nt, Human
caccuguacccauaauca

SEQ ID NO: 1169306 - RNA, 18 nt, Human
cagcuuagggauguggcu

SEQ ID NO: 1169307 - RNA, 26 nt, Human
caggugauguucuuuccagaaagccc

SEQ ID NO: 1169308 - RNA, 19 nt, Human
cccauagcugaaguaaaau

SEQ ID NO: 1169309 - RNA, 27 nt, Human
ccccaaaagucagcgcucggccgcacu

SEQ ID NO: 1169310 - RNA, 21 nt, Human
ccuccggggugcagccacguc

SEQ ID NO: 1169311 - RNA, 23 nt, Human
ccuugagaaauggguuccagaga

SEQ ID NO: 1169312 - RNA, 22 nt, Human
cgcagagggacccagugagacg

SEQ ID NO: 1169313 - RNA, 18 nt, Human
cgggacagcgggcggggg

SEQ ID NO: 1169314 - RNA, 20 nt, Human
cucccaggagcgaagguggg

SEQ ID NO: 1169315 - RNA, 21 nt, Human
cucccuguuccucuggucuga

SEQ ID NO: 1169316 - RNA, 18 nt, Human
cugaagccgaggccggca

SEQ ID NO: 1169317 - RNA, 24 nt, Human
cuggggugcagcggggcucccagg

SEQ ID NO: 1169318 - RNA, 24 nt, Human
gaagccgaggccggcagagaggga

SEQ ID NO: 1169319 - RNA, 18 nt, Human
gagcucgaagaugagcag

SEQ ID NO: 1169320 - RNA, 18 nt, Human
gaggaaugcguguuucuu

SEQ ID NO: 1169321 - RNA, 19 nt, Human
gcauuaggaaaaagacuga

SEQ ID NO: 1169322 - RNA, 21 nt, Human
gccgcagagggacccagugag

SEQ ID NO: 1169323 - RNA, 23 nt, Human
gggcucccaggagcgaagguggg

SEQ ID NO: 1169324 - RNA, 23 nt, Human
uaggaaaaagacugaugggccug

SEQ ID NO: 1169325 - RNA, 22 nt, Human
uaggugagcaauaaagcagccc

SEQ ID NO: 1169326 - RNA, 20 nt, Human
uagugagacaucaaacuucc

SEQ ID NO: 1169327 - RNA, 22 nt, Human
uccaaguggaggggcuauuucc

SEQ ID NO: 1169328 - RNA, 23 nt, Human
uccagagagcucgaagaugagca

SEQ ID NO: 1169329 - RNA, 20 nt, Human
uccccacuuguagguuccua

SEQ ID NO: 1169330 - RNA, 22 nt, Human
uccccacuuguagguuccuaau

SEQ ID NO: 1169331 - RNA, 24 nt, Human
ucccuguuccucuggucugagauc

SEQ ID NO: 1169332 - RNA, 23 nt, Human
ucccuugagaaauggguuccaga

SEQ ID NO: 1169333 - RNA, 20 nt, Human
ucggccggcgccccccuccg

SEQ ID NO: 1169334 - RNA, 19 nt, Human
ucuugggguaagagaaccc

SEQ ID NO: 1169335 - RNA, 20 nt, Human
ugaaccgggacagcgggcgg

SEQ ID NO: 1169336 - RNA, 24 nt, Human
ugaaccgggacagcgggcggggga

SEQ ID NO: 1169337 - RNA, 20 nt, Human
ugacaaaagaaaccugucuu

SEQ ID NO: 1169338 - RNA, 22 nt, Human
ugaggugggggaaugugguucu

SEQ ID NO: 1169339 - RNA, 21 nt, Human
ugccucaaguauuuucugucu

SEQ ID NO: 1169340 - RNA, 22 nt, Human
ugccucaaguauuuucugucua

SEQ ID NO: 1169341 - RNA, 25 nt, Human
uggaacuccuggggugcagcggggc

SEQ ID NO: 1169342 - RNA, 22 nt, Human
uuagggauguggcugaaauuca

SEQ ID NO: 1169343 - RNA, 24 nt, Human
uuauuaaaaggcccguacugaaag

SEQ ID NO: 1169344 - RNA, 18 nt, Human
uucccuaaaaucucccca

SEQ ID NO: 1169345 - RNA, 21 nt, Human
uucuuuccagaaagccccccu

SEQ ID NO: 1169346 - RNA, 24 nt, Human
aaaauacacaagacaagaauccac

SEQ ID NO: 1169347 - RNA, 24 nt, Human
aaacaaaacaaaacaaaaaaccca

SEQ ID NO: 1169348 - RNA, 25 nt, Human
aaacaaaacaaaacaaaaaacccaa

SEQ ID NO: 1169349 - RNA, 26 nt, Human
aaacaaaacaaaacaaaaaacccaaa

SEQ ID NO: 1169350 - RNA, 22 nt, Human
aaacaaaacaaaacaaaacaaa

SEQ ID NO: 1169351 - RNA, 21 nt, Human
aaacaggaaugaaaacaggga

SEQ ID NO: 1169352 - RNA, 19 nt, Human
aaacaggaaugaaaacaua

SEQ ID NO: 1169353 - RNA, 28 nt, Human
aaacaggaaugaaaacauacauauacug

SEQ ID NO: 1169354 - RNA, 19 nt, Human
aacauggugaaacccuauc

SEQ ID NO: 1169355 - RNA, 20 nt, Human
aacauggugaaacccuaucu

SEQ ID NO: 1169356 - RNA, 21 nt, Human
aacauggugaaacccuaucuc

SEQ ID NO: 1169357 - RNA, 22 nt, Human
aacccuaucucuacuaaaauaa

SEQ ID NO: 1169358 - RNA, 20 nt, Human
aagcaaauauuaugcuggaa

SEQ ID NO: 1169359 - RNA, 20 nt, Human
aauauaaucaaguuggccag

SEQ ID NO: 1169360 - RNA, 18 nt, Human
aaucgcuugaaccuggga

SEQ ID NO: 1169361 - RNA, 24 nt, Human
aaucgcuugaaccugggaggcaga

SEQ ID NO: 1169362 - RNA, 25 nt, Human
acaaaacaaaacaaaaaacccaaaa

SEQ ID NO: 1169363 - RNA, 22 nt, Human
acaaaacaaaacaaaacaaaaa

SEQ ID NO: 1169364 - RNA, 25 nt, Human
acaaaacaaaacaaaacaaaaaacc

SEQ ID NO: 1169365 - RNA, 20 nt, Human
acaagacaagaauccacaau

SEQ ID NO: 1169366 - RNA, 20 nt, Human
acacaagacaagaauccaca

SEQ ID NO: 1169367 - RNA, 21 nt, Human
acccuaucucuacuaaaauaa

SEQ ID NO: 1169368 - RNA, 23 nt, Human
agacaagaauccacaauaauagc

SEQ ID NO: 1169369 - RNA, 22 nt, Human
agccuggccaacauggugaaac

SEQ ID NO: 1169370 - RNA, 24 nt, Human
agccuggccaacauggugaaaccc

SEQ ID NO: 1169371 - RNA, 22 nt, Human
aggcagagggugcagugaacca

SEQ ID NO: 1169372 - RNA, 22 nt, Human
aggcaggagaaucgcuugaacc

SEQ ID NO: 1169373 - RNA, 24 nt, Human
aggcaggagaaucgcuugaaccug

SEQ ID NO: 1169374 - RNA, 22 nt, Human
aggcugaaaagaaaacaccugg

SEQ ID NO: 1169375 - RNA, 20 nt, Human
aggcugaggcaggagaaucg

SEQ ID NO: 1169376 - RNA, 24 nt, Human
aggcugaggcaggagaaucgcuug

SEQ ID NO: 1169377 - RNA, 24 nt, Human
aggugugguggcacgcaccuguag

SEQ ID NO: 1169378 - RNA, 18 nt, Human
aguaacaggcugaaaaga

SEQ ID NO: 1169379 - RNA, 19 nt, Human
auacaagacagcuuaacca

SEQ ID NO: 1169380 - RNA, 21 nt, Human
aucaaacauaauuuacuaaua

SEQ ID NO: 1169381 - RNA, 25 nt, Human
aucucuacuaaaauaacuaaaauaa

SEQ ID NO: 1169382 - RNA, 22 nt, Human
auggagggcaauuuuuuggcca

SEQ ID NO: 1169383 - RNA, 19 nt, Human
auuaugcuggaaaaugcuu

SEQ ID NO: 1169384 - RNA, 25 nt, Human
caaaacaaaacaaaacaaaaaaccc

SEQ ID NO: 1169385 - RNA, 24 nt, Human
caacauggugaaacccuaucucua

SEQ ID NO: 1169386 - RNA, 18 nt, Human
caagauccacaaauucuu

SEQ ID NO: 1169387 - RNA, 22 nt, Human
caagcaaauauuaugcuggaaa

SEQ ID NO: 1169388 - RNA, 25 nt, Human
caagcaaauauuaugcuggaaaaug

SEQ ID NO: 1169389 - RNA, 26 nt, Human
caaggaggacggaucaccugcaguca

SEQ ID NO: 1169390 - RNA, 20 nt, Human
caauaauagcaguuacauua

SEQ ID NO: 1169391 - RNA, 24 nt, Human
cacaccuauaaucccagcacuuug

SEQ ID NO: 1169392 - RNA, 27 nt, Human
cacaggacaguaacaggcugaaaagaa

SEQ ID NO: 1169393 - RNA, 23 nt, Human
caccuauaaucccagcacuuugg

SEQ ID NO: 1169394 - RNA, 24 nt, Human
caccuauaaucccagcacuuuggg

SEQ ID NO: 1169395 - RNA, 22 nt, Human
caccugcagucaggaguuccga

SEQ ID NO: 1169396 - RNA, 20 nt, Human
caccuguaguaccagcuacu

SEQ ID NO: 1169397 - RNA, 24 nt, Human
caccuguaguaccagcuacuuggg

SEQ ID NO: 1169398 - RNA, 26 nt, Human
cacucguacaaaacaggaaugaaaac

SEQ ID NO: 1169399 - RNA, 20 nt, Human
cagcacuuugggagcccaag

SEQ ID NO: 1169400 - RNA, 21 nt, Human
cagcacuuugggagcccaagg

SEQ ID NO: 1169401 - RNA, 24 nt, Human
cagcuacuugggaggcugaggcag

SEQ ID NO: 1169402 - RNA, 20 nt, Human
caggacaguaacaggcugaa

SEQ ID NO: 1169403 - RNA, 21 nt, Human
cccagcacuuugggagcccaa

SEQ ID NO: 1169404 - RNA, 23 nt, Human
ccugcagucaggaguuccgagac

SEQ ID NO: 1169405 - RNA, 22 nt, Human
ccuggccaacauggugaaaccc

SEQ ID NO: 1169406 - RNA, 23 nt, Human
ccuggccaacauggugaaacccu

SEQ ID NO: 1169407 - RNA, 24 nt, Human
ccuggccaacauggugaaacccua

SEQ ID NO: 1169408 - RNA, 21 nt, Human
ccuguaguaccagcuacuugg

SEQ ID NO: 1169409 - RNA, 24 nt, Human
cgagaccagccuggccaacauggu

SEQ ID NO: 1169410 - RNA, 24 nt, Human
cgcaccuguaguaccagcuacuug

SEQ ID NO: 1169411 - RNA, 24 nt, Human
cggaucaccugcagucaggaguuc

SEQ ID NO: 1169412 - RNA, 19 nt, Human
cguauuaaugccaaagaua

SEQ ID NO: 1169413 - RNA, 18 nt, Human
cuaaaacccggaugcuac

SEQ ID NO: 1169414 - RNA, 22 nt, Human
cucacaccuauaaucccagcac

SEQ ID NO: 1169415 - RNA, 24 nt, Human
cucacaccuauaaucccagcacuu

SEQ ID NO: 1169416 - RNA, 18 nt, Human
gaaaagaaaacaccuggu

SEQ ID NO: 1169417 - RNA, 18 nt, Human
gaaagaaaauacacaaga

SEQ ID NO: 1169418 - RNA, 21 nt, Human
gaaccugggaggcagagggug

SEQ ID NO: 1169419 - RNA, 23 nt, Human
gagaaucgcuugaaccugggagg

SEQ ID NO: 1169420 - RNA, 22 nt, Human
gauaagauucauuuaaaauucu

SEQ ID NO: 1169421 - RNA, 25 nt, Human
gaucaccugcagucaggaguuccga

SEQ ID NO: 1169422 - RNA, 24 nt, Human
gccaacauggugaaacccuaucuc

SEQ ID NO: 1169423 - RNA, 19 nt, Human
ggaaagaaaauacacaaga

SEQ ID NO: 1169424 - RNA, 19 nt, Human
ggagcccaaggaggacgga

SEQ ID NO: 1169425 - RNA, 23 nt, Human
ggaucaccugcagucaggaguuc

SEQ ID NO: 1169426 - RNA, 21 nt, Human
ggcucacaccuauaaucccag

SEQ ID NO: 1169427 - RNA, 24 nt, Human
gggaaaaaagucaccuaaaaacau

SEQ ID NO: 1169428 - RNA, 21 nt, Human
gggaaagaaaauacacaagac

SEQ ID NO: 1169429 - RNA, 24 nt, Human
gggggcucacaccuauaaucccag

SEQ ID NO: 1169430 - RNA, 24 nt, Human
gguggcacgcaccuguaguaccag

SEQ ID NO: 1169431 - RNA, 24 nt, Human
guacaaaacaggaaugaaaacaua

SEQ ID NO: 1169432 - RNA, 25 nt, Human
uaaaaaacaaaacaaaacaaaacaa

SEQ ID NO: 1169433 - RNA, 26 nt, Human
uaaaaaacaaaacaaaacaaaacaaa

SEQ ID NO: 1169434 - RNA, 19 nt, Human
uaaaaauaaaacaaaaagg

SEQ ID NO: 1169435 - RNA, 22 nt, Human
uaaaacaaaaaggucuucuuuc

SEQ ID NO: 1169436 - RNA, 23 nt, Human
uaaaacccggaugcuacccaagc

SEQ ID NO: 1169437 - RNA, 25 nt, Human
uaaaauaacuaaaauaagccaggug

SEQ ID NO: 1169438 - RNA, 19 nt, Human
uaacaggcugaaaagaaaa

SEQ ID NO: 1169439 - RNA, 20 nt, Human
uaagagggggaaaaaaguug

SEQ ID NO: 1169440 - RNA, 21 nt, Human
uaagccaggugugguggcacg

SEQ ID NO: 1169441 - RNA, 20 nt, Human
uacaaaacaggaaugaaaac

SEQ ID NO: 1169442 - RNA, 22 nt, Human
uacacaaacgucacauuggcau

SEQ ID NO: 1169443 - RNA, 23 nt, Human
uacagaaaugacguaucuuggau

SEQ ID NO: 1169444 - RNA, 23 nt, Human
uacaucuggaauugagauggccc

SEQ ID NO: 1169445 - RNA, 20 nt, Human
uaccugccaguaaaauggag

SEQ ID NO: 1169446 - RNA, 23 nt, Human
uacuaauaaugaacaacugcaca

SEQ ID NO: 1169447 - RNA, 21 nt, Human
uagaaggcaacaaaugaccac

SEQ ID NO: 1169448 - RNA, 22 nt, Human
uagaaggcaacaaaugaccaca

SEQ ID NO: 1169449 - RNA, 22 nt, Human
uagcuucuacaauaguuauucc

SEQ ID NO: 1169450 - RNA, 23 nt, Human
uagcuucuacaauaguuauuccu

SEQ ID NO: 1169451 - RNA, 23 nt, Human
uauaaauaguaaaaauaaaacaa

SEQ ID NO: 1169452 - RNA, 22 nt, Human
uccacaauaauagcaguuacau

SEQ ID NO: 1169453 - RNA, 20 nt, Human
ucccuaugaaaauacuuauc

SEQ ID NO: 1169454 - RNA, 20 nt, Human
ucgcaaacgcaauacaaugu

SEQ ID NO: 1169455 - RNA, 18 nt, Human
ucgcuugaaccugggagg

SEQ ID NO: 1169456 - RNA, 23 nt, Human
ucuacaauaguuauuccuagacc

SEQ ID NO: 1169457 - RNA, 27 nt, Human
ucuacaauaguuauuccuagaccuuaa

SEQ ID NO: 1169458 - RNA, 21 nt, Human
ugaaaacaacacgauaaagua

SEQ ID NO: 1169459 - RNA, 19 nt, Human
ugaaaacauacauauacug

SEQ ID NO: 1169460 - RNA, 19 nt, Human
ugaagaagggcagcaauac

SEQ ID NO: 1169461 - RNA, 19 nt, Human
ugagauggcccaucuucau

SEQ ID NO: 1169462 - RNA, 20 nt, Human
ugaggcaggagaaucgcuug

SEQ ID NO: 1169463 - RNA, 24 nt, Human
ugaggcaggagaaucgcuugaacc

SEQ ID NO: 1169464 - RNA, 25 nt, Human
ugaggcaggagaaucgcuugaaccu

SEQ ID NO: 1169465 - RNA, 21 nt, Human
ugcacacuucauacuaugacc

SEQ ID NO: 1169466 - RNA, 22 nt, Human
ugcagucaggaguuccgagacc

SEQ ID NO: 1169467 - RNA, 20 nt, Human
ugccaaagauauugucaggg

SEQ ID NO: 1169468 - RNA, 22 nt, Human
ugcguugauagaaaauugacac

SEQ ID NO: 1169469 - RNA, 24 nt, Human
uggaaaaugcuuucccuaugaaaa

SEQ ID NO: 1169470 - RNA, 21 nt, Human
uggaauugagauggcccaucu

SEQ ID NO: 1169471 - RNA, 24 nt, Human
uggccaacauggugaaacccuauc

SEQ ID NO: 1169472 - RNA, 22 nt, Human
uggcuauuuuuaaaaauggcac

SEQ ID NO: 1169473 - RNA, 19 nt, Human
ugggaggcugaggcaggag

SEQ ID NO: 1169474 - RNA, 23 nt, Human
ugggaggcugaggcaggagaauc

SEQ ID NO: 1169475 - RNA, 19 nt, Human
uggucuggguacccuaagg

SEQ ID NO: 1169476 - RNA, 18 nt, Human
ugugguggcacgcaccug

SEQ ID NO: 1169477 - RNA, 20 nt, Human
uguuuguuuuguuuuaaaaa

SEQ ID NO: 1169478 - RNA, 21 nt, Human
uuaaaaaucaaacauaauuua

SEQ ID NO: 1169479 - RNA, 23 nt, Human
uuaaauacuaaaacccggaugcu

SEQ ID NO: 1169480 - RNA, 19 nt, Human
uuccgagaccagccuggcc

SEQ ID NO: 1169481 - RNA, 19 nt, Human
uugaaaaacuaggggagaa

SEQ ID NO: 1169482 - RNA, 27 nt, Human
uugaaauaaaaauuacuuuuuguuuac

SEQ ID NO: 1169483 - RNA, 24 nt, Human
uugggaggcugaggcaggagaauc

SEQ ID NO: 1169484 - RNA, 27 nt, Human
uuuuaaaaagucaucaauucaaccuaa

SEQ ID NO: 1169485 - RNA, 26 nt, Human
aagacaguuaugacauggacacaugc

SEQ ID NO: 1169486 - RNA, 25 nt, Human
aagcucccagccugggugccaaucu

SEQ ID NO: 1169487 - RNA, 21 nt, Human
agagcugugcccaguuuuauc

SEQ ID NO: 1169488 - RNA, 22 nt, Human
cacaugcaugagcuauuauaca

SEQ ID NO: 1169489 - RNA, 21 nt, Human
cacuggguuccuggcaagcuc

SEQ ID NO: 1169490 - RNA, 20 nt, Human
cagcaaaucucaauuuguca

SEQ ID NO: 1169491 - RNA, 25 nt, Human
ccacuggguuccuggcaagcuccca

SEQ ID NO: 1169492 - RNA, 19 nt, Human
cccggagugcagaagcgua

SEQ ID NO: 1169493 - RNA, 26 nt, Human
cucacaagaaugaagcaagggacaaa

SEQ ID NO: 1169494 - RNA, 22 nt, Human
cucccuggccacuggguuccug

SEQ ID NO: 1169495 - RNA, 23 nt, Human
cucccuggccacuggguuccugg

SEQ ID NO: 1169496 - RNA, 22 nt, Human
gauucaugacagauucuucccc

SEQ ID NO: 1169497 - RNA, 18 nt, Human
ggguuccuggcaagcucc

SEQ ID NO: 1169498 - RNA, 21 nt, Human
uaugacauggacacaugcaug

SEQ ID NO: 1169499 - RNA, 21 nt, Human
uccuggcaagcucccagccug

SEQ ID NO: 1169500 - RNA, 26 nt, Human
ucucacaagaaugaagcaagggacaa

SEQ ID NO: 1169501 - RNA, 26 nt, Human
uggacacaugcaugagcuauuauaca

SEQ ID NO: 1169502 - RNA, 25 nt, Human
uggguuccuggcaagcucccagccu

SEQ ID NO: 1169503 - RNA, 21 nt, Human
agccuuguucccccucuccac

SEQ ID NO: 1169504 - RNA, 18 nt, Human
aggauccccuucaacucc

SEQ ID NO: 1169505 - RNA, 20 nt, Human
caacuccugaggcugcuccu

SEQ ID NO: 1169506 - RNA, 25 nt, Human
cccacaguaauugcgcauuucucuc

SEQ ID NO: 1169507 - RNA, 23 nt, Human
cuccugaggcugcuccucugggc

SEQ ID NO: 1169508 - RNA, 26 nt, Human
cuucccaagucucugccucuguuucc

SEQ ID NO: 1169509 - RNA, 21 nt, Human
gccugccgacagccccuuugc

SEQ ID NO: 1169510 - RNA, 19 nt, Human
uccccuucaacuccugagg

SEQ ID NO: 1169511 - RNA, 24 nt, Human
ucugccucuguuuccccaugaccc

SEQ ID NO: 1169512 - RNA, 22 nt, Human
uuuuuaguuuuaacaaaugauu

SEQ ID NO: 1169513 - RNA, 23 nt, Human
aaacaaagaccaacaaccaacag

SEQ ID NO: 1169514 - RNA, 27 nt, Human
aaacaaagaccaacaaccaacagaaaa

SEQ ID NO: 1169515 - RNA, 21 nt, Human
aaacaaucccaucaaauacaa

SEQ ID NO: 1169516 - RNA, 18 nt, Human
aaacaguaacaaaaucag

SEQ ID NO: 1169517 - RNA, 24 nt, Human
aaaguccugggauuacagguguga

SEQ ID NO: 1169518 - RNA, 28 nt, Human
aacaaagaccaacaaccaacagaaaaag

SEQ ID NO: 1169519 - RNA, 21 nt, Human
aacagaaaaauaggcaaagaa

SEQ ID NO: 1169520 - RNA, 19 nt, Human
aaccaacagaaaaauaggc

SEQ ID NO: 1169521 - RNA, 23 nt, Human
aauacacuacauucuuacaaaau

SEQ ID NO: 1169522 - RNA, 25 nt, Human
aaugacaaugacaaacuggaaagaa

SEQ ID NO: 1169523 - RNA, 28 nt, Human
acaaaacaaagaccaacaaccaacagaa

SEQ ID NO: 1169524 - RNA, 18 nt, Human
acaggguuucaccauguu

SEQ ID NO: 1169525 - RNA, 23 nt, Human
acaggguuucaccauguuggcca

SEQ ID NO: 1169526 - RNA, 24 nt, Human
acaggguuucaccauguuggccag

SEQ ID NO: 1169527 - RNA, 21 nt, Human
acaguggcgcaaucucagcuc

SEQ ID NO: 1169528 - RNA, 22 nt, Human
acauccauggaauucacucaga

SEQ ID NO: 1169529 - RNA, 24 nt, Human
acauccauggaauucacucagaau

SEQ ID NO: 1169530 - RNA, 22 nt, Human
accaucaaaugcucacauacaa

SEQ ID NO: 1169531 - RNA, 24 nt, Human
accuguaauacaaaacaaagacca

SEQ ID NO: 1169532 - RNA, 24 nt, Human
acucuguugccaggcuggaguaca

SEQ ID NO: 1169533 - RNA, 20 nt, Human
agaaaaauaggcaaagaaua

SEQ ID NO: 1169534 - RNA, 25 nt, Human
agaaauuguacaaaggccuaaauaa

SEQ ID NO: 1169535 - RNA, 23 nt, Human
agagggaaaggacagagacuuca

SEQ ID NO: 1169536 - RNA, 24 nt, Human
aggaaaaagaagcaacaugcagaa

SEQ ID NO: 1169537 - RNA, 21 nt, Human
aggcaaagaauagaaauagga

SEQ ID NO: 1169538 - RNA, 22 nt, Human
aggcauucacauuacauccaug

SEQ ID NO: 1169539 - RNA, 23 nt, Human
aggugugagccacugugcccggc

SEQ ID NO: 1169540 - RNA, 21 nt, Human
aguacaguggcgcaaucucag

SEQ ID NO: 1169541 - RNA, 20 nt, Human
aguggcgcaaucucagcuca

SEQ ID NO: 1169542 - RNA, 21 nt, Human
auaucaaaaaauaccagaaca

SEQ ID NO: 1169543 - RNA, 20 nt, Human
aucagguacauccaggguuu

SEQ ID NO: 1169544 - RNA, 24 nt, Human
auuuuuguauuuuuaguagagaca

SEQ ID NO: 1169545 - RNA, 21 nt, Human
caaaacaaagaccaacaacca

SEQ ID NO: 1169546 - RNA, 22 nt, Human
caaaggccuaaauaauaaccau

SEQ ID NO: 1169547 - RNA, 24 nt, Human
caaaguccugggauuacaggugug

SEQ ID NO: 1169548 - RNA, 20 nt, Human
caagcgauccuccugccuca

SEQ ID NO: 1169549 - RNA, 22 nt, Human
caagcgauccuccugccucagc

SEQ ID NO: 1169550 - RNA, 23 nt, Human
caaguaacucaucgagcaccauc

SEQ ID NO: 1169551 - RNA, 22 nt, Human
caccaccgcgcccagcuaauuu

SEQ ID NO: 1169552 - RNA, 21 nt, Human
caccaucaaaugcucacauac

SEQ ID NO: 1169553 - RNA, 18 nt, Human
caccauguuggccaggau

SEQ ID NO: 1169554 - RNA, 22 nt, Human
caccauguuggccaggaugguc

SEQ ID NO: 1169555 - RNA, 24 nt, Human
caccauguuggccaggauggucuc

SEQ ID NO: 1169556 - RNA, 24 nt, Human
caccgcgcccagcuaauuuuugua

SEQ ID NO: 1169557 - RNA, 18 nt, Human
caccuguaauacaaaaca

SEQ ID NO: 1169558 - RNA, 18 nt, Human
cacucuguugccaggcug

SEQ ID NO: 1169559 - RNA, 21 nt, Human
cacugcaacugcugccucccg

SEQ ID NO: 1169560 - RNA, 23 nt, Human
cacugcaacugcugccucccggg

SEQ ID NO: 1169561 - RNA, 23 nt, Human
caggaucucuuacaaaaagcuaa

SEQ ID NO: 1169562 - RNA, 24 nt, Human
caggguuucaccauguuggccagg

SEQ ID NO: 1169563 - RNA, 27 nt, Human
cauccaaacaaucccaucaaauacaag

SEQ ID NO: 1169564 - RNA, 22 nt, Human
caugcagaacaaugugugcagu

SEQ ID NO: 1169565 - RNA, 21 nt, Human
ccaaaguccugggauuacagg

SEQ ID NO: 1169566 - RNA, 24 nt, Human
ccaaaguccugggauuacaggugu

SEQ ID NO: 1169567 - RNA, 24 nt, Human
ccacuaaauuguuagaaauuguac

SEQ ID NO: 1169568 - RNA, 20 nt, Human
cccggguucaagcgauccuc

SEQ ID NO: 1169569 - RNA, 23 nt, Human
cccggguucaagcgauccuccug

SEQ ID NO: 1169570 - RNA, 24 nt, Human
ccucccggguucaagcgauccucc

SEQ ID NO: 1169571 - RNA, 23 nt, Human
ccuccugccucagccucugagua

SEQ ID NO: 1169572 - RNA, 23 nt, Human
ccugccucagccucugaguagcu

SEQ ID NO: 1169573 - RNA, 21 nt, Human
ccuugugaucugcuuuccuca

SEQ ID NO: 1169574 - RNA, 22 nt, Human
ccuugugaucugcuuuccucag

SEQ ID NO: 1169575 - RNA, 18 nt, Human
cucacucuguugccaggc

SEQ ID NO: 1169576 - RNA, 23 nt, Human
cucacucuguugccaggcuggag

SEQ ID NO: 1169577 - RNA, 23 nt, Human
cucacugcaacugcugccucccg

SEQ ID NO: 1169578 - RNA, 24 nt, Human
cucacugcaacugcugccucccgg

SEQ ID NO: 1169579 - RNA, 21 nt, Human
cucagccucccaaaguccugg

SEQ ID NO: 1169580 - RNA, 23 nt, Human
cuccaaauacucccauuaaauac

SEQ ID NO: 1169581 - RNA, 23 nt, Human
cugcaacugcugccucccggguu

SEQ ID NO: 1169582 - RNA, 21 nt, Human
cuucuuggagggggaacugga

SEQ ID NO: 1169583 - RNA, 20 nt, Human
gaaaaaaaaaaggaaaaaga

SEQ ID NO: 1169584 - RNA, 23 nt, Human
gaauagaaauaggaaaggccaug

SEQ ID NO: 1169585 - RNA, 24 nt, Human
gaccuugugaucugcuuuccucag

SEQ ID NO: 1169586 - RNA, 23 nt, Human
gauggcagggaagagggaaagga

SEQ ID NO: 1169587 - RNA, 18 nt, Human
gauuacaggugugagcca

SEQ ID NO: 1169588 - RNA, 21 nt, Human
gauuacaggugugagccacug

SEQ ID NO: 1169589 - RNA, 24 nt, Human
gauuacaggugugagccacugugc

SEQ ID NO: 1169590 - RNA, 22 nt, Human
gcccagcuaauuuuuguauuuu

SEQ ID NO: 1169591 - RNA, 19 nt, Human
gcuggaguacaguggcgca

SEQ ID NO: 1169592 - RNA, 19 nt, Human
gggaacuggauggcaggga

SEQ ID NO: 1169593 - RNA, 22 nt, Human
ggguuucaccauguuggccagg

SEQ ID NO: 1169594 - RNA, 24 nt, Human
gguuucaccauguuggccaggaug

SEQ ID NO: 1169595 - RNA, 24 nt, Human
gucucacucuguugccaggcugga

SEQ ID NO: 1169596 - RNA, 24 nt, Human
gugaucugcuuuccucagccuccc

SEQ ID NO: 1169597 - RNA, 20 nt, Human
uaaaacaguaacaaaaucag

SEQ ID NO: 1169598 - RNA, 23 nt, Human
uaaagcagauuccaguggcuguu

SEQ ID NO: 1169599 - RNA, 22 nt, Human
uaaauacauccaaacaauccca

SEQ ID NO: 1169600 - RNA, 23 nt, Human
uaagaagacaugcauugauggug

SEQ ID NO: 1169601 - RNA, 24 nt, Human
uaauuuuuguauuuuuaguagaga

SEQ ID NO: 1169602 - RNA, 19 nt, Human
uacaaaacaaagaccaaca

SEQ ID NO: 1169603 - RNA, 21 nt, Human
uacaaaacaaagaccaacaac

SEQ ID NO: 1169604 - RNA, 23 nt, Human
uacaggugugagccacugugccc

SEQ ID NO: 1169605 - RNA, 23 nt, Human
uacaggugugagccacugugccc

SEQ ID NO: 1169606 - RNA, 19 nt, Human
uacauccaaacaaucccau

SEQ ID NO: 1169607 - RNA, 22 nt, Human
uacauccaaacaaucccaucaa

SEQ ID NO: 1169608 - RNA, 18 nt, Human
uaccagaacaaagucaaa

SEQ ID NO: 1169609 - RNA, 22 nt, Human
uagagacaggguuucaccaugu

SEQ ID NO: 1169610 - RNA, 24 nt, Human
uaguagagacaggguuucaccaug

SEQ ID NO: 1169611 - RNA, 26 nt, Human
uaguagagacaggguuucaccauguu

SEQ ID NO: 1169612 - RNA, 22 nt, Human
uagucuugacucaguaauuuca

SEQ ID NO: 1169613 - RNA, 19 nt, Human
ucaaaugcucacauacaac

SEQ ID NO: 1169614 - RNA, 19 nt, Human
ucaaucucuugaccuugug

SEQ ID NO: 1169615 - RNA, 20 nt, Human
ucaaucucuugaccuuguga

SEQ ID NO: 1169616 - RNA, 23 nt, Human
ucacauuacauccauggaauuca

SEQ ID NO: 1169617 - RNA, 24 nt, Human
ucaccauguuggccaggauggucu

SEQ ID NO: 1169618 - RNA, 24 nt, Human
ucacugcaacugcugccucccggg

SEQ ID NO: 1169619 - RNA, 18 nt, Human
ucagccucccaaaguccu

SEQ ID NO: 1169620 - RNA, 23 nt, Human
ucccaaaguccugggauuacagg

SEQ ID NO: 1169621 - RNA, 21 nt, Human
ucccggguucaagcgauccuc

SEQ ID NO: 1169622 - RNA, 24 nt, Human
ucccggguucaagcgauccuccug

SEQ ID NO: 1169623 - RNA, 27 nt, Human
ucuaaagcacaccuguaauacaaaaca

SEQ ID NO: 1169624 - RNA, 21 nt, Human
ucucacucuguugccaggcug

SEQ ID NO: 1169625 - RNA, 23 nt, Human
ucucacucuguugccaggcugga

SEQ ID NO: 1169626 - RNA, 23 nt, Human
ucugaguagcugagacuauaggu

SEQ ID NO: 1169627 - RNA, 24 nt, Human
ucugaguagcugagacuauaggug

SEQ ID NO: 1169628 - RNA, 18 nt, Human
ucuguugccaggcuggag

SEQ ID NO: 1169629 - RNA, 19 nt, Human
ugaaaaaaaaaaggaaaaa

SEQ ID NO: 1169630 - RNA, 21 nt, Human
ugaaaaaaaaaaggaaaaaga

SEQ ID NO: 1169631 - RNA, 25 nt, Human
ugacaaugacaaacuggaaagaaga

SEQ ID NO: 1169632 - RNA, 21 nt, Human
ugagacuauaggugugcacca

SEQ ID NO: 1169633 - RNA, 24 nt, Human
ugagacuauaggugugcaccaccg

SEQ ID NO: 1169634 - RNA, 26 nt, Human
ugauacauauuauuacaauauuuuau

SEQ ID NO: 1169635 - RNA, 22 nt, Human
ugcaacugcugccucccggguu

SEQ ID NO: 1169636 - RNA, 20 nt, Human
ugccaggcuggaguacagug

SEQ ID NO: 1169637 - RNA, 23 nt, Human
ugccaggcuggaguacaguggcg

SEQ ID NO: 1169638 - RNA, 20 nt, Human
ugccucagccucugaguagc

SEQ ID NO: 1169639 - RNA, 23 nt, Human
ugccucagccucugaguagcuga

SEQ ID NO: 1169640 - RNA, 24 nt, Human
ugccucccggguucaagcgauccu

SEQ ID NO: 1169641 - RNA, 19 nt, Human
ugcuucaauucuuuugaua

SEQ ID NO: 1169642 - RNA, 18 nt, Human
uggaaagaagauauuugc

SEQ ID NO: 1169643 - RNA, 19 nt, Human
uggaguacaguggcgcaau

SEQ ID NO: 1169644 - RNA, 18 nt, Human
uggcagggaagagggaaa

SEQ ID NO: 1169645 - RNA, 24 nt, Human
uggccaggauggucucaaucucuu

SEQ ID NO: 1169646 - RNA, 24 nt, Human
uggcgcaaucucagcucacugcaa

SEQ ID NO: 1169647 - RNA, 18 nt, Human
ugggauuacaggugugag

SEQ ID NO: 1169648 - RNA, 21 nt, Human
ugggauuacaggugugagcca

SEQ ID NO: 1169649 - RNA, 22 nt, Human
ugggauuacaggugugagccac

SEQ ID NO: 1169650 - RNA, 22 nt, Human
ugggauuacaggugugagccac

SEQ ID NO: 1169651 - RNA, 22 nt, Human
ugggauuacaggugugagccac

SEQ ID NO: 1169652 - RNA, 24 nt, Human
ugggauuacaggugugagccacug

SEQ ID NO: 1169653 - RNA, 24 nt, Human
uguaauacaaaacaaagaccaaca

SEQ ID NO: 1169654 - RNA, 20 nt, Human
ugugcaccaccgcgcccagc

SEQ ID NO: 1169655 - RNA, 20 nt, Human
ugugugcaguauguuaccgu

SEQ ID NO: 1169656 - RNA, 22 nt, Human
uuacaaaaagcuaauaucuaaa

SEQ ID NO: 1169657 - RNA, 22 nt, Human
uuacaaaauaaugaaaaauugg

SEQ ID NO: 1169658 - RNA, 24 nt, Human
uuaguagagacaggguuucaccau

SEQ ID NO: 1169659 - RNA, 21 nt, Human
uucaagcgauccuccugccuc

SEQ ID NO: 1169660 - RNA, 24 nt, Human
uucaagcgauccuccugccucagc

SEQ ID NO: 1169661 - RNA, 24 nt, Human
uuccucagccucccaaaguccugg

SEQ ID NO: 1169662 - RNA, 20 nt, Human
uuguguagggggaaaggaau

SEQ ID NO: 1169663 - RNA, 20 nt, Human
uuuauaaucauuggcauuuu

SEQ ID NO: 1169664 - RNA, 19 nt, Human
uuucaccauguuggccagg

SEQ ID NO: 1169665 - RNA, 20 nt, Human
uuucaccauguuggccagga

SEQ ID NO: 1169666 - RNA, 23 nt, Human
uuuuacccuguauauauauuacc

SEQ ID NO: 1169667 - RNA, 24 nt, Human
uuuuuaguagagacaggguuucac

SEQ ID NO: 1169668 - RNA, 20 nt, Human
uuuuuguauuuuuaguagag

SEQ ID NO: 1169669 - RNA, 20 nt, Human
aaaaagaagaugacugaaaa

SEQ ID NO: 1169670 - RNA, 19 nt, Human
aagcaguaaacaucccaga

SEQ ID NO: 1169671 - RNA, 23 nt, Human
acuaaggucuuccuguuucuggg

SEQ ID NO: 1169672 - RNA, 22 nt, Human
cccagagauaguaacuuucuuc

SEQ ID NO: 1169673 - RNA, 21 nt, Human
uaaaaggagacauuagaagca

SEQ ID NO: 1169674 - RNA, 24 nt, Human
uaaaaggagacauuagaagcagua

SEQ ID NO: 1169675 - RNA, 23 nt, Human
uaaggucuuccuguuucuggggc

SEQ ID NO: 1169676 - RNA, 24 nt, Human
uaguaacuuucuucuucagaacuu

SEQ ID NO: 1169677 - RNA, 18 nt, Human
ugaaaaacaaucucugug

SEQ ID NO: 1169678 - RNA, 24 nt, Human
ugaaaaagaagaugacugaaaagg

SEQ ID NO: 1169679 - RNA, 23 nt, Human
uggcugaugaaaaagaagaugac

SEQ ID NO: 1169680 - RNA, 25 nt, Human
uucuuugcuuuauuauuuuucuggu

SEQ ID NO: 1169681 - RNA, 18 nt, Human
uugcauccuaacuaaggc

SEQ ID NO: 1169682 - RNA, 18 nt, Human
uuucugguacauucgucu

SEQ ID NO: 1169683 - RNA, 21 nt, Human
uuugcuuuauuauuuuucugg

SEQ ID NO: 1169684 - RNA, 18 nt, Human
aaaugacaucugagggca

SEQ ID NO: 1169685 - RNA, 19 nt, Human
aaccccauuguucucccac

SEQ ID NO: 1169686 - RNA, 25 nt, Human
acaaaaacucaaaagaccacagaca

SEQ ID NO: 1169687 - RNA, 22 nt, Human
accccauuguucucccacucaa

SEQ ID NO: 1169688 - RNA, 21 nt, Human
acucuagaaaccccauuguuc

SEQ ID NO: 1169689 - RNA, 25 nt, Human
auuacaauacaauuuauucuugauu

SEQ ID NO: 1169690 - RNA, 20 nt, Human
auucauccuuuuuuuuuuga

SEQ ID NO: 1169691 - RNA, 23 nt, Human
caaaagaccacagacaacaauca

SEQ ID NO: 1169692 - RNA, 21 nt, Human
cacaaaaacucaaaagaccac

SEQ ID NO: 1169693 - RNA, 22 nt, Human
cacugcacguauccacucaaaa

SEQ ID NO: 1169694 - RNA, 25 nt, Human
ccacaaaaacucaaaagaccacaga

SEQ ID NO: 1169695 - RNA, 20 nt, Human
ccacagacaacaaucaccau

SEQ ID NO: 1169696 - RNA, 23 nt, Human
ccacagacaacaaucaccaucua

SEQ ID NO: 1169697 - RNA, 21 nt, Human
ccaucuaaaauauaaaauggg

SEQ ID NO: 1169698 - RNA, 18 nt, Human
cccauuguucucccacuc

SEQ ID NO: 1169699 - RNA, 22 nt, Human
cuuccauguaaaacaauuucac

SEQ ID NO: 1169700 - RNA, 22 nt, Human
gagccacaaaaacucaaaagac

SEQ ID NO: 1169701 - RNA, 21 nt, Human
uacaugguaauuuguccauua

SEQ ID NO: 1169702 - RNA, 22 nt, Human
uagaaaccccauuguucuccca

SEQ ID NO: 1169703 - RNA, 18 nt, Human
uauaaaauggggaaauga

SEQ ID NO: 1169704 - RNA, 23 nt, Human
uaucaagucacauauggccaaua

SEQ ID NO: 1169705 - RNA, 21 nt, Human
ucaagcaaugagccacaaaaa

SEQ ID NO: 1169706 - RNA, 23 nt, Human
ucaagcaaugagccacaaaaacu

SEQ ID NO: 1169707 - RNA, 19 nt, Human
ucacugcacguauccacuc

SEQ ID NO: 1169708 - RNA, 18 nt, Human
ucuagacauguaucacua

SEQ ID NO: 1169709 - RNA, 20 nt, Human
ucuccugcagauauagaaau

SEQ ID NO: 1169710 - RNA, 22 nt, Human
ugagaaauucauccuuuuuuuu

SEQ ID NO: 1169711 - RNA, 18 nt, Human
uggggaaaugacaucuga

SEQ ID NO: 1169712 - RNA, 20 nt, Human
uggggaaaugacaucugagg

SEQ ID NO: 1169713 - RNA, 19 nt, Human
uucuugauuccaaauucau

SEQ ID NO: 1169714 - RNA, 22 nt, Human
aaagugcugggauuacaggcau

SEQ ID NO: 1169715 - RNA, 23 nt, Human
aaagugcugggauuacaggcaug

SEQ ID NO: 1169716 - RNA, 24 nt, Human
aaagugcugggauuacaggcauga

SEQ ID NO: 1169717 - RNA, 25 nt, Human
aaccaaacugcaaagaaccaaacug

SEQ ID NO: 1169718 - RNA, 22 nt, Human
aaccucgugauccgaccaccuc

SEQ ID NO: 1169719 - RNA, 25 nt, Human
aagcaggaaaggaaaggaaccccag

SEQ ID NO: 1169720 - RNA, 19 nt, Human
aagugcugggauuacaggc

SEQ ID NO: 1169721 - RNA, 21 nt, Human
aagugcugggauuacaggcau

SEQ ID NO: 1169722 - RNA, 26 nt, Human
aagugcugggauuacaggcaugagcc

SEQ ID NO: 1169723 - RNA, 19 nt, Human
acaggcaccugccaccacg

SEQ ID NO: 1169724 - RNA, 20 nt, Human
acugcaagcucugccuccca

SEQ ID NO: 1169725 - RNA, 18 nt, Human
agccuccagaguagcugg

SEQ ID NO: 1169726 - RNA, 21 nt, Human
aggcaugagccaccgugcccg

SEQ ID NO: 1169727 - RNA, 23 nt, Human
aggcaugagccaccgugcccggc

SEQ ID NO: 1169728 - RNA, 20 nt, Human
aggugaaggcagauuuucaa

SEQ ID NO: 1169729 - RNA, 18 nt, Human
aguagcugggacuacagg

SEQ ID NO: 1169730 - RNA, 19 nt, Human
aguagcugggacuacaggc

SEQ ID NO: 1169731 - RNA, 18 nt, Human
agugcugggauuacaggc

SEQ ID NO: 1169732 - RNA, 19 nt, Human
agugcugggauuacaggca

SEQ ID NO: 1169733 - RNA, 20 nt, Human
agugugguggcgcgaucucg

SEQ ID NO: 1169734 - RNA, 24 nt, Human
agugugguggcgcgaucucggcuc

SEQ ID NO: 1169735 - RNA, 20 nt, Human
augggguuucacuguguuag

SEQ ID NO: 1169736 - RNA, 24 nt, Human
augggguuucacuguguuagccag

SEQ ID NO: 1169737 - RNA, 19 nt, Human
caaagaaccaaacugcaaa

SEQ ID NO: 1169738 - RNA, 23 nt, Human
caacugaacuucaggaauggcuc

SEQ ID NO: 1169739 - RNA, 18 nt, Human
cacuguguuagccaggau

SEQ ID NO: 1169740 - RNA, 19 nt, Human
cacuguguuagccaggaug

SEQ ID NO: 1169741 - RNA, 24 nt, Human
cacuguguuagccaggauggucuc

SEQ ID NO: 1169742 - RNA, 25 nt, Human
cagaaccaaacugcaaagaaccaaa

SEQ ID NO: 1169743 - RNA, 24 nt, Human
cagaguagcugggacuacaggcac

SEQ ID NO: 1169744 - RNA, 24 nt, Human
caggaaaggaaaggaaccccagac

SEQ ID NO: 1169745 - RNA, 21 nt, Human
caggcaccugccaccacgccc

SEQ ID NO: 1169746 - RNA, 24 nt, Human
ccagaguagcugggacuacaggca

SEQ ID NO: 1169747 - RNA, 20 nt, Human
ccaugcagagacaccccagu

SEQ ID NO: 1169748 - RNA, 20 nt, Human
cccagguucacaccauccuc

SEQ ID NO: 1169749 - RNA, 19 nt, Human
ccccaugcagagacacccc

SEQ ID NO: 1169750 - RNA, 23 nt, Human
ccgaaagugcugggauuacaggc

SEQ ID NO: 1169751 - RNA, 20 nt, Human
ccuauagagauuuauuaggg

SEQ ID NO: 1169752 - RNA, 24 nt, Human
ccuccugccucagccuccagagua

SEQ ID NO: 1169753 - RNA, 24 nt, Human
cgaaagugcugggauuacaggcau

SEQ ID NO: 1169754 - RNA, 24 nt, Human
cgcucaggcuggagugugguggcg

SEQ ID NO: 1169755 - RNA, 24 nt, Human
cgugauccgaccaccucggccucc

SEQ ID NO: 1169756 - RNA, 23 nt, Human
cucaaauaguuuaagccuauaga

SEQ ID NO: 1169757 - RNA, 24 nt, Human
cucagaaccaaacugcaaagaacc

SEQ ID NO: 1169758 - RNA, 24 nt, Human
cucagccuccagaguagcugggac

SEQ ID NO: 1169759 - RNA, 18 nt, Human
cuccuaaccucgugaucc

SEQ ID NO: 1169760 - RNA, 21 nt, Human
cucggccuccgaaagugcugg

SEQ ID NO: 1169761 - RNA, 24 nt, Human
cugcaagcucugccucccagguuc

SEQ ID NO: 1169762 - RNA, 23 nt, Human
cugccucagccuccagaguagcu

SEQ ID NO: 1169763 - RNA, 18 nt, Human
cugucgcucaggcuggag

SEQ ID NO: 1169764 - RNA, 19 nt, Human
gagacaccccagugagggc

SEQ ID NO: 1169765 - RNA, 18 nt, Human
gagaugggguuucacugu

SEQ ID NO: 1169766 - RNA, 25 nt, Human
gaguagcugggacuacaggcaccug

SEQ ID NO: 1169767 - RNA, 18 nt, Human
gauuacaggcaugagcca

SEQ ID NO: 1169768 - RNA, 21 nt, Human
gauuacaggcaugagccaccg

SEQ ID NO: 1169769 - RNA, 24 nt, Human
gauuacaggcaugagccaccgugc

SEQ ID NO: 1169770 - RNA, 20 nt, Human
gcucaggcuggaguguggug

SEQ ID NO: 1169771 - RNA, 19 nt, Human
ggaaaggaaaggaacccca

SEQ ID NO: 1169772 - RNA, 24 nt, Human
ggauuacaggcaugagccaccgug

SEQ ID NO: 1169773 - RNA, 21 nt, Human
gggguuaaagauaacuuaaaa

SEQ ID NO: 1169774 - RNA, 22 nt, Human
gggguuucacuguguuagccag

SEQ ID NO: 1169775 - RNA, 22 nt, Human
ggguuucacuguguuagccagg

SEQ ID NO: 1169776 - RNA, 24 nt, Human
gucuugcucugucgcucaggcugg

SEQ ID NO: 1169777 - RNA, 19 nt, Human
gugcugggauuacaggcau

SEQ ID NO: 1169778 - RNA, 23 nt, Human
uacaggcaccugccaccacgccc

SEQ ID NO: 1169779 - RNA, 23 nt, Human
uacaggcaugagccaccgugccc

SEQ ID NO: 1169780 - RNA, 25 nt, Human
uagacauaaaauugaaugugauauc

SEQ ID NO: 1169781 - RNA, 24 nt, Human
uauuagagaugggguuucacugug

SEQ ID NO: 1169782 - RNA, 21 nt, Human
ucacaccauccuccugccuca

SEQ ID NO: 1169783 - RNA, 18 nt, Human
ucacugcaagcucugccu

SEQ ID NO: 1169784 - RNA, 18 nt, Human
ucacugcaagcucugccu

SEQ ID NO: 1169785 - RNA, 19 nt, Human
ucacugcaagcucugccuc

SEQ ID NO: 1169786 - RNA, 24 nt, Human
ucacugcaagcucugccucccagg

SEQ ID NO: 1169787 - RNA, 24 nt, Human
ucacuguguuagccaggauggucu

SEQ ID NO: 1169788 - RNA, 24 nt, Human
uccagaguagcugggacuacaggc

SEQ ID NO: 1169789 - RNA, 19 nt, Human
ucccagguucacaccaucc

SEQ ID NO: 1169790 - RNA, 24 nt, Human
ucccagguucacaccauccuccug

SEQ ID NO: 1169791 - RNA, 24 nt, Human
uccgaaagugcugggauuacaggc

SEQ ID NO: 1169792 - RNA, 24 nt, Human
ucgcucaggcuggagugugguggc

SEQ ID NO: 1169793 - RNA, 24 nt, Human
ucugucgcucaggcuggagugugg

SEQ ID NO: 1169794 - RNA, 20 nt, Human
ucuugcucugucgcucaggc

SEQ ID NO: 1169795 - RNA, 23 nt, Human
ucuugcucugucgcucaggcugg

SEQ ID NO: 1169796 - RNA, 24 nt, Human
ucuugcucugucgcucaggcugga

SEQ ID NO: 1169797 - RNA, 22 nt, Human
ugagacggagucuugcucuguc

SEQ ID NO: 1169798 - RNA, 25 nt, Human
ugagggcccucauauugcccuugug

SEQ ID NO: 1169799 - RNA, 20 nt, Human
ugcaaagaaccaaacugcaa

SEQ ID NO: 1169800 - RNA, 24 nt, Human
ugccucagccuccagaguagcugg

SEQ ID NO: 1169801 - RNA, 24 nt, Human
ugccucccagguucacaccauccu

SEQ ID NO: 1169802 - RNA, 24 nt, Human
ugcucugucgcucaggcuggagug

SEQ ID NO: 1169803 - RNA, 22 nt, Human
uggaagcaggaaaggaaaggaa

SEQ ID NO: 1169804 - RNA, 24 nt, Human
uggagugugguggcgcgaucucgg

SEQ ID NO: 1169805 - RNA, 21 nt, Human
ugggacuacaggcaccugcca

SEQ ID NO: 1169806 - RNA, 22 nt, Human
ugggacuacaggcaccugccac

SEQ ID NO: 1169807 - RNA, 24 nt, Human
ugggacuacaggcaccugccacca

SEQ ID NO: 1169808 - RNA, 18 nt, Human
ugggauuacaggcaugag

SEQ ID NO: 1169809 - RNA, 21 nt, Human
ugggauuacaggcaugagcca

SEQ ID NO: 1169810 - RNA, 22 nt, Human
ugggauuacaggcaugagccac

SEQ ID NO: 1169811 - RNA, 23 nt, Human
ugggauuacaggcaugagccacc

SEQ ID NO: 1169812 - RNA, 23 nt, Human
ugggauuacaggcaugagccacc

SEQ ID NO: 1169813 - RNA, 24 nt, Human
ugggauuacaggcaugagccaccg

SEQ ID NO: 1169814 - RNA, 24 nt, Human
ugggguuucacuguguuagccagg

SEQ ID NO: 1169815 - RNA, 25 nt, Human
ugugguggcgcgaucucggcucaac

SEQ ID NO: 1169816 - RNA, 24 nt, Human
uuauuagagaugggguuucacugu

SEQ ID NO: 1169817 - RNA, 21 nt, Human
uucacuguguuagccaggaug

SEQ ID NO: 1169818 - RNA, 23 nt, Human
uuccccaugcagagacaccccag

SEQ ID NO: 1169819 - RNA, 24 nt, Human
uugcucugucgcucaggcuggagu

SEQ ID NO: 1169820 - RNA, 19 nt, Human
uuuaagaacauuauuuuua

SEQ ID NO: 1169821 - RNA, 19 nt, Human
uuucacuguguuagccagg

SEQ ID NO: 1169822 - RNA, 24 nt, Human
uuuuuauuagagaugggguuucac

SEQ ID NO: 1169823 - RNA, 24 nt, Human
uuuuuuguauuuuuauuagagaug

SEQ ID NO: 1169824 - RNA, 21 nt, Human
aaauuuaauuuccaccuccac

SEQ ID NO: 1169825 - RNA, 25 nt, Human
aacugccugagaaugccugaccugg

SEQ ID NO: 1169826 - RNA, 21 nt, Human
acagggcugggggucuuccuc

SEQ ID NO: 1169827 - RNA, 21 nt, Human
accaaguuucuggguuuuagu

SEQ ID NO: 1169828 - RNA, 23 nt, Human
auuaaugccaacaccaaguuucu

SEQ ID NO: 1169829 - RNA, 19 nt, Human
cccugaaaugccaugguug

SEQ ID NO: 1169830 - RNA, 19 nt, Human
ccuggagcugaugcccuga

SEQ ID NO: 1169831 - RNA, 20 nt, Human
cugaccuggagcugaugccc

SEQ ID NO: 1169832 - RNA, 21 nt, Human
cugaccuggagcugaugcccu

SEQ ID NO: 1169833 - RNA, 22 nt, Human
cugaccuggagcugaugcccug

SEQ ID NO: 1169834 - RNA, 22 nt, Human
cugggggucuuccucauggcuc

SEQ ID NO: 1169835 - RNA, 25 nt, Human
cuuccucauggcucccuaaauuuaa

SEQ ID NO: 1169836 - RNA, 24 nt, Human
gugaaaaaaaaaaaaaaaaagucu

SEQ ID NO: 1169837 - RNA, 18 nt, Human
uaauuuccaccuccaccc

SEQ ID NO: 1169838 - RNA, 27 nt, Human
ucacugugugaaaaaaaaaaaaaaaaa

SEQ ID NO: 1169839 - RNA, 19 nt, Human
uccaccuccacccuguaaa

SEQ ID NO: 1169840 - RNA, 18 nt, Human
ucuuccucauggcucccu

SEQ ID NO: 1169841 - RNA, 22 nt, Human
uggagcugaugcccugaaaugc

SEQ ID NO: 1169842 - RNA, 22 nt, Human
aaaggcaagcaguuguuggccc

SEQ ID NO: 1169843 - RNA, 20 nt, Human
aaagugcuaggauuauagca

SEQ ID NO: 1169844 - RNA, 22 nt, Human
aaagugcuaggauuauagcagg

SEQ ID NO: 1169845 - RNA, 23 nt, Human
aaagugcuaggauuauagcaggg

SEQ ID NO: 1169846 - RNA, 23 nt, Human
aaguuacccugugacucguuggu

SEQ ID NO: 1169847 - RNA, 23 nt, Human
aaugugaaagcuuaugggaaaaa

SEQ ID NO: 1169848 - RNA, 19 nt, Human
acaccacugcaccagcccg

SEQ ID NO: 1169849 - RNA, 19 nt, Human
acugagccaagaugacacc

SEQ ID NO: 1169850 - RNA, 24 nt, Human
agagauacuccugacuuagccucc

SEQ ID NO: 1169851 - RNA, 18 nt, Human
agcugcgaucagaaaacg

SEQ ID NO: 1169852 - RNA, 24 nt, Human
aggaagucgaggcugcacugagcc

SEQ ID NO: 1169853 - RNA, 20 nt, Human
aggcugaagcgggaggaucg

SEQ ID NO: 1169854 - RNA, 23 nt, Human
aggcugaagcgggaggaucgcug

SEQ ID NO: 1169855 - RNA, 19 nt, Human
aggggcgggagaccugaag

SEQ ID NO: 1169856 - RNA, 20 nt, Human
agucuugcaguucauuuuuc

SEQ ID NO: 1169857 - RNA, 24 nt, Human
auuuuucucuccugcccucuucca

SEQ ID NO: 1169858 - RNA, 21 nt, Human
caaagugcuaggauuauagca

SEQ ID NO: 1169859 - RNA, 21 nt, Human
caccagcccguuuccccaugc

SEQ ID NO: 1169860 - RNA, 22 nt, Human
cagaaucaacgagcguucccac

SEQ ID NO: 1169861 - RNA, 18 nt, Human
caggauccgauugggaga

SEQ ID NO: 1169862 - RNA, 23 nt, Human
caggaucucacuuugugcuuagg

SEQ ID NO: 1169863 - RNA, 18 nt, Human
ccaaagugcuaggauuau

SEQ ID NO: 1169864 - RNA, 18 nt, Human
cccacagaguuccguccu

SEQ ID NO: 1169865 - RNA, 21 nt, Human
ccccacucuugacugaaaagu

SEQ ID NO: 1169866 - RNA, 19 nt, Human
ccugcccucuuccaaaucc

SEQ ID NO: 1169867 - RNA, 23 nt, Human
ccuguggucucggcuacucuaga

SEQ ID NO: 1169868 - RNA, 19 nt, Human
cgcuggaucccaggaaguc

SEQ ID NO: 1169869 - RNA, 23 nt, Human
cgggagaccugaagcugcgauca

SEQ ID NO: 1169870 - RNA, 24 nt, Human
cucuccugcccucuuccaaauccu

SEQ ID NO: 1169871 - RNA, 21 nt, Human
cuuuuuuuuuuuuuuuaaagg

SEQ ID NO: 1169872 - RNA, 26 nt, Human
gcuccugguagggucuguaagccucu

SEQ ID NO: 1169873 - RNA, 22 nt, Human
ggaaagacagagaaagcgucag

SEQ ID NO: 1169874 - RNA, 24 nt, Human
ggcugcacugagccaagaugacac

SEQ ID NO: 1169875 - RNA, 19 nt, Human
ggugaccuguggucucggc

SEQ ID NO: 1169876 - RNA, 21 nt, Human
guaggauccugugggcucugg

SEQ ID NO: 1169877 - RNA, 20 nt, Human
uaaagagauacuccugacuu

SEQ ID NO: 1169878 - RNA, 19 nt, Human
uacccugugacucguuggu

SEQ ID NO: 1169879 - RNA, 22 nt, Human
uagaggcaggaucucacuuugu

SEQ ID NO: 1169880 - RNA, 23 nt, Human
uagggucuguaagccucuuaggg

SEQ ID NO: 1169881 - RNA, 24 nt, Human
uaugaggaaggaguuuauagcccc

SEQ ID NO: 1169882 - RNA, 22 nt, Human
ucagaaaacgcugugccuuuua

SEQ ID NO: 1169883 - RNA, 23 nt, Human
ucccaaagugcuaggauuauagc

SEQ ID NO: 1169884 - RNA, 20 nt, Human
uccccaugcgaaggcgaagu

SEQ ID NO: 1169885 - RNA, 19 nt, Human
ucgcuggaucccaggaagu

SEQ ID NO: 1169886 - RNA, 19 nt, Human
ucuccugcccucuuccaaa

SEQ ID NO: 1169887 - RNA, 24 nt, Human
ucuccugcccucuuccaaauccua

SEQ ID NO: 1169888 - RNA, 18 nt, Human
ucugccagcaaucccacc

SEQ ID NO: 1169889 - RNA, 24 nt, Human
ucugccagcaaucccaccucuugu

SEQ ID NO: 1169890 - RNA, 25 nt, Human
ucuguaagccucuuagggggauuac

SEQ ID NO: 1169891 - RNA, 22 nt, Human
ugaaaagugugagagacaauuc

SEQ ID NO: 1169892 - RNA, 21 nt, Human
ugagauguucauuagguuugg

SEQ ID NO: 1169893 - RNA, 23 nt, Human
ugcuuuuuuuuuuuuuuuaaagg

SEQ ID NO: 1169894 - RNA, 20 nt, Human
uggcagcgaggggugaccug

SEQ ID NO: 1169895 - RNA, 19 nt, Human
ugggaaaugugaaagcuua

SEQ ID NO: 1169896 - RNA, 19 nt, Human
ugggagcucuuauaccaag

SEQ ID NO: 1169897 - RNA, 19 nt, Human
ugugacucguuggucagca

SEQ ID NO: 1169898 - RNA, 24 nt, Human
uuaaccaucagaaucaacgagcgu

SEQ ID NO: 1169899 - RNA, 18 nt, Human
uuagccucccaaagugcu

SEQ ID NO: 1169900 - RNA, 19 nt, Human
uugaaaauucaccuguuuu

SEQ ID NO: 1169901 - RNA, 19 nt, Human
uuugugcuuagggugguau

SEQ ID NO: 1169902 - RNA, 22 nt, Human
uuuuuuuuuuuuuaaagguuua

SEQ ID NO: 1169903 - RNA, 23 nt, Human
aaaaaaaaaaaaaaggcugggag

SEQ ID NO: 1169904 - RNA, 22 nt, Human
aaaaaaacaaaaacagagcugg

SEQ ID NO: 1169905 - RNA, 25 nt, Human
aaaaaggacucauccuacauuuaaa

SEQ ID NO: 1169906 - RNA, 23 nt, Human
aaagaaaacaaggcaugagaaag

SEQ ID NO: 1169907 - RNA, 24 nt, Human
aaagugcugggauuauaggcauga

SEQ ID NO: 1169908 - RNA, 20 nt, Human
aacacgaugaaauccugucu

SEQ ID NO: 1169909 - RNA, 21 nt, Human
aacacgaugaaauccugucuc

SEQ ID NO: 1169910 - RNA, 20 nt, Human
aacauggugaaacccugucu

SEQ ID NO: 1169911 - RNA, 21 nt, Human
aacauggugaaacccugucuc

SEQ ID NO: 1169912 - RNA, 24 nt, Human
aaccagguggccucaguuuuaccu

SEQ ID NO: 1169913 - RNA, 21 nt, Human
aacccagggcccucguuuuaa

SEQ ID NO: 1169914 - RNA, 20 nt, Human
aaccccuaguccugggcaga

SEQ ID NO: 1169915 - RNA, 24 nt, Human
aagaaaacaaggcaugagaaagca

SEQ ID NO: 1169916 - RNA, 20 nt, Human
aagaugccaccuuuaagaca

SEQ ID NO: 1169917 - RNA, 22 nt, Human
aagcacaccuggaggacaaaaa

SEQ ID NO: 1169918 - RNA, 21 nt, Human
aagcugagaaggcuuccugga

SEQ ID NO: 1169919 - RNA, 20 nt, Human
aaguagcugggacuacaggc

SEQ ID NO: 1169920 - RNA, 20 nt, Human
aaguagcugggacuacaggc

SEQ ID NO: 1169921 - RNA, 19 nt, Human
aagugcugggauuauaggc

SEQ ID NO: 1169922 - RNA, 21 nt, Human
aagugcugggauuauaggcau

SEQ ID NO: 1169923 - RNA, 19 nt, Human
aagugggaugaggagagag

SEQ ID NO: 1169924 - RNA, 18 nt, Human
aaucauaauucccaaucu

SEQ ID NO: 1169925 - RNA, 21 nt, Human
acaaggcaugagaaagcacca

SEQ ID NO: 1169926 - RNA, 21 nt, Human
acaccuguaaucccaacccuu

SEQ ID NO: 1169927 - RNA, 20 nt, Human
acagagugagacuccgucuc

SEQ ID NO: 1169928 - RNA, 24 nt, Human
acagagugagacuccgucucaaaa

SEQ ID NO: 1169929 - RNA, 21 nt, Human
acauggaagaaauaaaauagg

SEQ ID NO: 1169930 - RNA, 20 nt, Human
accaagaaaggaaguuucag

SEQ ID NO: 1169931 - RNA, 23 nt, Human
accaagaaaggaaguuucagcag

SEQ ID NO: 1169932 - RNA, 21 nt, Human
accaggaaggggauuguucca

SEQ ID NO: 1169933 - RNA, 21 nt, Human
acccugucaacugugcucacu

SEQ ID NO: 1169934 - RNA, 24 nt, Human
acccugucucuacuaaaaauacaa

SEQ ID NO: 1169935 - RNA, 21 nt, Human
accgugggguacaaagccuca

SEQ ID NO: 1169936 - RNA, 24 nt, Human
acuccagccugggugacagaguga

SEQ ID NO: 1169937 - RNA, 22 nt, Human
agaaaggagugagguggaauca

SEQ ID NO: 1169938 - RNA, 19 nt, Human
agacagagucucccucugu

SEQ ID NO: 1169939 - RNA, 18 nt, Human
agacaggacacaacagaa

SEQ ID NO: 1169940 - RNA, 23 nt, Human
agacaggguuucaccacguugcc

SEQ ID NO: 1169941 - RNA, 20 nt, Human
agauagcaucuccccuaggu

SEQ ID NO: 1169942 - RNA, 22 nt, Human
agcacuuugggaagccgaggca

SEQ ID NO: 1169943 - RNA, 20 nt, Human
agcacuuugggaggcucagg

SEQ ID NO: 1169944 - RNA, 23 nt, Human
agcacuuugggaggcucaggcag

SEQ ID NO: 1169945 - RNA, 24 nt, Human
agcccggccaacauggugaaaccc

SEQ ID NO: 1169946 - RNA, 22 nt, Human
agcccuuucccucucugggcuu

SEQ ID NO: 1169947 - RNA, 24 nt, Human
agccugggcaacacgaugaaaucc

SEQ ID NO: 1169948 - RNA, 23 nt, Human
agccugggcaacauggggagccc

SEQ ID NO: 1169949 - RNA, 24 nt, Human
agccugggcaacauggggagcccu

SEQ ID NO: 1169950 - RNA, 24 nt, Human
agccugggugacagagugagacuc

SEQ ID NO: 1169951 - RNA, 23 nt, Human
agccuguaaucccagcuaccugg

SEQ ID NO: 1169952 - RNA, 22 nt, Human
agccuguguagaggacagccuc

SEQ ID NO: 1169953 - RNA, 20 nt, Human
agcugcaggacugaaagaug

SEQ ID NO: 1169954 - RNA, 25 nt, Human
aggaggggcagaggggccgggaggg

SEQ ID NO: 1169955 - RNA, 23 nt, Human
aggaguucaagaccagccugggc

SEQ ID NO: 1169956 - RNA, 28 nt, Human
aggaugaaagaaaacaaggcaugagaaa

SEQ ID NO: 1169957 - RNA, 18 nt, Human
aggcaggagaaugguuug

SEQ ID NO: 1169958 - RNA, 24 nt, Human
aggcaggagaaugguuugaacccg

SEQ ID NO: 1169959 - RNA, 22 nt, Human
aggcaggaggaucgcuugagcc

SEQ ID NO: 1169960 - RNA, 23 nt, Human
aggcaggaggaucgcuugagccu

SEQ ID NO: 1169961 - RNA, 18 nt, Human
aggcagguggaucgcuug

SEQ ID NO: 1169962 - RNA, 21 nt, Human
aggccuugguuugggggcagg

SEQ ID NO: 1169963 - RNA, 24 nt, Human
aggcgugguggcgggagccuguaa

SEQ ID NO: 1169964 - RNA, 24 nt, Human
aggcucaggcaggaggaucgcuug

SEQ ID NO: 1169965 - RNA, 24 nt, Human
aggcugaggcaggagaaugguuug

SEQ ID NO: 1169966 - RNA, 25 nt, Human
aggcuggagugcagugacacgaucu

SEQ ID NO: 1169967 - RNA, 23 nt, Human
aggggccgggagggaggugcuuc

SEQ ID NO: 1169968 - RNA, 22 nt, Human
agguaggcggaucaccugaggg

SEQ ID NO: 1169969 - RNA, 22 nt, Human
aggucucuaaucaaguggccac

SEQ ID NO: 1169970 - RNA, 24 nt, Human
aggugauccacccgccuuggucuc

SEQ ID NO: 1169971 - RNA, 21 nt, Human
agguggagguugcagugagcc

SEQ ID NO: 1169972 - RNA, 24 nt, Human
agguggagguugcagugagccgag

SEQ ID NO: 1169973 - RNA, 24 nt, Human
agugcagugacacgaucucggcuc

SEQ ID NO: 1169974 - RNA, 20 nt, Human
agugcucaugccuguaaucc

SEQ ID NO: 1169975 - RNA, 20 nt, Human
agugcucaugccuguaaucc

SEQ ID NO: 1169976 - RNA, 23 nt, Human
aguggcucacgccuguaauccug

SEQ ID NO: 1169977 - RNA, 24 nt, Human
aucuagccccagugaccucuuccu

SEQ ID NO: 1169978 - RNA, 24 nt, Human
aucuugccauugcacuccagccug

SEQ ID NO: 1169979 - RNA, 19 nt, Human
augccuguaauccuagcac

SEQ ID NO: 1169980 - RNA, 21 nt, Human
auguccuuccauucuccuagg

SEQ ID NO: 1169981 - RNA, 21 nt, Human
auugcacuccagccuggguga

SEQ ID NO: 1169982 - RNA, 24 nt, Human
auugcacuccagccugggugacag

SEQ ID NO: 1169983 - RNA, 24 nt, Human
auuuuuguauuuuuaguagagaca

SEQ ID NO: 1169984 - RNA, 21 nt, Human
caaagccccuucucacucuuc

SEQ ID NO: 1169985 - RNA, 22 nt, Human
caacacgaugaaauccugucuc

SEQ ID NO: 1169986 - RNA, 24 nt, Human
caacacgaugaaauccugucucua

SEQ ID NO: 1169987 - RNA, 24 nt, Human
caacauggugaaacccugucucua

SEQ ID NO: 1169988 - RNA, 23 nt, Human
caagauguaggcuaagauuauug

SEQ ID NO: 1169989 - RNA, 21 nt, Human
caaggcaugagaaagcaccaa

SEQ ID NO: 1169990 - RNA, 21 nt, Human
caaggccauuuccauuccaag

SEQ ID NO: 1169991 - RNA, 24 nt, Human
caagguaggcggaucaccugaggu

SEQ ID NO: 1169992 - RNA, 24 nt, Human
cacacccguccucucacccccaga

SEQ ID NO: 1169993 - RNA, 19 nt, Human
caccaagaaaggaaguuuc

SEQ ID NO: 1169994 - RNA, 20 nt, Human
caccaagaaaggaaguuuca

SEQ ID NO: 1169995 - RNA, 22 nt, Human
caccaccaugccuggcuaauuu

SEQ ID NO: 1169996 - RNA, 27 nt, Human
caccacguugcccaggcuggucuagaa

SEQ ID NO: 1169997 - RNA, 22 nt, Human
caccauccaaaaaagaagcucc

SEQ ID NO: 1169998 - RNA, 24 nt, Human
caccaugccuggcuaauuuuugua

SEQ ID NO: 1169999 - RNA, 25 nt, Human
cacccacuucgggcucccagggacu

SEQ ID NO: 1170000 - RNA, 19 nt, Human
cacccagagaaagagggga

SEQ ID NO: 1170001 - RNA, 24 nt, Human
cacccccugcuucauguucucacc

SEQ ID NO: 1170002 - RNA, 19 nt, Human
caccccgccccccccccac

SEQ ID NO: 1170003 - RNA, 20 nt, Human
caccccgccccccccccacc

SEQ ID NO: 1170004 - RNA, 22 nt, Human
caccccgccccccccccacccc

SEQ ID NO: 1170005 - RNA, 27 nt, Human
caccccgccccccccccaccccauucc

SEQ ID NO: 1170006 - RNA, 24 nt, Human
cacccgccuuggucucccaaagug

SEQ ID NO: 1170007 - RNA, 20 nt, Human
caccuggaggacaaaaaggu

SEQ ID NO: 1170008 - RNA, 19 nt, Human
caccuguaaucccaacccu

SEQ ID NO: 1170009 - RNA, 23 nt, Human
caccuguaaucccaacccuuugg

SEQ ID NO: 1170010 - RNA, 24 nt, Human
caccuguaaucccaacccuuuggg

SEQ ID NO: 1170011 - RNA, 25 nt, Human
cacgccuguaauccugagcacuuug

SEQ ID NO: 1170012 - RNA, 24 nt, Human
cacguugcccaggcuggucuagaa

SEQ ID NO: 1170013 - RNA, 22 nt, Human
cacuccagccugggugacagag

SEQ ID NO: 1170014 - RNA, 24 nt, Human
cacuccagccugggugacagagug

SEQ ID NO: 1170015 - RNA, 21 nt, Human
cacucuccacggcucccacug

SEQ ID NO: 1170016 - RNA, 19 nt, Human
cacugcaaacuccaccuuc

SEQ ID NO: 1170017 - RNA, 21 nt, Human
cagaagccagagcagggcuaa

SEQ ID NO: 1170018 - RNA, 22 nt, Human
cagagcugagaacugagcuggg

SEQ ID NO: 1170019 - RNA, 19 nt, Human
cagaggaccuucuugcauu

SEQ ID NO: 1170020 - RNA, 24 nt, Human
cagcuaccugggaggcugaggcag

SEQ ID NO: 1170021 - RNA, 19 nt, Human
cagcuccuggguggauggg

SEQ ID NO: 1170022 - RNA, 22 nt, Human
caggccuugguuugggggcagg

SEQ ID NO: 1170023 - RNA, 24 nt, Human
caggguuucaccacguugcccagg

SEQ ID NO: 1170024 - RNA, 21 nt, Human
cagguggccucaguuuuaccu

SEQ ID NO: 1170025 - RNA, 24 nt, Human
cagugcucaugccuguaauccuag

SEQ ID NO: 1170026 - RNA, 19 nt, Human
caugagggccuuacugaga

SEQ ID NO: 1170027 - RNA, 19 nt, Human
cauugcacuccagccuggg

SEQ ID NO: 1170028 - RNA, 21 nt, Human
cauugcacuccagccugggug

SEQ ID NO: 1170029 - RNA, 22 nt, Human
cauugcacuccagccuggguga

SEQ ID NO: 1170030 - RNA, 24 nt, Human
cauugcacuccagccugggugaca

SEQ ID NO: 1170031 - RNA, 24 nt, Human
cauugcacuccagccugggugaca

SEQ ID NO: 1170032 - RNA, 24 nt, Human
ccaaagugcugggauuauaggcau

SEQ ID NO: 1170033 - RNA, 23 nt, Human
ccagccagauaacugcuuuccuc

SEQ ID NO: 1170034 - RNA, 19 nt, Human
ccagccccuccuuuacuuc

SEQ ID NO: 1170035 - RNA, 24 nt, Human
ccagccccuccuuuacuucuuuag

SEQ ID NO: 1170036 - RNA, 25 nt, Human
ccagugucuucugagcugacucccc

SEQ ID NO: 1170037 - RNA, 20 nt, Human
ccauugcacuccagccuggg

SEQ ID NO: 1170038 - RNA, 21 nt, Human
ccauugcacuccagccugggu

SEQ ID NO: 1170039 - RNA, 21 nt, Human
ccauugcacuccagccugggu

SEQ ID NO: 1170040 - RNA, 22 nt, Human
ccauugcacuccagccugggug

SEQ ID NO: 1170041 - RNA, 24 nt, Human
ccauugcacuccagccugggugac

SEQ ID NO: 1170042 - RNA, 23 nt, Human
cccaaguagcugggacuacaggc

SEQ ID NO: 1170043 - RNA, 24 nt, Human
cccaaguagcugggacuacaggcg

SEQ ID NO: 1170044 - RNA, 22 nt, Human
cccaccccuggggaagcugaga

SEQ ID NO: 1170045 - RNA, 24 nt, Human
ccccacccuccaccaccacucaga

SEQ ID NO: 1170046 - RNA, 26 nt, Human
ccccauuguccucaggcugaauucug

SEQ ID NO: 1170047 - RNA, 23 nt, Human
cccccacccuccaccaccacuca

SEQ ID NO: 1170048 - RNA, 18 nt, Human
ccccccccaccccauucc

SEQ ID NO: 1170049 - RNA, 21 nt, Human
ccccccccaccccauuccacu

SEQ ID NO: 1170050 - RNA, 21 nt, Human
cccccccccaccccauuccac

SEQ ID NO: 1170051 - RNA, 21 nt, Human
ccccgucacucucccugccca

SEQ ID NO: 1170052 - RNA, 25 nt, Human
ccccgucacucucccugcccaucuc

SEQ ID NO: 1170053 - RNA, 18 nt, Human
ccccuaguccugggcaga

SEQ ID NO: 1170054 - RNA, 20 nt, Human
ccccuugcuguuggugccuc

SEQ ID NO: 1170055 - RNA, 22 nt, Human
cccggcagugugggggacagcu

SEQ ID NO: 1170056 - RNA, 22 nt, Human
cccggccaacauggugaaaccc

SEQ ID NO: 1170057 - RNA, 24 nt, Human
cccggccaacauggugaaacccug

SEQ ID NO: 1170058 - RNA, 22 nt, Human
cccguccucucacccccagaca

SEQ ID NO: 1170059 - RNA, 24 nt, Human
cccuccaccaccacucagagggcc

SEQ ID NO: 1170060 - RNA, 21 nt, Human
cccuccuuuacuucuuuagcc

SEQ ID NO: 1170061 - RNA, 21 nt, Human
cccucguuuuaaccucuacgc

SEQ ID NO: 1170062 - RNA, 24 nt, Human
cccucugucgcccaggcuggagug

SEQ ID NO: 1170063 - RNA, 18 nt, Human
cccugagcuccuucccuu

SEQ ID NO: 1170064 - RNA, 20 nt, Human
cccugcccaucucuuccucc

SEQ ID NO: 1170065 - RNA, 24 nt, Human
ccgccuuggucucccaaagugcug

SEQ ID NO: 1170066 - RNA, 21 nt, Human
ccggggagguggagguugcag

SEQ ID NO: 1170067 - RNA, 19 nt, Human
ccggguuaaagcaauucuc

SEQ ID NO: 1170068 - RNA, 22 nt, Human
ccggguuaaagcaauucucaug

SEQ ID NO: 1170069 - RNA, 23 nt, Human
ccuaccuuuugaugccaugcccc

SEQ ID NO: 1170070 - RNA, 23 nt, Human
ccucaggcugaauucugaagccc

SEQ ID NO: 1170071 - RNA, 22 nt, Human
ccugaccucaggugauccaccc

SEQ ID NO: 1170072 - RNA, 23 nt, Human
ccugaccucaggugauccacccg

SEQ ID NO: 1170073 - RNA, 25 nt, Human
ccugccaagaucucagggcacccca

SEQ ID NO: 1170074 - RNA, 22 nt, Human
ccugcccaucucuuccuccugu

SEQ ID NO: 1170075 - RNA, 22 nt, Human
ccugggcaacacgaugaaaucc

SEQ ID NO: 1170076 - RNA, 24 nt, Human
ccugggcaacacgaugaaauccug

SEQ ID NO: 1170077 - RNA, 22 nt, Human
ccugggugacagagugagacuc

SEQ ID NO: 1170078 - RNA, 18 nt, Human
ccuggguggaugggcugu

SEQ ID NO: 1170079 - RNA, 21 nt, Human
ccuguaaucccagcuaccugg

SEQ ID NO: 1170080 - RNA, 22 nt, Human
ccuguaaucccagcuaccuggg

SEQ ID NO: 1170081 - RNA, 20 nt, Human
ccuguaauccuagcacuuug

SEQ ID NO: 1170082 - RNA, 22 nt, Human
ccuguaauccuagcacuuuggg

SEQ ID NO: 1170083 - RNA, 21 nt, Human
ccuuaaaaaaacaaaaacaga

SEQ ID NO: 1170084 - RNA, 21 nt, Human
ccuugguuugggggcaggguc

SEQ ID NO: 1170085 - RNA, 24 nt, Human
cgagaccagcccggccaacauggu

SEQ ID NO: 1170086 - RNA, 22 nt, Human
cgcagcaguggccaugggagaa

SEQ ID NO: 1170087 - RNA, 24 nt, Human
cgccuguaauccugagcacuuugg

SEQ ID NO: 1170088 - RNA, 25 nt, Human
cgccuguaauccugagcacuuuggg

SEQ ID NO: 1170089 - RNA, 24 nt, Human
cggaucaccugagguugggaguuc

SEQ ID NO: 1170090 - RNA, 24 nt, Human
cggccaacauggugaaacccuguc

SEQ ID NO: 1170091 - RNA, 22 nt, Human
cggcuugggugggaacuuucag

SEQ ID NO: 1170092 - RNA, 23 nt, Human
cgugcaccaccaugccuggcuaa

SEQ ID NO: 1170093 - RNA, 20 nt, Human
cuagcacuuugggaggcuca

SEQ ID NO: 1170094 - RNA, 20 nt, Human
cuauggccaccccgcccccc

SEQ ID NO: 1170095 - RNA, 25 nt, Human
cucacgccuguaauccugagcacuu

SEQ ID NO: 1170096 - RNA, 24 nt, Human
cucaggugauccacccgccuuggu

SEQ ID NO: 1170097 - RNA, 24 nt, Human
cucaugccuguaauccuagcacuu

SEQ ID NO: 1170098 - RNA, 23 nt, Human
cucccuccuacucuggaucccca

SEQ ID NO: 1170099 - RNA, 24 nt, Human
cucccucugucgcccaggcuggag

SEQ ID NO: 1170100 - RNA, 19 nt, Human
cuccgucucaaaaaaaaaa

SEQ ID NO: 1170101 - RNA, 20 nt, Human
cuccuagggagcccugugcc

SEQ ID NO: 1170102 - RNA, 20 nt, Human
cuccuuaaaaaaacaaaaac

SEQ ID NO: 1170103 - RNA, 20 nt, Human
cucgccaggccugagccagg

SEQ ID NO: 1170104 - RNA, 19 nt, Human
cucuccacggcucccacug

SEQ ID NO: 1170105 - RNA, 23 nt, Human
cugggcuucuguuucucccccug

SEQ ID NO: 1170106 - RNA, 21 nt, Human
cuggucacccaggacucugcu

SEQ ID NO: 1170107 - RNA, 20 nt, Human
cuuacaccuguaaucccaac

SEQ ID NO: 1170108 - RNA, 19 nt, Human
cuucaggaaaugucucugg

SEQ ID NO: 1170109 - RNA, 18 nt, Human
cuucccagccaucuuccc

SEQ ID NO: 1170110 - RNA, 19 nt, Human
cuucugagcugacuccccg

SEQ ID NO: 1170111 - RNA, 19 nt, Human
gaaacccugucucuacuaa

SEQ ID NO: 1170112 - RNA, 23 nt, Human
gacaaccugggcaacuggggagg

SEQ ID NO: 1170113 - RNA, 24 nt, Human
gacagagugagacuccgucucaaa

SEQ ID NO: 1170114 - RNA, 24 nt, Human
gaccucaggugauccacccgccuu

SEQ ID NO: 1170115 - RNA, 24 nt, Human
gacuacaggcgugcaccaccaugc

SEQ ID NO: 1170116 - RNA, 23 nt, Human
gagaggcugccggaggggagggg

SEQ ID NO: 1170117 - RNA, 23 nt, Human
gagaucuugccauugcacuccag

SEQ ID NO: 1170118 - RNA, 24 nt, Human
gagcacuuugggaagccgaggcag

SEQ ID NO: 1170119 - RNA, 26 nt, Human
gaggaccaggaaggggauuguuccag

SEQ ID NO: 1170120 - RNA, 22 nt, Human
gaggggccgggagggaggugcu

SEQ ID NO: 1170121 - RNA, 22 nt, Human
gagguugcagugagccgagauc

SEQ ID NO: 1170122 - RNA, 24 nt, Human
gaucaccugagguugggaguucga

SEQ ID NO: 1170123 - RNA, 24 nt, Human
gaucgcuugagcccaggaguucaa

SEQ ID NO: 1170124 - RNA, 23 nt, Human
gaucgcuugagccuagaguucaa

SEQ ID NO: 1170125 - RNA, 19 nt, Human
gauuauaggcaugaaccac

SEQ ID NO: 1170126 - RNA, 24 nt, Human
gauuauaggcaugaaccacagugc

SEQ ID NO: 1170127 - RNA, 24 nt, Human
gcacaggcucagggaucagaaagg

SEQ ID NO: 1170128 - RNA, 24 nt, Human
gcacuccagccugggugacagagu

SEQ ID NO: 1170129 - RNA, 18 nt, Human
gcagcaguggccauggga

SEQ ID NO: 1170130 - RNA, 20 nt, Human
gcagugcacccccacccucc

SEQ ID NO: 1170131 - RNA, 24 nt, Human
gccaacauggugaaacccugucuc

SEQ ID NO: 1170132 - RNA, 23 nt, Human
gccaagaucucagggcaccccag

SEQ ID NO: 1170133 - RNA, 20 nt, Human
gccaggcugcucugggcugg

SEQ ID NO: 1170134 - RNA, 19 nt, Human
gccauugcacuccagccug

SEQ ID NO: 1170135 - RNA, 24 nt, Human
gccauugcacuccagccuggguga

SEQ ID NO: 1170136 - RNA, 22 nt, Human
gcccaggaguucaagaccagcc

SEQ ID NO: 1170137 - RNA, 23 nt, Human
gcccaggcuggagugcagugaca

SEQ ID NO: 1170138 - RNA, 18 nt, Human
gcccagggccuugcaagc

SEQ ID NO: 1170139 - RNA, 24 nt, Human
gcccucuuucuaacccuuuaccau

SEQ ID NO: 1170140 - RNA, 22 nt, Human
gccuuggucucccaaagugcug

SEQ ID NO: 1170141 - RNA, 24 nt, Human
gccuuggucucccaaagugcuggg

SEQ ID NO: 1170142 - RNA, 18 nt, Human
gcggcucugggugccggc

SEQ ID NO: 1170143 - RNA, 20 nt, Human
gcgggagccuguaaucccag

SEQ ID NO: 1170144 - RNA, 21 nt, Human
gcuacagcucauagauguccu

SEQ ID NO: 1170145 - RNA, 22 nt, Human
gcucaugccuguaauccuagca

SEQ ID NO: 1170146 - RNA, 18 nt, Human
ggaaguuucagcagucac

SEQ ID NO: 1170147 - RNA, 24 nt, Human
ggacuacaggcgugcaccaccaug

SEQ ID NO: 1170148 - RNA, 21 nt, Human
ggagagagagagagagagagc

SEQ ID NO: 1170149 - RNA, 22 nt, Human
ggagcagugcucaugccuguaa

SEQ ID NO: 1170150 - RNA, 20 nt, Human
ggagcaguggcuuacaccug

SEQ ID NO: 1170151 - RNA, 23 nt, Human
ggagcaguggcuuacaccuguaa

SEQ ID NO: 1170152 - RNA, 18 nt, Human
ggaggacaaaaagguucc

SEQ ID NO: 1170153 - RNA, 18 nt, Human
ggagguugcagugagccg

SEQ ID NO: 1170154 - RNA, 20 nt, Human
ggagguugcagugagccgag

SEQ ID NO: 1170155 - RNA, 22 nt, Human
ggagguugcagugagccgagau

SEQ ID NO: 1170156 - RNA, 23 nt, Human
ggagguugcagugagccgagauc

SEQ ID NO: 1170157 - RNA, 23 nt, Human
ggaucaccugagguugggaguuc

SEQ ID NO: 1170158 - RNA, 23 nt, Human
ggcacaguggcucacgccuguaa

SEQ ID NO: 1170159 - RNA, 24 nt, Human
ggccaccccgccccccccccaccc

SEQ ID NO: 1170160 - RNA, 23 nt, Human
ggccaggcugcucugggcuggga

SEQ ID NO: 1170161 - RNA, 24 nt, Human
ggcuggucuagaacuccugaccuc

SEQ ID NO: 1170162 - RNA, 24 nt, Human
gggagaggaacacccagagaaaga

SEQ ID NO: 1170163 - RNA, 24 nt, Human
gggagguagucccaugcuucugaa

SEQ ID NO: 1170164 - RNA, 18 nt, Human
gggcacaguggcucacgc

SEQ ID NO: 1170165 - RNA, 22 nt, Human
gggcugggagcuugcugcagug

SEQ ID NO: 1170166 - RNA, 22 nt, Human
ggggagggugaggggggaagug

SEQ ID NO: 1170167 - RNA, 29 nt, Human
ggggagguggagguugcagugacaacggu

SEQ ID NO: 1170168 - RNA, 24 nt, Human
ggggagguggagguugcagugagc

SEQ ID NO: 1170169 - RNA, 18 nt, Human
ggggcccugggucugacc

SEQ ID NO: 1170170 - RNA, 20 nt, Human
ggggcccugggucugaccug

SEQ ID NO: 1170171 - RNA, 24 nt, Human
gggggcccugggucugaccugugg

SEQ ID NO: 1170172 - RNA, 22 nt, Human
ggggggcccugggucugaccug

SEQ ID NO: 1170173 - RNA, 18 nt, Human
gggugagcuggggaggag

SEQ ID NO: 1170174 - RNA, 22 nt, Human
gggugaggggggaagugggggc

SEQ ID NO: 1170175 - RNA, 20 nt, Human
ggucacagggccugagcuug

SEQ ID NO: 1170176 - RNA, 20 nt, Human
ggucccagguuccacuucuu

SEQ ID NO: 1170177 - RNA, 24 nt, Human
gguggcgggagccuguaaucccag

SEQ ID NO: 1170178 - RNA, 21 nt, Human
guacagagcugagaacugagc

SEQ ID NO: 1170179 - RNA, 24 nt, Human
gugauccacccgccuuggucuccc

SEQ ID NO: 1170180 - RNA, 24 nt, Human
gugcucaugccuguaauccuagca

SEQ ID NO: 1170181 - RNA, 19 nt, Human
guuucucccccugucaaau

SEQ ID NO: 1170182 - RNA, 23 nt, Human
uaaaaaaaaaaaaaaggcuggga

SEQ ID NO: 1170183 - RNA, 21 nt, Human
uaaaaauacaaaaauuagcca

SEQ ID NO: 1170184 - RNA, 24 nt, Human
uaauuuuuguauuuuuaguagaga

SEQ ID NO: 1170185 - RNA, 21 nt, Human
uacaccuguaaucccaacccu

SEQ ID NO: 1170186 - RNA, 24 nt, Human
uacaccuguaaucccaacccuuug

SEQ ID NO: 1170187 - RNA, 21 nt, Human
uacagcucauagauguccuuc

SEQ ID NO: 1170188 - RNA, 23 nt, Human
uacauggaauuauuuaauauguu

SEQ ID NO: 1170189 - RNA, 24 nt, Human
uacauuuaaaaauauuauaaucau

SEQ ID NO: 1170190 - RNA, 20 nt, Human
uaccgugggguacaaagccu

SEQ ID NO: 1170191 - RNA, 21 nt, Human
uagaaggaaaauuccccucac

SEQ ID NO: 1170192 - RNA, 22 nt, Human
uagagacaggguuucaccacgu

SEQ ID NO: 1170193 - RNA, 19 nt, Human
uagcacuugucccaacccc

SEQ ID NO: 1170194 - RNA, 21 nt, Human
uagcacuuugggaggcucagg

SEQ ID NO: 1170195 - RNA, 20 nt, Human
uaggcaugaaccacagugcc

SEQ ID NO: 1170196 - RNA, 18 nt, Human
uaggcggaucaccugagg

SEQ ID NO: 1170197 - RNA, 19 nt, Human
uaguagagacaggguuuca

SEQ ID NO: 1170198 - RNA, 22 nt, Human
uaucaguguuauuugugugugg

SEQ ID NO: 1170199 - RNA, 18 nt, Human
ucaccugagguugggagu

SEQ ID NO: 1170200 - RNA, 24 nt, Human
ucacugcaaacuccaccuuccggg

SEQ ID NO: 1170201 - RNA, 20 nt, Human
ucacugugguggccuugaug

SEQ ID NO: 1170202 - RNA, 22 nt, Human
ucacuuggugcgugauuauuuc

SEQ ID NO: 1170203 - RNA, 21 nt, Human
ucagaagcucuuucuucccuc

SEQ ID NO: 1170204 - RNA, 22 nt, Human
ucagcagucacacccguccucu

SEQ ID NO: 1170205 - RNA, 21 nt, Human
ucaggugagcaggcaaagccc

SEQ ID NO: 1170206 - RNA, 23 nt, Human
uccagccugggugacagagugag

SEQ ID NO: 1170207 - RNA, 24 nt, Human
uccagccugggugacagagugaga

SEQ ID NO: 1170208 - RNA, 21 nt, Human
uccauucuccuagggagcccu

SEQ ID NO: 1170209 - RNA, 24 nt, Human
ucccaaagugcugggauuauaggc

SEQ ID NO: 1170210 - RNA, 18 nt, Human
ucccaaccccugccuccu

SEQ ID NO: 1170211 - RNA, 24 nt, Human
ucccaaguagcugggacuacaggc

SEQ ID NO: 1170212 - RNA, 18 nt, Human
ucccagggacugugcugc

SEQ ID NO: 1170213 - RNA, 21 nt, Human
uccccaggccagugucuucug

SEQ ID NO: 1170214 - RNA, 20 nt, Human
ucccucugucgcccaggcug

SEQ ID NO: 1170215 - RNA, 24 nt, Human
ucccucugucgcccaggcuggagu

SEQ ID NO: 1170216 - RNA, 20 nt, Human
uccgauaccauuuaaucauc

SEQ ID NO: 1170217 - RNA, 23 nt, Human
uccgucucaaaaaaaaaaaaaaa

SEQ ID NO: 1170218 - RNA, 22 nt, Human
ucgcccaggcuggagugcagug

SEQ ID NO: 1170219 - RNA, 23 nt, Human
ucgcuugagcccaggaguucaag

SEQ ID NO: 1170220 - RNA, 22 nt, Human
ucgcuugagccuagaguucaag

SEQ ID NO: 1170221 - RNA, 21 nt, Human
ucuauccaaaaauacgaaaaa

SEQ ID NO: 1170222 - RNA, 18 nt, Human
ucucaaaaaaaaaaaaaa

SEQ ID NO: 1170223 - RNA, 22 nt, Human
ucucacuuauugcccaggcuuc

SEQ ID NO: 1170224 - RNA, 23 nt, Human
ucucacuuauugcccaggcuuca

SEQ ID NO: 1170225 - RNA, 23 nt, Human
ucucccucugucgcccaggcugg

SEQ ID NO: 1170226 - RNA, 24 nt, Human
ucucccucugucgcccaggcugga

SEQ ID NO: 1170227 - RNA, 22 nt, Human
ucucuaauaaaaaaaaaaaaaa

SEQ ID NO: 1170228 - RNA, 23 nt, Human
ucucuacuaaaaauacaaaaauu

SEQ ID NO: 1170229 - RNA, 21 nt, Human
ucucugggcuucuguuucucc

SEQ ID NO: 1170230 - RNA, 22 nt, Human
ucuggguuuucucgccaggccu

SEQ ID NO: 1170231 - RNA, 24 nt, Human
ucugucgcccaggcuggagugcag

SEQ ID NO: 1170232 - RNA, 20 nt, Human
ugaaaucagggccagguggu

SEQ ID NO: 1170233 - RNA, 20 nt, Human
ugaccucaggugauccaccc

SEQ ID NO: 1170234 - RNA, 24 nt, Human
ugaccucaggugauccacccgccu

SEQ ID NO: 1170235 - RNA, 20 nt, Human
ugacugaguuuggaaaacag

SEQ ID NO: 1170236 - RNA, 18 nt, Human
ugagaaagcaccaagaug

SEQ ID NO: 1170237 - RNA, 22 nt, Human
ugagaaagcaccaagaugccac

SEQ ID NO: 1170238 - RNA, 24 nt, Human
ugagaaggcuuccuggaggaggaa

SEQ ID NO: 1170239 - RNA, 23 nt, Human
ugagauaagggaugggggagagg

SEQ ID NO: 1170240 - RNA, 23 nt, Human
ugagcccaggaguucaagaccag

SEQ ID NO: 1170241 - RNA, 22 nt, Human
ugagccgagaucuugccauugc

SEQ ID NO: 1170242 - RNA, 24 nt, Human
ugaggcaggagaaugguuugaacc

SEQ ID NO: 1170243 - RNA, 25 nt, Human
ugaggcaggagaaugguuugaaccc

SEQ ID NO: 1170244 - RNA, 24 nt, Human
ugagguggaaucaccaagaaagga

SEQ ID NO: 1170245 - RNA, 18 nt, Human
ugauuugcugcugagaac

SEQ ID NO: 1170246 - RNA, 23 nt, Human
ugcaaauaugcucauaucuuacu

SEQ ID NO: 1170247 - RNA, 22 nt, Human
ugcacuccagccugggugacag

SEQ ID NO: 1170248 - RNA, 24 nt, Human
ugcacuccagccugggugacagag

SEQ ID NO: 1170249 - RNA, 22 nt, Human
ugcagugacacgaucucggcuc

SEQ ID NO: 1170250 - RNA, 24 nt, Human
ugcccaggcuggucuagaacuccu

SEQ ID NO: 1170251 - RNA, 24 nt, Human
ugccccagccucccaaguagcugg

SEQ ID NO: 1170252 - RNA, 19 nt, Human
ugcccuguccaauuggcca

SEQ ID NO: 1170253 - RNA, 23 nt, Human
ugccuguaauccuagcacuuugg

SEQ ID NO: 1170254 - RNA, 23 nt, Human
ugccuguaauccuagcacuuugg

SEQ ID NO: 1170255 - RNA, 22 nt, Human
ugcugcagugcacccccacccu

SEQ ID NO: 1170256 - RNA, 18 nt, Human
ugcugggagacaggacac

SEQ ID NO: 1170257 - RNA, 23 nt, Human
uggagugcagugacacgaucucg

SEQ ID NO: 1170258 - RNA, 24 nt, Human
uggagugcagugacacgaucucgg

SEQ ID NO: 1170259 - RNA, 24 nt, Human
uggaucgcuugagcccaggaguuc

SEQ ID NO: 1170260 - RNA, 22 nt, Human
uggccacucugggaaacccucc

SEQ ID NO: 1170261 - RNA, 24 nt, Human
uggccaggcugcucugggcuggga

SEQ ID NO: 1170262 - RNA, 22 nt, Human
uggcgggagccuguaaucccag

SEQ ID NO: 1170263 - RNA, 25 nt, Human
uggcucacgccuguaauccugagca

SEQ ID NO: 1170264 - RNA, 18 nt, Human
uggcugugggggaccucu

SEQ ID NO: 1170265 - RNA, 21 nt, Human
uggcuuacaccuguaauccca

SEQ ID NO: 1170266 - RNA, 24 nt, Human
ugggacuacaggcgugcaccacca

SEQ ID NO: 1170267 - RNA, 25 nt, Human
ugggacuacaggcgugcaccaccau

SEQ ID NO: 1170268 - RNA, 18 nt, Human
ugggagaggcugccggag

SEQ ID NO: 1170269 - RNA, 24 nt, Human
ugggaggccaagguaggcggauca

SEQ ID NO: 1170270 - RNA, 23 nt, Human
ugggaggcucaggcaggaggauc

SEQ ID NO: 1170271 - RNA, 18 nt, Human
ugggaggcugaggcagga

SEQ ID NO: 1170272 - RNA, 24 nt, Human
ugggaggcugaggcaggagaaugg

SEQ ID NO: 1170273 - RNA, 26 nt, Human
ugggaggcugaggcaggagaaugguu

SEQ ID NO: 1170274 - RNA, 24 nt, Human
ugggagguagucccaugcuucuga

SEQ ID NO: 1170275 - RNA, 21 nt, Human
ugggauuauaggcaugaacca

SEQ ID NO: 1170276 - RNA, 24 nt, Human
ugggauuauaggcaugaaccacag

SEQ ID NO: 1170277 - RNA, 26 nt, Human
ugggauuauaggcaugaaccacagug

SEQ ID NO: 1170278 - RNA, 24 nt, Human
ugggcaacacgaugaaauccuguc

SEQ ID NO: 1170279 - RNA, 23 nt, Human
uggucuagaacuccugaccucag

SEQ ID NO: 1170280 - RNA, 24 nt, Human
ugguggcgggagccuguaauccca

SEQ ID NO: 1170281 - RNA, 23 nt, Human
ugguggcugggcacaguggcuca

SEQ ID NO: 1170282 - RNA, 20 nt, Human
ugguuugaacccggggaggu

SEQ ID NO: 1170283 - RNA, 25 nt, Human
ugguuugaacccggggagguggagg

SEQ ID NO: 1170284 - RNA, 21 nt, Human
uguagaggacagccucugucu

SEQ ID NO: 1170285 - RNA, 20 nt, Human
ugucccuucagcgcacugcc

SEQ ID NO: 1170286 - RNA, 20 nt, Human
ugucuucugagcugacuccc

SEQ ID NO: 1170287 - RNA, 22 nt, Human
ugugcaaacaauggcacaauau

SEQ ID NO: 1170288 - RNA, 21 nt, Human
ugugcuaggucucuaaucaag

SEQ ID NO: 1170289 - RNA, 20 nt, Human
uguggaauuuuauaguccug

SEQ ID NO: 1170290 - RNA, 21 nt, Human
uguuagaguuugcuauuuaca

SEQ ID NO: 1170291 - RNA, 25 nt, Human
uguugaaccagguggccucaguuuu

SEQ ID NO: 1170292 - RNA, 21 nt, Human
uguuucccucuggucuaucau

SEQ ID NO: 1170293 - RNA, 23 nt, Human
uuagccaggcgugguggcgggag

SEQ ID NO: 1170294 - RNA, 18 nt, Human
uuaguagagacaggguuu

SEQ ID NO: 1170295 - RNA, 21 nt, Human
uucaggaaugucugaagggga

SEQ ID NO: 1170296 - RNA, 22 nt, Human
uucaggaaugucugaaggggau

SEQ ID NO: 1170297 - RNA, 24 nt, Human
uucccagccaucuucccauaauga

SEQ ID NO: 1170298 - RNA, 21 nt, Human
uucccuugagucuugcauacu

SEQ ID NO: 1170299 - RNA, 21 nt, Human
uucucaugccccagccuccca

SEQ ID NO: 1170300 - RNA, 23 nt, Human
uucucaugccccagccucccaag

SEQ ID NO: 1170301 - RNA, 22 nt, Human
uucuugcauugcuuagugguca

SEQ ID NO: 1170302 - RNA, 21 nt, Human
uucuuucuguggcugcuuccc

SEQ ID NO: 1170303 - RNA, 19 nt, Human
uugaacccggggaggugga

SEQ ID NO: 1170304 - RNA, 21 nt, Human
uugaacccggggagguggagg

SEQ ID NO: 1170305 - RNA, 25 nt, Human
uugaacccggggagguggagguugc

SEQ ID NO: 1170306 - RNA, 22 nt, Human
uugaagaccauuuccaccaagg

SEQ ID NO: 1170307 - RNA, 22 nt, Human
uugagcccaggaguucaagacc

SEQ ID NO: 1170308 - RNA, 20 nt, Human
uugagccuagaguucaagau

SEQ ID NO: 1170309 - RNA, 21 nt, Human
uugcagugagccgagaucuug

SEQ ID NO: 1170310 - RNA, 22 nt, Human
uugcagugagccgagaucuugc

SEQ ID NO: 1170311 - RNA, 23 nt, Human
uugcagugagccgagaucuugcc

SEQ ID NO: 1170312 - RNA, 21 nt, Human
uuuaauaucccaaaagggcuc

SEQ ID NO: 1170313 - RNA, 21 nt, Human
uuuaccaugcugguaaugugg

SEQ ID NO: 1170314 - RNA, 27 nt, Human
uuuauguugagauaagggaugggggag

SEQ ID NO: 1170315 - RNA, 23 nt, Human
uuucaccacguugcccaggcugg

SEQ ID NO: 1170316 - RNA, 22 nt, Human
uuucucccccugucaaaugagg

SEQ ID NO: 1170317 - RNA, 24 nt, Human
uuuuuaguagagacaggguuucac

SEQ ID NO: 1170318 - RNA, 20 nt, Human
uuuuuguauuuuuaguagag

SEQ ID NO: 1170319 - RNA, 18 nt, Human
caggugacccaagcaaaa

SEQ ID NO: 1170320 - RNA, 19 nt, Human
gugcaaggaggauggucuc

SEQ ID NO: 1170321 - RNA, 22 nt, Human
ucaugggaacucugccuccugg

SEQ ID NO: 1170322 - RNA, 23 nt, Human
ucuuggcacaaaggugcaaggag

SEQ ID NO: 1170323 - RNA, 24 nt, Human
uggcacaaaggugcaaggaggaug

SEQ ID NO: 1170324 - RNA, 22 nt, Human
uuggcacaaaggugcaaggagg

SEQ ID NO: 1170325 - RNA, 21 nt, Human
aaaagucuucuuccuuccacc

SEQ ID NO: 1170326 - RNA, 23 nt, Human
aacaguaaagaccggaaccaagg

SEQ ID NO: 1170327 - RNA, 19 nt, Human
aacccuggcgaccagggag

SEQ ID NO: 1170328 - RNA, 24 nt, Human
aacccuggcgaccagggagcuggg

SEQ ID NO: 1170329 - RNA, 24 nt, Human
aaguugccccaaagcaccagaguu

SEQ ID NO: 1170330 - RNA, 21 nt, Human
accccaucugcuucaacccag

SEQ ID NO: 1170331 - RNA, 21 nt, Human
accgaaacuuuuggaccagca

SEQ ID NO: 1170332 - RNA, 22 nt, Human
acgugugugugcauauguaugu

SEQ ID NO: 1170333 - RNA, 19 nt, Human
agaaauaaugaguuuaaug

SEQ ID NO: 1170334 - RNA, 20 nt, Human
agacaucaauaaacucgaaa

SEQ ID NO: 1170335 - RNA, 21 nt, Human
agaucucggaaguucuuaacu

SEQ ID NO: 1170336 - RNA, 24 nt, Human
aggaugguggagagguacucagag

SEQ ID NO: 1170337 - RNA, 20 nt, Human
auagaugagggaaauccugg

SEQ ID NO: 1170338 - RNA, 18 nt, Human
auguauauguguaugugc

SEQ ID NO: 1170339 - RNA, 26 nt, Human
auguauguauguguguauguauguau

SEQ ID NO: 1170340 - RNA, 24 nt, Human
auguauguguguauguauguauau

SEQ ID NO: 1170341 - RNA, 20 nt, Human
auguguguauguauguauau

SEQ ID NO: 1170342 - RNA, 21 nt, Human
caacaguaaagaccggaacca

SEQ ID NO: 1170343 - RNA, 22 nt, Human
caacaguaaagaccggaaccaa

SEQ ID NO: 1170344 - RNA, 20 nt, Human
caacccaggagcuuacucag

SEQ ID NO: 1170345 - RNA, 24 nt, Human
caacccaggagcuuacucagauac

SEQ ID NO: 1170346 - RNA, 21 nt, Human
caccccguuucacuccaccuu

SEQ ID NO: 1170347 - RNA, 21 nt, Human
cagaagaaaagugagucuaac

SEQ ID NO: 1170348 - RNA, 24 nt, Human
cagcacucucccuuaccacuuucc

SEQ ID NO: 1170349 - RNA, 19 nt, Human
caguaaagaccggaaccaa

SEQ ID NO: 1170350 - RNA, 20 nt, Human
caguaaagaccggaaccaag

SEQ ID NO: 1170351 - RNA, 21 nt, Human
cauauguauguauguguguau

SEQ ID NO: 1170352 - RNA, 23 nt, Human
caucaauaaacucgaaaggcucc

SEQ ID NO: 1170353 - RNA, 21 nt, Human
ccaccgccguccccacccccg

SEQ ID NO: 1170354 - RNA, 25 nt, Human
ccagcacucucccuuaccacuuucc

SEQ ID NO: 1170355 - RNA, 18 nt, Human
cccacccgaccccugccc

SEQ ID NO: 1170356 - RNA, 22 nt, Human
cccaucugcuucaacccaggag

SEQ ID NO: 1170357 - RNA, 26 nt, Human
ccccaaagcaccagaguuuuauuacu

SEQ ID NO: 1170358 - RNA, 21 nt, Human
cccccgcaccccguuucacuc

SEQ ID NO: 1170359 - RNA, 22 nt, Human
cccccgcaccccguuucacucc

SEQ ID NO: 1170360 - RNA, 18 nt, Human
ccccguucgcugugcugc

SEQ ID NO: 1170361 - RNA, 19 nt, Human
ccccuagcucuaccugaag

SEQ ID NO: 1170362 - RNA, 19 nt, Human
cccgaccccugcccucagc

SEQ ID NO: 1170363 - RNA, 21 nt, Human
cccgcaccccguuucacucca

SEQ ID NO: 1170364 - RNA, 19 nt, Human
cccuggcgaccagggagcu

SEQ ID NO: 1170365 - RNA, 20 nt, Human
ccgaaacuuuuggaccagca

SEQ ID NO: 1170366 - RNA, 21 nt, Human
ccguccccacccccgcacccc

SEQ ID NO: 1170367 - RNA, 24 nt, Human
ccguuucacuccaccuuggagggc

SEQ ID NO: 1170368 - RNA, 24 nt, Human
ccuauaaucuaaaauauaguuguc

SEQ ID NO: 1170369 - RNA, 20 nt, Human
cgaccccugcccucagcccc

SEQ ID NO: 1170370 - RNA, 22 nt, Human
cggaaccaaggcgugguacuag

SEQ ID NO: 1170371 - RNA, 18 nt, Human
cggcgggagggaagauug

SEQ ID NO: 1170372 - RNA, 20 nt, Human
cggcgggagggaagauugga

SEQ ID NO: 1170373 - RNA, 22 nt, Human
cuagaggaaguaugguaaacac

SEQ ID NO: 1170374 - RNA, 20 nt, Human
cucaugcuagaggugccucc

SEQ ID NO: 1170375 - RNA, 18 nt, Human
cucuggaguugcgcauac

SEQ ID NO: 1170376 - RNA, 18 nt, Human
cugcagaauccugagcca

SEQ ID NO: 1170377 - RNA, 18 nt, Human
cuuaaacucuagaggaag

SEQ ID NO: 1170378 - RNA, 24 nt, Human
cuucaaaguugccccaaagcacca

SEQ ID NO: 1170379 - RNA, 23 nt, Human
cuuccuuccaccgccguccccac

SEQ ID NO: 1170380 - RNA, 19 nt, Human
cuuuuguaaucugucccca

SEQ ID NO: 1170381 - RNA, 21 nt, Human
gccccggaucccuuuuaacuu

SEQ ID NO: 1170382 - RNA, 20 nt, Human
gcuuugaugucccaggagag

SEQ ID NO: 1170383 - RNA, 20 nt, Human
ggaaccaaggcgugguacua

SEQ ID NO: 1170384 - RNA, 20 nt, Human
guccaccacccaugcagagu

SEQ ID NO: 1170385 - RNA, 22 nt, Human
gugcgcgagcucgcaggcgcgu

SEQ ID NO: 1170386 - RNA, 20 nt, Human
guguacgugugugugcauau

SEQ ID NO: 1170387 - RNA, 20 nt, Human
guguacgugugugugcauau

SEQ ID NO: 1170388 - RNA, 21 nt, Human
gugugugcauauguauguaug

SEQ ID NO: 1170389 - RNA, 19 nt, Human
guuuuauuacucucuggag

SEQ ID NO: 1170390 - RNA, 23 nt, Human
guuuuauucaucuuuguguuccc

SEQ ID NO: 1170391 - RNA, 23 nt, Human
uaaacaccccaucugcuucaacc

SEQ ID NO: 1170392 - RNA, 20 nt, Human
uacaaguacgaaaaauggug

SEQ ID NO: 1170393 - RNA, 26 nt, Human
uagcaaaagcgauugaaagaagguac

SEQ ID NO: 1170394 - RNA, 21 nt, Human
uauagauuauacucacuuucc

SEQ ID NO: 1170395 - RNA, 25 nt, Human
uaucuuggagcucccagguccagag

SEQ ID NO: 1170396 - RNA, 19 nt, Human
uauguauauguguaugugc

SEQ ID NO: 1170397 - RNA, 25 nt, Human
uauguauauguguaugugcgcgagc

SEQ ID NO: 1170398 - RNA, 19 nt, Human
uauguauguauauguguau

SEQ ID NO: 1170399 - RNA, 21 nt, Human
uauguauguauauguguaugu

SEQ ID NO: 1170400 - RNA, 22 nt, Human
uauguauguauauguguaugug

SEQ ID NO: 1170401 - RNA, 23 nt, Human
uauguauguauauguguaugugc

SEQ ID NO: 1170402 - RNA, 23 nt, Human
uauguauguauguguguauguau

SEQ ID NO: 1170403 - RNA, 19 nt, Human
uauguauguguguauguau

SEQ ID NO: 1170404 - RNA, 23 nt, Human
uauguauguguguauguauguau

SEQ ID NO: 1170405 - RNA, 18 nt, Human
uauguguguauguaugua

SEQ ID NO: 1170406 - RNA, 18 nt, Human
ucccagguccagagagcu

SEQ ID NO: 1170407 - RNA, 18 nt, Human
uccccacccccgcacccc

SEQ ID NO: 1170408 - RNA, 19 nt, Human
uccccacccccgcaccccc

SEQ ID NO: 1170409 - RNA, 23 nt, Human
uccccacccccgcaccccguuuc

SEQ ID NO: 1170410 - RNA, 23 nt, Human
uccgcacacauugccugccccau

SEQ ID NO: 1170411 - RNA, 24 nt, Human
uccgcacacauugccugccccaua

SEQ ID NO: 1170412 - RNA, 22 nt, Human
uccuaaccaugcaucccucucc

SEQ ID NO: 1170413 - RNA, 20 nt, Human
ucguccaccacccaugcaga

SEQ ID NO: 1170414 - RNA, 18 nt, Human
ucuccgcacacauugccu

SEQ ID NO: 1170415 - RNA, 22 nt, Human
ucuuccgggcuucaaaaggcuu

SEQ ID NO: 1170416 - RNA, 24 nt, Human
ucuucuuccuuccaccgccguccc

SEQ ID NO: 1170417 - RNA, 28 nt, Human
ugaaaacaggagucuguguguccccuuc

SEQ ID NO: 1170418 - RNA, 22 nt, Human
ugaacaaucgaacacagaacuc

SEQ ID NO: 1170419 - RNA, 24 nt, Human
ugaagcuacuguucaaccugaagg

SEQ ID NO: 1170420 - RNA, 21 nt, Human
ugaguaauaaaagucuucuuc

SEQ ID NO: 1170421 - RNA, 25 nt, Human
ugaguaauaaaagucuucuuccuuc

SEQ ID NO: 1170422 - RNA, 25 nt, Human
ugaguacaccgaaacuuuuggacca

SEQ ID NO: 1170423 - RNA, 20 nt, Human
ugcaaagaggaaauucaaga

SEQ ID NO: 1170424 - RNA, 18 nt, Human
ugccagaagaaaagugag

SEQ ID NO: 1170425 - RNA, 19 nt, Human
ugccugccccauaaccauu

SEQ ID NO: 1170426 - RNA, 22 nt, Human
uggcgggaaccuuggguuuuua

SEQ ID NO: 1170427 - RNA, 19 nt, Human
uguacgugugugugcauau

SEQ ID NO: 1170428 - RNA, 23 nt, Human
uguacgugugugugcauauguau

SEQ ID NO: 1170429 - RNA, 19 nt, Human
uguauguauauguguaugu

SEQ ID NO: 1170430 - RNA, 19 nt, Human
uguauguauauguguaugu

SEQ ID NO: 1170431 - RNA, 19 nt, Human
uguauguauguauaugugu

SEQ ID NO: 1170432 - RNA, 19 nt, Human
uguauguauguguguaugu

SEQ ID NO: 1170433 - RNA, 19 nt, Human
uguauguauguguguaugu

SEQ ID NO: 1170434 - RNA, 18 nt, Human
uguauguguguauguaug

SEQ ID NO: 1170435 - RNA, 18 nt, Human
uguccccuucacccggaa

SEQ ID NO: 1170436 - RNA, 23 nt, Human
uguccccuucacccggaaacuca

SEQ ID NO: 1170437 - RNA, 21 nt, Human
ugucccugccacccaauacaa

SEQ ID NO: 1170438 - RNA, 24 nt, Human
ugucuacuguuuaaaaaucaaagu

SEQ ID NO: 1170439 - RNA, 19 nt, Human
ugugcauauguauguaugu

SEQ ID NO: 1170440 - RNA, 19 nt, Human
ugugcauauguauguaugu

SEQ ID NO: 1170441 - RNA, 22 nt, Human
ugugugauucugcguguacgug

SEQ ID NO: 1170442 - RNA, 18 nt, Human
ugugugcauauguaugua

SEQ ID NO: 1170443 - RNA, 19 nt, Human
ugugugcauauguauguau

SEQ ID NO: 1170444 - RNA, 19 nt, Human
ugugugcauauguauguau

SEQ ID NO: 1170445 - RNA, 27 nt, Human
ugugugcauauguauguauguguguau

SEQ ID NO: 1170446 - RNA, 19 nt, Human
uguguguauguauguauau

SEQ ID NO: 1170447 - RNA, 23 nt, Human
uguguguauguauguauaugugu

SEQ ID NO: 1170448 - RNA, 20 nt, Human
ugugugugcauauguaugua

SEQ ID NO: 1170449 - RNA, 26 nt, Human
uuacucuaucccugacagagagugau

SEQ ID NO: 1170450 - RNA, 22 nt, Human
uucaacuggagagaaacccugg

SEQ ID NO: 1170451 - RNA, 23 nt, Human
uucccaucuccgcacacauugcc

SEQ ID NO: 1170452 - RNA, 21 nt, Human
uuccuuccaccgccgucccca

SEQ ID NO: 1170453 - RNA, 21 nt, Human
uuguuuguuuguuuguuuuuu

SEQ ID NO: 1170454 - RNA, 18 nt, Human
uuuccugcagaauccuga

SEQ ID NO: 1170455 - RNA, 21 nt, Human
uuugaugucccaggagagugu

SEQ ID NO: 1170456 - RNA, 18 nt, Human
uuugcgugugagggugug

SEQ ID NO: 1170457 - RNA, 21 nt, Human
aagcucggagaguagcagcag

SEQ ID NO: 1170458 - RNA, 22 nt, Human
uagcagcagacaccgcagccuc

SEQ ID NO: 1170459 - RNA, 24 nt, Human
aaagugcugagauuacaggcauga

SEQ ID NO: 1170460 - RNA, 21 nt, Human
aagcaagaaaaaaaucuuccc

SEQ ID NO: 1170461 - RNA, 22 nt, Human
aagcaagaaaaaaaucuuccca

SEQ ID NO: 1170462 - RNA, 22 nt, Human
aagggauucuucuccugucuca

SEQ ID NO: 1170463 - RNA, 22 nt, Human
aaguagcugagauuacaggcau

SEQ ID NO: 1170464 - RNA, 24 nt, Human
aaguagcugagauuacaggcauga

SEQ ID NO: 1170465 - RNA, 26 nt, Human
aagugcugagauuacaggcaugagcc

SEQ ID NO: 1170466 - RNA, 19 nt, Human
aauaccugauaaacuacaa

SEQ ID NO: 1170467 - RNA, 24 nt, Human
aaucuuacucuuucucacucuuac

SEQ ID NO: 1170468 - RNA, 23 nt, Human
acaaccucugccucccuagguuc

SEQ ID NO: 1170469 - RNA, 24 nt, Human
accauguuggccaggguggucucg

SEQ ID NO: 1170470 - RNA, 18 nt, Human
acgggguuucaccauguu

SEQ ID NO: 1170471 - RNA, 23 nt, Human
acgggguuucaccauguuggcca

SEQ ID NO: 1170472 - RNA, 24 nt, Human
acgggguuucaccauguuggccag

SEQ ID NO: 1170473 - RNA, 19 nt, Human
agauuacaggcaugagcca

SEQ ID NO: 1170474 - RNA, 19 nt, Human
agauuacaggcaugagcca

SEQ ID NO: 1170475 - RNA, 21 nt, Human
agauuacaggcaugagccacc

SEQ ID NO: 1170476 - RNA, 22 nt, Human
agauuacaggcaugagccacca

SEQ ID NO: 1170477 - RNA, 21 nt, Human
aguagaaacuagcacacugag

SEQ ID NO: 1170478 - RNA, 25 nt, Human
aguagcugagauuacaggcaugagc

SEQ ID NO: 1170479 - RNA, 20 nt, Human
agugcaguggcacgaucuug

SEQ ID NO: 1170480 - RNA, 23 nt, Human
agugcaguggcacgaucuuggcu

SEQ ID NO: 1170481 - RNA, 24 nt, Human
agugcaguggcacgaucuuggcuc

SEQ ID NO: 1170482 - RNA, 19 nt, Human
auauacccauauauauaua

SEQ ID NO: 1170483 - RNA, 18 nt, Human
auucuucuccugucucag

SEQ ID NO: 1170484 - RNA, 24 nt, Human
caaagugcugagauuacaggcaug

SEQ ID NO: 1170485 - RNA, 24 nt, Human
caacacacuccccugccacgcuaa

SEQ ID NO: 1170486 - RNA, 24 nt, Human
caagauaucucuuuaauauucucu

SEQ ID NO: 1170487 - RNA, 20 nt, Human
cacaggagggauauggaugg

SEQ ID NO: 1170488 - RNA, 23 nt, Human
cacaugucuaaagccaaaguucc

SEQ ID NO: 1170489 - RNA, 24 nt, Human
caccacacucggcuaauuuuugua

SEQ ID NO: 1170490 - RNA, 18 nt, Human
caccauguuggccagggu

SEQ ID NO: 1170491 - RNA, 22 nt, Human
caccauguuggccagggugguc

SEQ ID NO: 1170492 - RNA, 24 nt, Human
caccauguuggccaggguggucuc

SEQ ID NO: 1170493 - RNA, 24 nt, Human
cagaaccuuggagcacaggaggga

SEQ ID NO: 1170494 - RNA, 25 nt, Human
cagcaauauacacaaaauuaaucuu

SEQ ID NO: 1170495 - RNA, 19 nt, Human
cagcacaacaccacugcuu

SEQ ID NO: 1170496 - RNA, 23 nt, Human
cagcgaaucacucccuucuguuu

SEQ ID NO: 1170497 - RNA, 19 nt, Human
caguggcacgaucuuggcu

SEQ ID NO: 1170498 - RNA, 26 nt, Human
ccaaaagcaagaaaaaaaucuuccca

SEQ ID NO: 1170499 - RNA, 23 nt, Human
ccaaagugcugagauuacaggca

SEQ ID NO: 1170500 - RNA, 24 nt, Human
ccaaagugcugagauuacaggcau

SEQ ID NO: 1170501 - RNA, 22 nt, Human
ccaacuuucuuuccucucccuc

SEQ ID NO: 1170502 - RNA, 23 nt, Human
ccaaguagcugagauuacaggca

SEQ ID NO: 1170503 - RNA, 24 nt, Human
ccaaguagcugagauuacaggcau

SEQ ID NO: 1170504 - RNA, 21 nt, Human
ccacuuucuccucuuuguucc

SEQ ID NO: 1170505 - RNA, 18 nt, Human
ccagucccuuuuucccuc

SEQ ID NO: 1170506 - RNA, 21 nt, Human
ccaucuccccuugguugauuc

SEQ ID NO: 1170507 - RNA, 18 nt, Human
ccaugaaggcaaagauaa

SEQ ID NO: 1170508 - RNA, 23 nt, Human
ccccaaauccaaaagcaagaaaa

SEQ ID NO: 1170509 - RNA, 20 nt, Human
ccccugacuucgugcccugc

SEQ ID NO: 1170510 - RNA, 23 nt, Human
ccccugccacgcuaacaucaccc

SEQ ID NO: 1170511 - RNA, 20 nt, Human
cccgcccggccucccaaagu

SEQ ID NO: 1170512 - RNA, 20 nt, Human
cccuagguucaagggauucu

SEQ ID NO: 1170513 - RNA, 27 nt, Human
cccuagguucaagggauucuucuccug

SEQ ID NO: 1170514 - RNA, 18 nt, Human
cccuaucaucucuuaaaa

SEQ ID NO: 1170515 - RNA, 19 nt, Human
cccuuuuucccucauuguc

SEQ ID NO: 1170516 - RNA, 23 nt, Human
ccgcccggccucccaaagugcug

SEQ ID NO: 1170517 - RNA, 18 nt, Human
ccuagguucaagggauuc

SEQ ID NO: 1170518 - RNA, 21 nt, Human
ccuaucaucucuuaaaacuuc

SEQ ID NO: 1170519 - RNA, 23 nt, Human
ccucaacacacuccccugccacg

SEQ ID NO: 1170520 - RNA, 22 nt, Human
ccucagugccucaacacacucc

SEQ ID NO: 1170521 - RNA, 19 nt, Human
ccucccucuucuucacucc

SEQ ID NO: 1170522 - RNA, 25 nt, Human
ccuugguugauucucucuucucugg

SEQ ID NO: 1170523 - RNA, 24 nt, Human
cgggguuucaccauguuggccagg

SEQ ID NO: 1170524 - RNA, 20 nt, Human
cuaauuuuuguauuuuuaga

SEQ ID NO: 1170525 - RNA, 25 nt, Human
cuacaaccucugccucccuagguuc

SEQ ID NO: 1170526 - RNA, 24 nt, Human
cuccaugaaggcaaagauaagggc

SEQ ID NO: 1170527 - RNA, 21 nt, Human
cucccaaagugcugagauuac

SEQ ID NO: 1170528 - RNA, 25 nt, Human
cucccucuucuucacuccucacaug

SEQ ID NO: 1170529 - RNA, 19 nt, Human
cucgugaaacauuuucccc

SEQ ID NO: 1170530 - RNA, 24 nt, Human
cucucugucacccaggcuagagug

SEQ ID NO: 1170531 - RNA, 23 nt, Human
cucugucacccaggcuagagugc

SEQ ID NO: 1170532 - RNA, 19 nt, Human
cugcagcauucaucacagc

SEQ ID NO: 1170533 - RNA, 24 nt, Human
cuuagccccaaauccaaaagcaag

SEQ ID NO: 1170534 - RNA, 21 nt, Human
cuucagaaccuuggagcacag

SEQ ID NO: 1170535 - RNA, 20 nt, Human
cuuuauaacucauaaggcug

SEQ ID NO: 1170536 - RNA, 24 nt, Human
gaaaaaaaucuucccaauaaugag

SEQ ID NO: 1170537 - RNA, 23 nt, Human
gaauguuauuacuaaggccaaga

SEQ ID NO: 1170538 - RNA, 21 nt, Human
gagacggagucucucucuguc

SEQ ID NO: 1170539 - RNA, 21 nt, Human
gagcagcaggcuauaaacagg

SEQ ID NO: 1170540 - RNA, 18 nt, Human
gauuacaggcaugagcca

SEQ ID NO: 1170541 - RNA, 18 nt, Human
gauuacaggcaugagcca

SEQ ID NO: 1170542 - RNA, 22 nt, Human
gauuacaggcaugagccaccac

SEQ ID NO: 1170543 - RNA, 24 nt, Human
gauuacaggcaugagccaccucgc

SEQ ID NO: 1170544 - RNA, 24 nt, Human
gcauucaucacagcgaaucacucc

SEQ ID NO: 1170545 - RNA, 19 nt, Human
gcuagagugcaguggcacg

SEQ ID NO: 1170546 - RNA, 21 nt, Human
gcucacuacaaccucugccuc

SEQ ID NO: 1170547 - RNA, 20 nt, Human
gggaaagaauauaagauucc

SEQ ID NO: 1170548 - RNA, 23 nt, Human
gggguuucaccauguuggccagg

SEQ ID NO: 1170549 - RNA, 23 nt, Human
gguggucucgaacuccugaccuc

SEQ ID NO: 1170550 - RNA, 18 nt, Human
gguugauucucucuucuc

SEQ ID NO: 1170551 - RNA, 21 nt, Human
guauauuuauauauauaccca

SEQ ID NO: 1170552 - RNA, 18 nt, Human
guuggccaggguggucuc

SEQ ID NO: 1170553 - RNA, 25 nt, Human
uaaaauuugggaaagaauauaagau

SEQ ID NO: 1170554 - RNA, 24 nt, Human
uaauuuuuguauuuuuaguacaga

SEQ ID NO: 1170555 - RNA, 22 nt, Human
uacagacgggguuucaccaugu

SEQ ID NO: 1170556 - RNA, 21 nt, Human
uacaggcaugagccaccacac

SEQ ID NO: 1170557 - RNA, 23 nt, Human
uagagugcaguggcacgaucuug

SEQ ID NO: 1170558 - RNA, 24 nt, Human
uagagugcaguggcacgaucuugg

SEQ ID NO: 1170559 - RNA, 22 nt, Human
uaggagaaugaaaaauguaaga

SEQ ID NO: 1170560 - RNA, 24 nt, Human
uaguacagacgggguuucaccaug

SEQ ID NO: 1170561 - RNA, 18 nt, Human
uauaaaauuugggaaaga

SEQ ID NO: 1170562 - RNA, 19 nt, Human
uauacccauauauauauau

SEQ ID NO: 1170563 - RNA, 19 nt, Human
uauacccauauauauauau

SEQ ID NO: 1170564 - RNA, 20 nt, Human
uauagcaaaacuucuuuaaa

SEQ ID NO: 1170565 - RNA, 20 nt, Human
uauauauacccauauauaua

SEQ ID NO: 1170566 - RNA, 22 nt, Human
uauauauauacccauauauaua

SEQ ID NO: 1170567 - RNA, 20 nt, Human
uaucuagaacuccaggcuuc

SEQ ID NO: 1170568 - RNA, 23 nt, Human
uauucucuccccucagugccuca

SEQ ID NO: 1170569 - RNA, 24 nt, Human
uauuuggccucugcagcauucauc

SEQ ID NO: 1170570 - RNA, 19 nt, Human
ucacagcgaaucacucccu

SEQ ID NO: 1170571 - RNA, 24 nt, Human
ucaccauguuggccaggguggucu

SEQ ID NO: 1170572 - RNA, 18 nt, Human
ucacuacaaccucugccu

SEQ ID NO: 1170573 - RNA, 19 nt, Human
ucacuacaaccucugccuc

SEQ ID NO: 1170574 - RNA, 25 nt, Human
ucacuacaaccucugccucccuagg

SEQ ID NO: 1170575 - RNA, 23 nt, Human
ucacucuuacuccaacuuucuuu

SEQ ID NO: 1170576 - RNA, 22 nt, Human
ucagugccucaacacacucccc

SEQ ID NO: 1170577 - RNA, 20 nt, Human
uccaacuuucuuuccucucc

SEQ ID NO: 1170578 - RNA, 22 nt, Human
uccacuuucuccucuuuguucc

SEQ ID NO: 1170579 - RNA, 24 nt, Human
ucccaaagugcugagauuacaggc

SEQ ID NO: 1170580 - RNA, 19 nt, Human
uccccugccacgcuaacau

SEQ ID NO: 1170581 - RNA, 25 nt, Human
uccccugccacgcuaacaucacccc

SEQ ID NO: 1170582 - RNA, 21 nt, Human
uccccuugguugauucucucu

SEQ ID NO: 1170583 - RNA, 19 nt, Human
ucccucucugucacacucu

SEQ ID NO: 1170584 - RNA, 20 nt, Human
uccucccucuucuucacucc

SEQ ID NO: 1170585 - RNA, 18 nt, Human
ucgaagauaaaaucaaaa

SEQ ID NO: 1170586 - RNA, 25 nt, Human
ucgaagauaaaaucaaaaggucuau

SEQ ID NO: 1170587 - RNA, 22 nt, Human
ucuaagaucacucuaaugucca

SEQ ID NO: 1170588 - RNA, 19 nt, Human
ucucgaacuccugaccucg

SEQ ID NO: 1170589 - RNA, 24 nt, Human
ucucucucugucacccaggcuaga

SEQ ID NO: 1170590 - RNA, 24 nt, Human
ucucucugucacccaggcuagagu

SEQ ID NO: 1170591 - RNA, 24 nt, Human
ucugucacccaggcuagagugcag

SEQ ID NO: 1170592 - RNA, 23 nt, Human
ucuuaaaacuucucagucuaaga

SEQ ID NO: 1170593 - RNA, 18 nt, Human
ugaacaaguuuugacagu

SEQ ID NO: 1170594 - RNA, 19 nt, Human
ugacuucugggaccaucuc

SEQ ID NO: 1170595 - RNA, 21 nt, Human
ugacuucugggaccaucuccc

SEQ ID NO: 1170596 - RNA, 21 nt, Human
ugagagcaaaagaugucacaa

SEQ ID NO: 1170597 - RNA, 22 nt, Human
ugagagcaaaagaugucacaaa

SEQ ID NO: 1170598 - RNA, 21 nt, Human
ugagauuacaggcaugagcca

SEQ ID NO: 1170599 - RNA, 22 nt, Human
ugagauuacaggcaugagccac

SEQ ID NO: 1170600 - RNA, 22 nt, Human
ugagauuacaggcaugagccac

SEQ ID NO: 1170601 - RNA, 23 nt, Human
ugagauuacaggcaugagccacc

SEQ ID NO: 1170602 - RNA, 23 nt, Human
ugagauuacaggcaugagccacc

SEQ ID NO: 1170603 - RNA, 24 nt, Human
ugagauuacaggcaugagccacca

SEQ ID NO: 1170604 - RNA, 24 nt, Human
ugagauuacaggcaugagccacca

SEQ ID NO: 1170605 - RNA, 26 nt, Human
ugagauuacaggcaugagccaccucg

SEQ ID NO: 1170606 - RNA, 27 nt, Human
ugagauuacaggcaugagccaccucgc

SEQ ID NO: 1170607 - RNA, 22 nt, Human
ugcaguggcacgaucuuggcuc

SEQ ID NO: 1170608 - RNA, 19 nt, Human
ugccacgcuaacaucaccc

SEQ ID NO: 1170609 - RNA, 24 nt, Human
ugccucaacacacuccccugccac

SEQ ID NO: 1170610 - RNA, 24 nt, Human
uggcacgaucuuggcucacuacaa

SEQ ID NO: 1170611 - RNA, 24 nt, Human
uggccaggguggucucgaacuccu

SEQ ID NO: 1170612 - RNA, 20 nt, Human
uggcuaauuuuaccccacug

SEQ ID NO: 1170613 - RNA, 21 nt, Human
uggcuuuauaacucauaaggc

SEQ ID NO: 1170614 - RNA, 21 nt, Human
uguauuuuuaguacagacggg

SEQ ID NO: 1170615 - RNA, 19 nt, Human
uguccaggacaaaaucaac

SEQ ID NO: 1170616 - RNA, 24 nt, Human
uuaguacagacgggguuucaccau

SEQ ID NO: 1170617 - RNA, 19 nt, Human
uuccccccgcccggccucc

SEQ ID NO: 1170618 - RNA, 23 nt, Human
uuccccccgcccggccucccaaa

SEQ ID NO: 1170619 - RNA, 22 nt, Human
uucuccccuguuacucuucaaa

SEQ ID NO: 1170620 - RNA, 24 nt, Human
uucugccuacccuguuuuaggaga

SEQ ID NO: 1170621 - RNA, 19 nt, Human
uugcuaucuauuaaucuua

SEQ ID NO: 1170622 - RNA, 18 nt, Human
uugcuugcuccuaucaca

SEQ ID NO: 1170623 - RNA, 23 nt, Human
uuguauuuuuaguacagacgggg

SEQ ID NO: 1170624 - RNA, 19 nt, Human
uuucaccauguuggccagg

SEQ ID NO: 1170625 - RNA, 24 nt, Human
uuuuuaguacagacgggguuucac

SEQ ID NO: 1170626 - RNA, 20 nt, Human
uuuuuguauuuuuaguacag

SEQ ID NO: 1170627 - RNA, 23 nt, Human
uuuuuguauuuuuaguacagacg

SEQ ID NO: 1170628 - RNA, 24 nt, Human
aaaaguacuaacauuucguaacuc

SEQ ID NO: 1170629 - RNA, 25 nt, Human
aaacagaagcagaaaagaaaacugc

SEQ ID NO: 1170630 - RNA, 25 nt, Human
aaacagaagcagaaaagaagggacc

SEQ ID NO: 1170631 - RNA, 18 nt, Human
aaagugcugggauuacaa

SEQ ID NO: 1170632 - RNA, 23 nt, Human
aaagugcugggauuacaagcaug

SEQ ID NO: 1170633 - RNA, 24 nt, Human
aaagugcugggauuacaagcauga

SEQ ID NO: 1170634 - RNA, 23 nt, Human
aacaccucugccuccgaccaucc

SEQ ID NO: 1170635 - RNA, 21 nt, Human
aacauagaaaaaguacuaaca

SEQ ID NO: 1170636 - RNA, 23 nt, Human
aacauagaaaaaguacuaacauu

SEQ ID NO: 1170637 - RNA, 23 nt, Human
aagcagaaaagaaaacugcauua

SEQ ID NO: 1170638 - RNA, 24 nt, Human
aagcagaaaagaaaacugcauuag

SEQ ID NO: 1170639 - RNA, 27 nt, Human
aagcagaaaagaaaacugcauuagcca

SEQ ID NO: 1170640 - RNA, 22 nt, Human
aagcggcagagccggguuccca

SEQ ID NO: 1170641 - RNA, 19 nt, Human
aagugcugggauuacaagc

SEQ ID NO: 1170642 - RNA, 21 nt, Human
aagugcugggauuacaagcau

SEQ ID NO: 1170643 - RNA, 26 nt, Human
aagugcugggauuacaagcaugagcc

SEQ ID NO: 1170644 - RNA, 21 nt, Human
aauaccuucuugguagaagca

SEQ ID NO: 1170645 - RNA, 22 nt, Human
acaaaaaugucauaacugacaa

SEQ ID NO: 1170646 - RNA, 26 nt, Human
acaaagcaugcuucaaacaaauacaa

SEQ ID NO: 1170647 - RNA, 25 nt, Human
acaaagccucaugaaacuuaauacc

SEQ ID NO: 1170648 - RNA, 20 nt, Human
acagagucccccuccaauca

SEQ ID NO: 1170649 - RNA, 22 nt, Human
acagagucccccuccaaucaag

SEQ ID NO: 1170650 - RNA, 20 nt, Human
acaguaacagagcugccacc

SEQ ID NO: 1170651 - RNA, 19 nt, Human
accacuuuaccuuuuuguu

SEQ ID NO: 1170652 - RNA, 21 nt, Human
accucugccuccgaccauccc

SEQ ID NO: 1170653 - RNA, 21 nt, Human
acugagcacagagucccccuc

SEQ ID NO: 1170654 - RNA, 20 nt, Human
agacacaaagauuuuauaaa

SEQ ID NO: 1170655 - RNA, 23 nt, Human
agacagggucucccuguguugcc

SEQ ID NO: 1170656 - RNA, 19 nt, Human
agcuauugauauuuaaaga

SEQ ID NO: 1170657 - RNA, 20 nt, Human
agcuauugauauuuaaagaa

SEQ ID NO: 1170658 - RNA, 24 nt, Human
agugcugggauuacaagcaugagc

SEQ ID NO: 1170659 - RNA, 21 nt, Human
auaaaucugugaaauccagaa

SEQ ID NO: 1170660 - RNA, 23 nt, Human
auauaaaacaaagcaugcuucaa

SEQ ID NO: 1170661 - RNA, 18 nt, Human
aucaagcacugugccagg

SEQ ID NO: 1170662 - RNA, 21 nt, Human
auuacaagcaugagccaccau

SEQ ID NO: 1170663 - RNA, 22 nt, Human
caaaaagauuauaucaauaaua

SEQ ID NO: 1170664 - RNA, 24 nt, Human
caaacuccaggccucaauucuccu

SEQ ID NO: 1170665 - RNA, 23 nt, Human
caccaccuagaaagcgguccuaa

SEQ ID NO: 1170666 - RNA, 21 nt, Human
caccuagaaagcgguccuaag

SEQ ID NO: 1170667 - RNA, 21 nt, Human
caccucugccuccgaccaucc

SEQ ID NO: 1170668 - RNA, 25 nt, Human
cacucuuguccucaccaccuagaaa

SEQ ID NO: 1170669 - RNA, 20 nt, Human
cacugugccaggggcucccc

SEQ ID NO: 1170670 - RNA, 21 nt, Human
cagaacaaagaauuuuccuau

SEQ ID NO: 1170671 - RNA, 20 nt, Human
cagagucccccuccaaucaa

SEQ ID NO: 1170672 - RNA, 24 nt, Human
cagggucucccuguguugcccagg

SEQ ID NO: 1170673 - RNA, 19 nt, Human
caugagccaccaugcccca

SEQ ID NO: 1170674 - RNA, 25 nt, Human
ccaccugaaguacuaaaacagccau

SEQ ID NO: 1170675 - RNA, 24 nt, Human
cccagacauaacguuaguccaaag

SEQ ID NO: 1170676 - RNA, 24 nt, Human
ccgaucacuggaaacaccucugcc

SEQ ID NO: 1170677 - RNA, 21 nt, Human
ccuaagccgaucacuggaaac

SEQ ID NO: 1170678 - RNA, 19 nt, Human
ccuccaaucaagcacugug

SEQ ID NO: 1170679 - RNA, 19 nt, Human
ccucugccuccgaccaucc

SEQ ID NO: 1170680 - RNA, 19 nt, Human
ccuguguugcccaggcuag

SEQ ID NO: 1170681 - RNA, 22 nt, Human
ccuucuugguagaagcaggaau

SEQ ID NO: 1170682 - RNA, 21 nt, Human
cgaauuccaccugaaguacua

SEQ ID NO: 1170683 - RNA, 18 nt, Human
cgggaggugcauguuacu

SEQ ID NO: 1170684 - RNA, 24 nt, Human
cuaaaacauuuuaagugccaucaa

SEQ ID NO: 1170685 - RNA, 19 nt, Human
cuggaaacaccucugccuc

SEQ ID NO: 1170686 - RNA, 22 nt, Human
cuguagagacagggucucccug

SEQ ID NO: 1170687 - RNA, 21 nt, Human
cuuguccucaccaccuagaaa

SEQ ID NO: 1170688 - RNA, 23 nt, Human
cuuucugcuuccaguucugaaga

SEQ ID NO: 1170689 - RNA, 19 nt, Human
gacagggucucccuguguu

SEQ ID NO: 1170690 - RNA, 18 nt, Human
gaccucugaaagugcugg

SEQ ID NO: 1170691 - RNA, 19 nt, Human
gagccaccaugccccaccu

SEQ ID NO: 1170692 - RNA, 19 nt, Human
gagccggguucccacccag

SEQ ID NO: 1170693 - RNA, 18 nt, Human
gauuacaagcaugagcca

SEQ ID NO: 1170694 - RNA, 24 nt, Human
gauuacaagcaugagccaccaugc

SEQ ID NO: 1170695 - RNA, 19 nt, Human
gcaugagccaccaugcccc

SEQ ID NO: 1170696 - RNA, 21 nt, Human
gcggcuaggaagcggcagagc

SEQ ID NO: 1170697 - RNA, 24 nt, Human
ggauuacaagcaugagccaccaug

SEQ ID NO: 1170698 - RNA, 23 nt, Human
ggcaaacagaagcagaaaagaaa

SEQ ID NO: 1170699 - RNA, 23 nt, Human
guuaaacauagaaaaaguacuaa

SEQ ID NO: 1170700 - RNA, 22 nt, Human
uaagccgaucacuggaaacacc

SEQ ID NO: 1170701 - RNA, 18 nt, Human
uagaaaaaguacuaacau

SEQ ID NO: 1170702 - RNA, 22 nt, Human
uagagacagggucucccugugu

SEQ ID NO: 1170703 - RNA, 23 nt, Human
uaggccaacacauauauuaaaua

SEQ ID NO: 1170704 - RNA, 19 nt, Human
uagucacucucucccuggu

SEQ ID NO: 1170705 - RNA, 23 nt, Human
uauaaaacaaagcaugcuucaaa

SEQ ID NO: 1170706 - RNA, 19 nt, Human
uauuuuaaagcuggcuuau

SEQ ID NO: 1170707 - RNA, 20 nt, Human
ucaagcacugugccaggggc

SEQ ID NO: 1170708 - RNA, 26 nt, Human
ucacuggaaacaccucugccuccgac

SEQ ID NO: 1170709 - RNA, 18 nt, Human
uccaguucugaagaugaa

SEQ ID NO: 1170710 - RNA, 22 nt, Human
uccccagacauaacguuagucc

SEQ ID NO: 1170711 - RNA, 19 nt, Human
uccucgacuccgaaaccac

SEQ ID NO: 1170712 - RNA, 24 nt, Human
ucuaacauuaacuuauuuaaauaa

SEQ ID NO: 1170713 - RNA, 19 nt, Human
ucucccuguguugcccagg

SEQ ID NO: 1170714 - RNA, 24 nt, Human
ucugaaagugcugggauuacaagc

SEQ ID NO: 1170715 - RNA, 23 nt, Human
ucuguagagacagggucucccug

SEQ ID NO: 1170716 - RNA, 23 nt, Human
ucuguagagacagggucucccug

SEQ ID NO: 1170717 - RNA, 19 nt, Human
ucuuugaaauguuuucagu

SEQ ID NO: 1170718 - RNA, 21 nt, Human
ugaaagacacaaagauuuuau

SEQ ID NO: 1170719 - RNA, 19 nt, Human
ugaaagugcugggauuaca

SEQ ID NO: 1170720 - RNA, 24 nt, Human
ugaaagugcugggauuacaagcau

SEQ ID NO: 1170721 - RNA, 21 nt, Human
ugaaggaaaauuuggaauugc

SEQ ID NO: 1170722 - RNA, 24 nt, Human
ugagcacagagucccccuccaauc

SEQ ID NO: 1170723 - RNA, 19 nt, Human
ugauauuuaaagaaugugg

SEQ ID NO: 1170724 - RNA, 23 nt, Human
ugccaggggcuccccagacauaa

SEQ ID NO: 1170725 - RNA, 25 nt, Human
ugcugggauuacaagcaugagccac

SEQ ID NO: 1170726 - RNA, 21 nt, Human
uggaaacaccucugccuccga

SEQ ID NO: 1170727 - RNA, 22 nt, Human
ugggauuacaagcaugagccac

SEQ ID NO: 1170728 - RNA, 23 nt, Human
ugggauuacaagcaugagccacc

SEQ ID NO: 1170729 - RNA, 24 nt, Human
ugggauuacaagcaugagccacca

SEQ ID NO: 1170730 - RNA, 22 nt, Human
uguagagacagggucucccugu

SEQ ID NO: 1170731 - RNA, 23 nt, Human
uguguugcccaggcuagugucaa

SEQ ID NO: 1170732 - RNA, 24 nt, Human
uguguugcccaggcuagugucaaa

SEQ ID NO: 1170733 - RNA, 24 nt, Human
uuaaacauagaaaaaguacuaaca

SEQ ID NO: 1170734 - RNA, 24 nt, Human
uucacaauauagcacaauaaucaa

SEQ ID NO: 1170735 - RNA, 23 nt, Human
uuccaguucugaagaugaaaagg

SEQ ID NO: 1170736 - RNA, 23 nt, Human
uucguaacucuaaacaaaaacca

SEQ ID NO: 1170737 - RNA, 25 nt, Human
uugaggcaaacagaagcagaaaaga

SEQ ID NO: 1170738 - RNA, 23 nt, Human
aaacagacaaaucaaguugaagg

SEQ ID NO: 1170739 - RNA, 18 nt, Human
aaugcaguuuuggacuga

SEQ ID NO: 1170740 - RNA, 27 nt, Human
aggcauuuucagucuaauuagucucua

SEQ ID NO: 1170741 - RNA, 20 nt, Human
caacaggaauuuuaaagguc

SEQ ID NO: 1170742 - RNA, 19 nt, Human
caacaguaacucuuacaau

SEQ ID NO: 1170743 - RNA, 23 nt, Human
cagaaaaugcaacaguaacucuu

SEQ ID NO: 1170744 - RNA, 23 nt, Human
ccccaaagauauugcuuaacuuc

SEQ ID NO: 1170745 - RNA, 19 nt, Human
cuuguaaacacaaagaaac

SEQ ID NO: 1170746 - RNA, 23 nt, Human
gagaaaaaguucaguccuuuccu

SEQ ID NO: 1170747 - RNA, 19 nt, Human
uaaugcaguuuuggacuga

SEQ ID NO: 1170748 - RNA, 23 nt, Human
uaggucagaaaaugcaacaguaa

SEQ ID NO: 1170749 - RNA, 27 nt, Human
uauccuguuguucaacuggcuuuugau

SEQ ID NO: 1170750 - RNA, 20 nt, Human
uccuuguaaacacaaagaaa

SEQ ID NO: 1170751 - RNA, 21 nt, Human
ugaaaauaaauuaguuccccc

SEQ ID NO: 1170752 - RNA, 28 nt, Human
ugcaacaguaacucuuacaauucuuuuc

SEQ ID NO: 1170753 - RNA, 18 nt, Human
uggggaaaaaagcuaguu

SEQ ID NO: 1170754 - RNA, 22 nt, Human
uguaaacacaaagaaacucaac

SEQ ID NO: 1170755 - RNA, 23 nt, Human
uguaaacacaaagaaacucaaca

SEQ ID NO: 1170756 - RNA, 25 nt, Human
uugguacuuaagucaugaauugugg

SEQ ID NO: 1170757 - RNA, 20 nt, Human
ucagauauucaacucuugcu

SEQ ID NO: 1170758 - RNA, 23 nt, Human
ucuugcuaguuuaaucugucuug

SEQ ID NO: 1170759 - RNA, 22 nt, Human
ugagugagucacuggaccaaaa

SEQ ID NO: 1170760 - RNA, 19 nt, Human
ugcuucuuuuuguagccuc

SEQ ID NO: 1170761 - RNA, 24 nt, Human
uugguccuaacuuuaaucuaugcu

SEQ ID NO: 1170762 - RNA, 22 nt, Human
aaacacaauccaguaugacugc

SEQ ID NO: 1170763 - RNA, 21 nt, Human
aaaccuguauuccagaaacug

SEQ ID NO: 1170764 - RNA, 18 nt, Human
aagaagugauucucaaaa

SEQ ID NO: 1170765 - RNA, 21 nt, Human
aagcaggcucccagaggaggg

SEQ ID NO: 1170766 - RNA, 23 nt, Human
aagggguacuuguacaccuggug

SEQ ID NO: 1170767 - RNA, 19 nt, Human
aauaaaaaaguagacaugg

SEQ ID NO: 1170768 - RNA, 18 nt, Human
acaggaggcagauggcca

SEQ ID NO: 1170769 - RNA, 22 nt, Human
agaggaggguaucauuuuaugu

SEQ ID NO: 1170770 - RNA, 22 nt, Human
agcaggcucccagaggagggua

SEQ ID NO: 1170771 - RNA, 23 nt, Human
agggugcuauccuagagaagcug

SEQ ID NO: 1170772 - RNA, 19 nt, Human
caccuuuucaaacacaauc

SEQ ID NO: 1170773 - RNA, 24 nt, Human
cacgccuccgcgagcucagagcug

SEQ ID NO: 1170774 - RNA, 20 nt, Human
cacuauucgaagcaggcucc

SEQ ID NO: 1170775 - RNA, 23 nt, Human
caguaugacugcagaauugaucc

SEQ ID NO: 1170776 - RNA, 26 nt, Human
ccaugcgcaugaucucauucaguccu

SEQ ID NO: 1170777 - RNA, 26 nt, Human
cccacuauucgaagcaggcucccaga

SEQ ID NO: 1170778 - RNA, 23 nt, Human
cccaucaaagacuuaacugagca

SEQ ID NO: 1170779 - RNA, 22 nt, Human
ccccgcgcgccgcgggccccgc

SEQ ID NO: 1170780 - RNA, 18 nt, Human
cggagaaagcuggcgacc

SEQ ID NO: 1170781 - RNA, 19 nt, Human
cuggcaagaaggucuucuc

SEQ ID NO: 1170782 - RNA, 18 nt, Human
cuggugcacauccaccga

SEQ ID NO: 1170783 - RNA, 25 nt, Human
gacccccauccccgcgcgccgcggg

SEQ ID NO: 1170784 - RNA, 18 nt, Human
gagcucagagcugcccag

SEQ ID NO: 1170785 - RNA, 19 nt, Human
gagcugcccagggcuccgc

SEQ ID NO: 1170786 - RNA, 21 nt, Human
gcccagggcuccgcagaggcc

SEQ ID NO: 1170787 - RNA, 26 nt, Human
gggaagacaggaggcagauggccagg

SEQ ID NO: 1170788 - RNA, 19 nt, Human
gggguugggguacugggaa

SEQ ID NO: 1170789 - RNA, 25 nt, Human
ggguugggguacugggaagacagga

SEQ ID NO: 1170790 - RNA, 21 nt, Human
uccaccgagacccccaucccc

SEQ ID NO: 1170791 - RNA, 22 nt, Human
uccaccgagacccccauccccg

SEQ ID NO: 1170792 - RNA, 20 nt, Human
uccccgcgcgccgcgggccc

SEQ ID NO: 1170793 - RNA, 22 nt, Human
uccccgcgcgccgcgggccccg

SEQ ID NO: 1170794 - RNA, 21 nt, Human
ucuuaucucccugagucccac

SEQ ID NO: 1170795 - RNA, 23 nt, Human
ugacugcagaauugaucaagcug

SEQ ID NO: 1170796 - RNA, 18 nt, Human
ugcacauccaccgagacc

SEQ ID NO: 1170797 - RNA, 22 nt, Human
ugcccagggcuccgcagaggcc

SEQ ID NO: 1170798 - RNA, 20 nt, Human
ugcucgaagggguacuuguu

SEQ ID NO: 1170799 - RNA, 19 nt, Human
ugggaagacaggaggcaga

SEQ ID NO: 1170800 - RNA, 20 nt, Human
ugucauaaaaauccagcaag

SEQ ID NO: 1170801 - RNA, 19 nt, Human
ugugaugugcuguggccaa

SEQ ID NO: 1170802 - RNA, 20 nt, Human
ugugcuguggccaagaagug

SEQ ID NO: 1170803 - RNA, 26 nt, Human
uucaaacacaauccaguaugacugca

SEQ ID NO: 1170804 - RNA, 26 nt, Human
uuccagaaacugugucuuccuggugg

SEQ ID NO: 1170805 - RNA, 24 nt, Human
uugugucauaaaaauccagcaaga

SEQ ID NO: 1170806 - RNA, 21 nt, Human
aaagaauggcaggaugcccuc

SEQ ID NO: 1170807 - RNA, 26 nt, Human
aagagacccuuguccuaaagucccag

SEQ ID NO: 1170808 - RNA, 18 nt, Human
aaguauccaccucacacc

SEQ ID NO: 1170809 - RNA, 24 nt, Human
accauagaaauucuacacaguaac

SEQ ID NO: 1170810 - RNA, 25 nt, Human
accaugguggggcugcgucugaggg

SEQ ID NO: 1170811 - RNA, 21 nt, Human
acgggggcagagcuggucucu

SEQ ID NO: 1170812 - RNA, 21 nt, Human
agaaauccucccuuugcagcc

SEQ ID NO: 1170813 - RNA, 21 nt, Human
agaagauggcagaaguuguuc

SEQ ID NO: 1170814 - RNA, 21 nt, Human
agaauguucaaaguauccacc

SEQ ID NO: 1170815 - RNA, 20 nt, Human
agcaacgccaacaaucccag

SEQ ID NO: 1170816 - RNA, 21 nt, Human
agcaggggugcgcugcgcccu

SEQ ID NO: 1170817 - RNA, 23 nt, Human
agcuggucucuugacgugacaca

SEQ ID NO: 1170818 - RNA, 18 nt, Human
aggaccaugguggggcug

SEQ ID NO: 1170819 - RNA, 23 nt, Human
aggccacgccaucuauccuccca

SEQ ID NO: 1170820 - RNA, 21 nt, Human
agggagcuggccgcggagugg

SEQ ID NO: 1170821 - RNA, 22 nt, Human
agggcaggcuuggaccccaucu

SEQ ID NO: 1170822 - RNA, 18 nt, Human
agguguaauguuuggugg

SEQ ID NO: 1170823 - RNA, 19 nt, Human
aucccaccguugucacacc

SEQ ID NO: 1170824 - RNA, 22 nt, Human
augcugccuugggaggacacag

SEQ ID NO: 1170825 - RNA, 23 nt, Human
auucuuucucaugcugcuccgcc

SEQ ID NO: 1170826 - RNA, 23 nt, Human
caaagaagcaacgccaacaaucc

SEQ ID NO: 1170827 - RNA, 20 nt, Human
cacaccccugcugcagcccc

SEQ ID NO: 1170828 - RNA, 20 nt, Human
cacuuuugcuuuccuggagg

SEQ ID NO: 1170829 - RNA, 21 nt, Human
cagagggaaaaagauauggca

SEQ ID NO: 1170830 - RNA, 19 nt, Human
caggauggaugguggggca

SEQ ID NO: 1170831 - RNA, 20 nt, Human
caggccccagaagauggcag

SEQ ID NO: 1170832 - RNA, 24 nt, Human
caggccccagaagauggcagaagg

SEQ ID NO: 1170833 - RNA, 19 nt, Human
caguugagccacgggggca

SEQ ID NO: 1170834 - RNA, 24 nt, Human
caucuccaccaccacggcugaggg

SEQ ID NO: 1170835 - RNA, 21 nt, Human
ccaacaaucccaccguuguca

SEQ ID NO: 1170836 - RNA, 22 nt, Human
ccacccagggcaggaauuucug

SEQ ID NO: 1170837 - RNA, 19 nt, Human
ccaucuauccucccaccca

SEQ ID NO: 1170838 - RNA, 22 nt, Human
cccaugcucaaguccccaaaga

SEQ ID NO: 1170839 - RNA, 20 nt, Human
ccccaaagaauggcaggaug

SEQ ID NO: 1170840 - RNA, 22 nt, Human
ccccaaagaauggcaggaugcc

SEQ ID NO: 1170841 - RNA, 24 nt, Human
cccccuuuaggacaccauagaaau

SEQ ID NO: 1170842 - RNA, 21 nt, Human
ccucccacccagggcaggaau

SEQ ID NO: 1170843 - RNA, 21 nt, Human
ccuccuccgcgcagcaggggu

SEQ ID NO: 1170844 - RNA, 23 nt, Human
ccuguggcugguagaauuggaac

SEQ ID NO: 1170845 - RNA, 19 nt, Human
cgagaguggggaucccgga

SEQ ID NO: 1170846 - RNA, 22 nt, Human
cggaggucugucugcuguccgg

SEQ ID NO: 1170847 - RNA, 20 nt, Human
cucacugccccugcugaugc

SEQ ID NO: 1170848 - RNA, 26 nt, Human
cucagaauguucaaaguauccaccuc

SEQ ID NO: 1170849 - RNA, 20 nt, Human
cuccaagcgccgcugcugcc

SEQ ID NO: 1170850 - RNA, 19 nt, Human
cugaugcacgugagggcgg

SEQ ID NO: 1170851 - RNA, 21 nt, Human
cugaugcacgugagggcgggc

SEQ ID NO: 1170852 - RNA, 22 nt, Human
cugcagcccccuuuaggacacc

SEQ ID NO: 1170853 - RNA, 18 nt, Human
cugcgcccuccaaccggc

SEQ ID NO: 1170854 - RNA, 23 nt, Human
cuggucucuugagaacgucagaa

SEQ ID NO: 1170855 - RNA, 20 nt, Human
gagaacgucagaauuuuugc

SEQ ID NO: 1170856 - RNA, 22 nt, Human
gaggcaguggacaccagggaag

SEQ ID NO: 1170857 - RNA, 22 nt, Human
gagggcgggcucccccgugagg

SEQ ID NO: 1170858 - RNA, 22 nt, Human
gagguguaauguuuggugggag

SEQ ID NO: 1170859 - RNA, 19 nt, Human
gccuugggaggacacagag

SEQ ID NO: 1170860 - RNA, 19 nt, Human
ggaaaagccacccguaggg

SEQ ID NO: 1170861 - RNA, 26 nt, Human
ggcacaaagacggauuugaagggacg

SEQ ID NO: 1170862 - RNA, 18 nt, Human
gggaggacacagaggagg

SEQ ID NO: 1170863 - RNA, 18 nt, Human
ggggcagagcuggucucu

SEQ ID NO: 1170864 - RNA, 23 nt, Human
gguucauuugcugggaaacacgg

SEQ ID NO: 1170865 - RNA, 19 nt, Human
guggauccgggccucacug

SEQ ID NO: 1170866 - RNA, 18 nt, Human
uaggaaaagccacccgua

SEQ ID NO: 1170867 - RNA, 20 nt, Human
uaggauggucaucucugggc

SEQ ID NO: 1170868 - RNA, 19 nt, Human
uauccaccucacaccccgc

SEQ ID NO: 1170869 - RNA, 18 nt, Human
ucaaaacuccaguuccca

SEQ ID NO: 1170870 - RNA, 23 nt, Human
ucaaaguauccaccucacacccc

SEQ ID NO: 1170871 - RNA, 24 nt, Human
uccaugcuggggcauaaagugggc

SEQ ID NO: 1170872 - RNA, 22 nt, Human
ucccggacuggaggggucucug

SEQ ID NO: 1170873 - RNA, 19 nt, Human
ucucacgguuuugacuugc

SEQ ID NO: 1170874 - RNA, 22 nt, Human
ucugcugaguucagcucagccc

SEQ ID NO: 1170875 - RNA, 23 nt, Human
ucugguuucaccaggauggaugg

SEQ ID NO: 1170876 - RNA, 21 nt, Human
ucuuucucaugcugcuccgcc

SEQ ID NO: 1170877 - RNA, 23 nt, Human
ugaggccgaaggaccaugguggg

SEQ ID NO: 1170878 - RNA, 19 nt, Human
ugccuugggaggacacaga

SEQ ID NO: 1170879 - RNA, 20 nt, Human
ugcgugccugaggcagugga

SEQ ID NO: 1170880 - RNA, 19 nt, Human
ugcugaggccgaaggacca

SEQ ID NO: 1170881 - RNA, 19 nt, Human
uggaggugaaauaggaaga

SEQ ID NO: 1170882 - RNA, 23 nt, Human
ugggaggacacagaggaggugga

SEQ ID NO: 1170883 - RNA, 19 nt, Human
ugggagguguaauguuugg

SEQ ID NO: 1170884 - RNA, 22 nt, Human
ugggcaaauaggauggucaucu

SEQ ID NO: 1170885 - RNA, 21 nt, Human
uggggcugcgucugagggagc

SEQ ID NO: 1170886 - RNA, 21 nt, Human
uguccggaguggcagccacuu

SEQ ID NO: 1170887 - RNA, 20 nt, Human
uucaaaguauccaccucaca

SEQ ID NO: 1170888 - RNA, 24 nt, Human
uucaaaguauccaccucacacccc

SEQ ID NO: 1170889 - RNA, 22 nt, Human
uucaggcugggacgccuugagg

SEQ ID NO: 1170890 - RNA, 19 nt, Human
uucauuugcugggaaacac

SEQ ID NO: 1170891 - RNA, 23 nt, Human
uugcugggaaacacggucugcgu

SEQ ID NO: 1170892 - RNA, 23 nt, Human
uuucaaaacuccaguucccaccu

SEQ ID NO: 1170893 - RNA, 21 nt, Human
uuucugguuucaccaggaugg

SEQ ID NO: 1170894 - RNA, 18 nt, Human
uuuucugguuucaccagg

SEQ ID NO: 1170895 - RNA, 23 nt, Human
aaaaagcaauuguuccacugaga

SEQ ID NO: 1170896 - RNA, 23 nt, Human
aggguguuggggaguaaggagga

SEQ ID NO: 1170897 - RNA, 23 nt, Human
ccacugagagguuugagaggagg

SEQ ID NO: 1170898 - RNA, 22 nt, Human
cccuuuggcaauaagcugguuu

SEQ ID NO: 1170899 - RNA, 21 nt, Human
cuuaggaaaaagcaauuguuc

SEQ ID NO: 1170900 - RNA, 18 nt, Human
gaggaggguguuggggag

SEQ ID NO: 1170901 - RNA, 22 nt, Human
gcuauccuuuuucccuuuggca

SEQ ID NO: 1170902 - RNA, 20 nt, Human
ggaggaggaguuaucuugcu

SEQ ID NO: 1170903 - RNA, 22 nt, Human
gguguuggggaguaaggaggag

SEQ ID NO: 1170904 - RNA, 24 nt, Human
ugagagguuugagaggaggguguu

SEQ ID NO: 1170905 - RNA, 23 nt, Human
uggggaguaaggaggaggaguua

SEQ ID NO: 1170906 - RNA, 18 nt, Human
guagaaaucccucaaaug

SEQ ID NO: 1170907 - RNA, 20 nt, Human
uggcccgggcaaccacacag

SEQ ID NO: 1170908 - RNA, 21 nt, Human
uucuggcccgggcaaccacac

SEQ ID NO: 1170909 - RNA, 19 nt, Human
agaggaacgaagcgcucag

SEQ ID NO: 1170910 - RNA, 23 nt, Human
agcagcggcggcggcggcggcgg

SEQ ID NO: 1170911 - RNA, 23 nt, Human
agcggcggcggcggcggcggcgg

SEQ ID NO: 1170912 - RNA, 19 nt, Human
aggaggaaaggaugcggcg

SEQ ID NO: 1170913 - RNA, 21 nt, Human
cagcagcagcgacacguccag

SEQ ID NO: 1170914 - RNA, 23 nt, Human
cagcggcagcagcagcagcgaca

SEQ ID NO: 1170915 - RNA, 23 nt, Human
cagcggcagcggcagcagcagca

SEQ ID NO: 1170916 - RNA, 25 nt, Human
cggcagcagcagcagcgacacgucc

SEQ ID NO: 1170917 - RNA, 18 nt, Human
cguggcuccgggcgccuc

SEQ ID NO: 1170918 - RNA, 19 nt, Human
gacccgacuccuacccggc

SEQ ID NO: 1170919 - RNA, 22 nt, Human
gcagcagcagcgacacguccag

SEQ ID NO: 1170920 - RNA, 23 nt, Human
gcagcggcggcggcggcggcggc

SEQ ID NO: 1170921 - RNA, 22 nt, Human
gcagcggcggcggcggcggcuu

SEQ ID NO: 1170922 - RNA, 20 nt, Human
gcggcggcggcagcggcagc

SEQ ID NO: 1170923 - RNA, 20 nt, Human
gcggcggcggcggcggcagc

SEQ ID NO: 1170924 - RNA, 20 nt, Human
gcggcggcggcggcggcggc

SEQ ID NO: 1170925 - RNA, 20 nt, Human
gcggcggcggcggcggcggc

SEQ ID NO: 1170926 - RNA, 24 nt, Human
gcggcggcggcggcggcggcagcg

SEQ ID NO: 1170927 - RNA, 24 nt, Human
gcggcggcggcggcggcggcggca

SEQ ID NO: 1170928 - RNA, 18 nt, Human
gcucaggagcaaacuagg

SEQ ID NO: 1170929 - RNA, 21 nt, Human
ggcggcagcggcagcggcagc

SEQ ID NO: 1170930 - RNA, 22 nt, Human
uagggcuagacccgacuccuac

SEQ ID NO: 1170931 - RNA, 22 nt, Human
uccagcagcggcggcggcggcg

SEQ ID NO: 1170932 - RNA, 24 nt, Human
uccagcagcggcggcggcggcuuu

SEQ ID NO: 1170933 - RNA, 24 nt, Human
ugcgacggcgacggggacggauac

SEQ ID NO: 1170934 - RNA, 23 nt, Human
uuccaaacuucagagcccaaaga

SEQ ID NO: 1170935 - RNA, 24 nt, Human
uucggcguggcuccgggcgccucc

SEQ ID NO: 1170936 - RNA, 22 nt, Human
acuuuuuuuuuuuuuuuuuuuc

SEQ ID NO: 1170937 - RNA, 21 nt, Human
cacuauuugaagucugaacuu

SEQ ID NO: 1170938 - RNA, 24 nt, Human
ccaguggcucuuccagaacuacug

SEQ ID NO: 1170939 - RNA, 23 nt, Human
cucauccccaguggcucuuccag

SEQ ID NO: 1170940 - RNA, 25 nt, Human
ugucucauccccaguggcucuucca

SEQ ID NO: 1170941 - RNA, 19 nt, Human
uucauauccaucagcucgu

SEQ ID NO: 1170942 - RNA, 25 nt, Human
uuccagaacuacugccuuccuggug

SEQ ID NO: 1170943 - RNA, 20 nt, Human
uuuuuuuuuuuuucuuucac

SEQ ID NO: 1170944 - RNA, 22 nt, Human
aaaacaaaugggcuacaggccc

SEQ ID NO: 1170945 - RNA, 18 nt, Human
aacaaguuaguuucuucc

SEQ ID NO: 1170946 - RNA, 21 nt, Human
aagcaagaacaucuucacaug

SEQ ID NO: 1170947 - RNA, 18 nt, Human
aaucauggcagaaggcaa

SEQ ID NO: 1170948 - RNA, 19 nt, Human
aauuacaauucaacaugag

SEQ ID NO: 1170949 - RNA, 22 nt, Human
acacaaucaugccuucccaaca

SEQ ID NO: 1170950 - RNA, 23 nt, Human
accaccaggucccucccccaaca

SEQ ID NO: 1170951 - RNA, 23 nt, Human
accauaucauucuccccagccuc

SEQ ID NO: 1170952 - RNA, 20 nt, Human
acucacaguucuguaggcuu

SEQ ID NO: 1170953 - RNA, 21 nt, Human
acugggaauuacaauucaaca

SEQ ID NO: 1170954 - RNA, 19 nt, Human
agaucuugcgggaauuuac

SEQ ID NO: 1170955 - RNA, 22 nt, Human
agccaaaccauaucauucuccc

SEQ ID NO: 1170956 - RNA, 20 nt, Human
agccucugccuauuacccag

SEQ ID NO: 1170957 - RNA, 23 nt, Human
aggggaaauuugcucccaugauc

SEQ ID NO: 1170958 - RNA, 18 nt, Human
agucaugaaaucuucaag

SEQ ID NO: 1170959 - RNA, 26 nt, Human
aucaccuccuaccagguccccuccca

SEQ ID NO: 1170960 - RNA, 19 nt, Human
auccaaucaccuccuacca

SEQ ID NO: 1170961 - RNA, 19 nt, Human
auucuccccagccucuccc

SEQ ID NO: 1170962 - RNA, 22 nt, Human
caaaacaaaugggcuacaggcc

SEQ ID NO: 1170963 - RNA, 24 nt, Human
caaagaacuaccugagaccggggc

SEQ ID NO: 1170964 - RNA, 18 nt, Human
caacacugggaauuacaa

SEQ ID NO: 1170965 - RNA, 23 nt, Human
caaccauaucagagggagguaau

SEQ ID NO: 1170966 - RNA, 21 nt, Human
caagaacaucuucacauggug

SEQ ID NO: 1170967 - RNA, 26 nt, Human
caagacacaaucaugccuucccaaca

SEQ ID NO: 1170968 - RNA, 23 nt, Human
caauaaguuccucaucuccaucu

SEQ ID NO: 1170969 - RNA, 21 nt, Human
cagaaggcaaaggggaagcaa

SEQ ID NO: 1170970 - RNA, 24 nt, Human
cagccucucccaaaucucauauua

SEQ ID NO: 1170971 - RNA, 24 nt, Human
caggucccucccccaacacuggga

SEQ ID NO: 1170972 - RNA, 19 nt, Human
cauagcaagagugaccguu

SEQ ID NO: 1170973 - RNA, 21 nt, Human
cauaucacugucagcauuuug

SEQ ID NO: 1170974 - RNA, 23 nt, Human
caugauccaaucaccuccuacca

SEQ ID NO: 1170975 - RNA, 22 nt, Human
caugcaagucugaaacccaaca

SEQ ID NO: 1170976 - RNA, 20 nt, Human
cauuccaccuaugagccugu

SEQ ID NO: 1170977 - RNA, 22 nt, Human
ccaagguacaaugagaguacag

SEQ ID NO: 1170978 - RNA, 22 nt, Human
ccagccucucccaaaucucaua

SEQ ID NO: 1170979 - RNA, 21 nt, Human
ccccaaaauggguuugucuuu

SEQ ID NO: 1170980 - RNA, 22 nt, Human
cccuuuuaaacauaaguuccaa

SEQ ID NO: 1170981 - RNA, 20 nt, Human
ccuaccagguccccucccaa

SEQ ID NO: 1170982 - RNA, 23 nt, Human
cuaccaccaggucccucccccaa

SEQ ID NO: 1170983 - RNA, 18 nt, Human
cuaccagguccccuccca

SEQ ID NO: 1170984 - RNA, 26 nt, Human
cugaaaaguccaaagucuuaucugag

SEQ ID NO: 1170985 - RNA, 19 nt, Human
cugaaacccaacagggaag

SEQ ID NO: 1170986 - RNA, 21 nt, Human
cugguaccaguuuucuguauu

SEQ ID NO: 1170987 - RNA, 25 nt, Human
cuucaugauucaaucaccuaccacc

SEQ ID NO: 1170988 - RNA, 18 nt, Human
cuuuuaaaccaucagauc

SEQ ID NO: 1170989 - RNA, 18 nt, Human
cuuuuaaaccaucagauc

SEQ ID NO: 1170990 - RNA, 21 nt, Human
gagauuuggauggggguacag

SEQ ID NO: 1170991 - RNA, 28 nt, Human
gagcaagucucuaggaagucugaaacuu

SEQ ID NO: 1170992 - RNA, 21 nt, Human
ggagacagagagaguaaagug

SEQ ID NO: 1170993 - RNA, 18 nt, Human
ggcgggggaggccucagg

SEQ ID NO: 1170994 - RNA, 18 nt, Human
gggcaggggcacaaugcu

SEQ ID NO: 1170995 - RNA, 18 nt, Human
guaaauguuccuguugca

SEQ ID NO: 1170996 - RNA, 20 nt, Human
gugaaggggaaugugccaca

SEQ ID NO: 1170997 - RNA, 27 nt, Human
uaaaucaucucucaaguucaaaguucc

SEQ ID NO: 1170998 - RNA, 19 nt, Human
uaccagguccccucccaac

SEQ ID NO: 1170999 - RNA, 25 nt, Human
uagaaaaauaccaggucacaucuug

SEQ ID NO: 1171000 - RNA, 21 nt, Human
uagaaggcaaaggggaagcaa

SEQ ID NO: 1171001 - RNA, 20 nt, Human
uagggauacagagcaaccau

SEQ ID NO: 1171002 - RNA, 20 nt, Human
uauagcagugccacacuucu

SEQ ID NO: 1171003 - RNA, 20 nt, Human
uaucacugucagcauuuugg

SEQ ID NO: 1171004 - RNA, 24 nt, Human
uauguaaauuucuaccacuggcuu

SEQ ID NO: 1171005 - RNA, 21 nt, Human
ucaaguucaaaguuccauaca

SEQ ID NO: 1171006 - RNA, 22 nt, Human
ucacaccgucucuucauacaua

SEQ ID NO: 1171007 - RNA, 24 nt, Human
ucaccuccuaccagguccccuccc

SEQ ID NO: 1171008 - RNA, 19 nt, Human
ucaugaaaucuucaagcuc

SEQ ID NO: 1171009 - RNA, 19 nt, Human
ucauucuccccagccucuc

SEQ ID NO: 1171010 - RNA, 26 nt, Human
ucauucuccccagccucucccaaauc

SEQ ID NO: 1171011 - RNA, 18 nt, Human
uccaagguacaaugagag

SEQ ID NO: 1171012 - RNA, 21 nt, Human
uccagccucugccuauuaccc

SEQ ID NO: 1171013 - RNA, 21 nt, Human
ucccacaucuucugucuucuu

SEQ ID NO: 1171014 - RNA, 19 nt, Human
uccccagccucucccaaau

SEQ ID NO: 1171015 - RNA, 22 nt, Human
uccccagccucucccaaaucuc

SEQ ID NO: 1171016 - RNA, 20 nt, Human
ucccccaaagucuuaacucc

SEQ ID NO: 1171017 - RNA, 20 nt, Human
ucuccaaacuguuccagccu

SEQ ID NO: 1171018 - RNA, 23 nt, Human
ucuccccagccucucccaaaucu

SEQ ID NO: 1171019 - RNA, 22 nt, Human
ucucuaggaagucugaaacuuu

SEQ ID NO: 1171020 - RNA, 19 nt, Human
ucugaucucuccaaacugu

SEQ ID NO: 1171021 - RNA, 23 nt, Human
ucuuacagucaugguagaaggca

SEQ ID NO: 1171022 - RNA, 22 nt, Human
ucuuuauagcagugccacacuu

SEQ ID NO: 1171023 - RNA, 18 nt, Human
ugacaggagaaacagcau

SEQ ID NO: 1171024 - RNA, 20 nt, Human
ugagaccacaucagccugga

SEQ ID NO: 1171025 - RNA, 24 nt, Human
ugagccuguaaaauaaaaaacaag

SEQ ID NO: 1171026 - RNA, 22 nt, Human
ugauccaaucaccuccuaccag

SEQ ID NO: 1171027 - RNA, 22 nt, Human
ugauuccaugucucacauccag

SEQ ID NO: 1171028 - RNA, 23 nt, Human
ugauuccaugucucacauccagg

SEQ ID NO: 1171029 - RNA, 20 nt, Human
ugcaagucugaaacccaaca

SEQ ID NO: 1171030 - RNA, 24 nt, Human
ugccagguacccuaaaucaucucu

SEQ ID NO: 1171031 - RNA, 21 nt, Human
ugccagucucugcuaaaucau

SEQ ID NO: 1171032 - RNA, 23 nt, Human
uggguaaauguuccuguugcaaa

SEQ ID NO: 1171033 - RNA, 24 nt, Human
uggguuugucuuuucuauagcaug

SEQ ID NO: 1171034 - RNA, 21 nt, Human
ugugaaggggaaugugccaca

SEQ ID NO: 1171035 - RNA, 18 nt, Human
uguuccagccucugccua

SEQ ID NO: 1171036 - RNA, 23 nt, Human
uucacauagugacaggagaaaca

SEQ ID NO: 1171037 - RNA, 21 nt, Human
uucacuguccauaucacuguc

SEQ ID NO: 1171038 - RNA, 21 nt, Human
uucuccccagccucucccaaa

SEQ ID NO: 1171039 - RNA, 19 nt, Human
uucugcauuuugagguauc

SEQ ID NO: 1171040 - RNA, 26 nt, Human
uugcuucugcauuuugagguaucuuu

SEQ ID NO: 1171041 - RNA, 24 nt, Human
uugguuacaauuauugagcaaguc

SEQ ID NO: 1171042 - RNA, 22 nt, Human
aaaaaacccacagcuucgcagg

SEQ ID NO: 1171043 - RNA, 18 nt, Human
aaaaacaugagaagagcc

SEQ ID NO: 1171044 - RNA, 26 nt, Human
aaaacaaacaaacaaacaaaaaaccc

SEQ ID NO: 1171045 - RNA, 24 nt, Human
aaaacaggaaaaaaauaccuucag

SEQ ID NO: 1171046 - RNA, 26 nt, Human
aaacaaacaaaaaacccacagcuucg

SEQ ID NO: 1171047 - RNA, 22 nt, Human
aaacaaacaaacaaaaaaccca

SEQ ID NO: 1171048 - RNA, 21 nt, Human
aaacaggaaaaaaauaccuuc

SEQ ID NO: 1171049 - RNA, 24 nt, Human
aaacaggaaaaaaauaccuucagc

SEQ ID NO: 1171050 - RNA, 23 nt, Human
aaacaugagaagagcuuauaaag

SEQ ID NO: 1171051 - RNA, 21 nt, Human
aaaggagggugugucgaagcu

SEQ ID NO: 1171052 - RNA, 19 nt, Human
aaauacaagacaaaacucc

SEQ ID NO: 1171053 - RNA, 18 nt, Human
aaccaccgacauuaacgu

SEQ ID NO: 1171054 - RNA, 23 nt, Human
aacuucaagcauguguuuggcac

SEQ ID NO: 1171055 - RNA, 26 nt, Human
aagaaaacaggaaaaaaauaccuuca

SEQ ID NO: 1171056 - RNA, 19 nt, Human
aagacucaggcauaagagc

SEQ ID NO: 1171057 - RNA, 22 nt, Human
aaguauccccacaggacucucc

SEQ ID NO: 1171058 - RNA, 24 nt, Human
aaguugaggcugcagugagccaag

SEQ ID NO: 1171059 - RNA, 20 nt, Human
aauugcuuuucuaaauccau

SEQ ID NO: 1171060 - RNA, 23 nt, Human
acaagacaaaacuccacgccccu

SEQ ID NO: 1171061 - RNA, 19 nt, Human
acaaggccaaaauacaaga

SEQ ID NO: 1171062 - RNA, 24 nt, Human
acaccacugcacuccagucugggc

SEQ ID NO: 1171063 - RNA, 24 nt, Human
acaccuguaauuccagcacuuggg

SEQ ID NO: 1171064 - RNA, 25 nt, Human
acagagcgagauccugccucuaaaa

SEQ ID NO: 1171065 - RNA, 20 nt, Human
acagagugacacccugucuc

SEQ ID NO: 1171066 - RNA, 24 nt, Human
acagagugagacccugucucuaaa

SEQ ID NO: 1171067 - RNA, 20 nt, Human
acaggaaaaaaauaccuuca

SEQ ID NO: 1171068 - RNA, 22 nt, Human
acagggccagccagucccaugc

SEQ ID NO: 1171069 - RNA, 18 nt, Human
acagugugagccaauguu

SEQ ID NO: 1171070 - RNA, 21 nt, Human
accaacaaggccaaaauacaa

SEQ ID NO: 1171071 - RNA, 22 nt, Human
accacugcacuccagucugggc

SEQ ID NO: 1171072 - RNA, 18 nt, Human
accauagcccagggagcu

SEQ ID NO: 1171073 - RNA, 22 nt, Human
accucaaaacucagagcccccg

SEQ ID NO: 1171074 - RNA, 24 nt, Human
accucguuucuacuaaaaauacaa

SEQ ID NO: 1171075 - RNA, 21 nt, Human
accuggguguaguggcaugcg

SEQ ID NO: 1171076 - RNA, 18 nt, Human
accuguaaucccagcacu

SEQ ID NO: 1171077 - RNA, 24 nt, Human
acggcgcuacugcacuccagucug

SEQ ID NO: 1171078 - RNA, 24 nt, Human
acuccagucugggcaacagaguga

SEQ ID NO: 1171079 - RNA, 24 nt, Human
acuccagucugggcgacagaguga

SEQ ID NO: 1171080 - RNA, 18 nt, Human
acucgggaggcagaggug

SEQ ID NO: 1171081 - RNA, 20 nt, Human
acucgggaggcagagguggg

SEQ ID NO: 1171082 - RNA, 18 nt, Human
acugcacuccagucuggg

SEQ ID NO: 1171083 - RNA, 18 nt, Human
acugcacuccagucuggg

SEQ ID NO: 1171084 - RNA, 19 nt, Human
acugcacuccagucugggc

SEQ ID NO: 1171085 - RNA, 19 nt, Human
acugcacuccagucugggc

SEQ ID NO: 1171086 - RNA, 24 nt, Human
acugcacuccagucugggcaacag

SEQ ID NO: 1171087 - RNA, 24 nt, Human
acugcacuccagucugggcaacag

SEQ ID NO: 1171088 - RNA, 21 nt, Human
acugcacuccagucugggcga

SEQ ID NO: 1171089 - RNA, 22 nt, Human
acugcacuccagucugggcgac

SEQ ID NO: 1171090 - RNA, 24 nt, Human
acugcacuccagucugggcgacag

SEQ ID NO: 1171091 - RNA, 26 nt, Human
acugcacuccagucugggcgacagag

SEQ ID NO: 1171092 - RNA, 24 nt, Human
acugcacuccugccugggugacag

SEQ ID NO: 1171093 - RNA, 26 nt, Human
acugcacuccugccugggugacagag

SEQ ID NO: 1171094 - RNA, 24 nt, Human
acugugccacugcacuccugccug

SEQ ID NO: 1171095 - RNA, 19 nt, Human
agaacgcaggcggcgggag

SEQ ID NO: 1171096 - RNA, 19 nt, Human
agacaaaacuccacgcccc

SEQ ID NO: 1171097 - RNA, 20 nt, Human
agacaaaacuccacgccccu

SEQ ID NO: 1171098 - RNA, 18 nt, Human
agaggugggaggauugcu

SEQ ID NO: 1171099 - RNA, 18 nt, Human
agagugaagaaaacagga

SEQ ID NO: 1171100 - RNA, 24 nt, Human
agagugaagaaaacaggaaaaaaa

SEQ ID NO: 1171101 - RNA, 23 nt, Human
agauacuucagcaggacaagaug

SEQ ID NO: 1171102 - RNA, 24 nt, Human
agcauguguuuggcacagagugag

SEQ ID NO: 1171103 - RNA, 23 nt, Human
agccuggccaacguggugaaacc

SEQ ID NO: 1171104 - RNA, 25 nt, Human
agccuggccaacguggugaaaccuc

SEQ ID NO: 1171105 - RNA, 20 nt, Human
agccugggcaacauggagaa

SEQ ID NO: 1171106 - RNA, 24 nt, Human
agccugggcaacauggagaagcuc

SEQ ID NO: 1171107 - RNA, 23 nt, Human
agccuguggucccagcuacuggg

SEQ ID NO: 1171108 - RNA, 23 nt, Human
agccuguggucccagcuacuggg

SEQ ID NO: 1171109 - RNA, 18 nt, Human
agcgcuggaaguugaggc

SEQ ID NO: 1171110 - RNA, 25 nt, Human
aggaggaaggaggagauuugggucg

SEQ ID NO: 1171111 - RNA, 20 nt, Human
aggaguuugagaccagccug

SEQ ID NO: 1171112 - RNA, 21 nt, Human
aggcagaggugggaggauugc

SEQ ID NO: 1171113 - RNA, 23 nt, Human
aggcagaggugggaggauugcuu

SEQ ID NO: 1171114 - RNA, 18 nt, Human
aggcaggagaaucacuug

SEQ ID NO: 1171115 - RNA, 22 nt, Human
aggcaggagaaucacuugaucc

SEQ ID NO: 1171116 - RNA, 26 nt, Human
aggcagguggaucauuugaggucagg

SEQ ID NO: 1171117 - RNA, 21 nt, Human
aggcggagcuugcagugagcc

SEQ ID NO: 1171118 - RNA, 24 nt, Human
aggcggagcuugcagugagccgag

SEQ ID NO: 1171119 - RNA, 24 nt, Human
aggcugaggcaggagaaucacuug

SEQ ID NO: 1171120 - RNA, 22 nt, Human
agguggaucauuugaggucagg

SEQ ID NO: 1171121 - RNA, 22 nt, Human
agucugggcaacagagugagac

SEQ ID NO: 1171122 - RNA, 22 nt, Human
agugaagaaaacaggaaaaaaa

SEQ ID NO: 1171123 - RNA, 26 nt, Human
auaaagccaauagaaaaugucaagcu

SEQ ID NO: 1171124 - RNA, 24 nt, Human
aucauuugaggucaggaguuugag

SEQ ID NO: 1171125 - RNA, 22 nt, Human
auggagaagcucugucucuaaa

SEQ ID NO: 1171126 - RNA, 24 nt, Human
auuacaccacugcacuccagucug

SEQ ID NO: 1171127 - RNA, 24 nt, Human
auuugaggucaggaguuugagacc

SEQ ID NO: 1171128 - RNA, 24 nt, Human
caaacaaaaaacccacagcuucgc

SEQ ID NO: 1171129 - RNA, 26 nt, Human
caaacaaacaaacaaaaaacccacag

SEQ ID NO: 1171130 - RNA, 21 nt, Human
caaacacacagggcuucuccc

SEQ ID NO: 1171131 - RNA, 22 nt, Human
caacagagugagacccugucuc

SEQ ID NO: 1171132 - RNA, 22 nt, Human
caacauggagaagcucugucuc

SEQ ID NO: 1171133 - RNA, 24 nt, Human
caacauggagaagcucugucucua

SEQ ID NO: 1171134 - RNA, 19 nt, Human
caaccacuugucaaggagc

SEQ ID NO: 1171135 - RNA, 21 nt, Human
caacccagcccucucagccag

SEQ ID NO: 1171136 - RNA, 24 nt, Human
caacguggugaaaccucguuucua

SEQ ID NO: 1171137 - RNA, 18 nt, Human
caagacaaaacuccacgc

SEQ ID NO: 1171138 - RNA, 21 nt, Human
caaggagcagacauaggcacc

SEQ ID NO: 1171139 - RNA, 23 nt, Human
cacaccuguaauuccagcacuug

SEQ ID NO: 1171140 - RNA, 18 nt, Human
cacaggacucucccuggg

SEQ ID NO: 1171141 - RNA, 18 nt, Human
cacagggccagccagucc

SEQ ID NO: 1171142 - RNA, 24 nt, Human
caccacugcacuccagucugggca

SEQ ID NO: 1171143 - RNA, 24 nt, Human
caccccaacuucaagcauguguuu

SEQ ID NO: 1171144 - RNA, 19 nt, Human
cacccuuucagcagccaag

SEQ ID NO: 1171145 - RNA, 19 nt, Human
caccgacauuaacgucacc

SEQ ID NO: 1171146 - RNA, 18 nt, Human
caccuccaugccucuccu

SEQ ID NO: 1171147 - RNA, 19 nt, Human
caccuguaauuccagcacu

SEQ ID NO: 1171148 - RNA, 22 nt, Human
caccuuguccccaccugccuuc

SEQ ID NO: 1171149 - RNA, 23 nt, Human
cacgccccucauauguaacaacu

SEQ ID NO: 1171150 - RNA, 22 nt, Human
cacuccagucugggcaacagag

SEQ ID NO: 1171151 - RNA, 24 nt, Human
cacuccagucugggcaacagagug

SEQ ID NO: 1171152 - RNA, 22 nt, Human
cacuccagucugggcgacagag

SEQ ID NO: 1171153 - RNA, 22 nt, Human
cacuccagucugggcgacagag

SEQ ID NO: 1171154 - RNA, 24 nt, Human
cacuccagucugggcgacagagug

SEQ ID NO: 1171155 - RNA, 23 nt, Human
cacuccugccugggugacagagc

SEQ ID NO: 1171156 - RNA, 24 nt, Human
cacuccugccugggugacagagcg

SEQ ID NO: 1171157 - RNA, 19 nt, Human
cacugcacuccagucuggg

SEQ ID NO: 1171158 - RNA, 21 nt, Human
cacugcacuccagucugggca

SEQ ID NO: 1171159 - RNA, 22 nt, Human
cacugcacuccagucugggcaa

SEQ ID NO: 1171160 - RNA, 23 nt, Human
cacugcacuccagucugggcaac

SEQ ID NO: 1171161 - RNA, 24 nt, Human
cacugcacuccagucugggcaaca

SEQ ID NO: 1171162 - RNA, 23 nt, Human
cacugcacuccugccugggugac

SEQ ID NO: 1171163 - RNA, 24 nt, Human
cacugcacuccugccugggugaca

SEQ ID NO: 1171164 - RNA, 21 nt, Human
cacuugauccugggaggcgga

SEQ ID NO: 1171165 - RNA, 29 nt, Human
cagagccccugccagcccagacccaaagg

SEQ ID NO: 1171166 - RNA, 23 nt, Human
cagcacuugggaggacgaggcag

SEQ ID NO: 1171167 - RNA, 24 nt, Human
cagcacuuugagacacuaaggcgg

SEQ ID NO: 1171168 - RNA, 23 nt, Human
cagcgcaugggaggguaugcaug

SEQ ID NO: 1171169 - RNA, 24 nt, Human
cagcuacucgggaggcugaggcag

SEQ ID NO: 1171170 - RNA, 23 nt, Human
cagggacaccucuccuggccagc

SEQ ID NO: 1171171 - RNA, 24 nt, Human
cagguggaucauuugaggucagga

SEQ ID NO: 1171172 - RNA, 23 nt, Human
cagugugagccaauguugacuuu

SEQ ID NO: 1171173 - RNA, 22 nt, Human
cauaaaggaucuuccuucuucc

SEQ ID NO: 1171174 - RNA, 24 nt, Human
cauaccuguaaucccagcacuuug

SEQ ID NO: 1171175 - RNA, 23 nt, Human
caucuguaaauccagcuacucgg

SEQ ID NO: 1171176 - RNA, 23 nt, Human
caugagaagagcuuauaaagcca

SEQ ID NO: 1171177 - RNA, 20 nt, Human
ccaacguggugaaaccucgu

SEQ ID NO: 1171178 - RNA, 21 nt, Human
ccacaaaaaagagggugaacc

SEQ ID NO: 1171179 - RNA, 20 nt, Human
ccacucuggcuuccaccucc

SEQ ID NO: 1171180 - RNA, 21 nt, Human
ccacugcaccuccaccugggc

SEQ ID NO: 1171181 - RNA, 27 nt, Human
ccacugcaccuccaccugggcaccagg

SEQ ID NO: 1171182 - RNA, 20 nt, Human
ccacugcacuccagucuggg

SEQ ID NO: 1171183 - RNA, 20 nt, Human
ccacugcacuccagucuggg

SEQ ID NO: 1171184 - RNA, 21 nt, Human
ccacugcacuccagucugggc

SEQ ID NO: 1171185 - RNA, 23 nt, Human
ccacugcacuccagucugggcaa

SEQ ID NO: 1171186 - RNA, 24 nt, Human
ccacugcacuccagucugggcaac

SEQ ID NO: 1171187 - RNA, 20 nt, Human
ccacugcacuccugccuggg

SEQ ID NO: 1171188 - RNA, 20 nt, Human
ccacugcacuccugccuggg

SEQ ID NO: 1171189 - RNA, 21 nt, Human
ccacugcacuccugccugggu

SEQ ID NO: 1171190 - RNA, 24 nt, Human
ccacugcacuccugccugggugac

SEQ ID NO: 1171191 - RNA, 19 nt, Human
ccagagccccugccagccc

SEQ ID NO: 1171192 - RNA, 30 nt, Human
ccagagccccugccagcccagacccaaagg

SEQ ID NO: 1171193 - RNA, 28 nt, Human
ccagcccagacccaaaguauccccacag

SEQ ID NO: 1171194 - RNA, 21 nt, Human
ccagguucgcaccuccaugcc

SEQ ID NO: 1171195 - RNA, 23 nt, Human
cccacugcaccuccaccugggca

SEQ ID NO: 1171196 - RNA, 21 nt, Human
cccaggaguuugaggcuagcc

SEQ ID NO: 1171197 - RNA, 21 nt, Human
cccaucaacacccgcccagga

SEQ ID NO: 1171198 - RNA, 27 nt, Human
ccccaacccagcccucucagccaggcc

SEQ ID NO: 1171199 - RNA, 21 nt, Human
ccccacugcaccuccaccugg

SEQ ID NO: 1171200 - RNA, 24 nt, Human
ccccacugcaccuccaccugggca

SEQ ID NO: 1171201 - RNA, 25 nt, Human
cccucauauguaacaacugcccuaa

SEQ ID NO: 1171202 - RNA, 21 nt, Human
cccugggucccaucaacaccc

SEQ ID NO: 1171203 - RNA, 22 nt, Human
ccuccaugccucuccuuccaga

SEQ ID NO: 1171204 - RNA, 24 nt, Human
ccugacccccaacccagcccucuc

SEQ ID NO: 1171205 - RNA, 27 nt, Human
ccugacccccaacccagcccucucagc

SEQ ID NO: 1171206 - RNA, 21 nt, Human
ccuggccaacguggugaaacc

SEQ ID NO: 1171207 - RNA, 24 nt, Human
ccuggccaacguggugaaaccucg

SEQ ID NO: 1171208 - RNA, 18 nt, Human
ccugggcaacauggagaa

SEQ ID NO: 1171209 - RNA, 19 nt, Human
ccugggugacagagcgaga

SEQ ID NO: 1171210 - RNA, 20 nt, Human
ccuguggggguguuuugggg

SEQ ID NO: 1171211 - RNA, 18 nt, Human
ccuguggucccagcuacu

SEQ ID NO: 1171212 - RNA, 22 nt, Human
ccuguggucccagcuacugggg

SEQ ID NO: 1171213 - RNA, 24 nt, Human
cgagacggcgcuacugcacuccag

SEQ ID NO: 1171214 - RNA, 19 nt, Human
cgagauccugccucuaaaa

SEQ ID NO: 1171215 - RNA, 24 nt, Human
cgaggcagguggaucauuugaggu

SEQ ID NO: 1171216 - RNA, 26 nt, Human
cgaggcagguggaucauuugagguca

SEQ ID NO: 1171217 - RNA, 22 nt, Human
cggcucacaccuguaauuccag

SEQ ID NO: 1171218 - RNA, 20 nt, Human
cgggaggcugaggcaggaga

SEQ ID NO: 1171219 - RNA, 24 nt, Human
cguguguagucccaguuacucggg

SEQ ID NO: 1171220 - RNA, 21 nt, Human
cuacugcacuccagucugggc

SEQ ID NO: 1171221 - RNA, 24 nt, Human
cuacugcacuccagucugggcgac

SEQ ID NO: 1171222 - RNA, 19 nt, Human
cuaucucccucuucuucca

SEQ ID NO: 1171223 - RNA, 21 nt, Human
cucaaaacucagagcccccgu

SEQ ID NO: 1171224 - RNA, 24 nt, Human
cucacaccuguaauuccagcacuu

SEQ ID NO: 1171225 - RNA, 24 nt, Human
cucauaccuguaaucccagcacuu

SEQ ID NO: 1171226 - RNA, 27 nt, Human
cugcaccuccaccugggcaccagguuc

SEQ ID NO: 1171227 - RNA, 21 nt, Human
cuguaaauccagcuacucggg

SEQ ID NO: 1171228 - RNA, 21 nt, Human
cuguggggguguuuuggggga

SEQ ID NO: 1171229 - RNA, 24 nt, Human
cuuccagagccccugccagcccag

SEQ ID NO: 1171230 - RNA, 24 nt, Human
cuugcagugagccgagacggcgcu

SEQ ID NO: 1171231 - RNA, 22 nt, Human
cuuuaucccaagccccauccuc

SEQ ID NO: 1171232 - RNA, 19 nt, Human
gaaaccucguuucuacuaa

SEQ ID NO: 1171233 - RNA, 22 nt, Human
gaagcccaggcuucugcuucua

SEQ ID NO: 1171234 - RNA, 22 nt, Human
gacacugaacacacgagaggaa

SEQ ID NO: 1171235 - RNA, 24 nt, Human
gacagagugacacccugucucgaa

SEQ ID NO: 1171236 - RNA, 23 nt, Human
gagaaucacuugauccugggagg

SEQ ID NO: 1171237 - RNA, 18 nt, Human
gagaccagccuggccaac

SEQ ID NO: 1171238 - RNA, 24 nt, Human
gagcaucacccuuucagcagccaa

SEQ ID NO: 1171239 - RNA, 22 nt, Human
gagccaagacucaggcauaaga

SEQ ID NO: 1171240 - RNA, 18 nt, Human
gagccccugccagcccag

SEQ ID NO: 1171241 - RNA, 21 nt, Human
gagcuugcagugagccgagac

SEQ ID NO: 1171242 - RNA, 18 nt, Human
gaggcugcagugagccaa

SEQ ID NO: 1171243 - RNA, 18 nt, Human
gaggcugcagugagccaa

SEQ ID NO: 1171244 - RNA, 24 nt, Human
gaucauuugaggucaggaguuuga

SEQ ID NO: 1171245 - RNA, 22 nt, Human
gcaaggcucuuaaccauagccc

SEQ ID NO: 1171246 - RNA, 24 nt, Human
gcacuccagucugggcaacagagu

SEQ ID NO: 1171247 - RNA, 24 nt, Human
gcacuccagucugggcgacagagu

SEQ ID NO: 1171248 - RNA, 25 nt, Human
gcaggaccacaggagccaagacuca

SEQ ID NO: 1171249 - RNA, 25 nt, Human
gccaaaauacaagacaaaacuccag

SEQ ID NO: 1171250 - RNA, 21 nt, Human
gccaacguggugaaaccucgu

SEQ ID NO: 1171251 - RNA, 24 nt, Human
gccacugcacuccugccuggguga

SEQ ID NO: 1171252 - RNA, 22 nt, Human
gcuacugcacuccagucugggc

SEQ ID NO: 1171253 - RNA, 24 nt, Human
gcuacugcacuccagucugggcga

SEQ ID NO: 1171254 - RNA, 22 nt, Human
gcuggaaguugaggcugcagug

SEQ ID NO: 1171255 - RNA, 18 nt, Human
ggagcuugcagugagccg

SEQ ID NO: 1171256 - RNA, 22 nt, Human
ggaucauuugaggucaggaguu

SEQ ID NO: 1171257 - RNA, 23 nt, Human
ggcgugguggcucauaccuguaa

SEQ ID NO: 1171258 - RNA, 23 nt, Human
ggcucacaccuguaauuccagca

SEQ ID NO: 1171259 - RNA, 19 nt, Human
gggaggcagaggugggagg

SEQ ID NO: 1171260 - RNA, 23 nt, Human
gggaggcugaggcaggagaauca

SEQ ID NO: 1171261 - RNA, 22 nt, Human
gggagggucacuggagcccagg

SEQ ID NO: 1171262 - RNA, 18 nt, Human
gggccauagcugcagaga

SEQ ID NO: 1171263 - RNA, 27 nt, Human
gggucacuggagcccaggaguuugagg

SEQ ID NO: 1171264 - RNA, 19 nt, Human
ggucaggaguuugagacca

SEQ ID NO: 1171265 - RNA, 24 nt, Human
gguggcucauaccuguaaucccag

SEQ ID NO: 1171266 - RNA, 21 nt, Human
gucacagauucaccccaacuu

SEQ ID NO: 1171267 - RNA, 25 nt, Human
gugaaccuuuaacaaugccccagag

SEQ ID NO: 1171268 - RNA, 23 nt, Human
guggcucauaccuguaaucccag

SEQ ID NO: 1171269 - RNA, 21 nt, Human
guggggccauagcugcagaga

SEQ ID NO: 1171270 - RNA, 21 nt, Human
guuugaggcuagccugggcaa

SEQ ID NO: 1171271 - RNA, 24 nt, Human
uaaaaaacaggcuggugcggcuca

SEQ ID NO: 1171272 - RNA, 24 nt, Human
uaaaacaaacaaacaaacaaaaaa

SEQ ID NO: 1171273 - RNA, 23 nt, Human
uaacaaugccccagaggagcuuc

SEQ ID NO: 1171274 - RNA, 21 nt, Human
uacaccacugcacuccagucu

SEQ ID NO: 1171275 - RNA, 19 nt, Human
uacccccacugcaccucca

SEQ ID NO: 1171276 - RNA, 19 nt, Human
uaccuggguguaguggcau

SEQ ID NO: 1171277 - RNA, 25 nt, Human
uaccuggguguaguggcaugcgugu

SEQ ID NO: 1171278 - RNA, 18 nt, Human
uaccuguaaucccagcac

SEQ ID NO: 1171279 - RNA, 21 nt, Human
uacugcacuccagucugggcg

SEQ ID NO: 1171280 - RNA, 23 nt, Human
uacugcacuccagucugggcgac

SEQ ID NO: 1171281 - RNA, 24 nt, Human
uacugcacuccagucugggcgaca

SEQ ID NO: 1171282 - RNA, 24 nt, Human
uagccugggcaacauggagaagcu

SEQ ID NO: 1171283 - RNA, 20 nt, Human
uagcuccuucuguccacacu

SEQ ID NO: 1171284 - RNA, 18 nt, Human
uagcugcagagaacgcag

SEQ ID NO: 1171285 - RNA, 20 nt, Human
uagcugggcgugguggcaug

SEQ ID NO: 1171286 - RNA, 20 nt, Human
uaggguggaaaaggaaggaa

SEQ ID NO: 1171287 - RNA, 23 nt, Human
ucaacacccgcccaggaaccagg

SEQ ID NO: 1171288 - RNA, 23 nt, Human
ucaacagccuuuccuaaugggcu

SEQ ID NO: 1171289 - RNA, 21 nt, Human
ucaaccaccgacauuaacguc

SEQ ID NO: 1171290 - RNA, 19 nt, Human
ucacuggagcccaggaguu

SEQ ID NO: 1171291 - RNA, 22 nt, Human
ucacuggagcccaggaguuuga

SEQ ID NO: 1171292 - RNA, 26 nt, Human
ucacuggagcccaggaguuugaggcu

SEQ ID NO: 1171293 - RNA, 18 nt, Human
ucacuggguggucccagc

SEQ ID NO: 1171294 - RNA, 20 nt, Human
ucacuggguggucccagccc

SEQ ID NO: 1171295 - RNA, 19 nt, Human
ucacuugauccugggaggc

SEQ ID NO: 1171296 - RNA, 22 nt, Human
ucagagccugguguggggucug

SEQ ID NO: 1171297 - RNA, 22 nt, Human
ucagccgggcgugcguggcaug

SEQ ID NO: 1171298 - RNA, 20 nt, Human
uccagagccccugccagccc

SEQ ID NO: 1171299 - RNA, 24 nt, Human
uccagucugggcaacagagugaga

SEQ ID NO: 1171300 - RNA, 22 nt, Human
uccagucugggcgacagaguga

SEQ ID NO: 1171301 - RNA, 18 nt, Human
ucccaagccccauccuca

SEQ ID NO: 1171302 - RNA, 18 nt, Human
ucccagccccacucuggc

SEQ ID NO: 1171303 - RNA, 24 nt, Human
uccugccugggugacagagcgaga

SEQ ID NO: 1171304 - RNA, 24 nt, Human
ucgaaauaaaacaaacaaacaaac

SEQ ID NO: 1171305 - RNA, 22 nt, Human
ucgggaggcagaggugggagga

SEQ ID NO: 1171306 - RNA, 25 nt, Human
ucgggaggcugaggcaggagaauca

SEQ ID NO: 1171307 - RNA, 20 nt, Human
ucucccucuucuuccacuuc

SEQ ID NO: 1171308 - RNA, 19 nt, Human
ucuccuggccagcuccccu

SEQ ID NO: 1171309 - RNA, 24 nt, Human
ucugaccgggcgugguggcucaua

SEQ ID NO: 1171310 - RNA, 22 nt, Human
ucugcuucuaucucccucuucu

SEQ ID NO: 1171311 - RNA, 19 nt, Human
ucuguccacacuuuaaaug

SEQ ID NO: 1171312 - RNA, 20 nt, Human
ugacagagcgagauccugcc

SEQ ID NO: 1171313 - RNA, 19 nt, Human
ugacccccaacccagcccu

SEQ ID NO: 1171314 - RNA, 20 nt, Human
ugacccccaacccagcccuc

SEQ ID NO: 1171315 - RNA, 19 nt, Human
ugaccgggcgugguggcuc

SEQ ID NO: 1171316 - RNA, 22 nt, Human
ugagaagagcuuauaaagccaa

SEQ ID NO: 1171317 - RNA, 23 nt, Human
ugagaccagccuggccaacgugg

SEQ ID NO: 1171318 - RNA, 18 nt, Human
ugagccaauguugacuuu

SEQ ID NO: 1171319 - RNA, 20 nt, Human
ugaggcaggagaaucacuug

SEQ ID NO: 1171320 - RNA, 24 nt, Human
ugaggcaggagaaucacuugaucc

SEQ ID NO: 1171321 - RNA, 18 nt, Human
ugaggcgaggucaaggcu

SEQ ID NO: 1171322 - RNA, 24 nt, Human
ugaggcuagccugggcaacaugga

SEQ ID NO: 1171323 - RNA, 18 nt, Human
ugaggucaggaguuugag

SEQ ID NO: 1171324 - RNA, 18 nt, Human
ugagugcaggugacgacc

SEQ ID NO: 1171325 - RNA, 22 nt, Human
ugcagcgagccaugacugugcc

SEQ ID NO: 1171326 - RNA, 25 nt, Human
ugccugggugacagagcgagauccu

SEQ ID NO: 1171327 - RNA, 19 nt, Human
ugccuguggggguguuuug

SEQ ID NO: 1171328 - RNA, 24 nt, Human
ugcggcucacaccuguaauuccag

SEQ ID NO: 1171329 - RNA, 26 nt, Human
ugcuacaauacuucaaacacacaggg

SEQ ID NO: 1171330 - RNA, 18 nt, Human
uggaagcccaggcuucug

SEQ ID NO: 1171331 - RNA, 23 nt, Human
uggagaagcucugucucuaaaaa

SEQ ID NO: 1171332 - RNA, 24 nt, Human
uggagauacuucagcaggacaaga

SEQ ID NO: 1171333 - RNA, 23 nt, Human
uggaucauuugaggucaggaguu

SEQ ID NO: 1171334 - RNA, 24 nt, Human
uggaucauuugaggucaggaguuu

SEQ ID NO: 1171335 - RNA, 24 nt, Human
uggcaugagccuguggucccagcu

SEQ ID NO: 1171336 - RNA, 24 nt, Human
uggccaacguggugaaaccucguu

SEQ ID NO: 1171337 - RNA, 22 nt, Human
uggcuacagggggccuccugac

SEQ ID NO: 1171338 - RNA, 21 nt, Human
uggcucauaccuguaauccca

SEQ ID NO: 1171339 - RNA, 22 nt, Human
uggcucauaccuguaaucccag

SEQ ID NO: 1171340 - RNA, 24 nt, Human
uggcucauaccuguaaucccagca

SEQ ID NO: 1171341 - RNA, 29 nt, Human
ugggaggcggagcuugcagugacaacggu

SEQ ID NO: 1171342 - RNA, 24 nt, Human
ugggaggcggagcuugcagugagc

SEQ ID NO: 1171343 - RNA, 21 nt, Human
ugggcaacagagugagacccu

SEQ ID NO: 1171344 - RNA, 24 nt, Human
ugggcaacagagugagacccuguc

SEQ ID NO: 1171345 - RNA, 19 nt, Human
ugggggagggaggaggaag

SEQ ID NO: 1171346 - RNA, 18 nt, Human
uggguguaguggcaugcg

SEQ ID NO: 1171347 - RNA, 22 nt, Human
uggguguaguggcaugcgugug

SEQ ID NO: 1171348 - RNA, 18 nt, Human
ugguauguccacuuaaaa

SEQ ID NO: 1171349 - RNA, 24 nt, Human
ugguggcucauaccuguaauccca

SEQ ID NO: 1171350 - RNA, 21 nt, Human
uguaacaacugcccuaaccag

SEQ ID NO: 1171351 - RNA, 23 nt, Human
uuacaccacugcacuccagucug

SEQ ID NO: 1171352 - RNA, 22 nt, Human
uuaccuggguguaguggcaugc

SEQ ID NO: 1171353 - RNA, 20 nt, Human
uuagcugggcgugguggcau

SEQ ID NO: 1171354 - RNA, 22 nt, Human
uuagcugggcgugguggcaugc

SEQ ID NO: 1171355 - RNA, 22 nt, Human
uucgcaccuccaugccucuccu

SEQ ID NO: 1171356 - RNA, 19 nt, Human
uucuugagaucuuccagga

SEQ ID NO: 1171357 - RNA, 18 nt, Human
uugcagugagccgagacg

SEQ ID NO: 1171358 - RNA, 22 nt, Human
uugcagugagccgagacggcgc

SEQ ID NO: 1171359 - RNA, 23 nt, Human
uugggggagggaggaggaaggag

SEQ ID NO: 1171360 - RNA, 22 nt, Human
uuucuacuaaaaauacaaaaaa

SEQ ID NO: 1171361 - RNA, 23 nt, Human
uuugaggucaggaguuugagacc

SEQ ID NO: 1171362 - RNA, 20 nt, Human
uuuuuaaaaauuaccugggu

SEQ ID NO: 1171363 - RNA, 21 nt, Human
aacccuuuguuggaaugcuuu

SEQ ID NO: 1171364 - RNA, 22 nt, Human
aacccuuuguuggaaugcuuuc

SEQ ID NO: 1171365 - RNA, 25 nt, Human
agcuucauucccaucuauaauuuua

SEQ ID NO: 1171366 - RNA, 23 nt, Human
auagaaccuggcaucacccugaa

SEQ ID NO: 1171367 - RNA, 26 nt, Human
auuuugcuuggguaaucccuuuuaau

SEQ ID NO: 1171368 - RNA, 23 nt, Human
caacagcauaggugcaaaaaaaa

SEQ ID NO: 1171369 - RNA, 28 nt, Human
caacuacaccaagguuucugaagacaau

SEQ ID NO: 1171370 - RNA, 25 nt, Human
caauggcuucucccuccaagcaggu

SEQ ID NO: 1171371 - RNA, 21 nt, Human
cagcauaggugcaaaaaaaaa

SEQ ID NO: 1171372 - RNA, 22 nt, Human
cagcauaggugcaaaaaaaaaa

SEQ ID NO: 1171373 - RNA, 19 nt, Human
cagcccuccaaugaagagc

SEQ ID NO: 1171374 - RNA, 21 nt, Human
cagggugaagagagacuuuaa

SEQ ID NO: 1171375 - RNA, 20 nt, Human
ccugcuaagcuuuguuuccu

SEQ ID NO: 1171376 - RNA, 22 nt, Human
cgggcucuucaggagacucuga

SEQ ID NO: 1171377 - RNA, 18 nt, Human
cugcuaagcuuuguuucc

SEQ ID NO: 1171378 - RNA, 21 nt, Human
cuuuccacagaacagaaacua

SEQ ID NO: 1171379 - RNA, 18 nt, Human
gagcuuccucagcuguuc

SEQ ID NO: 1171380 - RNA, 24 nt, Human
guuuuuugcccauacacaugaguc

SEQ ID NO: 1171381 - RNA, 19 nt, Human
uacacaagcuucauuccca

SEQ ID NO: 1171382 - RNA, 21 nt, Human
uacaccaagguuucugaagac

SEQ ID NO: 1171383 - RNA, 19 nt, Human
ucaaagcucagcccuccaa

SEQ ID NO: 1171384 - RNA, 18 nt, Human
ucaggagacucugacuua

SEQ ID NO: 1171385 - RNA, 19 nt, Human
ucaggagacucugacuuag

SEQ ID NO: 1171386 - RNA, 19 nt, Human
ugaagagagacuuuaacaa

SEQ ID NO: 1171387 - RNA, 19 nt, Human
uguuguaaccuguagcuuc

SEQ ID NO: 1171388 - RNA, 20 nt, Human
uucagaguagacuaacuuua

SEQ ID NO: 1171389 - RNA, 18 nt, Human
uuccucagcuguucgggc

SEQ ID NO: 1171390 - RNA, 20 nt, Human
aauagaaaagacgaccugga

SEQ ID NO: 1171391 - RNA, 20 nt, Human
accuggaaguuaccccagcu

SEQ ID NO: 1171392 - RNA, 21 nt, Human
agacgaccuggaaguuacccc

SEQ ID NO: 1171393 - RNA, 18 nt, Human
aggguccuggcccucucc

SEQ ID NO: 1171394 - RNA, 19 nt, Human
cuggaaguuaccccagcuc

SEQ ID NO: 1171395 - RNA, 27 nt, Human
ggacaugcagguguaaaauagaaaaga

SEQ ID NO: 1171396 - RNA, 23 nt, Human
uaaaauagaaaagacgaccugga

SEQ ID NO: 1171397 - RNA, 24 nt, Human
uaccccagcuccagcuccaagccu

SEQ ID NO: 1171398 - RNA, 18 nt, Human
uaggguccuggcccucuc

SEQ ID NO: 1171399 - RNA, 18 nt, Human
ucccaggggucgggaacu

SEQ ID NO: 1171400 - RNA, 21 nt, Human
ucuaaagaaucugaaaugcaa

SEQ ID NO: 1171401 - RNA, 19 nt, Human
uguaaaauagaaaagacga

SEQ ID NO: 1171402 - RNA, 24 nt, Human
aaacuggcuugaaaaagauuucua

SEQ ID NO: 1171403 - RNA, 18 nt, Human
aagcagccaacugcugaa

SEQ ID NO: 1171404 - RNA, 19 nt, Human
aagcagccaacugcugaac

SEQ ID NO: 1171405 - RNA, 24 nt, Human
aagcauuugugugugucagaaguu

SEQ ID NO: 1171406 - RNA, 19 nt, Human
acagauacauguacagagu

SEQ ID NO: 1171407 - RNA, 18 nt, Human
agacgccagugcacauag

SEQ ID NO: 1171408 - RNA, 23 nt, Human
aggucacugucuuagacgccagu

SEQ ID NO: 1171409 - RNA, 18 nt, Human
augguagaacauuaaaca

SEQ ID NO: 1171410 - RNA, 21 nt, Human
caagaaaaagcucuuguagca

SEQ ID NO: 1171411 - RNA, 21 nt, Human
ccccacauacaaugcaacacc

SEQ ID NO: 1171412 - RNA, 19 nt, Human
cgccagugcacauaguccc

SEQ ID NO: 1171413 - RNA, 21 nt, Human
cuaagcagccaacugcugaac

SEQ ID NO: 1171414 - RNA, 21 nt, Human
cucuaugguuugugcaaagcu

SEQ ID NO: 1171415 - RNA, 21 nt, Human
cuuguauuuuaagcuuuugca

SEQ ID NO: 1171416 - RNA, 22 nt, Human
gaaaaagauuucuaagcagcca

SEQ ID NO: 1171417 - RNA, 18 nt, Human
gcacauaguccccacaua

SEQ ID NO: 1171418 - RNA, 23 nt, Human
uccccacauacaaugcaacaccu

SEQ ID NO: 1171419 - RNA, 22 nt, Human
ucuuuagaaacuggcuugaaaa

SEQ ID NO: 1171420 - RNA, 23 nt, Human
uugacaauggugugcauuauucu

SEQ ID NO: 1171421 - RNA, 22 nt, Human
uuuaagcuuuugcaagaaaaag

SEQ ID NO: 1171422 - RNA, 21 nt, Human
aagggcuccaaagagaaggug

SEQ ID NO: 1171423 - RNA, 19 nt, Human
agaccaccaacaggaaucu

SEQ ID NO: 1171424 - RNA, 22 nt, Human
cagcucccgaaaccugccuccu

SEQ ID NO: 1171425 - RNA, 23 nt, Human
ccugugacccagaccaccaacag

SEQ ID NO: 1171426 - RNA, 25 nt, Human
cgaaaccugccuccugugacccaga

SEQ ID NO: 1171427 - RNA, 28 nt, Human
cucccgaaaccugccuccugugacccag

SEQ ID NO: 1171428 - RNA, 20 nt, Human
cuccugugacccagaccacc

SEQ ID NO: 1171429 - RNA, 23 nt, Human
cugaugaccauauacaacuuguu

SEQ ID NO: 1171430 - RNA, 22 nt, Human
gaagaugaauaaguagaaccca

SEQ ID NO: 1171431 - RNA, 24 nt, Human
gacaaaccauuuacuucugugguc

SEQ ID NO: 1171432 - RNA, 18 nt, Human
gaccaccaacaggaaucu

SEQ ID NO: 1171433 - RNA, 25 nt, Human
gcuccaaagagaaggugugaagaga

SEQ ID NO: 1171434 - RNA, 21 nt, Human
uagaagaugaauaaguagaac

SEQ ID NO: 1171435 - RNA, 21 nt, Human
uccaaagagaaggugugaaga

SEQ ID NO: 1171436 - RNA, 22 nt, Human
ucuaaaccgcaaacaggcgaaa

SEQ ID NO: 1171437 - RNA, 24 nt, Human
ucuuuggggucuaaaccgcaaaca

SEQ ID NO: 1171438 - RNA, 21 nt, Human
ugacaggcuuauuaaaucaca

SEQ ID NO: 1171439 - RNA, 19 nt, Human
ugacccagaccaccaacag

SEQ ID NO: 1171440 - RNA, 19 nt, Human
aaaaaaaaacaaacucaaa

SEQ ID NO: 1171441 - RNA, 22 nt, Human
aaaauaaaaauacugccacaga

SEQ ID NO: 1171442 - RNA, 26 nt, Human
aaacaagagaaaaaaagaagggaccc

SEQ ID NO: 1171443 - RNA, 19 nt, Human
aacaugguaaaaccccauu

SEQ ID NO: 1171444 - RNA, 20 nt, Human
aacaugguaaaaccccauuu

SEQ ID NO: 1171445 - RNA, 21 nt, Human
aacaugguaaaaccccauuuc

SEQ ID NO: 1171446 - RNA, 21 nt, Human
aacaugguaaaaccccauuuc

SEQ ID NO: 1171447 - RNA, 19 nt, Human
aagcauuuugggaggcuga

SEQ ID NO: 1171448 - RNA, 24 nt, Human
aagcauuuugggaggcugaagugg

SEQ ID NO: 1171449 - RNA, 21 nt, Human
aagcuaacaaugcaucaccug

SEQ ID NO: 1171450 - RNA, 18 nt, Human
aaggcacauuaguauaug

SEQ ID NO: 1171451 - RNA, 23 nt, Human
aaguaacaaaugaaaagccaaac

SEQ ID NO: 1171452 - RNA, 21 nt, Human
aaguaagcaccugaauauuaa

SEQ ID NO: 1171453 - RNA, 19 nt, Human
aaguacagaauacaaacaa

SEQ ID NO: 1171454 - RNA, 20 nt, Human
aagucaguugucaaagcuaa

SEQ ID NO: 1171455 - RNA, 25 nt, Human
aauacaaacaacagaaaucauuaga

SEQ ID NO: 1171456 - RNA, 21 nt, Human
acacaguaguauuuuguaaca

SEQ ID NO: 1171457 - RNA, 21 nt, Human
accccauuucuacuaaaaaca

SEQ ID NO: 1171458 - RNA, 18 nt, Human
acugcacuccagccuggg

SEQ ID NO: 1171459 - RNA, 21 nt, Human
acugcacuccagccugggcaa

SEQ ID NO: 1171460 - RNA, 24 nt, Human
acugcacuccagccugggcaaaag

SEQ ID NO: 1171461 - RNA, 24 nt, Human
acuugaggucaggaguucaagacc

SEQ ID NO: 1171462 - RNA, 24 nt, Human
agaugcagugguucaugccuguaa

SEQ ID NO: 1171463 - RNA, 20 nt, Human
agcaaggaaaacauuuuacu

SEQ ID NO: 1171464 - RNA, 21 nt, Human
agcacugaugugucaaaaaug

SEQ ID NO: 1171465 - RNA, 20 nt, Human
agcauuuugggaggcugaag

SEQ ID NO: 1171466 - RNA, 24 nt, Human
agcauuuugggaggcugaaguggg

SEQ ID NO: 1171467 - RNA, 22 nt, Human
agccuggacaacaugguaaaac

SEQ ID NO: 1171468 - RNA, 24 nt, Human
agccuggacaacaugguaaaaccc

SEQ ID NO: 1171469 - RNA, 24 nt, Human
agccugggcaaaagaaugagacuc

SEQ ID NO: 1171470 - RNA, 23 nt, Human
aggaguucaagaccagccuggac

SEQ ID NO: 1171471 - RNA, 22 nt, Human
aggcaggagacucgcuugaacc

SEQ ID NO: 1171472 - RNA, 24 nt, Human
aggcaggagacucgcuugaaccug

SEQ ID NO: 1171473 - RNA, 24 nt, Human
aggcugaggcaggagacucgcuug

SEQ ID NO: 1171474 - RNA, 18 nt, Human
aggugaugauuggcaguu

SEQ ID NO: 1171475 - RNA, 24 nt, Human
aggugugguggcaugugccuguaa

SEQ ID NO: 1171476 - RNA, 24 nt, Human
agugguucaugccuguaauccaag

SEQ ID NO: 1171477 - RNA, 23 nt, Human
aguuaccagcauuuugagugcca

SEQ ID NO: 1171478 - RNA, 23 nt, Human
aguuaggugugguggcaugugcc

SEQ ID NO: 1171479 - RNA, 24 nt, Human
auaaaaauacugccacagagaaau

SEQ ID NO: 1171480 - RNA, 20 nt, Human
aucaaaacaagagaaaaaaa

SEQ ID NO: 1171481 - RNA, 23 nt, Human
aucacuugaggucaggaguucaa

SEQ ID NO: 1171482 - RNA, 24 nt, Human
aucacuugaggucaggaguucaag

SEQ ID NO: 1171483 - RNA, 18 nt, Human
augcacaaaauuuaagcc

SEQ ID NO: 1171484 - RNA, 24 nt, Human
auugugccacugcacuccagccug

SEQ ID NO: 1171485 - RNA, 21 nt, Human
caaaaaaagcaaaugagguga

SEQ ID NO: 1171486 - RNA, 21 nt, Human
caaaaaaagcaaaugagguga

SEQ ID NO: 1171487 - RNA, 21 nt, Human
caaaaaaagcaaaugagguga

SEQ ID NO: 1171488 - RNA, 22 nt, Human
caaaacaagagaaaaaaagaaa

SEQ ID NO: 1171489 - RNA, 19 nt, Human
caaaaugcaaagauaaaua

SEQ ID NO: 1171490 - RNA, 23 nt, Human
caaagcuaacaaugcaucacccc

SEQ ID NO: 1171491 - RNA, 24 nt, Human
caagccaaauccagccagcucaua

SEQ ID NO: 1171492 - RNA, 26 nt, Human
cacaaaauuuaagccaaauauucaag

SEQ ID NO: 1171493 - RNA, 18 nt, Human
cacugcacuccagccugg

SEQ ID NO: 1171494 - RNA, 19 nt, Human
cacugcacuccagccuggg

SEQ ID NO: 1171495 - RNA, 21 nt, Human
cacugcacuccagccugggca

SEQ ID NO: 1171496 - RNA, 23 nt, Human
cacugcacuccagccugggcaaa

SEQ ID NO: 1171497 - RNA, 23 nt, Human
cacuugaggucaggaguucaaga

SEQ ID NO: 1171498 - RNA, 24 nt, Human
cagcuacuugggaggcugaggcag

SEQ ID NO: 1171499 - RNA, 20 nt, Human
caguuucacauuuucuaaug

SEQ ID NO: 1171500 - RNA, 19 nt, Human
caucaaaacaagagaaaaa

SEQ ID NO: 1171501 - RNA, 24 nt, Human
caugccuguaauccaagcauuuug

SEQ ID NO: 1171502 - RNA, 18 nt, Human
cauggauuaacugacucg

SEQ ID NO: 1171503 - RNA, 18 nt, Human
cauuuugggaggcugaag

SEQ ID NO: 1171504 - RNA, 18 nt, Human
ccacugcacuccagccug

SEQ ID NO: 1171505 - RNA, 20 nt, Human
ccacugcacuccagccuggg

SEQ ID NO: 1171506 - RNA, 20 nt, Human
ccacugcacuccagccuggg

SEQ ID NO: 1171507 - RNA, 21 nt, Human
ccacugcacuccagccugggc

SEQ ID NO: 1171508 - RNA, 24 nt, Human
ccacugcacuccagccugggcaaa

SEQ ID NO: 1171509 - RNA, 21 nt, Human
ccugcaggguggagguugcag

SEQ ID NO: 1171510 - RNA, 24 nt, Human
ccuggacaacaugguaaaacccca

SEQ ID NO: 1171511 - RNA, 22 nt, Human
ccuguaauccaagcauuuuggg

SEQ ID NO: 1171512 - RNA, 24 nt, Human
ccuguaauccaagcauuuugggag

SEQ ID NO: 1171513 - RNA, 18 nt, Human
ccuguaaucucagcuacu

SEQ ID NO: 1171514 - RNA, 19 nt, Human
ccuguaaucucagcuacuu

SEQ ID NO: 1171515 - RNA, 21 nt, Human
ccuguaaucucagcuacuugg

SEQ ID NO: 1171516 - RNA, 22 nt, Human
ccuguaaucucagcuacuuggg

SEQ ID NO: 1171517 - RNA, 19 nt, Human
ccuuucaaaauguagucaa

SEQ ID NO: 1171518 - RNA, 18 nt, Human
cucaaaaaaaaaaaaaaa

SEQ ID NO: 1171519 - RNA, 24 nt, Human
cucagucucaaaaaaaaaaaaaaa

SEQ ID NO: 1171520 - RNA, 23 nt, Human
cuggacaacaugguaaaacccca

SEQ ID NO: 1171521 - RNA, 21 nt, Human
gaaaauguaaauuccuguguc

SEQ ID NO: 1171522 - RNA, 23 nt, Human
gaaguggguggaucacuugaggu

SEQ ID NO: 1171523 - RNA, 23 nt, Human
gagguugcagugaacugagauug

SEQ ID NO: 1171524 - RNA, 23 nt, Human
gaucacuugaggucaggaguuca

SEQ ID NO: 1171525 - RNA, 24 nt, Human
gaucacuugaggucaggaguucaa

SEQ ID NO: 1171526 - RNA, 18 nt, Human
gcacaaaauuuaagccaa

SEQ ID NO: 1171527 - RNA, 18 nt, Human
gcaucaccuggcuucaaa

SEQ ID NO: 1171528 - RNA, 23 nt, Human
gcauuuugagugccacauauguu

SEQ ID NO: 1171529 - RNA, 22 nt, Human
gccacugcacuccagccugggc

SEQ ID NO: 1171530 - RNA, 24 nt, Human
gccacugcacuccagccugggcaa

SEQ ID NO: 1171531 - RNA, 20 nt, Human
gccuguaaucucagcuacuu

SEQ ID NO: 1171532 - RNA, 22 nt, Human
ggaggucagaugcagugguuca

SEQ ID NO: 1171533 - RNA, 22 nt, Human
ggagguugcagugaacugagau

SEQ ID NO: 1171534 - RNA, 24 nt, Human
ggagguugcagugaacugagauug

SEQ ID NO: 1171535 - RNA, 22 nt, Human
ggaucacuugaggucaggaguu

SEQ ID NO: 1171536 - RNA, 18 nt, Human
ggauuaacugacucgaaa

SEQ ID NO: 1171537 - RNA, 20 nt, Human
gggaggcugaagugggugga

SEQ ID NO: 1171538 - RNA, 21 nt, Human
gggauaucuuuauuucuagac

SEQ ID NO: 1171539 - RNA, 19 nt, Human
gguggagguugcagugaac

SEQ ID NO: 1171540 - RNA, 23 nt, Human
gguggagguugcagugaacugag

SEQ ID NO: 1171541 - RNA, 21 nt, Human
gguggaucacuugaggucagg

SEQ ID NO: 1171542 - RNA, 24 nt, Human
gguggcaugugccuguaaucucag

SEQ ID NO: 1171543 - RNA, 20 nt, Human
gugagcuauugccaaaaaaa

SEQ ID NO: 1171544 - RNA, 18 nt, Human
guugaacaaaugcaaagg

SEQ ID NO: 1171545 - RNA, 18 nt, Human
uaaaaacugcaguaaugc

SEQ ID NO: 1171546 - RNA, 22 nt, Human
uaaaaauacugccacagagaaa

SEQ ID NO: 1171547 - RNA, 19 nt, Human
uaaaauaucccuaaauguc

SEQ ID NO: 1171548 - RNA, 21 nt, Human
uaaagaauacuauagggaggu

SEQ ID NO: 1171549 - RNA, 19 nt, Human
uaacaaaugaaaagccaaa

SEQ ID NO: 1171550 - RNA, 21 nt, Human
uaacaguauucauaugcacaa

SEQ ID NO: 1171551 - RNA, 21 nt, Human
uaagaacaguuucacauuuuc

SEQ ID NO: 1171552 - RNA, 21 nt, Human
uaaggcacauuaguauaugaa

SEQ ID NO: 1171553 - RNA, 19 nt, Human
uacagaauacaaacaacag

SEQ ID NO: 1171554 - RNA, 21 nt, Human
uacagaauacaaacaacagaa

SEQ ID NO: 1171555 - RNA, 23 nt, Human
uacaggcaaagaucuugagcaca

SEQ ID NO: 1171556 - RNA, 27 nt, Human
uaccaaauacauagauuaaaauauccc

SEQ ID NO: 1171557 - RNA, 22 nt, Human
uagauuaaaauaucccuaaaug

SEQ ID NO: 1171558 - RNA, 18 nt, Human
uagguuucuaguaguaug

SEQ ID NO: 1171559 - RNA, 22 nt, Human
uaguuaggugugguggcaugug

SEQ ID NO: 1171560 - RNA, 20 nt, Human
uauaacuaauacuucacuaa

SEQ ID NO: 1171561 - RNA, 21 nt, Human
uaucucagucgucuguacaga

SEQ ID NO: 1171562 - RNA, 22 nt, Human
uaugcacaaaauuuaagccaaa

SEQ ID NO: 1171563 - RNA, 23 nt, Human
uauugccaaaaaaaugauucuaa

SEQ ID NO: 1171564 - RNA, 19 nt, Human
ucaaaacaagagaaaaaaa

SEQ ID NO: 1171565 - RNA, 19 nt, Human
ucaaaacaagagaaaaaaa

SEQ ID NO: 1171566 - RNA, 23 nt, Human
ucagucucaaaaaaaaaaaaaaa

SEQ ID NO: 1171567 - RNA, 20 nt, Human
ucagugcucaugaaauuuua

SEQ ID NO: 1171568 - RNA, 20 nt, Human
ucaugccuguaauccaagca

SEQ ID NO: 1171569 - RNA, 19 nt, Human
uccaagcauuuugggaggc

SEQ ID NO: 1171570 - RNA, 19 nt, Human
uccacaagccaaauccagc

SEQ ID NO: 1171571 - RNA, 24 nt, Human
ucgcuugaaccugcaggguggagg

SEQ ID NO: 1171572 - RNA, 24 nt, Human
ucucaaaaaaaaaaaaaaacaaac

SEQ ID NO: 1171573 - RNA, 18 nt, Human
ugaacaaaugcaaaggag

SEQ ID NO: 1171574 - RNA, 22 nt, Human
ugaacugagauugugccacugc

SEQ ID NO: 1171575 - RNA, 24 nt, Human
ugaaguggguggaucacuugaggu

SEQ ID NO: 1171576 - RNA, 26 nt, Human
ugaaguggguggaucacuugagguca

SEQ ID NO: 1171577 - RNA, 24 nt, Human
ugagauugugccacugcacuccag

SEQ ID NO: 1171578 - RNA, 24 nt, Human
ugaggcaggagacucgcuugaacc

SEQ ID NO: 1171579 - RNA, 24 nt, Human
ugaggcaggagacucgcuugaacc

SEQ ID NO: 1171580 - RNA, 22 nt, Human
ugcaaaggagacuuauguggug

SEQ ID NO: 1171581 - RNA, 23 nt, Human
ugcaucaccuggcuucaaaauuu

SEQ ID NO: 1171582 - RNA, 21 nt, Human
ugccaaaggaauaaucuuggc

SEQ ID NO: 1171583 - RNA, 24 nt, Human
ugccacugcacuccagccugggca

SEQ ID NO: 1171584 - RNA, 24 nt, Human
ugccuguaaucucagcuacuuggg

SEQ ID NO: 1171585 - RNA, 19 nt, Human
ugcuaaaaggagaaaagua

SEQ ID NO: 1171586 - RNA, 26 nt, Human
ugcugucaucauuuugcacugcuacu

SEQ ID NO: 1171587 - RNA, 21 nt, Human
uggaauaggggucacaaauuu

SEQ ID NO: 1171588 - RNA, 22 nt, Human
uggacaacaugguaaaacccca

SEQ ID NO: 1171589 - RNA, 24 nt, Human
uggaucacuugaggucaggaguuc

SEQ ID NO: 1171590 - RNA, 27 nt, Human
uggaucacuugaggucaggaguucaag

SEQ ID NO: 1171591 - RNA, 27 nt, Human
uggcagaguugaacaaaugcaaaggag

SEQ ID NO: 1171592 - RNA, 21 nt, Human
uggcaugugccuguaaucuca

SEQ ID NO: 1171593 - RNA, 24 nt, Human
uggcaugugccuguaaucucagcu

SEQ ID NO: 1171594 - RNA, 18 nt, Human
uggcucaaaaguaagcac

SEQ ID NO: 1171595 - RNA, 26 nt, Human
uggcugaaaaaaucuaauggcuaaaa

SEQ ID NO: 1171596 - RNA, 18 nt, Human
ugggaagauaauuuaccu

SEQ ID NO: 1171597 - RNA, 23 nt, Human
ugggaggcugaaguggguggauc

SEQ ID NO: 1171598 - RNA, 24 nt, Human
ugggaggcugaaguggguggauca

SEQ ID NO: 1171599 - RNA, 19 nt, Human
ugggaggcugaggcaggag

SEQ ID NO: 1171600 - RNA, 23 nt, Human
ugggaggcugaggcaggagacuc

SEQ ID NO: 1171601 - RNA, 24 nt, Human
uggguggaucacuugaggucagga

SEQ ID NO: 1171602 - RNA, 24 nt, Human
ugguggcaugugccuguaaucuca

SEQ ID NO: 1171603 - RNA, 22 nt, Human
ugguucaugccuguaauccaag

SEQ ID NO: 1171604 - RNA, 24 nt, Human
ugguucaugccuguaauccaagca

SEQ ID NO: 1171605 - RNA, 19 nt, Human
uguggugcugucaucauuu

SEQ ID NO: 1171606 - RNA, 22 nt, Human
uuaguuaggugugguggcaugu

SEQ ID NO: 1171607 - RNA, 24 nt, Human
uuaguuaggugugguggcaugugc

SEQ ID NO: 1171608 - RNA, 23 nt, Human
uuauguaaaauucaacuuucagu

SEQ ID NO: 1171609 - RNA, 24 nt, Human
uugaaccugcaggguggagguugc

SEQ ID NO: 1171610 - RNA, 19 nt, Human
uugcacugcuacuuggcac

SEQ ID NO: 1171611 - RNA, 19 nt, Human
uugcagugaacugagauug

SEQ ID NO: 1171612 - RNA, 22 nt, Human
uugcagugaacugagauugugc

SEQ ID NO: 1171613 - RNA, 25 nt, Human
uugggaggcugaaguggguggauca

SEQ ID NO: 1171614 - RNA, 21 nt, Human
uuuaagucaguugucaaagcu

SEQ ID NO: 1171615 - RNA, 18 nt, Human
uuuaauagcugaaaguaa

SEQ ID NO: 1171616 - RNA, 21 nt, Human
uuucacauuuucuaauggcug

SEQ ID NO: 1171617 - RNA, 21 nt, Human
uuucuacuaaaaacauaaaaa

SEQ ID NO: 1171618 - RNA, 21 nt, Human
uuucucugaaguaucaauauc

SEQ ID NO: 1171619 - RNA, 23 nt, Human
uuucuugucuacacaucuuucuu

SEQ ID NO: 1171620 - RNA, 23 nt, Human
uuuugggaggcugaagugggugg

SEQ ID NO: 1171621 - RNA, 23 nt, Human
aagcagcgagcugcuggcguucu

SEQ ID NO: 1171622 - RNA, 18 nt, Human
agagauuacaaagagauu

SEQ ID NO: 1171623 - RNA, 24 nt, Human
agcaggaaggagaugauuggugag

SEQ ID NO: 1171624 - RNA, 25 nt, Human
agcaggaaggagaugauuggugagu

SEQ ID NO: 1171625 - RNA, 18 nt, Human
aggaaggagaugauuggu

SEQ ID NO: 1171626 - RNA, 20 nt, Human
gaacucggugggagcaacaa

SEQ ID NO: 1171627 - RNA, 20 nt, Human
gagccugccuuccuucccac

SEQ ID NO: 1171628 - RNA, 22 nt, Human
gugaguuuucuucauagccagg

SEQ ID NO: 1171629 - RNA, 25 nt, Human
gugaguuuucuucauagccagguuc

SEQ ID NO: 1171630 - RNA, 23 nt, Human
uagcaggaaggagaugauuggug

SEQ ID NO: 1171631 - RNA, 20 nt, Human
ugguuuaauuuuaagcagcg

SEQ ID NO: 1171632 - RNA, 21 nt, Human
uguuaaaaagggcuuaguuuc

SEQ ID NO: 1171633 - RNA, 22 nt, Human
uuccuucccaccauggagaucc

SEQ ID NO: 1171634 - RNA, 25 nt, Human
uucuuuacaaugauuucagaagaga

SEQ ID NO: 1171635 - RNA, 19 nt, Human
aaaaccaaauaaaaaucac

SEQ ID NO: 1171636 - RNA, 20 nt, Human
aaguguguaguuucauaguu

SEQ ID NO: 1171637 - RNA, 19 nt, Human
aauaaaaaucacaucugaa

SEQ ID NO: 1171638 - RNA, 21 nt, Human
acaauauaaccucaagaggac

SEQ ID NO: 1171639 - RNA, 25 nt, Human
acggagagauacauuccuguuggua

SEQ ID NO: 1171640 - RNA, 23 nt, Human
acugacaguuuaaaaaugacauc

SEQ ID NO: 1171641 - RNA, 22 nt, Human
acugcagcgagagcagcggcgg

SEQ ID NO: 1171642 - RNA, 20 nt, Human
agaagcaggcgcagccugac

SEQ ID NO: 1171643 - RNA, 18 nt, Human
agagcagcggcggcaaca

SEQ ID NO: 1171644 - RNA, 20 nt, Human
auaaaaaucacaucugaaug

SEQ ID NO: 1171645 - RNA, 19 nt, Human
aucagacauuuucccagca

SEQ ID NO: 1171646 - RNA, 20 nt, Human
auggcccuaugggccagggc

SEQ ID NO: 1171647 - RNA, 24 nt, Human
auuauagaaaaauacuugaaguaa

SEQ ID NO: 1171648 - RNA, 20 nt, Human
cacaauauaaccucaagagg

SEQ ID NO: 1171649 - RNA, 18 nt, Human
cagaaggaguaaagggug

SEQ ID NO: 1171650 - RNA, 21 nt, Human
cagcacuuuuuauauaugcau

SEQ ID NO: 1171651 - RNA, 21 nt, Human
caggagggucuagaagcggcg

SEQ ID NO: 1171652 - RNA, 19 nt, Human
caggcaucaguggaguacc

SEQ ID NO: 1171653 - RNA, 23 nt, Human
caugugcauauauacguacuuca

SEQ ID NO: 1171654 - RNA, 23 nt, Human
ccagggccuggcacaguugaggc

SEQ ID NO: 1171655 - RNA, 21 nt, Human
cccagcaauauccgagacugc

SEQ ID NO: 1171656 - RNA, 20 nt, Human
ccuggaggugguccgguggg

SEQ ID NO: 1171657 - RNA, 27 nt, Human
cgagagcagcggcggcaacuggagacc

SEQ ID NO: 1171658 - RNA, 20 nt, Human
cuagaagcggcgaugugucc

SEQ ID NO: 1171659 - RNA, 18 nt, Human
cucugagaggugcaagag

SEQ ID NO: 1171660 - RNA, 20 nt, Human
cuggauuaaaaacaaaaaag

SEQ ID NO: 1171661 - RNA, 19 nt, Human
cugggcccugaagaagcag

SEQ ID NO: 1171662 - RNA, 20 nt, Human
cuggguagcucuggaaaggg

SEQ ID NO: 1171663 - RNA, 18 nt, Human
cuggucagcuuugaggag

SEQ ID NO: 1171664 - RNA, 21 nt, Human
gaauauacuuuaucacuuuaa

SEQ ID NO: 1171665 - RNA, 22 nt, Human
gaaugcccucuaauagugaaac

SEQ ID NO: 1171666 - RNA, 22 nt, Human
gagcagcggcggcaacagcacc

SEQ ID NO: 1171667 - RNA, 22 nt, Human
gaggguguugcacuugguggga

SEQ ID NO: 1171668 - RNA, 19 nt, Human
gaguaaagggugcuggggg

SEQ ID NO: 1171669 - RNA, 18 nt, Human
gcagcggcggcaacagca

SEQ ID NO: 1171670 - RNA, 18 nt, Human
gcggcgauguguccaagg

SEQ ID NO: 1171671 - RNA, 21 nt, Human
ggcacaguggaggguguugca

SEQ ID NO: 1171672 - RNA, 21 nt, Human
gguccuggaggugguccggug

SEQ ID NO: 1171673 - RNA, 21 nt, Human
guagugcaucugccaacgaaa

SEQ ID NO: 1171674 - RNA, 18 nt, Human
guccaaaaggcacagugg

SEQ ID NO: 1171675 - RNA, 22 nt, Human
uaaaaacaaaaaaguuaguuuc

SEQ ID NO: 1171676 - RNA, 18 nt, Human
uaauagugaaaccagcac

SEQ ID NO: 1171677 - RNA, 20 nt, Human
uacauacauguuggccugga

SEQ ID NO: 1171678 - RNA, 21 nt, Human
uagcagacuuuagggcuguau

SEQ ID NO: 1171679 - RNA, 25 nt, Human
uauaugcauucaugugcauauauac

SEQ ID NO: 1171680 - RNA, 20 nt, Human
ucaugugcauauauacguag

SEQ ID NO: 1171681 - RNA, 22 nt, Human
uccacaauauaaccucaagagg

SEQ ID NO: 1171682 - RNA, 19 nt, Human
uccuguugguacuggucca

SEQ ID NO: 1171683 - RNA, 18 nt, Human
ucugacaauaauuacuga

SEQ ID NO: 1171684 - RNA, 19 nt, Human
ucugccaacgaaaauucau

SEQ ID NO: 1171685 - RNA, 22 nt, Human
ugaagucacagauucuaacaau

SEQ ID NO: 1171686 - RNA, 21 nt, Human
ugacuaaaaauaaaaccagga

SEQ ID NO: 1171687 - RNA, 18 nt, Human
ugauuauagaaaaauacu

SEQ ID NO: 1171688 - RNA, 20 nt, Human
uggaaagggcauauuuggua

SEQ ID NO: 1171689 - RNA, 19 nt, Human
uggggguccuggagguggu

SEQ ID NO: 1171690 - RNA, 23 nt, Human
ugguaagaaugggggccaccagg

SEQ ID NO: 1171691 - RNA, 18 nt, Human
uguauacauaugauguac

SEQ ID NO: 1171692 - RNA, 18 nt, Human
ugucaaagagcuagugaa

SEQ ID NO: 1171693 - RNA, 21 nt, Human
uugaggagguuggccagguuu

SEQ ID NO: 1171694 - RNA, 20 nt, Human
aacauggcaaaacccugucu

SEQ ID NO: 1171695 - RNA, 21 nt, Human
aacauggcaaaacccugucuc

SEQ ID NO: 1171696 - RNA, 20 nt, Human
aagaacagcaaauccaaccc

SEQ ID NO: 1171697 - RNA, 18 nt, Human
aagaggcuggguaagccc

SEQ ID NO: 1171698 - RNA, 26 nt, Human
aagcagggcagacgaagaggcugggu

SEQ ID NO: 1171699 - RNA, 22 nt, Human
aagcuggagcuuguccacucgu

SEQ ID NO: 1171700 - RNA, 20 nt, Human
aaggucaaagcugaagugag

SEQ ID NO: 1171701 - RNA, 21 nt, Human
aagugacugggagccugaagc

SEQ ID NO: 1171702 - RNA, 21 nt, Human
acaaaaaaauacaaaaguuag

SEQ ID NO: 1171703 - RNA, 23 nt, Human
acagcaaauccaacccagaaaca

SEQ ID NO: 1171704 - RNA, 24 nt, Human
acagcaaauccaacccagaaacau

SEQ ID NO: 1171705 - RNA, 25 nt, Human
acccgugguuccaguugcuccagag

SEQ ID NO: 1171706 - RNA, 18 nt, Human
accuccuuucuguuccau

SEQ ID NO: 1171707 - RNA, 18 nt, Human
acugcacuccagacuggg

SEQ ID NO: 1171708 - RNA, 24 nt, Human
acugcacuccagacugggcuacag

SEQ ID NO: 1171709 - RNA, 18 nt, Human
acuuggcugguggaauga

SEQ ID NO: 1171710 - RNA, 26 nt, Human
agaacagcaaauccaacccagaaaca

SEQ ID NO: 1171711 - RNA, 23 nt, Human
agccuaggcacaaguucccuaag

SEQ ID NO: 1171712 - RNA, 23 nt, Human
agcucuuucacccagaccugcuu

SEQ ID NO: 1171713 - RNA, 21 nt, Human
aggcaagaacagcaaauccaa

SEQ ID NO: 1171714 - RNA, 21 nt, Human
aggcaaguuaucugggggccu

SEQ ID NO: 1171715 - RNA, 24 nt, Human
aggcugagguagaaggaccgcuug

SEQ ID NO: 1171716 - RNA, 23 nt, Human
agggagaaaagcagggcagacga

SEQ ID NO: 1171717 - RNA, 24 nt, Human
agguagaaggaccgcuugagccug

SEQ ID NO: 1171718 - RNA, 22 nt, Human
auagaaggaucuccacaccucc

SEQ ID NO: 1171719 - RNA, 23 nt, Human
augguaagugaggcuauugcugc

SEQ ID NO: 1171720 - RNA, 21 nt, Human
auugauuaaugcucaugguac

SEQ ID NO: 1171721 - RNA, 24 nt, Human
auuguaccacugcacuccagacug

SEQ ID NO: 1171722 - RNA, 21 nt, Human
auuguuuguuuagcauguaua

SEQ ID NO: 1171723 - RNA, 26 nt, Human
caaauccaacccagaaacaugaauua

SEQ ID NO: 1171724 - RNA, 22 nt, Human
caacauggcaaaacccugucuc

SEQ ID NO: 1171725 - RNA, 24 nt, Human
caacauggcaaaacccugucucua

SEQ ID NO: 1171726 - RNA, 21 nt, Human
caagaacagcaaauccaaccc

SEQ ID NO: 1171727 - RNA, 27 nt, Human
caagaacagcaaauccaacccagaaac

SEQ ID NO: 1171728 - RNA, 23 nt, Human
caccaggaccucuaaacccacag

SEQ ID NO: 1171729 - RNA, 24 nt, Human
cacccaggcaaguuaucugggggc

SEQ ID NO: 1171730 - RNA, 22 nt, Human
cacuccagacugggcuacagag

SEQ ID NO: 1171731 - RNA, 19 nt, Human
cacugcacuccagacuggg

SEQ ID NO: 1171732 - RNA, 24 nt, Human
cacugcacuccagacugggcuaca

SEQ ID NO: 1171733 - RNA, 23 nt, Human
cagcaaauccaacccagaaacau

SEQ ID NO: 1171734 - RNA, 22 nt, Human
caggaccucuaaacccacagag

SEQ ID NO: 1171735 - RNA, 30 nt, Human
cauggcaaaacccugucucuacaaaaaaag

SEQ ID NO: 1171736 - RNA, 21 nt, Human
ccacauauuuuaccucuuggg

SEQ ID NO: 1171737 - RNA, 20 nt, Human
ccacugcacuccagacuggg

SEQ ID NO: 1171738 - RNA, 20 nt, Human
ccacugcacuccagacuggg

SEQ ID NO: 1171739 - RNA, 21 nt, Human
ccacugcacuccagacugggc

SEQ ID NO: 1171740 - RNA, 21 nt, Human
ccagaaacaugaauuaauuca

SEQ ID NO: 1171741 - RNA, 22 nt, Human
ccagcugaggcccugcaggcaa

SEQ ID NO: 1171742 - RNA, 21 nt, Human
ccauucacagcucuuucaccc

SEQ ID NO: 1171743 - RNA, 25 nt, Human
cccacagagccuaggcacaaguucc

SEQ ID NO: 1171744 - RNA, 23 nt, Human
cccagucucagcccuaacccugc

SEQ ID NO: 1171745 - RNA, 22 nt, Human
cccuaacccugccagagaaggg

SEQ ID NO: 1171746 - RNA, 22 nt, Human
cccugcaggcaagaacagcaaa

SEQ ID NO: 1171747 - RNA, 25 nt, Human
ccuaacccugccagagaagggcagg

SEQ ID NO: 1171748 - RNA, 24 nt, Human
ccuuugggcaccaggaccucuaaa

SEQ ID NO: 1171749 - RNA, 19 nt, Human
cuacaaaaaaauacaaaag

SEQ ID NO: 1171750 - RNA, 18 nt, Human
cucagcccuaacccugcc

SEQ ID NO: 1171751 - RNA, 23 nt, Human
cugcacuccagacugggcuacag

SEQ ID NO: 1171752 - RNA, 24 nt, Human
cuucagagguggaugcaccucucu

SEQ ID NO: 1171753 - RNA, 25 nt, Human
gaagcacaucuccuuugggcaccag

SEQ ID NO: 1171754 - RNA, 29 nt, Human
gaaggaaggggagggagaaaagcagggcc

SEQ ID NO: 1171755 - RNA, 19 nt, Human
gaagucccaucauuaugcc

SEQ ID NO: 1171756 - RNA, 22 nt, Human
gaccucuaaacccacagagccu

SEQ ID NO: 1171757 - RNA, 22 nt, Human
gagaaucugaugaugacauucc

SEQ ID NO: 1171758 - RNA, 20 nt, Human
gcaagaacagcaaauccaac

SEQ ID NO: 1171759 - RNA, 22 nt, Human
gccauuauuguaccacugcacu

SEQ ID NO: 1171760 - RNA, 22 nt, Human
gccuuuguuagguggagacugu

SEQ ID NO: 1171761 - RNA, 23 nt, Human
gcucaugguacggugauuccucu

SEQ ID NO: 1171762 - RNA, 18 nt, Human
gcuguuugauuuguggac

SEQ ID NO: 1171763 - RNA, 18 nt, Human
ggcaugagguuuauuagg

SEQ ID NO: 1171764 - RNA, 19 nt, Human
ggccucucuguggccuugu

SEQ ID NO: 1171765 - RNA, 19 nt, Human
gggagggagaaaagcaggg

SEQ ID NO: 1171766 - RNA, 19 nt, Human
gggggacuagguccuucag

SEQ ID NO: 1171767 - RNA, 18 nt, Human
gggugcacccgugguucc

SEQ ID NO: 1171768 - RNA, 19 nt, Human
gugacugggagccugaagc

SEQ ID NO: 1171769 - RNA, 18 nt, Human
uaaauaaaccuccgauga

SEQ ID NO: 1171770 - RNA, 19 nt, Human
uaacccugccagagaaggg

SEQ ID NO: 1171771 - RNA, 22 nt, Human
uaacucucuaagccuuuagaug

SEQ ID NO: 1171772 - RNA, 21 nt, Human
uaagcccaaagugacugggag

SEQ ID NO: 1171773 - RNA, 20 nt, Human
uaaggagaagcuccucuagg

SEQ ID NO: 1171774 - RNA, 21 nt, Human
uacagucuagauuuccugucu

SEQ ID NO: 1171775 - RNA, 22 nt, Human
uaccacugcacuccagacuggg

SEQ ID NO: 1171776 - RNA, 18 nt, Human
uacggugauuccucuuuu

SEQ ID NO: 1171777 - RNA, 18 nt, Human
uacuuggcugguggaaug

SEQ ID NO: 1171778 - RNA, 18 nt, Human
uaguguggcagcuucugg

SEQ ID NO: 1171779 - RNA, 23 nt, Human
uauuauuaaaaaaugggcaaggg

SEQ ID NO: 1171780 - RNA, 22 nt, Human
ucacucuugagaagucccauca

SEQ ID NO: 1171781 - RNA, 21 nt, Human
ucagcagggcuucagcagcac

SEQ ID NO: 1171782 - RNA, 21 nt, Human
ucagcagucccaucuccuucu

SEQ ID NO: 1171783 - RNA, 22 nt, Human
ucaguccugaugggaaauuuga

SEQ ID NO: 1171784 - RNA, 22 nt, Human
uccacaccuccuuucuguucca

SEQ ID NO: 1171785 - RNA, 19 nt, Human
uccauucacagcucuuuca

SEQ ID NO: 1171786 - RNA, 19 nt, Human
uccuuagcucccacauauu

SEQ ID NO: 1171787 - RNA, 22 nt, Human
ucucuuggcaugaggagccuga

SEQ ID NO: 1171788 - RNA, 22 nt, Human
ucucuugugucuacuggugauu

SEQ ID NO: 1171789 - RNA, 22 nt, Human
ugacagcucagcucuugugcuu

SEQ ID NO: 1171790 - RNA, 20 nt, Human
ugacauuaccuugcaauggu

SEQ ID NO: 1171791 - RNA, 22 nt, Human
ugacucagcagggcuucagcag

SEQ ID NO: 1171792 - RNA, 21 nt, Human
ugacugucuucagccuguggg

SEQ ID NO: 1171793 - RNA, 19 nt, Human
ugagaacuugcaacuguag

SEQ ID NO: 1171794 - RNA, 20 nt, Human
ugagaacuugcaacuguaga

SEQ ID NO: 1171795 - RNA, 18 nt, Human
ugagaagggagugagagc

SEQ ID NO: 1171796 - RNA, 19 nt, Human
ugagaugccauguuggugg

SEQ ID NO: 1171797 - RNA, 23 nt, Human
ugagccuggaaggucaaagcuga

SEQ ID NO: 1171798 - RNA, 23 nt, Human
ugaucucuuggcaugaggagccu

SEQ ID NO: 1171799 - RNA, 20 nt, Human
ugauuuguggacucugacuc

SEQ ID NO: 1171800 - RNA, 20 nt, Human
ugcucaugguacggugauuc

SEQ ID NO: 1171801 - RNA, 21 nt, Human
ugcucccaaguggcagccuua

SEQ ID NO: 1171802 - RNA, 24 nt, Human
ugcucucaggauccaaaccugcag

SEQ ID NO: 1171803 - RNA, 21 nt, Human
ugcuucacagaggcaaagggu

SEQ ID NO: 1171804 - RNA, 19 nt, Human
ugcuucauggauccacuuc

SEQ ID NO: 1171805 - RNA, 22 nt, Human
uggccuugugucagcaguccca

SEQ ID NO: 1171806 - RNA, 25 nt, Human
uggcucauccacuaugccuucaaca

SEQ ID NO: 1171807 - RNA, 19 nt, Human
ugggaaauuugagaugugc

SEQ ID NO: 1171808 - RNA, 18 nt, Human
ugggaugcuucacagagg

SEQ ID NO: 1171809 - RNA, 24 nt, Human
ugggauguuaugugagaugccaug

SEQ ID NO: 1171810 - RNA, 21 nt, Human
uggggugcacccgugguucca

SEQ ID NO: 1171811 - RNA, 22 nt, Human
uggucugagggcccagucucag

SEQ ID NO: 1171812 - RNA, 18 nt, Human
ugugcugacaaguuguug

SEQ ID NO: 1171813 - RNA, 23 nt, Human
uguggcagcuucuggauggugcc

SEQ ID NO: 1171814 - RNA, 19 nt, Human
uguuccuggggaaucuucc

SEQ ID NO: 1171815 - RNA, 25 nt, Human
uuaauccauucacagcucuuucacc

SEQ ID NO: 1171816 - RNA, 22 nt, Human
uuagcugggcgugguggggugc

SEQ ID NO: 1171817 - RNA, 21 nt, Human
uuccaaauggucugagggccc

SEQ ID NO: 1171818 - RNA, 19 nt, Human
uuccucuuuuugcuuggug

SEQ ID NO: 1171819 - RNA, 21 nt, Human
uuccuggggaaucuuccuguc

SEQ ID NO: 1171820 - RNA, 23 nt, Human
uuguaccacugcacuccagacug

SEQ ID NO: 1171821 - RNA, 21 nt, Human
uuuuugguaccucugcugguc

SEQ ID NO: 1171822 - RNA, 21 nt, Human
aaaucagguuuuauuaagcca

SEQ ID NO: 1171823 - RNA, 21 nt, Human
aaauccacgucgcagcccagg

SEQ ID NO: 1171824 - RNA, 20 nt, Human
aacaacaaaaaagcaccaag

SEQ ID NO: 1171825 - RNA, 22 nt, Human
aacaaguuaacaacaacaaaaa

SEQ ID NO: 1171826 - RNA, 20 nt, Human
aacauacuaaugauauauaa

SEQ ID NO: 1171827 - RNA, 22 nt, Human
aacugcuaaaaaauaaauugag

SEQ ID NO: 1171828 - RNA, 20 nt, Human
aagaaaccuggcaucucuac

SEQ ID NO: 1171829 - RNA, 25 nt, Human
aagcuuguggccacuagcauagaug

SEQ ID NO: 1171830 - RNA, 27 nt, Human
acaaaauggaagacucuaaaauguacc

SEQ ID NO: 1171831 - RNA, 19 nt, Human
acagcauuugaggaagagg

SEQ ID NO: 1171832 - RNA, 20 nt, Human
acccagcacuuaagagugcc

SEQ ID NO: 1171833 - RNA, 21 nt, Human
acgcuggaggaacauaaaaca

SEQ ID NO: 1171834 - RNA, 19 nt, Human
agaaggaugaauggagggu

SEQ ID NO: 1171835 - RNA, 21 nt, Human
agaauuacagauguauuacua

SEQ ID NO: 1171836 - RNA, 18 nt, Human
agauaaaaaagaaaccug

SEQ ID NO: 1171837 - RNA, 24 nt, Human
agccaauccucauaacccagcacu

SEQ ID NO: 1171838 - RNA, 19 nt, Human
aguacacgaccaauuaaaa

SEQ ID NO: 1171839 - RNA, 20 nt, Human
auacuugcaucccagccaua

SEQ ID NO: 1171840 - RNA, 18 nt, Human
aucucggugccuagugug

SEQ ID NO: 1171841 - RNA, 24 nt, Human
auggagggucagcuucaguccaca

SEQ ID NO: 1171842 - RNA, 22 nt, Human
caaaauggaagacucuaaaaug

SEQ ID NO: 1171843 - RNA, 18 nt, Human
caacaacaaaaaagcacc

SEQ ID NO: 1171844 - RNA, 23 nt, Human
caacaacaaaaaagcaccaagua

SEQ ID NO: 1171845 - RNA, 18 nt, Human
caacauuaaaagauacac

SEQ ID NO: 1171846 - RNA, 21 nt, Human
caagcaacaagccucucaucc

SEQ ID NO: 1171847 - RNA, 18 nt, Human
caccaaguuccccaaauc

SEQ ID NO: 1171848 - RNA, 24 nt, Human
cauaacccagcacuuaagagugcc

SEQ ID NO: 1171849 - RNA, 20 nt, Human
ccacaugcuaacuggucuuc

SEQ ID NO: 1171850 - RNA, 20 nt, Human
ccacccaggagagcugacag

SEQ ID NO: 1171851 - RNA, 23 nt, Human
cccagcgagacugacagcagucu

SEQ ID NO: 1171852 - RNA, 22 nt, Human
ccccugaaaggguaacaccuua

SEQ ID NO: 1171853 - RNA, 23 nt, Human
ccuagaccaagcuuguggccacu

SEQ ID NO: 1171854 - RNA, 23 nt, Human
cgagaaggaugaauggaggguca

SEQ ID NO: 1171855 - RNA, 18 nt, Human
cgaguguuccuguuucuu

SEQ ID NO: 1171856 - RNA, 20 nt, Human
cuaaaugaacaaguuaacag

SEQ ID NO: 1171857 - RNA, 21 nt, Human
cuaaaugaagaauuacagaug

SEQ ID NO: 1171858 - RNA, 23 nt, Human
cuacaggggccaccaaguucccc

SEQ ID NO: 1171859 - RNA, 21 nt, Human
cucccuggcagugagcuucag

SEQ ID NO: 1171860 - RNA, 19 nt, Human
cugacagcagucuccaacu

SEQ ID NO: 1171861 - RNA, 18 nt, Human
cugccugucacuuuggug

SEQ ID NO: 1171862 - RNA, 20 nt, Human
cuggcagugagcuucaggcc

SEQ ID NO: 1171863 - RNA, 25 nt, Human
cuugcugucccagcgagacugacag

SEQ ID NO: 1171864 - RNA, 21 nt, Human
cuuuugcccuaauuacccuuc

SEQ ID NO: 1171865 - RNA, 19 nt, Human
gaaauaauaacaaaaaugc

SEQ ID NO: 1171866 - RNA, 24 nt, Human
gaaauaauaacaaaaaugcuaugg

SEQ ID NO: 1171867 - RNA, 19 nt, Human
gaguuguucacuuuagugg

SEQ ID NO: 1171868 - RNA, 20 nt, Human
gcucugggucacucaggacu

SEQ ID NO: 1171869 - RNA, 22 nt, Human
ggaggaacauaaaacaauguua

SEQ ID NO: 1171870 - RNA, 21 nt, Human
ggaguuguucacuuuaguggg

SEQ ID NO: 1171871 - RNA, 24 nt, Human
gugcucccacuuguauccugucuu

SEQ ID NO: 1171872 - RNA, 19 nt, Human
uaaaaaagaaaccuggcau

SEQ ID NO: 1171873 - RNA, 24 nt, Human
uaacaacaacaaaaaagcaccaag

SEQ ID NO: 1171874 - RNA, 22 nt, Human
uaagccaaauccauaucccuug

SEQ ID NO: 1171875 - RNA, 20 nt, Human
uaccacauaagcccaguuua

SEQ ID NO: 1171876 - RNA, 19 nt, Human
uagcaauacuugcauccca

SEQ ID NO: 1171877 - RNA, 21 nt, Human
uagcaauacuugcaucccagc

SEQ ID NO: 1171878 - RNA, 19 nt, Human
uagccucuaaaccaauaug

SEQ ID NO: 1171879 - RNA, 19 nt, Human
uagcuggccagccaauccu

SEQ ID NO: 1171880 - RNA, 23 nt, Human
uaguggagaagugggcuuuagga

SEQ ID NO: 1171881 - RNA, 19 nt, Human
uccagacugccugucacuu

SEQ ID NO: 1171882 - RNA, 25 nt, Human
uccccaaaucuaccacugaagggac

SEQ ID NO: 1171883 - RNA, 23 nt, Human
ucccccaguguuaggcgagaagg

SEQ ID NO: 1171884 - RNA, 19 nt, Human
ucccuuggugaagacaugc

SEQ ID NO: 1171885 - RNA, 19 nt, Human
uccuagaccaagcuugugg

SEQ ID NO: 1171886 - RNA, 23 nt, Human
ucugaagcgaguguuccuguuuc

SEQ ID NO: 1171887 - RNA, 22 nt, Human
ucuuugcaaaugucaggccaua

SEQ ID NO: 1171888 - RNA, 25 nt, Human
ugaaaggguaacaccuuaaagcuga

SEQ ID NO: 1171889 - RNA, 18 nt, Human
ugaagacaugcuuggcag

SEQ ID NO: 1171890 - RNA, 19 nt, Human
ugagaauaccacauaagcc

SEQ ID NO: 1171891 - RNA, 20 nt, Human
ugauuuuagcacuuuucccc

SEQ ID NO: 1171892 - RNA, 18 nt, Human
ugccacccaggagagcug

SEQ ID NO: 1171893 - RNA, 18 nt, Human
ugcccuaauuacccuucu

SEQ ID NO: 1171894 - RNA, 21 nt, Human
uggagaagugggcuuuaggau

SEQ ID NO: 1171895 - RNA, 19 nt, Human
uggcacagccaucuucugc

SEQ ID NO: 1171896 - RNA, 23 nt, Human
uggcagauuugccaagauuagca

SEQ ID NO: 1171897 - RNA, 18 nt, Human
uggguuucuucuguaccc

SEQ ID NO: 1171898 - RNA, 22 nt, Human
uguauccugucuugauuuuagc

SEQ ID NO: 1171899 - RNA, 19 nt, Human
ugugaagguaucuaugcug

SEQ ID NO: 1171900 - RNA, 23 nt, Human
uuaaaaugaaacuuaaacuagca

SEQ ID NO: 1171901 - RNA, 18 nt, Human
uugaggaagaggaucuaa

SEQ ID NO: 1171902 - RNA, 20 nt, Human
uugaggaagaggaucuaauu

SEQ ID NO: 1171903 - RNA, 20 nt, Human
uugucaguguuccauuucuu

SEQ ID NO: 1171904 - RNA, 26 nt, Human
aaacagacaucacaucuaccguuccu

SEQ ID NO: 1171905 - RNA, 21 nt, Human
agggaguaaauaaaaaucuga

SEQ ID NO: 1171906 - RNA, 24 nt, Human
agggaguaaauaaaaaucugaagc

SEQ ID NO: 1171907 - RNA, 19 nt, Human
gaagcaaguuuuacuuguu

SEQ ID NO: 1171908 - RNA, 20 nt, Human
guuccuuccccuuagguggc

SEQ ID NO: 1171909 - RNA, 19 nt, Human
ucugaagcaaguuuuacuu

SEQ ID NO: 1171910 - RNA, 21 nt, Human
uggguuucagggaggcagucu

SEQ ID NO: 1171911 - RNA, 19 nt, Human
uucuaagugaugcuucaag

SEQ ID NO: 1171912 - RNA, 21 nt, Human
aacaaaaagaagucagaagga

SEQ ID NO: 1171913 - RNA, 18 nt, Human
aagcaaugauaccagcca

SEQ ID NO: 1171914 - RNA, 23 nt, Human
aagcuccauuaaguucaagcaau

SEQ ID NO: 1171915 - RNA, 23 nt, Human
acuucaaaaaguucauggaaaaa

SEQ ID NO: 1171916 - RNA, 22 nt, Human
agaaaaacaggugcccuucagg

SEQ ID NO: 1171917 - RNA, 25 nt, Human
cauauguguguguuucuaucuuccc

SEQ ID NO: 1171918 - RNA, 19 nt, Human
gaaaaauagaauuaaaaga

SEQ ID NO: 1171919 - RNA, 20 nt, Human
uaucccuaaagaacugaggg

SEQ ID NO: 1171920 - RNA, 20 nt, Human
uauguguguguuucuaucuu

SEQ ID NO: 1171921 - RNA, 20 nt, Human
ucagaaggagccaaaucagg

SEQ ID NO: 1171922 - RNA, 18 nt, Human
ucuaucccuaaagaacug

SEQ ID NO: 1171923 - RNA, 23 nt, Human
uucaaaaaguucauggaaaaaua

SEQ ID NO: 1171924 - RNA, 24 nt, Human
aaaaagggaagaaagcaaaaacgu

SEQ ID NO: 1171925 - RNA, 21 nt, Human
aagcaaaaacgucccuugcac

SEQ ID NO: 1171926 - RNA, 18 nt, Human
agaaagcaaaaacguccc

SEQ ID NO: 1171927 - RNA, 18 nt, Human
cccugcaacccagugucu

SEQ ID NO: 1171928 - RNA, 18 nt, Human
ccgaacuggaacguaauu

SEQ ID NO: 1171929 - RNA, 18 nt, Human
cucgugcuuuuucagccc

SEQ ID NO: 1171930 - RNA, 24 nt, Human
gggagguggaaaacuaaaggucaa

SEQ ID NO: 1171931 - RNA, 20 nt, Human
uacacaccgaacuggaacgu

SEQ ID NO: 1171932 - RNA, 19 nt, Human
ucaaaaagggaagaaagca

SEQ ID NO: 1171933 - RNA, 24 nt, Human
ugggagguggaaaacuaaagguca

SEQ ID NO: 1171934 - RNA, 18 nt, Human
uugaaguugggaggugga

SEQ ID NO: 1171935 - RNA, 24 nt, Human
aaacaggcaagcugcuacauuccu

SEQ ID NO: 1171936 - RNA, 23 nt, Human
aagcauuucggcacccucaaaug

SEQ ID NO: 1171937 - RNA, 20 nt, Human
acccugagaacgauaaacug

SEQ ID NO: 1171938 - RNA, 21 nt, Human
agaaaggaggaauuaguguuu

SEQ ID NO: 1171939 - RNA, 18 nt, Human
agaggcagaaaucugguc

SEQ ID NO: 1171940 - RNA, 23 nt, Human
agcaaucuuguucuuuucucucc

SEQ ID NO: 1171941 - RNA, 18 nt, Human
agcuuccgaaaaaauucu

SEQ ID NO: 1171942 - RNA, 23 nt, Human
aguuagucacaccagaucgagga

SEQ ID NO: 1171943 - RNA, 21 nt, Human
augcuucuggauugaagguag

SEQ ID NO: 1171944 - RNA, 21 nt, Human
auuuugagaguuucugaauuu

SEQ ID NO: 1171945 - RNA, 21 nt, Human
caaaugcaauacuuucuaaug

SEQ ID NO: 1171946 - RNA, 21 nt, Human
caacugggccgaacaagcagg

SEQ ID NO: 1171947 - RNA, 24 nt, Human
cacacuugcuaaaugagcuggaaa

SEQ ID NO: 1171948 - RNA, 19 nt, Human
caccauuaccccccuuuag

SEQ ID NO: 1171949 - RNA, 22 nt, Human
cacuuauaacagaaacacgaga

SEQ ID NO: 1171950 - RNA, 20 nt, Human
cagcucacccugagaacgau

SEQ ID NO: 1171951 - RNA, 21 nt, Human
cauaacauaccaccuuguuca

SEQ ID NO: 1171952 - RNA, 18 nt, Human
caucaaguuguucacuug

SEQ ID NO: 1171953 - RNA, 20 nt, Human
ccucaaauguacugggaaug

SEQ ID NO: 1171954 - RNA, 21 nt, Human
cugaauggaaucuccagauga

SEQ ID NO: 1171955 - RNA, 18 nt, Human
cuggaaaaauggguggcg

SEQ ID NO: 1171956 - RNA, 26 nt, Human
cuucaugaucauauaguaaauaagcu

SEQ ID NO: 1171957 - RNA, 28 nt, Human
gaccuggcagcugaauuucugaacugga

SEQ ID NO: 1171958 - RNA, 20 nt, Human
gcaucaccguugcauuuacu

SEQ ID NO: 1171959 - RNA, 21 nt, Human
gcuccuuucgguggguuaaaa

SEQ ID NO: 1171960 - RNA, 23 nt, Human
gcuuuccaaaguuauccucaauc

SEQ ID NO: 1171961 - RNA, 23 nt, Human
gggaaugccagcaguuuccaaag

SEQ ID NO: 1171962 - RNA, 20 nt, Human
ggucagcaagguguuuggau

SEQ ID NO: 1171963 - RNA, 21 nt, Human
guaaaggaaggaaaggaucug

SEQ ID NO: 1171964 - RNA, 21 nt, Human
uaguaagcuguuuucaauguu

SEQ ID NO: 1171965 - RNA, 22 nt, Human
uaguagcaggguuuuccaaacc

SEQ ID NO: 1171966 - RNA, 25 nt, Human
uaucccaagcaucacuucuaucugc

SEQ ID NO: 1171967 - RNA, 20 nt, Human
ucaguaguaagucauucguu

SEQ ID NO: 1171968 - RNA, 24 nt, Human
ucccuuuuuauuuaaaugacugga

SEQ ID NO: 1171969 - RNA, 19 nt, Human
ucucaauauucucugcugu

SEQ ID NO: 1171970 - RNA, 19 nt, Human
ucucuccuggaaaccugga

SEQ ID NO: 1171971 - RNA, 23 nt, Human
ucugaacuggagcuuuuggaggc

SEQ ID NO: 1171972 - RNA, 21 nt, Human
ucuuucuuucucaauauucuc

SEQ ID NO: 1171973 - RNA, 18 nt, Human
ugaacuacuuucugcagg

SEQ ID NO: 1171974 - RNA, 23 nt, Human
ugaaggaaaaacugcauuuucac

SEQ ID NO: 1171975 - RNA, 19 nt, Human
ugacacacuugcuaaauga

SEQ ID NO: 1171976 - RNA, 19 nt, Human
ugaccagugcuucaccacu

SEQ ID NO: 1171977 - RNA, 23 nt, Human
ugaucauauaguaaauaagcuuc

SEQ ID NO: 1171978 - RNA, 19 nt, Human
ugcacagaaaaggucauca

SEQ ID NO: 1171979 - RNA, 19 nt, Human
ugcauuuucaccauuaccc

SEQ ID NO: 1171980 - RNA, 24 nt, Human
ugccugagcucagaggcagaaauc

SEQ ID NO: 1171981 - RNA, 19 nt, Human
uggaaaaacaggcaagcug

SEQ ID NO: 1171982 - RNA, 20 nt, Human
uggaaaaacaggcaagcugc

SEQ ID NO: 1171983 - RNA, 24 nt, Human
uggagcuuuuggaggcacugaugg

SEQ ID NO: 1171984 - RNA, 18 nt, Human
uggaucuuuaaaacaugc

SEQ ID NO: 1171985 - RNA, 20 nt, Human
uggcaaaaaauaaacaaacu

SEQ ID NO: 1171986 - RNA, 25 nt, Human
uggcaaaaaauaaacaaacuuucca

SEQ ID NO: 1171987 - RNA, 22 nt, Human
uggcaucaccguugcauuuacu

SEQ ID NO: 1171988 - RNA, 24 nt, Human
ugggaaaaaacagaauuaguccca

SEQ ID NO: 1171989 - RNA, 19 nt, Human
uggucagcaagguguuugg

SEQ ID NO: 1171990 - RNA, 21 nt, Human
ugguccauuagcuugccugag

SEQ ID NO: 1171991 - RNA, 19 nt, Human
uguacugggaaugccagca

SEQ ID NO: 1171992 - RNA, 23 nt, Human
uguuacugguaaaauuuugugau

SEQ ID NO: 1171993 - RNA, 22 nt, Human
uguuuggauggcauacagugug

SEQ ID NO: 1171994 - RNA, 18 nt, Human
uuaguguuuccuucaauc

SEQ ID NO: 1171995 - RNA, 23 nt, Human
uuccacaguugaguuuucuugcu

SEQ ID NO: 1171996 - RNA, 22 nt, Human
uugaacuacuuucugcagguaa

SEQ ID NO: 1171997 - RNA, 22 nt, Human
uugaggacaacaauggaguuga

SEQ ID NO: 1171998 - RNA, 24 nt, Human
uuguuuggucacagcugauucugc

SEQ ID NO: 1171999 - RNA, 20 nt, Human
uuucccuuuuuauuuaaaug

SEQ ID NO: 1172000 - RNA, 21 nt, Human
uuuggauuuaugacacuuucc

SEQ ID NO: 1172001 - RNA, 18 nt, Human
aguacuuugaggcuagug

SEQ ID NO: 1172002 - RNA, 20 nt, Human
gagagauaguagggggaccc

SEQ ID NO: 1172003 - RNA, 18 nt, Human
gaggagggauugguagca

SEQ ID NO: 1172004 - RNA, 20 nt, Human
ggauuuggaggagggauugg

SEQ ID NO: 1172005 - RNA, 18 nt, Human
uagcucaggcugagauca

SEQ ID NO: 1172006 - RNA, 19 nt, Human
uuucaugguugacauggau

SEQ ID NO: 1172007 - RNA, 23 nt, Human
aaacugauuuugccuucucuuug

SEQ ID NO: 1172008 - RNA, 20 nt, Human
acugauuuugccuucucuuu

SEQ ID NO: 1172009 - RNA, 26 nt, Human
acuuagcaacucagggacacaaacug

SEQ ID NO: 1172010 - RNA, 21 nt, Human
augcugaccagaaacaaagca

SEQ ID NO: 1172011 - RNA, 19 nt, Human
cacacccacacaaauacca

SEQ ID NO: 1172012 - RNA, 20 nt, Human
cacacccacacaaauaccaa

SEQ ID NO: 1172013 - RNA, 21 nt, Human
cacacccacacaaauaccaau

SEQ ID NO: 1172014 - RNA, 21 nt, Human
caguagccaggaacugaaugc

SEQ ID NO: 1172015 - RNA, 25 nt, Human
cccacacaaauaccaauaucuauau

SEQ ID NO: 1172016 - RNA, 23 nt, Human
cgagcaccucccaguaagacuga

SEQ ID NO: 1172017 - RNA, 25 nt, Human
cugaccagaaacaaagcacauuuca

SEQ ID NO: 1172018 - RNA, 21 nt, Human
cugcaaaauuucuucaguagc

SEQ ID NO: 1172019 - RNA, 22 nt, Human
cugguugguggacguuucuucu

SEQ ID NO: 1172020 - RNA, 22 nt, Human
gagcaccucccaguaagacuga

SEQ ID NO: 1172021 - RNA, 18 nt, Human
gcaaaauuucuucaguag

SEQ ID NO: 1172022 - RNA, 19 nt, Human
ggaggcagguguuuccugg

SEQ ID NO: 1172023 - RNA, 26 nt, Human
guaacacacacccacacaaauaccaa

SEQ ID NO: 1172024 - RNA, 23 nt, Human
uaaaugaauuaauauauauuuua

SEQ ID NO: 1172025 - RNA, 22 nt, Human
ucuggaacuccugcaaaauuuc

SEQ ID NO: 1172026 - RNA, 20 nt, Human
ugaacauguucaacauuuuu

SEQ ID NO: 1172027 - RNA, 19 nt, Human
ugaccagaaacaaagcaca

SEQ ID NO: 1172028 - RNA, 20 nt, Human
ugcaaaauuucuucaguagc

SEQ ID NO: 1172029 - RNA, 19 nt, Human
uguaacacacacccacaca

SEQ ID NO: 1172030 - RNA, 18 nt, Human
aaccugcucuuucacucu

SEQ ID NO: 1172031 - RNA, 19 nt, Human
aaccugcucuuucacucuu

SEQ ID NO: 1172032 - RNA, 22 nt, Human
aaguucuccaaguacccaccgg

SEQ ID NO: 1172033 - RNA, 18 nt, Human
aggaagcuucaggacuac

SEQ ID NO: 1172034 - RNA, 24 nt, Human
aggaagcuucaggacuacaccaaa

SEQ ID NO: 1172035 - RNA, 26 nt, Human
caaguacccaccggacucaggagccc

SEQ ID NO: 1172036 - RNA, 20 nt, Human
caccaaagaagcagaaccug

SEQ ID NO: 1172037 - RNA, 19 nt, Human
caugacugcucucuacaug

SEQ ID NO: 1172038 - RNA, 18 nt, Human
ccugcucuuucacucugu

SEQ ID NO: 1172039 - RNA, 18 nt, Human
cgcucugaauaaugggau

SEQ ID NO: 1172040 - RNA, 21 nt, Human
cuacaccaaagaagcagaacc

SEQ ID NO: 1172041 - RNA, 22 nt, Human
cuccaaguacccaccggacuca

SEQ ID NO: 1172042 - RNA, 22 nt, Human
cuguugcauuguguggagugca

SEQ ID NO: 1172043 - RNA, 18 nt, Human
gacugcucucuacaugaa

SEQ ID NO: 1172044 - RNA, 20 nt, Human
ggagcccagcuggcuuugcc

SEQ ID NO: 1172045 - RNA, 19 nt, Human
guucuccaaguacccaccg

SEQ ID NO: 1172046 - RNA, 22 nt, Human
ucacucuguugcauugugugga

SEQ ID NO: 1172047 - RNA, 19 nt, Human
uccaaguacccaccggacu

SEQ ID NO: 1172048 - RNA, 23 nt, Human
ucuccaaguacccaccggacucu

SEQ ID NO: 1172049 - RNA, 26 nt, Human
ugaaacaucuccucauggagcuucag

SEQ ID NO: 1172050 - RNA, 21 nt, Human
ugaaacccuacaagcguuucc

SEQ ID NO: 1172051 - RNA, 23 nt, Human
agcuccccaaugucauggccucu

SEQ ID NO: 1172052 - RNA, 21 nt, Human
aggcucugauggccaaaaacg

SEQ ID NO: 1172053 - RNA, 19 nt, Human
ccccaaugucauggccucu

SEQ ID NO: 1172054 - RNA, 23 nt, Human
aaacagaucauaaaaacauucuc

SEQ ID NO: 1172055 - RNA, 22 nt, Human
aacaaaaaaaaugcacaacuga

SEQ ID NO: 1172056 - RNA, 20 nt, Human
aacagagcaagacuccaucu

SEQ ID NO: 1172057 - RNA, 21 nt, Human
aacauagugagauccugucuc

SEQ ID NO: 1172058 - RNA, 25 nt, Human
aacugacacacagggaucaaucuca

SEQ ID NO: 1172059 - RNA, 20 nt, Human
aagagcauacuaugaacuaa

SEQ ID NO: 1172060 - RNA, 20 nt, Human
aagauggacagcagcuauag

SEQ ID NO: 1172061 - RNA, 22 nt, Human
aaggggguaugagaauuuuggg

SEQ ID NO: 1172062 - RNA, 21 nt, Human
aauaaaugacaaacaauucua

SEQ ID NO: 1172063 - RNA, 18 nt, Human
aauggaugggcaagaugg

SEQ ID NO: 1172064 - RNA, 24 nt, Human
aauuugggaggaaaacacagauua

SEQ ID NO: 1172065 - RNA, 18 nt, Human
acaaaauaucaaucuaag

SEQ ID NO: 1172066 - RNA, 25 nt, Human
acagagcaagacuccaucucuaaaa

SEQ ID NO: 1172067 - RNA, 26 nt, Human
acauuuaucacaucucgaaucaccuc

SEQ ID NO: 1172068 - RNA, 18 nt, Human
accagcuggagaacauag

SEQ ID NO: 1172069 - RNA, 22 nt, Human
accaguguagugguaaacagua

SEQ ID NO: 1172070 - RNA, 23 nt, Human
acuaagcauuacaacaaaaaaga

SEQ ID NO: 1172071 - RNA, 20 nt, Human
acucgcuguuagaacuuugg

SEQ ID NO: 1172072 - RNA, 24 nt, Human
agaaaucccacaccuccucacgcc

SEQ ID NO: 1172073 - RNA, 22 nt, Human
agaacauacuacucagcaacaa

SEQ ID NO: 1172074 - RNA, 21 nt, Human
agacagaucccauggaggcag

SEQ ID NO: 1172075 - RNA, 19 nt, Human
agaggaauugauugggaaa

SEQ ID NO: 1172076 - RNA, 25 nt, Human
agauuagaaauguuugugagaaggu

SEQ ID NO: 1172077 - RNA, 18 nt, Human
agcaaaucuguggcugcc

SEQ ID NO: 1172078 - RNA, 21 nt, Human
agcaacaaaaaaaaugcacaa

SEQ ID NO: 1172079 - RNA, 20 nt, Human
agcauuuugggaggcugagg

SEQ ID NO: 1172080 - RNA, 24 nt, Human
agccuaggcaacagagcaagacuc

SEQ ID NO: 1172081 - RNA, 23 nt, Human
aggaguucaagaccagccuaggc

SEQ ID NO: 1172082 - RNA, 24 nt, Human
aggaucaucugagcccaggaguuc

SEQ ID NO: 1172083 - RNA, 24 nt, Human
aggcacaguggcucacacuuguaa

SEQ ID NO: 1172084 - RNA, 25 nt, Human
aggcugaggacaggaggaucaucug

SEQ ID NO: 1172085 - RNA, 23 nt, Human
agggaucaaucucaaaaaucugc

SEQ ID NO: 1172086 - RNA, 18 nt, Human
aguggcacacaccuauag

SEQ ID NO: 1172087 - RNA, 24 nt, Human
aguggcucacacuuguaaucccag

SEQ ID NO: 1172088 - RNA, 23 nt, Human
auggcaguugacuugccaauauc

SEQ ID NO: 1172089 - RNA, 23 nt, Human
auggucaauauucaaaauauauc

SEQ ID NO: 1172090 - RNA, 23 nt, Human
auuugggaggaaaacacagauua

SEQ ID NO: 1172091 - RNA, 24 nt, Human
caaaauuccaauucaagacuauaa

SEQ ID NO: 1172092 - RNA, 18 nt, Human
caaacaaagaacaugagc

SEQ ID NO: 1172093 - RNA, 19 nt, Human
caaaccacaaacagggaag

SEQ ID NO: 1172094 - RNA, 20 nt, Human
caacaaaaaaaaugcacaac

SEQ ID NO: 1172095 - RNA, 25 nt, Human
caacaaaaaaaaugcacaacugaca

SEQ ID NO: 1172096 - RNA, 20 nt, Human
caacaaaaaagagguacuac

SEQ ID NO: 1172097 - RNA, 23 nt, Human
caacaauauaaagacagauccca

SEQ ID NO: 1172098 - RNA, 21 nt, Human
caagguaggauuuuggacuuu

SEQ ID NO: 1172099 - RNA, 22 nt, Human
caaguagcucacauccagugaa

SEQ ID NO: 1172100 - RNA, 18 nt, Human
caaucugauccaaaucca

SEQ ID NO: 1172101 - RNA, 23 nt, Human
cacacuuguaaucccagcacuuu

SEQ ID NO: 1172102 - RNA, 24 nt, Human
cacauuuaucacaucucgaaucaa

SEQ ID NO: 1172103 - RNA, 19 nt, Human
cacugcacuccagccagua

SEQ ID NO: 1172104 - RNA, 19 nt, Human
cacugcacuccagccagua

SEQ ID NO: 1172105 - RNA, 20 nt, Human
cacugcacuccagccaguag

SEQ ID NO: 1172106 - RNA, 18 nt, Human
cacuuguaaucccagcac

SEQ ID NO: 1172107 - RNA, 22 nt, Human
cacuuguaaucccagcacuuua

SEQ ID NO: 1172108 - RNA, 24 nt, Human
cagagcaagacuccaucucuaaaa

SEQ ID NO: 1172109 - RNA, 18 nt, Human
cagcacuuuaggaggccg

SEQ ID NO: 1172110 - RNA, 20 nt, Human
cagcacuuuaggaggccgag

SEQ ID NO: 1172111 - RNA, 18 nt, Human
cagcauuuugggaggcug

SEQ ID NO: 1172112 - RNA, 25 nt, Human
cagcauuuugggaggcugaggacag

SEQ ID NO: 1172113 - RNA, 21 nt, Human
cauuauauagccauagagaau

SEQ ID NO: 1172114 - RNA, 24 nt, Human
cauuauauagccauagagaaugca

SEQ ID NO: 1172115 - RNA, 18 nt, Human
ccaagaggaagcggccga

SEQ ID NO: 1172116 - RNA, 18 nt, Human
ccacugcacuccagccag

SEQ ID NO: 1172117 - RNA, 18 nt, Human
ccacugcacuccagccag

SEQ ID NO: 1172118 - RNA, 19 nt, Human
ccacugcacuccagccagu

SEQ ID NO: 1172119 - RNA, 22 nt, Human
ccacugcacuccagccaguaga

SEQ ID NO: 1172120 - RNA, 19 nt, Human
ccaguuaguaaaaucaaug

SEQ ID NO: 1172121 - RNA, 24 nt, Human
ccaguuaguaaaaucaaugaaauc

SEQ ID NO: 1172122 - RNA, 23 nt, Human
ccccaauuucuccaauccacucc

SEQ ID NO: 1172123 - RNA, 22 nt, Human
ccccuaaucucucaucuauacc

SEQ ID NO: 1172124 - RNA, 18 nt, Human
ccuaaaguaaaaauaaaa

SEQ ID NO: 1172125 - RNA, 22 nt, Human
ccugguggcucccagcauuuug

SEQ ID NO: 1172126 - RNA, 23 nt, Human
ccuucuaugucgugaacacucag

SEQ ID NO: 1172127 - RNA, 20 nt, Human
cgugauaguggcugcacaga

SEQ ID NO: 1172128 - RNA, 19 nt, Human
cuaggaguuugaggcugca

SEQ ID NO: 1172129 - RNA, 22 nt, Human
cucaaaccacaaacagggaagu

SEQ ID NO: 1172130 - RNA, 22 nt, Human
cucacacuuguaaucccagcac

SEQ ID NO: 1172131 - RNA, 24 nt, Human
cucacacuuguaaucccagcacuu

SEQ ID NO: 1172132 - RNA, 21 nt, Human
cucugccuucucuugcucuuc

SEQ ID NO: 1172133 - RNA, 20 nt, Human
cugacauaagauagaacaua

SEQ ID NO: 1172134 - RNA, 19 nt, Human
cugcagcccacccgccaag

SEQ ID NO: 1172135 - RNA, 23 nt, Human
cugcagugagcuacagacugcac

SEQ ID NO: 1172136 - RNA, 24 nt, Human
cuuuccuucuucucgacucacagu

SEQ ID NO: 1172137 - RNA, 21 nt, Human
gaacauagugagauccugucu

SEQ ID NO: 1172138 - RNA, 24 nt, Human
gaacauagugagauccugucucua

SEQ ID NO: 1172139 - RNA, 20 nt, Human
gaggacaggaggaucaucug

SEQ ID NO: 1172140 - RNA, 22 nt, Human
gaggccaggagcuugagaccag

SEQ ID NO: 1172141 - RNA, 24 nt, Human
gaucaucugagcccaggaguucaa

SEQ ID NO: 1172142 - RNA, 24 nt, Human
gaucgccugagccuaggaguuuga

SEQ ID NO: 1172143 - RNA, 23 nt, Human
gaucgugauaguggcugcacaga

SEQ ID NO: 1172144 - RNA, 21 nt, Human
gauuauuucuuuuaacuccaa

SEQ ID NO: 1172145 - RNA, 18 nt, Human
gccaaugauugcugaguu

SEQ ID NO: 1172146 - RNA, 22 nt, Human
gcccaggaguucaagaccagcc

SEQ ID NO: 1172147 - RNA, 19 nt, Human
gccgugaaucuacugaagc

SEQ ID NO: 1172148 - RNA, 18 nt, Human
gccuaggaguuugaggcu

SEQ ID NO: 1172149 - RNA, 24 nt, Human
gccuaggaguuugaggcugcagug

SEQ ID NO: 1172150 - RNA, 19 nt, Human
gcugcagugagcuacagac

SEQ ID NO: 1172151 - RNA, 20 nt, Human
ggaaaaaaugcuuuuaauaa

SEQ ID NO: 1172152 - RNA, 19 nt, Human
ggaagaccuaugaacaugu

SEQ ID NO: 1172153 - RNA, 18 nt, Human
ggacaggaggaucaucug

SEQ ID NO: 1172154 - RNA, 23 nt, Human
ggaucaucugagcccaggaguuc

SEQ ID NO: 1172155 - RNA, 19 nt, Human
gggcaagauggacagcagc

SEQ ID NO: 1172156 - RNA, 19 nt, Human
ggggcgagggggaagaccu

SEQ ID NO: 1172157 - RNA, 23 nt, Human
gguggcucccagcauuuugggag

SEQ ID NO: 1172158 - RNA, 22 nt, Human
guagaucacaccuggugccugg

SEQ ID NO: 1172159 - RNA, 20 nt, Human
gugccugguggcucccagca

SEQ ID NO: 1172160 - RNA, 22 nt, Human
uaaaaagaaacagaaaaugccc

SEQ ID NO: 1172161 - RNA, 19 nt, Human
uaaaagcagcaauuucaug

SEQ ID NO: 1172162 - RNA, 25 nt, Human
uaaaauacacacguaaaaagggugc

SEQ ID NO: 1172163 - RNA, 23 nt, Human
uaaaaucacaagaauaaacaaua

SEQ ID NO: 1172164 - RNA, 24 nt, Human
uaaaaucacaagaauaaacaauac

SEQ ID NO: 1172165 - RNA, 20 nt, Human
uaaaauuacagauuaacacc

SEQ ID NO: 1172166 - RNA, 24 nt, Human
uaaaguucccucugaccacccucc

SEQ ID NO: 1172167 - RNA, 21 nt, Human
uaacuccaauacaauaaucua

SEQ ID NO: 1172168 - RNA, 21 nt, Human
uaagagcauacuaugaacuaa

SEQ ID NO: 1172169 - RNA, 21 nt, Human
uaaguacaauggcagcaauau

SEQ ID NO: 1172170 - RNA, 21 nt, Human
uaauauagguacaaguacuuc

SEQ ID NO: 1172171 - RNA, 18 nt, Human
uaaucgguaaccaaaagc

SEQ ID NO: 1172172 - RNA, 24 nt, Human
uaaugcaauauuaacacaaacuuu

SEQ ID NO: 1172173 - RNA, 22 nt, Human
uacaaaaaaccuaaauaugcca

SEQ ID NO: 1172174 - RNA, 20 nt, Human
uacaaaacacaacaugacag

SEQ ID NO: 1172175 - RNA, 18 nt, Human
uacacagguaauuagaaa

SEQ ID NO: 1172176 - RNA, 21 nt, Human
uacagacugcaccacugcacu

SEQ ID NO: 1172177 - RNA, 21 nt, Human
uaccugaagccuaacagccaa

SEQ ID NO: 1172178 - RNA, 22 nt, Human
uacgaaaucauagagggcaaga

SEQ ID NO: 1172179 - RNA, 21 nt, Human
uagaacauacuacucagcaac

SEQ ID NO: 1172180 - RNA, 19 nt, Human
uagaucacaccuggugccu

SEQ ID NO: 1172181 - RNA, 19 nt, Human
uagcaaaacgaacaaaaca

SEQ ID NO: 1172182 - RNA, 19 nt, Human
uagcagugauacuauaaaa

SEQ ID NO: 1172183 - RNA, 19 nt, Human
uaggaggccgaggccagga

SEQ ID NO: 1172184 - RNA, 19 nt, Human
uauacauaacaauauaugg

SEQ ID NO: 1172185 - RNA, 24 nt, Human
uauauuagcaaaacgaacaaaaca

SEQ ID NO: 1172186 - RNA, 27 nt, Human
uauggauaaagcuaaaguucccucuga

SEQ ID NO: 1172187 - RNA, 22 nt, Human
uauggugucuuuccccaucccu

SEQ ID NO: 1172188 - RNA, 22 nt, Human
ucaaucuaagcaauaaaugaca

SEQ ID NO: 1172189 - RNA, 20 nt, Human
ucagagcgcuuuuucuuugu

SEQ ID NO: 1172190 - RNA, 23 nt, Human
ucaucugagcccaggaguucaag

SEQ ID NO: 1172191 - RNA, 19 nt, Human
uccacaaaaaaaaaaaaaa

SEQ ID NO: 1172192 - RNA, 21 nt, Human
ucccacaccuccucacgccag

SEQ ID NO: 1172193 - RNA, 18 nt, Human
uccucugccuucucuugc

SEQ ID NO: 1172194 - RNA, 18 nt, Human
ucgccugagccuaggagu

SEQ ID NO: 1172195 - RNA, 18 nt, Human
ucggaugcuuaacauuuc

SEQ ID NO: 1172196 - RNA, 20 nt, Human
ucucuccaacaauauaaaga

SEQ ID NO: 1172197 - RNA, 22 nt, Human
ucugaccacccucccaauccug

SEQ ID NO: 1172198 - RNA, 23 nt, Human
ucugagcccaggaguucaagacc

SEQ ID NO: 1172199 - RNA, 20 nt, Human
ucuugcucuucuugccaaug

SEQ ID NO: 1172200 - RNA, 21 nt, Human
ugaagcauauuuacuggaaaa

SEQ ID NO: 1172201 - RNA, 19 nt, Human
ugaaggcauaaacccugcu

SEQ ID NO: 1172202 - RNA, 20 nt, Human
ugacuauggugucuuucccc

SEQ ID NO: 1172203 - RNA, 25 nt, Human
ugacuauggugucuuuccccauccc

SEQ ID NO: 1172204 - RNA, 25 nt, Human
ugagaccaauccagguuaauaugga

SEQ ID NO: 1172205 - RNA, 23 nt, Human
ugagaccagcuggagaacauagu

SEQ ID NO: 1172206 - RNA, 23 nt, Human
ugagcccaggaguucaagaccag

SEQ ID NO: 1172207 - RNA, 19 nt, Human
ugagcuacagacugcacca

SEQ ID NO: 1172208 - RNA, 18 nt, Human
ugaggcugcaggcacagg

SEQ ID NO: 1172209 - RNA, 19 nt, Human
ugauaaagucuaaccucau

SEQ ID NO: 1172210 - RNA, 23 nt, Human
ugauaugauguauuaaacauuga

SEQ ID NO: 1172211 - RNA, 18 nt, Human
ugaucuauaaaagcagca

SEQ ID NO: 1172212 - RNA, 19 nt, Human
ugaucuauaaaagcagcaa

SEQ ID NO: 1172213 - RNA, 22 nt, Human
ugauguauuacaaacaagcuuc

SEQ ID NO: 1172214 - RNA, 23 nt, Human
ugauugggaaaggggguaugaga

SEQ ID NO: 1172215 - RNA, 20 nt, Human
ugauuugcaccccuaaucuc

SEQ ID NO: 1172216 - RNA, 19 nt, Human
ugccugguggcucccagca

SEQ ID NO: 1172217 - RNA, 20 nt, Human
ugcgccagaaccguuaaaca

SEQ ID NO: 1172218 - RNA, 18 nt, Human
uggaacuguaaaaaaagc

SEQ ID NO: 1172219 - RNA, 18 nt, Human
uggauguuugcuauucuc

SEQ ID NO: 1172220 - RNA, 21 nt, Human
uggcucacacuuguaauccca

SEQ ID NO: 1172221 - RNA, 24 nt, Human
uggcucacacuuguaaucccagca

SEQ ID NO: 1172222 - RNA, 19 nt, Human
ugggaggccagggcaagag

SEQ ID NO: 1172223 - RNA, 23 nt, Human
ugggaggccagggcaagaggauc

SEQ ID NO: 1172224 - RNA, 25 nt, Human
ugggaggcugaggacaggaggauca

SEQ ID NO: 1172225 - RNA, 19 nt, Human
ugguauggauuccucugaa

SEQ ID NO: 1172226 - RNA, 22 nt, Human
ugguauggauuccucugaaccu

SEQ ID NO: 1172227 - RNA, 25 nt, Human
uguacauauauauaauuuguauaua

SEQ ID NO: 1172228 - RNA, 19 nt, Human
ugugcacauuuaucacauc

SEQ ID NO: 1172229 - RNA, 23 nt, Human
uguuuugagauucaaauuuucuc

SEQ ID NO: 1172230 - RNA, 20 nt, Human
uuaaaugaaacauuaagacc

SEQ ID NO: 1172231 - RNA, 21 nt, Human
uuacucacuaaugcaaacaaa

SEQ ID NO: 1172232 - RNA, 19 nt, Human
uuagaaaauauucucaaug

SEQ ID NO: 1172233 - RNA, 24 nt, Human
uuagaaauguuugugagaagguac

SEQ ID NO: 1172234 - RNA, 24 nt, Human
uuaggaggccgaggccaggagcuu

SEQ ID NO: 1172235 - RNA, 22 nt, Human
uucaaauaagagcauacuauga

SEQ ID NO: 1172236 - RNA, 21 nt, Human
uucauagcagcacucuagaaa

SEQ ID NO: 1172237 - RNA, 19 nt, Human
uuccccaucccucucuuuc

SEQ ID NO: 1172238 - RNA, 21 nt, Human
uugcagcuacaugggaggcca

SEQ ID NO: 1172239 - RNA, 22 nt, Human
uugcucuaagaaagccuuuugg

SEQ ID NO: 1172240 - RNA, 26 nt, Human
uugggaggcugaggacaggaggauca

SEQ ID NO: 1172241 - RNA, 25 nt, Human
uuuccugaggaggaagcauaguggc

SEQ ID NO: 1172242 - RNA, 22 nt, Human
uuugaucuauaaaagcagcaau

SEQ ID NO: 1172243 - RNA, 23 nt, Human
aaaagaaaaagaaauugcauaag

SEQ ID NO: 1172244 - RNA, 19 nt, Human
aaacaaguguaacaggccu

SEQ ID NO: 1172245 - RNA, 22 nt, Human
aaguguaacaggccuacacuua

SEQ ID NO: 1172246 - RNA, 23 nt, Human
aauaccugaugcuaguugaaaau

SEQ ID NO: 1172247 - RNA, 23 nt, Human
acaggucaaaaugcaaacucaug

SEQ ID NO: 1172248 - RNA, 24 nt, Human
accaauuugaguccccccagcccc

SEQ ID NO: 1172249 - RNA, 21 nt, Human
accaccccacacaaauaacca

SEQ ID NO: 1172250 - RNA, 19 nt, Human
acccauuucccuccuuuug

SEQ ID NO: 1172251 - RNA, 22 nt, Human
agcaaggcacuuggggcaggag

SEQ ID NO: 1172252 - RNA, 18 nt, Human
agccagucgucccagcgc

SEQ ID NO: 1172253 - RNA, 19 nt, Human
agcuccuccuucccccgcc

SEQ ID NO: 1172254 - RNA, 22 nt, Human
aguugaaaauuagugaccauga

SEQ ID NO: 1172255 - RNA, 18 nt, Human
auaguuuagaaaaaucaa

SEQ ID NO: 1172256 - RNA, 18 nt, Human
auccugcaaacuuccaag

SEQ ID NO: 1172257 - RNA, 23 nt, Human
caaacaggcucuacccauuuccc

SEQ ID NO: 1172258 - RNA, 22 nt, Human
caaaccaacacaucugugugaa

SEQ ID NO: 1172259 - RNA, 23 nt, Human
caaagucaaagcugcuacacuua

SEQ ID NO: 1172260 - RNA, 25 nt, Human
caacaccaccccacacaaauaacca

SEQ ID NO: 1172261 - RNA, 23 nt, Human
caagaguuaauauccagacacac

SEQ ID NO: 1172262 - RNA, 20 nt, Human
caagccagcaccuaagaucc

SEQ ID NO: 1172263 - RNA, 23 nt, Human
caauaauauauaacaacaccacc

SEQ ID NO: 1172264 - RNA, 18 nt, Human
caccaccccacacaaaua

SEQ ID NO: 1172265 - RNA, 25 nt, Human
caccuaagauccucugaauuuguuc

SEQ ID NO: 1172266 - RNA, 23 nt, Human
cagauaaagaaguuggaccacaa

SEQ ID NO: 1172267 - RNA, 22 nt, Human
cagccccucaaaaaggaacaau

SEQ ID NO: 1172268 - RNA, 19 nt, Human
cagcugcagcuccuccuuc

SEQ ID NO: 1172269 - RNA, 24 nt, Human
caggucaaaaugcaaacucaugua

SEQ ID NO: 1172270 - RNA, 24 nt, Human
caggucccaccuccugcgccgccc

SEQ ID NO: 1172271 - RNA, 19 nt, Human
cagguggccugagcagggu

SEQ ID NO: 1172272 - RNA, 24 nt, Human
cauaauacugaggcugaaacgaga

SEQ ID NO: 1172273 - RNA, 27 nt, Human
cauguaucuuucaucaaccuaaaucuu

SEQ ID NO: 1172274 - RNA, 22 nt, Human
ccaauccugcaaacuuccaaga

SEQ ID NO: 1172275 - RNA, 23 nt, Human
ccacaagccagcaccuaagaucc

SEQ ID NO: 1172276 - RNA, 21 nt, Human
ccacacaaauaaccauaaacu

SEQ ID NO: 1172277 - RNA, 18 nt, Human
ccacuguaaaagcaaggc

SEQ ID NO: 1172278 - RNA, 20 nt, Human
ccagacacacguuuucaaaa

SEQ ID NO: 1172279 - RNA, 22 nt, Human
ccaggggagcccggcccucucc

SEQ ID NO: 1172280 - RNA, 18 nt, Human
cccacacaaauaaccaua

SEQ ID NO: 1172281 - RNA, 23 nt, Human
cccccagccccucaaaaaggaac

SEQ ID NO: 1172282 - RNA, 21 nt, Human
ccccugcgcccgagcgacucc

SEQ ID NO: 1172283 - RNA, 18 nt, Human
cccggcccucucccucca

SEQ ID NO: 1172284 - RNA, 20 nt, Human
cccugcgcccgagcgacucc

SEQ ID NO: 1172285 - RNA, 21 nt, Human
ccuccugcgccgcccucccgu

SEQ ID NO: 1172286 - RNA, 24 nt, Human
ccucucccuccagcugccacaguc

SEQ ID NO: 1172287 - RNA, 21 nt, Human
ccucucgcugggcuggagagu

SEQ ID NO: 1172288 - RNA, 23 nt, Human
ccuggccucggcucggcacggga

SEQ ID NO: 1172289 - RNA, 24 nt, Human
cgccgggcugcgaccccagacccc

SEQ ID NO: 1172290 - RNA, 21 nt, Human
cgcggcuccgccaggggagcc

SEQ ID NO: 1172291 - RNA, 18 nt, Human
cuacacuuaaaccucugc

SEQ ID NO: 1172292 - RNA, 22 nt, Human
cuaucucuggggaagcaagaca

SEQ ID NO: 1172293 - RNA, 22 nt, Human
cucccuccagcugccacagucc

SEQ ID NO: 1172294 - RNA, 21 nt, Human
cugcaaacuuccaagaagggc

SEQ ID NO: 1172295 - RNA, 27 nt, Human
cugcgaccccagaccccuggccucggc

SEQ ID NO: 1172296 - RNA, 19 nt, Human
cuucacauucuaucucugg

SEQ ID NO: 1172297 - RNA, 18 nt, Human
gaguccccccagccccuc

SEQ ID NO: 1172298 - RNA, 27 nt, Human
gcacgggagccucccggcccgcgacca

SEQ ID NO: 1172299 - RNA, 20 nt, Human
gccgccgggaucccgggcac

SEQ ID NO: 1172300 - RNA, 24 nt, Human
gcugaaacgagaagaggcugucca

SEQ ID NO: 1172301 - RNA, 22 nt, Human
gcuguccacuguaaaagcaagg

SEQ ID NO: 1172302 - RNA, 21 nt, Human
ggaagacagacacugaacagg

SEQ ID NO: 1172303 - RNA, 22 nt, Human
ggcagguggccugagcaggguc

SEQ ID NO: 1172304 - RNA, 21 nt, Human
ggcccgcgaccacuuccucgg

SEQ ID NO: 1172305 - RNA, 20 nt, Human
ggcgcaggucccaccuccug

SEQ ID NO: 1172306 - RNA, 21 nt, Human
ggcgcgaucggcucucccucg

SEQ ID NO: 1172307 - RNA, 19 nt, Human
gucaaaaugcaaacucaug

SEQ ID NO: 1172308 - RNA, 25 nt, Human
gucccaccuccugcgccgcccuccc

SEQ ID NO: 1172309 - RNA, 20 nt, Human
guguacaauuuugaagaagu

SEQ ID NO: 1172310 - RNA, 23 nt, Human
uaaagaaguuggaccacaaacca

SEQ ID NO: 1172311 - RNA, 25 nt, Human
uacauaauacugaggcugaaacgag

SEQ ID NO: 1172312 - RNA, 22 nt, Human
uaguuuagaaaaaucaaaucaa

SEQ ID NO: 1172313 - RNA, 20 nt, Human
uauaacaacaccaccccaca

SEQ ID NO: 1172314 - RNA, 22 nt, Human
uauaacaacaccaccccacaca

SEQ ID NO: 1172315 - RNA, 21 nt, Human
ucaaaaaggaacaaugccacc

SEQ ID NO: 1172316 - RNA, 23 nt, Human
ucaaaaauguuuucucacuggcu

SEQ ID NO: 1172317 - RNA, 21 nt, Human
ucaaacaaguguaacaggccc

SEQ ID NO: 1172318 - RNA, 23 nt, Human
ucaaacaaguguaacaggccuac

SEQ ID NO: 1172319 - RNA, 24 nt, Human
ucaaacaaguguaacaggccuaca

SEQ ID NO: 1172320 - RNA, 19 nt, Human
uccacuguaaaagcaaggc

SEQ ID NO: 1172321 - RNA, 22 nt, Human
ucccaccuccugcgccgcccuc

SEQ ID NO: 1172322 - RNA, 21 nt, Human
uccgccaggggagcccggccc

SEQ ID NO: 1172323 - RNA, 22 nt, Human
uccugcgccgcccucccgugcc

SEQ ID NO: 1172324 - RNA, 23 nt, Human
ucgaggcgcgaucggcucucccu

SEQ ID NO: 1172325 - RNA, 23 nt, Human
ucucuggggaagcaagacaaaca

SEQ ID NO: 1172326 - RNA, 26 nt, Human
ucuggggaagcaagacaaacaggcuu

SEQ ID NO: 1172327 - RNA, 19 nt, Human
ugaacaggucaaaaugcaa

SEQ ID NO: 1172328 - RNA, 19 nt, Human
ugcugcugccugcgcuccg

SEQ ID NO: 1172329 - RNA, 20 nt, Human
uggccucggcucggcacggg

SEQ ID NO: 1172330 - RNA, 24 nt, Human
uguaaaagcaaggcacuuggggca

SEQ ID NO: 1172331 - RNA, 23 nt, Human
uguaacaggccuacacuuaaacc

SEQ ID NO: 1172332 - RNA, 23 nt, Human
uuaaacaagaguuaauauccaga

SEQ ID NO: 1172333 - RNA, 18 nt, Human
uucccggcgcagguccca

SEQ ID NO: 1172334 - RNA, 22 nt, Human
uucgccucucgcugggcuggag

SEQ ID NO: 1172335 - RNA, 18 nt, Human
uuggggcaggagccaggc

SEQ ID NO: 1172336 - RNA, 23 nt, Human
uuuucuaaaugauacuuuggcug

SEQ ID NO: 1172337 - RNA, 18 nt, Human
agucaaaauguggaaagu

SEQ ID NO: 1172338 - RNA, 19 nt, Human
auguuuaaacuuugacauu

SEQ ID NO: 1172339 - RNA, 21 nt, Human
caucuucuuccaagaagcuug

SEQ ID NO: 1172340 - RNA, 22 nt, Human
cauuuccaaagaccccaucugc

SEQ ID NO: 1172341 - RNA, 19 nt, Human
guguuucuggcacucacuc

SEQ ID NO: 1172342 - RNA, 21 nt, Human
uuuccaaagaccccaucugca

SEQ ID NO: 1172343 - RNA, 22 nt, Human
uuugacauuuuuccauuguugg

SEQ ID NO: 1172344 - RNA, 20 nt, Human
aauugcuugaacccaggagg

SEQ ID NO: 1172345 - RNA, 24 nt, Human
aauugcuugaacccaggaggcgga

SEQ ID NO: 1172346 - RNA, 24 nt, Human
acccaggaggcggagguugcagug

SEQ ID NO: 1172347 - RNA, 22 nt, Human
aggagacaggcagguucaaaca

SEQ ID NO: 1172348 - RNA, 26 nt, Human
aggagacaggcagguucaaacagcaa

SEQ ID NO: 1172349 - RNA, 20 nt, Human
aggcggagguugcagugagc

SEQ ID NO: 1172350 - RNA, 24 nt, Human
aggcggagguugcagugagcugag

SEQ ID NO: 1172351 - RNA, 21 nt, Human
cagagcuuagaacugcugccc

SEQ ID NO: 1172352 - RNA, 19 nt, Human
cagcggcagugguucucag

SEQ ID NO: 1172353 - RNA, 22 nt, Human
ccagagaauugcuugaacccag

SEQ ID NO: 1172354 - RNA, 21 nt, Human
ccccagagaauugcuugaacc

SEQ ID NO: 1172355 - RNA, 22 nt, Human
gagcuuagaacugcugccccag

SEQ ID NO: 1172356 - RNA, 21 nt, Human
gaggcggagguugcagugagc

SEQ ID NO: 1172357 - RNA, 23 nt, Human
gagguugcagugagcugagaucg

SEQ ID NO: 1172358 - RNA, 22 nt, Human
ggagguugcagugagcugagau

SEQ ID NO: 1172359 - RNA, 24 nt, Human
ggagguugcagugagcugagaucg

SEQ ID NO: 1172360 - RNA, 19 nt, Human
ggcagugguucucagccgu

SEQ ID NO: 1172361 - RNA, 26 nt, Human
gugcaaccagagcuuagaacugcugg

SEQ ID NO: 1172362 - RNA, 19 nt, Human
guugcagugagcugagauc

SEQ ID NO: 1172363 - RNA, 21 nt, Human
guugcagugagcugagaucgc

SEQ ID NO: 1172364 - RNA, 21 nt, Human
uagaacugcugccccagagaa

SEQ ID NO: 1172365 - RNA, 25 nt, Human
uagaauaaucccauccucaaauuaa

SEQ ID NO: 1172366 - RNA, 18 nt, Human
ugagcugagaucgcgcca

SEQ ID NO: 1172367 - RNA, 24 nt, Human
ugccccagagaauugcuugaaccc

SEQ ID NO: 1172368 - RNA, 19 nt, Human
uguguugaaacgucagcgg

SEQ ID NO: 1172369 - RNA, 21 nt, Human
uguguugaaacgucagcggca

SEQ ID NO: 1172370 - RNA, 24 nt, Human
uugaacccaggaggcggagguugc

SEQ ID NO: 1172371 - RNA, 19 nt, Human
uugcagugagcugagaucg

SEQ ID NO: 1172372 - RNA, 22 nt, Human
uugcagugagcugagaucgcgc

SEQ ID NO: 1172373 - RNA, 24 nt, Human
uugcuugaacccaggaggcggagg

SEQ ID NO: 1172374 - RNA, 25 nt, Human
aaaagcagugaagacacuaaauaac

SEQ ID NO: 1172375 - RNA, 23 nt, Human
aaacaaauguauagucacuugau

SEQ ID NO: 1172376 - RNA, 20 nt, Human
aaaguaauuuugaccuaaaa

SEQ ID NO: 1172377 - RNA, 21 nt, Human
aacagccaaauaccuaaugcc

SEQ ID NO: 1172378 - RNA, 27 nt, Human
aagcagugaagacacuaaauaacccag

SEQ ID NO: 1172379 - RNA, 20 nt, Human
aauaggccuaaccagauacc

SEQ ID NO: 1172380 - RNA, 21 nt, Human
aauggcacgcaagguaaacac

SEQ ID NO: 1172381 - RNA, 27 nt, Human
aauugcuuuuuuaaugaaggaugacac

SEQ ID NO: 1172382 - RNA, 23 nt, Human
acacccuaaaauaaaaaccugga

SEQ ID NO: 1172383 - RNA, 20 nt, Human
acagccaaauaccuaaugcc

SEQ ID NO: 1172384 - RNA, 23 nt, Human
acuaaaaaaacaagcuacucuag

SEQ ID NO: 1172385 - RNA, 26 nt, Human
agaaagaguaucaaauaaacuagaaa

SEQ ID NO: 1172386 - RNA, 23 nt, Human
agacacaaauaaaaauuauacca

SEQ ID NO: 1172387 - RNA, 20 nt, Human
agaugcugaauggccacagu

SEQ ID NO: 1172388 - RNA, 23 nt, Human
agaugcugaauggccacagugca

SEQ ID NO: 1172389 - RNA, 21 nt, Human
agcaguucuaaaacugaccua

SEQ ID NO: 1172390 - RNA, 27 nt, Human
agguaaauaauggcccacaaaaccaga

SEQ ID NO: 1172391 - RNA, 25 nt, Human
aggugaccuguggucccaccagagc

SEQ ID NO: 1172392 - RNA, 20 nt, Human
aucagacuuaaauagaccag

SEQ ID NO: 1172393 - RNA, 18 nt, Human
augcaaagcaacuucuac

SEQ ID NO: 1172394 - RNA, 21 nt, Human
auggcccacaaaaccagauga

SEQ ID NO: 1172395 - RNA, 21 nt, Human
auggucccacaccuacuaaaa

SEQ ID NO: 1172396 - RNA, 18 nt, Human
auucaccaugcugucagu

SEQ ID NO: 1172397 - RNA, 27 nt, Human
caauuuuuaacaaaagcagugaagaca

SEQ ID NO: 1172398 - RNA, 21 nt, Human
cacaccuacuaaaaaaacaag

SEQ ID NO: 1172399 - RNA, 23 nt, Human
cacugcauccauggcuguccuag

SEQ ID NO: 1172400 - RNA, 23 nt, Human
cagaaagaugcugaauggccaca

SEQ ID NO: 1172401 - RNA, 22 nt, Human
cagaggguccaacuccagacac

SEQ ID NO: 1172402 - RNA, 18 nt, Human
cagaugauaugguuaaga

SEQ ID NO: 1172403 - RNA, 18 nt, Human
cauggaaagaggggccuu

SEQ ID NO: 1172404 - RNA, 22 nt, Human
ccaaauaccuaaugccacauug

SEQ ID NO: 1172405 - RNA, 19 nt, Human
cccguaaacaucagacuua

SEQ ID NO: 1172406 - RNA, 23 nt, Human
ccuuuuguggaaaaaaauggagu

SEQ ID NO: 1172407 - RNA, 23 nt, Human
cuaaaauaaaaaccuggagugaa

SEQ ID NO: 1172408 - RNA, 22 nt, Human
cucuaaguuccaaucacucacu

SEQ ID NO: 1172409 - RNA, 19 nt, Human
cuggcaacaggagucucua

SEQ ID NO: 1172410 - RNA, 27 nt, Human
gaagguaaauaauggcccacaaaacca

SEQ ID NO: 1172411 - RNA, 24 nt, Human
gagcuugccaaguuaaacaccgcc

SEQ ID NO: 1172412 - RNA, 23 nt, Human
gauguauuucauggaaagagggg

SEQ ID NO: 1172413 - RNA, 23 nt, Human
gcacacaaaaacaaauguauagu

SEQ ID NO: 1172414 - RNA, 21 nt, Human
gcacgcaagguaaacacuaaa

SEQ ID NO: 1172415 - RNA, 20 nt, Human
ggaagguaaauaauggccca

SEQ ID NO: 1172416 - RNA, 24 nt, Human
ggaagguaaauaauggcccacaaa

SEQ ID NO: 1172417 - RNA, 21 nt, Human
gggcagccagcgggcucagag

SEQ ID NO: 1172418 - RNA, 23 nt, Human
guuaaacaccgccuucaguaccg

SEQ ID NO: 1172419 - RNA, 26 nt, Human
uaaaaaaacaagcuacucuaguauca

SEQ ID NO: 1172420 - RNA, 18 nt, Human
uaaaagagauggucccac

SEQ ID NO: 1172421 - RNA, 20 nt, Human
uaaauaauggcccacaaaac

SEQ ID NO: 1172422 - RNA, 22 nt, Human
uaacccaguggcgaccucuuca

SEQ ID NO: 1172423 - RNA, 23 nt, Human
uaagggaagguaaauaauggccc

SEQ ID NO: 1172424 - RNA, 21 nt, Human
uacaaaguauaaacuaagaua

SEQ ID NO: 1172425 - RNA, 22 nt, Human
uaccgagcugcuauacaagaac

SEQ ID NO: 1172426 - RNA, 19 nt, Human
uaggccuaaccagauaccu

SEQ ID NO: 1172427 - RNA, 23 nt, Human
uagguaaaaucgaugacacccua

SEQ ID NO: 1172428 - RNA, 20 nt, Human
uagucacuugaugaggaaau

SEQ ID NO: 1172429 - RNA, 20 nt, Human
uauauacacagaaagaguag

SEQ ID NO: 1172430 - RNA, 25 nt, Human
uauugcaaaaccauaguauuuaacg

SEQ ID NO: 1172431 - RNA, 20 nt, Human
ucaucuuuauuuugguugca

SEQ ID NO: 1172432 - RNA, 19 nt, Human
uccaugcugagguuucagg

SEQ ID NO: 1172433 - RNA, 19 nt, Human
ucccccguaaacaucagac

SEQ ID NO: 1172434 - RNA, 21 nt, Human
ucgaugacacccuaaaauaaa

SEQ ID NO: 1172435 - RNA, 23 nt, Human
ucuaaaacugaccuacagaaaag

SEQ ID NO: 1172436 - RNA, 24 nt, Human
ucucuaaguuccaaucacucacuc

SEQ ID NO: 1172437 - RNA, 19 nt, Human
ugaaauaggccuaaccaga

SEQ ID NO: 1172438 - RNA, 19 nt, Human
ugacacccuaaaauaaaaa

SEQ ID NO: 1172439 - RNA, 23 nt, Human
ugagauaacuggcaaaccuccaa

SEQ ID NO: 1172440 - RNA, 23 nt, Human
ugauaugguuaagauaacuaguu

SEQ ID NO: 1172441 - RNA, 22 nt, Human
ugauucuggcaacaggagucuc

SEQ ID NO: 1172442 - RNA, 23 nt, Human
ugcaaaaccauaguauuuaacga

SEQ ID NO: 1172443 - RNA, 23 nt, Human
ugcacuuguaaaagagauggucc

SEQ ID NO: 1172444 - RNA, 19 nt, Human
ugcauuaaaacaacauuga

SEQ ID NO: 1172445 - RNA, 19 nt, Human
ugcuccagaaagaugcuga

SEQ ID NO: 1172446 - RNA, 26 nt, Human
uggaaagaggggccuuuaaaggcacu

SEQ ID NO: 1172447 - RNA, 26 nt, Human
uguggaaaaaaauggaguuuuucuga

SEQ ID NO: 1172448 - RNA, 22 nt, Human
uucauuuuuucuacaugaagac

SEQ ID NO: 1172449 - RNA, 19 nt, Human
uugaagccacuaaaguucc

SEQ ID NO: 1172450 - RNA, 28 nt, Human
uugagcacacaaaaacaaauguauaguc

SEQ ID NO: 1172451 - RNA, 19 nt, Human
uuugguugcaaagaugugg

SEQ ID NO: 1172452 - RNA, 26 nt, Human
uuuucuguaaucccuuuuguggaaaa

SEQ ID NO: 1172453 - RNA, 19 nt, Human
aaaaaagcaaaaacugggg

SEQ ID NO: 1172454 - RNA, 19 nt, Human
aaaaaaguacagccaacag

SEQ ID NO: 1172455 - RNA, 21 nt, Human
aaaauacugaaaaaaaguaug

SEQ ID NO: 1172456 - RNA, 19 nt, Human
aaagugcugggauuacagg

SEQ ID NO: 1172457 - RNA, 24 nt, Human
aaagugcugggauuacaggcacga

SEQ ID NO: 1172458 - RNA, 19 nt, Human
aacaagcccgcauauggaa

SEQ ID NO: 1172459 - RNA, 19 nt, Human
aacauuugcaagaguguca

SEQ ID NO: 1172460 - RNA, 21 nt, Human
aagagugucagguagguuuua

SEQ ID NO: 1172461 - RNA, 18 nt, Human
aagcgauccaccugccuc

SEQ ID NO: 1172462 - RNA, 24 nt, Human
aaggauucucccaccuuagccuuc

SEQ ID NO: 1172463 - RNA, 24 nt, Human
aagugcaguggugcaaucacagcu

SEQ ID NO: 1172464 - RNA, 18 nt, Human
aagugcugggauuacagg

SEQ ID NO: 1172465 - RNA, 19 nt, Human
aagugcugggauuacaggc

SEQ ID NO: 1172466 - RNA, 26 nt, Human
aagugcugggauuacaggcacgagcc

SEQ ID NO: 1172467 - RNA, 18 nt, Human
acagcucacugcagccuc

SEQ ID NO: 1172468 - RNA, 18 nt, Human
acaggguuucaccauguu

SEQ ID NO: 1172469 - RNA, 19 nt, Human
acaggguuucaccauguug

SEQ ID NO: 1172470 - RNA, 21 nt, Human
acaggguuucaccauguugcc

SEQ ID NO: 1172471 - RNA, 23 nt, Human
acaggguuucaccauguugccua

SEQ ID NO: 1172472 - RNA, 24 nt, Human
acaggguuucaccauguugccuag

SEQ ID NO: 1172473 - RNA, 24 nt, Human
accauguugccuaggcuggucuug

SEQ ID NO: 1172474 - RNA, 18 nt, Human
acuccagaguuugguagg

SEQ ID NO: 1172475 - RNA, 19 nt, Human
acugcagccucaaccuccu

SEQ ID NO: 1172476 - RNA, 21 nt, Human
agacaaaaaggaacagcaagg

SEQ ID NO: 1172477 - RNA, 23 nt, Human
agacaggguuucaccauguugcc

SEQ ID NO: 1172478 - RNA, 24 nt, Human
agacuaaagugcaguggugcaauc

SEQ ID NO: 1172479 - RNA, 25 nt, Human
agagaaacaguaaauauaaagggag

SEQ ID NO: 1172480 - RNA, 22 nt, Human
agagagaaacaguaaauauaaa

SEQ ID NO: 1172481 - RNA, 19 nt, Human
agccucaaccuccuggccu

SEQ ID NO: 1172482 - RNA, 19 nt, Human
aggaaaagacaaacuuugg

SEQ ID NO: 1172483 - RNA, 21 nt, Human
agugcaguggugcaaucacag

SEQ ID NO: 1172484 - RNA, 22 nt, Human
aucaaaaaaguacagccaacag

SEQ ID NO: 1172485 - RNA, 19 nt, Human
augaaaauaaccacuuuau

SEQ ID NO: 1172486 - RNA, 26 nt, Human
augaaaauaaccacuuuauaugaaug

SEQ ID NO: 1172487 - RNA, 22 nt, Human
auggcugaauaauauuccauug

SEQ ID NO: 1172488 - RNA, 23 nt, Human
caaagugcugggauuacaggcac

SEQ ID NO: 1172489 - RNA, 24 nt, Human
caaagugcugggauuacaggcacg

SEQ ID NO: 1172490 - RNA, 22 nt, Human
caccauguugccuaggcugguc

SEQ ID NO: 1172491 - RNA, 23 nt, Human
caccauguugccuaggcuggucu

SEQ ID NO: 1172492 - RNA, 24 nt, Human
caccauguugccuaggcuggucuu

SEQ ID NO: 1172493 - RNA, 22 nt, Human
caccuaagguaaaauuauuagc

SEQ ID NO: 1172494 - RNA, 23 nt, Human
caccugccucgaccucccaaagu

SEQ ID NO: 1172495 - RNA, 21 nt, Human
caccuuagccuucccaggagc

SEQ ID NO: 1172496 - RNA, 21 nt, Human
cacgguuggcuaauuuuugua

SEQ ID NO: 1172497 - RNA, 19 nt, Human
cacugcagccucaaccucc

SEQ ID NO: 1172498 - RNA, 24 nt, Human
cagccucaaccuccuggccucaag

SEQ ID NO: 1172499 - RNA, 24 nt, Human
caggguuucaccauguugccuagg

SEQ ID NO: 1172500 - RNA, 22 nt, Human
caugcaucaguuggugggcauu

SEQ ID NO: 1172501 - RNA, 24 nt, Human
cauguugccuaggcuggucuugaa

SEQ ID NO: 1172502 - RNA, 19 nt, Human
ccaaagugcugggauuaca

SEQ ID NO: 1172503 - RNA, 23 nt, Human
ccaaagugcugggauuacaggca

SEQ ID NO: 1172504 - RNA, 23 nt, Human
ccagagcucuaggcucucaguag

SEQ ID NO: 1172505 - RNA, 20 nt, Human
ccagaguuugguagguggca

SEQ ID NO: 1172506 - RNA, 24 nt, Human
ccauguuuucaccagaaaccucuu

SEQ ID NO: 1172507 - RNA, 24 nt, Human
cccaaagugcugggauuacaggca

SEQ ID NO: 1172508 - RNA, 24 nt, Human
ccccagcccuauacaaccacuaaa

SEQ ID NO: 1172509 - RNA, 18 nt, Human
ccugggcucaagcgaucc

SEQ ID NO: 1172510 - RNA, 21 nt, Human
ccugggcucaagcgauccacc

SEQ ID NO: 1172511 - RNA, 22 nt, Human
ccugggcucaagcgauccaccu

SEQ ID NO: 1172512 - RNA, 23 nt, Human
ccugggcucaagcgauccaccug

SEQ ID NO: 1172513 - RNA, 18 nt, Human
cuaaaaauaagucacuuu

SEQ ID NO: 1172514 - RNA, 20 nt, Human
cuagaagacaauauugucua

SEQ ID NO: 1172515 - RNA, 19 nt, Human
cuagugaauuugaguugug

SEQ ID NO: 1172516 - RNA, 23 nt, Human
cucaaggauucucccaccuuagc

SEQ ID NO: 1172517 - RNA, 24 nt, Human
cucacugcagccucaaccuccugg

SEQ ID NO: 1172518 - RNA, 18 nt, Human
cucacuggcagucacucc

SEQ ID NO: 1172519 - RNA, 20 nt, Human
cucacuggcagucacuccua

SEQ ID NO: 1172520 - RNA, 20 nt, Human
cuccagauaacaaaucuaac

SEQ ID NO: 1172521 - RNA, 23 nt, Human
cucccaccuuagccuucccagga

SEQ ID NO: 1172522 - RNA, 20 nt, Human
cucugucacccagacuaaag

SEQ ID NO: 1172523 - RNA, 23 nt, Human
cucugucacccagacuaaagugc

SEQ ID NO: 1172524 - RNA, 22 nt, Human
cugcagccucaaccuccuggcc

SEQ ID NO: 1172525 - RNA, 24 nt, Human
cugccucgaccucccaaagugcug

SEQ ID NO: 1172526 - RNA, 19 nt, Human
cuggucuugaaguccuggg

SEQ ID NO: 1172527 - RNA, 25 nt, Human
gaacagcaaaugaauggggaauaaa

SEQ ID NO: 1172528 - RNA, 18 nt, Human
gauuacaggcacgagcca

SEQ ID NO: 1172529 - RNA, 18 nt, Human
gccaaacagaaauggcag

SEQ ID NO: 1172530 - RNA, 24 nt, Human
gcgauccaccugccucgaccuccc

SEQ ID NO: 1172531 - RNA, 18 nt, Human
gcuguugagcaguuuccc

SEQ ID NO: 1172532 - RNA, 23 nt, Human
ggaauaaaauauuaagaucaaaa

SEQ ID NO: 1172533 - RNA, 24 nt, Human
ggaaugcuguugagcaguuucccc

SEQ ID NO: 1172534 - RNA, 20 nt, Human
ggagacacacuuucccuccc

SEQ ID NO: 1172535 - RNA, 19 nt, Human
ggauuacaggcacgagcca

SEQ ID NO: 1172536 - RNA, 21 nt, Human
gggaauaaaauauuaagauca

SEQ ID NO: 1172537 - RNA, 24 nt, Human
gggcucaagcgauccaccugccuc

SEQ ID NO: 1172538 - RNA, 22 nt, Human
guaaaauuuuaaaaaguguauu

SEQ ID NO: 1172539 - RNA, 18 nt, Human
gucaagaugcaugaugcc

SEQ ID NO: 1172540 - RNA, 23 nt, Human
guggugcaaucacagcucacugc

SEQ ID NO: 1172541 - RNA, 24 nt, Human
uaaaaacaguuuugaaauacagga

SEQ ID NO: 1172542 - RNA, 18 nt, Human
uaaaucacuauuuucgag

SEQ ID NO: 1172543 - RNA, 21 nt, Human
uaacuuccuaggaaaagacaa

SEQ ID NO: 1172544 - RNA, 23 nt, Human
uaagaucaaaacaauaauuuaau

SEQ ID NO: 1172545 - RNA, 18 nt, Human
uaauuuuuguauuuuuag

SEQ ID NO: 1172546 - RNA, 19 nt, Human
uaauuuuuguauuuuuaga

SEQ ID NO: 1172547 - RNA, 21 nt, Human
uacaugcaugugguuuaucuc

SEQ ID NO: 1172548 - RNA, 24 nt, Human
uaccagggagaacauaagaaauac

SEQ ID NO: 1172549 - RNA, 26 nt, Human
uaccuccucauuucucuauaacuucc

SEQ ID NO: 1172550 - RNA, 18 nt, Human
uacuuuguaacugucuca

SEQ ID NO: 1172551 - RNA, 24 nt, Human
uagaaaagacaggguuucaccaug

SEQ ID NO: 1172552 - RNA, 18 nt, Human
uagaacagacaaaaagga

SEQ ID NO: 1172553 - RNA, 18 nt, Human
uagaagcucacagaauuc

SEQ ID NO: 1172554 - RNA, 21 nt, Human
uaggaaaagacaaacuuuggg

SEQ ID NO: 1172555 - RNA, 23 nt, Human
uaggaaaagacaaacuuugggug

SEQ ID NO: 1172556 - RNA, 19 nt, Human
uaguggauaauccccagug

SEQ ID NO: 1172557 - RNA, 19 nt, Human
uaucaaaaaaguacagcca

SEQ ID NO: 1172558 - RNA, 22 nt, Human
uaucaaaaaaguacagccaaca

SEQ ID NO: 1172559 - RNA, 26 nt, Human
uauguagauagugccaugcauggcuu

SEQ ID NO: 1172560 - RNA, 24 nt, Human
uauguuauuuagagauggguuuua

SEQ ID NO: 1172561 - RNA, 18 nt, Human
uauucaugcaucaguugg

SEQ ID NO: 1172562 - RNA, 19 nt, Human
ucaccagaaaccucuugcu

SEQ ID NO: 1172563 - RNA, 19 nt, Human
ucacugcagccucaaccuc

SEQ ID NO: 1172564 - RNA, 23 nt, Human
ucacugcagccucaaccuccugg

SEQ ID NO: 1172565 - RNA, 24 nt, Human
ucacugcagccucaaccuccuggc

SEQ ID NO: 1172566 - RNA, 21 nt, Human
ucagaggagguguggcucugg

SEQ ID NO: 1172567 - RNA, 21 nt, Human
uccagaguuugguagguggca

SEQ ID NO: 1172568 - RNA, 24 nt, Human
ucccaaagugcugggauuacaggc

SEQ ID NO: 1172569 - RNA, 18 nt, Human
uccugggcucaagcgauc

SEQ ID NO: 1172570 - RNA, 24 nt, Human
uccugggcucaagcgauccaccug

SEQ ID NO: 1172571 - RNA, 21 nt, Human
ucuggaguuguuucugccugg

SEQ ID NO: 1172572 - RNA, 20 nt, Human
ucuggaguuguuucugccuu

SEQ ID NO: 1172573 - RNA, 21 nt, Human
ucugggaaagcuaggaugauu

SEQ ID NO: 1172574 - RNA, 24 nt, Human
ucugucacccagacuaaagugcag

SEQ ID NO: 1172575 - RNA, 21 nt, Human
ucuugaaguccugggcucaag

SEQ ID NO: 1172576 - RNA, 18 nt, Human
ucuugcucugucacccag

SEQ ID NO: 1172577 - RNA, 19 nt, Human
ucuugcucugucacccaga

SEQ ID NO: 1172578 - RNA, 24 nt, Human
ucuugcucugucacccagacuaaa

SEQ ID NO: 1172579 - RNA, 18 nt, Human
ugaaguccugggcucaag

SEQ ID NO: 1172580 - RNA, 19 nt, Human
ugaauaauacaauuugugg

SEQ ID NO: 1172581 - RNA, 21 nt, Human
ugaccccagcccuauacaacc

SEQ ID NO: 1172582 - RNA, 18 nt, Human
ugacuauuaugaauaaug

SEQ ID NO: 1172583 - RNA, 22 nt, Human
ugagacagggucuugcucuguc

SEQ ID NO: 1172584 - RNA, 22 nt, Human
ugagauauuaacauccuaaaaa

SEQ ID NO: 1172585 - RNA, 25 nt, Human
ugagcaaauaaccuuauuguaauau

SEQ ID NO: 1172586 - RNA, 22 nt, Human
ugcaguggugcaaucacagcuc

SEQ ID NO: 1172587 - RNA, 20 nt, Human
ugccaaacagaaauggcagg

SEQ ID NO: 1172588 - RNA, 24 nt, Human
ugccuaggcuggucuugaaguccu

SEQ ID NO: 1172589 - RNA, 24 nt, Human
ugccucgaccucccaaagugcugg

SEQ ID NO: 1172590 - RNA, 22 nt, Human
ugccuggcucugucuuugugcu

SEQ ID NO: 1172591 - RNA, 19 nt, Human
ugcugggauuacaggcacg

SEQ ID NO: 1172592 - RNA, 26 nt, Human
ugcugggauuacaggcacgagccaac

SEQ ID NO: 1172593 - RNA, 20 nt, Human
uggaauuuucagucaagaug

SEQ ID NO: 1172594 - RNA, 21 nt, Human
uggaauuuucagucaagaugc

SEQ ID NO: 1172595 - RNA, 21 nt, Human
uggcuucuuucacuuagcaua

SEQ ID NO: 1172596 - RNA, 18 nt, Human
ugggauuacaggcacgag

SEQ ID NO: 1172597 - RNA, 21 nt, Human
ugggauuacaggcacgagcca

SEQ ID NO: 1172598 - RNA, 24 nt, Human
ugggauuacaggcacgagccaaca

SEQ ID NO: 1172599 - RNA, 27 nt, Human
ugggauuacaggcacgagccaacaagc

SEQ ID NO: 1172600 - RNA, 31 nt, Human
ugggauuacaggcacgagccaacaagcccgg

SEQ ID NO: 1172601 - RNA, 23 nt, Human
ugguagguggcagagcauaacac

SEQ ID NO: 1172602 - RNA, 18 nt, Human
ugguccuugauggcuggc

SEQ ID NO: 1172603 - RNA, 24 nt, Human
uggugcaaucacagcucacugcag

SEQ ID NO: 1172604 - RNA, 20 nt, Human
ugugaugauuguaucacuuu

SEQ ID NO: 1172605 - RNA, 23 nt, Human
uguucauuuaccaggcugagagu

SEQ ID NO: 1172606 - RNA, 23 nt, Human
uguugaaaaaaaugaaauuggcu

SEQ ID NO: 1172607 - RNA, 21 nt, Human
uuacuuuguaacugucucagu

SEQ ID NO: 1172608 - RNA, 22 nt, Human
uucaugcaucaguuggugggca

SEQ ID NO: 1172609 - RNA, 21 nt, Human
uucucaucccacccauauguc

SEQ ID NO: 1172610 - RNA, 22 nt, Human
uucugccaaacagaaauggcag

SEQ ID NO: 1172611 - RNA, 22 nt, Human
uugagacagggucuugcucugu

SEQ ID NO: 1172612 - RNA, 19 nt, Human
uugauaacaccuaagguaa

SEQ ID NO: 1172613 - RNA, 22 nt, Human
uuuauccuuuuuaauggcugaa

SEQ ID NO: 1172614 - RNA, 26 nt, Human
uuuauucaugcaucaguuggugggca

SEQ ID NO: 1172615 - RNA, 24 nt, Human
uuucaccauguugccuaggcuggu

SEQ ID NO: 1172616 - RNA, 26 nt, Human
uuucauauauaaggugaauuauccau

SEQ ID NO: 1172617 - RNA, 22 nt, Human
uuucucugauacaugcaugugg

SEQ ID NO: 1172618 - RNA, 19 nt, Human
uuuuguuuauucaugcauc

SEQ ID NO: 1172619 - RNA, 23 nt, Human
uuuuuguauuuuuagaaaagaca

SEQ ID NO: 1172620 - RNA, 19 nt, Human
aaagaaaugugauaauuac

SEQ ID NO: 1172621 - RNA, 19 nt, Human
aaagugcugggauuacaga

SEQ ID NO: 1172622 - RNA, 23 nt, Human
aaagugcugggauuacagaugug

SEQ ID NO: 1172623 - RNA, 20 nt, Human
aaaugcuguugcugaagaag

SEQ ID NO: 1172624 - RNA, 22 nt, Human
aagcaccuccucuuccacaucc

SEQ ID NO: 1172625 - RNA, 19 nt, Human
aagcucaagugauccuccu

SEQ ID NO: 1172626 - RNA, 21 nt, Human
aagcucaagugauccuccugc

SEQ ID NO: 1172627 - RNA, 18 nt, Human
aagugcugggauuacaga

SEQ ID NO: 1172628 - RNA, 19 nt, Human
acacccggagcagccagac

SEQ ID NO: 1172629 - RNA, 18 nt, Human
acagaugugggccaccgc

SEQ ID NO: 1172630 - RNA, 19 nt, Human
accacaccuccaccuuugc

SEQ ID NO: 1172631 - RNA, 24 nt, Human
accuccucuuccacauccccccaa

SEQ ID NO: 1172632 - RNA, 19 nt, Human
acuugugaagaacuuccuu

SEQ ID NO: 1172633 - RNA, 22 nt, Human
agaacuuccuucaguaagaaag

SEQ ID NO: 1172634 - RNA, 22 nt, Human
agaauauuuccaaaauucacau

SEQ ID NO: 1172635 - RNA, 25 nt, Human
agaauccuacucauacccuacuaau

SEQ ID NO: 1172636 - RNA, 25 nt, Human
aggcucuugguggggcacucuuggu

SEQ ID NO: 1172637 - RNA, 24 nt, Human
agugcugggauuacagaugugggc

SEQ ID NO: 1172638 - RNA, 22 nt, Human
auaauauuuguuugguaagauc

SEQ ID NO: 1172639 - RNA, 23 nt, Human
aucuuaaagcaccuccucuucca

SEQ ID NO: 1172640 - RNA, 22 nt, Human
auggugcugcaggcugcccuua

SEQ ID NO: 1172641 - RNA, 24 nt, Human
caaagugcugggauuacagaugug

SEQ ID NO: 1172642 - RNA, 22 nt, Human
caagugauccuccugcuucagc

SEQ ID NO: 1172643 - RNA, 27 nt, Human
caagugauccuccugcuucagccuccc

SEQ ID NO: 1172644 - RNA, 24 nt, Human
cacaccuccaccuuugccccugcu

SEQ ID NO: 1172645 - RNA, 19 nt, Human
cacauccccccaacacccc

SEQ ID NO: 1172646 - RNA, 20 nt, Human
cacccggagcagccagacag

SEQ ID NO: 1172647 - RNA, 21 nt, Human
caccuccaccuuugccccugc

SEQ ID NO: 1172648 - RNA, 18 nt, Human
caccuccucuuccacauc

SEQ ID NO: 1172649 - RNA, 20 nt, Human
caccuccucuuccacauccc

SEQ ID NO: 1172650 - RNA, 20 nt, Human
caccuuugccccugcuggac

SEQ ID NO: 1172651 - RNA, 19 nt, Human
cacggccaagcuggcaggu

SEQ ID NO: 1172652 - RNA, 21 nt, Human
cagagucaggggccaccgcca

SEQ ID NO: 1172653 - RNA, 21 nt, Human
cagcaaacagcgacgucagga

SEQ ID NO: 1172654 - RNA, 20 nt, Human
cagccagacagcuugcaguc

SEQ ID NO: 1172655 - RNA, 22 nt, Human
caggaaaggacaacugaacagu

SEQ ID NO: 1172656 - RNA, 22 nt, Human
caggcaccagcagaauccuacu

SEQ ID NO: 1172657 - RNA, 20 nt, Human
caugaauaauauuuguuugg

SEQ ID NO: 1172658 - RNA, 21 nt, Human
ccaaagugcugggauuacaga

SEQ ID NO: 1172659 - RNA, 22 nt, Human
ccaaagugcugggauuacagau

SEQ ID NO: 1172660 - RNA, 24 nt, Human
ccaaagugcugggauuacagaugu

SEQ ID NO: 1172661 - RNA, 23 nt, Human
ccacaccuccaccuuugccccug

SEQ ID NO: 1172662 - RNA, 18 nt, Human
ccacguucuccaccuccu

SEQ ID NO: 1172663 - RNA, 23 nt, Human
ccaggcaccagcagaauccuacu

SEQ ID NO: 1172664 - RNA, 21 nt, Human
ccccaacaccccacgugcagg

SEQ ID NO: 1172665 - RNA, 25 nt, Human
ccccaacaccccacgugcaggacca

SEQ ID NO: 1172666 - RNA, 22 nt, Human
ccccccaacaccccacgugcag

SEQ ID NO: 1172667 - RNA, 24 nt, Human
ccccgauuccucaggcagcuugga

SEQ ID NO: 1172668 - RNA, 25 nt, Human
ccccuccagcucugagcucuagcuc

SEQ ID NO: 1172669 - RNA, 19 nt, Human
cccggagcagccagacagc

SEQ ID NO: 1172670 - RNA, 21 nt, Human
cccuccagcucugagcucuag

SEQ ID NO: 1172671 - RNA, 26 nt, Human
ccuccugcuucagccucccaaagugc

SEQ ID NO: 1172672 - RNA, 24 nt, Human
ccugcuucagccucccaaagugcu

SEQ ID NO: 1172673 - RNA, 19 nt, Human
ccuucccaggcaccagcag

SEQ ID NO: 1172674 - RNA, 18 nt, Human
ccuucuggagcucuccac

SEQ ID NO: 1172675 - RNA, 24 nt, Human
cucaagugauccuccugcuucagc

SEQ ID NO: 1172676 - RNA, 23 nt, Human
cucacaguuuccucccuucugga

SEQ ID NO: 1172677 - RNA, 23 nt, Human
cuccucuuccacauccccccaac

SEQ ID NO: 1172678 - RNA, 24 nt, Human
cucuaagccugcagagaaauucac

SEQ ID NO: 1172679 - RNA, 18 nt, Human
cucuuccacaucccccca

SEQ ID NO: 1172680 - RNA, 22 nt, Human
cugccuucccaggcaccagcag

SEQ ID NO: 1172681 - RNA, 24 nt, Human
cugcuucagccucccaaagugcug

SEQ ID NO: 1172682 - RNA, 24 nt, Human
cugcuuuaauuuccccuccagcuc

SEQ ID NO: 1172683 - RNA, 18 nt, Human
cuuggcuugccuauuacc

SEQ ID NO: 1172684 - RNA, 19 nt, Human
gaaagaacauuggaaacua

SEQ ID NO: 1172685 - RNA, 19 nt, Human
gaacugaauuugaaagacc

SEQ ID NO: 1172686 - RNA, 22 nt, Human
gaacugaauuugaaagaccaaa

SEQ ID NO: 1172687 - RNA, 24 nt, Human
gaagaacuuccuucaguaagaaag

SEQ ID NO: 1172688 - RNA, 22 nt, Human
gaucagucaggccccccuuggc

SEQ ID NO: 1172689 - RNA, 20 nt, Human
gaucuccuuuaccugacuca

SEQ ID NO: 1172690 - RNA, 18 nt, Human
gauuacagaugugggcca

SEQ ID NO: 1172691 - RNA, 19 nt, Human
gcagauggguacuugugaa

SEQ ID NO: 1172692 - RNA, 23 nt, Human
gccuuguggucaucggggcugua

SEQ ID NO: 1172693 - RNA, 19 nt, Human
gcuguugcugaagaaggcg

SEQ ID NO: 1172694 - RNA, 24 nt, Human
gcuugcagucugagcuuuggccug

SEQ ID NO: 1172695 - RNA, 20 nt, Human
ggaaacuaauuccacaggga

SEQ ID NO: 1172696 - RNA, 24 nt, Human
ggcuggucuugaacucccaagcuc

SEQ ID NO: 1172697 - RNA, 19 nt, Human
gguggggcacucuuggugg

SEQ ID NO: 1172698 - RNA, 19 nt, Human
guagauggcacugccuucc

SEQ ID NO: 1172699 - RNA, 24 nt, Human
gugauccuccugcuucagccuccc

SEQ ID NO: 1172700 - RNA, 25 nt, Human
gugguggguaucuggauuccuuuua

SEQ ID NO: 1172701 - RNA, 21 nt, Human
guuuccucccuucuggagcuc

SEQ ID NO: 1172702 - RNA, 23 nt, Human
uaaauggcuuaguaaucucuaag

SEQ ID NO: 1172703 - RNA, 20 nt, Human
uaaggaaacaaaauguggug

SEQ ID NO: 1172704 - RNA, 22 nt, Human
uagaauucaacgucgucgccuc

SEQ ID NO: 1172705 - RNA, 24 nt, Human
uaggggagaauauuuccaaaauuc

SEQ ID NO: 1172706 - RNA, 18 nt, Human
uaucuggauuccuuuuaa

SEQ ID NO: 1172707 - RNA, 19 nt, Human
ucacaguuuccucccuucu

SEQ ID NO: 1172708 - RNA, 21 nt, Human
ucaggcagcuuggacucgagc

SEQ ID NO: 1172709 - RNA, 20 nt, Human
uccacauccccccaacaccc

SEQ ID NO: 1172710 - RNA, 18 nt, Human
ucccaaagugcugggauu

SEQ ID NO: 1172711 - RNA, 23 nt, Human
ucccaaagugcugggauuacaga

SEQ ID NO: 1172712 - RNA, 22 nt, Human
ucccugccacguucuccaccuc

SEQ ID NO: 1172713 - RNA, 21 nt, Human
uccucaggcagcuuggacucg

SEQ ID NO: 1172714 - RNA, 20 nt, Human
ucuagcucugccuuggcuug

SEQ ID NO: 1172715 - RNA, 22 nt, Human
ucucuggaucuuaaagcaccuc

SEQ ID NO: 1172716 - RNA, 27 nt, Human
ucucuggaucuuaaagcaccuccucuu

SEQ ID NO: 1172717 - RNA, 25 nt, Human
ugaacucccaagcucaagugauccu

SEQ ID NO: 1172718 - RNA, 20 nt, Human
ugaagaacuuccuucaguaa

SEQ ID NO: 1172719 - RNA, 24 nt, Human
ugaagaacuuccuucaguaagaaa

SEQ ID NO: 1172720 - RNA, 22 nt, Human
ugaauuugaaagaccaaaauga

SEQ ID NO: 1172721 - RNA, 18 nt, Human
ugacuucugggcacaccc

SEQ ID NO: 1172722 - RNA, 20 nt, Human
ugaguuauguuuucuucccu

SEQ ID NO: 1172723 - RNA, 19 nt, Human
ugaguucagagcaucccag

SEQ ID NO: 1172724 - RNA, 22 nt, Human
ugauaauuacucauuaaggaaa

SEQ ID NO: 1172725 - RNA, 19 nt, Human
ugccuauuaccuuggccac

SEQ ID NO: 1172726 - RNA, 22 nt, Human
ugccuauuaccuuggccacacg

SEQ ID NO: 1172727 - RNA, 18 nt, Human
ugcugggauuacagaugu

SEQ ID NO: 1172728 - RNA, 24 nt, Human
ugcugggauuacagaugugggcca

SEQ ID NO: 1172729 - RNA, 24 nt, Human
ugcuucagccucccaaagugcugg

SEQ ID NO: 1172730 - RNA, 18 nt, Human
ugcuuuaauuuccccucc

SEQ ID NO: 1172731 - RNA, 19 nt, Human
uggagaaagacccaauagg

SEQ ID NO: 1172732 - RNA, 18 nt, Human
uggauuuuuaaauacugc

SEQ ID NO: 1172733 - RNA, 18 nt, Human
uggcauggugcugcaggc

SEQ ID NO: 1172734 - RNA, 19 nt, Human
ugggauuacagaugugggc

SEQ ID NO: 1172735 - RNA, 21 nt, Human
ugggauuacagaugugggcca

SEQ ID NO: 1172736 - RNA, 22 nt, Human
ugggauuacagaugugggccac

SEQ ID NO: 1172737 - RNA, 23 nt, Human
ugggauuacagaugugggccacc

SEQ ID NO: 1172738 - RNA, 24 nt, Human
ugggauuacagaugugggccaccg

SEQ ID NO: 1172739 - RNA, 18 nt, Human
ugguccgaggacucaauc

SEQ ID NO: 1172740 - RNA, 18 nt, Human
uggugcugcaggcugccc

SEQ ID NO: 1172741 - RNA, 22 nt, Human
ugugggaauaacuugaagaaug

SEQ ID NO: 1172742 - RNA, 21 nt, Human
ugugguggguaucuggauucc

SEQ ID NO: 1172743 - RNA, 20 nt, Human
uguugccagcaaacagcgag

SEQ ID NO: 1172744 - RNA, 23 nt, Human
uuaggaucccugccacguucucc

SEQ ID NO: 1172745 - RNA, 25 nt, Human
uuuuaaauacugcccugaccuccca

SEQ ID NO: 1172746 - RNA, 21 nt, Human
aaagcugucugccacaacuga

SEQ ID NO: 1172747 - RNA, 21 nt, Human
aagaaaccacaaagaaauuac

SEQ ID NO: 1172748 - RNA, 19 nt, Human
aauggcaaaaaucagaaga

SEQ ID NO: 1172749 - RNA, 24 nt, Human
aaugugcagguggccucccugagg

SEQ ID NO: 1172750 - RNA, 20 nt, Human
acuaaaauagaagguaucug

SEQ ID NO: 1172751 - RNA, 23 nt, Human
acuacgccuacuaggaaaaaaga

SEQ ID NO: 1172752 - RNA, 18 nt, Human
acugaacugucuugccag

SEQ ID NO: 1172753 - RNA, 21 nt, Human
agaaucaccccaaacuaggac

SEQ ID NO: 1172754 - RNA, 18 nt, Human
aggaaaaaagagaagaaa

SEQ ID NO: 1172755 - RNA, 19 nt, Human
aucagaagaaaccacaaag

SEQ ID NO: 1172756 - RNA, 23 nt, Human
augcaauuucuuuauugaaaagc

SEQ ID NO: 1172757 - RNA, 19 nt, Human
caacauggguaguaauuga

SEQ ID NO: 1172758 - RNA, 22 nt, Human
caauggcaaaaaucagaagaaa

SEQ ID NO: 1172759 - RNA, 20 nt, Human
ccucccugaggauucagagc

SEQ ID NO: 1172760 - RNA, 22 nt, Human
ccugaggauucagagcuucagc

SEQ ID NO: 1172761 - RNA, 18 nt, Human
ccuggacagaguaugaga

SEQ ID NO: 1172762 - RNA, 25 nt, Human
ccuuuacauuguuaucuuuuuugau

SEQ ID NO: 1172763 - RNA, 23 nt, Human
cuauaagucucccccugggauuc

SEQ ID NO: 1172764 - RNA, 22 nt, Human
cugcuagauauuuacugaagag

SEQ ID NO: 1172765 - RNA, 23 nt, Human
gaaucaccccaaacuaggaccag

SEQ ID NO: 1172766 - RNA, 21 nt, Human
gagaaugugcagguggccucc

SEQ ID NO: 1172767 - RNA, 22 nt, Human
guuugagauuucagaaucaccc

SEQ ID NO: 1172768 - RNA, 25 nt, Human
guuuguuagcaacuaaaauagaagg

SEQ ID NO: 1172769 - RNA, 18 nt, Human
uaacucacugaacugucu

SEQ ID NO: 1172770 - RNA, 19 nt, Human
uaacuguaacggaaucuuu

SEQ ID NO: 1172771 - RNA, 20 nt, Human
uacauuguuaucuuuuuuga

SEQ ID NO: 1172772 - RNA, 21 nt, Human
ucagaagaaaccacaaagaaa

SEQ ID NO: 1172773 - RNA, 20 nt, Human
uccacauauaguauuauggu

SEQ ID NO: 1172774 - RNA, 26 nt, Human
ugacugggcauaauucaaaaaggaaa

SEQ ID NO: 1172775 - RNA, 21 nt, Human
uggcaaaaaucagaagaaacc

SEQ ID NO: 1172776 - RNA, 24 nt, Human
uggcaaaaaucagaagaaaccaca

SEQ ID NO: 1172777 - RNA, 25 nt, Human
uggcaaaaaucagaagaaaccacaa

SEQ ID NO: 1172778 - RNA, 18 nt, Human
uguuguacaacaugggua

SEQ ID NO: 1172779 - RNA, 24 nt, Human
uucaaaaaggaaaagcucauauuc

SEQ ID NO: 1172780 - RNA, 19 nt, Human
uuccuguucuuuugacuca

SEQ ID NO: 1172781 - RNA, 26 nt, Human
uugaccccaauggcaaaaaucagaag

SEQ ID NO: 1172782 - RNA, 24 nt, Human
uugaugccugugcugccuauggug

SEQ ID NO: 1172783 - RNA, 23 nt, Human
ccucugcggcggucacgucgccc

SEQ ID NO: 1172784 - RNA, 23 nt, Human
cgccggagccgugccgggucccc

SEQ ID NO: 1172785 - RNA, 19 nt, Human
cggcugccucuucauugcu

SEQ ID NO: 1172786 - RNA, 21 nt, Human
cuuuucacguggccacccucc

SEQ ID NO: 1172787 - RNA, 22 nt, Human
gccggagccgugccgggucccc

SEQ ID NO: 1172788 - RNA, 24 nt, Human
guggccacccuccuguccguuggc

SEQ ID NO: 1172789 - RNA, 23 nt, Human
ucauugcuuuucacguggccacc

SEQ ID NO: 1172790 - RNA, 21 nt, Human
ucggagcucuggcugcccacg

SEQ ID NO: 1172791 - RNA, 18 nt, Human
ugccggguccccgccgca

SEQ ID NO: 1172792 - RNA, 20 nt, Human
aaggagacaggaaggcucca

SEQ ID NO: 1172793 - RNA, 18 nt, Human
gagaguuuucaccaagga

SEQ ID NO: 1172794 - RNA, 18 nt, Human
gcuagucucagcuccugg

SEQ ID NO: 1172795 - RNA, 22 nt, Human
ucaccaaggagacaggaaggcu

SEQ ID NO: 1172796 - RNA, 24 nt, Human
uccagcucagucugggcucugcag

SEQ ID NO: 1172797 - RNA, 19 nt, Human
ucucagcuccuggcgcugg

SEQ ID NO: 1172798 - RNA, 19 nt, Human
ucugcagaagguguccuug

SEQ ID NO: 1172799 - RNA, 20 nt, Human
uggcuagucucagcuccugg

SEQ ID NO: 1172800 - RNA, 18 nt, Human
aaaaaagagagaugaaaa

SEQ ID NO: 1172801 - RNA, 19 nt, Human
aaaaagccagcagcccaga

SEQ ID NO: 1172802 - RNA, 19 nt, Human
aaaaagccagcagcccaga

SEQ ID NO: 1172803 - RNA, 25 nt, Human
aaaaccaacccugaguuaagaaccu

SEQ ID NO: 1172804 - RNA, 21 nt, Human
aaaaggcauucugcugccuuu

SEQ ID NO: 1172805 - RNA, 20 nt, Human
aaaccugcacauguaccccu

SEQ ID NO: 1172806 - RNA, 22 nt, Human
aaccaauaaccuggacauggcc

SEQ ID NO: 1172807 - RNA, 22 nt, Human
aaccaguaaugucacaagucaa

SEQ ID NO: 1172808 - RNA, 21 nt, Human
aaccaugaucccucugccucc

SEQ ID NO: 1172809 - RNA, 27 nt, Human
aacugcuucuucuuaccaaacuucuau

SEQ ID NO: 1172810 - RNA, 20 nt, Human
aagcacucauagacaauaca

SEQ ID NO: 1172811 - RNA, 18 nt, Human
aagggcaaaaagccagca

SEQ ID NO: 1172812 - RNA, 22 nt, Human
acagcagccccucuucagcucc

SEQ ID NO: 1172813 - RNA, 21 nt, Human
accccuaaauuuuuuuaaaaa

SEQ ID NO: 1172814 - RNA, 20 nt, Human
accugggugacgaaauaauc

SEQ ID NO: 1172815 - RNA, 21 nt, Human
acuguagugcaaaagcacuca

SEQ ID NO: 1172816 - RNA, 20 nt, Human
agcacuuugggaggccgagg

SEQ ID NO: 1172817 - RNA, 18 nt, Human
caaaaagccagcagccca

SEQ ID NO: 1172818 - RNA, 24 nt, Human
cacgccuguaaucccagcacuuug

SEQ ID NO: 1172819 - RNA, 26 nt, Human
cacggccagccaugaucauuaacacc

SEQ ID NO: 1172820 - RNA, 22 nt, Human
cagcacuuugggaggccgaggg

SEQ ID NO: 1172821 - RNA, 20 nt, Human
cagcccagaauggacugucu

SEQ ID NO: 1172822 - RNA, 19 nt, Human
caggaagggcaaaaagcca

SEQ ID NO: 1172823 - RNA, 21 nt, Human
caggaagggcaaaaagccagc

SEQ ID NO: 1172824 - RNA, 18 nt, Human
caguagcuggaaaucaug

SEQ ID NO: 1172825 - RNA, 19 nt, Human
caugacacagguuugccua

SEQ ID NO: 1172826 - RNA, 21 nt, Human
cauucugcugccuuucugagg

SEQ ID NO: 1172827 - RNA, 18 nt, Human
ccaaccccgggcaagcag

SEQ ID NO: 1172828 - RNA, 20 nt, Human
ccaacccugaguuaagaacc

SEQ ID NO: 1172829 - RNA, 20 nt, Human
ccugaguuaagaaccucaga

SEQ ID NO: 1172830 - RNA, 23 nt, Human
cgccuguaaucccagcacuuugg

SEQ ID NO: 1172831 - RNA, 24 nt, Human
cgccuguaaucccagcacuuuggg

SEQ ID NO: 1172832 - RNA, 22 nt, Human
cucacgccuguaaucccagcac

SEQ ID NO: 1172833 - RNA, 24 nt, Human
cucacgccuguaaucccagcacuu

SEQ ID NO: 1172834 - RNA, 20 nt, Human
cucaggucagaagaaaaagg

SEQ ID NO: 1172835 - RNA, 20 nt, Human
cucuacacaucgccacacca

SEQ ID NO: 1172836 - RNA, 18 nt, Human
cugaaaccaugaucccuc

SEQ ID NO: 1172837 - RNA, 22 nt, Human
cugaaaccaugaucccucugcc

SEQ ID NO: 1172838 - RNA, 21 nt, Human
cugauuuccaaucuuggcuca

SEQ ID NO: 1172839 - RNA, 22 nt, Human
cuucucagcacucgccuucuaa

SEQ ID NO: 1172840 - RNA, 21 nt, Human
gaaaucaugcaggaagggcaa

SEQ ID NO: 1172841 - RNA, 23 nt, Human
gagccgaugccuggguucccagc

SEQ ID NO: 1172842 - RNA, 21 nt, Human
ggccgggcgcgguggcucacg

SEQ ID NO: 1172843 - RNA, 21 nt, Human
ggcucacgccuguaaucccag

SEQ ID NO: 1172844 - RNA, 18 nt, Human
gggcaaaaagccagcagc

SEQ ID NO: 1172845 - RNA, 24 nt, Human
gggcgcgguggcucacgccuguaa

SEQ ID NO: 1172846 - RNA, 23 nt, Human
gguggcucacgccuguaauccca

SEQ ID NO: 1172847 - RNA, 24 nt, Human
gguggcucacgccuguaaucccag

SEQ ID NO: 1172848 - RNA, 21 nt, Human
guccucuuggcucguagaguu

SEQ ID NO: 1172849 - RNA, 19 nt, Human
gugacaagucuucucagca

SEQ ID NO: 1172850 - RNA, 24 nt, Human
uaagaaccucagaacagggguuga

SEQ ID NO: 1172851 - RNA, 23 nt, Human
uagugcaaaagcacucauagaca

SEQ ID NO: 1172852 - RNA, 23 nt, Human
uauguaacaaaccugcacaugua

SEQ ID NO: 1172853 - RNA, 20 nt, Human
ucuacacaucgccacaccac

SEQ ID NO: 1172854 - RNA, 23 nt, Human
ugaaaccaugaucccucugccuc

SEQ ID NO: 1172855 - RNA, 19 nt, Human
ugaaauggaaaacauucgg

SEQ ID NO: 1172856 - RNA, 23 nt, Human
ugaaauggaaaacauucggaaaa

SEQ ID NO: 1172857 - RNA, 21 nt, Human
ugaguuaagaaccucagaaca

SEQ ID NO: 1172858 - RNA, 22 nt, Human
ugaucauuaacaccuccaugaa

SEQ ID NO: 1172859 - RNA, 22 nt, Human
ugauuugagaaaccugugacaa

SEQ ID NO: 1172860 - RNA, 22 nt, Human
ugccugacuuucaguccaugca

SEQ ID NO: 1172861 - RNA, 24 nt, Human
uggcucacgccuguaaucccagca

SEQ ID NO: 1172862 - RNA, 23 nt, Human
ugggaggccgagggagaggauca

SEQ ID NO: 1172863 - RNA, 18 nt, Human
uggguucccagcauccag

SEQ ID NO: 1172864 - RNA, 23 nt, Human
uguaaagaaccaaauaguaaaua

SEQ ID NO: 1172865 - RNA, 19 nt, Human
uucagcuccauguacagga

SEQ ID NO: 1172866 - RNA, 20 nt, Human
uucagcuccauguacaggag

SEQ ID NO: 1172867 - RNA, 24 nt, Human
uugggaggccgagggagaggauca

SEQ ID NO: 1172868 - RNA, 20 nt, Human
uuucugauuuccaaucuugg

SEQ ID NO: 1172869 - RNA, 21 nt, Human
uggccaaaggaacaacuccau

SEQ ID NO: 1172870 - RNA, 19 nt, Human
aaaaaaaagauguaugaau

SEQ ID NO: 1172871 - RNA, 21 nt, Human
aaaaaaacaggcaggcuuaga

SEQ ID NO: 1172872 - RNA, 22 nt, Human
aaaaaacaggcaggcuuagaaa

SEQ ID NO: 1172873 - RNA, 20 nt, Human
aaaaacaaaaaacaaaaauc

SEQ ID NO: 1172874 - RNA, 21 nt, Human
aaaaacaaaaaacaaaaaucu

SEQ ID NO: 1172875 - RNA, 25 nt, Human
aaaacaaaaaucuuaaucuugagcc

SEQ ID NO: 1172876 - RNA, 19 nt, Human
aaacuccaggcucucuggc

SEQ ID NO: 1172877 - RNA, 22 nt, Human
aaagccuaaaauguaggaguuc

SEQ ID NO: 1172878 - RNA, 21 nt, Human
aacauaaaagguaugucuccc

SEQ ID NO: 1172879 - RNA, 19 nt, Human
aacauaccuagaucauaua

SEQ ID NO: 1172880 - RNA, 22 nt, Human
aagcauaugaauacaacagucu

SEQ ID NO: 1172881 - RNA, 23 nt, Human
aaggugguuucuauguccaauua

SEQ ID NO: 1172882 - RNA, 25 nt, Human
aauguaggaguuccuccagguacca

SEQ ID NO: 1172883 - RNA, 23 nt, Human
acaaacauaaaagguaugucucc

SEQ ID NO: 1172884 - RNA, 23 nt, Human
acacacacacacacacacacaca

SEQ ID NO: 1172885 - RNA, 23 nt, Human
acacacacacacacacacacaca

SEQ ID NO: 1172886 - RNA, 23 nt, Human
acacacacacacacacacacaca

SEQ ID NO: 1172887 - RNA, 28 nt, Human
acacacacacacacgaaaagccuguagu

SEQ ID NO: 1172888 - RNA, 20 nt, Human
acacacgaaaagccuguaac

SEQ ID NO: 1172889 - RNA, 25 nt, Human
accaaauugccuccaaggucaaaac

SEQ ID NO: 1172890 - RNA, 22 nt, Human
accaucaguuucccuaguucug

SEQ ID NO: 1172891 - RNA, 23 nt, Human
acgcacacacacacacacacaca

SEQ ID NO: 1172892 - RNA, 22 nt, Human
acuaugauacugccacucugaa

SEQ ID NO: 1172893 - RNA, 22 nt, Human
acuuggcaacugauugcaacau

SEQ ID NO: 1172894 - RNA, 22 nt, Human
agaucauauaaauuugugaagg

SEQ ID NO: 1172895 - RNA, 21 nt, Human
aggaagacaagcauaugaaua

SEQ ID NO: 1172896 - RNA, 22 nt, Human
auauaaguaaacauacauucua

SEQ ID NO: 1172897 - RNA, 22 nt, Human
augaacaucaacuauccuacag

SEQ ID NO: 1172898 - RNA, 21 nt, Human
augaagaccaaauugccucca

SEQ ID NO: 1172899 - RNA, 25 nt, Human
caaggucaaaacaauaguucuuugu

SEQ ID NO: 1172900 - RNA, 20 nt, Human
cacacacacacacacacaca

SEQ ID NO: 1172901 - RNA, 20 nt, Human
cacacacacacacacacaca

SEQ ID NO: 1172902 - RNA, 20 nt, Human
cacacacacacacacacaca

SEQ ID NO: 1172903 - RNA, 20 nt, Human
cacacacacacacacacaca

SEQ ID NO: 1172904 - RNA, 20 nt, Human
cacacacacacacacacaca

SEQ ID NO: 1172905 - RNA, 20 nt, Human
cacacacacacacacacaca

SEQ ID NO: 1172906 - RNA, 20 nt, Human
cacacacacacacacacaca

SEQ ID NO: 1172907 - RNA, 22 nt, Human
cacacacacacacacacacaca

SEQ ID NO: 1172908 - RNA, 22 nt, Human
cacacacacacacacacacaca

SEQ ID NO: 1172909 - RNA, 26 nt, Human
cacacacacacacacacacacacaca

SEQ ID NO: 1172910 - RNA, 26 nt, Human
cacacacacacacacacacacacaca

SEQ ID NO: 1172911 - RNA, 26 nt, Human
cacacacacacacacacacacacaca

SEQ ID NO: 1172912 - RNA, 26 nt, Human
cacacacacacacacacacacacaca

SEQ ID NO: 1172913 - RNA, 26 nt, Human
cacacacacacacacacacacacacg

SEQ ID NO: 1172914 - RNA, 33 nt, Human
cacacacacacacacacacacgaaaagccuggu

SEQ ID NO: 1172915 - RNA, 25 nt, Human
cacacacacgaaaagccuguaaccu

SEQ ID NO: 1172916 - RNA, 18 nt, Human
cacaguguuugaauucca

SEQ ID NO: 1172917 - RNA, 21 nt, Human
cagaaagaaaauugcugacau

SEQ ID NO: 1172918 - RNA, 24 nt, Human
cagcuaaaccuaaugaagaccaaa

SEQ ID NO: 1172919 - RNA, 21 nt, Human
ccaggcucucuggccuuggga

SEQ ID NO: 1172920 - RNA, 19 nt, Human
ccagggaaauggaaaaaaa

SEQ ID NO: 1172921 - RNA, 23 nt, Human
ccagggaaauggaaaaaaaacaa

SEQ ID NO: 1172922 - RNA, 20 nt, Human
ccaucaguuucccuaguucu

SEQ ID NO: 1172923 - RNA, 25 nt, Human
cccacgacaauggauauaguugcuu

SEQ ID NO: 1172924 - RNA, 24 nt, Human
ccuacagcuaaaccuaaugaagac

SEQ ID NO: 1172925 - RNA, 20 nt, Human
cgcacacacacacacacaca

SEQ ID NO: 1172926 - RNA, 25 nt, Human
cgcacacacacacacacacacacac

SEQ ID NO: 1172927 - RNA, 24 nt, Human
cucaagaaguauaaauuuuacaaa

SEQ ID NO: 1172928 - RNA, 22 nt, Human
cucucuggccuugggauuccag

SEQ ID NO: 1172929 - RNA, 20 nt, Human
cugaaauaucuaguguagca

SEQ ID NO: 1172930 - RNA, 20 nt, Human
cuugagcucuaguucuugac

SEQ ID NO: 1172931 - RNA, 22 nt, Human
gaaauggaaaaaaaacaaaaaa

SEQ ID NO: 1172932 - RNA, 19 nt, Human
gaccuaagacacccuccuu

SEQ ID NO: 1172933 - RNA, 21 nt, Human
ggaccuaagacacccuccuuc

SEQ ID NO: 1172934 - RNA, 23 nt, Human
ggaguuccuccagguacucacuu

SEQ ID NO: 1172935 - RNA, 24 nt, Human
guaugucucccuucaauauuuccu

SEQ ID NO: 1172936 - RNA, 23 nt, Human
uaaaacagauccucuagccagga

SEQ ID NO: 1172937 - RNA, 22 nt, Human
uaaguggagcaauauuauuggc

SEQ ID NO: 1172938 - RNA, 20 nt, Human
uaaugaacaucaacuauccu

SEQ ID NO: 1172939 - RNA, 21 nt, Human
uaauugaugcugcauugacgc

SEQ ID NO: 1172940 - RNA, 24 nt, Human
uacaugaacacucagcuauguaua

SEQ ID NO: 1172941 - RNA, 18 nt, Human
uaggaguuccuccaggua

SEQ ID NO: 1172942 - RNA, 24 nt, Human
uaggaugugacuuggcaacugauu

SEQ ID NO: 1172943 - RNA, 18 nt, Human
uaguucagauggaucuua

SEQ ID NO: 1172944 - RNA, 18 nt, Human
uaguucagauggaucuua

SEQ ID NO: 1172945 - RNA, 22 nt, Human
uaguucagauggaucuuaccag

SEQ ID NO: 1172946 - RNA, 24 nt, Human
uaucacaguuaaaauuauaguuaa

SEQ ID NO: 1172947 - RNA, 19 nt, Human
uauuuaauagagggacacc

SEQ ID NO: 1172948 - RNA, 31 nt, Human
ucaaaacgcacacacacacacacacacacag

SEQ ID NO: 1172949 - RNA, 18 nt, Human
ucacuggggucuauuguu

SEQ ID NO: 1172950 - RNA, 20 nt, Human
ucagaaagaaaauugcugac

SEQ ID NO: 1172951 - RNA, 19 nt, Human
ucaguaaguggagcaauau

SEQ ID NO: 1172952 - RNA, 22 nt, Human
uccaagcuagcugcccaucauc

SEQ ID NO: 1172953 - RNA, 21 nt, Human
uccacauuuucucuauuuuuc

SEQ ID NO: 1172954 - RNA, 25 nt, Human
ucccacgacaauggauauaguugcu

SEQ ID NO: 1172955 - RNA, 21 nt, Human
ucuauacuucaguaaguggag

SEQ ID NO: 1172956 - RNA, 24 nt, Human
ucugaaaagcugucuacauccaaa

SEQ ID NO: 1172957 - RNA, 24 nt, Human
ucuggccuugggauuccaggagga

SEQ ID NO: 1172958 - RNA, 21 nt, Human
ucuuucuuuuaucaauucucc

SEQ ID NO: 1172959 - RNA, 18 nt, Human
ugaaaaaaggauguuuua

SEQ ID NO: 1172960 - RNA, 24 nt, Human
ugaaaacauaccuagaucauauaa

SEQ ID NO: 1172961 - RNA, 22 nt, Human
ugaaauaucuaguguagcacau

SEQ ID NO: 1172962 - RNA, 25 nt, Human
ugaaauaucuaguguagcacauaau

SEQ ID NO: 1172963 - RNA, 19 nt, Human
ugccucaggucaucuucau

SEQ ID NO: 1172964 - RNA, 20 nt, Human
ugcuaauugaauuacacuuc

SEQ ID NO: 1172965 - RNA, 24 nt, Human
ugcuuuuggacauccaaacuccag

SEQ ID NO: 1172966 - RNA, 19 nt, Human
uggaaaaaaaacaaaaaac

SEQ ID NO: 1172967 - RNA, 25 nt, Human
ugguucuccagcuugcagacaaccu

SEQ ID NO: 1172968 - RNA, 25 nt, Human
uguucccagggaaauggaaaaaaaa

SEQ ID NO: 1172969 - RNA, 20 nt, Human
uuaguauuaaccaauaauaa

SEQ ID NO: 1172970 - RNA, 20 nt, Human
uucaauauuuccucuuaaug

SEQ ID NO: 1172971 - RNA, 22 nt, Human
uucaauuuccuuucuuuucacu

SEQ ID NO: 1172972 - RNA, 21 nt, Human
uucccugguucuccagcuugc

SEQ ID NO: 1172973 - RNA, 33 nt, Human
uucucaaaacgcacacacacacacacacacagu

SEQ ID NO: 1172974 - RNA, 21 nt, Human
uuggacauccaaacuccaggc

SEQ ID NO: 1172975 - RNA, 22 nt, Human
aaacagaaucugauuuacacgg

SEQ ID NO: 1172976 - RNA, 18 nt, Human
acagaaucugauuuacac

SEQ ID NO: 1172977 - RNA, 21 nt, Human
acagaauuucuagaaaagacc

SEQ ID NO: 1172978 - RNA, 19 nt, Human
agagagcauggggacccga

SEQ ID NO: 1172979 - RNA, 25 nt, Human
caaacagauccaucugcaaacagaa

SEQ ID NO: 1172980 - RNA, 21 nt, Human
cacacccagcacaccucccag

SEQ ID NO: 1172981 - RNA, 24 nt, Human
cacgaacacacccagcacaccucc

SEQ ID NO: 1172982 - RNA, 20 nt, Human
ccucccagagagcaugggga

SEQ ID NO: 1172983 - RNA, 20 nt, Human
cgaacacacccagcacaccu

SEQ ID NO: 1172984 - RNA, 28 nt, Human
gaaaagaccaaacagauccaucugcaaa

SEQ ID NO: 1172985 - RNA, 21 nt, Human
gaacacacccagcacaccucc

SEQ ID NO: 1172986 - RNA, 20 nt, Human
uagaaaagaccaaacagauc

SEQ ID NO: 1172987 - RNA, 23 nt, Human
ucaggacauaacagaauuucuag

SEQ ID NO: 1172988 - RNA, 20 nt, Human
ucccagagagcauggggacc

SEQ ID NO: 1172989 - RNA, 21 nt, Human
ucuagaaaagaccaaacagau

SEQ ID NO: 1172990 - RNA, 22 nt, Human
ugauuuacacgaacacacccag

SEQ ID NO: 1172991 - RNA, 24 nt, Human
uuucuagaaaagaccaaacagauc

SEQ ID NO: 1172992 - RNA, 18 nt, Human
aaauguggaaaaauagug

SEQ ID NO: 1172993 - RNA, 21 nt, Human
aagagccaaugucaacagagc

SEQ ID NO: 1172994 - RNA, 18 nt, Human
aaggagccaucaucuuuc

SEQ ID NO: 1172995 - RNA, 21 nt, Human
acacauucacgccccuacgca

SEQ ID NO: 1172996 - RNA, 21 nt, Human
acagagcuuuaauuauauaac

SEQ ID NO: 1172997 - RNA, 20 nt, Human
agaggcauuguggcccacgg

SEQ ID NO: 1172998 - RNA, 23 nt, Human
agaugguagaagguuccucucag

SEQ ID NO: 1172999 - RNA, 23 nt, Human
aucaucugcauguuaccagugca

SEQ ID NO: 1173000 - RNA, 24 nt, Human
aucuucuuccaagaaccacaaagg

SEQ ID NO: 1173001 - RNA, 22 nt, Human
auuauguccacaaaggagccau

SEQ ID NO: 1173002 - RNA, 20 nt, Human
caacagcuuugauucuccua

SEQ ID NO: 1173003 - RNA, 22 nt, Human
caagugaggacauaaauccacu

SEQ ID NO: 1173004 - RNA, 26 nt, Human
cacaaaacuugacucuuccccucauu

SEQ ID NO: 1173005 - RNA, 30 nt, Human
cacacacauucacgccccuacgcauauaca

SEQ ID NO: 1173006 - RNA, 19 nt, Human
cacuguauaugcuucaggu

SEQ ID NO: 1173007 - RNA, 18 nt, Human
cagugaacucuuaucuuc

SEQ ID NO: 1173008 - RNA, 24 nt, Human
cauaaauccacuaaaccaucacuc

SEQ ID NO: 1173009 - RNA, 25 nt, Human
cauuaugaaguuugccuucaagagg

SEQ ID NO: 1173010 - RNA, 20 nt, Human
ccaaugucaacagagcuuua

SEQ ID NO: 1173011 - RNA, 22 nt, Human
ccccuacgcauauacacuucag

SEQ ID NO: 1173012 - RNA, 23 nt, Human
ccuacuccaaccagcuuagcugg

SEQ ID NO: 1173013 - RNA, 23 nt, Human
cuggcaauggacacuguauaugc

SEQ ID NO: 1173014 - RNA, 24 nt, Human
gaaaauguggaaaaauaguguagc

SEQ ID NO: 1173015 - RNA, 21 nt, Human
gagaaucacugggagaugaga

SEQ ID NO: 1173016 - RNA, 18 nt, Human
ggugcagaguucaaagac

SEQ ID NO: 1173017 - RNA, 21 nt, Human
uacaagguuacugggccuagu

SEQ ID NO: 1173018 - RNA, 22 nt, Human
uagaagguuccucucaguguuu

SEQ ID NO: 1173019 - RNA, 25 nt, Human
uaguuuaugaaagugaccauuuuuu

SEQ ID NO: 1173020 - RNA, 20 nt, Human
uauaauaggugcauucaguu

SEQ ID NO: 1173021 - RNA, 25 nt, Human
uauacacacacauucacgccccuac

SEQ ID NO: 1173022 - RNA, 29 nt, Human
uauacacacacauucacgccccuacgcau

SEQ ID NO: 1173023 - RNA, 20 nt, Human
uauauacacacacauucacg

SEQ ID NO: 1173024 - RNA, 21 nt, Human
uaucuuuacucaagugcuggc

SEQ ID NO: 1173025 - RNA, 26 nt, Human
ucacucucuaccuuaaucuucucaau

SEQ ID NO: 1173026 - RNA, 24 nt, Human
ucacugggagaugagaugguagaa

SEQ ID NO: 1173027 - RNA, 19 nt, Human
ucagugaacucuuaucuuc

SEQ ID NO: 1173028 - RNA, 22 nt, Human
uccaagcaauucucagaagagg

SEQ ID NO: 1173029 - RNA, 19 nt, Human
ucuuaggauaacugguucu

SEQ ID NO: 1173030 - RNA, 22 nt, Human
ugacuuuaauuuaauacauugc

SEQ ID NO: 1173031 - RNA, 18 nt, Human
ugcagaguucaaagacag

SEQ ID NO: 1173032 - RNA, 29 nt, Human
uggcccacggagaaucacugggagaugaa

SEQ ID NO: 1173033 - RNA, 27 nt, Human
uguagcggcauggaacuggguaaguac

SEQ ID NO: 1173034 - RNA, 21 nt, Human
uguauaugcuucagguuacac

SEQ ID NO: 1173035 - RNA, 20 nt, Human
uuaauuuaguuucacucauu

SEQ ID NO: 1173036 - RNA, 25 nt, Human
uuauauacacacacauucacggugu

SEQ ID NO: 1173037 - RNA, 22 nt, Human
uucaagagccaaugucaacaga

SEQ ID NO: 1173038 - RNA, 19 nt, Human
uucaagaugugacucacag

SEQ ID NO: 1173039 - RNA, 20 nt, Human
uucacucucuaccuuaaucu

SEQ ID NO: 1173040 - RNA, 20 nt, Human
uugcuuguugguacagauag

SEQ ID NO: 1173041 - RNA, 25 nt, Human
uugguacagauaggacuucagcuau

SEQ ID NO: 1173042 - RNA, 24 nt, Human
uuguccugaccauauuucacucuc

SEQ ID NO: 1173043 - RNA, 23 nt, Human
uuuaucuuuacucaagugcuggc

SEQ ID NO: 1173044 - RNA, 20 nt, Human
aacuauugcuccccccaccc

SEQ ID NO: 1173045 - RNA, 18 nt, Human
aagacagagcucucaaac

SEQ ID NO: 1173046 - RNA, 20 nt, Human
acaaaugcaaaaaaaaagga

SEQ ID NO: 1173047 - RNA, 19 nt, Human
acauugguaaauauuuuuc

SEQ ID NO: 1173048 - RNA, 22 nt, Human
acucugucccacccccaacccc

SEQ ID NO: 1173049 - RNA, 21 nt, Human
agaaaaaacuugcuccaugcc

SEQ ID NO: 1173050 - RNA, 23 nt, Human
agaaaaauagcauucuucaccgg

SEQ ID NO: 1173051 - RNA, 18 nt, Human
agaauuaacaaaugcaaa

SEQ ID NO: 1173052 - RNA, 18 nt, Human
agacacacuggagcugcu

SEQ ID NO: 1173053 - RNA, 20 nt, Human
aggacucaaaggacaauaca

SEQ ID NO: 1173054 - RNA, 20 nt, Human
aggucaucauggcauguuuc

SEQ ID NO: 1173055 - RNA, 19 nt, Human
aguguuguauguagaggcu

SEQ ID NO: 1173056 - RNA, 27 nt, Human
augaaaaccaaauaaugcuuuaaaaua

SEQ ID NO: 1173057 - RNA, 18 nt, Human
augaaaugcaggaggcca

SEQ ID NO: 1173058 - RNA, 18 nt, Human
augauaguugugauuugg

SEQ ID NO: 1173059 - RNA, 19 nt, Human
augcaaaaaaaaaggacac

SEQ ID NO: 1173060 - RNA, 18 nt, Human
caagaaaaaauaugacuc

SEQ ID NO: 1173061 - RNA, 26 nt, Human
cacacaacagaucccccaaauaccac

SEQ ID NO: 1173062 - RNA, 21 nt, Human
cacacaauguagguggguuaa

SEQ ID NO: 1173063 - RNA, 19 nt, Human
caccauggaggcucuaugg

SEQ ID NO: 1173064 - RNA, 21 nt, Human
caccauggaggcucuauggua

SEQ ID NO: 1173065 - RNA, 24 nt, Human
cacccccaaccccaucagaagacc

SEQ ID NO: 1173066 - RNA, 22 nt, Human
caccuagagugcaauaaauaaa

SEQ ID NO: 1173067 - RNA, 24 nt, Human
cacgugugugugugugugugugag

SEQ ID NO: 1173068 - RNA, 19 nt, Human
cagaucccccaaauaccac

SEQ ID NO: 1173069 - RNA, 18 nt, Human
cagccuuuagggcaaaca

SEQ ID NO: 1173070 - RNA, 22 nt, Human
cagcgaguuaagccauuucugc

SEQ ID NO: 1173071 - RNA, 26 nt, Human
cauggcauguuucguuuguuuuugca

SEQ ID NO: 1173072 - RNA, 18 nt, Human
ccaacccgcugggcugca

SEQ ID NO: 1173073 - RNA, 19 nt, Human
ccacagcuguuucuguguu

SEQ ID NO: 1173074 - RNA, 21 nt, Human
ccacugaggaaauucaagcau

SEQ ID NO: 1173075 - RNA, 22 nt, Human
ccaugcaaacacaguaauggaa

SEQ ID NO: 1173076 - RNA, 25 nt, Human
cccacccccaaccccaucagaagac

SEQ ID NO: 1173077 - RNA, 20 nt, Human
ccccaaauaccacaaaaaga

SEQ ID NO: 1173078 - RNA, 20 nt, Human
ccccacccacccaaaaauaa

SEQ ID NO: 1173079 - RNA, 24 nt, Human
cccccaaauaccacaaaaagaucu

SEQ ID NO: 1173080 - RNA, 21 nt, Human
ccgaaggccugggagaaaggg

SEQ ID NO: 1173081 - RNA, 21 nt, Human
ccuuggaugacuucccagcuc

SEQ ID NO: 1173082 - RNA, 19 nt, Human
cgugcucacgugugugugu

SEQ ID NO: 1173083 - RNA, 19 nt, Human
cucacagaggccaacccgc

SEQ ID NO: 1173084 - RNA, 23 nt, Human
cucauacauuaaacaugcauggu

SEQ ID NO: 1173085 - RNA, 24 nt, Human
cugauaagccugagcuaauuaugu

SEQ ID NO: 1173086 - RNA, 26 nt, Human
cuugaacucauuuagaauuaauagca

SEQ ID NO: 1173087 - RNA, 18 nt, Human
gacacacuggagcugcug

SEQ ID NO: 1173088 - RNA, 24 nt, Human
gauuacuuuuuaguagucaacuac

SEQ ID NO: 1173089 - RNA, 22 nt, Human
gcgugcucacgugugugugugu

SEQ ID NO: 1173090 - RNA, 19 nt, Human
gcugcagaggaguuagcaa

SEQ ID NO: 1173091 - RNA, 21 nt, Human
ggccacugcgaaaaaaguucu

SEQ ID NO: 1173092 - RNA, 25 nt, Human
gugugugcgugcucacgugugugug

SEQ ID NO: 1173093 - RNA, 21 nt, Human
guuucaguuagaaagaggagg

SEQ ID NO: 1173094 - RNA, 19 nt, Human
uaacaaaugcaaaaaaaaa

SEQ ID NO: 1173095 - RNA, 19 nt, Human
uaacacacaacagaucccc

SEQ ID NO: 1173096 - RNA, 20 nt, Human
uaacacacaacagauccccc

SEQ ID NO: 1173097 - RNA, 22 nt, Human
uaacugaaacuucauagaaauc

SEQ ID NO: 1173098 - RNA, 21 nt, Human
uacacucuaacacacaacaga

SEQ ID NO: 1173099 - RNA, 22 nt, Human
uacauauucaguuggccucugu

SEQ ID NO: 1173100 - RNA, 27 nt, Human
uaccacaaaaagaucucaaauauuuca

SEQ ID NO: 1173101 - RNA, 19 nt, Human
uacuauaaggugaaaucgc

SEQ ID NO: 1173102 - RNA, 20 nt, Human
uagaaauccacagcuguuuc

SEQ ID NO: 1173103 - RNA, 20 nt, Human
ucagaagaccauauuuuagg

SEQ ID NO: 1173104 - RNA, 20 nt, Human
ucagaauuaacaaaugcaaa

SEQ ID NO: 1173105 - RNA, 27 nt, Human
ucauggcauguuucguuuguuuuugca

SEQ ID NO: 1173106 - RNA, 20 nt, Human
uccaagaaaaaauaugacuc

SEQ ID NO: 1173107 - RNA, 24 nt, Human
uccauaaacacauugaccuacuau

SEQ ID NO: 1173108 - RNA, 26 nt, Human
ucccacccccaaccccaucagaagac

SEQ ID NO: 1173109 - RNA, 25 nt, Human
ucuaucauuuucaaauguauaugug

SEQ ID NO: 1173110 - RNA, 22 nt, Human
ucugaacuuuccgaaggccugg

SEQ ID NO: 1173111 - RNA, 20 nt, Human
ugaaauacacucuaacacac

SEQ ID NO: 1173112 - RNA, 22 nt, Human
ugaaauacacucuaacacacaa

SEQ ID NO: 1173113 - RNA, 24 nt, Human
ugaaaugcaggaggccacugcgaa

SEQ ID NO: 1173114 - RNA, 20 nt, Human
ugaccuguccacugauuacu

SEQ ID NO: 1173115 - RNA, 19 nt, Human
ugaggaaauucaagcauga

SEQ ID NO: 1173116 - RNA, 21 nt, Human
ugaggaaauucaagcaugagu

SEQ ID NO: 1173117 - RNA, 23 nt, Human
ugcacugggauucuugggcacac

SEQ ID NO: 1173118 - RNA, 21 nt, Human
ugccaacuacguuaacagcac

SEQ ID NO: 1173119 - RNA, 21 nt, Human
ugccuuggaugacuucccagc

SEQ ID NO: 1173120 - RNA, 25 nt, Human
ugcgugcucacgugugugugugugu

SEQ ID NO: 1173121 - RNA, 18 nt, Human
ugcuccccccacccaccc

SEQ ID NO: 1173122 - RNA, 18 nt, Human
uggcauguuucguuuguu

SEQ ID NO: 1173123 - RNA, 24 nt, Human
uggcauguuucguuuguuuuugca

SEQ ID NO: 1173124 - RNA, 20 nt, Human
uggcuuggggcugucugcac

SEQ ID NO: 1173125 - RNA, 24 nt, Human
ugggagaaaggggccugcuuucag

SEQ ID NO: 1173126 - RNA, 21 nt, Human
ugggcacacaauguagguggg

SEQ ID NO: 1173127 - RNA, 21 nt, Human
uggguuaaggcaaguauguac

SEQ ID NO: 1173128 - RNA, 18 nt, Human
ugucccacccccaacccc

SEQ ID NO: 1173129 - RNA, 21 nt, Human
ugugcgugcucacgugugugu

SEQ ID NO: 1173130 - RNA, 18 nt, Human
ugugugcgugcucacgug

SEQ ID NO: 1173131 - RNA, 22 nt, Human
ugugugcgugcucacgugugug

SEQ ID NO: 1173132 - RNA, 22 nt, Human
ugugugugucaguguuguaugu

SEQ ID NO: 1173133 - RNA, 22 nt, Human
ugugugugugugugugucagug

SEQ ID NO: 1173134 - RNA, 18 nt, Human
ugugugugugugugugug

SEQ ID NO: 1173135 - RNA, 19 nt, Human
ugugugugugugugugugu

SEQ ID NO: 1173136 - RNA, 23 nt, Human
uguugccaacuacguuaacagca

SEQ ID NO: 1173137 - RNA, 21 nt, Human
uguuuauuuuauacauguaug

SEQ ID NO: 1173138 - RNA, 23 nt, Human
uguuuauuuuauacauguaugua

SEQ ID NO: 1173139 - RNA, 20 nt, Human
uuaauguuuuacucuguccc

SEQ ID NO: 1173140 - RNA, 18 nt, Human
uuacucugucccaccccc

SEQ ID NO: 1173141 - RNA, 24 nt, Human
uucaagcaugagugcuggaaucuu

SEQ ID NO: 1173142 - RNA, 21 nt, Human
uuggggcugucugcacuggga

SEQ ID NO: 1173143 - RNA, 19 nt, Human
uugguggugaugauaguug

SEQ ID NO: 1173144 - RNA, 20 nt, Human
uugguggugaugauaguugu

SEQ ID NO: 1173145 - RNA, 18 nt, Human
aaacaggcaguccccaga

SEQ ID NO: 1173146 - RNA, 20 nt, Human
aaaugcugaggccuacaacc

SEQ ID NO: 1173147 - RNA, 21 nt, Human
aaccgugcagcuccagguccu

SEQ ID NO: 1173148 - RNA, 20 nt, Human
aaccuggccccuguucucgg

SEQ ID NO: 1173149 - RNA, 19 nt, Human
aagcaagccacaacuucug

SEQ ID NO: 1173150 - RNA, 21 nt, Human
aagcaagccacaacuucugcu

SEQ ID NO: 1173151 - RNA, 21 nt, Human
aaggggcaguugcccagggug

SEQ ID NO: 1173152 - RNA, 24 nt, Human
acuggaagggaaggggcaguugcc

SEQ ID NO: 1173153 - RNA, 25 nt, Human
agaaacaggcaguccccagacagaa

SEQ ID NO: 1173154 - RNA, 23 nt, Human
agacagaagcacaaagggcaauc

SEQ ID NO: 1173155 - RNA, 25 nt, Human
agacagaagcacaaagggcaaucuc

SEQ ID NO: 1173156 - RNA, 18 nt, Human
agcagagugccaaaguca

SEQ ID NO: 1173157 - RNA, 22 nt, Human
aggaagucaaggguaugcaggc

SEQ ID NO: 1173158 - RNA, 25 nt, Human
aggaagucaaggguaugcaggcgcu

SEQ ID NO: 1173159 - RNA, 23 nt, Human
aggccuacaaccauguguucuga

SEQ ID NO: 1173160 - RNA, 24 nt, Human
aucuggacaaagcuaaugcagaag

SEQ ID NO: 1173161 - RNA, 24 nt, Human
augcaggcgcuccaguuucccugc

SEQ ID NO: 1173162 - RNA, 22 nt, Human
auggcagguuaaaaaaaaaaaa

SEQ ID NO: 1173163 - RNA, 21 nt, Human
caaaauacccuauaagggcug

SEQ ID NO: 1173164 - RNA, 19 nt, Human
caaagcuaaugcagaauga

SEQ ID NO: 1173165 - RNA, 18 nt, Human
caaagucaggcuggagug

SEQ ID NO: 1173166 - RNA, 21 nt, Human
caaaugcugaggccuacaacc

SEQ ID NO: 1173167 - RNA, 18 nt, Human
caacagagaccccaccga

SEQ ID NO: 1173168 - RNA, 24 nt, Human
caaccagacauucucccuggagac

SEQ ID NO: 1173169 - RNA, 27 nt, Human
cacaaccagacauucucccuggagacc

SEQ ID NO: 1173170 - RNA, 18 nt, Human
caccccgcugaccugagc

SEQ ID NO: 1173171 - RNA, 21 nt, Human
caccccgcugaccugagcaga

SEQ ID NO: 1173172 - RNA, 23 nt, Human
cacuggacaucacagcacaugag

SEQ ID NO: 1173173 - RNA, 19 nt, Human
cagaagcacaaagggcaau

SEQ ID NO: 1173174 - RNA, 25 nt, Human
cagcaggcauucccaacagagaccc

SEQ ID NO: 1173175 - RNA, 21 nt, Human
caggagccugggaggagguga

SEQ ID NO: 1173176 - RNA, 19 nt, Human
caggcaguccccagacaga

SEQ ID NO: 1173177 - RNA, 21 nt, Human
caggccccacuggaagggaag

SEQ ID NO: 1173178 - RNA, 21 nt, Human
caguccccagacagaagcaca

SEQ ID NO: 1173179 - RNA, 21 nt, Human
ccaaaggauuccugccuucug

SEQ ID NO: 1173180 - RNA, 20 nt, Human
ccaauauuaauuaccaccca

SEQ ID NO: 1173181 - RNA, 22 nt, Human
ccacagucuuuaauuaucuucc

SEQ ID NO: 1173182 - RNA, 23 nt, Human
ccacagucuuuaauuaucuuccc

SEQ ID NO: 1173183 - RNA, 22 nt, Human
ccagacagaagcacaaagggca

SEQ ID NO: 1173184 - RNA, 24 nt, Human
ccagucuggagcccucccagccac

SEQ ID NO: 1173185 - RNA, 19 nt, Human
cccacacugaacaaucugg

SEQ ID NO: 1173186 - RNA, 19 nt, Human
cccaggagccugggaggag

SEQ ID NO: 1173187 - RNA, 22 nt, Human
ccccaaaauuuguaucuugaag

SEQ ID NO: 1173188 - RNA, 21 nt, Human
ccccuucuccuccaccauguc

SEQ ID NO: 1173189 - RNA, 23 nt, Human
ccucccagccacggaacugccug

SEQ ID NO: 1173190 - RNA, 24 nt, Human
ccucccagccacggaacugccugg

SEQ ID NO: 1173191 - RNA, 22 nt, Human
cgggugcuauggauggaauguu

SEQ ID NO: 1173192 - RNA, 21 nt, Human
cucccuggagacccuaagcuc

SEQ ID NO: 1173193 - RNA, 22 nt, Human
cucuguccauuccacugauaaa

SEQ ID NO: 1173194 - RNA, 18 nt, Human
cugauaagaacagagaug

SEQ ID NO: 1173195 - RNA, 26 nt, Human
cugcucacuggacaucacagcacaug

SEQ ID NO: 1173196 - RNA, 24 nt, Human
cugguauuaggaagcggggcauuu

SEQ ID NO: 1173197 - RNA, 23 nt, Human
gaaccacacgcuucacacagcaa

SEQ ID NO: 1173198 - RNA, 18 nt, Human
gagaaggagcaccuggca

SEQ ID NO: 1173199 - RNA, 22 nt, Human
gagacugcuugaggauggaggg

SEQ ID NO: 1173200 - RNA, 22 nt, Human
gagcacagacaccacauccugc

SEQ ID NO: 1173201 - RNA, 25 nt, Human
gagcaccuggcacugaccagcccug

SEQ ID NO: 1173202 - RNA, 18 nt, Human
gagcgugaaugcugaggg

SEQ ID NO: 1173203 - RNA, 19 nt, Human
gaggagcaaccuggccccu

SEQ ID NO: 1173204 - RNA, 20 nt, Human
gcaaucucaaggaaucaaga

SEQ ID NO: 1173205 - RNA, 19 nt, Human
gcacagacaccacauccug

SEQ ID NO: 1173206 - RNA, 18 nt, Human
gcccagggugccugagga

SEQ ID NO: 1173207 - RNA, 19 nt, Human
ggaaccuagggauuaggga

SEQ ID NO: 1173208 - RNA, 21 nt, Human
ggaagcggggcauuuaggagg

SEQ ID NO: 1173209 - RNA, 27 nt, Human
ggagcccucccagccacggaacugccu

SEQ ID NO: 1173210 - RNA, 18 nt, Human
ggagguguugugauuuga

SEQ ID NO: 1173211 - RNA, 24 nt, Human
gggugggagaaggagcaccuggca

SEQ ID NO: 1173212 - RNA, 19 nt, Human
gucuggagcccucccagcc

SEQ ID NO: 1173213 - RNA, 20 nt, Human
gugaaugggauuagugcccu

SEQ ID NO: 1173214 - RNA, 23 nt, Human
uaaaaaaaaaaaaucacuguucc

SEQ ID NO: 1173215 - RNA, 21 nt, Human
uaacagaaauggcagguuaaa

SEQ ID NO: 1173216 - RNA, 21 nt, Human
uaaggcaaaugcugaggccua

SEQ ID NO: 1173217 - RNA, 21 nt, Human
uaagugaggauuagaaagccc

SEQ ID NO: 1173218 - RNA, 23 nt, Human
uaaguugagcacuuugucacuug

SEQ ID NO: 1173219 - RNA, 22 nt, Human
uacagcagccugaacugacuaa

SEQ ID NO: 1173220 - RNA, 24 nt, Human
uacccuacauauccauaacagacu

SEQ ID NO: 1173221 - RNA, 24 nt, Human
uaggaagcggggcauuuaggaggu

SEQ ID NO: 1173222 - RNA, 22 nt, Human
ucacaaccagacauucucccug

SEQ ID NO: 1173223 - RNA, 24 nt, Human
ucaggcuggagugugcccugaaag

SEQ ID NO: 1173224 - RNA, 23 nt, Human
ucagggccccuucuccuccacca

SEQ ID NO: 1173225 - RNA, 21 nt, Human
ucagugucuauccaggcacug

SEQ ID NO: 1173226 - RNA, 24 nt, Human
uccauaacagacuucaacacgaga

SEQ ID NO: 1173227 - RNA, 20 nt, Human
ucccuggagacccuaagcuc

SEQ ID NO: 1173228 - RNA, 18 nt, Human
uccugcagccguccuugg

SEQ ID NO: 1173229 - RNA, 24 nt, Human
uccugcgucccagccucacaagaa

SEQ ID NO: 1173230 - RNA, 23 nt, Human
ucgcccaagcgcuugcuugauuu

SEQ ID NO: 1173231 - RNA, 20 nt, Human
ucucaggguuaucuuuucca

SEQ ID NO: 1173232 - RNA, 19 nt, Human
ucugcuggaaauugcucca

SEQ ID NO: 1173233 - RNA, 24 nt, Human
ugaagguucggaugcaagcacucu

SEQ ID NO: 1173234 - RNA, 20 nt, Human
ugagcacagacaccacaucc

SEQ ID NO: 1173235 - RNA, 19 nt, Human
ugauaaagggccaagucca

SEQ ID NO: 1173236 - RNA, 21 nt, Human
ugcccagggugccugaggagc

SEQ ID NO: 1173237 - RNA, 19 nt, Human
ugcccugauaagaacagag

SEQ ID NO: 1173238 - RNA, 22 nt, Human
ugcucaggugcuucccaggagc

SEQ ID NO: 1173239 - RNA, 20 nt, Human
ugcuucccaggagccuggga

SEQ ID NO: 1173240 - RNA, 18 nt, Human
uggaauguuugagucccc

SEQ ID NO: 1173241 - RNA, 19 nt, Human
ugggaggaggugacgcuga

SEQ ID NO: 1173242 - RNA, 21 nt, Human
ugggaggaggugacgcugagc

SEQ ID NO: 1173243 - RNA, 21 nt, Human
ugggaggaggugacgcugagc

SEQ ID NO: 1173244 - RNA, 22 nt, Human
ugggaggaggugacgcugagcc

SEQ ID NO: 1173245 - RNA, 21 nt, Human
uguugugauuugagucacucu

SEQ ID NO: 1173246 - RNA, 20 nt, Human
uuaggaggugauuaggucau

SEQ ID NO: 1173247 - RNA, 21 nt, Human
uucccaacagagaccccaccg

SEQ ID NO: 1173248 - RNA, 18 nt, Human
uucccaggagccugggag

SEQ ID NO: 1173249 - RNA, 22 nt, Human
uuccucuguugggggagcacaa

SEQ ID NO: 1173250 - RNA, 19 nt, Human
uucuucaucucugccuugg

SEQ ID NO: 1173251 - RNA, 18 nt, Human
uuguggucugaggucugc

SEQ ID NO: 1173252 - RNA, 21 nt, Human
aaaccgcuuauucaagccucc

SEQ ID NO: 1173253 - RNA, 20 nt, Human
aaaugcagaaaucaccugcc

SEQ ID NO: 1173254 - RNA, 19 nt, Human
aacagucaugcccuucuuc

SEQ ID NO: 1173255 - RNA, 19 nt, Human
aacauggugaaacaccauc

SEQ ID NO: 1173256 - RNA, 20 nt, Human
aacauggugaaacaccaucu

SEQ ID NO: 1173257 - RNA, 21 nt, Human
aacauggugaaacaccaucuc

SEQ ID NO: 1173258 - RNA, 23 nt, Human
aagaauugcuugaaccugggagg

SEQ ID NO: 1173259 - RNA, 24 nt, Human
aagccuccguaauggccgacaccc

SEQ ID NO: 1173260 - RNA, 19 nt, Human
aagcugcgcccacggccgc

SEQ ID NO: 1173261 - RNA, 24 nt, Human
aauugcuugaaccugggaggugga

SEQ ID NO: 1173262 - RNA, 20 nt, Human
acaccccuccccguaccaag

SEQ ID NO: 1173263 - RNA, 24 nt, Human
acagagcgagacucugucucagga

SEQ ID NO: 1173264 - RNA, 24 nt, Human
acaggccggaugcaguggcucaug

SEQ ID NO: 1173265 - RNA, 19 nt, Human
acauggugaaacaccaucu

SEQ ID NO: 1173266 - RNA, 23 nt, Human
acccugcuucugcuugccuuccg

SEQ ID NO: 1173267 - RNA, 22 nt, Human
accuggcgacagagcgagacuc

SEQ ID NO: 1173268 - RNA, 22 nt, Human
acgccacugcacuccaaccugg

SEQ ID NO: 1173269 - RNA, 23 nt, Human
acugcacuccaaccuggcgacag

SEQ ID NO: 1173270 - RNA, 25 nt, Human
acugcacuccaaccuggcgacagag

SEQ ID NO: 1173271 - RNA, 19 nt, Human
acuggggcugcugccuuuc

SEQ ID NO: 1173272 - RNA, 19 nt, Human
agagauccugagcuuucau

SEQ ID NO: 1173273 - RNA, 24 nt, Human
agcacuuugggaggcugaggcagg

SEQ ID NO: 1173274 - RNA, 23 nt, Human
agccgggcgugguggcaugugcc

SEQ ID NO: 1173275 - RNA, 22 nt, Human
aggaaaaaaaaaaaaaaaaucc

SEQ ID NO: 1173276 - RNA, 22 nt, Human
aggcagaagaauugcuugaacc

SEQ ID NO: 1173277 - RNA, 24 nt, Human
aggcagaagaauugcuugaaccug

SEQ ID NO: 1173278 - RNA, 24 nt, Human
aggcagguggaucacaaggucaag

SEQ ID NO: 1173279 - RNA, 24 nt, Human
aggcagucugucccucagcagagc

SEQ ID NO: 1173280 - RNA, 24 nt, Human
aggcugaggcagaagaauugcuug

SEQ ID NO: 1173281 - RNA, 19 nt, Human
aggcugaggcagguggauc

SEQ ID NO: 1173282 - RNA, 21 nt, Human
aggcugaggcagguggaucac

SEQ ID NO: 1173283 - RNA, 25 nt, Human
agguggagguugcagugacaacggu

SEQ ID NO: 1173284 - RNA, 21 nt, Human
agguggagguugcagugagcc

SEQ ID NO: 1173285 - RNA, 24 nt, Human
agguggagguugcagugagccgag

SEQ ID NO: 1173286 - RNA, 19 nt, Human
agguggaucacaaggucaa

SEQ ID NO: 1173287 - RNA, 23 nt, Human
aguggcucaugccuguaauccca

SEQ ID NO: 1173288 - RNA, 24 nt, Human
aguggcucaugccuguaaucccag

SEQ ID NO: 1173289 - RNA, 24 nt, Human
aucacgccacugcacuccaaccug

SEQ ID NO: 1173290 - RNA, 20 nt, Human
auccauuaaaaauccuuaac

SEQ ID NO: 1173291 - RNA, 21 nt, Human
auccuggccaacauggugaaa

SEQ ID NO: 1173292 - RNA, 19 nt, Human
augccuguaaucccagcac

SEQ ID NO: 1173293 - RNA, 24 nt, Human
caacauggugaaacaccaucucua

SEQ ID NO: 1173294 - RNA, 19 nt, Human
caccccacccugcuucugc

SEQ ID NO: 1173295 - RNA, 23 nt, Human
caccccacccugcuucugcuugc

SEQ ID NO: 1173296 - RNA, 23 nt, Human
caccccuccccguaccaagcuug

SEQ ID NO: 1173297 - RNA, 22 nt, Human
cacuccaaccuggcgacagagc

SEQ ID NO: 1173298 - RNA, 21 nt, Human
cacugcacuccaaccuggcga

SEQ ID NO: 1173299 - RNA, 22 nt, Human
cacugcacuccaaccuggcgac

SEQ ID NO: 1173300 - RNA, 23 nt, Human
cacugcacuccaaccuggcgaca

SEQ ID NO: 1173301 - RNA, 18 nt, Human
cacugcucuuuucagagc

SEQ ID NO: 1173302 - RNA, 24 nt, Human
cagcacuuugggaggcugaggcag

SEQ ID NO: 1173303 - RNA, 26 nt, Human
cagcacuuugggaggcugaggcaggu

SEQ ID NO: 1173304 - RNA, 24 nt, Human
cagcuacucaggaggcugaggcag

SEQ ID NO: 1173305 - RNA, 27 nt, Human
caggaggcugaggcagaagaauugcuu

SEQ ID NO: 1173306 - RNA, 19 nt, Human
cagucaugcccuucuucug

SEQ ID NO: 1173307 - RNA, 20 nt, Human
caugccuguaaucccagcac

SEQ ID NO: 1173308 - RNA, 24 nt, Human
caugccuguaaucccagcacuuug

SEQ ID NO: 1173309 - RNA, 18 nt, Human
ccaaagaggagaaaucua

SEQ ID NO: 1173310 - RNA, 19 nt, Human
ccacugcacuccaaccugg

SEQ ID NO: 1173311 - RNA, 19 nt, Human
ccacugcacuccaaccugg

SEQ ID NO: 1173312 - RNA, 19 nt, Human
ccacugcacuccaaccugg

SEQ ID NO: 1173313 - RNA, 20 nt, Human
ccacugcacuccaaccuggc

SEQ ID NO: 1173314 - RNA, 23 nt, Human
ccacugcacuccaaccuggcgac

SEQ ID NO: 1173315 - RNA, 18 nt, Human
ccagucaggaggcacagg

SEQ ID NO: 1173316 - RNA, 23 nt, Human
cccaaucagaugaaccggguacc

SEQ ID NO: 1173317 - RNA, 19 nt, Human
cccagucaggaggcacagg

SEQ ID NO: 1173318 - RNA, 22 nt, Human
ccccaggugcucugucccaggg

SEQ ID NO: 1173319 - RNA, 23 nt, Human
ccccguaccaagcuugagcaucc

SEQ ID NO: 1173320 - RNA, 19 nt, Human
ccuggccaacauggugaaa

SEQ ID NO: 1173321 - RNA, 24 nt, Human
ccuggccaacauggugaaacacca

SEQ ID NO: 1173322 - RNA, 21 nt, Human
ccugggagguggagguugcag

SEQ ID NO: 1173323 - RNA, 19 nt, Human
ccuguagucccagcuacuc

SEQ ID NO: 1173324 - RNA, 21 nt, Human
ccuguagucccagcuacucag

SEQ ID NO: 1173325 - RNA, 21 nt, Human
ccuucuucauugaucucgcug

SEQ ID NO: 1173326 - RNA, 19 nt, Human
cgagaucacgccacugcac

SEQ ID NO: 1173327 - RNA, 25 nt, Human
cgccacugcacuccaaccuggcgac

SEQ ID NO: 1173328 - RNA, 19 nt, Human
cgcugggagcugcagacug

SEQ ID NO: 1173329 - RNA, 21 nt, Human
cuauaggccccugacuggggc

SEQ ID NO: 1173330 - RNA, 22 nt, Human
cucaggaaaaaaaaaaaaaaaa

SEQ ID NO: 1173331 - RNA, 24 nt, Human
cucaggaaaaaaaaaaaaaaaauc

SEQ ID NO: 1173332 - RNA, 26 nt, Human
cucaggaaaaaaaaaaaaaaaauccu

SEQ ID NO: 1173333 - RNA, 23 nt, Human
cucaugccuguaaucccagcacu

SEQ ID NO: 1173334 - RNA, 24 nt, Human
cucaugccuguaaucccagcacuu

SEQ ID NO: 1173335 - RNA, 24 nt, Human
cucuuggacuucccaggugaggug

SEQ ID NO: 1173336 - RNA, 19 nt, Human
cugaagcugcgcccacggc

SEQ ID NO: 1173337 - RNA, 24 nt, Human
cugucucaggaaaaaaaaaaaaaa

SEQ ID NO: 1173338 - RNA, 23 nt, Human
cuucccaggugaggugacacccc

SEQ ID NO: 1173339 - RNA, 19 nt, Human
cuugaaccugggaggugga

SEQ ID NO: 1173340 - RNA, 23 nt, Human
cuuuggaugggguuuuugcgugg

SEQ ID NO: 1173341 - RNA, 18 nt, Human
cuuuuuguugauguugau

SEQ ID NO: 1173342 - RNA, 24 nt, Human
gacagagcgagacucugucucagg

SEQ ID NO: 1173343 - RNA, 23 nt, Human
gacccuguuuuccucgguaucac

SEQ ID NO: 1173344 - RNA, 18 nt, Human
gacucugucucaggaaaa

SEQ ID NO: 1173345 - RNA, 22 nt, Human
gagguugcagugagccgagauc

SEQ ID NO: 1173346 - RNA, 24 nt, Human
gccaacauggugaaacaccaucuc

SEQ ID NO: 1173347 - RNA, 20 nt, Human
gccgagaucacgccacugca

SEQ ID NO: 1173348 - RNA, 24 nt, Human
gcgacagagcgagacucugucuca

SEQ ID NO: 1173349 - RNA, 22 nt, Human
gcugaagcugcgcccacggccg

SEQ ID NO: 1173350 - RNA, 21 nt, Human
ggacuucccaggugaggugac

SEQ ID NO: 1173351 - RNA, 20 nt, Human
ggagguugcagugagccgag

SEQ ID NO: 1173352 - RNA, 22 nt, Human
ggagguugcagugagccgagau

SEQ ID NO: 1173353 - RNA, 23 nt, Human
ggagguugcagugagccgagauc

SEQ ID NO: 1173354 - RNA, 24 nt, Human
ggagguugcagugagccgagauca

SEQ ID NO: 1173355 - RNA, 20 nt, Human
ggaguuugcuggagguccac

SEQ ID NO: 1173356 - RNA, 24 nt, Human
ggaugcaguggcucaugccuguaa

SEQ ID NO: 1173357 - RNA, 20 nt, Human
ggcaagaacguuuaagucug

SEQ ID NO: 1173358 - RNA, 26 nt, Human
ggccccugacuggggcugcugccuuu

SEQ ID NO: 1173359 - RNA, 19 nt, Human
ggguaccucaguuggaaau

SEQ ID NO: 1173360 - RNA, 24 nt, Human
gguugcugccugcuucuuccucug

SEQ ID NO: 1173361 - RNA, 20 nt, Human
gucaugcccuucuucugcag

SEQ ID NO: 1173362 - RNA, 21 nt, Human
guggugggcucugccccgugu

SEQ ID NO: 1173363 - RNA, 23 nt, Human
guugcugccugcuucuuccucug

SEQ ID NO: 1173364 - RNA, 26 nt, Human
uagacauccauuaaaaauccuuaaca

SEQ ID NO: 1173365 - RNA, 18 nt, Human
uagcccaauucagagauc

SEQ ID NO: 1173366 - RNA, 22 nt, Human
uagccgggcgugguggcaugug

SEQ ID NO: 1173367 - RNA, 21 nt, Human
uauguugggagauccacugcu

SEQ ID NO: 1173368 - RNA, 24 nt, Human
ucacaaggucaagagauugagacc

SEQ ID NO: 1173369 - RNA, 23 nt, Human
ucacgccacugcacuccaaccug

SEQ ID NO: 1173370 - RNA, 22 nt, Human
ucaggaaaaaaaaaaaaaaaaa

SEQ ID NO: 1173371 - RNA, 22 nt, Human
ucaggaaaaaaaaaaaaaaaau

SEQ ID NO: 1173372 - RNA, 21 nt, Human
ucaguuggaaaugcagaaauc

SEQ ID NO: 1173373 - RNA, 23 nt, Human
uccaaccuggcgacagagcgaga

SEQ ID NO: 1173374 - RNA, 26 nt, Human
ucccagaggggcacccaccagaugcc

SEQ ID NO: 1173375 - RNA, 18 nt, Human
uccccaggugcucugucc

SEQ ID NO: 1173376 - RNA, 21 nt, Human
uccccguaccaagcuugagca

SEQ ID NO: 1173377 - RNA, 18 nt, Human
uccuccuuuuuguugaug

SEQ ID NO: 1173378 - RNA, 20 nt, Human
ucuaacagucaugcccuucu

SEQ ID NO: 1173379 - RNA, 21 nt, Human
ucucuacuaaaaacauaaaaa

SEQ ID NO: 1173380 - RNA, 20 nt, Human
ugaaacaccaucucuacuaa

SEQ ID NO: 1173381 - RNA, 21 nt, Human
ugaaacaccaucucuacuaaa

SEQ ID NO: 1173382 - RNA, 24 nt, Human
ugaaccugggagguggagguugca

SEQ ID NO: 1173383 - RNA, 19 nt, Human
ugaccucuuggacuucccu

SEQ ID NO: 1173384 - RNA, 24 nt, Human
ugagaccauccuggccaacauggu

SEQ ID NO: 1173385 - RNA, 22 nt, Human
ugagccgagaucacgccacugc

SEQ ID NO: 1173386 - RNA, 24 nt, Human
ugaggcagaagaauugcuugaacc

SEQ ID NO: 1173387 - RNA, 25 nt, Human
ugaggcagaagaauugcuugaaccu

SEQ ID NO: 1173388 - RNA, 24 nt, Human
ugaggcagguggaucacaagguca

SEQ ID NO: 1173389 - RNA, 22 nt, Human
ugaggugacaccccacccugcu

SEQ ID NO: 1173390 - RNA, 23 nt, Human
ugccuguaaucccagcacuuugg

SEQ ID NO: 1173391 - RNA, 24 nt, Human
ugccuguaaucccagcacuuuggg

SEQ ID NO: 1173392 - RNA, 24 nt, Human
ugccuguagucccagcuacucagg

SEQ ID NO: 1173393 - RNA, 22 nt, Human
ugcgcccacggccgccccuuuc

SEQ ID NO: 1173394 - RNA, 21 nt, Human
uggagguccacuacagacccu

SEQ ID NO: 1173395 - RNA, 24 nt, Human
uggcaugugccuguagucccagcu

SEQ ID NO: 1173396 - RNA, 18 nt, Human
uggccaacauggugaaac

SEQ ID NO: 1173397 - RNA, 22 nt, Human
uggcucaugccuguaaucccag

SEQ ID NO: 1173398 - RNA, 24 nt, Human
uggcucaugccuguaaucccagca

SEQ ID NO: 1173399 - RNA, 18 nt, Human
ugggaggcugaggcaggu

SEQ ID NO: 1173400 - RNA, 24 nt, Human
ugggaggcugaggcagguggauca

SEQ ID NO: 1173401 - RNA, 18 nt, Human
ugggagguggagguugca

SEQ ID NO: 1173402 - RNA, 24 nt, Human
ugggagguggagguugcagugagc

SEQ ID NO: 1173403 - RNA, 22 nt, Human
ugggaguuuuaucuauaggccc

SEQ ID NO: 1173404 - RNA, 24 nt, Human
ugguggcaugugccuguaguccca

SEQ ID NO: 1173405 - RNA, 19 nt, Human
ugugcuguggugggcucug

SEQ ID NO: 1173406 - RNA, 18 nt, Human
uguuugcuaguuuuccuu

SEQ ID NO: 1173407 - RNA, 23 nt, Human
uuaacacugaggggaaaaccgcu

SEQ ID NO: 1173408 - RNA, 19 nt, Human
uuagccgggcgugguggca

SEQ ID NO: 1173409 - RNA, 20 nt, Human
uuagccgggcgugguggcau

SEQ ID NO: 1173410 - RNA, 24 nt, Human
uuagccgggcgugguggcaugugc

SEQ ID NO: 1173411 - RNA, 24 nt, Human
uuccugguggcuuuaacacugagg

SEQ ID NO: 1173412 - RNA, 24 nt, Human
uugaaccugggagguggagguugc

SEQ ID NO: 1173413 - RNA, 18 nt, Human
uugcagugagccgagauc

SEQ ID NO: 1173414 - RNA, 20 nt, Human
uugcagugagccgagaucac

SEQ ID NO: 1173415 - RNA, 21 nt, Human
uugcagugagccgagaucacg

SEQ ID NO: 1173416 - RNA, 24 nt, Human
uugcugccugcuucuuccucugga

SEQ ID NO: 1173417 - RNA, 24 nt, Human
uugcugugcuguggugggcucugc

SEQ ID NO: 1173418 - RNA, 24 nt, Human
uugcuugaaccugggagguggagg

SEQ ID NO: 1173419 - RNA, 25 nt, Human
uugggaggcugaggcagguggauca

SEQ ID NO: 1173420 - RNA, 18 nt, Human
aaggacaccacagcaaac

SEQ ID NO: 1173421 - RNA, 23 nt, Human
aaggacaccacagcaaacccaaa

SEQ ID NO: 1173422 - RNA, 25 nt, Human
aaggacaccacagcaaacccaaagg

SEQ ID NO: 1173423 - RNA, 26 nt, Human
aaggacaccacagcaaacccaaaggc

SEQ ID NO: 1173424 - RNA, 20 nt, Human
ccacagcaaacccaaaggcc

SEQ ID NO: 1173425 - RNA, 19 nt, Human
ggagacaaggacaccacag

SEQ ID NO: 1173426 - RNA, 18 nt, Human
caagcugguccacagagu

SEQ ID NO: 1173427 - RNA, 23 nt, Human
cagaguagaaagugcaaugaaga

SEQ ID NO: 1173428 - RNA, 21 nt, Human
cccucaccgcgacggucggag

SEQ ID NO: 1173429 - RNA, 20 nt, Human
gccgugucugucugcuucug

SEQ ID NO: 1173430 - RNA, 21 nt, Human
gugcaaugaagauaggaaaga

SEQ ID NO: 1173431 - RNA, 21 nt, Human
uccacagaguagaaagugcaa

SEQ ID NO: 1173432 - RNA, 19 nt, Human
ugcuucuguccuggggccc

SEQ ID NO: 1173433 - RNA, 22 nt, Human
uguugggaccgcuaucuuugau

SEQ ID NO: 1173434 - RNA, 18 nt, Human
uguuuugucaucauuucc

SEQ ID NO: 1173435 - RNA, 21 nt, Human
aaugccacugcccugggcagc

SEQ ID NO: 1173436 - RNA, 25 nt, Human
accccaacaaaugaaaugagaagag

SEQ ID NO: 1173437 - RNA, 19 nt, Human
agagcagggcugacggggg

SEQ ID NO: 1173438 - RNA, 22 nt, Human
cccaacaaaugaaaugagaaga

SEQ ID NO: 1173439 - RNA, 19 nt, Human
ccccaacaaaugaaaugag

SEQ ID NO: 1173440 - RNA, 24 nt, Human
cccuaggucacgucugcaaaaccc

SEQ ID NO: 1173441 - RNA, 24 nt, Human
gcaaaaccccagcgcucaggggac

SEQ ID NO: 1173442 - RNA, 24 nt, Human
ggggacacagugcaaaugccacug

SEQ ID NO: 1173443 - RNA, 20 nt, Human
gggggagaaggggcugaggg

SEQ ID NO: 1173444 - RNA, 21 nt, Human
uaaauagugacagaaaugaga

SEQ ID NO: 1173445 - RNA, 19 nt, Human
ugagaagagcagggcugac

SEQ ID NO: 1173446 - RNA, 22 nt, Human
ugcccugggcagccguggagug

SEQ ID NO: 1173447 - RNA, 20 nt, Human
ugcugucaagcaccccgccc

SEQ ID NO: 1173448 - RNA, 26 nt, Human
uggaguucacauguuucccguacccg

SEQ ID NO: 1173449 - RNA, 25 nt, Human
uggaucacauguggugauuaaguuu

SEQ ID NO: 1173450 - RNA, 22 nt, Human
cuguguuguguccuaggcacug

SEQ ID NO: 1173451 - RNA, 21 nt, Human
uagagucuccucccgaaguuc

SEQ ID NO: 1173452 - RNA, 21 nt, Human
uuugcuagagucuccucccga

SEQ ID NO: 1173453 - RNA, 20 nt, Human
caccccagcaccacauucau

SEQ ID NO: 1173454 - RNA, 18 nt, Human
gaaggcgacuaauuuugc

SEQ ID NO: 1173455 - RNA, 22 nt, Human
gccauaaacaccccagcaccac

SEQ ID NO: 1173456 - RNA, 18 nt, Human
uggcuugccauaaacacc

SEQ ID NO: 1173457 - RNA, 24 nt, Human
ugucaaaguggcuugccauaaaca

SEQ ID NO: 1173458 - RNA, 24 nt, Human
uugaagcaguaagucagacaacau

SEQ ID NO: 1173459 - RNA, 21 nt, Human
uugguggcggcuccacugcag

SEQ ID NO: 1173460 - RNA, 23 nt, Human
aaaaaaaaaauucaggaugaaca

SEQ ID NO: 1173461 - RNA, 18 nt, Human
aaagaucaaaauuaaugc

SEQ ID NO: 1173462 - RNA, 19 nt, Human
aagaucaaaauuaaugcca

SEQ ID NO: 1173463 - RNA, 22 nt, Human
aagcaaccuggugucugagagc

SEQ ID NO: 1173464 - RNA, 21 nt, Human
aaugccaaaaaaaaaaauuca

SEQ ID NO: 1173465 - RNA, 24 nt, Human
acccacccaucguacuaucacaca

SEQ ID NO: 1173466 - RNA, 22 nt, Human
acucuguacccaguaaacaaua

SEQ ID NO: 1173467 - RNA, 18 nt, Human
acucuuugcugaucuuuu

SEQ ID NO: 1173468 - RNA, 19 nt, Human
acuuuuucuuaggcuauau

SEQ ID NO: 1173469 - RNA, 20 nt, Human
agaaugucauauagcuggaa

SEQ ID NO: 1173470 - RNA, 20 nt, Human
agacagccguggggccaugg

SEQ ID NO: 1173471 - RNA, 21 nt, Human
agacagggacgacaucuucag

SEQ ID NO: 1173472 - RNA, 20 nt, Human
agaguucccacauaucaccu

SEQ ID NO: 1173473 - RNA, 23 nt, Human
agaguucccacauaucaccuucc

SEQ ID NO: 1173474 - RNA, 21 nt, Human
agcauggagcucuguccucgg

SEQ ID NO: 1173475 - RNA, 19 nt, Human
aggggcugccggugcuggc

SEQ ID NO: 1173476 - RNA, 20 nt, Human
agguggugggugguguagau

SEQ ID NO: 1173477 - RNA, 18 nt, Human
aguaaacaauaacuccca

SEQ ID NO: 1173478 - RNA, 22 nt, Human
auucuugccuuuuccagaaugu

SEQ ID NO: 1173479 - RNA, 21 nt, Human
caaaauaccauuagugucugc

SEQ ID NO: 1173480 - RNA, 19 nt, Human
caaaauuaaugccaaaaaa

SEQ ID NO: 1173481 - RNA, 23 nt, Human
caacauaugcacagccuccccca

SEQ ID NO: 1173482 - RNA, 26 nt, Human
caagaagcaaccuggugucugagagc

SEQ ID NO: 1173483 - RNA, 22 nt, Human
cacaacauaaaguuagccgucu

SEQ ID NO: 1173484 - RNA, 18 nt, Human
caccuccaucuaccucca

SEQ ID NO: 1173485 - RNA, 20 nt, Human
cagaagguauagagaguucc

SEQ ID NO: 1173486 - RNA, 28 nt, Human
cagaucaugcaaauaaauaguuaaagag

SEQ ID NO: 1173487 - RNA, 20 nt, Human
cagcacaagcucccaucaca

SEQ ID NO: 1173488 - RNA, 20 nt, Human
ccacaggaaagaccaauacc

SEQ ID NO: 1173489 - RNA, 20 nt, Human
ccaccccuccccugcuggac

SEQ ID NO: 1173490 - RNA, 20 nt, Human
cccccaugucaacaucccca

SEQ ID NO: 1173491 - RNA, 18 nt, Human
ccguucgguggguuugga

SEQ ID NO: 1173492 - RNA, 23 nt, Human
ccucagaggcaacuucccucccu

SEQ ID NO: 1173493 - RNA, 19 nt, Human
ccuccaucuaccuccagaa

SEQ ID NO: 1173494 - RNA, 19 nt, Human
cggcuuccagcacaagcuc

SEQ ID NO: 1173495 - RNA, 23 nt, Human
cucccccaugucaacauccccaa

SEQ ID NO: 1173496 - RNA, 20 nt, Human
cuccgcacccaaagggugcc

SEQ ID NO: 1173497 - RNA, 21 nt, Human
cugaaacucuguacccaguaa

SEQ ID NO: 1173498 - RNA, 24 nt, Human
cugaaacucuguacccaguaaaca

SEQ ID NO: 1173499 - RNA, 19 nt, Human
cugcgcagacccugccaga

SEQ ID NO: 1173500 - RNA, 18 nt, Human
gaaauagcgcucagcuuu

SEQ ID NO: 1173501 - RNA, 21 nt, Human
gagcaccggaggcuggaaacg

SEQ ID NO: 1173502 - RNA, 24 nt, Human
gcaggugcucguucucuccuguaa

SEQ ID NO: 1173503 - RNA, 24 nt, Human
gcaguaaaacauacacaacauaaa

SEQ ID NO: 1173504 - RNA, 18 nt, Human
gccauggcuccccugaga

SEQ ID NO: 1173505 - RNA, 20 nt, Human
gcuccccugagaggugugug

SEQ ID NO: 1173506 - RNA, 25 nt, Human
ggcugccggugcuggcaggugcucg

SEQ ID NO: 1173507 - RNA, 24 nt, Human
uaaacaauaacucccaagauuaaa

SEQ ID NO: 1173508 - RNA, 20 nt, Human
uaagucggccgugaccgucu

SEQ ID NO: 1173509 - RNA, 22 nt, Human
uaaugccaaaaaaaaaaauuca

SEQ ID NO: 1173510 - RNA, 24 nt, Human
uacaguggugaagaugauccccac

SEQ ID NO: 1173511 - RNA, 24 nt, Human
uaccauuagugucugcccugucuu

SEQ ID NO: 1173512 - RNA, 22 nt, Human
uaggaucgaggggcugccggug

SEQ ID NO: 1173513 - RNA, 24 nt, Human
uaucacacagauguagucuccaca

SEQ ID NO: 1173514 - RNA, 22 nt, Human
uauugggcagaagguauagaga

SEQ ID NO: 1173515 - RNA, 23 nt, Human
ucauugcagugaauggaaagaaa

SEQ ID NO: 1173516 - RNA, 19 nt, Human
ucccaagauuaaaguuacu

SEQ ID NO: 1173517 - RNA, 21 nt, Human
ucccaccccuccccugcugga

SEQ ID NO: 1173518 - RNA, 23 nt, Human
uccucggcuuccagcacaagcuc

SEQ ID NO: 1173519 - RNA, 22 nt, Human
ucuauucuugccuuuuccagaa

SEQ ID NO: 1173520 - RNA, 20 nt, Human
ucucaagaagcaaccuggug

SEQ ID NO: 1173521 - RNA, 21 nt, Human
ucucguucccaccccuccccu

SEQ ID NO: 1173522 - RNA, 22 nt, Human
ucugagguuaggaucgaggggc

SEQ ID NO: 1173523 - RNA, 21 nt, Human
ucuguccucggcuuccagcac

SEQ ID NO: 1173524 - RNA, 24 nt, Human
ucuucagggggagacagccguggg

SEQ ID NO: 1173525 - RNA, 21 nt, Human
ugagagcaguuuuagguucgc

SEQ ID NO: 1173526 - RNA, 22 nt, Human
ugagccuucaccagcugagucu

SEQ ID NO: 1173527 - RNA, 21 nt, Human
ugcagugaauggaaagaaagg

SEQ ID NO: 1173528 - RNA, 22 nt, Human
ugcauaaugccauguacccacc

SEQ ID NO: 1173529 - RNA, 22 nt, Human
ugcccugucuucacacuucagc

SEQ ID NO: 1173530 - RNA, 19 nt, Human
ugcugccaacauuuugugc

SEQ ID NO: 1173531 - RNA, 21 nt, Human
ugcuggacguuucugggaagu

SEQ ID NO: 1173532 - RNA, 24 nt, Human
ugggaaguuucuagguggugggug

SEQ ID NO: 1173533 - RNA, 18 nt, Human
uggguuuggacaaaugca

SEQ ID NO: 1173534 - RNA, 22 nt, Human
ugguuucuuucacuuacucaua

SEQ ID NO: 1173535 - RNA, 19 nt, Human
uguacaguggugaagauga

SEQ ID NO: 1173536 - RNA, 18 nt, Human
ugugagcauuacggugag

SEQ ID NO: 1173537 - RNA, 19 nt, Human
uuaaugccaaaaaaaaaaa

SEQ ID NO: 1173538 - RNA, 18 nt, Human
uucaccuuccagaacuga

SEQ ID NO: 1173539 - RNA, 18 nt, Human
uucagggggagacagccg

SEQ ID NO: 1173540 - RNA, 19 nt, Human
uucaugggcuguugggggg

SEQ ID NO: 1173541 - RNA, 18 nt, Human
uuugagccugguacaggg

SEQ ID NO: 1173542 - RNA, 22 nt, Human
uuugucccuuuccgacuuauuu

SEQ ID NO: 1173543 - RNA, 23 nt, Human
aaacaccacaaaucuaccaucuu

SEQ ID NO: 1173544 - RNA, 24 nt, Human
aaagugcugggauuacaggcuuga

SEQ ID NO: 1173545 - RNA, 20 nt, Human
aaaguucugggauuacaggc

SEQ ID NO: 1173546 - RNA, 24 nt, Human
aaaguucugggauuacaggcguga

SEQ ID NO: 1173547 - RNA, 21 nt, Human
aacaccacaaaucuaccaucu

SEQ ID NO: 1173548 - RNA, 19 nt, Human
aacuguaacaugagguccc

SEQ ID NO: 1173549 - RNA, 19 nt, Human
aagaguuagagaucagccu

SEQ ID NO: 1173550 - RNA, 26 nt, Human
aagccacccccauuccuugacuuacc

SEQ ID NO: 1173551 - RNA, 25 nt, Human
aagcgauccucccaccucagccucc

SEQ ID NO: 1173552 - RNA, 18 nt, Human
aagugauucucugccucc

SEQ ID NO: 1173553 - RNA, 19 nt, Human
aagugauucucugccuccc

SEQ ID NO: 1173554 - RNA, 19 nt, Human
aagugcugggauuacaggc

SEQ ID NO: 1173555 - RNA, 19 nt, Human
aagugcugggauuacaggc

SEQ ID NO: 1173556 - RNA, 26 nt, Human
aagugcugggauuacaggcuugagcc

SEQ ID NO: 1173557 - RNA, 21 nt, Human
acagaaugugcuccuuugccu

SEQ ID NO: 1173558 - RNA, 21 nt, Human
acaggcacccaccaccacacc

SEQ ID NO: 1173559 - RNA, 24 nt, Human
acaggcgugagcaacuguaacaug

SEQ ID NO: 1173560 - RNA, 24 nt, Human
accaucuuggcuaggcuggucuug

SEQ ID NO: 1173561 - RNA, 23 nt, Human
accauguuggucaggcuggucug

SEQ ID NO: 1173562 - RNA, 26 nt, Human
accucgugacuccauauucaaggcca

SEQ ID NO: 1173563 - RNA, 19 nt, Human
accucgugauccacccucc

SEQ ID NO: 1173564 - RNA, 18 nt, Human
acucuccuaccuccuucu

SEQ ID NO: 1173565 - RNA, 22 nt, Human
agaggaaggauugcuugaggcc

SEQ ID NO: 1173566 - RNA, 20 nt, Human
agccaccgcaccuggcccca

SEQ ID NO: 1173567 - RNA, 21 nt, Human
agcugccagagaaagcaacca

SEQ ID NO: 1173568 - RNA, 22 nt, Human
agcugccagagaaagcaaccac

SEQ ID NO: 1173569 - RNA, 23 nt, Human
agcuggacauggugaugcaugcc

SEQ ID NO: 1173570 - RNA, 19 nt, Human
aggaggagggcuagcugcc

SEQ ID NO: 1173571 - RNA, 20 nt, Human
aggcuaaggugggaggauug

SEQ ID NO: 1173572 - RNA, 18 nt, Human
aggugucagaaggcugca

SEQ ID NO: 1173573 - RNA, 22 nt, Human
aguagagaugggguuucaccau

SEQ ID NO: 1173574 - RNA, 23 nt, Human
aguagcuggaauuauagggaugu

SEQ ID NO: 1173575 - RNA, 18 nt, Human
aguagcugggauuacagg

SEQ ID NO: 1173576 - RNA, 24 nt, Human
agugcugggauuacaggcuugagc

SEQ ID NO: 1173577 - RNA, 24 nt, Human
agugguccaugugccucagccuuc

SEQ ID NO: 1173578 - RNA, 18 nt, Human
aguucugggauuacaggc

SEQ ID NO: 1173579 - RNA, 20 nt, Human
augggguuucaccaucuugg

SEQ ID NO: 1173580 - RNA, 22 nt, Human
augggguuucaccaucuuggcu

SEQ ID NO: 1173581 - RNA, 24 nt, Human
augggguuucaccaucuuggcuag

SEQ ID NO: 1173582 - RNA, 24 nt, Human
augggguuucaccauguuggucag

SEQ ID NO: 1173583 - RNA, 19 nt, Human
auguugcccaggcuggucu

SEQ ID NO: 1173584 - RNA, 24 nt, Human
auguuuguauuuuuaguagagaug

SEQ ID NO: 1173585 - RNA, 24 nt, Human
caaacugcuaggauuacaggagug

SEQ ID NO: 1173586 - RNA, 24 nt, Human
caaagugcugggauuacaggcuug

SEQ ID NO: 1173587 - RNA, 21 nt, Human
caacauuuugggaggccaaag

SEQ ID NO: 1173588 - RNA, 23 nt, Human
caaccuccaccucccggguucaa

SEQ ID NO: 1173589 - RNA, 23 nt, Human
caacuaggucuauuaaggcuaaa

SEQ ID NO: 1173590 - RNA, 22 nt, Human
caagcaauucuccugccucggc

SEQ ID NO: 1173591 - RNA, 22 nt, Human
caagugguccaugugccucagc

SEQ ID NO: 1173592 - RNA, 21 nt, Human
caccaucuuggcuaggcuggu

SEQ ID NO: 1173593 - RNA, 24 nt, Human
caccaucuuggcuaggcuggucuu

SEQ ID NO: 1173594 - RNA, 21 nt, Human
caccauguuggucaggcuggu

SEQ ID NO: 1173595 - RNA, 22 nt, Human
caccauguuggucaggcugguc

SEQ ID NO: 1173596 - RNA, 18 nt, Human
cacccaccaccacaccug

SEQ ID NO: 1173597 - RNA, 24 nt, Human
caccucagccuccuaaaguucugg

SEQ ID NO: 1173598 - RNA, 21 nt, Human
cacuacaaccuccaccucccg

SEQ ID NO: 1173599 - RNA, 23 nt, Human
cacugcaaugucugccuuuuggg

SEQ ID NO: 1173600 - RNA, 21 nt, Human
cagcuucuagaagccaccccc

SEQ ID NO: 1173601 - RNA, 22 nt, Human
caguucugggggccagaagccc

SEQ ID NO: 1173602 - RNA, 22 nt, Human
caucuguaaucccaacauuuug

SEQ ID NO: 1173603 - RNA, 22 nt, Human
cauuauguugcccaggcugguc

SEQ ID NO: 1173604 - RNA, 19 nt, Human
ccaaagugcugggauuaca

SEQ ID NO: 1173605 - RNA, 20 nt, Human
ccaaagugcugggauuacag

SEQ ID NO: 1173606 - RNA, 22 nt, Human
ccaaagugcugggauuacaggc

SEQ ID NO: 1173607 - RNA, 23 nt, Human
ccaaagugcugggauuacaggcu

SEQ ID NO: 1173608 - RNA, 19 nt, Human
ccaacauuuugggaggcca

SEQ ID NO: 1173609 - RNA, 20 nt, Human
ccaccacaccuggcuaaugu

SEQ ID NO: 1173610 - RNA, 19 nt, Human
ccacccccauuccuugacu

SEQ ID NO: 1173611 - RNA, 18 nt, Human
ccaccgcaccuggcccca

SEQ ID NO: 1173612 - RNA, 26 nt, Human
ccaccucccggguucaagcaauucuu

SEQ ID NO: 1173613 - RNA, 24 nt, Human
cccaaagugcugggauuacaggcu

SEQ ID NO: 1173614 - RNA, 24 nt, Human
cccaacauuuugggaggccaaaga

SEQ ID NO: 1173615 - RNA, 19 nt, Human
cccgaguagcuggaauuau

SEQ ID NO: 1173616 - RNA, 23 nt, Human
cccgaguagcugggauuacaggc

SEQ ID NO: 1173617 - RNA, 24 nt, Human
cccgaguagcugggauuacaggca

SEQ ID NO: 1173618 - RNA, 23 nt, Human
cccggguucaagcaauucuccug

SEQ ID NO: 1173619 - RNA, 23 nt, Human
ccgaguagcugggauuacaggca

SEQ ID NO: 1173620 - RNA, 25 nt, Human
ccucaccugcugaacuccaggaggc

SEQ ID NO: 1173621 - RNA, 18 nt, Human
ccucccaccucagccucc

SEQ ID NO: 1173622 - RNA, 23 nt, Human
ccucccaccucagccuccuaaag

SEQ ID NO: 1173623 - RNA, 24 nt, Human
ccucccggguucaagcaauucucc

SEQ ID NO: 1173624 - RNA, 20 nt, Human
ccucggccucccaaagugcu

SEQ ID NO: 1173625 - RNA, 21 nt, Human
ccucgugauccacccuccucg

SEQ ID NO: 1173626 - RNA, 18 nt, Human
ccucucugaccucuucuu

SEQ ID NO: 1173627 - RNA, 23 nt, Human
ccugccucggccucccgaguagc

SEQ ID NO: 1173628 - RNA, 24 nt, Human
ccugccucggccucccgaguagcu

SEQ ID NO: 1173629 - RNA, 21 nt, Human
ccuuuuggguucaagugauuc

SEQ ID NO: 1173630 - RNA, 24 nt, Human
cuaaaguucugggauuacaggcgu

SEQ ID NO: 1173631 - RNA, 23 nt, Human
cuacaaccuccaccucccggguu

SEQ ID NO: 1173632 - RNA, 24 nt, Human
cuacaaccuccaccucccggguuc

SEQ ID NO: 1173633 - RNA, 23 nt, Human
cucaagugguccaugugccucag

SEQ ID NO: 1173634 - RNA, 19 nt, Human
cucaccugcugaacuccag

SEQ ID NO: 1173635 - RNA, 24 nt, Human
cucacuacaaccuccaccucccgg

SEQ ID NO: 1173636 - RNA, 25 nt, Human
cucacuacaaccuccaccucccggg

SEQ ID NO: 1173637 - RNA, 19 nt, Human
cucacugcaaugucugccu

SEQ ID NO: 1173638 - RNA, 25 nt, Human
cucagccuccuaaaguucugggauu

SEQ ID NO: 1173639 - RNA, 23 nt, Human
cuccugggcuuaagcgauccucc

SEQ ID NO: 1173640 - RNA, 19 nt, Human
cucugccucccgaguagcu

SEQ ID NO: 1173641 - RNA, 18 nt, Human
cucuuguagcccaggcug

SEQ ID NO: 1173642 - RNA, 19 nt, Human
cucuuguagcccaggcugg

SEQ ID NO: 1173643 - RNA, 22 nt, Human
cucuuguagcccaggcuggagu

SEQ ID NO: 1173644 - RNA, 23 nt, Human
cugccuuuuggguucaagugauu

SEQ ID NO: 1173645 - RNA, 23 nt, Human
cugggggccagaagcccaacuag

SEQ ID NO: 1173646 - RNA, 21 nt, Human
cuguaaucccaacauuuuggg

SEQ ID NO: 1173647 - RNA, 24 nt, Human
cuuaagcgauccucccaccucagc

SEQ ID NO: 1173648 - RNA, 22 nt, Human
cuucaaaucucccucucugacc

SEQ ID NO: 1173649 - RNA, 21 nt, Human
cuuccaaacugcuaggauuac

SEQ ID NO: 1173650 - RNA, 21 nt, Human
cuucuagaagccacccccauu

SEQ ID NO: 1173651 - RNA, 18 nt, Human
cuucugaccucgugaucc

SEQ ID NO: 1173652 - RNA, 21 nt, Human
cuugaccucaagugguccaug

SEQ ID NO: 1173653 - RNA, 21 nt, Human
cuugaggccaagaguuagaga

SEQ ID NO: 1173654 - RNA, 19 nt, Human
cuuguagcccaggcuggag

SEQ ID NO: 1173655 - RNA, 24 nt, Human
cuuguagcccaggcuggagugcaa

SEQ ID NO: 1173656 - RNA, 25 nt, Human
cuuucagccucaccugcugaacucc

SEQ ID NO: 1173657 - RNA, 24 nt, Human
gaaaugggguuucaccauguuggu

SEQ ID NO: 1173658 - RNA, 24 nt, Human
gaccucaagugguccaugugccuc

SEQ ID NO: 1173659 - RNA, 22 nt, Human
gaccucgugauccacccuccuc

SEQ ID NO: 1173660 - RNA, 22 nt, Human
gaccucgugauccacccuccuc

SEQ ID NO: 1173661 - RNA, 24 nt, Human
gaccucgugauccacccuccucgg

SEQ ID NO: 1173662 - RNA, 21 nt, Human
gaccucuucuuccauuaccac

SEQ ID NO: 1173663 - RNA, 18 nt, Human
gagaugggguuucaccau

SEQ ID NO: 1173664 - RNA, 24 nt, Human
gagaugggguuucaccaucuuggc

SEQ ID NO: 1173665 - RNA, 25 nt, Human
gaguagcugggauuacaggcaccca

SEQ ID NO: 1173666 - RNA, 18 nt, Human
gauuacaggagugagcca

SEQ ID NO: 1173667 - RNA, 21 nt, Human
gauuacaggcgugagcaacug

SEQ ID NO: 1173668 - RNA, 22 nt, Human
gauuacaggcgugagcaacugu

SEQ ID NO: 1173669 - RNA, 18 nt, Human
gauuacaggcuugagcca

SEQ ID NO: 1173670 - RNA, 19 nt, Human
gauuacaggcuugagccac

SEQ ID NO: 1173671 - RNA, 22 nt, Human
gauuacaggcuugagccacugc

SEQ ID NO: 1173672 - RNA, 23 nt, Human
gauugcuugaggccaagaguuag

SEQ ID NO: 1173673 - RNA, 19 nt, Human
gcaucaaacaccacaaauc

SEQ ID NO: 1173674 - RNA, 21 nt, Human
gccacaacgccuagcuaacug

SEQ ID NO: 1173675 - RNA, 19 nt, Human
gcccaggcuggagugcaau

SEQ ID NO: 1173676 - RNA, 23 nt, Human
gcccaggcuggagugcaauggca

SEQ ID NO: 1173677 - RNA, 21 nt, Human
gccucggccucccgaguagcu

SEQ ID NO: 1173678 - RNA, 23 nt, Human
gcuacaacaaaguacccuacauu

SEQ ID NO: 1173679 - RNA, 20 nt, Human
gcucacugcaaugucugccu

SEQ ID NO: 1173680 - RNA, 20 nt, Human
gcucuuguagcccaggcugg

SEQ ID NO: 1173681 - RNA, 24 nt, Human
gcucuuguagcccaggcuggagug

SEQ ID NO: 1173682 - RNA, 19 nt, Human
gcuggagugcaauggcaca

SEQ ID NO: 1173683 - RNA, 23 nt, Human
gcuggucugaaacucuugaccuc

SEQ ID NO: 1173684 - RNA, 22 nt, Human
ggaugcuguugagcuaacaggg

SEQ ID NO: 1173685 - RNA, 22 nt, Human
ggauuacaggagugagccaccg

SEQ ID NO: 1173686 - RNA, 21 nt, Human
ggccaaagaggaaggauugcu

SEQ ID NO: 1173687 - RNA, 24 nt, Human
ggcuggucuugaacuucugaccuc

SEQ ID NO: 1173688 - RNA, 21 nt, Human
gggaaaauaggaagacccugc

SEQ ID NO: 1173689 - RNA, 19 nt, Human
gggguuucaccaucuuggc

SEQ ID NO: 1173690 - RNA, 22 nt, Human
gggguuucaccauguuggucag

SEQ ID NO: 1173691 - RNA, 19 nt, Human
ggguucaagugauucucug

SEQ ID NO: 1173692 - RNA, 22 nt, Human
ggguuucaccaucuuggcuagg

SEQ ID NO: 1173693 - RNA, 20 nt, Human
ggucuugaacuucugaccuc

SEQ ID NO: 1173694 - RNA, 21 nt, Human
gucucggucgcccaggcugaa

SEQ ID NO: 1173695 - RNA, 24 nt, Human
gugauccacccuccucggccuccc

SEQ ID NO: 1173696 - RNA, 24 nt, Human
gugguccaugugccucagccuucc

SEQ ID NO: 1173697 - RNA, 22 nt, Human
guugcuacaacaaaguacccua

SEQ ID NO: 1173698 - RNA, 18 nt, Human
uaagcgauccucccaccu

SEQ ID NO: 1173699 - RNA, 27 nt, Human
uaagcgauccucccaccucagccuccu

SEQ ID NO: 1173700 - RNA, 21 nt, Human
uaagcuccugggcuuaagcga

SEQ ID NO: 1173701 - RNA, 18 nt, Human
uaaggugggaggauugcu

SEQ ID NO: 1173702 - RNA, 24 nt, Human
uaauguuuguauuuuuaguagaga

SEQ ID NO: 1173703 - RNA, 22 nt, Human
uacaggagugagccaccgcacc

SEQ ID NO: 1173704 - RNA, 22 nt, Human
uacaggagugagccaccgcacc

SEQ ID NO: 1173705 - RNA, 23 nt, Human
uacaggagugagccaccgcaccu

SEQ ID NO: 1173706 - RNA, 22 nt, Human
uacaggcuugagccacugcgcc

SEQ ID NO: 1173707 - RNA, 22 nt, Human
uagaaaugggguuucaccaugu

SEQ ID NO: 1173708 - RNA, 18 nt, Human
uagcccaggcuggagugc

SEQ ID NO: 1173709 - RNA, 22 nt, Human
uaggauuacaggagugagccac

SEQ ID NO: 1173710 - RNA, 23 nt, Human
uaggauuacaggagugagccacc

SEQ ID NO: 1173711 - RNA, 24 nt, Human
uaggauuacaggagugagccaccg

SEQ ID NO: 1173712 - RNA, 24 nt, Human
uaguagaaaugggguuucaccaug

SEQ ID NO: 1173713 - RNA, 26 nt, Human
uaguagaaaugggguuucaccauguu

SEQ ID NO: 1173714 - RNA, 19 nt, Human
uaguagagaugggguuuca

SEQ ID NO: 1173715 - RNA, 23 nt, Human
uaguagagaugggguuucaccau

SEQ ID NO: 1173716 - RNA, 26 nt, Human
uaguagagaugggguuucaccaucuu

SEQ ID NO: 1173717 - RNA, 23 nt, Human
uauguugcccaggcuggucuuaa

SEQ ID NO: 1173718 - RNA, 24 nt, Human
uauguugcccaggcuggucuuaag

SEQ ID NO: 1173719 - RNA, 24 nt, Human
ucacuacaaccuccaccucccggg

SEQ ID NO: 1173720 - RNA, 25 nt, Human
ucacuacaaccuccaccucccgggu

SEQ ID NO: 1173721 - RNA, 27 nt, Human
ucacuacaaccuccaccucccggguuc

SEQ ID NO: 1173722 - RNA, 24 nt, Human
ucacugcaaugucugccuuuuggg

SEQ ID NO: 1173723 - RNA, 27 nt, Human
ucacuuucucuaauucugacucuccua

SEQ ID NO: 1173724 - RNA, 21 nt, Human
uccacccuccucggccuccca

SEQ ID NO: 1173725 - RNA, 24 nt, Human
ucccaaagugcugggauuacaggc

SEQ ID NO: 1173726 - RNA, 24 nt, Human
ucccgaguagcugggauuacaggc

SEQ ID NO: 1173727 - RNA, 21 nt, Human
ucccggguucaagcaauucuc

SEQ ID NO: 1173728 - RNA, 24 nt, Human
ucccggguucaagcaauucuccug

SEQ ID NO: 1173729 - RNA, 25 nt, Human
ucccucucugaccucuucuuccauu

SEQ ID NO: 1173730 - RNA, 24 nt, Human
uccuaaaguucugggauuacaggc

SEQ ID NO: 1173731 - RNA, 21 nt, Human
uccugggcuuaagcgauccuc

SEQ ID NO: 1173732 - RNA, 24 nt, Human
uccugggcuuaagcgauccuccca

SEQ ID NO: 1173733 - RNA, 18 nt, Human
ucgcccaggcugaagugu

SEQ ID NO: 1173734 - RNA, 23 nt, Human
ucggccucccgaguagcuggaau

SEQ ID NO: 1173735 - RNA, 21 nt, Human
ucuagaagccacccccauucc

SEQ ID NO: 1173736 - RNA, 18 nt, Human
ucucauuauguugcccag

SEQ ID NO: 1173737 - RNA, 23 nt, Human
ucucauuauguugcccaggcugg

SEQ ID NO: 1173738 - RNA, 24 nt, Human
ucucauuauguugcccaggcuggu

SEQ ID NO: 1173739 - RNA, 23 nt, Human
ucuccuaccuccuucucuuauaa

SEQ ID NO: 1173740 - RNA, 19 nt, Human
ucucggucgcccaggcuga

SEQ ID NO: 1173741 - RNA, 22 nt, Human
ucucuaauucugacucuccuac

SEQ ID NO: 1173742 - RNA, 18 nt, Human
ucucugaccucuucuucc

SEQ ID NO: 1173743 - RNA, 19 nt, Human
ucucuuauaaagauccuug

SEQ ID NO: 1173744 - RNA, 18 nt, Human
ucuuguagcccaggcugg

SEQ ID NO: 1173745 - RNA, 24 nt, Human
ugaccucaagugguccaugugccu

SEQ ID NO: 1173746 - RNA, 20 nt, Human
ugaggcuuggaacuuucagc

SEQ ID NO: 1173747 - RNA, 24 nt, Human
ugaggucucauuauguugcccagg

SEQ ID NO: 1173748 - RNA, 18 nt, Human
ugaugcaugccuguaguu

SEQ ID NO: 1173749 - RNA, 24 nt, Human
ugcccaggcuggucuuaagcuccu

SEQ ID NO: 1173750 - RNA, 28 nt, Human
ugcccaggcuggucuuaagcuccugggc

SEQ ID NO: 1173751 - RNA, 18 nt, Human
ugccucagccuuccaaac

SEQ ID NO: 1173752 - RNA, 24 nt, Human
ugccucagccuuccaaacugcuag

SEQ ID NO: 1173753 - RNA, 19 nt, Human
ugccucggccucccgagua

SEQ ID NO: 1173754 - RNA, 21 nt, Human
ugccucggccucccgaguagc

SEQ ID NO: 1173755 - RNA, 24 nt, Human
ugccucggccucccgaguagcugg

SEQ ID NO: 1173756 - RNA, 22 nt, Human
ugccuguaguuccagcuacugg

SEQ ID NO: 1173757 - RNA, 21 nt, Human
uggaauuauagggaugugcca

SEQ ID NO: 1173758 - RNA, 22 nt, Human
uggaauuauagggaugugccac

SEQ ID NO: 1173759 - RNA, 23 nt, Human
uggagugcaauggcacaaucuca

SEQ ID NO: 1173760 - RNA, 24 nt, Human
uggagugcaauggcacaaucucag

SEQ ID NO: 1173761 - RNA, 24 nt, Human
uggcacaaucucagcucacuacaa

SEQ ID NO: 1173762 - RNA, 24 nt, Human
uggcuaggcuggucuugaacuucu

SEQ ID NO: 1173763 - RNA, 22 nt, Human
ugggaggccaaagaggaaggau

SEQ ID NO: 1173764 - RNA, 19 nt, Human
ugggauuacaggcacccac

SEQ ID NO: 1173765 - RNA, 21 nt, Human
ugggauuacaggcacccacca

SEQ ID NO: 1173766 - RNA, 24 nt, Human
ugggauuacaggcacccaccacca

SEQ ID NO: 1173767 - RNA, 18 nt, Human
ugggauuacaggcgugag

SEQ ID NO: 1173768 - RNA, 19 nt, Human
ugggauuacaggcgugagc

SEQ ID NO: 1173769 - RNA, 19 nt, Human
ugggauuacaggcgugagc

SEQ ID NO: 1173770 - RNA, 20 nt, Human
ugggauuacaggcgugagca

SEQ ID NO: 1173771 - RNA, 22 nt, Human
ugggauuacaggcgugagcaac

SEQ ID NO: 1173772 - RNA, 23 nt, Human
ugggauuacaggcgugagcaacu

SEQ ID NO: 1173773 - RNA, 24 nt, Human
ugggauuacaggcgugagcaacug

SEQ ID NO: 1173774 - RNA, 27 nt, Human
ugggauuacaggcgugagcaacuguaa

SEQ ID NO: 1173775 - RNA, 19 nt, Human
ugggauuacaggcuugagc

SEQ ID NO: 1173776 - RNA, 21 nt, Human
ugggauuacaggcuugagcca

SEQ ID NO: 1173777 - RNA, 22 nt, Human
ugggauuacaggcuugagccac

SEQ ID NO: 1173778 - RNA, 22 nt, Human
ugggauuacaggcuugagccac

SEQ ID NO: 1173779 - RNA, 24 nt, Human
ugggauuacaggcuugagccacug

SEQ ID NO: 1173780 - RNA, 24 nt, Human
ugggauuacaggcuugagccacug

SEQ ID NO: 1173781 - RNA, 24 nt, Human
ugggggcucccaucuguaauccca

SEQ ID NO: 1173782 - RNA, 24 nt, Human
ugggguuucaccaucuuggcuagg

SEQ ID NO: 1173783 - RNA, 24 nt, Human
ugggguuucaccauguuggucagg

SEQ ID NO: 1173784 - RNA, 18 nt, Human
uggguucaagugauucuc

SEQ ID NO: 1173785 - RNA, 20 nt, Human
uggguucaagugauucucuu

SEQ ID NO: 1173786 - RNA, 24 nt, Human
uggucaggcuggucugaaacucuu

SEQ ID NO: 1173787 - RNA, 20 nt, Human
ugguccaugugccucagccu

SEQ ID NO: 1173788 - RNA, 23 nt, Human
uggugaugcaugccuguaguucc

SEQ ID NO: 1173789 - RNA, 24 nt, Human
uggugaugcaugccuguaguucca

SEQ ID NO: 1173790 - RNA, 21 nt, Human
ugugauugguggguauggggg

SEQ ID NO: 1173791 - RNA, 21 nt, Human
uguuuguauuuuuaguagaga

SEQ ID NO: 1173792 - RNA, 18 nt, Human
uuaaggcuaaagucaagg

SEQ ID NO: 1173793 - RNA, 18 nt, Human
uuaguagaaaugggguuu

SEQ ID NO: 1173794 - RNA, 22 nt, Human
uuaguagaaaugggguuucacc

SEQ ID NO: 1173795 - RNA, 24 nt, Human
uuaguagaaaugggguuucaccau

SEQ ID NO: 1173796 - RNA, 18 nt, Human
uuaguagagaugggguuu

SEQ ID NO: 1173797 - RNA, 22 nt, Human
uuaguagagaugggguuucacc

SEQ ID NO: 1173798 - RNA, 24 nt, Human
uuaguagagaugggguuucaccau

SEQ ID NO: 1173799 - RNA, 21 nt, Human
uucaagcaauucuccugccuc

SEQ ID NO: 1173800 - RNA, 24 nt, Human
uucaagcaauucuccugccucggc

SEQ ID NO: 1173801 - RNA, 22 nt, Human
uucaggaggagggcuagcugcc

SEQ ID NO: 1173802 - RNA, 23 nt, Human
uuguauuuuuaguagagaugggg

SEQ ID NO: 1173803 - RNA, 19 nt, Human
uuuaaaacggaguuuggcu

SEQ ID NO: 1173804 - RNA, 24 nt, Human
uuucaccaucuuggcuaggcuggu

SEQ ID NO: 1173805 - RNA, 24 nt, Human
uuucaccauguuggucaggcuggu

SEQ ID NO: 1173806 - RNA, 22 nt, Human
uuugccuuuuccagcuucuaga

SEQ ID NO: 1173807 - RNA, 24 nt, Human
uuuggcucuuguagcccaggcugg

SEQ ID NO: 1173808 - RNA, 18 nt, Human
uuuguauuuuuaguagag

SEQ ID NO: 1173809 - RNA, 24 nt, Human
uuuuuaguagaaaugggguuucac

SEQ ID NO: 1173810 - RNA, 24 nt, Human
uuuuuaguagagaugggguuucac

SEQ ID NO: 1173811 - RNA, 24 nt, Human
uuuuuuuuuuaaaacggaguuugg

SEQ ID NO: 1173812 - RNA, 22 nt, Human
aaauggcaaugaagaucuggag

SEQ ID NO: 1173813 - RNA, 26 nt, Human
acccuagaacagcugagccagaaagc

SEQ ID NO: 1173814 - RNA, 18 nt, Human
acgcuguccacugcagcc

SEQ ID NO: 1173815 - RNA, 21 nt, Human
agaaagcaguuguuugcauug

SEQ ID NO: 1173816 - RNA, 21 nt, Human
agcucaagcucccagcagcag

SEQ ID NO: 1173817 - RNA, 28 nt, Human
augaagaucuggagaaaggugcuucucu

SEQ ID NO: 1173818 - RNA, 23 nt, Human
augggacuggucagcacugggac

SEQ ID NO: 1173819 - RNA, 23 nt, Human
auuuuggguuuggagcugugugu

SEQ ID NO: 1173820 - RNA, 23 nt, Human
cacccuagaacagcugagccaga

SEQ ID NO: 1173821 - RNA, 24 nt, Human
cacgucagaagugggcugccuccu

SEQ ID NO: 1173822 - RNA, 19 nt, Human
cagcacugggacugguccg

SEQ ID NO: 1173823 - RNA, 19 nt, Human
cauuguggguugauccagu

SEQ ID NO: 1173824 - RNA, 22 nt, Human
cgcagcucagcuucaucgcagc

SEQ ID NO: 1173825 - RNA, 24 nt, Human
cugcagccuguuaacugaaggaca

SEQ ID NO: 1173826 - RNA, 24 nt, Human
cuucucuguagaaagcugugucug

SEQ ID NO: 1173827 - RNA, 22 nt, Human
gagcuguguguccaaaauggca

SEQ ID NO: 1173828 - RNA, 21 nt, Human
gucagaagugggcugccuccu

SEQ ID NO: 1173829 - RNA, 21 nt, Human
uagaacagcugagccagaaag

SEQ ID NO: 1173830 - RNA, 18 nt, Human
uccaaaauggcaaugaag

SEQ ID NO: 1173831 - RNA, 22 nt, Human
uccacccaccacacgcugucca

SEQ ID NO: 1173832 - RNA, 18 nt, Human
ucucaucugccgucuucc

SEQ ID NO: 1173833 - RNA, 23 nt, Human
ucugccgucuuccuccacccccc

SEQ ID NO: 1173834 - RNA, 18 nt, Human
uggcaaugaagaucugga

SEQ ID NO: 1173835 - RNA, 20 nt, Human
uguccaaaauggcaaugaag

SEQ ID NO: 1173836 - RNA, 23 nt, Human
uugcauuguggguugauccagug

SEQ ID NO: 1173837 - RNA, 23 nt, Human
uuguggguugauccaguggacac

SEQ ID NO: 1173838 - RNA, 21 nt, Human
auccuggcugaguucuuccca

SEQ ID NO: 1173839 - RNA, 23 nt, Human
cagagaaucacccuggcaggagc

SEQ ID NO: 1173840 - RNA, 18 nt, Human
ccuggcaggagcguggaa

SEQ ID NO: 1173841 - RNA, 19 nt, Human
ccuggcugaguucuuccca

SEQ ID NO: 1173842 - RNA, 18 nt, Human
ccuuggucugugggccug

SEQ ID NO: 1173843 - RNA, 21 nt, Human
cugaggcgaugcagcucuccc

SEQ ID NO: 1173844 - RNA, 23 nt, Human
cugcgggaggggccgggggagcg

SEQ ID NO: 1173845 - RNA, 19 nt, Human
cugugggccuggcugaggc

SEQ ID NO: 1173846 - RNA, 18 nt, Human
gagaaucacccuggcagg

SEQ ID NO: 1173847 - RNA, 18 nt, Human
gcaaaugaagaaaugcua

SEQ ID NO: 1173848 - RNA, 19 nt, Human
gccuuggucugugggccug

SEQ ID NO: 1173849 - RNA, 19 nt, Human
gcugcgcucuuggucggcc

SEQ ID NO: 1173850 - RNA, 22 nt, Human
gggaacugcugcgggaggggcc

SEQ ID NO: 1173851 - RNA, 24 nt, Human
gggaggggccgggggagcggcugc

SEQ ID NO: 1173852 - RNA, 19 nt, Human
gugaggcagaagaacuaag

SEQ ID NO: 1173853 - RNA, 20 nt, Human
ucccaggagcagagaaucac

SEQ ID NO: 1173854 - RNA, 22 nt, Human
ugcagcucucccaggagcagag

SEQ ID NO: 1173855 - RNA, 20 nt, Human
ugccuuggucugugggccug

SEQ ID NO: 1173856 - RNA, 22 nt, Human
ugccuuggucugugggccuggc

SEQ ID NO: 1173857 - RNA, 22 nt, Human
uggcaggagcguggaauccugg

SEQ ID NO: 1173858 - RNA, 23 nt, Human
uggcugaggcgaugcagcucucc

SEQ ID NO: 1173859 - RNA, 18 nt, Human
ugugggccuggcugaggc

SEQ ID NO: 1173860 - RNA, 21 nt, Human
uguugaauuuucuuguucauu

SEQ ID NO: 1173861 - RNA, 23 nt, Human
uuagugacauuucugcaacuguu

SEQ ID NO: 1173862 - RNA, 20 nt, Human
uucgaucuaugauuuaugca

SEQ ID NO: 1173863 - RNA, 20 nt, Human
uuucuuguucauucgaucua

SEQ ID NO: 1173864 - RNA, 21 nt, Human
aacagaaaagaggggggcgag

SEQ ID NO: 1173865 - RNA, 22 nt, Human
aacagaaaagaggggggcgagg

SEQ ID NO: 1173866 - RNA, 18 nt, Human
agaguaaaaucgaagauc

SEQ ID NO: 1173867 - RNA, 24 nt, Human
caacaaacugggucacugaaaacc

SEQ ID NO: 1173868 - RNA, 23 nt, Human
caauuacagaguaaaaucgaaga

SEQ ID NO: 1173869 - RNA, 21 nt, Human
cacaguucagcugugccgucc

SEQ ID NO: 1173870 - RNA, 23 nt, Human
cacccccccccccgcccccggac

SEQ ID NO: 1173871 - RNA, 21 nt, Human
cacgugguccagacagacggc

SEQ ID NO: 1173872 - RNA, 25 nt, Human
cagcgacaagggcggcgccccccac

SEQ ID NO: 1173873 - RNA, 23 nt, Human
cccacagcgaagucacucugaag

SEQ ID NO: 1173874 - RNA, 23 nt, Human
ccccaaaacaauuacagaguaaa

SEQ ID NO: 1173875 - RNA, 21 nt, Human
ccccacccgccugcgcucccc

SEQ ID NO: 1173876 - RNA, 19 nt, Human
ccccccgcccccggaccag

SEQ ID NO: 1173877 - RNA, 18 nt, Human
ccccgcccccggaccagg

SEQ ID NO: 1173878 - RNA, 20 nt, Human
cccgccugcgcucccggaag

SEQ ID NO: 1173879 - RNA, 21 nt, Human
ccgccugaagaaacugggcuc

SEQ ID NO: 1173880 - RNA, 21 nt, Human
ccuucuguugccugccgcagc

SEQ ID NO: 1173881 - RNA, 22 nt, Human
ccuuuccucuucugcuuaugcc

SEQ ID NO: 1173882 - RNA, 23 nt, Human
cgaggcggaguccugaaggcuuu

SEQ ID NO: 1173883 - RNA, 20 nt, Human
cgagucugucagcgcugccu

SEQ ID NO: 1173884 - RNA, 20 nt, Human
cgccugaagaaacugggcuc

SEQ ID NO: 1173885 - RNA, 21 nt, Human
cgcuccuucccuguggggcag

SEQ ID NO: 1173886 - RNA, 20 nt, Human
cgcuggccugcgcuucugcc

SEQ ID NO: 1173887 - RNA, 19 nt, Human
cuccuucccuguggggcag

SEQ ID NO: 1173888 - RNA, 21 nt, Human
cugaagaaacugggcucuguc

SEQ ID NO: 1173889 - RNA, 22 nt, Human
cuggccugcgcuucugcuucua

SEQ ID NO: 1173890 - RNA, 22 nt, Human
gaacagaaaagaggggggcgag

SEQ ID NO: 1173891 - RNA, 19 nt, Human
gaccagguggguugcgccc

SEQ ID NO: 1173892 - RNA, 20 nt, Human
gcgggagaaccaggcagggg

SEQ ID NO: 1173893 - RNA, 22 nt, Human
ggaaguuuauuccucacccccc

SEQ ID NO: 1173894 - RNA, 25 nt, Human
ggcgccccccacccgccugcgcucc

SEQ ID NO: 1173895 - RNA, 22 nt, Human
gggcgaggcggaguccugaagg

SEQ ID NO: 1173896 - RNA, 20 nt, Human
ggggcagagcuggcuggagc

SEQ ID NO: 1173897 - RNA, 23 nt, Human
ucagcugugccguccccagcgcu

SEQ ID NO: 1173898 - RNA, 19 nt, Human
uccggacagcgacaagggg

SEQ ID NO: 1173899 - RNA, 22 nt, Human
uccucacccccccccccgcccc

SEQ ID NO: 1173900 - RNA, 20 nt, Human
uccuccgcuccggggagggg

SEQ ID NO: 1173901 - RNA, 24 nt, Human
ucgcugccagcacaguucagcugu

SEQ ID NO: 1173902 - RNA, 18 nt, Human
ucuaggcggcucugaccu

SEQ ID NO: 1173903 - RNA, 22 nt, Human
ucuccgaacagaaaagaggggg

SEQ ID NO: 1173904 - RNA, 19 nt, Human
ucugucagcgcugccugcg

SEQ ID NO: 1173905 - RNA, 21 nt, Human
ucuguccuccgcuccggggag

SEQ ID NO: 1173906 - RNA, 18 nt, Human
ugaagaaacugggcucug

SEQ ID NO: 1173907 - RNA, 22 nt, Human
ugaagagcaucucgcuggccug

SEQ ID NO: 1173908 - RNA, 21 nt, Human
ugcggugccuguagcuggugu

SEQ ID NO: 1173909 - RNA, 21 nt, Human
uggggcagagcuggcuggagc

SEQ ID NO: 1173910 - RNA, 26 nt, Human
uuuauuccucacccccccccccgccc

SEQ ID NO: 1173911 - RNA, 20 nt, Human
aacaguggcgcgugucagaa

SEQ ID NO: 1173912 - RNA, 22 nt, Human
aagaaauagaguuaauucuuuu

SEQ ID NO: 1173913 - RNA, 27 nt, Human
accaugaaaacaugguauucuaggaau

SEQ ID NO: 1173914 - RNA, 21 nt, Human
agacacuggcaucugccugcc

SEQ ID NO: 1173915 - RNA, 20 nt, Human
agagagcagacacuggcauc

SEQ ID NO: 1173916 - RNA, 20 nt, Human
aggcaguucacauauggaug

SEQ ID NO: 1173917 - RNA, 21 nt, Human
aggugucagacacacugagcu

SEQ ID NO: 1173918 - RNA, 21 nt, Human
agugaaucugggcuauaucuu

SEQ ID NO: 1173919 - RNA, 21 nt, Human
aucaaugucauaacuauucug

SEQ ID NO: 1173920 - RNA, 25 nt, Human
aucuucuuuaagcucauagaggcug

SEQ ID NO: 1173921 - RNA, 20 nt, Human
auggagggccuuguaccgcc

SEQ ID NO: 1173922 - RNA, 21 nt, Human
cacagaucuauauucuaauuc

SEQ ID NO: 1173923 - RNA, 22 nt, Human
cacaucaaucacucugacaucc

SEQ ID NO: 1173924 - RNA, 23 nt, Human
cagaagucccucccgcgcggccu

SEQ ID NO: 1173925 - RNA, 21 nt, Human
cagggucucucauagggucuu

SEQ ID NO: 1173926 - RNA, 24 nt, Human
caguuuuuguggaucaggagucca

SEQ ID NO: 1173927 - RNA, 18 nt, Human
cauccaaucucucuccag

SEQ ID NO: 1173928 - RNA, 25 nt, Human
cauccaaucucucuccaguccuaug

SEQ ID NO: 1173929 - RNA, 22 nt, Human
caucugccugccugggagugaa

SEQ ID NO: 1173930 - RNA, 20 nt, Human
ccaaucucucuccaguccua

SEQ ID NO: 1173931 - RNA, 20 nt, Human
cccuguuugaaaacaaaaac

SEQ ID NO: 1173932 - RNA, 25 nt, Human
cgcggccucuucccccucuuccucc

SEQ ID NO: 1173933 - RNA, 20 nt, Human
cuaauaccucaauuuucuua

SEQ ID NO: 1173934 - RNA, 24 nt, Human
cucuccaguccuaugauggagucc

SEQ ID NO: 1173935 - RNA, 19 nt, Human
cugacuaugaaaggaaaac

SEQ ID NO: 1173936 - RNA, 24 nt, Human
cugcagucaaggugucagacacac

SEQ ID NO: 1173937 - RNA, 23 nt, Human
cuggaaguugcccauguguucaa

SEQ ID NO: 1173938 - RNA, 21 nt, Human
gaagucccucccgcgcggccu

SEQ ID NO: 1173939 - RNA, 20 nt, Human
ggagggccuuguaccgccug

SEQ ID NO: 1173940 - RNA, 18 nt, Human
ucccccucuuccuccgca

SEQ ID NO: 1173941 - RNA, 23 nt, Human
ucccuaggcaaccaacuuaacuu

SEQ ID NO: 1173942 - RNA, 23 nt, Human
ucuagcaaggauugagugucuuc

SEQ ID NO: 1173943 - RNA, 18 nt, Human
ucugcucaggaccuccca

SEQ ID NO: 1173944 - RNA, 19 nt, Human
ugaaaacaaaaacaguggc

SEQ ID NO: 1173945 - RNA, 19 nt, Human
ugaaaacaaaaacaguggc

SEQ ID NO: 1173946 - RNA, 23 nt, Human
ugagguuauaggacuaaaguccc

SEQ ID NO: 1173947 - RNA, 21 nt, Human
ugccugggagugaaucugggc

SEQ ID NO: 1173948 - RNA, 23 nt, Human
ugcucaggaccucccaagccugc

SEQ ID NO: 1173949 - RNA, 27 nt, Human
ugcucaguaaaugcuagaugcuaguag

SEQ ID NO: 1173950 - RNA, 21 nt, Human
uggacaauaaaacuaucugcu

SEQ ID NO: 1173951 - RNA, 19 nt, Human
ugggguccucuuccaagcu

SEQ ID NO: 1173952 - RNA, 22 nt, Human
ugucagacacacugagcuucuu

SEQ ID NO: 1173953 - RNA, 21 nt, Human
ugucuucagcuucacagaucu

SEQ ID NO: 1173954 - RNA, 19 nt, Human
uguggaucaggaguccagg

SEQ ID NO: 1173955 - RNA, 22 nt, Human
uuccaagcuucucagaugguuc

SEQ ID NO: 1173956 - RNA, 19 nt, Human
uuugccuucuuccaguagg

SEQ ID NO: 1173957 - RNA, 19 nt, Human
aagacccccagagugaagc

SEQ ID NO: 1173958 - RNA, 22 nt, Human
aagcagcagacagaacccagga

SEQ ID NO: 1173959 - RNA, 19 nt, Human
acccccagagugaagcagc

SEQ ID NO: 1173960 - RNA, 18 nt, Human
acgugcugccaagucugg

SEQ ID NO: 1173961 - RNA, 21 nt, Human
acuuguacuuccaaggggaca

SEQ ID NO: 1173962 - RNA, 18 nt, Human
agaacucucuagaacgca

SEQ ID NO: 1173963 - RNA, 26 nt, Human
agacagaacccaggaccuucucugca

SEQ ID NO: 1173964 - RNA, 20 nt, Human
aggaccuucucugcacucac

SEQ ID NO: 1173965 - RNA, 23 nt, Human
aggagcauggacgggccugagcc

SEQ ID NO: 1173966 - RNA, 19 nt, Human
caacaugaagagcuguaca

SEQ ID NO: 1173967 - RNA, 26 nt, Human
caccccggacucuggugccauggccu

SEQ ID NO: 1173968 - RNA, 25 nt, Human
cagcagacagaacccaggaccuucu

SEQ ID NO: 1173969 - RNA, 22 nt, Human
caugcccacuucccacauggga

SEQ ID NO: 1173970 - RNA, 18 nt, Human
ccaagucuggucucugcc

SEQ ID NO: 1173971 - RNA, 25 nt, Human
ccaccgcagcccacaguuucuaugu

SEQ ID NO: 1173972 - RNA, 21 nt, Human
ccagagccaccgcagcccaca

SEQ ID NO: 1173973 - RNA, 23 nt, Human
ccagagugaagcagcagacagaa

SEQ ID NO: 1173974 - RNA, 19 nt, Human
ccagcuccagagccaccgg

SEQ ID NO: 1173975 - RNA, 19 nt, Human
ccaggaccuucucugcacu

SEQ ID NO: 1173976 - RNA, 22 nt, Human
ccaggcacgaaaaugaagaagg

SEQ ID NO: 1173977 - RNA, 19 nt, Human
ccccgcacgaggcccugcc

SEQ ID NO: 1173978 - RNA, 23 nt, Human
ccucagggcugugcagccucacc

SEQ ID NO: 1173979 - RNA, 19 nt, Human
ccugccggagucucugcca

SEQ ID NO: 1173980 - RNA, 20 nt, Human
cuccagagccaccgcagccc

SEQ ID NO: 1173981 - RNA, 22 nt, Human
cuccagagccaccgcagcccac

SEQ ID NO: 1173982 - RNA, 23 nt, Human
cuccaggcacgaaaaugaagaag

SEQ ID NO: 1173983 - RNA, 23 nt, Human
cucccggcccccgcacgaggccc

SEQ ID NO: 1173984 - RNA, 18 nt, Human
cucugagaaauggagaag

SEQ ID NO: 1173985 - RNA, 19 nt, Human
cuguguggguuuagugugu

SEQ ID NO: 1173986 - RNA, 22 nt, Human
gaagcagcagacagaacccagg

SEQ ID NO: 1173987 - RNA, 22 nt, Human
gaaggcgcugcucccggccccc

SEQ ID NO: 1173988 - RNA, 22 nt, Human
gaaugugccuguguggguuuag

SEQ ID NO: 1173989 - RNA, 20 nt, Human
gagcauggacgggccugagc

SEQ ID NO: 1173990 - RNA, 19 nt, Human
ggcacgaaaaugaagaagg

SEQ ID NO: 1173991 - RNA, 18 nt, Human
gguucugggcucucucag

SEQ ID NO: 1173992 - RNA, 24 nt, Human
gucggggccuagcagcuuccucag

SEQ ID NO: 1173993 - RNA, 21 nt, Human
guggaaugcagcuccuuguca

SEQ ID NO: 1173994 - RNA, 22 nt, Human
uaccucugagaaauggagaaga

SEQ ID NO: 1173995 - RNA, 18 nt, Human
ugaagcgucguuuccuaa

SEQ ID NO: 1173996 - RNA, 20 nt, Human
ugaagcgucguuuccuaaaa

SEQ ID NO: 1173997 - RNA, 20 nt, Human
uggaaugugccugugugggu

SEQ ID NO: 1173998 - RNA, 20 nt, Human
uggaaugugccugugugggu

SEQ ID NO: 1173999 - RNA, 18 nt, Human
ugggcucucucaggucca

SEQ ID NO: 1174000 - RNA, 24 nt, Human
uucugcugcuacugggguucuggg

SEQ ID NO: 1174001 - RNA, 23 nt, Human
aagaaaacguccugugagaggcc

SEQ ID NO: 1174002 - RNA, 21 nt, Human
aaucuugccucucagucccac

SEQ ID NO: 1174003 - RNA, 19 nt, Human
acagggucaugguggacac

SEQ ID NO: 1174004 - RNA, 21 nt, Human
agaaagagaagucaggguucu

SEQ ID NO: 1174005 - RNA, 19 nt, Human
agaggccaggaagguagca

SEQ ID NO: 1174006 - RNA, 20 nt, Human
agggucaugguggacacggg

SEQ ID NO: 1174007 - RNA, 22 nt, Human
augaacaaaucuugccucucag

SEQ ID NO: 1174008 - RNA, 24 nt, Human
caaaucuugccucucagucccaca

SEQ ID NO: 1174009 - RNA, 21 nt, Human
caugaacaaaucuugccucuc

SEQ ID NO: 1174010 - RNA, 24 nt, Human
ccccaccaccucacauuaugccua

SEQ ID NO: 1174011 - RNA, 23 nt, Human
cucacauuaugccuauagggaca

SEQ ID NO: 1174012 - RNA, 20 nt, Human
cucagucccacacaaggcag

SEQ ID NO: 1174013 - RNA, 21 nt, Human
gaacagggucaugguggacac

SEQ ID NO: 1174014 - RNA, 19 nt, Human
gggaaggaauguaggucag

SEQ ID NO: 1174015 - RNA, 23 nt, Human
gucaggguucuugaagucacaaa

SEQ ID NO: 1174016 - RNA, 22 nt, Human
ugaacaaaucuugccucucagu

SEQ ID NO: 1174017 - RNA, 23 nt, Human
ugagaggccaggaagguagcagg

SEQ ID NO: 1174018 - RNA, 23 nt, Human
ugugagaggccaggaagguagca

SEQ ID NO: 1174019 - RNA, 24 nt, Human
uguggggaacagggucauggugga

SEQ ID NO: 1174020 - RNA, 21 nt, Human
aaggccugggccgccaggaag

SEQ ID NO: 1174021 - RNA, 18 nt, Human
accccagcaccuuggucc

SEQ ID NO: 1174022 - RNA, 21 nt, Human
accccccagcaggccagggag

SEQ ID NO: 1174023 - RNA, 23 nt, Human
acccggaaccccccagcaggcca

SEQ ID NO: 1174024 - RNA, 19 nt, Human
ccagggaggcaaggccugg

SEQ ID NO: 1174025 - RNA, 19 nt, Human
ccgccaggaagccaugcuu

SEQ ID NO: 1174026 - RNA, 23 nt, Human
cgggaucccccagucaucacugg

SEQ ID NO: 1174027 - RNA, 22 nt, Human
cuucuggagacccggaaccccc

SEQ ID NO: 1174028 - RNA, 21 nt, Human
cuugccgggaucccccaguca

SEQ ID NO: 1174029 - RNA, 22 nt, Human
gaccagcaccauguccuucugg

SEQ ID NO: 1174030 - RNA, 21 nt, Human
ugauccugaucaaggggccaa

SEQ ID NO: 1174031 - RNA, 20 nt, Human
uggagacccggaaccccccu

SEQ ID NO: 1174032 - RNA, 21 nt, Human
ugguuguggggaagugccagg

SEQ ID NO: 1174033 - RNA, 20 nt, Human
aaacaggagcaaaagacugg

SEQ ID NO: 1174034 - RNA, 26 nt, Human
aaacaggagcaaaagacuggcggcga

SEQ ID NO: 1174035 - RNA, 23 nt, Human
aucuucuuuggugacaucuguua

SEQ ID NO: 1174036 - RNA, 24 nt, Human
caaguuuacaaugcacacgcauag

SEQ ID NO: 1174037 - RNA, 21 nt, Human
cacacgcauaccugaaacagg

SEQ ID NO: 1174038 - RNA, 22 nt, Human
cacuugcagcuaugugcucgcu

SEQ ID NO: 1174039 - RNA, 18 nt, Human
ccugaaacaggagcaaaa

SEQ ID NO: 1174040 - RNA, 21 nt, Human
cugaaacaggagcaaaagacu

SEQ ID NO: 1174041 - RNA, 18 nt, Human
ggagcaaaagacuggcgg

SEQ ID NO: 1174042 - RNA, 25 nt, Human
uaagcauuagaaaaacauguugggg

SEQ ID NO: 1174043 - RNA, 19 nt, Human
uagaaaaacauguuggggc

SEQ ID NO: 1174044 - RNA, 19 nt, Human
ucaguucagucagacaagu

SEQ ID NO: 1174045 - RNA, 24 nt, Human
ugaguuuuaagaguucuuauauau

SEQ ID NO: 1174046 - RNA, 18 nt, Human
uuaagcauuagaaaaaca

SEQ ID NO: 1174047 - RNA, 19 nt, Human
uuagggucuuuggccuauu

SEQ ID NO: 1174048 - RNA, 19 nt, Human
uuggauucuuuuuuucugc

SEQ ID NO: 1174049 - RNA, 19 nt, Human
uuggugacaucuguuaggg

SEQ ID NO: 1174050 - RNA, 22 nt, Human
aaacaacaagacgcuugacuug

SEQ ID NO: 1174051 - RNA, 18 nt, Human
aagcagcaccaggagcgg

SEQ ID NO: 1174052 - RNA, 25 nt, Human
aagcagcaccaggagcggcagaaga

SEQ ID NO: 1174053 - RNA, 25 nt, Human
agcaccaggagcggcagaagaagga

SEQ ID NO: 1174054 - RNA, 21 nt, Human
aggcggcagcaguggacaagg

SEQ ID NO: 1174055 - RNA, 24 nt, Human
caaacgagcacacaagcagcacca

SEQ ID NO: 1174056 - RNA, 24 nt, Human
caagcagcaccaggagcggcagaa

SEQ ID NO: 1174057 - RNA, 20 nt, Human
cacaagcagcaccaggagcg

SEQ ID NO: 1174058 - RNA, 24 nt, Human
cacaagcagcaccaggagcggcag

SEQ ID NO: 1174059 - RNA, 20 nt, Human
cagaagaaggaggcggcagc

SEQ ID NO: 1174060 - RNA, 18 nt, Human
caggagcggcagaagaag

SEQ ID NO: 1174061 - RNA, 23 nt, Human
caggagcggcagaagaaggaggc

SEQ ID NO: 1174062 - RNA, 18 nt, Human
caguaaaggaauggggaa

SEQ ID NO: 1174063 - RNA, 18 nt, Human
caugccacuaauggagaa

SEQ ID NO: 1174064 - RNA, 20 nt, Human
gagaaaggggguauuuucac

SEQ ID NO: 1174065 - RNA, 19 nt, Human
gagcaugccacuaauggag

SEQ ID NO: 1174066 - RNA, 21 nt, Human
gaggcggcagcaguggacaag

SEQ ID NO: 1174067 - RNA, 21 nt, Human
gaggcggcagcaguggacaag

SEQ ID NO: 1174068 - RNA, 18 nt, Human
gcggcagcaguggacaag

SEQ ID NO: 1174069 - RNA, 20 nt, Human
ggaaaacuaucuaggauucu

SEQ ID NO: 1174070 - RNA, 23 nt, Human
gguauuuucacagaaucaguauu

SEQ ID NO: 1174071 - RNA, 19 nt, Human
uaaaauucuccaauugaac

SEQ ID NO: 1174072 - RNA, 21 nt, Human
ucagcugccgcuucacaaaag

SEQ ID NO: 1174073 - RNA, 24 nt, Human
uccucagcugccgcuucacaaaag

SEQ ID NO: 1174074 - RNA, 21 nt, Human
ugcauguaacagcuaaguaca

SEQ ID NO: 1174075 - RNA, 19 nt, Human
uggggaagggggaaaugaa

SEQ ID NO: 1174076 - RNA, 23 nt, Human
uguuguuguuuuuuuguuguugu

SEQ ID NO: 1174077 - RNA, 20 nt, Human
uuguuguuguuguuaaaaca

SEQ ID NO: 1174078 - RNA, 19 nt, Human
uuguuguuuuuuuguuguu

SEQ ID NO: 1174079 - RNA, 23 nt, Human
uuucacagaaucaguauuuuucc

SEQ ID NO: 1174080 - RNA, 22 nt, Human
uuuguuguuguuguuaaaacag

SEQ ID NO: 1174081 - RNA, 23 nt, Human
uuuuguuguuguuguuaaaacag

SEQ ID NO: 1174082 - RNA, 24 nt, Human
uuuuuuuguuguuguuguuaaaac

SEQ ID NO: 1174083 - RNA, 19 nt, Human
aacuagacuucugacgcug

SEQ ID NO: 1174084 - RNA, 19 nt, Human
acacgcugcacaacugaca

SEQ ID NO: 1174085 - RNA, 25 nt, Human
acagcugccuauaaaacuagacuuc

SEQ ID NO: 1174086 - RNA, 24 nt, Human
caacugacaucacaggacagcugc

SEQ ID NO: 1174087 - RNA, 28 nt, Human
cgcugcacaacugacaucacaggacagc

SEQ ID NO: 1174088 - RNA, 18 nt, Human
gagagcaggcauggcaac

SEQ ID NO: 1174089 - RNA, 22 nt, Human
uaaaacuagacuucugacgcug

SEQ ID NO: 1174090 - RNA, 18 nt, Human
uauaaaacuagacuucug

SEQ ID NO: 1174091 - RNA, 25 nt, Human
ucacuuuccuguccuuaauauccac

SEQ ID NO: 1174092 - RNA, 21 nt, Human
ucuuucgguggaagacaaugg

SEQ ID NO: 1174093 - RNA, 23 nt, Human
uuagggucuccaaugagcuuccu

SEQ ID NO: 1174094 - RNA, 18 nt, Human
aaaaaacaagauagaggc

SEQ ID NO: 1174095 - RNA, 22 nt, Human
aaaaacaaaaaacaagauagag

SEQ ID NO: 1174096 - RNA, 24 nt, Human
aaaaagcagcaaguucaacacaaa

SEQ ID NO: 1174097 - RNA, 25 nt, Human
aaaaagcagcaaguucaacacaaaa

SEQ ID NO: 1174098 - RNA, 21 nt, Human
aaaggggcaguugaguaagau

SEQ ID NO: 1174099 - RNA, 25 nt, Human
aagaaaugagauguugugaaaaaga

SEQ ID NO: 1174100 - RNA, 21 nt, Human
aagaggacauuucuggaggcu

SEQ ID NO: 1174101 - RNA, 18 nt, Human
aagcagcaaguucaacac

SEQ ID NO: 1174102 - RNA, 19 nt, Human
aagcugagaugggaaaugg

SEQ ID NO: 1174103 - RNA, 22 nt, Human
accaucuucuacuuugggcuua

SEQ ID NO: 1174104 - RNA, 22 nt, Human
accuccccagaagaaaaaacaa

SEQ ID NO: 1174105 - RNA, 22 nt, Human
acugccuucuaccaucuucuac

SEQ ID NO: 1174106 - RNA, 24 nt, Human
agaaaugagauguugugaaaaaga

SEQ ID NO: 1174107 - RNA, 22 nt, Human
agaaggaaauacagggucaccc

SEQ ID NO: 1174108 - RNA, 19 nt, Human
agaauggcagaaaccuagg

SEQ ID NO: 1174109 - RNA, 25 nt, Human
agaggcagcaaacacaaauucugag

SEQ ID NO: 1174110 - RNA, 19 nt, Human
agcaacagcaaaaggaaga

SEQ ID NO: 1174111 - RNA, 26 nt, Human
agccuggauuucccucuccaaaacuu

SEQ ID NO: 1174112 - RNA, 21 nt, Human
aggaaugggcaccagaaggaa

SEQ ID NO: 1174113 - RNA, 22 nt, Human
aggcagcaaacacaaauucuga

SEQ ID NO: 1174114 - RNA, 20 nt, Human
aguaugaaaaaaagcagcaa

SEQ ID NO: 1174115 - RNA, 18 nt, Human
agucagggauguuccuuc

SEQ ID NO: 1174116 - RNA, 19 nt, Human
augguggccauuaucuaca

SEQ ID NO: 1174117 - RNA, 22 nt, Human
auucugagggagaggaaagggg

SEQ ID NO: 1174118 - RNA, 19 nt, Human
caaaaaacaagauagaggc

SEQ ID NO: 1174119 - RNA, 19 nt, Human
caaaauccuccuccucuuc

SEQ ID NO: 1174120 - RNA, 20 nt, Human
caacacaaaauagaaaucuc

SEQ ID NO: 1174121 - RNA, 24 nt, Human
caacagcaaaaggaagaaaugaga

SEQ ID NO: 1174122 - RNA, 24 nt, Human
cacccagaauggcagaaaccuagg

SEQ ID NO: 1174123 - RNA, 22 nt, Human
cacuguucuagaccuccccaga

SEQ ID NO: 1174124 - RNA, 21 nt, Human
cagaaaccuagguuucccaga

SEQ ID NO: 1174125 - RNA, 18 nt, Human
cagaagaaaaaacaaaaa

SEQ ID NO: 1174126 - RNA, 20 nt, Human
cagaguggaaagagagagga

SEQ ID NO: 1174127 - RNA, 20 nt, Human
cagagugggacagacaccuc

SEQ ID NO: 1174128 - RNA, 18 nt, Human
ccagaagaaaaaacaaaa

SEQ ID NO: 1174129 - RNA, 21 nt, Human
ccagaguggaaagagagagga

SEQ ID NO: 1174130 - RNA, 19 nt, Human
cccagaagaaaaaacaaaa

SEQ ID NO: 1174131 - RNA, 19 nt, Human
ccuccucuucugcgguggc

SEQ ID NO: 1174132 - RNA, 20 nt, Human
cuaugugccaggcacuguuc

SEQ ID NO: 1174133 - RNA, 23 nt, Human
cucuccaaaacuuuuagaaugga

SEQ ID NO: 1174134 - RNA, 20 nt, Human
cucugauacucagagacgag

SEQ ID NO: 1174135 - RNA, 18 nt, Human
cugccuucuaccaucuuc

SEQ ID NO: 1174136 - RNA, 24 nt, Human
cuggaggcuuagggaccaaggcug

SEQ ID NO: 1174137 - RNA, 18 nt, Human
cuguucuagaccucccca

SEQ ID NO: 1174138 - RNA, 23 nt, Human
gaaaguggagauaauacugcuga

SEQ ID NO: 1174139 - RNA, 23 nt, Human
gagagaggagacauucaacaaac

SEQ ID NO: 1174140 - RNA, 19 nt, Human
gaggcuuagggaccaaggc

SEQ ID NO: 1174141 - RNA, 20 nt, Human
gagggagguagaguuggaaa

SEQ ID NO: 1174142 - RNA, 21 nt, Human
gauuucccucuccaaaacuuu

SEQ ID NO: 1174143 - RNA, 21 nt, Human
gcuggacucuuucccccacuc

SEQ ID NO: 1174144 - RNA, 19 nt, Human
ggaaaggaaaggauuccac

SEQ ID NO: 1174145 - RNA, 22 nt, Human
ggaaaggauuccacuugacaga

SEQ ID NO: 1174146 - RNA, 24 nt, Human
ggaacugaaaagccugaggugaug

SEQ ID NO: 1174147 - RNA, 23 nt, Human
ggagguagaguuggaaaggaaag

SEQ ID NO: 1174148 - RNA, 20 nt, Human
ggcaguugaguaagauggcu

SEQ ID NO: 1174149 - RNA, 23 nt, Human
ggcuuagggaccaaggcuggacu

SEQ ID NO: 1174150 - RNA, 22 nt, Human
gggagguagaguuggaaaggaa

SEQ ID NO: 1174151 - RNA, 23 nt, Human
gggggggaagcaacagcaaaagg

SEQ ID NO: 1174152 - RNA, 20 nt, Human
uaaauggcaucuggaugaga

SEQ ID NO: 1174153 - RNA, 20 nt, Human
uaagauggcuaagggaacug

SEQ ID NO: 1174154 - RNA, 20 nt, Human
uaagggaacugaaaagccug

SEQ ID NO: 1174155 - RNA, 21 nt, Human
uaccaucuucuacuuugggcu

SEQ ID NO: 1174156 - RNA, 21 nt, Human
uacuaugugccaggcacuguu

SEQ ID NO: 1174157 - RNA, 23 nt, Human
uagaauggaaaaucccauccccu

SEQ ID NO: 1174158 - RNA, 21 nt, Human
uaggggguaagaaaaaguggg

SEQ ID NO: 1174159 - RNA, 21 nt, Human
ucacguugcucucagccucgg

SEQ ID NO: 1174160 - RNA, 22 nt, Human
uccccagaagaaaaaacaaaaa

SEQ ID NO: 1174161 - RNA, 24 nt, Human
ucccccacuccuugaucccuuucu

SEQ ID NO: 1174162 - RNA, 22 nt, Human
ucuagaccuccccagaagaaaa

SEQ ID NO: 1174163 - RNA, 22 nt, Human
ucucugaucaggggaaaggagc

SEQ ID NO: 1174164 - RNA, 23 nt, Human
ucuggaggcuuagggaccaaggc

SEQ ID NO: 1174165 - RNA, 19 nt, Human
ucuggaugagacccagcuu

SEQ ID NO: 1174166 - RNA, 19 nt, Human
ugaaaaagauggaggaggg

SEQ ID NO: 1174167 - RNA, 21 nt, Human
ugacaccucucuugaagcuga

SEQ ID NO: 1174168 - RNA, 23 nt, Human
ugacucaaacacugauguggcag

SEQ ID NO: 1174169 - RNA, 22 nt, Human
ugagaugggaaauggacauacu

SEQ ID NO: 1174170 - RNA, 23 nt, Human
ugagaugggaaauggacauacuu

SEQ ID NO: 1174171 - RNA, 25 nt, Human
ugagaugggaaauggacauacuuag

SEQ ID NO: 1174172 - RNA, 19 nt, Human
ugagggagaggaaaggggc

SEQ ID NO: 1174173 - RNA, 21 nt, Human
ugaggugaugggggcucuguc

SEQ ID NO: 1174174 - RNA, 24 nt, Human
uggaaaaucccauccccuuccuua

SEQ ID NO: 1174175 - RNA, 19 nt, Human
uggaaggaaugggcaccag

SEQ ID NO: 1174176 - RNA, 21 nt, Human
uggacucuuucccccacuccu

SEQ ID NO: 1174177 - RNA, 23 nt, Human
uggauuucccucuccaaaacuuu

SEQ ID NO: 1174178 - RNA, 19 nt, Human
uggcaucuggaugagaccc

SEQ ID NO: 1174179 - RNA, 19 nt, Human
ugugaaaaagauggaggag

SEQ ID NO: 1174180 - RNA, 21 nt, Human
ugugaaaaagauggaggaggg

SEQ ID NO: 1174181 - RNA, 20 nt, Human
uguggggggggggaagcaac

SEQ ID NO: 1174182 - RNA, 21 nt, Human
uguugugaaaaagauggagga

SEQ ID NO: 1174183 - RNA, 25 nt, Human
uucaacacaaaauagaaaucucaaa

SEQ ID NO: 1174184 - RNA, 19 nt, Human
uuuauuuuuggcucuuggg

SEQ ID NO: 1174185 - RNA, 18 nt, Human
uuucccucuccaaaacuu

SEQ ID NO: 1174186 - RNA, 23 nt, Human
uuucccucuccaaaacuuuuaga

SEQ ID NO: 1174187 - RNA, 19 nt, Human
uuucuggaggcuuagggac

SEQ ID NO: 1174188 - RNA, 18 nt, Human
gcaauaucuguucccagc

SEQ ID NO: 1174189 - RNA, 27 nt, Human
cagggcacucuuccauucuuuaccuau

SEQ ID NO: 1174190 - RNA, 22 nt, Human
uaaacaauccuuaguaccugua

SEQ ID NO: 1174191 - RNA, 23 nt, Human
uccacauacugaacauugugaau

SEQ ID NO: 1174192 - RNA, 18 nt, Human
ugaaaaguucggaaguaa

SEQ ID NO: 1174193 - RNA, 21 nt, Human
uugugaauugacucucucagu

SEQ ID NO: 1174194 - RNA, 22 nt, Human
ccuacaccuugauccaguguua

SEQ ID NO: 1174195 - RNA, 22 nt, Human
ugaaguuccuacaccuugaucc

SEQ ID NO: 1174196 - RNA, 23 nt, Human
uugauccaguguuacaaagaagg

SEQ ID NO: 1174197 - RNA, 24 nt, Human
aucuucugccacugccauagcuac

SEQ ID NO: 1174198 - RNA, 20 nt, Human
ccugcuaagcuuuguuuccu

SEQ ID NO: 1174199 - RNA, 18 nt, Human
cugcuaagcuuuguuucc

SEQ ID NO: 1174200 - RNA, 20 nt, Human
guuuugcaaaguauugccuc

SEQ ID NO: 1174201 - RNA, 21 nt, Human
uacugcugcugcuggaacugc

SEQ ID NO: 1174202 - RNA, 20 nt, Human
ucucuggcucuccucuccug

SEQ ID NO: 1174203 - RNA, 21 nt, Human
ucugccacugccauagcuacu

SEQ ID NO: 1174204 - RNA, 24 nt, Human
ugcaaaguauugccuccaccgcca

SEQ ID NO: 1174205 - RNA, 23 nt, Human
aaaaaguuuacccaagguaauua

SEQ ID NO: 1174206 - RNA, 21 nt, Human
aacaaacuaucacagcauaaa

SEQ ID NO: 1174207 - RNA, 18 nt, Human
aaggcagguggaucaucu

SEQ ID NO: 1174208 - RNA, 18 nt, Human
aaucgcuugaaccuggga

SEQ ID NO: 1174209 - RNA, 24 nt, Human
aaucgcuugaaccugggaggcgga

SEQ ID NO: 1174210 - RNA, 20 nt, Human
acaagagcgaaacucugucu

SEQ ID NO: 1174211 - RNA, 21 nt, Human
acaagagcgaaacucugucuc

SEQ ID NO: 1174212 - RNA, 22 nt, Human
acggaagcugugguaucacuuu

SEQ ID NO: 1174213 - RNA, 22 nt, Human
acguggcaagagccugucucuc

SEQ ID NO: 1174214 - RNA, 18 nt, Human
acugcacuccagccuggg

SEQ ID NO: 1174215 - RNA, 21 nt, Human
acugcacuccagccugggcaa

SEQ ID NO: 1174216 - RNA, 24 nt, Human
acugcacuccagccugggcaacaa

SEQ ID NO: 1174217 - RNA, 18 nt, Human
agagcgaaacucugucuc

SEQ ID NO: 1174218 - RNA, 24 nt, Human
agcacuuugggaggcugaggcagg

SEQ ID NO: 1174219 - RNA, 21 nt, Human
agccugucucuccaaaaccua

SEQ ID NO: 1174220 - RNA, 24 nt, Human
aggcacgguggcucaugccuguaa

SEQ ID NO: 1174221 - RNA, 22 nt, Human
aggcaggagaaucgcuugaacc

SEQ ID NO: 1174222 - RNA, 24 nt, Human
aggcaggagaaucgcuugaaccug

SEQ ID NO: 1174223 - RNA, 26 nt, Human
aggcagguggaucaucugagcccagg

SEQ ID NO: 1174224 - RNA, 20 nt, Human
aggcggagguuguggugagc

SEQ ID NO: 1174225 - RNA, 20 nt, Human
aggcugaggcaggagaaucg

SEQ ID NO: 1174226 - RNA, 24 nt, Human
aggcugaggcaggagaaucgcuug

SEQ ID NO: 1174227 - RNA, 20 nt, Human
agugcuuugggaggcgaagg

SEQ ID NO: 1174228 - RNA, 24 nt, Human
aucgugccacugcacuccagccug

SEQ ID NO: 1174229 - RNA, 19 nt, Human
augccuguaaucccagcac

SEQ ID NO: 1174230 - RNA, 18 nt, Human
augguguuugcauuuugu

SEQ ID NO: 1174231 - RNA, 23 nt, Human
caacaagagcgaaacucugucuc

SEQ ID NO: 1174232 - RNA, 24 nt, Human
caacguggcaagagccugucucuc

SEQ ID NO: 1174233 - RNA, 24 nt, Human
caagagccugucucuccaaaaccu

SEQ ID NO: 1174234 - RNA, 24 nt, Human
cacuccagccugggcaacaagagc

SEQ ID NO: 1174235 - RNA, 25 nt, Human
cacuccagccugggcaacaagagcg

SEQ ID NO: 1174236 - RNA, 18 nt, Human
cacugcacuccagccugg

SEQ ID NO: 1174237 - RNA, 19 nt, Human
cacugcacuccagccuggg

SEQ ID NO: 1174238 - RNA, 21 nt, Human
cacugcacuccagccugggca

SEQ ID NO: 1174239 - RNA, 23 nt, Human
cacugcacuccagccugggcaac

SEQ ID NO: 1174240 - RNA, 24 nt, Human
cacugcacuccagccugggcaaca

SEQ ID NO: 1174241 - RNA, 24 nt, Human
cagcacuuugggaggcugaggcag

SEQ ID NO: 1174242 - RNA, 25 nt, Human
cagcacuuugggaggcugaggcagg

SEQ ID NO: 1174243 - RNA, 18 nt, Human
cagcauaaaguaggaaua

SEQ ID NO: 1174244 - RNA, 24 nt, Human
cagguggaucaucugagcccagga

SEQ ID NO: 1174245 - RNA, 24 nt, Human
cagugcuuugggaggcgaaggcag

SEQ ID NO: 1174246 - RNA, 26 nt, Human
cagugcuuugggaggcgaaggcaggu

SEQ ID NO: 1174247 - RNA, 24 nt, Human
caugccuguaaucccagcacuuug

SEQ ID NO: 1174248 - RNA, 20 nt, Human
ccacugcacuccagccuggg

SEQ ID NO: 1174249 - RNA, 21 nt, Human
ccacugcacuccagccugggc

SEQ ID NO: 1174250 - RNA, 23 nt, Human
ccacugcacuccagccugggcaa

SEQ ID NO: 1174251 - RNA, 24 nt, Human
ccacugcacuccagccugggcaac

SEQ ID NO: 1174252 - RNA, 18 nt, Human
cccagugcuuugggaggc

SEQ ID NO: 1174253 - RNA, 19 nt, Human
ccugggaggcggagguugu

SEQ ID NO: 1174254 - RNA, 21 nt, Human
cgcuugaaccugggaggcgga

SEQ ID NO: 1174255 - RNA, 24 nt, Human
cucaugccuguaaucccagcacuu

SEQ ID NO: 1174256 - RNA, 23 nt, Human
gagaaucgcuugaaccugggagg

SEQ ID NO: 1174257 - RNA, 23 nt, Human
gagaucgugccacugcacuccag

SEQ ID NO: 1174258 - RNA, 24 nt, Human
gaucaucugagcccaggaguuuga

SEQ ID NO: 1174259 - RNA, 23 nt, Human
gcagguggaucaucugagcccag

SEQ ID NO: 1174260 - RNA, 22 nt, Human
gccacugcacuccagccugggc

SEQ ID NO: 1174261 - RNA, 24 nt, Human
gccacugcacuccagccugggcaa

SEQ ID NO: 1174262 - RNA, 22 nt, Human
gccaggcacgguggcucaugcc

SEQ ID NO: 1174263 - RNA, 22 nt, Human
gcccaggaguuugagaccagcc

SEQ ID NO: 1174264 - RNA, 20 nt, Human
gcugagaucgugccacugca

SEQ ID NO: 1174265 - RNA, 22 nt, Human
ggagguuguggugagcugagau

SEQ ID NO: 1174266 - RNA, 24 nt, Human
ggagguuguggugagcugagaucg

SEQ ID NO: 1174267 - RNA, 20 nt, Human
ggcaacguggcaagagccug

SEQ ID NO: 1174268 - RNA, 21 nt, Human
ggcugggcgugguggcucaug

SEQ ID NO: 1174269 - RNA, 23 nt, Human
gggcgugguggcucaugucccag

SEQ ID NO: 1174270 - RNA, 23 nt, Human
gguggcucaugccuguaauccca

SEQ ID NO: 1174271 - RNA, 24 nt, Human
gguggcucaugccuguaaucccag

SEQ ID NO: 1174272 - RNA, 27 nt, Human
guacuugcggcugggcgugguggcuca

SEQ ID NO: 1174273 - RNA, 23 nt, Human
guggcucaugccuguaaucccag

SEQ ID NO: 1174274 - RNA, 18 nt, Human
guggugugagccuguagu

SEQ ID NO: 1174275 - RNA, 21 nt, Human
guguguguuuacaauuuucug

SEQ ID NO: 1174276 - RNA, 25 nt, Human
uaaauaaacaaacuaucacagcaua

SEQ ID NO: 1174277 - RNA, 24 nt, Human
uaagaagauacaguuuaacaucaa

SEQ ID NO: 1174278 - RNA, 20 nt, Human
uacaaaaaugaacacaaguu

SEQ ID NO: 1174279 - RNA, 20 nt, Human
uaccuggcaaaacuucacgg

SEQ ID NO: 1174280 - RNA, 23 nt, Human
ucaucugagcccaggaguuugag

SEQ ID NO: 1174281 - RNA, 22 nt, Human
ucaugccuguaaucccagcacu

SEQ ID NO: 1174282 - RNA, 24 nt, Human
ucgcuugaaccugggaggcggagg

SEQ ID NO: 1174283 - RNA, 23 nt, Human
ucgugccacugcacuccagccug

SEQ ID NO: 1174284 - RNA, 25 nt, Human
ucuccaaaaccuacaaaauuuagcc

SEQ ID NO: 1174285 - RNA, 23 nt, Human
ucugagcccaggaguuugagacc

SEQ ID NO: 1174286 - RNA, 24 nt, Human
ucugagcccaggaguuugagacca

SEQ ID NO: 1174287 - RNA, 24 nt, Human
ucuggccaggcacgguggcucaug

SEQ ID NO: 1174288 - RNA, 22 nt, Human
ugaaccugggaggcggagguug

SEQ ID NO: 1174289 - RNA, 23 nt, Human
ugagcccaggaguuugagaccag

SEQ ID NO: 1174290 - RNA, 22 nt, Human
ugagcugagaucgugccacugc

SEQ ID NO: 1174291 - RNA, 20 nt, Human
ugaggcaggagaaucgcuug

SEQ ID NO: 1174292 - RNA, 24 nt, Human
ugaggcaggagaaucgcuugaacc

SEQ ID NO: 1174293 - RNA, 25 nt, Human
ugaggcaggagaaucgcuugaaccu

SEQ ID NO: 1174294 - RNA, 22 nt, Human
ugaguacuaccuggcaaaacuu

SEQ ID NO: 1174295 - RNA, 23 nt, Human
ugauugguuuggugagagggaau

SEQ ID NO: 1174296 - RNA, 24 nt, Human
ugccacugcacuccagccugggca

SEQ ID NO: 1174297 - RNA, 23 nt, Human
ugccuguaaucccagcacuuugg

SEQ ID NO: 1174298 - RNA, 24 nt, Human
ugccuguaaucccagcacuuuggg

SEQ ID NO: 1174299 - RNA, 24 nt, Human
ugcggcugggcgugguggcucaug

SEQ ID NO: 1174300 - RNA, 23 nt, Human
uggaucaucugagcccaggaguu

SEQ ID NO: 1174301 - RNA, 24 nt, Human
uggaucaucugagcccaggaguuu

SEQ ID NO: 1174302 - RNA, 21 nt, Human
uggcaaaacuucacggaagcu

SEQ ID NO: 1174303 - RNA, 24 nt, Human
uggccaggcacgguggcucaugcc

SEQ ID NO: 1174304 - RNA, 22 nt, Human
uggcucaugccuguaaucccag

SEQ ID NO: 1174305 - RNA, 24 nt, Human
uggcucaugccuguaaucccagca

SEQ ID NO: 1174306 - RNA, 24 nt, Human
ugggaggcgaaggcagguggauca

SEQ ID NO: 1174307 - RNA, 24 nt, Human
ugggaggcggagguuguggugagc

SEQ ID NO: 1174308 - RNA, 19 nt, Human
ugggaggcugaggcaggag

SEQ ID NO: 1174309 - RNA, 23 nt, Human
ugggaggcugaggcaggagaauc

SEQ ID NO: 1174310 - RNA, 24 nt, Human
ugguggugugagccuguaguccca

SEQ ID NO: 1174311 - RNA, 20 nt, Human
uguaaaaguacuugcggcug

SEQ ID NO: 1174312 - RNA, 23 nt, Human
uugaaccugggaggcggagguug

SEQ ID NO: 1174313 - RNA, 24 nt, Human
uugggaggcugaggcaggagaauc

SEQ ID NO: 1174314 - RNA, 21 nt, Human
uuuguacaaaaaugaacacaa

SEQ ID NO: 1174315 - RNA, 23 nt, Human
uuuguacaaaaaugaacacaagu

SEQ ID NO: 1174316 - RNA, 19 nt, Human
aaaagaaccaacacggaug

SEQ ID NO: 1174317 - RNA, 24 nt, Human
aaaagaaccaacacggaugcaugg

SEQ ID NO: 1174318 - RNA, 21 nt, Human
aaaaugaaacaagcuuagccc

SEQ ID NO: 1174319 - RNA, 22 nt, Human
aaaaugaaacaagcuuagccca

SEQ ID NO: 1174320 - RNA, 19 nt, Human
aaaaugcugggauuacagg

SEQ ID NO: 1174321 - RNA, 24 nt, Human
aaaaugcugggauuacagguguca

SEQ ID NO: 1174322 - RNA, 23 nt, Human
aaaccugcacagguacccuccgg

SEQ ID NO: 1174323 - RNA, 21 nt, Human
aaagccuuccuuacaaacacc

SEQ ID NO: 1174324 - RNA, 21 nt, Human
aaauaaaccacccacacccaa

SEQ ID NO: 1174325 - RNA, 19 nt, Human
aaauacaaaaagcaagccc

SEQ ID NO: 1174326 - RNA, 26 nt, Human
aaaugcugggauuacaggugucagcc

SEQ ID NO: 1174327 - RNA, 21 nt, Human
aaaugggaauaauaagaauau

SEQ ID NO: 1174328 - RNA, 20 nt, Human
aacaagcuuagcccaucagc

SEQ ID NO: 1174329 - RNA, 18 nt, Human
aacaguuuagaugucauc

SEQ ID NO: 1174330 - RNA, 23 nt, Human
aaccacccacacccaaguccuua

SEQ ID NO: 1174331 - RNA, 20 nt, Human
aacuccauagaaauucaacu

SEQ ID NO: 1174332 - RNA, 23 nt, Human
aacuccugaacccaagggauccu

SEQ ID NO: 1174333 - RNA, 19 nt, Human
aacugcauggcaggagccu

SEQ ID NO: 1174334 - RNA, 19 nt, Human
aacuuccucuucuucucug

SEQ ID NO: 1174335 - RNA, 25 nt, Human
aagugccuucuaaccacugaucuac

SEQ ID NO: 1174336 - RNA, 24 nt, Human
aagugcgguggcaugaucacagcu

SEQ ID NO: 1174337 - RNA, 21 nt, Human
aauagaaggguucugccugga

SEQ ID NO: 1174338 - RNA, 19 nt, Human
aauaucuacuuaaccucaa

SEQ ID NO: 1174339 - RNA, 26 nt, Human
aaucacuucccaaauaaaccacccac

SEQ ID NO: 1174340 - RNA, 24 nt, Human
aaugcaacugcccaaauuuuugcc

SEQ ID NO: 1174341 - RNA, 19 nt, Human
aauuaccugaggucagaga

SEQ ID NO: 1174342 - RNA, 27 nt, Human
acaaaaagcaagcccauggaugucaac

SEQ ID NO: 1174343 - RNA, 19 nt, Human
acaaacaccuccaguagau

SEQ ID NO: 1174344 - RNA, 24 nt, Human
acaaagauaaauuuacuucuuucc

SEQ ID NO: 1174345 - RNA, 23 nt, Human
acacauccaaauacaaaaagcaa

SEQ ID NO: 1174346 - RNA, 18 nt, Human
acagccucaggggaagac

SEQ ID NO: 1174347 - RNA, 18 nt, Human
acagcucacugcagccuc

SEQ ID NO: 1174348 - RNA, 20 nt, Human
acaguucuggauaacuuucc

SEQ ID NO: 1174349 - RNA, 19 nt, Human
acauuugcauuaugucuaa

SEQ ID NO: 1174350 - RNA, 18 nt, Human
accacccacacccaaguc

SEQ ID NO: 1174351 - RNA, 21 nt, Human
accacucacagccacaaaaug

SEQ ID NO: 1174352 - RNA, 23 nt, Human
accauguuggucaggcuggucuc

SEQ ID NO: 1174353 - RNA, 22 nt, Human
acccacucuuuugcccuuccca

SEQ ID NO: 1174354 - RNA, 23 nt, Human
accucagccucccaaauugcugg

SEQ ID NO: 1174355 - RNA, 20 nt, Human
accucagccucccaaguagc

SEQ ID NO: 1174356 - RNA, 19 nt, Human
accugcacagguacccucc

SEQ ID NO: 1174357 - RNA, 24 nt, Human
accuguugcccaggcuggaguuca

SEQ ID NO: 1174358 - RNA, 19 nt, Human
acgggguuuugauauguug

SEQ ID NO: 1174359 - RNA, 24 nt, Human
acgggguuuugauauguugcucag

SEQ ID NO: 1174360 - RNA, 18 nt, Human
acucugucacccaggcug

SEQ ID NO: 1174361 - RNA, 26 nt, Human
acucugucacccaggcuggaagugcg

SEQ ID NO: 1174362 - RNA, 22 nt, Human
acugcaaccuuccucuacuggg

SEQ ID NO: 1174363 - RNA, 21 nt, Human
agacaggcacucacaccuuca

SEQ ID NO: 1174364 - RNA, 20 nt, Human
agagaccuaccaccaggaua

SEQ ID NO: 1174365 - RNA, 22 nt, Human
agcacugagccagcaggaagga

SEQ ID NO: 1174366 - RNA, 23 nt, Human
agccccuucccaucuugucuuug

SEQ ID NO: 1174367 - RNA, 18 nt, Human
agccuccagaguagcugg

SEQ ID NO: 1174368 - RNA, 23 nt, Human
aggaggcugaggcaggaguauca

SEQ ID NO: 1174369 - RNA, 20 nt, Human
aggauuuugccugagcacaa

SEQ ID NO: 1174370 - RNA, 24 nt, Human
aggcaaucugcccaccuuggucuc

SEQ ID NO: 1174371 - RNA, 18 nt, Human
aggcaggaguaucauuug

SEQ ID NO: 1174372 - RNA, 24 nt, Human
aggcaggaguaucauuugaacccg

SEQ ID NO: 1174373 - RNA, 24 nt, Human
aggcaugguggcucaugccuguaa

SEQ ID NO: 1174374 - RNA, 18 nt, Human
aggcuaaacuuuuuucuu

SEQ ID NO: 1174375 - RNA, 22 nt, Human
aggcucaggugauccuccuacc

SEQ ID NO: 1174376 - RNA, 18 nt, Human
aggcugagauagcuccca

SEQ ID NO: 1174377 - RNA, 20 nt, Human
aggcugaggcaggaguauca

SEQ ID NO: 1174378 - RNA, 24 nt, Human
aggcugaggcaggaguaucauuug

SEQ ID NO: 1174379 - RNA, 24 nt, Human
agggacuacaggcaugagccacca

SEQ ID NO: 1174380 - RNA, 18 nt, Human
aggguuucaccauguugg

SEQ ID NO: 1174381 - RNA, 22 nt, Human
aggguuucaccauguuggucag

SEQ ID NO: 1174382 - RNA, 23 nt, Human
aguagcuggaauuauagacaugu

SEQ ID NO: 1174383 - RNA, 18 nt, Human
aguagcugggauuacagg

SEQ ID NO: 1174384 - RNA, 24 nt, Human
agugauucuccugccucagccucc

SEQ ID NO: 1174385 - RNA, 24 nt, Human
agugcgguggcaugaucacagcuc

SEQ ID NO: 1174386 - RNA, 24 nt, Human
aguggcaugaucucagcuuacugc

SEQ ID NO: 1174387 - RNA, 24 nt, Human
aguuauaaaugaagcuaacaaaua

SEQ ID NO: 1174388 - RNA, 21 nt, Human
aguugugggcauacauuugaa

SEQ ID NO: 1174389 - RNA, 23 nt, Human
aucauucaauaauaaucauaauc

SEQ ID NO: 1174390 - RNA, 24 nt, Human
aucucaccuguugcccaggcugga

SEQ ID NO: 1174391 - RNA, 18 nt, Human
aucucacucuuuccuuag

SEQ ID NO: 1174392 - RNA, 23 nt, Human
aucuuccuauguuguccaggcug

SEQ ID NO: 1174393 - RNA, 20 nt, Human
augucuccugccucauaagu

SEQ ID NO: 1174394 - RNA, 19 nt, Human
auguggggauaaaagaacc

SEQ ID NO: 1174395 - RNA, 20 nt, Human
auguugccaggcaugguggc

SEQ ID NO: 1174396 - RNA, 20 nt, Human
auguugcucaggcuggucuc

SEQ ID NO: 1174397 - RNA, 18 nt, Human
auucuccugccucagccu

SEQ ID NO: 1174398 - RNA, 21 nt, Human
auuuggagacagaaucucacc

SEQ ID NO: 1174399 - RNA, 25 nt, Human
caaaaugcugggauuacagguguca

SEQ ID NO: 1174400 - RNA, 20 nt, Human
caaaaugggaauaauaagaa

SEQ ID NO: 1174401 - RNA, 21 nt, Human
caaauaaaccacccacaccca

SEQ ID NO: 1174402 - RNA, 24 nt, Human
caaauugcugggaugacuggcaug

SEQ ID NO: 1174403 - RNA, 22 nt, Human
caacagcgcaagucacacgaaa

SEQ ID NO: 1174404 - RNA, 18 nt, Human
caacuccauagaaauuca

SEQ ID NO: 1174405 - RNA, 22 nt, Human
caagugauucuccugccucagc

SEQ ID NO: 1174406 - RNA, 27 nt, Human
caagugauucuccugccucagccucca

SEQ ID NO: 1174407 - RNA, 24 nt, Human
cacacaauacacccauguaauaaa

SEQ ID NO: 1174408 - RNA, 21 nt, Human
cacacccaaguccuuacucca

SEQ ID NO: 1174409 - RNA, 24 nt, Human
caccacaccuggcuaauuuuugua

SEQ ID NO: 1174410 - RNA, 21 nt, Human
caccauguuggucaggcuggu

SEQ ID NO: 1174411 - RNA, 24 nt, Human
caccauguuggucaggcuggucuc

SEQ ID NO: 1174412 - RNA, 23 nt, Human
cacccacucuuuugcccuuccca

SEQ ID NO: 1174413 - RNA, 24 nt, Human
cacccuauaaaagccuuccuuaca

SEQ ID NO: 1174414 - RNA, 21 nt, Human
caccuguugcccaggcuggag

SEQ ID NO: 1174415 - RNA, 23 nt, Human
caccuguugcccaggcuggaguu

SEQ ID NO: 1174416 - RNA, 18 nt, Human
cacucacagccacaaaau

SEQ ID NO: 1174417 - RNA, 19 nt, Human
cacucugucacccaggcug

SEQ ID NO: 1174418 - RNA, 24 nt, Human
cacucugucacccaggcuggaagu

SEQ ID NO: 1174419 - RNA, 21 nt, Human
cacuuaaaaaacacacuaaga

SEQ ID NO: 1174420 - RNA, 20 nt, Human
cacuugcagguuaacagccu

SEQ ID NO: 1174421 - RNA, 19 nt, Human
cagaaaaaacugcauggca

SEQ ID NO: 1174422 - RNA, 25 nt, Human
cagaagaugcuacugcaguuuguau

SEQ ID NO: 1174423 - RNA, 21 nt, Human
cagaaguugguuaaugggcac

SEQ ID NO: 1174424 - RNA, 23 nt, Human
cagaaucucaccuguugcccagg

SEQ ID NO: 1174425 - RNA, 21 nt, Human
cagauauguguuguuccuggu

SEQ ID NO: 1174426 - RNA, 21 nt, Human
cagcaucacacaauacaccca

SEQ ID NO: 1174427 - RNA, 25 nt, Human
cagccaccacucacagccacaaaau

SEQ ID NO: 1174428 - RNA, 20 nt, Human
cagcccagaagcacuugcag

SEQ ID NO: 1174429 - RNA, 19 nt, Human
cagccuccugaguagcugg

SEQ ID NO: 1174430 - RNA, 24 nt, Human
cagcuacucaggaggcugaggcag

SEQ ID NO: 1174431 - RNA, 23 nt, Human
cagcucacugcagccucuacauc

SEQ ID NO: 1174432 - RNA, 18 nt, Human
caguagauccuucaacca

SEQ ID NO: 1174433 - RNA, 19 nt, Human
caguggcaugaucucagcu

SEQ ID NO: 1174434 - RNA, 21 nt, Human
cauaacaagaugcaaacaaga

SEQ ID NO: 1174435 - RNA, 22 nt, Human
caugcaccacugucccagccug

SEQ ID NO: 1174436 - RNA, 20 nt, Human
caugggcagggccuggucca

SEQ ID NO: 1174437 - RNA, 21 nt, Human
ccaaaaugcugggauuacagg

SEQ ID NO: 1174438 - RNA, 21 nt, Human
ccaaaaugcugggauuacagg

SEQ ID NO: 1174439 - RNA, 24 nt, Human
ccaaaaugcugggauuacaggugu

SEQ ID NO: 1174440 - RNA, 21 nt, Human
ccaaauaaaccacccacaccc

SEQ ID NO: 1174441 - RNA, 23 nt, Human
ccaaauaaaccacccacacccaa

SEQ ID NO: 1174442 - RNA, 23 nt, Human
ccaaauacaaaaagcaagcccau

SEQ ID NO: 1174443 - RNA, 22 nt, Human
ccacaaggucaaagucaagugu

SEQ ID NO: 1174444 - RNA, 24 nt, Human
ccaccuuggucucccaaaaugcug

SEQ ID NO: 1174445 - RNA, 18 nt, Human
ccacgaagccauccaagc

SEQ ID NO: 1174446 - RNA, 19 nt, Human
ccagaguagcugggauuac

SEQ ID NO: 1174447 - RNA, 22 nt, Human
ccagaguagcugggauuacagg

SEQ ID NO: 1174448 - RNA, 23 nt, Human
ccagaguagcugggauuacaggu

SEQ ID NO: 1174449 - RNA, 24 nt, Human
ccagaguagcugggauuacaggug

SEQ ID NO: 1174450 - RNA, 20 nt, Human
ccaggguacagucaguggag

SEQ ID NO: 1174451 - RNA, 24 nt, Human
cccaaguagcagggacuacaggca

SEQ ID NO: 1174452 - RNA, 26 nt, Human
cccacacccaaguccuuacuccagcu

SEQ ID NO: 1174453 - RNA, 19 nt, Human
cccacauuugcauuauguc

SEQ ID NO: 1174454 - RNA, 21 nt, Human
cccacucuuuugcccuuccca

SEQ ID NO: 1174455 - RNA, 24 nt, Human
cccaggcuggaagugcgguggcau

SEQ ID NO: 1174456 - RNA, 19 nt, Human
cccaggcuggaguucagug

SEQ ID NO: 1174457 - RNA, 23 nt, Human
cccaggcuggaguucaguggcau

SEQ ID NO: 1174458 - RNA, 21 nt, Human
cccaucauuuguuugcuguug

SEQ ID NO: 1174459 - RNA, 21 nt, Human
cccaugguccacauuuuuauc

SEQ ID NO: 1174460 - RNA, 23 nt, Human
cccuagaaauauguauaauugcc

SEQ ID NO: 1174461 - RNA, 21 nt, Human
cccuaggccccaugcaagcuc

SEQ ID NO: 1174462 - RNA, 20 nt, Human
cccucuuucagccagcacug

SEQ ID NO: 1174463 - RNA, 23 nt, Human
cccugagugcccagcgugugccc

SEQ ID NO: 1174464 - RNA, 20 nt, Human
cccuuuucauccacccacuc

SEQ ID NO: 1174465 - RNA, 20 nt, Human
ccgcugaguauuagcugugu

SEQ ID NO: 1174466 - RNA, 18 nt, Human
ccuauaaaagccuuccuu

SEQ ID NO: 1174467 - RNA, 22 nt, Human
ccuauguuguccaggcuggucu

SEQ ID NO: 1174468 - RNA, 22 nt, Human
ccucauaaguaccacuggacaa

SEQ ID NO: 1174469 - RNA, 19 nt, Human
ccucccugcauucccuccu

SEQ ID NO: 1174470 - RNA, 24 nt, Human
ccuccugccucagccuccugagua

SEQ ID NO: 1174471 - RNA, 20 nt, Human
ccucuugcuuuuagucauuu

SEQ ID NO: 1174472 - RNA, 21 nt, Human
ccugagaucaacccuccaccu

SEQ ID NO: 1174473 - RNA, 19 nt, Human
ccugaguagcuggaauuau

SEQ ID NO: 1174474 - RNA, 19 nt, Human
ccugauccaugaaucucug

SEQ ID NO: 1174475 - RNA, 24 nt, Human
ccugccucagccuccagaguagcu

SEQ ID NO: 1174476 - RNA, 23 nt, Human
ccugccucagccuccugaguagc

SEQ ID NO: 1174477 - RNA, 21 nt, Human
ccuguaaucccagcuacucag

SEQ ID NO: 1174478 - RNA, 22 nt, Human
ccuguaaucccagcuacucagg

SEQ ID NO: 1174479 - RNA, 18 nt, Human
ccugucccucuuucagcc

SEQ ID NO: 1174480 - RNA, 20 nt, Human
cgccagggcccugagugccc

SEQ ID NO: 1174481 - RNA, 19 nt, Human
cgcuuugaaauggacccag

SEQ ID NO: 1174482 - RNA, 24 nt, Human
cgggguuuugauauguugcucagg

SEQ ID NO: 1174483 - RNA, 23 nt, Human
cuaaaaugaaaguugaaauucau

SEQ ID NO: 1174484 - RNA, 24 nt, Human
cuauaucaugucuccugccucaua

SEQ ID NO: 1174485 - RNA, 23 nt, Human
cucaaggccacaaaaaaucagaa

SEQ ID NO: 1174486 - RNA, 24 nt, Human
cucaagugaucugcccaccucagc

SEQ ID NO: 1174487 - RNA, 24 nt, Human
cucaccuguugcccaggcuggagu

SEQ ID NO: 1174488 - RNA, 21 nt, Human
cucagcaucacacaauacacc

SEQ ID NO: 1174489 - RNA, 24 nt, Human
cucagccuccagaguagcugggau

SEQ ID NO: 1174490 - RNA, 24 nt, Human
cucaggugauccuccuaccucagc

SEQ ID NO: 1174491 - RNA, 18 nt, Human
cucugcuucuagggauac

SEQ ID NO: 1174492 - RNA, 21 nt, Human
cucugcuucuagggauacagg

SEQ ID NO: 1174493 - RNA, 23 nt, Human
cugcccaccucagccucccaaau

SEQ ID NO: 1174494 - RNA, 23 nt, Human
cugccucagccuccugaguagcu

SEQ ID NO: 1174495 - RNA, 19 nt, Human
cuggaagugcgguggcaug

SEQ ID NO: 1174496 - RNA, 21 nt, Human
cuggacaaggucccuuuuaug

SEQ ID NO: 1174497 - RNA, 24 nt, Human
cuggaguucaguggcaugaucuca

SEQ ID NO: 1174498 - RNA, 22 nt, Human
cuggauaacuuuccggagccuc

SEQ ID NO: 1174499 - RNA, 18 nt, Human
cugugucaugucuucuca

SEQ ID NO: 1174500 - RNA, 24 nt, Human
cuuacaaacaccuccaguagaucc

SEQ ID NO: 1174501 - RNA, 20 nt, Human
cuuacugcaaccuuccucua

SEQ ID NO: 1174502 - RNA, 23 nt, Human
cuuagcucaaggccacaaaaaau

SEQ ID NO: 1174503 - RNA, 24 nt, Human
cuucuuggaaucacuucccaaaua

SEQ ID NO: 1174504 - RNA, 22 nt, Human
cuugccuggcucacucuuccca

SEQ ID NO: 1174505 - RNA, 18 nt, Human
cuuuaugccugugcaucc

SEQ ID NO: 1174506 - RNA, 22 nt, Human
gaagaggccaugcaggcucagg

SEQ ID NO: 1174507 - RNA, 23 nt, Human
gaagccccuucccaucuugucuu

SEQ ID NO: 1174508 - RNA, 18 nt, Human
gaaguagcaacuccauag

SEQ ID NO: 1174509 - RNA, 23 nt, Human
gaaguggagaacaaagauaagug

SEQ ID NO: 1174510 - RNA, 24 nt, Human
gaccuaccaccaggauaguucaaa

SEQ ID NO: 1174511 - RNA, 19 nt, Human
gacgggguuuugauauguu

SEQ ID NO: 1174512 - RNA, 21 nt, Human
gacuacaggcaugagccacca

SEQ ID NO: 1174513 - RNA, 23 nt, Human
gacucaagugaucugcccaccuc

SEQ ID NO: 1174514 - RNA, 25 nt, Human
gacucuugcuucuuggaaucacuuc

SEQ ID NO: 1174515 - RNA, 19 nt, Human
gagacagaaucucaccugu

SEQ ID NO: 1174516 - RNA, 20 nt, Human
gagacagaaucucaccuguu

SEQ ID NO: 1174517 - RNA, 19 nt, Human
gagagaccuaccaccagga

SEQ ID NO: 1174518 - RNA, 20 nt, Human
gagagggugagagcucuggg

SEQ ID NO: 1174519 - RNA, 22 nt, Human
gagcaacuggcaucaauaaaug

SEQ ID NO: 1174520 - RNA, 24 nt, Human
gagcucaggcaaucugcccaccuu

SEQ ID NO: 1174521 - RNA, 26 nt, Human
gaguagcugggauuacaggugcacac

SEQ ID NO: 1174522 - RNA, 18 nt, Human
gauuacaggugucagcca

SEQ ID NO: 1174523 - RNA, 21 nt, Human
gauuacaggugucagccacca

SEQ ID NO: 1174524 - RNA, 18 nt, Human
gccagcacugagccagca

SEQ ID NO: 1174525 - RNA, 22 nt, Human
gccaggcaugguggcucaugcc

SEQ ID NO: 1174526 - RNA, 19 nt, Human
gccccuucccaucuugucu

SEQ ID NO: 1174527 - RNA, 24 nt, Human
gccuggcuaauuuuuuuguauuuu

SEQ ID NO: 1174528 - RNA, 18 nt, Human
gccuggcucacucuuccc

SEQ ID NO: 1174529 - RNA, 20 nt, Human
gcugggauuacaggugucag

SEQ ID NO: 1174530 - RNA, 21 nt, Human
ggaaagauguggaauguccuc

SEQ ID NO: 1174531 - RNA, 19 nt, Human
ggacuacaggcaugagcca

SEQ ID NO: 1174532 - RNA, 22 nt, Human
ggauccuccugccucagccucc

SEQ ID NO: 1174533 - RNA, 22 nt, Human
ggcacaaaaauacaguuagaug

SEQ ID NO: 1174534 - RNA, 18 nt, Human
ggcagggccugguccaua

SEQ ID NO: 1174535 - RNA, 23 nt, Human
ggcucaggugauccuccuaccuc

SEQ ID NO: 1174536 - RNA, 23 nt, Human
gggacuacaggcaugagccacca

SEQ ID NO: 1174537 - RNA, 24 nt, Human
gggauccuccugccucagccuccu

SEQ ID NO: 1174538 - RNA, 23 nt, Human
gggguuuugauauguugcucagg

SEQ ID NO: 1174539 - RNA, 20 nt, Human
ggguucaagugauucuccug

SEQ ID NO: 1174540 - RNA, 21 nt, Human
ggguuucaccauguuggucag

SEQ ID NO: 1174541 - RNA, 22 nt, Human
ggguuucaccauguuggucagg

SEQ ID NO: 1174542 - RNA, 24 nt, Human
gguggcacaugccuguaaucccag

SEQ ID NO: 1174543 - RNA, 19 nt, Human
gguggcucaugccuguaau

SEQ ID NO: 1174544 - RNA, 18 nt, Human
guagcugggauuacaggu

SEQ ID NO: 1174545 - RNA, 24 nt, Human
guaggguuucaccauguuggucag

SEQ ID NO: 1174546 - RNA, 24 nt, Human
gugauccuccuaccucagccuccc

SEQ ID NO: 1174547 - RNA, 24 nt, Human
gugaucugcccaccucagccuccc

SEQ ID NO: 1174548 - RNA, 21 nt, Human
gugauucuccugccucagccu

SEQ ID NO: 1174549 - RNA, 22 nt, Human
gugccuccacacccagcuuaca

SEQ ID NO: 1174550 - RNA, 20 nt, Human
guggcaugaggaguuguggg

SEQ ID NO: 1174551 - RNA, 20 nt, Human
guggcccgcugaguauuagc

SEQ ID NO: 1174552 - RNA, 19 nt, Human
guguccuaauacauaugua

SEQ ID NO: 1174553 - RNA, 19 nt, Human
guuguuccuggugcucucc

SEQ ID NO: 1174554 - RNA, 21 nt, Human
guuugaggugauggauaugca

SEQ ID NO: 1174555 - RNA, 18 nt, Human
uaaaaauaaaagggccua

SEQ ID NO: 1174556 - RNA, 22 nt, Human
uaaaagaaccaacacggaugca

SEQ ID NO: 1174557 - RNA, 26 nt, Human
uaaaagccuuccuuacaaacaccucc

SEQ ID NO: 1174558 - RNA, 21 nt, Human
uaaaccacccacacccaaguc

SEQ ID NO: 1174559 - RNA, 22 nt, Human
uaaaccacccacacccaagucc

SEQ ID NO: 1174560 - RNA, 19 nt, Human
uaaagggagagccgauccu

SEQ ID NO: 1174561 - RNA, 23 nt, Human
uaaaguagcuucaaagcccauuu

SEQ ID NO: 1174562 - RNA, 25 nt, Human
uaaauacuuucacuuaaaaaacaca

SEQ ID NO: 1174563 - RNA, 25 nt, Human
uaaugcaguucucucccaauuguuu

SEQ ID NO: 1174564 - RNA, 20 nt, Human
uaauuggcugauucauucag

SEQ ID NO: 1174565 - RNA, 22 nt, Human
uaauuuuuguauuuuuuguaga

SEQ ID NO: 1174566 - RNA, 24 nt, Human
uaauuuuuguauuuuuuguagaga

SEQ ID NO: 1174567 - RNA, 21 nt, Human
uacaaaaagcaagcccaugga

SEQ ID NO: 1174568 - RNA, 22 nt, Human
uacaaacaccuccaguagaucc

SEQ ID NO: 1174569 - RNA, 25 nt, Human
uacaaagcaguauuucaccagaaga

SEQ ID NO: 1174570 - RNA, 23 nt, Human
uacagcccagaagcacuugcagg

SEQ ID NO: 1174571 - RNA, 22 nt, Human
uacaggcaugagccaccacacc

SEQ ID NO: 1174572 - RNA, 19 nt, Human
uacaggugucagccaccac

SEQ ID NO: 1174573 - RNA, 21 nt, Human
uacauagacaaaaugaaacaa

SEQ ID NO: 1174574 - RNA, 21 nt, Human
uaccccaaaucucagcaucac

SEQ ID NO: 1174575 - RNA, 23 nt, Human
uaccccaaaucucagcaucacac

SEQ ID NO: 1174576 - RNA, 23 nt, Human
uaccucagccucccaaguagcag

SEQ ID NO: 1174577 - RNA, 24 nt, Human
uacuggguucaagugauucuccug

SEQ ID NO: 1174578 - RNA, 23 nt, Human
uacuuuuuuuggaaauaggguga

SEQ ID NO: 1174579 - RNA, 20 nt, Human
uagaauucucugauuucuug

SEQ ID NO: 1174580 - RNA, 18 nt, Human
uagcagggacuacaggca

SEQ ID NO: 1174581 - RNA, 26 nt, Human
uagcucccauggccaggguuccuucc

SEQ ID NO: 1174582 - RNA, 22 nt, Human
uagcuucaaagcccauuugcaa

SEQ ID NO: 1174583 - RNA, 23 nt, Human
uaggguuccucuugcccagauug

SEQ ID NO: 1174584 - RNA, 24 nt, Human
uaggguuucaccauguuggucagg

SEQ ID NO: 1174585 - RNA, 25 nt, Human
uauaaaagccuuccuuacaaacacc

SEQ ID NO: 1174586 - RNA, 26 nt, Human
uauauaguauauaacuauauagugau

SEQ ID NO: 1174587 - RNA, 23 nt, Human
uaucacaacagcgcaagucacac

SEQ ID NO: 1174588 - RNA, 19 nt, Human
uaucaugucuccugccuca

SEQ ID NO: 1174589 - RNA, 24 nt, Human
uauguguuguuccuggugcucucc

SEQ ID NO: 1174590 - RNA, 24 nt, Human
uauguucccugcaccacuggugcc

SEQ ID NO: 1174591 - RNA, 18 nt, Human
uauguugcucaggcuggu

SEQ ID NO: 1174592 - RNA, 23 nt, Human
uauguugcucaggcuggucucaa

SEQ ID NO: 1174593 - RNA, 24 nt, Human
uauguugcucaggcuggucucaaa

SEQ ID NO: 1174594 - RNA, 24 nt, Human
uauguuguccaggcuggucuuaaa

SEQ ID NO: 1174595 - RNA, 22 nt, Human
uauuuggagacagaaucucacc

SEQ ID NO: 1174596 - RNA, 24 nt, Human
uauuuggagacagaaucucaccug

SEQ ID NO: 1174597 - RNA, 23 nt, Human
ucaaaauacauaugaguacaauc

SEQ ID NO: 1174598 - RNA, 23 nt, Human
ucaaagcccauuugcaaauagau

SEQ ID NO: 1174599 - RNA, 21 nt, Human
ucaaagucaaguguagaauuc

SEQ ID NO: 1174600 - RNA, 19 nt, Human
ucaagugauucuccugccu

SEQ ID NO: 1174601 - RNA, 19 nt, Human
ucacacaaaauuuuuugcu

SEQ ID NO: 1174602 - RNA, 23 nt, Human
ucacccuauaaaagccuuccuua

SEQ ID NO: 1174603 - RNA, 19 nt, Human
ucacugcagccucuacauc

SEQ ID NO: 1174604 - RNA, 25 nt, Human
ucacugcagccucuacaucuccagg

SEQ ID NO: 1174605 - RNA, 25 nt, Human
ucagacacauaauuaucaagucaaa

SEQ ID NO: 1174606 - RNA, 22 nt, Human
ucagcaaguggcccgcugagua

SEQ ID NO: 1174607 - RNA, 23 nt, Human
ucagcaaguggcccgcugaguau

SEQ ID NO: 1174608 - RNA, 22 nt, Human
ucagccuccugaguagcuggaa

SEQ ID NO: 1174609 - RNA, 23 nt, Human
ucagcucaccuuucauucagucu

SEQ ID NO: 1174610 - RNA, 19 nt, Human
ucauauccagcuucccaaa

SEQ ID NO: 1174611 - RNA, 21 nt, Human
uccacaauucucaccccuuca

SEQ ID NO: 1174612 - RNA, 24 nt, Human
uccagaguagcugggauuacaggu

SEQ ID NO: 1174613 - RNA, 20 nt, Human
uccaggcucaggugauccuc

SEQ ID NO: 1174614 - RNA, 25 nt, Human
uccaguagauccuucaaccacuuuc

SEQ ID NO: 1174615 - RNA, 23 nt, Human
ucccaaaaugcugggauuacagg

SEQ ID NO: 1174616 - RNA, 22 nt, Human
ucccaaauaaaccacccacacc

SEQ ID NO: 1174617 - RNA, 27 nt, Human
ucccaaauaaaccacccacacccaagu

SEQ ID NO: 1174618 - RNA, 24 nt, Human
ucccaaauugcugggaugacuggc

SEQ ID NO: 1174619 - RNA, 24 nt, Human
ucccaaguagcagggacuacaggc

SEQ ID NO: 1174620 - RNA, 23 nt, Human
ucccucaucuacaaaaugggaau

SEQ ID NO: 1174621 - RNA, 25 nt, Human
ucccugcaccacuggugccuaucuc

SEQ ID NO: 1174622 - RNA, 19 nt, Human
ucccuugugcugccagcaa

SEQ ID NO: 1174623 - RNA, 27 nt, Human
uccuccuaccucagccucccaaguagc

SEQ ID NO: 1174624 - RNA, 21 nt, Human
uccugaacccaagggauccuc

SEQ ID NO: 1174625 - RNA, 24 nt, Human
ucuacuggguucaagugauucucc

SEQ ID NO: 1174626 - RNA, 23 nt, Human
ucucaaacuccugagcucaggca

SEQ ID NO: 1174627 - RNA, 21 nt, Human
ucucaccuguugcccaggcug

SEQ ID NO: 1174628 - RNA, 22 nt, Human
ucucaccuguugcccaggcugg

SEQ ID NO: 1174629 - RNA, 23 nt, Human
ucucaccuguugcccaggcugga

SEQ ID NO: 1174630 - RNA, 23 nt, Human
ucucacucugucacccaggcugg

SEQ ID NO: 1174631 - RNA, 24 nt, Human
ucucacucugucacccaggcugga

SEQ ID NO: 1174632 - RNA, 22 nt, Human
ucuccaggcucaggugauccuc

SEQ ID NO: 1174633 - RNA, 25 nt, Human
ucuccaggcucaggugauccuccua

SEQ ID NO: 1174634 - RNA, 24 nt, Human
ucuccugccucagccuccagagua

SEQ ID NO: 1174635 - RNA, 18 nt, Human
ucucugauuucuuggugc

SEQ ID NO: 1174636 - RNA, 21 nt, Human
ucugcagucccuacucuaagc

SEQ ID NO: 1174637 - RNA, 21 nt, Human
ucugcccaccucagccuccca

SEQ ID NO: 1174638 - RNA, 21 nt, Human
ucugcccaccuuggucuccca

SEQ ID NO: 1174639 - RNA, 25 nt, Human
ucugucacccaggcuggaagugcgg

SEQ ID NO: 1174640 - RNA, 19 nt, Human
ucugugaagaccuguaccc

SEQ ID NO: 1174641 - RNA, 26 nt, Human
ucuuauauucacauauguauuggugu

SEQ ID NO: 1174642 - RNA, 19 nt, Human
ucuuccuauguuguccagg

SEQ ID NO: 1174643 - RNA, 21 nt, Human
ucuuccuauguuguccaggcu

SEQ ID NO: 1174644 - RNA, 23 nt, Human
ucuuccuauguuguccaggcugg

SEQ ID NO: 1174645 - RNA, 24 nt, Human
ucuuccuauguuguccaggcuggu

SEQ ID NO: 1174646 - RNA, 23 nt, Human
ucuucuucucugagauuucuaga

SEQ ID NO: 1174647 - RNA, 18 nt, Human
ugaaaagagcuugugaaa

SEQ ID NO: 1174648 - RNA, 22 nt, Human
ugaaaggaaugacauugagaug

SEQ ID NO: 1174649 - RNA, 21 nt, Human
ugaaaguuccagauaugaaga

SEQ ID NO: 1174650 - RNA, 21 nt, Human
ugaaauggacccagggaagag

SEQ ID NO: 1174651 - RNA, 19 nt, Human
ugaacccgggagugauaua

SEQ ID NO: 1174652 - RNA, 20 nt, Human
ugaagaccuguacccucagu

SEQ ID NO: 1174653 - RNA, 21 nt, Human
ugacauugagauguauuuuca

SEQ ID NO: 1174654 - RNA, 24 nt, Human
ugaccugcucuccuaagaaauuca

SEQ ID NO: 1174655 - RNA, 19 nt, Human
ugacucaaagaaagauucu

SEQ ID NO: 1174656 - RNA, 19 nt, Human
ugacuucauauccagcuuc

SEQ ID NO: 1174657 - RNA, 24 nt, Human
ugagaagcuuugcguaccccugug

SEQ ID NO: 1174658 - RNA, 24 nt, Human
ugagagugaaaaauuaccugaggu

SEQ ID NO: 1174659 - RNA, 18 nt, Human
ugagauauccacagaacu

SEQ ID NO: 1174660 - RNA, 20 nt, Human
ugagaucaacccuccaccuc

SEQ ID NO: 1174661 - RNA, 21 nt, Human
ugagaucaacccuccaccucu

SEQ ID NO: 1174662 - RNA, 20 nt, Human
ugagauuucuagacaguaac

SEQ ID NO: 1174663 - RNA, 24 nt, Human
ugagcacaaauacagcccagaagc

SEQ ID NO: 1174664 - RNA, 24 nt, Human
ugagccagcaggaaggaucucaca

SEQ ID NO: 1174665 - RNA, 20 nt, Human
ugaggcaggaguaucauuug

SEQ ID NO: 1174666 - RNA, 24 nt, Human
ugaggcaggaguaucauuugaacc

SEQ ID NO: 1174667 - RNA, 25 nt, Human
ugaggcaggaguaucauuugaaccc

SEQ ID NO: 1174668 - RNA, 28 nt, Human
ugaggcaggaguaucauuugaacccccu

SEQ ID NO: 1174669 - RNA, 21 nt, Human
ugagucaagugccuucuaacc

SEQ ID NO: 1174670 - RNA, 24 nt, Human
ugaucugcccaccucagccuccca

SEQ ID NO: 1174671 - RNA, 19 nt, Human
ugauuugaucacuacacag

SEQ ID NO: 1174672 - RNA, 19 nt, Human
ugcaaaaagagauuggaaa

SEQ ID NO: 1174673 - RNA, 19 nt, Human
ugcaauggcaguuaaugcc

SEQ ID NO: 1174674 - RNA, 18 nt, Human
ugcaccacugucccagcc

SEQ ID NO: 1174675 - RNA, 18 nt, Human
ugcaugggcagggccugg

SEQ ID NO: 1174676 - RNA, 19 nt, Human
ugccauucaauuucugcag

SEQ ID NO: 1174677 - RNA, 19 nt, Human
ugccauucaauuucugcag

SEQ ID NO: 1174678 - RNA, 22 nt, Human
ugcccaccuuggucucccaaaa

SEQ ID NO: 1174679 - RNA, 21 nt, Human
ugcccaggcuggaguucagug

SEQ ID NO: 1174680 - RNA, 24 nt, Human
ugcccaggcuggaguucaguggca

SEQ ID NO: 1174681 - RNA, 24 nt, Human
ugccucagccuccagaguagcugg

SEQ ID NO: 1174682 - RNA, 24 nt, Human
ugccucagccuccugaguagcugg

SEQ ID NO: 1174683 - RNA, 19 nt, Human
ugccugagcacaaauacag

SEQ ID NO: 1174684 - RNA, 28 nt, Human
ugccugagcacaaauacagcccagaagc

SEQ ID NO: 1174685 - RNA, 21 nt, Human
ugccugauccaugaaucucug

SEQ ID NO: 1174686 - RNA, 20 nt, Human
ugccuggauuugcauguggg

SEQ ID NO: 1174687 - RNA, 24 nt, Human
ugccuguaaucccagcuacucagg

SEQ ID NO: 1174688 - RNA, 24 nt, Human
ugcucaggcuggucucaaacucuu

SEQ ID NO: 1174689 - RNA, 21 nt, Human
ugcucuccugucccucuuuca

SEQ ID NO: 1174690 - RNA, 18 nt, Human
ugcugggaugacuggcau

SEQ ID NO: 1174691 - RNA, 20 nt, Human
ugcugggauuacagguguca

SEQ ID NO: 1174692 - RNA, 21 nt, Human
uggaaggaacagaagaauuuc

SEQ ID NO: 1174693 - RNA, 24 nt, Human
uggaauuauagacaugugccucca

SEQ ID NO: 1174694 - RNA, 19 nt, Human
uggacaagcacaguuugcg

SEQ ID NO: 1174695 - RNA, 21 nt, Human
uggacaagcacaguuugcgcu

SEQ ID NO: 1174696 - RNA, 18 nt, Human
uggacucaagugaucugc

SEQ ID NO: 1174697 - RNA, 22 nt, Human
uggacucaagugaucugcccac

SEQ ID NO: 1174698 - RNA, 19 nt, Human
uggaguucaguggcaugau

SEQ ID NO: 1174699 - RNA, 19 nt, Human
uggaguucaguggcaugau

SEQ ID NO: 1174700 - RNA, 23 nt, Human
uggaucuuccuauguuguccagg

SEQ ID NO: 1174701 - RNA, 21 nt, Human
uggcacaugccuguaauccca

SEQ ID NO: 1174702 - RNA, 22 nt, Human
uggcacaugccuguaaucccag

SEQ ID NO: 1174703 - RNA, 20 nt, Human
uggcaggagccucaauagca

SEQ ID NO: 1174704 - RNA, 23 nt, Human
uggcaugaucacagcucacugca

SEQ ID NO: 1174705 - RNA, 24 nt, Human
uggcaugaucucagcuuacugcaa

SEQ ID NO: 1174706 - RNA, 22 nt, Human
ugggacagggucucacucuguc

SEQ ID NO: 1174707 - RNA, 21 nt, Human
ugggagagcauuaggcugaga

SEQ ID NO: 1174708 - RNA, 21 nt, Human
ugggauuacaggugcacacca

SEQ ID NO: 1174709 - RNA, 19 nt, Human
ugggauuacaggugcacca

SEQ ID NO: 1174710 - RNA, 18 nt, Human
ugggauuacaggugucag

SEQ ID NO: 1174711 - RNA, 19 nt, Human
ugggauuacaggugucagc

SEQ ID NO: 1174712 - RNA, 22 nt, Human
ugggauuacaggugucagccac

SEQ ID NO: 1174713 - RNA, 24 nt, Human
ugggauuacaggugucagccacca

SEQ ID NO: 1174714 - RNA, 23 nt, Human
uggguucaagugauucuccugcc

SEQ ID NO: 1174715 - RNA, 24 nt, Human
uggguucaagugauucuccugccu

SEQ ID NO: 1174716 - RNA, 24 nt, Human
uggucaggcuggucucaaacuccu

SEQ ID NO: 1174717 - RNA, 24 nt, Human
ugguggcacaugccuguaauccca

SEQ ID NO: 1174718 - RNA, 18 nt, Human
ugguggcucaugccugua

SEQ ID NO: 1174719 - RNA, 23 nt, Human
ugguguccuaauacauauguaug

SEQ ID NO: 1174720 - RNA, 24 nt, Human
uguagagacgggguuuugauaugu

SEQ ID NO: 1174721 - RNA, 24 nt, Human
uguccaggcuggucuuaaacuccu

SEQ ID NO: 1174722 - RNA, 23 nt, Human
uguucuauucuccuacuucgaua

SEQ ID NO: 1174723 - RNA, 24 nt, Human
uguugccaggcaugguggcucaug

SEQ ID NO: 1174724 - RNA, 20 nt, Human
uguugcucaggcuggucuca

SEQ ID NO: 1174725 - RNA, 18 nt, Human
uuaaaguagcuucaaagc

SEQ ID NO: 1174726 - RNA, 22 nt, Human
uuaaaguagcuucaaagcccau

SEQ ID NO: 1174727 - RNA, 24 nt, Human
uuacugcaaccuuccucuacuggg

SEQ ID NO: 1174728 - RNA, 22 nt, Human
uuagaccauugagcacuuuugu

SEQ ID NO: 1174729 - RNA, 18 nt, Human
uuagcccaucagcaagug

SEQ ID NO: 1174730 - RNA, 22 nt, Human
uuaggcugagauagcucccaug

SEQ ID NO: 1174731 - RNA, 18 nt, Human
uuaguaggguuucaccau

SEQ ID NO: 1174732 - RNA, 20 nt, Human
uucaaaaugacuacaggaaa

SEQ ID NO: 1174733 - RNA, 21 nt, Human
uucaagugauucuccugccuc

SEQ ID NO: 1174734 - RNA, 23 nt, Human
uucaagugauucuccugccucag

SEQ ID NO: 1174735 - RNA, 24 nt, Human
uucaagugauucuccugccucagc

SEQ ID NO: 1174736 - RNA, 27 nt, Human
uucauucauaccccaaaucucagcauc

SEQ ID NO: 1174737 - RNA, 24 nt, Human
uucccugggucccuuuuccuuagc

SEQ ID NO: 1174738 - RNA, 21 nt, Human
uugcugggaugacuggcaugc

SEQ ID NO: 1174739 - RNA, 24 nt, Human
uuggagacagaaucucaccuguug

SEQ ID NO: 1174740 - RNA, 19 nt, Human
uuggcuuuucuuucuugcc

SEQ ID NO: 1174741 - RNA, 22 nt, Human
uuguagagacgggguuuugaua

SEQ ID NO: 1174742 - RNA, 24 nt, Human
uuguagagacgggguuuugauaug

SEQ ID NO: 1174743 - RNA, 18 nt, Human
uuuaguaggguuucacca

SEQ ID NO: 1174744 - RNA, 19 nt, Human
uuucaccagaagaugcuac

SEQ ID NO: 1174745 - RNA, 24 nt, Human
uuucaccauguuggucaggcuggu

SEQ ID NO: 1174746 - RNA, 20 nt, Human
uuucugcccuagggcaucuc

SEQ ID NO: 1174747 - RNA, 20 nt, Human
uuuguagagacgggguuuug

SEQ ID NO: 1174748 - RNA, 24 nt, Human
uuuguagagacgggguuuugauau

SEQ ID NO: 1174749 - RNA, 18 nt, Human
uuuucacauugcuaaguu

SEQ ID NO: 1174750 - RNA, 21 nt, Human
uuuucugcaagucacacaaaa

SEQ ID NO: 1174751 - RNA, 23 nt, Human
uuuugauauguugcucaggcugg

SEQ ID NO: 1174752 - RNA, 20 nt, Human
uuuuuguauuuuuuguagag

SEQ ID NO: 1174753 - RNA, 23 nt, Human
uuuuuguauuuuuuguagagacg

SEQ ID NO: 1174754 - RNA, 21 nt, Human
uuuuuuguagagacgggguuu

SEQ ID NO: 1174755 - RNA, 18 nt, Human
uuuuuuguauuuuuagua

SEQ ID NO: 1174756 - RNA, 19 nt, Human
uuuuuuguauuuuuaguag

SEQ ID NO: 1174757 - RNA, 19 nt, Human
aaaaugacuuucuguaaca

SEQ ID NO: 1174758 - RNA, 20 nt, Human
aaaugcuaaaguaacaguag

SEQ ID NO: 1174759 - RNA, 24 nt, Human
aagaaaaagauaagugcaucacaa

SEQ ID NO: 1174760 - RNA, 20 nt, Human
aaucauuugcuucugauuca

SEQ ID NO: 1174761 - RNA, 21 nt, Human
acaccaaggcccaaaucaaca

SEQ ID NO: 1174762 - RNA, 26 nt, Human
acaccaaggcccaaaucaacaagaaa

SEQ ID NO: 1174763 - RNA, 19 nt, Human
acgcuccccagauggagga

SEQ ID NO: 1174764 - RNA, 23 nt, Human
acuggguacauacacucaaccau

SEQ ID NO: 1174765 - RNA, 25 nt, Human
agaaaaagauaagugcaucacaaaa

SEQ ID NO: 1174766 - RNA, 24 nt, Human
agacaaaaaaggaacauaaaauga

SEQ ID NO: 1174767 - RNA, 21 nt, Human
agacgcuccccagauggagga

SEQ ID NO: 1174768 - RNA, 18 nt, Human
agauggaggagguggggu

SEQ ID NO: 1174769 - RNA, 19 nt, Human
agcagccagaggaggcaga

SEQ ID NO: 1174770 - RNA, 19 nt, Human
aggaucaacuauugaaaau

SEQ ID NO: 1174771 - RNA, 21 nt, Human
aggcccccgcagacgcucccc

SEQ ID NO: 1174772 - RNA, 19 nt, Human
auaagaauaaauuuuaaaa

SEQ ID NO: 1174773 - RNA, 26 nt, Human
caacacugaaaaguugaaaaggaaaa

SEQ ID NO: 1174774 - RNA, 18 nt, Human
caauaagcacaaaaacau

SEQ ID NO: 1174775 - RNA, 19 nt, Human
cacaauagcacuaaagaga

SEQ ID NO: 1174776 - RNA, 18 nt, Human
cacaccaaggcccaaauc

SEQ ID NO: 1174777 - RNA, 21 nt, Human
cacaccaaggcccaaaucaac

SEQ ID NO: 1174778 - RNA, 23 nt, Human
cacaccaaggcccaaaucaacaa

SEQ ID NO: 1174779 - RNA, 21 nt, Human
caccaaggcccaaaucaacaa

SEQ ID NO: 1174780 - RNA, 24 nt, Human
cagccgccgccgccgccgccgccc

SEQ ID NO: 1174781 - RNA, 23 nt, Human
cagcuuuaccagaguaaagaagu

SEQ ID NO: 1174782 - RNA, 20 nt, Human
caggcccccgcagacgcucc

SEQ ID NO: 1174783 - RNA, 24 nt, Human
cagguaaauauacuucacaccaag

SEQ ID NO: 1174784 - RNA, 19 nt, Human
caucacaaaacaacuaacc

SEQ ID NO: 1174785 - RNA, 22 nt, Human
ccacacaguggcacucuuaaaa

SEQ ID NO: 1174786 - RNA, 18 nt, Human
ccagaguaaagaagugca

SEQ ID NO: 1174787 - RNA, 20 nt, Human
ccccagauggaggagguggg

SEQ ID NO: 1174788 - RNA, 22 nt, Human
cccgcagacgcuccccagaugg

SEQ ID NO: 1174789 - RNA, 19 nt, Human
ccgccgccgccccucaggc

SEQ ID NO: 1174790 - RNA, 21 nt, Human
ccgccgccgccccucaggccc

SEQ ID NO: 1174791 - RNA, 21 nt, Human
ccgccgccgccgccgccccuc

SEQ ID NO: 1174792 - RNA, 18 nt, Human
ccgccgccgccgccgccg

SEQ ID NO: 1174793 - RNA, 24 nt, Human
ccuccuuaacggaaaggugaggac

SEQ ID NO: 1174794 - RNA, 20 nt, Human
cgcacaacauuaaccaugaa

SEQ ID NO: 1174795 - RNA, 22 nt, Human
cgcacaacauuaaccaugaaau

SEQ ID NO: 1174796 - RNA, 22 nt, Human
cgccgccgccccucaggccccc

SEQ ID NO: 1174797 - RNA, 27 nt, Human
cucaggcccccgcagacgcuccccaga

SEQ ID NO: 1174798 - RNA, 26 nt, Human
cucuuccaagugcaaacccuuucaaa

SEQ ID NO: 1174799 - RNA, 19 nt, Human
cuguaaaccucugcauuuc

SEQ ID NO: 1174800 - RNA, 20 nt, Human
gaaagggaaaauucccacag

SEQ ID NO: 1174801 - RNA, 22 nt, Human
gacaaaaaaggaacauaaaaug

SEQ ID NO: 1174802 - RNA, 20 nt, Human
gauagugcuaaaugcuaaag

SEQ ID NO: 1174803 - RNA, 22 nt, Human
gcacuaaagagaaaaagguacc

SEQ ID NO: 1174804 - RNA, 21 nt, Human
gcagccagaggaggcagagga

SEQ ID NO: 1174805 - RNA, 22 nt, Human
gccgccgccgccgccgccgccc

SEQ ID NO: 1174806 - RNA, 23 nt, Human
ggagccuggacugaaaggggcuu

SEQ ID NO: 1174807 - RNA, 21 nt, Human
gguaggaggagggagcugcgg

SEQ ID NO: 1174808 - RNA, 22 nt, Human
uaaccacuugaaaaaaaaaucc

SEQ ID NO: 1174809 - RNA, 21 nt, Human
uacacucaaccauuuauauca

SEQ ID NO: 1174810 - RNA, 22 nt, Human
uacgcacaacauuaaccaugaa

SEQ ID NO: 1174811 - RNA, 23 nt, Human
uauaagaauaaauuuuaaaauug

SEQ ID NO: 1174812 - RNA, 21 nt, Human
uauacuucacaccaaggcccu

SEQ ID NO: 1174813 - RNA, 20 nt, Human
ucacaauaagcacaaaaaca

SEQ ID NO: 1174814 - RNA, 19 nt, Human
ucagaaacacagaaaggca

SEQ ID NO: 1174815 - RNA, 20 nt, Human
ucagaaacacagaaaggcau

SEQ ID NO: 1174816 - RNA, 19 nt, Human
ucauuugcuucugauucag

SEQ ID NO: 1174817 - RNA, 21 nt, Human
uccccagauggaggagguggg

SEQ ID NO: 1174818 - RNA, 24 nt, Human
ucgcagccgccgccgccgccgccg

SEQ ID NO: 1174819 - RNA, 22 nt, Human
ucugcuaugacaugagucacuc

SEQ ID NO: 1174820 - RNA, 19 nt, Human
ucuguaaaccucugcauuu

SEQ ID NO: 1174821 - RNA, 25 nt, Human
ugaaaaaaaaauccacacaguggca

SEQ ID NO: 1174822 - RNA, 21 nt, Human
ugaaaaggaaaacauauagca

SEQ ID NO: 1174823 - RNA, 18 nt, Human
ugaaacuuuaagcuuucu

SEQ ID NO: 1174824 - RNA, 23 nt, Human
ugagaaguagaaaaaaauagcaa

SEQ ID NO: 1174825 - RNA, 22 nt, Human
ugaugcugucaaaugagcuuuu

SEQ ID NO: 1174826 - RNA, 22 nt, Human
ugcaaacccuuucaaaaaggug

SEQ ID NO: 1174827 - RNA, 19 nt, Human
uggaggaggugggguagga

SEQ ID NO: 1174828 - RNA, 19 nt, Human
ugggguaggaggagggagc

SEQ ID NO: 1174829 - RNA, 19 nt, Human
uggguacauacacucaacc

SEQ ID NO: 1174830 - RNA, 24 nt, Human
uuaagauaccaaaaggucaaaacc

SEQ ID NO: 1174831 - RNA, 25 nt, Human
uuaagauaccaaaaggucaaaacca

SEQ ID NO: 1174832 - RNA, 21 nt, Human
uuacauuguuccuugcuuaaa

SEQ ID NO: 1174833 - RNA, 22 nt, Human
uucuaugauagugcuaaaugcu

SEQ ID NO: 1174834 - RNA, 24 nt, Human
aaacucaguuugcaaauuuccugc

SEQ ID NO: 1174835 - RNA, 23 nt, Human
aaagauccucuguuggccucuga

SEQ ID NO: 1174836 - RNA, 20 nt, Human
aaccagagacucucugccuc

SEQ ID NO: 1174837 - RNA, 19 nt, Human
aaugacaggaaaccagaga

SEQ ID NO: 1174838 - RNA, 20 nt, Human
acaggcaaaggcccagcaca

SEQ ID NO: 1174839 - RNA, 24 nt, Human
accaaagccacagggacacaacug

SEQ ID NO: 1174840 - RNA, 21 nt, Human
acccgaggcagcccauacccc

SEQ ID NO: 1174841 - RNA, 21 nt, Human
acccucugcugauccuaacuu

SEQ ID NO: 1174842 - RNA, 21 nt, Human
agcacaauggccggaggcccu

SEQ ID NO: 1174843 - RNA, 22 nt, Human
agccccacuuacccugucugac

SEQ ID NO: 1174844 - RNA, 24 nt, Human
aggaaaccagagacucucugccuc

SEQ ID NO: 1174845 - RNA, 18 nt, Human
aggcgcaccaaagccaca

SEQ ID NO: 1174846 - RNA, 20 nt, Human
agguagcccaguggcuggga

SEQ ID NO: 1174847 - RNA, 22 nt, Human
aucuccacccccaccuccccag

SEQ ID NO: 1174848 - RNA, 19 nt, Human
aucugccagggcccuccuc

SEQ ID NO: 1174849 - RNA, 23 nt, Human
caacccgaggcagcccauacccc

SEQ ID NO: 1174850 - RNA, 19 nt, Human
cacacaggcgcaccaaagc

SEQ ID NO: 1174851 - RNA, 21 nt, Human
caccuccccagccagaggccc

SEQ ID NO: 1174852 - RNA, 21 nt, Human
cagcccauaccccagaaacag

SEQ ID NO: 1174853 - RNA, 24 nt, Human
cagcccauaccccagaaacagccu

SEQ ID NO: 1174854 - RNA, 20 nt, Human
cagccccguuagagagaaga

SEQ ID NO: 1174855 - RNA, 21 nt, Human
cagccugucagaaguugccag

SEQ ID NO: 1174856 - RNA, 19 nt, Human
caggagguagcccaguggc

SEQ ID NO: 1174857 - RNA, 20 nt, Human
cagugcacacuggcaucucu

SEQ ID NO: 1174858 - RNA, 20 nt, Human
cagugcacacuggcaucucu

SEQ ID NO: 1174859 - RNA, 24 nt, Human
cauccaggauccgguccugggcac

SEQ ID NO: 1174860 - RNA, 19 nt, Human
ccaaagccacagggacaca

SEQ ID NO: 1174861 - RNA, 25 nt, Human
ccacccccaccuccccagccagagg

SEQ ID NO: 1174862 - RNA, 29 nt, Human
ccagagacucucugccucagagacuacag

SEQ ID NO: 1174863 - RNA, 22 nt, Human
ccagggcccuccucuacccucu

SEQ ID NO: 1174864 - RNA, 20 nt, Human
ccccacaucugccagggccc

SEQ ID NO: 1174865 - RNA, 23 nt, Human
cccucgcacccacaccugucuca

SEQ ID NO: 1174866 - RNA, 19 nt, Human
cccuguagucucccuucca

SEQ ID NO: 1174867 - RNA, 18 nt, Human
cccuuccagcuuuguccc

SEQ ID NO: 1174868 - RNA, 21 nt, Human
ccuacuggaucuccaccccca

SEQ ID NO: 1174869 - RNA, 20 nt, Human
ccuggggcuucagugcacac

SEQ ID NO: 1174870 - RNA, 22 nt, Human
ccuucuuuccuuucuccuuccc

SEQ ID NO: 1174871 - RNA, 24 nt, Human
cgaggcagcccauaccccagaaac

SEQ ID NO: 1174872 - RNA, 22 nt, Human
cgcaccaaagccacagggacac

SEQ ID NO: 1174873 - RNA, 19 nt, Human
cuacuggaucuccaccccc

SEQ ID NO: 1174874 - RNA, 18 nt, Human
cucacaccucggucccaa

SEQ ID NO: 1174875 - RNA, 18 nt, Human
cuccacccccaccucccc

SEQ ID NO: 1174876 - RNA, 19 nt, Human
cuccagguggagggagaaa

SEQ ID NO: 1174877 - RNA, 20 nt, Human
cucccgcugaugccaaugac

SEQ ID NO: 1174878 - RNA, 18 nt, Human
cucugccucagagacuac

SEQ ID NO: 1174879 - RNA, 21 nt, Human
cucugccucagagacuacagg

SEQ ID NO: 1174880 - RNA, 18 nt, Human
cugccaggagguagccca

SEQ ID NO: 1174881 - RNA, 20 nt, Human
cuucuuuccuuucuccuucc

SEQ ID NO: 1174882 - RNA, 20 nt, Human
gaggcggugggcaggggaac

SEQ ID NO: 1174883 - RNA, 21 nt, Human
gagggagccccacuuacccug

SEQ ID NO: 1174884 - RNA, 20 nt, Human
gaucuccacccccaccuccc

SEQ ID NO: 1174885 - RNA, 21 nt, Human
gcaccaaagccacagggacac

SEQ ID NO: 1174886 - RNA, 18 nt, Human
gccagaggcccucaaucc

SEQ ID NO: 1174887 - RNA, 25 nt, Human
gcgcaccaaagccacagggacacaa

SEQ ID NO: 1174888 - RNA, 18 nt, Human
ggcucugccuucuuuccu

SEQ ID NO: 1174889 - RNA, 21 nt, Human
gggaacucuuuucuuuccuug

SEQ ID NO: 1174890 - RNA, 18 nt, Human
gguccugggcacgcccug

SEQ ID NO: 1174891 - RNA, 26 nt, Human
uaacagcaacaacccgaggcagccca

SEQ ID NO: 1174892 - RNA, 25 nt, Human
uaacuccuguccucuucuagacccc

SEQ ID NO: 1174893 - RNA, 23 nt, Human
uaccccagaaacagccugucaga

SEQ ID NO: 1174894 - RNA, 22 nt, Human
uagcccaguggcugggaggcgg

SEQ ID NO: 1174895 - RNA, 23 nt, Human
uauugcuccuacuggaucuccac

SEQ ID NO: 1174896 - RNA, 23 nt, Human
ucaggugauggggcaggcccugc

SEQ ID NO: 1174897 - RNA, 25 nt, Human
ucagugcacacuggcaucucuggaa

SEQ ID NO: 1174898 - RNA, 21 nt, Human
uccagccccguuagagagaag

SEQ ID NO: 1174899 - RNA, 19 nt, Human
uccagguggagggagaaag

SEQ ID NO: 1174900 - RNA, 24 nt, Human
uccccagccagaggcccucaaucc

SEQ ID NO: 1174901 - RNA, 25 nt, Human
uccucuguuauugcuccuacuggau

SEQ ID NO: 1174902 - RNA, 19 nt, Human
uccucuucuagaccccaca

SEQ ID NO: 1174903 - RNA, 21 nt, Human
ucucugccucagagacuacag

SEQ ID NO: 1174904 - RNA, 20 nt, Human
ucugccagggcccuccucua

SEQ ID NO: 1174905 - RNA, 23 nt, Human
ucugccagggcccuccucuaccc

SEQ ID NO: 1174906 - RNA, 21 nt, Human
ucugccuucuuuccuuucucc

SEQ ID NO: 1174907 - RNA, 19 nt, Human
ucugcugugggcaaaagau

SEQ ID NO: 1174908 - RNA, 21 nt, Human
ucuucuagaccccacaucugc

SEQ ID NO: 1174909 - RNA, 18 nt, Human
ucuuuccuuucuccuucc

SEQ ID NO: 1174910 - RNA, 22 nt, Human
ugccagggcccuccucuacccu

SEQ ID NO: 1174911 - RNA, 22 nt, Human
ugccuggggcuucagugcacac

SEQ ID NO: 1174912 - RNA, 21 nt, Human
uggccucugaccccuccuccc

SEQ ID NO: 1174913 - RNA, 18 nt, Human
ugggaggcggugggcagg

SEQ ID NO: 1174914 - RNA, 22 nt, Human
uguaacagcaacaacccgaggc

SEQ ID NO: 1174915 - RNA, 18 nt, Human
ugucucagaaguucgucg

SEQ ID NO: 1174916 - RNA, 26 nt, Human
ugucucagaaguucgucgaccgacgg

SEQ ID NO: 1174917 - RNA, 19 nt, Human
uguuagcccaugcuccagg

SEQ ID NO: 1174918 - RNA, 20 nt, Human
uuagagagaagaggggaggg

SEQ ID NO: 1174919 - RNA, 19 nt, Human
uuagcccaugcuccaggug

SEQ ID NO: 1174920 - RNA, 21 nt, Human
uucccuccucacaccucgguc

SEQ ID NO: 1174921 - RNA, 23 nt, Human
uugcaaauuuccugccaggaggu

SEQ ID NO: 1174922 - RNA, 19 nt, Human
uuugcaaauuuccugccag

SEQ ID NO: 1174923 - RNA, 18 nt, Human
aaacagaucuccacccau

SEQ ID NO: 1174924 - RNA, 23 nt, Human
aaagggaagcucugggcaaagag

SEQ ID NO: 1174925 - RNA, 21 nt, Human
aacaucauccugacagugcca

SEQ ID NO: 1174926 - RNA, 22 nt, Human
acaaagagaagagucaggaagc

SEQ ID NO: 1174927 - RNA, 23 nt, Human
acaccgaugaccuuaccaaggcc

SEQ ID NO: 1174928 - RNA, 28 nt, Human
accaguggaaaaaagcagccgagagaga

SEQ ID NO: 1174929 - RNA, 19 nt, Human
accucuucaugccuccuca

SEQ ID NO: 1174930 - RNA, 20 nt, Human
agaaaagggaagcugggguu

SEQ ID NO: 1174931 - RNA, 22 nt, Human
agaaaagggaagcugggguuuc

SEQ ID NO: 1174932 - RNA, 19 nt, Human
agacaaaacagaucuccac

SEQ ID NO: 1174933 - RNA, 19 nt, Human
agacaaagagaagagucag

SEQ ID NO: 1174934 - RNA, 24 nt, Human
agacaggagcccagcucaaaucug

SEQ ID NO: 1174935 - RNA, 20 nt, Human
agacuuauaguggagcuguu

SEQ ID NO: 1174936 - RNA, 23 nt, Human
agggcagccaacuaggcccugug

SEQ ID NO: 1174937 - RNA, 25 nt, Human
auugcaauuugauuaacaaggagaa

SEQ ID NO: 1174938 - RNA, 20 nt, Human
caaaacagaucuccacccau

SEQ ID NO: 1174939 - RNA, 23 nt, Human
caaagcaucacaaagacucuaau

SEQ ID NO: 1174940 - RNA, 23 nt, Human
caaaugacuuuggagugcuaaaa

SEQ ID NO: 1174941 - RNA, 23 nt, Human
caaggagacaggagcccagcuca

SEQ ID NO: 1174942 - RNA, 20 nt, Human
cacauagaaaagggaagcuu

SEQ ID NO: 1174943 - RNA, 23 nt, Human
cacaucacaaagcaucacaaaga

SEQ ID NO: 1174944 - RNA, 20 nt, Human
cagacaaaacagaucuccaa

SEQ ID NO: 1174945 - RNA, 22 nt, Human
cagacaaaacagaucuccaccc

SEQ ID NO: 1174946 - RNA, 19 nt, Human
cagagucccccagcucauc

SEQ ID NO: 1174947 - RNA, 20 nt, Human
cagggcagacaaagagaaga

SEQ ID NO: 1174948 - RNA, 18 nt, Human
cagugccaaccacaaacc

SEQ ID NO: 1174949 - RNA, 18 nt, Human
ccacggacaacaucaucc

SEQ ID NO: 1174950 - RNA, 20 nt, Human
ccacuuccuaccacagcuag

SEQ ID NO: 1174951 - RNA, 22 nt, Human
ccaguggaaaaaagcagccgag

SEQ ID NO: 1174952 - RNA, 19 nt, Human
cccaucacuccccaaaaua

SEQ ID NO: 1174953 - RNA, 21 nt, Human
cccccagcucauccucaauau

SEQ ID NO: 1174954 - RNA, 24 nt, Human
ccuaagaaaagcaacuccaggacu

SEQ ID NO: 1174955 - RNA, 23 nt, Human
ccucacacgcacaucacaaagca

SEQ ID NO: 1174956 - RNA, 24 nt, Human
ccucuacgucaucgugcccaaggg

SEQ ID NO: 1174957 - RNA, 26 nt, Human
cuaauaccuuccaucuacacaaccuc

SEQ ID NO: 1174958 - RNA, 23 nt, Human
cuccucuacgucaucgugcccaa

SEQ ID NO: 1174959 - RNA, 21 nt, Human
cuggcuuagguccugcuagaa

SEQ ID NO: 1174960 - RNA, 22 nt, Human
gaaaagcaacuccaggacucca

SEQ ID NO: 1174961 - RNA, 19 nt, Human
gagggagagagaaucaacc

SEQ ID NO: 1174962 - RNA, 22 nt, Human
gcccugugccugucacuaucag

SEQ ID NO: 1174963 - RNA, 19 nt, Human
gggaaguuggagaaguggg

SEQ ID NO: 1174964 - RNA, 19 nt, Human
ggggagagcuggccacgga

SEQ ID NO: 1174965 - RNA, 21 nt, Human
ggggagcugugccugccccau

SEQ ID NO: 1174966 - RNA, 19 nt, Human
gggugguugcuaaauggga

SEQ ID NO: 1174967 - RNA, 20 nt, Human
guauuuuucagcucaaggga

SEQ ID NO: 1174968 - RNA, 22 nt, Human
gucaggugaagacuuauagugg

SEQ ID NO: 1174969 - RNA, 18 nt, Human
guccugcuagaagaaccc

SEQ ID NO: 1174970 - RNA, 23 nt, Human
uaaguuuccaugccuagcacaua

SEQ ID NO: 1174971 - RNA, 18 nt, Human
uacacaaccucacacgca

SEQ ID NO: 1174972 - RNA, 19 nt, Human
uaccacagcuagggucccu

SEQ ID NO: 1174973 - RNA, 24 nt, Human
ucacaaagacucuaauuucuccaa

SEQ ID NO: 1174974 - RNA, 26 nt, Human
ucacacgcacaucacaaagcaucaca

SEQ ID NO: 1174975 - RNA, 23 nt, Human
ucaugggucccaugugcaaacuc

SEQ ID NO: 1174976 - RNA, 21 nt, Human
uccaaaugacuuuggagugcu

SEQ ID NO: 1174977 - RNA, 21 nt, Human
uccaugauauuuauucccagg

SEQ ID NO: 1174978 - RNA, 21 nt, Human
uccccaaaauaugcccuacau

SEQ ID NO: 1174979 - RNA, 23 nt, Human
uccccagacuggcuuagguccug

SEQ ID NO: 1174980 - RNA, 23 nt, Human
ucccuggggagagcuggccacgg

SEQ ID NO: 1174981 - RNA, 18 nt, Human
uccuugacucugagggcc

SEQ ID NO: 1174982 - RNA, 22 nt, Human
ucgcuggaggaguggaagaggc

SEQ ID NO: 1174983 - RNA, 18 nt, Human
ucugucagcauucuuucu

SEQ ID NO: 1174984 - RNA, 25 nt, Human
ugauugauagaaagaaaaggaaggg

SEQ ID NO: 1174985 - RNA, 23 nt, Human
ugccaggaucagccuggucucuu

SEQ ID NO: 1174986 - RNA, 20 nt, Human
ugccuggcagaaagacacaa

SEQ ID NO: 1174987 - RNA, 18 nt, Human
uggaaaaaagcagccgag

SEQ ID NO: 1174988 - RNA, 19 nt, Human
uggaggcagaagauacgga

SEQ ID NO: 1174989 - RNA, 19 nt, Human
uggcagaugccgugggaac

SEQ ID NO: 1174990 - RNA, 18 nt, Human
uggcggccagaaagggaa

SEQ ID NO: 1174991 - RNA, 19 nt, Human
ugggagggaacauggaggc

SEQ ID NO: 1174992 - RNA, 18 nt, Human
ugggcaaagagggagaga

SEQ ID NO: 1174993 - RNA, 20 nt, Human
ugggcaaagagggagagaga

SEQ ID NO: 1174994 - RNA, 18 nt, Human
ugguggagagaaagagga

SEQ ID NO: 1174995 - RNA, 23 nt, Human
ugguugcuaaaugggagagggau

SEQ ID NO: 1174996 - RNA, 21 nt, Human
uuaccaguggaaaaaagcagc

SEQ ID NO: 1174997 - RNA, 19 nt, Human
uucacagaggacagagcag

SEQ ID NO: 1174998 - RNA, 20 nt, Human
uuccaugauauuuauuccca

SEQ ID NO: 1174999 - RNA, 23 nt, Human
uucugcacaaacucugguuuuau

SEQ ID NO: 1175000 - RNA, 18 nt, Human
uuugccaggaucagccug

SEQ ID NO: 1175001 - RNA, 22 nt, Human
aaaccguacggugaaggaacac

SEQ ID NO: 1175002 - RNA, 20 nt, Human
aaagguaaacauuucugcag

SEQ ID NO: 1175003 - RNA, 22 nt, Human
aacacuuuuuauuacagaaacc

SEQ ID NO: 1175004 - RNA, 21 nt, Human
aagaaacuaugaguaacaagc

SEQ ID NO: 1175005 - RNA, 21 nt, Human
aagcuauaacauaguucacca

SEQ ID NO: 1175006 - RNA, 21 nt, Human
acaaaagggaggagagcagaa

SEQ ID NO: 1175007 - RNA, 19 nt, Human
acauucuaaagccaaguaa

SEQ ID NO: 1175008 - RNA, 18 nt, Human
accgaaaaaaugaucaaa

SEQ ID NO: 1175009 - RNA, 21 nt, Human
acggugaaggaacacaacaga

SEQ ID NO: 1175010 - RNA, 21 nt, Human
agcgcugacgggaacaucugc

SEQ ID NO: 1175011 - RNA, 20 nt, Human
aggccagcgcccacgguccc

SEQ ID NO: 1175012 - RNA, 18 nt, Human
agggagccacguuccuug

SEQ ID NO: 1175013 - RNA, 19 nt, Human
aucugcuugggguggcauc

SEQ ID NO: 1175014 - RNA, 23 nt, Human
caagacuaauauaaauucacucc

SEQ ID NO: 1175015 - RNA, 18 nt, Human
caaugggacccccccccc

SEQ ID NO: 1175016 - RNA, 20 nt, Human
cacauaggaaaaagagguac

SEQ ID NO: 1175017 - RNA, 24 nt, Human
cacccuacaguuaguaauauuaca

SEQ ID NO: 1175018 - RNA, 18 nt, Human
cagaaaccguacggugaa

SEQ ID NO: 1175019 - RNA, 21 nt, Human
cauauacaauaugcauaugug

SEQ ID NO: 1175020 - RNA, 20 nt, Human
ccacaaugggaccccccccc

SEQ ID NO: 1175021 - RNA, 19 nt, Human
ccagcgcccacggucccag

SEQ ID NO: 1175022 - RNA, 24 nt, Human
cccacggucccaggagcgccuccc

SEQ ID NO: 1175023 - RNA, 19 nt, Human
ccccccccccuuuuucuca

SEQ ID NO: 1175024 - RNA, 19 nt, Human
cccccccccuuuuucucac

SEQ ID NO: 1175025 - RNA, 20 nt, Human
ccugaauucaugagcaguug

SEQ ID NO: 1175026 - RNA, 22 nt, Human
cgaaaaaaugaucaaaaagaaa

SEQ ID NO: 1175027 - RNA, 25 nt, Human
cgagaaaauacuguugcacgcaaua

SEQ ID NO: 1175028 - RNA, 23 nt, Human
cuucccuguucucauuuugggga

SEQ ID NO: 1175029 - RNA, 18 nt, Human
gagaaaauacuguugcac

SEQ ID NO: 1175030 - RNA, 20 nt, Human
gagaugacccuggggaggga

SEQ ID NO: 1175031 - RNA, 21 nt, Human
gcacgcaauaauuuucacaca

SEQ ID NO: 1175032 - RNA, 19 nt, Human
gcgcccacggucccaggag

SEQ ID NO: 1175033 - RNA, 26 nt, Human
ggaaaaagagguacacgagaaaauac

SEQ ID NO: 1175034 - RNA, 24 nt, Human
ggaccgacugacucagggcagcgc

SEQ ID NO: 1175035 - RNA, 23 nt, Human
gguuaaaaaaaugcacacacaga

SEQ ID NO: 1175036 - RNA, 20 nt, Human
uaaagccaaguaaaauaucc

SEQ ID NO: 1175037 - RNA, 21 nt, Human
uaacauaguucaccacaaugg

SEQ ID NO: 1175038 - RNA, 22 nt, Human
uaauuuucacacagauuaacaa

SEQ ID NO: 1175039 - RNA, 23 nt, Human
uagacauuuauaaauaaaaaaga

SEQ ID NO: 1175040 - RNA, 22 nt, Human
uauaacauaguucaccacaaug

SEQ ID NO: 1175041 - RNA, 18 nt, Human
ucaaaaagaaacuaugag

SEQ ID NO: 1175042 - RNA, 19 nt, Human
uccaguguccugaauucau

SEQ ID NO: 1175043 - RNA, 23 nt, Human
ucuacacauauacaauaugcaua

SEQ ID NO: 1175044 - RNA, 20 nt, Human
ugaaggaacacaacagacca

SEQ ID NO: 1175045 - RNA, 21 nt, Human
ugaccugggagagaaagaucu

SEQ ID NO: 1175046 - RNA, 22 nt, Human
ugacucagggcagcgcugacgg

SEQ ID NO: 1175047 - RNA, 23 nt, Human
ugacucagggcagcgcugacggg

SEQ ID NO: 1175048 - RNA, 19 nt, Human
ugacugugcccuggaaagu

SEQ ID NO: 1175049 - RNA, 23 nt, Human
ugagaugacccuggggagggagc

SEQ ID NO: 1175050 - RNA, 22 nt, Human
ugagaugaccugggagagaaaa

SEQ ID NO: 1175051 - RNA, 25 nt, Human
ugaguaacaagcuauaacauaguuc

SEQ ID NO: 1175052 - RNA, 19 nt, Human
ugcacgcaauaauuuucac

SEQ ID NO: 1175053 - RNA, 22 nt, Human
uggaagaagcuugaagugagca

SEQ ID NO: 1175054 - RNA, 22 nt, Human
uggaccuggugacuuagugucg

SEQ ID NO: 1175055 - RNA, 19 nt, Human
uggggagggagccacguuc

SEQ ID NO: 1175056 - RNA, 20 nt, Human
uggggagggagccacguucc

SEQ ID NO: 1175057 - RNA, 21 nt, Human
uguaaaacauucuaaagccaa

SEQ ID NO: 1175058 - RNA, 23 nt, Human
uguugcacgcaauaauuuucaca

SEQ ID NO: 1175059 - RNA, 23 nt, Human
uuaacauggauuaacacuuuuua

SEQ ID NO: 1175060 - RNA, 26 nt, Human
uuagaaauucugcugccccaaaguau

SEQ ID NO: 1175061 - RNA, 19 nt, Human
aaaaaaaaggacagagagg

SEQ ID NO: 1175062 - RNA, 25 nt, Human
aaaaauauauaccuuuaguauugcc

SEQ ID NO: 1175063 - RNA, 21 nt, Human
aaacaggacaacccaugagca

SEQ ID NO: 1175064 - RNA, 23 nt, Human
aacagaaagaaaaaaguuccugg

SEQ ID NO: 1175065 - RNA, 22 nt, Human
aacugaacuccuggcagcccug

SEQ ID NO: 1175066 - RNA, 19 nt, Human
aagagaaagacaaauagaa

SEQ ID NO: 1175067 - RNA, 21 nt, Human
aagcacaggagagcucugagg

SEQ ID NO: 1175068 - RNA, 18 nt, Human
aagcccaaucaaggcuuu

SEQ ID NO: 1175069 - RNA, 18 nt, Human
aagcccuccucgccccuc

SEQ ID NO: 1175070 - RNA, 22 nt, Human
aagcucaguucuggagcugggc

SEQ ID NO: 1175071 - RNA, 24 nt, Human
aaggaaaagacacagacagggaau

SEQ ID NO: 1175072 - RNA, 19 nt, Human
aaguaaggacuagguuggc

SEQ ID NO: 1175073 - RNA, 22 nt, Human
aauaccagaggcaagccaaaga

SEQ ID NO: 1175074 - RNA, 20 nt, Human
aauucugccccuuuugccua

SEQ ID NO: 1175075 - RNA, 19 nt, Human
acagaaacaauuuuccuac

SEQ ID NO: 1175076 - RNA, 23 nt, Human
acagaaagaaaaaaguuccugga

SEQ ID NO: 1175077 - RNA, 18 nt, Human
acaguccuuuagcugagu

SEQ ID NO: 1175078 - RNA, 18 nt, Human
accccacccugcccucag

SEQ ID NO: 1175079 - RNA, 23 nt, Human
accccuuucuucaacuggggccu

SEQ ID NO: 1175080 - RNA, 25 nt, Human
accucagccaccaggaagacuagaa

SEQ ID NO: 1175081 - RNA, 19 nt, Human
acuaauauugccgaucuca

SEQ ID NO: 1175082 - RNA, 19 nt, Human
acucacacaugcucacacg

SEQ ID NO: 1175083 - RNA, 19 nt, Human
acuccuggcagcccugcuu

SEQ ID NO: 1175084 - RNA, 22 nt, Human
agaagcacaggagagcucugag

SEQ ID NO: 1175085 - RNA, 24 nt, Human
agaaggaacccuuaccucuccuca

SEQ ID NO: 1175086 - RNA, 22 nt, Human
agaagucuguaaaacacaccag

SEQ ID NO: 1175087 - RNA, 24 nt, Human
agacagggaaugaagccugcaaag

SEQ ID NO: 1175088 - RNA, 18 nt, Human
agacuagaaaggcuaaca

SEQ ID NO: 1175089 - RNA, 19 nt, Human
agagaaagacaaauagaau

SEQ ID NO: 1175090 - RNA, 18 nt, Human
agaggaggccauugggug

SEQ ID NO: 1175091 - RNA, 21 nt, Human
agagugaaucuauuacagaga

SEQ ID NO: 1175092 - RNA, 24 nt, Human
agauuucagaagcacaggagagcu

SEQ ID NO: 1175093 - RNA, 24 nt, Human
agccgcccagcuuuguucaggguu

SEQ ID NO: 1175094 - RNA, 21 nt, Human
agccucgacucucccaccccu

SEQ ID NO: 1175095 - RNA, 20 nt, Human
agcgcacacagcacagugca

SEQ ID NO: 1175096 - RNA, 20 nt, Human
agcugggcagacucagguuc

SEQ ID NO: 1175097 - RNA, 22 nt, Human
aggaagggccugaugaacaaaa

SEQ ID NO: 1175098 - RNA, 19 nt, Human
aggacagagaggaaagaga

SEQ ID NO: 1175099 - RNA, 24 nt, Human
aggagcccccucuuugcacagucc

SEQ ID NO: 1175100 - RNA, 21 nt, Human
aggaggccauugggugaggac

SEQ ID NO: 1175101 - RNA, 21 nt, Human
agggaaugaagccugcaaagu

SEQ ID NO: 1175102 - RNA, 24 nt, Human
agggagcuggccucuccugcaggg

SEQ ID NO: 1175103 - RNA, 20 nt, Human
agguugaagaggacaaaggu

SEQ ID NO: 1175104 - RNA, 21 nt, Human
caacccaugagcaauucccag

SEQ ID NO: 1175105 - RNA, 21 nt, Human
caacugaacuccuggcagccc

SEQ ID NO: 1175106 - RNA, 20 nt, Human
cacacaugcucacacggccu

SEQ ID NO: 1175107 - RNA, 22 nt, Human
cacacggccuaaaucuuccacc

SEQ ID NO: 1175108 - RNA, 19 nt, Human
cacaggagagcucugagga

SEQ ID NO: 1175109 - RNA, 23 nt, Human
cacagugcacugaagauguggcc

SEQ ID NO: 1175110 - RNA, 24 nt, Human
caccaggcuccaguuaaacacucc

SEQ ID NO: 1175111 - RNA, 20 nt, Human
caccccacccugcccucagc

SEQ ID NO: 1175112 - RNA, 20 nt, Human
caccccuuucuucaacuggg

SEQ ID NO: 1175113 - RNA, 19 nt, Human
caccugccacuucucagag

SEQ ID NO: 1175114 - RNA, 27 nt, Human
cacucuuacuuauaagagcugguugua

SEQ ID NO: 1175115 - RNA, 21 nt, Human
cagaagcaaauugcccugcgg

SEQ ID NO: 1175116 - RNA, 20 nt, Human
cagaagucuguaaaacacac

SEQ ID NO: 1175117 - RNA, 20 nt, Human
cagauuucagaagcacagga

SEQ ID NO: 1175118 - RNA, 22 nt, Human
cagcagcaucgaaggggucacc

SEQ ID NO: 1175119 - RNA, 23 nt, Human
cagcagcaucgaaggggucaccu

SEQ ID NO: 1175120 - RNA, 27 nt, Human
cagcccccgcgugcucuacgcccuuga

SEQ ID NO: 1175121 - RNA, 18 nt, Human
cagcuggcuagaauuggg

SEQ ID NO: 1175122 - RNA, 22 nt, Human
caggcuccaguuaaacacuccu

SEQ ID NO: 1175123 - RNA, 24 nt, Human
ccaaaacaucaugaagaggcccua

SEQ ID NO: 1175124 - RNA, 25 nt, Human
ccacucacucacacaugcucacacg

SEQ ID NO: 1175125 - RNA, 24 nt, Human
ccagcccgugaacaccucagccac

SEQ ID NO: 1175126 - RNA, 20 nt, Human
ccaggcuccaguuaaacacu

SEQ ID NO: 1175127 - RNA, 19 nt, Human
ccagggagcuggccucucc

SEQ ID NO: 1175128 - RNA, 22 nt, Human
cccacaccccacccugcccuca

SEQ ID NO: 1175129 - RNA, 18 nt, Human
cccccagcccgugaacac

SEQ ID NO: 1175130 - RNA, 18 nt, Human
cccccgcgugcucuacgc

SEQ ID NO: 1175131 - RNA, 21 nt, Human
ccccuucccuuccugaugucc

SEQ ID NO: 1175132 - RNA, 26 nt, Human
cccgcgugcucuacgcccuugaugca

SEQ ID NO: 1175133 - RNA, 18 nt, Human
cccgugaacaccucagcc

SEQ ID NO: 1175134 - RNA, 22 nt, Human
cccgugaacaccucagccacca

SEQ ID NO: 1175135 - RNA, 27 nt, Human
cccuuaccucuccucaauucucucugc

SEQ ID NO: 1175136 - RNA, 21 nt, Human
ccuaagcacagagacaugggg

SEQ ID NO: 1175137 - RNA, 20 nt, Human
ccucaucuccucccuccagu

SEQ ID NO: 1175138 - RNA, 24 nt, Human
ccuccacccacuuccagcuggcua

SEQ ID NO: 1175139 - RNA, 21 nt, Human
ccuccucaucuccucccucca

SEQ ID NO: 1175140 - RNA, 20 nt, Human
ccugagcagccgcccagcuu

SEQ ID NO: 1175141 - RNA, 21 nt, Human
ccugcuggcgcuguggagucc

SEQ ID NO: 1175142 - RNA, 25 nt, Human
ccugcugucccuccacccacuucca

SEQ ID NO: 1175143 - RNA, 19 nt, Human
ccuggcagcccugcuuugc

SEQ ID NO: 1175144 - RNA, 21 nt, Human
ccuucuuuccauuuucugucc

SEQ ID NO: 1175145 - RNA, 18 nt, Human
ccuuggcuguagggggac

SEQ ID NO: 1175146 - RNA, 19 nt, Human
cgagcccagcccccgcgug

SEQ ID NO: 1175147 - RNA, 18 nt, Human
cgagcccaugagaugcca

SEQ ID NO: 1175148 - RNA, 24 nt, Human
cgcacacagcacagugcacugaag

SEQ ID NO: 1175149 - RNA, 24 nt, Human
cucacugugcccagcagcuucugg

SEQ ID NO: 1175150 - RNA, 26 nt, Human
cucagguucaagcccuccucgccccu

SEQ ID NO: 1175151 - RNA, 18 nt, Human
cucccaccccuugaucug

SEQ ID NO: 1175152 - RNA, 21 nt, Human
cucccccagcccgugaacacc

SEQ ID NO: 1175153 - RNA, 23 nt, Human
cucccccagcccgugaacaccuc

SEQ ID NO: 1175154 - RNA, 25 nt, Human
cucccccagcccgugaacaccuucc

SEQ ID NO: 1175155 - RNA, 21 nt, Human
cuccucaucuccucccuccag

SEQ ID NO: 1175156 - RNA, 19 nt, Human
cucucugcuaguugagagc

SEQ ID NO: 1175157 - RNA, 21 nt, Human
cucugcuugagagcuuggucc

SEQ ID NO: 1175158 - RNA, 21 nt, Human
cugaagauguggccggagccc

SEQ ID NO: 1175159 - RNA, 21 nt, Human
cugaggaugugggagagaagc

SEQ ID NO: 1175160 - RNA, 23 nt, Human
cugcaagcucaguucuggagcug

SEQ ID NO: 1175161 - RNA, 24 nt, Human
cuggagcugggcagacucagguuc

SEQ ID NO: 1175162 - RNA, 22 nt, Human
cuugagagcuugguccuaguga

SEQ ID NO: 1175163 - RNA, 25 nt, Human
cuuguggccaagucacuccugcugg

SEQ ID NO: 1175164 - RNA, 20 nt, Human
cuuugcuccaacccuucuuu

SEQ ID NO: 1175165 - RNA, 24 nt, Human
gaaacauccaaaacaucaugaaga

SEQ ID NO: 1175166 - RNA, 21 nt, Human
gaagucuguaaaacacaccag

SEQ ID NO: 1175167 - RNA, 18 nt, Human
gaaugucuuguggccaag

SEQ ID NO: 1175168 - RNA, 24 nt, Human
gacaaaggucagcuggcuccccca

SEQ ID NO: 1175169 - RNA, 20 nt, Human
gagaaccugggacaaaagcu

SEQ ID NO: 1175170 - RNA, 26 nt, Human
gagcagaagcaaauugcccugcgguu

SEQ ID NO: 1175171 - RNA, 21 nt, Human
gagcugaagagugaaucuauu

SEQ ID NO: 1175172 - RNA, 20 nt, Human
gauagagaugacagaaacaa

SEQ ID NO: 1175173 - RNA, 20 nt, Human
gauucuggcccaucacugcu

SEQ ID NO: 1175174 - RNA, 21 nt, Human
gcccugcuuugcucucuccca

SEQ ID NO: 1175175 - RNA, 18 nt, Human
ggaaagaaaucuaaaagg

SEQ ID NO: 1175176 - RNA, 19 nt, Human
ggaaggagggagcccacaa

SEQ ID NO: 1175177 - RNA, 23 nt, Human
ggacaaaagcuggggcgagcugg

SEQ ID NO: 1175178 - RNA, 20 nt, Human
ggagaagaugaaacaggaca

SEQ ID NO: 1175179 - RNA, 21 nt, Human
ggagaugagaagugagaguuc

SEQ ID NO: 1175180 - RNA, 24 nt, Human
ggauagagaugacagaaacaauuu

SEQ ID NO: 1175181 - RNA, 21 nt, Human
ggauuguggggaagcggaugg

SEQ ID NO: 1175182 - RNA, 19 nt, Human
ggggcaggcugaggaacug

SEQ ID NO: 1175183 - RNA, 20 nt, Human
ggggcccacguccagacggg

SEQ ID NO: 1175184 - RNA, 20 nt, Human
ggugaugcuguguaaaggcc

SEQ ID NO: 1175185 - RNA, 23 nt, Human
gugaugcuguguaaaggccuuuc

SEQ ID NO: 1175186 - RNA, 21 nt, Human
gugcaugggauggcacaggga

SEQ ID NO: 1175187 - RNA, 26 nt, Human
gugcaugggauggcacagggugaugc

SEQ ID NO: 1175188 - RNA, 24 nt, Human
guggagaugagaagugagaguucu

SEQ ID NO: 1175189 - RNA, 21 nt, Human
gugggauggcuguuggggccc

SEQ ID NO: 1175190 - RNA, 18 nt, Human
uaaaugcauuuuuuuuuu

SEQ ID NO: 1175191 - RNA, 21 nt, Human
uaacagaaagaaaaaaguucc

SEQ ID NO: 1175192 - RNA, 20 nt, Human
uauaagagcugguuguagca

SEQ ID NO: 1175193 - RNA, 22 nt, Human
uauuucaccccuuucuucaacu

SEQ ID NO: 1175194 - RNA, 21 nt, Human
ucaaaagaaacucuccagaga

SEQ ID NO: 1175195 - RNA, 22 nt, Human
ucaaaagaaacucuccagagau

SEQ ID NO: 1175196 - RNA, 19 nt, Human
ucaacaccugccacuucuc

SEQ ID NO: 1175197 - RNA, 24 nt, Human
ucaagcccuccucgccccucaaga

SEQ ID NO: 1175198 - RNA, 20 nt, Human
ucacccacuucccuuggaaa

SEQ ID NO: 1175199 - RNA, 23 nt, Human
ucagacaaagagaaccugggaca

SEQ ID NO: 1175200 - RNA, 25 nt, Human
ucaguaauacuucccgaagccuccu

SEQ ID NO: 1175201 - RNA, 20 nt, Human
ucccacaccccacccugccc

SEQ ID NO: 1175202 - RNA, 19 nt, Human
ucccuccacccacuuccag

SEQ ID NO: 1175203 - RNA, 25 nt, Human
ucccuggggcuggaaugucuugugg

SEQ ID NO: 1175204 - RNA, 22 nt, Human
ucccuuaucuauaaaugggggc

SEQ ID NO: 1175205 - RNA, 21 nt, Human
uccuaagucuuuccuuuuuuu

SEQ ID NO: 1175206 - RNA, 23 nt, Human
uccucaucuccucccuccaguuu

SEQ ID NO: 1175207 - RNA, 25 nt, Human
uccugcuggcgcuguggagucccag

SEQ ID NO: 1175208 - RNA, 23 nt, Human
uccuucuuuccauuuucuguccu

SEQ ID NO: 1175209 - RNA, 18 nt, Human
ucgacucucccaccccuu

SEQ ID NO: 1175210 - RNA, 21 nt, Human
ucucagagcauccggucagcu

SEQ ID NO: 1175211 - RNA, 21 nt, Human
ucucccgauagcagcagcauc

SEQ ID NO: 1175212 - RNA, 20 nt, Human
ucugaggaugugggagagaa

SEQ ID NO: 1175213 - RNA, 23 nt, Human
ucuuacuuauaagagcugguugu

SEQ ID NO: 1175214 - RNA, 21 nt, Human
ucuuuggcuaaagaaaggaac

SEQ ID NO: 1175215 - RNA, 19 nt, Human
ugaaacaggacaacccaug

SEQ ID NO: 1175216 - RNA, 23 nt, Human
ugaaacaggacaacccaugagca

SEQ ID NO: 1175217 - RNA, 21 nt, Human
ugaccauguugucagaagccc

SEQ ID NO: 1175218 - RNA, 18 nt, Human
ugacucaauggcagauuc

SEQ ID NO: 1175219 - RNA, 20 nt, Human
ugacucaauggcagauucgg

SEQ ID NO: 1175220 - RNA, 22 nt, Human
ugagaagugagaguucuaaggc

SEQ ID NO: 1175221 - RNA, 22 nt, Human
ugagaugccaccugacgucgca

SEQ ID NO: 1175222 - RNA, 18 nt, Human
ugagcgucuguggggcug

SEQ ID NO: 1175223 - RNA, 20 nt, Human
ugaggaacuggguggugugg

SEQ ID NO: 1175224 - RNA, 21 nt, Human
ugaggacuaggagaaugugca

SEQ ID NO: 1175225 - RNA, 23 nt, Human
ugaucugcucacccacuucccuu

SEQ ID NO: 1175226 - RNA, 22 nt, Human
ugccuaaauccaacucaggagc

SEQ ID NO: 1175227 - RNA, 23 nt, Human
ugccugagcagccgcccagcuuu

SEQ ID NO: 1175228 - RNA, 19 nt, Human
ugccuggaaaggaacgaag

SEQ ID NO: 1175229 - RNA, 24 nt, Human
ugcuugagagcuugguccuaguga

SEQ ID NO: 1175230 - RNA, 18 nt, Human
ugcuuuauccuuccuuca

SEQ ID NO: 1175231 - RNA, 19 nt, Human
uggaaagaaaucuaaaagg

SEQ ID NO: 1175232 - RNA, 18 nt, Human
uggcuagaauugggugcu

SEQ ID NO: 1175233 - RNA, 19 nt, Human
uggcucugggcaguuuccu

SEQ ID NO: 1175234 - RNA, 20 nt, Human
uggcucugggcaguuuccuu

SEQ ID NO: 1175235 - RNA, 23 nt, Human
uggcugcaagcucaguucuggag

SEQ ID NO: 1175236 - RNA, 20 nt, Human
ugggagggggcaaauguccc

SEQ ID NO: 1175237 - RNA, 18 nt, Human
ugggcgggcugagucuuc

SEQ ID NO: 1175238 - RNA, 18 nt, Human
uggggaagguaccaccug

SEQ ID NO: 1175239 - RNA, 19 nt, Human
uggggucaccucugggagg

SEQ ID NO: 1175240 - RNA, 21 nt, Human
ugggugaggacuaggagaaug

SEQ ID NO: 1175241 - RNA, 18 nt, Human
ugggugcugggggcaugc

SEQ ID NO: 1175242 - RNA, 19 nt, Human
ugucagaagcccaaucaag

SEQ ID NO: 1175243 - RNA, 19 nt, Human
ugucuuguggccaagucaa

SEQ ID NO: 1175244 - RNA, 21 nt, Human
ugugagcacccagcgcacaca

SEQ ID NO: 1175245 - RNA, 20 nt, Human
uguggcagcuccaugcaugg

SEQ ID NO: 1175246 - RNA, 23 nt, Human
uguggccaagucacuccugcugg

SEQ ID NO: 1175247 - RNA, 21 nt, Human
uguuccaauaugaguguuugc

SEQ ID NO: 1175248 - RNA, 20 nt, Human
uucacucuuacuuauaagaa

SEQ ID NO: 1175249 - RNA, 18 nt, Human
uuggggcuucugaugugg

SEQ ID NO: 1175250 - RNA, 19 nt, Human
uuguggggaagcggauggg

SEQ ID NO: 1175251 - RNA, 21 nt, Human
uuguucaggguuucucuggcc

SEQ ID NO: 1175252 - RNA, 23 nt, Human
uuguuccacucacucacacaugc

SEQ ID NO: 1175253 - RNA, 22 nt, Human
uuuacaaauuuggugugaaccc

SEQ ID NO: 1175254 - RNA, 22 nt, Human
uuuccuggggaagguaccaccu

SEQ ID NO: 1175255 - RNA, 20 nt, Human
uuuccuucuuuccauuuucu

SEQ ID NO: 1175256 - RNA, 20 nt, Human
uuugauucuucuuuaaacuu

SEQ ID NO: 1175257 - RNA, 20 nt, Human
uuuuuuuaacagaaagaaaa

SEQ ID NO: 1175258 - RNA, 22 nt, Human
aaacagaugccaucucucccau

SEQ ID NO: 1175259 - RNA, 19 nt, Human
aaagaagcacaccagccuc

SEQ ID NO: 1175260 - RNA, 20 nt, Human
aaagaagcacaccagccucc

SEQ ID NO: 1175261 - RNA, 25 nt, Human
aaaggaggccaggaaccagggacuc

SEQ ID NO: 1175262 - RNA, 23 nt, Human
aaauaacuucuuaaauccaaaug

SEQ ID NO: 1175263 - RNA, 23 nt, Human
aacagcaccacggacacagcagg

SEQ ID NO: 1175264 - RNA, 21 nt, Human
aagaagggggaugcaggggac

SEQ ID NO: 1175265 - RNA, 18 nt, Human
aagugacagcagggcagc

SEQ ID NO: 1175266 - RNA, 20 nt, Human
acaacagcaccacggacaca

SEQ ID NO: 1175267 - RNA, 22 nt, Human
acaacagcaccacggacacagc

SEQ ID NO: 1175268 - RNA, 23 nt, Human
acacugcagauguggcuguccuc

SEQ ID NO: 1175269 - RNA, 20 nt, Human
acagcagggcagccccuggg

SEQ ID NO: 1175270 - RNA, 22 nt, Human
accaccaugcugucuuccaguc

SEQ ID NO: 1175271 - RNA, 21 nt, Human
accacugaacugcugggaagu

SEQ ID NO: 1175272 - RNA, 18 nt, Human
acccaguggaauucgucc

SEQ ID NO: 1175273 - RNA, 24 nt, Human
acccgcucugucuucuacccccua

SEQ ID NO: 1175274 - RNA, 23 nt, Human
accgggacacaucagauguggcu

SEQ ID NO: 1175275 - RNA, 21 nt, Human
acugugggaagccuggcaggg

SEQ ID NO: 1175276 - RNA, 22 nt, Human
agagcagccaguccuccggggg

SEQ ID NO: 1175277 - RNA, 20 nt, Human
agaugccaucucucccauga

SEQ ID NO: 1175278 - RNA, 21 nt, Human
agccccuggguuaggaucucc

SEQ ID NO: 1175279 - RNA, 18 nt, Human
agcccuuggaagcugcag

SEQ ID NO: 1175280 - RNA, 21 nt, Human
aggccagguaccaacagcagg

SEQ ID NO: 1175281 - RNA, 20 nt, Human
aggccucuggagugacccag

SEQ ID NO: 1175282 - RNA, 24 nt, Human
agugaccaauacaacagcaccacg

SEQ ID NO: 1175283 - RNA, 24 nt, Human
aucuccagucugcagacugcuucc

SEQ ID NO: 1175284 - RNA, 21 nt, Human
caaggcaaagaagggggaugc

SEQ ID NO: 1175285 - RNA, 23 nt, Human
cacagcaggggcccugccugaga

SEQ ID NO: 1175286 - RNA, 25 nt, Human
cacaggccuaggggcggggccaccu

SEQ ID NO: 1175287 - RNA, 23 nt, Human
cacaucagauguggcucuaccag

SEQ ID NO: 1175288 - RNA, 19 nt, Human
cacccaccgcuucgccuug

SEQ ID NO: 1175289 - RNA, 21 nt, Human
caccgcuucgccuugcagagg

SEQ ID NO: 1175290 - RNA, 19 nt, Human
caccucaaguauaggccau

SEQ ID NO: 1175291 - RNA, 22 nt, Human
caccucuggccccacccaccuc

SEQ ID NO: 1175292 - RNA, 18 nt, Human
cacuugaugcagcccuug

SEQ ID NO: 1175293 - RNA, 24 nt, Human
cagcaccgccucguggguguggcc

SEQ ID NO: 1175294 - RNA, 23 nt, Human
cagcagcaacagugaccaccaug

SEQ ID NO: 1175295 - RNA, 18 nt, Human
cagcaggacagacugccc

SEQ ID NO: 1175296 - RNA, 18 nt, Human
cagcagggcagccccugg

SEQ ID NO: 1175297 - RNA, 23 nt, Human
cagccccuggguuaggaucuccu

SEQ ID NO: 1175298 - RNA, 23 nt, Human
cagcucggcccugcccgcccccc

SEQ ID NO: 1175299 - RNA, 20 nt, Human
caggaaccagggacucagag

SEQ ID NO: 1175300 - RNA, 18 nt, Human
cagggccugggagagggg

SEQ ID NO: 1175301 - RNA, 20 nt, Human
cagggccugggagaggggcc

SEQ ID NO: 1175302 - RNA, 22 nt, Human
caggucucccccagugucagaa

SEQ ID NO: 1175303 - RNA, 26 nt, Human
caguacugccugccugugucguaguc

SEQ ID NO: 1175304 - RNA, 21 nt, Human
cagucugcagacugcuuccac

SEQ ID NO: 1175305 - RNA, 19 nt, Human
ccacgcacccaccgcuucg

SEQ ID NO: 1175306 - RNA, 18 nt, Human
ccaggcaaggcaaagaag

SEQ ID NO: 1175307 - RNA, 22 nt, Human
ccagguugaaacagaugccauc

SEQ ID NO: 1175308 - RNA, 23 nt, Human
cccacaggccuaggggcggggcc

SEQ ID NO: 1175309 - RNA, 20 nt, Human
cccagagacacccgcucugu

SEQ ID NO: 1175310 - RNA, 19 nt, Human
ccccagcccgagucccacu

SEQ ID NO: 1175311 - RNA, 28 nt, Human
ccccccagcccgagucccaguccgagga

SEQ ID NO: 1175312 - RNA, 22 nt, Human
cccccccagcccgagucccacu

SEQ ID NO: 1175313 - RNA, 21 nt, Human
cccccuacucaaagaagcaca

SEQ ID NO: 1175314 - RNA, 18 nt, Human
ccuagaccugcuggucua

SEQ ID NO: 1175315 - RNA, 20 nt, Human
ccucccacaggccuaggggc

SEQ ID NO: 1175316 - RNA, 20 nt, Human
ccucuggccccacccaccuc

SEQ ID NO: 1175317 - RNA, 29 nt, Human
ccugccugcagacaaaggaggccaggaac

SEQ ID NO: 1175318 - RNA, 20 nt, Human
cgaagacacacuccccugga

SEQ ID NO: 1175319 - RNA, 25 nt, Human
cgucaugggaucuccagucugcaga

SEQ ID NO: 1175320 - RNA, 22 nt, Human
cguccccaacucugcguagucc

SEQ ID NO: 1175321 - RNA, 19 nt, Human
cuccaaacucccagaggca

SEQ ID NO: 1175322 - RNA, 24 nt, Human
cucccagaggcauggaacgccaga

SEQ ID NO: 1175323 - RNA, 21 nt, Human
cuccucugucuccaaacuccc

SEQ ID NO: 1175324 - RNA, 20 nt, Human
cucgcugcaauguccccaug

SEQ ID NO: 1175325 - RNA, 20 nt, Human
cucggcccugcccgcccccc

SEQ ID NO: 1175326 - RNA, 24 nt, Human
cucggcccugcccgcccccccagc

SEQ ID NO: 1175327 - RNA, 21 nt, Human
cucuccuuccagcuaggccag

SEQ ID NO: 1175328 - RNA, 24 nt, Human
cucugaaucacagccagcaccgcc

SEQ ID NO: 1175329 - RNA, 20 nt, Human
cugcacacccagggccgggu

SEQ ID NO: 1175330 - RNA, 24 nt, Human
cugggaaggaagcccggagcuucu

SEQ ID NO: 1175331 - RNA, 27 nt, Human
cuucuggcucugaaucacagccagcac

SEQ ID NO: 1175332 - RNA, 23 nt, Human
cuugcugcacacccagggccgac

SEQ ID NO: 1175333 - RNA, 21 nt, Human
gaacccaggcaaggcaaagaa

SEQ ID NO: 1175334 - RNA, 19 nt, Human
gaagacacacuccccugga

SEQ ID NO: 1175335 - RNA, 20 nt, Human
gaagacacacuccccuggac

SEQ ID NO: 1175336 - RNA, 21 nt, Human
gaagacacacuccccuggacc

SEQ ID NO: 1175337 - RNA, 22 nt, Human
gaagccuggcaggggcaucauc

SEQ ID NO: 1175338 - RNA, 24 nt, Human
gagcagacaccagacaccucccac

SEQ ID NO: 1175339 - RNA, 21 nt, Human
gcagcccuuggaagcugcagg

SEQ ID NO: 1175340 - RNA, 21 nt, Human
gcauggaacgccagaaacuca

SEQ ID NO: 1175341 - RNA, 18 nt, Human
gccaucucucccaugauu

SEQ ID NO: 1175342 - RNA, 18 nt, Human
ggagaggggccuggggcg

SEQ ID NO: 1175343 - RNA, 23 nt, Human
ggaugcaggggaccucuggggcc

SEQ ID NO: 1175344 - RNA, 20 nt, Human
ggccaggaaccagggacuca

SEQ ID NO: 1175345 - RNA, 19 nt, Human
ggcggggccaccucuggcc

SEQ ID NO: 1175346 - RNA, 21 nt, Human
ggggaccucuggggcccgggg

SEQ ID NO: 1175347 - RNA, 19 nt, Human
gucugcagacugcuuccac

SEQ ID NO: 1175348 - RNA, 18 nt, Human
gugacagcagggcagccc

SEQ ID NO: 1175349 - RNA, 19 nt, Human
uacaacagcaccacggaca

SEQ ID NO: 1175350 - RNA, 19 nt, Human
uaccagcagcaacagugac

SEQ ID NO: 1175351 - RNA, 24 nt, Human
ucacuuuggcucaucauuugaguu

SEQ ID NO: 1175352 - RNA, 24 nt, Human
ucauccagguugaaacagaugcca

SEQ ID NO: 1175353 - RNA, 20 nt, Human
uccacgaagacacacucccc

SEQ ID NO: 1175354 - RNA, 20 nt, Human
ucccagaggcauggaacgcc

SEQ ID NO: 1175355 - RNA, 22 nt, Human
uccugcagggacacugcagaug

SEQ ID NO: 1175356 - RNA, 20 nt, Human
ucggcccugcccgccccccc

SEQ ID NO: 1175357 - RNA, 24 nt, Human
ucuaccagcagcaacagugaccac

SEQ ID NO: 1175358 - RNA, 26 nt, Human
ucuacccccuacucaaagaagcacca

SEQ ID NO: 1175359 - RNA, 19 nt, Human
ucuccaaacucccagaggc

SEQ ID NO: 1175360 - RNA, 24 nt, Human
ucucccaugauuccugacaagggu

SEQ ID NO: 1175361 - RNA, 20 nt, Human
ucuccuuccagcuaggccag

SEQ ID NO: 1175362 - RNA, 24 nt, Human
ucugcguaguccaauccagggcuc

SEQ ID NO: 1175363 - RNA, 21 nt, Human
ucugggaaggaagcccggagc

SEQ ID NO: 1175364 - RNA, 23 nt, Human
ucuguggcucccuccccugccuc

SEQ ID NO: 1175365 - RNA, 21 nt, Human
ucuugauuucuuucacccauc

SEQ ID NO: 1175366 - RNA, 19 nt, Human
ugagaaaggggacuguggg

SEQ ID NO: 1175367 - RNA, 18 nt, Human
ugaugcagcccuuggaag

SEQ ID NO: 1175368 - RNA, 21 nt, Human
ugauucuaagccaggucuccc

SEQ ID NO: 1175369 - RNA, 23 nt, Human
ugcagggaagagaccagcucggc

SEQ ID NO: 1175370 - RNA, 24 nt, Human
ugcccauguuagcuaccaaggcug

SEQ ID NO: 1175371 - RNA, 23 nt, Human
ugccugcagacaaaggaggccag

SEQ ID NO: 1175372 - RNA, 22 nt, Human
ugccugccuguguuccagucuc

SEQ ID NO: 1175373 - RNA, 21 nt, Human
ugccuggagguaaaagggugg

SEQ ID NO: 1175374 - RNA, 21 nt, Human
uggauuuugucagcugcaaau

SEQ ID NO: 1175375 - RNA, 18 nt, Human
uggcucugaaucacagcc

SEQ ID NO: 1175376 - RNA, 21 nt, Human
ugggaagccuggcaggggcau

SEQ ID NO: 1175377 - RNA, 18 nt, Human
uggggcccggggcggggc

SEQ ID NO: 1175378 - RNA, 21 nt, Human
uggggcccggggcggggcugg

SEQ ID NO: 1175379 - RNA, 24 nt, Human
uggggcggaggccacgcacccacc

SEQ ID NO: 1175380 - RNA, 18 nt, Human
uggguuaggaucuccucu

SEQ ID NO: 1175381 - RNA, 21 nt, Human
uggguuaggaucuccucuguc

SEQ ID NO: 1175382 - RNA, 21 nt, Human
uguccggaucaaacggguccc

SEQ ID NO: 1175383 - RNA, 23 nt, Human
uuaauccacaaucuuagauuguu

SEQ ID NO: 1175384 - RNA, 20 nt, Human
uuccagcuccuucuggcucu

SEQ ID NO: 1175385 - RNA, 22 nt, Human
uucgcacuugaugcagcccuug

SEQ ID NO: 1175386 - RNA, 24 nt, Human
uuuuggauuuugucagcugcaaau

SEQ ID NO: 1175387 - RNA, 24 nt, Human
aaaaauuuuuuuaaguagaaaaac

SEQ ID NO: 1175388 - RNA, 23 nt, Human
aaacaaaauuacagagaaaaacc

SEQ ID NO: 1175389 - RNA, 21 nt, Human
aaacgaaacccgacuguuaac

SEQ ID NO: 1175390 - RNA, 24 nt, Human
aaagugcugggauuacaggcguga

SEQ ID NO: 1175391 - RNA, 23 nt, Human
aaccucaggugauccgccugccu

SEQ ID NO: 1175392 - RNA, 19 nt, Human
aagugcugggauuacaggc

SEQ ID NO: 1175393 - RNA, 19 nt, Human
aagugcugggauuacaggc

SEQ ID NO: 1175394 - RNA, 26 nt, Human
aagugcugggauuacaggcgugagcc

SEQ ID NO: 1175395 - RNA, 24 nt, Human
aauuuuguauuuuuaguagagacg

SEQ ID NO: 1175396 - RNA, 23 nt, Human
acagagaaaaaccuuaaacuuaa

SEQ ID NO: 1175397 - RNA, 25 nt, Human
acccugaaaaccccuccuccggccc

SEQ ID NO: 1175398 - RNA, 20 nt, Human
acgggguuuuuccauguugg

SEQ ID NO: 1175399 - RNA, 21 nt, Human
acgggguuuuuccauguuggu

SEQ ID NO: 1175400 - RNA, 24 nt, Human
acgggguuuuuccauguuggucag

SEQ ID NO: 1175401 - RNA, 20 nt, Human
agaaaaaccuuaaacuuaaa

SEQ ID NO: 1175402 - RNA, 23 nt, Human
agcgauucuccugucccagccuc

SEQ ID NO: 1175403 - RNA, 19 nt, Human
aggaccucuaacccagaac

SEQ ID NO: 1175404 - RNA, 23 nt, Human
aggcgugagccaccgugccuggc

SEQ ID NO: 1175405 - RNA, 24 nt, Human
aggugauccgccugccuuggccuc

SEQ ID NO: 1175406 - RNA, 23 nt, Human
aguagcugggauuacaggcaugu

SEQ ID NO: 1175407 - RNA, 18 nt, Human
agugcugggauuacaggc

SEQ ID NO: 1175408 - RNA, 24 nt, Human
caaagugcugggauuacaggcgug

SEQ ID NO: 1175409 - RNA, 23 nt, Human
caaccuccaccucccggguucaa

SEQ ID NO: 1175410 - RNA, 22 nt, Human
caacggcguccuacgacccuga

SEQ ID NO: 1175411 - RNA, 20 nt, Human
caagcgauucuccuguccca

SEQ ID NO: 1175412 - RNA, 21 nt, Human
caccgugccuggcuaaggcuu

SEQ ID NO: 1175413 - RNA, 20 nt, Human
cagccuccugaguagcuggg

SEQ ID NO: 1175414 - RNA, 21 nt, Human
caucgcaaccuccaccucccg

SEQ ID NO: 1175415 - RNA, 23 nt, Human
caucgcaaccuccaccucccggg

SEQ ID NO: 1175416 - RNA, 24 nt, Human
cauguuggucaggcuggucgcgaa

SEQ ID NO: 1175417 - RNA, 20 nt, Human
ccaaagugcugggauuacag

SEQ ID NO: 1175418 - RNA, 22 nt, Human
ccaaagugcugggauuacaggc

SEQ ID NO: 1175419 - RNA, 22 nt, Human
ccaaagugcugggauuacaggc

SEQ ID NO: 1175420 - RNA, 24 nt, Human
ccaaagugcugggauuacaggcgu

SEQ ID NO: 1175421 - RNA, 20 nt, Human
ccaccacgccuggcuaauuu

SEQ ID NO: 1175422 - RNA, 24 nt, Human
ccaccucccggguucaagcgauuc

SEQ ID NO: 1175423 - RNA, 19 nt, Human
ccauguuggucaggcuggu

SEQ ID NO: 1175424 - RNA, 20 nt, Human
ccauguuggucaggcugguc

SEQ ID NO: 1175425 - RNA, 20 nt, Human
ccauguuggucaggcugguc

SEQ ID NO: 1175426 - RNA, 20 nt, Human
cccaaccucaggugauccgc

SEQ ID NO: 1175427 - RNA, 24 nt, Human
cccaaccucaggugauccgccugc

SEQ ID NO: 1175428 - RNA, 20 nt, Human
cccaacggcguccuacgacc

SEQ ID NO: 1175429 - RNA, 18 nt, Human
cccaggcuggagugagug

SEQ ID NO: 1175430 - RNA, 22 nt, Human
ccccuaagaacuaguaaacaaa

SEQ ID NO: 1175431 - RNA, 20 nt, Human
cccggguucaagcgauucuc

SEQ ID NO: 1175432 - RNA, 23 nt, Human
cccggguucaagcgauucuccug

SEQ ID NO: 1175433 - RNA, 25 nt, Human
cccugaaaaccccuccuccggcccu

SEQ ID NO: 1175434 - RNA, 24 nt, Human
ccucccggguucaagcgauucucc

SEQ ID NO: 1175435 - RNA, 21 nt, Human
ccucuaacccagaacaagggu

SEQ ID NO: 1175436 - RNA, 23 nt, Human
ccugaguagcugggauuacaggc

SEQ ID NO: 1175437 - RNA, 24 nt, Human
ccugaguagcugggauuacaggca

SEQ ID NO: 1175438 - RNA, 22 nt, Human
ccugccuuggccucccaaagug

SEQ ID NO: 1175439 - RNA, 24 nt, Human
cgggguuuuuccauguuggucagg

SEQ ID NO: 1175440 - RNA, 24 nt, Human
cuaauuuuguauuuuuaguagaga

SEQ ID NO: 1175441 - RNA, 24 nt, Human
cucaucgcaaccuccaccucccgg

SEQ ID NO: 1175442 - RNA, 23 nt, Human
cugaguagcugggauuacaggca

SEQ ID NO: 1175443 - RNA, 24 nt, Human
cugaguagcugggauuacaggcau

SEQ ID NO: 1175444 - RNA, 23 nt, Human
cugccuuggccucccaaagugcu

SEQ ID NO: 1175445 - RNA, 23 nt, Human
cugucccagccuccugaguagcu

SEQ ID NO: 1175446 - RNA, 26 nt, Human
cuuauacuaauuuuuuuuuuuuuuuu

SEQ ID NO: 1175447 - RNA, 20 nt, Human
gacccugaaaaccccuccuc

SEQ ID NO: 1175448 - RNA, 23 nt, Human
gagacgggguuuuuccauguugg

SEQ ID NO: 1175449 - RNA, 24 nt, Human
gagacgggguuuuuccauguuggu

SEQ ID NO: 1175450 - RNA, 22 nt, Human
gaguagcugggauuacaggcau

SEQ ID NO: 1175451 - RNA, 25 nt, Human
gaguagcugggauuacaggcaugug

SEQ ID NO: 1175452 - RNA, 18 nt, Human
gauuacaggcaugugcca

SEQ ID NO: 1175453 - RNA, 18 nt, Human
gauuacaggcgugagcca

SEQ ID NO: 1175454 - RNA, 20 nt, Human
gauuacaggcgugagccacc

SEQ ID NO: 1175455 - RNA, 21 nt, Human
gauuacaggcgugagccaccg

SEQ ID NO: 1175456 - RNA, 18 nt, Human
gcccaggcuggagugagu

SEQ ID NO: 1175457 - RNA, 22 nt, Human
gccuuggccucccaaagugcug

SEQ ID NO: 1175458 - RNA, 21 nt, Human
gcucuuguugcccaggcugga

SEQ ID NO: 1175459 - RNA, 24 nt, Human
gcucuuguugcccaggcuggagug

SEQ ID NO: 1175460 - RNA, 23 nt, Human
gcuggucgcgaacucccaaccuc

SEQ ID NO: 1175461 - RNA, 19 nt, Human
ggauuacaggcaugugcca

SEQ ID NO: 1175462 - RNA, 23 nt, Human
gggguuuuuccauguuggucagg

SEQ ID NO: 1175463 - RNA, 23 nt, Human
guagagacgggguuuuuccaugu

SEQ ID NO: 1175464 - RNA, 18 nt, Human
guagcugggauuacaggc

SEQ ID NO: 1175465 - RNA, 20 nt, Human
guagcugggauuacaggcau

SEQ ID NO: 1175466 - RNA, 19 nt, Human
uaacccagaacaaggguuu

SEQ ID NO: 1175467 - RNA, 22 nt, Human
uaaugguacggucggacagacu

SEQ ID NO: 1175468 - RNA, 23 nt, Human
uaauuuuuuuuuuuuuuuugaga

SEQ ID NO: 1175469 - RNA, 26 nt, Human
uacagagaaaaaccuuaaacuuaaaa

SEQ ID NO: 1175470 - RNA, 22 nt, Human
uacaggcaugugccaccacgcc

SEQ ID NO: 1175471 - RNA, 22 nt, Human
uacaggcgugagccaccgugcc

SEQ ID NO: 1175472 - RNA, 22 nt, Human
uacaggcgugagccaccgugcc

SEQ ID NO: 1175473 - RNA, 24 nt, Human
uaguaaacaaaauuacagagaaaa

SEQ ID NO: 1175474 - RNA, 24 nt, Human
uaguagagacgggguuuuuccaug

SEQ ID NO: 1175475 - RNA, 24 nt, Human
ucaucgcaaccuccaccucccggg

SEQ ID NO: 1175476 - RNA, 19 nt, Human
uccaaggauauucuccaug

SEQ ID NO: 1175477 - RNA, 24 nt, Human
ucccaaagugcugggauuacaggc

SEQ ID NO: 1175478 - RNA, 21 nt, Human
ucccggguucaagcgauucuc

SEQ ID NO: 1175479 - RNA, 24 nt, Human
ucccggguucaagcgauucuccug

SEQ ID NO: 1175480 - RNA, 20 nt, Human
uccuacgacccugaaaaccc

SEQ ID NO: 1175481 - RNA, 24 nt, Human
uccugaguagcugggauuacaggc

SEQ ID NO: 1175482 - RNA, 23 nt, Human
ucgcaaccuccaccucccggguu

SEQ ID NO: 1175483 - RNA, 24 nt, Human
ucgcaaccuccaccucccggguuc

SEQ ID NO: 1175484 - RNA, 24 nt, Human
ucuccugucccagccuccugagua

SEQ ID NO: 1175485 - RNA, 22 nt, Human
ucuuguugcccaggcuggagug

SEQ ID NO: 1175486 - RNA, 22 nt, Human
ugaaauguccaguuaauucccc

SEQ ID NO: 1175487 - RNA, 23 nt, Human
ugagacagaguuuugcucuuguu

SEQ ID NO: 1175488 - RNA, 23 nt, Human
ugagaguaaagaugaaaugucca

SEQ ID NO: 1175489 - RNA, 22 nt, Human
ugauaaauacauauugauagaa

SEQ ID NO: 1175490 - RNA, 20 nt, Human
ugcccaggcuggagugagug

SEQ ID NO: 1175491 - RNA, 21 nt, Human
ugcccaggcuggagugagugc

SEQ ID NO: 1175492 - RNA, 24 nt, Human
ugcucuuguugcccaggcuggagu

SEQ ID NO: 1175493 - RNA, 24 nt, Human
ugcugggauuacaggcgugagcca

SEQ ID NO: 1175494 - RNA, 20 nt, Human
uggagugagugccauggcgc

SEQ ID NO: 1175495 - RNA, 24 nt, Human
uggcgcgaucucagcucaucgcaa

SEQ ID NO: 1175496 - RNA, 18 nt, Human
ugggauuacaggcaugug

SEQ ID NO: 1175497 - RNA, 21 nt, Human
ugggauuacaggcaugugcca

SEQ ID NO: 1175498 - RNA, 22 nt, Human
ugggauuacaggcaugugccac

SEQ ID NO: 1175499 - RNA, 24 nt, Human
ugggauuacaggcaugugccacca

SEQ ID NO: 1175500 - RNA, 18 nt, Human
ugggauuacaggcgugag

SEQ ID NO: 1175501 - RNA, 21 nt, Human
ugggauuacaggcgugagcca

SEQ ID NO: 1175502 - RNA, 22 nt, Human
ugggauuacaggcgugagccac

SEQ ID NO: 1175503 - RNA, 23 nt, Human
ugggauuacaggcgugagccacc

SEQ ID NO: 1175504 - RNA, 23 nt, Human
ugggauuacaggcgugagccacc

SEQ ID NO: 1175505 - RNA, 24 nt, Human
ugggauuacaggcgugagccaccg

SEQ ID NO: 1175506 - RNA, 21 nt, Human
uggucaggcuggucgcgaacu

SEQ ID NO: 1175507 - RNA, 24 nt, Human
ugucccagccuccugaguagcugg

SEQ ID NO: 1175508 - RNA, 18 nt, Human
uuaguagagacgggguuu

SEQ ID NO: 1175509 - RNA, 18 nt, Human
uuaguagagacgggguuu

SEQ ID NO: 1175510 - RNA, 22 nt, Human
uuaguagagacgggguuuuucc

SEQ ID NO: 1175511 - RNA, 24 nt, Human
uuaguagagacgggguuuuuccau

SEQ ID NO: 1175512 - RNA, 19 nt, Human
uucacugagaguaaagaug

SEQ ID NO: 1175513 - RNA, 23 nt, Human
uugcucuuguugcccaggcugga

SEQ ID NO: 1175514 - RNA, 18 nt, Human
uuggccucccaaagugcu

SEQ ID NO: 1175515 - RNA, 23 nt, Human
uuguauuuuuaguagagacgggg

SEQ ID NO: 1175516 - RNA, 21 nt, Human
uuguugcccaggcuggaguga

SEQ ID NO: 1175517 - RNA, 19 nt, Human
uuuaaguagaaaaacaaca

SEQ ID NO: 1175518 - RNA, 24 nt, Human
uuugcucuuguugcccaggcugga

SEQ ID NO: 1175519 - RNA, 24 nt, Human
uuuugcucuuguugcccaggcugg

SEQ ID NO: 1175520 - RNA, 19 nt, Human
uuuuguauuuuuaguagag

SEQ ID NO: 1175521 - RNA, 20 nt, Human
uuuuguauuuuuaguagaga

SEQ ID NO: 1175522 - RNA, 22 nt, Human
uuuuuaguagagacgggguuuu

SEQ ID NO: 1175523 - RNA, 20 nt, Human
uuuuuuuuuuugagacagag

SEQ ID NO: 1175524 - RNA, 25 nt, Human
aaaaaaaaaaaaaacacaaaaaucc

SEQ ID NO: 1175525 - RNA, 20 nt, Human
aaaaaaauuuaccugcccuu

SEQ ID NO: 1175526 - RNA, 22 nt, Human
aaaaaacacucauuaaaaggcc

SEQ ID NO: 1175527 - RNA, 21 nt, Human
aaaaacacaaaaaucccugca

SEQ ID NO: 1175528 - RNA, 22 nt, Human
aaaaacacucauuaaaaggccc

SEQ ID NO: 1175529 - RNA, 21 nt, Human
aaacacacacgcacacauacc

SEQ ID NO: 1175530 - RNA, 24 nt, Human
aaacacagauuuacaauagugagg

SEQ ID NO: 1175531 - RNA, 24 nt, Human
aaagaaaaaacacucauuaaaagg

SEQ ID NO: 1175532 - RNA, 20 nt, Human
aaauagccucuaaugaagau

SEQ ID NO: 1175533 - RNA, 23 nt, Human
aagaaagaagaauucaacauuaa

SEQ ID NO: 1175534 - RNA, 19 nt, Human
aagaaugaagacuaaagga

SEQ ID NO: 1175535 - RNA, 23 nt, Human
aagcaaaccauccaaagugugaa

SEQ ID NO: 1175536 - RNA, 20 nt, Human
aagcaggccugcacagggcu

SEQ ID NO: 1175537 - RNA, 24 nt, Human
aaggagaagaggaaaaaaaagaac

SEQ ID NO: 1175538 - RNA, 25 nt, Human
aagggagacagguauauuuacaaaa

SEQ ID NO: 1175539 - RNA, 19 nt, Human
aaguacuaacgcacuauga

SEQ ID NO: 1175540 - RNA, 22 nt, Human
aagucacacacuuauuugaaau

SEQ ID NO: 1175541 - RNA, 25 nt, Human
aauagccucuaaugaagaucuccau

SEQ ID NO: 1175542 - RNA, 22 nt, Human
acaaaauuuucaccagcuggag

SEQ ID NO: 1175543 - RNA, 23 nt, Human
acacacacgcacacauacccgca

SEQ ID NO: 1175544 - RNA, 24 nt, Human
acauacccgcacccauucacaugu

SEQ ID NO: 1175545 - RNA, 23 nt, Human
accuugaaaaguaacaagaggaa

SEQ ID NO: 1175546 - RNA, 24 nt, Human
acuaaaggaaaccaagaaagaaga

SEQ ID NO: 1175547 - RNA, 21 nt, Human
acuacugcgauucugaaaagc

SEQ ID NO: 1175548 - RNA, 23 nt, Human
acuuugagagucuaugagaaaaa

SEQ ID NO: 1175549 - RNA, 21 nt, Human
agaaaaaacacucauuaaaag

SEQ ID NO: 1175550 - RNA, 19 nt, Human
agaagaggaaaaaaaagaa

SEQ ID NO: 1175551 - RNA, 22 nt, Human
agacaagcaaaccauccaaagu

SEQ ID NO: 1175552 - RNA, 21 nt, Human
agauggcagugggaagaagaa

SEQ ID NO: 1175553 - RNA, 23 nt, Human
aggaaaaaaaaaucccaaaauau

SEQ ID NO: 1175554 - RNA, 23 nt, Human
aggaaaaaaaagaacaccucuag

SEQ ID NO: 1175555 - RNA, 18 nt, Human
aggaaagacugaaaagua

SEQ ID NO: 1175556 - RNA, 18 nt, Human
aggaggaaaaaaaaaucc

SEQ ID NO: 1175557 - RNA, 23 nt, Human
aggaggaaaaaaaaaucccaaaa

SEQ ID NO: 1175558 - RNA, 18 nt, Human
aggcaagauggcaguggg

SEQ ID NO: 1175559 - RNA, 27 nt, Human
auacaacaacaaacacguaacauauac

SEQ ID NO: 1175560 - RNA, 22 nt, Human
aucacauuauucaaaggcaguc

SEQ ID NO: 1175561 - RNA, 21 nt, Human
auccaagggcaagccccagga

SEQ ID NO: 1175562 - RNA, 19 nt, Human
aucuaugucaaguguggag

SEQ ID NO: 1175563 - RNA, 22 nt, Human
auucuugucuuucaccuagagg

SEQ ID NO: 1175564 - RNA, 26 nt, Human
caaaaaaauuaaaaaaaaaaaaaaaa

SEQ ID NO: 1175565 - RNA, 19 nt, Human
caaagggcacguagaacug

SEQ ID NO: 1175566 - RNA, 19 nt, Human
caaaugcaauacaguaauu

SEQ ID NO: 1175567 - RNA, 22 nt, Human
caaauggaaauaccucggcuca

SEQ ID NO: 1175568 - RNA, 19 nt, Human
caaguagcuacuuucaagc

SEQ ID NO: 1175569 - RNA, 22 nt, Human
caaguuagcaaaaacacaccuc

SEQ ID NO: 1175570 - RNA, 27 nt, Human
cacacgcacacauacccgcacccauuc

SEQ ID NO: 1175571 - RNA, 18 nt, Human
cacaugucaucaccaccc

SEQ ID NO: 1175572 - RNA, 21 nt, Human
caggaaacaucuacacugaau

SEQ ID NO: 1175573 - RNA, 21 nt, Human
cagguauauuuacaaaaaucc

SEQ ID NO: 1175574 - RNA, 23 nt, Human
caguucaucucaaaagagccuua

SEQ ID NO: 1175575 - RNA, 23 nt, Human
cauauacaaaaagaaaaaacacu

SEQ ID NO: 1175576 - RNA, 24 nt, Human
ccauucacaugucaucaccacccc

SEQ ID NO: 1175577 - RNA, 22 nt, Human
ccauucagcucuauaaaccuga

SEQ ID NO: 1175578 - RNA, 19 nt, Human
ccucugcugggauguaaag

SEQ ID NO: 1175579 - RNA, 24 nt, Human
ccugcccuucuuuuuucuuaggaa

SEQ ID NO: 1175580 - RNA, 25 nt, Human
ccuugggcuaccaaacaagucuuuc

SEQ ID NO: 1175581 - RNA, 24 nt, Human
cuaaaugcuacaaucuuucagguc

SEQ ID NO: 1175582 - RNA, 22 nt, Human
cuaauuacaaaggcauagccaa

SEQ ID NO: 1175583 - RNA, 23 nt, Human
cugaaaaguagaacuaucacaau

SEQ ID NO: 1175584 - RNA, 21 nt, Human
cugccugaauccucugcuggg

SEQ ID NO: 1175585 - RNA, 24 nt, Human
cuggaggcuugccauggaucacag

SEQ ID NO: 1175586 - RNA, 30 nt, Human
cuuauacaaacacacacgcacacauagugu

SEQ ID NO: 1175587 - RNA, 21 nt, Human
cuuguguucagguccaguuuu

SEQ ID NO: 1175588 - RNA, 23 nt, Human
gaaauggagauacacaggaaaga

SEQ ID NO: 1175589 - RNA, 21 nt, Human
gaagacuaaaggaaaccaaga

SEQ ID NO: 1175590 - RNA, 23 nt, Human
gagaagaggaaaaaaaagaacac

SEQ ID NO: 1175591 - RNA, 19 nt, Human
gcucugaauaaagaaugaa

SEQ ID NO: 1175592 - RNA, 21 nt, Human
ggaagaagaacgugacuucug

SEQ ID NO: 1175593 - RNA, 22 nt, Human
gugaacauucacuguauaaaua

SEQ ID NO: 1175594 - RNA, 25 nt, Human
uaaaaaaaaaaaaaaaacacaaaaa

SEQ ID NO: 1175595 - RNA, 21 nt, Human
uaaaaggcccugucacaaagg

SEQ ID NO: 1175596 - RNA, 22 nt, Human
uaaaauccugagagucccugcc

SEQ ID NO: 1175597 - RNA, 21 nt, Human
uaaagcaggccugcacagggc

SEQ ID NO: 1175598 - RNA, 22 nt, Human
uaaaugcuacaaucuuucaggu

SEQ ID NO: 1175599 - RNA, 21 nt, Human
uaacaagaggaagucaugaaa

SEQ ID NO: 1175600 - RNA, 22 nt, Human
uaacauauacaaaaagaaaaaa

SEQ ID NO: 1175601 - RNA, 22 nt, Human
uauacaaaaagaaaaaacacuc

SEQ ID NO: 1175602 - RNA, 22 nt, Human
uauacaaaaagaaaaaacacuc

SEQ ID NO: 1175603 - RNA, 22 nt, Human
uauacaguagcaaaaucuauuu

SEQ ID NO: 1175604 - RNA, 22 nt, Human
uaugaaauggagauacacagga

SEQ ID NO: 1175605 - RNA, 18 nt, Human
uaugagcaaggcuguugc

SEQ ID NO: 1175606 - RNA, 23 nt, Human
uauuacaaacaucaacucaaagc

SEQ ID NO: 1175607 - RNA, 25 nt, Human
uauuaugagaaauagccucuaauga

SEQ ID NO: 1175608 - RNA, 27 nt, Human
uauuccugcuccgauuugagcuggaaa

SEQ ID NO: 1175609 - RNA, 23 nt, Human
ucacacacuuauuugaaauacag

SEQ ID NO: 1175610 - RNA, 21 nt, Human
ucaguagcagcaguuugucca

SEQ ID NO: 1175611 - RNA, 18 nt, Human
uccauggcugguacagua

SEQ ID NO: 1175612 - RNA, 24 nt, Human
ucccaaaauauuaagucacacacu

SEQ ID NO: 1175613 - RNA, 18 nt, Human
uccuagacacagagaccc

SEQ ID NO: 1175614 - RNA, 18 nt, Human
uccuagacacagagaccc

SEQ ID NO: 1175615 - RNA, 20 nt, Human
ucuuuuuucuuaggaaggag

SEQ ID NO: 1175616 - RNA, 19 nt, Human
ugaaaagcauuccugacuu

SEQ ID NO: 1175617 - RNA, 18 nt, Human
ugaaaaguaacaagagga

SEQ ID NO: 1175618 - RNA, 19 nt, Human
ugaaaaguagaacuaucac

SEQ ID NO: 1175619 - RNA, 21 nt, Human
ugaaaaguagaacuaucacaa

SEQ ID NO: 1175620 - RNA, 21 nt, Human
ugaaauccaagggcaagcccc

SEQ ID NO: 1175621 - RNA, 23 nt, Human
ugaaauggagauacacaggaaag

SEQ ID NO: 1175622 - RNA, 18 nt, Human
ugaagacuaaaggaaacc

SEQ ID NO: 1175623 - RNA, 18 nt, Human
ugaaggucucagaaggua

SEQ ID NO: 1175624 - RNA, 20 nt, Human
ugacuucugcgucauuuccu

SEQ ID NO: 1175625 - RNA, 19 nt, Human
ugagaagaggauguaaaag

SEQ ID NO: 1175626 - RNA, 18 nt, Human
ugagcuggaaauuaaaca

SEQ ID NO: 1175627 - RNA, 21 nt, Human
ugaggaagauguaacuggagg

SEQ ID NO: 1175628 - RNA, 19 nt, Human
ugccugaauccucugcugg

SEQ ID NO: 1175629 - RNA, 21 nt, Human
ugccugaauccucugcuggga

SEQ ID NO: 1175630 - RNA, 19 nt, Human
ugcucuguuauaaaauauu

SEQ ID NO: 1175631 - RNA, 20 nt, Human
uggaaauaccucggcucagu

SEQ ID NO: 1175632 - RNA, 18 nt, Human
uguguucagguccaguuu

SEQ ID NO: 1175633 - RNA, 24 nt, Human
uguugcaaaaaaauuaaaaaaaaa

SEQ ID NO: 1175634 - RNA, 21 nt, Human
uuaauacaaaggagaagagga

SEQ ID NO: 1175635 - RNA, 21 nt, Human
uucaacauuaauauucaaagc

SEQ ID NO: 1175636 - RNA, 18 nt, Human
uucagggggaguaugaaa

SEQ ID NO: 1175637 - RNA, 20 nt, Human
uucagggggaguaugaaaau

SEQ ID NO: 1175638 - RNA, 23 nt, Human
uuccuugggcuaccaaacaaguc

SEQ ID NO: 1175639 - RNA, 18 nt, Human
uugaaacauguuggcauc

SEQ ID NO: 1175640 - RNA, 19 nt, Human
uugaaucuuuucucuggag

SEQ ID NO: 1175641 - RNA, 22 nt, Human
uugaaucuuuucucuggaggcu

SEQ ID NO: 1175642 - RNA, 21 nt, Human
uugguuaaaaaaauuuaccug

SEQ ID NO: 1175643 - RNA, 19 nt, Human
uugguuuugaaacauguug

SEQ ID NO: 1175644 - RNA, 19 nt, Human
uuuaaaggaggaaaaaaaa

SEQ ID NO: 1175645 - RNA, 21 nt, Human
uuuaauuagaguuugaucacc

SEQ ID NO: 1175646 - RNA, 20 nt, Human
uuuacauacucucugaaaga

SEQ ID NO: 1175647 - RNA, 22 nt, Human
uuuccauuagugcucuguuaua

SEQ ID NO: 1175648 - RNA, 18 nt, Human
uuucuuaggaaggaguga

SEQ ID NO: 1175649 - RNA, 20 nt, Human
uuugauacuuucugaaauaa

SEQ ID NO: 1175650 - RNA, 18 nt, Human
uuuggggcacaaaauuuu

SEQ ID NO: 1175651 - RNA, 21 nt, Human
uuuuaaaggaggaaaaaaaaa

SEQ ID NO: 1175652 - RNA, 23 nt, Human
uuuuacuaaaauacaaaaaaggg

SEQ ID NO: 1175653 - RNA, 23 nt, Human
agcagcccuaugaccacauaagu

SEQ ID NO: 1175654 - RNA, 21 nt, Human
augaccacauaaguacuuucc

SEQ ID NO: 1175655 - RNA, 19 nt, Human
auuccaucagucaacuaaa

SEQ ID NO: 1175656 - RNA, 21 nt, Human
caacuaaacauuucgucuccu

SEQ ID NO: 1175657 - RNA, 19 nt, Human
ccucaccacagugcuuggg

SEQ ID NO: 1175658 - RNA, 21 nt, Human
cgacagaaacagcagcccuau

SEQ ID NO: 1175659 - RNA, 24 nt, Human
gaaacagcagcccuaugaccacau

SEQ ID NO: 1175660 - RNA, 22 nt, Human
uaaacaucgacagaaacagcag

SEQ ID NO: 1175661 - RNA, 21 nt, Human
uuagccaauaaugaugcuccu

SEQ ID NO: 1175662 - RNA, 21 nt, Human
accucagccgccgccgcccgu

SEQ ID NO: 1175663 - RNA, 26 nt, Human
acuuuacaauugagggcagggggcua

SEQ ID NO: 1175664 - RNA, 19 nt, Human
auaccgggccacccgcucc

SEQ ID NO: 1175665 - RNA, 21 nt, Human
cacucuuagcaggacgggagc

SEQ ID NO: 1175666 - RNA, 22 nt, Human
cagccgccgccgcccgucgggg

SEQ ID NO: 1175667 - RNA, 24 nt, Human
cagggccccaggucgcagagggcc

SEQ ID NO: 1175668 - RNA, 26 nt, Human
ccaccgccgccaccgccgccuccgcc

SEQ ID NO: 1175669 - RNA, 21 nt, Human
ccaccucagccgccgccgccc

SEQ ID NO: 1175670 - RNA, 28 nt, Human
cccagggccccaggucgcagagggcccc

SEQ ID NO: 1175671 - RNA, 30 nt, Human
ccgccaucuucccgccgccgccgccgccgg

SEQ ID NO: 1175672 - RNA, 21 nt, Human
ccgccgccaccgccgccuccg

SEQ ID NO: 1175673 - RNA, 18 nt, Human
ccgccgccgccgccgccg

SEQ ID NO: 1175674 - RNA, 20 nt, Human
ccgccgccgccgccgccgcc

SEQ ID NO: 1175675 - RNA, 20 nt, Human
ccgccgccgccucccuccgc

SEQ ID NO: 1175676 - RNA, 21 nt, Human
ccgccgccgccucccuccgcc

SEQ ID NO: 1175677 - RNA, 22 nt, Human
ccgccgccgccucccuccgccu

SEQ ID NO: 1175678 - RNA, 18 nt, Human
ccgccucccuccgccucc

SEQ ID NO: 1175679 - RNA, 22 nt, Human
ccuucuaauuuaccggauuuuu

SEQ ID NO: 1175680 - RNA, 23 nt, Human
ccuuuuuguauccauauuuaaaa

SEQ ID NO: 1175681 - RNA, 21 nt, Human
cgcagagggcccggugcucgg

SEQ ID NO: 1175682 - RNA, 20 nt, Human
cgccgccaccgccgccuccc

SEQ ID NO: 1175683 - RNA, 22 nt, Human
cggagcacuucacccagggccc

SEQ ID NO: 1175684 - RNA, 21 nt, Human
cggcaccgacacucuuagcag

SEQ ID NO: 1175685 - RNA, 18 nt, Human
cggggcccgacccagccg

SEQ ID NO: 1175686 - RNA, 21 nt, Human
cuagcaaugguugcucacuuu

SEQ ID NO: 1175687 - RNA, 21 nt, Human
cucccaccgcggcaccgacac

SEQ ID NO: 1175688 - RNA, 23 nt, Human
cuucccgccgccgccgccgccgc

SEQ ID NO: 1175689 - RNA, 24 nt, Human
gagggcccggugcucggggucccg

SEQ ID NO: 1175690 - RNA, 20 nt, Human
ggauuuuuaaaaaucaguuu

SEQ ID NO: 1175691 - RNA, 23 nt, Human
gucccgcuccuucucccgcucca

SEQ ID NO: 1175692 - RNA, 20 nt, Human
uacaguaucuauucuagaau

SEQ ID NO: 1175693 - RNA, 25 nt, Human
uaccggauuuuuaaaaaucaguuug

SEQ ID NO: 1175694 - RNA, 22 nt, Human
uauccauauuuaaaaugaagac

SEQ ID NO: 1175695 - RNA, 18 nt, Human
ucaaaguaaaguuaaagc

SEQ ID NO: 1175696 - RNA, 19 nt, Human
uccaccucagccgccgccg

SEQ ID NO: 1175697 - RNA, 21 nt, Human
ucuucccgccgccgccgccgc

SEQ ID NO: 1175698 - RNA, 24 nt, Human
uucccgccgccgccgccgccgccu

SEQ ID NO: 1175699 - RNA, 19 nt, Human
uuccggcagcgcacacugc

SEQ ID NO: 1175700 - RNA, 21 nt, Human
acccuugcggauauggugcca

SEQ ID NO: 1175701 - RNA, 25 nt, Human
accucguaauccauaggccaaacca

SEQ ID NO: 1175702 - RNA, 24 nt, Human
agcaacagcaaccucguaauccau

SEQ ID NO: 1175703 - RNA, 22 nt, Human
agcaaccucguaauccauaggc

SEQ ID NO: 1175704 - RNA, 21 nt, Human
auguacaacgagucccuggga

SEQ ID NO: 1175705 - RNA, 22 nt, Human
caacagcaaccucguaauccau

SEQ ID NO: 1175706 - RNA, 23 nt, Human
cacuuccucaaagaagcugggaa

SEQ ID NO: 1175707 - RNA, 20 nt, Human
ccugcagccacugcaauugu

SEQ ID NO: 1175708 - RNA, 18 nt, Human
ccugggaagcgcugugga

SEQ ID NO: 1175709 - RNA, 18 nt, Human
cuauguacaacgaguccc

SEQ ID NO: 1175710 - RNA, 25 nt, Human
gacccacuuccucaaagaagcuggu

SEQ ID NO: 1175711 - RNA, 21 nt, Human
gagcagacuggaaaagcuuuc

SEQ ID NO: 1175712 - RNA, 23 nt, Human
ggauauggugccaugcagcacca

SEQ ID NO: 1175713 - RNA, 25 nt, Human
gggaauucucucuuaggaacagcau

SEQ ID NO: 1175714 - RNA, 18 nt, Human
uaggagacccacuuccuc

SEQ ID NO: 1175715 - RNA, 24 nt, Human
uauggugccaugcagcaccauugg

SEQ ID NO: 1175716 - RNA, 18 nt, Human
ucccugggaucuuuggug

SEQ ID NO: 1175717 - RNA, 24 nt, Human
ugacuucaacucuaaacuaaauuc

SEQ ID NO: 1175718 - RNA, 20 nt, Human
uggggaaucagcaacagcaa

SEQ ID NO: 1175719 - RNA, 23 nt, Human
aagaauugcuugagcccaggaga

SEQ ID NO: 1175720 - RNA, 18 nt, Human
aaguuuuucuuuguugac

SEQ ID NO: 1175721 - RNA, 20 nt, Human
aauugcuugagcccaggaga

SEQ ID NO: 1175722 - RNA, 19 nt, Human
acauugcacuccagccugg

SEQ ID NO: 1175723 - RNA, 20 nt, Human
acauugcacuccagccugga

SEQ ID NO: 1175724 - RNA, 20 nt, Human
acauugcacuccagccuggc

SEQ ID NO: 1175725 - RNA, 25 nt, Human
acauugcacuccagccuggcugaca

SEQ ID NO: 1175726 - RNA, 26 nt, Human
acauugcacuccagccuggcugacaa

SEQ ID NO: 1175727 - RNA, 24 nt, Human
agacagagguugcagugagccaag

SEQ ID NO: 1175728 - RNA, 21 nt, Human
agagaacacuucggaauacag

SEQ ID NO: 1175729 - RNA, 22 nt, Human
agagguugcagugagccaagau

SEQ ID NO: 1175730 - RNA, 24 nt, Human
agagguugcagugagccaagauug

SEQ ID NO: 1175731 - RNA, 19 nt, Human
agccuggcugacaaaggaa

SEQ ID NO: 1175732 - RNA, 24 nt, Human
aggaagacucuagcaaggauauug

SEQ ID NO: 1175733 - RNA, 23 nt, Human
aggcagaagaauugcuugagccc

SEQ ID NO: 1175734 - RNA, 24 nt, Human
aggcagaagaauugcuugagccca

SEQ ID NO: 1175735 - RNA, 24 nt, Human
aggcugaggcagaagaauugcuug

SEQ ID NO: 1175736 - RNA, 20 nt, Human
auugcacuccagccuggcug

SEQ ID NO: 1175737 - RNA, 21 nt, Human
auugcacuccagccuggcuga

SEQ ID NO: 1175738 - RNA, 20 nt, Human
cacugcauguaaccuaggcu

SEQ ID NO: 1175739 - RNA, 22 nt, Human
cagccuggcugacaaaggaaga

SEQ ID NO: 1175740 - RNA, 24 nt, Human
cagcuacucaggaggcugaggcag

SEQ ID NO: 1175741 - RNA, 27 nt, Human
caggaggcugaggcagaagaauugcuu

SEQ ID NO: 1175742 - RNA, 24 nt, Human
cauugcacauugcacuccagccug

SEQ ID NO: 1175743 - RNA, 18 nt, Human
cauugcacuccagccugg

SEQ ID NO: 1175744 - RNA, 18 nt, Human
cauugcacuccagccugg

SEQ ID NO: 1175745 - RNA, 19 nt, Human
cauugcacuccagccuggc

SEQ ID NO: 1175746 - RNA, 21 nt, Human
cauugcacuccagccuggcug

SEQ ID NO: 1175747 - RNA, 24 nt, Human
cauugcacuccagccuggcugaca

SEQ ID NO: 1175748 - RNA, 18 nt, Human
cccacacgggugugggag

SEQ ID NO: 1175749 - RNA, 24 nt, Human
cccacacgggugugggagcgaccg

SEQ ID NO: 1175750 - RNA, 21 nt, Human
cuguaaucccagcuacucagg

SEQ ID NO: 1175751 - RNA, 21 nt, Human
cuguaugcagcaucuucuucc

SEQ ID NO: 1175752 - RNA, 24 nt, Human
cuuaguggaacucaaacaucugag

SEQ ID NO: 1175753 - RNA, 27 nt, Human
gagaacacuucggaauacagaugccau

SEQ ID NO: 1175754 - RNA, 21 nt, Human
gagacagagguugcagugagc

SEQ ID NO: 1175755 - RNA, 18 nt, Human
gagguugcagugagccaa

SEQ ID NO: 1175756 - RNA, 18 nt, Human
gcccacacggguguggga

SEQ ID NO: 1175757 - RNA, 24 nt, Human
gcccaggagacagagguugcagug

SEQ ID NO: 1175758 - RNA, 19 nt, Human
gccuggcugacaaaggaag

SEQ ID NO: 1175759 - RNA, 19 nt, Human
ggcuggguccugagacagc

SEQ ID NO: 1175760 - RNA, 20 nt, Human
ucccagagcccacacgggug

SEQ ID NO: 1175761 - RNA, 18 nt, Human
uccuuagacgucuucccc

SEQ ID NO: 1175762 - RNA, 20 nt, Human
ugacaaaggaagacucuagc

SEQ ID NO: 1175763 - RNA, 22 nt, Human
ugagccaagauugugccauugc

SEQ ID NO: 1175764 - RNA, 25 nt, Human
ugaggcagaagaauugcuugagccc

SEQ ID NO: 1175765 - RNA, 21 nt, Human
ugccauucucaaaauugaagu

SEQ ID NO: 1175766 - RNA, 20 nt, Human
ugggagcgaccgggaugacc

SEQ ID NO: 1175767 - RNA, 20 nt, Human
ugggcuggcuggaagagggg

SEQ ID NO: 1175768 - RNA, 21 nt, Human
uugcacauugcacuccagccu

SEQ ID NO: 1175769 - RNA, 22 nt, Human
uugcagugagccaagauugugc

SEQ ID NO: 1175770 - RNA, 24 nt, Human
uugcuugagcccaggagacagagg

SEQ ID NO: 1175771 - RNA, 24 nt, Human
aagaugccccaggucccagggggc

SEQ ID NO: 1175772 - RNA, 25 nt, Human
aagcgggugcucgaacagccuggcc

SEQ ID NO: 1175773 - RNA, 19 nt, Human
aauccacaaagcccucccu

SEQ ID NO: 1175774 - RNA, 26 nt, Human
acaaagcacuccuaaggugggcaaag

SEQ ID NO: 1175775 - RNA, 21 nt, Human
acaaagcccucccucugcuca

SEQ ID NO: 1175776 - RNA, 19 nt, Human
acacacccaggcggaggcc

SEQ ID NO: 1175777 - RNA, 20 nt, Human
agaagacuggaugagaacca

SEQ ID NO: 1175778 - RNA, 20 nt, Human
agacuggaugagaaccaaug

SEQ ID NO: 1175779 - RNA, 19 nt, Human
agggguggcagugagccaa

SEQ ID NO: 1175780 - RNA, 20 nt, Human
agggguggcagugagccaag

SEQ ID NO: 1175781 - RNA, 19 nt, Human
caaagcacuccuaaggugg

SEQ ID NO: 1175782 - RNA, 21 nt, Human
caggucccagggggccccaca

SEQ ID NO: 1175783 - RNA, 22 nt, Human
caguugccugccaagggccugg

SEQ ID NO: 1175784 - RNA, 24 nt, Human
cauccuauccuugcauugguccca

SEQ ID NO: 1175785 - RNA, 23 nt, Human
ccacaccagaauccugggguagg

SEQ ID NO: 1175786 - RNA, 26 nt, Human
cccacgcagcgagaucccacuggaca

SEQ ID NO: 1175787 - RNA, 20 nt, Human
ccccaccccagaagacugga

SEQ ID NO: 1175788 - RNA, 20 nt, Human
ccccgggacagcuggaccaa

SEQ ID NO: 1175789 - RNA, 21 nt, Human
ccgcuuuggggcugagccugg

SEQ ID NO: 1175790 - RNA, 21 nt, Human
ccgcuuuggggcugagccugg

SEQ ID NO: 1175791 - RNA, 27 nt, Human
ccggugcgcggggucgugggggacgcc

SEQ ID NO: 1175792 - RNA, 20 nt, Human
cgacagacccuguggaaggu

SEQ ID NO: 1175793 - RNA, 18 nt, Human
cgacucggaccgacgcgg

SEQ ID NO: 1175794 - RNA, 21 nt, Human
cgcccuggcuggugugcacgg

SEQ ID NO: 1175795 - RNA, 21 nt, Human
cgccgggaucccgcccccgca

SEQ ID NO: 1175796 - RNA, 22 nt, Human
cucccucugcucagacccugcc

SEQ ID NO: 1175797 - RNA, 20 nt, Human
cuugcgugcugcuccucccg

SEQ ID NO: 1175798 - RNA, 20 nt, Human
gaacaggacguccuccuccg

SEQ ID NO: 1175799 - RNA, 18 nt, Human
gagcuccuggcacagaac

SEQ ID NO: 1175800 - RNA, 22 nt, Human
gagcuccuggcacagaacuccc

SEQ ID NO: 1175801 - RNA, 20 nt, Human
gaggcgagcgagcgagauca

SEQ ID NO: 1175802 - RNA, 19 nt, Human
gauggggaaaaugagcugg

SEQ ID NO: 1175803 - RNA, 20 nt, Human
gcaaagaugccccagguccc

SEQ ID NO: 1175804 - RNA, 21 nt, Human
gccacaccagaauccuggggu

SEQ ID NO: 1175805 - RNA, 22 nt, Human
gccacaccagaauccuggggua

SEQ ID NO: 1175806 - RNA, 24 nt, Human
gcugcaguugccugccaagggccu

SEQ ID NO: 1175807 - RNA, 19 nt, Human
guggcagugagccaagccu

SEQ ID NO: 1175808 - RNA, 22 nt, Human
uaaccaggacacacccaggcgg

SEQ ID NO: 1175809 - RNA, 20 nt, Human
uaacuugcgugcugcuccuc

SEQ ID NO: 1175810 - RNA, 27 nt, Human
uaaggugggcaaagaugccccaggucc

SEQ ID NO: 1175811 - RNA, 25 nt, Human
ucacaugcacaucucauccuauccu

SEQ ID NO: 1175812 - RNA, 23 nt, Human
ucccagggggccccacacucucc

SEQ ID NO: 1175813 - RNA, 24 nt, Human
ucccugaagcugcucugggagcuc

SEQ ID NO: 1175814 - RNA, 19 nt, Human
uccgccgcuuuggggcuga

SEQ ID NO: 1175815 - RNA, 19 nt, Human
uccgccggggccggggggc

SEQ ID NO: 1175816 - RNA, 21 nt, Human
ucucauuccucucccugccaa

SEQ ID NO: 1175817 - RNA, 19 nt, Human
ucuccgccggggccggggg

SEQ ID NO: 1175818 - RNA, 19 nt, Human
ugaacaggacguccuccuc

SEQ ID NO: 1175819 - RNA, 22 nt, Human
ugcaaugucaggcagccugggc

SEQ ID NO: 1175820 - RNA, 23 nt, Human
ugccaagacggacccaccuggaa

SEQ ID NO: 1175821 - RNA, 18 nt, Human
ugccaagggccugguggc

SEQ ID NO: 1175822 - RNA, 19 nt, Human
ugccaagggccugguggcc

SEQ ID NO: 1175823 - RNA, 21 nt, Human
ugccaagggccugguggccuu

SEQ ID NO: 1175824 - RNA, 19 nt, Human
ugcccgacagacccugugg

SEQ ID NO: 1175825 - RNA, 18 nt, Human
uggcacagaacucccaca

SEQ ID NO: 1175826 - RNA, 22 nt, Human
uggcacagaacucccacaccuc

SEQ ID NO: 1175827 - RNA, 19 nt, Human
uggccaggagggaggcguc

SEQ ID NO: 1175828 - RNA, 22 nt, Human
uggggaaaaugagcuggagaga

SEQ ID NO: 1175829 - RNA, 18 nt, Human
ugucaggcagccugggca

SEQ ID NO: 1175830 - RNA, 27 nt, Human
uugcgugcugcuccucccgaacgcccu

SEQ ID NO: 1175831 - RNA, 22 nt, Human
uuggaauccacaaagcccuccc

SEQ ID NO: 1175832 - RNA, 21 nt, Human
aaaaaacagggcaggaaccua

SEQ ID NO: 1175833 - RNA, 23 nt, Human
aaacaaaaaacagggcaggaacc

SEQ ID NO: 1175834 - RNA, 26 nt, Human
aaacaaaaaacagggcaggaaccuaa

SEQ ID NO: 1175835 - RNA, 22 nt, Human
aaacaaacaaacaaaaaacagg

SEQ ID NO: 1175836 - RNA, 18 nt, Human
aaacagggcaggaaccua

SEQ ID NO: 1175837 - RNA, 19 nt, Human
aaacagggcaggaaccuaa

SEQ ID NO: 1175838 - RNA, 22 nt, Human
aaagucagauuuggugguucuc

SEQ ID NO: 1175839 - RNA, 23 nt, Human
aacaaacaaacaaacaaaaaaca

SEQ ID NO: 1175840 - RNA, 23 nt, Human
aacaaacaaacaaacaaacaaac

SEQ ID NO: 1175841 - RNA, 23 nt, Human
aacaaacaaacaaacaaacaaac

SEQ ID NO: 1175842 - RNA, 18 nt, Human
aaccugcaggcaugguca

SEQ ID NO: 1175843 - RNA, 18 nt, Human
acaaacaaacaaacaaac

SEQ ID NO: 1175844 - RNA, 18 nt, Human
acaaacaaacaaacaaac

SEQ ID NO: 1175845 - RNA, 18 nt, Human
acaaacaaacaaacaaac

SEQ ID NO: 1175846 - RNA, 24 nt, Human
acaaacaaacaaacaaacaaaaaa

SEQ ID NO: 1175847 - RNA, 25 nt, Human
acccugcaugccugaaguccgacuc

SEQ ID NO: 1175848 - RNA, 26 nt, Human
acuguuuaaaaaacaaacaaacaaac

SEQ ID NO: 1175849 - RNA, 19 nt, Human
agcaggguggucggagaug

SEQ ID NO: 1175850 - RNA, 19 nt, Human
augguuuuucuuguuggcu

SEQ ID NO: 1175851 - RNA, 23 nt, Human
auuguaucaucaaaagcugcuuu

SEQ ID NO: 1175852 - RNA, 20 nt, Human
caaaagcugcuuuugccaac

SEQ ID NO: 1175853 - RNA, 23 nt, Human
caaacaaacaaaaaacagggcug

SEQ ID NO: 1175854 - RNA, 25 nt, Human
caaacaaacaaacaaacaaaaaaca

SEQ ID NO: 1175855 - RNA, 21 nt, Human
caccaucacccugcaugccug

SEQ ID NO: 1175856 - RNA, 21 nt, Human
cagcggcagccgcucccacag

SEQ ID NO: 1175857 - RNA, 23 nt, Human
caggaaccuaaauucugacgcca

SEQ ID NO: 1175858 - RNA, 21 nt, Human
caggguggucggagaugguuu

SEQ ID NO: 1175859 - RNA, 19 nt, Human
caucuuccaccuccugcag

SEQ ID NO: 1175860 - RNA, 23 nt, Human
ccacagcggcagccgcucccaca

SEQ ID NO: 1175861 - RNA, 24 nt, Human
cugcucggccagcuuuaccugggg

SEQ ID NO: 1175862 - RNA, 18 nt, Human
gaccgauggaaguggaua

SEQ ID NO: 1175863 - RNA, 20 nt, Human
gauagggaagagcagggugg

SEQ ID NO: 1175864 - RNA, 20 nt, Human
gccugaaguccauagugucc

SEQ ID NO: 1175865 - RNA, 21 nt, Human
ggaaccuaaauucugacgcca

SEQ ID NO: 1175866 - RNA, 24 nt, Human
guaccagauccucucgaucaucca

SEQ ID NO: 1175867 - RNA, 18 nt, Human
gugggauagggaagagca

SEQ ID NO: 1175868 - RNA, 25 nt, Human
ucagugacaauggggaguugccaag

SEQ ID NO: 1175869 - RNA, 21 nt, Human
uccacagcggcagccgcuccc

SEQ ID NO: 1175870 - RNA, 19 nt, Human
uccugcagcgcuucuuuau

SEQ ID NO: 1175871 - RNA, 25 nt, Human
ucgaucauccacagcggcagccgcu

SEQ ID NO: 1175872 - RNA, 20 nt, Human
ucucacugauuuucaucuuc

SEQ ID NO: 1175873 - RNA, 21 nt, Human
ucucacugauuuucaucuucc

SEQ ID NO: 1175874 - RNA, 27 nt, Human
ucugcaauuguaucaucaaaagcugcu

SEQ ID NO: 1175875 - RNA, 19 nt, Human
ucugcgcgaccgauggaag

SEQ ID NO: 1175876 - RNA, 19 nt, Human
ugccaaggggugggauagg

SEQ ID NO: 1175877 - RNA, 20 nt, Human
ugccaaggggugggauaggg

SEQ ID NO: 1175878 - RNA, 23 nt, Human
uuguauugcucagccugcucggc

SEQ ID NO: 1175879 - RNA, 23 nt, Human
uuuuaugucucacugauuuucau

SEQ ID NO: 1175880 - RNA, 23 nt, Human
uuuucaucuuccaccuccugcag

SEQ ID NO: 1175881 - RNA, 19 nt, Human
agucacagaggcugggccu

SEQ ID NO: 1175882 - RNA, 18 nt, Human
ccauauccucucaguauc

SEQ ID NO: 1175883 - RNA, 18 nt, Human
cucuggguaguucucaaa

SEQ ID NO: 1175884 - RNA, 19 nt, Human
guaaauucucauguccaca

SEQ ID NO: 1175885 - RNA, 21 nt, Human
uauaaccuucuuugaacaccu

SEQ ID NO: 1175886 - RNA, 21 nt, Human
ucacagaggcugggccucuag

SEQ ID NO: 1175887 - RNA, 18 nt, Human
ucaguaucacuuuuugaa

SEQ ID NO: 1175888 - RNA, 20 nt, Human
ucucaaacauugguuaaguu

SEQ ID NO: 1175889 - RNA, 19 nt, Human
aaaaccacaaacacagaac

SEQ ID NO: 1175890 - RNA, 18 nt, Human
aaacagguuuuuucuauu

SEQ ID NO: 1175891 - RNA, 23 nt, Human
aaccacaaacacagaacaagccu

SEQ ID NO: 1175892 - RNA, 18 nt, Human
aaccuagcccgguggcgg

SEQ ID NO: 1175893 - RNA, 21 nt, Human
acaaaaccacaaacacagaac

SEQ ID NO: 1175894 - RNA, 26 nt, Human
acaaaaccacaaacacagaacaagcc

SEQ ID NO: 1175895 - RNA, 27 nt, Human
acagaacaagccuccuaaggcuuuuaa

SEQ ID NO: 1175896 - RNA, 22 nt, Human
accacaaacacagaacaagccu

SEQ ID NO: 1175897 - RNA, 19 nt, Human
accgaggugacggcccaug

SEQ ID NO: 1175898 - RNA, 22 nt, Human
accgugucuugaauaugguugu

SEQ ID NO: 1175899 - RNA, 22 nt, Human
acuccgggauuccgggagcggg

SEQ ID NO: 1175900 - RNA, 19 nt, Human
acuuuguggaugaaagugc

SEQ ID NO: 1175901 - RNA, 22 nt, Human
agcucugcgcgcuccuuuggcc

SEQ ID NO: 1175902 - RNA, 18 nt, Human
agcuggacucuccaaagc

SEQ ID NO: 1175903 - RNA, 23 nt, Human
aggcagguucggcuggugaugcc

SEQ ID NO: 1175904 - RNA, 18 nt, Human
aguagcuuucaaagaccu

SEQ ID NO: 1175905 - RNA, 19 nt, Human
aguagugauuguccccgag

SEQ ID NO: 1175906 - RNA, 19 nt, Human
auggcaccuugagcugcug

SEQ ID NO: 1175907 - RNA, 21 nt, Human
caaaaccacaaacacagaaca

SEQ ID NO: 1175908 - RNA, 28 nt, Human
caaaaccacaaacacagaacaagccucc

SEQ ID NO: 1175909 - RNA, 21 nt, Human
caaacacagaacaagccuccu

SEQ ID NO: 1175910 - RNA, 20 nt, Human
caaccccgagcccuucuccu

SEQ ID NO: 1175911 - RNA, 24 nt, Human
caagcucucuuccuuuccaccccu

SEQ ID NO: 1175912 - RNA, 19 nt, Human
cacucacuucaggguccag

SEQ ID NO: 1175913 - RNA, 18 nt, Human
cagacucgguucgggccg

SEQ ID NO: 1175914 - RNA, 19 nt, Human
cagcaguacaagcugguaa

SEQ ID NO: 1175915 - RNA, 21 nt, Human
cagcuggacucuccaaagccu

SEQ ID NO: 1175916 - RNA, 25 nt, Human
cagcuuacagcugccgugucuucaa

SEQ ID NO: 1175917 - RNA, 19 nt, Human
ccaaaaacguauuuagccg

SEQ ID NO: 1175918 - RNA, 18 nt, Human
ccaacccugagucauagc

SEQ ID NO: 1175919 - RNA, 22 nt, Human
ccacaaacacagaacaagccuc

SEQ ID NO: 1175920 - RNA, 28 nt, Human
ccacaaacacagaacaagcugcuacugc

SEQ ID NO: 1175921 - RNA, 23 nt, Human
ccacccgguggccuccuacuucc

SEQ ID NO: 1175922 - RNA, 22 nt, Human
ccagagccgggcugcuucgcgc

SEQ ID NO: 1175923 - RNA, 20 nt, Human
cccagcccaagcucucuucc

SEQ ID NO: 1175924 - RNA, 19 nt, Human
ccccucuuggcucuugggg

SEQ ID NO: 1175925 - RNA, 19 nt, Human
cccgguggcggaggagugc

SEQ ID NO: 1175926 - RNA, 21 nt, Human
cccuuugcacccgcagccaaa

SEQ ID NO: 1175927 - RNA, 19 nt, Human
ccgguggccuccuacuucc

SEQ ID NO: 1175928 - RNA, 22 nt, Human
ccuacgacacgagccccaaggc

SEQ ID NO: 1175929 - RNA, 19 nt, Human
ccugaaccgaggugacggc

SEQ ID NO: 1175930 - RNA, 18 nt, Human
ccuucuggaguagcuuuc

SEQ ID NO: 1175931 - RNA, 19 nt, Human
cgaaaggaauaaacuggug

SEQ ID NO: 1175932 - RNA, 19 nt, Human
cgagccccaaggcaggagg

SEQ ID NO: 1175933 - RNA, 22 nt, Human
cgaggugacggcccaugccacc

SEQ ID NO: 1175934 - RNA, 19 nt, Human
cgccaagaacucugcgaug

SEQ ID NO: 1175935 - RNA, 23 nt, Human
cgccaagaacucugcgaugggcu

SEQ ID NO: 1175936 - RNA, 19 nt, Human
cgcccuuugcuugcagcuc

SEQ ID NO: 1175937 - RNA, 22 nt, Human
cgccuugugcuaccugaaccga

SEQ ID NO: 1175938 - RNA, 26 nt, Human
cgcgcgcgcgcgucuguguguauccu

SEQ ID NO: 1175939 - RNA, 18 nt, Human
cgcgcuucuuggcuuuuu

SEQ ID NO: 1175940 - RNA, 19 nt, Human
cgcuaaucaaucaauugca

SEQ ID NO: 1175941 - RNA, 23 nt, Human
cggcggcgcccgcggcggugccc

SEQ ID NO: 1175942 - RNA, 22 nt, Human
cgguggccuccuacuuccucag

SEQ ID NO: 1175943 - RNA, 23 nt, Human
cuacgacacgagccccaaggcag

SEQ ID NO: 1175944 - RNA, 23 nt, Human
cucaacugcgcacugagucucaa

SEQ ID NO: 1175945 - RNA, 23 nt, Human
cuccuacuuccucaguuccccuu

SEQ ID NO: 1175946 - RNA, 25 nt, Human
cugcaugauccccuucgugccugug

SEQ ID NO: 1175947 - RNA, 19 nt, Human
gacucgguucgggccgcgg

SEQ ID NO: 1175948 - RNA, 18 nt, Human
gagcugcugcggucggcc

SEQ ID NO: 1175949 - RNA, 19 nt, Human
gaucacuuaagaaaguuug

SEQ ID NO: 1175950 - RNA, 18 nt, Human
gauccccugcaugauccc

SEQ ID NO: 1175951 - RNA, 19 nt, Human
gcagguacuuaagaaagaa

SEQ ID NO: 1175952 - RNA, 21 nt, Human
gcccaugccacccggcagccg

SEQ ID NO: 1175953 - RNA, 21 nt, Human
gccgcggaaggccagucugga

SEQ ID NO: 1175954 - RNA, 22 nt, Human
gcgcccgcggcggugcccucgg

SEQ ID NO: 1175955 - RNA, 22 nt, Human
gcggaggagugcagcaggaggg

SEQ ID NO: 1175956 - RNA, 20 nt, Human
ggccccaccgcccuuugcuu

SEQ ID NO: 1175957 - RNA, 18 nt, Human
ggcccgcgacgcgcugcc

SEQ ID NO: 1175958 - RNA, 18 nt, Human
ggccuccuacuuccucag

SEQ ID NO: 1175959 - RNA, 24 nt, Human
ggcggaggagugcagcaggagggg

SEQ ID NO: 1175960 - RNA, 21 nt, Human
guucaaaaccucggauuucag

SEQ ID NO: 1175961 - RNA, 24 nt, Human
guucccagcccaagcucucuuccu

SEQ ID NO: 1175962 - RNA, 18 nt, Human
uaaggcuccagaggccgc

SEQ ID NO: 1175963 - RNA, 23 nt, Human
uacaaaaccacaaacacagaaca

SEQ ID NO: 1175964 - RNA, 25 nt, Human
uacaaaaccacaaacacagaacaag

SEQ ID NO: 1175965 - RNA, 18 nt, Human
uaccugaaccgaggugac

SEQ ID NO: 1175966 - RNA, 18 nt, Human
uacgacacgagccccaag

SEQ ID NO: 1175967 - RNA, 21 nt, Human
uacgacacgagccccaaggca

SEQ ID NO: 1175968 - RNA, 20 nt, Human
uagccagaaacugcauuugc

SEQ ID NO: 1175969 - RNA, 20 nt, Human
uagccgaaaggaauaaacug

SEQ ID NO: 1175970 - RNA, 23 nt, Human
uagcuuucaaagaccugucccag

SEQ ID NO: 1175971 - RNA, 19 nt, Human
ucaacaaaaagccacaagc

SEQ ID NO: 1175972 - RNA, 18 nt, Human
ucacuucaggguccaggc

SEQ ID NO: 1175973 - RNA, 21 nt, Human
uccacaguaaagguuggagaa

SEQ ID NO: 1175974 - RNA, 22 nt, Human
uccauaaaguccaacccugagu

SEQ ID NO: 1175975 - RNA, 20 nt, Human
ucccaggccuauugccgcgg

SEQ ID NO: 1175976 - RNA, 20 nt, Human
uccccuucgugccuguggcc

SEQ ID NO: 1175977 - RNA, 24 nt, Human
uccucuuggaaguuaacgauuggc

SEQ ID NO: 1175978 - RNA, 25 nt, Human
uccuuuggccuccucacgccagcuu

SEQ ID NO: 1175979 - RNA, 18 nt, Human
ucggcucccgcauucagc

SEQ ID NO: 1175980 - RNA, 23 nt, Human
ucuaaaugguccagacucgguuc

SEQ ID NO: 1175981 - RNA, 20 nt, Human
ucucaagggcgaccuggccc

SEQ ID NO: 1175982 - RNA, 18 nt, Human
ucucuuccuuuccacccc

SEQ ID NO: 1175983 - RNA, 20 nt, Human
ucuucuaaaugguccagacu

SEQ ID NO: 1175984 - RNA, 19 nt, Human
ugacaagcaaaacuuugcu

SEQ ID NO: 1175985 - RNA, 20 nt, Human
ugcagcccuuccugcgcgcc

SEQ ID NO: 1175986 - RNA, 18 nt, Human
ugccaggcagauggcacc

SEQ ID NO: 1175987 - RNA, 21 nt, Human
ugcgcacugagucucaagggc

SEQ ID NO: 1175988 - RNA, 22 nt, Human
ugcgcgcgcgcgcgucugugug

SEQ ID NO: 1175989 - RNA, 20 nt, Human
ugcucuuuccagacucucaa

SEQ ID NO: 1175990 - RNA, 19 nt, Human
ugcuugcagcucugcgcgc

SEQ ID NO: 1175991 - RNA, 22 nt, Human
uggcaggaguccauugggcugg

SEQ ID NO: 1175992 - RNA, 19 nt, Human
uggcccgcgacgcgcugcc

SEQ ID NO: 1175993 - RNA, 21 nt, Human
ugggcuaucuucuaauuguuc

SEQ ID NO: 1175994 - RNA, 22 nt, Human
uggggcggagggacccggguag

SEQ ID NO: 1175995 - RNA, 18 nt, Human
uggucccggcgguggaga

SEQ ID NO: 1175996 - RNA, 20 nt, Human
uguacaagucagcuggacuc

SEQ ID NO: 1175997 - RNA, 22 nt, Human
uguuuugugugugugucugcuu

SEQ ID NO: 1175998 - RNA, 24 nt, Human
uugugugugugucugcuuguuucu

SEQ ID NO: 1175999 - RNA, 21 nt, Human
uuuauaaacuucuuuuuuucc

SEQ ID NO: 1176000 - RNA, 22 nt, Human
aaaggucucccuggaucaaagc

SEQ ID NO: 1176001 - RNA, 25 nt, Human
aagagacaaacaugagaaaacaaaa

SEQ ID NO: 1176002 - RNA, 21 nt, Human
aauggaaaaggucucccugga

SEQ ID NO: 1176003 - RNA, 25 nt, Human
acaaaacaacaucaguuguagaaga

SEQ ID NO: 1176004 - RNA, 21 nt, Human
acaaacaugagaaaacaaaac

SEQ ID NO: 1176005 - RNA, 18 nt, Human
agagacaaacaugagaaa

SEQ ID NO: 1176006 - RNA, 18 nt, Human
cacaaauuucacccuugu

SEQ ID NO: 1176007 - RNA, 24 nt, Human
caugagaaaacaaaacaacaucag

SEQ ID NO: 1176008 - RNA, 23 nt, Human
cuucagaaaauucuccagauuuc

SEQ ID NO: 1176009 - RNA, 19 nt, Human
gagacaaacaugagaaaac

SEQ ID NO: 1176010 - RNA, 23 nt, Human
uaaguuuucaggaugucacacuu

SEQ ID NO: 1176011 - RNA, 18 nt, Human
uagaagaacauaaagaag

SEQ ID NO: 1176012 - RNA, 19 nt, Human
uagaagaacauaaagaaga

SEQ ID NO: 1176013 - RNA, 24 nt, Human
uaucuugcuccuuccaguauuuua

SEQ ID NO: 1176014 - RNA, 21 nt, Human
uauuaagagacaaacaugaga

SEQ ID NO: 1176015 - RNA, 21 nt, Human
ugagaaaacaaaacaacaucg

SEQ ID NO: 1176016 - RNA, 19 nt, Human
ugcaugccuuauggaaaaa

SEQ ID NO: 1176017 - RNA, 18 nt, Human
uggaaaaggucucccugg

SEQ ID NO: 1176018 - RNA, 20 nt, Human
uguccuaugggcuaaaagcu

SEQ ID NO: 1176019 - RNA, 24 nt, Human
aaacagauuaaauuccauuuccau

SEQ ID NO: 1176020 - RNA, 22 nt, Human
aaacauuuguacuucaaaaaug

SEQ ID NO: 1176021 - RNA, 21 nt, Human
aacuucaggauuaaacagagg

SEQ ID NO: 1176022 - RNA, 22 nt, Human
aagcagacgauaaacugcaaag

SEQ ID NO: 1176023 - RNA, 24 nt, Human
aauucuguagaaggcaaauaaagc

SEQ ID NO: 1176024 - RNA, 23 nt, Human
acucaaaauacuaugaaaaacaa

SEQ ID NO: 1176025 - RNA, 24 nt, Human
acuuaaagaaguuuucaagaaaga

SEQ ID NO: 1176026 - RNA, 24 nt, Human
agagcacuuuauaauguuuccucc

SEQ ID NO: 1176027 - RNA, 20 nt, Human
augaaaaacaaaaaacaaaa

SEQ ID NO: 1176028 - RNA, 22 nt, Human
caagaaagagcacuuuauaaug

SEQ ID NO: 1176029 - RNA, 18 nt, Human
cggcgugagguggaugau

SEQ ID NO: 1176030 - RNA, 25 nt, Human
cuaugaaaaacaaaaaacaaaauca

SEQ ID NO: 1176031 - RNA, 22 nt, Human
cucugugaccucuguauuaccc

SEQ ID NO: 1176032 - RNA, 22 nt, Human
cuguagaaggcaaauaaagcug

SEQ ID NO: 1176033 - RNA, 18 nt, Human
gugagguggaugauacag

SEQ ID NO: 1176034 - RNA, 26 nt, Human
uaccccaaaauauuaauuucaguaac

SEQ ID NO: 1176035 - RNA, 24 nt, Human
uagaaggcaaauaaagcuggcaac

SEQ ID NO: 1176036 - RNA, 22 nt, Human
ucaagaaagagcacuuuauaau

SEQ ID NO: 1176037 - RNA, 18 nt, Human
ugagaaggauggaaggug

SEQ ID NO: 1176038 - RNA, 23 nt, Human
ugccgaucaucaaacaaauacuc

SEQ ID NO: 1176039 - RNA, 22 nt, Human
uggcaacuguggcaaaaguaaa

SEQ ID NO: 1176040 - RNA, 21 nt, Human
ugggucuugagggaccuuaag

SEQ ID NO: 1176041 - RNA, 23 nt, Human
uguuuucuuuaccccaaaauauu

SEQ ID NO: 1176042 - RNA, 21 nt, Human
uucaaugggucuugagggacc

SEQ ID NO: 1176043 - RNA, 19 nt, Human
uucucguuuuugagccuca

SEQ ID NO: 1176044 - RNA, 18 nt, Human
uugucuaguuuuuauuug

SEQ ID NO: 1176045 - RNA, 25 nt, Human
uuucaagaaagagcacuuuauaaug

SEQ ID NO: 1176046 - RNA, 20 nt, Human
aacaucucacaaugcauuuc

SEQ ID NO: 1176047 - RNA, 18 nt, Human
aagcaggcagggaggcaa

SEQ ID NO: 1176048 - RNA, 23 nt, Human
acccgcuuuagcuguuuuaugcu

SEQ ID NO: 1176049 - RNA, 18 nt, Human
aggcagggaggcaagugg

SEQ ID NO: 1176050 - RNA, 24 nt, Human
agggaaaaaacuucaauccacauu

SEQ ID NO: 1176051 - RNA, 24 nt, Human
agggaggcaaguggcaggcugguc

SEQ ID NO: 1176052 - RNA, 20 nt, Human
aucuuuaaauuaacugcuuc

SEQ ID NO: 1176053 - RNA, 23 nt, Human
cagaagcaggcagggaggcaagu

SEQ ID NO: 1176054 - RNA, 25 nt, Human
cagaaggagcuugaaggaccaggca

SEQ ID NO: 1176055 - RNA, 24 nt, Human
cugcauccucuucuaaagaucaug

SEQ ID NO: 1176056 - RNA, 20 nt, Human
ggaccaggcauucaaggcgg

SEQ ID NO: 1176057 - RNA, 18 nt, Human
ggcuucuggaacuuccac

SEQ ID NO: 1176058 - RNA, 22 nt, Human
uacaacucggaguuaccaacac

SEQ ID NO: 1176059 - RNA, 22 nt, Human
uauugagauuacaaaaauaaca

SEQ ID NO: 1176060 - RNA, 19 nt, Human
uccacagauaggaagagca

SEQ ID NO: 1176061 - RNA, 20 nt, Human
ucuuuggaauuaauggguga

SEQ ID NO: 1176062 - RNA, 20 nt, Human
ugaaggaccaggcauucaag

SEQ ID NO: 1176063 - RNA, 23 nt, Human
uucauauuuacagaagaaacaug

SEQ ID NO: 1176064 - RNA, 19 nt, Human
uugaaggaccaggcauuca

SEQ ID NO: 1176065 - RNA, 20 nt, Human
caggagagauaaagccucug

SEQ ID NO: 1176066 - RNA, 23 nt, Human
ucaggauuuucuacuaacauugg

SEQ ID NO: 1176067 - RNA, 20 nt, Human
ucaugagccuucccugcagg

SEQ ID NO: 1176068 - RNA, 24 nt, Human
aaaaaaaaaaaaaaaagcagcaag

SEQ ID NO: 1176069 - RNA, 24 nt, Human
aaaaaaaaaaaaagcagcaagcaa

SEQ ID NO: 1176070 - RNA, 20 nt, Human
aaaaaaaaaagagagagaca

SEQ ID NO: 1176071 - RNA, 19 nt, Human
aaaaaacuuagucuggcac

SEQ ID NO: 1176072 - RNA, 19 nt, Human
aaaauacaaaaauuagccc

SEQ ID NO: 1176073 - RNA, 25 nt, Human
aaacagaagugagcucuucccagag

SEQ ID NO: 1176074 - RNA, 19 nt, Human
aaagugcugggauuacaua

SEQ ID NO: 1176075 - RNA, 20 nt, Human
aacagggugaaacccugucu

SEQ ID NO: 1176076 - RNA, 21 nt, Human
aacagggugaaacccugucuc

SEQ ID NO: 1176077 - RNA, 24 nt, Human
aacagggugaaacccugucucaaa

SEQ ID NO: 1176078 - RNA, 20 nt, Human
aacagguugcagugcgaugg

SEQ ID NO: 1176079 - RNA, 19 nt, Human
aacauggcaaaaccccauc

SEQ ID NO: 1176080 - RNA, 21 nt, Human
aacauggcaaaaccccaucuc

SEQ ID NO: 1176081 - RNA, 21 nt, Human
aacauggcaaaaccccaucuc

SEQ ID NO: 1176082 - RNA, 19 nt, Human
aacauggugaaaccccgac

SEQ ID NO: 1176083 - RNA, 21 nt, Human
aacauggugaaaccccgacuc

SEQ ID NO: 1176084 - RNA, 21 nt, Human
aacauggugaaaccccgacuc

SEQ ID NO: 1176085 - RNA, 20 nt, Human
aacauggugagacccugucu

SEQ ID NO: 1176086 - RNA, 21 nt, Human
aacauggugagacccugucuc

SEQ ID NO: 1176087 - RNA, 23 nt, Human
aaccggaugugguggcaggcgcc

SEQ ID NO: 1176088 - RNA, 20 nt, Human
aagcaacaggauggguggaa

SEQ ID NO: 1176089 - RNA, 21 nt, Human
aagcagcacagagcaccagcc

SEQ ID NO: 1176090 - RNA, 22 nt, Human
aagcagcacagagcaccagccc

SEQ ID NO: 1176091 - RNA, 18 nt, Human
aagcaggaggaucacuug

SEQ ID NO: 1176092 - RNA, 23 nt, Human
aagcaggaggaucacuugagccu

SEQ ID NO: 1176093 - RNA, 24 nt, Human
aagcaggaggaucacuugagccua

SEQ ID NO: 1176094 - RNA, 19 nt, Human
aagcgacccagauaggguc

SEQ ID NO: 1176095 - RNA, 21 nt, Human
aagggccuggacugcaaagcu

SEQ ID NO: 1176096 - RNA, 19 nt, Human
aaguagcuugcucuccucu

SEQ ID NO: 1176097 - RNA, 22 nt, Human
aagugagcucuucccagaguuu

SEQ ID NO: 1176098 - RNA, 19 nt, Human
aagugagcugugggagagg

SEQ ID NO: 1176099 - RNA, 25 nt, Human
aagugauucuccugccucagccucc

SEQ ID NO: 1176100 - RNA, 21 nt, Human
aagugcugggauuacauaugu

SEQ ID NO: 1176101 - RNA, 24 nt, Human
aaucgcuugaacccaggagguaga

SEQ ID NO: 1176102 - RNA, 19 nt, Human
aauuagccaggcaugguug

SEQ ID NO: 1176103 - RNA, 20 nt, Human
acagagcgagacucuaucuc

SEQ ID NO: 1176104 - RNA, 21 nt, Human
acagcugaaauccccaggaaa

SEQ ID NO: 1176105 - RNA, 19 nt, Human
acagggugaaacccugucu

SEQ ID NO: 1176106 - RNA, 24 nt, Human
acagggugaaacccugucucaaaa

SEQ ID NO: 1176107 - RNA, 20 nt, Human
acauagcaagaccccaucuc

SEQ ID NO: 1176108 - RNA, 24 nt, Human
accagguaguuagcaugaccccaa

SEQ ID NO: 1176109 - RNA, 24 nt, Human
accccaucucuacuaaaaauacaa

SEQ ID NO: 1176110 - RNA, 24 nt, Human
accccgacucuacuaaaaauacaa

SEQ ID NO: 1176111 - RNA, 24 nt, Human
acccugggcgacagagcgagacuc

SEQ ID NO: 1176112 - RNA, 24 nt, Human
acccugucucaaaaaacaggagcc

SEQ ID NO: 1176113 - RNA, 22 nt, Human
acgccacugcacuccacccugg

SEQ ID NO: 1176114 - RNA, 24 nt, Human
acgccacugcacuccacccugggc

SEQ ID NO: 1176115 - RNA, 23 nt, Human
acggcauuccagccuggcaacag

SEQ ID NO: 1176116 - RNA, 24 nt, Human
acggcauuccagccuggcaacaga

SEQ ID NO: 1176117 - RNA, 24 nt, Human
acguaaggucaggaguucgagacc

SEQ ID NO: 1176118 - RNA, 24 nt, Human
acuaaaaauacaaaaauuaaccgg

SEQ ID NO: 1176119 - RNA, 21 nt, Human
acucuacuaaaaauacaaaaa

SEQ ID NO: 1176120 - RNA, 18 nt, Human
acugcacuccacccuggg

SEQ ID NO: 1176121 - RNA, 24 nt, Human
acugcacuccacccugggcgacag

SEQ ID NO: 1176122 - RNA, 19 nt, Human
acugcacucuggccugcga

SEQ ID NO: 1176123 - RNA, 23 nt, Human
acugcacucuggccugcgagaca

SEQ ID NO: 1176124 - RNA, 24 nt, Human
agaacuuugggaggccgagguggg

SEQ ID NO: 1176125 - RNA, 22 nt, Human
agaaucgcugggacccaggaga

SEQ ID NO: 1176126 - RNA, 22 nt, Human
agaaucgcuugaacccaggagg

SEQ ID NO: 1176127 - RNA, 25 nt, Human
agagaaaccugcccggggcaucaga

SEQ ID NO: 1176128 - RNA, 18 nt, Human
agagagagacagguggaa

SEQ ID NO: 1176129 - RNA, 22 nt, Human
agagagggaagugagcuguggg

SEQ ID NO: 1176130 - RNA, 18 nt, Human
agagauggaacgugccgu

SEQ ID NO: 1176131 - RNA, 20 nt, Human
agagcaccagcccaggagau

SEQ ID NO: 1176132 - RNA, 22 nt, Human
agaggaaggagaggagaucaag

SEQ ID NO: 1176133 - RNA, 18 nt, Human
agagguucaggacuggcc

SEQ ID NO: 1176134 - RNA, 22 nt, Human
agagguugcagugagcugagau

SEQ ID NO: 1176135 - RNA, 24 nt, Human
agagguugcagugagcugagauug

SEQ ID NO: 1176136 - RNA, 18 nt, Human
agaguggauuggagaagg

SEQ ID NO: 1176137 - RNA, 24 nt, Human
agaugcaguggcucacgccuguaa

SEQ ID NO: 1176138 - RNA, 20 nt, Human
agcacuuucggaggcugaag

SEQ ID NO: 1176139 - RNA, 24 nt, Human
agcacuuugggaggccgaggcagg

SEQ ID NO: 1176140 - RNA, 21 nt, Human
agccaggcacagugacucaca

SEQ ID NO: 1176141 - RNA, 22 nt, Human
agccaggcugggcaccauggcu

SEQ ID NO: 1176142 - RNA, 19 nt, Human
agccagugugguggugcac

SEQ ID NO: 1176143 - RNA, 21 nt, Human
agccgggugugguggcucacg

SEQ ID NO: 1176144 - RNA, 24 nt, Human
agccuagccaacauggugagaccc

SEQ ID NO: 1176145 - RNA, 24 nt, Human
agccugaggcaggagaaucgcuug

SEQ ID NO: 1176146 - RNA, 22 nt, Human
agccuggcaacagaggagacug

SEQ ID NO: 1176147 - RNA, 18 nt, Human
agccuggccaacauggca

SEQ ID NO: 1176148 - RNA, 24 nt, Human
agccuggccaacauggcaaaaccc

SEQ ID NO: 1176149 - RNA, 21 nt, Human
agccugggcaacauagugaga

SEQ ID NO: 1176150 - RNA, 24 nt, Human
agccugggcaacauagugagaucc

SEQ ID NO: 1176151 - RNA, 25 nt, Human
agccugggcaacauagugagauccu

SEQ ID NO: 1176152 - RNA, 19 nt, Human
agccugggcaacaugguga

SEQ ID NO: 1176153 - RNA, 22 nt, Human
agccugggcaacauggugaaac

SEQ ID NO: 1176154 - RNA, 24 nt, Human
agccugggcaacauggugaaaccc

SEQ ID NO: 1176155 - RNA, 23 nt, Human
agccuguaaucccaggacuuugg

SEQ ID NO: 1176156 - RNA, 24 nt, Human
agccuguaaucccaggacuuuggg

SEQ ID NO: 1176157 - RNA, 21 nt, Human
agcucccccucccuggacagc

SEQ ID NO: 1176158 - RNA, 19 nt, Human
aggaagggccauguugggc

SEQ ID NO: 1176159 - RNA, 20 nt, Human
aggacuuugggaggcugagg

SEQ ID NO: 1176160 - RNA, 19 nt, Human
aggagcuggucuuugggcc

SEQ ID NO: 1176161 - RNA, 23 nt, Human
aggaguucgagaccagccugggc

SEQ ID NO: 1176162 - RNA, 24 nt, Human
aggaguuugagaccagccacauag

SEQ ID NO: 1176163 - RNA, 24 nt, Human
aggaucacuugagcccaggaguuu

SEQ ID NO: 1176164 - RNA, 24 nt, Human
aggaucacuugagccuaggaguuc

SEQ ID NO: 1176165 - RNA, 24 nt, Human
aggcacagugacucacaacuguaa

SEQ ID NO: 1176166 - RNA, 23 nt, Human
aggcaggaacagcagcugcauga

SEQ ID NO: 1176167 - RNA, 23 nt, Human
aggcaggagaaucgcugggaccc

SEQ ID NO: 1176168 - RNA, 23 nt, Human
aggcaggagaaucgcuugaaccc

SEQ ID NO: 1176169 - RNA, 18 nt, Human
aggcaggagaauggugug

SEQ ID NO: 1176170 - RNA, 21 nt, Human
aggcaggagaauggugugaac

SEQ ID NO: 1176171 - RNA, 24 nt, Human
aggcaggagaauggugugaacccg

SEQ ID NO: 1176172 - RNA, 18 nt, Human
aggcaggaggaucacuug

SEQ ID NO: 1176173 - RNA, 23 nt, Human
aggcaggaggaucacuugagccc

SEQ ID NO: 1176174 - RNA, 18 nt, Human
aggcaggaggauugcuug

SEQ ID NO: 1176175 - RNA, 24 nt, Human
aggccaaggcaggaggauugcuug

SEQ ID NO: 1176176 - RNA, 22 nt, Human
aggccagaugcaguggcucacg

SEQ ID NO: 1176177 - RNA, 24 nt, Human
aggccgaggcaggaggaucacuug

SEQ ID NO: 1176178 - RNA, 21 nt, Human
aggccgaggugggcagaucac

SEQ ID NO: 1176179 - RNA, 21 nt, Human
aggcggagguugcaaugagcc

SEQ ID NO: 1176180 - RNA, 24 nt, Human
aggcggagguugcaaugagccgag

SEQ ID NO: 1176181 - RNA, 22 nt, Human
aggcggguagaucaccugaggg

SEQ ID NO: 1176182 - RNA, 22 nt, Human
aggcggguagaucaccugaggu

SEQ ID NO: 1176183 - RNA, 26 nt, Human
aggcggguggaucacguaaggucagg

SEQ ID NO: 1176184 - RNA, 24 nt, Human
aggcugaagcaggaggaucacuug

SEQ ID NO: 1176185 - RNA, 24 nt, Human
aggcugaggagggaggauugcuug

SEQ ID NO: 1176186 - RNA, 20 nt, Human
aggcugaggcaggagaaucg

SEQ ID NO: 1176187 - RNA, 23 nt, Human
aggcugaggcaggagaaucgcug

SEQ ID NO: 1176188 - RNA, 19 nt, Human
aggcugaggcaggagaaug

SEQ ID NO: 1176189 - RNA, 21 nt, Human
aggcugaggcggguagaucac

SEQ ID NO: 1176190 - RNA, 24 nt, Human
aggcugaguggggaggacugcuug

SEQ ID NO: 1176191 - RNA, 25 nt, Human
aggcuggagugcaguggcgcaaucu

SEQ ID NO: 1176192 - RNA, 23 nt, Human
agggaggauugcuugagcccagg

SEQ ID NO: 1176193 - RNA, 24 nt, Human
aggggccccucuacccaccaaauc

SEQ ID NO: 1176194 - RNA, 24 nt, Human
agguagagguugcagugagcugag

SEQ ID NO: 1176195 - RNA, 18 nt, Human
agguagugaacuccccau

SEQ ID NO: 1176196 - RNA, 22 nt, Human
aggugaagaggugaagcccagg

SEQ ID NO: 1176197 - RNA, 26 nt, Human
aggugggcagaucaccugagcucagg

SEQ ID NO: 1176198 - RNA, 24 nt, Human
agugacucacaacuguaaucccag

SEQ ID NO: 1176199 - RNA, 24 nt, Human
agugauucuccugccucagccucc

SEQ ID NO: 1176200 - RNA, 20 nt, Human
agugcaguggcgcaaucucg

SEQ ID NO: 1176201 - RNA, 24 nt, Human
agugcaguggcgcaaucucggcuc

SEQ ID NO: 1176202 - RNA, 24 nt, Human
aguggcucacgccuguaaucccag

SEQ ID NO: 1176203 - RNA, 18 nt, Human
agugguggggaccagagu

SEQ ID NO: 1176204 - RNA, 24 nt, Human
aucacaccacugcacucuggccug

SEQ ID NO: 1176205 - RNA, 24 nt, Human
aucacgccacugcacuccacccug

SEQ ID NO: 1176206 - RNA, 24 nt, Human
aucacguaaggucaggaguucgag

SEQ ID NO: 1176207 - RNA, 24 nt, Human
aucacuugagcccaggaguuugag

SEQ ID NO: 1176208 - RNA, 24 nt, Human
aucacuugagccuaggaguucaag

SEQ ID NO: 1176209 - RNA, 21 nt, Human
augcaguucccaaggcagccu

SEQ ID NO: 1176210 - RNA, 21 nt, Human
augcaucugugccugcacaca

SEQ ID NO: 1176211 - RNA, 22 nt, Human
auggaacgugccguugcuuccc

SEQ ID NO: 1176212 - RNA, 22 nt, Human
auggagguuauucucucugagc

SEQ ID NO: 1176213 - RNA, 23 nt, Human
auggcucacgccuguaaucccag

SEQ ID NO: 1176214 - RNA, 24 nt, Human
auugcgccacggcauuccagccug

SEQ ID NO: 1176215 - RNA, 21 nt, Human
caaaaaaaaaaggccagaugc

SEQ ID NO: 1176216 - RNA, 23 nt, Human
caacagagagagauucucucuac

SEQ ID NO: 1176217 - RNA, 21 nt, Human
caacauagugagauccugucu

SEQ ID NO: 1176218 - RNA, 22 nt, Human
caacauagugagauccugucuc

SEQ ID NO: 1176219 - RNA, 24 nt, Human
caacauagugagauccugucucua

SEQ ID NO: 1176220 - RNA, 22 nt, Human
caacauggugaaaccccgacuc

SEQ ID NO: 1176221 - RNA, 24 nt, Human
caacauggugaaaccccgacucua

SEQ ID NO: 1176222 - RNA, 24 nt, Human
caacauggugagacccugucucca

SEQ ID NO: 1176223 - RNA, 20 nt, Human
caaccuccgccucccggguu

SEQ ID NO: 1176224 - RNA, 21 nt, Human
caacugagcaaacagccugaa

SEQ ID NO: 1176225 - RNA, 24 nt, Human
caacuguaaucccagcacuuucgg

SEQ ID NO: 1176226 - RNA, 26 nt, Human
caaggcaggaggauugcuugaagcca

SEQ ID NO: 1176227 - RNA, 22 nt, Human
caagugauucuccugccucagc

SEQ ID NO: 1176228 - RNA, 19 nt, Human
cacaacuguaaucccagca

SEQ ID NO: 1176229 - RNA, 19 nt, Human
cacagagcaccagcccagg

SEQ ID NO: 1176230 - RNA, 20 nt, Human
cacauagcaagaccccaucu

SEQ ID NO: 1176231 - RNA, 20 nt, Human
caccaagagguucaggacug

SEQ ID NO: 1176232 - RNA, 18 nt, Human
caccacugcacucuggcc

SEQ ID NO: 1176233 - RNA, 18 nt, Human
cacccaccacacccagcc

SEQ ID NO: 1176234 - RNA, 24 nt, Human
caccuaggcuggagugcaguggcg

SEQ ID NO: 1176235 - RNA, 23 nt, Human
caccuguaaucccagcuacuugg

SEQ ID NO: 1176236 - RNA, 24 nt, Human
caccuguaaucccagcuacuuggg

SEQ ID NO: 1176237 - RNA, 20 nt, Human
cacgccuguaaucccagaac

SEQ ID NO: 1176238 - RNA, 24 nt, Human
cacgccuguaaucccagaacuuug

SEQ ID NO: 1176239 - RNA, 24 nt, Human
cacgccuguaaucccagcacuuug

SEQ ID NO: 1176240 - RNA, 20 nt, Human
cacggcauuccagccuggca

SEQ ID NO: 1176241 - RNA, 23 nt, Human
cacguaaggucaggaguucgaga

SEQ ID NO: 1176242 - RNA, 24 nt, Human
cacuauacuccaaccugggaaaca

SEQ ID NO: 1176243 - RNA, 23 nt, Human
cacuccacccugggcgacagagc

SEQ ID NO: 1176244 - RNA, 21 nt, Human
cacugcaaccuccgccucccg

SEQ ID NO: 1176245 - RNA, 23 nt, Human
cacugcaaccuccgccucccggg

SEQ ID NO: 1176246 - RNA, 23 nt, Human
cacugcacuccacccugggcgac

SEQ ID NO: 1176247 - RNA, 24 nt, Human
cacugcacuccacccugggcgaca

SEQ ID NO: 1176248 - RNA, 19 nt, Human
cacugcacucuggccugcg

SEQ ID NO: 1176249 - RNA, 20 nt, Human
cacugcacucuggccugcga

SEQ ID NO: 1176250 - RNA, 20 nt, Human
cacugcacucuggccugcga

SEQ ID NO: 1176251 - RNA, 22 nt, Human
cacugcacucuggccugcgaga

SEQ ID NO: 1176252 - RNA, 24 nt, Human
cagaacuuugggaggccgaggugg

SEQ ID NO: 1176253 - RNA, 25 nt, Human
cagagcaccagcccaggagaugcag

SEQ ID NO: 1176254 - RNA, 24 nt, Human
cagaucaccugagcucaggaguuc

SEQ ID NO: 1176255 - RNA, 19 nt, Human
cagcaagcaacaggauggg

SEQ ID NO: 1176256 - RNA, 18 nt, Human
cagcacuuucggaggcug

SEQ ID NO: 1176257 - RNA, 24 nt, Human
cagcacuuucggaggcugaagcag

SEQ ID NO: 1176258 - RNA, 24 nt, Human
cagcacuuugggaggccaaggcag

SEQ ID NO: 1176259 - RNA, 25 nt, Human
cagcacuuugggaggccaaggcagg

SEQ ID NO: 1176260 - RNA, 24 nt, Human
cagcacuuugggaggccgaggcag

SEQ ID NO: 1176261 - RNA, 24 nt, Human
cagcacuuugggaggccgaggcag

SEQ ID NO: 1176262 - RNA, 18 nt, Human
cagcagggccggucgcgg

SEQ ID NO: 1176263 - RNA, 24 nt, Human
cagccugaaagagacaaaaaccag

SEQ ID NO: 1176264 - RNA, 23 nt, Human
cagccuguaaucccaggacuuug

SEQ ID NO: 1176265 - RNA, 24 nt, Human
cagcuacucgggaggcugaggcag

SEQ ID NO: 1176266 - RNA, 22 nt, Human
cagcuaguguucccuaggccaa

SEQ ID NO: 1176267 - RNA, 19 nt, Human
cagcucccugcagcuccuc

SEQ ID NO: 1176268 - RNA, 19 nt, Human
caggacuggccagaggaag

SEQ ID NO: 1176269 - RNA, 24 nt, Human
caggacuuugggaggcugaggcgg

SEQ ID NO: 1176270 - RNA, 23 nt, Human
caggagccaggcugggcaccaug

SEQ ID NO: 1176271 - RNA, 24 nt, Human
caggcgccuguagucccagcucuc

SEQ ID NO: 1176272 - RNA, 18 nt, Human
cagggaaagcucccccuc

SEQ ID NO: 1176273 - RNA, 21 nt, Human
cauagcaagaccccaucucua

SEQ ID NO: 1176274 - RNA, 21 nt, Human
cauaugucacccaccacaccc

SEQ ID NO: 1176275 - RNA, 24 nt, Human
caucuguagucucagguacucagg

SEQ ID NO: 1176276 - RNA, 19 nt, Human
ccaaagugcugggauuaca

SEQ ID NO: 1176277 - RNA, 19 nt, Human
ccaaagugcugggauuaca

SEQ ID NO: 1176278 - RNA, 20 nt, Human
ccaaagugcugggauuacau

SEQ ID NO: 1176279 - RNA, 22 nt, Human
ccaaagugcugggauuacauau

SEQ ID NO: 1176280 - RNA, 21 nt, Human
ccaacauggugagacccuguc

SEQ ID NO: 1176281 - RNA, 20 nt, Human
ccaagaguggauuggagaag

SEQ ID NO: 1176282 - RNA, 19 nt, Human
ccaccaaaaaauacaaaaa

SEQ ID NO: 1176283 - RNA, 19 nt, Human
ccacggcauuccagccugg

SEQ ID NO: 1176284 - RNA, 20 nt, Human
ccacggcauuccagccuggc

SEQ ID NO: 1176285 - RNA, 21 nt, Human
ccacugcacuccacccugggc

SEQ ID NO: 1176286 - RNA, 21 nt, Human
ccacugcacuccacccugggc

SEQ ID NO: 1176287 - RNA, 24 nt, Human
ccacugcacuccacccugggcgac

SEQ ID NO: 1176288 - RNA, 18 nt, Human
ccacugcacucuggccug

SEQ ID NO: 1176289 - RNA, 19 nt, Human
ccacugcacucuggccugc

SEQ ID NO: 1176290 - RNA, 21 nt, Human
ccacugcacucuggccugcga

SEQ ID NO: 1176291 - RNA, 22 nt, Human
ccacugcacucuggccugcgag

SEQ ID NO: 1176292 - RNA, 24 nt, Human
ccacugcacucuggccugcgagac

SEQ ID NO: 1176293 - RNA, 22 nt, Human
ccagaaguagcuugcucuccuc

SEQ ID NO: 1176294 - RNA, 21 nt, Human
ccaggaaauaagacgggagca

SEQ ID NO: 1176295 - RNA, 18 nt, Human
ccaggaagucaaagcugc

SEQ ID NO: 1176296 - RNA, 22 nt, Human
ccaggagguagagguugcagug

SEQ ID NO: 1176297 - RNA, 24 nt, Human
ccaggcugggcaccauggcucacg

SEQ ID NO: 1176298 - RNA, 19 nt, Human
cccacaacuccccucccag

SEQ ID NO: 1176299 - RNA, 19 nt, Human
cccacaacuccccucccag

SEQ ID NO: 1176300 - RNA, 25 nt, Human
cccacggccaugccugcugagaauc

SEQ ID NO: 1176301 - RNA, 18 nt, Human
ccccagagcaggggcucc

SEQ ID NO: 1176302 - RNA, 19 nt, Human
cccccagaaaugcugccgg

SEQ ID NO: 1176303 - RNA, 20 nt, Human
cccccagaaaugcugccgga

SEQ ID NO: 1176304 - RNA, 24 nt, Human
ccccuccucccaucccgcacgucc

SEQ ID NO: 1176305 - RNA, 18 nt, Human
ccccucuccagcucccuu

SEQ ID NO: 1176306 - RNA, 26 nt, Human
ccccucuccagcucccuuuugggcaa

SEQ ID NO: 1176307 - RNA, 21 nt, Human
cccgccaccagcucccugcag

SEQ ID NO: 1176308 - RNA, 23 nt, Human
cccggguucaagugauucuccuc

SEQ ID NO: 1176309 - RNA, 23 nt, Human
cccggguucaagugauucuccug

SEQ ID NO: 1176310 - RNA, 22 nt, Human
ccuagccaacauggugagaccc

SEQ ID NO: 1176311 - RNA, 24 nt, Human
ccuagccaacauggugagacccug

SEQ ID NO: 1176312 - RNA, 24 nt, Human
ccucccggguucaagugauucucc

SEQ ID NO: 1176313 - RNA, 19 nt, Human
ccuccuaaacagaagugag

SEQ ID NO: 1176314 - RNA, 22 nt, Human
ccugaggucgggaguucgaaac

SEQ ID NO: 1176315 - RNA, 21 nt, Human
ccugcacacagcugaaauccc

SEQ ID NO: 1176316 - RNA, 18 nt, Human
ccugcugagaauccugcc

SEQ ID NO: 1176317 - RNA, 19 nt, Human
ccugcugagaauccugcca

SEQ ID NO: 1176318 - RNA, 24 nt, Human
ccuggccaacauggcaaaacccca

SEQ ID NO: 1176319 - RNA, 24 nt, Human
ccugggaaacagggugaaacccug

SEQ ID NO: 1176320 - RNA, 22 nt, Human
ccugggcaacauagugagaucc

SEQ ID NO: 1176321 - RNA, 24 nt, Human
ccugggcaacauagugagauccug

SEQ ID NO: 1176322 - RNA, 23 nt, Human
ccugggcaacauggugaaacccc

SEQ ID NO: 1176323 - RNA, 24 nt, Human
ccugggcaacauggugaaaccccg

SEQ ID NO: 1176324 - RNA, 22 nt, Human
ccuguaaucccagaacuuuggg

SEQ ID NO: 1176325 - RNA, 22 nt, Human
ccuguaaucccagcacuuuggg

SEQ ID NO: 1176326 - RNA, 21 nt, Human
ccuguaaucccagcuacucgg

SEQ ID NO: 1176327 - RNA, 22 nt, Human
ccuguaaucccagcuacucggg

SEQ ID NO: 1176328 - RNA, 21 nt, Human
ccuguaaucccagcuacuugg

SEQ ID NO: 1176329 - RNA, 18 nt, Human
ccuguagucccagcucuc

SEQ ID NO: 1176330 - RNA, 20 nt, Human
ccuguagucccagcucucag

SEQ ID NO: 1176331 - RNA, 21 nt, Human
ccuguagucccagcucucagg

SEQ ID NO: 1176332 - RNA, 20 nt, Human
ccugugugacuccagcaagu

SEQ ID NO: 1176333 - RNA, 20 nt, Human
cgacugugcaggaacagagu

SEQ ID NO: 1176334 - RNA, 24 nt, Human
cgagaccagccugggcaacauggu

SEQ ID NO: 1176335 - RNA, 20 nt, Human
cgaggcaggaggaucacuug

SEQ ID NO: 1176336 - RNA, 24 nt, Human
cgaggcaggaggaucacuugagcc

SEQ ID NO: 1176337 - RNA, 19 nt, Human
cgaggugggcagaucaccu

SEQ ID NO: 1176338 - RNA, 26 nt, Human
cgaggugggcagaucaccugagcuca

SEQ ID NO: 1176339 - RNA, 21 nt, Human
cgccuguaauccagcacuuug

SEQ ID NO: 1176340 - RNA, 23 nt, Human
cgccuguaauccagcacuuuggg

SEQ ID NO: 1176341 - RNA, 26 nt, Human
cgccuguaauccagcacuuugggagg

SEQ ID NO: 1176342 - RNA, 18 nt, Human
cgccuguaaucccagaac

SEQ ID NO: 1176343 - RNA, 23 nt, Human
cgccuguaaucccagaacuuugg

SEQ ID NO: 1176344 - RNA, 23 nt, Human
cgccuguagucccagcucucagg

SEQ ID NO: 1176345 - RNA, 22 nt, Human
cggagccgggugugguggcuca

SEQ ID NO: 1176346 - RNA, 23 nt, Human
cggaggcugaagcaggaggauca

SEQ ID NO: 1176347 - RNA, 18 nt, Human
cggaugggggacuccaga

SEQ ID NO: 1176348 - RNA, 22 nt, Human
cggcaccacuauacuccaaccu

SEQ ID NO: 1176349 - RNA, 18 nt, Human
cgggguugugcagugggg

SEQ ID NO: 1176350 - RNA, 24 nt, Human
cggguagaucaccugaggucggga

SEQ ID NO: 1176351 - RNA, 24 nt, Human
cggguggaucacguaaggucagga

SEQ ID NO: 1176352 - RNA, 24 nt, Human
cgguggcucagccuguaaucccag

SEQ ID NO: 1176353 - RNA, 20 nt, Human
cgugccagauccugugcugc

SEQ ID NO: 1176354 - RNA, 21 nt, Human
cuaacuugcccuuccccacaa

SEQ ID NO: 1176355 - RNA, 19 nt, Human
cuaucaccuaggcuggagu

SEQ ID NO: 1176356 - RNA, 20 nt, Human
cucaaaaaacaggagccagg

SEQ ID NO: 1176357 - RNA, 24 nt, Human
cucacaacuguaaucccagcacuu

SEQ ID NO: 1176358 - RNA, 23 nt, Human
cucacgccuguaauccagcacuu

SEQ ID NO: 1176359 - RNA, 22 nt, Human
cucacgccuguaaucccagaac

SEQ ID NO: 1176360 - RNA, 24 nt, Human
cucacgccuguaaucccagaacuu

SEQ ID NO: 1176361 - RNA, 22 nt, Human
cucacgccuguaaucccagcac

SEQ ID NO: 1176362 - RNA, 24 nt, Human
cucacgccuguaaucccagcacuu

SEQ ID NO: 1176363 - RNA, 24 nt, Human
cucacugcaaccuccgccucccgg

SEQ ID NO: 1176364 - RNA, 23 nt, Human
cucagccuguaaucccaggacuu

SEQ ID NO: 1176365 - RNA, 23 nt, Human
cuccaaaaaaaaaaggccagaug

SEQ ID NO: 1176366 - RNA, 19 nt, Human
cucccccucccuggacagc

SEQ ID NO: 1176367 - RNA, 20 nt, Human
cucccggguucaagugauuc

SEQ ID NO: 1176368 - RNA, 20 nt, Human
cucuaucaccuaggcuggag

SEQ ID NO: 1176369 - RNA, 23 nt, Human
cucuaucaccuaggcuggagugc

SEQ ID NO: 1176370 - RNA, 20 nt, Human
cucugagccucuguguccuu

SEQ ID NO: 1176371 - RNA, 22 nt, Human
cugagcucaggaguucaagacc

SEQ ID NO: 1176372 - RNA, 24 nt, Human
cugcaaccuccgccucccggguuc

SEQ ID NO: 1176373 - RNA, 21 nt, Human
cugcagccugagccuggggug

SEQ ID NO: 1176374 - RNA, 20 nt, Human
cugcaggagacaagaaggac

SEQ ID NO: 1176375 - RNA, 23 nt, Human
cugccucagccucccaaagugcu

SEQ ID NO: 1176376 - RNA, 24 nt, Human
cugccucagccucccaaagugcug

SEQ ID NO: 1176377 - RNA, 24 nt, Human
cuggacccaggccagcuuccgcuc

SEQ ID NO: 1176378 - RNA, 25 nt, Human
cuggaggcauuuagcagagguugag

SEQ ID NO: 1176379 - RNA, 23 nt, Human
cuggccaacauggcaaaacccca

SEQ ID NO: 1176380 - RNA, 21 nt, Human
cuguaaucccagcuacuuggg

SEQ ID NO: 1176381 - RNA, 20 nt, Human
cugugcacccacggccaugc

SEQ ID NO: 1176382 - RNA, 22 nt, Human
cuuaaaaaaaaaagagagagac

SEQ ID NO: 1176383 - RNA, 18 nt, Human
cuugcaagauccucucug

SEQ ID NO: 1176384 - RNA, 19 nt, Human
cuugccuaccugggcuuca

SEQ ID NO: 1176385 - RNA, 23 nt, Human
cuuugggaggccgaggugggcag

SEQ ID NO: 1176386 - RNA, 22 nt, Human
gaacccggaaggcggagguugc

SEQ ID NO: 1176387 - RNA, 23 nt, Human
gaacggagccgggugugguggcu

SEQ ID NO: 1176388 - RNA, 21 nt, Human
gaaggaggaugggggaaaugg

SEQ ID NO: 1176389 - RNA, 18 nt, Human
gaauggaugcagagaggg

SEQ ID NO: 1176390 - RNA, 25 nt, Human
gacagaaugagaccuugucuuucaa

SEQ ID NO: 1176391 - RNA, 21 nt, Human
gacagugggcagcugggcccc

SEQ ID NO: 1176392 - RNA, 18 nt, Human
gagacaagaaggacagga

SEQ ID NO: 1176393 - RNA, 19 nt, Human
gagacaagaaggacaggag

SEQ ID NO: 1176394 - RNA, 24 nt, Human
gagacccugucuccaccaaaaaau

SEQ ID NO: 1176395 - RNA, 18 nt, Human
gagaggaaggaggauggg

SEQ ID NO: 1176396 - RNA, 18 nt, Human
gagaucacgccacugcac

SEQ ID NO: 1176397 - RNA, 20 nt, Human
gagcugugggagaggaagga

SEQ ID NO: 1176398 - RNA, 24 nt, Human
gaggagggaggauugcuugagccc

SEQ ID NO: 1176399 - RNA, 19 nt, Human
gaggaugggggaaauggca

SEQ ID NO: 1176400 - RNA, 20 nt, Human
gaggaugggggaaauggcaa

SEQ ID NO: 1176401 - RNA, 23 nt, Human
gagggcuggaaggagggaaggag

SEQ ID NO: 1176402 - RNA, 21 nt, Human
gagguagagguugcagugagc

SEQ ID NO: 1176403 - RNA, 19 nt, Human
gaggugggcagaucaccug

SEQ ID NO: 1176404 - RNA, 22 nt, Human
gagguugcaaugagccgagauc

SEQ ID NO: 1176405 - RNA, 23 nt, Human
gaucaccugagcucaggaguuca

SEQ ID NO: 1176406 - RNA, 24 nt, Human
gaucaccugagcucaggaguucaa

SEQ ID NO: 1176407 - RNA, 24 nt, Human
gaucaccugaggucgggaguucga

SEQ ID NO: 1176408 - RNA, 24 nt, Human
gaucacguaaggucaggaguucga

SEQ ID NO: 1176409 - RNA, 24 nt, Human
gaucacuugagcccaggaguuuga

SEQ ID NO: 1176410 - RNA, 24 nt, Human
gaucacuugagccuaggaguucaa

SEQ ID NO: 1176411 - RNA, 21 nt, Human
gauucaugccuggagccccag

SEQ ID NO: 1176412 - RNA, 20 nt, Human
gcaccacuauacuccaaccu

SEQ ID NO: 1176413 - RNA, 19 nt, Human
gcagagaugaggagcuggg

SEQ ID NO: 1176414 - RNA, 22 nt, Human
gcaggagaaucgcuugaaccca

SEQ ID NO: 1176415 - RNA, 20 nt, Human
gcaguuuugggggaaguggu

SEQ ID NO: 1176416 - RNA, 22 nt, Human
gccaaagaguucaaggcugcag

SEQ ID NO: 1176417 - RNA, 24 nt, Human
gccaacauggugagacccugucuc

SEQ ID NO: 1176418 - RNA, 24 nt, Human
gccacugcacuccacccugggcga

SEQ ID NO: 1176419 - RNA, 22 nt, Human
gcccaggaguuugagaccagcc

SEQ ID NO: 1176420 - RNA, 20 nt, Human
gccgagaucacgccacugca

SEQ ID NO: 1176421 - RNA, 20 nt, Human
gcgggcaccuguaaucccag

SEQ ID NO: 1176422 - RNA, 19 nt, Human
gcgguggcucagccuguaa

SEQ ID NO: 1176423 - RNA, 23 nt, Human
gcuaugaucacaccacugcacuu

SEQ ID NO: 1176424 - RNA, 19 nt, Human
gcuggagugcaguggcgca

SEQ ID NO: 1176425 - RNA, 20 nt, Human
ggaacgugccguugcuuccc

SEQ ID NO: 1176426 - RNA, 18 nt, Human
ggaagaggcugaggcagg

SEQ ID NO: 1176427 - RNA, 19 nt, Human
ggacuccagaagcguggag

SEQ ID NO: 1176428 - RNA, 21 nt, Human
ggagaaucgcugggacccagg

SEQ ID NO: 1176429 - RNA, 23 nt, Human
ggagaggaaggaggaugggggaa

SEQ ID NO: 1176430 - RNA, 21 nt, Human
ggagccgggugugguggcuca

SEQ ID NO: 1176431 - RNA, 22 nt, Human
ggaggcugaagcaggaggauca

SEQ ID NO: 1176432 - RNA, 24 nt, Human
ggagggcuggaaggagggaaggag

SEQ ID NO: 1176433 - RNA, 18 nt, Human
ggagguugcaaugagccg

SEQ ID NO: 1176434 - RNA, 24 nt, Human
ggagguugcaaugagccgagauca

SEQ ID NO: 1176435 - RNA, 22 nt, Human
ggaguucgagaccagccugggc

SEQ ID NO: 1176436 - RNA, 25 nt, Human
ggaucaccaagagguucaggaagaa

SEQ ID NO: 1176437 - RNA, 22 nt, Human
ggaucacuugagcccaggaguu

SEQ ID NO: 1176438 - RNA, 23 nt, Human
ggaucacuugagccuaggaguuc

SEQ ID NO: 1176439 - RNA, 19 nt, Human
ggcaagugauugaaucugc

SEQ ID NO: 1176440 - RNA, 24 nt, Human
ggcaccuguaaucccagcuacuug

SEQ ID NO: 1176441 - RNA, 20 nt, Human
ggccccaagacggauggggg

SEQ ID NO: 1176442 - RNA, 18 nt, Human
ggccgaggcaggaggauc

SEQ ID NO: 1176443 - RNA, 21 nt, Human
ggcgggcaccuguaaucccag

SEQ ID NO: 1176444 - RNA, 21 nt, Human
ggcucacgccuguaaucccag

SEQ ID NO: 1176445 - RNA, 23 nt, Human
gggcaacauggugaaaccccgac

SEQ ID NO: 1176446 - RNA, 24 nt, Human
gggcaccauggcucacgccuguaa

SEQ ID NO: 1176447 - RNA, 22 nt, Human
gggcagaucaccugagcucagg

SEQ ID NO: 1176448 - RNA, 26 nt, Human
gggcagaucaccugagcucaggaguu

SEQ ID NO: 1176449 - RNA, 19 nt, Human
ggggaagugguggggacca

SEQ ID NO: 1176450 - RNA, 20 nt, Human
ggggaagugguggggaccag

SEQ ID NO: 1176451 - RNA, 22 nt, Human
ggguucaagugauucuccugcc

SEQ ID NO: 1176452 - RNA, 23 nt, Human
ggguucaagugauucuccugccu

SEQ ID NO: 1176453 - RNA, 21 nt, Human
ggugaagaggugaagcccagg

SEQ ID NO: 1176454 - RNA, 24 nt, Human
ggugauucaugccuggagccccag

SEQ ID NO: 1176455 - RNA, 21 nt, Human
gguggaucacguaaggucagg

SEQ ID NO: 1176456 - RNA, 23 nt, Human
gguggcucacgccuguaauccag

SEQ ID NO: 1176457 - RNA, 22 nt, Human
gguggcucagccuguaauccca

SEQ ID NO: 1176458 - RNA, 23 nt, Human
ggugugguggcgggcaccuguaa

SEQ ID NO: 1176459 - RNA, 23 nt, Human
ggugugguggcucacgccuguaa

SEQ ID NO: 1176460 - RNA, 24 nt, Human
gucucaaaaaacaggagccaggcu

SEQ ID NO: 1176461 - RNA, 22 nt, Human
gugacuugagcuuuauuuugug

SEQ ID NO: 1176462 - RNA, 24 nt, Human
gugauucuccugccucagccuccc

SEQ ID NO: 1176463 - RNA, 22 nt, Human
guggaauggaugcagagagggc

SEQ ID NO: 1176464 - RNA, 19 nt, Human
guggagcuggcagagagaa

SEQ ID NO: 1176465 - RNA, 24 nt, Human
guggaucacguaaggucaggaguu

SEQ ID NO: 1176466 - RNA, 23 nt, Human
guggcaggcgccuguagucccag

SEQ ID NO: 1176467 - RNA, 21 nt, Human
gugguccaggccauccuuucu

SEQ ID NO: 1176468 - RNA, 19 nt, Human
guugcagugagcugagauu

SEQ ID NO: 1176469 - RNA, 24 nt, Human
guuggcagaugccuguaaucccag

SEQ ID NO: 1176470 - RNA, 21 nt, Human
uaaaaaaacuuagucuggcac

SEQ ID NO: 1176471 - RNA, 20 nt, Human
uaaaaauacaaaaauuagcc

SEQ ID NO: 1176472 - RNA, 21 nt, Human
uaaaaauacaaaaauuagccc

SEQ ID NO: 1176473 - RNA, 19 nt, Human
uacgcuguucugcagccug

SEQ ID NO: 1176474 - RNA, 20 nt, Human
uacuccaaccugggaaacag

SEQ ID NO: 1176475 - RNA, 23 nt, Human
uacuccaaccugggaaacagggu

SEQ ID NO: 1176476 - RNA, 24 nt, Human
uacuccaaccugggaaacagggug

SEQ ID NO: 1176477 - RNA, 22 nt, Human
uagaaccaaggaggggccccuc

SEQ ID NO: 1176478 - RNA, 18 nt, Human
uagagguugcagugagcu

SEQ ID NO: 1176479 - RNA, 24 nt, Human
uagaucaccugaggucgggaguuc

SEQ ID NO: 1176480 - RNA, 23 nt, Human
uagccaacauggugagacccugu

SEQ ID NO: 1176481 - RNA, 19 nt, Human
uagcuugcucuccucugcc

SEQ ID NO: 1176482 - RNA, 20 nt, Human
ucaagauuaaaagagccagg

SEQ ID NO: 1176483 - RNA, 19 nt, Human
ucaagugauucuccugccu

SEQ ID NO: 1176484 - RNA, 23 nt, Human
ucacaccacugcacucuggccug

SEQ ID NO: 1176485 - RNA, 19 nt, Human
ucaccaagagguucaggac

SEQ ID NO: 1176486 - RNA, 24 nt, Human
ucaccuaggcuggagugcaguggc

SEQ ID NO: 1176487 - RNA, 23 nt, Human
ucaccugagcucaggaguucaag

SEQ ID NO: 1176488 - RNA, 23 nt, Human
ucacgccacugcacuccacccug

SEQ ID NO: 1176489 - RNA, 24 nt, Human
ucacgccuguaauccagcacuuug

SEQ ID NO: 1176490 - RNA, 23 nt, Human
ucacugcaaccuccgccucccgg

SEQ ID NO: 1176491 - RNA, 24 nt, Human
ucacugcaaccuccgccucccggg

SEQ ID NO: 1176492 - RNA, 25 nt, Human
ucacugcaaccuccgccucccgggu

SEQ ID NO: 1176493 - RNA, 27 nt, Human
ucacugcaaccuccgccucccggguuc

SEQ ID NO: 1176494 - RNA, 18 nt, Human
ucacuugagccuaggagu

SEQ ID NO: 1176495 - RNA, 19 nt, Human
ucagaagcaacagcagggc

SEQ ID NO: 1176496 - RNA, 21 nt, Human
ucaguagagagggaagugagc

SEQ ID NO: 1176497 - RNA, 21 nt, Human
ucaguagagagggaagugagc

SEQ ID NO: 1176498 - RNA, 24 nt, Human
ucauguagggcuugcugcaggaga

SEQ ID NO: 1176499 - RNA, 22 nt, Human
ucauuguaaugauacaaucaga

SEQ ID NO: 1176500 - RNA, 20 nt, Human
uccaaccugggaaacagggu

SEQ ID NO: 1176501 - RNA, 18 nt, Human
uccaagcagcacagagca

SEQ ID NO: 1176502 - RNA, 24 nt, Human
uccacccugggcgacagagcgaga

SEQ ID NO: 1176503 - RNA, 18 nt, Human
ucccaaagugcugggauu

SEQ ID NO: 1176504 - RNA, 21 nt, Human
ucccaaagugcugggauuaca

SEQ ID NO: 1176505 - RNA, 25 nt, Human
ucccagcuacuugggagccugaggc

SEQ ID NO: 1176506 - RNA, 19 nt, Human
uccccacaacuccccuccc

SEQ ID NO: 1176507 - RNA, 23 nt, Human
ucccgcacguccacgcgugccag

SEQ ID NO: 1176508 - RNA, 21 nt, Human
ucccggguucaagugauucuc

SEQ ID NO: 1176509 - RNA, 24 nt, Human
ucccggguucaagugauucuccug

SEQ ID NO: 1176510 - RNA, 19 nt, Human
ucccuggacagcuaguguu

SEQ ID NO: 1176511 - RNA, 22 nt, Human
ucccuggacagcuaguguuccc

SEQ ID NO: 1176512 - RNA, 19 nt, Human
ucccuggucuacgcuguuc

SEQ ID NO: 1176513 - RNA, 24 nt, Human
ucggaggcugaagcaggaggauca

SEQ ID NO: 1176514 - RNA, 26 nt, Human
ucuacaaaaaaugaaaacaaugagcc

SEQ ID NO: 1176515 - RNA, 24 nt, Human
ucuaggaaagcaucugcacacagu

SEQ ID NO: 1176516 - RNA, 24 nt, Human
ucuaucaccuaggcuggagugcag

SEQ ID NO: 1176517 - RNA, 21 nt, Human
ucuaucuccaaaaaaaaaagg

SEQ ID NO: 1176518 - RNA, 19 nt, Human
ucucaaaaaacaggagcca

SEQ ID NO: 1176519 - RNA, 27 nt, Human
ucuccagcucccuuuuggggggccgcc

SEQ ID NO: 1176520 - RNA, 26 nt, Human
ucuccugccucagccucccaaagugc

SEQ ID NO: 1176521 - RNA, 21 nt, Human
ucucuacuaaaaauacaaaaa

SEQ ID NO: 1176522 - RNA, 26 nt, Human
ucucucuacaaaaaauuuuaaaaaaa

SEQ ID NO: 1176523 - RNA, 22 nt, Human
ucugaacccagacagugggcag

SEQ ID NO: 1176524 - RNA, 19 nt, Human
ucuugcucuaucaccuagg

SEQ ID NO: 1176525 - RNA, 23 nt, Human
ucuugcucuaucaccuaggcugg

SEQ ID NO: 1176526 - RNA, 24 nt, Human
ucuugcucuaucaccuaggcugga

SEQ ID NO: 1176527 - RNA, 18 nt, Human
ugaaagagacaaaaacca

SEQ ID NO: 1176528 - RNA, 22 nt, Human
ugaaagagacaaaaaccaggua

SEQ ID NO: 1176529 - RNA, 22 nt, Human
ugaaauccccaggaaauaagac

SEQ ID NO: 1176530 - RNA, 20 nt, Human
ugaagcaggaggaucacuug

SEQ ID NO: 1176531 - RNA, 24 nt, Human
ugaagcaggaggaucacuugagcc

SEQ ID NO: 1176532 - RNA, 19 nt, Human
ugaccccaaagccacuccc

SEQ ID NO: 1176533 - RNA, 23 nt, Human
ugacggcaccacuauacuccaac

SEQ ID NO: 1176534 - RNA, 22 nt, Human
ugacucacaacuguaaucccag

SEQ ID NO: 1176535 - RNA, 24 nt, Human
ugacucacaacuguaaucccagca

SEQ ID NO: 1176536 - RNA, 22 nt, Human
ugagacuagauggaggggcuaa

SEQ ID NO: 1176537 - RNA, 23 nt, Human
ugagcccaggaguuugagaccag

SEQ ID NO: 1176538 - RNA, 22 nt, Human
ugagccgagaucacgccacugc

SEQ ID NO: 1176539 - RNA, 25 nt, Human
ugagccucuguguccuuggcugcag

SEQ ID NO: 1176540 - RNA, 18 nt, Human
ugaggagggaggauugcu

SEQ ID NO: 1176541 - RNA, 24 nt, Human
ugaggagggaggauugcuugagcc

SEQ ID NO: 1176542 - RNA, 18 nt, Human
ugaggcacuugggagaug

SEQ ID NO: 1176543 - RNA, 19 nt, Human
ugaggcaggagaaucgcug

SEQ ID NO: 1176544 - RNA, 23 nt, Human
ugaggcaggagaaucgcugggac

SEQ ID NO: 1176545 - RNA, 24 nt, Human
ugaggcaggagaaucgcugggacc

SEQ ID NO: 1176546 - RNA, 25 nt, Human
ugaggcaggagaaucgcugggaccc

SEQ ID NO: 1176547 - RNA, 20 nt, Human
ugaggcaggagaaucgcuug

SEQ ID NO: 1176548 - RNA, 24 nt, Human
ugaggcaggagaaucgcuugaacc

SEQ ID NO: 1176549 - RNA, 25 nt, Human
ugaggcaggagaaucgcuugaaccc

SEQ ID NO: 1176550 - RNA, 24 nt, Human
ugaggcaggagaauggugugaacc

SEQ ID NO: 1176551 - RNA, 25 nt, Human
ugaggcaggagaauggugugaaccc

SEQ ID NO: 1176552 - RNA, 20 nt, Human
ugaggcggguagaucaccug

SEQ ID NO: 1176553 - RNA, 24 nt, Human
ugaggcggguagaucaccugaggu

SEQ ID NO: 1176554 - RNA, 23 nt, Human
ugaggucgggaguucgaaaccag

SEQ ID NO: 1176555 - RNA, 20 nt, Human
ugauucuccugccucagccu

SEQ ID NO: 1176556 - RNA, 22 nt, Human
ugcaaugagccgagaucacgcc

SEQ ID NO: 1176557 - RNA, 22 nt, Human
ugcacgggaggccaagcgaccc

SEQ ID NO: 1176558 - RNA, 25 nt, Human
ugcacuccacccugggcgacagagc

SEQ ID NO: 1176559 - RNA, 19 nt, Human
ugcaguaagucaugacggc

SEQ ID NO: 1176560 - RNA, 22 nt, Human
ugcaguggcgcaaucucggcuc

SEQ ID NO: 1176561 - RNA, 23 nt, Human
ugcaguggcgcaaucucggcuca

SEQ ID NO: 1176562 - RNA, 18 nt, Human
ugcauaugggcccagcug

SEQ ID NO: 1176563 - RNA, 19 nt, Human
ugccagauccugugcugcg

SEQ ID NO: 1176564 - RNA, 24 nt, Human
ugccucagccucccaaagugcugg

SEQ ID NO: 1176565 - RNA, 24 nt, Human
ugccuggagccccagcuacuagag

SEQ ID NO: 1176566 - RNA, 23 nt, Human
ugccuguaaucccagcuacucgg

SEQ ID NO: 1176567 - RNA, 24 nt, Human
ugccuguaaucccagcuacucggg

SEQ ID NO: 1176568 - RNA, 18 nt, Human
ugcugccccgccaccagc

SEQ ID NO: 1176569 - RNA, 20 nt, Human
ugcugggauuacauauguca

SEQ ID NO: 1176570 - RNA, 21 nt, Human
uggaagagaguugcugaaggc

SEQ ID NO: 1176571 - RNA, 18 nt, Human
uggaaggagggaaggaga

SEQ ID NO: 1176572 - RNA, 19 nt, Human
uggaauagugggcucagga

SEQ ID NO: 1176573 - RNA, 19 nt, Human
uggaauggaugcagagagg

SEQ ID NO: 1176574 - RNA, 20 nt, Human
uggacaagggugaccuugau

SEQ ID NO: 1176575 - RNA, 19 nt, Human
uggagaguggaauggaugc

SEQ ID NO: 1176576 - RNA, 18 nt, Human
uggagcuggcagagagaa

SEQ ID NO: 1176577 - RNA, 22 nt, Human
uggagcuggcagagagaaaccu

SEQ ID NO: 1176578 - RNA, 23 nt, Human
uggagugcaguggcgcaaucucg

SEQ ID NO: 1176579 - RNA, 24 nt, Human
uggagugcaguggcgcaaucucgg

SEQ ID NO: 1176580 - RNA, 24 nt, Human
uggaucacguaaggucaggaguuc

SEQ ID NO: 1176581 - RNA, 21 nt, Human
uggcagaugccuguaauccca

SEQ ID NO: 1176582 - RNA, 22 nt, Human
uggcgggcaccuguaaucccag

SEQ ID NO: 1176583 - RNA, 19 nt, Human
uggcucacgccuguaaucc

SEQ ID NO: 1176584 - RNA, 23 nt, Human
uggcucacgccuguaauccagca

SEQ ID NO: 1176585 - RNA, 21 nt, Human
uggcucacgccuguaauccca

SEQ ID NO: 1176586 - RNA, 22 nt, Human
uggcucacgccuguaaucccag

SEQ ID NO: 1176587 - RNA, 22 nt, Human
uggcucacgccuguaaucccag

SEQ ID NO: 1176588 - RNA, 24 nt, Human
uggcucacgccuguaaucccagca

SEQ ID NO: 1176589 - RNA, 20 nt, Human
uggcucagccuguaauccca

SEQ ID NO: 1176590 - RNA, 21 nt, Human
uggcucagccuguaaucccag

SEQ ID NO: 1176591 - RNA, 22 nt, Human
ugggaaacagggugaaacccug

SEQ ID NO: 1176592 - RNA, 20 nt, Human
ugggaggccgaggcaggagg

SEQ ID NO: 1176593 - RNA, 24 nt, Human
ugggaggccgaggcaggaggauca

SEQ ID NO: 1176594 - RNA, 20 nt, Human
ugggaggccgaggugggcag

SEQ ID NO: 1176595 - RNA, 24 nt, Human
ugggaggccgaggugggcagauca

SEQ ID NO: 1176596 - RNA, 20 nt, Human
ugggaggcugaggcggguag

SEQ ID NO: 1176597 - RNA, 24 nt, Human
ugggaggcugaggcggguagauca

SEQ ID NO: 1176598 - RNA, 24 nt, Human
ugggauuacauaugucacccacca

SEQ ID NO: 1176599 - RNA, 24 nt, Human
ugggcaacauagugagauccuguc

SEQ ID NO: 1176600 - RNA, 24 nt, Human
ugggcagaucaccugagcucagga

SEQ ID NO: 1176601 - RNA, 21 nt, Human
ugggguggccaggcgggguug

SEQ ID NO: 1176602 - RNA, 18 nt, Human
uggugcacaucuguaguc

SEQ ID NO: 1176603 - RNA, 19 nt, Human
ugguggagggaggggacag

SEQ ID NO: 1176604 - RNA, 20 nt, Human
ugguggagggaggggacaga

SEQ ID NO: 1176605 - RNA, 23 nt, Human
ugguggagggaggggacagaguc

SEQ ID NO: 1176606 - RNA, 24 nt, Human
ugguggcaggcgccuguaguccca

SEQ ID NO: 1176607 - RNA, 24 nt, Human
ugguggcgggcaccuguaauccca

SEQ ID NO: 1176608 - RNA, 22 nt, Human
ugguggcucacgccuguaaucc

SEQ ID NO: 1176609 - RNA, 24 nt, Human
ugguggugcacaucuguagucuca

SEQ ID NO: 1176610 - RNA, 24 nt, Human
ugguuggggucaggguccuagagg

SEQ ID NO: 1176611 - RNA, 20 nt, Human
uguaaugauacaaucagauu

SEQ ID NO: 1176612 - RNA, 18 nt, Human
ugucacccaccacaccca

SEQ ID NO: 1176613 - RNA, 20 nt, Human
ugucuuaaaaaaaaaagaga

SEQ ID NO: 1176614 - RNA, 23 nt, Human
ugugguggcaggcgccuguaguc

SEQ ID NO: 1176615 - RNA, 19 nt, Human
ugugguggcgggcaccugu

SEQ ID NO: 1176616 - RNA, 18 nt, Human
uguugggccacaggagau

SEQ ID NO: 1176617 - RNA, 21 nt, Human
uuaaaagagccaggcacagug

SEQ ID NO: 1176618 - RNA, 21 nt, Human
uuagaggcaggaacagcagcu

SEQ ID NO: 1176619 - RNA, 18 nt, Human
uuagcagagguugagcug

SEQ ID NO: 1176620 - RNA, 25 nt, Human
uucaaaaaaaaaaaaauucuagaau

SEQ ID NO: 1176621 - RNA, 21 nt, Human
uucaagugauucuccugccuc

SEQ ID NO: 1176622 - RNA, 23 nt, Human
uucaagugauucuccugccucag

SEQ ID NO: 1176623 - RNA, 24 nt, Human
uucaagugauucuccugccucagc

SEQ ID NO: 1176624 - RNA, 18 nt, Human
uucccagucauuguaaug

SEQ ID NO: 1176625 - RNA, 24 nt, Human
uuccccacaacuccccucccagaa

SEQ ID NO: 1176626 - RNA, 23 nt, Human
uuccucaguggcauggggagaga

SEQ ID NO: 1176627 - RNA, 19 nt, Human
uuccugugugacuccagca

SEQ ID NO: 1176628 - RNA, 19 nt, Human
uucucuguucugugcaccc

SEQ ID NO: 1176629 - RNA, 19 nt, Human
uucugcagccugagccugg

SEQ ID NO: 1176630 - RNA, 20 nt, Human
uugaagccaggagaccagcc

SEQ ID NO: 1176631 - RNA, 21 nt, Human
uugagccaaagaguucaaggc

SEQ ID NO: 1176632 - RNA, 22 nt, Human
uugagcccaggaguuugagacc

SEQ ID NO: 1176633 - RNA, 20 nt, Human
uugcaaugagccgagaucac

SEQ ID NO: 1176634 - RNA, 19 nt, Human
uugcagugagcugagauug

SEQ ID NO: 1176635 - RNA, 20 nt, Human
uugcagugagcugagauugc

SEQ ID NO: 1176636 - RNA, 22 nt, Human
uugcagugagcugagauugcgc

SEQ ID NO: 1176637 - RNA, 23 nt, Human
uugcgccacggcauuccagccug

SEQ ID NO: 1176638 - RNA, 19 nt, Human
uugcuucccugcagguucu

SEQ ID NO: 1176639 - RNA, 24 nt, Human
uugcuugagcccaggaagucaaag

SEQ ID NO: 1176640 - RNA, 18 nt, Human
uuggagaaggcaaaacua

SEQ ID NO: 1176641 - RNA, 25 nt, Human
uugggaggccgaggcaggaggauca

SEQ ID NO: 1176642 - RNA, 25 nt, Human
uugggaggccgaggugggcagauca

SEQ ID NO: 1176643 - RNA, 25 nt, Human
uugggaggcugaggcggguagauca

SEQ ID NO: 1176644 - RNA, 18 nt, Human
uuuagaggcaggaacagc

SEQ ID NO: 1176645 - RNA, 18 nt, Human
uuuuuugguggagggagg

SEQ ID NO: 1176646 - RNA, 20 nt, Human
uuuuuuugguggagggaggg

SEQ ID NO: 1176647 - RNA, 23 nt, Human
ugacaacgcgcaccucaggccuu

SEQ ID NO: 1176648 - RNA, 21 nt, Human
aaaaugaacacauauuaggca

SEQ ID NO: 1176649 - RNA, 22 nt, Human
aaagaugcacuuccuuaugauc

SEQ ID NO: 1176650 - RNA, 25 nt, Human
aagaaggaaaugcaguaguaacaga

SEQ ID NO: 1176651 - RNA, 21 nt, Human
aagagcucucagcuugcugcc

SEQ ID NO: 1176652 - RNA, 19 nt, Human
aagauaagagaagccgcgg

SEQ ID NO: 1176653 - RNA, 24 nt, Human
aaguagcugggacuacagacaugu

SEQ ID NO: 1176654 - RNA, 19 nt, Human
aaugggcuuaaugaacugc

SEQ ID NO: 1176655 - RNA, 24 nt, Human
acaauccaccacaucuaauugcac

SEQ ID NO: 1176656 - RNA, 19 nt, Human
acagagcaagaaggaaaug

SEQ ID NO: 1176657 - RNA, 21 nt, Human
acauuacugaaagcaaugggc

SEQ ID NO: 1176658 - RNA, 21 nt, Human
accaagcaagguggacauccu

SEQ ID NO: 1176659 - RNA, 24 nt, Human
accacaauccaccacaucuaauug

SEQ ID NO: 1176660 - RNA, 23 nt, Human
acccaucuugucuaucugguccu

SEQ ID NO: 1176661 - RNA, 19 nt, Human
accccuuuaucuggaggcc

SEQ ID NO: 1176662 - RNA, 19 nt, Human
acccugaggugcagucagg

SEQ ID NO: 1176663 - RNA, 19 nt, Human
agagaagccgcggcccuaa

SEQ ID NO: 1176664 - RNA, 20 nt, Human
agagcaagaaggaaaugcag

SEQ ID NO: 1176665 - RNA, 18 nt, Human
agagcgcauaucucagaa

SEQ ID NO: 1176666 - RNA, 22 nt, Human
agcagccaaggagguguucuga

SEQ ID NO: 1176667 - RNA, 23 nt, Human
agcaucccuguaauccuaagcaa

SEQ ID NO: 1176668 - RNA, 24 nt, Human
agccaccaagcaagguggacaucc

SEQ ID NO: 1176669 - RNA, 18 nt, Human
agccuccagaguagcugg

SEQ ID NO: 1176670 - RNA, 22 nt, Human
agcugguacuacaggugugugc

SEQ ID NO: 1176671 - RNA, 24 nt, Human
agcuugcugcccagugucaccucu

SEQ ID NO: 1176672 - RNA, 18 nt, Human
aggaagagacagguacaa

SEQ ID NO: 1176673 - RNA, 18 nt, Human
aggaaggugguggaagau

SEQ ID NO: 1176674 - RNA, 19 nt, Human
aggaguaaguaaaccaaaa

SEQ ID NO: 1176675 - RNA, 21 nt, Human
aggcgugugcccaaguagcug

SEQ ID NO: 1176676 - RNA, 21 nt, Human
aggugguggaagauaagagaa

SEQ ID NO: 1176677 - RNA, 23 nt, Human
aggugguggaagauaagagaagc

SEQ ID NO: 1176678 - RNA, 23 nt, Human
aguagcugggacuacagacaugu

SEQ ID NO: 1176679 - RNA, 23 nt, Human
aguagcugguacuacaggugugu

SEQ ID NO: 1176680 - RNA, 19 nt, Human
aguggccuggacuacaggc

SEQ ID NO: 1176681 - RNA, 23 nt, Human
aguggccuggacuacaggcgugu

SEQ ID NO: 1176682 - RNA, 21 nt, Human
aguuuugucuuccuacggcuc

SEQ ID NO: 1176683 - RNA, 23 nt, Human
auaacccugcaagcaaggaaggu

SEQ ID NO: 1176684 - RNA, 19 nt, Human
auccuuggggaucuuuuuc

SEQ ID NO: 1176685 - RNA, 18 nt, Human
augagauagcagccaagg

SEQ ID NO: 1176686 - RNA, 22 nt, Human
auguuacaugucaaagauaaca

SEQ ID NO: 1176687 - RNA, 21 nt, Human
caagaugaauccagucccuug

SEQ ID NO: 1176688 - RNA, 23 nt, Human
caagaugaauccagucccuuguc

SEQ ID NO: 1176689 - RNA, 20 nt, Human
caagcccugagcccaacccu

SEQ ID NO: 1176690 - RNA, 22 nt, Human
caagugauccuccugccucagc

SEQ ID NO: 1176691 - RNA, 27 nt, Human
caagugauccuccugccucagccucca

SEQ ID NO: 1176692 - RNA, 20 nt, Human
caauagagagagcgcauauc

SEQ ID NO: 1176693 - RNA, 19 nt, Human
cacaacaauucuauaaaga

SEQ ID NO: 1176694 - RNA, 23 nt, Human
caccaauauacugagcacaaggg

SEQ ID NO: 1176695 - RNA, 22 nt, Human
caccaaucagaagaaccaaaau

SEQ ID NO: 1176696 - RNA, 23 nt, Human
cacuuccuuaugaucagggagaa

SEQ ID NO: 1176697 - RNA, 23 nt, Human
cagacauguuccuggcucgcauc

SEQ ID NO: 1176698 - RNA, 23 nt, Human
cagccccacggaggaauucagcc

SEQ ID NO: 1176699 - RNA, 21 nt, Human
caggugugugcucgaguggcc

SEQ ID NO: 1176700 - RNA, 19 nt, Human
cagugucaccucucugccu

SEQ ID NO: 1176701 - RNA, 23 nt, Human
ccaaucagaagaaccaaaaugaa

SEQ ID NO: 1176702 - RNA, 22 nt, Human
ccagaguagcugguacuacagg

SEQ ID NO: 1176703 - RNA, 25 nt, Human
ccagaguagcugguacuacaggugu

SEQ ID NO: 1176704 - RNA, 19 nt, Human
cccaaguagcugggacuac

SEQ ID NO: 1176705 - RNA, 22 nt, Human
cccagcccuuccuuuaccuucu

SEQ ID NO: 1176706 - RNA, 23 nt, Human
cccagcccuuccuuuaccuucuc

SEQ ID NO: 1176707 - RNA, 21 nt, Human
cccaggcuggagcacaguggc

SEQ ID NO: 1176708 - RNA, 23 nt, Human
cccucuggcucugggcagugggc

SEQ ID NO: 1176709 - RNA, 22 nt, Human
cccugaggugcagucagggaga

SEQ ID NO: 1176710 - RNA, 23 nt, Human
cccugggagcugugccucaggau

SEQ ID NO: 1176711 - RNA, 28 nt, Human
ccggaaggaaaagaaaagucuuuccaca

SEQ ID NO: 1176712 - RNA, 24 nt, Human
ccuccugccucagccuccagagua

SEQ ID NO: 1176713 - RNA, 24 nt, Human
ccugcaggccgcaagcccugagcc

SEQ ID NO: 1176714 - RNA, 19 nt, Human
ccugccaugcuccauggga

SEQ ID NO: 1176715 - RNA, 20 nt, Human
ccuggacuacaggcgugugc

SEQ ID NO: 1176716 - RNA, 22 nt, Human
ccugggcucaagugauccuccu

SEQ ID NO: 1176717 - RNA, 23 nt, Human
ccugggcucaagugauccuccug

SEQ ID NO: 1176718 - RNA, 21 nt, Human
ccuuccuuuaccuucucagaa

SEQ ID NO: 1176719 - RNA, 24 nt, Human
cucaagugauccuccugccucagc

SEQ ID NO: 1176720 - RNA, 20 nt, Human
cucaauggcuugcauguaug

SEQ ID NO: 1176721 - RNA, 21 nt, Human
cuccagaaaagagacuauccc

SEQ ID NO: 1176722 - RNA, 22 nt, Human
cuccagcgagagagaggaacgg

SEQ ID NO: 1176723 - RNA, 23 nt, Human
cucgaguggccuggacuacaggc

SEQ ID NO: 1176724 - RNA, 18 nt, Human
cucuaaauaaccaagccc

SEQ ID NO: 1176725 - RNA, 20 nt, Human
cucugggcagugggcgcggc

SEQ ID NO: 1176726 - RNA, 21 nt, Human
cucugggcagugggcgcggcu

SEQ ID NO: 1176727 - RNA, 18 nt, Human
cucuguucacacagacuu

SEQ ID NO: 1176728 - RNA, 22 nt, Human
cugauaccagugaggcuguccc

SEQ ID NO: 1176729 - RNA, 23 nt, Human
cugccucagccuccagaguagcu

SEQ ID NO: 1176730 - RNA, 23 nt, Human
cuggaggccguuaccacaaucca

SEQ ID NO: 1176731 - RNA, 19 nt, Human
cugguacuacaggugugug

SEQ ID NO: 1176732 - RNA, 24 nt, Human
cuuagaucucaguauccaccucuu

SEQ ID NO: 1176733 - RNA, 23 nt, Human
cuuggucuucucuuccucauaug

SEQ ID NO: 1176734 - RNA, 19 nt, Human
cuuucauccuuuggagccu

SEQ ID NO: 1176735 - RNA, 18 nt, Human
cuuucuucuucagccagg

SEQ ID NO: 1176736 - RNA, 22 nt, Human
gaaauagaggaguaaguaaacc

SEQ ID NO: 1176737 - RNA, 20 nt, Human
gaagaucuaggcaucuugcc

SEQ ID NO: 1176738 - RNA, 22 nt, Human
gagaagggggaagcagaagggg

SEQ ID NO: 1176739 - RNA, 21 nt, Human
gagaauguuaccaggacagag

SEQ ID NO: 1176740 - RNA, 25 nt, Human
gagauagcagccaaggagguguucu

SEQ ID NO: 1176741 - RNA, 20 nt, Human
gagcugugccucaggaugcu

SEQ ID NO: 1176742 - RNA, 22 nt, Human
gauucuggggcagucagcagcc

SEQ ID NO: 1176743 - RNA, 21 nt, Human
gcagugggcgcggcuucgggc

SEQ ID NO: 1176744 - RNA, 18 nt, Human
gcccagagccuugugucc

SEQ ID NO: 1176745 - RNA, 22 nt, Human
gcccuggaaucuuuguuuacac

SEQ ID NO: 1176746 - RNA, 18 nt, Human
gccucaggaugcuguucu

SEQ ID NO: 1176747 - RNA, 19 nt, Human
gcuaugggguggcugguca

SEQ ID NO: 1176748 - RNA, 22 nt, Human
gcucuuucuucuucagccaggg

SEQ ID NO: 1176749 - RNA, 23 nt, Human
gcuguaaacauugugguuuucua

SEQ ID NO: 1176750 - RNA, 23 nt, Human
gcugugugucucacccagcccuu

SEQ ID NO: 1176751 - RNA, 24 nt, Human
ggagagaagaugcucuuucuucuu

SEQ ID NO: 1176752 - RNA, 18 nt, Human
ggagaucacugccgucca

SEQ ID NO: 1176753 - RNA, 19 nt, Human
ggagccuuccuuccagacc

SEQ ID NO: 1176754 - RNA, 24 nt, Human
ggcagugggcgcggcuucucgcgg

SEQ ID NO: 1176755 - RNA, 24 nt, Human
ggcgggcggaggcggcggccccgg

SEQ ID NO: 1176756 - RNA, 20 nt, Human
gggaagcagaaggggucaag

SEQ ID NO: 1176757 - RNA, 23 nt, Human
gggcagugggcgcggcuucgggc

SEQ ID NO: 1176758 - RNA, 20 nt, Human
gggccuggccauuuagaguu

SEQ ID NO: 1176759 - RNA, 21 nt, Human
gggcucaagugauccuccugc

SEQ ID NO: 1176760 - RNA, 22 nt, Human
gggcucaagugauccuccugcc

SEQ ID NO: 1176761 - RNA, 22 nt, Human
ggucaagaaggugacaaaacuu

SEQ ID NO: 1176762 - RNA, 20 nt, Human
ggugcagugggagagaagau

SEQ ID NO: 1176763 - RNA, 21 nt, Human
gguggaagauaagagaagccg

SEQ ID NO: 1176764 - RNA, 18 nt, Human
gguguugcccaggcugga

SEQ ID NO: 1176765 - RNA, 24 nt, Human
gguguugcccaggcuggagcacag

SEQ ID NO: 1176766 - RNA, 22 nt, Human
guaaaacaaaauauaaagaagu

SEQ ID NO: 1176767 - RNA, 19 nt, Human
guaaaccaaaauauacagg

SEQ ID NO: 1176768 - RNA, 25 nt, Human
guaacaccaaucagaagaaccaaaa

SEQ ID NO: 1176769 - RNA, 19 nt, Human
guauggacucuaaauaacc

SEQ ID NO: 1176770 - RNA, 21 nt, Human
gugauccuccugccucagccu

SEQ ID NO: 1176771 - RNA, 26 nt, Human
uaaaagaguacaacaggagugcagcg

SEQ ID NO: 1176772 - RNA, 21 nt, Human
uaacaccaaucagaagaacca

SEQ ID NO: 1176773 - RNA, 21 nt, Human
uaaccaagcccugccaugcuc

SEQ ID NO: 1176774 - RNA, 18 nt, Human
uaagacagggcuguaaac

SEQ ID NO: 1176775 - RNA, 19 nt, Human
uacacauagggaacaggag

SEQ ID NO: 1176776 - RNA, 19 nt, Human
uaccacaauccaccacauc

SEQ ID NO: 1176777 - RNA, 24 nt, Human
uacgaugguguugcccaggcugga

SEQ ID NO: 1176778 - RNA, 19 nt, Human
uagcuuuggcagcuauggu

SEQ ID NO: 1176779 - RNA, 26 nt, Human
uauccaccucuuuuccaccucuaaaa

SEQ ID NO: 1176780 - RNA, 19 nt, Human
ucaaauggggaaaagucac

SEQ ID NO: 1176781 - RNA, 23 nt, Human
ucaaauggggaaaagucacuucc

SEQ ID NO: 1176782 - RNA, 23 nt, Human
ucagcuccccuuauacccaucuu

SEQ ID NO: 1176783 - RNA, 19 nt, Human
uccacauuuugggaaugug

SEQ ID NO: 1176784 - RNA, 20 nt, Human
uccaccucuaaaagaguaca

SEQ ID NO: 1176785 - RNA, 22 nt, Human
uccaccucuuuuccaccucuaa

SEQ ID NO: 1176786 - RNA, 18 nt, Human
ucccagggcuuggucuuc

SEQ ID NO: 1176787 - RNA, 23 nt, Human
ucccagggcuuggucuucucuuc

SEQ ID NO: 1176788 - RNA, 19 nt, Human
uccccugggagcugugccu

SEQ ID NO: 1176789 - RNA, 24 nt, Human
ucccuguaauccuaagcaagccuu

SEQ ID NO: 1176790 - RNA, 25 nt, Human
uccucauaugaacacagacuucagc

SEQ ID NO: 1176791 - RNA, 26 nt, Human
uccuccccaauuuauuuauuuauuua

SEQ ID NO: 1176792 - RNA, 21 nt, Human
uccugggcucaagugauccuc

SEQ ID NO: 1176793 - RNA, 22 nt, Human
uccugggcucaagugauccucc

SEQ ID NO: 1176794 - RNA, 22 nt, Human
uccugggcucaagugauccucc

SEQ ID NO: 1176795 - RNA, 24 nt, Human
uccugggcucaagugauccuccug

SEQ ID NO: 1176796 - RNA, 25 nt, Human
uccuucacuccauuuagaaagagcu

SEQ ID NO: 1176797 - RNA, 22 nt, Human
ucggcagauucuggggcaguca

SEQ ID NO: 1176798 - RNA, 22 nt, Human
ucuuaaucuccugggcucaagu

SEQ ID NO: 1176799 - RNA, 21 nt, Human
ugaauccagucccuugucaag

SEQ ID NO: 1176800 - RNA, 20 nt, Human
ugaauuccuucacuccauuu

SEQ ID NO: 1176801 - RNA, 19 nt, Human
ugacaaaacuucucgggac

SEQ ID NO: 1176802 - RNA, 20 nt, Human
ugacuaguuggccuaggcug

SEQ ID NO: 1176803 - RNA, 24 nt, Human
ugacuuggggaaucuucaaaagaa

SEQ ID NO: 1176804 - RNA, 18 nt, Human
ugagaagauaacccugca

SEQ ID NO: 1176805 - RNA, 21 nt, Human
ugagauagcagccaaggaggu

SEQ ID NO: 1176806 - RNA, 20 nt, Human
ugaggaaaggccaggugagc

SEQ ID NO: 1176807 - RNA, 23 nt, Human
ugcauagcuuuggcagcuauggu

SEQ ID NO: 1176808 - RNA, 19 nt, Human
ugcccagugucaccucucu

SEQ ID NO: 1176809 - RNA, 24 nt, Human
ugccucagccuccagaguagcugg

SEQ ID NO: 1176810 - RNA, 21 nt, Human
ugccugcaggccgcaagcccu

SEQ ID NO: 1176811 - RNA, 19 nt, Human
uggacuacaggcgugugcc

SEQ ID NO: 1176812 - RNA, 21 nt, Human
uggacuacaggcgugugccca

SEQ ID NO: 1176813 - RNA, 22 nt, Human
uggacucuaaauaaccaagccc

SEQ ID NO: 1176814 - RNA, 18 nt, Human
uggagcuacaccucuguc

SEQ ID NO: 1176815 - RNA, 25 nt, Human
uggauucuaacacaugagauagcag

SEQ ID NO: 1176816 - RNA, 22 nt, Human
ugggacuacagacauguuccug

SEQ ID NO: 1176817 - RNA, 22 nt, Human
ugggagaagggggaagcagaag

SEQ ID NO: 1176818 - RNA, 20 nt, Human
ugggcucaagugauccuccu

SEQ ID NO: 1176819 - RNA, 24 nt, Human
ugggcucaagugauccuccugccu

SEQ ID NO: 1176820 - RNA, 24 nt, Human
uggggaaaagucacuuccacaggg

SEQ ID NO: 1176821 - RNA, 18 nt, Human
ugguacuacaggugugug

SEQ ID NO: 1176822 - RNA, 19 nt, Human
uggugaagaacauguuccg

SEQ ID NO: 1176823 - RNA, 22 nt, Human
ugguguugcccaggcuggagca

SEQ ID NO: 1176824 - RNA, 23 nt, Human
ugucucacccagcccuuccuuua

SEQ ID NO: 1176825 - RNA, 18 nt, Human
ugugaucaauggugcuac

SEQ ID NO: 1176826 - RNA, 20 nt, Human
uuauuuauuuauuuauuuuu

SEQ ID NO: 1176827 - RNA, 21 nt, Human
uuauuuauuuauuuauuuuua

SEQ ID NO: 1176828 - RNA, 20 nt, Human
uuccaaagagguucaccaca

SEQ ID NO: 1176829 - RNA, 19 nt, Human
uucucgggacuuccugguc

SEQ ID NO: 1176830 - RNA, 19 nt, Human
uucucuuccucauaugaac

SEQ ID NO: 1176831 - RNA, 24 nt, Human
uucuggggcagucagcagccccuu

SEQ ID NO: 1176832 - RNA, 19 nt, Human
uugcauuccagcccuguga

SEQ ID NO: 1176833 - RNA, 19 nt, Human
uuggagcuacaccucuguc

SEQ ID NO: 1176834 - RNA, 19 nt, Human
uuggaggagaaggggugca

SEQ ID NO: 1176835 - RNA, 22 nt, Human
uuguguacgagaacaauagaga

SEQ ID NO: 1176836 - RNA, 22 nt, Human
uuuauuuauuuauuuauuuauu

SEQ ID NO: 1176837 - RNA, 20 nt, Human
uuugcauuccagcccuguga

SEQ ID NO: 1176838 - RNA, 23 nt, Human
aagguuuauauggaugucauugc

SEQ ID NO: 1176839 - RNA, 20 nt, Human
augucauugcauguuuggga

SEQ ID NO: 1176840 - RNA, 20 nt, Human
uggaugucauugcauguuug

SEQ ID NO: 1176841 - RNA, 21 nt, Human
aaaacaaacaaacaaacaaac

SEQ ID NO: 1176842 - RNA, 18 nt, Human
aaaaucauuuucacauuu

SEQ ID NO: 1176843 - RNA, 21 nt, Human
aaacaaaacaaaacaaacaaa

SEQ ID NO: 1176844 - RNA, 21 nt, Human
aaacaaacaaacaaacaaacc

SEQ ID NO: 1176845 - RNA, 24 nt, Human
aaacaaacaaacaaacaaaccaca

SEQ ID NO: 1176846 - RNA, 18 nt, Human
aaacaaacaaaccacaca

SEQ ID NO: 1176847 - RNA, 26 nt, Human
aaacaaacaaaccacacacuaaaaca

SEQ ID NO: 1176848 - RNA, 26 nt, Human
aaacaaacaaaccacacacuaaaacu

SEQ ID NO: 1176849 - RNA, 22 nt, Human
aaauccugucucuacuaaaaaa

SEQ ID NO: 1176850 - RNA, 25 nt, Human
aacaaacaaacaaaccacacacuaa

SEQ ID NO: 1176851 - RNA, 22 nt, Human
aacaaaccacacacuaaaacaa

SEQ ID NO: 1176852 - RNA, 20 nt, Human
aacacaguaaaauccugucu

SEQ ID NO: 1176853 - RNA, 21 nt, Human
aacacaguaaaauccugucuc

SEQ ID NO: 1176854 - RNA, 21 nt, Human
aagaaguuuugaggauuguaa

SEQ ID NO: 1176855 - RNA, 20 nt, Human
aauugcuugaaccuggaagg

SEQ ID NO: 1176856 - RNA, 19 nt, Human
acaaaacaaaacaaacaaa

SEQ ID NO: 1176857 - RNA, 24 nt, Human
acaaaacaaaacaaacaaacaaac

SEQ ID NO: 1176858 - RNA, 18 nt, Human
acaaaaccuuaugcugag

SEQ ID NO: 1176859 - RNA, 20 nt, Human
acaaacaaaccacacacuaa

SEQ ID NO: 1176860 - RNA, 21 nt, Human
acacacuaaaacaaaaccuua

SEQ ID NO: 1176861 - RNA, 22 nt, Human
acauauuaauggcuuuucuaca

SEQ ID NO: 1176862 - RNA, 21 nt, Human
acauuuuucugguuuguaaca

SEQ ID NO: 1176863 - RNA, 20 nt, Human
accuguuauuccagcacuuu

SEQ ID NO: 1176864 - RNA, 18 nt, Human
acuccagccugggagaga

SEQ ID NO: 1176865 - RNA, 24 nt, Human
agagguuacgguaaaccaagauug

SEQ ID NO: 1176866 - RNA, 22 nt, Human
agauugcaccagugcacuccag

SEQ ID NO: 1176867 - RNA, 22 nt, Human
agcacuuugggaggcagaggug

SEQ ID NO: 1176868 - RNA, 23 nt, Human
agccgggcgugaugguacaugcc

SEQ ID NO: 1176869 - RNA, 24 nt, Human
agccuggccaacacaguaaaaucc

SEQ ID NO: 1176870 - RNA, 24 nt, Human
aggcagagguuacgguaaaccaag

SEQ ID NO: 1176871 - RNA, 22 nt, Human
aggcaggagaauugcuugaacc

SEQ ID NO: 1176872 - RNA, 22 nt, Human
aggcaggagaauugcuugaacc

SEQ ID NO: 1176873 - RNA, 23 nt, Human
aggcaggagaauugcuugaaccu

SEQ ID NO: 1176874 - RNA, 24 nt, Human
aggcaggagaauugcuugaaccug

SEQ ID NO: 1176875 - RNA, 18 nt, Human
agugcacuccagccuggg

SEQ ID NO: 1176876 - RNA, 21 nt, Human
aucauuucaagucaggaguuc

SEQ ID NO: 1176877 - RNA, 22 nt, Human
auguaagcacauauuaauggcu

SEQ ID NO: 1176878 - RNA, 24 nt, Human
auugcaccagugcacuccagccug

SEQ ID NO: 1176879 - RNA, 19 nt, Human
auuugugggguuucucccc

SEQ ID NO: 1176880 - RNA, 24 nt, Human
caacacaguaaaauccugucucua

SEQ ID NO: 1176881 - RNA, 24 nt, Human
cacaccuguuauuccagcacuuug

SEQ ID NO: 1176882 - RNA, 21 nt, Human
cacauucuucacauuuguaga

SEQ ID NO: 1176883 - RNA, 24 nt, Human
cacauuuuucugguuuguaacauu

SEQ ID NO: 1176884 - RNA, 20 nt, Human
cacuccagccugggagagag

SEQ ID NO: 1176885 - RNA, 18 nt, Human
cagcacuuugggaggcag

SEQ ID NO: 1176886 - RNA, 20 nt, Human
caguaugaauuuucuuaugu

SEQ ID NO: 1176887 - RNA, 18 nt, Human
cagugcacuccagccugg

SEQ ID NO: 1176888 - RNA, 20 nt, Human
cagugcacuccagccuggga

SEQ ID NO: 1176889 - RNA, 22 nt, Human
cagugcacuccagccugggaga

SEQ ID NO: 1176890 - RNA, 19 nt, Human
ccagugcacuccagccugg

SEQ ID NO: 1176891 - RNA, 22 nt, Human
ccagugcacuccagccugggag

SEQ ID NO: 1176892 - RNA, 22 nt, Human
ccauauucuucacacuucuggg

SEQ ID NO: 1176893 - RNA, 21 nt, Human
ccuggaaggcagagguuacgg

SEQ ID NO: 1176894 - RNA, 22 nt, Human
ccuggccaacacaguaaaaucc

SEQ ID NO: 1176895 - RNA, 24 nt, Human
ccuggccaacacaguaaaauccug

SEQ ID NO: 1176896 - RNA, 22 nt, Human
ccuguagucccagcuauucugg

SEQ ID NO: 1176897 - RNA, 23 nt, Human
ccugucucuacuaaaaaauacaa

SEQ ID NO: 1176898 - RNA, 19 nt, Human
cuaaaacaaaaccuuaugc

SEQ ID NO: 1176899 - RNA, 24 nt, Human
cucacaccuguuauuccagcacuu

SEQ ID NO: 1176900 - RNA, 20 nt, Human
cucuacuaaaaaauacaaaa

SEQ ID NO: 1176901 - RNA, 22 nt, Human
gaaccuggaaggcagagguuac

SEQ ID NO: 1176902 - RNA, 24 nt, Human
gaucauuucaagucaggaguucga

SEQ ID NO: 1176903 - RNA, 21 nt, Human
gcacuccagccugggagagag

SEQ ID NO: 1176904 - RNA, 20 nt, Human
gcagaaaggguugaagacuu

SEQ ID NO: 1176905 - RNA, 24 nt, Human
gccaacacaguaaaauccugucuc

SEQ ID NO: 1176906 - RNA, 22 nt, Human
guaaggcaggcacuacaacccu

SEQ ID NO: 1176907 - RNA, 23 nt, Human
guagaguuucucuccaguuugaa

SEQ ID NO: 1176908 - RNA, 23 nt, Human
uaaaaaaaacaaaacaaaacaaa

SEQ ID NO: 1176909 - RNA, 18 nt, Human
uaaaacaaaaccuuaugc

SEQ ID NO: 1176910 - RNA, 21 nt, Human
uacuaaggauugaguaucggu

SEQ ID NO: 1176911 - RNA, 21 nt, Human
uaucuuauguguaauaagagu

SEQ ID NO: 1176912 - RNA, 23 nt, Human
uauuggcugggaacaguggcuca

SEQ ID NO: 1176913 - RNA, 22 nt, Human
ucacauucuucacauuuuuaua

SEQ ID NO: 1176914 - RNA, 20 nt, Human
ucauuucaagucaggaguuc

SEQ ID NO: 1176915 - RNA, 24 nt, Human
ucauuucaagucaggaguucgaga

SEQ ID NO: 1176916 - RNA, 21 nt, Human
ucucuacuaaaaaauacaaaa

SEQ ID NO: 1176917 - RNA, 27 nt, Human
ucugugauacaaguaaggccggggucc

SEQ ID NO: 1176918 - RNA, 21 nt, Human
ugacaaccauuuaaaggcuuu

SEQ ID NO: 1176919 - RNA, 20 nt, Human
ugauacaaguaaggcaggca

SEQ ID NO: 1176920 - RNA, 24 nt, Human
ugaugguacaugccuguaguccca

SEQ ID NO: 1176921 - RNA, 23 nt, Human
ugcaccagugcacuccagccugg

SEQ ID NO: 1176922 - RNA, 20 nt, Human
ugcagaaaggguugaagacu

SEQ ID NO: 1176923 - RNA, 22 nt, Human
ugccacauucuucacauuugua

SEQ ID NO: 1176924 - RNA, 24 nt, Human
ugccuguagucccagcuauucugg

SEQ ID NO: 1176925 - RNA, 18 nt, Human
uggaaggcagagguuacg

SEQ ID NO: 1176926 - RNA, 20 nt, Human
uggaucauuucaagucagga

SEQ ID NO: 1176927 - RNA, 24 nt, Human
uggaucauuucaagucaggaguuc

SEQ ID NO: 1176928 - RNA, 22 nt, Human
uggcucacaccuguuauuccag

SEQ ID NO: 1176929 - RNA, 24 nt, Human
uggcucacaccuguuauuccagca

SEQ ID NO: 1176930 - RNA, 21 nt, Human
uggcuuuucuacauucuuuau

SEQ ID NO: 1176931 - RNA, 21 nt, Human
ugggaggcagagguguaugga

SEQ ID NO: 1176932 - RNA, 24 nt, Human
ugggaggcagagguguauggauca

SEQ ID NO: 1176933 - RNA, 18 nt, Human
ugggaguuucugccagua

SEQ ID NO: 1176934 - RNA, 23 nt, Human
uguagaguuucucuccaguuuga

SEQ ID NO: 1176935 - RNA, 23 nt, Human
uguaggguuuuucuccacuguga

SEQ ID NO: 1176936 - RNA, 23 nt, Human
uguaggguuuuucuccaguauga

SEQ ID NO: 1176937 - RNA, 24 nt, Human
uguauggaucauuucaagucagga

SEQ ID NO: 1176938 - RNA, 18 nt, Human
uguauuacauuuguaguu

SEQ ID NO: 1176939 - RNA, 24 nt, Human
ugucacauucuucacauuuuuaua

SEQ ID NO: 1176940 - RNA, 23 nt, Human
ugugggguuucucuccaguauga

SEQ ID NO: 1176941 - RNA, 21 nt, Human
uuaauggcuuuucuacauucu

SEQ ID NO: 1176942 - RNA, 20 nt, Human
uuagccgggcgugaugguac

SEQ ID NO: 1176943 - RNA, 22 nt, Human
uuaugugcagaaaggguugaag

SEQ ID NO: 1176944 - RNA, 20 nt, Human
uucacauuugugguguuucc

SEQ ID NO: 1176945 - RNA, 30 nt, Human; identical to SEQ ID NO: 428589

SEQ ID NO: 1176946 - RNA, 18 nt, Human
uucauauuugugggguuu

SEQ ID NO: 1176947 - RNA, 23 nt, Human
uugcaccagugcacuccagccug

SEQ ID NO: 1176948 - RNA, 18 nt, Human
uugcuugaaccuggaagg

SEQ ID NO: 1176949 - RNA, 24 nt, Human
uuguuaaaaucauuuucacauuuu

SEQ ID NO: 1176950 - RNA, 22 nt, Human
uuucaagucaggaguucgagau

SEQ ID NO: 1176951 - RNA, 19 nt, Human
uuuguagaguuucucucca

SEQ ID NO: 1176952 - RNA, 19 nt, Human
uuugugggguuucucccca

SEQ ID NO: 1176953 - RNA, 19 nt, Human
uuugugggguuucucucca

SEQ ID NO: 1176954 - RNA, 21 nt, Human
uuuaauuagaaaaacacagau

SEQ ID NO: 1176955 - RNA, 21 nt, Human
ccgcuguuggggcgcccgggg

SEQ ID NO: 1176956 - RNA, 18 nt, Human
uucucugauaauccugcu

SEQ ID NO: 1176957 - RNA, 21 nt, Human
cugacccugauccaccucccc

SEQ ID NO: 1176958 - RNA, 27 nt, Human
aaauggccucacagucaugaguugggc

SEQ ID NO: 1176959 - RNA, 20 nt, Human
aagcggccgagaggcaggag

SEQ ID NO: 1176960 - RNA, 21 nt, Human
aagcggccgagaggcaggagc

SEQ ID NO: 1176961 - RNA, 19 nt, Human
acgaggcaggcacuaggcc

SEQ ID NO: 1176962 - RNA, 24 nt, Human
agacagaaguugggcaaaagccug

SEQ ID NO: 1176963 - RNA, 26 nt, Human
agacagaaguugggcaaaagggaccc

SEQ ID NO: 1176964 - RNA, 18 nt, Human
agcagggccugcagaggc

SEQ ID NO: 1176965 - RNA, 19 nt, Human
aggcacuaggccuggaaau

SEQ ID NO: 1176966 - RNA, 25 nt, Human
aggcagaaauuuggccuggggcagc

SEQ ID NO: 1176967 - RNA, 22 nt, Human
aggcaggagcuucgccugagga

SEQ ID NO: 1176968 - RNA, 25 nt, Human
aggcaggagcuucgccugaggaugc

SEQ ID NO: 1176969 - RNA, 19 nt, Human
aggcaggaggagcugggcc

SEQ ID NO: 1176970 - RNA, 21 nt, Human
aggcaggaggagcugggccug

SEQ ID NO: 1176971 - RNA, 19 nt, Human
aggcaggaggcugggccuu

SEQ ID NO: 1176972 - RNA, 20 nt, Human
aggcaugagcugggcugggc

SEQ ID NO: 1176973 - RNA, 19 nt, Human
aucugggucuggagggucc

SEQ ID NO: 1176974 - RNA, 21 nt, Human
augggccugaagaggccacug

SEQ ID NO: 1176975 - RNA, 20 nt, Human
caagagcagggccugcagag

SEQ ID NO: 1176976 - RNA, 21 nt, Human
caccgggaagcagaagguggg

SEQ ID NO: 1176977 - RNA, 21 nt, Human
cacuaggccuggaaauggccu

SEQ ID NO: 1176978 - RNA, 19 nt, Human
cagcaaacaagcucuuuug

SEQ ID NO: 1176979 - RNA, 21 nt, Human
ccaccgaaagucaaaagcggg

SEQ ID NO: 1176980 - RNA, 18 nt, Human
ccacugugaggcagaggc

SEQ ID NO: 1176981 - RNA, 18 nt, Human
ccccaugggccugaagag

SEQ ID NO: 1176982 - RNA, 21 nt, Human
ccccugagaggcaagagcagg

SEQ ID NO: 1176983 - RNA, 21 nt, Human
ccgaaaggcaggagcuucgcc

SEQ ID NO: 1176984 - RNA, 22 nt, Human
ccucacagucaugaguugggcc

SEQ ID NO: 1176985 - RNA, 20 nt, Human
cgccgggaggcaugagcugg

SEQ ID NO: 1176986 - RNA, 22 nt, Human
cgggagcugggccugccgaagc

SEQ ID NO: 1176987 - RNA, 22 nt, Human
cgggaggcaugagcugggcugg

SEQ ID NO: 1176988 - RNA, 18 nt, Human
cugaagaggccacuggca

SEQ ID NO: 1176989 - RNA, 20 nt, Human
cuggggcagcugccaugagg

SEQ ID NO: 1176990 - RNA, 21 nt, Human
gaagcagaaggugggccugga

SEQ ID NO: 1176991 - RNA, 20 nt, Human
gccccugagaggcaagagcu

SEQ ID NO: 1176992 - RNA, 24 nt, Human
gccgaaaggcaggagcuucgccug

SEQ ID NO: 1176993 - RNA, 18 nt, Human
gcgggagcugggccugcc

SEQ ID NO: 1176994 - RNA, 18 nt, Human
ggaaggccgccgggaggc

SEQ ID NO: 1176995 - RNA, 23 nt, Human
ggaggcaggaggagcugggcccc

SEQ ID NO: 1176996 - RNA, 22 nt, Human
ggcaggcagaaauuuggccugg

SEQ ID NO: 1176997 - RNA, 20 nt, Human
gggaggcaugagcugggcug

SEQ ID NO: 1176998 - RNA, 23 nt, Human
gggaggcaugagcugggcugggc

SEQ ID NO: 1176999 - RNA, 19 nt, Human
gggcugggccgaaagaggc

SEQ ID NO: 1177000 - RNA, 18 nt, Human
gggcuugggaaggccgcc

SEQ ID NO: 1177001 - RNA, 18 nt, Human
gugaggcagaggcugacc

SEQ ID NO: 1177002 - RNA, 19 nt, Human
gugaggcagaggcugggcc

SEQ ID NO: 1177003 - RNA, 25 nt, Human
ucaaagcugggccuguugaugccac

SEQ ID NO: 1177004 - RNA, 20 nt, Human
uccacugugaggcagaggcu

SEQ ID NO: 1177005 - RNA, 20 nt, Human
uccgcugugaggcagaggcu

SEQ ID NO: 1177006 - RNA, 23 nt, Human
ugagcugggcugggccgaaagag

SEQ ID NO: 1177007 - RNA, 25 nt, Human
ugaggaugccacagugagacaccau

SEQ ID NO: 1177008 - RNA, 20 nt, Human
ugaggcaagagcugggccug

SEQ ID NO: 1177009 - RNA, 19 nt, Human
ugaggcagaggcugaccug

SEQ ID NO: 1177010 - RNA, 18 nt, Human
ugaggcagaggcugggcc

SEQ ID NO: 1177011 - RNA, 18 nt, Human
ugaggcagaggcugggcc

SEQ ID NO: 1177012 - RNA, 18 nt, Human
ugaguugggccuaaaugg

SEQ ID NO: 1177013 - RNA, 19 nt, Human
uggaaaaagccccugagag

SEQ ID NO: 1177014 - RNA, 25 nt, Human
uggaaaaagccccugagaggcaaga

SEQ ID NO: 1177015 - RNA, 22 nt, Human
uggcaggcgggagcugggccug

SEQ ID NO: 1177016 - RNA, 24 nt, Human
uggccuggggcagcugccaugagg

SEQ ID NO: 1177017 - RNA, 21 nt, Human
ugggaggcaggaggagcuggg

SEQ ID NO: 1177018 - RNA, 21 nt, Human
ugggcaaaagccugauuugag

SEQ ID NO: 1177019 - RNA, 26 nt, Human
ugggcaaaagccugauuugaggaagu

SEQ ID NO: 1177020 - RNA, 18 nt, Human
ugugaggcagaggcuggg

SEQ ID NO: 1177021 - RNA, 23 nt, Human
aaacaccacaaaucuaccaucuu

SEQ ID NO: 1177022 - RNA, 21 nt, Human
aaagcaaccguuuuuuuuuuu

SEQ ID NO: 1177023 - RNA, 24 nt, Human
aaagugcugggauuacgaauguga

SEQ ID NO: 1177024 - RNA, 18 nt, Human
aaaguucugggauuacag

SEQ ID NO: 1177025 - RNA, 20 nt, Human
aaaguucugggauuacaggc

SEQ ID NO: 1177026 - RNA, 24 nt, Human
aaaguucugggauuacaggcguga

SEQ ID NO: 1177027 - RNA, 21 nt, Human
aacaccacaaaucuaccaucu

SEQ ID NO: 1177028 - RNA, 19 nt, Human
aacuguaacaugagguccc

SEQ ID NO: 1177029 - RNA, 19 nt, Human
aagaguuagagaucagccu

SEQ ID NO: 1177030 - RNA, 26 nt, Human
aagccacccccauuccuugacuuacc

SEQ ID NO: 1177031 - RNA, 21 nt, Human
aagcgauccuccuaccucagc

SEQ ID NO: 1177032 - RNA, 24 nt, Human
aagugauucucugccucagccucc

SEQ ID NO: 1177033 - RNA, 26 nt, Human
aagugcugggauuacgaaugugagcc

SEQ ID NO: 1177034 - RNA, 21 nt, Human
acagaaugugcuccuuugccu

SEQ ID NO: 1177035 - RNA, 24 nt, Human
acaggcgugagcaacuguaacaug

SEQ ID NO: 1177036 - RNA, 21 nt, Human
acagguacccaccaccacacc

SEQ ID NO: 1177037 - RNA, 24 nt, Human
accaucuuggcuaggcuggucuug

SEQ ID NO: 1177038 - RNA, 23 nt, Human
accauguuggucaggcuggucuc

SEQ ID NO: 1177039 - RNA, 26 nt, Human
accucgugauuccauauucaaggcca

SEQ ID NO: 1177040 - RNA, 21 nt, Human
acgggguuucaccauguuggu

SEQ ID NO: 1177041 - RNA, 23 nt, Human
acgggguuucaccauguugguca

SEQ ID NO: 1177042 - RNA, 24 nt, Human
acgggguuucaccauguuggucag

SEQ ID NO: 1177043 - RNA, 18 nt, Human
acucuccuaccuccuucu

SEQ ID NO: 1177044 - RNA, 22 nt, Human
agaggaaggauugcuugaggcc

SEQ ID NO: 1177045 - RNA, 20 nt, Human
agccaccacaccuggcccca

SEQ ID NO: 1177046 - RNA, 21 nt, Human
agccaccacaccuggccccaa

SEQ ID NO: 1177047 - RNA, 21 nt, Human
agcugccagagaaagcaacca

SEQ ID NO: 1177048 - RNA, 22 nt, Human
agcugccagagaaagcaaccac

SEQ ID NO: 1177049 - RNA, 23 nt, Human
agcuggacauggugaugcacgcc

SEQ ID NO: 1177050 - RNA, 20 nt, Human
aggaaggauugcuugaggcc

SEQ ID NO: 1177051 - RNA, 19 nt, Human
aggaggagggcuagcugcc

SEQ ID NO: 1177052 - RNA, 22 nt, Human
aggcuaaggugggaggaucgcu

SEQ ID NO: 1177053 - RNA, 22 nt, Human
aggucucauuauguugcccagg

SEQ ID NO: 1177054 - RNA, 22 nt, Human
aguagaaacgggguuucaccau

SEQ ID NO: 1177055 - RNA, 22 nt, Human
aguagagauggaguuucaccau

SEQ ID NO: 1177056 - RNA, 23 nt, Human
aguagcuggaauuacagggaugu

SEQ ID NO: 1177057 - RNA, 18 nt, Human
aguagcugggauuacagg

SEQ ID NO: 1177058 - RNA, 18 nt, Human
aguucugggauuacaggc

SEQ ID NO: 1177059 - RNA, 20 nt, Human
auggaguuucaccaucuugg

SEQ ID NO: 1177060 - RNA, 24 nt, Human
auggaguuucaccaucuuggcuag

SEQ ID NO: 1177061 - RNA, 24 nt, Human
auguuuguauuuuuaguagagaug

SEQ ID NO: 1177062 - RNA, 24 nt, Human
caaacugcuaggauuacaggagug

SEQ ID NO: 1177063 - RNA, 24 nt, Human
caaagugcugggauuacgaaugug

SEQ ID NO: 1177064 - RNA, 21 nt, Human
caacauuuugggaggccaaag

SEQ ID NO: 1177065 - RNA, 20 nt, Human
caaccuccaccucccggguu

SEQ ID NO: 1177066 - RNA, 23 nt, Human
caaccuccaccucccggguucaa

SEQ ID NO: 1177067 - RNA, 23 nt, Human
caacuaggucuauuaaggcuaaa

SEQ ID NO: 1177068 - RNA, 22 nt, Human
caagcaauucuccugccucagc

SEQ ID NO: 1177069 - RNA, 19 nt, Human
caagugauucucugccuca

SEQ ID NO: 1177070 - RNA, 21 nt, Human
caagugauucucugccucagc

SEQ ID NO: 1177071 - RNA, 21 nt, Human
caccaucuuggcuaggcuggu

SEQ ID NO: 1177072 - RNA, 24 nt, Human
caccaucuuggcuaggcuggucuu

SEQ ID NO: 1177073 - RNA, 21 nt, Human
caccauguuggucaggcuggu

SEQ ID NO: 1177074 - RNA, 24 nt, Human
caccauguuggucaggcuggucuc

SEQ ID NO: 1177075 - RNA, 18 nt, Human
cacgccuguaguuccagc

SEQ ID NO: 1177076 - RNA, 21 nt, Human
cacugcaaccuccaccucccg

SEQ ID NO: 1177077 - RNA, 23 nt, Human
cacugcaaccuccaccucccggg

SEQ ID NO: 1177078 - RNA, 23 nt, Human
cacugcaaugucugccuuuuggg

SEQ ID NO: 1177079 - RNA, 22 nt, Human
caguucugggggccagaagccc

SEQ ID NO: 1177080 - RNA, 22 nt, Human
caucuguaaucccaacauuuug

SEQ ID NO: 1177081 - RNA, 24 nt, Human
caucuguaaucccaacauuuuggg

SEQ ID NO: 1177082 - RNA, 24 nt, Human
cauuauguugcccaggcuggucuu

SEQ ID NO: 1177083 - RNA, 27 nt, Human
cauuauguugcccaggcuggucuuaaa

SEQ ID NO: 1177084 - RNA, 18 nt, Human
ccaaagugcugggauuac

SEQ ID NO: 1177085 - RNA, 23 nt, Human
ccaaagugcugggauuacgaaug

SEQ ID NO: 1177086 - RNA, 24 nt, Human
ccaaagugcugggauuacgaaugu

SEQ ID NO: 1177087 - RNA, 19 nt, Human
ccaacauuuugggaggcca

SEQ ID NO: 1177088 - RNA, 23 nt, Human
ccaacauuuugggaggccaaaga

SEQ ID NO: 1177089 - RNA, 18 nt, Human
ccaccacaccuggcccca

SEQ ID NO: 1177090 - RNA, 20 nt, Human
ccaccacaccuggcuaaugu

SEQ ID NO: 1177091 - RNA, 19 nt, Human
ccacccccauuccuugacu

SEQ ID NO: 1177092 - RNA, 27 nt, Human
ccaccucccggguucaagcaauucuuu

SEQ ID NO: 1177093 - RNA, 23 nt, Human
cccgaguagcuggaauuacaggg

SEQ ID NO: 1177094 - RNA, 23 nt, Human
cccgaguagcugggauuacaggu

SEQ ID NO: 1177095 - RNA, 24 nt, Human
cccgaguagcugggauuacaggua

SEQ ID NO: 1177096 - RNA, 23 nt, Human
cccggguucaagcaauucuccug

SEQ ID NO: 1177097 - RNA, 21 nt, Human
ccgaguagcugggauuacagg

SEQ ID NO: 1177098 - RNA, 25 nt, Human
ccucaccugcugaacuccaagaggc

SEQ ID NO: 1177099 - RNA, 24 nt, Human
ccucccggguucaagcaauucucc

SEQ ID NO: 1177100 - RNA, 23 nt, Human
ccuccuaccucagccuccuaaag

SEQ ID NO: 1177101 - RNA, 18 nt, Human
ccucgugauccacccucc

SEQ ID NO: 1177102 - RNA, 21 nt, Human
ccucgugauccacccuccucg

SEQ ID NO: 1177103 - RNA, 18 nt, Human
ccucucugaccucuucuu

SEQ ID NO: 1177104 - RNA, 23 nt, Human
ccugccucagccucccgaguagc

SEQ ID NO: 1177105 - RNA, 21 nt, Human
ccuuuuggguucaagugauuc

SEQ ID NO: 1177106 - RNA, 22 nt, Human
cgccuguaguuccagcuacugg

SEQ ID NO: 1177107 - RNA, 24 nt, Human
cuaaaguucugggauuacaggcgu

SEQ ID NO: 1177108 - RNA, 24 nt, Human
cucacugcaaccuccaccucccgg

SEQ ID NO: 1177109 - RNA, 19 nt, Human
cucacugcaaugucugccu

SEQ ID NO: 1177110 - RNA, 24 nt, Human
cucagccucccgaguagcugggau

SEQ ID NO: 1177111 - RNA, 25 nt, Human
cucagccuccuaaaguucugggauu

SEQ ID NO: 1177112 - RNA, 23 nt, Human
cuccugggcuuaagcgauccucc

SEQ ID NO: 1177113 - RNA, 24 nt, Human
cucugccucagccucccgaguagc

SEQ ID NO: 1177114 - RNA, 22 nt, Human
cucuuauagcccaggcuggagu

SEQ ID NO: 1177115 - RNA, 23 nt, Human
cugccucagccucccgaguagcu

SEQ ID NO: 1177116 - RNA, 23 nt, Human
cugccucagccucccgaguagcu

SEQ ID NO: 1177117 - RNA, 23 nt, Human
cugccuuuuggguucaagugauu

SEQ ID NO: 1177118 - RNA, 23 nt, Human
cugggggccagaagcccaacuag

SEQ ID NO: 1177119 - RNA, 24 nt, Human
cuuauagcccaggcuggagugcaa

SEQ ID NO: 1177120 - RNA, 22 nt, Human
cuucaaaucucccucucugacc

SEQ ID NO: 1177121 - RNA, 21 nt, Human
cuuccaaacugcuaggauuac

SEQ ID NO: 1177122 - RNA, 21 nt, Human
cuucuagaagccacccccauu

SEQ ID NO: 1177123 - RNA, 21 nt, Human
cuugaggccaagaguuagaga

SEQ ID NO: 1177124 - RNA, 19 nt, Human
cuuggucacccaggcugaa

SEQ ID NO: 1177125 - RNA, 25 nt, Human
cuuucagccucaccugcugaacucc

SEQ ID NO: 1177126 - RNA, 22 nt, Human
gaccucgugauccacccuccuc

SEQ ID NO: 1177127 - RNA, 22 nt, Human
gaccucgugauccacccuccuc

SEQ ID NO: 1177128 - RNA, 24 nt, Human
gaccucgugauccacccuccucgg

SEQ ID NO: 1177129 - RNA, 21 nt, Human
gaccucuucuuccauuaccac

SEQ ID NO: 1177130 - RNA, 25 nt, Human
gaguagcuggaauuacagggaugug

SEQ ID NO: 1177131 - RNA, 22 nt, Human
gaguagcugggauuacagguac

SEQ ID NO: 1177132 - RNA, 18 nt, Human
gauuacaggagugagcca

SEQ ID NO: 1177133 - RNA, 19 nt, Human
gauuacaggcgugagcaac

SEQ ID NO: 1177134 - RNA, 21 nt, Human
gauuacaggcgugagcaacug

SEQ ID NO: 1177135 - RNA, 18 nt, Human
gauuacgaaugugagcca

SEQ ID NO: 1177136 - RNA, 23 nt, Human
gauuacgaaugugagccacugca

SEQ ID NO: 1177137 - RNA, 22 nt, Human
gcaaccuccaccucccggguuc

SEQ ID NO: 1177138 - RNA, 19 nt, Human
gcccaggcuggagugcaau

SEQ ID NO: 1177139 - RNA, 23 nt, Human
gcccaggcuggagugcaauggca

SEQ ID NO: 1177140 - RNA, 19 nt, Human
gcgucagccuuccaaacug

SEQ ID NO: 1177141 - RNA, 23 nt, Human
gcuacaacaaaguacccuacauu

SEQ ID NO: 1177142 - RNA, 20 nt, Human
gcucacugcaaugucugccu

SEQ ID NO: 1177143 - RNA, 24 nt, Human
gcucuuauagcccaggcuggagug

SEQ ID NO: 1177144 - RNA, 26 nt, Human
gcuggaauuacagggaugugccaguc

SEQ ID NO: 1177145 - RNA, 19 nt, Human
gcuggagugcaauggcaca

SEQ ID NO: 1177146 - RNA, 21 nt, Human
gcugggauuacgaaugugagc

SEQ ID NO: 1177147 - RNA, 23 nt, Human
gcuggucucaaacuccugaccuc

SEQ ID NO: 1177148 - RNA, 19 nt, Human
gcuucaaacaccacaaauc

SEQ ID NO: 1177149 - RNA, 24 nt, Human
ggacauggugaugcacgccuguag

SEQ ID NO: 1177150 - RNA, 19 nt, Human
ggaguuucaccaucuuggc

SEQ ID NO: 1177151 - RNA, 23 nt, Human
ggaguuucaccaucuuggcuagg

SEQ ID NO: 1177152 - RNA, 22 nt, Human
ggaugcuguugagcuaacaggg

SEQ ID NO: 1177153 - RNA, 22 nt, Human
ggauuacaggagugagccacca

SEQ ID NO: 1177154 - RNA, 21 nt, Human
ggccaaagaggaaggauugcu

SEQ ID NO: 1177155 - RNA, 24 nt, Human
ggcuggucucaaacuccugaccuc

SEQ ID NO: 1177156 - RNA, 24 nt, Human
ggcuggucuugaacuucugaccuc

SEQ ID NO: 1177157 - RNA, 21 nt, Human
gggaaaauaggaagacccugc

SEQ ID NO: 1177158 - RNA, 22 nt, Human
gggcuuaagcgauccuccuacc

SEQ ID NO: 1177159 - RNA, 21 nt, Human
ggggaggcucuagacagaaug

SEQ ID NO: 1177160 - RNA, 23 nt, Human
gggguuucaccauguuggucagg

SEQ ID NO: 1177161 - RNA, 19 nt, Human
ggguucaagugauucucug

SEQ ID NO: 1177162 - RNA, 22 nt, Human
ggguuucaccauguuggucagg

SEQ ID NO: 1177163 - RNA, 20 nt, Human
ggucuugaacuucugaccuc

SEQ ID NO: 1177164 - RNA, 24 nt, Human
ggugaugcacgccuguaguuccag

SEQ ID NO: 1177165 - RNA, 18 nt, Human
gucacccaggcugaagug

SEQ ID NO: 1177166 - RNA, 21 nt, Human
gucuuggucacccaggcugaa

SEQ ID NO: 1177167 - RNA, 24 nt, Human
gugauccacccuccucggccuccc

SEQ ID NO: 1177168 - RNA, 23 nt, Human
gugauucucugccucagccuccc

SEQ ID NO: 1177169 - RNA, 23 nt, Human
guucaagugauucucugccucag

SEQ ID NO: 1177170 - RNA, 22 nt, Human
guugcuacaacaaaguacccua

SEQ ID NO: 1177171 - RNA, 20 nt, Human
uaagcgauccuccuaccuca

SEQ ID NO: 1177172 - RNA, 27 nt, Human
uaagcgauccuccuaccucagccuccu

SEQ ID NO: 1177173 - RNA, 24 nt, Human
uaauguuuguauuuuuaguagaga

SEQ ID NO: 1177174 - RNA, 22 nt, Human
uacaggagugagccaccacacc

SEQ ID NO: 1177175 - RNA, 23 nt, Human
uacaggagugagccaccacaccu

SEQ ID NO: 1177176 - RNA, 23 nt, Human
uacaggagugagccaccacaccu

SEQ ID NO: 1177177 - RNA, 22 nt, Human
uacagguacccaccaccacacc

SEQ ID NO: 1177178 - RNA, 24 nt, Human
uaccucagccuccuaaaguucugg

SEQ ID NO: 1177179 - RNA, 24 nt, Human
uacgaaugugagccacugcaccug

SEQ ID NO: 1177180 - RNA, 22 nt, Human
uagaaacgggguuucaccaugu

SEQ ID NO: 1177181 - RNA, 18 nt, Human
uagcccaggcuggagugc

SEQ ID NO: 1177182 - RNA, 19 nt, Human
uagcuggaauuacagggau

SEQ ID NO: 1177183 - RNA, 21 nt, Human
uagcuucuagaagccaccccc

SEQ ID NO: 1177184 - RNA, 22 nt, Human
uaggauuacaggagugagccac

SEQ ID NO: 1177185 - RNA, 24 nt, Human
uaggauuacaggagugagccacca

SEQ ID NO: 1177186 - RNA, 24 nt, Human
uaguagaaacgggguuucaccaug

SEQ ID NO: 1177187 - RNA, 25 nt, Human
uaguagaaacgggguuucaccaugu

SEQ ID NO: 1177188 - RNA, 19 nt, Human
uaguagagauggaguuuca

SEQ ID NO: 1177189 - RNA, 26 nt, Human
uaguagagauggaguuucaccaucuu

SEQ ID NO: 1177190 - RNA, 20 nt, Human
uauguugcccaggcuggucu

SEQ ID NO: 1177191 - RNA, 23 nt, Human
uauguugcccaggcuggucuuaa

SEQ ID NO: 1177192 - RNA, 24 nt, Human
uauguugcccaggcuggucuuaaa

SEQ ID NO: 1177193 - RNA, 23 nt, Human
ucacugcaaccuccaccucccgg

SEQ ID NO: 1177194 - RNA, 24 nt, Human
ucacugcaaccuccaccucccggg

SEQ ID NO: 1177195 - RNA, 25 nt, Human
ucacugcaaccuccaccucccgggu

SEQ ID NO: 1177196 - RNA, 26 nt, Human
ucacugcaaccuccaccucccggguu

SEQ ID NO: 1177197 - RNA, 24 nt, Human
ucacugcaaugucugccuuuuggg

SEQ ID NO: 1177198 - RNA, 27 nt, Human
ucacuuucucuaauucugacucuccua

SEQ ID NO: 1177199 - RNA, 20 nt, Human
ucagccucccgaguagcugg

SEQ ID NO: 1177200 - RNA, 22 nt, Human
ucagccucccgaguagcuggaa

SEQ ID NO: 1177201 - RNA, 21 nt, Human
uccacccuccucggccuccca

SEQ ID NO: 1177202 - RNA, 18 nt, Human
ucccaaagugcugggauu

SEQ ID NO: 1177203 - RNA, 20 nt, Human
ucccaaagugcugggauuac

SEQ ID NO: 1177204 - RNA, 23 nt, Human
ucccgaguagcugggauuacagg

SEQ ID NO: 1177205 - RNA, 24 nt, Human
ucccgaguagcugggauuacaggu

SEQ ID NO: 1177206 - RNA, 21 nt, Human
ucccggguucaagcaauucuc

SEQ ID NO: 1177207 - RNA, 24 nt, Human
ucccggguucaagcaauucuccug

SEQ ID NO: 1177208 - RNA, 25 nt, Human
ucccucucugaccucuucuuccauu

SEQ ID NO: 1177209 - RNA, 24 nt, Human
uccuaaaguucugggauuacaggc

SEQ ID NO: 1177210 - RNA, 20 nt, Human
uccuccuaccucagccuccc

SEQ ID NO: 1177211 - RNA, 21 nt, Human
uccucggccucccaaagugcu

SEQ ID NO: 1177212 - RNA, 21 nt, Human
uccugggcuuaagcgauccuc

SEQ ID NO: 1177213 - RNA, 21 nt, Human
ucuagaagccacccccauucc

SEQ ID NO: 1177214 - RNA, 24 nt, Human
ucucaaacuccugaccucaaguag

SEQ ID NO: 1177215 - RNA, 18 nt, Human
ucucauuauguugcccag

SEQ ID NO: 1177216 - RNA, 23 nt, Human
ucucauuauguugcccaggcugg

SEQ ID NO: 1177217 - RNA, 24 nt, Human
ucucauuauguugcccaggcuggu

SEQ ID NO: 1177218 - RNA, 22 nt, Human
ucuccuaccuccuucucuuaua

SEQ ID NO: 1177219 - RNA, 24 nt, Human
ucuccugccucagccucccgagua

SEQ ID NO: 1177220 - RNA, 22 nt, Human
ucucuaauucugacucuccuac

SEQ ID NO: 1177221 - RNA, 24 nt, Human
ucuggcucuuauagcccaggcugg

SEQ ID NO: 1177222 - RNA, 23 nt, Human
ucuuaaacuccugggcuuaagcg

SEQ ID NO: 1177223 - RNA, 20 nt, Human
ugaggcuuggaacuuucagc

SEQ ID NO: 1177224 - RNA, 24 nt, Human
ugaggucucauuauguugcccagg

SEQ ID NO: 1177225 - RNA, 18 nt, Human
ugaugcacgccuguaguu

SEQ ID NO: 1177226 - RNA, 20 nt, Human
ugaugcacgccuguaguucc

SEQ ID NO: 1177227 - RNA, 24 nt, Human
ugcccaggcuggucuuaaacuccu

SEQ ID NO: 1177228 - RNA, 28 nt, Human
ugcccaggcuggucuuaaacuccugggc

SEQ ID NO: 1177229 - RNA, 24 nt, Human
ugccucagccucccgaguagcugg

SEQ ID NO: 1177230 - RNA, 24 nt, Human
ugccucagccucccgaguagcugg

SEQ ID NO: 1177231 - RNA, 24 nt, Human
ugcugggauuacgaaugugagcca

SEQ ID NO: 1177232 - RNA, 21 nt, Human
uggaauuacagggaugugcca

SEQ ID NO: 1177233 - RNA, 22 nt, Human
uggaauuacagggaugugccac

SEQ ID NO: 1177234 - RNA, 23 nt, Human
uggagugcaauggcacaaucuca

SEQ ID NO: 1177235 - RNA, 24 nt, Human
uggagugcaauggcacaaucucag

SEQ ID NO: 1177236 - RNA, 24 nt, Human
uggaguuucaccaucuuggcuagg

SEQ ID NO: 1177237 - RNA, 24 nt, Human
uggcacaaucucagcucacugcaa

SEQ ID NO: 1177238 - RNA, 24 nt, Human
uggcuaggcuggucuugaacuucu

SEQ ID NO: 1177239 - RNA, 22 nt, Human
ugggaggccaaagaggaaggau

SEQ ID NO: 1177240 - RNA, 18 nt, Human
ugggauuacaggcgugag

SEQ ID NO: 1177241 - RNA, 19 nt, Human
ugggauuacaggcgugagc

SEQ ID NO: 1177242 - RNA, 19 nt, Human
ugggauuacaggcgugagc

SEQ ID NO: 1177243 - RNA, 20 nt, Human
ugggauuacaggcgugagca

SEQ ID NO: 1177244 - RNA, 22 nt, Human
ugggauuacaggcgugagcaac

SEQ ID NO: 1177245 - RNA, 23 nt, Human
ugggauuacaggcgugagcaacu

SEQ ID NO: 1177246 - RNA, 24 nt, Human
ugggauuacaggcgugagcaacug

SEQ ID NO: 1177247 - RNA, 27 nt, Human
ugggauuacaggcgugagcaacuguaa

SEQ ID NO: 1177248 - RNA, 19 nt, Human
ugggauuacagguacccac

SEQ ID NO: 1177249 - RNA, 21 nt, Human
ugggauuacagguacccacca

SEQ ID NO: 1177250 - RNA, 24 nt, Human
ugggauuacagguacccaccacca

SEQ ID NO: 1177251 - RNA, 22 nt, Human
ugggauuacgaaugugagccac

SEQ ID NO: 1177252 - RNA, 22 nt, Human
ugggauuacgaaugugagccac

SEQ ID NO: 1177253 - RNA, 24 nt, Human
ugggauuacgaaugugagccacug

SEQ ID NO: 1177254 - RNA, 25 nt, Human
ugggggaggcucuagacagaaugug

SEQ ID NO: 1177255 - RNA, 24 nt, Human
ugggggcucccaucuguaauccca

SEQ ID NO: 1177256 - RNA, 18 nt, Human
uggguucaagugauucuc

SEQ ID NO: 1177257 - RNA, 20 nt, Human
uggguucaagugauucucuu

SEQ ID NO: 1177258 - RNA, 24 nt, Human
uggucaggcuggucucaaacuccu

SEQ ID NO: 1177259 - RNA, 24 nt, Human
uggugaugcacgccuguaguucca

SEQ ID NO: 1177260 - RNA, 21 nt, Human
ugugauugguggguauggggg

SEQ ID NO: 1177261 - RNA, 21 nt, Human
uguuuguauuuuuaguagaga

SEQ ID NO: 1177262 - RNA, 18 nt, Human
uuaaggcuaaagucaagg

SEQ ID NO: 1177263 - RNA, 24 nt, Human
uuaguagaaacgggguuucaccau

SEQ ID NO: 1177264 - RNA, 18 nt, Human
uuaguagagauggaguuu

SEQ ID NO: 1177265 - RNA, 22 nt, Human
uuaguagagauggaguuucacc

SEQ ID NO: 1177266 - RNA, 24 nt, Human
uuaguagagauggaguuucaccau

SEQ ID NO: 1177267 - RNA, 21 nt, Human
uucaagcaauucuccugccuc

SEQ ID NO: 1177268 - RNA, 24 nt, Human
uucaagcaauucuccugccucagc

SEQ ID NO: 1177269 - RNA, 22 nt, Human
uucaggaggagggcuagcugcc

SEQ ID NO: 1177270 - RNA, 23 nt, Human
uuguauuuuuaguagagauggag

SEQ ID NO: 1177271 - RNA, 24 nt, Human
uuucaccaucuuggcuaggcuggu

SEQ ID NO: 1177272 - RNA, 24 nt, Human
uuucaccauguuggucaggcuggu

SEQ ID NO: 1177273 - RNA, 22 nt, Human
uuugccuuuucuagcuucuaga

SEQ ID NO: 1177274 - RNA, 18 nt, Human
uuuguauuuuuaguagag

SEQ ID NO: 1177275 - RNA, 18 nt, Human
uuuuguuguugcuacaac

SEQ ID NO: 1177276 - RNA, 24 nt, Human
uuuuuaguagaaacgggguuucac

SEQ ID NO: 1177277 - RNA, 24 nt, Human
uuuuuaguagagauggaguuucac

SEQ ID NO: 1177278 - RNA, 24 nt, Human
uuuuugaggcuuggaacuuucagc

SEQ ID NO: 1177279 - RNA, 21 nt, Human
uuuuuuuuuaaacggagucug

SEQ ID NO: 1177280 - RNA, 24 nt, Human
uuuuuuuuuuuaaacggagucugg

SEQ ID NO: 1177281 - RNA, 20 nt, Human
accuggaggccgguggggcu

SEQ ID NO: 1177282 - RNA, 20 nt, Human
ccgccagguaaucguugagc

SEQ ID NO: 1177283 - RNA, 20 nt, Human
cguugagcaccuggaggccg

SEQ ID NO: 1177284 - RNA, 22 nt, Human
uguauccgagagcuggggagca

SEQ ID NO: 1177285 - RNA, 21 nt, Human
aggaggggaaggggagggggu

SEQ ID NO: 1177286 - RNA, 21 nt, Human
aggcagaggcuugcaugccuc

SEQ ID NO: 1177287 - RNA, 22 nt, Human
aggcaggaggggaaggggaggg

SEQ ID NO: 1177288 - RNA, 27 nt, Human
aggcaggaggggaaggggagggggugu

SEQ ID NO: 1177289 - RNA, 21 nt, Human
cagcucccuguggagaccccu

SEQ ID NO: 1177290 - RNA, 18 nt, Human
cagcuuagcuuuucccuu

SEQ ID NO: 1177291 - RNA, 20 nt, Human
cauuuucccuaugcugcugg

SEQ ID NO: 1177292 - RNA, 22 nt, Human
cauuuucccuaugcugcuggcg

SEQ ID NO: 1177293 - RNA, 20 nt, Human
cccagcuuagcuuuucccuu

SEQ ID NO: 1177294 - RNA, 22 nt, Human
ccuaugcugcuggcgcauuggg

SEQ ID NO: 1177295 - RNA, 22 nt, Human
cuauuauauccagcauaggauc

SEQ ID NO: 1177296 - RNA, 19 nt, Human
gaaauccuuucaaacgcac

SEQ ID NO: 1177297 - RNA, 23 nt, Human
gaaauccuuucaaacgcacgccu

SEQ ID NO: 1177298 - RNA, 18 nt, Human
gagcagaaggaaaggcag

SEQ ID NO: 1177299 - RNA, 21 nt, Human
gcaaagcaggcaggaggggaa

SEQ ID NO: 1177300 - RNA, 23 nt, Human
ggauugcagaucuuuuggccgcu

SEQ ID NO: 1177301 - RNA, 22 nt, Human
ggcugagaaauccuuucaaacg

SEQ ID NO: 1177302 - RNA, 18 nt, Human
ggcuugcgucugcggcug

SEQ ID NO: 1177303 - RNA, 20 nt, Human
gggcaaagcaggcaggaggg

SEQ ID NO: 1177304 - RNA, 18 nt, Human
gucacauuuuccucagca

SEQ ID NO: 1177305 - RNA, 21 nt, Human
uccgcagcaauuugcucugga

SEQ ID NO: 1177306 - RNA, 23 nt, Human
uccgcagcaauuugcucuggagc

SEQ ID NO: 1177307 - RNA, 19 nt, Human
uccucagcauuuucccuau

SEQ ID NO: 1177308 - RNA, 20 nt, Human
ugaaaggggcaaagcaggca

SEQ ID NO: 1177309 - RNA, 22 nt, Human
ugacccggcaggaccucaguaa

SEQ ID NO: 1177310 - RNA, 23 nt, Human
ugcagaucuuuuggccgcugcau

SEQ ID NO: 1177311 - RNA, 21 nt, Human
ugccgucacauuuuccucagc

SEQ ID NO: 1177312 - RNA, 20 nt, Human
uggcagaaugaacugggucu

SEQ ID NO: 1177313 - RNA, 21 nt, Human
uggguagcucuacucaaccca

SEQ ID NO: 1177314 - RNA, 24 nt, Human
uguggcugcuuuaagagugggcac

SEQ ID NO: 1177315 - RNA, 21 nt, Human
uuccgcagcaauuugcucugg

SEQ ID NO: 1177316 - RNA, 25 nt, Human
uuucaaacgcacgccuucccuauua

SEQ ID NO: 1177317 - RNA, 24 nt, Human
aaagugcugggauuacaggcauga

SEQ ID NO: 1177318 - RNA, 24 nt, Human
aaagugcugggauuacaggcauga

SEQ ID NO: 1177319 - RNA, 22 nt, Human
aaccaggcaaucucuucaguuu

SEQ ID NO: 1177320 - RNA, 20 nt, Human
aaccugcccucuccuccucu

SEQ ID NO: 1177321 - RNA, 21 nt, Human
aaccugcccucuccuccucug

SEQ ID NO: 1177322 - RNA, 21 nt, Human
aagacaccaggaugaggagug

SEQ ID NO: 1177323 - RNA, 21 nt, Human
aagacaggaugaagccagaag

SEQ ID NO: 1177324 - RNA, 20 nt, Human
aagcagauaaccugguuuug

SEQ ID NO: 1177325 - RNA, 21 nt, Human
aagcagauaaccugguuuugg

SEQ ID NO: 1177326 - RNA, 18 nt, Human
aagccagaaggagagcug

SEQ ID NO: 1177327 - RNA, 22 nt, Human
aaggagagcuggagaaggaccu

SEQ ID NO: 1177328 - RNA, 19 nt, Human
aaguagcugggauuacagg

SEQ ID NO: 1177329 - RNA, 19 nt, Human
aagugcugggauuacaggc

SEQ ID NO: 1177330 - RNA, 19 nt, Human
aagugcugggauuacaggc

SEQ ID NO: 1177331 - RNA, 21 nt, Human
aagugcugggauuacaggcau

SEQ ID NO: 1177332 - RNA, 21 nt, Human
aagugcugggauuacaggcau

SEQ ID NO: 1177333 - RNA, 26 nt, Human
aagugcugggauuacaggcaugagcc

SEQ ID NO: 1177334 - RNA, 26 nt, Human
aagugcugggauuacaggcaugagcc

SEQ ID NO: 1177335 - RNA, 19 nt, Human
acagggucucauuauguug

SEQ ID NO: 1177336 - RNA, 18 nt, Human
acaggguuucaccauguu

SEQ ID NO: 1177337 - RNA, 23 nt, Human
acaggguuucaccauguuggcca

SEQ ID NO: 1177338 - RNA, 24 nt, Human
acaggguuucaccauguuggccag

SEQ ID NO: 1177339 - RNA, 23 nt, Human
accagcuccaggucacccaagga

SEQ ID NO: 1177340 - RNA, 18 nt, Human
accauguuggccaggcug

SEQ ID NO: 1177341 - RNA, 22 nt, Human
accauuuugugcaccgagccug

SEQ ID NO: 1177342 - RNA, 24 nt, Human
acucccaccugcaggagcuggaaa

SEQ ID NO: 1177343 - RNA, 26 nt, Human
agaaggcacaaaaugcuucauaagga

SEQ ID NO: 1177344 - RNA, 21 nt, Human
agacaggaugaagccagaagg

SEQ ID NO: 1177345 - RNA, 19 nt, Human
agagccguggaagacagga

SEQ ID NO: 1177346 - RNA, 22 nt, Human
agauucuccugccucggccucc

SEQ ID NO: 1177347 - RNA, 18 nt, Human
aggaaggauaaacuaugg

SEQ ID NO: 1177348 - RNA, 20 nt, Human
aggcaugagccaccauaccu

SEQ ID NO: 1177349 - RNA, 25 nt, Human
aggcuggagugcaguggcaugaucu

SEQ ID NO: 1177350 - RNA, 22 nt, Human
agggacagaagcagauaaccug

SEQ ID NO: 1177351 - RNA, 23 nt, Human
aggggcccuugggagugacaugc

SEQ ID NO: 1177352 - RNA, 22 nt, Human
aguagagacaggguuucaccau

SEQ ID NO: 1177353 - RNA, 23 nt, Human
aguagcugggauuacaggugugc

SEQ ID NO: 1177354 - RNA, 18 nt, Human
agugaugagccggggagg

SEQ ID NO: 1177355 - RNA, 20 nt, Human
agugcaguggcaugaucuug

SEQ ID NO: 1177356 - RNA, 23 nt, Human
agugcaguggcaugaucuuggcu

SEQ ID NO: 1177357 - RNA, 24 nt, Human
agugcaguggcaugaucuuggcuc

SEQ ID NO: 1177358 - RNA, 18 nt, Human
agugcugggauuacaggc

SEQ ID NO: 1177359 - RNA, 24 nt, Human
aguggcaugaucuuggcucacugc

SEQ ID NO: 1177360 - RNA, 28 nt, Human
auccucacauucuuuuuuuuuuuuuuuu

SEQ ID NO: 1177361 - RNA, 18 nt, Human
aucuggagaaaaauggag

SEQ ID NO: 1177362 - RNA, 19 nt, Human
augaagccagaaggagagc

SEQ ID NO: 1177363 - RNA, 24 nt, Human
auuuuuguauuuuuaguagagaca

SEQ ID NO: 1177364 - RNA, 23 nt, Human
caaagugcugggauuacaggcau

SEQ ID NO: 1177365 - RNA, 24 nt, Human
caaagugcugggauuacaggcaug

SEQ ID NO: 1177366 - RNA, 24 nt, Human
caaagugcugggauuacaggcaug

SEQ ID NO: 1177367 - RNA, 19 nt, Human
caagacagugaggacagaa

SEQ ID NO: 1177368 - RNA, 22 nt, Human
caagagauucuccugccucggc

SEQ ID NO: 1177369 - RNA, 20 nt, Human
caagccagggacagaagcag

SEQ ID NO: 1177370 - RNA, 24 nt, Human
caaggucuugccaucuugcccagg

SEQ ID NO: 1177371 - RNA, 24 nt, Human
caccacaccuggcuaauuuuugua

SEQ ID NO: 1177372 - RNA, 22 nt, Human
caccagcuccaggucacccaag

SEQ ID NO: 1177373 - RNA, 21 nt, Human
caccauguuggccaggcugau

SEQ ID NO: 1177374 - RNA, 22 nt, Human
caccauguuggccaggcugauc

SEQ ID NO: 1177375 - RNA, 27 nt, Human
caccauguuggccaggcugaucuggaa

SEQ ID NO: 1177376 - RNA, 24 nt, Human
caccucugccucccaaagugcugg

SEQ ID NO: 1177377 - RNA, 24 nt, Human
cagagucuugcucugccgcccagg

SEQ ID NO: 1177378 - RNA, 24 nt, Human
cagcagagaagcugaagacaccag

SEQ ID NO: 1177379 - RNA, 18 nt, Human
caggacucaagccaggga

SEQ ID NO: 1177380 - RNA, 19 nt, Human
caggagcuggaaagcaacu

SEQ ID NO: 1177381 - RNA, 24 nt, Human
cagggucucauuauguugcucagg

SEQ ID NO: 1177382 - RNA, 24 nt, Human
caggguuucaccauguuggccagg

SEQ ID NO: 1177383 - RNA, 24 nt, Human
caucuugcccaggcuggucucgaa

SEQ ID NO: 1177384 - RNA, 24 nt, Human
cauguuggccaggcugaucuggaa

SEQ ID NO: 1177385 - RNA, 20 nt, Human
cauucacaacaacugcacau

SEQ ID NO: 1177386 - RNA, 23 nt, Human
cauuugccucuucaagagauugu

SEQ ID NO: 1177387 - RNA, 23 nt, Human
ccaaagugcugggauuacaggca

SEQ ID NO: 1177388 - RNA, 24 nt, Human
ccaaagugcugggauuacaggcau

SEQ ID NO: 1177389 - RNA, 21 nt, Human
ccaaguagcugggauuacagg

SEQ ID NO: 1177390 - RNA, 24 nt, Human
ccaaguagcugggauuacaggugu

SEQ ID NO: 1177391 - RNA, 22 nt, Human
ccaucuugcccaggcuggucuc

SEQ ID NO: 1177392 - RNA, 23 nt, Human
ccaucuugcccaggcuggucucg

SEQ ID NO: 1177393 - RNA, 24 nt, Human
cccaaagugcugggauuacaggca

SEQ ID NO: 1177394 - RNA, 22 nt, Human
cccaaguagcugggauuacagg

SEQ ID NO: 1177395 - RNA, 23 nt, Human
cccaaguagcugggauuacaggu

SEQ ID NO: 1177396 - RNA, 24 nt, Human
cccaaguagcugggauuacaggug

SEQ ID NO: 1177397 - RNA, 24 nt, Human
cccaggacucaagccagggacaga

SEQ ID NO: 1177398 - RNA, 24 nt, Human
ccgcccaggcuggagugcaguggc

SEQ ID NO: 1177399 - RNA, 19 nt, Human
ccgcucuuucuucuuuccc

SEQ ID NO: 1177400 - RNA, 24 nt, Human
ccuccgagguucaagagauucucc

SEQ ID NO: 1177401 - RNA, 19 nt, Human
ccuccugucucagucucuc

SEQ ID NO: 1177402 - RNA, 19 nt, Human
ccugcccucuccuccucuc

SEQ ID NO: 1177403 - RNA, 23 nt, Human
ccugccucggccucccaaguagc

SEQ ID NO: 1177404 - RNA, 24 nt, Human
ccugccucggccucccaaguagcu

SEQ ID NO: 1177405 - RNA, 18 nt, Human
ccugggcacagcccaggg

SEQ ID NO: 1177406 - RNA, 20 nt, Human
ccugggcuaaagugauccuc

SEQ ID NO: 1177407 - RNA, 23 nt, Human
ccuugagugaucugcccaccucu

SEQ ID NO: 1177408 - RNA, 19 nt, Human
cgagguucaagagauucuc

SEQ ID NO: 1177409 - RNA, 24 nt, Human
cguccacucuccaugcuaagugac

SEQ ID NO: 1177410 - RNA, 23 nt, Human
cuaauuuuuguauuuuuaguaga

SEQ ID NO: 1177411 - RNA, 22 nt, Human
cucagucucucaaagugcuggg

SEQ ID NO: 1177412 - RNA, 22 nt, Human
cuccugaccuugagugaucugc

SEQ ID NO: 1177413 - RNA, 24 nt, Human
cucggccucccaaguagcugggau

SEQ ID NO: 1177414 - RNA, 19 nt, Human
cucuuucuucuuucccuug

SEQ ID NO: 1177415 - RNA, 24 nt, Human
cugcaaccuccgccuccgagguuc

SEQ ID NO: 1177416 - RNA, 18 nt, Human
cugcugcaggugagucga

SEQ ID NO: 1177417 - RNA, 22 nt, Human
cuggagguggaguugggaagca

SEQ ID NO: 1177418 - RNA, 24 nt, Human
cuggagugcaguggcaugaucuug

SEQ ID NO: 1177419 - RNA, 18 nt, Human
gaagcuuaaaggugaaaa

SEQ ID NO: 1177420 - RNA, 19 nt, Human
gaccugaggugggggugaa

SEQ ID NO: 1177421 - RNA, 24 nt, Human
gaccuugagugaucugcccaccuc

SEQ ID NO: 1177422 - RNA, 19 nt, Human
gagcaguuuugagucauuu

SEQ ID NO: 1177423 - RNA, 23 nt, Human
gagcaguuuugagucauuugccu

SEQ ID NO: 1177424 - RNA, 18 nt, Human
gagccaccaugcccaccu

SEQ ID NO: 1177425 - RNA, 19 nt, Human
gaggcugugcugagugccc

SEQ ID NO: 1177426 - RNA, 24 nt, Human
gagucauuuuguccuuucuuucuu

SEQ ID NO: 1177427 - RNA, 18 nt, Human
gauuacaggcaugagcca

SEQ ID NO: 1177428 - RNA, 18 nt, Human
gauuacaggcaugagcca

SEQ ID NO: 1177429 - RNA, 21 nt, Human
gauuacaggcaugagccacca

SEQ ID NO: 1177430 - RNA, 21 nt, Human
gauuacaggcaugagccacca

SEQ ID NO: 1177431 - RNA, 24 nt, Human
gauuacaggcaugagccaccauac

SEQ ID NO: 1177432 - RNA, 24 nt, Human
gauuacaggcaugagccaccaugc

SEQ ID NO: 1177433 - RNA, 22 nt, Human
gcacagcccaggggcccuuggg

SEQ ID NO: 1177434 - RNA, 19 nt, Human
gcacuugcuucugaaaaug

SEQ ID NO: 1177435 - RNA, 21 nt, Human
gcagagaagcugaagacacca

SEQ ID NO: 1177436 - RNA, 19 nt, Human
gcaggugagccgguccugc

SEQ ID NO: 1177437 - RNA, 24 nt, Human
gcagugaaggcuaaaacuugggca

SEQ ID NO: 1177438 - RNA, 21 nt, Human
gcaugagccaccaugcccacc

SEQ ID NO: 1177439 - RNA, 23 nt, Human
gcccaggcuggagugcaguggca

SEQ ID NO: 1177440 - RNA, 24 nt, Human
gcccaggcuggagugcaguggcau

SEQ ID NO: 1177441 - RNA, 21 nt, Human
gccucggccucccaaguagcu

SEQ ID NO: 1177442 - RNA, 19 nt, Human
gccuuacuccccuucccca

SEQ ID NO: 1177443 - RNA, 24 nt, Human
gcuccaggcagaucaagcauucga

SEQ ID NO: 1177444 - RNA, 25 nt, Human
gcucugccgcccaggcuggagugca

SEQ ID NO: 1177445 - RNA, 22 nt, Human
gcugaucuggaacuccugaccu

SEQ ID NO: 1177446 - RNA, 19 nt, Human
gcuggagugcaguggcaug

SEQ ID NO: 1177447 - RNA, 18 nt, Human
gcugggggacagauggac

SEQ ID NO: 1177448 - RNA, 19 nt, Human
ggaccugagguggggguga

SEQ ID NO: 1177449 - RNA, 22 nt, Human
ggaugaagccagaaggagagcu

SEQ ID NO: 1177450 - RNA, 19 nt, Human
ggauuacaggcaugagcca

SEQ ID NO: 1177451 - RNA, 24 nt, Human
ggauuacaggcaugagccaccaug

SEQ ID NO: 1177452 - RNA, 23 nt, Human
ggcagcagagaagcugaagacac

SEQ ID NO: 1177453 - RNA, 19 nt, Human
gggcaccggcagggagaau

SEQ ID NO: 1177454 - RNA, 19 nt, Human
gggcuaaagugauccuccu

SEQ ID NO: 1177455 - RNA, 22 nt, Human
ggguuucaccauguuggccagg

SEQ ID NO: 1177456 - RNA, 22 nt, Human
guaaaaguaacugaagcuuaaa

SEQ ID NO: 1177457 - RNA, 18 nt, Human
guagcugggauuacaggu

SEQ ID NO: 1177458 - RNA, 24 nt, Human
gucuugccaucuugcccaggcugg

SEQ ID NO: 1177459 - RNA, 24 nt, Human
gucuugcucugccgcccaggcugg

SEQ ID NO: 1177460 - RNA, 18 nt, Human
gugaagauggugggagug

SEQ ID NO: 1177461 - RNA, 24 nt, Human
gugaucugcccaccucugccuccc

SEQ ID NO: 1177462 - RNA, 22 nt, Human
uaaagugauccuccugucucag

SEQ ID NO: 1177463 - RNA, 21 nt, Human
uaagcccaggacucaagccag

SEQ ID NO: 1177464 - RNA, 24 nt, Human
uaagcccaggacucaagccaggga

SEQ ID NO: 1177465 - RNA, 24 nt, Human
uaauuuuuguauuuuuaguagaga

SEQ ID NO: 1177466 - RNA, 22 nt, Human
uacaggcaugagccaccauacc

SEQ ID NO: 1177467 - RNA, 24 nt, Human
uacaggcaugagccaccaugccca

SEQ ID NO: 1177468 - RNA, 22 nt, Human
uacaggugugcaccaccacacc

SEQ ID NO: 1177469 - RNA, 20 nt, Human
uaccugggcacagcccaggg

SEQ ID NO: 1177470 - RNA, 22 nt, Human
uaccugggcacagcccaggggc

SEQ ID NO: 1177471 - RNA, 22 nt, Human
uagagacagggucucauuaugu

SEQ ID NO: 1177472 - RNA, 22 nt, Human
uagagacaggguuucaccaugu

SEQ ID NO: 1177473 - RNA, 24 nt, Human
uaguagagacaggguuucaccaug

SEQ ID NO: 1177474 - RNA, 26 nt, Human
uaguagagacaggguuucaccauguu

SEQ ID NO: 1177475 - RNA, 24 nt, Human
uauguugcucaggcucagacucuu

SEQ ID NO: 1177476 - RNA, 26 nt, Human
uauguugcucaggcucagacucuuuu

SEQ ID NO: 1177477 - RNA, 23 nt, Human
ucaaagugcugggauuacaggca

SEQ ID NO: 1177478 - RNA, 24 nt, Human
ucaaagugcugggauuacaggcau

SEQ ID NO: 1177479 - RNA, 18 nt, Human
ucaagacagugaggacag

SEQ ID NO: 1177480 - RNA, 23 nt, Human
ucacccaugcacucauuggacaa

SEQ ID NO: 1177481 - RNA, 20 nt, Human
ucacugcaaccuccgccucc

SEQ ID NO: 1177482 - RNA, 21 nt, Human
ucacugcaaccuccgccuccg

SEQ ID NO: 1177483 - RNA, 24 nt, Human
ucacugcaaccuccgccuccgagg

SEQ ID NO: 1177484 - RNA, 25 nt, Human
ucacugcaaccuccgccuccgaggu

SEQ ID NO: 1177485 - RNA, 26 nt, Human
ucacugcaaccuccgccuccgagguu

SEQ ID NO: 1177486 - RNA, 23 nt, Human
ucagaaauuaucugcuguuuugg

SEQ ID NO: 1177487 - RNA, 21 nt, Human
ucagaggucuuucauuuuucc

SEQ ID NO: 1177488 - RNA, 22 nt, Human
ucagaggucuuucauuuuuccu

SEQ ID NO: 1177489 - RNA, 18 nt, Human
ucauucauuaauucaccc

SEQ ID NO: 1177490 - RNA, 22 nt, Human
uccaugcuaagugacagugacu

SEQ ID NO: 1177491 - RNA, 24 nt, Human
ucccaaagugcugggauuacaggc

SEQ ID NO: 1177492 - RNA, 23 nt, Human
ucccaaguagcugggauuacagg

SEQ ID NO: 1177493 - RNA, 21 nt, Human
uccgagguucaagagauucuc

SEQ ID NO: 1177494 - RNA, 24 nt, Human
uccgagguucaagagauucuccug

SEQ ID NO: 1177495 - RNA, 24 nt, Human
uccuugauucuggagguggaguug

SEQ ID NO: 1177496 - RNA, 24 nt, Human
ucucaaagugcugggauuacaggc

SEQ ID NO: 1177497 - RNA, 27 nt, Human
ucucccgcucuuucuucuugggccgcc

SEQ ID NO: 1177498 - RNA, 22 nt, Human
ucucgaauuccugggcuaaagu

SEQ ID NO: 1177499 - RNA, 24 nt, Human
ucucgaauuccugggcuaaaguga

SEQ ID NO: 1177500 - RNA, 23 nt, Human
ucugcuguuuuggaagacuacaa

SEQ ID NO: 1177501 - RNA, 23 nt, Human
ucuugccaucuugcccaggcugg

SEQ ID NO: 1177502 - RNA, 22 nt, Human
ucuugcucugccgcccaggcug

SEQ ID NO: 1177503 - RNA, 24 nt, Human
ucuugcucugccgcccaggcugga

SEQ ID NO: 1177504 - RNA, 19 nt, Human
ugaaaugacaguuaagccc

SEQ ID NO: 1177505 - RNA, 19 nt, Human
ugaagacaccaggaugagg

SEQ ID NO: 1177506 - RNA, 21 nt, Human
ugaagccagaaggagagcugg

SEQ ID NO: 1177507 - RNA, 18 nt, Human
ugacagcgccuacccugg

SEQ ID NO: 1177508 - RNA, 20 nt, Human
ugacaguuaagcccaggacu

SEQ ID NO: 1177509 - RNA, 20 nt, Human
ugaggaaggauaaacuaugg

SEQ ID NO: 1177510 - RNA, 23 nt, Human
ugaggugggggugaagauggugg

SEQ ID NO: 1177511 - RNA, 21 nt, Human
ugagugcccggugcaggugag

SEQ ID NO: 1177512 - RNA, 24 nt, Human
ugaucugcccaccucugccuccca

SEQ ID NO: 1177513 - RNA, 22 nt, Human
ugauucuggagguggaguuggg

SEQ ID NO: 1177514 - RNA, 24 nt, Human
ugauucuggagguggaguugggaa

SEQ ID NO: 1177515 - RNA, 22 nt, Human
ugcaguggcaugaucuuggcuc

SEQ ID NO: 1177516 - RNA, 24 nt, Human
ugccaucuugcccaggcuggucuc

SEQ ID NO: 1177517 - RNA, 24 nt, Human
ugcccaggcuggucucgaauuccu

SEQ ID NO: 1177518 - RNA, 18 nt, Human
ugccccaggggugugagg

SEQ ID NO: 1177519 - RNA, 21 nt, Human
ugccgcccaggcuggagugca

SEQ ID NO: 1177520 - RNA, 20 nt, Human
ugccuagaagaaagguuaaa

SEQ ID NO: 1177521 - RNA, 21 nt, Human
ugccucggccucccaaguagc

SEQ ID NO: 1177522 - RNA, 24 nt, Human
ugccucggccucccaaguagcugg

SEQ ID NO: 1177523 - RNA, 24 nt, Human
ugcucugccgcccaggcuggagug

SEQ ID NO: 1177524 - RNA, 22 nt, Human
uggaagacuacaagaugaacca

SEQ ID NO: 1177525 - RNA, 19 nt, Human
uggagugcaguggcaugau

SEQ ID NO: 1177526 - RNA, 24 nt, Human
uggagugcaguggcaugaucuugg

SEQ ID NO: 1177527 - RNA, 23 nt, Human
uggcagcugcccauggggaguga

SEQ ID NO: 1177528 - RNA, 19 nt, Human
uggcaugaucuuggcucac

SEQ ID NO: 1177529 - RNA, 21 nt, Human
uggcaugaucuuggcucacug

SEQ ID NO: 1177530 - RNA, 24 nt, Human
uggccaggcugaucuggaacuccu

SEQ ID NO: 1177531 - RNA, 23 nt, Human
uggcguguucuaggggaaggcag

SEQ ID NO: 1177532 - RNA, 18 nt, Human
ugggauuacaggcaugag

SEQ ID NO: 1177533 - RNA, 18 nt, Human
ugggauuacaggcaugag

SEQ ID NO: 1177534 - RNA, 22 nt, Human
ugggauuacaggcaugagccac

SEQ ID NO: 1177535 - RNA, 22 nt, Human
ugggauuacaggcaugagccac

SEQ ID NO: 1177536 - RNA, 23 nt, Human
ugggauuacaggcaugagccacc

SEQ ID NO: 1177537 - RNA, 23 nt, Human
ugggauuacaggcaugagccacc

SEQ ID NO: 1177538 - RNA, 24 nt, Human
ugggauuacaggcaugagccacca

SEQ ID NO: 1177539 - RNA, 24 nt, Human
ugggauuacaggcaugagccacca

SEQ ID NO: 1177540 - RNA, 25 nt, Human
ugggauuacaggcaugagccaccau

SEQ ID NO: 1177541 - RNA, 25 nt, Human
ugggauuacaggcaugagccaccau

SEQ ID NO: 1177542 - RNA, 21 nt, Human
ugggauuacaggugugcacca

SEQ ID NO: 1177543 - RNA, 22 nt, Human
ugggauuacaggugugcaccac

SEQ ID NO: 1177544 - RNA, 24 nt, Human
ugggauuacaggugugcaccacca

SEQ ID NO: 1177545 - RNA, 24 nt, Human
ugggcuaaagugauccuccugucu

SEQ ID NO: 1177546 - RNA, 18 nt, Human
uggggagugaugagccga

SEQ ID NO: 1177547 - RNA, 19 nt, Human
ugugccgagugccugcugc

SEQ ID NO: 1177548 - RNA, 21 nt, Human
uuagccuuacuccccuucccc

SEQ ID NO: 1177549 - RNA, 24 nt, Human
uuaguagagacaggguuucaccau

SEQ ID NO: 1177550 - RNA, 24 nt, Human
uugcucugccgcccaggcuggagu

SEQ ID NO: 1177551 - RNA, 21 nt, Human
uugucagggaacuuuacuuag

SEQ ID NO: 1177552 - RNA, 21 nt, Human
uuucaccauguuggccaggcu

SEQ ID NO: 1177553 - RNA, 24 nt, Human
uuuuuaguagagacaggguuucac

SEQ ID NO: 1177554 - RNA, 22 nt, Human
uuuuuccuuuuuguauuuugac

SEQ ID NO: 1177555 - RNA, 20 nt, Human
uuuuuguauuuuuaguagag

SEQ ID NO: 1177556 - RNA, 24 nt, Human
uuuuuuuuuucugauacagagucu

SEQ ID NO: 1177557 - RNA, 18 nt, Human
uuuuuuuuuuuuuuucug

SEQ ID NO: 1177558 - RNA, 21 nt, Human
aaacgucugcuccucugccgg

SEQ ID NO: 1177559 - RNA, 19 nt, Human
aaaugaaggcagaagaccc

SEQ ID NO: 1177560 - RNA, 23 nt, Human
aggaggggacgcgcagagcugcc

SEQ ID NO: 1177561 - RNA, 22 nt, Human
caaaaugaaggcagaagacccg

SEQ ID NO: 1177562 - RNA, 20 nt, Human
caagguuccucucucuccgc

SEQ ID NO: 1177563 - RNA, 24 nt, Human
ccccagggacacgagccggaccaa

SEQ ID NO: 1177564 - RNA, 22 nt, Human
ccucggaccggcaagguuccuc

SEQ ID NO: 1177565 - RNA, 26 nt, Human
cgcgcugggccgaggaugccgugcac

SEQ ID NO: 1177566 - RNA, 22 nt, Human
cgcgugugcuugcgugugugcg

SEQ ID NO: 1177567 - RNA, 18 nt, Human
cgcucccguccggugucc

SEQ ID NO: 1177568 - RNA, 22 nt, Human
cgcugggccgaggaugcuaagc

SEQ ID NO: 1177569 - RNA, 22 nt, Human
gaaaaucccuuagccgcaagcc

SEQ ID NO: 1177570 - RNA, 19 nt, Human
gcggugcgggccgcgcugg

SEQ ID NO: 1177571 - RNA, 21 nt, Human
ggcggugcgggccgcgcuggg

SEQ ID NO: 1177572 - RNA, 23 nt, Human
gugugcgcgcgcgugucuguagu

SEQ ID NO: 1177573 - RNA, 27 nt, Human
gugugcuugcgugugugcgcgcgcgug

SEQ ID NO: 1177574 - RNA, 21 nt, Human
gugugugcgcgcgcgugucug

SEQ ID NO: 1177575 - RNA, 20 nt, Human
uccaaaaugaaggcagaaga

SEQ ID NO: 1177576 - RNA, 22 nt, Human
uccaaaaugaaggcagaagacc

SEQ ID NO: 1177577 - RNA, 20 nt, Human
uccccagggacacgagccgg

SEQ ID NO: 1177578 - RNA, 23 nt, Human
uccccagggacacgagccggacc

SEQ ID NO: 1177579 - RNA, 21 nt, Human
ugccgcuacggcuccagacac

SEQ ID NO: 1177580 - RNA, 18 nt, Human
ugugcgcgcgcgugucug

SEQ ID NO: 1177581 - RNA, 18 nt, Human
ucccugaagggcaggugc

SEQ ID NO: 1177582 - RNA, 21 nt, Human
aaaaaucaaaaccagaagacc

SEQ ID NO: 1177583 - RNA, 25 nt, Human
aaaagaucaaagauacuaacaaagg

SEQ ID NO: 1177584 - RNA, 21 nt, Human
aaaaucccaaauaaauggccc

SEQ ID NO: 1177585 - RNA, 18 nt, Human
aaacaaaaaccaaacaac

SEQ ID NO: 1177586 - RNA, 25 nt, Human
aaacaaaaaccaaacaacuccaaaa

SEQ ID NO: 1177587 - RNA, 21 nt, Human
aaacagaagugggauggggcu

SEQ ID NO: 1177588 - RNA, 21 nt, Human
aaacuuggauacucccucuaa

SEQ ID NO: 1177589 - RNA, 21 nt, Human
aaagaaauugcuggaagaaga

SEQ ID NO: 1177590 - RNA, 23 nt, Human
aaaguguuccuuaguccuguuug

SEQ ID NO: 1177591 - RNA, 25 nt, Human
aaauaaagaaauugcuggaagaaga

SEQ ID NO: 1177592 - RNA, 18 nt, Human
aacacuguugucuaaaga

SEQ ID NO: 1177593 - RNA, 18 nt, Human
aaccacccuuccauccug

SEQ ID NO: 1177594 - RNA, 18 nt, Human
aacgucggggagggagag

SEQ ID NO: 1177595 - RNA, 21 nt, Human
aagaagacagauggaaauuga

SEQ ID NO: 1177596 - RNA, 23 nt, Human
aagaggggaagaggcccuugaug

SEQ ID NO: 1177597 - RNA, 24 nt, Human
aaggagcaggggaaguucccggag

SEQ ID NO: 1177598 - RNA, 18 nt, Human
aaguuacaacugggcucc

SEQ ID NO: 1177599 - RNA, 22 nt, Human
aauugagcuuuucuuuuuaggu

SEQ ID NO: 1177600 - RNA, 22 nt, Human
acaaacaaaaaccaaacaacuc

SEQ ID NO: 1177601 - RNA, 23 nt, Human
acagagccuccuuaaaguuugag

SEQ ID NO: 1177602 - RNA, 24 nt, Human
acccuuccauccuguuucuccccu

SEQ ID NO: 1177603 - RNA, 21 nt, Human
acuccugcuucuuccugggaa

SEQ ID NO: 1177604 - RNA, 19 nt, Human
acuggaacagagauaaccu

SEQ ID NO: 1177605 - RNA, 21 nt, Human
acugggcucacuguuccugga

SEQ ID NO: 1177606 - RNA, 18 nt, Human
agaagccagacaugcaac

SEQ ID NO: 1177607 - RNA, 18 nt, Human
agacacgguggaaugagg

SEQ ID NO: 1177608 - RNA, 23 nt, Human
agagaugggcuggccccuacaug

SEQ ID NO: 1177609 - RNA, 21 nt, Human
agagcuggcaggaagagggga

SEQ ID NO: 1177610 - RNA, 18 nt, Human
agaggaaaggaggacaga

SEQ ID NO: 1177611 - RNA, 29 nt, Human
agcaaaaauuuguaguaaaaaaaaaaaaa

SEQ ID NO: 1177612 - RNA, 18 nt, Human
agcuccuggaggugacuc

SEQ ID NO: 1177613 - RNA, 20 nt, Human
agcuggcaggaagaggggaa

SEQ ID NO: 1177614 - RNA, 20 nt, Human
agcuuuucauuuuaagaaca

SEQ ID NO: 1177615 - RNA, 18 nt, Human
aggaagaggcugaggguu

SEQ ID NO: 1177616 - RNA, 23 nt, Human
aggaagaggcugaggguucaagg

SEQ ID NO: 1177617 - RNA, 19 nt, Human
aggaagaggggaagaggcc

SEQ ID NO: 1177618 - RNA, 24 nt, Human
aggagcacaggcagaagccagaca

SEQ ID NO: 1177619 - RNA, 19 nt, Human
aggaggagcacaggcagaa

SEQ ID NO: 1177620 - RNA, 19 nt, Human
aggagggacagggaggaug

SEQ ID NO: 1177621 - RNA, 22 nt, Human
aggcaagaaaauauuuuccuga

SEQ ID NO: 1177622 - RNA, 22 nt, Human
aggcagaagccagacaugcaac

SEQ ID NO: 1177623 - RNA, 28 nt, Human
aggcagaagccagacaugcaacgggaga

SEQ ID NO: 1177624 - RNA, 19 nt, Human
aggcagcuuuggguggggu

SEQ ID NO: 1177625 - RNA, 22 nt, Human
aggcagcuuugggugggguagg

SEQ ID NO: 1177626 - RNA, 19 nt, Human
agggagcuccuacagccag

SEQ ID NO: 1177627 - RNA, 23 nt, Human
agggagcuccuacagccaggaag

SEQ ID NO: 1177628 - RNA, 19 nt, Human
aggggcuggcuuugggugc

SEQ ID NO: 1177629 - RNA, 21 nt, Human
agggguaggcuuuaggggcug

SEQ ID NO: 1177630 - RNA, 22 nt, Human
aguaccaggggcagcccagaga

SEQ ID NO: 1177631 - RNA, 23 nt, Human
auaaagugaggcucccgcaaccc

SEQ ID NO: 1177632 - RNA, 21 nt, Human
auaaaucgcccugggacagag

SEQ ID NO: 1177633 - RNA, 23 nt, Human
auccaauccuuccuucccaccuc

SEQ ID NO: 1177634 - RNA, 19 nt, Human
auccuguuucuccccuucu

SEQ ID NO: 1177635 - RNA, 19 nt, Human
auccuguuucuccccuucu

SEQ ID NO: 1177636 - RNA, 18 nt, Human
aucgcccugggacagagg

SEQ ID NO: 1177637 - RNA, 22 nt, Human
auggcggggggggauuuggggc

SEQ ID NO: 1177638 - RNA, 21 nt, Human
caaaaccccugcaucaucccc

SEQ ID NO: 1177639 - RNA, 25 nt, Human
caaacaaaaaccaaacaaccccggg

SEQ ID NO: 1177640 - RNA, 24 nt, Human
caaacaacuccaaaaucccaaaua

SEQ ID NO: 1177641 - RNA, 25 nt, Human
caaagcagccaacacacgacuaagc

SEQ ID NO: 1177642 - RNA, 24 nt, Human
caaauaaauggcccacaguuuugu

SEQ ID NO: 1177643 - RNA, 18 nt, Human
caaggacaccaggccaag

SEQ ID NO: 1177644 - RNA, 18 nt, Human
caauccuuccuucccacc

SEQ ID NO: 1177645 - RNA, 23 nt, Human
caccucacuaccucugccaauac

SEQ ID NO: 1177646 - RNA, 24 nt, Human
cagaagccagacaugcaacgggag

SEQ ID NO: 1177647 - RNA, 22 nt, Human
cagccuaccugaaucaccucag

SEQ ID NO: 1177648 - RNA, 26 nt, Human
cagcuuugggugggguaggauggggc

SEQ ID NO: 1177649 - RNA, 21 nt, Human
caggcagaagccagacaugca

SEQ ID NO: 1177650 - RNA, 24 nt, Human
caggcagaagccagacaugcaacg

SEQ ID NO: 1177651 - RNA, 20 nt, Human
cagggaggaugcucguggca

SEQ ID NO: 1177652 - RNA, 24 nt, Human
cagggcacggagcugccuggggua

SEQ ID NO: 1177653 - RNA, 21 nt, Human
caguaccaggggcagcccaga

SEQ ID NO: 1177654 - RNA, 18 nt, Human
caugcaacgggagacacg

SEQ ID NO: 1177655 - RNA, 20 nt, Human
cauggaaagaccccuugaag

SEQ ID NO: 1177656 - RNA, 22 nt, Human
cauuggaauguaccuuggccug

SEQ ID NO: 1177657 - RNA, 23 nt, Human
ccaaaaccccugcaucaucccca

SEQ ID NO: 1177658 - RNA, 20 nt, Human
ccaaauaaauggcccacagu

SEQ ID NO: 1177659 - RNA, 25 nt, Human
ccaacacacgacuaagcaaagaccg

SEQ ID NO: 1177660 - RNA, 25 nt, Human
ccaggccaagguagggaguggugag

SEQ ID NO: 1177661 - RNA, 22 nt, Human
cccacacgucggcucgcugagc

SEQ ID NO: 1177662 - RNA, 21 nt, Human
cccgcaacccaggauuuucag

SEQ ID NO: 1177663 - RNA, 23 nt, Human
cccgcaacccaggauuuucagcc

SEQ ID NO: 1177664 - RNA, 22 nt, Human
ccgcaacccaggauuuucagcc

SEQ ID NO: 1177665 - RNA, 23 nt, Human
ccggagaggggcuucucugggcc

SEQ ID NO: 1177666 - RNA, 19 nt, Human
ccucccagucaccuguccu

SEQ ID NO: 1177667 - RNA, 27 nt, Human
ccucuggcugggccaaaaccggggucc

SEQ ID NO: 1177668 - RNA, 18 nt, Human
ccugaggaaguaacuggc

SEQ ID NO: 1177669 - RNA, 21 nt, Human
ccugcagagcaccuuccuacc

SEQ ID NO: 1177670 - RNA, 18 nt, Human
ccugcccuaccuccuuca

SEQ ID NO: 1177671 - RNA, 25 nt, Human
ccugccgguuccuuaaaccacccuu

SEQ ID NO: 1177672 - RNA, 23 nt, Human
ccuggauugcggcugacuucugu

SEQ ID NO: 1177673 - RNA, 24 nt, Human
cgcccugggacagaggcuaugugu

SEQ ID NO: 1177674 - RNA, 23 nt, Human
cuaccucugccaauacaaacaga

SEQ ID NO: 1177675 - RNA, 19 nt, Human
cucuaugugacucaaagac

SEQ ID NO: 1177676 - RNA, 21 nt, Human
cucuggcugggccaaaacccc

SEQ ID NO: 1177677 - RNA, 23 nt, Human
cucuggguccucuggcugggcca

SEQ ID NO: 1177678 - RNA, 21 nt, Human
cugaaacuuuuacugcagugg

SEQ ID NO: 1177679 - RNA, 21 nt, Human
cugaaucaccucacuaccucu

SEQ ID NO: 1177680 - RNA, 24 nt, Human
cugaaucaccucacuaccucugcc

SEQ ID NO: 1177681 - RNA, 21 nt, Human
cuggaacagagauaaccugcc

SEQ ID NO: 1177682 - RNA, 21 nt, Human
cuggccccuacaugcuaaagu

SEQ ID NO: 1177683 - RNA, 24 nt, Human
cuggcuggggcugcucacugggcu

SEQ ID NO: 1177684 - RNA, 18 nt, Human
cugggccugaggggacca

SEQ ID NO: 1177685 - RNA, 20 nt, Human
cugucugucuuucccucacu

SEQ ID NO: 1177686 - RNA, 20 nt, Human
cuucguccugugccuggauu

SEQ ID NO: 1177687 - RNA, 22 nt, Human
cuuuucauuuuaagaacagaag

SEQ ID NO: 1177688 - RNA, 19 nt, Human
gaaugaggagggacaggga

SEQ ID NO: 1177689 - RNA, 22 nt, Human
gagcugccugggguaggucuuc

SEQ ID NO: 1177690 - RNA, 20 nt, Human
gaggaugcucguggcaggag

SEQ ID NO: 1177691 - RNA, 19 nt, Human
gagguaagcuagcuuuuca

SEQ ID NO: 1177692 - RNA, 22 nt, Human
gauggggacccauagggccuug

SEQ ID NO: 1177693 - RNA, 25 nt, Human
gcaaagaccguaugucucaaggaca

SEQ ID NO: 1177694 - RNA, 25 nt, Human
gcaguaccaggggcagcccagagag

SEQ ID NO: 1177695 - RNA, 20 nt, Human
gccagacaugcaacgggaga

SEQ ID NO: 1177696 - RNA, 18 nt, Human
gccaggaaggcagcuuug

SEQ ID NO: 1177697 - RNA, 18 nt, Human
gcucaaagcagccaacac

SEQ ID NO: 1177698 - RNA, 20 nt, Human
gcugucugugaggugggagg

SEQ ID NO: 1177699 - RNA, 25 nt, Human
ggaaauugagcuuuucuuuuuaggu

SEQ ID NO: 1177700 - RNA, 22 nt, Human
ggaagaggcugaggguucaagg

SEQ ID NO: 1177701 - RNA, 22 nt, Human
ggagcccuuccaaaaugugcuu

SEQ ID NO: 1177702 - RNA, 22 nt, Human
ggauggggcuggaaggggguga

SEQ ID NO: 1177703 - RNA, 19 nt, Human
ggcagaagccagacaugca

SEQ ID NO: 1177704 - RNA, 18 nt, Human
ggccuugaagagcuggcu

SEQ ID NO: 1177705 - RNA, 25 nt, Human
gggagaagccagggcacggagcugc

SEQ ID NO: 1177706 - RNA, 21 nt, Human
gggauuuggggcauggggaga

SEQ ID NO: 1177707 - RNA, 18 nt, Human
gggcagucacagagggcu

SEQ ID NO: 1177708 - RNA, 23 nt, Human
ggggaggagggcaguggcaucca

SEQ ID NO: 1177709 - RNA, 19 nt, Human
ggggagggagaggaaagga

SEQ ID NO: 1177710 - RNA, 21 nt, Human
gggugggguaggauggggcug

SEQ ID NO: 1177711 - RNA, 24 nt, Human
gguaaggauucuucuugcagugga

SEQ ID NO: 1177712 - RNA, 18 nt, Human
ggugggguaggauggggc

SEQ ID NO: 1177713 - RNA, 18 nt, Human
ggugggguaggauggggc

SEQ ID NO: 1177714 - RNA, 23 nt, Human
guacccuggaguugcugguugcu

SEQ ID NO: 1177715 - RNA, 21 nt, Human
gugggauggggcuggaagggg

SEQ ID NO: 1177716 - RNA, 22 nt, Human
uaaagugaggcucccgcaaccc

SEQ ID NO: 1177717 - RNA, 28 nt, Human
uaacuguauccucuguuuugggcccucc

SEQ ID NO: 1177718 - RNA, 23 nt, Human
uaagauauacaaacaaaaaccaa

SEQ ID NO: 1177719 - RNA, 19 nt, Human
uacauuugaggcucauuuu

SEQ ID NO: 1177720 - RNA, 18 nt, Human
uaccagggaccugguugc

SEQ ID NO: 1177721 - RNA, 21 nt, Human
uacccuggaguugcugguugc

SEQ ID NO: 1177722 - RNA, 18 nt, Human
uaggauggggcuggggca

SEQ ID NO: 1177723 - RNA, 22 nt, Human
uauaacaaagguacagaagcuu

SEQ ID NO: 1177724 - RNA, 21 nt, Human
uaugugacucaaagaccccug

SEQ ID NO: 1177725 - RNA, 22 nt, Human
uauuuacauacacagguauaca

SEQ ID NO: 1177726 - RNA, 19 nt, Human
ucaaaaccagaagacccuc

SEQ ID NO: 1177727 - RNA, 24 nt, Human
ucaaggacaccaggccaagguagg

SEQ ID NO: 1177728 - RNA, 19 nt, Human
ucagagacuuuuccugugg

SEQ ID NO: 1177729 - RNA, 23 nt, Human
ucauccccacacgucggcucgcu

SEQ ID NO: 1177730 - RNA, 25 nt, Human
ucauggaaagaccccuugaaggccu

SEQ ID NO: 1177731 - RNA, 24 nt, Human
uccaaaaucccaaauaaauggccc

SEQ ID NO: 1177732 - RNA, 19 nt, Human
uccucacaagcagccaagc

SEQ ID NO: 1177733 - RNA, 21 nt, Human
uccugugccuggauugcggcu

SEQ ID NO: 1177734 - RNA, 21 nt, Human
uccuucccaccucagggccug

SEQ ID NO: 1177735 - RNA, 19 nt, Human
ucguccugugccuggauug

SEQ ID NO: 1177736 - RNA, 20 nt, Human
ucucaaggacaccaggccaa

SEQ ID NO: 1177737 - RNA, 21 nt, Human
ucugaaacuuuuacugcagug

SEQ ID NO: 1177738 - RNA, 24 nt, Human
ugaagcucaacucuggguccucug

SEQ ID NO: 1177739 - RNA, 19 nt, Human
ugaaggccuugaagagcug

SEQ ID NO: 1177740 - RNA, 20 nt, Human
ugaaguggucucgguuucuu

SEQ ID NO: 1177741 - RNA, 23 nt, Human
ugacuggaacagagauaaccugc

SEQ ID NO: 1177742 - RNA, 18 nt, Human
ugagaggaguggucauuu

SEQ ID NO: 1177743 - RNA, 20 nt, Human
ugagaggucugagcagcucc

SEQ ID NO: 1177744 - RNA, 25 nt, Human
ugagcagcuccuguacucaagugga

SEQ ID NO: 1177745 - RNA, 22 nt, Human
ugaggaaagcugauaagagaug

SEQ ID NO: 1177746 - RNA, 22 nt, Human
ugaggaaagcugauaagagaug

SEQ ID NO: 1177747 - RNA, 18 nt, Human
ugcaguggauuacuuucc

SEQ ID NO: 1177748 - RNA, 18 nt, Human
ugcccuaccuccuucaac

SEQ ID NO: 1177749 - RNA, 20 nt, Human
ugccucaaacuuugggauuu

SEQ ID NO: 1177750 - RNA, 18 nt, Human
ugccugggguaggucuuc

SEQ ID NO: 1177751 - RNA, 21 nt, Human
ugcuaugguaacucagcagga

SEQ ID NO: 1177752 - RNA, 20 nt, Human
uggaagggggugacuggaac

SEQ ID NO: 1177753 - RNA, 22 nt, Human
uggaagggggugacuggaacag

SEQ ID NO: 1177754 - RNA, 22 nt, Human
uggaaugaggagggacagggag

SEQ ID NO: 1177755 - RNA, 25 nt, Human
uggcggagggaaagcuugggucuuc

SEQ ID NO: 1177756 - RNA, 19 nt, Human
uggcuggggcugcucacug

SEQ ID NO: 1177757 - RNA, 20 nt, Human
uggcuggggcugcucacugg

SEQ ID NO: 1177758 - RNA, 21 nt, Human
ugggauggggcuggaaggggg

SEQ ID NO: 1177759 - RNA, 22 nt, Human
ugggauggggcuggaagggggu

SEQ ID NO: 1177760 - RNA, 20 nt, Human
uggggacccauagggccuug

SEQ ID NO: 1177761 - RNA, 18 nt, Human
uggggaggagggcagugg

SEQ ID NO: 1177762 - RNA, 23 nt, Human
uggggaggagggcaguggcaucc

SEQ ID NO: 1177763 - RNA, 19 nt, Human
uggggcagucacagagggc

SEQ ID NO: 1177764 - RNA, 20 nt, Human
ugggguaggauggggcuggg

SEQ ID NO: 1177765 - RNA, 18 nt, Human
uggguaacuccugcuucu

SEQ ID NO: 1177766 - RNA, 25 nt, Human
ugggugcagggaucaugcugccauu

SEQ ID NO: 1177767 - RNA, 22 nt, Human
uguaguaaaaaaaaaaaaacuc

SEQ ID NO: 1177768 - RNA, 19 nt, Human
ugugguacccuggaguugc

SEQ ID NO: 1177769 - RNA, 21 nt, Human
uguuuuguuuuguuuuuuuua

SEQ ID NO: 1177770 - RNA, 21 nt, Human
uucacuuguagcuccucacaa

SEQ ID NO: 1177771 - RNA, 19 nt, Human
uucuugcaguggaggucau

SEQ ID NO: 1177772 - RNA, 22 nt, Human
uugaagagcuggcuggggcugc

SEQ ID NO: 1177773 - RNA, 19 nt, Human
uugcuuuguucuaacaaag

SEQ ID NO: 1177774 - RNA, 20 nt, Human
uugggugggguaggaugggg

SEQ ID NO: 1177775 - RNA, 21 nt, Human
uugucuaaagauaugcuuugc

SEQ ID NO: 1177776 - RNA, 22 nt, Human
uuuacuaggauacucuucuuua

SEQ ID NO: 1177777 - RNA, 24 nt, Human
aaauggaagagaaugagaagugag

SEQ ID NO: 1177778 - RNA, 22 nt, Human
aacaaaucugaccaucuugucu

SEQ ID NO: 1177779 - RNA, 20 nt, Human
aacaagaaacaaaaccagaa

SEQ ID NO: 1177780 - RNA, 22 nt, Human
aagaaacaaaaccagaagagaa

SEQ ID NO: 1177781 - RNA, 18 nt, Human
aagagaaugagaagugag

SEQ ID NO: 1177782 - RNA, 23 nt, Human
aagccgggccccguggaucagaa

SEQ ID NO: 1177783 - RNA, 19 nt, Human
aagggaaugacuaaaaagg

SEQ ID NO: 1177784 - RNA, 19 nt, Human
aaucugcuuccaauuccag

SEQ ID NO: 1177785 - RNA, 20 nt, Human
aaugacaaugccucuuccua

SEQ ID NO: 1177786 - RNA, 20 nt, Human
acaucuggaagaagguuuug

SEQ ID NO: 1177787 - RNA, 21 nt, Human
accagacucaagcucccacca

SEQ ID NO: 1177788 - RNA, 23 nt, Human
accagacucaagcucccaccagc

SEQ ID NO: 1177789 - RNA, 22 nt, Human
acucauggcuguuuucuguucc

SEQ ID NO: 1177790 - RNA, 25 nt, Human
acuccugcagagccggggugggggu

SEQ ID NO: 1177791 - RNA, 19 nt, Human
acuggauguguccucaugc

SEQ ID NO: 1177792 - RNA, 21 nt, Human
acuuuugacccaggggagcca

SEQ ID NO: 1177793 - RNA, 21 nt, Human
agaaacaaaaccagaagagaa

SEQ ID NO: 1177794 - RNA, 24 nt, Human
agaacaagaaacaaaaccagaaga

SEQ ID NO: 1177795 - RNA, 26 nt, Human
agaacaagaaacaaaaccagaagaga

SEQ ID NO: 1177796 - RNA, 20 nt, Human
agagaaaaucuagcccaagg

SEQ ID NO: 1177797 - RNA, 23 nt, Human
agagaacacacagaaagauccuc

SEQ ID NO: 1177798 - RNA, 20 nt, Human
agagaagccagcucuccaca

SEQ ID NO: 1177799 - RNA, 19 nt, Human
agcaggugaaguccccagg

SEQ ID NO: 1177800 - RNA, 26 nt, Human
agccacaggcaccaggagcgaggccc

SEQ ID NO: 1177801 - RNA, 22 nt, Human
aggaaggaggaaugugggcugg

SEQ ID NO: 1177802 - RNA, 24 nt, Human
aggcagaacaagaaacaaaaccag

SEQ ID NO: 1177803 - RNA, 25 nt, Human
aggcagaacaagaaacaaaaccaga

SEQ ID NO: 1177804 - RNA, 21 nt, Human
aggcuuggccagggggaggga

SEQ ID NO: 1177805 - RNA, 22 nt, Human
aguaccaccccauccuugcaga

SEQ ID NO: 1177806 - RNA, 21 nt, Human
aguuuugccuuuucugauguu

SEQ ID NO: 1177807 - RNA, 20 nt, Human
auccucuuccuccccagccc

SEQ ID NO: 1177808 - RNA, 20 nt, Human
caaaaccagaagagaaaauc

SEQ ID NO: 1177809 - RNA, 24 nt, Human
caagacacacacggaagagacugg

SEQ ID NO: 1177810 - RNA, 18 nt, Human
caagggaccucugccaau

SEQ ID NO: 1177811 - RNA, 21 nt, Human
caauuccaggcuccaaccagu

SEQ ID NO: 1177812 - RNA, 18 nt, Human
caccagcguccacagcag

SEQ ID NO: 1177813 - RNA, 18 nt, Human
caccccauccuugcagaa

SEQ ID NO: 1177814 - RNA, 23 nt, Human
caccccauccuugcagaaggcug

SEQ ID NO: 1177815 - RNA, 19 nt, Human
cacgugcacugcccauuac

SEQ ID NO: 1177816 - RNA, 18 nt, Human
cagaacaagaaacaaaac

SEQ ID NO: 1177817 - RNA, 18 nt, Human
cagaacaagaaacaaaac

SEQ ID NO: 1177818 - RNA, 19 nt, Human
cagagcccaggccaggagc

SEQ ID NO: 1177819 - RNA, 20 nt, Human
cagcguccacagcaguccag

SEQ ID NO: 1177820 - RNA, 22 nt, Human
caggagcaaagggcuccuuugu

SEQ ID NO: 1177821 - RNA, 20 nt, Human
caggucuucuuacuggaugu

SEQ ID NO: 1177822 - RNA, 22 nt, Human
caguggcagagagugggggccu

SEQ ID NO: 1177823 - RNA, 23 nt, Human
caguggcagagagugggggccug

SEQ ID NO: 1177824 - RNA, 24 nt, Human
caguggcagagagugggggccugu

SEQ ID NO: 1177825 - RNA, 18 nt, Human
caguggcuccugaaauug

SEQ ID NO: 1177826 - RNA, 23 nt, Human
caucuggaagaagguuuugccuc

SEQ ID NO: 1177827 - RNA, 24 nt, Human
caugcuccagaguauuuuggauug

SEQ ID NO: 1177828 - RNA, 18 nt, Human
ccacugccccaaggaggu

SEQ ID NO: 1177829 - RNA, 20 nt, Human
ccagcggccagucaggcaga

SEQ ID NO: 1177830 - RNA, 22 nt, Human
ccaggggagccagcccacagcc

SEQ ID NO: 1177831 - RNA, 22 nt, Human
ccagucaggcagaacaagaaac

SEQ ID NO: 1177832 - RNA, 22 nt, Human
cccacagcccaagaaaaggcac

SEQ ID NO: 1177833 - RNA, 23 nt, Human
cccacagcccaagaaaaggcacu

SEQ ID NO: 1177834 - RNA, 22 nt, Human
cccagcccuggucaguuuugcc

SEQ ID NO: 1177835 - RNA, 20 nt, Human
cccgggugcagugccagcca

SEQ ID NO: 1177836 - RNA, 20 nt, Human
cccuucaacugcacugcugc

SEQ ID NO: 1177837 - RNA, 19 nt, Human
cccuugcccucagggagcu

SEQ ID NO: 1177838 - RNA, 18 nt, Human
ccgggguggggguggggg

SEQ ID NO: 1177839 - RNA, 19 nt, Human
ccgugcacuccugcagagc

SEQ ID NO: 1177840 - RNA, 25 nt, Human
ccuaaauauccucugacccagguuu

SEQ ID NO: 1177841 - RNA, 23 nt, Human
ccucuagaaccaggucugccacc

SEQ ID NO: 1177842 - RNA, 19 nt, Human
ccucuuccuccccagccca

SEQ ID NO: 1177843 - RNA, 19 nt, Human
ccugaaauugcuugggguu

SEQ ID NO: 1177844 - RNA, 19 nt, Human
ccugggcccuguucccuuc

SEQ ID NO: 1177845 - RNA, 22 nt, Human
cggggugggggugggggucccu

SEQ ID NO: 1177846 - RNA, 19 nt, Human
cuaaauauccucugaccca

SEQ ID NO: 1177847 - RNA, 19 nt, Human
cuagaaccaggucugccac

SEQ ID NO: 1177848 - RNA, 23 nt, Human
cuagacccugguaggacucaaga

SEQ ID NO: 1177849 - RNA, 18 nt, Human
cucacaccggaccuguuc

SEQ ID NO: 1177850 - RNA, 23 nt, Human
cuccagaaaccugacgcaccauu

SEQ ID NO: 1177851 - RNA, 24 nt, Human
cuccccagcccacugggcugaaca

SEQ ID NO: 1177852 - RNA, 20 nt, Human
cugaacaagggaaggaggcu

SEQ ID NO: 1177853 - RNA, 23 nt, Human
cugcugccugccugggcccuguu

SEQ ID NO: 1177854 - RNA, 21 nt, Human
cuuccugucucugaacucuag

SEQ ID NO: 1177855 - RNA, 23 nt, Human
gaaaggaaaaugaagccugcagg

SEQ ID NO: 1177856 - RNA, 20 nt, Human
gaagggaaugacuaaaaagg

SEQ ID NO: 1177857 - RNA, 23 nt, Human
gaagggaaugacuaaaaagggcu

SEQ ID NO: 1177858 - RNA, 20 nt, Human
gacagguaaggaaagggcag

SEQ ID NO: 1177859 - RNA, 23 nt, Human
gaccacacagugaaaucagagcc

SEQ ID NO: 1177860 - RNA, 19 nt, Human
gaccucucacccugcccag

SEQ ID NO: 1177861 - RNA, 21 nt, Human
gagaaugagaagugagaagga

SEQ ID NO: 1177862 - RNA, 19 nt, Human
gagccgggguggggguggg

SEQ ID NO: 1177863 - RNA, 24 nt, Human
gcagaacaagaaacaaaaccagaa

SEQ ID NO: 1177864 - RNA, 25 nt, Human
gcagaacaagaaacaaaaccagaag

SEQ ID NO: 1177865 - RNA, 21 nt, Human
gcagagagugggggccugugg

SEQ ID NO: 1177866 - RNA, 18 nt, Human
gccagggggagggagggg

SEQ ID NO: 1177867 - RNA, 24 nt, Human
gcccaggccaggagcaaagggcuc

SEQ ID NO: 1177868 - RNA, 19 nt, Human
ggacucaagacacacacgg

SEQ ID NO: 1177869 - RNA, 23 nt, Human
ggacucaagacacacacggaaga

SEQ ID NO: 1177870 - RNA, 18 nt, Human
ggagcagagaagccagcu

SEQ ID NO: 1177871 - RNA, 20 nt, Human
ggcacuacuuguacaguggc

SEQ ID NO: 1177872 - RNA, 23 nt, Human
ggcagcaggugaaguccccaggg

SEQ ID NO: 1177873 - RNA, 23 nt, Human
ggccaggagcaaagggcuccuuu

SEQ ID NO: 1177874 - RNA, 20 nt, Human
ggccagggggagggaggggc

SEQ ID NO: 1177875 - RNA, 21 nt, Human
ggcuggacgaccacuuccgug

SEQ ID NO: 1177876 - RNA, 22 nt, Human
ggcugggugguuugggaagccg

SEQ ID NO: 1177877 - RNA, 18 nt, Human
gggagcagagaagccagc

SEQ ID NO: 1177878 - RNA, 22 nt, Human
gggugcagugccagccaggccu

SEQ ID NO: 1177879 - RNA, 19 nt, Human
ggucaguuuugccuuuucu

SEQ ID NO: 1177880 - RNA, 18 nt, Human
ggugugaagaugggagga

SEQ ID NO: 1177881 - RNA, 23 nt, Human
gucaccuccacuggucaccgcag

SEQ ID NO: 1177882 - RNA, 26 nt, Human
guccaugggacagcacgcaguucggg

SEQ ID NO: 1177883 - RNA, 24 nt, Human
gucugccccagcugugauucccac

SEQ ID NO: 1177884 - RNA, 23 nt, Human
gugaaguccccagggcugagguu

SEQ ID NO: 1177885 - RNA, 21 nt, Human
uaacucacauacccucucccc

SEQ ID NO: 1177886 - RNA, 19 nt, Human
uaagagccugaggccuccg

SEQ ID NO: 1177887 - RNA, 18 nt, Human
uacaguggccuugacucg

SEQ ID NO: 1177888 - RNA, 18 nt, Human
uaccggccaccgacaagc

SEQ ID NO: 1177889 - RNA, 23 nt, Human
uaggucugggagaagggaaugac

SEQ ID NO: 1177890 - RNA, 18 nt, Human
uauccaggcuggacgacc

SEQ ID NO: 1177891 - RNA, 19 nt, Human
ucagaccagacucaagcuc

SEQ ID NO: 1177892 - RNA, 23 nt, Human
uccaccgaccucucacccugccc

SEQ ID NO: 1177893 - RNA, 21 nt, Human
uccaugggacagcacgcaguu

SEQ ID NO: 1177894 - RNA, 21 nt, Human
ucccugaugcucccacugccc

SEQ ID NO: 1177895 - RNA, 19 nt, Human
ucccuuggcaaccaccuua

SEQ ID NO: 1177896 - RNA, 23 nt, Human
ucccuuggcaaccaccuuaaucu

SEQ ID NO: 1177897 - RNA, 18 nt, Human
uccgugcacuccugcaga

SEQ ID NO: 1177898 - RNA, 22 nt, Human
uccgugcacuccugcagagccg

SEQ ID NO: 1177899 - RNA, 19 nt, Human
uccuaaauauccucugacc

SEQ ID NO: 1177900 - RNA, 26 nt, Human
uccugcagagccgggguggggguggg

SEQ ID NO: 1177901 - RNA, 18 nt, Human
uccuggucuccgugucca

SEQ ID NO: 1177902 - RNA, 20 nt, Human
ucgggucuuaagauccugcc

SEQ ID NO: 1177903 - RNA, 21 nt, Human
ucucugaacucuagccaagug

SEQ ID NO: 1177904 - RNA, 18 nt, Human
ugacagguaaggaaaggg

SEQ ID NO: 1177905 - RNA, 18 nt, Human
ugacugguucagguguga

SEQ ID NO: 1177906 - RNA, 21 nt, Human
ugagaacuuguagcuuccagg

SEQ ID NO: 1177907 - RNA, 19 nt, Human
ugagaaggacaguaccacc

SEQ ID NO: 1177908 - RNA, 21 nt, Human
ugaggcaggucuucuuacugg

SEQ ID NO: 1177909 - RNA, 23 nt, Human
ugcacugcccauuaccggccacc

SEQ ID NO: 1177910 - RNA, 21 nt, Human
ugcuagacccugguaggacuc

SEQ ID NO: 1177911 - RNA, 21 nt, Human
ugcugccugccugggcccugu

SEQ ID NO: 1177912 - RNA, 22 nt, Human
uggaagagaaugagaagugaga

SEQ ID NO: 1177913 - RNA, 22 nt, Human
uggcaaccaccuuaaucucagc

SEQ ID NO: 1177914 - RNA, 25 nt, Human
uggcagagagugggggccuguggcc

SEQ ID NO: 1177915 - RNA, 20 nt, Human
uggccaggcagccaggauga

SEQ ID NO: 1177916 - RNA, 24 nt, Human
ugggaagccgggccccguggauca

SEQ ID NO: 1177917 - RNA, 22 nt, Human
ugggaggaguccuugcccugcu

SEQ ID NO: 1177918 - RNA, 20 nt, Human
ugguggaagcaggauucuuu

SEQ ID NO: 1177919 - RNA, 24 nt, Human
uguagcuuccaggcugacugguuc

SEQ ID NO: 1177920 - RNA, 21 nt, Human
ugucuggggaagggaaaugag

SEQ ID NO: 1177921 - RNA, 22 nt, Human
ugucuggggaagggaaaugagg

SEQ ID NO: 1177922 - RNA, 22 nt, Human
ugugaagaugggaggaguccuu

SEQ ID NO: 1177923 - RNA, 19 nt, Human
uguucauucuggggaggca

SEQ ID NO: 1177924 - RNA, 23 nt, Human
uuaacucacauacccucucccca

SEQ ID NO: 1177925 - RNA, 22 nt, Human
uuaaugacaaugccucuuccua

SEQ ID NO: 1177926 - RNA, 24 nt, Human
uuaaugacaaugccucuuccuaaa

SEQ ID NO: 1177927 - RNA, 18 nt, Human
uuccacucagucagcucc

SEQ ID NO: 1177928 - RNA, 22 nt, Human
uuccaggcuccaaccagucacc

SEQ ID NO: 1177929 - RNA, 22 nt, Human
uuccugaacaagggaaggaggc

SEQ ID NO: 1177930 - RNA, 21 nt, Human
uuccuggucuccguguccaga

SEQ ID NO: 1177931 - RNA, 22 nt, Human
caagcucaaguuccccugcugg

SEQ ID NO: 1177932 - RNA, 19 nt, Human
ccucuuccuccacugccuu

SEQ ID NO: 1177933 - RNA, 26 nt, Human
aaacagaugacaaagauuaugcucuc

SEQ ID NO: 1177934 - RNA, 26 nt, Human
aaagaacaccacugucuugaaaccaa

SEQ ID NO: 1177935 - RNA, 23 nt, Human
aaaucuagaacaacacuuagaau

SEQ ID NO: 1177936 - RNA, 21 nt, Human
aagaacaccacugucuugaaa

SEQ ID NO: 1177937 - RNA, 21 nt, Human
aagaagguuccagauuucucu

SEQ ID NO: 1177938 - RNA, 22 nt, Human
aaggagaaagagaaacgcaaug

SEQ ID NO: 1177939 - RNA, 19 nt, Human
aaggagacaggagagcuca

SEQ ID NO: 1177940 - RNA, 20 nt, Human
aaucuucacccuccugccac

SEQ ID NO: 1177941 - RNA, 23 nt, Human
aauuuuuauuucagguucaaggg

SEQ ID NO: 1177942 - RNA, 21 nt, Human
acagaaagauagaacaaaacu

SEQ ID NO: 1177943 - RNA, 19 nt, Human
acagguuguaccaugcccc

SEQ ID NO: 1177944 - RNA, 18 nt, Human
accagccccagccugcuu

SEQ ID NO: 1177945 - RNA, 19 nt, Human
accuacacaagugagguga

SEQ ID NO: 1177946 - RNA, 24 nt, Human
accuguuuccuaaccucaagggaa

SEQ ID NO: 1177947 - RNA, 23 nt, Human
acgacuaucuauauucucauccc

SEQ ID NO: 1177948 - RNA, 20 nt, Human
agaacaccacugucuugaaa

SEQ ID NO: 1177949 - RNA, 18 nt, Human
agacaggagagcucaggg

SEQ ID NO: 1177950 - RNA, 23 nt, Human
agauuaugcucucaaagcaugua

SEQ ID NO: 1177951 - RNA, 21 nt, Human
aggggaaaaaaacagaugaca

SEQ ID NO: 1177952 - RNA, 21 nt, Human
auagaacaaaacugggauguu

SEQ ID NO: 1177953 - RNA, 24 nt, Human
aucccaaaggagacaggagagcuc

SEQ ID NO: 1177954 - RNA, 26 nt, Human
caacacuuagaauuacagaacuuugc

SEQ ID NO: 1177955 - RNA, 24 nt, Human
caaggcgggaugcauuugccucuc

SEQ ID NO: 1177956 - RNA, 23 nt, Human
cacccaccucucaaaauaaucug

SEQ ID NO: 1177957 - RNA, 21 nt, Human
cacccaggaaaccagcauaac

SEQ ID NO: 1177958 - RNA, 22 nt, Human
cacccaggaaaccagcauaaca

SEQ ID NO: 1177959 - RNA, 19 nt, Human
cacccuccacccucaagua

SEQ ID NO: 1177960 - RNA, 22 nt, Human
cacccuccacccucaaguauac

SEQ ID NO: 1177961 - RNA, 22 nt, Human
cacccuccugccacccuccacc

SEQ ID NO: 1177962 - RNA, 19 nt, Human
cagguggccucagccuuga

SEQ ID NO: 1177963 - RNA, 18 nt, Human
cauuuuacccuguaucua

SEQ ID NO: 1177964 - RNA, 18 nt, Human
ccaccagccccagccugc

SEQ ID NO: 1177965 - RNA, 22 nt, Human
ccagaagaagguuccagauuuc

SEQ ID NO: 1177966 - RNA, 21 nt, Human
ccagcaauggaagacuauguc

SEQ ID NO: 1177967 - RNA, 22 nt, Human
ccaugccccgccccucccccca

SEQ ID NO: 1177968 - RNA, 24 nt, Human
ccccaaccugagggugucucuaau

SEQ ID NO: 1177969 - RNA, 20 nt, Human
cccccaaccugagggugucu

SEQ ID NO: 1177970 - RNA, 23 nt, Human
cccuaagucgcaucccaaaggag

SEQ ID NO: 1177971 - RNA, 22 nt, Human
cccuggacaacagggaggcccu

SEQ ID NO: 1177972 - RNA, 23 nt, Human
ccuccacccucaaguauaccccu

SEQ ID NO: 1177973 - RNA, 21 nt, Human
ccugccacccuccacccucaa

SEQ ID NO: 1177974 - RNA, 18 nt, Human
cgcccccaccugcaauuu

SEQ ID NO: 1177975 - RNA, 22 nt, Human
cucaaagccaugaacccgcuuu

SEQ ID NO: 1177976 - RNA, 23 nt, Human
cucaagggaaagagaaggagaaa

SEQ ID NO: 1177977 - RNA, 24 nt, Human
cucacauaucacccaccucucaaa

SEQ ID NO: 1177978 - RNA, 21 nt, Human
cucaucccagguggccucagc

SEQ ID NO: 1177979 - RNA, 21 nt, Human
cugauuccaaccuaccuacac

SEQ ID NO: 1177980 - RNA, 21 nt, Human
cuggagucugcuuccugcuuc

SEQ ID NO: 1177981 - RNA, 20 nt, Human
cuguucuagucuaugucacu

SEQ ID NO: 1177982 - RNA, 22 nt, Human
cuucacccuccugccacccucc

SEQ ID NO: 1177983 - RNA, 19 nt, Human
gaaaaaaacagaugacaaa

SEQ ID NO: 1177984 - RNA, 27 nt, Human
gaaagaacaccacugucuugaaaccaa

SEQ ID NO: 1177985 - RNA, 20 nt, Human
gaacccgcuucccuucccac

SEQ ID NO: 1177986 - RNA, 19 nt, Human
gaagcaaauucgaguguag

SEQ ID NO: 1177987 - RNA, 19 nt, Human
gagcucagggagccaacgg

SEQ ID NO: 1177988 - RNA, 18 nt, Human
gaggugauucuugugacu

SEQ ID NO: 1177989 - RNA, 19 nt, Human
gaguguagaagccacaucc

SEQ ID NO: 1177990 - RNA, 24 nt, Human
gauucucugauuuuggcaaucuua

SEQ ID NO: 1177991 - RNA, 22 nt, Human
ggcuuccugacaggagauacag

SEQ ID NO: 1177992 - RNA, 20 nt, Human
gggaaagagaaggagaaagg

SEQ ID NO: 1177993 - RNA, 21 nt, Human
gguaauuuugucacccaggaa

SEQ ID NO: 1177994 - RNA, 22 nt, Human
gguggccucagccuugaucaca

SEQ ID NO: 1177995 - RNA, 24 nt, Human
gugggacagaaagauagaacaaaa

SEQ ID NO: 1177996 - RNA, 21 nt, Human
guuuccucagggacagccagc

SEQ ID NO: 1177997 - RNA, 18 nt, Human
uaaguugugugucacagg

SEQ ID NO: 1177998 - RNA, 20 nt, Human
uacccagaagaagguuccag

SEQ ID NO: 1177999 - RNA, 20 nt, Human
uacccuacuauucgccccca

SEQ ID NO: 1178000 - RNA, 25 nt, Human
uacccuacuauucgcccccaccugc

SEQ ID NO: 1178001 - RNA, 19 nt, Human
uagcccuaagucgcauccc

SEQ ID NO: 1178002 - RNA, 19 nt, Human
uauuguucccuucuuugug

SEQ ID NO: 1178003 - RNA, 23 nt, Human
ucacagugucuauccugauucca

SEQ ID NO: 1178004 - RNA, 22 nt, Human
ucagcuauggaaagaacaccac

SEQ ID NO: 1178005 - RNA, 23 nt, Human
uccagauuucucucucacauauc

SEQ ID NO: 1178006 - RNA, 22 nt, Human
uccauguccuuuuaaauggauu

SEQ ID NO: 1178007 - RNA, 19 nt, Human
ucccacagguuguaccaug

SEQ ID NO: 1178008 - RNA, 26 nt, Human
ucccacagguuguaccaugccccgcc

SEQ ID NO: 1178009 - RNA, 20 nt, Human
ucccagugcaggugggacag

SEQ ID NO: 1178010 - RNA, 24 nt, Human
uccugcuuccgccaugcccaggag

SEQ ID NO: 1178011 - RNA, 21 nt, Human
ucgcaucccaaaggagacagg

SEQ ID NO: 1178012 - RNA, 20 nt, Human
ucuaggggaaaaaaacagau

SEQ ID NO: 1178013 - RNA, 18 nt, Human
ucucacauaucacccacc

SEQ ID NO: 1178014 - RNA, 23 nt, Human
ucuucacccuccugccacccucc

SEQ ID NO: 1178015 - RNA, 21 nt, Human
ugccccgccccuccccccaac

SEQ ID NO: 1178016 - RNA, 19 nt, Human
ugcucagcuauggaaagaa

SEQ ID NO: 1178017 - RNA, 22 nt, Human
uggaaagaacaccacugucuug

SEQ ID NO: 1178018 - RNA, 25 nt, Human
uggaaagaacaccacugucuugaaa

SEQ ID NO: 1178019 - RNA, 22 nt, Human
uggagucugcuuccugcuuccg

SEQ ID NO: 1178020 - RNA, 23 nt, Human
uggcaaucuuacuaugcuucuaa

SEQ ID NO: 1178021 - RNA, 19 nt, Human
ugucacccaggaaaccagc

SEQ ID NO: 1178022 - RNA, 19 nt, Human
ugugcugaacgcugcccug

SEQ ID NO: 1178023 - RNA, 20 nt, Human
ugugucuacggcacacacau

SEQ ID NO: 1178024 - RNA, 22 nt, Human
uucaagggguacaugcacaggu

SEQ ID NO: 1178025 - RNA, 23 nt, Human
uucacccuccugccacccuccac

SEQ ID NO: 1178026 - RNA, 24 nt, Human
uucagaaccuccaagacucauguc

SEQ ID NO: 1178027 - RNA, 21 nt, Human
uugaaaccaagaagcaaauuc

SEQ ID NO: 1178028 - RNA, 20 nt, Human
uuguucccuucuuugugucu

SEQ ID NO: 1178029 - RNA, 21 nt, Human
uuuccagauuuccccaccuug

SEQ ID NO: 1178030 - RNA, 20 nt, Human
uuuucaaucuucacccuccc

SEQ ID NO: 1178031 - RNA, 28 nt, Human
acgccacuaaucucaggugcccgcaagc

SEQ ID NO: 1178032 - RNA, 18 nt, Human
cacugcccugucccacgc

SEQ ID NO: 1178033 - RNA, 23 nt, Human
cccacgccacuaaucucaggugc

SEQ ID NO: 1178034 - RNA, 21 nt, Human
ucucaggugcccgcaagccuu

SEQ ID NO: 1178035 - RNA, 26 nt, Human
ugcccugucccacgccacuaaucuca

SEQ ID NO: 1178036 - RNA, 18 nt, Human
ugggcauuuaugccucug

SEQ ID NO: 1178037 - RNA, 19 nt, Human
uuaugccucugccccaucc

SEQ ID NO: 1178038 - RNA, 24 nt, Human
aaacuucugggcucaagcgauccu

SEQ ID NO: 1178039 - RNA, 23 nt, Human
aaauggccugguaauggaaaagc

SEQ ID NO: 1178040 - RNA, 19 nt, Human
aagcaugcaccacaacgcc

SEQ ID NO: 1178041 - RNA, 25 nt, Human
aagcgauccucccaccugggccucc

SEQ ID NO: 1178042 - RNA, 27 nt, Human
aagcgauccuccugccucaaccuccca

SEQ ID NO: 1178043 - RNA, 21 nt, Human
aaguagcugggaccacaagca

SEQ ID NO: 1178044 - RNA, 24 nt, Human
aaguagcugggaccacaagcaugc

SEQ ID NO: 1178045 - RNA, 24 nt, Human
aauguugccuaggcuggucucaaa

SEQ ID NO: 1178046 - RNA, 23 nt, Human
acccaggcuggagugcaguggug

SEQ ID NO: 1178047 - RNA, 24 nt, Human
acccaggcuggagugcaguggugu

SEQ ID NO: 1178048 - RNA, 19 nt, Human
acugaagagaucguuggac

SEQ ID NO: 1178049 - RNA, 22 nt, Human
agccaacagagcugcuggcacc

SEQ ID NO: 1178050 - RNA, 26 nt, Human
agcugggaccacaagcaugcaccaca

SEQ ID NO: 1178051 - RNA, 23 nt, Human
agugcaguggugugagcauggcu

SEQ ID NO: 1178052 - RNA, 24 nt, Human
agugcaguggugugagcauggcuc

SEQ ID NO: 1178053 - RNA, 20 nt, Human
auauuuuuuguagagaugga

SEQ ID NO: 1178054 - RNA, 22 nt, Human
aucagugugaauguuuccucca

SEQ ID NO: 1178055 - RNA, 19 nt, Human
auggaaacauuccaagaaa

SEQ ID NO: 1178056 - RNA, 20 nt, Human
auguugccuaggcuggucuc

SEQ ID NO: 1178057 - RNA, 23 nt, Human
auguugccuaggcuggucucaaa

SEQ ID NO: 1178058 - RNA, 20 nt, Human
auuuugugauuuuuuuucuu

SEQ ID NO: 1178059 - RNA, 22 nt, Human
caaaguaaugggauuacaggcg

SEQ ID NO: 1178060 - RNA, 22 nt, Human
caaaguagcugggaccacaagc

SEQ ID NO: 1178061 - RNA, 18 nt, Human
caacuugagccaacagag

SEQ ID NO: 1178062 - RNA, 19 nt, Human
caacuugagccaacagagc

SEQ ID NO: 1178063 - RNA, 21 nt, Human
caagaaacagaagcccucuca

SEQ ID NO: 1178064 - RNA, 27 nt, Human
caagcgauccucccaccugggccuccc

SEQ ID NO: 1178065 - RNA, 27 nt, Human
caagcgauccucccaccugggccuccc

SEQ ID NO: 1178066 - RNA, 23 nt, Human
caagcgauccuccugccucaacc

SEQ ID NO: 1178067 - RNA, 20 nt, Human
cacaagcaugcaccacaacg

SEQ ID NO: 1178068 - RNA, 24 nt, Human
cacccaggcuggagugcaguggug

SEQ ID NO: 1178069 - RNA, 23 nt, Human
cacugcagccucugccuccuggg

SEQ ID NO: 1178070 - RNA, 19 nt, Human
cagccucugccuccugggc

SEQ ID NO: 1178071 - RNA, 23 nt, Human
cagccucugccuccugggcucaa

SEQ ID NO: 1178072 - RNA, 21 nt, Human
caguggugugagcauggcuca

SEQ ID NO: 1178073 - RNA, 21 nt, Human
cauggcucacugcagccucug

SEQ ID NO: 1178074 - RNA, 18 nt, Human
cauuccaagaaacagaag

SEQ ID NO: 1178075 - RNA, 19 nt, Human
ccaucugagagaaaaugaa

SEQ ID NO: 1178076 - RNA, 18 nt, Human
cccaaaguagcugggacc

SEQ ID NO: 1178077 - RNA, 22 nt, Human
ccccuccgcuccgccccaaccc

SEQ ID NO: 1178078 - RNA, 25 nt, Human
cccugccuggcacggccuccccucc

SEQ ID NO: 1178079 - RNA, 24 nt, Human
ccgccccaacccaacucccaggua

SEQ ID NO: 1178080 - RNA, 22 nt, Human
ccuccugccucaaccucccaaa

SEQ ID NO: 1178081 - RNA, 24 nt, Human
ccuccugggcucaagcgauccucc

SEQ ID NO: 1178082 - RNA, 19 nt, Human
ccucugccuccugggcuca

SEQ ID NO: 1178083 - RNA, 22 nt, Human
ccuggcugacuuuuauauuuuu

SEQ ID NO: 1178084 - RNA, 20 nt, Human
ccugggcucaagcgauccuc

SEQ ID NO: 1178085 - RNA, 23 nt, Human
ccugggcucaagcgauccuccug

SEQ ID NO: 1178086 - RNA, 18 nt, Human
cgcuccgccccaacccaa

SEQ ID NO: 1178087 - RNA, 18 nt, Human
cggccuccccuccgcucc

SEQ ID NO: 1178088 - RNA, 18 nt, Human
cgggagccacugugcccg

SEQ ID NO: 1178089 - RNA, 24 nt, Human
cucaagcgauccucccaccugggc

SEQ ID NO: 1178090 - RNA, 24 nt, Human
cucaagcgauccuccugccucaac

SEQ ID NO: 1178091 - RNA, 21 nt, Human
cucacugcagccucugccucc

SEQ ID NO: 1178092 - RNA, 24 nt, Human
cucacugcagccucugccuccugg

SEQ ID NO: 1178093 - RNA, 19 nt, Human
cuccacaacuggcacgucu

SEQ ID NO: 1178094 - RNA, 18 nt, Human
cuccugccucaaccuccc

SEQ ID NO: 1178095 - RNA, 21 nt, Human
cugaagacuuuaauacagaaa

SEQ ID NO: 1178096 - RNA, 22 nt, Human
cugagagaaaaugaaaauccac

SEQ ID NO: 1178097 - RNA, 23 nt, Human
cugcagccucugccuccugggcu

SEQ ID NO: 1178098 - RNA, 20 nt, Human
cugggcucaagcgauccucc

SEQ ID NO: 1178099 - RNA, 18 nt, Human
cugucacccaggcuggag

SEQ ID NO: 1178100 - RNA, 25 nt, Human
cuucugggcucaagcgauccuccca

SEQ ID NO: 1178101 - RNA, 19 nt, Human
gagcauggcucacugcagc

SEQ ID NO: 1178102 - RNA, 18 nt, Human
gauuacaggcgggagcca

SEQ ID NO: 1178103 - RNA, 21 nt, Human
gauuacaggcgggagccacug

SEQ ID NO: 1178104 - RNA, 24 nt, Human
gauuacaggcgggagccacugugc

SEQ ID NO: 1178105 - RNA, 20 nt, Human
gcaccacaacgccuggcuga

SEQ ID NO: 1178106 - RNA, 23 nt, Human
gccuaggcuggucucaaacuucu

SEQ ID NO: 1178107 - RNA, 21 nt, Human
gcucacugcagccucugccuc

SEQ ID NO: 1178108 - RNA, 25 nt, Human
gcucugucacccaggcuggagugca

SEQ ID NO: 1178109 - RNA, 23 nt, Human
ggagucuugcaauguugccuagg

SEQ ID NO: 1178110 - RNA, 21 nt, Human
ggccugguaauggaaaagcug

SEQ ID NO: 1178111 - RNA, 22 nt, Human
gggcucaagcgauccuccugcc

SEQ ID NO: 1178112 - RNA, 25 nt, Human
gguaauggaaaagcugacugaggaa

SEQ ID NO: 1178113 - RNA, 23 nt, Human
uaacauuucuucacucaggcugu

SEQ ID NO: 1178114 - RNA, 24 nt, Human
ucacccaggcuggagugcaguggu

SEQ ID NO: 1178115 - RNA, 24 nt, Human
ucacugcagccucugccuccuggg

SEQ ID NO: 1178116 - RNA, 25 nt, Human
ucacugcagccucugccuccugggc

SEQ ID NO: 1178117 - RNA, 24 nt, Human
uccaagaaacagaagcccucucac

SEQ ID NO: 1178118 - RNA, 25 nt, Human
uccaagaaacagaagcccucucacc

SEQ ID NO: 1178119 - RNA, 24 nt, Human
uccacuaugagagaaaacugaaga

SEQ ID NO: 1178120 - RNA, 24 nt, Human
ucccaaaguaaugggauuacaggc

SEQ ID NO: 1178121 - RNA, 21 nt, Human
uccccuccgcuccgccccaac

SEQ ID NO: 1178122 - RNA, 19 nt, Human
uccgccccaacccaacucc

SEQ ID NO: 1178123 - RNA, 27 nt, Human
uccuccugccucaaccucccaaaguag

SEQ ID NO: 1178124 - RNA, 21 nt, Human
uccugggcucaagcgauccuc

SEQ ID NO: 1178125 - RNA, 22 nt, Human
uccugggcucaagcgauccucc

SEQ ID NO: 1178126 - RNA, 24 nt, Human
uccugggcucaagcgauccuccug

SEQ ID NO: 1178127 - RNA, 23 nt, Human
ucucaaacuucugggcucaagcg

SEQ ID NO: 1178128 - RNA, 24 nt, Human
ucugucacccaggcuggagugcag

SEQ ID NO: 1178129 - RNA, 23 nt, Human
ucuugcaauguugccuaggcugg

SEQ ID NO: 1178130 - RNA, 24 nt, Human
ucuugcaauguugccuaggcuggu

SEQ ID NO: 1178131 - RNA, 23 nt, Human
ucuugcucugucacccaggcugg

SEQ ID NO: 1178132 - RNA, 24 nt, Human
ucuugcucugucacccaggcugga

SEQ ID NO: 1178133 - RNA, 22 nt, Human
ugagacaagaucuugcucuguc

SEQ ID NO: 1178134 - RNA, 20 nt, Human
ugagagaaaacugaagacuu

SEQ ID NO: 1178135 - RNA, 19 nt, Human
ugagccaacagagcugcug

SEQ ID NO: 1178136 - RNA, 24 nt, Human
ugagccaacagagcugcuggcacc

SEQ ID NO: 1178137 - RNA, 25 nt, Human
ugccucaaccucccaaaguagcugg

SEQ ID NO: 1178138 - RNA, 24 nt, Human
ugccuccugggcucaagcgauccu

SEQ ID NO: 1178139 - RNA, 24 nt, Human
ugcucugucacccaggcuggagug

SEQ ID NO: 1178140 - RNA, 24 nt, Human
uggagucuugcaauguugccuagg

SEQ ID NO: 1178141 - RNA, 18 nt, Human
uggagugcagugguguga

SEQ ID NO: 1178142 - RNA, 24 nt, Human
uggagugcaguggugugagcaugg

SEQ ID NO: 1178143 - RNA, 21 nt, Human
uggagugcaguggugugagcc

SEQ ID NO: 1178144 - RNA, 20 nt, Human
uggcacgucuuuccuaugac

SEQ ID NO: 1178145 - RNA, 22 nt, Human
uggccugguaauggaaaagcug

SEQ ID NO: 1178146 - RNA, 21 nt, Human
ugggaccacaagcaugcacca

SEQ ID NO: 1178147 - RNA, 24 nt, Human
ugggaccacaagcaugcaccacaa

SEQ ID NO: 1178148 - RNA, 21 nt, Human
ugggauuacaggcgggagcca

SEQ ID NO: 1178149 - RNA, 22 nt, Human
ugggauuacaggcgggagccac

SEQ ID NO: 1178150 - RNA, 22 nt, Human
ugggauuacaggcgggagccac

SEQ ID NO: 1178151 - RNA, 22 nt, Human
ugggauuacaggcgggagccac

SEQ ID NO: 1178152 - RNA, 24 nt, Human
ugggauuacaggcgggagccacug

SEQ ID NO: 1178153 - RNA, 24 nt, Human
ugggcucaagcgauccuccugccu

SEQ ID NO: 1178154 - RNA, 18 nt, Human
ugguaauggaaaagcuga

SEQ ID NO: 1178155 - RNA, 24 nt, Human
uggugugagcauggcucacugcag

SEQ ID NO: 1178156 - RNA, 24 nt, Human
uguagagauggagucuugcaaugu

SEQ ID NO: 1178157 - RNA, 22 nt, Human
ugugaauguuuccuccacaacu

SEQ ID NO: 1178158 - RNA, 19 nt, Human
ugugagcauggcucacugc

SEQ ID NO: 1178159 - RNA, 23 nt, Human
uuaaugaagggauuauuggauga

SEQ ID NO: 1178160 - RNA, 25 nt, Human
uucaaccugccucaacuugagccaa

SEQ ID NO: 1178161 - RNA, 25 nt, Human
uuccuggcuguaacauuucuucacu

SEQ ID NO: 1178162 - RNA, 19 nt, Human
uugagggagaugucucuuu

SEQ ID NO: 1178163 - RNA, 24 nt, Human
uugcucugucacccaggcuggagu

SEQ ID NO: 1178164 - RNA, 24 nt, Human
uuguagagauggagucuugcaaug

SEQ ID NO: 1178165 - RNA, 20 nt, Human
uuuguagagauggagucuug

SEQ ID NO: 1178166 - RNA, 24 nt, Human
uuuuucuuuuuugagacaagaucu

SEQ ID NO: 1178167 - RNA, 21 nt, Human
uuuuuuguagagauggagucu

SEQ ID NO: 1178168 - RNA, 18 nt, Human
aaacaggaggcugggucu

SEQ ID NO: 1178169 - RNA, 23 nt, Human
aacuggccggccaccauaagggc

SEQ ID NO: 1178170 - RNA, 21 nt, Human
aagcaucacugaaggccccac

SEQ ID NO: 1178171 - RNA, 21 nt, Human
aagccaagaccauggccagaa

SEQ ID NO: 1178172 - RNA, 21 nt, Human
aagcccaggccuuccccucag

SEQ ID NO: 1178173 - RNA, 18 nt, Human
aaggccuccugccaccac

SEQ ID NO: 1178174 - RNA, 23 nt, Human
aaucuuacaacucaccaaggcug

SEQ ID NO: 1178175 - RNA, 23 nt, Human
aauggcuugaagacaaauauuac

SEQ ID NO: 1178176 - RNA, 23 nt, Human
accaacugccccugggcccucag

SEQ ID NO: 1178177 - RNA, 27 nt, Human
acugagcaccagcgaaaggccgggggc

SEQ ID NO: 1178178 - RNA, 23 nt, Human
acugcagcccaugcugccugcug

SEQ ID NO: 1178179 - RNA, 19 nt, Human
acugcuccgugccccuagc

SEQ ID NO: 1178180 - RNA, 20 nt, Human
acugggcgcaaggugggcac

SEQ ID NO: 1178181 - RNA, 24 nt, Human
agaauacuuugaccuggccaagaa

SEQ ID NO: 1178182 - RNA, 19 nt, Human
aggaaccaggccugucuuu

SEQ ID NO: 1178183 - RNA, 20 nt, Human
aggccuuccccucagugagg

SEQ ID NO: 1178184 - RNA, 21 nt, Human
aggcucccccguucauccacc

SEQ ID NO: 1178185 - RNA, 23 nt, Human
agguugcucagauuuaaggggca

SEQ ID NO: 1178186 - RNA, 21 nt, Human
caaagcacugaguaauuacgg

SEQ ID NO: 1178187 - RNA, 18 nt, Human
caaaggacacagaagggu

SEQ ID NO: 1178188 - RNA, 19 nt, Human
caacauuuacugcagccca

SEQ ID NO: 1178189 - RNA, 24 nt, Human
cacacugggcgcaaggugggcacu

SEQ ID NO: 1178190 - RNA, 22 nt, Human
cacagccagcccaggcccuucc

SEQ ID NO: 1178191 - RNA, 27 nt, Human
caccucugagccuuggcccgagggucc

SEQ ID NO: 1178192 - RNA, 21 nt, Human
caccugcccuuggcucuucug

SEQ ID NO: 1178193 - RNA, 18 nt, Human
cacugagcuccuucuggc

SEQ ID NO: 1178194 - RNA, 26 nt, Human
cacugagcuccuucuggccgaagcuc

SEQ ID NO: 1178195 - RNA, 19 nt, Human
cacugggcgcaaggugggc

SEQ ID NO: 1178196 - RNA, 19 nt, Human
cagcccaugcugccugcug

SEQ ID NO: 1178197 - RNA, 23 nt, Human
cagcccucccccgggaagccaag

SEQ ID NO: 1178198 - RNA, 18 nt, Human
cagcucccauuguccucu

SEQ ID NO: 1178199 - RNA, 22 nt, Human
caguuguggcugagaucuccag

SEQ ID NO: 1178200 - RNA, 20 nt, Human
caucagcucccauuguccuc

SEQ ID NO: 1178201 - RNA, 20 nt, Human
caucagcucccauuguccuc

SEQ ID NO: 1178202 - RNA, 21 nt, Human
cauggccagaauacuuugacc

SEQ ID NO: 1178203 - RNA, 18 nt, Human
ccaagauggcugguccug

SEQ ID NO: 1178204 - RNA, 23 nt, Human
ccacagcuaggaaccaggccugu

SEQ ID NO: 1178205 - RNA, 22 nt, Human
ccacaggcucugcagccgggcc

SEQ ID NO: 1178206 - RNA, 22 nt, Human
ccagcccaggcccuuccgggac

SEQ ID NO: 1178207 - RNA, 20 nt, Human
ccccacagcuaggaaccagg

SEQ ID NO: 1178208 - RNA, 22 nt, Human
ccccuagcggcuggcucagccu

SEQ ID NO: 1178209 - RNA, 19 nt, Human
cccugggcccucagagccc

SEQ ID NO: 1178210 - RNA, 19 nt, Human
cccugggcccucagagccc

SEQ ID NO: 1178211 - RNA, 23 nt, Human
cccuuugccugccugcuccaaca

SEQ ID NO: 1178212 - RNA, 29 nt, Human
ccgacgguggcuggcgggggugguccuuu

SEQ ID NO: 1178213 - RNA, 19 nt, Human
ccguccaaggccuccugcc

SEQ ID NO: 1178214 - RNA, 22 nt, Human
ccucuaucccagccgccucccu

SEQ ID NO: 1178215 - RNA, 22 nt, Human
ccugggagaacagcccuccccc

SEQ ID NO: 1178216 - RNA, 21 nt, Human
ccugggguucaagcaucacug

SEQ ID NO: 1178217 - RNA, 22 nt, Human
ccugugcuguuccaccuaaggc

SEQ ID NO: 1178218 - RNA, 18 nt, Human
cgagaaggcccaugggca

SEQ ID NO: 1178219 - RNA, 19 nt, Human
cgccaggaucucagggggg

SEQ ID NO: 1178220 - RNA, 23 nt, Human
cguccaaggccuccugccaccac

SEQ ID NO: 1178221 - RNA, 22 nt, Human
cucagccuauuaaacaggaggc

SEQ ID NO: 1178222 - RNA, 22 nt, Human
cugagcaccagcgaaaggccgg

SEQ ID NO: 1178223 - RNA, 23 nt, Human
cugcaacauuuacugcagcccau

SEQ ID NO: 1178224 - RNA, 25 nt, Human
cugccccugggcccucagagccccu

SEQ ID NO: 1178225 - RNA, 20 nt, Human
cuuacaacucaccaaggcug

SEQ ID NO: 1178226 - RNA, 24 nt, Human
gaacagcccucccccgggaagcca

SEQ ID NO: 1178227 - RNA, 20 nt, Human
gaccauggccagaauacuuu

SEQ ID NO: 1178228 - RNA, 22 nt, Human
gauacccuucccagccccacag

SEQ ID NO: 1178229 - RNA, 19 nt, Human
gccaccaccgcccacccua

SEQ ID NO: 1178230 - RNA, 23 nt, Human
gcucccauuguccucugccgggu

SEQ ID NO: 1178231 - RNA, 21 nt, Human
gcugcuggcaggccaugucca

SEQ ID NO: 1178232 - RNA, 18 nt, Human
ggagaacagcccuccccc

SEQ ID NO: 1178233 - RNA, 22 nt, Human
ggagaacagcccucccccgguc

SEQ ID NO: 1178234 - RNA, 20 nt, Human
ggcagggcgcugugagggcc

SEQ ID NO: 1178235 - RNA, 20 nt, Human
ggcuggcucagccuggcucg

SEQ ID NO: 1178236 - RNA, 18 nt, Human
gggacgcuugggcucagc

SEQ ID NO: 1178237 - RNA, 18 nt, Human
gggccuccagacuccucu

SEQ ID NO: 1178238 - RNA, 21 nt, Human
gguaauggggagcaaggggga

SEQ ID NO: 1178239 - RNA, 19 nt, Human
uaagagugagcaccuugga

SEQ ID NO: 1178240 - RNA, 20 nt, Human
uaccucccuucugcucaacc

SEQ ID NO: 1178241 - RNA, 19 nt, Human
uagaacaaggcaaagccag

SEQ ID NO: 1178242 - RNA, 23 nt, Human
uagcggcuggcucagccuggcuc

SEQ ID NO: 1178243 - RNA, 18 nt, Human
uaucaaaaugggaggguc

SEQ ID NO: 1178244 - RNA, 20 nt, Human
uaucccagccgccucccugc

SEQ ID NO: 1178245 - RNA, 18 nt, Human
uauuacaccaacugggca

SEQ ID NO: 1178246 - RNA, 19 nt, Human
ucacagucagcauccagga

SEQ ID NO: 1178247 - RNA, 25 nt, Human
ucagagccccuuuagggagcucucu

SEQ ID NO: 1178248 - RNA, 24 nt, Human
ucagccuggcucggggggccucca

SEQ ID NO: 1178249 - RNA, 24 nt, Human
ucccauuguccucugccggguucc

SEQ ID NO: 1178250 - RNA, 20 nt, Human
ucccugcaacgagaaggccc

SEQ ID NO: 1178251 - RNA, 24 nt, Human
ucccugcaacgagaaggcccaugg

SEQ ID NO: 1178252 - RNA, 18 nt, Human
uccgugccccuagcggcu

SEQ ID NO: 1178253 - RNA, 20 nt, Human
uccugagcacugggccacag

SEQ ID NO: 1178254 - RNA, 28 nt, Human
ucucugcaggcaaaggacacagaagggu

SEQ ID NO: 1178255 - RNA, 23 nt, Human
ucuucacagucagcauccaggaa

SEQ ID NO: 1178256 - RNA, 22 nt, Human
ugaggaucuaggggauccuggc

SEQ ID NO: 1178257 - RNA, 21 nt, Human
ugagggacgcuugggcucagc

SEQ ID NO: 1178258 - RNA, 18 nt, Human
ugagugaggccugccugc

SEQ ID NO: 1178259 - RNA, 19 nt, Human
ugccacaggcucugcagcc

SEQ ID NO: 1178260 - RNA, 24 nt, Human
ugcccuuggcucuucuggagucuu

SEQ ID NO: 1178261 - RNA, 21 nt, Human
ugccugccacaggcucugcag

SEQ ID NO: 1178262 - RNA, 24 nt, Human
ugccugccugcuccaacaauggcu

SEQ ID NO: 1178263 - RNA, 25 nt, Human
ugcuccgugccccuagcggcuggcu

SEQ ID NO: 1178264 - RNA, 19 nt, Human
uggagucugaagccugggg

SEQ ID NO: 1178265 - RNA, 24 nt, Human
uggccagaauacuuugaccuggcc

SEQ ID NO: 1178266 - RNA, 22 nt, Human
uggccucuaucccagccgccuc

SEQ ID NO: 1178267 - RNA, 23 nt, Human
uggcucagccuggcucggggggc

SEQ ID NO: 1178268 - RNA, 22 nt, Human
uggcugguccugagcacugggg

SEQ ID NO: 1178269 - RNA, 23 nt, Human
ugucagauacccuucccagcccc

SEQ ID NO: 1178270 - RNA, 24 nt, Human
uguuggauucgcaucugagggacg

SEQ ID NO: 1178271 - RNA, 22 nt, Human
uucaagcaucacugaaggcccc

SEQ ID NO: 1178272 - RNA, 18 nt, Human
uucuggagucugaagccu

SEQ ID NO: 1178273 - RNA, 24 nt, Human
uucuggccgaagcucuggccacac

SEQ ID NO: 1178274 - RNA, 23 nt, Human
aaaaaaaaacaaaaaacaaaaaa

SEQ ID NO: 1178275 - RNA, 26 nt, Human
aaaaacaaaacagguuugcaauuaaa

SEQ ID NO: 1178276 - RNA, 19 nt, Human
aaacaaaaaacaaaacagg

SEQ ID NO: 1178277 - RNA, 21 nt, Human
aaacccagccucgcgagcugu

SEQ ID NO: 1178278 - RNA, 23 nt, Human
aaacuaccacacaaagugaacag

SEQ ID NO: 1178279 - RNA, 22 nt, Human
aagccacuuggcccccaaaccc

SEQ ID NO: 1178280 - RNA, 18 nt, Human
aauggcccucacugccca

SEQ ID NO: 1178281 - RNA, 25 nt, Human
acaagcagaaguuccuuugaggccu

SEQ ID NO: 1178282 - RNA, 20 nt, Human
acagguacaaaauauacagu

SEQ ID NO: 1178283 - RNA, 19 nt, Human
accccauccccaggaguca

SEQ ID NO: 1178284 - RNA, 22 nt, Human
acgcugaggccacaaguccagu

SEQ ID NO: 1178285 - RNA, 22 nt, Human
agacguuuguggugcagcuccc

SEQ ID NO: 1178286 - RNA, 18 nt, Human
agagggaaaaccuggaaa

SEQ ID NO: 1178287 - RNA, 21 nt, Human
agaugcuggaaugaacaagcc

SEQ ID NO: 1178288 - RNA, 20 nt, Human
agauggcccaaaauagagaa

SEQ ID NO: 1178289 - RNA, 24 nt, Human
agccacuuggcccccaaacccagc

SEQ ID NO: 1178290 - RNA, 19 nt, Human
aggagaggcaagcugggaa

SEQ ID NO: 1178291 - RNA, 22 nt, Human
aggcugagguguguccccucug

SEQ ID NO: 1178292 - RNA, 21 nt, Human
agguuggggugggcggccagg

SEQ ID NO: 1178293 - RNA, 23 nt, Human
aguaccuacaaaauuuaaauagc

SEQ ID NO: 1178294 - RNA, 23 nt, Human
agugggaggcagccccagguugg

SEQ ID NO: 1178295 - RNA, 20 nt, Human
auagaaacaauuuucuuaac

SEQ ID NO: 1178296 - RNA, 21 nt, Human
auagugacagaaaugcacgcc

SEQ ID NO: 1178297 - RNA, 21 nt, Human
augaggcaucucgccuguugc

SEQ ID NO: 1178298 - RNA, 20 nt, Human
auuucagacaacucguccuu

SEQ ID NO: 1178299 - RNA, 22 nt, Human
caaaaaacaaaaaacaaaacag

SEQ ID NO: 1178300 - RNA, 23 nt, Human
caaaaaacaaaaaacaaaacagg

SEQ ID NO: 1178301 - RNA, 18 nt, Human
caacaaaacaggaaugga

SEQ ID NO: 1178302 - RNA, 22 nt, Human
caagaaaucugggcccaccuuu

SEQ ID NO: 1178303 - RNA, 21 nt, Human
caagcagaaguuccuuugagg

SEQ ID NO: 1178304 - RNA, 19 nt, Human
cacagauggcccaaaauag

SEQ ID NO: 1178305 - RNA, 19 nt, Human
caccaagugcccuugggac

SEQ ID NO: 1178306 - RNA, 21 nt, Human
caccuccucuuccuggacuuc

SEQ ID NO: 1178307 - RNA, 19 nt, Human
cacgugcggccggcagggg

SEQ ID NO: 1178308 - RNA, 23 nt, Human
cacucagcccaacugggcagagc

SEQ ID NO: 1178309 - RNA, 20 nt, Human
cagcacaggguccuggcugg

SEQ ID NO: 1178310 - RNA, 25 nt, Human
cagcacuuuuggggggccuuuucag

SEQ ID NO: 1178311 - RNA, 26 nt, Human
cagcacuuuuggggggccuuuucagg

SEQ ID NO: 1178312 - RNA, 21 nt, Human
cagccucgcgagcugugcccu

SEQ ID NO: 1178313 - RNA, 20 nt, Human
caggucccuccgucugcagg

SEQ ID NO: 1178314 - RNA, 29 nt, Human
cccaaacccagccucgcgagccgguuccg

SEQ ID NO: 1178315 - RNA, 22 nt, Human
cccagcucugcugagagcuaga

SEQ ID NO: 1178316 - RNA, 23 nt, Human
ccccaaacccagccucgcgagcu

SEQ ID NO: 1178317 - RNA, 24 nt, Human
cccccaaacccagccucgcgagcu

SEQ ID NO: 1178318 - RNA, 24 nt, Human
cccgccaucggugggucccaggac

SEQ ID NO: 1178319 - RNA, 19 nt, Human
ccugaagcuuccacgccgc

SEQ ID NO: 1178320 - RNA, 24 nt, Human
ccugcacacggggcuuuuuacacg

SEQ ID NO: 1178321 - RNA, 21 nt, Human
ccuggaaaucucuguucaccc

SEQ ID NO: 1178322 - RNA, 22 nt, Human
ccuguccugcugcuucccaagg

SEQ ID NO: 1178323 - RNA, 22 nt, Human
cgcuaggcccacucagcccaac

SEQ ID NO: 1178324 - RNA, 19 nt, Human
cgcugaggccacaagucca

SEQ ID NO: 1178325 - RNA, 19 nt, Human
cggcgucgggaguggcugg

SEQ ID NO: 1178326 - RNA, 26 nt, Human
cucaagaauuaaaaaaaaacaaaaaa

SEQ ID NO: 1178327 - RNA, 24 nt, Human
cucccauuucacagagaauucuac

SEQ ID NO: 1178328 - RNA, 20 nt, Human
cucgcgagcugugcccucug

SEQ ID NO: 1178329 - RNA, 19 nt, Human
cucuaggucaguaggaugu

SEQ ID NO: 1178330 - RNA, 21 nt, Human
cugggcccaccuuuaugaugu

SEQ ID NO: 1178331 - RNA, 18 nt, Human
cuuggcccccaaacccag

SEQ ID NO: 1178332 - RNA, 19 nt, Human
cuuugcucccagcucugcu

SEQ ID NO: 1178333 - RNA, 18 nt, Human
gaaaaccuggaaaucucu

SEQ ID NO: 1178334 - RNA, 18 nt, Human
gaaaaguuggggccagca

SEQ ID NO: 1178335 - RNA, 21 nt, Human
gaaguuccuuugaggccuggu

SEQ ID NO: 1178336 - RNA, 21 nt, Human
gagcaguuugcaccucuaaaa

SEQ ID NO: 1178337 - RNA, 18 nt, Human
gaggcagccccagguugg

SEQ ID NO: 1178338 - RNA, 19 nt, Human
gaggcggcugcuacaagca

SEQ ID NO: 1178339 - RNA, 21 nt, Human
gauaguuucucuuucuccagu

SEQ ID NO: 1178340 - RNA, 19 nt, Human
gcacacacaggaccccauc

SEQ ID NO: 1178341 - RNA, 21 nt, Human
gcagccccagguugggguggg

SEQ ID NO: 1178342 - RNA, 22 nt, Human
gcccaggggcuuggugcgcuag

SEQ ID NO: 1178343 - RNA, 21 nt, Human
gcccccaaacccagccucgcg

SEQ ID NO: 1178344 - RNA, 18 nt, Human
gcccugaaaaccaaaagu

SEQ ID NO: 1178345 - RNA, 21 nt, Human
gcuauggggcuggaggcgcuc

SEQ ID NO: 1178346 - RNA, 24 nt, Human
gcuggggcacaggggaggcggcug

SEQ ID NO: 1178347 - RNA, 21 nt, Human
ggaaacaagaggaccaguggc

SEQ ID NO: 1178348 - RNA, 20 nt, Human
ggacgcugaggccacaaguc

SEQ ID NO: 1178349 - RNA, 20 nt, Human
ggcccaaaauagagaaaagu

SEQ ID NO: 1178350 - RNA, 22 nt, Human
ggccuuuucaggagaggcaagc

SEQ ID NO: 1178351 - RNA, 22 nt, Human
ggcucucgcagccccagcacag

SEQ ID NO: 1178352 - RNA, 18 nt, Human
gggcacaggggaggcggc

SEQ ID NO: 1178353 - RNA, 22 nt, Human
ggguaccacagauggcccaaaa

SEQ ID NO: 1178354 - RNA, 23 nt, Human
gguccuggcuggggaaggagcug

SEQ ID NO: 1178355 - RNA, 21 nt, Human
gguggauaguuucucuuucuc

SEQ ID NO: 1178356 - RNA, 19 nt, Human
guguaaacagguacaaaag

SEQ ID NO: 1178357 - RNA, 24 nt, Human
uaaaaaaaaacaaaaaacaaaaaa

SEQ ID NO: 1178358 - RNA, 23 nt, Human
uaaaaagaaaucccuguccugcu

SEQ ID NO: 1178359 - RNA, 20 nt, Human
uaaaauucuacggcgcuccc

SEQ ID NO: 1178360 - RNA, 23 nt, Human
uagaaugaggcaucucgccuguu

SEQ ID NO: 1178361 - RNA, 21 nt, Human
ucacaaggucuguggaggccc

SEQ ID NO: 1178362 - RNA, 20 nt, Human
ucaggccgggcgggcucucg

SEQ ID NO: 1178363 - RNA, 21 nt, Human
ucaguuauaucaauauuagaa

SEQ ID NO: 1178364 - RNA, 20 nt, Human
uccaagggacccaauggccc

SEQ ID NO: 1178365 - RNA, 20 nt, Human
uccacgccgcccugcugccu

SEQ ID NO: 1178366 - RNA, 18 nt, Human
ucccaggcuccuuccugg

SEQ ID NO: 1178367 - RNA, 22 nt, Human
uccgucugcaggggaaacaaga

SEQ ID NO: 1178368 - RNA, 18 nt, Human
uccuggcuggggaaggag

SEQ ID NO: 1178369 - RNA, 21 nt, Human
uccugggcaggacuagggaag

SEQ ID NO: 1178370 - RNA, 20 nt, Human
uccuuuggaggcggggcucu

SEQ ID NO: 1178371 - RNA, 22 nt, Human
uccuuuggaggcggggcucuug

SEQ ID NO: 1178372 - RNA, 21 nt, Human
ugaaugggcacugccaggucc

SEQ ID NO: 1178373 - RNA, 18 nt, Human
ugacagaaaugcacgccc

SEQ ID NO: 1178374 - RNA, 22 nt, Human
ugagccucuaggucaggacccu

SEQ ID NO: 1178375 - RNA, 19 nt, Human
ugcaaccgcuacucccgga

SEQ ID NO: 1178376 - RNA, 21 nt, Human
ugcccuggcuuucccaggcuc

SEQ ID NO: 1178377 - RNA, 18 nt, Human
ugccugaagcuuccacgc

SEQ ID NO: 1178378 - RNA, 19 nt, Human
ugcgcuaggcccacucagc

SEQ ID NO: 1178379 - RNA, 20 nt, Human
ugcuacaagcagaaguuccu

SEQ ID NO: 1178380 - RNA, 25 nt, Human
uggaaugaacaagccacuuggcccc

SEQ ID NO: 1178381 - RNA, 20 nt, Human
uggcagcuguccugguggau

SEQ ID NO: 1178382 - RNA, 23 nt, Human
ugggccagggguccccaacuggc

SEQ ID NO: 1178383 - RNA, 21 nt, Human
uucacagagaauucuacuugg

SEQ ID NO: 1178384 - RNA, 19 nt, Human
uuccacgccgcccugcugc

SEQ ID NO: 1178385 - RNA, 23 nt, Human
uuccuggacuucuguuuuuauua

SEQ ID NO: 1178386 - RNA, 21 nt, Human
uuucccaggcuccuuccuggg

SEQ ID NO: 1178387 - RNA, 24 nt, Human
uuugcaauuaaauuacuuaaaauu

SEQ ID NO: 1178388 - RNA, 21 nt, Human
uuuuggggggccuuuucagga

SEQ ID NO: 1178389 - RNA, 20 nt, Human
aacaaggcugcaccccaccc

SEQ ID NO: 1178390 - RNA, 23 nt, Human
aaccaacaaggcugcaccccacc

SEQ ID NO: 1178391 - RNA, 25 nt, Human
accccacccguuaucucccaagcua

SEQ ID NO: 1178392 - RNA, 20 nt, Human
acgcugcaaccaacaaggcu

SEQ ID NO: 1178393 - RNA, 19 nt, Human
aggcugcaccccacccguu

SEQ ID NO: 1178394 - RNA, 25 nt, Human
aucacagccacacacggcugccuug

SEQ ID NO: 1178395 - RNA, 22 nt, Human
cacacacggcugccaggcagcg

SEQ ID NO: 1178396 - RNA, 25 nt, Human
cacccguuaucucccaagcuaccuc

SEQ ID NO: 1178397 - RNA, 26 nt, Human
caccgggcacaggcagucacugccgg

SEQ ID NO: 1178398 - RNA, 20 nt, Human
cacgcugcaaccaacaaggc

SEQ ID NO: 1178399 - RNA, 23 nt, Human
cacucugucacccccagcaugca

SEQ ID NO: 1178400 - RNA, 19 nt, Human
cagccuguggcauuccugg

SEQ ID NO: 1178401 - RNA, 22 nt, Human
cagcgcagauagaauggcucuu

SEQ ID NO: 1178402 - RNA, 23 nt, Human
ccaagcuaccucuucacccccac

SEQ ID NO: 1178403 - RNA, 22 nt, Human
ccacauucuuccucuugcccca

SEQ ID NO: 1178404 - RNA, 24 nt, Human
ccagcaugcacgcugcaaccaaca

SEQ ID NO: 1178405 - RNA, 19 nt, Human
ccccaaaggucgcugcccu

SEQ ID NO: 1178406 - RNA, 23 nt, Human
ccccaaaggucgcugcccucacc

SEQ ID NO: 1178407 - RNA, 23 nt, Human
ccccacccguuaucucccaagcu

SEQ ID NO: 1178408 - RNA, 21 nt, Human
ccuaaagugccccacgaccga

SEQ ID NO: 1178409 - RNA, 23 nt, Human
cggcugccaggcagcgcagauag

SEQ ID NO: 1178410 - RNA, 23 nt, Human
cugcaaccaacaaggcugcaccc

SEQ ID NO: 1178411 - RNA, 21 nt, Human
cugccgggaucacagccacac

SEQ ID NO: 1178412 - RNA, 21 nt, Human
gcucuuuguccaccagccugu

SEQ ID NO: 1178413 - RNA, 23 nt, Human
ggcugcaccccacccguuaucuc

SEQ ID NO: 1178414 - RNA, 22 nt, Human
ucuuccucuugccccaaagguc

SEQ ID NO: 1178415 - RNA, 23 nt, Human
ugcaaccaacaaggcugcacccc

SEQ ID NO: 1178416 - RNA, 24 nt, Human
uucuuccucuugccccaaaggucg

SEQ ID NO: 1178417 - RNA, 21 nt, Human
uuguccaccagccuguggcau

SEQ ID NO: 1178418 - RNA, 23 nt, Human
aaacacacacauuagccuaagcc

SEQ ID NO: 1178419 - RNA, 25 nt, Human
aaacagaaguggcaaaaagcaugcc

SEQ ID NO: 1178420 - RNA, 22 nt, Human
aaacagaaguggcaaaagggac

SEQ ID NO: 1178421 - RNA, 21 nt, Human
aaagccucuugcccaaagcca

SEQ ID NO: 1178422 - RNA, 22 nt, Human
aaaucaacuucaaaucacugau

SEQ ID NO: 1178423 - RNA, 26 nt, Human
aaccuagaaacagaaguggcaaaaag

SEQ ID NO: 1178424 - RNA, 21 nt, Human
aaccucauuauccuuuucucc

SEQ ID NO: 1178425 - RNA, 23 nt, Human
aagacacaaacacacacauuagc

SEQ ID NO: 1178426 - RNA, 18 nt, Human
aagccucugacugaacag

SEQ ID NO: 1178427 - RNA, 22 nt, Human
aagcuaaugugcccacaaccac

SEQ ID NO: 1178428 - RNA, 21 nt, Human
acagggucaggaucaugaaga

SEQ ID NO: 1178429 - RNA, 21 nt, Human
accaauaucaaucccaauauu

SEQ ID NO: 1178430 - RNA, 21 nt, Human
agaaacagaaguggcaaaaag

SEQ ID NO: 1178431 - RNA, 21 nt, Human
agagaauucuccucugugcca

SEQ ID NO: 1178432 - RNA, 22 nt, Human
aggaaaaacuacagcaucaaaa

SEQ ID NO: 1178433 - RNA, 22 nt, Human
aggaauuucucagccccacugu

SEQ ID NO: 1178434 - RNA, 21 nt, Human
aggcugccacugucuccaagc

SEQ ID NO: 1178435 - RNA, 19 nt, Human
agggagggagcgcggccca

SEQ ID NO: 1178436 - RNA, 21 nt, Human
augcagccgccgcgaccgccc

SEQ ID NO: 1178437 - RNA, 19 nt, Human
caaagccaauuuaugacac

SEQ ID NO: 1178438 - RNA, 26 nt, Human
cacacacauuagccuaagccuacaca

SEQ ID NO: 1178439 - RNA, 23 nt, Human
caccuuuucuuccaacucaaagc

SEQ ID NO: 1178440 - RNA, 22 nt, Human
cagaguccuuccuagucuuccc

SEQ ID NO: 1178441 - RNA, 21 nt, Human
cagcaucaaaagaaccucauu

SEQ ID NO: 1178442 - RNA, 20 nt, Human
cagccgccgcgaccgccccg

SEQ ID NO: 1178443 - RNA, 18 nt, Human
caggaaaaacuacagcau

SEQ ID NO: 1178444 - RNA, 21 nt, Human
cauggccccgcuuucggaggc

SEQ ID NO: 1178445 - RNA, 23 nt, Human
cccaagaggcugccacugucucc

SEQ ID NO: 1178446 - RNA, 21 nt, Human
cccaagcacuuucuuuccacc

SEQ ID NO: 1178447 - RNA, 25 nt, Human
ccccggggacccaggcucccggagg

SEQ ID NO: 1178448 - RNA, 22 nt, Human
ccccuccccccgcggccuggcc

SEQ ID NO: 1178449 - RNA, 20 nt, Human
ccgcccccaagcacuuucuu

SEQ ID NO: 1178450 - RNA, 21 nt, Human
ccgcccccaagcacuuucuuu

SEQ ID NO: 1178451 - RNA, 18 nt, Human
ccgccgcgaccgccccgg

SEQ ID NO: 1178452 - RNA, 23 nt, Human
ccggagggggagggcacccaggu

SEQ ID NO: 1178453 - RNA, 21 nt, Human
ccgugccgcccccuccccccg

SEQ ID NO: 1178454 - RNA, 19 nt, Human
ccuacauuuugcuucucuu

SEQ ID NO: 1178455 - RNA, 19 nt, Human
ccucgcccgagcccggcuc

SEQ ID NO: 1178456 - RNA, 22 nt, Human
ccuuccaguccuaccuuccccg

SEQ ID NO: 1178457 - RNA, 18 nt, Human
cgaaaacguuuguugaga

SEQ ID NO: 1178458 - RNA, 23 nt, Human
cgcccccuccccccgcggccugg

SEQ ID NO: 1178459 - RNA, 18 nt, Human
cgccccgccucgcccgag

SEQ ID NO: 1178460 - RNA, 23 nt, Human
cgccccggggacccaggcucccg

SEQ ID NO: 1178461 - RNA, 19 nt, Human
cggaggcccgugccgcccc

SEQ ID NO: 1178462 - RNA, 23 nt, Human
cggcccccgggccuuccaguccu

SEQ ID NO: 1178463 - RNA, 19 nt, Human
cgggagggagcgggcggcc

SEQ ID NO: 1178464 - RNA, 23 nt, Human
cgggagggagcgggcggcccccg

SEQ ID NO: 1178465 - RNA, 19 nt, Human
cggggccuccgcccgagcc

SEQ ID NO: 1178466 - RNA, 22 nt, Human
cgugccgcccccuccccccgcg

SEQ ID NO: 1178467 - RNA, 19 nt, Human
cucccggagggggagggca

SEQ ID NO: 1178468 - RNA, 19 nt, Human
cucuugcccaaagccaauu

SEQ ID NO: 1178469 - RNA, 21 nt, Human
gagaauucuccucugugccaa

SEQ ID NO: 1178470 - RNA, 22 nt, Human
gagggcacccagguagggaggg

SEQ ID NO: 1178471 - RNA, 23 nt, Human
gccccgccucgcccgagcccggc

SEQ ID NO: 1178472 - RNA, 21 nt, Human
gccccgcuuucggaggcccgu

SEQ ID NO: 1178473 - RNA, 20 nt, Human
gccgcgaccgccccggggac

SEQ ID NO: 1178474 - RNA, 19 nt, Human
gcgcggcccaagaacuucg

SEQ ID NO: 1178475 - RNA, 22 nt, Human
gcggcccccgggccuuccaguc

SEQ ID NO: 1178476 - RNA, 20 nt, Human
ggacccaggcucccggaggg

SEQ ID NO: 1178477 - RNA, 19 nt, Human
ggagcgggcggcccccggg

SEQ ID NO: 1178478 - RNA, 18 nt, Human
ggccuggaagcgcuggca

SEQ ID NO: 1178479 - RNA, 23 nt, Human
gggccuuccaguccuaccuuccc

SEQ ID NO: 1178480 - RNA, 19 nt, Human
gggggcgguagcgccggug

SEQ ID NO: 1178481 - RNA, 20 nt, Human
gggggcgguagcgccggugg

SEQ ID NO: 1178482 - RNA, 21 nt, Human
guucaaugcaaaucacagauc

SEQ ID NO: 1178483 - RNA, 20 nt, Human
uaaaaccuaagacacaaacu

SEQ ID NO: 1178484 - RNA, 21 nt, Human
uaagaaacaauacucaagaac

SEQ ID NO: 1178485 - RNA, 19 nt, Human
uaagaaagccucugacuga

SEQ ID NO: 1178486 - RNA, 20 nt, Human
uacaugcaucacuguagcuu

SEQ ID NO: 1178487 - RNA, 20 nt, Human
uacucaagaacuggcagcaa

SEQ ID NO: 1178488 - RNA, 24 nt, Human
uacucaagaacuggcagcaaacaa

SEQ ID NO: 1178489 - RNA, 21 nt, Human
uagcgccgguggacccaggau

SEQ ID NO: 1178490 - RNA, 23 nt, Human
ucaaagccucuugcccaaagcca

SEQ ID NO: 1178491 - RNA, 22 nt, Human
ucagaguccuuccuagucuucc

SEQ ID NO: 1178492 - RNA, 18 nt, Human
uccagaaagauguuaguc

SEQ ID NO: 1178493 - RNA, 24 nt, Human
uccagaaagauguuagucccaaga

SEQ ID NO: 1178494 - RNA, 26 nt, Human
uccaugaaguacauaaccuagaaacc

SEQ ID NO: 1178495 - RNA, 24 nt, Human
ucccaagaggcugccacugucucc

SEQ ID NO: 1178496 - RNA, 20 nt, Human
uccccgacucucugggcucc

SEQ ID NO: 1178497 - RNA, 22 nt, Human
uccccgacucucugggcuccau

SEQ ID NO: 1178498 - RNA, 23 nt, Human
uccuauuuauccucauacuucca

SEQ ID NO: 1178499 - RNA, 21 nt, Human
uccucauacuuccagcaucuc

SEQ ID NO: 1178500 - RNA, 21 nt, Human
uccucauacuuccagcaucuc

SEQ ID NO: 1178501 - RNA, 20 nt, Human
ucgcucucucacgucggggg

SEQ ID NO: 1178502 - RNA, 18 nt, Human
ucucugggcuccauggcc

SEQ ID NO: 1178503 - RNA, 18 nt, Human
ucuuggaugacacggccu

SEQ ID NO: 1178504 - RNA, 19 nt, Human
ugaacuccgcccccaagcc

SEQ ID NO: 1178505 - RNA, 21 nt, Human
ugagagaauucuccucugugc

SEQ ID NO: 1178506 - RNA, 21 nt, Human
ugcccagauauuccaugaagu

SEQ ID NO: 1178507 - RNA, 18 nt, Human
uggcaaaaagcaugccag

SEQ ID NO: 1178508 - RNA, 21 nt, Human
uggcagcaaacaacauccaga

SEQ ID NO: 1178509 - RNA, 22 nt, Human
uggcagcaaacaacauccagaa

SEQ ID NO: 1178510 - RNA, 25 nt, Human
uggcuuggaccacguacucuguagg

SEQ ID NO: 1178511 - RNA, 20 nt, Human
uguuauacagcgcaugaccg

SEQ ID NO: 1178512 - RNA, 21 nt, Human
uguugagagaauucuccucug

SEQ ID NO: 1178513 - RNA, 23 nt, Human
uguugagagaauucuccucugug

SEQ ID NO: 1178514 - RNA, 18 nt, Human
uuagucccaagaggcugc

SEQ ID NO: 1178515 - RNA, 21 nt, Human
uuccccgacucucugggcucc

SEQ ID NO: 1178516 - RNA, 22 nt, Human
uucucagccccacuguagucuc

SEQ ID NO: 1178517 - RNA, 20 nt, Human
uucucuuuauucaaauucag

SEQ ID NO: 1178518 - RNA, 21 nt, Human
aaaaggccuugccuauaaccc

SEQ ID NO: 1178519 - RNA, 18 nt, Human
aaaccugcacugugcucg

SEQ ID NO: 1178520 - RNA, 20 nt, Human
aaagaccccuggagcuuggg

SEQ ID NO: 1178521 - RNA, 21 nt, Human
aaauccacccccacugcagcc

SEQ ID NO: 1178522 - RNA, 20 nt, Human
aacacccuuacccaacagga

SEQ ID NO: 1178523 - RNA, 19 nt, Human
aagaccccuggagcuuggg

SEQ ID NO: 1178524 - RNA, 20 nt, Human
aaugcccgcugaacaggaug

SEQ ID NO: 1178525 - RNA, 21 nt, Human
acacagcaaagggugccaaca

SEQ ID NO: 1178526 - RNA, 19 nt, Human
acgcagcgggagggcgguc

SEQ ID NO: 1178527 - RNA, 18 nt, Human
agaaaggccccagcggcg

SEQ ID NO: 1178528 - RNA, 21 nt, Human
agagggaguguagggggagga

SEQ ID NO: 1178529 - RNA, 20 nt, Human
agcaggaugguggcagagcu

SEQ ID NO: 1178530 - RNA, 20 nt, Human
agcccaagucagagccaaac

SEQ ID NO: 1178531 - RNA, 22 nt, Human
agcgugagggcaaggcuggaga

SEQ ID NO: 1178532 - RNA, 21 nt, Human
aggaccugccuaggagcccac

SEQ ID NO: 1178533 - RNA, 20 nt, Human
aggcccccccaguucccagc

SEQ ID NO: 1178534 - RNA, 19 nt, Human
aggcuggggucgggggagg

SEQ ID NO: 1178535 - RNA, 19 nt, Human
agggagguccagguggcag

SEQ ID NO: 1178536 - RNA, 19 nt, Human
agggcaaggcuggagaggu

SEQ ID NO: 1178537 - RNA, 19 nt, Human
aggguccgcgucagccccg

SEQ ID NO: 1178538 - RNA, 22 nt, Human
agggugccaacaucuaggacug

SEQ ID NO: 1178539 - RNA, 24 nt, Human
agguuuucagcacaagucacacuc

SEQ ID NO: 1178540 - RNA, 18 nt, Human
auacucugaggagacaca

SEQ ID NO: 1178541 - RNA, 20 nt, Human
auccacccccacugcagcca

SEQ ID NO: 1178542 - RNA, 23 nt, Human
auccuauucuccugcugcuccaa

SEQ ID NO: 1178543 - RNA, 20 nt, Human
caaaagcccaagucagagcc

SEQ ID NO: 1178544 - RNA, 22 nt, Human
caaaagcccaagucagagccaa

SEQ ID NO: 1178545 - RNA, 23 nt, Human
caaaagcccaagucagagccaaa

SEQ ID NO: 1178546 - RNA, 19 nt, Human
caacaggaggggcgacgga

SEQ ID NO: 1178547 - RNA, 20 nt, Human
cacagagcccagggccaggg

SEQ ID NO: 1178548 - RNA, 21 nt, Human
cacgccgcauucuuauuucca

SEQ ID NO: 1178549 - RNA, 18 nt, Human
cacucaacacccuuaccc

SEQ ID NO: 1178550 - RNA, 21 nt, Human
cagagcccagggccagggggc

SEQ ID NO: 1178551 - RNA, 20 nt, Human
cagccugagcccugagcagc

SEQ ID NO: 1178552 - RNA, 23 nt, Human
cagggggcagagggcggggcugg

SEQ ID NO: 1178553 - RNA, 23 nt, Human
cauccuauucuccugcugcucca

SEQ ID NO: 1178554 - RNA, 19 nt, Human
caucuggacccacaugacu

SEQ ID NO: 1178555 - RNA, 24 nt, Human
ccaauagaggcccccccaguuccc

SEQ ID NO: 1178556 - RNA, 19 nt, Human
ccacugagggagguccagg

SEQ ID NO: 1178557 - RNA, 25 nt, Human
ccagcggucuuucggggcguccccu

SEQ ID NO: 1178558 - RNA, 20 nt, Human
ccaggacuagcgagcggcgg

SEQ ID NO: 1178559 - RNA, 19 nt, Human
ccaggcaaggugggugagc

SEQ ID NO: 1178560 - RNA, 19 nt, Human
ccagggccagggggcagag

SEQ ID NO: 1178561 - RNA, 20 nt, Human
ccagggccagggggcagagg

SEQ ID NO: 1178562 - RNA, 21 nt, Human
ccaugagaggcucugaaaucc

SEQ ID NO: 1178563 - RNA, 19 nt, Human
cccacaugacuauguugcu

SEQ ID NO: 1178564 - RNA, 26 nt, Human
cccagccugagcccugagcagcuggc

SEQ ID NO: 1178565 - RNA, 18 nt, Human
cccauagcgccacucaca

SEQ ID NO: 1178566 - RNA, 21 nt, Human
ccccagccugagcccugagca

SEQ ID NO: 1178567 - RNA, 21 nt, Human
ccccauucuucaccaucccua

SEQ ID NO: 1178568 - RNA, 23 nt, Human
ccccauucuucaccaucccuagc

SEQ ID NO: 1178569 - RNA, 21 nt, Human
cccccacugcagccaaaagcc

SEQ ID NO: 1178570 - RNA, 24 nt, Human
cccccacugcagccaaaagcccaa

SEQ ID NO: 1178571 - RNA, 20 nt, Human
cccccauucuucaccauccc

SEQ ID NO: 1178572 - RNA, 25 nt, Human
ccccuggagcaccagugaggacagg

SEQ ID NO: 1178573 - RNA, 23 nt, Human
cccgcagccugggccgccccgaa

SEQ ID NO: 1178574 - RNA, 18 nt, Human
cccgcgcccgcacagcca

SEQ ID NO: 1178575 - RNA, 21 nt, Human
cccgcugaacaggauggcagg

SEQ ID NO: 1178576 - RNA, 21 nt, Human
ccgcacagccaacgucacgcc

SEQ ID NO: 1178577 - RNA, 23 nt, Human
ccgcauucuuauuuccaaagacc

SEQ ID NO: 1178578 - RNA, 26 nt, Human
ccuauaacccaauagaggccccccca

SEQ ID NO: 1178579 - RNA, 22 nt, Human
ccuauucuccugcugcuccaaa

SEQ ID NO: 1178580 - RNA, 21 nt, Human
ccucagcacgcguucuccuca

SEQ ID NO: 1178581 - RNA, 18 nt, Human
ccugggccgccccgaacc

SEQ ID NO: 1178582 - RNA, 22 nt, Human
cgcacagccaacgucacgccgc

SEQ ID NO: 1178583 - RNA, 20 nt, Human
cggcccgaagcgcccugcgg

SEQ ID NO: 1178584 - RNA, 23 nt, Human
cggccgggccggcguucagggac

SEQ ID NO: 1178585 - RNA, 23 nt, Human
cggcgcagccagaaaggccccag

SEQ ID NO: 1178586 - RNA, 21 nt, Human
cggcgggcgcggaccggggcc

SEQ ID NO: 1178587 - RNA, 24 nt, Human
cggcguucagggacccggcgggag

SEQ ID NO: 1178588 - RNA, 18 nt, Human
cguucuccucacucccag

SEQ ID NO: 1178589 - RNA, 21 nt, Human
cguuucuuccccuggagcacc

SEQ ID NO: 1178590 - RNA, 19 nt, Human
cucccaggacuagcgagcg

SEQ ID NO: 1178591 - RNA, 21 nt, Human
cucugcuucaacauuuucaga

SEQ ID NO: 1178592 - RNA, 22 nt, Human
cugcguguugcuucccacuccu

SEQ ID NO: 1178593 - RNA, 18 nt, Human
cugcuuuccuccuucggc

SEQ ID NO: 1178594 - RNA, 20 nt, Human
cugucccucuggccgggucc

SEQ ID NO: 1178595 - RNA, 21 nt, Human
cugucccucuggccggguccu

SEQ ID NO: 1178596 - RNA, 21 nt, Human
gaaccagguuuucagcacaag

SEQ ID NO: 1178597 - RNA, 21 nt, Human
gaauguuucucugcuucaaca

SEQ ID NO: 1178598 - RNA, 21 nt, Human
gacccgcagccugggccgccc

SEQ ID NO: 1178599 - RNA, 23 nt, Human
gagacacagcaaagggugccaac

SEQ ID NO: 1178600 - RNA, 20 nt, Human
gagacgcagcgggagggcgg

SEQ ID NO: 1178601 - RNA, 23 nt, Human
gagcacccucuccaugaggacac

SEQ ID NO: 1178602 - RNA, 20 nt, Human
gagcagcuggccagccagga

SEQ ID NO: 1178603 - RNA, 24 nt, Human
gaggcggcgcagccagaaaggccc

SEQ ID NO: 1178604 - RNA, 18 nt, Human
gagggcaaggcuggagag

SEQ ID NO: 1178605 - RNA, 24 nt, Human
gaugucaaugggaggccccagccu

SEQ ID NO: 1178606 - RNA, 23 nt, Human
gcccaagucagagccaaaccugc

SEQ ID NO: 1178607 - RNA, 21 nt, Human
gcccccauucuucaccauccc

SEQ ID NO: 1178608 - RNA, 20 nt, Human
gcgcagccagaaaggcccca

SEQ ID NO: 1178609 - RNA, 18 nt, Human
gcgcggaccggggccugg

SEQ ID NO: 1178610 - RNA, 21 nt, Human
gcggaccggggccuggggucg

SEQ ID NO: 1178611 - RNA, 21 nt, Human
gcggcgcagccagaaaggccc

SEQ ID NO: 1178612 - RNA, 18 nt, Human
gcucaggagcagggcugg

SEQ ID NO: 1178613 - RNA, 21 nt, Human
gcuuggggucccaccccagcg

SEQ ID NO: 1178614 - RNA, 18 nt, Human
ggaccggccgggccggcg

SEQ ID NO: 1178615 - RNA, 18 nt, Human
ggagcaccagugaggaca

SEQ ID NO: 1178616 - RNA, 19 nt, Human
ggaggaugucaaugggagg

SEQ ID NO: 1178617 - RNA, 24 nt, Human
ggcaaggugggugagcucugugcu

SEQ ID NO: 1178618 - RNA, 23 nt, Human
ggcgacggaggcucagagaggga

SEQ ID NO: 1178619 - RNA, 21 nt, Human
gggaggccccagccugagccc

SEQ ID NO: 1178620 - RNA, 20 nt, Human
gggcagagggcggggcuggc

SEQ ID NO: 1178621 - RNA, 22 nt, Human
gggcagagggcggggcuggcuc

SEQ ID NO: 1178622 - RNA, 20 nt, Human
gggccgcggacagagagaaa

SEQ ID NO: 1178623 - RNA, 19 nt, Human
gugagggcaaggcuggaga

SEQ ID NO: 1178624 - RNA, 19 nt, Human
guuugggggaaggcggggg

SEQ ID NO: 1178625 - RNA, 20 nt, Human
ucaaaaaucccuaucuucug

SEQ ID NO: 1178626 - RNA, 21 nt, Human
ucacaucuagacgugucagaa

SEQ ID NO: 1178627 - RNA, 24 nt, Human
ucacauugccccuuccccucucuc

SEQ ID NO: 1178628 - RNA, 21 nt, Human
ucagagccaaaccugcacugu

SEQ ID NO: 1178629 - RNA, 23 nt, Human
ucccauagcgccacucacauugc

SEQ ID NO: 1178630 - RNA, 20 nt, Human
uccccuggagcaccagugag

SEQ ID NO: 1178631 - RNA, 23 nt, Human
uccccuggagcaccagugaggac

SEQ ID NO: 1178632 - RNA, 20 nt, Human
ucugaaauccacccccacug

SEQ ID NO: 1178633 - RNA, 20 nt, Human
ucugaggagacacagcaaag

SEQ ID NO: 1178634 - RNA, 19 nt, Human
ugacuccuugcgucaguag

SEQ ID NO: 1178635 - RNA, 21 nt, Human
ugagacguuugggggaaggcg

SEQ ID NO: 1178636 - RNA, 21 nt, Human
ugcagccaaaagcccaaguca

SEQ ID NO: 1178637 - RNA, 19 nt, Human
ugccaggcuggcacgcccc

SEQ ID NO: 1178638 - RNA, 26 nt, Human
ugccuauaacccaauagaggcccccc

SEQ ID NO: 1178639 - RNA, 26 nt, Human
ugcuuuccuccuucggcguuuggauc

SEQ ID NO: 1178640 - RNA, 19 nt, Human
uggagcuuggggucccacc

SEQ ID NO: 1178641 - RNA, 25 nt, Human
uggcagagcugcugacugggcacug

SEQ ID NO: 1178642 - RNA, 20 nt, Human
ugggagccaggcaagguggg

SEQ ID NO: 1178643 - RNA, 19 nt, Human
ugggggaaggcgggggcuu

SEQ ID NO: 1178644 - RNA, 19 nt, Human
uggggucgggggagggaag

SEQ ID NO: 1178645 - RNA, 21 nt, Human
uggggucgggggagggaagac

SEQ ID NO: 1178646 - RNA, 24 nt, Human
uuaaaugaauaggcauguggaaag

SEQ ID NO: 1178647 - RNA, 19 nt, Human
uuacagaucaguggccucc

SEQ ID NO: 1178648 - RNA, 18 nt, Human
uuccaucagggcuggaag

SEQ ID NO: 1178649 - RNA, 24 nt, Human
uuccccuggagcaccagugaggac

SEQ ID NO: 1178650 - RNA, 22 nt, Human
uuccuccuucggcguuuggauc

SEQ ID NO: 1178651 - RNA, 26 nt, Human
aaaacaagaaaacacaaggacaaacc

SEQ ID NO: 1178652 - RNA, 24 nt, Human
aaaacacaaggacaaacccuacug

SEQ ID NO: 1178653 - RNA, 21 nt, Human
aaacaaaacaagaaaacacaa

SEQ ID NO: 1178654 - RNA, 22 nt, Human
aaacauggaacaugggagaaaa

SEQ ID NO: 1178655 - RNA, 20 nt, Human
aaagcauggggaguggcauc

SEQ ID NO: 1178656 - RNA, 24 nt, Human
aaagugcugggauuacaggcguga

SEQ ID NO: 1178657 - RNA, 24 nt, Human
aaagugcugggauuacagguguga

SEQ ID NO: 1178658 - RNA, 20 nt, Human
aagaaugggacuagcgcccu

SEQ ID NO: 1178659 - RNA, 20 nt, Human
aagacggccaagugcuuuuc

SEQ ID NO: 1178660 - RNA, 18 nt, Human
aagagacagagaaggcca

SEQ ID NO: 1178661 - RNA, 19 nt, Human
aagcccacaagaaugggac

SEQ ID NO: 1178662 - RNA, 19 nt, Human
aaguagcugggacuacagg

SEQ ID NO: 1178663 - RNA, 20 nt, Human
aaguagcugggacuacaggc

SEQ ID NO: 1178664 - RNA, 25 nt, Human
aaguagcugggacuacaggcgcccg

SEQ ID NO: 1178665 - RNA, 18 nt, Human
aagugcugggauuacagg

SEQ ID NO: 1178666 - RNA, 19 nt, Human
aagugcugggauuacaggc

SEQ ID NO: 1178667 - RNA, 19 nt, Human
aagugcugggauuacaggc

SEQ ID NO: 1178668 - RNA, 26 nt, Human
aagugcugggauuacaggcgugagcc

SEQ ID NO: 1178669 - RNA, 19 nt, Human
aagugcugggauuacaggu

SEQ ID NO: 1178670 - RNA, 26 nt, Human
aagugcugggauuacaggugugagcc

SEQ ID NO: 1178671 - RNA, 22 nt, Human
aauuuuugacauaaggcaauuu

SEQ ID NO: 1178672 - RNA, 18 nt, Human
acaaaacaagaaaacaca

SEQ ID NO: 1178673 - RNA, 19 nt, Human
acaaaacaagaaaacacaa

SEQ ID NO: 1178674 - RNA, 19 nt, Human
acacagcgagaagccaucc

SEQ ID NO: 1178675 - RNA, 20 nt, Human
acagcgagaagccauccucu

SEQ ID NO: 1178676 - RNA, 21 nt, Human
acagcgagaagccauccucug

SEQ ID NO: 1178677 - RNA, 18 nt, Human
acaggguuucaccauguu

SEQ ID NO: 1178678 - RNA, 19 nt, Human
acaggguuucaccauguua

SEQ ID NO: 1178679 - RNA, 20 nt, Human
acaggguuucaccauguuag

SEQ ID NO: 1178680 - RNA, 24 nt, Human
acaggguuucaccauguuagccag

SEQ ID NO: 1178681 - RNA, 19 nt, Human
acccaggcuggaguacagu

SEQ ID NO: 1178682 - RNA, 25 nt, Human
acccgccucagccucccaaagugcu

SEQ ID NO: 1178683 - RNA, 18 nt, Human
acgccaugcuccugcuuc

SEQ ID NO: 1178684 - RNA, 18 nt, Human
acgggguuucaccauguu

SEQ ID NO: 1178685 - RNA, 19 nt, Human
acgggguuucaccauguua

SEQ ID NO: 1178686 - RNA, 20 nt, Human
acgggguuucaccauguuag

SEQ ID NO: 1178687 - RNA, 24 nt, Human
acgggguuucaccauguuagccag

SEQ ID NO: 1178688 - RNA, 18 nt, Human
acugcaagcucugccucc

SEQ ID NO: 1178689 - RNA, 20 nt, Human
acugcaagcucugccuccca

SEQ ID NO: 1178690 - RNA, 20 nt, Human
agaaacagugaaggugucag

SEQ ID NO: 1178691 - RNA, 21 nt, Human
agacagcaaaucaacuccaga

SEQ ID NO: 1178692 - RNA, 22 nt, Human
agacgagggaguuaacaaggga

SEQ ID NO: 1178693 - RNA, 22 nt, Human
agaggaaaagaaagcaugggga

SEQ ID NO: 1178694 - RNA, 24 nt, Human
agcacauuaggguguauucggggg

SEQ ID NO: 1178695 - RNA, 19 nt, Human
aggagguggacuuugggag

SEQ ID NO: 1178696 - RNA, 20 nt, Human
aggcaggcagccacccaugu

SEQ ID NO: 1178697 - RNA, 20 nt, Human
aggcuggcaggcaggcagcc

SEQ ID NO: 1178698 - RNA, 19 nt, Human
aggggucagaggcaucagg

SEQ ID NO: 1178699 - RNA, 21 nt, Human
aguacaguggugcgaucucag

SEQ ID NO: 1178700 - RNA, 24 nt, Human
aguacaguggugcgaucucagcuc

SEQ ID NO: 1178701 - RNA, 18 nt, Human
aguagcugggacuacagg

SEQ ID NO: 1178702 - RNA, 19 nt, Human
aguagcugggacuacaggc

SEQ ID NO: 1178703 - RNA, 24 nt, Human
aguggcgugaucucagcucacugc

SEQ ID NO: 1178704 - RNA, 22 nt, Human
aguggucuguggacugcauggc

SEQ ID NO: 1178705 - RNA, 24 nt, Human
aguggugcgaucucagcucacugc

SEQ ID NO: 1178706 - RNA, 19 nt, Human
aguguaguggcgugaucuc

SEQ ID NO: 1178707 - RNA, 21 nt, Human
aguguaguggcgugaucucag

SEQ ID NO: 1178708 - RNA, 24 nt, Human
aguguaguggcgugaucucagcuc

SEQ ID NO: 1178709 - RNA, 24 nt, Human
auaaagcccacaagaaugggacuu

SEQ ID NO: 1178710 - RNA, 24 nt, Human
augauccaccuaccucagccuccc

SEQ ID NO: 1178711 - RNA, 21 nt, Human
augcuccugcuucagccuccc

SEQ ID NO: 1178712 - RNA, 20 nt, Human
augguguggucggagcugcu

SEQ ID NO: 1178713 - RNA, 23 nt, Human
caaaacaagaaaacacaaggaca

SEQ ID NO: 1178714 - RNA, 24 nt, Human
caaagugcugggauuacaggcgug

SEQ ID NO: 1178715 - RNA, 24 nt, Human
caaagugcugggauuacaggugug

SEQ ID NO: 1178716 - RNA, 22 nt, Human
caaguaaguuaacaugaccaaa

SEQ ID NO: 1178717 - RNA, 20 nt, Human
cacacagugucaggggucag

SEQ ID NO: 1178718 - RNA, 18 nt, Human
caccauguuagccaggau

SEQ ID NO: 1178719 - RNA, 18 nt, Human
caccauguuagccaggau

SEQ ID NO: 1178720 - RNA, 22 nt, Human
caccauguuagccaggaugguc

SEQ ID NO: 1178721 - RNA, 22 nt, Human
caccauguuagccaggaugguc

SEQ ID NO: 1178722 - RNA, 24 nt, Human
caccauguuagccaggauggucuc

SEQ ID NO: 1178723 - RNA, 24 nt, Human
caccauguuagccaggauggucuc

SEQ ID NO: 1178724 - RNA, 18 nt, Human
caccccuuccaccacaug

SEQ ID NO: 1178725 - RNA, 23 nt, Human
cacccgccucagccucccaaagu

SEQ ID NO: 1178726 - RNA, 23 nt, Human
caccuaccucagccucccaaagu

SEQ ID NO: 1178727 - RNA, 22 nt, Human
caccugggcagcccaugggagc

SEQ ID NO: 1178728 - RNA, 22 nt, Human
cacgccauucuccugccucagc

SEQ ID NO: 1178729 - RNA, 23 nt, Human
cacugcaagcucugccucccggg

SEQ ID NO: 1178730 - RNA, 19 nt, Human
cagaaugcagaagacggcc

SEQ ID NO: 1178731 - RNA, 21 nt, Human
cagaaugcagaagacggccaa

SEQ ID NO: 1178732 - RNA, 18 nt, Human
cagcgagaagccauccuc

SEQ ID NO: 1178733 - RNA, 22 nt, Human
caggcagccacccauguuuccg

SEQ ID NO: 1178734 - RNA, 20 nt, Human
caggcgcccgccaccgcgcc

SEQ ID NO: 1178735 - RNA, 24 nt, Human
caggguuucaccauguuagccagg

SEQ ID NO: 1178736 - RNA, 19 nt, Human
caucugaaaaccacaacag

SEQ ID NO: 1178737 - RNA, 24 nt, Human
caugauccaccuaccucagccucc

SEQ ID NO: 1178738 - RNA, 22 nt, Human
ccaaaaaaaauguuuagaaaca

SEQ ID NO: 1178739 - RNA, 21 nt, Human
ccaaagugcugggauuacagg

SEQ ID NO: 1178740 - RNA, 21 nt, Human
ccaaagugcugggauuacagg

SEQ ID NO: 1178741 - RNA, 22 nt, Human
ccaaagugcugggauuacaggc

SEQ ID NO: 1178742 - RNA, 22 nt, Human
ccaaagugcugggauuacaggc

SEQ ID NO: 1178743 - RNA, 24 nt, Human
ccaaagugcugggauuacaggcgu

SEQ ID NO: 1178744 - RNA, 24 nt, Human
ccaaagugcugggauuacaggugu

SEQ ID NO: 1178745 - RNA, 26 nt, Human
ccacccgccucagccucccaaagugc

SEQ ID NO: 1178746 - RNA, 26 nt, Human
ccaccuaccucagccucccaaagugc

SEQ ID NO: 1178747 - RNA, 22 nt, Human
ccagaagucucuguucaucuga

SEQ ID NO: 1178748 - RNA, 23 nt, Human
cccaaguagcugggacuacaggc

SEQ ID NO: 1178749 - RNA, 24 nt, Human
cccaaguagcugggacuacaggcg

SEQ ID NO: 1178750 - RNA, 22 nt, Human
cccaccgugccggacucucaga

SEQ ID NO: 1178751 - RNA, 22 nt, Human
cccagaaugcagaagacggcca

SEQ ID NO: 1178752 - RNA, 23 nt, Human
cccaugggagcaccggccggugg

SEQ ID NO: 1178753 - RNA, 20 nt, Human
ccccaccgugccggacucuc

SEQ ID NO: 1178754 - RNA, 18 nt, Human
ccccucaccccuuccacc

SEQ ID NO: 1178755 - RNA, 23 nt, Human
cccgaguagcugggacuacaggc

SEQ ID NO: 1178756 - RNA, 24 nt, Human
cccgaguagcugggacuacaggcg

SEQ ID NO: 1178757 - RNA, 26 nt, Human
cccucaccccuuccaccaaucgguug

SEQ ID NO: 1178758 - RNA, 24 nt, Human
ccgccucagccucccaaagugcug

SEQ ID NO: 1178759 - RNA, 24 nt, Human
ccgguggugacgaagcaccaugca

SEQ ID NO: 1178760 - RNA, 21 nt, Human
ccuacugugaagcaguggaga

SEQ ID NO: 1178761 - RNA, 23 nt, Human
ccucccauaaguaaggccagagu

SEQ ID NO: 1178762 - RNA, 22 nt, Human
ccugaccucaugauccaccuac

SEQ ID NO: 1178763 - RNA, 20 nt, Human
ccugaccucgugauccaccc

SEQ ID NO: 1178764 - RNA, 23 nt, Human
ccugccucagccucccgaguagc

SEQ ID NO: 1178765 - RNA, 24 nt, Human
ccugcuucagccucccaaguagcu

SEQ ID NO: 1178766 - RNA, 18 nt, Human
cgaagcaccaugcagugg

SEQ ID NO: 1178767 - RNA, 22 nt, Human
cgaagcaccaugcaguggucug

SEQ ID NO: 1178768 - RNA, 24 nt, Human
cgagaacaagcagggagaacaaau

SEQ ID NO: 1178769 - RNA, 24 nt, Human
cgggguuucaccauguuagccagg

SEQ ID NO: 1178770 - RNA, 24 nt, Human
cgugauccacccgccucagccucc

SEQ ID NO: 1178771 - RNA, 24 nt, Human
cucacugcaagcucugccucccgg

SEQ ID NO: 1178772 - RNA, 24 nt, Human
cucagccucccgaguagcugggac

SEQ ID NO: 1178773 - RNA, 21 nt, Human
cucagucacccaggcuggagu

SEQ ID NO: 1178774 - RNA, 21 nt, Human
cucccggguucacgccauucu

SEQ ID NO: 1178775 - RNA, 18 nt, Human
cuccugaccucaugaucc

SEQ ID NO: 1178776 - RNA, 24 nt, Human
cuccugaccucgugauccacccgc

SEQ ID NO: 1178777 - RNA, 22 nt, Human
cuccugccucagccucccgagu

SEQ ID NO: 1178778 - RNA, 20 nt, Human
cucugucacccagguuggag

SEQ ID NO: 1178779 - RNA, 23 nt, Human
cugccucagccucccgaguagcu

SEQ ID NO: 1178780 - RNA, 23 nt, Human
cuguggacugcauggcucugucc

SEQ ID NO: 1178781 - RNA, 21 nt, Human
cugugggucaggaagccacau

SEQ ID NO: 1178782 - RNA, 25 nt, Human
cuucagccucccaaguagcugggac

SEQ ID NO: 1178783 - RNA, 22 nt, Human
cuuccaccacaugaggacacag

SEQ ID NO: 1178784 - RNA, 24 nt, Human
cuuucuuuuuuuguuugagaugga

SEQ ID NO: 1178785 - RNA, 21 nt, Human
gaaaggagaggagggagagga

SEQ ID NO: 1178786 - RNA, 20 nt, Human
gaacaugggagaaaacaagu

SEQ ID NO: 1178787 - RNA, 18 nt, Human
gaagaaaagggccuccca

SEQ ID NO: 1178788 - RNA, 19 nt, Human
gaagaagggacaaaccacc

SEQ ID NO: 1178789 - RNA, 21 nt, Human
gaccccucaccccuuccacca

SEQ ID NO: 1178790 - RNA, 22 nt, Human
gaccucaugauccaccuaccuc

SEQ ID NO: 1178791 - RNA, 22 nt, Human
gaccucgugauccacccgccuc

SEQ ID NO: 1178792 - RNA, 24 nt, Human
gaccucgugauccacccgccucag

SEQ ID NO: 1178793 - RNA, 24 nt, Human
gacuacaggcgcccgccaccaugc

SEQ ID NO: 1178794 - RNA, 27 nt, Human
gagaacaagcagggagaaccgguaccc

SEQ ID NO: 1178795 - RNA, 24 nt, Human
gagacgggguuucaccauguuagc

SEQ ID NO: 1178796 - RNA, 22 nt, Human
gaggaggagcugaaggaagaua

SEQ ID NO: 1178797 - RNA, 22 nt, Human
gagguggcagugugaggauggu

SEQ ID NO: 1178798 - RNA, 25 nt, Human
gaguagcugggacuacaggcgcccg

SEQ ID NO: 1178799 - RNA, 19 nt, Human
gagugauuagguggugaga

SEQ ID NO: 1178800 - RNA, 19 nt, Human
gauacuggaagaggaaagg

SEQ ID NO: 1178801 - RNA, 18 nt, Human
gauuacaggcgugagcca

SEQ ID NO: 1178802 - RNA, 21 nt, Human
gauuacaggcgugagccacca

SEQ ID NO: 1178803 - RNA, 24 nt, Human
gauuacaggcgugagccaccaugc

SEQ ID NO: 1178804 - RNA, 18 nt, Human
gauuacaggugugagcca

SEQ ID NO: 1178805 - RNA, 21 nt, Human
gauuacaggugugagccacug

SEQ ID NO: 1178806 - RNA, 24 nt, Human
gauuacaggugugagccacugugc

SEQ ID NO: 1178807 - RNA, 19 nt, Human
gcaaaucaacuccagaagu

SEQ ID NO: 1178808 - RNA, 22 nt, Human
gcaagcucugccucccagguuc

SEQ ID NO: 1178809 - RNA, 20 nt, Human
gcagaagacggccaagugcu

SEQ ID NO: 1178810 - RNA, 18 nt, Human
gcaggcagccacccaugu

SEQ ID NO: 1178811 - RNA, 24 nt, Human
gcccagcuauuuuuuuuguauuuu

SEQ ID NO: 1178812 - RNA, 23 nt, Human
gccucagccucccaaagugcugg

SEQ ID NO: 1178813 - RNA, 25 nt, Human
gccucccggguucacgccauucucc

SEQ ID NO: 1178814 - RNA, 19 nt, Human
gccugggcaccugggcagc

SEQ ID NO: 1178815 - RNA, 18 nt, Human
gcuauaauaagcaaacuc

SEQ ID NO: 1178816 - RNA, 19 nt, Human
gcucugucacccagguugg

SEQ ID NO: 1178817 - RNA, 22 nt, Human
ggaaaggagaggagggagagga

SEQ ID NO: 1178818 - RNA, 20 nt, Human
ggaagaaaagggccucccau

SEQ ID NO: 1178819 - RNA, 21 nt, Human
ggaagaggaaaggagaggagg

SEQ ID NO: 1178820 - RNA, 24 nt, Human
ggagguggcagugugaggauggug

SEQ ID NO: 1178821 - RNA, 24 nt, Human
ggauuacaggcgugagccaccaug

SEQ ID NO: 1178822 - RNA, 18 nt, Human
gggaagagacagagaagg

SEQ ID NO: 1178823 - RNA, 21 nt, Human
gggagugauuagguggugaga

SEQ ID NO: 1178824 - RNA, 23 nt, Human
gggguuucaccauguuagccagg

SEQ ID NO: 1178825 - RNA, 20 nt, Human
ggucucgaucuccugaccuc

SEQ ID NO: 1178826 - RNA, 20 nt, Human
ggucucgaucuccugaccuc

SEQ ID NO: 1178827 - RNA, 22 nt, Human
gguuggaguguaguggcgugau

SEQ ID NO: 1178828 - RNA, 24 nt, Human
gguuucaccauguuagccaggaug

SEQ ID NO: 1178829 - RNA, 24 nt, Human
gguuucaccauguuagccaggaug

SEQ ID NO: 1178830 - RNA, 23 nt, Human
guagagacgggguuucaccaugu

SEQ ID NO: 1178831 - RNA, 27 nt, Human
guauguggcaguguuuccucuuaguag

SEQ ID NO: 1178832 - RNA, 22 nt, Human
gugaagaaaggaagagggcuug

SEQ ID NO: 1178833 - RNA, 24 nt, Human
gugauccacccgccucagccuccc

SEQ ID NO: 1178834 - RNA, 22 nt, Human
uaaagacaggguuucaccaugu

SEQ ID NO: 1178835 - RNA, 25 nt, Human
uaacaugaccaaaaaaaauguuuag

SEQ ID NO: 1178836 - RNA, 22 nt, Human
uaagaaccccacacaaauguca

SEQ ID NO: 1178837 - RNA, 22 nt, Human
uaaggccagaguugugggcauu

SEQ ID NO: 1178838 - RNA, 19 nt, Human
uaauuuuuugcauuuuuag

SEQ ID NO: 1178839 - RNA, 20 nt, Human
uacaacaaaucucuuuugca

SEQ ID NO: 1178840 - RNA, 21 nt, Human
uacaacaaaucucuuuugcau

SEQ ID NO: 1178841 - RNA, 24 nt, Human
uacaggcgugagccaccaugccca

SEQ ID NO: 1178842 - RNA, 23 nt, Human
uacaggugugagccacugugccc

SEQ ID NO: 1178843 - RNA, 24 nt, Human
uacaggugugagccacugugccca

SEQ ID NO: 1178844 - RNA, 24 nt, Human
uaccucagccucccaaagugcugg

SEQ ID NO: 1178845 - RNA, 22 nt, Human
uagagacgggguuucaccaugu

SEQ ID NO: 1178846 - RNA, 24 nt, Human
uaguaaagacaggguuucaccaug

SEQ ID NO: 1178847 - RNA, 26 nt, Human
uaguaaagacaggguuucaccauguu

SEQ ID NO: 1178848 - RNA, 24 nt, Human
uaguagagacgggguuucaccaug

SEQ ID NO: 1178849 - RNA, 26 nt, Human
uaguagagacgggguuucaccauguu

SEQ ID NO: 1178850 - RNA, 19 nt, Human
uauuaguuaagaguccuca

SEQ ID NO: 1178851 - RNA, 21 nt, Human
ucaaagcuuuuacaacaaauc

SEQ ID NO: 1178852 - RNA, 24 nt, Human
ucaccauguuagccaggauggucu

SEQ ID NO: 1178853 - RNA, 24 nt, Human
ucaccauguuagccaggauggucu

SEQ ID NO: 1178854 - RNA, 22 nt, Human
ucacccagguuggaguguagug

SEQ ID NO: 1178855 - RNA, 25 nt, Human
ucaccccuuccaccacaugaggacc

SEQ ID NO: 1178856 - RNA, 18 nt, Human
ucacugcaagcucugccu

SEQ ID NO: 1178857 - RNA, 18 nt, Human
ucacugcaagcucugccu

SEQ ID NO: 1178858 - RNA, 18 nt, Human
ucacugcaagcucugccu

SEQ ID NO: 1178859 - RNA, 18 nt, Human
ucacugcaagcucugccu

SEQ ID NO: 1178860 - RNA, 19 nt, Human
ucacugcaagcucugccuc

SEQ ID NO: 1178861 - RNA, 24 nt, Human
ucacugcaagcucugccucccagg

SEQ ID NO: 1178862 - RNA, 24 nt, Human
ucacugcaagcucugccucccggg

SEQ ID NO: 1178863 - RNA, 18 nt, Human
ucagccucccaaagugcu

SEQ ID NO: 1178864 - RNA, 18 nt, Human
ucagccucccaaguagcu

SEQ ID NO: 1178865 - RNA, 23 nt, Human
ucagccucccgaguagcugggac

SEQ ID NO: 1178866 - RNA, 26 nt, Human
ucagcucacugcaagcucugccuccc

SEQ ID NO: 1178867 - RNA, 18 nt, Human
ucagggcagauauccaaa

SEQ ID NO: 1178868 - RNA, 21 nt, Human
uccacccgccucagccuccca

SEQ ID NO: 1178869 - RNA, 22 nt, Human
uccagaaaugaaacaagcacau

SEQ ID NO: 1178870 - RNA, 22 nt, Human
uccaggaugaacuacggaaaaa

SEQ ID NO: 1178871 - RNA, 23 nt, Human
ucccaaagugcugggauuacagg

SEQ ID NO: 1178872 - RNA, 24 nt, Human
ucccaaagugcugggauuacaggc

SEQ ID NO: 1178873 - RNA, 24 nt, Human
ucccaaguagcugggacuacaggc

SEQ ID NO: 1178874 - RNA, 21 nt, Human
ucccagguucacgccaugcuc

SEQ ID NO: 1178875 - RNA, 24 nt, Human
ucccagguucacgccaugcuccug

SEQ ID NO: 1178876 - RNA, 24 nt, Human
ucccgaguagcugggacuacaggc

SEQ ID NO: 1178877 - RNA, 21 nt, Human
ucccggguucacgccauucuc

SEQ ID NO: 1178878 - RNA, 24 nt, Human
ucccggguucacgccauucuccug

SEQ ID NO: 1178879 - RNA, 22 nt, Human
uccucuuuucuaaaauuaaagc

SEQ ID NO: 1178880 - RNA, 21 nt, Human
ucgcucugucacccagguugg

SEQ ID NO: 1178881 - RNA, 22 nt, Human
ucgcucugucacccagguugga

SEQ ID NO: 1178882 - RNA, 24 nt, Human
ucgcucugucacccagguuggagu

SEQ ID NO: 1178883 - RNA, 24 nt, Human
ucucgcucagucacccaggcugga

SEQ ID NO: 1178884 - RNA, 24 nt, Human
ucugucacccagguuggaguguag

SEQ ID NO: 1178885 - RNA, 24 nt, Human
ucuuucuuuuuuuguuugagaugg

SEQ ID NO: 1178886 - RNA, 20 nt, Human
ugacaguagcccuguggacu

SEQ ID NO: 1178887 - RNA, 24 nt, Human
ugagcuccuaagaggaggagcuga

SEQ ID NO: 1178888 - RNA, 24 nt, Human
ugauccaccuaccucagccuccca

SEQ ID NO: 1178889 - RNA, 22 nt, Human
ugcauuauuuucccaaacaaaa

SEQ ID NO: 1178890 - RNA, 24 nt, Human
ugccucagccucccgaguagcugg

SEQ ID NO: 1178891 - RNA, 19 nt, Human
ugccucccagguucacgcc

SEQ ID NO: 1178892 - RNA, 19 nt, Human
ugccucccggguucacgcc

SEQ ID NO: 1178893 - RNA, 24 nt, Human
ugcugggauuacaggcgugagcca

SEQ ID NO: 1178894 - RNA, 24 nt, Human
ugcugggauuacaggugugagcca

SEQ ID NO: 1178895 - RNA, 24 nt, Human
ugcuucagccucccaaguagcugg

SEQ ID NO: 1178896 - RNA, 23 nt, Human
uggaagaggaaaggagaggaggg

SEQ ID NO: 1178897 - RNA, 22 nt, Human
uggacuuugggagugauuaggu

SEQ ID NO: 1178898 - RNA, 24 nt, Human
uggacuuugggagugauuaggugg

SEQ ID NO: 1178899 - RNA, 19 nt, Human
uggaguacaguggugcgau

SEQ ID NO: 1178900 - RNA, 24 nt, Human
uggaguguaguggcgugaucucag

SEQ ID NO: 1178901 - RNA, 24 nt, Human
uggcgugaucucagcucacugcaa

SEQ ID NO: 1178902 - RNA, 21 nt, Human
ugggacuacaggcgcccgcca

SEQ ID NO: 1178903 - RNA, 21 nt, Human
ugggacuacaggcgcccgcca

SEQ ID NO: 1178904 - RNA, 22 nt, Human
ugggacuacaggcgcccgccac

SEQ ID NO: 1178905 - RNA, 22 nt, Human
ugggacuacaggcgcccgccac

SEQ ID NO: 1178906 - RNA, 23 nt, Human
ugggacuacaggcgcccgccacc

SEQ ID NO: 1178907 - RNA, 24 nt, Human
ugggacuacaggcgcccgccacca

SEQ ID NO: 1178908 - RNA, 25 nt, Human
ugggacuacaggcgcccgccaccau

SEQ ID NO: 1178909 - RNA, 24 nt, Human
ugggacuacaggcgcccgccaccg

SEQ ID NO: 1178910 - RNA, 23 nt, Human
ugggagaaaacaaguauguggca

SEQ ID NO: 1178911 - RNA, 18 nt, Human
ugggauuacaggcgugag

SEQ ID NO: 1178912 - RNA, 22 nt, Human
ugggauuacaggcgugagccac

SEQ ID NO: 1178913 - RNA, 23 nt, Human
ugggauuacaggcgugagccacc

SEQ ID NO: 1178914 - RNA, 24 nt, Human
ugggauuacaggcgugagccacca

SEQ ID NO: 1178915 - RNA, 25 nt, Human
ugggauuacaggcgugagccaccau

SEQ ID NO: 1178916 - RNA, 18 nt, Human
ugggauuacaggugugag

SEQ ID NO: 1178917 - RNA, 21 nt, Human
ugggauuacaggugugagcca

SEQ ID NO: 1178918 - RNA, 22 nt, Human
ugggauuacaggugugagccac

SEQ ID NO: 1178919 - RNA, 22 nt, Human
ugggauuacaggugugagccac

SEQ ID NO: 1178920 - RNA, 22 nt, Human
ugggauuacaggugugagccac

SEQ ID NO: 1178921 - RNA, 24 nt, Human
ugggauuacaggugugagccacug

SEQ ID NO: 1178922 - RNA, 19 nt, Human
ugggcagcccaugggagca

SEQ ID NO: 1178923 - RNA, 24 nt, Human
uggugcgaucucagcucacugcaa

SEQ ID NO: 1178924 - RNA, 22 nt, Human
uguaguggcgugaucucagcuc

SEQ ID NO: 1178925 - RNA, 21 nt, Human
uguauuuuuaguagagacggg

SEQ ID NO: 1178926 - RNA, 23 nt, Human
uguggcaguguuucagagacagg

SEQ ID NO: 1178927 - RNA, 19 nt, Human
ugugggcauuucaggucug

SEQ ID NO: 1178928 - RNA, 24 nt, Human
uuaacaagggaagagacagagaag

SEQ ID NO: 1178929 - RNA, 23 nt, Human
uuaagaguccucaaaaauucuuu

SEQ ID NO: 1178930 - RNA, 24 nt, Human
uuaguaaagacaggguuucaccau

SEQ ID NO: 1178931 - RNA, 18 nt, Human
uuaguagagacgggguuu

SEQ ID NO: 1178932 - RNA, 22 nt, Human
uuaguagagacgggguuucacc

SEQ ID NO: 1178933 - RNA, 24 nt, Human
uuaguagagacgggguuucaccau

SEQ ID NO: 1178934 - RNA, 21 nt, Human
uucagagagaccccucacccc

SEQ ID NO: 1178935 - RNA, 21 nt, Human
uucccaaacaaaacaagaaaa

SEQ ID NO: 1178936 - RNA, 24 nt, Human
uuccuuuagaacucccugaucaua

SEQ ID NO: 1178937 - RNA, 24 nt, Human
uucgcucugucacccagguuggag

SEQ ID NO: 1178938 - RNA, 24 nt, Human
uucucacauuuuuaagaaccccac

SEQ ID NO: 1178939 - RNA, 24 nt, Human
uuggaguguaguggcgugaucuca

SEQ ID NO: 1178940 - RNA, 23 nt, Human
uuuaaaauuaaauucuaucagag

SEQ ID NO: 1178941 - RNA, 19 nt, Human
uuucaccauguuagccagg

SEQ ID NO: 1178942 - RNA, 19 nt, Human
uuucaccauguuagccagg

SEQ ID NO: 1178943 - RNA, 20 nt, Human
uuucaccauguuagccagga

SEQ ID NO: 1178944 - RNA, 20 nt, Human
uuucaccauguuagccagga

SEQ ID NO: 1178945 - RNA, 19 nt, Human
uuucgcucugucacccagg

SEQ ID NO: 1178946 - RNA, 23 nt, Human
uuucgcucugucacccagguugg

SEQ ID NO: 1178947 - RNA, 24 nt, Human
uuucgcucugucacccagguugga

SEQ ID NO: 1178948 - RNA, 21 nt, Human
uuuuguauuuuuaguagagac

SEQ ID NO: 1178949 - RNA, 24 nt, Human
uuuuuaguaaagacaggguuucac

SEQ ID NO: 1178950 - RNA, 24 nt, Human
uuuuuaguagagacgggguuucac

SEQ ID NO: 1178951 - RNA, 21 nt, Human
uuuuuguauuuuuaguagaga

SEQ ID NO: 1178952 - RNA, 21 nt, Human
uuuuuuguauuuuuaguagag

SEQ ID NO: 1178953 - RNA, 24 nt, Human
uuuuuuuuguauuuuuaguagaga

SEQ ID NO: 1178954 - RNA, 23 nt, Human
aaaaacaugcucccuucagcagc

SEQ ID NO: 1178955 - RNA, 26 nt, Human
aaaaacaugcucccuucagcagcacg

SEQ ID NO: 1178956 - RNA, 26 nt, Human
aaaaagaauugucucuuaaaaaugaa

SEQ ID NO: 1178957 - RNA, 19 nt, Human
aaacaaaccaauaaaaugc

SEQ ID NO: 1178958 - RNA, 24 nt, Human
aaacaagguaaaaaauuacaucug

SEQ ID NO: 1178959 - RNA, 21 nt, Human
aaacacacagcucauguccuc

SEQ ID NO: 1178960 - RNA, 23 nt, Human
aaaguaauauacaaacaugccaa

SEQ ID NO: 1178961 - RNA, 26 nt, Human
aaaguaauauacaaacaugccaaaac

SEQ ID NO: 1178962 - RNA, 26 nt, Human
aaggaccccaccccccucccccaacc

SEQ ID NO: 1178963 - RNA, 18 nt, Human
aaguaauauacaaacaug

SEQ ID NO: 1178964 - RNA, 20 nt, Human
accccaccccccucccccaa

SEQ ID NO: 1178965 - RNA, 19 nt, Human
accccccucccccaacccc

SEQ ID NO: 1178966 - RNA, 21 nt, Human
aggaaaggguggaacuggaaa

SEQ ID NO: 1178967 - RNA, 19 nt, Human
aggaugaaaagaauccucu

SEQ ID NO: 1178968 - RNA, 18 nt, Human
auaacaacuauaacucuc

SEQ ID NO: 1178969 - RNA, 21 nt, Human
aucacuguauucagcuccauc

SEQ ID NO: 1178970 - RNA, 18 nt, Human
augaaaagaauccucucu

SEQ ID NO: 1178971 - RNA, 23 nt, Human
augcagagugugcaugaagcuau

SEQ ID NO: 1178972 - RNA, 19 nt, Human
augcucccuucagcagcac

SEQ ID NO: 1178973 - RNA, 23 nt, Human
augguccagguucuucuagauga

SEQ ID NO: 1178974 - RNA, 20 nt, Human
caaaccuaaacagcaaauaa

SEQ ID NO: 1178975 - RNA, 26 nt, Human
cacaaaccuaaacagcaaauaaaaau

SEQ ID NO: 1178976 - RNA, 23 nt, Human
cacacagcgucuccacuacccag

SEQ ID NO: 1178977 - RNA, 18 nt, Human
caccccccucccccaacc

SEQ ID NO: 1178978 - RNA, 22 nt, Human
caccccccucccccaaccccug

SEQ ID NO: 1178979 - RNA, 24 nt, Human
caccccccucccccaaccccugcu

SEQ ID NO: 1178980 - RNA, 19 nt, Human
caccuccagguuccgcccc

SEQ ID NO: 1178981 - RNA, 27 nt, Human
cacuccuucuuccuuuuccagccaagg

SEQ ID NO: 1178982 - RNA, 18 nt, Human
cagcuccaucaagaaugg

SEQ ID NO: 1178983 - RNA, 23 nt, Human
caucacacagcuuuauagaaaca

SEQ ID NO: 1178984 - RNA, 23 nt, Human
ccaaaacaagguaaaaaauuaca

SEQ ID NO: 1178985 - RNA, 20 nt, Human
ccaccccccucccccaaccc

SEQ ID NO: 1178986 - RNA, 26 nt, Human
ccacuccuucuuccuuuuccagccaa

SEQ ID NO: 1178987 - RNA, 23 nt, Human
cccacacagcgucuccacuaccc

SEQ ID NO: 1178988 - RNA, 20 nt, Human
cccaggaggacacgugaucc

SEQ ID NO: 1178989 - RNA, 19 nt, Human
ccccaccccccucccccaa

SEQ ID NO: 1178990 - RNA, 22 nt, Human
ccccaccccccucccccaaccc

SEQ ID NO: 1178991 - RNA, 20 nt, Human
cccccucccccaaccccugc

SEQ ID NO: 1178992 - RNA, 19 nt, Human
ccccuggguccgguguucu

SEQ ID NO: 1178993 - RNA, 23 nt, Human
cccuucagcagcacguguaauaa

SEQ ID NO: 1178994 - RNA, 20 nt, Human
ccgaugaccucaggccucca

SEQ ID NO: 1178995 - RNA, 19 nt, Human
ccucaggcucaggggcgag

SEQ ID NO: 1178996 - RNA, 22 nt, Human
ccuucagcagcacguguaauaa

SEQ ID NO: 1178997 - RNA, 19 nt, Human
cucccccaaccccugcucc

SEQ ID NO: 1178998 - RNA, 21 nt, Human
cucccccaaccccugcuccca

SEQ ID NO: 1178999 - RNA, 21 nt, Human
cuccuagaaggaccccacccc

SEQ ID NO: 1179000 - RNA, 18 nt, Human
cuccucagauucaucuga

SEQ ID NO: 1179001 - RNA, 18 nt, Human
cuccucaggcucaggggc

SEQ ID NO: 1179002 - RNA, 19 nt, Human
cuccuuccuggugucugcc

SEQ ID NO: 1179003 - RNA, 22 nt, Human
cuccuucuccggcuccuccuca

SEQ ID NO: 1179004 - RNA, 22 nt, Human
cucuucuccuuccuggugucug

SEQ ID NO: 1179005 - RNA, 24 nt, Human
gaaaacacacagcucauguccucc

SEQ ID NO: 1179006 - RNA, 25 nt, Human
gaccccaccccccucccccaacccc

SEQ ID NO: 1179007 - RNA, 21 nt, Human
gagugcucgcuucaggagcac

SEQ ID NO: 1179008 - RNA, 23 nt, Human
ggaaaggguggaacuggaaacac

SEQ ID NO: 1179009 - RNA, 24 nt, Human
ggaccuacauggggggcugggauc

SEQ ID NO: 1179010 - RNA, 25 nt, Human
ggacuccuagaaggaccccaccccc

SEQ ID NO: 1179011 - RNA, 20 nt, Human
ggcaaccaaguccguaagaa

SEQ ID NO: 1179012 - RNA, 25 nt, Human
uaaaauagauaguauauauuagacg

SEQ ID NO: 1179013 - RNA, 23 nt, Human
uaauauacaaacaugccaaaaca

SEQ ID NO: 1179014 - RNA, 26 nt, Human
uaccaguauuuccaaaauauuuaaaa

SEQ ID NO: 1179015 - RNA, 18 nt, Human
uagaaggaccccaccccc

SEQ ID NO: 1179016 - RNA, 26 nt, Human
uagaaggaccccaccccccuccccca

SEQ ID NO: 1179017 - RNA, 22 nt, Human
uagauaaaaacaugcucccuuc

SEQ ID NO: 1179018 - RNA, 22 nt, Human
uagaugaucugcacaaaugguu

SEQ ID NO: 1179019 - RNA, 24 nt, Human
uauaaaaagggugguggugccgca

SEQ ID NO: 1179020 - RNA, 18 nt, Human
uauauguauguguauaua

SEQ ID NO: 1179021 - RNA, 19 nt, Human
uauauguauguguauauaa

SEQ ID NO: 1179022 - RNA, 22 nt, Human
ucaaaaguacaacaauuuccaa

SEQ ID NO: 1179023 - RNA, 24 nt, Human
ucaggagcacauauaauaauacag

SEQ ID NO: 1179024 - RNA, 26 nt, Human
uccccuggguccgguguucuucucuc

SEQ ID NO: 1179025 - RNA, 25 nt, Human
ucucaggccgaugaccucaggccuc

SEQ ID NO: 1179026 - RNA, 24 nt, Human
ucuccggcuccuccucagauucau

SEQ ID NO: 1179027 - RNA, 25 nt, Human
ucuccggcuccuccucagauucauc

SEQ ID NO: 1179028 - RNA, 18 nt, Human
ugagccccugcauugugc

SEQ ID NO: 1179029 - RNA, 22 nt, Human
ugaucugcacaaaugguuccuc

SEQ ID NO: 1179030 - RNA, 18 nt, Human
ugccaaaacaagguaaaa

SEQ ID NO: 1179031 - RNA, 19 nt, Human
ugccaaucugagccccugc

SEQ ID NO: 1179032 - RNA, 23 nt, Human
uggaauaaaguuccugcugaaaa

SEQ ID NO: 1179033 - RNA, 19 nt, Human
uuacaagaauuuaggggaa

SEQ ID NO: 1179034 - RNA, 18 nt, Human
uuaggggaacuacuacau

SEQ ID NO: 1179035 - RNA, 18 nt, Human
uucaaauauauaugaaau

SEQ ID NO: 1179036 - RNA, 21 nt, Human
uucacaaaagaauucugugcc

SEQ ID NO: 1179037 - RNA, 23 nt, Human
uucauuuuuauuauguuucccca

SEQ ID NO: 1179038 - RNA, 19 nt, Human
aaagagcccaguccuaaag

SEQ ID NO: 1179039 - RNA, 23 nt, Human
aaagagcccaguccuaaagccac

SEQ ID NO: 1179040 - RNA, 27 nt, Human
agaaacagcagcaggggcacccuugac

SEQ ID NO: 1179041 - RNA, 26 nt, Human
agaggagaggccaccguggggcacgc

SEQ ID NO: 1179042 - RNA, 21 nt, Human
agcccaguccuaaagccaccc

SEQ ID NO: 1179043 - RNA, 23 nt, Human
cacuguggguccaaggaugagcu

SEQ ID NO: 1179044 - RNA, 19 nt, Human
cagagaugcucuagaaaca

SEQ ID NO: 1179045 - RNA, 22 nt, Human
ccacuguggguccaaggaugag

SEQ ID NO: 1179046 - RNA, 19 nt, Human
ucaguggaagcaaggagcc

SEQ ID NO: 1179047 - RNA, 24 nt, Human
uccaaagagcccaguccuaaagcc

SEQ ID NO: 1179048 - RNA, 22 nt, Human
ucuagaaacagcagcaggggca

SEQ ID NO: 1179049 - RNA, 23 nt, Human
ucuagaaacagcagcaggggcac

SEQ ID NO: 1179050 - RNA, 20 nt, Human
ugaaaguacucaagagguca

SEQ ID NO: 1179051 - RNA, 19 nt, Human
uggaagcaaggagccaaau

SEQ ID NO: 1179052 - RNA, 18 nt, Human
uggguugcagagaugcuc

SEQ ID NO: 1179053 - RNA, 21 nt, Human
uuguucccuucuuggcaaucc

SEQ ID NO: 1179054 - RNA, 24 nt, Human
aaaaaugcagccaagcuuugcugu

SEQ ID NO: 1179055 - RNA, 22 nt, Human
aaaaugcagccaagcuuugcug

SEQ ID NO: 1179056 - RNA, 25 nt, Human
aaacacguacacaagccaggccccc

SEQ ID NO: 1179057 - RNA, 26 nt, Human
aaacacguacacaagccaggcccccc

SEQ ID NO: 1179058 - RNA, 24 nt, Human
aaagagacacgacgcagaugcuga

SEQ ID NO: 1179059 - RNA, 20 nt, Human
aaauacaaaaugccaaagac

SEQ ID NO: 1179060 - RNA, 19 nt, Human
aacaacaccugccaccaac

SEQ ID NO: 1179061 - RNA, 18 nt, Human
aaccaaauuccuuccugg

SEQ ID NO: 1179062 - RNA, 18 nt, Human
aaccaggccgccgaccua

SEQ ID NO: 1179063 - RNA, 19 nt, Human
aacccacagaccaaauaag

SEQ ID NO: 1179064 - RNA, 20 nt, Human
aagcaagugugaugcugcuu

SEQ ID NO: 1179065 - RNA, 22 nt, Human
aaggaugucccuggagcccucc

SEQ ID NO: 1179066 - RNA, 25 nt, Human
acaaacaaaagcacaaagagacacg

SEQ ID NO: 1179067 - RNA, 31 nt, Human; identical to SEQ ID NO: 764339

SEQ ID NO: 1179068 - RNA, 22 nt, Human
acacaagcaagagaugggcacu

SEQ ID NO: 1179069 - RNA, 21 nt, Human
acagcggggugugucugccug

SEQ ID NO: 1179070 - RNA, 18 nt, Human
acaggcugggcuggggac

SEQ ID NO: 1179071 - RNA, 18 nt, Human
accagaugcaacacgccc

SEQ ID NO: 1179072 - RNA, 20 nt, Human
acccagccguggucuguacc

SEQ ID NO: 1179073 - RNA, 20 nt, Human
acugcaccuguggcucacca

SEQ ID NO: 1179074 - RNA, 18 nt, Human
acugggagagaacaggcu

SEQ ID NO: 1179075 - RNA, 23 nt, Human
agacaccaggccugggcugugca

SEQ ID NO: 1179076 - RNA, 18 nt, Human
agagaacaggcugggcug

SEQ ID NO: 1179077 - RNA, 22 nt, Human
agagaugggcacuggacacugu

SEQ ID NO: 1179078 - RNA, 19 nt, Human
agaugcaacacgccccacc

SEQ ID NO: 1179079 - RNA, 20 nt, Human
agaugcaacacgccccacca

SEQ ID NO: 1179080 - RNA, 19 nt, Human
agaugugucuguuggcacu

SEQ ID NO: 1179081 - RNA, 20 nt, Human
agcagacagaccacagccag

SEQ ID NO: 1179082 - RNA, 19 nt, Human
agccacgggagagcaaacg

SEQ ID NO: 1179083 - RNA, 19 nt, Human
agccgcuggcccuccccag

SEQ ID NO: 1179084 - RNA, 23 nt, Human
agcuggugccucugcugaggucu

SEQ ID NO: 1179085 - RNA, 19 nt, Human
aggaacucccuccuaggcc

SEQ ID NO: 1179086 - RNA, 19 nt, Human
aggccgccgaccuacccag

SEQ ID NO: 1179087 - RNA, 21 nt, Human
aggccucugcagcugcuggcu

SEQ ID NO: 1179088 - RNA, 24 nt, Human
aggcugcacgccucucuggcauca

SEQ ID NO: 1179089 - RNA, 20 nt, Human
agggcagcucuggagggcag

SEQ ID NO: 1179090 - RNA, 18 nt, Human
aguuggcacagcguaggc

SEQ ID NO: 1179091 - RNA, 21 nt, Human
auagaaucucauucagaucuu

SEQ ID NO: 1179092 - RNA, 22 nt, Human
auagaaucucauucagaucuug

SEQ ID NO: 1179093 - RNA, 22 nt, Human
augacccaggcucagcuuaggu

SEQ ID NO: 1179094 - RNA, 24 nt, Human
auggagcuugggagugcagaggcc

SEQ ID NO: 1179095 - RNA, 23 nt, Human
caaaagcacaaagagacacgacg

SEQ ID NO: 1179096 - RNA, 20 nt, Human
caaaaugccaaagaccagcg

SEQ ID NO: 1179097 - RNA, 23 nt, Human
caaacgcugcuuccaaaaccaaa

SEQ ID NO: 1179098 - RNA, 25 nt, Human
cacaaacaaaagcacaaagagacac

SEQ ID NO: 1179099 - RNA, 23 nt, Human
cacccugcuguucucagaagcaa

SEQ ID NO: 1179100 - RNA, 21 nt, Human
cacgagccuaugcugucccuu

SEQ ID NO: 1179101 - RNA, 20 nt, Human
cacgccucucuggcaucacg

SEQ ID NO: 1179102 - RNA, 24 nt, Human
cagacaaacgagcaaagggaguuc

SEQ ID NO: 1179103 - RNA, 19 nt, Human
cagacgucauuucuguugc

SEQ ID NO: 1179104 - RNA, 19 nt, Human
cagagccuccucucucccu

SEQ ID NO: 1179105 - RNA, 21 nt, Human
cagaggccgcacacauggggu

SEQ ID NO: 1179106 - RNA, 21 nt, Human
cagaugcaacacgccccacca

SEQ ID NO: 1179107 - RNA, 19 nt, Human
cagcaagggcuaaucucac

SEQ ID NO: 1179108 - RNA, 20 nt, Human
cagccaccugcacggggcca

SEQ ID NO: 1179109 - RNA, 24 nt, Human
cagcgccccagggaguggacccgg

SEQ ID NO: 1179110 - RNA, 24 nt, Human
cagcgcugccaucacggcguggag

SEQ ID NO: 1179111 - RNA, 18 nt, Human
cagcggguccacuccuuc

SEQ ID NO: 1179112 - RNA, 21 nt, Human
cagcugucuggugggugaugu

SEQ ID NO: 1179113 - RNA, 18 nt, Human
caggagacaaaaauagac

SEQ ID NO: 1179114 - RNA, 18 nt, Human
caggcccuugggagcuug

SEQ ID NO: 1179115 - RNA, 18 nt, Human
caggguggggcggguccu

SEQ ID NO: 1179116 - RNA, 18 nt, Human
ccaacaccgggcccuggg

SEQ ID NO: 1179117 - RNA, 22 nt, Human
ccaggccugggcugugcagggg

SEQ ID NO: 1179118 - RNA, 18 nt, Human
ccagggguuaagccuguc

SEQ ID NO: 1179119 - RNA, 18 nt, Human
cccagcccagcccagccc

SEQ ID NO: 1179120 - RNA, 25 nt, Human
cccagccccucccugcacucucucc

SEQ ID NO: 1179121 - RNA, 21 nt, Human
ccccacacaggcuaaggcucc

SEQ ID NO: 1179122 - RNA, 23 nt, Human
ccccgcugacucgcuuccaccca

SEQ ID NO: 1179123 - RNA, 23 nt, Human
ccccggcaggaguccccacaggg

SEQ ID NO: 1179124 - RNA, 18 nt, Human
cccgccaccagcuuggga

SEQ ID NO: 1179125 - RNA, 20 nt, Human
cccuccucuccuccucuucc

SEQ ID NO: 1179126 - RNA, 23 nt, Human
cccuggguuggaguuuagcccug

SEQ ID NO: 1179127 - RNA, 21 nt, Human
cccugugccaggaaagccucc

SEQ ID NO: 1179128 - RNA, 21 nt, Human
ccggcccgcgaccccgcugcc

SEQ ID NO: 1179129 - RNA, 19 nt, Human
ccuccggguacugcaccug

SEQ ID NO: 1179130 - RNA, 24 nt, Human
ccuccucucucccuuucacaagcc

SEQ ID NO: 1179131 - RNA, 18 nt, Human
ccucggggccuucccugg

SEQ ID NO: 1179132 - RNA, 21 nt, Human
ccucuccuaagccaucuugac

SEQ ID NO: 1179133 - RNA, 20 nt, Human
ccucucuggcaucacagucc

SEQ ID NO: 1179134 - RNA, 23 nt, Human
ccugccaccaacgucgacccuga

SEQ ID NO: 1179135 - RNA, 20 nt, Human
ccuggccugcugggcugaga

SEQ ID NO: 1179136 - RNA, 20 nt, Human
ccuggcgccggcccgcgacc

SEQ ID NO: 1179137 - RNA, 22 nt, Human
ccuggcuucugagccuggggcc

SEQ ID NO: 1179138 - RNA, 18 nt, Human
ccugggaagggcagcucu

SEQ ID NO: 1179139 - RNA, 27 nt, Human
ccuguccccguggacggaagccuuggg

SEQ ID NO: 1179140 - RNA, 21 nt, Human
ccuuaucccuuccaaaagauc

SEQ ID NO: 1179141 - RNA, 22 nt, Human
cgccggcccgcgaccccgcugc

SEQ ID NO: 1179142 - RNA, 18 nt, Human
cggcgcuggcuucgugcc

SEQ ID NO: 1179143 - RNA, 18 nt, Human
cggguaagcgaccugcgu

SEQ ID NO: 1179144 - RNA, 19 nt, Human
cggguccugcacuuugggu

SEQ ID NO: 1179145 - RNA, 18 nt, Human
cgugggcaggcggcaagg

SEQ ID NO: 1179146 - RNA, 23 nt, Human
cuaaauacaaaaugccaaagacc

SEQ ID NO: 1179147 - RNA, 21 nt, Human
cuacaaaggccuccuaagagc

SEQ ID NO: 1179148 - RNA, 24 nt, Human
cuccuccucuuucuccccauccug

SEQ ID NO: 1179149 - RNA, 18 nt, Human
cugagcuagguugggcua

SEQ ID NO: 1179150 - RNA, 21 nt, Human
cugcccggccgccccucaggg

SEQ ID NO: 1179151 - RNA, 21 nt, Human
cuggccugcugggcugagauc

SEQ ID NO: 1179152 - RNA, 24 nt, Human
cuuggaacggcgagccugccuccu

SEQ ID NO: 1179153 - RNA, 27 nt, Human
gaaaacacguacacaagccaggccccc

SEQ ID NO: 1179154 - RNA, 25 nt, Human
gaacagacaucacccugcuguucuc

SEQ ID NO: 1179155 - RNA, 19 nt, Human
gacauucagcagacagacc

SEQ ID NO: 1179156 - RNA, 26 nt, Human
gacgcuggggcagcgccccagggagu

SEQ ID NO: 1179157 - RNA, 20 nt, Human
gagccgcuggcccuccccag

SEQ ID NO: 1179158 - RNA, 21 nt, Human
gcaaacgcugcuuccaaaacc

SEQ ID NO: 1179159 - RNA, 23 nt, Human
gcagacaccaggccugggcugug

SEQ ID NO: 1179160 - RNA, 28 nt, Human
gccaugcugcagaaaaggcgcccagggg

SEQ ID NO: 1179161 - RNA, 20 nt, Human
gccccaggcacacccaccuc

SEQ ID NO: 1179162 - RNA, 18 nt, Human
gcccggccgccccucagg

SEQ ID NO: 1179163 - RNA, 18 nt, Human
gcccugcuuggcucugcc

SEQ ID NO: 1179164 - RNA, 19 nt, Human
gccgcccgcagccucgggg

SEQ ID NO: 1179165 - RNA, 22 nt, Human
gccuccuccucuuucuccccau

SEQ ID NO: 1179166 - RNA, 21 nt, Human
gccucucuggcaucacagucc

SEQ ID NO: 1179167 - RNA, 23 nt, Human
gccuggggccuccuccucuuucu

SEQ ID NO: 1179168 - RNA, 19 nt, Human
gcgaccagcgucguuuggc

SEQ ID NO: 1179169 - RNA, 23 nt, Human
gcucaccagccaccugcacgggg

SEQ ID NO: 1179170 - RNA, 18 nt, Human
gcugaggucugugagcag

SEQ ID NO: 1179171 - RNA, 18 nt, Human
gcuguaaggcuccacuga

SEQ ID NO: 1179172 - RNA, 18 nt, Human
gcuguggggaugggggaa

SEQ ID NO: 1179173 - RNA, 23 nt, Human
ggaauccgcgggcagcccuggcc

SEQ ID NO: 1179174 - RNA, 24 nt, Human
ggacggaagccuugggagaagcug

SEQ ID NO: 1179175 - RNA, 18 nt, Human
ggagacaggggccaggcu

SEQ ID NO: 1179176 - RNA, 21 nt, Human
ggagcuugggagugcagaggc

SEQ ID NO: 1179177 - RNA, 19 nt, Human
ggauagcaagggugacggg

SEQ ID NO: 1179178 - RNA, 18 nt, Human
ggcggguggggugaaggc

SEQ ID NO: 1179179 - RNA, 19 nt, Human
ggcguccgggucugggaau

SEQ ID NO: 1179180 - RNA, 21 nt, Human
ggcuccacugaaauccccccg

SEQ ID NO: 1179181 - RNA, 19 nt, Human
ggcuguaaggcuccacuga

SEQ ID NO: 1179182 - RNA, 20 nt, Human
gggaagggcagcucuggagg

SEQ ID NO: 1179183 - RNA, 18 nt, Human
gggcagcccuggccgccc

SEQ ID NO: 1179184 - RNA, 20 nt, Human
gggcaggcggcaaggugcug

SEQ ID NO: 1179185 - RNA, 24 nt, Human
gggcggguggggugaaggcaggga

SEQ ID NO: 1179186 - RNA, 21 nt, Human
ggggaagccggucucacaccu

SEQ ID NO: 1179187 - RNA, 19 nt, Human
ggggaggaguuggggacag

SEQ ID NO: 1179188 - RNA, 18 nt, Human
ggggugugucugccuggc

SEQ ID NO: 1179189 - RNA, 22 nt, Human
ggguggggcggguccugcacuu

SEQ ID NO: 1179190 - RNA, 21 nt, Human
ggugauguggagguguugcag

SEQ ID NO: 1179191 - RNA, 20 nt, Human
ggugccucugcugaggucug

SEQ ID NO: 1179192 - RNA, 19 nt, Human
gucaaggucgugggcaggc

SEQ ID NO: 1179193 - RNA, 19 nt, Human
gucccuggcuucugagccu

SEQ ID NO: 1179194 - RNA, 21 nt, Human
gugaacaacaccugccaccaa

SEQ ID NO: 1179195 - RNA, 18 nt, Human
gugccucugcugaggucu

SEQ ID NO: 1179196 - RNA, 18 nt, Human
gugcuuucugcagguuuu

SEQ ID NO: 1179197 - RNA, 18 nt, Human
guggucuucucuggcccu

SEQ ID NO: 1179198 - RNA, 22 nt, Human
guggucuugguggucuucucug

SEQ ID NO: 1179199 - RNA, 22 nt, Human
uaaaaggccaauaaugagaaua

SEQ ID NO: 1179200 - RNA, 24 nt, Human
uacacaguccaucaaguuaccagc

SEQ ID NO: 1179201 - RNA, 21 nt, Human
uagcccugcuuggcucugccc

SEQ ID NO: 1179202 - RNA, 24 nt, Human
ucacggcguggagacagugacggg

SEQ ID NO: 1179203 - RNA, 19 nt, Human
ucacuacagggcucccugg

SEQ ID NO: 1179204 - RNA, 20 nt, Human
ucacuucugccucuuuucug

SEQ ID NO: 1179205 - RNA, 21 nt, Human
ucagcagacagaccacagcca

SEQ ID NO: 1179206 - RNA, 22 nt, Human
ucagccucagcagugucagcuc

SEQ ID NO: 1179207 - RNA, 19 nt, Human
ucagucaggucacucaccc

SEQ ID NO: 1179208 - RNA, 19 nt, Human
uccacaaacaaaagcacaa

SEQ ID NO: 1179209 - RNA, 21 nt, Human
uccaccauccgagcugcagcu

SEQ ID NO: 1179210 - RNA, 21 nt, Human
uccacugaaauccccccggcg

SEQ ID NO: 1179211 - RNA, 24 nt, Human
ucccccaggaacucccuccuaggc

SEQ ID NO: 1179212 - RNA, 24 nt, Human
ucccuggagcccuccagcuggugc

SEQ ID NO: 1179213 - RNA, 19 nt, Human
ucccuggcuucugagccug

SEQ ID NO: 1179214 - RNA, 20 nt, Human
ucccuggcuucugagccugg

SEQ ID NO: 1179215 - RNA, 21 nt, Human
ucccuggcuucugagccuggg

SEQ ID NO: 1179216 - RNA, 23 nt, Human
ucccuggcuucugagccuggggc

SEQ ID NO: 1179217 - RNA, 20 nt, Human
uccgagcugcagcuggagau

SEQ ID NO: 1179218 - RNA, 19 nt, Human
ucgacccugaagugguaga

SEQ ID NO: 1179219 - RNA, 22 nt, Human
ucuaaauacaaaaugccaaaga

SEQ ID NO: 1179220 - RNA, 19 nt, Human
ucucuggcccuuccaccuc

SEQ ID NO: 1179221 - RNA, 24 nt, Human
ucugccucuuuucugcugguuucu

SEQ ID NO: 1179222 - RNA, 21 nt, Human
ucugucccuggcuucugagcc

SEQ ID NO: 1179223 - RNA, 23 nt, Human
ucuguuggcacugaaaauccacc

SEQ ID NO: 1179224 - RNA, 18 nt, Human
ugagccuggggccuccuc

SEQ ID NO: 1179225 - RNA, 21 nt, Human
ugagggggaugcgagccgcug

SEQ ID NO: 1179226 - RNA, 23 nt, Human
ugagggugucaccaggaagaggg

SEQ ID NO: 1179227 - RNA, 19 nt, Human
ugaugugaaccaagggaca

SEQ ID NO: 1179228 - RNA, 18 nt, Human
ugcagacaccaggccugg

SEQ ID NO: 1179229 - RNA, 21 nt, Human
ugcagacaccaggccugggcu

SEQ ID NO: 1179230 - RNA, 23 nt, Human
ugcgggaacgguggucuuggugg

SEQ ID NO: 1179231 - RNA, 23 nt, Human
ugcuguggggaugggggaagccg

SEQ ID NO: 1179232 - RNA, 19 nt, Human
uggagacagugacggggac

SEQ ID NO: 1179233 - RNA, 24 nt, Human
uggcacugccuggauucaguuugg

SEQ ID NO: 1179234 - RNA, 18 nt, Human
uggcaucacaguccgcac

SEQ ID NO: 1179235 - RNA, 21 nt, Human
uggccugcugggcugagaucg

SEQ ID NO: 1179236 - RNA, 24 nt, Human
uggcuccacaggcuccgcacgccc

SEQ ID NO: 1179237 - RNA, 19 nt, Human
uggcucggacccauggcgg

SEQ ID NO: 1179238 - RNA, 20 nt, Human
uggcucggacccauggcggg

SEQ ID NO: 1179239 - RNA, 21 nt, Human
uggcuucugagccuggggccu

SEQ ID NO: 1179240 - RNA, 24 nt, Human
uggcuucugagccuggggccuccu

SEQ ID NO: 1179241 - RNA, 25 nt, Human
ugggaagggcagcucuggagggcag

SEQ ID NO: 1179242 - RNA, 25 nt, Human
ugggaagggcagcucuggagggcag

SEQ ID NO: 1179243 - RNA, 18 nt, Human
ugggacaggccguguuuu

SEQ ID NO: 1179244 - RNA, 19 nt, Human
ugggagaagcugucagcug

SEQ ID NO: 1179245 - RNA, 22 nt, Human
ugggagagaacaggcugggcug

SEQ ID NO: 1179246 - RNA, 23 nt, Human
ugggagagaacaggcugggcugg

SEQ ID NO: 1179247 - RNA, 23 nt, Human
ugggcaggcggcaaggugcuguc

SEQ ID NO: 1179248 - RNA, 25 nt, Human
uggggacaccuguguccuccuccca

SEQ ID NO: 1179249 - RNA, 21 nt, Human
uggugccucugcugaggucug

SEQ ID NO: 1179250 - RNA, 20 nt, Human
uuccaaaagaucggccuaua

SEQ ID NO: 1179251 - RNA, 23 nt, Human
uucucagaagcaagugugaugcu

SEQ ID NO: 1179252 - RNA, 21 nt, Human
uucuggccuguuuggucccag

SEQ ID NO: 1179253 - RNA, 24 nt, Human
uucuggccuguuuggucccagccc

SEQ ID NO: 1179254 - RNA, 21 nt, Human
uuggggccaucggccuucuga

SEQ ID NO: 1179255 - RNA, 20 nt, Human
uuuagcccugcuuggcucuu

SEQ ID NO: 1179256 - RNA, 24 nt, Human
uuucuaaccauugggucucuccug

SEQ ID NO: 1179257 - RNA, 19 nt, Human
uuucugcugguuucuggcc

SEQ ID NO: 1179258 - RNA, 19 nt, Human
gugcacagcauuuucauga

SEQ ID NO: 1179259 - RNA, 20 nt, Human
aagacccugacccugcuccg

SEQ ID NO: 1179260 - RNA, 22 nt, Human
acaggcccagcagaaccaggag

SEQ ID NO: 1179261 - RNA, 29 nt, Human
accccaaagggcggcugccacacagaggg

SEQ ID NO: 1179262 - RNA, 25 nt, Human
agaccgcggccaccaccagcgucac

SEQ ID NO: 1179263 - RNA, 19 nt, Human
agagcuggggggaucugga

SEQ ID NO: 1179264 - RNA, 20 nt, Human
agcagcaccgccagcuuagc

SEQ ID NO: 1179265 - RNA, 19 nt, Human
agugguagauggugaagau

SEQ ID NO: 1179266 - RNA, 19 nt, Human
caccaccagcgucaccagc

SEQ ID NO: 1179267 - RNA, 25 nt, Human
caccagcagcaccgccagcuuagcc

SEQ ID NO: 1179268 - RNA, 18 nt, Human
caccccuucuccagccac

SEQ ID NO: 1179269 - RNA, 19 nt, Human
cagaaaaagaggaugaagg

SEQ ID NO: 1179270 - RNA, 18 nt, Human
cagcaggugcaccccuuc

SEQ ID NO: 1179271 - RNA, 23 nt, Human
ccacacagaggauccagcugugu

SEQ ID NO: 1179272 - RNA, 23 nt, Human
ccaccgagcacacaccauaaccc

SEQ ID NO: 1179273 - RNA, 18 nt, Human
ccccaaagggcggcugcc

SEQ ID NO: 1179274 - RNA, 23 nt, Human
ccugaggcacaggggcccagaaa

SEQ ID NO: 1179275 - RNA, 18 nt, Human
cgagcacacaccauaacc

SEQ ID NO: 1179276 - RNA, 18 nt, Human
cggcgcuggggcgcgugc

SEQ ID NO: 1179277 - RNA, 18 nt, Human
cggggcuggcgcggggcc

SEQ ID NO: 1179278 - RNA, 22 nt, Human
cucggcggacccuggagauagg

SEQ ID NO: 1179279 - RNA, 24 nt, Human
cucggcggacccuggagauaggag

SEQ ID NO: 1179280 - RNA, 18 nt, Human
gaagauggccacagccug

SEQ ID NO: 1179281 - RNA, 25 nt, Human
gaaggugagcagcaggugcaccccc

SEQ ID NO: 1179282 - RNA, 21 nt, Human
gagagcuggggggaucuggag

SEQ ID NO: 1179283 - RNA, 22 nt, Human
gagcggggccgggucgcaagaa

SEQ ID NO: 1179284 - RNA, 23 nt, Human
gagcggggccgggucgcaagaag

SEQ ID NO: 1179285 - RNA, 24 nt, Human
gaggagguaagccagccacuccag

SEQ ID NO: 1179286 - RNA, 18 nt, Human
gcucucggcggacccugg

SEQ ID NO: 1179287 - RNA, 20 nt, Human
ggcacaggggcccagaaaaa

SEQ ID NO: 1179288 - RNA, 20 nt, Human
gggcgcucacacgcggcccg

SEQ ID NO: 1179289 - RNA, 23 nt, Human
gguccgcggccgagagcuggggg

SEQ ID NO: 1179290 - RNA, 21 nt, Human
ggugaagauggccacagccug

SEQ ID NO: 1179291 - RNA, 27 nt, Human
gugcuggggccgcgggaugcggggcug

SEQ ID NO: 1179292 - RNA, 18 nt, Human
guggcucucggcggaccc

SEQ ID NO: 1179293 - RNA, 21 nt, Human
uaagccagccacuccagcccc

SEQ ID NO: 1179294 - RNA, 19 nt, Human
uaggagaccgcggccacca

SEQ ID NO: 1179295 - RNA, 24 nt, Human
ucagggcgcugcccacaccccaaa

SEQ ID NO: 1179296 - RNA, 18 nt, Human
uccagccccaccgagcac

SEQ ID NO: 1179297 - RNA, 18 nt, Human
uccagccccaccgagcac

SEQ ID NO: 1179298 - RNA, 21 nt, Human
uccgcagguaggagaccgcgg

SEQ ID NO: 1179299 - RNA, 22 nt, Human
ucucguccgaguuguccuccuc

SEQ ID NO: 1179300 - RNA, 24 nt, Human
ucucguccgaguuguccuccucca

SEQ ID NO: 1179301 - RNA, 21 nt, Human
ucuucguacaagauucccagg

SEQ ID NO: 1179302 - RNA, 19 nt, Human
ugaagauggccacagccug

SEQ ID NO: 1179303 - RNA, 18 nt, Human
ugagcagcaggugcaccc

SEQ ID NO: 1179304 - RNA, 24 nt, Human
ugaguccagucuuguucagggcgc

SEQ ID NO: 1179305 - RNA, 19 nt, Human
ugcaggaccugaggcacag

SEQ ID NO: 1179306 - RNA, 18 nt, Human
ugcuaagggcccgcgggg

SEQ ID NO: 1179307 - RNA, 20 nt, Human
uggcagccacaggcccagca

SEQ ID NO: 1179308 - RNA, 23 nt, Human
uggcagccacaggcccagcagaa

SEQ ID NO: 1179309 - RNA, 22 nt, Human
uggcgcggggccacgccccgcc

SEQ ID NO: 1179310 - RNA, 24 nt, Human
uucuccagccacgaggggcaccgg

SEQ ID NO: 1179311 - RNA, 22 nt, Human
uuuucuguaaaaaaucguggcu

SEQ ID NO: 1179312 - RNA, 22 nt, Human
agaggaggcccagcagaugggc

SEQ ID NO: 1179313 - RNA, 20 nt, Human
aggccacauggagucagggg

SEQ ID NO: 1179314 - RNA, 18 nt, Human
ccagcugggggcuggggg

SEQ ID NO: 1179315 - RNA, 23 nt, Human
cugaggggcaggguugguucgga

SEQ ID NO: 1179316 - RNA, 20 nt, Human
cugggagcucauuuaauagg

SEQ ID NO: 1179317 - RNA, 18 nt, Human
gagcucauuuaauaggca

SEQ ID NO: 1179318 - RNA, 18 nt, Human
gaggcagaggaggcccag

SEQ ID NO: 1179319 - RNA, 21 nt, Human
gaggcagaggaggcccagcag

SEQ ID NO: 1179320 - RNA, 20 nt, Human
ggagucaggggccagcuggg

SEQ ID NO: 1179321 - RNA, 23 nt, Human
gggaggcagaggaggcccagcag

SEQ ID NO: 1179322 - RNA, 19 nt, Human
ggggccagcugggggcugg

SEQ ID NO: 1179323 - RNA, 18 nt, Human
uaauaggcagggcauuuc

SEQ ID NO: 1179324 - RNA, 19 nt, Human
ucaggggccagcugggggc

SEQ ID NO: 1179325 - RNA, 20 nt, Human
uggagucaggggccagcugg

SEQ ID NO: 1179326 - RNA, 21 nt, Human
ugggagcucauuuaauaggca

SEQ ID NO: 1179327 - RNA, 24 nt, Human
aaaaucugcuuacagauuucaguu

SEQ ID NO: 1179328 - RNA, 23 nt, Human
accagcgccucgcgguaacgacc

SEQ ID NO: 1179329 - RNA, 19 nt, Human
acccagaagccggcaaacc

SEQ ID NO: 1179330 - RNA, 18 nt, Human
agacccagaagccggcaa

SEQ ID NO: 1179331 - RNA, 21 nt, Human
aggcagccgccacagcguguc

SEQ ID NO: 1179332 - RNA, 22 nt, Human
caaaccagggcugacccgcgcc

SEQ ID NO: 1179333 - RNA, 23 nt, Human
caaagacccagaagccggcaaac

SEQ ID NO: 1179334 - RNA, 23 nt, Human
caagccgcuccgccagccgacga

SEQ ID NO: 1179335 - RNA, 18 nt, Human
cagaagccggcaaaccag

SEQ ID NO: 1179336 - RNA, 21 nt, Human
cagccgacgaccuuguuucug

SEQ ID NO: 1179337 - RNA, 23 nt, Human
cagcgccucgcgguaacgaccga

SEQ ID NO: 1179338 - RNA, 22 nt, Human
ccaaccacaagugcgcggcgcc

SEQ ID NO: 1179339 - RNA, 23 nt, Human
ccacaagugcgcggcgccgcgac

SEQ ID NO: 1179340 - RNA, 25 nt, Human
ccagcgccucgcgguaacgaccgag

SEQ ID NO: 1179341 - RNA, 20 nt, Human
ggucugcagaacuucaucaa

SEQ ID NO: 1179342 - RNA, 24 nt, Human
uaggaaacauuuacaaacacugag

SEQ ID NO: 1179343 - RNA, 21 nt, Human
uccguaccacggccacauugg

SEQ ID NO: 1179344 - RNA, 19 nt, Human
ugagaucuuccuucuuggc

SEQ ID NO: 1179345 - RNA, 19 nt, Human
uguucaaagacccagaagc

SEQ ID NO: 1179346 - RNA, 22 nt, Human
uugguuaggcggaucugguugg

SEQ ID NO: 1179347 - RNA, 18 nt, Human
uuuggucaucuguuccaa

SEQ ID NO: 1179348 - RNA, 21 nt, Human
agacaccaacggucggaaacc

SEQ ID NO: 1179349 - RNA, 25 nt, Human
agaucaccugaggucaggaguuggg

SEQ ID NO: 1179350 - RNA, 22 nt, Human
aggcgggcagaucaccugaggu

SEQ ID NO: 1179351 - RNA, 26 nt, Human
aggcgggcagaucaccugaggucagg

SEQ ID NO: 1179352 - RNA, 20 nt, Human
caccaacggucagaaaccgc

SEQ ID NO: 1179353 - RNA, 18 nt, Human
cagacaccaacggucaga

SEQ ID NO: 1179354 - RNA, 21 nt, Human
cagacaccaacggucggaaag

SEQ ID NO: 1179355 - RNA, 24 nt, Human
cagcacuuugggagguggaggcgg

SEQ ID NO: 1179356 - RNA, 22 nt, Human
caggaguuggggaccagucaug

SEQ ID NO: 1179357 - RNA, 24 nt, Human
caggccuguaaucucagcacuuug

SEQ ID NO: 1179358 - RNA, 18 nt, Human
caguguccuguaucaugu

SEQ ID NO: 1179359 - RNA, 24 nt, Human
cauggccaccauggugaaauuccg

SEQ ID NO: 1179360 - RNA, 19 nt, Human
cauggugaaauuccgucuc

SEQ ID NO: 1179361 - RNA, 21 nt, Human
cauggugaaauuccgucucua

SEQ ID NO: 1179362 - RNA, 20 nt, Human
ccugaggucaggaguugggg

SEQ ID NO: 1179363 - RNA, 22 nt, Human
ccuguaaucucagcacuuuggg

SEQ ID NO: 1179364 - RNA, 21 nt, Human
cgcucggaaaccgccagacac

SEQ ID NO: 1179365 - RNA, 24 nt, Human
cgcucggaauacacgccagaccac

SEQ ID NO: 1179366 - RNA, 24 nt, Human
cgggcagaucaccugaggucagga

SEQ ID NO: 1179367 - RNA, 21 nt, Human
cggucagaaaccgccagacac

SEQ ID NO: 1179368 - RNA, 24 nt, Human
cucaggccuguaaucucagcacuu

SEQ ID NO: 1179369 - RNA, 22 nt, Human
cugcuuucuucuucacaccgcg

SEQ ID NO: 1179370 - RNA, 21 nt, Human
gaucaccugaggucaggaguu

SEQ ID NO: 1179371 - RNA, 23 nt, Human
gaucaccugaggucaggaguugg

SEQ ID NO: 1179372 - RNA, 24 nt, Human
gaucaccugaggucaggaguuggg

SEQ ID NO: 1179373 - RNA, 25 nt, Human
gaucaccugaggucaggaguugggg

SEQ ID NO: 1179374 - RNA, 24 nt, Human
gccaccauggugaaauuccgucuc

SEQ ID NO: 1179375 - RNA, 20 nt, Human
ggaggcgggcagaucaccug

SEQ ID NO: 1179376 - RNA, 23 nt, Human
ggccuguaaucucagcacuuugg

SEQ ID NO: 1179377 - RNA, 23 nt, Human
ggcgcgguggcucaggccuguaa

SEQ ID NO: 1179378 - RNA, 19 nt, Human
ggcugggcgcgguggcuca

SEQ ID NO: 1179379 - RNA, 26 nt, Human
gggcagaucaccugaggucaggaguu

SEQ ID NO: 1179380 - RNA, 23 nt, Human
gguggcucaggccuguaaucuca

SEQ ID NO: 1179381 - RNA, 24 nt, Human
gguggcucaggccuguaaucucag

SEQ ID NO: 1179382 - RNA, 20 nt, Human
guaucauguuucagagggug

SEQ ID NO: 1179383 - RNA, 18 nt, Human
uaaaacagaugccauggc

SEQ ID NO: 1179384 - RNA, 24 nt, Human
ucaguggucguuuugcugcuuucu

SEQ ID NO: 1179385 - RNA, 26 nt, Human
ucaguggucguuuugcugcuuucuuc

SEQ ID NO: 1179386 - RNA, 23 nt, Human
ucuucacaccgcgauugaagcug

SEQ ID NO: 1179387 - RNA, 22 nt, Human
ugacgauguaccgcuugggacc

SEQ ID NO: 1179388 - RNA, 18 nt, Human
ugccauggcugggcgcgg

SEQ ID NO: 1179389 - RNA, 18 nt, Human
ugcugcuuucuucuucac

SEQ ID NO: 1179390 - RNA, 27 nt, Human
uggaggcgggcagaucaccugagguca

SEQ ID NO: 1179391 - RNA, 21 nt, Human
uggccaccauggugaaauucc

SEQ ID NO: 1179392 - RNA, 19 nt, Human
uggcucaggccuguaaucu

SEQ ID NO: 1179393 - RNA, 24 nt, Human
uggcucaggccuguaaucucagca

SEQ ID NO: 1179394 - RNA, 22 nt, Human
uggcugggcgcgguggcucagg

SEQ ID NO: 1179395 - RNA, 23 nt, Human
uggcugggcgcgguggcucaggc

SEQ ID NO: 1179396 - RNA, 24 nt, Human
ugggagguggaggcgggcagauca

SEQ ID NO: 1179397 - RNA, 25 nt, Human
uuuccggcuaugacgauguaccgcu

SEQ ID NO: 1179398 - RNA, 18 nt, Human
aaagugcugggauuacaa

SEQ ID NO: 1179399 - RNA, 24 nt, Human
aaagugcugggauuacaaguguga

SEQ ID NO: 1179400 - RNA, 19 nt, Human
aacugaacucccaggugcc

SEQ ID NO: 1179401 - RNA, 20 nt, Human
aagcguguuggggucuccuc

SEQ ID NO: 1179402 - RNA, 19 nt, Human
aaguagcugggauuauagg

SEQ ID NO: 1179403 - RNA, 24 nt, Human
aaguagcugggauuauaggcacac

SEQ ID NO: 1179404 - RNA, 24 nt, Human
aagugauccgccugccuuggcuuc

SEQ ID NO: 1179405 - RNA, 18 nt, Human
aagugcugggauuacaag

SEQ ID NO: 1179406 - RNA, 19 nt, Human
aagugcugggauuacaagu

SEQ ID NO: 1179407 - RNA, 26 nt, Human
aagugcugggauuacaagugugagcc

SEQ ID NO: 1179408 - RNA, 21 nt, Human
aaucaggaaggucggaaucuc

SEQ ID NO: 1179409 - RNA, 18 nt, Human
acaggguuucaccauguu

SEQ ID NO: 1179410 - RNA, 23 nt, Human
acaggguuucaccauguuggcca

SEQ ID NO: 1179411 - RNA, 24 nt, Human
acaggguuucaccauguuggccag

SEQ ID NO: 1179412 - RNA, 18 nt, Human
accauguuggccaggcug

SEQ ID NO: 1179413 - RNA, 23 nt, Human
acccaggcuggaguguaguggug

SEQ ID NO: 1179414 - RNA, 20 nt, Human
acccuucuuuuuuuucuucu

SEQ ID NO: 1179415 - RNA, 21 nt, Human
accgccuggcuaauuuuugua

SEQ ID NO: 1179416 - RNA, 18 nt, Human
acucugucacccagacug

SEQ ID NO: 1179417 - RNA, 25 nt, Human
acucugucacccagacuggagugca

SEQ ID NO: 1179418 - RNA, 24 nt, Human
aggcacacaccacuaccgccuggc

SEQ ID NO: 1179419 - RNA, 19 nt, Human
aggcucaagugauucuccu

SEQ ID NO: 1179420 - RNA, 24 nt, Human
agugcaguagcacgaucucggcuc

SEQ ID NO: 1179421 - RNA, 21 nt, Human
aguguaguggugcaaucucag

SEQ ID NO: 1179422 - RNA, 24 nt, Human
aguguaguggugcaaucucagcuc

SEQ ID NO: 1179423 - RNA, 20 nt, Human
aguuauucuccugccucagc

SEQ ID NO: 1179424 - RNA, 18 nt, Human
aucucacucugucaccca

SEQ ID NO: 1179425 - RNA, 24 nt, Human
aucuugcuuugucacccaggcugg

SEQ ID NO: 1179426 - RNA, 24 nt, Human
auuuuuguacuuuuaguagagaug

SEQ ID NO: 1179427 - RNA, 24 nt, Human
caaagugcugggauuacaagugug

SEQ ID NO: 1179428 - RNA, 23 nt, Human
caaccucuuccucccaggcucaa

SEQ ID NO: 1179429 - RNA, 22 nt, Human
caagugauccgccugccuuggc

SEQ ID NO: 1179430 - RNA, 22 nt, Human
caagugauucuccugucuuagc

SEQ ID NO: 1179431 - RNA, 21 nt, Human
caccauguuggccaggcuggu

SEQ ID NO: 1179432 - RNA, 24 nt, Human
caccauguuggccaggcuggucuc

SEQ ID NO: 1179433 - RNA, 27 nt, Human
caccauguuggccaggcuggucucaaa

SEQ ID NO: 1179434 - RNA, 24 nt, Human
cacccaggcuggaguguaguggug

SEQ ID NO: 1179435 - RNA, 22 nt, Human
cacucugucacccagacuggag

SEQ ID NO: 1179436 - RNA, 23 nt, Human
cacucugucacccagacuggagu

SEQ ID NO: 1179437 - RNA, 24 nt, Human
cacugcacccagccugaauuucuc

SEQ ID NO: 1179438 - RNA, 24 nt, Human
caggguuucaccauguuggccagg

SEQ ID NO: 1179439 - RNA, 28 nt, Human
caucucccggauuccaguuauucuccuu

SEQ ID NO: 1179440 - RNA, 24 nt, Human
cauguuggccaggcuggucucaaa

SEQ ID NO: 1179441 - RNA, 24 nt, Human
cauuuuguacuuuuaauagagaca

SEQ ID NO: 1179442 - RNA, 20 nt, Human
ccaaagugcugggauuacaa

SEQ ID NO: 1179443 - RNA, 21 nt, Human
ccaaagugcugggauuacaag

SEQ ID NO: 1179444 - RNA, 24 nt, Human
ccaaagugcugggauuacaagugu

SEQ ID NO: 1179445 - RNA, 19 nt, Human
ccacugcacccagccugaa

SEQ ID NO: 1179446 - RNA, 20 nt, Human
ccacugcacccagccugaau

SEQ ID NO: 1179447 - RNA, 23 nt, Human
ccagcagaggcuguguccucucc

SEQ ID NO: 1179448 - RNA, 24 nt, Human
ccaguuauucuccugccucagccu

SEQ ID NO: 1179449 - RNA, 20 nt, Human
cccaaccucagaccacuguc

SEQ ID NO: 1179450 - RNA, 23 nt, Human
cccaaguagcugggauuauaggc

SEQ ID NO: 1179451 - RNA, 24 nt, Human
cccaaguagcugggauuauaggca

SEQ ID NO: 1179452 - RNA, 21 nt, Human
cccaggcucaagugauucucc

SEQ ID NO: 1179453 - RNA, 21 nt, Human
cccaggcucaagugauucucc

SEQ ID NO: 1179454 - RNA, 20 nt, Human
ccgccuggcuaauuuuugua

SEQ ID NO: 1179455 - RNA, 21 nt, Human
ccucaagugauccgccugccu

SEQ ID NO: 1179456 - RNA, 24 nt, Human
ccucccaggcucaagugauucucc

SEQ ID NO: 1179457 - RNA, 24 nt, Human
ccucucagguagcugggauuacag

SEQ ID NO: 1179458 - RNA, 22 nt, Human
ccugccuuggcuucccaaagug

SEQ ID NO: 1179459 - RNA, 22 nt, Human
ccuggagauccugggugaaugg

SEQ ID NO: 1179460 - RNA, 18 nt, Human
ccuggccucaagugaucc

SEQ ID NO: 1179461 - RNA, 18 nt, Human
ccuggccucaagugaucc

SEQ ID NO: 1179462 - RNA, 21 nt, Human
ccuggccucaagugauccgcc

SEQ ID NO: 1179463 - RNA, 23 nt, Human
ccuggccucaagugauccgccug

SEQ ID NO: 1179464 - RNA, 21 nt, Human
cuaccgccuggcuaauuuuug

SEQ ID NO: 1179465 - RNA, 23 nt, Human
cucaagugauccgccugccuugg

SEQ ID NO: 1179466 - RNA, 23 nt, Human
cucaagugauucuccugucuuag

SEQ ID NO: 1179467 - RNA, 24 nt, Human
cucacugcaacaugcaucucccgg

SEQ ID NO: 1179468 - RNA, 19 nt, Human
cucacugcaaccucuuccu

SEQ ID NO: 1179469 - RNA, 24 nt, Human
cucacugcaaccucuuccucccag

SEQ ID NO: 1179470 - RNA, 23 nt, Human
cucagccucucagguagcuggga

SEQ ID NO: 1179471 - RNA, 23 nt, Human
cucagguagcugggauuacaggu

SEQ ID NO: 1179472 - RNA, 24 nt, Human
cucagguagcugggauuacaggug

SEQ ID NO: 1179473 - RNA, 20 nt, Human
cucaugccaaccuggcaacc

SEQ ID NO: 1179474 - RNA, 18 nt, Human
cucccaggcucaagugau

SEQ ID NO: 1179475 - RNA, 20 nt, Human
cucccaggugccgacagagu

SEQ ID NO: 1179476 - RNA, 24 nt, Human
cuccugccacugucccaaccucag

SEQ ID NO: 1179477 - RNA, 22 nt, Human
cuccugccucagccucucaggu

SEQ ID NO: 1179478 - RNA, 23 nt, Human
cugcaaccucuuccucccaggcu

SEQ ID NO: 1179479 - RNA, 24 nt, Human
cugcaaccucuuccucccaggcuc

SEQ ID NO: 1179480 - RNA, 20 nt, Human
cugccaggcugaucucuugu

SEQ ID NO: 1179481 - RNA, 23 nt, Human
cugccucagccucucagguagcu

SEQ ID NO: 1179482 - RNA, 19 nt, Human
cugggugaaugguaucucc

SEQ ID NO: 1179483 - RNA, 23 nt, Human
cugucuuagccucccaaguagcu

SEQ ID NO: 1179484 - RNA, 18 nt, Human
cuuccucccaggcucaag

SEQ ID NO: 1179485 - RNA, 19 nt, Human
cuuuuaguagagauggggu

SEQ ID NO: 1179486 - RNA, 22 nt, Human
gacagaaucuugcuuugucacc

SEQ ID NO: 1179487 - RNA, 18 nt, Human
gauuacaagugugagcca

SEQ ID NO: 1179488 - RNA, 22 nt, Human
gauuacaagugugagccacugc

SEQ ID NO: 1179489 - RNA, 23 nt, Human
gauuacaagugugagccacugca

SEQ ID NO: 1179490 - RNA, 18 nt, Human
gauuacaggugccugcca

SEQ ID NO: 1179491 - RNA, 21 nt, Human
gccauaaugcccagcuccauu

SEQ ID NO: 1179492 - RNA, 22 nt, Human
gccuuggcuucccaaagugcug

SEQ ID NO: 1179493 - RNA, 24 nt, Human
gccuuggcuucccaaagugcuggg

SEQ ID NO: 1179494 - RNA, 21 nt, Human
gcucacugcaaccucuuccuc

SEQ ID NO: 1179495 - RNA, 21 nt, Human
gcugggauuacaagugugagc

SEQ ID NO: 1179496 - RNA, 23 nt, Human
gcuggucucaaacuccuggccuc

SEQ ID NO: 1179497 - RNA, 24 nt, Human
gcuugaagcguguuggggucuccu

SEQ ID NO: 1179498 - RNA, 24 nt, Human
ggcuggucucaaacuccuggccuc

SEQ ID NO: 1179499 - RNA, 22 nt, Human
ggguuucaccauguuggccagg

SEQ ID NO: 1179500 - RNA, 20 nt, Human
gguagcugggauuacaggug

SEQ ID NO: 1179501 - RNA, 18 nt, Human
guagcugggauuacaggu

SEQ ID NO: 1179502 - RNA, 20 nt, Human
guagcugggauuacaggugc

SEQ ID NO: 1179503 - RNA, 18 nt, Human
guagcugggauuauaggc

SEQ ID NO: 1179504 - RNA, 18 nt, Human
guccaacugaacucccag

SEQ ID NO: 1179505 - RNA, 24 nt, Human
gugauucuccugucuuagccuccc

SEQ ID NO: 1179506 - RNA, 23 nt, Human
uaacugccaggcugaucucuugu

SEQ ID NO: 1179507 - RNA, 24 nt, Human
uaauagagacaggguuucaccaug

SEQ ID NO: 1179508 - RNA, 25 nt, Human
uaauagagacaggguuucaccaugu

SEQ ID NO: 1179509 - RNA, 24 nt, Human
uaauuuuuguacuuuuaguagaga

SEQ ID NO: 1179510 - RNA, 24 nt, Human
uacaagugugagccacugcaccca

SEQ ID NO: 1179511 - RNA, 21 nt, Human
uagagacaggguuucaccaug

SEQ ID NO: 1179512 - RNA, 22 nt, Human
uagagacaggguuucaccaugu

SEQ ID NO: 1179513 - RNA, 19 nt, Human
uauucuccugccucagccu

SEQ ID NO: 1179514 - RNA, 24 nt, Human
ucacccaggcuggaguguaguggu

SEQ ID NO: 1179515 - RNA, 24 nt, Human
ucacugcaacaugcaucucccgga

SEQ ID NO: 1179516 - RNA, 22 nt, Human
ucacugcaaccucuuccuccca

SEQ ID NO: 1179517 - RNA, 24 nt, Human
ucacugcaaccucuuccucccagg

SEQ ID NO: 1179518 - RNA, 25 nt, Human
ucaggaugggaaagaaaaguagggu

SEQ ID NO: 1179519 - RNA, 21 nt, Human
ucagguagcugggauuacagg

SEQ ID NO: 1179520 - RNA, 18 nt, Human
ucccaaagugcugggauu

SEQ ID NO: 1179521 - RNA, 23 nt, Human
ucccaaagugcugggauuacaag

SEQ ID NO: 1179522 - RNA, 24 nt, Human
ucccaaguagcugggauuauaggc

SEQ ID NO: 1179523 - RNA, 21 nt, Human
ucccaggcucaagugauucuc

SEQ ID NO: 1179524 - RNA, 24 nt, Human
ucccaggcucaagugauucuccug

SEQ ID NO: 1179525 - RNA, 21 nt, Human
ucccaggugccgacagagucc

SEQ ID NO: 1179526 - RNA, 18 nt, Human
uccccagguucuccuucc

SEQ ID NO: 1179527 - RNA, 21 nt, Human
uccccagguucuccuuccuga

SEQ ID NO: 1179528 - RNA, 21 nt, Human
ucccggauuccaguuauucuc

SEQ ID NO: 1179529 - RNA, 24 nt, Human
ucccggauuccaguuauucuccug

SEQ ID NO: 1179530 - RNA, 18 nt, Human
ucccucuguucccugucc

SEQ ID NO: 1179531 - RNA, 21 nt, Human
uccugggugaaugguaucucc

SEQ ID NO: 1179532 - RNA, 18 nt, Human
uccuuggucuucuucugg

SEQ ID NO: 1179533 - RNA, 24 nt, Human
ucucacucugucacccagacugga

SEQ ID NO: 1179534 - RNA, 26 nt, Human
ucucacucugucacccagacuggagu

SEQ ID NO: 1179535 - RNA, 27 nt, Human
ucucacucugucacccagacuggagug

SEQ ID NO: 1179536 - RNA, 23 nt, Human
ucucagguagcugggauuacagg

SEQ ID NO: 1179537 - RNA, 24 nt, Human
ucucagguagcugggauuacaggu

SEQ ID NO: 1179538 - RNA, 24 nt, Human
ucucccggauuccaguuauucucc

SEQ ID NO: 1179539 - RNA, 26 nt, Human
ucuccugucuuagccucccaaguagc

SEQ ID NO: 1179540 - RNA, 24 nt, Human
ucugucacccagacuggagugcag

SEQ ID NO: 1179541 - RNA, 25 nt, Human
ucuuagccucccaaguagcugggau

SEQ ID NO: 1179542 - RNA, 19 nt, Human
ucuuccucccaggcucaag

SEQ ID NO: 1179543 - RNA, 23 nt, Human
ucuugcuuugucacccaggcugg

SEQ ID NO: 1179544 - RNA, 24 nt, Human
ucuugcuuugucacccaggcugga

SEQ ID NO: 1179545 - RNA, 18 nt, Human
ucuuuuuuuuuuuuuuuu

SEQ ID NO: 1179546 - RNA, 21 nt, Human
ugaauuucuccauucuuccca

SEQ ID NO: 1179547 - RNA, 23 nt, Human
ugacccuucuuuuuuuucuucuu

SEQ ID NO: 1179548 - RNA, 24 nt, Human
ugccucagccucucagguagcugg

SEQ ID NO: 1179549 - RNA, 19 nt, Human
ugccuuggcuucccaaagu

SEQ ID NO: 1179550 - RNA, 27 nt, Human
ugcugggauuacaagugugagccacug

SEQ ID NO: 1179551 - RNA, 24 nt, Human
ugcuuugucacccaggcuggagug

SEQ ID NO: 1179552 - RNA, 23 nt, Human
uggagugcaguagcacgaucucg

SEQ ID NO: 1179553 - RNA, 24 nt, Human
uggagugcaguagcacgaucucgg

SEQ ID NO: 1179554 - RNA, 23 nt, Human
uggaguguaguggugcaaucuca

SEQ ID NO: 1179555 - RNA, 24 nt, Human
uggaguguaguggugcaaucucag

SEQ ID NO: 1179556 - RNA, 24 nt, Human
uggccaggcuggucucaaacuccu

SEQ ID NO: 1179557 - RNA, 18 nt, Human
uggccucaagugauccgc

SEQ ID NO: 1179558 - RNA, 24 nt, Human
uggccucaagugauccgccugccu

SEQ ID NO: 1179559 - RNA, 19 nt, Human
ugggagaagucaggagugg

SEQ ID NO: 1179560 - RNA, 24 nt, Human
ugggagaagucaggaguggagaac

SEQ ID NO: 1179561 - RNA, 19 nt, Human
ugggauuacaagugugagc

SEQ ID NO: 1179562 - RNA, 21 nt, Human
ugggauuacaagugugagcca

SEQ ID NO: 1179563 - RNA, 22 nt, Human
ugggauuacaagugugagccac

SEQ ID NO: 1179564 - RNA, 22 nt, Human
ugggauuacaagugugagccac

SEQ ID NO: 1179565 - RNA, 24 nt, Human
ugggauuacaagugugagccacug

SEQ ID NO: 1179566 - RNA, 19 nt, Human
ugggauuacaggugccugc

SEQ ID NO: 1179567 - RNA, 21 nt, Human
ugggauuacaggugccugcca

SEQ ID NO: 1179568 - RNA, 21 nt, Human
ugggauuacaggugccugcca

SEQ ID NO: 1179569 - RNA, 22 nt, Human
ugggauuacaggugccugccau

SEQ ID NO: 1179570 - RNA, 21 nt, Human
ugggauuauaggcacacacca

SEQ ID NO: 1179571 - RNA, 22 nt, Human
ugggauuauaggcacacaccac

SEQ ID NO: 1179572 - RNA, 24 nt, Human
uggugcaaucucagcucacugcaa

SEQ ID NO: 1179573 - RNA, 20 nt, Human
uguacaugcccguuucagag

SEQ ID NO: 1179574 - RNA, 21 nt, Human
uguccaaaagcaucuucaggg

SEQ ID NO: 1179575 - RNA, 22 nt, Human
ugucccagcagaggcugugucc

SEQ ID NO: 1179576 - RNA, 19 nt, Human
uguccuggagauccugggu

SEQ ID NO: 1179577 - RNA, 24 nt, Human
uuaauagagacaggguuucaccau

SEQ ID NO: 1179578 - RNA, 18 nt, Human
uuaguagagaugggguuu

SEQ ID NO: 1179579 - RNA, 21 nt, Human
uuccaguuauucuccugccuc

SEQ ID NO: 1179580 - RNA, 23 nt, Human
uucuucccacacacccuccccag

SEQ ID NO: 1179581 - RNA, 19 nt, Human
uugaagcguguuggggucu

SEQ ID NO: 1179582 - RNA, 24 nt, Human
uugaagcguguuggggucuccucu

SEQ ID NO: 1179583 - RNA, 24 nt, Human
uugcuuugucacccaggcuggagu

SEQ ID NO: 1179584 - RNA, 24 nt, Human
uuucaccauguuggccaggcuggu

SEQ ID NO: 1179585 - RNA, 24 nt, Human
uuugucacccaggcuggaguguag

SEQ ID NO: 1179586 - RNA, 20 nt, Human
uuuuuguacuuuuaguagag

SEQ ID NO: 1179587 - RNA, 26 nt, Human
uuuuuuuuuuuugagauagcaucuca

SEQ ID NO: 1179588 - RNA, 18 nt, Human
uuuuuuuuuuuuuuuuug

SEQ ID NO: 1179589 - RNA, 19 nt, Human
aaaacacuccuggcggccu

SEQ ID NO: 1179590 - RNA, 19 nt, Human
aaagcccugcccacccacc

SEQ ID NO: 1179591 - RNA, 20 nt, Human
aagcccugcccacccacccc

SEQ ID NO: 1179592 - RNA, 21 nt, Human
aagcccugcccacccaccccc

SEQ ID NO: 1179593 - RNA, 19 nt, Human
acagaacguacaaagacaa

SEQ ID NO: 1179594 - RNA, 20 nt, Human
acagccgaggccugaucacc

SEQ ID NO: 1179595 - RNA, 22 nt, Human
acagguccccuuggcaaggccc

SEQ ID NO: 1179596 - RNA, 22 nt, Human
acgccgcagcagcuccugcagc

SEQ ID NO: 1179597 - RNA, 24 nt, Human
acgcuggaaggcaggcaggaaggc

SEQ ID NO: 1179598 - RNA, 18 nt, Human
agaacgcucccgacgccg

SEQ ID NO: 1179599 - RNA, 24 nt, Human
agacagggacagaaaaauacagaa

SEQ ID NO: 1179600 - RNA, 20 nt, Human
agcaggucccggagcugccc

SEQ ID NO: 1179601 - RNA, 20 nt, Human
agcgccagaggcauaaagcc

SEQ ID NO: 1179602 - RNA, 23 nt, Human
aggacagcugcagccgggaagga

SEQ ID NO: 1179603 - RNA, 19 nt, Human
aggcaggcaggaaggccuc

SEQ ID NO: 1179604 - RNA, 23 nt, Human
aggcagggugucuucagcgccag

SEQ ID NO: 1179605 - RNA, 18 nt, Human
aggcagugggggaggagg

SEQ ID NO: 1179606 - RNA, 19 nt, Human
aggccccuaggggacccag

SEQ ID NO: 1179607 - RNA, 24 nt, Human
aggccccuaggggacccaggcauc

SEQ ID NO: 1179608 - RNA, 21 nt, Human
aggccuccaggcuuugcuccc

SEQ ID NO: 1179609 - RNA, 20 nt, Human
aggcucaggacaugaugucg

SEQ ID NO: 1179610 - RNA, 19 nt, Human
aggggggccgggccgaggg

SEQ ID NO: 1179611 - RNA, 19 nt, Human
agugggcaggacagcugca

SEQ ID NO: 1179612 - RNA, 23 nt, Human
aucuucccaggccccuguaguug

SEQ ID NO: 1179613 - RNA, 21 nt, Human
cacagccgaggccugaucacc

SEQ ID NO: 1179614 - RNA, 22 nt, Human
cacagccgaggccugaucaccu

SEQ ID NO: 1179615 - RNA, 18 nt, Human
cacggaaacaaaaaaggc

SEQ ID NO: 1179616 - RNA, 25 nt, Human
cacucucaccugcacaggucagaag

SEQ ID NO: 1179617 - RNA, 19 nt, Human
cacugggcgggaguccaag

SEQ ID NO: 1179618 - RNA, 21 nt, Human
cagaauggucuuuccugggua

SEQ ID NO: 1179619 - RNA, 25 nt, Human
cagcagccgaggugggggccggcug

SEQ ID NO: 1179620 - RNA, 23 nt, Human
cagcuccugcagcuucucugccu

SEQ ID NO: 1179621 - RNA, 23 nt, Human
cagggccagggccugccugaggc

SEQ ID NO: 1179622 - RNA, 23 nt, Human
caggggacccuccuccccagcuc

SEQ ID NO: 1179623 - RNA, 24 nt, Human
cauaaagcccugcccacccacccc

SEQ ID NO: 1179624 - RNA, 24 nt, Human
caucugcuccucugccuccugcuc

SEQ ID NO: 1179625 - RNA, 18 nt, Human
ccacccaggcaguggggg

SEQ ID NO: 1179626 - RNA, 24 nt, Human
ccagggccagggccugccugaggc

SEQ ID NO: 1179627 - RNA, 19 nt, Human
ccaggggacccuccucccc

SEQ ID NO: 1179628 - RNA, 18 nt, Human
cccaaagcgccccgggcu

SEQ ID NO: 1179629 - RNA, 23 nt, Human
cccaaagcgccccgggcugccgg

SEQ ID NO: 1179630 - RNA, 22 nt, Human
cccacccacccccagcccccuc

SEQ ID NO: 1179631 - RNA, 22 nt, Human
cccagcucagccuccagggccu

SEQ ID NO: 1179632 - RNA, 22 nt, Human
cccaggccccuguaguugaguc

SEQ ID NO: 1179633 - RNA, 23 nt, Human
ccccagcccccucucgggccucu

SEQ ID NO: 1179634 - RNA, 19 nt, Human
ccccagggucuggagcaug

SEQ ID NO: 1179635 - RNA, 18 nt, Human
ccccgggcugccgggcuc

SEQ ID NO: 1179636 - RNA, 19 nt, Human
ccccuguaguugagucaag

SEQ ID NO: 1179637 - RNA, 18 nt, Human
ccccuuggcaaggccccu

SEQ ID NO: 1179638 - RNA, 20 nt, Human
ccccuuggcaaggccccuag

SEQ ID NO: 1179639 - RNA, 22 nt, Human
cccgcccgcgccgcccgggccc

SEQ ID NO: 1179640 - RNA, 19 nt, Human
ccgcaccguggauccuacc

SEQ ID NO: 1179641 - RNA, 18 nt, Human
ccgcagcagcuccugcag

SEQ ID NO: 1179642 - RNA, 24 nt, Human
ccgcagcagcuccugcagcuucuc

SEQ ID NO: 1179643 - RNA, 25 nt, Human
ccgcagcagcuccugcagcuucucu

SEQ ID NO: 1179644 - RNA, 21 nt, Human
ccgcgcccccagcucggcugc

SEQ ID NO: 1179645 - RNA, 18 nt, Human
ccgcuccgccccggcucc

SEQ ID NO: 1179646 - RNA, 18 nt, Human
ccgcuccgcuccggcucc

SEQ ID NO: 1179647 - RNA, 25 nt, Human
ccucucgggccucuuccaggggacc

SEQ ID NO: 1179648 - RNA, 21 nt, Human
ccugaggccagggggaggggc

SEQ ID NO: 1179649 - RNA, 20 nt, Human
ccugccugaggccaggggga

SEQ ID NO: 1179650 - RNA, 19 nt, Human
ccuugccccagggucugga

SEQ ID NO: 1179651 - RNA, 21 nt, Human
cgagcagcagcugcuccaucu

SEQ ID NO: 1179652 - RNA, 22 nt, Human
cgagggggcacccgggggagcc

SEQ ID NO: 1179653 - RNA, 24 nt, Human
cgcccccagcucggcugcuggcuc

SEQ ID NO: 1179654 - RNA, 20 nt, Human
cgcccgcccgcgcccccagc

SEQ ID NO: 1179655 - RNA, 23 nt, Human
cgcuccgcuccgcuccggcucca

SEQ ID NO: 1179656 - RNA, 23 nt, Human
cgcuccgcuccggcuccaggauc

SEQ ID NO: 1179657 - RNA, 23 nt, Human
cggaaacaaaaaaggcagggugu

SEQ ID NO: 1179658 - RNA, 19 nt, Human
cggcccgcuccgccccggc

SEQ ID NO: 1179659 - RNA, 22 nt, Human
cggggcacggaaacaaaaaagg

SEQ ID NO: 1179660 - RNA, 18 nt, Human
cguacaaagacaaggacc

SEQ ID NO: 1179661 - RNA, 19 nt, Human
cucaaaaagcuuccauucu

SEQ ID NO: 1179662 - RNA, 22 nt, Human
cuccaggauccgcuccggcucc

SEQ ID NO: 1179663 - RNA, 18 nt, Human
cuccccagcucagccucc

SEQ ID NO: 1179664 - RNA, 21 nt, Human
cuccccagcucagccuccagg

SEQ ID NO: 1179665 - RNA, 19 nt, Human
cuccucugccuccugcucc

SEQ ID NO: 1179666 - RNA, 25 nt, Human
cugcccucaaaaagcuuccauucua

SEQ ID NO: 1179667 - RNA, 22 nt, Human
cuggaaggcaggcaggaaggcc

SEQ ID NO: 1179668 - RNA, 23 nt, Human
cugugggccccagaauuuggggg

SEQ ID NO: 1179669 - RNA, 20 nt, Human
gacccuccuccccagcucag

SEQ ID NO: 1179670 - RNA, 20 nt, Human
gagacagggacagaaaaaua

SEQ ID NO: 1179671 - RNA, 21 nt, Human
gaucagcagccgagguggggg

SEQ ID NO: 1179672 - RNA, 19 nt, Human
gcagccgggaaggauuugg

SEQ ID NO: 1179673 - RNA, 21 nt, Human
gcagccgggaaggauuugggg

SEQ ID NO: 1179674 - RNA, 19 nt, Human
gccagggggaggggccugc

SEQ ID NO: 1179675 - RNA, 18 nt, Human
gcccgcccgcgcccccag

SEQ ID NO: 1179676 - RNA, 19 nt, Human
gcccugcccacccaccccc

SEQ ID NO: 1179677 - RNA, 22 nt, Human
gcccugcccacccacccccagc

SEQ ID NO: 1179678 - RNA, 24 nt, Human
gccgcaccguggauccuaccggug

SEQ ID NO: 1179679 - RNA, 18 nt, Human
gccgggaaggauuugggg

SEQ ID NO: 1179680 - RNA, 19 nt, Human
gccugccccuccccccacc

SEQ ID NO: 1179681 - RNA, 20 nt, Human
gcuccggccccgcccgcgcc

SEQ ID NO: 1179682 - RNA, 24 nt, Human
gggcacugcugguggcccccgggc

SEQ ID NO: 1179683 - RNA, 20 nt, Human
gggcuccggccccgcccgcg

SEQ ID NO: 1179684 - RNA, 18 nt, Human
ggggaucagcagccgagg

SEQ ID NO: 1179685 - RNA, 18 nt, Human
gggggaggaggaggagcc

SEQ ID NO: 1179686 - RNA, 21 nt, Human
gggggcaggcuccggggcacu

SEQ ID NO: 1179687 - RNA, 19 nt, Human
gggggccgcaccguggauc

SEQ ID NO: 1179688 - RNA, 25 nt, Human
uacaaagacaaggaccugcccucaa

SEQ ID NO: 1179689 - RNA, 25 nt, Human
uccagggccagggccugccugaggc

SEQ ID NO: 1179690 - RNA, 20 nt, Human
uccccgagcagcagcugcuc

SEQ ID NO: 1179691 - RNA, 22 nt, Human
uccccgagcagcagcugcucca

SEQ ID NO: 1179692 - RNA, 22 nt, Human
uccgccccggcuccgcuccgcu

SEQ ID NO: 1179693 - RNA, 21 nt, Human
uccgcuccggcuccaggaucc

SEQ ID NO: 1179694 - RNA, 18 nt, Human
uccgcuccggcuccggcc

SEQ ID NO: 1179695 - RNA, 25 nt, Human
ucucgggccucuuccaggggacccu

SEQ ID NO: 1179696 - RNA, 22 nt, Human
ucugccuccugcuccgccucuu

SEQ ID NO: 1179697 - RNA, 18 nt, Human
ucuucagcgccagaggca

SEQ ID NO: 1179698 - RNA, 26 nt, Human
ucuucagcgccagaggcauaaagccc

SEQ ID NO: 1179699 - RNA, 18 nt, Human
ugcagccgggaaggauuu

SEQ ID NO: 1179700 - RNA, 24 nt, Human
ugcgagcccaguggaguggugggg

SEQ ID NO: 1179701 - RNA, 21 nt, Human
uggacacguaguagccccagg

SEQ ID NO: 1179702 - RNA, 18 nt, Human
uggcccccgggcggcccc

SEQ ID NO: 1179703 - RNA, 22 nt, Human
uggcccccgggcggccccagug

SEQ ID NO: 1179704 - RNA, 22 nt, Human
uggcuccuaggcugugggcccc

SEQ ID NO: 1179705 - RNA, 21 nt, Human
uggcugcgagggccgagggcu

SEQ ID NO: 1179706 - RNA, 22 nt, Human
ugggggaaagguaggcucagga

SEQ ID NO: 1179707 - RNA, 20 nt, Human
ugggggaggaggaggagcca

SEQ ID NO: 1179708 - RNA, 25 nt, Human
ugggggaggaggaggagccacgcau

SEQ ID NO: 1179709 - RNA, 21 nt, Human
uggggggaucagcagccgagg

SEQ ID NO: 1179710 - RNA, 23 nt, Human
uggggugcgacagguccccuugg

SEQ ID NO: 1179711 - RNA, 21 nt, Human
ugguggggugcgacagguccc

SEQ ID NO: 1179712 - RNA, 19 nt, Human
uugugcgagcccaguggag

SEQ ID NO: 1179713 - RNA, 20 nt, Human
aacucugggugaacugaguc

SEQ ID NO: 1179714 - RNA, 20 nt, Human
agacaaauacaccuggguua

SEQ ID NO: 1179715 - RNA, 18 nt, Human
cagggcacgggugggcag

SEQ ID NO: 1179716 - RNA, 20 nt, Human
cccagcagccuggggccgac

SEQ ID NO: 1179717 - RNA, 21 nt, Human
cgcggucaccccagcagccug

SEQ ID NO: 1179718 - RNA, 21 nt, Human
gggcacgggugggcagcugcc

SEQ ID NO: 1179719 - RNA, 19 nt, Human
uagcagcaugagaacagac

SEQ ID NO: 1179720 - RNA, 18 nt, Human
uccccagggcacgggugg

SEQ ID NO: 1179721 - RNA, 27 nt, Human
uccgcggucaccccagcagccuggggc

SEQ ID NO: 1179722 - RNA, 21 nt, Human
ugagaacagacaaauacaccu

SEQ ID NO: 1179723 - RNA, 18 nt, Human
ccaccggggagcagccga

SEQ ID NO: 1179724 - RNA, 26 nt, Human
cccugcucgccacucgcccuccuuuu

SEQ ID NO: 1179725 - RNA, 18 nt, Human
ccgcgccgggccggccgc

SEQ ID NO: 1179726 - RNA, 19 nt, Human
cggaguccgaggccugggc

SEQ ID NO: 1179727 - RNA, 23 nt, Human
cggccgaggccccugcucgccac

SEQ ID NO: 1179728 - RNA, 22 nt, Human
cguguggguggcggccgaggcc

SEQ ID NO: 1179729 - RNA, 19 nt, Human
gccgagggcggcggccggg

SEQ ID NO: 1179730 - RNA, 20 nt, Human
ggagcagccgauggccgagg

SEQ ID NO: 1179731 - RNA, 21 nt, Human
ggccaccggggagcagccgau

SEQ ID NO: 1179732 - RNA, 19 nt, Human
ugaauccaagaagaugugu

SEQ ID NO: 1179733 - RNA, 21 nt, Human
ugcucgccacucgcccuccuu

SEQ ID NO: 1179734 - RNA, 19 nt, Human
aacugaacucccaggugcc

SEQ ID NO: 1179735 - RNA, 21 nt, Human
aaucaggaaggucggaaucuc

SEQ ID NO: 1179736 - RNA, 18 nt, Human
guccaacugaacucccag

SEQ ID NO: 1179737 - RNA, 19 nt, Human
ucccaaaaucugucccauc

SEQ ID NO: 1179738 - RNA, 21 nt, Human
ucccaggugccgacagagucc

SEQ ID NO: 1179739 - RNA, 18 nt, Human
uccuuggucuucuucugg

SEQ ID NO: 1179740 - RNA, 19 nt, Human
ugggagaagucaggagugg

SEQ ID NO: 1179741 - RNA, 25 nt, Human
uugauggcucaucaugaucuuuccc

SEQ ID NO: 1179742 - RNA, 18 nt, Human
aaagcagggccaccaccu

SEQ ID NO: 1179743 - RNA, 22 nt, Human
aggcagagaugaggucuccccu

SEQ ID NO: 1179744 - RNA, 21 nt, Human
aggcuucccugccccacugga

SEQ ID NO: 1179745 - RNA, 20 nt, Human
caaggcuucccugccccacu

SEQ ID NO: 1179746 - RNA, 20 nt, Human
cagaguccucacaaccccuc

SEQ ID NO: 1179747 - RNA, 23 nt, Human
cagggccaccaccucuuuggcuc

SEQ ID NO: 1179748 - RNA, 20 nt, Human
cauaccccuagcauccucau

SEQ ID NO: 1179749 - RNA, 21 nt, Human
ccacuggagauggcuuuucuu

SEQ ID NO: 1179750 - RNA, 22 nt, Human
ccagaguccucacaaccccucc

SEQ ID NO: 1179751 - RNA, 24 nt, Human
ccccagaguccucacaaccccucc

SEQ ID NO: 1179752 - RNA, 21 nt, Human
ccccuagcauccucauaccua

SEQ ID NO: 1179753 - RNA, 18 nt, Human
ccccugaaagcagggcca

SEQ ID NO: 1179754 - RNA, 23 nt, Human
ccccugaaagcagggccaccacc

SEQ ID NO: 1179755 - RNA, 23 nt, Human
ccuagcauccucauaccuaccuc

SEQ ID NO: 1179756 - RNA, 20 nt, Human
cuacuugaaugcugucaggc

SEQ ID NO: 1179757 - RNA, 23 nt, Human
cucacaaccccuccuggguguca

SEQ ID NO: 1179758 - RNA, 22 nt, Human
cucauaccuaccucucagaccu

SEQ ID NO: 1179759 - RNA, 20 nt, Human
cuccugggugucaugugauc

SEQ ID NO: 1179760 - RNA, 23 nt, Human
ggccaccaccucuuuggcucaga

SEQ ID NO: 1179761 - RNA, 18 nt, Human
uccccagaguccucacaa

SEQ ID NO: 1179762 - RNA, 20 nt, Human
uccccugaaagcagggccac

SEQ ID NO: 1179763 - RNA, 19 nt, Human
uccucacaaccccuccugg

SEQ ID NO: 1179764 - RNA, 18 nt, Human
uggcuuuucuuccccaga

SEQ ID NO: 1179765 - RNA, 18 nt, Human
aaacaaagaagcgggugg

SEQ ID NO: 1179766 - RNA, 23 nt, Human
aaacaacagaauuaaaaaguuac

SEQ ID NO: 1179767 - RNA, 23 nt, Human
aaacaggauggagaucaaaccca

SEQ ID NO: 1179768 - RNA, 24 nt, Human
aaacaggauggagaucaaacccag

SEQ ID NO: 1179769 - RNA, 19 nt, Human
aacagaaauggacagagag

SEQ ID NO: 1179770 - RNA, 25 nt, Human
aacccagagaaacgcacuccccgag

SEQ ID NO: 1179771 - RNA, 19 nt, Human
aacugcaaaacaacagaau

SEQ ID NO: 1179772 - RNA, 21 nt, Human
aagcaaaacagaaauggacag

SEQ ID NO: 1179773 - RNA, 28 nt, Human
aagcagaggggcgggaaacaaagaagcg

SEQ ID NO: 1179774 - RNA, 30 nt, Human
aagcagaggggcgggaaacaaagaagcggg

SEQ ID NO: 1179775 - RNA, 23 nt, Human
aaggaaaaagcaaguacucagaa

SEQ ID NO: 1179776 - RNA, 23 nt, Human
aauaaaauaacaaagaaauacaa

SEQ ID NO: 1179777 - RNA, 22 nt, Human
aaugaaaagcaguuuaaaagaa

SEQ ID NO: 1179778 - RNA, 18 nt, Human
acacagcuucgcccccaa

SEQ ID NO: 1179779 - RNA, 19 nt, Human
acagaacgcauacagcuag

SEQ ID NO: 1179780 - RNA, 20 nt, Human
acagagagggagagcccaga

SEQ ID NO: 1179781 - RNA, 22 nt, Human
acagagagggagagcccagagc

SEQ ID NO: 1179782 - RNA, 24 nt, Human
accacagcaguuaacgcgaaguga

SEQ ID NO: 1179783 - RNA, 22 nt, Human
accccccucccucccacuccaa

SEQ ID NO: 1179784 - RNA, 19 nt, Human
acgcaucagggccgggagg

SEQ ID NO: 1179785 - RNA, 21 nt, Human
acucaagcacaagagcuccug

SEQ ID NO: 1179786 - RNA, 21 nt, Human
agaaaacaggauggagaucaa

SEQ ID NO: 1179787 - RNA, 18 nt, Human
agaaacgcacucccguca

SEQ ID NO: 1179788 - RNA, 20 nt, Human
agaaucagcucagacaugaa

SEQ ID NO: 1179789 - RNA, 18 nt, Human
agcaaaauaucaacauga

SEQ ID NO: 1179790 - RNA, 27 nt, Human
agccacgcuaccacuaacacugaacuc

SEQ ID NO: 1179791 - RNA, 22 nt, Human
agccaggagguggagggagagg

SEQ ID NO: 1179792 - RNA, 29 nt, Human
agccaggagguggagggagaggggacccc

SEQ ID NO: 1179793 - RNA, 20 nt, Human
aggcugaggcggagcagagu

SEQ ID NO: 1179794 - RNA, 19 nt, Human
agggagagcccagagcaug

SEQ ID NO: 1179795 - RNA, 25 nt, Human
agggagaggagcauggaaagccagg

SEQ ID NO: 1179796 - RNA, 20 nt, Human
aguaaaauaaaaccaagcaa

SEQ ID NO: 1179797 - RNA, 25 nt, Human
auaaaauaacaaagaaauacaaaac

SEQ ID NO: 1179798 - RNA, 22 nt, Human
aucacacaaaugaaacacacaa

SEQ ID NO: 1179799 - RNA, 23 nt, Human
auuaaaaaaaaaaaaaauggggu

SEQ ID NO: 1179800 - RNA, 24 nt, Human
caaaaaaaccuuacauaaaauccu

SEQ ID NO: 1179801 - RNA, 19 nt, Human
caaacugcaaaacaacaga

SEQ ID NO: 1179802 - RNA, 22 nt, Human
caaaggaaaaagcaaguacuca

SEQ ID NO: 1179803 - RNA, 23 nt, Human
caagaagcaggcacguggagcaa

SEQ ID NO: 1179804 - RNA, 33 nt, Human
caagcaaaauaucaacaugaagaccuccuucuu

SEQ ID NO: 1179805 - RNA, 21 nt, Human
cacaaacuuuaaaaauagcug

SEQ ID NO: 1179806 - RNA, 19 nt, Human
cacacaaaugaaacacaca

SEQ ID NO: 1179807 - RNA, 19 nt, Human
cacagcuucgcccccaacc

SEQ ID NO: 1179808 - RNA, 19 nt, Human
caccccccucccucccacu

SEQ ID NO: 1179809 - RNA, 24 nt, Human
caccccccucccucccacuccaaa

SEQ ID NO: 1179810 - RNA, 21 nt, Human
cacggucagacggccgccacc

SEQ ID NO: 1179811 - RNA, 21 nt, Human
cacuaaaguaucuaagccucu

SEQ ID NO: 1179812 - RNA, 24 nt, Human
cacucugugcuuugcugcuguggu

SEQ ID NO: 1179813 - RNA, 24 nt, Human
cagcuuacacaguccuugcaaaac

SEQ ID NO: 1179814 - RNA, 21 nt, Human
caggcaacggcauucccccaa

SEQ ID NO: 1179815 - RNA, 18 nt, Human
cauuccgcuuaccuuccc

SEQ ID NO: 1179816 - RNA, 21 nt, Human
ccaaaacaugacacagaaaag

SEQ ID NO: 1179817 - RNA, 24 nt, Human
ccaauaauaccuuucgagcuuucu

SEQ ID NO: 1179818 - RNA, 21 nt, Human
ccacccagcccacguggaguu

SEQ ID NO: 1179819 - RNA, 26 nt, Human
ccaccccccucccucccacuccaaau

SEQ ID NO: 1179820 - RNA, 19 nt, Human
ccacgccugugaaaagcaa

SEQ ID NO: 1179821 - RNA, 23 nt, Human
cccaauaaaauaacaaagaaaua

SEQ ID NO: 1179822 - RNA, 18 nt, Human
cccaccccccucccuccc

SEQ ID NO: 1179823 - RNA, 21 nt, Human
cccagcccacguggaguucuc

SEQ ID NO: 1179824 - RNA, 22 nt, Human
ccccccucccucccacuccaaa

SEQ ID NO: 1179825 - RNA, 18 nt, Human
ccccucccucccacucca

SEQ ID NO: 1179826 - RNA, 19 nt, Human
ccccugugugcugugcgcg

SEQ ID NO: 1179827 - RNA, 22 nt, Human
cccucccacuccaaauuaaaaa

SEQ ID NO: 1179828 - RNA, 19 nt, Human
ccuaagaaaagacuacaga

SEQ ID NO: 1179829 - RNA, 23 nt, Human
ccuccaaguggagugagccacgc

SEQ ID NO: 1179830 - RNA, 23 nt, Human
cgcauacagcuagaacgcauaca

SEQ ID NO: 1179831 - RNA, 24 nt, Human
cgcccaccccccucccucccacuc

SEQ ID NO: 1179832 - RNA, 21 nt, Human
cggccgccaccuccaagugga

SEQ ID NO: 1179833 - RNA, 19 nt, Human
cggucagacggccgccacc

SEQ ID NO: 1179834 - RNA, 19 nt, Human
cuagccaaggcagguuaca

SEQ ID NO: 1179835 - RNA, 23 nt, Human
cucccucccacuccaaauuaaaa

SEQ ID NO: 1179836 - RNA, 21 nt, Human
cuccuucggcucagggcaccc

SEQ ID NO: 1179837 - RNA, 18 nt, Human
cucugugcuuugcugcug

SEQ ID NO: 1179838 - RNA, 18 nt, Human
cugggagaaaacaggaug

SEQ ID NO: 1179839 - RNA, 18 nt, Human
cugugaaaagcaaagcug

SEQ ID NO: 1179840 - RNA, 18 nt, Human
cuuugcugcugugguacc

SEQ ID NO: 1179841 - RNA, 18 nt, Human
cuuuuuaaaggccuacau

SEQ ID NO: 1179842 - RNA, 19 nt, Human
gaaaaagcaaguacucaga

SEQ ID NO: 1179843 - RNA, 19 nt, Human
gaacaggcaacggcauucc

SEQ ID NO: 1179844 - RNA, 18 nt, Human
gaaucagcucagacauga

SEQ ID NO: 1179845 - RNA, 18 nt, Human
gcaaaacagaaauggaca

SEQ ID NO: 1179846 - RNA, 21 nt, Human
gcaaaacagaaauggacagag

SEQ ID NO: 1179847 - RNA, 21 nt, Human
gcacacugcgggacgccggca

SEQ ID NO: 1179848 - RNA, 27 nt, Human
gcagaguguacacgcaucagggccccc

SEQ ID NO: 1179849 - RNA, 19 nt, Human
gccaaacugcaaaacaaca

SEQ ID NO: 1179850 - RNA, 20 nt, Human
gcccaccccccucccuccca

SEQ ID NO: 1179851 - RNA, 19 nt, Human
gcugugguaccugaaaauu

SEQ ID NO: 1179852 - RNA, 18 nt, Human
guaccugaaaauuaaaca

SEQ ID NO: 1179853 - RNA, 20 nt, Human
guggagugagccacgcuacc

SEQ ID NO: 1179854 - RNA, 18 nt, Human
guggaguucucaaggcug

SEQ ID NO: 1179855 - RNA, 20 nt, Human
gugguaccugaaaauuaaac

SEQ ID NO: 1179856 - RNA, 25 nt, Human
uaaaaaaaaaaaaaaugggguggag

SEQ ID NO: 1179857 - RNA, 22 nt, Human
uaaaaccaagcaaaauaucaac

SEQ ID NO: 1179858 - RNA, 25 nt, Human
uaaaauaacaaagaaauacaaaaca

SEQ ID NO: 1179859 - RNA, 21 nt, Human
uaaaaucaguaaaauaaaacc

SEQ ID NO: 1179860 - RNA, 23 nt, Human
uaacugaaaugcucuuuaaauac

SEQ ID NO: 1179861 - RNA, 19 nt, Human
uaagucaaggcuaaaugcc

SEQ ID NO: 1179862 - RNA, 23 nt, Human
uacauaaaauccuuaggauuuaa

SEQ ID NO: 1179863 - RNA, 26 nt, Human
uacauuuuucuauauaccuuuuaaaa

SEQ ID NO: 1179864 - RNA, 19 nt, Human
uaccugaaaauuaaacagu

SEQ ID NO: 1179865 - RNA, 19 nt, Human
uaccugaaaauuaaacagu

SEQ ID NO: 1179866 - RNA, 19 nt, Human
uagccaaggcagguuacaa

SEQ ID NO: 1179867 - RNA, 22 nt, Human
ucaacacagcuucgcccccaac

SEQ ID NO: 1179868 - RNA, 23 nt, Human
uccaaaauaacacuccauucaca

SEQ ID NO: 1179869 - RNA, 27 nt, Human
uccaugucucaauuuccaacgcucucc

SEQ ID NO: 1179870 - RNA, 21 nt, Human
ucccugguagaaucgucaccu

SEQ ID NO: 1179871 - RNA, 18 nt, Human
ucucgcccaccccccucc

SEQ ID NO: 1179872 - RNA, 22 nt, Human
ucucgcccaccccccucccucc

SEQ ID NO: 1179873 - RNA, 22 nt, Human
ugaaaaaccaauaauaccuuuc

SEQ ID NO: 1179874 - RNA, 19 nt, Human
ugaaaagcaaagcuggaag

SEQ ID NO: 1179875 - RNA, 25 nt, Human
ugaggcaaacggccuuuuccagcca

SEQ ID NO: 1179876 - RNA, 19 nt, Human
ugcaaaacaacagaauuaa

SEQ ID NO: 1179877 - RNA, 22 nt, Human
ugcaaaaccagcuuccgccacg

SEQ ID NO: 1179878 - RNA, 18 nt, Human
ugccuccgaaccuuuccu

SEQ ID NO: 1179879 - RNA, 22 nt, Human
uggagcaaacagaaucagcuca

SEQ ID NO: 1179880 - RNA, 26 nt, Human
uggagcaaacagaaucagcucagaca

SEQ ID NO: 1179881 - RNA, 19 nt, Human
ugggaaggucugagagagu

SEQ ID NO: 1179882 - RNA, 21 nt, Human
ugguacgaaaucacacaaaug

SEQ ID NO: 1179883 - RNA, 19 nt, Human
uguccaaaauaacacucca

SEQ ID NO: 1179884 - RNA, 21 nt, Human
ugucugggagaaaacaggaug

SEQ ID NO: 1179885 - RNA, 23 nt, Human
uuaaaagaaaaucaugcuaaaag

SEQ ID NO: 1179886 - RNA, 25 nt, Human
uuaaauacacuaaaguaucuaagcc

SEQ ID NO: 1179887 - RNA, 22 nt, Human
uuccuaccaaaacaugacacag

SEQ ID NO: 1179888 - RNA, 23 nt, Human
aaaaacaggucuguuccaccuuc

SEQ ID NO: 1179889 - RNA, 19 nt, Human
aaacaaaacaaaacgaaaa

SEQ ID NO: 1179890 - RNA, 21 nt, Human
aaacacgcacaccccagggcc

SEQ ID NO: 1179891 - RNA, 19 nt, Human
aagaacaaagauaaugguu

SEQ ID NO: 1179892 - RNA, 25 nt, Human
aagccacccucaccccgcaugccag

SEQ ID NO: 1179893 - RNA, 21 nt, Human
aagggcuaccaaagucaccac

SEQ ID NO: 1179894 - RNA, 21 nt, Human
aaggucaggcucucuuguuag

SEQ ID NO: 1179895 - RNA, 21 nt, Human
aagucaugaaacucauuucau

SEQ ID NO: 1179896 - RNA, 24 nt, Human
aaucaccuuucaagaacauucuau

SEQ ID NO: 1179897 - RNA, 23 nt, Human
aaugccuacuuuucagagacaac

SEQ ID NO: 1179898 - RNA, 19 nt, Human
aaugugacaugaaaucgua

SEQ ID NO: 1179899 - RNA, 23 nt, Human
acaaaacaaaacgaaaaacuugg

SEQ ID NO: 1179900 - RNA, 24 nt, Human
acaaaacaaaacgaaaaacuugga

SEQ ID NO: 1179901 - RNA, 18 nt, Human
acacccuggcuuuccagg

SEQ ID NO: 1179902 - RNA, 21 nt, Human
acacucagguaacaccaaaac

SEQ ID NO: 1179903 - RNA, 21 nt, Human
accccagggccugugucacac

SEQ ID NO: 1179904 - RNA, 22 nt, Human
agaaaaacagaggugacugaag

SEQ ID NO: 1179905 - RNA, 23 nt, Human
agaaacacgcacaccccagggcc

SEQ ID NO: 1179906 - RNA, 19 nt, Human
agaaaggaucgcagggucu

SEQ ID NO: 1179907 - RNA, 18 nt, Human
agagccagugauaaacag

SEQ ID NO: 1179908 - RNA, 20 nt, Human
agcgccaugcucccuccagg

SEQ ID NO: 1179909 - RNA, 23 nt, Human
aggaaaaaaacaggucuguucca

SEQ ID NO: 1179910 - RNA, 19 nt, Human
aggccaccuuacugcauuu

SEQ ID NO: 1179911 - RNA, 21 nt, Human
aggccagagggcugccaggug

SEQ ID NO: 1179912 - RNA, 19 nt, Human
aggcgggccugcaugacuu

SEQ ID NO: 1179913 - RNA, 26 nt, Human
auaaaaaucgaauauacacacaaaca

SEQ ID NO: 1179914 - RNA, 21 nt, Human
auaccaaacaccuaaguacca

SEQ ID NO: 1179915 - RNA, 20 nt, Human
auauuuacaugguaugcuaa

SEQ ID NO: 1179916 - RNA, 19 nt, Human
aucccuggagggacaggcg

SEQ ID NO: 1179917 - RNA, 23 nt, Human
auggagaauaugucucaccuaca

SEQ ID NO: 1179918 - RNA, 24 nt, Human
caaauaaacuagacgaaauacauc

SEQ ID NO: 1179919 - RNA, 27 nt, Human
caacacaaagaacuaauagcuaagaug

SEQ ID NO: 1179920 - RNA, 22 nt, Human
caaccaccccacucacacccug

SEQ ID NO: 1179921 - RNA, 18 nt, Human
caacuggcaccacuccca

SEQ ID NO: 1179922 - RNA, 21 nt, Human
caagcacacagcaaacgccac

SEQ ID NO: 1179923 - RNA, 20 nt, Human
caagggcuaccaaagucacc

SEQ ID NO: 1179924 - RNA, 19 nt, Human
cacagaguugacgcuuuug

SEQ ID NO: 1179925 - RNA, 20 nt, Human
caccaaaacagaccuuccag

SEQ ID NO: 1179926 - RNA, 24 nt, Human
cacucccaaccaccccacucacac

SEQ ID NO: 1179927 - RNA, 25 nt, Human
cacugcuacagaaaggaucgcaggg

SEQ ID NO: 1179928 - RNA, 19 nt, Human
cagaaaaacagaggugacu

SEQ ID NO: 1179929 - RNA, 22 nt, Human
cagacccugcucuagccgaggg

SEQ ID NO: 1179930 - RNA, 19 nt, Human
cagcacagcugcagggucc

SEQ ID NO: 1179931 - RNA, 22 nt, Human
cagcacauugccuuaucuggga

SEQ ID NO: 1179932 - RNA, 24 nt, Human
caggccagagugaacauccgcuga

SEQ ID NO: 1179933 - RNA, 24 nt, Human
cagugacaagaagcagaaucugcu

SEQ ID NO: 1179934 - RNA, 24 nt, Human
cagugacagccaugggaaccugcu

SEQ ID NO: 1179935 - RNA, 21 nt, Human
caguguuacucucaagcacac

SEQ ID NO: 1179936 - RNA, 21 nt, Human
cauaccaaacaccuaaguacc

SEQ ID NO: 1179937 - RNA, 24 nt, Human
caucaacaacuguggaacuguauc

SEQ ID NO: 1179938 - RNA, 20 nt, Human
cauucugcuucuuuccuuuu

SEQ ID NO: 1179939 - RNA, 19 nt, Human
ccacucccaaccaccccac

SEQ ID NO: 1179940 - RNA, 19 nt, Human
ccaugccgugugccugucc

SEQ ID NO: 1179941 - RNA, 25 nt, Human
ccccagggccugugucacacucagg

SEQ ID NO: 1179942 - RNA, 24 nt, Human
ccccugcagcgugcaguguuacuc

SEQ ID NO: 1179943 - RNA, 22 nt, Human
cccgcaauuacgaaaagcaguu

SEQ ID NO: 1179944 - RNA, 21 nt, Human
cccuagcgccaugcucccucc

SEQ ID NO: 1179945 - RNA, 18 nt, Human
cccuuccuucuaggaggc

SEQ ID NO: 1179946 - RNA, 21 nt, Human
ccuacaggaaccuacccgcaa

SEQ ID NO: 1179947 - RNA, 21 nt, Human
ccuagcgccaugcucccucca

SEQ ID NO: 1179948 - RNA, 23 nt, Human
ccucaccccgcaugccacgggga

SEQ ID NO: 1179949 - RNA, 18 nt, Human
ccucauguguggugggaa

SEQ ID NO: 1179950 - RNA, 19 nt, Human
ccuucauuacugggauugu

SEQ ID NO: 1179951 - RNA, 18 nt, Human
cgaggguuuggcuggugu

SEQ ID NO: 1179952 - RNA, 22 nt, Human
cuaacaccaacuccagccugcu

SEQ ID NO: 1179953 - RNA, 22 nt, Human
cucaagggcuaccaaagucacc

SEQ ID NO: 1179954 - RNA, 19 nt, Human
cucauuuggggcuggaaga

SEQ ID NO: 1179955 - RNA, 23 nt, Human
cucccaaccaccccacucacacc

SEQ ID NO: 1179956 - RNA, 20 nt, Human
cugaagauaagugcaaccau

SEQ ID NO: 1179957 - RNA, 18 nt, Human
cugcucccuggacagccu

SEQ ID NO: 1179958 - RNA, 20 nt, Human
cugcuucuuuccuuuucugu

SEQ ID NO: 1179959 - RNA, 20 nt, Human
cuggaacagccuucagaaaa

SEQ ID NO: 1179960 - RNA, 23 nt, Human
gaaaacaaaacaaaacgaaaaac

SEQ ID NO: 1179961 - RNA, 18 nt, Human
gaacaaugucuacaugca

SEQ ID NO: 1179962 - RNA, 22 nt, Human
gaacgggcuucuauuucccuua

SEQ ID NO: 1179963 - RNA, 22 nt, Human
gaacuaggccagagggcugcca

SEQ ID NO: 1179964 - RNA, 22 nt, Human
gagcagcauaccaaacaccuaa

SEQ ID NO: 1179965 - RNA, 18 nt, Human
gagugugcguggggcccc

SEQ ID NO: 1179966 - RNA, 23 nt, Human
gaucauagagucagaccacaaag

SEQ ID NO: 1179967 - RNA, 22 nt, Human
gaucgcagggucuggaagaccu

SEQ ID NO: 1179968 - RNA, 18 nt, Human
gcaggcauggugaggcag

SEQ ID NO: 1179969 - RNA, 18 nt, Human
gcccguggcuggcuggcg

SEQ ID NO: 1179970 - RNA, 23 nt, Human
gcugcaggguccuagcagauccu

SEQ ID NO: 1179971 - RNA, 23 nt, Human
guacaagagccuuuugagggcug

SEQ ID NO: 1179972 - RNA, 19 nt, Human
guggggccccgcuggcaga

SEQ ID NO: 1179973 - RNA, 19 nt, Human
uaacaccaacuccagccug

SEQ ID NO: 1179974 - RNA, 18 nt, Human
uaagacaacacaaagaac

SEQ ID NO: 1179975 - RNA, 19 nt, Human
uaagacaacacaaagaacu

SEQ ID NO: 1179976 - RNA, 21 nt, Human
uacacacaaacacaucaacaa

SEQ ID NO: 1179977 - RNA, 24 nt, Human
uaccaaacaccuaaguaccauucc

SEQ ID NO: 1179978 - RNA, 19 nt, Human
uaccaaagucaccacucca

SEQ ID NO: 1179979 - RNA, 21 nt, Human
uagacaguuagagaaacacgc

SEQ ID NO: 1179980 - RNA, 21 nt, Human
uagagaaacacgcacacccca

SEQ ID NO: 1179981 - RNA, 25 nt, Human
uagcagauccuacaagcgcuguggc

SEQ ID NO: 1179982 - RNA, 19 nt, Human
uagcgccaugcucccucca

SEQ ID NO: 1179983 - RNA, 20 nt, Human
uaggccuucccacugcccag

SEQ ID NO: 1179984 - RNA, 26 nt, Human
uaugcaaaggucaaucaacaaucacc

SEQ ID NO: 1179985 - RNA, 19 nt, Human
ucaacuguggaaacgagau

SEQ ID NO: 1179986 - RNA, 20 nt, Human
ucaagcacacagcaaacgcc

SEQ ID NO: 1179987 - RNA, 21 nt, Human
ucaagggcuaccaaagucacc

SEQ ID NO: 1179988 - RNA, 21 nt, Human
ucacagagccagugauaaaca

SEQ ID NO: 1179989 - RNA, 21 nt, Human
ucagaaaaacagaggugacug

SEQ ID NO: 1179990 - RNA, 23 nt, Human
ucagcgcuuuaaggcgggccugc

SEQ ID NO: 1179991 - RNA, 18 nt, Human
uccaacgcagcuguggac

SEQ ID NO: 1179992 - RNA, 23 nt, Human
uccauuuucgaugguugugggua

SEQ ID NO: 1179993 - RNA, 20 nt, Human
ucccuccaggggcaguaaga

SEQ ID NO: 1179994 - RNA, 18 nt, Human
ucccuggagggacaggcg

SEQ ID NO: 1179995 - RNA, 23 nt, Human
uccucuggaaucaggcccguggc

SEQ ID NO: 1179996 - RNA, 24 nt, Human
ucgccgggugaauuccuuggaugc

SEQ ID NO: 1179997 - RNA, 21 nt, Human
ucgucucauuuggggcuggaa

SEQ ID NO: 1179998 - RNA, 21 nt, Human
ucuuaauuagagcucaagggc

SEQ ID NO: 1179999 - RNA, 20 nt, Human
ugaaaacaaaacaaaacgaa

SEQ ID NO: 1180000 - RNA, 25 nt, Human
ugaaaacaaaacaaaacgaaaaacu

SEQ ID NO: 1180001 - RNA, 23 nt, Human
ugaaacagugacaagaagcagaa

SEQ ID NO: 1180002 - RNA, 19 nt, Human
ugaaaucguagguauaaaa

SEQ ID NO: 1180003 - RNA, 24 nt, Human
ugaggccaucacagacccugcucu

SEQ ID NO: 1180004 - RNA, 21 nt, Human
ugagggcugagaagacaacuc

SEQ ID NO: 1180005 - RNA, 22 nt, Human
ugagugaggucggacuguguug

SEQ ID NO: 1180006 - RNA, 21 nt, Human
ugagugguuuggaucucucuu

SEQ ID NO: 1180007 - RNA, 19 nt, Human
ugaguugaaagcacuucca

SEQ ID NO: 1180008 - RNA, 21 nt, Human
ugauaaacaggccaccuuacu

SEQ ID NO: 1180009 - RNA, 23 nt, Human
ugcccagaaugaauucuacuaca

SEQ ID NO: 1180010 - RNA, 21 nt, Human
ugcguggggccccgcuggcag

SEQ ID NO: 1180011 - RNA, 22 nt, Human
ugcguggggccccgcuggcaga

SEQ ID NO: 1180012 - RNA, 22 nt, Human
ugcuccuggggguucugcgccg

SEQ ID NO: 1180013 - RNA, 18 nt, Human
ugcugcaacagccccugc

SEQ ID NO: 1180014 - RNA, 22 nt, Human
uggaacagccuucagaaaaaca

SEQ ID NO: 1180015 - RNA, 20 nt, Human
uggaagaaagccacccucac

SEQ ID NO: 1180016 - RNA, 23 nt, Human
uggcagaugugggggcugcugga

SEQ ID NO: 1180017 - RNA, 21 nt, Human
uggcugaguugaaagcacuuc

SEQ ID NO: 1180018 - RNA, 19 nt, Human
uggcuggcuggcgcucugg

SEQ ID NO: 1180019 - RNA, 23 nt, Human
ugggauugucugguacuaagaau

SEQ ID NO: 1180020 - RNA, 18 nt, Human
ugguugcagcagaucuuc

SEQ ID NO: 1180021 - RNA, 22 nt, Human
ugugacaugaaaucguagguau

SEQ ID NO: 1180022 - RNA, 22 nt, Human
uguguuaaaaaugaauggggag

SEQ ID NO: 1180023 - RNA, 24 nt, Human
uuaaaaaaaaaaaaagucaugaaa

SEQ ID NO: 1180024 - RNA, 19 nt, Human
uuaaacuuugauaagacaa

SEQ ID NO: 1180025 - RNA, 20 nt, Human
uucuguaguuuccuucaagg

SEQ ID NO: 1180026 - RNA, 20 nt, Human
uuucuguaguuuccuucaag

SEQ ID NO: 1180027 - RNA, 20 nt, Human
uuuucaguguuugcccagaa

SEQ ID NO: 1180028 - RNA, 20 nt, Human
aaacaagguucaugccugca

SEQ ID NO: 1180029 - RNA, 27 nt, Human
aacaaagaggacaugaauuaagaagaa

SEQ ID NO: 1180030 - RNA, 21 nt, Human
aaccaaaacaagguucaugcc

SEQ ID NO: 1180031 - RNA, 22 nt, Human
aaccaaaccaaaacaagguuca

SEQ ID NO: 1180032 - RNA, 23 nt, Human
aagaaauuaguucuccccaguuc

SEQ ID NO: 1180033 - RNA, 24 nt, Human
aagcgaucugcccaccuuggccuc

SEQ ID NO: 1180034 - RNA, 25 nt, Human
aaggggacagaggaaggcaguccca

SEQ ID NO: 1180035 - RNA, 22 nt, Human
aauaaagauuccugaacagcug

SEQ ID NO: 1180036 - RNA, 24 nt, Human
aauaaccaaugucaccacacuaag

SEQ ID NO: 1180037 - RNA, 28 nt, Human
acagagaguaacaaccaaaccaaaacaa

SEQ ID NO: 1180038 - RNA, 18 nt, Human
acagagcagggcgaaguc

SEQ ID NO: 1180039 - RNA, 19 nt, Human
acagagcagggcgaagucu

SEQ ID NO: 1180040 - RNA, 21 nt, Human
accugcuguuugucggccccg

SEQ ID NO: 1180041 - RNA, 23 nt, Human
agaaaacccagguucccacugga

SEQ ID NO: 1180042 - RNA, 21 nt, Human
agaguaacaaccaaaccaaaa

SEQ ID NO: 1180043 - RNA, 22 nt, Human
agaguaacaaccaaaccaaaac

SEQ ID NO: 1180044 - RNA, 22 nt, Human
agaucacaggcaaauuacugca

SEQ ID NO: 1180045 - RNA, 23 nt, Human
agcaccaaggggacagaggaagg

SEQ ID NO: 1180046 - RNA, 23 nt, Human
agccaggagggcaccaggcagug

SEQ ID NO: 1180047 - RNA, 18 nt, Human
agcugcagcagcccgagg

SEQ ID NO: 1180048 - RNA, 26 nt, Human
agguacugggauuacaggugugagcc

SEQ ID NO: 1180049 - RNA, 20 nt, Human
caaaacguagggcccugagc

SEQ ID NO: 1180050 - RNA, 22 nt, Human
caacccguaucugggagacaau

SEQ ID NO: 1180051 - RNA, 18 nt, Human
caagccucggcuggcaca

SEQ ID NO: 1180052 - RNA, 24 nt, Human
caagguacugggauuacaggugug

SEQ ID NO: 1180053 - RNA, 24 nt, Human
cacacucacacucacauucgugua

SEQ ID NO: 1180054 - RNA, 24 nt, Human
cacacucacauucguguacaugua

SEQ ID NO: 1180055 - RNA, 25 nt, Human
caccagcuagaaaacccagguuccc

SEQ ID NO: 1180056 - RNA, 19 nt, Human
cagcccgaggcagucacug

SEQ ID NO: 1180057 - RNA, 20 nt, Human
caggagggcaccaggcagug

SEQ ID NO: 1180058 - RNA, 19 nt, Human
cagucaaaacagcgcucag

SEQ ID NO: 1180059 - RNA, 18 nt, Human
caugagguuucaauaugu

SEQ ID NO: 1180060 - RNA, 22 nt, Human
ccaaaccaaaacaagguucaug

SEQ ID NO: 1180061 - RNA, 20 nt, Human
ccaagguacugggauuacag

SEQ ID NO: 1180062 - RNA, 21 nt, Human
ccaagguacugggauuacagg

SEQ ID NO: 1180063 - RNA, 24 nt, Human
ccaagguacugggauuacaggugu

SEQ ID NO: 1180064 - RNA, 23 nt, Human
ccacuggaugacaaccccaaccc

SEQ ID NO: 1180065 - RNA, 21 nt, Human
ccagcuagaaaacccagguuc

SEQ ID NO: 1180066 - RNA, 23 nt, Human
ccaucucuucacuacuagaaucc

SEQ ID NO: 1180067 - RNA, 26 nt, Human
cccacuggaugacaaccccaacccgu

SEQ ID NO: 1180068 - RNA, 22 nt, Human
cccgcagugugagugcugggac

SEQ ID NO: 1180069 - RNA, 18 nt, Human
ccgccaauccuacagagc

SEQ ID NO: 1180070 - RNA, 24 nt, Human
ccucgggggucugggaaacugugg

SEQ ID NO: 1180071 - RNA, 23 nt, Human
ccugagcugcagcagcccgaggc

SEQ ID NO: 1180072 - RNA, 18 nt, Human
ccugcauuggcuguucug

SEQ ID NO: 1180073 - RNA, 21 nt, Human
ccugcauuggcuguucugugg

SEQ ID NO: 1180074 - RNA, 19 nt, Human
ccugggaaguagcugugga

SEQ ID NO: 1180075 - RNA, 24 nt, Human
cgaucugcccaccuuggccuccca

SEQ ID NO: 1180076 - RNA, 18 nt, Human
cggccccaacagaggcaa

SEQ ID NO: 1180077 - RNA, 20 nt, Human
cgggggucugggaaacugug

SEQ ID NO: 1180078 - RNA, 22 nt, Human
cguguacauguacacauucaca

SEQ ID NO: 1180079 - RNA, 24 nt, Human
cucaagcgaucugcccaccuuggc

SEQ ID NO: 1180080 - RNA, 18 nt, Human
cugccuuggugaugccuc

SEQ ID NO: 1180081 - RNA, 20 nt, Human
cuugcuagcuacaagaucac

SEQ ID NO: 1180082 - RNA, 19 nt, Human
gaaacagagaguaacaacc

SEQ ID NO: 1180083 - RNA, 21 nt, Human
gagcaccaaggggacagagga

SEQ ID NO: 1180084 - RNA, 22 nt, Human
gagccgccaauccuacagagca

SEQ ID NO: 1180085 - RNA, 23 nt, Human
gagccgccaauccuacagagcag

SEQ ID NO: 1180086 - RNA, 18 nt, Human
gauuacaggugugagcca

SEQ ID NO: 1180087 - RNA, 23 nt, Human
gauuacaggugugagccacggca

SEQ ID NO: 1180088 - RNA, 20 nt, Human
gcccgaggcagucacugucc

SEQ ID NO: 1180089 - RNA, 20 nt, Human
gcugccuuggugaugccuca

SEQ ID NO: 1180090 - RNA, 24 nt, Human
gcuuggugaagggcaucauucggc

SEQ ID NO: 1180091 - RNA, 25 nt, Human
ggaaacugugggaggagccgguacc

SEQ ID NO: 1180092 - RNA, 18 nt, Human
ggagcuggggcagagugg

SEQ ID NO: 1180093 - RNA, 23 nt, Human
ggccuccugagcugcagcagccc

SEQ ID NO: 1180094 - RNA, 22 nt, Human
gggggcacaguucccugcauug

SEQ ID NO: 1180095 - RNA, 21 nt, Human
guacugggauuacagguguga

SEQ ID NO: 1180096 - RNA, 19 nt, Human
guuccacuaacaaagagga

SEQ ID NO: 1180097 - RNA, 22 nt, Human
uaaggaaggaagagcucagaaa

SEQ ID NO: 1180098 - RNA, 24 nt, Human
uacaggugugagccacggcacccu

SEQ ID NO: 1180099 - RNA, 24 nt, Human
uacugggauuacaggugugagcca

SEQ ID NO: 1180100 - RNA, 22 nt, Human
uccagggagcuggggcagagug

SEQ ID NO: 1180101 - RNA, 19 nt, Human
ucccaaaggaagcggaugg

SEQ ID NO: 1180102 - RNA, 23 nt, Human
ucccaagguacugggauuacagg

SEQ ID NO: 1180103 - RNA, 18 nt, Human
ucccacuggaugacaacc

SEQ ID NO: 1180104 - RNA, 19 nt, Human
ucggccccgcagugugagu

SEQ ID NO: 1180105 - RNA, 27 nt, Human
ugaagcaggcagaaugccaaucgagcc

SEQ ID NO: 1180106 - RNA, 20 nt, Human
ugagugcugggaccucgggg

SEQ ID NO: 1180107 - RNA, 21 nt, Human
ugauuaaauggccuggggugc

SEQ ID NO: 1180108 - RNA, 24 nt, Human
ugcugggaccucgggggucuggga

SEQ ID NO: 1180109 - RNA, 22 nt, Human
uggaaaggaauaaagauuccug

SEQ ID NO: 1180110 - RNA, 24 nt, Human
uggaugacaaccccaacccguauc

SEQ ID NO: 1180111 - RNA, 20 nt, Human
ugggaggagccaggagggca

SEQ ID NO: 1180112 - RNA, 18 nt, Human
ugggauuacaggugugag

SEQ ID NO: 1180113 - RNA, 19 nt, Human
ugggauuacaggugugagc

SEQ ID NO: 1180114 - RNA, 21 nt, Human
ugggauuacaggugugagcca

SEQ ID NO: 1180115 - RNA, 22 nt, Human
ugggauuacaggugugagccac

SEQ ID NO: 1180116 - RNA, 22 nt, Human
ugggauuacaggugugagccac

SEQ ID NO: 1180117 - RNA, 24 nt, Human
ugggauuacaggugugagccacgg

SEQ ID NO: 1180118 - RNA, 25 nt, Human
ugggauuacaggugugagccacggc

SEQ ID NO: 1180119 - RNA, 21 nt, Human
ugggcaacccagaauaaccaa

SEQ ID NO: 1180120 - RNA, 21 nt, Human
ugggguaggauccagggagcu

SEQ ID NO: 1180121 - RNA, 18 nt, Human
uguacacauucacacccg

SEQ ID NO: 1180122 - RNA, 20 nt, Human
uguacacauucacacccgca

SEQ ID NO: 1180123 - RNA, 23 nt, Human
uguugagaugcuaguuaugagca

SEQ ID NO: 1180124 - RNA, 21 nt, Human
uuagcgcugccuuggugaugc

SEQ ID NO: 1180125 - RNA, 21 nt, Human
uucggccuccugagcugcagc

SEQ ID NO: 1180126 - RNA, 19 nt, Human
uugcacucaagcgaucugc

SEQ ID NO: 1180127 - RNA, 18 nt, Human
uuuaaaaauuucucccaa

SEQ ID NO: 1180128 - RNA, 20 nt, Human
agaagaagcugacuuggcca

SEQ ID NO: 1180129 - RNA, 21 nt, Human
cagaagaagcugacuuggcca

SEQ ID NO: 1180130 - RNA, 23 nt, Human
cagagguuuucuucaugaaauuu

SEQ ID NO: 1180131 - RNA, 23 nt, Human
gugcucuuguuggaaauguauuc

SEQ ID NO: 1180132 - RNA, 24 nt, Human
uaguaauauuacaaaaucuauaua

SEQ ID NO: 1180133 - RNA, 25 nt, Human
uauugcaaacacauuaaaaaaacua

SEQ ID NO: 1180134 - RNA, 22 nt, Human
ucagaagaagcugacuuggcca

SEQ ID NO: 1180135 - RNA, 19 nt, Human
ucucucagaagaagcugac

SEQ ID NO: 1180136 - RNA, 22 nt, Human
uuaaaaaaacuaaauaguaaua

SEQ ID NO: 1180137 - RNA, 19 nt, Human
uugaagugaaggcuuuuuu

SEQ ID NO: 1180138 - RNA, 23 nt, Human
uugaagugaaggcuuuuuuccau

SEQ ID NO: 1180139 - RNA, 19 nt, Human
guccuuuauuuuuuuuuuu

SEQ ID NO: 1180140 - RNA, 23 nt, Human
aaaaagagacauauuuagguaaa

SEQ ID NO: 1180141 - RNA, 23 nt, Human
aaaaauaauaaaaaccccaugcu

SEQ ID NO: 1180142 - RNA, 20 nt, Human
aacaacaucaaacuccacag

SEQ ID NO: 1180143 - RNA, 25 nt, Human
aagcacuuaaggucuucagcuccaa

SEQ ID NO: 1180144 - RNA, 23 nt, Human
acacugcgaagguacuuccuggg

SEQ ID NO: 1180145 - RNA, 21 nt, Human
aguucuauuuaucuggucaac

SEQ ID NO: 1180146 - RNA, 25 nt, Human
aucuuccuuggugucauuccuguug

SEQ ID NO: 1180147 - RNA, 21 nt, Human
caacgggcaaaaagcaagcac

SEQ ID NO: 1180148 - RNA, 18 nt, Human
cacccucuucuccuucaa

SEQ ID NO: 1180149 - RNA, 22 nt, Human
cacccucuucuccuucaacaac

SEQ ID NO: 1180150 - RNA, 18 nt, Human
cagcggcggggcugcuca

SEQ ID NO: 1180151 - RNA, 22 nt, Human
cauuugcugccuccgcacccuc

SEQ ID NO: 1180152 - RNA, 18 nt, Human
ccugcgguagggccggca

SEQ ID NO: 1180153 - RNA, 19 nt, Human
cggcggcgcugagggcggg

SEQ ID NO: 1180154 - RNA, 21 nt, Human
cggcugcggcagcugcggcuu

SEQ ID NO: 1180155 - RNA, 24 nt, Human
cgggggcggcggguggcugcuggg

SEQ ID NO: 1180156 - RNA, 20 nt, Human
cucaggguucucuggggucc

SEQ ID NO: 1180157 - RNA, 21 nt, Human
cuccgcacccucuucuccuuc

SEQ ID NO: 1180158 - RNA, 19 nt, Human
gacgggaggggggcggugg

SEQ ID NO: 1180159 - RNA, 18 nt, Human
gaucccucggucuuuucc

SEQ ID NO: 1180160 - RNA, 20 nt, Human
gaucccucggucuuuucccc

SEQ ID NO: 1180161 - RNA, 19 nt, Human
gcagcggcggggcugcuca

SEQ ID NO: 1180162 - RNA, 21 nt, Human
gcggcggggcugcucaggguu

SEQ ID NO: 1180163 - RNA, 18 nt, Human
gcggcggggggacgggag

SEQ ID NO: 1180164 - RNA, 18 nt, Human
gcugcggcuccucccgug

SEQ ID NO: 1180165 - RNA, 20 nt, Human
ggcggcggguggcugcuggg

SEQ ID NO: 1180166 - RNA, 26 nt, Human
ggcggggggacgggaggggggcggug

SEQ ID NO: 1180167 - RNA, 24 nt, Human
ggcgguggggggaaaggcgggggc

SEQ ID NO: 1180168 - RNA, 25 nt, Human
ggcuuggugucggcggcgcugaggg

SEQ ID NO: 1180169 - RNA, 18 nt, Human
gggacgggaggggggcgg

SEQ ID NO: 1180170 - RNA, 24 nt, Human
gggacgggaggggggcgguggggg

SEQ ID NO: 1180171 - RNA, 24 nt, Human
gggcggcggggggacgggaggggg

SEQ ID NO: 1180172 - RNA, 23 nt, Human
gggcggcggguggcugcuggguc

SEQ ID NO: 1180173 - RNA, 25 nt, Human
gggcgguggggggaaaggcgggggc

SEQ ID NO: 1180174 - RNA, 20 nt, Human
ggggaaaggcgggggcggcg

SEQ ID NO: 1180175 - RNA, 19 nt, Human
ggggacgggaggggggcgg

SEQ ID NO: 1180176 - RNA, 18 nt, Human
gggggcgguggggggaaa

SEQ ID NO: 1180177 - RNA, 23 nt, Human
gggggcgguggggggaaaggcgg

SEQ ID NO: 1180178 - RNA, 27 nt, Human
gggggcgguggggggaaaggcggggaa

SEQ ID NO: 1180179 - RNA, 19 nt, Human
ggggggaaaggcgggggcg

SEQ ID NO: 1180180 - RNA, 23 nt, Human
gguggcugcugggucucggccuu

SEQ ID NO: 1180181 - RNA, 20 nt, Human
gguggggggaaaggcggggg

SEQ ID NO: 1180182 - RNA, 21 nt, Human
gucucggccuugcugcucauu

SEQ ID NO: 1180183 - RNA, 20 nt, Human
uacacugcgaagguacuucc

SEQ ID NO: 1180184 - RNA, 23 nt, Human
uacacugcgaagguacuuccugg

SEQ ID NO: 1180185 - RNA, 24 nt, Human
uagguaaaaauaauaaaaacccca

SEQ ID NO: 1180186 - RNA, 23 nt, Human
uauuaccaaaaagagacauauuu

SEQ ID NO: 1180187 - RNA, 19 nt, Human
ucccaaaaccuucacugcg

SEQ ID NO: 1180188 - RNA, 19 nt, Human
uccgcacccucuucuccuu

SEQ ID NO: 1180189 - RNA, 21 nt, Human
uccgggguccgcucuccgcuc

SEQ ID NO: 1180190 - RNA, 22 nt, Human
uccuguugaugaaaccauaucc

SEQ ID NO: 1180191 - RNA, 18 nt, Human
ucuccuacacugcgaagg

SEQ ID NO: 1180192 - RNA, 18 nt, Human
ugaacucgaacaccacca

SEQ ID NO: 1180193 - RNA, 20 nt, Human
ugcucauugguugcggugau

SEQ ID NO: 1180194 - RNA, 19 nt, Human
uguccacgcuggcaggcgc

SEQ ID NO: 1180195 - RNA, 24 nt, Human
uuccccacucucacuguucuggua

SEQ ID NO: 1180196 - RNA, 19 nt, Human
uuccuuggugucauuccug

SEQ ID NO: 1180197 - RNA, 24 nt, Human
uuccuuggugucauuccuguugau

SEQ ID NO: 1180198 - RNA, 20 nt, Human
uuguccacgcuggcaggcgc

SEQ ID NO: 1180199 - RNA, 19 nt, Human
aaagugcugggaauauagg

SEQ ID NO: 1180200 - RNA, 24 nt, Human
aaagugcugggaauauaggcauga

SEQ ID NO: 1180201 - RNA, 24 nt, Human
aacacuggugaaaccccgucucua

SEQ ID NO: 1180202 - RNA, 19 nt, Human
aaccaugauaugacacaac

SEQ ID NO: 1180203 - RNA, 21 nt, Human
aaccccgucucuaccaaaaau

SEQ ID NO: 1180204 - RNA, 24 nt, Human
aacugcuugaaccuggggggugga

SEQ ID NO: 1180205 - RNA, 22 nt, Human
aagcccagcuaggcccuggaaa

SEQ ID NO: 1180206 - RNA, 20 nt, Human
aaugcaggggagagggagaa

SEQ ID NO: 1180207 - RNA, 21 nt, Human
acaagaaugaaacucugucuc

SEQ ID NO: 1180208 - RNA, 22 nt, Human
acaauggcauaugcuuugucga

SEQ ID NO: 1180209 - RNA, 19 nt, Human
acacuggugaaaccccguc

SEQ ID NO: 1180210 - RNA, 20 nt, Human
acacuggugaaaccccgucu

SEQ ID NO: 1180211 - RNA, 21 nt, Human
acacuggugaaaccccgucuc

SEQ ID NO: 1180212 - RNA, 22 nt, Human
accaaucacuaagcauugccau

SEQ ID NO: 1180213 - RNA, 21 nt, Human
accacaaugcaggggagaggg

SEQ ID NO: 1180214 - RNA, 19 nt, Human
accagacuacaaauaaaug

SEQ ID NO: 1180215 - RNA, 24 nt, Human
accccgucucuaccaaaaauacaa

SEQ ID NO: 1180216 - RNA, 24 nt, Human
accugaggucaggaguucgagacc

SEQ ID NO: 1180217 - RNA, 24 nt, Human
acuccugggcucaagugauucucc

SEQ ID NO: 1180218 - RNA, 28 nt, Human
acucugucucaaaaaaaaaaaaaaaaaa

SEQ ID NO: 1180219 - RNA, 19 nt, Human
acugcacuccagcccuggg

SEQ ID NO: 1180220 - RNA, 20 nt, Human
acugcacuccagcccugggg

SEQ ID NO: 1180221 - RNA, 24 nt, Human
agcacuuugggaggccgagguggg

SEQ ID NO: 1180222 - RNA, 21 nt, Human
agccgagggaagcuguuucuu

SEQ ID NO: 1180223 - RNA, 25 nt, Human
agccuggccaacacuggugaaaccc

SEQ ID NO: 1180224 - RNA, 24 nt, Human
aggaaagaaagagaaaauacauaa

SEQ ID NO: 1180225 - RNA, 19 nt, Human
aggaagaacugcuugaacc

SEQ ID NO: 1180226 - RNA, 21 nt, Human
aggaagaacugcuugaaccug

SEQ ID NO: 1180227 - RNA, 19 nt, Human
aggcaugagccaccaugcc

SEQ ID NO: 1180228 - RNA, 21 nt, Human
aggccgagguggguggaucac

SEQ ID NO: 1180229 - RNA, 21 nt, Human
aggcugaggaagaacugcuug

SEQ ID NO: 1180230 - RNA, 19 nt, Human
aggggagagggagaaaagg

SEQ ID NO: 1180231 - RNA, 19 nt, Human
aggggagagggagaaaagg

SEQ ID NO: 1180232 - RNA, 22 nt, Human
agguggguggaucaccugaggu

SEQ ID NO: 1180233 - RNA, 23 nt, Human
aguacuuuacaggccugcuuuac

SEQ ID NO: 1180234 - RNA, 18 nt, Human
aguccugaacuccugggc

SEQ ID NO: 1180235 - RNA, 22 nt, Human
agugcuggauaacacuugagug

SEQ ID NO: 1180236 - RNA, 20 nt, Human
auagcauuuuuucugcagua

SEQ ID NO: 1180237 - RNA, 21 nt, Human
aucaccugaggucaggaguuc

SEQ ID NO: 1180238 - RNA, 25 nt, Human
aucaugccacugcacuccagcccug

SEQ ID NO: 1180239 - RNA, 24 nt, Human
augccacugcacuccagcccuggg

SEQ ID NO: 1180240 - RNA, 19 nt, Human
augccuguaaucccagcac

SEQ ID NO: 1180241 - RNA, 23 nt, Human
caaagugcugggaauauaggcau

SEQ ID NO: 1180242 - RNA, 24 nt, Human
caaagugcugggaauauaggcaug

SEQ ID NO: 1180243 - RNA, 23 nt, Human
caacaagaaugaaacucugucuc

SEQ ID NO: 1180244 - RNA, 18 nt, Human
caacugauggccacugug

SEQ ID NO: 1180245 - RNA, 22 nt, Human
caagaaugaaacucugucucaa

SEQ ID NO: 1180246 - RNA, 19 nt, Human
caaguaagccacaauggca

SEQ ID NO: 1180247 - RNA, 23 nt, Human
caaguuuaagaaacacuggauuu

SEQ ID NO: 1180248 - RNA, 18 nt, Human
caccauggaccagaauac

SEQ ID NO: 1180249 - RNA, 19 nt, Human
caccauggaccagaauaca

SEQ ID NO: 1180250 - RNA, 19 nt, Human
caccauggaccagaauaca

SEQ ID NO: 1180251 - RNA, 23 nt, Human
caccugaggucaggaguucgaga

SEQ ID NO: 1180252 - RNA, 18 nt, Human
cacgccuguaaucccagc

SEQ ID NO: 1180253 - RNA, 19 nt, Human
cacgccuguaaucccagcu

SEQ ID NO: 1180254 - RNA, 20 nt, Human
cacugcacuccagcccuggg

SEQ ID NO: 1180255 - RNA, 22 nt, Human
cacugcacuccagcccugggca

SEQ ID NO: 1180256 - RNA, 23 nt, Human
cacugcacuccagcccugggcaa

SEQ ID NO: 1180257 - RNA, 24 nt, Human
cacugcacuccagcccugggcaac

SEQ ID NO: 1180258 - RNA, 25 nt, Human
cacugcacuccagcccugggcaaca

SEQ ID NO: 1180259 - RNA, 22 nt, Human
cagaauccugcugcagagcuga

SEQ ID NO: 1180260 - RNA, 24 nt, Human
cagcacuuugggaggccgaggugg

SEQ ID NO: 1180261 - RNA, 18 nt, Human
caggcuaguccugaacuc

SEQ ID NO: 1180262 - RNA, 23 nt, Human
caggggagagggagaaaaggggu

SEQ ID NO: 1180263 - RNA, 20 nt, Human
caugccuguaaucccagcac

SEQ ID NO: 1180264 - RNA, 24 nt, Human
caugccuguaaucccagcacuuug

SEQ ID NO: 1180265 - RNA, 19 nt, Human
caugcugucuuuugggguc

SEQ ID NO: 1180266 - RNA, 23 nt, Human
ccaaagcaaaaauuucaucagaa

SEQ ID NO: 1180267 - RNA, 21 nt, Human
ccacugcacuccagcccuggg

SEQ ID NO: 1180268 - RNA, 22 nt, Human
ccacugcacuccagcccugggc

SEQ ID NO: 1180269 - RNA, 25 nt, Human
ccacugcacuccagcccugggcaac

SEQ ID NO: 1180270 - RNA, 20 nt, Human
ccagacuucacaucccgccu

SEQ ID NO: 1180271 - RNA, 21 nt, Human
cccagaccacaaugcagggga

SEQ ID NO: 1180272 - RNA, 18 nt, Human
ccggggacuuagaggaag

SEQ ID NO: 1180273 - RNA, 22 nt, Human
ccugaggucaggaguucgagac

SEQ ID NO: 1180274 - RNA, 30 nt, Human
ccugccuuaaaggacaagaaaugauuuucc

SEQ ID NO: 1180275 - RNA, 24 nt, Human
ccuggccaacacuggugaaacccc

SEQ ID NO: 1180276 - RNA, 25 nt, Human
ccuggccaacacuggugaaaccccg

SEQ ID NO: 1180277 - RNA, 22 nt, Human
ccugggcucaagugauucuccc

SEQ ID NO: 1180278 - RNA, 21 nt, Human
ccugggggguggagguugcag

SEQ ID NO: 1180279 - RNA, 22 nt, Human
ccuguaaucccagcacuuuggg

SEQ ID NO: 1180280 - RNA, 22 nt, Human
ccuguaaucccagcuacuccgg

SEQ ID NO: 1180281 - RNA, 23 nt, Human
ccuguaaucccagcuacuccgga

SEQ ID NO: 1180282 - RNA, 25 nt, Human
cgagaccagccuggccaacacuggu

SEQ ID NO: 1180283 - RNA, 24 nt, Human
cgagguggguggaucaccugaggu

SEQ ID NO: 1180284 - RNA, 24 nt, Human
cgccuguaaucccagcuacuccgg

SEQ ID NO: 1180285 - RNA, 19 nt, Human
cuaagcauugccauguacc

SEQ ID NO: 1180286 - RNA, 22 nt, Human
cuaguucuuauaguggcucaug

SEQ ID NO: 1180287 - RNA, 18 nt, Human
cucaaaaaaaaaaaaaaa

SEQ ID NO: 1180288 - RNA, 23 nt, Human
cucaagugauucucccacuuuga

SEQ ID NO: 1180289 - RNA, 18 nt, Human
cucagaauuaguggguca

SEQ ID NO: 1180290 - RNA, 21 nt, Human
cucccacuuugaccucucaaa

SEQ ID NO: 1180291 - RNA, 20 nt, Human
cuccugggcucaagugauuc

SEQ ID NO: 1180292 - RNA, 21 nt, Human
cuccugggcucaagugauucu

SEQ ID NO: 1180293 - RNA, 19 nt, Human
cucugucucaaaaaaaaaa

SEQ ID NO: 1180294 - RNA, 24 nt, Human
cugcuugaaccugggggguggagg

SEQ ID NO: 1180295 - RNA, 19 nt, Human
cuugaaccuggggggugga

SEQ ID NO: 1180296 - RNA, 25 nt, Human
cuugcacauccagacuucacauccc

SEQ ID NO: 1180297 - RNA, 28 nt, Human
cuugugcauacagacugggagucccuug

SEQ ID NO: 1180298 - RNA, 21 nt, Human
gaauauaggcaugagccacca

SEQ ID NO: 1180299 - RNA, 24 nt, Human
gaauauaggcaugagccaccaugc

SEQ ID NO: 1180300 - RNA, 21 nt, Human
gacucugaauuuuuucuuuuu

SEQ ID NO: 1180301 - RNA, 20 nt, Human
gagcuaguucuuauaguggc

SEQ ID NO: 1180302 - RNA, 25 nt, Human
gagguggguggaucaccugagguca

SEQ ID NO: 1180303 - RNA, 22 nt, Human
gagguugcagugagcugagauc

SEQ ID NO: 1180304 - RNA, 21 nt, Human
gaucaccugaggucaggaguu

SEQ ID NO: 1180305 - RNA, 24 nt, Human
gaucaccugaggucaggaguucga

SEQ ID NO: 1180306 - RNA, 21 nt, Human
gcagugggcucugggcagcau

SEQ ID NO: 1180307 - RNA, 25 nt, Human
gccaacacuggugaaaccccgucuc

SEQ ID NO: 1180308 - RNA, 25 nt, Human
gccacugcacuccagcccugggcaa

SEQ ID NO: 1180309 - RNA, 22 nt, Human
gccgggcacggugguucaugcc

SEQ ID NO: 1180310 - RNA, 18 nt, Human
gccugcuuuacuccucag

SEQ ID NO: 1180311 - RNA, 19 nt, Human
gcuaguccugaacuccugg

SEQ ID NO: 1180312 - RNA, 20 nt, Human
gcugagaucaugccacugca

SEQ ID NO: 1180313 - RNA, 22 nt, Human
ggaauauaggcaugagccacca

SEQ ID NO: 1180314 - RNA, 24 nt, Human
ggaauauaggcaugagccaccaug

SEQ ID NO: 1180315 - RNA, 24 nt, Human
ggacagguuguucggcaacgaccc

SEQ ID NO: 1180316 - RNA, 31 nt, Human
ggaccaaggcccagaccacaaugcaggggaa

SEQ ID NO: 1180317 - RNA, 21 nt, Human
ggagacaggucgagaguaagg

SEQ ID NO: 1180318 - RNA, 18 nt, Human
ggagaggaaaaggcggca

SEQ ID NO: 1180319 - RNA, 18 nt, Human
ggagguugcagugagcug

SEQ ID NO: 1180320 - RNA, 22 nt, Human
ggagguugcagugagcugagau

SEQ ID NO: 1180321 - RNA, 23 nt, Human
ggagguugcagugagcugagauc

SEQ ID NO: 1180322 - RNA, 24 nt, Human
ggagguugcagugagcugagauca

SEQ ID NO: 1180323 - RNA, 23 nt, Human
ggccgggcacggugguucaugcc

SEQ ID NO: 1180324 - RNA, 24 nt, Human
ggcugaggaagaacugcuugaacc

SEQ ID NO: 1180325 - RNA, 24 nt, Human
gggcacggugguucaugccuguaa

SEQ ID NO: 1180326 - RNA, 24 nt, Human
gggcgugguggcgcacgccuguaa

SEQ ID NO: 1180327 - RNA, 21 nt, Human
gggcucaagugauucucccac

SEQ ID NO: 1180328 - RNA, 19 nt, Human
ggggcugggacuaugggag

SEQ ID NO: 1180329 - RNA, 19 nt, Human
ggguccuuaggaaaugacu

SEQ ID NO: 1180330 - RNA, 19 nt, Human
gguggagguugcagugagc

SEQ ID NO: 1180331 - RNA, 19 nt, Human
gguggagguugcagugagc

SEQ ID NO: 1180332 - RNA, 23 nt, Human
gguggagguugcagugagcugag

SEQ ID NO: 1180333 - RNA, 21 nt, Human
gguggaucaccugaggucagg

SEQ ID NO: 1180334 - RNA, 24 nt, Human
gguggcgcacgccuguaaucccag

SEQ ID NO: 1180335 - RNA, 23 nt, Human
ggugguucaugccuguaauccca

SEQ ID NO: 1180336 - RNA, 24 nt, Human
ggugguucaugccuguaaucccag

SEQ ID NO: 1180337 - RNA, 18 nt, Human
guagaggugggaucuugc

SEQ ID NO: 1180338 - RNA, 19 nt, Human
guccagggaaggaaacugu

SEQ ID NO: 1180339 - RNA, 20 nt, Human
guggagguugcagugagcug

SEQ ID NO: 1180340 - RNA, 24 nt, Human
guugcagugagcugagaucaugcc

SEQ ID NO: 1180341 - RNA, 22 nt, Human
uaaagaaaugacaaguaagcca

SEQ ID NO: 1180342 - RNA, 22 nt, Human
uaagaaacacuggauuugccau

SEQ ID NO: 1180343 - RNA, 28 nt, Human
uaagaacaauguucuggccccucccucc

SEQ ID NO: 1180344 - RNA, 19 nt, Human
uaagcauugccauguacca

SEQ ID NO: 1180345 - RNA, 24 nt, Human
uaagcauugccauguaccaggccc

SEQ ID NO: 1180346 - RNA, 20 nt, Human
uaaggagaugaagggacauu

SEQ ID NO: 1180347 - RNA, 22 nt, Human
uagaggugggaucuugcuaugu

SEQ ID NO: 1180348 - RNA, 24 nt, Human
uagcagaaaguacggugguacacu

SEQ ID NO: 1180349 - RNA, 23 nt, Human
uauacaaugccauuuauuguaau

SEQ ID NO: 1180350 - RNA, 20 nt, Human
uaugacacaaccagacuaca

SEQ ID NO: 1180351 - RNA, 21 nt, Human
uaugcuuugucgaaugagagg

SEQ ID NO: 1180352 - RNA, 23 nt, Human
uauguugcccaggcuaguccuga

SEQ ID NO: 1180353 - RNA, 24 nt, Human
uauguugcccaggcuaguccugaa

SEQ ID NO: 1180354 - RNA, 24 nt, Human
ucaaaaaaaaaaaaaaaaaaagaa

SEQ ID NO: 1180355 - RNA, 24 nt, Human
ucaaagugcugggaauauaggcau

SEQ ID NO: 1180356 - RNA, 20 nt, Human
ucaccugaggucaggaguuc

SEQ ID NO: 1180357 - RNA, 18 nt, Human
ucagaauccugcugcaga

SEQ ID NO: 1180358 - RNA, 23 nt, Human
ucaugccacugcacuccagcccu

SEQ ID NO: 1180359 - RNA, 22 nt, Human
ucaugccuguaaucccagcacu

SEQ ID NO: 1180360 - RNA, 23 nt, Human
ucaugccuguaaucccagcacuu

SEQ ID NO: 1180361 - RNA, 23 nt, Human
uccaaaaggucuuucaguaacuc

SEQ ID NO: 1180362 - RNA, 24 nt, Human
uccccaccauggaccagaauacaa

SEQ ID NO: 1180363 - RNA, 22 nt, Human
ucccuuggguagcgggggacag

SEQ ID NO: 1180364 - RNA, 18 nt, Human
uccugaacuccugggcuc

SEQ ID NO: 1180365 - RNA, 23 nt, Human
uccugaacuccugggcucaagug

SEQ ID NO: 1180366 - RNA, 24 nt, Human
uccugcugcagagcugagggcugg

SEQ ID NO: 1180367 - RNA, 21 nt, Human
uccugggcucaagugauucuc

SEQ ID NO: 1180368 - RNA, 22 nt, Human
uccugggcucaagugauucucc

SEQ ID NO: 1180369 - RNA, 23 nt, Human
uccugggcucaagugauucuccc

SEQ ID NO: 1180370 - RNA, 24 nt, Human
uccugggcucaagugauucuccca

SEQ ID NO: 1180371 - RNA, 23 nt, Human
uccuucaugcugucuuuuggggu

SEQ ID NO: 1180372 - RNA, 24 nt, Human
ucucaaagugcugggaauauaggc

SEQ ID NO: 1180373 - RNA, 23 nt, Human
ucucacuguaaauagcauaagaa

SEQ ID NO: 1180374 - RNA, 23 nt, Human
ucugucucaaaaaaaaaaaaaaa

SEQ ID NO: 1180375 - RNA, 18 nt, Human
ucuugcuauguugcccag

SEQ ID NO: 1180376 - RNA, 19 nt, Human
ucuugcuauguugcccagg

SEQ ID NO: 1180377 - RNA, 24 nt, Human
ugaaccugggggguggagguugca

SEQ ID NO: 1180378 - RNA, 24 nt, Human
ugagacucugaauuuuuucuuuuu

SEQ ID NO: 1180379 - RNA, 20 nt, Human
ugagaggaauaaaacuggac

SEQ ID NO: 1180380 - RNA, 24 nt, Human
ugagaucaugccacugcacuccag

SEQ ID NO: 1180381 - RNA, 22 nt, Human
ugagcugagaucaugccacugc

SEQ ID NO: 1180382 - RNA, 21 nt, Human
ugaggaagaacugcuugaacc

SEQ ID NO: 1180383 - RNA, 21 nt, Human
ugaggaagaacugcuugaacc

SEQ ID NO: 1180384 - RNA, 22 nt, Human
ugaguggaaaggaggggcacag

SEQ ID NO: 1180385 - RNA, 23 nt, Human
ugcacauccagacuucacauccc

SEQ ID NO: 1180386 - RNA, 22 nt, Human
ugccaucuaucaagaugcucca

SEQ ID NO: 1180387 - RNA, 24 nt, Human
ugcccaggcuaguccugaacuccu

SEQ ID NO: 1180388 - RNA, 28 nt, Human
ugcccaggcuaguccugaacuccugggc

SEQ ID NO: 1180389 - RNA, 19 nt, Human
ugcccugggauggcugagg

SEQ ID NO: 1180390 - RNA, 23 nt, Human
ugccuguaaucccagcacuuugg

SEQ ID NO: 1180391 - RNA, 23 nt, Human
ugccuguaaucccagcacuuugg

SEQ ID NO: 1180392 - RNA, 20 nt, Human
ugcuauguugcccaggcuag

SEQ ID NO: 1180393 - RNA, 22 nt, Human
ugcuauguugcccaggcuaguc

SEQ ID NO: 1180394 - RNA, 27 nt, Human
ugcuauguugcccaggcuaguccugaa

SEQ ID NO: 1180395 - RNA, 20 nt, Human
ugcugcagagcugagggcug

SEQ ID NO: 1180396 - RNA, 23 nt, Human
ugcuugaaccugggggguggagg

SEQ ID NO: 1180397 - RNA, 21 nt, Human
uggaauggacaaggcauagca

SEQ ID NO: 1180398 - RNA, 23 nt, Human
uggacaaguuuaagaaacacugg

SEQ ID NO: 1180399 - RNA, 18 nt, Human
uggaccaaggcccagacc

SEQ ID NO: 1180400 - RNA, 18 nt, Human
uggagguugcagugagcu

SEQ ID NO: 1180401 - RNA, 24 nt, Human
uggaucaccugaggucaggaguuc

SEQ ID NO: 1180402 - RNA, 27 nt, Human
uggaucaccugaggucaggaguucgag

SEQ ID NO: 1180403 - RNA, 22 nt, Human
uggccaugaggcagauuaagca

SEQ ID NO: 1180404 - RNA, 21 nt, Human
uggcgcacgccuguaauccca

SEQ ID NO: 1180405 - RNA, 22 nt, Human
uggcgcacgccuguaaucccag

SEQ ID NO: 1180406 - RNA, 18 nt, Human
ugggaauauaggcaugag

SEQ ID NO: 1180407 - RNA, 24 nt, Human
ugggaauauaggcaugagccacca

SEQ ID NO: 1180408 - RNA, 23 nt, Human
ugggaggccgagguggguggauc

SEQ ID NO: 1180409 - RNA, 24 nt, Human
ugggaggccgagguggguggauca

SEQ ID NO: 1180410 - RNA, 24 nt, Human
ugggaucuugcuauguugcccagg

SEQ ID NO: 1180411 - RNA, 18 nt, Human
ugggaugacacuguggca

SEQ ID NO: 1180412 - RNA, 21 nt, Human
ugggaugacacuguggcagug

SEQ ID NO: 1180413 - RNA, 18 nt, Human
ugggcucaagugauucuc

SEQ ID NO: 1180414 - RNA, 24 nt, Human
ugggggguggagguugcagugagc

SEQ ID NO: 1180415 - RNA, 19 nt, Human
ugggucacaugaauaugaa

SEQ ID NO: 1180416 - RNA, 24 nt, Human
uggguggaucaccugaggucagga

SEQ ID NO: 1180417 - RNA, 19 nt, Human
uggguuucuugcacaucca

SEQ ID NO: 1180418 - RNA, 24 nt, Human
ugguggcgcacgccuguaauccca

SEQ ID NO: 1180419 - RNA, 22 nt, Human
ugguucaugccuguaaucccag

SEQ ID NO: 1180420 - RNA, 24 nt, Human
ugguucaugccuguaaucccagca

SEQ ID NO: 1180421 - RNA, 19 nt, Human
uguaccaggcccaggggcu

SEQ ID NO: 1180422 - RNA, 19 nt, Human
uguuagguguuguggggua

SEQ ID NO: 1180423 - RNA, 18 nt, Human
uuaguggggcgugguggc

SEQ ID NO: 1180424 - RNA, 20 nt, Human
uuaguggggcgugguggcgc

SEQ ID NO: 1180425 - RNA, 24 nt, Human
uuaguggggcgugguggcgcacgc

SEQ ID NO: 1180426 - RNA, 22 nt, Human
uucaaccaugauaugacacaac

SEQ ID NO: 1180427 - RNA, 19 nt, Human
uucacaagcccagcuaggc

SEQ ID NO: 1180428 - RNA, 18 nt, Human
uucucuggcaacugaugg

SEQ ID NO: 1180429 - RNA, 18 nt, Human
uucuggccccucccucca

SEQ ID NO: 1180430 - RNA, 19 nt, Human
uucuuuuuuuguagaggug

SEQ ID NO: 1180431 - RNA, 24 nt, Human
uugaaccugggggguggagguugc

SEQ ID NO: 1180432 - RNA, 20 nt, Human
uugcagugagcugagaucau

SEQ ID NO: 1180433 - RNA, 21 nt, Human
uugcagugagcugagaucaug

SEQ ID NO: 1180434 - RNA, 25 nt, Human
uugggaggccgagguggguggauca

SEQ ID NO: 1180435 - RNA, 18 nt, Human
uuuguagaggugggaucu

SEQ ID NO: 1180436 - RNA, 24 nt, Human
uuuuuuguagaggugggaucuugc

SEQ ID NO: 1180437 - RNA, 21 nt, Human
aaaagaccuccucguuccccc

SEQ ID NO: 1180438 - RNA, 21 nt, Human
aaagcacugcaggccaagggc

SEQ ID NO: 1180439 - RNA, 21 nt, Human
aaagcagaacacaccgugcuu

SEQ ID NO: 1180440 - RNA, 28 nt, Human
aaauaucccccugguccuuaugacaucc

SEQ ID NO: 1180441 - RNA, 23 nt, Human
aacaucccccaggcugcaccccc

SEQ ID NO: 1180442 - RNA, 19 nt, Human
aagaaccccaagacgggac

SEQ ID NO: 1180443 - RNA, 21 nt, Human
aagaaccccaagacgggacag

SEQ ID NO: 1180444 - RNA, 21 nt, Human
aagacgggacagaaccggcca

SEQ ID NO: 1180445 - RNA, 24 nt, Human
aagcccacggcccacaagacgugg

SEQ ID NO: 1180446 - RNA, 25 nt, Human
aagccggaggcacggagacagaaaa

SEQ ID NO: 1180447 - RNA, 20 nt, Human
aagcugcacccccucagccc

SEQ ID NO: 1180448 - RNA, 19 nt, Human
aaggaagcccaagguggag

SEQ ID NO: 1180449 - RNA, 22 nt, Human
acacacacagacaccaccccac

SEQ ID NO: 1180450 - RNA, 21 nt, Human
acaccagcaagcugcaccccc

SEQ ID NO: 1180451 - RNA, 22 nt, Human
acaggggagaccucacgacgug

SEQ ID NO: 1180452 - RNA, 24 nt, Human
acccgccgcgcccucuggagugcc

SEQ ID NO: 1180453 - RNA, 19 nt, Human
accuccacauccaugucca

SEQ ID NO: 1180454 - RNA, 18 nt, Human
acggagcugccgacacac

SEQ ID NO: 1180455 - RNA, 24 nt, Human
acgggacagaaccggccacccgcu

SEQ ID NO: 1180456 - RNA, 23 nt, Human
acgggacagcuggaaggacggag

SEQ ID NO: 1180457 - RNA, 22 nt, Human
agaaaauucuuuauugcaaagg

SEQ ID NO: 1180458 - RNA, 27 nt, Human
agacagaaaacaaacccacgugacaaa

SEQ ID NO: 1180459 - RNA, 20 nt, Human
agacguggacaccaagaacc

SEQ ID NO: 1180460 - RNA, 23 nt, Human
agcacaaaaaauaaauaaugaaa

SEQ ID NO: 1180461 - RNA, 21 nt, Human
agcccguggcugugcuccugg

SEQ ID NO: 1180462 - RNA, 26 nt, Human
agcccguggcugugcuccugggggug

SEQ ID NO: 1180463 - RNA, 21 nt, Human
agcucugggcggugacagcgg

SEQ ID NO: 1180464 - RNA, 23 nt, Human
aggaaaaggaagcccaaggugga

SEQ ID NO: 1180465 - RNA, 24 nt, Human
auccauguccaccaacauccccca

SEQ ID NO: 1180466 - RNA, 19 nt, Human
caaaagaccuccucguucc

SEQ ID NO: 1180467 - RNA, 22 nt, Human
caaaagaccuccucguuccccc

SEQ ID NO: 1180468 - RNA, 21 nt, Human
caacaucccccaggcugcacc

SEQ ID NO: 1180469 - RNA, 25 nt, Human
caagacgggacagaaccggccaccc

SEQ ID NO: 1180470 - RNA, 23 nt, Human
caagguggagugccaagcccacu

SEQ ID NO: 1180471 - RNA, 20 nt, Human
cacacacacagacaccaccc

SEQ ID NO: 1180472 - RNA, 21 nt, Human
cacacagccugaguccugcuc

SEQ ID NO: 1180473 - RNA, 23 nt, Human
cacacagccugaguccugcucac

SEQ ID NO: 1180474 - RNA, 24 nt, Human
cacacagccugaguccugcucacc

SEQ ID NO: 1180475 - RNA, 22 nt, Human
cacaccgugcccacucacgcag

SEQ ID NO: 1180476 - RNA, 22 nt, Human
caccaagaaccccaagacggga

SEQ ID NO: 1180477 - RNA, 23 nt, Human
caccaagaaccccaagacgggac

SEQ ID NO: 1180478 - RNA, 21 nt, Human
caccagagcacaggggagacc

SEQ ID NO: 1180479 - RNA, 22 nt, Human
cacccccucucccuagacugca

SEQ ID NO: 1180480 - RNA, 18 nt, Human
cacccgccgcgcccucug

SEQ ID NO: 1180481 - RNA, 20 nt, Human
caccugcucucgcacacggc

SEQ ID NO: 1180482 - RNA, 21 nt, Human
cacgcccuggaaacgcaaaga

SEQ ID NO: 1180483 - RNA, 23 nt, Human
cagaaaacaaacccacgugacaa

SEQ ID NO: 1180484 - RNA, 21 nt, Human
cagcacaaaaaauaaauaaug

SEQ ID NO: 1180485 - RNA, 26 nt, Human
cagcagcccuuccccucgccaggccc

SEQ ID NO: 1180486 - RNA, 18 nt, Human
cagcccguggcugugcuc

SEQ ID NO: 1180487 - RNA, 21 nt, Human
cagcugccugguacaguccgu

SEQ ID NO: 1180488 - RNA, 19 nt, Human
caggcaaaggcuccgggug

SEQ ID NO: 1180489 - RNA, 24 nt, Human
caggccaagggcagguagaagccc

SEQ ID NO: 1180490 - RNA, 20 nt, Human
cagggagucccuucuccagc

SEQ ID NO: 1180491 - RNA, 18 nt, Human
caguagacacagaaccaa

SEQ ID NO: 1180492 - RNA, 18 nt, Human
cagugaacaccagcaagc

SEQ ID NO: 1180493 - RNA, 19 nt, Human
cagugguccuggcgggccu

SEQ ID NO: 1180494 - RNA, 19 nt, Human
ccaaaagaccuccucguuc

SEQ ID NO: 1180495 - RNA, 18 nt, Human
ccaagaaccccaagacgg

SEQ ID NO: 1180496 - RNA, 22 nt, Human
ccaagacgggacagaaccggcc

SEQ ID NO: 1180497 - RNA, 23 nt, Human
ccaagacgggacagaaccggcca

SEQ ID NO: 1180498 - RNA, 21 nt, Human
ccacauccauguccaccaaca

SEQ ID NO: 1180499 - RNA, 18 nt, Human
ccaccugugcccgugccc

SEQ ID NO: 1180500 - RNA, 18 nt, Human
ccacgaagcucuccugga

SEQ ID NO: 1180501 - RNA, 18 nt, Human
ccacgcaacguccuccuc

SEQ ID NO: 1180502 - RNA, 22 nt, Human
cccaaaagaccuccucguuccc

SEQ ID NO: 1180503 - RNA, 24 nt, Human
cccaaaagaccuccucguuccccc

SEQ ID NO: 1180504 - RNA, 22 nt, Human
cccacaagacguggacaccaag

SEQ ID NO: 1180505 - RNA, 22 nt, Human
cccacccgccgcgcccucugga

SEQ ID NO: 1180506 - RNA, 20 nt, Human
ccccaagacgggacagaacc

SEQ ID NO: 1180507 - RNA, 23 nt, Human
ccccacccgccgcgcccucugga

SEQ ID NO: 1180508 - RNA, 18 nt, Human
cccccaggcugcaccccc

SEQ ID NO: 1180509 - RNA, 24 nt, Human
cccccgcggcucucgcugcagaga

SEQ ID NO: 1180510 - RNA, 20 nt, Human
ccccucgccaggcccccaaa

SEQ ID NO: 1180511 - RNA, 24 nt, Human
ccccucgccaggcccccaaaagac

SEQ ID NO: 1180512 - RNA, 19 nt, Human
cccgugcccccggcucugc

SEQ ID NO: 1180513 - RNA, 19 nt, Human
cccuagacugcagcagccc

SEQ ID NO: 1180514 - RNA, 23 nt, Human
cccucccagcguggcuggcaccc

SEQ ID NO: 1180515 - RNA, 22 nt, Human
ccgcgcccucuggagugccagg

SEQ ID NO: 1180516 - RNA, 23 nt, Human
ccggggcugucuguccucugccc

SEQ ID NO: 1180517 - RNA, 19 nt, Human
ccuaccacggccacggggg

SEQ ID NO: 1180518 - RNA, 27 nt, Human
ccuccucccaccacuccacgcaacguc

SEQ ID NO: 1180519 - RNA, 28 nt, Human
ccuccucccaccacuccacgcaacgucc

SEQ ID NO: 1180520 - RNA, 18 nt, Human
ccuccuccuuccaccucc

SEQ ID NO: 1180521 - RNA, 21 nt, Human
ccuccucguucccccugcacu

SEQ ID NO: 1180522 - RNA, 18 nt, Human
ccugcagcccguggcugu

SEQ ID NO: 1180523 - RNA, 18 nt, Human
ccugcagcuucccacuca

SEQ ID NO: 1180524 - RNA, 21 nt, Human
ccugcagcuucccacucaacu

SEQ ID NO: 1180525 - RNA, 19 nt, Human
ccugcugccuccccacccg

SEQ ID NO: 1180526 - RNA, 19 nt, Human
ccuuccaccuccacaucca

SEQ ID NO: 1180527 - RNA, 20 nt, Human
cgacacaccauccaugcucc

SEQ ID NO: 1180528 - RNA, 23 nt, Human
cgaccucccacaccgugcccacu

SEQ ID NO: 1180529 - RNA, 24 nt, Human
cgcaacguccuccuccuuccaccu

SEQ ID NO: 1180530 - RNA, 21 nt, Human
cgcaggccccugcuaaggcag

SEQ ID NO: 1180531 - RNA, 23 nt, Human
cgcaggcgaccucccacaccgug

SEQ ID NO: 1180532 - RNA, 25 nt, Human
cgcccuggaaacgcaaagaccugga

SEQ ID NO: 1180533 - RNA, 18 nt, Human
cgcuccugccuguguccg

SEQ ID NO: 1180534 - RNA, 19 nt, Human
cggcauagggggccggggu

SEQ ID NO: 1180535 - RNA, 21 nt, Human
cgggacagaaccggccacccg

SEQ ID NO: 1180536 - RNA, 23 nt, Human
cguccuccuccuuccaccuccac

SEQ ID NO: 1180537 - RNA, 19 nt, Human
cuccaggaaaaggaagccc

SEQ ID NO: 1180538 - RNA, 21 nt, Human
cuccaggaaaaggaagcccaa

SEQ ID NO: 1180539 - RNA, 20 nt, Human
cucccaccugugcccgugcc

SEQ ID NO: 1180540 - RNA, 23 nt, Human
cucccgccuccucccaccacucc

SEQ ID NO: 1180541 - RNA, 19 nt, Human
cucccuagacugcagcagc

SEQ ID NO: 1180542 - RNA, 23 nt, Human
cuccuccuuccaccuccacaucc

SEQ ID NO: 1180543 - RNA, 20 nt, Human
cuccucgggucaccagagca

SEQ ID NO: 1180544 - RNA, 23 nt, Human
cuccugggggugugcgcgcagga

SEQ ID NO: 1180545 - RNA, 22 nt, Human
cucguucccccugcacugacca

SEQ ID NO: 1180546 - RNA, 18 nt, Human
cucuuugggaagccggag

SEQ ID NO: 1180547 - RNA, 22 nt, Human
cugaaaccagaaaauucuuuau

SEQ ID NO: 1180548 - RNA, 20 nt, Human
cugcacccccucagcccugc

SEQ ID NO: 1180549 - RNA, 22 nt, Human
cuggcacccgccugggcucugu

SEQ ID NO: 1180550 - RNA, 22 nt, Human
gaaaauucuuuauugcaaaggu

SEQ ID NO: 1180551 - RNA, 20 nt, Human
gacagcuggaaggacggagc

SEQ ID NO: 1180552 - RNA, 18 nt, Human
gacuggugccugcugccu

SEQ ID NO: 1180553 - RNA, 21 nt, Human
gagcugccgacacaccaucca

SEQ ID NO: 1180554 - RNA, 21 nt, Human
gaggagcaggcaaaggcuccg

SEQ ID NO: 1180555 - RNA, 22 nt, Human
gcaagcugcacccccucagccc

SEQ ID NO: 1180556 - RNA, 23 nt, Human
gcacggagacagaaaacaaaccc

SEQ ID NO: 1180557 - RNA, 22 nt, Human
gcagaacacaccgugcuucccc

SEQ ID NO: 1180558 - RNA, 18 nt, Human
gcagggacggggcagggc

SEQ ID NO: 1180559 - RNA, 18 nt, Human
gcccacucacgcaggccc

SEQ ID NO: 1180560 - RNA, 19 nt, Human
gcccguggcugugcuccug

SEQ ID NO: 1180561 - RNA, 21 nt, Human
gccucagugcucuuggaagga

SEQ ID NO: 1180562 - RNA, 22 nt, Human
gccugaguccugcucaccguca

SEQ ID NO: 1180563 - RNA, 19 nt, Human
gccugcugccuccccaccc

SEQ ID NO: 1180564 - RNA, 22 nt, Human
gcucccaacucccaccugugcc

SEQ ID NO: 1180565 - RNA, 18 nt, Human
gcuuugcucccaacuccc

SEQ ID NO: 1180566 - RNA, 18 nt, Human
ggaaacgcaaagaccugg

SEQ ID NO: 1180567 - RNA, 20 nt, Human
ggcggcggcggccagacacg

SEQ ID NO: 1180568 - RNA, 22 nt, Human
ggcucucgcugcagagacccca

SEQ ID NO: 1180569 - RNA, 21 nt, Human
gggcagguagaagcccacggc

SEQ ID NO: 1180570 - RNA, 24 nt, Human
gggcucuguagcuggugggggcug

SEQ ID NO: 1180571 - RNA, 18 nt, Human
ggggcagggcggcggcgg

SEQ ID NO: 1180572 - RNA, 21 nt, Human
ggggcugucuguccucugccc

SEQ ID NO: 1180573 - RNA, 23 nt, Human
gggugugcgcgcaggagccacgu

SEQ ID NO: 1180574 - RNA, 23 nt, Human
gguagaagcccacggcccacaag

SEQ ID NO: 1180575 - RNA, 18 nt, Human
ggugguggccgcagggac

SEQ ID NO: 1180576 - RNA, 22 nt, Human
guccaccaacaucccccaggcu

SEQ ID NO: 1180577 - RNA, 20 nt, Human
gugccaagcccacuggugcc

SEQ ID NO: 1180578 - RNA, 24 nt, Human
uaaaaagcagcacaaaaaauaaau

SEQ ID NO: 1180579 - RNA, 19 nt, Human
uaacaguagacacagaacc

SEQ ID NO: 1180580 - RNA, 21 nt, Human
uaucaaacuggaaaagaaaga

SEQ ID NO: 1180581 - RNA, 21 nt, Human
uaucaugauaaaaagcagcac

SEQ ID NO: 1180582 - RNA, 21 nt, Human
uccaccaacaucccccaggcu

SEQ ID NO: 1180583 - RNA, 19 nt, Human
ucccccaggcaggggcucc

SEQ ID NO: 1180584 - RNA, 22 nt, Human
ucccccaggcugcacccccucu

SEQ ID NO: 1180585 - RNA, 21 nt, Human
ucccgugggcaggggcuucug

SEQ ID NO: 1180586 - RNA, 23 nt, Human
ucccucgucuuuuucuuaaauaa

SEQ ID NO: 1180587 - RNA, 23 nt, Human
uccgcugagauccgggacggccu

SEQ ID NO: 1180588 - RNA, 23 nt, Human
uccucccaccacuccacgcaacg

SEQ ID NO: 1180589 - RNA, 23 nt, Human
uccuggacuggugccugcugccu

SEQ ID NO: 1180590 - RNA, 21 nt, Human
ucgcacacggcucccgccucc

SEQ ID NO: 1180591 - RNA, 22 nt, Human
ucgcacacggcucccgccuccu

SEQ ID NO: 1180592 - RNA, 22 nt, Human
ucgccaggcccccaaaagaccu

SEQ ID NO: 1180593 - RNA, 21 nt, Human
ugaggccagccacaccugcag

SEQ ID NO: 1180594 - RNA, 21 nt, Human
ugauagauuuacaguaucaaa

SEQ ID NO: 1180595 - RNA, 18 nt, Human
ugcaacgggacagcugga

SEQ ID NO: 1180596 - RNA, 22 nt, Human
ugcacacacacagacaccaccc

SEQ ID NO: 1180597 - RNA, 19 nt, Human
ugcacccccucucccuaga

SEQ ID NO: 1180598 - RNA, 22 nt, Human
ugcacccccucucccuagacug

SEQ ID NO: 1180599 - RNA, 19 nt, Human
ugccaagcccacuggugcc

SEQ ID NO: 1180600 - RNA, 21 nt, Human
ugcccacaggcccucccccag

SEQ ID NO: 1180601 - RNA, 24 nt, Human
ugcccgugcccccggcucugcucu

SEQ ID NO: 1180602 - RNA, 20 nt, Human
ugccugguacaguccguggg

SEQ ID NO: 1180603 - RNA, 22 nt, Human
ugcgcugugcugcacgaccucc

SEQ ID NO: 1180604 - RNA, 24 nt, Human
uggagugccaagcccacuggugcc

SEQ ID NO: 1180605 - RNA, 22 nt, Human
uggccgcagggacggggcaggg

SEQ ID NO: 1180606 - RNA, 23 nt, Human
uggcggcauagggggccgggguc

SEQ ID NO: 1180607 - RNA, 24 nt, Human
uggcugugcuccugggggugugcg

SEQ ID NO: 1180608 - RNA, 24 nt, Human
ugugaauauaauuuuauaucucua

SEQ ID NO: 1180609 - RNA, 18 nt, Human
ugugcccacaggcccucc

SEQ ID NO: 1180610 - RNA, 24 nt, Human
ugugcccgugcccccggcucugcu

SEQ ID NO: 1180611 - RNA, 18 nt, Human
uuaggugguggccgcagg

SEQ ID NO: 1180612 - RNA, 19 nt, Human
uuccccggcccagcucugg

SEQ ID NO: 1180613 - RNA, 20 nt, Human
uucuccagcaaagcacugca

SEQ ID NO: 1180614 - RNA, 21 nt, Human
uugcucccaacucccaccugu

SEQ ID NO: 1180615 - RNA, 22 nt, Human
uuuaaauaucccccugguccuu

SEQ ID NO: 1180616 - RNA, 20 nt, Human
uuucuuaaauaaaaaaaucc

SEQ ID NO: 1180617 - RNA, 21 nt, Human
uuugcucccaacucccaccug

SEQ ID NO: 1180618 - RNA, 25 nt, Human
aaacaacagaaguuuauuucuccca

SEQ ID NO: 1180619 - RNA, 19 nt, Human
aaacaucauauucccagag

SEQ ID NO: 1180620 - RNA, 18 nt, Human
aaaccagaguucaagucu

SEQ ID NO: 1180621 - RNA, 21 nt, Human
aaaggaucugaugccagagac

SEQ ID NO: 1180622 - RNA, 20 nt, Human
aaauggagcugccaagaacc

SEQ ID NO: 1180623 - RNA, 18 nt, Human
aacaagucuuccggauca

SEQ ID NO: 1180624 - RNA, 22 nt, Human
aaccauaucacuuaccaaggcc

SEQ ID NO: 1180625 - RNA, 19 nt, Human
aaccccagggcccaggcau

SEQ ID NO: 1180626 - RNA, 20 nt, Human
aaccccagggcccaggcauc

SEQ ID NO: 1180627 - RNA, 25 nt, Human
aagaaaaagaaggaugccaugaaga

SEQ ID NO: 1180628 - RNA, 21 nt, Human
aagaccacaggaagaccacca

SEQ ID NO: 1180629 - RNA, 24 nt, Human
aagagaaagagauucaugcaagag

SEQ ID NO: 1180630 - RNA, 19 nt, Human
aauucaagaugagauuugg

SEQ ID NO: 1180631 - RNA, 21 nt, Human
accauggaauguauauggcac

SEQ ID NO: 1180632 - RNA, 24 nt, Human
accgaccucucuaacccuuccccu

SEQ ID NO: 1180633 - RNA, 20 nt, Human
accuugcaaaccucauaguc

SEQ ID NO: 1180634 - RNA, 22 nt, Human
acugggucccucccacaacagu

SEQ ID NO: 1180635 - RNA, 21 nt, Human
acuuagaaauguuuguggaau

SEQ ID NO: 1180636 - RNA, 21 nt, Human
agaaauuacugaagauggugu

SEQ ID NO: 1180637 - RNA, 24 nt, Human
agaacagcagcaugggguaaucac

SEQ ID NO: 1180638 - RNA, 24 nt, Human
agacauuuaagaucauugacaaug

SEQ ID NO: 1180639 - RNA, 18 nt, Human
agagccagugauggcaga

SEQ ID NO: 1180640 - RNA, 20 nt, Human
agaguuuuguacuugugcug

SEQ ID NO: 1180641 - RNA, 19 nt, Human
agcacgugcugcaggcagg

SEQ ID NO: 1180642 - RNA, 19 nt, Human
agccccuggcuucauccag

SEQ ID NO: 1180643 - RNA, 22 nt, Human
agccccuggcuucauccagccu

SEQ ID NO: 1180644 - RNA, 20 nt, Human
aggcaagagagaagugccga

SEQ ID NO: 1180645 - RNA, 21 nt, Human
agugauggcagaagggaggaa

SEQ ID NO: 1180646 - RNA, 23 nt, Human
aguggaggggaagggaagaccac

SEQ ID NO: 1180647 - RNA, 24 nt, Human
aucuccagcuucccggaauccugg

SEQ ID NO: 1180648 - RNA, 26 nt, Human
augcugcccuggaguagacuagcugg

SEQ ID NO: 1180649 - RNA, 21 nt, Human
auuuggguggggacacagcca

SEQ ID NO: 1180650 - RNA, 30 nt, Human
auuuugucuaaaauagcccuucccucucaa

SEQ ID NO: 1180651 - RNA, 19 nt, Human
caagaagcaaucuccaaac

SEQ ID NO: 1180652 - RNA, 22 nt, Human
caagaucaaagugucagcaugg

SEQ ID NO: 1180653 - RNA, 21 nt, Human
caagguaccaagggucagcca

SEQ ID NO: 1180654 - RNA, 20 nt, Human
caaugaucuucaguccuucu

SEQ ID NO: 1180655 - RNA, 22 nt, Human
caccagcuggaugcugcccugg

SEQ ID NO: 1180656 - RNA, 19 nt, Human
cacugcccucucaggucac

SEQ ID NO: 1180657 - RNA, 21 nt, Human
cagcaugggguaaucaccccc

SEQ ID NO: 1180658 - RNA, 21 nt, Human
cagcauuguagaggguguuac

SEQ ID NO: 1180659 - RNA, 27 nt, Human
cagccaagaagcaaucuccaaacuuau

SEQ ID NO: 1180660 - RNA, 20 nt, Human
cagcuggaugcugcccugga

SEQ ID NO: 1180661 - RNA, 21 nt, Human
caguauacucugcccaccaac

SEQ ID NO: 1180662 - RNA, 19 nt, Human
cauaguguugggucugggc

SEQ ID NO: 1180663 - RNA, 22 nt, Human
caucccauccagauaucauccc

SEQ ID NO: 1180664 - RNA, 18 nt, Human
caucucucucucucugcu

SEQ ID NO: 1180665 - RNA, 19 nt, Human
caugcaaacaacagaaguu

SEQ ID NO: 1180666 - RNA, 21 nt, Human
caugcaaacaacagaaguuua

SEQ ID NO: 1180667 - RNA, 22 nt, Human
cauggagacuggugcgccacug

SEQ ID NO: 1180668 - RNA, 18 nt, Human
caugucuuagagcuggaa

SEQ ID NO: 1180669 - RNA, 22 nt, Human
cauuaccucccaauggcuuuac

SEQ ID NO: 1180670 - RNA, 25 nt, Human
cauuaccucccaauggcuuuaccuc

SEQ ID NO: 1180671 - RNA, 21 nt, Human
cauugcacugaguauuuuugc

SEQ ID NO: 1180672 - RNA, 19 nt, Human
ccaagaucaaagugucagc

SEQ ID NO: 1180673 - RNA, 21 nt, Human
ccaauggaaaaagaaaaagaa

SEQ ID NO: 1180674 - RNA, 22 nt, Human
ccauagccccuggcuucaucca

SEQ ID NO: 1180675 - RNA, 20 nt, Human
ccauugcacugaguauuuuu

SEQ ID NO: 1180676 - RNA, 20 nt, Human
cccagagcuaugggaacgug

SEQ ID NO: 1180677 - RNA, 21 nt, Human
cccauccuucagacucaucca

SEQ ID NO: 1180678 - RNA, 21 nt, Human
ccccagggcccaggcauccca

SEQ ID NO: 1180679 - RNA, 24 nt, Human
ccccuggcuucauccagccucacc

SEQ ID NO: 1180680 - RNA, 20 nt, Human
ccccuguaggagcacuuacu

SEQ ID NO: 1180681 - RNA, 22 nt, Human
cccggaauccugggccccucua

SEQ ID NO: 1180682 - RNA, 23 nt, Human
ccuaauccuaacacauaguagau

SEQ ID NO: 1180683 - RNA, 22 nt, Human
ccucacaaucauggcagaagga

SEQ ID NO: 1180684 - RNA, 19 nt, Human
ccucucuaacccuuccccu

SEQ ID NO: 1180685 - RNA, 22 nt, Human
ccucugcucuggagauaaaggc

SEQ ID NO: 1180686 - RNA, 21 nt, Human
ccugcuauaucccuaacacca

SEQ ID NO: 1180687 - RNA, 23 nt, Human
ccuucagacucauccagguucau

SEQ ID NO: 1180688 - RNA, 19 nt, Human
cuaaaauagcccuucccuc

SEQ ID NO: 1180689 - RNA, 23 nt, Human
cuaccgaccucucuaacccuucc

SEQ ID NO: 1180690 - RNA, 23 nt, Human
cuauaugugcuaucucuuuuccu

SEQ ID NO: 1180691 - RNA, 19 nt, Human
cucagcauuguagagggug

SEQ ID NO: 1180692 - RNA, 18 nt, Human
cuccaaaaaauggagaag

SEQ ID NO: 1180693 - RNA, 20 nt, Human
cuccuucuucuuugaacucc

SEQ ID NO: 1180694 - RNA, 19 nt, Human
cucuggaacccugaaguuc

SEQ ID NO: 1180695 - RNA, 18 nt, Human
cugaugccagagacugac

SEQ ID NO: 1180696 - RNA, 19 nt, Human
cuggaacccugaaguuccc

SEQ ID NO: 1180697 - RNA, 23 nt, Human
cuuagagcuggaaucuccagcuu

SEQ ID NO: 1180698 - RNA, 25 nt, Human
cuucagacucauccagguucauucc

SEQ ID NO: 1180699 - RNA, 22 nt, Human
cuucccauugcuuucaaaggga

SEQ ID NO: 1180700 - RNA, 26 nt, Human
cuuccccuauuaacccuucuccaaaa

SEQ ID NO: 1180701 - RNA, 23 nt, Human
cuuugcagucacucucuccuuca

SEQ ID NO: 1180702 - RNA, 20 nt, Human
gaccucucuaacccuucccc

SEQ ID NO: 1180703 - RNA, 19 nt, Human
gacuggugcgccacugccc

SEQ ID NO: 1180704 - RNA, 22 nt, Human
gcaugagcuggcugcaguugca

SEQ ID NO: 1180705 - RNA, 19 nt, Human
gcccuagaaacuuuggucu

SEQ ID NO: 1180706 - RNA, 20 nt, Human
gcucaagucuucacucccaa

SEQ ID NO: 1180707 - RNA, 21 nt, Human
ggaauccugggccccucuacc

SEQ ID NO: 1180708 - RNA, 20 nt, Human
ggacgcagccaaauggagcu

SEQ ID NO: 1180709 - RNA, 21 nt, Human
ggagaucagcacgugcugcag

SEQ ID NO: 1180710 - RNA, 19 nt, Human
gggaagaccacaggaagac

SEQ ID NO: 1180711 - RNA, 22 nt, Human
gggaagaccacaggaagaccac

SEQ ID NO: 1180712 - RNA, 24 nt, Human
gugaaaacucgcucacugucauga

SEQ ID NO: 1180713 - RNA, 24 nt, Human
uaaacaucauauucccagagcuaa

SEQ ID NO: 1180714 - RNA, 21 nt, Human
uaaagacagcaagggagaggc

SEQ ID NO: 1180715 - RNA, 23 nt, Human
uaaagagaggacaagagccagug

SEQ ID NO: 1180716 - RNA, 19 nt, Human
uaaguugaaggcacagcau

SEQ ID NO: 1180717 - RNA, 18 nt, Human
uacaauagcaugucuuag

SEQ ID NO: 1180718 - RNA, 19 nt, Human
uaccaaggccuuacaugau

SEQ ID NO: 1180719 - RNA, 26 nt, Human
uacccaguauacucugcccaccaaca

SEQ ID NO: 1180720 - RNA, 20 nt, Human
uagaacaagguaccaagggu

SEQ ID NO: 1180721 - RNA, 21 nt, Human
uagaacaagguaccaaggguc

SEQ ID NO: 1180722 - RNA, 22 nt, Human
uagagcuggaaucuccagcuuc

SEQ ID NO: 1180723 - RNA, 20 nt, Human
uagccccuggcuucauccag

SEQ ID NO: 1180724 - RNA, 23 nt, Human
uauaaaaccaucagaucucguga

SEQ ID NO: 1180725 - RNA, 24 nt, Human
uaucacuuaccaaggccuuacaug

SEQ ID NO: 1180726 - RNA, 18 nt, Human
uauuccugagaacuccac

SEQ ID NO: 1180727 - RNA, 20 nt, Human
ucaagggcuugguggagagu

SEQ ID NO: 1180728 - RNA, 23 nt, Human
ucaaucagauuagaccaauggaa

SEQ ID NO: 1180729 - RNA, 20 nt, Human
ucacaguucuacaugggugg

SEQ ID NO: 1180730 - RNA, 24 nt, Human
ucacccccaugauucaauuaucuc

SEQ ID NO: 1180731 - RNA, 23 nt, Human
ucacuaagguuucagacccucug

SEQ ID NO: 1180732 - RNA, 21 nt, Human
ucagaucucuguuuaaacauc

SEQ ID NO: 1180733 - RNA, 20 nt, Human
ucaugagaacagcagcaugg

SEQ ID NO: 1180734 - RNA, 18 nt, Human
uccaaaaaauggagaagc

SEQ ID NO: 1180735 - RNA, 21 nt, Human
uccaaccuggccacuacuucu

SEQ ID NO: 1180736 - RNA, 19 nt, Human
uccacccucauuaccuccc

SEQ ID NO: 1180737 - RNA, 21 nt, Human
uccauuucugcuccuucuucu

SEQ ID NO: 1180738 - RNA, 19 nt, Human
uccccaguugcagauaucu

SEQ ID NO: 1180739 - RNA, 25 nt, Human
uccccuauuaacccuucuccaaaaa

SEQ ID NO: 1180740 - RNA, 18 nt, Human
ucccggaauccugggccc

SEQ ID NO: 1180741 - RNA, 20 nt, Human
uccuaacacauaguagauua

SEQ ID NO: 1180742 - RNA, 21 nt, Human
uccuauuccugagaacuccac

SEQ ID NO: 1180743 - RNA, 23 nt, Human
uccugggccccucuaccgaccuc

SEQ ID NO: 1180744 - RNA, 19 nt, Human
uccuugagcauuuugucua

SEQ ID NO: 1180745 - RNA, 22 nt, Human
ucucaggucaccagcuggaugc

SEQ ID NO: 1180746 - RNA, 18 nt, Human
ucucucaucucucucucu

SEQ ID NO: 1180747 - RNA, 19 nt, Human
ucucugcucacucucuccu

SEQ ID NO: 1180748 - RNA, 19 nt, Human
ucucuguuuaaacaucaua

SEQ ID NO: 1180749 - RNA, 21 nt, Human
ucuggaacccugaaguuccca

SEQ ID NO: 1180750 - RNA, 21 nt, Human
ucugucucgacgucuuucucc

SEQ ID NO: 1180751 - RNA, 24 nt, Human
ucugucuugaggcuacaauagcau

SEQ ID NO: 1180752 - RNA, 21 nt, Human
ucuuauucaccucuuugcuca

SEQ ID NO: 1180753 - RNA, 19 nt, Human
ugaaggagcaguuagacuu

SEQ ID NO: 1180754 - RNA, 18 nt, Human
ugaaggcaugagcuggcu

SEQ ID NO: 1180755 - RNA, 18 nt, Human
ugacagugaacuucaccu

SEQ ID NO: 1180756 - RNA, 19 nt, Human
ugacucaaugagugaacaa

SEQ ID NO: 1180757 - RNA, 22 nt, Human
ugagauuuggguggggacacag

SEQ ID NO: 1180758 - RNA, 23 nt, Human
ugagcuggugaaggagcaguuag

SEQ ID NO: 1180759 - RNA, 18 nt, Human
ugaguauuuuugcuucuu

SEQ ID NO: 1180760 - RNA, 18 nt, Human
ugccaagaaccagagaaa

SEQ ID NO: 1180761 - RNA, 23 nt, Human
ugcuaagaaagacauaucugaga

SEQ ID NO: 1180762 - RNA, 19 nt, Human
uggaaaaagaaaaagaagg

SEQ ID NO: 1180763 - RNA, 23 nt, Human
uggaaaggaucugaugccagaga

SEQ ID NO: 1180764 - RNA, 19 nt, Human
uggaauguauauggcacuu

SEQ ID NO: 1180765 - RNA, 24 nt, Human
uggagaagcuaaguugaaggcaca

SEQ ID NO: 1180766 - RNA, 24 nt, Human
uggaggggaagggaagaccacagg

SEQ ID NO: 1180767 - RNA, 19 nt, Human
uggcaugcuggcuucuucu

SEQ ID NO: 1180768 - RNA, 18 nt, Human
uggcuucccauugcuuuc

SEQ ID NO: 1180769 - RNA, 24 nt, Human
ugggucccucccacaacaguggga

SEQ ID NO: 1180770 - RNA, 20 nt, Human
ugggucugggcuggguugca

SEQ ID NO: 1180771 - RNA, 22 nt, Human
ugggugagcuggugaaggagca

SEQ ID NO: 1180772 - RNA, 19 nt, Human
uuagaaauguuuguggaau

SEQ ID NO: 1180773 - RNA, 22 nt, Human
uucaaagggaagggcaaauguc

SEQ ID NO: 1180774 - RNA, 24 nt, Human
uucaagaugagauuugggugggga

SEQ ID NO: 1180775 - RNA, 22 nt, Human
uucccagagcuaugggaacgug

SEQ ID NO: 1180776 - RNA, 20 nt, Human
uucccauugcuuucaaaggg

SEQ ID NO: 1180777 - RNA, 20 nt, Human
aaaaccugagauugugaaga

SEQ ID NO: 1180778 - RNA, 24 nt, Human
aaaggagaaauguugaacagagag

SEQ ID NO: 1180779 - RNA, 24 nt, Human
aaagugcugggauuacagguguga

SEQ ID NO: 1180780 - RNA, 27 nt, Human
aaccucuuuaagacucugucuuuguca

SEQ ID NO: 1180781 - RNA, 21 nt, Human
aagaaugauccagccccaaau

SEQ ID NO: 1180782 - RNA, 23 nt, Human
aagcagucuucccgucucagacu

SEQ ID NO: 1180783 - RNA, 25 nt, Human
aagugauccucccaccucagccucc

SEQ ID NO: 1180784 - RNA, 18 nt, Human
aagugcugggauuacagg

SEQ ID NO: 1180785 - RNA, 19 nt, Human
aagugcugggauuacaggu

SEQ ID NO: 1180786 - RNA, 22 nt, Human
aauagugcugaaagugagagac

SEQ ID NO: 1180787 - RNA, 18 nt, Human
accacaccuggcuaauuu

SEQ ID NO: 1180788 - RNA, 24 nt, Human
acccugauuccaucuuagagauca

SEQ ID NO: 1180789 - RNA, 23 nt, Human
accucagccucccgaguagcuga

SEQ ID NO: 1180790 - RNA, 19 nt, Human
acggagcaguaaguacaga

SEQ ID NO: 1180791 - RNA, 24 nt, Human
acucuauccagccucaacuguuuu

SEQ ID NO: 1180792 - RNA, 18 nt, Human
acugcagccucuaccucc

SEQ ID NO: 1180793 - RNA, 22 nt, Human
agcaucuguugcucuaggcaac

SEQ ID NO: 1180794 - RNA, 18 nt, Human
aggcaaggucuugcuacg

SEQ ID NO: 1180795 - RNA, 23 nt, Human
aggcaaggucuugcuacguugcc

SEQ ID NO: 1180796 - RNA, 22 nt, Human
aguacagaguucuggagaggga

SEQ ID NO: 1180797 - RNA, 23 nt, Human
aguagcugagaccacaggcaugu

SEQ ID NO: 1180798 - RNA, 20 nt, Human
agugcaguggugcgaucccg

SEQ ID NO: 1180799 - RNA, 23 nt, Human
agugcaguggugcgaucccggcu

SEQ ID NO: 1180800 - RNA, 24 nt, Human
agugcaguggugcgaucccggcuc

SEQ ID NO: 1180801 - RNA, 20 nt, Human
agugcugggauuacaggugu

SEQ ID NO: 1180802 - RNA, 24 nt, Human
aucacuuugcaauaaaaccugagg

SEQ ID NO: 1180803 - RNA, 24 nt, Human
caaagugcugggauuacaggugug

SEQ ID NO: 1180804 - RNA, 24 nt, Human
caaggucuugcuacguugcccagg

SEQ ID NO: 1180805 - RNA, 20 nt, Human
caagugauccucccaccuca

SEQ ID NO: 1180806 - RNA, 27 nt, Human
caagugauccucccaccucagccuccc

SEQ ID NO: 1180807 - RNA, 19 nt, Human
caaucucugguuucuuugc

SEQ ID NO: 1180808 - RNA, 20 nt, Human
cacauauuuaugaaaaugcc

SEQ ID NO: 1180809 - RNA, 26 nt, Human
caccuguagcugucaccucugugcca

SEQ ID NO: 1180810 - RNA, 23 nt, Human
cacugcagccucuaccuccuggg

SEQ ID NO: 1180811 - RNA, 21 nt, Human
cacuuugcaauaaaaccugag

SEQ ID NO: 1180812 - RNA, 20 nt, Human
cagccucuaccuccuggguu

SEQ ID NO: 1180813 - RNA, 23 nt, Human
cagccucuaccuccuggguucaa

SEQ ID NO: 1180814 - RNA, 19 nt, Human
cagggcuuuucagccaggg

SEQ ID NO: 1180815 - RNA, 18 nt, Human
cagugcaccuguguuugg

SEQ ID NO: 1180816 - RNA, 19 nt, Human
cagugcaccuguguuuggg

SEQ ID NO: 1180817 - RNA, 20 nt, Human
cauccaagcacacuuggcca

SEQ ID NO: 1180818 - RNA, 21 nt, Human
caugaagaaaaggcagacuca

SEQ ID NO: 1180819 - RNA, 24 nt, Human
cauuuucaauugauucauuggggg

SEQ ID NO: 1180820 - RNA, 21 nt, Human
ccaaagugcugggauuacagg

SEQ ID NO: 1180821 - RNA, 21 nt, Human
ccaaagugcugggauuacagg

SEQ ID NO: 1180822 - RNA, 24 nt, Human
ccaaagugcugggauuacaggugu

SEQ ID NO: 1180823 - RNA, 23 nt, Human
ccaccucagccucccgaguagcu

SEQ ID NO: 1180824 - RNA, 23 nt, Human
cccaccucagccucccgaguagc

SEQ ID NO: 1180825 - RNA, 19 nt, Human
cccaggcuggagugcagug

SEQ ID NO: 1180826 - RNA, 21 nt, Human
cccccagagaacacguggcca

SEQ ID NO: 1180827 - RNA, 22 nt, Human
cccccagagaacacguggccau

SEQ ID NO: 1180828 - RNA, 20 nt, Human
ccccccagagaacacguggc

SEQ ID NO: 1180829 - RNA, 18 nt, Human
cccuggagagcaggaugg

SEQ ID NO: 1180830 - RNA, 21 nt, Human
ccuacaaugccccggacaacu

SEQ ID NO: 1180831 - RNA, 24 nt, Human
ccuccuggguucaagugauccucc

SEQ ID NO: 1180832 - RNA, 22 nt, Human
ccucuaccuccuggguucaagu

SEQ ID NO: 1180833 - RNA, 21 nt, Human
ccucugugcuauaguacugcu

SEQ ID NO: 1180834 - RNA, 22 nt, Human
ccuggguucaagugauccuccc

SEQ ID NO: 1180835 - RNA, 19 nt, Human
cggcuggaggagguggugc

SEQ ID NO: 1180836 - RNA, 23 nt, Human
cuaagcauccuacaaugccccuc

SEQ ID NO: 1180837 - RNA, 24 nt, Human
cucacugcagccucuaccuccugg

SEQ ID NO: 1180838 - RNA, 19 nt, Human
cucagcaucuuuuaacuca

SEQ ID NO: 1180839 - RNA, 20 nt, Human
cucugugcuauaguacugcu

SEQ ID NO: 1180840 - RNA, 18 nt, Human
cugcccggaacauggcgg

SEQ ID NO: 1180841 - RNA, 25 nt, Human
cuucagggcuuuucagccagggggu

SEQ ID NO: 1180842 - RNA, 21 nt, Human
gaagaaaaggcagacucauua

SEQ ID NO: 1180843 - RNA, 24 nt, Human
gagaggaccucauuuuuauaacuc

SEQ ID NO: 1180844 - RNA, 19 nt, Human
gaguaaucccaaagugcug

SEQ ID NO: 1180845 - RNA, 27 nt, Human
gaguagcugagaccacaggcauguauu

SEQ ID NO: 1180846 - RNA, 18 nt, Human
gauuacaggugugaguca

SEQ ID NO: 1180847 - RNA, 20 nt, Human
gauuacaggugugagucacu

SEQ ID NO: 1180848 - RNA, 23 nt, Human
gauuacaggugugagucacucua

SEQ ID NO: 1180849 - RNA, 20 nt, Human
gauuuugccccccagagaac

SEQ ID NO: 1180850 - RNA, 18 nt, Human
gcaacaucgaugggaguu

SEQ ID NO: 1180851 - RNA, 19 nt, Human
gcccaggcuggagugcagu

SEQ ID NO: 1180852 - RNA, 20 nt, Human
gcccaggcuggagugcagug

SEQ ID NO: 1180853 - RNA, 23 nt, Human
gcccaggcuggagugcaguggug

SEQ ID NO: 1180854 - RNA, 21 nt, Human
gcuaauuuuuucccuuuuucu

SEQ ID NO: 1180855 - RNA, 24 nt, Human
gcuacguugcccaggcuggucuug

SEQ ID NO: 1180856 - RNA, 21 nt, Human
gcucacugcagccucuaccuc

SEQ ID NO: 1180857 - RNA, 23 nt, Human
gcuggaggagguggugcuacugg

SEQ ID NO: 1180858 - RNA, 20 nt, Human
ggaaauguguagucuuugag

SEQ ID NO: 1180859 - RNA, 22 nt, Human
ggaggaacuuuauuucuggcca

SEQ ID NO: 1180860 - RNA, 21 nt, Human
ggcaaggucuugcuacguugc

SEQ ID NO: 1180861 - RNA, 20 nt, Human
ggcuggucuugaacuccuga

SEQ ID NO: 1180862 - RNA, 19 nt, Human
gucucaaucucugguuucu

SEQ ID NO: 1180863 - RNA, 24 nt, Human
gugauccucccaccucagccuccc

SEQ ID NO: 1180864 - RNA, 22 nt, Human
uaagacaaaagaaugauccagc

SEQ ID NO: 1180865 - RNA, 18 nt, Human
uaaucccaaagugcuggg

SEQ ID NO: 1180866 - RNA, 21 nt, Human
uacagaguucuggagagggaa

SEQ ID NO: 1180867 - RNA, 22 nt, Human
uaccauuugugcaaguugugca

SEQ ID NO: 1180868 - RNA, 24 nt, Human
uaccuccuggguucaagugauccu

SEQ ID NO: 1180869 - RNA, 23 nt, Human
uacguugcccaggcuggucuuga

SEQ ID NO: 1180870 - RNA, 24 nt, Human
uacguugcccaggcuggucuugaa

SEQ ID NO: 1180871 - RNA, 21 nt, Human
uagagaucauccaagcacacu

SEQ ID NO: 1180872 - RNA, 22 nt, Human
uagaggcaaggucuugcuacgu

SEQ ID NO: 1180873 - RNA, 18 nt, Human
uagcccaggcuggagugc

SEQ ID NO: 1180874 - RNA, 23 nt, Human
uaguacugcuuuuuuuuuuccuu

SEQ ID NO: 1180875 - RNA, 18 nt, Human
uaugucuuuacuucaggg

SEQ ID NO: 1180876 - RNA, 23 nt, Human
ucaagaaaggagaaauguugaaa

SEQ ID NO: 1180877 - RNA, 24 nt, Human
ucacugcagccucuaccuccuggg

SEQ ID NO: 1180878 - RNA, 25 nt, Human
ucacugcagccucuaccuccugggu

SEQ ID NO: 1180879 - RNA, 18 nt, Human
ucagcagcguugucccug

SEQ ID NO: 1180880 - RNA, 26 nt, Human
ucagugcaccuguguuuggggcuuug

SEQ ID NO: 1180881 - RNA, 23 nt, Human
ucccaaagugcugggauuacagg

SEQ ID NO: 1180882 - RNA, 24 nt, Human
ucccaugaagaaaaggcagacuca

SEQ ID NO: 1180883 - RNA, 24 nt, Human
ucccgaguagcugagaccacaggc

SEQ ID NO: 1180884 - RNA, 19 nt, Human
ucccuggagagcaggaugg

SEQ ID NO: 1180885 - RNA, 26 nt, Human
uccucccaccucagccucccgaguag

SEQ ID NO: 1180886 - RNA, 20 nt, Human
uccugaguucaagcagucuu

SEQ ID NO: 1180887 - RNA, 21 nt, Human
uccuggguucaagugauccuc

SEQ ID NO: 1180888 - RNA, 24 nt, Human
uccuggguucaagugauccuccca

SEQ ID NO: 1180889 - RNA, 23 nt, Human
ucucugguuucuuugcucagugc

SEQ ID NO: 1180890 - RNA, 19 nt, Human
ucuguagcccaggcuggag

SEQ ID NO: 1180891 - RNA, 20 nt, Human
ucuguagcccaggcuggagu

SEQ ID NO: 1180892 - RNA, 24 nt, Human
ucuguagcccaggcuggagugcag

SEQ ID NO: 1180893 - RNA, 24 nt, Human
ucuugaacuccugaguucaagcag

SEQ ID NO: 1180894 - RNA, 23 nt, Human
ucuugcuacguugcccaggcugg

SEQ ID NO: 1180895 - RNA, 24 nt, Human
ucuugcuacguugcccaggcuggu

SEQ ID NO: 1180896 - RNA, 19 nt, Human
ugaacagagaggaccucau

SEQ ID NO: 1180897 - RNA, 24 nt, Human
ugaacuccugaguucaagcagucu

SEQ ID NO: 1180898 - RNA, 20 nt, Human
ugaagaaaaggcagacucau

SEQ ID NO: 1180899 - RNA, 23 nt, Human
ugacgggauuucuuuaguuucug

SEQ ID NO: 1180900 - RNA, 24 nt, Human
ugagaccacaggcauguauuacca

SEQ ID NO: 1180901 - RNA, 23 nt, Human
ugagggaaugucauuuugucuca

SEQ ID NO: 1180902 - RNA, 21 nt, Human
ugaguucaagcagucuucccg

SEQ ID NO: 1180903 - RNA, 19 nt, Human
ugccaccccgggaguugca

SEQ ID NO: 1180904 - RNA, 24 nt, Human
ugcccaggcuggucuugaacuccu

SEQ ID NO: 1180905 - RNA, 27 nt, Human
ugcccaggcuggucuugaacuccugag

SEQ ID NO: 1180906 - RNA, 18 nt, Human
ugccccggacaacuccca

SEQ ID NO: 1180907 - RNA, 22 nt, Human
ugcccggaacauggcgguaaga

SEQ ID NO: 1180908 - RNA, 24 nt, Human
ugcuacguugcccaggcuggucuu

SEQ ID NO: 1180909 - RNA, 27 nt, Human
ugcuacguugcccaggcuggucuugaa

SEQ ID NO: 1180910 - RNA, 24 nt, Human
ugcugggauuacaggugugaguca

SEQ ID NO: 1180911 - RNA, 18 nt, Human
uggagacaauuuuggugg

SEQ ID NO: 1180912 - RNA, 24 nt, Human
uggagugcaguggugcgaucccgg

SEQ ID NO: 1180913 - RNA, 22 nt, Human
uggcaacaucgaugggaguuuu

SEQ ID NO: 1180914 - RNA, 23 nt, Human
uggcuaauuuuuucccuuuuucu

SEQ ID NO: 1180915 - RNA, 18 nt, Human
ugggauuacaggugugag

SEQ ID NO: 1180916 - RNA, 18 nt, Human
ugggauuacaggugugag

SEQ ID NO: 1180917 - RNA, 21 nt, Human
ugggauuacaggugugaguca

SEQ ID NO: 1180918 - RNA, 22 nt, Human
ugggauuacaggugugagucac

SEQ ID NO: 1180919 - RNA, 22 nt, Human
ugggauuacaggugugagucac

SEQ ID NO: 1180920 - RNA, 23 nt, Human
ugggauuacaggugugagucacu

SEQ ID NO: 1180921 - RNA, 25 nt, Human
ugggauuacaggugugagucacucu

SEQ ID NO: 1180922 - RNA, 23 nt, Human
uggguucaagugauccucccacc

SEQ ID NO: 1180923 - RNA, 24 nt, Human
uggguucaagugauccucccaccu

SEQ ID NO: 1180924 - RNA, 24 nt, Human
uggugcgaucccggcucacugcag

SEQ ID NO: 1180925 - RNA, 19 nt, Human
ugguugcggcuggaggagg

SEQ ID NO: 1180926 - RNA, 18 nt, Human
ugucccuggagagcagga

SEQ ID NO: 1180927 - RNA, 23 nt, Human
uucaagugauccucccaccucag

SEQ ID NO: 1180928 - RNA, 24 nt, Human
uucaagugauccucccaccucagc

SEQ ID NO: 1180929 - RNA, 18 nt, Human
uucauugucauuaccagu

SEQ ID NO: 1180930 - RNA, 21 nt, Human
uuggaaauguguagucuuuga

SEQ ID NO: 1180931 - RNA, 23 nt, Human
uuggugguugcggcuggaggagg

SEQ ID NO: 1180932 - RNA, 19 nt, Human
uugucccuggagagcagga

SEQ ID NO: 1180933 - RNA, 21 nt, Human
uuuccuuucucuuucuccacc

SEQ ID NO: 1180934 - RNA, 24 nt, Human
uuuucagccagggggugauuuugc

SEQ ID NO: 1180935 - RNA, 23 nt, Human
uuuuucagcagcguugucccugg

SEQ ID NO: 1180936 - RNA, 20 nt, Human
aaggagccccugccaccugc

SEQ ID NO: 1180937 - RNA, 24 nt, Human
acagaagcgccacagccggggagc

SEQ ID NO: 1180938 - RNA, 26 nt, Human
agagucccugcaucugcucccugccu

SEQ ID NO: 1180939 - RNA, 20 nt, Human
agcuccagcgucuguuuucu

SEQ ID NO: 1180940 - RNA, 18 nt, Human
agcuguguguggcggcug

SEQ ID NO: 1180941 - RNA, 18 nt, Human
aggaggaggaaaccugaa

SEQ ID NO: 1180942 - RNA, 19 nt, Human
aggcagagucccugcaucu

SEQ ID NO: 1180943 - RNA, 22 nt, Human
aggcagagucccugcaucugcu

SEQ ID NO: 1180944 - RNA, 22 nt, Human
aggguucccuaacuuuucccuu

SEQ ID NO: 1180945 - RNA, 21 nt, Human
agucaucuagagagcaaauac

SEQ ID NO: 1180946 - RNA, 22 nt, Human
auccacagaagcgccacagccg

SEQ ID NO: 1180947 - RNA, 18 nt, Human
auccaucuucagaguuuc

SEQ ID NO: 1180948 - RNA, 25 nt, Human
augaggcagagucccugcaucugcu

SEQ ID NO: 1180949 - RNA, 23 nt, Human
augauccaucuucagaguuucuc

SEQ ID NO: 1180950 - RNA, 23 nt, Human
caacacaccuguuuacaaaggca

SEQ ID NO: 1180951 - RNA, 18 nt, Human
cacugcaggucagaaucg

SEQ ID NO: 1180952 - RNA, 22 nt, Human
cagacuucucugacacaugagg

SEQ ID NO: 1180953 - RNA, 20 nt, Human
cagagcccaguuuucgaggc

SEQ ID NO: 1180954 - RNA, 23 nt, Human
cagcccgaggccagcuggcugca

SEQ ID NO: 1180955 - RNA, 27 nt, Human
cagggugcacacaucccugcaggucuc

SEQ ID NO: 1180956 - RNA, 20 nt, Human
caucauggcuggccgcuggg

SEQ ID NO: 1180957 - RNA, 19 nt, Human
cauguuugcagcccgaggc

SEQ ID NO: 1180958 - RNA, 19 nt, Human
ccacaguccccuccaaguc

SEQ ID NO: 1180959 - RNA, 26 nt, Human
ccaccgucaauuggaccgcacccgcc

SEQ ID NO: 1180960 - RNA, 21 nt, Human
cccacauccacagaagcgcca

SEQ ID NO: 1180961 - RNA, 20 nt, Human
ccccagcucaccucccugga

SEQ ID NO: 1180962 - RNA, 24 nt, Human
cccgccauguuugcagcccgaggc

SEQ ID NO: 1180963 - RNA, 21 nt, Human
ccggaagagcacucugagagg

SEQ ID NO: 1180964 - RNA, 18 nt, Human
ccugaaucggagccuggg

SEQ ID NO: 1180965 - RNA, 18 nt, Human
ccuggucugaagcugaga

SEQ ID NO: 1180966 - RNA, 23 nt, Human
cgccauguuugcagcccgaggcc

SEQ ID NO: 1180967 - RNA, 22 nt, Human
cgggagcuggaggccaaggagc

SEQ ID NO: 1180968 - RNA, 21 nt, Human
cuccagggcccccagcucacc

SEQ ID NO: 1180969 - RNA, 22 nt, Human
cuccagggcccccagcucaccu

SEQ ID NO: 1180970 - RNA, 26 nt, Human
cuccagggcccccagcucaccucccu

SEQ ID NO: 1180971 - RNA, 18 nt, Human
cuccucagucccacaguc

SEQ ID NO: 1180972 - RNA, 20 nt, Human
cucucugcucugcgcuccuc

SEQ ID NO: 1180973 - RNA, 19 nt, Human
cucugagcgaggaagacuc

SEQ ID NO: 1180974 - RNA, 22 nt, Human
cucuuggcuccuggucugaagc

SEQ ID NO: 1180975 - RNA, 23 nt, Human
cugaggaggaggaaaccugaagg

SEQ ID NO: 1180976 - RNA, 18 nt, Human
cugcucccugccuggccu

SEQ ID NO: 1180977 - RNA, 20 nt, Human
cuggucugaagcugagauug

SEQ ID NO: 1180978 - RNA, 21 nt, Human
gaaucucuggcacggaagcuu

SEQ ID NO: 1180979 - RNA, 18 nt, Human
gaccauauuuacucuacc

SEQ ID NO: 1180980 - RNA, 21 nt, Human
gacgccgggcaccugggcggg

SEQ ID NO: 1180981 - RNA, 22 nt, Human
gagcaaauacacaguaauuccc

SEQ ID NO: 1180982 - RNA, 20 nt, Human
gagcacucugagaggcuggg

SEQ ID NO: 1180983 - RNA, 21 nt, Human
gaggcugaggaaagaccccga

SEQ ID NO: 1180984 - RNA, 22 nt, Human
gcagugggcaggcaaggucugc

SEQ ID NO: 1180985 - RNA, 19 nt, Human
gcggcuggugggccgggcu

SEQ ID NO: 1180986 - RNA, 18 nt, Human
gcucaccucccuggaugg

SEQ ID NO: 1180987 - RNA, 22 nt, Human
ggccaccuuuuaauuggaccau

SEQ ID NO: 1180988 - RNA, 20 nt, Human
gggcacagcggaagggcugc

SEQ ID NO: 1180989 - RNA, 19 nt, Human
gggcaggucucuuggcucc

SEQ ID NO: 1180990 - RNA, 23 nt, Human
gguuuugugaccgccuuuuucag

SEQ ID NO: 1180991 - RNA, 18 nt, Human
gucauggccaugauccau

SEQ ID NO: 1180992 - RNA, 24 nt, Human
gucccugcaucugcucccugccug

SEQ ID NO: 1180993 - RNA, 25 nt, Human
guucggugggacacgaacacagggg

SEQ ID NO: 1180994 - RNA, 21 nt, Human
uccagcgucuguuuucuaguc

SEQ ID NO: 1180995 - RNA, 19 nt, Human
ucccacaguccccuccaag

SEQ ID NO: 1180996 - RNA, 21 nt, Human
uccccuccaagucacgggagc

SEQ ID NO: 1180997 - RNA, 23 nt, Human
ucccucaccagaauucaaugagg

SEQ ID NO: 1180998 - RNA, 24 nt, Human
ucccugcaggucucggggcuccug

SEQ ID NO: 1180999 - RNA, 19 nt, Human
uccggaagagcacucugag

SEQ ID NO: 1181000 - RNA, 22 nt, Human
uccuggggguuuugugaccgcc

SEQ ID NO: 1181001 - RNA, 19 nt, Human
ucuccagggcccccagcuc

SEQ ID NO: 1181002 - RNA, 19 nt, Human
ucugaagcugagauuggag

SEQ ID NO: 1181003 - RNA, 19 nt, Human
ucugcucccugccuggccu

SEQ ID NO: 1181004 - RNA, 21 nt, Human
ucuucagaguuucucuuucuu

SEQ ID NO: 1181005 - RNA, 20 nt, Human
ugaccacacccucauguguu

SEQ ID NO: 1181006 - RNA, 23 nt, Human
ugaccacacccucauguguuuuc

SEQ ID NO: 1181007 - RNA, 19 nt, Human
ugagaggcugggccccauc

SEQ ID NO: 1181008 - RNA, 21 nt, Human
ugaggaaagaccccgagagcg

SEQ ID NO: 1181009 - RNA, 19 nt, Human
ugaggaggaggaaaccuga

SEQ ID NO: 1181010 - RNA, 22 nt, Human
ugcaccucucaggguucccuaa

SEQ ID NO: 1181011 - RNA, 18 nt, Human
ugcaggucucggggcucc

SEQ ID NO: 1181012 - RNA, 18 nt, Human
ugccuggccugggcuccc

SEQ ID NO: 1181013 - RNA, 22 nt, Human
ugcggaggcugccggucgacgc

SEQ ID NO: 1181014 - RNA, 22 nt, Human
ugcucugcgcuccucaguccca

SEQ ID NO: 1181015 - RNA, 18 nt, Human
uggaagggacccagucuc

SEQ ID NO: 1181016 - RNA, 23 nt, Human
uggauggcgcuuucggggaucug

SEQ ID NO: 1181017 - RNA, 19 nt, Human
uggcggagguuggagauuc

SEQ ID NO: 1181018 - RNA, 21 nt, Human
uggcugcaggugcaggacuag

SEQ ID NO: 1181019 - RNA, 23 nt, Human
ugggcagugggcaggcaaggucu

SEQ ID NO: 1181020 - RNA, 21 nt, Human
uucaacacaccuguuuacaaa

SEQ ID NO: 1181021 - RNA, 18 nt, Human
uucggagucaccgcacag

SEQ ID NO: 1181022 - RNA, 23 nt, Human
uucucaggagagugaaaugaggg

SEQ ID NO: 1181023 - RNA, 24 nt, Human
uucucugacacaugagggcucuga

SEQ ID NO: 1181024 - RNA, 19 nt, Human
uugugaccgccuuuuucag

SEQ ID NO: 1181025 - RNA, 23 nt, Human
uuuacaaaggcauuccagagccc

SEQ ID NO: 1181026 - RNA, 18 nt, Human
uuucucuuucuuccccac

SEQ ID NO: 1181027 - RNA, 20 nt, Human
uuuuccuggcgcguuuccgg

SEQ ID NO: 1181028 - RNA, 23 nt, Human
uuuuucagggguugacuguuggg

SEQ ID NO: 1181029 - RNA, 21 nt, Human
aaauaacaauuugacaaaagg

SEQ ID NO: 1181030 - RNA, 20 nt, Human
aaggggcagcgacggugcag

SEQ ID NO: 1181031 - RNA, 18 nt, Human
aaggguuaggcagggaag

SEQ ID NO: 1181032 - RNA, 23 nt, Human
acuuagugcagagaggagacgag

SEQ ID NO: 1181033 - RNA, 23 nt, Human
agacaggaaaggguuaggcaggg

SEQ ID NO: 1181034 - RNA, 20 nt, Human
aggcagggaaggggcagcga

SEQ ID NO: 1181035 - RNA, 25 nt, Human
aggcagggaaggggcagcgacggug

SEQ ID NO: 1181036 - RNA, 18 nt, Human
agguacuggcagcaaagc

SEQ ID NO: 1181037 - RNA, 22 nt, Human
cagcgacggugcaggcuggggc

SEQ ID NO: 1181038 - RNA, 19 nt, Human
caugacucaaccaaaaaaa

SEQ ID NO: 1181039 - RNA, 23 nt, Human
caugacucaaccaaaaaaaauuu

SEQ ID NO: 1181040 - RNA, 22 nt, Human
ccagccgggccuggcucuucuu

SEQ ID NO: 1181041 - RNA, 24 nt, Human
ccagguaucccagucaucuguacc

SEQ ID NO: 1181042 - RNA, 21 nt, Human
gaaaacagggaggaccgguac

SEQ ID NO: 1181043 - RNA, 19 nt, Human
gacuuagugcagagaggag

SEQ ID NO: 1181044 - RNA, 21 nt, Human
gaguguggacgggcaacagca

SEQ ID NO: 1181045 - RNA, 19 nt, Human
gcagggaaggggcagcgac

SEQ ID NO: 1181046 - RNA, 19 nt, Human
gugccgcccggcuucugcu

SEQ ID NO: 1181047 - RNA, 26 nt, Human
uagugcagagaggagacgagugugga

SEQ ID NO: 1181048 - RNA, 26 nt, Human
uauauauauuuauauauuuuacaucc

SEQ ID NO: 1181049 - RNA, 19 nt, Human
uccaccgccuucuccgcaa

SEQ ID NO: 1181050 - RNA, 21 nt, Human
uccagguaucccagucaucug

SEQ ID NO: 1181051 - RNA, 21 nt, Human
uccgcagacgccagguacugg

SEQ ID NO: 1181052 - RNA, 22 nt, Human
ucuucuucugcugcagguuugg

SEQ ID NO: 1181053 - RNA, 21 nt, Human
ugcauggaacuggaaaugugu

SEQ ID NO: 1181054 - RNA, 22 nt, Human
ugcgguacugggaagcagacac

SEQ ID NO: 1181055 - RNA, 22 nt, Human
uggggcuuggcucacagaagcu

SEQ ID NO: 1181056 - RNA, 19 nt, Human
uucccagggagacaugggu

SEQ ID NO: 1181057 - RNA, 21 nt, Human
uucuucugcugcagguuuggg

SEQ ID NO: 1181058 - RNA, 19 nt, Human
uucuuuuuuuuuuuucuuu

SEQ ID NO: 1181059 - RNA, 20 nt, Human
uugacaaaagggugaagaaa

SEQ ID NO: 1181060 - RNA, 18 nt, Human
uuuuacauccagguaucc

SEQ ID NO: 1181061 - RNA, 27 nt, Human
uuuucuucuuuuuuuuuuuucuuuaaa

SEQ ID NO: 1181062 - RNA, 18 nt, Human
aagcgugacuccugggaa

SEQ ID NO: 1181063 - RNA, 24 nt, Human
aagugauccacccgccucagccuc

SEQ ID NO: 1181064 - RNA, 19 nt, Human
acaggcaguaucggccaac

SEQ ID NO: 1181065 - RNA, 19 nt, Human
accaaaaucacaauccagu

SEQ ID NO: 1181066 - RNA, 23 nt, Human
accaaaaucacaauccaguuuua

SEQ ID NO: 1181067 - RNA, 25 nt, Human
acccgccucagccucccagagagcu

SEQ ID NO: 1181068 - RNA, 19 nt, Human
acugcagagaaagaccaug

SEQ ID NO: 1181069 - RNA, 20 nt, Human
agaaauguugguuucacagu

SEQ ID NO: 1181070 - RNA, 21 nt, Human
agagcaaaacuuaaaauuuug

SEQ ID NO: 1181071 - RNA, 24 nt, Human
agagcugguauuacagaugugagc

SEQ ID NO: 1181072 - RNA, 19 nt, Human
agauuacaggugugugcca

SEQ ID NO: 1181073 - RNA, 24 nt, Human
agauuacaggugugugccaucaug

SEQ ID NO: 1181074 - RNA, 20 nt, Human
aguaaauguauacaguugug

SEQ ID NO: 1181075 - RNA, 21 nt, Human
aguaacugagauuacaggugu

SEQ ID NO: 1181076 - RNA, 23 nt, Human
aguaacugagauuacaggugugu

SEQ ID NO: 1181077 - RNA, 21 nt, Human
aguggguagaagcaggcucag

SEQ ID NO: 1181078 - RNA, 18 nt, Human
aguuaguuuuuauuuauu

SEQ ID NO: 1181079 - RNA, 22 nt, Human
aguucuuuacauggucugggua

SEQ ID NO: 1181080 - RNA, 21 nt, Human
auuuuguuuaucuacuuuuca

SEQ ID NO: 1181081 - RNA, 24 nt, Human
caagguuucaccaaguuggccagg

SEQ ID NO: 1181082 - RNA, 21 nt, Human
caccaaguuggccaggcuggu

SEQ ID NO: 1181083 - RNA, 23 nt, Human
caccaaguuggccaggcuggucu

SEQ ID NO: 1181084 - RNA, 20 nt, Human
cacccgccucagccucccag

SEQ ID NO: 1181085 - RNA, 18 nt, Human
cacuuauguuucugaggc

SEQ ID NO: 1181086 - RNA, 27 nt, Human
cacuuuuguucuagguuucacugaaga

SEQ ID NO: 1181087 - RNA, 20 nt, Human
cagccuccugaguaacugag

SEQ ID NO: 1181088 - RNA, 25 nt, Human
caggugugugccaucaugccuggcu

SEQ ID NO: 1181089 - RNA, 26 nt, Human
ccacccgccucagccucccagagagc

SEQ ID NO: 1181090 - RNA, 24 nt, Human
ccagagagcugguauuacagaugu

SEQ ID NO: 1181091 - RNA, 20 nt, Human
cccuggggcugccauguagc

SEQ ID NO: 1181092 - RNA, 22 nt, Human
ccugaguaacugagauuacagg

SEQ ID NO: 1181093 - RNA, 24 nt, Human
ccugaguaacugagauuacaggug

SEQ ID NO: 1181094 - RNA, 24 nt, Human
cgccucagccucccagagagcugg

SEQ ID NO: 1181095 - RNA, 19 nt, Human
cgugccucuacaguuuugc

SEQ ID NO: 1181096 - RNA, 18 nt, Human
cuaaauggaaucuuacaa

SEQ ID NO: 1181097 - RNA, 20 nt, Human
cuccacagggaguucuaggg

SEQ ID NO: 1181098 - RNA, 23 nt, Human
cucucucucucuuuuuuuuaaaa

SEQ ID NO: 1181099 - RNA, 20 nt, Human
cucucucuuuuuuuuaaaaa

SEQ ID NO: 1181100 - RNA, 21 nt, Human
cugaguaacugagauuacagg

SEQ ID NO: 1181101 - RNA, 24 nt, Human
cugaguaacugagauuacaggugu

SEQ ID NO: 1181102 - RNA, 23 nt, Human
cugcuucagccuccugaguaacu

SEQ ID NO: 1181103 - RNA, 21 nt, Human
cuguaucauuuugcacucaug

SEQ ID NO: 1181104 - RNA, 20 nt, Human
cugucugauggguccucugg

SEQ ID NO: 1181105 - RNA, 19 nt, Human
cugugcccacguauuggcu

SEQ ID NO: 1181106 - RNA, 20 nt, Human
cuuagaccacauugcagguc

SEQ ID NO: 1181107 - RNA, 18 nt, Human
gaccaugaaucuguuucg

SEQ ID NO: 1181108 - RNA, 18 nt, Human
gaccauggccuuaacuug

SEQ ID NO: 1181109 - RNA, 24 nt, Human
gacuucaagugauccacccgccuc

SEQ ID NO: 1181110 - RNA, 20 nt, Human
gagaucugagagcuauugcc

SEQ ID NO: 1181111 - RNA, 19 nt, Human
gaguaacugagauuacagg

SEQ ID NO: 1181112 - RNA, 26 nt, Human
gaguaacugagauuacaggugugugc

SEQ ID NO: 1181113 - RNA, 21 nt, Human
gaugacuaagcgugacuccug

SEQ ID NO: 1181114 - RNA, 18 nt, Human
gauuacaggugugugcca

SEQ ID NO: 1181115 - RNA, 24 nt, Human
gauuacaggugugugccaucaugc

SEQ ID NO: 1181116 - RNA, 19 nt, Human
gcucucuguucccacuccc

SEQ ID NO: 1181117 - RNA, 18 nt, Human
gcugauacagacauggag

SEQ ID NO: 1181118 - RNA, 22 nt, Human
gcugcagcagaccaugaaucug

SEQ ID NO: 1181119 - RNA, 21 nt, Human
ggccaacuccacagggaguuc

SEQ ID NO: 1181120 - RNA, 20 nt, Human
guauacaguuguguaaccaa

SEQ ID NO: 1181121 - RNA, 24 nt, Human
gugauccacccgccucagccuccc

SEQ ID NO: 1181122 - RNA, 22 nt, Human
guugcuuuuuagaaguuugcug

SEQ ID NO: 1181123 - RNA, 21 nt, Human
uaaauccuccaacuuugcucu

SEQ ID NO: 1181124 - RNA, 21 nt, Human
uaaaugaacuaccagaugcag

SEQ ID NO: 1181125 - RNA, 24 nt, Human
uaauuuuuuguauuucuaguagag

SEQ ID NO: 1181126 - RNA, 25 nt, Human
uaauuuuuuguauuucuaguagaga

SEQ ID NO: 1181127 - RNA, 22 nt, Human
uacagaugugagccacggcacc

SEQ ID NO: 1181128 - RNA, 18 nt, Human
uagaagcaggcucaggua

SEQ ID NO: 1181129 - RNA, 20 nt, Human
uagaccacauugcaggucac

SEQ ID NO: 1181130 - RNA, 26 nt, Human
uaguagagacaagguuucaccaaguu

SEQ ID NO: 1181131 - RNA, 18 nt, Human
uauacaagaccuugugca

SEQ ID NO: 1181132 - RNA, 23 nt, Human
uauacugacuugccucgucaccu

SEQ ID NO: 1181133 - RNA, 25 nt, Human
uaucuaagaaagcuuugccuaaccu

SEQ ID NO: 1181134 - RNA, 21 nt, Human
uaugccaaugugauacuuuug

SEQ ID NO: 1181135 - RNA, 20 nt, Human
uauggaaaaccuucuggcca

SEQ ID NO: 1181136 - RNA, 18 nt, Human
uauuacagaugugagcca

SEQ ID NO: 1181137 - RNA, 19 nt, Human
ucagguucuauaaauccuc

SEQ ID NO: 1181138 - RNA, 20 nt, Human
ucaguguuagcuaccugcac

SEQ ID NO: 1181139 - RNA, 21 nt, Human
uccacccgccucagccuccca

SEQ ID NO: 1181140 - RNA, 22 nt, Human
uccacccgccucagccucccag

SEQ ID NO: 1181141 - RNA, 23 nt, Human
uccaucaucccaaaauguuugcu

SEQ ID NO: 1181142 - RNA, 18 nt, Human
ucccacucccauccccag

SEQ ID NO: 1181143 - RNA, 24 nt, Human
uccugaguaacugagauuacaggu

SEQ ID NO: 1181144 - RNA, 22 nt, Human
ucuauaaauccuccaacuuugc

SEQ ID NO: 1181145 - RNA, 22 nt, Human
ucugauggguccucuggguagc

SEQ ID NO: 1181146 - RNA, 20 nt, Human
ucuuggucagauguuggaau

SEQ ID NO: 1181147 - RNA, 19 nt, Human
ugacagcuuagaccacauu

SEQ ID NO: 1181148 - RNA, 19 nt, Human
ugagagugaaauugcuggg

SEQ ID NO: 1181149 - RNA, 19 nt, Human
ugagauuacaggugugugc

SEQ ID NO: 1181150 - RNA, 21 nt, Human
ugagauuacaggugugugcca

SEQ ID NO: 1181151 - RNA, 21 nt, Human
ugagauuacaggugugugcca

SEQ ID NO: 1181152 - RNA, 22 nt, Human
ugagauuacaggugugugccau

SEQ ID NO: 1181153 - RNA, 24 nt, Human
ugagauuacaggugugugccauca

SEQ ID NO: 1181154 - RNA, 19 nt, Human
ugauuugcaaguauuuuuu

SEQ ID NO: 1181155 - RNA, 21 nt, Human
ugcauauuacuuucugucuga

SEQ ID NO: 1181156 - RNA, 25 nt, Human
ugcaugaauugucuucagcuuuuuc

SEQ ID NO: 1181157 - RNA, 22 nt, Human
ugcccuggggcugccauguagc

SEQ ID NO: 1181158 - RNA, 20 nt, Human
ugcccugugccuuucugugg

SEQ ID NO: 1181159 - RNA, 20 nt, Human
ugccucgucaccuuuguuca

SEQ ID NO: 1181160 - RNA, 24 nt, Human
ugcuucagccuccugaguaacuga

SEQ ID NO: 1181161 - RNA, 21 nt, Human
uggagccucauguugggcuga

SEQ ID NO: 1181162 - RNA, 21 nt, Human
uggccaggcuggucuuaaacu

SEQ ID NO: 1181163 - RNA, 21 nt, Human
uggcuggggacugcagagaaa

SEQ ID NO: 1181164 - RNA, 18 nt, Human
uggcuguaucauuuugca

SEQ ID NO: 1181165 - RNA, 22 nt, Human
uggggacugcagagaaagacca

SEQ ID NO: 1181166 - RNA, 21 nt, Human
ugguauuacagaugugagcca

SEQ ID NO: 1181167 - RNA, 22 nt, Human
ugguauuacagaugugagccac

SEQ ID NO: 1181168 - RNA, 23 nt, Human
ugguauuacagaugugagccacg

SEQ ID NO: 1181169 - RNA, 27 nt, Human
ugguauuacagaugugagccacggcac

SEQ ID NO: 1181170 - RNA, 24 nt, Human
uggucaguguuagcuaccugcacu

SEQ ID NO: 1181171 - RNA, 22 nt, Human
uguagaaaugguaucuaaaugg

SEQ ID NO: 1181172 - RNA, 22 nt, Human
uguaggagaguucuaguuucuc

SEQ ID NO: 1181173 - RNA, 19 nt, Human
uguauacaagaccuugugc

SEQ ID NO: 1181174 - RNA, 19 nt, Human
ugugugccaucaugccugg

SEQ ID NO: 1181175 - RNA, 19 nt, Human
uguugcacguguuuaguag

SEQ ID NO: 1181176 - RNA, 21 nt, Human
uuaaaaguguucuguucauug

SEQ ID NO: 1181177 - RNA, 23 nt, Human
uuaguuuuuauuuauuccacuuu

SEQ ID NO: 1181178 - RNA, 23 nt, Human
uucaagugauccacccgccucag

SEQ ID NO: 1181179 - RNA, 21 nt, Human
uucauagucuguggcuugucu

SEQ ID NO: 1181180 - RNA, 18 nt, Human
uucccacucccaucccca

SEQ ID NO: 1181181 - RNA, 21 nt, Human
uuucaccaaguuggccaggcu

SEQ ID NO: 1181182 - RNA, 21 nt, Human
uuuccaucaucccaaaauguu

SEQ ID NO: 1181183 - RNA, 24 nt, Human
uuucuaguagagacaagguuucac

SEQ ID NO: 1181184 - RNA, 24 nt, Human
uuuugugucugaccucuuucacuu

SEQ ID NO: 1181185 - RNA, 21 nt, Human
uuuuuguauuucuaguagaga

SEQ ID NO: 1181186 - RNA, 18 nt, Human
uuuuuuguauuucuagua

SEQ ID NO: 1181187 - RNA, 22 nt, Human
uuuuuuguauuucuaguagaga

SEQ ID NO: 1181188 - RNA, 24 nt, Human
uuuuuuguauuucuaguagagaca

SEQ ID NO: 1181189 - RNA, 23 nt, Human
aagcaccucucaugucagguucc

SEQ ID NO: 1181190 - RNA, 22 nt, Human
aagcaggucucagcuaaagcuc

SEQ ID NO: 1181191 - RNA, 18 nt, Human
agcaaggggagcucacca

SEQ ID NO: 1181192 - RNA, 24 nt, Human
caacucccaaguauucuguuuauu

SEQ ID NO: 1181193 - RNA, 19 nt, Human
caggucucagcuaaagcuc

SEQ ID NO: 1181194 - RNA, 18 nt, Human
caugaggagagaauauga

SEQ ID NO: 1181195 - RNA, 24 nt, Human
cccccaaugcuguugaagcuucau

SEQ ID NO: 1181196 - RNA, 24 nt, Human
ccuacuacagacaaagauguaagc

SEQ ID NO: 1181197 - RNA, 21 nt, Human
cgaaucuccaaaacaaaagca

SEQ ID NO: 1181198 - RNA, 27 nt, Human
cuagaaaacaucuugaaugacacucca

SEQ ID NO: 1181199 - RNA, 23 nt, Human
cuccaccgaucguaagcauuacc

SEQ ID NO: 1181200 - RNA, 18 nt, Human
cucucaugucagguucca

SEQ ID NO: 1181201 - RNA, 19 nt, Human
cugcucacugcuguuauga

SEQ ID NO: 1181202 - RNA, 21 nt, Human
cuugaaugacacuccagguaa

SEQ ID NO: 1181203 - RNA, 18 nt, Human
gaaaugauaaagcuauaa

SEQ ID NO: 1181204 - RNA, 20 nt, Human
gaccugcucccucaaagcca

SEQ ID NO: 1181205 - RNA, 19 nt, Human
gaguaaucucucaguaagc

SEQ ID NO: 1181206 - RNA, 19 nt, Human
gauuuguaacacauuccuu

SEQ ID NO: 1181207 - RNA, 22 nt, Human
uaacuauacaaauucaagcaaa

SEQ ID NO: 1181208 - RNA, 20 nt, Human
uaagcauuaccaaagaccug

SEQ ID NO: 1181209 - RNA, 18 nt, Human
uaccaaagaccugcuccc

SEQ ID NO: 1181210 - RNA, 21 nt, Human
uaccaaagaccugcucccuca

SEQ ID NO: 1181211 - RNA, 21 nt, Human
uagaacugggauuuguaacac

SEQ ID NO: 1181212 - RNA, 18 nt, Human
uauucuguuuauucucuc

SEQ ID NO: 1181213 - RNA, 23 nt, Human
uccaaaacaaaagcaccucucau

SEQ ID NO: 1181214 - RNA, 22 nt, Human
uccacccgagccuccguccccc

SEQ ID NO: 1181215 - RNA, 18 nt, Human
ucccuacuacagacaaag

SEQ ID NO: 1181216 - RNA, 20 nt, Human
ucccuacuacagacaaagau

SEQ ID NO: 1181217 - RNA, 19 nt, Human
uccuagaaaacaucuugaa

SEQ ID NO: 1181218 - RNA, 23 nt, Human
ucgaaucuccaaaacaaaagcac

SEQ ID NO: 1181219 - RNA, 24 nt, Human
ucucaugucagguuccacccgagc

SEQ ID NO: 1181220 - RNA, 21 nt, Human
ucuccaaaacaaaagcaccuc

SEQ ID NO: 1181221 - RNA, 23 nt, Human
ugaaauggugaggucuguaaaag

SEQ ID NO: 1181222 - RNA, 24 nt, Human
ugaaauggugaggucuguaaaagc

SEQ ID NO: 1181223 - RNA, 21 nt, Human
uggugaggucuguaaaagcag

SEQ ID NO: 1181224 - RNA, 23 nt, Human
uguggaucagggcucugcauaga

SEQ ID NO: 1181225 - RNA, 24 nt, Human
uguuuagaaaacaugaggagagaa

SEQ ID NO: 1181226 - RNA, 20 nt, Human
uucugaaauggugaggucug

SEQ ID NO: 1181227 - RNA, 21 nt, Human
uugaaugacacuccagguaac

SEQ ID NO: 1181228 - RNA, 21 nt, Human
uuguaacacauuccuugcucc

SEQ ID NO: 1181229 - RNA, 18 nt, Human
uuuaucccucuuuaccuu

SEQ ID NO: 1181230 - RNA, 18 nt, Human
aaauccccgaccccgccc

SEQ ID NO: 1181231 - RNA, 24 nt, Human
aaggcccgccaggcagacaggcuu

SEQ ID NO: 1181232 - RNA, 22 nt, Human
aaucacuccgccaccucccccu

SEQ ID NO: 1181233 - RNA, 20 nt, Human
accgauucaaauccccgacc

SEQ ID NO: 1181234 - RNA, 22 nt, Human
accgauucaaauccccgacccc

SEQ ID NO: 1181235 - RNA, 20 nt, Human
agaaacuuauuuauuucuac

SEQ ID NO: 1181236 - RNA, 18 nt, Human
agcccgaggucccgacgg

SEQ ID NO: 1181237 - RNA, 20 nt, Human
agcugcagucaacccgagga

SEQ ID NO: 1181238 - RNA, 21 nt, Human
aggaacuuuugaaacacugag

SEQ ID NO: 1181239 - RNA, 20 nt, Human
aggacuacagacaccugcca

SEQ ID NO: 1181240 - RNA, 25 nt, Human
caaauccccgaccccgccccucggu

SEQ ID NO: 1181241 - RNA, 19 nt, Human
caccucccccuucuccagu

SEQ ID NO: 1181242 - RNA, 20 nt, Human
cacuccgccaccucccccuu

SEQ ID NO: 1181243 - RNA, 18 nt, Human
cagaccccggcuccucug

SEQ ID NO: 1181244 - RNA, 19 nt, Human
cauuucagcauagaugguu

SEQ ID NO: 1181245 - RNA, 19 nt, Human
ccccgccccucgguaccga

SEQ ID NO: 1181246 - RNA, 28 nt, Human
ccccggcuccucuguccggaagggcucc

SEQ ID NO: 1181247 - RNA, 19 nt, Human
cccggcagccuccuccacc

SEQ ID NO: 1181248 - RNA, 20 nt, Human
ccgccaccucccccuucucc

SEQ ID NO: 1181249 - RNA, 26 nt, Human
ccggcagccuccuccacccgccuccu

SEQ ID NO: 1181250 - RNA, 25 nt, Human
ccuccacccgccuccuccgcccgcc

SEQ ID NO: 1181251 - RNA, 18 nt, Human
cgcugauccuggccugcg

SEQ ID NO: 1181252 - RNA, 21 nt, Human
cggcagccuccuccacccgcc

SEQ ID NO: 1181253 - RNA, 21 nt, Human
cuccgccaccucccccuucuc

SEQ ID NO: 1181254 - RNA, 24 nt, Human
cuccgccaccucccccuucuccag

SEQ ID NO: 1181255 - RNA, 23 nt, Human
cucuacgaaucacuccgccaccu

SEQ ID NO: 1181256 - RNA, 20 nt, Human
cucugcccggcagccuccuc

SEQ ID NO: 1181257 - RNA, 21 nt, Human
cucuugcuacagacucugcag

SEQ ID NO: 1181258 - RNA, 20 nt, Human
cuggaguggcuuccugggcu

SEQ ID NO: 1181259 - RNA, 21 nt, Human
cuggccugcgcucugcccggc

SEQ ID NO: 1181260 - RNA, 21 nt, Human
gagguugaacagagaauggga

SEQ ID NO: 1181261 - RNA, 18 nt, Human
gcgucgcgucggccgcuc

SEQ ID NO: 1181262 - RNA, 23 nt, Human
gcucugcccggcagccuccucca

SEQ ID NO: 1181263 - RNA, 24 nt, Human
gcucugcccggcagccuccuccac

SEQ ID NO: 1181264 - RNA, 24 nt, Human
gcugauccuggccugcgcucugcc

SEQ ID NO: 1181265 - RNA, 21 nt, Human
guagguucaacucaaaugagu

SEQ ID NO: 1181266 - RNA, 23 nt, Human
uaaaaguagguucaacucaaaug

SEQ ID NO: 1181267 - RNA, 23 nt, Human
uacagacucugcaggaaauguca

SEQ ID NO: 1181268 - RNA, 19 nt, Human
ucaaauccccgaccccgcc

SEQ ID NO: 1181269 - RNA, 19 nt, Human
uccacccgccuccuccgcc

SEQ ID NO: 1181270 - RNA, 18 nt, Human
uccccgaccccgccccuc

SEQ ID NO: 1181271 - RNA, 18 nt, Human
uccgcgcacacuccgagc

SEQ ID NO: 1181272 - RNA, 19 nt, Human
uccgcgcacacuccgagcg

SEQ ID NO: 1181273 - RNA, 25 nt, Human
uccucuguccggaagggcucuccug

SEQ ID NO: 1181274 - RNA, 18 nt, Human
ucuugcuacagacucugc

SEQ ID NO: 1181275 - RNA, 19 nt, Human
ugccuugugaccucgggga

SEQ ID NO: 1181276 - RNA, 22 nt, Human
aaaagcaccauucccaaucaca

SEQ ID NO: 1181277 - RNA, 22 nt, Human
aaagcaccauucccaaucacaa

SEQ ID NO: 1181278 - RNA, 23 nt, Human
aacccuugccuuuaagaggcaaa

SEQ ID NO: 1181279 - RNA, 25 nt, Human
aagacaauccuaaauuauaaccuag

SEQ ID NO: 1181280 - RNA, 23 nt, Human
aaugaacacaaaacacaggugaa

SEQ ID NO: 1181281 - RNA, 22 nt, Human
aauucucuuuuuagucgcuggc

SEQ ID NO: 1181282 - RNA, 24 nt, Human
accacacuaaaaugccuuucaaua

SEQ ID NO: 1181283 - RNA, 22 nt, Human
agccagucuuaguuuuaaauca

SEQ ID NO: 1181284 - RNA, 24 nt, Human
aggcaaaugaacacaaaacacagg

SEQ ID NO: 1181285 - RNA, 18 nt, Human
auucccaaucacaaauac

SEQ ID NO: 1181286 - RNA, 21 nt, Human
caugagacauuucuguuuugu

SEQ ID NO: 1181287 - RNA, 20 nt, Human
cauuuaaccacaagccaguc

SEQ ID NO: 1181288 - RNA, 18 nt, Human
gucaugagacauuucugu

SEQ ID NO: 1181289 - RNA, 25 nt, Human
uaacuugcuacuauuuuaaaagcau

SEQ ID NO: 1181290 - RNA, 20 nt, Human
uaagaggcaaaugaacacaa

SEQ ID NO: 1181291 - RNA, 21 nt, Human
uagaagggguaaacagugaua

SEQ ID NO: 1181292 - RNA, 26 nt, Human
ucacacauaauuuuaaaauuugugua

SEQ ID NO: 1181293 - RNA, 19 nt, Human
ucuuuagaagggguaaaca

SEQ ID NO: 1181294 - RNA, 19 nt, Human
uggcaaaagcaccauuccc

SEQ ID NO: 1181295 - RNA, 19 nt, Human
uggcuguuuaaagacaauc

SEQ ID NO: 1181296 - RNA, 23 nt, Human
uuacuaacgaagucuaaucauau

SEQ ID NO: 1181297 - RNA, 19 nt, Human
uucaugaucugaauucugg

SEQ ID NO: 1181298 - RNA, 21 nt, Human
aaaaugcucgcacaagggaca

SEQ ID NO: 1181299 - RNA, 21 nt, Human
aaacagccccagagccccugg

SEQ ID NO: 1181300 - RNA, 20 nt, Human
aacaacuuucucauuuaugu

SEQ ID NO: 1181301 - RNA, 21 nt, Human
aagacagcacucgagucagaa

SEQ ID NO: 1181302 - RNA, 20 nt, Human
aaggagggaggggaggcagc

SEQ ID NO: 1181303 - RNA, 22 nt, Human
aaggaggugcgagccggggaac

SEQ ID NO: 1181304 - RNA, 24 nt, Human
acacaggcacaaacacuaaaaacc

SEQ ID NO: 1181305 - RNA, 21 nt, Human
acagaccgaacagccuugaca

SEQ ID NO: 1181306 - RNA, 20 nt, Human
acaggcacaaacacuaaaaa

SEQ ID NO: 1181307 - RNA, 30 nt, Human
acaucucagcgccccaaauggggaccaauu

SEQ ID NO: 1181308 - RNA, 18 nt, Human
accagcgcaacggcccac

SEQ ID NO: 1181309 - RNA, 24 nt, Human
acuggaguagagaggcugagagca

SEQ ID NO: 1181310 - RNA, 21 nt, Human
agaacacagaagccagcaagc

SEQ ID NO: 1181311 - RNA, 19 nt, Human
agaagggagagggggucag

SEQ ID NO: 1181312 - RNA, 23 nt, Human
agaagggagagggggucaguggc

SEQ ID NO: 1181313 - RNA, 19 nt, Human
agacagcagcguuaggccc

SEQ ID NO: 1181314 - RNA, 19 nt, Human
agagcccugcccugagcgg

SEQ ID NO: 1181315 - RNA, 19 nt, Human
agaggaaacagaggcccag

SEQ ID NO: 1181316 - RNA, 20 nt, Human
agagggccuggagaagggcu

SEQ ID NO: 1181317 - RNA, 21 nt, Human
agaggugcgggcgcgggcagg

SEQ ID NO: 1181318 - RNA, 20 nt, Human
agcaagcaguaggcaaggga

SEQ ID NO: 1181319 - RNA, 23 nt, Human
agcacggggcugcccuccucaca

SEQ ID NO: 1181320 - RNA, 19 nt, Human
agcacuuccuagaccacac

SEQ ID NO: 1181321 - RNA, 23 nt, Human
agcaggaaggagggaggggaggc

SEQ ID NO: 1181322 - RNA, 21 nt, Human
agccaacaggccuaagucgcu

SEQ ID NO: 1181323 - RNA, 24 nt, Human
agccagugcugcugggguuggggu

SEQ ID NO: 1181324 - RNA, 24 nt, Human
aggaaagaaacgaucacaucucag

SEQ ID NO: 1181325 - RNA, 18 nt, Human
aggagggaggggaggcag

SEQ ID NO: 1181326 - RNA, 26 nt, Human
aggagggaggggaggcagcagaaggg

SEQ ID NO: 1181327 - RNA, 22 nt, Human
aggagggguuccagcccaaaca

SEQ ID NO: 1181328 - RNA, 20 nt, Human
aggcacaaacacuaaaaacc

SEQ ID NO: 1181329 - RNA, 21 nt, Human
aggcacaaacacuaaaaaccc

SEQ ID NO: 1181330 - RNA, 24 nt, Human
aggcagcgaccagccaggguccug

SEQ ID NO: 1181331 - RNA, 18 nt, Human
aggcaggaggggcgcagg

SEQ ID NO: 1181332 - RNA, 20 nt, Human
aggcaggaggggcgcagggg

SEQ ID NO: 1181333 - RNA, 25 nt, Human
aggcauccagccucaccaggaaaca

SEQ ID NO: 1181334 - RNA, 21 nt, Human
aggcguucaggaaccccgggg

SEQ ID NO: 1181335 - RNA, 21 nt, Human
agggagagggggucaguggcu

SEQ ID NO: 1181336 - RNA, 22 nt, Human
agggaggggaggcagcagaagg

SEQ ID NO: 1181337 - RNA, 20 nt, Human
aggggcugccggagacaggc

SEQ ID NO: 1181338 - RNA, 19 nt, Human
aggggcugccggagacggg

SEQ ID NO: 1181339 - RNA, 19 nt, Human
aggggcugccggagacggg

SEQ ID NO: 1181340 - RNA, 20 nt, Human
aggggcugccggagacgggc

SEQ ID NO: 1181341 - RNA, 20 nt, Human
aggggcugccggagacgggc

SEQ ID NO: 1181342 - RNA, 21 nt, Human
aggggugcgggugcgggcagg

SEQ ID NO: 1181343 - RNA, 21 nt, Human
aggggugcgggugcgggcagg

SEQ ID NO: 1181344 - RNA, 18 nt, Human
aggggugcgggugggggc

SEQ ID NO: 1181345 - RNA, 21 nt, Human
aggggugcgggugugggcagg

SEQ ID NO: 1181346 - RNA, 21 nt, Human
agucggcccacagccagcccc

SEQ ID NO: 1181347 - RNA, 20 nt, Human
agugcagagagcucaaugaa

SEQ ID NO: 1181348 - RNA, 23 nt, Human
aucacaucucagcgccccaaaug

SEQ ID NO: 1181349 - RNA, 20 nt, Human
aucggccccucccugcuucc

SEQ ID NO: 1181350 - RNA, 23 nt, Human
caacacgagaggccaagaccaca

SEQ ID NO: 1181351 - RNA, 19 nt, Human
caacagaaaguaacuggga

SEQ ID NO: 1181352 - RNA, 19 nt, Human
caaggugggggccgucugc

SEQ ID NO: 1181353 - RNA, 23 nt, Human
caagucacagaaagcgcagcuga

SEQ ID NO: 1181354 - RNA, 19 nt, Human
cacaaacacuaaaaacccu

SEQ ID NO: 1181355 - RNA, 19 nt, Human
cacagaaagcgcagcugaa

SEQ ID NO: 1181356 - RNA, 22 nt, Human
cacagaagccagcaagcaguag

SEQ ID NO: 1181357 - RNA, 21 nt, Human
cacagccagcccccccagccu

SEQ ID NO: 1181358 - RNA, 23 nt, Human
cacaugcaugccuggggaaugug

SEQ ID NO: 1181359 - RNA, 21 nt, Human
caccaggaaacaggcacacgg

SEQ ID NO: 1181360 - RNA, 23 nt, Human
cacuaggccaccuaaugaacccu

SEQ ID NO: 1181361 - RNA, 18 nt, Human
cacugcggggcacagggg

SEQ ID NO: 1181362 - RNA, 18 nt, Human
cagaaagcgcagcugaaa

SEQ ID NO: 1181363 - RNA, 25 nt, Human
cagaagggagagggggucaguggcc

SEQ ID NO: 1181364 - RNA, 25 nt, Human
cagagaacacagaagccagcaagca

SEQ ID NO: 1181365 - RNA, 18 nt, Human
cagcagagcaaagucaca

SEQ ID NO: 1181366 - RNA, 19 nt, Human
caggaaagaaacgaucaca

SEQ ID NO: 1181367 - RNA, 24 nt, Human
caggaaagaaacgaucacaucuca

SEQ ID NO: 1181368 - RNA, 21 nt, Human
cagggagggagggaggagagc

SEQ ID NO: 1181369 - RNA, 21 nt, Human
cagggaugggaccugcaggga

SEQ ID NO: 1181370 - RNA, 21 nt, Human
cagggcagcccucugggucag

SEQ ID NO: 1181371 - RNA, 19 nt, Human
cagggcagcugaguggggc

SEQ ID NO: 1181372 - RNA, 20 nt, Human
caggggugcgggugggggca

SEQ ID NO: 1181373 - RNA, 18 nt, Human
caguccccugcacgugac

SEQ ID NO: 1181374 - RNA, 23 nt, Human
caugccaggcauccagccucacc

SEQ ID NO: 1181375 - RNA, 21 nt, Human
cauugugaguuagugaacaac

SEQ ID NO: 1181376 - RNA, 19 nt, Human
ccaccgccacgcacgaccc

SEQ ID NO: 1181377 - RNA, 18 nt, Human
ccagcccaaacagcccca

SEQ ID NO: 1181378 - RNA, 25 nt, Human
ccagcccaaacagccccagagcccc

SEQ ID NO: 1181379 - RNA, 19 nt, Human
cccacagccagccccccca

SEQ ID NO: 1181380 - RNA, 24 nt, Human
cccagaaacgcagguggaccccac

SEQ ID NO: 1181381 - RNA, 25 nt, Human
cccaucuuccuccccagcauguuuu

SEQ ID NO: 1181382 - RNA, 22 nt, Human
ccccaccacagccaacaggccu

SEQ ID NO: 1181383 - RNA, 23 nt, Human
ccccaccgccacgcacgacccug

SEQ ID NO: 1181384 - RNA, 21 nt, Human
ccccagaaacgcagguggacc

SEQ ID NO: 1181385 - RNA, 23 nt, Human
ccccagggcccaucuuccucccc

SEQ ID NO: 1181386 - RNA, 19 nt, Human
ccccaggggcagaaguacc

SEQ ID NO: 1181387 - RNA, 19 nt, Human
ccccaggguccgugggcuc

SEQ ID NO: 1181388 - RNA, 22 nt, Human
ccccaggguccgugggcucccc

SEQ ID NO: 1181389 - RNA, 19 nt, Human
ccccggggccuccucuggg

SEQ ID NO: 1181390 - RNA, 18 nt, Human
cccgcuggucagggcagc

SEQ ID NO: 1181391 - RNA, 19 nt, Human
cccgcuggucagggcagcc

SEQ ID NO: 1181392 - RNA, 27 nt, Human
cccugcccugccccggcuucucaggag

SEQ ID NO: 1181393 - RNA, 21 nt, Human
cccuuccugcucuccugagaa

SEQ ID NO: 1181394 - RNA, 24 nt, Human
ccgaacagccuugacaccuccacu

SEQ ID NO: 1181395 - RNA, 24 nt, Human
ccggcucagaggcguguccaggaa

SEQ ID NO: 1181396 - RNA, 23 nt, Human
ccggcuucucaggagcccugccc

SEQ ID NO: 1181397 - RNA, 18 nt, Human
ccggggcuggcugggagc

SEQ ID NO: 1181398 - RNA, 21 nt, Human
ccucacagaccugcaccuggg

SEQ ID NO: 1181399 - RNA, 25 nt, Human
ccucaccaggaaacaggcacacggg

SEQ ID NO: 1181400 - RNA, 20 nt, Human
ccucagagacacccugcccu

SEQ ID NO: 1181401 - RNA, 21 nt, Human
ccugcaccugggccccagggc

SEQ ID NO: 1181402 - RNA, 21 nt, Human
ccugcucccuuccugcucucc

SEQ ID NO: 1181403 - RNA, 25 nt, Human
ccugugggaaccuucaaagcuuccc

SEQ ID NO: 1181404 - RNA, 21 nt, Human
cgagacagcagcguuaggccc

SEQ ID NO: 1181405 - RNA, 24 nt, Human
cgagccacuggaguagagaggcug

SEQ ID NO: 1181406 - RNA, 18 nt, Human
cgagccggggaacagagg

SEQ ID NO: 1181407 - RNA, 19 nt, Human
cgcaggggcagaggucuga

SEQ ID NO: 1181408 - RNA, 24 nt, Human
cgggcagugcccuugucucuaggg

SEQ ID NO: 1181409 - RNA, 20 nt, Human
cgugggaggugcagaggugc

SEQ ID NO: 1181410 - RNA, 25 nt, Human
cuccccagcauguuuuuaccucagc

SEQ ID NO: 1181411 - RNA, 24 nt, Human
cucccugcucccuuccugcucucc

SEQ ID NO: 1181412 - RNA, 22 nt, Human
cuccucacagaccugcaccuuu

SEQ ID NO: 1181413 - RNA, 19 nt, Human
cuccugugagucuggcuaa

SEQ ID NO: 1181414 - RNA, 26 nt, Human
cucuaaggggcagcaucagagagaga

SEQ ID NO: 1181415 - RNA, 18 nt, Human
cugcccaccaccgccuca

SEQ ID NO: 1181416 - RNA, 19 nt, Human
cugcuccagccagugcugc

SEQ ID NO: 1181417 - RNA, 24 nt, Human
cugcucccuuccugcucuccugag

SEQ ID NO: 1181418 - RNA, 18 nt, Human
cuggagacgggcguggaa

SEQ ID NO: 1181419 - RNA, 20 nt, Human
cugggucagggugacugagc

SEQ ID NO: 1181420 - RNA, 22 nt, Human
cugguuccggggcuggcuggga

SEQ ID NO: 1181421 - RNA, 24 nt, Human
cugguuccggggcuggcugggagc

SEQ ID NO: 1181422 - RNA, 23 nt, Human
cugguugagagcaacugcccuga

SEQ ID NO: 1181423 - RNA, 19 nt, Human
cuuguggagacccaucacc

SEQ ID NO: 1181424 - RNA, 22 nt, Human
gaaacgcagguggaccccacca

SEQ ID NO: 1181425 - RNA, 23 nt, Human
gagaggcaggaggggcgcagggg

SEQ ID NO: 1181426 - RNA, 19 nt, Human
gagcaagucacagaaagcg

SEQ ID NO: 1181427 - RNA, 19 nt, Human
gagugaggcugggaggaug

SEQ ID NO: 1181428 - RNA, 22 nt, Human
gcaacugcccugacgaaggagg

SEQ ID NO: 1181429 - RNA, 22 nt, Human
gcacaaacacuaaaaacccucg

SEQ ID NO: 1181430 - RNA, 23 nt, Human
gcacuuccuagaccacaccugga

SEQ ID NO: 1181431 - RNA, 22 nt, Human
gcagagcaagucacagaaagcg

SEQ ID NO: 1181432 - RNA, 21 nt, Human
gcaggggcugccggagacggg

SEQ ID NO: 1181433 - RNA, 21 nt, Human
gcaggggcugccggagacggg

SEQ ID NO: 1181434 - RNA, 22 nt, Human
gcaggggcugccggagacgggc

SEQ ID NO: 1181435 - RNA, 18 nt, Human
gccacgggagcacggggc

SEQ ID NO: 1181436 - RNA, 24 nt, Human
gccagcccccccagccuguugucu

SEQ ID NO: 1181437 - RNA, 21 nt, Human
gcccacagccagcccccccag

SEQ ID NO: 1181438 - RNA, 20 nt, Human
gcccacagccagcccccccg

SEQ ID NO: 1181439 - RNA, 19 nt, Human
gccccagagccccuggucc

SEQ ID NO: 1181440 - RNA, 23 nt, Human
gcccugcccaccaccgccucagc

SEQ ID NO: 1181441 - RNA, 19 nt, Human
gccugaaggaguugccugg

SEQ ID NO: 1181442 - RNA, 20 nt, Human
gcggcggcugcacaugcaug

SEQ ID NO: 1181443 - RNA, 18 nt, Human
gcugcaguccccugcacg

SEQ ID NO: 1181444 - RNA, 19 nt, Human
gcugcaguccccugcacgu

SEQ ID NO: 1181445 - RNA, 26 nt, Human
gcugcugggguuggggucggcucguc

SEQ ID NO: 1181446 - RNA, 18 nt, Human
ggaagcagcaccugcacu

SEQ ID NO: 1181447 - RNA, 19 nt, Human
ggagagggggucaguggcu

SEQ ID NO: 1181448 - RNA, 22 nt, Human
ggagcccugcccaccaccgccu

SEQ ID NO: 1181449 - RNA, 18 nt, Human
ggaggacagaacgggaug

SEQ ID NO: 1181450 - RNA, 18 nt, Human
ggagggagggaggagagc

SEQ ID NO: 1181451 - RNA, 22 nt, Human
ggaguagagaggcugagagcac

SEQ ID NO: 1181452 - RNA, 26 nt, Human
ggcaagacgggcgugggaggugcagg

SEQ ID NO: 1181453 - RNA, 24 nt, Human
ggcacaggggucugcagggaggga

SEQ ID NO: 1181454 - RNA, 27 nt, Human
ggcagcccucugggucagggugacuga

SEQ ID NO: 1181455 - RNA, 20 nt, Human
ggcaggggcugccggagacg

SEQ ID NO: 1181456 - RNA, 19 nt, Human
ggcaggggcugcuggagac

SEQ ID NO: 1181457 - RNA, 21 nt, Human
ggccgagugaggcugggagga

SEQ ID NO: 1181458 - RNA, 21 nt, Human
ggccugaagaaggcguucagg

SEQ ID NO: 1181459 - RNA, 18 nt, Human
ggccugcaggggugacug

SEQ ID NO: 1181460 - RNA, 21 nt, Human
ggcugagcgguggccacggga

SEQ ID NO: 1181461 - RNA, 27 nt, Human
ggcugggaggauggugcccgcugguca

SEQ ID NO: 1181462 - RNA, 19 nt, Human
gggaugggaccugcaggga

SEQ ID NO: 1181463 - RNA, 21 nt, Human
gggcagcugaguggggcuggg

SEQ ID NO: 1181464 - RNA, 20 nt, Human
gggcaggggcugcuggagac

SEQ ID NO: 1181465 - RNA, 21 nt, Human
gggcgugggaggugcaggggu

SEQ ID NO: 1181466 - RNA, 18 nt, Human
ggggacacaggcacaaac

SEQ ID NO: 1181467 - RNA, 24 nt, Human
ggggcugugggguagagaagagca

SEQ ID NO: 1181468 - RNA, 23 nt, Human
ggggugcgggugggggcaggggc

SEQ ID NO: 1181469 - RNA, 20 nt, Human
gggugcaggcaggggcugcc

SEQ ID NO: 1181470 - RNA, 19 nt, Human
ggucugaugccugaaggag

SEQ ID NO: 1181471 - RNA, 22 nt, Human
ggugcccgcuggucagggcagc

SEQ ID NO: 1181472 - RNA, 22 nt, Human
ggugcccgcuggucagggcagc

SEQ ID NO: 1181473 - RNA, 19 nt, Human
gguggcggcggcggcugca

SEQ ID NO: 1181474 - RNA, 22 nt, Human
ggugggggcaggggcugcugga

SEQ ID NO: 1181475 - RNA, 21 nt, Human
guccugugguccugggaagca

SEQ ID NO: 1181476 - RNA, 28 nt, Human
gugcugcugggguuggggucggcucguc

SEQ ID NO: 1181477 - RNA, 22 nt, Human
gugcugcugggguuggggugag

SEQ ID NO: 1181478 - RNA, 24 nt, Human
guggcggcggcggcugcacaugca

SEQ ID NO: 1181479 - RNA, 19 nt, Human
gugggguagagaagagcag

SEQ ID NO: 1181480 - RNA, 18 nt, Human
guuccggggcuggcuggg

SEQ ID NO: 1181481 - RNA, 24 nt, Human
guuggagcaggaaggagggagggg

SEQ ID NO: 1181482 - RNA, 18 nt, Human
uaucccagaugcacagga

SEQ ID NO: 1181483 - RNA, 21 nt, Human
ucaaugaagacagcacucgag

SEQ ID NO: 1181484 - RNA, 23 nt, Human
ucaccccauccuuccugcguccc

SEQ ID NO: 1181485 - RNA, 20 nt, Human
ucagcgccacaguacauggg

SEQ ID NO: 1181486 - RNA, 22 nt, Human
ucagcgccacaguacaugggug

SEQ ID NO: 1181487 - RNA, 18 nt, Human
ucaggccagagcccugcc

SEQ ID NO: 1181488 - RNA, 22 nt, Human
ucagggaugggaccugcaggga

SEQ ID NO: 1181489 - RNA, 21 nt, Human
ucagggcacugcggggcacag

SEQ ID NO: 1181490 - RNA, 23 nt, Human
ucagggcacugcggggcacaggg

SEQ ID NO: 1181491 - RNA, 23 nt, Human
uccaggaacccccgucaggccag

SEQ ID NO: 1181492 - RNA, 21 nt, Human
uccauuuggcugagcgguggc

SEQ ID NO: 1181493 - RNA, 21 nt, Human
uccccagagugcagagagcuc

SEQ ID NO: 1181494 - RNA, 23 nt, Human
ucccugggaggaagccgguagcc

SEQ ID NO: 1181495 - RNA, 22 nt, Human
ucgcccccaccgccacgcacga

SEQ ID NO: 1181496 - RNA, 19 nt, Human
ucggagccagcagccaguc

SEQ ID NO: 1181497 - RNA, 24 nt, Human
ucuaggggucccugugggaaccuu

SEQ ID NO: 1181498 - RNA, 18 nt, Human
ucucugcacucugaggcc

SEQ ID NO: 1181499 - RNA, 23 nt, Human
ucugguuccggggcuggcuggga

SEQ ID NO: 1181500 - RNA, 19 nt, Human
ugaaacccagguacacccc

SEQ ID NO: 1181501 - RNA, 20 nt, Human
ugaaacccagguacacccca

SEQ ID NO: 1181502 - RNA, 19 nt, Human
ugaacccuuagcuucccag

SEQ ID NO: 1181503 - RNA, 20 nt, Human
ugaagucgcccccaccgcca

SEQ ID NO: 1181504 - RNA, 21 nt, Human
ugacacagcuggcagaagucc

SEQ ID NO: 1181505 - RNA, 22 nt, Human
ugagaucggggaauccagugcc

SEQ ID NO: 1181506 - RNA, 19 nt, Human
ugagcaaggcuggaaggau

SEQ ID NO: 1181507 - RNA, 19 nt, Human
ugaggcugggaggguggug

SEQ ID NO: 1181508 - RNA, 23 nt, Human
ugagucuggcuaauggggagugg

SEQ ID NO: 1181509 - RNA, 22 nt, Human
ugagugcaggcacuaggccacc

SEQ ID NO: 1181510 - RNA, 22 nt, Human
ugaguggggcugggaggauggu

SEQ ID NO: 1181511 - RNA, 20 nt, Human
ugagugugucgggcaggcug

SEQ ID NO: 1181512 - RNA, 20 nt, Human
ugcacucugaggccuacaga

SEQ ID NO: 1181513 - RNA, 20 nt, Human
ugcagagaacacagaagcca

SEQ ID NO: 1181514 - RNA, 18 nt, Human
ugcagagagcucaaugaa

SEQ ID NO: 1181515 - RNA, 22 nt, Human
ugcagagagcucaaugaagaca

SEQ ID NO: 1181516 - RNA, 21 nt, Human
ugcaugccuggggaaugugag

SEQ ID NO: 1181517 - RNA, 19 nt, Human
ugccccggcuucucaggag

SEQ ID NO: 1181518 - RNA, 21 nt, Human
ugcccuugucucuaggggucc

SEQ ID NO: 1181519 - RNA, 21 nt, Human
ugccgagugggccccaggggc

SEQ ID NO: 1181520 - RNA, 22 nt, Human
ugccugaaggaguugccugggg

SEQ ID NO: 1181521 - RNA, 18 nt, Human
ugccuggggcuguggggu

SEQ ID NO: 1181522 - RNA, 21 nt, Human
ugccugggguucgaguuugga

SEQ ID NO: 1181523 - RNA, 21 nt, Human
ugcggaggaagccaggagagu

SEQ ID NO: 1181524 - RNA, 21 nt, Human
ugcugggguuggggugagggu

SEQ ID NO: 1181525 - RNA, 22 nt, Human
ugcuggucaggguggccgcgug

SEQ ID NO: 1181526 - RNA, 21 nt, Human
uggaagaccaggcaggggagu

SEQ ID NO: 1181527 - RNA, 23 nt, Human
uggcaggacaguuaaacuuuugg

SEQ ID NO: 1181528 - RNA, 24 nt, Human
uggcaggacaguuaaacuuuugga

SEQ ID NO: 1181529 - RNA, 20 nt, Human
uggcaggagggcuggucaga

SEQ ID NO: 1181530 - RNA, 21 nt, Human
uggcggcggcggcugcacaug

SEQ ID NO: 1181531 - RNA, 21 nt, Human
ugggaggguggugcccgcugg

SEQ ID NO: 1181532 - RNA, 23 nt, Human
ugggaggguggugcccgcuggag

SEQ ID NO: 1181533 - RNA, 19 nt, Human
ugggaggugcagaggugcg

SEQ ID NO: 1181534 - RNA, 19 nt, Human
ugggaggugcaggggugcg

SEQ ID NO: 1181535 - RNA, 22 nt, Human
uggggauucugucaaggugggg

SEQ ID NO: 1181536 - RNA, 18 nt, Human
ugggucagggugacugag

SEQ ID NO: 1181537 - RNA, 19 nt, Human
ugugggguagagaagagca

SEQ ID NO: 1181538 - RNA, 23 nt, Human
ugugggguagagaagagcaggac

SEQ ID NO: 1181539 - RNA, 24 nt, Human
uuaaacuuuuggacaacagaaagu

SEQ ID NO: 1181540 - RNA, 21 nt, Human
uuacaggaggggucagcgcca

SEQ ID NO: 1181541 - RNA, 19 nt, Human
uuaggcccggucucggcug

SEQ ID NO: 1181542 - RNA, 19 nt, Human
uucucugcacucugaggcc

SEQ ID NO: 1181543 - RNA, 21 nt, Human
uuggaagaccaggcaggggag

SEQ ID NO: 1181544 - RNA, 22 nt, Human
uuuuguugagaucggggaaucc

SEQ ID NO: 1181545 - RNA, 19 nt, Human
accugccgcccaaagccag

SEQ ID NO: 1181546 - RNA, 23 nt, Human
aggacauuuccaggcaggcaucc

SEQ ID NO: 1181547 - RNA, 18 nt, Human
aggaggaggcugugaagg

SEQ ID NO: 1181548 - RNA, 22 nt, Human
aggaggccacgaaugcaaggac

SEQ ID NO: 1181549 - RNA, 21 nt, Human
agucugggcaaguggucccag

SEQ ID NO: 1181550 - RNA, 28 nt, Human
aucaguagcucccagagcagccucuucc

SEQ ID NO: 1181551 - RNA, 18 nt, Human
cagcaucaguagcuccca

SEQ ID NO: 1181552 - RNA, 23 nt, Human
cagggaccugccgcccaaagcca

SEQ ID NO: 1181553 - RNA, 23 nt, Human
cugugccugaggggccccagucu

SEQ ID NO: 1181554 - RNA, 23 nt, Human
gaggaggaggcugugaaggaggc

SEQ ID NO: 1181555 - RNA, 20 nt, Human
gcagggaccugccgcccaaa

SEQ ID NO: 1181556 - RNA, 18 nt, Human
gcucccagagcagccucu

SEQ ID NO: 1181557 - RNA, 18 nt, Human
gguggugggugccugaag

SEQ ID NO: 1181558 - RNA, 23 nt, Human
gucugggcaaguggucccagccc

SEQ ID NO: 1181559 - RNA, 21 nt, Human
gugccugaagaggggucacgg

SEQ ID NO: 1181560 - RNA, 20 nt, Human
gugggagcuggggagacagg

SEQ ID NO: 1181561 - RNA, 18 nt, Human
uagaugcuuucugugugg

SEQ ID NO: 1181562 - RNA, 22 nt, Human
ucugggcaaguggucccagccc

SEQ ID NO: 1181563 - RNA, 23 nt, Human
ugaggaggaggcugugaaggagg

SEQ ID NO: 1181564 - RNA, 22 nt, Human
ugccugaagaggggucacgggg

SEQ ID NO: 1181565 - RNA, 19 nt, Human
ugggagcuggggagacagg

SEQ ID NO: 1181566 - RNA, 24 nt, Human
uggggagacaggucaguaggaccc

SEQ ID NO: 1181567 - RNA, 23 nt, Human
uggugggugccugaagagggguc

SEQ ID NO: 1181568 - RNA, 21 nt, Human
uuucugugugggagcugggga

SEQ ID NO: 1181569 - RNA, 20 nt, Human
aaauaccgaguggagguacg

SEQ ID NO: 1181570 - RNA, 23 nt, Human
aacuguacccagccuccagcuaa

SEQ ID NO: 1181571 - RNA, 25 nt, Human
agaagcacaaauauauuaaguaaaa

SEQ ID NO: 1181572 - RNA, 18 nt, Human
agcuaauuccagguccua

SEQ ID NO: 1181573 - RNA, 21 nt, Human
agguuccuccuucugggcugc

SEQ ID NO: 1181574 - RNA, 20 nt, Human
agucuacacacuucuucagg

SEQ ID NO: 1181575 - RNA, 19 nt, Human
augagauguuuuaggguuu

SEQ ID NO: 1181576 - RNA, 26 nt, Human
auuaaguaaaacaguaguuccaggaa

SEQ ID NO: 1181577 - RNA, 22 nt, Human
auuugcagugucugcucuccuu

SEQ ID NO: 1181578 - RNA, 23 nt, Human
caaauauauuaaguaaaacagua

SEQ ID NO: 1181579 - RNA, 20 nt, Human
caaccugcaacuguacccag

SEQ ID NO: 1181580 - RNA, 21 nt, Human
caacuguacccagccuccagc

SEQ ID NO: 1181581 - RNA, 18 nt, Human
cagccuccagcuaauucc

SEQ ID NO: 1181582 - RNA, 21 nt, Human
caggaagccugccuaaagcuu

SEQ ID NO: 1181583 - RNA, 21 nt, Human
caguaguuccaggaagccugc

SEQ ID NO: 1181584 - RNA, 18 nt, Human
ccaacccuaagucaagcc

SEQ ID NO: 1181585 - RNA, 19 nt, Human
ccaccagacaucacccaga

SEQ ID NO: 1181586 - RNA, 24 nt, Human
ccccaccuccucgcaguacuccug

SEQ ID NO: 1181587 - RNA, 22 nt, Human
ccucaugagguugcagaagcug

SEQ ID NO: 1181588 - RNA, 18 nt, Human
ccugcagcuucauuaccu

SEQ ID NO: 1181589 - RNA, 20 nt, Human
ccugccuaaagcuuccccac

SEQ ID NO: 1181590 - RNA, 22 nt, Human
ccugccuaaagcuuccccaccu

SEQ ID NO: 1181591 - RNA, 23 nt, Human
ccuggcccaacccuaagucaagc

SEQ ID NO: 1181592 - RNA, 19 nt, Human
cgguagguuccuccuucuu

SEQ ID NO: 1181593 - RNA, 22 nt, Human
cgucagucuacacacuucuuca

SEQ ID NO: 1181594 - RNA, 26 nt, Human
cucgcaguacuccugacagccccugu

SEQ ID NO: 1181595 - RNA, 22 nt, Human
cucuccuuuuucugagcuuucu

SEQ ID NO: 1181596 - RNA, 25 nt, Human
cugcagcuucauuaccuuaagccua

SEQ ID NO: 1181597 - RNA, 20 nt, Human
cuggcccaacccuaagucaa

SEQ ID NO: 1181598 - RNA, 19 nt, Human
cuuuccauuucccuuccag

SEQ ID NO: 1181599 - RNA, 25 nt, Human
gagguugcagaagcacaaauauauu

SEQ ID NO: 1181600 - RNA, 23 nt, Human
gcaauuaaaauuggaucugguuu

SEQ ID NO: 1181601 - RNA, 21 nt, Human
gcagcuucauuaccuuaagcc

SEQ ID NO: 1181602 - RNA, 20 nt, Human
ggcaauuaaaauuggaucug

SEQ ID NO: 1181603 - RNA, 24 nt, Human
gguagguuccuccuucugggcugc

SEQ ID NO: 1181604 - RNA, 22 nt, Human
uaaaacaguaguuccaggaagc

SEQ ID NO: 1181605 - RNA, 18 nt, Human
uaauggcuuuuccuggcc

SEQ ID NO: 1181606 - RNA, 23 nt, Human
uacagaacgucagucuacacacu

SEQ ID NO: 1181607 - RNA, 21 nt, Human
uauggagaaauucagcugaca

SEQ ID NO: 1181608 - RNA, 23 nt, Human
uauggagaaauucagcugacauu

SEQ ID NO: 1181609 - RNA, 21 nt, Human
ucacccagaucuacccgguuc

SEQ ID NO: 1181610 - RNA, 23 nt, Human
uccaugcuuuuuggagacaggag

SEQ ID NO: 1181611 - RNA, 22 nt, Human
ucccacccguugagccaccaga

SEQ ID NO: 1181612 - RNA, 22 nt, Human
ucccuuugcugucccauugcuu

SEQ ID NO: 1181613 - RNA, 18 nt, Human
ucucucuugcuuguugcu

SEQ ID NO: 1181614 - RNA, 21 nt, Human
ucuugcuuccugcugagcugg

SEQ ID NO: 1181615 - RNA, 18 nt, Human
ugaaaagaaauggauggg

SEQ ID NO: 1181616 - RNA, 21 nt, Human
ugagcaaauaccgaguggagg

SEQ ID NO: 1181617 - RNA, 22 nt, Human
ugccaggcaguauugggcauug

SEQ ID NO: 1181618 - RNA, 19 nt, Human
ugcuuuccauuucccuucc

SEQ ID NO: 1181619 - RNA, 25 nt, Human
uggcugaaaagaaauggauggguau

SEQ ID NO: 1181620 - RNA, 21 nt, Human
ugggcugguguauccugcagc

SEQ ID NO: 1181621 - RNA, 18 nt, Human
ugggucaaggucaggagg

SEQ ID NO: 1181622 - RNA, 21 nt, Human
uugggucaaggucaggaggga

SEQ ID NO: 1181623 - RNA, 19 nt, Human
uuucucagccuuucugugu

SEQ ID NO: 1181624 - RNA, 20 nt, Human
uuuuccuggcccaacccuaa

SEQ ID NO: 1181625 - RNA, 22 nt, Human
aaaaagccaaacccuaugaaag

SEQ ID NO: 1181626 - RNA, 27 nt, Human
aaaagcauuucaacaauauacacaaaa

SEQ ID NO: 1181627 - RNA, 22 nt, Human
aagcaaaccccaagucaauaca

SEQ ID NO: 1181628 - RNA, 23 nt, Human
aauacaguacaucaaugacacuu

SEQ ID NO: 1181629 - RNA, 22 nt, Human
aaugcuuucaugcauguacaca

SEQ ID NO: 1181630 - RNA, 20 nt, Human
auacacaaaaugauacuaaa

SEQ ID NO: 1181631 - RNA, 21 nt, Human
auguuaaguaacaaauaagca

SEQ ID NO: 1181632 - RNA, 24 nt, Human
auguucccaaaaagaggguaaaaa

SEQ ID NO: 1181633 - RNA, 19 nt, Human
auuauuauaaauguuuacu

SEQ ID NO: 1181634 - RNA, 22 nt, Human
caaauaagcaaaccccaaguca

SEQ ID NO: 1181635 - RNA, 23 nt, Human
cauuauccaaaaagccaaacccu

SEQ ID NO: 1181636 - RNA, 26 nt, Human
gggaacaacgaaaaaugcuuucaugc

SEQ ID NO: 1181637 - RNA, 19 nt, Human
uaacaguacaaaauugaug

SEQ ID NO: 1181638 - RNA, 18 nt, Human
uaacauuaugaauauaaa

SEQ ID NO: 1181639 - RNA, 21 nt, Human
uacugcauaacaguacaaaau

SEQ ID NO: 1181640 - RNA, 23 nt, Human
uccaaaaagccaaacccuaugaa

SEQ ID NO: 1181641 - RNA, 19 nt, Human
uuauccaaaaagccaaacc

SEQ ID NO: 1181642 - RNA, 23 nt, Human
uucccaaaaagaggguaaaaaaa

SEQ ID NO: 1181643 - RNA, 21 nt, Human
aaccacggcuccugugacuug

SEQ ID NO: 1181644 - RNA, 18 nt, Human
aaccagugucccgacagg

SEQ ID NO: 1181645 - RNA, 21 nt, Human
aauuuauuuccucgcuuucca

SEQ ID NO: 1181646 - RNA, 24 nt, Human
accuccauaauucucuguaccucu

SEQ ID NO: 1181647 - RNA, 18 nt, Human
agaaagaggcaaacugac

SEQ ID NO: 1181648 - RNA, 19 nt, Human
agccagaaagagaaucuga

SEQ ID NO: 1181649 - RNA, 22 nt, Human
aggcagaagcugcaaggacuuc

SEQ ID NO: 1181650 - RNA, 23 nt, Human
aggcagaagcugcaaggacuucu

SEQ ID NO: 1181651 - RNA, 19 nt, Human
agugcucagacuuuuaaga

SEQ ID NO: 1181652 - RNA, 22 nt, Human
aucuggcuuggugucauugucu

SEQ ID NO: 1181653 - RNA, 19 nt, Human
auuuacuugccugcccucc

SEQ ID NO: 1181654 - RNA, 20 nt, Human
caagacgaauccagagcucu

SEQ ID NO: 1181655 - RNA, 18 nt, Human
cacagggccucaugggcu

SEQ ID NO: 1181656 - RNA, 23 nt, Human
cagaaaccaguucuccaaacucc

SEQ ID NO: 1181657 - RNA, 23 nt, Human
cagaauuaaagaacuggucacau

SEQ ID NO: 1181658 - RNA, 20 nt, Human
cagaguuagagaaggauuag

SEQ ID NO: 1181659 - RNA, 19 nt, Human
cagugucccgacagggacc

SEQ ID NO: 1181660 - RNA, 23 nt, Human
caucaugugauaucccagcuuug

SEQ ID NO: 1181661 - RNA, 22 nt, Human
cccugcccaguauaccuucccc

SEQ ID NO: 1181662 - RNA, 27 nt, Human
ccuccagaaggugugcacacucaaucu

SEQ ID NO: 1181663 - RNA, 18 nt, Human
ccucuagucccugucacu

SEQ ID NO: 1181664 - RNA, 23 nt, Human
ccugcccucccaucagaugagaa

SEQ ID NO: 1181665 - RNA, 21 nt, Human
cucaagacgaauccagagcuc

SEQ ID NO: 1181666 - RNA, 18 nt, Human
cugaagcagacagacuug

SEQ ID NO: 1181667 - RNA, 20 nt, Human
cuguaccucucucuccucuc

SEQ ID NO: 1181668 - RNA, 19 nt, Human
gaccacccuuacugauuua

SEQ ID NO: 1181669 - RNA, 21 nt, Human
ggucacagaguuagagaagga

SEQ ID NO: 1181670 - RNA, 20 nt, Human
guaccucucucuccucucug

SEQ ID NO: 1181671 - RNA, 20 nt, Human
gucgcaggcagaagcugcaa

SEQ ID NO: 1181672 - RNA, 19 nt, Human
uaaaagaugcuuagugaau

SEQ ID NO: 1181673 - RNA, 31 nt, Human
uaacaaauccaaaaacauagugguuaaaaaa

SEQ ID NO: 1181674 - RNA, 19 nt, Human
uacagaauuaaagaacugg

SEQ ID NO: 1181675 - RNA, 22 nt, Human
uaccuccagagacuuagcucaa

SEQ ID NO: 1181676 - RNA, 22 nt, Human
uagaaggucuagaauauuuagg

SEQ ID NO: 1181677 - RNA, 19 nt, Human
uagagaaggauuagacaga

SEQ ID NO: 1181678 - RNA, 28 nt, Human
uaguaguauucuuuaaauugcuuguggu

SEQ ID NO: 1181679 - RNA, 18 nt, Human
uagugaaugaaugacugc

SEQ ID NO: 1181680 - RNA, 19 nt, Human
uauaacaaauccaaaaaca

SEQ ID NO: 1181681 - RNA, 19 nt, Human
uauaacaaauccaaaaaca

SEQ ID NO: 1181682 - RNA, 18 nt, Human
uaucuauaaacuuauaac

SEQ ID NO: 1181683 - RNA, 21 nt, Human
uauuaucauucacagggccuc

SEQ ID NO: 1181684 - RNA, 21 nt, Human
ucaaagcaugagaagaaaacc

SEQ ID NO: 1181685 - RNA, 21 nt, Human
ucacagaguuagagaaggauu

SEQ ID NO: 1181686 - RNA, 23 nt, Human
ucagagugcucagacuuuuaaga

SEQ ID NO: 1181687 - RNA, 23 nt, Human
ucaugugauaucccagcuuugcc

SEQ ID NO: 1181688 - RNA, 24 nt, Human
uccaaaaacauagugguuaaaaac

SEQ ID NO: 1181689 - RNA, 19 nt, Human
uccauaauucucuguaccu

SEQ ID NO: 1181690 - RNA, 18 nt, Human
ucuccucucugguacucu

SEQ ID NO: 1181691 - RNA, 18 nt, Human
ucuggcuuggugucauug

SEQ ID NO: 1181692 - RNA, 19 nt, Human
ucugugucuguuuuuuccc

SEQ ID NO: 1181693 - RNA, 18 nt, Human
ucuuucucugucauccag

SEQ ID NO: 1181694 - RNA, 20 nt, Human
ugaagcagacagacuugggg

SEQ ID NO: 1181695 - RNA, 22 nt, Human
ugaagcagacagacuuggggug

SEQ ID NO: 1181696 - RNA, 23 nt, Human
ugagaaacuuucuaaagucagaa

SEQ ID NO: 1181697 - RNA, 22 nt, Human
ugagaagaaaaccagauugggu

SEQ ID NO: 1181698 - RNA, 24 nt, Human
ugaggcaguucuuaauuagagugu

SEQ ID NO: 1181699 - RNA, 22 nt, Human
ugauaaccaucuggcuuggugu

SEQ ID NO: 1181700 - RNA, 18 nt, Human
ugccagaggagagugagu

SEQ ID NO: 1181701 - RNA, 23 nt, Human
ugccuggcaugugaccuccuaaa

SEQ ID NO: 1181702 - RNA, 18 nt, Human
ugcuguggugaaugauua

SEQ ID NO: 1181703 - RNA, 21 nt, Human
uggcagagaugaggcugcaga

SEQ ID NO: 1181704 - RNA, 20 nt, Human
ugguuaaaaacaauuuauua

SEQ ID NO: 1181705 - RNA, 23 nt, Human
ugugguauucacaccauaguucu

SEQ ID NO: 1181706 - RNA, 18 nt, Human
uguuaaaauacucaauca

SEQ ID NO: 1181707 - RNA, 22 nt, Human
uguucuaagagucgcaggcaga

SEQ ID NO: 1181708 - RNA, 24 nt, Human
uuaaaaaauuccaguuuccucauc

SEQ ID NO: 1181709 - RNA, 19 nt, Human
uuaucuauaaacuuauaac

SEQ ID NO: 1181710 - RNA, 25 nt, Human
uucaaagcaugagaagaaaaccaga

SEQ ID NO: 1181711 - RNA, 21 nt, Human
uucagagugcucagacuuuua

SEQ ID NO: 1181712 - RNA, 23 nt, Human
uuccucacagcaugaugguuuca

SEQ ID NO: 1181713 - RNA, 25 nt, Human
uuccuggguauuucucaaccagugu

SEQ ID NO: 1181714 - RNA, 21 nt, Human
uucuccuuguagcugacaccu

SEQ ID NO: 1181715 - RNA, 18 nt, Human
uugccugcccucccauca

SEQ ID NO: 1181716 - RNA, 19 nt, Human
uuuaagacagcaucuggca

SEQ ID NO: 1181717 - RNA, 21 nt, Human
uuugcucucacccacuucugu

SEQ ID NO: 1181718 - RNA, 18 nt, Human
aaacaugaucaugucgug

SEQ ID NO: 1181719 - RNA, 21 nt, Human
aaccagaucugagacgacccc

SEQ ID NO: 1181720 - RNA, 23 nt, Human
aacuaccucuguaaggacccuau

SEQ ID NO: 1181721 - RNA, 18 nt, Human
aagaagaaaaugcaggaa

SEQ ID NO: 1181722 - RNA, 21 nt, Human
aagauggcaggguucagagug

SEQ ID NO: 1181723 - RNA, 19 nt, Human
aaggagggggugauauuuc

SEQ ID NO: 1181724 - RNA, 18 nt, Human
aagggagaaauggacuuu

SEQ ID NO: 1181725 - RNA, 19 nt, Human
acagaguacacugccaaaa

SEQ ID NO: 1181726 - RNA, 22 nt, Human
acauccaggcccagcacugaaa

SEQ ID NO: 1181727 - RNA, 20 nt, Human
acccuaaugacccugcuuua

SEQ ID NO: 1181728 - RNA, 21 nt, Human
acuacgcugcccagcaccccu

SEQ ID NO: 1181729 - RNA, 21 nt, Human
acuacgcugcccagcaccccu

SEQ ID NO: 1181730 - RNA, 23 nt, Human
aggcaacuccaacuuggcaagag

SEQ ID NO: 1181731 - RNA, 23 nt, Human
aggcugggacauagggagaaaga

SEQ ID NO: 1181732 - RNA, 24 nt, Human
agucccugagggacaacgcacugc

SEQ ID NO: 1181733 - RNA, 22 nt, Human
augagcucaucuuucugggcug

SEQ ID NO: 1181734 - RNA, 24 nt, Human
caacuuggcaagaguaagccgaag

SEQ ID NO: 1181735 - RNA, 21 nt, Human
cacaguuaugcacgacagggc

SEQ ID NO: 1181736 - RNA, 19 nt, Human
cacauccaggcccagcacu

SEQ ID NO: 1181737 - RNA, 19 nt, Human
caccuaaccagauacucac

SEQ ID NO: 1181738 - RNA, 24 nt, Human
caccugccucugcucccucuccug

SEQ ID NO: 1181739 - RNA, 22 nt, Human
cacgacagggcucucugauacc

SEQ ID NO: 1181740 - RNA, 25 nt, Human
cagaguaccuuagggcccacccuaa

SEQ ID NO: 1181741 - RNA, 23 nt, Human
cagauaagacaagggggccucuu

SEQ ID NO: 1181742 - RNA, 23 nt, Human
cagaugacuguacuucguggccc

SEQ ID NO: 1181743 - RNA, 19 nt, Human
cagcagaaagccugggacc

SEQ ID NO: 1181744 - RNA, 19 nt, Human
cagcagagacccugcagac

SEQ ID NO: 1181745 - RNA, 22 nt, Human
cagccugagucccugagggaca

SEQ ID NO: 1181746 - RNA, 21 nt, Human
caggaagcgaggcuggcagug

SEQ ID NO: 1181747 - RNA, 22 nt, Human
caguguccaggguuccaccaca

SEQ ID NO: 1181748 - RNA, 23 nt, Human
caguguccaggguuccaccacau

SEQ ID NO: 1181749 - RNA, 18 nt, Human
caguugccuucuucucgu

SEQ ID NO: 1181750 - RNA, 24 nt, Human
cauaagaagcuggcagaaaugaug

SEQ ID NO: 1181751 - RNA, 18 nt, Human
cauagcucgagcacaacc

SEQ ID NO: 1181752 - RNA, 19 nt, Human
ccaaguccagaugacugua

SEQ ID NO: 1181753 - RNA, 18 nt, Human
ccacauaucccgcacauc

SEQ ID NO: 1181754 - RNA, 18 nt, Human
ccagacccaccuaaccag

SEQ ID NO: 1181755 - RNA, 19 nt, Human
ccaggagcaagauggcagg

SEQ ID NO: 1181756 - RNA, 27 nt, Human
ccaggcccagcacugaaaagccucugc

SEQ ID NO: 1181757 - RNA, 20 nt, Human
cccaaauuaaagcaaugagc

SEQ ID NO: 1181758 - RNA, 18 nt, Human
cccgcacaucucucuccu

SEQ ID NO: 1181759 - RNA, 24 nt, Human
cccuccggauguggcccuggucau

SEQ ID NO: 1181760 - RNA, 19 nt, Human
ccuuaacugaguucuaagg

SEQ ID NO: 1181761 - RNA, 25 nt, Human
cuacacaguuaugcacgacagggcu

SEQ ID NO: 1181762 - RNA, 25 nt, Human
cucacagaauucuggcagaagaugc

SEQ ID NO: 1181763 - RNA, 19 nt, Human
cuccugaaucugguuucug

SEQ ID NO: 1181764 - RNA, 23 nt, Human
cucugcucaaccccuugccugga

SEQ ID NO: 1181765 - RNA, 20 nt, Human
cugaaucugguuucugaggc

SEQ ID NO: 1181766 - RNA, 21 nt, Human
cugcagcccgggaacaccugc

SEQ ID NO: 1181767 - RNA, 19 nt, Human
cugcucccucuccugaucu

SEQ ID NO: 1181768 - RNA, 24 nt, Human
cugggaccguagaaggccuuaacu

SEQ ID NO: 1181769 - RNA, 19 nt, Human
cuuggaagaaggaaggagg

SEQ ID NO: 1181770 - RNA, 18 nt, Human
cuuuccauccuuguauuc

SEQ ID NO: 1181771 - RNA, 19 nt, Human
gaagcugcuccuguccaca

SEQ ID NO: 1181772 - RNA, 22 nt, Human
gaaggagggggugauauuucug

SEQ ID NO: 1181773 - RNA, 23 nt, Human
gagaacaaaggagaugagacagc

SEQ ID NO: 1181774 - RNA, 23 nt, Human
gagcacaaccagaucugagacga

SEQ ID NO: 1181775 - RNA, 24 nt, Human
gcccgggaacaccugccucugcuc

SEQ ID NO: 1181776 - RNA, 20 nt, Human
gcuccuguccacauauagcu

SEQ ID NO: 1181777 - RNA, 19 nt, Human
ggagaucgcugcagcccgg

SEQ ID NO: 1181778 - RNA, 22 nt, Human
gggauccucagccagcaauguc

SEQ ID NO: 1181779 - RNA, 21 nt, Human
gggcacaguucagcccacagc

SEQ ID NO: 1181780 - RNA, 20 nt, Human
ggggugauauuucugaguau

SEQ ID NO: 1181781 - RNA, 24 nt, Human
guggagggcacaguucagcccaca

SEQ ID NO: 1181782 - RNA, 18 nt, Human
gugggguggagggcacag

SEQ ID NO: 1181783 - RNA, 19 nt, Human
guuaugcuagggauccuca

SEQ ID NO: 1181784 - RNA, 18 nt, Human
uaaaaacaccagucagag

SEQ ID NO: 1181785 - RNA, 22 nt, Human
uaaaaacaccagucagaguacc

SEQ ID NO: 1181786 - RNA, 18 nt, Human
uaacuucauacuucagca

SEQ ID NO: 1181787 - RNA, 21 nt, Human
uaagccgaagaagaaaaugca

SEQ ID NO: 1181788 - RNA, 24 nt, Human
uaauagauagguccucgcaucucc

SEQ ID NO: 1181789 - RNA, 18 nt, Human
uacagagaacaaaggaga

SEQ ID NO: 1181790 - RNA, 21 nt, Human
uaccuugaucuccuucccugg

SEQ ID NO: 1181791 - RNA, 23 nt, Human
uagaugaaagucuguugcccccu

SEQ ID NO: 1181792 - RNA, 18 nt, Human
uagcucgagcacaaccag

SEQ ID NO: 1181793 - RNA, 23 nt, Human
uaguagaucagugguugaaaagg

SEQ ID NO: 1181794 - RNA, 24 nt, Human
uauaagauuuccugccuggagauu

SEQ ID NO: 1181795 - RNA, 24 nt, Human
uauagcuuccagucuacugaugcc

SEQ ID NO: 1181796 - RNA, 23 nt, Human
uaucccgcacaucucucuccuug

SEQ ID NO: 1181797 - RNA, 23 nt, Human
uaucuuggaagaaggaaggaggg

SEQ ID NO: 1181798 - RNA, 21 nt, Human
uauuccagacccaccuaacca

SEQ ID NO: 1181799 - RNA, 27 nt, Human
ucacuuaucuuggaagaaggaaggagg

SEQ ID NO: 1181800 - RNA, 18 nt, Human
ucagcccacagcagugca

SEQ ID NO: 1181801 - RNA, 21 nt, Human
ucccuggccucuggagucucu

SEQ ID NO: 1181802 - RNA, 22 nt, Human
ucccuggccucuggagucucug

SEQ ID NO: 1181803 - RNA, 21 nt, Human
ucccuguaaguccuaaucucc

SEQ ID NO: 1181804 - RNA, 23 nt, Human
ucccuguaaguccuaaucuccuc

SEQ ID NO: 1181805 - RNA, 23 nt, Human
uccugaucuguggaugacuacgc

SEQ ID NO: 1181806 - RNA, 22 nt, Human
ucgagcacaaccagaucugaga

SEQ ID NO: 1181807 - RNA, 23 nt, Human
ucgcugcagcccgggaacaccug

SEQ ID NO: 1181808 - RNA, 23 nt, Human
ucugggcugaagugccuuggagc

SEQ ID NO: 1181809 - RNA, 21 nt, Human
ucugguuucugaggcggcugu

SEQ ID NO: 1181810 - RNA, 21 nt, Human
ucuuggaagaaggaaggaggg

SEQ ID NO: 1181811 - RNA, 23 nt, Human
ugaaaagccucugcucaaccccu

SEQ ID NO: 1181812 - RNA, 19 nt, Human
ugaaaagggcugauagaug

SEQ ID NO: 1181813 - RNA, 24 nt, Human
ugaaagucuguugcccccuccgga

SEQ ID NO: 1181814 - RNA, 22 nt, Human
ugacuacgcugcccagcacccc

SEQ ID NO: 1181815 - RNA, 18 nt, Human
ugagaaaaaaaaaagagc

SEQ ID NO: 1181816 - RNA, 18 nt, Human
ugagacgacccccgcuug

SEQ ID NO: 1181817 - RNA, 22 nt, Human
ugagacgacccccgcuugacua

SEQ ID NO: 1181818 - RNA, 20 nt, Human
ugaucuccuucccuggccuc

SEQ ID NO: 1181819 - RNA, 24 nt, Human
ugcaggaagcgaggcuggcagugg

SEQ ID NO: 1181820 - RNA, 18 nt, Human
ugcaguaaagaaaccuau

SEQ ID NO: 1181821 - RNA, 21 nt, Human
ugcccccuccggauguggccc

SEQ ID NO: 1181822 - RNA, 21 nt, Human
ugcccccuccggauguggccc

SEQ ID NO: 1181823 - RNA, 25 nt, Human
ugccucugcucccucuccugaucug

SEQ ID NO: 1181824 - RNA, 18 nt, Human
uggaagaaggaaggaggg

SEQ ID NO: 1181825 - RNA, 19 nt, Human
uggaagaaggaaggagggg

SEQ ID NO: 1181826 - RNA, 19 nt, Human
uggacagaguacacugcca

SEQ ID NO: 1181827 - RNA, 19 nt, Human
uggagugagaaaaaaaaaa

SEQ ID NO: 1181828 - RNA, 20 nt, Human
uggcagcauauaagcuuggu

SEQ ID NO: 1181829 - RNA, 23 nt, Human
uggccucuggagucucugauccu

SEQ ID NO: 1181830 - RNA, 21 nt, Human
ugggaauggacagaguacacu

SEQ ID NO: 1181831 - RNA, 19 nt, Human
ugggaguggacugaacuac

SEQ ID NO: 1181832 - RNA, 19 nt, Human
ugucacauccaggcccagc

SEQ ID NO: 1181833 - RNA, 19 nt, Human
ugugcagaggagguggcca

SEQ ID NO: 1181834 - RNA, 22 nt, Human
ugugcagaggagguggccagau

SEQ ID NO: 1181835 - RNA, 19 nt, Human
uucagcccacagcagugca

SEQ ID NO: 1181836 - RNA, 26 nt, Human
uuccagacccaccuaaccagauacuc

SEQ ID NO: 1181837 - RNA, 18 nt, Human
uucucugugugcucacau

SEQ ID NO: 1181838 - RNA, 19 nt, Human
uugcaguuuuccucucuca

SEQ ID NO: 1181839 - RNA, 22 nt, Human
uugcccccuccggauguggccc

SEQ ID NO: 1181840 - RNA, 23 nt, Human
uuguucugaccacaaggcuguga

SEQ ID NO: 1181841 - RNA, 19 nt, Human
uuuaacuuuuuuaaacuca

SEQ ID NO: 1181842 - RNA, 19 nt, Human
uuuccucucucaugacugu

SEQ ID NO: 1181843 - RNA, 26 nt, Human
aaaagcaccugcugcaccauaagccc

SEQ ID NO: 1181844 - RNA, 24 nt, Human
aaaguuuuauccgcuuucccauau

SEQ ID NO: 1181845 - RNA, 22 nt, Human
aaccgaauguguccagggaugu

SEQ ID NO: 1181846 - RNA, 21 nt, Human
aaguccaagugagggagcuag

SEQ ID NO: 1181847 - RNA, 26 nt, Human
accaguuccggaagaaccugcgggac

SEQ ID NO: 1181848 - RNA, 22 nt, Human
accccagggccccugcuguccu

SEQ ID NO: 1181849 - RNA, 24 nt, Human
accugggaugggguggggacaggc

SEQ ID NO: 1181850 - RNA, 18 nt, Human
agacugugcucccuuugg

SEQ ID NO: 1181851 - RNA, 19 nt, Human
agcugggugcagacugugc

SEQ ID NO: 1181852 - RNA, 23 nt, Human
agggauguggcagcugccgcggg

SEQ ID NO: 1181853 - RNA, 24 nt, Human
auuuggucuccaggugucaccuuu

SEQ ID NO: 1181854 - RNA, 26 nt, Human
caccauaagcccagggauguggcagc

SEQ ID NO: 1181855 - RNA, 21 nt, Human
cagcgccucccaguggccaga

SEQ ID NO: 1181856 - RNA, 21 nt, Human
ccaagugagggagcuagggac

SEQ ID NO: 1181857 - RNA, 18 nt, Human
ccccagggccccugcugu

SEQ ID NO: 1181858 - RNA, 18 nt, Human
cccguuggagucguguau

SEQ ID NO: 1181859 - RNA, 21 nt, Human
ccugaaggcaagcuaaaccag

SEQ ID NO: 1181860 - RNA, 24 nt, Human
ccugcauuuggucuccagguguca

SEQ ID NO: 1181861 - RNA, 19 nt, Human
cuaaaaccccagggccccu

SEQ ID NO: 1181862 - RNA, 24 nt, Human
cugauuuggaauuuaacauucucc

SEQ ID NO: 1181863 - RNA, 23 nt, Human
cuuccugucuucuucuguucuuc

SEQ ID NO: 1181864 - RNA, 22 nt, Human
cuuuccugauccugaaggcaag

SEQ ID NO: 1181865 - RNA, 18 nt, Human
cuuuucucaaacuuuccu

SEQ ID NO: 1181866 - RNA, 18 nt, Human
gaaccgaauguguccagg

SEQ ID NO: 1181867 - RNA, 18 nt, Human
gaaccgaguguguccagg

SEQ ID NO: 1181868 - RNA, 18 nt, Human
gaagggucucaaguccaa

SEQ ID NO: 1181869 - RNA, 22 nt, Human
gagcuuggcuuugugaggaacc

SEQ ID NO: 1181870 - RNA, 23 nt, Human
gagggagcuagggacuugggagg

SEQ ID NO: 1181871 - RNA, 21 nt, Human
gcacccacaugcuuagauagc

SEQ ID NO: 1181872 - RNA, 18 nt, Human
gcagcugcagcgagcuug

SEQ ID NO: 1181873 - RNA, 18 nt, Human
gcagcugcagcgggcuug

SEQ ID NO: 1181874 - RNA, 18 nt, Human
gcagcugccgcgggcuug

SEQ ID NO: 1181875 - RNA, 20 nt, Human
gcagcugccgcgggcuuggc

SEQ ID NO: 1181876 - RNA, 19 nt, Human
gcuaaaaccccagggcccc

SEQ ID NO: 1181877 - RNA, 22 nt, Human
ggaauuuaacauucuccaaaca

SEQ ID NO: 1181878 - RNA, 22 nt, Human
ggagcuagggacuugggagggg

SEQ ID NO: 1181879 - RNA, 20 nt, Human
ggccagaggcuaaaacccca

SEQ ID NO: 1181880 - RNA, 19 nt, Human
gggaugggguggggacagg

SEQ ID NO: 1181881 - RNA, 20 nt, Human
gggaugggguggggacaggc

SEQ ID NO: 1181882 - RNA, 21 nt, Human
ggugcagacugugcuccccgg

SEQ ID NO: 1181883 - RNA, 22 nt, Human
ggugugaagggucucaagucca

SEQ ID NO: 1181884 - RNA, 18 nt, Human
gucaccuuucugccaugu

SEQ ID NO: 1181885 - RNA, 22 nt, Human
gucuucuucuguucuucacgcc

SEQ ID NO: 1181886 - RNA, 22 nt, Human
guucugugacuucccugugacc

SEQ ID NO: 1181887 - RNA, 21 nt, Human
guuggcccugauuucuucuuu

SEQ ID NO: 1181888 - RNA, 21 nt, Human
uauuagagggcagauuguggu

SEQ ID NO: 1181889 - RNA, 19 nt, Human
uccaagugagggagcuagg

SEQ ID NO: 1181890 - RNA, 19 nt, Human
uccaagugagggagcuagg

SEQ ID NO: 1181891 - RNA, 23 nt, Human
ucucaaguccaagugagggagcu

SEQ ID NO: 1181892 - RNA, 19 nt, Human
ucucagaaaugcuuccugu

SEQ ID NO: 1181893 - RNA, 21 nt, Human
ucuucuguucuucacgcccca

SEQ ID NO: 1181894 - RNA, 22 nt, Human
ucuucuucuguucuucacgccc

SEQ ID NO: 1181895 - RNA, 22 nt, Human
ugaagggucucaaguccaagug

SEQ ID NO: 1181896 - RNA, 21 nt, Human
ugaaugacccgggaagcugug

SEQ ID NO: 1181897 - RNA, 19 nt, Human
ugaccucugcaguacuccu

SEQ ID NO: 1181898 - RNA, 18 nt, Human
ugacuucccugugaccuc

SEQ ID NO: 1181899 - RNA, 18 nt, Human
ugagggagcuagggacuu

SEQ ID NO: 1181900 - RNA, 18 nt, Human
ugaugggaugagagcugg

SEQ ID NO: 1181901 - RNA, 19 nt, Human
ugaugggaugagagcuggg

SEQ ID NO: 1181902 - RNA, 20 nt, Human
ugcauuuggucuccaggugu

SEQ ID NO: 1181903 - RNA, 22 nt, Human
ugcugcaccauaagcccaggga

SEQ ID NO: 1181904 - RNA, 19 nt, Human
uggcagcugcagcgagcuu

SEQ ID NO: 1181905 - RNA, 19 nt, Human
uggcagcugccgcgggcuu

SEQ ID NO: 1181906 - RNA, 20 nt, Human
ugggaugagagcugggugca

SEQ ID NO: 1181907 - RNA, 18 nt, Human
ugggaugggguggggaca

SEQ ID NO: 1181908 - RNA, 19 nt, Human
ugggguggggacaggcaau

SEQ ID NO: 1181909 - RNA, 24 nt, Human
ugggguggggacaggcaaugaggu

SEQ ID NO: 1181910 - RNA, 18 nt, Human
ugggucggggagcugggg

SEQ ID NO: 1181911 - RNA, 24 nt, Human
ugggugcagacugugcucccuuug

SEQ ID NO: 1181912 - RNA, 23 nt, Human
uggugaccugggauggggugggg

SEQ ID NO: 1181913 - RNA, 20 nt, Human
ugugaagggucucaagucca

SEQ ID NO: 1181914 - RNA, 22 nt, Human
ugugaggaaccgaaugugucca

SEQ ID NO: 1181915 - RNA, 24 nt, Human
uguggcagcugcagcgggcuuggc

SEQ ID NO: 1181916 - RNA, 26 nt, Human
ugugguuggcccugauuucuucuuug

SEQ ID NO: 1181917 - RNA, 23 nt, Human
uuccaguccaaugaaaguuuuau

SEQ ID NO: 1181918 - RNA, 24 nt, Human
uucccauauaaaaauucuucccac

SEQ ID NO: 1181919 - RNA, 19 nt, Human
uuccggaagaaccugcggg

SEQ ID NO: 1181920 - RNA, 20 nt, Human
uucuucuguucuucacgccc

SEQ ID NO: 1181921 - RNA, 23 nt, Human
uuuauccgcuuucccauauaaaa

SEQ ID NO: 1181922 - RNA, 19 nt, Human
uuuuuuuggaguuucaggg

SEQ ID NO: 1181923 - RNA, 24 nt, Human
aaagucccaaagaaagaaagcagg

SEQ ID NO: 1181924 - RNA, 24 nt, Human
aaagugcugggauuacaggcguga

SEQ ID NO: 1181925 - RNA, 20 nt, Human
aaccuccaccucccuggcuc

SEQ ID NO: 1181926 - RNA, 22 nt, Human
aagaagaaccaucauagagcac

SEQ ID NO: 1181927 - RNA, 30 nt, Human
aagcaggaaauaauaauucuauaauccaag

SEQ ID NO: 1181928 - RNA, 22 nt, Human
aaguaaaaaacauaaugcagga

SEQ ID NO: 1181929 - RNA, 19 nt, Human
aagugcugggauuacaggc

SEQ ID NO: 1181930 - RNA, 19 nt, Human
aagugcugggauuacaggc

SEQ ID NO: 1181931 - RNA, 26 nt, Human
aagugcugggauuacaggcgugagcc

SEQ ID NO: 1181932 - RNA, 21 nt, Human
aaguggcauuucagagcacag

SEQ ID NO: 1181933 - RNA, 24 nt, Human
acacaccuguaucuccuucauaca

SEQ ID NO: 1181934 - RNA, 24 nt, Human
acagggucucgcccguugcccagg

SEQ ID NO: 1181935 - RNA, 18 nt, Human
accccagguccuagcagc

SEQ ID NO: 1181936 - RNA, 18 nt, Human
acgggguuuugccauguu

SEQ ID NO: 1181937 - RNA, 23 nt, Human
acgggguuuugccauguuggcca

SEQ ID NO: 1181938 - RNA, 24 nt, Human
acgggguuuugccauguuggccag

SEQ ID NO: 1181939 - RNA, 20 nt, Human
acugaguccucagggacagu

SEQ ID NO: 1181940 - RNA, 22 nt, Human
agacagggucucgcccguugcc

SEQ ID NO: 1181941 - RNA, 23 nt, Human
agcaccacucuccccagggcacu

SEQ ID NO: 1181942 - RNA, 22 nt, Human
agcagcagcagaagccaggcac

SEQ ID NO: 1181943 - RNA, 24 nt, Human
agcgauucuugugccucagccucc

SEQ ID NO: 1181944 - RNA, 20 nt, Human
aggcacccuugagucaauug

SEQ ID NO: 1181945 - RNA, 18 nt, Human
agugcugggauuacaggc

SEQ ID NO: 1181946 - RNA, 24 nt, Human
auaauaauucuauaauccaaaaac

SEQ ID NO: 1181947 - RNA, 23 nt, Human
auauggacugagucacacacccc

SEQ ID NO: 1181948 - RNA, 26 nt, Human
auccuugugaacacugcagaucucua

SEQ ID NO: 1181949 - RNA, 23 nt, Human
auggaccuuccucccucugcccc

SEQ ID NO: 1181950 - RNA, 19 nt, Human
augugcacacacaccugua

SEQ ID NO: 1181951 - RNA, 25 nt, Human
augugcacacacaccuguaucuccu

SEQ ID NO: 1181952 - RNA, 25 nt, Human
auuucuguauuuuuuaguagagacg

SEQ ID NO: 1181953 - RNA, 24 nt, Human
caaagugcugggauuacaggcgug

SEQ ID NO: 1181954 - RNA, 19 nt, Human
caaauauauacauguaccu

SEQ ID NO: 1181955 - RNA, 28 nt, Human
caagcgauucuugugccucagccucccg

SEQ ID NO: 1181956 - RNA, 22 nt, Human
caagugauucacccgccucagc

SEQ ID NO: 1181957 - RNA, 22 nt, Human
caccccagguccuagcagcaga

SEQ ID NO: 1181958 - RNA, 23 nt, Human
cacccgccucagccucccaaagu

SEQ ID NO: 1181959 - RNA, 20 nt, Human
caccgcguccagccauacau

SEQ ID NO: 1181960 - RNA, 22 nt, Human
cagcagacaucuccaaaccaac

SEQ ID NO: 1181961 - RNA, 18 nt, Human
cagcagcagaagccaggc

SEQ ID NO: 1181962 - RNA, 28 nt, Human
cagcagcagaagccaggcacccuugagu

SEQ ID NO: 1181963 - RNA, 19 nt, Human
cagcagcagcagaagccag

SEQ ID NO: 1181964 - RNA, 21 nt, Human
cagcucuccaauggaagaaga

SEQ ID NO: 1181965 - RNA, 23 nt, Human
cagcugucugccaccacacccag

SEQ ID NO: 1181966 - RNA, 23 nt, Human
cagggucucgcccguugcccagg

SEQ ID NO: 1181967 - RNA, 24 nt, Human
cauguuggccaggcuggucucgaa

SEQ ID NO: 1181968 - RNA, 27 nt, Human
ccaaagaaauucaaaagucccaaagaa

SEQ ID NO: 1181969 - RNA, 22 nt, Human
ccaaagugcugggauuacaggc

SEQ ID NO: 1181970 - RNA, 22 nt, Human
ccaaagugcugggauuacaggc

SEQ ID NO: 1181971 - RNA, 24 nt, Human
ccaaagugcugggauuacaggcgu

SEQ ID NO: 1181972 - RNA, 19 nt, Human
ccauguuggccaggcuggu

SEQ ID NO: 1181973 - RNA, 20 nt, Human
cccagauaaccccuccccca

SEQ ID NO: 1181974 - RNA, 25 nt, Human
cccagcagcagcagaagccaggcac

SEQ ID NO: 1181975 - RNA, 19 nt, Human
cccccaaaacugaguccuc

SEQ ID NO: 1181976 - RNA, 19 nt, Human
cccguugcccaggcuggag

SEQ ID NO: 1181977 - RNA, 24 nt, Human
cccguugcccaggcuggagugcaa

SEQ ID NO: 1181978 - RNA, 20 nt, Human
cccuggcucaagcgauucuu

SEQ ID NO: 1181979 - RNA, 23 nt, Human
ccgccucagccucccaaagugcu

SEQ ID NO: 1181980 - RNA, 22 nt, Human
ccuucaguuggaggaagagggc

SEQ ID NO: 1181981 - RNA, 18 nt, Human
ccuuccucccucugcccc

SEQ ID NO: 1181982 - RNA, 20 nt, Human
cgauucuugugccucagccu

SEQ ID NO: 1181983 - RNA, 23 nt, Human
cgcccguugcccaggcuggagug

SEQ ID NO: 1181984 - RNA, 24 nt, Human
cgccucagccucccaaagugcugg

SEQ ID NO: 1181985 - RNA, 20 nt, Human
cgcguccagccauacaugua

SEQ ID NO: 1181986 - RNA, 24 nt, Human
cgggguuuugccauguuggccagg

SEQ ID NO: 1181987 - RNA, 20 nt, Human
cguugcccaggcuggagugc

SEQ ID NO: 1181988 - RNA, 23 nt, Human
cucaagcgauucuugugccucag

SEQ ID NO: 1181989 - RNA, 25 nt, Human
cucacugcaaccuccaccucccugg

SEQ ID NO: 1181990 - RNA, 24 nt, Human
cuccugaccucaaucaagugauuc

SEQ ID NO: 1181991 - RNA, 24 nt, Human
cucgcccguugcccaggcuggagu

SEQ ID NO: 1181992 - RNA, 18 nt, Human
cugcaaccuccaccuccc

SEQ ID NO: 1181993 - RNA, 24 nt, Human
cuggagugcaaugaugugaucuca

SEQ ID NO: 1181994 - RNA, 26 nt, Human
cuucucccagauaaccccucccccaa

SEQ ID NO: 1181995 - RNA, 23 nt, Human
cuugugccucagccucccgagca

SEQ ID NO: 1181996 - RNA, 22 nt, Human
gaagaaccaucauagagcacca

SEQ ID NO: 1181997 - RNA, 28 nt, Human
gaccucaaucaagugauucacccgccuc

SEQ ID NO: 1181998 - RNA, 24 nt, Human
gagacgggguuuugccauguuggc

SEQ ID NO: 1181999 - RNA, 26 nt, Human
gagcagcugagauuacagcugucugc

SEQ ID NO: 1182000 - RNA, 18 nt, Human
gaggaagagggcgucagu

SEQ ID NO: 1182001 - RNA, 18 nt, Human
gauuacaggcgugagcca

SEQ ID NO: 1182002 - RNA, 22 nt, Human
gauuacaggcgugagccaccgc

SEQ ID NO: 1182003 - RNA, 22 nt, Human
gauuacaggcgugagccaccgc

SEQ ID NO: 1182004 - RNA, 21 nt, Human
gauucacccgccucagccucc

SEQ ID NO: 1182005 - RNA, 19 nt, Human
gcaugugcacacacaccug

SEQ ID NO: 1182006 - RNA, 20 nt, Human
gccauguuggccaggcuggu

SEQ ID NO: 1182007 - RNA, 24 nt, Human
gccauguuggccaggcuggucucg

SEQ ID NO: 1182008 - RNA, 19 nt, Human
gcccaggcuggagugcaau

SEQ ID NO: 1182009 - RNA, 21 nt, Human
gccucccgagcagcugagauu

SEQ ID NO: 1182010 - RNA, 24 nt, Human
gcgauucuugugccucagccuccc

SEQ ID NO: 1182011 - RNA, 23 nt, Human
gcuggucucgaacuccugaccuc

SEQ ID NO: 1182012 - RNA, 24 nt, Human
ggcuggucucgaacuccugaccuc

SEQ ID NO: 1182013 - RNA, 28 nt, Human
gggcacuuggacuaucacaguaaaaaua

SEQ ID NO: 1182014 - RNA, 23 nt, Human
gggguuuugccauguuggccagg

SEQ ID NO: 1182015 - RNA, 19 nt, Human
ggucucgaacuccugaccu

SEQ ID NO: 1182016 - RNA, 23 nt, Human
guagagacgggguuuugccaugu

SEQ ID NO: 1182017 - RNA, 24 nt, Human
gucucgcccguugcccaggcugga

SEQ ID NO: 1182018 - RNA, 24 nt, Human
gugauucacccgccucagccuccc

SEQ ID NO: 1182019 - RNA, 22 nt, Human
gugcaggaaugcuauaaacuga

SEQ ID NO: 1182020 - RNA, 22 nt, Human
gugccucagccucccgagcagc

SEQ ID NO: 1182021 - RNA, 23 nt, Human
gugccucagccucccgagcagcu

SEQ ID NO: 1182022 - RNA, 18 nt, Human
gugggagggaggauggug

SEQ ID NO: 1182023 - RNA, 19 nt, Human
guguuguaggaaauguugg

SEQ ID NO: 1182024 - RNA, 18 nt, Human
uaaccccucccccaaaac

SEQ ID NO: 1182025 - RNA, 26 nt, Human
uaaguagcucacacaguagauaugga

SEQ ID NO: 1182026 - RNA, 21 nt, Human
uaaguucuccaccuaaggcaa

SEQ ID NO: 1182027 - RNA, 25 nt, Human
uaauuucuguauuuuuuaguagaga

SEQ ID NO: 1182028 - RNA, 24 nt, Human
uacagcugucugccaccacaccca

SEQ ID NO: 1182029 - RNA, 24 nt, Human
uacaggcgugagccaccgcgucca

SEQ ID NO: 1182030 - RNA, 20 nt, Human
uacaguauguggcugagcau

SEQ ID NO: 1182031 - RNA, 22 nt, Human
uaccggcaugugcacacacacc

SEQ ID NO: 1182032 - RNA, 22 nt, Human
uagagacgggguuuugccaugu

SEQ ID NO: 1182033 - RNA, 20 nt, Human
uagcaaaacugagaagcaca

SEQ ID NO: 1182034 - RNA, 19 nt, Human
uaggauucuccagugcucc

SEQ ID NO: 1182035 - RNA, 24 nt, Human
uaguagagacgggguuuugccaug

SEQ ID NO: 1182036 - RNA, 21 nt, Human
uauauacauguaccuuuucuu

SEQ ID NO: 1182037 - RNA, 21 nt, Human
uaucaaguaaaaaacauaaug

SEQ ID NO: 1182038 - RNA, 22 nt, Human
ucaagugauucacccgccucag

SEQ ID NO: 1182039 - RNA, 18 nt, Human
ucaauuguccuucauuga

SEQ ID NO: 1182040 - RNA, 19 nt, Human
ucacugcaaccuccaccuc

SEQ ID NO: 1182041 - RNA, 24 nt, Human
ucacugcaaccuccaccucccugg

SEQ ID NO: 1182042 - RNA, 25 nt, Human
ucacugcaaccuccaccucccuggc

SEQ ID NO: 1182043 - RNA, 27 nt, Human
ucacugcaaccuccaccucccuggcuc

SEQ ID NO: 1182044 - RNA, 24 nt, Human
ucauggaccuuccucccucugccc

SEQ ID NO: 1182045 - RNA, 20 nt, Human
uccagguuaucuacuuuggg

SEQ ID NO: 1182046 - RNA, 24 nt, Human
ucccaaagugcugggauuacaggc

SEQ ID NO: 1182047 - RNA, 20 nt, Human
ucccagauaaccccuccccc

SEQ ID NO: 1182048 - RNA, 23 nt, Human
ucccucugccccguugagcuccc

SEQ ID NO: 1182049 - RNA, 20 nt, Human
ucccuggcucaagcgauucu

SEQ ID NO: 1182050 - RNA, 24 nt, Human
uccuccacccagaugucccucuca

SEQ ID NO: 1182051 - RNA, 19 nt, Human
ucgggguccacagcuguuc

SEQ ID NO: 1182052 - RNA, 20 nt, Human
ucucccagauaaccccuccc

SEQ ID NO: 1182053 - RNA, 19 nt, Human
ucucgaacuccugaccuca

SEQ ID NO: 1182054 - RNA, 21 nt, Human
ucucgcccguugcccaggcug

SEQ ID NO: 1182055 - RNA, 22 nt, Human
ucucgcccguugcccaggcugg

SEQ ID NO: 1182056 - RNA, 23 nt, Human
ucucgcccguugcccaggcugga

SEQ ID NO: 1182057 - RNA, 21 nt, Human
ucuuucuuucuuuuuuuugaa

SEQ ID NO: 1182058 - RNA, 22 nt, Human
ucuuuuuuuugagacagggucu

SEQ ID NO: 1182059 - RNA, 21 nt, Human
ugagacagggucucgcccguu

SEQ ID NO: 1182060 - RNA, 24 nt, Human
ugagauuacagcugucugccacca

SEQ ID NO: 1182061 - RNA, 23 nt, Human
ugcaaugaugugaucucagcucc

SEQ ID NO: 1182062 - RNA, 24 nt, Human
ugccauguuggccaggcuggucuc

SEQ ID NO: 1182063 - RNA, 27 nt, Human
ugccauguuggccaggcuggucucgaa

SEQ ID NO: 1182064 - RNA, 18 nt, Human
ugcccaggcuggagugca

SEQ ID NO: 1182065 - RNA, 21 nt, Human
ugcccaggcuggagugcaaug

SEQ ID NO: 1182066 - RNA, 22 nt, Human
ugcccaggcuggagugcaauga

SEQ ID NO: 1182067 - RNA, 24 nt, Human
ugcccaggcuggagugcaaugaug

SEQ ID NO: 1182068 - RNA, 24 nt, Human
ugccucagccucccgagcagcuga

SEQ ID NO: 1182069 - RNA, 24 nt, Human
ugcugggauuacaggcgugagcca

SEQ ID NO: 1182070 - RNA, 22 nt, Human
uggaagaagaaccaucauagag

SEQ ID NO: 1182071 - RNA, 23 nt, Human
uggaggaagagggcgucaguuaa

SEQ ID NO: 1182072 - RNA, 19 nt, Human
uggagugcaaugaugugau

SEQ ID NO: 1182073 - RNA, 21 nt, Human
uggcaaagggcagacuuacuc

SEQ ID NO: 1182074 - RNA, 24 nt, Human
uggccaggcuggucucgaacuccu

SEQ ID NO: 1182075 - RNA, 24 nt, Human
uggcugagcaucauggaccuuccu

SEQ ID NO: 1182076 - RNA, 18 nt, Human
ugggaggugcaggaaugc

SEQ ID NO: 1182077 - RNA, 25 nt, Human
ugggaggugcaggaaugcuauaaac

SEQ ID NO: 1182078 - RNA, 18 nt, Human
ugggauuacaggcgugag

SEQ ID NO: 1182079 - RNA, 19 nt, Human
ugggauuacaggcgugagc

SEQ ID NO: 1182080 - RNA, 21 nt, Human
ugggauuacaggcgugagcca

SEQ ID NO: 1182081 - RNA, 22 nt, Human
ugggauuacaggcgugagccac

SEQ ID NO: 1182082 - RNA, 23 nt, Human
ugggauuacaggcgugagccacc

SEQ ID NO: 1182083 - RNA, 24 nt, Human
ugggauuacaggcgugagccaccg

SEQ ID NO: 1182084 - RNA, 21 nt, Human
uguaccuuuucuuucuuucuu

SEQ ID NO: 1182085 - RNA, 18 nt, Human
uguuguaggaaauguugg

SEQ ID NO: 1182086 - RNA, 18 nt, Human
uuagcaaaacugagaagc

SEQ ID NO: 1182087 - RNA, 18 nt, Human
uuaguagagacgggguuu

SEQ ID NO: 1182088 - RNA, 22 nt, Human
uuaguagagacgggguuuugcc

SEQ ID NO: 1182089 - RNA, 24 nt, Human
uuaguagagacgggguuuugccau

SEQ ID NO: 1182090 - RNA, 24 nt, Human
uuaguaguucuagaaaaagaaaaa

SEQ ID NO: 1182091 - RNA, 21 nt, Human
uucaaaagucccaaagaaaga

SEQ ID NO: 1182092 - RNA, 21 nt, Human
uucacccgccucagccuccca

SEQ ID NO: 1182093 - RNA, 19 nt, Human
uucauuguccagagcuacc

SEQ ID NO: 1182094 - RNA, 20 nt, Human
uucuuuuuuuugagacaggg

SEQ ID NO: 1182095 - RNA, 21 nt, Human
uugagacagggucucgcccgu

SEQ ID NO: 1182096 - RNA, 24 nt, Human
uugccauguuggccaggcuggucu

SEQ ID NO: 1182097 - RNA, 18 nt, Human
uugcccaggcuggagugc

SEQ ID NO: 1182098 - RNA, 21 nt, Human
uuucuguauuuuuuaguagag

SEQ ID NO: 1182099 - RNA, 21 nt, Human
uuucuuuuuuuugagacaggg

SEQ ID NO: 1182100 - RNA, 25 nt, Human
uuucuuuuuuuugagacagggucuc

SEQ ID NO: 1182101 - RNA, 23 nt, Human
uuuugccauguuggccaggcugg

SEQ ID NO: 1182102 - RNA, 24 nt, Human
uuuuuaguagagacgggguuuugc

SEQ ID NO: 1182103 - RNA, 22 nt, Human
uuuuuuaguagagacgggguuu

SEQ ID NO: 1182104 - RNA, 23 nt, Human
acauaaaucuggaacuaccacca

SEQ ID NO: 1182105 - RNA, 18 nt, Human
agguagggcccuggccug

SEQ ID NO: 1182106 - RNA, 21 nt, Human
cagaggcugaaucccauuugu

SEQ ID NO: 1182107 - RNA, 21 nt, Human
cauaaaucuggaacuaccacc

SEQ ID NO: 1182108 - RNA, 20 nt, Human
ccacauaaaucuggaacuac

SEQ ID NO: 1182109 - RNA, 23 nt, Human
cucgugguccucuggcgcccucu

SEQ ID NO: 1182110 - RNA, 22 nt, Human
gaaaaacaaaguaacauccaca

SEQ ID NO: 1182111 - RNA, 24 nt, Human
ggcgcccucugcuggccgcucgcg

SEQ ID NO: 1182112 - RNA, 25 nt, Human
gggaaaaacaaaguaacauccacau

SEQ ID NO: 1182113 - RNA, 22 nt, Human
uaaauaauauauuuuauaggga

SEQ ID NO: 1182114 - RNA, 23 nt, Human
uggaacuaccaccacuuuccaga

SEQ ID NO: 1182115 - RNA, 21 nt, Human
acuuucuucucucuguuuucc

SEQ ID NO: 1182116 - RNA, 18 nt, Human
cacaaggucaaucuugga

SEQ ID NO: 1182117 - RNA, 20 nt, Human
caucugaagaguaacuagcc

SEQ ID NO: 1182118 - RNA, 18 nt, Human
cccaagucacacgcaaga

SEQ ID NO: 1182119 - RNA, 21 nt, Human
ccuuucuucuuucucuuuucc

SEQ ID NO: 1182120 - RNA, 18 nt, Human
cuucaauaauuaccaaca

SEQ ID NO: 1182121 - RNA, 24 nt, Human
cuuccccuuucuucuuucucuuuu

SEQ ID NO: 1182122 - RNA, 23 nt, Human
uaacauaggauaaacggcuuccc

SEQ ID NO: 1182123 - RNA, 22 nt, Human
uagcauggacuuuuucaaauau

SEQ ID NO: 1182124 - RNA, 19 nt, Human
ucagaaugaugguguguuu

SEQ ID NO: 1182125 - RNA, 23 nt, Human
ucaucugaagaguaacuagccau

SEQ ID NO: 1182126 - RNA, 18 nt, Human
uccccuuucuucuuucuc

SEQ ID NO: 1182127 - RNA, 20 nt, Human
uccggggcccgcaggggagc

SEQ ID NO: 1182128 - RNA, 21 nt, Human
uuuccugaauuuuucuuuuuu

SEQ ID NO: 1182129 - RNA, 19 nt, Human
uuucuuucuuccccuuucu

SEQ ID NO: 1182130 - RNA, 22 nt, Human
uuuuucagaaugaugguguguu

SEQ ID NO: 1182131 - RNA, 22 nt, Human
aaacaaaauuaaguacaaccuc

SEQ ID NO: 1182132 - RNA, 23 nt, Human
aacagaccaaaauaacuauggua

SEQ ID NO: 1182133 - RNA, 20 nt, Human
aagcacaagaacugccaaga

SEQ ID NO: 1182134 - RNA, 26 nt, Human
aagcagaaacuauuuaguagaggcaa

SEQ ID NO: 1182135 - RNA, 22 nt, Human
acaaaacaaaaaaauugaacag

SEQ ID NO: 1182136 - RNA, 18 nt, Human
acaccguucccuacgcac

SEQ ID NO: 1182137 - RNA, 26 nt, Human
acuagaaacuccaauccaaacugcaa

SEQ ID NO: 1182138 - RNA, 23 nt, Human
acuuacuuaacagaccaaaauaa

SEQ ID NO: 1182139 - RNA, 23 nt, Human
agaacugccaagaugaucauuca

SEQ ID NO: 1182140 - RNA, 19 nt, Human
agcaaaaaggauauucugc

SEQ ID NO: 1182141 - RNA, 20 nt, Human
auaaaacaacaguagcugag

SEQ ID NO: 1182142 - RNA, 22 nt, Human
augaggauuuuacccaaaacca

SEQ ID NO: 1182143 - RNA, 20 nt, Human
auggucucuuucugcgcucu

SEQ ID NO: 1182144 - RNA, 21 nt, Human
caaaaccaaccuuagaaacaa

SEQ ID NO: 1182145 - RNA, 25 nt, Human
caaaaccaaccuuagaaacaaacaa

SEQ ID NO: 1182146 - RNA, 20 nt, Human
caaaggguuguccagcucua

SEQ ID NO: 1182147 - RNA, 24 nt, Human
caaaggguuguccagcucuaacac

SEQ ID NO: 1182148 - RNA, 20 nt, Human
caaaguaaaagcacaagaac

SEQ ID NO: 1182149 - RNA, 23 nt, Human
caagaaaaaccauguaaccaagg

SEQ ID NO: 1182150 - RNA, 24 nt, Human
caccguucccuacgcacacucgug

SEQ ID NO: 1182151 - RNA, 20 nt, Human
cacugugcucauacuggggg

SEQ ID NO: 1182152 - RNA, 21 nt, Human
cacugugcucauacuggggga

SEQ ID NO: 1182153 - RNA, 26 nt, Human
cagagauagauuuaaaacaaaacaaa

SEQ ID NO: 1182154 - RNA, 20 nt, Human
caggccccuacaucuagucc

SEQ ID NO: 1182155 - RNA, 22 nt, Human
caucgacucucccuaggcuauu

SEQ ID NO: 1182156 - RNA, 20 nt, Human
ccauuugggagcagguuuau

SEQ ID NO: 1182157 - RNA, 21 nt, Human
cccaaaaccaaccuuagaaac

SEQ ID NO: 1182158 - RNA, 20 nt, Human
ccccaccugugaaucugccc

SEQ ID NO: 1182159 - RNA, 23 nt, Human
ccccacuauuuuccucccauccu

SEQ ID NO: 1182160 - RNA, 22 nt, Human
ccucccgcgaauaaagacacac

SEQ ID NO: 1182161 - RNA, 25 nt, Human
ccuugaaaagaggcugaagucuccu

SEQ ID NO: 1182162 - RNA, 23 nt, Human
cuaacacacuucaauucuguuuu

SEQ ID NO: 1182163 - RNA, 19 nt, Human
cuacaccguucccuacgca

SEQ ID NO: 1182164 - RNA, 20 nt, Human
cuaguccaaauaggcaacac

SEQ ID NO: 1182165 - RNA, 21 nt, Human
cucguggggucucucggaccu

SEQ ID NO: 1182166 - RNA, 24 nt, Human
cugcugcauuucugguugggggag

SEQ ID NO: 1182167 - RNA, 23 nt, Human
cuuccauuugcuguucaccugcc

SEQ ID NO: 1182168 - RNA, 22 nt, Human
cuugucuuuucaucuguuuggu

SEQ ID NO: 1182169 - RNA, 23 nt, Human
cuuuccacuucauuucaucacaa

SEQ ID NO: 1182170 - RNA, 22 nt, Human
gaaucugccacuuccuucuucc

SEQ ID NO: 1182171 - RNA, 20 nt, Human
gacaacaggggacugagaaa

SEQ ID NO: 1182172 - RNA, 20 nt, Human
gccucccgcgaauaaagacu

SEQ ID NO: 1182173 - RNA, 21 nt, Human
gccugcugacaguggccuccc

SEQ ID NO: 1182174 - RNA, 19 nt, Human
gccuugaaaagaggcugaa

SEQ ID NO: 1182175 - RNA, 21 nt, Human
gcgcucuuuaccaaagaaagg

SEQ ID NO: 1182176 - RNA, 19 nt, Human
gcuaaagggauguuuggau

SEQ ID NO: 1182177 - RNA, 19 nt, Human
gcuguucaccugccaccug

SEQ ID NO: 1182178 - RNA, 23 nt, Human
ggaaagccuugaaaagaggcuga

SEQ ID NO: 1182179 - RNA, 21 nt, Human
ggaaggaaacaaauuuaauaa

SEQ ID NO: 1182180 - RNA, 18 nt, Human
ggaaggaugauuuugcuc

SEQ ID NO: 1182181 - RNA, 23 nt, Human
ggagggggaagcacaggaauggg

SEQ ID NO: 1182182 - RNA, 22 nt, Human
ggcacugggggucacugccugc

SEQ ID NO: 1182183 - RNA, 19 nt, Human
gggaaaggagcacaaaaug

SEQ ID NO: 1182184 - RNA, 26 nt, Human
uaaaacaacaguagcugagguaguua

SEQ ID NO: 1182185 - RNA, 20 nt, Human
uaaaagcacaagaacugcca

SEQ ID NO: 1182186 - RNA, 24 nt, Human
uaaaauaacuggagaauuaagaac

SEQ ID NO: 1182187 - RNA, 20 nt, Human
uaauuaucauuacuagaaac

SEQ ID NO: 1182188 - RNA, 23 nt, Human
uacaucaaauacuccacacacug

SEQ ID NO: 1182189 - RNA, 18 nt, Human
uacaucagaauauuagug

SEQ ID NO: 1182190 - RNA, 23 nt, Human
uacccaaaaccaaccuuagaaac

SEQ ID NO: 1182191 - RNA, 30 nt, Human
uacccaaaaccaaccuuagaaacaaacaag

SEQ ID NO: 1182192 - RNA, 21 nt, Human
uacuccacacacugugcuuca

SEQ ID NO: 1182193 - RNA, 26 nt, Human
uagaaacaaacaaacaaaauuaagua

SEQ ID NO: 1182194 - RNA, 22 nt, Human
uaggaaggaugauuuugcucuu

SEQ ID NO: 1182195 - RNA, 20 nt, Human
uaguacagacgaaguuugua

SEQ ID NO: 1182196 - RNA, 20 nt, Human
uaguagaggcaagguucuca

SEQ ID NO: 1182197 - RNA, 22 nt, Human
uccccaugacauacucgcccca

SEQ ID NO: 1182198 - RNA, 23 nt, Human
ucuaaauaaaacaacaguagcug

SEQ ID NO: 1182199 - RNA, 23 nt, Human
ucuccuuucuuccagugaugaga

SEQ ID NO: 1182200 - RNA, 22 nt, Human
ucucuacuugucuuuucaucug

SEQ ID NO: 1182201 - RNA, 22 nt, Human
ucucuuucugcgcucuuuacca

SEQ ID NO: 1182202 - RNA, 22 nt, Human
ugagaaaagaauccauaggaag

SEQ ID NO: 1182203 - RNA, 24 nt, Human
ugagaaaagaauccauaggaaggg

SEQ ID NO: 1182204 - RNA, 18 nt, Human
ugagaaugggaaaaaugu

SEQ ID NO: 1182205 - RNA, 21 nt, Human
uggaaaugaggauuuuaccca

SEQ ID NO: 1182206 - RNA, 24 nt, Human
uggagggggaagcacaggaauggc

SEQ ID NO: 1182207 - RNA, 24 nt, Human
uggcagcacaaacuuuaaaaaaaa

SEQ ID NO: 1182208 - RNA, 20 nt, Human
ugggcaggggaaaaaggaca

SEQ ID NO: 1182209 - RNA, 21 nt, Human
ugggcaggggaaaaaggacag

SEQ ID NO: 1182210 - RNA, 21 nt, Human
ugucauagcccuaaauucagc

SEQ ID NO: 1182211 - RNA, 19 nt, Human
uguuuuguaucuuuguggc

SEQ ID NO: 1182212 - RNA, 21 nt, Human
uuaaguaaacacugagaaaag

SEQ ID NO: 1182213 - RNA, 22 nt, Human
uuaguagaggcaagguucucau

SEQ ID NO: 1182214 - RNA, 18 nt, Human
uucagagauagauuuaaa

SEQ ID NO: 1182215 - RNA, 18 nt, Human
uucuuccaggccccuaca

SEQ ID NO: 1182216 - RNA, 22 nt, Human
uugaauauauauauuuacagga

SEQ ID NO: 1182217 - RNA, 23 nt, Human
uuugcuguucaccugccaccugu

SEQ ID NO: 1182218 - RNA, 20 nt, Human
uuuguggcaaaaucucccca

SEQ ID NO: 1182219 - RNA, 23 nt, Human
aaaaaaaaaaauucaacuaauac

SEQ ID NO: 1182220 - RNA, 24 nt, Human
aaaaaaauacuguaaaaaugucau

SEQ ID NO: 1182221 - RNA, 18 nt, Human
aaaauuagcugggcgugg

SEQ ID NO: 1182222 - RNA, 24 nt, Human
aaacaacacaaguuuagaauccau

SEQ ID NO: 1182223 - RNA, 24 nt, Human
aaacauuggccacuauuuaaacaa

SEQ ID NO: 1182224 - RNA, 21 nt, Human
aaagaaacaacacaaguuuag

SEQ ID NO: 1182225 - RNA, 22 nt, Human
aaagagcuaaacauacaaacac

SEQ ID NO: 1182226 - RNA, 21 nt, Human
aacacaaguuuagaauccaua

SEQ ID NO: 1182227 - RNA, 22 nt, Human
aacauacaaacaccaugaaaaa

SEQ ID NO: 1182228 - RNA, 19 nt, Human
aacauggugaaaccccguc

SEQ ID NO: 1182229 - RNA, 20 nt, Human
aacauggugaaaccccgucu

SEQ ID NO: 1182230 - RNA, 21 nt, Human
aacauggugaaaccccgucuc

SEQ ID NO: 1182231 - RNA, 31 nt, Human
aagaaaugaaacacagcaacuuccugaggaa

SEQ ID NO: 1182232 - RNA, 24 nt, Human
aaucacuugaaacugggaggcaga

SEQ ID NO: 1182233 - RNA, 24 nt, Human
acaacacaaguuuagaauccauaa

SEQ ID NO: 1182234 - RNA, 26 nt, Human
acacauauaccaaauucaaggcacaa

SEQ ID NO: 1182235 - RNA, 22 nt, Human
acagagcgagacuccaucaaaa

SEQ ID NO: 1182236 - RNA, 23 nt, Human
acagagcucuuccucaaguccug

SEQ ID NO: 1182237 - RNA, 24 nt, Human
acagugcagauuugaucuguggug

SEQ ID NO: 1182238 - RNA, 24 nt, Human
acauauaacagagcucuuccucaa

SEQ ID NO: 1182239 - RNA, 24 nt, Human
accaacauggugaaaccccgucuc

SEQ ID NO: 1182240 - RNA, 24 nt, Human
accccgucucuacuaaaaauacaa

SEQ ID NO: 1182241 - RNA, 21 nt, Human
acugcacuccagccuggugac

SEQ ID NO: 1182242 - RNA, 23 nt, Human
acugcacuccagccuggugacag

SEQ ID NO: 1182243 - RNA, 25 nt, Human
acugcacuccagccuggugacagag

SEQ ID NO: 1182244 - RNA, 23 nt, Human
agacagcagaaucacuugaaacu

SEQ ID NO: 1182245 - RNA, 19 nt, Human
agacuccaucaaaaaaaaa

SEQ ID NO: 1182246 - RNA, 24 nt, Human
agagauugcagugagccgugauug

SEQ ID NO: 1182247 - RNA, 24 nt, Human
agcacuuugggaggccgaggcagg

SEQ ID NO: 1182248 - RNA, 21 nt, Human
agccuggugacagagcgagac

SEQ ID NO: 1182249 - RNA, 23 nt, Human
agccuggugacagagcgagacuc

SEQ ID NO: 1182250 - RNA, 23 nt, Human
agcugggcgugguggcgcaugcc

SEQ ID NO: 1182251 - RNA, 21 nt, Human
aggcagagauugcagugagcc

SEQ ID NO: 1182252 - RNA, 22 nt, Human
aggcagagauugcagugagccg

SEQ ID NO: 1182253 - RNA, 24 nt, Human
aggcagguggaucacaaugucaag

SEQ ID NO: 1182254 - RNA, 21 nt, Human
aggccgaggcagguggaucac

SEQ ID NO: 1182255 - RNA, 18 nt, Human
aggcucgcugggaggcaa

SEQ ID NO: 1182256 - RNA, 22 nt, Human
aggcugggugcaguggcucaug

SEQ ID NO: 1182257 - RNA, 19 nt, Human
agguggaucacaaugucaa

SEQ ID NO: 1182258 - RNA, 21 nt, Human
aguccauccaaagaaaugaaa

SEQ ID NO: 1182259 - RNA, 23 nt, Human
aguggcucaugccuguaauccca

SEQ ID NO: 1182260 - RNA, 24 nt, Human
aguggcucaugccuguaaucccag

SEQ ID NO: 1182261 - RNA, 19 nt, Human
augccuguaaucccagcac

SEQ ID NO: 1182262 - RNA, 24 nt, Human
auugcagugagccgugauugugcu

SEQ ID NO: 1182263 - RNA, 24 nt, Human
auugugcuacugcacuccagccug

SEQ ID NO: 1182264 - RNA, 19 nt, Human
caaaagagcuaaacauaca

SEQ ID NO: 1182265 - RNA, 25 nt, Human
caaaagagcuaaacauacaaacacc

SEQ ID NO: 1182266 - RNA, 25 nt, Human
caaaauuccuuuucaaaagagcuaa

SEQ ID NO: 1182267 - RNA, 21 nt, Human
caacacugcugauaacuaaua

SEQ ID NO: 1182268 - RNA, 24 nt, Human
caacauggugaaaccccgucucua

SEQ ID NO: 1182269 - RNA, 22 nt, Human
caagcccuuaaucaagucucua

SEQ ID NO: 1182270 - RNA, 22 nt, Human
caaggcugggugcaguggcuca

SEQ ID NO: 1182271 - RNA, 18 nt, Human
cacaaugucaagagaugg

SEQ ID NO: 1182272 - RNA, 23 nt, Human
cacauauaccaaauucaaggcac

SEQ ID NO: 1182273 - RNA, 19 nt, Human
caccaggaccuuuccuaua

SEQ ID NO: 1182274 - RNA, 22 nt, Human
caccaugaaaaagucaccuagg

SEQ ID NO: 1182275 - RNA, 23 nt, Human
cacuccagccuggugacagagcg

SEQ ID NO: 1182276 - RNA, 22 nt, Human
cagagcucuuccucaaguccug

SEQ ID NO: 1182277 - RNA, 24 nt, Human
cagcacuuugggaggccgaggcag

SEQ ID NO: 1182278 - RNA, 26 nt, Human
cagcacuuugggaggccgaggcaggu

SEQ ID NO: 1182279 - RNA, 22 nt, Human
cagguggaucacaaugucaaga

SEQ ID NO: 1182280 - RNA, 23 nt, Human
cauauaacagagcucuuccucaa

SEQ ID NO: 1182281 - RNA, 20 nt, Human
caugccuguaaucccagcac

SEQ ID NO: 1182282 - RNA, 22 nt, Human
ccacuauuuaaacaagacauuc

SEQ ID NO: 1182283 - RNA, 21 nt, Human
cccggggccccgcacgagccc

SEQ ID NO: 1182284 - RNA, 22 nt, Human
ccugaccaacauggugaaaccc

SEQ ID NO: 1182285 - RNA, 23 nt, Human
ccugaccaacauggugaaacccc

SEQ ID NO: 1182286 - RNA, 24 nt, Human
ccugaccaacauggugaaaccccg

SEQ ID NO: 1182287 - RNA, 21 nt, Human
ccuggugacagagcgagacuc

SEQ ID NO: 1182288 - RNA, 20 nt, Human
ccuguaaucccagcacuuug

SEQ ID NO: 1182289 - RNA, 22 nt, Human
ccuguaaucccagcacuuuggg

SEQ ID NO: 1182290 - RNA, 18 nt, Human
ccuguagucccagcuacu

SEQ ID NO: 1182291 - RNA, 21 nt, Human
ccuguagucccagcuacuugg

SEQ ID NO: 1182292 - RNA, 20 nt, Human
ccuuaaacauuggccacuau

SEQ ID NO: 1182293 - RNA, 21 nt, Human
ccuuccauacauaugccauag

SEQ ID NO: 1182294 - RNA, 24 nt, Human
cgaggcagguggaucacaauguca

SEQ ID NO: 1182295 - RNA, 19 nt, Human
cgcccggggccccgcacga

SEQ ID NO: 1182296 - RNA, 23 nt, Human
cgcccggggccccgcacgagccc

SEQ ID NO: 1182297 - RNA, 19 nt, Human
cuacugcacuccagccugg

SEQ ID NO: 1182298 - RNA, 20 nt, Human
cuacugcacuccagccuggu

SEQ ID NO: 1182299 - RNA, 23 nt, Human
cuacugcacuccagccuggugac

SEQ ID NO: 1182300 - RNA, 24 nt, Human
cucaugccuguaaucccagcacuu

SEQ ID NO: 1182301 - RNA, 24 nt, Human
cuccagccuggugacagagcgaga

SEQ ID NO: 1182302 - RNA, 22 nt, Human
cuccaucaaaaaaaaaaaaaaa

SEQ ID NO: 1182303 - RNA, 23 nt, Human
cucuaaucuagggacaguaacau

SEQ ID NO: 1182304 - RNA, 21 nt, Human
cucugaguauaucugucccca

SEQ ID NO: 1182305 - RNA, 18 nt, Human
cuuugauaaagagaaaug

SEQ ID NO: 1182306 - RNA, 24 nt, Human
gaaacaacacaaguuuagaaucca

SEQ ID NO: 1182307 - RNA, 20 nt, Human
gagcuaaacauacaaacacc

SEQ ID NO: 1182308 - RNA, 21 nt, Human
gauugugcuacugcacuccag

SEQ ID NO: 1182309 - RNA, 23 nt, Human
gcacuccagccuggugacagagc

SEQ ID NO: 1182310 - RNA, 24 nt, Human
ggagaccauccugaccaacauggu

SEQ ID NO: 1182311 - RNA, 19 nt, Human
ggcauuguuuccccacuuu

SEQ ID NO: 1182312 - RNA, 23 nt, Human
ggcugggugcaguggcucaugcc

SEQ ID NO: 1182313 - RNA, 24 nt, Human
gggugcaguggcucaugccuguaa

SEQ ID NO: 1182314 - RNA, 20 nt, Human
gguucugccuaaaaggaccc

SEQ ID NO: 1182315 - RNA, 25 nt, Human
guuaaugucuguuucccaacacuau

SEQ ID NO: 1182316 - RNA, 21 nt, Human
uaaaaaaaaaagcaaucacau

SEQ ID NO: 1182317 - RNA, 18 nt, Human
uaaaaaugucauuugcug

SEQ ID NO: 1182318 - RNA, 18 nt, Human
uaaaacacaggucauggc

SEQ ID NO: 1182319 - RNA, 22 nt, Human
uaaaaggacccuguuggcaaca

SEQ ID NO: 1182320 - RNA, 25 nt, Human
uaacaagaaugaguaaacucuggga

SEQ ID NO: 1182321 - RNA, 22 nt, Human
uaacaucggcuauuugagugca

SEQ ID NO: 1182322 - RNA, 19 nt, Human
uaagaguccauccaaagaa

SEQ ID NO: 1182323 - RNA, 26 nt, Human
uaagggcaauaacaaacaaaaauaga

SEQ ID NO: 1182324 - RNA, 23 nt, Human
uacacccuuccauacauaugcca

SEQ ID NO: 1182325 - RNA, 22 nt, Human
uaccuaaagugggauaaugauc

SEQ ID NO: 1182326 - RNA, 20 nt, Human
uacugcacuccagccuggug

SEQ ID NO: 1182327 - RNA, 22 nt, Human
uacugcacuccagccuggugac

SEQ ID NO: 1182328 - RNA, 23 nt, Human
uacugcacuccagccuggugaca

SEQ ID NO: 1182329 - RNA, 24 nt, Human
uacugcacuccagccuggugacag

SEQ ID NO: 1182330 - RNA, 18 nt, Human
uacuuuagucauugugac

SEQ ID NO: 1182331 - RNA, 24 nt, Human
uagaaaacgugagaaaauacagca

SEQ ID NO: 1182332 - RNA, 20 nt, Human
uaguuugcuuuacaaaaaaa

SEQ ID NO: 1182333 - RNA, 21 nt, Human
ucaaaaaaaaaaaaaaaaaaa

SEQ ID NO: 1182334 - RNA, 22 nt, Human
ucaaaagagcuaaacauacaaa

SEQ ID NO: 1182335 - RNA, 24 nt, Human
ucacuugaaacugggaggcagagg

SEQ ID NO: 1182336 - RNA, 22 nt, Human
ucaugccuguaaucccagcacu

SEQ ID NO: 1182337 - RNA, 22 nt, Human
uccagccuggugacagagcgag

SEQ ID NO: 1182338 - RNA, 25 nt, Human
uccaucaaaaaaaaaaaaaaaaaaa

SEQ ID NO: 1182339 - RNA, 23 nt, Human
uccaugauugaaaauuaagaggc

SEQ ID NO: 1182340 - RNA, 23 nt, Human
uccccacuuuugguacaaacaag

SEQ ID NO: 1182341 - RNA, 22 nt, Human
ucuaaucuagggacaguaacau

SEQ ID NO: 1182342 - RNA, 23 nt, Human
ucucuacuaaaaauacaaaaauu

SEQ ID NO: 1182343 - RNA, 22 nt, Human
ugaaaaaucacacacaugaaac

SEQ ID NO: 1182344 - RNA, 23 nt, Human
ugaaaaaucacacacaugaaaca

SEQ ID NO: 1182345 - RNA, 18 nt, Human
ugaagaugucacacugcu

SEQ ID NO: 1182346 - RNA, 24 nt, Human
ugaccaacauggugaaaccccguc

SEQ ID NO: 1182347 - RNA, 18 nt, Human
ugacugguuucuggguuc

SEQ ID NO: 1182348 - RNA, 20 nt, Human
ugagacagcagaaucacuug

SEQ ID NO: 1182349 - RNA, 23 nt, Human
ugagacagcagaaucacuugaaa

SEQ ID NO: 1182350 - RNA, 25 nt, Human
ugaguaaacucugggaauucugaaa

SEQ ID NO: 1182351 - RNA, 21 nt, Human
ugcagccaaacuaaaacacag

SEQ ID NO: 1182352 - RNA, 21 nt, Human
ugccuaaaaggacccuguugg

SEQ ID NO: 1182353 - RNA, 23 nt, Human
ugccuguaaucccagcacuuugg

SEQ ID NO: 1182354 - RNA, 24 nt, Human
ugccuguagucccagcuacuuggg

SEQ ID NO: 1182355 - RNA, 23 nt, Human
uggcuagaguuuaauaacaagaa

SEQ ID NO: 1182356 - RNA, 24 nt, Human
uggcucaugccuguaaucccagca

SEQ ID NO: 1182357 - RNA, 23 nt, Human
ugggaggcagagauugcaguggc

SEQ ID NO: 1182358 - RNA, 24 nt, Human
ugggaggccgaggcagguggauca

SEQ ID NO: 1182359 - RNA, 18 nt, Human
ugggaggcugagacagca

SEQ ID NO: 1182360 - RNA, 24 nt, Human
ugggaggcugagacagcagaauca

SEQ ID NO: 1182361 - RNA, 26 nt, Human
ugggauaaugaucauaaaaaaaaaaa

SEQ ID NO: 1182362 - RNA, 21 nt, Human
ugguacaaacaagcccuuaau

SEQ ID NO: 1182363 - RNA, 24 nt, Human
ugguggcgcaugccuguaguccca

SEQ ID NO: 1182364 - RNA, 19 nt, Human
ugguuucuggguucugccu

SEQ ID NO: 1182365 - RNA, 22 nt, Human
ugucaagagauggagaccaucc

SEQ ID NO: 1182366 - RNA, 18 nt, Human
uuagcugggcgugguggc

SEQ ID NO: 1182367 - RNA, 20 nt, Human
uuagcugggcgugguggcgc

SEQ ID NO: 1182368 - RNA, 24 nt, Human
uuagcugggcgugguggcgcaugc

SEQ ID NO: 1182369 - RNA, 22 nt, Human
uugcagugagccgugauugugc

SEQ ID NO: 1182370 - RNA, 25 nt, Human
uugggaggccgaggcagguggauca

SEQ ID NO: 1182371 - RNA, 25 nt, Human
uugggaggcugagacagcagaauca

SEQ ID NO: 1182372 - RNA, 23 nt, Human
uugugcuacugcacuccagccug

SEQ ID NO: 1182373 - RNA, 23 nt, Human
aaaacaccacaugaaucaaaaua

SEQ ID NO: 1182374 - RNA, 19 nt, Human
aaaauaccucauaaaaaua

SEQ ID NO: 1182375 - RNA, 21 nt, Human
aaaaugucaccagaugaaaug

SEQ ID NO: 1182376 - RNA, 19 nt, Human
aaaguugugaccaaaaacu

SEQ ID NO: 1182377 - RNA, 23 nt, Human
aagaaucacuugaacccaggagg

SEQ ID NO: 1182378 - RNA, 25 nt, Human
aagcagaagaaucacuugaacccag

SEQ ID NO: 1182379 - RNA, 24 nt, Human
aaucacuugaacccaggaggcgga

SEQ ID NO: 1182380 - RNA, 18 nt, Human
aaugucuuccuuuauccu

SEQ ID NO: 1182381 - RNA, 20 nt, Human
acaaaauacaaaggaaccca

SEQ ID NO: 1182382 - RNA, 22 nt, Human
acaaaauacaaaggaacccaac

SEQ ID NO: 1182383 - RNA, 19 nt, Human
acaggaagagagucucugg

SEQ ID NO: 1182384 - RNA, 21 nt, Human
accucauacaaauggcuuuau

SEQ ID NO: 1182385 - RNA, 22 nt, Human
acuuuuuuuuuauucuccuuuu

SEQ ID NO: 1182386 - RNA, 20 nt, Human
agcacacauacacagcugug

SEQ ID NO: 1182387 - RNA, 20 nt, Human
agcacuuugggaggcugaag

SEQ ID NO: 1182388 - RNA, 19 nt, Human
aggcggacguugcagugag

SEQ ID NO: 1182389 - RNA, 20 nt, Human
aguaugaagugugcaugccc

SEQ ID NO: 1182390 - RNA, 23 nt, Human
auaaccacugggaucggggacac

SEQ ID NO: 1182391 - RNA, 21 nt, Human
auaguaugaagugugcaugcc

SEQ ID NO: 1182392 - RNA, 23 nt, Human
aucaugccacugcacuccagcag

SEQ ID NO: 1182393 - RNA, 18 nt, Human
auccaugguuuaaucuuu

SEQ ID NO: 1182394 - RNA, 19 nt, Human
augccuguaaucccagcac

SEQ ID NO: 1182395 - RNA, 24 nt, Human
auuuuucaaaucuuuuucuuauug

SEQ ID NO: 1182396 - RNA, 25 nt, Human
caaaaguaauucacaaaauacaaag

SEQ ID NO: 1182397 - RNA, 22 nt, Human
caaaauacaaaggaacccaaca

SEQ ID NO: 1182398 - RNA, 20 nt, Human
caaaaugucaccagaugaaa

SEQ ID NO: 1182399 - RNA, 19 nt, Human
caaagcugaaaagugacaa

SEQ ID NO: 1182400 - RNA, 18 nt, Human
caagaugaaaaauggccc

SEQ ID NO: 1182401 - RNA, 20 nt, Human
cacacaaaguucaugaguag

SEQ ID NO: 1182402 - RNA, 23 nt, Human
caccagugcucauccuguuacag

SEQ ID NO: 1182403 - RNA, 22 nt, Human
caccauagucacauauuuuugu

SEQ ID NO: 1182404 - RNA, 22 nt, Human
cacugcacuccagcaguuccac

SEQ ID NO: 1182405 - RNA, 22 nt, Human
cagaagccuggucagggguccc

SEQ ID NO: 1182406 - RNA, 19 nt, Human
cagauccuccacacuuuuc

SEQ ID NO: 1182407 - RNA, 24 nt, Human
cagcacuuugggaggcugaagcag

SEQ ID NO: 1182408 - RNA, 24 nt, Human
caggggagacccauguuuaauuuu

SEQ ID NO: 1182409 - RNA, 20 nt, Human
caugccuguaaucccagcac

SEQ ID NO: 1182410 - RNA, 24 nt, Human
caugccuguaaucccagcacuuug

SEQ ID NO: 1182411 - RNA, 22 nt, Human
cauuaaucugacaagcuaaaau

SEQ ID NO: 1182412 - RNA, 19 nt, Human
ccacugcacuccagcagga

SEQ ID NO: 1182413 - RNA, 18 nt, Human
ccacugcacuccagcagu

SEQ ID NO: 1182414 - RNA, 22 nt, Human
cccaagaaacaaauaguaugaa

SEQ ID NO: 1182415 - RNA, 22 nt, Human
ccuguaaucccagcacuuuggg

SEQ ID NO: 1182416 - RNA, 25 nt, Human
ccuuaucugcaaacuaucagagcug

SEQ ID NO: 1182417 - RNA, 21 nt, Human
ccuuugcugcggcauuaggga

SEQ ID NO: 1182418 - RNA, 24 nt, Human
cgacaucaugccacugcacuccag

SEQ ID NO: 1182419 - RNA, 24 nt, Human
cuaaaaaaugaaaaaaaauuccua

SEQ ID NO: 1182420 - RNA, 18 nt, Human
cucaagaugaaaaauggc

SEQ ID NO: 1182421 - RNA, 20 nt, Human
cucaagaugaaaaauggccc

SEQ ID NO: 1182422 - RNA, 23 nt, Human
cucaugccuguaaucccagcacu

SEQ ID NO: 1182423 - RNA, 24 nt, Human
cucaugccuguaaucccagcacuu

SEQ ID NO: 1182424 - RNA, 20 nt, Human
cuccagcaguuccacauggc

SEQ ID NO: 1182425 - RNA, 23 nt, Human
cucgggcacaccagcuucugccc

SEQ ID NO: 1182426 - RNA, 22 nt, Human
cugcaaacuaucagagcugcag

SEQ ID NO: 1182427 - RNA, 23 nt, Human
cugcuccugaccucauacaaaug

SEQ ID NO: 1182428 - RNA, 23 nt, Human
cuggacacuuggauauuauauuc

SEQ ID NO: 1182429 - RNA, 21 nt, Human
cuggccaccauacgaagggaa

SEQ ID NO: 1182430 - RNA, 21 nt, Human
cuuagcugguagcuggggguc

SEQ ID NO: 1182431 - RNA, 21 nt, Human
cuuucaaugcuugcuggacac

SEQ ID NO: 1182432 - RNA, 22 nt, Human
gaaagucuugcuucuguaaggg

SEQ ID NO: 1182433 - RNA, 18 nt, Human
gaugccuccaaaugcuag

SEQ ID NO: 1182434 - RNA, 24 nt, Human
gcaguuccacauggcugggaggcc

SEQ ID NO: 1182435 - RNA, 18 nt, Human
ggacguugcagugagccg

SEQ ID NO: 1182436 - RNA, 24 nt, Human
ggacguugcagugagccgacauca

SEQ ID NO: 1182437 - RNA, 21 nt, Human
ggcucaugccuguaaucccag

SEQ ID NO: 1182438 - RNA, 23 nt, Human
ggcuggguuugguggcucaugcc

SEQ ID NO: 1182439 - RNA, 23 nt, Human
gguuugguggcucaugccuguaa

SEQ ID NO: 1182440 - RNA, 19 nt, Human
guaugaagugugcaugccc

SEQ ID NO: 1182441 - RNA, 23 nt, Human
guggcucaugccuguaaucccag

SEQ ID NO: 1182442 - RNA, 24 nt, Human
guugcagugagccgacaucaugcc

SEQ ID NO: 1182443 - RNA, 20 nt, Human
uaaaauacaacuucugggcu

SEQ ID NO: 1182444 - RNA, 22 nt, Human
uaauuuuuugaaugucuuccuu

SEQ ID NO: 1182445 - RNA, 21 nt, Human
uacacagcugugaaaacacca

SEQ ID NO: 1182446 - RNA, 22 nt, Human
uacacagcugugaaaacaccac

SEQ ID NO: 1182447 - RNA, 25 nt, Human
uacagaacauguccagcacucucaa

SEQ ID NO: 1182448 - RNA, 21 nt, Human
uaguugccuccucuucuuuuu

SEQ ID NO: 1182449 - RNA, 22 nt, Human
uaucaacauuaaucugacaagc

SEQ ID NO: 1182450 - RNA, 19 nt, Human
uaugcacacaaaguucaug

SEQ ID NO: 1182451 - RNA, 23 nt, Human
uauuucgaccucuaacucucagc

SEQ ID NO: 1182452 - RNA, 22 nt, Human
ucaugucccucagcucucucag

SEQ ID NO: 1182453 - RNA, 18 nt, Human
uccaugguuuaaucuuuc

SEQ ID NO: 1182454 - RNA, 21 nt, Human
ucucaggucgugcccgaugcu

SEQ ID NO: 1182455 - RNA, 21 nt, Human
ucugcaaacuaucagagcugc

SEQ ID NO: 1182456 - RNA, 18 nt, Human
ucugcauuuaaauuuugu

SEQ ID NO: 1182457 - RNA, 21 nt, Human
ucuuccagucacugacucuag

SEQ ID NO: 1182458 - RNA, 18 nt, Human
ugaaaaauggcccagcau

SEQ ID NO: 1182459 - RNA, 19 nt, Human
ugaaaagugacaaacagug

SEQ ID NO: 1182460 - RNA, 24 nt, Human
ugaaaagugacaaacagugcuuua

SEQ ID NO: 1182461 - RNA, 20 nt, Human
ugaagcagaagaaucacuug

SEQ ID NO: 1182462 - RNA, 24 nt, Human
ugaagcagaagaaucacuugaacc

SEQ ID NO: 1182463 - RNA, 20 nt, Human
ugaaugucuuccuuuauccu

SEQ ID NO: 1182464 - RNA, 22 nt, Human
ugaccaaaaacuuuuuuaugau

SEQ ID NO: 1182465 - RNA, 19 nt, Human
ugagacuuacucacuacca

SEQ ID NO: 1182466 - RNA, 20 nt, Human
ugaggaaagugauuugaucc

SEQ ID NO: 1182467 - RNA, 22 nt, Human
ugauuugauccaucaucuguca

SEQ ID NO: 1182468 - RNA, 24 nt, Human
ugccuccaaaugcuaggcaauccu

SEQ ID NO: 1182469 - RNA, 23 nt, Human
ugccuguaaucccagcacuuugg

SEQ ID NO: 1182470 - RNA, 23 nt, Human
ugccuguaaucccagcacuuugg

SEQ ID NO: 1182471 - RNA, 22 nt, Human
uggcucaugccuguaaucccag

SEQ ID NO: 1182472 - RNA, 24 nt, Human
uggcucaugccuguaaucccagca

SEQ ID NO: 1182473 - RNA, 24 nt, Human
ugggaggcugaagcagaagaauca

SEQ ID NO: 1182474 - RNA, 21 nt, Human
ugggcuggguuugguggcuca

SEQ ID NO: 1182475 - RNA, 24 nt, Human
ugguggcucaugccuguaauccca

SEQ ID NO: 1182476 - RNA, 20 nt, Human
uuaaaguugugaccaaaaac

SEQ ID NO: 1182477 - RNA, 24 nt, Human
uuaaccacuauuucgaccucuaac

SEQ ID NO: 1182478 - RNA, 21 nt, Human
uucugggcuggguuugguggc

SEQ ID NO: 1182479 - RNA, 22 nt, Human
uucuuccagucacugacucuag

SEQ ID NO: 1182480 - RNA, 20 nt, Human
uugagcacacauacacagcu

SEQ ID NO: 1182481 - RNA, 21 nt, Human
uugauccaucaucugucaaaa

SEQ ID NO: 1182482 - RNA, 25 nt, Human
uugggaggcugaagcagaagaauca

SEQ ID NO: 1182483 - RNA, 24 nt, Human
uugguuggauagcuuguuccaaga

SEQ ID NO: 1182484 - RNA, 26 nt, Human
uuguguccauccaugguuuaaucuuu

SEQ ID NO: 1182485 - RNA, 23 nt, Human
uuguuccaaguguagccguucuc

SEQ ID NO: 1182486 - RNA, 19 nt, Human
uuucugcugcaugcacaca

SEQ ID NO: 1182487 - RNA, 24 nt, Human
uuuuuuauucuccuuuugaugggg

SEQ ID NO: 1182488 - RNA, 24 nt, Human
uuuuuuuuuauucuccuuuugaug

SEQ ID NO: 1182489 - RNA, 26 nt, Human
aaaaacaccaacacccaaacacacaa

SEQ ID NO: 1182490 - RNA, 20 nt, Human
aaaacaccaacacccaaaca

SEQ ID NO: 1182491 - RNA, 23 nt, Human
aaaacaccaacacccaaacacac

SEQ ID NO: 1182492 - RNA, 19 nt, Human
aacaccaacacccaaacac

SEQ ID NO: 1182493 - RNA, 24 nt, Human
aagaagcugagugaugaggcuggg

SEQ ID NO: 1182494 - RNA, 20 nt, Human
aagcgauugugcaggaggaa

SEQ ID NO: 1182495 - RNA, 22 nt, Human
auagaaagcaaauuuaaaaaca

SEQ ID NO: 1182496 - RNA, 21 nt, Human
caaacacacaagacugcacac

SEQ ID NO: 1182497 - RNA, 26 nt, Human
cacacaagaaaaagugcucaagaaac

SEQ ID NO: 1182498 - RNA, 20 nt, Human
cacccaaacacacaagacuu

SEQ ID NO: 1182499 - RNA, 21 nt, Human
cagcucaggacguacaaccga

SEQ ID NO: 1182500 - RNA, 23 nt, Human
cagcucaggacguacaaccgaug

SEQ ID NO: 1182501 - RNA, 21 nt, Human
caggcuaggguuaaagcugac

SEQ ID NO: 1182502 - RNA, 21 nt, Human
caguuuuguacuaggaagaag

SEQ ID NO: 1182503 - RNA, 24 nt, Human
caucccaaccagugcucagcugcu

SEQ ID NO: 1182504 - RNA, 23 nt, Human
ccaacacccaaacacacaagacu

SEQ ID NO: 1182505 - RNA, 22 nt, Human
cccacauccccucugaaggcca

SEQ ID NO: 1182506 - RNA, 22 nt, Human
cccagcccaaucaggcccuggc

SEQ ID NO: 1182507 - RNA, 22 nt, Human
cugaaggccaguguugucgcgc

SEQ ID NO: 1182508 - RNA, 21 nt, Human
gaagcugagugaugaggcugg

SEQ ID NO: 1182509 - RNA, 24 nt, Human
gaggcugggugaugggaucgcuug

SEQ ID NO: 1182510 - RNA, 23 nt, Human
gaugggaucgcuugacgggcugc

SEQ ID NO: 1182511 - RNA, 21 nt, Human
gcaaauuuaaaaacaccaaca

SEQ ID NO: 1182512 - RNA, 20 nt, Human
gcagcugagguucagagaac

SEQ ID NO: 1182513 - RNA, 20 nt, Human
gcugagugaugaggcugggu

SEQ ID NO: 1182514 - RNA, 19 nt, Human
gcugcaauguggccuugau

SEQ ID NO: 1182515 - RNA, 23 nt, Human
ggccaaggugaauucacucagca

SEQ ID NO: 1182516 - RNA, 22 nt, Human
gggaagaaacccacgaucaccc

SEQ ID NO: 1182517 - RNA, 18 nt, Human
ggugaugggaucgcuuga

SEQ ID NO: 1182518 - RNA, 20 nt, Human
guaacgacauggagagaggc

SEQ ID NO: 1182519 - RNA, 22 nt, Human
uaaaaacaccaacacccaaaca

SEQ ID NO: 1182520 - RNA, 22 nt, Human
uaaaaacaccaacacccaaaca

SEQ ID NO: 1182521 - RNA, 22 nt, Human
uagaaagcaaauuuaaaaacac

SEQ ID NO: 1182522 - RNA, 22 nt, Human
uaggaagaagcugagugaugag

SEQ ID NO: 1182523 - RNA, 26 nt, Human
uaggaagaagcugagugaugaggcug

SEQ ID NO: 1182524 - RNA, 18 nt, Human
ucacucagcaaacguuca

SEQ ID NO: 1182525 - RNA, 21 nt, Human
ucccugggugugcccgucucu

SEQ ID NO: 1182526 - RNA, 22 nt, Human
ucccugggugugcccgucucug

SEQ ID NO: 1182527 - RNA, 19 nt, Human
ugagugaugaggcugggug

SEQ ID NO: 1182528 - RNA, 20 nt, Human
ugagugaugaggcuggguga

SEQ ID NO: 1182529 - RNA, 18 nt, Human
ugaugaggcugggugaug

SEQ ID NO: 1182530 - RNA, 24 nt, Human
ugaugggaucgcuugacgggcugc

SEQ ID NO: 1182531 - RNA, 20 nt, Human
ugcacacaagaaaaagugcu

SEQ ID NO: 1182532 - RNA, 21 nt, Human
ugccaacuuuggaccaaacuc

SEQ ID NO: 1182533 - RNA, 18 nt, Human
uguacuaggaagaagcug

SEQ ID NO: 1182534 - RNA, 21 nt, Human
uuuacucccacauccccucug

SEQ ID NO: 1182535 - RNA, 18 nt, Human
aaaguucuucaaagccac

SEQ ID NO: 1182536 - RNA, 19 nt, Human
accaaauuucuuuauuuga

SEQ ID NO: 1182537 - RNA, 23 nt, Human
accaaggaaggcaccccacggcu

SEQ ID NO: 1182538 - RNA, 19 nt, Human
aucaucgcggucaaaguau

SEQ ID NO: 1182539 - RNA, 21 nt, Human
auguucccucuccucaugaga

SEQ ID NO: 1182540 - RNA, 19 nt, Human
cagcauguucccucuccuc

SEQ ID NO: 1182541 - RNA, 31 nt, Human
cccacggcuauggggaaauuagccugagacc

SEQ ID NO: 1182542 - RNA, 20 nt, Human
ccucugaguccugguuguag

SEQ ID NO: 1182543 - RNA, 19 nt, Human
cgcggucaaaguauaagac

SEQ ID NO: 1182544 - RNA, 27 nt, Human
cucagcauguucccucuccucaugaga

SEQ ID NO: 1182545 - RNA, 22 nt, Human
gaaggcaccccacggcuauggg

SEQ ID NO: 1182546 - RNA, 20 nt, Human
uacaaaucaaagaacuuaag

SEQ ID NO: 1182547 - RNA, 24 nt, Human
uacaacuuauagaaaagguaaagg

SEQ ID NO: 1182548 - RNA, 19 nt, Human
ucaaagccacaucaucgcg

SEQ ID NO: 1182549 - RNA, 24 nt, Human
ucagcauguucccucuccucauga

SEQ ID NO: 1182550 - RNA, 22 nt, Human
uccagguugauguggcgguuga

SEQ ID NO: 1182551 - RNA, 23 nt, Human
ugaccaaggaaggcaccccacgg

SEQ ID NO: 1182552 - RNA, 23 nt, Human
ugauggcggccucugaguccugg

SEQ ID NO: 1182553 - RNA, 19 nt, Human
uguggcgguugauggcggc

SEQ ID NO: 1182554 - RNA, 20 nt, Human
uuggcaaaguucuucaaagc

SEQ ID NO: 1182555 - RNA, 22 nt, Human
uuuggcaaaguucuucaaagcc

SEQ ID NO: 1182556 - RNA, 18 nt, Human
aaaaacuuaaaguuugga

SEQ ID NO: 1182557 - RNA, 21 nt, Human
aaaagaaaaacaaacaaaaag

SEQ ID NO: 1182558 - RNA, 29 nt, Human
aaaagaaaaacaaacaaaaagccauagaa

SEQ ID NO: 1182559 - RNA, 23 nt, Human
aaacaaaaagccauagaaaagau

SEQ ID NO: 1182560 - RNA, 21 nt, Human
aaagcauaaaaccuauaaaag

SEQ ID NO: 1182561 - RNA, 19 nt, Human
aagaaaaacaaacaaaaag

SEQ ID NO: 1182562 - RNA, 18 nt, Human
acaugcuaaagcauaaaa

SEQ ID NO: 1182563 - RNA, 19 nt, Human
auaaaaccuauaaaagugc

SEQ ID NO: 1182564 - RNA, 23 nt, Human
auaaaaccuauaaaagugcacuc

SEQ ID NO: 1182565 - RNA, 22 nt, Human
caaacaaaaagccauagaaaag

SEQ ID NO: 1182566 - RNA, 24 nt, Human
cacauaauguuuauauuguuaauu

SEQ ID NO: 1182567 - RNA, 26 nt, Human
cuuaaaagaaaaacaaacaaaaagcc

SEQ ID NO: 1182568 - RNA, 19 nt, Human
gaaaaacaaacaaaaagcc

SEQ ID NO: 1182569 - RNA, 22 nt, Human
gaaaaacuuaaaguuuggaccu

SEQ ID NO: 1182570 - RNA, 18 nt, Human
gccaugugggcugugcuc

SEQ ID NO: 1182571 - RNA, 21 nt, Human
gguagggccaugugggcugug

SEQ ID NO: 1182572 - RNA, 19 nt, Human
uaaaugaauagcuccaaua

SEQ ID NO: 1182573 - RNA, 24 nt, Human
ucccuuuugagcaaauucuuaaau

SEQ ID NO: 1182574 - RNA, 21 nt, Human
uggaagugguuuguugaucua

SEQ ID NO: 1182575 - RNA, 22 nt, Human
ugugcucuguugucuaaagcaa

SEQ ID NO: 1182576 - RNA, 28 nt, Human
uucaguguggggccauucuuaaaagaaa

SEQ ID NO: 1182577 - RNA, 23 nt, Human
uuggaguucucuaccucuucuga

SEQ ID NO: 1182578 - RNA, 23 nt, Human
ucccuuuaaguuacgacgggaau

SEQ ID NO: 1182579 - RNA, 23 nt, Human
aaaagcuaacauuuauguagcag

SEQ ID NO: 1182580 - RNA, 23 nt, Human
aaacauccaaggcugcugcagcu

SEQ ID NO: 1182581 - RNA, 22 nt, Human
aaagcaauagaucaccuggaac

SEQ ID NO: 1182582 - RNA, 23 nt, Human
aaccacgcagcauccugaacccc

SEQ ID NO: 1182583 - RNA, 20 nt, Human
aacccccucucugggcaagg

SEQ ID NO: 1182584 - RNA, 21 nt, Human
aacccccucucugggcaaggc

SEQ ID NO: 1182585 - RNA, 19 nt, Human
aaccccgcaaaacugguca

SEQ ID NO: 1182586 - RNA, 21 nt, Human
aagaauccagaacagguggug

SEQ ID NO: 1182587 - RNA, 21 nt, Human
aagcaauagaucaccuggaac

SEQ ID NO: 1182588 - RNA, 19 nt, Human
acagagcaccccuccaggg

SEQ ID NO: 1182589 - RNA, 22 nt, Human
acaggcaacaccugguuucugc

SEQ ID NO: 1182590 - RNA, 21 nt, Human
acaguccucucuccuccacuc

SEQ ID NO: 1182591 - RNA, 24 nt, Human
accccgcaaaacuggucagggagu

SEQ ID NO: 1182592 - RNA, 25 nt, Human
acccucacaaccacacuagggggua

SEQ ID NO: 1182593 - RNA, 19 nt, Human
acgcagcauccugaacccc

SEQ ID NO: 1182594 - RNA, 19 nt, Human
acgcagcauccugaacccc

SEQ ID NO: 1182595 - RNA, 23 nt, Human
acuccagugacuaauaaaagcua

SEQ ID NO: 1182596 - RNA, 23 nt, Human
acugaagccaggauuuaaaucca

SEQ ID NO: 1182597 - RNA, 18 nt, Human
agagagagcauuuucugu

SEQ ID NO: 1182598 - RNA, 21 nt, Human
agagaggaacugaaauagaua

SEQ ID NO: 1182599 - RNA, 23 nt, Human
agaucaccuggaaccacgcagca

SEQ ID NO: 1182600 - RNA, 25 nt, Human
agcaagacaaaaagagugggggcaa

SEQ ID NO: 1182601 - RNA, 19 nt, Human
agccagaauccauaaugug

SEQ ID NO: 1182602 - RNA, 20 nt, Human
agcuaacauuuauguagcac

SEQ ID NO: 1182603 - RNA, 22 nt, Human
agcucagacuugcguaggccaa

SEQ ID NO: 1182604 - RNA, 21 nt, Human
agcugcuuacgucacaguccg

SEQ ID NO: 1182605 - RNA, 23 nt, Human
aggauaaaucccaaauuccuguu

SEQ ID NO: 1182606 - RNA, 18 nt, Human
aguccggguggagagccu

SEQ ID NO: 1182607 - RNA, 19 nt, Human
aguccucucuccuccacuc

SEQ ID NO: 1182608 - RNA, 22 nt, Human
auccagaaacauccaaggcugc

SEQ ID NO: 1182609 - RNA, 19 nt, Human
auucccgggauccaguugu

SEQ ID NO: 1182610 - RNA, 20 nt, Human
caaaguuagcacccaaaagc

SEQ ID NO: 1182611 - RNA, 24 nt, Human
caaccagaaccagagcuccgugcc

SEQ ID NO: 1182612 - RNA, 18 nt, Human
caacccucacaaccacac

SEQ ID NO: 1182613 - RNA, 20 nt, Human
caacgucauccauaaacacu

SEQ ID NO: 1182614 - RNA, 22 nt, Human
cacagagcaccccuccaggucc

SEQ ID NO: 1182615 - RNA, 24 nt, Human
caccccuuccagcugugguacuuc

SEQ ID NO: 1182616 - RNA, 18 nt, Human
caccuggaaccacgcagc

SEQ ID NO: 1182617 - RNA, 23 nt, Human
caccuuuaacucaugaagauuuu

SEQ ID NO: 1182618 - RNA, 22 nt, Human
cagaaaaaaaggaaaagcagau

SEQ ID NO: 1182619 - RNA, 20 nt, Human
cagaaccagagcuccgugcc

SEQ ID NO: 1182620 - RNA, 19 nt, Human
cagaauccauaauguggaa

SEQ ID NO: 1182621 - RNA, 22 nt, Human
cagcugcauuuugaaccuagag

SEQ ID NO: 1182622 - RNA, 24 nt, Human
caggacucuucaaccagaaccaga

SEQ ID NO: 1182623 - RNA, 23 nt, Human
caggagccuuggagugcagggcu

SEQ ID NO: 1182624 - RNA, 22 nt, Human
caggcuucccaggauggggaca

SEQ ID NO: 1182625 - RNA, 21 nt, Human
caguccucucuccuccacucc

SEQ ID NO: 1182626 - RNA, 21 nt, Human
cagugacuaauaaaagcuaac

SEQ ID NO: 1182627 - RNA, 19 nt, Human
caucacaaugccagucucc

SEQ ID NO: 1182628 - RNA, 24 nt, Human
cauccucauugauccacaaauugu

SEQ ID NO: 1182629 - RNA, 19 nt, Human
caugcugagcgcagcaccc

SEQ ID NO: 1182630 - RNA, 24 nt, Human
ccaggauggggacauugacaagga

SEQ ID NO: 1182631 - RNA, 20 nt, Human
ccagguccucgaucuuggcu

SEQ ID NO: 1182632 - RNA, 21 nt, Human
ccagugacuaauaaaagcuaa

SEQ ID NO: 1182633 - RNA, 21 nt, Human
ccccucuccuuuccuccuucc

SEQ ID NO: 1182634 - RNA, 24 nt, Human
cccuccagguccucgaucuuggcu

SEQ ID NO: 1182635 - RNA, 21 nt, Human
cccucuccuuuccuccuuccu

SEQ ID NO: 1182636 - RNA, 20 nt, Human
ccuagagcucagacuugcgu

SEQ ID NO: 1182637 - RNA, 22 nt, Human
ccucaugcugagcgcagcaccc

SEQ ID NO: 1182638 - RNA, 25 nt, Human
ccucaugcugagcgcagcacccguu

SEQ ID NO: 1182639 - RNA, 24 nt, Human
ccuccuuccuuccaccucuggcca

SEQ ID NO: 1182640 - RNA, 24 nt, Human
ccucucugggcaaggcuuggaggc

SEQ ID NO: 1182641 - RNA, 24 nt, Human
ccuuuccuccuuccuuccaccucu

SEQ ID NO: 1182642 - RNA, 23 nt, Human
cuaaggcagagcuggaggagugg

SEQ ID NO: 1182643 - RNA, 23 nt, Human
cuccaaaagcuuccacuaccucc

SEQ ID NO: 1182644 - RNA, 22 nt, Human
cuccuuccuuccaccucuggcc

SEQ ID NO: 1182645 - RNA, 26 nt, Human
cucuccuuuccuccuuccuuccaccu

SEQ ID NO: 1182646 - RNA, 21 nt, Human
cugaagccaggauuuaaaucc

SEQ ID NO: 1182647 - RNA, 22 nt, Human
cugacaauguccuuaaaguccu

SEQ ID NO: 1182648 - RNA, 23 nt, Human
cuggaaguauggaggccccucuc

SEQ ID NO: 1182649 - RNA, 18 nt, Human
cugguguacgaugccagg

SEQ ID NO: 1182650 - RNA, 22 nt, Human
cuguaaaaauacaauccgauga

SEQ ID NO: 1182651 - RNA, 20 nt, Human
cuuuccuccuuccuuccacc

SEQ ID NO: 1182652 - RNA, 23 nt, Human
gaacagucagagccuaugccugu

SEQ ID NO: 1182653 - RNA, 19 nt, Human
gacuugcguaggccaauga

SEQ ID NO: 1182654 - RNA, 24 nt, Human
gagcgcagcacccguucgcacccc

SEQ ID NO: 1182655 - RNA, 22 nt, Human
gagcuccgugcccacccucuga

SEQ ID NO: 1182656 - RNA, 18 nt, Human
gagcuggaggaguggaac

SEQ ID NO: 1182657 - RNA, 20 nt, Human
gcaauagaucaccuggaacc

SEQ ID NO: 1182658 - RNA, 20 nt, Human
gccuccucugcaggcuuugc

SEQ ID NO: 1182659 - RNA, 21 nt, Human
gcgacuggggggcuugguggg

SEQ ID NO: 1182660 - RNA, 22 nt, Human
ggacucuucaaccagaaccaga

SEQ ID NO: 1182661 - RNA, 18 nt, Human
ggagcaaagauucaugga

SEQ ID NO: 1182662 - RNA, 24 nt, Human
ggaguauugccacuaagacuuaag

SEQ ID NO: 1182663 - RNA, 24 nt, Human
ggcauccucagagcaagacaaaaa

SEQ ID NO: 1182664 - RNA, 22 nt, Human
ggcugaugcuuuuggcagaaaa

SEQ ID NO: 1182665 - RNA, 22 nt, Human
gucccuucaagcccaggguggc

SEQ ID NO: 1182666 - RNA, 25 nt, Human
gucuauaugacagcgaaguccacca

SEQ ID NO: 1182667 - RNA, 23 nt, Human
uaacccccaguggggcucuggaa

SEQ ID NO: 1182668 - RNA, 23 nt, Human
uaauaagcacuuugaacauagau

SEQ ID NO: 1182669 - RNA, 22 nt, Human
uaccuguuccaagaauccagaa

SEQ ID NO: 1182670 - RNA, 24 nt, Human
uacgaugccaggagccuuggagug

SEQ ID NO: 1182671 - RNA, 22 nt, Human
uagaagggcaccuuuucugaua

SEQ ID NO: 1182672 - RNA, 21 nt, Human
uagauagaauagauuuuggcu

SEQ ID NO: 1182673 - RNA, 27 nt, Human
uagaucaccuggaaccacgcagcaucc

SEQ ID NO: 1182674 - RNA, 22 nt, Human
uaggcagugucacuuacacccc

SEQ ID NO: 1182675 - RNA, 21 nt, Human
uauggaggccccucuccuuuc

SEQ ID NO: 1182676 - RNA, 20 nt, Human
ucagaaaaaaaggaaaagca

SEQ ID NO: 1182677 - RNA, 23 nt, Human
ucagagauuuucauauagcacaa

SEQ ID NO: 1182678 - RNA, 22 nt, Human
uccaaaagcuuccacuaccucc

SEQ ID NO: 1182679 - RNA, 24 nt, Human
uccaagaauccagaacagcggacc

SEQ ID NO: 1182680 - RNA, 23 nt, Human
uccauaaacacugaagccaggau

SEQ ID NO: 1182681 - RNA, 22 nt, Human
uccguaaugagaacucugagac

SEQ ID NO: 1182682 - RNA, 23 nt, Human
ucugaacuuuaaacucgagaaag

SEQ ID NO: 1182683 - RNA, 21 nt, Human
ugaacauagaugaucucaacc

SEQ ID NO: 1182684 - RNA, 18 nt, Human
ugaagagcagugugagaa

SEQ ID NO: 1182685 - RNA, 21 nt, Human
ugaaggacgaucccauugcag

SEQ ID NO: 1182686 - RNA, 23 nt, Human
ugagcgcagcacccguucgcacc

SEQ ID NO: 1182687 - RNA, 21 nt, Human
ugauuuggggaggcaggagua

SEQ ID NO: 1182688 - RNA, 21 nt, Human
ugcaggcuuugcuucuccuuu

SEQ ID NO: 1182689 - RNA, 24 nt, Human
ugccaggagccuuggagugcaggg

SEQ ID NO: 1182690 - RNA, 23 nt, Human
ugcugcagcugcuuacgucacag

SEQ ID NO: 1182691 - RNA, 26 nt, Human
uggaaccacgcagcauccugaacccc

SEQ ID NO: 1182692 - RNA, 21 nt, Human
uggccaccuguuacaaaagca

SEQ ID NO: 1182693 - RNA, 23 nt, Human
uggccagcgaggcagaacucaca

SEQ ID NO: 1182694 - RNA, 23 nt, Human
uggccuccucugcaggcuuugcu

SEQ ID NO: 1182695 - RNA, 18 nt, Human
uggggaggcaggaguagg

SEQ ID NO: 1182696 - RNA, 19 nt, Human
uggggggcuuggugggggg

SEQ ID NO: 1182697 - RNA, 22 nt, Human
ugguguacgaugccaggagccu

SEQ ID NO: 1182698 - RNA, 20 nt, Human
ugguuaagaccuccaaaagc

SEQ ID NO: 1182699 - RNA, 19 nt, Human
ugugagaaucagcaaucac

SEQ ID NO: 1182700 - RNA, 19 nt, Human
uguuccaagaauccagaac

SEQ ID NO: 1182701 - RNA, 18 nt, Human
uuacauguccccgucucu

SEQ ID NO: 1182702 - RNA, 18 nt, Human
uucagaaaaaaaggaaaa

SEQ ID NO: 1182703 - RNA, 25 nt, Human
uucagaccuagagcucagacuugcc

SEQ ID NO: 1182704 - RNA, 26 nt, Human
uucaugauccucugaacuuuaaacuc

SEQ ID NO: 1182705 - RNA, 18 nt, Human
uucccaggauggggacau

SEQ ID NO: 1182706 - RNA, 20 nt, Human
uugcuggugcugguguacga

SEQ ID NO: 1182707 - RNA, 19 nt, Human
uugcuucuccuuuugagau

SEQ ID NO: 1182708 - RNA, 22 nt, Human
uuuaaagcaguuuccacagagc

SEQ ID NO: 1182709 - RNA, 22 nt, Human
uuuacuaagaccuaugguucca

SEQ ID NO: 1182710 - RNA, 18 nt, Human
uuuccacagagcaccccu

SEQ ID NO: 1182711 - RNA, 18 nt, Human
uuuggcugaugcuuuugg

SEQ ID NO: 1182712 - RNA, 19 nt, Human
uuuucauauagcacaaagc

SEQ ID NO: 1182713 - RNA, 18 nt, Human
aaagcccuuugaccugcc

SEQ ID NO: 1182714 - RNA, 19 nt, Human
aaagugcuuggauuacaga

SEQ ID NO: 1182715 - RNA, 24 nt, Human
aaagugcuuggauuacagauguga

SEQ ID NO: 1182716 - RNA, 20 nt, Human
aacaguuuuagcuggguuug

SEQ ID NO: 1182717 - RNA, 24 nt, Human
aaccacaccgccauugaggcuuaa

SEQ ID NO: 1182718 - RNA, 22 nt, Human
aagagauggggucucacuaugu

SEQ ID NO: 1182719 - RNA, 21 nt, Human
aagagcuucuccauccucuga

SEQ ID NO: 1182720 - RNA, 18 nt, Human
aaugaagaaagaugauuc

SEQ ID NO: 1182721 - RNA, 27 nt, Human
acuauguugcccaggcuggagugaggu

SEQ ID NO: 1182722 - RNA, 21 nt, Human
agagacaaggucuugcuuucu

SEQ ID NO: 1182723 - RNA, 19 nt, Human
agcuggucucaaacuccug

SEQ ID NO: 1182724 - RNA, 24 nt, Human
agcuggucucaaacuccuggcuuc

SEQ ID NO: 1182725 - RNA, 18 nt, Human
aguagcugggacuauagg

SEQ ID NO: 1182726 - RNA, 18 nt, Human
auggggucucacuauguu

SEQ ID NO: 1182727 - RNA, 19 nt, Human
auggggucucacuauguug

SEQ ID NO: 1182728 - RNA, 21 nt, Human
caaacuccuggcuucaagcua

SEQ ID NO: 1182729 - RNA, 24 nt, Human
caaagugcuuggauuacagaugug

SEQ ID NO: 1182730 - RNA, 24 nt, Human
caacuccugugcucaagugauccu

SEQ ID NO: 1182731 - RNA, 20 nt, Human
caagugauccuuccaccuca

SEQ ID NO: 1182732 - RNA, 27 nt, Human
caagugauccuuccaccucagccuccu

SEQ ID NO: 1182733 - RNA, 20 nt, Human
cacacauaaaucuagacagc

SEQ ID NO: 1182734 - RNA, 22 nt, Human
cacauagaauucuuucucuuug

SEQ ID NO: 1182735 - RNA, 24 nt, Human
cacauagaauucuuucucuuugug

SEQ ID NO: 1182736 - RNA, 21 nt, Human
caccccaccuacaaccacacc

SEQ ID NO: 1182737 - RNA, 18 nt, Human
cacccccaccccaccuac

SEQ ID NO: 1182738 - RNA, 24 nt, Human
caccucagccuccugaguagcugg

SEQ ID NO: 1182739 - RNA, 18 nt, Human
cacuauguugcccaggcu

SEQ ID NO: 1182740 - RNA, 22 nt, Human
cacuauguugcccaggcuggag

SEQ ID NO: 1182741 - RNA, 24 nt, Human
cacuauguugcccaggcuggagug

SEQ ID NO: 1182742 - RNA, 20 nt, Human
cagccuccugaguagcuggg

SEQ ID NO: 1182743 - RNA, 25 nt, Human
cagccucgaccucccaaagugcuug

SEQ ID NO: 1182744 - RNA, 23 nt, Human
cagcucccucuucuagagcguuu

SEQ ID NO: 1182745 - RNA, 22 nt, Human
cauccucugaauccaaagcccu

SEQ ID NO: 1182746 - RNA, 21 nt, Human
cauggcucacuguauccucca

SEQ ID NO: 1182747 - RNA, 24 nt, Human
cauucugcaaauauuucaccagcc

SEQ ID NO: 1182748 - RNA, 22 nt, Human
ccaaagugcuuggauuacagau

SEQ ID NO: 1182749 - RNA, 24 nt, Human
ccaaagugcuuggauuacagaugu

SEQ ID NO: 1182750 - RNA, 24 nt, Human
ccacccccaccccaccuacaacca

SEQ ID NO: 1182751 - RNA, 30 nt, Human
ccacccccaccccaccuacaaccacacugu

SEQ ID NO: 1182752 - RNA, 23 nt, Human
ccaccucagccuccugaguagcu

SEQ ID NO: 1182753 - RNA, 25 nt, Human
cccaccccaccuacaaccacaccgc

SEQ ID NO: 1182754 - RNA, 19 nt, Human
cccaggcuggagugaggug

SEQ ID NO: 1182755 - RNA, 20 nt, Human
cccaggcuggagugaggugg

SEQ ID NO: 1182756 - RNA, 22 nt, Human
cccccaccccaccuacaaccac

SEQ ID NO: 1182757 - RNA, 18 nt, Human
ccuacaaccacaccgcca

SEQ ID NO: 1182758 - RNA, 24 nt, Human
ccuacaaccacaccgccauugagg

SEQ ID NO: 1182759 - RNA, 25 nt, Human
ccuacaaccacaccgccauugaggc

SEQ ID NO: 1182760 - RNA, 19 nt, Human
ccugaguagcugggacuau

SEQ ID NO: 1182761 - RNA, 24 nt, Human
ccugaguagcugggacuauaggug

SEQ ID NO: 1182762 - RNA, 21 nt, Human
ccuguaccucaccuccacuua

SEQ ID NO: 1182763 - RNA, 20 nt, Human
ccugugcucaagugauccuu

SEQ ID NO: 1182764 - RNA, 24 nt, Human
ccuuccaccucagccuccugagua

SEQ ID NO: 1182765 - RNA, 24 nt, Human
cucaagugauccuuccaccucagc

SEQ ID NO: 1182766 - RNA, 21 nt, Human
cucacuguauccuccaacucc

SEQ ID NO: 1182767 - RNA, 24 nt, Human
cucagccuccugaguagcugggac

SEQ ID NO: 1182768 - RNA, 18 nt, Human
cugcuggguguggccaug

SEQ ID NO: 1182769 - RNA, 19 nt, Human
gagaugaugagaacuggag

SEQ ID NO: 1182770 - RNA, 26 nt, Human
gaguagcugggacuauaggugcacac

SEQ ID NO: 1182771 - RNA, 18 nt, Human
gauuacagaugugaguca

SEQ ID NO: 1182772 - RNA, 22 nt, Human
gauuacagaugugagucacugc

SEQ ID NO: 1182773 - RNA, 23 nt, Human
gauuacagaugugagucacugca

SEQ ID NO: 1182774 - RNA, 19 nt, Human
gcaccuggccuggcuaugu

SEQ ID NO: 1182775 - RNA, 19 nt, Human
gccuccacccccaccccac

SEQ ID NO: 1182776 - RNA, 21 nt, Human
gccucuuguguuuggccucac

SEQ ID NO: 1182777 - RNA, 22 nt, Human
gcucaagugauccuuccaccuc

SEQ ID NO: 1182778 - RNA, 22 nt, Human
ggagaugaugagaacuggagcg

SEQ ID NO: 1182779 - RNA, 20 nt, Human
ggauuacagaugugagucac

SEQ ID NO: 1182780 - RNA, 22 nt, Human
ggcuggagugagguggugugau

SEQ ID NO: 1182781 - RNA, 22 nt, Human
ggggucucacuauguugcccag

SEQ ID NO: 1182782 - RNA, 22 nt, Human
gggucucacuauguugcccagg

SEQ ID NO: 1182783 - RNA, 22 nt, Human
ggguguggccaugugacuaagc

SEQ ID NO: 1182784 - RNA, 22 nt, Human
gguggugugaucauggcucacu

SEQ ID NO: 1182785 - RNA, 20 nt, Human
guaucaacaacuucaaugaa

SEQ ID NO: 1182786 - RNA, 24 nt, Human
gugauccuuccaccucagccuccu

SEQ ID NO: 1182787 - RNA, 23 nt, Human
uaaagagauggggucucacuaug

SEQ ID NO: 1182788 - RNA, 18 nt, Human
uaacaaaauuagaagcua

SEQ ID NO: 1182789 - RNA, 21 nt, Human
uaagcaacuuccuggugaugu

SEQ ID NO: 1182790 - RNA, 26 nt, Human
uacaaggggaagccuuguguugagga

SEQ ID NO: 1182791 - RNA, 21 nt, Human
uacacaaaacauuucuuguca

SEQ ID NO: 1182792 - RNA, 21 nt, Human
uacacaaugccuagcauauug

SEQ ID NO: 1182793 - RNA, 19 nt, Human
uagaagacauguaagcaac

SEQ ID NO: 1182794 - RNA, 18 nt, Human
uagagacaaggucuugcu

SEQ ID NO: 1182795 - RNA, 22 nt, Human
uagcuggguuugggguuaccua

SEQ ID NO: 1182796 - RNA, 23 nt, Human
uaggugcacaccaccacacaugg

SEQ ID NO: 1182797 - RNA, 18 nt, Human
uauguugcccaggcugga

SEQ ID NO: 1182798 - RNA, 22 nt, Human
uauguugcccaggcuggaguga

SEQ ID NO: 1182799 - RNA, 23 nt, Human
uauuacacaaugccuagcauauu

SEQ ID NO: 1182800 - RNA, 18 nt, Human
ucacugcaccuggccugg

SEQ ID NO: 1182801 - RNA, 18 nt, Human
ucacugcaccuggccugg

SEQ ID NO: 1182802 - RNA, 19 nt, Human
ucacugcaccuggccuggc

SEQ ID NO: 1182803 - RNA, 22 nt, Human
ucacugcaccuggccuggcuau

SEQ ID NO: 1182804 - RNA, 23 nt, Human
ucagccuccugaguagcugggac

SEQ ID NO: 1182805 - RNA, 21 nt, Human
ucauaacauccucucggcuga

SEQ ID NO: 1182806 - RNA, 24 nt, Human
uccaaagcccuuugaccugccucu

SEQ ID NO: 1182807 - RNA, 18 nt, Human
ucccaaagugcuuggauu

SEQ ID NO: 1182808 - RNA, 19 nt, Human
uccuccagccucgaccucc

SEQ ID NO: 1182809 - RNA, 24 nt, Human
uccugaguagcugggacuauaggu

SEQ ID NO: 1182810 - RNA, 22 nt, Human
ucucacuauguugcccaggcug

SEQ ID NO: 1182811 - RNA, 23 nt, Human
ucucacuauguugcccaggcugg

SEQ ID NO: 1182812 - RNA, 24 nt, Human
ucucacuauguugcccaggcugga

SEQ ID NO: 1182813 - RNA, 26 nt, Human
ucucacuauguugcccaggcuggagu

SEQ ID NO: 1182814 - RNA, 23 nt, Human
ucuugcuuucuuauccaagcugg

SEQ ID NO: 1182815 - RNA, 19 nt, Human
ucuuucugcuggguguggc

SEQ ID NO: 1182816 - RNA, 27 nt, Human
ucuuugcaggccaaagaggacaggggu

SEQ ID NO: 1182817 - RNA, 24 nt, Human
ugaaauaccuuuggugaacuguga

SEQ ID NO: 1182818 - RNA, 27 nt, Human
ugagaaaaauuaacugcauugugguag

SEQ ID NO: 1182819 - RNA, 22 nt, Human
ugcacaccaccacacaugguua

SEQ ID NO: 1182820 - RNA, 21 nt, Human
ugcccaggcuggagugaggug

SEQ ID NO: 1182821 - RNA, 24 nt, Human
ugcccaggcuggagugagguggug

SEQ ID NO: 1182822 - RNA, 21 nt, Human
ugcuggguguggccaugugac

SEQ ID NO: 1182823 - RNA, 23 nt, Human
uggacucuuucuuacagcagcuu

SEQ ID NO: 1182824 - RNA, 18 nt, Human
uggauuacagaugugagu

SEQ ID NO: 1182825 - RNA, 20 nt, Human
uggauuacagaugugaguca

SEQ ID NO: 1182826 - RNA, 23 nt, Human
uggauuacagaugugagucacug

SEQ ID NO: 1182827 - RNA, 24 nt, Human
uggcucacuguauccuccaacucc

SEQ ID NO: 1182828 - RNA, 20 nt, Human
uggcuucaagcuauccucca

SEQ ID NO: 1182829 - RNA, 24 nt, Human
ugggacuauaggugcacaccacca

SEQ ID NO: 1182830 - RNA, 24 nt, Human
uggggucucacuauguugcccagg

SEQ ID NO: 1182831 - RNA, 23 nt, Human
uggugugaucauggcucacugua

SEQ ID NO: 1182832 - RNA, 21 nt, Human
uguauacaugaaugaauuaua

SEQ ID NO: 1182833 - RNA, 22 nt, Human
uuaaauaaccauaucuaaaaac

SEQ ID NO: 1182834 - RNA, 18 nt, Human
uucccaauaaauguguug

SEQ ID NO: 1182835 - RNA, 21 nt, Human
uugcccaggcuggagugaggu

SEQ ID NO: 1182836 - RNA, 22 nt, Human
uuggauuacagaugugagucac

SEQ ID NO: 1182837 - RNA, 24 nt, Human
uuggauuacagaugugagucacug

SEQ ID NO: 1182838 - RNA, 23 nt, Human
uuguuuuguuuuuuaaagagaug

SEQ ID NO: 1182839 - RNA, 23 nt, Human
uuuccuagaguucuuucugcugg

SEQ ID NO: 1182840 - RNA, 21 nt, Human
uuucuuacagcagcuuagccc

SEQ ID NO: 1182841 - RNA, 20 nt, Human
uuuguagagacaaggucuug

SEQ ID NO: 1182842 - RNA, 19 nt, Human
uuuucagaagcggaggaca

SEQ ID NO: 1182843 - RNA, 26 nt, Human
uuuuguuuuuuaaagagauggggucu

SEQ ID NO: 1182844 - RNA, 25 nt, Human
aaaaaacaaaaccauuaguucuuuc

SEQ ID NO: 1182845 - RNA, 19 nt, Human
aaaaaugcaaaaagaacau

SEQ ID NO: 1182846 - RNA, 23 nt, Human
aaaacaaaaccaccaacaaaaac

SEQ ID NO: 1182847 - RNA, 22 nt, Human
aaaacaaauaaauauaagauca

SEQ ID NO: 1182848 - RNA, 20 nt, Human
aaaagaggccuucaaacaua

SEQ ID NO: 1182849 - RNA, 23 nt, Human
aaacaaauaaauauaagaucaaa

SEQ ID NO: 1182850 - RNA, 19 nt, Human
aaaccaccaacaaaaacua

SEQ ID NO: 1182851 - RNA, 18 nt, Human
aaaccucagagagaacga

SEQ ID NO: 1182852 - RNA, 19 nt, Human
aaauagaugcuaacaauac

SEQ ID NO: 1182853 - RNA, 21 nt, Human
aacaaaaccaccaacaaaaac

SEQ ID NO: 1182854 - RNA, 20 nt, Human
aacugugcgcuccugcaagc

SEQ ID NO: 1182855 - RNA, 20 nt, Human
aagaagcaaaaagaaucaca

SEQ ID NO: 1182856 - RNA, 28 nt, Human
aagagaaaauaccaagaagcaaaaagaa

SEQ ID NO: 1182857 - RNA, 23 nt, Human
aagcaaagcaguuuacaaaaaga

SEQ ID NO: 1182858 - RNA, 20 nt, Human
aagcaagacucugcaagcug

SEQ ID NO: 1182859 - RNA, 21 nt, Human
aagcacacgccgcgaaagcac

SEQ ID NO: 1182860 - RNA, 22 nt, Human
aagccacaugaaagagcaagcc

SEQ ID NO: 1182861 - RNA, 20 nt, Human
aagcugcaauauaguuugag

SEQ ID NO: 1182862 - RNA, 20 nt, Human
aaggacuuccuagcuucuuc

SEQ ID NO: 1182863 - RNA, 20 nt, Human
aaguuuucuucugaauauac

SEQ ID NO: 1182864 - RNA, 18 nt, Human
aauacuaaaauaagccaa

SEQ ID NO: 1182865 - RNA, 22 nt, Human
aaugaaaacaaaaccaccaaca

SEQ ID NO: 1182866 - RNA, 19 nt, Human
acacacagaccgcgaagaa

SEQ ID NO: 1182867 - RNA, 20 nt, Human
acacagaccgcgaagaagcc

SEQ ID NO: 1182868 - RNA, 22 nt, Human
acacagaccgcgaagaagccau

SEQ ID NO: 1182869 - RNA, 19 nt, Human
accaccaacaaaaacuaau

SEQ ID NO: 1182870 - RNA, 22 nt, Human
accgcgaagaagccaucacgga

SEQ ID NO: 1182871 - RNA, 21 nt, Human
accuaaaagcaagacucugca

SEQ ID NO: 1182872 - RNA, 22 nt, Human
acuacaauuuccugacuuuacc

SEQ ID NO: 1182873 - RNA, 24 nt, Human
acuacaauuuccugacuuuaccca

SEQ ID NO: 1182874 - RNA, 24 nt, Human
agaaaugcuccauccauucuugcc

SEQ ID NO: 1182875 - RNA, 23 nt, Human
agaacaaacauuggaagccagga

SEQ ID NO: 1182876 - RNA, 23 nt, Human
agaacccucgcaggccucugccc

SEQ ID NO: 1182877 - RNA, 26 nt, Human
agagcucacucacaccccaacagcuu

SEQ ID NO: 1182878 - RNA, 22 nt, Human
agggccccggccaggccuacug

SEQ ID NO: 1182879 - RNA, 19 nt, Human
agguacuguugggaaaacc

SEQ ID NO: 1182880 - RNA, 22 nt, Human
agguacuguugggaaaaccuca

SEQ ID NO: 1182881 - RNA, 22 nt, Human
auaagauacuguuuuucuuuuu

SEQ ID NO: 1182882 - RNA, 22 nt, Human
auagauacaagagaaaauacca

SEQ ID NO: 1182883 - RNA, 24 nt, Human
augaaaacaaaaccaccaacaaaa

SEQ ID NO: 1182884 - RNA, 18 nt, Human
augugccauucuggagag

SEQ ID NO: 1182885 - RNA, 24 nt, Human
caaaaauaaaugaaaacaaaacca

SEQ ID NO: 1182886 - RNA, 24 nt, Human
caaaaauuauccuaaaaacaaaua

SEQ ID NO: 1182887 - RNA, 22 nt, Human
caaaaccaccaacaaaaacuaa

SEQ ID NO: 1182888 - RNA, 28 nt, Human
caaaaccaccaacaaaaacuggagaccc

SEQ ID NO: 1182889 - RNA, 24 nt, Human
caagaagcaaaaagaaucacagaa

SEQ ID NO: 1182890 - RNA, 22 nt, Human
caagcgcaaacgagaacccucg

SEQ ID NO: 1182891 - RNA, 18 nt, Human
cacagaccgcgaagaagc

SEQ ID NO: 1182892 - RNA, 22 nt, Human
cacggacccgcggucgcuuccu

SEQ ID NO: 1182893 - RNA, 24 nt, Human
cacuguuaacucagaaaugcucca

SEQ ID NO: 1182894 - RNA, 20 nt, Human
cagagaauuacagauaugga

SEQ ID NO: 1182895 - RNA, 19 nt, Human
caggccccgggccaaguac

SEQ ID NO: 1182896 - RNA, 23 nt, Human
caggccuacuggaccuccagugc

SEQ ID NO: 1182897 - RNA, 18 nt, Human
cagggccccggccaggcc

SEQ ID NO: 1182898 - RNA, 18 nt, Human
cagggccccggccaggcc

SEQ ID NO: 1182899 - RNA, 21 nt, Human
caguagaaaaaggauuuucug

SEQ ID NO: 1182900 - RNA, 25 nt, Human
cauaaaaggaaccauuaaucuuuaa

SEQ ID NO: 1182901 - RNA, 19 nt, Human
caugugccauucuggagag

SEQ ID NO: 1182902 - RNA, 24 nt, Human
ccaaauagaugcuaacaauacuaa

SEQ ID NO: 1182903 - RNA, 22 nt, Human
ccccggaccacagcccuaaccc

SEQ ID NO: 1182904 - RNA, 25 nt, Human
ccccggccaggccuacuggaccucc

SEQ ID NO: 1182905 - RNA, 22 nt, Human
cccgcaagcgcaaacgagaacc

SEQ ID NO: 1182906 - RNA, 18 nt, Human
cccggaccacagcccuaa

SEQ ID NO: 1182907 - RNA, 20 nt, Human
cccggaccacagcccuaacc

SEQ ID NO: 1182908 - RNA, 21 nt, Human
cccggaccacagcccuaaccc

SEQ ID NO: 1182909 - RNA, 20 nt, Human
cccggagccaugugccauuc

SEQ ID NO: 1182910 - RNA, 23 nt, Human
cccgggcacccucgccccucagg

SEQ ID NO: 1182911 - RNA, 20 nt, Human
cccucgugaacacacagacc

SEQ ID NO: 1182912 - RNA, 21 nt, Human
ccgcggucgcuuccucggccc

SEQ ID NO: 1182913 - RNA, 24 nt, Human
ccuaacccgcaagcgcaaacgaga

SEQ ID NO: 1182914 - RNA, 23 nt, Human
ccucagggccccggccaggccua

SEQ ID NO: 1182915 - RNA, 23 nt, Human
ccucgcaggccucugcccggccc

SEQ ID NO: 1182916 - RNA, 22 nt, Human
ccucgccccucagggccccggc

SEQ ID NO: 1182917 - RNA, 21 nt, Human
ccugcaagcacacgccgcgaa

SEQ ID NO: 1182918 - RNA, 22 nt, Human
cgccugaacugugcgcuccugc

SEQ ID NO: 1182919 - RNA, 19 nt, Human
cgcugcccagggguucccc

SEQ ID NO: 1182920 - RNA, 26 nt, Human
cuaauucuagcagcaauucaauuagc

SEQ ID NO: 1182921 - RNA, 19 nt, Human
cucacaccccaacagcuug

SEQ ID NO: 1182922 - RNA, 18 nt, Human
cugauccugaagcagcca

SEQ ID NO: 1182923 - RNA, 18 nt, Human
cugcaagcugauccugaa

SEQ ID NO: 1182924 - RNA, 20 nt, Human
cugcaagcugauccugaagc

SEQ ID NO: 1182925 - RNA, 23 nt, Human
cugcggcguggcuuccgcgcucc

SEQ ID NO: 1182926 - RNA, 20 nt, Human
cuuaucccuagagaaaguaa

SEQ ID NO: 1182927 - RNA, 18 nt, Human
gaagcagccaguuacucg

SEQ ID NO: 1182928 - RNA, 19 nt, Human
gacccgcggucgcuuccuc

SEQ ID NO: 1182929 - RNA, 19 nt, Human
gagaacccucgcaggccuc

SEQ ID NO: 1182930 - RNA, 20 nt, Human
gagcaagccucaauacuagg

SEQ ID NO: 1182931 - RNA, 19 nt, Human
gaucuuuucguucaguggu

SEQ ID NO: 1182932 - RNA, 23 nt, Human
gcaaaaagaacauguacugcccu

SEQ ID NO: 1182933 - RNA, 18 nt, Human
gccgcggaagguguggga

SEQ ID NO: 1182934 - RNA, 18 nt, Human
gcuccugcaagcacacgc

SEQ ID NO: 1182935 - RNA, 27 nt, Human
gcuccugcaagcacacgccgcgaaagc

SEQ ID NO: 1182936 - RNA, 20 nt, Human
gggaagcccgggcacccucg

SEQ ID NO: 1182937 - RNA, 18 nt, Human
guaggcuuuccuacaaag

SEQ ID NO: 1182938 - RNA, 20 nt, Human
guggcuuccgcgcuccaccc

SEQ ID NO: 1182939 - RNA, 24 nt, Human
uaaaaauacuaaaauaagccaguc

SEQ ID NO: 1182940 - RNA, 23 nt, Human
uaaaauaagccaaauagaugcua

SEQ ID NO: 1182941 - RNA, 21 nt, Human
uaaagccacaugaaagagcaa

SEQ ID NO: 1182942 - RNA, 20 nt, Human
uaaauaauuaucaagccuuc

SEQ ID NO: 1182943 - RNA, 23 nt, Human
uaacaaaagaggccuucaaacau

SEQ ID NO: 1182944 - RNA, 20 nt, Human
uaacccgcaagcgcaaacga

SEQ ID NO: 1182945 - RNA, 23 nt, Human
uaauuaaaaaugcaaaaagaaca

SEQ ID NO: 1182946 - RNA, 23 nt, Human
uacaauaauuaaaaaugcaaaaa

SEQ ID NO: 1182947 - RNA, 21 nt, Human
uaccaagaagcaaaaagaauc

SEQ ID NO: 1182948 - RNA, 25 nt, Human
uaccaagaagcaaaaagaaucacag

SEQ ID NO: 1182949 - RNA, 18 nt, Human
uacccgagcccuaagugg

SEQ ID NO: 1182950 - RNA, 27 nt, Human
uagccaauuccgaauaccguggaacgu

SEQ ID NO: 1182951 - RNA, 21 nt, Human
uagcccaggcgcugcccacag

SEQ ID NO: 1182952 - RNA, 20 nt, Human
uaguguucuccauuccaaag

SEQ ID NO: 1182953 - RNA, 21 nt, Human
uaucaagccuucauauucuuu

SEQ ID NO: 1182954 - RNA, 23 nt, Human
ucaaaaauuauccuaaaaacaaa

SEQ ID NO: 1182955 - RNA, 25 nt, Human
ucaaaugaacacaucauuaucuaaa

SEQ ID NO: 1182956 - RNA, 23 nt, Human
ucagagguagcguuaggaugcaa

SEQ ID NO: 1182957 - RNA, 25 nt, Human
ucaguggucacucagcaguuucucu

SEQ ID NO: 1182958 - RNA, 24 nt, Human
uccauccauucuugccaucagaga

SEQ ID NO: 1182959 - RNA, 18 nt, Human
uccccggaccacagcccu

SEQ ID NO: 1182960 - RNA, 24 nt, Human
uccccggaccacagcccuaacccu

SEQ ID NO: 1182961 - RNA, 23 nt, Human
ucggcccggcucccuccagucgc

SEQ ID NO: 1182962 - RNA, 24 nt, Human
ucucgccccggccgagcagcugga

SEQ ID NO: 1182963 - RNA, 20 nt, Human
ucucugaauucucaagaagg

SEQ ID NO: 1182964 - RNA, 21 nt, Human
ucugcaagcugauccugaagc

SEQ ID NO: 1182965 - RNA, 26 nt, Human
ugaaaacaaaaccaccaacaaaaacu

SEQ ID NO: 1182966 - RNA, 21 nt, Human
ugaacacacagaccgcgaaga

SEQ ID NO: 1182967 - RNA, 18 nt, Human
ugacuguaauucugauga

SEQ ID NO: 1182968 - RNA, 20 nt, Human
ugagaaacugagaacaaaca

SEQ ID NO: 1182969 - RNA, 21 nt, Human
ugagaacaaacauuggaagcc

SEQ ID NO: 1182970 - RNA, 22 nt, Human
ugcaaaaagaacauguacugcc

SEQ ID NO: 1182971 - RNA, 22 nt, Human
ugcaaaaauaaaugaaaacaaa

SEQ ID NO: 1182972 - RNA, 23 nt, Human
ugcccagggguuccccggaccac

SEQ ID NO: 1182973 - RNA, 22 nt, Human
ugcccggcccucgugaacacac

SEQ ID NO: 1182974 - RNA, 23 nt, Human
ugccuuuauuccaaaaaacaaaa

SEQ ID NO: 1182975 - RNA, 25 nt, Human
ugcuaacuauucaguagaaaaagga

SEQ ID NO: 1182976 - RNA, 24 nt, Human
ugcuuuuuagcacugcaagccaau

SEQ ID NO: 1182977 - RNA, 21 nt, Human
uggcuuccgcgcuccaccccc

SEQ ID NO: 1182978 - RNA, 22 nt, Human
ugucccggcgccugaacugugc

SEQ ID NO: 1182979 - RNA, 23 nt, Human
uuaaaaauacuaaaauaagccaa

SEQ ID NO: 1182980 - RNA, 23 nt, Human
uuaaccacucaagaacauaauuc

SEQ ID NO: 1182981 - RNA, 22 nt, Human
uuacucaggaauuuuacaacag

SEQ ID NO: 1182982 - RNA, 23 nt, Human
uucaguagaaaaaggauuuucug

SEQ ID NO: 1182983 - RNA, 24 nt, Human
uuccaaaaaacaaaaccauuaguu

SEQ ID NO: 1182984 - RNA, 22 nt, Human
uuggaagccaggaaacaggcaa

SEQ ID NO: 1182985 - RNA, 20 nt, Human
uuuucugacuguaauucuga

SEQ ID NO: 1182986 - RNA, 18 nt, Human
uuuuguuugguuugugac

SEQ ID NO: 1182987 - RNA, 23 nt, Human
acugaagaugcacugaagauugg

SEQ ID NO: 1182988 - RNA, 18 nt, Human
auaugugugugugcgugu

SEQ ID NO: 1182989 - RNA, 29 nt, Human
auaugugugugugcgugugugugugugug

SEQ ID NO: 1182990 - RNA, 22 nt, Human
augugugugugcgugugugugu

SEQ ID NO: 1182991 - RNA, 23 nt, Human
cacccaaagauuuuuccuuugaa

SEQ ID NO: 1182992 - RNA, 24 nt, Human
ccaaagauuuuuccuuugaauccc

SEQ ID NO: 1182993 - RNA, 22 nt, Human
ccacagaaaacuguucuucacc

SEQ ID NO: 1182994 - RNA, 25 nt, Human
cccaaagauuuuuccuuugaauccu

SEQ ID NO: 1182995 - RNA, 24 nt, Human
cucuuugaacuuauccagauagua

SEQ ID NO: 1182996 - RNA, 22 nt, Human
cuuuuugaauugacugaagaug

SEQ ID NO: 1182997 - RNA, 24 nt, Human
gagugcuaaucagggaaucaccca

SEQ ID NO: 1182998 - RNA, 21 nt, Human
gauaugugugugugcgugugu

SEQ ID NO: 1182999 - RNA, 22 nt, Human
uaaaagaccaggucacauuucu

SEQ ID NO: 1183000 - RNA, 18 nt, Human
uacaaaguuucauaauua

SEQ ID NO: 1183001 - RNA, 20 nt, Human
uagauaauccuggucuaaga

SEQ ID NO: 1183002 - RNA, 18 nt, Human
uaugugugugugcgugug

SEQ ID NO: 1183003 - RNA, 24 nt, Human
ucacccaaagauuuuuccuuugaa

SEQ ID NO: 1183004 - RNA, 26 nt, Human
ucaccuaaagaucuuuuugaauugac

SEQ ID NO: 1183005 - RNA, 22 nt, Human
uccucugaagaaaaagccucau

SEQ ID NO: 1183006 - RNA, 25 nt, Human
uccuuugaauccccagauaauuuuc

SEQ ID NO: 1183007 - RNA, 23 nt, Human
ucuagagaaaaaucacuuuguau

SEQ ID NO: 1183008 - RNA, 18 nt, Human
ucugaagaaaaagccuca

SEQ ID NO: 1183009 - RNA, 23 nt, Human
ugaagaaaaagccucauuuuuau

SEQ ID NO: 1183010 - RNA, 21 nt, Human
ugcgugugugugugugugugu

SEQ ID NO: 1183011 - RNA, 23 nt, Human
ugcguguguguguguguguguaa

SEQ ID NO: 1183012 - RNA, 21 nt, Human
ugugauaugugugugugcgug

SEQ ID NO: 1183013 - RNA, 21 nt, Human
ugugcgugugugugugugugu

SEQ ID NO: 1183014 - RNA, 19 nt, Human
ugugugcgugugugugugu

SEQ ID NO: 1183015 - RNA, 25 nt, Human
ugugugugcgugugugugugugugu

SEQ ID NO: 1183016 - RNA, 25 nt, Human
ugugugugugcgugugugugugugu

SEQ ID NO: 1183017 - RNA, 19 nt, Human
uguguguguguaugagugu

SEQ ID NO: 1183018 - RNA, 21 nt, Human
uguguguguguguaugagugu

SEQ ID NO: 1183019 - RNA, 20 nt, Human
uguguguguguguguguaug

SEQ ID NO: 1183020 - RNA, 25 nt, Human
uguguguguguguguguaugagugu

SEQ ID NO: 1183021 - RNA, 18 nt, Human
uugccuguuugcuucuga

SEQ ID NO: 1183022 - RNA, 23 nt, Human
uuucuagagaaaaaucacuuugu

SEQ ID NO: 1183023 - RNA, 19 nt, Human
uuugccuguuugcuucuga

SEQ ID NO: 1183024 - RNA, 26 nt, Human
aaagucuuuccauguucaguccacuu

SEQ ID NO: 1183025 - RNA, 24 nt, Human
accacaauaaguacuuaagcugaa

SEQ ID NO: 1183026 - RNA, 23 nt, Human
cacuaccacaauaaguacuuaag

SEQ ID NO: 1183027 - RNA, 24 nt, Human
guucaguccacuuuggcucuggaa

SEQ ID NO: 1183028 - RNA, 23 nt, Human
uccacugugcaaagcaucuuguc

SEQ ID NO: 1183029 - RNA, 24 nt, Human
uccacuuuggcucuggaaccugga

SEQ ID NO: 1183030 - RNA, 24 nt, Human
ucccucuucaagccucaagcgcug

SEQ ID NO: 1183031 - RNA, 20 nt, Human
ucuccgacucccuccagucc

SEQ ID NO: 1183032 - RNA, 21 nt, Human
ugucucccucuucaagccuca

SEQ ID NO: 1183033 - RNA, 20 nt, Human
uucaagccucaagcgcugac

SEQ ID NO: 1183034 - RNA, 22 nt, Human
aucacagaaucaaagucacuuc

SEQ ID NO: 1183035 - RNA, 20 nt, Human
auggaaagacacauauggua

SEQ ID NO: 1183036 - RNA, 24 nt, Human
caagucauuagagucuuuggauuu

SEQ ID NO: 1183037 - RNA, 18 nt, Human
gagaagcaagagugaauc

SEQ ID NO: 1183038 - RNA, 19 nt, Human
uagagucuuuacaagucau

SEQ ID NO: 1183039 - RNA, 32 nt, Human
aagagcuccuggauggcugugcuauugccccc

SEQ ID NO: 1183040 - RNA, 27 nt, Human
acagcagccacggugaggucgggcuuc

SEQ ID NO: 1183041 - RNA, 23 nt, Human
augcgccccagaggcuggagcag

SEQ ID NO: 1183042 - RNA, 21 nt, Human
cagcgaggugcaaacgcgacg

SEQ ID NO: 1183043 - RNA, 23 nt, Human
ccagaggcuggagcagcgaggug

SEQ ID NO: 1183044 - RNA, 19 nt, Human
ccccagaggcuggagcagc

SEQ ID NO: 1183045 - RNA, 24 nt, Human
ccccagaggcuggagcagcgaggu

SEQ ID NO: 1183046 - RNA, 19 nt, Human
gacauuguuggggauccau

SEQ ID NO: 1183047 - RNA, 21 nt, Human
gccccagaggcuggagcagcg

SEQ ID NO: 1183048 - RNA, 20 nt, Human
gcgccccagaggcuggagca

SEQ ID NO: 1183049 - RNA, 19 nt, Human
ggccguggcgggggucaca

SEQ ID NO: 1183050 - RNA, 23 nt, Human
gugcuauugccaaugaaggugac

SEQ ID NO: 1183051 - RNA, 22 nt, Human
uaagcaucugcucaucgaccuc

SEQ ID NO: 1183052 - RNA, 21 nt, Human
ucugcucaucgaccuccuuca

SEQ ID NO: 1183053 - RNA, 21 nt, Human
ugagguaucggccguggcggg

SEQ ID NO: 1183054 - RNA, 19 nt, Human
uggaaugcgccccagaggc

SEQ ID NO: 1183055 - RNA, 18 nt, Human
ugucacagacggcugucu

SEQ ID NO: 1183056 - RNA, 32 nt, Human; identical to SEQ ID NO: 1183039

SEQ ID NO: 1183057 - RNA, 22 nt, Human
agggagaaaggagaggggaggg

SEQ ID NO: 1183058 - RNA, 23 nt, Human
augcgccccagaggcuggagcag

SEQ ID NO: 1183059 - RNA, 21 nt, Human
cagcgaggugcaaacgcgacg

SEQ ID NO: 1183060 - RNA, 23 nt, Human
ccagaggcuggagcagcgaggug

SEQ ID NO: 1183061 - RNA, 19 nt, Human
ccccagaggcuggagcagc

SEQ ID NO: 1183062 - RNA, 24 nt, Human
ccccagaggcuggagcagcgaggu

SEQ ID NO: 1183063 - RNA, 20 nt, Human
ccggggcugggaggcgggag

SEQ ID NO: 1183064 - RNA, 21 nt, Human
cggggcugggaggcgggagaa

SEQ ID NO: 1183065 - RNA, 24 nt, Human
cucucagccucggugaacuccauc

SEQ ID NO: 1183066 - RNA, 19 nt, Human
gacauuguuggggauccau

SEQ ID NO: 1183067 - RNA, 18 nt, Human
gagggcgcggagggaaag

SEQ ID NO: 1183068 - RNA, 21 nt, Human
gccccagaggcuggagcagcg

SEQ ID NO: 1183069 - RNA, 20 nt, Human
gcgccccagaggcuggagca

SEQ ID NO: 1183070 - RNA, 21 nt, Human
gcgccggggcugggaggcggg

SEQ ID NO: 1183071 - RNA, 19 nt, Human
ggagaaaggagaggggagg

SEQ ID NO: 1183072 - RNA, 23 nt, Human
ggagaggggagggcgcggaggga

SEQ ID NO: 1183073 - RNA, 22 nt, Human
ggcaggaagguucugagaggga

SEQ ID NO: 1183074 - RNA, 23 nt, Human
gugcuauugccaaugaaggugac

SEQ ID NO: 1183075 - RNA, 22 nt, Human
uaagcaucugcucaucgaccuc

SEQ ID NO: 1183076 - RNA, 21 nt, Human
ucauguugcucucagccucgg

SEQ ID NO: 1183077 - RNA, 19 nt, Human
uggaaugcgccccagaggc

SEQ ID NO: 1183078 - RNA, 27 nt, Human
ugggcggggcgcgcgugcgccggggcu

SEQ ID NO: 1183079 - RNA, 18 nt, Human
ugucacagacggcugucu

SEQ ID NO: 1183080 - RNA, 23 nt, Human
agcaucucuucaaauauagcucc

SEQ ID NO: 1183081 - RNA, 19 nt, Human
aucacaguucucuaaauca

SEQ ID NO: 1183082 - RNA, 22 nt, Human
aucacaguucucuaaaucagug

SEQ ID NO: 1183083 - RNA, 18 nt, Human
auuuucuacaucuuccuc

SEQ ID NO: 1183084 - RNA, 21 nt, Human
cagccccuaaaauucucaucu

SEQ ID NO: 1183085 - RNA, 19 nt, Human
caggaggcuuagaaucugc

SEQ ID NO: 1183086 - RNA, 18 nt, Human
uaauggugucagcaucuc

SEQ ID NO: 1183087 - RNA, 21 nt, Human
uacaguguuguuucuucuaga

SEQ ID NO: 1183088 - RNA, 27 nt, Human
ucagcaucucuucaaauauagcucccu

SEQ ID NO: 1183089 - RNA, 18 nt, Human
ucagugccugccagaguu

SEQ ID NO: 1183090 - RNA, 19 nt, Human
ucagugccugccagaguug

SEQ ID NO: 1183091 - RNA, 21 nt, Human
ugauaaggaaaacauuuucau

SEQ ID NO: 1183092 - RNA, 21 nt, Human
uuccuccagccccuaaaauuc

SEQ ID NO: 1183093 - RNA, 25 nt, Human
accauguugcccaagcuggucucaa

SEQ ID NO: 1183094 - RNA, 23 nt, Human
accucagccucccaaagugaugg

SEQ ID NO: 1183095 - RNA, 20 nt, Human
accucccaccucagccuccc

SEQ ID NO: 1183096 - RNA, 20 nt, Human
agcuggucucaaacuccugg

SEQ ID NO: 1183097 - RNA, 20 nt, Human
caacaagaaagccugagguc

SEQ ID NO: 1183098 - RNA, 24 nt, Human
caccauguugcccaagcuggucuc

SEQ ID NO: 1183099 - RNA, 27 nt, Human
caccauguugcccaagcuggucucaaa

SEQ ID NO: 1183100 - RNA, 21 nt, Human
caccugcagaaucaaggcccc

SEQ ID NO: 1183101 - RNA, 24 nt, Human
cauguugcccaagcuggucucaaa

SEQ ID NO: 1183102 - RNA, 25 nt, Human
ccaccugcagaaucaaggcccccgg

SEQ ID NO: 1183103 - RNA, 20 nt, Human
ccgccgagacagcgcgggga

SEQ ID NO: 1183104 - RNA, 23 nt, Human
ccucccaccucagccucccaaag

SEQ ID NO: 1183105 - RNA, 21 nt, Human
ccugggcuuaagcaaaccucc

SEQ ID NO: 1183106 - RNA, 24 nt, Human
ccugggcuuaagcaaaccucccac

SEQ ID NO: 1183107 - RNA, 19 nt, Human
cugguuuggcaacaagaaa

SEQ ID NO: 1183108 - RNA, 20 nt, Human
guccaggcaucgggagugcc

SEQ ID NO: 1183109 - RNA, 20 nt, Human
guggaggagcagaugcuaca

SEQ ID NO: 1183110 - RNA, 20 nt, Human
uccugggccgccgagacagc

SEQ ID NO: 1183111 - RNA, 21 nt, Human
uccugggcuuaagcaaaccuc

SEQ ID NO: 1183112 - RNA, 23 nt, Human
ucucaaacuccugggcuuaagca

SEQ ID NO: 1183113 - RNA, 18 nt, Human
uggaaucugugcacaggc

SEQ ID NO: 1183114 - RNA, 19 nt, Human
uuccagggucccucugugg

SEQ ID NO: 1183115 - RNA, 21 nt, Human
uuggccacgcucuguucagcc

SEQ ID NO: 1183116 - RNA, 21 nt, Human
aaggaggacaaacccaggcca

SEQ ID NO: 1183117 - RNA, 22 nt, Human
aauccccauccccuacacccac

SEQ ID NO: 1183118 - RNA, 22 nt, Human
aauccccauccccuacacccac

SEQ ID NO: 1183119 - RNA, 21 nt, Human
aauucccuccacauccacucc

SEQ ID NO: 1183120 - RNA, 19 nt, Human
acaaacccaggccaccaca

SEQ ID NO: 1183121 - RNA, 23 nt, Human
acacacacacacacacacacaca

SEQ ID NO: 1183122 - RNA, 23 nt, Human
acacacacacacacacacacaca

SEQ ID NO: 1183123 - RNA, 23 nt, Human
acacacacacacacacacacaca

SEQ ID NO: 1183124 - RNA, 25 nt, Human
acacacacacacacacacacacaac

SEQ ID NO: 1183125 - RNA, 31 nt, Human
acacacacacacacacacacacaacaugcag

SEQ ID NO: 1183126 - RNA, 19 nt, Human
acaugcaaggaggacaaac

SEQ ID NO: 1183127 - RNA, 20 nt, Human
accacuaucacuacuaucuc

SEQ ID NO: 1183128 - RNA, 20 nt, Human
agaacugaccuacagacacu

SEQ ID NO: 1183129 - RNA, 24 nt, Human
aggaaagaaagaggguaccugcag

SEQ ID NO: 1183130 - RNA, 20 nt, Human
aggcaggacgcgggcaugug

SEQ ID NO: 1183131 - RNA, 21 nt, Human
agugucucuuggggaccaugg

SEQ ID NO: 1183132 - RNA, 21 nt, Human
auaaaauguacuaucuuagcc

SEQ ID NO: 1183133 - RNA, 23 nt, Human
auagugucucuuggggaccaugg

SEQ ID NO: 1183134 - RNA, 19 nt, Human
caacugcccaucccccagc

SEQ ID NO: 1183135 - RNA, 19 nt, Human
caagcaauccccauccccu

SEQ ID NO: 1183136 - RNA, 26 nt, Human
caagcaauccccauccccuacaccca

SEQ ID NO: 1183137 - RNA, 19 nt, Human
caaggaggacaaacccagg

SEQ ID NO: 1183138 - RNA, 26 nt, Human
cacaaucaaauacuugcuuauaauuu

SEQ ID NO: 1183139 - RNA, 28 nt, Human
cacacacacacacaacaugcagguuuaa

SEQ ID NO: 1183140 - RNA, 29 nt, Human
cacacacacacacacaacaugcagguuua

SEQ ID NO: 1183141 - RNA, 20 nt, Human
cacacacacacacacacaca

SEQ ID NO: 1183142 - RNA, 20 nt, Human
cacacacacacacacacaca

SEQ ID NO: 1183143 - RNA, 20 nt, Human
cacacacacacacacacaca

SEQ ID NO: 1183144 - RNA, 20 nt, Human
cacacacacacacacacaca

SEQ ID NO: 1183145 - RNA, 20 nt, Human
cacacacacacacacacaca

SEQ ID NO: 1183146 - RNA, 22 nt, Human
cacacacacacacacacacaca

SEQ ID NO: 1183147 - RNA, 27 nt, Human
cacacacacacacacacacacaacaug

SEQ ID NO: 1183148 - RNA, 26 nt, Human
cacacacacacacacacacacacaca

SEQ ID NO: 1183149 - RNA, 26 nt, Human
cacacacacacacacacacacacaca

SEQ ID NO: 1183150 - RNA, 31 nt, Human
cacagacacacacacacacacacacacacag

SEQ ID NO: 1183151 - RNA, 21 nt, Human
cauuaugucuucuccaagcaa

SEQ ID NO: 1183152 - RNA, 22 nt, Human
cauuuccaucacaguuugaagg

SEQ ID NO: 1183153 - RNA, 21 nt, Human
cauuucgcccucuagcggcaa

SEQ ID NO: 1183154 - RNA, 19 nt, Human
cauuuugugaucacuuuuu

SEQ ID NO: 1183155 - RNA, 22 nt, Human
ccacugcaacugcccauccccc

SEQ ID NO: 1183156 - RNA, 22 nt, Human
cccagauaaacucacaaucaaa

SEQ ID NO: 1183157 - RNA, 19 nt, Human
cccccagcagucgccaggc

SEQ ID NO: 1183158 - RNA, 21 nt, Human
cccccagcagucgccaggcac

SEQ ID NO: 1183159 - RNA, 18 nt, Human
ccccuccagagucaccac

SEQ ID NO: 1183160 - RNA, 20 nt, Human
ccugcaguucaaaccucauu

SEQ ID NO: 1183161 - RNA, 22 nt, Human
cgccaggcacagggcuccggaa

SEQ ID NO: 1183162 - RNA, 18 nt, Human
cgggcauguggauucuag

SEQ ID NO: 1183163 - RNA, 22 nt, Human
cuaaagggaaagucacaggaaa

SEQ ID NO: 1183164 - RNA, 23 nt, Human
cuagaaguccuuagaagaacuga

SEQ ID NO: 1183165 - RNA, 21 nt, Human
cuccaagcaauccccaucccc

SEQ ID NO: 1183166 - RNA, 22 nt, Human
cucuacccagauaaacucacaa

SEQ ID NO: 1183167 - RNA, 18 nt, Human
cugcacggagaccacuuc

SEQ ID NO: 1183168 - RNA, 23 nt, Human
cuucaauucccuccacauccacu

SEQ ID NO: 1183169 - RNA, 20 nt, Human
gaaaaaaguauuacuagaaa

SEQ ID NO: 1183170 - RNA, 19 nt, Human
gagcugccccuccagaguc

SEQ ID NO: 1183171 - RNA, 22 nt, Human
gcgugugcacacguggguguac

SEQ ID NO: 1183172 - RNA, 23 nt, Human
ggaauggcugugcuugcuaaagg

SEQ ID NO: 1183173 - RNA, 21 nt, Human
ggacaaacccaggccaccaca

SEQ ID NO: 1183174 - RNA, 19 nt, Human
ggcaggcagauccacucag

SEQ ID NO: 1183175 - RNA, 28 nt, Human
gguguacacagacacacacacacacaca

SEQ ID NO: 1183176 - RNA, 33 nt, Human
guacacagacacacacacacacacacacacagu

SEQ ID NO: 1183177 - RNA, 22 nt, Human
gucucuuggggaccauggauuc

SEQ ID NO: 1183178 - RNA, 24 nt, Human
guguacacagacacacacacacac

SEQ ID NO: 1183179 - RNA, 27 nt, Human
guguacacagacacacacacacacaca

SEQ ID NO: 1183180 - RNA, 19 nt, Human
uaaguaccuucacuuuguu

SEQ ID NO: 1183181 - RNA, 23 nt, Human
uacaaggcacuucacuugguucu

SEQ ID NO: 1183182 - RNA, 20 nt, Human
uacuagaaaggaaccugaac

SEQ ID NO: 1183183 - RNA, 23 nt, Human
uagaaaggaaccugaacguacaa

SEQ ID NO: 1183184 - RNA, 25 nt, Human
uagaaaggaaccugaacguacaaua

SEQ ID NO: 1183185 - RNA, 19 nt, Human
uagaagaacugaccuacag

SEQ ID NO: 1183186 - RNA, 19 nt, Human
uagguuuucauguaauuau

SEQ ID NO: 1183187 - RNA, 24 nt, Human
uaugucuucuccaagcaaucccca

SEQ ID NO: 1183188 - RNA, 24 nt, Human
ucaaucaaaacuuuaaaaaaaaaa

SEQ ID NO: 1183189 - RNA, 21 nt, Human
ucaauucccuccacauccacu

SEQ ID NO: 1183190 - RNA, 23 nt, Human
uccaagcaauccccauccccuac

SEQ ID NO: 1183191 - RNA, 24 nt, Human
uccacauccacuccaucaaauucc

SEQ ID NO: 1183192 - RNA, 22 nt, Human
ucccccagcagucgccaggccg

SEQ ID NO: 1183193 - RNA, 22 nt, Human
ucccccuucugcacggagacca

SEQ ID NO: 1183194 - RNA, 19 nt, Human
ucccuccacauccacucca

SEQ ID NO: 1183195 - RNA, 20 nt, Human
ugaaugcuuuggacacucua

SEQ ID NO: 1183196 - RNA, 21 nt, Human
ugcuugucuugcgugugcaca

SEQ ID NO: 1183197 - RNA, 24 nt, Human
uggauucuagacucauuucgcccu

SEQ ID NO: 1183198 - RNA, 22 nt, Human
uguaccacuaucacuacuaucu

SEQ ID NO: 1183199 - RNA, 23 nt, Human
uguccgggagccagcacagcugc

SEQ ID NO: 1183200 - RNA, 24 nt, Human
ugugaaaugacugggauggcuuuu

SEQ ID NO: 1183201 - RNA, 19 nt, Human
uuagaagaacugaccuaca

SEQ ID NO: 1183202 - RNA, 21 nt, Human
uuaugucuucuccaagcaauc

SEQ ID NO: 1183203 - RNA, 24 nt, Human
uucacuuuguuguaccacuaucac

SEQ ID NO: 1183204 - RNA, 19 nt, Human
uugaaggcccuuguggcaa

SEQ ID NO: 1183205 - RNA, 23 nt, Human
uuuuaguccauagggagcacagg

SEQ ID NO: 1183206 - RNA, 21 nt, Human
aauucccuccacauccacucc

SEQ ID NO: 1183207 - RNA, 19 nt, Human
acaaacccaggccaccaca

SEQ ID NO: 1183208 - RNA, 26 nt, Human
acacacacacacaacaugcagguuua

SEQ ID NO: 1183209 - RNA, 22 nt, Human
acacacacacacacacaacaug

SEQ ID NO: 1183210 - RNA, 27 nt, Human
acacacacacacacacacaacaugcag

SEQ ID NO: 1183211 - RNA, 23 nt, Human
acacacacacacacacacacaca

SEQ ID NO: 1183212 - RNA, 23 nt, Human
acacacacacacacacacacaca

SEQ ID NO: 1183213 - RNA, 23 nt, Human
acacacacacacacacacacaca

SEQ ID NO: 1183214 - RNA, 23 nt, Human
acacacacacacacacacacaca

SEQ ID NO: 1183215 - RNA, 23 nt, Human
acacacacacacacacacacaca

SEQ ID NO: 1183216 - RNA, 23 nt, Human
acacacacacacacacacacaca

SEQ ID NO: 1183217 - RNA, 23 nt, Human
acacacacacacacacacacaca

SEQ ID NO: 1183218 - RNA, 19 nt, Human
acaugcaaggaggacaaac

SEQ ID NO: 1183219 - RNA, 24 nt, Human
acuucaauucccuccacauccacu

SEQ ID NO: 1183220 - RNA, 19 nt, Human
caaggaggacaaacccagg

SEQ ID NO: 1183221 - RNA, 22 nt, Human
caaggaggacaaacccaggcca

SEQ ID NO: 1183222 - RNA, 28 nt, Human
cacacacacacacaacaugcagguuuaa

SEQ ID NO: 1183223 - RNA, 20 nt, Human
cacacacacacacacacaca

SEQ ID NO: 1183224 - RNA, 20 nt, Human
cacacacacacacacacaca

SEQ ID NO: 1183225 - RNA, 20 nt, Human
cacacacacacacacacaca

SEQ ID NO: 1183226 - RNA, 20 nt, Human
cacacacacacacacacaca

SEQ ID NO: 1183227 - RNA, 20 nt, Human
cacacacacacacacacaca

SEQ ID NO: 1183228 - RNA, 20 nt, Human
cacacacacacacacacaca

SEQ ID NO: 1183229 - RNA, 20 nt, Human
cacacacacacacacacaca

SEQ ID NO: 1183230 - RNA, 20 nt, Human
cacacacacacacacacaca

SEQ ID NO: 1183231 - RNA, 22 nt, Human
cacacacacacacacacacaca

SEQ ID NO: 1183232 - RNA, 22 nt, Human
cacacacacacacacacacaca

SEQ ID NO: 1183233 - RNA, 27 nt, Human
cacacacacacacacacacacacaaca

SEQ ID NO: 1183234 - RNA, 26 nt, Human
cacacacacacacacacacacacaca

SEQ ID NO: 1183235 - RNA, 26 nt, Human
cacacacacacacacacacacacaca

SEQ ID NO: 1183236 - RNA, 26 nt, Human
cacacacacacacacacacacacaca

SEQ ID NO: 1183237 - RNA, 30 nt, Human
cguggguguacacacacacacacacacaca

SEQ ID NO: 1183238 - RNA, 22 nt, Human
gcgugugcacacguggguguac

SEQ ID NO: 1183239 - RNA, 21 nt, Human
ggacaaacccaggccaccaca

SEQ ID NO: 1183240 - RNA, 25 nt, Human
guguacacacacacacacacacagu

SEQ ID NO: 1183241 - RNA, 26 nt, Human
gugugcacacguggguguacacacac

SEQ ID NO: 1183242 - RNA, 20 nt, Human
uacacacacacacacacaca

SEQ ID NO: 1183243 - RNA, 25 nt, Human
uacacacacacacacacacacacac

SEQ ID NO: 1183244 - RNA, 24 nt, Human
ucaaucaaaacuuuaaaaaaaaaa

SEQ ID NO: 1183245 - RNA, 21 nt, Human
ucaauucccuccacauccacu

SEQ ID NO: 1183246 - RNA, 24 nt, Human
uccacauccacuccaucaaauucc

SEQ ID NO: 1183247 - RNA, 19 nt, Human
ucccuccacauccacucca

SEQ ID NO: 1183248 - RNA, 21 nt, Human
ugcuugucuugcgugugcaca

SEQ ID NO: 1183249 - RNA, 25 nt, Human
uguacacacacacacacacacacac

SEQ ID NO: 1183250 - RNA, 24 nt, Human
ugugaaaugacugggauggcuuuu

SEQ ID NO: 1183251 - RNA, 23 nt, Human
uuuuaguccauagggagcacagg

SEQ ID NO: 1183252 - RNA, 22 nt, Human
aaacucaggcugacaaaugcaa

SEQ ID NO: 1183253 - RNA, 23 nt, Human
aaacugcccucaugauucaauug

SEQ ID NO: 1183254 - RNA, 19 nt, Human
aaaguuucacaauucacag

SEQ ID NO: 1183255 - RNA, 23 nt, Human
aacaaucauggcggaaggcacca

SEQ ID NO: 1183256 - RNA, 21 nt, Human
aacuuugccuuccuguaccac

SEQ ID NO: 1183257 - RNA, 22 nt, Human
aaggcaccagggcagcaggaga

SEQ ID NO: 1183258 - RNA, 19 nt, Human
aagugaacuuguccugggu

SEQ ID NO: 1183259 - RNA, 20 nt, Human
aauauggugaaacuccaucu

SEQ ID NO: 1183260 - RNA, 21 nt, Human
aauauggugaaacuccaucuc

SEQ ID NO: 1183261 - RNA, 22 nt, Human
acugaguaaucuguaaagaaga

SEQ ID NO: 1183262 - RNA, 18 nt, Human
acuugcagagaauguugg

SEQ ID NO: 1183263 - RNA, 20 nt, Human
acuugcagagaauguugucc

SEQ ID NO: 1183264 - RNA, 24 nt, Human
agaaaacuuaaaaacaaguccuga

SEQ ID NO: 1183265 - RNA, 18 nt, Human
agacaggaggaucacuug

SEQ ID NO: 1183266 - RNA, 23 nt, Human
agacaggaggaucacuugagccc

SEQ ID NO: 1183267 - RNA, 24 nt, Human
agacaggaggaucacuugagccca

SEQ ID NO: 1183268 - RNA, 21 nt, Human
agauaaugggugccaagugaa

SEQ ID NO: 1183269 - RNA, 21 nt, Human
agccagguguggugguacgug

SEQ ID NO: 1183270 - RNA, 19 nt, Human
agccugggcaauaugguga

SEQ ID NO: 1183271 - RNA, 22 nt, Human
agccugggcaauauggugaaac

SEQ ID NO: 1183272 - RNA, 23 nt, Human
agccugggcaauauggugaaacu

SEQ ID NO: 1183273 - RNA, 24 nt, Human
agccugggcaauauggugaaacuc

SEQ ID NO: 1183274 - RNA, 24 nt, Human
aggaucacuugagcccaggaguuu

SEQ ID NO: 1183275 - RNA, 24 nt, Human
aggcacaguggcucaugcuuguaa

SEQ ID NO: 1183276 - RNA, 21 nt, Human
aggcagaugguccugagucca

SEQ ID NO: 1183277 - RNA, 22 nt, Human
aggugagauuuggguggggaca

SEQ ID NO: 1183278 - RNA, 22 nt, Human
agucuccauucacccucugagc

SEQ ID NO: 1183279 - RNA, 23 nt, Human
aguggcucaugcuuguaauucca

SEQ ID NO: 1183280 - RNA, 24 nt, Human
aguggcucaugcuuguaauuccag

SEQ ID NO: 1183281 - RNA, 21 nt, Human
auggcaguauggguggugggu

SEQ ID NO: 1183282 - RNA, 19 nt, Human
auggugaaacuccaucucu

SEQ ID NO: 1183283 - RNA, 32 nt, Human
auuacaacacaaggugagauuuggguggggaa

SEQ ID NO: 1183284 - RNA, 21 nt, Human
auuuggguggggacacagcca

SEQ ID NO: 1183285 - RNA, 18 nt, Human
caaguccugaaagaacua

SEQ ID NO: 1183286 - RNA, 24 nt, Human
caauauggugaaacuccaucucug

SEQ ID NO: 1183287 - RNA, 23 nt, Human
cacagaguaaaacucaggaauac

SEQ ID NO: 1183288 - RNA, 19 nt, Human
cacagcccaaacuguccga

SEQ ID NO: 1183289 - RNA, 22 nt, Human
cagaguaaaacucaggaauacc

SEQ ID NO: 1183290 - RNA, 18 nt, Human
cagcacucugggaggccg

SEQ ID NO: 1183291 - RNA, 20 nt, Human
cagcacucugggaggccgag

SEQ ID NO: 1183292 - RNA, 24 nt, Human
cagcuuuauuuggaagcucaccca

SEQ ID NO: 1183293 - RNA, 18 nt, Human
caggagagauaaugggug

SEQ ID NO: 1183294 - RNA, 24 nt, Human
caggagagauaaugggugccaagu

SEQ ID NO: 1183295 - RNA, 25 nt, Human
caguaugggugguggguaaguuccu

SEQ ID NO: 1183296 - RNA, 21 nt, Human
cauagccaauaugcucucccc

SEQ ID NO: 1183297 - RNA, 24 nt, Human
caugcuuguaauuccagcacucug

SEQ ID NO: 1183298 - RNA, 21 nt, Human
ccccacccacaugcaagauug

SEQ ID NO: 1183299 - RNA, 22 nt, Human
cccuguuccuccuuuuucucuu

SEQ ID NO: 1183300 - RNA, 25 nt, Human
ccgaucaaaucagacgguuacccaa

SEQ ID NO: 1183301 - RNA, 18 nt, Human
ccugaaagaacuaaaugg

SEQ ID NO: 1183302 - RNA, 26 nt, Human
ccugaaagaacuaaaugguuuccaag

SEQ ID NO: 1183303 - RNA, 24 nt, Human
ccugggcaauauggugaaacucca

SEQ ID NO: 1183304 - RNA, 26 nt, Human
ccuguaccacuuccuccacauagcca

SEQ ID NO: 1183305 - RNA, 20 nt, Human
cgagacaggaggaucacuug

SEQ ID NO: 1183306 - RNA, 24 nt, Human
cgagacaggaggaucacuugagcc

SEQ ID NO: 1183307 - RNA, 23 nt, Human
cguuagaacucacucacuaucac

SEQ ID NO: 1183308 - RNA, 25 nt, Human
cucacagccuuccugcaaggcaguu

SEQ ID NO: 1183309 - RNA, 23 nt, Human
cucaccccacuaugaagaaauac

SEQ ID NO: 1183310 - RNA, 21 nt, Human
cucauagccaauaugcucucc

SEQ ID NO: 1183311 - RNA, 23 nt, Human
cucaugcuuguaauuccagcacu

SEQ ID NO: 1183312 - RNA, 19 nt, Human
cucccccacccacaugcaa

SEQ ID NO: 1183313 - RNA, 20 nt, Human
cugaaagaacuaaaugguuu

SEQ ID NO: 1183314 - RNA, 23 nt, Human
cugcucugcacuccacccacacc

SEQ ID NO: 1183315 - RNA, 25 nt, Human
cuguaccacuuccuccacauagcca

SEQ ID NO: 1183316 - RNA, 18 nt, Human
gaauucucacagccuucc

SEQ ID NO: 1183317 - RNA, 20 nt, Human
gacaaggauccuaucacagc

SEQ ID NO: 1183318 - RNA, 19 nt, Human
gacucuaauacgccccucu

SEQ ID NO: 1183319 - RNA, 28 nt, Human
gagaacagcaugggggaaaccgguaccc

SEQ ID NO: 1183320 - RNA, 20 nt, Human
gagauugagggucaggcaca

SEQ ID NO: 1183321 - RNA, 24 nt, Human
gaucacuugagcccaggaguuuaa

SEQ ID NO: 1183322 - RNA, 22 nt, Human
gcccaggaguuuaagaccagcc

SEQ ID NO: 1183323 - RNA, 18 nt, Human
ggaagcucacccaauuac

SEQ ID NO: 1183324 - RNA, 22 nt, Human
ggaucacuugagcccaggaguu

SEQ ID NO: 1183325 - RNA, 23 nt, Human
ggaucacuugagcccaggaguuu

SEQ ID NO: 1183326 - RNA, 22 nt, Human
gggucaggcacaguggcucaug

SEQ ID NO: 1183327 - RNA, 21 nt, Human
gggugguggguaaguuccugu

SEQ ID NO: 1183328 - RNA, 20 nt, Human
ggucaaacccagagcccaag

SEQ ID NO: 1183329 - RNA, 22 nt, Human
guaggcccuaggcacugugccu

SEQ ID NO: 1183330 - RNA, 28 nt, Human
guccugaaagaacuaaaugguuuccaag

SEQ ID NO: 1183331 - RNA, 18 nt, Human
uaacaggacaaggauccu

SEQ ID NO: 1183332 - RNA, 26 nt, Human
uaaguggccccaaggauguaucccag

SEQ ID NO: 1183333 - RNA, 21 nt, Human
uacaccguuucauuacuaucu

SEQ ID NO: 1183334 - RNA, 18 nt, Human
uagaguagagugcuucuc

SEQ ID NO: 1183335 - RNA, 22 nt, Human
uagccacguuuuccaauuauau

SEQ ID NO: 1183336 - RNA, 25 nt, Human
uaggcacugugccuauccccugaag

SEQ ID NO: 1183337 - RNA, 19 nt, Human
uaggcccuaggcacugugc

SEQ ID NO: 1183338 - RNA, 19 nt, Human
uaggggucaaacccagagc

SEQ ID NO: 1183339 - RNA, 21 nt, Human
uaucaugagaacagcaugggg

SEQ ID NO: 1183340 - RNA, 24 nt, Human
ucacagaguaaaacucaggaauac

SEQ ID NO: 1183341 - RNA, 23 nt, Human
ucacuugagcccaggaguuuaag

SEQ ID NO: 1183342 - RNA, 21 nt, Human
ucaggcacaguggcucaugcu

SEQ ID NO: 1183343 - RNA, 22 nt, Human
ucaugcuuguaauuccagcacu

SEQ ID NO: 1183344 - RNA, 18 nt, Human
ucucucuggccacccugu

SEQ ID NO: 1183345 - RNA, 22 nt, Human
ucucugcaaaaauauacaaaaa

SEQ ID NO: 1183346 - RNA, 20 nt, Human
ucuuugacuuuuuuuccaau

SEQ ID NO: 1183347 - RNA, 18 nt, Human
ugaaacauuguuuuccag

SEQ ID NO: 1183348 - RNA, 25 nt, Human
ugaaagaacuaaaugguuuccaagu

SEQ ID NO: 1183349 - RNA, 27 nt, Human
ugaaaguacuguaggcccuaggcacug

SEQ ID NO: 1183350 - RNA, 22 nt, Human
ugagauuuggguggggacacag

SEQ ID NO: 1183351 - RNA, 23 nt, Human
ugagcccaggaguuuaagaccag

SEQ ID NO: 1183352 - RNA, 21 nt, Human
ugccaagugaaggaggaagcc

SEQ ID NO: 1183353 - RNA, 24 nt, Human
ugccaagugaaggaggaagccccc

SEQ ID NO: 1183354 - RNA, 18 nt, Human
ugcccugcucugcacucc

SEQ ID NO: 1183355 - RNA, 21 nt, Human
ugccuuugacaccuugauuuu

SEQ ID NO: 1183356 - RNA, 21 nt, Human
ugcucugcacuccacccacac

SEQ ID NO: 1183357 - RNA, 22 nt, Human
uggaaauuuuccaccacccuga

SEQ ID NO: 1183358 - RNA, 20 nt, Human
uggacugauacucagcagca

SEQ ID NO: 1183359 - RNA, 24 nt, Human
ugggaggccgagacaggaggauca

SEQ ID NO: 1183360 - RNA, 21 nt, Human
ugggccccagucaacuuugcc

SEQ ID NO: 1183361 - RNA, 24 nt, Human
uggugguacgugucuguaguccca

SEQ ID NO: 1183362 - RNA, 22 nt, Human
ugguuuccaaguaacuuaaaug

SEQ ID NO: 1183363 - RNA, 21 nt, Human
uuaagugcccugcucugcacu

SEQ ID NO: 1183364 - RNA, 24 nt, Human
uuagaacucacucacuaucaccgc

SEQ ID NO: 1183365 - RNA, 24 nt, Human
uucacagugcuucugaugccuuug

SEQ ID NO: 1183366 - RNA, 21 nt, Human
uucaugagccccugaaaguac

SEQ ID NO: 1183367 - RNA, 21 nt, Human
uucauggcaguauggguggug

SEQ ID NO: 1183368 - RNA, 22 nt, Human
uugagcccaggaguuuaagacc

SEQ ID NO: 1183369 - RNA, 24 nt, Human
uugcauuauguuucugugggcccc

SEQ ID NO: 1183370 - RNA, 19 nt, Human
uuucccaagaaaccagcuu

SEQ ID NO: 1183371 - RNA, 23 nt, Human
aaagucuuucauuagaagugcuu

SEQ ID NO: 1183372 - RNA, 18 nt, Human
aaaucuuccccaacacac

SEQ ID NO: 1183373 - RNA, 18 nt, Human
aacaauacuccucuccuc

SEQ ID NO: 1183374 - RNA, 21 nt, Human
aacccaggacguaugagucuu

SEQ ID NO: 1183375 - RNA, 18 nt, Human
aagcaucuuaagaggccu

SEQ ID NO: 1183376 - RNA, 19 nt, Human
aagccaguuccacauuuga

SEQ ID NO: 1183377 - RNA, 24 nt, Human
aaugagauccuuccaaugucuccc

SEQ ID NO: 1183378 - RNA, 22 nt, Human
accacguaaaagugaguuacag

SEQ ID NO: 1183379 - RNA, 21 nt, Human
acccuagagccuuuuggugga

SEQ ID NO: 1183380 - RNA, 19 nt, Human
acucuaucagccaagguga

SEQ ID NO: 1183381 - RNA, 21 nt, Human
agaaacaauacuccucuccuc

SEQ ID NO: 1183382 - RNA, 24 nt, Human
agacaggagcuccugagaaggcaa

SEQ ID NO: 1183383 - RNA, 22 nt, Human
agcagagagccacucuccccca

SEQ ID NO: 1183384 - RNA, 23 nt, Human
aggaagaaaaaguucaaaacuaa

SEQ ID NO: 1183385 - RNA, 23 nt, Human
aggcaggaacuuaacccuggagc

SEQ ID NO: 1183386 - RNA, 19 nt, Human
aggcaugaacuccaaagcc

SEQ ID NO: 1183387 - RNA, 21 nt, Human
agguacugggagucacaggcu

SEQ ID NO: 1183388 - RNA, 24 nt, Human
aguggguggcccugcugaaggcag

SEQ ID NO: 1183389 - RNA, 26 nt, Human
aucacacagaugcacuaaaugcauaa

SEQ ID NO: 1183390 - RNA, 20 nt, Human
augacuuugggugggaauuu

SEQ ID NO: 1183391 - RNA, 24 nt, Human
auguugcacacagaacaauaugug

SEQ ID NO: 1183392 - RNA, 23 nt, Human
caaaacuaagaaaacccacaaaa

SEQ ID NO: 1183393 - RNA, 24 nt, Human
caaaacuaagaaaacccacaaaac

SEQ ID NO: 1183394 - RNA, 19 nt, Human
caagaaacaauacuccucu

SEQ ID NO: 1183395 - RNA, 22 nt, Human
caagugacugcuguauaaaucc

SEQ ID NO: 1183396 - RNA, 21 nt, Human
caccccuaaaacccaggacgu

SEQ ID NO: 1183397 - RNA, 20 nt, Human
cagagccugagagggcaugg

SEQ ID NO: 1183398 - RNA, 22 nt, Human
cagcagagagccacucuccccc

SEQ ID NO: 1183399 - RNA, 24 nt, Human
cagcagagagccacucucccccac

SEQ ID NO: 1183400 - RNA, 23 nt, Human
ccaaugucucaaguaugcucucc

SEQ ID NO: 1183401 - RNA, 26 nt, Human
ccccacuagaggguggacuccuccca

SEQ ID NO: 1183402 - RNA, 24 nt, Human
cccuaagucccaagcacaagucuc

SEQ ID NO: 1183403 - RNA, 23 nt, Human
ccuggagcuacagagccugagag

SEQ ID NO: 1183404 - RNA, 23 nt, Human
cgcccaaaugaauaucuuccaaa

SEQ ID NO: 1183405 - RNA, 19 nt, Human
cggcaaggggcccugucuc

SEQ ID NO: 1183406 - RNA, 20 nt, Human
cggcaaggggcccugucucc

SEQ ID NO: 1183407 - RNA, 18 nt, Human
cuacaaugagauccuucc

SEQ ID NO: 1183408 - RNA, 21 nt, Human
cucauaacugcuaaggcaguc

SEQ ID NO: 1183409 - RNA, 24 nt, Human
cuccaagaaacaauacuccucucc

SEQ ID NO: 1183410 - RNA, 22 nt, Human
cugacccagacaguacaucccu

SEQ ID NO: 1183411 - RNA, 21 nt, Human
cuggcuugcaccccuaaaacc

SEQ ID NO: 1183412 - RNA, 23 nt, Human
gaaagaaaagacuuagaacccua

SEQ ID NO: 1183413 - RNA, 20 nt, Human
gaauccauguugcacacaga

SEQ ID NO: 1183414 - RNA, 19 nt, Human
gagcuacagagccugagag

SEQ ID NO: 1183415 - RNA, 24 nt, Human
gcaaaaaggauguaauaccaaaag

SEQ ID NO: 1183416 - RNA, 18 nt, Human
gcacuaaaugcauaagca

SEQ ID NO: 1183417 - RNA, 18 nt, Human
gccugagagggcauggaa

SEQ ID NO: 1183418 - RNA, 23 nt, Human
gcugaaggcaggaacuuaacccu

SEQ ID NO: 1183419 - RNA, 21 nt, Human
gcuuaugguaugacuuugggu

SEQ ID NO: 1183420 - RNA, 23 nt, Human
gguaaaaugcaaggacuggcuug

SEQ ID NO: 1183421 - RNA, 23 nt, Human
gugaguuacagccaaaaauaaug

SEQ ID NO: 1183422 - RNA, 20 nt, Human
uaaaacaaauaaguuaggaa

SEQ ID NO: 1183423 - RNA, 18 nt, Human
uaacccuggagcuacaga

SEQ ID NO: 1183424 - RNA, 28 nt, Human
uaagucccaagcacaagucucccaagga

SEQ ID NO: 1183425 - RNA, 24 nt, Human
uaccaaaagcccagaauugugccu

SEQ ID NO: 1183426 - RNA, 22 nt, Human
uacugggagaaugcaaagggaa

SEQ ID NO: 1183427 - RNA, 18 nt, Human
uacugggagucacaggcu

SEQ ID NO: 1183428 - RNA, 18 nt, Human
ucaaaacuaagaaaaccc

SEQ ID NO: 1183429 - RNA, 21 nt, Human
ucacugagcuuggcuaaaucu

SEQ ID NO: 1183430 - RNA, 23 nt, Human
ucacugagcuuggcuaaaucuuu

SEQ ID NO: 1183431 - RNA, 25 nt, Human
ucauuagaagugcuuucuguguuuu

SEQ ID NO: 1183432 - RNA, 22 nt, Human
uccaaugucucccagaaaaauc

SEQ ID NO: 1183433 - RNA, 22 nt, Human
ucccaagcacaagucucccaag

SEQ ID NO: 1183434 - RNA, 21 nt, Human
ucccugucgcccaaaugaaua

SEQ ID NO: 1183435 - RNA, 20 nt, Human
ucccuuuaagagauaaaggu

SEQ ID NO: 1183436 - RNA, 24 nt, Human
ucuaucagccaaggugaggcuguu

SEQ ID NO: 1183437 - RNA, 23 nt, Human
ucucugguaauuaugucuccaag

SEQ ID NO: 1183438 - RNA, 19 nt, Human
ugacucauaacugcuaagg

SEQ ID NO: 1183439 - RNA, 19 nt, Human
ugcacacagaacaauaugu

SEQ ID NO: 1183440 - RNA, 18 nt, Human
ugcaccccuaaaacccag

SEQ ID NO: 1183441 - RNA, 19 nt, Human
uggaaacgggccaccaaug

SEQ ID NO: 1183442 - RNA, 25 nt, Human
uggaagacaacgguaaggaagaaaa

SEQ ID NO: 1183443 - RNA, 21 nt, Human
uggagcuacagagccugagag

SEQ ID NO: 1183444 - RNA, 23 nt, Human
uggaguggcaggcaugaacucca

SEQ ID NO: 1183445 - RNA, 21 nt, Human
uggguggcccugcugaaggca

SEQ ID NO: 1183446 - RNA, 20 nt, Human
ugugccugcuuuggggcugg

SEQ ID NO: 1183447 - RNA, 24 nt, Human
uguuguguuguguuuuugggagac

SEQ ID NO: 1183448 - RNA, 20 nt, Human
uguuguguuuuugggagacc

SEQ ID NO: 1183449 - RNA, 21 nt, Human
uguuucaguggguggcccugc

SEQ ID NO: 1183450 - RNA, 23 nt, Human
uuaaaggaugacaguacgauguc

SEQ ID NO: 1183451 - RNA, 18 nt, Human
uucaaaacuaagaaaacc

SEQ ID NO: 1183452 - RNA, 19 nt, Human
uugcuggggggcucuggga

SEQ ID NO: 1183453 - RNA, 21 nt, Human
uugugccugcuuuggggcugg

SEQ ID NO: 1183454 - RNA, 19 nt, Human
uuucugauuuaguggcugu

SEQ ID NO: 1183455 - RNA, 19 nt, Human
uuuugggagacaggagcuc

SEQ ID NO: 1183456 - RNA, 18 nt, Human
uuuuuacauuacaaaagu

SEQ ID NO: 1183457 - RNA, 23 nt, Human
uuuuugggagacaggagcuccug

SEQ ID NO: 1183458 - RNA, 19 nt, Human
aaaccacccacagaguaga

SEQ ID NO: 1183459 - RNA, 22 nt, Human
aacacacauaccaccagcacaa

SEQ ID NO: 1183460 - RNA, 23 nt, Human
aaccguguccuacuuuuucuuaa

SEQ ID NO: 1183461 - RNA, 19 nt, Human
aagagaaaauguuuucucu

SEQ ID NO: 1183462 - RNA, 21 nt, Human
aagcagcauagauggauggac

SEQ ID NO: 1183463 - RNA, 23 nt, Human
aagcagcauagauggauggacuu

SEQ ID NO: 1183464 - RNA, 22 nt, Human
accuggcaggcgucagccaugg

SEQ ID NO: 1183465 - RNA, 20 nt, Human
accuuugccucugcuagaag

SEQ ID NO: 1183466 - RNA, 21 nt, Human
agcacaacuccucauguugac

SEQ ID NO: 1183467 - RNA, 22 nt, Human
agccagcccagccuccaacaca

SEQ ID NO: 1183468 - RNA, 23 nt, Human
aggaauuacggggaagcaguuac

SEQ ID NO: 1183469 - RNA, 22 nt, Human
aggcaaaugcccacacccaugc

SEQ ID NO: 1183470 - RNA, 23 nt, Human
agggagaacgcuuugcagcugcc

SEQ ID NO: 1183471 - RNA, 20 nt, Human
auacauucacaaaagccgcc

SEQ ID NO: 1183472 - RNA, 25 nt, Human
aucugaaaggggcauuacgugggag

SEQ ID NO: 1183473 - RNA, 21 nt, Human
augaaguaaaaaauaugcccc

SEQ ID NO: 1183474 - RNA, 19 nt, Human
auggggacugugauggcag

SEQ ID NO: 1183475 - RNA, 22 nt, Human
auucacaaaagccgccccccuc

SEQ ID NO: 1183476 - RNA, 24 nt, Human
caaaugcccacacccaugcgcaca

SEQ ID NO: 1183477 - RNA, 24 nt, Human
caacacacauaccaccagcacaac

SEQ ID NO: 1183478 - RNA, 19 nt, Human
cacacauaccaccagcaca

SEQ ID NO: 1183479 - RNA, 22 nt, Human
cacagaccuaauagacccagaa

SEQ ID NO: 1183480 - RNA, 20 nt, Human
cacagaguagaugaggaaag

SEQ ID NO: 1183481 - RNA, 19 nt, Human
cacccaugcgcacagaccu

SEQ ID NO: 1183482 - RNA, 22 nt, Human
cagcacaucagcgaaggguaca

SEQ ID NO: 1183483 - RNA, 19 nt, Human
cagcagaaaccuggcaggc

SEQ ID NO: 1183484 - RNA, 18 nt, Human
cauaaauaggccccaaau

SEQ ID NO: 1183485 - RNA, 19 nt, Human
cauagauuaucugcagcag

SEQ ID NO: 1183486 - RNA, 24 nt, Human
ccaacacacauaccaccagcacaa

SEQ ID NO: 1183487 - RNA, 26 nt, Human
ccagaacacucccacacacauuaaag

SEQ ID NO: 1183488 - RNA, 24 nt, Human
ccaugcgcacagaccuaauagacc

SEQ ID NO: 1183489 - RNA, 22 nt, Human
cccaaauacagaagggaagggc

SEQ ID NO: 1183490 - RNA, 21 nt, Human
cccacagaguagaugaggaaa

SEQ ID NO: 1183491 - RNA, 26 nt, Human
ccgaauaucucucuggcaaaagcucc

SEQ ID NO: 1183492 - RNA, 18 nt, Human
ccgccccccucccuuugg

SEQ ID NO: 1183493 - RNA, 22 nt, Human
ccucauacauucacaaaagccg

SEQ ID NO: 1183494 - RNA, 20 nt, Human
cucgugggcccugaaaccac

SEQ ID NO: 1183495 - RNA, 23 nt, Human
cugcagcagaaaccuggcaggcg

SEQ ID NO: 1183496 - RNA, 19 nt, Human
cugcccccagaagacucca

SEQ ID NO: 1183497 - RNA, 19 nt, Human
gcccagccuccaacacaca

SEQ ID NO: 1183498 - RNA, 21 nt, Human
gcuagaggggcucaaauaggu

SEQ ID NO: 1183499 - RNA, 18 nt, Human
gggaaggcaucuggaggu

SEQ ID NO: 1183500 - RNA, 18 nt, Human
gggaggcuccaucugucc

SEQ ID NO: 1183501 - RNA, 24 nt, Human
gguaacagaaguaacuuacaggaa

SEQ ID NO: 1183502 - RNA, 24 nt, Human
uaaagcuuucuggaacaagaguuu

SEQ ID NO: 1183503 - RNA, 22 nt, Human
uaaaugccuuccucuaaaugcu

SEQ ID NO: 1183504 - RNA, 23 nt, Human
uaagcucucagcuuaaagcaucu

SEQ ID NO: 1183505 - RNA, 25 nt, Human
uaaguaaugaaguaaaaaauaugcc

SEQ ID NO: 1183506 - RNA, 24 nt, Human
uacuaaagaguuaaaugcacucaa

SEQ ID NO: 1183507 - RNA, 23 nt, Human
uaggccccaaauacagaagggaa

SEQ ID NO: 1183508 - RNA, 23 nt, Human
ucacucggacaccucauuugagc

SEQ ID NO: 1183509 - RNA, 20 nt, Human
ucccuuugguaacagaaguu

SEQ ID NO: 1183510 - RNA, 20 nt, Human
uccucuaaaugcuagcauug

SEQ ID NO: 1183511 - RNA, 23 nt, Human
ucugcagcagaaaccuggcaggc

SEQ ID NO: 1183512 - RNA, 23 nt, Human
ugaaguaaaaaauaugccccucc

SEQ ID NO: 1183513 - RNA, 24 nt, Human
ugaaguaaaaaauaugccccuccc

SEQ ID NO: 1183514 - RNA, 20 nt, Human
ugaccuucacucggacaccu

SEQ ID NO: 1183515 - RNA, 21 nt, Human
ugacucgugggcccugaaacc

SEQ ID NO: 1183516 - RNA, 26 nt, Human
ugacucgugggcccugaaaccacccu

SEQ ID NO: 1183517 - RNA, 20 nt, Human
ugcccacacccaugcgcaca

SEQ ID NO: 1183518 - RNA, 22 nt, Human
ugccucaaccguguccuacuuu

SEQ ID NO: 1183519 - RNA, 18 nt, Human
ugcuagaaggucaaucuc

SEQ ID NO: 1183520 - RNA, 18 nt, Human
uggaacaagaguuuacau

SEQ ID NO: 1183521 - RNA, 18 nt, Human
uggcaggcgucagccaug

SEQ ID NO: 1183522 - RNA, 25 nt, Human
uggcaggcgucagccaugguaccug

SEQ ID NO: 1183523 - RNA, 22 nt, Human
uggcauaaauaggccccaaaua

SEQ ID NO: 1183524 - RNA, 23 nt, Human
uggcauaaauaggccccaaauac

SEQ ID NO: 1183525 - RNA, 21 nt, Human
ugggcacaccccuccuccgaa

SEQ ID NO: 1183526 - RNA, 19 nt, Human
ugugugcauaugggcacac

SEQ ID NO: 1183527 - RNA, 18 nt, Human
uuugccauuuucagccau

SEQ ID NO: 1183528 - RNA, 18 nt, Human
aaagggagcagcggcugc

SEQ ID NO: 1183529 - RNA, 23 nt, Human
aagcccaggauaggaagcaacgg

SEQ ID NO: 1183530 - RNA, 19 nt, Human
aagggcccaggaaucccag

SEQ ID NO: 1183531 - RNA, 22 nt, Human
acgcugcggacacacguucacc

SEQ ID NO: 1183532 - RNA, 23 nt, Human
acuccgaacuuucccccaacccc

SEQ ID NO: 1183533 - RNA, 22 nt, Human
agacgccccccacccccaacua

SEQ ID NO: 1183534 - RNA, 22 nt, Human
agaggaagacagacagggggcc

SEQ ID NO: 1183535 - RNA, 19 nt, Human
agcaacaagcaccggagcu

SEQ ID NO: 1183536 - RNA, 20 nt, Human
agcaccggagcuggagggac

SEQ ID NO: 1183537 - RNA, 23 nt, Human
aggaagacagacagggggccaga

SEQ ID NO: 1183538 - RNA, 23 nt, Human
aggaagagagggagaaagggagc

SEQ ID NO: 1183539 - RNA, 22 nt, Human
aggauucuuccaagcccaggau

SEQ ID NO: 1183540 - RNA, 20 nt, Human
agggagaaagggagcagcgg

SEQ ID NO: 1183541 - RNA, 21 nt, Human
agggggccagagggagacgcc

SEQ ID NO: 1183542 - RNA, 18 nt, Human
caacucuuuuccaaaggg

SEQ ID NO: 1183543 - RNA, 18 nt, Human
cagacaguggcaaaagag

SEQ ID NO: 1183544 - RNA, 18 nt, Human
cagccucgcagccuggcg

SEQ ID NO: 1183545 - RNA, 18 nt, Human
cagcgaggcugggcagag

SEQ ID NO: 1183546 - RNA, 21 nt, Human
cagcuggggcugcugccccuc

SEQ ID NO: 1183547 - RNA, 20 nt, Human
cauuucaccaacucuuuucc

SEQ ID NO: 1183548 - RNA, 22 nt, Human
cccccgcggcugcguagcgccc

SEQ ID NO: 1183549 - RNA, 18 nt, Human
cccucuguccccuuccuc

SEQ ID NO: 1183550 - RNA, 19 nt, Human
cccucuguccccuuccucc

SEQ ID NO: 1183551 - RNA, 22 nt, Human
ccgccagcuggggcugcugccc

SEQ ID NO: 1183552 - RNA, 22 nt, Human
ccgcgcuuccucccgccagcug

SEQ ID NO: 1183553 - RNA, 26 nt, Human
ccucagccagcucucgggggaggugg

SEQ ID NO: 1183554 - RNA, 21 nt, Human
ccuccucccccguccacagcc

SEQ ID NO: 1183555 - RNA, 22 nt, Human
ccucuguccccuuccuccuccc

SEQ ID NO: 1183556 - RNA, 20 nt, Human
ccuggcggcaacagcucccg

SEQ ID NO: 1183557 - RNA, 19 nt, Human
cgaacuuucccccaacccc

SEQ ID NO: 1183558 - RNA, 22 nt, Human
cgccccgagacuucuagggcga

SEQ ID NO: 1183559 - RNA, 22 nt, Human
cgccccgauacuugaaggcggg

SEQ ID NO: 1183560 - RNA, 21 nt, Human
cgcuugggccgggcgagcaac

SEQ ID NO: 1183561 - RNA, 18 nt, Human
cuaaaguguuuccuaccu

SEQ ID NO: 1183562 - RNA, 18 nt, Human
cucccgcuugggccgggc

SEQ ID NO: 1183563 - RNA, 19 nt, Human
cucugcgcucagcucgccc

SEQ ID NO: 1183564 - RNA, 21 nt, Human
cugcucccucuguccccuucc

SEQ ID NO: 1183565 - RNA, 18 nt, Human
cugcugccccuccucagc

SEQ ID NO: 1183566 - RNA, 20 nt, Human
gagacgccccccacccccaa

SEQ ID NO: 1183567 - RNA, 22 nt, Human
gagcaacaagcaccggagcugg

SEQ ID NO: 1183568 - RNA, 21 nt, Human
gaggaagagagggagaaaggg

SEQ ID NO: 1183569 - RNA, 18 nt, Human
gaggaggagaggacggca

SEQ ID NO: 1183570 - RNA, 21 nt, Human
gaggaggagaggacggcagcc

SEQ ID NO: 1183571 - RNA, 18 nt, Human
gagggcagcgcagcgggc

SEQ ID NO: 1183572 - RNA, 19 nt, Human
gagggcagcgcagcgggca

SEQ ID NO: 1183573 - RNA, 20 nt, Human
gcaacggcaggaauggguac

SEQ ID NO: 1183574 - RNA, 23 nt, Human
gccaggcaaguccacaguuugcu

SEQ ID NO: 1183575 - RNA, 19 nt, Human
gccccgagacuucuagggc

SEQ ID NO: 1183576 - RNA, 19 nt, Human
gcgagcaacaagcaccgga

SEQ ID NO: 1183577 - RNA, 23 nt, Human
gcucggcagucccuccucucccg

SEQ ID NO: 1183578 - RNA, 19 nt, Human
ggagaggugaaggccgugg

SEQ ID NO: 1183579 - RNA, 20 nt, Human
ggagcagcggcugcuacugc

SEQ ID NO: 1183580 - RNA, 22 nt, Human
ggagggacgggauuguagaucc

SEQ ID NO: 1183581 - RNA, 21 nt, Human
ggcaaaagagggaggaagaga

SEQ ID NO: 1183582 - RNA, 19 nt, Human
ggcagccucgcagccuggc

SEQ ID NO: 1183583 - RNA, 23 nt, Human
ggcggcagcgaggcugggcagag

SEQ ID NO: 1183584 - RNA, 20 nt, Human
gggagacgccccccaccccc

SEQ ID NO: 1183585 - RNA, 22 nt, Human
gggcagagggcagcgcagcggg

SEQ ID NO: 1183586 - RNA, 22 nt, Human
gggcccagacaguggcaaaaga

SEQ ID NO: 1183587 - RNA, 26 nt, Human
gggcugaggcuacccgcggagaggug

SEQ ID NO: 1183588 - RNA, 18 nt, Human
ggugaaggccguggggcc

SEQ ID NO: 1183589 - RNA, 22 nt, Human
ggugaaggccguggggccuggg

SEQ ID NO: 1183590 - RNA, 25 nt, Human
uacuugaaggcggggggcaaucccu

SEQ ID NO: 1183591 - RNA, 26 nt, Human
uacuugaaggcggggggcaaucccug

SEQ ID NO: 1183592 - RNA, 20 nt, Human
uccacaguuugcuccaccgc

SEQ ID NO: 1183593 - RNA, 20 nt, Human
ucccccaaccccacgugcuu

SEQ ID NO: 1183594 - RNA, 18 nt, Human
ucccucuguccccuuccu

SEQ ID NO: 1183595 - RNA, 21 nt, Human
ucccucuguccccuuccuccu

SEQ ID NO: 1183596 - RNA, 19 nt, Human
uccgggcucccgggcggga

SEQ ID NO: 1183597 - RNA, 21 nt, Human
ucgcagccuggcggcaacagc

SEQ ID NO: 1183598 - RNA, 18 nt, Human
ugaaggccguggggccug

SEQ ID NO: 1183599 - RNA, 22 nt, Human
ugaggcuacccgcggagaggug

SEQ ID NO: 1183600 - RNA, 20 nt, Human
ugggcagagggcagcgcagc

SEQ ID NO: 1183601 - RNA, 21 nt, Human
uggggccuggggaagggcucc

SEQ ID NO: 1183602 - RNA, 22 nt, Human
uggggcugcugccccuccucag

SEQ ID NO: 1183603 - RNA, 22 nt, Human
uguaggcucggcagucccuccu

SEQ ID NO: 1183604 - RNA, 18 nt, Human
uguuuccuaccugcuccc

SEQ ID NO: 1183605 - RNA, 21 nt, Human
uucccccaaccccacgugcuu

SEQ ID NO: 1183606 - RNA, 21 nt, Human
uugaagguguaggcucggcag

SEQ ID NO: 1183607 - RNA, 20 nt, Human
uugggccgggcgagcaacaa

SEQ ID NO: 1183608 - RNA, 18 nt, Human
aagaaggcaaaccaugaa

SEQ ID NO: 1183609 - RNA, 23 nt, Human
aagaaggcaaaccaugaaaagaa

SEQ ID NO: 1183610 - RNA, 25 nt, Human
aauaagaaggcaaaccaugaaaaga

SEQ ID NO: 1183611 - RNA, 20 nt, Human
accaugaaaagaaaagagga

SEQ ID NO: 1183612 - RNA, 21 nt, Human
accaugaaaagaaaagaggag

SEQ ID NO: 1183613 - RNA, 22 nt, Human
agaaaagaucacacacaaggcu

SEQ ID NO: 1183614 - RNA, 20 nt, Human
aggugcuccucacuucccag

SEQ ID NO: 1183615 - RNA, 18 nt, Human
aucccaaccugcaccugu

SEQ ID NO: 1183616 - RNA, 21 nt, Human
cacacacaaggcugucacuuc

SEQ ID NO: 1183617 - RNA, 25 nt, Human
caccuguggcgacuuugagacuuuc

SEQ ID NO: 1183618 - RNA, 23 nt, Human
cacugaaucaggggcauguuucc

SEQ ID NO: 1183619 - RNA, 25 nt, Human
cagaaaagaucacacacaaggcugg

SEQ ID NO: 1183620 - RNA, 21 nt, Human
cagaggcgcuccucacuuccc

SEQ ID NO: 1183621 - RNA, 21 nt, Human
cagaggcgcuccucacuuccc

SEQ ID NO: 1183622 - RNA, 21 nt, Human
cagaggugcuccucacuuccc

SEQ ID NO: 1183623 - RNA, 20 nt, Human
caucccaaccugcaccugug

SEQ ID NO: 1183624 - RNA, 27 nt, Human
ccucccaucccaaccugcaccuguggc

SEQ ID NO: 1183625 - RNA, 18 nt, Human
ggcggccgggcagaggcg

SEQ ID NO: 1183626 - RNA, 18 nt, Human
ggcggccgggcagaggcg

SEQ ID NO: 1183627 - RNA, 19 nt, Human
gggaagacagaaaagauca

SEQ ID NO: 1183628 - RNA, 20 nt, Human
guggggcggccgggcagagg

SEQ ID NO: 1183629 - RNA, 21 nt, Human
uaaaagguaaacuuuaauguu

SEQ ID NO: 1183630 - RNA, 27 nt, Human
uaagaaggcaaaccaugaaaagaaaaa

SEQ ID NO: 1183631 - RNA, 21 nt, Human
ucagggcuuuaaaccaguugg

SEQ ID NO: 1183632 - RNA, 19 nt, Human
uggggcggccgggcagagg

SEQ ID NO: 1183633 - RNA, 22 nt, Human
uguccuuuuucuggaaaacugu

SEQ ID NO: 1183634 - RNA, 18 nt, Human
ugugguaagagaaaaagu

SEQ ID NO: 1183635 - RNA, 21 nt, Human
aaaaaaaccuccccaagaacc

SEQ ID NO: 1183636 - RNA, 21 nt, Human
aaaaaucaauacaaagcugac

SEQ ID NO: 1183637 - RNA, 25 nt, Human
aaacacacacacgcacacacaaaca

SEQ ID NO: 1183638 - RNA, 21 nt, Human
aaaccuccccaagaaccccaa

SEQ ID NO: 1183639 - RNA, 19 nt, Human
aaaggguguggcaggcucc

SEQ ID NO: 1183640 - RNA, 24 nt, Human
aaccuccccaagaaccccaauucu

SEQ ID NO: 1183641 - RNA, 24 nt, Human
aacuccuuccuaaauccuuuucug

SEQ ID NO: 1183642 - RNA, 23 nt, Human
aagccaccugaacccaagucacc

SEQ ID NO: 1183643 - RNA, 23 nt, Human
aaggaaaagcauuggaugcagug

SEQ ID NO: 1183644 - RNA, 24 nt, Human
aaguagcccucagucccuagccca

SEQ ID NO: 1183645 - RNA, 23 nt, Human
aaugaggaagaagucagaaggaa

SEQ ID NO: 1183646 - RNA, 23 nt, Human
aauggaguccugcagagccgccu

SEQ ID NO: 1183647 - RNA, 21 nt, Human
acaaaaagaaaugcagaaucc

SEQ ID NO: 1183648 - RNA, 22 nt, Human
acacacaaacauacacacagga

SEQ ID NO: 1183649 - RNA, 25 nt, Human
acacacacacacacacacacagaga

SEQ ID NO: 1183650 - RNA, 29 nt, Human
acacacacacacacacacacagagacuca

SEQ ID NO: 1183651 - RNA, 27 nt, Human
acacacacacacacacacagagacuca

SEQ ID NO: 1183652 - RNA, 22 nt, Human
acacacacacauaugcaucucu

SEQ ID NO: 1183653 - RNA, 21 nt, Human
acacacacauagauacacaca

SEQ ID NO: 1183654 - RNA, 27 nt, Human
acacacaugcacaccggcacacacaca

SEQ ID NO: 1183655 - RNA, 30 nt, Human
accucaccauccuccuucugagccuccaag

SEQ ID NO: 1183656 - RNA, 20 nt, Human
accucaguucuuuucauagu

SEQ ID NO: 1183657 - RNA, 18 nt, Human
accugcacugccccuccc

SEQ ID NO: 1183658 - RNA, 21 nt, Human
acugggcccgugcagauuuuc

SEQ ID NO: 1183659 - RNA, 20 nt, Human
agaaaucuacauugugaaga

SEQ ID NO: 1183660 - RNA, 22 nt, Human
agaaccccaauucuguuccugc

SEQ ID NO: 1183661 - RNA, 22 nt, Human
agagccgccuccccguccaccu

SEQ ID NO: 1183662 - RNA, 20 nt, Human
agagcugugggagaaaugga

SEQ ID NO: 1183663 - RNA, 20 nt, Human
agccaccugaacccaaguca

SEQ ID NO: 1183664 - RNA, 20 nt, Human
agccuccaaucgcuggcucc

SEQ ID NO: 1183665 - RNA, 18 nt, Human
agcuaagaaggaaaagca

SEQ ID NO: 1183666 - RNA, 23 nt, Human
aggaagagcaaguuuggagugaa

SEQ ID NO: 1183667 - RNA, 26 nt, Human
aggagcaccaacgguggccaagaagu

SEQ ID NO: 1183668 - RNA, 21 nt, Human
agggacacccuugguuuugug

SEQ ID NO: 1183669 - RNA, 21 nt, Human
agggguugcagaaaaggaugg

SEQ ID NO: 1183670 - RNA, 22 nt, Human
aguguagaggaaaggacagggu

SEQ ID NO: 1183671 - RNA, 24 nt, Human
auggacacacacacacacacacac

SEQ ID NO: 1183672 - RNA, 19 nt, Human
auggacuggcugcuguggg

SEQ ID NO: 1183673 - RNA, 22 nt, Human
caaagcugacagaucaaaagug

SEQ ID NO: 1183674 - RNA, 27 nt, Human
caaagcugacagaucaaaagugaguca

SEQ ID NO: 1183675 - RNA, 20 nt, Human
caaauuacaauaacagcuaa

SEQ ID NO: 1183676 - RNA, 22 nt, Human
caaccugaagggccaagaacac

SEQ ID NO: 1183677 - RNA, 20 nt, Human
caagaacacugugguuccau

SEQ ID NO: 1183678 - RNA, 21 nt, Human
caagauaccgaggaaagugug

SEQ ID NO: 1183679 - RNA, 18 nt, Human
cacacaaacauacacaca

SEQ ID NO: 1183680 - RNA, 20 nt, Human
cacacacacacacacacaca

SEQ ID NO: 1183681 - RNA, 20 nt, Human
cacacacacacacacacaca

SEQ ID NO: 1183682 - RNA, 22 nt, Human
cacacacacacacacacacaca

SEQ ID NO: 1183683 - RNA, 28 nt, Human
cacacacacacacacagagacucacaca

SEQ ID NO: 1183684 - RNA, 22 nt, Human
cacacacacacauaugcaucuc

SEQ ID NO: 1183685 - RNA, 18 nt, Human
cacacacacgcacacaca

SEQ ID NO: 1183686 - RNA, 20 nt, Human
cacaggaaaguugaggggag

SEQ ID NO: 1183687 - RNA, 22 nt, Human
caccaacgguggccaagaaguc

SEQ ID NO: 1183688 - RNA, 26 nt, Human
caccugaacccaagucaccugggagc

SEQ ID NO: 1183689 - RNA, 22 nt, Human
cagaaaaaucaauacaaagcug

SEQ ID NO: 1183690 - RNA, 22 nt, Human
cagagacucacacagagaccca

SEQ ID NO: 1183691 - RNA, 19 nt, Human
cagcacagggccuggcaaa

SEQ ID NO: 1183692 - RNA, 20 nt, Human
cagucccucuuuccaaaagu

SEQ ID NO: 1183693 - RNA, 18 nt, Human
ccaaaaguagcccucagu

SEQ ID NO: 1183694 - RNA, 25 nt, Human
ccaauucuguuccugccacacauac

SEQ ID NO: 1183695 - RNA, 18 nt, Human
ccaggcccuuugugcugc

SEQ ID NO: 1183696 - RNA, 24 nt, Human
cccaagaaccccaauucuguuccu

SEQ ID NO: 1183697 - RNA, 27 nt, Human
cccacauacacacacauagauacacac

SEQ ID NO: 1183698 - RNA, 21 nt, Human
ccccaagaaccccaauucugg

SEQ ID NO: 1183699 - RNA, 22 nt, Human
ccccagccugcccgcucaugcc

SEQ ID NO: 1183700 - RNA, 25 nt, Human
cccccagccugcccgcucaugccgu

SEQ ID NO: 1183701 - RNA, 18 nt, Human
ccccuccuccccacccca

SEQ ID NO: 1183702 - RNA, 22 nt, Human
cccucagucccuagcccaggac

SEQ ID NO: 1183703 - RNA, 19 nt, Human
ccggcacacacacacauau

SEQ ID NO: 1183704 - RNA, 21 nt, Human
ccuccccaagaaccccaauuc

SEQ ID NO: 1183705 - RNA, 19 nt, Human
ccugaggggcugucugagg

SEQ ID NO: 1183706 - RNA, 24 nt, Human
ccugcacugccccuccuccccacc

SEQ ID NO: 1183707 - RNA, 24 nt, Human
ccugugugugaggggaguggaggg

SEQ ID NO: 1183708 - RNA, 22 nt, Human
cgcaguggguuacaacguagcc

SEQ ID NO: 1183709 - RNA, 25 nt, Human
cggcacacacacacauaugcaucuc

SEQ ID NO: 1183710 - RNA, 20 nt, Human
cuccuccccaccccacuccc

SEQ ID NO: 1183711 - RNA, 21 nt, Human
cuccugaggggcugucugagg

SEQ ID NO: 1183712 - RNA, 18 nt, Human
cugcacugccccuccucc

SEQ ID NO: 1183713 - RNA, 21 nt, Human
cugcacugccccuccucccca

SEQ ID NO: 1183714 - RNA, 18 nt, Human
cugccaacucuguguguc

SEQ ID NO: 1183715 - RNA, 24 nt, Human
cugguggagucaacccugggcaga

SEQ ID NO: 1183716 - RNA, 19 nt, Human
cugugugucccuuguuaca

SEQ ID NO: 1183717 - RNA, 21 nt, Human
cuuugugcugccaacucugug

SEQ ID NO: 1183718 - RNA, 22 nt, Human
gaaaaaaaccuccccaagaacc

SEQ ID NO: 1183719 - RNA, 18 nt, Human
gaaaggacaggguggaaa

SEQ ID NO: 1183720 - RNA, 22 nt, Human
gagcugccuggcuucccuucag

SEQ ID NO: 1183721 - RNA, 20 nt, Human
gaggggaguggagggguugc

SEQ ID NO: 1183722 - RNA, 21 nt, Human
gauguggguguggggcucggg

SEQ ID NO: 1183723 - RNA, 22 nt, Human
gauuuauuucccuugcaucuaa

SEQ ID NO: 1183724 - RNA, 21 nt, Human
gccacacauacccccagccug

SEQ ID NO: 1183725 - RNA, 24 nt, Human
gccucugggccucugucagcuccc

SEQ ID NO: 1183726 - RNA, 25 nt, Human
gcgucgggcaggagacacagggguc

SEQ ID NO: 1183727 - RNA, 26 nt, Human
gcuuuaaacacacacacgcacacaca

SEQ ID NO: 1183728 - RNA, 19 nt, Human
ggacacccuugguuuugug

SEQ ID NO: 1183729 - RNA, 19 nt, Human
ggacagaagcggggugaga

SEQ ID NO: 1183730 - RNA, 18 nt, Human
ggagcuuccagacuagcg

SEQ ID NO: 1183731 - RNA, 18 nt, Human
ggaggauucaaagaugac

SEQ ID NO: 1183732 - RNA, 23 nt, Human
gggcacuggagauaaaauauccc

SEQ ID NO: 1183733 - RNA, 25 nt, Human
gggcacuggagauaaaauaucccug

SEQ ID NO: 1183734 - RNA, 22 nt, Human
gggcgucgggcaggagacacag

SEQ ID NO: 1183735 - RNA, 21 nt, Human
gggugcaggugaggagacaga

SEQ ID NO: 1183736 - RNA, 22 nt, Human
gucuaagacacuggaaagagaa

SEQ ID NO: 1183737 - RNA, 18 nt, Human
gucucuucugccugugcc

SEQ ID NO: 1183738 - RNA, 21 nt, Human
gugacaccugguccggugggu

SEQ ID NO: 1183739 - RNA, 18 nt, Human
gugagacaacacgaggga

SEQ ID NO: 1183740 - RNA, 18 nt, Human
guggaaaaaaaccucccc

SEQ ID NO: 1183741 - RNA, 21 nt, Human
guggaaaugguuugccucugg

SEQ ID NO: 1183742 - RNA, 23 nt, Human
gugggagaaauggaguccugcag

SEQ ID NO: 1183743 - RNA, 19 nt, Human
gugugucccuuguuacaaa

SEQ ID NO: 1183744 - RNA, 24 nt, Human
guuucaccucaagagucugaauuu

SEQ ID NO: 1183745 - RNA, 23 nt, Human
uaaacacacacacgcacacacaa

SEQ ID NO: 1183746 - RNA, 26 nt, Human
uaaacacacacacgcacacacaaaca

SEQ ID NO: 1183747 - RNA, 21 nt, Human
uaaaggguguggcaggcuccu

SEQ ID NO: 1183748 - RNA, 25 nt, Human
uaacacggacagaagcggggugaga

SEQ ID NO: 1183749 - RNA, 33 nt, Human
uacacacaugcacaccggcacacacacacagug

SEQ ID NO: 1183750 - RNA, 21 nt, Human
uacuuggcaauuacucagcug

SEQ ID NO: 1183751 - RNA, 21 nt, Human
uagagccuuacugggcccgug

SEQ ID NO: 1183752 - RNA, 18 nt, Human
uagcccaggacaggcaug

SEQ ID NO: 1183753 - RNA, 19 nt, Human
uagcccaggacaggcaugg

SEQ ID NO: 1183754 - RNA, 21 nt, Human
uagcucagaaaucuuuaaaug

SEQ ID NO: 1183755 - RNA, 21 nt, Human
uaggauaucucaguuugacug

SEQ ID NO: 1183756 - RNA, 18 nt, Human
uagggcagccagcacagg

SEQ ID NO: 1183757 - RNA, 21 nt, Human
uagggcagccagcacagggcc

SEQ ID NO: 1183758 - RNA, 23 nt, Human
uauggacauuguggcuguggaca

SEQ ID NO: 1183759 - RNA, 24 nt, Human
ucaagagucugaauuuguagaugg

SEQ ID NO: 1183760 - RNA, 21 nt, Human
ucacacagagacccacauaca

SEQ ID NO: 1183761 - RNA, 24 nt, Human
ucacccaauaaauaaaaaugacaa

SEQ ID NO: 1183762 - RNA, 24 nt, Human
ucaccugggagccuuuaacugcag

SEQ ID NO: 1183763 - RNA, 22 nt, Human
ucaggaacaaugggaaggucgg

SEQ ID NO: 1183764 - RNA, 18 nt, Human
ucaguucuuuucauagua

SEQ ID NO: 1183765 - RNA, 19 nt, Human
ucaguucuuuucauaguaa

SEQ ID NO: 1183766 - RNA, 21 nt, Human
ucaguuugacugaaaaggcuu

SEQ ID NO: 1183767 - RNA, 26 nt, Human
uccauggagcuuccagacuagcgggg

SEQ ID NO: 1183768 - RNA, 23 nt, Human
uccccaugaguggucugaaagcc

SEQ ID NO: 1183769 - RNA, 23 nt, Human
ucccuguauccauggagcuucca

SEQ ID NO: 1183770 - RNA, 18 nt, Human
uccucagacucgggagcu

SEQ ID NO: 1183771 - RNA, 18 nt, Human
uccuccccaccccacucc

SEQ ID NO: 1183772 - RNA, 19 nt, Human
uccugggugcccagggacu

SEQ ID NO: 1183773 - RNA, 18 nt, Human
ucgcuggcuccccgguuc

SEQ ID NO: 1183774 - RNA, 20 nt, Human
ucuccucccacauucccaca

SEQ ID NO: 1183775 - RNA, 21 nt, Human
ucuccuggcauuguuugcuga

SEQ ID NO: 1183776 - RNA, 26 nt, Human
ucucucagugacaugucaaaccugcu

SEQ ID NO: 1183777 - RNA, 23 nt, Human
ucugggccucugucagcucccau

SEQ ID NO: 1183778 - RNA, 22 nt, Human
ucugucagcucccaucaguccc

SEQ ID NO: 1183779 - RNA, 23 nt, Human
ucugugccaggcauuguauuggg

SEQ ID NO: 1183780 - RNA, 18 nt, Human
ucuugguucuucuccugg

SEQ ID NO: 1183781 - RNA, 22 nt, Human
ugaagugggaaauuccauuuua

SEQ ID NO: 1183782 - RNA, 20 nt, Human
ugaauaaucagugaucucau

SEQ ID NO: 1183783 - RNA, 18 nt, Human
ugacgugguuccaccucu

SEQ ID NO: 1183784 - RNA, 21 nt, Human
ugagggcacccacaggaaagu

SEQ ID NO: 1183785 - RNA, 18 nt, Human
ugaggggaggcacugagg

SEQ ID NO: 1183786 - RNA, 21 nt, Human
ugagucaugccaguucuccuc

SEQ ID NO: 1183787 - RNA, 19 nt, Human
ugauagaaaugaggaagaa

SEQ ID NO: 1183788 - RNA, 19 nt, Human
ugauguggguguggggcuc

SEQ ID NO: 1183789 - RNA, 19 nt, Human
ugcacaccggcacacacac

SEQ ID NO: 1183790 - RNA, 19 nt, Human
ugccccuccuccccacccc

SEQ ID NO: 1183791 - RNA, 24 nt, Human
ugccguguaggcugcauuccuggg

SEQ ID NO: 1183792 - RNA, 23 nt, Human
uggaaaaaaaccuccccaagaac

SEQ ID NO: 1183793 - RNA, 27 nt, Human
uggaaaaaaaccuccccaagaacccca

SEQ ID NO: 1183794 - RNA, 22 nt, Human
uggaaagagaaagauuagccug

SEQ ID NO: 1183795 - RNA, 20 nt, Human
uggaaaugguuugccucugg

SEQ ID NO: 1183796 - RNA, 22 nt, Human
uggagauaaaauaucccuguau

SEQ ID NO: 1183797 - RNA, 23 nt, Human
uggaguccugcagagccgccucc

SEQ ID NO: 1183798 - RNA, 23 nt, Human
uggcauuguuugcugaggccagc

SEQ ID NO: 1183799 - RNA, 19 nt, Human
uggcuccccgguucccagu

SEQ ID NO: 1183800 - RNA, 23 nt, Human
ugggaaggucgguaggauaucuc

SEQ ID NO: 1183801 - RNA, 20 nt, Human
ugggagccuuuaacugcaga

SEQ ID NO: 1183802 - RNA, 21 nt, Human
ugggagccuuuaacugcagau

SEQ ID NO: 1183803 - RNA, 21 nt, Human
ugggcagauggacuggcugcu

SEQ ID NO: 1183804 - RNA, 23 nt, Human
ugggugcccagggacugcugggc

SEQ ID NO: 1183805 - RNA, 21 nt, Human
uggguguggggcucgggagug

SEQ ID NO: 1183806 - RNA, 22 nt, Human
ugguggccuuuguaaugacuga

SEQ ID NO: 1183807 - RNA, 26 nt, Human
ugugaagagcuccccagaggauucug

SEQ ID NO: 1183808 - RNA, 18 nt, Human
uguggggcucgggaguga

SEQ ID NO: 1183809 - RNA, 24 nt, Human
ugugggugacaccugguccggugg

SEQ ID NO: 1183810 - RNA, 25 nt, Human
ugugugucccuuguuacaaagcucu

SEQ ID NO: 1183811 - RNA, 24 nt, Human
uuacaauaacagcuaagaaggaaa

SEQ ID NO: 1183812 - RNA, 23 nt, Human
uugacugaaaaggcuuuaaacac

SEQ ID NO: 1183813 - RNA, 22 nt, Human
uugaggcugcaguuggauaaag

SEQ ID NO: 1183814 - RNA, 20 nt, Human
uuguugggggagagccuagg

SEQ ID NO: 1183815 - RNA, 19 nt, Human
aaaagugugaggauuggcc

SEQ ID NO: 1183816 - RNA, 21 nt, Human
aaaauaccuguaacuacuucu

SEQ ID NO: 1183817 - RNA, 24 nt, Human
aaagugcugggauuacaggcguga

SEQ ID NO: 1183818 - RNA, 22 nt, Human
aacuccauaaucaaaccucuau

SEQ ID NO: 1183819 - RNA, 19 nt, Human
aagugcugggauuacaggc

SEQ ID NO: 1183820 - RNA, 19 nt, Human
aagugcugggauuacaggc

SEQ ID NO: 1183821 - RNA, 26 nt, Human
aagugcugggauuacaggcgugagcu

SEQ ID NO: 1183822 - RNA, 22 nt, Human
acagggaaugguauugcuaggg

SEQ ID NO: 1183823 - RNA, 19 nt, Human
acuccauaaucaaaccucu

SEQ ID NO: 1183824 - RNA, 18 nt, Human
agacagagucucacugug

SEQ ID NO: 1183825 - RNA, 25 nt, Human
agcagggaguuuguggcagauugga

SEQ ID NO: 1183826 - RNA, 20 nt, Human
agcgcaguggcgcgaccuug

SEQ ID NO: 1183827 - RNA, 24 nt, Human
agcgcaguggcgcgaccuuggcuc

SEQ ID NO: 1183828 - RNA, 22 nt, Human
aggaaggagcccaacagguuac

SEQ ID NO: 1183829 - RNA, 20 nt, Human
aggcaugcaccaccgcgccc

SEQ ID NO: 1183830 - RNA, 19 nt, Human
agggaaugguauugcuagg

SEQ ID NO: 1183831 - RNA, 18 nt, Human
aguagagaugguguuuua

SEQ ID NO: 1183832 - RNA, 21 nt, Human
aguaguugggauuacaggcau

SEQ ID NO: 1183833 - RNA, 24 nt, Human
agucucacuguguuguccaggcug

SEQ ID NO: 1183834 - RNA, 18 nt, Human
agugcugggauuacaggc

SEQ ID NO: 1183835 - RNA, 18 nt, Human
aucaauaaaauucacugc

SEQ ID NO: 1183836 - RNA, 24 nt, Human
aucauguuggccaggcuggucuug

SEQ ID NO: 1183837 - RNA, 19 nt, Human
aucugacuggaagaagugu

SEQ ID NO: 1183838 - RNA, 23 nt, Human
aucuuuggcaacaaaagaucuga

SEQ ID NO: 1183839 - RNA, 19 nt, Human
augcaccaccgcgcccagc

SEQ ID NO: 1183840 - RNA, 19 nt, Human
augguguuuuaucauguug

SEQ ID NO: 1183841 - RNA, 24 nt, Human
augguguuuuaucauguuggccag

SEQ ID NO: 1183842 - RNA, 24 nt, Human
auuuuuguauuuuuaguagagaug

SEQ ID NO: 1183843 - RNA, 20 nt, Human
caaaagagggaaaaauaagc

SEQ ID NO: 1183844 - RNA, 24 nt, Human
caaaauagaaaauaacuuuugaua

SEQ ID NO: 1183845 - RNA, 24 nt, Human
caaagugcugggauuacaggcgug

SEQ ID NO: 1183846 - RNA, 19 nt, Human
caacaauaaccuguaugua

SEQ ID NO: 1183847 - RNA, 19 nt, Human
caaccugauccuaccagag

SEQ ID NO: 1183848 - RNA, 22 nt, Human
caauaaauuuuccugccucggc

SEQ ID NO: 1183849 - RNA, 22 nt, Human
caccaccgcgcccagcuaauuu

SEQ ID NO: 1183850 - RNA, 24 nt, Human
caccgcgcccagcuaauuuuugua

SEQ ID NO: 1183851 - RNA, 21 nt, Human
cacuacaaccucugccuccca

SEQ ID NO: 1183852 - RNA, 21 nt, Human
cacugccuuuucccacaggga

SEQ ID NO: 1183853 - RNA, 18 nt, Human
cacuguguuguccaggcu

SEQ ID NO: 1183854 - RNA, 25 nt, Human
cacuuuaacugcuacaaguugggga

SEQ ID NO: 1183855 - RNA, 28 nt, Human
caggaaggagcccaacagguuaccuguu

SEQ ID NO: 1183856 - RNA, 20 nt, Human
caugcaccaccgcgcccagc

SEQ ID NO: 1183857 - RNA, 23 nt, Human
caugcaccaccgcgcccagcuaa

SEQ ID NO: 1183858 - RNA, 18 nt, Human
cauguuggccaggcuggu

SEQ ID NO: 1183859 - RNA, 24 nt, Human
cauguuggccaggcuggucuugaa

SEQ ID NO: 1183860 - RNA, 22 nt, Human
ccaaagugcugggauuacaggc

SEQ ID NO: 1183861 - RNA, 22 nt, Human
ccaaagugcugggauuacaggc

SEQ ID NO: 1183862 - RNA, 24 nt, Human
ccaaagugcugggauuacaggcgu

SEQ ID NO: 1183863 - RNA, 23 nt, Human
ccacugaucaccugguuucugcc

SEQ ID NO: 1183864 - RNA, 23 nt, Human
cccagguucaauaaauuuuccug

SEQ ID NO: 1183865 - RNA, 23 nt, Human
cccgaguaguugggauuacaggc

SEQ ID NO: 1183866 - RNA, 24 nt, Human
cccgaguaguugggauuacaggca

SEQ ID NO: 1183867 - RNA, 24 nt, Human
ccgaguaguugggauuacaggcau

SEQ ID NO: 1183868 - RNA, 24 nt, Human
ccucccagguucaauaaauuuucc

SEQ ID NO: 1183869 - RNA, 23 nt, Human
ccugaccucagcugaucugccug

SEQ ID NO: 1183870 - RNA, 22 nt, Human
ccuucaguaggguggcuggaau

SEQ ID NO: 1183871 - RNA, 21 nt, Human
cuaaugaucagaucuuccucc

SEQ ID NO: 1183872 - RNA, 23 nt, Human
cuacaaccucugccucccagguu

SEQ ID NO: 1183873 - RNA, 24 nt, Human
cuacaaccucugccucccagguuc

SEQ ID NO: 1183874 - RNA, 24 nt, Human
cucacuacaaccucugccucccag

SEQ ID NO: 1183875 - RNA, 18 nt, Human
cucccagguucaauaaau

SEQ ID NO: 1183876 - RNA, 26 nt, Human
cuccugaccucagcugaucugccugc

SEQ ID NO: 1183877 - RNA, 23 nt, Human
cugaucugccugccucagccucc

SEQ ID NO: 1183878 - RNA, 23 nt, Human
cugccucagccucccaaagugcu

SEQ ID NO: 1183879 - RNA, 24 nt, Human
cugccucagccucccaaagugcug

SEQ ID NO: 1183880 - RNA, 21 nt, Human
cugccucggccucccgaguag

SEQ ID NO: 1183881 - RNA, 21 nt, Human
cuugaacuccugaccucagcc

SEQ ID NO: 1183882 - RNA, 20 nt, Human
cuugcuguuuacuucccuug

SEQ ID NO: 1183883 - RNA, 24 nt, Human
cuuuguuucaauuauucccuuuca

SEQ ID NO: 1183884 - RNA, 24 nt, Human
gaccucagcugaucugccugccuc

SEQ ID NO: 1183885 - RNA, 19 nt, Human
gaccuuggcucacuacaac

SEQ ID NO: 1183886 - RNA, 24 nt, Human
gaguaguugggauuacaggcaugc

SEQ ID NO: 1183887 - RNA, 18 nt, Human
gauuacaggcgugagcua

SEQ ID NO: 1183888 - RNA, 21 nt, Human
gauuacaggcgugagcuacca

SEQ ID NO: 1183889 - RNA, 24 nt, Human
gauuacaggcgugagcuaccaugc

SEQ ID NO: 1183890 - RNA, 19 nt, Human
gcaguggcgcgaccuuggc

SEQ ID NO: 1183891 - RNA, 22 nt, Human
gcccagcuaauuuuuguauuuu

SEQ ID NO: 1183892 - RNA, 21 nt, Human
gcucacuacaaccucugccuc

SEQ ID NO: 1183893 - RNA, 19 nt, Human
gcuggagcgcaguggcgcg

SEQ ID NO: 1183894 - RNA, 23 nt, Human
gcuggucuugaacuccugaccuc

SEQ ID NO: 1183895 - RNA, 23 nt, Human
ggaaagcucccaaaaucucucaa

SEQ ID NO: 1183896 - RNA, 24 nt, Human
ggcuggucuugaacuccugaccuc

SEQ ID NO: 1183897 - RNA, 19 nt, Human
ggucuugaacuccugaccu

SEQ ID NO: 1183898 - RNA, 22 nt, Human
gguguuuuaucauguuggccag

SEQ ID NO: 1183899 - RNA, 18 nt, Human
guaguugggauuacaggc

SEQ ID NO: 1183900 - RNA, 20 nt, Human
guaguugggauuacaggcau

SEQ ID NO: 1183901 - RNA, 19 nt, Human
uaagugaaacauccaugua

SEQ ID NO: 1183902 - RNA, 25 nt, Human
uaagugaaacauccauguaucagga

SEQ ID NO: 1183903 - RNA, 24 nt, Human
uaaugaucagaucuuccucccuuc

SEQ ID NO: 1183904 - RNA, 24 nt, Human
uaauuuuuguauuuuuaguagaga

SEQ ID NO: 1183905 - RNA, 24 nt, Human
uacaggcaugcaccaccgcgccca

SEQ ID NO: 1183906 - RNA, 21 nt, Human
uaccuguaacuacuucugaac

SEQ ID NO: 1183907 - RNA, 19 nt, Human
uagcagggaguuuguggca

SEQ ID NO: 1183908 - RNA, 22 nt, Human
uaggauuuuugugauuuuggag

SEQ ID NO: 1183909 - RNA, 24 nt, Human
uaguagagaugguguuuuaucaug

SEQ ID NO: 1183910 - RNA, 18 nt, Human
uaguugggauuacaggca

SEQ ID NO: 1183911 - RNA, 18 nt, Human
uaucaggaauaauuccaa

SEQ ID NO: 1183912 - RNA, 24 nt, Human
uaucauguuggccaggcuggucuu

SEQ ID NO: 1183913 - RNA, 27 nt, Human
uaucauguuggccaggcuggucuugaa

SEQ ID NO: 1183914 - RNA, 23 nt, Human
ucaaaauagaaaauaacuuuuga

SEQ ID NO: 1183915 - RNA, 24 nt, Human
ucaaaccucuauuaaacagaagac

SEQ ID NO: 1183916 - RNA, 19 nt, Human
ucacuacaaccucugccuc

SEQ ID NO: 1183917 - RNA, 24 nt, Human
ucacuacaaccucugccucccagg

SEQ ID NO: 1183918 - RNA, 25 nt, Human
ucacuacaaccucugccucccaggu

SEQ ID NO: 1183919 - RNA, 24 nt, Human
uccaaauuaugaucuuuggcaaca

SEQ ID NO: 1183920 - RNA, 23 nt, Human
uccauguaucaggaauaauucca

SEQ ID NO: 1183921 - RNA, 24 nt, Human
ucccaaagugcugggauuacaggc

SEQ ID NO: 1183922 - RNA, 18 nt, Human
ucccagguucaauaaauu

SEQ ID NO: 1183923 - RNA, 24 nt, Human
ucccagguucaauaaauuuuccug

SEQ ID NO: 1183924 - RNA, 24 nt, Human
ucccgaguaguugggauuacaggc

SEQ ID NO: 1183925 - RNA, 19 nt, Human
ucccuugauggaguuuuag

SEQ ID NO: 1183926 - RNA, 23 nt, Human
ucggccucccgaguaguugggau

SEQ ID NO: 1183927 - RNA, 22 nt, Human
ucuaaugaucagaucuuccucc

SEQ ID NO: 1183928 - RNA, 23 nt, Human
ucucacuguguuguccaggcugg

SEQ ID NO: 1183929 - RNA, 24 nt, Human
ucucacuguguuguccaggcugga

SEQ ID NO: 1183930 - RNA, 18 nt, Human
ucugacuggaagaagugu

SEQ ID NO: 1183931 - RNA, 24 nt, Human
ugaaaaacuagauauuuguaugga

SEQ ID NO: 1183932 - RNA, 18 nt, Human
ugaccucagcugaucugc

SEQ ID NO: 1183933 - RNA, 19 nt, Human
ugaccucagcugaucugcc

SEQ ID NO: 1183934 - RNA, 20 nt, Human
ugagguaagaucagcuauga

SEQ ID NO: 1183935 - RNA, 21 nt, Human
ugaucugccugccucagccuc

SEQ ID NO: 1183936 - RNA, 23 nt, Human
ugaucugccugccucagccuccc

SEQ ID NO: 1183937 - RNA, 24 nt, Human
ugccucagccucccaaagugcugg

SEQ ID NO: 1183938 - RNA, 20 nt, Human
ugccucggccucccgaguag

SEQ ID NO: 1183939 - RNA, 20 nt, Human
ugcugggauuacaggcguga

SEQ ID NO: 1183940 - RNA, 18 nt, Human
uggaaagcucccaaaauc

SEQ ID NO: 1183941 - RNA, 22 nt, Human
uggaacuccauaaucaaaccuc

SEQ ID NO: 1183942 - RNA, 19 nt, Human
uggaagaaguguuguagac

SEQ ID NO: 1183943 - RNA, 24 nt, Human
uggagcgcaguggcgcgaccuugg

SEQ ID NO: 1183944 - RNA, 24 nt, Human
uggccaggcuggucuugaacuccu

SEQ ID NO: 1183945 - RNA, 24 nt, Human
uggcgcgaccuuggcucacuacaa

SEQ ID NO: 1183946 - RNA, 22 nt, Human
ugggagcuagaaauuuugaggg

SEQ ID NO: 1183947 - RNA, 23 nt, Human
ugggagcuagaaauuuugaggga

SEQ ID NO: 1183948 - RNA, 21 nt, Human
ugggauuacaggcaugcacca

SEQ ID NO: 1183949 - RNA, 24 nt, Human
ugggauuacaggcaugcaccaccg

SEQ ID NO: 1183950 - RNA, 18 nt, Human
ugggauuacaggcgugag

SEQ ID NO: 1183951 - RNA, 22 nt, Human
ugggauuacaggcgugagcuac

SEQ ID NO: 1183952 - RNA, 23 nt, Human
ugggauuacaggcgugagcuacc

SEQ ID NO: 1183953 - RNA, 24 nt, Human
ugggauuacaggcgugagcuacca

SEQ ID NO: 1183954 - RNA, 25 nt, Human
ugggauuacaggcgugagcuaccau

SEQ ID NO: 1183955 - RNA, 24 nt, Human
ugguguuuuaucauguuggccagg

SEQ ID NO: 1183956 - RNA, 21 nt, Human
uguaacuacuucugaacaccc

SEQ ID NO: 1183957 - RNA, 21 nt, Human
ugucauggcuaggaaaaggag

SEQ ID NO: 1183958 - RNA, 24 nt, Human
uguccaggcuggagcgcaguggcg

SEQ ID NO: 1183959 - RNA, 22 nt, Human
uguccgaaugugcagucugcau

SEQ ID NO: 1183960 - RNA, 24 nt, Human
uguguuguccaggcuggagcgcag

SEQ ID NO: 1183961 - RNA, 19 nt, Human
uuaaaugaacaaaagaggg

SEQ ID NO: 1183962 - RNA, 22 nt, Human
uuacuacaauaaauuuuacaag

SEQ ID NO: 1183963 - RNA, 18 nt, Human
uuaguagagaugguguuu

SEQ ID NO: 1183964 - RNA, 18 nt, Human
uuaguagagaugguguuu

SEQ ID NO: 1183965 - RNA, 18 nt, Human
uuaguagagaugguguuu

SEQ ID NO: 1183966 - RNA, 24 nt, Human
uuaguagagaugguguuuuaucau

SEQ ID NO: 1183967 - RNA, 23 nt, Human
uuccucccuucaguaggguggcu

SEQ ID NO: 1183968 - RNA, 25 nt, Human
uuccugaaugugcugcuauuguagg

SEQ ID NO: 1183969 - RNA, 24 nt, Human
uuuuuaguagagaugguguuuuau

SEQ ID NO: 1183970 - RNA, 20 nt, Human
uuuuuguauuuuuaguagag

SEQ ID NO: 1183971 - RNA, 29 nt, Human
aaaacaacagaaucucaacguuuugagaa

SEQ ID NO: 1183972 - RNA, 19 nt, Human
aaacaacagaaucucaacg

SEQ ID NO: 1183973 - RNA, 22 nt, Human
aaacaggaagaaggcaagucug

SEQ ID NO: 1183974 - RNA, 25 nt, Human
aaacaggaagaaggcaagucugugu

SEQ ID NO: 1183975 - RNA, 21 nt, Human
aaagaccuagaaagaacaggc

SEQ ID NO: 1183976 - RNA, 24 nt, Human
aaagugcugggauuacaggcguga

SEQ ID NO: 1183977 - RNA, 23 nt, Human
aacaacaacaaaauccucauccu

SEQ ID NO: 1183978 - RNA, 20 nt, Human
aacaacaacaacaacaaaau

SEQ ID NO: 1183979 - RNA, 21 nt, Human
aacguuuugagaauuuuaggu

SEQ ID NO: 1183980 - RNA, 22 nt, Human
aagacacucucuugcccaacca

SEQ ID NO: 1183981 - RNA, 21 nt, Human
aagcacccaccucuggaacuc

SEQ ID NO: 1183982 - RNA, 24 nt, Human
aaggcauaaacuaaacaggaagaa

SEQ ID NO: 1183983 - RNA, 19 nt, Human
aagugcugggauuacaggc

SEQ ID NO: 1183984 - RNA, 19 nt, Human
aagugcugggauuacaggc

SEQ ID NO: 1183985 - RNA, 26 nt, Human
aagugcugggauuacaggcgugagcc

SEQ ID NO: 1183986 - RNA, 22 nt, Human
aaugagcacauacucuuuaaac

SEQ ID NO: 1183987 - RNA, 20 nt, Human
aauuaaaaaaaaaaaaaaaa

SEQ ID NO: 1183988 - RNA, 23 nt, Human
aauuaaaaaaaaaaaaaaaauca

SEQ ID NO: 1183989 - RNA, 20 nt, Human
aauuaccuguagacucccau

SEQ ID NO: 1183990 - RNA, 24 nt, Human
acaacaacaacaacaaaauccuca

SEQ ID NO: 1183991 - RNA, 19 nt, Human
acaacaacaacaacaacaa

SEQ ID NO: 1183992 - RNA, 19 nt, Human
acaacaacaacaacaacaa

SEQ ID NO: 1183993 - RNA, 20 nt, Human
acaacaacaacaacaacaaa

SEQ ID NO: 1183994 - RNA, 22 nt, Human
acaacaacaacaacaacaacaa

SEQ ID NO: 1183995 - RNA, 24 nt, Human
acaacaacaacaacaacaacaaaa

SEQ ID NO: 1183996 - RNA, 20 nt, Human
acauauauuuugucugaacc

SEQ ID NO: 1183997 - RNA, 24 nt, Human
accauguuggucaggcuggucucg

SEQ ID NO: 1183998 - RNA, 21 nt, Human
acgggguuucaccauguuggu

SEQ ID NO: 1183999 - RNA, 23 nt, Human
acgggguuucaccauguugguca

SEQ ID NO: 1184000 - RNA, 24 nt, Human
acgggguuucaccauguuggucag

SEQ ID NO: 1184001 - RNA, 20 nt, Human
acuccaaagaccuagaaaga

SEQ ID NO: 1184002 - RNA, 19 nt, Human
acuccgcacucugaaguuc

SEQ ID NO: 1184003 - RNA, 20 nt, Human
acucucuugcccaaccacag

SEQ ID NO: 1184004 - RNA, 27 nt, Human
acucuguugcccacgcuggagugcaau

SEQ ID NO: 1184005 - RNA, 22 nt, Human
agaagacaaagaucugcaaaaa

SEQ ID NO: 1184006 - RNA, 22 nt, Human
agaucucggcucacugcaaccc

SEQ ID NO: 1184007 - RNA, 18 nt, Human
agaugguggugauagaca

SEQ ID NO: 1184008 - RNA, 18 nt, Human
agcagcugggauuacagg

SEQ ID NO: 1184009 - RNA, 24 nt, Human
aggaagaaggcaagucugugugaa

SEQ ID NO: 1184010 - RNA, 20 nt, Human
agguugcaaauucuuuuugu

SEQ ID NO: 1184011 - RNA, 22 nt, Human
aguagagacgggguuucaccau

SEQ ID NO: 1184012 - RNA, 24 nt, Human
agugcaauggccagaucucggcuc

SEQ ID NO: 1184013 - RNA, 24 nt, Human
caaagugcugggauuacaggcgug

SEQ ID NO: 1184014 - RNA, 20 nt, Human
caacaacaaaauccucaucc

SEQ ID NO: 1184015 - RNA, 24 nt, Human
caacaacaacaaaauccucauccu

SEQ ID NO: 1184016 - RNA, 22 nt, Human
caacaacaacaacaaaauccuc

SEQ ID NO: 1184017 - RNA, 18 nt, Human
caacaacaacaacaacaa

SEQ ID NO: 1184018 - RNA, 23 nt, Human
caaccccuccaccacauuuuacc

SEQ ID NO: 1184019 - RNA, 20 nt, Human
caagcgauucuccugccuca

SEQ ID NO: 1184020 - RNA, 22 nt, Human
caagcgauucuccugccucagc

SEQ ID NO: 1184021 - RNA, 21 nt, Human
caccauguuggucaggcuggu

SEQ ID NO: 1184022 - RNA, 24 nt, Human
caccauguuggucaggcuggucuc

SEQ ID NO: 1184023 - RNA, 24 nt, Human
caccccgcccggcuaauuuuugug

SEQ ID NO: 1184024 - RNA, 19 nt, Human
caccccugcagugaugacc

SEQ ID NO: 1184025 - RNA, 24 nt, Human
cacucuguugcccacgcuggagug

SEQ ID NO: 1184026 - RNA, 22 nt, Human
cacugcaaccccccgccuccca

SEQ ID NO: 1184027 - RNA, 18 nt, Human
cagaagacaaagaucugc

SEQ ID NO: 1184028 - RNA, 20 nt, Human
ccaaagugcugggauuacag

SEQ ID NO: 1184029 - RNA, 22 nt, Human
ccaaagugcugggauuacaggc

SEQ ID NO: 1184030 - RNA, 22 nt, Human
ccaaagugcugggauuacaggc

SEQ ID NO: 1184031 - RNA, 24 nt, Human
ccaaagugcugggauuacaggcgu

SEQ ID NO: 1184032 - RNA, 23 nt, Human
ccaacaaagacacucucuugccc

SEQ ID NO: 1184033 - RNA, 22 nt, Human
ccaaccacaguaauauuacaac

SEQ ID NO: 1184034 - RNA, 25 nt, Human
cccacgcuggagugcaauggccaga

SEQ ID NO: 1184035 - RNA, 23 nt, Human
cccagguucaagcgauucuccug

SEQ ID NO: 1184036 - RNA, 23 nt, Human
ccccugcagugaugaccuaugcc

SEQ ID NO: 1184037 - RNA, 19 nt, Human
cccgagcagcugggauuac

SEQ ID NO: 1184038 - RNA, 24 nt, Human
cccgagcagcugggauuacaggug

SEQ ID NO: 1184039 - RNA, 21 nt, Human
ccgagcagcugggauuacagg

SEQ ID NO: 1184040 - RNA, 23 nt, Human
ccgagcagcugggauuacaggug

SEQ ID NO: 1184041 - RNA, 21 nt, Human
ccgcccggcuaauuuuugugu

SEQ ID NO: 1184042 - RNA, 24 nt, Human
ccgccucccagguucaagcgauuc

SEQ ID NO: 1184043 - RNA, 24 nt, Human
ccucccagguucaagcgauucucc

SEQ ID NO: 1184044 - RNA, 22 nt, Human
ccucuggaacucaagcagugga

SEQ ID NO: 1184045 - RNA, 24 nt, Human
ccugaccucgugauccgccucggc

SEQ ID NO: 1184046 - RNA, 24 nt, Human
ccugccucagccucccgagcagcu

SEQ ID NO: 1184047 - RNA, 22 nt, Human
ccuuuuuuuuugagauggaguc

SEQ ID NO: 1184048 - RNA, 24 nt, Human
cgggguuucaccauguuggucagg

SEQ ID NO: 1184049 - RNA, 21 nt, Human
cgugauccgccucggccuccc

SEQ ID NO: 1184050 - RNA, 24 nt, Human
cucacugcaaccccccgccuccca

SEQ ID NO: 1184051 - RNA, 25 nt, Human
cucacugcaaccccccgccucccag

SEQ ID NO: 1184052 - RNA, 26 nt, Human
cucacugcaaccccccgccucccagg

SEQ ID NO: 1184053 - RNA, 22 nt, Human
cucccauuuugacaaucucacc

SEQ ID NO: 1184054 - RNA, 22 nt, Human
cuccugaccucgugauccgccu

SEQ ID NO: 1184055 - RNA, 22 nt, Human
cugcaaccccccgccucccagg

SEQ ID NO: 1184056 - RNA, 24 nt, Human
cugcaaccccccgccucccagguu

SEQ ID NO: 1184057 - RNA, 25 nt, Human
cugcaaccccccgccucccagguuc

SEQ ID NO: 1184058 - RNA, 20 nt, Human
gaaagaacaggcggggccgg

SEQ ID NO: 1184059 - RNA, 18 nt, Human
gaccucgugauccgccuc

SEQ ID NO: 1184060 - RNA, 24 nt, Human
gaccucgugauccgccucggccuc

SEQ ID NO: 1184061 - RNA, 24 nt, Human
gagaacaacaacaacaacaacaac

SEQ ID NO: 1184062 - RNA, 23 nt, Human
gagacgggguuucaccauguugg

SEQ ID NO: 1184063 - RNA, 24 nt, Human
gagacgggguuucaccauguuggu

SEQ ID NO: 1184064 - RNA, 24 nt, Human
gagcagcugggauuacaggugcgc

SEQ ID NO: 1184065 - RNA, 18 nt, Human
gauuacaggcgugagcca

SEQ ID NO: 1184066 - RNA, 22 nt, Human
gauuacaggcgugagccaccgc

SEQ ID NO: 1184067 - RNA, 22 nt, Human
gauuacaggcgugagccaccgc

SEQ ID NO: 1184068 - RNA, 18 nt, Human
gauuacaggugcgcgcca

SEQ ID NO: 1184069 - RNA, 21 nt, Human
gauucuccugccucagccucc

SEQ ID NO: 1184070 - RNA, 18 nt, Human
gcagcugggauuacaggu

SEQ ID NO: 1184071 - RNA, 21 nt, Human
gccucccgagcagcugggauu

SEQ ID NO: 1184072 - RNA, 23 nt, Human
gccucggccucccaaagugcugg

SEQ ID NO: 1184073 - RNA, 24 nt, Human
gcgauucuccugccucagccuccc

SEQ ID NO: 1184074 - RNA, 18 nt, Human
gcuggagugcaauggcca

SEQ ID NO: 1184075 - RNA, 23 nt, Human
gcuggucucgaacuccugaccuc

SEQ ID NO: 1184076 - RNA, 24 nt, Human
ggcuggucucgaacuccugaccuc

SEQ ID NO: 1184077 - RNA, 23 nt, Human
gggguuucaccauguuggucagg

SEQ ID NO: 1184078 - RNA, 19 nt, Human
ggucucgaacuccugaccu

SEQ ID NO: 1184079 - RNA, 23 nt, Human
guagagacgggguuucaccaugu

SEQ ID NO: 1184080 - RNA, 26 nt, Human
guuuugagaauuuuaggugugguccu

SEQ ID NO: 1184081 - RNA, 23 nt, Human
uaaaaaaaaaaaaaaaaucagaa

SEQ ID NO: 1184082 - RNA, 22 nt, Human
uaaguuacagacaugauuccuc

SEQ ID NO: 1184083 - RNA, 21 nt, Human
uaaucugcaaaaguucuucuu

SEQ ID NO: 1184084 - RNA, 24 nt, Human
uaauuuuuguguuuuuaguagaga

SEQ ID NO: 1184085 - RNA, 23 nt, Human
uacaggcgugagccaccgcgccc

SEQ ID NO: 1184086 - RNA, 22 nt, Human
uagagacgggguuucaccaugu

SEQ ID NO: 1184087 - RNA, 24 nt, Human
uaguagagacgggguuucaccaug

SEQ ID NO: 1184088 - RNA, 26 nt, Human
uaguagagacgggguuucaccauguu

SEQ ID NO: 1184089 - RNA, 22 nt, Human
uaguuggaaagauuaaccuuuu

SEQ ID NO: 1184090 - RNA, 21 nt, Human
uaucauucccuuuacauauau

SEQ ID NO: 1184091 - RNA, 27 nt, Human
uauccaaacgggcuacacaaaugauuu

SEQ ID NO: 1184092 - RNA, 19 nt, Human
uauuccaaccccuccacca

SEQ ID NO: 1184093 - RNA, 22 nt, Human
ucacugcaaccccccgccuccc

SEQ ID NO: 1184094 - RNA, 25 nt, Human
ucacugcaaccccccgccucccagg

SEQ ID NO: 1184095 - RNA, 24 nt, Human
uccaaacuccaaagaccuagaaag

SEQ ID NO: 1184096 - RNA, 21 nt, Human
uccaaagaccuagaaagaaca

SEQ ID NO: 1184097 - RNA, 26 nt, Human
uccaccaacaaagacacucucuugcc

SEQ ID NO: 1184098 - RNA, 24 nt, Human
ucccaaagugcugggauuacaggc

SEQ ID NO: 1184099 - RNA, 21 nt, Human
ucccagguucaagcgauucuc

SEQ ID NO: 1184100 - RNA, 24 nt, Human
ucccagguucaagcgauucuccug

SEQ ID NO: 1184101 - RNA, 23 nt, Human
ucccgagcagcugggauuacagg

SEQ ID NO: 1184102 - RNA, 24 nt, Human
ucccgagcagcugggauuacaggu

SEQ ID NO: 1184103 - RNA, 18 nt, Human
uccucaacuugggucucu

SEQ ID NO: 1184104 - RNA, 27 nt, Human
uccugagccaauacuuaaauaagccuc

SEQ ID NO: 1184105 - RNA, 18 nt, Human
ucggccucccaaagugcu

SEQ ID NO: 1184106 - RNA, 23 nt, Human
ucucacucuguugcccacgcugg

SEQ ID NO: 1184107 - RNA, 24 nt, Human
ucucacucuguugcccacgcugga

SEQ ID NO: 1184108 - RNA, 18 nt, Human
ucucgaacuccugaccuc

SEQ ID NO: 1184109 - RNA, 24 nt, Human
ucuguugcccacgcuggagugcaa

SEQ ID NO: 1184110 - RNA, 25 nt, Human
ugaagaaugagcacauacucuuuaa

SEQ ID NO: 1184111 - RNA, 19 nt, Human
ugaccuaugcccuaggcuc

SEQ ID NO: 1184112 - RNA, 27 nt, Human
ugagaacaacaacaacaacuggagacc

SEQ ID NO: 1184113 - RNA, 22 nt, Human
ugagauggagucucacucuguu

SEQ ID NO: 1184114 - RNA, 22 nt, Human
ugagugccuaguauaugucagg

SEQ ID NO: 1184115 - RNA, 21 nt, Human
ugcaaccccccgccucccagg

SEQ ID NO: 1184116 - RNA, 24 nt, Human
ugccucagccucccgagcagcugg

SEQ ID NO: 1184117 - RNA, 24 nt, Human
ugcugggauuacaggcgugagcca

SEQ ID NO: 1184118 - RNA, 23 nt, Human
uggagugcaauggccagaucucg

SEQ ID NO: 1184119 - RNA, 24 nt, Human
uggagugcaauggccagaucucgg

SEQ ID NO: 1184120 - RNA, 22 nt, Human
uggcuuucauguauguaagagu

SEQ ID NO: 1184121 - RNA, 18 nt, Human
ugggaauacauuugagaa

SEQ ID NO: 1184122 - RNA, 19 nt, Human
ugggacccuggccuucgcc

SEQ ID NO: 1184123 - RNA, 18 nt, Human
ugggauuacaggcgugag

SEQ ID NO: 1184124 - RNA, 19 nt, Human
ugggauuacaggcgugagc

SEQ ID NO: 1184125 - RNA, 21 nt, Human
ugggauuacaggcgugagcca

SEQ ID NO: 1184126 - RNA, 22 nt, Human
ugggauuacaggcgugagccac

SEQ ID NO: 1184127 - RNA, 23 nt, Human
ugggauuacaggcgugagccacc

SEQ ID NO: 1184128 - RNA, 24 nt, Human
ugggauuacaggcgugagccaccg

SEQ ID NO: 1184129 - RNA, 18 nt, Human
ugggauuacaggugcgcg

SEQ ID NO: 1184130 - RNA, 21 nt, Human
ugggauuacaggugcgcgcca

SEQ ID NO: 1184131 - RNA, 22 nt, Human
ugggauuacaggugcgcgccac

SEQ ID NO: 1184132 - RNA, 24 nt, Human
uggucaggcuggucucgaacuccu

SEQ ID NO: 1184133 - RNA, 18 nt, Human
uguaaacaacucccacaa

SEQ ID NO: 1184134 - RNA, 21 nt, Human
uguguuuuuaguagagacggg

SEQ ID NO: 1184135 - RNA, 21 nt, Human
uguuaaacgcgcugauuuaau

SEQ ID NO: 1184136 - RNA, 27 nt, Human
uuaaaaacaaaacaacagaaucucaac

SEQ ID NO: 1184137 - RNA, 18 nt, Human
uuaguagagacgggguuu

SEQ ID NO: 1184138 - RNA, 22 nt, Human
uuaguagagacgggguuucacc

SEQ ID NO: 1184139 - RNA, 24 nt, Human
uuaguagagacgggguuucaccau

SEQ ID NO: 1184140 - RNA, 21 nt, Human
uucaacuccaagacucaagau

SEQ ID NO: 1184141 - RNA, 21 nt, Human
uucaagcgauucuccugccuc

SEQ ID NO: 1184142 - RNA, 23 nt, Human
uucaagcgauucuccugccucag

SEQ ID NO: 1184143 - RNA, 24 nt, Human
uucaagcgauucuccugccucagc

SEQ ID NO: 1184144 - RNA, 19 nt, Human
uucaggacagggaagcacc

SEQ ID NO: 1184145 - RNA, 22 nt, Human
uuccaaccccuccaccacauuu

SEQ ID NO: 1184146 - RNA, 19 nt, Human
uuccaccaacaaagacacu

SEQ ID NO: 1184147 - RNA, 18 nt, Human
uugcccacgcuggagugc

SEQ ID NO: 1184148 - RNA, 19 nt, Human
uugcuuuaucauucccuuu

SEQ ID NO: 1184149 - RNA, 23 nt, Human
uuguguuuuuaguagagacgggg

SEQ ID NO: 1184150 - RNA, 18 nt, Human
uuuagacuuacagaaaag

SEQ ID NO: 1184151 - RNA, 24 nt, Human
uuucaccauguuggucaggcuggu

SEQ ID NO: 1184152 - RNA, 19 nt, Human
uuucugguucaggaucaug

SEQ ID NO: 1184153 - RNA, 20 nt, Human
uuucugguucaggaucaugu

SEQ ID NO: 1184154 - RNA, 21 nt, Human
uuuuguguuuuuaguagagac

SEQ ID NO: 1184155 - RNA, 24 nt, Human
uuuuuaguagagacgggguuucac

SEQ ID NO: 1184156 - RNA, 20 nt, Human
uuuuuguguuuuuaguagag

SEQ ID NO: 1184157 - RNA, 20 nt, Human
aaaaaaaacacacaaauaaa

SEQ ID NO: 1184158 - RNA, 22 nt, Human
aaaaacacacaaauaaaaacaa

SEQ ID NO: 1184159 - RNA, 22 nt, Human
aaaacaccucaaaaaauaaaca

SEQ ID NO: 1184160 - RNA, 24 nt, Human
aaaauaaauguauaugaauaaugc

SEQ ID NO: 1184161 - RNA, 19 nt, Human
aaaaugcccagucaaaaca

SEQ ID NO: 1184162 - RNA, 18 nt, Human
aaauauauaguacagccu

SEQ ID NO: 1184163 - RNA, 21 nt, Human
aaauauauguucucauguaca

SEQ ID NO: 1184164 - RNA, 21 nt, Human
aacaaauucugcagccaauag

SEQ ID NO: 1184165 - RNA, 23 nt, Human
aacaucuaguucauauccccaaa

SEQ ID NO: 1184166 - RNA, 23 nt, Human
aaucggguggauaacggaguaua

SEQ ID NO: 1184167 - RNA, 22 nt, Human
acaaccaauuacaauaaaauca

SEQ ID NO: 1184168 - RNA, 24 nt, Human
acacaaauaaaaacaaaaacaccu

SEQ ID NO: 1184169 - RNA, 24 nt, Human
acagcaagauacuugcuuuuggcc

SEQ ID NO: 1184170 - RNA, 24 nt, Human
acagccuuaacagugaugcuagaa

SEQ ID NO: 1184171 - RNA, 20 nt, Human
accaauuuuauauucccugu

SEQ ID NO: 1184172 - RNA, 22 nt, Human
acuguuucuucacuuuaaccaa

SEQ ID NO: 1184173 - RNA, 19 nt, Human
acuuaaaaaaaaaaaaaca

SEQ ID NO: 1184174 - RNA, 23 nt, Human
agaaaggugugaacaguacuguu

SEQ ID NO: 1184175 - RNA, 20 nt, Human
agaauaagugaugacaauau

SEQ ID NO: 1184176 - RNA, 21 nt, Human
agcaucaggcaugcacaguag

SEQ ID NO: 1184177 - RNA, 19 nt, Human
agccaacaccagaaacuua

SEQ ID NO: 1184178 - RNA, 22 nt, Human
agccuuaacagugaugcuagaa

SEQ ID NO: 1184179 - RNA, 18 nt, Human
aggugugaacaguacugu

SEQ ID NO: 1184180 - RNA, 24 nt, Human
auauauguucucauguacacugga

SEQ ID NO: 1184181 - RNA, 21 nt, Human
aucaugaccacaggaaaccaa

SEQ ID NO: 1184182 - RNA, 21 nt, Human
auuuagucauuuuaaacccaa

SEQ ID NO: 1184183 - RNA, 23 nt, Human
caaauaaaaacaaaaacaccuca

SEQ ID NO: 1184184 - RNA, 22 nt, Human
caagacaccugugauaaagaag

SEQ ID NO: 1184185 - RNA, 23 nt, Human
cacaacccaucaguagccaacac

SEQ ID NO: 1184186 - RNA, 25 nt, Human
cacagcaagauacuugcuuuuggcc

SEQ ID NO: 1184187 - RNA, 20 nt, Human
caccguacaacagugacaac

SEQ ID NO: 1184188 - RNA, 20 nt, Human
cagccuuucccucucccaaa

SEQ ID NO: 1184189 - RNA, 20 nt, Human
cauauccccaaaaaaugugg

SEQ ID NO: 1184190 - RNA, 24 nt, Human
ccacacacuuacggcaugccaagc

SEQ ID NO: 1184191 - RNA, 19 nt, Human
ccacuuuaggcuaaaauaa

SEQ ID NO: 1184192 - RNA, 21 nt, Human
cccagucaaaacauuuagaaa

SEQ ID NO: 1184193 - RNA, 20 nt, Human
ccugacccugccacccugcu

SEQ ID NO: 1184194 - RNA, 24 nt, Human
ccugacccugccacccugcugcaa

SEQ ID NO: 1184195 - RNA, 25 nt, Human
cuaaacacccaaguuauuacacaau

SEQ ID NO: 1184196 - RNA, 19 nt, Human
cuacacacagcaagauacu

SEQ ID NO: 1184197 - RNA, 23 nt, Human
cucccaaauacuacccaggaaaa

SEQ ID NO: 1184198 - RNA, 24 nt, Human
cuccuaaacacccaaguuauuaca

SEQ ID NO: 1184199 - RNA, 18 nt, Human
cucucccaaauacuaccc

SEQ ID NO: 1184200 - RNA, 23 nt, Human
cuuaaaaaaaaaaaaacacacaa

SEQ ID NO: 1184201 - RNA, 19 nt, Human
cuuacggcaugccaagccu

SEQ ID NO: 1184202 - RNA, 23 nt, Human
gaaaaaaguuccaagcugacuua

SEQ ID NO: 1184203 - RNA, 20 nt, Human
gaaaaacagaaacuuccucc

SEQ ID NO: 1184204 - RNA, 19 nt, Human
gaaguacgauuccccggca

SEQ ID NO: 1184205 - RNA, 22 nt, Human
gaagugacuugcuucaagugcc

SEQ ID NO: 1184206 - RNA, 21 nt, Human
gaggugugugauaauuaggag

SEQ ID NO: 1184207 - RNA, 21 nt, Human
gaucagucucuucuuuuuauu

SEQ ID NO: 1184208 - RNA, 23 nt, Human
ggaguauaguuauuccacuuaag

SEQ ID NO: 1184209 - RNA, 22 nt, Human
gugaauaucaaacauaaucaca

SEQ ID NO: 1184210 - RNA, 20 nt, Human
uaaaaacaaaaacaccucaa

SEQ ID NO: 1184211 - RNA, 26 nt, Human
uaaaaacaaaaacaccucaaaaaaua

SEQ ID NO: 1184212 - RNA, 18 nt, Human
uaaccaagagacuacaca

SEQ ID NO: 1184213 - RNA, 23 nt, Human
uaagcuacaauauguuuaaagca

SEQ ID NO: 1184214 - RNA, 19 nt, Human
uacacaaugggaagcugau

SEQ ID NO: 1184215 - RNA, 23 nt, Human
uacuacccaggaaaaaaguucca

SEQ ID NO: 1184216 - RNA, 21 nt, Human
uauuaaaccuuacuccccaaa

SEQ ID NO: 1184217 - RNA, 21 nt, Human
uauuagaagggacugaauaua

SEQ ID NO: 1184218 - RNA, 21 nt, Human
uauuugccaggucauccuaau

SEQ ID NO: 1184219 - RNA, 24 nt, Human
ucaauacccgauggcaauauuaaa

SEQ ID NO: 1184220 - RNA, 22 nt, Human
ucagauugcuuggaucuugguc

SEQ ID NO: 1184221 - RNA, 22 nt, Human
ucaguggugguguucaagaaua

SEQ ID NO: 1184222 - RNA, 22 nt, Human
uccaagcugacuuaaaaaaaaa

SEQ ID NO: 1184223 - RNA, 18 nt, Human
ucccaaauacuacccagg

SEQ ID NO: 1184224 - RNA, 19 nt, Human
uccccaaaaaaugugaaaa

SEQ ID NO: 1184225 - RNA, 19 nt, Human
uccccggcagcagucuacc

SEQ ID NO: 1184226 - RNA, 19 nt, Human
ucggugguaaguuaccucu

SEQ ID NO: 1184227 - RNA, 22 nt, Human
ucuaguucauauccccaaaaaa

SEQ ID NO: 1184228 - RNA, 18 nt, Human
ucuccugacccugccacc

SEQ ID NO: 1184229 - RNA, 22 nt, Human
ucugcagccaauaguacacuga

SEQ ID NO: 1184230 - RNA, 18 nt, Human
ucuuuaauucuagacacc

SEQ ID NO: 1184231 - RNA, 19 nt, Human
ugaaaagacuccuaaacac

SEQ ID NO: 1184232 - RNA, 20 nt, Human
ugaauauaauuauggagacu

SEQ ID NO: 1184233 - RNA, 24 nt, Human
ugaccuaugucuaaauggagaaaa

SEQ ID NO: 1184234 - RNA, 18 nt, Human
ugacuuaaaaaaaaaaaa

SEQ ID NO: 1184235 - RNA, 22 nt, Human
ugauucaguauccacaguccag

SEQ ID NO: 1184236 - RNA, 25 nt, Human
uguauauaucuuaacacauauaucu

SEQ ID NO: 1184237 - RNA, 27 nt, Human
uguauuaaaauccaggugaauaucaaa

SEQ ID NO: 1184238 - RNA, 18 nt, Human
ugugcacagcuguauaca

SEQ ID NO: 1184239 - RNA, 18 nt, Human
uuaaaagaaaaaugccca

SEQ ID NO: 1184240 - RNA, 22 nt, Human
uucaaauaguagcugaaaauag

SEQ ID NO: 1184241 - RNA, 25 nt, Human
uucaaauaguagcugaaaauagggu

SEQ ID NO: 1184242 - RNA, 28 nt, Human
uucaaauaguagcugaaaauaggguuug

SEQ ID NO: 1184243 - RNA, 23 nt, Human
uucaugcugcauuuucauuucua

SEQ ID NO: 1184244 - RNA, 20 nt, Human
uucauuucuauagagcagac

SEQ ID NO: 1184245 - RNA, 19 nt, Human
uuccacuuaagaagcauuc

SEQ ID NO: 1184246 - RNA, 20 nt, Human
uugccaggucauccuaauuu

SEQ ID NO: 1184247 - RNA, 24 nt, Human
aggcacaguggcuugggccuccaa

SEQ ID NO: 1184248 - RNA, 24 nt, Human
uggcuugggccuccaaucccggca

SEQ ID NO: 1184249 - RNA, 24 nt, Human
aaacauguccuguauuuacugucu

SEQ ID NO: 1184250 - RNA, 21 nt, Human
aaaggaaauacguggguaacc

SEQ ID NO: 1184251 - RNA, 18 nt, Human
aaaugccaggaaccaugg

SEQ ID NO: 1184252 - RNA, 19 nt, Human
aacagccuuuucucuaguu

SEQ ID NO: 1184253 - RNA, 22 nt, Human
aaggagaagccaguuuacaaug

SEQ ID NO: 1184254 - RNA, 20 nt, Human
aaggccaggaguucaagacc

SEQ ID NO: 1184255 - RNA, 21 nt, Human
aauaauaaaaauaaaaugaac

SEQ ID NO: 1184256 - RNA, 27 nt, Human
acagccuuuucucuaguuuuguuuccc

SEQ ID NO: 1184257 - RNA, 19 nt, Human
acccuugcaauagcucaua

SEQ ID NO: 1184258 - RNA, 21 nt, Human
acuccagcugccucuaaucuc

SEQ ID NO: 1184259 - RNA, 19 nt, Human
acuuggucuguccucuuuc

SEQ ID NO: 1184260 - RNA, 21 nt, Human
agaauaaaaaguucuaaaagg

SEQ ID NO: 1184261 - RNA, 24 nt, Human
agacaaaaccacacucaaguuauc

SEQ ID NO: 1184262 - RNA, 18 nt, Human
agaggguagauuuugcau

SEQ ID NO: 1184263 - RNA, 23 nt, Human
agcacuuugggaggccgaggcgg

SEQ ID NO: 1184264 - RNA, 19 nt, Human
agccaccuuucucccacuc

SEQ ID NO: 1184265 - RNA, 22 nt, Human
agccaguuaaacaaugagccuc

SEQ ID NO: 1184266 - RNA, 24 nt, Human
aggaguucaagaccagccucugua

SEQ ID NO: 1184267 - RNA, 22 nt, Human
aggcagcacauugcauggaauu

SEQ ID NO: 1184268 - RNA, 24 nt, Human
aguggcucacacuuauagucccag

SEQ ID NO: 1184269 - RNA, 23 nt, Human
auucaauuaucaugcuuuugauu

SEQ ID NO: 1184270 - RNA, 23 nt, Human
caaccuuucaauccaaggacgau

SEQ ID NO: 1184271 - RNA, 24 nt, Human
cacacuuauagucccagcacuuug

SEQ ID NO: 1184272 - RNA, 20 nt, Human
cacuccagcugccucuaauc

SEQ ID NO: 1184273 - RNA, 21 nt, Human
cacugagucugcaggcuuucc

SEQ ID NO: 1184274 - RNA, 25 nt, Human
cacuucacccuugcaauagcucaua

SEQ ID NO: 1184275 - RNA, 24 nt, Human
cagcacuuugggaggccgaggcgg

SEQ ID NO: 1184276 - RNA, 23 nt, Human
cagccugggcuuucuuuccuaaa

SEQ ID NO: 1184277 - RNA, 21 nt, Human
caggaaccauggcagagcuaa

SEQ ID NO: 1184278 - RNA, 23 nt, Human
caggcuuucccccacucuuaucu

SEQ ID NO: 1184279 - RNA, 19 nt, Human
caguggcucacacuuauag

SEQ ID NO: 1184280 - RNA, 22 nt, Human
cauaggaguggcccugcagaga

SEQ ID NO: 1184281 - RNA, 25 nt, Human
cauccuuagccuuuccuaguggccc

SEQ ID NO: 1184282 - RNA, 25 nt, Human
cauggcaagacccccgccucuaaaa

SEQ ID NO: 1184283 - RNA, 28 nt, Human
cauggcaagacccccgccucuaaaaaaa

SEQ ID NO: 1184284 - RNA, 19 nt, Human
ccacaacagaaggcagcac

SEQ ID NO: 1184285 - RNA, 21 nt, Human
ccagccaccugguagaaugau

SEQ ID NO: 1184286 - RNA, 22 nt, Human
ccucuaaaaaaaauaauaaaaa

SEQ ID NO: 1184287 - RNA, 19 nt, Human
ccucuaaaacacaagcgga

SEQ ID NO: 1184288 - RNA, 19 nt, Human
ccuguauuuacugucuuug

SEQ ID NO: 1184289 - RNA, 19 nt, Human
cgaggcggauugcuuaagg

SEQ ID NO: 1184290 - RNA, 22 nt, Human
cgaggcggauugcuuaaggcca

SEQ ID NO: 1184291 - RNA, 24 nt, Human
cggauugcuuaaggccaggaguuc

SEQ ID NO: 1184292 - RNA, 20 nt, Human
cucaaugcucuccaagcacu

SEQ ID NO: 1184293 - RNA, 24 nt, Human
cucacacuuauagucccagcacuu

SEQ ID NO: 1184294 - RNA, 21 nt, Human
cucacgggacccuguuuucca

SEQ ID NO: 1184295 - RNA, 18 nt, Human
cuuauagacauacuacuu

SEQ ID NO: 1184296 - RNA, 23 nt, Human
gaccagcuucagaaccaaacugg

SEQ ID NO: 1184297 - RNA, 24 nt, Human
gagggccagaugcaguggcucaca

SEQ ID NO: 1184298 - RNA, 24 nt, Human
gauugcuuaaggccaggaguucaa

SEQ ID NO: 1184299 - RNA, 28 nt, Human
ggagaagccaguuuacaaugaacuuaga

SEQ ID NO: 1184300 - RNA, 18 nt, Human
ggcaggaaauccacaaca

SEQ ID NO: 1184301 - RNA, 21 nt, Human
ggcaggaaauccacaacagaa

SEQ ID NO: 1184302 - RNA, 24 nt, Human
gggccagaugcaguggcucacacu

SEQ ID NO: 1184303 - RNA, 24 nt, Human
guccgagccaccuuucucccacuc

SEQ ID NO: 1184304 - RNA, 24 nt, Human
guggcucacacuuauagucccagc

SEQ ID NO: 1184305 - RNA, 18 nt, Human
guggguaaccagagcugc

SEQ ID NO: 1184306 - RNA, 24 nt, Human
guucucacccuugcuguguaugua

SEQ ID NO: 1184307 - RNA, 18 nt, Human
uaaaacacaagcggagac

SEQ ID NO: 1184308 - RNA, 24 nt, Human
uaaaaggguaccagccaccuggua

SEQ ID NO: 1184309 - RNA, 23 nt, Human
uaaaaugaacaugaauuuagagg

SEQ ID NO: 1184310 - RNA, 19 nt, Human
uaacacaucucagaauaaa

SEQ ID NO: 1184311 - RNA, 18 nt, Human
uaaccagagcugcaaugg

SEQ ID NO: 1184312 - RNA, 20 nt, Human
uaccagccugggcuuucuuu

SEQ ID NO: 1184313 - RNA, 18 nt, Human
uagaaagaggguagauuu

SEQ ID NO: 1184314 - RNA, 22 nt, Human
uauguaaccuugggaaaauuac

SEQ ID NO: 1184315 - RNA, 22 nt, Human
ucacgggacccuguuuuccaua

SEQ ID NO: 1184316 - RNA, 18 nt, Human
uccauagugauuaacuag

SEQ ID NO: 1184317 - RNA, 22 nt, Human
ucccacuccagcugccucuaau

SEQ ID NO: 1184318 - RNA, 20 nt, Human
ucccauugccuuuuccuuug

SEQ ID NO: 1184319 - RNA, 21 nt, Human
uccuguauuuacugucuuugc

SEQ ID NO: 1184320 - RNA, 20 nt, Human
uccuugaugcuuaccuagca

SEQ ID NO: 1184321 - RNA, 21 nt, Human
ucuaucacuucacccuugcaa

SEQ ID NO: 1184322 - RNA, 21 nt, Human
ucugcaggcuuucccccacuc

SEQ ID NO: 1184323 - RNA, 18 nt, Human
ugagagaagucuuuugua

SEQ ID NO: 1184324 - RNA, 20 nt, Human
ugagucugcaggcuuucccc

SEQ ID NO: 1184325 - RNA, 25 nt, Human
ugcauaaaauucuuuucucacggga

SEQ ID NO: 1184326 - RNA, 24 nt, Human
ugccuuuuccuuugguagacucua

SEQ ID NO: 1184327 - RNA, 24 nt, Human
ugcucugcccuuauagacauacua

SEQ ID NO: 1184328 - RNA, 23 nt, Human
uggcccuggaaaaaucucaauuu

SEQ ID NO: 1184329 - RNA, 24 nt, Human
uggcucacacuuauagucccagca

SEQ ID NO: 1184330 - RNA, 18 nt, Human
ugggaggccgaggcggau

SEQ ID NO: 1184331 - RNA, 20 nt, Human
ugggaggccgaggcggauug

SEQ ID NO: 1184332 - RNA, 18 nt, Human
uguaaagaguggcuuaua

SEQ ID NO: 1184333 - RNA, 18 nt, Human
ugugagauaaaauugaag

SEQ ID NO: 1184334 - RNA, 21 nt, Human
uguuucccuuuuucuuccaag

SEQ ID NO: 1184335 - RNA, 25 nt, Human
uguuucccuuuuucuuccaaggaga

SEQ ID NO: 1184336 - RNA, 24 nt, Human
uguuugcuacuuggucuguccucu

SEQ ID NO: 1184337 - RNA, 19 nt, Human
uuaccuagcagugucuggc

SEQ ID NO: 1184338 - RNA, 25 nt, Human
uuccaaggcauccuuagccuuuccu

SEQ ID NO: 1184339 - RNA, 25 nt, Human
uugaaaaaaguguucacuaaucauu

SEQ ID NO: 1184340 - RNA, 23 nt, Human
uugcuuaaggccaggaguucaag

SEQ ID NO: 1184341 - RNA, 18 nt, Human
uugggaggccgaggcgga

SEQ ID NO: 1184342 - RNA, 19 nt, Human
uuguauaaaggagaagcca

SEQ ID NO: 1184343 - RNA, 22 nt, Human
uuguauaaaggagaagccaguu

SEQ ID NO: 1184344 - RNA, 22 nt, Human
uuuacugucuuugcauccuuga

SEQ ID NO: 1184345 - RNA, 23 nt, Human
acuuggcuggugcugucaaugag

SEQ ID NO: 1184346 - RNA, 21 nt, Human
cagccacagucagcucaaggg

SEQ ID NO: 1184347 - RNA, 23 nt, Human
ccuccgacagccacagucagcuc

SEQ ID NO: 1184348 - RNA, 21 nt, Human
ccugcccaccacuuccagcug

SEQ ID NO: 1184349 - RNA, 23 nt, Human
cuggugcugcugcagugggaagc

SEQ ID NO: 1184350 - RNA, 19 nt, Human
gcccaccacuuccagcugu

SEQ ID NO: 1184351 - RNA, 22 nt, Human
gcucaaggggagggaugcccag

SEQ ID NO: 1184352 - RNA, 23 nt, Human
guccuccgacagccacagucagc

SEQ ID NO: 1184353 - RNA, 25 nt, Human
gugcugcugcagugggaagcuggca

SEQ ID NO: 1184354 - RNA, 21 nt, Human
uauucugauagcuccuuccug

SEQ ID NO: 1184355 - RNA, 21 nt, Human
ucaaggggagggaugcccaga

SEQ ID NO: 1184356 - RNA, 19 nt, Human
uccuuuguucuccccagac

SEQ ID NO: 1184357 - RNA, 18 nt, Human
ucuguuaucuuuauucug

SEQ ID NO: 1184358 - RNA, 21 nt, Human
uuuauucugauagcuccuucc

SEQ ID NO: 1184359 - RNA, 21 nt, Human
aaacagccaucggcagacuuc

SEQ ID NO: 1184360 - RNA, 24 nt, Human
aacaagcaacaugguggaaucuua

SEQ ID NO: 1184361 - RNA, 22 nt, Human
acauugucucacuucaccaucc

SEQ ID NO: 1184362 - RNA, 20 nt, Human
agaaagaaacauuucaagga

SEQ ID NO: 1184363 - RNA, 22 nt, Human
agacaagugcaaacgugucccu

SEQ ID NO: 1184364 - RNA, 21 nt, Human
auaaauuugagagaaagaaac

SEQ ID NO: 1184365 - RNA, 23 nt, Human
cacauugucucacuucaccaucc

SEQ ID NO: 1184366 - RNA, 23 nt, Human
cacugagccucacaaaacacucc

SEQ ID NO: 1184367 - RNA, 18 nt, Human
cagcggcuucugccugga

SEQ ID NO: 1184368 - RNA, 21 nt, Human
cucacaaaacacuccauucac

SEQ ID NO: 1184369 - RNA, 21 nt, Human
gagaaagaaacauuucaagga

SEQ ID NO: 1184370 - RNA, 22 nt, Human
gcagcacugagccucacaaaac

SEQ ID NO: 1184371 - RNA, 23 nt, Human
gcagcacugagccucacaaaaca

SEQ ID NO: 1184372 - RNA, 19 nt, Human
gcauuuuuaauuuuuagaa

SEQ ID NO: 1184373 - RNA, 21 nt, Human
gccuagaaaaucucuugcgaa

SEQ ID NO: 1184374 - RNA, 18 nt, Human
uaaacaagcaacauggug

SEQ ID NO: 1184375 - RNA, 20 nt, Human
uaugcagcacugagccucac

SEQ ID NO: 1184376 - RNA, 24 nt, Human
uccuccagcagacucuccccguca

SEQ ID NO: 1184377 - RNA, 23 nt, Human
ugaacuaaacaagcaacauggug

SEQ ID NO: 1184378 - RNA, 18 nt, Human
ugacuuccuccagcagac

SEQ ID NO: 1184379 - RNA, 20 nt, Human
ugacuuccuccagcagacuc

SEQ ID NO: 1184380 - RNA, 23 nt, Human
ugguugaacuaaacaagcaacau

SEQ ID NO: 1184381 - RNA, 25 nt, Human
aaaaaaaaguagaugauugacagaa

SEQ ID NO: 1184382 - RNA, 24 nt, Human
aaaagaugaacaugcauuuuaaga

SEQ ID NO: 1184383 - RNA, 23 nt, Human
aaagaaaaauauaccuuuucuuu

SEQ ID NO: 1184384 - RNA, 19 nt, Human
aacuugcucccugaaccug

SEQ ID NO: 1184385 - RNA, 21 nt, Human
aaguuuuggaggcucccaacc

SEQ ID NO: 1184386 - RNA, 20 nt, Human
aauaaagggaccgauuuaga

SEQ ID NO: 1184387 - RNA, 22 nt, Human
acaguaagcagacagaaaaaga

SEQ ID NO: 1184388 - RNA, 30 nt, Human
accugaaaucccagcacuuuaggaagccaa

SEQ ID NO: 1184389 - RNA, 22 nt, Human
acgcagccccccucacuccgcc

SEQ ID NO: 1184390 - RNA, 20 nt, Human
acgcggaaaagacucaacaa

SEQ ID NO: 1184391 - RNA, 19 nt, Human
agaaaaagaacgcgagaga

SEQ ID NO: 1184392 - RNA, 23 nt, Human
agaaaaccuccacaacuucacca

SEQ ID NO: 1184393 - RNA, 19 nt, Human
agacagaaaaagaacgcga

SEQ ID NO: 1184394 - RNA, 19 nt, Human
agacagaaaaagaacgcga

SEQ ID NO: 1184395 - RNA, 22 nt, Human
agacagaaaaagaacgcgagag

SEQ ID NO: 1184396 - RNA, 21 nt, Human
agagaagacagacauagagga

SEQ ID NO: 1184397 - RNA, 19 nt, Human
agauuucuucucugccuuc

SEQ ID NO: 1184398 - RNA, 27 nt, Human
aggaacaaacggaaggaaccgguaccc

SEQ ID NO: 1184399 - RNA, 21 nt, Human
aggaucacauugucaaggaca

SEQ ID NO: 1184400 - RNA, 20 nt, Human
aggcucccaaccuucaauuu

SEQ ID NO: 1184401 - RNA, 18 nt, Human
agguuuuauuuuacuuuu

SEQ ID NO: 1184402 - RNA, 25 nt, Human
aucaacugacuaaaauugauccaua

SEQ ID NO: 1184403 - RNA, 27 nt, Human
auugcuguuuuuugcauaacagaugac

SEQ ID NO: 1184404 - RNA, 18 nt, Human
auugucccaaaauccaga

SEQ ID NO: 1184405 - RNA, 20 nt, Human
caaaaaagaaccacuguuac

SEQ ID NO: 1184406 - RNA, 23 nt, Human
caagaacaaacauaugagccuaa

SEQ ID NO: 1184407 - RNA, 24 nt, Human
caagaagcuauuccucccucagca

SEQ ID NO: 1184408 - RNA, 22 nt, Human
caaggacaguaagcagacagaa

SEQ ID NO: 1184409 - RNA, 23 nt, Human
cacccacgguguccucaggguca

SEQ ID NO: 1184410 - RNA, 18 nt, Human
cacugcaguguguucugc

SEQ ID NO: 1184411 - RNA, 18 nt, Human
cagaucaaguaaaccugu

SEQ ID NO: 1184412 - RNA, 22 nt, Human
cagccccccucacuccgccucc

SEQ ID NO: 1184413 - RNA, 24 nt, Human
cauccacaugcaugaaacagcaca

SEQ ID NO: 1184414 - RNA, 19 nt, Human
ccaccuggagcuguuggca

SEQ ID NO: 1184415 - RNA, 19 nt, Human
cccccucacuccgccuccu

SEQ ID NO: 1184416 - RNA, 22 nt, Human
ccgccuccuccgggcuaucugu

SEQ ID NO: 1184417 - RNA, 19 nt, Human
ccgcgcgcaggcuccaccu

SEQ ID NO: 1184418 - RNA, 22 nt, Human
ccugaaccugaaaucccagcac

SEQ ID NO: 1184419 - RNA, 22 nt, Human
cgcagccccccucacuccgccu

SEQ ID NO: 1184420 - RNA, 24 nt, Human
cgcggaaaagacucaacaacuaca

SEQ ID NO: 1184421 - RNA, 23 nt, Human
cggaaaagacucaacaacuacau

SEQ ID NO: 1184422 - RNA, 28 nt, Human
cggaaaagacucaacaacuacaugguag

SEQ ID NO: 1184423 - RNA, 21 nt, Human
cuaaaugaaauuaucaacuga

SEQ ID NO: 1184424 - RNA, 22 nt, Human
cuccacaacuucaccauuucaa

SEQ ID NO: 1184425 - RNA, 22 nt, Human
cucccucagcaaaagaugaaca

SEQ ID NO: 1184426 - RNA, 20 nt, Human
cugaaccugaaaucccagca

SEQ ID NO: 1184427 - RNA, 19 nt, Human
cugccgcgcgcaggcucca

SEQ ID NO: 1184428 - RNA, 26 nt, Human
cuuaacucucuauaaugagcaagaca

SEQ ID NO: 1184429 - RNA, 19 nt, Human
cuuagaauuugucaacuua

SEQ ID NO: 1184430 - RNA, 19 nt, Human
cuucuuacagaucuaacac

SEQ ID NO: 1184431 - RNA, 23 nt, Human
gaaaaaacacagcuucuuacaga

SEQ ID NO: 1184432 - RNA, 24 nt, Human
gagaagacagacauagaggacagg

SEQ ID NO: 1184433 - RNA, 21 nt, Human
gcagccccccucacuccgccu

SEQ ID NO: 1184434 - RNA, 19 nt, Human
gccgcgcgcaggcuccacc

SEQ ID NO: 1184435 - RNA, 24 nt, Human
gccugaccaggauggguggccacc

SEQ ID NO: 1184436 - RNA, 21 nt, Human
ggaaaagacucaacaacuaca

SEQ ID NO: 1184437 - RNA, 21 nt, Human
ggaacaaagaaaaccuccaca

SEQ ID NO: 1184438 - RNA, 23 nt, Human
ggaacauccacaugcaugaaaca

SEQ ID NO: 1184439 - RNA, 19 nt, Human
ggacaggugaauagauacg

SEQ ID NO: 1184440 - RNA, 22 nt, Human
ggacaggugaauagauacggau

SEQ ID NO: 1184441 - RNA, 20 nt, Human
ggccaggcugguguacuugg

SEQ ID NO: 1184442 - RNA, 22 nt, Human
uaaaaggccaccaugucggggc

SEQ ID NO: 1184443 - RNA, 23 nt, Human
uaaaaggccaccaugucggggca

SEQ ID NO: 1184444 - RNA, 24 nt, Human
uaaaaggccaccaugucggggcac

SEQ ID NO: 1184445 - RNA, 24 nt, Human
uaaaauuccaaaaaagaaccacug

SEQ ID NO: 1184446 - RNA, 23 nt, Human
uaacacugcaguguguucugcca

SEQ ID NO: 1184447 - RNA, 23 nt, Human
uaacgcggaaaagacucaacaac

SEQ ID NO: 1184448 - RNA, 24 nt, Human
uaacucucuauaaugagcaagaca

SEQ ID NO: 1184449 - RNA, 19 nt, Human
uaagagauaucugcaggac

SEQ ID NO: 1184450 - RNA, 22 nt, Human
uaagauacauuuuacucccaaa

SEQ ID NO: 1184451 - RNA, 21 nt, Human
uaagugauugacacagauuau

SEQ ID NO: 1184452 - RNA, 21 nt, Human
uauggaacaaagaaaaccucc

SEQ ID NO: 1184453 - RNA, 22 nt, Human
uauggaacaaagaaaaccucca

SEQ ID NO: 1184454 - RNA, 18 nt, Human
ucaccauuucaagguucu

SEQ ID NO: 1184455 - RNA, 19 nt, Human
uccaaaaaagaaccacugu

SEQ ID NO: 1184456 - RNA, 21 nt, Human
uccaaauaucaaauauaggca

SEQ ID NO: 1184457 - RNA, 20 nt, Human
uccacaacuucaccauuuca

SEQ ID NO: 1184458 - RNA, 22 nt, Human
uccacaugcaugaaacagcaca

SEQ ID NO: 1184459 - RNA, 26 nt, Human
uccagauuucuucucugccuucaacu

SEQ ID NO: 1184460 - RNA, 18 nt, Human
ugaaacagcacaggagug

SEQ ID NO: 1184461 - RNA, 19 nt, Human
ugagagaagacagacauag

SEQ ID NO: 1184462 - RNA, 24 nt, Human
ugagagaagacagacauagagggg

SEQ ID NO: 1184463 - RNA, 26 nt, Human
ugagccuaauaaaaaagaggcacuuc

SEQ ID NO: 1184464 - RNA, 23 nt, Human
ugauaagagccaaccuuccaggg

SEQ ID NO: 1184465 - RNA, 20 nt, Human
ugauugacagaaggcuagau

SEQ ID NO: 1184466 - RNA, 31 nt, Human
ugccgucggaugcucaccagccucccugccc

SEQ ID NO: 1184467 - RNA, 23 nt, Human
ugcuuuuccaguauuuguuuacg

SEQ ID NO: 1184468 - RNA, 18 nt, Human
uggcgucauccucccagc

SEQ ID NO: 1184469 - RNA, 19 nt, Human
uguaaacaaaaaagagagc

SEQ ID NO: 1184470 - RNA, 22 nt, Human
uguacuuggucgagcccuuggc

SEQ ID NO: 1184471 - RNA, 21 nt, Human
ugucuuguuuuuacgugaggg

SEQ ID NO: 1184472 - RNA, 19 nt, Human
uuaaaaaaaaaaguagaug

SEQ ID NO: 1184473 - RNA, 21 nt, Human
uuggaggcucccaaccuucaa

SEQ ID NO: 1184474 - RNA, 27 nt, Human
uugucuuguuuuuacgugaggggaaug

SEQ ID NO: 1184475 - RNA, 22 nt, Human
uuuggaggcucccaaccuucaa

SEQ ID NO: 1184476 - RNA, 18 nt, Human
aaaagucacugcugaacc

SEQ ID NO: 1184477 - RNA, 21 nt, Human
aaagcauucuuaaagcagaga

SEQ ID NO: 1184478 - RNA, 18 nt, Human
aacugacaccagcagccu

SEQ ID NO: 1184479 - RNA, 19 nt, Human
aagcaaacgcagaaugaga

SEQ ID NO: 1184480 - RNA, 21 nt, Human
aagcaaacgcagaaugagaug

SEQ ID NO: 1184481 - RNA, 20 nt, Human
aaguccucugggcuccaccu

SEQ ID NO: 1184482 - RNA, 18 nt, Human
acaaugucauucgcagag

SEQ ID NO: 1184483 - RNA, 20 nt, Human
accaugacagcaucguacag

SEQ ID NO: 1184484 - RNA, 22 nt, Human
acccagaaagcauucuuaaagc

SEQ ID NO: 1184485 - RNA, 20 nt, Human
accccaauuucucaucugaa

SEQ ID NO: 1184486 - RNA, 21 nt, Human
agaaacagaaucaaguuuuau

SEQ ID NO: 1184487 - RNA, 25 nt, Human
aggccccugggcuccaccugcuccu

SEQ ID NO: 1184488 - RNA, 19 nt, Human
augaggauccugaucuucu

SEQ ID NO: 1184489 - RNA, 27 nt, Human
auuugguguuguuaguguucuggauuu

SEQ ID NO: 1184490 - RNA, 21 nt, Human
caauguguagccuuuucagau

SEQ ID NO: 1184491 - RNA, 19 nt, Human
caccugcuccucccagucc

SEQ ID NO: 1184492 - RNA, 19 nt, Human
caccugcuccucccagucc

SEQ ID NO: 1184493 - RNA, 19 nt, Human
caccugcuccucccagucc

SEQ ID NO: 1184494 - RNA, 19 nt, Human
caccugcuccucccagucc

SEQ ID NO: 1184495 - RNA, 19 nt, Human
caccugcuccuuccagucc

SEQ ID NO: 1184496 - RNA, 19 nt, Human
cagcugcugggcuccggcc

SEQ ID NO: 1184497 - RNA, 21 nt, Human
cauaacugcuggauccuacag

SEQ ID NO: 1184498 - RNA, 23 nt, Human
cauuuaaggucccaucaugucuu

SEQ ID NO: 1184499 - RNA, 25 nt, Human
cccagagaacuaacucuaagcccau

SEQ ID NO: 1184500 - RNA, 18 nt, Human
cccaucugcagugaugag

SEQ ID NO: 1184501 - RNA, 22 nt, Human
cccugggcuccaccugcuccuc

SEQ ID NO: 1184502 - RNA, 27 nt, Human
ccgucgugcaaauccucugggcuccac

SEQ ID NO: 1184503 - RNA, 20 nt, Human
ccuguaacagacucugcugu

SEQ ID NO: 1184504 - RNA, 21 nt, Human
cggccaacaggggacguagcc

SEQ ID NO: 1184505 - RNA, 27 nt, Human
cgugcaaauccucugggcuccaccugc

SEQ ID NO: 1184506 - RNA, 23 nt, Human
cuagaacauuuuaauacccagaa

SEQ ID NO: 1184507 - RNA, 19 nt, Human
cucguacauccugugaguu

SEQ ID NO: 1184508 - RNA, 18 nt, Human
cucuaauucugcuuguuc

SEQ ID NO: 1184509 - RNA, 22 nt, Human
cucugggcuccaccugcuccuc

SEQ ID NO: 1184510 - RNA, 22 nt, Human
cucugggcuccaccugcuccuc

SEQ ID NO: 1184511 - RNA, 22 nt, Human
cucugggcuccaccugcuccuc

SEQ ID NO: 1184512 - RNA, 21 nt, Human
cugacaccagcagccuuugcu

SEQ ID NO: 1184513 - RNA, 20 nt, Human
cugcuguuucucuaauucug

SEQ ID NO: 1184514 - RNA, 23 nt, Human
cuucaaacauuuugaguaacagu

SEQ ID NO: 1184515 - RNA, 22 nt, Human
gcaaguccucugggcuccaccu

SEQ ID NO: 1184516 - RNA, 22 nt, Human
gcaaguccucugggcuccaccu

SEQ ID NO: 1184517 - RNA, 20 nt, Human
gcaauguguagccuuuucag

SEQ ID NO: 1184518 - RNA, 22 nt, Human
gcagguuuauugacguuuucca

SEQ ID NO: 1184519 - RNA, 21 nt, Human
gcccaccaggaacaaacacgu

SEQ ID NO: 1184520 - RNA, 25 nt, Human
ggacguagcccucaggaggcccggc

SEQ ID NO: 1184521 - RNA, 21 nt, Human
uaacugcuggauccuacaggu

SEQ ID NO: 1184522 - RNA, 21 nt, Human
uaagaaacuaccaaacugucu

SEQ ID NO: 1184523 - RNA, 18 nt, Human
uagcuaaaaagucacugc

SEQ ID NO: 1184524 - RNA, 25 nt, Human
uauugggauuuuuaaauuuuuucuu

SEQ ID NO: 1184525 - RNA, 24 nt, Human
ucacugaucuuuuuggggucuccu

SEQ ID NO: 1184526 - RNA, 24 nt, Human
ucacugcugaacccgagggcaccu

SEQ ID NO: 1184527 - RNA, 19 nt, Human
ucagagccagugugcugac

SEQ ID NO: 1184528 - RNA, 18 nt, Human
ucagauggcaucuugccc

SEQ ID NO: 1184529 - RNA, 23 nt, Human
ucccagagaacuaacucuaagcc

SEQ ID NO: 1184530 - RNA, 21 nt, Human
ucucggggcucccacagcugc

SEQ ID NO: 1184531 - RNA, 19 nt, Human
ucucuaauucugcuuguuc

SEQ ID NO: 1184532 - RNA, 24 nt, Human
ucugcaguuuacauugcgguucac

SEQ ID NO: 1184533 - RNA, 21 nt, Human
ucuuucaaguucccagagaac

SEQ ID NO: 1184534 - RNA, 18 nt, Human
ugacacacguugccaccc

SEQ ID NO: 1184535 - RNA, 21 nt, Human
ugacaccagcagccuuugcug

SEQ ID NO: 1184536 - RNA, 19 nt, Human
ugacagcaucguacagggc

SEQ ID NO: 1184537 - RNA, 20 nt, Human
ugacaguucauuucuuuuua

SEQ ID NO: 1184538 - RNA, 19 nt, Human
ugagaugcgcccaccauga

SEQ ID NO: 1184539 - RNA, 19 nt, Human
ugcaauguguagccuuuuc

SEQ ID NO: 1184540 - RNA, 20 nt, Human
ugccucccaaguaaucuucu

SEQ ID NO: 1184541 - RNA, 21 nt, Human
ugcuauaaacauccaugugca

SEQ ID NO: 1184542 - RNA, 18 nt, Human
ugcugucgcugagauuuc

SEQ ID NO: 1184543 - RNA, 20 nt, Human
uggauguaccacaauuugcu

SEQ ID NO: 1184544 - RNA, 19 nt, Human
ugggauuuuuaaauuuuuu

SEQ ID NO: 1184545 - RNA, 21 nt, Human
ugugugcugucgcugagauuu

SEQ ID NO: 1184546 - RNA, 19 nt, Human
uguuaaagaggagcuguuc

SEQ ID NO: 1184547 - RNA, 24 nt, Human
uguuguagcuaaaaagucacugcu

SEQ ID NO: 1184548 - RNA, 22 nt, Human
uuaaagaggagcuguucuuaaa

SEQ ID NO: 1184549 - RNA, 27 nt, Human
uuauuugccaucuacauauuuuccuug

SEQ ID NO: 1184550 - RNA, 25 nt, Human
uucaaacuauacauuuaacuuaaca

SEQ ID NO: 1184551 - RNA, 21 nt, Human
uuccaaguuucggcaguuaug

SEQ ID NO: 1184552 - RNA, 21 nt, Human
uugcccaccaggaacaaacac

SEQ ID NO: 1184553 - RNA, 21 nt, Human
uuggugagguccacaucuuug

SEQ ID NO: 1184554 - RNA, 18 nt, Human
uuguuaguguucuggauu

SEQ ID NO: 1184555 - RNA, 25 nt, Human
uuucaaguucccagagaacuaacuc

SEQ ID NO: 1184556 - RNA, 19 nt, Human
uuuguuaaagaggagcugu

SEQ ID NO: 1184557 - RNA, 21 nt, Human
uuuguuaaagaggagcuguuc

SEQ ID NO: 1184558 - RNA, 22 nt, Human
uuuucuuugauuuaugcuuccu

SEQ ID NO: 1184559 - RNA, 20 nt, Human
gcagcacaaaagcccuacug

SEQ ID NO: 1184560 - RNA, 22 nt, Human
gcagcacaaaagcccuacuggg

SEQ ID NO: 1184561 - RNA, 20 nt, Human
ucugagcagcacaaaagccc

SEQ ID NO: 1184562 - RNA, 22 nt, Human
ugagcagcacaaaagcccuacu

SEQ ID NO: 1184563 - RNA, 19 nt, Human
ugguaacaucugagcagca

SEQ ID NO: 1184564 - RNA, 20 nt, Human
aaacccagcaaaaagagcac

SEQ ID NO: 1184565 - RNA, 18 nt, Human
aaacucuggcguggaaac

SEQ ID NO: 1184566 - RNA, 24 nt, Human
aaauaaacccagcaaaaagagcac

SEQ ID NO: 1184567 - RNA, 30 nt, Human
aaccagugcugccaagaagcgccaacacgg

SEQ ID NO: 1184568 - RNA, 24 nt, Human
acgauggaccagcacaaauaaacc

SEQ ID NO: 1184569 - RNA, 25 nt, Human
aggaacagcaaggcagacuucuuac

SEQ ID NO: 1184570 - RNA, 24 nt, Human
aucacagaccaauaucuacuccaa

SEQ ID NO: 1184571 - RNA, 22 nt, Human
caaaaagagcacuucauacuua

SEQ ID NO: 1184572 - RNA, 20 nt, Human
caaacucaugcaaaccagug

SEQ ID NO: 1184573 - RNA, 23 nt, Human
caugcaaaccagugcugccaaga

SEQ ID NO: 1184574 - RNA, 22 nt, Human
ccacaaaaacucuggcguggaa

SEQ ID NO: 1184575 - RNA, 21 nt, Human
cccaggaacagcaaggcagac

SEQ ID NO: 1184576 - RNA, 19 nt, Human
ccgcccacaaaaacucugg

SEQ ID NO: 1184577 - RNA, 19 nt, Human
cgccaacacguguguucuc

SEQ ID NO: 1184578 - RNA, 25 nt, Human
gcacaaauaaacccagcaaaaagag

SEQ ID NO: 1184579 - RNA, 18 nt, Human
uccaaacauccaguaaca

SEQ ID NO: 1184580 - RNA, 23 nt, Human
ucuacuccaaacauccaguaaca

SEQ ID NO: 1184581 - RNA, 21 nt, Human
ucuguggugcacaugcggccg

SEQ ID NO: 1184582 - RNA, 18 nt, Human
acaaggaaaugcuuuguu

SEQ ID NO: 1184583 - RNA, 19 nt, Human
accacugaaaacaaggaaa

SEQ ID NO: 1184584 - RNA, 20 nt, Human
agaauaagaaaaauaccaua

SEQ ID NO: 1184585 - RNA, 19 nt, Human
agacagacauguggaaaca

SEQ ID NO: 1184586 - RNA, 20 nt, Human
caaacaagaauaagaaaaaa

SEQ ID NO: 1184587 - RNA, 22 nt, Human
caagcaaucuaucaggugauag

SEQ ID NO: 1184588 - RNA, 20 nt, Human
cagacauguggaaacaagau

SEQ ID NO: 1184589 - RNA, 23 nt, Human
ccccugaagauuugcacuagccu

SEQ ID NO: 1184590 - RNA, 22 nt, Human
guaguccuggacggccccugaa

SEQ ID NO: 1184591 - RNA, 18 nt, Human
uaacaugaucaaacaaga

SEQ ID NO: 1184592 - RNA, 24 nt, Human
uucaauaacuuccuuuuaacauuu

SEQ ID NO: 1184593 - RNA, 20 nt, Human
uuuauaauuuucuacauuug

SEQ ID NO: 1184594 - RNA, 26 nt, Human
uuuuauuuucuucaauaacuuccuuu

SEQ ID NO: 1184595 - RNA, 19 nt, Human
acagggcagccccaucccc

SEQ ID NO: 1184596 - RNA, 24 nt, Human
aggcccucgcacugcuugcaaucc

SEQ ID NO: 1184597 - RNA, 19 nt, Human
caggaggaggccuggggca

SEQ ID NO: 1184598 - RNA, 18 nt, Human
ccccggaucccgcugcuc

SEQ ID NO: 1184599 - RNA, 23 nt, Human
cccggaucccgcugcuccccagg

SEQ ID NO: 1184600 - RNA, 20 nt, Human
ccgcugcuccccaggcgcag

SEQ ID NO: 1184601 - RNA, 20 nt, Human
cuagagcauuaggcagggug

SEQ ID NO: 1184602 - RNA, 19 nt, Human
cuccccaggcgcaguuggc

SEQ ID NO: 1184603 - RNA, 19 nt, Human
ggacaggaggaggccuggg

SEQ ID NO: 1184604 - RNA, 22 nt, Human
ggacaggaggaggccuggggca

SEQ ID NO: 1184605 - RNA, 21 nt, Human
gggcaggucaggcaggugagc

SEQ ID NO: 1184606 - RNA, 21 nt, Human
gggcugagaccagggccgaga

SEQ ID NO: 1184607 - RNA, 19 nt, Human
uagagcauuaggcagggug

SEQ ID NO: 1184608 - RNA, 21 nt, Human
uagagcauuaggcaggguggg

SEQ ID NO: 1184609 - RNA, 24 nt, Human
uaggcagggugggacaggaggagg

SEQ ID NO: 1184610 - RNA, 18 nt, Human
uccccggaucccgcugcu

SEQ ID NO: 1184611 - RNA, 24 nt, Human
ugagcacacagggcagccccaucc

SEQ ID NO: 1184612 - RNA, 21 nt, Human
ugggacaggaggaggccuggg

SEQ ID NO: 1184613 - RNA, 21 nt, Human
uuaggcagggugggacaggag

SEQ ID NO: 1184614 - RNA, 18 nt, Human
aaacaaaaagaacgcaca

SEQ ID NO: 1184615 - RNA, 22 nt, Human
acaaagccucccuuauacguaa

SEQ ID NO: 1184616 - RNA, 26 nt, Human
accccgaagagauacugaggacaaag

SEQ ID NO: 1184617 - RNA, 19 nt, Human
acuuugaguaauggaaaga

SEQ ID NO: 1184618 - RNA, 20 nt, Human
agaaaccaaggugcagagga

SEQ ID NO: 1184619 - RNA, 18 nt, Human
agaccggaaacccugaug

SEQ ID NO: 1184620 - RNA, 27 nt, Human
agaccggaaacccugaugggcagggga

SEQ ID NO: 1184621 - RNA, 19 nt, Human
agacugaugaacacuggug

SEQ ID NO: 1184622 - RNA, 24 nt, Human
agccaggagauccagguuccaggg

SEQ ID NO: 1184623 - RNA, 24 nt, Human
agccaggagauccagguuccaggg

SEQ ID NO: 1184624 - RNA, 25 nt, Human
aggcuggagugcaguggcgugaucu

SEQ ID NO: 1184625 - RNA, 19 nt, Human
aggcuuuggaggcaggagu

SEQ ID NO: 1184626 - RNA, 20 nt, Human
aguaauggaaagagcccuga

SEQ ID NO: 1184627 - RNA, 25 nt, Human
agugcagggugcgguucuaucucug

SEQ ID NO: 1184628 - RNA, 19 nt, Human
agugcaguggcgugaucuc

SEQ ID NO: 1184629 - RNA, 20 nt, Human
agugcaguggcgugaucucg

SEQ ID NO: 1184630 - RNA, 23 nt, Human
agugcaguggcgugaucucggcu

SEQ ID NO: 1184631 - RNA, 24 nt, Human
agugcaguggcgugaucucggcuc

SEQ ID NO: 1184632 - RNA, 18 nt, Human
caacagaagaccggaaac

SEQ ID NO: 1184633 - RNA, 23 nt, Human
caacagaagaccggaaacccuga

SEQ ID NO: 1184634 - RNA, 24 nt, Human
caaggucucucucuguugcccagg

SEQ ID NO: 1184635 - RNA, 22 nt, Human
cacaccuucuuucccaucccca

SEQ ID NO: 1184636 - RNA, 22 nt, Human
cacuaacaacagaagaccggaa

SEQ ID NO: 1184637 - RNA, 23 nt, Human
cacugcaaccuccgucuccuggg

SEQ ID NO: 1184638 - RNA, 25 nt, Human
cacugccacguagauguucaaacaa

SEQ ID NO: 1184639 - RNA, 22 nt, Human
cagugcugggggggauuuuugg

SEQ ID NO: 1184640 - RNA, 18 nt, Human
cauacagggaugaucauu

SEQ ID NO: 1184641 - RNA, 21 nt, Human
cauccccauccuggccaggga

SEQ ID NO: 1184642 - RNA, 22 nt, Human
ccaggagauccagguuccaggg

SEQ ID NO: 1184643 - RNA, 19 nt, Human
cccauccccauccuggcca

SEQ ID NO: 1184644 - RNA, 24 nt, Human
ccccgaagagauacugaggacaaa

SEQ ID NO: 1184645 - RNA, 26 nt, Human
ccucccuuauacguaacuucucuccu

SEQ ID NO: 1184646 - RNA, 23 nt, Human
ccuccgucuccuggguucuagcg

SEQ ID NO: 1184647 - RNA, 21 nt, Human
ccuuauacguaacuucucucc

SEQ ID NO: 1184648 - RNA, 20 nt, Human
ccuugcugucaggcugcuuu

SEQ ID NO: 1184649 - RNA, 24 nt, Human
cucacugcaaccuccgucuccugg

SEQ ID NO: 1184650 - RNA, 21 nt, Human
cuccuggguucuagcgauucu

SEQ ID NO: 1184651 - RNA, 21 nt, Human
cucuccuaaaaucaacucuaa

SEQ ID NO: 1184652 - RNA, 24 nt, Human
cucucucuguugcccaggcuggag

SEQ ID NO: 1184653 - RNA, 24 nt, Human
cucucuguugcccaggcuggagug

SEQ ID NO: 1184654 - RNA, 23 nt, Human
cucuguugcccaggcuggagugc

SEQ ID NO: 1184655 - RNA, 23 nt, Human
cugcaaccuccgucuccuggguu

SEQ ID NO: 1184656 - RNA, 24 nt, Human
cugcaaccuccgucuccuggguuc

SEQ ID NO: 1184657 - RNA, 22 nt, Human
cuuuucaacaacuguaccccga

SEQ ID NO: 1184658 - RNA, 21 nt, Human
gagacaaggucucucucuguu

SEQ ID NO: 1184659 - RNA, 23 nt, Human
gaguaggagccaggagauccagg

SEQ ID NO: 1184660 - RNA, 23 nt, Human
gaugauaccuugagaaaccaagg

SEQ ID NO: 1184661 - RNA, 24 nt, Human
gcaccagaaaugucaccacuaaca

SEQ ID NO: 1184662 - RNA, 22 nt, Human
gcagaggacagacugaugaaca

SEQ ID NO: 1184663 - RNA, 23 nt, Human
gcagaggacagacugaugaacac

SEQ ID NO: 1184664 - RNA, 24 nt, Human
gcccaggcuggagugcaguggcgu

SEQ ID NO: 1184665 - RNA, 22 nt, Human
gcgauucuugcaugcacagcau

SEQ ID NO: 1184666 - RNA, 19 nt, Human
gcuggagugcaguggcgug

SEQ ID NO: 1184667 - RNA, 20 nt, Human
ggaugaucauucugucauca

SEQ ID NO: 1184668 - RNA, 22 nt, Human
ggcuggagugcaguggcgugau

SEQ ID NO: 1184669 - RNA, 21 nt, Human
ggggaggaaguguacgcagug

SEQ ID NO: 1184670 - RNA, 25 nt, Human
ggggaggaaguguacgcagugcagg

SEQ ID NO: 1184671 - RNA, 19 nt, Human
guagauguucaaacaaaaa

SEQ ID NO: 1184672 - RNA, 22 nt, Human
gugcugggggggauuuuugggg

SEQ ID NO: 1184673 - RNA, 18 nt, Human
uaaaaucaacucuaaccc

SEQ ID NO: 1184674 - RNA, 25 nt, Human
uaaaaucaacucuaacccacugcca

SEQ ID NO: 1184675 - RNA, 23 nt, Human
uaagcaguccucucacccaguga

SEQ ID NO: 1184676 - RNA, 20 nt, Human
ucaaacaaaaagaacgcaca

SEQ ID NO: 1184677 - RNA, 24 nt, Human
ucacugcaaccuccgucuccuggg

SEQ ID NO: 1184678 - RNA, 25 nt, Human
ucacugcaaccuccgucuccugggu

SEQ ID NO: 1184679 - RNA, 19 nt, Human
ucauucaccagugcugggg

SEQ ID NO: 1184680 - RNA, 22 nt, Human
ucccuuauacguaacuucucuc

SEQ ID NO: 1184681 - RNA, 21 nt, Human
uccuggguucuagcgauucuu

SEQ ID NO: 1184682 - RNA, 22 nt, Human
ucuccuggguucuagcgauucu

SEQ ID NO: 1184683 - RNA, 23 nt, Human
ucucucucuguugcccaggcugg

SEQ ID NO: 1184684 - RNA, 24 nt, Human
ucucucucuguugcccaggcugga

SEQ ID NO: 1184685 - RNA, 20 nt, Human
ucucucuguugcccaggcug

SEQ ID NO: 1184686 - RNA, 24 nt, Human
ucucucuguugcccaggcuggagu

SEQ ID NO: 1184687 - RNA, 18 nt, Human
ucucuguugcccaggcug

SEQ ID NO: 1184688 - RNA, 23 nt, Human
ucucuguugcccaggcuggagug

SEQ ID NO: 1184689 - RNA, 24 nt, Human
ucuguugcccaggcuggagugcag

SEQ ID NO: 1184690 - RNA, 23 nt, Human
ugaggacaaagccucccuuauac

SEQ ID NO: 1184691 - RNA, 23 nt, Human
ugaucauucugucaucaggaagg

SEQ ID NO: 1184692 - RNA, 20 nt, Human
ugaugggcaggggagagccu

SEQ ID NO: 1184693 - RNA, 21 nt, Human
ugcacagcauuugaagggcac

SEQ ID NO: 1184694 - RNA, 19 nt, Human
ugcaugcacagcauuugaa

SEQ ID NO: 1184695 - RNA, 18 nt, Human
ugcccaggcuggagugca

SEQ ID NO: 1184696 - RNA, 21 nt, Human
ugcccaggcuggagugcagug

SEQ ID NO: 1184697 - RNA, 22 nt, Human
ugcccaggcuggagugcagugg

SEQ ID NO: 1184698 - RNA, 24 nt, Human
ugcccaggcuggagugcaguggcg

SEQ ID NO: 1184699 - RNA, 22 nt, Human
uggaggcaggagugaaacaagg

SEQ ID NO: 1184700 - RNA, 19 nt, Human
uggagugcaguggcgugau

SEQ ID NO: 1184701 - RNA, 23 nt, Human
uggagugcaguggcgugaucucg

SEQ ID NO: 1184702 - RNA, 24 nt, Human
uggagugcaguggcgugaucucgg

SEQ ID NO: 1184703 - RNA, 20 nt, Human
uggcgugaucucggcucacu

SEQ ID NO: 1184704 - RNA, 19 nt, Human
ugggcucuuaauauucaac

SEQ ID NO: 1184705 - RNA, 19 nt, Human
uuauacguaacuucucucc

SEQ ID NO: 1184706 - RNA, 24 nt, Human
uugcauacagggaugaucauucug

SEQ ID NO: 1184707 - RNA, 24 nt, Human
uugcccaggcuggagugcaguggc

SEQ ID NO: 1184708 - RNA, 21 nt, Human
uuugguuggauggcuuucuuu

SEQ ID NO: 1184709 - RNA, 21 nt, Human
accaggacacaggagcuccuc

SEQ ID NO: 1184710 - RNA, 24 nt, Human
accaggacacaggagcuccucuuc

SEQ ID NO: 1184711 - RNA, 20 nt, Human
agcaacgccacacacaaaca

SEQ ID NO: 1184712 - RNA, 18 nt, Human
agcuuucacuaauccagu

SEQ ID NO: 1184713 - RNA, 23 nt, Human
caacgccacacacaaacauguga

SEQ ID NO: 1184714 - RNA, 22 nt, Human
cagcuccucgggugugaagcuc

SEQ ID NO: 1184715 - RNA, 24 nt, Human
caucccagcaacgccacacacaaa

SEQ ID NO: 1184716 - RNA, 18 nt, Human
ccaggccaucuaucuugc

SEQ ID NO: 1184717 - RNA, 19 nt, Human
cuccaggccaucuaucuug

SEQ ID NO: 1184718 - RNA, 24 nt, Human
cuccugggccagcuccucgggugu

SEQ ID NO: 1184719 - RNA, 21 nt, Human
gcagaaaacuaauaaccaccg

SEQ ID NO: 1184720 - RNA, 18 nt, Human
gccacacacaaacaugug

SEQ ID NO: 1184721 - RNA, 22 nt, Human
ggaauuccggcacgugcuugag

SEQ ID NO: 1184722 - RNA, 18 nt, Human
uaaccaccgguagccuug

SEQ ID NO: 1184723 - RNA, 22 nt, Human
uaguaaguguccaaagcacugc

SEQ ID NO: 1184724 - RNA, 22 nt, Human
uccacguuguaugugaucugga

SEQ ID NO: 1184725 - RNA, 22 nt, Human
ucuuccagauucuuucaguugg

SEQ ID NO: 1184726 - RNA, 22 nt, Human
ugagcagaaaacuaauaaccac

SEQ ID NO: 1184727 - RNA, 27 nt, Human
uggaaagggacucagcuggggccucca

SEQ ID NO: 1184728 - RNA, 20 nt, Human
uggaauuccggcacgugcuu

SEQ ID NO: 1184729 - RNA, 23 nt, Human
uggcgaacggcauccacguugua

SEQ ID NO: 1184730 - RNA, 27 nt, Human
ugugaagcucauggcgcugacauugua

SEQ ID NO: 1184731 - RNA, 18 nt, Human
uuccacccccaguccuuc

SEQ ID NO: 1184732 - RNA, 21 nt, Human
acaaguguuggaugagcugau

SEQ ID NO: 1184733 - RNA, 27 nt, Human
acuugcucuucugugcacugcauguac

SEQ ID NO: 1184734 - RNA, 19 nt, Human
agcccaacggcagcggcgg

SEQ ID NO: 1184735 - RNA, 23 nt, Human
aguagccacuuccgcuaggaguc

SEQ ID NO: 1184736 - RNA, 23 nt, Human
auggacaaguguuggaugagcug

SEQ ID NO: 1184737 - RNA, 19 nt, Human
caaaaucaaaagcauggac

SEQ ID NO: 1184738 - RNA, 23 nt, Human
caagugacuugcucuucugugcc

SEQ ID NO: 1184739 - RNA, 21 nt, Human
caccacuugauccuguccucc

SEQ ID NO: 1184740 - RNA, 21 nt, Human
cacccaugcgcuggguuucac

SEQ ID NO: 1184741 - RNA, 22 nt, Human
cacgggccagccccgcgccggg

SEQ ID NO: 1184742 - RNA, 23 nt, Human
cagacugaaguccaggcucugcu

SEQ ID NO: 1184743 - RNA, 22 nt, Human
cagccccugucuccccgcggcc

SEQ ID NO: 1184744 - RNA, 20 nt, Human
cccagccccugucuccccgc

SEQ ID NO: 1184745 - RNA, 19 nt, Human
cccgccccgccccacgggc

SEQ ID NO: 1184746 - RNA, 20 nt, Human
ccgccagcaagucaagugag

SEQ ID NO: 1184747 - RNA, 23 nt, Human
ccuuucuacccggcugucgaggg

SEQ ID NO: 1184748 - RNA, 18 nt, Human
cgccgcgcccacccagcc

SEQ ID NO: 1184749 - RNA, 18 nt, Human
cgccgcgcccacccagcc

SEQ ID NO: 1184750 - RNA, 20 nt, Human
cggccagggcguggaagcgg

SEQ ID NO: 1184751 - RNA, 18 nt, Human
cggguggacaauguggug

SEQ ID NO: 1184752 - RNA, 21 nt, Human
cguccagccccagccccuguc

SEQ ID NO: 1184753 - RNA, 24 nt, Human
cuacugcccuccgcuugccaacgc

SEQ ID NO: 1184754 - RNA, 22 nt, Human
cuccggccgcgggggagcaugg

SEQ ID NO: 1184755 - RNA, 19 nt, Human
cucguccagccccagcccc

SEQ ID NO: 1184756 - RNA, 23 nt, Human
cugcugcagauuaacgggguggc

SEQ ID NO: 1184757 - RNA, 19 nt, Human
cugugccugacgggccacc

SEQ ID NO: 1184758 - RNA, 24 nt, Human
cugugccugacgggccaccacuug

SEQ ID NO: 1184759 - RNA, 23 nt, Human
cuugggccucguccagccccagc

SEQ ID NO: 1184760 - RNA, 18 nt, Human
gacggggaggcugugcgg

SEQ ID NO: 1184761 - RNA, 22 nt, Human
gauccuguccucccggcaggac

SEQ ID NO: 1184762 - RNA, 23 nt, Human
gauccuguccucccggcaggaca

SEQ ID NO: 1184763 - RNA, 18 nt, Human
gccccgccccacgggcca

SEQ ID NO: 1184764 - RNA, 20 nt, Human
gccccgccccacgggccagc

SEQ ID NO: 1184765 - RNA, 21 nt, Human
ggacccggagcccaacggcag

SEQ ID NO: 1184766 - RNA, 18 nt, Human
ggauuuaaaaggucaaug

SEQ ID NO: 1184767 - RNA, 18 nt, Human
ggcaggacaauacggagg

SEQ ID NO: 1184768 - RNA, 18 nt, Human
ggccggugccggcggcug

SEQ ID NO: 1184769 - RNA, 18 nt, Human
gggccuguggagaggggu

SEQ ID NO: 1184770 - RNA, 23 nt, Human
gugggugucugacggggaggcug

SEQ ID NO: 1184771 - RNA, 22 nt, Human
uaagaaggacaaaaucaaaagc

SEQ ID NO: 1184772 - RNA, 23 nt, Human
uaggccucgccgcgcccacccag

SEQ ID NO: 1184773 - RNA, 23 nt, Human
ucccugcggcgggguaaccgccu

SEQ ID NO: 1184774 - RNA, 22 nt, Human
uccuacuuuugaauaaaaaugu

SEQ ID NO: 1184775 - RNA, 19 nt, Human
ucgagggcacccugugccu

SEQ ID NO: 1184776 - RNA, 20 nt, Human
ucgccgcgcccacccagccu

SEQ ID NO: 1184777 - RNA, 19 nt, Human
ucuguggccgaguccuagg

SEQ ID NO: 1184778 - RNA, 27 nt, Human
ugagguuguggcaauuuacuuugugaa

SEQ ID NO: 1184779 - RNA, 23 nt, Human
ugcacugcauguacuuggguucc

SEQ ID NO: 1184780 - RNA, 18 nt, Human
ugccggcggcuguaggcc

SEQ ID NO: 1184781 - RNA, 20 nt, Human
ugccugacgggccaccacuu

SEQ ID NO: 1184782 - RNA, 23 nt, Human
ugcgggagaggcgcuugggccuc

SEQ ID NO: 1184783 - RNA, 25 nt, Human
uggaagcggauucugaggcggcuuu

SEQ ID NO: 1184784 - RNA, 19 nt, Human
ugggcggugggaaaggaac

SEQ ID NO: 1184785 - RNA, 24 nt, Human
uggggcgggcccagccucaccgcc

SEQ ID NO: 1184786 - RNA, 20 nt, Human
ugugcacugcauguacuuga

SEQ ID NO: 1184787 - RNA, 18 nt, Human
uuaaaaggucaaugaagu

SEQ ID NO: 1184788 - RNA, 24 nt, Human
uugcggagcugauuaagaccccgc

SEQ ID NO: 1184789 - RNA, 18 nt, Human
uuuccucuuucuugcucc

SEQ ID NO: 1184790 - RNA, 21 nt, Human
aaauagaagacacauagagaa

SEQ ID NO: 1184791 - RNA, 23 nt, Human
aacacugugguuuaaauucacau

SEQ ID NO: 1184792 - RNA, 24 nt, Human
aaccaguaugauggcaaaaucaca

SEQ ID NO: 1184793 - RNA, 24 nt, Human
aacuucaaaauauucaaacuaaaa

SEQ ID NO: 1184794 - RNA, 24 nt, Human
aagcacaccagagccaaucaugac

SEQ ID NO: 1184795 - RNA, 25 nt, Human
aauagaagacacauagagaacaaaa

SEQ ID NO: 1184796 - RNA, 19 nt, Human
acaggaauaauuucaaaca

SEQ ID NO: 1184797 - RNA, 18 nt, Human
acccuggcuaauaucugg

SEQ ID NO: 1184798 - RNA, 23 nt, Human
acuguugcuaccaugagggaagu

SEQ ID NO: 1184799 - RNA, 19 nt, Human
agacugggucauuagaaau

SEQ ID NO: 1184800 - RNA, 24 nt, Human
agucagacaucccccagcagcuuc

SEQ ID NO: 1184801 - RNA, 20 nt, Human
caccuaguguccaaagaaua

SEQ ID NO: 1184802 - RNA, 18 nt, Human
cagagccaaucaugacuc

SEQ ID NO: 1184803 - RNA, 24 nt, Human
cagcagacuucaagagcacagaua

SEQ ID NO: 1184804 - RNA, 25 nt, Human
cauccucaaacuucaaaauauucaa

SEQ ID NO: 1184805 - RNA, 24 nt, Human
ccagcagcuuccggaaagucuucu

SEQ ID NO: 1184806 - RNA, 21 nt, Human
cccaaaagucuagcugcaauu

SEQ ID NO: 1184807 - RNA, 27 nt, Human
cccaaacagcaauaacaagaggaguuc

SEQ ID NO: 1184808 - RNA, 21 nt, Human
ccucugcacgccgcucggcuc

SEQ ID NO: 1184809 - RNA, 18 nt, Human
ccucuugcugcuggugug

SEQ ID NO: 1184810 - RNA, 24 nt, Human
ccucuugcugcuggugugagaacc

SEQ ID NO: 1184811 - RNA, 22 nt, Human
ccugcgaggcacaguccccaaa

SEQ ID NO: 1184812 - RNA, 21 nt, Human
cgaggcacaguccccaaaagu

SEQ ID NO: 1184813 - RNA, 21 nt, Human
cuccagcaccgcgcgcucucc

SEQ ID NO: 1184814 - RNA, 21 nt, Human
cuuaguucuuuuucacaaagu

SEQ ID NO: 1184815 - RNA, 22 nt, Human
cuucauuuuaaaaaagagccug

SEQ ID NO: 1184816 - RNA, 21 nt, Human
cuuguagccucugcacgccgc

SEQ ID NO: 1184817 - RNA, 21 nt, Human
gacacauagagaacaaaaaca

SEQ ID NO: 1184818 - RNA, 25 nt, Human
gagaacaaaaacacuuacuggcugu

SEQ ID NO: 1184819 - RNA, 20 nt, Human
gcacgccgcucggcuccgcc

SEQ ID NO: 1184820 - RNA, 23 nt, Human
gcagacuucaagagcacagauaa

SEQ ID NO: 1184821 - RNA, 18 nt, Human
gcucguugcuuggccuac

SEQ ID NO: 1184822 - RNA, 18 nt, Human
ggaaagcccaacauccuc

SEQ ID NO: 1184823 - RNA, 22 nt, Human
ggagaaagucccccaaucacca

SEQ ID NO: 1184824 - RNA, 28 nt, Human
ggauagguguggcugguugacgaccucg

SEQ ID NO: 1184825 - RNA, 22 nt, Human
uaaaaaagagccugugacccug

SEQ ID NO: 1184826 - RNA, 23 nt, Human
uaaaaaagagccugugacccugg

SEQ ID NO: 1184827 - RNA, 22 nt, Human
uaaaaugucucaugccuugccu

SEQ ID NO: 1184828 - RNA, 18 nt, Human
uaaggaaagcccaacauc

SEQ ID NO: 1184829 - RNA, 27 nt, Human
uacaauaaggaaagcccaacauccuca

SEQ ID NO: 1184830 - RNA, 24 nt, Human
uacggcacuuguagccucugcacg

SEQ ID NO: 1184831 - RNA, 22 nt, Human
uagaaguucuuggccauuacag

SEQ ID NO: 1184832 - RNA, 19 nt, Human
uaugauggcaaaaucacaa

SEQ ID NO: 1184833 - RNA, 21 nt, Human
ucauuagaaauauuuuucuau

SEQ ID NO: 1184834 - RNA, 23 nt, Human
ucggccacccggugcggcuccag

SEQ ID NO: 1184835 - RNA, 20 nt, Human
ucucccggcacgguucccgg

SEQ ID NO: 1184836 - RNA, 20 nt, Human
ugagaaccagcagacuucaa

SEQ ID NO: 1184837 - RNA, 22 nt, Human
ugcuuaguucuuuuucacaaag

SEQ ID NO: 1184838 - RNA, 18 nt, Human
uggccuacagcaagugau

SEQ ID NO: 1184839 - RNA, 24 nt, Human
ugugagaaccagcagacuucaaga

SEQ ID NO: 1184840 - RNA, 18 nt, Human
uguguaaaagaaauaauu

SEQ ID NO: 1184841 - RNA, 19 nt, Human
uguguaaaagaaauaauuu

SEQ ID NO: 1184842 - RNA, 21 nt, Human
uuagccuucagcucuucagaa

SEQ ID NO: 1184843 - RNA, 22 nt, Human
uuaguguuuagccaaauuacaa

SEQ ID NO: 1184844 - RNA, 26 nt, Human
uucaaaauauucaaacuaaaaauucc

SEQ ID NO: 1184845 - RNA, 19 nt, Human
uucaagagcacagauaacc

SEQ ID NO: 1184846 - RNA, 21 nt, Human
uucacauuggucuuacaauga

SEQ ID NO: 1184847 - RNA, 22 nt, Human
uugccaggcaaauaaauugcac

SEQ ID NO: 1184848 - RNA, 23 nt, Human
aacauccuggcccaaacuaccaa

SEQ ID NO: 1184849 - RNA, 18 nt, Human
aagacuggcucaggaacc

SEQ ID NO: 1184850 - RNA, 19 nt, Human
accaucaacauccuggccc

SEQ ID NO: 1184851 - RNA, 18 nt, Human
aguccucaaaucugugaa

SEQ ID NO: 1184852 - RNA, 20 nt, Human
ccagaggagcugaaugagcu

SEQ ID NO: 1184853 - RNA, 23 nt, Human
cugaagccucuacauccaaucca

SEQ ID NO: 1184854 - RNA, 21 nt, Human
cuuugcccagguuaagacugg

SEQ ID NO: 1184855 - RNA, 24 nt, Human
gaaugagcuggaagucuguaccuc

SEQ ID NO: 1184856 - RNA, 18 nt, Human
gaccccuccgggaaugga

SEQ ID NO: 1184857 - RNA, 18 nt, Human
gagcugaccccuccggga

SEQ ID NO: 1184858 - RNA, 28 nt, Human
gagcugaccccuccgggaauggaucuca

SEQ ID NO: 1184859 - RNA, 20 nt, Human
gcagauggccaucacaaugc

SEQ ID NO: 1184860 - RNA, 21 nt, Human
gcugaccccuccgggaaugga

SEQ ID NO: 1184861 - RNA, 18 nt, Human
ggaacccgucaggagcug

SEQ ID NO: 1184862 - RNA, 19 nt, Human
gucugcuuuucccucucca

SEQ ID NO: 1184863 - RNA, 23 nt, Human
gucugcuuuucccucuccaguuu

SEQ ID NO: 1184864 - RNA, 21 nt, Human
uaaaggcaucucucucugaag

SEQ ID NO: 1184865 - RNA, 24 nt, Human
uaaaggcaucucucucugaagccu

SEQ ID NO: 1184866 - RNA, 23 nt, Human
uaagacuggcucaggaacccguc

SEQ ID NO: 1184867 - RNA, 18 nt, Human
uacaacuaaaggcaucuc

SEQ ID NO: 1184868 - RNA, 23 nt, Human
uacacaacaaagacaucuaucca

SEQ ID NO: 1184869 - RNA, 22 nt, Human
uacuuugcuucuguaccaucaa

SEQ ID NO: 1184870 - RNA, 19 nt, Human
uagaguucuucaaagucuc

SEQ ID NO: 1184871 - RNA, 23 nt, Human
ucaaacaucuacuauuuauuaau

SEQ ID NO: 1184872 - RNA, 23 nt, Human
ucaaagucucagucucaucagaa

SEQ ID NO: 1184873 - RNA, 21 nt, Human
ucagaaagguuugcaagagca

SEQ ID NO: 1184874 - RNA, 18 nt, Human
uccaaaagcucagauugu

SEQ ID NO: 1184875 - RNA, 19 nt, Human
uccagaggagcugaaugag

SEQ ID NO: 1184876 - RNA, 21 nt, Human
ucccucuccaguuugcuccca

SEQ ID NO: 1184877 - RNA, 19 nt, Human
uccucaucuccuuugccca

SEQ ID NO: 1184878 - RNA, 20 nt, Human
uccuuguuccaagcuuggag

SEQ ID NO: 1184879 - RNA, 24 nt, Human
ucggguacaguacaacuaaaggca

SEQ ID NO: 1184880 - RNA, 19 nt, Human
ucucaaugccaucagcucu

SEQ ID NO: 1184881 - RNA, 18 nt, Human
ucucucucugaagccucu

SEQ ID NO: 1184882 - RNA, 22 nt, Human
ucucuuggaauuuuguaaaagu

SEQ ID NO: 1184883 - RNA, 23 nt, Human
ucucuuggaauuuuguaaaaguu

SEQ ID NO: 1184884 - RNA, 18 nt, Human
ucugaagccucuacaucc

SEQ ID NO: 1184885 - RNA, 24 nt, Human
ugaagccucuacauccaauccaag

SEQ ID NO: 1184886 - RNA, 27 nt, Human
ugcccagguuaagacuggcucaggaac

SEQ ID NO: 1184887 - RNA, 19 nt, Human
uggcucaggaacccgucag

SEQ ID NO: 1184888 - RNA, 23 nt, Human
ugggcagauggccaucacaaugc

SEQ ID NO: 1184889 - RNA, 28 nt, Human
uuaaaguagauucuguucaaaaguucau

SEQ ID NO: 1184890 - RNA, 19 nt, Human
uucaaaguuagagucuuug

SEQ ID NO: 1184891 - RNA, 23 nt, Human
aucaauugucuuuuccaguuuug

SEQ ID NO: 1184892 - RNA, 21 nt, Human
cagcacgggucucagccucuu

SEQ ID NO: 1184893 - RNA, 22 nt, Human
ucacuuugucagacagaaguug

SEQ ID NO: 1184894 - RNA, 22 nt, Human
ucagaauacuuuucagaugcag

SEQ ID NO: 1184895 - RNA, 24 nt, Human
ucagcacgggucucagccucuuuc

SEQ ID NO: 1184896 - RNA, 22 nt, Human
uuuccaguuuugcaaccguucu

SEQ ID NO: 1184897 - RNA, 20 nt, Human
aucugugagggcgcccccuu

SEQ ID NO: 1184898 - RNA, 23 nt, Human
ccggugggcagugagucugcagg

SEQ ID NO: 1184899 - RNA, 18 nt, Human
ccuugaaauuucuuuuuc

SEQ ID NO: 1184900 - RNA, 26 nt, Human
cuugaaauuucuuuuucauugcaucc

SEQ ID NO: 1184901 - RNA, 19 nt, Human
gcagugagucugcagggca

SEQ ID NO: 1184902 - RNA, 20 nt, Human
gggaugcgggggagggagcc

SEQ ID NO: 1184903 - RNA, 18 nt, Human
ucgccucugggguugcag

SEQ ID NO: 1184904 - RNA, 18 nt, Human
ugggcagugagucugcag

SEQ ID NO: 1184905 - RNA, 20 nt, Human
aaacuaacaacaauucacag

SEQ ID NO: 1184906 - RNA, 19 nt, Human
aaagaagaaagcaucaaga

SEQ ID NO: 1184907 - RNA, 22 nt, Human
aaagacauuaaaaggccccaaa

SEQ ID NO: 1184908 - RNA, 22 nt, Human
aaagagaaagaagaaagcauca

SEQ ID NO: 1184909 - RNA, 19 nt, Human
aacaaggugaaaccccguc

SEQ ID NO: 1184910 - RNA, 20 nt, Human
aacaaggugaaaccccgucu

SEQ ID NO: 1184911 - RNA, 21 nt, Human
aacaaggugaaaccccgucuc

SEQ ID NO: 1184912 - RNA, 23 nt, Human
aacuguacacuuuuugcagccuu

SEQ ID NO: 1184913 - RNA, 19 nt, Human
aagaagauaauaaacugaa

SEQ ID NO: 1184914 - RNA, 19 nt, Human
aagacauuaaaaggcccca

SEQ ID NO: 1184915 - RNA, 24 nt, Human
aagagaaagaagaaagcaucaaga

SEQ ID NO: 1184916 - RNA, 21 nt, Human
aagcaccaagcugacucaaaa

SEQ ID NO: 1184917 - RNA, 18 nt, Human
aauacaaaaauuagcugg

SEQ ID NO: 1184918 - RNA, 24 nt, Human
aauagcuugaaccugggaggcgga

SEQ ID NO: 1184919 - RNA, 19 nt, Human
acacagcaagacuccgucu

SEQ ID NO: 1184920 - RNA, 20 nt, Human
acacagcaagacuccgucuc

SEQ ID NO: 1184921 - RNA, 24 nt, Human
acacagcaagacuccgucucaaaa

SEQ ID NO: 1184922 - RNA, 21 nt, Human
acauauaaacacauacauaua

SEQ ID NO: 1184923 - RNA, 24 nt, Human
accccgucucuacuaaaaauacaa

SEQ ID NO: 1184924 - RNA, 24 nt, Human
acuaaaaugcaagguggauuacua

SEQ ID NO: 1184925 - RNA, 18 nt, Human
agcaggaaguuaugaaga

SEQ ID NO: 1184926 - RNA, 20 nt, Human
agcauucugaauuacacaga

SEQ ID NO: 1184927 - RNA, 21 nt, Human
agccuggugacacagcaagac

SEQ ID NO: 1184928 - RNA, 23 nt, Human
agccuggugacacagcaagacuc

SEQ ID NO: 1184929 - RNA, 23 nt, Human
agcuggaugugguggcaugugcc

SEQ ID NO: 1184930 - RNA, 22 nt, Human
aggcaggagaauagcuugaacc

SEQ ID NO: 1184931 - RNA, 24 nt, Human
aggcaggagaauagcuugaaccug

SEQ ID NO: 1184932 - RNA, 19 nt, Human
aggccaaugcgggcagauc

SEQ ID NO: 1184933 - RNA, 19 nt, Human
aggcggagguugcagugag

SEQ ID NO: 1184934 - RNA, 24 nt, Human
aggcggagguugcagugaggcgag

SEQ ID NO: 1184935 - RNA, 24 nt, Human
aggcugaggcaggagaauagcuug

SEQ ID NO: 1184936 - RNA, 24 nt, Human
agucccuuauuuccauuaaaaaau

SEQ ID NO: 1184937 - RNA, 23 nt, Human
aguggcucaugccuguaauccca

SEQ ID NO: 1184938 - RNA, 24 nt, Human
aguggcucaugccuguaaucccag

SEQ ID NO: 1184939 - RNA, 23 nt, Human
auauacauauacauauauuauau

SEQ ID NO: 1184940 - RNA, 24 nt, Human
auauacauauacauauauuauaug

SEQ ID NO: 1184941 - RNA, 25 nt, Human
aucacgagaucaagagaucgagauc

SEQ ID NO: 1184942 - RNA, 19 nt, Human
augccuguaaucccagcac

SEQ ID NO: 1184943 - RNA, 24 nt, Human
augcgggcagaucacgagaucaag

SEQ ID NO: 1184944 - RNA, 24 nt, Human
caacaaggugaaaccccgucucua

SEQ ID NO: 1184945 - RNA, 18 nt, Human
caagaagauaauaaacug

SEQ ID NO: 1184946 - RNA, 20 nt, Human
caagauaagccuagaaauua

SEQ ID NO: 1184947 - RNA, 20 nt, Human
caccaagcugacucaaaagg

SEQ ID NO: 1184948 - RNA, 18 nt, Human
cagaaccuguaaacagca

SEQ ID NO: 1184949 - RNA, 21 nt, Human
cagaaccuguaaacagcaaag

SEQ ID NO: 1184950 - RNA, 19 nt, Human
cagaucacgagaucaagag

SEQ ID NO: 1184951 - RNA, 23 nt, Human
cagaucacgagaucaagagaucg

SEQ ID NO: 1184952 - RNA, 24 nt, Human
caguuacuugggaggcugaggcag

SEQ ID NO: 1184953 - RNA, 20 nt, Human
caugaaaacugcaaaacaag

SEQ ID NO: 1184954 - RNA, 24 nt, Human
caugaaaacugcaaaacaagauaa

SEQ ID NO: 1184955 - RNA, 20 nt, Human
caugccuguaaucccagcac

SEQ ID NO: 1184956 - RNA, 23 nt, Human
caugccuguaaucccagcacuuc

SEQ ID NO: 1184957 - RNA, 25 nt, Human
cauuugaauuauaaauaacuaaggc

SEQ ID NO: 1184958 - RNA, 21 nt, Human
ccugcagucccaguuacuugg

SEQ ID NO: 1184959 - RNA, 23 nt, Human
ccuggccaacaaggugaaacccc

SEQ ID NO: 1184960 - RNA, 24 nt, Human
ccuggccaacaaggugaaaccccg

SEQ ID NO: 1184961 - RNA, 19 nt, Human
ccugggaggcggagguugc

SEQ ID NO: 1184962 - RNA, 22 nt, Human
ccuggugacacagcaagacucc

SEQ ID NO: 1184963 - RNA, 21 nt, Human
ccuguaaacagcaaaguucau

SEQ ID NO: 1184964 - RNA, 24 nt, Human
cgagaucauccuggccaacaaggu

SEQ ID NO: 1184965 - RNA, 24 nt, Human
cgagaucgugccacugcuccagcc

SEQ ID NO: 1184966 - RNA, 22 nt, Human
cgggcagaucacgagaucaaga

SEQ ID NO: 1184967 - RNA, 18 nt, Human
cgugccacugcuccagcc

SEQ ID NO: 1184968 - RNA, 23 nt, Human
cuaaaguaggucaccaagaagau

SEQ ID NO: 1184969 - RNA, 24 nt, Human
cucaugccuguaaucccagcacuu

SEQ ID NO: 1184970 - RNA, 22 nt, Human
cuccaauguacuaagguuucau

SEQ ID NO: 1184971 - RNA, 19 nt, Human
cuccagccuggugacacag

SEQ ID NO: 1184972 - RNA, 21 nt, Human
cugcuggaucaagucuguugc

SEQ ID NO: 1184973 - RNA, 22 nt, Human
cuguacuugaacuacaauaaga

SEQ ID NO: 1184974 - RNA, 18 nt, Human
cuugaaccugggaggcgg

SEQ ID NO: 1184975 - RNA, 24 nt, Human
gacacagcaagacuccgucucaaa

SEQ ID NO: 1184976 - RNA, 18 nt, Human
gacacugcuggaucaagu

SEQ ID NO: 1184977 - RNA, 24 nt, Human
gccaacaaggugaaaccccgucuc

SEQ ID NO: 1184978 - RNA, 20 nt, Human
gcgggcagaucacgagauca

SEQ ID NO: 1184979 - RNA, 22 nt, Human
ggaauucgacacugcuggauca

SEQ ID NO: 1184980 - RNA, 20 nt, Human
ggagguugcagugaggcgag

SEQ ID NO: 1184981 - RNA, 24 nt, Human
ggagguugcagugaggcgagaucg

SEQ ID NO: 1184982 - RNA, 18 nt, Human
ggcagaucacgagaucaa

SEQ ID NO: 1184983 - RNA, 24 nt, Human
ggccaaugcgggcagaucacgaga

SEQ ID NO: 1184984 - RNA, 23 nt, Human
ggccgggcgcaguggcucaugcc

SEQ ID NO: 1184985 - RNA, 24 nt, Human
gggcgcaguggcucaugccuguaa

SEQ ID NO: 1184986 - RNA, 21 nt, Human
guaaacagcaaaguucaugac

SEQ ID NO: 1184987 - RNA, 19 nt, Human
guacuaagguuucauccag

SEQ ID NO: 1184988 - RNA, 21 nt, Human
uaaaaggccccaaaucacuga

SEQ ID NO: 1184989 - RNA, 26 nt, Human
uaaacugaagucacaccaaucaacgg

SEQ ID NO: 1184990 - RNA, 21 nt, Human
uaaauguuuucauuagcuaag

SEQ ID NO: 1184991 - RNA, 23 nt, Human
uaagaauauaccuagcaauaucc

SEQ ID NO: 1184992 - RNA, 23 nt, Human
uacagaacacauacuaaaguagg

SEQ ID NO: 1184993 - RNA, 22 nt, Human
uacauauaaacacauacauaua

SEQ ID NO: 1184994 - RNA, 18 nt, Human
uacuaagguuucauccag

SEQ ID NO: 1184995 - RNA, 19 nt, Human
uagauccauuuaguuaugu

SEQ ID NO: 1184996 - RNA, 22 nt, Human
uagcuggaugugguggcaugug

SEQ ID NO: 1184997 - RNA, 24 nt, Human
uagcuugaaccugggaggcggagg

SEQ ID NO: 1184998 - RNA, 18 nt, Human
uauacauauacauauauu

SEQ ID NO: 1184999 - RNA, 32 nt, Human
uauaugcauacauauaaacacauacauauagu

SEQ ID NO: 1185000 - RNA, 19 nt, Human
ucaagauuuccuaacaaaa

SEQ ID NO: 1185001 - RNA, 22 nt, Human
ucaugccuguaaucccagcacu

SEQ ID NO: 1185002 - RNA, 19 nt, Human
ucucaaaaauaaauaaaua

SEQ ID NO: 1185003 - RNA, 21 nt, Human
ucucuacuaaaaauacaaaaa

SEQ ID NO: 1185004 - RNA, 21 nt, Human
ugaaaacauuuuuguacuuga

SEQ ID NO: 1185005 - RNA, 24 nt, Human
ugaaccugggaggcggagguugca

SEQ ID NO: 1185006 - RNA, 28 nt, Human
ugaauuacacagaaccuguaaacagcaa

SEQ ID NO: 1185007 - RNA, 19 nt, Human
ugacaaagaaugaaauucu

SEQ ID NO: 1185008 - RNA, 24 nt, Human
ugacaaagaaugaaauucugaaaa

SEQ ID NO: 1185009 - RNA, 24 nt, Human
ugaggcaggagaauagcuugaacc

SEQ ID NO: 1185010 - RNA, 25 nt, Human
ugaggcaggagaauagcuugaaccu

SEQ ID NO: 1185011 - RNA, 22 nt, Human
ugaggcgagaucgugccacugc

SEQ ID NO: 1185012 - RNA, 19 nt, Human
ugcaaagacuaaaaugcaa

SEQ ID NO: 1185013 - RNA, 24 nt, Human
ugccugcagucccaguuacuuggg

SEQ ID NO: 1185014 - RNA, 18 nt, Human
ugccuguaaucccagcac

SEQ ID NO: 1185015 - RNA, 22 nt, Human
ugccuguaaucccagcacuuca

SEQ ID NO: 1185016 - RNA, 24 nt, Human
ugccuguaaucccagcacuucagg

SEQ ID NO: 1185017 - RNA, 21 nt, Human
ugcuccagccuggugacacag

SEQ ID NO: 1185018 - RNA, 22 nt, Human
ugcuccagccuggugacacagc

SEQ ID NO: 1185019 - RNA, 18 nt, Human
uggaugugguggcaugug

SEQ ID NO: 1185020 - RNA, 24 nt, Human
uggcaugugccugcagucccaguu

SEQ ID NO: 1185021 - RNA, 22 nt, Human
uggcucaugccuguaaucccag

SEQ ID NO: 1185022 - RNA, 24 nt, Human
uggcucaugccuguaaucccagca

SEQ ID NO: 1185023 - RNA, 28 nt, Human
ugggaaaauauaguuugaccaaaucuua

SEQ ID NO: 1185024 - RNA, 20 nt, Human
ugggaggcggagguugcagu

SEQ ID NO: 1185025 - RNA, 29 nt, Human
ugggaggcggagguugcagugacaacggu

SEQ ID NO: 1185026 - RNA, 18 nt, Human
ugggaggcugaggcagga

SEQ ID NO: 1185027 - RNA, 19 nt, Human
ugggaggcugaggcaggag

SEQ ID NO: 1185028 - RNA, 24 nt, Human
ugguggcaugugccugcaguccca

SEQ ID NO: 1185029 - RNA, 23 nt, Human
uguacuaagguuucauccagcuc

SEQ ID NO: 1185030 - RNA, 19 nt, Human
uuagcuggaugugguggca

SEQ ID NO: 1185031 - RNA, 24 nt, Human
uuagcuggaugugguggcaugugc

SEQ ID NO: 1185032 - RNA, 23 nt, Human
uuauaugcauacauauaaacaca

SEQ ID NO: 1185033 - RNA, 23 nt, Human
uucaggaggccaaugcgggcaga

SEQ ID NO: 1185034 - RNA, 19 nt, Human
uucauaauacaagauaaua

SEQ ID NO: 1185035 - RNA, 24 nt, Human
uugaaccugggaggcggagguugc

SEQ ID NO: 1185036 - RNA, 22 nt, Human
uugcagugaggcgagaucgugc

SEQ ID NO: 1185037 - RNA, 19 nt, Human
uugcuugauuacaaaaauu

SEQ ID NO: 1185038 - RNA, 24 nt, Human
uugggccgggcgcaguggcucaug

SEQ ID NO: 1185039 - RNA, 18 nt, Human
aaacagaagcaaaacuga

SEQ ID NO: 1185040 - RNA, 23 nt, Human
aaacagaagcaaaacugaggcca

SEQ ID NO: 1185041 - RNA, 20 nt, Human
aaaugccuugcaucauccuc

SEQ ID NO: 1185042 - RNA, 23 nt, Human
aagcaucucucaagucuuugucc

SEQ ID NO: 1185043 - RNA, 19 nt, Human
acuaccaggcugccccgga

SEQ ID NO: 1185044 - RNA, 20 nt, Human
acugcagggguucaggagug

SEQ ID NO: 1185045 - RNA, 19 nt, Human
agggguucaggaguggagg

SEQ ID NO: 1185046 - RNA, 23 nt, Human
aucauccuccaguccccucacug

SEQ ID NO: 1185047 - RNA, 24 nt, Human
caaaacagaagcaaaacugaggcc

SEQ ID NO: 1185048 - RNA, 21 nt, Human
cagaagcaaaacugaggccau

SEQ ID NO: 1185049 - RNA, 20 nt, Human
cauccuccaguccccucacu

SEQ ID NO: 1185050 - RNA, 25 nt, Human
ccaaaacagaagcaaaacugaggcc

SEQ ID NO: 1185051 - RNA, 27 nt, Human
ccaaaacagaagcaaaacugaggccau

SEQ ID NO: 1185052 - RNA, 21 nt, Human
ccagugugcaggagcauuggg

SEQ ID NO: 1185053 - RNA, 22 nt, Human
ccgauggcuggugacagucacu

SEQ ID NO: 1185054 - RNA, 21 nt, Human
ccuugcaucauccuccagucc

SEQ ID NO: 1185055 - RNA, 24 nt, Human
cuauucuggcagguucgggcucag

SEQ ID NO: 1185056 - RNA, 24 nt, Human
cugaaacuguggcccauucaacag

SEQ ID NO: 1185057 - RNA, 22 nt, Human
gaaaaaaaaagcaucucucaag

SEQ ID NO: 1185058 - RNA, 20 nt, Human
gauggucugcugaaacugug

SEQ ID NO: 1185059 - RNA, 18 nt, Human
ggaacagacaaauagagg

SEQ ID NO: 1185060 - RNA, 19 nt, Human
ggcuggugacagucacugc

SEQ ID NO: 1185061 - RNA, 20 nt, Human
ggugguguucauccaaaaca

SEQ ID NO: 1185062 - RNA, 21 nt, Human
gucaagcagaacacacguguc

SEQ ID NO: 1185063 - RNA, 21 nt, Human
gugcaugugcuuccugggugg

SEQ ID NO: 1185064 - RNA, 23 nt, Human
gugguguucauccaaaacagaag

SEQ ID NO: 1185065 - RNA, 28 nt, Human
uagagggucuucuuucacauucaggccc

SEQ ID NO: 1185066 - RNA, 25 nt, Human
uaugaaaggagggagaaucuuuuuu

SEQ ID NO: 1185067 - RNA, 27 nt, Human
ucacugcagggguucaggaguggagga

SEQ ID NO: 1185068 - RNA, 20 nt, Human
ucagauuucucuagaaagcu

SEQ ID NO: 1185069 - RNA, 26 nt, Human
uccaaaacagaagcaaaacugaggcc

SEQ ID NO: 1185070 - RNA, 23 nt, Human
ucugcagguguccucgcugcuga

SEQ ID NO: 1185071 - RNA, 24 nt, Human
ugaaugagagcucgggcuccacaa

SEQ ID NO: 1185072 - RNA, 28 nt, Human
ugccuugcaucauccuccaguccccuca

SEQ ID NO: 1185073 - RNA, 29 nt, Human
uggcugauaccacugaaggccagugugcc

SEQ ID NO: 1185074 - RNA, 25 nt, Human
uuuuuucaauuuacuacaauaaaua

SEQ ID NO: 1185075 - RNA, 22 nt, Human
agcgcggcugugagucugaagc

SEQ ID NO: 1185076 - RNA, 18 nt, Human
cuuucccucuuucuuucu

SEQ ID NO: 1185077 - RNA, 21 nt, Human
cuuucuuucuucuucuaaggu

SEQ ID NO: 1185078 - RNA, 24 nt, Human
cuuucuuucuucuucuaagguaga

SEQ ID NO: 1185079 - RNA, 21 nt, Human
ggggaaguuggucagcauggg

SEQ ID NO: 1185080 - RNA, 23 nt, Human
ugaaaacagcugucugaacaagu

SEQ ID NO: 1185081 - RNA, 19 nt, Human
ugaaauggggaaguugguc

SEQ ID NO: 1185082 - RNA, 18 nt, Human
agacugaaagagcaggug

SEQ ID NO: 1185083 - RNA, 22 nt, Human
agauccuugugaagacauacaa

SEQ ID NO: 1185084 - RNA, 22 nt, Human
auacaaguuguuuucguugcca

SEQ ID NO: 1185085 - RNA, 19 nt, Human
auccuugugaagacauaca

SEQ ID NO: 1185086 - RNA, 21 nt, Human
aucuguaaagcccauuuccuc

SEQ ID NO: 1185087 - RNA, 22 nt, Human
cggcggcgggaaggccggaggg

SEQ ID NO: 1185088 - RNA, 23 nt, Human
cuuguuuucugggcccacaucug

SEQ ID NO: 1185089 - RNA, 19 nt, Human
ucagagaguggcucucugu

SEQ ID NO: 1185090 - RNA, 18 nt, Human
uccaguuugcagcgccug

SEQ ID NO: 1185091 - RNA, 18 nt, Human
ugaaagagcaggugccgc

SEQ ID NO: 1185092 - RNA, 24 nt, Human
ugaagcggcuguaucagcccggcc

SEQ ID NO: 1185093 - RNA, 18 nt, Human
uggucccggcuacggcgg

SEQ ID NO: 1185094 - RNA, 21 nt, Human
uuuucugggcccacaucugua

SEQ ID NO: 1185095 - RNA, 20 nt, Human
aaagccagugaggaugggca

SEQ ID NO: 1185096 - RNA, 21 nt, Human
acccagccggaggggcugucc

SEQ ID NO: 1185097 - RNA, 20 nt, Human
acccuguuggccagcguccc

SEQ ID NO: 1185098 - RNA, 19 nt, Human
agaaaggaggccaggggga

SEQ ID NO: 1185099 - RNA, 25 nt, Human
agccaggaucccgggccuggacggc

SEQ ID NO: 1185100 - RNA, 22 nt, Human
aggagcguggggaaggggaggg

SEQ ID NO: 1185101 - RNA, 22 nt, Human
agggggauuuccgcagcucagg

SEQ ID NO: 1185102 - RNA, 20 nt, Human
aggggugccguucugggguc

SEQ ID NO: 1185103 - RNA, 24 nt, Human
auaucagcaccaaaugaugcccag

SEQ ID NO: 1185104 - RNA, 22 nt, Human
aucacccgggugaaaaauacca

SEQ ID NO: 1185105 - RNA, 30 nt, Human
caaagaaagacucagucccugcgcccccag

SEQ ID NO: 1185106 - RNA, 21 nt, Human
caacagcuggaucacaguggc

SEQ ID NO: 1185107 - RNA, 24 nt, Human
cacccccuaccugccagcagcuca

SEQ ID NO: 1185108 - RNA, 19 nt, Human
cacccgccucccccagccc

SEQ ID NO: 1185109 - RNA, 21 nt, Human
cacccgggugaaaaauaccac

SEQ ID NO: 1185110 - RNA, 19 nt, Human
caccguccccgccuccccu

SEQ ID NO: 1185111 - RNA, 26 nt, Human
cacgcgccccucauccaaagaaagac

SEQ ID NO: 1185112 - RNA, 19 nt, Human
cagcccacccccuaccugc

SEQ ID NO: 1185113 - RNA, 21 nt, Human
cagcccucacccgccuccccc

SEQ ID NO: 1185114 - RNA, 22 nt, Human
cagcccucacccgccuccccca

SEQ ID NO: 1185115 - RNA, 21 nt, Human
cagcccuuccuuuccucccca

SEQ ID NO: 1185116 - RNA, 19 nt, Human
caggaucccgggccuggac

SEQ ID NO: 1185117 - RNA, 23 nt, Human
caggccgcaaggcgaucugagga

SEQ ID NO: 1185118 - RNA, 24 nt, Human
caggccgugguucagccccuuccu

SEQ ID NO: 1185119 - RNA, 21 nt, Human
cauccuccacccagccggagg

SEQ ID NO: 1185120 - RNA, 22 nt, Human
cauccugcagugucaggggcau

SEQ ID NO: 1185121 - RNA, 18 nt, Human
ccacccagccggaggggc

SEQ ID NO: 1185122 - RNA, 21 nt, Human
ccacccagccggaggggcugu

SEQ ID NO: 1185123 - RNA, 20 nt, Human
cccacuccccccgccccaac

SEQ ID NO: 1185124 - RNA, 24 nt, Human
cccagcccacccccuaccugccag

SEQ ID NO: 1185125 - RNA, 20 nt, Human
cccagcccuuccuuuccucc

SEQ ID NO: 1185126 - RNA, 21 nt, Human
ccccccgcaggcugcagccag

SEQ ID NO: 1185127 - RNA, 27 nt, Human
ccccccgccccaacagccggguccuuc

SEQ ID NO: 1185128 - RNA, 19 nt, Human
cccccgcaggcugcagcca

SEQ ID NO: 1185129 - RNA, 22 nt, Human
cccccgccccaacagcuggauc

SEQ ID NO: 1185130 - RNA, 18 nt, Human
ccccgccccaacagcugg

SEQ ID NO: 1185131 - RNA, 19 nt, Human
ccccgccuccccucucccu

SEQ ID NO: 1185132 - RNA, 18 nt, Human
ccccuuucccuccuuuuc

SEQ ID NO: 1185133 - RNA, 19 nt, Human
cccucacccgccuccccca

SEQ ID NO: 1185134 - RNA, 19 nt, Human
ccgggccuggacggcgggc

SEQ ID NO: 1185135 - RNA, 20 nt, Human
ccucacccgccucccccagc

SEQ ID NO: 1185136 - RNA, 24 nt, Human
ccuccccucucccugcacccuccc

SEQ ID NO: 1185137 - RNA, 24 nt, Human
ccucccugggaaguccugcccacu

SEQ ID NO: 1185138 - RNA, 21 nt, Human
ccuccuuuuccuccuccucca

SEQ ID NO: 1185139 - RNA, 20 nt, Human
ccugcacccuccccuuuucc

SEQ ID NO: 1185140 - RNA, 19 nt, Human
ccugcccacuccccccgcc

SEQ ID NO: 1185141 - RNA, 21 nt, Human
cgccucccccagcccaccccc

SEQ ID NO: 1185142 - RNA, 25 nt, Human
cgccuccccucucccugcacccucc

SEQ ID NO: 1185143 - RNA, 24 nt, Human
cggaggggcuguccuucucccuuc

SEQ ID NO: 1185144 - RNA, 21 nt, Human
cggcguccccccgcaggcugc

SEQ ID NO: 1185145 - RNA, 18 nt, Human
cuaagaccagcccucacc

SEQ ID NO: 1185146 - RNA, 22 nt, Human
cuccccagccagcugccucccu

SEQ ID NO: 1185147 - RNA, 23 nt, Human
cucccccagcccacccccuaccu

SEQ ID NO: 1185148 - RNA, 20 nt, Human
cucccuccuggccuccuccu

SEQ ID NO: 1185149 - RNA, 20 nt, Human
cuccuuuuccuccuccucca

SEQ ID NO: 1185150 - RNA, 23 nt, Human
cugcccacuccccccgccccaac

SEQ ID NO: 1185151 - RNA, 25 nt, Human
cugcccacuccccccgccccaacag

SEQ ID NO: 1185152 - RNA, 20 nt, Human
cuggcauccuccacccagcc

SEQ ID NO: 1185153 - RNA, 25 nt, Human
cuggccccuccagugggacccuucc

SEQ ID NO: 1185154 - RNA, 19 nt, Human
cuguuggccagcgucccug

SEQ ID NO: 1185155 - RNA, 23 nt, Human
cuuccuggcauccuccacccagc

SEQ ID NO: 1185156 - RNA, 25 nt, Human
gaaguccugcccacuccccccgccc

SEQ ID NO: 1185157 - RNA, 23 nt, Human
gcagcuggcuuggggcccaagac

SEQ ID NO: 1185158 - RNA, 21 nt, Human
gccccucauccaaagaaagac

SEQ ID NO: 1185159 - RNA, 22 nt, Human
gcgccccucauccaaagaaaga

SEQ ID NO: 1185160 - RNA, 21 nt, Human
gcugucaggaugaggagggca

SEQ ID NO: 1185161 - RNA, 19 nt, Human
ggaccccacagccaguuuc

SEQ ID NO: 1185162 - RNA, 18 nt, Human
ggagugcugugccucccu

SEQ ID NO: 1185163 - RNA, 19 nt, Human
ggagugcugugccucccuc

SEQ ID NO: 1185164 - RNA, 24 nt, Human
ggcauccuccacccagccggaggg

SEQ ID NO: 1185165 - RNA, 19 nt, Human
ggcugucaggaugaggagg

SEQ ID NO: 1185166 - RNA, 24 nt, Human
gggcagcggcuuccaggucucagg

SEQ ID NO: 1185167 - RNA, 19 nt, Human
ggggaaggggaggggaagg

SEQ ID NO: 1185168 - RNA, 19 nt, Human
ggggaaggggaggggaagg

SEQ ID NO: 1185169 - RNA, 23 nt, Human
gucugggaccccacagccaguuu

SEQ ID NO: 1185170 - RNA, 21 nt, Human
gugguucagccccuuccuggc

SEQ ID NO: 1185171 - RNA, 23 nt, Human
uaagaccagcccucacccgccuc

SEQ ID NO: 1185172 - RNA, 21 nt, Human
uagcuaggaugccuguccccu

SEQ ID NO: 1185173 - RNA, 18 nt, Human
uaggugcucagcucuggc

SEQ ID NO: 1185174 - RNA, 20 nt, Human
ucacccgccucccccagccc

SEQ ID NO: 1185175 - RNA, 25 nt, Human
ucacccgccucccccagcccacccc

SEQ ID NO: 1185176 - RNA, 22 nt, Human
ucagcaccaaaugaugcccagg

SEQ ID NO: 1185177 - RNA, 20 nt, Human
ucagcaccagcuccagugcc

SEQ ID NO: 1185178 - RNA, 21 nt, Human
ucauccugcagugucaggggc

SEQ ID NO: 1185179 - RNA, 20 nt, Human
uccaaagaaagacucagucc

SEQ ID NO: 1185180 - RNA, 23 nt, Human
uccacgcgccccucauccaaaga

SEQ ID NO: 1185181 - RNA, 20 nt, Human
uccccagccagcugccuccc

SEQ ID NO: 1185182 - RNA, 19 nt, Human
ucccccagcccacccccua

SEQ ID NO: 1185183 - RNA, 22 nt, Human
ucccccagcccacccccuaccu

SEQ ID NO: 1185184 - RNA, 19 nt, Human
uccccgccuccccucuccc

SEQ ID NO: 1185185 - RNA, 22 nt, Human
uccccgccuccccucucccugc

SEQ ID NO: 1185186 - RNA, 23 nt, Human
uccccgccuccccucucccugca

SEQ ID NO: 1185187 - RNA, 20 nt, Human
uccccuuucccuccuuuucc

SEQ ID NO: 1185188 - RNA, 22 nt, Human
ucccugucagcaccagcuccag

SEQ ID NO: 1185189 - RNA, 18 nt, Human
uccugcagugucaggggc

SEQ ID NO: 1185190 - RNA, 19 nt, Human
uccuggccuccuccucccu

SEQ ID NO: 1185191 - RNA, 18 nt, Human
ucugaggagugcaccugg

SEQ ID NO: 1185192 - RNA, 26 nt, Human
ucugcagccagcagcuggcuuggggc

SEQ ID NO: 1185193 - RNA, 22 nt, Human
ucugggcugcauuccuaucuaa

SEQ ID NO: 1185194 - RNA, 20 nt, Human
ucuguccacuugugaaucug

SEQ ID NO: 1185195 - RNA, 19 nt, Human
ugaaucugcagaacuggca

SEQ ID NO: 1185196 - RNA, 24 nt, Human
ugacuccccagccagcugccuccc

SEQ ID NO: 1185197 - RNA, 22 nt, Human
ugaggguaaaucggagaaagga

SEQ ID NO: 1185198 - RNA, 18 nt, Human
ugaugcccaggugggugg

SEQ ID NO: 1185199 - RNA, 24 nt, Human
ugcauuccuaucuaagaccagccc

SEQ ID NO: 1185200 - RNA, 19 nt, Human
ugcccagguggguggcccu

SEQ ID NO: 1185201 - RNA, 24 nt, Human
ugcccagguggguggcccuugggc

SEQ ID NO: 1185202 - RNA, 27 nt, Human
ugccucccucccugggaaguccugccc

SEQ ID NO: 1185203 - RNA, 24 nt, Human
ugccuguccccuuucccuccuuuu

SEQ ID NO: 1185204 - RNA, 21 nt, Human
ugcucagcucuggccccucca

SEQ ID NO: 1185205 - RNA, 22 nt, Human
ugcugugccucccuccuggccu

SEQ ID NO: 1185206 - RNA, 22 nt, Human
uggaggggugccguucuggggu

SEQ ID NO: 1185207 - RNA, 23 nt, Human
uggcaggcgaggcccgaggaggu

SEQ ID NO: 1185208 - RNA, 22 nt, Human
ugggaaguccugcccacucccc

SEQ ID NO: 1185209 - RNA, 19 nt, Human
uggggaaggggaggggaag

SEQ ID NO: 1185210 - RNA, 19 nt, Human
ugucccacuuccccuccug

SEQ ID NO: 1185211 - RNA, 21 nt, Human
ugucccacuuccccuccugga

SEQ ID NO: 1185212 - RNA, 18 nt, Human
ugucugggaccccacagc

SEQ ID NO: 1185213 - RNA, 21 nt, Human
ugucugggaccccacagccag

SEQ ID NO: 1185214 - RNA, 20 nt, Human
ugucuuuucuucugcagcca

SEQ ID NO: 1185215 - RNA, 24 nt, Human
uucagccccuuccuggcauccucc

SEQ ID NO: 1185216 - RNA, 22 nt, Human
uuccugcagccuggguuaggug

SEQ ID NO: 1185217 - RNA, 20 nt, Human
uuccugugcacaggucugag

SEQ ID NO: 1185218 - RNA, 20 nt, Human
aaacaaaaacgccaggaggc

SEQ ID NO: 1185219 - RNA, 23 nt, Human
aaacagccagagcaacuugacaa

SEQ ID NO: 1185220 - RNA, 22 nt, Human
aaaccaacacagcaccugagac

SEQ ID NO: 1185221 - RNA, 19 nt, Human
aaaccagcaaucaagccag

SEQ ID NO: 1185222 - RNA, 23 nt, Human
aaagaaaacgaugccacucugca

SEQ ID NO: 1185223 - RNA, 18 nt, Human
aaccagcaaucaagccag

SEQ ID NO: 1185224 - RNA, 22 nt, Human
aacucagcucccucugaaaguu

SEQ ID NO: 1185225 - RNA, 19 nt, Human
aagaaaacugggugaccac

SEQ ID NO: 1185226 - RNA, 21 nt, Human
aagaaagaaaccagcaaucaa

SEQ ID NO: 1185227 - RNA, 28 nt, Human
aagaacagagaaaggggugccgguaccc

SEQ ID NO: 1185228 - RNA, 22 nt, Human
aagauccuauauuccacaaaaa

SEQ ID NO: 1185229 - RNA, 19 nt, Human
aagccagaaacagaaaacg

SEQ ID NO: 1185230 - RNA, 27 nt, Human
aagccagaaacagaaaacgagggaccc

SEQ ID NO: 1185231 - RNA, 22 nt, Human
aaggaagaagagaaaguggggg

SEQ ID NO: 1185232 - RNA, 24 nt, Human
aaggacuaucuggcuggacaaccc

SEQ ID NO: 1185233 - RNA, 20 nt, Human
aagggcccauguuguagcuc

SEQ ID NO: 1185234 - RNA, 26 nt, Human
aagugggcagaucaccagaggucagg

SEQ ID NO: 1185235 - RNA, 24 nt, Human
aaucacuugaaaccgggaggcaga

SEQ ID NO: 1185236 - RNA, 22 nt, Human
acaaaacaaaaacgccaggagg

SEQ ID NO: 1185237 - RNA, 26 nt, Human
acaaaacaaaaacgccaggaggcccc

SEQ ID NO: 1185238 - RNA, 20 nt, Human
acagagugagauuccgucuc

SEQ ID NO: 1185239 - RNA, 25 nt, Human
acagagugagauuccgucuccaaaa

SEQ ID NO: 1185240 - RNA, 19 nt, Human
acauagugaaacccugucu

SEQ ID NO: 1185241 - RNA, 20 nt, Human
acauagugaaacccugucuc

SEQ ID NO: 1185242 - RNA, 22 nt, Human
acauagugaaacccugucucua

SEQ ID NO: 1185243 - RNA, 24 nt, Human
accagaggucaggaguuugagacc

SEQ ID NO: 1185244 - RNA, 18 nt, Human
accagggcucccccuccu

SEQ ID NO: 1185245 - RNA, 19 nt, Human
acccauagccccaaucugc

SEQ ID NO: 1185246 - RNA, 19 nt, Human
accccauccgucagcacca

SEQ ID NO: 1185247 - RNA, 21 nt, Human
accuauccccugcccuccccu

SEQ ID NO: 1185248 - RNA, 23 nt, Human
acugaaacgcaaggagagccugg

SEQ ID NO: 1185249 - RNA, 22 nt, Human
acuguguuugcccuucaagguu

SEQ ID NO: 1185250 - RNA, 21 nt, Human
agaaagaaaccagcaaucaag

SEQ ID NO: 1185251 - RNA, 18 nt, Human
agaaaguggggguggaga

SEQ ID NO: 1185252 - RNA, 21 nt, Human
agaaccacagccaauccacag

SEQ ID NO: 1185253 - RNA, 24 nt, Human
agaagagaaaguggggguggagag

SEQ ID NO: 1185254 - RNA, 21 nt, Human
agaauaauuugcccucuaccc

SEQ ID NO: 1185255 - RNA, 19 nt, Human
agagagugggcuguccaca

SEQ ID NO: 1185256 - RNA, 20 nt, Human
agaggucaggaguuugagac

SEQ ID NO: 1185257 - RNA, 18 nt, Human
agagguugcagugagcca

SEQ ID NO: 1185258 - RNA, 23 nt, Human
agagguugcagugagccaugauc

SEQ ID NO: 1185259 - RNA, 24 nt, Human
agagguugcagugagccaugaucg

SEQ ID NO: 1185260 - RNA, 24 nt, Human
agcacuuugagaggccgaaguggg

SEQ ID NO: 1185261 - RNA, 21 nt, Human
agccuaguaagaaagaaacca

SEQ ID NO: 1185262 - RNA, 22 nt, Human
aggcagagguugcagugagcca

SEQ ID NO: 1185263 - RNA, 24 nt, Human
aggcagagguugcagugagccaug

SEQ ID NO: 1185264 - RNA, 27 nt, Human
aggcagagguugcagugagccaugauc

SEQ ID NO: 1185265 - RNA, 25 nt, Human
aggcagcuggagcuucagacuucug

SEQ ID NO: 1185266 - RNA, 18 nt, Human
aggcaggagaaucacuug

SEQ ID NO: 1185267 - RNA, 24 nt, Human
aggcaggagaaucacuugaaaccg

SEQ ID NO: 1185268 - RNA, 21 nt, Human
aggccgaagugggcagaucac

SEQ ID NO: 1185269 - RNA, 19 nt, Human
aggccuggcagggagaaag

SEQ ID NO: 1185270 - RNA, 19 nt, Human
aggcggaggcaggagaauc

SEQ ID NO: 1185271 - RNA, 24 nt, Human
aggcggaggcaggagaaucacuug

SEQ ID NO: 1185272 - RNA, 18 nt, Human
aggcuucucguacacacc

SEQ ID NO: 1185273 - RNA, 19 nt, Human
agggagaaaggaggcacag

SEQ ID NO: 1185274 - RNA, 25 nt, Human
auagaauuccacccaggcuuguccc

SEQ ID NO: 1185275 - RNA, 26 nt, Human
auagaauuccacccaggcuuguccca

SEQ ID NO: 1185276 - RNA, 19 nt, Human
aucaacaaauuauacuccu

SEQ ID NO: 1185277 - RNA, 24 nt, Human
aucaccagaggucaggaguuugag

SEQ ID NO: 1185278 - RNA, 19 nt, Human
augaagcaugagguaaccc

SEQ ID NO: 1185279 - RNA, 19 nt, Human
augccuguaaucccagcac

SEQ ID NO: 1185280 - RNA, 19 nt, Human
auggaagagcaggaaccag

SEQ ID NO: 1185281 - RNA, 24 nt, Human
caaaacaaaaacgccaggaggccc

SEQ ID NO: 1185282 - RNA, 21 nt, Human
caacacagcaccugagacugu

SEQ ID NO: 1185283 - RNA, 21 nt, Human
caacuucagaugaaccaacac

SEQ ID NO: 1185284 - RNA, 22 nt, Human
caagccagaaacagaaaacgau

SEQ ID NO: 1185285 - RNA, 22 nt, Human
cacagagcaaaggaaaaggcag

SEQ ID NO: 1185286 - RNA, 23 nt, Human
cacagcaccugagacuguaugaa

SEQ ID NO: 1185287 - RNA, 20 nt, Human
cacauagugaaacccugucu

SEQ ID NO: 1185288 - RNA, 18 nt, Human
caccccauccgucagcac

SEQ ID NO: 1185289 - RNA, 19 nt, Human
cacuguguuugcccuucaa

SEQ ID NO: 1185290 - RNA, 23 nt, Human
cacuucaaccaggugacagagug

SEQ ID NO: 1185291 - RNA, 24 nt, Human
cagaucaccagaggucaggaguuu

SEQ ID NO: 1185292 - RNA, 23 nt, Human
cagcacuggggccaugcuggacc

SEQ ID NO: 1185293 - RNA, 24 nt, Human
cagcacuuugagaggccgaagugg

SEQ ID NO: 1185294 - RNA, 23 nt, Human
cagcccagggauagcuucagaug

SEQ ID NO: 1185295 - RNA, 21 nt, Human
cagcggcccuggcagacucuc

SEQ ID NO: 1185296 - RNA, 22 nt, Human
cagcggcccuggcagacucuca

SEQ ID NO: 1185297 - RNA, 24 nt, Human
caugccuguaaucccagcacuuug

SEQ ID NO: 1185298 - RNA, 20 nt, Human
cauggagcaucuuuugcucc

SEQ ID NO: 1185299 - RNA, 22 nt, Human
ccaauccacagagcaaaggaaa

SEQ ID NO: 1185300 - RNA, 19 nt, Human
ccacaaaaaaguugguugc

SEQ ID NO: 1185301 - RNA, 22 nt, Human
ccagaaaagaaaaaugaguccc

SEQ ID NO: 1185302 - RNA, 23 nt, Human
ccagaaaagaaaaaugagucccg

SEQ ID NO: 1185303 - RNA, 18 nt, Human
ccagcaaucaagccagaa

SEQ ID NO: 1185304 - RNA, 22 nt, Human
ccagcccacauagugaaacccc

SEQ ID NO: 1185305 - RNA, 20 nt, Human
ccaggaggccccugggcaag

SEQ ID NO: 1185306 - RNA, 23 nt, Human
ccagggcucccccuccuccccca

SEQ ID NO: 1185307 - RNA, 21 nt, Human
ccaggugacagagugagauuc

SEQ ID NO: 1185308 - RNA, 21 nt, Human
cccaacucugcuugcuaccuc

SEQ ID NO: 1185309 - RNA, 21 nt, Human
cccaggcuuguaagggcccau

SEQ ID NO: 1185310 - RNA, 23 nt, Human
ccccaccgugcuggcuccuuccu

SEQ ID NO: 1185311 - RNA, 20 nt, Human
ccccagcagugggagccuca

SEQ ID NO: 1185312 - RNA, 18 nt, Human
ccccauccgucagcacca

SEQ ID NO: 1185313 - RNA, 18 nt, Human
cccccuccucccccaacu

SEQ ID NO: 1185314 - RNA, 18 nt, Human
ccccucuccuucccuuuc

SEQ ID NO: 1185315 - RNA, 23 nt, Human
ccccugcccuccccucuccuucc

SEQ ID NO: 1185316 - RNA, 21 nt, Human
cccucacuguguuugcccuuc

SEQ ID NO: 1185317 - RNA, 22 nt, Human
cccucuacccugcagauccccu

SEQ ID NO: 1185318 - RNA, 22 nt, Human
cccugcccuccccucuccuucc

SEQ ID NO: 1185319 - RNA, 22 nt, Human
ccuacucaggccauuagucacu

SEQ ID NO: 1185320 - RNA, 24 nt, Human
ccuccccucuccuucccuuucccc

SEQ ID NO: 1185321 - RNA, 18 nt, Human
ccucucaugccuccuccc

SEQ ID NO: 1185322 - RNA, 21 nt, Human
ccucuccuucccuuuccucuc

SEQ ID NO: 1185323 - RNA, 19 nt, Human
ccugaagaacacccuccuu

SEQ ID NO: 1185324 - RNA, 22 nt, Human
ccugcccuccccucuccuuccc

SEQ ID NO: 1185325 - RNA, 23 nt, Human
ccuggcgcgccuuuaaccucaac

SEQ ID NO: 1185326 - RNA, 21 nt, Human
ccuguaaucccagcuacucgg

SEQ ID NO: 1185327 - RNA, 22 nt, Human
ccuguaaucccagcuacucggg

SEQ ID NO: 1185328 - RNA, 21 nt, Human
ccuucccuuuccucuccucuc

SEQ ID NO: 1185329 - RNA, 26 nt, Human
cgaagugggcagaucaccagagguca

SEQ ID NO: 1185330 - RNA, 23 nt, Human
cgcugucacagaucagacagcgg

SEQ ID NO: 1185331 - RNA, 24 nt, Human
cgggaggcagagguugcagugagc

SEQ ID NO: 1185332 - RNA, 19 nt, Human
cgggaggcggaggcaggag

SEQ ID NO: 1185333 - RNA, 24 nt, Human
cgggaggcggaggcaggagaauca

SEQ ID NO: 1185334 - RNA, 18 nt, Human
cuacacccugccuucugc

SEQ ID NO: 1185335 - RNA, 24 nt, Human
cucaugccuguaaucccagcacuu

SEQ ID NO: 1185336 - RNA, 19 nt, Human
cuccccuggugaaacagcu

SEQ ID NO: 1185337 - RNA, 21 nt, Human
cuccccuggugaaacagcucc

SEQ ID NO: 1185338 - RNA, 22 nt, Human
cucuaccuauccccugcccucc

SEQ ID NO: 1185339 - RNA, 19 nt, Human
cugcacugaaacgcaagga

SEQ ID NO: 1185340 - RNA, 20 nt, Human
cugcacuucaaccaggugac

SEQ ID NO: 1185341 - RNA, 18 nt, Human
cuggaucaggguuagggg

SEQ ID NO: 1185342 - RNA, 21 nt, Human
cugugcgcaugacuguguaug

SEQ ID NO: 1185343 - RNA, 24 nt, Human
cuucaaccaggugacagagugaga

SEQ ID NO: 1185344 - RNA, 25 nt, Human
cuucuaaguugggucacaaucacac

SEQ ID NO: 1185345 - RNA, 24 nt, Human
cuucuccagcucagcuuccucagu

SEQ ID NO: 1185346 - RNA, 26 nt, Human
cuucugggacccaaagaggcuucgcu

SEQ ID NO: 1185347 - RNA, 19 nt, Human
gaaagacuaaaucuaagag

SEQ ID NO: 1185348 - RNA, 23 nt, Human
gaacacaaaacaaaaacgccagg

SEQ ID NO: 1185349 - RNA, 22 nt, Human
gacaccuccggagacacaacug

SEQ ID NO: 1185350 - RNA, 25 nt, Human
gacagagugagauuccgucuccaaa

SEQ ID NO: 1185351 - RNA, 18 nt, Human
gagaaaguggggguggag

SEQ ID NO: 1185352 - RNA, 20 nt, Human
gagaacacaaaacaaaaacg

SEQ ID NO: 1185353 - RNA, 23 nt, Human
gagaaucacuugaaaccgggagg

SEQ ID NO: 1185354 - RNA, 24 nt, Human
gaggcaggagaaucacuugaaacc

SEQ ID NO: 1185355 - RNA, 23 nt, Human
gaguccguuugacucagagcugg

SEQ ID NO: 1185356 - RNA, 18 nt, Human
gagugguucacaagaaug

SEQ ID NO: 1185357 - RNA, 24 nt, Human
gaucaccagaggucaggaguuuga

SEQ ID NO: 1185358 - RNA, 26 nt, Human
gaucaccagaggucaggaguuugaga

SEQ ID NO: 1185359 - RNA, 19 nt, Human
gaugaggacacuaagcugg

SEQ ID NO: 1185360 - RNA, 27 nt, Human
gcaaagucuggacaccuccggagacag

SEQ ID NO: 1185361 - RNA, 19 nt, Human
gcaacuugacauccgagug

SEQ ID NO: 1185362 - RNA, 18 nt, Human
gcaggagaaucacuugaa

SEQ ID NO: 1185363 - RNA, 21 nt, Human
gccacgcugucacagaucaga

SEQ ID NO: 1185364 - RNA, 24 nt, Human
gcccacauagugaaacccugucuc

SEQ ID NO: 1185365 - RNA, 21 nt, Human
gcuaauagcucauuucugauu

SEQ ID NO: 1185366 - RNA, 21 nt, Human
gcuugcuaccuccacaacucc

SEQ ID NO: 1185367 - RNA, 22 nt, Human
ggaaaucccccuuccucaugcc

SEQ ID NO: 1185368 - RNA, 18 nt, Human
ggacuagcuuggcuaaua

SEQ ID NO: 1185369 - RNA, 20 nt, Human
ggaggcaggagaaucacuug

SEQ ID NO: 1185370 - RNA, 18 nt, Human
ggcccuggcagacucuca

SEQ ID NO: 1185371 - RNA, 20 nt, Human
ggcucaugccuguaauccca

SEQ ID NO: 1185372 - RNA, 19 nt, Human
gggaggcggaggcaggaga

SEQ ID NO: 1185373 - RNA, 26 nt, Human
gggcagaucaccagaggucaggaguu

SEQ ID NO: 1185374 - RNA, 24 nt, Human
gggcucaugccuguaaucccagca

SEQ ID NO: 1185375 - RNA, 21 nt, Human
ggggccaugcuggacccagag

SEQ ID NO: 1185376 - RNA, 23 nt, Human
gggggcucaugccuguaauccca

SEQ ID NO: 1185377 - RNA, 24 nt, Human
gggggcucaugccuguaaucccag

SEQ ID NO: 1185378 - RNA, 24 nt, Human
gggugcgggggcucaugccuguaa

SEQ ID NO: 1185379 - RNA, 20 nt, Human
gggugguggucucucaggag

SEQ ID NO: 1185380 - RNA, 18 nt, Human
gguauggaaacaaagaga

SEQ ID NO: 1185381 - RNA, 23 nt, Human
gguggcacaugccuguaauccca

SEQ ID NO: 1185382 - RNA, 24 nt, Human
gguggcacaugccuguaaucccag

SEQ ID NO: 1185383 - RNA, 19 nt, Human
gguugcaaccgggugcggg

SEQ ID NO: 1185384 - RNA, 23 nt, Human
gucacaaucacaccccauccguc

SEQ ID NO: 1185385 - RNA, 21 nt, Human
guccuuuuuccccagagcucc

SEQ ID NO: 1185386 - RNA, 22 nt, Human
gugacucccugaaacuucuaag

SEQ ID NO: 1185387 - RNA, 18 nt, Human
guggguggcacaugccug

SEQ ID NO: 1185388 - RNA, 18 nt, Human
gugucaggaauaccuggc

SEQ ID NO: 1185389 - RNA, 22 nt, Human
guugcaaccgggugcgggggcu

SEQ ID NO: 1185390 - RNA, 21 nt, Human
uaaaaccaacacagcaccuga

SEQ ID NO: 1185391 - RNA, 19 nt, Human
uaaaaggagaauggcccau

SEQ ID NO: 1185392 - RNA, 20 nt, Human
uaaagugaagauaaaucaac

SEQ ID NO: 1185393 - RNA, 22 nt, Human
uaacuccucaauauagaauucc

SEQ ID NO: 1185394 - RNA, 21 nt, Human
uaagaaagaaaccagcaauca

SEQ ID NO: 1185395 - RNA, 21 nt, Human
uaaggaaaucccccuuccuca

SEQ ID NO: 1185396 - RNA, 24 nt, Human
uaccacaccacaugccacgcuguc

SEQ ID NO: 1185397 - RNA, 19 nt, Human
uacucaggccauuagucac

SEQ ID NO: 1185398 - RNA, 19 nt, Human
uagcaucagacgcagguca

SEQ ID NO: 1185399 - RNA, 20 nt, Human
uauggaaacaaagagaggag

SEQ ID NO: 1185400 - RNA, 21 nt, Human
ucaagccagaaacagaaaacg

SEQ ID NO: 1185401 - RNA, 19 nt, Human
ucaaggaaacuccuuccuc

SEQ ID NO: 1185402 - RNA, 21 nt, Human
ucagagagccccucauuuaac

SEQ ID NO: 1185403 - RNA, 19 nt, Human
ucagcucccucugaaaguu

SEQ ID NO: 1185404 - RNA, 22 nt, Human
ucaugccuguaaucccagcacu

SEQ ID NO: 1185405 - RNA, 19 nt, Human
uccacacagcaagucagag

SEQ ID NO: 1185406 - RNA, 20 nt, Human
uccacugccaagauccugcu

SEQ ID NO: 1185407 - RNA, 18 nt, Human
uccagcucagcuuccuca

SEQ ID NO: 1185408 - RNA, 19 nt, Human
uccccagcagugggagccu

SEQ ID NO: 1185409 - RNA, 23 nt, Human
ucccccaacucugcuugcuaccu

SEQ ID NO: 1185410 - RNA, 18 nt, Human
uccccugcccuccccucu

SEQ ID NO: 1185411 - RNA, 22 nt, Human
uccccuguaucuaauuaucugu

SEQ ID NO: 1185412 - RNA, 21 nt, Human
ucccucaucccuucugguuua

SEQ ID NO: 1185413 - RNA, 20 nt, Human
ucccugagcuaugacuugcu

SEQ ID NO: 1185414 - RNA, 21 nt, Human
uccuagguccaaagaacaguu

SEQ ID NO: 1185415 - RNA, 19 nt, Human
uccucaguuuuucagcucu

SEQ ID NO: 1185416 - RNA, 20 nt, Human
uccucaguuuuucagcucuu

SEQ ID NO: 1185417 - RNA, 21 nt, Human
uccucucuccucucucccuca

SEQ ID NO: 1185418 - RNA, 21 nt, Human
ucuaauuaucugucaaccuga

SEQ ID NO: 1185419 - RNA, 23 nt, Human
ucucagagagccccucauuuaac

SEQ ID NO: 1185420 - RNA, 24 nt, Human
ucugaaaugcaaucuaaguuuaca

SEQ ID NO: 1185421 - RNA, 21 nt, Human
ucugcacugaaacgcaaggag

SEQ ID NO: 1185422 - RNA, 21 nt, Human
ucugcacugaaacgcaaggag

SEQ ID NO: 1185423 - RNA, 22 nt, Human
ucugcagucuucaauaucaccu

SEQ ID NO: 1185424 - RNA, 23 nt, Human
ucugcagucuucaauaucaccuc

SEQ ID NO: 1185425 - RNA, 23 nt, Human
ugaagaaaacugggugaccacau

SEQ ID NO: 1185426 - RNA, 25 nt, Human
ugaagaacacccuccuuuucccuga

SEQ ID NO: 1185427 - RNA, 19 nt, Human
ugagaccagcccagcccac

SEQ ID NO: 1185428 - RNA, 20 nt, Human
ugagaggccgaagugggcag

SEQ ID NO: 1185429 - RNA, 24 nt, Human
ugagaggccgaagugggcagauca

SEQ ID NO: 1185430 - RNA, 26 nt, Human
ugagauauaaggaaaucccccuuccc

SEQ ID NO: 1185431 - RNA, 21 nt, Human
ugagcuggaggcauggagggu

SEQ ID NO: 1185432 - RNA, 22 nt, Human
ugaggcaaggagggugucucug

SEQ ID NO: 1185433 - RNA, 21 nt, Human
ugccacucugcacugaaacgc

SEQ ID NO: 1185434 - RNA, 22 nt, Human
ugcccucuacccugcagauccc

SEQ ID NO: 1185435 - RNA, 23 nt, Human
ugccuguaaucccagcacuuuga

SEQ ID NO: 1185436 - RNA, 23 nt, Human
ugccuguaaucccagcuacucgg

SEQ ID NO: 1185437 - RNA, 24 nt, Human
ugccuguaaucccagcuacucggg

SEQ ID NO: 1185438 - RNA, 19 nt, Human
uggagcaucuuuugcuccu

SEQ ID NO: 1185439 - RNA, 18 nt, Human
uggaugucucugcagucu

SEQ ID NO: 1185440 - RNA, 21 nt, Human
uggcacaugccuguaauccca

SEQ ID NO: 1185441 - RNA, 19 nt, Human
uggcagacucucagagagc

SEQ ID NO: 1185442 - RNA, 20 nt, Human
uggcuuccagcucccagccc

SEQ ID NO: 1185443 - RNA, 19 nt, Human
ugggaagguuggugaggca

SEQ ID NO: 1185444 - RNA, 20 nt, Human
ugggaagguuggugaggcaa

SEQ ID NO: 1185445 - RNA, 21 nt, Human
ugggcagaucaccagagguca

SEQ ID NO: 1185446 - RNA, 24 nt, Human
ugggcagaucaccagaggucagga

SEQ ID NO: 1185447 - RNA, 19 nt, Human
uggggccaugcuggaccca

SEQ ID NO: 1185448 - RNA, 21 nt, Human
uggggccaugcuggacccaga

SEQ ID NO: 1185449 - RNA, 20 nt, Human
uggggguggagagggagaac

SEQ ID NO: 1185450 - RNA, 23 nt, Human
ugguauggaaacaaagagaggag

SEQ ID NO: 1185451 - RNA, 18 nt, Human
ugucacagaucagacagc

SEQ ID NO: 1185452 - RNA, 23 nt, Human
uguguaugggaagguuggugagg

SEQ ID NO: 1185453 - RNA, 21 nt, Human
uuaaugcugucaaggguuuaa

SEQ ID NO: 1185454 - RNA, 18 nt, Human
uuccucaguuuuucagcu

SEQ ID NO: 1185455 - RNA, 23 nt, Human
uuccucccaaacagccagagcaa

SEQ ID NO: 1185456 - RNA, 23 nt, Human
uucucguacacaccuuguuccau

SEQ ID NO: 1185457 - RNA, 19 nt, Human
uucuugugagacaauaggu

SEQ ID NO: 1185458 - RNA, 24 nt, Human
uugacucagagcugggcaugagcu

SEQ ID NO: 1185459 - RNA, 21 nt, Human
uugaugauuuucauucaacga

SEQ ID NO: 1185460 - RNA, 22 nt, Human
uugcagugagccaugaucgcgc

SEQ ID NO: 1185461 - RNA, 20 nt, Human
uuucugauuuaacaucacau

SEQ ID NO: 1185462 - RNA, 24 nt, Human
uuuuccaaaucggccucucggcug

SEQ ID NO: 1185463 - RNA, 22 nt, Human
aaaaagacacccuaauaaaccu

SEQ ID NO: 1185464 - RNA, 20 nt, Human
aaaacucaaagaucagcccc

SEQ ID NO: 1185465 - RNA, 20 nt, Human
aaacccuucaaccuuccagg

SEQ ID NO: 1185466 - RNA, 24 nt, Human
aagcaacuucugccauggggaggu

SEQ ID NO: 1185467 - RNA, 20 nt, Human
aaggaucuucucaaagcaag

SEQ ID NO: 1185468 - RNA, 22 nt, Human
acaaaaccccgcagucaugggc

SEQ ID NO: 1185469 - RNA, 24 nt, Human
acagagagagauuuaugaccugga

SEQ ID NO: 1185470 - RNA, 29 nt, Human
acauccaucuaaaaagacacccuaauaaa

SEQ ID NO: 1185471 - RNA, 18 nt, Human
accaugugggauggcagg

SEQ ID NO: 1185472 - RNA, 21 nt, Human
acccuaauaaaccugcagcua

SEQ ID NO: 1185473 - RNA, 20 nt, Human
accuggauagcuuugauccc

SEQ ID NO: 1185474 - RNA, 18 nt, Human
acugccaucugcccuugc

SEQ ID NO: 1185475 - RNA, 18 nt, Human
acuuccugggaaucccag

SEQ ID NO: 1185476 - RNA, 20 nt, Human
agagagauuccugcuccucc

SEQ ID NO: 1185477 - RNA, 18 nt, Human
agcuuuuucccguccccu

SEQ ID NO: 1185478 - RNA, 21 nt, Human
aggaaccccccaucaccagga

SEQ ID NO: 1185479 - RNA, 20 nt, Human
aggaaggaagccugcccagu

SEQ ID NO: 1185480 - RNA, 22 nt, Human
aggaggaaggaagccugcccag

SEQ ID NO: 1185481 - RNA, 22 nt, Human
aggaggaaggaagccugcccag

SEQ ID NO: 1185482 - RNA, 25 nt, Human
aggaggaaggaagccugcccaguaa

SEQ ID NO: 1185483 - RNA, 23 nt, Human
aggccaggcuuccucucccccag

SEQ ID NO: 1185484 - RNA, 19 nt, Human
agggacacagcuggguggc

SEQ ID NO: 1185485 - RNA, 18 nt, Human
agggggugcccagggacu

SEQ ID NO: 1185486 - RNA, 21 nt, Human
auccauaaaacuguuccccuc

SEQ ID NO: 1185487 - RNA, 24 nt, Human
caaaaccccgcagucaugggcucc

SEQ ID NO: 1185488 - RNA, 19 nt, Human
caaauugggucuaaugacc

SEQ ID NO: 1185489 - RNA, 20 nt, Human
caacaagagagauuccugcu

SEQ ID NO: 1185490 - RNA, 23 nt, Human
caagaaaccagccuguggcccac

SEQ ID NO: 1185491 - RNA, 18 nt, Human
caaggugaaggaggggcc

SEQ ID NO: 1185492 - RNA, 26 nt, Human
cacaaggaaaaggcacacaagguccc

SEQ ID NO: 1185493 - RNA, 19 nt, Human
cacacaaggucccccagcc

SEQ ID NO: 1185494 - RNA, 18 nt, Human
cacagcuggguggcugag

SEQ ID NO: 1185495 - RNA, 20 nt, Human
caccccucccucaaggccag

SEQ ID NO: 1185496 - RNA, 21 nt, Human
caccugcaccccucccucaag

SEQ ID NO: 1185497 - RNA, 30 nt, Human
cacucccaacagcccaccagcuccugcgcu

SEQ ID NO: 1185498 - RNA, 20 nt, Human
cagcagcuccccagaaugga

SEQ ID NO: 1185499 - RNA, 22 nt, Human
cagccauggcuucucagaggac

SEQ ID NO: 1185500 - RNA, 24 nt, Human
cagcuccugcgcccagaugccccu

SEQ ID NO: 1185501 - RNA, 23 nt, Human
cagcuucuuggcagagcugggag

SEQ ID NO: 1185502 - RNA, 24 nt, Human
caggaggaaggaagccugcccagu

SEQ ID NO: 1185503 - RNA, 19 nt, Human
caggcuuccucuccccccu

SEQ ID NO: 1185504 - RNA, 23 nt, Human
cauacauccaucuaaaaagacac

SEQ ID NO: 1185505 - RNA, 21 nt, Human
caucaacagacccacugccau

SEQ ID NO: 1185506 - RNA, 21 nt, Human
caucuaaaaagacacccuaau

SEQ ID NO: 1185507 - RNA, 19 nt, Human
cauugcacccaagaaacca

SEQ ID NO: 1185508 - RNA, 26 nt, Human
cauuucacagccacaaggaaaaggca

SEQ ID NO: 1185509 - RNA, 22 nt, Human
ccacaccugcaccccucccuca

SEQ ID NO: 1185510 - RNA, 22 nt, Human
ccacgcaugcaggaauaaacac

SEQ ID NO: 1185511 - RNA, 25 nt, Human
cccaagaaaccagccuguggcccac

SEQ ID NO: 1185512 - RNA, 21 nt, Human
cccacacacacaggagccaca

SEQ ID NO: 1185513 - RNA, 23 nt, Human
cccaccagcuccugcgcccagau

SEQ ID NO: 1185514 - RNA, 23 nt, Human
cccacgcaugcaggaauaaacac

SEQ ID NO: 1185515 - RNA, 20 nt, Human
ccccagcacacgcaaguucu

SEQ ID NO: 1185516 - RNA, 20 nt, Human
ccccuccaccccuucacuuu

SEQ ID NO: 1185517 - RNA, 21 nt, Human
cccguccccuccacuugacca

SEQ ID NO: 1185518 - RNA, 20 nt, Human
cccuaaaccccgaggagaag

SEQ ID NO: 1185519 - RNA, 25 nt, Human
cccuucaaccuuccaggcacaguuu

SEQ ID NO: 1185520 - RNA, 18 nt, Human
ccggucccuucccuuccc

SEQ ID NO: 1185521 - RNA, 22 nt, Human
ccggucccuucccuucccuggg

SEQ ID NO: 1185522 - RNA, 23 nt, Human
ccucaaggccaggcuuccucucc

SEQ ID NO: 1185523 - RNA, 22 nt, Human
ccuccagccccuccaccccuuc

SEQ ID NO: 1185524 - RNA, 23 nt, Human
ccuccagccccuccaccccuuca

SEQ ID NO: 1185525 - RNA, 18 nt, Human
ccuggagaaaacgagccc

SEQ ID NO: 1185526 - RNA, 20 nt, Human
ccuggggccuuguggcugag

SEQ ID NO: 1185527 - RNA, 19 nt, Human
ccuguggcccacgcaugca

SEQ ID NO: 1185528 - RNA, 22 nt, Human
cgagcccaggagggggugccca

SEQ ID NO: 1185529 - RNA, 22 nt, Human
cgcccagaugccccugaaaucc

SEQ ID NO: 1185530 - RNA, 18 nt, Human
cgggcuggacuuccuggg

SEQ ID NO: 1185531 - RNA, 19 nt, Human
cuaaaaagacacccuaaua

SEQ ID NO: 1185532 - RNA, 19 nt, Human
cuaaacgucucugcacccc

SEQ ID NO: 1185533 - RNA, 20 nt, Human
cucagauggguugccucaag

SEQ ID NO: 1185534 - RNA, 19 nt, Human
cucccuuccacgaccgguc

SEQ ID NO: 1185535 - RNA, 21 nt, Human
cugaggcccuggggccuugug

SEQ ID NO: 1185536 - RNA, 18 nt, Human
cugcaccccucccucaag

SEQ ID NO: 1185537 - RNA, 20 nt, Human
cugcccuggggcccaacagc

SEQ ID NO: 1185538 - RNA, 23 nt, Human
cugggaagcccugacgaagagag

SEQ ID NO: 1185539 - RNA, 21 nt, Human
gaaaaggcacacaaggucccc

SEQ ID NO: 1185540 - RNA, 18 nt, Human
gaaacagcacuacaucca

SEQ ID NO: 1185541 - RNA, 21 nt, Human
gaacauccccuguuuugcuga

SEQ ID NO: 1185542 - RNA, 23 nt, Human
gacaggcagagucuucacucucc

SEQ ID NO: 1185543 - RNA, 20 nt, Human
gaggcccuggggccuugugg

SEQ ID NO: 1185544 - RNA, 20 nt, Human
gagggacacagcuggguggc

SEQ ID NO: 1185545 - RNA, 23 nt, Human
gagggacacagcuggguggcuga

SEQ ID NO: 1185546 - RNA, 21 nt, Human
gcacucccaacagcccaccag

SEQ ID NO: 1185547 - RNA, 22 nt, Human
gccacagagagagauuuaugac

SEQ ID NO: 1185548 - RNA, 23 nt, Human
gccccgaagcguccaugaauccu

SEQ ID NO: 1185549 - RNA, 21 nt, Human
ggaacaaacccuucaaccuuc

SEQ ID NO: 1185550 - RNA, 18 nt, Human
ggagggggugcccaggga

SEQ ID NO: 1185551 - RNA, 25 nt, Human
ggaguagagcacauuuuuuccuuug

SEQ ID NO: 1185552 - RNA, 20 nt, Human
ggcagagcugggagugggug

SEQ ID NO: 1185553 - RNA, 19 nt, Human
gggcuggacuuccugggaa

SEQ ID NO: 1185554 - RNA, 26 nt, Human
uaaaccccgaggagaagguuuaugga

SEQ ID NO: 1185555 - RNA, 24 nt, Human
uaaacgucucugcaccccaugcuu

SEQ ID NO: 1185556 - RNA, 22 nt, Human
uaaggucucagccacauccaua

SEQ ID NO: 1185557 - RNA, 18 nt, Human
uagcaagguuugcaugca

SEQ ID NO: 1185558 - RNA, 24 nt, Human
ucagggucucuuucugcugauggc

SEQ ID NO: 1185559 - RNA, 18 nt, Human
uccaugaauccugggaca

SEQ ID NO: 1185560 - RNA, 18 nt, Human
uccauggugucucgaugg

SEQ ID NO: 1185561 - RNA, 20 nt, Human
ucccugggcuucaauuucca

SEQ ID NO: 1185562 - RNA, 19 nt, Human
uccgggguccggaguguuc

SEQ ID NO: 1185563 - RNA, 18 nt, Human
uccuccagccccuccacc

SEQ ID NO: 1185564 - RNA, 20 nt, Human
uccugaggcccuggggccuu

SEQ ID NO: 1185565 - RNA, 18 nt, Human
ucuucagcugcccugggg

SEQ ID NO: 1185566 - RNA, 18 nt, Human
ucuucuguaaaaugagag

SEQ ID NO: 1185567 - RNA, 18 nt, Human
ugaaaagagauccuagaa

SEQ ID NO: 1185568 - RNA, 20 nt, Human
ugaccaugugggauggcagg

SEQ ID NO: 1185569 - RNA, 22 nt, Human
ugaccuggauagcuuugauccc

SEQ ID NO: 1185570 - RNA, 20 nt, Human
ugagaggguugggugcaagu

SEQ ID NO: 1185571 - RNA, 19 nt, Human
ugagguccaaagggcuguc

SEQ ID NO: 1185572 - RNA, 19 nt, Human
ugaggugucuacaaaaccc

SEQ ID NO: 1185573 - RNA, 21 nt, Human
ugauugaaaagagauccuaau

SEQ ID NO: 1185574 - RNA, 19 nt, Human
ugcccuggggcccaacagc

SEQ ID NO: 1185575 - RNA, 18 nt, Human
ugcuccuccagccccucc

SEQ ID NO: 1185576 - RNA, 28 nt, Human
uggaaaugguuuccuggucccgaccacg

SEQ ID NO: 1185577 - RNA, 19 nt, Human
uggaacggcccagccaugg

SEQ ID NO: 1185578 - RNA, 26 nt, Human
uggagaaaacgagcccaggagggggu

SEQ ID NO: 1185579 - RNA, 19 nt, Human
uggcagagcugggaguggg

SEQ ID NO: 1185580 - RNA, 19 nt, Human
uggcaguuuggaaaugguu

SEQ ID NO: 1185581 - RNA, 23 nt, Human
uucacucuccgggguccggagug

SEQ ID NO: 1185582 - RNA, 19 nt, Human
uuccugaggcccuggggcc

SEQ ID NO: 1185583 - RNA, 23 nt, Human
uuccugcuccuccagccccucca

SEQ ID NO: 1185584 - RNA, 18 nt, Human
uuccugggaagcccugac

SEQ ID NO: 1185585 - RNA, 18 nt, Human
uuccuggucuggcugucc

SEQ ID NO: 1185586 - RNA, 24 nt, Human
uucugcugauggcucucccuucca

SEQ ID NO: 1185587 - RNA, 20 nt, Human
uugcugauugaaaagagauc

SEQ ID NO: 1185588 - RNA, 24 nt, Human
uuggaacauccccuguuuugcuga

SEQ ID NO: 1185589 - RNA, 21 nt, Human
uuuugugcugaggaacccccc

SEQ ID NO: 1185590 - RNA, 24 nt, Human
uuuugugcugaggaaccccccauc

SEQ ID NO: 1185591 - RNA, 19 nt, Human
uuuuucccguccccuccac

SEQ ID NO: 1185592 - RNA, 19 nt, Human
aggcuguggcaagaacagg

SEQ ID NO: 1185593 - RNA, 21 nt, Human
caaagaggacccaggccugga

SEQ ID NO: 1185594 - RNA, 22 nt, Human
cagccugucaaagaggacccag

SEQ ID NO: 1185595 - RNA, 20 nt, Human
gaggacccaggccuggacug

SEQ ID NO: 1185596 - RNA, 22 nt, Human
ggccuggacugaguuggggugg

SEQ ID NO: 1185597 - RNA, 21 nt, Human
ugaguugggguggugggaggc

SEQ ID NO: 1185598 - RNA, 23 nt, Human
ugggaggcuguggcaagaacagg

SEQ ID NO: 1185599 - RNA, 19 nt, Human
ugggguggugggaggcugu

SEQ ID NO: 1185600 - RNA, 23 nt, Human
uucacugaacucuuuguucacca

SEQ ID NO: 1185601 - RNA, 19 nt, Human
aaaaagacuuagaacauaa

SEQ ID NO: 1185602 - RNA, 24 nt, Human
aaaagagcaaccaaaaaagggggc

SEQ ID NO: 1185603 - RNA, 23 nt, Human
aaagagcaaccaaaaaagggggc

SEQ ID NO: 1185604 - RNA, 21 nt, Human
aaagcagaaaaagagcaacca

SEQ ID NO: 1185605 - RNA, 22 nt, Human
aacacugaauaauauuccauug

SEQ ID NO: 1185606 - RNA, 20 nt, Human
aacauagcaagaccccaugu

SEQ ID NO: 1185607 - RNA, 26 nt, Human
aacauuccuccaugucuucauggcuu

SEQ ID NO: 1185608 - RNA, 26 nt, Human
aaccuugaaagcagaaaaagagcaac

SEQ ID NO: 1185609 - RNA, 19 nt, Human
aagcagaaaaagagcaacc

SEQ ID NO: 1185610 - RNA, 23 nt, Human
aagcagaaaaagagcaaccaaaa

SEQ ID NO: 1185611 - RNA, 18 nt, Human
aaggcacaucuaagucaa

SEQ ID NO: 1185612 - RNA, 18 nt, Human
aaugaaugacaguuucug

SEQ ID NO: 1185613 - RNA, 27 nt, Human
acacagcccuuucaaauuggcuuuuuu

SEQ ID NO: 1185614 - RNA, 23 nt, Human
acaccuauaauccuaccacuuug

SEQ ID NO: 1185615 - RNA, 19 nt, Human
acauaacacuuucaagccc

SEQ ID NO: 1185616 - RNA, 20 nt, Human
accuugaaagcagaaaaaga

SEQ ID NO: 1185617 - RNA, 22 nt, Human
accuugaaagcagaaaaagagc

SEQ ID NO: 1185618 - RNA, 21 nt, Human
agaacuuuccccacuucguau

SEQ ID NO: 1185619 - RNA, 24 nt, Human
aggauugcuugaagccaggaguuu

SEQ ID NO: 1185620 - RNA, 21 nt, Human
aggccaagguggaaggauugc

SEQ ID NO: 1185621 - RNA, 22 nt, Human
auagcaagaccccaugucuaca

SEQ ID NO: 1185622 - RNA, 18 nt, Human
auuauuuucuuccucugc

SEQ ID NO: 1185623 - RNA, 24 nt, Human
auugcuugaagccaggaguuuaag

SEQ ID NO: 1185624 - RNA, 22 nt, Human
caaccuuaacuuuucauggccc

SEQ ID NO: 1185625 - RNA, 21 nt, Human
caagcuaauauaaaccuugaa

SEQ ID NO: 1185626 - RNA, 25 nt, Human
caagcuaauauaaaccuugaaagca

SEQ ID NO: 1185627 - RNA, 26 nt, Human
caagguggaaggauugcuugaagcca

SEQ ID NO: 1185628 - RNA, 19 nt, Human
caaugaaugacaguuucug

SEQ ID NO: 1185629 - RNA, 24 nt, Human
cacauccuuaccagcauuuggugu

SEQ ID NO: 1185630 - RNA, 19 nt, Human
caccuauaauccuaccacu

SEQ ID NO: 1185631 - RNA, 23 nt, Human
caccuauaauccuaccacuuugg

SEQ ID NO: 1185632 - RNA, 24 nt, Human
caccuauaauccuaccacuuuggg

SEQ ID NO: 1185633 - RNA, 21 nt, Human
cagaaaaagagcaaccaaaaa

SEQ ID NO: 1185634 - RNA, 22 nt, Human
cauaacacuuucaagcccuugc

SEQ ID NO: 1185635 - RNA, 28 nt, Human
cauaaugaacaaaaucucagagacuugg

SEQ ID NO: 1185636 - RNA, 25 nt, Human
cauagcaagaccccaugucuacaaa

SEQ ID NO: 1185637 - RNA, 22 nt, Human
cauuuugcuauugcugagugaa

SEQ ID NO: 1185638 - RNA, 23 nt, Human
ccuauaauccuaccacuuuggga

SEQ ID NO: 1185639 - RNA, 19 nt, Human
cuacaaaaccuccuaaaac

SEQ ID NO: 1185640 - RNA, 20 nt, Human
cuuuacagcuauucugcacu

SEQ ID NO: 1185641 - RNA, 18 nt, Human
gagagcuacaaaaccucc

SEQ ID NO: 1185642 - RNA, 21 nt, Human
gagcuuacaccuauaauccua

SEQ ID NO: 1185643 - RNA, 21 nt, Human
gaguaacagaguggaaaaaga

SEQ ID NO: 1185644 - RNA, 24 nt, Human
gauugcuugaagccaggaguuuaa

SEQ ID NO: 1185645 - RNA, 23 nt, Human
gcaggguuuuguguggacauaag

SEQ ID NO: 1185646 - RNA, 22 nt, Human
ggauugcuugaagccaggaguu

SEQ ID NO: 1185647 - RNA, 20 nt, Human
gucugcugauuuuuuguugg

SEQ ID NO: 1185648 - RNA, 20 nt, Human
uaaccaaacacuucccagcc

SEQ ID NO: 1185649 - RNA, 25 nt, Human
uaaguuuucagcucauuuggguaau

SEQ ID NO: 1185650 - RNA, 21 nt, Human
uaauaaccaaacacuucccag

SEQ ID NO: 1185651 - RNA, 24 nt, Human
uaccacuuugggaggccaaggugg

SEQ ID NO: 1185652 - RNA, 19 nt, Human
uagcaagaccccaugucua

SEQ ID NO: 1185653 - RNA, 22 nt, Human
uaggcaacauagcaagacccca

SEQ ID NO: 1185654 - RNA, 24 nt, Human
uagugguaucucauuguuguuuua

SEQ ID NO: 1185655 - RNA, 21 nt, Human
ucagagaacaaacuauuugau

SEQ ID NO: 1185656 - RNA, 23 nt, Human
ucagggcaaaauauuuucaaucu

SEQ ID NO: 1185657 - RNA, 25 nt, Human
ucuaaagugcccuucuuuaucuuuu

SEQ ID NO: 1185658 - RNA, 20 nt, Human
ucuaucaacuucugagagac

SEQ ID NO: 1185659 - RNA, 21 nt, Human
ucuuccucugcuugcuuugag

SEQ ID NO: 1185660 - RNA, 23 nt, Human
ugaaaaguauaauuucuuaagua

SEQ ID NO: 1185661 - RNA, 18 nt, Human
ugaaagcagaaaaagagc

SEQ ID NO: 1185662 - RNA, 19 nt, Human
ugaaagcagaaaaagagca

SEQ ID NO: 1185663 - RNA, 22 nt, Human
ugaaagcagaaaaagagcaacc

SEQ ID NO: 1185664 - RNA, 20 nt, Human
ugaaugacaguuucuguugg

SEQ ID NO: 1185665 - RNA, 19 nt, Human
ugauuuaagaacuuucccc

SEQ ID NO: 1185666 - RNA, 19 nt, Human
ugauuuagucuuuagccca

SEQ ID NO: 1185667 - RNA, 21 nt, Human
ugcuauaaacauccaugugca

SEQ ID NO: 1185668 - RNA, 20 nt, Human
uggaaaaagacuuagaacau

SEQ ID NO: 1185669 - RNA, 24 nt, Human
uggaaaaagacuuagaacauaaug

SEQ ID NO: 1185670 - RNA, 22 nt, Human
ugggaggccaagguggaaggau

SEQ ID NO: 1185671 - RNA, 24 nt, Human
ugggaggccaagguggaaggauug

SEQ ID NO: 1185672 - RNA, 21 nt, Human
uguguagugguaucucauugu

SEQ ID NO: 1185673 - RNA, 26 nt, Human
uuaucuuauuguuuuugguuuccaau

SEQ ID NO: 1185674 - RNA, 19 nt, Human
uucaaauuggcuuuuuuca

SEQ ID NO: 1185675 - RNA, 20 nt, Human
uucaaccuuuuuaauauuua

SEQ ID NO: 1185676 - RNA, 21 nt, Human
uuccaaaugcuugggguuuuc

SEQ ID NO: 1185677 - RNA, 22 nt, Human
uugaagccaggaguuuaagacc

SEQ ID NO: 1185678 - RNA, 24 nt, Human
uugucuccucugacauuuguuucu

SEQ ID NO: 1185679 - RNA, 23 nt, Human
uuucaaauuggcuuuuuucaguu

SEQ ID NO: 1185680 - RNA, 18 nt, Human
uuucauggcccauuuaca

SEQ ID NO: 1185681 - RNA, 20 nt, Human
uuucuugugcuuacuauuua

SEQ ID NO: 1185682 - RNA, 21 nt, Human
aaacuugaagcuggacucuga

SEQ ID NO: 1185683 - RNA, 22 nt, Human
aacuaaacuugaagcuggacuc

SEQ ID NO: 1185684 - RNA, 22 nt, Human
aagaacauaaaaccacaagagc

SEQ ID NO: 1185685 - RNA, 18 nt, Human
aagagcuuuuugaguggg

SEQ ID NO: 1185686 - RNA, 21 nt, Human
acacaccauccaccccaaaca

SEQ ID NO: 1185687 - RNA, 22 nt, Human
acagacauguauucugugucuc

SEQ ID NO: 1185688 - RNA, 21 nt, Human
accaguguggagacguagcuu

SEQ ID NO: 1185689 - RNA, 21 nt, Human
aggcuuuaagccuuggaaaua

SEQ ID NO: 1185690 - RNA, 23 nt, Human
aggucaagaacauaaaaccacaa

SEQ ID NO: 1185691 - RNA, 24 nt, Human
auaaaaccacaagagcuuuuugag

SEQ ID NO: 1185692 - RNA, 21 nt, Human
aucaacuaaacuugaagcugg

SEQ ID NO: 1185693 - RNA, 18 nt, Human
cacaguguuuggcaaagu

SEQ ID NO: 1185694 - RNA, 21 nt, Human
caccauccaccccaaacauua

SEQ ID NO: 1185695 - RNA, 23 nt, Human
cagaaugcuuacuaaaauuuuaa

SEQ ID NO: 1185696 - RNA, 22 nt, Human
cagaauuuauggaauauuaaau

SEQ ID NO: 1185697 - RNA, 26 nt, Human
caucaacuaaacuugaagcuggacuc

SEQ ID NO: 1185698 - RNA, 24 nt, Human
ccagcacaguguuuggcaaaguca

SEQ ID NO: 1185699 - RNA, 24 nt, Human
ccgacacaccauccaccccaaaca

SEQ ID NO: 1185700 - RNA, 23 nt, Human
ccuuaaacaugccauuuugccuc

SEQ ID NO: 1185701 - RNA, 23 nt, Human
cuggccccuaaauuuucuuucuc

SEQ ID NO: 1185702 - RNA, 22 nt, Human
cuuccauaaccgacacaccauc

SEQ ID NO: 1185703 - RNA, 23 nt, Human
gaccaagaaauacguauuuuagu

SEQ ID NO: 1185704 - RNA, 21 nt, Human
gauccccuuaaaugacacuuc

SEQ ID NO: 1185705 - RNA, 24 nt, Human
ggcuuuaagccuuggaaauaaucu

SEQ ID NO: 1185706 - RNA, 20 nt, Human
guagagugugcauaccugua

SEQ ID NO: 1185707 - RNA, 21 nt, Human
gugugcauaccuguauacaug

SEQ ID NO: 1185708 - RNA, 21 nt, Human
uaaaauagacugcaagguuca

SEQ ID NO: 1185709 - RNA, 20 nt, Human
uaauuugcccuguggaaaaa

SEQ ID NO: 1185710 - RNA, 24 nt, Human
uacagaaugcuuacuaaaauuuua

SEQ ID NO: 1185711 - RNA, 18 nt, Human
uagaaaaugcaugcggua

SEQ ID NO: 1185712 - RNA, 20 nt, Human
uauaaaauagacugcaaggu

SEQ ID NO: 1185713 - RNA, 19 nt, Human
uauggaaauauauguguag

SEQ ID NO: 1185714 - RNA, 21 nt, Human
uauggaauauuaaauauaugg

SEQ ID NO: 1185715 - RNA, 20 nt, Human
ucacaaaugaaaggggcuua

SEQ ID NO: 1185716 - RNA, 23 nt, Human
uccaccccaaacauuagaaaaug

SEQ ID NO: 1185717 - RNA, 18 nt, Human
ucccauugaccuacaaug

SEQ ID NO: 1185718 - RNA, 24 nt, Human
ucuaugccuuccauaaccgacaca

SEQ ID NO: 1185719 - RNA, 23 nt, Human
ugaaagauuauuuuauucagcuu

SEQ ID NO: 1185720 - RNA, 24 nt, Human
ugaaugagaggacuccaguugaaa

SEQ ID NO: 1185721 - RNA, 24 nt, Human
ugaccuacaaugagcauuugaucc

SEQ ID NO: 1185722 - RNA, 20 nt, Human
uggugguagaauuuucagaa

SEQ ID NO: 1185723 - RNA, 26 nt, Human
uguagagugugcauaccuguauacau

SEQ ID NO: 1185724 - RNA, 19 nt, Human
uguggagacguagcuuguc

SEQ ID NO: 1185725 - RNA, 19 nt, Human
uguguagaccaguguggag

SEQ ID NO: 1185726 - RNA, 21 nt, Human
uugaaaccaaagaaaucucau

SEQ ID NO: 1185727 - RNA, 20 nt, Human
uuuauucagcuucaggcuuu

SEQ ID NO: 1185728 - RNA, 22 nt, Human
uuucauggaguucugguugagg

SEQ ID NO: 1185729 - RNA, 20 nt, Human
uuuuccacaaaaacaacuuu

SEQ ID NO: 1185730 - RNA, 22 nt, Human
aaaaaaaauaggagcagcaaau

SEQ ID NO: 1185731 - RNA, 25 nt, Human
aaaaaaaauaggagcagccgguacc

SEQ ID NO: 1185732 - RNA, 27 nt, Human
aaacagaaaaaaaaauaggagcagggu

SEQ ID NO: 1185733 - RNA, 18 nt, Human
aauacauuuucucuagac

SEQ ID NO: 1185734 - RNA, 18 nt, Human
agaagaauucuuaugaga

SEQ ID NO: 1185735 - RNA, 18 nt, Human
cacugacugcuggugugu

SEQ ID NO: 1185736 - RNA, 20 nt, Human
cagaaaaaaaaauaggagca

SEQ ID NO: 1185737 - RNA, 23 nt, Human
cagaaggugccaaacagguuuca

SEQ ID NO: 1185738 - RNA, 23 nt, Human
cagaaugccuuaucuucuuuuaa

SEQ ID NO: 1185739 - RNA, 24 nt, Human
gugaggugccuucugaagaagaga

SEQ ID NO: 1185740 - RNA, 20 nt, Human
guuuaguuuuugguguuuag

SEQ ID NO: 1185741 - RNA, 20 nt, Human
uaaaaagguauaauauggua

SEQ ID NO: 1185742 - RNA, 19 nt, Human
uagagacccaagaaagcaa

SEQ ID NO: 1185743 - RNA, 20 nt, Human
uagagacccaagaaagcaac

SEQ ID NO: 1185744 - RNA, 24 nt, Human
uagagacccaagaaagcaacucaa

SEQ ID NO: 1185745 - RNA, 22 nt, Human
uauggaagagcaguuuguaaua

SEQ ID NO: 1185746 - RNA, 20 nt, Human
ucaaaguuuuccucacugac

SEQ ID NO: 1185747 - RNA, 27 nt, Human
ucuucuuuuucuuuuuuuuuuucuuuu

SEQ ID NO: 1185748 - RNA, 20 nt, Human
ucuuucuucuuuuucuuuuu

SEQ ID NO: 1185749 - RNA, 24 nt, Human
ucuuuuucuuuuuuuuuuucuuuu

SEQ ID NO: 1185750 - RNA, 22 nt, Human
uuccagaaggugccaaacaggu

SEQ ID NO: 1185751 - RNA, 29 nt, Human
uucuuuuucuuuuuuuuuuucuuuuuuuc

SEQ ID NO: 1185752 - RNA, 26 nt, Human
uugugucuuucuucuuuuucuuuuuu

SEQ ID NO: 1185753 - RNA, 18 nt, Human
uuguucaaaguuuuccuc

SEQ ID NO: 1185754 - RNA, 20 nt, Human
uuuagagacucccuuccucu

SEQ ID NO: 1185755 - RNA, 18 nt, Human
uuucaacaucauauuaau

SEQ ID NO: 1185756 - RNA, 24 nt, Human
uuuguuugcacucagaaugccuua

SEQ ID NO: 1185757 - RNA, 23 nt, Human
uuuuucuuuuuuuuuuucuuuuu

SEQ ID NO: 1185758 - RNA, 26 nt, Human
uuuuuuuuuuucuuuuuuacaauagg

SEQ ID NO: 1185759 - RNA, 20 nt, Human
aaaacaaacaaacacgaaaa

SEQ ID NO: 1185760 - RNA, 24 nt, Human
aaaacaagacagaauucaaguacc

SEQ ID NO: 1185761 - RNA, 23 nt, Human
aaacaaaagggagggacaccugg

SEQ ID NO: 1185762 - RNA, 20 nt, Human
aaacaaacaaacacgaaaaa

SEQ ID NO: 1185763 - RNA, 22 nt, Human
aaacaaacacgaaaaaccuuug

SEQ ID NO: 1185764 - RNA, 24 nt, Human
aaagaaacaaaacaaacaaacacg

SEQ ID NO: 1185765 - RNA, 21 nt, Human
aaggacacaggccuccaaaac

SEQ ID NO: 1185766 - RNA, 22 nt, Human
aaggccccucugagcccgggcc

SEQ ID NO: 1185767 - RNA, 18 nt, Human
aaucacaaucguguacga

SEQ ID NO: 1185768 - RNA, 19 nt, Human
acaaugcggaaaacaagac

SEQ ID NO: 1185769 - RNA, 22 nt, Human
acaauggaagcgacugaucgga

SEQ ID NO: 1185770 - RNA, 23 nt, Human
acacacaugcacagacgcgcaca

SEQ ID NO: 1185771 - RNA, 27 nt, Human
acacacaugcacagacgcgcacacaca

SEQ ID NO: 1185772 - RNA, 21 nt, Human
acacacgcgugcacacauaca

SEQ ID NO: 1185773 - RNA, 33 nt, Human
acacgcacacacacacagacacgcgcacacggu

SEQ ID NO: 1185774 - RNA, 19 nt, Human
acagcagguccgcucagca

SEQ ID NO: 1185775 - RNA, 22 nt, Human
acagcagucaggcguccucugu

SEQ ID NO: 1185776 - RNA, 19 nt, Human
acccagcugccuccugggc

SEQ ID NO: 1185777 - RNA, 24 nt, Human
accugugcccaagacaggggagga

SEQ ID NO: 1185778 - RNA, 31 nt, Human
acgcacacacacacagacacgcgcacacgca

SEQ ID NO: 1185779 - RNA, 33 nt, Human
acgcgugcacacauacacagacacgcgugcagu

SEQ ID NO: 1185780 - RNA, 27 nt, Human
acgcgugcagagacacgcacgugcaca

SEQ ID NO: 1185781 - RNA, 30 nt, Human
acgugcacacacagacacgcacacacacag

SEQ ID NO: 1185782 - RNA, 19 nt, Human
agaacucggguggacagac

SEQ ID NO: 1185783 - RNA, 24 nt, Human
agacacgcgcacacgcacacucuc

SEQ ID NO: 1185784 - RNA, 19 nt, Human
agaggaaggcagggcagga

SEQ ID NO: 1185785 - RNA, 22 nt, Human
agaggaaggcagggcaggagag

SEQ ID NO: 1185786 - RNA, 22 nt, Human
agaugaaggaaacuccagaggg

SEQ ID NO: 1185787 - RNA, 21 nt, Human
agcaacagacauuucaagucu

SEQ ID NO: 1185788 - RNA, 21 nt, Human
agccacgcacguccacagaca

SEQ ID NO: 1185789 - RNA, 22 nt, Human
aggaaggcagggcaggagaggc

SEQ ID NO: 1185790 - RNA, 21 nt, Human
aggacaaccccggauucuaga

SEQ ID NO: 1185791 - RNA, 21 nt, Human
aggacacaggccuccaaaaca

SEQ ID NO: 1185792 - RNA, 18 nt, Human
aggcaguacacggcuggg

SEQ ID NO: 1185793 - RNA, 22 nt, Human
aggcaguacacggcuggguggg

SEQ ID NO: 1185794 - RNA, 23 nt, Human
aggccuccaaaacaaaagggagg

SEQ ID NO: 1185795 - RNA, 21 nt, Human
agggagggacaccuggguagg

SEQ ID NO: 1185796 - RNA, 24 nt, Human
agggggaccagcccucccucccua

SEQ ID NO: 1185797 - RNA, 21 nt, Human
agggucuggaugagucagggu

SEQ ID NO: 1185798 - RNA, 21 nt, Human
agguggccacaccagcacuuc

SEQ ID NO: 1185799 - RNA, 18 nt, Human
auaaaggugcagacaucu

SEQ ID NO: 1185800 - RNA, 22 nt, Human
aucuauagcucuugccuuccuu

SEQ ID NO: 1185801 - RNA, 23 nt, Human
caaaacaaacaaacacgaaaaac

SEQ ID NO: 1185802 - RNA, 24 nt, Human
caaacaaacacgaaaaaccuuugc

SEQ ID NO: 1185803 - RNA, 21 nt, Human
caaaguacaacaaccaaaucc

SEQ ID NO: 1185804 - RNA, 20 nt, Human
caagacagaauucaaguacc

SEQ ID NO: 1185805 - RNA, 21 nt, Human
caagacaggggaggaagaggc

SEQ ID NO: 1185806 - RNA, 20 nt, Human
cacaaugcggaaaacaagac

SEQ ID NO: 1185807 - RNA, 31 nt, Human
cacacacacgcgcacacagacgcacacacag

SEQ ID NO: 1185808 - RNA, 24 nt, Human
cacacacagacacgcacacacaca

SEQ ID NO: 1185809 - RNA, 28 nt, Human
cacacacagacgcacagacgugcacaca

SEQ ID NO: 1185810 - RNA, 30 nt, Human
cacacacgcgcacacagacgcacacacaca

SEQ ID NO: 1185811 - RNA, 31 nt, Human
cacacgcgugcacacauacacagacacgcgg

SEQ ID NO: 1185812 - RNA, 19 nt, Human
cacauacacagacacgcgu

SEQ ID NO: 1185813 - RNA, 29 nt, Human
cacauacacagacacgcgugcagagacac

SEQ ID NO: 1185814 - RNA, 21 nt, Human
caccagcacuucacacaggac

SEQ ID NO: 1185815 - RNA, 22 nt, Human
cacccacggagcuggcuggcug

SEQ ID NO: 1185816 - RNA, 24 nt, Human
cacgcacacacacacagacacgcg

SEQ ID NO: 1185817 - RNA, 30 nt, Human
cacgcacgugcacacagacgcgcgugcaca

SEQ ID NO: 1185818 - RNA, 22 nt, Human
cacucuggaaggccccucugag

SEQ ID NO: 1185819 - RNA, 23 nt, Human
cagacacaaugcggaaaacaaga

SEQ ID NO: 1185820 - RNA, 29 nt, Human
cagacacacgcgugcacacauacagugug

SEQ ID NO: 1185821 - RNA, 21 nt, Human
cagacacucccgacucacgcc

SEQ ID NO: 1185822 - RNA, 29 nt, Human
cagacgcacacacgcacagacacacacag

SEQ ID NO: 1185823 - RNA, 20 nt, Human
cagagaacucggguggacag

SEQ ID NO: 1185824 - RNA, 18 nt, Human
cagagagagcccuucugu

SEQ ID NO: 1185825 - RNA, 23 nt, Human
cagcccucccucccuaccuuccg

SEQ ID NO: 1185826 - RNA, 21 nt, Human
cagcggcucccucccuguccu

SEQ ID NO: 1185827 - RNA, 18 nt, Human
cagcugccuccugggccc

SEQ ID NO: 1185828 - RNA, 22 nt, Human
cagggagagcucagaacccauu

SEQ ID NO: 1185829 - RNA, 25 nt, Human
caggggaggaagaggcagagaaagg

SEQ ID NO: 1185830 - RNA, 27 nt, Human
cauacacagacacgcgugcagagacac

SEQ ID NO: 1185831 - RNA, 22 nt, Human
caugcaacccagcugccuccug

SEQ ID NO: 1185832 - RNA, 21 nt, Human
ccaaaacaaaagggagggaca

SEQ ID NO: 1185833 - RNA, 24 nt, Human
ccaaaacaaaagggagggacaaca

SEQ ID NO: 1185834 - RNA, 22 nt, Human
ccaaagaaacaaaacaaacaaa

SEQ ID NO: 1185835 - RNA, 23 nt, Human
ccaagacaggggaggaagaggca

SEQ ID NO: 1185836 - RNA, 24 nt, Human
ccaccugccaggcggcagcuccaa

SEQ ID NO: 1185837 - RNA, 19 nt, Human
ccagcccucccucccuacc

SEQ ID NO: 1185838 - RNA, 22 nt, Human
ccagcgggccccaugggggcuc

SEQ ID NO: 1185839 - RNA, 26 nt, Human
ccagcugccuccugggcccauccccu

SEQ ID NO: 1185840 - RNA, 19 nt, Human
ccaggcccccagggauggu

SEQ ID NO: 1185841 - RNA, 31 nt, Human
cccagccaggcgcggcccgccgggcucacag

SEQ ID NO: 1185842 - RNA, 21 nt, Human
cccagcugccuccugggccca

SEQ ID NO: 1185843 - RNA, 24 nt, Human
ccccugcuccaccccgcggcuucc

SEQ ID NO: 1185844 - RNA, 26 nt, Human
ccccuggacaaggacacaggccucca

SEQ ID NO: 1185845 - RNA, 19 nt, Human
cccgcagucaccaacgccg

SEQ ID NO: 1185846 - RNA, 23 nt, Human
cccgccccacgguacauucagga

SEQ ID NO: 1185847 - RNA, 21 nt, Human
cccggggcgcagggagagcuc

SEQ ID NO: 1185848 - RNA, 23 nt, Human
cccuggacaaggacacaggccuc

SEQ ID NO: 1185849 - RNA, 18 nt, Human
cccuuggggaagaggaag

SEQ ID NO: 1185850 - RNA, 22 nt, Human
ccgcccccgccccacgguacau

SEQ ID NO: 1185851 - RNA, 18 nt, Human
ccgcccggggcgcaggga

SEQ ID NO: 1185852 - RNA, 24 nt, Human
ccgggcucacaguaucugucacac

SEQ ID NO: 1185853 - RNA, 22 nt, Human
ccuaccugccccugcuccaccc

SEQ ID NO: 1185854 - RNA, 18 nt, Human
ccuccggucccuccugga

SEQ ID NO: 1185855 - RNA, 19 nt, Human
ccucugagcccgggccgcc

SEQ ID NO: 1185856 - RNA, 23 nt, Human
ccucugagcccgggccgccgccc

SEQ ID NO: 1185857 - RNA, 19 nt, Human
ccucugugcagccaccacc

SEQ ID NO: 1185858 - RNA, 20 nt, Human
ccucugugcagccaccaccu

SEQ ID NO: 1185859 - RNA, 21 nt, Human
ccugccccugcuccaccccgc

SEQ ID NO: 1185860 - RNA, 19 nt, Human
ccuggaggagaaaggaggc

SEQ ID NO: 1185861 - RNA, 18 nt, Human
ccugugcccaagacaggg

SEQ ID NO: 1185862 - RNA, 19 nt, Human
ccugugugcacaccggagg

SEQ ID NO: 1185863 - RNA, 20 nt, Human
cgcacacacacacagacacg

SEQ ID NO: 1185864 - RNA, 25 nt, Human
cgcacacacacgcgcacacagacgc

SEQ ID NO: 1185865 - RNA, 22 nt, Human
cgcacacagacgcacacacaca

SEQ ID NO: 1185866 - RNA, 28 nt, Human
cgcgcacacacagacgcacagacgugca

SEQ ID NO: 1185867 - RNA, 24 nt, Human
cggcuccuauguucuaggagcccc

SEQ ID NO: 1185868 - RNA, 23 nt, Human
cggcuuccucccaucuccgagga

SEQ ID NO: 1185869 - RNA, 19 nt, Human
cgugcacacagacgcgcgu

SEQ ID NO: 1185870 - RNA, 19 nt, Human
cuccaaccccaccugugcc

SEQ ID NO: 1185871 - RNA, 24 nt, Human
cuccuggcucuaaacacaaaugcc

SEQ ID NO: 1185872 - RNA, 22 nt, Human
cucuccaugcaacccagcugcc

SEQ ID NO: 1185873 - RNA, 20 nt, Human
cugccccugcuccaccccgc

SEQ ID NO: 1185874 - RNA, 18 nt, Human
cuggccaagggugggggg

SEQ ID NO: 1185875 - RNA, 19 nt, Human
cuggccacaccugggaagg

SEQ ID NO: 1185876 - RNA, 22 nt, Human
cugggugggguggggggacugg

SEQ ID NO: 1185877 - RNA, 23 nt, Human
gaaacaaaacaaacaaacacgaa

SEQ ID NO: 1185878 - RNA, 25 nt, Human
gaacaaaacagacggcgauuacaaa

SEQ ID NO: 1185879 - RNA, 19 nt, Human
gaagccgaguucuggaggg

SEQ ID NO: 1185880 - RNA, 22 nt, Human
gacaaaaguaugcagcagcaac

SEQ ID NO: 1185881 - RNA, 28 nt, Human
gacacgcacacacacacagacacgcgca

SEQ ID NO: 1185882 - RNA, 28 nt, Human
gacgcacacacacagacgcacacacgca

SEQ ID NO: 1185883 - RNA, 28 nt, Human
gacgugcacacacagacacgcacacaca

SEQ ID NO: 1185884 - RNA, 18 nt, Human
gacucacgcccaccgugg

SEQ ID NO: 1185885 - RNA, 20 nt, Human
gagguugggggaguggggug

SEQ ID NO: 1185886 - RNA, 22 nt, Human
gaugaaggaaacuccagaggga

SEQ ID NO: 1185887 - RNA, 20 nt, Human
gauucugcaugauuuuccuu

SEQ ID NO: 1185888 - RNA, 23 nt, Human
gcacacacacagacgcacacacg

SEQ ID NO: 1185889 - RNA, 29 nt, Human
gcacacacgcacagacacacacaugcaca

SEQ ID NO: 1185890 - RNA, 28 nt, Human
gcacacacgcacagacacacacaugcag

SEQ ID NO: 1185891 - RNA, 21 nt, Human
gcacccccaggcggguccugc

SEQ ID NO: 1185892 - RNA, 28 nt, Human
gcacuagagcccccucagagggggacca

SEQ ID NO: 1185893 - RNA, 19 nt, Human
gcacuuguuuugcaaguga

SEQ ID NO: 1185894 - RNA, 21 nt, Human
gcagagagagcccuucuguca

SEQ ID NO: 1185895 - RNA, 21 nt, Human
gcagaggcagacagaggguuc

SEQ ID NO: 1185896 - RNA, 20 nt, Human
gcagggcugcacuuguuuug

SEQ ID NO: 1185897 - RNA, 22 nt, Human
gccaagauguuuccauaaaaau

SEQ ID NO: 1185898 - RNA, 20 nt, Human
gccaccgcucacuggccugu

SEQ ID NO: 1185899 - RNA, 24 nt, Human
gccacgcacguccacagacacucc

SEQ ID NO: 1185900 - RNA, 21 nt, Human
gcccauccccuuggggaagag

SEQ ID NO: 1185901 - RNA, 20 nt, Human
gccuccaaaacaaaagggag

SEQ ID NO: 1185902 - RNA, 21 nt, Human
gccugugugcacaccggaggg

SEQ ID NO: 1185903 - RNA, 25 nt, Human
gcgcacacacacgcgcacacagacg

SEQ ID NO: 1185904 - RNA, 31 nt, Human
gcgcgugcacacacacagacacacgcgugca

SEQ ID NO: 1185905 - RNA, 31 nt, Human
gcgcgugcacacauacacacagacgcgcaca

SEQ ID NO: 1185906 - RNA, 27 nt, Human
gcgugcacacacacagacacacgcggg

SEQ ID NO: 1185907 - RNA, 31 nt, Human
gcgugcacacacacagacacacgcgugcaca

SEQ ID NO: 1185908 - RNA, 18 nt, Human
gcugaugggcgcagggcu

SEQ ID NO: 1185909 - RNA, 25 nt, Human
ggaaaacaagacagaauucaaguac

SEQ ID NO: 1185910 - RNA, 18 nt, Human
ggagguugggggaguggg

SEQ ID NO: 1185911 - RNA, 26 nt, Human
ggcugggugggguggggggacugggc

SEQ ID NO: 1185912 - RNA, 20 nt, Human
gggaacucaagugcagcuca

SEQ ID NO: 1185913 - RNA, 21 nt, Human
gggaagaggaaggcagggcag

SEQ ID NO: 1185914 - RNA, 23 nt, Human
gggaccagcccucccucccuacc

SEQ ID NO: 1185915 - RNA, 20 nt, Human
gggccccaugggggcuccaa

SEQ ID NO: 1185916 - RNA, 23 nt, Human
ggggaguggggugcgcuggucgg

SEQ ID NO: 1185917 - RNA, 24 nt, Human
gucaggcacuagagcccccucaga

SEQ ID NO: 1185918 - RNA, 18 nt, Human
gucagggucacacucaca

SEQ ID NO: 1185919 - RNA, 29 nt, Human
gugcacacacacagacacacgcgugcaca

SEQ ID NO: 1185920 - RNA, 23 nt, Human
gugcacacauacacagacacgcg

SEQ ID NO: 1185921 - RNA, 19 nt, Human
uacacggcuggguggggug

SEQ ID NO: 1185922 - RNA, 19 nt, Human
uaccaaacccuaaaugcuc

SEQ ID NO: 1185923 - RNA, 20 nt, Human
uaccaaacccuaaaugcucc

SEQ ID NO: 1185924 - RNA, 19 nt, Human
uacgagccggucguccagu

SEQ ID NO: 1185925 - RNA, 21 nt, Human
uacgaugcuaacaauggaagc

SEQ ID NO: 1185926 - RNA, 21 nt, Human
uagaucccaggcccaccaccu

SEQ ID NO: 1185927 - RNA, 22 nt, Human
ucaggacguggagggagcacaa

SEQ ID NO: 1185928 - RNA, 18 nt, Human
ucccagcgggccccaugg

SEQ ID NO: 1185929 - RNA, 18 nt, Human
ucccaggcccaccaccug

SEQ ID NO: 1185930 - RNA, 23 nt, Human
uccccuagcggaggcggccuccg

SEQ ID NO: 1185931 - RNA, 21 nt, Human
uccgccuuccuccuggcucua

SEQ ID NO: 1185932 - RNA, 18 nt, Human
uccuggaccucuccaugc

SEQ ID NO: 1185933 - RNA, 22 nt, Human
uccuggccaagggugggggggc

SEQ ID NO: 1185934 - RNA, 24 nt, Human
ucggccaccgcucacuggccugug

SEQ ID NO: 1185935 - RNA, 21 nt, Human
ucuaaacacaaaugccaaaga

SEQ ID NO: 1185936 - RNA, 19 nt, Human
ucuaggagccccgacccgc

SEQ ID NO: 1185937 - RNA, 22 nt, Human
ucuccaugcaacccagcugccu

SEQ ID NO: 1185938 - RNA, 21 nt, Human
ucuccgaggaaggcuuggucc

SEQ ID NO: 1185939 - RNA, 22 nt, Human
ucuggaaggccccucugagccc

SEQ ID NO: 1185940 - RNA, 19 nt, Human
ucuggccacaccugggaag

SEQ ID NO: 1185941 - RNA, 22 nt, Human
ucugugagcccuaccacuuaaa

SEQ ID NO: 1185942 - RNA, 26 nt, Human
ucuuguaccaaacccuaaaugcuccc

SEQ ID NO: 1185943 - RNA, 26 nt, Human
ugaaacaguaguuacagcugaggaca

SEQ ID NO: 1185944 - RNA, 20 nt, Human
ugacaugacaaaaguaugca

SEQ ID NO: 1185945 - RNA, 25 nt, Human
ugacgugcacgcgcgugcacacaca

SEQ ID NO: 1185946 - RNA, 18 nt, Human
ugaggaaggggcacggga

SEQ ID NO: 1185947 - RNA, 19 nt, Human
ugauggguuguggagguug

SEQ ID NO: 1185948 - RNA, 19 nt, Human
ugcacacacagacacgcac

SEQ ID NO: 1185949 - RNA, 24 nt, Human
ugcacacauacacacagacgcgca

SEQ ID NO: 1185950 - RNA, 26 nt, Human
ugcacacauacacacagacgcgcaca

SEQ ID NO: 1185951 - RNA, 18 nt, Human
ugcagcucaaccucaccu

SEQ ID NO: 1185952 - RNA, 21 nt, Human
ugccuccugggcccauccccu

SEQ ID NO: 1185953 - RNA, 19 nt, Human
ugccuuccuuacccagaac

SEQ ID NO: 1185954 - RNA, 20 nt, Human
uggcagaggcagacagaggg

SEQ ID NO: 1185955 - RNA, 22 nt, Human
uggcagaggcagacagaggguu

SEQ ID NO: 1185956 - RNA, 23 nt, Human
uggcagaggcagacagaggguuc

SEQ ID NO: 1185957 - RNA, 20 nt, Human
ugggacacauuagugcaaaa

SEQ ID NO: 1185958 - RNA, 20 nt, Human
ugggaugggggguucuucug

SEQ ID NO: 1185959 - RNA, 22 nt, Human
uggggaagccgaguucuggagg

SEQ ID NO: 1185960 - RNA, 20 nt, Human
ugggggaguggggugcgcug

SEQ ID NO: 1185961 - RNA, 18 nt, Human
ugggguggggggacuggg

SEQ ID NO: 1185962 - RNA, 19 nt, Human
ugggguggggggacugggc

SEQ ID NO: 1185963 - RNA, 24 nt, Human
uggugacgugcacgcgcgugcaca

SEQ ID NO: 1185964 - RNA, 19 nt, Human
uguccuggccaaggguggg

SEQ ID NO: 1185965 - RNA, 24 nt, Human
ugugcacaccggagggggugcuga

SEQ ID NO: 1185966 - RNA, 21 nt, Human
uuaaagugcaaauuugggugu

SEQ ID NO: 1185967 - RNA, 26 nt, Human
uuacccagaacaaaacagacggcgag

SEQ ID NO: 1185968 - RNA, 23 nt, Human
uuccaaagaaacaaaacaaacaa

SEQ ID NO: 1185969 - RNA, 25 nt, Human
uuccaaagaaacaaaacaaacaaac

SEQ ID NO: 1185970 - RNA, 23 nt, Human
uucuucuggccacaccugggaag

SEQ ID NO: 1185971 - RNA, 20 nt, Human
uuggguguggggcagaugaa

SEQ ID NO: 1185972 - RNA, 22 nt, Human
uuguggagguugggggaguggg

SEQ ID NO: 1185973 - RNA, 21 nt, Human
uuuaucuauagcucuugccuu

SEQ ID NO: 1185974 - RNA, 20 nt, Human
aaaaaaagacaaaaaaaaaa

SEQ ID NO: 1185975 - RNA, 24 nt, Human
aaaaagacaaaaaaaaaaagcuag

SEQ ID NO: 1185976 - RNA, 24 nt, Human
aaaacaagacagaauucaaguacc

SEQ ID NO: 1185977 - RNA, 23 nt, Human
aaacaaaacaaaggcuuccuccu

SEQ ID NO: 1185978 - RNA, 25 nt, Human
aaagacaaaaaaaaaaagcuaagca

SEQ ID NO: 1185979 - RNA, 20 nt, Human
aaaguacaacaaccaaaucc

SEQ ID NO: 1185980 - RNA, 33 nt, Human; identical to SEQ ID NO: 1185773

SEQ ID NO: 1185981 - RNA, 22 nt, Human
acagagaacucggguggacaga

SEQ ID NO: 1185982 - RNA, 19 nt, Human
acccagcugccuccugggc

SEQ ID NO: 1185983 - RNA, 23 nt, Human
accuccggucccuccuggaccuu

SEQ ID NO: 1185984 - RNA, 31 nt, Human; identical to SEQ ID NO: 1185778

SEQ ID NO: 1185985 - RNA, 30 nt, Human; identical to SEQ ID NO: 1185781

SEQ ID NO: 1185986 - RNA, 19 nt, Human
agaacucggguggacagac

SEQ ID NO: 1185987 - RNA, 24 nt, Human
agacacgcgcacacgcacacucuc

SEQ ID NO: 1185988 - RNA, 19 nt, Human
agaggaaggcagggcagga

SEQ ID NO: 1185989 - RNA, 22 nt, Human
agaggaaggcagggcaggagag

SEQ ID NO: 1185990 - RNA, 28 nt, Human
agccaggcgcggcccgccgggcucacag

SEQ ID NO: 1185991 - RNA, 22 nt, Human
aggaaggcagggcaggagaggc

SEQ ID NO: 1185992 - RNA, 24 nt, Human
aggagaggcggcuagaucccaggc

SEQ ID NO: 1185993 - RNA, 18 nt, Human
aggcaguacacggcuggg

SEQ ID NO: 1185994 - RNA, 22 nt, Human
aggcaguacacggcuggguggg

SEQ ID NO: 1185995 - RNA, 24 nt, Human
agggggaccagcccucccucccua

SEQ ID NO: 1185996 - RNA, 23 nt, Human
agugagggcucaggaaaacaaaa

SEQ ID NO: 1185997 - RNA, 18 nt, Human
caaaaaaaaaaagcuaag

SEQ ID NO: 1185998 - RNA, 19 nt, Human
caaaacaaaggcuuccucc

SEQ ID NO: 1185999 - RNA, 24 nt, Human
caacaaccaaauccaaugcaaagu

SEQ ID NO: 1186000 - RNA, 20 nt, Human
caagacagaauucaaguacc

SEQ ID NO: 1186001 - RNA, 20 nt, Human
cacaaugcggaaaacaagac

SEQ ID NO: 1186002 - RNA, 24 nt, Human
cacacacagacacgcacacacaca

SEQ ID NO: 1186003 - RNA, 28 nt, Human
cacacacagacgcacagacgugcacaca

SEQ ID NO: 1186004 - RNA, 29 nt, Human
cacagacacgcacacacacacagacacgg

SEQ ID NO: 1186005 - RNA, 22 nt, Human
cacccacggagcuggcuggcug

SEQ ID NO: 1186006 - RNA, 22 nt, Human
caccugccaggcggcagcucca

SEQ ID NO: 1186007 - RNA, 23 nt, Human
cagacacaaugcggaaaacaaga

SEQ ID NO: 1186008 - RNA, 23 nt, Human
cagacucuuuaaaacaaccgucu

SEQ ID NO: 1186009 - RNA, 20 nt, Human
cagcacaggaaaauuuauuu

SEQ ID NO: 1186010 - RNA, 23 nt, Human
cagcccucccucccuaccuuccg

SEQ ID NO: 1186011 - RNA, 18 nt, Human
cagcugccuccugggccc

SEQ ID NO: 1186012 - RNA, 22 nt, Human
caugcaacccagcugccuccug

SEQ ID NO: 1186013 - RNA, 24 nt, Human
ccaccugccaggcggcagcuccaa

SEQ ID NO: 1186014 - RNA, 19 nt, Human
ccagcccucccucccuacc

SEQ ID NO: 1186015 - RNA, 26 nt, Human
ccagcugccuccugggcccauccccu

SEQ ID NO: 1186016 - RNA, 21 nt, Human
cccagcugccuccugggccca

SEQ ID NO: 1186017 - RNA, 19 nt, Human
cccgcagucaccaacgccg

SEQ ID NO: 1186018 - RNA, 18 nt, Human
cccuuggggaagaggaag

SEQ ID NO: 1186019 - RNA, 24 nt, Human
ccgggcucacaguaucugucacac

SEQ ID NO: 1186020 - RNA, 18 nt, Human
ccuccggucccuccugga

SEQ ID NO: 1186021 - RNA, 22 nt, Human
ccuccucaaaagguguggagau

SEQ ID NO: 1186022 - RNA, 19 nt, Human
ccuuaaaaaaaagacaaaa

SEQ ID NO: 1186023 - RNA, 20 nt, Human
cgcgcacacacagacgcaca

SEQ ID NO: 1186024 - RNA, 28 nt, Human
cgcgcacacacagacgcacagacgugca

SEQ ID NO: 1186025 - RNA, 24 nt, Human
cggcuccuauguucuaggagcccc

SEQ ID NO: 1186026 - RNA, 19 nt, Human
cucaggaaaacaaaacaaa

SEQ ID NO: 1186027 - RNA, 24 nt, Human
cuccuggcucuaaacacaaaugcc

SEQ ID NO: 1186028 - RNA, 22 nt, Human
cucuccaugcaacccagcugcc

SEQ ID NO: 1186029 - RNA, 22 nt, Human
cugggugggguggggggacugg

SEQ ID NO: 1186030 - RNA, 23 nt, Human
gaacugacuuuauuauuuuguaa

SEQ ID NO: 1186031 - RNA, 22 nt, Human
gacaaaaguaugcagcagcaac

SEQ ID NO: 1186032 - RNA, 21 nt, Human
gacacaaugcggaaaacaaga

SEQ ID NO: 1186033 - RNA, 28 nt, Human
gacacgcacacacacacagacacgcgca

SEQ ID NO: 1186034 - RNA, 21 nt, Human
gcacacacacacagacacgcg

SEQ ID NO: 1186035 - RNA, 21 nt, Human
gcacccccaggcggguccugc

SEQ ID NO: 1186036 - RNA, 28 nt, Human
gcacuagagcccccucagagggggacca

SEQ ID NO: 1186037 - RNA, 21 nt, Human
gcagaggcagacagaggguuc

SEQ ID NO: 1186038 - RNA, 20 nt, Human
gcaguacacggcuggguggg

SEQ ID NO: 1186039 - RNA, 22 nt, Human
gccaagauguuuccauaaaaau

SEQ ID NO: 1186040 - RNA, 21 nt, Human
gcccauccccuuggggaagag

SEQ ID NO: 1186041 - RNA, 18 nt, Human
gcuaagcaucuguggcug

SEQ ID NO: 1186042 - RNA, 27 nt, Human
ggaaaacaaaacaaaggcuuccucccu

SEQ ID NO: 1186043 - RNA, 25 nt, Human
ggaaaacaagacagaauucaaguac

SEQ ID NO: 1186044 - RNA, 26 nt, Human
ggcugggugggguggggggacugggc

SEQ ID NO: 1186045 - RNA, 21 nt, Human
gggaagaggaaggcagggcag

SEQ ID NO: 1186046 - RNA, 23 nt, Human
gggaccagcccucccucccuacc

SEQ ID NO: 1186047 - RNA, 20 nt, Human
gguacugugaaaccuuccuu

SEQ ID NO: 1186048 - RNA, 24 nt, Human
gugcacacacagacacgcacacac

SEQ ID NO: 1186049 - RNA, 24 nt, Human
guucgcuuuugaauguuucaguuu

SEQ ID NO: 1186050 - RNA, 22 nt, Human
uaacagcacaaaaacagaguga

SEQ ID NO: 1186051 - RNA, 27 nt, Human
uaaccccuaaacagacucuuuaaaaca

SEQ ID NO: 1186052 - RNA, 18 nt, Human
uacaaagcgcuuuacaau

SEQ ID NO: 1186053 - RNA, 21 nt, Human
uacaaagcgcuuuacaauuaa

SEQ ID NO: 1186054 - RNA, 19 nt, Human
uacacggcuggguggggug

SEQ ID NO: 1186055 - RNA, 23 nt, Human
uaccgaguaacagcacaaaaaca

SEQ ID NO: 1186056 - RNA, 21 nt, Human
uagaucccaggcccaccaccu

SEQ ID NO: 1186057 - RNA, 23 nt, Human
ucaggcacuagagcccccucaga

SEQ ID NO: 1186058 - RNA, 24 nt, Human
ucagugguacugugaaaccuuccu

SEQ ID NO: 1186059 - RNA, 18 nt, Human
ucccaggcccaccaccug

SEQ ID NO: 1186060 - RNA, 21 nt, Human
uccgccuuccuccuggcucua

SEQ ID NO: 1186061 - RNA, 24 nt, Human
uccuccuuaaaaaaaagacaaaaa

SEQ ID NO: 1186062 - RNA, 18 nt, Human
uccuggaccucuccaugc

SEQ ID NO: 1186063 - RNA, 21 nt, Human
ucuaaacacaaaugccaaaga

SEQ ID NO: 1186064 - RNA, 19 nt, Human
ucuaggagccccgacccgc

SEQ ID NO: 1186065 - RNA, 22 nt, Human
ucuccaugcaacccagcugccu

SEQ ID NO: 1186066 - RNA, 26 nt, Human
ugaaacaguaguuacagcugaggaca

SEQ ID NO: 1186067 - RNA, 23 nt, Human
ugaaaucuaacucagugguacug

SEQ ID NO: 1186068 - RNA, 20 nt, Human
ugacaugacaaaaguaugca

SEQ ID NO: 1186069 - RNA, 19 nt, Human
ugcacacacagacacgcac

SEQ ID NO: 1186070 - RNA, 21 nt, Human
ugccuccugggcccauccccu

SEQ ID NO: 1186071 - RNA, 20 nt, Human
uggcagaggcagacagaggg

SEQ ID NO: 1186072 - RNA, 22 nt, Human
uggcagaggcagacagaggguu

SEQ ID NO: 1186073 - RNA, 18 nt, Human
ugggguggggggacuggg

SEQ ID NO: 1186074 - RNA, 19 nt, Human
ugggguggggggacugggc

SEQ ID NO: 1186075 - RNA, 25 nt, Human
ugucauggauuuccacugucugaaa

SEQ ID NO: 1186076 - RNA, 20 nt, Human
uuacagcugaggacagcuac

SEQ ID NO: 1186077 - RNA, 21 nt, Human
uuccuggaggagaaaggaggc

SEQ ID NO: 1186078 - RNA, 22 nt, Human
uuuaguuauugauacaauguca

SEQ ID NO: 1186079 - RNA, 25 nt, Human
aaacaauaaauaaggaccccguggc

SEQ ID NO: 1186080 - RNA, 22 nt, Human
aaauaacugcaaauaaccacuu

SEQ ID NO: 1186081 - RNA, 22 nt, Human
aacaaaacaaaaguauccaucu

SEQ ID NO: 1186082 - RNA, 21 nt, Human
aagaaagcaaaguggaucacg

SEQ ID NO: 1186083 - RNA, 22 nt, Human
aagggccagaggcccaccacag

SEQ ID NO: 1186084 - RNA, 24 nt, Human
aaggggaauaagaccuauaauucc

SEQ ID NO: 1186085 - RNA, 19 nt, Human
acccaaagccauccacuua

SEQ ID NO: 1186086 - RNA, 23 nt, Human
accuucccucggugucuucaucg

SEQ ID NO: 1186087 - RNA, 18 nt, Human
acucccccauccucaccc

SEQ ID NO: 1186088 - RNA, 21 nt, Human
acucccccauccucacccugc

SEQ ID NO: 1186089 - RNA, 19 nt, Human
acugucagcuuaagugcau

SEQ ID NO: 1186090 - RNA, 19 nt, Human
agaaaccucuuugcaaaag

SEQ ID NO: 1186091 - RNA, 18 nt, Human
agacaggacaagccguga

SEQ ID NO: 1186092 - RNA, 23 nt, Human
agacaggacaagccgugaccuaa

SEQ ID NO: 1186093 - RNA, 24 nt, Human
agacguuguucuagcggaagacag

SEQ ID NO: 1186094 - RNA, 21 nt, Human
agagagcggcugugucgaaca

SEQ ID NO: 1186095 - RNA, 19 nt, Human
agagcacuacccaaaacuu

SEQ ID NO: 1186096 - RNA, 20 nt, Human
agcagcaagggauaagaauu

SEQ ID NO: 1186097 - RNA, 19 nt, Human
aggcagaaagaacccaaag

SEQ ID NO: 1186098 - RNA, 25 nt, Human
aguauccaucuacaggggaaacggc

SEQ ID NO: 1186099 - RNA, 20 nt, Human
auuagagcacuacccaaaag

SEQ ID NO: 1186100 - RNA, 26 nt, Human
caaaacaaaaguauccaucuacaggg

SEQ ID NO: 1186101 - RNA, 30 nt, Human
caaccaauaaauaucauacaauuucucaaa

SEQ ID NO: 1186102 - RNA, 23 nt, Human
caagauugagccucagucccaua

SEQ ID NO: 1186103 - RNA, 19 nt, Human
caagccaagauugagccuc

SEQ ID NO: 1186104 - RNA, 24 nt, Human
caaggcagaaagaacccaaagcca

SEQ ID NO: 1186105 - RNA, 25 nt, Human
caaguaacacucccaagaaaauaug

SEQ ID NO: 1186106 - RNA, 26 nt, Human
caauaaauaucauacaauuucucaaa

SEQ ID NO: 1186107 - RNA, 19 nt, Human
cacagcagugcgagccacu

SEQ ID NO: 1186108 - RNA, 19 nt, Human
cacugaagggacugucagc

SEQ ID NO: 1186109 - RNA, 23 nt, Human
cagaaagaacccaaagccaucca

SEQ ID NO: 1186110 - RNA, 25 nt, Human
cagaaagaacccaaagccauccacu

SEQ ID NO: 1186111 - RNA, 22 nt, Human
cagaagcaucaacaccauuggg

SEQ ID NO: 1186112 - RNA, 23 nt, Human
cagagagcggcugugucgaacac

SEQ ID NO: 1186113 - RNA, 20 nt, Human
cagcuccuagugccauuccc

SEQ ID NO: 1186114 - RNA, 19 nt, Human
caguggccacagcagugcg

SEQ ID NO: 1186115 - RNA, 20 nt, Human
ccaaggcagaaagaacccaa

SEQ ID NO: 1186116 - RNA, 25 nt, Human
ccaaggcagaaagaacccaaagcca

SEQ ID NO: 1186117 - RNA, 22 nt, Human
ccacagaccucuccugcgguuu

SEQ ID NO: 1186118 - RNA, 20 nt, Human
cccaccacagaccucuccug

SEQ ID NO: 1186119 - RNA, 20 nt, Human
cccacgugugaaaguauggu

SEQ ID NO: 1186120 - RNA, 22 nt, Human
ccccaagccaagauugagccuc

SEQ ID NO: 1186121 - RNA, 19 nt, Human
ccguggauggucccugggg

SEQ ID NO: 1186122 - RNA, 23 nt, Human
cgcuccacagaagcaucaacacc

SEQ ID NO: 1186123 - RNA, 24 nt, Human
cuccacagaagcaucaacaccauu

SEQ ID NO: 1186124 - RNA, 18 nt, Human
cuggcagccauggcuggc

SEQ ID NO: 1186125 - RNA, 22 nt, Human
gaaaaagauuucccauuaugaa

SEQ ID NO: 1186126 - RNA, 21 nt, Human
gaaaacaauaaauaaggaccg

SEQ ID NO: 1186127 - RNA, 22 nt, Human
gaaacggcacgcuccucugaga

SEQ ID NO: 1186128 - RNA, 18 nt, Human
gaagaagccauccgugga

SEQ ID NO: 1186129 - RNA, 24 nt, Human
gacaagccgugaccuaacaaaacc

SEQ ID NO: 1186130 - RNA, 23 nt, Human
gaccuauaauuccuucuagccuu

SEQ ID NO: 1186131 - RNA, 20 nt, Human
gagauuacagcuggccaaua

SEQ ID NO: 1186132 - RNA, 22 nt, Human
gcaaacaucagcuccuagugcc

SEQ ID NO: 1186133 - RNA, 21 nt, Human
gccaagauugagccucagucc

SEQ ID NO: 1186134 - RNA, 19 nt, Human
gccaagggccagaggccca

SEQ ID NO: 1186135 - RNA, 18 nt, Human
gcggaagacaggcuuugc

SEQ ID NO: 1186136 - RNA, 20 nt, Human
gcugcaguuggcucggcuug

SEQ ID NO: 1186137 - RNA, 20 nt, Human
ggaagaagccauccguggau

SEQ ID NO: 1186138 - RNA, 18 nt, Human
ggaagacaggcuuugcag

SEQ ID NO: 1186139 - RNA, 26 nt, Human
ggauggucccugggggaacggaucga

SEQ ID NO: 1186140 - RNA, 21 nt, Human
ggcagaaagaacccaaagcca

SEQ ID NO: 1186141 - RNA, 19 nt, Human
ggcaucauuuacgagucug

SEQ ID NO: 1186142 - RNA, 23 nt, Human
ggccacagcagugcgagccacug

SEQ ID NO: 1186143 - RNA, 18 nt, Human
ggcucggcuugccuacuu

SEQ ID NO: 1186144 - RNA, 21 nt, Human
gugagaagcaagaaagcaaag

SEQ ID NO: 1186145 - RNA, 20 nt, Human
uaacaaaaccacugaaggga

SEQ ID NO: 1186146 - RNA, 23 nt, Human
uaacagaaagcucacucaggacu

SEQ ID NO: 1186147 - RNA, 21 nt, Human
uaacaguuaaauuugucucuu

SEQ ID NO: 1186148 - RNA, 19 nt, Human
uaaggaccccguggcaccc

SEQ ID NO: 1186149 - RNA, 24 nt, Human
uaagggagcuccguggcccgggac

SEQ ID NO: 1186150 - RNA, 24 nt, Human
uaagugcaucaccuuuugggacaa

SEQ ID NO: 1186151 - RNA, 22 nt, Human
uacagugagaaauaaagcccac

SEQ ID NO: 1186152 - RNA, 22 nt, Human
uacaugaaggaagaagccaucc

SEQ ID NO: 1186153 - RNA, 19 nt, Human
uacuuggaguucugaaaua

SEQ ID NO: 1186154 - RNA, 20 nt, Human
ucaaaggacugaggaaaggg

SEQ ID NO: 1186155 - RNA, 25 nt, Human
ucaacaccauugggaccaaggcaga

SEQ ID NO: 1186156 - RNA, 22 nt, Human
uccacagaagcaucaacaccau

SEQ ID NO: 1186157 - RNA, 23 nt, Human
uccaucuacaggggaaacggcac

SEQ ID NO: 1186158 - RNA, 20 nt, Human
ucccuccuuauguacacgac

SEQ ID NO: 1186159 - RNA, 20 nt, Human
uccguaaacuuuuucugagc

SEQ ID NO: 1186160 - RNA, 21 nt, Human
ucuuuugauuuuuucugcagu

SEQ ID NO: 1186161 - RNA, 22 nt, Human
ugaacaacuaacauauaaccuu

SEQ ID NO: 1186162 - RNA, 25 nt, Human
ugaacaacuaacauauaaccuuccc

SEQ ID NO: 1186163 - RNA, 18 nt, Human
ugagaagcaagaaagcaa

SEQ ID NO: 1186164 - RNA, 19 nt, Human
ugagagagggguuuucuuc

SEQ ID NO: 1186165 - RNA, 19 nt, Human
ugcgagccacugcaaaagc

SEQ ID NO: 1186166 - RNA, 22 nt, Human
ugcucggcuuccucuaugucca

SEQ ID NO: 1186167 - RNA, 22 nt, Human
uggcugugaacacccuccgcug

SEQ ID NO: 1186168 - RNA, 19 nt, Human
uuacuuggaguucugaaau

SEQ ID NO: 1186169 - RNA, 21 nt, Human
uuaguggcuccagaaucuucc

SEQ ID NO: 1186170 - RNA, 22 nt, Human
uucacauuuguagacguuguuc

SEQ ID NO: 1186171 - RNA, 20 nt, Human
uucuguaccauguucccucc

SEQ ID NO: 1186172 - RNA, 19 nt, Human
uuucagaaaucuuagaauu

SEQ ID NO: 1186173 - RNA, 23 nt, Human
uuugaacaacuaacauauaaccu

SEQ ID NO: 1186174 - RNA, 23 nt, Human
aagaggccaacggagaugaugag

SEQ ID NO: 1186175 - RNA, 21 nt, Human
acgacaucaucgaccuggaac

SEQ ID NO: 1186176 - RNA, 24 nt, Human
agccacgcaccuccagcuggccuu

SEQ ID NO: 1186177 - RNA, 22 nt, Human
agccagggugggccugagggcc

SEQ ID NO: 1186178 - RNA, 23 nt, Human
caagagcccccagaagaggccaa

SEQ ID NO: 1186179 - RNA, 25 nt, Human
cacccuggagaugaaccccaagagc

SEQ ID NO: 1186180 - RNA, 24 nt, Human
cagaagaggccaacggagaugaug

SEQ ID NO: 1186181 - RNA, 21 nt, Human
cagccacgcaccuccagcugg

SEQ ID NO: 1186182 - RNA, 27 nt, Human
cagccacgcaccuccagcuggccuugg

SEQ ID NO: 1186183 - RNA, 21 nt, Human
cauccuugacucugccaggag

SEQ ID NO: 1186184 - RNA, 19 nt, Human
ccaggaguggggagagggg

SEQ ID NO: 1186185 - RNA, 21 nt, Human
ccauuagagguggccuucucu

SEQ ID NO: 1186186 - RNA, 19 nt, Human
ccccccggcccuuuccucc

SEQ ID NO: 1186187 - RNA, 22 nt, Human
ccuccaaguuuuccacccugga

SEQ ID NO: 1186188 - RNA, 29 nt, Human
ccuccaaguuuuccacccuggagaugaag

SEQ ID NO: 1186189 - RNA, 18 nt, Human
ccugaggcuggggaaggg

SEQ ID NO: 1186190 - RNA, 21 nt, Human
cggagaugaugagagugccug

SEQ ID NO: 1186191 - RNA, 20 nt, Human
cggcaguucucguacucagc

SEQ ID NO: 1186192 - RNA, 20 nt, Human
cggggaguggaaagagccag

SEQ ID NO: 1186193 - RNA, 20 nt, Human
cuugacucugccaggagggg

SEQ ID NO: 1186194 - RNA, 23 nt, Human
gaacagacagccacgcaccucca

SEQ ID NO: 1186195 - RNA, 20 nt, Human
gagaggggccccccggcccu

SEQ ID NO: 1186196 - RNA, 19 nt, Human
ggaaagagccagcucccag

SEQ ID NO: 1186197 - RNA, 18 nt, Human
ggacagccagggugggcc

SEQ ID NO: 1186198 - RNA, 18 nt, Human
ucagaggggcucugggug

SEQ ID NO: 1186199 - RNA, 21 nt, Human
uccacccuggagaugaacccc

SEQ ID NO: 1186200 - RNA, 23 nt, Human
uccagcuggccuugaacuucacc

SEQ ID NO: 1186201 - RNA, 22 nt, Human
ucucgcugaccccauccuugac

SEQ ID NO: 1186202 - RNA, 21 nt, Human
ucugccaggaggggcccucca

SEQ ID NO: 1186203 - RNA, 20 nt, Human
ugaaacaaagguugagggcu

SEQ ID NO: 1186204 - RNA, 25 nt, Human
ugaaacaaagguugagggcugaggg

SEQ ID NO: 1186205 - RNA, 20 nt, Human
ugaaccccaagagcccccag

SEQ ID NO: 1186206 - RNA, 23 nt, Human
ugaaccccaagagcccccagaag

SEQ ID NO: 1186207 - RNA, 19 nt, Human
ugagggcugaggggauggg

SEQ ID NO: 1186208 - RNA, 24 nt, Human
ugaugagagugccugaggcugggg

SEQ ID NO: 1186209 - RNA, 21 nt, Human
ugccugaggcuggggaagggc

SEQ ID NO: 1186210 - RNA, 24 nt, Human
ugccugaggcuggggaagggcaac

SEQ ID NO: 1186211 - RNA, 19 nt, Human
uggaaagagccagcuccca

SEQ ID NO: 1186212 - RNA, 24 nt, Human
uggagaugaaccccaagagccccc

SEQ ID NO: 1186213 - RNA, 23 nt, Human
uggggagaggggccccccggccc

SEQ ID NO: 1186214 - RNA, 19 nt, Human
uguggcaaggcugugccug

SEQ ID NO: 1186215 - RNA, 23 nt, Human
uguggccacaaugccugcaggcc

SEQ ID NO: 1186216 - RNA, 18 nt, Human
uucaccgcccacauggcc

SEQ ID NO: 1186217 - RNA, 27 nt, Human
uuuuccacccuggagaugaaccccaag

SEQ ID NO: 1186218 - RNA, 23 nt, Human
acaauagccucucuguguggccc

SEQ ID NO: 1186219 - RNA, 24 nt, Human
agccacaagccugacucugagccc

SEQ ID NO: 1186220 - RNA, 18 nt, Human
aggcgaagccacaagccu

SEQ ID NO: 1186221 - RNA, 22 nt, Human
cacacaauagccucucugugug

SEQ ID NO: 1186222 - RNA, 19 nt, Human
cacacugccacucagcccu

SEQ ID NO: 1186223 - RNA, 19 nt, Human
cacuggaucccagggucuc

SEQ ID NO: 1186224 - RNA, 18 nt, Human
cagcaagugacacacaau

SEQ ID NO: 1186225 - RNA, 19 nt, Human
ccuaacccagcaagugaca

SEQ ID NO: 1186226 - RNA, 25 nt, Human
cucucuguguggcccugcaucaucc

SEQ ID NO: 1186227 - RNA, 21 nt, Human
ggaaucccccaucccacaggg

SEQ ID NO: 1186228 - RNA, 18 nt, Human
ggugcccacacugccacu

SEQ ID NO: 1186229 - RNA, 18 nt, Human
ucccgggccgcggugccc

SEQ ID NO: 1186230 - RNA, 21 nt, Human
ugccacggaaucccccauccc

SEQ ID NO: 1186231 - RNA, 23 nt, Human
ugccacggaaucccccaucccac

SEQ ID NO: 1186232 - RNA, 27 nt, Human
ugccacggaaucccccaucccacaggg

SEQ ID NO: 1186233 - RNA, 23 nt, Human
ugccacucagcccuggcuggaga

SEQ ID NO: 1186234 - RNA, 20 nt, Human
aagaagccuuggcguccacc

SEQ ID NO: 1186235 - RNA, 19 nt, Human
aagcuaagguggguaugaa

SEQ ID NO: 1186236 - RNA, 22 nt, Human
aauugggaagcuaaggugggua

SEQ ID NO: 1186237 - RNA, 19 nt, Human
accaaagccucgcccgccc

SEQ ID NO: 1186238 - RNA, 22 nt, Human
acccuuacacccacaccugcag

SEQ ID NO: 1186239 - RNA, 21 nt, Human
acucuagagagaugccuggga

SEQ ID NO: 1186240 - RNA, 18 nt, Human
acugcaauaaaguuacaa

SEQ ID NO: 1186241 - RNA, 19 nt, Human
agaaaggaguagaccucac

SEQ ID NO: 1186242 - RNA, 18 nt, Human
agaaggagaugccuacag

SEQ ID NO: 1186243 - RNA, 19 nt, Human
agagauggaagaggaaagg

SEQ ID NO: 1186244 - RNA, 18 nt, Human
agaggaaaggagggaagg

SEQ ID NO: 1186245 - RNA, 19 nt, Human
agaggaaaggagggaaggu

SEQ ID NO: 1186246 - RNA, 20 nt, Human
agagggccuggcgcgcacuu

SEQ ID NO: 1186247 - RNA, 22 nt, Human
agccggccuugccucuggcccc

SEQ ID NO: 1186248 - RNA, 20 nt, Human
agcucuucaucagcagggaa

SEQ ID NO: 1186249 - RNA, 19 nt, Human
agcuucccaaagauugaga

SEQ ID NO: 1186250 - RNA, 20 nt, Human
aggaccaguaagaagccuug

SEQ ID NO: 1186251 - RNA, 18 nt, Human
aggauggacucacgccac

SEQ ID NO: 1186252 - RNA, 18 nt, Human
auccuugcgggcgugaga

SEQ ID NO: 1186253 - RNA, 20 nt, Human
caaagcuccgcuugcacuuc

SEQ ID NO: 1186254 - RNA, 20 nt, Human
caccacgucagacucacacc

SEQ ID NO: 1186255 - RNA, 19 nt, Human
cacuucuuggcuguacugc

SEQ ID NO: 1186256 - RNA, 22 nt, Human
cagagcucucgcguucacuuuc

SEQ ID NO: 1186257 - RNA, 21 nt, Human
cagcaacucugggacccuggu

SEQ ID NO: 1186258 - RNA, 22 nt, Human
cagcacucugagccuggggcag

SEQ ID NO: 1186259 - RNA, 20 nt, Human
cagcuaaagcaaagcuccgg

SEQ ID NO: 1186260 - RNA, 19 nt, Human
cagcugcauugaggcccag

SEQ ID NO: 1186261 - RNA, 23 nt, Human
cagggugaggggggucgucccuc

SEQ ID NO: 1186262 - RNA, 21 nt, Human
cauccuucccaggauggacuc

SEQ ID NO: 1186263 - RNA, 18 nt, Human
caugaggcuugcugcguc

SEQ ID NO: 1186264 - RNA, 18 nt, Human
caugcaagcauggccccc

SEQ ID NO: 1186265 - RNA, 21 nt, Human
ccaggccgugagaaagugacc

SEQ ID NO: 1186266 - RNA, 20 nt, Human
cccacaccugcagcugggcu

SEQ ID NO: 1186267 - RNA, 18 nt, Human
cccaggagacuaagauga

SEQ ID NO: 1186268 - RNA, 24 nt, Human
cccuaaguucucuccuccagcccc

SEQ ID NO: 1186269 - RNA, 23 nt, Human
cgcagggugaugggggauggugg

SEQ ID NO: 1186270 - RNA, 20 nt, Human
cggagggcaccaaagccucg

SEQ ID NO: 1186271 - RNA, 23 nt, Human
cggagggcaccaaagccucgccc

SEQ ID NO: 1186272 - RNA, 21 nt, Human
cuaggcugggaggacagccag

SEQ ID NO: 1186273 - RNA, 25 nt, Human
cucagcacucugagccuggggcaga

SEQ ID NO: 1186274 - RNA, 18 nt, Human
cucccuguuccugcugug

SEQ ID NO: 1186275 - RNA, 20 nt, Human
cucguccacacacgcacagg

SEQ ID NO: 1186276 - RNA, 20 nt, Human
cugcaaaguccacuuagucu

SEQ ID NO: 1186277 - RNA, 19 nt, Human
cugcccugaagaaaggagu

SEQ ID NO: 1186278 - RNA, 23 nt, Human
cugcucagauucugguggugcug

SEQ ID NO: 1186279 - RNA, 18 nt, Human
cugcugggcaauuccuau

SEQ ID NO: 1186280 - RNA, 22 nt, Human
cuguccccuaugcagguggccc

SEQ ID NO: 1186281 - RNA, 23 nt, Human
cuguccccuaugcagguggcccu

SEQ ID NO: 1186282 - RNA, 19 nt, Human
cugugccacugccccaagu

SEQ ID NO: 1186283 - RNA, 27 nt, Human
cuucccaggauggacucacgccacccu

SEQ ID NO: 1186284 - RNA, 20 nt, Human
gaacgugggugggucggcac

SEQ ID NO: 1186285 - RNA, 19 nt, Human
gacacguccagagcuaugg

SEQ ID NO: 1186286 - RNA, 25 nt, Human
gagacuauuuuuuggcaauuuugua

SEQ ID NO: 1186287 - RNA, 25 nt, Human
gagaggugggagggaggugacagag

SEQ ID NO: 1186288 - RNA, 18 nt, Human
gagggccuggcgcgcacu

SEQ ID NO: 1186289 - RNA, 23 nt, Human
gaggguggcaaacauggcaggag

SEQ ID NO: 1186290 - RNA, 19 nt, Human
gcagaaggagaugccuaca

SEQ ID NO: 1186291 - RNA, 23 nt, Human
gcguucacuuucucguccacaca

SEQ ID NO: 1186292 - RNA, 23 nt, Human
ggacagccaggggaauugggaag

SEQ ID NO: 1186293 - RNA, 21 nt, Human
ggucccaucagggcccuuccc

SEQ ID NO: 1186294 - RNA, 21 nt, Human
ggugacagagagauggaagag

SEQ ID NO: 1186295 - RNA, 21 nt, Human
gguggugucuaggagcugagc

SEQ ID NO: 1186296 - RNA, 24 nt, Human
uaagcuguguuccaagaccuuuga

SEQ ID NO: 1186297 - RNA, 21 nt, Human
uaauuaaaaguuuggggcugu

SEQ ID NO: 1186298 - RNA, 20 nt, Human
uagaccccgcgagaugccag

SEQ ID NO: 1186299 - RNA, 20 nt, Human
uagaccucacucugacccaa

SEQ ID NO: 1186300 - RNA, 19 nt, Human
ucagaccuggucuaaccaa

SEQ ID NO: 1186301 - RNA, 23 nt, Human
ucagccggccuugccucuggccc

SEQ ID NO: 1186302 - RNA, 19 nt, Human
ucauggcaggccugggagc

SEQ ID NO: 1186303 - RNA, 21 nt, Human
ucccaagggguggcuuagacc

SEQ ID NO: 1186304 - RNA, 25 nt, Human
ucccggagggcaccaaagccucgcc

SEQ ID NO: 1186305 - RNA, 19 nt, Human
ucccuccugcuuuagccca

SEQ ID NO: 1186306 - RNA, 24 nt, Human
uccugcccuaaguucucuccucca

SEQ ID NO: 1186307 - RNA, 22 nt, Human
uccuuuuauuuuguucaagccu

SEQ ID NO: 1186308 - RNA, 19 nt, Human
ucuaagcagccauuggcaa

SEQ ID NO: 1186309 - RNA, 23 nt, Human
ucuaauacuguuugcgaugaauu

SEQ ID NO: 1186310 - RNA, 19 nt, Human
ucuggccccaccucugcug

SEQ ID NO: 1186311 - RNA, 18 nt, Human
ugaaggagcagagcagac

SEQ ID NO: 1186312 - RNA, 23 nt, Human
ugacccaaggcugauccucgcga

SEQ ID NO: 1186313 - RNA, 23 nt, Human
ugaggggggucgucccuccugcu

SEQ ID NO: 1186314 - RNA, 18 nt, Human
ugauccugcccaugucuc

SEQ ID NO: 1186315 - RNA, 19 nt, Human
ugcagcaacucugggaccc

SEQ ID NO: 1186316 - RNA, 18 nt, Human
ugccugggacacguccag

SEQ ID NO: 1186317 - RNA, 18 nt, Human
ugccuuugccaggcugcu

SEQ ID NO: 1186318 - RNA, 21 nt, Human
ugcuggggauaagggcuuccc

SEQ ID NO: 1186319 - RNA, 22 nt, Human
uggaagaggaaaggagggaagg

SEQ ID NO: 1186320 - RNA, 26 nt, Human
uggaagaggaaaggagggaagguucc

SEQ ID NO: 1186321 - RNA, 25 nt, Human
uggcaaaaugacagcuaaagcaaag

SEQ ID NO: 1186322 - RNA, 20 nt, Human
uggcagaggaaagggggcug

SEQ ID NO: 1186323 - RNA, 19 nt, Human
uggcaggccugggagcgga

SEQ ID NO: 1186324 - RNA, 18 nt, Human
ugggaaugccagcccugc

SEQ ID NO: 1186325 - RNA, 23 nt, Human
ugggacacguccagagcuaugga

SEQ ID NO: 1186326 - RNA, 21 nt, Human
ugggacccuggugcaugguau

SEQ ID NO: 1186327 - RNA, 18 nt, Human
ugggagggaggugacaga

SEQ ID NO: 1186328 - RNA, 22 nt, Human
ugggagggaggugacagagaga

SEQ ID NO: 1186329 - RNA, 24 nt, Human
ugggagggaggugacagagagaug

SEQ ID NO: 1186330 - RNA, 19 nt, Human
ugggcaauuccuaugggcc

SEQ ID NO: 1186331 - RNA, 23 nt, Human
uggggucagccggccuugccucc

SEQ ID NO: 1186332 - RNA, 18 nt, Human
uggguaugaaguuuugcc

SEQ ID NO: 1186333 - RNA, 18 nt, Human
ugguauugcaccugugag

SEQ ID NO: 1186334 - RNA, 22 nt, Human
ugguggcaagugggggagggug

SEQ ID NO: 1186335 - RNA, 24 nt, Human
uguaccuuuugagagcacuucuug

SEQ ID NO: 1186336 - RNA, 21 nt, Human
ugucuccugcccuaaguucuc

SEQ ID NO: 1186337 - RNA, 18 nt, Human
ugugguggcuugccaggg

SEQ ID NO: 1186338 - RNA, 26 nt, Human
uguuggggggaaggagaggugggagg

SEQ ID NO: 1186339 - RNA, 27 nt, Human
uguuggggggaaggagaggugggaggg

SEQ ID NO: 1186340 - RNA, 24 nt, Human
uuacacccacaccugcagcugggc

SEQ ID NO: 1186341 - RNA, 18 nt, Human
uugagagguggugucuag

SEQ ID NO: 1186342 - RNA, 26 nt, Human
uugcagcaacucugggacccuggugc

SEQ ID NO: 1186343 - RNA, 18 nt, Human
uuggagacgcugugccac

SEQ ID NO: 1186344 - RNA, 20 nt, Human
uuggagccuaacacagcaug

SEQ ID NO: 1186345 - RNA, 21 nt, Human
uuuguuggggggaaggagagg

SEQ ID NO: 1186346 - RNA, 24 nt, Human
cucaaccuauccaaauccucgaga

SEQ ID NO: 1186347 - RNA, 18 nt, Human
gcccaauaaaggcucaac

SEQ ID NO: 1186348 - RNA, 21 nt, Human
gcccaauaaaggcucaaccua

SEQ ID NO: 1186349 - RNA, 20 nt, Human
aaaaggaaagaauucaggca

SEQ ID NO: 1186350 - RNA, 21 nt, Human
aauaaagugugugcuucuuuc

SEQ ID NO: 1186351 - RNA, 18 nt, Human
acccaaagacagggagcc

SEQ ID NO: 1186352 - RNA, 24 nt, Human
acgcagcagcuucagcagguacag

SEQ ID NO: 1186353 - RNA, 18 nt, Human
acucacauggcugaaaca

SEQ ID NO: 1186354 - RNA, 24 nt, Human
acuggcuucucagucuggcucuuu

SEQ ID NO: 1186355 - RNA, 18 nt, Human
agaacuagagaaagguga

SEQ ID NO: 1186356 - RNA, 20 nt, Human
agagaaaggugaguguagug

SEQ ID NO: 1186357 - RNA, 21 nt, Human
auggcugaaacagcagggagc

SEQ ID NO: 1186358 - RNA, 22 nt, Human
caaagacagggagccuggaaga

SEQ ID NO: 1186359 - RNA, 19 nt, Human
caagaccagaacuagagaa

SEQ ID NO: 1186360 - RNA, 19 nt, Human
cagcagcuucagcagguac

SEQ ID NO: 1186361 - RNA, 21 nt, Human
cagcagguacaggaagauuuc

SEQ ID NO: 1186362 - RNA, 21 nt, Human
cauaacaaaccaucucaaaac

SEQ ID NO: 1186363 - RNA, 20 nt, Human
caucucaucaacaucucccu

SEQ ID NO: 1186364 - RNA, 20 nt, Human
ccagaacuagagaaagguga

SEQ ID NO: 1186365 - RNA, 21 nt, Human
ccagaacuagagaaaggugag

SEQ ID NO: 1186366 - RNA, 22 nt, Human
cccaaagacagggagccuggaa

SEQ ID NO: 1186367 - RNA, 21 nt, Human
ccuccggcugugacuuuugcc

SEQ ID NO: 1186368 - RNA, 25 nt, Human
ccuccggcugugacuuuugccauuu

SEQ ID NO: 1186369 - RNA, 22 nt, Human
ccucugaggaacgcagcagcuu

SEQ ID NO: 1186370 - RNA, 23 nt, Human
cuaauaaagugugugcuucuuuc

SEQ ID NO: 1186371 - RNA, 23 nt, Human
cuagcaucuuucaccuaagcaau

SEQ ID NO: 1186372 - RNA, 23 nt, Human
cuccggcugugacuuuugccauu

SEQ ID NO: 1186373 - RNA, 22 nt, Human
cucuggauucuccccuuccccu

SEQ ID NO: 1186374 - RNA, 23 nt, Human
cuggagucaccugaagguucagc

SEQ ID NO: 1186375 - RNA, 19 nt, Human
cuggauucuccccuucccc

SEQ ID NO: 1186376 - RNA, 20 nt, Human
cuucacgcugaucuugaccc

SEQ ID NO: 1186377 - RNA, 20 nt, Human
gacaggaagaaaaguucuaa

SEQ ID NO: 1186378 - RNA, 20 nt, Human
gaccagaacuagagaaaggu

SEQ ID NO: 1186379 - RNA, 19 nt, Human
gacccaaagacagggagcc

SEQ ID NO: 1186380 - RNA, 18 nt, Human
gaggcaagaccagaacua

SEQ ID NO: 1186381 - RNA, 22 nt, Human
gaggcaagaccagaacuagaga

SEQ ID NO: 1186382 - RNA, 24 nt, Human
gcagggagcuggccaggcaucucu

SEQ ID NO: 1186383 - RNA, 20 nt, Human
gccuagcuggggcugggggg

SEQ ID NO: 1186384 - RNA, 21 nt, Human
gcugaaacagcagggagcugg

SEQ ID NO: 1186385 - RNA, 22 nt, Human
gggcugggggguggcgggcggg

SEQ ID NO: 1186386 - RNA, 18 nt, Human
guaauugcucgacauucc

SEQ ID NO: 1186387 - RNA, 23 nt, Human
guuucagucucacauuuuaucuc

SEQ ID NO: 1186388 - RNA, 22 nt, Human
uaacaaaccaucucaaaacuga

SEQ ID NO: 1186389 - RNA, 24 nt, Human
uaagcucugcucuucuugcuugag

SEQ ID NO: 1186390 - RNA, 22 nt, Human
uaagguuugauuuugguuuugg

SEQ ID NO: 1186391 - RNA, 21 nt, Human
uacguggugacuggcuucuca

SEQ ID NO: 1186392 - RNA, 23 nt, Human
uagcaucuuucaccuaagcaauu

SEQ ID NO: 1186393 - RNA, 25 nt, Human
uagcaucuuucaccuaagcaauugg

SEQ ID NO: 1186394 - RNA, 22 nt, Human
uaguaagcaugggcuuccuucu

SEQ ID NO: 1186395 - RNA, 18 nt, Human
uaucucuggauucucccc

SEQ ID NO: 1186396 - RNA, 21 nt, Human
ucuccuagugcugggccuccg

SEQ ID NO: 1186397 - RNA, 20 nt, Human
ucugcucuucuugcuugagg

SEQ ID NO: 1186398 - RNA, 19 nt, Human
ugcaccaaaaugccucacu

SEQ ID NO: 1186399 - RNA, 21 nt, Human
uggauuucggucuugcaauuu

SEQ ID NO: 1186400 - RNA, 23 nt, Human
uggccuagcuggggcuggggggu

SEQ ID NO: 1186401 - RNA, 18 nt, Human
ugggccuccggcugugac

SEQ ID NO: 1186402 - RNA, 24 nt, Human
ugguuuuggggacugcagaggugc

SEQ ID NO: 1186403 - RNA, 23 nt, Human
uucagcagguacaggaagauuuc

SEQ ID NO: 1186404 - RNA, 24 nt, Human
uucuuucuuguaugcuucuuuaaa

SEQ ID NO: 1186405 - RNA, 19 nt, Human
uucuuuggguugacugagc

SEQ ID NO: 1186406 - RNA, 18 nt, Human
aaguccuucaaaguccac

SEQ ID NO: 1186407 - RNA, 22 nt, Human
cagugaaaauuuucugagaucu

SEQ ID NO: 1186408 - RNA, 20 nt, Human
cuucaaaguccacuggcucc

SEQ ID NO: 1186409 - RNA, 21 nt, Human
gcaaugcuggcaaacaggggc

SEQ ID NO: 1186410 - RNA, 24 nt, Human
uaacaucguagagggcaaugcugg

SEQ ID NO: 1186411 - RNA, 21 nt, Human
ucagaguucaggucacaguga

SEQ ID NO: 1186412 - RNA, 18 nt, Human
ucuuuuuccuuucuuuaa

SEQ ID NO: 1186413 - RNA, 20 nt, Human
ugacuugaugcggccacuga

SEQ ID NO: 1186414 - RNA, 19 nt, Human
uucaggucacagugaaaau

SEQ ID NO: 1186415 - RNA, 24 nt, Human
aaagugcugggaucacaggcguga

SEQ ID NO: 1186416 - RNA, 21 nt, Human
aagcgaacacgggcuccucca

SEQ ID NO: 1186417 - RNA, 19 nt, Human
aaguagcugggacuaaggc

SEQ ID NO: 1186418 - RNA, 25 nt, Human
aagugauuccccugccucagccucc

SEQ ID NO: 1186419 - RNA, 26 nt, Human
aagugcugggaucacaggcgugagcc

SEQ ID NO: 1186420 - RNA, 26 nt, Human
acagaacuccagcaaaaagggaacgc

SEQ ID NO: 1186421 - RNA, 18 nt, Human
acgggguuucaccacguu

SEQ ID NO: 1186422 - RNA, 20 nt, Human
acgggguuucaccacguugg

SEQ ID NO: 1186423 - RNA, 24 nt, Human
acgggguuucaccacguuggccag

SEQ ID NO: 1186424 - RNA, 20 nt, Human
acugcaagcuccgccucccg

SEQ ID NO: 1186425 - RNA, 23 nt, Human
acuugcucugucgccaggcugga

SEQ ID NO: 1186426 - RNA, 22 nt, Human
agaaagagcuuggcuccuggug

SEQ ID NO: 1186427 - RNA, 22 nt, Human
agccuucugucguccugagcaa

SEQ ID NO: 1186428 - RNA, 20 nt, Human
aggaaggaugaugggcauau

SEQ ID NO: 1186429 - RNA, 24 nt, Human
aggcuggagugcaguggcagaucu

SEQ ID NO: 1186430 - RNA, 24 nt, Human
agugauuccccugccucagccucc

SEQ ID NO: 1186431 - RNA, 22 nt, Human
agugcaguggcagaucucgguu

SEQ ID NO: 1186432 - RNA, 23 nt, Human
agugcaguggcagaucucgguuc

SEQ ID NO: 1186433 - RNA, 18 nt, Human
augaaguggaaaaaguga

SEQ ID NO: 1186434 - RNA, 24 nt, Human
auuuuuuguauuuuaguagagacg

SEQ ID NO: 1186435 - RNA, 23 nt, Human
caaaaguugauuugaauccugau

SEQ ID NO: 1186436 - RNA, 22 nt, Human
caaaguaucauuuaacaugcaa

SEQ ID NO: 1186437 - RNA, 24 nt, Human
caaagugcugggaucacaggcgug

SEQ ID NO: 1186438 - RNA, 20 nt, Human
caacaugaaaaucauuaaca

SEQ ID NO: 1186439 - RNA, 22 nt, Human
caagugauuccccugccucagc

SEQ ID NO: 1186440 - RNA, 25 nt, Human
caauucagacuaaccauaaugccga

SEQ ID NO: 1186441 - RNA, 23 nt, Human
cacaggcgugagccaccgcgccc

SEQ ID NO: 1186442 - RNA, 18 nt, Human
caccacguuggccaggau

SEQ ID NO: 1186443 - RNA, 22 nt, Human
caccacguuggccaggaugguc

SEQ ID NO: 1186444 - RNA, 24 nt, Human
caccacguuggccaggauggucuc

SEQ ID NO: 1186445 - RNA, 22 nt, Human
caccauccaauuccuaaucaaa

SEQ ID NO: 1186446 - RNA, 19 nt, Human
cacgauguuuucugcgcug

SEQ ID NO: 1186447 - RNA, 19 nt, Human
cagaaagagcuuggcuccu

SEQ ID NO: 1186448 - RNA, 19 nt, Human
ccaaaggagccaugaagug

SEQ ID NO: 1186449 - RNA, 22 nt, Human
ccaaagugcugggaucacaggc

SEQ ID NO: 1186450 - RNA, 24 nt, Human
ccaaagugcugggaucacaggcgu

SEQ ID NO: 1186451 - RNA, 24 nt, Human
ccaacucaccauccaauuccuaau

SEQ ID NO: 1186452 - RNA, 21 nt, Human
ccaaguagcugggacuaaggc

SEQ ID NO: 1186453 - RNA, 20 nt, Human
ccaccacgcccggcuaauuu

SEQ ID NO: 1186454 - RNA, 18 nt, Human
ccaccgcgcccggccugc

SEQ ID NO: 1186455 - RNA, 18 nt, Human
ccaccgcgcccggccugc

SEQ ID NO: 1186456 - RNA, 20 nt, Human
ccaccgcgcccggccugcuu

SEQ ID NO: 1186457 - RNA, 24 nt, Human
ccagcaaaaagcuaaggacugggg

SEQ ID NO: 1186458 - RNA, 19 nt, Human
cccaaguagcugggacuaa

SEQ ID NO: 1186459 - RNA, 21 nt, Human
cccggguucaagugauucccc

SEQ ID NO: 1186460 - RNA, 23 nt, Human
cccggguucaagugauuccccug

SEQ ID NO: 1186461 - RNA, 24 nt, Human
ccgccucccggguucaagugauuc

SEQ ID NO: 1186462 - RNA, 19 nt, Human
ccgcgcccggccugcuuug

SEQ ID NO: 1186463 - RNA, 21 nt, Human
ccucccggguucaagugauuc

SEQ ID NO: 1186464 - RNA, 22 nt, Human
ccucccggguucaagugauucc

SEQ ID NO: 1186465 - RNA, 23 nt, Human
ccugccucagccucccaaguagc

SEQ ID NO: 1186466 - RNA, 24 nt, Human
ccugccucagccucccaaguagcu

SEQ ID NO: 1186467 - RNA, 24 nt, Human
cgccucggccucccaaagugcugg

SEQ ID NO: 1186468 - RNA, 24 nt, Human
cgggguuucaccacguuggccagg

SEQ ID NO: 1186469 - RNA, 24 nt, Human
cucagccucccaaguagcugggac

SEQ ID NO: 1186470 - RNA, 22 nt, Human
cucagucugaaacugaaauaaa

SEQ ID NO: 1186471 - RNA, 24 nt, Human
cuccugaccucgugaugcgcccgc

SEQ ID NO: 1186472 - RNA, 19 nt, Human
cucugucgccaggcuggag

SEQ ID NO: 1186473 - RNA, 23 nt, Human
cugcaagccuucugucguccuga

SEQ ID NO: 1186474 - RNA, 22 nt, Human
cuugcucugucgccaggcugga

SEQ ID NO: 1186475 - RNA, 18 nt, Human
gaaaacauuuuuugagaa

SEQ ID NO: 1186476 - RNA, 19 nt, Human
gaauccugauagauuccac

SEQ ID NO: 1186477 - RNA, 24 nt, Human
gagacgggguuucaccacguuggc

SEQ ID NO: 1186478 - RNA, 18 nt, Human
gaucacaggcgugagcca

SEQ ID NO: 1186479 - RNA, 21 nt, Human
gaucacaggcgugagccaccg

SEQ ID NO: 1186480 - RNA, 23 nt, Human
gcccggcuaauuuuuuguauuuu

SEQ ID NO: 1186481 - RNA, 24 nt, Human
gccugcuuugguauuuuuuaagag

SEQ ID NO: 1186482 - RNA, 19 nt, Human
gcucugucgccaggcugga

SEQ ID NO: 1186483 - RNA, 20 nt, Human
ggaugaauccauuauauuua

SEQ ID NO: 1186484 - RNA, 22 nt, Human
ggcuccguccucgccugcuuca

SEQ ID NO: 1186485 - RNA, 24 nt, Human
gggcuucuuagcagaccucagucu

SEQ ID NO: 1186486 - RNA, 23 nt, Human
gggguuucaccacguuggccagg

SEQ ID NO: 1186487 - RNA, 20 nt, Human
ggucucgaucuccugaccuc

SEQ ID NO: 1186488 - RNA, 24 nt, Human
gugaugcgcccgccucggccuccc

SEQ ID NO: 1186489 - RNA, 24 nt, Human
gugauuccccugccucagccuccc

SEQ ID NO: 1186490 - RNA, 23 nt, Human
gugcaguggcagaucucgguuca

SEQ ID NO: 1186491 - RNA, 26 nt, Human
uaaauaaaccaaaagaaauggccugu

SEQ ID NO: 1186492 - RNA, 24 nt, Human
uaaggacugggggaucccaacuca

SEQ ID NO: 1186493 - RNA, 22 nt, Human
uaaggcgugcgccaccacgccc

SEQ ID NO: 1186494 - RNA, 23 nt, Human
uaauuuuuuguauuuuaguagag

SEQ ID NO: 1186495 - RNA, 24 nt, Human
uaauuuuuuguauuuuaguagaga

SEQ ID NO: 1186496 - RNA, 20 nt, Human
uacagaacuccagcaaaagg

SEQ ID NO: 1186497 - RNA, 20 nt, Human
uacccugguccaaaggagcc

SEQ ID NO: 1186498 - RNA, 22 nt, Human
uagagacgggguuucaccacgu

SEQ ID NO: 1186499 - RNA, 22 nt, Human
uagagcagcacgccggcaccuu

SEQ ID NO: 1186500 - RNA, 24 nt, Human
uaguagagacgggguuucaccacg

SEQ ID NO: 1186501 - RNA, 26 nt, Human
uaguagagacgggguuucaccacguu

SEQ ID NO: 1186502 - RNA, 24 nt, Human
ucaccacguuggccaggauggucu

SEQ ID NO: 1186503 - RNA, 18 nt, Human
ucacugcaagcuccgccu

SEQ ID NO: 1186504 - RNA, 19 nt, Human
ucacugcaagcuccgccuc

SEQ ID NO: 1186505 - RNA, 24 nt, Human
ucacugcaagcuccgccucccggg

SEQ ID NO: 1186506 - RNA, 18 nt, Human
ucagccucccaaguagcu

SEQ ID NO: 1186507 - RNA, 20 nt, Human
ucagccucccaaguagcugg

SEQ ID NO: 1186508 - RNA, 20 nt, Human
uccacuaacuuuuuugucuu

SEQ ID NO: 1186509 - RNA, 24 nt, Human
ucccaaagugcugggaucacaggc

SEQ ID NO: 1186510 - RNA, 23 nt, Human
ucccaaguagcugggacuaaggc

SEQ ID NO: 1186511 - RNA, 26 nt, Human
uccccugccucagccucccaaguagc

SEQ ID NO: 1186512 - RNA, 19 nt, Human
ucccggguucaagugauuc

SEQ ID NO: 1186513 - RNA, 24 nt, Human
ucccggguucaagugauuccccug

SEQ ID NO: 1186514 - RNA, 19 nt, Human
uccuuggaugaauccauua

SEQ ID NO: 1186515 - RNA, 18 nt, Human
ucugucgccaggcuggag

SEQ ID NO: 1186516 - RNA, 21 nt, Human
ucugucgccaggcuggagugc

SEQ ID NO: 1186517 - RNA, 23 nt, Human
ucugucgccaggcuggagugcag

SEQ ID NO: 1186518 - RNA, 20 nt, Human
ugaaacugaaauaaaccugg

SEQ ID NO: 1186519 - RNA, 23 nt, Human
ugaaacugaaauaaaccuggacg

SEQ ID NO: 1186520 - RNA, 22 nt, Human
ugaagcgaacacgggcuccucc

SEQ ID NO: 1186521 - RNA, 21 nt, Human
ugacauuuugagauuuacaga

SEQ ID NO: 1186522 - RNA, 19 nt, Human
ugaugggcauauugcuugc

SEQ ID NO: 1186523 - RNA, 24 nt, Human
ugccucagccucccaaguagcugg

SEQ ID NO: 1186524 - RNA, 22 nt, Human
ugcgcugucuuuaaauuccagu

SEQ ID NO: 1186525 - RNA, 24 nt, Human
ugcugggaucacaggcgugagcca

SEQ ID NO: 1186526 - RNA, 21 nt, Human
ugcuucauuauuccagaaaga

SEQ ID NO: 1186527 - RNA, 21 nt, Human
uggagugcaguggcagaucuc

SEQ ID NO: 1186528 - RNA, 23 nt, Human
uggagugcaguggcagaucucgg

SEQ ID NO: 1186529 - RNA, 25 nt, Human
uggcaucgcuauuuuuauacccuuc

SEQ ID NO: 1186530 - RNA, 24 nt, Human
uggccaggauggucucgaucuccu

SEQ ID NO: 1186531 - RNA, 23 nt, Human
ugggacuaaggcgugcgccacca

SEQ ID NO: 1186532 - RNA, 19 nt, Human
ugggaucacaggcgugagc

SEQ ID NO: 1186533 - RNA, 21 nt, Human
ugggaucacaggcgugagcca

SEQ ID NO: 1186534 - RNA, 22 nt, Human
ugggaucacaggcgugagccac

SEQ ID NO: 1186535 - RNA, 23 nt, Human
ugggaucacaggcgugagccacc

SEQ ID NO: 1186536 - RNA, 24 nt, Human
ugggaucacaggcgugagccaccg

SEQ ID NO: 1186537 - RNA, 24 nt, Human
ugguaaauggaggcauuauaugga

SEQ ID NO: 1186538 - RNA, 22 nt, Human
ugguuguuuuuuuuuuuuucuu

SEQ ID NO: 1186539 - RNA, 18 nt, Human
uuaguagagacgggguuu

SEQ ID NO: 1186540 - RNA, 22 nt, Human
uuaguagagacgggguuucacc

SEQ ID NO: 1186541 - RNA, 24 nt, Human
uuaguagagacgggguuucaccac

SEQ ID NO: 1186542 - RNA, 25 nt, Human
uuaguagagacgggguuucaccacg

SEQ ID NO: 1186543 - RNA, 21 nt, Human
uucaagugauuccccugccuc

SEQ ID NO: 1186544 - RNA, 23 nt, Human
uucaagugauuccccugccucag

SEQ ID NO: 1186545 - RNA, 24 nt, Human
uucaagugauuccccugccucagc

SEQ ID NO: 1186546 - RNA, 21 nt, Human
uuccagaaagagcuuggcucc

SEQ ID NO: 1186547 - RNA, 19 nt, Human
uuccccugccucagccucc

SEQ ID NO: 1186548 - RNA, 22 nt, Human
uuccuuggaugaauccauuaua

SEQ ID NO: 1186549 - RNA, 24 nt, Human
uugucuuuuuuuuuggcugccuuc

SEQ ID NO: 1186550 - RNA, 19 nt, Human
uuucaccacguuggccagg

SEQ ID NO: 1186551 - RNA, 23 nt, Human
uuuuaguagagacgggguuucac

SEQ ID NO: 1186552 - RNA, 20 nt, Human
uuuuuguauuuuaguagaga

SEQ ID NO: 1186553 - RNA, 18 nt, Human
acuuugaagggaaaggaa

SEQ ID NO: 1186554 - RNA, 19 nt, Human
aggaagggaggagaaaaga

SEQ ID NO: 1186555 - RNA, 18 nt, Human
ggaggaauaacgaagaaa

SEQ ID NO: 1186556 - RNA, 22 nt, Human
uacuuugaagggaaaggaaggg

SEQ ID NO: 1186557 - RNA, 21 nt, Human
uauggaggaauaacgaagaaa

SEQ ID NO: 1186558 - RNA, 23 nt, Human
aaaaaacaaaaucaaaacaaaaa

SEQ ID NO: 1186559 - RNA, 23 nt, Human
aaaaaagacgaacauacuugauc

SEQ ID NO: 1186560 - RNA, 21 nt, Human
aaaaacaaaaauaucaccgaa

SEQ ID NO: 1186561 - RNA, 20 nt, Human
aaaaagacgaacauacuuga

SEQ ID NO: 1186562 - RNA, 21 nt, Human
aaaacaaaaucaaaacaaaaa

SEQ ID NO: 1186563 - RNA, 18 nt, Human
aaaagacaggagcaaaug

SEQ ID NO: 1186564 - RNA, 28 nt, Human
aaaauaaaaaugguauggggaauccacu

SEQ ID NO: 1186565 - RNA, 24 nt, Human
aaaauacauuagauuuuaugccaa

SEQ ID NO: 1186566 - RNA, 24 nt, Human
aaacaaaaacucuuuuuccuuaau

SEQ ID NO: 1186567 - RNA, 23 nt, Human
aaacaaacaauaacaacaacaac

SEQ ID NO: 1186568 - RNA, 22 nt, Human
aaacaaccacaacuagaauuca

SEQ ID NO: 1186569 - RNA, 19 nt, Human
aaagagcuagacauacucu

SEQ ID NO: 1186570 - RNA, 18 nt, Human
aaagcaaaagacaggagc

SEQ ID NO: 1186571 - RNA, 26 nt, Human
aaagcauaaaaauucagcaaggaaau

SEQ ID NO: 1186572 - RNA, 21 nt, Human
aaauccaacacauagucaaaa

SEQ ID NO: 1186573 - RNA, 25 nt, Human
aacaacaacaaaaaacaaaaucaaa

SEQ ID NO: 1186574 - RNA, 18 nt, Human
aacaaccaccaccaccac

SEQ ID NO: 1186575 - RNA, 19 nt, Human
aacauagcgagaccccauc

SEQ ID NO: 1186576 - RNA, 20 nt, Human
aacauagcgagaccccaucu

SEQ ID NO: 1186577 - RNA, 21 nt, Human
aacauagcgagaccccaucuc

SEQ ID NO: 1186578 - RNA, 19 nt, Human
aacauggugaaacuccguc

SEQ ID NO: 1186579 - RNA, 20 nt, Human
aacauggugaaacuccgucu

SEQ ID NO: 1186580 - RNA, 21 nt, Human
aacauggugaaacuccgucuc

SEQ ID NO: 1186581 - RNA, 19 nt, Human
aacuacagauaucaaaagg

SEQ ID NO: 1186582 - RNA, 23 nt, Human
aagaaucaaugagagucgguaga

SEQ ID NO: 1186583 - RNA, 18 nt, Human
aagagcuagacauacucu

SEQ ID NO: 1186584 - RNA, 27 nt, Human
aagcaaauaauaguaucaugcugagau

SEQ ID NO: 1186585 - RNA, 19 nt, Human
aagcagaaauacacaaaca

SEQ ID NO: 1186586 - RNA, 20 nt, Human
aagcagaaauacacaaacac

SEQ ID NO: 1186587 - RNA, 21 nt, Human
aagcuguuugaaucaguagaa

SEQ ID NO: 1186588 - RNA, 18 nt, Human
aagguaugaaacuugaaa

SEQ ID NO: 1186589 - RNA, 21 nt, Human
aauaacaacaacaacaaaaaa

SEQ ID NO: 1186590 - RNA, 31 nt, Human
aauacacaaacacacacacacacacacggug

SEQ ID NO: 1186591 - RNA, 27 nt, Human
aauaggacaauuaaagcaaaagacagg

SEQ ID NO: 1186592 - RNA, 21 nt, Human
aaugccacccuaacaugucaa

SEQ ID NO: 1186593 - RNA, 22 nt, Human
aaugugaguaucccuuaaugua

SEQ ID NO: 1186594 - RNA, 22 nt, Human
acaacaacaacaaaaaacaaaa

SEQ ID NO: 1186595 - RNA, 21 nt, Human
acaagagugaaacucuaucuc

SEQ ID NO: 1186596 - RNA, 26 nt, Human
acaauaacaacaacaacaaaaaacaa

SEQ ID NO: 1186597 - RNA, 21 nt, Human
acacaacccuaauuuuuuaag

SEQ ID NO: 1186598 - RNA, 23 nt, Human
acacacacacacacguauauagg

SEQ ID NO: 1186599 - RNA, 25 nt, Human
acacaccccaaauuaaaaaaaacaa

SEQ ID NO: 1186600 - RNA, 19 nt, Human
acacagcgaagaaauagcc

SEQ ID NO: 1186601 - RNA, 18 nt, Human
acacauagucaaaaggag

SEQ ID NO: 1186602 - RNA, 18 nt, Human
acaccacuacacuccagc

SEQ ID NO: 1186603 - RNA, 23 nt, Human
acaccccaaauuaaaaaaaacaa

SEQ ID NO: 1186604 - RNA, 23 nt, Human
acagaaaaccauuaugcuaaaac

SEQ ID NO: 1186605 - RNA, 24 nt, Human
acauagcgagaccccaucucaaaa

SEQ ID NO: 1186606 - RNA, 19 nt, Human
acauggugaaacuccgucu

SEQ ID NO: 1186607 - RNA, 29 nt, Human
accaccaccacacacacacacaccccaaa

SEQ ID NO: 1186608 - RNA, 21 nt, Human
accaccaccaccacacacaca

SEQ ID NO: 1186609 - RNA, 23 nt, Human
accaccaccaccaccacacacuu

SEQ ID NO: 1186610 - RNA, 24 nt, Human
accacuacacuccagccuggguga

SEQ ID NO: 1186611 - RNA, 21 nt, Human
accccaaaaauuaccaaaagu

SEQ ID NO: 1186612 - RNA, 18 nt, Human
accccaucucaaaaaaaa

SEQ ID NO: 1186613 - RNA, 20 nt, Human
accugccucccauccccacc

SEQ ID NO: 1186614 - RNA, 21 nt, Human
acgaaaucuaaucuugcuccu

SEQ ID NO: 1186615 - RNA, 18 nt, Human
acuacacuccagccuggg

SEQ ID NO: 1186616 - RNA, 25 nt, Human
acuccagccugggugacaagaguga

SEQ ID NO: 1186617 - RNA, 18 nt, Human
acuccggaggcugaggca

SEQ ID NO: 1186618 - RNA, 24 nt, Human
acuccgucucuacuaaaaauacaa

SEQ ID NO: 1186619 - RNA, 19 nt, Human
agaaaaaucuggaucagcu

SEQ ID NO: 1186620 - RNA, 19 nt, Human
agaaaaauuuggaucagcu

SEQ ID NO: 1186621 - RNA, 23 nt, Human
agaaaaccauuaugcuaaaacca

SEQ ID NO: 1186622 - RNA, 19 nt, Human
agaaacgagcaugagaaaa

SEQ ID NO: 1186623 - RNA, 24 nt, Human
agaaagcauuaaaaugacaaaaaa

SEQ ID NO: 1186624 - RNA, 26 nt, Human
agauaugugcacucuugauauccuuc

SEQ ID NO: 1186625 - RNA, 19 nt, Human
agccaggggugguggcagg

SEQ ID NO: 1186626 - RNA, 23 nt, Human
agccaggggugguggcaggcgcc

SEQ ID NO: 1186627 - RNA, 24 nt, Human
agcccuuugggaggcugaaauagg

SEQ ID NO: 1186628 - RNA, 22 nt, Human
agccuggcuaacauggugaaac

SEQ ID NO: 1186629 - RNA, 24 nt, Human
agccuggcuaacauggugaaacuc

SEQ ID NO: 1186630 - RNA, 24 nt, Human
agccuggucaacauagcgagaccc

SEQ ID NO: 1186631 - RNA, 26 nt, Human
aggaaaaagcaaguauuggguaugaa

SEQ ID NO: 1186632 - RNA, 21 nt, Human
aggaaagaaacgagcaugaga

SEQ ID NO: 1186633 - RNA, 24 nt, Human
aggaaagaaacgagcaugagaaaa

SEQ ID NO: 1186634 - RNA, 28 nt, Human
aggaaaugaagauauucaaaaagugguu

SEQ ID NO: 1186635 - RNA, 23 nt, Human
aggaggcacuauuaagagaucac

SEQ ID NO: 1186636 - RNA, 24 nt, Human
aggaucacuggagaccaggaguuc

SEQ ID NO: 1186637 - RNA, 23 nt, Human
aggcaaaaaaugauaaacuucca

SEQ ID NO: 1186638 - RNA, 21 nt, Human
aggcaggagaaucgcuugaac

SEQ ID NO: 1186639 - RNA, 23 nt, Human
aggcaggagaaucgcuugaacug

SEQ ID NO: 1186640 - RNA, 22 nt, Human
aggcggagauugcagugagcca

SEQ ID NO: 1186641 - RNA, 22 nt, Human
aggcggagauugcagugagcca

SEQ ID NO: 1186642 - RNA, 24 nt, Human
aggcggagauugcagugagccagg

SEQ ID NO: 1186643 - RNA, 20 nt, Human
aggcugaggcaggagaaucg

SEQ ID NO: 1186644 - RNA, 24 nt, Human
aggcugaggcaggagaaucgcuug

SEQ ID NO: 1186645 - RNA, 24 nt, Human
aggggugguggcaggcgccuguaa

SEQ ID NO: 1186646 - RNA, 24 nt, Human
aguggcucacaccuguaauucuag

SEQ ID NO: 1186647 - RNA, 24 nt, Human
aguugcaguggcucacaccuguaa

SEQ ID NO: 1186648 - RNA, 33 nt, Human
auacacaaacacacacacacacacacguauagu

SEQ ID NO: 1186649 - RNA, 23 nt, Human
aucacaaagcuauagagcuauag

SEQ ID NO: 1186650 - RNA, 24 nt, Human
aucacaccacuacacuccagccug

SEQ ID NO: 1186651 - RNA, 20 nt, Human
aucuugcuccuucaguucua

SEQ ID NO: 1186652 - RNA, 20 nt, Human
augccagcuggggcugcagu

SEQ ID NO: 1186653 - RNA, 22 nt, Human
caaaagcuguuuuacaucaaac

SEQ ID NO: 1186654 - RNA, 20 nt, Human
caaaaguuuuuaauauucac

SEQ ID NO: 1186655 - RNA, 24 nt, Human
caaacacauguauaugcuuaugca

SEQ ID NO: 1186656 - RNA, 20 nt, Human
caaauuaaaaaaaacaaaaa

SEQ ID NO: 1186657 - RNA, 24 nt, Human
caaauuaaaaaaaacaaaaauauc

SEQ ID NO: 1186658 - RNA, 21 nt, Human
caacaaaaaacaaaaucaaaa

SEQ ID NO: 1186659 - RNA, 21 nt, Human
caacaacaaaaaacaaaauca

SEQ ID NO: 1186660 - RNA, 23 nt, Human
caacaacaacaaaaaacaaaauc

SEQ ID NO: 1186661 - RNA, 18 nt, Human
caacauaaaauacuggga

SEQ ID NO: 1186662 - RNA, 20 nt, Human
caacauacaaaaaagacgaa

SEQ ID NO: 1186663 - RNA, 18 nt, Human
caaccaccaccaccacca

SEQ ID NO: 1186664 - RNA, 18 nt, Human
caagaacagccuggucaa

SEQ ID NO: 1186665 - RNA, 21 nt, Human
caagcaguaaaugccacccua

SEQ ID NO: 1186666 - RNA, 20 nt, Human
caauaaauuugacuaaauaa

SEQ ID NO: 1186667 - RNA, 19 nt, Human
caauggaucuccuugaucu

SEQ ID NO: 1186668 - RNA, 21 nt, Human
caauugaauacuagaggaugc

SEQ ID NO: 1186669 - RNA, 27 nt, Human
cacacacacacacacacguauauauca

SEQ ID NO: 1186670 - RNA, 25 nt, Human
cacacacacacacguauauaucaaa

SEQ ID NO: 1186671 - RNA, 23 nt, Human
cacacaccccaaauuaaaaaaaa

SEQ ID NO: 1186672 - RNA, 25 nt, Human
cacaccccaaauuaaaaaaaacaaa

SEQ ID NO: 1186673 - RNA, 24 nt, Human
cacaccuguaauucuagcccuuug

SEQ ID NO: 1186674 - RNA, 28 nt, Human
cacauguauaugcuuaugcauaugugug

SEQ ID NO: 1186675 - RNA, 20 nt, Human
caccacacacacacacaccc

SEQ ID NO: 1186676 - RNA, 22 nt, Human
caccaccacacacacacacacc

SEQ ID NO: 1186677 - RNA, 27 nt, Human
caccaccaccaccacacacacacacac

SEQ ID NO: 1186678 - RNA, 26 nt, Human
caccacuacacuccagccugggugac

SEQ ID NO: 1186679 - RNA, 24 nt, Human
caccuguaauucuagcccuuuggg

SEQ ID NO: 1186680 - RNA, 23 nt, Human
cacuccagccugggugacaagag

SEQ ID NO: 1186681 - RNA, 24 nt, Human
cacuccagccugggugacaagagu

SEQ ID NO: 1186682 - RNA, 25 nt, Human
cacuccagccugggugacaagagug

SEQ ID NO: 1186683 - RNA, 20 nt, Human
caguacuauauaacaaccac

SEQ ID NO: 1186684 - RNA, 24 nt, Human
caguagaaguuagaccugccuccc

SEQ ID NO: 1186685 - RNA, 20 nt, Human
cauacccaaaugagcaaacc

SEQ ID NO: 1186686 - RNA, 21 nt, Human
cauacccaaaugagcaaacca

SEQ ID NO: 1186687 - RNA, 23 nt, Human
cauagcgagaccccaucucaaaa

SEQ ID NO: 1186688 - RNA, 18 nt, Human
cauccccaccacauacaa

SEQ ID NO: 1186689 - RNA, 19 nt, Human
cauccccaccacauacaaa

SEQ ID NO: 1186690 - RNA, 25 nt, Human
caucuuguucuaagauugcacgaaa

SEQ ID NO: 1186691 - RNA, 27 nt, Human
cauucuuacuguucacauagucaagaa

SEQ ID NO: 1186692 - RNA, 21 nt, Human
ccaaaaauuaccaaaaguuuu

SEQ ID NO: 1186693 - RNA, 23 nt, Human
ccacacacacacacaccccaaau

SEQ ID NO: 1186694 - RNA, 21 nt, Human
ccaccaccacacacacacaca

SEQ ID NO: 1186695 - RNA, 31 nt, Human
ccaccaccaccacacacacacacaccccaag

SEQ ID NO: 1186696 - RNA, 20 nt, Human
ccacuacacuccagccuggg

SEQ ID NO: 1186697 - RNA, 21 nt, Human
ccacuacacuccagccugggu

SEQ ID NO: 1186698 - RNA, 24 nt, Human
ccacuacacuccagccugggugac

SEQ ID NO: 1186699 - RNA, 25 nt, Human
ccacuacacuccagccugggugaca

SEQ ID NO: 1186700 - RNA, 22 nt, Human
ccaguagauggcagaauaacau

SEQ ID NO: 1186701 - RNA, 19 nt, Human
ccucauacccaaaugagca

SEQ ID NO: 1186702 - RNA, 24 nt, Human
ccucccauccccaccacauacaaa

SEQ ID NO: 1186703 - RNA, 23 nt, Human
ccuggcuaacauggugaaacucc

SEQ ID NO: 1186704 - RNA, 24 nt, Human
ccuggucaacauagcgagacccca

SEQ ID NO: 1186705 - RNA, 23 nt, Human
ccuguaaugccaguuacuccgga

SEQ ID NO: 1186706 - RNA, 24 nt, Human
cgagaccagccuggcuaacauggu

SEQ ID NO: 1186707 - RNA, 23 nt, Human
cgagaccccaucucaaaaaaaaa

SEQ ID NO: 1186708 - RNA, 24 nt, Human
cgccuguaaugccaguuacuccgg

SEQ ID NO: 1186709 - RNA, 21 nt, Human
cuaaaacuagaauuaccccua

SEQ ID NO: 1186710 - RNA, 24 nt, Human
cuaucucaaaaaacaaacaauaac

SEQ ID NO: 1186711 - RNA, 24 nt, Human
cucacaccuguaauucuagcccuu

SEQ ID NO: 1186712 - RNA, 21 nt, Human
cucuuuggacuuacaauugga

SEQ ID NO: 1186713 - RNA, 22 nt, Human
cugaggucaggaguucgagacc

SEQ ID NO: 1186714 - RNA, 24 nt, Human
cuggcacuugggugaaaugaggca

SEQ ID NO: 1186715 - RNA, 22 nt, Human
cuugcuguaaauagagaauaaa

SEQ ID NO: 1186716 - RNA, 21 nt, Human
gaaagcaguugcucugagacu

SEQ ID NO: 1186717 - RNA, 21 nt, Human
gaaauauacuuacuguccaaa

SEQ ID NO: 1186718 - RNA, 19 nt, Human
gaccugccucccaucccca

SEQ ID NO: 1186719 - RNA, 23 nt, Human
gagaaucgcuugaacuggggagg

SEQ ID NO: 1186720 - RNA, 22 nt, Human
gagauugcagugagccaggauc

SEQ ID NO: 1186721 - RNA, 21 nt, Human
gaggaucacuggagaccagga

SEQ ID NO: 1186722 - RNA, 24 nt, Human
gaucacuggagaccaggaguucaa

SEQ ID NO: 1186723 - RNA, 19 nt, Human
gccaggaucacaccacuac

SEQ ID NO: 1186724 - RNA, 19 nt, Human
gccaguugcaguggcucac

SEQ ID NO: 1186725 - RNA, 24 nt, Human
gcuaacauggugaaacuccgucuc

SEQ ID NO: 1186726 - RNA, 18 nt, Human
ggagauugcagugagcca

SEQ ID NO: 1186727 - RNA, 19 nt, Human
ggagauugcagugagccag

SEQ ID NO: 1186728 - RNA, 24 nt, Human
ggagauugcagugagccaggauca

SEQ ID NO: 1186729 - RNA, 18 nt, Human
gggaaucacuaaauccaa

SEQ ID NO: 1186730 - RNA, 25 nt, Human
gggcugcaguugucugaagguucug

SEQ ID NO: 1186731 - RNA, 18 nt, Human
gguuuuguuauuacuguu

SEQ ID NO: 1186732 - RNA, 23 nt, Human
guauguguauauacauauaugaa

SEQ ID NO: 1186733 - RNA, 21 nt, Human
gugaaacuccgucucuacuaa

SEQ ID NO: 1186734 - RNA, 24 nt, Human
gugcuauaaaaauuucuggguuuu

SEQ ID NO: 1186735 - RNA, 27 nt, Human
uaaaaaaaacaaaaauaucaccgaaag

SEQ ID NO: 1186736 - RNA, 21 nt, Human
uaaaaauacaaaaauuagcca

SEQ ID NO: 1186737 - RNA, 28 nt, Human
uaaaacaaccacaacuagaaggucaucc

SEQ ID NO: 1186738 - RNA, 19 nt, Human
uaaaauaaaggucauagcu

SEQ ID NO: 1186739 - RNA, 21 nt, Human
uaaaauacugggauaauuaug

SEQ ID NO: 1186740 - RNA, 22 nt, Human
uaaaaugacaaaaaaacuaauu

SEQ ID NO: 1186741 - RNA, 23 nt, Human
uaaacaaagacuuuuaauuuuaa

SEQ ID NO: 1186742 - RNA, 23 nt, Human
uaaaccaauugacaaugcacuca

SEQ ID NO: 1186743 - RNA, 19 nt, Human
uaaagcaaaagacaggagc

SEQ ID NO: 1186744 - RNA, 21 nt, Human
uaaagcauaaaaauucagcaa

SEQ ID NO: 1186745 - RNA, 23 nt, Human
uaaauccaacacauagucaaaag

SEQ ID NO: 1186746 - RNA, 23 nt, Human
uaacaaaggaauccuaaaacuag

SEQ ID NO: 1186747 - RNA, 24 nt, Human
uaacaacaacaacaaaaaacaaaa

SEQ ID NO: 1186748 - RNA, 22 nt, Human
uaacauggugaaacuccgucuc

SEQ ID NO: 1186749 - RNA, 24 nt, Human
uaacauggugaaacuccgucucua

SEQ ID NO: 1186750 - RNA, 21 nt, Human
uaacgaaaucccauucaaagc

SEQ ID NO: 1186751 - RNA, 24 nt, Human
uaacuagaaagaaaagcuacuuga

SEQ ID NO: 1186752 - RNA, 19 nt, Human
uaagaguccuuucuaaccc

SEQ ID NO: 1186753 - RNA, 26 nt, Human
uaaggugaaaauaugagaauugaccc

SEQ ID NO: 1186754 - RNA, 21 nt, Human
uaauaugaaauuggcuuuuau

SEQ ID NO: 1186755 - RNA, 21 nt, Human
uacaaaggaaaaacacuugau

SEQ ID NO: 1186756 - RNA, 22 nt, Human
uaccccaaaaauuaccaaaagu

SEQ ID NO: 1186757 - RNA, 19 nt, Human
uagaaauauacuuacuguc

SEQ ID NO: 1186758 - RNA, 21 nt, Human
uagaaguuagaccugccuccc

SEQ ID NO: 1186759 - RNA, 24 nt, Human
uagacaacgaaacuucugaaguuu

SEQ ID NO: 1186760 - RNA, 24 nt, Human
uagcccuuugggaggcugaaauag

SEQ ID NO: 1186761 - RNA, 18 nt, Human
uagcgagaccccaucuca

SEQ ID NO: 1186762 - RNA, 18 nt, Human
uaguugaugccauucuua

SEQ ID NO: 1186763 - RNA, 19 nt, Human
uauaugcucaacaauugaa

SEQ ID NO: 1186764 - RNA, 22 nt, Human
uaucaaaaggaaagugacuuug

SEQ ID NO: 1186765 - RNA, 19 nt, Human
uaucuggagaaagauggag

SEQ ID NO: 1186766 - RNA, 20 nt, Human
uaugccaccuaaugauaaaa

SEQ ID NO: 1186767 - RNA, 21 nt, Human
uauggggaauccacucaaagg

SEQ ID NO: 1186768 - RNA, 19 nt, Human
uauguguauauacauauau

SEQ ID NO: 1186769 - RNA, 20 nt, Human
uauguguauauacauauaug

SEQ ID NO: 1186770 - RNA, 21 nt, Human
ucaaagcagaaauacacaaac

SEQ ID NO: 1186771 - RNA, 23 nt, Human
ucacuggagaccaggaguucaag

SEQ ID NO: 1186772 - RNA, 22 nt, Human
ucauacccaaaugagcaaacca

SEQ ID NO: 1186773 - RNA, 19 nt, Human
ucauagcuauuuaaaucug

SEQ ID NO: 1186774 - RNA, 22 nt, Human
ucauucucauuuuaacuagaaa

SEQ ID NO: 1186775 - RNA, 20 nt, Human
uccagaugaaauguugcaga

SEQ ID NO: 1186776 - RNA, 19 nt, Human
uccagccugggugacaaga

SEQ ID NO: 1186777 - RNA, 21 nt, Human
uccuaauuaaugaggaacuuc

SEQ ID NO: 1186778 - RNA, 23 nt, Human
ucuaccguaccccaaaaauuacc

SEQ ID NO: 1186779 - RNA, 21 nt, Human
ucucuacuaaaaauacaaaaa

SEQ ID NO: 1186780 - RNA, 21 nt, Human
ucuggccuauuuucugucacu

SEQ ID NO: 1186781 - RNA, 23 nt, Human
ucuggccuauuuucugucacuuc

SEQ ID NO: 1186782 - RNA, 23 nt, Human
ucuuugagcccauggguggcacu

SEQ ID NO: 1186783 - RNA, 19 nt, Human
ugaaaaaagaucauuggaa

SEQ ID NO: 1186784 - RNA, 22 nt, Human
ugaaaauaugagaauugaccca

SEQ ID NO: 1186785 - RNA, 18 nt, Human
ugaaacuacagauaucaa

SEQ ID NO: 1186786 - RNA, 26 nt, Human
ugaaauaggaggaucacuggagacca

SEQ ID NO: 1186787 - RNA, 18 nt, Human
ugaacuuucacaugugcu

SEQ ID NO: 1186788 - RNA, 18 nt, Human
ugaagguucuguuugggc

SEQ ID NO: 1186789 - RNA, 20 nt, Human
ugaauuagaaauaaguuuua

SEQ ID NO: 1186790 - RNA, 18 nt, Human
ugacagaugaugaaacua

SEQ ID NO: 1186791 - RNA, 19 nt, Human
ugacagaugaugaaacuac

SEQ ID NO: 1186792 - RNA, 18 nt, Human
ugacuuuggauuuggggg

SEQ ID NO: 1186793 - RNA, 25 nt, Human
ugacuuuggauuugggggcugaguu

SEQ ID NO: 1186794 - RNA, 18 nt, Human
ugagaaaauuugugaaua

SEQ ID NO: 1186795 - RNA, 20 nt, Human
ugaggcaaaaaaugauaaac

SEQ ID NO: 1186796 - RNA, 20 nt, Human
ugaggcaggagaaucgcuug

SEQ ID NO: 1186797 - RNA, 23 nt, Human
ugaggcaggagaaucgcuugaac

SEQ ID NO: 1186798 - RNA, 23 nt, Human
ugaggcaggagaaucgcuugaac

SEQ ID NO: 1186799 - RNA, 20 nt, Human
ugagggaaaaaaugcuuggu

SEQ ID NO: 1186800 - RNA, 20 nt, Human
ugauuugauccucauaccca

SEQ ID NO: 1186801 - RNA, 25 nt, Human
ugcauucuaaacugucuggcuaacc

SEQ ID NO: 1186802 - RNA, 23 nt, Human
ugcuaaaaccacauauuuccuac

SEQ ID NO: 1186803 - RNA, 19 nt, Human
ugcuauaaaaauuucuggg

SEQ ID NO: 1186804 - RNA, 20 nt, Human
uggaaagcaguugcucugag

SEQ ID NO: 1186805 - RNA, 26 nt, Human
uggagaaugaggaaauggguaguuga

SEQ ID NO: 1186806 - RNA, 24 nt, Human
uggcucagguacacaauucaacag

SEQ ID NO: 1186807 - RNA, 23 nt, Human
uggcuuguacuagaggaagugau

SEQ ID NO: 1186808 - RNA, 25 nt, Human
ugggaagaaucuuuaaaaauccauu

SEQ ID NO: 1186809 - RNA, 19 nt, Human
ugggaggcugaaauaggag

SEQ ID NO: 1186810 - RNA, 24 nt, Human
ugggaggcugaaauaggaggauca

SEQ ID NO: 1186811 - RNA, 18 nt, Human
uguguauauacauauaug

SEQ ID NO: 1186812 - RNA, 20 nt, Human
uuaaagcaaaagacaggagc

SEQ ID NO: 1186813 - RNA, 23 nt, Human
uuaaagcaaaagacaggagcaaa

SEQ ID NO: 1186814 - RNA, 19 nt, Human
uuaagagaucacuuguugu

SEQ ID NO: 1186815 - RNA, 18 nt, Human
uucaaaaagugguuaugg

SEQ ID NO: 1186816 - RNA, 23 nt, Human
uucaaagcagaaauacacaaaca

SEQ ID NO: 1186817 - RNA, 22 nt, Human
uucaggaggcacuauuaagaga

SEQ ID NO: 1186818 - RNA, 21 nt, Human
uuccuggcuggaagaauguuu

SEQ ID NO: 1186819 - RNA, 19 nt, Human
uucuuugagcccaugggug

SEQ ID NO: 1186820 - RNA, 23 nt, Human
uugaaguaaacacugcuuaguau

SEQ ID NO: 1186821 - RNA, 21 nt, Human
uugacuaaauaaaugaagaaa

SEQ ID NO: 1186822 - RNA, 21 nt, Human
uugacuggcacuugggugaaa

SEQ ID NO: 1186823 - RNA, 22 nt, Human
uugagcccauggguggcacuaa

SEQ ID NO: 1186824 - RNA, 20 nt, Human
uugcagugagccaggaucac

SEQ ID NO: 1186825 - RNA, 24 nt, Human
uugccaaauugcauucuaaacugu

SEQ ID NO: 1186826 - RNA, 25 nt, Human
uugggaggcugaaauaggaggauca

SEQ ID NO: 1186827 - RNA, 23 nt, Human
uuuacaucaaacacauguauaug

SEQ ID NO: 1186828 - RNA, 21 nt, Human
uuuggcucagguacacaauuc

SEQ ID NO: 1186829 - RNA, 20 nt, Human
auguggccaaaaggguuaua

SEQ ID NO: 1186830 - RNA, 24 nt, Human
auuacugagauccccagaacgcca

SEQ ID NO: 1186831 - RNA, 20 nt, Human
auucuguuuuucucacuuca

SEQ ID NO: 1186832 - RNA, 23 nt, Human
caacgcaaacacuuaguauccca

SEQ ID NO: 1186833 - RNA, 24 nt, Human
cacuccuguuccucucauuugaga

SEQ ID NO: 1186834 - RNA, 25 nt, Human
cacuccuguuccucucauuugagag

SEQ ID NO: 1186835 - RNA, 18 nt, Human
cagcaucucucagagucc

SEQ ID NO: 1186836 - RNA, 20 nt, Human
ccaauauuugcaacgcaaaa

SEQ ID NO: 1186837 - RNA, 30 nt, Human
cuccugcuuccauagacccugcuuuugauu

SEQ ID NO: 1186838 - RNA, 23 nt, Human
cucucuuagcucuuucucuucca

SEQ ID NO: 1186839 - RNA, 22 nt, Human
cucuuccacaacgaacauguug

SEQ ID NO: 1186840 - RNA, 25 nt, Human
cugcauucuguuuuucucacuucac

SEQ ID NO: 1186841 - RNA, 18 nt, Human
cugcuuuugauacagggg

SEQ ID NO: 1186842 - RNA, 18 nt, Human
cugggugaaauccaagcu

SEQ ID NO: 1186843 - RNA, 18 nt, Human
ggagagucuccauuggaa

SEQ ID NO: 1186844 - RNA, 18 nt, Human
uagaaaaugcugaauaau

SEQ ID NO: 1186845 - RNA, 20 nt, Human
uagaaaaugcugaauaauug

SEQ ID NO: 1186846 - RNA, 19 nt, Human
uagagucuccgagcauuuc

SEQ ID NO: 1186847 - RNA, 19 nt, Human
uauuguuaauuauccuccu

SEQ ID NO: 1186848 - RNA, 20 nt, Human
ucagagucccacaagccaac

SEQ ID NO: 1186849 - RNA, 18 nt, Human
uccaagcuggguaguuga

SEQ ID NO: 1186850 - RNA, 27 nt, Human
uccaggcucaugugauuaaaaauccac

SEQ ID NO: 1186851 - RNA, 20 nt, Human
uccauagacccugcuuuuga

SEQ ID NO: 1186852 - RNA, 20 nt, Human
uccuugauucuacccguuug

SEQ ID NO: 1186853 - RNA, 21 nt, Human
ucucagagucccacaagccaa

SEQ ID NO: 1186854 - RNA, 19 nt, Human
ucuccauuggaaguccucc

SEQ ID NO: 1186855 - RNA, 21 nt, Human
ucucccacacaaagcucuugg

SEQ ID NO: 1186856 - RNA, 27 nt, Human
ucucuuagcucuuucucuucgggccgc

SEQ ID NO: 1186857 - RNA, 18 nt, Human
ucuugcuuuuuugcaugu

SEQ ID NO: 1186858 - RNA, 18 nt, Human
ugagagcacacuccuuga

SEQ ID NO: 1186859 - RNA, 18 nt, Human
ugagccaaauauucaggu

SEQ ID NO: 1186860 - RNA, 24 nt, Human
ugcaacgcaaacacuuaguauccc

SEQ ID NO: 1186861 - RNA, 23 nt, Human
ugcuugaaacgaaccuugaaagc

SEQ ID NO: 1186862 - RNA, 19 nt, Human
ugggugaaauccaagcugg

SEQ ID NO: 1186863 - RNA, 21 nt, Human
ugugugaagggcucugacaca

SEQ ID NO: 1186864 - RNA, 19 nt, Human
uugaaagcugcauucuguu

SEQ ID NO: 1186865 - RNA, 20 nt, Human
uugcagugguagaaaaugcu

SEQ ID NO: 1186866 - RNA, 23 nt, Human
uuggaaguccuccugcuuccaua

SEQ ID NO: 1186867 - RNA, 26 nt, Human
uuucggugcucugcucugagcuucuc

SEQ ID NO: 1186868 - RNA, 21 nt, Human
aaccccacuuuccuuuccagc

SEQ ID NO: 1186869 - RNA, 24 nt, Human
accacguuuucuuuauccauucau

SEQ ID NO: 1186870 - RNA, 19 nt, Human
accagagaccccagauacc

SEQ ID NO: 1186871 - RNA, 21 nt, Human
accauucccaccuuccuccca

SEQ ID NO: 1186872 - RNA, 21 nt, Human
acuguugugcuaucaaauauu

SEQ ID NO: 1186873 - RNA, 18 nt, Human
agcacauuguuaaugagc

SEQ ID NO: 1186874 - RNA, 21 nt, Human
agugcugcaauaaacaugggg

SEQ ID NO: 1186875 - RNA, 20 nt, Human
augaucaccugcggggaggc

SEQ ID NO: 1186876 - RNA, 20 nt, Human
caacugcgccccgcccacag

SEQ ID NO: 1186877 - RNA, 19 nt, Human
caauggcuguagucccaga

SEQ ID NO: 1186878 - RNA, 24 nt, Human
cacagcaauggcuguagucccaga

SEQ ID NO: 1186879 - RNA, 27 nt, Human
cacagcaauggcuguagucccagaugc

SEQ ID NO: 1186880 - RNA, 27 nt, Human
caccagagaccccagauaccugggcga

SEQ ID NO: 1186881 - RNA, 20 nt, Human
cacccgccucugggagcggg

SEQ ID NO: 1186882 - RNA, 22 nt, Human
caccugagacccgaggacaccu

SEQ ID NO: 1186883 - RNA, 24 nt, Human
cagccaccugagacccgaggacac

SEQ ID NO: 1186884 - RNA, 23 nt, Human
cagccaggcaaccucaagcccuc

SEQ ID NO: 1186885 - RNA, 18 nt, Human
ccaggccucgccuguggc

SEQ ID NO: 1186886 - RNA, 22 nt, Human
ccauucccaccuuccucccaac

SEQ ID NO: 1186887 - RNA, 19 nt, Human
ccccacuuuccuuuccagc

SEQ ID NO: 1186888 - RNA, 18 nt, Human
ccuuggccaggccucgcc

SEQ ID NO: 1186889 - RNA, 19 nt, Human
cgaggacaccugcaggagg

SEQ ID NO: 1186890 - RNA, 20 nt, Human
cuacucucuauguccaagag

SEQ ID NO: 1186891 - RNA, 19 nt, Human
cucaggucucugcacccuc

SEQ ID NO: 1186892 - RNA, 21 nt, Human
cucauuuuuuuaauggcugaa

SEQ ID NO: 1186893 - RNA, 18 nt, Human
cucucaagaccugcccua

SEQ ID NO: 1186894 - RNA, 20 nt, Human
cugcacccucccccaacugc

SEQ ID NO: 1186895 - RNA, 21 nt, Human
cuuuccuuuccagcuucuggu

SEQ ID NO: 1186896 - RNA, 20 nt, Human
gccccgccucuguccgcacc

SEQ ID NO: 1186897 - RNA, 23 nt, Human
gccccgccucuguccgcaccacc

SEQ ID NO: 1186898 - RNA, 20 nt, Human
gcuggaccucucaagaccug

SEQ ID NO: 1186899 - RNA, 22 nt, Human
ggauggugcggggggagaacag

SEQ ID NO: 1186900 - RNA, 20 nt, Human
guugugcuaucaaauauuag

SEQ ID NO: 1186901 - RNA, 19 nt, Human
uaagugagaacaugugaug

SEQ ID NO: 1186902 - RNA, 23 nt, Human
uagaucccacaaauaagugagaa

SEQ ID NO: 1186903 - RNA, 18 nt, Human
uccaagaguucaauuguu

SEQ ID NO: 1186904 - RNA, 22 nt, Human
ucccaaccccacuuuccuuucc

SEQ ID NO: 1186905 - RNA, 23 nt, Human
ucccaccuuccucccaaccccac

SEQ ID NO: 1186906 - RNA, 23 nt, Human
ucccccaacugcgccccgcccac

SEQ ID NO: 1186907 - RNA, 21 nt, Human
uccucccaaccccacuuuccu

SEQ ID NO: 1186908 - RNA, 24 nt, Human
ucuuggcuguugugaacagugcug

SEQ ID NO: 1186909 - RNA, 21 nt, Human
ugacaguagucacacuguugu

SEQ ID NO: 1186910 - RNA, 20 nt, Human
ugcccuagaugcgcccacac

SEQ ID NO: 1186911 - RNA, 22 nt, Human
ugcggggggagaacagcugcac

SEQ ID NO: 1186912 - RNA, 20 nt, Human
uggcugaagaguacuccauu

SEQ ID NO: 1186913 - RNA, 22 nt, Human
uguaccuauuaaccauucccac

SEQ ID NO: 1186914 - RNA, 18 nt, Human
uguccaagaguucaauug

SEQ ID NO: 1186915 - RNA, 24 nt, Human
uguugugaacagugcugcaauaaa

SEQ ID NO: 1186916 - RNA, 24 nt, Human
uucugugccuggcuuauuucacuu

SEQ ID NO: 1186917 - RNA, 19 nt, Human
uuguaccuauuaaccauuc

SEQ ID NO: 1186918 - RNA, 21 nt, Human
uuugucuuucugugccuggcu

SEQ ID NO: 1186919 - RNA, 21 nt, Human
aaaagcagcaaagccccacca

SEQ ID NO: 1186920 - RNA, 22 nt, Human
aacgaaaaaagacugggagaaa

SEQ ID NO: 1186921 - RNA, 21 nt, Human
aaucccaucucuucucacauc

SEQ ID NO: 1186922 - RNA, 18 nt, Human
aauggagaaaccagcgga

SEQ ID NO: 1186923 - RNA, 19 nt, Human
acacagcgucucaggggcc

SEQ ID NO: 1186924 - RNA, 20 nt, Human
accccuaggagccaacagaa

SEQ ID NO: 1186925 - RNA, 20 nt, Human
acccgccucaccccuccgcu

SEQ ID NO: 1186926 - RNA, 18 nt, Human
acccuagagggucgagcc

SEQ ID NO: 1186927 - RNA, 22 nt, Human
acucagagcccagcucagucuc

SEQ ID NO: 1186928 - RNA, 26 nt, Human
agaaagacagccgcgcccccugcagg

SEQ ID NO: 1186929 - RNA, 18 nt, Human
agaaagagccagcguaaa

SEQ ID NO: 1186930 - RNA, 22 nt, Human
agacugggagaaagagccagcg

SEQ ID NO: 1186931 - RNA, 21 nt, Human
agcacuggguggaggccucug

SEQ ID NO: 1186932 - RNA, 24 nt, Human
agcuggggacaaggguggcuccca

SEQ ID NO: 1186933 - RNA, 25 nt, Human
aggagcagcagaggaaggccgcggc

SEQ ID NO: 1186934 - RNA, 18 nt, Human
aggcaaaagcagcaaagc

SEQ ID NO: 1186935 - RNA, 22 nt, Human
aggcaaaagcagcaaagcccca

SEQ ID NO: 1186936 - RNA, 24 nt, Human
aggcaaaagcagcaaagccccacc

SEQ ID NO: 1186937 - RNA, 18 nt, Human
agugcccaccccgguggg

SEQ ID NO: 1186938 - RNA, 20 nt, Human
agugcccaccuguucccugc

SEQ ID NO: 1186939 - RNA, 22 nt, Human
auaucacccccucccucaccag

SEQ ID NO: 1186940 - RNA, 21 nt, Human
caaaaggcgagccccacgccu

SEQ ID NO: 1186941 - RNA, 20 nt, Human
caacggaagaaugcgaggaa

SEQ ID NO: 1186942 - RNA, 24 nt, Human
cacagcaagcaccagcggcccccg

SEQ ID NO: 1186943 - RNA, 20 nt, Human
caccacggcgccugcccucu

SEQ ID NO: 1186944 - RNA, 19 nt, Human
caccagccgccggcccagc

SEQ ID NO: 1186945 - RNA, 18 nt, Human
cacccagggaggaccuca

SEQ ID NO: 1186946 - RNA, 19 nt, Human
cacccccucccucaccagc

SEQ ID NO: 1186947 - RNA, 21 nt, Human
caccccuaggagccaacagaa

SEQ ID NO: 1186948 - RNA, 20 nt, Human
caccuccuuccgcggagggu

SEQ ID NO: 1186949 - RNA, 26 nt, Human
caccucugcaucccccucuuuggaaa

SEQ ID NO: 1186950 - RNA, 23 nt, Human
caccuguucccugcgaucuuccg

SEQ ID NO: 1186951 - RNA, 21 nt, Human
cacgcugugaccaaggcugug

SEQ ID NO: 1186952 - RNA, 24 nt, Human
cacgcugugaccaaggcuguggug

SEQ ID NO: 1186953 - RNA, 22 nt, Human
cagccgccggcccagcugggga

SEQ ID NO: 1186954 - RNA, 23 nt, Human
cagcgucucaggggcaggcuggg

SEQ ID NO: 1186955 - RNA, 22 nt, Human
caggauuagggagaagaggggg

SEQ ID NO: 1186956 - RNA, 23 nt, Human
caucccugcccugagguccagag

SEQ ID NO: 1186957 - RNA, 24 nt, Human
ccaccacggcgccugcccucugga

SEQ ID NO: 1186958 - RNA, 24 nt, Human
ccacccagggaggaccucagccgc

SEQ ID NO: 1186959 - RNA, 24 nt, Human
ccacgucagccggacugaagcucu

SEQ ID NO: 1186960 - RNA, 18 nt, Human
ccacugggaagaagcaga

SEQ ID NO: 1186961 - RNA, 23 nt, Human
ccagcacuggguggaggccucug

SEQ ID NO: 1186962 - RNA, 19 nt, Human
ccagccgccggcccagcug

SEQ ID NO: 1186963 - RNA, 26 nt, Human
ccccaccaggaauagugauggccacc

SEQ ID NO: 1186964 - RNA, 23 nt, Human
cccccgugcuggacagcauggcu

SEQ ID NO: 1186965 - RNA, 21 nt, Human
cccugcaccgccugcggcccu

SEQ ID NO: 1186966 - RNA, 19 nt, Human
ccgccgccgccugcccucc

SEQ ID NO: 1186967 - RNA, 21 nt, Human
ccgcugggucgcucuggccgc

SEQ ID NO: 1186968 - RNA, 23 nt, Human
ccucaaccgcucagccucccucg

SEQ ID NO: 1186969 - RNA, 23 nt, Human
ccuccgaaaaaugagggcacaga

SEQ ID NO: 1186970 - RNA, 19 nt, Human
ccugcccugagguccagag

SEQ ID NO: 1186971 - RNA, 18 nt, Human
ccuggaggugcaccagcc

SEQ ID NO: 1186972 - RNA, 22 nt, Human
cgagcggcaaaaggcgagcccc

SEQ ID NO: 1186973 - RNA, 21 nt, Human
cggcucuucccugcccuugcc

SEQ ID NO: 1186974 - RNA, 23 nt, Human
cgggcacccccaccacggcgccu

SEQ ID NO: 1186975 - RNA, 23 nt, Human
cguggcacggauaucacccccuc

SEQ ID NO: 1186976 - RNA, 23 nt, Human
cuccacuccacaucaggcuacaa

SEQ ID NO: 1186977 - RNA, 19 nt, Human
cuccuggcucuuggguucu

SEQ ID NO: 1186978 - RNA, 21 nt, Human
cugcagacugauuucccgcca

SEQ ID NO: 1186979 - RNA, 22 nt, Human
cuggcacagccuggaggugcac

SEQ ID NO: 1186980 - RNA, 26 nt, Human
cuuaaaacgaaaaaagacugggagaa

SEQ ID NO: 1186981 - RNA, 20 nt, Human
cuuguuguccuggcaacccc

SEQ ID NO: 1186982 - RNA, 23 nt, Human
gaagccgcugucuaacaucccug

SEQ ID NO: 1186983 - RNA, 21 nt, Human
gaagcucucccugcaccgccu

SEQ ID NO: 1186984 - RNA, 18 nt, Human
gacagcauggcuaauggg

SEQ ID NO: 1186985 - RNA, 19 nt, Human
gagcagcagaggaaggccg

SEQ ID NO: 1186986 - RNA, 20 nt, Human
gaugggggcagcggggcugg

SEQ ID NO: 1186987 - RNA, 24 nt, Human
gcaaaaggcgagccccacgccuga

SEQ ID NO: 1186988 - RNA, 21 nt, Human
gcaaacaaugacaccuccuuc

SEQ ID NO: 1186989 - RNA, 24 nt, Human
gcaagcaccagcggcccccgugcu

SEQ ID NO: 1186990 - RNA, 21 nt, Human
gcauuuuaugccuagggcagg

SEQ ID NO: 1186991 - RNA, 23 nt, Human
gccgccgccugcccuccagccuc

SEQ ID NO: 1186992 - RNA, 24 nt, Human
gccuucaacggaagggucuauggc

SEQ ID NO: 1186993 - RNA, 21 nt, Human
ggacaaggguggcucccaccc

SEQ ID NO: 1186994 - RNA, 18 nt, Human
ggcucccacccagggagg

SEQ ID NO: 1186995 - RNA, 21 nt, Human
gggcacagaggauagugccca

SEQ ID NO: 1186996 - RNA, 22 nt, Human
gggcagcggggcuggggcuggg

SEQ ID NO: 1186997 - RNA, 19 nt, Human
gggcucggguguagggugc

SEQ ID NO: 1186998 - RNA, 20 nt, Human
gggggcagcggggcuggggc

SEQ ID NO: 1186999 - RNA, 21 nt, Human
ggguggaggccucugcuggcu

SEQ ID NO: 1187000 - RNA, 20 nt, Human
gugcaggugagugggcccgg

SEQ ID NO: 1187001 - RNA, 21 nt, Human
uaaugugguacagcagugguc

SEQ ID NO: 1187002 - RNA, 29 nt, Human
uacacucagagcccagcucagucucacaa

SEQ ID NO: 1187003 - RNA, 18 nt, Human
uacagcaguggucacaga

SEQ ID NO: 1187004 - RNA, 20 nt, Human
uacagcaguggucacagagc

SEQ ID NO: 1187005 - RNA, 22 nt, Human
uaccacgugcucccuaacucug

SEQ ID NO: 1187006 - RNA, 19 nt, Human
uagugcccaccccgguggg

SEQ ID NO: 1187007 - RNA, 24 nt, Human
uaugcaauaaaaaaugauugauuc

SEQ ID NO: 1187008 - RNA, 21 nt, Human
ucaaacaggucaggaaucuga

SEQ ID NO: 1187009 - RNA, 24 nt, Human
ucacagcaagcaccagcggccccc

SEQ ID NO: 1187010 - RNA, 19 nt, Human
ucacccccucccucaccag

SEQ ID NO: 1187011 - RNA, 22 nt, Human
ucagagcccagcucagucucac

SEQ ID NO: 1187012 - RNA, 19 nt, Human
ucagccucccucggcuccc

SEQ ID NO: 1187013 - RNA, 21 nt, Human
ucaggauuagggagaagaggg

SEQ ID NO: 1187014 - RNA, 19 nt, Human
ucagggaaguggugacacu

SEQ ID NO: 1187015 - RNA, 20 nt, Human
uccacuccacaucaggcuac

SEQ ID NO: 1187016 - RNA, 21 nt, Human
ucccagcccaacggaagaaug

SEQ ID NO: 1187017 - RNA, 19 nt, Human
ucccugcaccgccugcggc

SEQ ID NO: 1187018 - RNA, 23 nt, Human
ucccugcaccgccugcggcccug

SEQ ID NO: 1187019 - RNA, 20 nt, Human
ucccugcgaucuuccgcggg

SEQ ID NO: 1187020 - RNA, 22 nt, Human
ucgagcccugggcuccuggcuc

SEQ ID NO: 1187021 - RNA, 19 nt, Human
ucugcagcuauggucucuc

SEQ ID NO: 1187022 - RNA, 18 nt, Human
ugacacuuguguccagcc

SEQ ID NO: 1187023 - RNA, 24 nt, Human
ugagguccagagaccuugcauuuu

SEQ ID NO: 1187024 - RNA, 20 nt, Human
ugauuccagcccaccuaggg

SEQ ID NO: 1187025 - RNA, 25 nt, Human
ugcaccagccuguccugugugcucu

SEQ ID NO: 1187026 - RNA, 19 nt, Human
ugcaggugagugggcccgg

SEQ ID NO: 1187027 - RNA, 20 nt, Human
ugccuagggcaggguugguu

SEQ ID NO: 1187028 - RNA, 21 nt, Human
ugccuagggcaggguugguuu

SEQ ID NO: 1187029 - RNA, 18 nt, Human
ugccuggccuggccgugg

SEQ ID NO: 1187030 - RNA, 18 nt, Human
ugcgugagccugcuggca

SEQ ID NO: 1187031 - RNA, 23 nt, Human
uggagaaaccagcggaugcugca

SEQ ID NO: 1187032 - RNA, 23 nt, Human
uggcaucgguccugcagacugau

SEQ ID NO: 1187033 - RNA, 18 nt, Human
ugggaagaagcagauggg

SEQ ID NO: 1187034 - RNA, 21 nt, Human
ugggaggagcugacccgucgg

SEQ ID NO: 1187035 - RNA, 18 nt, Human
ugggggcagcggggcugg

SEQ ID NO: 1187036 - RNA, 20 nt, Human
ugggggcagcggggcugggg

SEQ ID NO: 1187037 - RNA, 20 nt, Human
ugugagcaggggcagagacu

SEQ ID NO: 1187038 - RNA, 22 nt, Human
uucagggaaguggugacacuug

SEQ ID NO: 1187039 - RNA, 19 nt, Human
uuccuggcacagccuggag

SEQ ID NO: 1187040 - RNA, 18 nt, Human
uuuccuggcacagccugg

SEQ ID NO: 1187041 - RNA, 20 nt, Human
aaaguggccuuggccugugg

SEQ ID NO: 1187042 - RNA, 18 nt, Human
acccaggcgguccccagc

SEQ ID NO: 1187043 - RNA, 23 nt, Human
accccuggcucuccugggcugag

SEQ ID NO: 1187044 - RNA, 21 nt, Human
acccgggccucagcgccuagc

SEQ ID NO: 1187045 - RNA, 21 nt, Human
acuggaccccuggcucuccug

SEQ ID NO: 1187046 - RNA, 22 nt, Human
agaagaccagccugugcacugu

SEQ ID NO: 1187047 - RNA, 19 nt, Human
agaagggccaaggaggggu

SEQ ID NO: 1187048 - RNA, 24 nt, Human
agacaggaagugcccagcagcagc

SEQ ID NO: 1187049 - RNA, 21 nt, Human
agacaggaugaggucguccag

SEQ ID NO: 1187050 - RNA, 24 nt, Human
agcagccaggugcuguccggugcc

SEQ ID NO: 1187051 - RNA, 19 nt, Human
agcagugcggccacacagg

SEQ ID NO: 1187052 - RNA, 21 nt, Human
agccacagcgccccugugggu

SEQ ID NO: 1187053 - RNA, 25 nt, Human
agccaggugcuguccggugccagau

SEQ ID NO: 1187054 - RNA, 22 nt, Human
aggaagccaaggacagaguuca

SEQ ID NO: 1187055 - RNA, 24 nt, Human
aggaagcggggccuugucuggggu

SEQ ID NO: 1187056 - RNA, 25 nt, Human
aggaggcugccucucgcaggguugg

SEQ ID NO: 1187057 - RNA, 21 nt, Human
aggcuguggaggaucacgccg

SEQ ID NO: 1187058 - RNA, 26 nt, Human
agggagcaaggaggguauugggacag

SEQ ID NO: 1187059 - RNA, 18 nt, Human
aggggcuggggggcuggg

SEQ ID NO: 1187060 - RNA, 19 nt, Human
aggggcuggggggcugggg

SEQ ID NO: 1187061 - RNA, 23 nt, Human
agggucccugcuuuaguuagggu

SEQ ID NO: 1187062 - RNA, 19 nt, Human
auagaagaccagccugugc

SEQ ID NO: 1187063 - RNA, 18 nt, Human
cacacacgaaguugcaca

SEQ ID NO: 1187064 - RNA, 18 nt, Human
cacagggucagggucucu

SEQ ID NO: 1187065 - RNA, 19 nt, Human
cacgccgccacugcagccg

SEQ ID NO: 1187066 - RNA, 18 nt, Human
cacggccuggccagggcu

SEQ ID NO: 1187067 - RNA, 18 nt, Human
cacgugaggaagcggggc

SEQ ID NO: 1187068 - RNA, 20 nt, Human
cacuccgugggugcugcugg

SEQ ID NO: 1187069 - RNA, 19 nt, Human
cagacccacgacgcccccc

SEQ ID NO: 1187070 - RNA, 30 nt, Human
cagagccucagcuugcaagaggaggcugcu

SEQ ID NO: 1187071 - RNA, 22 nt, Human
cagagucccaaucuggggccca

SEQ ID NO: 1187072 - RNA, 21 nt, Human
cagcaggaaccucugucucuc

SEQ ID NO: 1187073 - RNA, 20 nt, Human
cagcgcggugguuccgggac

SEQ ID NO: 1187074 - RNA, 19 nt, Human
cagcucccugcuggucagg

SEQ ID NO: 1187075 - RNA, 20 nt, Human
cagcugcccacccgcccucc

SEQ ID NO: 1187076 - RNA, 21 nt, Human
cagcugcccacccgcccuccc

SEQ ID NO: 1187077 - RNA, 22 nt, Human
caggaagccaaggacagaguuc

SEQ ID NO: 1187078 - RNA, 20 nt, Human
caggaggcagcggcugcagg

SEQ ID NO: 1187079 - RNA, 22 nt, Human
caggcgguccccagcuccccuc

SEQ ID NO: 1187080 - RNA, 18 nt, Human
caggggucccagggcagc

SEQ ID NO: 1187081 - RNA, 18 nt, Human
caggugggagugaggaug

SEQ ID NO: 1187082 - RNA, 24 nt, Human
caggugggcacuguggccccaggc

SEQ ID NO: 1187083 - RNA, 26 nt, Human
caguucagccacaucugaccccuugg

SEQ ID NO: 1187084 - RNA, 20 nt, Human
caucuagagccacagcgccc

SEQ ID NO: 1187085 - RNA, 26 nt, Human
ccaaaccgacaaacuccagcucgggg

SEQ ID NO: 1187086 - RNA, 18 nt, Human
ccaaggccugguggacag

SEQ ID NO: 1187087 - RNA, 19 nt, Human
ccaccaaaccgacaaacuc

SEQ ID NO: 1187088 - RNA, 23 nt, Human
ccacgagccuuggggguccaggg

SEQ ID NO: 1187089 - RNA, 20 nt, Human
ccagacccacgacgcccccc

SEQ ID NO: 1187090 - RNA, 24 nt, Human
ccagccucgggggacucaaagucu

SEQ ID NO: 1187091 - RNA, 21 nt, Human
ccagcugcccacccgcccucc

SEQ ID NO: 1187092 - RNA, 22 nt, Human
ccaggccagggggucugugggg

SEQ ID NO: 1187093 - RNA, 19 nt, Human
ccaggcuagccugucucca

SEQ ID NO: 1187094 - RNA, 20 nt, Human
ccaguguguggucugaguga

SEQ ID NO: 1187095 - RNA, 23 nt, Human
cccagcccccagccucgggggac

SEQ ID NO: 1187096 - RNA, 23 nt, Human
cccaggaacaggaccaaggcggg

SEQ ID NO: 1187097 - RNA, 21 nt, Human
ccccacgcuggcguccuccca

SEQ ID NO: 1187098 - RNA, 26 nt, Human
ccccagagucugcaggaacagcugga

SEQ ID NO: 1187099 - RNA, 23 nt, Human
ccccagcugcccacccgcccucc

SEQ ID NO: 1187100 - RNA, 22 nt, Human
ccccagggcccugugcucugcc

SEQ ID NO: 1187101 - RNA, 22 nt, Human
ccccuggcucuccugggcugag

SEQ ID NO: 1187102 - RNA, 18 nt, Human
cccgcccuccccuugggc

SEQ ID NO: 1187103 - RNA, 19 nt, Human
cccgggccucagcgccuag

SEQ ID NO: 1187104 - RNA, 23 nt, Human
cccggggggcgccgggccccaga

SEQ ID NO: 1187105 - RNA, 20 nt, Human
cccucgguggguuccaacgg

SEQ ID NO: 1187106 - RNA, 18 nt, Human
cccugcuuuaguuagggu

SEQ ID NO: 1187107 - RNA, 23 nt, Human
cccugcuuuaguuagggucuggg

SEQ ID NO: 1187108 - RNA, 18 nt, Human
ccggggucccuggaggag

SEQ ID NO: 1187109 - RNA, 25 nt, Human
ccgugggugcugcuggcaccugggg

SEQ ID NO: 1187110 - RNA, 20 nt, Human
ccuccgagacuggucugcag

SEQ ID NO: 1187111 - RNA, 23 nt, Human
ccugccagccagggccccagggc

SEQ ID NO: 1187112 - RNA, 24 nt, Human
ccuugggcaccccccacgagccuu

SEQ ID NO: 1187113 - RNA, 22 nt, Human
cgccccccgggccugucugccc

SEQ ID NO: 1187114 - RNA, 26 nt, Human
cgucgcacagcugcuggggcuccacg

SEQ ID NO: 1187115 - RNA, 19 nt, Human
cuagagccacagcgccccu

SEQ ID NO: 1187116 - RNA, 20 nt, Human
cuccugccagccagggcccc

SEQ ID NO: 1187117 - RNA, 19 nt, Human
cucuaggucaucuagagcc

SEQ ID NO: 1187118 - RNA, 22 nt, Human
cucugcgccaugggucagcucc

SEQ ID NO: 1187119 - RNA, 19 nt, Human
cugagugaggcccaggacc

SEQ ID NO: 1187120 - RNA, 25 nt, Human
cugcggcccugcuuguccccagcug

SEQ ID NO: 1187121 - RNA, 20 nt, Human
cugcucgaagucacaggcga

SEQ ID NO: 1187122 - RNA, 18 nt, Human
cuggaccccuggcucucc

SEQ ID NO: 1187123 - RNA, 25 nt, Human
gagccacagcgccccuguggguggc

SEQ ID NO: 1187124 - RNA, 19 nt, Human
gagcgguuccaugggccca

SEQ ID NO: 1187125 - RNA, 21 nt, Human
gagcugggcggcaggggcugg

SEQ ID NO: 1187126 - RNA, 18 nt, Human
gcaacagagucagcacag

SEQ ID NO: 1187127 - RNA, 19 nt, Human
gcaggggcuggggggcugg

SEQ ID NO: 1187128 - RNA, 21 nt, Human
gcaggguggacaccuccgaga

SEQ ID NO: 1187129 - RNA, 22 nt, Human
gcagugcggccacacagggugc

SEQ ID NO: 1187130 - RNA, 24 nt, Human
gccaaggaggggugugaggacccg

SEQ ID NO: 1187131 - RNA, 18 nt, Human
gccacugcagccgcccca

SEQ ID NO: 1187132 - RNA, 19 nt, Human
gccacugcagccgccccac

SEQ ID NO: 1187133 - RNA, 18 nt, Human
gccaggaggaucuggaag

SEQ ID NO: 1187134 - RNA, 19 nt, Human
gccaugggucagcuccacc

SEQ ID NO: 1187135 - RNA, 18 nt, Human
gccccagggcccugugcu

SEQ ID NO: 1187136 - RNA, 22 nt, Human
gcccuccccuugggcacccccc

SEQ ID NO: 1187137 - RNA, 18 nt, Human
gcccugcuuguccccagc

SEQ ID NO: 1187138 - RNA, 23 nt, Human
gccucagcauauccugagaccug

SEQ ID NO: 1187139 - RNA, 21 nt, Human
gccuggguaccagcugcaugu

SEQ ID NO: 1187140 - RNA, 21 nt, Human
gccugugguguggucgugguc

SEQ ID NO: 1187141 - RNA, 19 nt, Human
gcggcaggggcuggggggc

SEQ ID NO: 1187142 - RNA, 23 nt, Human
gcuaggcgcagagucccaaucug

SEQ ID NO: 1187143 - RNA, 18 nt, Human
gcucaggaccaccagcgc

SEQ ID NO: 1187144 - RNA, 25 nt, Human
gcucuguaaauaauaagccaggugg

SEQ ID NO: 1187145 - RNA, 21 nt, Human
gcugccucucgcaggguuggc

SEQ ID NO: 1187146 - RNA, 20 nt, Human
gcuggcguccucccagcccc

SEQ ID NO: 1187147 - RNA, 18 nt, Human
gcuggggggcuggggccc

SEQ ID NO: 1187148 - RNA, 26 nt, Human
ggaccaaggcgggcagcagguggcug

SEQ ID NO: 1187149 - RNA, 21 nt, Human
ggacccgggccucagcgccua

SEQ ID NO: 1187150 - RNA, 18 nt, Human
ggaggaguguaaggggag

SEQ ID NO: 1187151 - RNA, 19 nt, Human
ggcagggagcaaggagggu

SEQ ID NO: 1187152 - RNA, 22 nt, Human
ggccagguggcgucacacaccu

SEQ ID NO: 1187153 - RNA, 21 nt, Human
ggcccggggggcgccgggccc

SEQ ID NO: 1187154 - RNA, 23 nt, Human
ggccuggagagcaggugggcacu

SEQ ID NO: 1187155 - RNA, 22 nt, Human
ggccuggguaccagcugcaugu

SEQ ID NO: 1187156 - RNA, 20 nt, Human
ggcgcaggugagaggucagg

SEQ ID NO: 1187157 - RNA, 20 nt, Human
ggcggcaggggcuggggggc

SEQ ID NO: 1187158 - RNA, 18 nt, Human
ggcuggggcccggggccc

SEQ ID NO: 1187159 - RNA, 22 nt, Human
gggacaggggcgcacagagaag

SEQ ID NO: 1187160 - RNA, 18 nt, Human
gggcccaggaggcagcgg

SEQ ID NO: 1187161 - RNA, 24 nt, Human
gggcuggggggcuggggcccgggg

SEQ ID NO: 1187162 - RNA, 23 nt, Human
ggggcccggggggcgccgggccc

SEQ ID NO: 1187163 - RNA, 21 nt, Human
gguaccagaagcugagacacu

SEQ ID NO: 1187164 - RNA, 21 nt, Human
ggucacuguggggcuacaguc

SEQ ID NO: 1187165 - RNA, 22 nt, Human
ggugggcagaccacagucccag

SEQ ID NO: 1187166 - RNA, 19 nt, Human
gugcugcuggcaccugggg

SEQ ID NO: 1187167 - RNA, 24 nt, Human
gugcugcuggcaccuggggccugg

SEQ ID NO: 1187168 - RNA, 19 nt, Human
uaccagaagcugagacacu

SEQ ID NO: 1187169 - RNA, 21 nt, Human
uaccagaagcugagacacucc

SEQ ID NO: 1187170 - RNA, 22 nt, Human
ucacugccaacuccugccagcc

SEQ ID NO: 1187171 - RNA, 19 nt, Human
uccaaggccugguggacag

SEQ ID NO: 1187172 - RNA, 22 nt, Human
uccaaguccaccaaaccgacaa

SEQ ID NO: 1187173 - RNA, 18 nt, Human
uccacgcagaccuuguuc

SEQ ID NO: 1187174 - RNA, 18 nt, Human
uccaugggcccaggccug

SEQ ID NO: 1187175 - RNA, 25 nt, Human
ucccagcccccagccucgggggacu

SEQ ID NO: 1187176 - RNA, 24 nt, Human
uccccagcuccccucggcgccucc

SEQ ID NO: 1187177 - RNA, 18 nt, Human
uccccgcaguugucuucc

SEQ ID NO: 1187178 - RNA, 25 nt, Human
ucccgggggacaguuggccuggggg

SEQ ID NO: 1187179 - RNA, 18 nt, Human
uccgcagcaggacggggg

SEQ ID NO: 1187180 - RNA, 19 nt, Human
uccggggucccuggaggag

SEQ ID NO: 1187181 - RNA, 21 nt, Human
uccuggagccgcgagcugggc

SEQ ID NO: 1187182 - RNA, 25 nt, Human
uccuggagccgcgagcugggcggca

SEQ ID NO: 1187183 - RNA, 23 nt, Human
ucggagccagcuguagccugagg

SEQ ID NO: 1187184 - RNA, 22 nt, Human
ucgguggguuccaacggccaug

SEQ ID NO: 1187185 - RNA, 21 nt, Human
ucuccccucccccuccagagc

SEQ ID NO: 1187186 - RNA, 19 nt, Human
ucucggacccaggcggucc

SEQ ID NO: 1187187 - RNA, 20 nt, Human
ucugcaggaacagcuggagg

SEQ ID NO: 1187188 - RNA, 22 nt, Human
ugagaagguggaagcuccgggg

SEQ ID NO: 1187189 - RNA, 24 nt, Human
ugagaagguggaagcuccgggguc

SEQ ID NO: 1187190 - RNA, 23 nt, Human
ugagacacgccgccacugcagcc

SEQ ID NO: 1187191 - RNA, 19 nt, Human
ugagagguggccuggguac

SEQ ID NO: 1187192 - RNA, 27 nt, Human
ugaggaagcggggccuugucuggggug

SEQ ID NO: 1187193 - RNA, 19 nt, Human
ugaggcccaggacccucca

SEQ ID NO: 1187194 - RNA, 19 nt, Human
ugaggcccaggacccuccc

SEQ ID NO: 1187195 - RNA, 18 nt, Human
ugcggccacacagggugc

SEQ ID NO: 1187196 - RNA, 23 nt, Human
ugcuggcaccuggggccuggaga

SEQ ID NO: 1187197 - RNA, 22 nt, Human
uggaagggguaggcgcucugga

SEQ ID NO: 1187198 - RNA, 20 nt, Human
uggacagaggcaugguuggg

SEQ ID NO: 1187199 - RNA, 19 nt, Human
uggacagcacgucaccaga

SEQ ID NO: 1187200 - RNA, 18 nt, Human
uggaccccuggcucuccu

SEQ ID NO: 1187201 - RNA, 20 nt, Human
uggaguucacagcuggggcc

SEQ ID NO: 1187202 - RNA, 23 nt, Human
uggaugccucuuucccucggugg

SEQ ID NO: 1187203 - RNA, 20 nt, Human
uggcagagaaggucacucgg

SEQ ID NO: 1187204 - RNA, 23 nt, Human
uggcagagaaggucacucggaaa

SEQ ID NO: 1187205 - RNA, 22 nt, Human
uggccaggcuagccugucucca

SEQ ID NO: 1187206 - RNA, 22 nt, Human
uggcucuguaaauaauaagcca

SEQ ID NO: 1187207 - RNA, 18 nt, Human
ugggagugaggaugggca

SEQ ID NO: 1187208 - RNA, 21 nt, Human
ugggcagaccacagucccaga

SEQ ID NO: 1187209 - RNA, 18 nt, Human
ugggcggcaggggcuggg

SEQ ID NO: 1187210 - RNA, 18 nt, Human
uggggcccauggaggugg

SEQ ID NO: 1187211 - RNA, 18 nt, Human
uggggggcuggggcccgg

SEQ ID NO: 1187212 - RNA, 21 nt, Human
uggggggugggcagaccacag

SEQ ID NO: 1187213 - RNA, 24 nt, Human
ugggugcugcuggcaccuggggcc

SEQ ID NO: 1187214 - RNA, 22 nt, Human
ugguguggucguggucagggcc

SEQ ID NO: 1187215 - RNA, 26 nt, Human
ugucccagccugggcggggcaggugu

SEQ ID NO: 1187216 - RNA, 21 nt, Human
ugugggguccaggagcacaaa

SEQ ID NO: 1187217 - RNA, 18 nt, Human
uucacagcuggggccaga

SEQ ID NO: 1187218 - RNA, 24 nt, Human
uucguccugagcagccaggugcug

SEQ ID NO: 1187219 - RNA, 22 nt, Human
uugggcaccccccacgagccuu

SEQ ID NO: 1187220 - RNA, 22 nt, Human
uugucuuccccgucgcacagcu

SEQ ID NO: 1187221 - RNA, 20 nt, Human
uuucggguggcagagaaggu

SEQ ID NO: 1187222 - RNA, 19 nt, Human
aaccacacggccugggccc

SEQ ID NO: 1187223 - RNA, 18 nt, Human
aagcacguaccagggccc

SEQ ID NO: 1187224 - RNA, 22 nt, Human
aaggaucuugugagcacaggug

SEQ ID NO: 1187225 - RNA, 19 nt, Human
acaggacccugugggcgcc

SEQ ID NO: 1187226 - RNA, 20 nt, Human
acgcagcacucacagaagga

SEQ ID NO: 1187227 - RNA, 24 nt, Human
cacacggccugggcccugggcacc

SEQ ID NO: 1187228 - RNA, 18 nt, Human
ccccgggagccgcugagc

SEQ ID NO: 1187229 - RNA, 25 nt, Human
ccgggagccgcugagcgaggugggu

SEQ ID NO: 1187230 - RNA, 19 nt, Human
ccugggcccugggcaccga

SEQ ID NO: 1187231 - RNA, 26 nt, Human
cgagguggguggacacuggccgaggu

SEQ ID NO: 1187232 - RNA, 27 nt, Human
gagguggguggacacuggccgagguca

SEQ ID NO: 1187233 - RNA, 24 nt, Human
ggcgccaucccuacuggggacgca

SEQ ID NO: 1187234 - RNA, 22 nt, Human
ggugcugggccccgggagccgc

SEQ ID NO: 1187235 - RNA, 22 nt, Human
ucccaaccacacggccugggcc

SEQ ID NO: 1187236 - RNA, 27 nt, Human
ucccaaccacacggccugggcccuggg

SEQ ID NO: 1187237 - RNA, 18 nt, Human
ucuucccaaccacacggc

SEQ ID NO: 1187238 - RNA, 21 nt, Human
uggguggacacuggccgaggu

SEQ ID NO: 1187239 - RNA, 22 nt, Human
uucugagcuggugcugggcccc

SEQ ID NO: 1187240 - RNA, 22 nt, Human
uucugagcuggugcugggcccc

SEQ ID NO: 1187241 - RNA, 23 nt, Human
aacugacuuaacacccaccaccc

SEQ ID NO: 1187242 - RNA, 21 nt, Human
aaugccacuucccccaggaag

SEQ ID NO: 1187243 - RNA, 22 nt, Human
accaaacaccucucaacaagcc

SEQ ID NO: 1187244 - RNA, 22 nt, Human
accccugcuccuccagccccac

SEQ ID NO: 1187245 - RNA, 21 nt, Human
acccuucccaggucagcccaa

SEQ ID NO: 1187246 - RNA, 20 nt, Human
accgcagccuucgaggugcc

SEQ ID NO: 1187247 - RNA, 18 nt, Human
agccucaggccagaagcc

SEQ ID NO: 1187248 - RNA, 22 nt, Human
agccucaggccagaagccugga

SEQ ID NO: 1187249 - RNA, 18 nt, Human
augaauuccuucagacuc

SEQ ID NO: 1187250 - RNA, 27 nt, Human
augucuuuucagaagucacauccuguu

SEQ ID NO: 1187251 - RNA, 19 nt, Human
caaacaccucucaacaagc

SEQ ID NO: 1187252 - RNA, 19 nt, Human
caaacugacuuaacaccca

SEQ ID NO: 1187253 - RNA, 21 nt, Human
caaccucccgucaucaccccu

SEQ ID NO: 1187254 - RNA, 19 nt, Human
cacccaccacccuucccag

SEQ ID NO: 1187255 - RNA, 19 nt, Human
caccccugcuccuccagcc

SEQ ID NO: 1187256 - RNA, 24 nt, Human
caccccugcuccuccagccccacc

SEQ ID NO: 1187257 - RNA, 22 nt, Human
cacuugacaucuggaacaacgc

SEQ ID NO: 1187258 - RNA, 19 nt, Human
cacuuuguucaccuuuacc

SEQ ID NO: 1187259 - RNA, 19 nt, Human
cagaagccuggaacagaca

SEQ ID NO: 1187260 - RNA, 24 nt, Human
cagcagggcagcccuucugacagg

SEQ ID NO: 1187261 - RNA, 23 nt, Human
ccacccaaacugacuuaacaccc

SEQ ID NO: 1187262 - RNA, 21 nt, Human
ccagaagaagguccauucauu

SEQ ID NO: 1187263 - RNA, 19 nt, Human
cccaaaugccacuuccccc

SEQ ID NO: 1187264 - RNA, 18 nt, Human
ccguggucuggugggccc

SEQ ID NO: 1187265 - RNA, 19 nt, Human
ccuaucgucugaaggcgag

SEQ ID NO: 1187266 - RNA, 18 nt, Human
ccuccagccccacccaaa

SEQ ID NO: 1187267 - RNA, 20 nt, Human
ccugcuccuccagccccacc

SEQ ID NO: 1187268 - RNA, 25 nt, Human
cgcagccuucgaggugccguggucu

SEQ ID NO: 1187269 - RNA, 21 nt, Human
cggguucaggguuucuuuggg

SEQ ID NO: 1187270 - RNA, 18 nt, Human
cuagagucaccaaacacc

SEQ ID NO: 1187271 - RNA, 22 nt, Human
cuccccgccgccauucugauac

SEQ ID NO: 1187272 - RNA, 25 nt, Human
cucugaucucuucucgggccagaag

SEQ ID NO: 1187273 - RNA, 18 nt, Human
cuggaacaacgcuccucg

SEQ ID NO: 1187274 - RNA, 20 nt, Human
cuggaacagacacuuggagg

SEQ ID NO: 1187275 - RNA, 18 nt, Human
cuggggaugcaccccugc

SEQ ID NO: 1187276 - RNA, 20 nt, Human
cuuaacacccaccacccuuc

SEQ ID NO: 1187277 - RNA, 23 nt, Human
cuuaacacccaccacccuuccca

SEQ ID NO: 1187278 - RNA, 22 nt, Human
cuucaccgcagccuucgaggug

SEQ ID NO: 1187279 - RNA, 21 nt, Human
cuuggagagccccagaauguc

SEQ ID NO: 1187280 - RNA, 25 nt, Human
gaaccaaucucugaucucuucucgg

SEQ ID NO: 1187281 - RNA, 22 nt, Human
gaagcucucccugaugcugccc

SEQ ID NO: 1187282 - RNA, 27 nt, Human
gacaggcuaggaagcguagccucaggc

SEQ ID NO: 1187283 - RNA, 19 nt, Human
gaggugccguggucuggug

SEQ ID NO: 1187284 - RNA, 22 nt, Human
gcaaauucuccauggacugccc

SEQ ID NO: 1187285 - RNA, 18 nt, Human
gccagaaggaggggcuga

SEQ ID NO: 1187286 - RNA, 18 nt, Human
gcugaaguuggcuucucc

SEQ ID NO: 1187287 - RNA, 20 nt, Human
gcuguuguggggcccuggcc

SEQ ID NO: 1187288 - RNA, 22 nt, Human
gggaagagcagaggacgcuggc

SEQ ID NO: 1187289 - RNA, 21 nt, Human
gggagggacagaggggacagg

SEQ ID NO: 1187290 - RNA, 26 nt, Human
guucaccuuuaccacggacgccccca

SEQ ID NO: 1187291 - RNA, 23 nt, Human
uaacacccaccacccuucccagg

SEQ ID NO: 1187292 - RNA, 18 nt, Human
uaagagauugcagccagc

SEQ ID NO: 1187293 - RNA, 21 nt, Human
uagagucaccaaacaccucuc

SEQ ID NO: 1187294 - RNA, 19 nt, Human
uagccucaggccagaagcc

SEQ ID NO: 1187295 - RNA, 23 nt, Human
uauacucgaguauccaggugacc

SEQ ID NO: 1187296 - RNA, 21 nt, Human
ucacacugucaaugaccuaga

SEQ ID NO: 1187297 - RNA, 22 nt, Human
ucaccccuugagugagaccuaa

SEQ ID NO: 1187298 - RNA, 22 nt, Human
ucagcccaaaugccacuucccc

SEQ ID NO: 1187299 - RNA, 24 nt, Human
ucagcccaaaugccacuuccccca

SEQ ID NO: 1187300 - RNA, 21 nt, Human
ucaggaggagucaugaauauu

SEQ ID NO: 1187301 - RNA, 23 nt, Human
ucccaggucagcccaaaugccac

SEQ ID NO: 1187302 - RNA, 24 nt, Human
uccccaaucuccuugagaaaccau

SEQ ID NO: 1187303 - RNA, 19 nt, Human
ucccccaggaagcucuccc

SEQ ID NO: 1187304 - RNA, 18 nt, Human
ucccugaugcugcccugg

SEQ ID NO: 1187305 - RNA, 23 nt, Human
ucccuggccggcaagaaucccug

SEQ ID NO: 1187306 - RNA, 19 nt, Human
ucccuugagccacuugauu

SEQ ID NO: 1187307 - RNA, 21 nt, Human
ucuccccgccgccauucugau

SEQ ID NO: 1187308 - RNA, 18 nt, Human
ucuccuugagaaaccauu

SEQ ID NO: 1187309 - RNA, 21 nt, Human
ucugauacuggcguccccaau

SEQ ID NO: 1187310 - RNA, 21 nt, Human
ucuggaacaacgcuccucggg

SEQ ID NO: 1187311 - RNA, 22 nt, Human
ucuuucgggaggaugacggcgg

SEQ ID NO: 1187312 - RNA, 18 nt, Human
ugagcaaauucuccaugg

SEQ ID NO: 1187313 - RNA, 21 nt, Human
ugcccagaaccaaucucugau

SEQ ID NO: 1187314 - RNA, 21 nt, Human
ugcuccuccagccccacccaa

SEQ ID NO: 1187315 - RNA, 19 nt, Human
uggaaugagucagaccugc

SEQ ID NO: 1187316 - RNA, 21 nt, Human
uggacugcccagaaccaaucu

SEQ ID NO: 1187317 - RNA, 19 nt, Human
uggagagccccagaauguc

SEQ ID NO: 1187318 - RNA, 21 nt, Human
uggaggggagggacagagggg

SEQ ID NO: 1187319 - RNA, 19 nt, Human
uggggcccuggccgcgccu

SEQ ID NO: 1187320 - RNA, 23 nt, Human
ugucacaagcguccaugaauucc

SEQ ID NO: 1187321 - RNA, 19 nt, Human
uguggggcccuggccgcgc

SEQ ID NO: 1187322 - RNA, 23 nt, Human
uucaccuuuaccacggacgcccc

SEQ ID NO: 1187323 - RNA, 21 nt, Human
uucaggguuucuuugggaucc

SEQ ID NO: 1187324 - RNA, 21 nt, Human
uugcagccagcagggcagccc

SEQ ID NO: 1187325 - RNA, 18 nt, Human
cagcaggcuuuauuggcu

SEQ ID NO: 1187326 - RNA, 24 nt, Human
caggaaaaacacccuauaaggaaa

SEQ ID NO: 1187327 - RNA, 21 nt, Human
ccuggggcagcgcuccuggcu

SEQ ID NO: 1187328 - RNA, 20 nt, Human
gaggcuggggggcugggggc

SEQ ID NO: 1187329 - RNA, 19 nt, Human
gcuggggggcugggggcag

SEQ ID NO: 1187330 - RNA, 20 nt, Human
ggcuggggggcugggggcag

SEQ ID NO: 1187331 - RNA, 19 nt, Human
gggggcugggggcagggga

SEQ ID NO: 1187332 - RNA, 20 nt, Human
ucccuggggcagcgcuccug

SEQ ID NO: 1187333 - RNA, 23 nt, Human
ucccuggggcagcgcuccuggcu

SEQ ID NO: 1187334 - RNA, 24 nt, Human
ucccuggggcagcgcuccuggcuc

SEQ ID NO: 1187335 - RNA, 18 nt, Human
uggggcagcgcuccuggc

SEQ ID NO: 1187336 - RNA, 22 nt, Human
uggggggcugggggcaggggau

SEQ ID NO: 1187337 - RNA, 26 nt, Human
uucaggaaaaacacccuauaaggaaa

SEQ ID NO: 1187338 - RNA, 25 nt, Human
aaagcgacccaaagguggauagucu

SEQ ID NO: 1187339 - RNA, 23 nt, Human
aagcgacccaaagguggauaguc

SEQ ID NO: 1187340 - RNA, 24 nt, Human
aagcgacccaaagguggauagucu

SEQ ID NO: 1187341 - RNA, 23 nt, Human
aagcucucaacacacaugggcuu

SEQ ID NO: 1187342 - RNA, 23 nt, Human
accauaucaacaauggcagcauc

SEQ ID NO: 1187343 - RNA, 24 nt, Human
acccaaagguggauagucugagaa

SEQ ID NO: 1187344 - RNA, 23 nt, Human
acgaacagcaaagcgacccaaag

SEQ ID NO: 1187345 - RNA, 20 nt, Human
agaagcucucaacacacaug

SEQ ID NO: 1187346 - RNA, 19 nt, Human
aggaaccauaucaacaaug

SEQ ID NO: 1187347 - RNA, 19 nt, Human
cacaugggcuugccaggaa

SEQ ID NO: 1187348 - RNA, 18 nt, Human
cacgaacagcaaagcgac

SEQ ID NO: 1187349 - RNA, 24 nt, Human
ccagaacggcgaucaaucuuuucc

SEQ ID NO: 1187350 - RNA, 24 nt, Human
cgaacagcaaagcgacccaaaggu

SEQ ID NO: 1187351 - RNA, 22 nt, Human
ggcgaucaaucuuuuccuucag

SEQ ID NO: 1187352 - RNA, 24 nt, Human
uaucacgaacagcaaagcgaccca

SEQ ID NO: 1187353 - RNA, 19 nt, Human
ucaacacacaugggcuugc

SEQ ID NO: 1187354 - RNA, 18 nt, Human
ucucaacacacaugggcu

SEQ ID NO: 1187355 - RNA, 26 nt, Human
ucucauaucacgaacagcaaagcgac

SEQ ID NO: 1187356 - RNA, 19 nt, Human
ugccaggaaccauaucaac

SEQ ID NO: 1187357 - RNA, 25 nt, Human
aaaccccucccugaaucaggguacc

SEQ ID NO: 1187358 - RNA, 22 nt, Human
aaccaaaccccucccugaauca

SEQ ID NO: 1187359 - RNA, 21 nt, Human
aacucuuggcuuucccuagag

SEQ ID NO: 1187360 - RNA, 22 nt, Human
aacuggaagauguaaggaacaa

SEQ ID NO: 1187361 - RNA, 19 nt, Human
aaucuuagucuucuugcuc

SEQ ID NO: 1187362 - RNA, 23 nt, Human
acagcagcaagaaaaccaaaccc

SEQ ID NO: 1187363 - RNA, 19 nt, Human
acaggugccugccaccacg

SEQ ID NO: 1187364 - RNA, 19 nt, Human
accguguuaggauggucuc

SEQ ID NO: 1187365 - RNA, 20 nt, Human
acgggauuucaccguguuag

SEQ ID NO: 1187366 - RNA, 20 nt, Human
acgggauuucaccguguuag

SEQ ID NO: 1187367 - RNA, 19 nt, Human
acuacaggugccugccacc

SEQ ID NO: 1187368 - RNA, 20 nt, Human
acugcaagcuccgccucccg

SEQ ID NO: 1187369 - RNA, 20 nt, Human
acugcugccagcugggccug

SEQ ID NO: 1187370 - RNA, 18 nt, Human
agcaagaaaaccaaaccc

SEQ ID NO: 1187371 - RNA, 25 nt, Human
aggcuggagugcaguggcgcgaucu

SEQ ID NO: 1187372 - RNA, 20 nt, Human
aggugccugccaccacgccc

SEQ ID NO: 1187373 - RNA, 18 nt, Human
aguagcugggacuacagg

SEQ ID NO: 1187374 - RNA, 23 nt, Human
agugcaguggcgcgaucuuggcu

SEQ ID NO: 1187375 - RNA, 24 nt, Human
agugcaguggcgcgaucuuggcuc

SEQ ID NO: 1187376 - RNA, 20 nt, Human
caccguguuaggauggucuc

SEQ ID NO: 1187377 - RNA, 24 nt, Human
caccucggccucccauagugcuga

SEQ ID NO: 1187378 - RNA, 22 nt, Human
cacgcccuucuccugccucagc

SEQ ID NO: 1187379 - RNA, 22 nt, Human
cagcaagaaaaccaaaccccuc

SEQ ID NO: 1187380 - RNA, 20 nt, Human
cagccuccugaguagcuggg

SEQ ID NO: 1187381 - RNA, 19 nt, Human
caggugccugccaccacgc

SEQ ID NO: 1187382 - RNA, 23 nt, Human
caggugccugccaccacgcccgg

SEQ ID NO: 1187383 - RNA, 19 nt, Human
caguggcgcgaucuuggcu

SEQ ID NO: 1187384 - RNA, 21 nt, Human
cauacagcucgugaccuuggu

SEQ ID NO: 1187385 - RNA, 20 nt, Human
ccaccacgcccggcuaauuu

SEQ ID NO: 1187386 - RNA, 18 nt, Human
cccucuuccaucucuuuu

SEQ ID NO: 1187387 - RNA, 20 nt, Human
ccggccccaaucugguagac

SEQ ID NO: 1187388 - RNA, 19 nt, Human
ccuacagcagcaagaaaac

SEQ ID NO: 1187389 - RNA, 22 nt, Human
ccuccaugcuucucugcugccu

SEQ ID NO: 1187390 - RNA, 24 nt, Human
ccucccggguucacgcccuucucc

SEQ ID NO: 1187391 - RNA, 19 nt, Human
ccucccucuuccaucucuu

SEQ ID NO: 1187392 - RNA, 22 nt, Human
ccugaccucgugauccacccac

SEQ ID NO: 1187393 - RNA, 22 nt, Human
ccugaguagcugggacuacagg

SEQ ID NO: 1187394 - RNA, 23 nt, Human
ccugaguagcugggacuacaggu

SEQ ID NO: 1187395 - RNA, 23 nt, Human
ccugccucagccuccugaguagc

SEQ ID NO: 1187396 - RNA, 24 nt, Human
ccuguuuuccuccaugcuucucug

SEQ ID NO: 1187397 - RNA, 21 nt, Human
cgccucccggguucacgcccu

SEQ ID NO: 1187398 - RNA, 20 nt, Human
cgggauuucaccguguuagg

SEQ ID NO: 1187399 - RNA, 18 nt, Human
cuacagcagcaagaaaac

SEQ ID NO: 1187400 - RNA, 25 nt, Human
cuacagcagcaagaaaaccaaaccc

SEQ ID NO: 1187401 - RNA, 24 nt, Human
cucagccuccugaguagcugggac

SEQ ID NO: 1187402 - RNA, 18 nt, Human
cuccaaacuggcugggca

SEQ ID NO: 1187403 - RNA, 18 nt, Human
cucccggguucacgcccu

SEQ ID NO: 1187404 - RNA, 18 nt, Human
cuccugaccucgugaucc

SEQ ID NO: 1187405 - RNA, 25 nt, Human
cuccugaccucgugauccacccacc

SEQ ID NO: 1187406 - RNA, 19 nt, Human
cucgcccggccccaaucug

SEQ ID NO: 1187407 - RNA, 26 nt, Human
cucucauguuccucccucuuccaucu

SEQ ID NO: 1187408 - RNA, 19 nt, Human
cugagacaccucgcccggc

SEQ ID NO: 1187409 - RNA, 23 nt, Human
cugccucagccuccugaguagcu

SEQ ID NO: 1187410 - RNA, 25 nt, Human
cuggcugggcauugggaacaguggg

SEQ ID NO: 1187411 - RNA, 22 nt, Human
cuuccaucucuuuucucugaac

SEQ ID NO: 1187412 - RNA, 21 nt, Human
cuucuggccuccgaucccacu

SEQ ID NO: 1187413 - RNA, 22 nt, Human
cuucuugcucuucugaugacua

SEQ ID NO: 1187414 - RNA, 18 nt, Human
gaccaguucuccaaacug

SEQ ID NO: 1187415 - RNA, 22 nt, Human
gaccucgugauccacccaccuc

SEQ ID NO: 1187416 - RNA, 22 nt, Human
gaccucgugauccacccaccuc

SEQ ID NO: 1187417 - RNA, 24 nt, Human
gaccucgugauccacccaccucgg

SEQ ID NO: 1187418 - RNA, 24 nt, Human
gaccucgugauccacccaccucgg

SEQ ID NO: 1187419 - RNA, 21 nt, Human
gagacgaagucuugcucuguc

SEQ ID NO: 1187420 - RNA, 18 nt, Human
gcaugccaaaucacacug

SEQ ID NO: 1187421 - RNA, 24 nt, Human
gccaaaucacacugguucucaaaa

SEQ ID NO: 1187422 - RNA, 23 nt, Human
gcccggcuaauuuuuuguauuuu

SEQ ID NO: 1187423 - RNA, 19 nt, Human
gcuggagugcaguggcgcg

SEQ ID NO: 1187424 - RNA, 24 nt, Human
ggauggucucgaucuccugaccuc

SEQ ID NO: 1187425 - RNA, 20 nt, Human
ggcauugggaacagugggga

SEQ ID NO: 1187426 - RNA, 18 nt, Human
gggauuucaccguguuag

SEQ ID NO: 1187427 - RNA, 21 nt, Human
ggguuaccauagaauugggcu

SEQ ID NO: 1187428 - RNA, 24 nt, Human
gucuugcucugucgccaggcugga

SEQ ID NO: 1187429 - RNA, 24 nt, Human
gugauccacccaccucggccuccc

SEQ ID NO: 1187430 - RNA, 21 nt, Human
uaauagagacgggauuucacc

SEQ ID NO: 1187431 - RNA, 24 nt, Human
uaauagagacgggauuucaccgug

SEQ ID NO: 1187432 - RNA, 26 nt, Human
uaauagagacgggauuucaccguguu

SEQ ID NO: 1187433 - RNA, 24 nt, Human
uaauuuuuuguauuuuuaauagag

SEQ ID NO: 1187434 - RNA, 25 nt, Human
uaauuuuuuguauuuuuaauagaga

SEQ ID NO: 1187435 - RNA, 23 nt, Human
uacaggugccugccaccacgccc

SEQ ID NO: 1187436 - RNA, 19 nt, Human
ucaccguguuaggaugguc

SEQ ID NO: 1187437 - RNA, 20 nt, Human
ucacgcccuucuccugccuc

SEQ ID NO: 1187438 - RNA, 22 nt, Human
ucacuagguuaccaccaaauau

SEQ ID NO: 1187439 - RNA, 18 nt, Human
ucacugcaagcuccgccu

SEQ ID NO: 1187440 - RNA, 19 nt, Human
ucacugcaagcuccgccuc

SEQ ID NO: 1187441 - RNA, 24 nt, Human
ucacugcaagcuccgccucccggg

SEQ ID NO: 1187442 - RNA, 22 nt, Human
ucacuggacauaaucuuagucu

SEQ ID NO: 1187443 - RNA, 23 nt, Human
ucagccuccugaguagcugggac

SEQ ID NO: 1187444 - RNA, 24 nt, Human
ucccauagugcugagauuauaggc

SEQ ID NO: 1187445 - RNA, 23 nt, Human
ucccggaccugagaaggcugugg

SEQ ID NO: 1187446 - RNA, 24 nt, Human
ucccggguucacgcccuucuccug

SEQ ID NO: 1187447 - RNA, 19 nt, Human
ucccucuuccaucucuuuu

SEQ ID NO: 1187448 - RNA, 18 nt, Human
ucccugaaucaggguacc

SEQ ID NO: 1187449 - RNA, 23 nt, Human
uccgccucccggguucacgcccu

SEQ ID NO: 1187450 - RNA, 24 nt, Human
uccugaguagcugggacuacaggu

SEQ ID NO: 1187451 - RNA, 24 nt, Human
ucgccaggcuggagugcaguggcg

SEQ ID NO: 1187452 - RNA, 22 nt, Human
ucucauguuccucccucuucca

SEQ ID NO: 1187453 - RNA, 24 nt, Human
ucuccugccucagccuccugagua

SEQ ID NO: 1187454 - RNA, 18 nt, Human
ucugucgccaggcuggag

SEQ ID NO: 1187455 - RNA, 21 nt, Human
ucugucgccaggcuggagugc

SEQ ID NO: 1187456 - RNA, 23 nt, Human
ucugucgccaggcuggagugcag

SEQ ID NO: 1187457 - RNA, 21 nt, Human
ucuugcucugucgccaggcug

SEQ ID NO: 1187458 - RNA, 22 nt, Human
ucuugcucugucgccaggcugg

SEQ ID NO: 1187459 - RNA, 23 nt, Human
ucuugcucugucgccaggcugga

SEQ ID NO: 1187460 - RNA, 24 nt, Human
ugauccacccaccucggccuccca

SEQ ID NO: 1187461 - RNA, 22 nt, Human
ugcaguggcgcgaucuuggcuc

SEQ ID NO: 1187462 - RNA, 24 nt, Human
ugccucagccuccugaguagcugg

SEQ ID NO: 1187463 - RNA, 23 nt, Human
ugcucugucgccaggcuggagug

SEQ ID NO: 1187464 - RNA, 23 nt, Human
uggagugcaguggcgcgaucuug

SEQ ID NO: 1187465 - RNA, 24 nt, Human
uggagugcaguggcgcgaucuugg

SEQ ID NO: 1187466 - RNA, 21 nt, Human
uggccuccgaucccacuuugg

SEQ ID NO: 1187467 - RNA, 18 nt, Human
uggcucacugcaagcucc

SEQ ID NO: 1187468 - RNA, 21 nt, Human
ugggacuacaggugccugcca

SEQ ID NO: 1187469 - RNA, 22 nt, Human
ugggacuacaggugccugccac

SEQ ID NO: 1187470 - RNA, 24 nt, Human
ugggacuacaggugccugccacca

SEQ ID NO: 1187471 - RNA, 24 nt, Human
uguuccucccucuuccaucucuuu

SEQ ID NO: 1187472 - RNA, 24 nt, Human
uuaauagagacgggauuucaccgu

SEQ ID NO: 1187473 - RNA, 24 nt, Human
uuccucccucuuccaucucuuuuc

SEQ ID NO: 1187474 - RNA, 18 nt, Human
uucuucagcucucauguu

SEQ ID NO: 1187475 - RNA, 21 nt, Human
uuuuuguauuuuuaauagaga

SEQ ID NO: 1187476 - RNA, 24 nt, Human
uuuuuuguauuuuuaauagagacg

SEQ ID NO: 1187477 - RNA, 21 nt, Human
aagggccgggcuggggcuggg

SEQ ID NO: 1187478 - RNA, 25 nt, Human
acccagccccagccucagcuuucuu

SEQ ID NO: 1187479 - RNA, 24 nt, Human
agccucagcuuucuugccggcacc

SEQ ID NO: 1187480 - RNA, 19 nt, Human
cagcugcaagggccgggcu

SEQ ID NO: 1187481 - RNA, 18 nt, Human
caugaccaaauccgccuc

SEQ ID NO: 1187482 - RNA, 26 nt, Human
cccagccccagccucagcuuucuugc

SEQ ID NO: 1187483 - RNA, 18 nt, Human
cucuccaauuuuacugag

SEQ ID NO: 1187484 - RNA, 23 nt, Human
cucugcagcugcaagggccgggc

SEQ ID NO: 1187485 - RNA, 18 nt, Human
cugacccagccccagccu

SEQ ID NO: 1187486 - RNA, 19 nt, Human
gccggcaccagguggcaca

SEQ ID NO: 1187487 - RNA, 19 nt, Human
gguggcugaccacguccau

SEQ ID NO: 1187488 - RNA, 26 nt, Human
guugcugacccagccccagccucagc

SEQ ID NO: 1187489 - RNA, 22 nt, Human
uaaggauuuuuggcuguaaguu

SEQ ID NO: 1187490 - RNA, 19 nt, Human
ugagguggcugaccacguc

SEQ ID NO: 1187491 - RNA, 20 nt, Human
ugcaagggccgggcugggga

SEQ ID NO: 1187492 - RNA, 23 nt, Human
ugcugacccagccccagccucag

SEQ ID NO: 1187493 - RNA, 21 nt, Human
uggcugaccacguccaugacc

SEQ ID NO: 1187494 - RNA, 26 nt, Human
uucgguugcugacccagccccagccu

SEQ ID NO: 1187495 - RNA, 23 nt, Human
aaaaggucagaggcaauucgaga

SEQ ID NO: 1187496 - RNA, 20 nt, Human
aggcggcggccugggugcuu

SEQ ID NO: 1187497 - RNA, 21 nt, Human
ccagaaguucucggggacuag

SEQ ID NO: 1187498 - RNA, 18 nt, Human
ccccugaguggcucuuga

SEQ ID NO: 1187499 - RNA, 24 nt, Human
cguggggcaggcggcggccugggu

SEQ ID NO: 1187500 - RNA, 20 nt, Human
cuggaaauucucccccagca

SEQ ID NO: 1187501 - RNA, 19 nt, Human
cuuuuaauccugaacauuc

SEQ ID NO: 1187502 - RNA, 19 nt, Human
gaacauucuugaagcacga

SEQ ID NO: 1187503 - RNA, 24 nt, Human
gaccuucuggaaauucucccccag

SEQ ID NO: 1187504 - RNA, 18 nt, Human
ggaaauucucccccagca

SEQ ID NO: 1187505 - RNA, 20 nt, Human
ggcaacucuuguaauacugg

SEQ ID NO: 1187506 - RNA, 20 nt, Human
ucccagauucagcuugucuc

SEQ ID NO: 1187507 - RNA, 20 nt, Human
ucuggaaauucucccccagc

SEQ ID NO: 1187508 - RNA, 21 nt, Human
ucuugaacucgcugaagcggg

SEQ ID NO: 1187509 - RNA, 25 nt, Human
ucuugaacucgcugaagcgggccuc

SEQ ID NO: 1187510 - RNA, 26 nt, Human
uuaauccugaacauucuugaagcacg

SEQ ID NO: 1187511 - RNA, 23 nt, Human
aaaaggucagaggcaauucgaga

SEQ ID NO: 1187512 - RNA, 18 nt, Human
acacggcaguccaggccc

SEQ ID NO: 1187513 - RNA, 23 nt, Human
gcagguggggcacacacggcagu

SEQ ID NO: 1187514 - RNA, 20 nt, Human
ucccagauucagcuugucuc

SEQ ID NO: 1187515 - RNA, 25 nt, Human
aggcuaaaaaggaauuugugacuga

SEQ ID NO: 1187516 - RNA, 19 nt, Human
agugaauuuuuucuuggug

SEQ ID NO: 1187517 - RNA, 18 nt, Human
cgccuggagccuugaaac

SEQ ID NO: 1187518 - RNA, 21 nt, Human
ggugacuuguuuuucucuagg

SEQ ID NO: 1187519 - RNA, 19 nt, Human
ucccugaaaaagacagugc

SEQ ID NO: 1187520 - RNA, 22 nt, Human
ucccugaaaaagacagugccuu

SEQ ID NO: 1187521 - RNA, 21 nt, Human
ugaccaaauuagauaccuccc

SEQ ID NO: 1187522 - RNA, 24 nt, Human
ugagagaaaauacuuuuccucuac

SEQ ID NO: 1187523 - RNA, 21 nt, Human
aagcaagucucaaauagccag

SEQ ID NO: 1187524 - RNA, 23 nt, Human
ccccacugcacacgugaaaagca

SEQ ID NO: 1187525 - RNA, 21 nt, Human
cgugaaaagcaagucucaaau

SEQ ID NO: 1187526 - RNA, 26 nt, Human
cuccaggauagcaucauucuccccac

SEQ ID NO: 1187527 - RNA, 21 nt, Human
uccaggauagcaucauucucc

SEQ ID NO: 1187528 - RNA, 19 nt, Human
ucucaaauagccagagcuu

SEQ ID NO: 1187529 - RNA, 24 nt, Human
ugguaauuaucaccugucuguuuu

SEQ ID NO: 1187530 - RNA, 20 nt, Human
uuccugacaucaggcuccug

SEQ ID NO: 1187531 - RNA, 22 nt, Human
aaaaaacaaaaaaaugcagaag

SEQ ID NO: 1187532 - RNA, 19 nt, Human
aaaacaaaaaaaugcagaa

SEQ ID NO: 1187533 - RNA, 21 nt, Human
aaaauaauaaaguucaaaaac

SEQ ID NO: 1187534 - RNA, 24 nt, Human
aaaauuugcauaauaaauuuuaaa

SEQ ID NO: 1187535 - RNA, 25 nt, Human
aaacaaaaggugaauaggagggacc

SEQ ID NO: 1187536 - RNA, 24 nt, Human
aaacaaacauaaaugcacaaguca

SEQ ID NO: 1187537 - RNA, 19 nt, Human
aaacuugcaguugagccag

SEQ ID NO: 1187538 - RNA, 21 nt, Human
aaaugcagaagaccauuagcu

SEQ ID NO: 1187539 - RNA, 20 nt, Human
aaccacaggaaaauuaaaug

SEQ ID NO: 1187540 - RNA, 19 nt, Human
aagaaagaaaacaguccac

SEQ ID NO: 1187541 - RNA, 28 nt, Human
aagaaagaaaacaguccacuuaaagaaa

SEQ ID NO: 1187542 - RNA, 21 nt, Human
aagccauauucccaaauacga

SEQ ID NO: 1187543 - RNA, 26 nt, Human
aagcugaccucaagccuucaugacau

SEQ ID NO: 1187544 - RNA, 18 nt, Human
aaguccuccucugcccuc

SEQ ID NO: 1187545 - RNA, 23 nt, Human
aauacccuuuccacuugagcagc

SEQ ID NO: 1187546 - RNA, 24 nt, Human
acuaaaaaauaaaaggaaagaaaa

SEQ ID NO: 1187547 - RNA, 18 nt, Human
acuacaguuacugaagcc

SEQ ID NO: 1187548 - RNA, 21 nt, Human
agaaagcaugugccaacugau

SEQ ID NO: 1187549 - RNA, 22 nt, Human
aggaaagaaaauuuugagaaga

SEQ ID NO: 1187550 - RNA, 18 nt, Human
aggugaauaggaaucaga

SEQ ID NO: 1187551 - RNA, 23 nt, Human
aguaagagggauggaggccccuu

SEQ ID NO: 1187552 - RNA, 24 nt, Human
auaaaguucaaaaacaacuuaaaa

SEQ ID NO: 1187553 - RNA, 22 nt, Human
auaacaaaauaauaaaguucaa

SEQ ID NO: 1187554 - RNA, 19 nt, Human
auagcagccauuuuauaag

SEQ ID NO: 1187555 - RNA, 21 nt, Human
augcucacaagacuacaguua

SEQ ID NO: 1187556 - RNA, 23 nt, Human
auuaguuuuauuauguauuuucu

SEQ ID NO: 1187557 - RNA, 23 nt, Human
caaauccugccagcagccuguag

SEQ ID NO: 1187558 - RNA, 21 nt, Human
caaggccccuuauuccuaacu

SEQ ID NO: 1187559 - RNA, 22 nt, Human
cauaaaugcacaagucaagcuu

SEQ ID NO: 1187560 - RNA, 24 nt, Human
ccaccuuuugaacagcagagauuu

SEQ ID NO: 1187561 - RNA, 21 nt, Human
cugugugcuagacuuagucuc

SEQ ID NO: 1187562 - RNA, 22 nt, Human
cuuccaggauuugcuggcccaa

SEQ ID NO: 1187563 - RNA, 23 nt, Human
cuugcaguugagccagacaguuu

SEQ ID NO: 1187564 - RNA, 23 nt, Human
gaaacauccuuuuagcaauaccc

SEQ ID NO: 1187565 - RNA, 21 nt, Human
gaacagcagagauuucuagag

SEQ ID NO: 1187566 - RNA, 23 nt, Human
ggaaacauccuuuuagcaauacc

SEQ ID NO: 1187567 - RNA, 18 nt, Human
ggacuugaaugacaaaua

SEQ ID NO: 1187568 - RNA, 21 nt, Human
ggcaguucuuucuaguuuucu

SEQ ID NO: 1187569 - RNA, 23 nt, Human
gucacagaggggagggaaacuug

SEQ ID NO: 1187570 - RNA, 26 nt, Human
gugcugccaccuuuugaacagcagag

SEQ ID NO: 1187571 - RNA, 25 nt, Human
uaaaaaaacaaaaaaaugcagaaga

SEQ ID NO: 1187572 - RNA, 22 nt, Human
uaaaauuaaaagcauaugaaac

SEQ ID NO: 1187573 - RNA, 23 nt, Human
uaaagugcuaccaagaucugcca

SEQ ID NO: 1187574 - RNA, 19 nt, Human
uaacaucaucugcauuauu

SEQ ID NO: 1187575 - RNA, 23 nt, Human
uaacaucaucugcauuauuauuu

SEQ ID NO: 1187576 - RNA, 22 nt, Human
uaacaucaugauuguacaacca

SEQ ID NO: 1187577 - RNA, 22 nt, Human
uaaugcagugucuuaaaacaaa

SEQ ID NO: 1187578 - RNA, 24 nt, Human
uacaagauuuuuggaaacauccuu

SEQ ID NO: 1187579 - RNA, 22 nt, Human
uacaguauuaucaucaaucacu

SEQ ID NO: 1187580 - RNA, 19 nt, Human
uacauaguuuuaaaauaug

SEQ ID NO: 1187581 - RNA, 20 nt, Human
uagccuuuucauauaagccu

SEQ ID NO: 1187582 - RNA, 24 nt, Human
uagcuaacaaaguccuugaaucag

SEQ ID NO: 1187583 - RNA, 19 nt, Human
uaggucaaccacaggaaaa

SEQ ID NO: 1187584 - RNA, 24 nt, Human
uaugaacagauagucugcuaggca

SEQ ID NO: 1187585 - RNA, 21 nt, Human
uccacuugagcagcauuagaa

SEQ ID NO: 1187586 - RNA, 18 nt, Human
ucuaacaggaaaacaacu

SEQ ID NO: 1187587 - RNA, 23 nt, Human
ucuguaagcugaccucaagccuu

SEQ ID NO: 1187588 - RNA, 23 nt, Human
ugaacagauagucugcuaggcac

SEQ ID NO: 1187589 - RNA, 19 nt, Human
ugacuuauacuaccaggaa

SEQ ID NO: 1187590 - RNA, 23 nt, Human
ugaggaagggcaguucuuucuag

SEQ ID NO: 1187591 - RNA, 19 nt, Human
ugcagaagaccauuagcua

SEQ ID NO: 1187592 - RNA, 24 nt, Human
ugcuguaaccauaggaaaaaagca

SEQ ID NO: 1187593 - RNA, 21 nt, Human
ugggaagaacauuauuaaaag

SEQ ID NO: 1187594 - RNA, 24 nt, Human
uguaacuggagcaaauuuuauuuu

SEQ ID NO: 1187595 - RNA, 18 nt, Human
ugugggaagaacauuauu

SEQ ID NO: 1187596 - RNA, 20 nt, Human
uguguagucauguuuuaccc

SEQ ID NO: 1187597 - RNA, 22 nt, Human
uuacuaaaucugauuuuugugu

SEQ ID NO: 1187598 - RNA, 19 nt, Human
uuaguuuuauuauguauuu

SEQ ID NO: 1187599 - RNA, 21 nt, Human
uugaccuuagguguaucaaaa

SEQ ID NO: 1187600 - RNA, 18 nt, Human
uuguguacaaauguaaag

SEQ ID NO: 1187601 - RNA, 21 nt, Human
aaaaagaaauucaauagaaag

SEQ ID NO: 1187602 - RNA, 22 nt, Human
aaacaauacagaacagaccagg

SEQ ID NO: 1187603 - RNA, 22 nt, Human
aaacaggaagugagaaaauggg

SEQ ID NO: 1187604 - RNA, 18 nt, Human
aagaacuggcaaggacuc

SEQ ID NO: 1187605 - RNA, 20 nt, Human
aagaagauacuucaauaccu

SEQ ID NO: 1187606 - RNA, 23 nt, Human
aagagcaacauggaggucugcac

SEQ ID NO: 1187607 - RNA, 21 nt, Human
aagagcuccccauccccaaag

SEQ ID NO: 1187608 - RNA, 28 nt, Human
aagagcuccccauccccaaagaacuggg

SEQ ID NO: 1187609 - RNA, 19 nt, Human
aagaucaaugggacagaau

SEQ ID NO: 1187610 - RNA, 21 nt, Human
acaaacauggcucccugaagc

SEQ ID NO: 1187611 - RNA, 26 nt, Human
acagagcacuccaccagguauuaaag

SEQ ID NO: 1187612 - RNA, 19 nt, Human
acauauccaaugccugcug

SEQ ID NO: 1187613 - RNA, 18 nt, Human
accccaccuccucccagg

SEQ ID NO: 1187614 - RNA, 20 nt, Human
accccagcccugaccccacc

SEQ ID NO: 1187615 - RNA, 21 nt, Human
acucgccugcccagggccccu

SEQ ID NO: 1187616 - RNA, 20 nt, Human
agagcuccccauccccaaag

SEQ ID NO: 1187617 - RNA, 20 nt, Human
agcaucuuacacaaggauuc

SEQ ID NO: 1187618 - RNA, 21 nt, Human
agcccugaccccaccuccucc

SEQ ID NO: 1187619 - RNA, 23 nt, Human
aggaagcuuccucaagcccaacu

SEQ ID NO: 1187620 - RNA, 18 nt, Human
auccucuauucuuggaga

SEQ ID NO: 1187621 - RNA, 23 nt, Human
cacacggcuuucaagugccagag

SEQ ID NO: 1187622 - RNA, 21 nt, Human
cacacuccccagagacucgcc

SEQ ID NO: 1187623 - RNA, 21 nt, Human
caccacacuccccagagacuc

SEQ ID NO: 1187624 - RNA, 24 nt, Human
caccacacuccccagagacucgcc

SEQ ID NO: 1187625 - RNA, 25 nt, Human
caccaccuaucauauggaaaaagaa

SEQ ID NO: 1187626 - RNA, 22 nt, Human
caccuuccagucaccacuacac

SEQ ID NO: 1187627 - RNA, 19 nt, Human
cagagcccccaaucuaacc

SEQ ID NO: 1187628 - RNA, 21 nt, Human
cagagcccccaaucuaaccuc

SEQ ID NO: 1187629 - RNA, 24 nt, Human
caggucagaucgguugaaaaaaua

SEQ ID NO: 1187630 - RNA, 18 nt, Human
cauauggaaaaagaaauu

SEQ ID NO: 1187631 - RNA, 20 nt, Human
ccacauaugucuucuccagg

SEQ ID NO: 1187632 - RNA, 21 nt, Human
ccacauaugucuucuccaggc

SEQ ID NO: 1187633 - RNA, 22 nt, Human
ccaccacgccacauaugucuuc

SEQ ID NO: 1187634 - RNA, 26 nt, Human
ccaccuagaaacauggagagcaguca

SEQ ID NO: 1187635 - RNA, 22 nt, Human
ccacggaccccagcccugaccc

SEQ ID NO: 1187636 - RNA, 20 nt, Human
ccauguaagugaguuucaga

SEQ ID NO: 1187637 - RNA, 23 nt, Human
cccaacccgucggcccacggacc

SEQ ID NO: 1187638 - RNA, 23 nt, Human
cccagcccugaccccaccuccuc

SEQ ID NO: 1187639 - RNA, 25 nt, Human
cccagcccugaccccaccuccuccc

SEQ ID NO: 1187640 - RNA, 23 nt, Human
ccccagagacucgccugcccagg

SEQ ID NO: 1187641 - RNA, 18 nt, Human
cccccaacccgucggccc

SEQ ID NO: 1187642 - RNA, 24 nt, Human
cccccaacccgucggcccacggac

SEQ ID NO: 1187643 - RNA, 21 nt, Human
ccuccauagcaugcaaagcuc

SEQ ID NO: 1187644 - RNA, 21 nt, Human
ccugagauggggucugacuca

SEQ ID NO: 1187645 - RNA, 19 nt, Human
cgaccucuccuacuaccua

SEQ ID NO: 1187646 - RNA, 24 nt, Human
cgccacauaugucuucuccaggca

SEQ ID NO: 1187647 - RNA, 19 nt, Human
cgcccugugaugucagaac

SEQ ID NO: 1187648 - RNA, 23 nt, Human
cggcuaauguuugacuguagcac

SEQ ID NO: 1187649 - RNA, 24 nt, Human
cgguugggacaaguaccggggucc

SEQ ID NO: 1187650 - RNA, 27 nt, Human
cgucggcccacggaccccagcccugac

SEQ ID NO: 1187651 - RNA, 21 nt, Human
cuaaguaucuuaaccaagguc

SEQ ID NO: 1187652 - RNA, 18 nt, Human
cuagaaacauggagagca

SEQ ID NO: 1187653 - RNA, 22 nt, Human
cucuuacaacuacguccacuuc

SEQ ID NO: 1187654 - RNA, 25 nt, Human
gaagcuuccucaagcccaacuauac

SEQ ID NO: 1187655 - RNA, 23 nt, Human
gccagagccaggacucagaucua

SEQ ID NO: 1187656 - RNA, 22 nt, Human
gcccuuauuucuccauuuggca

SEQ ID NO: 1187657 - RNA, 27 nt, Human
gccugcccagggccccucucuaacccc

SEQ ID NO: 1187658 - RNA, 25 nt, Human
gcuccagagcccccaaucuaaccuc

SEQ ID NO: 1187659 - RNA, 25 nt, Human
ggaagaacagagacagucauggaaa

SEQ ID NO: 1187660 - RNA, 19 nt, Human
ggaccccagcccugacccc

SEQ ID NO: 1187661 - RNA, 23 nt, Human
ggagcacacuuguaaguaaauau

SEQ ID NO: 1187662 - RNA, 19 nt, Human
gguugaaaaaauaaaacua

SEQ ID NO: 1187663 - RNA, 23 nt, Human
gugcagggcccugagaugggguc

SEQ ID NO: 1187664 - RNA, 21 nt, Human
uaaaacaauacagaacagacc

SEQ ID NO: 1187665 - RNA, 21 nt, Human
uaaaacuaacaaauuuuuaca

SEQ ID NO: 1187666 - RNA, 22 nt, Human
uaaagaccaccaggagcacacu

SEQ ID NO: 1187667 - RNA, 21 nt, Human
uacaacccuguguuaauauua

SEQ ID NO: 1187668 - RNA, 18 nt, Human
uagaaaauccauaguaac

SEQ ID NO: 1187669 - RNA, 20 nt, Human
uagaaaauccauaguaacau

SEQ ID NO: 1187670 - RNA, 19 nt, Human
uagcacaugugagaggccc

SEQ ID NO: 1187671 - RNA, 19 nt, Human
uaggugcccuuauuucucc

SEQ ID NO: 1187672 - RNA, 25 nt, Human
uaugcagaaauaaguaaacagagca

SEQ ID NO: 1187673 - RNA, 19 nt, Human
ucaauagaaaguuauaugg

SEQ ID NO: 1187674 - RNA, 24 nt, Human
ucaccugccaccauaaugugaauu

SEQ ID NO: 1187675 - RNA, 23 nt, Human
uccagagcccccaaucuaaccuc

SEQ ID NO: 1187676 - RNA, 19 nt, Human
uccagucaccacuacaccu

SEQ ID NO: 1187677 - RNA, 24 nt, Human
uccauuccaccacgccacauaugu

SEQ ID NO: 1187678 - RNA, 20 nt, Human
uccccagagacucgccugcc

SEQ ID NO: 1187679 - RNA, 19 nt, Human
ucccugaagccgcucaggc

SEQ ID NO: 1187680 - RNA, 21 nt, Human
ucccugaagccgcucaggcuc

SEQ ID NO: 1187681 - RNA, 21 nt, Human
ucccugacgcuggccaucccc

SEQ ID NO: 1187682 - RNA, 25 nt, Human
ucgcccgucaagacgggccagggcu

SEQ ID NO: 1187683 - RNA, 24 nt, Human
ucuagaacaguucuuagaacacag

SEQ ID NO: 1187684 - RNA, 21 nt, Human
ucucaccacacuccccagaga

SEQ ID NO: 1187685 - RNA, 24 nt, Human
ucucaucacuuagaaacccuacag

SEQ ID NO: 1187686 - RNA, 20 nt, Human
ucuccauuuggcagagaggg

SEQ ID NO: 1187687 - RNA, 23 nt, Human
ucucuuuguauugucugucaccu

SEQ ID NO: 1187688 - RNA, 19 nt, Human
ucuuggagaucuggaugcc

SEQ ID NO: 1187689 - RNA, 20 nt, Human
ugaaguguauuaacuugugu

SEQ ID NO: 1187690 - RNA, 23 nt, Human
ugacacaaaucgauaauuaacug

SEQ ID NO: 1187691 - RNA, 22 nt, Human
ugaccccaccuccucccagcau

SEQ ID NO: 1187692 - RNA, 20 nt, Human
ugagaggcgaauaacauugc

SEQ ID NO: 1187693 - RNA, 20 nt, Human
ugaggaagcuuccucaagcc

SEQ ID NO: 1187694 - RNA, 22 nt, Human
ugaggacauaggugguggaguc

SEQ ID NO: 1187695 - RNA, 21 nt, Human
ugaggucaaagggcggucuca

SEQ ID NO: 1187696 - RNA, 23 nt, Human
ugaucccugacgcuggccauccc

SEQ ID NO: 1187697 - RNA, 19 nt, Human
ugcacaugcucagugaggu

SEQ ID NO: 1187698 - RNA, 25 nt, Human
ugcccuucaguuaaagaccaccagg

SEQ ID NO: 1187699 - RNA, 24 nt, Human
ugccugcugcugaccacagggauu

SEQ ID NO: 1187700 - RNA, 19 nt, Human
ugcuaaacucaugaauacu

SEQ ID NO: 1187701 - RNA, 20 nt, Human
uggcuccuuuuagcacuccu

SEQ ID NO: 1187702 - RNA, 19 nt, Human
uguaaucacacaacuaccc

SEQ ID NO: 1187703 - RNA, 22 nt, Human
uguaauuaaaacaauacagaac

SEQ ID NO: 1187704 - RNA, 23 nt, Human
uguaauuaaaacaauacagaaca

SEQ ID NO: 1187705 - RNA, 21 nt, Human
uguagaaugaggaagcuuccu

SEQ ID NO: 1187706 - RNA, 21 nt, Human
uguauugucugucaccugcca

SEQ ID NO: 1187707 - RNA, 22 nt, Human
ugucacagaucucaucacuuag

SEQ ID NO: 1187708 - RNA, 22 nt, Human
ugugcagggcccugagaugggg

SEQ ID NO: 1187709 - RNA, 24 nt, Human
uucaccagugacccagucagugcc

SEQ ID NO: 1187710 - RNA, 22 nt, Human
uuccuccugggaagcucuuucu

SEQ ID NO: 1187711 - RNA, 26 nt, Human
uugacacacaaacaggaagugagaaa

SEQ ID NO: 1187712 - RNA, 19 nt, Human
uuucuccauuuggcagaga

SEQ ID NO: 1187713 - RNA, 18 nt, Human
uuugaaaauccaaggcua

SEQ ID NO: 1187714 - RNA, 24 nt, Human
acacuccguuggugaccugcaggc

SEQ ID NO: 1187715 - RNA, 23 nt, Human
agaacuucacggggccugugugg

SEQ ID NO: 1187716 - RNA, 21 nt, Human
agaaggcagcagagggcagga

SEQ ID NO: 1187717 - RNA, 21 nt, Human
agcaagcguccugcccaccac

SEQ ID NO: 1187718 - RNA, 24 nt, Human
agcacagucacuuugcgucugugg

SEQ ID NO: 1187719 - RNA, 21 nt, Human
aggaagccuggagaggcggcu

SEQ ID NO: 1187720 - RNA, 21 nt, Human
aggcagcagagggcagccggc

SEQ ID NO: 1187721 - RNA, 24 nt, Human
aggcggcuguggccaggugggggc

SEQ ID NO: 1187722 - RNA, 21 nt, Human
aguggaggguuugagcuggaa

SEQ ID NO: 1187723 - RNA, 21 nt, Human
augccagcacagucacuuugc

SEQ ID NO: 1187724 - RNA, 19 nt, Human
caaggaagccuggagaggc

SEQ ID NO: 1187725 - RNA, 21 nt, Human
cacccuucaggacccgcagac

SEQ ID NO: 1187726 - RNA, 22 nt, Human
cacucacccuucaggacccgca

SEQ ID NO: 1187727 - RNA, 21 nt, Human
cagaaggcagcagagggcagc

SEQ ID NO: 1187728 - RNA, 20 nt, Human
cagcaccaucugaaagggaa

SEQ ID NO: 1187729 - RNA, 18 nt, Human
cagcagagggcagccggc

SEQ ID NO: 1187730 - RNA, 21 nt, Human
cagcugcccacuccgggucuc

SEQ ID NO: 1187731 - RNA, 22 nt, Human
ccacugauuggguggagguggg

SEQ ID NO: 1187732 - RNA, 25 nt, Human
ccagcucacucacccuucaggaccc

SEQ ID NO: 1187733 - RNA, 18 nt, Human
ccaggaaagggggaccuc

SEQ ID NO: 1187734 - RNA, 18 nt, Human
ccaguggaggguuugagc

SEQ ID NO: 1187735 - RNA, 26 nt, Human
ccuccacagcagcugcccacuccggg

SEQ ID NO: 1187736 - RNA, 27 nt, Human
ccugcugugggcaugggccaugggaac

SEQ ID NO: 1187737 - RNA, 18 nt, Human
ccuguguggccacccagc

SEQ ID NO: 1187738 - RNA, 21 nt, Human
ccuucaggacccgcagacacu

SEQ ID NO: 1187739 - RNA, 24 nt, Human
ccuugaaucccagacugguggccc

SEQ ID NO: 1187740 - RNA, 18 nt, Human
ccuugguugccugcugug

SEQ ID NO: 1187741 - RNA, 19 nt, Human
cugcucugguggggccugg

SEQ ID NO: 1187742 - RNA, 20 nt, Human
gacccgcagacacuucgcuc

SEQ ID NO: 1187743 - RNA, 21 nt, Human
gagagagcccugagcugcaga

SEQ ID NO: 1187744 - RNA, 19 nt, Human
gagagcccugagcugcaga

SEQ ID NO: 1187745 - RNA, 19 nt, Human
gaggugggugggucugguu

SEQ ID NO: 1187746 - RNA, 20 nt, Human
gcccggggucggggaaggug

SEQ ID NO: 1187747 - RNA, 19 nt, Human
gccggcuaccuggccuuga

SEQ ID NO: 1187748 - RNA, 21 nt, Human
gcuguggccaggugggggcag

SEQ ID NO: 1187749 - RNA, 19 nt, Human
ggcagccuugguugccugc

SEQ ID NO: 1187750 - RNA, 23 nt, Human
ggcaugggccaugggaaccagug

SEQ ID NO: 1187751 - RNA, 20 nt, Human
gggaagguggaaaggugacg

SEQ ID NO: 1187752 - RNA, 19 nt, Human
guccaggaaagggggaccu

SEQ ID NO: 1187753 - RNA, 19 nt, Human
gugacacaggacacagcac

SEQ ID NO: 1187754 - RNA, 19 nt, Human
uaccuggccuugacagucc

SEQ ID NO: 1187755 - RNA, 20 nt, Human
uaccuggccuugacaguccc

SEQ ID NO: 1187756 - RNA, 18 nt, Human
uccaggaaagggggaccu

SEQ ID NO: 1187757 - RNA, 24 nt, Human
ucccagacugguggccccagcccc

SEQ ID NO: 1187758 - RNA, 20 nt, Human
ucccagcucacucacccuuc

SEQ ID NO: 1187759 - RNA, 22 nt, Human
ucugcucugguggggccuggag

SEQ ID NO: 1187760 - RNA, 18 nt, Human
ucuguggggagaagcggc

SEQ ID NO: 1187761 - RNA, 18 nt, Human
ugaaagggaacgcuggcc

SEQ ID NO: 1187762 - RNA, 21 nt, Human
ugaaagggaacgcuggccugg

SEQ ID NO: 1187763 - RNA, 20 nt, Human
ugacgugacacaggacacag

SEQ ID NO: 1187764 - RNA, 19 nt, Human
ugcaaaaagccugagggcu

SEQ ID NO: 1187765 - RNA, 24 nt, Human
ugcuuggcucccagcucacucacc

SEQ ID NO: 1187766 - RNA, 21 nt, Human
uggaaaggugacgugacacag

SEQ ID NO: 1187767 - RNA, 21 nt, Human
uggaggugggugggucugguu

SEQ ID NO: 1187768 - RNA, 23 nt, Human
uggccaggugggggcagccuugg

SEQ ID NO: 1187769 - RNA, 21 nt, Human
uggcucccagcucacucaccc

SEQ ID NO: 1187770 - RNA, 21 nt, Human
ugggcaugggccaugggaacc

SEQ ID NO: 1187771 - RNA, 24 nt, Human
ugggggcagccuugguugccugcu

SEQ ID NO: 1187772 - RNA, 19 nt, Human
ugguggccccagccccuca

SEQ ID NO: 1187773 - RNA, 21 nt, Human
ugguggggccuggagaguccu

SEQ ID NO: 1187774 - RNA, 20 nt, Human
ugucccagccaccugaugcc

SEQ ID NO: 1187775 - RNA, 19 nt, Human
uguggccaggugggggcag

SEQ ID NO: 1187776 - RNA, 18 nt, Human
uuggguggaggugggugg

SEQ ID NO: 1187777 - RNA, 23 nt, Human
uugucugcucugguggggccugg

SEQ ID NO: 1187778 - RNA, 20 nt, Human
aagcagaugaaguaauaaau

SEQ ID NO: 1187779 - RNA, 23 nt, Human
aaguuucuugcucauuuauaugc

SEQ ID NO: 1187780 - RNA, 19 nt, Human
acaaaauauaucuguaucc

SEQ ID NO: 1187781 - RNA, 20 nt, Human
acgcaaucaaucuugcauac

SEQ ID NO: 1187782 - RNA, 20 nt, Human
acuccuuuguuuuuccuuug

SEQ ID NO: 1187783 - RNA, 18 nt, Human
auacucuucucucugaca

SEQ ID NO: 1187784 - RNA, 19 nt, Human
auauaucuguauccaagga

SEQ ID NO: 1187785 - RNA, 20 nt, Human
augauucugauuguuucuuc

SEQ ID NO: 1187786 - RNA, 20 nt, Human
auuuggcuagaauuuuccuu

SEQ ID NO: 1187787 - RNA, 23 nt, Human
caagagucugaaaugcaaaacca

SEQ ID NO: 1187788 - RNA, 26 nt, Human
caccucuaccaagcagaugaaguaau

SEQ ID NO: 1187789 - RNA, 20 nt, Human
cacuaaagccaccucuacca

SEQ ID NO: 1187790 - RNA, 22 nt, Human
cagugauuuugguuucaccaca

SEQ ID NO: 1187791 - RNA, 19 nt, Human
cauaaaggucaaaagccuu

SEQ ID NO: 1187792 - RNA, 24 nt, Human
cucuucucucugacaguuuuucuu

SEQ ID NO: 1187793 - RNA, 19 nt, Human
cuuggauuucugccucuuc

SEQ ID NO: 1187794 - RNA, 24 nt, Human
gagggugucugagaauuauuagcu

SEQ ID NO: 1187795 - RNA, 26 nt, Human
uaaauaucuuucauuuaacauugggu

SEQ ID NO: 1187796 - RNA, 21 nt, Human
uagaauuuuccuuugccuuuc

SEQ ID NO: 1187797 - RNA, 21 nt, Human
uagcuucacagaagcauagcu

SEQ ID NO: 1187798 - RNA, 24 nt, Human
uaguaguuuucuuuuuucucaucu

SEQ ID NO: 1187799 - RNA, 23 nt, Human
uauacacuucacuaaagccaccu

SEQ ID NO: 1187800 - RNA, 19 nt, Human
ucaauaucuucccuuugcu

SEQ ID NO: 1187801 - RNA, 18 nt, Human
ucauuccaucugcaccau

SEQ ID NO: 1187802 - RNA, 22 nt, Human
uccccuggaugauucugauugu

SEQ ID NO: 1187803 - RNA, 23 nt, Human
uccccuggaugauucugauuguu

SEQ ID NO: 1187804 - RNA, 22 nt, Human
ucuaccaaaaggauguuuccug

SEQ ID NO: 1187805 - RNA, 24 nt, Human
ucuauacugcaggcauguuuguag

SEQ ID NO: 1187806 - RNA, 19 nt, Human
ucugccucuucuuuucuga

SEQ ID NO: 1187807 - RNA, 22 nt, Human
ucugcuuuucucuaucuucccc

SEQ ID NO: 1187808 - RNA, 24 nt, Human
ugacuccuuuguuuuuccuuuguu

SEQ ID NO: 1187809 - RNA, 20 nt, Human
ugacucuuuccaaacguuca

SEQ ID NO: 1187810 - RNA, 19 nt, Human
ugagaauuauuagcugugg

SEQ ID NO: 1187811 - RNA, 24 nt, Human
ugugggagguuugcauuuggcuag

SEQ ID NO: 1187812 - RNA, 19 nt, Human
uucaaguucugcuuggauu

SEQ ID NO: 1187813 - RNA, 26 nt, Human
uuccuuuguuuugguucagaauuggu

SEQ ID NO: 1187814 - RNA, 23 nt, Human
uuguuuauucuucucagcucacg

SEQ ID NO: 1187815 - RNA, 23 nt, Human
uuguuuuuccuuuguuuugguuc

SEQ ID NO: 1187816 - RNA, 21 nt, Human
uuugaacauuucuuccuguuc

SEQ ID NO: 1187817 - RNA, 23 nt, Human
uuugguucagaauugguagaggg

SEQ ID NO: 1187818 - RNA, 20 nt, Human
uuucuggcaauuucaucuga

SEQ ID NO: 1187819 - RNA, 18 nt, Human
aacacccaagcccacagc

SEQ ID NO: 1187820 - RNA, 18 nt, Human
aacacuguccccuccucu

SEQ ID NO: 1187821 - RNA, 18 nt, Human
aagcuuggaaguugggcc

SEQ ID NO: 1187822 - RNA, 21 nt, Human
acagaaagcuuggaaguuggg

SEQ ID NO: 1187823 - RNA, 23 nt, Human
acagaaagcuuggaaguugggcc

SEQ ID NO: 1187824 - RNA, 22 nt, Human
agcaaacagaaagcuuggaagu

SEQ ID NO: 1187825 - RNA, 26 nt, Human
caccaccaacacuguccccuccucug

SEQ ID NO: 1187826 - RNA, 21 nt, Human
cacccaagcccacagcaccac

SEQ ID NO: 1187827 - RNA, 20 nt, Human
ccaagcccacagcaccacca

SEQ ID NO: 1187828 - RNA, 20 nt, Human
ccacagcaccaccaacacug

SEQ ID NO: 1187829 - RNA, 19 nt, Human
ccaccaacacuguccccuc

SEQ ID NO: 1187830 - RNA, 19 nt, Human
cccacagcaccaccaacac

SEQ ID NO: 1187831 - RNA, 20 nt, Human
ccccuccucuggccauccca

SEQ ID NO: 1187832 - RNA, 23 nt, Human
cugcucugcucagaguaauuuua

SEQ ID NO: 1187833 - RNA, 20 nt, Human
uccucuggccaucccacccc

SEQ ID NO: 1187834 - RNA, 22 nt, Human
uccucuggccaucccaccccga

SEQ ID NO: 1187835 - RNA, 23 nt, Human
uguccccuccucuggccauccca

SEQ ID NO: 1187836 - RNA, 18 nt, Human
gaaaaagaaagcuucuac

SEQ ID NO: 1187837 - RNA, 21 nt, Human
ucugagccaggaaaaagaaag

SEQ ID NO: 1187838 - RNA, 24 nt, Human
acaguggugaugguggcuggaggc

SEQ ID NO: 1187839 - RNA, 19 nt, Human
acauuuucuccuccagcau

SEQ ID NO: 1187840 - RNA, 25 nt, Human
aggcuaaaaaagaauuugugacuga

SEQ ID NO: 1187841 - RNA, 21 nt, Human
aguagaaggggugccuguggu

SEQ ID NO: 1187842 - RNA, 20 nt, Human
agugaauuuuuucuugggga

SEQ ID NO: 1187843 - RNA, 19 nt, Human
augucacaggccccauugc

SEQ ID NO: 1187844 - RNA, 20 nt, Human
auuuuuggcccaugcugagg

SEQ ID NO: 1187845 - RNA, 18 nt, Human
caaauuagauaccucccc

SEQ ID NO: 1187846 - RNA, 21 nt, Human
caagggcugcugaucucugcu

SEQ ID NO: 1187847 - RNA, 21 nt, Human
caccagguauuuuuggcccau

SEQ ID NO: 1187848 - RNA, 24 nt, Human
caccagguauuuuuggcccaugcu

SEQ ID NO: 1187849 - RNA, 20 nt, Human
cacuuuucaagggcugcuga

SEQ ID NO: 1187850 - RNA, 23 nt, Human
cauggcacucacggcaaagugac

SEQ ID NO: 1187851 - RNA, 22 nt, Human
ccagguauuuuuggcccaugcu

SEQ ID NO: 1187852 - RNA, 22 nt, Human
cccacagacuggggcuugaaac

SEQ ID NO: 1187853 - RNA, 19 nt, Human
ccugugguugcagggaaac

SEQ ID NO: 1187854 - RNA, 23 nt, Human
cuccccgaagaagacagugccuu

SEQ ID NO: 1187855 - RNA, 23 nt, Human
cugaccaaauuagauaccucccc

SEQ ID NO: 1187856 - RNA, 22 nt, Human
gaagaagacagugccuuggaca

SEQ ID NO: 1187857 - RNA, 18 nt, Human
gagcaagaguuggggaug

SEQ ID NO: 1187858 - RNA, 20 nt, Human
ggacaguggugaugguggcc

SEQ ID NO: 1187859 - RNA, 26 nt, Human
gggaaacccacagacuggggcuugaa

SEQ ID NO: 1187860 - RNA, 21 nt, Human
ggggagcaagaguuggggaug

SEQ ID NO: 1187861 - RNA, 22 nt, Human
uaaaaaaccauauauauugugg

SEQ ID NO: 1187862 - RNA, 19 nt, Human
uagaaggggugccuguggu

SEQ ID NO: 1187863 - RNA, 18 nt, Human
ucacaggccccauugcuc

SEQ ID NO: 1187864 - RNA, 20 nt, Human
ucacaggccccauugcucau

SEQ ID NO: 1187865 - RNA, 28 nt, Human
ucauuguugcaccggacacuuuucaacu

SEQ ID NO: 1187866 - RNA, 23 nt, Human
ucuggcucuugggaguggcuugu

SEQ ID NO: 1187867 - RNA, 21 nt, Human
ugagggggacugacuggggau

SEQ ID NO: 1187868 - RNA, 22 nt, Human
ugaguagaaggggugccugugg

SEQ ID NO: 1187869 - RNA, 24 nt, Human
ugcaccggacacuuuucaagggcu

SEQ ID NO: 1187870 - RNA, 23 nt, Human
ugccuuggacaguggugauggug

SEQ ID NO: 1187871 - RNA, 20 nt, Human
ugcugagggggacugacugg

SEQ ID NO: 1187872 - RNA, 19 nt, Human
ugcuguguucugaguagaa

SEQ ID NO: 1187873 - RNA, 22 nt, Human
uggccccuggagccucgaaacc

SEQ ID NO: 1187874 - RNA, 21 nt, Human
ugugguugcagggaaacccac

SEQ ID NO: 1187875 - RNA, 20 nt, Human
uucaagggcugcugaucucu

SEQ ID NO: 1187876 - RNA, 19 nt, Human
uugcaccggacacuuuuca

SEQ ID NO: 1187877 - RNA, 24 nt, Human
uuggacaguggugaugguggcuuu

SEQ ID NO: 1187878 - RNA, 20 nt, Human
aaacaaauauaaagagacac

SEQ ID NO: 1187879 - RNA, 22 nt, Human
aaacaaauauaaagagacacuu

SEQ ID NO: 1187880 - RNA, 27 nt, Human
aaacaccgugaacagaaaaaagauugc

SEQ ID NO: 1187881 - RNA, 20 nt, Human
aaaguuuucccaugccacau

SEQ ID NO: 1187882 - RNA, 21 nt, Human
aaauaugaaaauaaaucuuua

SEQ ID NO: 1187883 - RNA, 19 nt, Human
aacaccaaauucaagcagu

SEQ ID NO: 1187884 - RNA, 21 nt, Human
aacaccgugaacagaaaaaag

SEQ ID NO: 1187885 - RNA, 22 nt, Human
aacagccauggcaaaaguuuuc

SEQ ID NO: 1187886 - RNA, 19 nt, Human
aagaugccacuaagacaaa

SEQ ID NO: 1187887 - RNA, 19 nt, Human
aagcaagguaaauuagaau

SEQ ID NO: 1187888 - RNA, 27 nt, Human
aagcagcaagugaaaaaaagggacccc

SEQ ID NO: 1187889 - RNA, 22 nt, Human
aaggacaugacuagucuauuua

SEQ ID NO: 1187890 - RNA, 20 nt, Human
aagguucuaucacaaacacc

SEQ ID NO: 1187891 - RNA, 18 nt, Human
aaucacucacugagacaa

SEQ ID NO: 1187892 - RNA, 22 nt, Human
acaaaacaaagaagagccaaag

SEQ ID NO: 1187893 - RNA, 24 nt, Human
acaaagaagagccaaaguuccaga

SEQ ID NO: 1187894 - RNA, 18 nt, Human
acaauaaauaacagcuac

SEQ ID NO: 1187895 - RNA, 22 nt, Human
acaauaaaugcccacaaaaacc

SEQ ID NO: 1187896 - RNA, 24 nt, Human
acagaaaaaagauugcuacaugga

SEQ ID NO: 1187897 - RNA, 19 nt, Human
acagcaaagcuaggaugag

SEQ ID NO: 1187898 - RNA, 21 nt, Human
acaggccaaggauguuuggga

SEQ ID NO: 1187899 - RNA, 21 nt, Human
acuauucugagauuaugaaau

SEQ ID NO: 1187900 - RNA, 21 nt, Human
acucucuguccuacugcuucc

SEQ ID NO: 1187901 - RNA, 21 nt, Human
agaaucccuucuuacuagaac

SEQ ID NO: 1187902 - RNA, 23 nt, Human
agaaucccuucuuacuagaacuu

SEQ ID NO: 1187903 - RNA, 23 nt, Human
agccaaaguuccagagggaccug

SEQ ID NO: 1187904 - RNA, 20 nt, Human
agccccuggcaaccacuccc

SEQ ID NO: 1187905 - RNA, 18 nt, Human
agggaccugagagcuggg

SEQ ID NO: 1187906 - RNA, 19 nt, Human
agggaccugagagcugggu

SEQ ID NO: 1187907 - RNA, 24 nt, Human
auaaaacaauuauucaauacucag

SEQ ID NO: 1187908 - RNA, 21 nt, Human
auaguaauaugcaaauguauc

SEQ ID NO: 1187909 - RNA, 18 nt, Human
auauaucagcaucuacau

SEQ ID NO: 1187910 - RNA, 22 nt, Human
augaaucucccagcauacagag

SEQ ID NO: 1187911 - RNA, 22 nt, Human
auucuggaaaugaagacuucac

SEQ ID NO: 1187912 - RNA, 22 nt, Human
caaaaaccaucacugaagccga

SEQ ID NO: 1187913 - RNA, 23 nt, Human
caaaggaagcaagcuuuauugaa

SEQ ID NO: 1187914 - RNA, 20 nt, Human
caaaugucacauaugucaua

SEQ ID NO: 1187915 - RNA, 25 nt, Human
caacacaguaacauauaaacuaaca

SEQ ID NO: 1187916 - RNA, 20 nt, Human
caaggccuuugagggcaagc

SEQ ID NO: 1187917 - RNA, 21 nt, Human
caaggccuuugagggcaagcu

SEQ ID NO: 1187918 - RNA, 18 nt, Human
cacacaauaaaugcccac

SEQ ID NO: 1187919 - RNA, 19 nt, Human
cacacacaauaaaugccca

SEQ ID NO: 1187920 - RNA, 24 nt, Human
cacugaagccgaucacuguacaaa

SEQ ID NO: 1187921 - RNA, 19 nt, Human
cacuguacaaauaugaaaa

SEQ ID NO: 1187922 - RNA, 19 nt, Human
cagccccuggcaaccacuc

SEQ ID NO: 1187923 - RNA, 18 nt, Human
caggaauucauggcagag

SEQ ID NO: 1187924 - RNA, 23 nt, Human
caucaucgcccaaagaaaccaca

SEQ ID NO: 1187925 - RNA, 24 nt, Human
cauggaauuguuucgauucaacaa

SEQ ID NO: 1187926 - RNA, 25 nt, Human
ccaaaaccuaaacaugugucccaua

SEQ ID NO: 1187927 - RNA, 20 nt, Human
ccacucuguuaagagccaaa

SEQ ID NO: 1187928 - RNA, 21 nt, Human
ccagaacauucucaucaucgc

SEQ ID NO: 1187929 - RNA, 24 nt, Human
ccagaacauucucaucaucgccca

SEQ ID NO: 1187930 - RNA, 27 nt, Human
ccagaacauucucaucaucgcccaaag

SEQ ID NO: 1187931 - RNA, 19 nt, Human
cccacaaaaaccaucacug

SEQ ID NO: 1187932 - RNA, 24 nt, Human
cccacaaaaaccaucacugaagcc

SEQ ID NO: 1187933 - RNA, 22 nt, Human
cccacacaaugaaaauguaaac

SEQ ID NO: 1187934 - RNA, 21 nt, Human
cccacagaaucugaggugcca

SEQ ID NO: 1187935 - RNA, 22 nt, Human
cccaugccacauaaauaauacc

SEQ ID NO: 1187936 - RNA, 26 nt, Human
ccgugaacagaaaaaagauugcuaca

SEQ ID NO: 1187937 - RNA, 23 nt, Human
ccuaggcucaaguguugacuccu

SEQ ID NO: 1187938 - RNA, 20 nt, Human
ccuauuagcagucacucccc

SEQ ID NO: 1187939 - RNA, 20 nt, Human
ccuucuuacuagaacuuuag

SEQ ID NO: 1187940 - RNA, 18 nt, Human
cuaaaaguuaacagugaa

SEQ ID NO: 1187941 - RNA, 23 nt, Human
cuaccacaugaaucuaauuaugu

SEQ ID NO: 1187942 - RNA, 20 nt, Human
cucaccuuuccuaaugguga

SEQ ID NO: 1187943 - RNA, 21 nt, Human
cuccccauccucccuuucuca

SEQ ID NO: 1187944 - RNA, 27 nt, Human
gaauaaauaaaggcaacacaguaacau

SEQ ID NO: 1187945 - RNA, 25 nt, Human
gagacaaaacaaagaagagccaaag

SEQ ID NO: 1187946 - RNA, 22 nt, Human
ggcaucucaguggggaggucug

SEQ ID NO: 1187947 - RNA, 22 nt, Human
gguaaagacuaugaaaauacuu

SEQ ID NO: 1187948 - RNA, 23 nt, Human
guaaaccauauaaaucaaaauca

SEQ ID NO: 1187949 - RNA, 20 nt, Human
guaggaugugccacucuguu

SEQ ID NO: 1187950 - RNA, 23 nt, Human
guaguuccuuagacauuugcauu

SEQ ID NO: 1187951 - RNA, 22 nt, Human
guaucaagucuaagauaaaaac

SEQ ID NO: 1187952 - RNA, 18 nt, Human
gugcaacugcaccaaaac

SEQ ID NO: 1187953 - RNA, 25 nt, Human
uaaaacaaauauaaagagacacuuu

SEQ ID NO: 1187954 - RNA, 22 nt, Human
uaaacgaaauauggcccacaca

SEQ ID NO: 1187955 - RNA, 21 nt, Human
uaaagagacacuuuggagaga

SEQ ID NO: 1187956 - RNA, 21 nt, Human
uaacagcaaagcuaggaugag

SEQ ID NO: 1187957 - RNA, 21 nt, Human
uaacagugaaaaauaucuccu

SEQ ID NO: 1187958 - RNA, 22 nt, Human
uaaccuaauucagcuaccacau

SEQ ID NO: 1187959 - RNA, 22 nt, Human
uaacucuccauaggacaguguc

SEQ ID NO: 1187960 - RNA, 23 nt, Human
uaaguuccuucagcaagcuacuu

SEQ ID NO: 1187961 - RNA, 26 nt, Human
uaauaaucaugaaucucccagcauac

SEQ ID NO: 1187962 - RNA, 21 nt, Human
uacaacuaucaccacuauucc

SEQ ID NO: 1187963 - RNA, 22 nt, Human
uacaacuaucaccacuauuccu

SEQ ID NO: 1187964 - RNA, 22 nt, Human
uagugagauaauucacaaccau

SEQ ID NO: 1187965 - RNA, 22 nt, Human
uauaaacgaaauauggcccaca

SEQ ID NO: 1187966 - RNA, 18 nt, Human
uauacucuuucacagauu

SEQ ID NO: 1187967 - RNA, 22 nt, Human
uaugcaagacauucuuuaugau

SEQ ID NO: 1187968 - RNA, 24 nt, Human
ucaauacucagaggccuacuuaau

SEQ ID NO: 1187969 - RNA, 20 nt, Human
ucacauaugucauauaaagc

SEQ ID NO: 1187970 - RNA, 22 nt, Human
ucacugaagccgaucacuguac

SEQ ID NO: 1187971 - RNA, 19 nt, Human
uccacaaugaaauuaaaau

SEQ ID NO: 1187972 - RNA, 19 nt, Human
ucuuuuuuuuuaccauuuu

SEQ ID NO: 1187973 - RNA, 20 nt, Human
ugaaaucagcagggauacga

SEQ ID NO: 1187974 - RNA, 18 nt, Human
ugaaauuucuuacacaca

SEQ ID NO: 1187975 - RNA, 19 nt, Human
ugaagaaacagauccgaca

SEQ ID NO: 1187976 - RNA, 22 nt, Human
ugaauaacuuccauaguaauau

SEQ ID NO: 1187977 - RNA, 21 nt, Human
ugacaggacaauccagaggua

SEQ ID NO: 1187978 - RNA, 24 nt, Human
ugagaaaaaucaauacuccaauau

SEQ ID NO: 1187979 - RNA, 25 nt, Human
ugagacaaaacaaagaagagccaaa

SEQ ID NO: 1187980 - RNA, 21 nt, Human
ugccacuaagacaaacagcca

SEQ ID NO: 1187981 - RNA, 22 nt, Human
ugccacucuguuaagagccaaa

SEQ ID NO: 1187982 - RNA, 20 nt, Human
uggaaccaggaaacaggaau

SEQ ID NO: 1187983 - RNA, 19 nt, Human
uggaaggagaguaggccca

SEQ ID NO: 1187984 - RNA, 21 nt, Human
ugggaagguuugaaaucagca

SEQ ID NO: 1187985 - RNA, 20 nt, Human
ugguaauaaucaugaaucuc

SEQ ID NO: 1187986 - RNA, 23 nt, Human
uguaaaccauauaaaucaaaauc

SEQ ID NO: 1187987 - RNA, 22 nt, Human
ugucucaaacauguuucuuuau

SEQ ID NO: 1187988 - RNA, 21 nt, Human
ugugcaacuuggguuuaugca

SEQ ID NO: 1187989 - RNA, 18 nt, Human
ugugccacucuguuaaga

SEQ ID NO: 1187990 - RNA, 21 nt, Human
ugugggccaccacacucucug

SEQ ID NO: 1187991 - RNA, 23 nt, Human
ugugggccaccacacucucuguu

SEQ ID NO: 1187992 - RNA, 20 nt, Human
uguuacaucacucuaaguac

SEQ ID NO: 1187993 - RNA, 25 nt, Human
uuaaaaagcaggaauaaccauaguu

SEQ ID NO: 1187994 - RNA, 24 nt, Human
uuaagguucuaucacaaacaccgu

SEQ ID NO: 1187995 - RNA, 23 nt, Human
uuagcagucacuccccauccucc

SEQ ID NO: 1187996 - RNA, 23 nt, Human
uucaaaaaacugaugcuugcgga

SEQ ID NO: 1187997 - RNA, 23 nt, Human
uucaacaaaaauaaauguuuuua

SEQ ID NO: 1187998 - RNA, 18 nt, Human
uucagugguuccuaguac

SEQ ID NO: 1187999 - RNA, 24 nt, Human
uucucagccccuggcaaccacucc

SEQ ID NO: 1188000 - RNA, 27 nt, Human
uuuucccaugccacauaaauaauaccc

SEQ ID NO: 1188001 - RNA, 18 nt, Human
aacagacaggacccucag

SEQ ID NO: 1188002 - RNA, 25 nt, Human
acggugcgcgcacacacuggccugc

SEQ ID NO: 1188003 - RNA, 21 nt, Human
agacagggacacuuaagucug

SEQ ID NO: 1188004 - RNA, 22 nt, Human
aucuccaucugcgugcugggag

SEQ ID NO: 1188005 - RNA, 21 nt, Human
cacacacuggccugcgcccac

SEQ ID NO: 1188006 - RNA, 18 nt, Human
cacgcugggagcuguaga

SEQ ID NO: 1188007 - RNA, 27 nt, Human
cacuggccugcgcccacugucucgcac

SEQ ID NO: 1188008 - RNA, 24 nt, Human
cagcccccaacaggucccgggagc

SEQ ID NO: 1188009 - RNA, 19 nt, Human
cagccucguugccgccuug

SEQ ID NO: 1188010 - RNA, 19 nt, Human
cagcugcaggucuguugga

SEQ ID NO: 1188011 - RNA, 23 nt, Human
cagggacacuuaagucugcagag

SEQ ID NO: 1188012 - RNA, 19 nt, Human
cagggcccucccuggaagg

SEQ ID NO: 1188013 - RNA, 18 nt, Human
caggucccgggagcggug

SEQ ID NO: 1188014 - RNA, 20 nt, Human
ccacccaguucgagcuucca

SEQ ID NO: 1188015 - RNA, 24 nt, Human
ccagagguggagccuacagaggca

SEQ ID NO: 1188016 - RNA, 22 nt, Human
ccagcccccaacaggucccggg

SEQ ID NO: 1188017 - RNA, 20 nt, Human
ccaguucgagcuuccaggcu

SEQ ID NO: 1188018 - RNA, 22 nt, Human
ccccagagguggagccuacaga

SEQ ID NO: 1188019 - RNA, 22 nt, Human
ccucccuggaaggacggggcca

SEQ ID NO: 1188020 - RNA, 20 nt, Human
ccugcgacugagcgcccaag

SEQ ID NO: 1188021 - RNA, 22 nt, Human
cgggcgccccucccccagccuc

SEQ ID NO: 1188022 - RNA, 21 nt, Human
cggggccaccugcugccgccg

SEQ ID NO: 1188023 - RNA, 18 nt, Human
cgggugggagugacccga

SEQ ID NO: 1188024 - RNA, 23 nt, Human
cguagugagaugaacccgguacc

SEQ ID NO: 1188025 - RNA, 21 nt, Human
cgugcugggagaaccacugcu

SEQ ID NO: 1188026 - RNA, 23 nt, Human
cucgcgcacggugcgcgcacaca

SEQ ID NO: 1188027 - RNA, 23 nt, Human
cugcuugggggucaggggucagg

SEQ ID NO: 1188028 - RNA, 22 nt, Human
gcaggucuguuggaauacccug

SEQ ID NO: 1188029 - RNA, 20 nt, Human
gcccugcccccagaggugga

SEQ ID NO: 1188030 - RNA, 19 nt, Human
gccuccaucccgccuggcg

SEQ ID NO: 1188031 - RNA, 18 nt, Human
gccugggcaauggcgggc

SEQ ID NO: 1188032 - RNA, 18 nt, Human
ggaacgucgggcggggcg

SEQ ID NO: 1188033 - RNA, 19 nt, Human
ggcgccccucccccagccu

SEQ ID NO: 1188034 - RNA, 25 nt, Human
gggcggggcgaggaacgucgggggu

SEQ ID NO: 1188035 - RNA, 18 nt, Human
gggcuccaggcaccgcca

SEQ ID NO: 1188036 - RNA, 19 nt, Human
guggccgagcggcucccuu

SEQ ID NO: 1188037 - RNA, 24 nt, Human
gugucagugugccccuguuggggg

SEQ ID NO: 1188038 - RNA, 23 nt, Human
guugccgccuugcaguuugaucu

SEQ ID NO: 1188039 - RNA, 19 nt, Human
uaacagacaggacccucag

SEQ ID NO: 1188040 - RNA, 21 nt, Human
uaacagacaggacccucagcu

SEQ ID NO: 1188041 - RNA, 18 nt, Human
ucagauggaaaugcagaa

SEQ ID NO: 1188042 - RNA, 18 nt, Human
ucccccagccucguugcc

SEQ ID NO: 1188043 - RNA, 18 nt, Human
ucugagccagguguggga

SEQ ID NO: 1188044 - RNA, 21 nt, Human
ucugugcccugcccccagagg

SEQ ID NO: 1188045 - RNA, 22 nt, Human
ucuguuggaauacccugccgug

SEQ ID NO: 1188046 - RNA, 22 nt, Human
ugaggcaaugccucgcccugcu

SEQ ID NO: 1188047 - RNA, 19 nt, Human
ugauguacagauggguuuu

SEQ ID NO: 1188048 - RNA, 18 nt, Human
ugcccugcccccagaggu

SEQ ID NO: 1188049 - RNA, 23 nt, Human
ugcccugcccccagagguggagc

SEQ ID NO: 1188050 - RNA, 22 nt, Human
ugcgacugagcgcccaagcgcc

SEQ ID NO: 1188051 - RNA, 20 nt, Human
ugcgcccgggcuccaggcac

SEQ ID NO: 1188052 - RNA, 22 nt, Human
ugcgcgcacacacuggccugcg

SEQ ID NO: 1188053 - RNA, 24 nt, Human
ugcuuuguuuaccuaagcaagccu

SEQ ID NO: 1188054 - RNA, 20 nt, Human
ugucagugugccccuguugg

SEQ ID NO: 1188055 - RNA, 22 nt, Human
uguggugcgccguuucuuaagc

SEQ ID NO: 1188056 - RNA, 19 nt, Human
uguggugggcuccacccag

SEQ ID NO: 1188057 - RNA, 20 nt, Human
uucccaggugaggcaaugcc

SEQ ID NO: 1188058 - RNA, 26 nt, Human
uugggggucaggggucagggacccac

SEQ ID NO: 1188059 - RNA, 21 nt, Human
uuugugguuuuaucuacuuuu

SEQ ID NO: 1188060 - RNA, 19 nt, Human
aaagugcuggaauuauagg

SEQ ID NO: 1188061 - RNA, 24 nt, Human
aaagugcuggaauuauaggcauga

SEQ ID NO: 1188062 - RNA, 20 nt, Human
aaccuccgccucccagccuc

SEQ ID NO: 1188063 - RNA, 24 nt, Human
aagugauccuucugccuuggccuc

SEQ ID NO: 1188064 - RNA, 26 nt, Human
aagugcuggaauuauaggcaugagcc

SEQ ID NO: 1188065 - RNA, 21 nt, Human
aauagugacccuaaugugcuu

SEQ ID NO: 1188066 - RNA, 21 nt, Human
aauuauaggcaugagccacug

SEQ ID NO: 1188067 - RNA, 18 nt, Human
accagagcuucuguucca

SEQ ID NO: 1188068 - RNA, 24 nt, Human
acuauguuucucaggcuggucucg

SEQ ID NO: 1188069 - RNA, 21 nt, Human
agaagguaugcaauguuccag

SEQ ID NO: 1188070 - RNA, 18 nt, Human
agagauccccccaccuca

SEQ ID NO: 1188071 - RNA, 19 nt, Human
agauccccccaccucaucc

SEQ ID NO: 1188072 - RNA, 18 nt, Human
aggcaugagccacugagc

SEQ ID NO: 1188073 - RNA, 19 nt, Human
aggcaugagccacugagcc

SEQ ID NO: 1188074 - RNA, 21 nt, Human
aggcaugagccacugagccug

SEQ ID NO: 1188075 - RNA, 25 nt, Human
aggcuggagugcaguggcacaaucu

SEQ ID NO: 1188076 - RNA, 21 nt, Human
aggcuggucucgaacuccugg

SEQ ID NO: 1188077 - RNA, 21 nt, Human
agugcaguggcacaaucucag

SEQ ID NO: 1188078 - RNA, 24 nt, Human
agugcaguggcacaaucucagcuc

SEQ ID NO: 1188079 - RNA, 19 nt, Human
auaccagagcuucuguucc

SEQ ID NO: 1188080 - RNA, 24 nt, Human
caaagugcuggaauuauaggcaug

SEQ ID NO: 1188081 - RNA, 19 nt, Human
caagagauccccccaccuc

SEQ ID NO: 1188082 - RNA, 19 nt, Human
caagagauccccccaccuc

SEQ ID NO: 1188083 - RNA, 22 nt, Human
caagugauccuucugccuuggc

SEQ ID NO: 1188084 - RNA, 27 nt, Human
caagugauccuucugccuuggccuccc

SEQ ID NO: 1188085 - RNA, 27 nt, Human
caagugauccuucugccuuggccuccc

SEQ ID NO: 1188086 - RNA, 20 nt, Human
caccucauccuccugaguag

SEQ ID NO: 1188087 - RNA, 28 nt, Human
caccucauccuccugaguaguugggacu

SEQ ID NO: 1188088 - RNA, 24 nt, Human
cacuauguuucucaggcuggucuc

SEQ ID NO: 1188089 - RNA, 21 nt, Human
cacugcaaccuccgccuccca

SEQ ID NO: 1188090 - RNA, 20 nt, Human
cagaagguaugcaauguucc

SEQ ID NO: 1188091 - RNA, 19 nt, Human
cagccucaagagauccccc

SEQ ID NO: 1188092 - RNA, 23 nt, Human
cagccucaagagauccccccacc

SEQ ID NO: 1188093 - RNA, 22 nt, Human
cagggucucgcugucacccagg

SEQ ID NO: 1188094 - RNA, 22 nt, Human
caugccaccacacccagcuauu

SEQ ID NO: 1188095 - RNA, 21 nt, Human
ccaaagccagugguggcacuc

SEQ ID NO: 1188096 - RNA, 24 nt, Human
ccaaagugcuggaauuauaggcau

SEQ ID NO: 1188097 - RNA, 18 nt, Human
ccacugagccuggccuga

SEQ ID NO: 1188098 - RNA, 18 nt, Human
ccccccaccucauccucc

SEQ ID NO: 1188099 - RNA, 23 nt, Human
cccuaaugugcuuuuccaguucc

SEQ ID NO: 1188100 - RNA, 25 nt, Human
ccucccagccucaagagaucccccc

SEQ ID NO: 1188101 - RNA, 21 nt, Human
ccugaguaguugggacuacau

SEQ ID NO: 1188102 - RNA, 24 nt, Human
ccugaguaguugggacuacaugcg

SEQ ID NO: 1188103 - RNA, 18 nt, Human
ccuggucucaagugaucc

SEQ ID NO: 1188104 - RNA, 20 nt, Human
ccuggucucaagugauccuu

SEQ ID NO: 1188105 - RNA, 22 nt, Human
ccuggucucaagugauccuucu

SEQ ID NO: 1188106 - RNA, 20 nt, Human
cgcaugccaccacacccagc

SEQ ID NO: 1188107 - RNA, 19 nt, Human
cucaagagauccccccacc

SEQ ID NO: 1188108 - RNA, 23 nt, Human
cucaagagauccccccaccucau

SEQ ID NO: 1188109 - RNA, 25 nt, Human
cucaagagauccccccaccucaucc

SEQ ID NO: 1188110 - RNA, 20 nt, Human
cucaagugauccuucugccu

SEQ ID NO: 1188111 - RNA, 20 nt, Human
cucaagugauccuucugccu

SEQ ID NO: 1188112 - RNA, 24 nt, Human
cucaagugauccuucugccuuggc

SEQ ID NO: 1188113 - RNA, 24 nt, Human
cucacugcaaccuccgccucccag

SEQ ID NO: 1188114 - RNA, 24 nt, Human
cugcaaccuccgccucccagccuc

SEQ ID NO: 1188115 - RNA, 23 nt, Human
cugccuuggccucccaaagugcu

SEQ ID NO: 1188116 - RNA, 20 nt, Human
gacagggucucgcugucacc

SEQ ID NO: 1188117 - RNA, 26 nt, Human
gaguaguugggacuacaugcgcaugc

SEQ ID NO: 1188118 - RNA, 19 nt, Human
gcaugccaccacacccagc

SEQ ID NO: 1188119 - RNA, 22 nt, Human
gccuuggccucccaaagugcug

SEQ ID NO: 1188120 - RNA, 19 nt, Human
gcuggagugcaguggcaca

SEQ ID NO: 1188121 - RNA, 22 nt, Human
gcuggucucgaacuccuggucu

SEQ ID NO: 1188122 - RNA, 24 nt, Human
gcugucacccaggcuggagugcag

SEQ ID NO: 1188123 - RNA, 24 nt, Human
ggcuggucucgaacuccuggucuc

SEQ ID NO: 1188124 - RNA, 23 nt, Human
gucucgcugucacccaggcugga

SEQ ID NO: 1188125 - RNA, 21 nt, Human
gugucauugucagcucuggcu

SEQ ID NO: 1188126 - RNA, 24 nt, Human
uacaugcgcaugccaccacaccca

SEQ ID NO: 1188127 - RNA, 22 nt, Human
uagagacaagggcucacuaugu

SEQ ID NO: 1188128 - RNA, 24 nt, Human
uauguuucucaggcuggucucgaa

SEQ ID NO: 1188129 - RNA, 24 nt, Human
ucacccaggcuggagugcaguggc

SEQ ID NO: 1188130 - RNA, 19 nt, Human
ucacugcaaccuccgccuc

SEQ ID NO: 1188131 - RNA, 23 nt, Human
ucacugcaaccuccgccucccag

SEQ ID NO: 1188132 - RNA, 24 nt, Human
ucacugcaaccuccgccucccagc

SEQ ID NO: 1188133 - RNA, 26 nt, Human
ucacugcaaccuccgccucccagccu

SEQ ID NO: 1188134 - RNA, 25 nt, Human
ucagauauuugaucagaggauugac

SEQ ID NO: 1188135 - RNA, 27 nt, Human
ucagcucacugcaaccuccgccuccca

SEQ ID NO: 1188136 - RNA, 24 nt, Human
ucccaaagugcuggaauuauaggc

SEQ ID NO: 1188137 - RNA, 19 nt, Human
uccccccaccucauccucc

SEQ ID NO: 1188138 - RNA, 22 nt, Human
uccccccaccucauccuccuga

SEQ ID NO: 1188139 - RNA, 18 nt, Human
uccugaguaguugggacu

SEQ ID NO: 1188140 - RNA, 23 nt, Human
ucgcugucacccaggcuggagug

SEQ ID NO: 1188141 - RNA, 21 nt, Human
ucucgaacuccuggucucaag

SEQ ID NO: 1188142 - RNA, 21 nt, Human
ucucgcugucacccaggcugg

SEQ ID NO: 1188143 - RNA, 21 nt, Human
ucucgcugucacccaggcugg

SEQ ID NO: 1188144 - RNA, 22 nt, Human
ucucgcugucacccaggcugga

SEQ ID NO: 1188145 - RNA, 24 nt, Human
ucucgcugucacccaggcuggagu

SEQ ID NO: 1188146 - RNA, 19 nt, Human
ugccaccacacccagcuau

SEQ ID NO: 1188147 - RNA, 21 nt, Human
uggaauuauaggcaugagcca

SEQ ID NO: 1188148 - RNA, 22 nt, Human
uggaauuauaggcaugagccac

SEQ ID NO: 1188149 - RNA, 22 nt, Human
uggaauuauaggcaugagccac

SEQ ID NO: 1188150 - RNA, 23 nt, Human
uggaauuauaggcaugagccacu

SEQ ID NO: 1188151 - RNA, 24 nt, Human
uggaauuauaggcaugagccacug

SEQ ID NO: 1188152 - RNA, 18 nt, Human
uggagugcaguggcacaa

SEQ ID NO: 1188153 - RNA, 23 nt, Human
uggagugcaguggcacaaucuca

SEQ ID NO: 1188154 - RNA, 24 nt, Human
uggagugcaguggcacaaucucag

SEQ ID NO: 1188155 - RNA, 24 nt, Human
uggcacaaucucagcucacugcaa

SEQ ID NO: 1188156 - RNA, 24 nt, Human
ugggacuacaugcgcaugccacca

SEQ ID NO: 1188157 - RNA, 20 nt, Human
uggucucaagugauccuucu

SEQ ID NO: 1188158 - RNA, 23 nt, Human
uggucucaagugauccuucugcc

SEQ ID NO: 1188159 - RNA, 24 nt, Human
uggucucaagugauccuucugccu

SEQ ID NO: 1188160 - RNA, 24 nt, Human
uuccagagugucauugucagcucu

SEQ ID NO: 1188161 - RNA, 24 nt, Human
uucucaggcuggucucgaacuccu

SEQ ID NO: 1188162 - RNA, 20 nt, Human
uugagacagggucucgcugu

SEQ ID NO: 1188163 - RNA, 21 nt, Human
uugauaaaauuuuucagcagu

SEQ ID NO: 1188164 - RNA, 18 nt, Human
uuggccucccaaagugcu

SEQ ID NO: 1188165 - RNA, 25 nt, Human
uugguggaaaagccauaccagagcu

SEQ ID NO: 1188166 - RNA, 23 nt, Human
uuugaucagaggauugacagauu

SEQ ID NO: 1188167 - RNA, 21 nt, Human
aaaaggcacaagcaccccaga

SEQ ID NO: 1188168 - RNA, 19 nt, Human
aacccuacgagcgccccuc

SEQ ID NO: 1188169 - RNA, 19 nt, Human
aagcaccccagacauucag

SEQ ID NO: 1188170 - RNA, 22 nt, Human
acccuacgagcgccccucugcc

SEQ ID NO: 1188171 - RNA, 26 nt, Human
aggaagcccuuauuuagcaaugcaga

SEQ ID NO: 1188172 - RNA, 20 nt, Human
agggaaggggaagcaugaua

SEQ ID NO: 1188173 - RNA, 22 nt, Human
caaggucaaucuauaucaaccc

SEQ ID NO: 1188174 - RNA, 26 nt, Human
cacaagcaccccagacauucaggccc

SEQ ID NO: 1188175 - RNA, 21 nt, Human
cagaacuuggcagaggcccca

SEQ ID NO: 1188176 - RNA, 22 nt, Human
cauuccaagacagccuuggccg

SEQ ID NO: 1188177 - RNA, 23 nt, Human
cauuccaagacagccuuggccgu

SEQ ID NO: 1188178 - RNA, 20 nt, Human
cccaacccuacgagcgcccc

SEQ ID NO: 1188179 - RNA, 19 nt, Human
ccgcugcagccaagccaca

SEQ ID NO: 1188180 - RNA, 20 nt, Human
ccggccgcugcagccaagcc

SEQ ID NO: 1188181 - RNA, 21 nt, Human
ccuacgagcgccccucugccc

SEQ ID NO: 1188182 - RNA, 20 nt, Human
cgacucggagggcugcucag

SEQ ID NO: 1188183 - RNA, 20 nt, Human
cugcagccaagccacaggcc

SEQ ID NO: 1188184 - RNA, 23 nt, Human
cugcucaggacauuccaagacag

SEQ ID NO: 1188185 - RNA, 26 nt, Human
cuucucagaaaaggcacaagcacccc

SEQ ID NO: 1188186 - RNA, 20 nt, Human
cuugauggggauguugagca

SEQ ID NO: 1188187 - RNA, 26 nt, Human
gccaagccacaggcgucccccaaccc

SEQ ID NO: 1188188 - RNA, 22 nt, Human
gccacaggcgucccccaacccu

SEQ ID NO: 1188189 - RNA, 25 nt, Human
gggcagaggcucgacucggagggcu

SEQ ID NO: 1188190 - RNA, 21 nt, Human
ucacagcagucccuucccaca

SEQ ID NO: 1188191 - RNA, 21 nt, Human
uccauagccacggucucuucc

SEQ ID NO: 1188192 - RNA, 24 nt, Human
ucccccaacccuacgagcgccccu

SEQ ID NO: 1188193 - RNA, 26 nt, Human
ucgcugcccacaaggucaaucuaguu

SEQ ID NO: 1188194 - RNA, 18 nt, Human
ucucgcugcccacaaggu

SEQ ID NO: 1188195 - RNA, 19 nt, Human
ucugugacucucgcugccc

SEQ ID NO: 1188196 - RNA, 19 nt, Human
ugcuugcugucuugucugu

SEQ ID NO: 1188197 - RNA, 21 nt, Human
uggcagaggccccacaucugu

SEQ ID NO: 1188198 - RNA, 21 nt, Human
uuccaagacagccuuggccgu

SEQ ID NO: 1188199 - RNA, 20 nt, Human
uugccggccgcugcagccaa

SEQ ID NO: 1188200 - RNA, 23 nt, Human
uugcugucuugucugugacucuc

SEQ ID NO: 1188201 - RNA, 18 nt, Human
uuuuguggacucaaaccu

SEQ ID NO: 1188202 - RNA, 18 nt, Human
accucggucgccaaggcc

SEQ ID NO: 1188203 - RNA, 20 nt, Human
aggagcugcuguggcugcag

SEQ ID NO: 1188204 - RNA, 18 nt, Human
caggccggcgcuguguuc

SEQ ID NO: 1188205 - RNA, 18 nt, Human
ccaaggccaccgccagga

SEQ ID NO: 1188206 - RNA, 19 nt, Human
ccgccaggaggcagaaggc

SEQ ID NO: 1188207 - RNA, 18 nt, Human
cgcuguguucggccagcg

SEQ ID NO: 1188208 - RNA, 20 nt, Human
gagcugcuguggcugcaggu

SEQ ID NO: 1188209 - RNA, 20 nt, Human
ggcucagcuucucugcggug

SEQ ID NO: 1188210 - RNA, 19 nt, Human
ucggccagcguggcugccu

SEQ ID NO: 1188211 - RNA, 19 nt, Human
ugccaggagcugcuguggc

SEQ ID NO: 1188212 - RNA, 19 nt, Human
acagacagaagagugcucu

SEQ ID NO: 1188213 - RNA, 21 nt, Human
agacaggccacaggggucccc

SEQ ID NO: 1188214 - RNA, 19 nt, Human
agagccgcugagacaucua

SEQ ID NO: 1188215 - RNA, 28 nt, Human
aggcugggguaaucauggggggagcacc

SEQ ID NO: 1188216 - RNA, 21 nt, Human
agguuuauuacuagcaaaacc

SEQ ID NO: 1188217 - RNA, 21 nt, Human
agguuuccagucuugggcucu

SEQ ID NO: 1188218 - RNA, 19 nt, Human
agugcucugcaucaggaac

SEQ ID NO: 1188219 - RNA, 18 nt, Human
cagaagagugcucuggug

SEQ ID NO: 1188220 - RNA, 18 nt, Human
cagcagauucugaagguu

SEQ ID NO: 1188221 - RNA, 18 nt, Human
caugcccagccccacacc

SEQ ID NO: 1188222 - RNA, 20 nt, Human
ccccacaccugaaaugggac

SEQ ID NO: 1188223 - RNA, 19 nt, Human
ccccagggaggguuggggg

SEQ ID NO: 1188224 - RNA, 19 nt, Human
cuaaaaccaggccucuccu

SEQ ID NO: 1188225 - RNA, 19 nt, Human
cugaagguuuccagucuug

SEQ ID NO: 1188226 - RNA, 18 nt, Human
gacaguauagcuugcugc

SEQ ID NO: 1188227 - RNA, 18 nt, Human
ggcugggguaaucauggg

SEQ ID NO: 1188228 - RNA, 22 nt, Human
gggaggguugggggccagcaga

SEQ ID NO: 1188229 - RNA, 25 nt, Human
gggcucugugguuccucaaagaggu

SEQ ID NO: 1188230 - RNA, 18 nt, Human
gggcucugugguuccucc

SEQ ID NO: 1188231 - RNA, 22 nt, Human
gggguccccagggaggguuggg

SEQ ID NO: 1188232 - RNA, 28 nt, Human
uccagcaggagugaccaugcccagcccu

SEQ ID NO: 1188233 - RNA, 22 nt, Human
ucuacagacagaagagugcucu

SEQ ID NO: 1188234 - RNA, 24 nt, Human
ucuggugagacaggccacaggggu

SEQ ID NO: 1188235 - RNA, 24 nt, Human
ugaaaugggacucccuuguagagc

SEQ ID NO: 1188236 - RNA, 22 nt, Human
ugagacaggccacagggguccc

SEQ ID NO: 1188237 - RNA, 28 nt, Human
ugcccagccccacaccugaaaugggacu

SEQ ID NO: 1188238 - RNA, 21 nt, Human
ugggagggagggcucuggaca

SEQ ID NO: 1188239 - RNA, 19 nt, Human
uggggcugggagggagggc

SEQ ID NO: 1188240 - RNA, 21 nt, Human
ugggguaaucauggggcuggg

SEQ ID NO: 1188241 - RNA, 21 nt, Human
uugaaagaguggaugagugcu

SEQ ID NO: 1188242 - RNA, 20 nt, Human
aaaaaaaaaaaaaaaagcca

SEQ ID NO: 1188243 - RNA, 23 nt, Human
aaaaaaccuagcuucggagucac

SEQ ID NO: 1188244 - RNA, 23 nt, Human
aaaaaagccauacuacucccaaa

SEQ ID NO: 1188245 - RNA, 23 nt, Human
aaaaauauauacuuaacggcucc

SEQ ID NO: 1188246 - RNA, 19 nt, Human
aaacaaccucagaccaggg

SEQ ID NO: 1188247 - RNA, 20 nt, Human
aaacaacuggugaagaagau

SEQ ID NO: 1188248 - RNA, 23 nt, Human
aaacaugcuaaaugaaauaagcc

SEQ ID NO: 1188249 - RNA, 24 nt, Human
aaagugcugggauuacaggcuuga

SEQ ID NO: 1188250 - RNA, 23 nt, Human
aacaaagccuaugaaacagagcc

SEQ ID NO: 1188251 - RNA, 27 nt, Human
aacagagccuaugaaaaaacauuaacc

SEQ ID NO: 1188252 - RNA, 23 nt, Human
aagaacacuaaaagaaagucaua

SEQ ID NO: 1188253 - RNA, 22 nt, Human
aagcagccauauuuaauucuca

SEQ ID NO: 1188254 - RNA, 19 nt, Human
aaggucaucauccacaaaa

SEQ ID NO: 1188255 - RNA, 22 nt, Human
aagguugaaagccaccaacacu

SEQ ID NO: 1188256 - RNA, 19 nt, Human
aagugacagcaaagacuga

SEQ ID NO: 1188257 - RNA, 19 nt, Human
aagugcugggauuacaggc

SEQ ID NO: 1188258 - RNA, 19 nt, Human
aagugcugggauuacaggc

SEQ ID NO: 1188259 - RNA, 26 nt, Human
aagugcugggauuacaggcuugagcc

SEQ ID NO: 1188260 - RNA, 23 nt, Human
aaugagggagagccuaugaaaaa

SEQ ID NO: 1188261 - RNA, 24 nt, Human
aauuuuguauccuuaguagagaca

SEQ ID NO: 1188262 - RNA, 22 nt, Human
acagcaaagacugacauccaga

SEQ ID NO: 1188263 - RNA, 24 nt, Human
acagggugucaccauguuggccag

SEQ ID NO: 1188264 - RNA, 21 nt, Human
accaaggucaucauccacaaa

SEQ ID NO: 1188265 - RNA, 22 nt, Human
accacuuggaacagaauaccac

SEQ ID NO: 1188266 - RNA, 24 nt, Human
accauguuggccaggguggucuug

SEQ ID NO: 1188267 - RNA, 33 nt, Human
accauuugcuguuaaaaaaaaaaaaaaaaaaaa

SEQ ID NO: 1188268 - RNA, 19 nt, Human
acccaggcuggagugcagu

SEQ ID NO: 1188269 - RNA, 21 nt, Human
acuacaggcgugugccaccau

SEQ ID NO: 1188270 - RNA, 22 nt, Human
agaaaaaaaaccuagcuucgga

SEQ ID NO: 1188271 - RNA, 19 nt, Human
agaaacugauagguuuguc

SEQ ID NO: 1188272 - RNA, 24 nt, Human
agagaaaaaaaaccuagcuucgga

SEQ ID NO: 1188273 - RNA, 20 nt, Human
agauuuucaacuuagcguuu

SEQ ID NO: 1188274 - RNA, 22 nt, Human
agcguuuacauguucacccagu

SEQ ID NO: 1188275 - RNA, 20 nt, Human
agcuauucuccugccucagc

SEQ ID NO: 1188276 - RNA, 23 nt, Human
aggcaagagagaaaaaaaaccua

SEQ ID NO: 1188277 - RNA, 24 nt, Human
aggcaagagagaaaaaaaaccuag

SEQ ID NO: 1188278 - RNA, 26 nt, Human
aggcaagagagaaaaaaaagggaccc

SEQ ID NO: 1188279 - RNA, 25 nt, Human
aggcuggagugcaguggcacagucu

SEQ ID NO: 1188280 - RNA, 23 nt, Human
aggcuugagccaccgugcccggc

SEQ ID NO: 1188281 - RNA, 25 nt, Human
aguaccaaaggcugaggggaaggga

SEQ ID NO: 1188282 - RNA, 21 nt, Human
agugcaguggcacagucucag

SEQ ID NO: 1188283 - RNA, 24 nt, Human
agugcauuauuuuauuuaaaaaga

SEQ ID NO: 1188284 - RNA, 24 nt, Human
agugcugggauuacaggcuugagc

SEQ ID NO: 1188285 - RNA, 18 nt, Human
auaaugggcagcccuugc

SEQ ID NO: 1188286 - RNA, 19 nt, Human
augaaccuuuaaaacaugc

SEQ ID NO: 1188287 - RNA, 23 nt, Human
augaaccuuuaaaacaugcuaaa

SEQ ID NO: 1188288 - RNA, 22 nt, Human
augaagcuguaaaagcacagug

SEQ ID NO: 1188289 - RNA, 19 nt, Human
augugcauuugcgcacccu

SEQ ID NO: 1188290 - RNA, 27 nt, Human
caaaccuaaagauugaggaggaacuga

SEQ ID NO: 1188291 - RNA, 23 nt, Human
caaagugcugggauuacaggcuu

SEQ ID NO: 1188292 - RNA, 22 nt, Human
caagccaaaagaagugacagca

SEQ ID NO: 1188293 - RNA, 23 nt, Human
cacaagccaaaagaagugacagc

SEQ ID NO: 1188294 - RNA, 22 nt, Human
caccaacacugacacauggauu

SEQ ID NO: 1188295 - RNA, 21 nt, Human
caccaccaauuucugauucug

SEQ ID NO: 1188296 - RNA, 18 nt, Human
caccauguuggccagggu

SEQ ID NO: 1188297 - RNA, 22 nt, Human
caccauguuggccagggugguc

SEQ ID NO: 1188298 - RNA, 24 nt, Human
caccauguuggccaggguggucuu

SEQ ID NO: 1188299 - RNA, 22 nt, Human
cacccaccucggccucccaaag

SEQ ID NO: 1188300 - RNA, 23 nt, Human
cacccaccucggccucccaaagu

SEQ ID NO: 1188301 - RNA, 24 nt, Human
caccucggccucccaaagugcugg

SEQ ID NO: 1188302 - RNA, 21 nt, Human
cacugcaaccucugccucccg

SEQ ID NO: 1188303 - RNA, 23 nt, Human
cacugcaaccucugccucccggg

SEQ ID NO: 1188304 - RNA, 19 nt, Human
cagaaacaguaccaaaggc

SEQ ID NO: 1188305 - RNA, 23 nt, Human
cagaauccucuaauucaguucuc

SEQ ID NO: 1188306 - RNA, 19 nt, Human
cagaggccguuagugguag

SEQ ID NO: 1188307 - RNA, 24 nt, Human
cagggugucaccauguuggccagg

SEQ ID NO: 1188308 - RNA, 19 nt, Human
caggucccacccuccaggg

SEQ ID NO: 1188309 - RNA, 20 nt, Human
cauccagaauccucuaauuc

SEQ ID NO: 1188310 - RNA, 20 nt, Human
caugcugaaaaaaaacaacu

SEQ ID NO: 1188311 - RNA, 24 nt, Human
ccaaaagaagugacagcaaagacu

SEQ ID NO: 1188312 - RNA, 19 nt, Human
ccaaagugcugggauuaca

SEQ ID NO: 1188313 - RNA, 22 nt, Human
ccaaagugcugggauuacaggc

SEQ ID NO: 1188314 - RNA, 23 nt, Human
ccaaagugcugggauuacaggcu

SEQ ID NO: 1188315 - RNA, 24 nt, Human
ccaacacugacacauggauuuaau

SEQ ID NO: 1188316 - RNA, 18 nt, Human
ccaagguugaaagccacc

SEQ ID NO: 1188317 - RNA, 24 nt, Human
ccagcuauucuccugccucagccu

SEQ ID NO: 1188318 - RNA, 24 nt, Human
cccaaagugcugggauuacaggcu

SEQ ID NO: 1188319 - RNA, 23 nt, Human
ccuagguagcugggacuacaggc

SEQ ID NO: 1188320 - RNA, 24 nt, Human
ccuagguagcugggacuacaggcg

SEQ ID NO: 1188321 - RNA, 24 nt, Human
ccucccggguuccagcuauucucc

SEQ ID NO: 1188322 - RNA, 24 nt, Human
ccucccggguuccagcuccgaccc

SEQ ID NO: 1188323 - RNA, 24 nt, Human
ccuccuagguagcugggacuacag

SEQ ID NO: 1188324 - RNA, 22 nt, Human
ccugaccucgugauccacccac

SEQ ID NO: 1188325 - RNA, 24 nt, Human
ccugccucagccuccuagguagcu

SEQ ID NO: 1188326 - RNA, 27 nt, Human
cguaaauaaugccacugaauugcacaa

SEQ ID NO: 1188327 - RNA, 24 nt, Human
cuaacucugcuuucucugugaugc

SEQ ID NO: 1188328 - RNA, 24 nt, Human
cucacugcaaccucugccucccgg

SEQ ID NO: 1188329 - RNA, 24 nt, Human
cucagccuccuagguagcugggac

SEQ ID NO: 1188330 - RNA, 21 nt, Human
cucccggguuccagcuauucu

SEQ ID NO: 1188331 - RNA, 18 nt, Human
cuccugaccucgugaucc

SEQ ID NO: 1188332 - RNA, 25 nt, Human
cuccugaccucgugauccacccacc

SEQ ID NO: 1188333 - RNA, 22 nt, Human
cucucaaauuugagcacgcuug

SEQ ID NO: 1188334 - RNA, 19 nt, Human
cucuuggaacaguggcaaa

SEQ ID NO: 1188335 - RNA, 19 nt, Human
cugcaaccucugccucccg

SEQ ID NO: 1188336 - RNA, 23 nt, Human
cugcaaccucugccucccggguu

SEQ ID NO: 1188337 - RNA, 24 nt, Human
cugcaaccucugccucccggguuc

SEQ ID NO: 1188338 - RNA, 18 nt, Human
cugucacccaggcuggag

SEQ ID NO: 1188339 - RNA, 21 nt, Human
cuugcucugucacccaggcug

SEQ ID NO: 1188340 - RNA, 25 nt, Human
gaaaaaaaacaacuggugaagaaga

SEQ ID NO: 1188341 - RNA, 22 nt, Human
gaccucgugauccacccaccuc

SEQ ID NO: 1188342 - RNA, 22 nt, Human
gaccucgugauccacccaccuc

SEQ ID NO: 1188343 - RNA, 24 nt, Human
gaccucgugauccacccaccucgg

SEQ ID NO: 1188344 - RNA, 24 nt, Human
gacuacaggcgugugccaccaugc

SEQ ID NO: 1188345 - RNA, 18 nt, Human
gauuacaggcuugagcca

SEQ ID NO: 1188346 - RNA, 21 nt, Human
gauuacaggcuugagccaccg

SEQ ID NO: 1188347 - RNA, 24 nt, Human
gauuacaggcuugagccaccgugc

SEQ ID NO: 1188348 - RNA, 20 nt, Human
gcaaggaagggcucaacaga

SEQ ID NO: 1188349 - RNA, 19 nt, Human
gccaagguugaaagccacc

SEQ ID NO: 1188350 - RNA, 21 nt, Human
gcgcagccaagguugaaagcc

SEQ ID NO: 1188351 - RNA, 22 nt, Human
gcgugugccaccaugcccggcu

SEQ ID NO: 1188352 - RNA, 25 nt, Human
gcucugucacccaggcuggagugca

SEQ ID NO: 1188353 - RNA, 19 nt, Human
gcuggagugcaguggcaca

SEQ ID NO: 1188354 - RNA, 24 nt, Human
ggacuacaggcgugugccaccaug

SEQ ID NO: 1188355 - RNA, 18 nt, Human
ggccccaccaccaauuuc

SEQ ID NO: 1188356 - RNA, 23 nt, Human
gggaaacauuaaaacacucauca

SEQ ID NO: 1188357 - RNA, 22 nt, Human
gggugucaccauguuggccagg

SEQ ID NO: 1188358 - RNA, 23 nt, Human
gguggucuugaacuccugaccuc

SEQ ID NO: 1188359 - RNA, 22 nt, Human
guagcugggacuacaggcgugu

SEQ ID NO: 1188360 - RNA, 20 nt, Human
guauuguauaauuucacuua

SEQ ID NO: 1188361 - RNA, 21 nt, Human
gucaucauccacaaaaauaca

SEQ ID NO: 1188362 - RNA, 24 nt, Human
gugauccacccaccucggccuccc

SEQ ID NO: 1188363 - RNA, 24 nt, Human
uaaaacacucaucaggucccaccc

SEQ ID NO: 1188364 - RNA, 23 nt, Human
uaaaagcacagugaaugagaaca

SEQ ID NO: 1188365 - RNA, 19 nt, Human
uaacaucguaaauaaugcc

SEQ ID NO: 1188366 - RNA, 22 nt, Human
uaaccaaggucaucauccacaa

SEQ ID NO: 1188367 - RNA, 21 nt, Human
uaacucggcuggguguagccu

SEQ ID NO: 1188368 - RNA, 23 nt, Human
uaauuuuguauccuuaguagaga

SEQ ID NO: 1188369 - RNA, 23 nt, Human
uacaggcuugagccaccgugccc

SEQ ID NO: 1188370 - RNA, 23 nt, Human
uaccugggaaaggcagauuuuca

SEQ ID NO: 1188371 - RNA, 21 nt, Human
uagacaaaugcauugaggcag

SEQ ID NO: 1188372 - RNA, 22 nt, Human
uagagacagggugucaccaugu

SEQ ID NO: 1188373 - RNA, 24 nt, Human
uaguagagacagggugucaccaug

SEQ ID NO: 1188374 - RNA, 19 nt, Human
uaugaaaaaacaaagccua

SEQ ID NO: 1188375 - RNA, 20 nt, Human
uaugaaacagagccuaugaa

SEQ ID NO: 1188376 - RNA, 25 nt, Human
uaugaaacagagccuaugaaaaaac

SEQ ID NO: 1188377 - RNA, 19 nt, Human
uauucuccugccucagccu

SEQ ID NO: 1188378 - RNA, 24 nt, Human
ucaccauguuggccaggguggucu

SEQ ID NO: 1188379 - RNA, 22 nt, Human
ucacccaggcuggagugcagug

SEQ ID NO: 1188380 - RNA, 24 nt, Human
ucacugcaaccucugccucccggg

SEQ ID NO: 1188381 - RNA, 25 nt, Human
ucacugcaaccucugccucccgggu

SEQ ID NO: 1188382 - RNA, 18 nt, Human
uccagaauccucuaauuc

SEQ ID NO: 1188383 - RNA, 24 nt, Human
ucccaaagugcugggauuacaggc

SEQ ID NO: 1188384 - RNA, 19 nt, Human
ucccaaauaccuccgcgca

SEQ ID NO: 1188385 - RNA, 21 nt, Human
ucccggguuccagcuauucuc

SEQ ID NO: 1188386 - RNA, 24 nt, Human
ucccggguuccagcuauucuccug

SEQ ID NO: 1188387 - RNA, 24 nt, Human
uccuagguagcugggacuacaggc

SEQ ID NO: 1188388 - RNA, 18 nt, Human
ucggccucccaaagugcu

SEQ ID NO: 1188389 - RNA, 24 nt, Human
ucuccugccucagccuccuaggua

SEQ ID NO: 1188390 - RNA, 23 nt, Human
ucucucuacucaucucacuaccu

SEQ ID NO: 1188391 - RNA, 24 nt, Human
ucugucacccaggcuggagugcag

SEQ ID NO: 1188392 - RNA, 19 nt, Human
ucuugaacuccugaccucg

SEQ ID NO: 1188393 - RNA, 22 nt, Human
ucuugcucugucacccaggcug

SEQ ID NO: 1188394 - RNA, 23 nt, Human
ucuugcucugucacccaggcugg

SEQ ID NO: 1188395 - RNA, 24 nt, Human
ucuugcucugucacccaggcugga

SEQ ID NO: 1188396 - RNA, 18 nt, Human
ugaaaaaaaacaacuggu

SEQ ID NO: 1188397 - RNA, 20 nt, Human
ugaaaaaacauuaaccaagg

SEQ ID NO: 1188398 - RNA, 23 nt, Human
ugaaacagagccuaugaaaaaac

SEQ ID NO: 1188399 - RNA, 19 nt, Human
ugaaacuucugagacugac

SEQ ID NO: 1188400 - RNA, 19 nt, Human
ugacaauguuacagggcuu

SEQ ID NO: 1188401 - RNA, 20 nt, Human
ugacacuuguaagaaccacu

SEQ ID NO: 1188402 - RNA, 24 nt, Human
ugacagcaaagacugacauccaga

SEQ ID NO: 1188403 - RNA, 21 nt, Human
ugacagcaagaauuaaaacac

SEQ ID NO: 1188404 - RNA, 22 nt, Human
ugacagcaauauugagagugag

SEQ ID NO: 1188405 - RNA, 19 nt, Human
ugagaacacuagcaagcua

SEQ ID NO: 1188406 - RNA, 18 nt, Human
ugagagugaggcaagaga

SEQ ID NO: 1188407 - RNA, 23 nt, Human
ugaggcaagagagaaaaaaaacc

SEQ ID NO: 1188408 - RNA, 18 nt, Human
ugaggcagaaacaguacc

SEQ ID NO: 1188409 - RNA, 24 nt, Human
ugauccacccaccucggccuccca

SEQ ID NO: 1188410 - RNA, 22 nt, Human
ugcaguggcacagucucagcuc

SEQ ID NO: 1188411 - RNA, 24 nt, Human
ugccucagccuccuagguagcugg

SEQ ID NO: 1188412 - RNA, 28 nt, Human
ugccucccggguuccagcuauucuccuu

SEQ ID NO: 1188413 - RNA, 24 nt, Human
ugcucugucacccaggcuggagug

SEQ ID NO: 1188414 - RNA, 21 nt, Human
uggaaaccuguuucuucaugu

SEQ ID NO: 1188415 - RNA, 23 nt, Human
uggaacaguggcaaauuuucugu

SEQ ID NO: 1188416 - RNA, 23 nt, Human
uggagugcaguggcacagucuca

SEQ ID NO: 1188417 - RNA, 24 nt, Human
uggagugcaguggcacagucucag

SEQ ID NO: 1188418 - RNA, 24 nt, Human
uggcacagucucagcucacugcaa

SEQ ID NO: 1188419 - RNA, 24 nt, Human
uggccaggguggucuugaacuccu

SEQ ID NO: 1188420 - RNA, 18 nt, Human
ugggaaaggcagauuuuc

SEQ ID NO: 1188421 - RNA, 18 nt, Human
ugggacuacaggcgugug

SEQ ID NO: 1188422 - RNA, 21 nt, Human
ugggacuacaggcgugugcca

SEQ ID NO: 1188423 - RNA, 22 nt, Human
ugggacuacaggcgugugccac

SEQ ID NO: 1188424 - RNA, 24 nt, Human
ugggacuacaggcgugugccacca

SEQ ID NO: 1188425 - RNA, 25 nt, Human
ugggacuacaggcgugugccaccau

SEQ ID NO: 1188426 - RNA, 18 nt, Human
ugggauuacaggcuugag

SEQ ID NO: 1188427 - RNA, 21 nt, Human
ugggauuacaggcuugagcca

SEQ ID NO: 1188428 - RNA, 22 nt, Human
ugggauuacaggcuugagccac

SEQ ID NO: 1188429 - RNA, 23 nt, Human
ugggauuacaggcuugagccacc

SEQ ID NO: 1188430 - RNA, 23 nt, Human
ugggauuacaggcuugagccacc

SEQ ID NO: 1188431 - RNA, 24 nt, Human
ugggauuacaggcuugagccaccg

SEQ ID NO: 1188432 - RNA, 25 nt, Human
uguaaaagcacagugaaugagaaca

SEQ ID NO: 1188433 - RNA, 24 nt, Human
uguagaaagauuaacaaggguuac

SEQ ID NO: 1188434 - RNA, 18 nt, Human
ugugauuuuaagagucag

SEQ ID NO: 1188435 - RNA, 23 nt, Human
uguuacagggcuucuguuuaggg

SEQ ID NO: 1188436 - RNA, 20 nt, Human
uuaaaaaaaaaaaaaaaaaa

SEQ ID NO: 1188437 - RNA, 19 nt, Human
uuaaaacacucaucagguc

SEQ ID NO: 1188438 - RNA, 23 nt, Human
uuaaccaaggucaucauccacaa

SEQ ID NO: 1188439 - RNA, 25 nt, Human
uuaacggcuccuaauccagcucucu

SEQ ID NO: 1188440 - RNA, 22 nt, Human
uuacuaccacuaacagccucug

SEQ ID NO: 1188441 - RNA, 19 nt, Human
uuaggaaaauuuguuacau

SEQ ID NO: 1188442 - RNA, 24 nt, Human
uuaguagagacagggugucaccau

SEQ ID NO: 1188443 - RNA, 21 nt, Human
uuccagcuauucuccugccuc

SEQ ID NO: 1188444 - RNA, 22 nt, Human
uugaaagccaccaacacugaca

SEQ ID NO: 1188445 - RNA, 24 nt, Human
uugcucugucacccaggcuggagu

SEQ ID NO: 1188446 - RNA, 19 nt, Human
uuuuguauccuuaguagag

SEQ ID NO: 1188447 - RNA, 20 nt, Human
uuuuguauccuuaguagaga

SEQ ID NO: 1188448 - RNA, 19 nt, Human
aaaccacccuuccuucccc

SEQ ID NO: 1188449 - RNA, 20 nt, Human
aaagccaugacuucacgaaa

SEQ ID NO: 1188450 - RNA, 25 nt, Human
aaaggcagagcccagcgcauccacu

SEQ ID NO: 1188451 - RNA, 24 nt, Human
aaagugcugggauuacaggcguga

SEQ ID NO: 1188452 - RNA, 24 nt, Human
aaaguggagaauggccgcugcgga

SEQ ID NO: 1188453 - RNA, 19 nt, Human
aaauaagaagaccaaggcc

SEQ ID NO: 1188454 - RNA, 24 nt, Human
aaccacaggaggcccccaggaagu

SEQ ID NO: 1188455 - RNA, 24 nt, Human
aaccucaccucaccguguccccac

SEQ ID NO: 1188456 - RNA, 20 nt, Human
aaccucugcaccugcuuccc

SEQ ID NO: 1188457 - RNA, 23 nt, Human
aacucagacucagcauguccaug

SEQ ID NO: 1188458 - RNA, 20 nt, Human
aacucagggaagggaagaac

SEQ ID NO: 1188459 - RNA, 22 nt, Human
aagaaaaaaaaaaucuagaaga

SEQ ID NO: 1188460 - RNA, 25 nt, Human
aagaggagcccaaccccuuaacagc

SEQ ID NO: 1188461 - RNA, 21 nt, Human
aagaucacacacauuuugcca

SEQ ID NO: 1188462 - RNA, 19 nt, Human
aagugcugggauuacaggc

SEQ ID NO: 1188463 - RNA, 19 nt, Human
aagugcugggauuacaggc

SEQ ID NO: 1188464 - RNA, 24 nt, Human
aaugcagugaugcaaucuuggcuc

SEQ ID NO: 1188465 - RNA, 18 nt, Human
acaggguuucaccauguu

SEQ ID NO: 1188466 - RNA, 21 nt, Human
acaggguuucaccauguuggc

SEQ ID NO: 1188467 - RNA, 24 nt, Human
acaggguuucaccauguuggccag

SEQ ID NO: 1188468 - RNA, 24 nt, Human
accauguuggccaggauggucucg

SEQ ID NO: 1188469 - RNA, 18 nt, Human
acccaccaccaguucucc

SEQ ID NO: 1188470 - RNA, 19 nt, Human
acccagggcccuggucagc

SEQ ID NO: 1188471 - RNA, 21 nt, Human
accccacccaaccucugcacc

SEQ ID NO: 1188472 - RNA, 24 nt, Human
accucauucaggaagccccgccag

SEQ ID NO: 1188473 - RNA, 24 nt, Human
accucgugauccacccgccuuggc

SEQ ID NO: 1188474 - RNA, 19 nt, Human
acgccacagaauccuccaa

SEQ ID NO: 1188475 - RNA, 19 nt, Human
acuacaggugugugccaca

SEQ ID NO: 1188476 - RNA, 18 nt, Human
acucacuccugcucccca

SEQ ID NO: 1188477 - RNA, 24 nt, Human
acugauucuuaaaaggggagguga

SEQ ID NO: 1188478 - RNA, 22 nt, Human
acuggcacccaccaccaguucu

SEQ ID NO: 1188479 - RNA, 25 nt, Human
agaacgaagcccagccuccucugcc

SEQ ID NO: 1188480 - RNA, 22 nt, Human
agaagaauacuagggaaggaac

SEQ ID NO: 1188481 - RNA, 24 nt, Human
agcaguucucccgccucaaccucc

SEQ ID NO: 1188482 - RNA, 22 nt, Human
agccccacagccuccaagccuc

SEQ ID NO: 1188483 - RNA, 23 nt, Human
aggaaacacccccaacccagggc

SEQ ID NO: 1188484 - RNA, 23 nt, Human
aggaagaagaaagaggagcccaa

SEQ ID NO: 1188485 - RNA, 22 nt, Human
aggacaggaaccaugggugaug

SEQ ID NO: 1188486 - RNA, 19 nt, Human
aggagucauccccaggcua

SEQ ID NO: 1188487 - RNA, 19 nt, Human
aggcagggccugcacacag

SEQ ID NO: 1188488 - RNA, 22 nt, Human
aggcccaagcuggaaaccggaa

SEQ ID NO: 1188489 - RNA, 19 nt, Human
aggcgugaaccaccacgcc

SEQ ID NO: 1188490 - RNA, 20 nt, Human
agggcucacagagacggggg

SEQ ID NO: 1188491 - RNA, 19 nt, Human
aggggaggugaaaaaaaaa

SEQ ID NO: 1188492 - RNA, 23 nt, Human
aguagcugggacuacaggugugu

SEQ ID NO: 1188493 - RNA, 19 nt, Human
agugauuccugccuggccc

SEQ ID NO: 1188494 - RNA, 24 nt, Human
agugcagcucccacccccaaaaag

SEQ ID NO: 1188495 - RNA, 24 nt, Human
auaaagcacagaacauauacagaa

SEQ ID NO: 1188496 - RNA, 19 nt, Human
auccacccgccuuggccuc

SEQ ID NO: 1188497 - RNA, 22 nt, Human
auccuacacacugcggcucagg

SEQ ID NO: 1188498 - RNA, 21 nt, Human
aucuauaacaagcauucucaa

SEQ ID NO: 1188499 - RNA, 23 nt, Human
augguggagccaaugaagaccag

SEQ ID NO: 1188500 - RNA, 26 nt, Human
auuaaacugcaacccucaaaggcaga

SEQ ID NO: 1188501 - RNA, 21 nt, Human
auuuugccaccccccauucca

SEQ ID NO: 1188502 - RNA, 24 nt, Human
auuuuuguauuuuuaguagagaca

SEQ ID NO: 1188503 - RNA, 24 nt, Human
caaagugcugggauuacaggcgug

SEQ ID NO: 1188504 - RNA, 19 nt, Human
caaccacaggaggccccca

SEQ ID NO: 1188505 - RNA, 22 nt, Human
caacccagggcccuggucagcc

SEQ ID NO: 1188506 - RNA, 21 nt, Human
caaccucugcaccugcuuccc

SEQ ID NO: 1188507 - RNA, 21 nt, Human
caacuaagccccaccgggguc

SEQ ID NO: 1188508 - RNA, 20 nt, Human
caagccucccacucugcacu

SEQ ID NO: 1188509 - RNA, 22 nt, Human
caagucccauaggcaacucaga

SEQ ID NO: 1188510 - RNA, 25 nt, Human
caccaggaagaagaaagaggagccc

SEQ ID NO: 1188511 - RNA, 18 nt, Human
caccauguuggccaggau

SEQ ID NO: 1188512 - RNA, 22 nt, Human
caccauguuggccaggaugguc

SEQ ID NO: 1188513 - RNA, 24 nt, Human
caccauguuggccaggauggucuc

SEQ ID NO: 1188514 - RNA, 19 nt, Human
caccccacccaaccucugc

SEQ ID NO: 1188515 - RNA, 22 nt, Human
caccccacccaaccucugcacc

SEQ ID NO: 1188516 - RNA, 22 nt, Human
caccccaguucccagggcauga

SEQ ID NO: 1188517 - RNA, 24 nt, Human
caccccccaccaccauacccugcu

SEQ ID NO: 1188518 - RNA, 23 nt, Human
cacccgccuuggccucccaaagu

SEQ ID NO: 1188519 - RNA, 24 nt, Human
cacccgccuuggccucccaaagug

SEQ ID NO: 1188520 - RNA, 25 nt, Human
caccucgggccaagacagguugagc

SEQ ID NO: 1188521 - RNA, 21 nt, Human
cacugcaaccuccgccuccca

SEQ ID NO: 1188522 - RNA, 18 nt, Human
cagaacucagggaaggga

SEQ ID NO: 1188523 - RNA, 22 nt, Human
cagagcccagcgcauccacugc

SEQ ID NO: 1188524 - RNA, 21 nt, Human
cagaggcuggaugugagcucc

SEQ ID NO: 1188525 - RNA, 21 nt, Human
cagcauccuacacacugcggc

SEQ ID NO: 1188526 - RNA, 21 nt, Human
cagccuccaagccucccacuc

SEQ ID NO: 1188527 - RNA, 21 nt, Human
caggagggaagcccaaccaca

SEQ ID NO: 1188528 - RNA, 24 nt, Human
caggcccaagcuggaaaccggaag

SEQ ID NO: 1188529 - RNA, 24 nt, Human
caggguuucaccauguuggccagg

SEQ ID NO: 1188530 - RNA, 18 nt, Human
caugagaucccaucuugg

SEQ ID NO: 1188531 - RNA, 23 nt, Human
cauugcugcaggcaagaggcaga

SEQ ID NO: 1188532 - RNA, 20 nt, Human
cauuuugccaccccccauuc

SEQ ID NO: 1188533 - RNA, 21 nt, Human
cauuuugccaccccccauucc

SEQ ID NO: 1188534 - RNA, 25 nt, Human
ccaaaccauuuccucacuugugccc

SEQ ID NO: 1188535 - RNA, 22 nt, Human
ccaaagugcugggauuacaggc

SEQ ID NO: 1188536 - RNA, 22 nt, Human
ccaaagugcugggauuacaggc

SEQ ID NO: 1188537 - RNA, 24 nt, Human
ccaaagugcugggauuacaggcgu

SEQ ID NO: 1188538 - RNA, 18 nt, Human
ccaauccccaggcccaag

SEQ ID NO: 1188539 - RNA, 20 nt, Human
ccacaaugucaugugaucag

SEQ ID NO: 1188540 - RNA, 26 nt, Human
ccacccgaaaaguggagaauggccgc

SEQ ID NO: 1188541 - RNA, 19 nt, Human
ccaccuccagaacgaagcc

SEQ ID NO: 1188542 - RNA, 23 nt, Human
ccaccuccagaacgaagcccagc

SEQ ID NO: 1188543 - RNA, 25 nt, Human
ccagcgcauccacugcgcaucccca

SEQ ID NO: 1188544 - RNA, 20 nt, Human
cccaaaaaggacacccccca

SEQ ID NO: 1188545 - RNA, 21 nt, Human
cccaaaaaggacaccccccac

SEQ ID NO: 1188546 - RNA, 22 nt, Human
cccaaaaaggacaccccccacc

SEQ ID NO: 1188547 - RNA, 21 nt, Human
cccaagcuggaaaccggaagc

SEQ ID NO: 1188548 - RNA, 20 nt, Human
cccacagccuccaagccucc

SEQ ID NO: 1188549 - RNA, 24 nt, Human
cccaccaccauacccugcucuguc

SEQ ID NO: 1188550 - RNA, 22 nt, Human
cccacccaaccucugcaccugc

SEQ ID NO: 1188551 - RNA, 19 nt, Human
cccaccuccagaacgaagc

SEQ ID NO: 1188552 - RNA, 24 nt, Human
cccacuccauccaaauggaaccca

SEQ ID NO: 1188553 - RNA, 21 nt, Human
cccauaggcaacucagacuca

SEQ ID NO: 1188554 - RNA, 25 nt, Human
cccaucuccaccauuuccagcaucc

SEQ ID NO: 1188555 - RNA, 24 nt, Human
cccauuguuaggugcccggcugcu

SEQ ID NO: 1188556 - RNA, 20 nt, Human
ccccaaaaaggacacccccc

SEQ ID NO: 1188557 - RNA, 23 nt, Human
ccccaaaaaggacaccccccacc

SEQ ID NO: 1188558 - RNA, 23 nt, Human
ccccaacccuccugucauuacuc

SEQ ID NO: 1188559 - RNA, 23 nt, Human
ccccaccaccauacccugcucug

SEQ ID NO: 1188560 - RNA, 21 nt, Human
ccccauuaaacugcaacccuc

SEQ ID NO: 1188561 - RNA, 27 nt, Human
ccccauucucccccuggggcaccccag

SEQ ID NO: 1188562 - RNA, 25 nt, Human
cccccauuaaacugcaacccucaaa

SEQ ID NO: 1188563 - RNA, 27 nt, Human
ccccccaccaccauacccugcucuguc

SEQ ID NO: 1188564 - RNA, 18 nt, Human
ccccgagccccacagccu

SEQ ID NO: 1188565 - RNA, 19 nt, Human
ccccgagccccacagccuc

SEQ ID NO: 1188566 - RNA, 25 nt, Human
ccccgagccccacagccuccaagga

SEQ ID NO: 1188567 - RNA, 24 nt, Human
ccccgcucucgucuccacgcccag

SEQ ID NO: 1188568 - RNA, 19 nt, Human
ccccuggggcaccccaguu

SEQ ID NO: 1188569 - RNA, 23 nt, Human
cccgaguagcugggacuacaggu

SEQ ID NO: 1188570 - RNA, 24 nt, Human
cccgaguagcugggacuacaggug

SEQ ID NO: 1188571 - RNA, 23 nt, Human
cccgccucaaccucccgaguagc

SEQ ID NO: 1188572 - RNA, 25 nt, Human
cccuaccccgagccccacagccucc

SEQ ID NO: 1188573 - RNA, 18 nt, Human
cccucacccacuccaucc

SEQ ID NO: 1188574 - RNA, 21 nt, Human
cccuggagcccuuggagcccu

SEQ ID NO: 1188575 - RNA, 27 nt, Human
cccuuaacagccuucaaucuauaacaa

SEQ ID NO: 1188576 - RNA, 20 nt, Human
ccgcuucugagcuccagacc

SEQ ID NO: 1188577 - RNA, 18 nt, Human
ccgugccugaaaaucccu

SEQ ID NO: 1188578 - RNA, 19 nt, Human
ccuaccuugugccaugccc

SEQ ID NO: 1188579 - RNA, 22 nt, Human
ccuccagaacgaagcccagccu

SEQ ID NO: 1188580 - RNA, 24 nt, Human
ccucccagguucaagcaguucucc

SEQ ID NO: 1188581 - RNA, 23 nt, Human
ccuccugucauuacuccacaauc

SEQ ID NO: 1188582 - RNA, 22 nt, Human
ccucugggaagccuccuggccu

SEQ ID NO: 1188583 - RNA, 21 nt, Human
ccuggccuuggcccagaggcc

SEQ ID NO: 1188584 - RNA, 22 nt, Human
ccuucccccgugccugaaaauc

SEQ ID NO: 1188585 - RNA, 18 nt, Human
ccuuccuucccccgugcc

SEQ ID NO: 1188586 - RNA, 25 nt, Human
ccuugugccaugcccccaacccucc

SEQ ID NO: 1188587 - RNA, 19 nt, Human
cgccacaaugucaugugau

SEQ ID NO: 1188588 - RNA, 23 nt, Human
cucaagaucacacacauuuugcc

SEQ ID NO: 1188589 - RNA, 19 nt, Human
cucaccucaccgugucccc

SEQ ID NO: 1188590 - RNA, 24 nt, Human
cucacugcaaccuccgccucccag

SEQ ID NO: 1188591 - RNA, 20 nt, Human
cuccaagccucccacucugc

SEQ ID NO: 1188592 - RNA, 22 nt, Human
cuccaauccccaggcccaagcu

SEQ ID NO: 1188593 - RNA, 22 nt, Human
cucccacccccaaaaaggacac

SEQ ID NO: 1188594 - RNA, 19 nt, Human
cuccccuaccccgagcccc

SEQ ID NO: 1188595 - RNA, 23 nt, Human
cuccccuaccccgagccccacag

SEQ ID NO: 1188596 - RNA, 20 nt, Human
cuccuggccuuggcccagag

SEQ ID NO: 1188597 - RNA, 21 nt, Human
cucugcuuagaagugcucuag

SEQ ID NO: 1188598 - RNA, 24 nt, Human
cucuugaccucgugauccacccgc

SEQ ID NO: 1188599 - RNA, 23 nt, Human
cugcaaccuccgccucccagguu

SEQ ID NO: 1188600 - RNA, 24 nt, Human
cugcaaccuccgccucccagguuc

SEQ ID NO: 1188601 - RNA, 19 nt, Human
cugcuccugggucaucacu

SEQ ID NO: 1188602 - RNA, 21 nt, Human
cuguaucuguacuggccuggg

SEQ ID NO: 1188603 - RNA, 18 nt, Human
cuugggcuaagacauagc

SEQ ID NO: 1188604 - RNA, 19 nt, Human
gaaaaucccucauucuguc

SEQ ID NO: 1188605 - RNA, 18 nt, Human
gaaacccugucuuccgcu

SEQ ID NO: 1188606 - RNA, 19 nt, Human
gaacauauacagaacauaa

SEQ ID NO: 1188607 - RNA, 20 nt, Human
gaacccaggagggaagccca

SEQ ID NO: 1188608 - RNA, 21 nt, Human
gaagcccagccuccucugccc

SEQ ID NO: 1188609 - RNA, 21 nt, Human
gaccucgugauccacccgccu

SEQ ID NO: 1188610 - RNA, 21 nt, Human
gaccucgugauccacccgccu

SEQ ID NO: 1188611 - RNA, 24 nt, Human
gaccucgugauccacccgccuugg

SEQ ID NO: 1188612 - RNA, 24 nt, Human
gagccccacagccuccaagccucc

SEQ ID NO: 1188613 - RNA, 22 nt, Human
gagggugggggaucuccaaggg

SEQ ID NO: 1188614 - RNA, 26 nt, Human
gaguagcugggacuacaggugugugc

SEQ ID NO: 1188615 - RNA, 20 nt, Human
gagugauuccugccuggccc

SEQ ID NO: 1188616 - RNA, 21 nt, Human
gauccuggccccucaccccac

SEQ ID NO: 1188617 - RNA, 21 nt, Human
gauuacaggcgugaaccacca

SEQ ID NO: 1188618 - RNA, 23 nt, Human
gcacccagaaguggugccaccac

SEQ ID NO: 1188619 - RNA, 23 nt, Human
gccucaaccucccgaguagcugg

SEQ ID NO: 1188620 - RNA, 18 nt, Human
gccuccucugcccauccc

SEQ ID NO: 1188621 - RNA, 22 nt, Human
gccuuggccucccaaagugcug

SEQ ID NO: 1188622 - RNA, 24 nt, Human
gcucaagaucacacacauuuugcc

SEQ ID NO: 1188623 - RNA, 19 nt, Human
gcucagcaggacccuccug

SEQ ID NO: 1188624 - RNA, 21 nt, Human
ggaaggaacuaaugaaaaaaa

SEQ ID NO: 1188625 - RNA, 21 nt, Human
ggacaccccccaccaccauac

SEQ ID NO: 1188626 - RNA, 19 nt, Human
ggagccaaugaagaccagg

SEQ ID NO: 1188627 - RNA, 19 nt, Human
ggauuacaggcgugaacca

SEQ ID NO: 1188628 - RNA, 19 nt, Human
ggcaccccaguucccaggg

SEQ ID NO: 1188629 - RNA, 23 nt, Human
ggcccaagcuggaaaccggaagc

SEQ ID NO: 1188630 - RNA, 19 nt, Human
ggccccucaccccacccaa

SEQ ID NO: 1188631 - RNA, 20 nt, Human
ggccccucaccccacccaac

SEQ ID NO: 1188632 - RNA, 18 nt, Human
gggaagcccaaccacagg

SEQ ID NO: 1188633 - RNA, 25 nt, Human
gggccaagacagguugagcagagga

SEQ ID NO: 1188634 - RNA, 19 nt, Human
gggcccuggucagccucag

SEQ ID NO: 1188635 - RNA, 22 nt, Human
gggcugaugcccaggacagcac

SEQ ID NO: 1188636 - RNA, 23 nt, Human
ggggcucagcaggacccuccugu

SEQ ID NO: 1188637 - RNA, 22 nt, Human
ggguuucaccauguuggccagg

SEQ ID NO: 1188638 - RNA, 24 nt, Human
gguuucaccauguuggccaggaug

SEQ ID NO: 1188639 - RNA, 21 nt, Human
guaaagugcagcucccacccc

SEQ ID NO: 1188640 - RNA, 24 nt, Human
gugauccacccgccuuggccuccc

SEQ ID NO: 1188641 - RNA, 25 nt, Human
uaaaaaauucugaucuacauucuug

SEQ ID NO: 1188642 - RNA, 23 nt, Human
uaaagcacagaacauauacagaa

SEQ ID NO: 1188643 - RNA, 25 nt, Human
uaagaacccaggagggaagcccaac

SEQ ID NO: 1188644 - RNA, 19 nt, Human
uaagaagaccaaggcccag

SEQ ID NO: 1188645 - RNA, 22 nt, Human
uaagaagaccaaggcccagaag

SEQ ID NO: 1188646 - RNA, 20 nt, Human
uaauuuuugcuauuguagag

SEQ ID NO: 1188647 - RNA, 24 nt, Human
uaauuuuuguauuuuuaguagaga

SEQ ID NO: 1188648 - RNA, 23 nt, Human
uacaggcgugaaccaccacgccc

SEQ ID NO: 1188649 - RNA, 21 nt, Human
uaccccaggaaacacccccaa

SEQ ID NO: 1188650 - RNA, 18 nt, Human
uaccccgagccccacagc

SEQ ID NO: 1188651 - RNA, 22 nt, Human
uagagacaggguuucaccaugu

SEQ ID NO: 1188652 - RNA, 27 nt, Human
uagaugaugccaccuagauaggcaccc

SEQ ID NO: 1188653 - RNA, 18 nt, Human
uaggugcccggcugcugc

SEQ ID NO: 1188654 - RNA, 24 nt, Human
uaguagagacaggguuucaccaug

SEQ ID NO: 1188655 - RNA, 27 nt, Human
uauacagaacauaaacagauauauagu

SEQ ID NO: 1188656 - RNA, 27 nt, Human
ucaauccccgcucucgucuccacgcug

SEQ ID NO: 1188657 - RNA, 24 nt, Human
ucaccauguuggccaggauggucu

SEQ ID NO: 1188658 - RNA, 18 nt, Human
ucacccacuccauccaaa

SEQ ID NO: 1188659 - RNA, 19 nt, Human
ucacugcaaccuccgccuc

SEQ ID NO: 1188660 - RNA, 24 nt, Human
ucacugcaaccuccgccucccagg

SEQ ID NO: 1188661 - RNA, 25 nt, Human
ucacugcaaccuccgccucccaggu

SEQ ID NO: 1188662 - RNA, 27 nt, Human
ucacugcaaccuccgccucccagguuc

SEQ ID NO: 1188663 - RNA, 24 nt, Human
ucaggauccccucaaaguauuucc

SEQ ID NO: 1188664 - RNA, 19 nt, Human
ucaggggcucccgugggau

SEQ ID NO: 1188665 - RNA, 23 nt, Human
uccaccauuuccagcauccuaca

SEQ ID NO: 1188666 - RNA, 22 nt, Human
uccaggcagggccugcacacag

SEQ ID NO: 1188667 - RNA, 21 nt, Human
uccagugucucuugaccaccu

SEQ ID NO: 1188668 - RNA, 24 nt, Human
ucccaaagugcugggauuacaggc

SEQ ID NO: 1188669 - RNA, 20 nt, Human
ucccacucugcacucaccuu

SEQ ID NO: 1188670 - RNA, 19 nt, Human
ucccagggcaugaaagacu

SEQ ID NO: 1188671 - RNA, 21 nt, Human
ucccagguucaagcaguucuc

SEQ ID NO: 1188672 - RNA, 24 nt, Human
ucccagguucaagcaguucucccg

SEQ ID NO: 1188673 - RNA, 18 nt, Human
uccccaggcccaagcugg

SEQ ID NO: 1188674 - RNA, 21 nt, Human
uccccaggcccaagcuggaaa

SEQ ID NO: 1188675 - RNA, 24 nt, Human
uccccaggcccaagcuggaaaccg

SEQ ID NO: 1188676 - RNA, 22 nt, Human
uccccaggcuaccugggggcuc

SEQ ID NO: 1188677 - RNA, 19 nt, Human
uccccauucucccccuggg

SEQ ID NO: 1188678 - RNA, 23 nt, Human
ucccgaguagcugggacuacagg

SEQ ID NO: 1188679 - RNA, 24 nt, Human
ucccgaguagcugggacuacaggu

SEQ ID NO: 1188680 - RNA, 23 nt, Human
uccuggccccucaccccacccaa

SEQ ID NO: 1188681 - RNA, 21 nt, Human
ucgaccacugaccucauucag

SEQ ID NO: 1188682 - RNA, 23 nt, Human
ucuagcucugucgccaggcugga

SEQ ID NO: 1188683 - RNA, 23 nt, Human
ucuccaaaccauuuccucacuug

SEQ ID NO: 1188684 - RNA, 24 nt, Human
ucucccgccucaaccucccgagua

SEQ ID NO: 1188685 - RNA, 19 nt, Human
ucugacuccucccucuccc

SEQ ID NO: 1188686 - RNA, 22 nt, Human
ucugcaccugcuucccuggagc

SEQ ID NO: 1188687 - RNA, 19 nt, Human
ucugggaagccuccuggcc

SEQ ID NO: 1188688 - RNA, 23 nt, Human
ucuguaucuguacuggccugggg

SEQ ID NO: 1188689 - RNA, 21 nt, Human
ucugucgccaggcuggaaugc

SEQ ID NO: 1188690 - RNA, 24 nt, Human
ucugucuccuccucugggaagccu

SEQ ID NO: 1188691 - RNA, 25 nt, Human
ugaaaaucccucauucugucguucu

SEQ ID NO: 1188692 - RNA, 18 nt, Human
ugaccucgugauccaccc

SEQ ID NO: 1188693 - RNA, 23 nt, Human
ugacuccucccucucccucaccc

SEQ ID NO: 1188694 - RNA, 22 nt, Human
ugacuucacgaaacccugucuu

SEQ ID NO: 1188695 - RNA, 20 nt, Human
ugagccagaaaugauucuca

SEQ ID NO: 1188696 - RNA, 20 nt, Human
ugauguaacuuaucuuccuc

SEQ ID NO: 1188697 - RNA, 22 nt, Human
ugcagugaugcaaucuuggcuc

SEQ ID NO: 1188698 - RNA, 26 nt, Human
ugccucaccucuacaccuugggcuaa

SEQ ID NO: 1188699 - RNA, 22 nt, Human
ugccuggccccagggucagugg

SEQ ID NO: 1188700 - RNA, 19 nt, Human
ugccuucugagccccaggc

SEQ ID NO: 1188701 - RNA, 23 nt, Human
ugcugggauuacaggcgugaacc

SEQ ID NO: 1188702 - RNA, 24 nt, Human
uggaaugcagugaugcaaucuugg

SEQ ID NO: 1188703 - RNA, 19 nt, Human
uggagccaaugaagaccag

SEQ ID NO: 1188704 - RNA, 19 nt, Human
uggauccuggccccucacc

SEQ ID NO: 1188705 - RNA, 22 nt, Human
uggccaggauggucucgaucuc

SEQ ID NO: 1188706 - RNA, 24 nt, Human
uggccccucaccccacccaaccuc

SEQ ID NO: 1188707 - RNA, 21 nt, Human
ugggacuacaggugugugcca

SEQ ID NO: 1188708 - RNA, 22 nt, Human
ugggacuacaggugugugccac

SEQ ID NO: 1188709 - RNA, 19 nt, Human
ugggauuacaggcgugaac

SEQ ID NO: 1188710 - RNA, 22 nt, Human
ugggauuacaggcgugaaccac

SEQ ID NO: 1188711 - RNA, 23 nt, Human
ugggauuacaggcgugaaccacc

SEQ ID NO: 1188712 - RNA, 24 nt, Human
ugggauuacaggcgugaaccacca

SEQ ID NO: 1188713 - RNA, 24 nt, Human
ugggauuacaggcgugaaccacca

SEQ ID NO: 1188714 - RNA, 23 nt, Human
uguccacccgaaaaguggagaau

SEQ ID NO: 1188715 - RNA, 22 nt, Human
ugucguucuuucaucucacccu

SEQ ID NO: 1188716 - RNA, 22 nt, Human
ugugccaugcccccaacccucc

SEQ ID NO: 1188717 - RNA, 18 nt, Human
uguggauggacauuuggg

SEQ ID NO: 1188718 - RNA, 19 nt, Human
uuaauauucacagcaacac

SEQ ID NO: 1188719 - RNA, 19 nt, Human
uuaauauucacagcaacac

SEQ ID NO: 1188720 - RNA, 24 nt, Human
uuaguagagacaggguuucaccau

SEQ ID NO: 1188721 - RNA, 22 nt, Human
uuccaagucccauaggcaacuc

SEQ ID NO: 1188722 - RNA, 18 nt, Human
uuccucuccaaaccauuu

SEQ ID NO: 1188723 - RNA, 20 nt, Human
uucuaaaccucaccucaccg

SEQ ID NO: 1188724 - RNA, 23 nt, Human
uucugacuccucccucucccuca

SEQ ID NO: 1188725 - RNA, 18 nt, Human
uuggccucccaaagugcu

SEQ ID NO: 1188726 - RNA, 24 nt, Human
uuuacaaauaagaagaccaaggcc

SEQ ID NO: 1188727 - RNA, 19 nt, Human
uuucaccauguuggccagg

SEQ ID NO: 1188728 - RNA, 20 nt, Human
uuucaccauguuggccagga

SEQ ID NO: 1188729 - RNA, 18 nt, Human
uuuccuauuccuucaugu

SEQ ID NO: 1188730 - RNA, 24 nt, Human
uuuuuaguagagacaggguuucac

SEQ ID NO: 1188731 - RNA, 20 nt, Human
uuuuuguauuuuuaguagag

SEQ ID NO: 1188732 - RNA, 27 nt, Human
ugccuucagucuuuaagaacucagcuc

SEQ ID NO: 1188733 - RNA, 24 nt, Human
aagcaaauaacauccaaugucaga

SEQ ID NO: 1188734 - RNA, 21 nt, Human
cagggacccacacggccucca

SEQ ID NO: 1188735 - RNA, 24 nt, Human
ccuccaaucucugcacggcuuugc

SEQ ID NO: 1188736 - RNA, 25 nt, Human
cucugagaguauauauaaaaaagaa

SEQ ID NO: 1188737 - RNA, 19 nt, Human
cuuuaaaaauuaagaggaa

SEQ ID NO: 1188738 - RNA, 18 nt, Human
uaaaaaagaaauuaaagg

SEQ ID NO: 1188739 - RNA, 19 nt, Human
uaagcaaauaacauccaau

SEQ ID NO: 1188740 - RNA, 21 nt, Human
ucaccagcaucuuuaaaaauu

SEQ ID NO: 1188741 - RNA, 23 nt, Human
ugagaguauauauaaaaaagaaa

SEQ ID NO: 1188742 - RNA, 24 nt, Human
uuugcgcgcggugcucagccuggg

SEQ ID NO: 1188743 - RNA, 22 nt, Human
aaaaauuccuaaaauaugacac

SEQ ID NO: 1188744 - RNA, 21 nt, Human
aaaacaacacgagugagccau

SEQ ID NO: 1188745 - RNA, 19 nt, Human
aaaagacuucuucgccccc

SEQ ID NO: 1188746 - RNA, 21 nt, Human
aacaaauccaaaauuggcuca

SEQ ID NO: 1188747 - RNA, 18 nt, Human
aacuaaaggacuaagcaa

SEQ ID NO: 1188748 - RNA, 25 nt, Human
aacuaaaggacuaagcaagguccag

SEQ ID NO: 1188749 - RNA, 20 nt, Human
aagaaaauguggugacacac

SEQ ID NO: 1188750 - RNA, 18 nt, Human
acacagggcacaguggac

SEQ ID NO: 1188751 - RNA, 24 nt, Human
agaaaggucucuucaacccaugaa

SEQ ID NO: 1188752 - RNA, 21 nt, Human
agacuucuucgcccccuaauu

SEQ ID NO: 1188753 - RNA, 23 nt, Human
agauacacagggguuuugaauuu

SEQ ID NO: 1188754 - RNA, 20 nt, Human
agauuagaaaacuaggucuu

SEQ ID NO: 1188755 - RNA, 19 nt, Human
auaaaacugaaaaagaccu

SEQ ID NO: 1188756 - RNA, 21 nt, Human
augcauuuuugaaauacuucu

SEQ ID NO: 1188757 - RNA, 27 nt, Human
caaaagacuucuucgcccccuaauuca

SEQ ID NO: 1188758 - RNA, 18 nt, Human
caacacauacaugugggg

SEQ ID NO: 1188759 - RNA, 19 nt, Human
caacaucuuaaguguaaaa

SEQ ID NO: 1188760 - RNA, 25 nt, Human
caacucuauucgggcaugauaaaac

SEQ ID NO: 1188761 - RNA, 20 nt, Human
cacagugcuagagagauuag

SEQ ID NO: 1188762 - RNA, 21 nt, Human
caccaccuuuaaucaaaugaa

SEQ ID NO: 1188763 - RNA, 22 nt, Human
cacucuggaugccacaacacau

SEQ ID NO: 1188764 - RNA, 22 nt, Human
cagaaccaggaccauauggagu

SEQ ID NO: 1188765 - RNA, 19 nt, Human
cagcaggaaauuuacuucc

SEQ ID NO: 1188766 - RNA, 18 nt, Human
cagggcacaguggacucc

SEQ ID NO: 1188767 - RNA, 22 nt, Human
cagugcuagagagauuagaaaa

SEQ ID NO: 1188768 - RNA, 21 nt, Human
cuaagcaagguccagauuauc

SEQ ID NO: 1188769 - RNA, 22 nt, Human
cugaaguuuaacuacccaacaa

SEQ ID NO: 1188770 - RNA, 20 nt, Human
cuggaugccacaacacauac

SEQ ID NO: 1188771 - RNA, 24 nt, Human
cuguuuccauucuucuugaacuga

SEQ ID NO: 1188772 - RNA, 25 nt, Human
cuucaagauucccuuucagcaacuc

SEQ ID NO: 1188773 - RNA, 22 nt, Human
gaaaauguggugacacacaggg

SEQ ID NO: 1188774 - RNA, 19 nt, Human
gcagagauggugaaacugu

SEQ ID NO: 1188775 - RNA, 21 nt, Human
gcaucugcaagucuuucaaaa

SEQ ID NO: 1188776 - RNA, 23 nt, Human
gggcaaugaugaugauugaaaaa

SEQ ID NO: 1188777 - RNA, 26 nt, Human
ggguagcagaaccaggaccauaugga

SEQ ID NO: 1188778 - RNA, 21 nt, Human
uaauaugaaauucuuuugggg

SEQ ID NO: 1188779 - RNA, 26 nt, Human
uacauagacucacaguuauaaaacug

SEQ ID NO: 1188780 - RNA, 21 nt, Human
uagaagaaaaauaauccaugu

SEQ ID NO: 1188781 - RNA, 18 nt, Human
uagcagaaccaggaccau

SEQ ID NO: 1188782 - RNA, 18 nt, Human
uagcagagauggugaaac

SEQ ID NO: 1188783 - RNA, 23 nt, Human
ucccuuuagauacacagggguug

SEQ ID NO: 1188784 - RNA, 26 nt, Human
ugaaaaauaaaacacuccaaguggga

SEQ ID NO: 1188785 - RNA, 22 nt, Human
ugaaauacuucuugugccucuu

SEQ ID NO: 1188786 - RNA, 22 nt, Human
ugaaguacauuauaucgauccg

SEQ ID NO: 1188787 - RNA, 21 nt, Human
ugccauuccauaggaaaaaaa

SEQ ID NO: 1188788 - RNA, 23 nt, Human
ugccucuucaagauucccuuuca

SEQ ID NO: 1188789 - RNA, 19 nt, Human
ugcuggaggaagggugcca

SEQ ID NO: 1188790 - RNA, 25 nt, Human
uggaugccacaacacauacaugugg

SEQ ID NO: 1188791 - RNA, 24 nt, Human
uggcucaacuuguaagcuauuugc

SEQ ID NO: 1188792 - RNA, 18 nt, Human
uuagacuauugcaucugc

SEQ ID NO: 1188793 - RNA, 24 nt, Human
uucaagauucccuuucagcaacuc

SEQ ID NO: 1188794 - RNA, 23 nt, Human
uucacaagaucauuuuuccacuu

SEQ ID NO: 1188795 - RNA, 19 nt, Human
uucacagaagaaaaugugg

SEQ ID NO: 1188796 - RNA, 19 nt, Human
uucgcccccuaauucaaau

SEQ ID NO: 1188797 - RNA, 30 nt, Human
uugaaaaauaaaacacuccaagugggaauu

SEQ ID NO: 1188798 - RNA, 30 nt, Human
uugaaaauaaauaccuaauacauagacucc

SEQ ID NO: 1188799 - RNA, 18 nt, Human
uugaaagucaucuguucu

SEQ ID NO: 1188800 - RNA, 23 nt, Human
uuuauuuaucuucugaaauuuaa

SEQ ID NO: 1188801 - RNA, 24 nt, Human
acaacacagcgccagcuucccagc

SEQ ID NO: 1188802 - RNA, 23 nt, Human
agcccgggaggaagcgagcagcu

SEQ ID NO: 1188803 - RNA, 23 nt, Human
agcuggcgggggaaacaacacag

SEQ ID NO: 1188804 - RNA, 24 nt, Human
auuuccauuucaaacaagugaaag

SEQ ID NO: 1188805 - RNA, 23 nt, Human
caagugaaagcaguuugcacucc

SEQ ID NO: 1188806 - RNA, 21 nt, Human
cagcaagccuccgcggggccu

SEQ ID NO: 1188807 - RNA, 20 nt, Human
ccugguccuggcuggugcgc

SEQ ID NO: 1188808 - RNA, 23 nt, Human
cgggaggaagcgagcagcuggcg

SEQ ID NO: 1188809 - RNA, 23 nt, Human
cggggccugguccuggcuggugc

SEQ ID NO: 1188810 - RNA, 19 nt, Human
cucucguggccacuuuugu

SEQ ID NO: 1188811 - RNA, 18 nt, Human
gagcccgggaggaagcga

SEQ ID NO: 1188812 - RNA, 18 nt, Human
gaggcggacgauggugaa

SEQ ID NO: 1188813 - RNA, 21 nt, Human
gcgccagcuucccagcaagcc

SEQ ID NO: 1188814 - RNA, 21 nt, Human
gcggggccugguccuggcugg

SEQ ID NO: 1188815 - RNA, 18 nt, Human
ggggcugguccggggcug

SEQ ID NO: 1188816 - RNA, 18 nt, Human
uccucguggcaccuccag

SEQ ID NO: 1188817 - RNA, 20 nt, Human
ugcacuccagugagcccggg

SEQ ID NO: 1188818 - RNA, 21 nt, Human
ugcgcggguguggcccggggg

SEQ ID NO: 1188819 - RNA, 19 nt, Human
ugcugggcuccgccugagc

SEQ ID NO: 1188820 - RNA, 20 nt, Human
ugguccggggcugucucuug

SEQ ID NO: 1188821 - RNA, 24 nt, Human
ugguccuggcuggugcgcgggugu

SEQ ID NO: 1188822 - RNA, 25 nt, Human
uuccaagucaguuugcuccauccac

SEQ ID NO: 1188823 - RNA, 23 nt, Human
uuucugaggcggacgauggugaa

SEQ ID NO: 1188824 - RNA, 18 nt, Human
cgggauccugagcccugc

SEQ ID NO: 1188825 - RNA, 20 nt, Human
ggcgggcucucaggccaggu

SEQ ID NO: 1188826 - RNA, 19 nt, Human
gggcagggccuggcgggcu

SEQ ID NO: 1188827 - RNA, 19 nt, Human
uggcugcagagggccacug

SEQ ID NO: 1188828 - RNA, 26 nt, Human
aaaaaaaaaacaaacccaaaacaaaa

SEQ ID NO: 1188829 - RNA, 22 nt, Human
aaaaaaaacaaacccaaaacaa

SEQ ID NO: 1188830 - RNA, 30 nt, Human
aaaaaaacaaacccaaaacaaaaaccaagg

SEQ ID NO: 1188831 - RNA, 23 nt, Human
aaaaacaaacccaaaacaaaaac

SEQ ID NO: 1188832 - RNA, 25 nt, Human
aaaacaaaaaccaaaccaaagccag

SEQ ID NO: 1188833 - RNA, 21 nt, Human
aaaacaaacccaaaacaaaaa

SEQ ID NO: 1188834 - RNA, 19 nt, Human
aaaaccaaaccaaagccag

SEQ ID NO: 1188835 - RNA, 23 nt, Human
aaacaaacccaaaacaaaaacca

SEQ ID NO: 1188836 - RNA, 24 nt, Human
aaacaaacccaaaacaaaaaccaa

SEQ ID NO: 1188837 - RNA, 20 nt, Human
aaacaugaauacaggcugac

SEQ ID NO: 1188838 - RNA, 18 nt, Human
aaauucuuuucagcagcu

SEQ ID NO: 1188839 - RNA, 18 nt, Human
aacaugaauacaggcuga

SEQ ID NO: 1188840 - RNA, 20 nt, Human
aacccaaaacaaaaaccaaa

SEQ ID NO: 1188841 - RNA, 23 nt, Human
aacccaaaacaaaaaccaaacca

SEQ ID NO: 1188842 - RNA, 20 nt, Human
aagaagggagacacagaaaa

SEQ ID NO: 1188843 - RNA, 21 nt, Human
aagccuccuuucuuucugugg

SEQ ID NO: 1188844 - RNA, 21 nt, Human
aagggaaaaaaauucuuuuca

SEQ ID NO: 1188845 - RNA, 25 nt, Human
aauaauaaagccagcaaagaaggga

SEQ ID NO: 1188846 - RNA, 22 nt, Human
acaaacccaaaacaaaaaccaa

SEQ ID NO: 1188847 - RNA, 23 nt, Human
acagccccaaggaggggggaacc

SEQ ID NO: 1188848 - RNA, 20 nt, Human
accaaacgccagccugcucu

SEQ ID NO: 1188849 - RNA, 23 nt, Human
acccaaaacaaaaaccaaaccaa

SEQ ID NO: 1188850 - RNA, 19 nt, Human
accccuuuccugggaacgc

SEQ ID NO: 1188851 - RNA, 22 nt, Human
accuaccuucccacucccccaa

SEQ ID NO: 1188852 - RNA, 18 nt, Human
acucccccaaaggaaagc

SEQ ID NO: 1188853 - RNA, 24 nt, Human
agacaguuggcuggacagcugccu

SEQ ID NO: 1188854 - RNA, 18 nt, Human
agaggaagaagagggaga

SEQ ID NO: 1188855 - RNA, 20 nt, Human
agaggaagaagagggagagg

SEQ ID NO: 1188856 - RNA, 22 nt, Human
agagggugucagccugggccau

SEQ ID NO: 1188857 - RNA, 18 nt, Human
agaugaaaaaaaaaaaaa

SEQ ID NO: 1188858 - RNA, 23 nt, Human
aggagggagguggaaagggggac

SEQ ID NO: 1188859 - RNA, 20 nt, Human
agggagguggaaaggccaag

SEQ ID NO: 1188860 - RNA, 20 nt, Human
agguucauaaaauuaaggga

SEQ ID NO: 1188861 - RNA, 18 nt, Human
auguccaagaaaacauga

SEQ ID NO: 1188862 - RNA, 23 nt, Human
caaaacaaaaaccaaaccaaagc

SEQ ID NO: 1188863 - RNA, 26 nt, Human
caaaacaaaaaccaaaccaaagccag

SEQ ID NO: 1188864 - RNA, 25 nt, Human
caaaccaaagccaguaaccugaaug

SEQ ID NO: 1188865 - RNA, 24 nt, Human
caaggggcaccuguguuccaggac

SEQ ID NO: 1188866 - RNA, 23 nt, Human
caccuguguuccaggaccaaggg

SEQ ID NO: 1188867 - RNA, 19 nt, Human
cacucccucuggauggcuu

SEQ ID NO: 1188868 - RNA, 21 nt, Human
cagaaacagccgcuagugcug

SEQ ID NO: 1188869 - RNA, 20 nt, Human
cagcaaagaagggagacaca

SEQ ID NO: 1188870 - RNA, 22 nt, Human
cagcaguagguggcugguuuaa

SEQ ID NO: 1188871 - RNA, 21 nt, Human
cagcgucuggggagcuaccgg

SEQ ID NO: 1188872 - RNA, 21 nt, Human
caggccacagaggggccccgg

SEQ ID NO: 1188873 - RNA, 19 nt, Human
cauuauacagugugucaca

SEQ ID NO: 1188874 - RNA, 21 nt, Human
ccaaaccaaagccaguaaccc

SEQ ID NO: 1188875 - RNA, 22 nt, Human
ccaaacgccagccugcucugcu

SEQ ID NO: 1188876 - RNA, 25 nt, Human
ccaccuaccuucccacucccccaaa

SEQ ID NO: 1188877 - RNA, 23 nt, Human
cccaaaacaaaaaccaaaccaaa

SEQ ID NO: 1188878 - RNA, 26 nt, Human
cccaaaacaaaaaccaaaccaaagcc

SEQ ID NO: 1188879 - RNA, 23 nt, Human
cccacagccgcccugugaggaca

SEQ ID NO: 1188880 - RNA, 24 nt, Human
cccacucccccaaaggaaagcacg

SEQ ID NO: 1188881 - RNA, 21 nt, Human
ccccuacaaagccuccuuucu

SEQ ID NO: 1188882 - RNA, 21 nt, Human
cgcucaaggacagaguugcuc

SEQ ID NO: 1188883 - RNA, 19 nt, Human
cgcugugagccucucucca

SEQ ID NO: 1188884 - RNA, 24 nt, Human
cuccugcucacucucaggccacag

SEQ ID NO: 1188885 - RNA, 21 nt, Human
cuggucacuaaaggcggguca

SEQ ID NO: 1188886 - RNA, 24 nt, Human
cugugaggacagggccugccuccu

SEQ ID NO: 1188887 - RNA, 22 nt, Human
gaaaaaaaaaaaaaacaaaccc

SEQ ID NO: 1188888 - RNA, 20 nt, Human
gaaaaaaauucuuuucagca

SEQ ID NO: 1188889 - RNA, 20 nt, Human
gaaagcacgaaucguuccag

SEQ ID NO: 1188890 - RNA, 19 nt, Human
gagacacagaaacagccgc

SEQ ID NO: 1188891 - RNA, 22 nt, Human
gcagaugaaaaaaaaaaaaaac

SEQ ID NO: 1188892 - RNA, 23 nt, Human
gcaggagguugggccucccaggg

SEQ ID NO: 1188893 - RNA, 20 nt, Human
gcuccucugcuggccucugu

SEQ ID NO: 1188894 - RNA, 22 nt, Human
ggauguuuuaggaaaugccaaa

SEQ ID NO: 1188895 - RNA, 24 nt, Human
ggcaggagguugggccucccaggg

SEQ ID NO: 1188896 - RNA, 22 nt, Human
ggcugggccacguggacgugcc

SEQ ID NO: 1188897 - RNA, 24 nt, Human
ggcugggccacguggacgugccag

SEQ ID NO: 1188898 - RNA, 21 nt, Human
ggcugguuuaaggcuccuggc

SEQ ID NO: 1188899 - RNA, 22 nt, Human
gggagguggaaaggccaagggg

SEQ ID NO: 1188900 - RNA, 25 nt, Human
gggcugggccacguggacgugccag

SEQ ID NO: 1188901 - RNA, 21 nt, Human
gucacaauuagaggaagaaga

SEQ ID NO: 1188902 - RNA, 23 nt, Human
gucacaauuagaggaagaagagg

SEQ ID NO: 1188903 - RNA, 23 nt, Human
guuccagggugucccugccuucc

SEQ ID NO: 1188904 - RNA, 21 nt, Human
uaaaggcgggucaccaagggc

SEQ ID NO: 1188905 - RNA, 20 nt, Human
uaggaaaugccaaacaggca

SEQ ID NO: 1188906 - RNA, 24 nt, Human
uaugagggcugggccacguggacg

SEQ ID NO: 1188907 - RNA, 18 nt, Human
ucaaugauaucaccacuu

SEQ ID NO: 1188908 - RNA, 19 nt, Human
ucacauagauuuggaaugu

SEQ ID NO: 1188909 - RNA, 19 nt, Human
ucacuaaaggcgggucacc

SEQ ID NO: 1188910 - RNA, 21 nt, Human
ucccaccuaccuucccacucc

SEQ ID NO: 1188911 - RNA, 25 nt, Human
ucccaccuaccuucccacuccccca

SEQ ID NO: 1188912 - RNA, 18 nt, Human
ucccugagaggggcagga

SEQ ID NO: 1188913 - RNA, 18 nt, Human
ucccugagaggggcagga

SEQ ID NO: 1188914 - RNA, 22 nt, Human
ucucaggccacagaggggcccc

SEQ ID NO: 1188915 - RNA, 26 nt, Human
ugaaaaaaaaaaaaaacaaacccaaa

SEQ ID NO: 1188916 - RNA, 19 nt, Human
ugaccggacgccuugcggg

SEQ ID NO: 1188917 - RNA, 20 nt, Human
ugagaggggcaggagguugg

SEQ ID NO: 1188918 - RNA, 24 nt, Human
ugaucaccaauucuggaagggugg

SEQ ID NO: 1188919 - RNA, 24 nt, Human
ugccgguccuugccaggcccuugg

SEQ ID NO: 1188920 - RNA, 18 nt, Human
ugccugauucggccauga

SEQ ID NO: 1188921 - RNA, 21 nt, Human
ugcuucagguuucccuccugc

SEQ ID NO: 1188922 - RNA, 23 nt, Human
uggaaaggccaaggggcaccugu

SEQ ID NO: 1188923 - RNA, 20 nt, Human
uggcaggcgguggggcccuc

SEQ ID NO: 1188924 - RNA, 19 nt, Human
uggcagggaugcaaacagc

SEQ ID NO: 1188925 - RNA, 26 nt, Human
uggcuggacagcugccugauucggcc

SEQ ID NO: 1188926 - RNA, 21 nt, Human
uggcugguuuaaggcuccugg

SEQ ID NO: 1188927 - RNA, 21 nt, Human
ugucccugccuuccucccuca

SEQ ID NO: 1188928 - RNA, 19 nt, Human
uucccacucccccaaagga

SEQ ID NO: 1188929 - RNA, 18 nt, Human
uuccccaauuaauuggca

SEQ ID NO: 1188930 - RNA, 21 nt, Human
uucgcugaucaccaauucugg

SEQ ID NO: 1188931 - RNA, 24 nt, Human
uuggcagcagaugaaaaaaaaaaa

SEQ ID NO: 1188932 - RNA, 22 nt, Human
uuuucuuuucucucaaagaaau

SEQ ID NO: 1188933 - RNA, 27 nt, Human
aaaaaacacccaaaagacaaaaagaaa

SEQ ID NO: 1188934 - RNA, 22 nt, Human
aaaaacacccaaaagacaaaaa

SEQ ID NO: 1188935 - RNA, 19 nt, Human
aaaaagaaaaccaaagaaa

SEQ ID NO: 1188936 - RNA, 20 nt, Human
aaaaagaaaaccaaagaaau

SEQ ID NO: 1188937 - RNA, 26 nt, Human
aaaaagaaguaaauaagaacccaagu

SEQ ID NO: 1188938 - RNA, 23 nt, Human
aaaacacccaaaagacaaaaaga

SEQ ID NO: 1188939 - RNA, 24 nt, Human
aaaauacugugauuacaggcguga

SEQ ID NO: 1188940 - RNA, 19 nt, Human
aaacacccaaaagacaaaa

SEQ ID NO: 1188941 - RNA, 24 nt, Human
aaacacccaaaagacaaaaagaaa

SEQ ID NO: 1188942 - RNA, 20 nt, Human
aaagaaaaccaaagaaaucc

SEQ ID NO: 1188943 - RNA, 20 nt, Human
aaagacaaaaagaaaaccaa

SEQ ID NO: 1188944 - RNA, 19 nt, Human
aaccuauuuccuugccucu

SEQ ID NO: 1188945 - RNA, 22 nt, Human
aagacaaaaagaaaaccaaaga

SEQ ID NO: 1188946 - RNA, 21 nt, Human
aagcaggcucucugcugcugc

SEQ ID NO: 1188947 - RNA, 27 nt, Human
aagcaguaaaugaggcaaaggggaccc

SEQ ID NO: 1188948 - RNA, 24 nt, Human
aagcauuguuccaagaacugaaaa

SEQ ID NO: 1188949 - RNA, 25 nt, Human
aagugauccucccaccuuagccucu

SEQ ID NO: 1188950 - RNA, 25 nt, Human
aauagauucccugcugccacacaga

SEQ ID NO: 1188951 - RNA, 21 nt, Human
aauuaccuaguuguggguauu

SEQ ID NO: 1188952 - RNA, 22 nt, Human
acaaaaagaaaaccaaagaaau

SEQ ID NO: 1188953 - RNA, 28 nt, Human
acaaaaagaaaaccaaagaaaucccacu

SEQ ID NO: 1188954 - RNA, 23 nt, Human
acaauuuccagagaaaaaaauca

SEQ ID NO: 1188955 - RNA, 20 nt, Human
accaaaaaacacccaaaaga

SEQ ID NO: 1188956 - RNA, 23 nt, Human
accaaaaaacacccaaaagacaa

SEQ ID NO: 1188957 - RNA, 24 nt, Human
acucauucucucuccugccacccc

SEQ ID NO: 1188958 - RNA, 19 nt, Human
agaaggaggcaagucccau

SEQ ID NO: 1188959 - RNA, 20 nt, Human
agacaaaaagaaaaccaaag

SEQ ID NO: 1188960 - RNA, 28 nt, Human
agacaaaaagaaaaccaaagaaauccca

SEQ ID NO: 1188961 - RNA, 27 nt, Human
agacagacaauaaacgaaaagggaccc

SEQ ID NO: 1188962 - RNA, 19 nt, Human
aggaaguggcaacagggga

SEQ ID NO: 1188963 - RNA, 18 nt, Human
agggaugaaccacgggaa

SEQ ID NO: 1188964 - RNA, 19 nt, Human
aguaaaugaggcaaagucc

SEQ ID NO: 1188965 - RNA, 23 nt, Human
aguacaguggcaggaucauagcu

SEQ ID NO: 1188966 - RNA, 19 nt, Human
aguggaucugugagggggc

SEQ ID NO: 1188967 - RNA, 23 nt, Human
aguggcaacaggggaacgcuuug

SEQ ID NO: 1188968 - RNA, 24 nt, Human
auaaucacccucaucauuaucugg

SEQ ID NO: 1188969 - RNA, 18 nt, Human
auagcucacugcagccuc

SEQ ID NO: 1188970 - RNA, 24 nt, Human
aucugcacuugggagcuguguggu

SEQ ID NO: 1188971 - RNA, 25 nt, Human
caaaaagaaaaccaaagaaauccca

SEQ ID NO: 1188972 - RNA, 22 nt, Human
caaaagacaaaaagaaaaccaa

SEQ ID NO: 1188973 - RNA, 24 nt, Human
caaaauacugugauuacaggcgug

SEQ ID NO: 1188974 - RNA, 20 nt, Human
caagugauccucccaccuua

SEQ ID NO: 1188975 - RNA, 22 nt, Human
caagugauccucccaccuuagc

SEQ ID NO: 1188976 - RNA, 18 nt, Human
cacaggaagugcugaguu

SEQ ID NO: 1188977 - RNA, 20 nt, Human
cacucuccuaaccucccacu

SEQ ID NO: 1188978 - RNA, 23 nt, Human
cacugcuuugcacuaugcccaga

SEQ ID NO: 1188979 - RNA, 23 nt, Human
cagaacaaagauaugucuaccaa

SEQ ID NO: 1188980 - RNA, 24 nt, Human
cagaguuucuguguagcacucucc

SEQ ID NO: 1188981 - RNA, 21 nt, Human
cagcaugagaacagacuaaua

SEQ ID NO: 1188982 - RNA, 22 nt, Human
cagccucgaacuccuggccaca

SEQ ID NO: 1188983 - RNA, 26 nt, Human
caguaaaugaggcaaagucccuucuu

SEQ ID NO: 1188984 - RNA, 21 nt, Human
ccaaaaaacacccaaaagacu

SEQ ID NO: 1188985 - RNA, 21 nt, Human
ccaaagaaaucccacaauuca

SEQ ID NO: 1188986 - RNA, 20 nt, Human
ccaagcauuguuccaagaac

SEQ ID NO: 1188987 - RNA, 20 nt, Human
ccaccccgugaagaggugcc

SEQ ID NO: 1188988 - RNA, 22 nt, Human
cccaaaagacaaaaagaaaacc

SEQ ID NO: 1188989 - RNA, 19 nt, Human
cccaggcuggaguacagug

SEQ ID NO: 1188990 - RNA, 24 nt, Human
ccccgugaagaggugccuucugcc

SEQ ID NO: 1188991 - RNA, 25 nt, Human
ccccugaguaaaauguaagcuccug

SEQ ID NO: 1188992 - RNA, 23 nt, Human
cccugcugccacacagaucccug

SEQ ID NO: 1188993 - RNA, 25 nt, Human
ccucccaccuuagccucucaaaaua

SEQ ID NO: 1188994 - RNA, 24 nt, Human
ccuggccacaagugauccucccac

SEQ ID NO: 1188995 - RNA, 19 nt, Human
ccuguggacccagagcgcc

SEQ ID NO: 1188996 - RNA, 22 nt, Human
ccuguggacccagagcgccagg

SEQ ID NO: 1188997 - RNA, 20 nt, Human
ccuugugagucagugggaau

SEQ ID NO: 1188998 - RNA, 21 nt, Human
cucacugcagccucgaacucc

SEQ ID NO: 1188999 - RNA, 24 nt, Human
cucacugcagccucgaacuccugg

SEQ ID NO: 1189000 - RNA, 22 nt, Human
cucccaccuuagccucucaaaa

SEQ ID NO: 1189001 - RNA, 19 nt, Human
cuccugaagggcagaaacu

SEQ ID NO: 1189002 - RNA, 27 nt, Human
cucucugcugcugccucgcccugugac

SEQ ID NO: 1189003 - RNA, 24 nt, Human
cucucuguguugcccaggcuggag

SEQ ID NO: 1189004 - RNA, 20 nt, Human
cucuguguugcccaggcugg

SEQ ID NO: 1189005 - RNA, 23 nt, Human
cugccucgcccugugacuucagc

SEQ ID NO: 1189006 - RNA, 21 nt, Human
cugcuuugcacuaugcccaga

SEQ ID NO: 1189007 - RNA, 20 nt, Human
cuuggucgcucacaaauucu

SEQ ID NO: 1189008 - RNA, 22 nt, Human
gaaacacaccuguggacccaga

SEQ ID NO: 1189009 - RNA, 23 nt, Human
gaacuccuggccacaagugaucc

SEQ ID NO: 1189010 - RNA, 19 nt, Human
gaucauagcucacugcagc

SEQ ID NO: 1189011 - RNA, 21 nt, Human
gaucugugagggggcagaggg

SEQ ID NO: 1189012 - RNA, 21 nt, Human
gauuacaggcgugaguuacca

SEQ ID NO: 1189013 - RNA, 22 nt, Human
gauuacaggcgugaguuaccau

SEQ ID NO: 1189014 - RNA, 24 nt, Human
gauuacaggcgugaguuaccaugc

SEQ ID NO: 1189015 - RNA, 21 nt, Human
gcaguaaaugaggcaaagucc

SEQ ID NO: 1189016 - RNA, 18 nt, Human
gccucgaacuccuggccc

SEQ ID NO: 1189017 - RNA, 23 nt, Human
gcuggaguacaguggcaggauca

SEQ ID NO: 1189018 - RNA, 19 nt, Human
ggaguacaguggcaggauc

SEQ ID NO: 1189019 - RNA, 19 nt, Human
gggaaacacaccuguggac

SEQ ID NO: 1189020 - RNA, 18 nt, Human
gggaaucagauaaagacc

SEQ ID NO: 1189021 - RNA, 19 nt, Human
ggugacagagccugggcac

SEQ ID NO: 1189022 - RNA, 21 nt, Human
guaagcuccugaagggcagaa

SEQ ID NO: 1189023 - RNA, 24 nt, Human
guggacccagagcgccaggugaca

SEQ ID NO: 1189024 - RNA, 24 nt, Human
uaacagcagcaugagaacagacuu

SEQ ID NO: 1189025 - RNA, 23 nt, Human
uaacauaaaugcuaugaagagaa

SEQ ID NO: 1189026 - RNA, 22 nt, Human
uaaucacccucaucauuaucug

SEQ ID NO: 1189027 - RNA, 20 nt, Human
uaccaaaaaacacccaaaag

SEQ ID NO: 1189028 - RNA, 18 nt, Human
uagcaccuugugagucag

SEQ ID NO: 1189029 - RNA, 22 nt, Human
uagcaggugcucaacaaucauu

SEQ ID NO: 1189030 - RNA, 24 nt, Human
uagcucacugcagccucgaacucc

SEQ ID NO: 1189031 - RNA, 25 nt, Human
uauaaagugaagcccuugcuuuggc

SEQ ID NO: 1189032 - RNA, 24 nt, Human
ucaaaauacugugauuacaggcgu

SEQ ID NO: 1189033 - RNA, 23 nt, Human
ucacugcagccucgaacuccugg

SEQ ID NO: 1189034 - RNA, 24 nt, Human
ucacugcagccucgaacuccuggc

SEQ ID NO: 1189035 - RNA, 20 nt, Human
uccccacccaaaaucucauc

SEQ ID NO: 1189036 - RNA, 21 nt, Human
uccccauaauccccauguguc

SEQ ID NO: 1189037 - RNA, 20 nt, Human
ucccuaccuucagagacaga

SEQ ID NO: 1189038 - RNA, 22 nt, Human
ucuaccaaaaaacacccaaaag

SEQ ID NO: 1189039 - RNA, 24 nt, Human
ucucaaaauacugugauuacaggc

SEQ ID NO: 1189040 - RNA, 20 nt, Human
ucuccuaaccucccacugga

SEQ ID NO: 1189041 - RNA, 23 nt, Human
ucucucuguguugcccaggcugg

SEQ ID NO: 1189042 - RNA, 24 nt, Human
ucucucuguguugcccaggcugga

SEQ ID NO: 1189043 - RNA, 22 nt, Human
ucucugcugcugccucgcccug

SEQ ID NO: 1189044 - RNA, 20 nt, Human
ucucuguguugcccaggcug

SEQ ID NO: 1189045 - RNA, 23 nt, Human
ucucuguguugcccaggcuggag

SEQ ID NO: 1189046 - RNA, 24 nt, Human
ucucuguguugcccaggcuggagu

SEQ ID NO: 1189047 - RNA, 18 nt, Human
ucugaggccuccccagcc

SEQ ID NO: 1189048 - RNA, 21 nt, Human
ucugcugcugccucgcccugu

SEQ ID NO: 1189049 - RNA, 18 nt, Human
ucuguguugcccaggcug

SEQ ID NO: 1189050 - RNA, 22 nt, Human
ugaaaagcaguaaaugaggcaa

SEQ ID NO: 1189051 - RNA, 21 nt, Human
ugagaacagacuaauacagua

SEQ ID NO: 1189052 - RNA, 22 nt, Human
ugagggggcagaggggacacag

SEQ ID NO: 1189053 - RNA, 24 nt, Human
ugaggucucucuguguugcccagg

SEQ ID NO: 1189054 - RNA, 26 nt, Human
ugaggucucucuguguugcccaggcc

SEQ ID NO: 1189055 - RNA, 21 nt, Human
ugcccaggcuggaguacagug

SEQ ID NO: 1189056 - RNA, 24 nt, Human
ugcccaggcuggaguacaguggca

SEQ ID NO: 1189057 - RNA, 22 nt, Human
ugccucgcccugugacuucagc

SEQ ID NO: 1189058 - RNA, 18 nt, Human
ugccuggcgcauagcagg

SEQ ID NO: 1189059 - RNA, 22 nt, Human
ugcuuuggcucccuguaagcuc

SEQ ID NO: 1189060 - RNA, 19 nt, Human
uggcaacaggggaacgcuu

SEQ ID NO: 1189061 - RNA, 24 nt, Human
uggcaggaucauagcucacugcag

SEQ ID NO: 1189062 - RNA, 24 nt, Human
ugggagagaaggaggcaaguccca

SEQ ID NO: 1189063 - RNA, 21 nt, Human
ugggccaccugguguccccag

SEQ ID NO: 1189064 - RNA, 24 nt, Human
ugguguccccagccucagugggag

SEQ ID NO: 1189065 - RNA, 18 nt, Human
ugugauuacaggcgugag

SEQ ID NO: 1189066 - RNA, 23 nt, Human
ugugauuacaggcgugaguuacc

SEQ ID NO: 1189067 - RNA, 21 nt, Human
uguggugggaggaaguggcaa

SEQ ID NO: 1189068 - RNA, 21 nt, Human
ugugucaggggugugaccaag

SEQ ID NO: 1189069 - RNA, 18 nt, Human
uguguugcccaggcugga

SEQ ID NO: 1189070 - RNA, 24 nt, Human
uguguugcccaggcuggaguacag

SEQ ID NO: 1189071 - RNA, 23 nt, Human
uugcacucauucucucuccugcc

SEQ ID NO: 1189072 - RNA, 24 nt, Human
uugcccaggcuggaguacaguggc

SEQ ID NO: 1189073 - RNA, 24 nt, Human
uuucugaggccuccccagccaugc

SEQ ID NO: 1189074 - RNA, 22 nt, Human
uuuggcuguguccccacccaaa

SEQ ID NO: 1189075 - RNA, 19 nt, Human
aaaauccugaccaaaagcu

SEQ ID NO: 1189076 - RNA, 23 nt, Human
aacacaguuccuuagaacucaga

SEQ ID NO: 1189077 - RNA, 22 nt, Human
accaggcgccacguaucagacu

SEQ ID NO: 1189078 - RNA, 23 nt, Human
acccgggcugugauccucguugc

SEQ ID NO: 1189079 - RNA, 24 nt, Human
acccugagagggagcagagaaagg

SEQ ID NO: 1189080 - RNA, 22 nt, Human
accugggcagcagcugcagccc

SEQ ID NO: 1189081 - RNA, 25 nt, Human
accuuagcuccucugagcacccauc

SEQ ID NO: 1189082 - RNA, 20 nt, Human
accuucugcccauugugggc

SEQ ID NO: 1189083 - RNA, 24 nt, Human
agagaaaggccacugaggcccaga

SEQ ID NO: 1189084 - RNA, 21 nt, Human
aggcacagaguggggaggcuu

SEQ ID NO: 1189085 - RNA, 18 nt, Human
agggggagggggaggggc

SEQ ID NO: 1189086 - RNA, 22 nt, Human
agggggagggggaggggcggag

SEQ ID NO: 1189087 - RNA, 19 nt, Human
auggugcugucgcccuugg

SEQ ID NO: 1189088 - RNA, 23 nt, Human
caaggcagaaagugcucaguacc

SEQ ID NO: 1189089 - RNA, 18 nt, Human
cacacagucagaaguggc

SEQ ID NO: 1189090 - RNA, 23 nt, Human
caggagaugcuguuguuggccac

SEQ ID NO: 1189091 - RNA, 24 nt, Human
caggcaauggacccagauagcucc

SEQ ID NO: 1189092 - RNA, 23 nt, Human
ccacaguaaugccucugucccca

SEQ ID NO: 1189093 - RNA, 18 nt, Human
ccagagggggaaagaggg

SEQ ID NO: 1189094 - RNA, 24 nt, Human
ccaggacaaggcagaaagugcuca

SEQ ID NO: 1189095 - RNA, 22 nt, Human
cccagguacccucaucugaaca

SEQ ID NO: 1189096 - RNA, 20 nt, Human
ccgguugcaggagaugcugu

SEQ ID NO: 1189097 - RNA, 21 nt, Human
ccucugagcacccauccaggc

SEQ ID NO: 1189098 - RNA, 28 nt, Human
ccucugagcacccauccaggcuuggccc

SEQ ID NO: 1189099 - RNA, 21 nt, Human
cgaggacacggagauggggga

SEQ ID NO: 1189100 - RNA, 18 nt, Human
cucaaccuugaccccacu

SEQ ID NO: 1189101 - RNA, 24 nt, Human
cucaguacccugagagggagcaga

SEQ ID NO: 1189102 - RNA, 23 nt, Human
cuccacuuugcacugggccucaa

SEQ ID NO: 1189103 - RNA, 24 nt, Human
cuccucugagcacccauccaggcu

SEQ ID NO: 1189104 - RNA, 25 nt, Human
cucucuggggauggaguagagccuu

SEQ ID NO: 1189105 - RNA, 19 nt, Human
cugcauuugggagcucucu

SEQ ID NO: 1189106 - RNA, 23 nt, Human
cuggagguaccguguuuuggagg

SEQ ID NO: 1189107 - RNA, 26 nt, Human
cugggccucaaccuugaccccacuuu

SEQ ID NO: 1189108 - RNA, 25 nt, Human
cuuugcacugggccucaaccuugac

SEQ ID NO: 1189109 - RNA, 22 nt, Human
gagccaaggcacagagugggga

SEQ ID NO: 1189110 - RNA, 26 nt, Human
gcagagaaaggccacugaggcccaga

SEQ ID NO: 1189111 - RNA, 22 nt, Human
gcccacuuucuucuugcuaugg

SEQ ID NO: 1189112 - RNA, 22 nt, Human
ggcgaugccguaggcccggaac

SEQ ID NO: 1189113 - RNA, 22 nt, Human
ggcggcuggugugggcacgcuc

SEQ ID NO: 1189114 - RNA, 18 nt, Human
gggagcagagaaaggcca

SEQ ID NO: 1189115 - RNA, 18 nt, Human
gggaggcuugggaggguc

SEQ ID NO: 1189116 - RNA, 18 nt, Human
ggggaggcuugggagggu

SEQ ID NO: 1189117 - RNA, 18 nt, Human
gucuuacugguuuugccc

SEQ ID NO: 1189118 - RNA, 20 nt, Human
gugcucaguacccugagagg

SEQ ID NO: 1189119 - RNA, 19 nt, Human
guggagcugaaguguucug

SEQ ID NO: 1189120 - RNA, 19 nt, Human
guggagcugaaguguucug

SEQ ID NO: 1189121 - RNA, 19 nt, Human
guuugguguguguaaaaca

SEQ ID NO: 1189122 - RNA, 21 nt, Human
guuuuggaggcccgggaccca

SEQ ID NO: 1189123 - RNA, 19 nt, Human
uaaaacacaguuccuuaga

SEQ ID NO: 1189124 - RNA, 21 nt, Human
uagauaccauugccccggagc

SEQ ID NO: 1189125 - RNA, 22 nt, Human
uagugucggaccugggcagcag

SEQ ID NO: 1189126 - RNA, 20 nt, Human
ucccugaaaaacauugccca

SEQ ID NO: 1189127 - RNA, 24 nt, Human
uccucugagcacccauccaggcuu

SEQ ID NO: 1189128 - RNA, 20 nt, Human
uccugagaagagucuggguu

SEQ ID NO: 1189129 - RNA, 18 nt, Human
ucgagggggagggggagg

SEQ ID NO: 1189130 - RNA, 22 nt, Human
ugagaagagucuggguuuggug

SEQ ID NO: 1189131 - RNA, 18 nt, Human
ugcacugggccucaaccu

SEQ ID NO: 1189132 - RNA, 23 nt, Human
ugccccggagcuccacuuugcac

SEQ ID NO: 1189133 - RNA, 22 nt, Human
ugccgguugcaggagaugcugu

SEQ ID NO: 1189134 - RNA, 23 nt, Human
ugccguaggcccggaacgagugg

SEQ ID NO: 1189135 - RNA, 19 nt, Human
ugcucaggaggggcggcug

SEQ ID NO: 1189136 - RNA, 21 nt, Human
ugcugugguaaccaccuucca

SEQ ID NO: 1189137 - RNA, 19 nt, Human
uggcacggccccgcacggc

SEQ ID NO: 1189138 - RNA, 19 nt, Human
ugggcuguggagcugaagu

SEQ ID NO: 1189139 - RNA, 18 nt, Human
uuccugagaagagucugg

SEQ ID NO: 1189140 - RNA, 21 nt, Human
uucugcauuugggagcucucu

SEQ ID NO: 1189141 - RNA, 19 nt, Human
uugcaugaugcauucucgg

SEQ ID NO: 1189142 - RNA, 19 nt, Human
uuggcccugaagcaggucu

SEQ ID NO: 1189143 - RNA, 23 nt, Human
aaaccaagagggcauuuccacag

SEQ ID NO: 1189144 - RNA, 20 nt, Human
aaaugcaucucaaaccaaga

SEQ ID NO: 1189145 - RNA, 23 nt, Human
aagaaaagcgauaaggaaaacau

SEQ ID NO: 1189146 - RNA, 24 nt, Human
aagagggcauuuccacaucaugcc

SEQ ID NO: 1189147 - RNA, 21 nt, Human
aagcaaauacaauagauacua

SEQ ID NO: 1189148 - RNA, 18 nt, Human
aaucuugcuucuucuaac

SEQ ID NO: 1189149 - RNA, 19 nt, Human
agaaagaaaagcgauaagg

SEQ ID NO: 1189150 - RNA, 20 nt, Human
agaauucuuuauugccacuu

SEQ ID NO: 1189151 - RNA, 18 nt, Human
agcaaagauuugcaugug

SEQ ID NO: 1189152 - RNA, 21 nt, Human
agucaauaccaaaaaaucuug

SEQ ID NO: 1189153 - RNA, 22 nt, Human
aguguuauuucuucuagacaac

SEQ ID NO: 1189154 - RNA, 20 nt, Human
auaaaaccagguaaacuccc

SEQ ID NO: 1189155 - RNA, 23 nt, Human
auaaaaccagguaaacuccccua

SEQ ID NO: 1189156 - RNA, 18 nt, Human
aucuuccuucagccccua

SEQ ID NO: 1189157 - RNA, 18 nt, Human
aucuugcacaucuuccuu

SEQ ID NO: 1189158 - RNA, 23 nt, Human
auuaaaauccucaaaugcaucuc

SEQ ID NO: 1189159 - RNA, 21 nt, Human
ccuggagauuugcacagucaa

SEQ ID NO: 1189160 - RNA, 21 nt, Human
cuauuuauaaaccugagcaac

SEQ ID NO: 1189161 - RNA, 20 nt, Human
cucaaaugcaucucaaacca

SEQ ID NO: 1189162 - RNA, 27 nt, Human
cucaaucaguaagaacuggauauuacu

SEQ ID NO: 1189163 - RNA, 20 nt, Human
cuccccuaccccauucaaaa

SEQ ID NO: 1189164 - RNA, 19 nt, Human
cugaaaacaagcauaaucc

SEQ ID NO: 1189165 - RNA, 19 nt, Human
ggagucugaucucaccaua

SEQ ID NO: 1189166 - RNA, 27 nt, Human
guaaguucuuccuccaucuggaguucu

SEQ ID NO: 1189167 - RNA, 21 nt, Human
uaaaauccucaaaugcaucuc

SEQ ID NO: 1189168 - RNA, 26 nt, Human
uaaaauccucaaaugcaucucaaacc

SEQ ID NO: 1189169 - RNA, 27 nt, Human
uaaacuccccuaccccauucaaaaggc

SEQ ID NO: 1189170 - RNA, 24 nt, Human
uaacacacccaauaaaucaaugcc

SEQ ID NO: 1189171 - RNA, 24 nt, Human
ucaaaccaagagggcauuuccaca

SEQ ID NO: 1189172 - RNA, 24 nt, Human
ucccuagaaugaaauucugagaaa

SEQ ID NO: 1189173 - RNA, 23 nt, Human
ucuggaguuccgcuguaccuuug

SEQ ID NO: 1189174 - RNA, 21 nt, Human
ugacucccuggagauuugcac

SEQ ID NO: 1189175 - RNA, 25 nt, Human
ugacuugguuggaguugcuagcaag

SEQ ID NO: 1189176 - RNA, 19 nt, Human
ugagaaaguucagcaccac

SEQ ID NO: 1189177 - RNA, 24 nt, Human
ugagaauucuuuauugccacuuuu

SEQ ID NO: 1189178 - RNA, 18 nt, Human
ugagugcuuuugcguuaa

SEQ ID NO: 1189179 - RNA, 19 nt, Human
ugaguggguggagaaagaa

SEQ ID NO: 1189180 - RNA, 25 nt, Human
ugcuagcaaacaucggacaaauucc

SEQ ID NO: 1189181 - RNA, 20 nt, Human
uguaccuuuggaaugacggu

SEQ ID NO: 1189182 - RNA, 21 nt, Human
uguugugcuuuccauaaauua

SEQ ID NO: 1189183 - RNA, 20 nt, Human
uuacaaguguuguagugaua

SEQ ID NO: 1189184 - RNA, 21 nt, Human
uucccuagaaugaaauucuga

SEQ ID NO: 1189185 - RNA, 19 nt, Human
uugguuggaguugcuagca

SEQ ID NO: 1189186 - RNA, 25 nt, Human
uuuaaaauuugcugacaguguuauu

SEQ ID NO: 1189187 - RNA, 24 nt, Human
aauuaagcccauuuugucuuucca

SEQ ID NO: 1189188 - RNA, 19 nt, Human
acuuggagaacuuuucugu

SEQ ID NO: 1189189 - RNA, 18 nt, Human
agaguuggaaaagaggca

SEQ ID NO: 1189190 - RNA, 23 nt, Human
agcccauuuugucuuuccaagug

SEQ ID NO: 1189191 - RNA, 25 nt, Human
caacaagcaaggcuaaaagcucucu

SEQ ID NO: 1189192 - RNA, 21 nt, Human
caaggcuaaaagcucucuaag

SEQ ID NO: 1189193 - RNA, 18 nt, Human
caccaucagcaagaaggc

SEQ ID NO: 1189194 - RNA, 19 nt, Human
caucagcaagaaggcucuc

SEQ ID NO: 1189195 - RNA, 21 nt, Human
ccaccaucagcaagaaggcuc

SEQ ID NO: 1189196 - RNA, 20 nt, Human
cccucccuccaaucauuucc

SEQ ID NO: 1189197 - RNA, 23 nt, Human
ccuugaucuuggacuucucagcc

SEQ ID NO: 1189198 - RNA, 19 nt, Human
cguugccaccuucaguugg

SEQ ID NO: 1189199 - RNA, 19 nt, Human
ggucgaguggggacuugga

SEQ ID NO: 1189200 - RNA, 19 nt, Human
uaucuaauaauuaagccca

SEQ ID NO: 1189201 - RNA, 19 nt, Human
ucaguuggaaacguauccu

SEQ ID NO: 1189202 - RNA, 21 nt, Human
uccaagugggagagucaugcu

SEQ ID NO: 1189203 - RNA, 18 nt, Human
ucuuggacuucucagccu

SEQ ID NO: 1189204 - RNA, 25 nt, Human
ugagaggcgaagccagcuggacuuc

SEQ ID NO: 1189205 - RNA, 19 nt, Human
ugaucuuggacuucucagc

SEQ ID NO: 1189206 - RNA, 18 nt, Human
uggaaauuuaaggagaaa

SEQ ID NO: 1189207 - RNA, 25 nt, Human
ugggagagucaugcugacacuguuu

SEQ ID NO: 1189208 - RNA, 20 nt, Human
uguguuggaagaagaguugg

SEQ ID NO: 1189209 - RNA, 22 nt, Human
uuaaggagaaauuuguguuuau

SEQ ID NO: 1189210 - RNA, 25 nt, Human
uucaauuuuaauacccaugaaggcc

SEQ ID NO: 1189211 - RNA, 18 nt, Human
aaaaggcuguccaagagg

SEQ ID NO: 1189212 - RNA, 19 nt, Human
aauucucuuaccugaaaau

SEQ ID NO: 1189213 - RNA, 25 nt, Human
acuguaaaaggcuguccaagaggag

SEQ ID NO: 1189214 - RNA, 19 nt, Human
aggaagcaucauuauugcc

SEQ ID NO: 1189215 - RNA, 20 nt, Human
cuuuaucugugcugcucucc

SEQ ID NO: 1189216 - RNA, 25 nt, Human
uaaaaggcuguccaagaggaggaag

SEQ ID NO: 1189217 - RNA, 24 nt, Human
ucagaccuaccuucucugaaguuc

SEQ ID NO: 1189218 - RNA, 22 nt, Human
uccauggccagaacuguaaaag

SEQ ID NO: 1189219 - RNA, 24 nt, Human
uccauggccagaacuguaaaaggc

SEQ ID NO: 1189220 - RNA, 20 nt, Human
ucccagggauccacugcugu

SEQ ID NO: 1189221 - RNA, 19 nt, Human
ucuccuguuuccccccaaa

SEQ ID NO: 1189222 - RNA, 21 nt, Human
ucugugcugcucucccaggga

SEQ ID NO: 1189223 - RNA, 22 nt, Human
uguaaaaggcuguccaagagga

SEQ ID NO: 1189224 - RNA, 23 nt, Human
ugugcugcucucccagggaucca

SEQ ID NO: 1189225 - RNA, 21 nt, Human
uguuuccccccaaaucagacc

SEQ ID NO: 1189226 - RNA, 18 nt, Human
aacagaaucuucagacaa

SEQ ID NO: 1189227 - RNA, 20 nt, Human
aaccacggccagccccacaa

SEQ ID NO: 1189228 - RNA, 22 nt, Human
aaccucaguaucauggccuuuc

SEQ ID NO: 1189229 - RNA, 20 nt, Human
aaccuggggagcaggaaggc

SEQ ID NO: 1189230 - RNA, 20 nt, Human
aagagagagcagauggaaaa

SEQ ID NO: 1189231 - RNA, 24 nt, Human
aaggaaaacagaaacagccauugg

SEQ ID NO: 1189232 - RNA, 20 nt, Human
aagggagggaauguggucuc

SEQ ID NO: 1189233 - RNA, 22 nt, Human
aaggggccccgcaaggucagac

SEQ ID NO: 1189234 - RNA, 19 nt, Human
aaggugaagggccccaggg

SEQ ID NO: 1189235 - RNA, 19 nt, Human
aagguucuugaacaaagga

SEQ ID NO: 1189236 - RNA, 24 nt, Human
aauagaaaccagcuguggcccaga

SEQ ID NO: 1189237 - RNA, 24 nt, Human
acagcugccaagggugguugggga

SEQ ID NO: 1189238 - RNA, 18 nt, Human
acaugagguacccagaua

SEQ ID NO: 1189239 - RNA, 27 nt, Human
acccaguguuucuggagccucugagug

SEQ ID NO: 1189240 - RNA, 19 nt, Human
acuucugacucugcugugu

SEQ ID NO: 1189241 - RNA, 23 nt, Human
agaaaccagcuguggcccagaac

SEQ ID NO: 1189242 - RNA, 21 nt, Human
agacaauugaaaaccagccau

SEQ ID NO: 1189243 - RNA, 19 nt, Human
agagagcagauggaaaauu

SEQ ID NO: 1189244 - RNA, 21 nt, Human
agccugaggcuaccuccucug

SEQ ID NO: 1189245 - RNA, 23 nt, Human
aggagaucuggcuucuacuucug

SEQ ID NO: 1189246 - RNA, 19 nt, Human
aggaggugaccuucagaug

SEQ ID NO: 1189247 - RNA, 21 nt, Human
aggauggaaggcaaagguggg

SEQ ID NO: 1189248 - RNA, 18 nt, Human
aggcggaagggggacucc

SEQ ID NO: 1189249 - RNA, 18 nt, Human
agggcagacacuuggagg

SEQ ID NO: 1189250 - RNA, 18 nt, Human
agggccccaggagucacu

SEQ ID NO: 1189251 - RNA, 22 nt, Human
aggggagggagaggccauguuu

SEQ ID NO: 1189252 - RNA, 19 nt, Human
agguaggcacuuccuggca

SEQ ID NO: 1189253 - RNA, 24 nt, Human
auagacuguccuucccaggccucu

SEQ ID NO: 1189254 - RNA, 19 nt, Human
caacagaaucuucagacaa

SEQ ID NO: 1189255 - RNA, 21 nt, Human
caaccacggccagccccacaa

SEQ ID NO: 1189256 - RNA, 20 nt, Human
caagcccucaucuuggguca

SEQ ID NO: 1189257 - RNA, 21 nt, Human
caauugaaaaccagccauuca

SEQ ID NO: 1189258 - RNA, 24 nt, Human
cacaugccugagguugugugugug

SEQ ID NO: 1189259 - RNA, 24 nt, Human
caccucuggccuggaauugugucc

SEQ ID NO: 1189260 - RNA, 23 nt, Human
cagaaacagccauuggaggcggg

SEQ ID NO: 1189261 - RNA, 20 nt, Human
caggcccagccucuagccac

SEQ ID NO: 1189262 - RNA, 18 nt, Human
cagugggagauugggcug

SEQ ID NO: 1189263 - RNA, 22 nt, Human
cauucaaagaugcaucaaacac

SEQ ID NO: 1189264 - RNA, 22 nt, Human
cauuccucccaacagaaucuuc

SEQ ID NO: 1189265 - RNA, 19 nt, Human
cauugcuggaggguucguu

SEQ ID NO: 1189266 - RNA, 18 nt, Human
ccaacagaaucuucagac

SEQ ID NO: 1189267 - RNA, 19 nt, Human
ccaaccacggccagcccca

SEQ ID NO: 1189268 - RNA, 23 nt, Human
ccacggccagccccacaagguga

SEQ ID NO: 1189269 - RNA, 19 nt, Human
ccagcgcccccugcccucc

SEQ ID NO: 1189270 - RNA, 22 nt, Human
ccaggccgggccgguggcucca

SEQ ID NO: 1189271 - RNA, 18 nt, Human
ccagggcucuggagugcg

SEQ ID NO: 1189272 - RNA, 21 nt, Human
ccauguuuaaccuggggagca

SEQ ID NO: 1189273 - RNA, 20 nt, Human
cccagaacgcccccgcagcc

SEQ ID NO: 1189274 - RNA, 22 nt, Human
cccagaacgcccccgcagccac

SEQ ID NO: 1189275 - RNA, 23 nt, Human
cccagccucuagccaccucuggc

SEQ ID NO: 1189276 - RNA, 20 nt, Human
cccagguauuuccccaucuc

SEQ ID NO: 1189277 - RNA, 20 nt, Human
ccccaggagucacuuagccc

SEQ ID NO: 1189278 - RNA, 20 nt, Human
ccccaggagucacuuagccc

SEQ ID NO: 1189279 - RNA, 19 nt, Human
ccccgcaaggucagaccag

SEQ ID NO: 1189280 - RNA, 21 nt, Human
cccgcagccacugcccaggga

SEQ ID NO: 1189281 - RNA, 22 nt, Human
cccggccagcuccacccagaag

SEQ ID NO: 1189282 - RNA, 20 nt, Human
cccucuugcuccuucacugu

SEQ ID NO: 1189283 - RNA, 23 nt, Human
ccucugaguggugcccgcugccu

SEQ ID NO: 1189284 - RNA, 18 nt, Human
cgcagccacugcccaggg

SEQ ID NO: 1189285 - RNA, 19 nt, Human
cggaagggggacuccagac

SEQ ID NO: 1189286 - RNA, 20 nt, Human
cuccagacuggggaagggac

SEQ ID NO: 1189287 - RNA, 23 nt, Human
cuccaggcccagccucuagccac

SEQ ID NO: 1189288 - RNA, 20 nt, Human
cugcuacagcugccaagggu

SEQ ID NO: 1189289 - RNA, 25 nt, Human
cugcugcuuccuggaccaagugaca

SEQ ID NO: 1189290 - RNA, 19 nt, Human
cuggaccaacucuuccaug

SEQ ID NO: 1189291 - RNA, 20 nt, Human
cuggaccaacucuuccaugg

SEQ ID NO: 1189292 - RNA, 22 nt, Human
cuggagccucugaguggugccc

SEQ ID NO: 1189293 - RNA, 23 nt, Human
cuggagccucugaguggugcccg

SEQ ID NO: 1189294 - RNA, 18 nt, Human
cugggcauguagugggag

SEQ ID NO: 1189295 - RNA, 20 nt, Human
cugggugagauguucacugg

SEQ ID NO: 1189296 - RNA, 22 nt, Human
cuuaaaggaaggagcagggaaa

SEQ ID NO: 1189297 - RNA, 19 nt, Human
cuugcuccuucacuguucu

SEQ ID NO: 1189298 - RNA, 22 nt, Human
gaaaacagaaacagccauugga

SEQ ID NO: 1189299 - RNA, 24 nt, Human
gaaacuucccggccagcuccaccc

SEQ ID NO: 1189300 - RNA, 21 nt, Human
gaagaagccacaccuucugag

SEQ ID NO: 1189301 - RNA, 22 nt, Human
gaaggcaaaggugggggaauga

SEQ ID NO: 1189302 - RNA, 19 nt, Human
gacggaggcggaaggggga

SEQ ID NO: 1189303 - RNA, 20 nt, Human
gagcaggaaggcuuccugga

SEQ ID NO: 1189304 - RNA, 22 nt, Human
gagcgggagccgcuggagagga

SEQ ID NO: 1189305 - RNA, 23 nt, Human
gagcucacaaaccgccauccuga

SEQ ID NO: 1189306 - RNA, 21 nt, Human
gccccuggagguaggcacuuc

SEQ ID NO: 1189307 - RNA, 19 nt, Human
ggaaaacagaaacagccau

SEQ ID NO: 1189308 - RNA, 22 nt, Human
ggaauguggucucccucccucc

SEQ ID NO: 1189309 - RNA, 26 nt, Human
ggaccagaaucagaaaggccaggaga

SEQ ID NO: 1189310 - RNA, 23 nt, Human
ggagaggccauguuuaaccuggg

SEQ ID NO: 1189311 - RNA, 18 nt, Human
ggagcccagaggagaggc

SEQ ID NO: 1189312 - RNA, 21 nt, Human
ggagcccagaggagaggcuga

SEQ ID NO: 1189313 - RNA, 25 nt, Human
ggagucacuuagcccuuccucuuuc

SEQ ID NO: 1189314 - RNA, 18 nt, Human
ggauuuggagucaggaga

SEQ ID NO: 1189315 - RNA, 23 nt, Human
ggcauguggcucuccucuccaca

SEQ ID NO: 1189316 - RNA, 26 nt, Human
ggccugcugcuuccuggaccaacucu

SEQ ID NO: 1189317 - RNA, 23 nt, Human
gggaccagaaucagaaaggccag

SEQ ID NO: 1189318 - RNA, 20 nt, Human
ggggaugcugguuaccucau

SEQ ID NO: 1189319 - RNA, 25 nt, Human
ggugaagggccccagggcagacacc

SEQ ID NO: 1189320 - RNA, 21 nt, Human
gugaccaggauggaaggcaaa

SEQ ID NO: 1189321 - RNA, 19 nt, Human
uacuauguggugaccagga

SEQ ID NO: 1189322 - RNA, 20 nt, Human
uacuauguggugaccaggau

SEQ ID NO: 1189323 - RNA, 19 nt, Human
uauuuccccaucucguggg

SEQ ID NO: 1189324 - RNA, 22 nt, Human
ucacuuagcccuuccucuuuca

SEQ ID NO: 1189325 - RNA, 25 nt, Human
ucacuuagcccuuccucuuucaauu

SEQ ID NO: 1189326 - RNA, 23 nt, Human
ucagauggucuuaaaggaaggag

SEQ ID NO: 1189327 - RNA, 22 nt, Human
ucauggccuuucaccaucuucc

SEQ ID NO: 1189328 - RNA, 22 nt, Human
ucauuggagcugagagcuuugu

SEQ ID NO: 1189329 - RNA, 20 nt, Human
uccagucccagaugugccca

SEQ ID NO: 1189330 - RNA, 20 nt, Human
ucccaaaugggcaccaaaca

SEQ ID NO: 1189331 - RNA, 23 nt, Human
ucccggccagcuccacccagaag

SEQ ID NO: 1189332 - RNA, 18 nt, Human
ucccugauggccagcgcc

SEQ ID NO: 1189333 - RNA, 19 nt, Human
ucccugauggccagcgccc

SEQ ID NO: 1189334 - RNA, 23 nt, Human
uccguaguugccucagaccaggg

SEQ ID NO: 1189335 - RNA, 21 nt, Human
ucgugggggagacagaugggc

SEQ ID NO: 1189336 - RNA, 20 nt, Human
ucuccacaucacaugccuga

SEQ ID NO: 1189337 - RNA, 21 nt, Human
ugaauagacuguccuucccag

SEQ ID NO: 1189338 - RNA, 23 nt, Human
ugagaagaugacaagaagugggc

SEQ ID NO: 1189339 - RNA, 19 nt, Human
ugagauguucacuggguga

SEQ ID NO: 1189340 - RNA, 20 nt, Human
ugagguugugugugugugug

SEQ ID NO: 1189341 - RNA, 19 nt, Human
ugcaagaagggaucaugag

SEQ ID NO: 1189342 - RNA, 22 nt, Human
ugcaagaagggaucaugagggc

SEQ ID NO: 1189343 - RNA, 19 nt, Human
ugccucagaccagggagcc

SEQ ID NO: 1189344 - RNA, 18 nt, Human
ugcuggaggguucguugg

SEQ ID NO: 1189345 - RNA, 24 nt, Human
uggacggaggcggaagggggacuc

SEQ ID NO: 1189346 - RNA, 21 nt, Human
uggagaggaagguugggaccc

SEQ ID NO: 1189347 - RNA, 18 nt, Human
uggagucaggagaucugg

SEQ ID NO: 1189348 - RNA, 21 nt, Human
uggaugcugggugagauguuc

SEQ ID NO: 1189349 - RNA, 21 nt, Human
uggcccagaacgcccccgcag

SEQ ID NO: 1189350 - RNA, 18 nt, Human
uggcccugggugucaccc

SEQ ID NO: 1189351 - RNA, 24 nt, Human
uggcuccaagucccucuugcuccu

SEQ ID NO: 1189352 - RNA, 19 nt, Human
uggcucuccucuccacauc

SEQ ID NO: 1189353 - RNA, 21 nt, Human
ugggagauugggcuggagcca

SEQ ID NO: 1189354 - RNA, 24 nt, Human
ugggggaaugagcgggagccgcug

SEQ ID NO: 1189355 - RNA, 23 nt, Human
ugguggcuccaagucccucuugc

SEQ ID NO: 1189356 - RNA, 19 nt, Human
ugucaaggagucccuuaga

SEQ ID NO: 1189357 - RNA, 21 nt, Human
uguccagcgccugagcucugc

SEQ ID NO: 1189358 - RNA, 19 nt, Human
uguggcucuccucuccaca

SEQ ID NO: 1189359 - RNA, 24 nt, Human
uguggcucuccucuccacaucaca

SEQ ID NO: 1189360 - RNA, 20 nt, Human
uguggugaccaggauggaag

SEQ ID NO: 1189361 - RNA, 24 nt, Human
ugugugcacauuuguguuuguaug

SEQ ID NO: 1189362 - RNA, 20 nt, Human
ugugugugugcacauuugug

SEQ ID NO: 1189363 - RNA, 22 nt, Human
ugugugugugugcacauuugug

SEQ ID NO: 1189364 - RNA, 18 nt, Human
ugugugugugugugcaca

SEQ ID NO: 1189365 - RNA, 19 nt, Human
ugugugugugugugcacau

SEQ ID NO: 1189366 - RNA, 20 nt, Human
uuacuauguggugaccagga

SEQ ID NO: 1189367 - RNA, 25 nt, Human
uuccagucccagaugugcccagguc

SEQ ID NO: 1189368 - RNA, 21 nt, Human
uuccagugggagauugggcug

SEQ ID NO: 1189369 - RNA, 22 nt, Human
uuccauggcccugggugucacc

SEQ ID NO: 1189370 - RNA, 25 nt, Human
uuccucccaacagaaucuucagaca

SEQ ID NO: 1189371 - RNA, 21 nt, Human
uucuguauuccagucccagau

SEQ ID NO: 1189372 - RNA, 19 nt, Human
uucuuacucaggcaugugg

SEQ ID NO: 1189373 - RNA, 23 nt, Human
uuuaaccuggggagcaggaaggc

SEQ ID NO: 1189374 - RNA, 22 nt, Human
uuuuccggaaugucauugcugg

SEQ ID NO: 1189375 - RNA, 24 nt, Human
uuuuggaauggaugccuggccuac

SEQ ID NO: 1189376 - RNA, 18 nt, Human
uuuuuuggaauggaugcc

SEQ ID NO: 1189377 - RNA, 21 nt, Human
uuuuuuggaauggaugccugg

SEQ ID NO: 1189378 - RNA, 18 nt, Human
aaacaaaugugaauuucu

SEQ ID NO: 1189379 - RNA, 28 nt, Human
aaacaaaugugaauuucuaaacugagac

SEQ ID NO: 1189380 - RNA, 23 nt, Human
aaacaggaggagggggaauccua

SEQ ID NO: 1189381 - RNA, 26 nt, Human
aacaauacaagcaaacaaaugugaau

SEQ ID NO: 1189382 - RNA, 18 nt, Human
aacccuggcugggcacug

SEQ ID NO: 1189383 - RNA, 22 nt, Human
accaccagggaugugaacuacc

SEQ ID NO: 1189384 - RNA, 23 nt, Human
accacuccccuuuguaccuccug

SEQ ID NO: 1189385 - RNA, 18 nt, Human
accccaauuccccgcugc

SEQ ID NO: 1189386 - RNA, 18 nt, Human
accucagcuuuuucccuc

SEQ ID NO: 1189387 - RNA, 24 nt, Human
accuccacugucuggcuagggagc

SEQ ID NO: 1189388 - RNA, 19 nt, Human
acuguagucagcucacuug

SEQ ID NO: 1189389 - RNA, 21 nt, Human
agacagaaaaugacuugccca

SEQ ID NO: 1189390 - RNA, 27 nt, Human
agacuugggggccauccugguaaagac

SEQ ID NO: 1189391 - RNA, 24 nt, Human
agaggcaaguaagcugagguucag

SEQ ID NO: 1189392 - RNA, 18 nt, Human
aggaaacaggaggagggg

SEQ ID NO: 1189393 - RNA, 18 nt, Human
aggcagaagacccuaaac

SEQ ID NO: 1189394 - RNA, 20 nt, Human
agguggaugggguggggaga

SEQ ID NO: 1189395 - RNA, 18 nt, Human
aucugaaccaaucuagaa

SEQ ID NO: 1189396 - RNA, 26 nt, Human
cacacaguuccccauaaauauguaca

SEQ ID NO: 1189397 - RNA, 25 nt, Human
cacagcaccgaugagcugguuccaa

SEQ ID NO: 1189398 - RNA, 22 nt, Human
cacagccuuggaucaggacaga

SEQ ID NO: 1189399 - RNA, 18 nt, Human
caccucccccuucgcucu

SEQ ID NO: 1189400 - RNA, 21 nt, Human
caccucccccuucgcucuguc

SEQ ID NO: 1189401 - RNA, 19 nt, Human
caccugagaugaccaccag

SEQ ID NO: 1189402 - RNA, 23 nt, Human
cacuugauccacagccuggcacc

SEQ ID NO: 1189403 - RNA, 18 nt, Human
cagaagacccuaaacagg

SEQ ID NO: 1189404 - RNA, 23 nt, Human
ccaacagccaagcuccacagggc

SEQ ID NO: 1189405 - RNA, 24 nt, Human
ccaacagccaagcuccacagggcc

SEQ ID NO: 1189406 - RNA, 21 nt, Human
ccaauuccccgcugccuucua

SEQ ID NO: 1189407 - RNA, 23 nt, Human
ccaccugagaugaccaccaggga

SEQ ID NO: 1189408 - RNA, 21 nt, Human
cccauccccagccccaggauc

SEQ ID NO: 1189409 - RNA, 23 nt, Human
ccccuuuguaccuccugucccaa

SEQ ID NO: 1189410 - RNA, 18 nt, Human
cccugaguuuaacccugg

SEQ ID NO: 1189411 - RNA, 18 nt, Human
cccuggugggaagagccc

SEQ ID NO: 1189412 - RNA, 18 nt, Human
ccggaagaccucccaccc

SEQ ID NO: 1189413 - RNA, 20 nt, Human
ccuccaacccgacaugugua

SEQ ID NO: 1189414 - RNA, 19 nt, Human
ccucccagccaugcuuccu

SEQ ID NO: 1189415 - RNA, 23 nt, Human
ccucccagccaugcuuccucuga

SEQ ID NO: 1189416 - RNA, 19 nt, Human
ccucccaggugcuguuucu

SEQ ID NO: 1189417 - RNA, 19 nt, Human
ccuccugccccauccccag

SEQ ID NO: 1189418 - RNA, 21 nt, Human
ccuccugccccauccccagcc

SEQ ID NO: 1189419 - RNA, 22 nt, Human
ccuccugucccaacagccaagc

SEQ ID NO: 1189420 - RNA, 22 nt, Human
ccucuccccggaagaccuccca

SEQ ID NO: 1189421 - RNA, 23 nt, Human
ccugcccugaguuuaacccuggc

SEQ ID NO: 1189422 - RNA, 23 nt, Human
cugcuucucccucaccccaauuc

SEQ ID NO: 1189423 - RNA, 24 nt, Human
cugcuucucccucaccccaauucc

SEQ ID NO: 1189424 - RNA, 26 nt, Human
cuguaaggccuuucuccucccaauug

SEQ ID NO: 1189425 - RNA, 26 nt, Human
gaaggagaggaaacaggaggaggggg

SEQ ID NO: 1189426 - RNA, 24 nt, Human
gaagggacuugcuuccucuuugcc

SEQ ID NO: 1189427 - RNA, 24 nt, Human
gacuugcuuccucuuugccuucca

SEQ ID NO: 1189428 - RNA, 25 nt, Human
gagacagaaaaugacuugcccaaga

SEQ ID NO: 1189429 - RNA, 19 nt, Human
gagaggaaacaggaggagg

SEQ ID NO: 1189430 - RNA, 19 nt, Human
gagcuccuuaacacuuuuc

SEQ ID NO: 1189431 - RNA, 24 nt, Human
gaggcccugauguccuggggucua

SEQ ID NO: 1189432 - RNA, 21 nt, Human
gaugacaggcaccgagugcug

SEQ ID NO: 1189433 - RNA, 24 nt, Human
gcaccuccacugucuggcuaggga

SEQ ID NO: 1189434 - RNA, 22 nt, Human
gccccauccccagccccaggau

SEQ ID NO: 1189435 - RNA, 22 nt, Human
gcccucuccccggaagaccucc

SEQ ID NO: 1189436 - RNA, 24 nt, Human
ggagaggaaacaggaggaggggga

SEQ ID NO: 1189437 - RNA, 22 nt, Human
ggaggagggggaauccuagcag

SEQ ID NO: 1189438 - RNA, 19 nt, Human
ggauaagugugagccacug

SEQ ID NO: 1189439 - RNA, 22 nt, Human
ggcaccacuccccuuuguaccu

SEQ ID NO: 1189440 - RNA, 18 nt, Human
ggcagaaaaguugggccu

SEQ ID NO: 1189441 - RNA, 20 nt, Human
ggcgaaaaucugggaaggcu

SEQ ID NO: 1189442 - RNA, 23 nt, Human
gggcgaaaaucugggaaggcuuc

SEQ ID NO: 1189443 - RNA, 23 nt, Human
ggggagaguucaggcauguggug

SEQ ID NO: 1189444 - RNA, 18 nt, Human
gguggaugggguggggag

SEQ ID NO: 1189445 - RNA, 21 nt, Human
uaaaaaaaaauccuuuucugu

SEQ ID NO: 1189446 - RNA, 23 nt, Human
uaaaaguguguagcaccuccccc

SEQ ID NO: 1189447 - RNA, 20 nt, Human
uaacccuggcugggcacugg

SEQ ID NO: 1189448 - RNA, 22 nt, Human
uaagacgcugucccugguggga

SEQ ID NO: 1189449 - RNA, 19 nt, Human
uacaagguggauggggugg

SEQ ID NO: 1189450 - RNA, 19 nt, Human
uagaaagaugaggagcaua

SEQ ID NO: 1189451 - RNA, 19 nt, Human
uagcaaugugagaacagac

SEQ ID NO: 1189452 - RNA, 19 nt, Human
uaggauaagugugagccac

SEQ ID NO: 1189453 - RNA, 20 nt, Human
uaggauaagugugagccacu

SEQ ID NO: 1189454 - RNA, 21 nt, Human
uaggauaagugugagccacug

SEQ ID NO: 1189455 - RNA, 22 nt, Human
uauagcaaugugagaacagaca

SEQ ID NO: 1189456 - RNA, 23 nt, Human
uauauacaugcaguacuuccaug

SEQ ID NO: 1189457 - RNA, 23 nt, Human
ucaggagcugcagcauaagggcc

SEQ ID NO: 1189458 - RNA, 25 nt, Human
uccaccaccucaaacauuuaccauu

SEQ ID NO: 1189459 - RNA, 23 nt, Human
uccaugacuauucaaagaaaaac

SEQ ID NO: 1189460 - RNA, 24 nt, Human
uccaugacuauucaaagaaaaaca

SEQ ID NO: 1189461 - RNA, 18 nt, Human
ucccaggugcuguuucuc

SEQ ID NO: 1189462 - RNA, 19 nt, Human
uccccagccccaggauccu

SEQ ID NO: 1189463 - RNA, 24 nt, Human
ucuaaacugagacuacuguaaggc

SEQ ID NO: 1189464 - RNA, 23 nt, Human
ucuaaugguuuagccccaccucc

SEQ ID NO: 1189465 - RNA, 24 nt, Human
ucuccccggaagaccucccacccu

SEQ ID NO: 1189466 - RNA, 18 nt, Human
ucuggcuagggagccucg

SEQ ID NO: 1189467 - RNA, 18 nt, Human
ucuguguacaauguguga

SEQ ID NO: 1189468 - RNA, 21 nt, Human
ucuguguuuggaacagcuaag

SEQ ID NO: 1189469 - RNA, 19 nt, Human
ugagaacagacaaauacaa

SEQ ID NO: 1189470 - RNA, 25 nt, Human
ugagaacagacaaauacaaggugga

SEQ ID NO: 1189471 - RNA, 22 nt, Human
ugcaguacuuccaugacuauuc

SEQ ID NO: 1189472 - RNA, 20 nt, Human
ugcaucaauaaagcuucugu

SEQ ID NO: 1189473 - RNA, 18 nt, Human
ugccucugcuucucccuc

SEQ ID NO: 1189474 - RNA, 18 nt, Human
ugcuuccucugaagccug

SEQ ID NO: 1189475 - RNA, 20 nt, Human
ugggaagacauuuucuucug

SEQ ID NO: 1189476 - RNA, 22 nt, Human
ugugaaaucacagcaccgauga

SEQ ID NO: 1189477 - RNA, 21 nt, Human
ugugaagaagggacuugcuuc

SEQ ID NO: 1189478 - RNA, 19 nt, Human
uguggagcccugaggugga

SEQ ID NO: 1189479 - RNA, 19 nt, Human
uguguugguguggcccugu

SEQ ID NO: 1189480 - RNA, 20 nt, Human
uuauagcaaugugagaacag

SEQ ID NO: 1189481 - RNA, 21 nt, Human
uucagagacagaaaaugacuu

SEQ ID NO: 1189482 - RNA, 22 nt, Human
uucagagacagaaaaugacuug

SEQ ID NO: 1189483 - RNA, 18 nt, Human
uucauucauucugaagcc

SEQ ID NO: 1189484 - RNA, 19 nt, Human
uuccaccaccucaaacauu

SEQ ID NO: 1189485 - RNA, 23 nt, Human
uuccugaggccucccagccaugc

SEQ ID NO: 1189486 - RNA, 20 nt, Human
uucucccucaccccaauucc

SEQ ID NO: 1189487 - RNA, 18 nt, Human
uucuccuaauagcaagau

SEQ ID NO: 1189488 - RNA, 20 nt, Human
uucugaagccugcccugagu

SEQ ID NO: 1189489 - RNA, 21 nt, Human
uucugcagggcgaaaaucugg

SEQ ID NO: 1189490 - RNA, 26 nt, Human
uucugcugcaagcaaggaaaugagag

SEQ ID NO: 1189491 - RNA, 20 nt, Human
uugcuuccucuuugccuucc

SEQ ID NO: 1189492 - RNA, 21 nt, Human
uuuaaaacaauacaagcaaac

SEQ ID NO: 1189493 - RNA, 22 nt, Human
uuuagccccaccucccaggugc

SEQ ID NO: 1189494 - RNA, 18 nt, Human
uuucugcugcaagcaagg

SEQ ID NO: 1189495 - RNA, 20 nt, Human
acccucauacugaacucugg

SEQ ID NO: 1189496 - RNA, 21 nt, Human
acccucauacugaacucuggc

SEQ ID NO: 1189497 - RNA, 25 nt, Human
cacacacacgaccaguaccuuauac

SEQ ID NO: 1189498 - RNA, 23 nt, Human
ccagaaagaaccacuaacggggc

SEQ ID NO: 1189499 - RNA, 18 nt, Human
ccucaaagcuauccugga

SEQ ID NO: 1189500 - RNA, 22 nt, Human
ccucauacugaacucuggcuuc

SEQ ID NO: 1189501 - RNA, 24 nt, Human
ccucauacugaacucuggcuucau

SEQ ID NO: 1189502 - RNA, 23 nt, Human
ccugaccaggugucuuucucacc

SEQ ID NO: 1189503 - RNA, 24 nt, Human
cgcagcuuauccucaaagcuaucc

SEQ ID NO: 1189504 - RNA, 21 nt, Human
uccacuaacacacacacgacc

SEQ ID NO: 1189505 - RNA, 21 nt, Human
uccagaaagaaccacuauuac

SEQ ID NO: 1189506 - RNA, 22 nt, Human
uccagaaagaaccacuauuacc

SEQ ID NO: 1189507 - RNA, 19 nt, Human
ucgcaugaagacaauaucg

SEQ ID NO: 1189508 - RNA, 22 nt, Human
ucucacccacugguuucaacaa

SEQ ID NO: 1189509 - RNA, 18 nt, Human
ucuuuagucugacaccau

SEQ ID NO: 1189510 - RNA, 18 nt, Human
ugacaccaugggcgagcc

SEQ ID NO: 1189511 - RNA, 22 nt, Human
ugucugugugacucccugucug

SEQ ID NO: 1189512 - RNA, 21 nt, Human
uugaucuucaaauucuacgug

SEQ ID NO: 1189513 - RNA, 22 nt, Human
uugucuuuagucugacaccaug

SEQ ID NO: 1189514 - RNA, 26 nt, Human
aggagaccauuuuggagccacgggug

SEQ ID NO: 1189515 - RNA, 18 nt, Human
cacggaccaggagaccau

SEQ ID NO: 1189516 - RNA, 26 nt, Human
cacggaccaggagaccauuuuggagc

SEQ ID NO: 1189517 - RNA, 21 nt, Human
ccuguguccccaguccagagc

SEQ ID NO: 1189518 - RNA, 21 nt, Human
cucagccucugccuugggggc

SEQ ID NO: 1189519 - RNA, 22 nt, Human
cucgcaucauauuuccuggauc

SEQ ID NO: 1189520 - RNA, 22 nt, Human
cucuggcucagcuuccaccccc

SEQ ID NO: 1189521 - RNA, 22 nt, Human
cugucucuggcucagcuuccac

SEQ ID NO: 1189522 - RNA, 22 nt, Human
cuuccacccccagcuggggcuc

SEQ ID NO: 1189523 - RNA, 25 nt, Human
cuucugauucucagccucugccuug

SEQ ID NO: 1189524 - RNA, 21 nt, Human
gcuuccacccccagcuggggc

SEQ ID NO: 1189525 - RNA, 19 nt, Human
ucaucuuccucgcaucaua

SEQ ID NO: 1189526 - RNA, 18 nt, Human
uccucucaucuuccucgc

SEQ ID NO: 1189527 - RNA, 19 nt, Human
uggcucagcuuccaccccc

SEQ ID NO: 1189528 - RNA, 25 nt, Human
uggcucagcuuccacccccagcugg

SEQ ID NO: 1189529 - RNA, 19 nt, Human
ugugcccagaugcuugaac

SEQ ID NO: 1189530 - RNA, 22 nt, Human
uguuccucugugacugucucug

SEQ ID NO: 1189531 - RNA, 22 nt, Human
uguuuuguccuucagauuugua

SEQ ID NO: 1189532 - RNA, 24 nt, Human
aaguguucaacacagcaacaauuc

SEQ ID NO: 1189533 - RNA, 23 nt, Human
agacaccacagugugucucuaac

SEQ ID NO: 1189534 - RNA, 20 nt, Human
agggcucgccugugcuuccu

SEQ ID NO: 1189535 - RNA, 19 nt, Human
caacacagaggcgauggga

SEQ ID NO: 1189536 - RNA, 20 nt, Human
cacaaccacuacuccuucug

SEQ ID NO: 1189537 - RNA, 19 nt, Human
cacagcaacaauucucuuu

SEQ ID NO: 1189538 - RNA, 18 nt, Human
caccucugcuucuaagaa

SEQ ID NO: 1189539 - RNA, 21 nt, Human
caccucugcuucuaagaaaaa

SEQ ID NO: 1189540 - RNA, 26 nt, Human
cacgcagagccacucagacaccaccg

SEQ ID NO: 1189541 - RNA, 22 nt, Human
cagugacauuguggggugacac

SEQ ID NO: 1189542 - RNA, 18 nt, Human
cauuccauggcaguggau

SEQ ID NO: 1189543 - RNA, 20 nt, Human
ccaguggagacucuaacguc

SEQ ID NO: 1189544 - RNA, 21 nt, Human
ccuucuguuuucucucucuca

SEQ ID NO: 1189545 - RNA, 19 nt, Human
cucaguggcuccaccucug

SEQ ID NO: 1189546 - RNA, 27 nt, Human
cucugcuucuaagaaaaaucacucauu

SEQ ID NO: 1189547 - RNA, 18 nt, Human
cuucacgcagagccacuc

SEQ ID NO: 1189548 - RNA, 22 nt, Human
gaaaaaucacucauuccauggc

SEQ ID NO: 1189549 - RNA, 20 nt, Human
gcagagccacucagacacca

SEQ ID NO: 1189550 - RNA, 19 nt, Human
gggaccagugagcacgugc

SEQ ID NO: 1189551 - RNA, 20 nt, Human
uaaguagacgggagcaagug

SEQ ID NO: 1189552 - RNA, 26 nt, Human
ucacgcagagccacucagacaccaca

SEQ ID NO: 1189553 - RNA, 24 nt, Human
ugccucucaccuagaaaacggucc

SEQ ID NO: 1189554 - RNA, 21 nt, Human
ugcuggggagggcucgccugu

SEQ ID NO: 1189555 - RNA, 22 nt, Human
aaggggcugugcagccaggagg

SEQ ID NO: 1189556 - RNA, 19 nt, Human
acgaagaccaugaagcacc

SEQ ID NO: 1189557 - RNA, 21 nt, Human
aggggcugugcagccaggagg

SEQ ID NO: 1189558 - RNA, 22 nt, Human
caagggguccugggugagaccu

SEQ ID NO: 1189559 - RNA, 24 nt, Human
caagggguccugggugagaccucg

SEQ ID NO: 1189560 - RNA, 20 nt, Human
cacacggccaugggcagucc

SEQ ID NO: 1189561 - RNA, 19 nt, Human
cacauguccacgaagacca

SEQ ID NO: 1189562 - RNA, 19 nt, Human
cacgcagaaggggcugugc

SEQ ID NO: 1189563 - RNA, 21 nt, Human
cacggccaugggcaguccacc

SEQ ID NO: 1189564 - RNA, 20 nt, Human
cagccaggagggccccccuc

SEQ ID NO: 1189565 - RNA, 19 nt, Human
cagcgugagauaagaucuc

SEQ ID NO: 1189566 - RNA, 21 nt, Human
caggccgggacgauacaucaa

SEQ ID NO: 1189567 - RNA, 24 nt, Human
ccaucauuugggccccccagacac

SEQ ID NO: 1189568 - RNA, 21 nt, Human
cccaugguggccacccucccu

SEQ ID NO: 1189569 - RNA, 20 nt, Human
cccuccggaauugcuccugg

SEQ ID NO: 1189570 - RNA, 20 nt, Human
ccugggugagaccucggccc

SEQ ID NO: 1189571 - RNA, 22 nt, Human
cucuguguccaggggccuccca

SEQ ID NO: 1189572 - RNA, 18 nt, Human
cuggaggacagcgugaga

SEQ ID NO: 1189573 - RNA, 22 nt, Human
gagcagagcaagggguccuggg

SEQ ID NO: 1189574 - RNA, 21 nt, Human
gcccaugguggccacccuccc

SEQ ID NO: 1189575 - RNA, 23 nt, Human
gggccagggcacgcagaaggggc

SEQ ID NO: 1189576 - RNA, 21 nt, Human
gggcugugcagccaggagggc

SEQ ID NO: 1189577 - RNA, 22 nt, Human
ggguccugggugagaccucggc

SEQ ID NO: 1189578 - RNA, 20 nt, Human
ugaacacaggcaucugcgcc

SEQ ID NO: 1189579 - RNA, 24 nt, Human
ugagauaagaucucagcauauacc

SEQ ID NO: 1189580 - RNA, 23 nt, Human
ugcaaggcugaggagcagagcaa

SEQ ID NO: 1189581 - RNA, 24 nt, Human
aaagugcugugauuacaggcguga

SEQ ID NO: 1189582 - RNA, 20 nt, Human
aagacaaaaaaugaagacag

SEQ ID NO: 1189583 - RNA, 24 nt, Human
aagugaucccccugccuuggccuc

SEQ ID NO: 1189584 - RNA, 25 nt, Human
aagugaucccccugccuuggccucc

SEQ ID NO: 1189585 - RNA, 18 nt, Human
aaugacaggugugagcca

SEQ ID NO: 1189586 - RNA, 23 nt, Human
acaggugugagccaccacgccca

SEQ ID NO: 1189587 - RNA, 20 nt, Human
accggccuaugaaccacuuu

SEQ ID NO: 1189588 - RNA, 24 nt, Human
accuugagaucugcccaccuuggc

SEQ ID NO: 1189589 - RNA, 18 nt, Human
acgggguuucacuguguu

SEQ ID NO: 1189590 - RNA, 19 nt, Human
acgggguuucacuguguua

SEQ ID NO: 1189591 - RNA, 20 nt, Human
acgggguuucacuguguuag

SEQ ID NO: 1189592 - RNA, 24 nt, Human
acgggguuucacuguguuagccag

SEQ ID NO: 1189593 - RNA, 25 nt, Human
acuauguugcccaggcuggucucaa

SEQ ID NO: 1189594 - RNA, 18 nt, Human
acucagccugggggacug

SEQ ID NO: 1189595 - RNA, 22 nt, Human
agacaaaaaaugaagacaggca

SEQ ID NO: 1189596 - RNA, 23 nt, Human
agcuggagucaggggacugcagg

SEQ ID NO: 1189597 - RNA, 18 nt, Human
aggcaucaagaugcuauu

SEQ ID NO: 1189598 - RNA, 20 nt, Human
aggcgugagccaccaugacc

SEQ ID NO: 1189599 - RNA, 25 nt, Human
agggaggacacgggaaacccacagc

SEQ ID NO: 1189600 - RNA, 24 nt, Human
aggggccucacuauguugcccagg

SEQ ID NO: 1189601 - RNA, 25 nt, Human
agugaucccccugccuuggccuccc

SEQ ID NO: 1189602 - RNA, 19 nt, Human
aucucaauagcuaaacgug

SEQ ID NO: 1189603 - RNA, 24 nt, Human
caaagugcugugauuacaggcgug

SEQ ID NO: 1189604 - RNA, 22 nt, Human
caagugaucccccugccuuggc

SEQ ID NO: 1189605 - RNA, 21 nt, Human
caccugacccuguuuagcagc

SEQ ID NO: 1189606 - RNA, 19 nt, Human
cacuauguugcccaggcug

SEQ ID NO: 1189607 - RNA, 24 nt, Human
cacuauguugcccaggcuggucuc

SEQ ID NO: 1189608 - RNA, 18 nt, Human
cacuguguuagccaggau

SEQ ID NO: 1189609 - RNA, 19 nt, Human
cacuguguuagccaggaug

SEQ ID NO: 1189610 - RNA, 24 nt, Human
cacuguguuagccaggauggucuu

SEQ ID NO: 1189611 - RNA, 22 nt, Human
cacuuuugacucagccuggggg

SEQ ID NO: 1189612 - RNA, 19 nt, Human
cagcagaagcuucaaggcc

SEQ ID NO: 1189613 - RNA, 18 nt, Human
cagccaggucgcccaggc

SEQ ID NO: 1189614 - RNA, 20 nt, Human
ccaaagugcugugauuacag

SEQ ID NO: 1189615 - RNA, 22 nt, Human
ccaaagugcugugauuacaggc

SEQ ID NO: 1189616 - RNA, 24 nt, Human
ccaaagugcugugauuacaggcgu

SEQ ID NO: 1189617 - RNA, 19 nt, Human
ccaccagaugggccaggug

SEQ ID NO: 1189618 - RNA, 20 nt, Human
cccacagcaaggagcggggc

SEQ ID NO: 1189619 - RNA, 24 nt, Human
cccccugccuuggccucccaaagc

SEQ ID NO: 1189620 - RNA, 26 nt, Human
ccucacuauguugcccaggcuggucu

SEQ ID NO: 1189621 - RNA, 24 nt, Human
ccucccauggcacagccaccagau

SEQ ID NO: 1189622 - RNA, 21 nt, Human
ccugccuuggccucccaaagc

SEQ ID NO: 1189623 - RNA, 22 nt, Human
cggaaugacaggugugagccac

SEQ ID NO: 1189624 - RNA, 24 nt, Human
cgggguuucacuguguuagccagg

SEQ ID NO: 1189625 - RNA, 24 nt, Human
cgugagccaccaugaccggccuau

SEQ ID NO: 1189626 - RNA, 22 nt, Human
cuccugaccuugagaucugccc

SEQ ID NO: 1189627 - RNA, 25 nt, Human
cuccugaccuugagaucugcccacc

SEQ ID NO: 1189628 - RNA, 19 nt, Human
cugacccuguuuagcagca

SEQ ID NO: 1189629 - RNA, 19 nt, Human
cugucuucugggcacagcu

SEQ ID NO: 1189630 - RNA, 21 nt, Human
cuuaaaacuccugggcacaag

SEQ ID NO: 1189631 - RNA, 22 nt, Human
cuuaucucaauagcuaaacgug

SEQ ID NO: 1189632 - RNA, 18 nt, Human
gauuacaggcgugagcca

SEQ ID NO: 1189633 - RNA, 21 nt, Human
gauuacaggcgugagccacca

SEQ ID NO: 1189634 - RNA, 22 nt, Human
gauuacaggcgugagccaccau

SEQ ID NO: 1189635 - RNA, 23 nt, Human
gauuacaggcgugagccaccaug

SEQ ID NO: 1189636 - RNA, 20 nt, Human
gcuagucuuaaaacuccugg

SEQ ID NO: 1189637 - RNA, 18 nt, Human
gcuggagucaggggacug

SEQ ID NO: 1189638 - RNA, 22 nt, Human
gcuucaaggccuguuccuaauu

SEQ ID NO: 1189639 - RNA, 21 nt, Human
ggaaugacaggcgugaacuag

SEQ ID NO: 1189640 - RNA, 23 nt, Human
ggaaugacaggugugagccacca

SEQ ID NO: 1189641 - RNA, 18 nt, Human
ggagaggcagagagguga

SEQ ID NO: 1189642 - RNA, 24 nt, Human
ggauggucuugaucuccugaccuu

SEQ ID NO: 1189643 - RNA, 20 nt, Human
gggacugcagggcagggagg

SEQ ID NO: 1189644 - RNA, 20 nt, Human
gggcuguggcucugcuccuu

SEQ ID NO: 1189645 - RNA, 23 nt, Human
gggguuucacuguguuagccagg

SEQ ID NO: 1189646 - RNA, 18 nt, Human
gguagcagcgugggggca

SEQ ID NO: 1189647 - RNA, 23 nt, Human
guagagacgggguuucacugugu

SEQ ID NO: 1189648 - RNA, 21 nt, Human
gucgcccaggcuagucuuaaa

SEQ ID NO: 1189649 - RNA, 23 nt, Human
gugcacagugggaagcagggggu

SEQ ID NO: 1189650 - RNA, 20 nt, Human
gugggggcaagugcaggcac

SEQ ID NO: 1189651 - RNA, 22 nt, Human
uaaaacuccugggcacaagaga

SEQ ID NO: 1189652 - RNA, 23 nt, Human
uacaggcgugagccaccaugacc

SEQ ID NO: 1189653 - RNA, 20 nt, Human
uacccagagcaggguagcag

SEQ ID NO: 1189654 - RNA, 23 nt, Human
uagagacaggggccucacuaugu

SEQ ID NO: 1189655 - RNA, 20 nt, Human
uaguagagacgggguuucac

SEQ ID NO: 1189656 - RNA, 24 nt, Human
uaguagagacgggguuucacugug

SEQ ID NO: 1189657 - RNA, 23 nt, Human
uauguugcccaggcuggucucaa

SEQ ID NO: 1189658 - RNA, 24 nt, Human
uauguugcccaggcuggucucaaa

SEQ ID NO: 1189659 - RNA, 24 nt, Human
ucacuguguuagccaggauggucu

SEQ ID NO: 1189660 - RNA, 22 nt, Human
uccagagcuggagucaggggac

SEQ ID NO: 1189661 - RNA, 24 nt, Human
ucccaaagugcugugauuacaggc

SEQ ID NO: 1189662 - RNA, 20 nt, Human
ucccagcacgagccacaugg

SEQ ID NO: 1189663 - RNA, 21 nt, Human
ucccauggcacagccaccaga

SEQ ID NO: 1189664 - RNA, 19 nt, Human
ucccccugccuuggccucc

SEQ ID NO: 1189665 - RNA, 20 nt, Human
ucccuuaaaccacagaagcu

SEQ ID NO: 1189666 - RNA, 20 nt, Human
uccucccauggcacagccac

SEQ ID NO: 1189667 - RNA, 26 nt, Human
ucucugggcgggugcacagugggaag

SEQ ID NO: 1189668 - RNA, 20 nt, Human
ucuggagaggcagagaggug

SEQ ID NO: 1189669 - RNA, 23 nt, Human
ugaagacaggcaucaagaugcua

SEQ ID NO: 1189670 - RNA, 18 nt, Human
ugacucagccugggggac

SEQ ID NO: 1189671 - RNA, 22 nt, Human
ugagaucugcccaccuuggccu

SEQ ID NO: 1189672 - RNA, 26 nt, Human
ugaggccggaaugacaggugugagcc

SEQ ID NO: 1189673 - RNA, 24 nt, Human
ugauccauggacaugcgaccaccc

SEQ ID NO: 1189674 - RNA, 27 nt, Human
ugauccauggacaugcgaccacccucu

SEQ ID NO: 1189675 - RNA, 24 nt, Human
ugauuacaggcgugagccaccaug

SEQ ID NO: 1189676 - RNA, 20 nt, Human
ugcacagugggaagcagggg

SEQ ID NO: 1189677 - RNA, 21 nt, Human
ugcacagugggaagcaggggg

SEQ ID NO: 1189678 - RNA, 24 nt, Human
ugcccaggcuggucucaaacuucu

SEQ ID NO: 1189679 - RNA, 19 nt, Human
uggaaugacaggcgugaac

SEQ ID NO: 1189680 - RNA, 25 nt, Human
uggcaguggguucaccugacccugu

SEQ ID NO: 1189681 - RNA, 25 nt, Human
uguagagacaggggccucacuaugu

SEQ ID NO: 1189682 - RNA, 21 nt, Human
uguccuugguacccagagcag

SEQ ID NO: 1189683 - RNA, 18 nt, Human
ugugauuacaggcgugag

SEQ ID NO: 1189684 - RNA, 22 nt, Human
ugugauuacaggcgugagccac

SEQ ID NO: 1189685 - RNA, 23 nt, Human
ugugauuacaggcgugagccacc

SEQ ID NO: 1189686 - RNA, 24 nt, Human
ugugauuacaggcgugagccacca

SEQ ID NO: 1189687 - RNA, 23 nt, Human
uuaaaacagaagacaaaaaauga

SEQ ID NO: 1189688 - RNA, 18 nt, Human
uuaguagagacgggguuu

SEQ ID NO: 1189689 - RNA, 21 nt, Human
uuaguagagacgggguuucac

SEQ ID NO: 1189690 - RNA, 21 nt, Human
uuaguagagacgggguuucac

SEQ ID NO: 1189691 - RNA, 24 nt, Human
uuaguagagacgggguuucacugu

SEQ ID NO: 1189692 - RNA, 23 nt, Human
uucaccugacccuguuuagcagc

SEQ ID NO: 1189693 - RNA, 21 nt, Human
uucacuguguuagccaggaug

SEQ ID NO: 1189694 - RNA, 18 nt, Human
uuggccucccaaagugcu

SEQ ID NO: 1189695 - RNA, 19 nt, Human
uuucacuguguuagccagg

SEQ ID NO: 1189696 - RNA, 25 nt, Human
uuuguagagacaggggccucacuau

SEQ ID NO: 1189697 - RNA, 24 nt, Human
uuuuuaguagagacgggguuucac

SEQ ID NO: 1189698 - RNA, 23 nt, Human
uuuuuuaguagagacgggguuuc

SEQ ID NO: 1189699 - RNA, 19 nt, Human
aaacagucacugagugaag

SEQ ID NO: 1189700 - RNA, 24 nt, Human
aaagugcugggauuacaggcauga

SEQ ID NO: 1189701 - RNA, 19 nt, Human
aaaguguuaggauuacagg

SEQ ID NO: 1189702 - RNA, 18 nt, Human
aaggacccugccaggccc

SEQ ID NO: 1189703 - RNA, 19 nt, Human
aagugcugggauuacaggc

SEQ ID NO: 1189704 - RNA, 21 nt, Human
aagugcugggauuacaggcau

SEQ ID NO: 1189705 - RNA, 26 nt, Human
aaguguuaggauuacaggccugagcc

SEQ ID NO: 1189706 - RNA, 24 nt, Human
aaugcaguuugccuuuucuuuuuu

SEQ ID NO: 1189707 - RNA, 19 nt, Human
acacccaccucccaggcac

SEQ ID NO: 1189708 - RNA, 21 nt, Human
accacagauauugcugugcca

SEQ ID NO: 1189709 - RNA, 19 nt, Human
accacccccacacccaccu

SEQ ID NO: 1189710 - RNA, 23 nt, Human
accacccccacacccaccuccca

SEQ ID NO: 1189711 - RNA, 21 nt, Human
accuggacuucaucaccacua

SEQ ID NO: 1189712 - RNA, 24 nt, Human
accuugugauccgcccgccuuggc

SEQ ID NO: 1189713 - RNA, 18 nt, Human
acgggguuucaccguguu

SEQ ID NO: 1189714 - RNA, 19 nt, Human
acgggguuucaccguguua

SEQ ID NO: 1189715 - RNA, 20 nt, Human
acgggguuucaccguguuag

SEQ ID NO: 1189716 - RNA, 24 nt, Human
acgggguuucaccguguuagccag

SEQ ID NO: 1189717 - RNA, 20 nt, Human
acugcaagcuccgccucccg

SEQ ID NO: 1189718 - RNA, 25 nt, Human
acuggcuccuuggagggcugcauac

SEQ ID NO: 1189719 - RNA, 25 nt, Human
agacaccacagauauugcugugcca

SEQ ID NO: 1189720 - RNA, 19 nt, Human
agagacgggguuucaccgu

SEQ ID NO: 1189721 - RNA, 22 nt, Human
agcaggcacaggagccuuaugc

SEQ ID NO: 1189722 - RNA, 19 nt, Human
aggagauucugcacagugc

SEQ ID NO: 1189723 - RNA, 19 nt, Human
aggcacccuccuuccagaa

SEQ ID NO: 1189724 - RNA, 23 nt, Human
aggccugagccaccgugcccggc

SEQ ID NO: 1189725 - RNA, 25 nt, Human
aggcuggagugcaguggcgcgaucu

SEQ ID NO: 1189726 - RNA, 20 nt, Human
aguaaacaguaguacaaugg

SEQ ID NO: 1189727 - RNA, 20 nt, Human
aguagagacgggguuucacc

SEQ ID NO: 1189728 - RNA, 18 nt, Human
aguagcugggacuacagg

SEQ ID NO: 1189729 - RNA, 19 nt, Human
aguagcugggacuacaggc

SEQ ID NO: 1189730 - RNA, 20 nt, Human
agugcaguggcgcgaucucg

SEQ ID NO: 1189731 - RNA, 23 nt, Human
agugcaguggcgcgaucucggcu

SEQ ID NO: 1189732 - RNA, 24 nt, Human
agugcaguggcgcgaucucggcuc

SEQ ID NO: 1189733 - RNA, 18 nt, Human
agugcugggauuacaggc

SEQ ID NO: 1189734 - RNA, 29 nt, Human
aguuugccuuuucuuuuuuuuuuuuuuuu

SEQ ID NO: 1189735 - RNA, 19 nt, Human
aucauucuccugccucggc

SEQ ID NO: 1189736 - RNA, 19 nt, Human
auccgcccgccuuggccuc

SEQ ID NO: 1189737 - RNA, 19 nt, Human
augcaucacaaugaaaaag

SEQ ID NO: 1189738 - RNA, 24 nt, Human
auuuuuguauuuuuaguagagaug

SEQ ID NO: 1189739 - RNA, 19 nt, Human
caaaacagucacugaguga

SEQ ID NO: 1189740 - RNA, 24 nt, Human
caaagugcugggauuacaggcaug

SEQ ID NO: 1189741 - RNA, 18 nt, Human
caaaguguuaggauuaca

SEQ ID NO: 1189742 - RNA, 21 nt, Human
caaggcagccaagccacagcc

SEQ ID NO: 1189743 - RNA, 20 nt, Human
caagugauucuucugccuca

SEQ ID NO: 1189744 - RNA, 22 nt, Human
caagugauucuucugccucagc

SEQ ID NO: 1189745 - RNA, 21 nt, Human
cacaccuggcuaauuuuugua

SEQ ID NO: 1189746 - RNA, 19 nt, Human
caccacagauauugcugug

SEQ ID NO: 1189747 - RNA, 22 nt, Human
caccacagauauugcugugcca

SEQ ID NO: 1189748 - RNA, 19 nt, Human
caccacccccacacccacc

SEQ ID NO: 1189749 - RNA, 24 nt, Human
caccaggcuggcuaauuuuuugua

SEQ ID NO: 1189750 - RNA, 23 nt, Human
cacccaccacccccacacccacc

SEQ ID NO: 1189751 - RNA, 25 nt, Human
cacccaccacccccacacccaccuc

SEQ ID NO: 1189752 - RNA, 20 nt, Human
cacccuccuuccagaauuca

SEQ ID NO: 1189753 - RNA, 24 nt, Human
cacccuccuuccagaauucaccuc

SEQ ID NO: 1189754 - RNA, 18 nt, Human
caccguguuagccaggau

SEQ ID NO: 1189755 - RNA, 24 nt, Human
caccguguuagccaggauggucuc

SEQ ID NO: 1189756 - RNA, 24 nt, Human
caccuggacuucaucaccacuaga

SEQ ID NO: 1189757 - RNA, 23 nt, Human
caccugucucggccucccaaagu

SEQ ID NO: 1189758 - RNA, 24 nt, Human
caccugucucggccucccaaagug

SEQ ID NO: 1189759 - RNA, 21 nt, Human
cacugcaaccuccgccuccug

SEQ ID NO: 1189760 - RNA, 23 nt, Human
cacugcaaccuccgccuccuggg

SEQ ID NO: 1189761 - RNA, 23 nt, Human
cacuggcagggaaaacaccagug

SEQ ID NO: 1189762 - RNA, 18 nt, Human
cagagaccucagccccuc

SEQ ID NO: 1189763 - RNA, 22 nt, Human
cagcauccaaccagacuuccag

SEQ ID NO: 1189764 - RNA, 24 nt, Human
cagcauguuggcuaggcuggucuc

SEQ ID NO: 1189765 - RNA, 20 nt, Human
cagccuccugaguagcuggg

SEQ ID NO: 1189766 - RNA, 22 nt, Human
cagcgcugccugccuaucucaa

SEQ ID NO: 1189767 - RNA, 19 nt, Human
cagcgugccagcugggccc

SEQ ID NO: 1189768 - RNA, 22 nt, Human
cagcugggagcagggauggcac

SEQ ID NO: 1189769 - RNA, 18 nt, Human
cagcuucaauucucugaa

SEQ ID NO: 1189770 - RNA, 22 nt, Human
caggauggucuccaucuccuga

SEQ ID NO: 1189771 - RNA, 23 nt, Human
caggcacccuccuuccagaauuc

SEQ ID NO: 1189772 - RNA, 19 nt, Human
cagucccggguucucuccu

SEQ ID NO: 1189773 - RNA, 22 nt, Human
cagucccggguucucuccuccu

SEQ ID NO: 1189774 - RNA, 22 nt, Human
cauaguaaugcaguuugccuuu

SEQ ID NO: 1189775 - RNA, 21 nt, Human
caucaccuggggccaguccaa

SEQ ID NO: 1189776 - RNA, 18 nt, Human
cauguuggcuaggcuggu

SEQ ID NO: 1189777 - RNA, 23 nt, Human
ccaaagugcugggauuacaggca

SEQ ID NO: 1189778 - RNA, 24 nt, Human
ccaaagugcugggauuacaggcau

SEQ ID NO: 1189779 - RNA, 19 nt, Human
ccaaaguguuaggauuaca

SEQ ID NO: 1189780 - RNA, 19 nt, Human
ccacacccaccucccaggc

SEQ ID NO: 1189781 - RNA, 27 nt, Human
ccaccacccccacacccaccucccagg

SEQ ID NO: 1189782 - RNA, 26 nt, Human
ccaccaggcuggcuaauuuuuuguau

SEQ ID NO: 1189783 - RNA, 18 nt, Human
ccaccgugcccggccgca

SEQ ID NO: 1189784 - RNA, 23 nt, Human
ccaccuagcagcccuccagggcc

SEQ ID NO: 1189785 - RNA, 22 nt, Human
ccaggcugaacagcuucaauuc

SEQ ID NO: 1189786 - RNA, 24 nt, Human
cccaaagugcugggauuacaggca

SEQ ID NO: 1189787 - RNA, 21 nt, Human
cccacacccaccucccaggca

SEQ ID NO: 1189788 - RNA, 25 nt, Human
cccacacccaccucccaggcacccu

SEQ ID NO: 1189789 - RNA, 19 nt, Human
cccacacccuagccuggcc

SEQ ID NO: 1189790 - RNA, 23 nt, Human
cccaccacccccacacccaccuc

SEQ ID NO: 1189791 - RNA, 24 nt, Human
cccaccacccccacacccaccucc

SEQ ID NO: 1189792 - RNA, 22 nt, Human
cccagagaccucagccccucau

SEQ ID NO: 1189793 - RNA, 20 nt, Human
cccaggcuggagugcaguga

SEQ ID NO: 1189794 - RNA, 24 nt, Human
cccaugcaucacaaugaaaaagca

SEQ ID NO: 1189795 - RNA, 20 nt, Human
ccccaagccucagccgcaga

SEQ ID NO: 1189796 - RNA, 23 nt, Human
ccccaagccucagccgcagaauc

SEQ ID NO: 1189797 - RNA, 27 nt, Human
ccccacacccuagccuggccagcaggc

SEQ ID NO: 1189798 - RNA, 20 nt, Human
ccccagagaccucagccccu

SEQ ID NO: 1189799 - RNA, 20 nt, Human
ccccagagaccucagccccu

SEQ ID NO: 1189800 - RNA, 22 nt, Human
cccccacacccaccucccaggc

SEQ ID NO: 1189801 - RNA, 22 nt, Human
cccgccuuggccucccaaagug

SEQ ID NO: 1189802 - RNA, 20 nt, Human
cccggguucccaucauucuc

SEQ ID NO: 1189803 - RNA, 24 nt, Human
ccgccuccuggguucaagugauuc

SEQ ID NO: 1189804 - RNA, 20 nt, Human
ccggcugauggagcagcgcu

SEQ ID NO: 1189805 - RNA, 18 nt, Human
ccggguucucuccuccuc

SEQ ID NO: 1189806 - RNA, 18 nt, Human
ccgugugaucagcagggu

SEQ ID NO: 1189807 - RNA, 20 nt, Human
ccuaagugugagaaacgagg

SEQ ID NO: 1189808 - RNA, 18 nt, Human
ccucacccacuagacgcg

SEQ ID NO: 1189809 - RNA, 21 nt, Human
ccucccaggcacccuccuucc

SEQ ID NO: 1189810 - RNA, 24 nt, Human
ccucccaggcacccuccuuccaga

SEQ ID NO: 1189811 - RNA, 18 nt, Human
ccucccagucccggguuc

SEQ ID NO: 1189812 - RNA, 20 nt, Human
ccucccagucccggguucuc

SEQ ID NO: 1189813 - RNA, 22 nt, Human
ccucccagucccggguucucuc

SEQ ID NO: 1189814 - RNA, 24 nt, Human
ccucccggguucccaucauucucc

SEQ ID NO: 1189815 - RNA, 22 nt, Human
ccuccgccuccuggguucaagu

SEQ ID NO: 1189816 - RNA, 21 nt, Human
ccuccuggguucaagugauuc

SEQ ID NO: 1189817 - RNA, 19 nt, Human
ccucuggcugugggguggc

SEQ ID NO: 1189818 - RNA, 19 nt, Human
ccugaccucgugauccacc

SEQ ID NO: 1189819 - RNA, 21 nt, Human
ccugaccucgugauccaccug

SEQ ID NO: 1189820 - RNA, 23 nt, Human
ccugaguagcugggauuacacgu

SEQ ID NO: 1189821 - RNA, 23 nt, Human
ccugccucggccuucugaguagc

SEQ ID NO: 1189822 - RNA, 24 nt, Human
ccugccucggccuucugaguagcu

SEQ ID NO: 1189823 - RNA, 23 nt, Human
ccuggguucaagugauucuucug

SEQ ID NO: 1189824 - RNA, 24 nt, Human
cgcccaggcuggagugcaguggcg

SEQ ID NO: 1189825 - RNA, 24 nt, Human
cgcuaggaaaaggccccaagccuc

SEQ ID NO: 1189826 - RNA, 24 nt, Human
cgcucugucgcccaggcuggagug

SEQ ID NO: 1189827 - RNA, 22 nt, Human
cgugcuucaggcuucacugcug

SEQ ID NO: 1189828 - RNA, 23 nt, Human
cuaauuuuuguauuuuuaguaga

SEQ ID NO: 1189829 - RNA, 24 nt, Human
cucacugcaaccuccgccuccugg

SEQ ID NO: 1189830 - RNA, 24 nt, Human
cucagccuccugaguagcugggau

SEQ ID NO: 1189831 - RNA, 21 nt, Human
cucccggguucccaucauucu

SEQ ID NO: 1189832 - RNA, 24 nt, Human
cuccugaccucgugauccaccugu

SEQ ID NO: 1189833 - RNA, 24 nt, Human
cuccugaccuugugauccgcccgc

SEQ ID NO: 1189834 - RNA, 21 nt, Human
cuccuggguucaagugauucu

SEQ ID NO: 1189835 - RNA, 24 nt, Human
cucgcucugucgcccaggcuggag

SEQ ID NO: 1189836 - RNA, 24 nt, Human
cucggccuucugaguagcugggac

SEQ ID NO: 1189837 - RNA, 23 nt, Human
cucugucgcccaggcuggagugc

SEQ ID NO: 1189838 - RNA, 23 nt, Human
cucuguugcccaggcuggagugc

SEQ ID NO: 1189839 - RNA, 23 nt, Human
cugcaaccuccgccuccuggguu

SEQ ID NO: 1189840 - RNA, 24 nt, Human
cugcaaccuccgccuccuggguuc

SEQ ID NO: 1189841 - RNA, 23 nt, Human
cugccucagccuccugaguagcu

SEQ ID NO: 1189842 - RNA, 21 nt, Human
cugcucagaaccaccuagcag

SEQ ID NO: 1189843 - RNA, 18 nt, Human
cuggcuaauuuuuuguau

SEQ ID NO: 1189844 - RNA, 23 nt, Human
cugucucggccucccaaagugcu

SEQ ID NO: 1189845 - RNA, 21 nt, Human
cugugggguggcaggucugag

SEQ ID NO: 1189846 - RNA, 19 nt, Human
cuguugcccaggcuggagu

SEQ ID NO: 1189847 - RNA, 23 nt, Human
cuuaaaauuguuucugauagccc

SEQ ID NO: 1189848 - RNA, 22 nt, Human
gaccauaguaaugcaguuugcc

SEQ ID NO: 1189849 - RNA, 22 nt, Human
gaccucgugauccaccugucuc

SEQ ID NO: 1189850 - RNA, 22 nt, Human
gaccucgugauccaccugucuc

SEQ ID NO: 1189851 - RNA, 24 nt, Human
gaccucgugauccaccugucucgg

SEQ ID NO: 1189852 - RNA, 21 nt, Human
gaccuugugauccgcccgccu

SEQ ID NO: 1189853 - RNA, 24 nt, Human
gaccuugugauccgcccgccuugg

SEQ ID NO: 1189854 - RNA, 24 nt, Human
gagacgggguuucaccguguuagc

SEQ ID NO: 1189855 - RNA, 25 nt, Human
gaguagcugggacuacaggcagccc

SEQ ID NO: 1189856 - RNA, 24 nt, Human
gaguagcugggauuacacgugugc

SEQ ID NO: 1189857 - RNA, 22 nt, Human
gauggcacggugcuaggaacau

SEQ ID NO: 1189858 - RNA, 18 nt, Human
gauuacaggcaugaguca

SEQ ID NO: 1189859 - RNA, 20 nt, Human
gauuacaggcaugagucacc

SEQ ID NO: 1189860 - RNA, 22 nt, Human
gauuacaggcaugagucaccgc

SEQ ID NO: 1189861 - RNA, 18 nt, Human
gauuacaggccugagcca

SEQ ID NO: 1189862 - RNA, 21 nt, Human
gauuacaggccugagccaccg

SEQ ID NO: 1189863 - RNA, 24 nt, Human
gauuacaggccugagccaccgugc

SEQ ID NO: 1189864 - RNA, 21 nt, Human
gauucuucugccucagccucc

SEQ ID NO: 1189865 - RNA, 20 nt, Human
gcaaacucagcucacugcaa

SEQ ID NO: 1189866 - RNA, 21 nt, Human
gcacagcgugccagcugggcc

SEQ ID NO: 1189867 - RNA, 19 nt, Human
gcccaggcuggagugcagu

SEQ ID NO: 1189868 - RNA, 20 nt, Human
gcccaggcuggagugcagug

SEQ ID NO: 1189869 - RNA, 18 nt, Human
gccuccuccaagccucag

SEQ ID NO: 1189870 - RNA, 21 nt, Human
gccucggccuucugaguagcu

SEQ ID NO: 1189871 - RNA, 19 nt, Human
gcuggagugcaguggcgcg

SEQ ID NO: 1189872 - RNA, 21 nt, Human
gcuugaagucacccaccaccc

SEQ ID NO: 1189873 - RNA, 20 nt, Human
gcuugacuuccugaaagcag

SEQ ID NO: 1189874 - RNA, 20 nt, Human
ggaaaaggccccaagccuca

SEQ ID NO: 1189875 - RNA, 23 nt, Human
ggacccugccaggccucuccuag

SEQ ID NO: 1189876 - RNA, 22 nt, Human
ggacuuaaaauuguuucugaua

SEQ ID NO: 1189877 - RNA, 19 nt, Human
ggaguuucagcauguuggc

SEQ ID NO: 1189878 - RNA, 24 nt, Human
ggauggucuccaucuccugaccuc

SEQ ID NO: 1189879 - RNA, 22 nt, Human
ggauuacaggcaugagucaccg

SEQ ID NO: 1189880 - RNA, 22 nt, Human
ggauuacaggccugagccaccg

SEQ ID NO: 1189881 - RNA, 22 nt, Human
ggccgcuaggaaaaggccccaa

SEQ ID NO: 1189882 - RNA, 23 nt, Human
ggcuggucucaaacuccugaccu

SEQ ID NO: 1189883 - RNA, 20 nt, Human
gggcugcauaccccccacuc

SEQ ID NO: 1189884 - RNA, 23 nt, Human
gggguuucaccguguuagccagg

SEQ ID NO: 1189885 - RNA, 22 nt, Human
ggguuucaccguguuagccagg

SEQ ID NO: 1189886 - RNA, 20 nt, Human
ggucucaaacuccugaccuu

SEQ ID NO: 1189887 - RNA, 23 nt, Human
guagagacgggguuucaccgugu

SEQ ID NO: 1189888 - RNA, 19 nt, Human
guaggccuccuccaagccu

SEQ ID NO: 1189889 - RNA, 22 nt, Human
guaggccuccuccaagccucag

SEQ ID NO: 1189890 - RNA, 24 nt, Human
guccagaggucuagggagaauuug

SEQ ID NO: 1189891 - RNA, 26 nt, Human
guccagaggucuagggagaauuuggg

SEQ ID NO: 1189892 - RNA, 24 nt, Human
gugauccaccugucucggccuccc

SEQ ID NO: 1189893 - RNA, 23 nt, Human
gugaugcaaacucagcucacugc

SEQ ID NO: 1189894 - RNA, 23 nt, Human
gugauucuucugccucagccucc

SEQ ID NO: 1189895 - RNA, 21 nt, Human
uaagguccccacacccuagcc

SEQ ID NO: 1189896 - RNA, 24 nt, Human
uaauuuuuguauuuuuaguagaga

SEQ ID NO: 1189897 - RNA, 24 nt, Human
uaauuuuuuguauuuuuaguagag

SEQ ID NO: 1189898 - RNA, 24 nt, Human
uacaggcaugagucaccgcgccca

SEQ ID NO: 1189899 - RNA, 23 nt, Human
uacaggccugagccaccgugccc

SEQ ID NO: 1189900 - RNA, 22 nt, Human
uagacaccacagauauugcugu

SEQ ID NO: 1189901 - RNA, 24 nt, Human
uagccaggauggucuccaucuccu

SEQ ID NO: 1189902 - RNA, 27 nt, Human
uagccuggccagcaggcacaggagccc

SEQ ID NO: 1189903 - RNA, 21 nt, Human
uagcugaccccagcauccaac

SEQ ID NO: 1189904 - RNA, 19 nt, Human
uaggauuacaggccugagc

SEQ ID NO: 1189905 - RNA, 21 nt, Human
uaggauuacaggccugagcca

SEQ ID NO: 1189906 - RNA, 22 nt, Human
uaggauuacaggccugagccac

SEQ ID NO: 1189907 - RNA, 23 nt, Human
uaggauuacaggccugagccacc

SEQ ID NO: 1189908 - RNA, 24 nt, Human
uaggauuacaggccugagccaccg

SEQ ID NO: 1189909 - RNA, 21 nt, Human
uaguagagacgggguuucacc

SEQ ID NO: 1189910 - RNA, 24 nt, Human
uaguagagacgggguuucaccgug

SEQ ID NO: 1189911 - RNA, 26 nt, Human
uaguagagacgggguuucaccguguu

SEQ ID NO: 1189912 - RNA, 26 nt, Human
uaguagagacgggguuucaccguugg

SEQ ID NO: 1189913 - RNA, 24 nt, Human
uaguagagauggaguuucagcaug

SEQ ID NO: 1189914 - RNA, 19 nt, Human
ucaagugauucuucugccu

SEQ ID NO: 1189915 - RNA, 23 nt, Human
ucacccaccacccccacacccac

SEQ ID NO: 1189916 - RNA, 24 nt, Human
ucaccguguuagccaggauggucu

SEQ ID NO: 1189917 - RNA, 23 nt, Human
ucacugcaaccuccgccuccugg

SEQ ID NO: 1189918 - RNA, 24 nt, Human
ucacugcaaccuccgccuccuggg

SEQ ID NO: 1189919 - RNA, 25 nt, Human
ucacugcaaccuccgccuccugggu

SEQ ID NO: 1189920 - RNA, 27 nt, Human
ucacugcaaccuccgccuccuggguuc

SEQ ID NO: 1189921 - RNA, 18 nt, Human
ucacugcaagcuccgccu

SEQ ID NO: 1189922 - RNA, 19 nt, Human
ucacugcaagcuccgccuc

SEQ ID NO: 1189923 - RNA, 24 nt, Human
ucacugcaagcuccgccucccggg

SEQ ID NO: 1189924 - RNA, 22 nt, Human
ucacugcugcugcacagcgugc

SEQ ID NO: 1189925 - RNA, 22 nt, Human
ucagccucacccacuagacgcg

SEQ ID NO: 1189926 - RNA, 20 nt, Human
ucagccuccugaguagcugg

SEQ ID NO: 1189927 - RNA, 19 nt, Human
ucagcugggagcagggaug

SEQ ID NO: 1189928 - RNA, 21 nt, Human
uccaggacucuggggccccga

SEQ ID NO: 1189929 - RNA, 25 nt, Human
uccagggccgcuaggaaaaggcccc

SEQ ID NO: 1189930 - RNA, 22 nt, Human
uccagggugauauugcgccuca

SEQ ID NO: 1189931 - RNA, 24 nt, Human
ucccaaagugcugggauuacaggc

SEQ ID NO: 1189932 - RNA, 24 nt, Human
ucccaaaguguuaggauuacaggc

SEQ ID NO: 1189933 - RNA, 22 nt, Human
ucccaggcacccuccuuccaga

SEQ ID NO: 1189934 - RNA, 21 nt, Human
ucccggguucccaucauucuc

SEQ ID NO: 1189935 - RNA, 24 nt, Human
ucccggguucccaucauucuccug

SEQ ID NO: 1189936 - RNA, 21 nt, Human
ucccucuggucuuuggaggcu

SEQ ID NO: 1189937 - RNA, 23 nt, Human
uccucuggguucuaucacacagg

SEQ ID NO: 1189938 - RNA, 18 nt, Human
uccugaguagcugggauu

SEQ ID NO: 1189939 - RNA, 21 nt, Human
uccuggguucaagugauucuu

SEQ ID NO: 1189940 - RNA, 24 nt, Human
uccuggguucaagugauucuucug

SEQ ID NO: 1189941 - RNA, 26 nt, Human
uccuuugggcagaugaagcuuccagu

SEQ ID NO: 1189942 - RNA, 24 nt, Human
ucgcccaggcuggagugcaguggc

SEQ ID NO: 1189943 - RNA, 24 nt, Human
ucgcucugucgcccaggcuggagu

SEQ ID NO: 1189944 - RNA, 23 nt, Human
ucggccuucugaguagcugggac

SEQ ID NO: 1189945 - RNA, 19 nt, Human
ucucgcucugucgcccagg

SEQ ID NO: 1189946 - RNA, 23 nt, Human
ucucgcucugucgcccaggcugg

SEQ ID NO: 1189947 - RNA, 24 nt, Human
ucucgcucugucgcccaggcugga

SEQ ID NO: 1189948 - RNA, 26 nt, Human
ucucgcucugucgcccaggcuggagu

SEQ ID NO: 1189949 - RNA, 27 nt, Human
ucucgcucugucgcccaggcuggagug

SEQ ID NO: 1189950 - RNA, 20 nt, Human
ucucggccucccaaagugcu

SEQ ID NO: 1189951 - RNA, 23 nt, Human
ucugaguagcugggacuacaggc

SEQ ID NO: 1189952 - RNA, 24 nt, Human
ucugaguagcugggacuacaggca

SEQ ID NO: 1189953 - RNA, 22 nt, Human
ucugcacagugcacuuccagga

SEQ ID NO: 1189954 - RNA, 22 nt, Human
ucuggcugugggguggcagguc

SEQ ID NO: 1189955 - RNA, 18 nt, Human
ucuguugcccaggcugga

SEQ ID NO: 1189956 - RNA, 22 nt, Human
ucuugcucuguugcccaggcug

SEQ ID NO: 1189957 - RNA, 22 nt, Human
ucuugcucuguugcccaggcug

SEQ ID NO: 1189958 - RNA, 23 nt, Human
ucuugcucuguugcccaggcugg

SEQ ID NO: 1189959 - RNA, 24 nt, Human
ucuugcucuguugcccaggcugga

SEQ ID NO: 1189960 - RNA, 25 nt, Human
ugaagucacccaccacccccacacc

SEQ ID NO: 1189961 - RNA, 18 nt, Human
ugacuuccugaaagcagg

SEQ ID NO: 1189962 - RNA, 22 nt, Human
ugagaccgagucuugcucuguu

SEQ ID NO: 1189963 - RNA, 22 nt, Human
ugagauggagucucgcucuguc

SEQ ID NO: 1189964 - RNA, 23 nt, Human
ugccagcugggcccggauauucu

SEQ ID NO: 1189965 - RNA, 18 nt, Human
ugcccaggcuggagugca

SEQ ID NO: 1189966 - RNA, 22 nt, Human
ugcccaggcuggagugcaguga

SEQ ID NO: 1189967 - RNA, 24 nt, Human
ugcccaggcuggagugcagugaug

SEQ ID NO: 1189968 - RNA, 24 nt, Human
ugccucagccuccugaguagcugg

SEQ ID NO: 1189969 - RNA, 18 nt, Human
ugcgccgccaucacaccu

SEQ ID NO: 1189970 - RNA, 24 nt, Human
ugcucuguugcccaggcuggagug

SEQ ID NO: 1189971 - RNA, 24 nt, Human
ugcugggauuacaggcaugaguca

SEQ ID NO: 1189972 - RNA, 24 nt, Human
uggagucucgcucugucgcccagg

SEQ ID NO: 1189973 - RNA, 18 nt, Human
uggagugcagugaugcaa

SEQ ID NO: 1189974 - RNA, 23 nt, Human
uggagugcaguggcgcgaucucg

SEQ ID NO: 1189975 - RNA, 24 nt, Human
uggagugcaguggcgcgaucucgg

SEQ ID NO: 1189976 - RNA, 24 nt, Human
uggaguuucagcauguuggcuagg

SEQ ID NO: 1189977 - RNA, 20 nt, Human
uggcagggaaaacaccagug

SEQ ID NO: 1189978 - RNA, 18 nt, Human
uggccuggggccagaaac

SEQ ID NO: 1189979 - RNA, 24 nt, Human
uggcuaggcuggucucaaacuccu

SEQ ID NO: 1189980 - RNA, 19 nt, Human
ugggacuacaggcagcccu

SEQ ID NO: 1189981 - RNA, 23 nt, Human
ugggacuacaggcagcccugcca

SEQ ID NO: 1189982 - RNA, 26 nt, Human
ugggacuacaggcagcccugccacca

SEQ ID NO: 1189983 - RNA, 18 nt, Human
ugggagcagggauggcac

SEQ ID NO: 1189984 - RNA, 22 nt, Human
ugggauggaaaggacccugcca

SEQ ID NO: 1189985 - RNA, 20 nt, Human
ugggauuacacgugugcgcc

SEQ ID NO: 1189986 - RNA, 21 nt, Human
ugggauuacacgugugcgccg

SEQ ID NO: 1189987 - RNA, 22 nt, Human
ugggauuacacgugugcgccgc

SEQ ID NO: 1189988 - RNA, 24 nt, Human
ugggauuacacgugugcgccgcca

SEQ ID NO: 1189989 - RNA, 18 nt, Human
ugggauuacaggcaugag

SEQ ID NO: 1189990 - RNA, 18 nt, Human
ugggauuacaggcaugag

SEQ ID NO: 1189991 - RNA, 21 nt, Human
ugggauuacaggcaugaguca

SEQ ID NO: 1189992 - RNA, 22 nt, Human
ugggauuacaggcaugagucac

SEQ ID NO: 1189993 - RNA, 23 nt, Human
ugggauuacaggcaugagucacc

SEQ ID NO: 1189994 - RNA, 24 nt, Human
ugggauuacaggcaugagucaccg

SEQ ID NO: 1189995 - RNA, 25 nt, Human
uggguccagaggucuagggagaauu

SEQ ID NO: 1189996 - RNA, 20 nt, Human
uggguucaagugauucuucu

SEQ ID NO: 1189997 - RNA, 23 nt, Human
uggguucaagugauucuucugcc

SEQ ID NO: 1189998 - RNA, 24 nt, Human
uggguucaagugauucuucugccu

SEQ ID NO: 1189999 - RNA, 21 nt, Human
ugucgcccaggcuggagugca

SEQ ID NO: 1190000 - RNA, 20 nt, Human
ugugggguggcaggucugag

SEQ ID NO: 1190001 - RNA, 21 nt, Human
uguugcccaggcuggagugca

SEQ ID NO: 1190002 - RNA, 18 nt, Human
uuaguagagacgggguuu

SEQ ID NO: 1190003 - RNA, 22 nt, Human
uuaguagagacgggguuucacc

SEQ ID NO: 1190004 - RNA, 24 nt, Human
uuaguagagacgggguuucaccgu

SEQ ID NO: 1190005 - RNA, 18 nt, Human
uuaguagagauggaguuu

SEQ ID NO: 1190006 - RNA, 24 nt, Human
uuaguagagauggaguuucagcau

SEQ ID NO: 1190007 - RNA, 23 nt, Human
uucaagugauucuucugccucag

SEQ ID NO: 1190008 - RNA, 24 nt, Human
uucaagugauucuucugccucagc

SEQ ID NO: 1190009 - RNA, 21 nt, Human
uucaucugcugcucagaacca

SEQ ID NO: 1190010 - RNA, 24 nt, Human
uucugaguagcugggacuacaggc

SEQ ID NO: 1190011 - RNA, 24 nt, Human
uugcccaggcuggagugcagugau

SEQ ID NO: 1190012 - RNA, 20 nt, Human
uuggccucccaaaguguuag

SEQ ID NO: 1190013 - RNA, 23 nt, Human
uuguauuuuuaguagagacgggg

SEQ ID NO: 1190014 - RNA, 23 nt, Human
uuguauuuuuaguagagauggag

SEQ ID NO: 1190015 - RNA, 19 nt, Human
uuucaccguguuagccagg

SEQ ID NO: 1190016 - RNA, 24 nt, Human
uuucagcauguuggcuaggcuggu

SEQ ID NO: 1190017 - RNA, 22 nt, Human
uuugggcagaugaagcuuccag

SEQ ID NO: 1190018 - RNA, 24 nt, Human
uuuuuaguagagacgggguuucac

SEQ ID NO: 1190019 - RNA, 19 nt, Human
uuuuuaguagagauggagu

SEQ ID NO: 1190020 - RNA, 20 nt, Human
uuuuuguauuuuuaguagag

SEQ ID NO: 1190021 - RNA, 21 nt, Human
uuuuuguauuuuuaguagaga

SEQ ID NO: 1190022 - RNA, 24 nt, Human
uuuuuuguauuuuuaguagagacg

SEQ ID NO: 1190023 - RNA, 22 nt, Human
aaaaaaacaaaccaagcaacaa

SEQ ID NO: 1190024 - RNA, 23 nt, Human
aaaaaaacaaaccaagcaacaaa

SEQ ID NO: 1190025 - RNA, 24 nt, Human
aaaaacaaaccaagcaacaaaaac

SEQ ID NO: 1190026 - RNA, 24 nt, Human
aaaaaccacaaccgagagcccgaa

SEQ ID NO: 1190027 - RNA, 22 nt, Human
aaaaagcaggcagugcuguguu

SEQ ID NO: 1190028 - RNA, 19 nt, Human
aaacaaaccaagcaacaaa

SEQ ID NO: 1190029 - RNA, 23 nt, Human
aaacaaaccaagcaacaaaaaca

SEQ ID NO: 1190030 - RNA, 19 nt, Human
aaaccacaaccgagagccc

SEQ ID NO: 1190031 - RNA, 23 nt, Human
aaaccagaagcagaagcugagga

SEQ ID NO: 1190032 - RNA, 21 nt, Human
aacggccucuggccuccaggc

SEQ ID NO: 1190033 - RNA, 18 nt, Human
aagaaaaaaacaaaccaa

SEQ ID NO: 1190034 - RNA, 23 nt, Human
aagaagccaggcgcggccggcca

SEQ ID NO: 1190035 - RNA, 20 nt, Human
aagcaacaaaaacaaaaagc

SEQ ID NO: 1190036 - RNA, 21 nt, Human
aagcaacaaaaacaaaaagca

SEQ ID NO: 1190037 - RNA, 18 nt, Human
aagccucuuggaguugcc

SEQ ID NO: 1190038 - RNA, 24 nt, Human
aaguaaaagauaaaaacucuaaga

SEQ ID NO: 1190039 - RNA, 18 nt, Human
aaguaucuauuugucuau

SEQ ID NO: 1190040 - RNA, 20 nt, Human
acaaaccaagcaacaaaaac

SEQ ID NO: 1190041 - RNA, 22 nt, Human
acaaaccaagcaacaaaaacaa

SEQ ID NO: 1190042 - RNA, 25 nt, Human
acaaaccaagcaacaaaaacaaaaa

SEQ ID NO: 1190043 - RNA, 18 nt, Human
acagacacaugggugugg

SEQ ID NO: 1190044 - RNA, 20 nt, Human
acucugaaaccagaagcaga

SEQ ID NO: 1190045 - RNA, 26 nt, Human
agaaaaaaacaaaccaagcaacaaaa

SEQ ID NO: 1190046 - RNA, 18 nt, Human
agcaguaucccuacugac

SEQ ID NO: 1190047 - RNA, 22 nt, Human
agcggcggccgaccggccugag

SEQ ID NO: 1190048 - RNA, 18 nt, Human
agcuggccaaugcccagu

SEQ ID NO: 1190049 - RNA, 19 nt, Human
agcuuuaaaacacccucca

SEQ ID NO: 1190050 - RNA, 19 nt, Human
agguguaaaaaccacaacc

SEQ ID NO: 1190051 - RNA, 26 nt, Human
agguguaaaaaccacaaccgagagcc

SEQ ID NO: 1190052 - RNA, 19 nt, Human
auagagagaacucugaaac

SEQ ID NO: 1190053 - RNA, 23 nt, Human
auccccuuuuccucuuuuuuucu

SEQ ID NO: 1190054 - RNA, 24 nt, Human
aucccgcucucccggaccccgcag

SEQ ID NO: 1190055 - RNA, 21 nt, Human
aucugaaggcccuccaugaga

SEQ ID NO: 1190056 - RNA, 19 nt, Human
caacuccgggccuccgccu

SEQ ID NO: 1190057 - RNA, 18 nt, Human
caacugaguacugucuuu

SEQ ID NO: 1190058 - RNA, 22 nt, Human
caagcaacaaaaacaaaaagca

SEQ ID NO: 1190059 - RNA, 19 nt, Human
cacaaccgagagcccgaag

SEQ ID NO: 1190060 - RNA, 20 nt, Human
cagaagcagaagcugaggaa

SEQ ID NO: 1190061 - RNA, 23 nt, Human
caggcgagcucuuccccaggacc

SEQ ID NO: 1190062 - RNA, 24 nt, Human
caucccgcucucccggaccccgca

SEQ ID NO: 1190063 - RNA, 25 nt, Human
ccaagcaacaaaaacaaaaagcagg

SEQ ID NO: 1190064 - RNA, 22 nt, Human
ccaaugcccaguauacaccagg

SEQ ID NO: 1190065 - RNA, 21 nt, Human
ccacaaccgagagcccgaagc

SEQ ID NO: 1190066 - RNA, 22 nt, Human
cccaguagcuggccaaugccca

SEQ ID NO: 1190067 - RNA, 18 nt, Human
ccccuuuuccucuuuuuu

SEQ ID NO: 1190068 - RNA, 25 nt, Human
ccccuuuuccucuuuuuuucuaugc

SEQ ID NO: 1190069 - RNA, 21 nt, Human
cccgucccggcccaacuccgg

SEQ ID NO: 1190070 - RNA, 20 nt, Human
ccgccuccgccgccgccucc

SEQ ID NO: 1190071 - RNA, 21 nt, Human
ccgccuccgccgccgccuccg

SEQ ID NO: 1190072 - RNA, 26 nt, Human
ccgggccuccgccuccgccgccgccu

SEQ ID NO: 1190073 - RNA, 20 nt, Human
ccgucccggcccaacuccgg

SEQ ID NO: 1190074 - RNA, 18 nt, Human
ccuagagagucuauagca

SEQ ID NO: 1190075 - RNA, 19 nt, Human
ccucaggagcaggcgagcu

SEQ ID NO: 1190076 - RNA, 22 nt, Human
ccuccaggcgcugccugcuccg

SEQ ID NO: 1190077 - RNA, 22 nt, Human
ccucccggaucccgucccggcc

SEQ ID NO: 1190078 - RNA, 18 nt, Human
ccuccgccgccgccuccg

SEQ ID NO: 1190079 - RNA, 19 nt, Human
ccucuuggaguugccuaga

SEQ ID NO: 1190080 - RNA, 18 nt, Human
ccugucaguuuguccauu

SEQ ID NO: 1190081 - RNA, 21 nt, Human
ccuuccugcucuuuccaagaa

SEQ ID NO: 1190082 - RNA, 20 nt, Human
ccuuugguguucugcuggug

SEQ ID NO: 1190083 - RNA, 21 nt, Human
cgcaggggaggggagcggcgg

SEQ ID NO: 1190084 - RNA, 20 nt, Human
cggccgaccggccugaggcg

SEQ ID NO: 1190085 - RNA, 20 nt, Human
cgguaagaaaaaaacaaacc

SEQ ID NO: 1190086 - RNA, 18 nt, Human
cuccuuccugcucuuucc

SEQ ID NO: 1190087 - RNA, 23 nt, Human
gagaacaacucuucucuuccaca

SEQ ID NO: 1190088 - RNA, 19 nt, Human
gagcaccugccgcggaacu

SEQ ID NO: 1190089 - RNA, 22 nt, Human
gagcaggcgagcucuuccccag

SEQ ID NO: 1190090 - RNA, 23 nt, Human
gcaacaaaaacaaaaagcaggca

SEQ ID NO: 1190091 - RNA, 21 nt, Human
gccuccgccuccgccgccgcc

SEQ ID NO: 1190092 - RNA, 21 nt, Human
ggaccccgcagucaggacccu

SEQ ID NO: 1190093 - RNA, 18 nt, Human
ggccagcaucccgcucuc

SEQ ID NO: 1190094 - RNA, 20 nt, Human
ggcccagaguggugcgagcc

SEQ ID NO: 1190095 - RNA, 19 nt, Human
ggccggccagcaucccgcu

SEQ ID NO: 1190096 - RNA, 21 nt, Human
ggcgcaggggaggggagcggc

SEQ ID NO: 1190097 - RNA, 22 nt, Human
ggcggccucucuggcccugccg

SEQ ID NO: 1190098 - RNA, 19 nt, Human
gguacuuaguuacacaggu

SEQ ID NO: 1190099 - RNA, 22 nt, Human
uaaaauauaguuuacuucaaaa

SEQ ID NO: 1190100 - RNA, 26 nt, Human
uaagaaaaaaacaaaccaagcaacaa

SEQ ID NO: 1190101 - RNA, 19 nt, Human
uaagaaccuaugaagcgcc

SEQ ID NO: 1190102 - RNA, 22 nt, Human
uacagucaggaccgacagacac

SEQ ID NO: 1190103 - RNA, 24 nt, Human
uaccuguggaauucagaugggauu

SEQ ID NO: 1190104 - RNA, 19 nt, Human
uagcagcucucacugccca

SEQ ID NO: 1190105 - RNA, 23 nt, Human
ucaggagcaggcgagcucuuccc

SEQ ID NO: 1190106 - RNA, 24 nt, Human
ucaucugaaggcccuccaugagaa

SEQ ID NO: 1190107 - RNA, 22 nt, Human
uccauagcagcucucacugccc

SEQ ID NO: 1190108 - RNA, 21 nt, Human
ucccggaucccgucccggccc

SEQ ID NO: 1190109 - RNA, 22 nt, Human
ucccggcccaacuccgggccuc

SEQ ID NO: 1190110 - RNA, 20 nt, Human
ucccgucccggcccaacucc

SEQ ID NO: 1190111 - RNA, 20 nt, Human
ucccucaggagcaggcgagc

SEQ ID NO: 1190112 - RNA, 22 nt, Human
uccuuugguguucugcuggugc

SEQ ID NO: 1190113 - RNA, 19 nt, Human
ucuaagaaccuaugaagcg

SEQ ID NO: 1190114 - RNA, 21 nt, Human
ucuccauauccccaguagcug

SEQ ID NO: 1190115 - RNA, 22 nt, Human
ucucuuccacauagauauuuuu

SEQ ID NO: 1190116 - RNA, 21 nt, Human
ucugaaaccagaagcagaagc

SEQ ID NO: 1190117 - RNA, 20 nt, Human
ugaaaccagaagcagaagcu

SEQ ID NO: 1190118 - RNA, 22 nt, Human
ugaaaccagaagcagaagcuga

SEQ ID NO: 1190119 - RNA, 23 nt, Human
ugaaaccagaagcagaagcugag

SEQ ID NO: 1190120 - RNA, 19 nt, Human
ugagaacaacucuucucuu

SEQ ID NO: 1190121 - RNA, 19 nt, Human
ugcucuuuccaagaagcca

SEQ ID NO: 1190122 - RNA, 19 nt, Human
uggcccugccgggaacagg

SEQ ID NO: 1190123 - RNA, 19 nt, Human
uggccuccaggcgcugccu

SEQ ID NO: 1190124 - RNA, 22 nt, Human
ugggaugagcaccugccgcgga

SEQ ID NO: 1190125 - RNA, 19 nt, Human
ugguacagucaggaccgac

SEQ ID NO: 1190126 - RNA, 25 nt, Human
uguuuucuucaucuccauaucccca

SEQ ID NO: 1190127 - RNA, 23 nt, Human
uuagacugaaaguaaaagauaaa

SEQ ID NO: 1190128 - RNA, 28 nt, Human
uugacucuacucugacuuaggacauauu

SEQ ID NO: 1190129 - RNA, 18 nt, Human
aaacaggcagaaugccau

SEQ ID NO: 1190130 - RNA, 22 nt, Human
aaaggacaaggacuggggggca

SEQ ID NO: 1190131 - RNA, 23 nt, Human
aagauauauccucagacaaagaa

SEQ ID NO: 1190132 - RNA, 18 nt, Human
aaguguuggaagcagcac

SEQ ID NO: 1190133 - RNA, 19 nt, Human
acccaucuuaucuccccca

SEQ ID NO: 1190134 - RNA, 20 nt, Human
acuucaggaacagagagagg

SEQ ID NO: 1190135 - RNA, 25 nt, Human
agaaacaggcagaaugccauaccug

SEQ ID NO: 1190136 - RNA, 18 nt, Human
agagaggaagagaggaag

SEQ ID NO: 1190137 - RNA, 18 nt, Human
agagcacauguccaaaca

SEQ ID NO: 1190138 - RNA, 22 nt, Human
agaggaagagaggaagcaagag

SEQ ID NO: 1190139 - RNA, 19 nt, Human
agccacgucugaagaaauc

SEQ ID NO: 1190140 - RNA, 18 nt, Human
agcugccugcuugugaag

SEQ ID NO: 1190141 - RNA, 23 nt, Human
aucucccccagaccccugucuac

SEQ ID NO: 1190142 - RNA, 23 nt, Human
aucuuaucucccccagaccccug

SEQ ID NO: 1190143 - RNA, 23 nt, Human
cacacuucaggaacagagagagg

SEQ ID NO: 1190144 - RNA, 22 nt, Human
caccacccaucuuaucuccccc

SEQ ID NO: 1190145 - RNA, 27 nt, Human
cacccaucuuaucucccccagaccccu

SEQ ID NO: 1190146 - RNA, 18 nt, Human
cacugcuaaaggacaagg

SEQ ID NO: 1190147 - RNA, 19 nt, Human
cacuucaggaacagagaga

SEQ ID NO: 1190148 - RNA, 18 nt, Human
cagaaugccauaccugac

SEQ ID NO: 1190149 - RNA, 19 nt, Human
cagaccccugucuaccccu

SEQ ID NO: 1190150 - RNA, 19 nt, Human
cagcugccugcuugugaag

SEQ ID NO: 1190151 - RNA, 23 nt, Human
ccacccaucuuaucucccccaga

SEQ ID NO: 1190152 - RNA, 22 nt, Human
cccaccaacacaacuuccuaca

SEQ ID NO: 1190153 - RNA, 23 nt, Human
ccgcaugauagcuacuggcuucu

SEQ ID NO: 1190154 - RNA, 22 nt, Human
ccuugugauucaccuuacucuc

SEQ ID NO: 1190155 - RNA, 25 nt, Human
gccuugugauucaccuuacucucgg

SEQ ID NO: 1190156 - RNA, 25 nt, Human
gcuaaaggacaaggacuggggggca

SEQ ID NO: 1190157 - RNA, 25 nt, Human
ggcacuguuuugcggucuaaauggg

SEQ ID NO: 1190158 - RNA, 19 nt, Human
ggggaaguguuggaagcag

SEQ ID NO: 1190159 - RNA, 21 nt, Human
uaaccugaucaaacacaucaa

SEQ ID NO: 1190160 - RNA, 22 nt, Human
uaagaaauaaacgaaaacugcc

SEQ ID NO: 1190161 - RNA, 21 nt, Human
uaagcuucagaaacaggcaga

SEQ ID NO: 1190162 - RNA, 25 nt, Human
uacacuaccugggagacagguugaa

SEQ ID NO: 1190163 - RNA, 23 nt, Human
uacugccaagauauauccucaga

SEQ ID NO: 1190164 - RNA, 22 nt, Human
uaucucccccagaccccugucu

SEQ ID NO: 1190165 - RNA, 19 nt, Human
ucaaugccaaauagagaga

SEQ ID NO: 1190166 - RNA, 21 nt, Human
uccaaacagaggaaugacaca

SEQ ID NO: 1190167 - RNA, 24 nt, Human
ucccccagaccccugucuaccccc

SEQ ID NO: 1190168 - RNA, 25 nt, Human
uccuguacugccaagauauauccuc

SEQ ID NO: 1190169 - RNA, 21 nt, Human
ucucccccagaccccugucua

SEQ ID NO: 1190170 - RNA, 18 nt, Human
ugaaaaagugauggcuag

SEQ ID NO: 1190171 - RNA, 20 nt, Human
ugacagguacacuaccuggg

SEQ ID NO: 1190172 - RNA, 25 nt, Human
ugacagguacacuaccugggagaca

SEQ ID NO: 1190173 - RNA, 19 nt, Human
ugcuguuggucaucuucac

SEQ ID NO: 1190174 - RNA, 21 nt, Human
ugcuugugaagcccaccaaca

SEQ ID NO: 1190175 - RNA, 19 nt, Human
uuccugaaaaagugauggc

SEQ ID NO: 1190176 - RNA, 24 nt, Human
aaaaguacuguguaauuucuaaau

SEQ ID NO: 1190177 - RNA, 18 nt, Human
acccugcacgccaccgcc

SEQ ID NO: 1190178 - RNA, 18 nt, Human
caccuggagcggcugacu

SEQ ID NO: 1190179 - RNA, 18 nt, Human
cacgcgcgccagcccggg

SEQ ID NO: 1190180 - RNA, 20 nt, Human
ccagcccgggagaccucacc

SEQ ID NO: 1190181 - RNA, 20 nt, Human
cccugcacgccaccgccccg

SEQ ID NO: 1190182 - RNA, 23 nt, Human
cgacuccuagaccccaaccaccu

SEQ ID NO: 1190183 - RNA, 19 nt, Human
cuccuagaccccaaccacc

SEQ ID NO: 1190184 - RNA, 25 nt, Human
cucuggaaguggugaagguuuuuug

SEQ ID NO: 1190185 - RNA, 20 nt, Human
cuggaaguggugaagguuuu

SEQ ID NO: 1190186 - RNA, 22 nt, Human
cuggaaguggugaagguuuuuu

SEQ ID NO: 1190187 - RNA, 18 nt, Human
cuguugcccuccuggagc

SEQ ID NO: 1190188 - RNA, 18 nt, Human
gaaguggugaagguuuuu

SEQ ID NO: 1190189 - RNA, 21 nt, Human
ggaaguggugaagguuuuuug

SEQ ID NO: 1190190 - RNA, 19 nt, Human
uagcgcgagguagcagcag

SEQ ID NO: 1190191 - RNA, 23 nt, Human
ucagagcaucgccagcugcagcc

SEQ ID NO: 1190192 - RNA, 30 nt, Human
uccgcaguccagacuuaagcaccuggagcc

SEQ ID NO: 1190193 - RNA, 18 nt, Human
uccugucgucuguugccc

SEQ ID NO: 1190194 - RNA, 19 nt, Human
ugacugggccccaggaagc

SEQ ID NO: 1190195 - RNA, 27 nt, Human
ugcacgccaccgccccggccuccgcag

SEQ ID NO: 1190196 - RNA, 25 nt, Human
ugggccccaggaagcugcggggucc

SEQ ID NO: 1190197 - RNA, 18 nt, Human
aagagaaaggcaggggcg

SEQ ID NO: 1190198 - RNA, 22 nt, Human
acagggccugauggaggaagag

SEQ ID NO: 1190199 - RNA, 19 nt, Human
aggcaggggcgggcacagg

SEQ ID NO: 1190200 - RNA, 19 nt, Human
aggcaggggcgggcacagg

SEQ ID NO: 1190201 - RNA, 21 nt, Human
aggcaggggcgggcacagggu

SEQ ID NO: 1190202 - RNA, 22 nt, Human
aggcaggggcgggcacagggug

SEQ ID NO: 1190203 - RNA, 22 nt, Human
agguugccagcauacagggccu

SEQ ID NO: 1190204 - RNA, 19 nt, Human
aucucucuggaaagcaggu

SEQ ID NO: 1190205 - RNA, 20 nt, Human
cagaagacgucucuggucug

SEQ ID NO: 1190206 - RNA, 21 nt, Human
cagaagacgucucuggucugu

SEQ ID NO: 1190207 - RNA, 21 nt, Human
caggguggaauugacaaccgu

SEQ ID NO: 1190208 - RNA, 18 nt, Human
cccacaugugagacuaca

SEQ ID NO: 1190209 - RNA, 23 nt, Human
cccacaugugagacuacauggac

SEQ ID NO: 1190210 - RNA, 21 nt, Human
cuguaggccgaccccacaugu

SEQ ID NO: 1190211 - RNA, 18 nt, Human
guggauggccgcccgggc

SEQ ID NO: 1190212 - RNA, 22 nt, Human
ucucuggaaagcagguggcugc

SEQ ID NO: 1190213 - RNA, 27 nt, Human
ucucuggaaagcagguggcugcagaag

SEQ ID NO: 1190214 - RNA, 18 nt, Human
uggaggaagagaaaggca

SEQ ID NO: 1190215 - RNA, 24 nt, Human
uggcugcagaagacgucucugguc

SEQ ID NO: 1190216 - RNA, 23 nt, Human
aaacaccacugcuucaacaaucc

SEQ ID NO: 1190217 - RNA, 18 nt, Human
aaagaaacagaacuauca

SEQ ID NO: 1190218 - RNA, 22 nt, Human
aaccacagguuuggaaaguucu

SEQ ID NO: 1190219 - RNA, 23 nt, Human
aagugggggcgggacggcagcgc

SEQ ID NO: 1190220 - RNA, 22 nt, Human
aaguuuaccaucagcauacagu

SEQ ID NO: 1190221 - RNA, 19 nt, Human
acacgccagcaagcagagu

SEQ ID NO: 1190222 - RNA, 23 nt, Human
acauuccguucuugcccaaugca

SEQ ID NO: 1190223 - RNA, 22 nt, Human
accgcccccgccgccgucgccg

SEQ ID NO: 1190224 - RNA, 21 nt, Human
acuguaacacgccagcaagca

SEQ ID NO: 1190225 - RNA, 19 nt, Human
agagcacuguaacacgcca

SEQ ID NO: 1190226 - RNA, 19 nt, Human
agauaguauggaccuccag

SEQ ID NO: 1190227 - RNA, 20 nt, Human
agauuucuaacauuccguuc

SEQ ID NO: 1190228 - RNA, 20 nt, Human
aguaagauggauacucacua

SEQ ID NO: 1190229 - RNA, 21 nt, Human
caacaaggugacugucacaca

SEQ ID NO: 1190230 - RNA, 24 nt, Human
caagagaagcggaaugucuucuca

SEQ ID NO: 1190231 - RNA, 23 nt, Human
cagucaauggugcauuucagagc

SEQ ID NO: 1190232 - RNA, 23 nt, Human
cauuaccgcccccgccgccgucg

SEQ ID NO: 1190233 - RNA, 19 nt, Human
ccaagaauaugaguucaac

SEQ ID NO: 1190234 - RNA, 18 nt, Human
ccagauacccaaaugaga

SEQ ID NO: 1190235 - RNA, 19 nt, Human
ccccgccgccgucgccgcc

SEQ ID NO: 1190236 - RNA, 27 nt, Human
ccgcccccgccgccgucgccgccgccg

SEQ ID NO: 1190237 - RNA, 25 nt, Human
ccgccgacgccgccgacgccgccgc

SEQ ID NO: 1190238 - RNA, 27 nt, Human
ccgccgacgccgccgacgccgccgcuc

SEQ ID NO: 1190239 - RNA, 18 nt, Human
ccgccgccgucgccgccg

SEQ ID NO: 1190240 - RNA, 24 nt, Human
ccgccgccgucgccgccgccgccg

SEQ ID NO: 1190241 - RNA, 22 nt, Human
ccgccgucgccgccgccgccga

SEQ ID NO: 1190242 - RNA, 23 nt, Human
ccgccgucgccgccgccgccgac

SEQ ID NO: 1190243 - RNA, 19 nt, Human
ccucccgcuccgcuugggg

SEQ ID NO: 1190244 - RNA, 23 nt, Human
ccucuuacacgguccuuaacaaa

SEQ ID NO: 1190245 - RNA, 22 nt, Human
ccuucgaccgaucggaaguggg

SEQ ID NO: 1190246 - RNA, 22 nt, Human
ccuucugcaaacugaggaucug

SEQ ID NO: 1190247 - RNA, 23 nt, Human
ccuucugcaaacugaggaucuga

SEQ ID NO: 1190248 - RNA, 26 nt, Human
cgaagcccucggccuucauccccaca

SEQ ID NO: 1190249 - RNA, 25 nt, Human
cgccgccgccgacgccgccgacgcc

SEQ ID NO: 1190250 - RNA, 22 nt, Human
cggcuccccgguccggccuccc

SEQ ID NO: 1190251 - RNA, 22 nt, Human
cgucgccgccgccgccgacgcc

SEQ ID NO: 1190252 - RNA, 22 nt, Human
cuacaggccuucugcaaacuga

SEQ ID NO: 1190253 - RNA, 23 nt, Human
cucggcuccccgguccggccucc

SEQ ID NO: 1190254 - RNA, 18 nt, Human
cuggagcagguuguccaa

SEQ ID NO: 1190255 - RNA, 23 nt, Human
cuggagcagguuguccaagaaua

SEQ ID NO: 1190256 - RNA, 18 nt, Human
cuuacagcccugucucca

SEQ ID NO: 1190257 - RNA, 20 nt, Human
cuuccggcggaagggaaagc

SEQ ID NO: 1190258 - RNA, 20 nt, Human
cuuucugccggacccggugc

SEQ ID NO: 1190259 - RNA, 21 nt, Human
gaaggggagcuggguggcaug

SEQ ID NO: 1190260 - RNA, 22 nt, Human
gaccauaucuucaagcgcccga

SEQ ID NO: 1190261 - RNA, 21 nt, Human
gaggaugggccaccgccacuu

SEQ ID NO: 1190262 - RNA, 23 nt, Human
gagucgcgucugcggggcggggu

SEQ ID NO: 1190263 - RNA, 24 nt, Human
gccgccgccgacgccgccgacgcc

SEQ ID NO: 1190264 - RNA, 19 nt, Human
ggugaugcccccaggagag

SEQ ID NO: 1190265 - RNA, 20 nt, Human
gugggggcgggacggcagcg

SEQ ID NO: 1190266 - RNA, 22 nt, Human
guuugcaugaggaugggccacc

SEQ ID NO: 1190267 - RNA, 22 nt, Human
uaaacaccacugcuucaacaau

SEQ ID NO: 1190268 - RNA, 25 nt, Human
uaaaguaacaauucaucagauaaaa

SEQ ID NO: 1190269 - RNA, 18 nt, Human
uaacacgccagcaagcag

SEQ ID NO: 1190270 - RNA, 21 nt, Human
uaacacgccagcaagcagagu

SEQ ID NO: 1190271 - RNA, 19 nt, Human
uaagauggauacucacuac

SEQ ID NO: 1190272 - RNA, 23 nt, Human
uacaauaaaccuaaaauuaccca

SEQ ID NO: 1190273 - RNA, 24 nt, Human
uacaauaaaccuaaaauuacccac

SEQ ID NO: 1190274 - RNA, 20 nt, Human
uacccaaaugagauccuuac

SEQ ID NO: 1190275 - RNA, 22 nt, Human
uaguaaacaccacugcuucaac

SEQ ID NO: 1190276 - RNA, 22 nt, Human
uaguaguaaacaccacugcuuc

SEQ ID NO: 1190277 - RNA, 24 nt, Human
uauacaauaaaccuaaaauuaccc

SEQ ID NO: 1190278 - RNA, 24 nt, Human
uauuaguagccagugagaaacaag

SEQ ID NO: 1190279 - RNA, 18 nt, Human
ucaaaauucacuuuaugu

SEQ ID NO: 1190280 - RNA, 24 nt, Human
ucacaucucuguaacaugcugugu

SEQ ID NO: 1190281 - RNA, 23 nt, Human
ucccgcuccgcuuggggacccgu

SEQ ID NO: 1190282 - RNA, 21 nt, Human
ucgccgccgccgccgacgccg

SEQ ID NO: 1190283 - RNA, 24 nt, Human
ucgccgccgccgccgacgccgccg

SEQ ID NO: 1190284 - RNA, 21 nt, Human
ucuauauacaauaaaccuaaa

SEQ ID NO: 1190285 - RNA, 20 nt, Human
ucuccauugggcuuauuacu

SEQ ID NO: 1190286 - RNA, 18 nt, Human
ugaaaagccagcguggug

SEQ ID NO: 1190287 - RNA, 19 nt, Human
ugaaaagccagcguggugu

SEQ ID NO: 1190288 - RNA, 24 nt, Human
ugcccaaugcaaaucuauauacaa

SEQ ID NO: 1190289 - RNA, 19 nt, Human
ugccggacccggugcaggg

SEQ ID NO: 1190290 - RNA, 19 nt, Human
uggaaagagauguaaagac

SEQ ID NO: 1190291 - RNA, 22 nt, Human
uggaaaguucugggauccaaua

SEQ ID NO: 1190292 - RNA, 21 nt, Human
uggaaggggagcuggguggca

SEQ ID NO: 1190293 - RNA, 23 nt, Human
uggaccuccagcuguuaacauuc

SEQ ID NO: 1190294 - RNA, 19 nt, Human
uggcucaagagaagcggaa

SEQ ID NO: 1190295 - RNA, 22 nt, Human
uggugcauuucagagcugagaa

SEQ ID NO: 1190296 - RNA, 19 nt, Human
ugguggaaggggagcuggg

SEQ ID NO: 1190297 - RNA, 21 nt, Human
ugguggaaggggagcugggug

SEQ ID NO: 1190298 - RNA, 19 nt, Human
uguaacaugcuguguauau

SEQ ID NO: 1190299 - RNA, 19 nt, Human
ugucuggugaugcccccag

SEQ ID NO: 1190300 - RNA, 21 nt, Human
uguguauauaacaaagaaaca

SEQ ID NO: 1190301 - RNA, 19 nt, Human
uuaguucuguuuaaugggg

SEQ ID NO: 1190302 - RNA, 18 nt, Human
uuccgccugggguugucu

SEQ ID NO: 1190303 - RNA, 26 nt, Human
uuuuagguggaaccacagguuuggaa

SEQ ID NO: 1190304 - RNA, 25 nt, Human
aaaaaaccuaaaugaucaacagaug

SEQ ID NO: 1190305 - RNA, 20 nt, Human
aaaggaacagacgagccacg

SEQ ID NO: 1190306 - RNA, 20 nt, Human
aagaacaaggcagacagagc

SEQ ID NO: 1190307 - RNA, 18 nt, Human
aagacugauucccacaac

SEQ ID NO: 1190308 - RNA, 19 nt, Human
aagagaccccaccucuauc

SEQ ID NO: 1190309 - RNA, 18 nt, Human
aagaugcuccccagaauc

SEQ ID NO: 1190310 - RNA, 21 nt, Human
aagcacaguuagacccugcug

SEQ ID NO: 1190311 - RNA, 21 nt, Human
aagcgccccacaagccuugcc

SEQ ID NO: 1190312 - RNA, 24 nt, Human
aaggacucaaagugacaugguggu

SEQ ID NO: 1190313 - RNA, 19 nt, Human
aaggcagacagagcugugg

SEQ ID NO: 1190314 - RNA, 26 nt, Human
acccgcccgggccccccaaaggaaca

SEQ ID NO: 1190315 - RNA, 19 nt, Human
acccugagggaccauucgg

SEQ ID NO: 1190316 - RNA, 22 nt, Human
aggaggauggaaacagcaucug

SEQ ID NO: 1190317 - RNA, 21 nt, Human
aggcugcagcauggcacuggc

SEQ ID NO: 1190318 - RNA, 22 nt, Human
caacccgcccgggccccccaaa

SEQ ID NO: 1190319 - RNA, 20 nt, Human
caagcccaagaacaaggcag

SEQ ID NO: 1190320 - RNA, 21 nt, Human
cacaacccgcccgggcccccc

SEQ ID NO: 1190321 - RNA, 23 nt, Human
cacaacccgcccgggccccccaa

SEQ ID NO: 1190322 - RNA, 24 nt, Human
cacaacccgcccgggccccccaaa

SEQ ID NO: 1190323 - RNA, 19 nt, Human
cacagggggcugccugcca

SEQ ID NO: 1190324 - RNA, 19 nt, Human
caccaagggcucccaguga

SEQ ID NO: 1190325 - RNA, 22 nt, Human
cacccgaccacagacacgguuc

SEQ ID NO: 1190326 - RNA, 24 nt, Human
caccucuauccagcucaagcccaa

SEQ ID NO: 1190327 - RNA, 21 nt, Human
cagaacaccaagggcucccag

SEQ ID NO: 1190328 - RNA, 23 nt, Human
cagaacaccaagggcucccagug

SEQ ID NO: 1190329 - RNA, 21 nt, Human
cagacacgguucugccugcug

SEQ ID NO: 1190330 - RNA, 18 nt, Human
cagcauggcacuggcauu

SEQ ID NO: 1190331 - RNA, 20 nt, Human
cagcucaagcccaagaacaa

SEQ ID NO: 1190332 - RNA, 19 nt, Human
caggcuuagggggcacagg

SEQ ID NO: 1190333 - RNA, 18 nt, Human
cagggucuguucugaauu

SEQ ID NO: 1190334 - RNA, 22 nt, Human
caggucagacauggugugugcc

SEQ ID NO: 1190335 - RNA, 19 nt, Human
ccaaaggaacagacgagcc

SEQ ID NO: 1190336 - RNA, 23 nt, Human
ccacaccccgacaccugcaggug

SEQ ID NO: 1190337 - RNA, 19 nt, Human
ccacggaaccaggcggcac

SEQ ID NO: 1190338 - RNA, 19 nt, Human
ccagcucaagcccaagaac

SEQ ID NO: 1190339 - RNA, 20 nt, Human
ccagggccaggcuuaggggg

SEQ ID NO: 1190340 - RNA, 21 nt, Human
ccaugaaggacucaaagugac

SEQ ID NO: 1190341 - RNA, 20 nt, Human
cccaaaggaacagacgagcc

SEQ ID NO: 1190342 - RNA, 23 nt, Human
cccacaacccgcccgggcccccc

SEQ ID NO: 1190343 - RNA, 25 nt, Human
cccaccucuauccagcucaagccca

SEQ ID NO: 1190344 - RNA, 18 nt, Human
ccccacaagccuugccca

SEQ ID NO: 1190345 - RNA, 20 nt, Human
ccccacaagccuugcccaga

SEQ ID NO: 1190346 - RNA, 18 nt, Human
ccccagaaucggguucag

SEQ ID NO: 1190347 - RNA, 24 nt, Human
cccccaaaggaacagacgagccac

SEQ ID NO: 1190348 - RNA, 20 nt, Human
cccccccacaccccgacacc

SEQ ID NO: 1190349 - RNA, 21 nt, Human
cccccccacaccccgacaccu

SEQ ID NO: 1190350 - RNA, 19 nt, Human
cccgcagcgcccugccugc

SEQ ID NO: 1190351 - RNA, 24 nt, Human
cccgcagcgcccugccugcaggcu

SEQ ID NO: 1190352 - RNA, 18 nt, Human
cccgggccccccaaagga

SEQ ID NO: 1190353 - RNA, 26 nt, Human
ccgacaccugcaggugaggacugacc

SEQ ID NO: 1190354 - RNA, 22 nt, Human
ccucagggaugcccuucccucc

SEQ ID NO: 1190355 - RNA, 24 nt, Human
ccugggcacacuggggccaggcac

SEQ ID NO: 1190356 - RNA, 20 nt, Human
cgcccgggccccccaaagga

SEQ ID NO: 1190357 - RNA, 22 nt, Human
cgggccccccaaaggaacagaa

SEQ ID NO: 1190358 - RNA, 20 nt, Human
cugaauucagggaaggugaa

SEQ ID NO: 1190359 - RNA, 20 nt, Human
cugcacccugagggaccauu

SEQ ID NO: 1190360 - RNA, 23 nt, Human
cugcagcugcugccuuaggaggc

SEQ ID NO: 1190361 - RNA, 21 nt, Human
cugcaggcucaugcuggaggc

SEQ ID NO: 1190362 - RNA, 23 nt, Human
cuguggacagcacccgaccacag

SEQ ID NO: 1190363 - RNA, 19 nt, Human
gacgagccacggccaggcc

SEQ ID NO: 1190364 - RNA, 20 nt, Human
gcaauaaccagggccaggcu

SEQ ID NO: 1190365 - RNA, 19 nt, Human
gcacacuggggccaggcac

SEQ ID NO: 1190366 - RNA, 23 nt, Human
gcguggggagaguggggagaggg

SEQ ID NO: 1190367 - RNA, 22 nt, Human
gcuggaggccacggaaccaggc

SEQ ID NO: 1190368 - RNA, 25 nt, Human
gcuggagugagaggccugguuucug

SEQ ID NO: 1190369 - RNA, 18 nt, Human
gcuugcugcagcugcugc

SEQ ID NO: 1190370 - RNA, 18 nt, Human
ggagagggugcgcuugcu

SEQ ID NO: 1190371 - RNA, 25 nt, Human
ggccacggaaccaggcggcacaggg

SEQ ID NO: 1190372 - RNA, 19 nt, Human
ggccugguuucugaggcug

SEQ ID NO: 1190373 - RNA, 24 nt, Human
gggccggagcgggaagaugcuccc

SEQ ID NO: 1190374 - RNA, 18 nt, Human
guccucacgcagggagcc

SEQ ID NO: 1190375 - RNA, 18 nt, Human
gugccucagggaugcccu

SEQ ID NO: 1190376 - RNA, 22 nt, Human
uaggaggcuccucuguggccag

SEQ ID NO: 1190377 - RNA, 19 nt, Human
uagggggcacagggggcug

SEQ ID NO: 1190378 - RNA, 20 nt, Human
uauauauuacaauguaaccc

SEQ ID NO: 1190379 - RNA, 27 nt, Human
ucccacaacccgcccgggccccccaaa

SEQ ID NO: 1190380 - RNA, 20 nt, Human
uccuugcccccccacacccc

SEQ ID NO: 1190381 - RNA, 20 nt, Human
ucgggugccucagggaugcc

SEQ ID NO: 1190382 - RNA, 24 nt, Human
ucuggaagccgcucuggcgugggg

SEQ ID NO: 1190383 - RNA, 24 nt, Human
ugagcacagagcucagcaauaacc

SEQ ID NO: 1190384 - RNA, 19 nt, Human
ugccucagggaugcccuuc

SEQ ID NO: 1190385 - RNA, 25 nt, Human
ugccugggcacacuggggccaggcc

SEQ ID NO: 1190386 - RNA, 19 nt, Human
ugcuggaggccacggaacc

SEQ ID NO: 1190387 - RNA, 22 nt, Human
ugcuggagugagaggccugguu

SEQ ID NO: 1190388 - RNA, 25 nt, Human
uggcguggggagaguggggagaggg

SEQ ID NO: 1190389 - RNA, 24 nt, Human
ugggcagcuuucaucuguguuuau

SEQ ID NO: 1190390 - RNA, 19 nt, Human
uggggagaguggggagagg

SEQ ID NO: 1190391 - RNA, 19 nt, Human
ugugaagacugauucccac

SEQ ID NO: 1190392 - RNA, 28 nt, Human
uguggccaggcuucugccucccugcacc

SEQ ID NO: 1190393 - RNA, 24 nt, Human
uguucaaaaacccaugaaggacuc

SEQ ID NO: 1190394 - RNA, 24 nt, Human
uguucugaauucagggaaggugaa

SEQ ID NO: 1190395 - RNA, 19 nt, Human
uucccacaacccgcccggg

SEQ ID NO: 1190396 - RNA, 20 nt, Human
uugccugugcuacagauggg

SEQ ID NO: 1190397 - RNA, 26 nt, Human
uugcugcagcugcugccuuaggaggc

SEQ ID NO: 1190398 - RNA, 19 nt, Human
uuucugaggcugcagcaug

SEQ ID NO: 1190399 - RNA, 24 nt, Human
aaagacacaagacaucacuacaua

SEQ ID NO: 1190400 - RNA, 19 nt, Human
aacacgcuacaccugacau

SEQ ID NO: 1190401 - RNA, 20 nt, Human
aacauugugaaacccugucu

SEQ ID NO: 1190402 - RNA, 21 nt, Human
aacauugugaaacccugucuc

SEQ ID NO: 1190403 - RNA, 21 nt, Human
aacccaacacgcuacaccuga

SEQ ID NO: 1190404 - RNA, 24 nt, Human
aagacacgcagagacauuuugcuu

SEQ ID NO: 1190405 - RNA, 24 nt, Human
aagcauguuuccaggccuuggacc

SEQ ID NO: 1190406 - RNA, 21 nt, Human
aaggacuggaagaaaauacuu

SEQ ID NO: 1190407 - RNA, 20 nt, Human
aaggucaggaguucgagacc

SEQ ID NO: 1190408 - RNA, 25 nt, Human
aagguggguggaucacuuaagguca

SEQ ID NO: 1190409 - RNA, 23 nt, Human
aagguugcagugagcugagacug

SEQ ID NO: 1190410 - RNA, 18 nt, Human
aagugcugggauuacagg

SEQ ID NO: 1190411 - RNA, 18 nt, Human
aagugcugggauuacagg

SEQ ID NO: 1190412 - RNA, 18 nt, Human
aagugcugggauuacagg

SEQ ID NO: 1190413 - RNA, 19 nt, Human
aagugcugggauuacaggu

SEQ ID NO: 1190414 - RNA, 23 nt, Human
aagugcugggauuacagguguga

SEQ ID NO: 1190415 - RNA, 26 nt, Human
aagugcugggauuacaggugugagcc

SEQ ID NO: 1190416 - RNA, 19 nt, Human
acagaguaagacucugucu

SEQ ID NO: 1190417 - RNA, 24 nt, Human
acagaguaagacucugucuugaaa

SEQ ID NO: 1190418 - RNA, 22 nt, Human
accacugcacuccagccugggc

SEQ ID NO: 1190419 - RNA, 23 nt, Human
accacugcacuccagccugggcg

SEQ ID NO: 1190420 - RNA, 25 nt, Human
accacugcacuccagccugggcgac

SEQ ID NO: 1190421 - RNA, 26 nt, Human
accugacaucaaggcaugagccauaa

SEQ ID NO: 1190422 - RNA, 24 nt, Human
acuauguugcccaggcuggucucg

SEQ ID NO: 1190423 - RNA, 25 nt, Human
acuauguugcccaggcuggucucga

SEQ ID NO: 1190424 - RNA, 24 nt, Human
acugcacuccagccugggcgacag

SEQ ID NO: 1190425 - RNA, 26 nt, Human
acugcacuccagccugggcgacagag

SEQ ID NO: 1190426 - RNA, 25 nt, Human
acugcacuccagccugggcgacagg

SEQ ID NO: 1190427 - RNA, 22 nt, Human
agaaucgcuugaacacgggagg

SEQ ID NO: 1190428 - RNA, 24 nt, Human
agcacuuugggaggccaagguggg

SEQ ID NO: 1190429 - RNA, 23 nt, Human
agcagggugugguggugcaugcc

SEQ ID NO: 1190430 - RNA, 24 nt, Human
agccugggcgacagaguaagacuc

SEQ ID NO: 1190431 - RNA, 20 nt, Human
agccuggucaacauugugaa

SEQ ID NO: 1190432 - RNA, 24 nt, Human
agccuggucaacauugugaaaccc

SEQ ID NO: 1190433 - RNA, 26 nt, Human
aggaaaaggcaagccaaggacuggaa

SEQ ID NO: 1190434 - RNA, 25 nt, Human
aggagcauaccagaaaccggggccc

SEQ ID NO: 1190435 - RNA, 22 nt, Human
aggaggaggaaaaggcaagcca

SEQ ID NO: 1190436 - RNA, 22 nt, Human
aggaguucgagaccagccuggu

SEQ ID NO: 1190437 - RNA, 24 nt, Human
aggcaggagaaucgcuugaacacg

SEQ ID NO: 1190438 - RNA, 21 nt, Human
aggccaagguggguggaucac

SEQ ID NO: 1190439 - RNA, 20 nt, Human
aggccaagguugcagugagc

SEQ ID NO: 1190440 - RNA, 24 nt, Human
aggccaagguugcagugagcugag

SEQ ID NO: 1190441 - RNA, 20 nt, Human
aggcugaggcaggagaaucg

SEQ ID NO: 1190442 - RNA, 24 nt, Human
aggcugaggcaggagaaucgcuug

SEQ ID NO: 1190443 - RNA, 20 nt, Human
agggaaaauggguaaacugg

SEQ ID NO: 1190444 - RNA, 22 nt, Human
aggucucacuauguugcccagg

SEQ ID NO: 1190445 - RNA, 24 nt, Human
aguggcuuaugcugguaaucccag

SEQ ID NO: 1190446 - RNA, 20 nt, Human
auaaaggcacagaaaugaaa

SEQ ID NO: 1190447 - RNA, 24 nt, Human
aucacuuaaggucaggaguucgag

SEQ ID NO: 1190448 - RNA, 21 nt, Human
auccacacuuucgccugcgca

SEQ ID NO: 1190449 - RNA, 27 nt, Human
auuccagucggcagauauuuauugagc

SEQ ID NO: 1190450 - RNA, 20 nt, Human
caaaagacacgcagagacau

SEQ ID NO: 1190451 - RNA, 20 nt, Human
caacauugugaaacccuguc

SEQ ID NO: 1190452 - RNA, 22 nt, Human
caacauugugaaacccugucuc

SEQ ID NO: 1190453 - RNA, 24 nt, Human
caacauugugaaacccugucucua

SEQ ID NO: 1190454 - RNA, 24 nt, Human
caagguggguggaucacuuaaggu

SEQ ID NO: 1190455 - RNA, 21 nt, Human
caaguuacuggcccaaggcca

SEQ ID NO: 1190456 - RNA, 24 nt, Human
caccacucaccacucacugaaccc

SEQ ID NO: 1190457 - RNA, 20 nt, Human
caccacugcacuccagccug

SEQ ID NO: 1190458 - RNA, 26 nt, Human
caccacugcacuccagccugggcgac

SEQ ID NO: 1190459 - RNA, 19 nt, Human
caccagaugguaaauaagc

SEQ ID NO: 1190460 - RNA, 22 nt, Human
caccaugaccugggccuggggc

SEQ ID NO: 1190461 - RNA, 20 nt, Human
cacuacauaccuaucagaau

SEQ ID NO: 1190462 - RNA, 19 nt, Human
cacuauguugcccaggcug

SEQ ID NO: 1190463 - RNA, 24 nt, Human
cacuauguugcccaggcuggucuc

SEQ ID NO: 1190464 - RNA, 19 nt, Human
cacuccauuccagucggca

SEQ ID NO: 1190465 - RNA, 19 nt, Human
cacugcacuccagccuggg

SEQ ID NO: 1190466 - RNA, 20 nt, Human
cacugcacuccagccugggc

SEQ ID NO: 1190467 - RNA, 22 nt, Human
cacugcacuccagccugggcga

SEQ ID NO: 1190468 - RNA, 23 nt, Human
cacugcacuccagccugggcgac

SEQ ID NO: 1190469 - RNA, 24 nt, Human
cacugcacuccagccugggcgaca

SEQ ID NO: 1190470 - RNA, 26 nt, Human
cacugcacuccagccugggcgacaga

SEQ ID NO: 1190471 - RNA, 20 nt, Human
cacugcacuccagccugggg

SEQ ID NO: 1190472 - RNA, 23 nt, Human
cacuuaaggucaggaguucgaga

SEQ ID NO: 1190473 - RNA, 18 nt, Human
cagaaaccugagccuggc

SEQ ID NO: 1190474 - RNA, 24 nt, Human
cagcacuuugggaggccaaggugg

SEQ ID NO: 1190475 - RNA, 24 nt, Human
cagcuacuuggaaggcugaggcag

SEQ ID NO: 1190476 - RNA, 18 nt, Human
cagggugugguggugcag

SEQ ID NO: 1190477 - RNA, 19 nt, Human
caugagccauaaaagggaa

SEQ ID NO: 1190478 - RNA, 21 nt, Human
ccacacccaagggcuagacuc

SEQ ID NO: 1190479 - RNA, 20 nt, Human
ccacugcacuccagccuggg

SEQ ID NO: 1190480 - RNA, 21 nt, Human
ccacugcacuccagccugggc

SEQ ID NO: 1190481 - RNA, 19 nt, Human
ccacuguacccagcuugga

SEQ ID NO: 1190482 - RNA, 20 nt, Human
ccaugaccugggccuggggc

SEQ ID NO: 1190483 - RNA, 20 nt, Human
ccauggccucucuaagugcu

SEQ ID NO: 1190484 - RNA, 19 nt, Human
cccugcagaagcugacacu

SEQ ID NO: 1190485 - RNA, 24 nt, Human
ccucuaagcaccaugaccugggcc

SEQ ID NO: 1190486 - RNA, 19 nt, Human
ccugacaucaaggcaugag

SEQ ID NO: 1190487 - RNA, 22 nt, Human
ccugggcgacagaguaagacuc

SEQ ID NO: 1190488 - RNA, 22 nt, Human
ccuggucaacauugugaaaccc

SEQ ID NO: 1190489 - RNA, 24 nt, Human
ccuggucaacauugugaaacccug

SEQ ID NO: 1190490 - RNA, 21 nt, Human
ccuguagucccagcuacuugg

SEQ ID NO: 1190491 - RNA, 21 nt, Human
cgagaccagccuggucaacau

SEQ ID NO: 1190492 - RNA, 21 nt, Human
cgggaggccaagguugcagug

SEQ ID NO: 1190493 - RNA, 24 nt, Human
cgggaggccaagguugcagugagc

SEQ ID NO: 1190494 - RNA, 23 nt, Human
cgugaaugagcaccucccuacag

SEQ ID NO: 1190495 - RNA, 20 nt, Human
cuaagugcugggauuacagg

SEQ ID NO: 1190496 - RNA, 24 nt, Human
cuaagugcugggauuacaggugug

SEQ ID NO: 1190497 - RNA, 19 nt, Human
cucaagagauucucccacc

SEQ ID NO: 1190498 - RNA, 24 nt, Human
cucaagagauucucccaccauggc

SEQ ID NO: 1190499 - RNA, 20 nt, Human
cucacuccauuccagucggc

SEQ ID NO: 1190500 - RNA, 27 nt, Human
cucagaguaagaagggaggcaugagaa

SEQ ID NO: 1190501 - RNA, 19 nt, Human
cucccuacagcauccacac

SEQ ID NO: 1190502 - RNA, 19 nt, Human
cugcaacccuggcaccuag

SEQ ID NO: 1190503 - RNA, 31 nt, Human
cugcaccacugcacuccagccugggcgacaa

SEQ ID NO: 1190504 - RNA, 25 nt, Human
cuggaccuugucagaaccgaacaca

SEQ ID NO: 1190505 - RNA, 18 nt, Human
cuggggccgggcugugga

SEQ ID NO: 1190506 - RNA, 23 nt, Human
cuuccaguagaacaccacucacc

SEQ ID NO: 1190507 - RNA, 19 nt, Human
cuugaaaaaaaaaauggca

SEQ ID NO: 1190508 - RNA, 19 nt, Human
gaaaaaaaaaauggcaaaa

SEQ ID NO: 1190509 - RNA, 23 nt, Human
gacacgugaacugcaacccuggc

SEQ ID NO: 1190510 - RNA, 22 nt, Human
gaccuugucagaaccgaacaca

SEQ ID NO: 1190511 - RNA, 23 nt, Human
gagacugcaccacugcacuccag

SEQ ID NO: 1190512 - RNA, 21 nt, Human
gagcaccucccuacagcaucc

SEQ ID NO: 1190513 - RNA, 20 nt, Human
gaggaggaggaaaaggcaag

SEQ ID NO: 1190514 - RNA, 18 nt, Human
gaucacuuaaggucagga

SEQ ID NO: 1190515 - RNA, 24 nt, Human
gaucacuuaaggucaggaguucga

SEQ ID NO: 1190516 - RNA, 18 nt, Human
gauuacaggugugagcca

SEQ ID NO: 1190517 - RNA, 21 nt, Human
gauuacaggugugagccacug

SEQ ID NO: 1190518 - RNA, 24 nt, Human
gauuacaggugugagccacuguac

SEQ ID NO: 1190519 - RNA, 24 nt, Human
gcacuccagccugggcgacagagu

SEQ ID NO: 1190520 - RNA, 18 nt, Human
gccauaaaagggaaaaug

SEQ ID NO: 1190521 - RNA, 19 nt, Human
gcugguaaucccagcacuu

SEQ ID NO: 1190522 - RNA, 22 nt, Human
ggaaaccaaccugcugccgcca

SEQ ID NO: 1190523 - RNA, 22 nt, Human
ggaucacuuaaggucaggaguu

SEQ ID NO: 1190524 - RNA, 23 nt, Human
ggcgcaguggcuuaugcugguaa

SEQ ID NO: 1190525 - RNA, 21 nt, Human
gguggaucacuuaaggucagg

SEQ ID NO: 1190526 - RNA, 19 nt, Human
gguggcggggaggagagag

SEQ ID NO: 1190527 - RNA, 26 nt, Human
gucccacgugaaugagcaccucccua

SEQ ID NO: 1190528 - RNA, 19 nt, Human
guugcagugagcugagacu

SEQ ID NO: 1190529 - RNA, 22 nt, Human
guuugguucuggccuucaugcu

SEQ ID NO: 1190530 - RNA, 24 nt, Human
uaaaagacacaagacaucacuaca

SEQ ID NO: 1190531 - RNA, 24 nt, Human
uaaacuggaccuugucagaaccga

SEQ ID NO: 1190532 - RNA, 22 nt, Human
uaaaggcacagaaaugaaacug

SEQ ID NO: 1190533 - RNA, 23 nt, Human
uaaaggcacagaaaugaaacuga

SEQ ID NO: 1190534 - RNA, 24 nt, Human
uaagugcugggauuacagguguga

SEQ ID NO: 1190535 - RNA, 22 nt, Human
uacacauuugguguucaggacu

SEQ ID NO: 1190536 - RNA, 19 nt, Human
uacaggugugagccacugu

SEQ ID NO: 1190537 - RNA, 24 nt, Human
uacaggugugagccacuguaccca

SEQ ID NO: 1190538 - RNA, 22 nt, Human
uagagaugaggucucacuaugu

SEQ ID NO: 1190539 - RNA, 18 nt, Human
uagcagggugugguggug

SEQ ID NO: 1190540 - RNA, 21 nt, Human
uaucucaaauaugggaagggc

SEQ ID NO: 1190541 - RNA, 24 nt, Human
uaugcugguaaucccagcacuuug

SEQ ID NO: 1190542 - RNA, 19 nt, Human
uauguugcccaggcugguc

SEQ ID NO: 1190543 - RNA, 23 nt, Human
uauguugcccaggcuggucucga

SEQ ID NO: 1190544 - RNA, 24 nt, Human
uauguugcccaggcuggucucgaa

SEQ ID NO: 1190545 - RNA, 23 nt, Human
ucaaaggcuuauauauaaaggca

SEQ ID NO: 1190546 - RNA, 23 nt, Human
ucaccauaaaaaaaucaauuaga

SEQ ID NO: 1190547 - RNA, 30 nt, Human
ucacucacacugcuggcaggaauggaaauu

SEQ ID NO: 1190548 - RNA, 19 nt, Human
ucacuccauuccagucggc

SEQ ID NO: 1190549 - RNA, 19 nt, Human
uccacacccaagggcuaga

SEQ ID NO: 1190550 - RNA, 24 nt, Human
uccagccugggcgacagaguaaga

SEQ ID NO: 1190551 - RNA, 18 nt, Human
ucccuacagcauccacac

SEQ ID NO: 1190552 - RNA, 20 nt, Human
ucccugcugagugcgugggg

SEQ ID NO: 1190553 - RNA, 19 nt, Human
ucccuguuccacggaagau

SEQ ID NO: 1190554 - RNA, 20 nt, Human
uccugggcucaagagauucu

SEQ ID NO: 1190555 - RNA, 21 nt, Human
uccugggcucaagagauucuc

SEQ ID NO: 1190556 - RNA, 22 nt, Human
ucuaagugcugggauuacaggu

SEQ ID NO: 1190557 - RNA, 24 nt, Human
ucuaagugcugggauuacaggugu

SEQ ID NO: 1190558 - RNA, 21 nt, Human
ucucaaauaugggaagggcuc

SEQ ID NO: 1190559 - RNA, 18 nt, Human
ucucacuauguugcccag

SEQ ID NO: 1190560 - RNA, 19 nt, Human
ucucacuauguugcccagg

SEQ ID NO: 1190561 - RNA, 23 nt, Human
ucucacuauguugcccaggcugg

SEQ ID NO: 1190562 - RNA, 24 nt, Human
ucucacuauguugcccaggcuggu

SEQ ID NO: 1190563 - RNA, 26 nt, Human
ucucacuauguugcccaggcuggucu

SEQ ID NO: 1190564 - RNA, 27 nt, Human
ucucacuauguugcccaggcuggucuc

SEQ ID NO: 1190565 - RNA, 24 nt, Human
ucucacuccauuccagucggcaga

SEQ ID NO: 1190566 - RNA, 23 nt, Human
ucucuaagugcugggauuacagg

SEQ ID NO: 1190567 - RNA, 22 nt, Human
ucucuauuaaaaauacaaaaaa

SEQ ID NO: 1190568 - RNA, 20 nt, Human
ugacaaaggacuuguaucuc

SEQ ID NO: 1190569 - RNA, 21 nt, Human
ugacacgugaacugcaacccu

SEQ ID NO: 1190570 - RNA, 20 nt, Human
ugacaucaaggcaugagcca

SEQ ID NO: 1190571 - RNA, 24 nt, Human
ugaggaggaggaaaaggcaagcca

SEQ ID NO: 1190572 - RNA, 20 nt, Human
ugaggcaggagaaucgcuug

SEQ ID NO: 1190573 - RNA, 23 nt, Human
ugaggcaggagaaucgcuugaac

SEQ ID NO: 1190574 - RNA, 24 nt, Human
ugaggucucacuauguugcccagg

SEQ ID NO: 1190575 - RNA, 24 nt, Human
ugagugcgugggguggcggggagg

SEQ ID NO: 1190576 - RNA, 21 nt, Human
ugcaccacugcacuccagccu

SEQ ID NO: 1190577 - RNA, 27 nt, Human
ugcaccacugcacuccagccugggcga

SEQ ID NO: 1190578 - RNA, 24 nt, Human
ugcccaggcuggucucgaauuccu

SEQ ID NO: 1190579 - RNA, 21 nt, Human
ugcccugcagaagcugacacu

SEQ ID NO: 1190580 - RNA, 23 nt, Human
ugccuguagucccagcuacuugg

SEQ ID NO: 1190581 - RNA, 24 nt, Human
ugcugggauuacaggugugagcca

SEQ ID NO: 1190582 - RNA, 23 nt, Human
ugcugguaaucccagcacuuugg

SEQ ID NO: 1190583 - RNA, 24 nt, Human
ugcugguaaucccagcacuuuggg

SEQ ID NO: 1190584 - RNA, 23 nt, Human
ugcugugugugagggccuagagc

SEQ ID NO: 1190585 - RNA, 24 nt, Human
uggaagaaaauacuugcaaaucac

SEQ ID NO: 1190586 - RNA, 20 nt, Human
uggaaggcugaggcaggaga

SEQ ID NO: 1190587 - RNA, 23 nt, Human
uggaaggcugaggcaggagaauc

SEQ ID NO: 1190588 - RNA, 24 nt, Human
uggaucacuuaaggucaggaguuc

SEQ ID NO: 1190589 - RNA, 27 nt, Human
uggaucacuuaaggucaggaguucgag

SEQ ID NO: 1190590 - RNA, 18 nt, Human
uggcaggaauggaaauga

SEQ ID NO: 1190591 - RNA, 23 nt, Human
uggccgggcgcaguggcuuaugc

SEQ ID NO: 1190592 - RNA, 24 nt, Human
uggcuuaugcugguaaucccagca

SEQ ID NO: 1190593 - RNA, 23 nt, Human
ugggaggccaagguggguggauc

SEQ ID NO: 1190594 - RNA, 24 nt, Human
ugggaggccaagguggguggauca

SEQ ID NO: 1190595 - RNA, 18 nt, Human
ugggauuacaggugugag

SEQ ID NO: 1190596 - RNA, 21 nt, Human
ugggauuacaggugugagcca

SEQ ID NO: 1190597 - RNA, 22 nt, Human
ugggauuacaggugugagccac

SEQ ID NO: 1190598 - RNA, 22 nt, Human
ugggauuacaggugugagccac

SEQ ID NO: 1190599 - RNA, 22 nt, Human
ugggauuacaggugugagccac

SEQ ID NO: 1190600 - RNA, 24 nt, Human
ugggauuacaggugugagccacug

SEQ ID NO: 1190601 - RNA, 23 nt, Human
ugggguggcggggaggagagagc

SEQ ID NO: 1190602 - RNA, 24 nt, Human
uggguggaucacuuaaggucagga

SEQ ID NO: 1190603 - RNA, 18 nt, Human
uggugcaugccuguaguc

SEQ ID NO: 1190604 - RNA, 24 nt, Human
ugguggugcaugccuguaguccca

SEQ ID NO: 1190605 - RNA, 21 nt, Human
uguuuucuuucacucaccugu

SEQ ID NO: 1190606 - RNA, 19 nt, Human
uuagcagggugugguggug

SEQ ID NO: 1190607 - RNA, 24 nt, Human
uuagcagggugugguggugcaugc

SEQ ID NO: 1190608 - RNA, 22 nt, Human
uuaggagcauaccagaaaccug

SEQ ID NO: 1190609 - RNA, 23 nt, Human
uuccugggcucaagagauucucc

SEQ ID NO: 1190610 - RNA, 25 nt, Human
uuccugggcucaagagauucuccca

SEQ ID NO: 1190611 - RNA, 19 nt, Human
uugcagugagcugagacug

SEQ ID NO: 1190612 - RNA, 20 nt, Human
uugcagugagcugagacugc

SEQ ID NO: 1190613 - RNA, 22 nt, Human
uugcagugagcugagacugcac

SEQ ID NO: 1190614 - RNA, 24 nt, Human
uuggaaggcugaggcaggagaauc

SEQ ID NO: 1190615 - RNA, 22 nt, Human
aaaaagccaagugaugagcacc

SEQ ID NO: 1190616 - RNA, 27 nt, Human
aaaaagccaagugaugagcagugggca

SEQ ID NO: 1190617 - RNA, 23 nt, Human
aagcaaagucacacuggagucca

SEQ ID NO: 1190618 - RNA, 19 nt, Human
aaggcaggacaugcagaag

SEQ ID NO: 1190619 - RNA, 21 nt, Human
acacugaugaaauaggagugg

SEQ ID NO: 1190620 - RNA, 23 nt, Human
acacugaugaaauaggagugguc

SEQ ID NO: 1190621 - RNA, 23 nt, Human
accacgggagcucaccaaggcca

SEQ ID NO: 1190622 - RNA, 24 nt, Human
accucacuagcaaugaacacacca

SEQ ID NO: 1190623 - RNA, 19 nt, Human
agagaacaaccgcagcaca

SEQ ID NO: 1190624 - RNA, 23 nt, Human
agagcagucggcagacagcauga

SEQ ID NO: 1190625 - RNA, 24 nt, Human
agaguacagcauggagagggggac

SEQ ID NO: 1190626 - RNA, 18 nt, Human
agauccucaacacccagc

SEQ ID NO: 1190627 - RNA, 22 nt, Human
agccggcgcucggggaggcgca

SEQ ID NO: 1190628 - RNA, 20 nt, Human
agccucuuucugcuuguucu

SEQ ID NO: 1190629 - RNA, 20 nt, Human
agcugguccuggaauacccc

SEQ ID NO: 1190630 - RNA, 18 nt, Human
aggcauguucaaccucuu

SEQ ID NO: 1190631 - RNA, 19 nt, Human
augcagaagauaagccagg

SEQ ID NO: 1190632 - RNA, 22 nt, Human
caaaaagccaagugaugagcac

SEQ ID NO: 1190633 - RNA, 22 nt, Human
caagcucaagagcagucggcag

SEQ ID NO: 1190634 - RNA, 24 nt, Human
caaugaacacaccagugcccagau

SEQ ID NO: 1190635 - RNA, 23 nt, Human
cacaacccauaccccuaaguguc

SEQ ID NO: 1190636 - RNA, 21 nt, Human
caccucagccucugucucugc

SEQ ID NO: 1190637 - RNA, 20 nt, Human
cagagagccucuuucugcuu

SEQ ID NO: 1190638 - RNA, 22 nt, Human
cagcauggagagggggacuuca

SEQ ID NO: 1190639 - RNA, 20 nt, Human
cagcccaagcucaagagcag

SEQ ID NO: 1190640 - RNA, 22 nt, Human
caggaaaagaagcaaagucaca

SEQ ID NO: 1190641 - RNA, 19 nt, Human
caggacauuucccagucac

SEQ ID NO: 1190642 - RNA, 18 nt, Human
cagguugacaauaacacu

SEQ ID NO: 1190643 - RNA, 19 nt, Human
caguggcagggggccgggc

SEQ ID NO: 1190644 - RNA, 21 nt, Human
caguggcagggggccgggcag

SEQ ID NO: 1190645 - RNA, 25 nt, Human
caucuuuaguagcagaaauuaagga

SEQ ID NO: 1190646 - RNA, 23 nt, Human
ccaaccucgaagaagcugagcag

SEQ ID NO: 1190647 - RNA, 23 nt, Human
ccagagcuucuuggagaauugac

SEQ ID NO: 1190648 - RNA, 24 nt, Human
ccagcugguccuggaauacccccc

SEQ ID NO: 1190649 - RNA, 24 nt, Human
cccaaaaagccaagugaugagcac

SEQ ID NO: 1190650 - RNA, 24 nt, Human
cccaaccuuugccccccuaccagc

SEQ ID NO: 1190651 - RNA, 23 nt, Human
ccccaggcucguuugugaacccu

SEQ ID NO: 1190652 - RNA, 24 nt, Human
ccccccaggacauuucccagucac

SEQ ID NO: 1190653 - RNA, 24 nt, Human
ccucacuagcaaugaacacaccag

SEQ ID NO: 1190654 - RNA, 24 nt, Human
ccucagccucugucucugcacccc

SEQ ID NO: 1190655 - RNA, 18 nt, Human
ccuccccaggcugcugug

SEQ ID NO: 1190656 - RNA, 18 nt, Human
ccucugucucugcacccc

SEQ ID NO: 1190657 - RNA, 23 nt, Human
ccucugucucugcacccccaggc

SEQ ID NO: 1190658 - RNA, 18 nt, Human
ccucuuucugcuuguucu

SEQ ID NO: 1190659 - RNA, 22 nt, Human
cgacuacagccaccacugucag

SEQ ID NO: 1190660 - RNA, 21 nt, Human
cuagaagcaacaacaccucac

SEQ ID NO: 1190661 - RNA, 20 nt, Human
cucaagauccucaacacccu

SEQ ID NO: 1190662 - RNA, 18 nt, Human
cucaccagcacuacccua

SEQ ID NO: 1190663 - RNA, 20 nt, Human
cucaccagcacuacccuaga

SEQ ID NO: 1190664 - RNA, 20 nt, Human
cuccuccucggaaguggagc

SEQ ID NO: 1190665 - RNA, 22 nt, Human
cucuggaagccgccuccccagg

SEQ ID NO: 1190666 - RNA, 20 nt, Human
cuggcaguggcagggggccu

SEQ ID NO: 1190667 - RNA, 19 nt, Human
cuguaucuucaggagacca

SEQ ID NO: 1190668 - RNA, 22 nt, Human
gagcucaccaaggccaaccucg

SEQ ID NO: 1190669 - RNA, 21 nt, Human
gcaggacaugcagaagauaag

SEQ ID NO: 1190670 - RNA, 20 nt, Human
gccaaccucgaagaagcuga

SEQ ID NO: 1190671 - RNA, 20 nt, Human
gcccagaucccaggguggcc

SEQ ID NO: 1190672 - RNA, 23 nt, Human
gcccuagugccaucucaagaguc

SEQ ID NO: 1190673 - RNA, 20 nt, Human
gcugcugugggucuuugcug

SEQ ID NO: 1190674 - RNA, 21 nt, Human
gcuggggggcgcagccggcgc

SEQ ID NO: 1190675 - RNA, 19 nt, Human
gcugugggucuuugcuggg

SEQ ID NO: 1190676 - RNA, 18 nt, Human
ggcaggcgguaggccccg

SEQ ID NO: 1190677 - RNA, 19 nt, Human
gggcaaaggcaggacaugc

SEQ ID NO: 1190678 - RNA, 22 nt, Human
gggcaggcgguaggccccgggc

SEQ ID NO: 1190679 - RNA, 23 nt, Human
gguuuuguuuuuguaaacuuuca

SEQ ID NO: 1190680 - RNA, 20 nt, Human
gucgcagcacucuggaagcc

SEQ ID NO: 1190681 - RNA, 21 nt, Human
guggagcacaacccauacccc

SEQ ID NO: 1190682 - RNA, 24 nt, Human
guuaucuccucaccagcacuaccc

SEQ ID NO: 1190683 - RNA, 18 nt, Human
uaaagguuugccacuacu

SEQ ID NO: 1190684 - RNA, 23 nt, Human
uacuuuaagaaugugaauggggu

SEQ ID NO: 1190685 - RNA, 18 nt, Human
uagcuacuucuccuccuc

SEQ ID NO: 1190686 - RNA, 19 nt, Human
ucaacacccagcuuggggc

SEQ ID NO: 1190687 - RNA, 23 nt, Human
ucaagagucuguuaucuccucac

SEQ ID NO: 1190688 - RNA, 20 nt, Human
ucagagagccucuuucugcu

SEQ ID NO: 1190689 - RNA, 20 nt, Human
uccccaggcugcuguggguc

SEQ ID NO: 1190690 - RNA, 24 nt, Human
uccccauaguucaugacccaaccu

SEQ ID NO: 1190691 - RNA, 25 nt, Human
ucccugacccugccagguauucauc

SEQ ID NO: 1190692 - RNA, 22 nt, Human
uccucaccagcacuacccuaga

SEQ ID NO: 1190693 - RNA, 22 nt, Human
ucuagaagcaacaacaccucac

SEQ ID NO: 1190694 - RNA, 18 nt, Human
ucuguuaucuccucacca

SEQ ID NO: 1190695 - RNA, 21 nt, Human
ucuuucugcuuguucuucagg

SEQ ID NO: 1190696 - RNA, 23 nt, Human
ucuuugcugggucccacuagugu

SEQ ID NO: 1190697 - RNA, 23 nt, Human
ugaaauaggagugguccagagaa

SEQ ID NO: 1190698 - RNA, 18 nt, Human
ugaauuuucuucuccccu

SEQ ID NO: 1190699 - RNA, 18 nt, Human
ugacaauaacacugauga

SEQ ID NO: 1190700 - RNA, 21 nt, Human
ugagagagucuagaagcaaca

SEQ ID NO: 1190701 - RNA, 21 nt, Human
ugagcaccugucagaggcaca

SEQ ID NO: 1190702 - RNA, 24 nt, Human
ugaguaucccccccaggacauuuc

SEQ ID NO: 1190703 - RNA, 23 nt, Human
ugcugggucccacuaguguccag

SEQ ID NO: 1190704 - RNA, 22 nt, Human
uggaauagguaagccgucaggg

SEQ ID NO: 1190705 - RNA, 20 nt, Human
ugucucugcacccccaggca

SEQ ID NO: 1190706 - RNA, 23 nt, Human
ugugaaugggguuuuguuuuugu

SEQ ID NO: 1190707 - RNA, 26 nt, Human
uucaugacccaaccuuugccccccua

SEQ ID NO: 1190708 - RNA, 19 nt, Human
uuuguaaacuuucaauuac

SEQ ID NO: 1190709 - RNA, 18 nt, Human
aaagggccaaacagggug

SEQ ID NO: 1190710 - RNA, 21 nt, Human
aacacacugcagacgaggaca

SEQ ID NO: 1190711 - RNA, 19 nt, Human
aagaugaacacacugcaga

SEQ ID NO: 1190712 - RNA, 22 nt, Human
accaugacuggccuugucuucc

SEQ ID NO: 1190713 - RNA, 22 nt, Human
agaccagcggacccacgucaga

SEQ ID NO: 1190714 - RNA, 19 nt, Human
agcauggaaucccucccuc

SEQ ID NO: 1190715 - RNA, 22 nt, Human
agcucuuugucccgcaggagac

SEQ ID NO: 1190716 - RNA, 21 nt, Human
aggaaacccgacgcagagucc

SEQ ID NO: 1190717 - RNA, 22 nt, Human
caagagucacaaagggccaaac

SEQ ID NO: 1190718 - RNA, 18 nt, Human
cacacugcagacgaggaa

SEQ ID NO: 1190719 - RNA, 21 nt, Human
cauucgugucucaggcaggga

SEQ ID NO: 1190720 - RNA, 20 nt, Human
ccaaaagucgugacgcggug

SEQ ID NO: 1190721 - RNA, 28 nt, Human
ccucucgcugacgcccaaugucuucaac

SEQ ID NO: 1190722 - RNA, 24 nt, Human
ccucucuggacgguguuggugggg

SEQ ID NO: 1190723 - RNA, 20 nt, Human
cgagauccgugucgugauug

SEQ ID NO: 1190724 - RNA, 22 nt, Human
cgaggacacgagccccacagga

SEQ ID NO: 1190725 - RNA, 22 nt, Human
cgcccaaugucuucaacaaaga

SEQ ID NO: 1190726 - RNA, 22 nt, Human
cucaaugccucucgcugacgcc

SEQ ID NO: 1190727 - RNA, 24 nt, Human
cugagaaaugaagccacaccacaa

SEQ ID NO: 1190728 - RNA, 20 nt, Human
gaaagcagaaccccacagcc

SEQ ID NO: 1190729 - RNA, 23 nt, Human
gaacacacugcagacgaggacac

SEQ ID NO: 1190730 - RNA, 20 nt, Human
gaacagccucuuuucuagga

SEQ ID NO: 1190731 - RNA, 19 nt, Human
gacacgagccccacaggag

SEQ ID NO: 1190732 - RNA, 20 nt, Human
gauuguuucucucuccaaac

SEQ ID NO: 1190733 - RNA, 18 nt, Human
gcagaguccggagaaggc

SEQ ID NO: 1190734 - RNA, 21 nt, Human
gcccaaugucuucaacaaaga

SEQ ID NO: 1190735 - RNA, 18 nt, Human
ggcaggucgcaugaccug

SEQ ID NO: 1190736 - RNA, 20 nt, Human
gucgaaagcagaaccccaca

SEQ ID NO: 1190737 - RNA, 22 nt, Human
uagaaugagcgcuaggcgacca

SEQ ID NO: 1190738 - RNA, 20 nt, Human
ucccucaggccucucuggac

SEQ ID NO: 1190739 - RNA, 21 nt, Human
ucucucuccaaacguguuucu

SEQ ID NO: 1190740 - RNA, 19 nt, Human
ucugcuugauugggcaggu

SEQ ID NO: 1190741 - RNA, 20 nt, Human
ucuggacgguguuggugggg

SEQ ID NO: 1190742 - RNA, 23 nt, Human
ugagaaaugaagccacaccacaa

SEQ ID NO: 1190743 - RNA, 18 nt, Human
ugccaagagucacaaagg

SEQ ID NO: 1190744 - RNA, 26 nt, Human
ugccaagagucacaaagggccaaaca

SEQ ID NO: 1190745 - RNA, 18 nt, Human
uggguggguggauugccu

SEQ ID NO: 1190746 - RNA, 21 nt, Human
ugucuucaacaaagaugacuu

SEQ ID NO: 1190747 - RNA, 24 nt, Human
uucucgucgaaagcagaaccccac

SEQ ID NO: 1190748 - RNA, 21 nt, Human
uuggugggggugagucucccc

SEQ ID NO: 1190749 - RNA, 22 nt, Human
uuuucuaggaucaagaugaaca

SEQ ID NO: 1190750 - RNA, 19 nt, Human
aacagcaucugcaaaagau

SEQ ID NO: 1190751 - RNA, 19 nt, Human
aacuuucuucuaugaaggc

SEQ ID NO: 1190752 - RNA, 24 nt, Human
aaguagccaagcuauauuaaaaua

SEQ ID NO: 1190753 - RNA, 23 nt, Human
aauacuccuccuuuuuccaacua

SEQ ID NO: 1190754 - RNA, 19 nt, Human
aauuaaaauccauacaugc

SEQ ID NO: 1190755 - RNA, 20 nt, Human
acaugagagcuuugcagaaa

SEQ ID NO: 1190756 - RNA, 18 nt, Human
agacaugagagcuuugca

SEQ ID NO: 1190757 - RNA, 20 nt, Human
aggaagauauggggagggag

SEQ ID NO: 1190758 - RNA, 19 nt, Human
aggcacuuguauagagagc

SEQ ID NO: 1190759 - RNA, 18 nt, Human
caacuugugaaaagugcu

SEQ ID NO: 1190760 - RNA, 20 nt, Human
cagacuucuccagauacuuc

SEQ ID NO: 1190761 - RNA, 18 nt, Human
cccugcagaacauggaga

SEQ ID NO: 1190762 - RNA, 19 nt, Human
cuucugggaaagucaggga

SEQ ID NO: 1190763 - RNA, 24 nt, Human
cuuuuuauucauuguugcagaaau

SEQ ID NO: 1190764 - RNA, 19 nt, Human
gcagaacauggagaaggaa

SEQ ID NO: 1190765 - RNA, 22 nt, Human
ggaaagugucccuccaggaagu

SEQ ID NO: 1190766 - RNA, 19 nt, Human
ggaagauauggggagggag

SEQ ID NO: 1190767 - RNA, 23 nt, Human
guggaacagcaucugcaaaagau

SEQ ID NO: 1190768 - RNA, 21 nt, Human
uccaggaagauauggggaggg

SEQ ID NO: 1190769 - RNA, 25 nt, Human
ucuucuaugaaggcagacaugagag

SEQ ID NO: 1190770 - RNA, 19 nt, Human
uggaacagcaucugcaaaa

SEQ ID NO: 1190771 - RNA, 21 nt, Human
uggaacagcaucugcaaaaga

SEQ ID NO: 1190772 - RNA, 22 nt, Human
ugugaaaagugcuucaauuauc

SEQ ID NO: 1190773 - RNA, 24 nt, Human
agccauuaugcugucagcaaccuu

SEQ ID NO: 1190774 - RNA, 21 nt, Human
cacugcaucaugggagaaagc

SEQ ID NO: 1190775 - RNA, 21 nt, Human
caggaggaacugcaaccucac

SEQ ID NO: 1190776 - RNA, 21 nt, Human
ccuaaucaagaaaacaucagc

SEQ ID NO: 1190777 - RNA, 28 nt, Human
ccuaaucaagaaaacaucagcgguggcu

SEQ ID NO: 1190778 - RNA, 19 nt, Human
cgcaggcagucgauucucc

SEQ ID NO: 1190779 - RNA, 25 nt, Human
uaagacaccuaaucaagaaaacauc

SEQ ID NO: 1190780 - RNA, 18 nt, Human
uagauccagacgccagac

SEQ ID NO: 1190781 - RNA, 21 nt, Human
uaggccaauccuuaucacacu

SEQ ID NO: 1190782 - RNA, 19 nt, Human
ucgcaggcagucgauucuc

SEQ ID NO: 1190783 - RNA, 22 nt, Human
uggaagauaagacaccuaauca

SEQ ID NO: 1190784 - RNA, 19 nt, Human
aaaaaaacgacacaagcaa

SEQ ID NO: 1190785 - RNA, 23 nt, Human
aaaaaaacgacacaagcaaguca

SEQ ID NO: 1190786 - RNA, 19 nt, Human
aaaaggaaguggacuucaa

SEQ ID NO: 1190787 - RNA, 21 nt, Human
aaaaggaaguggacuucaagg

SEQ ID NO: 1190788 - RNA, 22 nt, Human
aaacaacaacgacaaaaauaag

SEQ ID NO: 1190789 - RNA, 20 nt, Human
aaacaacuaaaucacaauga

SEQ ID NO: 1190790 - RNA, 21 nt, Human
aaacaccgaguaacuggugug

SEQ ID NO: 1190791 - RNA, 26 nt, Human
aacaaacaaccaggacauguaccaaa

SEQ ID NO: 1190792 - RNA, 25 nt, Human
aacaaccaggacauguaccaaaaaa

SEQ ID NO: 1190793 - RNA, 18 nt, Human
aacuggugugagguuauu

SEQ ID NO: 1190794 - RNA, 23 nt, Human
aagcaccacagagugcuuggguc

SEQ ID NO: 1190795 - RNA, 18 nt, Human
aagggaacaaacaaccag

SEQ ID NO: 1190796 - RNA, 27 nt, Human
acaaccaggacauguaccaaaaaacaa

SEQ ID NO: 1190797 - RNA, 19 nt, Human
acaagcaagucaguuagaa

SEQ ID NO: 1190798 - RNA, 18 nt, Human
acagaucagauaauccca

SEQ ID NO: 1190799 - RNA, 22 nt, Human
acuuauuauuuucucuuccccc

SEQ ID NO: 1190800 - RNA, 19 nt, Human
aggaagagucuacagauca

SEQ ID NO: 1190801 - RNA, 18 nt, Human
aguagcugccccgccuuu

SEQ ID NO: 1190802 - RNA, 18 nt, Human
augaugucacaggucucu

SEQ ID NO: 1190803 - RNA, 24 nt, Human
augucauuuuuuugacaggugaug

SEQ ID NO: 1190804 - RNA, 22 nt, Human
caaaacauucacaggccauuga

SEQ ID NO: 1190805 - RNA, 24 nt, Human
caaaaugaacugaacaaagggaac

SEQ ID NO: 1190806 - RNA, 21 nt, Human
caacuaaaucacaaugacucu

SEQ ID NO: 1190807 - RNA, 19 nt, Human
caccaaacaacuaaaucac

SEQ ID NO: 1190808 - RNA, 22 nt, Human
caccacucuaugccaaaaccug

SEQ ID NO: 1190809 - RNA, 18 nt, Human
cagcugcugcacucugcu

SEQ ID NO: 1190810 - RNA, 21 nt, Human
cauuucagucuuaaugaaguc

SEQ ID NO: 1190811 - RNA, 21 nt, Human
ccaacaucugaauaagaaacu

SEQ ID NO: 1190812 - RNA, 22 nt, Human
ccacucuaugccaaaaccugga

SEQ ID NO: 1190813 - RNA, 18 nt, Human
ccagcagauaaugccuuc

SEQ ID NO: 1190814 - RNA, 20 nt, Human
ccaucaauuaaaaauagagu

SEQ ID NO: 1190815 - RNA, 21 nt, Human
ccauuccuguggccauuugau

SEQ ID NO: 1190816 - RNA, 21 nt, Human
cccaccgugggagcgcugggc

SEQ ID NO: 1190817 - RNA, 21 nt, Human
ccucccgggagagaguaaaca

SEQ ID NO: 1190818 - RNA, 19 nt, Human
ccuugcagcaugaaacugu

SEQ ID NO: 1190819 - RNA, 21 nt, Human
cgggagagaguaaacagcuuc

SEQ ID NO: 1190820 - RNA, 23 nt, Human
cuacuguuggggaaaaaaacgac

SEQ ID NO: 1190821 - RNA, 20 nt, Human
cuacuuagucucucaggcuu

SEQ ID NO: 1190822 - RNA, 21 nt, Human
cuagagugccauuuaaaaauu

SEQ ID NO: 1190823 - RNA, 21 nt, Human
cucacacaaguaggugcugaa

SEQ ID NO: 1190824 - RNA, 22 nt, Human
cugccccgccuuuccucacugu

SEQ ID NO: 1190825 - RNA, 19 nt, Human
cugggcacgucaguucaca

SEQ ID NO: 1190826 - RNA, 23 nt, Human
cuggucaccacucuaugccaaaa

SEQ ID NO: 1190827 - RNA, 19 nt, Human
cuugaaaugaggaaucuug

SEQ ID NO: 1190828 - RNA, 23 nt, Human
cuuggcaaaaugaacugaacaaa

SEQ ID NO: 1190829 - RNA, 18 nt, Human
cuugggucuugaucuuuc

SEQ ID NO: 1190830 - RNA, 18 nt, Human
cuuuccucuuuuccucuu

SEQ ID NO: 1190831 - RNA, 18 nt, Human
gaaagaauacaaagguua

SEQ ID NO: 1190832 - RNA, 18 nt, Human
gaaucucggguuuugcug

SEQ ID NO: 1190833 - RNA, 20 nt, Human
gagaucuccuaaaggucuga

SEQ ID NO: 1190834 - RNA, 20 nt, Human
gaggaaucuugaaggagaaa

SEQ ID NO: 1190835 - RNA, 20 nt, Human
gagugcuugggucuugaucu

SEQ ID NO: 1190836 - RNA, 19 nt, Human
gccauugaacuacuguugg

SEQ ID NO: 1190837 - RNA, 19 nt, Human
gccccgccuuuccucacug

SEQ ID NO: 1190838 - RNA, 18 nt, Human
guucuguaaacacuuggc

SEQ ID NO: 1190839 - RNA, 23 nt, Human
uaaaaggaaguggacuucaaggu

SEQ ID NO: 1190840 - RNA, 21 nt, Human
uaagaaaaaaaugcagucgga

SEQ ID NO: 1190841 - RNA, 23 nt, Human
uaauaugcaauacccaugccuug

SEQ ID NO: 1190842 - RNA, 18 nt, Human
uacagaucagauaauccc

SEQ ID NO: 1190843 - RNA, 20 nt, Human
uaccaaaaaacaacaacgac

SEQ ID NO: 1190844 - RNA, 21 nt, Human
uaccaaaaaacaacaacgaca

SEQ ID NO: 1190845 - RNA, 24 nt, Human
uaccaaaaaacaacaacgacaaaa

SEQ ID NO: 1190846 - RNA, 19 nt, Human
uaccaggagcuccaggcac

SEQ ID NO: 1190847 - RNA, 23 nt, Human
uaccaggagcuccaggcacagag

SEQ ID NO: 1190848 - RNA, 25 nt, Human
uagaacguguugaucugguugauaa

SEQ ID NO: 1190849 - RNA, 24 nt, Human
uagagugccauuuaaaaauugaaa

SEQ ID NO: 1190850 - RNA, 21 nt, Human
uaggaagagucuacagaucag

SEQ ID NO: 1190851 - RNA, 18 nt, Human
uaggagaaacugauuccu

SEQ ID NO: 1190852 - RNA, 19 nt, Human
uaguagcugccccgccuuu

SEQ ID NO: 1190853 - RNA, 25 nt, Human
uaucucacacaaguaggugcugaau

SEQ ID NO: 1190854 - RNA, 26 nt, Human
uauuauuuucucuuccccccaugagc

SEQ ID NO: 1190855 - RNA, 23 nt, Human
uauuuugccauuccuguggccau

SEQ ID NO: 1190856 - RNA, 21 nt, Human
ucacaggccauugaacuacca

SEQ ID NO: 1190857 - RNA, 20 nt, Human
ucauaaucuuucuaauggau

SEQ ID NO: 1190858 - RNA, 22 nt, Human
uccaaagagauguggauguccu

SEQ ID NO: 1190859 - RNA, 23 nt, Human
uccauuaccaggagcuccaggca

SEQ ID NO: 1190860 - RNA, 21 nt, Human
ucccgggagagaguaaacagc

SEQ ID NO: 1190861 - RNA, 20 nt, Human
uccucuucacuuccccuccu

SEQ ID NO: 1190862 - RNA, 19 nt, Human
ucuaagaaaaaaaugcagu

SEQ ID NO: 1190863 - RNA, 22 nt, Human
ucuaugccaaaaccuggaagag

SEQ ID NO: 1190864 - RNA, 19 nt, Human
ucuccagauucaaacaccg

SEQ ID NO: 1190865 - RNA, 19 nt, Human
ucuguaaacacuuggcaaa

SEQ ID NO: 1190866 - RNA, 18 nt, Human
ucuguauuuuagggagaa

SEQ ID NO: 1190867 - RNA, 22 nt, Human
ugaaacugugugguuccuucug

SEQ ID NO: 1190868 - RNA, 23 nt, Human
ugaacaaagggaacaaacaacca

SEQ ID NO: 1190869 - RNA, 25 nt, Human
ugaaggagaaaauauucuuaacagc

SEQ ID NO: 1190870 - RNA, 22 nt, Human
ugacuugagagggaaaaaaaaa

SEQ ID NO: 1190871 - RNA, 22 nt, Human
ugagcaauucaccaaacaacua

SEQ ID NO: 1190872 - RNA, 21 nt, Human
ugagcauggaagcaccacaga

SEQ ID NO: 1190873 - RNA, 20 nt, Human
ugcaauacccaugccuugau

SEQ ID NO: 1190874 - RNA, 21 nt, Human
uggaaucucggguuuugcugu

SEQ ID NO: 1190875 - RNA, 22 nt, Human
uggacuucaagguguaagucac

SEQ ID NO: 1190876 - RNA, 20 nt, Human
ugggucaguaauaugugacu

SEQ ID NO: 1190877 - RNA, 19 nt, Human
ugggucuugaucuuuccug

SEQ ID NO: 1190878 - RNA, 19 nt, Human
uggguguucuguaaacacu

SEQ ID NO: 1190879 - RNA, 21 nt, Human
uuaguaccuguccaacaucug

SEQ ID NO: 1190880 - RNA, 26 nt, Human
uucaccaaacaacuaaaucacaauga

SEQ ID NO: 1190881 - RNA, 24 nt, Human
uucaucauauuuaugacuaguuga

SEQ ID NO: 1190882 - RNA, 21 nt, Human
agcccguagccucuuaggcac

SEQ ID NO: 1190883 - RNA, 21 nt, Human
aggcagcugcugcgaggcuug

SEQ ID NO: 1190884 - RNA, 27 nt, Human
caacgcgacucacugcgccgggcucua

SEQ ID NO: 1190885 - RNA, 20 nt, Human
ccagcccguugagaguuugc

SEQ ID NO: 1190886 - RNA, 18 nt, Human
cuggguggaggaaugagc

SEQ ID NO: 1190887 - RNA, 19 nt, Human
gcagcugcugcgaggcuug

SEQ ID NO: 1190888 - RNA, 21 nt, Human
uagcugccagcccguagccuc

SEQ ID NO: 1190889 - RNA, 25 nt, Human
ugccagcccguagccucuuaggcac

SEQ ID NO: 1190890 - RNA, 24 nt, Human
uggguggaggaaugagcagggggc

SEQ ID NO: 1190891 - RNA, 21 nt, Human
aaacagauaagguaaguagac

SEQ ID NO: 1190892 - RNA, 20 nt, Human
aagcagcugggacuacaggc

SEQ ID NO: 1190893 - RNA, 25 nt, Human
aagcagcugggacuacaggcaccug

SEQ ID NO: 1190894 - RNA, 21 nt, Human
aaguaaauauauuuauaugga

SEQ ID NO: 1190895 - RNA, 21 nt, Human
aaugcaguggcgcaaucucag

SEQ ID NO: 1190896 - RNA, 22 nt, Human
aauuacuuggugcucagugucu

SEQ ID NO: 1190897 - RNA, 21 nt, Human
acaggcaccugccaccaugcc

SEQ ID NO: 1190898 - RNA, 19 nt, Human
acaggguuucaccguguca

SEQ ID NO: 1190899 - RNA, 20 nt, Human
acaggguuucaccgugucag

SEQ ID NO: 1190900 - RNA, 24 nt, Human
acaggguuucaccgugucagccag

SEQ ID NO: 1190901 - RNA, 19 nt, Human
acauauauacuccauuccu

SEQ ID NO: 1190902 - RNA, 26 nt, Human
acuacaggcaccugccaccaugccag

SEQ ID NO: 1190903 - RNA, 18 nt, Human
agacaggguuucaccgug

SEQ ID NO: 1190904 - RNA, 20 nt, Human
aguagagacaggguuucacc

SEQ ID NO: 1190905 - RNA, 22 nt, Human
agucauuuugucauuucuuugu

SEQ ID NO: 1190906 - RNA, 23 nt, Human
auccucucugaaggaaauuguug

SEQ ID NO: 1190907 - RNA, 20 nt, Human
caaagugcuaggauaccaug

SEQ ID NO: 1190908 - RNA, 18 nt, Human
caccgugucagccaggau

SEQ ID NO: 1190909 - RNA, 24 nt, Human
caccgugucagccaggauggucuc

SEQ ID NO: 1190910 - RNA, 27 nt, Human
cagcugggacuacaggcaccugccaac

SEQ ID NO: 1190911 - RNA, 24 nt, Human
caggguuucaccgugucagccagg

SEQ ID NO: 1190912 - RNA, 20 nt, Human
ccaaagugcuaggauaccau

SEQ ID NO: 1190913 - RNA, 23 nt, Human
ccaccuagucauuuugucauuuc

SEQ ID NO: 1190914 - RNA, 21 nt, Human
cccaaagugcuaggauaccau

SEQ ID NO: 1190915 - RNA, 24 nt, Human
cccaagcagcugggacuacaggca

SEQ ID NO: 1190916 - RNA, 22 nt, Human
ccucagccucccaagcagcugg

SEQ ID NO: 1190917 - RNA, 22 nt, Human
cuaaaacaagugcuguaagaac

SEQ ID NO: 1190918 - RNA, 23 nt, Human
cuaacauauauacuccauuccua

SEQ ID NO: 1190919 - RNA, 19 nt, Human
cuccuuccucagccuccca

SEQ ID NO: 1190920 - RNA, 20 nt, Human
cucugucacccaggcuggaa

SEQ ID NO: 1190921 - RNA, 24 nt, Human
cucuugaccucgugaucugcccgc

SEQ ID NO: 1190922 - RNA, 21 nt, Human
cuugaaagauagagauggugg

SEQ ID NO: 1190923 - RNA, 20 nt, Human
cuuuguuuacuuccugccuc

SEQ ID NO: 1190924 - RNA, 22 nt, Human
gaccucgugaucugcccgccuc

SEQ ID NO: 1190925 - RNA, 24 nt, Human
gaccucgugaucugcccgccucgg

SEQ ID NO: 1190926 - RNA, 24 nt, Human
gacuacaggcaccugccaccaugc

SEQ ID NO: 1190927 - RNA, 22 nt, Human
gaugguguuuuccuaaggagua

SEQ ID NO: 1190928 - RNA, 19 nt, Human
gauucaagccauucuccuu

SEQ ID NO: 1190929 - RNA, 21 nt, Human
gccucccaagcagcugggacu

SEQ ID NO: 1190930 - RNA, 23 nt, Human
gccucggccucccaaagugcuag

SEQ ID NO: 1190931 - RNA, 25 nt, Human
gcucugucacccaggcuggaaugca

SEQ ID NO: 1190932 - RNA, 19 nt, Human
gcuggaaugcaguggcgca

SEQ ID NO: 1190933 - RNA, 21 nt, Human
gucucuuuguuuacuuccugg

SEQ ID NO: 1190934 - RNA, 24 nt, Human
gugaucugcccgccucggccuccc

SEQ ID NO: 1190935 - RNA, 19 nt, Human
guguuuuauaaaggcuguu

SEQ ID NO: 1190936 - RNA, 22 nt, Human
uaaaaacagauaagguaaguag

SEQ ID NO: 1190937 - RNA, 27 nt, Human
uaauuuuuuuuguauuuuuaguagaga

SEQ ID NO: 1190938 - RNA, 22 nt, Human
uagagacaggguuucaccgugu

SEQ ID NO: 1190939 - RNA, 21 nt, Human
uaguagagacaggguuucacc

SEQ ID NO: 1190940 - RNA, 24 nt, Human
uaguagagacaggguuucaccgug

SEQ ID NO: 1190941 - RNA, 25 nt, Human
uaguagagacaggguuucaccgugu

SEQ ID NO: 1190942 - RNA, 20 nt, Human
uauaaaaacagauaagguaa

SEQ ID NO: 1190943 - RNA, 23 nt, Human
uauauacuccauuccuacucagg

SEQ ID NO: 1190944 - RNA, 19 nt, Human
uaucuaaccucaugaaaca

SEQ ID NO: 1190945 - RNA, 19 nt, Human
uaucuaaccucaugaaaca

SEQ ID NO: 1190946 - RNA, 25 nt, Human
ucaagccauucuccuuccucagccu

SEQ ID NO: 1190947 - RNA, 19 nt, Human
ucacccaggcuggaaugca

SEQ ID NO: 1190948 - RNA, 24 nt, Human
ucaccgugucagccaggauggucu

SEQ ID NO: 1190949 - RNA, 18 nt, Human
ucacugcaagcucugccg

SEQ ID NO: 1190950 - RNA, 21 nt, Human
ucacugcaagcucugccgccc

SEQ ID NO: 1190951 - RNA, 23 nt, Human
ucacugcaagcucugccgcccgg

SEQ ID NO: 1190952 - RNA, 18 nt, Human
ucagccucccaagcagcu

SEQ ID NO: 1190953 - RNA, 20 nt, Human
ucagccucccaagcagcugg

SEQ ID NO: 1190954 - RNA, 25 nt, Human
ucagcuaaaacaagugcuguaagaa

SEQ ID NO: 1190955 - RNA, 23 nt, Human
ucagugucucuuuguuuacuucc

SEQ ID NO: 1190956 - RNA, 21 nt, Human
uccaaagauacucaagcccac

SEQ ID NO: 1190957 - RNA, 23 nt, Human
ucccaaagugcuaggauaccaug

SEQ ID NO: 1190958 - RNA, 25 nt, Human
ucccaaagugcuaggauaccauggc

SEQ ID NO: 1190959 - RNA, 22 nt, Human
ucccaaagugcuaggauaccuc

SEQ ID NO: 1190960 - RNA, 24 nt, Human
ucccaagcagcugggacuacaggc

SEQ ID NO: 1190961 - RNA, 18 nt, Human
ucggccucccaaagugcu

SEQ ID NO: 1190962 - RNA, 19 nt, Human
ucucgcucugucacccagg

SEQ ID NO: 1190963 - RNA, 23 nt, Human
ucucgcucugucacccaggcugg

SEQ ID NO: 1190964 - RNA, 24 nt, Human
ucucgcucugucacccaggcugga

SEQ ID NO: 1190965 - RNA, 26 nt, Human
ucucgcucugucacccaggcuggaau

SEQ ID NO: 1190966 - RNA, 27 nt, Human
ucucgcucugucacccaggcuggaaug

SEQ ID NO: 1190967 - RNA, 21 nt, Human
ucugccgcccggauucaagcc

SEQ ID NO: 1190968 - RNA, 24 nt, Human
ucugucacccaggcuggaaugcag

SEQ ID NO: 1190969 - RNA, 19 nt, Human
ucuuuguuuacuuccugcc

SEQ ID NO: 1190970 - RNA, 22 nt, Human
ugagaugaauaauuaagucuug

SEQ ID NO: 1190971 - RNA, 22 nt, Human
ugagauggagucucgcucuguc

SEQ ID NO: 1190972 - RNA, 22 nt, Human
ugcaguggcgcaaucucagcuc

SEQ ID NO: 1190973 - RNA, 23 nt, Human
ugcaguggcgcaaucucagcuca

SEQ ID NO: 1190974 - RNA, 23 nt, Human
ugccaggcuaauuuuuuuuguau

SEQ ID NO: 1190975 - RNA, 25 nt, Human
ugcucagugucucuuuggucugagg

SEQ ID NO: 1190976 - RNA, 20 nt, Human
ugcuguaagaaccauguugg

SEQ ID NO: 1190977 - RNA, 18 nt, Human
uggaaugcaguggcgcaa

SEQ ID NO: 1190978 - RNA, 19 nt, Human
uggaaugcaguggcgcaau

SEQ ID NO: 1190979 - RNA, 20 nt, Human
uggacaguaucuaaccucau

SEQ ID NO: 1190980 - RNA, 24 nt, Human
uggcgcaaucucagcucacugcaa

SEQ ID NO: 1190981 - RNA, 21 nt, Human
ugggacuacaggcaccugcca

SEQ ID NO: 1190982 - RNA, 22 nt, Human
ugggacuacaggcaccugccac

SEQ ID NO: 1190983 - RNA, 24 nt, Human
ugggacuacaggcaccugccacca

SEQ ID NO: 1190984 - RNA, 25 nt, Human
ugggacuacaggcaccugccaccau

SEQ ID NO: 1190985 - RNA, 26 nt, Human
ugggcucuauaaaaacagauaaggua

SEQ ID NO: 1190986 - RNA, 22 nt, Human
ugugauaacucaguggucaagg

SEQ ID NO: 1190987 - RNA, 19 nt, Human
uguguaauuauaaaaaauu

SEQ ID NO: 1190988 - RNA, 22 nt, Human
uuaguagagacaggguuucacc

SEQ ID NO: 1190989 - RNA, 24 nt, Human
uuaguagagacaggguuucaccgu

SEQ ID NO: 1190990 - RNA, 22 nt, Human
uuuuguauuuuuaguagagaca

SEQ ID NO: 1190991 - RNA, 30 nt, Human
uuuuguuuauuagaaguguuuuaauuuuuu

SEQ ID NO: 1190992 - RNA, 24 nt, Human
uuuuuaguagagacaggguuucac

SEQ ID NO: 1190993 - RNA, 21 nt, Human
uuuuuguauuuuuaguagaga

SEQ ID NO: 1190994 - RNA, 21 nt, Human
uuuuuuguauuuuuaguagag

SEQ ID NO: 1190995 - RNA, 18 nt, Human
acauuuuugccagaugac

SEQ ID NO: 1190996 - RNA, 19 nt, Human
agccacucuccucucagcc

SEQ ID NO: 1190997 - RNA, 21 nt, Human
auaggagccuugaauacagcg

SEQ ID NO: 1190998 - RNA, 24 nt, Human
caaaagcacccuggccggagcggu

SEQ ID NO: 1190999 - RNA, 20 nt, Human
cacagcucugccaguacccc

SEQ ID NO: 1191000 - RNA, 21 nt, Human
cacagcucugccaguacccca

SEQ ID NO: 1191001 - RNA, 21 nt, Human
cccggcugcugcccccaggaa

SEQ ID NO: 1191002 - RNA, 22 nt, Human
ccucucagcccggcugcugccc

SEQ ID NO: 1191003 - RNA, 21 nt, Human
ccugcuaauucacuggcagcg

SEQ ID NO: 1191004 - RNA, 23 nt, Human
cgagccacagcucugccaguacc

SEQ ID NO: 1191005 - RNA, 21 nt, Human
cuggcagcguagggcugucug

SEQ ID NO: 1191006 - RNA, 25 nt, Human
gaauaggagccuugaauacagcggg

SEQ ID NO: 1191007 - RNA, 18 nt, Human
gacauuuuugccagauga

SEQ ID NO: 1191008 - RNA, 18 nt, Human
gaguagacagccacucuc

SEQ ID NO: 1191009 - RNA, 24 nt, Human
gccauggcggagagaguagacagc

SEQ ID NO: 1191010 - RNA, 19 nt, Human
gcugucuguuguuuuugcg

SEQ ID NO: 1191011 - RNA, 20 nt, Human
ggaguacagcgacaucagug

SEQ ID NO: 1191012 - RNA, 18 nt, Human
ggccggagcggugagucc

SEQ ID NO: 1191013 - RNA, 19 nt, Human
gugcugguccgaugaccug

SEQ ID NO: 1191014 - RNA, 25 nt, Human
uacagcgacaucagugggcggacac

SEQ ID NO: 1191015 - RNA, 20 nt, Human
ucacugccuguauaaucagg

SEQ ID NO: 1191016 - RNA, 21 nt, Human
uccaaaagcacccuggccgga

SEQ ID NO: 1191017 - RNA, 22 nt, Human
ugccaguaccccaagacucagu

SEQ ID NO: 1191018 - RNA, 19 nt, Human
acaaacaaucccacagcau

SEQ ID NO: 1191019 - RNA, 19 nt, Human
acgucuaaaaacaaacugu

SEQ ID NO: 1191020 - RNA, 23 nt, Human
auaaauguucauauuggacaaag

SEQ ID NO: 1191021 - RNA, 21 nt, Human
auacaaacaaucccacagcau

SEQ ID NO: 1191022 - RNA, 22 nt, Human
caaaggacgucuaaaaacaaag

SEQ ID NO: 1191023 - RNA, 21 nt, Human
cucaacaauuucucacuucau

SEQ ID NO: 1191024 - RNA, 24 nt, Human
gacgucuaaaaacaaacuguaucc

SEQ ID NO: 1191025 - RNA, 24 nt, Human
uaaaaacaaacuguauccuucuca

SEQ ID NO: 1191026 - RNA, 25 nt, Human
uaaaaacaaacuguauccuucucaa

SEQ ID NO: 1191027 - RNA, 18 nt, Human
uaaaaacauaaguguaau

SEQ ID NO: 1191028 - RNA, 25 nt, Human
uaaaaacauaaguguaaucaaaaca

SEQ ID NO: 1191029 - RNA, 19 nt, Human
uaaguguaaucaaaacaau

SEQ ID NO: 1191030 - RNA, 22 nt, Human
uggaauuucacaaagagcacac

SEQ ID NO: 1191031 - RNA, 21 nt, Human
acacauacacaaaaauuugua

SEQ ID NO: 1191032 - RNA, 29 nt, Human
acacgcacauacacacauacacaaaaauu

SEQ ID NO: 1191033 - RNA, 20 nt, Human
acauacacacauacacaaaa

SEQ ID NO: 1191034 - RNA, 23 nt, Human
accuuaaaaaaaaacacacauua

SEQ ID NO: 1191035 - RNA, 20 nt, Human
acuccaugaaugugaagaau

SEQ ID NO: 1191036 - RNA, 22 nt, Human
aucacacgcacauacacacaua

SEQ ID NO: 1191037 - RNA, 21 nt, Human
auugcacuccaugaaugugaa

SEQ ID NO: 1191038 - RNA, 20 nt, Human
caacagauuuaacagacauc

SEQ ID NO: 1191039 - RNA, 19 nt, Human
cacaacagauuuaacagac

SEQ ID NO: 1191040 - RNA, 24 nt, Human
cacacauacacaaaaauuuguaga

SEQ ID NO: 1191041 - RNA, 18 nt, Human
cacccagauuggccgagg

SEQ ID NO: 1191042 - RNA, 19 nt, Human
cacgccacccagauuggcc

SEQ ID NO: 1191043 - RNA, 21 nt, Human
cagcacggaaaagcuaucuug

SEQ ID NO: 1191044 - RNA, 22 nt, Human
caguugguuuuuuuaguaguuc

SEQ ID NO: 1191045 - RNA, 24 nt, Human
cauugagguuuuccaagagguaca

SEQ ID NO: 1191046 - RNA, 19 nt, Human
cccauaaucuugcaucugc

SEQ ID NO: 1191047 - RNA, 19 nt, Human
ccccauaaucuugcaucug

SEQ ID NO: 1191048 - RNA, 21 nt, Human
ccccauaaucuugcaucugcu

SEQ ID NO: 1191049 - RNA, 18 nt, Human
cccccauaaucuugcauc

SEQ ID NO: 1191050 - RNA, 28 nt, Human
cggaccaucacagacaccgguuaaagag

SEQ ID NO: 1191051 - RNA, 22 nt, Human
cuauacaguauuauugcacucc

SEQ ID NO: 1191052 - RNA, 23 nt, Human
gaauuuuaaacuauaaaaaacaa

SEQ ID NO: 1191053 - RNA, 21 nt, Human
gacuaaggaaaaaaguuacaa

SEQ ID NO: 1191054 - RNA, 21 nt, Human
gcacaacagauuuaacagaca

SEQ ID NO: 1191055 - RNA, 22 nt, Human
gcacaacagauuuaacagacau

SEQ ID NO: 1191056 - RNA, 24 nt, Human
gcacauacacacauacacaaaaau

SEQ ID NO: 1191057 - RNA, 19 nt, Human
gcaucugcuguauuuugua

SEQ ID NO: 1191058 - RNA, 22 nt, Human
gccucgcuccggaccaucacag

SEQ ID NO: 1191059 - RNA, 24 nt, Human
gcuccggaccaucacagacaccgc

SEQ ID NO: 1191060 - RNA, 22 nt, Human
uaacagacaucuuuggaaaaaa

SEQ ID NO: 1191061 - RNA, 24 nt, Human
uacacacauacacaaaaauuugua

SEQ ID NO: 1191062 - RNA, 23 nt, Human
uauaaaguauuugggaacuucaa

SEQ ID NO: 1191063 - RNA, 24 nt, Human
uauacaguauuauugcacuccaug

SEQ ID NO: 1191064 - RNA, 20 nt, Human
uauauaaacuggacauggcc

SEQ ID NO: 1191065 - RNA, 21 nt, Human
uauugcacuccaugaauguga

SEQ ID NO: 1191066 - RNA, 25 nt, Human
ucacacgcacauacacacauacaca

SEQ ID NO: 1191067 - RNA, 18 nt, Human
ucgcugggcacgccaccc

SEQ ID NO: 1191068 - RNA, 18 nt, Human
ugaacuacacaauaggau

SEQ ID NO: 1191069 - RNA, 24 nt, Human
uggaaugaucccuuaaugcaaaag

SEQ ID NO: 1191070 - RNA, 19 nt, Human
uggggaaagcuauacagua

SEQ ID NO: 1191071 - RNA, 23 nt, Human
ugguaaucacacgcacauacaca

SEQ ID NO: 1191072 - RNA, 19 nt, Human
ugugggggguggggaaagc

SEQ ID NO: 1191073 - RNA, 23 nt, Human
uugcauugagguuuuccaagagg

SEQ ID NO: 1191074 - RNA, 19 nt, Human
uugggaacuucaacuggau

SEQ ID NO: 1191075 - RNA, 19 nt, Human
aagaagaaagacagaaugg

SEQ ID NO: 1191076 - RNA, 21 nt, Human
agaaagacagaauggugucag

SEQ ID NO: 1191077 - RNA, 22 nt, Human
aggggguggaugauaagaagaa

SEQ ID NO: 1191078 - RNA, 19 nt, Human
gaagaaagacagaauggug

SEQ ID NO: 1191079 - RNA, 20 nt, Human
ggggauugggauaauuggag

SEQ ID NO: 1191080 - RNA, 22 nt, Human
uagauuuuugacuuucuagucu

SEQ ID NO: 1191081 - RNA, 20 nt, Human
uggaugauaagaagaaagac

SEQ ID NO: 1191082 - RNA, 21 nt, Human
ugggauggaauuuuguuuuuu

SEQ ID NO: 1191083 - RNA, 21 nt, Human
uuuguuuuuuugagaggggau

SEQ ID NO: 1191084 - RNA, 20 nt, Human
aaacaggaugcuauugcugg

SEQ ID NO: 1191085 - RNA, 22 nt, Human
aaagacaggcgauauaaaauca

SEQ ID NO: 1191086 - RNA, 25 nt, Human
acagcacaaugucacuuuucaaaac

SEQ ID NO: 1191087 - RNA, 18 nt, Human
acagguaacuaagaugaa

SEQ ID NO: 1191088 - RNA, 26 nt, Human
agaaagacaggcgauauaaaaucaga

SEQ ID NO: 1191089 - RNA, 22 nt, Human
agacaggcgauauaaaaucaga

SEQ ID NO: 1191090 - RNA, 18 nt, Human
agagaaagacaggcgaua

SEQ ID NO: 1191091 - RNA, 20 nt, Human
agagcaucugaaauccacga

SEQ ID NO: 1191092 - RNA, 18 nt, Human
agcagagcagaggcaugc

SEQ ID NO: 1191093 - RNA, 19 nt, Human
aucagaguuuagagccugg

SEQ ID NO: 1191094 - RNA, 24 nt, Human
aucaucaggccaaagucaggaaaa

SEQ ID NO: 1191095 - RNA, 23 nt, Human
caucugaaauccacgacagguaa

SEQ ID NO: 1191096 - RNA, 20 nt, Human
cauuucuuucuccaugggcu

SEQ ID NO: 1191097 - RNA, 20 nt, Human
ccuaugagaaugagagcaaa

SEQ ID NO: 1191098 - RNA, 20 nt, Human
cuaagaugaaaagcaacagc

SEQ ID NO: 1191099 - RNA, 18 nt, Human
cucaagggacugccagcu

SEQ ID NO: 1191100 - RNA, 21 nt, Human
cucaagggacugccagcuucu

SEQ ID NO: 1191101 - RNA, 19 nt, Human
cucugugcuggaccgcaac

SEQ ID NO: 1191102 - RNA, 22 nt, Human
gagaaagacaggcgauauaaaa

SEQ ID NO: 1191103 - RNA, 19 nt, Human
gccuaagccugguguagaa

SEQ ID NO: 1191104 - RNA, 23 nt, Human
gccuugaaggacggagaggaugu

SEQ ID NO: 1191105 - RNA, 21 nt, Human
ggaagcauaaauacuaccaga

SEQ ID NO: 1191106 - RNA, 19 nt, Human
ggauaccauuugguugaaa

SEQ ID NO: 1191107 - RNA, 20 nt, Human
gguagaggaagcauaaauac

SEQ ID NO: 1191108 - RNA, 23 nt, Human
gucaugaaagccuaagccuggug

SEQ ID NO: 1191109 - RNA, 19 nt, Human
uaccagagaaagacaggcg

SEQ ID NO: 1191110 - RNA, 21 nt, Human
uaccagagaaagacaggcgau

SEQ ID NO: 1191111 - RNA, 23 nt, Human
uagagcccuggccaaugaaaaaa

SEQ ID NO: 1191112 - RNA, 30 nt, Human
uagagccuggagagaugacaucagcugggg

SEQ ID NO: 1191113 - RNA, 20 nt, Human
uagaggcaagucaugaaagg

SEQ ID NO: 1191114 - RNA, 23 nt, Human
uagugaaaguauguuuuauucac

SEQ ID NO: 1191115 - RNA, 19 nt, Human
ucagcugggggaucaggaa

SEQ ID NO: 1191116 - RNA, 21 nt, Human
ugaaaaaaccagcaacuugag

SEQ ID NO: 1191117 - RNA, 21 nt, Human
ugaaaagcaacagcacaaugu

SEQ ID NO: 1191118 - RNA, 18 nt, Human
ugccuaucaagugugaaa

SEQ ID NO: 1191119 - RNA, 19 nt, Human
uguagaacagagcaucuga

SEQ ID NO: 1191120 - RNA, 25 nt, Human
aaaaagaauugccucuuucuguaga

SEQ ID NO: 1191121 - RNA, 19 nt, Human
aaaaagaccaggacaugaa

SEQ ID NO: 1191122 - RNA, 25 nt, Human
aaaagaccaggacaugaaagggaau

SEQ ID NO: 1191123 - RNA, 23 nt, Human
aaacuacauuuucauaugcacau

SEQ ID NO: 1191124 - RNA, 21 nt, Human
aaagacucucgaaucuaagca

SEQ ID NO: 1191125 - RNA, 20 nt, Human
aaaugucccucuggggcucc

SEQ ID NO: 1191126 - RNA, 18 nt, Human
aaccuuugcuaacugcaa

SEQ ID NO: 1191127 - RNA, 21 nt, Human
aacugucaccucuaccuuccc

SEQ ID NO: 1191128 - RNA, 18 nt, Human
aagagaaaagggaaaccc

SEQ ID NO: 1191129 - RNA, 21 nt, Human
aagagaaacacugagaagcaa

SEQ ID NO: 1191130 - RNA, 24 nt, Human
aaggggaaugacaaucucuguuug

SEQ ID NO: 1191131 - RNA, 22 nt, Human
aauggcauuguuucacuuuugu

SEQ ID NO: 1191132 - RNA, 20 nt, Human
acccagggaguuucuaagag

SEQ ID NO: 1191133 - RNA, 19 nt, Human
acuggaaggaccugucagu

SEQ ID NO: 1191134 - RNA, 27 nt, Human
agaaacacugagaagcaaccgguaccc

SEQ ID NO: 1191135 - RNA, 18 nt, Human
agaacugucaccucuacc

SEQ ID NO: 1191136 - RNA, 19 nt, Human
agaccaggacaugaaaggg

SEQ ID NO: 1191137 - RNA, 22 nt, Human
agagucauccccaaacuacauu

SEQ ID NO: 1191138 - RNA, 19 nt, Human
agccaggaaguaacaggua

SEQ ID NO: 1191139 - RNA, 20 nt, Human
aggaagacuggagccugguu

SEQ ID NO: 1191140 - RNA, 22 nt, Human
aggguaagagggaugcaaaaag

SEQ ID NO: 1191141 - RNA, 18 nt, Human
agguaagaaaggggcagg

SEQ ID NO: 1191142 - RNA, 21 nt, Human
agguuccagcuacaggacugu

SEQ ID NO: 1191143 - RNA, 18 nt, Human
aguaaaaucugagcacug

SEQ ID NO: 1191144 - RNA, 22 nt, Human
aguauacaaacugucacagaau

SEQ ID NO: 1191145 - RNA, 18 nt, Human
agucaggaagaggguaag

SEQ ID NO: 1191146 - RNA, 21 nt, Human
agugugaaaguaagcaaggga

SEQ ID NO: 1191147 - RNA, 21 nt, Human
aguuugauaaauggcauuguu

SEQ ID NO: 1191148 - RNA, 22 nt, Human
auguagaggugucacagaaaau

SEQ ID NO: 1191149 - RNA, 18 nt, Human
auguggcuaagagaaaag

SEQ ID NO: 1191150 - RNA, 22 nt, Human
auucuacugcauguuggaauga

SEQ ID NO: 1191151 - RNA, 24 nt, Human
caauaauaaugauuuccauccaaa

SEQ ID NO: 1191152 - RNA, 20 nt, Human
cacggugcgggaagcagggc

SEQ ID NO: 1191153 - RNA, 20 nt, Human
cacugagaagcaacugguua

SEQ ID NO: 1191154 - RNA, 18 nt, Human
caggaaagacccacggug

SEQ ID NO: 1191155 - RNA, 23 nt, Human
cauguggcuaagagaaaagggaa

SEQ ID NO: 1191156 - RNA, 23 nt, Human
ccacauugauuuccugcugagga

SEQ ID NO: 1191157 - RNA, 18 nt, Human
ccagaguggaggcaaugg

SEQ ID NO: 1191158 - RNA, 22 nt, Human
ccucauucuacugcauguugga

SEQ ID NO: 1191159 - RNA, 24 nt, Human
ccucuauugcuuacgcccucuuua

SEQ ID NO: 1191160 - RNA, 21 nt, Human
ccuguggccagcaugcucucu

SEQ ID NO: 1191161 - RNA, 19 nt, Human
cguuaguaaaaucugagca

SEQ ID NO: 1191162 - RNA, 19 nt, Human
cucagaaaaagaauugccu

SEQ ID NO: 1191163 - RNA, 23 nt, Human
cucagguaaccuuugcuaacugc

SEQ ID NO: 1191164 - RNA, 21 nt, Human
cucuggggcuccacauugauu

SEQ ID NO: 1191165 - RNA, 24 nt, Human
cugcagugugaaaguaagcaaggg

SEQ ID NO: 1191166 - RNA, 23 nt, Human
cugguucacaagcagcuccucuc

SEQ ID NO: 1191167 - RNA, 22 nt, Human
cuuucuguagacuuuucgagaa

SEQ ID NO: 1191168 - RNA, 23 nt, Human
gaacugucaccucuaccuuccca

SEQ ID NO: 1191169 - RNA, 18 nt, Human
gaagagaaacacugagaa

SEQ ID NO: 1191170 - RNA, 20 nt, Human
gaagagacagacagaugagu

SEQ ID NO: 1191171 - RNA, 24 nt, Human
gaaguaacagguauccaggagagu

SEQ ID NO: 1191172 - RNA, 26 nt, Human
gagcacuggaagucaaguaucacuuc

SEQ ID NO: 1191173 - RNA, 20 nt, Human
gaugcaaaaagaggguggag

SEQ ID NO: 1191174 - RNA, 21 nt, Human
gcagaaccacagcugugcaaa

SEQ ID NO: 1191175 - RNA, 19 nt, Human
gcaucaggagcagcaaggg

SEQ ID NO: 1191176 - RNA, 19 nt, Human
gcgggaagcagggcugcac

SEQ ID NO: 1191177 - RNA, 20 nt, Human
ggaagcagggcugcacuggg

SEQ ID NO: 1191178 - RNA, 19 nt, Human
gggcaggguuacugugaga

SEQ ID NO: 1191179 - RNA, 21 nt, Human
gguaagagggaugcaaaaaga

SEQ ID NO: 1191180 - RNA, 19 nt, Human
guagagucauccccaaacu

SEQ ID NO: 1191181 - RNA, 20 nt, Human
guagagucauccccaaacua

SEQ ID NO: 1191182 - RNA, 28 nt, Human
gugcccacuccauuucccucagguaacc

SEQ ID NO: 1191183 - RNA, 18 nt, Human
gugcgggaagcagggcug

SEQ ID NO: 1191184 - RNA, 19 nt, Human
guguguguagucuggaagg

SEQ ID NO: 1191185 - RNA, 21 nt, Human
guucacaagcagcuccucuca

SEQ ID NO: 1191186 - RNA, 19 nt, Human
uaaaaugcaaaaacaagga

SEQ ID NO: 1191187 - RNA, 19 nt, Human
uaacagguauccaggagag

SEQ ID NO: 1191188 - RNA, 18 nt, Human
uaacaugcuagagguggg

SEQ ID NO: 1191189 - RNA, 22 nt, Human
uaagagggaugcaaaaagaggg

SEQ ID NO: 1191190 - RNA, 23 nt, Human
uaagaguugagaccacacuaugc

SEQ ID NO: 1191191 - RNA, 18 nt, Human
uaagucuuuaaaaugcaa

SEQ ID NO: 1191192 - RNA, 23 nt, Human
uacaggacuguuggugcgggagg

SEQ ID NO: 1191193 - RNA, 18 nt, Human
uacugugucuuugggacu

SEQ ID NO: 1191194 - RNA, 20 nt, Human
uacugugucuuugggacugg

SEQ ID NO: 1191195 - RNA, 23 nt, Human
uaggcugcuggcauauaaaaccu

SEQ ID NO: 1191196 - RNA, 20 nt, Human
uauagcugaugcccuaggac

SEQ ID NO: 1191197 - RNA, 23 nt, Human
uccaggccuucaaacuggaacuc

SEQ ID NO: 1191198 - RNA, 26 nt, Human
ucccucuugccccugucaggggggcc

SEQ ID NO: 1191199 - RNA, 21 nt, Human
ucuacgugaaagcuuuucuua

SEQ ID NO: 1191200 - RNA, 21 nt, Human
ucucaguuugauaaauggcau

SEQ ID NO: 1191201 - RNA, 19 nt, Human
ucugucuuguccuccuucc

SEQ ID NO: 1191202 - RNA, 24 nt, Human
ucuuuaaaaugcaaaaacaaggau

SEQ ID NO: 1191203 - RNA, 19 nt, Human
ucuuugggacuggccaauu

SEQ ID NO: 1191204 - RNA, 21 nt, Human
ugaaagggaaugauuuuuuug

SEQ ID NO: 1191205 - RNA, 20 nt, Human
ugaaaguaagcaagggacaa

SEQ ID NO: 1191206 - RNA, 21 nt, Human
ugaaaguaagcaagggacaaa

SEQ ID NO: 1191207 - RNA, 23 nt, Human
ugaaauaugauaguaccagaaug

SEQ ID NO: 1191208 - RNA, 24 nt, Human
ugaccaagugcacugugaaaacaa

SEQ ID NO: 1191209 - RNA, 27 nt, Human
ugagaaaaaauacuugaaauaugauag

SEQ ID NO: 1191210 - RNA, 21 nt, Human
ugagauaaaaugucccucugg

SEQ ID NO: 1191211 - RNA, 23 nt, Human
ugagauaaaaugucccucugggg

SEQ ID NO: 1191212 - RNA, 19 nt, Human
ugaguggauauccugaaaa

SEQ ID NO: 1191213 - RNA, 21 nt, Human
ugcacugugaaaacaaaaccc

SEQ ID NO: 1191214 - RNA, 19 nt, Human
ugcuaacugcaaaacuaac

SEQ ID NO: 1191215 - RNA, 18 nt, Human
uggaguuuucagguagag

SEQ ID NO: 1191216 - RNA, 19 nt, Human
ugggacuguggagggagac

SEQ ID NO: 1191217 - RNA, 22 nt, Human
ugguuucuaaaguugagcuucu

SEQ ID NO: 1191218 - RNA, 22 nt, Human
uguagggaagagacagacagau

SEQ ID NO: 1191219 - RNA, 20 nt, Human
ugucacagaaaaugacuucc

SEQ ID NO: 1191220 - RNA, 21 nt, Human
ugucccaguucucacaucugg

SEQ ID NO: 1191221 - RNA, 26 nt, Human
uguccuauccugaggcugcaaucuca

SEQ ID NO: 1191222 - RNA, 24 nt, Human
ugucuuguccuccuucccccuuuc

SEQ ID NO: 1191223 - RNA, 19 nt, Human
ugugaaaauuccaggccuu

SEQ ID NO: 1191224 - RNA, 21 nt, Human
ugugaaaauuccaggccuuca

SEQ ID NO: 1191225 - RNA, 18 nt, Human
ugugagguaagaaagggg

SEQ ID NO: 1191226 - RNA, 18 nt, Human
uguuggaaugaacucugg

SEQ ID NO: 1191227 - RNA, 22 nt, Human
uguuuggaguuuucagguagag

SEQ ID NO: 1191228 - RNA, 23 nt, Human
uuccagcuacaggacuguuggug

SEQ ID NO: 1191229 - RNA, 20 nt, Human
uucccuguuuggaguuuuca

SEQ ID NO: 1191230 - RNA, 21 nt, Human
uucccuguuuggaguuuucag

SEQ ID NO: 1191231 - RNA, 19 nt, Human
uuuagagucccucuugccc

SEQ ID NO: 1191232 - RNA, 19 nt, Human
uuugaaguuuccacuugua

SEQ ID NO: 1191233 - RNA, 21 nt, Human
uuugcagacuuugacgucuac

SEQ ID NO: 1191234 - RNA, 18 nt, Human
uuuguucagaaaaacauu

SEQ ID NO: 1191235 - RNA, 20 nt, Human
aacaacaucaaacuccacag

SEQ ID NO: 1191236 - RNA, 23 nt, Human
acacugcgaagguacuuccuggg

SEQ ID NO: 1191237 - RNA, 19 nt, Human
agacgucuuuagguaaaaa

SEQ ID NO: 1191238 - RNA, 20 nt, Human
agcggcgggcggcugcuggg

SEQ ID NO: 1191239 - RNA, 19 nt, Human
aggccggcggcggaggugg

SEQ ID NO: 1191240 - RNA, 21 nt, Human
aguucuauuuaucuggucaac

SEQ ID NO: 1191241 - RNA, 25 nt, Human
aucuuccuuggugucauuccuguug

SEQ ID NO: 1191242 - RNA, 21 nt, Human
caacgggcaaaaagcaagcac

SEQ ID NO: 1191243 - RNA, 18 nt, Human
cacccuuuucuccuucaa

SEQ ID NO: 1191244 - RNA, 22 nt, Human
cacccuuuucuccuucaacaac

SEQ ID NO: 1191245 - RNA, 22 nt, Human
cacugaaccauuuuacuguucc

SEQ ID NO: 1191246 - RNA, 25 nt, Human
cacugaaccauuuuacuguucccaa

SEQ ID NO: 1191247 - RNA, 22 nt, Human
cacuuaaggucuucagcuccaa

SEQ ID NO: 1191248 - RNA, 22 nt, Human
cauuugcugccuccgcacccuu

SEQ ID NO: 1191249 - RNA, 21 nt, Human
cccagggcucucuggggucag

SEQ ID NO: 1191250 - RNA, 20 nt, Human
cccuguaacauuugcugccu

SEQ ID NO: 1191251 - RNA, 20 nt, Human
ccgcuuccugcgccgcugcc

SEQ ID NO: 1191252 - RNA, 23 nt, Human
cgccgcugccugcagugcugggg

SEQ ID NO: 1191253 - RNA, 23 nt, Human
cgcuaccgauugaacucuccuug

SEQ ID NO: 1191254 - RNA, 19 nt, Human
cggcggcgcugagggcggg

SEQ ID NO: 1191255 - RNA, 18 nt, Human
cggcggcggagguggggc

SEQ ID NO: 1191256 - RNA, 21 nt, Human
cggcugcggcagcugcggcuu

SEQ ID NO: 1191257 - RNA, 18 nt, Human
cguuguugggcuuggccu

SEQ ID NO: 1191258 - RNA, 20 nt, Human
cuuccugcgccgcugccugc

SEQ ID NO: 1191259 - RNA, 20 nt, Human
cuucguugcgaugaccuucu

SEQ ID NO: 1191260 - RNA, 23 nt, Human
gcccagggcucucuggggucagc

SEQ ID NO: 1191261 - RNA, 19 nt, Human
gcccgggccaccgcuuccu

SEQ ID NO: 1191262 - RNA, 18 nt, Human
gcgggggcggcguggggg

SEQ ID NO: 1191263 - RNA, 24 nt, Human
gcugccuccgcacccuuuucuccu

SEQ ID NO: 1191264 - RNA, 19 nt, Human
ggcggcgugggggagcggc

SEQ ID NO: 1191265 - RNA, 20 nt, Human
gggcggcgugggggagcggg

SEQ ID NO: 1191266 - RNA, 20 nt, Human
gguauuuuuggcgugacuau

SEQ ID NO: 1191267 - RNA, 19 nt, Human
ggugauggugacuggggcc

SEQ ID NO: 1191268 - RNA, 24 nt, Human
guuauucuucuuucuggcagucug

SEQ ID NO: 1191269 - RNA, 20 nt, Human
uacacugcgaagguacuucc

SEQ ID NO: 1191270 - RNA, 23 nt, Human
uacacugcgaagguacuuccugg

SEQ ID NO: 1191271 - RNA, 22 nt, Human
uauuaccaaaaagagacgucuu

SEQ ID NO: 1191272 - RNA, 22 nt, Human
uccuguugaugaaaccauaucc

SEQ ID NO: 1191273 - RNA, 18 nt, Human
ucuccuacacugcgaagg

SEQ ID NO: 1191274 - RNA, 22 nt, Human
ucucuggggucagcucuccgcu

SEQ ID NO: 1191275 - RNA, 18 nt, Human
ucuuuuguucauuucuua

SEQ ID NO: 1191276 - RNA, 23 nt, Human
ugaacuggaacaccaccaggccc

SEQ ID NO: 1191277 - RNA, 23 nt, Human
ugaugguagagaugguaagcugg

SEQ ID NO: 1191278 - RNA, 21 nt, Human
ugcuggggugggugucggcgg

SEQ ID NO: 1191279 - RNA, 25 nt, Human
ugcuggggugggugucggcggcgcu

SEQ ID NO: 1191280 - RNA, 18 nt, Human
uggaacaccaccaggccc

SEQ ID NO: 1191281 - RNA, 22 nt, Human
uggaacaccaccaggcccugua

SEQ ID NO: 1191282 - RNA, 19 nt, Human
uggggucagcucuccgcuc

SEQ ID NO: 1191283 - RNA, 22 nt, Human
uggugacuggggccggcugcgg

SEQ ID NO: 1191284 - RNA, 19 nt, Human
uguccccgccggcaggcgc

SEQ ID NO: 1191285 - RNA, 26 nt, Human
uuaaaaaacacguuuguuauuaccaa

SEQ ID NO: 1191286 - RNA, 26 nt, Human
uuacggucugcugcauauguacugcc

SEQ ID NO: 1191287 - RNA, 19 nt, Human
uuccuuggugucauuccug

SEQ ID NO: 1191288 - RNA, 24 nt, Human
uuccuuggugucauuccuguugau

SEQ ID NO: 1191289 - RNA, 20 nt, Human
uuguccccgccggcaggcgc

SEQ ID NO: 1191290 - RNA, 20 nt, Human
aaacaagagcuuugaaugua

SEQ ID NO: 1191291 - RNA, 19 nt, Human
aacagaaccagcaucauag

SEQ ID NO: 1191292 - RNA, 19 nt, Human
aagagcuuugaauguaaca

SEQ ID NO: 1191293 - RNA, 21 nt, Human
aagcugcggccaggacccccc

SEQ ID NO: 1191294 - RNA, 24 nt, Human
aagcugcggccaggaccccccuga

SEQ ID NO: 1191295 - RNA, 21 nt, Human
acagcugaagcagcagaggac

SEQ ID NO: 1191296 - RNA, 22 nt, Human
acgaacagcaccaccaccaccc

SEQ ID NO: 1191297 - RNA, 19 nt, Human
agagagaagcuuccuggcg

SEQ ID NO: 1191298 - RNA, 19 nt, Human
agagcuguggucagcucca

SEQ ID NO: 1191299 - RNA, 22 nt, Human
agauucccuggugcugcagccu

SEQ ID NO: 1191300 - RNA, 21 nt, Human
agucaccacgaacagcaccac

SEQ ID NO: 1191301 - RNA, 20 nt, Human
caaguaagaagcgguuucua

SEQ ID NO: 1191302 - RNA, 22 nt, Human
cacaccguuuacaauaaauucc

SEQ ID NO: 1191303 - RNA, 23 nt, Human
caccgugaagcugcggccaggac

SEQ ID NO: 1191304 - RNA, 21 nt, Human
caccguuuacaauaaauucca

SEQ ID NO: 1191305 - RNA, 22 nt, Human
cacggcguuccucccugggugc

SEQ ID NO: 1191306 - RNA, 21 nt, Human
cacuugagggugcugcgugcc

SEQ ID NO: 1191307 - RNA, 25 nt, Human
cagagccggcccaccgugcacuccu

SEQ ID NO: 1191308 - RNA, 21 nt, Human
cagcaccaccaccaccccaau

SEQ ID NO: 1191309 - RNA, 18 nt, Human
cagcagaggacgcaggug

SEQ ID NO: 1191310 - RNA, 22 nt, Human
caggaccccccugaggauccug

SEQ ID NO: 1191311 - RNA, 21 nt, Human
caggccccgugaagagagaag

SEQ ID NO: 1191312 - RNA, 20 nt, Human
cauggcccacugagcaaccu

SEQ ID NO: 1191313 - RNA, 20 nt, Human
ccacgaacagcaccaccacc

SEQ ID NO: 1191314 - RNA, 22 nt, Human
ccacgaacagcaccaccaccac

SEQ ID NO: 1191315 - RNA, 21 nt, Human
ccacugagcaaccuuaggucc

SEQ ID NO: 1191316 - RNA, 19 nt, Human
ccaggaccccccugaggau

SEQ ID NO: 1191317 - RNA, 20 nt, Human
ccauggcccacugagcaacc

SEQ ID NO: 1191318 - RNA, 22 nt, Human
cccacugcugaaaucucagaug

SEQ ID NO: 1191319 - RNA, 25 nt, Human
cccagggaccacggcguuccucccu

SEQ ID NO: 1191320 - RNA, 25 nt, Human
ccccugaggauccugggcccuugag

SEQ ID NO: 1191321 - RNA, 25 nt, Human
ccgugcuccuccggcggcucuccuu

SEQ ID NO: 1191322 - RNA, 23 nt, Human
ccuccaagagcuguggucagcuc

SEQ ID NO: 1191323 - RNA, 19 nt, Human
ccuuaaauauagcauggca

SEQ ID NO: 1191324 - RNA, 23 nt, Human
cgaacagcaccaccaccacccca

SEQ ID NO: 1191325 - RNA, 18 nt, Human
cggcucuccuuccgucuc

SEQ ID NO: 1191326 - RNA, 23 nt, Human
cuccaagagcuguggucagcucc

SEQ ID NO: 1191327 - RNA, 22 nt, Human
cugcgugcccagguggcaacag

SEQ ID NO: 1191328 - RNA, 22 nt, Human
cugggugcugcagccucugucc

SEQ ID NO: 1191329 - RNA, 23 nt, Human
gaacagcaccaccaccaccccaa

SEQ ID NO: 1191330 - RNA, 24 nt, Human
gagcaggccucgagguuggguucu

SEQ ID NO: 1191331 - RNA, 22 nt, Human
gccacagucaccacgaacagca

SEQ ID NO: 1191332 - RNA, 19 nt, Human
gcccacugagcaaccuuag

SEQ ID NO: 1191333 - RNA, 20 nt, Human
gcggcucuccuuccgucucc

SEQ ID NO: 1191334 - RNA, 18 nt, Human
gcugcagccuccuggccu

SEQ ID NO: 1191335 - RNA, 19 nt, Human
ggccugguggccgucccag

SEQ ID NO: 1191336 - RNA, 21 nt, Human
uaaaacauauuguacuuucug

SEQ ID NO: 1191337 - RNA, 19 nt, Human
uaaaauaucuuauuucugg

SEQ ID NO: 1191338 - RNA, 20 nt, Human
uaaaauaucuuauuucuggc

SEQ ID NO: 1191339 - RNA, 21 nt, Human
uaagccucaggccaugccucc

SEQ ID NO: 1191340 - RNA, 21 nt, Human
uagaucagcagagccggccca

SEQ ID NO: 1191341 - RNA, 19 nt, Human
ucacagcugaagcagcaga

SEQ ID NO: 1191342 - RNA, 23 nt, Human
ucacagcugaagcagcagaggac

SEQ ID NO: 1191343 - RNA, 24 nt, Human
ucagaugaucucugucuauuuucu

SEQ ID NO: 1191344 - RNA, 20 nt, Human
uccaagagcuguggucagcu

SEQ ID NO: 1191345 - RNA, 18 nt, Human
ucccugggugcugcagcc

SEQ ID NO: 1191346 - RNA, 22 nt, Human
ucccugggugcugcagccucug

SEQ ID NO: 1191347 - RNA, 18 nt, Human
ucgcaggugccccgugcu

SEQ ID NO: 1191348 - RNA, 19 nt, Human
ucgcuccugcuccaggccu

SEQ ID NO: 1191349 - RNA, 22 nt, Human
ucgggcgcugccacguggcccc

SEQ ID NO: 1191350 - RNA, 18 nt, Human
ucuaagccucaggccaug

SEQ ID NO: 1191351 - RNA, 22 nt, Human
ucuagaagaagcacuguccugg

SEQ ID NO: 1191352 - RNA, 21 nt, Human
ucugucuauuuucuaagccuc

SEQ ID NO: 1191353 - RNA, 23 nt, Human
ugaagcugcggccaggacccccc

SEQ ID NO: 1191354 - RNA, 22 nt, Human
ugaauguaacauaacauuuuaa

SEQ ID NO: 1191355 - RNA, 24 nt, Human
ugaggauccugggcccuugaguca

SEQ ID NO: 1191356 - RNA, 22 nt, Human
ugaugaaaacaagagcuuugaa

SEQ ID NO: 1191357 - RNA, 24 nt, Human
ugcaaugugcaaaaguaaucaauu

SEQ ID NO: 1191358 - RNA, 26 nt, Human
ugcccagguggcaacagaaccagcau

SEQ ID NO: 1191359 - RNA, 21 nt, Human
ugccguuuccauggcccacug

SEQ ID NO: 1191360 - RNA, 21 nt, Human
ugcucugagucccugggucgc

SEQ ID NO: 1191361 - RNA, 23 nt, Human
uggcagggagcaggccucgaggu

SEQ ID NO: 1191362 - RNA, 25 nt, Human
uggcagggagcaggccucgagguug

SEQ ID NO: 1191363 - RNA, 21 nt, Human
uggccacagucaccacgaaca

SEQ ID NO: 1191364 - RNA, 19 nt, Human
uggcccacugagcaaccuu

SEQ ID NO: 1191365 - RNA, 20 nt, Human
uggccugguggccgucccag

SEQ ID NO: 1191366 - RNA, 24 nt, Human
uggccugguggccgucccagggac

SEQ ID NO: 1191367 - RNA, 20 nt, Human
uggugcugcagccuccuggc

SEQ ID NO: 1191368 - RNA, 26 nt, Human
uuccugguguagaucagcagagccgg

SEQ ID NO: 1191369 - RNA, 25 nt, Human
uucgcucccauccagaacaggaggc

SEQ ID NO: 1191370 - RNA, 23 nt, Human
uuucagaauuucagggcugauuu

SEQ ID NO: 1191371 - RNA, 23 nt, Human
uuuccauggcccacugagcaacc

SEQ ID NO: 1191372 - RNA, 23 nt, Human
uuugugaugaaaacaagagcuuu

SEQ ID NO: 1191373 - RNA, 24 nt, Human
agcugggccucgugggcccaggag

SEQ ID NO: 1191374 - RNA, 23 nt, Human
aggaggggccacugucagcagca

SEQ ID NO: 1191375 - RNA, 20 nt, Human
cagcuaugcaucaacgagca

SEQ ID NO: 1191376 - RNA, 19 nt, Human
gaggagcugggccucgugg

SEQ ID NO: 1191377 - RNA, 18 nt, Human
gccugugaccagccaggc

SEQ ID NO: 1191378 - RNA, 21 nt, Human
gggucccaucuggagcccggg

SEQ ID NO: 1191379 - RNA, 21 nt, Human
ucuggagcccgggcccggggc

SEQ ID NO: 1191380 - RNA, 20 nt, Human
ugaccacggggucccaucug

SEQ ID NO: 1191381 - RNA, 21 nt, Human
ugcccccucgugccaagacug

SEQ ID NO: 1191382 - RNA, 18 nt, Human
ugggccucgugggcccag

SEQ ID NO: 1191383 - RNA, 21 nt, Human
uccaaugacuccucuuuuauu

SEQ ID NO: 1191384 - RNA, 22 nt, Human
uccaaugacuccucuuuuauug

SEQ ID NO: 1191385 - RNA, 20 nt, Human
ugacuccucuuuuauugcug

SEQ ID NO: 1191386 - RNA, 18 nt, Human
ugucaggaucuaaagccu

SEQ ID NO: 1191387 - RNA, 24 nt, Human
uuccaaugacuccucuuuuauugc

SEQ ID NO: 1191388 - RNA, 20 nt, Human
aaaagagaaaucgugcugca

SEQ ID NO: 1191389 - RNA, 24 nt, Human
aaaagagaaaucgugcugcaaaga

SEQ ID NO: 1191390 - RNA, 25 nt, Human
aaaagagaaaucgugcugcaaagaa

SEQ ID NO: 1191391 - RNA, 26 nt, Human
aaaagagaaaucgugcugcaaagaaa

SEQ ID NO: 1191392 - RNA, 19 nt, Human
aaagacuggugaauaaaca

SEQ ID NO: 1191393 - RNA, 19 nt, Human
aaauacagcacaauuacuu

SEQ ID NO: 1191394 - RNA, 24 nt, Human
aaucacaguccaccaaaauuucug

SEQ ID NO: 1191395 - RNA, 22 nt, Human
aaugaaaaaacagaagcagccc

SEQ ID NO: 1191396 - RNA, 21 nt, Human
acaccaacaaaaccuccacaa

SEQ ID NO: 1191397 - RNA, 22 nt, Human
acaccaacaaaaccuccacaaa

SEQ ID NO: 1191398 - RNA, 24 nt, Human
acaccaacaaaaccuccacaauuu

SEQ ID NO: 1191399 - RNA, 18 nt, Human
accaacaaaaccuccaca

SEQ ID NO: 1191400 - RNA, 19 nt, Human
agaucugaguaacagugua

SEQ ID NO: 1191401 - RNA, 19 nt, Human
agcacacacucucgugaca

SEQ ID NO: 1191402 - RNA, 30 nt, Human
aucacaguccaccaaaauuucugcacguuu

SEQ ID NO: 1191403 - RNA, 23 nt, Human
aucugaguaacaguguacaccac

SEQ ID NO: 1191404 - RNA, 21 nt, Human
aucuuuuggaucuucucgcca

SEQ ID NO: 1191405 - RNA, 21 nt, Human
augacuagggaaaaaaaaacc

SEQ ID NO: 1191406 - RNA, 22 nt, Human
auugcaauggaaauaaauguuc

SEQ ID NO: 1191407 - RNA, 23 nt, Human
caaaaaaaaguuuaaacacacaa

SEQ ID NO: 1191408 - RNA, 22 nt, Human
caaaacaaaaucaaaacaaaaa

SEQ ID NO: 1191409 - RNA, 28 nt, Human
caaaacaaaaucaaaacaaaaaucuauu

SEQ ID NO: 1191410 - RNA, 21 nt, Human
caaaaccuccacaauuuucug

SEQ ID NO: 1191411 - RNA, 23 nt, Human
caaagggcauuaucaaaagagaa

SEQ ID NO: 1191412 - RNA, 19 nt, Human
caccucagauuaacuucac

SEQ ID NO: 1191413 - RNA, 18 nt, Human
cagaagcagccauaauga

SEQ ID NO: 1191414 - RNA, 25 nt, Human
cagccacagaaauugcaauggaaau

SEQ ID NO: 1191415 - RNA, 18 nt, Human
ccacagaaauugcaaugg

SEQ ID NO: 1191416 - RNA, 25 nt, Human
ccccaaagggcauuaucaaaagaga

SEQ ID NO: 1191417 - RNA, 25 nt, Human
cguauacacacaaacccaugaacau

SEQ ID NO: 1191418 - RNA, 22 nt, Human
cucaagucaauuuuuaguuugc

SEQ ID NO: 1191419 - RNA, 26 nt, Human
cucaucagcacacacucucgugacaa

SEQ ID NO: 1191420 - RNA, 25 nt, Human
cucucgugacaaaugauucagacau

SEQ ID NO: 1191421 - RNA, 24 nt, Human
cuucauaucguauacacacaaacc

SEQ ID NO: 1191422 - RNA, 21 nt, Human
cuucccucgcucaaaaaaaag

SEQ ID NO: 1191423 - RNA, 21 nt, Human
cuucucgccaacaacuacugg

SEQ ID NO: 1191424 - RNA, 22 nt, Human
gaaaaaacagaagcagccauaa

SEQ ID NO: 1191425 - RNA, 19 nt, Human
guauacacacaaacccaug

SEQ ID NO: 1191426 - RNA, 24 nt, Human
uaaaagcccucugcacucaacuaa

SEQ ID NO: 1191427 - RNA, 23 nt, Human
uacuggauuuucuuuucugauuu

SEQ ID NO: 1191428 - RNA, 18 nt, Human
uagaaucucaucagcaca

SEQ ID NO: 1191429 - RNA, 18 nt, Human
ucauuuucaaaacaaaau

SEQ ID NO: 1191430 - RNA, 23 nt, Human
ucuuuuggaucuucucgccaaca

SEQ ID NO: 1191431 - RNA, 23 nt, Human
ugagaaaauaaacugcaagauua

SEQ ID NO: 1191432 - RNA, 22 nt, Human
ugcaauggaaauaaauguucag

SEQ ID NO: 1191433 - RNA, 23 nt, Human
ugcacaccaacaaaaccuccaca

SEQ ID NO: 1191434 - RNA, 19 nt, Human
uuaccgauaacuaguugug

SEQ ID NO: 1191435 - RNA, 20 nt, Human
uuccuccauugcacaccaac

SEQ ID NO: 1191436 - RNA, 19 nt, Human
uucucagccacagaaauug

SEQ ID NO: 1191437 - RNA, 21 nt, Human
uuuaauacuggaaaaaucaca

SEQ ID NO: 1191438 - RNA, 22 nt, Human
uuuaguuugcagaugaucaaga

SEQ ID NO: 1191439 - RNA, 22 nt, Human
uuuucuguuugcuucaccucag

SEQ ID NO: 1191440 - RNA, 23 nt, Human
aaacuccuggccucaagcaaucc

SEQ ID NO: 1191441 - RNA, 18 nt, Human
aaaguguugugauuacag

SEQ ID NO: 1191442 - RNA, 20 nt, Human
aacacuaaauaaacuaaggc

SEQ ID NO: 1191443 - RNA, 19 nt, Human
aacuacaggcacacacuac

SEQ ID NO: 1191444 - RNA, 22 nt, Human
aagcauuuucaggagaggaauc

SEQ ID NO: 1191445 - RNA, 25 nt, Human
aagcgauccucccaccucagccucc

SEQ ID NO: 1191446 - RNA, 25 nt, Human
aaguagcugagacuacaggcgcaca

SEQ ID NO: 1191447 - RNA, 21 nt, Human
aagucugcaggcacccagaau

SEQ ID NO: 1191448 - RNA, 21 nt, Human
aaucuuuguagcuaucuucuu

SEQ ID NO: 1191449 - RNA, 23 nt, Human
accaugugaucucugcacaugcc

SEQ ID NO: 1191450 - RNA, 20 nt, Human
accucagcccccugaguagc

SEQ ID NO: 1191451 - RNA, 23 nt, Human
accucagcccccugaguagcuga

SEQ ID NO: 1191452 - RNA, 24 nt, Human
accugucucauuauguugcccagg

SEQ ID NO: 1191453 - RNA, 25 nt, Human
acuauguugcccaggcugguaacaa

SEQ ID NO: 1191454 - RNA, 23 nt, Human
agagugcugggacuauaggugug

SEQ ID NO: 1191455 - RNA, 24 nt, Human
agagugcugggacuauagguguga

SEQ ID NO: 1191456 - RNA, 19 nt, Human
agaugcugcagaaccauga

SEQ ID NO: 1191457 - RNA, 22 nt, Human
agaugcugcagaaccaugagcc

SEQ ID NO: 1191458 - RNA, 22 nt, Human
agcauuuucaggagaggaaucc

SEQ ID NO: 1191459 - RNA, 21 nt, Human
aggagauuguuuuggaacuuu

SEQ ID NO: 1191460 - RNA, 19 nt, Human
aggcaauggggaaaagucc

SEQ ID NO: 1191461 - RNA, 19 nt, Human
aggcaauggggaaaagucc

SEQ ID NO: 1191462 - RNA, 19 nt, Human
agggugcuguggagcaacc

SEQ ID NO: 1191463 - RNA, 21 nt, Human
aggugugagccacugcuccca

SEQ ID NO: 1191464 - RNA, 23 nt, Human
aguccaguggcaccauuauagcu

SEQ ID NO: 1191465 - RNA, 22 nt, Human
agugcugggacuauagguguga

SEQ ID NO: 1191466 - RNA, 21 nt, Human
aucccagccacucuggcucca

SEQ ID NO: 1191467 - RNA, 19 nt, Human
auccuuccuuccuuccucu

SEQ ID NO: 1191468 - RNA, 19 nt, Human
auguaauagaaaaggaaaa

SEQ ID NO: 1191469 - RNA, 22 nt, Human
auuugcauaagguccauuacac

SEQ ID NO: 1191470 - RNA, 20 nt, Human
auuuuuuuuguagauacagg

SEQ ID NO: 1191471 - RNA, 20 nt, Human
caaaggcacuucagaagaua

SEQ ID NO: 1191472 - RNA, 24 nt, Human
caaauuccugagcucaagcaaucc

SEQ ID NO: 1191473 - RNA, 24 nt, Human
caacacuaaauaaacuaaggcaga

SEQ ID NO: 1191474 - RNA, 27 nt, Human
caacacuaaauaaacuaaggcagacau

SEQ ID NO: 1191475 - RNA, 19 nt, Human
caagagagcaugacuaaaa

SEQ ID NO: 1191476 - RNA, 26 nt, Human
caagcaauccucccaccucauucucc

SEQ ID NO: 1191477 - RNA, 27 nt, Human
caagcgauccucccaccucagccuccc

SEQ ID NO: 1191478 - RNA, 27 nt, Human
caagcgauccucccaccucagccuccc

SEQ ID NO: 1191479 - RNA, 26 nt, Human
caccagaagcagaugcugcagaacca

SEQ ID NO: 1191480 - RNA, 21 nt, Human
caccucauucuccuaaguagc

SEQ ID NO: 1191481 - RNA, 28 nt, Human
caccucauucuccuaaguagcugagacu

SEQ ID NO: 1191482 - RNA, 19 nt, Human
cacuaaauaaacuaaggca

SEQ ID NO: 1191483 - RNA, 18 nt, Human
cacuauguugcccaggcu

SEQ ID NO: 1191484 - RNA, 19 nt, Human
cacuauguugcccaggcug

SEQ ID NO: 1191485 - RNA, 23 nt, Human
cacuauguugcccaggcugguaa

SEQ ID NO: 1191486 - RNA, 31 nt, Human
cacuauguugcccaggcugguaacaaacucc

SEQ ID NO: 1191487 - RNA, 23 nt, Human
cacucuggcuccagccacagcuc

SEQ ID NO: 1191488 - RNA, 25 nt, Human
cagaaccaugagccaaauaaaccuc

SEQ ID NO: 1191489 - RNA, 20 nt, Human
cagagugcugggacuauagg

SEQ ID NO: 1191490 - RNA, 24 nt, Human
cagagugcugggacuauaggugug

SEQ ID NO: 1191491 - RNA, 21 nt, Human
caggcacccagaaugcaagag

SEQ ID NO: 1191492 - RNA, 21 nt, Human
caggcgcacaccaccacaccc

SEQ ID NO: 1191493 - RNA, 25 nt, Human
caggcuggaguccaguggcaccauu

SEQ ID NO: 1191494 - RNA, 24 nt, Human
cagggucucacuauguugcccagg

SEQ ID NO: 1191495 - RNA, 27 nt, Human
cauuacacacacacaccuauauauaua

SEQ ID NO: 1191496 - RNA, 24 nt, Human
cauuauguugcccaggcaugucuc

SEQ ID NO: 1191497 - RNA, 22 nt, Human
cauucugucucccaggcuggag

SEQ ID NO: 1191498 - RNA, 24 nt, Human
ccaaaguguugugauuacaguugu

SEQ ID NO: 1191499 - RNA, 23 nt, Human
ccacaguggaagcagccugaagc

SEQ ID NO: 1191500 - RNA, 23 nt, Human
ccaccucauucuccuaaguagcu

SEQ ID NO: 1191501 - RNA, 24 nt, Human
ccagaaugcaagagugguggagaa

SEQ ID NO: 1191502 - RNA, 19 nt, Human
ccagugugccuaggaugca

SEQ ID NO: 1191503 - RNA, 24 nt, Human
ccaucacaagcuaagagguccagg

SEQ ID NO: 1191504 - RNA, 21 nt, Human
cccaggcaugucuccaacucc

SEQ ID NO: 1191505 - RNA, 22 nt, Human
cccaggcuggaguccaguggca

SEQ ID NO: 1191506 - RNA, 23 nt, Human
cccccugaguagcugaacuacag

SEQ ID NO: 1191507 - RNA, 19 nt, Human
ccccguugcuuccucucuc

SEQ ID NO: 1191508 - RNA, 23 nt, Human
ccuaaguagcugagacuacaggc

SEQ ID NO: 1191509 - RNA, 22 nt, Human
ccucaagcgauccucccaccuc

SEQ ID NO: 1191510 - RNA, 24 nt, Human
ccucccaccucagcccccugagua

SEQ ID NO: 1191511 - RNA, 23 nt, Human
ccucccaccucagccucccaaag

SEQ ID NO: 1191512 - RNA, 20 nt, Human
ccugagcucaagcaauccuc

SEQ ID NO: 1191513 - RNA, 23 nt, Human
ccugagcucaagcaauccuccca

SEQ ID NO: 1191514 - RNA, 23 nt, Human
ccugaguagcugaacuacaggca

SEQ ID NO: 1191515 - RNA, 18 nt, Human
ccuggccucaagcaaucc

SEQ ID NO: 1191516 - RNA, 21 nt, Human
ccugggccuguuacgccuuuc

SEQ ID NO: 1191517 - RNA, 23 nt, Human
ccugugcugccuagagaugcugc

SEQ ID NO: 1191518 - RNA, 20 nt, Human
ccuuccuuccuuccucucuc

SEQ ID NO: 1191519 - RNA, 20 nt, Human
ccuugccucaagcgauccuc

SEQ ID NO: 1191520 - RNA, 18 nt, Human
cgcacaccaccacaccca

SEQ ID NO: 1191521 - RNA, 23 nt, Human
cgcacaccaccacacccagcuaa

SEQ ID NO: 1191522 - RNA, 19 nt, Human
cuagagaugcugcucccac

SEQ ID NO: 1191523 - RNA, 25 nt, Human
cucaagcaauccucccaccucauuc

SEQ ID NO: 1191524 - RNA, 24 nt, Human
cucaagcgauccucccaccucagc

SEQ ID NO: 1191525 - RNA, 23 nt, Human
cucccaccucagcccccugagua

SEQ ID NO: 1191526 - RNA, 21 nt, Human
cucccaggcuggaguccagug

SEQ ID NO: 1191527 - RNA, 20 nt, Human
cucccaucacaagcuaagag

SEQ ID NO: 1191528 - RNA, 26 nt, Human
cucccaucacaagcuaagagguccag

SEQ ID NO: 1191529 - RNA, 21 nt, Human
cuccuaaguagcugagacuac

SEQ ID NO: 1191530 - RNA, 20 nt, Human
cucucucuuuuuuucuuuga

SEQ ID NO: 1191531 - RNA, 21 nt, Human
cucugcacaugccagcuccac

SEQ ID NO: 1191532 - RNA, 23 nt, Human
cugcucugcuggguucuggauuu

SEQ ID NO: 1191533 - RNA, 18 nt, Human
cuggccucaagcaauccu

SEQ ID NO: 1191534 - RNA, 22 nt, Human
cuguuuggauccuggaggcaga

SEQ ID NO: 1191535 - RNA, 21 nt, Human
cuuccuuccuuccucucucuu

SEQ ID NO: 1191536 - RNA, 23 nt, Human
gaacauccuuuacccaaaccuca

SEQ ID NO: 1191537 - RNA, 19 nt, Human
gaacuacaggcacacacua

SEQ ID NO: 1191538 - RNA, 22 nt, Human
gaacuacaggcacacacuacca

SEQ ID NO: 1191539 - RNA, 25 nt, Human
gaaugggaacauguuuucuacuugg

SEQ ID NO: 1191540 - RNA, 18 nt, Human
gacagggucuugcuaugu

SEQ ID NO: 1191541 - RNA, 18 nt, Human
gacuauaggugugagcca

SEQ ID NO: 1191542 - RNA, 21 nt, Human
gacuauaggugugagccacug

SEQ ID NO: 1191543 - RNA, 22 nt, Human
gacuauaggugugagccacugc

SEQ ID NO: 1191544 - RNA, 25 nt, Human
gagcaugacuaaaaguuaaucaugc

SEQ ID NO: 1191545 - RNA, 19 nt, Human
gagugcugggacuauaggu

SEQ ID NO: 1191546 - RNA, 19 nt, Human
gauuuuuagucagcagucc

SEQ ID NO: 1191547 - RNA, 21 nt, Human
gcacacacuaccacaccugga

SEQ ID NO: 1191548 - RNA, 19 nt, Human
gcaggcacccagaaugcaa

SEQ ID NO: 1191549 - RNA, 19 nt, Human
gcgcacaccaccacaccca

SEQ ID NO: 1191550 - RNA, 23 nt, Human
gcugguaacaaacuccuggccuc

SEQ ID NO: 1191551 - RNA, 21 nt, Human
ggaaaaagcauuuucaggaga

SEQ ID NO: 1191552 - RNA, 24 nt, Human
ggcugguaacaaacuccuggccuc

SEQ ID NO: 1191553 - RNA, 23 nt, Human
ggugcaguagcacgaucauaguu

SEQ ID NO: 1191554 - RNA, 20 nt, Human
gguucuggauuugcauaagg

SEQ ID NO: 1191555 - RNA, 19 nt, Human
gguuuuuggaggacaggcu

SEQ ID NO: 1191556 - RNA, 21 nt, Human
guagucucucccaucacaagc

SEQ ID NO: 1191557 - RNA, 20 nt, Human
uaaauaaacuaaggcagaca

SEQ ID NO: 1191558 - RNA, 22 nt, Human
uaacuguuuggauccuggaggc

SEQ ID NO: 1191559 - RNA, 21 nt, Human
uacaaacaaaaugagaggcag

SEQ ID NO: 1191560 - RNA, 19 nt, Human
uacccagccucagguauuc

SEQ ID NO: 1191561 - RNA, 22 nt, Human
uagauacagggucucacuaugu

SEQ ID NO: 1191562 - RNA, 23 nt, Human
uagcuaucuucuuuacaaacaaa

SEQ ID NO: 1191563 - RNA, 20 nt, Human
uauaggugugagccacugcu

SEQ ID NO: 1191564 - RNA, 21 nt, Human
uauguugcccaggcaugucuc

SEQ ID NO: 1191565 - RNA, 24 nt, Human
uauguugcccaggcaugucuccaa

SEQ ID NO: 1191566 - RNA, 20 nt, Human
uauguugcccaggcugguaa

SEQ ID NO: 1191567 - RNA, 23 nt, Human
uauguugcccaggcugguaacaa

SEQ ID NO: 1191568 - RNA, 24 nt, Human
uauguugcccaggcugguaacaaa

SEQ ID NO: 1191569 - RNA, 18 nt, Human
ucaccaauggcuuggugc

SEQ ID NO: 1191570 - RNA, 23 nt, Human
ucagaagauagguagucucuccc

SEQ ID NO: 1191571 - RNA, 21 nt, Human
ucagagugcugggacuauagg

SEQ ID NO: 1191572 - RNA, 24 nt, Human
ucagagugcugggacuauaggugu

SEQ ID NO: 1191573 - RNA, 18 nt, Human
ucagcccccugaguagcu

SEQ ID NO: 1191574 - RNA, 21 nt, Human
ucagggcucugugcccugugc

SEQ ID NO: 1191575 - RNA, 23 nt, Human
ucauaguucauucugucucccag

SEQ ID NO: 1191576 - RNA, 24 nt, Human
ucauguugaaauuugauccccagu

SEQ ID NO: 1191577 - RNA, 20 nt, Human
ucauucugucucccaggcug

SEQ ID NO: 1191578 - RNA, 22 nt, Human
ucauucugucucccaggcugga

SEQ ID NO: 1191579 - RNA, 19 nt, Human
uccacuucaucuuccacca

SEQ ID NO: 1191580 - RNA, 18 nt, Human
uccagccacagcucaaag

SEQ ID NO: 1191581 - RNA, 19 nt, Human
ucccaaacauccaaaucug

SEQ ID NO: 1191582 - RNA, 22 nt, Human
ucccaaaguguugugauuacag

SEQ ID NO: 1191583 - RNA, 23 nt, Human
ucccaucacaagcuaagagguug

SEQ ID NO: 1191584 - RNA, 22 nt, Human
ucccccguugcuuccucucuca

SEQ ID NO: 1191585 - RNA, 24 nt, Human
uccuaaguagcugagacuacaggc

SEQ ID NO: 1191586 - RNA, 20 nt, Human
uccucccaccucagccuccc

SEQ ID NO: 1191587 - RNA, 23 nt, Human
uccuuauaaauacccagccucag

SEQ ID NO: 1191588 - RNA, 18 nt, Human
ucucacuauguugcccag

SEQ ID NO: 1191589 - RNA, 19 nt, Human
ucucacuauguugcccagg

SEQ ID NO: 1191590 - RNA, 23 nt, Human
ucucacuauguugcccaggcugg

SEQ ID NO: 1191591 - RNA, 24 nt, Human
ucucacuauguugcccaggcuggu

SEQ ID NO: 1191592 - RNA, 24 nt, Human
ucucacuauguugcccaggcuggu

SEQ ID NO: 1191593 - RNA, 25 nt, Human
ucucacuauguugcccaggcuggua

SEQ ID NO: 1191594 - RNA, 23 nt, Human
ucucagagugcugggacuauagg

SEQ ID NO: 1191595 - RNA, 24 nt, Human
ucucagagugcugggacuauaggu

SEQ ID NO: 1191596 - RNA, 19 nt, Human
ucucagagugcugggacuu

SEQ ID NO: 1191597 - RNA, 18 nt, Human
ucucauuauguugcccag

SEQ ID NO: 1191598 - RNA, 21 nt, Human
ucucccuuuuggaaugggaac

SEQ ID NO: 1191599 - RNA, 21 nt, Human
ucugcucugcuggguucugga

SEQ ID NO: 1191600 - RNA, 23 nt, Human
ucuuuacaaacaaaaugagaggc

SEQ ID NO: 1191601 - RNA, 19 nt, Human
ucuuuuuuucuuugacagg

SEQ ID NO: 1191602 - RNA, 23 nt, Human
ugaacuacaggcacacacuacca

SEQ ID NO: 1191603 - RNA, 19 nt, Human
ugaaguaacacaacuuacu

SEQ ID NO: 1191604 - RNA, 21 nt, Human
ugaagucaaaggagauuguuu

SEQ ID NO: 1191605 - RNA, 24 nt, Human
ugagacuacaggcgcacaccacca

SEQ ID NO: 1191606 - RNA, 20 nt, Human
ugagaggcagguuuuccuga

SEQ ID NO: 1191607 - RNA, 18 nt, Human
ugcagauauaaaaauuug

SEQ ID NO: 1191608 - RNA, 24 nt, Human
ugcccaggcugguaacaaacuccu

SEQ ID NO: 1191609 - RNA, 19 nt, Human
uggccucaagcaauccucu

SEQ ID NO: 1191610 - RNA, 20 nt, Human
uggccucaagcaauccucug

SEQ ID NO: 1191611 - RNA, 19 nt, Human
ugggacuauaggugugagc

SEQ ID NO: 1191612 - RNA, 21 nt, Human
ugggacuauaggugugagcca

SEQ ID NO: 1191613 - RNA, 22 nt, Human
ugggacuauaggugugagccac

SEQ ID NO: 1191614 - RNA, 22 nt, Human
ugggacuauaggugugagccac

SEQ ID NO: 1191615 - RNA, 24 nt, Human
ugggacuauaggugugagccacug

SEQ ID NO: 1191616 - RNA, 18 nt, Human
ugggccaauuucucccuu

SEQ ID NO: 1191617 - RNA, 19 nt, Human
ugggccuguuacgccuuuc

SEQ ID NO: 1191618 - RNA, 18 nt, Human
uggugccauccuugaagu

SEQ ID NO: 1191619 - RNA, 18 nt, Human
uguauggaaggacaugag

SEQ ID NO: 1191620 - RNA, 19 nt, Human
uguauggaaggacaugaga

SEQ ID NO: 1191621 - RNA, 23 nt, Human
ugucccaaacauccaaaucuguc

SEQ ID NO: 1191622 - RNA, 21 nt, Human
ugugcugccuagagaugcugc

SEQ ID NO: 1191623 - RNA, 23 nt, Human
uuaaaaagagcuuggcaccucac

SEQ ID NO: 1191624 - RNA, 22 nt, Human
uuaaaauguuuguagagaccug

SEQ ID NO: 1191625 - RNA, 18 nt, Human
uuaaugucugcucugcug

SEQ ID NO: 1191626 - RNA, 22 nt, Human
uuacuacaucaucaaauucccu

SEQ ID NO: 1191627 - RNA, 25 nt, Human
uucaucuuccaccacaguggaagca

SEQ ID NO: 1191628 - RNA, 18 nt, Human
uucauucugucucccagg

SEQ ID NO: 1191629 - RNA, 24 nt, Human
uucauucugucucccaggcuggag

SEQ ID NO: 1191630 - RNA, 21 nt, Human
uucugucucccaggcuggagu

SEQ ID NO: 1191631 - RNA, 18 nt, Human
uugauccccaguguugga

SEQ ID NO: 1191632 - RNA, 18 nt, Human
uugauuuuuagucagcag

SEQ ID NO: 1191633 - RNA, 23 nt, Human
uugggccaauuucucccuuuugg

SEQ ID NO: 1191634 - RNA, 23 nt, Human
uuuacuggaacauccuuuaccca

SEQ ID NO: 1191635 - RNA, 24 nt, Human
uuucaggagaggaauccaagggug

SEQ ID NO: 1191636 - RNA, 20 nt, Human
uuuccugacacaguuccuag

SEQ ID NO: 1191637 - RNA, 27 nt, Human
uuuuggaggacaggcucagggcucugu

SEQ ID NO: 1191638 - RNA, 21 nt, Human
uuuuuuucuuugacagggucu

SEQ ID NO: 1191639 - RNA, 24 nt, Human
aaaaggaaacaaagucacuuuaaa

SEQ ID NO: 1191640 - RNA, 21 nt, Human
aaagaaacuugcuuuccauug

SEQ ID NO: 1191641 - RNA, 21 nt, Human
aaagcuuccaaaguuucuuga

SEQ ID NO: 1191642 - RNA, 20 nt, Human
aaaucuucuuucacaaaagc

SEQ ID NO: 1191643 - RNA, 23 nt, Human
aacauuuuucuaaacaacugaca

SEQ ID NO: 1191644 - RNA, 23 nt, Human
aaucauuuauaaaaggaaacaaa

SEQ ID NO: 1191645 - RNA, 21 nt, Human
acuucauuguaguccaugugg

SEQ ID NO: 1191646 - RNA, 19 nt, Human
agagagaaacauucuggaa

SEQ ID NO: 1191647 - RNA, 24 nt, Human
caauaagaaaacuugacggcucau

SEQ ID NO: 1191648 - RNA, 23 nt, Human
cccggaacugaaacagcugagac

SEQ ID NO: 1191649 - RNA, 20 nt, Human
ccuccacaaagaaacuugcu

SEQ ID NO: 1191650 - RNA, 18 nt, Human
ccuccugcaucucuuccu

SEQ ID NO: 1191651 - RNA, 21 nt, Human
ccugcaucucuuccuggggua

SEQ ID NO: 1191652 - RNA, 20 nt, Human
cuacucaagagaguaggcaa

SEQ ID NO: 1191653 - RNA, 22 nt, Human
cuagagaaauccaaagucauaa

SEQ ID NO: 1191654 - RNA, 25 nt, Human
cucaaggaaauccuccacaaagaaa

SEQ ID NO: 1191655 - RNA, 22 nt, Human
cugaccuccucuacuucaauuu

SEQ ID NO: 1191656 - RNA, 18 nt, Human
ggaaauccuccacaaaga

SEQ ID NO: 1191657 - RNA, 23 nt, Human
ggaaauccuccacaaagaaacuu

SEQ ID NO: 1191658 - RNA, 23 nt, Human
uaaaaggaaacaaagucacuuua

SEQ ID NO: 1191659 - RNA, 20 nt, Human
uaaauuucaaccugagguaa

SEQ ID NO: 1191660 - RNA, 23 nt, Human
uagaauuuuaggacauaacaaga

SEQ ID NO: 1191661 - RNA, 23 nt, Human
uagaggaaauccagaaucuaaca

SEQ ID NO: 1191662 - RNA, 19 nt, Human
uaggccaaugugaacggaa

SEQ ID NO: 1191663 - RNA, 22 nt, Human
uaucugucauucccggaacuga

SEQ ID NO: 1191664 - RNA, 23 nt, Human
ucaaagcaguguaaauuucaacc

SEQ ID NO: 1191665 - RNA, 22 nt, Human
ucaaccugagguaaaaaucgcc

SEQ ID NO: 1191666 - RNA, 22 nt, Human
uccauguggguguauaaacuga

SEQ ID NO: 1191667 - RNA, 19 nt, Human
uccuccacaaagaaacuug

SEQ ID NO: 1191668 - RNA, 19 nt, Human
uccuuuaccaaaaacaguu

SEQ ID NO: 1191669 - RNA, 18 nt, Human
ucgaagcaauaaagcauc

SEQ ID NO: 1191670 - RNA, 18 nt, Human
ucuaaacaacugacaggg

SEQ ID NO: 1191671 - RNA, 18 nt, Human
ucuggcagagccagggcc

SEQ ID NO: 1191672 - RNA, 24 nt, Human
ucuguaaaacuucuuucuaaccac

SEQ ID NO: 1191673 - RNA, 28 nt, Human
ucuguaaaacuucuuucuaaccacauuc

SEQ ID NO: 1191674 - RNA, 18 nt, Human
ugaaaacauaucuucuuu

SEQ ID NO: 1191675 - RNA, 20 nt, Human
ugaaacagcugagacucucg

SEQ ID NO: 1191676 - RNA, 19 nt, Human
ugauggaauaucaauuucu

SEQ ID NO: 1191677 - RNA, 23 nt, Human
ugcaugauauuucaaugcugaaa

SEQ ID NO: 1191678 - RNA, 24 nt, Human
uggaaaaauuagcuucugugaaga

SEQ ID NO: 1191679 - RNA, 23 nt, Human
ugggagucuggauuugaacuugg

SEQ ID NO: 1191680 - RNA, 23 nt, Human
uucacaaaagcuuccaaaguuuc

SEQ ID NO: 1191681 - RNA, 24 nt, Human
uucauacucaauaagaaaacuuga

SEQ ID NO: 1191682 - RNA, 21 nt, Human
uucaucauuuuuucaagaaaa

SEQ ID NO: 1191683 - RNA, 23 nt, Human
uucaucauuuuuucaagaaaaug

SEQ ID NO: 1191684 - RNA, 19 nt, Human
uucucauauaaauagucua

SEQ ID NO: 1191685 - RNA, 24 nt, Human
uucucauauaaauagucuauugca

SEQ ID NO: 1191686 - RNA, 18 nt, Human
uugguucugguuuugaag

SEQ ID NO: 1191687 - RNA, 19 nt, Human
uuucuggcacuggguuuaa

SEQ ID NO: 1191688 - RNA, 19 nt, Human
uuucugguuugaggcuugg

SEQ ID NO: 1191689 - RNA, 24 nt, Human
aaaaagaagcaagcuccauuucca

SEQ ID NO: 1191690 - RNA, 23 nt, Human
aaaacaacccaaguucccucuga

SEQ ID NO: 1191691 - RNA, 22 nt, Human
aaacaaaaagaagcaagcucca

SEQ ID NO: 1191692 - RNA, 18 nt, Human
aaacuacaggugguacca

SEQ ID NO: 1191693 - RNA, 24 nt, Human
aaagcacagagcuaacccuucagg

SEQ ID NO: 1191694 - RNA, 20 nt, Human
aaagcacuccugcacuuuca

SEQ ID NO: 1191695 - RNA, 20 nt, Human
aacaaaaaccuauuuuaaag

SEQ ID NO: 1191696 - RNA, 19 nt, Human
aacacggugaaaccccccu

SEQ ID NO: 1191697 - RNA, 20 nt, Human
aacacggugaaaccccccuc

SEQ ID NO: 1191698 - RNA, 18 nt, Human
aagcagggaggcagaggu

SEQ ID NO: 1191699 - RNA, 22 nt, Human
aagcagggaggcagagguuaca

SEQ ID NO: 1191700 - RNA, 19 nt, Human
aagcccaccaagacucaag

SEQ ID NO: 1191701 - RNA, 21 nt, Human
aagcucuccaagcuagaucuc

SEQ ID NO: 1191702 - RNA, 19 nt, Human
aaggcugacagcccccuac

SEQ ID NO: 1191703 - RNA, 24 nt, Human
aauauguaucucuccaauaaaggc

SEQ ID NO: 1191704 - RNA, 18 nt, Human
aauccugcuaaccccaag

SEQ ID NO: 1191705 - RNA, 22 nt, Human
aaugaccuuguaaguuauaaac

SEQ ID NO: 1191706 - RNA, 24 nt, Human
acacaaucaacugcccagagcugu

SEQ ID NO: 1191707 - RNA, 24 nt, Human
acagagugagaccuugucucaaaa

SEQ ID NO: 1191708 - RNA, 24 nt, Human
acuccagccugggcaacagaguga

SEQ ID NO: 1191709 - RNA, 18 nt, Human
acucgggaggaugaggug

SEQ ID NO: 1191710 - RNA, 24 nt, Human
acugcacuccagccugggcaacag

SEQ ID NO: 1191711 - RNA, 24 nt, Human
acugcacuccagccugggcaacag

SEQ ID NO: 1191712 - RNA, 18 nt, Human
acugccucauucccucca

SEQ ID NO: 1191713 - RNA, 21 nt, Human
agaauacucaggccagccucg

SEQ ID NO: 1191714 - RNA, 20 nt, Human
agaauaugacuuguguccuc

SEQ ID NO: 1191715 - RNA, 19 nt, Human
agagcuauaggugccccuc

SEQ ID NO: 1191716 - RNA, 23 nt, Human
agagguuacagugagcugagauc

SEQ ID NO: 1191717 - RNA, 24 nt, Human
agagguuacagugagcugagauca

SEQ ID NO: 1191718 - RNA, 19 nt, Human
agcaaaagcacuccugcac

SEQ ID NO: 1191719 - RNA, 24 nt, Human
agcacuuugggaggcggagacggg

SEQ ID NO: 1191720 - RNA, 22 nt, Human
agccagccagaguggugguggg

SEQ ID NO: 1191721 - RNA, 24 nt, Human
agccuggccaacacggugaaaccc

SEQ ID NO: 1191722 - RNA, 20 nt, Human
agccugggcaacagagugac

SEQ ID NO: 1191723 - RNA, 23 nt, Human
agcuccacccccaucugaguagc

SEQ ID NO: 1191724 - RNA, 20 nt, Human
aggaagccaagucagauuca

SEQ ID NO: 1191725 - RNA, 24 nt, Human
aggcaaaacaaaaagaagcaagcu

SEQ ID NO: 1191726 - RNA, 23 nt, Human
aggcagaaggcggcauuguagag

SEQ ID NO: 1191727 - RNA, 24 nt, Human
aggcagacugccucauucccucca

SEQ ID NO: 1191728 - RNA, 20 nt, Human
aggcagagguuacagugagc

SEQ ID NO: 1191729 - RNA, 24 nt, Human
aggcagagguuacagugagcugag

SEQ ID NO: 1191730 - RNA, 19 nt, Human
aguugcaggcagggacuga

SEQ ID NO: 1191731 - RNA, 18 nt, Human
aucaucagcagagcaaaa

SEQ ID NO: 1191732 - RNA, 18 nt, Human
aucaucuccucgauaggg

SEQ ID NO: 1191733 - RNA, 24 nt, Human
aucaugccacugcacuccagccug

SEQ ID NO: 1191734 - RNA, 24 nt, Human
augccacugcacuccagccugggc

SEQ ID NO: 1191735 - RNA, 19 nt, Human
augggggccaagaaggacc

SEQ ID NO: 1191736 - RNA, 19 nt, Human
caaaaaaggccgacuggca

SEQ ID NO: 1191737 - RNA, 22 nt, Human
caaaacaacccaaguucccucu

SEQ ID NO: 1191738 - RNA, 23 nt, Human
caaacuacaggugguaccaacca

SEQ ID NO: 1191739 - RNA, 21 nt, Human
caacacggugaaaccccccuc

SEQ ID NO: 1191740 - RNA, 23 nt, Human
caacagagugacagagugagacc

SEQ ID NO: 1191741 - RNA, 19 nt, Human
caagaaggaccuuuguacu

SEQ ID NO: 1191742 - RNA, 25 nt, Human
caagauggccacucccagggacuaa

SEQ ID NO: 1191743 - RNA, 22 nt, Human
caagcacaacaacauauacaua

SEQ ID NO: 1191744 - RNA, 22 nt, Human
caagugaaugcaucuggucaga

SEQ ID NO: 1191745 - RNA, 24 nt, Human
caaguucuuggcuuggaaggguca

SEQ ID NO: 1191746 - RNA, 23 nt, Human
caauacagaccaucacaggucaa

SEQ ID NO: 1191747 - RNA, 18 nt, Human
caccacgugguagagggu

SEQ ID NO: 1191748 - RNA, 18 nt, Human
caccacgugguagagggu

SEQ ID NO: 1191749 - RNA, 21 nt, Human
caccacgugguagagggucca

SEQ ID NO: 1191750 - RNA, 22 nt, Human
cacuccagccugggcaacagag

SEQ ID NO: 1191751 - RNA, 24 nt, Human
cacuccagccugggcaacagagug

SEQ ID NO: 1191752 - RNA, 19 nt, Human
cacugcacuccagccuggg

SEQ ID NO: 1191753 - RNA, 21 nt, Human
cacugcacuccagccugggca

SEQ ID NO: 1191754 - RNA, 22 nt, Human
cacugcacuccagccugggcaa

SEQ ID NO: 1191755 - RNA, 23 nt, Human
cacugcacuccagccugggcaac

SEQ ID NO: 1191756 - RNA, 24 nt, Human
cacugcacuccagccugggcaaca

SEQ ID NO: 1191757 - RNA, 21 nt, Human
cagagcaaaacccaugcaaac

SEQ ID NO: 1191758 - RNA, 18 nt, Human
cagaucacaggaagccaa

SEQ ID NO: 1191759 - RNA, 18 nt, Human
cagcacuuugggaggcgg

SEQ ID NO: 1191760 - RNA, 21 nt, Human
cagcagagcaaaacccaugca

SEQ ID NO: 1191761 - RNA, 26 nt, Human
cagcuccccuuuugugggcacugccu

SEQ ID NO: 1191762 - RNA, 24 nt, Human
caggcaaaacaaaaagaagcaagc

SEQ ID NO: 1191763 - RNA, 18 nt, Human
cagggacuaaagcacaga

SEQ ID NO: 1191764 - RNA, 22 nt, Human
cauaaauucugaauccugcuaa

SEQ ID NO: 1191765 - RNA, 20 nt, Human
cauaacucauggcuaagagc

SEQ ID NO: 1191766 - RNA, 19 nt, Human
caucccaagccacagucau

SEQ ID NO: 1191767 - RNA, 24 nt, Human
caugccaguaauuccagcacuuug

SEQ ID NO: 1191768 - RNA, 23 nt, Human
cauggcuaagagcuauaggugcc

SEQ ID NO: 1191769 - RNA, 25 nt, Human
ccaaaacaacccaaguucccucuga

SEQ ID NO: 1191770 - RNA, 22 nt, Human
ccaacacggugaaaccccccuc

SEQ ID NO: 1191771 - RNA, 20 nt, Human
ccacugcacuccagccuggg

SEQ ID NO: 1191772 - RNA, 20 nt, Human
ccacugcacuccagccuggg

SEQ ID NO: 1191773 - RNA, 21 nt, Human
ccacugcacuccagccugggc

SEQ ID NO: 1191774 - RNA, 23 nt, Human
ccacugcacuccagccugggcaa

SEQ ID NO: 1191775 - RNA, 24 nt, Human
ccacugcacuccagccugggcaac

SEQ ID NO: 1191776 - RNA, 21 nt, Human
cccaaagaaacagugcccuuu

SEQ ID NO: 1191777 - RNA, 26 nt, Human
cccaagccacagucauuaucccaaaa

SEQ ID NO: 1191778 - RNA, 21 nt, Human
cccaaggcuaggggaugggac

SEQ ID NO: 1191779 - RNA, 19 nt, Human
cccccaaaucucugugccg

SEQ ID NO: 1191780 - RNA, 18 nt, Human
ccccucaccuccucuccc

SEQ ID NO: 1191781 - RNA, 20 nt, Human
ccccucaccuccucucccua

SEQ ID NO: 1191782 - RNA, 25 nt, Human
cccucuguuuggcaugccaaaaauc

SEQ ID NO: 1191783 - RNA, 22 nt, Human
cccuuggauggagggagucaua

SEQ ID NO: 1191784 - RNA, 21 nt, Human
ccuccagaaguggcuuuucau

SEQ ID NO: 1191785 - RNA, 18 nt, Human
ccuggccaacacggugaa

SEQ ID NO: 1191786 - RNA, 27 nt, Human
ccugggcaacagagugacagagugaga

SEQ ID NO: 1191787 - RNA, 19 nt, Human
ccuugggucucccuuggau

SEQ ID NO: 1191788 - RNA, 24 nt, Human
ccuugucucaaaaaaaaaaaaaaa

SEQ ID NO: 1191789 - RNA, 19 nt, Human
ccuuuugugggcacugccu

SEQ ID NO: 1191790 - RNA, 24 nt, Human
cgagacuagccuggccaacacggu

SEQ ID NO: 1191791 - RNA, 20 nt, Human
cgauagggcuacaugcagug

SEQ ID NO: 1191792 - RNA, 20 nt, Human
cuagagucuccaaggcugac

SEQ ID NO: 1191793 - RNA, 22 nt, Human
cuauaggugccccucaccuccu

SEQ ID NO: 1191794 - RNA, 23 nt, Human
cuauaggugccccucaccuccuc

SEQ ID NO: 1191795 - RNA, 18 nt, Human
cucaaaaaaaaaaaaaaa

SEQ ID NO: 1191796 - RNA, 18 nt, Human
cucaagauggccacuccc

SEQ ID NO: 1191797 - RNA, 21 nt, Human
cucauaaauucugaauccugc

SEQ ID NO: 1191798 - RNA, 24 nt, Human
cucaugccaguaauuccagcacuu

SEQ ID NO: 1191799 - RNA, 20 nt, Human
cuccaaggcugacagccccc

SEQ ID NO: 1191800 - RNA, 22 nt, Human
cucccuaucucugcuucucaca

SEQ ID NO: 1191801 - RNA, 18 nt, Human
cucuaacagguaagaaaa

SEQ ID NO: 1191802 - RNA, 21 nt, Human
cucugcaucuagcuccacccc

SEQ ID NO: 1191803 - RNA, 23 nt, Human
cucugcaucuagcuccaccccca

SEQ ID NO: 1191804 - RNA, 19 nt, Human
cucugcuucucacagcuac

SEQ ID NO: 1191805 - RNA, 25 nt, Human
cugagauagaggccaagaguucaga

SEQ ID NO: 1191806 - RNA, 20 nt, Human
cugcaucuagcuccaccccc

SEQ ID NO: 1191807 - RNA, 21 nt, Human
cugcccagagcuguucaacaa

SEQ ID NO: 1191808 - RNA, 19 nt, Human
cuggagcucaucuguugcc

SEQ ID NO: 1191809 - RNA, 18 nt, Human
cuggccaacacggugaaa

SEQ ID NO: 1191810 - RNA, 21 nt, Human
cuguagucccaguuacucggg

SEQ ID NO: 1191811 - RNA, 23 nt, Human
gaaaacccucuguuuggcaugcc

SEQ ID NO: 1191812 - RNA, 20 nt, Human
gaaaaguguuuauuugaguu

SEQ ID NO: 1191813 - RNA, 19 nt, Human
gaagcagggaggcagaggu

SEQ ID NO: 1191814 - RNA, 23 nt, Human
gagaucaugccacugcacuccag

SEQ ID NO: 1191815 - RNA, 24 nt, Human
gaucacgugaggucacgagcucga

SEQ ID NO: 1191816 - RNA, 25 nt, Human
gcacaacaacauauacauaugaaug

SEQ ID NO: 1191817 - RNA, 24 nt, Human
gcacuccagccugggcaacagagu

SEQ ID NO: 1191818 - RNA, 21 nt, Human
gcaggcaaaacaaaaagaagc

SEQ ID NO: 1191819 - RNA, 23 nt, Human
gccaacacggugaaaccccccuc

SEQ ID NO: 1191820 - RNA, 22 nt, Human
gccacugcacuccagccugggc

SEQ ID NO: 1191821 - RNA, 24 nt, Human
gccacugcacuccagccugggcaa

SEQ ID NO: 1191822 - RNA, 20 nt, Human
gccccaggauugagggcaaa

SEQ ID NO: 1191823 - RNA, 21 nt, Human
gccucacugcugucccugacc

SEQ ID NO: 1191824 - RNA, 20 nt, Human
gccucauucccuccagaagu

SEQ ID NO: 1191825 - RNA, 23 nt, Human
gcugacagcccccuacaucaucu

SEQ ID NO: 1191826 - RNA, 20 nt, Human
gcugagaucaugccacugca

SEQ ID NO: 1191827 - RNA, 23 nt, Human
ggacacaagcccacggacccagc

SEQ ID NO: 1191828 - RNA, 18 nt, Human
ggacccaaagaaacagug

SEQ ID NO: 1191829 - RNA, 24 nt, Human
ggagccagcagugacggcaggaaa

SEQ ID NO: 1191830 - RNA, 21 nt, Human
ggaggcagagguuacagugag

SEQ ID NO: 1191831 - RNA, 22 nt, Human
ggugaaaccccccucucuacua

SEQ ID NO: 1191832 - RNA, 23 nt, Human
gguggcucaugccaguaauucca

SEQ ID NO: 1191833 - RNA, 24 nt, Human
gguggcucaugccaguaauuccag

SEQ ID NO: 1191834 - RNA, 18 nt, Human
uaaaauagcuagacaagc

SEQ ID NO: 1191835 - RNA, 22 nt, Human
uaacaaaauauaaaauagcuag

SEQ ID NO: 1191836 - RNA, 23 nt, Human
uaacaugcaacagcaaacuacag

SEQ ID NO: 1191837 - RNA, 18 nt, Human
uaaccccaaggcuagggg

SEQ ID NO: 1191838 - RNA, 20 nt, Human
uaagaaaacugaagucugug

SEQ ID NO: 1191839 - RNA, 21 nt, Human
uaagaaacccaagggucaaga

SEQ ID NO: 1191840 - RNA, 22 nt, Human
uacaaucaauacagaccaucac

SEQ ID NO: 1191841 - RNA, 21 nt, Human
uagaauacucaggccagccuc

SEQ ID NO: 1191842 - RNA, 24 nt, Human
uagacaagcacaacaacauauaca

SEQ ID NO: 1191843 - RNA, 24 nt, Human
uagccuggccaacacggugaaacc

SEQ ID NO: 1191844 - RNA, 22 nt, Human
uaggaaguaauugugcuggaaa

SEQ ID NO: 1191845 - RNA, 24 nt, Human
uaggcuagagucuccaaggcugac

SEQ ID NO: 1191846 - RNA, 20 nt, Human
uaggugccccucaccuccuc

SEQ ID NO: 1191847 - RNA, 21 nt, Human
uaggugguauuggcacagaaa

SEQ ID NO: 1191848 - RNA, 19 nt, Human
ucaaaaaaaaaaaaaaaaa

SEQ ID NO: 1191849 - RNA, 24 nt, Human
ucaggccagccucgguggcucaug

SEQ ID NO: 1191850 - RNA, 22 nt, Human
ucaguacaagccuggaaagagg

SEQ ID NO: 1191851 - RNA, 23 nt, Human
ucaugccacugcacuccagccug

SEQ ID NO: 1191852 - RNA, 22 nt, Human
ucaugccaguaauuccagcacu

SEQ ID NO: 1191853 - RNA, 23 nt, Human
ucauucuaugccuagcucuccua

SEQ ID NO: 1191854 - RNA, 24 nt, Human
ucccagggacuaaagcacagagcu

SEQ ID NO: 1191855 - RNA, 19 nt, Human
ucucaaaaaaaaaaaaaaa

SEQ ID NO: 1191856 - RNA, 24 nt, Human
ucuccgugacaucccaagccacag

SEQ ID NO: 1191857 - RNA, 22 nt, Human
ucuccuagguggguuucagcuc

SEQ ID NO: 1191858 - RNA, 19 nt, Human
ucucuacuaaaaauauaaa

SEQ ID NO: 1191859 - RNA, 21 nt, Human
ucuguagucccaguuacucgg

SEQ ID NO: 1191860 - RNA, 24 nt, Human
ucuguggcuggagccagcagugac

SEQ ID NO: 1191861 - RNA, 20 nt, Human
ugaaaaguguuuauuugagu

SEQ ID NO: 1191862 - RNA, 21 nt, Human
ugaaaccccccucucuacuaa

SEQ ID NO: 1191863 - RNA, 25 nt, Human
ugacagagugagaccuugucucaaa

SEQ ID NO: 1191864 - RNA, 21 nt, Human
ugacaucccaagccacaguca

SEQ ID NO: 1191865 - RNA, 20 nt, Human
ugagauagaggccaagaguu

SEQ ID NO: 1191866 - RNA, 22 nt, Human
ugagcugagaucaugccacugc

SEQ ID NO: 1191867 - RNA, 24 nt, Human
ugcaggaguugcacugcccagccg

SEQ ID NO: 1191868 - RNA, 21 nt, Human
ugccaaguucuuggcuuggaa

SEQ ID NO: 1191869 - RNA, 24 nt, Human
ugccacugcacuccagccugggca

SEQ ID NO: 1191870 - RNA, 24 nt, Human
ugccaguaauuccagcacuuuggg

SEQ ID NO: 1191871 - RNA, 21 nt, Human
uggaagggucaugggggccaa

SEQ ID NO: 1191872 - RNA, 23 nt, Human
uggagggagucauaacucauggc

SEQ ID NO: 1191873 - RNA, 19 nt, Human
uggcagagcaaaagcacuc

SEQ ID NO: 1191874 - RNA, 21 nt, Human
uggcaggcaaaacaaaaagaa

SEQ ID NO: 1191875 - RNA, 22 nt, Human
uggcaggcaaaacaaaaagaag

SEQ ID NO: 1191876 - RNA, 31 nt, Human
uggcaggcaaaacaaaaagaagcaagcuccc

SEQ ID NO: 1191877 - RNA, 19 nt, Human
uggcuaagagcuauaggug

SEQ ID NO: 1191878 - RNA, 22 nt, Human
ugggaaauuagugaggccccag

SEQ ID NO: 1191879 - RNA, 19 nt, Human
ugggaggcggagacgggag

SEQ ID NO: 1191880 - RNA, 24 nt, Human
ugggaggcggagacgggaggauca

SEQ ID NO: 1191881 - RNA, 21 nt, Human
ugguauaaacaaaaaccuauu

SEQ ID NO: 1191882 - RNA, 28 nt, Human
ugguauaaacaaaaaccuauuuuaaagu

SEQ ID NO: 1191883 - RNA, 20 nt, Human
uuacagugagcugagaucau

SEQ ID NO: 1191884 - RNA, 21 nt, Human
uuacagugagcugagaucaug

SEQ ID NO: 1191885 - RNA, 20 nt, Human
uucugaauccugcuaacccc

SEQ ID NO: 1191886 - RNA, 22 nt, Human
aaaaaccaaccuuucauuacca

SEQ ID NO: 1191887 - RNA, 19 nt, Human
aaaccaaaccaacagaaaa

SEQ ID NO: 1191888 - RNA, 23 nt, Human
aaaccaccccaagaugauuacac

SEQ ID NO: 1191889 - RNA, 21 nt, Human
aacgaaaccaaaccaacagaa

SEQ ID NO: 1191890 - RNA, 18 nt, Human
aagcaggagguaagccca

SEQ ID NO: 1191891 - RNA, 21 nt, Human
aagccacugaacucugccagg

SEQ ID NO: 1191892 - RNA, 20 nt, Human
aaguggcuuguuuuaggagg

SEQ ID NO: 1191893 - RNA, 19 nt, Human
aauacaguauuggcagggg

SEQ ID NO: 1191894 - RNA, 21 nt, Human
acagaaagggcauaugcugug

SEQ ID NO: 1191895 - RNA, 18 nt, Human
acuugaguaugcauuggg

SEQ ID NO: 1191896 - RNA, 21 nt, Human
agaacuccagagcacugagca

SEQ ID NO: 1191897 - RNA, 24 nt, Human
agagagaacauuuaaaagcucaga

SEQ ID NO: 1191898 - RNA, 20 nt, Human
agaggcuggugaugaaaagg

SEQ ID NO: 1191899 - RNA, 20 nt, Human
agauagacagacugaagcca

SEQ ID NO: 1191900 - RNA, 19 nt, Human
agcuugcagauuccccucg

SEQ ID NO: 1191901 - RNA, 21 nt, Human
aggaaaaaaaccaauggugaa

SEQ ID NO: 1191902 - RNA, 21 nt, Human
aggcggggccagggccucagc

SEQ ID NO: 1191903 - RNA, 24 nt, Human
aggcugcacauggcccaggagugg

SEQ ID NO: 1191904 - RNA, 22 nt, Human
aggcuggugaugaaaaggugaa

SEQ ID NO: 1191905 - RNA, 21 nt, Human
aucauucuuuauuaacccucc

SEQ ID NO: 1191906 - RNA, 18 nt, Human
auguguuucuuggaaccu

SEQ ID NO: 1191907 - RNA, 24 nt, Human
caaaagcaggagguaagcccaaug

SEQ ID NO: 1191908 - RNA, 26 nt, Human
caacagaaaaugaagaagggggaccc

SEQ ID NO: 1191909 - RNA, 22 nt, Human
caacgugacuccuccccucccg

SEQ ID NO: 1191910 - RNA, 21 nt, Human
caagaugauuacacugaaaug

SEQ ID NO: 1191911 - RNA, 27 nt, Human
caagcagacacgucauggcuaugugga

SEQ ID NO: 1191912 - RNA, 20 nt, Human
cacagcuugcagauuccccu

SEQ ID NO: 1191913 - RNA, 18 nt, Human
cacagugggcaaauggcu

SEQ ID NO: 1191914 - RNA, 22 nt, Human
cacauggcccaggaguggcacc

SEQ ID NO: 1191915 - RNA, 23 nt, Human
caccauggcagugcuggaugacc

SEQ ID NO: 1191916 - RNA, 23 nt, Human
cacuggccagaagacugggcagc

SEQ ID NO: 1191917 - RNA, 20 nt, Human
cagaacagauagacagacug

SEQ ID NO: 1191918 - RNA, 21 nt, Human
cagaagacugggcagccacca

SEQ ID NO: 1191919 - RNA, 21 nt, Human
cagaccacauagugucuguug

SEQ ID NO: 1191920 - RNA, 21 nt, Human
cagauagacagacugaagcca

SEQ ID NO: 1191921 - RNA, 18 nt, Human
cagcgcuauggaagagug

SEQ ID NO: 1191922 - RNA, 18 nt, Human
cagcuugcagauuccccu

SEQ ID NO: 1191923 - RNA, 23 nt, Human
caggcucaggcucuaucccucag

SEQ ID NO: 1191924 - RNA, 21 nt, Human
cagguaagugguagacaacgu

SEQ ID NO: 1191925 - RNA, 18 nt, Human
cagugccaguuaaacuaa

SEQ ID NO: 1191926 - RNA, 23 nt, Human
cauagaaacgaaaccaaaccaac

SEQ ID NO: 1191927 - RNA, 21 nt, Human
cauuaccaaucccaggcaaca

SEQ ID NO: 1191928 - RNA, 22 nt, Human
cauuaccaaucccaggcaacaa

SEQ ID NO: 1191929 - RNA, 21 nt, Human
ccaaauacuuuugaaaacacc

SEQ ID NO: 1191930 - RNA, 25 nt, Human
ccaccauggcagugcuggaugaccu

SEQ ID NO: 1191931 - RNA, 19 nt, Human
ccacugugggacuugagua

SEQ ID NO: 1191932 - RNA, 26 nt, Human
ccagagagaacauuuaaaagcucaga

SEQ ID NO: 1191933 - RNA, 24 nt, Human
ccagagcacugagcagagaggcug

SEQ ID NO: 1191934 - RNA, 23 nt, Human
cccuccuuggaauuuugaaaacc

SEQ ID NO: 1191935 - RNA, 24 nt, Human
ccuacuuuuaccgagggccuggga

SEQ ID NO: 1191936 - RNA, 22 nt, Human
cuaacagccccagcugcaugga

SEQ ID NO: 1191937 - RNA, 22 nt, Human
cuacuaacagccccagcugcau

SEQ ID NO: 1191938 - RNA, 23 nt, Human
cucucauagaaacgaaaccaaac

SEQ ID NO: 1191939 - RNA, 20 nt, Human
cugaggcugcacauggcccc

SEQ ID NO: 1191940 - RNA, 28 nt, Human
cugcguacauggagggcuggucagagga

SEQ ID NO: 1191941 - RNA, 24 nt, Human
cugcguauguguuucuuggaaccu

SEQ ID NO: 1191942 - RNA, 20 nt, Human
cuggcaaacuuuucuguaaa

SEQ ID NO: 1191943 - RNA, 19 nt, Human
cugggaaaaugccaaaggu

SEQ ID NO: 1191944 - RNA, 20 nt, Human
cuuccacauaaagucuggua

SEQ ID NO: 1191945 - RNA, 21 nt, Human
cuuuugcuggauaugcagaaa

SEQ ID NO: 1191946 - RNA, 22 nt, Human
cuuuugggaguuauuuucauua

SEQ ID NO: 1191947 - RNA, 25 nt, Human
gaaacgaaaccaaaccaacagaaaa

SEQ ID NO: 1191948 - RNA, 19 nt, Human
gaacagauagacagacuga

SEQ ID NO: 1191949 - RNA, 23 nt, Human
gaacagauagacagacugaagcc

SEQ ID NO: 1191950 - RNA, 19 nt, Human
gacccuugaacaauauggg

SEQ ID NO: 1191951 - RNA, 20 nt, Human
gauuccuucugcagcaauuc

SEQ ID NO: 1191952 - RNA, 21 nt, Human
gcacucuuuuaaaggguucuu

SEQ ID NO: 1191953 - RNA, 20 nt, Human
gcagauuccccucaggcgag

SEQ ID NO: 1191954 - RNA, 20 nt, Human
gcagccaccauggcagugcu

SEQ ID NO: 1191955 - RNA, 23 nt, Human
gccaauuugcuuccaccaacugu

SEQ ID NO: 1191956 - RNA, 19 nt, Human
gccacuuaucagcucauca

SEQ ID NO: 1191957 - RNA, 18 nt, Human
gcuggggaaagcagagcu

SEQ ID NO: 1191958 - RNA, 19 nt, Human
ggauccagcaaaaguguua

SEQ ID NO: 1191959 - RNA, 18 nt, Human
ggaucccaugcagcucac

SEQ ID NO: 1191960 - RNA, 24 nt, Human
ggcacucuuuuaaaggguucuuuu

SEQ ID NO: 1191961 - RNA, 18 nt, Human
ggcagccaccauggcagu

SEQ ID NO: 1191962 - RNA, 23 nt, Human
gggaaauccuggccaaaccaccc

SEQ ID NO: 1191963 - RNA, 23 nt, Human
guggguucuguagggcccacugu

SEQ ID NO: 1191964 - RNA, 18 nt, Human
uaaaaacuguggcucaaa

SEQ ID NO: 1191965 - RNA, 18 nt, Human
uaaaacacuuuguuacaa

SEQ ID NO: 1191966 - RNA, 23 nt, Human
uaaagcagcuuauaucagggagc

SEQ ID NO: 1191967 - RNA, 19 nt, Human
uaaggccaccucugccucu

SEQ ID NO: 1191968 - RNA, 25 nt, Human
uaaguggcuuguuuuaggaggccac

SEQ ID NO: 1191969 - RNA, 23 nt, Human
uaccacagugccaguuaaacuaa

SEQ ID NO: 1191970 - RNA, 22 nt, Human
uaccgagggccugggaaaaugc

SEQ ID NO: 1191971 - RNA, 26 nt, Human
uacggccaaauacuuuugaaaacacc

SEQ ID NO: 1191972 - RNA, 23 nt, Human
uaggaaaaaaaccaauggugaaa

SEQ ID NO: 1191973 - RNA, 22 nt, Human
uauaaaacacuuuguuacaaau

SEQ ID NO: 1191974 - RNA, 20 nt, Human
uauagucaccccaaaccuac

SEQ ID NO: 1191975 - RNA, 20 nt, Human
uauauggauuuuuuucaacc

SEQ ID NO: 1191976 - RNA, 18 nt, Human
uauguguuucuuggaacc

SEQ ID NO: 1191977 - RNA, 24 nt, Human
ucagaacagauagacagacugaag

SEQ ID NO: 1191978 - RNA, 24 nt, Human
ucagcagcuuugggaucccaugca

SEQ ID NO: 1191979 - RNA, 22 nt, Human
ucauagaaacgaaaccaaacca

SEQ ID NO: 1191980 - RNA, 22 nt, Human
ucauccaaaucagaaugucuca

SEQ ID NO: 1191981 - RNA, 22 nt, Human
uccaaaucagaaugucucaggu

SEQ ID NO: 1191982 - RNA, 22 nt, Human
ucuaugcauggcugcguaugug

SEQ ID NO: 1191983 - RNA, 23 nt, Human
ucucauagaaacgaaaccaaacc

SEQ ID NO: 1191984 - RNA, 22 nt, Human
ucugcagucuugccaugcuuuc

SEQ ID NO: 1191985 - RNA, 23 nt, Human
ucugcagucuugccaugcuuucu

SEQ ID NO: 1191986 - RNA, 22 nt, Human
ugaaaacaccuuucuauauugc

SEQ ID NO: 1191987 - RNA, 21 nt, Human
ugaacugcauggcugcacuua

SEQ ID NO: 1191988 - RNA, 21 nt, Human
ugaagcucccagagagaacau

SEQ ID NO: 1191989 - RNA, 21 nt, Human
ugacacagagcugucugccag

SEQ ID NO: 1191990 - RNA, 23 nt, Human
ugcagaaaugauaggaaaaaaac

SEQ ID NO: 1191991 - RNA, 19 nt, Human
ugccaggagucaacaugag

SEQ ID NO: 1191992 - RNA, 21 nt, Human
uggaugugaaaaucuacggcc

SEQ ID NO: 1191993 - RNA, 20 nt, Human
uggcagggggcgaaaccugc

SEQ ID NO: 1191994 - RNA, 23 nt, Human
uggcagugcuggaugaccucagu

SEQ ID NO: 1191995 - RNA, 22 nt, Human
ugggacuugaguaugcauuggg

SEQ ID NO: 1191996 - RNA, 24 nt, Human
ugugagguaagacacuagagggau

SEQ ID NO: 1191997 - RNA, 18 nt, Human
ugugaggugcaggugcug

SEQ ID NO: 1191998 - RNA, 19 nt, Human
uguugcagggacaaccauc

SEQ ID NO: 1191999 - RNA, 22 nt, Human
uuagcuauuagcaaauaaaacu

SEQ ID NO: 1192000 - RNA, 18 nt, Human
uucauuaccaaucccagg

SEQ ID NO: 1192001 - RNA, 19 nt, Human
uuccagaucaacauggcua

SEQ ID NO: 1192002 - RNA, 22 nt, Human
uuuaucacauacguggguucug

SEQ ID NO: 1192003 - RNA, 20 nt, Human
uuugggaucccaugcagcuc

SEQ ID NO: 1192004 - RNA, 21 nt, Human
aaagaauuucucauauuucca

SEQ ID NO: 1192005 - RNA, 25 nt, Human
aaagcucucucacacucagugcauu

SEQ ID NO: 1192006 - RNA, 22 nt, Human
aacaagaaagacucaagaccau

SEQ ID NO: 1192007 - RNA, 23 nt, Human
aagaguugaucauugacaagcac

SEQ ID NO: 1192008 - RNA, 19 nt, Human
aagcacucuucauucagac

SEQ ID NO: 1192009 - RNA, 21 nt, Human
aagcucucucacacucagugc

SEQ ID NO: 1192010 - RNA, 18 nt, Human
aaggcauuuaaaaaguug

SEQ ID NO: 1192011 - RNA, 26 nt, Human
aaguuuccagcaucauauauguuaau

SEQ ID NO: 1192012 - RNA, 24 nt, Human
acccacccuagcuucucccagaac

SEQ ID NO: 1192013 - RNA, 21 nt, Human
acuugcuggggcuucucccca

SEQ ID NO: 1192014 - RNA, 19 nt, Human
agaauccagauggaagaaa

SEQ ID NO: 1192015 - RNA, 24 nt, Human
agauuucucguuggagugaggaug

SEQ ID NO: 1192016 - RNA, 22 nt, Human
agugaucaaauuugagcucaga

SEQ ID NO: 1192017 - RNA, 23 nt, Human
caaaaccucugggcaucuguaga

SEQ ID NO: 1192018 - RNA, 18 nt, Human
caagaaagacucaagacc

SEQ ID NO: 1192019 - RNA, 20 nt, Human
caagaaagacucaagaccau

SEQ ID NO: 1192020 - RNA, 21 nt, Human
caauuuuucaccaguauggcu

SEQ ID NO: 1192021 - RNA, 18 nt, Human
cacccuagcuucucccag

SEQ ID NO: 1192022 - RNA, 20 nt, Human
cacucuucauucagacacuu

SEQ ID NO: 1192023 - RNA, 18 nt, Human
cagugcauuucuaagguu

SEQ ID NO: 1192024 - RNA, 23 nt, Human
cauuucuaagguuucccacuugu

SEQ ID NO: 1192025 - RNA, 22 nt, Human
ccaaagguuuucucagacucaa

SEQ ID NO: 1192026 - RNA, 19 nt, Human
cccacccuagcuucuccca

SEQ ID NO: 1192027 - RNA, 22 nt, Human
cccacccuagcuucucccagaa

SEQ ID NO: 1192028 - RNA, 23 nt, Human
ccggcgccgccccuaggccuggg

SEQ ID NO: 1192029 - RNA, 20 nt, Human
cggugugaauucucuuacaa

SEQ ID NO: 1192030 - RNA, 19 nt, Human
cucauacauauuauaugua

SEQ ID NO: 1192031 - RNA, 21 nt, Human
cuccggugugaauucucuuac

SEQ ID NO: 1192032 - RNA, 25 nt, Human
cucucugguccccacugaauucuga

SEQ ID NO: 1192033 - RNA, 18 nt, Human
cugucugcagcacaacug

SEQ ID NO: 1192034 - RNA, 21 nt, Human
gaaaacauacauuccugaucc

SEQ ID NO: 1192035 - RNA, 20 nt, Human
gaaggcauuuaaaaaguugu

SEQ ID NO: 1192036 - RNA, 27 nt, Human
gacccaucguugcccucacagucauuu

SEQ ID NO: 1192037 - RNA, 20 nt, Human
gacucaagaccaucuuccuu

SEQ ID NO: 1192038 - RNA, 21 nt, Human
gagaagggcugagcauuagua

SEQ ID NO: 1192039 - RNA, 23 nt, Human
gcacaacugacacugaaggcauu

SEQ ID NO: 1192040 - RNA, 22 nt, Human
gccccuaggccuggggacagca

SEQ ID NO: 1192041 - RNA, 21 nt, Human
ggagcuucuaccaaagguuuu

SEQ ID NO: 1192042 - RNA, 19 nt, Human
ggagugaggaugaaguguu

SEQ ID NO: 1192043 - RNA, 20 nt, Human
ggcuucuccccagggugggu

SEQ ID NO: 1192044 - RNA, 22 nt, Human
gggcaaagaauuucucauauuu

SEQ ID NO: 1192045 - RNA, 19 nt, Human
ggggccugauaagacagga

SEQ ID NO: 1192046 - RNA, 19 nt, Human
uaaaagaaaagcaucuuua

SEQ ID NO: 1192047 - RNA, 21 nt, Human
uacucugacccacccuagcuu

SEQ ID NO: 1192048 - RNA, 25 nt, Human
uagaaagcucucucacacucagugc

SEQ ID NO: 1192049 - RNA, 21 nt, Human
uagggaguuuuccgcuggucu

SEQ ID NO: 1192050 - RNA, 26 nt, Human
uagggaguuuuccgcuggucuucuug

SEQ ID NO: 1192051 - RNA, 18 nt, Human
uauuauauguacauagau

SEQ ID NO: 1192052 - RNA, 19 nt, Human
ucaaaaccucugggcaucu

SEQ ID NO: 1192053 - RNA, 25 nt, Human
ucaagguaaguauggguuuuuucac

SEQ ID NO: 1192054 - RNA, 24 nt, Human
ucacugcagaacagguuuuuuggg

SEQ ID NO: 1192055 - RNA, 24 nt, Human
ucagacacuugcagucuuuccuca

SEQ ID NO: 1192056 - RNA, 21 nt, Human
ucucacacucagugcauuucu

SEQ ID NO: 1192057 - RNA, 21 nt, Human
ucucccagaacaagcuucugg

SEQ ID NO: 1192058 - RNA, 23 nt, Human
ucucccagaacaagcuucugggu

SEQ ID NO: 1192059 - RNA, 19 nt, Human
ucugagcucugagcaaagu

SEQ ID NO: 1192060 - RNA, 18 nt, Human
ugacccaucguugcccuc

SEQ ID NO: 1192061 - RNA, 18 nt, Human
ugagauguucauacuguc

SEQ ID NO: 1192062 - RNA, 24 nt, Human
ugcuggggcuucuccccagggugg

SEQ ID NO: 1192063 - RNA, 23 nt, Human
uggaagauacaucuguuucaggc

SEQ ID NO: 1192064 - RNA, 21 nt, Human
uucccugauguaccacaagag

SEQ ID NO: 1192065 - RNA, 18 nt, Human
uuccugauccugacaauu

SEQ ID NO: 1192066 - RNA, 23 nt, Human
uuccugauccugacaauuugacu

SEQ ID NO: 1192067 - RNA, 22 nt, Human
uucguaacaagaaagacucaag

SEQ ID NO: 1192068 - RNA, 26 nt, Human
uuucauguaaaguccucucuaccaua

SEQ ID NO: 1192069 - RNA, 19 nt, Human
uuucucguuggagugagga

SEQ ID NO: 1192070 - RNA, 21 nt, Human
uuugggugcaaacccaaguaa

SEQ ID NO: 1192071 - RNA, 26 nt, Human
aaacuugcaacaaauguuugccuuga

SEQ ID NO: 1192072 - RNA, 22 nt, Human
aaggcaucauucuugcacgaaa

SEQ ID NO: 1192073 - RNA, 20 nt, Human
aauacugaugagccauuugu

SEQ ID NO: 1192074 - RNA, 21 nt, Human
agccgacccccgagcuuccca

SEQ ID NO: 1192075 - RNA, 22 nt, Human
agccuuuucaagaaaagcuuuu

SEQ ID NO: 1192076 - RNA, 20 nt, Human
caagugugaauucauagagc

SEQ ID NO: 1192077 - RNA, 19 nt, Human
cagccuuuucaagaaaagc

SEQ ID NO: 1192078 - RNA, 25 nt, Human
cagcugcgcccccucuacuuuccga

SEQ ID NO: 1192079 - RNA, 23 nt, Human
cauuauauucaaaaucuugcccc

SEQ ID NO: 1192080 - RNA, 22 nt, Human
ccaaaucaagugugaauucaua

SEQ ID NO: 1192081 - RNA, 23 nt, Human
ccauuugucacaaacauuacgcu

SEQ ID NO: 1192082 - RNA, 25 nt, Human
cccacaaacuucccgcuuccucucc

SEQ ID NO: 1192083 - RNA, 18 nt, Human
ccccagcugcgcccccuc

SEQ ID NO: 1192084 - RNA, 19 nt, Human
ccgacccccgagcuucccu

SEQ ID NO: 1192085 - RNA, 19 nt, Human
ccuuuuggguggguacugu

SEQ ID NO: 1192086 - RNA, 21 nt, Human
cucccgcuuccgggcacaaac

SEQ ID NO: 1192087 - RNA, 21 nt, Human
cuccuuguuccaaugugaaga

SEQ ID NO: 1192088 - RNA, 20 nt, Human
gaaacuuuuuccauauucaa

SEQ ID NO: 1192089 - RNA, 18 nt, Human
gacccccgagcuucccaa

SEQ ID NO: 1192090 - RNA, 21 nt, Human
gagccgacccccgagcuuccc

SEQ ID NO: 1192091 - RNA, 18 nt, Human
gagcuucccaaaccgcuu

SEQ ID NO: 1192092 - RNA, 19 nt, Human
guaaagcaguagccugaaa

SEQ ID NO: 1192093 - RNA, 21 nt, Human
gugugacuuuuggcugaagga

SEQ ID NO: 1192094 - RNA, 23 nt, Human
uaaagcuuucaaaagaaucagaa

SEQ ID NO: 1192095 - RNA, 26 nt, Human
uaacaagggcagccuuuucaagaaaa

SEQ ID NO: 1192096 - RNA, 21 nt, Human
uagaaauccuuucucuuucuc

SEQ ID NO: 1192097 - RNA, 22 nt, Human
uagccacggaaaacccuucaug

SEQ ID NO: 1192098 - RNA, 18 nt, Human
ucacugaaccuuucaugc

SEQ ID NO: 1192099 - RNA, 19 nt, Human
ucacugaaccuuucaugcc

SEQ ID NO: 1192100 - RNA, 19 nt, Human
ucagaaguagauagccacg

SEQ ID NO: 1192101 - RNA, 21 nt, Human
ucagguugggagucuucuggg

SEQ ID NO: 1192102 - RNA, 18 nt, Human
ucauuuucuguggcucuu

SEQ ID NO: 1192103 - RNA, 20 nt, Human
uccugaaauuucuugcucug

SEQ ID NO: 1192104 - RNA, 22 nt, Human
uccuuguuccaaugugaagauc

SEQ ID NO: 1192105 - RNA, 21 nt, Human
ucucccgcuuccgggcacaaa

SEQ ID NO: 1192106 - RNA, 21 nt, Human
ucucugagauuucaucagguu

SEQ ID NO: 1192107 - RNA, 18 nt, Human
ucuugggagaguauagag

SEQ ID NO: 1192108 - RNA, 19 nt, Human
ugagauuucaucagguugg

SEQ ID NO: 1192109 - RNA, 18 nt, Human
ugagccccuggcaagcag

SEQ ID NO: 1192110 - RNA, 19 nt, Human
ugauguacacugaaaguug

SEQ ID NO: 1192111 - RNA, 24 nt, Human
ugauuuaucauauuuguuuucccc

SEQ ID NO: 1192112 - RNA, 19 nt, Human
ugcccaaugucuuuaaagc

SEQ ID NO: 1192113 - RNA, 18 nt, Human
uggcaagcagaccccgca

SEQ ID NO: 1192114 - RNA, 25 nt, Human
uggcugaaggauuucccuccugugg

SEQ ID NO: 1192115 - RNA, 22 nt, Human
uguaaagccucagcugugaaag

SEQ ID NO: 1192116 - RNA, 27 nt, Human
uguaacaagggcagccuuuucaagaaa

SEQ ID NO: 1192117 - RNA, 22 nt, Human
uguccucccgccccagcugcgc

SEQ ID NO: 1192118 - RNA, 19 nt, Human
uguuuuccuccuggcucua

SEQ ID NO: 1192119 - RNA, 22 nt, Human
uuccauauucaaaggguuucac

SEQ ID NO: 1192120 - RNA, 21 nt, Human
uuccgagccgacccccgagcu

SEQ ID NO: 1192121 - RNA, 23 nt, Human
uucucuggauucauguucugagg

SEQ ID NO: 1192122 - RNA, 20 nt, Human
uucuugcucuguagucaaua

SEQ ID NO: 1192123 - RNA, 18 nt, Human
aaacagagucugcagaug

SEQ ID NO: 1192124 - RNA, 25 nt, Human
aaacuagccucucccaauugcccuu

SEQ ID NO: 1192125 - RNA, 21 nt, Human
aaacugaucuuauucugagua

SEQ ID NO: 1192126 - RNA, 19 nt, Human
aaagugcugagauuacagg

SEQ ID NO: 1192127 - RNA, 23 nt, Human
aaagugcugagauuacaggcaca

SEQ ID NO: 1192128 - RNA, 24 nt, Human
aaagugcugagauuacaggcacac

SEQ ID NO: 1192129 - RNA, 21 nt, Human
aagaaguggucuuguuucaaa

SEQ ID NO: 1192130 - RNA, 24 nt, Human
aagugcugagauuacaggcacacu

SEQ ID NO: 1192131 - RNA, 24 nt, Human
acagacagacacauagugaggagg

SEQ ID NO: 1192132 - RNA, 25 nt, Human
acagauucaccucuucuaccaaauu

SEQ ID NO: 1192133 - RNA, 23 nt, Human
acuucagagagaguauggcacug

SEQ ID NO: 1192134 - RNA, 25 nt, Human
acuuugucacccaggcuagagcaca

SEQ ID NO: 1192135 - RNA, 25 nt, Human
agaaaagagcauauuauuaagaaaa

SEQ ID NO: 1192136 - RNA, 22 nt, Human
agaaacuggacauuuuagauaa

SEQ ID NO: 1192137 - RNA, 19 nt, Human
agaaggagccucacugaua

SEQ ID NO: 1192138 - RNA, 24 nt, Human
agccacggauugcuggaaaccacc

SEQ ID NO: 1192139 - RNA, 18 nt, Human
agcuggagcaggaggccc

SEQ ID NO: 1192140 - RNA, 19 nt, Human
agcuggaggacaauucauc

SEQ ID NO: 1192141 - RNA, 21 nt, Human
aggaaaauguaaacacagaca

SEQ ID NO: 1192142 - RNA, 24 nt, Human
aggacacugccauccuacuccucc

SEQ ID NO: 1192143 - RNA, 21 nt, Human
aggaggcccucugugcuggga

SEQ ID NO: 1192144 - RNA, 21 nt, Human
aggcauugcaucuggucucca

SEQ ID NO: 1192145 - RNA, 18 nt, Human
agguguugaaguccuaac

SEQ ID NO: 1192146 - RNA, 21 nt, Human
aguuucuuucucugcuuuuuu

SEQ ID NO: 1192147 - RNA, 19 nt, Human
auaaagaucuuuauccaca

SEQ ID NO: 1192148 - RNA, 24 nt, Human
caaagugcagggaugacagaugug

SEQ ID NO: 1192149 - RNA, 23 nt, Human
caaagugcugagauuacaggcac

SEQ ID NO: 1192150 - RNA, 24 nt, Human
caaagugcugagauuacaggcaca

SEQ ID NO: 1192151 - RNA, 19 nt, Human
caacaagacgcucaguacc

SEQ ID NO: 1192152 - RNA, 23 nt, Human
caauugcccuucaccacaaccuc

SEQ ID NO: 1192153 - RNA, 26 nt, Human
caauugcccuucaccacaaccuccac

SEQ ID NO: 1192154 - RNA, 18 nt, Human
cacacucagccuaugucu

SEQ ID NO: 1192155 - RNA, 25 nt, Human
caccacaaccuccacuguguuuuca

SEQ ID NO: 1192156 - RNA, 24 nt, Human
caccucaaccccucaaagugcuga

SEQ ID NO: 1192157 - RNA, 23 nt, Human
cacgcaguucaaaccuguguugu

SEQ ID NO: 1192158 - RNA, 20 nt, Human
cacggauugcuggaaaccac

SEQ ID NO: 1192159 - RNA, 21 nt, Human
cacucugcuguccuguccuuc

SEQ ID NO: 1192160 - RNA, 19 nt, Human
cacugccauccuacuccuc

SEQ ID NO: 1192161 - RNA, 22 nt, Human
cacuuugucacccaggcuagag

SEQ ID NO: 1192162 - RNA, 19 nt, Human
cagaaggagccucacugau

SEQ ID NO: 1192163 - RNA, 23 nt, Human
cagcaacagggagcugggggcag

SEQ ID NO: 1192164 - RNA, 20 nt, Human
caggaugaaggacacugcca

SEQ ID NO: 1192165 - RNA, 21 nt, Human
caggcacacucagccuauguc

SEQ ID NO: 1192166 - RNA, 18 nt, Human
caggcauugcaucugguc

SEQ ID NO: 1192167 - RNA, 20 nt, Human
cagguguauggaucauauua

SEQ ID NO: 1192168 - RNA, 21 nt, Human
cagugguuuugcuagggcucu

SEQ ID NO: 1192169 - RNA, 21 nt, Human
caguucaaaccuguguugucc

SEQ ID NO: 1192170 - RNA, 18 nt, Human
cauccuacuccucccugg

SEQ ID NO: 1192171 - RNA, 20 nt, Human
ccacaaccuccacuguguuu

SEQ ID NO: 1192172 - RNA, 20 nt, Human
ccagaacucucaaagugcag

SEQ ID NO: 1192173 - RNA, 22 nt, Human
ccauccuacuccucccuggaag

SEQ ID NO: 1192174 - RNA, 18 nt, Human
cccaauugcccuucacca

SEQ ID NO: 1192175 - RNA, 21 nt, Human
cccaauugcccuucaccacaa

SEQ ID NO: 1192176 - RNA, 23 nt, Human
cccaccucaaccccucaaagugc

SEQ ID NO: 1192177 - RNA, 22 nt, Human
ccccauuaaacuguggcuccuu

SEQ ID NO: 1192178 - RNA, 20 nt, Human
cccuggaaggaggcccucug

SEQ ID NO: 1192179 - RNA, 22 nt, Human
ccuaaccccaguacccaugaac

SEQ ID NO: 1192180 - RNA, 24 nt, Human
ccucaaagugcugagauuacaggc

SEQ ID NO: 1192181 - RNA, 26 nt, Human
ccucccaccucaaccccucaaagugc

SEQ ID NO: 1192182 - RNA, 18 nt, Human
ccuccuucaggacuuguu

SEQ ID NO: 1192183 - RNA, 22 nt, Human
ccugcaggcuuugacccagggc

SEQ ID NO: 1192184 - RNA, 20 nt, Human
ccugggcucaagcaauccuc

SEQ ID NO: 1192185 - RNA, 23 nt, Human
ccuucaccacaaccuccacugug

SEQ ID NO: 1192186 - RNA, 21 nt, Human
cgaguccaacuuucagucucc

SEQ ID NO: 1192187 - RNA, 21 nt, Human
cucaaccccucaaagugcuga

SEQ ID NO: 1192188 - RNA, 21 nt, Human
cucaagcaauccucccaccuc

SEQ ID NO: 1192189 - RNA, 24 nt, Human
cucaagcaauccucccaccucaac

SEQ ID NO: 1192190 - RNA, 18 nt, Human
cucccaccucaaccccuc

SEQ ID NO: 1192191 - RNA, 19 nt, Human
cucucuggcacuucccuaa

SEQ ID NO: 1192192 - RNA, 21 nt, Human
cuggaaaccaccagaaacugg

SEQ ID NO: 1192193 - RNA, 21 nt, Human
cuguggcuccuuugaaagaau

SEQ ID NO: 1192194 - RNA, 19 nt, Human
cuucccuaaccacauccag

SEQ ID NO: 1192195 - RNA, 27 nt, Human
cuucccuaaccacauccagcuguuaag

SEQ ID NO: 1192196 - RNA, 24 nt, Human
cuucgccugcaggcuuugacccag

SEQ ID NO: 1192197 - RNA, 23 nt, Human
gaaguccuaaccccaguacccau

SEQ ID NO: 1192198 - RNA, 27 nt, Human
gagacagccucagcaacagggagcugg

SEQ ID NO: 1192199 - RNA, 21 nt, Human
gaggaaagaaguggucuuguu

SEQ ID NO: 1192200 - RNA, 21 nt, Human
gagggagaagaauagggguca

SEQ ID NO: 1192201 - RNA, 18 nt, Human
gaugacagaugugagcca

SEQ ID NO: 1192202 - RNA, 21 nt, Human
gaugccaucaagcgaagaaga

SEQ ID NO: 1192203 - RNA, 18 nt, Human
gcaugccuuguaauuuuu

SEQ ID NO: 1192204 - RNA, 21 nt, Human
ggaggagugggucaggcggcu

SEQ ID NO: 1192205 - RNA, 23 nt, Human
gggaugacagaugugagccauca

SEQ ID NO: 1192206 - RNA, 19 nt, Human
guuuucaacaauauccugg

SEQ ID NO: 1192207 - RNA, 21 nt, Human
uaaacacagacagacacauag

SEQ ID NO: 1192208 - RNA, 24 nt, Human
uaaaguguuccacaaacuaacccc

SEQ ID NO: 1192209 - RNA, 23 nt, Human
uaccuacgaguccaacuuucagu

SEQ ID NO: 1192210 - RNA, 22 nt, Human
uaccuggaggagugggucaggc

SEQ ID NO: 1192211 - RNA, 26 nt, Human
uaccuggaggagugggucaggcggcu

SEQ ID NO: 1192212 - RNA, 22 nt, Human
uagccucacucuccugggcuca

SEQ ID NO: 1192213 - RNA, 19 nt, Human
uagcuuucuagcauagcuu

SEQ ID NO: 1192214 - RNA, 26 nt, Human
uaguacauuuucuugaauacagguuc

SEQ ID NO: 1192215 - RNA, 21 nt, Human
uagugaggaggccgcaugaug

SEQ ID NO: 1192216 - RNA, 24 nt, Human
ucaaagugcagggaugacagaugu

SEQ ID NO: 1192217 - RNA, 23 nt, Human
ucaaagugcugagauuacaggca

SEQ ID NO: 1192218 - RNA, 23 nt, Human
ucaccacaaccuccacuggggcc

SEQ ID NO: 1192219 - RNA, 25 nt, Human
ucaguaaaauaaguuacagaaaaga

SEQ ID NO: 1192220 - RNA, 19 nt, Human
uccagaagccuuaaauggc

SEQ ID NO: 1192221 - RNA, 22 nt, Human
ucccuaaccacauccagcuguu

SEQ ID NO: 1192222 - RNA, 18 nt, Human
uccucccaccucaacccc

SEQ ID NO: 1192223 - RNA, 18 nt, Human
uccugggcucaagcaauc

SEQ ID NO: 1192224 - RNA, 24 nt, Human
uccugggcucaagcaauccuccca

SEQ ID NO: 1192225 - RNA, 22 nt, Human
uccuugggacuauuuccagaag

SEQ ID NO: 1192226 - RNA, 20 nt, Human
ucucaaagugcagggaugac

SEQ ID NO: 1192227 - RNA, 19 nt, Human
ucucacuuugucacccagg

SEQ ID NO: 1192228 - RNA, 22 nt, Human
ucucacuuugucacccaggcua

SEQ ID NO: 1192229 - RNA, 24 nt, Human
ucucacuuugucacccaggcuaga

SEQ ID NO: 1192230 - RNA, 19 nt, Human
ucuccacaacaagacgcuc

SEQ ID NO: 1192231 - RNA, 24 nt, Human
ucuccugggcucaagcaauccucc

SEQ ID NO: 1192232 - RNA, 23 nt, Human
ucugugcugggaggagaggagac

SEQ ID NO: 1192233 - RNA, 19 nt, Human
ugaacaaaguagggguuau

SEQ ID NO: 1192234 - RNA, 22 nt, Human
ugacagugguuuugcuagggcu

SEQ ID NO: 1192235 - RNA, 22 nt, Human
ugacccccagaaggguuccuuc

SEQ ID NO: 1192236 - RNA, 21 nt, Human
ugagaagaggaaaauguaaac

SEQ ID NO: 1192237 - RNA, 25 nt, Human
ugagauuacaggcacacucagccua

SEQ ID NO: 1192238 - RNA, 24 nt, Human
ugaguaaguagcuauuaucaauac

SEQ ID NO: 1192239 - RNA, 25 nt, Human
ugauagaugccuagccucacucucc

SEQ ID NO: 1192240 - RNA, 18 nt, Human
ugccaucaagcgaagaag

SEQ ID NO: 1192241 - RNA, 22 nt, Human
ugccuuguaauuuuuugugaga

SEQ ID NO: 1192242 - RNA, 23 nt, Human
ugcugagauuacaggcacacuca

SEQ ID NO: 1192243 - RNA, 23 nt, Human
ugcugggaggagaggagaccugu

SEQ ID NO: 1192244 - RNA, 21 nt, Human
uggaaacagagucugcagaug

SEQ ID NO: 1192245 - RNA, 19 nt, Human
uggagggaaauugccaccg

SEQ ID NO: 1192246 - RNA, 19 nt, Human
ugggaguggggaggaaaga

SEQ ID NO: 1192247 - RNA, 20 nt, Human
ugggaguggggaggaaagaa

SEQ ID NO: 1192248 - RNA, 23 nt, Human
ugggaguggggaggaaagaagug

SEQ ID NO: 1192249 - RNA, 24 nt, Human
ugguggccaauugcccuauuguuu

SEQ ID NO: 1192250 - RNA, 22 nt, Human
uguagaguaugcugcagaggag

SEQ ID NO: 1192251 - RNA, 22 nt, Human
ugucacccaggcuagagcacag

SEQ ID NO: 1192252 - RNA, 18 nt, Human
ugugauagaugccuagcc

SEQ ID NO: 1192253 - RNA, 21 nt, Human
ugugauagaugccuagccuca

SEQ ID NO: 1192254 - RNA, 21 nt, Human
uguuccacaaacuaaccccau

SEQ ID NO: 1192255 - RNA, 18 nt, Human
uguuugauauuuguucug

SEQ ID NO: 1192256 - RNA, 21 nt, Human
uucagcaguagcugucuggag

SEQ ID NO: 1192257 - RNA, 18 nt, Human
uugaaguccuaaccccag

SEQ ID NO: 1192258 - RNA, 21 nt, Human
uugcaugccuuguaauuuuuu

SEQ ID NO: 1192259 - RNA, 19 nt, Human
uugcuggaaaccaccagaa

SEQ ID NO: 1192260 - RNA, 23 nt, Human
uugcuguuuuuccuugggacuaa

SEQ ID NO: 1192261 - RNA, 20 nt, Human
uuucacacuuguggccucca

SEQ ID NO: 1192262 - RNA, 21 nt, Human
aaaaggcucagcuagaccuuu

SEQ ID NO: 1192263 - RNA, 19 nt, Human
aagggcuccugguugccca

SEQ ID NO: 1192264 - RNA, 24 nt, Human
aagugaaagcaaguuuauugagaa

SEQ ID NO: 1192265 - RNA, 19 nt, Human
accuaccuucuuccccuug

SEQ ID NO: 1192266 - RNA, 18 nt, Human
accucuauucucccaaca

SEQ ID NO: 1192267 - RNA, 25 nt, Human
accuucuuccccuuguuuuccuccu

SEQ ID NO: 1192268 - RNA, 21 nt, Human
acucccucuuccucuccacug

SEQ ID NO: 1192269 - RNA, 19 nt, Human
agauaggagagggggcugc

SEQ ID NO: 1192270 - RNA, 18 nt, Human
aggaauaaaagaauggcc

SEQ ID NO: 1192271 - RNA, 24 nt, Human
aggagcugguuguauugauggggg

SEQ ID NO: 1192272 - RNA, 20 nt, Human
agucauggugcugaggccug

SEQ ID NO: 1192273 - RNA, 19 nt, Human
auccacugggacuagaaua

SEQ ID NO: 1192274 - RNA, 24 nt, Human
caacuaugugcaaagucccuauaa

SEQ ID NO: 1192275 - RNA, 23 nt, Human
cacccucugccacagaaccugcc

SEQ ID NO: 1192276 - RNA, 18 nt, Human
cacucaagaugauuuggg

SEQ ID NO: 1192277 - RNA, 21 nt, Human
cacucccucuuccucuccacu

SEQ ID NO: 1192278 - RNA, 24 nt, Human
cacuguuccuuucugggcaccgcg

SEQ ID NO: 1192279 - RNA, 19 nt, Human
cagccccuauacaagagag

SEQ ID NO: 1192280 - RNA, 25 nt, Human
caggagcugguuguauugauggggg

SEQ ID NO: 1192281 - RNA, 19 nt, Human
cagugcagaggcuccugcc

SEQ ID NO: 1192282 - RNA, 18 nt, Human
cccaacauccucaugccc

SEQ ID NO: 1192283 - RNA, 22 nt, Human
ccccaagggcuccugguugccc

SEQ ID NO: 1192284 - RNA, 22 nt, Human
ccggcuucuuuacugcaaccug

SEQ ID NO: 1192285 - RNA, 22 nt, Human
ccuaccuucuuccccuuguuuu

SEQ ID NO: 1192286 - RNA, 21 nt, Human
ccuccuaucucauccugugac

SEQ ID NO: 1192287 - RNA, 21 nt, Human
ccucugcuguguccacagggc

SEQ ID NO: 1192288 - RNA, 21 nt, Human
cgggaugcucuuuuccaggcc

SEQ ID NO: 1192289 - RNA, 21 nt, Human
cucacucccucuuccucucca

SEQ ID NO: 1192290 - RNA, 18 nt, Human
cucauuuuacccagcccc

SEQ ID NO: 1192291 - RNA, 23 nt, Human
cuccuauucuguuauucuuuuuc

SEQ ID NO: 1192292 - RNA, 23 nt, Human
cuccugccggcuuccuugcuugg

SEQ ID NO: 1192293 - RNA, 19 nt, Human
cuucucagaggagccaccu

SEQ ID NO: 1192294 - RNA, 19 nt, Human
gaggagccaccucuauucu

SEQ ID NO: 1192295 - RNA, 22 nt, Human
gagucaaucugguuuaaacacc

SEQ ID NO: 1192296 - RNA, 21 nt, Human
gccauauuagaaauaaaagga

SEQ ID NO: 1192297 - RNA, 20 nt, Human
gccuuccuuucuuuccaaag

SEQ ID NO: 1192298 - RNA, 22 nt, Human
gcuggcaaaccagacccccgcg

SEQ ID NO: 1192299 - RNA, 19 nt, Human
ggagcugguuguauugaug

SEQ ID NO: 1192300 - RNA, 24 nt, Human
ggagcugguuguauugaugggggc

SEQ ID NO: 1192301 - RNA, 19 nt, Human
ggcaggccaaccugcagca

SEQ ID NO: 1192302 - RNA, 20 nt, Human
ggcuccugguugcccauuuu

SEQ ID NO: 1192303 - RNA, 19 nt, Human
gguggguuuuggccggcuu

SEQ ID NO: 1192304 - RNA, 22 nt, Human
gucccaccuaccuucuuccccu

SEQ ID NO: 1192305 - RNA, 21 nt, Human
guuagcuuggcugaaggagca

SEQ ID NO: 1192306 - RNA, 22 nt, Human
guuccuuucugggcaccgcggc

SEQ ID NO: 1192307 - RNA, 20 nt, Human
uaaagugaaagcaaguuuaa

SEQ ID NO: 1192308 - RNA, 19 nt, Human
uagcuuggcugaaggagca

SEQ ID NO: 1192309 - RNA, 21 nt, Human
uagucauggugcugaggccug

SEQ ID NO: 1192310 - RNA, 21 nt, Human
ucacccucugccacagaaccu

SEQ ID NO: 1192311 - RNA, 20 nt, Human
ucacucccucuuccucucca

SEQ ID NO: 1192312 - RNA, 22 nt, Human
ucagcuagaccuuuccaggguc

SEQ ID NO: 1192313 - RNA, 21 nt, Human
uccaccuuagccauauuagaa

SEQ ID NO: 1192314 - RNA, 21 nt, Human
uccagaugcucuagggcuucc

SEQ ID NO: 1192315 - RNA, 22 nt, Human
uccagggucccagugagcaccc

SEQ ID NO: 1192316 - RNA, 20 nt, Human
ucuuuacugcaaccuguuuu

SEQ ID NO: 1192317 - RNA, 24 nt, Human
ugaaggagcaggaacuaagcugca

SEQ ID NO: 1192318 - RNA, 20 nt, Human
ugagaaugcagcccaguagg

SEQ ID NO: 1192319 - RNA, 23 nt, Human
ugagauaggagagggggcugcuu

SEQ ID NO: 1192320 - RNA, 26 nt, Human
ugagauaggagagggggcugcuuuaa

SEQ ID NO: 1192321 - RNA, 20 nt, Human
ugccugaagagaguucugag

SEQ ID NO: 1192322 - RNA, 23 nt, Human
ugcucuagggcuuccgcguuagc

SEQ ID NO: 1192323 - RNA, 28 nt, Human
uggcaaaccagacccccgcgucguuucu

SEQ ID NO: 1192324 - RNA, 18 nt, Human
uguagcagugaggacgac

SEQ ID NO: 1192325 - RNA, 18 nt, Human
ugucauggcgcugauggg

SEQ ID NO: 1192326 - RNA, 18 nt, Human
uguggauuccucugcugu

SEQ ID NO: 1192327 - RNA, 21 nt, Human
uuaaagugaaagcaaguuuau

SEQ ID NO: 1192328 - RNA, 19 nt, Human
uuacccagccccuauacaa

SEQ ID NO: 1192329 - RNA, 18 nt, Human
uuccagggucccagugag

SEQ ID NO: 1192330 - RNA, 19 nt, Human
uuccagggucccagugagc

SEQ ID NO: 1192331 - RNA, 18 nt, Human
uugguggguuuuggccgg

SEQ ID NO: 1192332 - RNA, 21 nt, Human
uuuccaggcccaagucccguu

SEQ ID NO: 1192333 - RNA, 25 nt, Human
uuuuuuuuuuaaagugaaagcaagu

SEQ ID NO: 1192334 - RNA, 21 nt, Human
uuuuuuuuuuuuuuuuuaaag

SEQ ID NO: 1192335 - RNA, 19 nt, Human
aaaggccacuuccaaacug

SEQ ID NO: 1192336 - RNA, 24 nt, Human
aacccguuccuccgaaucaggcug

SEQ ID NO: 1192337 - RNA, 18 nt, Human
aggccgccgggggcccag

SEQ ID NO: 1192338 - RNA, 24 nt, Human
cacaacucgagcugggagccgccc

SEQ ID NO: 1192339 - RNA, 23 nt, Human
cacccgcggcggggcccacaacu

SEQ ID NO: 1192340 - RNA, 20 nt, Human
cagaugauggaaugcccucc

SEQ ID NO: 1192341 - RNA, 19 nt, Human
caggcaccuggagccggga

SEQ ID NO: 1192342 - RNA, 21 nt, Human
caggucucaagaagcuuagaa

SEQ ID NO: 1192343 - RNA, 19 nt, Human
cagugggcggguggcgugg

SEQ ID NO: 1192344 - RNA, 29 nt, Human
ccaauggcgggaacaagcaaggcuuccuu

SEQ ID NO: 1192345 - RNA, 21 nt, Human
cccacaacucgagcugggagc

SEQ ID NO: 1192346 - RNA, 22 nt, Human
ccgggaggguccgcucccuucc

SEQ ID NO: 1192347 - RNA, 21 nt, Human
ccucccaauggcgggaacaag

SEQ ID NO: 1192348 - RNA, 21 nt, Human
ccuccgcaggccgccgggggc

SEQ ID NO: 1192349 - RNA, 29 nt, Human
cgaggccagugggcggguggcguggggcg

SEQ ID NO: 1192350 - RNA, 22 nt, Human
gaagcuuagaauguccccuagg

SEQ ID NO: 1192351 - RNA, 22 nt, Human
gcaaggcuuccgcagcucaaaa

SEQ ID NO: 1192352 - RNA, 23 nt, Human
gccccaagcaacccguuccuccg

SEQ ID NO: 1192353 - RNA, 25 nt, Human
gcgcuggaguccucagaaaaggcca

SEQ ID NO: 1192354 - RNA, 18 nt, Human
ggaaccccgcgggccaag

SEQ ID NO: 1192355 - RNA, 24 nt, Human
ggggcccacaacucgagcugggag

SEQ ID NO: 1192356 - RNA, 24 nt, Human
uagaauguccccuagguggacgcu

SEQ ID NO: 1192357 - RNA, 21 nt, Human
ucaggcgucccggggaacccc

SEQ ID NO: 1192358 - RNA, 19 nt, Human
uccaaacuguggggauggg

SEQ ID NO: 1192359 - RNA, 20 nt, Human
ucccgcgcgcgucgcgccga

SEQ ID NO: 1192360 - RNA, 20 nt, Human
ucccgcgcgcgucgcgccgg

SEQ ID NO: 1192361 - RNA, 24 nt, Human
uccgaagggcacccgcggcggggc

SEQ ID NO: 1192362 - RNA, 22 nt, Human
uccgcagcucaaaaggagaaac

SEQ ID NO: 1192363 - RNA, 19 nt, Human
ugcagaugauggaaugccc

SEQ ID NO: 1192364 - RNA, 18 nt, Human
uggaaugcccucccaaug

SEQ ID NO: 1192365 - RNA, 22 nt, Human
uggcgggaacaagcaaggcuuc

SEQ ID NO: 1192366 - RNA, 19 nt, Human
aagaagaaaauaaguuaaa

SEQ ID NO: 1192367 - RNA, 23 nt, Human
acacuccugaaaaucuaaaguga

SEQ ID NO: 1192368 - RNA, 24 nt, Human
acucuauucuucuuggaucacaaa

SEQ ID NO: 1192369 - RNA, 18 nt, Human
agcagaauaacuuaauca

SEQ ID NO: 1192370 - RNA, 19 nt, Human
aggaggccuccagccaaca

SEQ ID NO: 1192371 - RNA, 20 nt, Human
aggccuccagccaacagcuc

SEQ ID NO: 1192372 - RNA, 24 nt, Human
cacaaacuaggcacacacuccuga

SEQ ID NO: 1192373 - RNA, 23 nt, Human
ugucaaggaagcaaaggaggccu

SEQ ID NO: 1192374 - RNA, 23 nt, Human
aaaaggaaaauguuauaaaagaa

SEQ ID NO: 1192375 - RNA, 18 nt, Human
aaacaaaacaaaacaaaa

SEQ ID NO: 1192376 - RNA, 19 nt, Human
aaacaaaacaaaacaggcc

SEQ ID NO: 1192377 - RNA, 22 nt, Human
aaacaaaacaaaacaggccaga

SEQ ID NO: 1192378 - RNA, 19 nt, Human
aaacaaaacaggccagagc

SEQ ID NO: 1192379 - RNA, 23 nt, Human
aaagaggauggacuauuuagcca

SEQ ID NO: 1192380 - RNA, 19 nt, Human
aacaaaacaaaacaaaaca

SEQ ID NO: 1192381 - RNA, 20 nt, Human
aagcaaaacaaaagaacaaa

SEQ ID NO: 1192382 - RNA, 21 nt, Human
aagcaaaacaaaagaacaaag

SEQ ID NO: 1192383 - RNA, 24 nt, Human
aauaaaaaauagaaaauauuugga

SEQ ID NO: 1192384 - RNA, 22 nt, Human
acaaaacaggccagagccucau

SEQ ID NO: 1192385 - RNA, 24 nt, Human
acaaagcugaacuaagaugacccu

SEQ ID NO: 1192386 - RNA, 18 nt, Human
acagcuucucacagaugu

SEQ ID NO: 1192387 - RNA, 19 nt, Human
acauggguugggccuuuca

SEQ ID NO: 1192388 - RNA, 23 nt, Human
accaaaagcaaaacaaaagaaca

SEQ ID NO: 1192389 - RNA, 21 nt, Human
agagcacauaccaaggggcua

SEQ ID NO: 1192390 - RNA, 21 nt, Human
agagcacuuggaaacaaaaca

SEQ ID NO: 1192391 - RNA, 24 nt, Human
agccagagcacauaccaaggggcu

SEQ ID NO: 1192392 - RNA, 20 nt, Human
agcccuggguccccagaagc

SEQ ID NO: 1192393 - RNA, 21 nt, Human
agccucaucaacuuugagcag

SEQ ID NO: 1192394 - RNA, 25 nt, Human
aggaaaaaaagaaaaaugaaaagga

SEQ ID NO: 1192395 - RNA, 26 nt, Human
aggaaaaaaagaaaaaugaaaaggag

SEQ ID NO: 1192396 - RNA, 24 nt, Human
aguagaaaaagcaguagaugcaug

SEQ ID NO: 1192397 - RNA, 19 nt, Human
auaccaaggggcuaggccc

SEQ ID NO: 1192398 - RNA, 21 nt, Human
auagcuuggguauggggaagc

SEQ ID NO: 1192399 - RNA, 21 nt, Human
caaaacaaaacaaaacaggcc

SEQ ID NO: 1192400 - RNA, 25 nt, Human
caaaacaaaacaaaacaggccagag

SEQ ID NO: 1192401 - RNA, 21 nt, Human
caaaacaaaacaggccagagc

SEQ ID NO: 1192402 - RNA, 21 nt, Human
caagacaauucuucuucuucc

SEQ ID NO: 1192403 - RNA, 24 nt, Human
cacaaugggcuugaagucuaccag

SEQ ID NO: 1192404 - RNA, 20 nt, Human
cagaagccauguccuuaaaa

SEQ ID NO: 1192405 - RNA, 30 nt, Human
cagagcacuuggaaacaaaacaaaacaaag

SEQ ID NO: 1192406 - RNA, 23 nt, Human
caggaaacgaggaaaaaaagaaa

SEQ ID NO: 1192407 - RNA, 25 nt, Human
caguaaagauguagccuagggcaau

SEQ ID NO: 1192408 - RNA, 21 nt, Human
ccaacacuuacuuuggguuua

SEQ ID NO: 1192409 - RNA, 20 nt, Human
ccagagcacauaccaagggg

SEQ ID NO: 1192410 - RNA, 22 nt, Human
ccagggaagccaaaagauugaa

SEQ ID NO: 1192411 - RNA, 19 nt, Human
ccaguguuaggaauaaaaa

SEQ ID NO: 1192412 - RNA, 21 nt, Human
ccauauccuugacacaugucc

SEQ ID NO: 1192413 - RNA, 24 nt, Human
cccaggauggcuuugaauguggcc

SEQ ID NO: 1192414 - RNA, 19 nt, Human
cccuggguccccagaagcc

SEQ ID NO: 1192415 - RNA, 22 nt, Human
cuaaaguucuacauuucaguag

SEQ ID NO: 1192416 - RNA, 21 nt, Human
cugcuuuugguuuuccaaaag

SEQ ID NO: 1192417 - RNA, 25 nt, Human
cuuuggguuuaucugcccaaauuuu

SEQ ID NO: 1192418 - RNA, 22 nt, Human
gaaaaaauaaauguaugcuacu

SEQ ID NO: 1192419 - RNA, 26 nt, Human
gaggaaaaaaagaaaaaugaaaagga

SEQ ID NO: 1192420 - RNA, 25 nt, Human
gauaaccaaaagcaaaacaaaagaa

SEQ ID NO: 1192421 - RNA, 22 nt, Human
gcagcccaggauggcuuugaau

SEQ ID NO: 1192422 - RNA, 22 nt, Human
gcccaacacaaauucauaaacc

SEQ ID NO: 1192423 - RNA, 21 nt, Human
ggaaaguacaacuuccacaaa

SEQ ID NO: 1192424 - RNA, 24 nt, Human
ggacauaguuuuuuguuaaaaaug

SEQ ID NO: 1192425 - RNA, 20 nt, Human
ggcccacaagccacaugcag

SEQ ID NO: 1192426 - RNA, 25 nt, Human
guaaagcaauauagagacuagccuc

SEQ ID NO: 1192427 - RNA, 23 nt, Human
guucauuaggacaugccaguaca

SEQ ID NO: 1192428 - RNA, 23 nt, Human
uaagcccuggguccccagaagcc

SEQ ID NO: 1192429 - RNA, 26 nt, Human
uagaaaaagcaguagaugcaugaaga

SEQ ID NO: 1192430 - RNA, 19 nt, Human
uagaaaauauuuggaaaaa

SEQ ID NO: 1192431 - RNA, 20 nt, Human
ucaaaagccuguucucaaaa

SEQ ID NO: 1192432 - RNA, 18 nt, Human
uccccagaagccaugucc

SEQ ID NO: 1192433 - RNA, 22 nt, Human
ucugcccaaauuuucccucuca

SEQ ID NO: 1192434 - RNA, 21 nt, Human
ugaaaaggaguagaaaaagca

SEQ ID NO: 1192435 - RNA, 22 nt, Human
ugaaaaucagaagccagaacag

SEQ ID NO: 1192436 - RNA, 19 nt, Human
ugaacaguaaagauguagc

SEQ ID NO: 1192437 - RNA, 19 nt, Human
ugagauaccacaucuaugu

SEQ ID NO: 1192438 - RNA, 21 nt, Human
ugaguuuaucaaaagccuguu

SEQ ID NO: 1192439 - RNA, 24 nt, Human
ugauaaaaggaaaauguuauaaaa

SEQ ID NO: 1192440 - RNA, 21 nt, Human
ugcccaaauuuucccucucaa

SEQ ID NO: 1192441 - RNA, 19 nt, Human
uggaaaaaauaaauguaug

SEQ ID NO: 1192442 - RNA, 23 nt, Human
uggaaacaaaacaaaacaaaaca

SEQ ID NO: 1192443 - RNA, 22 nt, Human
uggacaaagcugaacuaagaug

SEQ ID NO: 1192444 - RNA, 18 nt, Human
uggcaaaaucuauggcuc

SEQ ID NO: 1192445 - RNA, 26 nt, Human
uggcaaaaucuauggcucuguaaaga

SEQ ID NO: 1192446 - RNA, 23 nt, Human
uggcaagcuugucuagcucauca

SEQ ID NO: 1192447 - RNA, 20 nt, Human
ugggccaugugaacaugucu

SEQ ID NO: 1192448 - RNA, 21 nt, Human
uguaguagguuucuuugucag

SEQ ID NO: 1192449 - RNA, 18 nt, Human
uguuccugagaaccacau

SEQ ID NO: 1192450 - RNA, 23 nt, Human
uuaaaaauguugaacaguaaaga

SEQ ID NO: 1192451 - RNA, 21 nt, Human
uucauaaaccuucuuaaaaca

SEQ ID NO: 1192452 - RNA, 23 nt, Human
uuuccaggauacuggaauuaggc

SEQ ID NO: 1192453 - RNA, 18 nt, Human
uuucuugaagagaggaaa

SEQ ID NO: 1192454 - RNA, 22 nt, Human
uuugggugagcuuuuaauauuu

SEQ ID NO: 1192455 - RNA, 23 nt, Human
aaacagguuaaauauacacccac

SEQ ID NO: 1192456 - RNA, 23 nt, Human
aaauauacacccacaucugagug

SEQ ID NO: 1192457 - RNA, 22 nt, Human
acucggaggggcgcaguggaag

SEQ ID NO: 1192458 - RNA, 20 nt, Human
agggguuuggaacccgggua

SEQ ID NO: 1192459 - RNA, 21 nt, Human
auauuccaagucaaauguauc

SEQ ID NO: 1192460 - RNA, 23 nt, Human
caaauaauaaccugccacuauau

SEQ ID NO: 1192461 - RNA, 21 nt, Human
cacagaaaauauggaagugaa

SEQ ID NO: 1192462 - RNA, 19 nt, Human
cccgggaaaguggcccgcc

SEQ ID NO: 1192463 - RNA, 21 nt, Human
cgacugcucccuccccucgug

SEQ ID NO: 1192464 - RNA, 24 nt, Human
cgacugcucccuccccucgugccc

SEQ ID NO: 1192465 - RNA, 20 nt, Human
cguggcuagggguuuggaac

SEQ ID NO: 1192466 - RNA, 23 nt, Human
cucagacugcaauugugggaaau

SEQ ID NO: 1192467 - RNA, 24 nt, Human
cuuagcauaguguuuucacccaaa

SEQ ID NO: 1192468 - RNA, 22 nt, Human
gucaaauguaucacaaagaagc

SEQ ID NO: 1192469 - RNA, 25 nt, Human
uacacagaaaauauggaagugaacc

SEQ ID NO: 1192470 - RNA, 23 nt, Human
uaucauggacuuauccaauggag

SEQ ID NO: 1192471 - RNA, 24 nt, Human
ucguggcuagggguuuggaacccg

SEQ ID NO: 1192472 - RNA, 19 nt, Human
uuuuuuuuuuuuuuuuuaa

SEQ ID NO: 1192473 - RNA, 23 nt, Human
ucccuuuaaguuacgacgggaau

SEQ ID NO: 1192474 - RNA, 21 nt, Human
aaaaaaaccaaaaaccuucag

SEQ ID NO: 1192475 - RNA, 22 nt, Human
aaaaaggcacuuuaauucaacu

SEQ ID NO: 1192476 - RNA, 23 nt, Human
aaaaggaaacaacaacaaaaaaa

SEQ ID NO: 1192477 - RNA, 28 nt, Human
aaaaggaaacaacaacaaaaaaacaaaa

SEQ ID NO: 1192478 - RNA, 26 nt, Human
aaacaaaaaaaccaaaaaccuucagu

SEQ ID NO: 1192479 - RNA, 29 nt, Human
aaacaaacaaaaaaaccaaaaaccuucag

SEQ ID NO: 1192480 - RNA, 27 nt, Human
aaacaacaacaaaaaaacaaaaaacaa

SEQ ID NO: 1192481 - RNA, 21 nt, Human
aaacuucuuggucuguguucc

SEQ ID NO: 1192482 - RNA, 22 nt, Human
aaaggcacuuuaauucaacuga

SEQ ID NO: 1192483 - RNA, 22 nt, Human
aaaguaaggggucuuggaagcu

SEQ ID NO: 1192484 - RNA, 24 nt, Human
aacaaacaaaaaaaccaaaaaccu

SEQ ID NO: 1192485 - RNA, 20 nt, Human
aacagagcaagacuccaucu

SEQ ID NO: 1192486 - RNA, 23 nt, Human
aacaugggcggaucaccuggggu

SEQ ID NO: 1192487 - RNA, 25 nt, Human
aacaugggcggaucaccugggguca

SEQ ID NO: 1192488 - RNA, 20 nt, Human
aacauggugaaacccugucu

SEQ ID NO: 1192489 - RNA, 21 nt, Human
aacauggugaaacccugucuc

SEQ ID NO: 1192490 - RNA, 20 nt, Human
aacccugucucuaccaaaua

SEQ ID NO: 1192491 - RNA, 18 nt, Human
aagcagauguggcugcuc

SEQ ID NO: 1192492 - RNA, 22 nt, Human
aagcauacacccagcuuuauaa

SEQ ID NO: 1192493 - RNA, 21 nt, Human
aagcuuuuguugaaacuuaau

SEQ ID NO: 1192494 - RNA, 23 nt, Human
aaggaaacaacaacaaaaaaaca

SEQ ID NO: 1192495 - RNA, 27 nt, Human
aaguacacugcauacaacugaaaacac

SEQ ID NO: 1192496 - RNA, 20 nt, Human
aaguccacuucuugucaauu

SEQ ID NO: 1192497 - RNA, 21 nt, Human
aauauggugaaacccugucuc

SEQ ID NO: 1192498 - RNA, 24 nt, Human
aauauucaaauuagauaacacuuc

SEQ ID NO: 1192499 - RNA, 23 nt, Human
aaucacaacagcugccugaccca

SEQ ID NO: 1192500 - RNA, 20 nt, Human
aauugcuugaauccaguagg

SEQ ID NO: 1192501 - RNA, 23 nt, Human
acaacaaaaaaacaaaaaacaaa

SEQ ID NO: 1192502 - RNA, 28 nt, Human
acaacaacaaaaaaacaaaaaacaaaaa

SEQ ID NO: 1192503 - RNA, 24 nt, Human
acagagcaagacuccaucucaaaa

SEQ ID NO: 1192504 - RNA, 19 nt, Human
acagagcaagacucugucu

SEQ ID NO: 1192505 - RNA, 24 nt, Human
accaacauggugaaacccugucuc

SEQ ID NO: 1192506 - RNA, 19 nt, Human
acccagccaccacauacau

SEQ ID NO: 1192507 - RNA, 23 nt, Human
acccugucucuacaaaaauacaa

SEQ ID NO: 1192508 - RNA, 24 nt, Human
acccugucucuaccaaauauacaa

SEQ ID NO: 1192509 - RNA, 24 nt, Human
accuggggucaggaguucaagacc

SEQ ID NO: 1192510 - RNA, 24 nt, Human
acugcacucaagcuggggcaacag

SEQ ID NO: 1192511 - RNA, 24 nt, Human
acugcacuccagccugggcgacag

SEQ ID NO: 1192512 - RNA, 26 nt, Human
acugcacuccagccugggcgacagag

SEQ ID NO: 1192513 - RNA, 18 nt, Human
agacugaccucccucccc

SEQ ID NO: 1192514 - RNA, 18 nt, Human
agaucaggaguucgagac

SEQ ID NO: 1192515 - RNA, 26 nt, Human
agaucaggaguucgagaccagccuga

SEQ ID NO: 1192516 - RNA, 24 nt, Human
agcacuuugggaggccaacauggg

SEQ ID NO: 1192517 - RNA, 24 nt, Human
agcacuuugggaggccgaggcagg

SEQ ID NO: 1192518 - RNA, 20 nt, Human
agcagaaaauuugucccagc

SEQ ID NO: 1192519 - RNA, 23 nt, Human
agccaggcgcgguggugggcgcc

SEQ ID NO: 1192520 - RNA, 24 nt, Human
agccugaccaacauggugaaaccc

SEQ ID NO: 1192521 - RNA, 22 nt, Human
agccuggccaauauggugaaac

SEQ ID NO: 1192522 - RNA, 24 nt, Human
agccuggccaauauggugaaaccc

SEQ ID NO: 1192523 - RNA, 24 nt, Human
agccuggccaauauggugaaaccc

SEQ ID NO: 1192524 - RNA, 24 nt, Human
agccugggcgacagagcaagacuc

SEQ ID NO: 1192525 - RNA, 24 nt, Human
agcuggggcaacagagcaagacuc

SEQ ID NO: 1192526 - RNA, 18 nt, Human
agcuguugccaauggccu

SEQ ID NO: 1192527 - RNA, 20 nt, Human
aggaaaaaaggcacuuuaau

SEQ ID NO: 1192528 - RNA, 21 nt, Human
aggcaauaacauacuuuuugc

SEQ ID NO: 1192529 - RNA, 26 nt, Human
aggcagaucacuucagaucaggaguu

SEQ ID NO: 1192530 - RNA, 23 nt, Human
aggcaggagaauugcuugaaucc

SEQ ID NO: 1192531 - RNA, 24 nt, Human
aggcaggagaauugcuugaaucca

SEQ ID NO: 1192532 - RNA, 26 nt, Human
aggcaggcagaucacuucagaucagg

SEQ ID NO: 1192533 - RNA, 24 nt, Human
aggcgcgguggugggcgccuguag

SEQ ID NO: 1192534 - RNA, 21 nt, Human
aggcugaggcaggagaauugc

SEQ ID NO: 1192535 - RNA, 24 nt, Human
aggcugaggcaggagaauugcuug

SEQ ID NO: 1192536 - RNA, 24 nt, Human
aggcugaugcaggagaaucgcuug

SEQ ID NO: 1192537 - RNA, 23 nt, Human
agggggcggagguugcagugagc

SEQ ID NO: 1192538 - RNA, 23 nt, Human
agucgggugugguggcaggcauc

SEQ ID NO: 1192539 - RNA, 22 nt, Human
agugauagacaaccuaagucuc

SEQ ID NO: 1192540 - RNA, 18 nt, Human
auaauggaguccaaugag

SEQ ID NO: 1192541 - RNA, 24 nt, Human
aucaccuggggucaggaguucaag

SEQ ID NO: 1192542 - RNA, 23 nt, Human
aucacgccacugcacucaagcug

SEQ ID NO: 1192543 - RNA, 18 nt, Human
augcaggagaaucgcuug

SEQ ID NO: 1192544 - RNA, 19 nt, Human
augccuguaaucccagcac

SEQ ID NO: 1192545 - RNA, 27 nt, Human
auggcagcuauccuuuuggagguaaac

SEQ ID NO: 1192546 - RNA, 21 nt, Human
auggcucuggccaauacuccc

SEQ ID NO: 1192547 - RNA, 19 nt, Human
augggcggaucaccugggg

SEQ ID NO: 1192548 - RNA, 20 nt, Human
auggugaaacccugucucua

SEQ ID NO: 1192549 - RNA, 24 nt, Human
auggugccacugcacuccagccug

SEQ ID NO: 1192550 - RNA, 22 nt, Human
auuugccuucucuguucucuau

SEQ ID NO: 1192551 - RNA, 30 nt, Human
caaaaaaacaaaaaacaaaaaacaaaacuu

SEQ ID NO: 1192552 - RNA, 21 nt, Human
caaaaaaaccaaaaaccuuca

SEQ ID NO: 1192553 - RNA, 21 nt, Human
caaaaauacaaaaauuagcca

SEQ ID NO: 1192554 - RNA, 24 nt, Human
caaaaggaaacaacaacaaaaaaa

SEQ ID NO: 1192555 - RNA, 21 nt, Human
caaacaaaaaaaccaaaaacc

SEQ ID NO: 1192556 - RNA, 24 nt, Human
caacauggugaaacccugucucua

SEQ ID NO: 1192557 - RNA, 22 nt, Human
caacuccacugcauaaagcaau

SEQ ID NO: 1192558 - RNA, 24 nt, Human
caagaccagccuggccaauauggu

SEQ ID NO: 1192559 - RNA, 23 nt, Human
caagacuccaucucaaaaggaaa

SEQ ID NO: 1192560 - RNA, 22 nt, Human
caaguacacugcauacaacuga

SEQ ID NO: 1192561 - RNA, 24 nt, Human
caauauggugaaacccugucucua

SEQ ID NO: 1192562 - RNA, 19 nt, Human
caauuacuagaacucaagg

SEQ ID NO: 1192563 - RNA, 19 nt, Human
cacaacagcugccugaccc

SEQ ID NO: 1192564 - RNA, 25 nt, Human
caccaaaguaaggggucuuggaagc

SEQ ID NO: 1192565 - RNA, 24 nt, Human
cacccagcuuuauaacugcaguca

SEQ ID NO: 1192566 - RNA, 23 nt, Human
caccuggggucaggaguucaaga

SEQ ID NO: 1192567 - RNA, 24 nt, Human
cacgucugcaauuccagcacuuug

SEQ ID NO: 1192568 - RNA, 23 nt, Human
cacuccagccugggcgacagagc

SEQ ID NO: 1192569 - RNA, 30 nt, Human
cacugagacucacauacacgucuccccuag

SEQ ID NO: 1192570 - RNA, 24 nt, Human
cacugcacucaagcuggggcaaca

SEQ ID NO: 1192571 - RNA, 19 nt, Human
cacugcacuccagccuggg

SEQ ID NO: 1192572 - RNA, 21 nt, Human
cacugcacuccagccugggcg

SEQ ID NO: 1192573 - RNA, 22 nt, Human
cacugcacuccagccugggcga

SEQ ID NO: 1192574 - RNA, 23 nt, Human
cacugcacuccagccugggcgac

SEQ ID NO: 1192575 - RNA, 24 nt, Human
cacugcacuccagccugggcgaca

SEQ ID NO: 1192576 - RNA, 27 nt, Human
cacugcacuccagccugggcgacagag

SEQ ID NO: 1192577 - RNA, 20 nt, Human
cacugcauacaacugaaaac

SEQ ID NO: 1192578 - RNA, 19 nt, Human
cacuucacacaaugaaaua

SEQ ID NO: 1192579 - RNA, 24 nt, Human
cagaucacuucagaucaggaguuc

SEQ ID NO: 1192580 - RNA, 28 nt, Human
cagcacuuugggaggccaacaugggcgg

SEQ ID NO: 1192581 - RNA, 24 nt, Human
cagcacuuugggaggccgaggcag

SEQ ID NO: 1192582 - RNA, 25 nt, Human
cagcacuuugggaggccgaggcagg

SEQ ID NO: 1192583 - RNA, 23 nt, Human
cagcagcagaaaauuugucccag

SEQ ID NO: 1192584 - RNA, 19 nt, Human
cagcagugcucagguacug

SEQ ID NO: 1192585 - RNA, 24 nt, Human
cagcuacucaggaggcugaggcag

SEQ ID NO: 1192586 - RNA, 24 nt, Human
caggcagaucacuucagaucagga

SEQ ID NO: 1192587 - RNA, 20 nt, Human
cagggagagcugagcaggca

SEQ ID NO: 1192588 - RNA, 19 nt, Human
cagugggucaccaccacau

SEQ ID NO: 1192589 - RNA, 24 nt, Human
caucuaugaucccagcuacucagg

SEQ ID NO: 1192590 - RNA, 24 nt, Human
caugaaaucauauagacugucaga

SEQ ID NO: 1192591 - RNA, 24 nt, Human
caugccuguaaucccagcacuuug

SEQ ID NO: 1192592 - RNA, 19 nt, Human
ccacugcacucaagcuggg

SEQ ID NO: 1192593 - RNA, 20 nt, Human
ccacugcacucaagcugggg

SEQ ID NO: 1192594 - RNA, 21 nt, Human
ccacugcacucaagcuggggc

SEQ ID NO: 1192595 - RNA, 24 nt, Human
ccacugcacucaagcuggggcaac

SEQ ID NO: 1192596 - RNA, 20 nt, Human
ccacugcacuccagccuggg

SEQ ID NO: 1192597 - RNA, 20 nt, Human
ccacugcacuccagccuggg

SEQ ID NO: 1192598 - RNA, 21 nt, Human
ccacugcacuccagccugggc

SEQ ID NO: 1192599 - RNA, 21 nt, Human
ccacugcacuccagccugggc

SEQ ID NO: 1192600 - RNA, 23 nt, Human
ccacugcacuccagccugggcga

SEQ ID NO: 1192601 - RNA, 24 nt, Human
ccacugcacuccagccugggcgac

SEQ ID NO: 1192602 - RNA, 20 nt, Human
ccaguauaaguaauauaggc

SEQ ID NO: 1192603 - RNA, 21 nt, Human
ccuaagucuccugacgagauc

SEQ ID NO: 1192604 - RNA, 18 nt, Human
ccuaucccagcccccaag

SEQ ID NO: 1192605 - RNA, 22 nt, Human
ccugaccaacauggugaaaccc

SEQ ID NO: 1192606 - RNA, 24 nt, Human
ccugaccaacauggugaaacccug

SEQ ID NO: 1192607 - RNA, 23 nt, Human
ccugacccagccaccacauacau

SEQ ID NO: 1192608 - RNA, 22 nt, Human
ccuggccaauauggugaaaccc

SEQ ID NO: 1192609 - RNA, 24 nt, Human
ccuggccaauauggugaaacccug

SEQ ID NO: 1192610 - RNA, 22 nt, Human
ccugggcgacagagcaagacuc

SEQ ID NO: 1192611 - RNA, 22 nt, Human
ccuguaaucccagcacuuuggg

SEQ ID NO: 1192612 - RNA, 20 nt, Human
ccuguagucccagcuacuug

SEQ ID NO: 1192613 - RNA, 22 nt, Human
ccuguagucccagcuacuugag

SEQ ID NO: 1192614 - RNA, 21 nt, Human
ccuucagugggucaccaccac

SEQ ID NO: 1192615 - RNA, 24 nt, Human
cgagaccagccugaccaacauggu

SEQ ID NO: 1192616 - RNA, 19 nt, Human
cgagaucaaucaaaaacuu

SEQ ID NO: 1192617 - RNA, 21 nt, Human
cgagaucaaucaaaaacuuca

SEQ ID NO: 1192618 - RNA, 26 nt, Human
cgaggcaggcagaucacuucagauca

SEQ ID NO: 1192619 - RNA, 22 nt, Human
cgccuguagucccagcuacuug

SEQ ID NO: 1192620 - RNA, 23 nt, Human
cgccuguagucccagcuacuuga

SEQ ID NO: 1192621 - RNA, 24 nt, Human
cggaucaccuggggucaggaguuc

SEQ ID NO: 1192622 - RNA, 26 nt, Human
cggcacagacugaccucccuccccag

SEQ ID NO: 1192623 - RNA, 23 nt, Human
cuaaaacuauguccauaagucca

SEQ ID NO: 1192624 - RNA, 25 nt, Human
cuaaaagaacaauguacauacuuaa

SEQ ID NO: 1192625 - RNA, 20 nt, Human
cucaaaaauaaugucaccau

SEQ ID NO: 1192626 - RNA, 24 nt, Human
cucaaaaggaaacaacaacaaaaa

SEQ ID NO: 1192627 - RNA, 26 nt, Human
cucaaaaggaaacaacaacaaaaaaa

SEQ ID NO: 1192628 - RNA, 25 nt, Human
cucaauacuaacaaucacaacagcu

SEQ ID NO: 1192629 - RNA, 24 nt, Human
cucacgucugcaauuccagcacuu

SEQ ID NO: 1192630 - RNA, 23 nt, Human
cucaugccuguaaucccagcacu

SEQ ID NO: 1192631 - RNA, 24 nt, Human
cucaugccuguaaucccagcacuu

SEQ ID NO: 1192632 - RNA, 25 nt, Human
cucauggcucuggccaauacucucc

SEQ ID NO: 1192633 - RNA, 24 nt, Human
cugaccaacauggugaaacccugu

SEQ ID NO: 1192634 - RNA, 22 nt, Human
cugcugcuguucagcuucagug

SEQ ID NO: 1192635 - RNA, 24 nt, Human
cuggccaauauggugaaacccugu

SEQ ID NO: 1192636 - RNA, 26 nt, Human
cuucaauggggggggcgggcguggug

SEQ ID NO: 1192637 - RNA, 24 nt, Human
gacagagcaagacucugucuugaa

SEQ ID NO: 1192638 - RNA, 22 nt, Human
gacucacauacacgucuccccu

SEQ ID NO: 1192639 - RNA, 23 nt, Human
gacucaguuccagaccaucauga

SEQ ID NO: 1192640 - RNA, 19 nt, Human
gacugucagauuaaaaaca

SEQ ID NO: 1192641 - RNA, 23 nt, Human
gagaaucgcuugaacccaggggg

SEQ ID NO: 1192642 - RNA, 18 nt, Human
gaggagcugcugcugcug

SEQ ID NO: 1192643 - RNA, 22 nt, Human
gaggagcuggaccccucaaaaa

SEQ ID NO: 1192644 - RNA, 21 nt, Human
gagguugcagugagcugagau

SEQ ID NO: 1192645 - RNA, 20 nt, Human
gauagacaaccuaagucucc

SEQ ID NO: 1192646 - RNA, 23 nt, Human
gaucaccuggggucaggaguuca

SEQ ID NO: 1192647 - RNA, 24 nt, Human
gaucaccuggggucaggaguucaa

SEQ ID NO: 1192648 - RNA, 24 nt, Human
gaucacuucagaucaggaguucga

SEQ ID NO: 1192649 - RNA, 23 nt, Human
gaugucgaaggcagcagcagaaa

SEQ ID NO: 1192650 - RNA, 19 nt, Human
gauugcaaaaaaaugcuga

SEQ ID NO: 1192651 - RNA, 21 nt, Human
gcaaaaaaaugcugacacaga

SEQ ID NO: 1192652 - RNA, 24 nt, Human
gcacuccagccugggcgacagagc

SEQ ID NO: 1192653 - RNA, 22 nt, Human
gcaggagaaucgcuugaaccca

SEQ ID NO: 1192654 - RNA, 24 nt, Human
gccaauauggugaaacccugucuc

SEQ ID NO: 1192655 - RNA, 22 nt, Human
gccacugcacuccagccugggc

SEQ ID NO: 1192656 - RNA, 24 nt, Human
gccacugcacuccagccugggcga

SEQ ID NO: 1192657 - RNA, 20 nt, Human
gcugggcaugguggcucacg

SEQ ID NO: 1192658 - RNA, 18 nt, Human
ggaagaaguagcagcagu

SEQ ID NO: 1192659 - RNA, 20 nt, Human
ggacagggcuuggagugggg

SEQ ID NO: 1192660 - RNA, 18 nt, Human
ggagcuguugccaauggc

SEQ ID NO: 1192661 - RNA, 22 nt, Human
ggagguugcagugagcugagau

SEQ ID NO: 1192662 - RNA, 23 nt, Human
ggagguugcagugagcugagaug

SEQ ID NO: 1192663 - RNA, 24 nt, Human
ggagguugcagugagcugagaugg

SEQ ID NO: 1192664 - RNA, 22 nt, Human
ggaucaccuggggucaggaguu

SEQ ID NO: 1192665 - RNA, 23 nt, Human
ggaucaccuggggucaggaguuc

SEQ ID NO: 1192666 - RNA, 19 nt, Human
ggcggagguugcagugagc

SEQ ID NO: 1192667 - RNA, 23 nt, Human
ggcggagguugcagugagcugag

SEQ ID NO: 1192668 - RNA, 24 nt, Human
gggcaugguggcucacgucugcaa

SEQ ID NO: 1192669 - RNA, 24 nt, Human
gggcgugguggcucaugccuguaa

SEQ ID NO: 1192670 - RNA, 22 nt, Human
ggggcgggcgugguggcucaug

SEQ ID NO: 1192671 - RNA, 22 nt, Human
gggggaagaaguagcagcagug

SEQ ID NO: 1192672 - RNA, 24 nt, Human
ggggggggcgggcgugguggcuca

SEQ ID NO: 1192673 - RNA, 21 nt, Human
ggugauuacagugaguccaga

SEQ ID NO: 1192674 - RNA, 24 nt, Human
gguggcucacgucugcaauuccag

SEQ ID NO: 1192675 - RNA, 24 nt, Human
gguggcucaugccuguaaucccag

SEQ ID NO: 1192676 - RNA, 23 nt, Human
gguggugggcgccuguaguccca

SEQ ID NO: 1192677 - RNA, 24 nt, Human
gguggugggcgccuguagucccag

SEQ ID NO: 1192678 - RNA, 18 nt, Human
gguuucuagguauuccuu

SEQ ID NO: 1192679 - RNA, 24 nt, Human
guugcagugagcugagauggugcc

SEQ ID NO: 1192680 - RNA, 20 nt, Human
uaaaagaacaauguacauac

SEQ ID NO: 1192681 - RNA, 19 nt, Human
uaaacuucuuggucugugu

SEQ ID NO: 1192682 - RNA, 27 nt, Human
uaaauauauagaagcauacacccagcu

SEQ ID NO: 1192683 - RNA, 21 nt, Human
uaaauccaaaagcagaugugg

SEQ ID NO: 1192684 - RNA, 21 nt, Human
uaaguaaaugaauauucaaau

SEQ ID NO: 1192685 - RNA, 20 nt, Human
uaauuugccuucucuguucc

SEQ ID NO: 1192686 - RNA, 19 nt, Human
uacaaugaaacauaaugga

SEQ ID NO: 1192687 - RNA, 22 nt, Human
uacacugcauacaacugaaaac

SEQ ID NO: 1192688 - RNA, 25 nt, Human
uacauacaugcauaaugcuuacaca

SEQ ID NO: 1192689 - RNA, 18 nt, Human
uacucagagaggcaacag

SEQ ID NO: 1192690 - RNA, 27 nt, Human
uagaacucaaggcaguccucauggcuc

SEQ ID NO: 1192691 - RNA, 20 nt, Human
uagacugucagauuaaaaac

SEQ ID NO: 1192692 - RNA, 23 nt, Human
uagacugucagauuaaaaacacu

SEQ ID NO: 1192693 - RNA, 22 nt, Human
uagagaacacuguguagaccac

SEQ ID NO: 1192694 - RNA, 20 nt, Human
uagagacaauaacaagguaa

SEQ ID NO: 1192695 - RNA, 23 nt, Human
uagcagcagugcucagguacuga

SEQ ID NO: 1192696 - RNA, 28 nt, Human
uaguagagacaauaacaagguaauagua

SEQ ID NO: 1192697 - RNA, 23 nt, Human
uaucucauuccaucucacuuuca

SEQ ID NO: 1192698 - RNA, 20 nt, Human
ucaaagcuuuaaucacuuac

SEQ ID NO: 1192699 - RNA, 19 nt, Human
ucaauacuaacaaucacaa

SEQ ID NO: 1192700 - RNA, 21 nt, Human
ucaauggggggggcgggcgug

SEQ ID NO: 1192701 - RNA, 18 nt, Human
ucacacacauuuugaggu

SEQ ID NO: 1192702 - RNA, 20 nt, Human
ucaccaccacauacacauua

SEQ ID NO: 1192703 - RNA, 22 nt, Human
ucacgucugcaauuccagcacu

SEQ ID NO: 1192704 - RNA, 20 nt, Human
ucacuucagaucaggaguuc

SEQ ID NO: 1192705 - RNA, 23 nt, Human
uccacuucuugucaauuuggcac

SEQ ID NO: 1192706 - RNA, 24 nt, Human
uccagccugggcgacagagcaaga

SEQ ID NO: 1192707 - RNA, 20 nt, Human
ucccauugguucaauggggc

SEQ ID NO: 1192708 - RNA, 18 nt, Human
uccccuaaauuucugggu

SEQ ID NO: 1192709 - RNA, 21 nt, Human
uccuacaugaaaaaauggcag

SEQ ID NO: 1192710 - RNA, 24 nt, Human
ucgcuugaacccagggggcggagg

SEQ ID NO: 1192711 - RNA, 19 nt, Human
ucuagguauuccuuaaucc

SEQ ID NO: 1192712 - RNA, 22 nt, Human
ucuaugaucccagcuacucagg

SEQ ID NO: 1192713 - RNA, 22 nt, Human
ucuguucucuauaggccccugg

SEQ ID NO: 1192714 - RNA, 23 nt, Human
ugaaaaaacaaacaaaaaaacca

SEQ ID NO: 1192715 - RNA, 22 nt, Human
ugaaaaagcuaaauauauagaa

SEQ ID NO: 1192716 - RNA, 25 nt, Human
ugaaaaagcuaaauauauagaagca

SEQ ID NO: 1192717 - RNA, 25 nt, Human
ugaaaauaaugccuuacuagguuuc

SEQ ID NO: 1192718 - RNA, 20 nt, Human
ugaaaucauauagacuguca

SEQ ID NO: 1192719 - RNA, 20 nt, Human
ugaauccccuuaaacuguaa

SEQ ID NO: 1192720 - RNA, 19 nt, Human
ugacaggguuuggacaggg

SEQ ID NO: 1192721 - RNA, 18 nt, Human
ugacaugagcacaugcug

SEQ ID NO: 1192722 - RNA, 19 nt, Human
ugacaugagcacaugcugu

SEQ ID NO: 1192723 - RNA, 24 nt, Human
ugaccaacauggugaaacccuguc

SEQ ID NO: 1192724 - RNA, 18 nt, Human
ugacccagccaccacaua

SEQ ID NO: 1192725 - RNA, 24 nt, Human
ugagaaacauaaaaacacuagaga

SEQ ID NO: 1192726 - RNA, 24 nt, Human
ugagauggugccacugcacuccag

SEQ ID NO: 1192727 - RNA, 19 nt, Human
ugagcagauaaacuguauu

SEQ ID NO: 1192728 - RNA, 22 nt, Human
ugagcugagauggugccacugc

SEQ ID NO: 1192729 - RNA, 24 nt, Human
ugaggcaggagaauugcuugaauc

SEQ ID NO: 1192730 - RNA, 25 nt, Human
ugaggcaggagaauugcuugaaucc

SEQ ID NO: 1192731 - RNA, 24 nt, Human
ugaugcaggagaaucgcuugaacc

SEQ ID NO: 1192732 - RNA, 23 nt, Human
ugccuguaaucccagcacuuugg

SEQ ID NO: 1192733 - RNA, 22 nt, Human
ugcugcugcuguucagcuucag

SEQ ID NO: 1192734 - RNA, 25 nt, Human
ugcugugauaauguaguuuguggug

SEQ ID NO: 1192735 - RNA, 24 nt, Human
uggccaauauggugaaacccuguc

SEQ ID NO: 1192736 - RNA, 22 nt, Human
uggcucacgucugcaauuccag

SEQ ID NO: 1192737 - RNA, 24 nt, Human
uggcucacgucugcaauuccagca

SEQ ID NO: 1192738 - RNA, 24 nt, Human
uggcucaugccuguaaucccagca

SEQ ID NO: 1192739 - RNA, 21 nt, Human
uggcugccugaguacucagag

SEQ ID NO: 1192740 - RNA, 18 nt, Human
uggcugggcaugguggcu

SEQ ID NO: 1192741 - RNA, 24 nt, Human
ugggaggccaacaugggcggauca

SEQ ID NO: 1192742 - RNA, 20 nt, Human
ugggaggccgaggcaggcag

SEQ ID NO: 1192743 - RNA, 24 nt, Human
ugggaggccgaggcaggcagauca

SEQ ID NO: 1192744 - RNA, 24 nt, Human
ugggcggaucaccuggggucagga

SEQ ID NO: 1192745 - RNA, 22 nt, Human
ugggggaagaaguagcagcagu

SEQ ID NO: 1192746 - RNA, 24 nt, Human
ugggugaaaaagcuaaauauauag

SEQ ID NO: 1192747 - RNA, 24 nt, Human
ugguggcucacgucugcaauucca

SEQ ID NO: 1192748 - RNA, 24 nt, Human
ugguggcucaugccuguaauccca

SEQ ID NO: 1192749 - RNA, 19 nt, Human
ugucccagcucugagaggg

SEQ ID NO: 1192750 - RNA, 19 nt, Human
ugugguggcaggcaucuau

SEQ ID NO: 1192751 - RNA, 19 nt, Human
uguuccuacaggaaaaaag

SEQ ID NO: 1192752 - RNA, 23 nt, Human
uguugaaacuuaaugugacuuaa

SEQ ID NO: 1192753 - RNA, 20 nt, Human
uuaaacuagagaaagugcca

SEQ ID NO: 1192754 - RNA, 22 nt, Human
uuacauacaugcauaaugcuua

SEQ ID NO: 1192755 - RNA, 22 nt, Human
uuagccaggcgcgguggugggc

SEQ ID NO: 1192756 - RNA, 21 nt, Human
uuagcccaaagagccaagauu

SEQ ID NO: 1192757 - RNA, 18 nt, Human
uuagucgggugugguggc

SEQ ID NO: 1192758 - RNA, 24 nt, Human
uuagucgggugugguggcaggcau

SEQ ID NO: 1192759 - RNA, 22 nt, Human
uucagaucaggaguucgagacc

SEQ ID NO: 1192760 - RNA, 20 nt, Human
uucuuggucuauaucucauu

SEQ ID NO: 1192761 - RNA, 20 nt, Human
uucuuggucuguguuccuac

SEQ ID NO: 1192762 - RNA, 24 nt, Human
uugaacccagggggcggagguugc

SEQ ID NO: 1192763 - RNA, 25 nt, Human
uugacaaaugcagauguacaaagag

SEQ ID NO: 1192764 - RNA, 25 nt, Human
uugagaggcugaugcaggagaaucg

SEQ ID NO: 1192765 - RNA, 18 nt, Human
uugcagugagcugagaug

SEQ ID NO: 1192766 - RNA, 22 nt, Human
uugcagugagcugagauggugc

SEQ ID NO: 1192767 - RNA, 25 nt, Human
uuggacggcuccugccaacacugaa

SEQ ID NO: 1192768 - RNA, 22 nt, Human
uuggaguggggaaggaaaacug

SEQ ID NO: 1192769 - RNA, 22 nt, Human
uuggaugcuggagauagauggg

SEQ ID NO: 1192770 - RNA, 18 nt, Human
uuggcugggcaugguggc

SEQ ID NO: 1192771 - RNA, 23 nt, Human
uuggcugggcaugguggcucacg

SEQ ID NO: 1192772 - RNA, 25 nt, Human
uugggaggccgaggcaggcagauca

SEQ ID NO: 1192773 - RNA, 19 nt, Human
uuguggugucaaauuucug

SEQ ID NO: 1192774 - RNA, 22 nt, Human
uuuuaugccugcacuucuuggu

SEQ ID NO: 1192775 - RNA, 22 nt, Human
uuuuggagguaaacuguacggc

SEQ ID NO: 1192776 - RNA, 27 nt, Human
aaaaagcaccugcugcaccauaagccc

SEQ ID NO: 1192777 - RNA, 20 nt, Human
aaacucugcagcaagaguuc

SEQ ID NO: 1192778 - RNA, 24 nt, Human
aaaguuuuauccgcuuucccauau

SEQ ID NO: 1192779 - RNA, 25 nt, Human
aaguuggaggcagagcgcugcuggg

SEQ ID NO: 1192780 - RNA, 20 nt, Human
acaaacacaggcugugggcu

SEQ ID NO: 1192781 - RNA, 19 nt, Human
acacaggcugugggcugga

SEQ ID NO: 1192782 - RNA, 19 nt, Human
acacuuccucucuucuucu

SEQ ID NO: 1192783 - RNA, 26 nt, Human
accaguuccggaagaaccugcgggac

SEQ ID NO: 1192784 - RNA, 22 nt, Human
accccgggaccccugcuguccu

SEQ ID NO: 1192785 - RNA, 18 nt, Human
agacugugcucccuuugg

SEQ ID NO: 1192786 - RNA, 21 nt, Human
agaggccaggaggugcuccag

SEQ ID NO: 1192787 - RNA, 22 nt, Human
agcacccacaagcuuagauagc

SEQ ID NO: 1192788 - RNA, 19 nt, Human
agccagguggugacauggg

SEQ ID NO: 1192789 - RNA, 19 nt, Human
agcugggugcagacugugc

SEQ ID NO: 1192790 - RNA, 19 nt, Human
aggcugaaaagaacaccga

SEQ ID NO: 1192791 - RNA, 22 nt, Human
auggcaguagugccaccuggug

SEQ ID NO: 1192792 - RNA, 26 nt, Human
caccauaagcccagggauguggcagc

SEQ ID NO: 1192793 - RNA, 24 nt, Human
cagcaucucaugugaccaggccug

SEQ ID NO: 1192794 - RNA, 18 nt, Human
caggggaaggaacgcagu

SEQ ID NO: 1192795 - RNA, 19 nt, Human
caguaaagguccaggucag

SEQ ID NO: 1192796 - RNA, 23 nt, Human
ccacugccaagcucuaggacagu

SEQ ID NO: 1192797 - RNA, 18 nt, Human
ccauauaaaaacucuucc

SEQ ID NO: 1192798 - RNA, 21 nt, Human
ccccgggaccccugcuguccu

SEQ ID NO: 1192799 - RNA, 19 nt, Human
cccgggaccccugcugucc

SEQ ID NO: 1192800 - RNA, 19 nt, Human
ccucgggcaccaagacggg

SEQ ID NO: 1192801 - RNA, 18 nt, Human
ccuggggucagccaggug

SEQ ID NO: 1192802 - RNA, 21 nt, Human
ccuucccacagcuucuucuca

SEQ ID NO: 1192803 - RNA, 22 nt, Human
ccuuucgagcagcgccucccag

SEQ ID NO: 1192804 - RNA, 21 nt, Human
cgagcagcgccucccaguggc

SEQ ID NO: 1192805 - RNA, 18 nt, Human
cgaugggauuagagcugg

SEQ ID NO: 1192806 - RNA, 19 nt, Human
cuaaaaccccgggaccccu

SEQ ID NO: 1192807 - RNA, 22 nt, Human
cuaaaaccccgggaccccugcu

SEQ ID NO: 1192808 - RNA, 19 nt, Human
cugccaggggaaggaacgc

SEQ ID NO: 1192809 - RNA, 18 nt, Human
cuuccucucuucuucugu

SEQ ID NO: 1192810 - RNA, 18 nt, Human
cuuggcucugauuucuuu

SEQ ID NO: 1192811 - RNA, 18 nt, Human
cuuuucucaaacuuuccu

SEQ ID NO: 1192812 - RNA, 21 nt, Human
gagcagcgccucccaguggcc

SEQ ID NO: 1192813 - RNA, 21 nt, Human
gauccuugauucagacaguuu

SEQ ID NO: 1192814 - RNA, 19 nt, Human
gcaaaauaucccgcagaag

SEQ ID NO: 1192815 - RNA, 20 nt, Human
gcagaaagggagcacccaca

SEQ ID NO: 1192816 - RNA, 22 nt, Human
gcagcgccucccaguggccaga

SEQ ID NO: 1192817 - RNA, 18 nt, Human
gcagcugcagcgggcuug

SEQ ID NO: 1192818 - RNA, 18 nt, Human
gcagcugcagcgggcuug

SEQ ID NO: 1192819 - RNA, 18 nt, Human
gcagcugcagcgggcuug

SEQ ID NO: 1192820 - RNA, 21 nt, Human
gcagcugcagcgggcuuggcu

SEQ ID NO: 1192821 - RNA, 18 nt, Human
gcgcgccgccaggaagcg

SEQ ID NO: 1192822 - RNA, 20 nt, Human
gcuuuguucgaauaaaacuu

SEQ ID NO: 1192823 - RNA, 23 nt, Human
ggaccuggggucagccagguggu

SEQ ID NO: 1192824 - RNA, 24 nt, Human
ggaccuggggucagccagguggug

SEQ ID NO: 1192825 - RNA, 18 nt, Human
ggcagcaucucaugugac

SEQ ID NO: 1192826 - RNA, 19 nt, Human
ggccaggaggugcuccagg

SEQ ID NO: 1192827 - RNA, 19 nt, Human
gggaccuggggucagccag

SEQ ID NO: 1192828 - RNA, 20 nt, Human
gggaugggguggggacaggc

SEQ ID NO: 1192829 - RNA, 25 nt, Human
gggcaguuugugguuccugauuugg

SEQ ID NO: 1192830 - RNA, 24 nt, Human
ggggaacauacagcauguagaggc

SEQ ID NO: 1192831 - RNA, 21 nt, Human
ggugcagacugugcuccccgg

SEQ ID NO: 1192832 - RNA, 18 nt, Human
gucaccuuucugccgugu

SEQ ID NO: 1192833 - RNA, 20 nt, Human
gugaccucugcaguacuccu

SEQ ID NO: 1192834 - RNA, 22 nt, Human
guucugugacuucccugugacc

SEQ ID NO: 1192835 - RNA, 24 nt, Human
guuuggucuccaggugucaccuuu

SEQ ID NO: 1192836 - RNA, 20 nt, Human
uccuaugagagaaggcugcc

SEQ ID NO: 1192837 - RNA, 21 nt, Human
ucuucuguucuucacgcccca

SEQ ID NO: 1192838 - RNA, 22 nt, Human
ucuucuucuguucuucacgccc

SEQ ID NO: 1192839 - RNA, 25 nt, Human
ugaaaagaacaccgacacccccuug

SEQ ID NO: 1192840 - RNA, 19 nt, Human
ugacugagccucccgaggg

SEQ ID NO: 1192841 - RNA, 18 nt, Human
ugacuucccugugaccuc

SEQ ID NO: 1192842 - RNA, 19 nt, Human
ugagagaaggcugccgggu

SEQ ID NO: 1192843 - RNA, 23 nt, Human
ugagagaaggcugccggguucuc

SEQ ID NO: 1192844 - RNA, 20 nt, Human
ugcguuuggucuccaggugu

SEQ ID NO: 1192845 - RNA, 22 nt, Human
ugcugcaccauaagcccaggga

SEQ ID NO: 1192846 - RNA, 24 nt, Human
ugcuggggcaugaagagucucgag

SEQ ID NO: 1192847 - RNA, 25 nt, Human
ugcuggggcaugaagagucucgagu

SEQ ID NO: 1192848 - RNA, 22 nt, Human
uggagccagaguuuucaugucu

SEQ ID NO: 1192849 - RNA, 22 nt, Human
uggaggcagagcgcugcugggg

SEQ ID NO: 1192850 - RNA, 18 nt, Human
ugggaugggguggggaca

SEQ ID NO: 1192851 - RNA, 20 nt, Human
ugggaugggguggggacagg

SEQ ID NO: 1192852 - RNA, 20 nt, Human
uggggggaacaucauacuug

SEQ ID NO: 1192853 - RNA, 21 nt, Human
uggggucagccagguggugac

SEQ ID NO: 1192854 - RNA, 23 nt, Human
uggggucagccagguggugacau

SEQ ID NO: 1192855 - RNA, 19 nt, Human
ugggguggggacaggcaau

SEQ ID NO: 1192856 - RNA, 24 nt, Human
ugggguggggacaggcaaugaggu

SEQ ID NO: 1192857 - RNA, 24 nt, Human
ugggugcagacugugcucccuuug

SEQ ID NO: 1192858 - RNA, 24 nt, Human
uguggcagcugcagcgggcuuggc

SEQ ID NO: 1192859 - RNA, 24 nt, Human
uguggcagcugcagcgggcuuggc

SEQ ID NO: 1192860 - RNA, 24 nt, Human
uguggcagcugcagcgggcuuggc

SEQ ID NO: 1192861 - RNA, 19 nt, Human
uuacaaacacaggcugugg

SEQ ID NO: 1192862 - RNA, 23 nt, Human
uuccaguccaaugaaaguuuuau

SEQ ID NO: 1192863 - RNA, 24 nt, Human
uucccauauaaaaacucuucccac

SEQ ID NO: 1192864 - RNA, 25 nt, Human
uucccauauaaaaacucuucccacg

SEQ ID NO: 1192865 - RNA, 19 nt, Human
uuccggaagaaccugcggg

SEQ ID NO: 1192866 - RNA, 20 nt, Human
uucuucuguucuucacgccc

SEQ ID NO: 1192867 - RNA, 27 nt, Human
uugaaaaaagcaccugcugcaccauaa

SEQ ID NO: 1192868 - RNA, 24 nt, Human
uuggcucugauuucuuuucuggag

SEQ ID NO: 1192869 - RNA, 22 nt, Human
uuggguaggggaccugggguca

SEQ ID NO: 1192870 - RNA, 18 nt, Human
uugguucugugacccggg

SEQ ID NO: 1192871 - RNA, 23 nt, Human
uuuauccgcuuucccauauaaaa

SEQ ID NO: 1192872 - RNA, 23 nt, Human
uuucuggaggcucggaaacacuu

SEQ ID NO: 1192873 - RNA, 23 nt, Human
aaaaggaaaauguuauaaaagaa

SEQ ID NO: 1192874 - RNA, 18 nt, Human
aaacaaaacaaaacaaaa

SEQ ID NO: 1192875 - RNA, 19 nt, Human
aaacaaaacaaaacaggcc

SEQ ID NO: 1192876 - RNA, 22 nt, Human
aaacaaaacaaaacaggccaga

SEQ ID NO: 1192877 - RNA, 19 nt, Human
aaacaaaacaggccagagc

SEQ ID NO: 1192878 - RNA, 19 nt, Human
aacaaaacaaaacaaaaca

SEQ ID NO: 1192879 - RNA, 19 nt, Human
aagcaaaacaaaagaacaa

SEQ ID NO: 1192880 - RNA, 21 nt, Human
aagcaaaacaaaagaacaaag

SEQ ID NO: 1192881 - RNA, 24 nt, Human
aauaaaaaauagaaaauauuugga

SEQ ID NO: 1192882 - RNA, 22 nt, Human
acaaaacaggccagagccucau

SEQ ID NO: 1192883 - RNA, 24 nt, Human
acaaagcugaacuaagaugacccu

SEQ ID NO: 1192884 - RNA, 18 nt, Human
acagcuucucacagaugu

SEQ ID NO: 1192885 - RNA, 19 nt, Human
acauggguugggccuuuca

SEQ ID NO: 1192886 - RNA, 23 nt, Human
accaaaagcaaaacaaaagaaca

SEQ ID NO: 1192887 - RNA, 21 nt, Human
agagcacauaccaaggggcua

SEQ ID NO: 1192888 - RNA, 21 nt, Human
agagcacuuggaaacaaaaca

SEQ ID NO: 1192889 - RNA, 24 nt, Human
agccagagcacauaccaaggggcu

SEQ ID NO: 1192890 - RNA, 20 nt, Human
agcccuggguccccagaagc

SEQ ID NO: 1192891 - RNA, 21 nt, Human
agccucaucaacuuugagcag

SEQ ID NO: 1192892 - RNA, 25 nt, Human
aggaaaaaaagaaaaaugaaaagga

SEQ ID NO: 1192893 - RNA, 24 nt, Human
aguagaaaaagcaguagaugcaug

SEQ ID NO: 1192894 - RNA, 21 nt, Human
auagcuuggguauggggaagc

SEQ ID NO: 1192895 - RNA, 23 nt, Human
auguugaacaguaaagauguagc

SEQ ID NO: 1192896 - RNA, 21 nt, Human
caaaacaaaacaaaacaggcc

SEQ ID NO: 1192897 - RNA, 25 nt, Human
caaaacaaaacaaaacaggccagag

SEQ ID NO: 1192898 - RNA, 21 nt, Human
caaaacaaaacaggccagagc

SEQ ID NO: 1192899 - RNA, 24 nt, Human
caaagaggauggacuauuuagcca

SEQ ID NO: 1192900 - RNA, 21 nt, Human
caagacaauucuucuucuucc

SEQ ID NO: 1192901 - RNA, 24 nt, Human
cacaaugggcuugaagucuaccag

SEQ ID NO: 1192902 - RNA, 20 nt, Human
cagaagccauguccuuaaaa

SEQ ID NO: 1192903 - RNA, 30 nt, Human; identical to SEQ ID NO: 1192405

SEQ ID NO: 1192904 - RNA, 23 nt, Human
caggaaacgaggaaaaaaagaaa

SEQ ID NO: 1192905 - RNA, 22 nt, Human
cauaccaaggggcuaggcccca

SEQ ID NO: 1192906 - RNA, 20 nt, Human
cauuaggacaugccaguaca

SEQ ID NO: 1192907 - RNA, 21 nt, Human
ccaacacuuacuuuggguuua

SEQ ID NO: 1192908 - RNA, 20 nt, Human
ccagagcacauaccaagggg

SEQ ID NO: 1192909 - RNA, 19 nt, Human
ccaguguuaggaauaaaaa

SEQ ID NO: 1192910 - RNA, 21 nt, Human
ccauauccuugacacaugucc

SEQ ID NO: 1192911 - RNA, 24 nt, Human
cccaggauggcuuugaauguggcc

SEQ ID NO: 1192912 - RNA, 22 nt, Human
cuaaaguucuacauuucaguag

SEQ ID NO: 1192913 - RNA, 21 nt, Human
cugcuuuugguuuuccaaaag

SEQ ID NO: 1192914 - RNA, 25 nt, Human
cuuuggguuuaucugcccaaauuuu

SEQ ID NO: 1192915 - RNA, 21 nt, Human
gaaaaaaagaaaaaugaaaag

SEQ ID NO: 1192916 - RNA, 26 nt, Human
gaggaaaaaaagaaaaaugaaaagga

SEQ ID NO: 1192917 - RNA, 25 nt, Human
gaguagaaaaagcaguagaugcaug

SEQ ID NO: 1192918 - RNA, 25 nt, Human
gauaaccaaaagcaaaacaaaagaa

SEQ ID NO: 1192919 - RNA, 22 nt, Human
gcagcccaggauggcuuugaau

SEQ ID NO: 1192920 - RNA, 22 nt, Human
gcccaacacaaauucauaaacc

SEQ ID NO: 1192921 - RNA, 21 nt, Human
ggaaaguacaacuuccacaaa

SEQ ID NO: 1192922 - RNA, 24 nt, Human
ggacauaguuuuuuguuaaaaaug

SEQ ID NO: 1192923 - RNA, 20 nt, Human
ggcccacaagccacaugcag

SEQ ID NO: 1192924 - RNA, 25 nt, Human
guaaagcaauauagagacuagccuc

SEQ ID NO: 1192925 - RNA, 23 nt, Human
uaagcccuggguccccagaagcc

SEQ ID NO: 1192926 - RNA, 26 nt, Human
uagaaaaagcaguagaugcaugaaga

SEQ ID NO: 1192927 - RNA, 19 nt, Human
uagaaaauauuuggaaaaa

SEQ ID NO: 1192928 - RNA, 20 nt, Human
ucaaaagccuguucucaaaa

SEQ ID NO: 1192929 - RNA, 18 nt, Human
uccccagaagccaugucc

SEQ ID NO: 1192930 - RNA, 18 nt, Human
ucuccuggcaaaaucuau

SEQ ID NO: 1192931 - RNA, 22 nt, Human
ucugcccaaauuuucccucuca

SEQ ID NO: 1192932 - RNA, 21 nt, Human
ugaaaaggaguagaaaaagca

SEQ ID NO: 1192933 - RNA, 22 nt, Human
ugaaaaucagaagccagaacag

SEQ ID NO: 1192934 - RNA, 19 nt, Human
ugagauaccacaucuaugu

SEQ ID NO: 1192935 - RNA, 21 nt, Human
ugaguuuaucaaaagccuguu

SEQ ID NO: 1192936 - RNA, 24 nt, Human
ugauaaaaggaaaauguuauaaaa

SEQ ID NO: 1192937 - RNA, 21 nt, Human
ugcccaaauuuucccucucaa

SEQ ID NO: 1192938 - RNA, 19 nt, Human
uggaaaaaauaaauguaug

SEQ ID NO: 1192939 - RNA, 23 nt, Human
uggaaacaaaacaaaacaaaaca

SEQ ID NO: 1192940 - RNA, 22 nt, Human
uggacaaagcugaacuaagaug

SEQ ID NO: 1192941 - RNA, 18 nt, Human
uggcaaaaucuauggcuc

SEQ ID NO: 1192942 - RNA, 26 nt, Human
uggcaaaaucuauggcucuguaaaga

SEQ ID NO: 1192943 - RNA, 23 nt, Human
uggcaagcuugucuagcucauca

SEQ ID NO: 1192944 - RNA, 20 nt, Human
ugggccaugugaacaugucu

SEQ ID NO: 1192945 - RNA, 21 nt, Human
uguaguagguuucuuugucag

SEQ ID NO: 1192946 - RNA, 18 nt, Human
uguuccugagaaccacau

SEQ ID NO: 1192947 - RNA, 23 nt, Human
uuaaaaauguugaacaguaaaga

SEQ ID NO: 1192948 - RNA, 21 nt, Human
uucauaaaccuucuuaaaaca

SEQ ID NO: 1192949 - RNA, 23 nt, Human
uuuccaggauacuggaauuaggc

SEQ ID NO: 1192950 - RNA, 18 nt, Human
uuucuugaagagaggaaa

SEQ ID NO: 1192951 - RNA, 22 nt, Human
uuugggugagcuuuuaauauuu

SEQ ID NO: 1192952 - RNA, 22 nt, Human
aacaacuccaacaggaaacaaa

SEQ ID NO: 1192953 - RNA, 21 nt, Human
aaccauccguuaaaaggaaca

SEQ ID NO: 1192954 - RNA, 21 nt, Human
aaccuugccuccucaccgagc

SEQ ID NO: 1192955 - RNA, 24 nt, Human
aauaaucucaaagucauccaacag

SEQ ID NO: 1192956 - RNA, 27 nt, Human
agaacagaaacccacuacuaagaaugc

SEQ ID NO: 1192957 - RNA, 21 nt, Human
agaagucaaggaaauccuggu

SEQ ID NO: 1192958 - RNA, 23 nt, Human
agaauagauugagguacaaggca

SEQ ID NO: 1192959 - RNA, 18 nt, Human
agcacuaugugugacuac

SEQ ID NO: 1192960 - RNA, 19 nt, Human
aggaaauccugguuugcau

SEQ ID NO: 1192961 - RNA, 18 nt, Human
agggauggggccccggaa

SEQ ID NO: 1192962 - RNA, 18 nt, Human
auccaacagaacagaaac

SEQ ID NO: 1192963 - RNA, 24 nt, Human
caacaggaaacaaagaauaaucuc

SEQ ID NO: 1192964 - RNA, 23 nt, Human
caacuccaacaggaaacaaagaa

SEQ ID NO: 1192965 - RNA, 27 nt, Human
caacuccaacaggaaacaaagaauaau

SEQ ID NO: 1192966 - RNA, 23 nt, Human
cacaauucacaaaauggaaugga

SEQ ID NO: 1192967 - RNA, 23 nt, Human
cacuggcccaaacccccucccac

SEQ ID NO: 1192968 - RNA, 20 nt, Human
cagaauagauugagguacaa

SEQ ID NO: 1192969 - RNA, 19 nt, Human
ccaaacccccucccacugg

SEQ ID NO: 1192970 - RNA, 21 nt, Human
ccaaacccccucccacuggcc

SEQ ID NO: 1192971 - RNA, 20 nt, Human
ccaacagaacagaaacccac

SEQ ID NO: 1192972 - RNA, 22 nt, Human
ccaaucugaauaaaaaacaaga

SEQ ID NO: 1192973 - RNA, 18 nt, Human
ccacuggcccuggcugca

SEQ ID NO: 1192974 - RNA, 19 nt, Human
ccccggaaggugcacuggc

SEQ ID NO: 1192975 - RNA, 24 nt, Human
cccucagaaccuugccuccucacc

SEQ ID NO: 1192976 - RNA, 19 nt, Human
ccuccgggggccucugguc

SEQ ID NO: 1192977 - RNA, 21 nt, Human
cuaaacuauauaaacagcacu

SEQ ID NO: 1192978 - RNA, 18 nt, Human
cuggcagaucuucuccuu

SEQ ID NO: 1192979 - RNA, 22 nt, Human
cuggcccaaacccccucccacc

SEQ ID NO: 1192980 - RNA, 18 nt, Human
cugggcaauggagaccca

SEQ ID NO: 1192981 - RNA, 21 nt, Human
cuugccuccucaccgagccug

SEQ ID NO: 1192982 - RNA, 21 nt, Human
cuuuuuccacugcuauuauua

SEQ ID NO: 1192983 - RNA, 22 nt, Human
gcauucucaaagaagucaagga

SEQ ID NO: 1192984 - RNA, 20 nt, Human
gcgggagugugggcaggagc

SEQ ID NO: 1192985 - RNA, 21 nt, Human
ggcgggagugugggcaggagc

SEQ ID NO: 1192986 - RNA, 20 nt, Human
gggcaauggagacccacugg

SEQ ID NO: 1192987 - RNA, 20 nt, Human
gggcaggagcugggcaaugg

SEQ ID NO: 1192988 - RNA, 22 nt, Human
uaaaaaacaagacucuuacucc

SEQ ID NO: 1192989 - RNA, 25 nt, Human
uaaaaaacaagacucuuacuccuaa

SEQ ID NO: 1192990 - RNA, 19 nt, Human
uacuaagaaugcugacugc

SEQ ID NO: 1192991 - RNA, 21 nt, Human
uacuaagaaugcugacugcuc

SEQ ID NO: 1192992 - RNA, 20 nt, Human
uauaaacagcacuaugugug

SEQ ID NO: 1192993 - RNA, 18 nt, Human
ucaaagaagucaaggaaa

SEQ ID NO: 1192994 - RNA, 18 nt, Human
ucaccgagccugggccgg

SEQ ID NO: 1192995 - RNA, 23 nt, Human
ucagugcuccuccgggggccucu

SEQ ID NO: 1192996 - RNA, 23 nt, Human
uccccucagaaccuugccuccuc

SEQ ID NO: 1192997 - RNA, 24 nt, Human
ucgcucguugcucagggcgagaau

SEQ ID NO: 1192998 - RNA, 24 nt, Human
ucucaaagucauccaacagaacag

SEQ ID NO: 1192999 - RNA, 21 nt, Human
ugggcaggagcugggcaaugg

SEQ ID NO: 1193000 - RNA, 19 nt, Human
uggucagggcaacaggcgg

SEQ ID NO: 1193001 - RNA, 24 nt, Human
ugguccuccaggucagccuguccc

SEQ ID NO: 1193002 - RNA, 21 nt, Human
uucuccuucagugcuccuccg

SEQ ID NO: 1193003 - RNA, 23 nt, Human
uuugaacaacuccaacaggaaac

SEQ ID NO: 1193004 - RNA, 24 nt, Human
uuugauuucuugaguuaucucaug

SEQ ID NO: 1193005 - RNA, 26 nt, Human
uuuuccacugcuauuauuaugucaca

SEQ ID NO: 1193006 - RNA, 21 nt, Human
accaggugccccuggccucgc

SEQ ID NO: 1193007 - RNA, 19 nt, Human
agcgggauggacagcgggg

SEQ ID NO: 1193008 - RNA, 22 nt, Human
augguggugauaguggcgggac

SEQ ID NO: 1193009 - RNA, 19 nt, Human
ccagcagcgggauggacag

SEQ ID NO: 1193010 - RNA, 20 nt, Human
ccuuuagcauccccuucagc

SEQ ID NO: 1193011 - RNA, 20 nt, Human
cgcaccaggugccccuggcc

SEQ ID NO: 1193012 - RNA, 21 nt, Human
cucgccagccagaggaccagu

SEQ ID NO: 1193013 - RNA, 19 nt, Human
gaugguggugauaguggcg

SEQ ID NO: 1193014 - RNA, 23 nt, Human
uaucuccuuuagcauccccuuca

SEQ ID NO: 1193015 - RNA, 19 nt, Human
uccuugggguggugugcgu

SEQ ID NO: 1193016 - RNA, 22 nt, Human
ugagugccuggggcaucuccug

SEQ ID NO: 1193017 - RNA, 20 nt, Human
ugccuggggcaucuccugca

SEQ ID NO: 1193018 - RNA, 18 nt, Human
uggcacccgcaccaggug

SEQ ID NO: 1193019 - RNA, 19 nt, Human
uggccggagggccucaggu

SEQ ID NO: 1193020 - RNA, 20 nt, Human
uuggggaugguggugauagu

SEQ ID NO: 1193021 - RNA, 27 nt, Human
aaagauuuucuuuuuuuucuucugaga

SEQ ID NO: 1193022 - RNA, 22 nt, Human
cauggcugagacaguccccucu

SEQ ID NO: 1193023 - RNA, 22 nt, Human
cucaagcaaacacuuuggucuc

SEQ ID NO: 1193024 - RNA, 21 nt, Human
gaaucaauuuuuaacuuucca

SEQ ID NO: 1193025 - RNA, 22 nt, Human
ugaaaugaagcccaagaaaguu

SEQ ID NO: 1193026 - RNA, 24 nt, Human
ugacaaaaauaagaaucaauuuuu

SEQ ID NO: 1193027 - RNA, 21 nt, Human
ugagacaguccccucugcucu

SEQ ID NO: 1193028 - RNA, 22 nt, Human
ugagguuugcauggcugagaca

SEQ ID NO: 1193029 - RNA, 21 nt, Human
aaacugguguuuuaucuuuaa

SEQ ID NO: 1193030 - RNA, 19 nt, Human
cauugcugaggugaucagc

SEQ ID NO: 1193031 - RNA, 22 nt, Human
cucuuccuuucuuccugcaaac

SEQ ID NO: 1193032 - RNA, 20 nt, Human
cugaggugaucagcuuucuu

SEQ ID NO: 1193033 - RNA, 24 nt, Human
gcuggugugugagaccauuugggu

SEQ ID NO: 1193034 - RNA, 22 nt, Human
guucucugucauuccauaagaa

SEQ ID NO: 1193035 - RNA, 18 nt, Human
uaagaaagcugaacagug

SEQ ID NO: 1193036 - RNA, 21 nt, Human
ucaaugauaaacuccacuggu

SEQ ID NO: 1193037 - RNA, 21 nt, Human
uccacugguuuauaccuccug

SEQ ID NO: 1193038 - RNA, 22 nt, Human
uccacugguuuauaccuccugg

SEQ ID NO: 1193039 - RNA, 18 nt, Human
ugaaaucauucauugcug

SEQ ID NO: 1193040 - RNA, 23 nt, Human
uggaaaacaguuauucagaaaca

SEQ ID NO: 1193041 - RNA, 30 nt, Human
ugguguuuuaucuuuacaaguucucugucc

SEQ ID NO: 1193042 - RNA, 25 nt, Human
uuacaaguucucugucauuccauaa

SEQ ID NO: 1193043 - RNA, 21 nt, Human
aaaauagcaaaauauagagag

SEQ ID NO: 1193044 - RNA, 18 nt, Human
aaaaugguuuccugggcu

SEQ ID NO: 1193045 - RNA, 23 nt, Human
aacugccaaaagcugugggagcc

SEQ ID NO: 1193046 - RNA, 22 nt, Human
aagauuggaggcauuuugcccc

SEQ ID NO: 1193047 - RNA, 22 nt, Human
aagcccagaggccuaggaggga

SEQ ID NO: 1193048 - RNA, 18 nt, Human
acaugacugacuccaucu

SEQ ID NO: 1193049 - RNA, 25 nt, Human
acugguuaguggagcugugagaaga

SEQ ID NO: 1193050 - RNA, 18 nt, Human
agaagaacagcauaaaag

SEQ ID NO: 1193051 - RNA, 20 nt, Human
agagaagaacagcauaaaag

SEQ ID NO: 1193052 - RNA, 21 nt, Human
agccagcugaagaaaucugca

SEQ ID NO: 1193053 - RNA, 23 nt, Human
agugcggaagaaaaauguggggu

SEQ ID NO: 1193054 - RNA, 24 nt, Human
agugcggaagaaaaaugugggguu

SEQ ID NO: 1193055 - RNA, 25 nt, Human
agugcggaagaaaaaugugggguuu

SEQ ID NO: 1193056 - RNA, 18 nt, Human
augcauucacaaagagaa

SEQ ID NO: 1193057 - RNA, 19 nt, Human
augucagagaucuucaugg

SEQ ID NO: 1193058 - RNA, 21 nt, Human
caaaaugcugagagugauacg

SEQ ID NO: 1193059 - RNA, 21 nt, Human
cacacagaguccccacugggg

SEQ ID NO: 1193060 - RNA, 25 nt, Human
cagaacuauaagucaauuaaaccuc

SEQ ID NO: 1193061 - RNA, 25 nt, Human
ccaagacaauggggaaaacgucuca

SEQ ID NO: 1193062 - RNA, 20 nt, Human
ccagaggccuaggagggaaa

SEQ ID NO: 1193063 - RNA, 28 nt, Human
ccagucucagggaaguucuuccgagagg

SEQ ID NO: 1193064 - RNA, 21 nt, Human
ccaguuuuauuuuggacccca

SEQ ID NO: 1193065 - RNA, 19 nt, Human
ccauguaaggcauuccugc

SEQ ID NO: 1193066 - RNA, 18 nt, Human
cccccacacagagucccc

SEQ ID NO: 1193067 - RNA, 22 nt, Human
ccccugcucugugcagccuugg

SEQ ID NO: 1193068 - RNA, 20 nt, Human
ccuggaugugagauguggag

SEQ ID NO: 1193069 - RNA, 19 nt, Human
cggacuaauucaaaaaacu

SEQ ID NO: 1193070 - RNA, 25 nt, Human
cuagccucaacaaauguauucagag

SEQ ID NO: 1193071 - RNA, 23 nt, Human
cuauguaguugaaaagaaaaacc

SEQ ID NO: 1193072 - RNA, 22 nt, Human
cugaaaguguucaguuauaugc

SEQ ID NO: 1193073 - RNA, 18 nt, Human
cuucauggcagccccugc

SEQ ID NO: 1193074 - RNA, 20 nt, Human
cuucuuggcaacugaagcaa

SEQ ID NO: 1193075 - RNA, 21 nt, Human
gaaaacgucucagcaccaugu

SEQ ID NO: 1193076 - RNA, 24 nt, Human
gaaauacagccucgauuuagaaag

SEQ ID NO: 1193077 - RNA, 20 nt, Human
gaagaugugggaaaguuugg

SEQ ID NO: 1193078 - RNA, 18 nt, Human
gaaguccaggaugaggug

SEQ ID NO: 1193079 - RNA, 24 nt, Human
gaauguggaagguacuuuggaacu

SEQ ID NO: 1193080 - RNA, 23 nt, Human
gaggaacuucuuggcaacugaag

SEQ ID NO: 1193081 - RNA, 21 nt, Human
ggaagaaaaaugugggguugg

SEQ ID NO: 1193082 - RNA, 20 nt, Human
gggaagagggaugguguaga

SEQ ID NO: 1193083 - RNA, 21 nt, Human
gggaugguguagacagugagu

SEQ ID NO: 1193084 - RNA, 25 nt, Human
gggcagaaguuggaacacuuuggaa

SEQ ID NO: 1193085 - RNA, 22 nt, Human
gggcagugcggaagaaaaaugu

SEQ ID NO: 1193086 - RNA, 22 nt, Human
gguuuccugggcugggccaagg

SEQ ID NO: 1193087 - RNA, 23 nt, Human
guagugcuggguuugagggugca

SEQ ID NO: 1193088 - RNA, 21 nt, Human
gugcacuuugaagagcaacag

SEQ ID NO: 1193089 - RNA, 21 nt, Human
gugcggaagaaaaaugugggg

SEQ ID NO: 1193090 - RNA, 21 nt, Human
gugcggaagaaaaaugugggg

SEQ ID NO: 1193091 - RNA, 21 nt, Human
uaaguaaugaggagcacaugg

SEQ ID NO: 1193092 - RNA, 24 nt, Human
uaccugagaauguggaagguacuu

SEQ ID NO: 1193093 - RNA, 19 nt, Human
uagagagaacacuucagag

SEQ ID NO: 1193094 - RNA, 23 nt, Human
uagugaagauggcauuuuuuuaa

SEQ ID NO: 1193095 - RNA, 18 nt, Human
uauucaagacaugaccug

SEQ ID NO: 1193096 - RNA, 20 nt, Human
ucaaaaaacugguacugagg

SEQ ID NO: 1193097 - RNA, 19 nt, Human
ucaccauuuugcacugaag

SEQ ID NO: 1193098 - RNA, 24 nt, Human
ucccccugcucugugcagccuugg

SEQ ID NO: 1193099 - RNA, 19 nt, Human
uccuucacacacucucucu

SEQ ID NO: 1193100 - RNA, 26 nt, Human
ucucagcaccaugucagagaucuuca

SEQ ID NO: 1193101 - RNA, 21 nt, Human
ucucagggaaguucuuuauag

SEQ ID NO: 1193102 - RNA, 21 nt, Human
ucugcauaaguaaugaggagc

SEQ ID NO: 1193103 - RNA, 23 nt, Human
ugaaaagaaaaacccauuuucug

SEQ ID NO: 1193104 - RNA, 19 nt, Human
ugaaacagcaagggugggu

SEQ ID NO: 1193105 - RNA, 24 nt, Human
ugagauguggagucaaaggagauc

SEQ ID NO: 1193106 - RNA, 20 nt, Human
ugaggaacuucuuggcaacu

SEQ ID NO: 1193107 - RNA, 24 nt, Human
ugaggguaguggggcauugcuaug

SEQ ID NO: 1193108 - RNA, 23 nt, Human
ugcacagaaguaaaaaauugaag

SEQ ID NO: 1193109 - RNA, 22 nt, Human
ugcagaaccucugcuagggcag

SEQ ID NO: 1193110 - RNA, 22 nt, Human
ugcagccuugggacauggugcc

SEQ ID NO: 1193111 - RNA, 21 nt, Human
ugccauguaaggcauuccugc

SEQ ID NO: 1193112 - RNA, 22 nt, Human
ugcccuugcccuagagaucugu

SEQ ID NO: 1193113 - RNA, 26 nt, Human
ugcccuugcccuagagaucuguggaa

SEQ ID NO: 1193114 - RNA, 18 nt, Human
ugcuagggcagugcggaa

SEQ ID NO: 1193115 - RNA, 21 nt, Human
ugcugcagaaguggaaacuuc

SEQ ID NO: 1193116 - RNA, 20 nt, Human
uggaacuggguaaugggcag

SEQ ID NO: 1193117 - RNA, 20 nt, Human
uggaagacaggaagaugugg

SEQ ID NO: 1193118 - RNA, 19 nt, Human
uggagcugugagaagaggg

SEQ ID NO: 1193119 - RNA, 22 nt, Human
ugggccaagggucccccugcuc

SEQ ID NO: 1193120 - RNA, 25 nt, Human
uggggcacugguuaguggagcugug

SEQ ID NO: 1193121 - RNA, 23 nt, Human
uguauucagagacuuuuuuucac

SEQ ID NO: 1193122 - RNA, 23 nt, Human
uguguuugacaguuccuccuuca

SEQ ID NO: 1193123 - RNA, 26 nt, Human
uuaaaacuuuauugauaauucagcaa

SEQ ID NO: 1193124 - RNA, 23 nt, Human
uuaaaccucuuuccuuuauaagu

SEQ ID NO: 1193125 - RNA, 24 nt, Human
uuccugaggcuuccccagccaugc

SEQ ID NO: 1193126 - RNA, 20 nt, Human
uuccugcuuccgcucacacc

SEQ ID NO: 1193127 - RNA, 23 nt, Human
uucuaagccaggcuccuccucac

SEQ ID NO: 1193128 - RNA, 24 nt, Human
uuucacuugucauuucaggcugag

SEQ ID NO: 1193129 - RNA, 21 nt, Human
aaauuccuuuuuaccauaggc

SEQ ID NO: 1193130 - RNA, 21 nt, Human
cacgaagcccucuucccauuc

SEQ ID NO: 1193131 - RNA, 25 nt, Human
cacucugcucucaaucuuccaucuc

SEQ ID NO: 1193132 - RNA, 21 nt, Human
ccaucuccuccucucaaauuc

SEQ ID NO: 1193133 - RNA, 19 nt, Human
cucugcucucaaucuucca

SEQ ID NO: 1193134 - RNA, 21 nt, Human
cuuccaucuccuccucucaaa

SEQ ID NO: 1193135 - RNA, 19 nt, Human
cuucccauucuugcacucu

SEQ ID NO: 1193136 - RNA, 28 nt, Human
cuucccauucuugcacucugcucucaau

SEQ ID NO: 1193137 - RNA, 23 nt, Human
gcccucuucccauucuugcacuc

SEQ ID NO: 1193138 - RNA, 24 nt, Human
ucaaucuuccaucuccuccucuca

SEQ ID NO: 1193139 - RNA, 19 nt, Human
ugugggagugauucuaggu

SEQ ID NO: 1193140 - RNA, 24 nt, Human
uucuaggugcugugacuuuuauga

SEQ ID NO: 1193141 - RNA, 18 nt, Human
aaugcacaagagaaagaa

SEQ ID NO: 1193142 - RNA, 22 nt, Human
ugaaaggaagauaaaaucuguc

SEQ ID NO: 1193143 - RNA, 18 nt, Human
aaaaaauggcaagggaca

SEQ ID NO: 1193144 - RNA, 23 nt, Human
aaaaaccauugaauuguacacuu

SEQ ID NO: 1193145 - RNA, 23 nt, Human
aaaaauucucuuuuaaaaauguc

SEQ ID NO: 1193146 - RNA, 24 nt, Human
aaaaauucucuuuuaaaaauguca

SEQ ID NO: 1193147 - RNA, 24 nt, Human
aaaacaggcaaaaucacagagaca

SEQ ID NO: 1193148 - RNA, 19 nt, Human
aaaaggccacaaauuauug

SEQ ID NO: 1193149 - RNA, 21 nt, Human
aaaaguaaccuauuuuacaug

SEQ ID NO: 1193150 - RNA, 20 nt, Human
aaaaucacagagacagaaag

SEQ ID NO: 1193151 - RNA, 25 nt, Human
aaacaauuauguuuugauccccccg

SEQ ID NO: 1193152 - RNA, 25 nt, Human
aaacaggcaaaaucacagagacaga

SEQ ID NO: 1193153 - RNA, 25 nt, Human
aaacaugauuauuacaacauguggc

SEQ ID NO: 1193154 - RNA, 18 nt, Human
aaaguaaccuauuuuaca

SEQ ID NO: 1193155 - RNA, 22 nt, Human
aaauagaaaauguagcaaagaa

SEQ ID NO: 1193156 - RNA, 24 nt, Human
aaauagaaaauguagcaaagaaaa

SEQ ID NO: 1193157 - RNA, 24 nt, Human
aaauggguucucaaucauaaaggu

SEQ ID NO: 1193158 - RNA, 20 nt, Human
aacacggugaaaccccuauc

SEQ ID NO: 1193159 - RNA, 21 nt, Human
aacacggugaaaccccuaucu

SEQ ID NO: 1193160 - RNA, 22 nt, Human
aacacggugaaaccccuaucuc

SEQ ID NO: 1193161 - RNA, 26 nt, Human
aacacuuucagccauuacugaaaaua

SEQ ID NO: 1193162 - RNA, 21 nt, Human
aagagcaucaugguaucacag

SEQ ID NO: 1193163 - RNA, 21 nt, Human
aagcauuucagaauggaaaua

SEQ ID NO: 1193164 - RNA, 21 nt, Human
aaggaacugguuccuggaggc

SEQ ID NO: 1193165 - RNA, 20 nt, Human
aaggagggaguaggggaggg

SEQ ID NO: 1193166 - RNA, 21 nt, Human
aauuacaagaaaaaauggcaa

SEQ ID NO: 1193167 - RNA, 20 nt, Human
aauugcuugaacccaggagg

SEQ ID NO: 1193168 - RNA, 24 nt, Human
aauugcuugaacccaggaggcgga

SEQ ID NO: 1193169 - RNA, 19 nt, Human
acaggcaaaaucacagaga

SEQ ID NO: 1193170 - RNA, 23 nt, Human
acaugaucaacaaaaaaaggaaa

SEQ ID NO: 1193171 - RNA, 18 nt, Human
acuccagccugggagaca

SEQ ID NO: 1193172 - RNA, 18 nt, Human
acugcacuccagccuggg

SEQ ID NO: 1193173 - RNA, 18 nt, Human
acugcacuccagccuggg

SEQ ID NO: 1193174 - RNA, 27 nt, Human
acugcacuccagccugggagacaacag

SEQ ID NO: 1193175 - RNA, 20 nt, Human
agaaaaaauggcaagggaca

SEQ ID NO: 1193176 - RNA, 20 nt, Human
agaaaauguagcaaagaaaa

SEQ ID NO: 1193177 - RNA, 22 nt, Human
agccaaauaauaaauuaaaaca

SEQ ID NO: 1193178 - RNA, 23 nt, Human
agccaggcgugguggugcacgcc

SEQ ID NO: 1193179 - RNA, 25 nt, Human
agccugggagacaacagcgagacuu

SEQ ID NO: 1193180 - RNA, 23 nt, Human
agcggugaugcuugcacaacauu

SEQ ID NO: 1193181 - RNA, 21 nt, Human
aggaaggaaggaaggaaagga

SEQ ID NO: 1193182 - RNA, 18 nt, Human
aggaaggagaauugcuug

SEQ ID NO: 1193183 - RNA, 18 nt, Human
aggagaauaagaaauggg

SEQ ID NO: 1193184 - RNA, 20 nt, Human
aggagaauugcuugaaccca

SEQ ID NO: 1193185 - RNA, 18 nt, Human
aggagggaguaggggagg

SEQ ID NO: 1193186 - RNA, 24 nt, Human
aggcagguggaucaccaggucagg

SEQ ID NO: 1193187 - RNA, 21 nt, Human
aggccgaggcagguggaucac

SEQ ID NO: 1193188 - RNA, 21 nt, Human
aggcggaggucacagugagcc

SEQ ID NO: 1193189 - RNA, 24 nt, Human
aggcggaggucacagugagccgag

SEQ ID NO: 1193190 - RNA, 24 nt, Human
aggcgugguggugcacgccuguag

SEQ ID NO: 1193191 - RNA, 24 nt, Human
aggcugaggaaggagaauugcuug

SEQ ID NO: 1193192 - RNA, 18 nt, Human
agggaguaggggagggag

SEQ ID NO: 1193193 - RNA, 22 nt, Human
agggaguaggggagggaggcuu

SEQ ID NO: 1193194 - RNA, 19 nt, Human
agguggaucaccaggucag

SEQ ID NO: 1193195 - RNA, 24 nt, Human
aucgcgccacugcacuccagccug

SEQ ID NO: 1193196 - RNA, 24 nt, Human
auuuaaggucacauuaaaggauaa

SEQ ID NO: 1193197 - RNA, 24 nt, Human
caaaacaggcaaaaucacagagac

SEQ ID NO: 1193198 - RNA, 18 nt, Human
caaaaguauaggaguuca

SEQ ID NO: 1193199 - RNA, 20 nt, Human
caaacacaaaaggccacaaa

SEQ ID NO: 1193200 - RNA, 21 nt, Human
caaagcuccuacagcuguaga

SEQ ID NO: 1193201 - RNA, 19 nt, Human
caaauggcccucuucauuc

SEQ ID NO: 1193202 - RNA, 24 nt, Human
caacaaaaaaaggaaaaugacauc

SEQ ID NO: 1193203 - RNA, 27 nt, Human
caacaaaaaaaggaaaaugacaucaca

SEQ ID NO: 1193204 - RNA, 24 nt, Human
caacaaguuaaaauacaguaaugc

SEQ ID NO: 1193205 - RNA, 24 nt, Human
caacacuuugggaggccgaggcag

SEQ ID NO: 1193206 - RNA, 25 nt, Human
caacacuuugggaggccgaggcagg

SEQ ID NO: 1193207 - RNA, 23 nt, Human
cacacucauacaaugaaacauca

SEQ ID NO: 1193208 - RNA, 22 nt, Human
cacaguauggccauuaggagaa

SEQ ID NO: 1193209 - RNA, 18 nt, Human
cacgccuguagucccagc

SEQ ID NO: 1193210 - RNA, 24 nt, Human
cacgcuuauaaucccaacacuuug

SEQ ID NO: 1193211 - RNA, 18 nt, Human
cacugcacuccagccugg

SEQ ID NO: 1193212 - RNA, 19 nt, Human
cacugcacuccagccuggg

SEQ ID NO: 1193213 - RNA, 22 nt, Human
cacugcacuccagccugggaga

SEQ ID NO: 1193214 - RNA, 25 nt, Human
cacugcacuccagccugggagacaa

SEQ ID NO: 1193215 - RNA, 26 nt, Human
cacugcacuccagccugggagacaac

SEQ ID NO: 1193216 - RNA, 24 nt, Human
cacuuuaaaaauggcaaguuugag

SEQ ID NO: 1193217 - RNA, 18 nt, Human
cagcauucuguucacacc

SEQ ID NO: 1193218 - RNA, 23 nt, Human
caggggccgaggaagggaagaac

SEQ ID NO: 1193219 - RNA, 20 nt, Human
caguccgaucucaccugaaa

SEQ ID NO: 1193220 - RNA, 24 nt, Human
caucacauuuuucacaaggacaca

SEQ ID NO: 1193221 - RNA, 20 nt, Human
ccaaaacaggcaaaaucaca

SEQ ID NO: 1193222 - RNA, 19 nt, Human
ccacugcacuccagccugg

SEQ ID NO: 1193223 - RNA, 20 nt, Human
ccacugcacuccagccuggg

SEQ ID NO: 1193224 - RNA, 22 nt, Human
ccacugcacuccagccugggag

SEQ ID NO: 1193225 - RNA, 24 nt, Human
ccacugcacuccagccugggagac

SEQ ID NO: 1193226 - RNA, 18 nt, Human
ccaguaaugucaaaagua

SEQ ID NO: 1193227 - RNA, 21 nt, Human
ccuggaggcgauuuccucucc

SEQ ID NO: 1193228 - RNA, 23 nt, Human
ccuggcuaacacggugaaacccc

SEQ ID NO: 1193229 - RNA, 25 nt, Human
ccuggcuaacacggugaaaccccua

SEQ ID NO: 1193230 - RNA, 19 nt, Human
ccuguagucccagcuacuc

SEQ ID NO: 1193231 - RNA, 21 nt, Human
ccuguagucccagcuacucag

SEQ ID NO: 1193232 - RNA, 24 nt, Human
cgagaccauccuggcuaacacggu

SEQ ID NO: 1193233 - RNA, 24 nt, Human
cgagaucgcgccacugcacuccag

SEQ ID NO: 1193234 - RNA, 24 nt, Human
cgaggcagguggaucaccagguca

SEQ ID NO: 1193235 - RNA, 26 nt, Human
cgccacugcacuccagccugggagac

SEQ ID NO: 1193236 - RNA, 24 nt, Human
cgccuguagucccagcuacucagg

SEQ ID NO: 1193237 - RNA, 23 nt, Human
cgcuuauaaucccaacacuuugg

SEQ ID NO: 1193238 - RNA, 24 nt, Human
cgcuuauaaucccaacacuuuggg

SEQ ID NO: 1193239 - RNA, 18 nt, Human
cuaaaaguauggaacagu

SEQ ID NO: 1193240 - RNA, 19 nt, Human
cuaagugaaagccaaacac

SEQ ID NO: 1193241 - RNA, 22 nt, Human
cucacgcuuauaaucccaacac

SEQ ID NO: 1193242 - RNA, 24 nt, Human
cucacgcuuauaaucccaacacuu

SEQ ID NO: 1193243 - RNA, 20 nt, Human
cugaauggauaaauaaaaug

SEQ ID NO: 1193244 - RNA, 24 nt, Human
cuggcuaacacggugaaaccccua

SEQ ID NO: 1193245 - RNA, 22 nt, Human
cuuuauguauugacauuuuuca

SEQ ID NO: 1193246 - RNA, 19 nt, Human
gaaauaaaaacugaaccca

SEQ ID NO: 1193247 - RNA, 19 nt, Human
gaaggaaaggagggaguag

SEQ ID NO: 1193248 - RNA, 20 nt, Human
gaaggaaggaaaggagggag

SEQ ID NO: 1193249 - RNA, 22 nt, Human
gacacauuuaaggucacauuaa

SEQ ID NO: 1193250 - RNA, 24 nt, Human
gaggaaggagaauugcuugaaccc

SEQ ID NO: 1193251 - RNA, 18 nt, Human
gaggcugaggaaggagaa

SEQ ID NO: 1193252 - RNA, 24 nt, Human
gaucaccaggucaggagaucgaga

SEQ ID NO: 1193253 - RNA, 21 nt, Human
gaucucaccugaaagaaacaa

SEQ ID NO: 1193254 - RNA, 21 nt, Human
gcaauaaagcagguaacugaa

SEQ ID NO: 1193255 - RNA, 20 nt, Human
gcccucuucauucuuaauuc

SEQ ID NO: 1193256 - RNA, 20 nt, Human
gccgagaucgcgccacugca

SEQ ID NO: 1193257 - RNA, 23 nt, Human
gccuguagucccagcuacucagg

SEQ ID NO: 1193258 - RNA, 25 nt, Human
gcuaacacggugaaaccccuaucuc

SEQ ID NO: 1193259 - RNA, 24 nt, Human
ggaaaggagggaguaggggaggga

SEQ ID NO: 1193260 - RNA, 18 nt, Human
ggagaugcaaauggcccu

SEQ ID NO: 1193261 - RNA, 21 nt, Human
ggaggcggaggucacagugag

SEQ ID NO: 1193262 - RNA, 18 nt, Human
ggagggaguaggggaggg

SEQ ID NO: 1193263 - RNA, 24 nt, Human
ggaggucacagugagccgagaucg

SEQ ID NO: 1193264 - RNA, 19 nt, Human
ggccgaggaagggaagaac

SEQ ID NO: 1193265 - RNA, 24 nt, Human
gguggugcacgccuguagucccag

SEQ ID NO: 1193266 - RNA, 22 nt, Human
gucuccaaaagaaaaaaaaaaa

SEQ ID NO: 1193267 - RNA, 21 nt, Human
uaaaaauacaaaaauuagcca

SEQ ID NO: 1193268 - RNA, 23 nt, Human
uaaaaauugcuuuaaaaauauau

SEQ ID NO: 1193269 - RNA, 19 nt, Human
uaaaauuuuuacuagaagc

SEQ ID NO: 1193270 - RNA, 19 nt, Human
uaacacggugaaaccccua

SEQ ID NO: 1193271 - RNA, 23 nt, Human
uaacacggugaaaccccuaucuc

SEQ ID NO: 1193272 - RNA, 18 nt, Human
uaagagcaucaugguauc

SEQ ID NO: 1193273 - RNA, 20 nt, Human
uacaugaucaacaaaaaaag

SEQ ID NO: 1193274 - RNA, 22 nt, Human
uagaagccaaaauccucaagca

SEQ ID NO: 1193275 - RNA, 20 nt, Human
ucaaacaauaaaaaggaagc

SEQ ID NO: 1193276 - RNA, 18 nt, Human
ucaccaggucaggagauc

SEQ ID NO: 1193277 - RNA, 24 nt, Human
ucaccaggucaggagaucgagacc

SEQ ID NO: 1193278 - RNA, 19 nt, Human
uccaaaacaggcaaaauca

SEQ ID NO: 1193279 - RNA, 24 nt, Human
uccaaaacaggcaaaaucacagag

SEQ ID NO: 1193280 - RNA, 23 nt, Human
uccaaaagaaaaaaaaaaaagug

SEQ ID NO: 1193281 - RNA, 20 nt, Human
uccacauggagcaauaaagc

SEQ ID NO: 1193282 - RNA, 22 nt, Human
uccaggggccgaggaagggaag

SEQ ID NO: 1193283 - RNA, 23 nt, Human
ucgcgccacugcacuccagccug

SEQ ID NO: 1193284 - RNA, 21 nt, Human
ucucuacuaaaaauacaaaaa

SEQ ID NO: 1193285 - RNA, 23 nt, Human
ugaaacaucauuuagccauaaaa

SEQ ID NO: 1193286 - RNA, 19 nt, Human
ugaaaguucagcaauacaa

SEQ ID NO: 1193287 - RNA, 23 nt, Human
ugaaauguccaaaacaggcaaaa

SEQ ID NO: 1193288 - RNA, 24 nt, Human
ugaauggauaaauaaaauguggua

SEQ ID NO: 1193289 - RNA, 22 nt, Human
ugagccgagaucgcgccacugc

SEQ ID NO: 1193290 - RNA, 24 nt, Human
ugaggaaggagaauugcuugaacc

SEQ ID NO: 1193291 - RNA, 24 nt, Human
ugaggccaggcgucauggcucacg

SEQ ID NO: 1193292 - RNA, 22 nt, Human
ugagguaaaaucaaaaggguuu

SEQ ID NO: 1193293 - RNA, 25 nt, Human
uggaaauaaaaacugaacccaggca

SEQ ID NO: 1193294 - RNA, 20 nt, Human
uggcaagggacaagugaucg

SEQ ID NO: 1193295 - RNA, 21 nt, Human
uggcaagggacaagugaucgc

SEQ ID NO: 1193296 - RNA, 20 nt, Human
uggcaaguuugaggccaggc

SEQ ID NO: 1193297 - RNA, 21 nt, Human
uggcucacgcuuauaauccca

SEQ ID NO: 1193298 - RNA, 24 nt, Human
ugggaggccgaggcagguggauca

SEQ ID NO: 1193299 - RNA, 18 nt, Human
uggugcacgccuguaguc

SEQ ID NO: 1193300 - RNA, 21 nt, Human
uggugcacgccuguaguccca

SEQ ID NO: 1193301 - RNA, 24 nt, Human
ugguggugcacgccuguaguccca

SEQ ID NO: 1193302 - RNA, 22 nt, Human
uguacauguacuauauaaaaug

SEQ ID NO: 1193303 - RNA, 19 nt, Human
uguccaaaacaggcaaaau

SEQ ID NO: 1193304 - RNA, 28 nt, Human
uguccaaaacaggcaaaaucacagaggg

SEQ ID NO: 1193305 - RNA, 18 nt, Human
ugugcuaaaaguauggaa

SEQ ID NO: 1193306 - RNA, 24 nt, Human
uguuauaugaauuuuaucucaauu

SEQ ID NO: 1193307 - RNA, 23 nt, Human
uuaaaaugagguaaaaucaaaag

SEQ ID NO: 1193308 - RNA, 21 nt, Human
uuacugaaaauaaacauguag

SEQ ID NO: 1193309 - RNA, 24 nt, Human
uuagccaggcgugguggugcacgc

SEQ ID NO: 1193310 - RNA, 21 nt, Human
uucaaacaauaaaaaggaagc

SEQ ID NO: 1193311 - RNA, 24 nt, Human
uucagaauggaaauaaaaacugaa

SEQ ID NO: 1193312 - RNA, 24 nt, Human
uugaacuuacaauuuaauacuuaa

SEQ ID NO: 1193313 - RNA, 24 nt, Human
uugcuugaacccaggaggcggagg

SEQ ID NO: 1193314 - RNA, 25 nt, Human
uugggaggccgaggcagguggauca

SEQ ID NO: 1193315 - RNA, 26 nt, Human
aaaaggccaaacuuuaggcaguggga

SEQ ID NO: 1193316 - RNA, 20 nt, Human
aaagagcuuacuacagagaa

SEQ ID NO: 1193317 - RNA, 24 nt, Human
aaaugaaugggcagagguaagaac

SEQ ID NO: 1193318 - RNA, 20 nt, Human
aacaugccuauaauaaaaga

SEQ ID NO: 1193319 - RNA, 26 nt, Human
aacaugccuauaauaaaagaaagaga

SEQ ID NO: 1193320 - RNA, 20 nt, Human
aagagaaaucugaauucagc

SEQ ID NO: 1193321 - RNA, 19 nt, Human
aagggcuagcaacacucag

SEQ ID NO: 1193322 - RNA, 26 nt, Human
aauccucucccucccacaaaguccac

SEQ ID NO: 1193323 - RNA, 20 nt, Human
acaaaauauuaaacacauca

SEQ ID NO: 1193324 - RNA, 18 nt, Human
acaugacaucacuguccc

SEQ ID NO: 1193325 - RNA, 23 nt, Human
agacaaugagacagacagcaagg

SEQ ID NO: 1193326 - RNA, 19 nt, Human
agagaggcagagaucuuuu

SEQ ID NO: 1193327 - RNA, 21 nt, Human
agcagugagccauagcucugg

SEQ ID NO: 1193328 - RNA, 26 nt, Human
agcuucaaaagaguuuaagagaacaa

SEQ ID NO: 1193329 - RNA, 18 nt, Human
aggcagagagaagagagg

SEQ ID NO: 1193330 - RNA, 22 nt, Human
auccccauuuugcagaugggaa

SEQ ID NO: 1193331 - RNA, 20 nt, Human
augaagaagagucacccaca

SEQ ID NO: 1193332 - RNA, 24 nt, Human
caauggcgaccuggguuuaagcca

SEQ ID NO: 1193333 - RNA, 22 nt, Human
cacaacaacccugugagguagg

SEQ ID NO: 1193334 - RNA, 22 nt, Human
cacagagcgguuaagaucucga

SEQ ID NO: 1193335 - RNA, 20 nt, Human
cagaacaauccucucccucc

SEQ ID NO: 1193336 - RNA, 20 nt, Human
cagagagaagagaggcagag

SEQ ID NO: 1193337 - RNA, 19 nt, Human
cagagcgguuaagaucucg

SEQ ID NO: 1193338 - RNA, 23 nt, Human
cagaggagcaaagcccuguuggu

SEQ ID NO: 1193339 - RNA, 19 nt, Human
cauucaauaagugugcacc

SEQ ID NO: 1193340 - RNA, 19 nt, Human
ccauccaagaaaugcaaac

SEQ ID NO: 1193341 - RNA, 23 nt, Human
ccauccaagaaaugcaaacucca

SEQ ID NO: 1193342 - RNA, 23 nt, Human
cccacaaaguccacauucaaaac

SEQ ID NO: 1193343 - RNA, 22 nt, Human
cccacaugacaucacugucccc

SEQ ID NO: 1193344 - RNA, 20 nt, Human
cccagccccucugaucuucc

SEQ ID NO: 1193345 - RNA, 23 nt, Human
cccauagccagaaaugaaugggc

SEQ ID NO: 1193346 - RNA, 22 nt, Human
cccaugggccggaacccagccc

SEQ ID NO: 1193347 - RNA, 18 nt, Human
ccccaguccacaucuucc

SEQ ID NO: 1193348 - RNA, 25 nt, Human
cccuacaaagagcuuacuacagaga

SEQ ID NO: 1193349 - RNA, 23 nt, Human
ccucucccucccacaaaguccac

SEQ ID NO: 1193350 - RNA, 19 nt, Human
cuaaagcccucaucacccc

SEQ ID NO: 1193351 - RNA, 18 nt, Human
cucacagaggagcaaagc

SEQ ID NO: 1193352 - RNA, 23 nt, Human
cucagcaccaaacuuccugcgga

SEQ ID NO: 1193353 - RNA, 25 nt, Human
cugaaggcccuuuggcaggaacuaa

SEQ ID NO: 1193354 - RNA, 21 nt, Human
cuguuuuucuucaaaaggcca

SEQ ID NO: 1193355 - RNA, 25 nt, Human
cuuccuggccucauuggggagagau

SEQ ID NO: 1193356 - RNA, 22 nt, Human
gaaagacaaugagacagacagc

SEQ ID NO: 1193357 - RNA, 19 nt, Human
gcaaagcauucauucaaua

SEQ ID NO: 1193358 - RNA, 21 nt, Human
gcaaagcauucauucaauaag

SEQ ID NO: 1193359 - RNA, 21 nt, Human
gcagagagaagagaggcagag

SEQ ID NO: 1193360 - RNA, 22 nt, Human
gcagagagaagagaggcagaga

SEQ ID NO: 1193361 - RNA, 20 nt, Human
gcauaauuacaaaucugugc

SEQ ID NO: 1193362 - RNA, 21 nt, Human
gcccucacagaggagcaaagc

SEQ ID NO: 1193363 - RNA, 20 nt, Human
gcuaaagcccucaucacccc

SEQ ID NO: 1193364 - RNA, 20 nt, Human
gggacgaggcagagagaaga

SEQ ID NO: 1193365 - RNA, 22 nt, Human
gggacgaggcagagagaagaga

SEQ ID NO: 1193366 - RNA, 22 nt, Human
guaagaacaggaggcuggccuu

SEQ ID NO: 1193367 - RNA, 23 nt, Human
uaaagcgagcagugagccauagc

SEQ ID NO: 1193368 - RNA, 24 nt, Human
uaacuccccaguccacaucuuccu

SEQ ID NO: 1193369 - RNA, 24 nt, Human
uaagccacacagagaaagggcugg

SEQ ID NO: 1193370 - RNA, 21 nt, Human
uaagugugcacacagaggcug

SEQ ID NO: 1193371 - RNA, 19 nt, Human
uagcagcauagcuucaaaa

SEQ ID NO: 1193372 - RNA, 20 nt, Human
uagcagcauagcuucaaaag

SEQ ID NO: 1193373 - RNA, 20 nt, Human
uagcugacgugagcaaggua

SEQ ID NO: 1193374 - RNA, 19 nt, Human
uaguagaagcauagggaau

SEQ ID NO: 1193375 - RNA, 24 nt, Human
ucaaaagaguuuaagagaacaaaa

SEQ ID NO: 1193376 - RNA, 19 nt, Human
ucacagaggagcaaagccc

SEQ ID NO: 1193377 - RNA, 23 nt, Human
ucaguuuauccucacaacaaccc

SEQ ID NO: 1193378 - RNA, 21 nt, Human
ucccacaaaguccacauucaa

SEQ ID NO: 1193379 - RNA, 21 nt, Human
uccccaguccacaucuuccuu

SEQ ID NO: 1193380 - RNA, 22 nt, Human
uccccauuuugcagaugggaac

SEQ ID NO: 1193381 - RNA, 25 nt, Human
ucuuacaauuugcauagcacuuacu

SEQ ID NO: 1193382 - RNA, 21 nt, Human
ucuuagacugccccugaauuc

SEQ ID NO: 1193383 - RNA, 22 nt, Human
ugagaugcuaaagcccucauca

SEQ ID NO: 1193384 - RNA, 22 nt, Human
ugaggggagagaaagacaaugg

SEQ ID NO: 1193385 - RNA, 19 nt, Human
ugccuugagaugcuaaagc

SEQ ID NO: 1193386 - RNA, 18 nt, Human
ugcucuggacagcucagc

SEQ ID NO: 1193387 - RNA, 19 nt, Human
uggcaggaacuaagaggua

SEQ ID NO: 1193388 - RNA, 22 nt, Human
uggcaggaacuaagagguagga

SEQ ID NO: 1193389 - RNA, 21 nt, Human
uggcccucacagaggagcaaa

SEQ ID NO: 1193390 - RNA, 18 nt, Human
ugggcucuauuagcuuug

SEQ ID NO: 1193391 - RNA, 18 nt, Human
ugggugauuuggcaaaau

SEQ ID NO: 1193392 - RNA, 19 nt, Human
ugguuagcagcauagcuuc

SEQ ID NO: 1193393 - RNA, 22 nt, Human
uguccauuccauugcuuuuaac

SEQ ID NO: 1193394 - RNA, 18 nt, Human
ugucuagacauuagcuuc

SEQ ID NO: 1193395 - RNA, 20 nt, Human
ugugcacacagaggcugaag

SEQ ID NO: 1193396 - RNA, 21 nt, Human
uucaaauaguggcccaugggc

SEQ ID NO: 1193397 - RNA, 20 nt, Human
uucuguucucagaacaaucc

SEQ ID NO: 1193398 - RNA, 19 nt, Human
uuugcagaugggaacacug

SEQ ID NO: 1193399 - RNA, 21 nt, Human
uuuuuuuuuuuuaaacucuca

SEQ ID NO: 1193400 - RNA, 19 nt, Human
aagcaagagcugacucagg

SEQ ID NO: 1193401 - RNA, 22 nt, Human
aagcagccucuggggcccuagu

SEQ ID NO: 1193402 - RNA, 22 nt, Human
aaggguagggcccagggcaacc

SEQ ID NO: 1193403 - RNA, 22 nt, Human
aaucuucaaugguagacagucc

SEQ ID NO: 1193404 - RNA, 22 nt, Human
aaugguagacagucccagguac

SEQ ID NO: 1193405 - RNA, 21 nt, Human
agaauaaacauuuguugagug

SEQ ID NO: 1193406 - RNA, 22 nt, Human
agagcugacucaggaaggguag

SEQ ID NO: 1193407 - RNA, 20 nt, Human
agaguauccuccacccccuc

SEQ ID NO: 1193408 - RNA, 21 nt, Human
agccccuuggcacagggguuc

SEQ ID NO: 1193409 - RNA, 21 nt, Human
aggaaucuguaauuuuaacac

SEQ ID NO: 1193410 - RNA, 24 nt, Human
aggaaucuguaauuuuaacacgcu

SEQ ID NO: 1193411 - RNA, 22 nt, Human
aggcagcacagccacacaagcc

SEQ ID NO: 1193412 - RNA, 20 nt, Human
aggcuacagccagccaccac

SEQ ID NO: 1193413 - RNA, 27 nt, Human
aguauccuccacccccucauccaugac

SEQ ID NO: 1193414 - RNA, 20 nt, Human
caacaaguuaccauggcuaa

SEQ ID NO: 1193415 - RNA, 19 nt, Human
caagccagacagcgugcac

SEQ ID NO: 1193416 - RNA, 25 nt, Human
caagggcuccugauuccugaggccc

SEQ ID NO: 1193417 - RNA, 19 nt, Human
cagcagcagcagcaggauu

SEQ ID NO: 1193418 - RNA, 19 nt, Human
cagccagccaccaccagga

SEQ ID NO: 1193419 - RNA, 21 nt, Human
caggaaggguagggcccaggg

SEQ ID NO: 1193420 - RNA, 19 nt, Human
caggaaguugaucacuaag

SEQ ID NO: 1193421 - RNA, 18 nt, Human
cagggguucccagaggcc

SEQ ID NO: 1193422 - RNA, 20 nt, Human
cagguuccggaguaccuccc

SEQ ID NO: 1193423 - RNA, 27 nt, Human
ccacacaagccagacagcgugcacuag

SEQ ID NO: 1193424 - RNA, 18 nt, Human
ccaccugcugccccccuc

SEQ ID NO: 1193425 - RNA, 22 nt, Human
ccccuuggcacagggguuccca

SEQ ID NO: 1193426 - RNA, 18 nt, Human
cccucgagccaugaccca

SEQ ID NO: 1193427 - RNA, 20 nt, Human
ccugcugccccccucccccg

SEQ ID NO: 1193428 - RNA, 24 nt, Human
ccuucgagauucugauucaguagg

SEQ ID NO: 1193429 - RNA, 24 nt, Human
ccuuuuggggaagccaucccugau

SEQ ID NO: 1193430 - RNA, 20 nt, Human
cuacuccuguccugaugccu

SEQ ID NO: 1193431 - RNA, 19 nt, Human
cuccccauccccucccuag

SEQ ID NO: 1193432 - RNA, 18 nt, Human
cuccuccuacuccugucc

SEQ ID NO: 1193433 - RNA, 23 nt, Human
cucucagccucauguccgacucc

SEQ ID NO: 1193434 - RNA, 21 nt, Human
cucucccugcuggcagcucca

SEQ ID NO: 1193435 - RNA, 25 nt, Human
cucuuucuccuccuacuccuguccu

SEQ ID NO: 1193436 - RNA, 18 nt, Human
cugccccccucccccggg

SEQ ID NO: 1193437 - RNA, 21 nt, Human
cugcugcccagugccagcagc

SEQ ID NO: 1193438 - RNA, 19 nt, Human
cuuccaccugcugcccccc

SEQ ID NO: 1193439 - RNA, 24 nt, Human
cuuuuggggaagccaucccugauu

SEQ ID NO: 1193440 - RNA, 19 nt, Human
gagaguauccuccaccccc

SEQ ID NO: 1193441 - RNA, 22 nt, Human
gauuccugaggcccaacuccug

SEQ ID NO: 1193442 - RNA, 21 nt, Human
gauuccuucagugagugugcu

SEQ ID NO: 1193443 - RNA, 19 nt, Human
gcccagugccagcagcccc

SEQ ID NO: 1193444 - RNA, 25 nt, Human
gccugggcagaguccagguggaccu

SEQ ID NO: 1193445 - RNA, 22 nt, Human
gcugcacucucugggaccagca

SEQ ID NO: 1193446 - RNA, 19 nt, Human
ggaaccacgcauccuccuu

SEQ ID NO: 1193447 - RNA, 19 nt, Human
ggcccagggcaacccucag

SEQ ID NO: 1193448 - RNA, 23 nt, Human
ggcugcacucucugggaccagca

SEQ ID NO: 1193449 - RNA, 21 nt, Human
ggggaagccaucccugauuuc

SEQ ID NO: 1193450 - RNA, 22 nt, Human
gggugcugcugcccagugccag

SEQ ID NO: 1193451 - RNA, 18 nt, Human
uaacacgcuccccacgug

SEQ ID NO: 1193452 - RNA, 19 nt, Human
uaacccuaggaggccuccc

SEQ ID NO: 1193453 - RNA, 20 nt, Human
uaacccuaggaggccucccc

SEQ ID NO: 1193454 - RNA, 20 nt, Human
uagagauacagguuccggag

SEQ ID NO: 1193455 - RNA, 22 nt, Human
uagcagcagcagcagcagcagg

SEQ ID NO: 1193456 - RNA, 24 nt, Human
uaggccugcggguggagccaagga

SEQ ID NO: 1193457 - RNA, 19 nt, Human
uaggcuacagccagccacc

SEQ ID NO: 1193458 - RNA, 20 nt, Human
uagugugccuuuuggggaag

SEQ ID NO: 1193459 - RNA, 20 nt, Human
ucaagggcuccugauuccug

SEQ ID NO: 1193460 - RNA, 18 nt, Human
ucaggcagcacagccaca

SEQ ID NO: 1193461 - RNA, 18 nt, Human
ucaguaggccugcgggug

SEQ ID NO: 1193462 - RNA, 19 nt, Human
ucauccaugaccucgguug

SEQ ID NO: 1193463 - RNA, 21 nt, Human
ucccugcuggcagcuccacag

SEQ ID NO: 1193464 - RNA, 18 nt, Human
uccucgugggcucugggg

SEQ ID NO: 1193465 - RNA, 18 nt, Human
ucuuucuccuccuacucc

SEQ ID NO: 1193466 - RNA, 19 nt, Human
ugagcaaggagaauguugc

SEQ ID NO: 1193467 - RNA, 19 nt, Human
ugcaggccacaaagggcag

SEQ ID NO: 1193468 - RNA, 20 nt, Human
ugcucugggcacacuccucg

SEQ ID NO: 1193469 - RNA, 18 nt, Human
ugcugccccccucccccg

SEQ ID NO: 1193470 - RNA, 23 nt, Human
ugcuggggugcuucaaggaauug

SEQ ID NO: 1193471 - RNA, 18 nt, Human
ugggaugagaguauccuc

SEQ ID NO: 1193472 - RNA, 30 nt, Human
ugggcacacuccucgugggcucuggggugg

SEQ ID NO: 1193473 - RNA, 21 nt, Human
ugggcagaguccagguggacc

SEQ ID NO: 1193474 - RNA, 20 nt, Human
uguccgacucccucucccug

SEQ ID NO: 1193475 - RNA, 19 nt, Human
uguugagugaauggugaca

SEQ ID NO: 1193476 - RNA, 19 nt, Human
uucaguaggccugcgggug

SEQ ID NO: 1193477 - RNA, 22 nt, Human
uuccucugguugcaggccacaa

SEQ ID NO: 1193478 - RNA, 18 nt, Human
uuccugaggcccaacucc

SEQ ID NO: 1193479 - RNA, 20 nt, Human
uuccugaggcccaacuccuu

SEQ ID NO: 1193480 - RNA, 19 nt, Human
uucucgugaacaagcaagu

SEQ ID NO: 1193481 - RNA, 24 nt, Human
uugaagcaagagcugacucaggaa

SEQ ID NO: 1193482 - RNA, 19 nt, Human
uugcaguuccucugguugc

SEQ ID NO: 1193483 - RNA, 22 nt, Human
uuucaagggcuccugauuccug

SEQ ID NO: 1193484 - RNA, 21 nt, Human
aaaaaaaacaaaaaaaaaccu

SEQ ID NO: 1193485 - RNA, 24 nt, Human
aaaaaaaacaaaaaaaaaccucag

SEQ ID NO: 1193486 - RNA, 22 nt, Human
aaaaaaacaaaaaaaaaccuca

SEQ ID NO: 1193487 - RNA, 21 nt, Human
aaacaaaaaaaaaccucagga

SEQ ID NO: 1193488 - RNA, 18 nt, Human
aaacagaccacugaaucu

SEQ ID NO: 1193489 - RNA, 18 nt, Human
acaaaaaaaaaccucagg

SEQ ID NO: 1193490 - RNA, 22 nt, Human
accacugaaucugaagucccag

SEQ ID NO: 1193491 - RNA, 20 nt, Human
agaaaaaaaaaaaacaaaaa

SEQ ID NO: 1193492 - RNA, 21 nt, Human
agaaaaaaaaaaaacaaaaaa

SEQ ID NO: 1193493 - RNA, 19 nt, Human
agaaaaaccaaagcuagag

SEQ ID NO: 1193494 - RNA, 23 nt, Human
agagaaaaaaaaaaaacaaaaaa

SEQ ID NO: 1193495 - RNA, 19 nt, Human
aggcagggaaggggaaaag

SEQ ID NO: 1193496 - RNA, 23 nt, Human
cacaauaggacaucccaccaaaa

SEQ ID NO: 1193497 - RNA, 18 nt, Human
cacugaaucugaaguccc

SEQ ID NO: 1193498 - RNA, 24 nt, Human
cacugaaucugaagucccagaaac

SEQ ID NO: 1193499 - RNA, 22 nt, Human
cacuucauagagaaaaaaaaaa

SEQ ID NO: 1193500 - RNA, 22 nt, Human
cagaacuucuccagaaacagac

SEQ ID NO: 1193501 - RNA, 22 nt, Human
cagaccacugaaucugaagucc

SEQ ID NO: 1193502 - RNA, 26 nt, Human
ccaccaaaauccuggagaaaucuagg

SEQ ID NO: 1193503 - RNA, 22 nt, Human
cccagaaacaggcagggaaggg

SEQ ID NO: 1193504 - RNA, 24 nt, Human
ccucaggaggccacagcugucccc

SEQ ID NO: 1193505 - RNA, 19 nt, Human
ccugguuuggugaagccau

SEQ ID NO: 1193506 - RNA, 23 nt, Human
cuagcuugggccuaaaaucagaa

SEQ ID NO: 1193507 - RNA, 22 nt, Human
cugaagucccagaaacaggcag

SEQ ID NO: 1193508 - RNA, 19 nt, Human
gaaaagauggacacaauag

SEQ ID NO: 1193509 - RNA, 22 nt, Human
gaccagaacuucuccagaaaca

SEQ ID NO: 1193510 - RNA, 25 nt, Human
gcagggaaggggaaaagauggacac

SEQ ID NO: 1193511 - RNA, 22 nt, Human
ggccacagcuguccccacaacc

SEQ ID NO: 1193512 - RNA, 21 nt, Human
ggggaaaagauggacacaaua

SEQ ID NO: 1193513 - RNA, 26 nt, Human
uagagaaaaaaaaaaaacaaaaaaaa

SEQ ID NO: 1193514 - RNA, 22 nt, Human
uagauaccacuucauagagaaa

SEQ ID NO: 1193515 - RNA, 18 nt, Human
uagguuuaucauauaagu

SEQ ID NO: 1193516 - RNA, 19 nt, Human
ucagaaaaaccaaagcuag

SEQ ID NO: 1193517 - RNA, 20 nt, Human
ucccagaaacaggcagggaa

SEQ ID NO: 1193518 - RNA, 21 nt, Human
uccccacaaccucauagguuu

SEQ ID NO: 1193519 - RNA, 23 nt, Human
ucuuacugccauucaucuuugac

SEQ ID NO: 1193520 - RNA, 22 nt, Human
ugaccagaacuucuccagaaac

SEQ ID NO: 1193521 - RNA, 27 nt, Human
ugaccagaacuucuccagaaacagacc

SEQ ID NO: 1193522 - RNA, 22 nt, Human
uggaaggagugaagaagaggua

SEQ ID NO: 1193523 - RNA, 22 nt, Human
uucauagagaaaaaaaaaaaac

SEQ ID NO: 1193524 - RNA, 22 nt, Human
caccggagaaaacugacgaccc

SEQ ID NO: 1193525 - RNA, 24 nt, Human
cagugaacucuuuuggugacaucc

SEQ ID NO: 1193526 - RNA, 26 nt, Human
cauccuguucuuguuguauaacuuua

SEQ ID NO: 1193527 - RNA, 18 nt, Human
cugcuuuuucuggugucc

SEQ ID NO: 1193528 - RNA, 19 nt, Human
gcccuggaucauggugaac

SEQ ID NO: 1193529 - RNA, 23 nt, Human
uaaucagcgcgauuucacuuccu

SEQ ID NO: 1193530 - RNA, 26 nt, Human
uaaucagcgcgauuucacuuccugaa

SEQ ID NO: 1193531 - RNA, 23 nt, Human
ugagauuuaaggccaugcccugg

SEQ ID NO: 1193532 - RNA, 19 nt, Human
uuguaagaccucugagauu

SEQ ID NO: 1193533 - RNA, 20 nt, Human
uuugccagggcccaccggag

SEQ ID NO: 1193534 - RNA, 24 nt, Human
aaacaccaccacacgaacacaaac

SEQ ID NO: 1193535 - RNA, 20 nt, Human
aaauuccccaguuguuucuc

SEQ ID NO: 1193536 - RNA, 19 nt, Human
aacaaagccaguccaaugg

SEQ ID NO: 1193537 - RNA, 19 nt, Human
aagcaagaagcaaauauua

SEQ ID NO: 1193538 - RNA, 23 nt, Human
acagaggacugacauguuuccca

SEQ ID NO: 1193539 - RNA, 21 nt, Human
acaguuagagaaggaaauaaa

SEQ ID NO: 1193540 - RNA, 24 nt, Human
accacacgaacacaaacacacaca

SEQ ID NO: 1193541 - RNA, 26 nt, Human
accacacgaacacaaacacacacaca

SEQ ID NO: 1193542 - RNA, 23 nt, Human
acccaggcaccauuugaucaacu

SEQ ID NO: 1193543 - RNA, 22 nt, Human
acgaacacaaacacacacacac

SEQ ID NO: 1193544 - RNA, 21 nt, Human
aguuguuucucugcuugucug

SEQ ID NO: 1193545 - RNA, 24 nt, Human
auaaaagcaagaagcaaauauuac

SEQ ID NO: 1193546 - RNA, 21 nt, Human
auagaaacaccaccacacgaa

SEQ ID NO: 1193547 - RNA, 30 nt, Human
cacaaacacacacacacauuaaccuugcag

SEQ ID NO: 1193548 - RNA, 22 nt, Human
cacacgaacacaaacacacacc

SEQ ID NO: 1193549 - RNA, 20 nt, Human
caccaccacacgaacacaaa

SEQ ID NO: 1193550 - RNA, 25 nt, Human
caguaacauaaaagcaagaagcaaa

SEQ ID NO: 1193551 - RNA, 20 nt, Human
cauggucaccaagcaaaucu

SEQ ID NO: 1193552 - RNA, 22 nt, Human
ccaccacacgaacacaaacaca

SEQ ID NO: 1193553 - RNA, 22 nt, Human
ccaggcaccauuugaucaacuc

SEQ ID NO: 1193554 - RNA, 18 nt, Human
cugagcuuuucuuccaac

SEQ ID NO: 1193555 - RNA, 19 nt, Human
cuuuacgcaggcuuucuuc

SEQ ID NO: 1193556 - RNA, 18 nt, Human
guauuucucauugcuaua

SEQ ID NO: 1193557 - RNA, 22 nt, Human
uaaaagcaagaagcaaauauua

SEQ ID NO: 1193558 - RNA, 24 nt, Human
uacgcaggcuuucuuccacugccu

SEQ ID NO: 1193559 - RNA, 20 nt, Human
uagaaagaauaacuaaaugg

SEQ ID NO: 1193560 - RNA, 23 nt, Human
uagagaaggaaauaaaaguagaa

SEQ ID NO: 1193561 - RNA, 23 nt, Human
uauugcacuuauccauuuacaug

SEQ ID NO: 1193562 - RNA, 20 nt, Human
uuucucauugcuauaucuga

SEQ ID NO: 1193563 - RNA, 19 nt, Human
agagguggugaagguccag

SEQ ID NO: 1193564 - RNA, 21 nt, Human
agguggugaagguccagccuc

SEQ ID NO: 1193565 - RNA, 22 nt, Human
caaaaagaaaugacugcacuua

SEQ ID NO: 1193566 - RNA, 19 nt, Human
ccaaaaagaaaugacugca

SEQ ID NO: 1193567 - RNA, 21 nt, Human
ccucugccgggcagccaaagg

SEQ ID NO: 1193568 - RNA, 21 nt, Human
gaagcucuugccacagcccuu

SEQ ID NO: 1193569 - RNA, 20 nt, Human
gcucuugccacagcccucug

SEQ ID NO: 1193570 - RNA, 22 nt, Human
ggugaagcucuugccacagccc

SEQ ID NO: 1193571 - RNA, 27 nt, Human
uccaaacucaagaucagaauuuaaauc

SEQ ID NO: 1193572 - RNA, 22 nt, Human
uccagccgcagccacccagggg

SEQ ID NO: 1193573 - RNA, 24 nt, Human
ugacuguaauaaaaguaagccaca

SEQ ID NO: 1193574 - RNA, 20 nt, Human
aaaagacucugaugagagaa

SEQ ID NO: 1193575 - RNA, 18 nt, Human
aaaagcccagagcauugu

SEQ ID NO: 1193576 - RNA, 24 nt, Human
aaaagcccagagcauuguuuaaua

SEQ ID NO: 1193577 - RNA, 24 nt, Human
aaaaugaagaagauuaacuagaug

SEQ ID NO: 1193578 - RNA, 25 nt, Human
aaagguugagcucuaauucaaauaa

SEQ ID NO: 1193579 - RNA, 19 nt, Human
aaaugcuggggccaugcuu

SEQ ID NO: 1193580 - RNA, 20 nt, Human
aacauagcaaaacccugucu

SEQ ID NO: 1193581 - RNA, 20 nt, Human
aacauagcaaaacccugucu

SEQ ID NO: 1193582 - RNA, 21 nt, Human
aacauagcaaaacccugucuu

SEQ ID NO: 1193583 - RNA, 21 nt, Human
aagagcuaaaugagagggaaa

SEQ ID NO: 1193584 - RNA, 25 nt, Human
aaguuacucccccauuuacucucca

SEQ ID NO: 1193585 - RNA, 18 nt, Human
aaugaaagaacagccuaa

SEQ ID NO: 1193586 - RNA, 20 nt, Human
aaugaagaagauuaacuaga

SEQ ID NO: 1193587 - RNA, 18 nt, Human
acacacacacacacauau

SEQ ID NO: 1193588 - RNA, 22 nt, Human
acacacacacacauauauacau

SEQ ID NO: 1193589 - RNA, 20 nt, Human
acacuaauaaugccuuccuc

SEQ ID NO: 1193590 - RNA, 21 nt, Human
acagaagauauucucaaaggu

SEQ ID NO: 1193591 - RNA, 21 nt, Human
accugccagugaccaaaaaau

SEQ ID NO: 1193592 - RNA, 19 nt, Human
acuauuuauccugugacga

SEQ ID NO: 1193593 - RNA, 22 nt, Human
agauuuuuuuuuagcuacucau

SEQ ID NO: 1193594 - RNA, 24 nt, Human
aggcugaugcaggagcaucacuug

SEQ ID NO: 1193595 - RNA, 26 nt, Human
aguuaucuaaaauaaaagcccagagc

SEQ ID NO: 1193596 - RNA, 20 nt, Human
auagcaaugaaagaacagcc

SEQ ID NO: 1193597 - RNA, 19 nt, Human
auauauauauauauauaua

SEQ ID NO: 1193598 - RNA, 19 nt, Human
auauauauauauauauaua

SEQ ID NO: 1193599 - RNA, 19 nt, Human
auauauauauauauauaua

SEQ ID NO: 1193600 - RNA, 24 nt, Human
aucacagucacuuguaaaucucaa

SEQ ID NO: 1193601 - RNA, 24 nt, Human
aucacuugagcccaggaguuuggg

SEQ ID NO: 1193602 - RNA, 18 nt, Human
auccauguuuuccugggu

SEQ ID NO: 1193603 - RNA, 21 nt, Human
augaaagaacagccuaauaca

SEQ ID NO: 1193604 - RNA, 20 nt, Human
auuuaucaauuguauucuuu

SEQ ID NO: 1193605 - RNA, 24 nt, Human
caaauaaacaaauuaucuauagaa

SEQ ID NO: 1193606 - RNA, 22 nt, Human
cacacacacauauauacauaua

SEQ ID NO: 1193607 - RNA, 23 nt, Human
cacacacauauauacauauacaa

SEQ ID NO: 1193608 - RNA, 23 nt, Human
cacaguaucugacauauaguaag

SEQ ID NO: 1193609 - RNA, 22 nt, Human
cagagcauuguuuaauaccucu

SEQ ID NO: 1193610 - RNA, 23 nt, Human
cagccugcaaaacugucagccaa

SEQ ID NO: 1193611 - RNA, 24 nt, Human
caucacuugagcccaggaguuugg

SEQ ID NO: 1193612 - RNA, 21 nt, Human
ccaugcauccauaaucccaac

SEQ ID NO: 1193613 - RNA, 23 nt, Human
cccagaagcugagcaaaugcugg

SEQ ID NO: 1193614 - RNA, 22 nt, Human
ccccagaagcugagcaaaugcu

SEQ ID NO: 1193615 - RNA, 24 nt, Human
cccuuacuauuuauccugugacga

SEQ ID NO: 1193616 - RNA, 21 nt, Human
ccuagugguuaaaaaagacuc

SEQ ID NO: 1193617 - RNA, 23 nt, Human
cuauuaucucucgugaccuuagu

SEQ ID NO: 1193618 - RNA, 24 nt, Human
cucaacuauaacauccaggcucac

SEQ ID NO: 1193619 - RNA, 24 nt, Human
cugcugaaguaaacagggccauau

SEQ ID NO: 1193620 - RNA, 20 nt, Human
cuuuauauauauauauauau

SEQ ID NO: 1193621 - RNA, 24 nt, Human
gaaaauuggaacacuaauaaugcc

SEQ ID NO: 1193622 - RNA, 19 nt, Human
gcagaaagaguggaaacac

SEQ ID NO: 1193623 - RNA, 22 nt, Human
gcaggagcaucacuugagccca

SEQ ID NO: 1193624 - RNA, 20 nt, Human
gcauccauaaucccaacucu

SEQ ID NO: 1193625 - RNA, 20 nt, Human
ggagcagagacagaggaagg

SEQ ID NO: 1193626 - RNA, 19 nt, Human
ggagcaucacuugagccca

SEQ ID NO: 1193627 - RNA, 23 nt, Human
gggaaagaaaauauauaaaguac

SEQ ID NO: 1193628 - RNA, 23 nt, Human
gggcagaaagaguggaaacacug

SEQ ID NO: 1193629 - RNA, 18 nt, Human
ggugugccuucucccacu

SEQ ID NO: 1193630 - RNA, 26 nt, Human
guaaaaucucccugaggccuccccag

SEQ ID NO: 1193631 - RNA, 27 nt, Human
guaaaaucucccugaggccuccccaga

SEQ ID NO: 1193632 - RNA, 19 nt, Human
guauauguauauauacaca

SEQ ID NO: 1193633 - RNA, 22 nt, Human
gucacaguaucugacauauagu

SEQ ID NO: 1193634 - RNA, 19 nt, Human
uaaaauaaaagcccagagc

SEQ ID NO: 1193635 - RNA, 22 nt, Human
uaaaauaaaagcccagagcauu

SEQ ID NO: 1193636 - RNA, 20 nt, Human
uaaaccucagucaaacacag

SEQ ID NO: 1193637 - RNA, 20 nt, Human
uaaaugagagggaaagaaaa

SEQ ID NO: 1193638 - RNA, 21 nt, Human
uaacauagcaaaacccugucu

SEQ ID NO: 1193639 - RNA, 21 nt, Human
uaacauagcaaaacccugucu

SEQ ID NO: 1193640 - RNA, 20 nt, Human
uaacauccaggcucacuccu

SEQ ID NO: 1193641 - RNA, 21 nt, Human
uaaguugcaucugguauauau

SEQ ID NO: 1193642 - RNA, 19 nt, Human
uaauaaugccuuccucaua

SEQ ID NO: 1193643 - RNA, 26 nt, Human
uaauauagacaaaauaagucuaaaau

SEQ ID NO: 1193644 - RNA, 25 nt, Human
uacacacacacacacauauauacau

SEQ ID NO: 1193645 - RNA, 18 nt, Human
uacacuuuggugaugauu

SEQ ID NO: 1193646 - RNA, 24 nt, Human
uacauauacaaaaaacauauauau

SEQ ID NO: 1193647 - RNA, 24 nt, Human
uacauauacaaaaaacauauauau

SEQ ID NO: 1193648 - RNA, 22 nt, Human
uaccacaaaaguauauuaauac

SEQ ID NO: 1193649 - RNA, 19 nt, Human
uacccagucucagguauuc

SEQ ID NO: 1193650 - RNA, 24 nt, Human
uacucuccauuucuucauccgaaa

SEQ ID NO: 1193651 - RNA, 22 nt, Human
uacugaaauucucucuccuccc

SEQ ID NO: 1193652 - RNA, 20 nt, Human
uaggccaaaaaugcaaucaa

SEQ ID NO: 1193653 - RNA, 18 nt, Human
uagguaacauagcaaaac

SEQ ID NO: 1193654 - RNA, 22 nt, Human
uauacacacacacacacauaua

SEQ ID NO: 1193655 - RNA, 25 nt, Human
uauacacacacacacacauauauac

SEQ ID NO: 1193656 - RNA, 26 nt, Human
uauauacacacacacacacauauaua

SEQ ID NO: 1193657 - RNA, 25 nt, Human
uauauacauauacaaaaaacauaua

SEQ ID NO: 1193658 - RNA, 30 nt, Human
uauauacauauacaaaaaacauauauaugg

SEQ ID NO: 1193659 - RNA, 19 nt, Human
uauauauauauauauauau

SEQ ID NO: 1193660 - RNA, 19 nt, Human
uauauauauauauauauau

SEQ ID NO: 1193661 - RNA, 19 nt, Human
uauauauauauauauauau

SEQ ID NO: 1193662 - RNA, 24 nt, Human
uauauauauauauauguauaugua

SEQ ID NO: 1193663 - RNA, 20 nt, Human
uauauauauguauauguaua

SEQ ID NO: 1193664 - RNA, 21 nt, Human
uauauauauguauauguauau

SEQ ID NO: 1193665 - RNA, 24 nt, Human
uauauauauguauauguauaugua

SEQ ID NO: 1193666 - RNA, 18 nt, Human
uauauguauauauacaca

SEQ ID NO: 1193667 - RNA, 24 nt, Human
uaucugacauauaguaagugauau

SEQ ID NO: 1193668 - RNA, 31 nt, Human
uauguauauauacacacacacacacauauag

SEQ ID NO: 1193669 - RNA, 19 nt, Human
uauguauauguauauguau

SEQ ID NO: 1193670 - RNA, 22 nt, Human
uauguauauguauauguauaua

SEQ ID NO: 1193671 - RNA, 22 nt, Human
ucacugcauucauauaaggcau

SEQ ID NO: 1193672 - RNA, 27 nt, Human
ucauacauacuauuauaucauauuaua

SEQ ID NO: 1193673 - RNA, 19 nt, Human
ucauuuaucaauuguauuc

SEQ ID NO: 1193674 - RNA, 22 nt, Human
uccagagaauuaucacagucac

SEQ ID NO: 1193675 - RNA, 21 nt, Human
uccauaaucccaacucuucca

SEQ ID NO: 1193676 - RNA, 22 nt, Human
uccccagaagcugagcaaaugc

SEQ ID NO: 1193677 - RNA, 22 nt, Human
ucccugaggccuccccagaagc

SEQ ID NO: 1193678 - RNA, 24 nt, Human
uccucauaagguugcuauaagagc

SEQ ID NO: 1193679 - RNA, 19 nt, Human
ugagagaaauaaagaaaua

SEQ ID NO: 1193680 - RNA, 20 nt, Human
ugagagacaccuaccucuca

SEQ ID NO: 1193681 - RNA, 23 nt, Human
ugagcccaggaguuuggggcuag

SEQ ID NO: 1193682 - RNA, 23 nt, Human
ugauaaacaauuauaacauuuuc

SEQ ID NO: 1193683 - RNA, 23 nt, Human
ugccagugaccaaaaaauggaac

SEQ ID NO: 1193684 - RNA, 21 nt, Human
ugcuauaagagcuaaaugaga

SEQ ID NO: 1193685 - RNA, 24 nt, Human
ugcuaugcuucuuuuaaaaauaua

SEQ ID NO: 1193686 - RNA, 18 nt, Human
ugcuuuuuaugcuucauc

SEQ ID NO: 1193687 - RNA, 24 nt, Human
uggaacacuaauaaugccuuccuc

SEQ ID NO: 1193688 - RNA, 23 nt, Human
uggaacaucugcugaaguaaaca

SEQ ID NO: 1193689 - RNA, 21 nt, Human
uggcaguaaugguuugccuuu

SEQ ID NO: 1193690 - RNA, 19 nt, Human
ugguauagggugcaguucc

SEQ ID NO: 1193691 - RNA, 22 nt, Human
ugguauguauuggcuauuuuga

SEQ ID NO: 1193692 - RNA, 20 nt, Human
ugguuugccuuuaaaaaaau

SEQ ID NO: 1193693 - RNA, 20 nt, Human
uguauauguauauguauaua

SEQ ID NO: 1193694 - RNA, 20 nt, Human
uguauauguauauguauaua

SEQ ID NO: 1193695 - RNA, 22 nt, Human
uguauauguauauguauauaua

SEQ ID NO: 1193696 - RNA, 20 nt, Human
ugucacaguaucugacauau

SEQ ID NO: 1193697 - RNA, 23 nt, Human
ugucaccuagugguuaaaaaaga

SEQ ID NO: 1193698 - RNA, 18 nt, Human
uuaugauuauuuuaugaa

SEQ ID NO: 1193699 - RNA, 23 nt, Human
uucuguacugaaauucucucucc

SEQ ID NO: 1193700 - RNA, 19 nt, Human
uuuauauauauauauauau

SEQ ID NO: 1193701 - RNA, 19 nt, Human
uuuauauauauauauauau

SEQ ID NO: 1193702 - RNA, 28 nt, Human
uuuauauauauauauauauauauaugua

SEQ ID NO: 1193703 - RNA, 19 nt, Human
uuuguggcuuucaacaacu

SEQ ID NO: 1193704 - RNA, 22 nt, Human
aaaaaaaccuagauugcucaaa

SEQ ID NO: 1193705 - RNA, 22 nt, Human
aaaaagcaacaacaacuagauc

SEQ ID NO: 1193706 - RNA, 24 nt, Human
aaaaagcaacaacaacuagaucau

SEQ ID NO: 1193707 - RNA, 27 nt, Human
aaaagaaaaaaaaaaaaacuugaagag

SEQ ID NO: 1193708 - RNA, 21 nt, Human
aaacacagauccccaaucccc

SEQ ID NO: 1193709 - RNA, 23 nt, Human
aaacacagauccccaauccccca

SEQ ID NO: 1193710 - RNA, 21 nt, Human
aaacagaacccacaccggccc

SEQ ID NO: 1193711 - RNA, 28 nt, Human
aaaccaguccagacccucuggaaaccaa

SEQ ID NO: 1193712 - RNA, 19 nt, Human
aaacuugaagagaccaaua

SEQ ID NO: 1193713 - RNA, 21 nt, Human
aagagacuucuccagggaaau

SEQ ID NO: 1193714 - RNA, 18 nt, Human
aagccagaaggaggugcg

SEQ ID NO: 1193715 - RNA, 19 nt, Human
aagggugccaggagcacag

SEQ ID NO: 1193716 - RNA, 25 nt, Human
aagugggaaaggagugacucggaug

SEQ ID NO: 1193717 - RNA, 25 nt, Human
acaacaacuagaucauuuuuggcau

SEQ ID NO: 1193718 - RNA, 20 nt, Human
accaauaauuaacuuuccca

SEQ ID NO: 1193719 - RNA, 18 nt, Human
acuaagccucuuucaaau

SEQ ID NO: 1193720 - RNA, 23 nt, Human
agaaaaagugggaaaggagugac

SEQ ID NO: 1193721 - RNA, 20 nt, Human
agaaagaaaaaaaaaaaccu

SEQ ID NO: 1193722 - RNA, 24 nt, Human
agacccucuggaaaccaagagccc

SEQ ID NO: 1193723 - RNA, 23 nt, Human
agcuugagucagagauggugguu

SEQ ID NO: 1193724 - RNA, 26 nt, Human
aggaagaaagaaaaaaaaaaaccuag

SEQ ID NO: 1193725 - RNA, 22 nt, Human
aggcagccaaggggagaaacag

SEQ ID NO: 1193726 - RNA, 21 nt, Human
agggaaaaaagcaacaacaac

SEQ ID NO: 1193727 - RNA, 26 nt, Human
agucccaucucccccauaagcaccac

SEQ ID NO: 1193728 - RNA, 19 nt, Human
agucuccucccacagggcc

SEQ ID NO: 1193729 - RNA, 21 nt, Human
aucacaaccuccucuuugauu

SEQ ID NO: 1193730 - RNA, 19 nt, Human
auccgaguccagcuccgcc

SEQ ID NO: 1193731 - RNA, 22 nt, Human
caaaggcugggaccucgggugg

SEQ ID NO: 1193732 - RNA, 19 nt, Human
caacuagaucauuuuuggc

SEQ ID NO: 1193733 - RNA, 23 nt, Human
caauagcaaaagaaaaaaaaaaa

SEQ ID NO: 1193734 - RNA, 26 nt, Human
cacaccggcccaggccgaucugcaag

SEQ ID NO: 1193735 - RNA, 19 nt, Human
cacagauccccaauccccc

SEQ ID NO: 1193736 - RNA, 20 nt, Human
caccacugaacuaaauaucu

SEQ ID NO: 1193737 - RNA, 18 nt, Human
caccaggcgggacacggc

SEQ ID NO: 1193738 - RNA, 22 nt, Human
cacuaaaccaggcaccuucgac

SEQ ID NO: 1193739 - RNA, 21 nt, Human
cagaagcuucuccccuggacu

SEQ ID NO: 1193740 - RNA, 21 nt, Human
cagauacugcuacaugcccuc

SEQ ID NO: 1193741 - RNA, 22 nt, Human
cagccggacaacuguguaccuu

SEQ ID NO: 1193742 - RNA, 20 nt, Human
caggagaggaagaaagaaaa

SEQ ID NO: 1193743 - RNA, 21 nt, Human
caguccagacccucuggaaac

SEQ ID NO: 1193744 - RNA, 24 nt, Human
caguccagacccucuggaaaccaa

SEQ ID NO: 1193745 - RNA, 24 nt, Human
cauccacccaagucucacacuuaa

SEQ ID NO: 1193746 - RNA, 23 nt, Human
ccagacccucuggaaaccaagag

SEQ ID NO: 1193747 - RNA, 27 nt, Human
ccagucagaugcccgcagggucgcgcc

SEQ ID NO: 1193748 - RNA, 20 nt, Human
cccaaaccaguccagacccu

SEQ ID NO: 1193749 - RNA, 20 nt, Human
cccacaacuccuuguuuuaa

SEQ ID NO: 1193750 - RNA, 21 nt, Human
cccacagggccuugggacugg

SEQ ID NO: 1193751 - RNA, 23 nt, Human
cccauaagcaccacugaacuaaa

SEQ ID NO: 1193752 - RNA, 23 nt, Human
cccauaagcaccacugaacuaaa

SEQ ID NO: 1193753 - RNA, 24 nt, Human
cccauaagcaccacugaacuaaau

SEQ ID NO: 1193754 - RNA, 19 nt, Human
ccccaaucccccaccaggc

SEQ ID NO: 1193755 - RNA, 21 nt, Human
cccgcagggucgcgccaagca

SEQ ID NO: 1193756 - RNA, 28 nt, Human
cccucuggaaaccaagagccccagccac

SEQ ID NO: 1193757 - RNA, 22 nt, Human
ccgcagggucgcgccaagcacg

SEQ ID NO: 1193758 - RNA, 22 nt, Human
ccgcccagggcggcuccugcaa

SEQ ID NO: 1193759 - RNA, 19 nt, Human
ccgggcgagaggaggguuc

SEQ ID NO: 1193760 - RNA, 20 nt, Human
ccucucggugaccacgacuc

SEQ ID NO: 1193761 - RNA, 20 nt, Human
ccucuggaaaccaagagccc

SEQ ID NO: 1193762 - RNA, 24 nt, Human
cgacugggguggaaaauagggaaa

SEQ ID NO: 1193763 - RNA, 20 nt, Human
cggcccaggccgaucugcaa

SEQ ID NO: 1193764 - RNA, 22 nt, Human
cucuggaaaccaagagccccag

SEQ ID NO: 1193765 - RNA, 23 nt, Human
cugaguaaauggcgauuccucuu

SEQ ID NO: 1193766 - RNA, 19 nt, Human
cugcugccgguuccuguaa

SEQ ID NO: 1193767 - RNA, 22 nt, Human
cugcugccgguuccuguaaggg

SEQ ID NO: 1193768 - RNA, 23 nt, Human
cuucacacuaagccucuuucaaa

SEQ ID NO: 1193769 - RNA, 20 nt, Human
cuuggguccgggcgagagga

SEQ ID NO: 1193770 - RNA, 20 nt, Human
cuuggguccgggcgagagga

SEQ ID NO: 1193771 - RNA, 22 nt, Human
gaaaaagugggaaaggagugac

SEQ ID NO: 1193772 - RNA, 24 nt, Human
gaaaauagggaaaaaagcaacaac

SEQ ID NO: 1193773 - RNA, 22 nt, Human
gacagugacaagugguaacaau

SEQ ID NO: 1193774 - RNA, 18 nt, Human
gacccucuggaaaccaag

SEQ ID NO: 1193775 - RNA, 19 nt, Human
gcgugacacccuuccccca

SEQ ID NO: 1193776 - RNA, 21 nt, Human
gcuugagucagagaugguggu

SEQ ID NO: 1193777 - RNA, 24 nt, Human
ggacagauacugcuacaugcccuc

SEQ ID NO: 1193778 - RNA, 23 nt, Human
gggaguguauucaggagaggaag

SEQ ID NO: 1193779 - RNA, 18 nt, Human
gggguggaaaauagggaa

SEQ ID NO: 1193780 - RNA, 23 nt, Human
gguaacaauagcaaaagaaaaaa

SEQ ID NO: 1193781 - RNA, 21 nt, Human
guggaaaauagggaaaaaagc

SEQ ID NO: 1193782 - RNA, 20 nt, Human
uaaaccaggcaccuucgacc

SEQ ID NO: 1193783 - RNA, 27 nt, Human
uaaagcacccaaaccaguccagacccu

SEQ ID NO: 1193784 - RNA, 26 nt, Human
uaacaauagcaaaagaaaaaaaaaaa

SEQ ID NO: 1193785 - RNA, 20 nt, Human
uaaccuauuaggaagcccau

SEQ ID NO: 1193786 - RNA, 18 nt, Human
uaagcaccacugaacuaa

SEQ ID NO: 1193787 - RNA, 23 nt, Human
uaagcaccacugaacuaaauauc

SEQ ID NO: 1193788 - RNA, 21 nt, Human
uaaggagcgacugggguggaa

SEQ ID NO: 1193789 - RNA, 23 nt, Human
uagauauaaauggcuaaacacag

SEQ ID NO: 1193790 - RNA, 18 nt, Human
ucaggagaggaagaaaga

SEQ ID NO: 1193791 - RNA, 19 nt, Human
ucaggagaggaagaaagaa

SEQ ID NO: 1193792 - RNA, 27 nt, Human
uccaagaaauauauauauaaaaaaaua

SEQ ID NO: 1193793 - RNA, 20 nt, Human
uccagucccugggcuagggu

SEQ ID NO: 1193794 - RNA, 25 nt, Human
ucccccacaacuccuuguuuuaaag

SEQ ID NO: 1193795 - RNA, 21 nt, Human
ucccccauaagcaccacugaa

SEQ ID NO: 1193796 - RNA, 21 nt, Human
ucccccauaagcaccacugaa

SEQ ID NO: 1193797 - RNA, 23 nt, Human
uccccuggacuacugauugaaca

SEQ ID NO: 1193798 - RNA, 23 nt, Human
ucccugggcuaggguucuagaag

SEQ ID NO: 1193799 - RNA, 18 nt, Human
ucgaccaaaucacaaccu

SEQ ID NO: 1193800 - RNA, 21 nt, Human
ucggugaccacgacucaaagg

SEQ ID NO: 1193801 - RNA, 19 nt, Human
ucugggcugcauuccagga

SEQ ID NO: 1193802 - RNA, 19 nt, Human
ucuuggguccgggcgagag

SEQ ID NO: 1193803 - RNA, 19 nt, Human
ugaaguagcagaagcuucu

SEQ ID NO: 1193804 - RNA, 21 nt, Human
ugagucagagauggugguuau

SEQ ID NO: 1193805 - RNA, 24 nt, Human
uggaagcuugagucagagauggug

SEQ ID NO: 1193806 - RNA, 20 nt, Human
uggagacagugacaaguggu

SEQ ID NO: 1193807 - RNA, 21 nt, Human
uggcuaaacacagauccccaa

SEQ ID NO: 1193808 - RNA, 20 nt, Human
ugguaacaauagcaaaagaa

SEQ ID NO: 1193809 - RNA, 20 nt, Human
ugguaacaauagcaaaagaa

SEQ ID NO: 1193810 - RNA, 25 nt, Human
ugguaacaauagcaaaagaaaaaaa

SEQ ID NO: 1193811 - RNA, 19 nt, Human
ugucugggcugcauuccag

SEQ ID NO: 1193812 - RNA, 22 nt, Human
uucaggagaggaagaaagaaaa

SEQ ID NO: 1193813 - RNA, 23 nt, Human
uucccagccggacaacuguguac

SEQ ID NO: 1193814 - RNA, 22 nt, Human
uucccauccacccaagucucac

SEQ ID NO: 1193815 - RNA, 19 nt, Human
uuggauggaggccggcggg

SEQ ID NO: 1193816 - RNA, 22 nt, Human
uuuaaagcacccaaaccagucc

SEQ ID NO: 1193817 - RNA, 22 nt, Human
aaacuucagcacggcccucugg

SEQ ID NO: 1193818 - RNA, 20 nt, Human
aacuuaaggacauccuccuc

SEQ ID NO: 1193819 - RNA, 19 nt, Human
acuguuccaucuggaaguc

SEQ ID NO: 1193820 - RNA, 23 nt, Human
agcagaagcuucucccagguccg

SEQ ID NO: 1193821 - RNA, 19 nt, Human
agguuccugcugcaaggaa

SEQ ID NO: 1193822 - RNA, 21 nt, Human
aguggcagcagcaaacuucag

SEQ ID NO: 1193823 - RNA, 27 nt, Human
auccagaacaacgccauauggaccccu

SEQ ID NO: 1193824 - RNA, 24 nt, Human
aucuggaagucaagauuggugcca

SEQ ID NO: 1193825 - RNA, 24 nt, Human
auggcaacaauggcacgagcugcc

SEQ ID NO: 1193826 - RNA, 19 nt, Human
cagaagcuucucccagguc

SEQ ID NO: 1193827 - RNA, 24 nt, Human
cagcaauuggaguggcuccagugg

SEQ ID NO: 1193828 - RNA, 19 nt, Human
cagcccuggggucaguaac

SEQ ID NO: 1193829 - RNA, 20 nt, Human
cagcccuggggucaguaacc

SEQ ID NO: 1193830 - RNA, 20 nt, Human
ccaccuaaauagguuccugc

SEQ ID NO: 1193831 - RNA, 24 nt, Human
ccagcagaagcuucucccaggucc

SEQ ID NO: 1193832 - RNA, 21 nt, Human
ccgugggucccagaaggcugc

SEQ ID NO: 1193833 - RNA, 22 nt, Human
cgaugggaauccagaacaacgc

SEQ ID NO: 1193834 - RNA, 22 nt, Human
gaacuuaaggacauccuccucc

SEQ ID NO: 1193835 - RNA, 18 nt, Human
gauguagaugccaucacu

SEQ ID NO: 1193836 - RNA, 18 nt, Human
gcccuggggucaguaacc

SEQ ID NO: 1193837 - RNA, 23 nt, Human
ggcugguggucagcccugggguc

SEQ ID NO: 1193838 - RNA, 19 nt, Human
uaagagcccaugcaagaac

SEQ ID NO: 1193839 - RNA, 20 nt, Human
uaaggacauccuccuccuuc

SEQ ID NO: 1193840 - RNA, 22 nt, Human
ucaauggcaacaauggcacgag

SEQ ID NO: 1193841 - RNA, 20 nt, Human
ucagcaggguuuucaauggc

SEQ ID NO: 1193842 - RNA, 23 nt, Human
ucccuuuaaguuacgaugggaau

SEQ ID NO: 1193843 - RNA, 18 nt, Human
ugccagcagaagcuucuc

SEQ ID NO: 1193844 - RNA, 20 nt, Human
ugccagcagaagcuucuccc

SEQ ID NO: 1193845 - RNA, 20 nt, Human
ugcuuaagagcccaugcaag

SEQ ID NO: 1193846 - RNA, 31 nt, Human
uggcaacaauggcacgagcugccagcagaag

SEQ ID NO: 1193847 - RNA, 21 nt, Human
uggcacgagcugccagcagaa

SEQ ID NO: 1193848 - RNA, 20 nt, Human
uggcagcagcaaacuucagc

SEQ ID NO: 1193849 - RNA, 23 nt, Human
uggcuccaguggcagcagcaaac

SEQ ID NO: 1193850 - RNA, 19 nt, Human
uucucccagguccgcuuca

SEQ ID NO: 1193851 - RNA, 23 nt, Human
uuuuccuuuuauagauguacugu

SEQ ID NO: 1193852 - RNA, 22 nt, Human
acagccccuggagcgcuuggug

SEQ ID NO: 1193853 - RNA, 19 nt, Human
caacaaauaucuuuuucac

SEQ ID NO: 1193854 - RNA, 20 nt, Human
cccacagccccuggagcgcu

SEQ ID NO: 1193855 - RNA, 20 nt, Human
ccuggagcgcuugguguuug

SEQ ID NO: 1193856 - RNA, 19 nt, Human
cguggcugcauccaccucc

SEQ ID NO: 1193857 - RNA, 21 nt, Human
cguggcugcauccaccuccuc

SEQ ID NO: 1193858 - RNA, 26 nt, Human
cuccacaguggcguaugugacaaacc

SEQ ID NO: 1193859 - RNA, 20 nt, Human
uccaccuccuccacaguggc

SEQ ID NO: 1193860 - RNA, 30 nt, Human
ucuuugguuccacaacuuuuccauccaccu

SEQ ID NO: 1193861 - RNA, 22 nt, Human
ugacaaacccacagccccugga

SEQ ID NO: 1193862 - RNA, 22 nt, Human
ugagacaguucucuuugguucc

SEQ ID NO: 1193863 - RNA, 18 nt, Human
ugcauccaccuccuccac

SEQ ID NO: 1193864 - RNA, 19 nt, Human
uggagcgcuugguguuugg

SEQ ID NO: 1193865 - RNA, 25 nt, Human
uuuuccauccaccuuguguggccuu

SEQ ID NO: 1193866 - RNA, 26 nt, Human
aaaaaaaaaagacauuuauucagcgu

SEQ ID NO: 1193867 - RNA, 23 nt, Human
aacaacaugggugcaaggaaaaa

SEQ ID NO: 1193868 - RNA, 19 nt, Human
aacaucuucugccacugcc

SEQ ID NO: 1193869 - RNA, 21 nt, Human
aacaugggugcaaggaaaaaa

SEQ ID NO: 1193870 - RNA, 21 nt, Human
aacccuuuguugaaaugcuuu

SEQ ID NO: 1193871 - RNA, 22 nt, Human
aagaaccuggcaucacccugaa

SEQ ID NO: 1193872 - RNA, 25 nt, Human
aauacaguccucaaguuuuuugccc

SEQ ID NO: 1193873 - RNA, 21 nt, Human
acauuaaaaaaaaaaagacau

SEQ ID NO: 1193874 - RNA, 25 nt, Human
agcuucauucccaucuauaauuuua

SEQ ID NO: 1193875 - RNA, 24 nt, Human
aucuucugccacugccauagcuac

SEQ ID NO: 1193876 - RNA, 22 nt, Human
caacaacaugggugcaaggaaa

SEQ ID NO: 1193877 - RNA, 22 nt, Human
cacauuaaaaaaaaaaagacau

SEQ ID NO: 1193878 - RNA, 22 nt, Human
cagcacauuaaaaaaaaaaaga

SEQ ID NO: 1193879 - RNA, 18 nt, Human
ccaacaaagaaccuggca

SEQ ID NO: 1193880 - RNA, 19 nt, Human
ccauagcuacugcugcuac

SEQ ID NO: 1193881 - RNA, 18 nt, Human
ccccaaaguuuccucccu

SEQ ID NO: 1193882 - RNA, 30 nt, Human
ccuuuucuugccacugccucagucaugauu

SEQ ID NO: 1193883 - RNA, 21 nt, Human
cuuuccacagaacagaaacua

SEQ ID NO: 1193884 - RNA, 19 nt, Human
uacacaagcuucauuccca

SEQ ID NO: 1193885 - RNA, 20 nt, Human
ucucuggcucuccucuccug

SEQ ID NO: 1193886 - RNA, 22 nt, Human
ucucuuagcugauguuuuucag

SEQ ID NO: 1193887 - RNA, 21 nt, Human
ucugccacugccauagcuacu

SEQ ID NO: 1193888 - RNA, 20 nt, Human
ugcaaggaaaaaaaucuaca

SEQ ID NO: 1193889 - RNA, 23 nt, Human
ugccauagcuacugcugcuacug

SEQ ID NO: 1193890 - RNA, 19 nt, Human
ugccccaaaguuuccuccc

SEQ ID NO: 1193891 - RNA, 19 nt, Human
uggaaccaccauagccacu

SEQ ID NO: 1193892 - RNA, 23 nt, Human
uguaaacugcagcuucccuguca

SEQ ID NO: 1193893 - RNA, 18 nt, Human
uguuguaaacugcagcuu

SEQ ID NO: 1193894 - RNA, 20 nt, Human
uucagaguagacuaacuuua

SEQ ID NO: 1193895 - RNA, 21 nt, Human
uucaguguuuucuuuaaugcc

SEQ ID NO: 1193896 - RNA, 18 nt, Human
aaacaaaaugcagugauc

SEQ ID NO: 1193897 - RNA, 22 nt, Human
aaacaaaaugcagugaucaaaa

SEQ ID NO: 1193898 - RNA, 21 nt, Human
aaccuacagacacaaaauagg

SEQ ID NO: 1193899 - RNA, 22 nt, Human
aaggacuucuguuauucaauca

SEQ ID NO: 1193900 - RNA, 24 nt, Human
aaucgcuugaacccgggaggcaga

SEQ ID NO: 1193901 - RNA, 19 nt, Human
aauggguuacguuacaggg

SEQ ID NO: 1193902 - RNA, 21 nt, Human
acagacacaaaauagguuaac

SEQ ID NO: 1193903 - RNA, 21 nt, Human
acagagagaagcucugucuua

SEQ ID NO: 1193904 - RNA, 24 nt, Human
acagagagaagcucugucuuaaaa

SEQ ID NO: 1193905 - RNA, 24 nt, Human
accagcauggugaaaccccaccuc

SEQ ID NO: 1193906 - RNA, 18 nt, Human
agagguugcagugagcug

SEQ ID NO: 1193907 - RNA, 22 nt, Human
agagguugcagugagcugaaau

SEQ ID NO: 1193908 - RNA, 24 nt, Human
agagguugcagugagcugaaauug

SEQ ID NO: 1193909 - RNA, 19 nt, Human
agcaaagagagaggcagag

SEQ ID NO: 1193910 - RNA, 24 nt, Human
agcacuuugggaggccaagguggg

SEQ ID NO: 1193911 - RNA, 18 nt, Human
agcauggugaaaccccac

SEQ ID NO: 1193912 - RNA, 20 nt, Human
agcauggugaaaccccaccu

SEQ ID NO: 1193913 - RNA, 21 nt, Human
agcauggugaaaccccaccuc

SEQ ID NO: 1193914 - RNA, 21 nt, Human
agccacggccucggccucggc

SEQ ID NO: 1193915 - RNA, 24 nt, Human
agccugggcaacagagagaagcuc

SEQ ID NO: 1193916 - RNA, 20 nt, Human
aggcagagguugcagugagc

SEQ ID NO: 1193917 - RNA, 24 nt, Human
aggcaggagaaucgcuugaacccg

SEQ ID NO: 1193918 - RNA, 20 nt, Human
aggccaagguggguggauca

SEQ ID NO: 1193919 - RNA, 20 nt, Human
aggcugaggcaggagaaucg

SEQ ID NO: 1193920 - RNA, 24 nt, Human
aggcugaggcaggagaaucgcuug

SEQ ID NO: 1193921 - RNA, 23 nt, Human
agguauguaugaccuuguuuauu

SEQ ID NO: 1193922 - RNA, 24 nt, Human
agguggguggaucaugaagucagg

SEQ ID NO: 1193923 - RNA, 24 nt, Human
aguggcucacaucuguaaucucag

SEQ ID NO: 1193924 - RNA, 23 nt, Human
aguuccuggcauucgaacagcuc

SEQ ID NO: 1193925 - RNA, 25 nt, Human
aucuccuaucaaaggacuucuguua

SEQ ID NO: 1193926 - RNA, 23 nt, Human
auggugucugccuguaaucccag

SEQ ID NO: 1193927 - RNA, 24 nt, Human
auugcacuccagccugggcaacag

SEQ ID NO: 1193928 - RNA, 24 nt, Human
auugugccauugcacuccagccug

SEQ ID NO: 1193929 - RNA, 24 nt, Human
auuuuugucaaaguuuaaacacug

SEQ ID NO: 1193930 - RNA, 23 nt, Human
caaaaacugacauauguauaucg

SEQ ID NO: 1193931 - RNA, 18 nt, Human
caaaaugauucuugcuaa

SEQ ID NO: 1193932 - RNA, 24 nt, Human
caaggguuuuuccugcugcaauuc

SEQ ID NO: 1193933 - RNA, 22 nt, Human
caagguggguggaucaugaagu

SEQ ID NO: 1193934 - RNA, 24 nt, Human
caagguggguggaucaugaaguca

SEQ ID NO: 1193935 - RNA, 20 nt, Human
caaguuucaaacaaaaugca

SEQ ID NO: 1193936 - RNA, 22 nt, Human
cacaaaaugauucuugcuaaua

SEQ ID NO: 1193937 - RNA, 24 nt, Human
cacaucuguaaucucagcacuuug

SEQ ID NO: 1193938 - RNA, 23 nt, Human
caccucuacuaaaaauacaaaaa

SEQ ID NO: 1193939 - RNA, 24 nt, Human
cagcacuuugggaggccaaggugg

SEQ ID NO: 1193940 - RNA, 20 nt, Human
cagcauggugaaaccccacc

SEQ ID NO: 1193941 - RNA, 22 nt, Human
cagccugggcaacagagagaag

SEQ ID NO: 1193942 - RNA, 24 nt, Human
cagcuacucaggaggcugaggcag

SEQ ID NO: 1193943 - RNA, 21 nt, Human
caucuccuccucgguaggguc

SEQ ID NO: 1193944 - RNA, 23 nt, Human
caucuguaaucucagcacuuugg

SEQ ID NO: 1193945 - RNA, 24 nt, Human
caucuguaaucucagcacuuuggg

SEQ ID NO: 1193946 - RNA, 18 nt, Human
cauggugaaaccccaccu

SEQ ID NO: 1193947 - RNA, 19 nt, Human
cauggugaaaccccaccuc

SEQ ID NO: 1193948 - RNA, 21 nt, Human
cauggugaaaccccaccucua

SEQ ID NO: 1193949 - RNA, 18 nt, Human
cauugcacuccagccugg

SEQ ID NO: 1193950 - RNA, 19 nt, Human
cauugcacuccagccuggg

SEQ ID NO: 1193951 - RNA, 21 nt, Human
cauugcacuccagccugggca

SEQ ID NO: 1193952 - RNA, 24 nt, Human
cauugcacuccagccugggcaaca

SEQ ID NO: 1193953 - RNA, 27 nt, Human
ccacggccucggccucggccacuaggc

SEQ ID NO: 1193954 - RNA, 22 nt, Human
ccacuaggcccucguccuccuc

SEQ ID NO: 1193955 - RNA, 20 nt, Human
ccauugcacuccagccuggg

SEQ ID NO: 1193956 - RNA, 21 nt, Human
ccauugcacuccagccugggc

SEQ ID NO: 1193957 - RNA, 23 nt, Human
ccauugcacuccagccugggcaa

SEQ ID NO: 1193958 - RNA, 24 nt, Human
ccauugcacuccagccugggcaac

SEQ ID NO: 1193959 - RNA, 19 nt, Human
cccagugucuauuauuccc

SEQ ID NO: 1193960 - RNA, 18 nt, Human
ccccacccuaccucccca

SEQ ID NO: 1193961 - RNA, 18 nt, Human
cccuaccuccccaguguc

SEQ ID NO: 1193962 - RNA, 27 nt, Human
ccuccgagcggccaucgcggaaagcuc

SEQ ID NO: 1193963 - RNA, 22 nt, Human
ccugaccagcauggugaaaccc

SEQ ID NO: 1193964 - RNA, 24 nt, Human
ccugaccagcauggugaaacccca

SEQ ID NO: 1193965 - RNA, 21 nt, Human
ccuguaaucccagcuacucag

SEQ ID NO: 1193966 - RNA, 22 nt, Human
cgcuccccacccuaccucccca

SEQ ID NO: 1193967 - RNA, 24 nt, Human
cggccacuaggcccucguccuccu

SEQ ID NO: 1193968 - RNA, 26 nt, Human
cggccucggccucggccacuaggccc

SEQ ID NO: 1193969 - RNA, 24 nt, Human
cgggaggcagagguugcagugagc

SEQ ID NO: 1193970 - RNA, 24 nt, Human
cucacaucuguaaucucagcacuu

SEQ ID NO: 1193971 - RNA, 21 nt, Human
cucagcaaagagagaggcaga

SEQ ID NO: 1193972 - RNA, 20 nt, Human
cuccccacccuaccucccca

SEQ ID NO: 1193973 - RNA, 22 nt, Human
cucuccguuucugccaucuccu

SEQ ID NO: 1193974 - RNA, 21 nt, Human
gaaaauucauuuuaggcagga

SEQ ID NO: 1193975 - RNA, 23 nt, Human
gaaauugugccauugcacuccag

SEQ ID NO: 1193976 - RNA, 21 nt, Human
gaauuugguuuuuuuuuuuuc

SEQ ID NO: 1193977 - RNA, 23 nt, Human
gacgcaguggcucacaucuguaa

SEQ ID NO: 1193978 - RNA, 23 nt, Human
gagaaucgcuugaacccgggagg

SEQ ID NO: 1193979 - RNA, 18 nt, Human
gauacuaaauguggcagg

SEQ ID NO: 1193980 - RNA, 22 nt, Human
gaucauaguuaauaccaauuua

SEQ ID NO: 1193981 - RNA, 24 nt, Human
gaucaugaagucaggaguuggaga

SEQ ID NO: 1193982 - RNA, 24 nt, Human
gauggugucugccuguaaucccag

SEQ ID NO: 1193983 - RNA, 22 nt, Human
gauuuggggguggggauacuaa

SEQ ID NO: 1193984 - RNA, 20 nt, Human
gcacuuugggaggccaaggu

SEQ ID NO: 1193985 - RNA, 19 nt, Human
gccaagguggguggaucau

SEQ ID NO: 1193986 - RNA, 22 nt, Human
gccauugcacuccagccugggc

SEQ ID NO: 1193987 - RNA, 24 nt, Human
gccauugcacuccagccugggcaa

SEQ ID NO: 1193988 - RNA, 20 nt, Human
gcggguccugcggaaguccu

SEQ ID NO: 1193989 - RNA, 21 nt, Human
ggaaguccuccgagcggccau

SEQ ID NO: 1193990 - RNA, 24 nt, Human
ggagaccauccugaccagcauggu

SEQ ID NO: 1193991 - RNA, 23 nt, Human
ggcgugauggugucugccuguaa

SEQ ID NO: 1193992 - RNA, 20 nt, Human
gggaacacaugggcagguuu

SEQ ID NO: 1193993 - RNA, 24 nt, Human
ggguggaucaugaagucaggaguu

SEQ ID NO: 1193994 - RNA, 21 nt, Human
gguggaucaugaagucaggag

SEQ ID NO: 1193995 - RNA, 19 nt, Human
gucacagaaaaauacugua

SEQ ID NO: 1193996 - RNA, 21 nt, Human
guggggauacuaaauguggca

SEQ ID NO: 1193997 - RNA, 24 nt, Human
guugcagugagcugaaauugugcc

SEQ ID NO: 1193998 - RNA, 22 nt, Human
uaauaguacaaauuuuguccca

SEQ ID NO: 1193999 - RNA, 19 nt, Human
uacaugaaacuacugaaag

SEQ ID NO: 1194000 - RNA, 24 nt, Human
ucaaacaaaaugcagugaucaaaa

SEQ ID NO: 1194001 - RNA, 22 nt, Human
ucaaaggacuucuguuauucaa

SEQ ID NO: 1194002 - RNA, 24 nt, Human
ucaugaagucaggaguuggagacc

SEQ ID NO: 1194003 - RNA, 19 nt, Human
ucaugcuuauagguuacuc

SEQ ID NO: 1194004 - RNA, 21 nt, Human
uccaaggguguaauucguuca

SEQ ID NO: 1194005 - RNA, 21 nt, Human
uccccagugucuauuauuccc

SEQ ID NO: 1194006 - RNA, 18 nt, Human
ucgcuugaacccgggagg
